United States Patent Application Publication US 2008/0168583 A1 - sequence listing, part 7

SEQ ID NO: 40919 - DNA, 326 bp, Gossypium hirsutum
  Clone ID: LIB3189-003-P1-K1-G4
cggacgcgtgggcggacgcgtggggtgtgtccacaatacgctccattagaacggatactcacattcaaacgtaatacttcttatccgcgtcatacccttgtatttcaaatgctttatcattagtatcttttatttctgacactctttattaatatctaattcacaaactttttaatataattaattaataacaatttatttttatttttaattttaaattttcttttttttttttttttttcttttatttaatttttttatttttattattgataattaattatttatgaatttaatttttaatattcaatttcttaatcttttta

SEQ ID NO: 40920 - DNA, 133 bp, Gossypium hirsutum
  Clone ID: LIB3189-003-P1-K1-G5
ctcttagatgagtacaaccatggcgaatcacaaaccgttccctaatttcttatctcttattcgcctctctctcgtcgccatcgcctctgctgaagttttcttcgaagaacgctttgatgatggatgggattgt

SEQ ID NO: 40921 - DNA, 411 bp, Gossypium hirsutum
  Clone ID: LIB3189-003-P1-K1-G6
ctgtactatgcttcatcctgggtatggtttcctttctgagaatgcggtttttgtagaaatgtgcagagatcacaggatcaactttattgggcctaaccctgacagtattcgtgttatgggtgacaaatcaactgcacgagaaacaatgaagaacgcgggtgttcctactgttccgggaagtgatggattgttacagagtacagaggaagcaatcaagcttgcccatgagattggctttcctgtgatgatcaaggccacagcaggtggtggaggacgtggaatgcgtctttctaaagagcctgatgagtttgtgaatgtactgcatcaagccaaaagtgaagcttcatcttcttttggatatgatggagtttatttggagaagtacatgctatatcctaggctcattgattt

SEQ ID NO: 40922 - DNA, 179 bp, Gossypium hirsutum
  unsure (1)..(179): unsure at all n locations; Clone ID: LIB3189-003-P1-K1-G7
cccacgcgtccgnaaaaaaaaaaaaaaaaaaaaaatataaaaaaaataataaaaaaataaaaaaaagagttatttaaaaattaaataaaaattattttttttggggtggcccttttaatatatccatgcttactttcgtaagaatccaaacttatttctcctctatagtgccacctaaa

SEQ ID NO: 40923 - DNA, 411 bp, Gossypium hirsutum
  unsure (1)..(411): unsure at all n locations; Clone ID: LIB3189-003-P1-K1-G8
cccacgcgtccgctgatatgtaaatgtattggttgtaaagtttgatgagtatttataaatacatttgattatatgcatgtcatatatatatatgtactctttgatatgaatgctatgagttcatatatttggttataaataagatgtttatgaataacaatattcaaatggtaatatatgtagtattcgcgatttcattaagtatacgtaggaaattatataaattattttatatttagttatgctgtaaacttacaaggctataaaaagttactttgtttgtttatgtctttctgttttatagatttaaagatcaagcttcaagcttgaggatcgtcagcaagatcatcactctatctactctctcggnattaaaatgttttaaattttaactatgacatgtttagacta

SEQ ID NO: 40924 - DNA, 109 bp, Gossypium hirsutum
  Clone ID: LIB3189-003-P1-K1-G9
ccacgcgtccggtttattgttatttctatcatatatgtgctgctatagtggtttctcaaaaaccgcgaacacagatgcggatcgcaagaggaagctatttttcgatctc

SEQ ID NO: 40925 - DNA, 373 bp, Gossypium hirsutum
  Clone ID: LIB3189-003-P1-K1-H1
gccgaaccctccatttctctctgcaaccagcggcacccaaagatgcaaatcttcgtcaaaaccctaacggggaagaccataaccctagaggttgagtcttccgacaccatcgacaatgtcaaagccaagatccaagacaaggaaggcatcccacccgaccaacagcgcctcatctttgccggcaagcagctcgaggacggccgcaccttagccgactacaacatccagaaggaatccaccctccatctcgtgctccgtcttaggggaggtgctaagaagagaaagaagaagacctacaccaagcccaagaagatcaagcacaagaagaagaaggtcaagctcgctgtgctacaagtctacaaggtggttgaat

SEQ ID NO: 40926 - DNA, 300 bp, Gossypium hirsutum
  Clone ID: LIB3189-003-P1-K1-H10
agataatatcatcaatgttttttagcgcttcatatttagaacactttttggtagaattcttttgggaaggtttcccataaattagttggcaatcaatgctgtggcgcatctatgcacatggactatattagaacgattgcattccgggccttagttatagcgccgcttagcacaaatgagctgtccttcacccaagcggccttggctatcgcaccgcttccgccgccgttctacctcacggtcacggcgagcaccataaggatgggtctatggattcgatcactgactagatccacggcc

SEQ ID NO: 40927 - DNA, 234 bp, Gossypium hirsutum
  Clone ID: LIB3189-003-P1-K1-H2
agcttaattcagctgaaaatggcaccttcatctctgccacaaacaccgccgtccgccgtggttattgtcctcttcttactcttcttcacggcattgctttgtgaatcaaggttaagcttatattactacttcaatacctgtcccagtttcaccaaaattatgcaagacaccataaccaacaagcaatatttccatccccacatccgtcgtcggtgctctccatttatttttcca

SEQ ID NO: 40928 - DNA, 393 bp, Gossypium hirsutum
  Clone ID: LIB3189-003-P1-K1-H3
aaaaacatccctaagaatcctttcatttcacccttttcctccatatcttcagtgtctcactctctccgtgcttcactccagtttctcctttccctcttcgaagaaaaaatgcgtgagatccttcatattcaaggtggccaatgcggcaaccaaatcggagccaagttctgggaagttgtttgtgctgagcatggcatagatgcaactgggcgttaccaaggagacttggatcttcaacttgagcgaatcaatgtctactacaatgaagccagttgtggtagattcgttcctcgtgctgttctcatggatcttgaacctggaaccatggacagcatcagatctggccctgtcggtcagatttttagaccagataacttcgtttttggtcaatct

SEQ ID NO: 40929 - DNA, 78 bp, Gossypium hirsutum
  Clone ID: LIB3189-003-P1-K1-H4
cgaacaaatttttttagcttttgataaatatcatcaatgttttttagtagctacatatatgaacaatatttgtagaat

SEQ ID NO: 40930 - DNA, 442 bp, Gossypium hirsutum
  Clone ID: LIB3189-003-P1-K1-H5
accagatcgaaaaatgtcgggaatcatgcacaagatcgaagaaacccttcacatgggagggcacaagaaggaagaagagaagcacaagggagaagctcatcacgaaggcggccatggctatggcgctgctgagcacaagggagaagttcatcacgaaggcggccatggctatggttatggcgccgctgagcacaagggagaagttcatcacgaaggcggccatggctatggcgccgctgcggccgccggtcacggtcacggtcacggcgagcagcaaaaggaagggtttatggataagatcaaggacaagatccacggcgagggaggtcatgaacatggtcacgagggcgaaaagaaaaagaagaaggagaagaagaagcatgaagatggccatgaaagcagcagcagcagcgacagtgattagatcttccatcatcggctt

SEQ ID NO: 40931 - DNA, 473 bp, Gossypium hirsutum
  Clone ID: LIB3189-003-P1-K1-H6
gttgcacttgagggaaagaaaaaaaaagaagaagaagcttgaatctatttttttgaagatggagggtaaagaagaagatgttaagctaggagcaaacaagttctcagagagacaacctattgggacatcagcccagacagacaaggactacaaggagccaccagcagcacccttctttgagcctggtgaactcaaatcatggtctttttacagagctggtattgccgagtttgtagccaccttcttgttcctttacatcaccgtcttgactgtcatgggtgtgtctcagtctaaaaccaaatgtgcaaccgttggtattcaaggcattgcttgggcttttggtggcatgatctttgcccttgtttactgtactgccggcattttatgtggtcatattaaccctgctgtgacctttggattgtttctagcaaggataactgcatttacaagggcattgttctatatgattatgc

SEQ ID NO: 40932 - DNA, 445 bp, Gossypium hirsutum
  Clone ID: LIB3189-003-P1-K1-H7
ggaatatggaagcttgatacagatgacgacatggcttccttctacttggtgcacatggagttggaatatggaagcaagatccatgtcatgagattattggccctgctttggtctcaccttataatgaaccaatgttcaactctgtcttttctttctgactaaacattaacatagcattctctgatctttaaattttcctaggcataataaaaatttgcggagccttttgtgaggattcccaaggtgacttggtaagtgttctatagtatgcatcttcttattaccgtggttgaatgtttgcaggcgttgctccatttcatttactgggatgccttgccagacatggaagagctcatgggttcaacttctaaatgggcttctacgcttgtagctcatcatctgcttgccgctgctgaccggtatgcgcttgagagaatgagattgc

SEQ ID NO: 40933 - DNA, 279 bp, Gossypium hirsutum
  Clone ID: LIB3189-003-P1-K1-H9
gatcaattaaaaagaaccgaaaaaaaatacacagatttagacagaagcatggccagccagctcgtaggaacaaagagagcttgtgtcgtgggtggcagcggattcgttgcctcattgctggtcaagttgttgctcgagaagggttacgccgtttacactacagtcagggtccctgacaaccagaagaagatctcttaccttgtaactctacaagagttgtgagactttgtgatctttcagtcggtttttactgttgtagggtgcttttgttgcccttat

SEQ ID NO: 40934 - DNA, 263 bp, Gossypium hirsutum
  Clone ID: LIB3189-004-P1-K1-A1
gatttccggttgaacacgccttccgaggcggccgttgcgaaccataaacttgggggctcttaattctttcaattttgggctctctttcagaactcaaaagtgttttccttaagggaggagatccaccaagattagggttcctgacccaccaaattttaaggggctttttggccaggcatcctttgttttggggaatcccaagcaaagtctgaaaagggcccttaaaatttcttttttaataaccattccaatttgttgttttt

SEQ ID NO: 40935 - DNA, 468 bp, Gossypium hirsutum
  Clone ID: LIB3189-004-P1-K1-A10
gttgaaaggaggattctatgttgatccagaagctaagcttttgttcattgttagaatccgcggtatcaatgccatgcacccaaggaccagaaagatcttgcagctcctacgtttgagacagattttcaatggtgtttttcttaaagtgaacaaggcaacaatgaacatgcttcaccttgttgaaccttatgtgacttatggatacccgaatctcaagagtgttagggaactcgtttacaaaagaggttttggaaagttgaacaagcagcgagttgccttgaccgacaacgcaattgttgagcaggcactaggcaagttcggcatcatttgtgttgaagatctcatccacgagataatgactgtgggacctcatttcaaggaagccaacaactttctttggccatttaagctcaaggcaccattgtgtggtctgaagaagaagaggaaccatttcgtctaaggtggaga

SEQ ID NO: 40936 - DNA, 433 bp, Gossypium hirsutum
  Clone ID: LIB3189-004-P1-K1-A11
gttggagcaagcgtctactgagaaaatagatggagggggtatagatggaattcagaccatggatgattctgctcaacccactgaaatgatggcagctcgtgaaatggaggtttcagatgctgattctgaaagcaaaagatcagtagccatggcagtagaagaatctcatttaccaaagtctgttgaacaaaatagttttgaaggtgaaatgcaagaggagcaccatcagaatgaaggtgctgaaattggaggctcagatactgacggagaggctgaaagcatgttctttgagaatgctgatgctgctgagcaattcttgaaggagctagaacgaggagctgccattggttctcactcgggtgctgatacttctcatgatcattcgcagacaattgatggtcagattgtcattgattccggttgaagaagggga

SEQ ID NO: 40937 - DNA, 334 bp, Gossypium hirsutum
  Clone ID: LIB3189-004-P1-K1-A12
aaaaatactgcattggtgggcataccatttttatccgtggaattgaaagaaattcgaattcgcaattctcgccggtggttaggggataaaatattttcaggaacaaacaaatcataatgattttagtctttattttcaggcattttttgatgtcttgcaatatatacatatagatgattgttatcaatatagttttttttttgggaattttttactaatagaatgttataaaactttttctaagatatttcttttaatattgttttgggggggatttattttttcatcattatttttgctgaaaaaatttttttatcaatattttttttttcca

SEQ ID NO: 40938 - DNA, 364 bp, Gossypium hirsutum
  Clone ID: LIB3189-004-P1-K1-A2
cctgcgaaaacaccaaggtcccatgtgtgataactggccccacaatccttagggttcgttctctcggcaaagtcattaatcgatttattggggaatgttggaatggtatgaatcttcgttatgttaaagaagcaaagcaccactgttcgcttcttcttcaacaaagacttttaccataacgacagttttcggctacggcgttttcagcccgtaatgatccattttccatgcaactccacgcttttcccggcgaccaacgccgttgctttcagtccatcgggaaattagacgcgctcggaaactacaatgccggcgtcggtgccgccttaaactgtaaagaaccctcttccggcttaaattttga

SEQ ID NO: 40939 - DNA, 219 bp, Gossypium hirsutum
  Clone ID: LIB3189-004-P1-K1-A3
aatgaaccttgcctttgttattttccttcacattctttaatatttttcccgagaaagtgacactcggatcacataaaaaaaattcattaaatgtggtggagatccgcttcttttattcctcgctgactgctagagccattctccagctatcccccatatcctgatttgcttttgctcttttttccacctgctttcttggccaatttctttcataaccct

SEQ ID NO: 40940 - DNA, 471 bp, Gossypium hirsutum
  Clone ID: LIB3189-004-P1-K1-A4
aatagcaatttaatttttttttaccatttcatatccaaacttcaaacaaaagggaattttcttgtcataattttctgaggaattcatcgatggcaaccaaagtgtatattgtatactattccatgtatggacatgtggaaaaactagcagaggagataaagaaaggggcggcatctgttgaaggtgttgaagcgaaactatggcaggtccctgagactctgtcagatgagattcttggaaagatgagtgcaccaccaaaaagtgatgtaccgatcattacaccacatgaccttcctgaggctgatgggtttatttttggcttcccaacaagatttggcatgatgtctgcccaattcaaagcatttatggatgcaactggtggtctatggagaactcagcaacttgctggaaaacctgctgggatattctatagcactggatctcaaggtggcggacaagaaactacaccgt

SEQ ID NO: 40941 - DNA, 455 bp, Gossypium hirsutum
  Clone ID: LIB3189-004-P1-K1-A5
caaaaattgatttttggttacccgctcattactcttcttctcatctcagtcgtgcgccctaaatccccaaagaaaagtttgtttttcttcagctgaaatcccccaaatttctcatttccagcaacaccagtcaatacacctacaccaatcacacttctttttccttttcatttcactgcactgaattcagtcaccatagctactccttttctttcgatctgttagggtttcttttaattttaggctttcaatagagtttccttttaattttactggtgatttctatggtgacagaaaccttagatgagaagaaatcggaggaagaggagttgaaagataaaggaaacgaagagggggagtaaggctgttcgctgaaataaagagataaaaaaaaggttgaagatggtacaagaagctcctaagctcagtggatcttacaaaggacctctttttca

SEQ ID NO: 40942 - DNA, 420 bp, Gossypium hirsutum
  Clone ID: LIB3189-004-P1-K1-A6
ggacccgtggcgccttcctgaaccatacatggttccgtatagatagtatccataccatggatgattcttctcaaccaagaccaacaatcttttcataaatccaaagaaatgctcccaaaaatagacaaaagtggccgcttttgcagtcccaaatacaagaatctgatttaccaaagtatggtgaacaaaatagttttgcaggtgtaatgcaagaggagcaccatcagaatgaaggtgctgaaattggaggctcagatactgacggagaggctgaaagcatgttctttgagaatgctgatgctgctgagcaattcttgaaggagctagaacgaggagctgccattggttctcactcgggtgctgatacttctcatgatcattcgcagacaattgatggtcagattgtcattgattctgatg

SEQ ID NO: 40943 - DNA, 454 bp, Gossypium hirsutum
  unsure (1)..(454): unsure at all n locations; Clone ID: LIB3189-004-P1-K1-A7
gcgaaaacaacaaggtctcatgtgtggtaactggcagaacaatcggggatggagaaacgcgaggggtagacagaggtcaaattttgcatatgaacgaccacctgtggagccgagacagttgaataccgtggattattgtggttgggccatttaaccatatgatgaatttggaggcaagttttgtaagtacaaagttattagcatatatatagagagtagtatataatgctttgtagattttagggctcaatattattttatttgttctgtgttggagtggatagtacaaaaaaattaggatcacagcagcttggcaaagggccctattgtgttctgtttatgtctacagttttgtagtntggttttttataaggtttctgtcgtaagttttgaatattatatttctagtcttcttgagagtgattgttgctttaatatattttatgagattttt

SEQ ID NO: 40944 - DNA, 286 bp, Gossypium hirsutum
  Clone ID: LIB3189-004-P1-K1-A8
cccacgcgtccgcccacgcgtccgttcaaagtagcatctcatcgaagtcctagcccgagacagaggcaactgtcaaagtctttgttttcacgaccacgctgttagcccagacatttgaataccatggattattgtgggtgggccatttaaccatatgattaatctggaggcatgttttgtaagtacaaagttattatcatatatatagagagtagtatataattctttggagattttagggctcaatattattttatttgttcttggttgaaatgtttatttcaaa

SEQ ID NO: 40945 - DNA, 464 bp, Gossypium hirsutum
  Clone ID: LIB3189-004-P1-K1-B11
gccggatatgcaagggaatttcttcaactcgatgaggatgtttctaaaagatgctgaagaggagattgctaagatcaaggcatatgaaagaaaagctttgttgcaagtaaaagaagttactgaatattttcatgggaatgcaacaaaggaagaagctcatcctttcagaatcttcatgattgtgaaagatttcctttcaatattggatcatgtctgtaaggaagtaggccaaatgcaggatagaacaatggtgggttccgccagatcctttcggatatctgcaactgcttcactaccagtccttagcaggtataatgtgggacaagacgcaagttcagatgacgaaagcttgtctccgtgaagctgcacgaatacgggtcctaagacttactcccacagttggacccttttccagctaaaccaacagttaggatgtctcatttaccatctcaagcatcatgtca

SEQ ID NO: 40946 - DNA, 400 bp, Gossypium hirsutum
  Clone ID: LIB3189-004-P1-K1-B12
cgcacgcgtggattaagatgactcataaaggatttctcttcaaggggcataaacagcagaggggagtccctcccaatctgccatggaaaaattcctcacattcgcaaaggtaagagagtgttcaaaccatcgaatatgacataagagatggtcgctgatcaattgtttgaccaacttcatatttcactgcaatttgatataagctttctccgtcgctaacatggatggaggccatctaaatattgtgattccacccccattatctctcagttattgtaaggaatagttttgttgctgtgtcttatatggctcctttttctaacgcaatatccttcatcattttttttaagagatttttttccccaaatttttctacctaatctctatgttataatttctt

SEQ ID NO: 40947 - DNA, 357 bp, Gossypium hirsutum
  Clone ID: LIB3189-004-P1-K1-B2
gccgaattcccgttcgaccacgcgtcctcgtactcgtgggcggacgcgtggtctgacgcgtggtcggagctcgtagcatgcaccatagcaacagtgatcctcaatggtgcatgataacaaaccatacccagcacagctaaccacatctgtcattatatctatgctttatttagtgacaagggcggttagtgaaatcaagcacgataacacatgtacttatccaaacctgccaccaccaacatcctctaatatcggatgctgatttgacacattgtcacaaacaccttcagcttgtttcttaccacccttctaaacagaatcatacttttgacctacagggaactttctatattacta

SEQ ID NO: 40948 - DNA, 455 bp, Gossypium hirsutum
  Clone ID: LIB3189-004-P1-K1-B4
ctttttcctttcgacagttaagtgaaaagatgccgtactactcgaggggtggcgaagatgacgttgacgagttcgacgaatttgatccgacgccttacggtggtggatacaatcttgacctaacttacggtcgtcctttggaaccctccgatgagacttgctacccttccgctacaccctccgatggcgactttgattatgcacgtcccgatttctcttccggttacgcgcacttagcttatgccgacgaagctcttgaaactgaatacagtagctatcttaaacccaagccccgacctggacgattcgaacctgcacctgcttttggtgctggatctggtgactatggaaggaaacctgtatatgagcaattcgaatctggtcatggacgcaagccggattttggacgacccggatccgtaattgaatctgattatggccgaagacctgaattc

SEQ ID NO: 40949 - DNA, 177 bp, Gossypium hirsutum
  Clone ID: LIB3189-004-P1-K1-B6
gcgagccatggtagtgttggaggctactgcggcgctgagcgaatggggctagggttagggccagtgtatttgggccgtgtaattggattttggaactggacccgtactattgattggttcttatgtatatttgttgggaaatttttttgagattattttttttcttttttatttttc

SEQ ID NO: 40950 - DNA, 253 bp, Gossypium hirsutum
  Clone ID: LIB3189-004-P1-K1-B8
agttctagatcgcgagcggccgctcgcagatcggacccgtggtctccggtatccttcttggatctggggtccacagattcttcaagcaacggaaacccccatggaggaagacgtggcctgcgtgtgggcgcacattaaagcctatgcacgccggggacgccgagtaggagccagatctagctcgctacctgtactacacaatcctatataactcctttctttagcgctccctcgacttccacctttgctacaa

SEQ ID NO: 40951 - DNA, 53 bp, Gossypium hirsutum
  Clone ID: LIB3189-004-P1-K1-B9
gcgttcggttataaatagtatgcaaacaaactcaatcagtattttttactttg

SEQ ID NO: 40952 - DNA, 363 bp, Gossypium hirsutum
  Clone ID: LIB3189-004-P1-K1-C1
cggacgcgtggggcaaaaccaggaaagggaaaaatggacgcaattgattcagttttcgatccgctaagagagttcgctaaggatagtgttcgtcttgtcaagagatgccacaagcccgatcgaaaagaatttacgaaggtggcgtttcgtacagcgatcggattcgtggttatgggattcgtagggtttttcgtcaagctcatctttatccccattaacaacattattgttggatctggttaggaagcatgagaatcagttccaagtttcagactgtaggcaaaagatagaagttagtacttgttgcaattgactgagaggtacattatctgatttcatgatctaattcaaactttttcatgg

SEQ ID NO: 40953 - DNA, 201 bp, Gossypium hirsutum
  Clone ID: LIB3189-004-P1-K1-C10
cccacgcgtccgcccacgcgtccggtttacgagtctactgagctgaatggcaagaacgtcggggggtatacgacttcttgcccaacctaatttcgcttccacatcttctcggacatcatttatcagaaagccatttttattggaacagtttgttgagcataacatttgactctgttttatgctttgctttcctttaccacc

SEQ ID NO: 40954 - DNA, 183 bp, Gossypium hirsutum
  Clone ID: LIB3189-004-P1-K1-C11
gcaaggagagctaggcttccccatcaagctcacacaacctctcaagggtgggtcgctaatgcatatagtggaggatgcgagtgggctgagtttggatgcagctactgttccttcacgtatggttcttgcaaaatgtatctacatacactatggtttgaggttttatgctgttgaattttataa

SEQ ID NO: 40955 - DNA, 448 bp, Gossypium hirsutum
  Clone ID: LIB3189-004-P1-K1-C12
gtttttaatgcaaggtaaagctggtcaccatacaccagttttcgagaagtaccgtcagaaggcggagtacttcatgtgttcattgatcggaaagggtagccgtaatattcagaagactcccggtggtttgatttacagacagagatggaacaacatgcagttcgtgacaagcgctttgttcttggcaaccgtttactctgattatctaacttcctataggggaagcttgaagtgtgctgctgtcaatgttgcaccatttgagcttctttcttttgcgaaatctcatgtggattaccttctcggagacaatttaagagctacaagctatatggttggcttctgtaacaattatcctttacaagtttatcaccgaggttcttcgttagtctcgatctttgtcaaccctaatttttttgccagccgacttggtttcgcaactttgtttaca

SEQ ID NO: 40956 - DNA, 268 bp, Gossypium hirsutum
  Clone ID: LIB3189-004-P1-K1-C2
gccggccctgcttcttcttcttccggtgttagagccgctatccgtagaccttcagattcaggttctggacttgatggttaccaatctttatcttcaagaaccaatgctgagctcaaaaagaagaacaaatctaaagataaattcgaattcgatgaaaacaatgcacagatctttacgctaaaacctgatttgggtcaactgaatacaaggctttcatacagagaggattgcaaaccttggatgggtggcttcatgggtcaaccttatt

SEQ ID NO: 40957 - DNA, 78 bp, Gossypium hirsutum
  Clone ID: LIB3189-004-P1-K1-C3
tcccacgcgttcgcacgggttgtggcgtagtaaaagcatagatggtgcgcaggataatgctactcacggtggtttcaa

SEQ ID NO: 40958 - DNA, 461 bp, Gossypium hirsutum
  Clone ID: LIB3189-004-P1-K1-C4
gttcattttgtctttgcgccggtcttctatctcctcgactcacttcccagccaaaggtaagccatggttaagcataacaatgttattccaaatgggcactttaagaagcactggcagaactacgtgaaaacttggttcaaccagccagcaaggaaggctagaagaagaattgcaaggcaaaagaaagcagtaaggatctttccaagacctactgctgggcctcttcgccctgttgttcatggccagaccttgaagtacaacatgaagttgagagctggcaacggtttcactcttggagagcttaaggcagctggtatttcaaagaaacttgcacccaccataggtattgctgttgatcaccgccgtaaaaatcgatatcttgaaggtcttcaagccaatgttcagagacttaagacctacaaggccaaacttgttgttttaccaagatgtgctcgcaaatt

SEQ ID NO: 40959 - DNA, 172 bp, Gossypium hirsutum
  Clone ID: LIB3189-004-P1-K1-C5
ccacgcgtccggtgattacaatctaattcaatttattttaagtgtctacaaaaaaaaaaaaaagggagaataaataaaaaaaaaaagtaaaaaaaaaaaaaaaaaaaaaaaaaaaaaaattaaaaaaaaaaaaaatagggagaattttttttagtgaaaaaaatttaaataa

SEQ ID NO: 40960 - DNA, 429 bp, Gossypium hirsutum
  Clone ID: LIB3189-004-P1-K1-C6
aaacaatatcaatataacaataatatatatatttcattcgaattcaaagtggattcttattttctatattctgtattctttttagattcaattagattcaagggctaagcactgaatcaaaaaaaaacagagaatagattcatgggcccctactttataatataatgaaaggcatgcttgatagaaagattagatcacataaagtcaacgaatgaggtgggttcattaacaactcacagatgaaaaaatggcaaaaaagaaagcattcactccccttctatatcttgcatctatagtatttttgccctggtggatctctctctcatttaataaaagtctgaaatcttggattactaattggtgggatactaggcaatccgaaacttttttgaatgatattcaagaaaagagtattctagaacaattcat

SEQ ID NO: 40961 - DNA, 315 bp, Gossypium hirsutum
  Clone ID: LIB3189-004-P1-K1-C8
gcgaaagcttatctcttttcgtctctgaatctgatcaatcaacacctgaaaaggaaaacttacgaacaacaactactactagtctactacccagcactagaagcagctcgtagccagccatggatgaagagtacgatgtcatagttctaggaactggtctcaaggaatgcatcctcagcggtcttctttctgttgacggactcaaggttctgcatatggataggaatgattactatggaggagagtctacatcactcaacctcattcagctctggaagaagtttagaggaaatgataagcctcctgctcaattgg

SEQ ID NO: 40962 - DNA, 406 bp, Gossypium hirsutum
  Clone ID: LIB3189-004-P1-K1-D1
gaccagaacacagatcgctctcgcgctttccctcaatcaatcatttttcttaccatgaagattatagattttttcctgatctcatcacttctcttctcaatctctagggctgaatctattgcatcagttttcttcatcgacagttctactcatcaattccttcgcgctccatcctctaacgatgtctctcagtcagagccaatgttgttacctgaagttggtgcgactgcatcagtcttgcttggttttccaccacccattacactttcagctgctggctcatctaagctgaatgaggttctcatttctaatccgtttgatagacctcgtgctgtttttatgcttgaagttagtggagttgatgatcctcttggtgttggacccaagaatgctctctttcacaaag

SEQ ID NO: 40963 - DNA, 419 bp, Gossypium hirsutum
  Clone ID: LIB3189-004-P1-K1-D10
ggcttctcttcctttcatcttcttcttatctttctttataatctccacaacattgacgtcagccggcgccgccgccgtcaccatcaaactctccctctctcccttccctcacccttcttcctcccatccttaccaaattctcaacaacttagtcacttcttctgttgcaagagcccaccacctcaaacaccccatagccaaggccgatattactacctcttctcttctcagggcttccctatttcctcacagttatgggggctacactatctccctcaaatttggaactccgcctcaaacccttcctttcattatggacactggtagcagcctctcctgtttcccttgcaccttttgttacctttgttcccaatgcgcatttctcaatgttgaccctgcttaaatccccacttttgccc

SEQ ID NO: 40964 - DNA, 308 bp, Gossypium hirsutum
  Clone ID: LIB3189-004-P1-K1-D11
cccacgcgtccggatctactcaagtagtgaggttgcttatcaaccctgatgacactcagaagatgttgactggttgcaaggcaagagggattaagttatgtggagcattaggagctgccgggctgatttctgcacacagttctaaaagccgttcagatcatcaaaagaagaaatatggcgttgtaacactcacagattgccgctcaattcttgaacctccgctctccaatcaccatttcggttttttctactctattattttgtacacgctcgccatcaaaggagtattgaagctttttttgcttgct

SEQ ID NO: 40965 - DNA, 471 bp, Gossypium hirsutum
  Clone ID: LIB3189-004-P1-K1-D12
ccagtggaaatatcttatgatggagttcaaacatcaaacatcgacactctcattgatctttcttcttatgatgcctggttttgccctttctgatgtcaatcaagacaaagcagaatgttctaatcagctagtcgggcttgctccatgtctcccatacgtaggcggagaggcaaaaacacccaccatagattgttgcagtgggctcaaacaggtgctggataagagcaagaaatgcctgtgtgtgttgattaaagataaagacgacccgagcctcggcctcaagatcaacggtactcttgcgggaactcttcctagtacttgtcgagccagtgctagcatgacagaatgtatctccctgctgcacttggcacccaattcccaggaagcaaagttatttgaaggatatcaaaagctgatagaggggcatggcagtactcttgctgccaccgggaactccactagcagaccatc

SEQ ID NO: 40966 - DNA, 444 bp, Gossypium hirsutum
  Clone ID: LIB3189-004-P1-K1-D2
atttaagtaacaaaaatggtgttcgaggtgatgaaagtgccaacgacgccgtttgatggccagaagccaggcacttctggacttcgtaagaaggtgaaagtttttgttcagcctcattatttgcagaatttcgtacaagcaacattcaatgcccttacacccgagaaagttaagggtgccacacttgtcgtttctggtgatggtcgttatttctcaaaggatgctgttcagataataatcaagatgtcagctgcaaatggagtaaggcgtgtatgggttggtcaaaacggattactttctactccagctgtatcagctctaatacgcgaaagggttggtgcagatggatccaaagcaactggtgcttttattttgacagccagtcacaatcccggtggccctaatgaggattttggaattaaatacaacatgggaaatggggga

SEQ ID NO: 40967 - DNA, 151 bp, Gossypium hirsutum
  unsure (1)..(151): unsure at all n locations; Clone ID: LIB3189-004-P1-K1-D4
atgnntnntnttaaaanntttatttttttaggggagattttttataaaaaaaattttatttttataatattttttttttaataaaatatttttcttagtatttttttaaaaaaaatttttttttatatatttttttttaaaaaattatttt

SEQ ID NO: 40968 - DNA, 457 bp, Gossypium hirsutum
  Clone ID: LIB3189-004-P1-K1-D6
atctctccttgacgttgccagataacgtcttcaaggaagcaaaaaatcttaaagtcttagatttgactggcgtgcatttttcttctttaccttcatcaattggtctcctaactagcctcagtacattgtgcctagatcactgcaagttgggagataacctaaccattattggagtgctcaagaacttaaatgtgcttagccttttgcaatctgatatcaaaattgtacccaaggaaattgggcacttgttgaagctaaagttgttagatgtaagtggttgtactaaactcgaaaaaatttcagctgacgtgttgccacgtttgtcaaaattagaagaattatatatgggtggcacttctattcaatggggacaacccaatgctagtcttgctgaactgaacacactgtctcatttgtccactttagaagttcaaattccggacgccaagtctgcccc

SEQ ID NO: 40969 - DNA, 311 bp, Gossypium hirsutum
  Clone ID: LIB3189-004-P1-K1-D8
gcctttttcttttgcctttttgtcatttcccttaattaattgtctcttatggagtcgttctcttttttgttgataatttcaattttctatcttctcttcaaaatatggaattggatcaataacgtgagagaccaacaatgttacattttggattaccaatgctacaagcccagtgatgataggatggtggggactgagttctgcggggaagtgataaagaggaacaagaatctcggactcaacgtgtacaagttcttgctgaaagcctttgtcagatcatgcattctagaactaacctactccccgaggat

SEQ ID NO: 40970 - DNA, 372 bp, Gossypium hirsutum
  Clone ID: LIB3189-004-P1-K1-E1
atcgggatagatgcccacagtgcaaagggaacaaggttactcaggaaaagaaggtgctggaagtacatattgagaaaggaatgagagatggtcagaaaattacatttgagggacaagctgatgaggctccagatacaataactggagacattgtttttgtattggaacaaaagaaacaccccaaatttgataggagatttggggacgaactttatgttgaccacaaactcagtttgacagaggctctatgtggttttcagtttgccctaactcaccttgatggcaggcagctcttaattaaatcaaaccctggcgaggtcgttaagcctggtcaatacaaggctatcaatgatgagggtatgccccaccatc

SEQ ID NO: 40971 - DNA, 472 bp, Gossypium hirsutum
  Clone ID: LIB3189-004-P1-K1-E11
ataaccttaaaatttttcaagtttctttaacatagcagcttaaaaaaccgaaaaaagaaaagtaactagaagaaggtattctggaatttgggtttttaatgggttttaagaaaagaagcactaaatctgaggaagaagttcttgagggtcaaactgatttagctgcggataatacggtttcagctccttccagtaagaaaattaagatggatggcaaaaaagatgcagacatgggagatggggttgcttcctcttcttctgttgcaaattccgttaaaccattggagagaataatgaagagaaaacatgttgactaggtgaggctgctttcgttttttgaaaatgaggtatcttagctgaaacatctgatttttgaaccttaaggaatagatgcctcagagcctgtggcagcttagtcttgtattatgttgccttggtttcatatcattgttttttaggactttggctttcg

SEQ ID NO: 40972 - DNA, 323 bp, Gossypium hirsutum
  Clone ID: LIB3189-004-P1-K1-E12
gcagccaccaatgccattaaggaatggggccagcccaagtccaagatcacccaccttgtctttggcaccactagtggtgtggacatgcctggggctgactaccagctcaccaagcttttgggcctccgcccgtccgttaagcgcctcatgatgtaccaacaaggttgcttcgcaggggggacggtgctccgagtggctaatgacttagctgagaacaacaaaggtgctcgtgtacttgttgtgtgctcggagattaccgctgttaccttccgtggacctagtgacactcacctatacagtcttgtaggccaagcattgtttgg

SEQ ID NO: 40973 - DNA, 392 bp, Gossypium hirsutum
  Clone ID: LIB3189-004-P1-K1-E2
gcgtggccttgcttgtgagaaagagatatctgctgcctttgagaagtcccttaaatgcacattttcaacccttgaggagtacctcgatttgttcctcacccgagtagatggcttgagacgtagaatttcatcagctagtggagatggtgtgttgaactattcaatgattagggaatcttttcagcaagcagcggattacttatcaccacacatgaagaacactgatggtttactgcatttgcatgcctattgggcccgtttagagctgaaattgggcaacgatttaattgcagctcgtggtgtttgggagagcttgcttaaaacttgtggttcaatgttggaagcatggaaaagttatatagcaatggaaattgaattagatcatataaatg

SEQ ID NO: 40974 - DNA, 340 bp, Gossypium hirsutum
  Clone ID: LIB3189-004-P1-K1-E4
cccacgcgtccgttaaaaaaaaaaaaaaaaaaaaaaaaaaaaaaaaaaaaaatataaaaaaaaaagtgggaaaaaaaaaaaaaaaataaaaaaaaaaaaataaaaaaaaaaaataaataaaataattaatttatgaaaaaaaatttgttaaaaatagtgagtggcgacaaaaaataatatttagtgttttttgttgtgaaattgttgtggcatgtttttttcttgggggtgttttttttaataaccttgtttgtgggatttgtttttttcctatgttttgtgtgatcctgttgttttgcctgtattttttttgctactttgttttttttccattttttgg

SEQ ID NO: 40975 - DNA, 401 bp, Gossypium hirsutum
  Clone ID: LIB3189-004-P1-K1-E5
cggacgcgtgggggtgtacctagcactgcaattagagaaatctctctcttgaaggaaatgcaacatcgtaatatcgtcaggttgcaggatgtagtgcacagtgagaagcgtttatatttggtatttgaatatctggacttggatttaaagaagcacatggattcatatccagaatttgggaaagatccacgaatgataaaagcattcctttatcaaattctccgtggcgttgcttattgtcattctcatagggttcttcatcgagatctaaaacctcaaaatttgctgatagatcgccgtaccaatgcactaaagcttgctgattttggtctggcccgagcatttggtattcctgtcagatcatttacacatgtggttgtttactttgtgggacagagcac

SEQ ID NO: 40976 - DNA, 360 bp, Gossypium hirsutum
  Clone ID: LIB3189-004-P1-K1-E6
gttcaatagagactgctttgacttatgttatgaatcagtataggttgacctcttctactttcttcgaccctgctcttcaatagagtcttgaggctaagtcagctctcttcttctttttctttctctgacattctgagagaaagattgatccacctggaaacccctcttggcctacttaacctactcttcatttaggcaataatagcagactttgctattacatcctccgattcggcaaaataaacttctctcgtggtcaagcatccggctttccttcctacaagcatataaacctcgagcttcaaacacttccatttgtgaccatccaactctccaatgagcctgcactctcaaaatcat

SEQ ID NO: 40977 - DNA, 145 bp, Gossypium hirsutum
  Clone ID: LIB3189-004-P1-K1-E8
aaaaaatgaagtctcagatctgtttagcctttggaactctggccttgctgttagcttcaggtggggccgatgacgtcgtagcactgacctatgcgtacttcgattaggtagttgatcatgatcggtgagccttgattgtgttcta

SEQ ID NO: 40978 - DNA, 411 bp, Gossypium hirsutum
  Clone ID: LIB3189-004-P1-K1-E9
cccacgcgtccgcaatggcttacttaacccatttcatccttttattactcataaatttagctggggcccaacaaatctcaaacacgtgaatcatcatcatcaacaacaaccaacccaacaacaacagaagattgttacaaccgttggatctacatcagaaacctcccatcaaggttcaatcttgatcttctgacaaactgtatcaaatacccaattgttgataatttttgtccgtacttagctaatcatggtttaggacaaaataacccataccaaatttcgtaattggtatataactgatcctttattacttgaacttatcttccatagacgaatccaggaattaccctttgtctacaaatgatcctaatgatttccaatgctatgtttttttcttattattttgctata

SEQ ID NO: 40979 - DNA, 449 bp, Gossypium hirsutum
  Clone ID: LIB3189-004-P1-K1-F1
ccggtcgaccacacgcgtccgccattttcttttcagcattgcgtttcttgcttctcacttgttgctttcaagaatggccattgctatgttgcaacaaacagttggaggaactcttcagcttctcagcaattctggaactcactgcaatgtcgggaaccgtcggtacggttgcttcccaaagggtttaagttggaagttgagttcccaaagagagcgattatagttcggaaagaggaaattaaacgttattaagcgtaacatctaaacctttgttgtggtcctctttagcttcctcaagtgtgacacccttgatttcacatgtaaccaattaggtagctttgattctgtttcgccatgtttaatccttatggtttgtgaaagaaccttttttcaggttgtgtttattttccaattatttttttatagatttttttgtggtattttttttt

SEQ ID NO: 40980 - DNA, 303 bp, Gossypium hirsutum
  Clone ID: LIB3189-004-P1-K1-F10
gtcttgatacacgcccccatttattttatttttcaaacaaattttcccttcaattttcgtatgggttcctaggaaaagaaatatgagagagtgcatttcagttcacatcggtcaggccggtattcaggtcggaaatgcttgctgggaactttactgtctcgagcatggcattcagcctgatggccaaatgccaagtgataagactgttggtggaggagacgatgcttttaacaccttttttagcgtaactgtttccgggaagctcgttcgtagcaccatttttcgtgatctttttccttactg

SEQ ID NO: 40981 - DNA, 474 bp, Gossypium hirsutum
  Clone ID: LIB3189-004-P1-K1-F11
ctttgttttagttgccataacgtcaccttccaatacaacccacaatgaggcaacaatatgtcttcactactctcacgttgctcatcctgttttccctcagttgttcaacaacattagcccaagctccggcactggctccagcaccttctggtccgacaaacgtcaccaagatcctcgaaaaagccggtcaattcaccctcttcattcgtcttctaaagtccactcaagtggccaaccagctgctcggtcagctcaacaattccaacaatggtatgaccgtttttgcaccaacggacaatgctttctccagccttaaatcgggcacattgaattcactcaccgatgaacaaaaagtggagctggtgcaattccacatcgtcccaacatacctcacctcgtctcagttccaaaccattagcaatcctttgagaacccaagctggtgatagtggcgatggcaagttccctctcaata

SEQ ID NO: 40982 - DNA, 459 bp, Gossypium hirsutum
  unsure (1)..(459): unsure at all n locations; Clone ID: LIB3189-004-P1-K1-F2
accaaaaagacggtggagatcaacccaaagcaaggatcagcattgaccgcaatcctgctcctattttggtacacccacctaggtcgtcttgttctttcccggctcctccaccaatggctacggcagctaagggaggtggcggctgtgggcctatggctaaagggtatgagtcgtttgttctcacgcgctgtaagtcggagccgaggaggtcatcgactaagcttgcacccgatgcttgcttttggaagaataggaagctcgagccggctgcacttgaagttggcgcggctggagttggtttttaagccaggttcgctagaaagcagntaaaagtaaaagaaaagaaaagaaaagaaagatatttgtgggaaaaccttgaagttttttatgagtaaaaaaatcaggaaatggtggaagttttagtccttttgaatagtgaaaaaaaaaaactttgggggt

SEQ ID NO: 40983 - DNA, 471 bp, Gossypium hirsutum
  Clone ID: LIB3189-004-P1-K1-F4
gttaaaatgctttcagagaaacagttgagagaaactgaggaattaaaggcgaaggctcaggtttgtcatgcacaaccagatgacctcattgacttctaccatttaaaaagtcgcaagggaatgagtcagcttgaattggaggatgaggtccaagatgatttgaaacgtgcaactggagagtttgtcaaggatgcagatgatgcaaataagcttaatcgcattcttcaactgactggatttagtgacccagtatatgctgaagcatatgtgactgtccatcactatgatattgttcttgatgtcactgttattaatcgaaccaaggaaactcttcagaatttgtgcttggagttggcaaccatgggtgatctgaaacttgttgagcgtccacaaaactataccctcgctcctgaatctagcaagcaaataaaggctaacatcaaggtgtcttcaactgagactggtgtcata

SEQ ID NO: 40984 - DNA, 77 bp, Gossypium hirsutum
  Clone ID: LIB3189-004-P1-K1-F5
gcggacctggccatgttagactgagaagaagctaaaataaagaagaaactgtgttgcatggcagcagagagcgtaaa

SEQ ID NO: 40985 - DNA, 393 bp, Gossypium hirsutum
  Clone ID: LIB3189-004-P1-K1-F6
gttatcttcaacaatttatcttctttattctggttgctctgccattcatgtttatttctccaactcattcctctttagctaatggtaatgttaatatattgcctcctaccaatacaagcgataaggtcactttggctctgtactatgaaactttatgcccatattgtgccgactttatcacaaatgaccttgtaaaggtcttcctcagtgatctgtataccattgtcaatctaaaattagtcccttggggcaatgctgacattcttggcgatgaaccccattgccagcatggagaagatgaatgctacttaaatactatacatagctgtgtcattctactactggcctgatgtgttaaatgctctttgattttattctgctgctcggagcaac

SEQ ID NO: 40986 - DNA, 311 bp, Gossypium hirsutum
  Clone ID: LIB3189-004-P1-K1-F9
tgttactaaaagagttgtcttgttatctttactttgttttaatgtgtttttagtgaatgcgattgttaaaaatgtggtgaatatgaaagcggaggaagagaagaaattaatatagggaaatggctttggagcttgggacaagggtaggttctatggtgggcatggtgtagctagagatggtattggtggaactggaaatggagttggttttggtggaactataccttcatccaaacctgtatcaagagcagtcacgccaactcgtcgtccatcaagtgctgttaatgtattccgctcctacaatcatatca

SEQ ID NO: 40987 - DNA, 270 bp, Gossypium hirsutum
  Clone ID: LIB3189-004-P1-K1-G1
cttatcttattctcccaattttctttcgtttaaaccctaaccctaatttccgccttcatgtagtaacatagaattcctcacgaaaaataaagaaaaatgattcctttagttccttccatatttcttcacgtcattttcatcttcttcgcgcttgtcaacggcgagcaggagactatttacgatatcctaaaggcccatgggctacccacggggctgcttccgaaggggatatcccgatttgtgttcgacgaaaccggccgtttcgaggtt

SEQ ID NO: 40988 - DNA, 453 bp, Gossypium hirsutum
  Clone ID: LIB3189-004-P1-K1-G11
tttttctttgctgttttaagaaaaacattgcgaatagggagaagggtgagagagataaaaggggaacaaaagaactgcaaaaaaattgaacttttttttcctaaaaaacctcaattagaagagcgattatcgcttcatcttccccgaaacgacttcgtcagcttgcagatttttttcaggttgcttttgttgccatggctgctgctgcgactgcctctggtggtccacgatatgctccgcctgaccctactcttcccgaaccatggaaaggcctggttgatggaaaaactggttatctctacttttggaatccggtaacaaatgtcacgcaatatgagaggcctagagggatagattctgtcccaaaatcttcttcagtgcctatgggttcttcaattctggttcaacaatcttctgaagggcgttataagtataagtttgagaaggaaaatg

SEQ ID NO: 40989 - DNA, 295 bp, Gossypium hirsutum
  Clone ID: LIB3189-004-P1-K1-G12
ctagttctagatcgcgagcggccagcgattgaaggagaggaaaaatattgtgcaacctcactggagtcaatgattgactatagcatttccaaactagggaaagttgatcaggcagtctcaacagaagtggaaaaacaaaccccaatgcaaaagtatacaatagcagctggagtgcagaagatgacagatgacaaagctgtagtgtgccacatgcagaattatgcatatgctgtcttctattgccataaatcagaaacaacaagggcttacatggttcctttagagggtgctgtcg

SEQ ID NO: 40990 - DNA, 344 bp, Gossypium hirsutum
  Clone ID: LIB3189-004-P1-K1-G2
agaagagcaaagattttgtcaagttcaaggcccgctgctccaagtacttgtacacactttgcgtgtcggatgctgagaaggctgacaagttgaagcagtcccttcctcgaggagcaaaacgtctagttcctgtgggtcttggagatgatgatcaatgcattgaagatgactttactgcctgacgtgaatcagtgtggcccgagttagatcagcttctgcgtgatgacgatgatgcaacaactgtttctaccccatacactgctgctgttttggaataccgtgttgtattttatgatcctgcaaatgcacctgtcaaggataagaactggaacaatgcaaatggc

SEQ ID NO: 40991 - DNA, 171 bp, Gossypium hirsutum
  Clone ID: LIB3189-004-P1-K1-G4
tacctggattccacatagctactgtgtacgatccagcgaaacctctattatatgaacagcctttgtggattcatcagagaaagaagacccgggcgagcgtgtctcttgttccactctgtgatacgacttgcaaggagcgggataagtgggtgctctcgggcgaaaatgaaa

SEQ ID NO: 40992 - DNA, 434 bp, Gossypium hirsutum
  Clone ID: LIB3189-004-P1-K1-G5
gtgatggcttcaaagcggatattgaaggagctcaaggatctccagaaagatcctcctacctcttgcagcgctggccctgttgctgaagacatgtttcattggcaagcaactattatgggtcctccagatagcccgtatgccggtggggtgtttctagtcaccattcatttccctccggattatccatttaaaccacccaaggttgcattcaggacaaaggtatttcaccctaatattaacagcaacggtagcatttgccttgatattttaaaggaacagtggagccctgccctcaccatatccaaggagtagctgtcaatctgctcactcctgacggatccaaatcctgatgaccctttggtgccggagattgcccacatgtacaaaacggataggaacaagtatgagacaaccgctcggagcttgacccaaaa

SEQ ID NO: 40993 - DNA, 321 bp, Gossypium hirsutum
  Clone ID: LIB3189-004-P1-K1-G9
cccacgcgtccgcggacgcgtgggtgaatcagtgcgtcttgatagttttgacatggacaggagggtatctctggtaccaccagatggtgaatttcctgtcatgaactaccgaatgacgcaagaattttagcctcctttccgtattaatagattaattgaagaagctggacagcttaaagctgtattgattattaaagttctctgcggagttccctttaaacattactgtcaacacaattgctgtacaaattccacttgctaaattttctacttatacttgtttttaattgtaatcccatgctttttttcaaagatctgttt

SEQ ID NO: 40994 - DNA, 110 bp, Gossypium hirsutum
  unsure (1)..(110): unsure at all n locations; Clone ID: LIB3189-004-P1-K1-H1
gcgtccgcccacgcgtccgcccacgcgtccgcccacgcgtccgcccacgcgtccgccccccccctttttttggggtgnaagnnnnngggggggggggtttttttattgtt

SEQ ID NO: 40995 - DNA, 306 bp, Gossypium hirsutum
  Clone ID: LIB3189-004-P1-K1-H10
gtttggttcatttttttattaccgaatcattatttcatgtaagcctctattatgggtgagcactgaataaccattctgtaaatagggctctgaattggctattctttgttgtccgtaatagccttctacttttgaagataaaagtctcttttcatctaccttcttcattttctctagatgcgcctgttacagtgagtaacaaagttagaggcataatctactttcattatcggatttagtactttccaacaagctgggtttgtatgatttggaaaatcaatccattggattggagcacaattagca

SEQ ID NO: 40996 - DNA, 403 bp, Gossypium hirsutum
  Clone ID: LIB3189-004-P1-K1-H11
gttgaccttatatgttacaagaagttgaacaaattgactctgatgcatcgccagcagaacgagttcaacgggcaatgaattgtcttcctttgaccttagagaagtcagtagatgattcaaattccagcagcttccgacgctggacaatagcggattattcaagagcctatagttctggagaaataactccccggaaggttgcggagcaatttataaatgccgtgcatgaatcttcccgtgctgctttgccaatgtccttcttcattaactatgatgctgaagatatcctgaaacaagctacagaatcaactcttcggtacgtaagaggggatccgttttcagctctagacggagtcccaattgctttcaaggatggattagattgttctccatttccaacatc

SEQ ID NO: 40997 - DNA, 229 bp, Gossypium hirsutum
  Clone ID: LIB3189-004-P1-K1-H12
gttcggttctagatcgcagagcagccgcccttattattatctttttacgcaactaaaaacctgaaatttgcgaactttattcaaggaaatcgctaaactgaatatataaaaaaaatagtaactgcatatcaagaacttacattcttctctgccgccgttatcatttgccaacacagaagtgtatttattcttcttattatctgaagttaaaaaaaaaaaatttgtcttc

SEQ ID NO: 40998 - DNA, 252 bp, Gossypium hirsutum
  Clone ID: LIB3189-004-P1-K1-H2
cagcaactgaaagcccatctttgaatgctctctctttctttccctattctttcattctatttgctgtgcgataaagaaaagaaaagaaaggaaaagaaaatcccaagcaacgcttaattattagtaatcaaactgagaaaggaaagtgaaaatccaagtgcggaggattatttttcttttaagcggttagacgctacaaatggggactcttcaaacttggagaaaagcgtatggcacccttttagattccat

SEQ ID NO: 40999 - DNA, 486 bp, Gossypium hirsutum
  Clone ID: LIB3189-004-P1-K1-H5
cacgcgtccgcaacaatttatcttctttattctggttgctcagccattcatgtttatttctctaactcattcctctttagctaaaggtaaggttaatatattgcctcctaccaatacaagtgataaggtcactttggccctgtactatgaaactttatgcccatattgtgccgactttatcacaaatgaccttgtaaaggtattcctcagcgatctgtttaccattgtcaatctaaagttagtcccttggggcaatgctgacattcttggcgatgaaccccattgccagcatggagaagatgaatgctacttaaataccatacatagctgtgtcatccaccactggcctgatgtgaaaaagcactttgatttcattcgctgcacagagcaacaaagctcaaaagaaccgcttgtcaagaacagagcagcaatgtggaaacaatgcagtgaaaagctgggaatgagtgctcacagaatcaacaaatg

SEQ ID NO: 41000 - DNA, 377 bp, Gossypium hirsutum
  Clone ID: LIB3189-004-P1-K1-H6
atcggttctagatcgagagcaacagcagataagatatcttcatcaaacaaggaaaaaacttaacaagtaaaacaattgagagaagatgtcctggcaagcgtatgtagatgatcacttgatgtgtgatattgagggcaaccatctctctgccgccgctatcattggccaagacggcagcgtttggtcccagagctccaatttccctcagttcaagccagaagaaatcactggcatcatgaatgacttttctgaacctggatcgcttgctccgactggattgtaccttggtggcacaaaattcatggtgatccaaggtgaacccggagctgttattctagggaaaaagggccccggaggtgttactgttaaaaagacca

SEQ ID NO: 41001 - DNA, 309 bp, Gossypium hirsutum
  Clone ID: LIB3189-004-P1-K1-H7
aaggacaagaaatcacattttcattacagagaaattaaaatgtcatgaaagctacattaagcaaattcccaaattacatttacatccacaatacgtagattgttaccaattaccctttttttaaagggccacataaacatggataaccaaaagatctatgtgcaagtcccacattgaagcttttttgattccaacacacttcttgcagctttctatcactacttgcccgtccacatattgtctgcggcataccggcatgtaaacttttggtccaccgatcaactcccgttttgttttatcggtctttct

SEQ ID NO: 41002 - DNA, 347 bp, Gossypium hirsutum
  Clone ID: LIB3189-004-P1-K1-H8
attggattatggatacagataattctattgtaatatcaaccggaccagagcatagatattggaagcaaggggttaagcttttgagcaagccagttgcagttgggattaatggatgtaatagcaatagtgaatatggttcaaccatagtggaagccttattagagccatcaagtagtgaactcatccttaagcatgcttttctgtgacacttgtatcatttggtttgttggtttttgggttaaattctgccattagtctatgtatcttacgtgagttgggaatttaattatgtataatttggtttttggatataggatttttaaagtgttaaaattgtaagataattt

SEQ ID NO: 41003 - DNA, 466 bp, Gossypium hirsutum
  Clone ID: LIB3189-004-P1-K1-H9
cccacgcgtccggtcttcctcaataattaagggccattttcttcctcgttctctcaaataattgttttttacattggccctttgatttttcttgtttaactaatttatctcttgaatttttcatatagctttcaatctaacatagttggttgcttgttttccgagattcatccatgtctcggggtaaccagagagatcgagatcgagatagggcacatgccagagctgcccacatagccaaaggttccaaagacgatgggttaacccctgagcatcggcgtgaaagagatgcattggcattgtttgataagttggccttttatgcggctcatgcgacggttgttatctatcggcgaagtgtgtttaaaaacttgttattacagttggtagtttgtatagttttttttccctaagagtgtgtgtataatatttttctttctgctttattttttacacattttttttt

SEQ ID NO: 41004 - DNA, 308 bp, Gossypium hirsutum
  Clone ID: LIB3189-005-P1-K1-E11
cagaagttgagttaatttccacgatggctgaaaagagattttggatgagaccaccaattcagatggaatttgaggtgcctaaatagattgctatcttactgctcaatcatgttgaatcaattttgctttggttttaatttctcttgaaaaatatagaaaaaatgttgttcttgaaactattctcctagttttttgatgtacttattaaccttattatctgtaatctttatcattgatgctgtagattcctttttacccttcacaaaaaaaaaaaataaaaaaaaaaaaaattaaaaaaaaaagggcag

SEQ ID NO: 41005 - DNA, 461 bp, Gossypium hirsutum
  Clone ID: LIB3189-005-P1-K1-E12
atcttcccccccccccaaaaaaaaaaaaaactatgtcccctctaaattaacaataagatatgtctgaagcaaagctgcagcgttctcatgttccaaaatttggtgactgggacaatggtgatctaccatatacaacctactttgaaaatgctcgcaaagagaaagctggcataaggatgaaccctaatgaccctgaggagaatcctgaggccttcatgtatacgaggggaggcccggaaagcaactacgatggccggtccgtgccagtcacggccgataaacaccatcggaatgctgctaataaagatggtccttcttatgatcatcaaaagagcgcaagaaggcaacgggacacagcactggaatccgaaaacaacaccggatcggaccgttcgattctgcattcgagtcatcgacgtcgaaactcgggtcaaaagaatagtcggcctgggggaagtgcc

SEQ ID NO: 41006 - DNA, 415 bp, Gossypium hirsutum
  Clone ID: LIB3189-005-P1-K1-E6
caagaaactcaccttcaaagcagaagttgaggttcaagcttgtgggagctcagaaggatagatggaagctcaatgacattgacaccaatactgtgcaagaaagaataaattcatggctgacaaagacccagcattttttaagtgagataactttgccactagtgaaaactggtcaaactggtcaaagtggacctggaaagcttgatcctcgaaatgaagatgaagttgataatcaagaaatggaagacattttcatggcagaagggattattcctagtgttttgcctaatggaaatctttttatagctgctattgtatctattgagcagtttatcaggatgaatggattgagtggaaagaatttgtatattatatttagatctcttattccctaaatcgagttcgattatgcttt

SEQ ID NO: 41007 - DNA, 306 bp, Gossypium hirsutum
  Clone ID: LIB3189-005-P1-K1-F10
tttttgtattaagagtcgccctttggtgtttttctaattcaatcagtgaggtgaagaaaaatgtcttgctgtggtggaaactgcggttgcggctccggttgcaagtgcggcggcggcggcggctgcggctgcggcggttgcaagatgtaccctgagatgaactttgctgagcaaaccacaactgagacacttgttcttggcgtggcaccccggaatgtgaactttgatggagctgaaatggaaactggggctgaaaatggctgcaaatgttgagataactgcacttgcaacccttgcaattgttaa

SEQ ID NO: 41008 - DNA, 469 bp, Gossypium hirsutum
  Clone ID: LIB3189-005-P1-K1-F11
cggacgcgtgggtccggacgcgtgggtgctgttgaagtagtaatatctatagcatacagagatggagaggcaaagaagcaagcaggtttgtttgttgatgtgggttttggttgctgcctttttttcccacaatagggtcattgcagagacctgcactggccttggtgagcataaaaactactatccagcttctgaccctcatgctggaacttcccctttaggttcacatggcacaccaccatcttcaggaggtggatcacctccctctcatggaaccccgtcacatggaggtggttaccaccctttaccaacaccatcaacgcctttgggtggaaattgtggaactcccccacatgacccttcaactccatcaacaccatcacacactccttctcatggtacttcaccatcatctggaggtggtagtcccctatcgtatggaggaggcagtccctcatcgtatggagga

SEQ ID NO: 41009 - DNA, 446 bp, Gossypium hirsutum
  unsure (1)..(446): unsure at all n locations; Clone ID: LIB3189-005-P1-K1-F12
aatcagcaaaagaggctactccaaagaataatgctgcaaacaggaataggcttttgaataagaccagttcaaattcaaggtctgtttcggacactgggagtcgtaagttacataccaaaactcagaagacaaccaaaacagagcctgttaaaggaaaggaaaagacaaagggacagggcaccgaatcagctgatcaagaagatcaggtttgcccttcggctgcagctgagactgttgaagaggacaaagaaaatatggatgcacttctgacagaagaaagcagcctgtccggagtgatgtagggggccaatgctcaaccatgctttaaattccatcctctattgggttgtctttcatgggttgatggntgtataagggtttaaaacttattaggttaaagggttccaatctgtgtgaaggtaagacctggtcttttggttttttac

SEQ ID NO: 41010 - DNA, 151 bp, Gossypium hirsutum
  unsure (1)..(151): unsure at all n locations; Clone ID: LIB3189-005-P1-K1-F4
caatagtactactactccaagcaagtattttccttacacgtttgtttttcttgtgattaatcgatatggctagctcaatgtcccttaaacttgcatgtgtggtggtgttgngcatggttgtggttgcaccccttgctctaggggccgtatc

SEQ ID NO: 41011 - DNA, 394 bp, Gossypium hirsutum
  Clone ID: LIB3189-005-P1-K1-F5
gaaaatatacactttgatgttcttctcgtttcctttgtatttttttttttttggttttgtgatgattgagaaattaaggggggatttttattgaataatgttaggcggaggagattttcaatgacggaggtttataggagaatgctgagtgatgaagatgaagatacgccggcgaagtgccggcaacgacggcgaagaaggattgagatgaggaggcatgctgctgtctcggcatcgggagcgttacggagtctgggccaaacggaggatcctgcggagagttcagattgcggtcgtgaagggaagcggctacatgtgctggaagccggcgatcttgtagtgactaacagtacgcatagttcttctggcgaggaggaatctattgtctgggaag

SEQ ID NO: 41012 - DNA, 463 bp, Gossypium hirsutum
  Clone ID: LIB3189-005-P1-K1-F6
gaagttctccttgccatggctgaagaattgggagtttttattccttatgttggaggtgtcgaacatgctaatgttttgttgcctccgttggagactctttgcattgttgaggagacttgtgtgagggataaggctgttgagtcgttgtgtagaattggtgctcaaatgagagagcaggacttggttgagttctttattccattgttgaagagattggctgctggtgagtggtttacagctcgagtttcctcttgtggattgtttcatattgcatacccaagtgccccagaggcactgaaaactgaattaagaacattatacggtcaactttgccaagatgacatgcccatggttaggagatctgctgcgacaaatcttggaaaatttgctgctactgtagaagcacctcatttgaaggtggacattatgtctatgtttgatgatttgacgcatgatgatcaaa

SEQ ID NO: 41013 - DNA, 451 bp, Gossypium hirsutum
  Clone ID: LIB3189-005-P1-K1-G10
aaaaaaaagaaaagaaaagaacaaggagtagcagaagagatgaagctaacgtggaacaagaacaacaacaacaacaacaagcggtccagggaagctattgcaagctaccctaatcttccctttgatcaacaagatccctcgcatgatgatatgcagttgcagaatcaagaacacgcccattctcaacatcaagacaaaccctctgctgatgctttggattctgactttaaacaacttgcccaatccttccaagcccaaggcaacaagcttgctgaggatgggaagtaccgggaagcacttgggaagtgggagacagcacttaatttgatgcctgaaaatgcagttttgcttgaacagaaagcacaagttctactcgaactaggggatgcatggagtgcattgaaggcagccactcgagccactgaattggaaccatcatgggcctgagcat

SEQ ID NO: 41014 - DNA, 380 bp, Gossypium hirsutum
  Clone ID: LIB3189-005-P1-K1-G11
cacaatttagcttctaactttgcctctttttttttcttttcatctgcaaatctggtcctttttttctgatgctggagagtttgggtattagatttaaattagtttgaagggctttcgagttctgggttttccattttggggtaacacccaggttagtcaaattgtggacatcacggctatacacagagtttaccggcctcttcttattcatgcccgatctgtacgacgtaagagttgtgtgatcgagaggaaccctgcgccggacggcgggcgtggagctttgccttctgaaggcggtagtccttccgatctcctcttacttgctggcggggggggtgtcttttaaaggttcagtagttggtataggtagcttttagtat

SEQ ID NO: 41015 - DNA, 222 bp, Gossypium hirsutum
  Clone ID: LIB3189-005-P1-K1-G12
acaatctagcttctaacttcgcctctttttttttcttttcatgtgcaaaattggtccttgatgtctgatgctagagagtgggggtattatatttaaattagctagaaggggtttcgtgttttgggatttccatttcgggggaacacccaggaaaggaaaattgtggacatcacggctatacacaaactttactcgcctattcttattcattctcgatctgtt

SEQ ID NO: 41016 - DNA, 199 bp, Gossypium hirsutum
  Clone ID: LIB3189-005-P1-K1-G4
atggccccccaaaggaaaaaaaccttttaaaaggaatttttttttaaaaaaaaagggaaattaaaaaaaaggtttggtaaaaaaaattttaaaaaaaatttttttaaaacacggaaaaatgtttttaaaaaatttattttttttaggttaaaacaaaaaaaaaaaaagggggggtttttaaaaaaaaaggttgaaattt

SEQ ID NO: 41017 - DNA, 375 bp, Gossypium hirsutum
  Clone ID: LIB3189-005-P1-K1-G6
agcacctccccgtaagcaaaccacaaaggaaagcttggagagagacccaaaaacaatgtctaaggaagttagtgaagaaggacagggtcgtaaggactatgtggaccctccaccggcacctctgattgacatggctgaactcaagtcatggtctttttacagagccctcatagctgagttcatagccactctcctcttcctctatgtcactgttgctactgtaattggtcacaagaaacaacaagatgcatgtgatggtgttggtctcttgggtattgcatgggctttcggtggcatgatctttatccttgtttactgcactgccggtatctcaggtggacacattaaccctgcggtgacttttgggttgttttt

SEQ ID NO: 41018 - DNA, 439 bp, Gossypium hirsutum
  Clone ID: LIB3189-005-P1-K1-H10
caggatatggctgagagaaagagaaggaagcttaagttgttagccgaaacaataaatttggataaaaaaaaagcaaccgaggaggaggagagtttgaagctacaaacgtgggctgatcttcctgtggaacttttggaattgattctgtgccgcctaacactagaggacaatgttcgagcttctgctgtatgtaggaggtggcataaggttgcagttgcagtccgggtggttaaccaatcaccgtggcttatgtactttccaaaatatggtagcttgtatgagttctatgatccagcagagcgtaaaacctactctctcgagctgccagagctacaaggatccagggcttgttacaccaaagatggttggttgttgctgtaccgacccagaaatcacggtgtgttcttctttaatcccttcaatcgccacatgattaagc

SEQ ID NO: 41019 - DNA, 361 bp, Gossypium hirsutum
  Clone ID: LIB3189-005-P1-K1-H11
tttgtttgctctgtatattgaaattttctttctcgattttctctttagccaaaaaagatgcagatcttcgtcaagactctaaccggcaagacgatcactctcgaggtcgagagctccgacacgatcgacaacgtgaagaccaaaatccaagataaggaaggcatccctccagaccagcagcgtctgatcttcgccggaaaacagcttgaggacggccggaccttggccgattacaacatccaaaaggagtcaactctccacctcgtcctccgtttgcgcggtgggatgcaaatcttcgtgaaaaccttgaccggcaagacaatcactcttgaggtcgagagctccgacacgatcgacaacg

SEQ ID NO: 41020 - DNA, 247 bp, Gossypium hirsutum
  Clone ID: LIB3189-005-P1-K1-H12
ccaacaaaccaaacacgtaaagtaactgagcataattcagggtttttattttaaaacagactgaaactttagaaatttaacttaattgaattccttgacaagcttattacataaacatacatgcttttattatggatctttttttacacccaaagaacttttttttttttttccgttttgcaatctttttttgaagggcccaatagtttacccttaaaggtttctttattgtggtggtgcccttttt

SEQ ID NO: 41021 - DNA, 415 bp, Gossypium hirsutum
  Clone ID: LIB3189-005-P1-K1-H4
aattcagtaaaagtattttaattaacttttaagcattttgtttattgtaatcaattaattcctcctttatcaataataattattaaaaataatatattcggatcctacatgaagaaaactcataagaaaaaggacccgtcgagtcgacccacccaacctatgataggcagcttggaaatttgcttgcctgttaatctctgtcgaagaagatggtttccgtttagatccagcaaaaatacagttttcttaagccttctttgatcctatattcctagccaatacaatttgcagttttcagaaatactagtaatttagaaaaaaaatggcttcaacggggggtctggtgcccataacaagggcgtttctcgcttcttattacgaaaagtacccattcgatccactcacagacgacgtg

SEQ ID NO: 41022 - DNA, 412 bp, Gossypium hirsutum
  unsure (1)..(412): unsure at all n locations; Clone ID: LIB3189-005-P1-K1-H6
cggacgcgtgggctactccaagcaagcattttccttacaagtttgtttttcttgtgattaatcgatatggctagctcaatgtcccttaagcttgcatgtgtggcggtgttgtgcatggtggtgggtgcacccctggctcaaggggccgnnacctgtggtcaagtcacaagctccctcgcaccctgcattggttacttgacagggaatggtgctggtggcgttcccccaggttgctgcggcggcataaaatctctcaactccgccgcccaaacaacaccagaccggcaagcagcttgcaaatgcatcacaagtgcggccgccggcatttctggcatcaactatggtattgcaagcggactcccaggcaagtgcggtgtcaacattccttacaagatcagccctagcactgact

SEQ ID NO: 41023 - DNA, 162 bp, Gossypium hirsutum
  Clone ID: LIB3189-006-P1-K1-A1
cgaaaaaacaaattccgttttttcgttaatttcctcccaacgctgatccgatcacagttgccgacatgtcttgttcttcatcatcgggttcggaggaagatgacgagggaatcgactcttacaggaaaggaggatatcatgccgtccggatcggcgatccat

SEQ ID NO: 41024 - DNA, 59 bp, Gossypium hirsutum
  Clone ID: LIB3189-006-P1-K1-A10
cctctcccttcaaatgtacaggactttcttaacctctccctccctatgtagaaccccca

SEQ ID NO: 41025 - DNA, 252 bp, Gossypium hirsutum
  Clone ID: LIB3189-006-P1-K1-A11
catgggtgggtaactccgccaagctttgcccaggtgtatgcgcttacccttttgccgtacgtgaatacatgccgatgttgtagccggtaaagtcacccaacggtgacgttggatttgacggtatgattagtgtgatcggacacgaaattgttttattagcaaccaacccactggttaacgtttggtacgcctgttattgacccatggtttttgaggaaatttcggatctatgtgtgtgtatatatggatctt

SEQ ID NO: 41026 - DNA, 421 bp, Gossypium hirsutum
  Clone ID: LIB3189-006-P1-K1-A12
cccacgcgtccgggagaatcttctgctgttaattctttcatgactgcagccaaggttgtcatcgttatttttgtcattattgttggatctttcaaagttgatgtagataattggtctccttttgctcccaatggtgttaaacatatatttacgggagcaaccgtagtattctttgcatatgttggatttgacgcggttgctaattctgctgaagaatcaaagagacctcagcgtgatttgccaatcggaattttgggaagtctgcttgtatgtgttattttatacgttggtgtttgcttagtgctcaccgggatggtaccttacaacctccttggcgaggatgctcctttatctgaagcgtttacatccaagggtttgaaatatgtttcttatttgatcagtattggagctggtgctgggc

SEQ ID NO: 41027 - DNA, 477 bp, Gossypium hirsutum
  Clone ID: LIB3189-006-P1-K1-A2
cccacgcgtccggcaaattgtaacttgaaactagaaagcaaacatgaagctgctcaagcttatgttgatgctgctcattgctataagaagacaaatgtaaaggaggctatatcctgcctgaaagaggcagtgaacatgttttgtgatattggaaggctcagcatggctgccaagtattataaggaaattgctgaattatatgagtctgaacagaacactgagcaggccattgattattatgaaaaggcagctgatttcttccaaaatgaagatatatcaacctctgccaaccaatgtaagcagaaagttgcacaatttgctgctcagatagaacaataccagaaagctgttgagatctatgaagatatagcacgacagtcactttccaataacttgctgaagtatggagctaaaggacatcttctaaatgctggcatttgtcaactgtgcaaaggtgatgttgcaatcaccaatgca

SEQ ID NO: 41028 - DNA, 370 bp, Gossypium hirsutum
  Clone ID: LIB3189-006-P1-K1-A3
cgcgtccgtattatctgctcctcttagtttccctttttgtcccttgattatttgatactcccacctcatggctgccgctgatgatcgagttacgaagccaaatgtaaaggatgctatatcctacctgatagaggcagcgaacatgttttgtgatattggaaggctcaacatggctgccaagtattataaggaaatagctgaattatatgagtctgaacagaacacttgacattccattgattattatgaaaaagcagctgatttcttccaaaatgaagaaatatcaacctctgtcaaccaatttgtagcaataagttgcacaattagttgttcagatatgaacaataccagaaagctgttgagatctatg

SEQ ID NO: 41029 - DNA, 413 bp, Gossypium hirsutum
  Clone ID: LIB3189-006-P1-K1-A4
gcattagcaaccatagccatggcttcctcaccaaaactcttctctatgtctatcctcttcctttttgccctcttctccatgcaaatccatgctagagagtacttcagcaaattcccaagagttaacatcaatgagaaagagacaacaaccagagagcaaaagcacgagaccttcgttccccagaccacccaaaagccagaagaacaagagccaaggttcattcctgaaacccaaaatggttatggcctttacggccacgagtcaggctcaagccggcccagtttcaccaccaaagaaacctatgaaccctatgtcacccctgttagattccaccctgatgagccctataacagcatccccgaatccttcaacaattaatgacacttactactacaacaagaatgcctacgagt

SEQ ID NO: 41030 - DNA, 466 bp, Gossypium hirsutum
  Clone ID: LIB3189-006-P1-K1-A5
cccacgcgtccgcgagaatgtatattcttcctcaaatctttcgttgagaggtaaaggattaaatccttttaagaaataaagtttttgctcggaatatgaatcaaaccgagggaccccttaactcttagggggattaatagaacgaatcacacttttaccactaaactatacccgctacaatgcgattattgtatttattgtatatttattggatataaatataaagggaccctttgtcaaacaggggaattgggcgtaatcaagataggattacaagataggagcctaaaaaatcctgaaaattagggccttgccaccttttgaccttttgtcagaagacttgtgttataggatttttgatagacaggattcgacaaaaggacttagtcataacataaataacataaaaatggattgtgcaaaaatccataggtttttttttattatttattctaggaattctagt

SEQ ID NO: 41031 - DNA, 246 bp, Gossypium hirsutum
  Clone ID: LIB3189-006-P1-K1-A7
aacctggaactgttaattattcaatgactgcctccaacgtcggcatgggcttttcattgcttttagatggcaaatgcaaaggtggcgattatcttcctgatagaggcagttccaatggtgtgagacatatattgacggtagcaacctgtcaagttttatgaatgaaatggattattcatctgatgctgttccgaccacagaaccaagccagacctcattatgaataggcaatcgtaattttgggaa

SEQ ID NO: 41032 - DNA, 197 bp, Gossypium hirsutum
  Clone ID: LIB3189-006-P1-K1-A8
gacaggcctttttacagtacgtgcaccatactgaatcccaggtaatcggcctagcacgtgggcggtgtattttccacactagttggatgcttcagggcagatgtactttaactctcagagtgtggagaccagtcggaactatcctcttgtactgttctgaactctaacttctctttttacatcctgatctcgaacaa

SEQ ID NO: 41033 - DNA, 261 bp, Gossypium hirsutum
  Clone ID: LIB3189-006-P1-K1-B1
cccactcgttcgagagtgcgttagcaaattccctttagttaacatcaatgatgaaagagacatcgtccagagagcaaaagcacgagaccttctctccccagaccacccaaatgccagaagaacaagagccaaggttcattcctgaaacccataatggttttggcctttactgccacgtgtcattctcaagcctgtctagtttcaccaccaaagaaacctattaaccctatgtcaccccttttattagccaccttgtttagc

SEQ ID NO: 41034 - DNA, 232 bp, Gossypium hirsutum
  Clone ID: LIB3189-006-P1-K1-B11
ctttctttctatagaattagtcactcctgttctagatgaaggttctctccccaattcttgcttgcctagcgcttgctgtggtggtaagccatgctgctctctcacctgagcaatattggagctataagctgccaaatactccaatgccaaaggctgtcaaagaaattctacatccagaactgatggaggagaaaagcacctctgtaaatgtaggaggtggtgtttgtaacgt

SEQ ID NO: 41035 - DNA, 317 bp, Gossypium hirsutum
  Clone ID: LIB3189-006-P1-K1-B12
ctgaaatccctgcctataatcaatctcttagcaaagggccaagctatagacaatggcagaaggcgaagaggatctgccgagggatgctaagattgtcaagtcactgcttaaatcaatgggcgtggtggactatgaacctcgtgttatccatcaatttctcgagctttggtatcgctatgtcgtggatgtactgacggatgcacatgtgtactctgaacatgccggcatgcaaaccatttattgcgatgatgtcaagcttgctattcaatctaaagtcaattacaacttctcgcaacccccatccagagaggtgcttt

SEQ ID NO: 41036 - DNA, 382 bp, Gossypium hirsutum
  Clone ID: LIB3189-006-P1-K1-B2
cggacgcgtggggtcaaaggcatttcaagcagttgatcaatttttacagatagtgaagcagtataatgagaagggtaatgctgaagatacttctggtgctggaagtttagggatttcatcaatgcctggaaatgctagtttactgggatgggccatgagttccttaactcttaaaggcaaagcttctgatcaagctccagttgctactgcaaattctgtcacacctgcaactaccacagcctctacagccagctcaggactaatagaaactccaagtacagcaccagtccaccgagttagttccagtacagattttgcagatcaactgatgccttcatctcctacttcaaccgatggatggtgagaaattgaaaatggcatt

SEQ ID NO: 41037 - DNA, 61 bp, Gossypium hirsutum
  Clone ID: LIB3189-006-P1-K1-B5
tttttatgcggcacttcttggaaaaatttgcacggaacctctactttgtttaatcttttta

SEQ ID NO: 41038 - DNA, 161 bp, Gossypium hirsutum
  Clone ID: LIB3189-006-P1-K1-B7
gtcaaacctcacacatatatttttgccaccgacaagactccgaggatcttgaggtttggcaagggaaccccttttttttcgctaaatttcgtgtcttttttataatggtgttttttttggagagtagttttttgtgtcggtgtttttgttaatattttttt

SEQ ID NO: 41039 - DNA, 218 bp, Gossypium hirsutum
  Clone ID: LIB3189-006-P1-K1-B9
gttacctacaagtgtgagagctgcactgagggcatggctaaaaccatatgcaaagagcttaacttcatcagttttagatacagagcttgctgaagactggactgaggcaatggctgctaaaatagagtggtttgcagccactagctcatttcaagattagatggccatctgttcggagtacttaacatcagcacgttgtttatgagactaattctctt

SEQ ID NO: 41040 - DNA, 399 bp, Gossypium hirsutum
  Clone ID: LIB3189-006-P1-K1-C1
gcattagcaaccatagccatggcttgctcaccaaaactcttctctatgtctatcctcttccttgttgccctcttctccatgcaaatccatgctagagagtacttcagcaaattcccaagagttaacatcaatgagaaagagacaacaaccagagagcaaaagcacgagaccttcgttccccagaccacccaaaagccagaagaacaagagccaaggttcattcctgaaacccaaaatggttatggcctttacggccacgagtcatgctcaagccggcccagtttcaccaccaaagaaacctatgaaccctatgtcacccctgttagattccaccctgatgagccctataacagcattcccgaatcctccaacaattaaaacacttactactacaacaag

SEQ ID NO: 41041 - DNA, 475 bp, Gossypium hirsutum
  Clone ID: LIB3189-006-P1-K1-C12
caagttcattctaaaaatcgccgaatagccattccggggaggaggtgccgaatggctattccaacctctccatcgaatgaccctttttttctcctccaaaaataccctttcttagattaaattttctctaacggtttcaacttttgttttcttttggtcattcgacaatctcaagctcaaatcaatctaaaaggaagcagatcaacttgaaggccaaatcaactagattttgttgtaagttcaattcaactagggtttgttttgcattttgattgattttttttttgtttctgatgatttgtccaaggggaattgaaatggattctgcaactgttcacgaggagatcgattcattattcgagtcaactcctcctctcatagattcggctaaaatcatagacaaattgaatcaagtcatccaatttgattctccttcaggtacagtaccttgatcttatcgatcctgcacatattt

SEQ ID NO: 41042 - DNA, 444 bp, Gossypium hirsutum
  Clone ID: LIB3189-006-P1-K1-C2
attttctgattcccccctcccctaccaaatttccaattttcctccccaaaccctaaccctaatccttcctcgtttttgattcctctctctaattaaaccttaagtcccttcaaaaattgattagtcgtttcaatttcttgttgtgaattccccaaactttcttttttaaattattgaatttttacatggctggtgttgttgaagaaattatacaatgattgggttattggggtttggtttcaattttatggggtttacgaaatgcctctggttggaaaaggagttagtagacgtcgcgccacgttagctcaaccgcaacaagggggaaaacagacgaggcggagcatccgaggtcggaaacgtgcggctgatggagaggtaggttggccgaggactagattggctgcttaaaggactaaggtggaggattaagttcaggtgggg

SEQ ID NO: 41043 - DNA, 245 bp, Gossypium hirsutum
  Clone ID: LIB3189-006-P1-K1-C7
tgtcaaactgaatggttcgaatttggtgaagactgatggttatagtccttcagtcttactaaagatttgtgctgagaccgtgatctaattaaaccataagtccctccaaatattgattagtcgtttctatttctggttgtgtattccccaaacttttttttttaaattattgaactcagtacttttttggggctgatgatactagatatacattgattgggttattggggtttggtttcaatttt

SEQ ID NO: 41044 - DNA, 117 bp, Gossypium hirsutum
  Clone ID: LIB3189-006-P1-K1-C9
gttccatgtgaacggcacttgcacatgggttagtcgatcctaagagacgggggaagcccgtgcgactgctcgtccagcgcgtgcttcgaaagggaatctggttaaaattccttgtcc

SEQ ID NO: 41045 - DNA, 120 bp, Gossypium hirsutum
  Clone ID: LIB3189-006-P1-K1-D1
tccacacgttcgtccacgcgtccgagattgttttcttttcaatagtgaacgcgagcgggcttttgaccgtcttgagacagtgtagtgttacccgacttaaggccagcttttaatagtaac

SEQ ID NO: 41046 - DNA, 285 bp, Gossypium hirsutum
  Clone ID: LIB3189-006-P1-K1-D10
tccacgcgtccggttcttgcattatgcgaccatccagccattttggacaaaagtgagacacagggtttattcagtgctgactccattgaacgtgcttggcaaatacttgatcaaattcctggaagggcaactggtgcctacagtcatagccagtgtatcaagggattactagatactattgctgccggaattgagggtcaagatggatttcctgctgagccaattgatattttcttgacagatggagcgagccctgcattgcacattatgatgcacttgctgata

SEQ ID NO: 41047 - DNA, 381 bp, Gossypium hirsutum
  Clone ID: LIB3189-006-P1-K1-D11
cccacgcgtccgggaatccttattcagagcagcaatggcggacactgtcatctctctcgataagctcaaagccttctggaactctcaagtccacgatgaagaaaactgggctcacaatatgaaactgctgcgagccgccggtttatttgctggatcgattcttctaatgcgcaattacggtgatctcatggctatataaggaattgaggattgattaagaggttcggagtaagctcagtttggaaatggatgcatctgttactttaggaactatatacatggttaatgatgatattgaaacaactttagtaactttttgaagtatgatgctcatatatgcttctaaatgttttggaatttgaatgaaatgaacccacttct

SEQ ID NO: 41048 - DNA, 450 bp, Gossypium hirsutum
  Clone ID: LIB3189-006-P1-K1-D12
atcagcgatccgggtatctacttgagacaagaggaagcataatataccaagttgagaccagagcaagagtaattatatttgatatttcaacacttgaaggcaatagggttttgcggaataattcatcttcatttaacctttcacatagatctttaactagagaacatggaggtcttatgagttggcccgaacatttctttaggggaagacaacatacacaaaatcatgacgcatctgatcaacaagtaaacagattgtcagcgagagccatgcagttaagcatatttggcagtaaggtaaatttgccacagcgtagctggagtttatcaaggatgaatcagtctcagccaataaacaacccgtcatataatagatttctttcattccctggccatctactggtctctgccggatcagaaggagcttctactatgacgaagaatcacaaag

SEQ ID NO: 41049 - DNA, 407 bp, Gossypium hirsutum
  Clone ID: LIB3189-006-P1-K1-D2
gtgaaagctctcaaaatggccctactcttgaaattcaaatccctgctgagcatgttactgccacaaatcgtcaggtcaggggtggccagctatgggggactgatatatacacagatgactctgaccttgttgctgttcttatgcatactggttactgccgtccaactgcttctccacctccaccagctatccaagagctacgtgctactatccgtgtgctgccaccacaagattgctacacctctaaacttaggaacaatgttcgttcccgtgcttggggagctggaatcagttgtagttatcgtgttgaacgatgctgcattggtaagaaaggtggcggaaccattgatttggaagccatccttacacattcatcaacagtggagcccaccccttgctccagttgc

SEQ ID NO: 41050 - DNA, 404 bp, Gossypium hirsutum
  Clone ID: LIB3189-006-P1-K1-D3
cccacgcgtccggctcatcccacttccttatatcctccggtccgcggacatgcctcgactggcaccctgggacgccacctggcaaggcggctcgtggagatcggtgtcaaggacgtcttctcagttcctggtgacttcaacttgaccctcttggatcatctaatagcagaacctgagctgaacttagtcggttgctgcaacgagcttaacgccggatatgcggctgatggctatgcacgcgctaagggcgtgggagcctgcgtcgtgactttcactgttggaggcctgagtgtgcttaacgctattgccggtgcttacagtgagaatttgcctgtgatttgcatagttagagggcctaattcgtatgattactgtaccatccggatcttgcatcatactttttg

SEQ ID NO: 41051 - DNA, 342 bp, Gossypium hirsutum
  Clone ID: LIB3189-006-P1-K1-D6
gaacaaaatgctgaagggatttgcaatacagagtgtaagacaattgagagaacttgtcaagaggttatggggtattctgatactgatgttgctgaatatatatacacgtcgaaacctgatgttgagtcattgacgaattatctgtgtaaagacttatctaaggcatgcaaaaccaagcctcccccactaccaaaggataggactccgggagaaccttttgtaccgaaaccaactaaataggctgaaatggaaaagatgttacgatccatggagggtattccatgagcacccaacatttcaaaaggattctagggaggagctaatgtacatgaagaatttcgg

SEQ ID NO: 41052 - DNA, 306 bp, Gossypium hirsutum
  Clone ID: LIB3189-006-P1-K1-E1
catggcttgctgtctcatgtaccgaggtgatgttgtgcccaaagatgtgaatgcagctgtggctgccatcaagaccaagcgcacaatccaatttgtcgattggtgcccgaccggatttaagtgtgggatcaattactttccaccaactgtttgttccggcgatttgtctctaccaattttttttttctagttttttttctctcatatttgtttcatgcgttgttttttaagttagtttttcttgcacacatattttttttaggcaaagttttcttttgtacaatattttgttttcttcaagttttt

SEQ ID NO: 41053 - DNA, 197 bp, Gossypium hirsutum
  Clone ID: LIB3189-006-P1-K1-E11
cccacgcgtccgcttcttgttcctttacatcaccgtcttgactgtcatgggtgtgtctcagtctaaaaccaaatgtgcaaccgttggtattcaaggcattgcttgggcttttggaggcatgatctttgcccttgtttactgtactgccttgtattcaggtggtcatatttaccctgctgtgacctttttattgattc

SEQ ID NO: 41054 - DNA, 227 bp, Gossypium hirsutum
  Clone ID: LIB3189-006-P1-K1-E12
gaaactggtgccgggaagcacgtccctcgcgccatctttgttgatctggagcctactgttatcgatgaagtgaggactggtacgtaccttcagttattccaccctgagcaactcattattggcaaagaagatgctgccaacaatttcgttcgtggccatttttcaatgggcaaatagattgctgatctctgcttggatcagtatccttaagcttgctttttactgta

SEQ ID NO: 41055 - DNA, 76 bp, Gossypium hirsutum
  Clone ID: LIB3189-006-P1-K1-E2
catggcttgaaaacatcatgctccgtgttagtgttgttcccaatcccttgactcattacattttttggcctcatta

SEQ ID NO: 41056 - DNA, 200 bp, Gossypium hirsutum
  Clone ID: LIB3189-006-P1-K1-E4
agttgatatccaactatcactctttaggtttatagcattaaataaatcatgaaatctttccttcctttctttgcattcctctcacttctcctgtttgtagacaccattgcagcagctaggaaagatgctggagagtactggtgagctgtaatgaaagatcagcctatgcctgtggcactttaagagcttgctcggattga

SEQ ID NO: 41057 - DNA, 183 bp, Gossypium hirsutum
  Clone ID: LIB3189-006-P1-K1-E8
cgcgttcgaaaaaacaagtgttgactatcttcataagaatcaatgtatggatgggtcggatcagcttgaggggacttctcagcgaagggcaagttctctatagtcatattgttgcctagatggagacaattctcctacagtgagactgtgttctacattataagttctattttgtttttttat

SEQ ID NO: 41058 - DNA, 52 bp, Gossypium hirsutum
  Clone ID: LIB3189-006-P1-K1-E9
agaaaagaaaaatggccaccattgatgttccttatcaggtttcacctcttgc

SEQ ID NO: 41059 - DNA, 416 bp, Gossypium hirsutum
  Clone ID: LIB3189-006-P1-K1-F1
atagaattacgaaagctcatctctctctctctctctctctagatttcaccccttaggtttctctttccacacagagacagagagagaatcagaggagcttaatcgagatttgatattcctcaccacagatggatcagatattgaacaaggtgggctcctattggctcggccagaaggccaacaaggagatcgattccgtcggcgacgacctcaactcattatccaccagtattgaagggggagccaaatggttggttaataaaatcaaaggaaaaatgcaaaagccgttgccagagctgttaagagagtataacctgccaataggaatcttccctcgtgatgccacaaattatgaattcaatgaagagactgggaagctcactgtttttattccagcaatatgtgaaaggggatac

SEQ ID NO: 41060 - DNA, 218 bp, Gossypium hirsutum
  Clone ID: LIB3189-006-P1-K1-F10
cttaataaacgccttctttcttcttcttctccctttctatgctttttcgaatttttcttaagcgagaatgagtgagtgcatttcgattcacatcggtcaggccggtatccaggttggaaacgcctgctgggagctttactgtcttgagcatggattccatccttatggttcttatgccaagtgactaaactgtcggttgaggtattttttcttttaac

SEQ ID NO: 41061 - DNA, 423 bp, Gossypium hirsutum
  Clone ID: LIB3189-006-P1-K1-F12
attaacttctgatccgaatatgccaacaattagtgctgaaggtagaccgcctccaaagataggaaatcttggacacttgacacgcatatctaacaaacttgttcagcttggaaatagcaatgctgaaattcaggcacatctgcaggaaaacagtgaatgggttgattggcacactaatgtcttattaaagcgtaatgctacagaaaatatctatcagtgggcttgtgggaggccaacagctctacacgaccgaaccagagacagtgatgatgatgattaccatgatagggattatgatgttgcagccttggcaaataacttaagccaggcatttcgatatggcatttacagtaatgatgatatggatcaggtacatggctcactcgaaagagatgatgaggatggttacttggatgatgaatc

SEQ ID NO: 41062 - DNA, 296 bp, Gossypium hirsutum
  Clone ID: LIB3189-006-P1-K1-F2
atagaattacgaaagctcatctctctctctctctctctctagatttcaccccttaggtttctctttccacacagagacagagagagaatcagaggagcttaatcgagatttgatattcctcaccacagatggatcagatattgaacaaggtgggctcctattggctcggccagaatgccaacaaggagatcgattccgtcggcgacgaccttaactcattattccaccagttttgatgggggggccatatggctggttaatttaatcaaaggaaatattcataatccgttttcaga

SEQ ID NO: 41063 - DNA, 107 bp, Gossypium hirsutum
  Clone ID: LIB3189-006-P1-K1-F3
ttatctttctatataaagatttcaccccttaggtttttcggggcacatatagtcagagagagaattattttagcttaatctggtatttgataaattttttttcaaat

SEQ ID NO: 41064 - DNA, 118 bp, Gossypium hirsutum
  unsure (1)..(118): unsure at all n locations; Clone ID: LIB3189-006-P1-K1-F4
aacagcacaaacagacaaaacgcnacaaccaaagaagaaaaacgggcgggaaggaggaacccgaggaggacgcggagaaagcagagaccccacccaagaacaccaccaacagcgacaa

SEQ ID NO: 41065 - DNA, 126 bp, Gossypium hirsutum
  Clone ID: LIB3189-006-P1-K1-F5
catttatctcatcacttgttgaaaaccaaccaaatcaaaaaaaaaaaaaaactttcttcgatttgggtgatccatagatctacatgaagtttctagcttttttcaattcccagatctttctttcat

SEQ ID NO: 41066 - DNA, 274 bp, Gossypium hirsutum
  Clone ID: LIB3189-006-P1-K1-F6
atcgggagcagcccggcctttgtttttcccaaggacgtcaatgctgcagtcgcctccattaagaccaagcgcaccattcagtttgtcgattggtgtcctactggattcaagtgcggtatcaactaccatccacccactgttgtccttggtggatatctttccaaggcccagttagctgtttacttgttttttaactgcatcagtgatgctgttgtcttctgtcgtattggccataattttttttctttatgtttgtctaacgtatctttttttt

SEQ ID NO: 41067 - DNA, 321 bp, Gossypium hirsutum
  Clone ID: LIB3189-006-P1-K1-F7
atcgacttgtgatctcgaatatgtccaacatgtttgtgcctaaagggtagaccgcacttcaaagatgcggaaatctgtggacactgtggacacgtcatatactaacataatcttgttcgagcttgtgaaatatgcacatgctgtaatattcaggcatcatctgtcaggaaaacatgtgaatggcatagatttttctcacataatgtgttattaaagcagtaatgctacagaaaatatctatcactgggcttgtgggaggccaacatctctacacgaccgaaccagagacagtgttgttgatgatttccatgaaaggtatta

SEQ ID NO: 41068 - DNA, 55 bp, Gossypium hirsutum
  Clone ID: LIB3189-006-P1-K1-F8
aataaagaaagataaaatggttctgctagacatattgtgggacgatgtagtatcc

SEQ ID NO: 41069 - DNA, 124 bp, Gossypium hirsutum
  Clone ID: LIB3189-006-P1-K1-F9
ctcactggcaaattctattggtaatgccaatttcaacattgtctctcgaagactttagatggggggtgtatcaaaacagcagtgattccacacccatagtcaaacatattttgtctttcgcgaa

SEQ ID NO: 41070 - DNA, 427 bp, Gossypium hirsutum
  Clone ID: LIB3189-006-P1-K1-G1
ctcagccaaaagggctctgctttggagttctttctttcttcctttcttctggcgtactttgggtgcccactctaatcatggtatccaagcacaatccatcgggcaacaaaaaacggagcccactatctatatttgctgttattggtttgtgttgtttcttctacattctgggagcatggcagcgaagtggttttggcaaaggagatagcatagcattggaagtaacaaagcaggcagactgcagtatcttaacaaatttgaactttgaaacacatcacaacgatgtagagattgttgagccttccaaaccaaaagctcatgtgtttaagccgtgtgatgtaaaatacactgattacacccctagccaagagcaagaccgagccatgtagtttcccaaggattacatggattaaccgggaaagacact

SEQ ID NO: 41071 - DNA, 233 bp, Gossypium hirsutum
  Clone ID: LIB3189-006-P1-K1-G10
gcttttgatcaatactatttttttgtgcgtctttttgcttctctggctcatattttctcgagattttccttcttagattgcttgaattatggcttcaaccttgctactggttctggattttgtgattgaacttattgctttcgcccttgctgttgctactgagcattgttgaagtactgccactgttggcatttttgggaaagaatgtctttagagttatgttgaggatattg

SEQ ID NO: 41072 - DNA, 93 bp, Gossypium hirsutum
  Clone ID: LIB3189-006-P1-K1-G11
gaaaaaacggagcagtttacggaagggactcttaaaacccagccaaaccacatacagttcctgcttatatttcaccgactgtatacgttgaat

SEQ ID NO: 41073 - DNA, 292 bp, Gossypium hirsutum
  Clone ID: LIB3189-006-P1-K1-G12
gcaatactccaagcaaccattttccttacaagtttgtttttcttgtgattaatccatatggctagctcaatgtcccttaagcttgcatgtctgttggtgttgtgcatggtgatgggtgcacccctggctcaaggggccataacccgtgctgatggcttagtcggcctcccacgctaccttcctttattgtcagggaatggagatggtgctgatgccacaggttgctgagccatcgtcatgaatgccttgggatcgctctgtggtgatacataagaaccgatctagcttgtaa

SEQ ID NO: 41074 - DNA, 179 bp, Gossypium hirsutum
  Clone ID: LIB3189-006-P1-K1-G2
cggacgcgtgggcgagatgttatatagccctttcattcttcatctctactggcgcactaagggtggctactagactaacgccctacaagcacaatccatccctcatcaaattacggatcccagtagctatatttgagggaatgggcatgcagcactgcttcatcattgtgagcgcatgt

SEQ ID NO: 41075 - DNA, 232 bp, Gossypium hirsutum
  Clone ID: LIB3189-006-P1-K1-G3
gccgcttcactcggcggtagcattgttttatgccgccgcttctcttttcgccattgctggcgccgaagatccttatatgttctacagtgtaggttgcctagcgcttgctgtggtggtaagccatgctgctctctcacctgagcaatattggagctataagctgccaaatactccaatgccaaaggctgtctttgaaattctacatccagaactgatggaggagaaaagcacc

SEQ ID NO: 41076 - DNA, 210 bp, Gossypium hirsutum
  Clone ID: LIB3189-006-P1-K1-G4
cacttggtactcgaaaactgaatgatgcaattccgaacttcggtgttcaaacgccattctttaaaaaaggagcttatggtttgatcgaattttagtgtaataaaaggggtgataaatactatgcttgctttacaatattacaggtatgggggaggtgtctgttgttttgtagtatgatgtagttgctgttgctcatatctatttaaaagt

SEQ ID NO: 41077 - DNA, 78 bp, Gossypium hirsutum
  Clone ID: LIB3189-006-P1-K1-G5
tcggagagagtggaaaaccccctgaaaggcgtggctatagtggtccttgaccttaccgtgtttttcgccgtatcattt

SEQ ID NO: 41078 - DNA, 274 bp, Gossypium hirsutum
  Clone ID: LIB3189-006-P1-K1-G8
ttttagattccctttccattgcactgctctttctttctatagaattagtcactcctgttctagatgaaggttctctccccaattcttgcttgcctagcgcttgcttaggtggtaagccatgctgctctctcacctgtgcaatataggagctataagctgccaaatactccaatgccaaatgctgtcaaagaaattctacatacagaactgtttgaggagtatcgcaccactttttctgtcggatgtggtggagttatacacttttctactcatt

SEQ ID NO: 41079 - DNA, 302 bp, Gossypium hirsutum
  Clone ID: LIB3189-006-P1-K1-G9
caagttttcgaattgaagctacggtttaacgaaccagcgggaaacaacaatccaagattcactgccaatcaatggacgggcataatttggaagactcaaagcaaagcactgctgatatgtctgttttcgtgcaaaatcttcttcaacatatgcaattcaggtttcaaacaatgttgttttccatcatctctaagagtgttttattggtagaccgtataaatgatctggagcagagcattaatgaccttaaagcagagatgggtttgtagggctcttcatcctctgtagcctcaccaaagcta

SEQ ID NO: 41080 - DNA, 432 bp, Gossypium hirsutum
  Clone ID: LIB3189-006-P1-K1-H1
cccacgcgtccgcccacgcgtccggttctagatcgcgagtctgccgcccttttttttttaaattaggtggctatcaatggacgggcataatttggaagactcaaagcaaagcactgttgatatgtctgttttcgtgcaaaatcttcttcaacaaatgcaatccaggtttcaaacaatgtcggagtccatcatcacaaagatagatgaaatgggagaccgtataaatgagctggagcagagcatcaatgacctaaaagcagagatgggaatggagggctctccatcctctttagccccaccaaagcataagtcatgactgagcgaatcaagaagttgactctgcattaaaactggccagagattgtatttagcggttaatggtgaatgttatattggtcaaatttggggattatcttggttagagactacttt

SEQ ID NO: 41081 - DNA, 452 bp, Gossypium hirsutum
  Clone ID: LIB3189-006-P1-K1-H10
gccttcttccatccactattttcgttcatgagggaaggctcgaacgaatatagaattactatagagttttatgggtggtagtctcaaccatcttctccattatttttcttcttatagacattagctttgcttaatcaaaattccctttttgatttccattcacaaagttccgttttagataaataagtgaagacagaaacttcagaatagaaacaaccattcaactataagaacaaagaatatattccccatggctctgttctccggtcatcagcattctattatcaccttcttcagcatcattctccttgtgtttcttgatggtgttacggcagccacctttacattcatcaacaaatgcgattacacagtatggcctggaattctagctaatccaggaagtccaaaacttgaaagtacaggctttgaacctaccaaaggcagctctcgtc

SEQ ID NO: 41082 - DNA, 353 bp, Gossypium hirsutum
  Clone ID: LIB3189-006-P1-K1-H11
aaaaaaatttctctggaaacaaagcaactatcaactacgtttacctcagatctaaaacacctcgtctcagatccactaaattcaccatgtctactactttcagcggcgatgaaacggctcccttcttcggcttcctcggcgccgccgccgctctcgtcttctcctgtatgggagctgcatacgggacggctaagagcggtgtgggtgtggcttcaatgggtgtgatgaggcctgagttggtgatgaaatccattgttccagttgttatggctgaggttttgggtatttatgggttgattattgctggtattattagtaccggcatcaatccaaaggccaaatcgtattatttt

SEQ ID NO: 41083 - DNA, 261 bp, Gossypium hirsutum
  Clone ID: LIB3189-006-P1-K1-H12
cggacgcgtggggcgaaattgaaataccactacttttaacgttattttacttattccgtgaatcggaggcggggcacggcccctctttttggacccaaggccggcttcggccggccgatccgggcggaagacattgtcaggtggggagtttggctggtgcggcacatctgttaaaagataacgcacgtgtcctaagatgagctcaacgagaacagaaatctcgagtggaacaaaaggggatatgctcgtttgattctgatt

SEQ ID NO: 41084 - DNA, 456 bp, Gossypium hirsutum
  Clone ID: LIB3189-006-P1-K1-H2
gctagccttcagttcagcaaagagcccaacaatctctacaacctccactcctacaaacactctgggttggcaaacaagaaaacagtcaccattcaaagtgggggcaaagaccagtctgtgctgctagcaaccaccaagactaagaagcagaacaagccttcggccttgcttcacgagtcctttatgaaaaaggagttccccaggatggccaaggcggtcaaaaaccaggtgacagacaactactacaggccagatttaacaaaagcagcccttgctaggttgagtgctgtgcacaggagtctaaaggtagccaagtctggtgttaagaagaggaacaggcaagcattgaaggttcgtggcttgaaaagagctagacctttcaggttgtatgagctctgctatttttatttgcccagacatttatttaccatctttttttgaattgggattattttt

SEQ ID NO: 41085 - DNA, 265 bp, Gossypium hirsutum
  unsure (1)..(265): unsure at all n locations; Clone ID: LIB3189-006-P1-K1-H4
ctaaaagccatcaaaggagtagggaaggtactttgcgaaaatactctcttttcaatccctcgtgtccactgttttcatcgattcagtataaaatttcccaaaagttttcgattcatagaaggaaaacccaaaaaaccagaaacatcaaccacaaagcgaaacgatgaaggtcatccctttaattttgatgggttgaggaggagnntnacnccaactacttcatctcatttgtttctgcaaatcattttactccaagcttggtttt

SEQ ID NO: 41086 - DNA, 232 bp, Gossypium hirsutum
  Clone ID: LIB3189-006-P1-K1-H5
cggacgcgtggggcattagcaaccatagccatgtcttcctcaccaaaactcttctctatgtctatcctgttcctttttgccctcttctccatgcaaatccatgctagagagtacttcagcaaattcccaagagttaacatcaatgagaaagagacaacaaccagagagcaaaagcacgtgaccttcgttccccagaccacccaaatgccatgaagaacaagagccaaggttc

SEQ ID NO: 41087 - DNA, 198 bp, Gossypium hirsutum
  Clone ID: LIB3189-006-P1-K1-H6
cggacgcgtgggttaaactatttgttgtttttctttgttgggaacatatatattaaatcttccactatttgtcttttgttctactagtactagtaggaggaagcatgtctacctactacgttcttgaatggttggcctgtattttatttgttgagcatgcttagctactactctagctcttgaatggtttataaatat

SEQ ID NO: 41088 - DNA, 353 bp, Gossypium hirsutum
  Clone ID: LIB3189-006-P1-K1-H7
cttctatagaggtctgctctgctcaacatcctatctctttctctcgaccaaagactcatatccacgcgtgaatctttgttccagcttgttagaatggagacatttctattcacatctgagtctgtcaacgagggtcaccctgacaagctttgtgaccagatctctgatgctgtgctcgatgcctgccttgcccaggaccctgacagcatggttgcctgtgaaacatgctccaagaccaacatggtcatggtctttggagaatttaccaccatagctaatgtagactatgtgatgattgtgcgttgctcgtgccgcatcattggatttgttttttgttttttgggttttgatgc

SEQ ID NO: 41089 - DNA, 357 bp, Gossypium hirsutum
  Clone ID: LIB3189-006-P1-K1-H8
cccacgcgtccgctttgcactttcccgataatcaccaaaccaaacccaaagcttggactttacttcaagaatatcattaatatgctttttgtttgattgttttctttctttttcttttttcctaatggattcagctactctccttgatcgtgctttgtttcaactcactccaactcgaactagatttaatctggtgctattctacataggaaagaatgagtatgcttgcttctgggctttttgaacccttcatttgtcacctcaaatttgcaagagatcatatctccaaaggtgggtattcgatttctctgcagccacctgctccctctacacctttggtcaccaaggcttcttttg

SEQ ID NO: 41090 - DNA, 386 bp, Gossypium hirsutum
  Clone ID: LIB3189-006-P1-K1-H9
accatccagtgcaaggtgtgcatgcaaacattcatctgtactacaacagaagtgaaatgccgggagcatgctgaggcgaagcatcctaaatccgacctatacacatgttttcctcatcttaaaaagtagcacactggggaagtggagatggcttgtagcatgcatctatcttgtcccattggtactgtatgagtaacttcttaaaatctctctcacaaaagccctataagctctcacttggtgatttcgatgatgcaattgtcatgtcgtgttctgtctcgatacttgcttgttgcttgattttgatatgattaatgtggtaaagctggtggtgttatttgtggagctgttttttcttaacctttttttgccactttgtctatgaa

SEQ ID NO: 41091 - DNA, 327 bp, Gossypium hirsutum
  Clone ID: LIB3189-007-P1-K1-A1
cttagaaggtgtcttaataaacgccttctttcttcttcttctccctttctttgctttttcgaatttttcttaagcgagaatgagagagtgcatttcgattcacatcggtcaggccggtatccaggtcggaaacgcctgctgggagctttactgcctcgagcatggaatccagcctgatggtcagatgccaagtgacaaaactgtcggaggaggtgatgatgcttttaacacctttttcagtgaaactggtgctgggaagcacgtccctcgtgccgtctttgtggatcttgaacccactgttattgatgaagtgagaactggtgctta

SEQ ID NO: 41092 - DNA, 230 bp, Gossypium hirsutum
  unsure (1)..(230): unsure at all n locations; Clone ID: LIB3189-007-P1-K1-A10
gcggtggcacacgcggtcagtccactgtcacagcttgttcatagcgtgtatgctattagggcatcattggtgaggcttgaaaaacagatcggagtgtaagtaactttgaccccataacgtacagccctggacgtatgacatatgtgtattcttttcgctttaggcctttttggtacagttttggtaatctcgacacatacatctatttanaatattaatattttatatat

SEQ ID NO: 41093 - DNA, 396 bp, Gossypium hirsutum
  Clone ID: LIB3189-007-P1-K1-A11
cggacgcgtgggtacagatttcatcatcaccagtactttccaggaaattgcaggaagcaaggacactgttggtcaatacgagagccacactgctttcactcttcctggtctctaccgtgttgtacatggtatcgatgtgtttgatcccaaattcaacattgtttcccctggtgctgatatggagatatacttcccttacaccgaagagaagcggaggttgaagcatttccatactgagatcgaagaccttctttacagcaaagttgagaatgaagaacacttatgtgtgctcaatgaccgcaacaagccaattctgttcacaatggcaaggcttgatcgtgtcaagaacttaaccggactcgtcgagtggtacggcaaggacgcaaagttgcgtga

SEQ ID NO: 41094 - DNA, 462 bp, Gossypium hirsutum
  Clone ID: LIB3189-007-P1-K1-A12
gcggagtataaataacaaagaacaacaaaactgccgcatcgacggtagacggaagctactcccatctacgatcaccgcgaccttccaaactccaccaccaaaatgcaaaatcaaaccgaaccaccgccggaaactaactcggacaaagacgatcaagcgattgagtttgatttatcatccaccaccgctctcgatctcaccagcttccagctccacgatctcgactcggtggaattgccgtcaagccttaccgagttggaccttactgcgaatcgcttgtcgaaattggaccctcggattgcgaatctcattaacctcagaaagctctcttttcagcagaacctcatcgacgatgctgctatcgagtcgatctctagctgggactcattatctggtcttgaggagttagtactcagggataataaattgatgaaagaccagatgtcagcttattcaagaagc

SEQ ID NO: 41095 - DNA, 451 bp, Gossypium hirsutum
  Clone ID: LIB3189-007-P1-K1-A2
tgtactgggcgcccgacgtccgagactcgttgcctagactgtgaacccacttccgaaaactgcactcagacctgccctccttacataatggaatacggtttaggttccactgctgggcttctattagtagaaaaccttgctttcccccagaaaaccttccaagatttccttgtcggatgctccatcctctccaaccgacagcccgctggaatagccgggttcggtcggagcgctgagtctataccctcccaattaggcctcaagaaattctcttactgtctcgtttctcgccggttcgatgacactggcgtcagcagcaacatgttgttggaaaccgggtcgggttccggtgatgccaagaccccaggccttagctacacaccgttttacaggaaccaagtggcttcaaacccaagtttcaaaagagtctactacgtaactcttacgtaaa

SEQ ID NO: 41096 - DNA, 507 bp, Gossypium hirsutum
  unsure (1)..(507): unsure at all n locations; Clone ID: LIB3189-007-P1-K1-A5
cgcctgcagcaccgctccagtattcgggtggcgacccacgcgtgcgcacacgcgggcggtctactgttactctgaaattatagctggacatagaggaagagcagctcagctagtctataaagggtcactagtaatgtcaggaactcagaccccaaaacctagcacactggctgtaacggccagtcgggagtgcgggaacccacacctcatcataaggaaatattgactgatctgttgcaggcagtgctttcgtagcaatgccaaggaaattggattcattaagtaccgctgaagaatttatgttgggaagaactttgttagagtatgagcctttggtaatgtgattattgaattagaaggataatgtttattgttttcagtctggacatctaaagtggttgttgaactaaggatactttggtgtttctcaatcaagtaatcatactggtttttttattnnannatataaatattatttttatttttatttttttttttattattata

SEQ ID NO: 41097 - DNA, 173 bp, Gossypium hirsutum
  Clone ID: LIB3189-007-P1-K1-A6
ggtgaggatattcagccacttgtttgtgacaaatgaactggaatggttaaggctggatttgctggggatgatgctccccgagccggatggcctagcatcgttggtcggccacgtcacaccggtgtgatggttggcatgggccagaaagatgcatctgtcggtgatgaatctta

SEQ ID NO: 41098 - DNA, 402 bp, Gossypium hirsutum
  Clone ID: LIB3189-007-P1-K1-A7
ccagtcccagaactcgtcggctgccttcgcactgctcgagctgctcccgcggcgagagcggttcgccgcgtgccgggcggtggacggactgggaacggctccctcggtggcctttctcgggcgactaacagtcgactcagaactgttactgacaaggggaatcctactgtttaatttaaacatagcattgcgttgtgtcctgttgattgctacgcaatgttatattttctctagttgctctttattgttaataataatttataatttaattcgttctctgttattatccctcttcttctaatatattctctcttaatctatatataataatttatttttttttacttaaaatactattattattttcatattcttattcacttataacttcaaactttatta

SEQ ID NO: 41099 - DNA, 357 bp, Gossypium hirsutum
  Clone ID: LIB3189-007-P1-K1-A8
ggtaaaaaacatgaaacatgaggggattctctaatgaaaattacaagacaagtaacagttgttcataatcttcaaactctgaataaataaataaatacctatattattcaaatcaccacaaatggttaacacttaatgactggccgattgatcagtcagcaatttaagtgatttctttaaactctcaactgtctttctcacttttttttattctaatgccctaatcctatttcctaacatctttgtctccacatctttttttttcatttcattcacttttttttattcaattatatatttttaataatttttttttactatctttctattatttttatctattttactttctttatt

SEQ ID NO: 41100 - DNA, 124 bp, Gossypium hirsutum
  Clone ID: LIB3189-007-P1-K1-A9
atctctctctcaacgcagagcgaataggctttgtcttccaagaatctatcgcatcatcgtggttgggcttcatagaatggatgaggggcaacacccatattttcatttcttttttttttctttt

SEQ ID NO: 41101 - DNA, 443 bp, Gossypium hirsutum
  unsure (1)..(443): unsure at all n locations; Clone ID: LIB3189-007-P1-K1-B1
atcataaaaaggaaagaaaaaaatgaagctcttgtttctaactttgctgctttgttctcttcttctatgttcttcagtttttgcaccaacaatggctcagcctcgttcacctttttgtgaagggaaatgcaaagggaggtgcaataaagcggcggtttgggatcggtgcttcaaatattgcggcatatgttgcgaggagtgtcaatgcgttccgtccggtacttacgggaacaaacacgagtgtccttgctacagagataaggtgaacaacaagggcaaacccaaatgcccttgaaaatgaaatatattcgagttcgggatttaatcaagcttaaagatcgaggacgaagaggccatatatatatatatatgcatgttgatgatgatgntattataaaaataaacttgttttgttggtggtattttcctttggggtttggggt

SEQ ID NO: 41102 - DNA, 400 bp, Gossypium hirsutum
  Clone ID: LIB3189-007-P1-K1-B10
gttctagatcgcgagcggccgctcgcgttgtcttcgaggctgatatcttcgtcaccacaaccggtaacaaggacatcatcatggttgatcacatgaggaagatgaagaacaatgccattgtttgcaacattggtcactttgacaatgaaatcgatatgctcggtcttgagacctatcctggtgttaaacgcatcaccattaagcctcaaaccgataggtgggtcttccctgaaaccaaaactggcatcattgtgttggctgaaggacgtctgatgaacttgggatgtgccactggacacccaagttttgtcatgtcctgctcgttcactaaccaggtgattgcccagctcgagctatggaaggagaaggcaactggaaaatatgagaagaaggtttacgt

SEQ ID NO: 41103 - DNA, 382 bp, Gossypium hirsutum
  Clone ID: LIB3189-007-P1-K1-B11
gcggactaccaacttaccaagctcctaggactgagacctttcgtgaagaggatcatgatgtatcagcaaggctgattagctggtggaaccacacttcgaatagccaaagatttggctgaaaataacacggacgctagtgttacagtgaaatgcatatgcaccgccttgagacctatcctggtgttaaacgcatcaccattaagccttaaaccgataggtgggtcttccctgaaaccaaaactggcatcattgtgttggctgaaggacgtctgatgaacttgggatgtgccactggacacccaagttttgtcatgtcctgctcgttcactaaccaggtgattgcccagctcgagctatggaaggagaaggcaactggaaaata

SEQ ID NO: 41104 - DNA, 412 bp, Gossypium hirsutum
  Clone ID: LIB3189-007-P1-K1-B12
ggaggatagaggagagagatctctgcgaataatccatggcgggcgattcagagatgaacccagagcaggtagaagaagagttcagcgtatggaagaagaacacccctttcctttacgatctcgtcatttctcaccctctcgaatggccttctttgactgtccattgggttccttcttctcccactccttacggacctgaccctacttttaacgttcacaaactcgtcctcggaactcacaccagcggcggcgcccccgattttctaatgatcgccgacgcagttctccccactctcgcctctgaatccaatatcgctgctaaaaatgatgacccagttatccctaaggttgagataacacagaaaatgcgtgttgatggggaagtcaacagggctagatgtatgcctcaaaa

SEQ ID NO: 41105 - DNA, 252 bp, Gossypium hirsutum
  Clone ID: LIB3189-007-P1-K1-B3
ctgagggaagatgtgagtgtggaagtggaacttttgtcagtgaagaaaattcctctattttttgtgacgcctttaagttctggaagggggactaatgaccatgaaaatgacacagaaaaaagtagcattgcatcgaatttatcgtcagatgaaaatgatgatcaccaccaaagtaaccttgaagatttacctctgtcagttttctttccttcttctgaaggtgtacctttaatatctccttatgagaatgaa

SEQ ID NO: 41106 - DNA, 414 bp, Gossypium hirsutum
  Clone ID: LIB3189-007-P1-K1-B4
aattcttattccttttatatttttcctctccaattttccgtcactttcccgagaaaatgagagaaatccttcacatccaaggtggccaatgcggcaatcagataggagccaagttctgggaagtcgtatgtgccgaacatggcatcgattcaacgggtcgatatggtggtgactcggagctccagcttgagcgaatcaatgtttactacaacgaagccagttgtggccgttttgttccccgcgcagttttaatggatctggaacccggtaccatggatagcgtaagatccggtccttacggacaaattttcagacccgataacttcgttttcggacagtcgggcgccggaaacaattgggctaagggacattacactgaaggagcggagcctatcgattccgttctcgacgtaa

SEQ ID NO: 41107 - DNA, 331 bp, Gossypium hirsutum
  Clone ID: LIB3189-007-P1-K1-B5
ctcaatttccccatctctctcgtctctgggtctcgtaagttggtgaatagtgttgtaattagtgccaatggctcggattgggacctctgcagctcacattgtgttggcaatatttgctgtggccatgtttgttgtgtccgggaccatggcacaggatattgctccttctcctgcaatggctaccggagcaggctctgctttgccggattccgctgtcttcttatgctcttccatgttgggctctttaattgctctcttggtgcattgaattcaaagctgtgcaagactttatgacattggctacccttaatttcactctcactggtgatga

SEQ ID NO: 41108 - DNA, 395 bp, Gossypium hirsutum
  Clone ID: LIB3189-007-P1-K1-B7
cccacgcgtccgcggacgcgtgggcaatgccactaccaacagctgccctctctgttcctgcagtgttcttctccatctgtctggccgctttcttccttctcttcctccaataatccccatgtcagcagcttctgccccgcccccaccgctctccccaaattcccttccctctccaagcccaaaacccctcttcgcaacctcacccctctctccgccgtttccatcgagaaagaaaccctcatctccgagcgcccccacactttcctccgtgaagccgacggaggagatgactgttccgtcaggtctcgctttcagcgcatgatattggaggcccaggaaagcgtgtgctctgccctcgaggctgttgacggagctggcaagttcaaggaagactc

SEQ ID NO: 41109 - DNA, 421 bp, Gossypium hirsutum
  Clone ID: LIB3189-007-P1-K1-B8
cccacgcgtccgcttaaattttgttcgtcaatggcgaattcccagttgcagaaatacgggacattatcaagggagcaattgtcatatctatttgatcgattctctcttcttattgcccagccagattttaagaagaggattctagacgctgtgaatgacaagcaggaaccggttgctgttaccacggcagttcaggaagagatatttttggagatgggtgttgatccaagtttcggtcttgcatgcctggggaaagtaaatatgacttacgagaatgatcaagatttgatgattcgttattatagatttgttgccaatgaggagttagcctgtgatgaagctgagcttggacctgagggatttgctgaaaagcttcatagtcaacaaaaacttcatgagcaagatctgtggatgctaaatt

SEQ ID NO: 41110 - DNA, 444 bp, Gossypium hirsutum
  Clone ID: LIB3189-007-P1-K1-B9
gattggcagcttggaaatttgcttgcctgttaatctctgtcgaagaagatggtttccgtttagatccagcaaaaatacagttttcgtaagccttctttgatcctatattcctagtcaatacaatctgcagttttcagaaatactagtaatttagaaaaaaatggcttaaacggggggtctggtgcccataacaagggcgtgtcttgcttgttattacgaaaagtacccattcgatccactcccagacgacgtgtctcgtctttcctctcagattcggtctttcatccaggatttgatccatggcttatcctcaactcatggtgatagctttttaattcaagatgcattttgtcagccttctgataaaatggatgataacatttggtaaatttttgattttttggactatttttgttttaattaaatgactttatttgctcttat

SEQ ID NO: 41111 - DNA, 438 bp, Gossypium hirsutum
  Clone ID: LIB3189-007-P1-K1-C1
ggtacatgttcgaacccgggacctgttggatcgaatgacattggaggaaaagatcggacaaatggtccagatcgaacgcagcgttgcttcggccgacgtgatgaacaagtatttcattgggagtgtattgagtggaggagggagtgccccttctccacaagcttctccagaggcttggataaacatgatcaatgactttcagaagggtagtttagcaacccgaatgcagatccccatgatttacgggattgatgctgttcatggcaacaacaatgtttacaaggcaacaatttttcctcacaacattggtctaggtgctaccagggaccctaaactggttaagaaaattggggctgcaacagcacttgaatctagagcaactggcattccatatgttttcgcaccttgtatagcggtttgccgagatccgagatgggg

SEQ ID NO: 41112 - DNA, 386 bp, Gossypium hirsutum
  Clone ID: LIB3189-007-P1-K1-C10
gttctcacttaacccgtttgcctccggcatctttccactcatggcttcggagaaagaagctgcccttgctgctgctccctctgattctcctaccatatttgacaaaatcatcaacaaggaaatcccagctaccgtggtgtatgaagatgataaggtcttagctttcagggacatagctccccaggctcctacgcacattttaattattccaaaatcaaaggatggcctaacgggtttgtctaaggctgaggagaggcactgtgaaatccttggctgccttctttatactgcaaagcttgttgcaaaacaggaagggctggaagatggattcaggattgtgatcaatgatggccctaaaggatgccaatctgtgtatcacattcatg

SEQ ID NO: 41113 - DNA, 186 bp, Gossypium hirsutum
  Clone ID: LIB3189-007-P1-K1-C11
aacttccctccaccccccagtttcgctgttcatttacaatggcgattgtgaatatggagatggctgtggttatcatggcagcgacgctcctacggaaattggcagcatcacaagtacaccatgtggacgtaggtgaccgtgtgaggaaccttacgtctgacctgtcatgttcagtccttccgtagg

SEQ ID NO: 41114 - DNA, 366 bp, Gossypium hirsutum
  Clone ID: LIB3189-007-P1-K1-C12
cttcagtctttacttttcgagaagctatgacccttacccttttcctttctcctacattcttagagacaggggttataataaaagacggaagctatgtgggctgttccaaggcgaagagtttcttcttcttcagttttgggccaatcatttcggattgctcgaccttcacgttgttacagttcttcctcaaatgaggcctatgcaaagactttagtttctagaaaagggacatcacatgttgcagggattgtgggttctctagggtttccatttggcccaaggcctctaagggacgagatttcatttgttcaaagatatcctccaatatatcgccgcactaggtcattttctgctgatagtggtgaa

SEQ ID NO: 41115 - DNA, 351 bp, Gossypium hirsutum
  Clone ID: LIB3189-007-P1-K1-C2
gggccggtatgatcttctaccgcaaaggaccaaagctcttcaaagaagggccaacctgaaggtgcggtgtatgattttgaagacaaaatcaattttgcggatttcccatcccttcagggtggtccgcacaatcaccagattggtgctttggctgttgccttgaaacaatccatgtcacccgggttcaaggcttacgctaaacaagttaaggccaatgcagttgccattggaaagtaccttatgagcaaaggataccagcttgttacaggaggaaccgagaaccaccttgttctttgggatctacgaccttttggattgactggcaacaccgttgagaaactttgtgacctt

SEQ ID NO: 41116 - DNA, 427 bp, Gossypium hirsutum
  Clone ID: LIB3189-007-P1-K1-C3
gggaattacgagaggaaactggagttgagtctgctgaaattatcgccgaggttccgacatggttgacatatgattttccaactgcagtaaaggccaaagtgaatcgactctggggaggcgaatggcacggaaatgcgcagaaatggtttcttatgaaattaacaaaagacgagagcgaaatcaacttagcaaccggagaggtagaaccggaatttgccgagtggaaatgggcaactcccgaagaagtagttgagcaggcagtggattataaaaggccaacatatgaagaagttatgaagacctttcagccatactttagtgataatggcaaagccaccaaatgtaaatcaacaaaatggtgaatgcaatggtcgtaaaagttctatgaagaatctatattaagagttggatcgtattttgttatttt

SEQ ID NO: 41117 - DNA, 66 bp, Gossypium hirsutum
  Clone ID: LIB3189-007-P1-K1-C4
gcgggttgttccattcggctttggttgtcggcgttattttgtggatgtggggcaaaggtgatggag

SEQ ID NO: 41118 - DNA, 347 bp, Gossypium hirsutum
  Clone ID: LIB3189-007-P1-K1-C5
cggacgcgtgggcagaaaaatggtgaaagcagtgtctgttcttagcagcagtgaaggtgttagtgggactgttttcttcactcaagagggagatggcccaactacagcgacggggaacatttctggtcttaagcctggcctccatgggttccatgttcatgccctaggggacacaacaaatggttgcatgtcaacaggacctcacttcaatcctgctggaaaagagcatggtgctcctgaagatgtgaatcgccatgctggtgatctaggaaatgtcactgttggtgctgatggctctgcgagtttctctattgtcgacaaacagattcctctttttgggccacact

SEQ ID NO: 41119 - DNA, 459 bp, Gossypium hirsutum
  Clone ID: LIB3189-007-P1-K1-C7
cccacgcgtccgagcaaatttcacaaaaacaaattcaaacccaaaacctgaaatcccaatattcgcccacccatttgcaacgatcaccttgaaaatcacatatccatggagtttaattgctcatctcctaccaccatccctgtggtttcaacttttgcatctccctttgacacttctgccgctgtcaatggctcagactccacgtcaaccaggaagcccatcagcctatggccaggaatgtaccattcaccagtaaccaatgctttatgggaagccaagtcccaaatctttgagagactccttgacccaccaaaagatgcacccccacagagcgagttgctcaccaaaaccccttctcaaagcaggaccagcattcctttataattatcatcagactacaatttgagagaacagtacaggggatccctggaatgaagttagaattgggaagttgtttga

SEQ ID NO: 41120 - DNA, 338 bp, Gossypium hirsutum
  Clone ID: LIB3189-007-P1-K1-C8
caacccccatcccttcattcattcatatctgcttttctttacgtttgttcattcgattttttctttgggttttctttctttttgatccttttgctattttgggtggtgaaagattgaagaattttgatcatgtcgatcgcgttggaacggatagaatcggcggggtacgggcgggtaatgaattgcgcttgcgatagctctaaattcgaatcgccgacgacggtttaggaagcgaagcatttgttactagtggccaattgctttttgtgaagacaagttctataatctattagagactcttttctctacctaatgaggctctcctatataatcttgtt

SEQ ID NO: 41121 - DNA, 127 bp, Gossypium hirsutum
  Clone ID: LIB3189-007-P1-K1-C9
cgcgagcgaacgccctattttattcatatttttttttctttacgtttgctcattccattttgtgtgttttattacatactcggggagccttacactattttatattatttaaagatttaataatttt

SEQ ID NO: 41122 - DNA, 400 bp, Gossypium hirsutum
  Clone ID: LIB3189-007-P1-K1-D1
aaaaaagagaagaaattgctctctcattgcactcttttgatcgtcgtcgtcgttattatgagttaaaatcgtttttttttaaaaccatacgaatttgccttgatttatgccctgcaattgactctttttttttttctctcttgttgtttgttttttgattgtttcgatcaaaagtaagatacggttttactaactttccgtgccgcatccaccgatgccagataatcggcaaattcagaacaatgttgtttcgaatcaatccgctgatagcattgaagaagcaattttgcgtttgaaaataaatgataataatcaagaggtgggtggtttctaaatcagtctcgtatcctgatcgtcctggtgaaccggattgttcttattatttaaggaccggatcatg

SEQ ID NO: 41123 - DNA, 380 bp, Gossypium hirsutum
  Clone ID: LIB3189-007-P1-K1-D10
cggacgcgtgggcggacgcgtgggcggacgcgtgggcaggcatgcttgctcctggtgatattcggaattgtgcttctgatagtgatcatagtactggcagcctaatcagaaagtcgtccaagatgatcaagggcaaactcaaaagatcttcccagcagcaagaatgtggtcttctgagtaatgtgtttgacgtttgtttgcaagacatgatggctgactcgaattcgcttaatagtttttcaagtatatagcatgtgattatcagtaaatcataatgatatttttggttaatctttggcggagtgtctcttttctaagttggtgttttggtttttttggtgaggatgtctttacagctttcgcgttgaaataagagttgc

SEQ ID NO: 41124 - DNA, 362 bp, Gossypium hirsutum
  Clone ID: LIB3189-007-P1-K1-D11
accgtccgattcccgtcgacccacctccgatcctgatgatgatggagctggaatgcattatttaatgattcaaactatgagggtgatcaaatgtctgtgataggacatgactgcagctatagaaagtcgccaagagatcaaggcaaactaaaacttcagcacagaatgtggctttggtatgtgtttgacgtgttgcaagacatgaggtgctcgaattcctaatagtttaagtatatagcatggattatagaaatcataatgatatttggtaatctttgcggagtgctcttttctaagtgggtttggtttttgttgaggatgtctttccagttcggttgaataagattgaattttttgtcttt

SEQ ID NO: 41125 - DNA, 417 bp, Gossypium hirsutum
  Clone ID: LIB3189-007-P1-K1-D12
cggacgcgtggggtaggtagtagaatcaatctgaaatcaaatctttcagttttagaactctttgtctctgaaaagctatgtagtatggagtctagtctagataggcacataactcaaatacacctttctttctcgattcattcattgggcgggcggccgaataaaccaaaacccaatcaggaaaacataataaaagaaaggggctgttgagatttgagaaagcgaagcagtcaacaaagctaaaaagaaaaagaaaaactcagaggaagaagaagttaaaaggaaggggtaggtcgggcatcttgatttggtttcctccacctcaagccttccatgctcccctcagccaacaacagccctaccggaatccaccactttggcggcggcggaggaggattctggtccgctgtacccatg

SEQ ID NO: 41126 - DNA, 406 bp, Gossypium hirsutum
  Clone ID: LIB3189-007-P1-K1-D3
agtagtaatatctatagcatacagagatggagaggcaaagaagcaagcaggtttgtttgttgatgtgggttttggttgctgccttgttctcccacaatagggtcattgcagtgacctccactggccttggtgagcagaaaaactactatccagctcctgaccctcatgctggaactcccccttcaggttcacatggcacaccaccatcttcaggaggtggatcacctccctctcatggaaccccgtcacatggaggtggttaccacccttcaccaacaccaataacgccttcgggtggaaattgtggaactcccccacatgacccttcaacttcatcaacaccatcacacactcctcctcatggtactccaccatcatctggaggtggtagttcccccatcgatgg

SEQ ID NO: 41127 - DNA, 311 bp, Gossypium hirsutum
  Clone ID: LIB3189-007-P1-K1-D4
agacaagagaggtatggcgatttcaaccacagagtcgaagaacccatcacattcgatccgtgagaggggactcccaagaaaagtaaggctgctaaaatactataacatgcacataatacttcttaaatagaaacctctttaatatccataagccacaatataaaaacactaaaaagtcagatcctctaatttggtttctcagcttcattctccaatggcagagcacaaaatgtatattattcaaacagagcttgtaaaccacaaaataccacgagaactatggatctctatacagggaaagatctacaatg

SEQ ID NO: 41128 - DNA, 387 bp, Gossypium hirsutum
  unsure (1)..(387): unsure at all n locations; Clone ID: LIB3189-007-P1-K1-D5
cgtccgcatgatcacagagagtcctacactgcgtctgagatacaactcttttcagcgttaaacaaataatggaggtttctctgtatatgcacgagcctagaagaagagtgtgagaagtaaggggaaaaggttnnctctctgcaggaatttggctcgaaggggggcactggttaggtatacccgagnnntttgggtcttaattacctgcaagggatctctcaaagcaannatggttggtctaactnnnaagctcttgatctaaagatcttgaaccaaatctgcttggaaaggaggaaatctggagagcataatntgaggggaacctcctatgctctttacaaagagaaaaaccttcttatagctttcggggtgtgggagatgatctac

SEQ ID NO: 41129 - DNA, 352 bp, Gossypium hirsutum
  Clone ID: LIB3189-007-P1-K1-D7
cccacgcgtccgatggttttggaagtagcaaacatttataccatatttgcctgaaactctcaggctttagataggtactacttggggtgcagtaaaagaagggggaaaaaacaaatggcggagcagtttttcgtgcctgctcttgatcatgtgctttgcatgcgagttattatgatgggtatcgagtcttgttcttgttgtggcagtttttcgaatgtaaaatatctttgtatttatgattactttatttatgttattttttgattatatttgatatttatttttaattttttttataatattaattttttatgtttatttttattatttgtttattttattttttttttta

SEQ ID NO: 41130 - DNA, 272 bp, Gossypium hirsutum
  Clone ID: LIB3189-007-P1-K1-D8
cgtccgattcccggtcgacccacctccgatcattaaagatgcaacagtagtaatacatttgaggggaacgatttggatagaatcttgcaggccactagcagagacgggcgtgctatatgtcatctggcagggagccctcagtcgttcactttacctatcatccaagtttacatttccataattctactgctacaagaattaacaaagctgccaaagtctaccacccactttgcacctgggactgttgctatggccatttctaatgtaaaatt

SEQ ID NO: 41131 - DNA, 411 bp, Gossypium hirsutum
  Clone ID: LIB3189-007-P1-K1-D9
caaagcattagcaaccatagccatggcttcctcaccaaaactcttctctatgtctatcctcttgctttttgccctcttctccatgcaaatccatgctagagagtacttcagcaaattcccaagagttaacaccaatgagaaagagacaacaaccagagagcaagagcacgagaccttcgttccccagaccacccaaaagccagaagagcaagagccaaggttcatccctgaaacccaaaatggttatggcctttacggccacgagtcaggctcaggctcaggctcaggctcaagccggcccagtttcaccaccaaagaaacctatgaaccctatgtcacccctgttagattccaccctgatgaaccctataacagcatttctcgaatccttcaacaataaagacacttact

SEQ ID NO: 41132 - DNA, 426 bp, Gossypium hirsutum
  Clone ID: LIB3189-007-P1-K1-E10
taataacaataattctctttctgtttctctggtttaaacatgggtatgggtttaaggaatggatttcttttgattttatcttgtgttgttacactttccctctcagttttggggcgacctgccactttccttgaagattttagaatcacttggtctgattctcatattaggcaaatcgatggagggagagccatccaacttgttctcgaccaaaattcaggctgtggatttgcttctaaaaggcagtatttgttcggacgtgtcagcatgaaaatcaagctcatccccggcgactccgccggaacagtcaccgccttttatatgaattctgttacagatgctgtgcgagatgagctagacttcgagttcttgggaaaccgtaccgggcagccatatacggttcaaaccaatatctatgcccatgga

SEQ ID NO: 41133 - DNA, 451 bp, Gossypium hirsutum
  Clone ID: LIB3189-007-P1-K1-E11
caaaaccaagtagatatttctttcaatggctggaattgctactacttgttattatttgaccctctcttctacaagcactaggaaaacctggttggaattaaagaccaactatggaagagccacacctatccggagaagaaacttaagcattagagctgaagtcaattttgtaaatgctgaagaagccaaaaaacttatagctgttgagggttatgccgttctcgacgtccgcgataaatctcagttcgatcgagctcatatcaaatcatgttatcatgttccccttttcattgaaaacacagacaatgatcctggcacaattgttaagaggactttgcacaataacttttcaggcttattctttgggttgccatttacaaaactcaatcctgaatttgtacagtccgtgaaaagtcagttttcgcccgaatctaaattgttacttgtatgt

SEQ ID NO: 41134 - DNA, 489 bp, Gossypium hirsutum
  Clone ID: LIB3189-007-P1-K1-E12
ggttttcaggtttgccattcactgggaggtggaacagggtcagggatggggacattgttgatatcaaagatcagggaagaataccctgaccggatgatgctaacgttctcggtgtttccatcacctaaagtatcggatactgtggttgaaccctataatgcgaccctgtcagtgcaccagcttgtggaaaatgctgatgaatgcatggtccttgacaatgaagctctttatgatatctgcttcagaactcttaagctcacaaatcccagctttggtgacttgaaccatttgatttcaacaaccatgagtggagtcacatgctgccttcgcttccctggccaactcaattccgatcttcgaaaactagcagtaaacttgatcccattcccacgcctccattttttcatggttggttttgcacctttaacatcccgggttcacaacaataccgagctttaacgatcctcgagctaactcaacaaatgtggg

SEQ ID NO: 41135 - DNA, 476 bp, Gossypium hirsutum
  Clone ID: LIB3189-007-P1-K1-E2
gttttaaatttgatcttctcttccaaaatcaaatccaaaaagagagaaaatcccaccaaaaaaatggcgatttctaatgacaacaacaacgacgagcaccatgaatcgagtcctcttttgagcaaacaagtggcagaccaagatttgaaggagaaaccaagtggtaaaaaggcaaaagaagctgccgccgaggtgccagctcatccggtagttgctaccggagatgggtttgggtggacagctgatgggttgccgttggtccaccggagtgtcgtcggagaacccttgggtcgatctcaatggaactcatctctccttgcttgtcttggccgtaacgatgaattttgcagcagcgacattgaagtttgtctccttggaagcttggtcccttgtgtgctatatggaaccaatgtcgaaagacttggatctgattctgggacatttgcgaatcactgctggccatactcgggttttac

SEQ ID NO: 41136 - DNA, 265 bp, Gossypium hirsutum
  Clone ID: LIB3189-007-P1-K1-E3
gttgcattttatcaacaacaagaaggccgccggtcagcgttgaacccatcgcctgtagattcagaaatgaattgaattcgattcgattaggtcagatcggatctcccaacacaagcatagacttgatccgctgctacgtttctctttctctacgtagaagctggtttctggttaaggggatcgaatttataaactatgggagattgggtcattggagcattcatcaacctctttggcaggattggcaataactttgggacaaacc

SEQ ID NO: 41137 - DNA, 398 bp, Gossypium hirsutum
  Clone ID: LIB3189-007-P1-K1-E5
gaccacgcgtccgatttaattcacttcctttcttttaatcccaccttttttactccagattttctctagaaccatgcgtggagatggcttttctcatgccttcacctgaaatttccaccgcctctgcaaaatttttctctaaccctaccccccgccctaaatttctcaagagctgcgcgatttcgaagaacgacgacgagaaagtttggtcaaggaccaacgctagggtcggtgttaaagatgccggcagtacggtttcgtgtttgagccaaaacttgaggttgtacgtacaattttcggctccggtgaagcgaggatcgaagcccatcatagagtgagaggagatgcaggattattacgtgaatatgggttacgctattcggaccttgagagaggag

SEQ ID NO: 41138 - DNA, 303 bp, Gossypium hirsutum
  Clone ID: LIB3189-007-P1-K1-E6
cggacgcgtgggcggacgcgtgggctgaatgattattttgagaaagcacttgacgatattttgaatgttattcctcgggataggcacacgtatttgttttcagcaaccatgaccaaaaaggtgaagaagctgcaaagggcatgtctgagaaatcctgtgaagattgaagctgcctcaaaatattctactgttgacacattgaagcagcaataccggtttatacctgcgaagtacaaggattgctatcttgtttatattttgactgagatgtctggatgtacatatatggttttcaaattaact

SEQ ID NO: 41139 - DNA, 274 bp, Gossypium hirsutum
  Clone ID: LIB3189-007-P1-K1-E7
tccaaacaaattttcgcgagaaaatgattcaatctctgtgatttttttttacaaaactctaacggggcaagacacagtacgatgaggtcgacctacgacctcctcttgaacttacaaaatcgaaagctttcctcatttctttcatggaaaatccagaacaacgagaccaagacaaaaccctaatttgcgacccgacgcaaatcaatgcaacacatgaaaatgagaaaataatctaatgggaagatttcgggcttgagcttgctagattgtggag

SEQ ID NO: 41140 - DNA, 452 bp, Gossypium hirsutum
  Clone ID: LIB3189-007-P1-K1-E8
atttgtattaagaatcgccctttagtgatcagtgtggtgaagaaaaatgtcttgctgtggtggaaactgcggttgcggctgcggtgtgcaagtgcggcagcggctgcggcggttgcaagatgtaccctgagatgaactttgctgagcaaaccacaaccgggacacttgttcttggcgtggcaccccggaaagcgcactttgatggagctgaaatggaaactggggctgaaaatggctgcaaatgtggagataactgcactcgtaacccttgcaattgtaaatgagaaaataaagctaagcatattatggaagctgatcttaataatatattatgtatttgggtttttctattttaaattattttttattatttattttgttcatcttttttttttttttttcttttagtattatcattttgtttactaattatttttattattttttatatt

SEQ ID NO: 41141 - DNA, 373 bp, Gossypium hirsutum
  Clone ID: LIB3189-007-P1-K1-E9
caacaccttttttcaatagcttcatttccaccactgcaacaatgccacatttctctaattctgtgcaagcttaagtatgtcaagcttggctaccaatatctcgtcaatcatattcttacacttactcttatacctgtcatggctggtgttcttattgaggttcttcgtttaggccctgctgagattgttaatctctggaattcccttcattttgatcttgttcaaatcttgtgctcttgtttctttattatctttgtagccactgtttacttcatgtctaagcctagaagcatttaccttgtggattatgcatgctacaaacctcctgtcacttgtcgtgttccttttgctactcttatggagcacttcaggc

SEQ ID NO: 41142 - DNA, 472 bp, Gossypium hirsutum
  Clone ID: LIB3189-007-P1-K1-F1
gtctgttatagtaaaagctagaggcaccaaaaaaaaaaaaaaaaccatgggaagatccatttcctgtttcaaaatcatcacttgcggcactgattcagctgataaaaacgacgacgttatcgatgttcctcaggacaagagatcgagtgacaaaaagggatggagtttccggaagagatctgaacggcatcgggtgcttagcaacactgtggtacaagaagcttctactggactggaggaaagtcctgaaactgctagttatgttcaacagtctgatgtctccgttgctcctgagaaaacctccaccgttcagtacaccgaagagaaacttcagtcagtggcaccaaaagattacgttgaagaaaaatctcaattattgacccaagaggacttgaaagtgcccgaacctgttgttgctgccacgaatgaggctaaagatgattctaacgtggatgaatccgtttgtgtagtc

SEQ ID NO: 41143 - DNA, 432 bp, Gossypium hirsutum
  Clone ID: LIB3189-007-P1-K1-F10
cggacgcgtgggttgcgatgcggcggcgtctttctctcacaattgtcagatagcaataataaaaacgggcggttggtaattgggggtttgggctgggggagagagccattccttggtcgtctccattgcagcagcaataataataacagcaactgcgatgcgaaaaagggtgtccccgattcaaactatgtagtgcccctggagaagtctttttcgccttccaactcctcctgcatcactcgccctcttattgaaatcctgcgcgacctcaataagcgtatacctcataacatcatcaagtctccgcctaattcttccactttcctcccctggtaccatgccaatcgcatgttgagcttctacgcccctgggtggtgtggagaagtacgtgatgttttttttcgccaacattggaacctttactggttgtgt

SEQ ID NO: 41144 - DNA, 299 bp, Gossypium hirsutum
  unsure (1)..(299): unsure at all n locations; Clone ID: LIB3189-007-P1-K1-F11
gcatgcatgattngtagatatgcacatgagcatagtgtgccagcgggaaatagagttacgaaacaatgatggcaaggggacagcatatggagaagccttccggacattacctgtactcttatgttagcgagctgcgatgcataaaggtgtcctttaaactattattgcttggagagtttttcgtttcacttctctgatactcgccctttttgtaatctgtctactattagctatcttatacatattaagtttctctatttgtacttctcttggtcatgccatctttgttgagttttatt

SEQ ID NO: 41145 - DNA, 405 bp, Gossypium hirsutum
  Clone ID: LIB3189-007-P1-K1-F12
cccacgcgtccggattggtatctgaaacattatctggaagtgtggtttttaatgatgcaatcattcagttcgcagctgacacccttccatttgggggcattggtgaaagtgggataggaaaataccatgggacattctcctttgacacatttacacactacaaggcagtggccagaagaagcttactcactgatttttggtataggttccctcatggaacaattacaaactggaactccttgagaatacttacaattaccattattttggattgctgcttgtcattttggggttgaagaggtctagaaagacttttctcgtcaactagtactttcagatatatacatatacctctttatccatgcatggctatattataagcaacatttaaatgttggtaacgat

SEQ ID NO: 41146 - DNA, 439 bp, Gossypium hirsutum
  Clone ID: LIB3189-007-P1-K1-F2
ccacccgtccaggactttggtggcactgtaaacagtattatgcattgaacataactaatttaaggtcctaactggatggtaacctcctggatcggtgatggaataagtactgggtaaacacccttttttcttaaccttttttgggtaatggagattatgttgcaggacaaatttcgaatttagctgaaaagctggagcaagcagagaaccaactggctcactctcgcattggcccactaggaccccctcgaaagaagttgcaggaagaatctcagcttgctaagattactagagatagtgcaaagataactgtggagcaagtccatggtttaatgtcacaggtcatcaaagacattcttttcaactctgtacgacagtcgagtaggtcccagaacgatcagtctggtcctgagcctatgattgaaacctaattctaaca

SEQ ID NO: 41147 - DNA, 278 bp, Gossypium hirsutum
  Clone ID: LIB3189-007-P1-K1-F3
cccacgcgtccgcgcctttctttatttatgttataataataaaaaggaaaataaaatcttctcgtgtggatctattggcttataagtgagtgtaagaaggaagaaattagaaaaagaaaaatggttctctgataaaaatttccgtttgtttcctgagcaaatctcgggaaggaataccctttttttccccctgatgtaaactcgatgtgattgtgaagctttctttaaaagaatcctagttaactcgactcgtgtacccagaaagtggtgatgatgtc

SEQ ID NO: 41148 - DNA, 360 bp, Gossypium hirsutum
  unsure (1)..(360): unsure at all n locations; Clone ID: LIB3189-007-P1-K1-F4
tnnccatgggaattagtcatgtgaagtgttcttataaagggaaacaccaactgctatagcgtgtaatacaattaacatggaattaaatagtaatgatgtcgtccacaaagggcaattgagattttacaacttaaaatgacaatacctccattatatctcacacagatgggaaatatttgtttaggttgaaggggagggaataaaattcttcactcctcgaatcacccttgaaggatcggaacttgtcccaccagtgcttacccctgtccttcctaatcccactgtccttgcggtgcaatgtgttttcgaggaaaaatgccaagcattccgctacgaacgcttccgatgagaatggcacat

SEQ ID NO: 41149 - DNA, 411 bp, Gossypium hirsutum
  Clone ID: LIB3189-007-P1-K1-F5
aaagacctgggatacctccttcacaccccaacatccctactgcttcattgccttattcgcaacgagatgattggttctcgtcccagtgctcaacatggagcacccagtcattctaagtctttatctcagcccaccttcttctcccttgatagattgccgccatggtgccctcccccttatcgagatcctcctgtctcgtctgcctcagatcctgcttcaaatgatgtttctatggaagaaaggtttgccaattctaatgctaggtcctcacttccttcacctgttgctggaggatgtaatgaatttcgcattggcgagagttcaagtctacctccgcgtaaaggacataggcggtctatcaacgatgttccattaggattcttactatgattcaatctttgcctaatctat

SEQ ID NO: 41150 - DNA, 426 bp, Gossypium hirsutum
  unsure (1)..(426): unsure at all n locations; Clone ID: LIB3189-007-P1-K1-F6
ggtcgaccacgcgtccgattgctgtgcattgctattgcaggagttttgggtttatgctcctagtaatcctcctacgtctacgccggcgccacccacaccaccggctgctactcctcctccgacgactcaaccaccgcctacaccaaccgccactccgccaccggtttctactcctcctcccacttcatcaccgcccccagtgacagcttctccacccccagtttcaactcctccacccagttctcctcctcccgcaactccaccacctgcttctccacctncagcttctccacctcctgcaactccacctncagcttctccacctnccgccactccttcaccagcttcttcacctnccgccactccaccaccagcaacccccccacctgcaactcctcctgctaccccaccaccagctccattggc

SEQ ID NO: 41151 - DNA, 214 bp, Gossypium hirsutum
  Clone ID: LIB3189-007-P1-K1-F7
ttgagacagaaggcaaaagaaaaaaaggaagacatagtgggatttttagtttggttttgagagggcgttctgctctatgattgggggtgggaaaggcgtcgatcggaaagagaagggaaagcagcagccgacatggaggatattttcattgaaagaattacattcagctaccaataatattaattatgacaacaagcttggagaaggaggattt

SEQ ID NO: 41152 - DNA, 312 bp, Gossypium hirsutum
  Clone ID: LIB3189-007-P1-K1-F8
cttaaaggtaaaaaggcaaaatcccatgactcaagttccagttccagctccagctcgagtgccagtgattctgaatgaaaaaacgacaaaaagaaagaaaaatatagtttggcatttccagttttattctaaaaatggttctttttcccctttcctttacaagaaacgaatttttaggtttcctagtttggttatcatcatgttttgttgattgattgattgagttattaaagaatgagttatgggttgatttggtatatcttttattggtagagccaatgctatttgttgagtataatttctttttttttc

SEQ ID NO: 41153 - DNA, 397 bp, Gossypium hirsutum
  Clone ID: LIB3189-007-P1-K1-F9
gcccaccgtcgcgttttggccccgtttatctttctggacccatggaactctggatccaagtctcaaaatatgcgaatgggggtgcccatgatgtgatctggtgtcttgaaaaaggtaatgatgcagatgcgctgttgtactgttaaggtcaagttcattttttttttctatttatttatctattttttcttttatctatctcttatttatatgtatctttctttttttttttccatctttatttttttattttactattttatcatccttaattttatttttttatgttttttatattattttttattatctttattatgtaaattataattaatttttatatatttttttatttcatttattttaattttatttttttttttattattttttatta

SEQ ID NO: 41154 - DNA, 342 bp, Gossypium hirsutum
  Clone ID: LIB3189-007-P1-K1-G1
cccacgcgtccggccgaccgatggttacccatgattgttcatctgcctctcacttcgactccgtgaagcggtcgatcaaggttttgttgaaccaaggagattcatgggtctcgcttaccagccccaaatcgccactgtgtttcgatggtggcgaaacaagcggaaactcgaaggcttcggaacgcaggtaagcttcatcacttttcttttttcttgttgatgatgaagtaacagaggactcgagtagataaaaaaaacaggaagagcagagagtttaaaaaaagagaagggaaaatcaccttcttttcggctaattgcttttccttgctttgcttttgcata

SEQ ID NO: 41155 - DNA, 401 bp, Gossypium hirsutum
  Clone ID: LIB3189-007-P1-K1-G10
cggacgcgtgggatttaccttgttctctgcttttgtttcagatttcagatctgatcaaagaacaaccaaacaaacaggttgcttagaagtcccaagttagagaacatgggtcgtggagtcagcagtggtgggggacagagttctttgggttaccttttcgggagcggagaagctccaccttcaaaaccaaccaacgtcacgagtactggcaccaccagtaatgaagttcctcagaagcagattgaggttgtgaaggaaactgtgcaaaaaccgaccactgcttcaccatcatcgggtgatgccaaggagatccctgcaggtgttccagggagcaaaacgaacaactatttccgagctgatggccagaattgtggcaactttcttacggagcgcatgacaac

SEQ ID NO: 41156 - DNA, 88 bp, Gossypium hirsutum
  Clone ID: LIB3189-007-P1-K1-G11
cccacgcgtccgaaaaaaaaaaaaaaaattttttttaaaaaaaaaaaaaaaaaaaaaaaagaaggggaaaaaaaaaaaggtaggggag

SEQ ID NO: 41157 - DNA, 461 bp, Gossypium hirsutum
  Clone ID: LIB3189-007-P1-K1-G12
cccacgcgtacgctctgattgatcctccaaaagaatggctcgcactatcaaagaccctagaaaggctaagagaaagaataagggctcaaaaaaaggcgatggagcatcaacgtcttcttcagagccgacaattcagccaagggtttggcaaccaggagttgatgaataggaggaaggagaagagcttcaatgtgatccttcagcttataattcacttaacgcttttcatattggatggccttgtatgagctttgatatcgtacgtgattagctgggtgcagaccggcaagattttccacatacggcgtatactgatgcagggactgatgcagagaacgctacttggaactctattggagtgttcaaagtaagcaacatttctggacaaaggcgtgagctggttcctaagaaatattccgaggatgatcctgatatggatggtgaaagtagtgatagtgatg

SEQ ID NO: 41158 - DNA, 397 bp, Gossypium hirsutum
  Clone ID: LIB3189-007-P1-K1-G2
cggacgcgtgggaaaatgggttatcttcaacaatttatcttctttattctggttgctctgccattcatgtttatttctccaactcattcctctttagctaatggtaatgttaatatattgcctcctaccaatacaagcgataaggtcacttttggctctgtactatgaaactttatgcccatattgtgccgactttatcacaaatgaccttgtaaaggtcttcctcagtgatctgtataccattgtcaatctaaaattagtcccttggggcaatgctgacattcttggcgatgaaccccattgccagcatggagaagatgaatgctacttaaatactatacatagctgtgtcatctactactggcctgatgtgaaaaagcactttgattttattcgc

SEQ ID NO: 41159 - DNA, 199 bp, Gossypium hirsutum
  Clone ID: LIB3189-007-P1-K1-G3
ttccactcgaaattcctcagattcagaaatcagaactatcttcctctctctctctaaaattcgttgtgtttctctctctagaaagaagtttccatcgtcaattccgccatggacgcagcaacgccgccgtggctcgtctactgcggtgtcgatcccctccgcttctctttcccgcgctctaacagagtatctattcgta

SEQ ID NO: 41160 - DNA, 161 bp, Gossypium hirsutum
  Clone ID: LIB3189-007-P1-K1-G5
gtctcgtgaagctcgagcacaagcagatataaagtttacttatgttgtttcatgtcaaaatttatgggtcaaacaaaaacaagaatagaaaccctgaggctgttgatattgcacttttgctacagagggaatgaaagcccttcgagttgcattcatacatg

SEQ ID NO: 41161 - DNA, 452 bp, Gossypium hirsutum
  Clone ID: LIB3189-007-P1-K1-G6
gaaaattcaagttgcagacgtaaatcgggaatccatgttgaatagactgaaattgcagccacctgatttcagcgccactttcatcaatggcgcgtccccaactaacatcagcccaaaccgtcgtgtccgtaatctccgccttccgctcctccgctacggttctccttccgtccgatcggagtatggttcagcttcgcctccgccgccttcatcattatctgagccgtcggtttctactcattatgtctcctccgtcggatctccctctctccagctctctcaatggtcccttaccaatcgccacatcctcgtgcttaacgtcgtcgcctgcgctgtggcagtttcagcaacttggctttttctctctgcaatccccgcgcttctggctttcaagagagcagccgagtcactagagaagctgatggatgtcaccagggaagagcttcctgata

SEQ ID NO: 41162 - DNA, 229 bp, Gossypium hirsutum
  Clone ID: LIB3189-007-P1-K1-G7
gtggcacttcacgtgattaccttgcaaagctgcttttctggtgtatgctattaggtcatcatttgagaggcttggaaaacagatggcatctaatttgtgttgttggattactgtaaagtaagttacgtatgacatatgtgtattcttttcgattttggtcctttttgctacagctttggttaatccgatgacatacatttgtttggattaacgagattcccactgtccc

SEQ ID NO: 41163 - DNA, 473 bp, Gossypium hirsutum
  Clone ID: LIB3189-007-P1-K1-G9
cgaggaaaaaaagagaaagaaatcgagtttccgagaaaccaaacggagcctgaagggttttcttttttgttgctaggaagatgcaaagcttaggacctttacgacctcgaagcacagtgctggtgaagcgtccttggcttactaaaccatttaactggagagcactctcgtctattcctcctcctgattactccaaccagtctcgcggtggcctgcctcgcttcttctctgaaactcttccttcttccaaggcaaaatcttctctttattcaggtattcatctcttaaccaccactcgaaatcttttttccaattgtttgcaaatttataaatgcagggcggtgttattcgcgttcaaggagatgaattttgcatatgactaaagtttaagattgaaactgacgaaggtgctgcttgcaatattccatgaacaatttaattttcatccaatttgaactgtgttttttttttat

SEQ ID NO: 41164 - DNA, 479 bp, Gossypium hirsutum
  Clone ID: LIB3189-007-P1-K1-H10
aaaagaatgaaccaaccctctttcgtaatctgaaatctgacaagaatttggattatagaactgggttttatttgtttaaaaaaaacagtgtggaaagtgagtctttttttattttctttgatcttcttttagtattctgaaacagagatggtaagtggggcaagaaccgaagggcatatctcagcgcgagtgagcaagacaatacaatcaatcaaggaaatagtcggtaatcactcggatgatgatatctacgttgccttgaaagaggccaacatggatcctaatgaaactgcccagaaattgcttcatcaagatacatttcatttagtaaggagaaagagagatcggaagaaagagagcattgggtaccaaggttccatggatccaagaaaattttctgagaatgccggtcaagtgatgaaatttcgtacatacccttgacgtggttctcgaagaggaggctattctcggaatgctct

SEQ ID NO: 41165 - DNA, 480 bp, Gossypium hirsutum
  Clone ID: LIB3189-007-P1-K1-H11
cccacgcgtccgcccacgcgttcgctcaccagtaatttgctaaatgattttttttttaacgtgtgggttcgattatcatcgaagcccgcctcaccatacggtcctttcgaaaccgttatttgcccggattttcgaatctaaatacagatatggttcgtgttgccagaaccatgggacataattcagcgcgagtgagcaagacaatacaatcaatcaaggaaatagtcggtaatcactcggatgatgatatctacgttgccttgaaagaggccaacatggatcctaatgaaactgcccataaattgcttcatcaagatacatttcatttagtaaggagaaagagagatcggaagaaagagagcattgtgtaccaaggttccatggatccaagaaaattttctgagaatgccgtcaagtgatgaaatttctacataccttgaacgtggtttttgagaggaggctattttcggaatgctctgt

SEQ ID NO: 41166 - DNA, 481 bp, Gossypium hirsutum
  Clone ID: LIB3189-007-P1-K1-H12
gaaaacaggtagagaaatctagaaaaaaattatcacaattccgtatttgaccgctctaaccacgtatttcagctatggccttctgttcgcgtttggccaattccgtgatttcttcaggaaaatcttcgattggtggcacgccagcaatcttgagggatatgcgccgatctgtttaggacttgaagatttctatactcggcgcttgtatcttcgtattcaggattgtttcggaagaccgatagcgagtgctccagatggttggtttgatgtagtggagcgctactccaatgacaataataaaacattgaagcgaactgacaagataagcaggtgtcttaacttgggatcatacaattatcttggcttcacagcagcctgaatattgcacgccccgtgtaattgattcattatgtagattttcggcaagcacttgtagtactcgtgttgaaggaggaactacaacactgcataaagaactgga

SEQ ID NO: 41167 - DNA, 358 bp, Gossypium hirsutum
  Clone ID: LIB3189-007-P1-K1-H2
attaatattactctaaccatacaatgtgggaaatactttgtattatggatctttctattttttggatatatcaacaaaaaccttttattggtaaaatggtttatggtataaactaatatatttattggtaaaaatggtactattaaaccttattcaaataaaatattaaaaaatataatttaattattaaaataatatttgaaatattaaaatattttttattaaaatagtatattagtattaaattatattaaataaatttattattaattattgaagtttttgtttaaatatattgaaaattgttatattaaaagtaattttacattaatgttttaatatttcaaatgttttaaac

SEQ ID NO: 41168 - DNA, 161 bp, Gossypium hirsutum
  Clone ID: LIB3189-007-P1-K1-H4
gtccgtctagatcgcgagcggccgctcgcgatctacgcttattcatcttcactagatggtgctcttcgggcggggaggaatttaagccccaagggctttcctaaactttgatttcaacgaaaaaaggagaagaaatccatggcctgttcgcacggttcggt

SEQ ID NO: 41169 - DNA, 320 bp, Gossypium hirsutum
  unsure (1)..(320): unsure at all n locations; Clone ID: LIB3189-007-P1-K1-H5
gaagtagtctctacaattccaacgattgggtttaatgtataggttgtacaatacaacaacatcaagtggcaagtatgggatttaggttgggcaaagtggaaatcctgcagctgttggggttgtattgtcaaacatgactgntgcatttgactattggcttttgggtgtggaggaaccttttgtctttgaaccctaccacaaagctctgcgaaagccaattgtctactatatggttggtcaaattatatcccgcctttgattgatttcagaaattcatatgttggcaatcttttttttttttttgaaatagaggagaagct

SEQ ID NO: 41170 - DNA, 124 bp, Gossypium hirsutum
  Clone ID: LIB3189-007-P1-K1-H6
agctctgcattcatttaatttcttctgctgttcaaagatgtcgtttatccgaaagtctttgccgattatcagtcggtctcaaaagctctcctccaatcattcgaggttcaatatcaaatacggg

SEQ ID NO: 41171 - DNA, 371 bp, Gossypium hirsutum
  Clone ID: LIB3189-007-P1-K1-H7
cggacgcgtggggcaaaggctgcaaagaagggatgagagagacaattcaatggtcttgttgatggctacaggaaaaccctaaaatgtgatggtattgccgggctttatcgtggtttcaacatttcatgtgttggaatcattgtttaccgaggtctatattttggaatgtacgactctctgaagccagtgcttttgactggaagcatgcaggatagtttcttcgctagcttagctcttggttggctcatcacaaatggtgctggccttgcatcttacccaattgacactgttcgtagaagaatgatgatgacttctggtgaagctgtcaaatacaagagctcgctcgatgccttctgttagatcttgaaaaa

SEQ ID NO: 41172 - DNA, 385 bp, Gossypium hirsutum
  Clone ID: LIB3189-007-P1-K1-H8
ctctaaccatacaatgtggaaaattttttttattatgtatctttctattttttgggtgtgttaatttaaacatttggtgggtaaatcttttatgttataatctatatatttattgttaaaatagtactattaaacattattcaataaaatattaataatataatttattattaaataatattgtaatattaaatatttcattaaaatagtatattgtattaattatattaataaatttattattaattattgatatttttgtttaaatatattaaaaatttttatattttaattaaatttacattaatgtttttaatattttaaatcttttaaatctaaaaatttatttttcttttaaaattaaaatattattattatatttaat

SEQ ID NO: 41173 - DNA, 343 bp, Gossypium hirsutum
  Clone ID: LIB3189-007-P1-K1-H9
cccacgcgtccgttcttgttccttccttcgccgtctattgcttttagttgcctcgatttcagagggaatcataatgggtaaggaaaggactcacattaacattgtggtcatcggccacgtcgattctgggaaatcaaccaccactggccacctgatttacaagcttggtggtattgacaagcgtgtgattgaaaggttcgagaaagaagctgctgagatgaacaagaggtcattcaagtatgcttgggtgcttgacatgctcaaggctgagcgtgagcgtggtatcaccattgatattgccttgttgaaattttataccctctaaatacctctgcactgtgat

SEQ ID NO: 41174 - DNA, 343 bp, Gossypium hirsutum
  unsure (1)..(343): unsure at all n locations; Clone ID: LIB3189-008-P1-K1-A1
gtacgcaaaaaatcaaaaccctaactngctcactctctgcatatttattcctaaccctatccgcttctattacctgttttcaatctcacgcatttgtgtcaaaccctaaccaaaggcaaaaggaaaaaaaatggcagaaagaggcggaggtgaacacggcgctttcaagcgtggctttggtggtggtagaagtgaccgtggtccaaaatgcatgcgccgcggccgcaaggactaagaggaaaaatgggttcccgtcacgaaactcggccgcttattcaaagccggcaagatcacatcccttgagcaaatctaactccattctttccctatcaaggagtaccaa

SEQ ID NO: 41175 - DNA, 448 bp, Gossypium hirsutum
  Clone ID: LIB3189-008-P1-K1-A10
cttgaatggccctgtaggccctgcaggctattcttgcaagaagacagccaccgaagatgactggtctttctccggcctcctccgtgccgcaagcaacacttcgaacctcgtaaaagctgcaataacaccagccttttcgactcaattcccgggtgttaacggactcggcatttcaatacctcgtttggatttagctgttggtggagtgatacctatgcatacacaccctagggcttctgaactcattcttgtttacaaatgacttgccgactgacattattgaaggaaccacttttctggatgctgctcagattaagaaagctgagggggttcttggaggaactgggtaatattatttgaacttgttgagagtccctttttttttcgtatgctttaacggttgcttgtgtcttcttggcaagggaagttggtgggaattactagcaaa

SEQ ID NO: 41176 - DNA, 406 bp, Gossypium hirsutum
  Clone ID: LIB3189-008-P1-K1-A11
attttcttcttaagtgaaacaagttttttattcaaaagatccaactgatgagggttggtacgttgtactccgaaacacccctagagacttgtttgacatgggcaatggaagtaaagatgacatcgtcgaaagatcagaaacttttccttttccagaacaaaacttaaatgaaaatatctctagtactagtacacaatttcaatgggttcgccaggatgtggatgaagatatttacgaattatgatgtaaaaaaatgcctagaagaagattacgagatccaaatattgttcagaatactccaaattcaaaagaaacaaatagtgaacaatagactgctattggatctttgaatgttctggaaacacctgatatgcctgtagaaattcaaactgaaaggtgtgggatg

SEQ ID NO: 41177 - DNA, 372 bp, Gossypium hirsutum
  Clone ID: LIB3189-008-P1-K1-A12
ccacgcgtccgaaagaaatcaaaaccacaaggtgaagaaggtaaaaaccagcagcggcaaaggcaataaaaggtgaagccaaagagagagagatatatacataataaaaaagattcttcaaaagaacacagctatggctcctcatggagaaggatcagatgcttcagtggaagccatggttgctcaagtcgaaaaacacccaatttcatcaatccttatcatcattgctatgcaaacagaagctttgccggtggtgaataagttccagttgattgaaaaccctcattcttcgtttccaaaaggggtcccttggatccattatcatggtgcatacaaggacatcataatcaatctagtgtggcccggaaaaga

SEQ ID NO: 41178 - DNA, 210 bp, Gossypium hirsutum
  Clone ID: LIB3189-008-P1-K1-A2
ctggaggcaatgcgccatcctctgaagaagcattcaatgatacatctactagaattaagcaatgatgctttcctgcggcagtggaagctgcagttaagcctggaccttacattcataacccatacagtgagatagagcatgctggtatcggccacctagtcaggcaccagtgcaccggttactcaggttgcctctagcgacgatgattct

SEQ ID NO: 41179 - DNA, 433 bp, Gossypium hirsutum
  Clone ID: LIB3189-008-P1-K1-A3
aagaaaagtccacttttcttatagattactcgtttccttcaagctagctctctctttatttagatcttgaagtgtgagatggcgacaacatcagcaacaaccttctcaattgggtcgactgtctccttcggaagcaggggaaatccacttccacaatctaaaccttttgttgcgaggttcacctccccaaattcacttgcaagttttagtggtctcaaggcagcaacatatgtgaactgtgagtcagagtcctcattcttcagcaaggaaagcagcgccgctcttagaggctcatttgtaccaaaagcacagaaagcaaaccagaagtctcagaatggtctacagcctgtggcatcttacaaagtcgcaatacttggagctgctggagggatagggcagccattagcccttctaatcaagatgtctccattag

SEQ ID NO: 41180 - DNA, 235 bp, Gossypium hirsutum
  Clone ID: LIB3189-008-P1-K1-A5
gagctgcttctcttgttgtggagtggaggtgcatctaccttactggtggccttggtggcaatagcaacagcaatggcaaatcattgagggcgtttggtgaataatttgtcaagaaaagcaggtgccaacaagcaaaaaatagctgaagaaatacaaaaagttggcaaagtaaaagtttcagctcatattttaacatttagagaactagcatttgctacagacaatttttaatcct

SEQ ID NO: 41181 - DNA, 181 bp, Gossypium hirsutum
  Clone ID: LIB3189-008-P1-K1-A6
caccccttcgattttcccaggttgtagaagatgtcattaggtgaggatattcaaccacttgtttgtgacaatggaaccggaatggttaaggctggatttgctggggatgatgctcccccagccgtattccctatcattgttggtcggccaccttacaccggtttgattgtttgcattggcc

SEQ ID NO: 41182 - DNA, 344 bp, Gossypium hirsutum
  Clone ID: LIB3189-008-P1-K1-A7
attttattttttatttagtttttattaattttctattcttcctgcttttctcaacctcattgagagcctatacgaaccccaagagctcctcatctcgttgtttttaccttccatttgaactcaagttcgtcgtagttttctactctctatccatcaaagatgtccaccatggaaagctgtaatccgtttagcaaacaggatccaacgagcacgtacggcgctcggtgattacgggggccgggacagcaacttgtccgcttattgaaaggctgtaagatcacatgccttgagcaaatgttccttctttctttccctatcaaggaggtcccaattcatttgaccaa

SEQ ID NO: 41183 - DNA, 321 bp, Gossypium hirsutum
  Clone ID: LIB3189-008-P1-K1-A8
ggggaaaaccatattgctctcttgggctacttagtgggactccctgatagcggagcctacatggagaaaaggttcgctgggcctcgttctatcaccatccttggtttgaacactggaacactggacatatcacaaaatggttggggccaccaggttggaattgatggagaaaagaagaaattgtttactgaggaaggctcaaagtctgttcagtggacaaagcctgaccaaggaggaccattaacatggtacaagggatattttgatgcaccagaaggggacaacccagttgccattgttatgactggtatggggaagggt

SEQ ID NO: 41184 - DNA, 56 bp, Gossypium hirsutum
  Clone ID: LIB3189-008-P1-K1-A9
aaaaaaaaaaaaaaaaaaaaaaaaaaaataaattttaaaaaaaaaaaaaaaaaaaa

SEQ ID NO: 41185 - DNA, 380 bp, Gossypium hirsutum
  Clone ID: LIB3189-008-P1-K1-B1
ctactttccctttgccttacttaccactgaaatcaatgtttggagtccaagcatgaggctttcacactgtgctttcaccctgcttgtcatgctgctgggtttggcatccagtgatgtgaaccaagacaaagcggaatgcactgatcagctagtcgggcttgctccatgtcttccatacgttggtggacaggccaaagcccccaccctggattgttgcggtgggctgaaacaagtgttggttaagagcaagaaatgcctgtgtgtgttgattaaagatagagatgaccccagtcttggcctcaacatcaatgctagtcttgctgcaaccctccctcacacttgtcatgacaactgttaacattacggaatgcatttccctt

SEQ ID NO: 41186 - DNA, 229 bp, Gossypium hirsutum
  Clone ID: LIB3189-008-P1-K1-B10
gtactgactgggaacgggtggcttttaggccttgggggggcgacgaacattttattcataactgttacagacaatgggaattctactgtttaatttaaacaaatcattgtgattggtccctgttgattctcacgcattttgatttctgtccagagctctaaatgttaaagggaatgatagacaaccaaactttggtaaactgtttttttatactattattttctaaagg

SEQ ID NO: 41187 - DNA, 145 bp, Gossypium hirsutum
  Clone ID: LIB3189-008-P1-K1-B2
gaataaccgttcacccaccgtcgcggaccgtgggctttaaagaaccaaatatctcttcttaatgccagaggacctacaatagactggttttttagaccgagcagacgcgctttgaaaagactggcacagtctccaaccaattctt

SEQ ID NO: 41188 - DNA, 403 bp, Gossypium hirsutum
  Clone ID: LIB3189-008-P1-K1-B3
ccacttcttcccttccattttacttagttttagttgccttaacgtcaccttccaatacaacccacaatgaggcaacaatatgtgttcactactctcacgttgctcatcctgttttccctcagttgttcaacaacattagcccaatctccggcactggccccggcaccttctggcccgacaaacgtcaccaagatcctcgaaaaagccggtcaattcaccctcttcattcgtcttctaaagtccactcaagtggccaaccagctgctcggtcagctcaacaattccaacaatggtatgaccgtgtttgcaccaacggacaatgctttctccagccttaaatcgtgcacattgaattcacttcacccgtgaacaaaaagtgcagctggtgcaattccacattgtt

SEQ ID NO: 41189 - DNA, 217 bp, Gossypium hirsutum
  unsure (1)..(217): unsure at all n locations; Clone ID: LIB3189-008-P1-K1-B4
ctttaggcttcactctctagcatagaagcaaagtggtaggaaaagaaaagcaaaggcaagatatgggttcggtttcactgaaaattggagatggaactgctagattcaagagagcaaccctttgntcttcagcttgtaacattctcatgcttttctcagttattacaaccaatctctttggctttatattgcctttcacgttttttacccaaaacca

SEQ ID NO: 41190 - DNA, 439 bp, Gossypium hirsutum
  Clone ID: LIB3189-008-P1-K1-B5
accggcgatatcaaaagcacttccccagtctcctggatttatcttctgcagtcaactccaccatattcctaagtttctctcgcaagctctttgcaatcccaaaaggagaaataaaaatctttttggggaaggacatggcagccgaggaggctcttgacttgtcaactttgcagtctcagctaagtgaaactcatgaaatttggaaccagaagatggaaaaacaccaatgccaggtagattttttacaagacaaaattatggaggtaaaggcttgcttacaggggtcggaggaggaatcaaaggaggtagatgttctttggcgtatggtaaaaactactgcaactttgttggcttacttggaatcaaaagctagagtgatggctgttcctgatttaaccctatagtcatgtggcatttaactattagaatgggtagggct

SEQ ID NO: 41191 - DNA, 430 bp, Gossypium hirsutum
  unsure (1)..(430): unsure at all n locations; Clone ID: LIB3189-008-P1-K1-B6
caagactcgggggctcggagctggcaaagctgcataccttacatattgggaaagtgctgcccgcatgatcgcggacgtatcgaaatctgacaagattgttgttgagaaatcaacagtccctgtcaaaactgctgaggcaattgaaaagattctcacccacaacagcaagggaatcaaattccaaatcctttcgaaccctgaatttcttgctgagggaactgcaattcaagatctttttaaccctgatcgtgttcttatcggaggccgggaaaccccagaaggcaataaggctgtccaagcattgaaagaggtttatgctcattgggttccctgaggagagaattcttaccaccaatctttggtctgcagagctttccaagcttgctgccaatgctntcttggctcataggatctcatccgtgaatgccat

SEQ ID NO: 41192 - DNA, 371 bp, Gossypium hirsutum
  Clone ID: LIB3189-008-P1-K1-B7
tgaaaaaaaaaaaaccatttatttttcttcagctctaagcgacaacaacaatggctgacttcaagaaagccactgctttgattctcacagtggctttgcttgtgaatctcgctttaatggttgatgctgatggtgatgatgataagaagattcgagtcaggaaacataagggtgagaagcagtgtatacaaggatgggaatgttcctactggtcgaaatattgttgcaacaaaacggtttcagatgtcttccaggtttatcaatttgaggacctgtttgctaaaatgaattcgccggtggctcatgctgttggattttgggattaccattcttttattttgtctgtttccatttatgagcctttttttttt

SEQ ID NO: 41193 - DNA, 306 bp, Gossypium hirsutum
  Clone ID: LIB3189-008-P1-K1-B8
ttcagattctttctccattataccttgttagaataaagaaatgggaggcaaagaagaggatgtttggctgggagcaaacaagtggtcataaaggcaacctatagggacaacagcacagacagacaaggactacaatgagccaccaccagcttccacttatcgaacatggtgagctctacttatggtcttattgtagagctagtattgcttaaaatgaatcaatttattatttctagtggtactaataatatttatcctttttgttaggatataattaaacaatttcaacggtttaattgagcgaaa

SEQ ID NO: 41194 - DNA, 420 bp, Gossypium hirsutum
  Clone ID: LIB3189-008-P1-K1-C1
cccacgcgtccgcttgcaacaagtctgttcaagttgcttctcaagtataggccggaggacaaggcgggcaagaaggaacgtctcctgaagaaagcccaagctgaggctgaaggaaaagctcccgaatcaaagaagccaattgttgtaaaatatggactcaaccacgttacctacctcattgagcagaacaaagcacaattggtagttattgctcatgatgtggatcccatagagttggtagtatggctccctgcattgtgcagaaagatggaggttccgtactgcattgtgaaggggaaatcacgtttgggatcaattgtccacaagaaaactgcttccgtcttatgcttgaccactgtcaagaatgaggataagctggacttcagcaaaatccttgaggctatcaaggcaaacttcaat

SEQ ID NO: 41195 - DNA, 284 bp, Gossypium hirsutum
  Clone ID: LIB3189-008-P1-K1-C10
cggacgcgtgggcggacgcgtggggtccttacgctgtgtctgaagcatgcatttgcctgcaagagaacaacataccgtacgacgtggtcatctccgattgtggaatacggatctttcttcttccacagtgatatgctgagaaacaagctcttggggatgtgagtgcagagctttctaacacctatgcagaccccactcagtagcaaaataaggcacacctagggttatacccttatgaggtctatgaaactatgtggtgacgttattcctgcaaagggtgcttt

SEQ ID NO: 41196 - DNA, 399 bp, Gossypium hirsutum
  unsure (1)..(399): unsure at all n locations; Clone ID: LIB3189-008-P1-K1-C11
cgccgtttccgtacatttcccctaaaatctccacagacaaaatgcaagaaatgaaggctgagattgcaaccaaaaattcaaagaaggcaaatctattagatcacaattccctcaaacacatcctcgacgaatccgtccctgagatcgttacgagtcgtgggtatgcggaagacgtgaggatgagcaatgtcagattattcattggaacgattatcattgtaatcgctctatttgctcagttttacaaaaagaagttccctggaaaccgtgatttcctcattggttgcattgtattgtatataagtttcaatgtaatactccagctgttcagctacagaaaggaaaagaacccaattatgtttacttaccctncttctggatccgtcaccaccaccggat

SEQ ID NO: 41197 - DNA, 417 bp, Gossypium hirsutum
  Clone ID: LIB3189-008-P1-K1-C12
gagttatcagtgaacttcatatcggcagtttctgaagaagtttcttctgatctgcatgctcgagttatgaaagcagctcgtggaggtatgctagatgaaataatcagcactatgatctcagagtttgttgctgcaaaaaaatctcagagacctctaatggttgaatcatacaaccaggatgctaaaagttctgatgggaaactgattaaaaataccacggaaagaagtatacattgtacttccaagtttggcacagcgacctccgatggtgtatctaatatttctatcctagaatctacaaattttgatgcaagtctaaaatctgttggaagccttgaaaacttttggggttcttatacagttgttcttaaaatgctttttgagtattgcttcaagtttacgtggaatgctgtcttt

SEQ ID NO: 41198 - DNA, 387 bp, Gossypium hirsutum
  Clone ID: LIB3189-008-P1-K1-C2
ctttttatttttttcagagcctgcttcaccaatctccgctctgttcagcccgcgatcttttgatcttgctctatggctaccatttccaagctctctaaccccaacccagtcgcttctctttcatcatcttccaaacccagatcttcttcatcgcttaaatgcttcgttgggttccctaccaggcctggtttctgctctaagctggtttcatcttctagcttgtcctcgataaacacccaccctttcaggggctccttggttgtcaggtgttctcttgctcgatggaaacgagagttcagtgaagaggactactttgcatgatctgtatgaaaaagaagggcagagctcatggtatgacaacctttgcaggccagtgaccgatttgct

SEQ ID NO: 41199 - DNA, 450 bp, Gossypium hirsutum
  Clone ID: LIB3189-008-P1-K1-C3
gctatctatgtttccaagctttttcatgaggctgtactttctcctggtgttctaaatgtggtctctggatttggtcctacagctggtgcagcactttcaagtcacatgaatgtcaacaagttatcatttacaggttccactgctacaggcaagattgtactcgcactcgctgcaaaaagcaaccttaaaccggtaacattggaactcggaggaaaatctccgttcattgtgtgcaaagatgctgacgttgacaaggctgttgagcttgcacattcagccttgttctttaaccagggtcagtgttgttgtgccggttctcgcactttggtacacgaaagcgtgtatgatgagttcgtaaagatagccaaagctcgagcactgaaaccaggtttcggggttcccttcatgacggggttcttactttgcccttttttttgttattggcaattt

SEQ ID NO: 41200 - DNA, 338 bp, Gossypium hirsutum
  Clone ID: LIB3189-008-P1-K1-C4
cccacgcgtccgctctctctctctctctctctcatgtctgaagcagtaaaatcgaaaggatgggtcaagggacaccaggcggtttgaaccggcaaggtcttcccggggaccgtaaaggcgacggatcgaacaagaaggaaaagaagttcgagccagccgcaccccctgcgagggtgggtcggaagcaacgaaaacaaaagggtccggaagcggctgctctacttcccacagtaaccccactcatcaagtgcaagctacggctgttaaagctggagcggatcaaggattatttactaatggaagaagagttcgtagccaattatgataggcttaagccc

SEQ ID NO: 41201 - DNA, 376 bp, Gossypium hirsutum
  unsure (1)..(376): unsure at all n locations; Clone ID: LIB3189-008-P1-K1-C5
cgatgaaccccattgccagcatggagaagatgaatgctacttaaataccatacatagctgtgtcatctaccactggcctgatgtgaaaaagcactttgatttcattcgctgcacagagcaacaaagctcaaagaaaccgctggtcaagaacagagcagcaatgtggaaacaatgcagtgaaaagctgggaatgagtgctcacagaatcaacaaatgctatacttctggatatggacttaagcttctgctacaatatgctaatgagactgcaaagctaaagccacctcatgagtatgtgccatgggtggtggtggataatcagncactcaaagatgactttgaaaattttgtgaaatatgtctgggaagacttttaa

SEQ ID NO: 41202 - DNA, 464 bp, Gossypium hirsutum
  Clone ID: LIB3189-008-P1-K1-C6
aaccactcaaacaccccatctttgactcctccctcttctttaactccgtcatcttaaaaaaaaaaaagtggatagttgagctgctattgagattttcttttttctccccaaccctgtcttatcttggttgctacctgcctcctgcatgaaacagaaacagagttccctttcttgtttctcactgttgcgatgaagtatatccggaccaacaacttgaaacggttattctcattaaaaagacgcagtttcgaagaaggtggtgccaaccaacatggggttttcgaagaagacaccaccaatgatagttttaagattgcttctgttgcagagcgttctcagcgaccttcctggcgaagcttctcctttgaagaaatttttgttgccaccaatgcttttagctcagagaatttggtagggaaaggagggtttgcagaggtatacaaaggagtactaaaggacgggga

SEQ ID NO: 41203 - DNA, 119 bp, Gossypium hirsutum
  Clone ID: LIB3189-008-P1-K1-C8
cccacgcgtccgattggctgatgaagtttgtgatgatcgtgaagatggtgatgatgatgatgataaggaagatggtgctggagctttggctgcttttgtacctggtccgctcctttctc

SEQ ID NO: 41204 - DNA, 434 bp, Gossypium hirsutum
  Clone ID: LIB3189-008-P1-K1-C9
aaaagagagagagagaaaggatggttttctcaactgtgttaacatcagttccaaatctctaccttaccaggaaacccaagaatattcacatccaaattcgatgcctatcgtcaccatctgtatcaatttcaagtcaatcaaatttgacccaattcgatttaaaggcttactgggctaccctttatgcagaaatcactcaaaagcttgaagaagcaatcccagtgaaatacccagatcagatctatgaagctatgaggtactctgttcttgcaaagggtgctaagcgagcccctcctgttatgtgtgtggctgcctatgaaatctttggggataatcgactcgctgcttttcctactgcttgtgctcttgaaatggttcatgctgcttcactaattcatgatgaccttccttgcatggatgatgctctagaacgc

SEQ ID NO: 41205 - DNA, 448 bp, Gossypium hirsutum
  unsure (1)..(448): unsure at all n locations; Clone ID: LIB3189-008-P1-K1-D1
gcggcacagcaagccaatgagtggagcgcagattttattctcaaaaaaccaacttcacttcccatttgctagtcttccacgatgactcccctccacttcttcctcctcctcctcctttcgtcagctgctttaatctccgcggccgccgccaccgccaccaccgcatatccttccatcccgggcaccgattccacaactgattgtggcctatccggaggggacgagaatccagttcccatccgtcgcgaagtctacggtaacggcaagatattcgacatcagccataggtacaccgtcgacatgccgtcttgggaatccaaggacggcgtgggacagttcctatggttgcctaaaagcatgaagaacggntccctcgctaataattcggggatgaaactcccaacttacaccggcacccaccttgacgctcccggacacgtcatcgatc

SEQ ID NO: 41206 - DNA, 431 bp, Gossypium hirsutum
  Clone ID: LIB3189-008-P1-K1-D10
caaaaaagcaaagaaaagatgctccctctcccactaaagttggtacgacaagccattacacatcaccctctccttctctcccaaaatactcaccaccgtcgccgccgcagtcgccgtcacgatcaccaccaccgtgatcttgatgaagaagaagatgatgatagtgaaaatgatgcttgcaattccaaacccagctcttacaatttttatcatcattcctcaaaaccaacgaaacccaaatccaaaaccccatttcttttttttcttcctactagagaactcatcggtgatacatacaggttggccaacatagctagagaaatgggtatggatttgtaccctactccttccctttctcacatcattttctctttctcttcttcccttccttctccttcctcttcttcctctatttcttctgcttcttcttc

SEQ ID NO: 41207 - DNA, 338 bp, Gossypium hirsutum
  unsure (1)..(338): unsure at all n locations; Clone ID: LIB3189-008-P1-K1-D2
attctttcctgggtcaatctttgcttctcatttcaatggtgtccatcactcaaaatggtacctcaaatggccatttgcagagcttttgcagcgccacaaatggtggtgttggtgttgcggnagaccctttaatctgcggggtcgccgccaccgtcaccaccgcatattcttacatccatggcaccgattccacatctgattgtggcctatccggaggggacgtgattccagttcccatccgtcttgatgtctacggtaacggtaagattttcgacatctgccataggtacaccgtctacatgccttcttgggaatccatggtcggcttgggacaattt

SEQ ID NO: 41208 - DNA, 307 bp, Gossypium hirsutum
  Clone ID: LIB3189-008-P1-K1-D3
acgtagttctagatcgcgggcggctcgctcgcgatctattttttccaaaagaaaccccgtttcacatgcaatggctttgttgcacttatggttagggtacatcacctctacctttctattcactgtagaccaatcctattcgccggtttctcaatcaaatcctaccattaacattctctatttctatttccgaccatatgctatctaatcgccactgttgcataccccatctacgcttttgaatcaaggaagcttgacgagagcacggttccaggtgatcaaggcatcaagtgtaccccttcatgcg

SEQ ID NO: 41209 - DNA, 392 bp, Gossypium hirsutum
  Clone ID: LIB3189-008-P1-K1-D4
gtgggcaagcaacaatccatggggataccagtcttagccttaggcttcaactaaatactaattttcttgcccggtcttttaaaaatgtctcatagggagaattaagtgtacaaatacttgtttaatttaaacaaaactgatccttgatgatcaaaagttaggatttatcaaatgttcaaagatcttataaaattcctttgtgttacatttataagtctttgtaagagtgatgtttttatcatttctggagtttaaaaaacgaatggctttaaatttaccgtaaggagttgacctaaacaagatccctttcagctttgatcttcaatcttatctattgatttgtttaccaaccatgctcagctcactgataggaggacttcaaagcttattcg

SEQ ID NO: 41210 - DNA, 412 bp, Gossypium hirsutum
  Clone ID: LIB3189-008-P1-K1-D5
aaactcgtgtggtcttatgcaaggccacaacgtgttagacaatttctttggctggttttcaaggaacgcttactaactaatgcagaacgttgcagaagaggtatgccaaattcttcttcttgtaagctttgcggatgcgttaatgaatctattcttcattctttaacgggttgtcgtaaggtaagagatatttgggaacaagtcattcctttaagattaatgcatcgcattcctttaagattaatgcatcgtttcttctcttactcgctaaaggactggctaagggtcaacttgggtaatgtatttggcttagttttttatgaacttgattggaggtctctgttcggtatactttatttgaagatttggaaagaaagattttcgtatgtgtttctaggatgttcaattcttt

SEQ ID NO: 41211 - DNA, 466 bp, Gossypium hirsutum
  Clone ID: LIB3189-008-P1-K1-D6
cttgcatgttgagtgctatttggatcacttttctacaagtgagtgcttcggctgcgaaggcggagagaactctatggtgaatctctgtgcatgacaggaggacgaaaccttttctgtttctgactactatcccagaagccgattgttggttgcgctcattatatgctccgtcaaagtttattttcactatttgaccaggtgggcgtttccatttagtattctccttagaaactatagaaatagtgctctctaaaccatccatttcttctaagtagctatgaacaaagcatgcaatttcctgactagatctgtttgttttatcatgtattcgagcatttctgtccccccatatggcccataatgtacaacaaaatagtctataaaaggaggttggctggtcaacgaggaccctggtaagccactgttcgaactctaaatttgtttcctgtaaaatgttaacagccga

SEQ ID NO: 41212 - DNA, 453 bp, Gossypium hirsutum
  Clone ID: LIB3189-008-P1-K1-D7
aacgcaagcaaaaaatttaatgttcgataatactttattttgataaaaataaaatgccgatttctcgaatcgcagtcgggtctccggccgaagccggccaagctgatgcactcaaggctgctttagccgagttcatttcagtgcttatttttgttttcgccggtgaaggctcgggcatggctttcaacaagttgaccgacgatggctcctcgacaccggcgggtttagtagctgcggcattggctcacgccttggcgttgtttgtggcggtttcgatcggggctaacatttccggcggacacgtaaaccccgccgtcacgttcggtgctttcgtgggtggccacattacattggtgaggagtattttgtattggatagctcagttgcttggatctgtcgttgcttgcttgcttctcaagttctcaaccggtggaatgacaacatcggcatttt

SEQ ID NO: 41213 - DNA, 202 bp, Gossypium hirsutum
  Clone ID: LIB3189-008-P1-K1-D8
tccacgcgtccgttcttcttcttcaaactagcttaaaaacaagaggaaaaaaatgggtggagaaagaaaggtctacactttggctgaggtctctcaacacaaccatgctaaagactgttggcttgtcattgagggcaaggtacaatttcttctattctgtagaaatatcatggataagtatatccccaatctcggactgagt

SEQ ID NO: 41214 - DNA, 443 bp, Gossypium hirsutum
  Clone ID: LIB3189-008-P1-K1-D9
ctagatctttgcatcaatggtcccaaggaaaagttagattcaactgtcataagccagcctgctatttatgtcacaagtctagctgctgtggagctgcttcgtgcccgtgatggaggcccgcagattattgattctgttgatgtcacttgtggtctcagcttgggtgaatatactgcactagcttttgctggggcttttagctttgaggatggactcaagcttgtcaaactaagaggagaagcgatgcaggaagccgcagatgctgctaaaagtgctatggtcagtatcataagacttgattcggagaaggttcagcaattgtgtgatgctgccaaccaagaagttgatgtagctgataaagtgcagattgcgaattacttgtgtcctggaaattatgcagtatctgggggtctcaaaggagtgcaagcagtggaagctaaagc

SEQ ID NO: 41215 - DNA, 422 bp, Gossypium hirsutum
  Clone ID: LIB3189-008-P1-K1-E1
cccacgcgtccgtgaaccctaaaaaccctaatcctaattagtaaatttcagtatattaatttgttagatctgtctcagctgctctccaagtctttcaagtcgccatggcatcagagaagaaattgtcgaacccaatgagggaaatcaaagttcaaaagctcgtcctcaatatctccgtcggcgaaagtggcgatcgtctcacacgcgccgccaaggtcttggaacaactcagtggtcaaacccctgttttctctaaggcgagatataccgtgagatctttcggaattaggcgtaatgagaaaattgcttgctacgttacggtgaggggagagaaggcaatgcaacttctcgagagtgggttgaaggttaaggaatacgagcttttaaggaggaaccttagcgattctggctgcttcgggatt

SEQ ID NO: 41216 - DNA, 332 bp, Gossypium hirsutum
  Clone ID: LIB3189-008-P1-K1-E10
gctttacatccttctttctgcaggaaaatacggtcaaagatgaccctccctatcttcctcaggattgtcattctcggtttcctcgagccagtgcttgaccagaatttatactttttgggaatgaagtacacatcagcaacatatgcgtcggctttccttaacatagttcctgccgttaccttcataatggcaatgatttttaggttagagaaaatcaacgtggagaagatacgaagtgtggcaaaaactattgggactgctatcacagtcatgggagccacggtgatgactttcatcaaaggtcccattattgactttttcaagcacggtgg

SEQ ID NO: 41217 - DNA, 417 bp, Gossypium hirsutum
  Clone ID: LIB3189-008-P1-K1-E11
ccccaacgagaaaccggtcctcttctctcacgttaaacctacatttgccaacccgaaagccttcccttttggctttttcttcttatataaaccacattgcaattccctcacctctttgcttcactcagataaactcgggtcttcttaaacgaaggaggaggatgcatgtggtttcttatgctctgtttttagttgctctgtttcaatgtagattcttggcttttgcaattttagacccaattgattttttggctttacaatctattagaaagggtttcccatgatttggctggctctaattttttggcttgcttgggatttatcttccgattcttggtacttttttcgacgtatctctgtgctttctgatatatgtatatgttcttaatctttctacgcccctttttctcgtttttt

SEQ ID NO: 41218 - DNA, 194 bp, Gossypium hirsutum
  Clone ID: LIB3189-008-P1-K1-E12
ttttatctacatttgccatcccttaaggcgggcctttttgttttggggggtggtaaaccacattgctgcatttttacccacatgcttactcagataaactcgggtcttctcaaacgaaggaggaggatgcatgtggttccttatgcactgcttttagccgctctgtttttttgaaatttttggataatgcatta

SEQ ID NO: 41219 - DNA, 141 bp, Gossypium hirsutum
  Clone ID: LIB3189-008-P1-K1-E2
aaaaaaaaaaagagaaaaaaaaaaaaataaaaaaataaattgaaaaaaaaaaaaaaaaaaaaaaggaagggggagaaaaaaaaaaaaggagaaggcattcaaaaaaaggaggcaacagagaaggaatgggaaccaatgggg

SEQ ID NO: 41220 - DNA, 380 bp, Gossypium hirsutum
  Clone ID: LIB3189-008-P1-K1-E4
caaagcaaagctttagcaaccttagccttggtttcctaaccaaaactcttctttatggctatgctcttcctttttgccggcgtggtccatgcaaatccatgctagagagtacttcagcaaattcccaagagttaacaccaatgagaaagagacatcaaccagagagcaagagcacgagaccttcgttccccagaccacccaaaagccagaagagcaagagccaaggttcatccctgaaacccaaaatggttatggcctttacggccacgagtcaggctcaggctcaggctcaggctaaagccggcccagttttaccaccaataaaacctatgacccctattgtacccctgttagattccaccctgatgaaccctattaca

SEQ ID NO: 41221 - DNA, 420 bp, Gossypium hirsutum
  Clone ID: LIB3189-008-P1-K1-E5
cccacgcgtacgcccacgcgtccgattttccttcactcttctcgcgcattttagcaaaaatggccggggagccgatagccgaagccaacgaggagagccccttcggcaccttaactccggacgaattctatgcccgacactcaatgagtcactcatccgagttcatcactaacgctgggggtctgaaactcttcacccagtcttggaccccactcgatactccggtcactggaattgtctccgatccccaaagggttacagtctagtcgagctctgatcatcaatttactttttctcttttttatatatcacattttttccaccgtttaatcgattatattttatttagttcttgtttgttccaaatttttttatccttaatttgttgtaaattatttttcattcatttttattttaata

SEQ ID NO: 41222 - DNA, 382 bp, Gossypium hirsutum
  Clone ID: LIB3189-008-P1-K1-E6
gatacagttttcgaaagatatagcattgaaactgatattatggttgaagaatgtcgtgataacagcgaggattctgtttgtgacattaccctggtgactaccgattatcaaaacaaccgaaaatgtatcggtccaaatgaaactgaccacgaaagcttcactagaggggccaaactaaaagcactgctattgagctgtccggctttcctcaatcacgccgactatcttttttatcttcatgtgaatcttcctacaacttcaccaaaatttgacatcaacgaattcacagatgccaacagaagacttttcttagactgcgcaaatgaaattgttcgaagaataagctttcccgattttcaaccggttcaaccttcgttattta

SEQ ID NO: 41223 - DNA, 449 bp, Gossypium hirsutum
  Clone ID: LIB3189-008-P1-K1-E7
caaaaatggctagactcgcttttctcttcacctttactttcctcctcttcaccttctctcacgcccgcttcatcacatctgaatcgccaacatgatgtcacccccgaaaaatccgaatccgaatccgaccccgaatccgccatccttctccccagcgagaaaccccactttgaaccccccaaattactcgacttcaagcacgatgatgatgcctccggcgtcgcctccgttcctttgaccaggatcagttttaaccctgtcaaccgccacttcccaaggcgtcccttgaatccgttccgtcacaagcacaactgccgtttccataaacgcttcaggcttttgaatccacgcttccatcagaagcgcttcatttcttacggcaacgatatgatactgtccaacgagagaagttttgacccagagtcacgcggtgttgttcgccagatcga

SEQ ID NO: 41224 - DNA, 468 bp, Gossypium hirsutum
  Clone ID: LIB3189-008-P1-K1-E8
tggggattaaacatgtaaaaggcatgctgctttatggacctcctggtactggcaaaactctcatggctcgtcaaattggaaagatgttgaacggaaaggaaccaaagatcattaacggtcctgaagtcctgagcaagtttgttggtgaaactgagaagaatgttatggacctatttgcagatgctgagaatgatcaaaaggacttgtggtgactaaagtgatctgcatgtcataatgcttgatgtttttggtgctttttgtaagtatattttttaaacttgtttttgtaacaaattttttacacagttttttttctatattttttttctttaaaatctttttttatcccctctttttttcgattttctttttcttctatttttgtcgtctagatttatttttctaccattgattttactgaaattaattttttattgacataattttttcaaactaattttttttttc

SEQ ID NO: 41225 - DNA, 397 bp, Gossypium hirsutum
  unsure (1)..(397): unsure at all n locations; Clone ID: LIB3189-008-P1-K1-F1
gcattaccactttgatctaatcctcaatttcccaatttctcttgaaaccctaatcctaaatcgatttcccaacttcggcgttctaatggccactgaggaaccaactgtcgccgtggaatctgcgcctgagctggcggaagagaatcccgctgaggctacagccaatcccaaatctggcaaagcaaagaaagctaaagagcccaaagccaagaaggctgcagctcctatgaagcgacgagctcctcctgctcatcctccttacgaagagatggtcaaggatgcaatncgtactttgaaggagaagactggatcaagtcagtatgctatcactaaattcattgaagagaaacagaagaatcttcctggaaattttaagaagcttctgcttttcatttga

SEQ ID NO: 41226 - DNA, 330 bp, Gossypium hirsutum
  Clone ID: LIB3189-008-P1-K1-F10
cgcctcggtcgtttagttttcttttcatttctttaggagggtggtcaatatggggtcttcgatgttgccagatctcggagctgagatcttgatccccgtttgcgccgttattggaattgtcttttctcttgcacaatggcttcttgtttccaaggtgaagctctccccgggtcgagactcgggttcccccggtaacaacggtgcgggtgggaaaaacggctattccgattacctcattgaagaagaagaaggtcttaatgaccataatgttgttattaagtgtgctgaaattcagaccgtcatatctgaaggagcaacctcatttctttt

SEQ ID NO: 41227 - DNA, 378 bp, Gossypium hirsutum
  Clone ID: LIB3189-008-P1-K1-F11
aaagaatggcatatgaagggattctgttggggatgggtaatcctctccttgacatttggttagtcgtggacgaagagtgcttgaaaaaatatgatatcaagttgaacaatgcaattttagctgaggagaaacaccttcccatgtatcaagaaatggcatccaagcccaatgtagagtatattgctggaggtgctactcaaaattcaatcaaagttgcacagtggatgcttcaaattcctggtgcaactggttacattggctgcattgggaaggacaagtttggggaggaaatgaataagaactcaaaagctgctggtgttaatgttcaatatcttgaggatgaaactgctccaacaggaacctgtgctgtttgtgttg

SEQ ID NO: 41228 - DNA, 415 bp, Gossypium hirsutum
  Clone ID: LIB3189-008-P1-K1-F12
ggatctctagcttctactcaggcaaagaagtccaaggaagatctgaaagaagttactcacaaagtttactttgatgttgaaattgctggaaaacctgctggtcgaattgtcattggactcttcggaaaggcagttccaaaaacagcagaaaacttccgagcactatgcacaggtgaaaaaggtgttggaaagagtgggaaacctctccacttcaaaggaagtgctttccaccggattattccaaacttcatgattcaaggtggtgattttacacttggtgatggaagaggtggagaatcaatctatggtgagaaatttgctgatgagaatttcaagctgaagcacactggacctgggcttttgtcaatggcaaatgctggtcccgacaccaacggctcacaattcttcatcacaa

SEQ ID NO: 41229 - DNA, 381 bp, Gossypium hirsutum
  Clone ID: LIB3189-008-P1-K1-F2
attttccaaaaccctcttctcctgcgcacagtaaacaaaatccatggatcttgaaaacggaactgttcgatacgaagatgaatatataacgaattctcgaggactaaagctatttacatgcagatggttaccagtaaacgaagaacccaaagctttaatctttctctgccatggttatgcccatggaatgcagtatcaccatgaacagtactgcaatccgattggtgaaagcaggatatgcagtttatggcatagattatgaaggccatggcaagtcttcggggttgcagggctatatctcaaagttcagtcatgttgttgatgattgttccgattatttcactgatatttgtgagaaaaaggagaataaaaagaagatga

SEQ ID NO: 41230 - DNA, 290 bp, Gossypium hirsutum
  Clone ID: LIB3189-008-P1-K1-F3
ccgaatcgcagtttcgacccacgcgtacgcgtacgcgaggctttcttatacttctttttttttagaatttaattaattgcattaaacggcttggttggaacggaagcatatgctataggatttaacgacttcctccctatgcttatttctatcaacattacttcccccccatgcatatgcatcgtgtaatgaagctaaatgtggcaagctattccacctatgaatgagcttgaaaaacttcacctttctctccaacttgggtctctgcttccaaaatccgggcagttcct

SEQ ID NO: 41231 - DNA, 440 bp, Gossypium hirsutum
  unsure (1)..(440): unsure at all n locations; Clone ID: LIB3189-008-P1-K1-F4
ttatctctgaaggtgtcttaataaacgccttcgatttaccttcgatttccatttacttctctattgctacgtttttgaatttttagtgagcgaaaatgagagagtgcatttcagtccacatcggtcaggctggtattcaagtcggaaatgcctgctgggaactttactgccttgaacatggaatccagcctgatggccagatgccaagtgacaagactgtcggaggaggtgatgatgcttttaacacctttntcagtgaaactggtgctggaaagcacgtccctcgtgctgtctttgtggatcttgagcctactgttattgatgaagtgaggactggtacttaccgtcagctttttcaccctgagcaactcatcaacggcaaggaagacgctgccaacaacttcgctcgtgggcactacactatttggcaaagagatcgt

SEQ ID NO: 41232 - DNA, 101 bp, Gossypium hirsutum
  Clone ID: LIB3189-008-P1-K1-F5
attgattctgattgacacttggcaagaagcttttggaggttcgagggcaagatatccacaatattgtggggcctaccaagagggggggggttgtgcaaatt

SEQ ID NO: 41233 - DNA, 120 bp, Gossypium hirsutum
  Clone ID: LIB3189-008-P1-K1-F6
ccattccttaggtaaattatcattgattccctgttcttttgtaatgtttactacaacaataataatggcagaacaccttggtgggtagttgaatgtaaaaacattttatttaaaaaggac

SEQ ID NO: 41234 - DNA, 497 bp, Gossypium hirsutum
  Clone ID: LIB3189-008-P1-K1-F7
atcaatcctgattgacacttttcaagaatcttttgtatgtgcgagtgcaagatatccacattagtatctttcctaccaagagtggttgccttttttaccactattcctatcaaaatctaatttttcttctttctttcttactaattttttttcacatccctttttttatatttttttttttagcattatttttaataattttttttatcctatattttatgtaacttctttttttttattttttttcatcttttttatattctataattttctattttatacctttccccttttttcatttacatttatccttcactatctttttcaatttatttcattagttttttctctaataacctttttttacttttatattttttttttatatatttttctatccctcttttatttatttatttatttatttatttttactattataaaaattttatatttatataatttttttttcaaaattttttttatttaataatttt

SEQ ID NO: 41235 - DNA, 419 bp, Gossypium hirsutum
  Clone ID: LIB3189-008-P1-K1-F9
atttctcttaaaactctacaatggctaaaacctttgcttgctttgtcctattagctttcataggtagttgcgcacttggtcaggctcctagctcggccccaaccaattcaccgccgtcttctaaccctactccggctcccaaggtttctccaaccatgtctccaaccgctacaccaaccgcatctccgccgtcaacatccactcccccgtcttcagcccctgaatcttcaccaacttcctctcccactacttctcccccagctcctctcgctggttctcccgctggctctccccctaccgctgattctcccacgaactccatcagcgagacaccaggcagctctcccacttctcctacgagtgcagccgcttgggacagagtcaccgtcgctggatctgcccgtgcagtccgttttgct

SEQ ID NO: 41236 - DNA, 304 bp, Gossypium hirsutum
  Clone ID: LIB3189-008-P1-K1-G1
gtttttcttgtgattaatcgatatggctagctcaatgtcccttaagcttgcatgtgtggcggtgttgtgcatggtggtgggtgcacccgtggctcaaggggccgtaacctgtggtcaagtcacaagctccctcgcaccctgcattggttacttgacagggaatggtgctggtggcgttcccccaggttgctgcggcggcataaaatctctcaactccgccgcccaaacaacaccagaccggcaagcagcttgcaaatgcatcaaaagtgcggccgccggcatttctggcatcaactatggtatt

SEQ ID NO: 41237 - DNA, 384 bp, Gossypium hirsutum
  Clone ID: LIB3189-008-P1-K1-G10
taaccgttctcctgagttcatttccttgtttgatgatgacaagcttcgtaaaggtttgaaatgagtcagttaggaggatgtggagatctttctcgacaaaattcttatactgatcctatttctcattgattttgatctcttttttatgcaaaacaaattttacttaatattttccacctttcttatttccatattttttttacattattttttttttccatttttatttacctgttttatttaagaacttttttccatacaattttttcctttttttttctatccatgcttttttctaaaattttttctcactttttttttctcttaaattttttttcccctttattttttttcttcctatctttttttctccgattatttttt

SEQ ID NO: 41238 - DNA, 337 bp, Gossypium hirsutum
  Clone ID: LIB3189-008-P1-K1-G11
gccaccaatggcatcccccccccccttttagctagcattagcaatgcccccattactagaactgtctttggctgctcgaaatgcgatccccatttttatcttcttcctcaaactctgcggcagcagattcttgtttttttgggtttcatgtcattctaaaccaaatggtcttataactactaactcatcttttccttttcttcttaaaactttctcttcacaatctgtacgagattggtgggttcttccttgggattttcaagttgcattttttttattctattcaaatttcccatttaatggccgcccgggccgcttgtaaacgggtgggtcaaat

SEQ ID NO: 41239 - DNA, 419 bp, Gossypium hirsutum
  unsure (1)..(419): unsure at all n locations; Clone ID: LIB3189-008-P1-K1-G12
acgaccacgcgttcgaaaatggatggttattgtcgcagaagggtaatcatgtttttggtgttcgcgatttgcagcaataagcagagggtgtggacaagaatcaaccactcttgttcctgcaatcatcacctttggtgactctgtggtagatgtgggcaataatgactatctccctaccatcttcaaggctaactatcctccttatggacgggactttgccaacaaaaagcctactgggaggttttgcaatggaaaattagccactgacatcactgctgaaactctggggtttacaacttatccaccagcttaccttagcccataagcatcagggaagaaccttctgcttggagccaattttgcttcagctggctctggctatgatgacaaagctgncatggtgaatcatgccatcacat

SEQ ID NO: 41240 - DNA, 386 bp, Gossypium hirsutum
  unsure (1)..(386): unsure at all n locations; Clone ID: LIB3189-008-P1-K1-G2
anggacttattctcatatatttgatattatgaagagccgaacaagtgtgatatagctagaggcatatctgtaattgggatagatgggagaggaccctcattttccctggaagctcagagtgcctcaggaccttccgttgagcctctttttcccttcctttatatcacaccgcccaattcncttcgccagaccgcttctcaaatggacccttccacttcctgtcgctccagttgttccccccatttcgagctcagcagnccggggaccgattatccccgaaagaaggaagatgagcgaagatgcttttgaaagtaaaaggaatgggaagttggaatgttccaatacgaagtcgcagctagtcaaggtttaagaatacggccacggcc

SEQ ID NO: 41241 - DNA, 379 bp, Gossypium hirsutum
  Clone ID: LIB3189-008-P1-K1-G3
caaaatcatgaggagcatttgtgttgtgcttcttatctctttgcctttccttctccgcattgcccagggtttcgatttccacgacaaggatttagcgtcggaggatagtttgtgggatctatacgagcgctggcggagccaccacacggtttccaggagtctcgacgagaaacatcggaggttcaatgtgttcaagcagaatgttttgcatgttcacaacaccaacaacaaggacaaaccttataagttgaagatcaacaagtttgctgatatgaccaaccacgaatttaggaatgcttacgctagttccaagattaaacatcataagatgttccaaggaaagtcccgtggcgccgggagtttcatgtacgagaacgtc

SEQ ID NO: 41242 - DNA, 232 bp, Gossypium hirsutum
  unsure (1)..(232): unsure at all n locations; Clone ID: LIB3189-008-P1-K1-G4
aaattcctttctcgagcgtttcttttttaactctacagttctgaacgaatccatagaatttgaccaagaagaagaagaagatgtcgtggcttacatatgtagatgagcacttgatgtgcgatatcgatggcaaccatgtntccttcgccggcatcaggggtcacgacgggagacattgggcgcaaagctccaatttgcctcatgtcaaacatgaagagatcaatgccatcat

SEQ ID NO: 41243 - DNA, 117 bp, Gossypium hirsutum
  Clone ID: LIB3189-008-P1-K1-G5
gtctcccgcacctttatcttttctttttcaacttttcattttttacccaattcatacaattttaggaaggtgtatatttacacgacgtgcgcgtcatatccatgctcaccacttcca

SEQ ID NO: 41244 - DNA, 288 bp, Gossypium hirsutum
  Clone ID: LIB3189-008-P1-K1-G6
agaagataggaatcgaagaactaatgccatagctattctctttcggcaaacacagaagaattgtggttagatcaacgatgcaacagggagattacagctcctattatcaatatccttacctttcaaaccccaactccaaccccaaccctaaccagcaataatgactatctccctaccatcttcaatgctaactatcctccttatggacgggactttgccaacaaaaagcctactgggaggttttgcaatggaaaattagccactgacatcactgctgaaactcttggg

SEQ ID NO: 41245 - DNA, 294 bp, Gossypium hirsutum
  unsure (1)..(294): unsure at all n locations; Clone ID: LIB3189-008-P1-K1-G7
gtttgggcaaagatggtgaagaattggaaaaagtctttgattttggtgctgtttacagtctgcgttctggggtttaagccaagaggtgttaatgccnaaacagatcaagcagatgcttctgctctaggggttatgtataccagcttaaattcaccacagcagctaacatgttggactgctagcaatggtgatccatgtgggcagttctggaaaggcgttacttgctcgaacaaactctcacttgaattaaactttcaatttattggcctttccggtttgttaaattttcatatt

SEQ ID NO: 41246 - DNA, 289 bp, Gossypium hirsutum
  Clone ID: LIB3189-008-P1-K1-G8
ccttcaccgcatttaggagggggtctatttccacgacagggagtgtatccgtccaagattattttttggaacttttccaacccctgtcgaaccaccacacagtttccaagatttttttccagaaacatttgaagttcaatgttttcaatcataattttttacaattttacaacacctacttcaatgacaaaccttatataaggtaaataccaaaagtttctttttatgtctccaacccccaaatttatttatgctctacccttatttttcatggattaaatcattcact

SEQ ID NO: 41247 - DNA, 437 bp, Gossypium hirsutum
  unsure (1)..(437): unsure at all n locations; Clone ID: LIB3189-008-P1-K1-G9
cccacgcgtccgcccacgcgttcgggccttggctctcattcaaagggtactgattggaagtgtgagcaaccatgtgatggtaaatgcaacttgtccagtaacaattgttaaaggatcctagtgctcatggattttgatctcagtattctgcaaaagtaatgttctttgaaaataatcgatgttccttgtttctatttctatgtgggtgatttatgtatgtatgtatggacatcttggttctggggttgtactcagatcctgagggtgcttagttaggatcagttccagtgctgtttccataaataaacaaaactttgtatggacatggacattgttcatggttcgcatttaagtaacaatgtttcactttnnaaaattttttttaggggnttttttttttttntttttattttttttnttttttttttttaattttt

SEQ ID NO: 41248 - DNA, 374 bp, Gossypium hirsutum
  Clone ID: LIB3189-008-P1-K1-H1
atctttgccttcaatcgataacgcgctctctttttctctcatcgaaggttttgatggcgtcaaaattgcagcagttgcaatctaaggcgtgtcaagcgtcgaagtttgtggcaaaaaacggaactgcttactacaagcaattgttggaacagaataagcaatatattcaggagccaccaacagtggagaagtgcaatgagctgtctaagcagctgttttatactcgacttgccagtatccctggccgtaacgaggcattctggaaggagcttgattatgtcaagaatctgtggaagaataggcaagaactgaaggttgaagacgctggtattgctgcattgtttggactggaatgctttgcatggttttgtgct

SEQ ID NO: 41249 - DNA, 366 bp, Gossypium hirsutum
  Clone ID: LIB3189-008-P1-K1-H10
atttatcttctttattctggttgctctgccattcatgtttatttctccaactcattcctctgtgagctaatggtaatgtgaatagagtgcctcctaccaatacaagcgataaggtcactttggctctgtactatgaaactttatgcccatattgtgccgactttatcacaaatgaccttgtaaaggtcttcctcagtgatctgtataccattgtcaatctaaaattagtcccttggggcaatgcttgacattcttggcgatgaaccccattgccagcatggagaagatgaatgcttcttaaatactatacatagctgtgtcatctactactggcctgatgggaaaaaacactttgattttattcgc

SEQ ID NO: 41250 - DNA, 294 bp, Gossypium hirsutum
  Clone ID: LIB3189-008-P1-K1-H11
gtttacttttgcttaaattatagagagaaaattcgattcctaaagatcgaaccctgttttgagtttcttatggggttgggaagcctacacaaattttctgggaaatgaaagataagataggaaaaatagtcacaaatgtgcagctttatccatatgaccttgctagaggccaaactactgatctgaataccatagacaatattaaattagtcccttgaggcaatgctgactttcttggagactaacacgattgggagaatggagaagttgaatgctacttaaattctatacata

SEQ ID NO: 41251 - DNA, 60 bp, Gossypium hirsutum
  Clone ID: LIB3189-008-P1-K1-H12
ttttttttaataaagaaaatcctttgactacgtgattttataacaagggggagaatgggt

SEQ ID NO: 41252 - DNA, 236 bp, Gossypium hirsutum
  Clone ID: LIB3189-008-P1-K1-H3
ctcaaactaccatcgagatcgattcattgtacgagggtatagacttttacaccacgataactcgtgcagggtttgaggagcttaacatggatctttttaggaagtgtatggagccagttgagaagtgtttgagggatgctaagatggataagagcagtgtccatgatggtgttcttgttggtggttcctctcggattcctaaagagcaacatttgtttcaagactttttcaacggg

SEQ ID NO: 41253 - DNA, 174 bp, Gossypium hirsutum
  Clone ID: LIB3189-008-P1-K1-H4
gcgtccgcccacgcgtccgaaaatggatggttattgtagcagaagggtaatcatgtaatcggagacagcattggcatcaataaacagaggggatggtcacgaatcaaccactcttgttcctgcaatcatcacctttggcgactcttgaggagatgtaggcaataatgactatct

SEQ ID NO: 41254 - DNA, 137 bp, Gossypium hirsutum
  Clone ID: LIB3189-008-P1-K1-H5
cttccgatttatcttctttattctggttgctctgccattcatgtttatttctccaactcattcctcttgagctaatggtaatgtggataggtggccccctaccaatacaagcgataaggtcactttggctctggact

SEQ ID NO: 41255 - DNA, 205 bp, Gossypium hirsutum
  unsure (1)..(205): unsure at all n locations; Clone ID: LIB3189-008-P1-K1-H6
gtagtctctcaaggacatcaccacctccactcaccttcccatttttctgtaacaccccccaaagagcttgtgcttggatatggctgaaaacgcagtaaaatggctgtttctcattctagcaagctgcctgtgtttcgctntcgttctgtcagcggttgatagagcggtgggtgatggagtgaatgtgttgtcgttacctttgggt

SEQ ID NO: 41256 - DNA, 313 bp, Gossypium hirsutum
  Clone ID: LIB3189-008-P1-K1-H7
cccacgcgtccgggcaagcccgatttaatcatctgaaactacagtgatggtaatatcgtcggctccttgctggcacataagttgggagttacacagtgtacgattgcccatgctttggagaagacaaagtatccagattccgacatctactggaagaagctcgaggataaatatcatttctcctgccaatttacagctgatcttttcgctatgaaccatacggatttcatcatcaccagtaccttccaagaaattgccggaagcaaggacactgttggtcaatacgagagtcacactggtttcactctttccg

SEQ ID NO: 41257 - DNA, 344 bp, Gossypium hirsutum
  Clone ID: LIB3189-008-P1-K1-H8
cccacgcgtccggttacatgcatgcctttcttttcttactgcacgaatggtaatatcgaggacggctctctgtaacataagatggggagtctcacattgtacgattgcccatgctttggagaatacaaagtatccatattccgacatctactggaagaagctcgtggataaatatcatttctcctgccaatttacagctgatcttttcgctatgaaccatacggatttcattattaccagtacctttcaagaaattgtctgaagcaaggacactgttggtcaatacgagagtcacacttttttcactctttctggtctataccgttttgttcacggaattgatg

SEQ ID NO: 41258 - DNA, 302 bp, Gossypium hirsutum
  unsure (1)..(302): unsure at all n locations; Clone ID: LIB3189-008-P1-K1-H9
tcttgctaaacctgaaatgactgctgctgctgttgtatacagaacaacaaatactggtaacggacaactggttcaagtgcaaaacagccagcatcaacaacaatatgcgggttattctcagattcatcatgcatcacaatctgttgcacctacctccagcacggctgccccatatgcatatgaattcactgatccaactcatgctcaaatgtattacactcagcctatggcacccaacatgcctnctcagtaccaaaccatgactgcagtagtcttgccagatgcacccacgcaactttcga

SEQ ID NO: 41259 - DNA, 78 bp, Gossypium hirsutum
  Clone ID: LIB3189-010-P1-K1-A10
cccacgcgtgcgcccacgcgtccgaccacgcttttcttattttaaaaaaaaacaaaaaaaaaaaggcagggtgtttat

SEQ ID NO: 41260 - DNA, 395 bp, Gossypium hirsutum
  Clone ID: LIB3189-010-P1-K1-A12
ctctacgatgatgttctgtcgtcttctcaccagttttttccatttccgttttctgcctcttctttgctccaaattcctgccatgttcttccttctctcaaccccatgcactttacctcgtccgtttcctctcaaccaacaacaatgacaataggaaagatcagtcattttccaatccctggaatttttccgaagaagctaacggcaaattcgggaatcttttccccgatgaatcgcaaaagaagagcggggaaggggattggttcgttggagaggaagacaaagcgtggagctttggagaagaagacaaagatgatggcgtgtttgattttaaagaagaagctgtacaagatgttggtctaaccattgatggtaccggtattgctttgggtgctg

SEQ ID NO: 41261 - DNA, 64 bp, Gossypium hirsutum
  Clone ID: LIB3189-010-P1-K1-A4
cccacgcgtccgatcaagtggaaaaggaaggcagacaggaaaaggcaaagcagacccaaccaga

SEQ ID NO: 41262 - DNA, 461 bp, Gossypium hirsutum
  unsure (1)..(461): unsure at all n locations; Clone ID: LIB3189-010-P1-K1-A5
taatccccgaaattctctgttttctaatccctggcttcttctcagtttacatccgttttatttttgacgccctaatttgccctctgtttcctgggtctgtctctctttatctccttcaatgcttgcttcgccttcggccagtagccccaatttcttgtcgagcatgccatagagaaaggcaagaagagagctgcttctggttttctttctttggtttctggaacagacccagaagttttaacccagaagccccaaattcttctcctttctttctttggtttctgtaacagacccagagactttagattgacgaggttgncggaagctgtagatgcaacaactccctctcaagcttttaaccgaagatggcagagagttacctctttctcttctcttctatctgatgagggcatttttcccgtcaatgcaatcccgccacaccatgctctctgcccaatctt

SEQ ID NO: 41263 - DNA, 106 bp, Gossypium hirsutum
  unsure (1)..(106): unsure at all n locations; Clone ID: LIB3189-010-P1-K1-A6
attttgttccccttccttgcagaaaacaaaggggagtttttccctcccgactcagncacttgctcactgggccacttacctcgggctttcaacggggttattcgga

SEQ ID NO: 41264 - DNA, 301 bp, Gossypium hirsutum
  Clone ID: LIB3189-010-P1-K1-B11
gtcgtctatcataactccgcggtgcagagccttggtgctttcaaaaggcgtaaattacaaaggggtgggctttttaaagtactaccaacaccacccacgatcgcacaattctcaaatggcaagggacctggaccaaatgctcgcattggctacattgatggggcattctatctctttcatgctgggcatgtggagatcctcaagaaggcaaggcagctcgtagactttttgctagttggtatctaccctgactatatcgtgagtgagcagaggggtttgcccctcccagttatgcatttac

SEQ ID NO: 41265 - DNA, 362 bp, Gossypium hirsutum
  Clone ID: LIB3189-010-P1-K1-B12
tcgcggacgcgtgggcagctaccggaaaatgtctacgtcaccgtccgtcaccgaactccaggtggagaactttacgttccctccgacggtgaagcctcctggttccaccaaaactctgttccttggtggcgcaggggagagaggattggaaatccaagggaagttcataaagttcaccgcaattggagtttacctggaagatagcgccgtgaattgcctcggcgttaagtggaagggtaagagcgcggtggagttaacggaatccgttgagtttttcagagacgtcgttacaggtgattttgagaagttcgtacgggtgacaatgatattgccattaacgggttaacaatactctgagaaag

SEQ ID NO: 41266 - DNA, 53 bp, Gossypium hirsutum
  Clone ID: LIB3189-010-P1-K1-B4
aacttgtgttgcgttggccttgttatatcccactctcctctaaatgcgcaccc

SEQ ID NO: 41267 - DNA, 220 bp, Gossypium hirsutum
  Clone ID: LIB3189-010-P1-K1-B5
tcctttttttttttttcggttaacaaaccgaaaattaagaacccttttcttttacattctgggggaatttaactaaaagctggatcttatgggggcttctttgggttttccgtgcccaacttttttctttatcagggacaagaaagaattggggggctctggttttcctttaacatctcaaatcggcattcaaaaatggaagaaacaagcctcgaagaaa

SEQ ID NO: 41268 - DNA, 469 bp, Gossypium hirsutum
  Clone ID: LIB3189-010-P1-K1-B6
gtttcagaccccaaaacacctttggaacaaccaagacccatccctacgaaacaacaactacaatgttacccgaaagacaaggcggaggtgcaccccatggaataatactagctgtggtggtgggcatcgtggtcttagccccattcttgttcggcgatcaaggcgaagccataactgaagccatttccgagctcttgactcccctcggtctcctcctcttgcccatcatcctactcctcacaatccagttcctttcctcagatcgcggctccttcgtcttcgccgtcttttccaccggcgaacccgacaccatccaccgcgtcagcggctctccctttggggtcgccttgttccttctcctcatcttgttcttgctttacaatcgtgtttccattttcggcggcgatgacgatttcgacgattgactgcttcgatctacggaggacttttttccctttcctttttcttt

SEQ ID NO: 41269 - DNA, 394 bp, Gossypium hirsutum
  unsure (1)..(394): unsure at all n locations; Clone ID: LIB3189-010-P1-K1-C10
ggaaattggttcagaaaagaaaaatggccactanttangttcctgagcaggtttcggttcttgcagatgcagatgctcttaaaaaggcttgtaaaggatgggggacagatgagaaggcaataatttcagtgttgggtcacagaaatgcaggtcaaaggaagcaaatcaggcttgcttatgaagacctttaccaggaagatctcatcaagcgtcttgaatcagagctttctggtgatttcgagaaagcagcgtatcgttggatattggatccagcagacctagatgccgtgttagctaatgttgccataaagaaattaagccctgatcaccatgtgatcgtcgaaatttcatgcaccaaatccgctgaagagctcttggctgtgaggagagctta

SEQ ID NO: 41270 - DNA, 398 bp, Gossypium hirsutum
  Clone ID: LIB3189-010-P1-K1-C11
ctgactttttccctcctattccttccttcttttcttttctctcctgtcatttccttccatttcctgttattttcaccatgccctttcctttcctcctcttcttttcctccatgttcctctcctttccttccctttccttctctcaacaaacccctcccaaaggatatttaattaactgcggcgcaaccaggagatcggtgatccacggccgagtatggttacccgacggtaacttcatatccgccggaacatccaaaaacctaactgtccccggcttagtccccacgctctccaccgtccggtcgtttcctctcgagaacaagaacctccggcgtaagttctgttacgtggtgcgtgtataccgtggtgcgaggtacttgattaggacgacttactat

SEQ ID NO: 41271 - DNA, 467 bp, Gossypium hirsutum
  Clone ID: LIB3189-010-P1-K1-C12
tttttgttcaaggaccacttcttcccttccatttttctttgttttagttgccataacgtcaccttgcaatacaacccacaatgaggcaacaatatgtcttcactactctcacgttgctcatcctgttttccctcagttgttcaacaacattagcccaatctccggcactggccccggcaccttctggcccgacaaacgtcaccaagatcctcgaaaaagccggtcaattcaccctcttcattcgtcttctaaagtccactcaagtggccaaccagctgctcggtcagctcaacaattccaacaatggtatgaccgtttttgcaccaacggacaatgctttctccagccttaaatcgggcacattgaattcactcaccgatgaacaaaaagtgcagctggtgcaattccacatcgtcccaacatacctcacctcgtctcagttccaaaccattagcaaccctttgaga

SEQ ID NO: 41272 - DNA, 130 bp, Gossypium hirsutum
  Clone ID: LIB3189-010-P1-K1-C5
cttcaaagctcctgtccgggtgagaaggctcttcttccttagcgttgcgcccttcgcaggccaatcgccaaaggttcaaagcggattttgaaggaactcaaggaacagcagaaagatccacccacttctt

SEQ ID NO: 41273 - DNA, 263 bp, Gossypium hirsutum
  Clone ID: LIB3189-010-P1-K1-D4
tatgtatggggggggggagaaattctctctgggcgctccattccggcaattggaccaccggccgtgggtcgtctttgaccgccgtgcacggcgtccagaggcgcaaaaatggcccattttaatacttcggctctccccacctcagatctgagtctcaaacgccaaaaaaaacccacggctggtgaaaaagaatgagaaaaccaatcggttttctttttttcgatcgctcaaaaaggttgctaggaggtcaacgttgttggtgc

SEQ ID NO: 41274 - DNA, 415 bp, Gossypium hirsutum
  Clone ID: LIB3189-010-P1-K1-D5
atcaaaaggtcgaattgcttccatgctagtggcggctaatatccatgccatatgaatagcaacccttatatgattgcttttggtattgttgaaatcattttctctcaaattcctgactttgatcgactatggtggctttccattgttgctgctgtcatgtctttcacctactctacaattggacttggccttggtattgctaaagtagcagaaactgggaaaattaggggaagcctgactggaatcagtgttggaactgtgactcaaacccaaaaaatatggaggagtttccaggcacttggagacattgcttttgcctattcatactcccttatactcatttgaaattcaggacacccctttaaggctccaccatcagaaatcaaagacaacggtagaaagccacccttgataa

SEQ ID NO: 41275 - DNA, 199 bp, Gossypium hirsutum
  Clone ID: LIB3189-010-P1-K1-E10
gtcagccaattgtttgagctagctagctctttccctaatggcaaccaaaacgatgatgttgcaaagtattttcacttttcttctttttgttcagtatctgcaactccattttccttggtgctaatggagatgacaatggtggttgtcaaactgcccatgccatcttttacagcggtgctataactacctgcacaacgac

SEQ ID NO: 41276 - DNA, 447 bp, Gossypium hirsutum
  Clone ID: LIB3189-010-P1-K1-E11
tctcaaatctcctcctcctcctcagaaatcttagtttcatcaccatggcctcaaatcccaaggtcttctttgacatgactatcggtggtcagcccgctggtcggattgtgatggagcttttcgcagattgcactcctcgcactgctgagaacttccgtgccctctgtaccggcgagaaaggcgtcggccgcagcggtaagcccctccactacaaaggctcctctttccatcgtgtgatccctaactttatgtgccaaggaggtgacttcacggccggaaacggtaccggaggtgaatccatctacggatccaagttcgctgacgagaacttcatcaagaagcacactggtcccggtattctctcaatggctaacgctggtcccggaactaacggatctcagttcttcatttgcacggctaagactgagtggctcgaccgaaagcacg

SEQ ID NO: 41277 - DNA, 455 bp, Gossypium hirsutum
  Clone ID: LIB3189-010-P1-K1-E12
cggacgcgtgggttaaaattcaattatggtgaaacctagtgaaaatgggtctcagtcaatagcaccctttctaaaaaaatgttatgaaatggtggatgatgagtctactgatgcgataatttcatggagtcaaaataacgatagttttataatttgggatatgactgaattttcagttcatttgctccctaagttcttcaagcacagcaatttttcctctttcatcaggcaactcaatatttatggttttagaaaaattgatacagaccgttgggaatttgcaaatgatggattcgtcagaggtcaaaaggacttgcttaagaatattgctagacggaaacactccccaggatctgagcagcgtaaaccattgcagcagcagccactacagcagctggagaacactgttggatcatgcgaaaacaatgaaacactggactgtggaaggaagttga

SEQ ID NO: 41278 - DNA, 383 bp, Gossypium hirsutum
  unsure (1)..(383): unsure at all n locations; Clone ID: LIB3189-010-P1-K1-E3
gacccacgcgtccgaagactcttgggcccacacttctgctgactcttgagagccncccataaactggtagggtttctaagaccaccctaaccctcgagaaggctcccaccaccgggctaccgagacagacgctgattacccgcaatagcgccgacgcccacggcggctggaaaataaaaagggaacactgttgggtgacgtcggctcccctagcgtaaaggcatcttacatcggagatgacagacctaggccactcacggtggcagaagacgagaagacaggtgagattaccgcccccttatgtaccataacatgcgtattcttgaaaaaaacgcaagttaaaaaaataaagaatcaagaatgaaggaatgataggacccacc

SEQ ID NO: 41279 - DNA, 59 bp, Gossypium hirsutum
  Clone ID: LIB3189-010-P1-K1-E5
cccacgcgtccgacgaaatcagtcaaagcggcggatctattggtggagaatccgggtca

SEQ ID NO: 41280 - DNA, 464 bp, Gossypium hirsutum
  Clone ID: LIB3189-010-P1-K1-E8
gatcttttctctccccaaacacctcattttcctgtgtaaaaaaaaacaaaaaagaagcgtaagtgaagaaggagaagaagaaaaagaaaatggcggaccagcttaccgatgaccagatctctgagttcaaggaggcctttagcctctttgacaaggatggcgatggttgcattactaccaaggaactgggaactgtgatgcggtcactcggacagaaccctactgaggcagaactccaagatatgattaatgaagttgacgccgatggaaatgggaccatcgatttccctgaatttctcaacctgatggcaaggaaaatgaaagatactgattctgaggaggaacttaaagaagctttcagggtgttcgataaggatcagaacggtttcatatctgctgccgagcttcgtcacgttatgacaaatcttggcgagaagcttaccgacgaggaagtcgatgagatg

SEQ ID NO: 41281 - DNA, 221 bp, Gossypium hirsutum
  Clone ID: LIB3189-010-P1-K1-E9
gttattgctcatgtggaccacggtaaagcaatcctgagctctattcgtctagaagctgctgataggatgtacgtgttcatgtaagcatgcataggtgatgcgtccccacgacaacataccgcgtgctagatgaggcgtgaactggtgtattacaagtcaagttctactggtgatctctactttattatgaacatgcctgaggactgctttgcaagagctac

SEQ ID NO: 41282 - DNA, 104 bp, Gossypium hirsutum
  Clone ID: LIB3189-010-P1-K1-F1
gaagcccgtccgacagcgcgtccagcgcgagcttctataaggaatcgggttaaaattcctgaaccgggacgcggcggctgacggcaacgttagggagtccggag

SEQ ID NO: 41283 - DNA, 214 bp, Gossypium hirsutum
  Clone ID: LIB3189-010-P1-K1-F10
cccacgcgtccgcccacgcgtccggtctaggtgcatatagtgattccagaggtattccaggcgttaggaaggaggttgctgaattcattgagaggcgtgatgggtatcctagtgacccagagctcatatttctcactgacggtgccagcaaaggtgtgatgcagatcttgaattgtattatccgtggtcaaggggatggggttttggtatctgt

SEQ ID NO: 41284 - DNA, 461 bp, Gossypium hirsutum
  Clone ID: LIB3189-010-P1-K1-F11
ctctctttctatattttttctttctgctaataatttcttttgtcaccagcggcgtcggaagacaggaaaacaccggtgttgtttgaaatggcagcttcgagaatggatctggacgggagaccaataaagccaattacgatatgcatgattggagcgggaggcttcattggctctcacctctgcgagaaattaatgtcggaaacgccgcacaaggtgctcgccttggacgtttacaatgacaagattaagcacctcctcgagcctgactctctcccttgggctggccgtatccagttccaccgacttaacatcaagcacgattctaggcttgaaggcctcatcaagatggcagatctcacgataaatcttgcggcgatctgtactccggcagattataatacacgcccgctcgatacgatttacagcaattttattgatgcactttctgtggtgaaatactg

SEQ ID NO: 41285 - DNA, 413 bp, Gossypium hirsutum
  Clone ID: LIB3189-010-P1-K1-F12
aaccataattctaacaacaaaggtcatcattatgtgataaaaatcaaagccaagcttcatacaaatacgaattaggaccagtttcatcaatcatgtcttgtgttctttctttttctttttccttttttaagaaaaaaaaagggaaaattaataatttatcatcatcatcatcgtgatcaaagacataaagcagtacactggagatcatcagcgtcatccaacggtggaaaattgagatcaaaaggcaacattctccgacgtgaagatgatgcgataaccccatcatcaacgaccgacgacgacgaatcgcagtcgctgtgacaatcctccggcgccaaaggcggcgtcctcggacgattctttctggtcgaaaccgccgcgaaatccgtcgacttctgtggcggtagttgagc

SEQ ID NO: 41286 - DNA, 409 bp, Gossypium hirsutum
  Clone ID: LIB3189-010-P1-K1-F2
cccacgcgtccggtttattttctctctaaaaagtggtgcattagaatccttacatcaaacagatggcaaccatggagaaggggttagagtttgagaacaagaatttaggcctgaagcacctaaacttcgtcagggtggctacgatccacgccttggtttgcatctcgaacctttacaattactctaaacagaactcggggccgttgagatccaccgtcgacgccgtcgagcgtgccgttaccaccgtcgtcggtcccgtctacgggaaaatttaaggatgtctctcgtcattttcttggattccttgataacaaggtagatgaggttttacacaaattctgttgagcattcttcaattccagccaatcatgtggtttatcattcctacgttttggttcaaaaggcttat

SEQ ID NO: 41287 - DNA, 159 bp, Gossypium hirsutum
  Clone ID: LIB3189-010-P1-K1-F3
aggattcaaaagccaagatccgacattctagagtctgtaactcactgtgacggctcaagccaagctgaaaccaggactgacgaagaaacgctactcttcactacagccggcaacaccatgcggtggccggcggggaaaagtggggggctggccgtggct

SEQ ID NO: 41288 - DNA, 178 bp, Gossypium hirsutum
  Clone ID: LIB3189-010-P1-K1-F4
cttcaacgaatcgatctcccgagagtgaagaagatacttattgtctgactagatcgaggacttccgagcacgcgcttctaaaagaatgttgatgtgagatggggatgatgaggctacccaagacgggtgttcttgggggtaaaattgcgagcgtgttataattagggatatgactgaa

SEQ ID NO: 41289 - DNA, 468 bp, Gossypium hirsutum
  unsure (1)..(468): unsure at all n locations; Clone ID: LIB3189-010-P1-K1-F6
ggcggcgacgccctcaaaaccaacatcacaacattgggttcgctcgtcctcccattctccgaacaactcttcttcttcgccaccctaatttggcgccatttctttggcggcgataaatccaaaacctccctatcaccgtcgtcgaagccatacatccccgactacaagctcgccttcgaacacttctgcgtccacgccgcaagcaagacggtgctagacgagctgcaaaagaacttggaactcagcgaaaacaacatggaagcatcgaggatgaccttacaccggttcggcaacacatcgagcagcagcatatggtacgaattggcttatttggaagctaaagaaagggttaaaagaggggataggatctggcaaatagccatcgngttctgggtttaaatgcaacaagtgtggtttgcgatccatgcgtcgtgtgaggaagccttcaagggataacccatggggtga

SEQ ID NO: 41290 - DNA, 181 bp, Gossypium hirsutum
  Clone ID: LIB3189-010-P1-K1-F7
gcccaccgggccttcgacagtacgagacaatgtcctgcttgagacccgacatgtctgaagatgaaaggcttgctcttacccagaagtacgaggagcttcttgtcgccggtggtggcatgtatattgaggtatttaatagaggggtcccttatttttgctcttacttataattctatttatt

SEQ ID NO: 41291 - DNA, 355 bp, Gossypium hirsutum
  Clone ID: LIB3189-010-P1-K1-F8
cctcaatctctctaatcctcgctttcttccccatcttacacaccttcgattttcccaaggttgtagaagatggcagaaggtgaggatattcagccacttgtttgtgacaatggaactggaatggttaaggctggatttgctggggatgatgctccccgagccgtattccctagcatcgtcggtcggccacgtcacaccggtgtgatggttggcatgggccagaaagatgcatatgttggtgatgaagctcaatcaaagagaggtattatgactttgatataccctatcgtgcatggttttgagtgctactggtaaggttctgtaaatatattccctctctttcttttattaccag

SEQ ID NO: 41292 - DNA, 435 bp, Gossypium hirsutum
  Clone ID: LIB3189-010-P1-K1-F9
cccacgcgtccgctggtctttccccaaataaggtgataggcattggcctgttatggggccctgactgcacggtggaattcttaaaaaagttcaaactaaagctaattatcaggtcgcatgaaggcccagatgcaagagaaaaaaggcctggtcttggaggaatggatgaaggatacacaatagatcatgatgtggaatcggggaaactgataactgtatttagtgctccagactacccacaatttcaggcaacagaagagagatacaataacaaaggagcatatgttgtactaaagccccctggttttgataatcctgaatttcatagttttgaagccattaccccaagacccaaggtgaatccatactatgactttgaggaggtgattgattctgatgaagacttggatttaacttcaatggggacttctgact

SEQ ID NO: 41293 - DNA, 453 bp, Gossypium hirsutum
  unsure (1)..(453): unsure at all n locations; Clone ID: LIB3189-010-P1-K1-G1
gaaaaaggaaaaaagcatttgtaattgtaattgtttcgagatctctgtgtgtatagacagtctcaaatggcagtagctgcagcaccagatcacttgttccatttgaggaacaatttctacttgggttcctttcaggctgccatcaacaacagcgatctttccaacctcttccccgacgacgccgtcgagcgcgactgcctcgtctaccgctcttacatcgctctcggcagctaccaactggtgatcaatgagatcgacttcggcggttgaacttctctccaagcccgtaaactgctggccctctatctctccaaccctcatgataaggaatcaacaattgcgagcttgaaagaatggntagcagatccagcgattggaagcaatgccttaataaggntgattgctggaatcgtttcatgcatggagaagattataatgaagctcttaaacaca

SEQ ID NO: 41294 - DNA, 387 bp, Gossypium hirsutum
  Clone ID: LIB3189-010-P1-K1-G10
gggaggttagtagggctgggacagaggtcatctctatctcgaatttgaaggtagagttgctgaggttgagaactttttgaaaactactgctaaaatgatacaggttcaggtagaggttgttgatcggaaacttgaaaatgaaattggtgggttaaggagggaattgaatgagagaatagacgatcaaagtgtggcattggggaattcattgaaaatattggaagaaaagagcgagggattggataagtccttgcgtgaattgaagagcgcgaatttgttgaccaaggatgaatttgagaatatgtatgaacaaatgtttaaagagaagggtggaattggctagattgaaactgctgtgagtttgagtgatatatgttcctattcaag

SEQ ID NO: 41295 - DNA, 463 bp, Gossypium hirsutum
  unsure (1)..(463): unsure at all n locations; Clone ID: LIB3189-010-P1-K1-G11
cgggaagaccgaggagcaggttaaggcacttggtgtcgattaccgtgttgggaaattccctttcttggcaaatagccgaaccaaggctattgatgatgctgaaggaatagtcaagatattggctgacaaggagacagacaaaattcttggagtccatattatggcaccaaatgcgggagagctcatccatgaagcagtccttgccattaattatgatgcatcaagtgaggacatcgctcgagtgtgccatgcacatcctacaatgagtgaggcattgaaggaagctgcaatggccacctatgacaagccaattcacatctagaaatatggatttttacatgttattcttcattttgatttatgtttgaanaatttcgagattgactcggcagcagtcagcacaaactgttcattttcttgttgtccttactcgaaacagatggcgtgcttgaatagacatttg

SEQ ID NO: 41296 - DNA, 394 bp, Gossypium hirsutum
  Clone ID: LIB3189-010-P1-K1-G12
attgcgcttcttttttatgtgtatcttttgtagtttgttgttaggccatagggaaaaacaagggaggggatgggcaacctattttgttagtgtccaagtagaccaatcaaccggagcgataaaggaacgatttggcaagtttgatgaagttctagagcctggacgccattgcttaccttggcgtattgtgagacagcttgccgggcatatgactctgcgattacagcagatagaagtgcgttgtgagaccaagactattgacactgtatttgccaacgttgcggcatacatacattgtcagcgccctgactgagaaggctaatgatgctctatacatacttagcaacccctacgtactaaactgaagcctatgagcttgatgatattatggcat

SEQ ID NO: 41297 - DNA, 411 bp, Gossypium hirsutum
  Clone ID: LIB3189-010-P1-K1-G2
ttttgcccataagtctactcccagtttcccttaatcctccatgggcaaaggcggaggttgtgtcccaagcaaaaagagacaaccttcctctgccgaaggctctgccactgccactgccactaccgccaccaacaacgcacccatcgaagccgatgaagaaactcacgaaactgccagtgtagctgtgaatcctacgaatgcgcaatcagttaccgccactttaaaaatctttattgtttactactccatgtatggtcacgtggagaaactggccaagcggatgaagaaaggggtcgacggcgtggaaggggtagaagcggttctttatcgggttcccgagacgctcccggctgatgtgctggaccatatgaaggtgccgtcgaaaaacccccgaagttccagagattaaag

SEQ ID NO: 41298 - DNA, 446 bp, Gossypium hirsutum
  Clone ID: LIB3189-010-P1-K1-G3
cttacatagttccgttccattttccctaacaaacctgcatcagatccgatcagatttaactcagatccatccgtatcgggtcttctaaattccagatctttacttttctcgagtaaaggaagaaagaggaagggagagatgagagagattattagcgtccacattggccaagctgggattcaagttgggaattcatgctgggagctttactgtcttgaacatgtaatccaccccgatggaacaatgccgagcgacacctcaatgggcgtcgcacacgatgctttcaacactttcttcagcgaaacgggttcgggaaagcatgtgcctaaagctgtctttgttgatctggaacccactgttatcgatgaagtccggaccggcccttatcgccaactttttcaccctgagcagcttattttcggcaaggaagatgctgctaataattt

SEQ ID NO: 41299 - DNA, 237 bp, Gossypium hirsutum
  Clone ID: LIB3189-010-P1-K1-G4
gcaaaatccaaaaagaaatacacaattttctttgttttctgttttgtcttcctcttcccagtaatagatggtaaggggagggaaggttggtccaagaagcaattttaaaagaagggtcagatcaaaagatgaggcttcggatgattcaaatgaagattatgtcgtttcactggagggaaatgatgaatctgaggacgatgtgaaacattattgttcttccttagatgagcgcccatc

SEQ ID NO: 41300 - DNA, 351 bp, Gossypium hirsutum
  Clone ID: LIB3189-010-P1-K1-G5
tcacgatcctttctctatttctcgatcctaactccgggaatttttttttccatttcgttttccgggaaatagttttcccggaaaagtacgagccaaattgtctatcgggccaatcagaaaaaaagaatcagtagctttcttttgaatggggcaacaacaatcaaaagacgagttgctatacaatcaagtcaattatggtaacgcagaagggatcaaatctcttttccgtgaaggcgcaggcctcgagtggatggatagagaagggaaaacgccgttgatattagcgtgtttgaatccacagctttttgatgttgccaagactttgatcgaacttggttctaacgttaacgc

SEQ ID NO: 41301 - DNA, 456 bp, Gossypium hirsutum
  Clone ID: LIB3189-010-P1-K1-G6
gttgtcggcggccgagaacaatttaattacgagtttgttcctaaaaacatagccgccgacacgttcaagttgcatttcctgtcggaaaccaatgaacgaggagtagagaacaatctctacccttttgtttttctcaatgtcgatggaaacctgttcattttcgccaacaatcgagctattttgcttgattatgtgaacaacaaggtggtgaaaacttaccccaaaataccaggtggggagccaagaagctatccaagcacaggttcggctgtattgctaccattgaagaacttgacagccgccactattcaagctgaagttttagtttgtagcggtgctccaaaaggatcatttgtccaagcattacaaggtaagttcgttaaagccttgaacacttgcgccaggatctcaataaccgacccgaaaccaaaatgggtcttggaaactatgccttta

SEQ ID NO: 41302 - DNA, 439 bp, Gossypium hirsutum
  Clone ID: LIB3189-010-P1-K1-G8
cggagatggaagccacattgaacttgcatgcattgtttcagagccccaacccatggcacgtttctgtctcttacgcacgtgcattgcagaacactgtgcttaagacatggcaaggacgtccagagaatgttgaagctgcacagaaggctcttttggtgcgtgcaaaggcaaactctctggctcaactcggaaaatactctgccgagggtgaaagtgaagaagccaagaaaggaatgtttgttaagggctatacctattaaggcgtaagacactgtaatatctggtttttgggcatctatggctttttgtgcgaggattattacttgctgttagataagttttttacacattattgttatgcctcctgaaactagggaggttgaataagttacttgagagagtagaaagatcattcctcgaatactttcctagacgcctt

SEQ ID NO: 41303 - DNA, 325 bp, Gossypium hirsutum
  Clone ID: LIB3189-010-P1-K1-G9
cccacgcgtccggctcccttctctaaagaaacactgttaggtagccgtttttgctttcagaaaatctaccgcagtttgcagttgagaggatggtgagagtcagcgttttgaatgatgcactcaagagcatgtacaatgccgagaagaggggcaaacgacaggtcatgatcaggccttcctccaaagtgatcattaagtttcttttggtcatgcagaagcatggttatattggagagtttgagtatgtcgatgatcacagatctggaaaaattgtggttgaattgaacggaaggctgaacaagtgtggggtgattagtccttattt

SEQ ID NO: 41304 - DNA, 459 bp, Gossypium hirsutum
  unsure (1)..(459): unsure at all n locations; Clone ID: LIB3189-010-P1-K1-H1
gcggtagcggagaggaagtggctgagcgagtattgagccagccatctttggccgggttgcagggccccacggtatgtccagttttttgtaagcgtgatggaaaagtaactgctgactactatgccatagtcatatgcgtacctaagaaagctttatacaagtctgtacaacaattgagagcgattggaggcagcggggtgttgatatcacctttgacctacatttttgatgaagagaccccaagatggagagaacttctttcaaagcttggtatctagtccatttgggattgaggcatgggtgttttacttgcatttcatataaaaagctgaaaaatttgtaagtgccanagtggttgaaaatttacttttgccgagagatagggaccttcaaagtgtgtcatggtggtcttgtttctcagtagtggcattcttcagccccttgtttcttttgtcaata

SEQ ID NO: 41305 - DNA, 435 bp, Gossypium hirsutum
  Clone ID: LIB3189-010-P1-K1-H10
ccacgcgtccggtgagttgaagaagaacaaaataatgagctgcaatggctgccgagttttacgaaaaggatgcagcgagacatgtgtgttacggtcgagtttacggtggattgaatcggctgaagctcaaggcaacgctaccttgtttctcgctaagttttttggccggagtgatctcctttcgcttatctcctccgtccctgaatctcaacgtcccgctttgtttcagtctttattgtttgaggcatgtggacgaactgtgaatccggtgaacggagcggtggggttgttatcgagtggtaactggcatatctgtcaagcggcagtggaaacggttcttcagggcggagctttacgaccaattttggctggatcctggacaccgagttgtgacgagtcatcaaatcgtttttgtgtaactcgggcaactttgaa

SEQ ID NO: 41306 - DNA, 404 bp, Gossypium hirsutum
  Clone ID: LIB3189-010-P1-K1-H2
caagaagaaggggaggaagagattgtggagttgtcttctgattgtttgtgaactgggaagttaaagataaagagactgatagatatatcaacaaagagatgggatctttcaagggtcatgctttgccagggacactgtttctgatggtgggtgtatggcacatatggagttccgtggttcggtttgtgtcaaaccccaagtcttttgaggtcagagtatggagcccagttcctgggtttaatgggaagatgaatcactttgtgactatatgttgtagccttcggcgctttcattgatctgtggattgggcctttgtattcaaccaactcaagtttttgtggatggagtcttgaatccatcacacttgaacgattttgagcatttaaggatgcttctaatgtttt

SEQ ID NO: 41307 - DNA, 429 bp, Gossypium hirsutum
  Clone ID: LIB3189-010-P1-K1-H3
cccacgcgtccgcccacgcgtccgttcccttccattttactttgttttagttgccataacgtcaccttgcaatacatcccacaatgaggcaacaatatgtcttcactactctcacgttgctcatcctgttttccctcagttgttcaacaacattagcccaagctccggcactggctccagcaccttctggtccgacaaacgtcaccaagatcctcgaaaaagccggtcaattcaccctcttcattcgtcttctaaagtccactcaagtggccaaccagctgctcggtcagctcaacaattccaacaatggtatgaccgtttttgcaccaacggacaatgctttctccagccttaaatcgggcacattgaattcactcaccgatgaacaaaaagtggagctggtgcaattccacatcgtcccaacatacc

SEQ ID NO: 41308 - DNA, 387 bp, Gossypium hirsutum
  Clone ID: LIB3189-010-P1-K1-H4
gaaagggatcagagaactgtatttgcttatcagataaccttgaaggctagtgaaagagatatttatgagttcttctctagggctggcaaggtacgagatgttcgcctcataatggatcgaaattcaagacgttcgaagggatttgcgtacgttgagttctatgatgtggatgtcagtccctatggcaatagcactctctggccagcctcttcttggtcaaccagtgatggtgaaaccatcagaagctgaaaagaatcttgctcagtcaactacatctgtggcagctggacagataggttcacatgctggtggagcgaagaggtttgtgttggcaacctacatttcaacattacagaagatcaacttcgtcaggtttttgaatctttt

SEQ ID NO: 41309 - DNA, 371 bp, Gossypium hirsutum
  unsure (1)..(371): unsure at all n locations; Clone ID: LIB3189-010-P1-K1-H5
ccggaacggaagttccgacccgagcgacgcgtacgggcggaagacattgtacccagcatctatgcttactcacctggcacccatggtagagttcgccaaggtccttctcactcaacacccttccctttctatccacatcctcatcgccacccttccttcacaaccttcctacaccgttccctcccccgttcctgcttccatcaccttccactaccttcccacattcgacctccttccaacctcaaccgacttagatccgcttttcttcgacgtcatccgcctcagaaaccccgatgtccgtcgcacccttctcaccatctncaataactacacactcaacgccattatcgtcgacttcttctgcaccagcg

SEQ ID NO: 41310 - DNA, 242 bp, Gossypium hirsutum
  Clone ID: LIB3189-010-P1-K1-H6
aaaaaaaaaagaaaatctttagctgatactcgatttcgacctgccaattgtcacttgatctcatcgtttttccgtctattctcctggcgatttagattaattaaatcgtaacagcatgaatttcctgcttggagctttcaagccggcatgcaatatcttgatcacattttcccatgctaaaactcgcaagcaggtatgcttctagatcactgtgattggtcaatttatttttcacgagtcat

SEQ ID NO: 41311 - DNA, 463 bp, Gossypium hirsutum
  Clone ID: LIB3189-010-P1-K1-H8
cggacgcgtggggccaaaaccaaaatatgaagatactatgccttcacgggtttagaaccagtgggaagttcctgcagaagcaaatcagcaaatgggatccttctctttttcttcatcactttcaaatggattttcctgacgggttatttagtgccggaggaaagtcagacatagaaggcatattccctcctccatactttgaatggttccaattcaacaaggaattcacagagtacacaaaccttgaggaatgcatctctcacttgtgtcaatatatcacccacaatggcccttttcatggattgctcggcttttcccagggtgcaactcttggtgctcttctattgggctacaaggcacaggggaaggtgttaaaggagcatccacctttcaaaatgtttgtatcaatatcaggatcaaaattcagagagccaagcatatgcgaggtggcttacaaagacaa

SEQ ID NO: 41312 - DNA, 322 bp, Gossypium hirsutum
  Clone ID: LIB3189-010-P1-K1-H9
cccacgcgtccgcccacgcgtccgcccacgcgtctcttttggtccgtttcctctctctctgtctgtgacgagtttgcttgattgctttcaagaaacatctgcttttccttacaagactttttttaaaaatcctcgctgagtaatttctttttcctatgaaccgaacagaggatgattactaggcgttgcttttgtagctctgccccgcggccatggctggttgcgggtctaggcaaccctggtgataaatataaaggaacaagacacaatgtgggttttgagatgattcgacgcttttgctaaagctcaagggatagaaatg

SEQ ID NO: 41313 - DNA, 319 bp, Gossypium hirsutum
  Clone ID: LIB3189-011-P1-K1-A1
ctcgagaaggagttctactaaaatgaccaaactgttggaactgttgcaagctacatcaatactagtgtctctgatcagaaagctgtactggagactgcacataaaatcactgatgagaaggtgacgagaaatgatacacaagagacaaatggtacaagagcattccagattcaagatgtgctttccctggaaaatgaagattctgatgagacgacaaccttgcttgataaaaaggataatgtgtgtgtaatgtcaaatagacaatccatgtatccagtgctccaagttgattcgagattgatatcagatttggtgttgt

SEQ ID NO: 41314 - DNA, 259 bp, Gossypium hirsutum
  Clone ID: LIB3189-011-P1-K1-A10
tcgttctaccacggagttcaatctatttcaatttcatccgggaaggctatgaagcttgggtcattgtataattttctttctctctgctgggcatgggttggaggaccaggatcagctatactcaacttgagtggcatagtaataaagccaacttgctatatgctgacatgaatgcatccttctatgccttaagatggaagatctacaccgagatgcaagaaaagaccagagcagctattaaatctgaatctcaatctaa

SEQ ID NO: 41315 - DNA, 265 bp, Gossypium hirsutum
  Clone ID: LIB3189-011-P1-K1-A11
gtcttaataaacgccttcgatttaccttcgatttccatttacttctctattgctacgttgttgaatttttagtgagcgaaaatgagagagtgcatttcagtccacatcggtcaggctggtattcaagtcggaaatgcctgctgggaactttactgccttgaacatggaatccagcctgatggccagatgccaagtgacaagactgtcggaggaggtgatgatgcttttaacacctttttcagtgaaactggttcttggaagcacg

SEQ ID NO: 41316 - DNA, 455 bp, Gossypium hirsutum
  Clone ID: LIB3189-011-P1-K1-A12
cggacgcgtgggttccgagcagatcgaatggttatgcttgctaaggcacttgaatatcaagatttcaacaaatttgatcgtatacgggtccctaaaatccgttatgctggaatgcttcagtatgatggcgagttgaagcttccaagctgctaccttgtttctcctccagagattgatagaacatcgggtgaatatttggtgcataatggtgtccgtacttttgcctgcagtgagactgtcaaatttggccatgtcactttcttctggaacgggaaccgctccgggtatttcaatcctcaaatggaagaatatgtggaaatcccgagcgatgttggcattacgttcaatgttcaacctaagatgaaggcattggagatcggtgaaaaggctagggatgctattctgagtgggaaatttgaccaggtacgtgtgaacataccaaatggtgacatggg

SEQ ID NO: 41317 - DNA, 301 bp, Gossypium hirsutum
  Clone ID: LIB3189-011-P1-K1-A2
gaatcgcatattactttgatctctccaacgaaatttaagtaataaaaatggtgttcgaggtgatgaaagtggcaacgacgacgtttgagaggcgcagataccaggcacttctggtcttcgtaagaaggtgaaagtttttgttcagcctcattatttgcagaatttcgttcaagcaacattcaatgcccttacacccgagaaagttaagggtgccacacttgtcgtttctggtgatggtcgttatttctcaaaggatgctgttcaaataataatcaagatgtcagctgcaaatggagtaagg

SEQ ID NO: 41318 - DNA, 464 bp, Gossypium hirsutum
  unsure (1)..(464): unsure at all n locations; Clone ID: LIB3189-011-P1-K1-A3
ctctctctctctattctctttggcttatctatcgctttgatttcgcatccttgctgtgcactcgatggcaaatcgatggttgaggcctgaggtgtatccgctgtttgcggccgtaggtgttgctgtcggaatctgcgggtttcagttggtgcgcaatatctgcatcaaccctgaagtcagggtaaccaaggagaacagggctgctggggttttggacaactttgctgagggagaaaaatattctgaacatttcttgagaaaatatgtccgcaacaagacgccagaaatcatgcccagtatcaacagcttcttcactgacccaaagtgaggcttcactcttgctttatgctgaaactaaaaaataaaaaaaatagaagaactaagtcttattcaatcaataccaagttatgccctttctttctgctgactgtgatgcaaatntgtgttggttttgcacttggatg

SEQ ID NO: 41319 - DNA, 330 bp, Gossypium hirsutum
  Clone ID: LIB3189-011-P1-K1-A4
ctgcatcaacctatgttttgggtctgaggtatctttattgccggatcttcgttgtcaatcatattgggattgtcaagagcagatgctgatgtgggagtcatggtttctttcagaacatcatttggtttccgatttaacccgaattcgaataccatagaatatgcaaaccgagattccgtgttcttagccattctttgacatctattgttaccatgctaggaatattcataacatatgtatctattacaaccaatatgttatgccaaggtcctgctcacctattaccctgatgatacccactctactagaatcatcaatggaggtggaaag

SEQ ID NO: 41320 - DNA, 457 bp, Gossypium hirsutum
  Clone ID: LIB3189-011-P1-K1-A5
gtctgccataactggcggcgcttccgtttctctttttggccctaagaagactaaaggccgtggtttccgccaggacaaccccgatcgtcattcccatctggcctccggggactttgactctatcgggtctgacgggggccccggcccccaagatctatggaagatgggataatttggtcactggggtcatgaggaacacaagaggatgatttgcacaatacaattgggtgaatttggggagatcaagaaatttgcatttaaatcttgatcgtcgcactggatttgtcaagggatatgcactgattgaatacgaaaagtttgaagaagccaaaaatgccatatctgcaatggatggagcagaacttcttacgcagactatgaatgttgattgggcctttagcaatggacccagtgttggagcctcttaaagaaaaaatatagagctggacggacacat

SEQ ID NO: 41321 - DNA, 456 bp, Gossypium hirsutum
  Clone ID: LIB3189-011-P1-K1-A6
aaaagtactctgtttttgctctgtttttaagtcatggtggtaatggtaactccactttgcttgctatattggctgttaatttcaacatggtggcttatggtttcaacgtcaggaatggtgtggattccattaactcattcattatcaaaaacccaattcaccactccacaccacttgcttaaaaccacctcaactcgttcagcaactcggttccgccagcatcatcaccaccgtcacaaacaagtgtcagtccctctttcacctggtagtgattatacgctttcgtttactcttggttcaccttcttcttcaactatttcactttatcttgatactggtagtgatctcgtttggcttccttgttcaccatttgaatgtattttatgtgaatcgaaaacgccgccgctttctcctccgcttaatctttcttcatctgctaccgccgtaccatgcaaa

SEQ ID NO: 41322 - DNA, 261 bp, Gossypium hirsutum
  Clone ID: LIB3189-011-P1-K1-A7
agccaaaaaaaaaaaaaaaagcctctttcctgtctctcgttctttttcctgttcaatcatgtcttggttcattagcaaatatgctgatgagttggctaaaaacgctgcttacattggaacccctggaaagggtatgcttgctgctgatgaatccactggcaccatcggcaagcgtgtttcaagtattaatgtagagaatgctgcatacaacaggcgtgctctacgtgagctgctattcacaactactggagctttttatca

SEQ ID NO: 41323 - DNA, 380 bp, Gossypium hirsutum
  Clone ID: LIB3189-011-P1-K1-A8
cccacgcgtccggaaagagaaagaaaacgcaacaatatttcactgaaaaccatgaatactggcttggcaaattacgaattctgcgactgcttttgatccaatccgtctttcgactatacccttgagatgacccatactcattactaatggcacctctatcgctaaacaacaggacagtttccagacaccacggatagaacagctacatacaagtggcgaatatgaccaggaaagtcctcaactaccaatctgtcattctttcacagccaagtcaaaccttgcccatctgtcgaatcgactctatcgatcgtcgccttggtctcggtttcaaagaaaacgaagccgctgcttatctccttaaatttcccacgttttcgtaa

SEQ ID NO: 41324 - DNA, 355 bp, Gossypium hirsutum
  Clone ID: LIB3189-011-P1-K1-A9
gatatttggacctggaaagtggggaggagagtcaacagtgctggcttctatggtgatagatttgtgcatcttcccgaaagtcttcgaaaggcaaatagtccaaaagtctttgcgagcaagccagcacttgaacgttttatccggttgaatttcccagatgcagatgttaatgcgttctttgcttcatttgtttggaagatccctgccgttgtggaatctcctactaaagtggcagctgcgcctgcatcaccagctgaaggaacagaagatgatcagcatgaatgtgtcacataaggtcttcttataacccataggaagagggctccccctccttccccattcagtacttctagtt

SEQ ID NO: 41325 - DNA, 183 bp, Gossypium hirsutum
  Clone ID: LIB3189-011-P1-K1-B1
gaaaaccacaaaagcttcagtgtttcttcttttcatcatcttctcagtcacaccatcatcctttttgtttggtgtggccaacgctacaaatgaacctgtgctcgacactgatggcaacgaagtccaaacaggcaccgaatactacgttgtgtcggcgatatggggtgctggtggtggtgggct

SEQ ID NO: 41326 - DNA, 400 bp, Gossypium hirsutum
  Clone ID: LIB3189-011-P1-K1-B10
aaaccctaacggctacactcttctctcactttctaaactaacaaaagaaaacaatcacggaaatggagttttctcaagctgacttcgatcgccttttactctccgaacacactcgtaaaatctctgaagttaactacgccaaggaccctcttgatgctgagagaaaaggcgtgctgaggcttccagaatcaggcgaaaataccctgacagaattccagtctgaccaaggtgcttatttgcttttaccatcatatgtcatccggacacatgggataaaacaacagcgtgaaactgttaaaagaactccaaggaagcaattagagcttgttcttgaggccctggatacactgggaaacaccaaatggaggataaattgtaggattcttggagtactaaacac

SEQ ID NO: 41327 - DNA, 361 bp, Gossypium hirsutum
  Clone ID: LIB3189-011-P1-K1-B11
gaaatttaaaggaaaaaaaaaatcattgcattttcctcctccttctctctgtccctgcaacaatcgttcgacgatctataaaccttctctcctcaggattttagggtttttttcattttctactgtaaactccaaaatgcataaactgggcagaggtcatcgggacaaagtccagcagttcatgactataactggagcgagtgaaaaacttgctcttcaagctttgaaggcgagtgattggcatcctgaaggagcttttgattctctctatggccagcagtctcatattaaaagttataccagatctacattttttggaagaactttattaaagatactaagatccttacaccagatatga

SEQ ID NO: 41328 - DNA, 452 bp, Gossypium hirsutum
  Clone ID: LIB3189-011-P1-K1-B12
gacatatctcatgattgatgaagatgaacctattcttgagaaagcaattgggactgaaattgaatggtatcctggaaaatgcttaacgcaaaagcttcttaaaaagaagcctaagaagggttcaaagaatgccaagccaatcactaaaacagaggagtgtgaaagtttcttcaacttcttcaatcctcctcaagttcctgaggatgatgaagacattgatgaagatactgctgaggagctacaaaatcaaatggaacaagattatgacatcggatcaacaattcgagacaagattattccacatgctgtgtcatggtttacaggagaagctatccagggagatgagcttgatatagatgacgatgaagaagatgacgatgatgatgatgaggaggaggaagaggatgatgtagaaagagatgaggatgaggatgctgatgatgaggatgctg

SEQ ID NO: 41329 - DNA, 338 bp, Gossypium hirsutum
  Clone ID: LIB3189-011-P1-K1-B2
gggaaacatgttcttcttctggtagtagtagttcatgcgactccggcttaacatgtcaaacttgcgccggaaatggaaatacccgacccagatgcactcggattcaaccactcagccctacatcaaaggtaaaaggtttgccatttaacaaatattcttggctcacaactcacaactcttttgcactcaaaggggtaaagtctgaaactggatcctctattattgcacccactaaccaggaagacaccatcaccaatcaacttaagaatggggttcgtggacttatgctggatatgtatgacttcaatggtgatatatgggtatgcaacttccttggg

SEQ ID NO: 41330 - DNA, 75 bp, Gossypium hirsutum
  Clone ID: LIB3189-011-P1-K1-B4
cacgccgtctcgctccacgtcgtctcgcgtgacgccccgtgggaaacccgccttcgtatttaacactatcgattt

SEQ ID NO: 41331 - DNA, 454 bp, Gossypium hirsutum
  Clone ID: LIB3189-011-P1-K1-B5
gtgcattacatcttgttgtgttcattactcagatccctatcgcttttatttctgttccatttttcctctttattttctaattttgggtattatttactcagatcccctttctttttattattggtttttctcttatatttagctagaaatcgacgatgccagaagaagctagaaatcgacgatgcaagttactgctggtctcattgctgctggtaacaagttattgcttaaaattcatggtaacaaatctacttccaaggaagttattcatattctttcgtatcgaagaaaagttatttacggtggaacttgattctccagctctcgtaagtttgttcccagttttgtatttgccatctataccaggtttacctctcttgcttctcttcgtcttcatctccctttcatttattctaccaaaaacgccttttaggtgtcattttttttctcacat

SEQ ID NO: 41332 - DNA, 403 bp, Gossypium hirsutum
  Clone ID: LIB3189-011-P1-K1-B6
gccgcctccaagagaagacagagaggtctcctcactactcaccgtaatgggtcgtgtcattcgagctcaacgtaagggtgccggttcggtcttcaaggcccataccaaccaccggaagggtcccgcccgtttccgcagcctcgacttcggtgaacggaacggttacctcaaaggtgtcgtcaccgacgtcattcacgaccctggccgtggcgctccgttagcccgcgtcgttttccgccaccctttccgttacaagaaacagaaggaattgttcgtcgccgccgagggtatgtacaccggacagttcgtgtattgtggtaagaaagctacccttatggttggaaatgtgttgccccttagatctatccctgaaggagcttgcggctgcaacgttgagcaccat

SEQ ID NO: 41333 - DNA, 295 bp, Gossypium hirsutum
  Clone ID: LIB3189-011-P1-K1-B7
atctatatccttctgtttctggtcaagccaatctcaaaagactccccttttagctcacagctcgggtcttgagtactataatgggggaggagaaggttcacatcaacattgtggtcattggccatgtcgactctgggaagtctacaaccactggttatttgatctacacgcttgttggcttagacaagcagaggattgatcaggttgagtaatgatcgttctcacttaccaataagacacttttacctatcaacttaagattgcggttcgtggacttacgctggatttgtaatac

SEQ ID NO: 41334 - DNA, 163 bp, Gossypium hirsutum
  Clone ID: LIB3189-011-P1-K1-B8
tgcctccgtccgatcccgtcgacccacctccgctagatctcagtaaacctgctaagggtgttgttatacttccttttatctccgcggggatctcctatctaaggggagtatatctactaagcatctttcttctggatcattcgttgaacctccctttcttgga

SEQ ID NO: 41335 - DNA, 339 bp, Gossypium hirsutum
  Clone ID: LIB3189-011-P1-K1-C1
gcgtcacgcccacgcgtccgctgtcttcgccgattgtcgtaaaagggttgatccaccgatgcccgacagttacttcggggacttgattcaagccatcttcaccgccacagcggccgggttgttattggaaaacccaccgtcattcggagcttcagtgatacaaaaagctatagaatcccacgacgctaaagccatcgatgaacgtaacaaggcatgggaagcagcgccgaagattttccagttcaaagacgccggtgtcaactgcgtagcggtcggaagctccccgaggttaaagtttacgaagtggatttcgggtggtgaaagccggtaggggtgagg

SEQ ID NO: 41336 - DNA, 279 bp, Gossypium hirsutum
  unsure (1)..(279): unsure at all n locations; Clone ID: LIB3189-011-P1-K1-C10
gtccggtttggaggattttaatcttactgagtgttcttgttgcagataggtgcagggaaaagagcgatggcggcagtgcccggacagtagattttnnangtatnaaataacaacaattgccttttgaaagacaaggagtaagtactaaagtgttccatactttgatgactacacctttggaacatgacaacatacgctcgtaataagacttcttgaatggaaagaagctatcagaagatatctaatgtggggtcctatacaattcctctccatttttga

SEQ ID NO: 41337 - DNA, 296 bp, Gossypium hirsutum
  Clone ID: LIB3189-011-P1-K1-C11
tggaccacagccttccgatgaatcttcctttaatagtcctctacctttattgaaaatcaagcgtttgttttggaagtggaggcaaccctggattccaggctgatttcgaatgaagctgttgatatgaaaatcatgaagaaattaggtgatgatgatcggcggcaaggcttgaccaaggcgaaaaatcggtcggatgctttggtgtcgtacaaggagttgccggactatatgaaggacaatgagttcatactgtattattatagggctaattggactctcatggatgttctttttaa

SEQ ID NO: 41338 - DNA, 346 bp, Gossypium hirsutum
  Clone ID: LIB3189-011-P1-K1-C12
tggttccggtgctcatgatccgtttgacatcttttcctccttctttggtggtagcccgtttagaggtgttttcattcgaggtagaatacatataatgggagaggatttttatattttatttatgttttaatttataaccttatcatattttttctatatactcttttttttttattatctttacttttttaatatattattatttttatttaaaatatattatttttttatttattttttattattttttatgttatttattttttataattttatttatttatttttattttttaaattttttattaattttttatactttctaatgatatcatttatttattat

SEQ ID NO: 41339 - DNA, 338 bp, Gossypium hirsutum
  Clone ID: LIB3189-011-P1-K1-C3
atatatgcaattaaccatacagatctgatcatcaccagtactttccaggaaattgcaagaagcagggacgctgtttgtcaatacgagagcgacactgctttcactctttctggtctctaccgcgttgtacatggtatcgatgtgtttgatcccaaattcaacattgtttcccctggtgctgatatggagatatactttccttacaccgaatagaatcggaggttgaatcattttcattctgagatcgaagaccttttttacagcaaaggtgtggaatgaataacacttatttttttctcaattaccctatccaagccaatttctgttcacaatttcta

SEQ ID NO: 41340 - DNA, 433 bp, Gossypium hirsutum
  Clone ID: LIB3189-011-P1-K1-C4
ggaaccctttccccctcgcttgcccacctccgtttcctccaaaacctctccgtcgccgataacaagcttaccggtcctatcccgacggagctcgctgtcctatccaatctccgttacctaaacctttccaacaatgttttcaatggttcctttcctacccagctttcccagctgaaaaatcttcaggtactcgatttatacaacaacaacatgacgggcgagctgccggtttccgtcacagagcttcccaatttgcgtcacttgcatttgggagggaactatttcagcggtcagatcccgtcaagttacggccgttgggagcatcttgaatatttagccgtttcgggtaacgaactcagcggtaaaatcccacccgaaatcggcaacttaacgaagctgaagcagttgtacattggttacttcaatagtttcg

SEQ ID NO: 41341 - DNA, 445 bp, Gossypium hirsutum
  Clone ID: LIB3189-011-P1-K1-C5
cccacgcgtccgcccacgcgtccgcccacgcgtccgtccacgcgtccgatttcttgaagagagaaaaatgatgtgttactgccgcttgtttgttttgcttgcactctcaagttttgtggtcgaaagtcgacatctcaaaggaaattcatacgaattatccaacttccatccttccggcaccaatgccaccattgaacccaaaatatgggcagttttagttgctggctccaatggttttgtaaattataggcaccaggcagatatatgccatgcatatcaaatcttgaaaaatggtggactagaagacgaaaatattatcgtttttatgtatgatgatattgcattcgacgtagaaaatttgagacccggtggtcataatcaataaccagatggagacaatgtttataaaggagttcccaaggattacacaggggaagatgtaaat

SEQ ID NO: 41342 - DNA, 251 bp, Gossypium hirsutum
  Clone ID: LIB3189-011-P1-K1-C6
agcaaaaataaaattgaggggcttattgaatcaatctgataatcgcacttgtgctgattgtggtgctccagatccaaagtgggcatcagcaaatattggagtctttttatgcttgaaatgttgtggtgtgcacagaagcctcggtacacacatatccaaggttttatctgtggcattggatgaatggtctgatgaagaaattgatgccatgattgaagttggaggaaattcctctgctaattcaatctatg

SEQ ID NO: 41343 - DNA, 207 bp, Gossypium hirsutum
  Clone ID: LIB3189-011-P1-K1-C8
gcttttgttgcctgtgctttctccccatttcaaactctgtttctctttgggaattttgggttctgctcattttatccactttcaaggccttcttcttttgattgctattctaattactttcatctgaaaaaaaaaagaaaaataaatttcttcctcaactgcccaaattcatgttcttggtgatatctggtttccctacctcaataa

SEQ ID NO: 41344 - DNA, 457 bp, Gossypium hirsutum
  unsure (1)..(457): unsure at all n locations; Clone ID: LIB3189-011-P1-K1-C9
cccacgcgtccgctagatcgcgagcggccgcccgctatctagactccctccgccattgccactggttctctctcttctcacattagctattgtgttcttcattttgcttgttgtaactatttaaagataaggagtaagttcttaagtgtttcatactttgatgtctacacctttggaacatgattacataggtttggcagagacttcttcaatggaaagaagctctgagaagatatcttcttcttcttcctcttcaattccctccaatattgaagacaaaaccaccaacaatccttccctgaatctcaaagaaactgagctgaggcttggcttaccaggttctcagtcacctgagagaaagctgtctctntttggcaaagatttggagactaatgataaaagcaacggttttgttggtaagcccttgaagaacctggtgtctggagctaaaaggggt

SEQ ID NO: 41345 - DNA, 310 bp, Gossypium hirsutum
  Clone ID: LIB3189-011-P1-K1-D1
cattttccttcattttctcagcgaattcgaaaccgaaaacgcaagaaatttttcattttttcttgagtcgaggcaacttttcaatctgggttttgcttgaatattcatattaactttgttttatacttaaaaaagatgacagaagcgagtaagaaaagcatgaatccggaaccagttcatgttcaaagcacagcttcgtcaaacgaaacaagatcaaacaacaatctccccaattttcttctttcagtgaggctaaaatacgtgaagctcggctaccattatttaatctccaacgccatgtatttaatgc

SEQ ID NO: 41346 - DNA, 421 bp, Gossypium hirsutum
  Clone ID: LIB3189-011-P1-K1-D10
atctcatgtttgtatatttctgggtttttttttcttttgcggttgggttcatatgattttgcgtgttaattatcttgttggatgaaggcttgatcttttgttgtagcatgagctaatgtacttataatttagtttttgatctggattttatctgattattggttttttccgttatagttgatcatttatttagaatatatacatatatttttgcaattctactgtttgttcactcttttgatctgatcaatgagaatactagctaaaggaatggctttagattgcaccatttcaaattgtattggttacacttttctttaaatattatttatttttaatatatattggattatacatgtctatcaggtgtctgggtttaaaatttttattttatgaatgtaatattattttatcttaattt

SEQ ID NO: 41347 - DNA, 231 bp, Gossypium hirsutum
  Clone ID: LIB3189-011-P1-K1-D11
aataaaaaaaaaaaaaattaaaaaaaaaatataatttataaaaaaaaaaaaaaaaaaaaaaatagtaaggttataaaaaaaaaaaaggagaaggaaaaaaaaaaaaaaaacaaaaacaaaataataaaattacaataaaaaaaaaattaaacaacaaattaaaaataaagcaatttttccaatttttttaattacaggtactggccataacattctcttcaatttgcttct

SEQ ID NO: 41348 - DNA, 83 bp, Gossypium hirsutum
  unsure (1)..(83): unsure at all n locations; Clone ID: LIB3189-011-P1-K1-D12
tcgtctcgtcggacgccccgtgggctanngttctagnantacgcgagtctggctctgcccttttnnttttttnnntttttaac

SEQ ID NO: 41349 - DNA, 215 bp, Gossypium hirsutum
  unsure (1)..(215): unsure at all n locations; Clone ID: LIB3189-011-P1-K1-D2
gcaaccatggtgaagtattcaagagaaccggacaaccctactaaatcttgcaaagctaggggttcgtacgttcgtgttcattttaagaatagaccanaaactgcctttgccatccgaaagctacctttgacaaaggcaaagagatacttggaggatgttattgcccacaagcaagcaattccgttccggcgcttctgtggtggagttggactaac

SEQ ID NO: 41350 - DNA, 417 bp, Gossypium hirsutum
  unsure (1)..(417): unsure at all n locations; Clone ID: LIB3189-011-P1-K1-D3
tttttttttttttttaatttttttttttttttgttttgtttttttttaaaaaagggttgggtatataaaaaaaaaaaaanaaaaaattttttaatttttattaaaaaaaaaaaaaatacnaaaaaaaaaatataattttaaatcctttacccctataaaaattttaataaacttaaattaaaataaaaaaccaaattgaccttttaaaaaataaaaatacaataccctaaacaaaacaaaatttttaaaaaaaaaaacaaaaatttttaaaaatatcccatcccaaaatataaaaattttaattttataaaaaaatagaactaatatctttaaaacttttttaaaaaacatcatatttttaaaaatatccaaaaaaaaaataaatttcttaatatgtaatataaaataatatctttt

SEQ ID NO: 41351 - DNA, 317 bp, Gossypium hirsutum
  Clone ID: LIB3189-011-P1-K1-D4
caaggtcacccggaccggttgttgccggatcggggtcaagttggtatgacccaacacttcatgaggagtgactccgatctcctcatgggaacctgtcatcgacgcggcgtccatgccatgggcggtatggcagcacaaattcccattagagatgatccaacagcaaatgaagcagcctttgaacttgtaagaaaagataaacaaagagaagttaaagcagggcatgatggaacatgggcagcttatccaggtcttaataaaacatgcatggaagttttaccaacaccatggggaactcttcgaaccaaatcgaaact

SEQ ID NO: 41352 - DNA, 378 bp, Gossypium hirsutum
  Clone ID: LIB3189-011-P1-K1-D5
cccacgcgtccggagagctatgcaagatgctttgggtagagaagctagagaaaagcacgagagattggagcgtgagaagcaacaaagggaaagggaggaggaagagagacagcaacggagatatgaattggagagggaaagggaggagaaagagagagaacaaagaaggcttgagaaagagagggaacaggaaagggccagacaagctgttcaaagggctactagagaagctcgtgaaagagcagcagctgaagctcgtgtgagagctgaaagggctgcagttgaaaaggcagctgctgaagctcgagaacgtgccgaaagggctgcagtgcagagagcacaagctgaagcccgtcaaagagcagcagctgaggcaag

SEQ ID NO: 41353 - DNA, 457 bp, Gossypium hirsutum
  Clone ID: LIB3189-011-P1-K1-D6
gtctccttcctggagagcagattgacatgcctataagtctttttattgttgaaaaggaaaaacgtggtggtgatcgtcaactaacctgtactttcttgcaggttttcttctacatagatcctgagtttgaaacagatgcccgaatggatggtataaacaacctgattttatcatatacttttttcaaggtttccgaagaatagaagggggatatttaaattcatagtgaaaatagaatatcattcacatgagaataaaaactattggttaggatcccattttcatataccgggagaagagggagaagaaacattcttttatcggaattattttattattacagtctcctttcacctctttatggtggaaacagtctatttttgtaccaggctcctccctcttcataccaaggaagtgcagaacttgtgtaaaatctgtggctgttctagtatggagt

SEQ ID NO: 41354 - DNA, 405 bp, Gossypium hirsutum
  Clone ID: LIB3189-011-P1-K1-D8
ggcaatggcatcaaatgtgagagcaaatatgggtatcctttccaaagccctaacgagactgcggcgcactggggccttgtattcccgtcccaaccaatccctccccccgccaaagcattgggtaccatcttcttccttctccaccgctgctgctgttgcttcatcccaatctcttcatgataaagagaaaggatcaaaatggtcaagatggtttcttttccttcctggagctatcactttcggccttggaacttggcagattttcagaaggcaagacaagatagagatgctggattacagacagaagaggttgcaaatggaacctttgaaactaaatgacatgcctccttcaagtgaaatattggacactttagagtttaggcgagtcgggtgcaaaggaagttt

SEQ ID NO: 41355 - DNA, 319 bp, Gossypium hirsutum
  Clone ID: LIB3189-011-P1-K1-D9
cggatacccggtcgaccacgcgtccgatacgatctaacattctggtttagatttaacacttttcagagttgagttttgaggaaacaaggtgcaccaaatcactgaagcgagcgatcaaataactgctatggctcggtatcttttctcggacctgccgagacaatcacctaacatgactgatacctgccgcctcatatcacaaccacctaatgttgtttccttaccaataaaccaaccgttccgttttcagtgttctcagatgtccattccctagctacgtatttcatgcgacagaggattccatgtaaaccatgctgta

SEQ ID NO: 41356 - DNA, 367 bp, Gossypium hirsutum
  Clone ID: LIB3189-011-P1-K1-E1
ggtcctagctggagtacaacttctagtctagtgggtaattcacaaattgctgaaatatttgttgaatggggtggacattcttccactccagcaaaaccatctgcataggggtgacactcaaatcttgagcccgtatactcatttaaaccatctatcatggcaagcgatcatgctgctgctccaacttcacgaagcgaccaattgactcattcgtactgcccggatcctgctcataatgcatttgcttgtgatccaattgttcccgaacctaatgagggtgatgaatcagtttcagatctcttggctgaagttgaagcaatggagtctcttaatggcttgacttcacctacataaattatgcattgtg

SEQ ID NO: 41357 - DNA, 438 bp, Gossypium hirsutum
  Clone ID: LIB3189-011-P1-K1-E10
gtttttaacagatcaagcagatttgctagtcttctaagcatcaaatgtgcaattgcagggaagagtctgtatttaagattctcatgctttactggtgatgctatggggatgaacatggtttccaagggagttcaaaacgttttagatttccttcaaaccgatttccctgacatggatgtcattggcatctcgggaaacttctgttccgacaaaaagccagcttcagtaaattggattgaaggccgaggcaaatctgtcgtctgtgaggccatcattaatggtgatgtagtgaggaaggtcttgaagacaagtgtagaatctctcgtggagcttaacatgcttaagaaccttactggttctgccatggctggagctctgggtggtattaatgctcatgccaatgacatttgtcactgctgtctatatagctactggcca

SEQ ID NO: 41358 - DNA, 451 bp, Gossypium hirsutum
  Clone ID: LIB3189-011-P1-K1-E12
cggacgcgtgggttctgctacaatatgctaatgagactgcaaagctaaagccaccccatgagtatgtgccatgggtggtggtggataatcagccactcaaagatgactttgaaaattttgtgaaatatgtctgtgaagcttataaaggtgccgataaaccagaagcatgcaaaacacaagcaaccagtgtcagctcaacccatgataagatggcaaacagaatacatccaggatgctatgctagtgaaattgcaaatttgggatagaaccttgaaagaggccagaacttgtgctttgtccattacagctgcttcacaattcaccaactacatgtaataaaaccagcctctagttatcattatcgttgatatcttttacatatatgacatgttacaggtgatatgtttacggtgtcttctattctatgaatgaaagatcaacatccttttgg

SEQ ID NO: 41359 - DNA, 462 bp, Gossypium hirsutum
  unsure (1)..(462): unsure at all n locations; Clone ID: LIB3189-011-P1-K1-E2
attgatcagcatgtcaccttgcctcaatttcattacgggaaactcgtcgaccccgtctcaacaatgctgcgacacagcttgccagtgtcgtgcgttcgtcaccccaatgcttgtgtgaggtccttaatggtggtggttcgtcgctggggatcaacgtcaaccggactcaagctttggccttacctggcgcatgcaatgttcagactccacccatcagtgcctgtaatggtgcttctccagcgcctgcagactctccagttggatcaccagaatctgggagtacaatccccacaggtggatctaaaactgtaccatcctcagaggaagatggatcaccatcatcatcatcgagtggaagcaccatgaccaaattgacactctcattattgttcttcctcattgtggccatatcacattgaatcttctatcctatttggaaaacattntatgatattattgatt

SEQ ID NO: 41360 - DNA, 171 bp, Gossypium hirsutum
  Clone ID: LIB3189-011-P1-K1-E4
ccttggataaaattatcaagtaataagttttaagtataacaaaatttgagaaacacaaaaggaaaattcagaaaaaagcatccagcataagttcattttaggtgccaaacttaaaaactacaaaatctaagacacttaacatgctccaaatatcaaatagatgactatcat

SEQ ID NO: 41361 - DNA, 447 bp, Gossypium hirsutum
  Clone ID: LIB3189-011-P1-K1-E5
atcttattttggtatcccctcttttttttttctttttttttctcagttcttattcttgcaaagatggcagcatcgtcagcatgcttgctaggaaatggtccgtctactcacagaacaaaatcgaagttgagtaaagaattttatgggaggaatattgtatttacccctgccatttcatctttgggtcggaaatcgaatgccgtactcgtaaaggcatctttaaaacataaacaacatgaaggaagaaggggattcttgaagtcattactcggaactgctggaattggagttccggctttactaggaaatggtaaagcatatgctgatgaacaaggggtttcttcctcgagaatgtcgtattctaggtttttggagtatttggacaaggacagggttaaaaaagtggatttgtttgaaaatggaacgatagctattgtggaagctgtc

SEQ ID NO: 41362 - DNA, 451 bp, Gossypium hirsutum
  Clone ID: LIB3189-011-P1-K1-E6
gtggttctcaatcaggcggcagcatgctctggtagttatggctgacagtctttactactcaagggtgccgcgattactgcaagcgtggttttgatggcaaaaattgcattgctgatgaacattacttgccaacttttttccatattatagatcctggtggtattgccaactggtcagtaacacatgttgactggtctgagagaaagtggcaccctaaatcctatagggctcgggatgttacatacgagctactgaagaatattacgtcaattgagttgagtgtgcatgtaacaagtgatgaaaagagagaagagcaggtacaggcctgcctatggaacggtgtccgacgaccatgctacctatttgctaggaaattctatccagaaaccctacataaactgatgaagcttcacaatttttgaatataaaatttttggttggatgtgacaat

SEQ ID NO: 41363 - DNA, 453 bp, Gossypium hirsutum
  Clone ID: LIB3189-011-P1-K1-E7
atgaatcttcctttaatagttctctacttttattgaaaatcaagcgtttgttttggagatggatgcaaccctcgattccaagcttgtgtcgaatgaagctgttgatatgaaaatcatgaagaaattaggtgatgatgatcggcggcaaggcttgaccaaggcgaaaaatcggtcgtatgctttggtgtcgtacaaggagttgccggactatatgaaggacaatgagttcatactgaattattatagggctaattggtctctcaaggaagctctttttagcgtctttcgttggcataatgaaacacttaatgattggacgcacttacttgggtttcttctatttctgggattaaccatggccaatttttatggaattcctacatattgtttatcttattacattctttatccgttcgttaattatttatgatttcctcaggtttttttatattc

SEQ ID NO: 41364 - DNA, 52 bp, Gossypium hirsutum
  Clone ID: LIB3189-011-P1-K1-E9
gaccccttcattccacctaataactcttctatagtgtcacctaaattcaatt

SEQ ID NO: 41365 - DNA, 133 bp, Gossypium hirsutum
  Clone ID: LIB3189-011-P1-K1-F1
ccacgcggtccgggttggagttggactaatgcgattccctacttgccctcaatttgcattgctgctgcagaaggacgttggtgaggccaaggattttcgtgaaacagaagggggttgatgttgggtccgattg

SEQ ID NO: 41366 - DNA, 399 bp, Gossypium hirsutum
  Clone ID: LIB3189-011-P1-K1-F10
tgccatttgccataatcatcttcctctttttttaataccgctccctatacaattcccgggtgaacttgcgctgaattacatggctactgcataagctgtatcagctcagactgcaatccatgaggagaaacctgaagaagtggtcaaggttggagaaattgcaacagaagaggtaccggctgctgctcctgcagcagaacctgttgctgaagaaccaaaggaagcagtgcctgaagcagcatccggagaaccccaggctccagaaactgaagccacagttgaaactgaatcaaaggaggtggttaaagagcccaaggctgtgactgaggagccagaagttgagaaaaaagaagaagagactcctaaggaaacggtagcagagccagttgccgaggagtc

SEQ ID NO: 41367 - DNA, 268 bp, Gossypium hirsutum
  Clone ID: LIB3189-011-P1-K1-F11
gattttcaacaaatatgttcatcggatcttttttgaatgatgagcggaagaaacaggtgcgctggtgactgcatattagcatgaagagctcaaacatcaaactctaatattcaagtacatgatctgagacatccctataccacctgatctactgttgaccatcaacagaagctgctcggatacctgactttcttcaaggctctgctgttaccaaaccaaacatatcggatggatctgcatcaagctgagatcgccaagatacataaac

SEQ ID NO: 41368 - DNA, 387 bp, Gossypium hirsutum
  Clone ID: LIB3189-011-P1-K1-F12
gcaaaagggggcacacagacaagtagactgcgtgtatttaggttttggtctctgaatgttgggaaatattagaggggctctaggtgatcatgttgggtagggagctgtggtgttgcaattgggaagtatttaatcttctcttacccctcaaggtccctggttttaatattattattattttttggggagggtgtggaattagaaaaagttaagaaccctagtgacgctacaaggttgaaatcttgagattcctagttgtagtaggagttgtgtattttatttatgttagtgtaattttattttgttttgttttttttttcttctggattcacaaacgaaacaactcagtctctgtttcagaaatcatcatactttttaagttgagac

SEQ ID NO: 41369 - DNA, 227 bp, Gossypium hirsutum
  Clone ID: LIB3189-011-P1-K1-F2
cccaacattcggattctatggatttgttctaacaatatgaaaaatttgccaaaataatatatcacaaacaaataacaaaaggtccattacaacatatacacactattctcactcttatccaatgaagtccatttcaaaaagctcaaacaattcaatacacccattttatgtagaaaccccacctgttaagactccaacaccaatcatttacatataaatcaagcatt

SEQ ID NO: 41370 - DNA, 462 bp, Gossypium hirsutum
  Clone ID: LIB3189-011-P1-K1-F3
ctacaatcgaaacccttaggcggcgactactcgagcttcataacacccgaagcttttaactatggcggatgtagagacggaggttgcgacggccggtgtgcccaagaagagaacattcaagaagtttagcttccgaggtgtcgatttggatgctctccttgatatgtccactgatgagcttgtcaagctcttccctgctcgagctcgcagaaggttccagaggggtttgaagagaaagcccatggctctaattaagaagcttcgcaaggcgaaaagggaggctccacctggtgagaagccagaaccagttagaacccacctgcgtaacatgatcattgtacccgaaatgattggaagcattatcggtgtgtacaatggcaagacattcaaccaagttgaaatctagcctgaaatgattagccattaccttgctggagtttctatttcgtacaagccagttaa

SEQ ID NO: 41371 - DNA, 116 bp, Gossypium hirsutum
  unsure (1)..(116): unsure at all n locations; Clone ID: LIB3189-011-P1-K1-F4
aactatgggggaggtttatacagaaatagggacggcccaatacccaanaagagaacattcaataatcttaacttccaaggtgaataattaaatactctcatttatatatccattta

SEQ ID NO: 41372 - DNA, 460 bp, Gossypium hirsutum
  Clone ID: LIB3189-011-P1-K1-F5
acccgtccgttcaatttccccatctctctcgtctctgggtctcgtaagttggtgaatagtgttgtaattagtgccaatggctcggattgggacctctgcagctcacattgtgttggcaatatttgctgtggccatgtttgttgtgtccgggaccatggcacaggatattgctccttctcctgcaatggctaccggagcaggctctgctttgccggtttccgctgtcttcttatgctcttccatgttggtctctttaattgctctcttggtgcattgaattcaaagcttttcaagactttatgacattggctacccttaatttcactctcactggtgatgaggggagtagcctctaatcttctccgagataatatttgggtgttatcaattttcaatttctctaaagttttaaatatctctatatatatcatgttacattagtgacataaattttgatttg

SEQ ID NO: 41373 - DNA, 428 bp, Gossypium hirsutum
  Clone ID: LIB3189-011-P1-K1-F8
gttttcgcttcacttttttaatctgtcacgtttcattgactaatttggctgataaaatcattcgggtgagtgttttaaaattttgagttgggcttaatcaatctctgttttttctcggtttcagctgccatggctaccgacccttcaccccaaatcccaatgagggccagttcaaagagctcaaacaattcgatacacccagtggatgtggaaaccccacctgttaggactccaacaccaatcatttacagagaaatcaagcatttcaagaaatggataccttggttggttcctgcttttgttgttgctaacactgttatgtttatcatcaccatgtacgttaacaattgtcccaagaattccgtttctcgcgttgctgatttcttaggcagagtctcctttcacccctttaaggagattccttttct

SEQ ID NO: 41374 - DNA, 411 bp, Gossypium hirsutum
  Clone ID: LIB3189-011-P1-K1-F9
gtcatccatccttcactcctgaagaaacttcacagttgatgcctcctttggcctcagaacctagggttctgcaatagaatactcgggagcttcccaatctgataggaaaaaccagcttcctattgctgtggataaacctgctgaagatggctacaactggcgtaagtatggacagaagcctattaaaggctgtgagtatccacgaagctactacaagtgtacctatcttaattgccctgtgaaaaagaaggtggaacgatctgcttatggccaaataaccgaaattatatacaaaggcgctcacaatcatgaaatgcctcagcaaaataaacaagcaaagggtggtagtgatggaaatgcaaattcacaggcatatcctgaatttggttctcaggttgcagctttaaattc

SEQ ID NO: 41375 - DNA, 425 bp, Gossypium hirsutum
  unsure (1)..(425): unsure at all n locations; Clone ID: LIB3189-011-P1-K1-G1
cccacccgtccggcgaaatcaaaagccagcagcgctgcatctaaaagaagcagtcgtttgacaattattggccatgggtaaggttaacggatctctacctcgtcctgtaagggtgagaggccaacctcctaaagtggccaaccaggacaggaaaaaaaacccccgtggccggcttacaaagcggtgcaatacacccgccgttcgtcaacgcagtggttggatttggcaaaaaaaggggacctaactcatctgagaagtaagagatctatgtaggtgaaagaaggcaagaagccttgttgaaagctttgatggattttaagtctttgntttcttttgataatggttttatgatactggtttcaaggattggattgaactaccattttgtttgctagatattatggggtattgttatcaattatctt

SEQ ID NO: 41376 - DNA, 301 bp, Gossypium hirsutum
  Clone ID: LIB3189-011-P1-K1-G10
acgcgtccggcaatagtactactactccaagcaagcattttccttacaagtttgtttttcttgtgattaatcgatatggctagctcaatgtcccttaagcttgcatgtgtggcggtgttgtgcatggtggtgggtgcacccctggctcaagagtcctggacgctgtcaaaagcttacacaaagtcgatccttccacggtgacacctgatgttcatttgcagaaagatttagggttagatagcttgcacaatgtggagattgtcatggctttagaggaagagttcaagctggaaattccaga

SEQ ID NO: 41377 - DNA, 236 bp, Gossypium hirsutum
  Clone ID: LIB3189-011-P1-K1-G11
gcagcttgcattttgattacccttttttttcttcaaccttatttaaacccattcgctagaaaggcactgtttcttccagtgtgcttccgattcgagttactgcactgctcgtgaactccctaagtgggtaccgccatggcgacgtataccaacaggtacacttaatgttcagcgctctaaatattggagggctcatcggagtgtatccgtggacaatatcataagagtccaggctt

SEQ ID NO: 41378 - DNA, 455 bp, Gossypium hirsutum
  Clone ID: LIB3189-011-P1-K1-G12
ttctgattatctacttgatgaagccacaaacttgtggggacataatcttgacttaatggataatcgggttttaagatatccaaatcgtgtgcagaacttatacttcacattcctctttgtgcttcgagctgtgacaaaggcagctgattacttggaacaagctgaatacgataccggtaatccaaccgaggacttaaaaacacattccctaatgagacagctactttataatccaaaattgcaagctgcatgcccacttccatttgatgaagctaaattatggaaaggacaaagaggacctgaactgaagcagaaaatacaagctcaattcaaaaatatcagtgcgttgatggactgtgtagggtgtgagaaatgtcgactttggggaaagcttcaggttcttggtcttggaactgcattttgagatactttctcttgtaatggtgaagatcact

SEQ ID NO: 41379 - DNA, 418 bp, Gossypium hirsutum
  Clone ID: LIB3189-011-P1-K1-G2
ataaccgtatgttacatgggagaaaaacagaaagaggtcgtaagcgtgatactcttacgataaaggttgtgaaaaagtatatccattatgcaaaacacaggattcagcctgagctgactgatgaggcttcagaacacattgctacagcttacgcagagctcagaaatgccagttcaaatgcaaagactggcggaacccttccaatcacagctagaaccttggaaaccataattcgtctatcaactgctcatgcaaagttgaagttaagcagaaaggttacaaaagttgatgttgaagctgctctgaaagttctaaattttgctatttatcataaagaattgacagagatgggggatcgtgaacaagaacggcaaagagaagaagcaaggacacacagagcggatcgtcaagggccaac

SEQ ID NO: 41380 - DNA, 525 bp, Gossypium hirsutum
  unsure (1)..(525): unsure at all n locations; Clone ID: LIB3189-011-P1-K1-G3
tccggannnattcccnngggtcgacgccaacgcccgtccgtgttttaatgtcataaacaatanntcgatcnntcccgggntcgttatttaccatgtggnctggtcgacccaatattaccaccgagggatgcgtgttttttacccggatagtgatagaaanccaaatgcttcnntgcgattcttgagtatttagagggaaataccgaccgactgtcatctcnctttctttcctgaaaaacttccttcgtataccgactatgattctgcaacacaattcaggaagcgtctgaaaagcttggcaagcaaagaacatcctatagatgttccgagaaacgtaactacccaaatgtacataacagcttccatggataaaattgttcacaacttttctgcgtatatggactatactcttctttcaagcttaaacaatataagctgggtgaacccctcaacagatgtgcttcaagcttattacaggaacttgagtggattctataccttggattttctggatgagccttccta

SEQ ID NO: 41381 - DNA, 395 bp, Gossypium hirsutum
  Clone ID: LIB3189-011-P1-K1-G4
tttttatttttttcagagcctccttcaccaaactccgctctgttcagcccgtgatcttttgatcgttctctatggctaccatttccaagctctctaaccccaacccagtcgcttctctttcatcatcttccaaacccagatcttcttcatcgcttaaatgcttcgttgggttccctaccaggcctggtttctgctctaagctggtttcatcttctagcttgtcctcgataaacacccaccctttcaggggctccttggttgtcaggtgttctcttgctgatggaaacggtagttcagtgaagaggactactttgcatgatctgtatgaaaaagaagggcagagtccatggtatgacaacctttgcaggccagtgaccgatttgctgccactgatt

SEQ ID NO: 41382 - DNA, 439 bp, Gossypium hirsutum
  Clone ID: LIB3189-011-P1-K1-G5
gcaatagtactactactccaagcaagcattttccttacaagtttgtttttcttgtgattaatcgatatggctagctcaatgtcccttaagcttgcatgtgtggcggtgttgtgcatggtggtgggtgcacccctggctcaaggggccgtaacctgtggtcaagtcacaagctccctcgcaccctgcattggttacttgacagggaatggtgctggtggcgttcccccaggttgctgcggcggcataaaatctctcaactccggcggccaaacaacaccagaccggcaagcagcttgcaaatgcatcaaaagtgcggccgccggcatttctggcatcaactatggtattgcaagcggactcccaggcaagtgcggtgtcaacatcccttacaagatcagccctagcactgactgcaacagcgtcaagtgaagttttggca

SEQ ID NO: 41383 - DNA, 250 bp, Gossypium hirsutum
  Clone ID: LIB3189-011-P1-K1-G6
gcacagaacctctccaatctatttacgagttctaccgtttgtttccctggaaaatatatgagacgtaatatttttattttgttagtttatttgtgtgtgtatttcatcttgttgtgttcattactcagatccctatcgcttttatttctgttccatttttcctctttattttctaattctgggtattatttactcagatcccctttctttttattatttttttttctctcatatgttagctagaaatctc

SEQ ID NO: 41384 - DNA, 308 bp, Gossypium hirsutum
  Clone ID: LIB3189-011-P1-K1-G7
attcccggtccaccacgcgtccgcttgggttgagtgtagagatgaggaaaatcatcgtttccaaagctcttttcttctatgctgggctgtccttttcagctggcgcggcggttgcacagaatgaggaagaccaatgtctcgccatgaacttctacaaggcttcttgtgaccacgctgaagacattatcaacgatcaagttaagctactgtacaagctacacaaaaacactgctttttcttgcctgaaaaacattttccatgactgttctatccagtcatgtgatgcttcactgctgctggacttccac

SEQ ID NO: 41385 - DNA, 308 bp, Gossypium hirsutum
  Clone ID: LIB3189-011-P1-K1-G8
gcccacgcgtcgcccacgcgtcgcccactctctgaagcgaggacgtggagggtcaggtggggacaagttcagatgtactgggtttaccagggcagccacagtgaactgtgctgataacactgtgctaaaaccttatatatctcgggaaaggaatcaagggccgttcaccggttgccctctgcttggttggagatatggtgatggctaccgtcaagaaagggaagcctgatctagaagaaggtttgcctgctgcattggagacacgcagccatgttcataaggttgtgtttcatttatcttatttaatt

SEQ ID NO: 41386 - DNA, 248 bp, Gossypium hirsutum
  unsure (1)..(248): unsure at all n locations; Clone ID: LIB3189-011-P1-K1-G9
tcacacaagctcatttgatgcaagtgacacgcaaggtcgntaacacaccatcacttgttctccattttattgcaacaataacttaagatcgagatcccattcaagcagacccgaaatggaagggatagagcattaggtaatcaaagccaatggcataaatattcacgtcgcttagaaagggaaaggccctgtaatccttttccttcatggattcccagagctctggtatacatggcgccatcaaatca

SEQ ID NO: 41387 - DNA, 126 bp, Gossypium hirsutum
  Clone ID: LIB3189-011-P1-K1-H1
ccacttaatctctctctgtcctttccttttctgttctctttcttcccccctccccctttcacatgggaccctaaccctacctcaccaatcaggatacaacatgaagggaggtaaatccaagtcaga

SEQ ID NO: 41388 - DNA, 176 bp, Gossypium hirsutum
  unsure (1)..(176): unsure at all n locations; Clone ID: LIB3189-011-P1-K1-H10
tctttctcccttttttttttttttgattttgggatncnncnctttgttaagttttttactaaaaaaaagccgacccaacccaatncctctccttttttttcttttctatatttttactaacaacaaattatttatacttcttcaaattatcaaaatattctatttttattctcttc

SEQ ID NO: 41389 - DNA, 400 bp, Gossypium hirsutum
  Clone ID: LIB3189-011-P1-K1-H11
ctgttgttttcttgtttaaccctctgccttgttgtattcttgctctaaccaccactacggaccggtcttgcaagtttttgggcggtggaatgggactattcaaggctgctggcgttgtttacaagccggtcgaggagattgatcttggtcctgacagcaatgagttttatctcaaagccaatgttaaagctcctcgcatggctggatttcttgtcaaaatatttgcttggttcctggagtcaaggatcattggaacgttattgttgtatatattgaagaggaacaacctaattcacaagcttgttttcaatgcaacgctggatgaagcacctatgtttgttctttgcatccatttgttgaccttaatgaacaaagagttgaacaaattgactctgatgca

SEQ ID NO: 41390 - DNA, 132 bp, Gossypium hirsutum
  Clone ID: LIB3189-011-P1-K1-H12
gccccactctgttccaccgccgtcgcaacttttactcctcctaaatcaccggaagatccactgtcgaatgatcaacccaatctttccaccccttctgagttcaactctacccccacctgcgacgattactgc

SEQ ID NO: 41391 - DNA, 343 bp, Gossypium hirsutum
  Clone ID: LIB3189-011-P1-K1-H2
ctccaagcaaccattttccttacaagtttgtttttcttgtgattaatccatatggctagctcaatgtccgttaagcttgcatgtctgttggtgttgtgcatggtgatgggtgcacccctggctcaaggggccataacccgtgctgatggcttagtcggcctcccacgctgccttccttttttgtcagggaatggtgatggtgctgatgccacaggttgctgtgccatcgtcatgaatgccttgggatcgctctgtggtgatacataggaaccgatctagcttgaaatcgggttcggatttgggtggaatttcaaattggtgtgttatggaatcccaacttaaa

SEQ ID NO: 41392 - DNA, 322 bp, Gossypium hirsutum
  unsure (1)..(322): unsure at all n locations; Clone ID: LIB3189-011-P1-K1-H3
cgccccttgcaggtttttttgttcttaaatccaactattgctaccaaaatggctgcttaaaacaatgtgtaggaaggctctcaagtggtgggaaagtactaantgaggaggaaaaagctgctgaaaatgtctacatcaagaaaactgagaaagagaaattggagaaacttgcacgcatggtaccgaaaccagatgagaaaccagctgttggttcaaggggttctgtgactgatgcttaccctagtatttgtacattaacatcaagagctttatttaccgagaaagtattgaccgataagtactaaaaactatgcaattttta

SEQ ID NO: 41393 - DNA, 299 bp, Gossypium hirsutum
  Clone ID: LIB3189-011-P1-K1-H4
cccgaaaaaatggtccagacaaaccagtctggttccggcaatgatttcaagctcgtcggattctggaatgtgcgtccggtcaaatccaaaatccgatcggttcaccgtcaaacgtttccaccacatcgagttttggtgtaccgacgccactaacgtcgctcgccgattctcatggcgtctccgtttgcacaaccgaggtctttaaaacacattcactcatgagacagctccatgcttattatctatctgcgttcccgtgtccctgaactttttttttcactggcccccttattttccct

SEQ ID NO: 41394 - DNA, 331 bp, Gossypium hirsutum
  unsure (1)..(331): unsure at all n locations; Clone ID: LIB3189-011-P1-K1-H5
ctttcttattaccttccctccattcttctgtaagttcattagttgccgcttgggagaaaatgggaccaggtgggccaggagggccaccggggccaggtggaccaggagggccaggagggcctccggggccaggagggccaggatggggcggtcctccacccggaccaggagggccaccaggatggggcggtcctccacccggaccaggagggccaccgggatgggggggtcctcctcccggaccagggggaccaccggggtggggcgggcctccggtcggaccagggttttttggtggcttttgtgatgtnattggtgcttgggttaactt

SEQ ID NO: 41395 - DNA, 312 bp, Gossypium hirsutum
  Clone ID: LIB3189-011-P1-K1-H6
agagaatgctgcttactgtactagaagcgttactttctcaataaaccctgattttctttttttggagcatggtcccgagaatttttgaagcatcaacaagaaagaaatacccggaaagtctacttattcagaaggtatgttcaagaaccaattgcaagagttggctcaaagaagttgctttaatctaccatcttattcgtgcatccgggaaggccctgatcacgctcctcggtttaaagctactgtaaactttaatggagagacctttgaaagccccatgttttgctctactttgagacaagcggaacacgc

SEQ ID NO: 41396 - DNA, 344 bp, Gossypium hirsutum
  Clone ID: LIB3189-011-P1-K1-H7
gcgagcggcctctcacgatctatagtgttacagtctataccgaatctgctctgactttggaaaggtgttctttaactccagaggaggctacaagtaaatagatacctgtgacactctcaaataagtctgataaaccaccacagttcacaaaacaaagcaaggcaaaatccattcttccgccacttcataaccgtggtaagagaaggatgcatcatttgatgttggtccttgttacatccctgatagattcggccttgcactttgactcgaaaactattacttatattttaacttatgtcttgctcaaaattttaactattatacacacacatatttatatacat

SEQ ID NO: 41397 - DNA, 456 bp, Gossypium hirsutum
  Clone ID: LIB3189-011-P1-K1-H8
gcgaccctggtttttattttttgagttttgaatttcctttttttggggggcttcgcttttattggagaattttgaaatagaaaagaggaaatggggattgatttgaggcaagtagtggccggtattctcactctcaccatgtttgtgatgcttggtcaaatgatcaaaagagaccattttgattctctccaagataaacttcctggagaagctcaggatgttcaagttgataatgccaatgttattgagaaggatggccttgtaaagccttcgaaggggagcaaagggccttggatgaaggacagtcaagagctaaaaccatgttggagcaggaccacttttgatggaatagagcagtcaagagggtatgttactttctcattgactaatggtccagaataccatgtctctcagatggctgatgccgtagtagtagcaaggttcctagaggcagca

SEQ ID NO: 41398 - DNA, 267 bp, Gossypium hirsutum
  unsure (1)..(267): unsure at all n locations; Clone ID: LIB3189-011-P1-K1-H9
ttcccggtccaccccgcgtccggcgacccgccgccctattttttttttttttaatttttttttatcttttttcttttttttgattgaggtattttttaaatagaaaaggagccatttatatnncacccaacatatacctccccatacaaaaacaccccccaaccctttatcccaattcaacccatcaaaattcatcccccctacaaaaaacccaaaaaaacaccctctttattctcattttacccaaactaattactaccaataaaa

SEQ ID NO: 41399 - DNA, 204 bp, Gossypium hirsutum
  unsure (1)..(204): unsure at all n locations; Clone ID: LIB3189-012-P1-K1-A10
tcggccgaagaggggaaaggttccatgtgaactgcatcntctcatgggttagtcgatcctaagagacgggggaagcccgtccgacagcgcgtccagcgcgagcttcgaaagggaatcgggttaaaattcctgaaccgggacgcggcggctgacggctacgttagggagttcggagtcgtctgctgtggccttgggaagagttat

SEQ ID NO: 41400 - DNA, 124 bp, Gossypium hirsutum
  Clone ID: LIB3189-012-P1-K1-A11
atttgaagctgcatttagttccacaaagatactacatatagattataagcacctccccattttcgaaaccacataggaaagcttggagagagacccaaaaacaatgtctattgatgttagtaaa

SEQ ID NO: 41401 - DNA, 135 bp, Gossypium hirsutum
  unsure (1)..(135): unsure at all n locations; Clone ID: LIB3189-012-P1-K1-A2
gcgtccgatcggatgtgatgaggttttcacagatggtgatgtgctgagaataccgncagcatccacccattgtgggggtctaccacaaggacgggggggataaggctcggcgctcggtaatacaaggctaagcaa

SEQ ID NO: 41402 - DNA, 162 bp, Gossypium hirsutum
  Clone ID: LIB3189-012-P1-K1-A3
tcgctacctaacactctatccgtccttcaaaacttataatcaataggggttggtttcttgattgcatgagaaaagcaatctttttggacacccaagttttgtttaaggcttaaacatcatctgaagaactgatacttttttctgtccaagctttgattattg

SEQ ID NO: 41403 - DNA, 131 bp, Gossypium hirsutum
  Clone ID: LIB3189-012-P1-K1-A5
gctgatttggaatctgctctctctgggttgaatgctcggatcgagacctacttcgctgatcttacgcactaaggcatacatgaccctggtgggattgaagggtgttaccgcttacggtttggatttggttc

SEQ ID NO: 41404 - DNA, 159 bp, Gossypium hirsutum
  Clone ID: LIB3189-012-P1-K1-A6
caaaaaccaagatgttgaccttagtatgtacaaagtaaattctcttcttgaagataatgaattttgtggatgttgacgcactgatggaaattatacccagttgactgacctttacaacatatacaaggaccaaggtctggagattttggcattctcatg

SEQ ID NO: 41405 - DNA, 404 bp, Gossypium hirsutum
  unsure (1)..(404): unsure at all n locations; Clone ID: LIB3189-012-P1-K1-A7
cccacgcgtccgcccacgcgttcggcggtcgtgttcatttcctttccctttcaccagcctctgtattcgatcgaaaaacaatggcctcttcttcctctctcaccctatctcaagccctccttgcccgagccatctcttcccatggctccgcccaaccctctgatcaccgcgtctctctctctgccctctctattcccactttctccggccttaaatctgctgccccacgcccttccacttnccgtcngccgccttccacgcgctctacctggaatcaccaagtccgttctgccgctgtcgagacgattggtactgccgccgagacttcattgatcgagaaatcggtcaacacgatcagattcttggccattgatgctgtcgagaaagccaattcaaggcattct

SEQ ID NO: 41406 - DNA, 334 bp, Gossypium hirsutum
  Clone ID: LIB3189-012-P1-K1-A8
acaccctcttctcttctgtttttaatataatttcgtcgttaattctaaaaattatattcacgttcggccgtggatttctatggtagaaaaacagtaaagctaagagaaaatataaaagttcttagtatcatcacctccgtctcactgtcccttgtctccctgggtgctgccgtcagcttctttggataaagaaagaggaggagaagtgaaagggagttagagggagtgtgctctctgtgcacgaaggtacttgtttattttaatctgaacttattttttttctacctttatattattggcttcgtttatccctattcattatatcttttttaat

SEQ ID NO: 41407 - DNA, 243 bp, Gossypium hirsutum
  unsure (1)..(243): unsure at all n locations; Clone ID: LIB3189-012-P1-K1-A9
tgggtggacgaacgcgtccgggtggaggtgcttcctttgtggtggttctacctttcctttcatatacgcctactgtntgtattatgggaatgctcggtcagacatgggaggcttcatgcaaacttcgttcttctttgggtacatggcctgcatttgctatggctttttcctcatgcttcggagctattggcttccgtgcatctctgctctataggcaacacattgaccgatctatgaagtgtg

SEQ ID NO: 41408 - DNA, 408 bp, Gossypium hirsutum
  unsure (1)..(408): unsure at all n locations; Clone ID: LIB3189-012-P1-K1-B1
gggtccgacccaacgcgtccgcatctggtggcatgtgcctttactttctgaaccagngtttttctccaattagtgctcgtcctgagtgtgttgagagggttttgaaaacacggtatcatgatgccatgattaaactgcagccgcagaacaaagaacttgacctgcttattgttattcttccagataataatggctctctttatggtgatttgaaaaggatttgtgagactgatcttggtattgtttcccagtgctgcttgactaaacatgtatttagaatgagcaaacaatatttggccaatgtggcattgaaaattaatgtcaaggttgggggaagaaatactggtcttggtgatgcaatatcaccaaggataccttttgtcagtgaccgttcgaccttaatttttg

SEQ ID NO: 41409 - DNA, 239 bp, Gossypium hirsutum
  Clone ID: LIB3189-012-P1-K1-B10
cagtgttcgaggtagtctcgaaagagttcgagtacaaatgggaaattatataagagcgcgtgaaatagaaaacatatcgggtttagccccatgcttcaacatttcgggctatacttcaataaaattccccgaattgagtttccagttcaaaggaggagccaaaatggcattgcctttggttaattatttctcatttgtcggtgatgataaggttgcgtgtttgatgatcgattcagaca

SEQ ID NO: 41410 - DNA, 277 bp, Gossypium hirsutum
  Clone ID: LIB3189-012-P1-K1-B11
aacaatggcaaacaaagaattttattacaatcaaagataatatatatatatacacacacatcaacaatattgctgtaagtatgttgttttccttcatttttgcaggcttgtggcacgacatatataacagtattggaaacatatttttacagtagcagttttaagtgctcaagactatgcatcaaacatgcaagttctaagattttggttaaaagtacccaccatatttaaggaatttgaaaaaataattcctcaagatgcgctttactaattacaa

SEQ ID NO: 41411 - DNA, 345 bp, Gossypium hirsutum
  Clone ID: LIB3189-012-P1-K1-B2
gtttcgatatttgtattaagaatcgcccttctgcgatcagtgaggtgaagaaaaatgtcttggtgtggttgaaactgcgggtgcggctccagttgcaagtgcggcatcggctgcggcggttgcaagatgtaccctgagatgaactttgctgagcaaaccacaaccgggacacttgttcttggcgtggcaccccggaaagtgcactttgatggagctgaaatggaaactggggctgaaaatggctgcaaatgtggagataactgcacttgcaacccctgcaattgttaatgagaaaaaaaagctaatcatattatggaagctgatctaaataatatatgatgtatt

SEQ ID NO: 41412 - DNA, 282 bp, Gossypium hirsutum
  Clone ID: LIB3189-012-P1-K1-B5
tcggacgcgtgggtttactccgtctttcttggaggctcgttcagcagagatccacccaacacatctgcgctttttaaaaagccaagggtggacctctttgtttttatacttttaacgactcccccaattcttcaccatcccccctcttaatttcttccactgcttttcatcgcttcccctctttactccttaaaggcactgtcatcttttaactctttagatccaacccgatttcaatggcagctcttcagccaacttctctttcaaaccatcctttatcaa

SEQ ID NO: 41413 - DNA, 189 bp, Gossypium hirsutum
  unsure (1)..(189): unsure at all n locations; Clone ID: LIB3189-012-P1-K1-B6
cccacgcgtccgttgactcgtgggaccnactctaatttttttttnncccaaataccataatcttgtgcggattattgtacaaagaagaggaaatggccgatcatcttaccgaccaacagatctctgagttcaaggaggcttttagcctcttctacaaggatggcttaagggtgcattactaccatagta

SEQ ID NO: 41414 - DNA, 193 bp, Gossypium hirsutum
  Clone ID: LIB3189-012-P1-K1-B7
gcgtccgggaagtagactagcatgatgatgagttcaaattacatggattcttccgctaaagcaaaggaagaagaagaaatcaccaaagtaagtgggatgacaagcatggttgaaacacaagatccttctttcaaggaagtagatgatatgacaatgagaagatttctaagaggtcctgatctatttgtcttga

SEQ ID NO: 41415 - DNA, 165 bp, Gossypium hirsutum
  Clone ID: LIB3189-012-P1-K1-C1
tctagatcgcgagcggccgcccgcgatctagatcttaaaaaagtgaaaagggtaatggtgtttgtcctgctacaaggtctccaagggctttaatacactcatctataaatgaaaaccaagaagtgaataccatcatgagaactgccaagaccattctgctgttgg

SEQ ID NO: 41416 - DNA, 287 bp, Gossypium hirsutum
  Clone ID: LIB3189-012-P1-K1-C11
ggccctgcttcgtgagaaactatatgtgggaactgttgtagggtcactgctgatagttggtgggctgtatgctgtcctgtggggaaaagataaagagatgaaacagatgaaaggcaatgaaaaaggaggagaagagcaagtagtagtagaagaaggggcagtggaagtcaccaaagctggtgacagagatcatgacttggagatgcagttgcatcaaggctgctccgtctgttgttaactagggcgtactgaatccaaaaaaaggaatgttaacatatatggatgaa

SEQ ID NO: 41417 - DNA, 368 bp, Gossypium hirsutum
  Clone ID: LIB3189-012-P1-K1-C12
cccacgcgtccgcaaaatctcaaacccagatttgtcctctctctctctctctctctccaatgcaattaattcctccattggaggagcttagggtttgttggtgttctgatctttgctctgtctgaaaaataaacagaattataaaccaacaccaacgccatgggaagatttgaagagggaggattcgattcagtggtttgccctaagcctatactaacctttagatggtctaccaacagctgttatcagactgatatggctgattcaaaagctggtgcagagcttcttgatataatcctctccgagggatggtatgtgggccgtgtaccccaccgaccaatatgtcttattaccaccgtatttcttgt

SEQ ID NO: 41418 - DNA, 384 bp, Gossypium hirsutum
  Clone ID: LIB3189-012-P1-K1-C2
ctcgccgaccctgcttgggtccttgctttaaggtcttccgatttcagcccttacacctcatcccgacttcgattaaagtgaaggagacgaggattccggcggttcatgcgtataggtaacccctttgctcccttttacccctttttatgctcgaaatgacagtatgtgcaaccaaacaataagaaaagaagatgaaaacaaacagaaaagaagggccaaagccgaataatcaccttttcaaggttttgatttcttttctttgtattcaatatgcaaaaatgtgcgtgtattcctctgaaaaaaactttacaatcaaagatagtaggcttttatagccgtatgttccaaaaaaaagttaaaaatacaatttttccttttagtatt

SEQ ID NO: 41419 - DNA, 268 bp, Gossypium hirsutum
  Clone ID: LIB3189-012-P1-K1-C4
aatcgacttaattattttgttatcgagttttcgatatgcttgcaattttttactttttactgaaccagtctgatgtaagaacgtcagtgatttttagttagatctctgctaatgcttttattttcagaatcggggagaagaatctatggattcgaaggaaaatccagagagatataaggtgggagacgacgcccgatcttcttatcgatcaatctgtttggaccctactttctcttcttgtttgatttttttcaggtcttacttcatt

SEQ ID NO: 41420 - DNA, 460 bp, Gossypium hirsutum
  unsure (1)..(460): unsure at all n locations; Clone ID: LIB3189-012-P1-K1-C5
cgccgtccgctttttttaccatttcattagcattatgcagcttagntccatcnctcactnacccaccatccatttggctgtttgtgagatcatccgaaaaaggaatgggggagcgcgtcggaagatagttcgttaagggctcaaacccgtgcccaatggcgcctgctcacncgttgtttggccaatcgggcaccatcaaacncccgccctanatttggtgttgatcatgagcgacatatccctgacgtactatttttccgtatcacaaaatatgtgaggcacaataaccccgagttgataagagtaagtttcaaggcgcgatgtgtggaaaatatcgatgattcaagaaggcgatacattgtacccttacatgaagaagatttttgaaaagagaatatcccaatgtttgttgtaatacatgggctcctttcaactgtgacgctaaggcaaagatattggt

SEQ ID NO: 41421 - DNA, 366 bp, Gossypium hirsutum
  Clone ID: LIB3189-012-P1-K1-C7
attttcggcggcaacatcggagaggcaccactactttctccaattcccagaccttcttcttcaggggtacattctcaaatcaaatcaagtcaaatcgtacactgaaaaaagcttaacgaaaatggtgcgtatagaagaaaagcaaggcacgatagtgcctagttcgatgccccagcaacaaaaccctctgcagcaattgcaagctaagttcaaggaagtggagaacggtttcagggcttggttatgcaagcaacccttgccagtcgaggcgactgttgaaaccgcccccggctcacctcaagaagcacctatcggtgctttatatgggtacctctcactaatgtttatttcctccttatttgtaaa

SEQ ID NO: 41422 - DNA, 352 bp, Gossypium hirsutum
  Clone ID: LIB3189-012-P1-K1-C8
ctttgccttgtgtaaagacattggcaacagagaacatcagttctatctttggtttgaccctacaagaaacttccacacctattccatcatttggaaaccccaacacatcattttcttggtggataacacccccattagagtcttcaaaaatgctgaatccattggtgtaccattccccaagagccaacccatgaggatttactctagtttatggaatgctgatgattgggccacaaggggtggattagtgaaaactgattgggcaaaagcacctttcacagcttattacaggaacttcaatgccaatgcttgtgtctggtcaggaacaagttcatcatgggctaaaactaac

SEQ ID NO: 41423 - DNA, 452 bp, Gossypium hirsutum
  Clone ID: LIB3189-012-P1-K1-C9
actcacttgacctgagattttgttttcttttgtttttctgtaatggggaagattaagatcggaatgaacggatttggaaggatcgggcgtttggttgcgagagttgctctccaaagcgaagatgttgagcttgttgctgttaatgatcctttcatcaccactgattacatgacctatatgttcaagtacgacagtgttcacggtcaatggaagcaccacgagcttaaagtgaaggactcaaagactcttctctttggtgaaaagcctgtcactgtttttggcatcaaaaaccctgaggaaattccatggggtgaggctggtgctgaatatgttgttgagtctaccggtgtcttcactgacaaggacaaagctgctgctcacttgaagggtggtgcaaagaaagtgattatttttgctcccagtaaggacgcccccatgttttgtgtttgtgt

SEQ ID NO: 41424 - DNA, 408 bp, Gossypium hirsutum
  Clone ID: LIB3189-012-P1-K1-D1
agtaccagtattttctcggattctttcttctttttttgatcaattttactttggtttcggctgagattaatggatcggtgcttaaaatgagaggaggaacttcttctgttcaatttgatcccacttctgttactcaactctcatggcgccctagggcttttatttacaaaggatttttatcaagtgaggaaagtgatcaccttatttttcgggctaaggataagttagagaagtcaatggtggcagatgatgtatcaggccagagtattgaaagtgaagttcgaaccagctccggcatgtttcttgagaaagctctggatgaagtagttgctgatattgaagccaggattgcagcatggaccttccttccagtagagaatggggaggcactacaaaaactgcactatc

SEQ ID NO: 41425 - DNA, 75 bp, Gossypium hirsutum
  Clone ID: LIB3189-012-P1-K1-D10
ctagatcgcgagcgggctcactttcgctttctttcttcttcatagctcttctatagtgtcacgggaaattcaatt

SEQ ID NO: 41426 - DNA, 268 bp, Gossypium hirsutum
  Clone ID: LIB3189-012-P1-K1-D11
ggattacccgctgagtttaagcatatcaataagcggaggaaaagaaacttaccaggattcccctagtaacggcgagcgaaccgggaaaagcccagcttgagaatcggtcgccatcggcgtccgaattgtagtctggagaagcgtcctcagcgacggaccgggcccaagtcccctggaaaggggcgccggagagggtgagagccccgtcgtgcccggaccctgtcgcaccaagaggcgctgtctacgagtcgggttgttatgggaattg

SEQ ID NO: 41427 - DNA, 468 bp, Gossypium hirsutum
  Clone ID: LIB3189-012-P1-K1-D12
gttttctttcttatttttcttaatttatcatgaaactaatcaataggcttagtcccaaacatctctttcgatctaataaaaagggtccatccactgtctccaagttcgatccttcgtcgtatactacttccggttctgcttcatcgtcttcgtcagaatccgtttcctcagttcacaaaggaaatcagtaccctttagcgccaacagttggaaccggaacacccaccagtgttttgcccgaaacatcggttgactggttagatttttctgctaatttttatgtagaactttgccaagcttttaaaacgatggataaagataacgatggggttattaccagaagcgaggtcgaggctttgcttagcaagttcgccaggcagccgccgagccaagaagagatttcgtccatgcttggcgaggtggatggagacggcgatgggtgcatcagcctggaaacgttgatgaacc

SEQ ID NO: 41428 - DNA, 394 bp, Gossypium hirsutum
  Clone ID: LIB3189-012-P1-K1-D2
aaaaaaaaaattaaaaaaaaaaaaaaaaaaatttttttttaaaaaaaaaaaaaaaaaaaaaaagggggaaaataaaaaaagaaaaggggagaaaaaaaaaaaaaaaaaaaaaaaaaaggggcggccctttttggggtccctgtctttcttccccttccttccggccttttttttctccttttgtgccccctatttccattcccctgcccccttttttccccccctgtgcttggaaaacccctggggttcccccctttattgcccttcccgaatttcccctttgtcccagctgttttatttcctttggggccctccccattgtcccttccctattttttcccccccttttttggcttttgggccccccctctttttgcccctttttgggcggtgg

SEQ ID NO: 41429 - DNA, 67 bp, Gossypium hirsutum
  unsure (1)..(67): unsure at all n locations; Clone ID: LIB3189-012-P1-K1-D3
ggcggatatgttactggagggtgngaaaagtgtttttatggaaaannaagcctatggccctattcaa

SEQ ID NO: 41430 - DNA, 472 bp, Gossypium hirsutum
  Clone ID: LIB3189-012-P1-K1-D4
gcgttcttcatatggttttcctgtttgtttccatggataacctgtaccattaccttgtaatcatcttattcattcttctcaccatcaaacttttgactcataaaaccaaaaatttgcctcccagtcccttttctctgccaattattggccaccttcacctcatcaaaaacccactttaccaatcactgaccacgttattatccaaatatggccctgttttatatctcaaattcggttgcagacatgtccttgttctttcttctccttctgctgttgaagaatgcttgaacaagaatgatataatatttgcaaaccggcctcggactatggctggggatcttatgacgtacaactacactactttcgtttgggactccttacggatcactttggcggaaccatcgccgtctcagcgctgttgagatcttctgttctaacagcgttgaaaagttttcttccatacgtgaagaag

SEQ ID NO: 41431 - DNA, 366 bp, Gossypium hirsutum
  Clone ID: LIB3189-012-P1-K1-D6
cccacgcgtccggcaaaacgcaatttggtatatggtaattacacgatcttctctctctctgcaatccttacattttagtccttcgccaaaaccttacaacaacgacaatgttgcaagaaagacacggcggtggtccaccccacggcgtaatactagcagtggtcgtatttgtcgtggtattaactccgttcttatccggtgaccaaggtgaagctatcactgaagccatttccgagctattgactccactcggtctcctcctcttgcccatcttcctccttctcgcaatccagttcctttcctccgatcgtggctcctttgtcttcgccgtttttttcaccggtgtactcgacaccatttacggtc

SEQ ID NO: 41432 - DNA, 221 bp, Gossypium hirsutum
  unsure (1)..(221): unsure at all n locations; Clone ID: LIB3189-012-P1-K1-D7
cggacgcgtgggcggacgcgtgggcaacaatgttnctancagtagctcgatcggccgccggaaagcgccttcttcgccgaggatatgcgcactgaatctgttcccgatcggaaggtcgcggttttgggcgctgccggagggattggccagcccttggctcttcttatgaagcttaaccctcttgtttctcaactgactctctatgatatcgctaacactcc

SEQ ID NO: 41433 - DNA, 248 bp, Gossypium hirsutum
  Clone ID: LIB3189-012-P1-K1-D8
cgaagatgttgagcttgttgctgttaatgatcctttcatcaccactgattacatgacctatatgtgcaagtacgacagtgttcacgggcaatggaagcaccacgagcttaaagtgaaggactcaaagactcttctctttggtgaaaagcctgtcactgtttttggcatcaaaaaccctgaggaaattccatggggtgaggctggtgctgaattatgttgtttagtcatactggtgtttcactgacaag

SEQ ID NO: 41434 - DNA, 450 bp, Gossypium hirsutum
  Clone ID: LIB3189-012-P1-K1-D9
aaaaaaaaagaaaacaaacaaacattggtggcctgagtatactatgaggaagtgggcgatcccttgggctttggttcttcgttgcctggtcagtctcctctcagatcatgggagaaaagtacaagcaaatgccgaggaaggaggtgtagatcctcctaaagtcgaggaaaagatcggcgctgtgcctcatggcttacaaactgattctgatgtagttaaaagggaatcggaatccatctcttcgagatcgcttcgcaataatgcggagaagtttgagttccaagctgaagtgtctcggcttatggatatcattatcaattctctttatagcaacaaggatattttcctgagggagttgatctccaatgcttctgatgcactggacaagattaggttcctttcactcacagacaaagaagttttgggtgaaggcgacacttccaagctgga

SEQ ID NO: 41435 - DNA, 368 bp, Gossypium hirsutum
  unsure (1)..(368): unsure at all n locations; Clone ID: LIB3189-012-P1-K1-E1
cctctctcaaaatctcaaaccttgatttgntgcttctctctctctctctctccaatcaattaaggccttcattggaggagcttagggttttgttgtgttcttatctttgctctgtctgaaaaattaaccggattattaacccacacccaccccctgggaaggtttggagaaggaaggttccgttcaatggtttgcccttagcctataccaacctttagatatgtctaccaacagctgttatcaaactgagatggctgattcaaaagctggtgcagagcttcttgatataatcctctcccagggagggtatggggcccagaaccccaccgaccaaatggcttcattaccaccgtatttctgtggatcac

SEQ ID NO: 41436 - DNA, 258 bp, Gossypium hirsutum
  Clone ID: LIB3189-012-P1-K1-E10
caatttttgttttctcagtttctttgcgatttcccgacatggggtttttaagatctgtgaagataagggaagtttggtcggatggtttataatcagagttcgagctgatcagtcgggtaattgatgactttcctttcgttttcatggacactgtatttcccggtcttgttttttgaccaaaagtggacctctctaggccttaccattagcatcttcttttacccttctttcataacatgttcctaaattctaacgttg

SEQ ID NO: 41437 - DNA, 382 bp, Gossypium hirsutum
  Clone ID: LIB3189-012-P1-K1-E11
gcagactcgagcaggagagcttcgaaaaaccagccaaatcctcttcctgtacttgcaatccttgctaaggatgttggtgagctagcagtccatgagacgaaggttttcagtccaatactgaagggttggcatcctttggcagctggtatagccgtggccacccttcattcttgttatgcaaatgagataaaacagttcatctcaggtattatggagttaactcctgatgctgttcaagtcctgagagctgcagataaacttgagaaagatcttgttcagattgcagttgaggatgcagtagacagtgaagatggtgggaaggccataatccgtgagatgcctccttatgaggctgaaactgcaattgccaatctggttaaag

SEQ ID NO: 41438 - DNA, 109 bp, Gossypium hirsutum
  Clone ID: LIB3189-012-P1-K1-E12
gcagactactatcaccttagcttcgaaaaactttttttatcctttctctgcacttacaataggggctaatgatttatgtacggtagcgctccattatacgaatgttttc

SEQ ID NO: 41439 - DNA, 283 bp, Gossypium hirsutum
  unsure (1)..(283): unsure at all n locations; Clone ID: LIB3189-012-P1-K1-E2
acnaaanaacaaanaaattgttgctttatttgcaagaaggggggtgctttaaccaaattatatccaatttttggtaaatgatcttcatcatgcactatttttatcctacctaaaagtacattttaattggttcatccctttttcaattttagtctaatcatcatttttttcatctttattgtactataacaagttctttactattataattacatatatattattaatatagttatttcaattttattattattatctattttttattatttaattcatattt

SEQ ID NO: 41440 - DNA, 225 bp, Gossypium hirsutum
  Clone ID: LIB3189-012-P1-K1-E3
gcgaaaatctcgaagcttccttttccgttttagatctcaaaattcaaaaagctctctttttcatgtcatggctgctactatcgtctccgtcaaagctaggcagatcttcgacagccgtggaaatccaacggttgaggttgatgtggaaacatcgaacggtataaaggctagggccgcagttcctagcggtgcatccactggaatttacgtggctcttgagatgag

SEQ ID NO: 41441 - DNA, 210 bp, Gossypium hirsutum
  Clone ID: LIB3189-012-P1-K1-E4
tcttattacacagtgagctttttgcagtgttttatttattgattctcttagttctcgttttcatcggagaagaaaagtcaaaaaacaaaaatttcatggctcggaaattctttgtcggtggcaactggaaatgcaatgggacaactgaggaggttaaaaagatcattacaacattgaatgaagctgaagttccttctgaggatgttgtgg

SEQ ID NO: 41442 - DNA, 480 bp, Gossypium hirsutum
  Clone ID: LIB3189-012-P1-K1-E5
ggaacaatccctggcatcggagttcccatgccattatcagttccatctcttgatgcatcttctcaaggggatcaaaagcagcttcatcctggttccttgccttttggagctcctcctcttcctcctggaccacatccatctcttctagccaatcagcagcatggatatcaacaaaaccctcaacaaattcagcaacagcagcaacagggaatgcaacagcaaatgcctcctatgccaatgggacctccaaatatgcagctacaacctccatctcacatgcccctgcttccacatcctcatttacaacgccctcctccccaaatgccttctcttggtatggcttcacaaatgccaggatctttgaatccaccttcatcaatgccaacatcacatccaatgccaatgcctggtccaatgggtatgcaaggtacaatgaatcagatgcctccttcaatgccacaaggtcattttatgggcatg

SEQ ID NO: 41443 - DNA, 392 bp, Gossypium hirsutum
  Clone ID: LIB3189-012-P1-K1-E6
atggcttcatcatctcctctttctcccattctcctctctctgtttctagtattcatttgtggggtgtgagctcaaacggctcccgcccctgccccctctggccccttgaatttcactggaatccttgacaaaaatggccaatacacctacttccttcagcttttggcacagactcaagttgggagccaagtacaaactcaactcaaaaccaccactgaaggctttaccgtctttgctcccacagataatgccttcaacaaccttaaacctggttccgtcaataacctggacccacaacagaaagtacaactagttctataccacgttatttccaaatactactccttgaacgatctccaatttgttagcaaccccgttagaacccatgctgt

SEQ ID NO: 41444 - DNA, 443 bp, Gossypium hirsutum
  Clone ID: LIB3189-012-P1-K1-E7
gaaaacccttaaacctctttgcctttttcttttcgtttcattttcgacgaaataacaatgagggaaatccttcacgtgcaaggaggccaatgcgggaaccaaatcggatccaagttttgggaagtgatctgcgacgagcacggtgttgatcctaccggaaagtacagtggagatggatcatccgatattcaattggagcggatcgatgtgtattacaacgaggcttccggtggaaggtacgtccctcgtgcggtactcatggatcttgaacccggtaccatggatagtatcagatccggtcccattggccagatctttagacctgataatttcgtgtttggacaatccggtgcctgtaacaacttggccataggtcattacaactaaaggagctgagttttttgatgctgattttgatgttgttagtaatgaggcccttaata

SEQ ID NO: 41445 - DNA, 135 bp, Gossypium hirsutum
  Clone ID: LIB3189-012-P1-K1-E8
cgaaaattgattgcgcttaagcgcgcgacctatactctgccgtcggggcaagggccaggccccgatgagtaggagggcgcggcgggcgcctcataaccctagtcgcgagccctgtcggagcggccgtattatcat

SEQ ID NO: 41446 - DNA, 363 bp, Gossypium hirsutum
  unsure (1)..(363): unsure at all n locations; Clone ID: LIB3189-012-P1-K1-E9
gttttattggtttcctttttttctgcaaaacaaacagtagtagagcagccccttcttccccatttgcgtttgtgctctactagggttgcaaaagaaacccatcatcgccatcatcgtacaaagccatcgagggcggtggccggagccacgcgaagaccaggttttcaacccttttcaagagagcccgaaagcaaagcacctcctaaactcagaaaatgcgaaagaaaaggtccctctcttttccctttaagtcagattctgacgacggagaatagatccgtcgaggtgacacgggnattcggtgagatgccttcttttattatatttttaaaaatagatttctaatagaatcataagaataat

SEQ ID NO: 41447 - DNA, 469 bp, Gossypium hirsutum
  Clone ID: LIB3189-012-P1-K1-F1
accacgcgcactatactcgagcgtaaaactccgtctctttgtccagctccgatcccaacaagctgatctccaaagccgacaaactaacaaagctaagtcttacaaggtggagtgcagattggaaaagtgctactcttttatatgaacaagctgcaaatggatttcgagtttcaaaggattatgagaaagcaaagttggcattcgagaaagcttccaaaggacaagagatgctagcttctccctgggatgctgctaaacacatggagtctgctgctgctttagcaaaggaactacgcaactggactgaggttatcgatttttacagaagggcatctgagctatacatgcagtgtgacagaccacaacctgcatctgattcacttgccaaggctgcccgtgctttggaggatgctttgcctgatgatgctgttcagctatataccgatgcttgtgttattcttgaagatga

SEQ ID NO: 41448 - DNA, 393 bp, Gossypium hirsutum
  Clone ID: LIB3189-012-P1-K1-F10
ggaattcgttatcgacaaagaagctgctatggtttctcaaacaatccgtaacatgcttacttcgtgcaggtggtttcgctgaggcggagcatggggaagtgactttcccggagataagtgctgtgattcttgagaagatttgtcagtatttttattggtctcttcaatattccaggggcaaagagactgagttccacattgaacccgaactgactctggagctgatgatggctgcgaattatctccatacttagccaattttcgtattttaggtctgttattctgcccgagaggagtatgtatgtaagcgtgcttttttgcttttattcttcaatgctaattgtgttgtttttataatattctttttatgattggtttttacttattagtatt

SEQ ID NO: 41449 - DNA, 473 bp, Gossypium hirsutum
  Clone ID: LIB3189-012-P1-K1-F11
cttgaccatcttccctccaagtcggaaggatgcctattcaactcctctcccactaggtaagagatctctcctctatctagagtattctttgcgaatctgtgtgcttgcgagttccctgatctatgaatatgctgaaaggtaatctcttgaaaataaaatttcttgttctgaatgtcttttatgatcctcgaatctctgatttatctattgaagatgtttgacattttttgattattgttctagaatcccccatgattttaaccgattgtatacccattgatatccctaactttatgccttccaaacatgcaaacgcttctgctgcgaacggggaagaaacattattgtgaagggtcgttttttaaaccagtatctcgcccgttaggccctaaaccaccaagcctgttgcttattaaagtttcgattgtctaacgctgcatcaaactttatcgttttctcgtcttgtgctcctg

SEQ ID NO: 41450 - DNA, 436 bp, Gossypium hirsutum
  Clone ID: LIB3189-012-P1-K1-F12
gcctggttggtgaaatcattggcagatttgagaagaaaggcttctatttgaaagggttgaagctcatcagtgtggatcgatcttttgccgagaagcactatgctgacctgtctgcaaagcccttctttaatgggctcgtagagtacattatctccggtccggtcgttgctatgatttgggaaggtaagaatgttgttaccacaggtcgcaagattatcggagccacaaacccagctgaatccgctccgggaacaatccgtggtgactttgcaattgacattgggaggaatgtgatccatgggagtgattccgtcgagagtgcaaggaaggaaatcgccctttggttccctgaatgccctgttaactggcagtgcagcctttacccttggatctacgagttgaaattaattgtataatctgttgaccgttatggctc

SEQ ID NO: 41451 - DNA, 271 bp, Gossypium hirsutum
  Clone ID: LIB3189-012-P1-K1-F2
atttccatggagtttactatcatcaaatctagtctctatgtccattcttttgcttctccttgtgtgactttccatacactattgtgggaacaggtagcttcgatgtttcggaaaaagaagtttatgagattgattatagaggtccagaaacacacactttgatccctccacctggtcacggtcaccgcagttcgggtcaccaacttactgatttaccaactcatgaattaagaaggggaaattaaattgatgggtgaaataagacagattt

SEQ ID NO: 41452 - DNA, 409 bp, Gossypium hirsutum
  Clone ID: LIB3189-012-P1-K1-F3
ctcagtgcagacttctcaccattttgctcattttcagcagcaactttttcctttcgacagttaagtgaaaagatgccgtactactcgaggggtggcgaagatgacgttgacgagttcgacgaatttgatccgacgccttacggtggtggatacaatcttgacctaacttacggtcgtcctttggaaccctccgatgagacttgctacccttccgctacaccctccgatggcgactttgattatgcacgtcccgatttctctttcggttacgcgcacttagcttatgccgacgaagctcttgaaactgaatacagtagctatcttaaacccatagccctgacctggacgattcgaacctgcacctgcttttggtgcttgatcttgggtctatggtaggtatcctggattt

SEQ ID NO: 41453 - DNA, 333 bp, Gossypium hirsutum
  Clone ID: LIB3189-012-P1-K1-F4
cccacgcgtccgcccacgcgtccgcccacgcgttcgggagaaaggaaaccaaaccaaactagtgagccgctgcttctcttcttctgtatcccaaaatggttgcttttaggtttcatcaataccaagtggtgggcagaggccttcctacagaagcagatgagcatcccaagatttaccgtatgaagctttgggccactaacgaagtccgtgccaaatccaagttttggtattttttgaggaagctgaataaggtgaagaaaagcattggacaagttttggcttttaatgagatctttgagaaatgcctctaccaagatcaataactttggcatt

SEQ ID NO: 41454 - DNA, 481 bp, Gossypium hirsutum
  Clone ID: LIB3189-012-P1-K1-F5
atcaaacacaattcatagaaagtaaaactccgactccatgtccagctccgatcccaacaagctcatcttcaaagccgacaaactaacaaagctaagtcttacaaggtggagtgcagattggaaaagtgctactcttttatatgaacaagctgcaaatggatttcgagtttcaaaggattatgagaaagcaaagttggcattcgagaaagcttccaaaggacaagagatgctagcttctccctgggatgctgctaaacacatggagtctgctgctgctttagcaaaggaactacgcaactggactgaggttatcgatttttacagaagggcatctgagctatacatgcagtgtgacagaccacaacctgcatctgattcacttgccaaggctgcccgtgctttggaggatgctttgcctgatgatgctgttcagctatataccgatgcttgtgttattcttgaagatgatggaaaggaacag

SEQ ID NO: 41455 - DNA, 378 bp, Gossypium hirsutum
  Clone ID: LIB3189-012-P1-K1-F6
ccaagcatcactctcatggcttccatcattgaatctggttggctgtatctgatcacgcatttcagcgacttccaactagctagtatgggaagtttccttcttcatgaaagtgtttttttcttatctgggcttccatttatatatcttgaaagagctggattgctaagcaaatacaagattcagacaaaaaacaatacccctaccgctcaagaaaaatgtatcactcgcctacttttgtatcattttagcgtcaatttaccgcttatgattgtctcgtatcccgtcttcagatgcatgggcatgagaagtagtctaccattgccatcctggaaagtggttctaactcagataatattctacttaattctggaggatttc

SEQ ID NO: 41456 - DNA, 175 bp, Gossypium hirsutum
  Clone ID: LIB3189-012-P1-K1-F7
tgcaatctctccccttttgtacaaagatgttttacgttttaccccatcccctttcttgaccttggaatgtaagtaaatacgccatctattatcttctttctcaagtaagaatttcattttgttggtttaaaaaaaaaaaaaaaaataaaaaaaaaaaaaaataaaataatttaat

SEQ ID NO: 41457 - DNA, 123 bp, Gossypium hirsutum
  Clone ID: LIB3189-012-P1-K1-F8
taccatgcaaatcttttcttatttccattcttttgcttctcctgggggactttccatacactattggtgaacaagtatcttcgatgtttcggaaaaagaagtttattagatagagtattgagg

SEQ ID NO: 41458 - DNA, 395 bp, Gossypium hirsutum
  unsure (1)..(395): unsure at all n locations; Clone ID: LIB3189-012-P1-K1-G1
caacccttcctaaataaagagggaaaaacgaaatgcagggatatcactgntattacgataaaagaaactnggnattttgaaatcttaacctgaggaccgtgcaccttaataagttaagaaatttgctaggcttgatattgacccgaattctattacatggagaagagtgatggatgttaatgatcggttcttgaggaaaatcaccgttggccagggcccggaagagaaagggatggtgagggaaactggatttgatatttcagttgctagtgaaataaaggcagatttagccctgactacgtcttttgcttatatgagagagaggctaggaaaaatggtgattggaaatagcaaggctggtgaacctataactgctgatgatcttggtgttggag

SEQ ID NO: 41459 - DNA, 300 bp, Gossypium hirsutum
  Clone ID: LIB3189-012-P1-K1-G10
cccacgcgtccgcaagaacctgcttctcaagcggtacaatggcaggaagaagatcaggaaactgagagatgcagactggcaagaagctagtctggaccataacgagttgatggatggtcgtaatgaagaagcctctgacatgaatcatgaggacggtgagagtgaaaatggaggttatgatgatatgcaagaagcccctgatgcacaacgtgaggatggtggcttgcacgacactagacaaaattgtgtggaaggatctttcaatctacaatctggcactcattgtaagaactgactcat

SEQ ID NO: 41460 - DNA, 449 bp, Gossypium hirsutum
  Clone ID: LIB3189-012-P1-K1-G11
agctggtgcattgctctcatatgatccaaaccttcgcttgccactttggccttcagctgatgaggctaggaaacagattttgtccatttgggataaggcagatattgtcaaggttagtgatgtcgagctcgagttcctcaccggtagcaacaaagtcgacgacgaaactgccatgaaactttggcgacccaactttacactgctcttggtcacccttggtgaaaagggtagccgatactacaccaagaatttccgtggggcagtcgatgctttccatgtcaataccgtggacacaactggcgccggtgactcctttgttggtgcattgctatgcaagattgttgaaaacccaaccattcttgaggatgaagcaaaattaagggaagtgttgaaatttgcaaatgcatgtggagccatcacgacgaccaaaaagggagcaatccctgcac

SEQ ID NO: 41461 - DNA, 243 bp, Gossypium hirsutum
  Clone ID: LIB3189-012-P1-K1-G12
agatgatggaacgggttttattgttttggccttgacggtggttttcgccgcgacggtggttacggcggctgacgagagtgggttagcgaatgattgcagcaaagatttccagagcgtgatgacttgcttaagctttgctcaaggaaaagcagcgtcgccgtcgaaggagtgttgtaattcagtggcggggatttaagagaatatacccaaatgtttgtgttatttagtgcaacatacacaaac

SEQ ID NO: 41462 - DNA, 442 bp, Gossypium hirsutum
  Clone ID: LIB3189-012-P1-K1-G2
cgtccgttttaattttattgttccttccttcgccgtctacttcacttgtgacatcgatttcaagtgaatcagagggggtaaggaaaagagtcacattaacattgtggtcattggccacgtcgattccggaaaatcgaccaccactggccacctgatctacaagcttggtggtattgacaagcgtgtgattgaaaggtttgagaaagaagctgcggagatgaacaagaggtcattcaagtatgcttgggtgcttgacaagctcaaggctgaacgtgagcgtggtatcaccattgatattgccttgtggaaatttgagacgaccaaatactactgcactgggattgatgcgcctggacaccgtgactttatcaagaacatgattactggtacctcgcaggctgattgtgctggtttgattattggttccaccactggtggtttt

SEQ ID NO: 41463 - DNA, 463 bp, Gossypium hirsutum
  Clone ID: LIB3189-012-P1-K1-G3
ctttctctctcctctcttccctgatctcattagatccattcaaagggcaacaaatcatcagagcaggaagtaaagcaaattaagaaaaatggcagcaacattaggagactcaagctcctggtccactgctcttgtcaagatttcaccttatactttctccgccgtcggtatcgccattgccatcggcgtttccgtcctcggcgccgcctggggaatttacataactgggagtagtttgatcggtgccgctattaaagctcctcgaatcacttccaagaatctcattagtgtgatcttctgcgaagctgttgctatctatggtgttattgtggcaattattttacaaacaaagttagagagtgttccttcatcacagatatatgaaccagagactcttagagctggatatgcaatctttgctttaggaattattgttgggtttgcaaaccttggttgcagattg

SEQ ID NO: 41464 - DNA, 326 bp, Gossypium hirsutum
  Clone ID: LIB3189-012-P1-K1-G4
cccacgcgtccggtttctccttgttttcttttatttttaatctaatttttgttttctttttggatatgtttgaaaaattatatactaaaagactgaaaaatatggggaatgcaaacggaagacaggacggagctaacggcggtgtcgacgatctatccggaagatccaatggcggcgaggccgttgttcctggagccgctgcagctggaattcgcgtgccatcgtctgattcaatggtgaatacttcgccgcagagccctgggcggtctcgatccccgcttttatttgttcctcaggttcctggtgctgccttaccaagggcttga

SEQ ID NO: 41465 - DNA, 483 bp, Gossypium hirsutum
  Clone ID: LIB3189-012-P1-K1-G5
cccacgcgttcgcggacgcgtgggctagatcgcgtgcttctgcccttttatttttcgaggaaccgtggaccttcgcccaaccatgagcacctctattcgaagcaaagtttttcccagaaaattaaggaatttcgcatgtgaaaacgcgtacttcaattgtatataataatatatgtacatataatataaccctaaaatcgagattccaaaacccactccattaagctttcaaaatacaaagaaaaactcgggatttcatcttccccaaaataatggctttcaagagtttcccaaagctcttcattcttgctggtgtttttaccttactattatcccaccacctatattaagtcttcgctgctaccggtggtcggatgggtggctcttcttttcttttcatagtgcccgccatttcaccggaatgatgatgattatcatgattacattcatcatgatctttatgaccgttaccattattaattt

SEQ ID NO: 41466 - DNA, 345 bp, Gossypium hirsutum
  Clone ID: LIB3189-012-P1-K1-G6
tgatggtttggtttacttggttcagagtaaccgaatgccacaggtctcatgttcgagggccgtgagagagagcagagtgagatcaggaagcaatgcaatcttgcaaacaagcttcactaaaatgcctcgccaaagagaaagccgagtgtggccgaataaaatgtttgtttactcagtttcttttccaagagacgagtttgttaatgtgcaggtgagtaatggtgcaatggtactggtttgtaacgatcgatccattgcatttttcttttagcataagccaggttgccttctcttgatgttggtcatgggcttggtggatgtagggatggatgttatatatgtatg

SEQ ID NO: 41467 - DNA, 401 bp, Gossypium hirsutum
  Clone ID: LIB3189-012-P1-K1-G8
attttgaaggggaagtccataccaatatttgtttcttgctaatcatggtacggtggctagggatgtgtacctacattgatgatattggtaaagggtgtttagcagcactggatactgccgagaagagtaccggtagtggagggaagaagaagggtccggctcaactgagggtatataatttggggaatacttcgcctgtgccagtttcagatcttgtgagtatcttggagaggctgttgaaagttaatgcaaagagggatattatgaagttgccacgaaacggggatgttcagtttactcatgccaatattagcttggctcagagagagcttggatataagccctcaactgatttgcagactggttagaagaaatttgtcaggtggtattcttggttacta

SEQ ID NO: 41468 - DNA, 464 bp, Gossypium hirsutum
  Clone ID: LIB3189-012-P1-K1-H1
acattgtttaaatttataaatgaaactgaaaatgtttatatatgttgcttaaattcaaaatgctagtcgtcattttcattgtaagagaagcttcctgatttagttgtcagcattctttcttttgcaattaaatggattgtccttgtttttccaattattgcttctttcttttgtctgattgtttttcttttctttctgatgagttggctaatttcataatctacagcgcatggagaagttcttcaaattctccactatgaatttggacataaatatgaaccacatcatgattacttctgcttatctgttctgctcttacaaattacactaaatactttctatcatctttacacacttatccatgattggaatgatatgtcatcaattcttaatacttatcgtagttcctttaaatctctttttttatgtgtctcttttatatcttcatatctatattttatttc

SEQ ID NO: 41469 - DNA, 342 bp, Gossypium hirsutum
  Clone ID: LIB3189-012-P1-K1-H10
ggcgttcccccaggttgctgcggcggcatataatctctcaactccgccgcccaaacaacaccagaccggcaagcagcttgcaaatgcatcaaaagtgcggccgccggcatttctggcatcaactatggtattgcaagcggactcccaggcaagtgcggtgtcaacatcccttacaagatcagccctagcactgactgcaacagcgtcaagtgaagttttggcatggaaagttcaccagctagtggaagccaaaataacgatagctacagaataaatatggatgttaaaattccagagttgtgggttgtgtactatgccgctttatgcgactacgtaatattt

SEQ ID NO: 41470 - DNA, 350 bp, Gossypium hirsutum
  Clone ID: LIB3189-012-P1-K1-H11
cccacgcgttcgcccacgcgtccgcccactcgttctaacaaaaccaagacacctggtcctggtgcccagtcagcacttagagccctcgctcgttctggcatgaaaattggacgcatagaggatgtcacccccattcccaccgatagtactcgtagaaagggtggcagacgcggaagaaggctgtgattctttgcttcatatctgctactcagccgctgctgctggcggtttgacattaggaattctctttgcttttgaaacaattttctgattagattcaagtatgctttgctctgttcttatgttgcacacttgtagttcctgaatggattttgatccttgtatcttaa

SEQ ID NO: 41471 - DNA, 319 bp, Gossypium hirsutum
  unsure (1)..(319): unsure at all n locations; Clone ID: LIB3189-012-P1-K1-H12
cgcgtccggtctttcgctctttccttcttttaagttcttttgttctttaatttgacctgngtttacagtaaacaaaagggaagaaaaatgtcgagcagcgatgaattcatggatgacatgaatgggaatggggattcatatgggacggtgaaccggaggttcaaagatcgagccgagcaagtggcgaaaacgaaagagtttttgtccaaacaagcggttccaacgaaaggaaagttttttaaacaggctggtaagatcgcttatcatagctgagaacactagcgcttattaatatagggactcaacttttgggggttct

SEQ ID NO: 41472 - DNA, 241 bp, Gossypium hirsutum
  Clone ID: LIB3189-012-P1-K1-H2
aaaaaaaatgaaggcaatagttataactacaggaggaggcccagaggtgttgcaattgcaacaagtagaagacccagaactcaaagatgatgaggttctcatcaaggtagaagctaccgctctaaaccgggctgatactctacagagaaaaggttcctaccctccttcaaagggtgcttgcccttaccctggtcttgaatgttctggtactatacaagcccctggcaagaatgttctgggc

SEQ ID NO: 41473 - DNA, 189 bp, Gossypium hirsutum
  Clone ID: LIB3189-012-P1-K1-H4
cgtttgcttccatcactctctatttcggtcttcacctccatctgctgcaaggagcagaaggaaaaaggataaaagcatcggtggggtggggcgtctttttcaaccttggctcttcgtccttgaaccttcctattttgttccttttttatacaagattgtaaaatattgccgattctgatgattttcatc

SEQ ID NO: 41474 - DNA, 347 bp, Gossypium hirsutum
  Clone ID: LIB3189-012-P1-K1-H5
cggacgcgtgggcaaattctcgactcatcggtttcagttcagctgctcctcaactactatggcaaccagaatgtctgttagatacgtttctcgtaggttctcgagtgggagtgggaagatactcagtgaggaagaaaaggctgctgaaaatatttacatccagaaaactgagcgagagaaattggagaaacttgcacgcaagggacccaagccagaggagaaaccgtgtgctggttcagggggtgctgcgaccgatggtagcacttcctttacatttggaacatctgctgagaaagtatcaaccgataattaccgaaactacggtgtttcttgctggtgatgcaacc

SEQ ID NO: 41475 - DNA, 123 bp, Gossypium hirsutum
  Clone ID: LIB3189-012-P1-K1-H6
ggtatctcaggtgtacacattaaccctgcggtgacttttgggttgtttttggcccgcaaagtgtgtgtgattagggctgtggctgacatggtgtcacagtgcttgtgtgctatatgtggagtt

SEQ ID NO: 41476 - DNA, 324 bp, Gossypium hirsutum
  Clone ID: LIB3189-012-P1-K1-H7
cggacgcgtgggatagcatagcaggttagtccaactccacacccaccaccgttggctgtttttgatcatccgaaaaagaatggtgaccgtggaagaagttcgtaaggctcaacgtgcccaaggccctgccaccgtgttggccatcggcacatcaaccccacctaattgtgttgatcagagcacataccctgactactatttccatatcacaaatagtgtgcacaagaccgagttgaaagagaaattcaagcgcatgtgtgaaaaatctatgatcaagaagcgatacatgtaccttacagaagagatttttaaagagtttcccaa

SEQ ID NO: 41477 - DNA, 341 bp, Gossypium hirsutum
  Clone ID: LIB3189-012-P1-K1-H8
ccaaaatatctgctttttcttagttttcctttttgtcccttgtttatttgatatttccccctgatggccgccgctgatgtcgaggtccggtgcttcgtcggagggctcgcatgggccaccgacgaccgggccctcgaagaagccttcagtgcgtttggtgaaatcgtcgaatcgaagatcattaatgatcgtgagactggaagatcccgaggctttggattcgttactttccgtgacgagaaagctatgagggacgcgatcgaaggaatgaacggtcaaaatcttgatggaaggaacatcaccgtcaacgaagcccaatcgcgcacaagtggaggcggtgg

SEQ ID NO: 41478 - DNA, 445 bp, Gossypium hirsutum
  Clone ID: LIB3189-012-P1-K1-H9
cgcaaaggaaaacaaaacaaggggcgaaaccttatttccatcaaaataattcaaaggaaaatatctgcagaatcataatggagaattatctctttctgttctcgcttgttcttctctttggtcttttacccttttcctctcaaaccccaaaccctaaaaaccccaatcccaaacctccgctcacccaggcacacaccgagcttataaactatggttttccgatcggtcttcttccggcctcggtgacgaagtacactcttaaccaaacatccggtaacttcgccattgatctcggtggcacgtgcaagatcacgctcccgcctgacaactacctggctacttactcgaagcgggtaacggggaagattgaaaacggaaagatagcggaactcgatgggatcagggtacgggcttttgtcaaatggtggtccataaccgggattcg

SEQ ID NO: 41479 - DNA, 457 bp, Gossypium hirsutum
  Clone ID: LIB3189-013-P1-K1-A1
aagaaaacccccctttcttttctccatttcacactaaaaagattatatctttttgtattttttttttgttagctttcatttcattggagcatcaatggcggattcaaaggggtacatttccaaaacagagcttgaaacccacaaaaaaccagatgatctttggatctcaatccaaggcaagatctatgatgtaactcaatggagtcaccaccaccctggtgggccacttccattactgaacctcgccggtcaagacgccaccgatgctttcatagcttatcatcccggcatagcttggcaatatctcgacaagttcttcactggttattaccttgaaggttacttagtctctgatatatccaaagattatagaaagctagctgttgagttctcaaagatgggtctttttgacaagaaaggacatgggacatgtattttacttaccatcatagcattg

SEQ ID NO: 41480 - DNA, 94 bp, Gossypium hirsutum
  unsure (1)..(94): unsure at all n locations; Clone ID: LIB3189-013-P1-K1-A10
cttttctttcttccaaacggtactgttgnttggtaatgaaagaaagaaagcaaaagaagatcatgtggctttctgacttttgagagggaaaatt

SEQ ID NO: 41481 - DNA, 350 bp, Gossypium hirsutum
  Clone ID: LIB3189-013-P1-K1-A11
cagatatacattatagaagcaaaaaagccaatcttgtatagactagctcagttattcctatgtgcaacattggtacccaagggctgactttgctctgaattccttgggtcaggaattagtgatcactactgaatcaaaatcaaactttggggggaaatggagttttccaagattttacgatatgttttctgattgctcttggctcctcgtggctaggtcaagcaagggccctcctgctccggtcgcaatgagcccaactcacaccagccccagcaccggcaccgcatatgtaacctacttattactctagggctggccattcacactttcttgctaccttgatccactaa

SEQ ID NO: 41482 - DNA, 394 bp, Gossypium hirsutum
  unsure (1)..(394): unsure at all n locations; Clone ID: LIB3189-013-P1-K1-A12
cggacgcgtgggttttgctggtgatgcacctttttatacccaccgtacacaaatggaaaggtcaggttactaaaggctcttgtgggtggtagcatattaggcataatccgtgctttgatgggatggtctaaggcttaaaagagaaaacctatgtggctatctctgttgtaactttttattatttttttcatgttatgcaatttactgatttcaatatattttcaagcatgtaagtcagtttaaagaccacggttgtatagttttcttttttcgcttaaaatcaatgtgatgttcataatgtaggtatcatgatttgagaatcattttataggaatgaattggcactgatgcagntcaacattgtaaaaatgtgttgatttgtntatattttaat

SEQ ID NO: 41483 - DNA, 450 bp, Gossypium hirsutum
  Clone ID: LIB3189-013-P1-K1-A2
gttaggaaaggttatctgctcaaaatgcggaccaaacttttatgtatgcccaatgaggggagaatgcagacattttgtcagtgcgtgtgcctgtacatggcttgccttgacagggccagaggagaaaagcattgtcagcgcatctgataacacaaaacccggtcataaccatgctgtcattattgatcaaaaggccctgcccctactccagccaattgaacaatcagatacgaactgtcagcctgaagcaaaccagcaattacaagcaaagtcctgggtcaataactgtagtcataaccatgctgtcattattgatcaggccctgcccttactccagccaatggaacaatcagataggtactgtcagtctgaagcaaaccggcaattacaagcaaaattcagggtcaataactgtgaccctattattggagagccagcgagcccagaacc

SEQ ID NO: 41484 - DNA, 170 bp, Gossypium hirsutum
  Clone ID: LIB3189-013-P1-K1-A3
aacggcacttgcacatgggttagtcgatcctaagagactgtggaagcccgtccgacagcgcgtgcagcgcgagcttcgaaagggaatcgggttaaaattcctgaaccgggacgcggcggctgacggcaacgttagggagtccggagacgtatttggtggcctcgtgatga

SEQ ID NO: 41485 - DNA, 413 bp, Gossypium hirsutum
  Clone ID: LIB3189-013-P1-K1-A4
gaaaagagaagacaagaaaatggcctccgatcagaccctttttcactgctgcctcctcacactttacataatcgccttaccaacatggatcagcctttacttcctccaagccccttacggcaagcacaaccgccctggttggggtcctaccatctctccacctttggcttggttcctcatggaaagtcccaccctctggctcactttctttctctttccctccggccaacatttctacaaccctaaatcattccttcttatctccccctttctctttcactacttcaaccgcaccgtcctttaccctcttcgcctctccaggaacaccacccaaaccagggcttttccggtgagtgtagcttttatggcgtttgggtttaatcttttgaacggttatttgcaagccaggtggg

SEQ ID NO: 41486 - DNA, 383 bp, Gossypium hirsutum
  Clone ID: LIB3189-013-P1-K1-A6
aataagcacctccccgtaagcaaaccacaaaggaatgcttggagagagacccaaaaacaatgtctaaggaagttagtgaagaaggacagggtcgtaaggactatgtggaccctccaccggcacctctgattgacatggctgaactcaagtcatggtctttttacagagccctcatagctgagttcatagccactctcctcttcctctatgtcactgttgctactgtaattggtcacaagaaacaacaagatgcatgtgatggtgttggtctcttgggtattgcatgggctttcggtggcatgatctttatccttgtttactgcactgccggtatcttaggtggacacattaaccctgcggtgacttttgggttgtttttggcc

SEQ ID NO: 41487 - DNA, 249 bp, Gossypium hirsutum
  unsure (1)..(249): unsure at all n locations; Clone ID: LIB3189-013-P1-K1-A7
tgttttcccttttgtctactcnctctttttccaaccctaaccctacctcaccaaccaggattcaacatgaagggaggaaaatccaagtcagatactaagagtgccaagctatccgtgaaatccaaagctggaaagaaatcggggaaggctgccaaggatccaaacaagccaaagaggcctgctagtgccttctttgttttcatggaggagttccgtgagcaatacaagaaggatcaccctaaaaacaaa

SEQ ID NO: 41488 - DNA, 280 bp, Gossypium hirsutum
  Clone ID: LIB3189-013-P1-K1-A8
cgtgaatttgccaaaacccagattgattatatccttggcaaaaatcctcgaaaaatgagctatgttgtgggctttggtaaccattatccaaagcatgttcaccatagaggggcatctatccctaagaataagatcaaatataactgtaaagggggatggaaatggagggatacgtcaaaaccaaaccccaacacacttgtgggagccatggtagcaggacctgacaagcatgatgggtttcgtgatgttcgtaccaactacaactattcggagctaactc

SEQ ID NO: 41489 - DNA, 440 bp, Gossypium hirsutum
  Clone ID: LIB3189-013-P1-K1-A9
ctgaaattgcgtgagccgctatagttacgattccctccagcctagattctcataattgtgtgtgccctctgcaaaggctttagtgttcattcgcttcgttgaatttctatcttcttttgatctgaacggagtttggtaatccagttttcgtcttctgttgattcaggaaatcttagtttttgaattgcgtgactgaatgatctaatggagtctaaaggtgggaaaaagaagtccagtagtagtaagtctttattctacgaagctcctctcggttacagcattgaagacgttcgaccaaacggtggaatcaagaagttcagatctgctgcttactccaactgcgctcgcaagccatcctgatatactcacaagcgtgccgtctgaccactagtagtggttaataaaactgttatttgccttgttagttaagtttagattat

SEQ ID NO: 41490 - DNA, 417 bp, Gossypium hirsutum
  unsure (1)..(417): unsure at all n locations; Clone ID: LIB3189-013-P1-K1-B1
ggcgacgagagtacctttaccttggtggcttgctctcatctggtgtgtccgtgcttctctggttgcattttgcttcctgcatctttggtggttccacagccctctttatgactgagatctacttggggtttttggtgtttgtgggatatatgatagttgacacgcatgacatattcttgaaagcacacttggttgacctggactacttgaagcatgccctgactcttttcactgattattctgctgtatatgtcctcattatcgatattatttattcaatatcatctatttttattttgataattaagtaaaggagtgactaactttcaaaccattatttttttaacttatttctatttatctttttcttttagtatatttaataatggngttctttttttttttatatcttttttt

SEQ ID NO: 41491 - DNA, 414 bp, Gossypium hirsutum
  Clone ID: LIB3189-013-P1-K1-B10
tttcgaaagccttttgccatcataaaaacactctgtcgaaacctctccaactcacccaagggaggcgaatcattacgaggagagcgcaaaagaacaggagaaacattacgatccctcctaattccaataatgcctgccactaaatgttgcatcgttttcatctgtctcctcttgatgttttcttcttcttgggatgttgcaatgggtggtcggtacatcccatcgagtgttccgagcacaatgaggcctgcatccgtggattacgtgaagatgaaccctcaagtgctactgaatcacaagcacaaggtttcccatgagaaggaagtaaagggttgcatgccaaaagggtttcgccgttcatcagctccaagccgctatgttaactatcaaactcttgggtcttcttgtgctaca

SEQ ID NO: 41492 - DNA, 436 bp, Gossypium hirsutum
  Clone ID: LIB3189-013-P1-K1-B11
aggcaatccattttccccgagtaaaacgccaaataaaacaaaaaatatgagagaaatcttgcgcgtccaaggtggtcaatgtggggaccagatcggggctaagttctgggaagtcatatgcgacgagcatggagttgacaacactggaaaatataacggtgactccgaccttcagttggatcgcatcaatgtctactacaatgaagccagtggtggaaggtatgtcccacgcgctgttctcatggatctggagccgggcactatggattccgtcagatctggtccttttggacaaatctttcgccccgataacttcgtcttcggacagtctggtgctggcaacaactgtgccaagggtcattacacggagggagctgagctcattgattctgttcttgatgttttcaggaaagaggctgagaattgtgattgcttg

SEQ ID NO: 41493 - DNA, 451 bp, Gossypium hirsutum
  Clone ID: LIB3189-013-P1-K1-B12
cgatcttcgaatacaacgggagtgccctaatatccatggtaggcaagaactgcttcgccattgccagcgatcggagactcggagtgcaactccaaactatcgccaccgatttccagaggatttataaagtccacgatcgcctcttcctcggtctctccggcctcgccaccgatgctcaaaccttgtatcaaaggcttgtctttcggcacaaactgtatcagctaagagaagaaagagacatgaaacctgagacttttgctaaccttgtttctgcgattctttacgagaaaaggtttggtccatacttctgccaacctgtaattgctggattaggagatgaagacaagcccttcatttgcaccatggattccatcggagccaaggagcttgcgaaagattttgttgtagctggcactgcctcggagtctctctatggtgcctgtgaatcaat

SEQ ID NO: 41494 - DNA, 284 bp, Gossypium hirsutum
  Clone ID: LIB3189-013-P1-K1-B3
ctttgatttcgagagtagatcttcgctcgcttctttctttcgtcgaactccgcgtaataatctcgcatatttctcgcagacgttaagatgggggctgtctttcacaaagctgttcagccggctttttgccaagaaggagatgcgtatattgatggttggacttgatgctgcttgtaaaaccaccattctttacaagctcaagttgtgagagattgtcaccacaattccaaccattggtttcaatgtggaaactgtggaattcaagaacatcagctatactgtct

SEQ ID NO: 41495 - DNA, 273 bp, Gossypium hirsutum
  unsure (1)..(273): unsure at all n locations; Clone ID: LIB3189-013-P1-K1-B4
ccaaaaagaggtaacaatggtggtgttttctagntaacctgtccttccccaannacaagaaaataatctgaaagattcactagaagaagcagctgaagataaatcactttcaaaatcacaaaacattgatccatcatcattaaatcaagatggttccaatggacggtcaagatcattagctagacttcattctcaaaatgatttcttgaatgctacttctcttgtttcataccgtatttttttctcataatatataatttcattcttttaatt

SEQ ID NO: 41496 - DNA, 203 bp, Gossypium hirsutum
  Clone ID: LIB3189-013-P1-K1-B5
atttgaatgaggcccaaattgctcttggttgattatccaaccagtggcgtcgacagtgcttcatcattttttgtaacccagactttacaaggcctgtcaagagatggtagaacttgtatagcttcagttcatcaacccatcagtgaagtctttgagctatttgatcaagtatatttgctggctgaaggcaaaaccatttattt

SEQ ID NO: 41497 - DNA, 248 bp, Gossypium hirsutum
  unsure (1)..(248): unsure at all n locations; Clone ID: LIB3189-013-P1-K1-B6
tctttttcgtaaatttaacgactatcatttttcattaggggaaaaaaaaaaaaagtttganacttagtactgggattaagatttttttttctgagaacaaaaaaatgttgtgtcgtaaaaattcaagctgcgaggaaacaggatctgtaccagtgtatctcaatgtgtatgatctaacaccaattaatggatttgctcattgattttgtctgactgaaaattaaatattttattatgatcattatttt

SEQ ID NO: 41498 - DNA, 370 bp, Gossypium hirsutum
  Clone ID: LIB3189-013-P1-K1-B7
ggacgcgtgggctaacacacattcttcactattttagcaaagcaaaaaaaaaaaaaaaaaggtaaaaattttgctatgcaattcaatcccatcacttctcaaactaaaaaactcccttcatatgctcttccacccatggcaagtcttatatctcccaaggtttctattgtcttcactcttccacctctctccaaaggggttgaagatctgaaactgcctttcatggctccaaagctgttacaccattcttcccacaccattccaccttataagattgaaatctttaaatctttggattatttatctagggataacattctgattcatcttaaacaagtttataaatgtttacaacctaaggattttcttc

SEQ ID NO: 41499 - DNA, 275 bp, Gossypium hirsutum
  unsure (1)..(275): unsure at all n locations; Clone ID: LIB3189-013-P1-K1-B8
gttcgttttcgttttatttgcgattatatcttctttcaacgccttggtttccactccctatcgtaagtccatctctgatttaaganaggcanttgtgaanggattgggattccaagccgatgattttaagatttcagggttcgatctcagagatgcccttgtgggccattctttggcatatgaattctacattgaaatcgataacaaagtgattccttaagctcttggaggatgtaaatcgttatgaatttgttgatttgcccaattttagtttt

SEQ ID NO: 41500 - DNA, 452 bp, Gossypium hirsutum
  Clone ID: LIB3189-013-P1-K1-B9
aacagcctctggtcaatggaacaatgtaggcaagggaagtcggcaaaatggatccgtaacgtggggaaaaggattggctctgagggctgggcacgggggtcccagtcccgaacccgtcggctgccggcgcactgctcgagctgctcccgcggcgagagcgggtcgccgcgtgccggccgggggacggactgggaacggctccctcgggggccttccccgggcgacgaacagtctgctcataactgttacggacaatgggatttctacttgttcatgaaaacttatctttcagatccttacattgagtgccgagggtatgttgctttttctttgttcatttttgttcctctttagtccgaagagcaaaacaaattaataatgaaaagcccatcaaaaaaagctcaccagcaaaaacagttaacctaatattttcaagctgtgcttaattgatc

SEQ ID NO: 41501 - DNA, 383 bp, Gossypium hirsutum
  Clone ID: LIB3189-013-P1-K1-C1
agggccaacttaagagttgctatgcttctttcatataaactacaaaagaaaggaaaggagacaagcaacggaacaacaaatatgacacacctacaaaactcaaatcgaccacaccaggcctaatactagcaacatatatatattccacactcctcaaagctctgctaacacaagaataaatccaatgaatgtattgagtttacaggaaaactgacctcacagaacctaaacttgagagccatctatatatttctttttctttgttcatttttgttcctctttagtccgaagagcaaaacaaattaataatgaaaagcccatcagaaaaagctcaccagcaaaaacagttaacctaatattttcaagctgtgctgaattgatct

SEQ ID NO: 41502 - DNA, 239 bp, Gossypium hirsutum
  unsure (1)..(239): unsure at all n locations; Clone ID: LIB3189-013-P1-K1-C10
gntcagccaattgtttgagctatctagctctttcttaaatggcaaccaaaacgatgatgttgcggatattttcacttttcttgttgtggttcaaagtctncaactccattttccttggtgctaatggagatgacaatggtggttggcaaactgcccatgccaccttctactgttgtgcttatgctaccggcacaatagggggagcttgtgtttatataaactctttctattaatgttat

SEQ ID NO: 41503 - DNA, 296 bp, Gossypium hirsutum
  unsure (1)..(296): unsure at all n locations; Clone ID: LIB3189-013-P1-K1-C11
gtaaaaagaaaattttatttcttacaaaggatagtggttaatcgaaattaaaaaaaaaaaagataganaatttaaagagaaagggaggtgaaagtcgccgttgatgttcgatgccgaaaatgaagcatctgttgaggaaactccacatcggcagtggattaaatgagcagcaactattggcggaggcacagcccgtgatcagctcgatcccgagcccgagtcccattcctaactttaactttaccagcgttacgggaatggaaacgactactttttcttcatcttcttggggtagt

SEQ ID NO: 41504 - DNA, 449 bp, Gossypium hirsutum
  Clone ID: LIB3189-013-P1-K1-C12
gcctaacatggtgacccccggttctgactcctttaaggttgccccagaggttattgctgagtacactgtccgtgccttgcagcgtaccgtccctgctgcagttcccgctattgtgttcttgtctggtgggcaaagtgaggaggaggctacccttaaccttaatgccatgaacaagctccagaccaagaaaccatggtcactctctttctcatttggacgtgcccttcagcagagcactctcaaggcctgggctggaaaggaggaaaacgtgaagaaagcacaagatgctttccttgttaggtgcaaggctaactcggaggccaccttgggtacatacaagggtgatgcaaagattagtgagggtgctgcagagagccttcatgttaaggactacaaatactaagaatttagtcttgtggtctgtgtatcagagaaattttctgtattga

SEQ ID NO: 41505 - DNA, 349 bp, Gossypium hirsutum
  Clone ID: LIB3189-013-P1-K1-C2
caaaaaccctacaagatttccacactcatcaaataatcaaccaccttgttcatccacagcgccttgtcaaaatgaaggtgatagccgctgtcttgcttgccgttttgggtgggaacactaacccttctgccggtgatttgaaggctattctcggatcagttgcagctgaggctgataatgataagatagagatgcttttatccgaagtcaaaggaaaagatatcaccgagctaattgcaagtggaagggagaagctggcttcagttccgtctggtggtggtggtgttttcactgcctctttttttttttgggggggggggtggggttttattttttttatatttttttt

SEQ ID NO: 41506 - DNA, 52 bp, Gossypium hirsutum
  Clone ID: LIB3189-013-P1-K1-C3
aatccgggtcgggcaggcgtccgctcaaaaatacgtattaaaatacgtatgg

SEQ ID NO: 41507 - DNA, 272 bp, Gossypium hirsutum
  unsure (1)..(272): unsure at all n locations; Clone ID: LIB3189-013-P1-K1-C4
cccacgcgcccaataccctaataatatgaatcaattccaccaatattttgcttgaggttgnctgnnatnatcaatggcgggattaacccaaatccatcgggggtctctcctttatatgcccccttcttattgtaattctttgcagtgtgacaaggaacaaggaagatggcggcaggaatgaatgcaggagcaccggagagagaggcacggagagcccatgcctccatggcgttggttcaactcatcaatggagggtatcaagtaattaccaa

SEQ ID NO: 41508 - DNA, 197 bp, Gossypium hirsutum
  unsure (1)..(197): unsure at all n locations; Clone ID: LIB3189-013-P1-K1-C6
actcccggaatctgaaaatgtcggtgggacgatttctaagtgggttagaggggggacctatcaaaaccaacgtcggttttcgggttaaagctatgggtagtgatcggaatccttttcggtactttcatagttctaactatgctncttatctattaaaccattgtcactctctttctcatttggacgtgcccttcaac

SEQ ID NO: 41509 - DNA, 275 bp, Gossypium hirsutum
  unsure (1)..(275): unsure at all n locations; Clone ID: LIB3189-013-P1-K1-C8
agatctactttctattcantagtatatacaatcttaattagcttggcttctctccaacagaaagtncttctttttccttccatcagtagaaaattttcctctataactccttcattctccttgtctctaccctgtattatctctttatcttaataggctactctttccattctttttntnaattccatattaattatttttttacttcttattttttatacttattacttatttttttttttttcttttttttttattttattttttttatctta

SEQ ID NO: 41510 - DNA, 278 bp, Gossypium hirsutum
  unsure (1)..(278): unsure at all n locations; Clone ID: LIB3189-013-P1-K1-C9
ttcaatatttaccagtttntctaagaaagtattctttacccaaataaatgtaatttttccaaattccattaatatatattttaaacatacaacaatattttacaaaaaatgttttataaaaaaaaaccctatattaactttctccctattttaattctttatattataattttttattttaattattttttttcttctttaattatttattcttatttactttaatcattctttattttatttattctttattatttttttaatttcttttttatttt

SEQ ID NO: 41511 - DNA, 449 bp, Gossypium hirsutum
  Clone ID: LIB3189-013-P1-K1-D1
cgaaaagaaaaaatggctttgaattttaatgccatcgcctcgaaatctcagaagctcccttgctttggtcttccaccaaaagccacccgtagatctcccaagttttccatgatctccaccattccttctggctccaaagaggttgggaatctgaaaaagcctttcacgcctccaaaggaggtgcctgttcagatcacccactccatgccgcctcacaagattgagatctttaaatctttggagggctgggctgagaacaacattctgactcacctcaaaccagttgagaaatgttggcaacccgccgactttcttccagatcctaattctgatggatttcatgagcaagtcaaagagcttagggaaagggcaaaggagatcccagatgattactttgtagttttggttggtgatatgatcaccgaggaagccctttcaacttatcaaac

SEQ ID NO: 41512 - DNA, 240 bp, Gossypium hirsutum
  unsure (1)..(240): unsure at all n locations; Clone ID: LIB3189-013-P1-K1-D11
tntttttttaaaaagaaacgatagtaacaaatgaaaaaatctgtctggtagaaggggatgtctaagagcattanaaacacaaaataaaccaagggaagaaggaaaaaaagggaactaaaatcccattacataaaacaaaactatacaactcctttttcattcatcaagtctagaggttcgggaattgactttcccaaagaataaaaaaaaaaaaaaaaaaaaaaaataaattaaaaaata

SEQ ID NO: 41513 - DNA, 449 bp, Gossypium hirsutum
  Clone ID: LIB3189-013-P1-K1-D12
agaccattcgacaatggtgacaatccctttctttgtcctaatcatcctccttttcctctccagctccgcggccacaccaaagagcggtgcaggtcacgacctggtccgttcatcatgtgtccacgccagctatccaagcctctgttttagcaccctttcttcctactccggcccagccaacaccccacgtgagttagcccaagccgccgtaaaagtcagcctgtcccgtgcccggaaagtgtcgaactacttgtcgacgagtgtgacggggtacaacaagagggaacgagtcgcactgagtgactgcgtggagcaaatagatgagtcgatggaggagttgagcaagacactaggggagttgaagcacttgagaggggagacgttcgagtttcagatgagtaatgcgcagacatgggtgagtgcggcgctgacgaatgaagacacgtgtc

SEQ ID NO: 41514 - DNA, 211 bp, Gossypium hirsutum
  Clone ID: LIB3189-013-P1-K1-D2
cgtcccttattccctttttctaacgcgacaaaacaggttttaggagaacatttgtatagctgcatggcttatctagcagcgggctgcacttgacccttgcaaacaggtcaatgttacaagaagctgaagagaggtcggtcagtttgtctggaggactcgtgaactgcaaaagcaggagacaatcggggagcaatttggtttgataacgttt

SEQ ID NO: 41515 - DNA, 386 bp, Gossypium hirsutum
  Clone ID: LIB3189-013-P1-K1-D3
gcgggattacccgctgagtttaagcatatcaatattcttaggaaaagaaacttaccaggattcccgtagtaactgcgagcgaacctgtaaaagcccatcttgagaatcggtcgccatcggcgtccgaattgtagtctggagaagcgtcctcagcgacggaccgggcccaagtcccctggaaaggggcgccggagagggtgagagccccgtcgtgccctgaccctgtcgcaccaagaggcgctgtttactagtcggtttgtttgtgtatgcagctttattcttactttcttttttttttttttcttatattctgggtggggttttgattattaactttttctttttttcaaatttttaatatgtctttatttatatgtttatatagg

SEQ ID NO: 41516 - DNA, 175 bp, Gossypium hirsutum
  unsure (1)..(175): unsure at all n locations; Clone ID: LIB3189-013-P1-K1-D5
tttcgcgttnctttcttaaactagagtcttgtaaaataaaacccaaagccttaaaaactgtcaaattttgttcaaaagctcgcttaccntactccccatanctattctaccaaatccaatcaacaccctttccttaaaaccccccgttggaaatttatctatcaaactacttaga

SEQ ID NO: 41517 - DNA, 70 bp, Gossypium hirsutum
  unsure (1)..(70): unsure at all n locations; Clone ID: LIB3189-013-P1-K1-D7
cattctttgctgttgaagtagtaatatctatattatacagagatggagaggcaaanaagcaagcaggttt

SEQ ID NO: 41518 - DNA, 248 bp, Gossypium hirsutum
  unsure (1)..(248): unsure at all n locations; Clone ID: LIB3189-013-P1-K1-D8
gtccgcagcaccccgatccggatcgtaacaaactcattttccgccattggattcaatctctctggcgtcctaatcctgcgccggcgtctgtcttcnnccgaccgcttttaagttttcgccctccaggccaggaaagagtggatgctaaaggtggaatagagaatggacaaattaagggaatttgggagaaaagctttgttctatgttagggttctctccggatatgaagaacctagaattcgaaacta

SEQ ID NO: 41519 - DNA, 451 bp, Gossypium hirsutum
  Clone ID: LIB3189-013-P1-K1-E1
caccttctctactccaaattttctctagaaccatacttcgagatggcttttctcatgccttcacctggaatttccaccgcctctgcgggtttttctctaaccctaccccccgccctaaatttctcaagagctgcgcgatttcgaagaacgacgacgagaaagtttggtcaaggaccaacgctagggtcggtgttaaagatgccggcagtacggtttcgtgtttgagccaaaacttgaggttgtacgtacaattttcggctccggtgaagcgaggatcgaagcccagcaaagaggaagaggagaagcaggattattacgtgaatatgggttacgctattcggaccttgagagaggagttcccggacatcttttacagggagctcagttttgatatttacagggatgacattgtattcaaagatcctctcaatactttcatcggaatcgacaa

SEQ ID NO: 41520 - DNA, 383 bp, Gossypium hirsutum
  Clone ID: LIB3189-013-P1-K1-E10
cccacgcgtccgcccacgcgtccgcccacgctttctgtagatcttcgttcaaccacgcctagtggccgctcggatttttctcaggcgtgaaaaaaatggggctgtctttcaccaagctattcagccggctatttgccaaaaaggagatgcgcatactgatggttgggcttgatgctgctggtaaaaccaccattctttacaagctgaagttgggagagattgtcactactattcccaccatcggtttcaatgttgagaccgttgaatacaagaacatcagcttcactgtttgggatgttggcggccaggacaagatccgaccattgtggatacactatttccaaaacacgcaaggacttattttcgtggttgatagcaatgat

SEQ ID NO: 41521 - DNA, 456 bp, Gossypium hirsutum
  Clone ID: LIB3189-013-P1-K1-E12
cggacgcgtgggctttactcttctgtgtgaggataaaaaggaaaaacctttccacaaatctgtatctgcatctgctttgaaactaaaaatggaaatcaataaccaccatgaaggaggtttcgaaatggagaagaagcccaagacgaagatcgtatgcactctgggtcctgcatccaggtccgtccctatgatcgagaagctgttgagggcaggcatgaacgtcgctcgtttcaacttctctcatggatctcatgcctaccatcaggaaacccttgacaatctcagggcagctatgctcaacaccggtattctctgcgccgtcatgctcgatactaagggtcccgagatccgaactggttttcttaaggatggaaaaattcaactcaaacagggtcaagaaatcaccataacaactgactatagcataaagggtgatgagacactgataagtatgag

SEQ ID NO: 41522 - DNA, 230 bp, Gossypium hirsutum
  Clone ID: LIB3189-013-P1-K1-E2
attttgcatatatgtttttaagttagtacttggtctttcttttgttcggaactctgttttttttagtgaattaacatctggttgttgattaagaaagaaaataaggttgtgttctttctttgaagtttgaatatttcatgtgagtgcattgttattgtggaattttttttcattgactatatgctattttacttaatttaataattttatgatattcattttttttgttg

SEQ ID NO: 41523 - DNA, 317 bp, Gossypium hirsutum
  Clone ID: LIB3189-013-P1-K1-E4
gcgtccgttttgaatcatttcctctcaatttcatcttcatattgtgcttcttgaccatctcctttcctaatgtagtgcatggcgggtcaactagtctctcgtcagagatgagacaatgtgaagggtcatctttgaagccaaaagttcacccatcaactctgaaccaccaaacctgatgctgatttggagtttcttttgtcgaacattgcatgaaattgaatcgtcatccttggactttacatgactactccctttggctcaacaagctttatgcttgatcccatcaatttacctaaaggacccttaactttagcttg

SEQ ID NO: 41524 - DNA, 278 bp, Gossypium hirsutum
  Clone ID: LIB3189-013-P1-K1-E8
aaaccctagcaacacactatttcatcctttcttatatcaaagtgcaaaccctagcttcttcgtgtcctcctcggctccatttgtgggtccctcaatatcaaagtaaaaatgaaggtggtcgccgcttacttgctcgccgtactcggaggaaacgcttccccttccgccgatgacttgaaggttattctcggatcagttggtgctgaggctgatgatgataggatagagttgctattatccgaagttaaaggcaaagatattaccgagctaattgcttg

SEQ ID NO: 41525 - DNA, 237 bp, Gossypium hirsutum
  unsure (1)..(237): unsure at all n locations; Clone ID: LIB3189-013-P1-K1-F1
cggacgcgtgggcggacgcgtgggttcctctctctctatatctaaagggttctttagattttctggccagtttcttctattaagaagatggcctcccacattgttggatatccccgtatgggaccaatgagagagcttaagtttgctttggaatccttctgggataagaagagcagtgcccnatgatttgctaactctctattgctgtttcttaatgatattcatttttttatcatt

SEQ ID NO: 41526 - DNA, 457 bp, Gossypium hirsutum
  Clone ID: LIB3189-013-P1-K1-F12
cttctttcaaccgcgcctaataaccgctcggttttttctcagacgtgaaaaaaatggggctgtctttcaccaagctattcagccggctatttgccaaaaaggagatgcgtatactgatggttgggcttgatgctgctggtaaaaccaccattctttacaagctgaagttgggagagattgtcactaccattcccaccatcggtttcaatgttgagaccgttgaatacaagaacatcagcttcactgtttgggatgttggtggccaggacaagatccgaccattgtggagacactatttccaaaacatgcaaggacttattttcgtggttgatagcaatgatcgtgaccgtgtggttgaagctagagatgagttgcacaggatgttgaatgaggatgagttgagggatgctgtgcttctagtatttgcaaacaagcaagatcttccaaatgctatgaa

SEQ ID NO: 41527 - DNA, 432 bp, Gossypium hirsutum
  Clone ID: LIB3189-013-P1-K1-F2
gaaattttgtgcaaatttgaagcattctgagaggttgaattcaggagtcatggtagtggaaccatctgaagctgttttcaatgacatgatgagcaaagtcaatactttgccttcttatactggaggagatcagggttttctgaattcttactactctgatttctcaaatgcacatgtttttgaccctaatatacccgaggaggtgctgaaatcccgtcctgctcctgagatggaacgactttctactctatacaatgcagatgttggtctttacatgcttgtcaacaagtgttatttttatgatagtgatctgtgtgtatttacttatcatttttttttctttattcttggattttgtttctttttattctttgatcctttttattttcttatttttttatttcatttttattatgttttatttttattttt

SEQ ID NO: 41528 - DNA, 186 bp, Gossypium hirsutum
  unsure (1)..(186): unsure at all n locations; Clone ID: LIB3189-013-P1-K1-F3
cgtccgaaaacactttgctttctttgggattcgtgatttttttaaagctgaattggccggaactcttaccaaaatactttatgtacaagttagcaaagaaaatntnaagaggaaaaatatatataaagaggatcgaaaacacaacaaatcgttaggttacctattgcaaacacatgaaaggcctgc

SEQ ID NO: 41529 - DNA, 227 bp, Gossypium hirsutum
  Clone ID: LIB3189-013-P1-K1-F6
ccccctaattgcggcctttgatgtggagttccgcggcttcaacggagggctcgcatgggccaccgacgaccgggccctcgaagaagccttcagtgcgtttggtgaaatcgtcgaatcgaagatcattaatgatcgtgagactggaagatcccgaggctttggattcgatactatccgtgactagaaagctatgagggacgcgatcgaaggaatgaactgacaaaatc

SEQ ID NO: 41530 - DNA, 261 bp, Gossypium hirsutum
  Clone ID: LIB3189-013-P1-K1-F7
acagagatggcaacgcaggttggcaaaatctacattggaacacaaaaaacatgtgttcttcccaatgtttcaaaaacccagaatccgaaacatgttccttttgtttcattcaaatcaaatctcaatggaaagacaagttcttggggtttggttgtgaagaacaatgggaaatttgggtcaataaaggctcggtctttgaaggtttctgctttaacagcttacagctgagaaaccatctagagcttcatagattgtgcttta

SEQ ID NO: 41531 - DNA, 177 bp, Gossypium hirsutum
  Clone ID: LIB3189-013-P1-K1-F8
agatggcaaaatagtctagttcatggcatttattttatgttgttgataaagaggtccatgaatgtgtattttcagttgatgaggggctcaacaaaatcatactaatagtatgactattattcattgcaagatttaatgaatacttgctacaaccctgatgatgactgcaactacaat

SEQ ID NO: 41532 - DNA, 349 bp, Gossypium hirsutum
  Clone ID: LIB3189-013-P1-K1-F9
aaaaaaaaaaaaaaaaaaaaaaaaaaaaaaattaatcattataaaaaaataaaaaataaaaaatggggagatattttaaaaaaaaaaagggggaaaaaaaaaaaaaaaaaaaaaaaaaaataaaaatgtgcctccttttttaaaaaatcaaaatttttttcctttactttaaacaaaatatttctataatatttctttaaaaattaatttattttcccccctttataaaacttcttatcttaaaaaacctcatttttcccaatttaatttttttttaaaaaaactctctttcttcatatttatttataaacaaataaacctcttattatatatttttttaaaaattttt

SEQ ID NO: 41533 - DNA, 302 bp, Gossypium hirsutum
  Clone ID: LIB3189-013-P1-K1-G1
cccacgcgtccgcgtggagccttttaaaacaattgataaaggattgttcctttccatggttagtggtgggcgattttaccgaaatggtatattcatttgagaaacaagggggacgagtgcgggatgaatagagcatgtagaattttcatgatgtattgaaagaatgtgagcttagcgatttgggtttcttcagtcaatggtttacttggaaaagagggcagctaccagaaaataatgtgtgtgcgcgactagatagggggtggctggttcaacttggtgggagctatttttttcattttttt

SEQ ID NO: 41534 - DNA, 441 bp, Gossypium hirsutum
  Clone ID: LIB3189-013-P1-K1-G10
gttctccaaaacgacatcgatttgttgaacccttctgccgagctcgagaagaagaagcacaagctcaagcgtcttgttcaatcgcccaattccttcttcatggatgtcaaatgtcaaggctgcttcaacataacaaccgtatttagccactctcaaactgtggtggtgtgtggaaactgccagacggttctgtgccagccgaccggcggtagagctagactcaccgagggctgctctttcaggaaaaagggtgactaaatccgatccagcggcaacgattcgaggaagaggttttttttgtatgatcccactctggttatctttttgatgtggttaatattgtcttaaatcttcgaaggagaattaaggattttagaacgactattatgttctattgttctttgattattgtggatggttttttttgttttttttttttgt

SEQ ID NO: 41535 - DNA, 461 bp, Gossypium hirsutum
  Clone ID: LIB3189-013-P1-K1-G11
cggacgcgtggggttttcttagccaaaggctttcgtttagcttcatcaatggcacaggaggaggttcagaacggaggaccggagaaagtagcggaggtgagcttcacggcgctgaaaccgcagctcatggtcgaagcacccaaggcagctgatgcggtgcagttctacaagaccgcgtttggcgctgttgaggctggccgtaccgtgtaccctaagcgcaaggctgagcaggagcagcctcacgtcctctccgctcaacttgagcttgctggctctaccattctcgtttctgacatcgctgataactctactccggtgaaaaccgaggggactggatgtgtgctctgcctggagactgaggacgtcgaagctgcaattgccaaggctgtcagcgctggaggcgttgcggagggtgaggtaactgagggcgatggcgcgtgctgtggtggtcgcgttggcaa

SEQ ID NO: 41536 - DNA, 455 bp, Gossypium hirsutum
  Clone ID: LIB3189-013-P1-K1-G12
ctctctcaaaatctcaaacccagatttgttctttctctctctctctctctatttccaatcaattaattcctccattggaggagcttagggtttgttggtgttctggtctttgctttgtctgaaaaataaacagaattataaacgaacaccaacgccatgggaagatttgaagagagaggattcgattcagtggtttgccctaagcctatccgaacctttagatggtctaccaactgttatcagactgagatggctgattcaaaaactggtgcagagcttcttgatataatcctccccgagggagggtatggggccgagaatcccaccaaccaaatggcttcatcaccaccgtatttctgtggatcaccgccgagcagggcgtcgaatccggtaatccaagatgcccgattcaacgacgagcagccggtgctaccttcactaacatccccagcaac

SEQ ID NO: 41537 - DNA, 456 bp, Gossypium hirsutum
  unsure (1)..(456): unsure at all n locations; Clone ID: LIB3189-013-P1-K1-G2
cccacgcgtccggccaccaaaaccaccggtttatacacctccaaagaaagagaaacctgaacccagagaccaccaatgtatgaacctccggaaaaacctccaatgtatgaacctaagccaccgaagccaccggtttatacacctccaaagaaagaaaaaccagaacccaagccaccaatgtatcaacctcccaacaacccaccaatatatgagccaaaaccacctaagccaccagtttatgcaccaccaaaggaagaaaagccaaaacctaaaccaccagtttatgagcctccggcacatgagccaccatacggtcactatccaggacatccacctttggggaagcctcaatagaatgctcccatcgactagccattcccaacaattgagctactagaaaaattagtatttataataagaggaactgccggctgatgtnctgttttattcttggat

SEQ ID NO: 41538 - DNA, 175 bp, Gossypium hirsutum
  Clone ID: LIB3189-013-P1-K1-G3
cattttccgactcatcgttgtatttttttttaaatttctcaccgatggcgaccgctatggtaggagattctatcttcgtagaaggccgtgcggctttcatgactaccaatgatatcttcctagctttccattattttcataacaagattcttattcttaatgaggagatgccaag

SEQ ID NO: 41539 - DNA, 459 bp, Gossypium hirsutum
  Clone ID: LIB3189-013-P1-K1-G4
ctgactccctctcccttttccaaaaagagagagttcccctctccatctaaaaaaatggaatatcggtcgagatctatccacaaatccggctccatcatgatctccgccatcctcttcctctttctgatccacacctctcattgcttctaccttcctggtgtcgcccccgaggacttccaaaagggagatcctttgaaagtgaaagtgaacaaattgacctctataaagacacaacttccttattcatattattccctccctttctgtccaccaaaaaagatagttgacagtgcagaaaatctcggggaagtgcttcgtggtgaccgtattgaaaactctccttatgtgtttaaaatgcgtgagccacaaatgtgttctgttctttgccggattacacttgatgccaaggctgcaaagcagtttcaggagaagattgatgatgaatatcgagtcaatatg

SEQ ID NO: 41540 - DNA, 381 bp, Gossypium hirsutum
  Clone ID: LIB3189-013-P1-K1-G5
cggacgcgtgggcggacgcgtgggtggaatttgtaattttccgaaagctgaagtggccggaactgtggcctaacctcaggaatatggaaaagggtgaagatgggaagaggaaagatagagataaagaggatcgagaacaccacgaatcgtcaggttacgttttgcaagcgcaggaatgggctgctgaagaaagcatacgagctgtcagtcctttgtgatgcaaaagttgctcttatcgtcttttccacccgtggccgtctctactagtactccaacaacaacataagatcaacaatagagaggtacaagatggtatgtggcggtaccttaaacacaaataccgtcacggaaataaatgcttagttttatcaacaagtattt

SEQ ID NO: 41541 - DNA, 423 bp, Gossypium hirsutum
  Clone ID: LIB3189-013-P1-K1-G6
cgcagacacatgggctctaatgttactctgtttcttttaaagcccacgccttgtttcttcctgaggtgtaagatttcaaatcccctttttttgcggcggttaacgtttgctgatcgttgcttggtttccgaggatcaatcatgactcgtggtaaccagagagatcgagatcgagaaagggctcaatcccgagcgggcggcaaaggcagcaagaccaaggacgatggcttaaccccagaacaacgtcgtgaaagagatgcaaaggccttgcaagaaaaggcggcaaagaaggctgcgcaggcggcagctggagggaacaatgctggaggcggtagtaaaaccaagaaataattatccgatgatgtcaaattgttaatgatttatttacgctggacgggaaagacagggttggttcgttgattgg

SEQ ID NO: 41542 - DNA, 399 bp, Gossypium hirsutum
  Clone ID: LIB3189-013-P1-K1-G7
cccacgcgtccgcacggcgtcacccaaccgcttttcgccactgcaccgtctccgcctgccgcgggctcgttgctttacccaacaggaaaattagaaaatggaggaagatgatgattacgttgagtatattccggtagcgaaacgccgcgctatggaagctcaaaaaatcctacagagaaaaggcaaggcttctgcgcttgaagatgaaactgaaaaagccaatgtggccgaagtaaaacctagtttacttataaaagcaactcagcttaaaaaggatcaacccgagatcagtcaaatggaacaaattgtacaacaagaaaaagagatgattgaacatttatttgataggaaaaccctcatgtctgttcgggaattggcaaaagggattacctatactga

SEQ ID NO: 41543 - DNA, 316 bp, Gossypium hirsutum
  Clone ID: LIB3189-013-P1-K1-G8
cccacgcgtccgaagacccttgagagattgttgttaaatctcttctagaattgaaggatccatggattcacacgcataatagtgggggcaattctgtgaagaatgaattccaaatttgtgtcctttaaggataataaaagaaattatcaattcataaaaaaaaaaaaaaataaaacgaaaaaatataatttataatattatattgattataaaataaagaatatattgtataaatttaaatattttttattttattataatacttaaatttatattggggggactcttttttttgtttttaatttttctttctctt

SEQ ID NO: 41544 - DNA, 316 bp, Gossypium hirsutum
  Clone ID: LIB3189-013-P1-K1-G9
ttttgaaattaccctttcttcttcttcttcctcgtcggcgtcgtcgccggcgttgttctcgtcggcttcggcatcaactccggtggctctctctcgctcgccgtagattccttttcatttcttaaacatgaacgagaaggccagcgttaccaaggagctcaacgccagacaccgaaagattattgaaagtcttcttaaattgccggagaatagggaatgcgccgactgcaaagccaaaggtccgagatgggcaagtgtgaatctaggtatctttatatgcatgcaatgttctgtgatccacataagtcttggtgtt

SEQ ID NO: 41545 - DNA, 419 bp, Gossypium hirsutum
  unsure (1)..(419): unsure at all n locations; Clone ID: LIB3189-013-P1-K1-H1
tttcacacgggttgtggcgtagtttaagcagagtgtttgcgcaggataaagtctcttcacattgtttcaacatgaaggtttgtaataagagatttgtttctatcagcattgctttgcattgctattgcaggagttttgggtcaagctcctagtaatcctcctacgtctacgccggcgccacccacaccaccggcttctactcctcctccgacgactcaaccaccgtctacaccaaccgccactccgccaccggtttctactcctcctcccacttcatcaccgcccccagtgacagcttctccacctcctgcaactccacctncagcttnttcaccttccggcactcctgcaccagcttttncaccttccgccacttcaccaccagcaacccccccacctgcaacttcttctgctacccc

SEQ ID NO: 41546 - DNA, 181 bp, Gossypium hirsutum
  Clone ID: LIB3189-013-P1-K1-H10
ctttcaagagcaatggcaattttggggttttttgcttttgtgttacttgttcaagtcgtcaactttgttgatggttttccatggagtcatcatcatagtcatcgtccccatcgtggatatcatggaccatggatcaatgctcatgccactttctatggagggggtgatgcttctggaacat

SEQ ID NO: 41547 - DNA, 281 bp, Gossypium hirsutum
  unsure (1)..(281): unsure at all n locations; Clone ID: LIB3189-013-P1-K1-H2
gtggaatgtcatggttccacctctttatctttggagtcgttctgatttttcagcaaagaacaagagcatagctgaaaagcatggtcaggtacctagggaaccagcgagttcaaatcaggaaatgaatattgatgaaacacgcagatctgattttgaactgccattggaggatgatggncttcgtgatgatgctactgagttgaaagatcatatgcaaaattatgaaattgaggaatgtaaaaaaagagaaatctttggtggtgatccctaatgagtgctct

SEQ ID NO: 41548 - DNA, 280 bp, Gossypium hirsutum
  Clone ID: LIB3189-013-P1-K1-H3
attttgatgtattgctgtccttttctcttaaccacttttccgatctccttcgcttcacagctctgtcatctcccccatttctttccatgcaagcgttctgtcatttctcactcattgaatgctatatttctatctaactttgccttcgtccgccagctaagtaagatcttttttcttcttctgaaaacaagattgatgaattcttttcttttgggaatctgggtcttgtctttcttgagatttgggaaacccttttgtttcattggccactgatgcgaaa

SEQ ID NO: 41549 - DNA, 121 bp, Gossypium hirsutum
  Clone ID: LIB3189-013-P1-K1-H4
ccgatacttcctctctccctttcctccgattctatatctctctctttctgctagggtttgggagttagtgaagaaggggttgttattggcgggggccaacattcttttatctactccttct

SEQ ID NO: 41550 - DNA, 293 bp, Gossypium hirsutum
  unsure (1)..(293): unsure at all n locations; Clone ID: LIB3189-013-P1-K1-H5
atctctttgagtgacttcttttagttctctcttcgtttcacctccgtgcacttcgaaaaatggtttctcacattgttggatatgcccgcatggcacctaagagagagcttaaatttgctttggaatctttctgggacaacaagagcagtgccgaggatttgcaaaaggttgcagctgatctcangtcatccatctggcaacatatggctgttgctgggatcaagtacatcccgagcaacactttttcttattacgaccaggtgctttatgcaacatttatgcttggagctgtt

SEQ ID NO: 41551 - DNA, 253 bp, Gossypium hirsutum
  unsure (1)..(253): unsure at all n locations; Clone ID: LIB3189-013-P1-K1-H6
ggactgcctcaaacaaggaagtcaacgagcggtatctgatgatatgccactaggacgcagaagtccgttttgggattcattagaagcatgggcggctctcgccatacaagatcgccatcaactatgagggcttgaagacacaggaaggggatcgaacacttttttacttcgaatacttgggtcctttgancctctaccctgtctactactacttccctgcatacaagtactctggttacgaagaaaagcgtgt

SEQ ID NO: 41552 - DNA, 366 bp, Gossypium hirsutum
  unsure (1)..(366): unsure at all n locations; Clone ID: LIB3189-013-P1-K1-H7
ctctttgngccaaactagttttactctcgaattcttccgtcacctataattcatctccggccggcggatcttatacgccgccggtgccgcgtcttcttggcattcattctagtttccgataagttcttgagtgtttctgttattttcatcggagaaggattgattttataggtaagacgatgtctttattgaactatggattaattttgcctttttttttttttttttacatacttatgctcattttttttattcctattttgtatatagtttaatagcttatttttttatttatctatttatattaactatattattttcttcttttaatattttatttattttatttcatttattttatgtttt

SEQ ID NO: 41553 - DNA, 226 bp, Gossypium hirsutum
  unsure (1)..(226): unsure at all n locations; Clone ID: LIB3189-013-P1-K1-H8
cggacgcgtgggcggacgcgtgggggtgacaatttctttctttgtcctaatcattctcctttgggtcttcagctccgcggccacggcaaagagcgttgcatgtcacgacctggtccgttcatcatgtgtccacgccagctatccaagcctttgttttagcacctctacttactactncggcgccttccaacatcctacgtgtggtagtctaagccgcctgtaaaag

SEQ ID NO: 41554 - DNA, 282 bp, Gossypium hirsutum
  Clone ID: LIB3189-013-P1-K1-H9
cttttactgtactttttctttctcctgttatttttatgctgaatcgttaaccgcaatgtcggtcactgcaatagcaactgcaacaccgtcagccactggatcgttccgtaccaggcgatccacgaacggggtatctcggttcaagatgtccgtccgatctggctccgtttcaatggctgctgctcccatgttaaccaagcttcagcaagactgtgccactccttttgccggtccttcgcaacgtggccgcctccatgtttgatgatttttcgtgcaggcctt

SEQ ID NO: 41555 - DNA, 227 bp, Gossypium hirsutum
  Clone ID: LIB3189-014-P1-K1-A11
tttttgttttctaagttttcaaagctttcatgtcttcttccattacatccaagcctttccttggagctactaaacccaattgttgtgtttctcctgatcttcaaagactttctttttcctctcttcgcatctcaatcaaaccaagaacccacaaatagcttcagatacaagcagctgggagcacatttggaaattatttccgagttacaacttttggagaatctcat

SEQ ID NO: 41556 - DNA, 438 bp, Gossypium hirsutum
  Clone ID: LIB3189-014-P1-K1-A12
atcgatctcccgagagtgaagaagatacagttttcaaactagatcgaggtcttctgataaaggcttcaaattgatattgtctgggtagattgcttcttggtaaccaagatggttgtacttgcggcttcaattgtaagcaagtctggaaaagtgcttctctccaggcagtttgtggacatgactcgcataagaattgaaggtcttcttgctgcttttcctaagttggtgggaacaggaaagcaacacacatatgttgagactgagaatgtgcgatatgtttatcaaccaatagaagctctttatttgcttcttgtaacaaacaaacagagcaacattcttgaagatttggagactttaagactgctctccaagctggtaactgagtattcttactctctaaatgaggagggtattggcaagactgctttgaactgatct

SEQ ID NO: 41557 - DNA, 171 bp, Gossypium hirsutum
  Clone ID: LIB3189-014-P1-K1-A4
ggaagttgaggactgcttgtgagagagcaaagaggtccctttcatcgacagctcaaactaccatcgagatcgattcattgtacgaggggattgacttttacaccacgataactcgtgcaaggtttgaggagctcaacatggatctttttaggatgagtttataaccagttc

SEQ ID NO: 41558 - DNA, 408 bp, Gossypium hirsutum
  Clone ID: LIB3189-014-P1-K1-A5
gttttgtatttcatactcatttagcccctttcattagcatcgaaatcactccagttttctttatcactgaaaaatgtcttgctgtggtggaaactgtggctgcggttctggctgcaagtgtggcagtggctgtggaggatgcaagatgtacccagacctgaacgttgccgagatgaccacaactgagactctggttcttggtgtagcaccccagaaagcacactttgagggagctgagatggaattcggggctgagaacggctgcaagtgtggagacaactgcacctgcaacccttgcaattgtaaatgattagagaccatagccatagctccctggaagcagagacgcctttgtctttaagaaataatatgttttagtggttatgtgtttttagaaataagtatcct

SEQ ID NO: 41559 - DNA, 440 bp, Gossypium hirsutum
  Clone ID: LIB3189-014-P1-K1-A6
gatcgatatgcaactcaagcttgttgctggcaactcatctggcactgtcactgcttattatctgtcatctcaagggccaacccatgatgagatagactttgaattcttagggaatctgagcggtgacccttacattttacacaccaatgtctttacacaaggcaaaggcaacagagaacaacagttctatctttggtttgaccctacaagaaacttccacacctattccatcatttggaaaccccaacacatcattttcttggtggataacacccccattagagtcttcaaaaatgctgaatccattggtgtaccattccccaagagccaacccatgaggatttactctaagttatggaatgctgatgattgggccacaaggggtggattagtgaaaactgattgggcaaaagcacctttcacagcttattacaggaact

SEQ ID NO: 41560 - DNA, 441 bp, Gossypium hirsutum
  Clone ID: LIB3189-014-P1-K1-B10
cccacgcgtccggtaatacaatatttttacgtttgaggcttcttatagccgaatataaaaaagggaatctatatttgctactgggcggctctgctctttcctgttctcccttctttgtcatgtttgcaggtctatggagggtcaacgaaggaaaaccttgctatttcagtgcaaggaaacagccatcgggcggagggtacactgacggaggcacgtggggtgcggggcgaccgaggctacggtgctagagtggatagaaaccctagggttttttgaaaattttttatattttgggccaatcgggccttgtaatgttgggctcgagattttgagttgtgttttgggtcttaatttgggctgatggtataggttaggtattgagtcttgtaattgaattgtaaatattttaggcccgggcaaaatttgagtcctacataagtc

SEQ ID NO: 41561 - DNA, 413 bp, Gossypium hirsutum
  Clone ID: LIB3189-014-P1-K1-B11
ctaaagtaaaaaagtaaatattgtgttgaaatatggaagaacaattgatatttgcgtgggcaatgatattctgcatcgccatagcgcccgtctatggggaatactattccaagactgttacacctagttcaaaggcggaaaaagtgaccaatcttcacttcttcctccacgataccctcagtggagaaaaccctagtgcagttctggtagcccatgctaacctcaccaggaaagaccattccccagttccgtttggcagcttgtttgctatcgatgatccgctcagagtagggcctgaaccaacatccaagataatcggcaacgcccaaggactgtacctatcatccagtcaagatgcttccaagtttacaatagttttgtacgctgattttgcgtttacgactggcaagttt

SEQ ID NO: 41562 - DNA, 431 bp, Gossypium hirsutum
  Clone ID: LIB3189-014-P1-K1-B12
ctttgctgttgaagtagtaatatctatagctttctgagatggagaggcaaagaagcaagcaggtttgtttgttgatgtgggtgggggttgctgcctttttctcccacaatagggtcattgcagtgacctccactggccttggtgagcagaaaaactactatccagctcctgaccctcatgctggaactcccccttcaggttcacatggcacaccaccatcttcaggaggtggatcacctccctctcatggaaccccgtcacatggaggtggttaccacccttcaccaacaccatcaacgccttctggtggtaattggggaactcccccacatgaccctttaactccattaacaccatcacacactccttcttatggtactccaccattatcttgaggtggtagtcccccatcgtatggaaggagcagtccc

SEQ ID NO: 41563 - DNA, 400 bp, Gossypium hirsutum
  Clone ID: LIB3189-014-P1-K1-B4
cttcgtaaaggcatcccactgctccgccttcggctgcaacgatacaaccttcttgcagctggaatcccatcgtctcctcgtcggcgttggtgcgctgctgcagagtcgactgggctcgaagaggaggtgtcctccgcggagaagagtagtgcggtgcctagcgtgagggacccgaagaagtaccatatgttggatgatcctgattacaggaaatggaaggataaggaggaagagattcttcgtgacatccatcctatcatttctctcgctagagagaatcttcactctaattggtataaggatggggaacggatgtactgttacaatttaaggaatcttttctttagatgcttattctttataactgctctccaagctggtaacttgagtattcttactc

SEQ ID NO: 41564 - DNA, 269 bp, Gossypium hirsutum
  Clone ID: LIB3189-014-P1-K1-B5
gtttattttaggctttgataaaccaaaattgaattacaatggtggtggtgcatccaaggataatgacgtatatcaagtggtgaaaggggatctgcattaaacaaataaataattatattattaatttgttagtgggaaaggtcatattcagcccgattccatcatctctgtatcgttaaatactgaatctatcaaccgcctacataaaaatttctagttatttaagaatctaaacatctaattttgtttgcatatcattttttttttaa

SEQ ID NO: 41565 - DNA, 299 bp, Gossypium hirsutum
  unsure (1)..(299): unsure at all n locations; Clone ID: LIB3189-014-P1-K1-B6
agaagagtaaaataccaataactttcaactaacgtttaataaccacaancagcaacaacctaaagaaggctttcaaacgagcgaagagggccacctcaagcnanccaccataatatgcattatacaccaccaggggaaaccccacaaggttctcctcaaggatatcttcattcttctcatcatccataactacaacctcaaggtatacatgtcacaccaccatctttaaaatgagaaatcacctcctctcatagaaccccatcacataaatgttgttaccacccttcaccatcaccata

SEQ ID NO: 41566 - DNA, 344 bp, Gossypium hirsutum
  Clone ID: LIB3189-014-P1-K1-C10
attctggtttagatttaacactttgcagagcctggtttttgaggaaacaagttcgaccaagtcggtgaatcgatccatcaaatgggtgctatggctcggtatcttttctcggacctgccgagacaatcacctaacatgactgatacctgccgtctcagatcacaaccacctcatgttgtttcctttccaataaaccaaccgttcctgtttcagttgactctgattttctttcttaattttcgtatttttttcgtcgttttttgtctttttgattccatgtttttttttatttactttttatttttttttatattgttttgtttttgtgttttttttaattactt

SEQ ID NO: 41567 - DNA, 365 bp, Gossypium hirsutum
  Clone ID: LIB3189-014-P1-K1-C11
cagattctttcaaaagaaatcgtcaaacctgcttctccagaaattcatctaaaagaacccttgcggactctgtgtatttgatcaggtgactcccaccacttacgctccaatcatattattttatgccccgagtgataccaacacctccaatattttgactcagctgaagaaatctctttcagaaaccctaaacatcttatatcccttctctgggagaatctttagtaacatgttcatccatgatttcgatgccggtgttccgtttttatcggctcgaatcggttggtgattatccgagtttcttaagcatcatcaaattgagaccttgaacaacttgctcctatgccctgcttttttacaagggt

SEQ ID NO: 41568 - DNA, 399 bp, Gossypium hirsutum
  Clone ID: LIB3189-014-P1-K1-C12
cagaaattaaaagaaaaaatatcaattttattttattactaaagcgtgaagattcaagcttgcaatcgaattcctcatttgaaatgctttgatgaaacaggtattagaactgtaatagagaggataaaaaaagatcattgttgaggatggcttgtaaaggatgcctagaatgcttgttgaagctgttgaacttcttgatgactcttgttggtttggcaatggttggatatgggatctacttgtttgttgagtacaaaagagctgctgatgttgccatgcttttgtcacctgtgggcactgaccaaatacagctcggtcggcccatgctcatggccgggtctctttcgtctagtattttcgataatcttccaaaagcatgggttatatatttgtttattg

SEQ ID NO: 41569 - DNA, 322 bp, Gossypium hirsutum
  Clone ID: LIB3189-014-P1-K1-C5
gattctatggccctgaagctcttctgggtcagactcacgttgttcttcggcttttgggttgttgctgtgctgtgatcaagatgggtgcttgagcttatcttgtggtggagcaaagagttatgtagattcatctaagataaaatgggtgtcagatgatacattcataaccacaggcaacacaactaccgttgagtatgctgaaagtaccttctcctcggccagcattgcacttcgattttttccggaacctctaggccccaattgctataagttaccggtagagaatatgtcctccaattgttcttgtgagggctcaatttag

SEQ ID NO: 41570 - DNA, 398 bp, Gossypium hirsutum
  Clone ID: LIB3189-014-P1-K1-C6
ccaacccgtccgcgacagttcctttgattttgagttgaaaagagagatagatagaagagtagatcttggcttctctggtgggttcgattccgcttaagtatagcccgcgtttctctcaaacgtgaaaaatggggctgtctttcacaaagctatttagccggcttttcgccaagaaggagatgcgtatactcatggttgggcttgatgctgctggtaaaactaccattctttacaagcttaagttgggagagattgtcactaccattcccaccatcggtttcaatgttgagaccgctgaatacaagaacattagctttactgtttgggattgttggtgaccagtacatgactcgtccattgttgagactctactttcaaatcacccaaggacttatttt

SEQ ID NO: 41571 - DNA, 56 bp, Gossypium hirsutum
  Clone ID: LIB3189-014-P1-K1-D10
cggacgggagggagacgagaaaaggaagacaacgatggtgtctttgaagttacaga

SEQ ID NO: 41572 - DNA, 418 bp, Gossypium hirsutum
  Clone ID: LIB3189-014-P1-K1-D11
gttacccgctcattactccctcttcttctcatcttcgtcgcgccctaaatcccgcaggtaactctcaaaatttggccggaaatttcccatttccagcaacacaagtcaatacacctacaccaatcacacttctttttccttttcatttcttcaaagattttaatctgaagaaatcttagctccgcttttacaacaatggagcgcaaggctattgaactagatcagggatgggattatacgaagattttgattttataagagtataataattgcgctcaagtcgtcaaattcatattttgcggagggtattgtatagattattatttaaggattggctcgattccgatttcatcaccattttcatatctcaaatgatctctctgtaaccgcttgctggtaaattttatagaaaaacacg

SEQ ID NO: 41573 - DNA, 297 bp, Gossypium hirsutum
  Clone ID: LIB3189-014-P1-K1-D12
cccatgcaaaatatgtataaaaggaaaaggatgatggaagaccactctaatgtggtaaaagtggctaaaaattggaatcgaggagaggctaatagtagtggagacattgccaaaggatccatcaaaaatgaaggatgaaaagaactttgttcttatttaacttgaaatgccaaatggtaatccgcttgttgttgaaaaagcagagaacatagaagcttcagtttgcaatcaaaatagggtggaaatatcaacaggaaaacctaatcatggaagaaacattactgccttaatcgaaat

SEQ ID NO: 41574 - DNA, 284 bp, Gossypium hirsutum
  Clone ID: LIB3189-014-P1-K1-D3
ctgactcagagaaccaagagcaagttcgtatttgcatgtccagccaaatctgctgagaccctcttggaatatattgctccggagcaagtgccagttcaatatggtggactgagcagagaaggaaaacaagaatttagcgtggccgatgccgtcacagaggttacaatcaagccagcagcgaagcacagtgttgaattccctataactgagaattgtaatctggtttgggaactccgagtagtgggatgggaagtcaattaccggagccaaattcttgccgaccg

SEQ ID NO: 41575 - DNA, 418 bp, Gossypium hirsutum
  Clone ID: LIB3189-014-P1-K1-D5
cttccactccaaaaaactgtagctatggctaacattttcctatatttttgcctcttctgtagctgaggtgtattaactcattcaggtggtgaggaggctctggtcactcaactccctggcttttctggcacttttccttcaaatcactactctgggtatgtgaatgtcgatcaaaatcatggcaagaacatgttttactattttgtggaatctgaaaggaatccgtcagaggatccactggttctttggctcaatggtggacctggatgttccatctttgacggctttttttacgagcacggtcctttcaatggttaagcaacatatgctatttgatagtttggcccaactacattctatattccttattagtgttcccaaggtctcttaccattatttattttatattttttcaatt

SEQ ID NO: 41576 - DNA, 379 bp, Gossypium hirsutum
  Clone ID: LIB3189-014-P1-K1-D6
cggacgcgtgggtgacagacggtggaacccagatgctttcgtcttcaactcctttcaagcgtatggaactcctagctactgggtgcagcgttttttcacagaatcaagtggagcaattcttcttaatgcaacactgcaaaaagattcctctaattcccttgttgcatctgcaattacttggaaaaattcagaggctggtcaaacctacataaggataaaggttgtaaactttgggagcaattcagtcaacctccaaatttctgttgatggattggatccaaattctgtaaagctgtctggatcaacaaagaccactcttacatctgctaatctgattgatgaaaattcctttaaggaacctaaaaaagtctcacctatt

SEQ ID NO: 41577 - DNA, 362 bp, Gossypium hirsutum
  Clone ID: LIB3189-014-P1-K1-D8
tcccgtcgacccacctccgcggaccgtgggttcagagtagatattctctcttttttctttcgtcgaactcccggaggaacgctcatattgccgaggcgtgagaatgggctgtctttcacaaactgtcaccgctttttgcctgaagagatgcgtttttgaagttgtactttttgcttttgttattccaccattctttctcctcatttttaatatttttccacaattcctctttttttttattatttactattttttcatttctttccttaattttttttatttattcttagtggtgattttttttttttcctttttatttcattttttttttttttatcttttaatttccttattttattttt

SEQ ID NO: 41578 - DNA, 201 bp, Gossypium hirsutum
  unsure (1)..(201): unsure at all n locations; Clone ID: LIB3189-014-P1-K1-D9
tcccactcatccatgaaaattactattattttgttcctttttaatagaatcccattcttccaaatagaaattttttcacaaaaatatagaaaactccncttcncttcctcttcctttttttttttttcttttttttccttacctttatttaactttttctacattctttatatcattattccattcctttttcattttttt

SEQ ID NO: 41579 - DNA, 383 bp, Gossypium hirsutum
  Clone ID: LIB3189-014-P1-K1-E1
cttcactctcccaccccgaccgcttgattttgatcagacggtaatcatgccgatcagaaacataggcgttggccggcctgaagaagctactcatccagatgctcttaaagcagctttagctgagttcatatcaacgttaatcttcgtttttgctggatctggttcaggcatggcttttaataagctgaccgacggcggtgcaacaactccggctggtctcgttgccgcctctctagctcacggatttgcgcttttcgtcgctgtctcagtcggtgctaacatctccggtggccatgtgaatcccgccgttacattcggtgctttcgttggcgggaacattactcttttacgtggtatcctttattggattgctcaactccttg

SEQ ID NO: 41580 - DNA, 185 bp, Gossypium hirsutum
  unsure (1)..(185): unsure at all n locations; Clone ID: LIB3189-014-P1-K1-E11
atcagtagctagcatctccgtcggttattttagtttttttcatgctgagaagctggtctccgattagtacggtttctaatggatagaagaaagctcctaancnnnttaagattgttatatcaaaaattcctgtatatttaattatcaatatgtaacaagttatgtagtttatttcttttttttta

SEQ ID NO: 41581 - DNA, 441 bp, Gossypium hirsutum
  Clone ID: LIB3189-014-P1-K1-E12
aaaaggctatcaataggctacacagaggctgagaaggttgttgcatcttcacttgcttgcttaactgattcgaagtcatcctttggatgtggggacccaaccaccaatttccagcagtgtccacttctgaatataacttactgtcctgcatcagaagctgacctgtctcatggaaagaacttaattgttgtggtctacaattctttgggatggaaaagagaggatgtcatacgttttcctgttgttaatgaagatgttactgttcatgattctgagggaagaaaaattgaatcacagcttgttccaatagttgatgcctatgtggacctaaggaagtattatgctagggcatatttaggtagcagcccaggtgatgtacctaagtattggattgcatttacggtatctgttccacctcttggcttcagcacttacaccatc

SEQ ID NO: 41582 - DNA, 135 bp, Gossypium hirsutum
  unsure (1)..(135): unsure at all n locations; Clone ID: LIB3189-014-P1-K1-E4
gaattcccccactccatttctgcaaaactagtgtttttttttcccgtcacattcttcancaataaganaatttttacatcagagatgtagatcctaaaagtnnaatgataatcacatcaaactgtcagctttatc

SEQ ID NO: 41583 - DNA, 358 bp, Gossypium hirsutum
  unsure (1)..(358): unsure at all n locations; Clone ID: LIB3189-014-P1-K1-E6
actattcctactacaattcttttcttcgatccttcttttcttgaagttggggtcttagctgctgctgtttatttttatgggtaaggtggtaataanagcccaacctatataatattattattattctaatggagtcttaatgatttttactgtgatgagaatatccatttcattacatgatcttaattgaatctatctacaattctttgggatggaaaagagaagatgtcatacgttttcctgttgttaatgaaaatgttactgttcatgattctgagggaagaaaaattgaatcacagcttgttccaatagttgatgcctatttggacctaatgaaatattatgctagggcatattt

SEQ ID NO: 41584 - DNA, 231 bp, Gossypium hirsutum
  Clone ID: LIB3189-014-P1-K1-E7
gcctggaagaatggcacctctgatagaacttctatttcttcatgtccctcgcttttgtgatacgaagaatcttttgggtcctagaagatgcaagattttggagagaagttcttcctttgcaaaattgtataacattagtaataacccttggcatgcttgagatgtctcttttttatttttatcactcttatttaaataacataattatccattcctgtattatttcatctt

SEQ ID NO: 41585 - DNA, 332 bp, Gossypium hirsutum
  Clone ID: LIB3189-014-P1-K1-E8
cccacgcgtacgccttctctgaaaactaattgatatcgtcggctgtctctcatttctgttactgatcggtcttccgccgacgggagcacccaaaatggtagctcaccgtctatcttctactaaacctgttcaagctctcaagccaacaaagaagatttctttagaggaagataccggtaaagcctccgacgcactgccgcttcccttgtacctaacgaatgccctgttcttcaccctcttcttctcggtggtttatttccttctttcccattggcgtgagaagatccgtacctacacacctttccatgtagtaaccttttcagagatcatcg

SEQ ID NO: 41586 - DNA, 351 bp, Gossypium hirsutum
  Clone ID: LIB3189-014-P1-K1-F1
gttaatgtttggcatggagattgggtgtttcggtcattcttcgctcttattcaaaaaggtacatgaatgtgtatattgaggatagcgaattaagagtcaaatggagatttacaggtttttatgggtccccgtatgcacaagacaggaatgattcgtgggatgttttgagaattttaaaagttgttggtaatatcccttggtttatttgtggggattttaatgaaataatgtatggatctgaaaaaaaaaagagagagagatacctagggatgaaaggagaatggatctatttcgaaaaactctggaagattgtcaaatgtctgatgtatgattattctggtagattgttca

SEQ ID NO: 41587 - DNA, 398 bp, Gossypium hirsutum
  Clone ID: LIB3189-014-P1-K1-F10
ctggtatctccaagagatggtcagactcgtgagcatgctttgcttgcttttacccttggtgtcgggcaaatgatttgctgttgcagcaagatggatgccactacccctaaatattcgaaggctaggtatgatgaaatcgtgaaggaagtctcttcctacttgaagaaggttggatacaaccctgacaagattccatttgttcccatttctggttttgagggtgataacatgattgagaggtctaccaacttggactggtacaagggccctacacttcttgaggctcttgaccagatcaatgagcccaagaggccttcatacaagcctttccgtctaccacttcatgatgtgtacaagattggtggtattggaactgtcccaattggtcgtgttgaaac

SEQ ID NO: 41588 - DNA, 52 bp, Gossypium hirsutum
  Clone ID: LIB3189-014-P1-K1-F11
atttgttctctccaattctttctacaaaataataattctagcaaagcatcac

SEQ ID NO: 41589 - DNA, 442 bp, Gossypium hirsutum
  Clone ID: LIB3189-014-P1-K1-F12
tcgtccacagcgttcgtttccttctctccactccaaacaagattgaagaaaacccttaaacctgttgggctttttttttcgtttgattggggacgaaataacaatgagggaaatccttcacgtgcaaggaggccaatgcgggaaccaaatcggatccaagttttgggaagtgatctgcgacgagcacggtgttgatcctaccggaaagtacaatggagatggatcatccgatatccaactggagcggatcgatgtgtattacaacgaggcttccggtggaaggtacgtccctcgtgcggttctcatggatcttgaacccggtaccatggatagtatcagatccggtcccattggccagatctttagacctgataatttcgtgtttggacaatccggtgccggaaacaactgggccaaaagtcattacactgaaggagctgag

SEQ ID NO: 41590 - DNA, 367 bp, Gossypium hirsutum
  Clone ID: LIB3189-014-P1-K1-F2
caaagccataaaacatgggttttcagaaagaaagaaatggggtataatagcttatacaaatctatgaagctatctatagattatgagctctttttttcactcttatattacatgttggtttccatagctttgattcttggctagctctttttacttgatttaacccatcatggtttaacaaagtgctttgaattgttcacttttttccaagatgaattttgaaactcgaccgagtctgtatacaagaaaccagattaagtgccacattcaccataccaaactttgtcacacaaccaatccctttcataaacagcgtcaaaatttcctaaggccttgaatctacacctttcttaagaaaacccatacc

SEQ ID NO: 41591 - DNA, 230 bp, Gossypium hirsutum
  unsure (1)..(230): unsure at all n locations; Clone ID: LIB3189-014-P1-K1-F3
tcccacgcgtccgctcaaacctctctcagctttttttattttcctcctttttttctatcaaaaacagaatgtcttctatccttactcgaagtgtcctcaaacttttcctcctcatctctttgtttcaaatctctntggccggtaggaagctcatcgaagtggtgcaagaccagtcttatctcttgacataccacaatgttccccttctttctagcaaaattactattaat

SEQ ID NO: 41592 - DNA, 334 bp, Gossypium hirsutum
  Clone ID: LIB3189-014-P1-K1-F5
aaaaaaaaaaaaaaaaaaaaaaaaaaaaaaaaaatttttttataaaaaaaaaaaaaaaaaaaaaaaaagaaaatttttaaaaaaaaaaaaaagaaaaaaaaaaaaaaaaaaaagggcccccccttttaaaaaatccaaccttacttccccttccttccaacttaataccttttctatttgttcaccaaaatcaaattaactgcccctctttttacaacccttttactggaaaaaccctgcctttcccaaatttattcccttttaaaaatatcccctttttcccatttttcttattatcaaaaatccccccaccttttgccctttctaacattta

SEQ ID NO: 41593 - DNA, 422 bp, Gossypium hirsutum
  Clone ID: LIB3189-014-P1-K1-F6
gcacgttggtgctgttcaacctggtgaacgtgtttttgtaattgatgatttggttgcaacggaagaaactctgtcaggtgccatgagagtcttagaacgcgttggtgctcaagtggtcgagtgtgcatgtgttattggactccgcgaggtcaaggggcaacgtagacttaatggaaagccactttatattcttgtggagccacgtgagatagatggatgttattaagagaaaagtgattcatgagcaacctttgttggtttacgtttcttggccaatgtcatttggtttcctttttggctttttttggatgaggcttttttcttatttagaagtcttttattatttttttaacacttatttttattttttttcttttatttttttttttttttaattttaatatatttaattatttatcatt

SEQ ID NO: 41594 - DNA, 378 bp, Gossypium hirsutum
  Clone ID: LIB3189-014-P1-K1-F7
tctgacgcgtggctaaaaaaactaaaaaacattttttttaaaaaaaaaaaaaaaaaaaaaaaaaaaaaattttttttaaaaataaggagggtattattattacacttttattctcatctatttttccccttcatttatttttctttctctatttttttatacagttatctcttatttttttttctccttctttactttatttccccttccctactttcccttttttctttttcaattatttcttcttttttcctttcttttttctcttatctactctttttccttcttctttttttttttttcttttcttaattttgttgcttgtttctctttttttttattctcttttttttttcctttttttttttttttttcttt

SEQ ID NO: 41595 - DNA, 302 bp, Gossypium hirsutum
  Clone ID: LIB3189-014-P1-K1-F8
cccacgcgtccggaaaaagttcagcttcagttatgtcgtgttgaagaagaaactaaacgggtggctgtgattcgtgaggagggggaagcacttgcagatcctatgaggaaggaagttgctcaggtgaggaagaagattgatgcagttaacaaagaattgaagccgttaggtatctcttgccagaaaaaggaaagggagttcaaggtagcccttgatgcattcaatgaaatgaacaaggaaaaagttcatctaatcactaatttaattgttctggtgagtgaatagcgtattgtttttgattt

SEQ ID NO: 41596 - DNA, 150 bp, Gossypium hirsutum
  Clone ID: LIB3189-014-P1-K1-F9
gagagacagaatcatccctgcatttttgaaacttttccaaaaacccgtaaactctctcagatgactgttttctttaactaacaagaactactctctatactttcataaaagggtgtgcatcacgtctggactctttgtgcttatccaaca

SEQ ID NO: 41597 - DNA, 399 bp, Gossypium hirsutum
  unsure (1)..(399): unsure at all n locations; Clone ID: LIB3189-014-P1-K1-G1
cctctattctctttgctttattgattgccattgttctctcatccctgggtcgtcttcacttttattaatttccatatctagagtgaatagaaaataaaagagaaaagacattgttgtatcaatattagtttagtaagtgagtaagagactgatcttcctttctcttcttacagccatcattttcctaatttccaagggagacattgagtcaacacacactttgccttgttcctctccttttctttttgttttctcttctttcccagttgaccctagacttatgagaacaataggatgggagataattcaaagtctaggtggttctattgttgactctnntatttttttcatttagccttcccatcatcaatccaaatctgccttactctctgatagata

SEQ ID NO: 41598 - DNA, 382 bp, Gossypium hirsutum
  Clone ID: LIB3189-014-P1-K1-G10
cacaaaaacaaaagaaaaattacagtgaaaatggcaacccttaaagttccagctcatgtacctgccccttctgaggatgctgagcaacttcgtaaagcttttgaaggatggggtacaaatgagcaattgattatcgacattttggctcacaggaatgcagctcagcgcaatttgattcgtaaaacttatcgtgaagcttatggggaagatctccttaagtctttggatgaggaactttcaagtgactttgagcgagctgtggtgctgtttactttggaccctgcagagcgtgatgcatttctggctcatgaagctacaaagaggttcacatcaagccattgggttctcatggaaattgcttgcactaggtcttcacatgaac

SEQ ID NO: 41599 - DNA, 442 bp, Gossypium hirsutum
  Clone ID: LIB3189-014-P1-K1-G11
gtggaaacaagccgactgcaaaacgctgcagctgaagccctaacttttccgctcacctctgtgcgaccagccgctcctctattcggatcttccatggctacgataccagttaacccaaaacccttcttgaacaatttgactggaaagactgttatagtgaagctcaaatgggggatggaatacaaaggttttcttgcatctgttgattcatacatgaacttgcagcttggcaatgctgaagagtatgttgatgggcaattcactggaaatttaggggagattttgatcagatgcaataatgttctctatcttcgtggggttccggaagatgaagatatagaagatgctgacaaggactagatggttcacatgtggttgaaatagaacctttggtatttgattagaggtgctgtaacttttgtttatcatggttggatgtcat

SEQ ID NO: 41600 - DNA, 433 bp, Gossypium hirsutum
  Clone ID: LIB3189-014-P1-K1-G12
caatattcaagacattttcagctcgttttttgacggagggtcggtagaagaggaagagagaatggtgaagggcgatgatgtaagtgttgaattggatgcaacactagaagatttgtacatgggaggtactcttaaggtttggagggagaaaaacatcttaaaaccagctccaggtaaacgccgctgtaactgcagaaatgaggtctatcataagcaaattggtccagggatgttccaacagatgactgaacaggtttgcgagcagtgccaaaatgtgaaatatgaacgagagggatactttgtcacagttgatattgagaaaggaatgcaagatggacaagaggtggtcttttatgaagatggtgagcctattatagatggagaacctggagatttgaagttccggattcatacagcaccccatgaccgattc

SEQ ID NO: 41601 - DNA, 368 bp, Gossypium hirsutum
  Clone ID: LIB3189-014-P1-K1-G2
atcaaagcttcaaaatggcatttgtcaaggctcagaaaaccaaagcttactttaagcggtttcaggtgccatacaaaagaaggagagagggaaagactgactaccgggctaggattcgcctaatcaatcaagacaagaataagtacaacactccgaagtaccgattcgttgtccgatttagcaacaaagatgtcaccgcacaaatagtttctgctaatattgctggtgatatggttcttgcttctgcttactcacatgagcttccacgatatgggcttgaagtgggtcttacaaactatgccgcaacttattgcactggtttgctgttggggcgccgtgtgcttaagatgcttgaaatggatgaagag

SEQ ID NO: 41602 - DNA, 359 bp, Gossypium hirsutum
  Clone ID: LIB3189-014-P1-K1-G3
cggacgcgtgggttcgtaatctcccaaatatctttcctttgtctcatcgaatatgatgcaacagcgagcatctggtggcgtggctgcggcaccttccatggcggctgatcagtctcaggctcatcagtaccagcaacaaccgcagtcgcagccttggatgatgatgtctcaacaacagcagggtggtcagccggttcctccacctaccggttggacgccgcaacctgttcctccgcccactcagatgcagcagtactccgccggttctgctgctgctggctccggtgagattcgatctctttggatcggagatcctcagcccgggatggatgagaattacctcatcaatatctttgctc

SEQ ID NO: 41603 - DNA, 424 bp, Gossypium hirsutum
  Clone ID: LIB3189-014-P1-K1-G4
ctcattttaactataaatactcgtttctcttgccattttcgtttccccctagaaaaaacagatggcgaaactgaaatctctaagtctggtattcttttcccatctctttctggtttcctcttccgccgccgtattccctgtcttagacgacctacgttttgccgggtcgagttttccgtcggtgcaagcaaagaaattgataagggagttgaatttgtttcctaaagaggaagttaacctggtcgatcgaggccgagtttcgttaccccaggattcgaagctggtggaaaagcggttcaagttccccggtttggaagcccttggtggggtttctgttgaccgattgagtcatcatgctggctattacaagcttcctaattcttatgatgccagaatgttctatttcttctttgaatcacgcagt

SEQ ID NO: 41604 - DNA, 349 bp, Gossypium hirsutum
  Clone ID: LIB3189-014-P1-K1-G5
gggaaatcggcttctgctgcccatcattatcatactatccaaaaggccgagctccggttacatgatgacgaggccgaatacgaggcggatatgatctggtaaagaatccacgtgcgataccgttcgtttcagataagttcagattccctcctgttgcaatctatcgatgatttttggcttgtttcgttgtattcatgtcttatcagtagtttcctgttagatattcgaaaaggaacatgaaaaacacgaacactaacacgattgtcaaagatctctgtttcatgttctggccctgtactagcaaacatagtttatcgatcaagttatccatttgctttttatccttgtt

SEQ ID NO: 41605 - DNA, 438 bp, Gossypium hirsutum
  Clone ID: LIB3189-014-P1-K1-G6
ctctcatttaccgccatcaatggctaactctcttctctcttctaacttctttggtactcaactggggctgtctcctccaacaccagaagactacaagaaagttgcaggttactcaatccatcctcaacaagaaacccaactctagccacagtgttaaaaccctccaatctcatgccactattgctgccttactcttctcttccgtagccccacaagcactcgccgttgacaacgccccacccactcccccacctgtaattgaagcccagcctacgaagccaagcccatcgaaccagtcgcccttctcccaaaacctgctcttaactgctcccaagcctcaatctcaatcctccgatcttccggagggcagccaatggaagttcagcgaattcttgaacgcattcaagaaggggaaagtggagagagtcaagttcaaca

SEQ ID NO: 41606 - DNA, 155 bp, Gossypium hirsutum
  unsure (1)..(155): unsure at all n locations; Clone ID: LIB3189-014-P1-K1-G7
ctctnctaacttctantttactcaaagaatattntttaatacaaaaaaaaaaactacaatttcctttcattttactcattccatccttaacaagaaacccaactttatcctacaatttaaaactctccaatcttattccactattgtttccttac

SEQ ID NO: 41607 - DNA, 282 bp, Gossypium hirsutum
  unsure (1)..(282): unsure at all n locations; Clone ID: LIB3189-014-P1-K1-G8
aactaaactatcggtatacgaaaatggtatttttagaatcaaagggggttactacanaantacacatatttaacaaacttaactaccttaactaatcatgcatcatcacccacccgaccaaaacccacaaaagccataaaacctgaaaaaagaaaaagagacaaatacaaaatgcctagacaaaatcacaagtttcaaaaaaatttaacaaaataaaaataaaaattactgatcaagaacattaatcccagttcattaactcactttatggttgcaaaccca

SEQ ID NO: 41608 - DNA, 384 bp, Gossypium hirsutum
  Clone ID: LIB3189-014-P1-K1-G9
cccacgcgtccgcgcgttttcttcattttctcatatctgtgttatagtagaaaaaaactggtggtgatcaatgactttggctaagggcgaagctcatcaagtgactaacaatggcgatttaagcaaacccttcaaaatctttgtcggttacgatccgcgtgaagatttagcctataaggtctgccgccattctatcttgaaacgttcatcggttcctgtcgagatcactcccattgttcaatcagatctccgggaaaaaggcctttactggcgcgagcggaacaagctcgagagtaccgaattcttgttttcccggttcctgactccctacttggcgaattatgatggttgggcgcttgttatcgactgggattttcctttact

SEQ ID NO: 41609 - DNA, 297 bp, Gossypium hirsutum
  Clone ID: LIB3189-014-P1-K1-H1
ctaagtgcaatatcaatcaactgtagaaacatagtttgtattggatcatgtccagcaaaacggaagatggtttacgtagtcagaaaatggagttcagagacggccaaaaggcaaaggggagactagaaggaatgggattgaacattgtggatccacagctatctgtaaagtgacatactacgacctgagttacattcttactgacggagctaaacaacagcgaagaacagtgagtaatcaacagccgagcatctgaagtggagaacgacaagaagaaaggtatgaatggcacagtaa

SEQ ID NO: 41610 - DNA, 331 bp, Gossypium hirsutum
  Clone ID: LIB3189-014-P1-K1-H10
gcgtgcgcagagctttcttcgacgagcagccatttgtaatctatcatgggtcattctaacgtctggaactctcgccccaaaacctacgggcctgggtctcgcgcatgccgagtgtgtggaaaccctcatgccatcatcaggaagtacgggctcatgtgttgcagacagtgcttccgtagcaatgccaaggaaattggattcattaagtaccgctgaggaatgtgtatatggctcgaagttggaaacactttttagctagcatgaacctgtgcttcgaaattgtagcaacatttaacataacattagcgttttctcataatgtaagtgtaaa

SEQ ID NO: 41611 - DNA, 429 bp, Gossypium hirsutum
  Clone ID: LIB3189-014-P1-K1-H11
atctactaccagattccacccctccccctacttttttcttctattattataattaagaccaaatggatttgggcgactctctataatgatattttttctatttaccatagattttctgaagggcctatatgatttatttttcgtcgttttgcttgttttcttctccaagccgaaacgtggcggtggactgactggaaagtgcaaacatattcaacaatctactgaatctgcgcttttggatttgcaactcctttttcttttttttaattacaccaatagttactcaattttggatagttaataaaataatcactcaaaattcaatttagtcactcaactttcgtaatataacaaaacatgcgccactattccattttcgtttgacacaacaaatctaccggttttcgttgatctacattttccattctc

SEQ ID NO: 41612 - DNA, 411 bp, Gossypium hirsutum
  Clone ID: LIB3189-014-P1-K1-H12
cccacgcgtccgcattgcactgctctttctttctatagaattagtcactcctgttctagatgaaggttctctccccaattcttgcttgcctagcgcttgctgtggtggtaagccatgctgctctctcacctgagcaatattggagctataagctgccaaatactccaatgccaaaggctgtcaaagaaattctacatccagaactgatggaggagaaaagcacctctgtaaatgtaggaggtggtggtgtaaacgtcaatacaggaaaagggaagcctgggggtgacacccatgtgaacgttggaggcaaaggagttggagtgaacacgggaaagccagggggtggcactcatgtgaatgttggagacccttttaattacctatatgcagccagtgaaactcaaatccatg

SEQ ID NO: 41613 - DNA, 185 bp, Gossypium hirsutum
  Clone ID: LIB3189-014-P1-K1-H2
cccacgcgtccgggcttatctttctgatcaggattttttacaaactaaattggcacgggaagcagatgaaagggcaagccaaaatatatttaaagctaggtaacctatttatttgacaagatggaagaatgtttggggattgttttgcttgaagcgttgctaaatggttcgtcagttctttattt

SEQ ID NO: 41614 - DNA, 266 bp, Gossypium hirsutum
  unsure (1)..(266): unsure at all n locations; Clone ID: LIB3189-014-P1-K1-H3
gccgccctttttttttttttttttttttttttttnnnntttnagccngntttatgtaggatttttaaaggtggagaggctttggtttgccaaggcttttttttnaagttttttgtgtgattttgtggaactattctttttttttttttaatattattgtttgtttttttttatttattaaattttttttttttttattattatttttatgttttaattttttttttattttatatttttttttatattttttaattttaaattttt

SEQ ID NO: 41615 - DNA, 356 bp, Gossypium hirsutum
  Clone ID: LIB3189-014-P1-K1-H4
caatattcaagacattttcagctcgttttttgtctgagaggtcattctgacgaggaagagagaagggcccaaaacctacaggcctgggtctcactcattccaacactataagatccgtacatcggaggtactcttaaagtttggagggagaaaaacatcttaaaaccagctccaggtaaacgccgctgtaactgcagaaatgaggtctatcataagcaaattggtccagggatgttccaacagatgactgaacaggtttgcgagcagtgccaaaatgtgaaatatgaacgagagggatactttgtcacagttgatattgagaaaggaatgcaagatggacaagaggtggtctttta

SEQ ID NO: 41616 - DNA, 242 bp, Gossypium hirsutum
  Clone ID: LIB3189-014-P1-K1-H5
ggggaaatatttgtgttaattataggttatttattttttttatggtttgttaataattaatatttttttttattattatattatttttttttgtttttttttttaattattatttattttttttttttttgattatttaggttatttattttttttttttttgttgttgtttttttttattttattatttgttttttttatatgggttgtttttttttttttgttttatttttatttaattt

SEQ ID NO: 41617 - DNA, 208 bp, Gossypium hirsutum
  Clone ID: LIB3189-014-P1-K1-H6
atccatttaaaccacccaaggttgcattcttttcttaggtatttcaccctaatattaacagcaacggtagcatttgccttgatattttaaaggaacagtggagccctgccctcaccatatccaaggtgttgctgtcaatctgttcactcctgacggatccaaatcctgatgacctttaggtgccggagattgttcacatgttctatga

SEQ ID NO: 41618 - DNA, 369 bp, Gossypium hirsutum
  Clone ID: LIB3189-014-P1-K1-H8
ggaaataaaatctctgaaagggaaaaaaaaactcttaatcaacagatcgaagtgaaaatggagtgcgtgttcggtttagtgggcaacgactttgccatagtggcggcggacacgtcggctgttcacagcatccttgttcacaaatctaacgaagataagatcatgatcctcgattctcacaaactcatcgccgccagcggtgaatccggcgacagagtgcagttcacggagtttgtacagtaaaatgtggccttgtatcatttccttaacagttttcctttgacaactgccgcctccgtttatttcactcgttgagatgctggccctgccctattgttgaatccttactttttggtcattcttttttgc

SEQ ID NO: 41619 - DNA, 380 bp, Gossypium hirsutum
  Clone ID: LIB3189-014-P1-K1-H9
cctctgtgccgtgtcttgcgggtttcacttctctgctagcaaaggatctgcaagatggaaagcatgaatagcttttggcagttaggagatgatctccggggacaatctaaagcctcagaggatcacaaatggttgatggttgcctccaaactggctgaacagacgaggataaagggtgagcgaatgaacaatctcgatctttcaaagggtccagctgaagtaaggacaagggataaatttgggttccatgaagacaacaaattcgagaaccttaacttcaatatgttgaacttggactccaagatcggagatagtgtaagcaaaagtaccttccgaaatggtatttacaacaccgatgctgtttaccagaaaaattacag

SEQ ID NO: 41620 - DNA, 360 bp, Gossypium hirsutum
  Clone ID: LIB3189-015-P1-K1-E12
gaaaatcaaaagcagccatcatctttagatcagatacacaaaaaagggctttgacggttggtggagaagaaattaaaaggtaaaggggaagaaaagagctgctgttttttgactaagattgtgattgtcaaaattgatgctgaggatcaaactgggttaattcattcatggagatttgcttaatctattctgtttttggttaacgagtgattttgcttgatcgagtgattgtttgctgttagaagacgaatgtgttactagtattatcaacgaattctatcgaaaatcgagtgctttattgacaagcaggggtcggtttaaatgcaaacgtcttagaaacaccaaacttgggtcaatatt

SEQ ID NO: 41621 - DNA, 211 bp, Gossypium hirsutum
  Clone ID: LIB3189-015-P1-K1-E6
gcagactcttggctccccgaaccttctcctcaagtacaatatctctcctctttcaagcgtattctgtgcaagtctgtgaccttttgagtgtttctgatatatgaatatgctgaaaatgaatttctcgaaagcaccttttcatattctatatatctttgatgatcgctccgattattgatttgctaatgatgttgattggcactctttgatt

SEQ ID NO: 41622 - DNA, 315 bp, Gossypium hirsutum
  Clone ID: LIB3189-015-P1-K1-F10
ccgatcttgacatcagatacatgattaaaatctgtaagatgcttggtttggcagctcttgtagaggtgcatgatgagagggaaatggaccgcgttcttggtatagaggggattgaacttattggtatcaataatcgtaaccttgaaacatttgaggtagatatcagtaacacaaagaagcttcttgaaggagagcgtggccagatgattcgcaagaaagatataattgttgttggagaatcggggctttttactcctgatgatgttgcttatgtccaagaagccggtgttaaagcattttttgttgttgagtgga

SEQ ID NO: 41623 - DNA, 236 bp, Gossypium hirsutum
  Clone ID: LIB3189-015-P1-K1-F11
gccacgcgtccgaatagtactactactccaagcatgtttttccttacacgtttgtttttcttggattaatcgatatggctagctcaatgtcccttaaacttgcatgtgtggtggtgttggcatggtagtgggtgcacccctggctcaagggggcgtaacctgtggtcatgtcacaaactccttcgcaccctgcattaattacttgagaggcggtggagcttgttcctttcctccat

SEQ ID NO: 41624 - DNA, 457 bp, Gossypium hirsutum
  Clone ID: LIB3189-015-P1-K1-F12
gccctgctgacgatctctatgctaatgctattatgaactgccatcctgagggtcctctatatgcgtggatgatcaaagatgatgccgcgctaattcctaaggtcagcatcttactcgcattaatgtcattattgtctatgcacctacattgttcaacacaataggtttcggtgactactctttcctcatgtacacaaagatcaccggtatagagaacgtacgtacaacattggtttcaatctaatagtatcataagacagtaatggacctttcttatataaaataatttatcactttttttttttttcattagtttttttaaattttttttttatttattttttttttttatatattcctattttttttcatttttattttttttttatctatttatttattctttttctttttaatttaattatttttttttttatttgttttattattttttatt

SEQ ID NO: 41625 - DNA, 72 bp, Gossypium hirsutum
  Clone ID: LIB3189-015-P1-K1-F4
cttccggcccttttgatgatatctatgctaatgctattatttattctttgaatcctgagggtaccttcttat

SEQ ID NO: 41626 - DNA, 360 bp, Gossypium hirsutum
  unsure (1)..(360): unsure at all n locations; Clone ID: LIB3189-015-P1-K1-F5
gatcnttcctaatcgcctaataataaaatttgtcctatttaccaccctgttgcgggtattccatttaattctanagcttcatggttgaaaccttctttaactccgtcctttctaccacttccactctctaggctccatctctcttaataacctaaaataccatcttttcactcttatcatatccttatttttaattactaatcttccatataaacctaattcttttttctttttactatttttctccttatacttctatttttattacctataatattttttaaatcttttatcatctagctttttctcttttttaatctatattttcttcaaatattttattttttttcattatttatt

SEQ ID NO: 41627 - DNA, 395 bp, Gossypium hirsutum
  Clone ID: LIB3189-015-P1-K1-F6
tgcaaagataactgaaggatcaactccaaatgatttacccggcagcaaggccatagatgcaatagtgtgggcaacagcggtttggatttgatggctgaagttcagagtgtttctatttccagtcaaaacagcgaatccagtgaaagtagagcaccagacaatttgaatttcactactgcttcgaacaagaaagtcccgaaatttgaagcggcagccgctgaagccaaattggatatgcttcttaattctttcaatgagactaaacttctcgatacttccaacttaagttccgaaaaaccctcgagcatcggttcactcaaagctttcaatttagacagtttgctggatgatttattacaagaaacattaacaacagtaaaccgaggtatagattt

SEQ ID NO: 41628 - DNA, 465 bp, Gossypium hirsutum
  Clone ID: LIB3189-015-P1-K1-G10
gacccacgcgtccgcttgtcttcagaagaccttatgattaaagaatctgctgaatgggccaagttggccattagtcgtgccatttctgtttgagggtgttgccattcagcatgtttatttcttttcgaagtccatgcatttgggaatgtctagggtcttgggttgcatgtgtcgtgtcatcaccattgtcagacaacagaagttaccagtctttatgttgtcactaacatttgcatcagcatcatggggtcagattccattttttttaatcatgaaggaactggatacagacaattttagtagaacttaacttactcctgtataaagagaatctcttttgttctcgcatgtgcggtttatgtggtggtgttttttttgacgttcttcttattgttgttttatgtattatatttattttctatttatttgtctttatgtttttcttttatttttttttaattcttt

SEQ ID NO: 41629 - DNA, 262 bp, Gossypium hirsutum
  Clone ID: LIB3189-015-P1-K1-G11
ggaggacagttcctttggttttgagagaaaagagttgatcttggcttctctccttcgttcgagtgggcttaattatagcccgcgtgggtctcagacgtgaaaaatggggctggctttcacaaagctatttagccggcttttcgccaagaaggagatgcgtatactcatggttgggcttgatgctgcgggtaaaactaccattctttacaagcttaagttgggagagattgttactaccattcccaccattggttttaattgt

SEQ ID NO: 41630 - DNA, 471 bp, Gossypium hirsutum
  Clone ID: LIB3189-015-P1-K1-G12
ccgattccctaatccgtgttttccccttctctgcttttccgttttttgccctcgtcctcagcctgcttcatcaatttcccttccagctcagttcagattctccgacgcctccttgcaaagacacctttttcatcgcaatcttggccgattttgcattcacccggttgttggtcatcgatctcttccccgatttccctggttacaggttagttttcctccccaagtaaaactcctctgcgatttgtgaagagaaacttgaggggacgaatctgctctcccttgctattcctacttaactgctttcgatctgttgtttttgttcattggcatgctaatgagctttatgattgcttagttggtgtttggtatacttaatctgctcaaattccaaacaatggagattttgcgtaattttagttgttgttgcgtcttggtctgcttggtttggttatatattgttgttagtaatgc

SEQ ID NO: 41631 - DNA, 153 bp, Gossypium hirsutum
  Clone ID: LIB3189-015-P1-K1-G4
ttttgtgggcatacaaactggaatccactgatacattgttgtcatataaaaaccaaagcaaaatgaagaggaaaacaataacgattctcaaaattcttcattcaaaggaaataaagggtgaggaagcacaattgggtgaaaatctacctgaca

SEQ ID NO: 41632 - DNA, 402 bp, Gossypium hirsutum
  Clone ID: LIB3189-015-P1-K1-G5
ttctcgcttctgattcaaatcagatcttaagaaaaccgtgaaccgcatcgatctgatctgcaaaatgactagggatttcgtagggcaaagaatataaacgaaagaagaaatggcgggggcagcatctgcactatttcttctagatataaagggccgtgttctggtgtggcgtgactaccgtggcgacgtctctgctgctcaagctgaacgcttcttcaccaaactcatcgaaaaagagggagatccgcagtcgcaagatccagtggtgtatgataatggagttacgtacatgtttatacaacacagcaacgtgtacttgatgactgcaacaaggcagaattgctatgctgccagtcttcttttcttcctttaccgtgtagttgatgttttttagctttattt

SEQ ID NO: 41633 - DNA, 473 bp, Gossypium hirsutum
  unsure (1)..(473): unsure at all n locations; Clone ID: LIB3189-015-P1-K1-G6
cgtcgcttcgccatggcatccgagaagaagctgtcgaacccaatgagggaaattaaagttcaaaagcttgtcctcaatatctccgttggtgaaagtggtgatcgtctcacccgtgctgccaaggttttggaacaactcagtggtcaaacccctgtcttctccaaagctaggtacactgtgagatctttcggaatcaggcgtaatgagaagattgcttgctacgtgacagtgaggggagagaaggctatgcagcttcttgagagcggtttgaaggtcaaggaatatgagcttttgaggaggaacttcagtgatactggctgctttggattcggcatccaggagcacatagatcttggaatcaagtatgacccttcaacccggtatctacggtatggatttctatgttgttcttgaacgagctgngtaccgtgttggccgtcgtcgcagatgcaagtcacgtgttggtattcagc

SEQ ID NO: 41634 - DNA, 382 bp, Gossypium hirsutum
  Clone ID: LIB3189-015-P1-K1-H11
ccaagctctctctatccccgtctatacacctatattattaccctctctacactctcttccatcggttcccctacccagtacttgagagatatgggtctctcaagctcctttccttcatggattttttcttctgtattctgagctaagcaaagacaagaagatggcaatacagcaatatgaacagcagcaacaacaacaagagaatcacccttccttcttgctagatgctctctactgtgaggaagaagcggatgcaggggaagttttagaggaagagagttcttgtgtgggctgtaacaatggcggaaacccttcatttttcccactgttgttgttagagcaggatttgttttgggaagaccgggagctttatttacttttt

SEQ ID NO: 41635 - DNA, 169 bp, Gossypium hirsutum
  unsure (1)..(169): unsure at all n locations; Clone ID: LIB3189-015-P1-K1-H4
caacaaaccatttcacaggaagtattccagctagcattgcttcatgtgagaaattgtcactttgaatgtaangaataaccgattgaccggagatattccggaatcgattgctatgatgcctactttggctgttgtcgatttgtctaacaactttctaacaggtgctata

SEQ ID NO: 41636 - DNA, 302 bp, Gossypium hirsutum
  unsure (1)..(302): unsure at all n locations; Clone ID: LIB3189-015-P1-K1-H5
cccacccgtccgcaaccctcttcctttcccttacttgcacagagacagaaatccaaggagtttgggggcaaaaccctaacccccagagcagtcaccccagtaagctatctatcgtctctcaatcatccttattatcagtcatggctgctgcagctccagagggttctcaanttgatgctcgccagtatgatgctaaaatggatgaacttgaagctgtggggcaagatttctttacctcatataataaggtttattaccacttttgatgttatgggaatgcaagaaaatctttttaagggcat

SEQ ID NO: 41637 - DNA, 373 bp, Gossypium hirsutum
  Clone ID: LIB3189-015-P1-K1-H6
ctgcctcgaccgacgcgtccgttttgattttgacaagtttttgaagtgagttgtgttattcattcaattgaattgagccccctggtggtggcgacaaagcaaatttattgtggaaaacaaaatttgatgttagattgagtaggataaggagatttgtgcttgtgaaaattcagtgctcaagtgaaaacagtttgtgaagaaatcatagtactataagaaggatgaggggaagatctgatggaagccaaaagaagagattaatcacctgtgtttttgcctttgtcattctttcttggttttattatagtatttttaaggatctttttatataaaattttataataatatgtccttttattatcttaatttattt

SEQ ID NO: 41638 - DNA, 413 bp, Gossypium hirsutum
  Clone ID: LIB3189-016-P1-K1-A1
atcactcgtcctggtattaacggtacagcgtttcgattttcatagagaaacctcgaaacttctacgtagtgagaggaaagtttgagtacgtgcgatggctcgctcgtggagagcaagcggctctttggtggctctagctatagtcttgtccggatgcttctttgcaatctcaattgccaaggaggaagccgcgaaattgggaacagtcatcggaattgatcttggtacaacttattcttgtgttggtgtgtacaaaaacggtcatgttgaaattatagccaatgaccaaggtaaccgtattactccatcgtgggtggctttcactgacagcgagaggctcatcggtgaggctgcaaagaatcaagcagctgttaacgctgaaagaaccatctttgacgtcaagagacttattg

SEQ ID NO: 41639 - DNA, 420 bp, Gossypium hirsutum
  Clone ID: LIB3189-016-P1-K1-A10
agcattgttgcctgagttcaccccaaatcccgttctggagcgtttttatcgtcatctagagttgaaagcaaagcagccagatgcagctgtacctccacttgatgaaactctaaagaatatcgttgaaccagacccggagcttgttgctgaaaacaagtctgtttttgatgcattacatagacactttgaactcaggcaaaatcctaagctgaagaaatcatccaggcagtggtatcaagagaaacaatcaggatcaaatgcacatgtatccagtggtcaggctgtcaatttcattgaaaatcaaccaccagttaagattgagaaaattggagatttaactcctgtccaagattttgaagccatgatgtctcaaaaagataacccagaatgggttgggaaagccatcaaggaattaagaga

SEQ ID NO: 41640 - DNA, 341 bp, Gossypium hirsutum
  Clone ID: LIB3189-016-P1-K1-A2
aaaacgctgaaaagagttgagggtaaactctcttttagcgccgaggcgtctccgtcattgggttgcctccgcgcctacgcgtcgacgcgccaccaccaacgccacccagtgcggtggccagaactcgaaaagtctcgactttctgatgtgattctaacgatctctcgcgagaaatccggtgatggaagagtcgctagcgttgatggaggcctgaagtctggtggtggtgtcgatgaggcgctgattagggaggcagagccttgagtgatggctttgattggggagctggacagaagcttcccaaaccgttcagaacttgctgaggcgcggggggtaagaga

SEQ ID NO: 41641 - DNA, 96 bp, Gossypium hirsutum
  Clone ID: LIB3189-016-P1-K1-A3
cgtacgcgtgggtcctagatcgcgagcggacaacctttgtgtttttttattactttaacaagtgagggggaatcttaacgactaaacaaggggaca

SEQ ID NO: 41642 - DNA, 420 bp, Gossypium hirsutum
  unsure (1)..(420): unsure at all n locations; Clone ID: LIB3189-016-P1-K1-A4
cccacgcgtncgtccacgcgtncgctttttttttcttttcgactttcggctactgagtcaccaaacgagttaaggaaaagagagacaagtttcaccaaaccatggggtcgatccccgatcctggcgagttgaccgagttaacccagccgagtttcgatgagttccagcgtcaaacgtctctgatgacgagctgtactctcctctggaaagaactgtcggatcacataaattcacttgagcagaacctgataaagcagtcggagaccttgaaacgcaaaatcgaggcactggactcggagaccaaggcttcactcgactcactcaagaagcgggaactcagtatcgaggacagtgtcaagatcgcactcagccgagtcgagttcaacaccaaagctgccatgaggacccttggcgatgacg

SEQ ID NO: 41643 - DNA, 366 bp, Gossypium hirsutum
  unsure (1)..(366): unsure at all n locations; Clone ID: LIB3189-016-P1-K1-A5
cttagacatgcagctggagaagcacctgagccgagtttggtctaggaacattgagaaacaaaggccagctgaggaatgggagattgatttggctaagttggatttaaggaatgttatagctcatggcacctatgggactgtttatcgtgccacttatgataatcaaaatgttgcaggaacctgagccagatgaggaagtagaaaatgaagcagatgaaaggctgttgttgagttcatggctgatctcgttgccaagagggataccaaggcaacaccaccaaagaaggagaaaggttgttggttcaggttttgctcgatntgttagccgctccggtctccaaatacgttccacaagatgtgtctcgt

SEQ ID NO: 41644 - DNA, 458 bp, Gossypium hirsutum
  Clone ID: LIB3189-016-P1-K1-A6
gtttgaaactcaattcgaatttggttcgttttgaatttattgattttgaaatccaatcatatcaggtttagatagattatttgattgaattatatttaattagaattttattgagatataaaaataaataatatttaaatacaaaagagatattatgtttagttttgttttttgtgatttcctctggtatttatttattttcttatattctctttccgactggtcttgcagtggctggctggctggcaggctttcatgccagcaactatgcgacttcctgtctcacccacccaccctcccttcttccccttgtctcttccaaattcagtccttaaagggcatatttgaaaattgcattatttttttggttgttcagtgttgcatgggatatatcgtcctcggtatcactaaagaatagctattacaggagggctctagatagggaagaaatggccttt

SEQ ID NO: 41645 - DNA, 411 bp, Gossypium hirsutum
  unsure (1)..(411): unsure at all n locations; Clone ID: LIB3189-016-P1-K1-A7
cccacgcgtccgccggaaggcgtnttgatacacgcccccatttattttatttttcaaacaaattttcccttcaattgtcgtataatttcctaggaaaagaaatatgagagagtgcatttcagttcacatcggtcaggccggtattcaggtcggaaatgcttgctgggaactttactgtctcgagcatggcattcagcctgatggccaaatgccaagtgataagactgttggtggaggagacgatgctttcaacacctttttcagcgaaactggtgccgggaagcacgtccctcgcgccatctttgttgatctggagcctactgttatcgatgaagtgaggactggtacctaccgccagttattccaccctgagcaactcatcagtggcaaagaaagatgctggcaacaatt

SEQ ID NO: 41646 - DNA, 439 bp, Gossypium hirsutum
  Clone ID: LIB3189-016-P1-K1-A8
gcgctttctacccccattatttccggaacaagccaagggagtggagagtacttttcccgggtcggagtcggtaaaccggctaaacaattctacatggttcttgatactggaagtgatatcaactggattcagtgtgagccctgtaacgaatgttaccaacaatccgaccccatatttaacccatccgggtcctccacttacagcccggttacttgcgaatcaaaacagtgctcttctcttgaagtttccgcttgccgtagcgggaaatgcctataccaagtctcgtacggtgatggatcttacacggtgggtgatttcgttaccgagacagtgtcgtttggaaactccggtaacatgaatggagtggctttgggttggggccatgattatgaaggctgtttgttggagcggggggtttgtttggactcggggtggaccc

SEQ ID NO: 41647 - DNA, 446 bp, Gossypium hirsutum
  Clone ID: LIB3189-016-P1-K1-A9
tgggaattgtcgtggtccttctactgcattctgtcttctttacaagttttttaccatgaaacttactgtcaagcaaatgcatgggctactgaagcaccctgattctccttacattagagcaattggattcctctacttgagatatgctgccgatccgaagactttatggagttggtttgaaccatacatcaaagatgaagaggaattctcccctggatctagtggacgaatgaccacaatgggcgtgtacgtgcgtgatttacttcttggacagtactattttgatactcttttcccccgaatccctgttcctgtgttgcggcaggtgacattcaatcttgagaagatgaagcttgctacttaaccttcagggtcaactggggataataacccgcatggatctgatgacacttgttggccgccaaccttttgtaaagcaacacttt

SEQ ID NO: 41648 - DNA, 286 bp, Gossypium hirsutum
  unsure (1)..(286): unsure at all n locations; Clone ID: LIB3189-016-P1-K1-B10
ctctgaactcaaacaatggngaaagggttgggcagtgaaggtgatgatgatgagtttggtggtggtggtttgtatttntttgggggggcttttccttttccgttttttttctgtttttttgtgttttttttttttttttttttgttttttttcttttttcgtcttgttttttgttttcgtttttttttgctcttttgttttttttctttttttgtttttttttcttttttttctttttttttctttttttttcttttttttttttttttttttttttttttttttt

SEQ ID NO: 41649 - DNA, 450 bp, Gossypium hirsutum
  Clone ID: LIB3189-016-P1-K1-B11
gtggtatcaccattgatattgccctgtggaagtttgagaccaccaaatactattgcaccgttattgatgcacctggacaccgtgactttatcaagaacatgattaccggtacctcacaggctgactgtgctgttctcattattgactcgaccactggtggttttgaagctggtatctctaaagatggtcagactcgtgagcatgctttgcttgcttttaccctcggtgttaggcagatgatttgctgctgcaacaagatggatgcaacaaccccaaagtactcaaaggcaaggtttgatgaaattgtcaaggaagtctcttcttatcttaagaaagttggttacaaccctgagaagatcccattttgtcccaatccttggttttgagggtgacaacatgatcgagagatctacaaacctcgattggtacaagggttctactcttcttgag

SEQ ID NO: 41650 - DNA, 476 bp, Gossypium hirsutum
  Clone ID: LIB3189-016-P1-K1-B12
gacccatgcgtacgatataaaaaatgaagctcttgtttctaactttgttgctttgttctcttcttctatgttcttcagtttttgaaccaacaatggctcagcctcgttcacctttttgtgaagggaaatgcaaagggaggtgcaataaagcggcggtttgggatcgatgcttcaaatattgcggcatatgttgcgaggagtgtaaatgtgttccttccggtacttttgggaacaaacacgagtgtccttgctacagagacaaggtgaataacaagggcaaacccaaatgcccttgaaaatgaaatatattcgagttcgggatttcatcaagcttaaagatcgaggacgaagaggctatatatatatatgcatgctgatggtgttattataaaaatgaactggtttattgctgttggtttcccttgggtttttggtttggtagcggtgaataaaactttccttatatttttccatca

SEQ ID NO: 41651 - DNA, 455 bp, Gossypium hirsutum
  Clone ID: LIB3189-016-P1-K1-B2
gcaatagctcctcctgctaccccaccaccagctccattggcttctcctccagccacagtcccagctatctctccagtacaaacaccattgacatcgccaccagctccgccgaccgaggccccagcacctaccctcggggctgctacgccaggtccagctggaactgacacgagtggagcaaatcaaatgtggaccgtacaaaagatgatgggaagcttagccatgggatgggctctgctcaatctgatggtttaaaacaaaagagtgcctcacatttgatgcaatagctctgtaatgtttcattcatttgcttatttcggccttgtttttctcgtattctatgggctgatgtctcatatgggacttttctactagagagcctacgttactttaccattatattgtattctttgagacattattatttttttaccttttgaggacactcttttttt

SEQ ID NO: 41652 - DNA, 316 bp, Gossypium hirsutum
  Clone ID: LIB3189-016-P1-K1-B3
tgataagttggtagaagcaatcaaagcaaagaagaatggtaaggctgttatcgttggtggaggttatattggtcttgagcttggtgcagccttgaaaattaacaatcttgatgtcagcatggtgtacccggaaccatggtgcatgccccggcttttcacctctggcatagctgctttttatgagggttattatgctaataaagggatcaaaattataaagggaacagttgcagttggattcacctttgactccaatggaaaggtgaaggaagttcaacttaaggatgtcagtgttctgtatgctgacattgttgtg

SEQ ID NO: 41653 - DNA, 373 bp, Gossypium hirsutum
  Clone ID: LIB3189-016-P1-K1-B4
cccacgcgtccgatcagtcaagaaataaaccatggcaacgaatgaagtaaaagttttgggttcctggccgagtccatatgcgatgaggccaaggattgcccttaacctcaaatccctcacttacgaatacattgaagagaagttatgggaaggcaaaagcgagcttcttctccaatcaaaccctgtttacaagaaaatcccagtcctcattcacggcgataacaagccaatctgcgaatctctcatcatcgtacaatacatcgacgaggcttggtcttccggtccttctattctttcttctgatccctgtgaacgtgctgtcgctcggttttgggctgcatatcttgacgacaagtgtgtcccagcggtgaaa

SEQ ID NO: 41654 - DNA, 307 bp, Gossypium hirsutum
  Clone ID: LIB3189-016-P1-K1-B6
cttacgtggaggattactgaccgagctacattgttttttttcaccaaaggaaatttacattggtggcgagcgaacactttgacaacgttggggctgtacagaacaccaactcagaagggccgcccgcgattatggttgctcgggcctcctttaagggccttgcaaggttgttcggttacagtgactgcgggtacgctgacgacgatgtgtacaggacggatgatgacttgtctgaacatactctaagcactgtcatgaccatggtggtaagcactaggctgagtacgatacggggctgtggtgtgaa

SEQ ID NO: 41655 - DNA, 424 bp, Gossypium hirsutum
  Clone ID: LIB3189-016-P1-K1-B7
ctcctccttcccctttagccgtctttccctcccttcctctcagatcaaagcttcaaaatggcatttgtcaaggctcagaaaaccaaagcttactttaagcggtttcaggttccatacaaaagaaggagagagggaaagactgactaccgggctaggattcgcctaatcaatcaagacaagaataagtacaacactccgaagtaccgattcgttgtccgatttagcaacaaagatgtcaccgcacaaatagtttctgctaatattgctggtgatatggttcttgcttctgcttactcacatgagcttccacgatatgggcttgaagtgggtcttacaaactatgccgcagcttattgcactggtttgctgttggggcgccgggtgcttaagatgcttgaaatggatgaagagtatcaaggcaatg

SEQ ID NO: 41656 - DNA, 440 bp, Gossypium hirsutum
  Clone ID: LIB3189-016-P1-K1-B8
gagaaaataaaaagatgtattattgaaaatatttttcaagatttggtcctaacagatattatatgatacgacatgagatggtcgggatcagggatgggcttgggtcaggggcgttacttctttcgtgaaagagcagcagcaatgccaccagcaatcagcccagcagcagaaacagcaatgccaataccaatcacaccatctttcgtaattcgatcttcgattgccttcttcagagattgtgcctgcctccattcaggttctaccattaaacactgctccacaagctctctgctccttgaatagtcaccttttcggaaatgcccaacagccagatgataaagcttctctcgcattttcagtggatcggtagtgctggctatagaagctttgagcatagctataccacgttctatatcttttgttcgttgtgagtgaacaag

SEQ ID NO: 41657 - DNA, 453 bp, Gossypium hirsutum
  Clone ID: LIB3189-016-P1-K1-B9
gttatctctgaaggtgtcttaataaacgccttctttttaccttcgatttccatttacttctctattgctacgtttttgaatttttagtgagcgaaaatgagagagtgcatttcagtccacatcggtcaggctggtatccaagtcggaaatgcctgctgggaactttactgccttgaacatggaatccagcctgatggccagatgccaagtgacaagactgtcggaggaggtgatgatgcttttaacacctttttcagtgaaactggtgctggaaagcacgtccctcgtgctgtctttgtggatcttgagcctactgttattgatgaagtgaggactggtacttaccgtcagcttttccaccctgagcaactcatcagcggcaaggaagacgctgccaacaacttcgctcgtggccactacactattggcatagagatcgttgacttgtgcttg

SEQ ID NO: 41658 - DNA, 242 bp, Gossypium hirsutum
  Clone ID: LIB3189-016-P1-K1-C10
ctgcctttaatttatttggctgctaactctggtgcccgtattggggtagctgaagaagtcaaagcctgttttaaagttggttggtctaatgaatccagccctgagcgtggttttcagtatgtctacttaactcctgaggattatactaagattggatcatcagtcattgcacatgagatgaagctggccagtggagagagcagatgggtgatagataccattgttgggaaagaggatggttt

SEQ ID NO: 41659 - DNA, 362 bp, Gossypium hirsutum
  Clone ID: LIB3189-016-P1-K1-C11
cccacgcgtccgaaaaaaaaaagagagtacttggtagtgcagtcatttagtctaaagggaaacgactgagattgcccagattcaaagctttttcccccaaaatatcgaatgcaacttcgattttcttcttcatcaaaatttcaatctttattttttgttttgcttttttttttccattgatgggttgctagatttttattaacctcacataaatactctatctttatccggacccaaatctttacaatcttttttttttttttcacatataatctttagttttatttgtttttttctttcggggggatgatggcatcttcattactggcaagttctttaattccttggctggtggctgcttt

SEQ ID NO: 41660 - DNA, 410 bp, Gossypium hirsutum
  Clone ID: LIB3189-016-P1-K1-C12
ggcaaacctatgaatggcattatcaaccttgtttgaggtggacgaataaaaaagcactgtggtgacatcatttactagcacaggcagagcactgactgtgacagagtccagcgaagccccgagctgcatagaacaccagctcgcggaagtcatagttgcgattgtttcagcatacataaggatgcagacaataccaaatagcagtaaggcaagtgtgctagctgacgcgagaaagacatattgacgactatggtacttgaacagtctccaagaatgttctatttaggggtatatacctagaggtgcatgaattgcgagaccaccagcaagcaggatgagaaattgattaagcattctaaaggctaggacagggtcatctttgctcagattgatgcttgtgctaatgaaca

SEQ ID NO: 41661 - DNA, 417 bp, Gossypium hirsutum
  Clone ID: LIB3189-016-P1-K1-C2
ggagactggcgcgcgttctacaccctgatgtctcggctaatggtcgaaacgacgtcgctgccaacgagttcatcaaagtacatgaagcctactctacgctatcggatcctgagaaacgggcggattatgatcgaacgttgttgttcaggccaaggcggtccttttctgtttccgtcgaatcgatggccggtccaacgttttctgggttttctggttattcgaaacgaacatgggaaaccgatcaatgttggtgatacttgagataaactgtgaaatccatagatggattttggtttattttcattctttttggcttttggggaattactgatttggtgctaatttcgcctgtaaaaatagaaatatgttaactaaaacaaggctgttttttttttattaaaaaataataaaaatatt

SEQ ID NO: 41662 - DNA, 441 bp, Gossypium hirsutum
  Clone ID: LIB3189-016-P1-K1-C3
ccaggactcttcgccaagccatggctcggtgggtcactcgagccatcaagttccggttctgccccatccttgaagaagctcaagccaaaagtgagcctgttgatctacaagacgtattgcttcggctcacgtttgataacatttgcggattagcttttggaaaagacccggaaacatgcgctcaacgactccccgagaacggcttcgcttctgcttttgaccgagccaccgaagcatctcttcaaaggtttattttgccagaggttttatggaagcttaagaaatggcttcggcttggattagaagccagtctgagccgaagccttgtccacatgaatgagtatttatccgacgtaatcgttacacgtaagcaagaactgctgagtcagtagaaagatgggaacccacacgacgatttgctttcaagattcatgaggaaaa

SEQ ID NO: 41663 - DNA, 438 bp, Gossypium hirsutum
  Clone ID: LIB3189-016-P1-K1-C4
gagcttttgagctctctccctctctcaaacccccactcctgctcggcctagggtttcggccgtaagtgccgccgtagcgccaccgtgaccgatggccgacgttgcgcaaaagaggcgtttcaaccccgatttccagtgcgctcaaagatccaaccttctttggcctaaaaaaccaggagagggcacccctagccccccttttaggtctaattccgacaacgggaaaagggccttcgacgaccggacttgaggggctattctaggtagcagaggcgtggcagaggctgtgagacgcgatgatagaggcgtacggtcaatggtagaggacccaggcgcagcgcctagggttagcaactttgttttttctgctaaaattttttagcttgtgggctttgggcttcttaggttaggtttgggcttggggtgttgtttttaatt

SEQ ID NO: 41664 - DNA, 449 bp, Gossypium hirsutum
  Clone ID: LIB3189-016-P1-K1-C5
cggacgcgtgggtttgaattaataaaaacaaaatttatataaggagagagaacaaacaaaaaaagtcttctctatctttgttctcgcctttaacatcaacaacaaaaagaaaaacagaattatcgaaggaaagatctgaaagagaatggcaacttttgcagggactacccagaaatgcaaggcttgtgaaaaaactgtttacttggttgaccagcttactgctgacaacaaagtttatcataaagcttgcttcaggtgccaccattgcaagggtacccttaagctaagtaattatagctcctttgagggtgtcttgtattgcaagcctcactttgatcaactatttaagatgactggcagcttggataaaagttttgaaggaactcctaaaactgttagggtagaccgatcaacttgaccaggtcaccaacagcaaattttcgggattg

SEQ ID NO: 41665 - DNA, 464 bp, Gossypium hirsutum
  Clone ID: LIB3189-016-P1-K1-C6
accggaacggcaggcccgacccgacgcgtccgaaacgacaacgtttccagatccacaatggcttctacattcagcggcgatgaaacggctccgttcttcggctttctcggcgccgccgccgctcttgtcttctcttgtatgggagctgcatatgggaccgctaagagcggtgtcggtgtggcatctatgggtgtgatgaggccagaattggtgatgaaatcgattgtacccgttgttatggctggtgtcttgggtatttacgggttgattattgctgtcattattagtaccgggatcaatcctaaggcaaaatcgtattaccttttcgatggttacgcccatctttcatctggtcttgcttgtggccttgccggtctttctgctggaatggctattggaattgtcggtgatgctggtgtcagggctaatgcacaacaaccaaaaccttttggtggaacgatact

SEQ ID NO: 41666 - DNA, 453 bp, Gossypium hirsutum
  Clone ID: LIB3189-016-P1-K1-C7
tttgtattcctattggtatcattgttagctattgttgaccaaactcggaaccctgcctatgttgaccaggtggtacttgcccatgacgtcccacaacaaccacctgctgcagcagttgtgaaagaaccacctcaagctgaaactgatgaagaatccgtaaatcagaagccggtcgagaaggctttagtggaagagtatttgtcaaaacccaagtgtgataatcagggaaatgttcttcagtcgggttctttcaaggaagagagcacgagggtggttgatcttcttgataatgaaaagaaagcgttacaacaacttaagcaacttgttcaagaagcgcttaacaagcatgagtttggtgggcaacaaccagaagcgcctaaagaggatgacgagaaaaaatcagccaaagaggaggcaaaggacgaagcggttatttgtgacgaaccaccaaaa

SEQ ID NO: 41667 - DNA, 456 bp, Gossypium hirsutum
  Clone ID: LIB3189-016-P1-K1-C8
gacagccaccaacttttgtccccctaactatgctttatctagtgacaatggcgggtggtgcaatcccccacgagaacactttgatttggccgaaccggcattcttgcagatcgcggaatatcgagctgggatcgtccctgttatgttcagaagggtgtcatgtgtgaagaaaggaggcatcaggtacaccatgaatggacattcgtacttcaacatggtgttgataaccaacgtgggaggggcaggggatataacgtcagtgtccatcaagggttccaaaacaggatggctacctatgtccagaaattggggccaaaactggcagagcaatgcttaccttaacggccaaagcctctctttcaaagtgactgccagcgatagcaggactatcacaaactacaatgtagtgcccgctggttggcaattcggacaaacttttgaaggaggccagtttta

SEQ ID NO: 41668 - DNA, 238 bp, Gossypium hirsutum
  Clone ID: LIB3189-016-P1-K1-C9
ttagaaggtgtcttaataaacgccttctttcttcttcttcttattcctttattgctttttagaatttttcttaatcgaaaatgagagagtgcatttcgatccacatcggtcaggccggtatccaggtcggaaacgcttgctgggagctttactggcttgggcgtggaataccagcctgtgggtagataccaagtgacataaacttgtggagggggggatgatgcttttaacacctttt

SEQ ID NO: 41669 - DNA, 440 bp, Gossypium hirsutum
  Clone ID: LIB3189-016-P1-K1-D10
tcaattttcccctcattctttttcgtgagagggagaacccaaagattttgtctgccgtttcttttttttttttgtgatattgaaatcctctaaatcacataaaaaaagaaattggggcaatatattggatccataccattaacatataaagagatggagaatggaggagtagagaacgcccaagcccacgcccatggcgacggcaacggcaatgggcaggcggcgtcgtatacttattgggtgagagaaacgatggcgggcgctactccgctccctgttcctaagaagctcactgctcaagacatcctttcaactcaatctcagtctacatctcttggttctgtttggaataaggctggaacttgggcttcattggatttatcttggggcaaggcatcaagtgtgttggtgatgcctttttgggcgactgtacgaaacaa

SEQ ID NO: 41670 - DNA, 408 bp, Gossypium hirsutum
  Clone ID: LIB3189-016-P1-K1-D11
atttgcctcaggcaacccaaatattcattcctcgttcgctctcaatcctcgccactaaattttacttcttaaatttcattttcttttgaaatatttcaattttcttactgatctaattgctttactggttagacttgtaagaggtttcgatagatccctcgagtaaattaagaaaagatgggaggaggagaacatggagggcatggagcagaggatttcaggacgaaggtgtggagcatgtctggtggcccatattgccggcccaagcactggcgtcgcaatactgcgattgctatgttcggcgttttcctcatttgtatcccgatcgccatgaaatccgccgagctcgagcaacggccttatcagcccgttcgtccaattcctttacagcttgtgggcaagaacttt

SEQ ID NO: 41671 - DNA, 355 bp, Gossypium hirsutum
  Clone ID: LIB3189-016-P1-K1-D2
ggcggagagcgtggcgcttttaggcgcggcttctttggtatgaaggggtgaccgtggtccaagaggcaggcgccgtggccgcaaggacgaagaggagaaatgggtacccgtcacgaaactcggccgtttagtcaaattcgggaaaatcacgtccctcgaacaaatttaccttcactctcttcctatttaagagtaccaaatcattgaccagctcgtcggccctttcttgtaagacgaagtcatgaagattacttccgttcagaaacaaacacctgcaggccagcgcacgcgttttaaggcctttgtcgtcgtctgagacggaaacggacacgtcggattgggtgtcaagtgcagc

SEQ ID NO: 41672 - DNA, 318 bp, Gossypium hirsutum
  Clone ID: LIB3189-016-P1-K1-D3
ctttctctttatattcatcactcgaagcaaaagtaaaagggaaaggtaaaggagggttttgaggagggtgaaagatggctggttacagggcaaaagatgactaccactttcttttcaagggggtgcttatcggggatttgggaggaggcaaggctaacctttttttaagggtcaccaagaaccaggttaaccttgagttcaaaggcactattggcggtgaggtcgcttcttggagcttggatggtgaaggtgagggcattaaggcttaaatttgggacactggtgggcaaaaaagggaccggggtattaccaggggct

SEQ ID NO: 41673 - DNA, 395 bp, Gossypium hirsutum
  Clone ID: LIB3189-016-P1-K1-D4
cggacgcgtgggttcttcttcactttgaggtttttttgtaagagttgagaggtgagaccaagtgattgtggattacaacagagaaaccagagtaacgaaaaagatggatatatatgggatcttgggtaaccgagatttgaagctaggcaaaatcaagcatacccaggagacgacaataagctcaagaccctttttaccctttcgcctttttctcttacactcttttttcgattcaatagttaaatttatagctggaaaagagaatcgattcaaatttttcaacaaattcatgattgttacagaaaattttatttaaagttttgtctattccccctttttacctcattttcttattttgggttttgcgatatttaaacaggattaattttttgttg

SEQ ID NO: 41674 - DNA, 368 bp, Gossypium hirsutum
  Clone ID: LIB3189-016-P1-K1-D6
gcagtcttgcattttgttttcccttttttttccccacacctttttttaaacccatttgctaaaaatgcactgggttcttccagtgttgcttgccgttatcggagttactgcactgctcgatgtaactccggtaagtgggtaccgtccatggccgtacttaaaacccaacagctccgacttaatgttcggaggctctaataaatttgagggctcatcggagtttatccatatgagatatcatatgggtccagtccttactgctaatatcaccatccacccaatctggtacggccggtggcagaaatcccagaagaaaatcatccgtgagttcatcaactagatctccggcgttgattacaaacaccctt

SEQ ID NO: 41675 - DNA, 426 bp, Gossypium hirsutum
  Clone ID: LIB3189-016-P1-K1-D7
ctttctacaactgggctatagcaatctctgtttgtgcaaaaatgcgtggtcggaccaaagagggggaagaactatgggagcaggcggcaaaaaactatgaaaaagctgtccagctcaactggaatagcccccaggctctaaacaattggggacttgctcttcaggaactcagtgctattgttccagctcgggagaagcaaaaaattgtcaggactgcaattagtaagtttcgtgctgcaatacagttgcaatttgatttccatcgagcaatatacaaccttggaactgttctgtatggactagctgaggataccttaagacatggttctgcgaatctgaaagaagtttcctcagatgagctgtatagccagtctgctatctatattggggctgcttatgcacttgaaatcaaattacttcgttttc

SEQ ID NO: 41676 - DNA, 439 bp, Gossypium hirsutum
  Clone ID: LIB3189-016-P1-K1-D8
agaatggataacagcgagggcaacaattcccccagcttgatctctcgtgagaagttgggagaggtggcaacctgggtcagcgccactgtggtctccgcctttttctcctctctcgagcgcttctcctgcgttaacctctccaccaacgaccctgacgatgacgacaatcccaacgaggccaaggaccgccctctcacctactcctaaatatctctctcggtacttgccacgtcatatactctcttgctttctcttgatttatggtctttgtatacagaaccaagaaaaaaagtattaaggaaactttaaatgctctatatttgttggtcgtcctgattgaaaagggaactcttctgtaataaaggccttttttttttttggatattcaatcatctaagtctgttggtgctgtgttttctcaaaagtcacaagtcaaaac

SEQ ID NO: 41677 - DNA, 413 bp, Gossypium hirsutum
  Clone ID: LIB3189-016-P1-K1-D9
gaggattcgacccaaggagaagaggggacagaaggaaacaaaggtcaagggcaagtagttgttcaagtagtcgaagaagaagaagaggaagaaaaagaagaagaagaagagtacttttacgaatcccttgatcgcattgcttcttctaattcttgttcttgttccaactcaactactccttcgtctgactcggattccgacccagttacccgttccagcaatgcccgccacccatttcccgtcccgaaattccccatggccgtttccaagttcgacatctggatctcagaacccgccttcgtttccgagagaagaactcggctgcaccgtgaaatgggtcttagccgcgaccccggtctttcccggtcaatacccggctcagaaacggaactgggtctgggacgggaaatggg

SEQ ID NO: 41678 - DNA, 121 bp, Gossypium hirsutum
  unsure (1)..(121): unsure at all n locations; Clone ID: LIB3189-016-P1-K1-E1
gnccaaagagatactgacttccaaaacttactttgatttttttataacgccaaaacaccaatttcgcgctgtttaaccaaactggtcgcgaggctttaacttttaggccccatcaccccct

SEQ ID NO: 41679 - DNA, 83 bp, Gossypium hirsutum
  Clone ID: LIB3189-016-P1-K1-E10
atctccgaactttttggtggttttttaaagaaaggaggcggggccaaaattcctatttcaaacaaaacttcaattaaaggaaa

SEQ ID NO: 41680 - DNA, 402 bp, Gossypium hirsutum
  Clone ID: LIB3189-016-P1-K1-E11
gccaattgtttgagctagctagctcttactcaaatggcaaccaaaacgatgatgttgcaaatattttcacttttcttctttttggtcagtatctgcaactccattttccttggtgctaatggagatgacaatggtggttggcaaactgcccatgccaccttctacggtggtgctgatgctaccggcacaatggggggagcttgtggttatggaaacctgtacagtcaagggtatggaacgagcacagcagctttgagcactgcacttttcaacaatggcttgagctgcggtgcctgctacgagctccggtgcaacaatgatcctcaatggtgcattagtcgaaccataaccgtgacaggcaccaacttttggccccctaactatgctttatctagtgacaat

SEQ ID NO: 41681 - DNA, 449 bp, Gossypium hirsutum
  unsure (1)..(449): unsure at all n locations; Clone ID: LIB3189-016-P1-K1-E12
gagaagtcggccttattactctctaaagactactgaacaaccttcagaaaagaagaaaggatttggtgattggatgaacttgatgaagcctggcaccgaggagaaagatcattgggtccctgatgaagctgtttcaaagtgtactgcatgtggaactgattttggagcttttgtgcgcaagcaccactgcaggaactgtggggatattttctgtgacaaatgtactcaaggtagaatcgctctaactgctgatgagaatgctcaaccagttagggtttgcgaccgatgcatggctgaagtgactcagaggctgagtattgctaaggaaacagcaagtaaacctgctgctttacagagtcatgaggatcttgctaggaagctngaggagatggaaaaaaattgcagagcatcatcaggttccaagtcagatggatctggtagacggatga

SEQ ID NO: 41682 - DNA, 459 bp, Gossypium hirsutum
  Clone ID: LIB3189-016-P1-K1-E2
atcgttctcaactcgtctctccggcttcatttcctttttgctcagatctcctcatctctcccactttttttctttcttctaatacccaatggccgtcactttctcaaatctccacaccgagtctggtcttaaagctcttaatgacttcctctctggaaaatcttacatctctgggaataagctgaccaaggatgacataaaagtttatgctgctgttctgaagaaccctggtgattctttccccaatgttagccagtggtataattctgtttcttctcaacttgcggccagcttccctggcaaagctgttggcgttgggtttggtggcaaagctgctccagctgagtctgctaaagctgaggctgcagatgatgacgacgacttggatctattcggtgatgagacagaggaggataagaaggctgcagaggagagggaagctgcaaagaagtcagctaa

SEQ ID NO: 41683 - DNA, 361 bp, Gossypium hirsutum
  Clone ID: LIB3189-016-P1-K1-E3
gaagattgcagaggccagcgttttacttgtgacatgcattgtcctgttttcaggacatggcgtcttttctttctcctatgactattctgcaacaatggagtgcttggcagcgcccaagagagctcaatatggtggagggatgattgggttcaatcaaagaacaaatggatccacattgtcgagtgaattaggagtttcaaatgatgggttacacaatacaacactctcattgaagactgtaaagctcgagaaaggaaatttatatacattttcagcttgggttcaaatcagcaatgggagtgaaagtgagactgtagctgttgcattcaaggcttctaatggtgaattggtacatggaggt

SEQ ID NO: 41684 - DNA, 430 bp, Gossypium hirsutum
  Clone ID: LIB3189-016-P1-K1-E4
cggacgcgtgggtccaaaaatgatgatcggagatttaattcaaccaaatcccaccatcaaaatccccgtaggggacccattcaacgatccgacggctagctttccctccgttaactttaactacaacaatgcagtcagtagtccttgccccgtcgattacctcgggtctctccaccgttacctaccgtcaaacgactacgagtccgattcgtttagtgatgattcggacttgcctgttgatgcattctcatgcgaccatttccggatgtacgagtttaaggtgaggaggtgtgctcgtggaaggtcacatgactggactgagtgttcgtacgctcaccctggtgagaaggcccgtagaagggtcccgcataagtttcattacctttgtaactgtttgtcccgattttcgtaagggaagctgtttgaaagg

SEQ ID NO: 41685 - DNA, 308 bp, Gossypium hirsutum
  Clone ID: LIB3189-016-P1-K1-E5
cctcaaaagtcttttttatgcttctctcactgctaccgccgacttcataacggttagccgtcgtattttggcggcgccgattttcctgtttcccggcgatcttctccgaaaggaatagacaaaatgattggatcctttcttaccagaggactagtgacggtttttgcctatgcttttccagcatatgaatgttataaaactgttgaaatgaataagcctgacgttgaggaactgcgcttttggtgccagtactggatattggtggctgttttgatcggtagtgagagaattggtgatgctacaatttt

SEQ ID NO: 41686 - DNA, 305 bp, Gossypium hirsutum
  Clone ID: LIB3189-016-P1-K1-E6
aggtaaatatgcaaattccattcaaagagaaaccatacatagatgcaaccggtaaacaaagactagaaattatttaaaaggccataaaagggcacaatccttcacgtaaaaccagaaaacccacattaaggaagaccttaaggcttagaacccaccacgaagacgaagaacaaggtgaagagtggactccttttgaatatgatgagaatgctcaaccagttagggtttgagaccgatgcatggctgaagtgacttataggctgagtattgctaaggaaacaggaagtgaacctgctgttttacag

SEQ ID NO: 41687 - DNA, 351 bp, Gossypium hirsutum
  Clone ID: LIB3189-016-P1-K1-E7
gaaaaagaacagcctttggtactagaaaccagtgctgcaatatggaatcatcacaagctcggcgggttttaacgaagctgatgaaggttttaactttgaggccccatcaccccgtttcaagggcagcaccttcatcatgtgtcttgcaaacgcgccttttcagcgatataaaacgacccatcactgaaaatgaatccatcaggagcaatgaggatgatgatggggctaccgaacatatttccaaacgacccttaaggggtcgaaggcctttcaatccggcttttaaagaaaccgaaggggccagctttgatcggaatcggtcctcggttcaatcccccaattgccaaattt

SEQ ID NO: 41688 - DNA, 308 bp, Gossypium hirsutum
  Clone ID: LIB3189-016-P1-K1-E8
ggctcagaaattggatggcaatgccacaaggtgtgactctcagtcatctctgtctgtttcaagccctcctgattctccagttcatctatctcatgatgatttggatgaatctggaggttctacagtgttatcagctgaagagaataaagaggtcaacttgtcaaggccagaaatagaaccgctagtgttacctactgaagctgggaaacaggatgtccggactgcatcaagttctatttctgctggtgatgatgaggaatggactgttgataacaatgaacagctgcaggagcaagtagaatatgacg

SEQ ID NO: 41689 - DNA, 400 bp, Gossypium hirsutum
  Clone ID: LIB3189-016-P1-K1-F10
atttcagttcacattggtcaggccggtattcaggtcggaaatgcttgctgggaactttactgtctcgagcatggcattcagcctgatggccaaatgccaagtgataagactgttggtggaggagacgatgctttcaacacctttttcagcgaaactggtgccgggaagcacgtccctcgcgccatctttgttgatctggagcctactgttatcgatgaagtgaggactggtacgtaccgccagttgttccaccctgagcaactcatcagtggcaaagaagatgctgccaacaatttcgctcgtggccattatacaattggcaaagagattgttgatctctgcttggatcgtatccgaaaacttgctgataattgtactgggctccaaggctttttggttt

SEQ ID NO: 41690 - DNA, 289 bp, Gossypium hirsutum
  Clone ID: LIB3189-016-P1-K1-F11
actggaggagatcaaaagggtaaaaggaatggtctgtctgctaaaaatttaatggccgagaggcgccgtctaaagaaactcagtggtaggctttacatgttgcggtccgatgttccaatgattagcttaatggatagagcatctattcttggggatgccattgcgttcctggaggaactactgcacagcatcaacgatcttcataacttatctgctttcaaccctggttggtctgtggtaacacatactaacattttcatacattatctttcaagtctgtttccttgcc

SEQ ID NO: 41691 - DNA, 456 bp, Gossypium hirsutum
  Clone ID: LIB3189-016-P1-K1-F12
ggaaattggttcagaaaagaaaaatggccaccattgatgttcctgagcaggtttcggttcttgcagatgcagaagctcttagaaaggcttgtaaaggatgggggacagatgagaaggcaataatttcagtgttgggtcacagaaatgcagttcaaaggaagcaaatcaggcttgcttatgaagacctttaccaggaagatctcatcaagcgtcttgaatcagagctttctggtgatttcgagaaagcagtgtatcgttggatattggatccagcagaccgagatgccgtgttagctaatgttgccataaagaaattaagccctgatcaccatgtgatcgttgaaatttcatgcaccagatcccctgaagagctcttggctgtgaggagagcttatcaagctcgatacaagcattcccctgaaagaagaattggctggtcataccaaagggagacac

SEQ ID NO: 41692 - DNA, 344 bp, Gossypium hirsutum
  Clone ID: LIB3189-016-P1-K1-F2
cccacgcgttcgcggacgcgtggggaaagtacaactagttctataccacgttattcccaaatactactgcttgaacgatctccaatttggtagcaaccccgttagaacccaagctggtgaggatttcggcctcaacgtaactggcctgaacaaccaggttaacgtctcaagcggggttgtcgagactcagattaacaacgcattatatcaaaagaaacctctggcaatttatcaagcggacaaggtgttgttgcctgaggaggtttttgaagctaaatactcagcgggtgcaccttttaccggggacaaagaaattatccacagggtcttcattgaactcaaga

SEQ ID NO: 41693 - DNA, 433 bp, Gossypium hirsutum
  Clone ID: LIB3189-016-P1-K1-F5
ctactctccacaaccgaagaggagggggggaaaaagccatggctgtggacaaagataagcttcaagaagaagcttccattgttcgtttttgtaaaattattcttggctgggactattttcgcctcctcaaattatctaaaaaaaataacaaagatgaggcgacgtcggctttaaaagaagtgaaggatagctacaaagacgttgatgattatttggctactttcgaaccgcttttgtttgaggaagtcaaagctcagattgttcagagaaaagatgaggaggaagtggctgattggaagctaaagctggttatggaatgcaatgaggctgatggattttacttacctgcgattacttatgaagctgaggaggaagaatcgatatcacagaatggccttttgctgctttcaaaagaggacttttaaggggttgt

SEQ ID NO: 41694 - DNA, 462 bp, Gossypium hirsutum
  Clone ID: LIB3189-016-P1-K1-F6
aattgtttgagctagctagctcttactcaaatggcaaccaaaacgatgatgttgcaaatatttccacttttcttctttttgttcagtgtctgcaactccattttccttggtgctaatggagatgacaatggtggttggcaaactgcccatgccaccttctacggtggtgctgatgctaccggcacaatggggggagcttgtggttatggaaacctgtacagtcaagggtatggaacgagcacagcagctttgagcactgcacttttcaacaatggcttgagctgcggtgcctgctacgagctccggtgcaacaatgatcctcaatggtgcattagtcgaaccataaccgtgacagccaccaacttttgtccacctaactatgctttatctagtgacaatggcgggtggtgcaatcccccacgagaacactttgatttggccgaaccggcattcttgcggata

SEQ ID NO: 41695 - DNA, 456 bp, Gossypium hirsutum
  Clone ID: LIB3189-016-P1-K1-F7
gtgacctcgaagcatccaaagcattgaaatacccttcttcaatttcccgattccaacaagtgatttcaaaaaaccctaaccctatctccagtttcaaccacgtcttgagttcgtttcgcttttcttttcgtaggtcgctgctaattctctcttttcttaatcgatggcggctaaacctcttacgagtgaagcaatcgccctcacagaaaagaaaatggacatgacattggatgatatcattaaaatgtcaaaaaatacttcacataaatctaagaaacagcgaaggataccgaataaaatccagagacctgtgagtaatgctgctaaagataaggccttgaaggtacgacagtacatggactcgcgggcctctgttagacagggggttctagctcaaagaaggtctaatttccaggggaaccggtttccttttgcggctgaggctgcacgtagggc

SEQ ID NO: 41696 - DNA, 443 bp, Gossypium hirsutum
  unsure (1)..(443): unsure at all n locations; Clone ID: LIB3189-016-P1-K1-F8
gtcgtttcgttcaaagactacgaaagaaagccgcatctcttcacaatgtaagtttagaacaagggacagtaacatctctacttgaagaaaatggtattgtcaaaggagtgcactataaagataagagtggtcaattgctaacagcttatgctcctctcaccatcgtctgtgatggttgtttctcgaatttgagacgctctctctgccattctaaggtggatatcccttcttattttgttggttttatcttgacgaactgtaaacttccaaaagaaaaatatggagtttttatattagcagatccttcacctatcctattttatcccattagtagcacagaaattcgttgcttggtggatgntcctaggcaaaatctaccctcttgtttcaatggggaaaaggctcattacttggaaactttggtggcttccaaggttcttcct

SEQ ID NO: 41697 - DNA, 186 bp, Gossypium hirsutum
  unsure (1)..(186): unsure at all n locations; Clone ID: LIB3189-016-P1-K1-F9
cccacgcgtccgcgctaggttcagggccgtngttgacaagtgtggtgctctgttgttgtgtgatatggctcacattagtggcctgggtgctgctcatgaggcaaacaatccgtttgagttctgtgacattgttacaaccatcatccacaagagcttgtggtgtcctagggctgcaattatttttta

SEQ ID NO: 41698 - DNA, 443 bp, Gossypium hirsutum
  Clone ID: LIB3189-016-P1-K1-G10
gcgtctctctcttagtctttaagcataaaattttattagaagaagcactctattgctctgtttctctcgttgtagcataagatcaagatcaactgttcttcaaccaaaagggaaaaagctgtggagtttttaagaaaacaaatgataaagccaggctcgttatcgcaacaattcttggaattgtgattggattctttattggtgtttcatttccgtcagtttccttttacaagattcacttaccttcaaaccttagatcggcttttgatgcatccatagctaatgaccaagactttatggtcaggtcacctgagagaactgcagacaatcttcctaagatatatgttcctacaaatcctcgtggtgcagaattgttaccttctggaattgttggtccagaatctgacctttacctgcgcaggttatggggtggacctagtgag

SEQ ID NO: 41699 - DNA, 223 bp, Gossypium hirsutum
  Clone ID: LIB3189-016-P1-K1-G11
ttttgtttttagcttaatctttgggtggggaaacaattaaacccgggcgttccaaacatattcttgcatcagatatatccaaatgcgggttaaaaaagggggtacatttttactacattccattcaaacgaccaagtttggtgcttgggcaggctcttaatttataacctcgtaaaaccaaatatttaacctactggctggttaaggttgaaactgttacttc

SEQ ID NO: 41700 - DNA, 469 bp, Gossypium hirsutum
  Clone ID: LIB3189-016-P1-K1-G12
ctgcttataatctacttcaactatgctgttctttattctcagcttcttacaaaggaacctcgctgcaatcttacgcatatctggctgggcttcgttatcttttggatcaggcagtagtgtacgcagtgtttgcgggaaacctagcgggtttggagcattcatttttggtattaaccggagaagagaacttccaatggctcaagtggtgcaataaatatactcgattctgcacccaaatcggaggatccttgctctgcggcttcgttgcaagcttactaatgttttccatcgcttccatctccgcattcaacttgttcaggctgtattcccccaccaagttcatgcacttgaaactctaatcataaattacggttaatgtggtattaaaaatttttaactttataaattgattgatattttgccatataatttaaaatttttaaaaataaaatgtttgtgaaggtaaaaa

SEQ ID NO: 41701 - DNA, 428 bp, Gossypium hirsutum
  Clone ID: LIB3189-016-P1-K1-G2
gtggacgcatgtttgctcctaccaagatctggcgccgctggcaccggaaaatcaacgttaaccagaagcgttacgccgttgcttctgccatcgccgcctcccctgttccttccctcgtcatggcacgtggccaccgcattgaggctgtaccggagatgccgctggtcatttctgacgctgttgagagcgttgagaaaacctttggtgcaatcaaggttttgaaacagatcggagcatatcctgatgttgaaaaggctaaagacagccaaggaatccgacccggaaaaggaaaaatgaggcatcggtggtacatttgccgtaaaggtactttgattgtttacggaactgttggagctaagcttgttaaagcctttcgtaacattcctggcctggaggttgccaactttgagaggcctaatttgttgaaa

SEQ ID NO: 41702 - DNA, 329 bp, Gossypium hirsutum
  Clone ID: LIB3189-016-P1-K1-G3
ctgcaatcttcctttgcttcactgcttcagccatctctaaatcagcacgttttctatcttcaacagccttcttcttagtttctttagcaatcttcctctgcttctctgctttagccatctccaaatcagcacattttctttcatcaacagcctttttcttagtttcttctgcactcttcctcaactcgcttgctttagccatctccaaatcgacaagttttctttctttaactgccttctttttcttttcttgtagcttcttaaattcctcgtcaagatttgacttctctgaatccaacttggactctgctttactaacatctctcctt

SEQ ID NO: 41703 - DNA, 406 bp, Gossypium hirsutum
  Clone ID: LIB3189-016-P1-K1-G4
ggtaaaaccattttcaaactttgaaacccagaagcaatctataatcaaaaccaaaaacccaaaatcatacaacagaaaaaaaaattggtaacctctttcatctgccccccttttcaacggtagcagcatataagggtcatatcttacccagaggaaagcctccattgtttctttgtagaacaagaaattggaggcgaatcgtctgggattttaatcttttgggtttttttattttatttttggtagaagatgataagatggtgtatttcttcttttcaattagctgagctgtttattagctcggtggttcatcttttatatgggttttatgtgtacagcactgctggtgctgcggaccttttacaggctttgagtgaatgtgttttcaagtctaatgttaacttag

SEQ ID NO: 41704 - DNA, 376 bp, Gossypium hirsutum
  Clone ID: LIB3189-016-P1-K1-G5
tccacacgtccagatgatgtcgacgaaacttttaggcagcttaggatggaagcagaagctagggctgaggagcttaagaaatcaaaacagatggttaagcctgtcaataacagtaagaagcaagggcaggctcagaaagctggttttgataaaggaaataagaagagggagggtagctcggctgctggtggtggggatgataatgataaacgcaaaggttgtaaagtggatcatctagacggcaaccgtaatacccatgagattgattaatctagaaaggcactctgggtgtactggccaaacagttctggttaccaaattatgatgattgaagcatgtatctataagcttaggtcttaaccaagttggtacggct

SEQ ID NO: 41705 - DNA, 466 bp, Gossypium hirsutum
  Clone ID: LIB3189-016-P1-K1-G6
caaaaaccctgaataattctcatttcccctctatttcccaaattgttattagtattttcttttcacatgatccagacattaagatgacacaaccgtcggtcatactagcaaccgccagctatgatcacactattcgattttgggaggcaaaaagcggccgctgttaccgtactattcaataccccgattctcaagttaatcggcttgaaataaccccagacaagcgctacttggctgcagctggtaatcctcacattcgtttgttcgatattaattccagcagccctcaacctgtaatgagctatgattcgcatacaaataatgttatggctgtaggatttcaatgtgatggaaagtggatgtattctggttctgaggatggcactgtaaagatttgggatttaagagctcctggttgccaaagggaatatgaaagtcgtggtgcagttaacacccgtgtcttaca

SEQ ID NO: 41706 - DNA, 298 bp, Gossypium hirsutum
  Clone ID: LIB3189-016-P1-K1-G7
cccgatttgaacatccatcctgaatcgtggtttttgattaacgctggctagattttgatgcagtgacagtgtggtggcttagatatggagacagagaatccggtgaattacaagtatatggggaggagctttaatgatttgagtatcaacgacgattctacagctttcagtgattgtaacagcgatagatcgggggagttcccatcggcatcgtctcagaaccggcgattactactcgcctgtgctaattccgagaattcggatgatttgatacggtagctcgtatcggatcttgatt

SEQ ID NO: 41707 - DNA, 115 bp, Gossypium hirsutum
  Clone ID: LIB3189-016-P1-K1-G8
atttattagtgatgctcctacgttttatacgagtctgtaatgacaatagctttcccttttccatatataggaaggctcatttggaaatgttatttgctttagatacttatttgcc

SEQ ID NO: 41708 - DNA, 446 bp, Gossypium hirsutum
  Clone ID: LIB3189-016-P1-K1-G9
atggctacctatgtccagaaattggggccataaactggcagagcaatgcttaccttaacggccaaagcctctctttcaaagtgactgccagcgatagcaggactatcacaaactacaatgtagtgcccgctggttggcaattcggacaaacttttgaaggaggccagttttaagacaatattatagtgtccgtctaatattaaaactggaattgacatattacttatataaggcacatgagcgttttatgccgaggtagcaaagtggcgcccgctggctttatgtgtgaaataggcgagcaagtgccattagcctataatatacacatttcctatagtgaaccaaactattaaatttggacttttgaggggatatccataatgtctgaaatttggttgttgatgattgaccatgttatttatgggttcattattgaaatcctcttt

SEQ ID NO: 41709 - DNA, 432 bp, Gossypium hirsutum
  Clone ID: LIB3189-016-P1-K1-H10
gacctacgcgtccgccacgcgtccggacggaggaagcccgtcttacagcgcgtccagcgcgagcttcgaaagggaatcgggttaaaattcctgaaccgggacgcggcggctgacggcaacgttagggagtccggagacgtcggcgggggcctcgggaagagttatcttttctgtttaacggcctgcccaccctggaaacggttaagccggaggtagggtccagcggccggaagagaccgcacctggcgtggggatcggggcgccccccgcgggccttgaaaatccggaggaccccgtgccgttcgcgcccgggcgtgcttataaacccatttagtgttcaaggggaacaggctttgtttaatggaacaatttttgtcaagggaggttgcaaaaaggattcgtaactcttggaaaaggattggttttttgggc

SEQ ID NO: 41710 - DNA, 440 bp, Gossypium hirsutum
  Clone ID: LIB3189-016-P1-K1-H11
gttggttttgatactatatgcaaggtcaattcctatctcatcagtaatgtctgcactgatgctctctctgcggagaagtactattattttatccgtcttatgggaaggaaggcatcacatgttgccctggaatgcaccctccaatctcatcccaatatggtaattcttggtgaagaagtggctgcatcaaagcttacactctttgacataacaaagcaaatttgtgatgcagttcaagctagggccgagcaagacaagaaccatggggtcattctcctgcctgaagggcttatagagagcattcctgaagtgtatgcgctattgaaggaaatttacagcttgtttaggcaaaatgtatctgctgataaaatttcttcccagttaataccttgggcatattctttgtgtgaatttcttccacatttcataaagaaacagct

SEQ ID NO: 41711 - DNA, 279 bp, Gossypium hirsutum
  Clone ID: LIB3189-016-P1-K1-H12
cgtcacggcagccgggttattgtcggctaatccaccgcaattcggtgcatcgttggtacaaaaagctatagaagcgcacaacgcgaaggccatcgaagaacgaaacaaggagtgggaagcagcaccgaagatattcgagtacaaggatgctggtgtgaactgcgtggcggtggggagctctcccaggttcaaggtatacgatgtggatttcgggtggggaaaacccgtaggggtgaggagcggattcaacaacacgtttgatgggatggtgtatttgtt

SEQ ID NO: 41712 - DNA, 465 bp, Gossypium hirsutum
  Clone ID: LIB3189-016-P1-K1-H2
cttaagttggtttccatgattctcatggtgtgcatgacgatgatgagtgcacccaaggcagccaaagccgccatcacgtgcagcgacgtggtgaaccacttgatcccgtgcttgtcctacgtacaaaacggcggtacacccgctgctgcatgctgcagtggggtaaaagcactctacggcgaggttcagacctccccggaccgccaaaacgtgtgcaagtgcatcaaatcggcggtgaacggaattccgtacaccagcaataacctcaatctcgcagccggcctacctgctaaatgtggtctccaactcccttacagcatcagcccctccactgactgcaacaaggtgcagtgaggttgatgatgatgatatggaaggagtggaagaaggttccagctcaactagataaagtagctagctaaggttaaataagctgtgttggtgtgtttgtttttagaaaattct

SEQ ID NO: 41713 - DNA, 386 bp, Gossypium hirsutum
  Clone ID: LIB3189-016-P1-K1-H3
cggacgcgtgggaaaaaaaaaaaaaaaaaaaaatatattattttaaaaaaaaaaaaaaaaaaaaaataaaaattataaaaaaaaaaagaggaaaaatttaataaataaatatataaataaataaaaaaaaaaaaaaaaaaaattttttttttttttaaaaataaatggggttctttttttggggttttaccattttctttcttttttttgcccttttatttttttttttttttgccctttttttaaattttctggttcgggttttatcctcgttgttctatttgtaaactcttggttttcctttttatttttcttttttgcaattttcctttttgtcccttctcttttttgtttatatttacctttccctttttttttttttatat

SEQ ID NO: 41714 - DNA, 382 bp, Gossypium hirsutum
  Clone ID: LIB3189-016-P1-K1-H4
cggacgcgtggggttggctctttcttttttgtttctgtttcctctctttttattgaaaaattagggtttccgtcagcggtattgagaatcaatggcgtcgacttcgaggaagataatgttgaggagctccgacggagagacttttgaggtggaggaagcggtggcggttgagtcgcagacgatcaagcacatgatcgaggacgattgcgccgacaacgagatccctctcccaaacgtcaccagcaagatcttgtccaaagtccttgagtactgcaagaagcatgtcgatgctgctgccgacaaggaaaagactcccgatgacgaactcaaggcttgggatgctgattttgtcaaggttgaccaaaataccctctttgacctc

SEQ ID NO: 41715 - DNA, 477 bp, Gossypium hirsutum
  Clone ID: LIB3189-016-P1-K1-H5
ctgtgttcatcaggttctttttatctcttcgaattttcattacagaccctgatcctaaactctcaattatgtcttccaagcaaggtggcaaagcaaagcctttgaagcaacccaaagctgagaagaaagaatacgacgagcatgatttggctaacattcagaaaaagaaagaagaagagaaggcccttagagagctgagagcaaaggcatcacaaaagggatcatttggtggttctggtcttaagaagagtggcaagaaatgagtttcttaaaaacccgagctaaaccgaacttatcgagtcctgtcttgggattaaaacatctattatgctgatgtctcttggttctattgtgatagttgggatgatttgatgctctagtttcattctgaatttgctattaaaaacattgtgtgtaatttcgtgacgtataacttaataaaatcaagttctacgtttgtgttttttgtctataaaa

SEQ ID NO: 41716 - DNA, 264 bp, Gossypium hirsutum
  unsure (1)..(264): unsure at all n locations; Clone ID: LIB3189-016-P1-K1-H7
ccgctccaatcgaagctcgcaactcgaggaagggaagctagaagtgcaaggcanataatgaagacccatnttnctttcttcaagagacccaatgganctatcccnntgatgggnngttgatattannaggtgannaggctcaagattgattcgnnaggttgannaggtcctcaggnnggtaagctcaatctcgtaactttcaaagcaccttcacacctcgtattttcattcttatcaagggactgaggagaggcggcaacacgc

SEQ ID NO: 41717 - DNA, 68 bp, Gossypium hirsutum
  Clone ID: LIB3189-016-P1-K1-H8
cggacgcgtgggtccggacgcgtgggcggattcttgggttaacgcaaacccatttttaagggggggaa

SEQ ID NO: 41718 - DNA, 368 bp, Gossypium hirsutum
  Clone ID: LIB3189-016-P1-K1-H9
cccacgcgtacgcggacgcgtggggcatttctgatcctccccggacactgacaaatagcaccagaaatggctgttggaggttttggcggcgtctatggacctgtcagcagcttcaatggcaagatcacagcttcggtggtgatcacctgcatttttgctgcttcaagcggcctcatatttggttatgacattggaatttcaggaggtgtgacaactatgcaaccatttcttcagaaatttttcccatcagttttaagaaaagcagcagaggcctaaaccaacatctattgcgtgtatgatagccaagttttaacatcctttacttcttcactgtacattgctggttaagctgccttactggttgctag

SEQ ID NO: 41719 - DNA, 359 bp, Gossypium hirsutum
  Clone ID: LIB3189-017-P1-K1-A1
tctagatcgcgagcggccgctcgcgatctagatctccttcgcgtccggcgggattacccgctgagtttaagcatatcaataagcggaggaaaagaaacttaccaggattcccctagtaacggcgagcgaaccgggaaaagcccatcttgagaatcggtcgccatcggcgtccgaattgtagtctggagaagcgtcctcagcgacggaccgggcccaagtccactggaaaggtgcgccggagagggtgagagccccgtcttgcccggaccctgtcgcaccaagaggcgctgtttacgagtcggtttgtttgtgaatgcattcctaatcgggcggtatattccgtccaatgctttaatacg

SEQ ID NO: 41720 - DNA, 350 bp, Gossypium hirsutum
  Clone ID: LIB3189-017-P1-K1-A10
cccacgcgtccgaaaaaggaaaaaaaaaatgaagctcttgtttctaactttgctgctttgttctcttcttctatgttcttcagtttttgaaccaacaatggctcaacctcgttcacctttttgtgaagggaaatgcaaagggaggtgcaataaagcggcggtttgggatcgatgcttcaaatattgcggcatatgttgcgaggagtgtaaatgtgttccttccggtacttatgggaacaaacacgagtgtccttgctacagagacatggtgaataacatgggcaaacccaaatgcccttgaaaatgaaatatatttcgagttcgggatttcatcaagcttaaagatcgag

SEQ ID NO: 41721 - DNA, 228 bp, Gossypium hirsutum
  Clone ID: LIB3189-017-P1-K1-A11
ggaaccattcctgtctgccatttccttcctcgttatcacattgtttgggtccctaagtaaaagtcctgaagagtagattcatacactatagtttcttcacagtgtgcattaaaacagcttaaagcaatatccagtttgttctataataatatacccacaagtttagtcatgtaaaatctatccatgaatcatgttcttagtaatggataaaatgatattactttctgt

SEQ ID NO: 41722 - DNA, 255 bp, Gossypium hirsutum
  Clone ID: LIB3189-017-P1-K1-A12
gacccacctctatgctgttaaagattaagccatgcatgtttagttgaacaaatcagactggaactgaatggctattaaatagtatagtgtgaggattgtctgataaccgagtattctagagctatcggcacacccgctttgaaggagcatttttgaaaaggtgcgcggcttgccgtgttgtgtcatgatactgacgacgacggcttggccgcaccatattaaatttgcctataactttatgtggaagggcactat

SEQ ID NO: 41723 - DNA, 323 bp, Gossypium hirsutum
  Clone ID: LIB3189-017-P1-K1-A2
cggacgcgtgggaccttcttcaagcatagccatgactactgaaatggtaatggttgatgaagtcccttttcctccacaaatcacagctaccaagccactatctcttttgggtcatggaattaccgacattgagattcactttttgcaaatcaagttcacagcaattggggtttaccttgaaccagaagttgtaggacatttgcaacaatggaaggtgaagcctgggaacgtgctagctgaagatgatgacttcttcgaggctcttattaatgctccagtggagaagtttctgagagttgtggtgattaaggagatcaaaggtt

SEQ ID NO: 41724 - DNA, 390 bp, Gossypium hirsutum
  Clone ID: LIB3189-017-P1-K1-A4
tatctctgaaggtgtcttaataaacgccttcgatttaccttcgatttccatttacttctctattgctacgtttttgaatttttagtgagcgaaaatgagagagtgcatttcagtccacatcggtcaggctggtattcaagtcggaaatgcctgctgggaactttactgccttgaacatggaatccagcctgatggccagatgccaagtgacaagactgtcggaggaggtgatgatgcttttaacacctttttcagtgaaactggtgctggaaagcacgtccctcgtgctgtctttgtggatcttgagcctactgttattgatgaagtgaggactggtacttaccgtcagcttttccaccctgagcaactcattagcggcaaggaagacgc

SEQ ID NO: 41725 - DNA, 427 bp, Gossypium hirsutum
  Clone ID: LIB3189-017-P1-K1-A5
ctttttgagctttcgtgtttgtctattgaattcttttcctcactttctcgaaaaaaaaaatgtcttcaggttgcaattgcggatctaactgcagctgcggtgacaactgctcatgcagcaggaaccttaaccttggatattcggagaagacaaccagcactcagaccatcatctccggagttgcgccagtgaagatgacctttgagggaccagagatgagcactactgaatcaggacatggatgcaagtgtggatcaaactgctcttgtgatccatgcaactgttgaaaagcttgatgaaagccatagattatgaaaaaaagaaagcagcaaaaataacaggcctctgtaatgatatattgtcaaggatggatgcctgcaaggtctataattatgtctctgtctgtgtcttgagtaatagaagcttt

SEQ ID NO: 41726 - DNA, 443 bp, Gossypium hirsutum
  unsure (1)..(443): unsure at all n locations; Clone ID: LIB3189-017-P1-K1-A6
ccacgcgnccgcccgacgcttcccgcctcggcttcttcctcttattcttatgaagctctcctccaagtcctcctcgagattcaacagaatcctcacttttgcgtcctcgattctcgctacatccagcatctcttcaccttcggcgacctctccccacctcccctctcgcgtttcaaccacacttaccctgtttcttcacccaatgaatactctctctttttcgccaattgcgcccccgaaacccgcgtttcgatgaacgtccgaaccgagacctacaatcttgaacgcgacggttccaaagattacctctccgctggtctaacccaccttccttccctttacaccttcttctccatcctctacttagtcttcttgggttgttggaactacgtttgttataccaacatacgatccatgcaccggatccatttattgttgagcgg

SEQ ID NO: 41727 - DNA, 435 bp, Gossypium hirsutum
  Clone ID: LIB3189-017-P1-K1-A7
cgaggaggctgctccgcccgctttcgatgaggtccaacacccattgtttgtcacttggaagaaggttgtgaatggtggggagcctcgtctacgaggatgtatcggcacacttgaagcttgtcagttgattaatgggtttagggactatgctctgacgagtgctttgagggaccgcaggttccctcctattcaagctaaagaactgcctaacttagaatgtacagtttctattctgactgattatgaaacagctaataactaccttgattgggaggtaggaaagcatggcataattattgagtttgttgatgattataatacaaggcgaagtgccacatatttacctgaggtgccggcacatgaaggttggactagagtggaggcaattgactcacttatccgggaagcaggctttagtggccccataaccgagtc

SEQ ID NO: 41728 - DNA, 391 bp, Gossypium hirsutum
  unsure (1)..(391): unsure at all n locations; Clone ID: LIB3189-017-P1-K1-A8
gtcagccaattgtttgagctagctagctcttactcaaatggcaaccaaaacgatgatgttgcaaatattttcacttttcttctttttgttcagtatctgcaactccattttccttggtgctaatggagatgacaatggtggttggcaaactgcccatgccaccttctacggtggtgctgatgctaccggcacaatggggggagcttgtggttatggaaacctgtacagtcaagggtatggaacgagcacagcagctttgagcactgcacttttcaacaatggctngagctgcggtgcctgctacgagctccggtgcaacaatgatccttaatggtgcattagtcgaaccataaccgtgacagccaccaacttttgtccccctaactatgct

SEQ ID NO: 41729 - DNA, 399 bp, Gossypium hirsutum
  Clone ID: LIB3189-017-P1-K1-A9
ctctctcttctctgccgatttctccgttcttcaaaatttaagttttttctgctaaaaagttgctatgggtaaggagaaggttcacatcaacattgttgtcattggccatgtcgactctggaaagtcaacaacaactggtcacttgatctacaagcttggaggtattgacaagcgtgtgatcgagaggttcgagaaggaagctgctgagatgaacaaaaggtcattcaagtatgcctgggtgctcgataagttgaaggctgagcgtgagcgtggtatcaccattgatattgccttgtggaagtttgagacaaccaagtactactgcactgtcattgatgctcctggacatcgtgacttcattaagaatatgattacgggtactttttaagctgactgtgc

SEQ ID NO: 41730 - DNA, 419 bp, Gossypium hirsutum
  Clone ID: LIB3189-017-P1-K1-B1
ttaattcataaaccaatcttacaataaaacattaaaatccctccttcccttaaacctcccttcttcttcctcttctgtttcgagctgtgattttctatttttatttttgcaaaatagtagagagagatggcgccgaatgatcccaaacaaagcggtggtttctttgcgtccatcgctagcagtatatctaattttggtagcgccatgactaaatcagtcaacggtttaatgggatatgaagggcttgaagttgttaatccagaaggcgggactgaagatgccgaagaagaagcaaggagaggaagatggaaacaggaggacagggaaagttactggaaaatgatgcaaaagtatataggttctgatgttacgtcaatggtgacactttcagtacttatttttgagccaatgtcaatgct

SEQ ID NO: 41731 - DNA, 173 bp, Gossypium hirsutum
  Clone ID: LIB3189-017-P1-K1-B10
ccacgcgtccgtgcaggagatttgggaaccatgttcgtgaaaagggatcatgttcgagaagctcgctgtggaacgccgtcttcgtttaatccaccggccttagcgggggtgagcccaattagagcaaggggagatgaaatggacgttgatgaggaagaggaggatgtaggtga

SEQ ID NO: 41732 - DNA, 310 bp, Gossypium hirsutum
  Clone ID: LIB3189-017-P1-K1-B11
ctttgtttctttgatttgtttctaaggatttaatctctaaaccttcttcccatttcttcattacattgttcaagaacaaacaaaaaaaaaaagaagcaaaaaaacatggccaaagttctgttgttcattgctctatgtgtgcttccagctttggttagtgctacacgcattctgaataaccaattggtggttgaaggctatgtgtactgtgatacttgccgtgctggttttgaaacccctaagactagaaggctagctgatgccatggttaaactggtatgctccgacaggaagaccggcggagttgttt

SEQ ID NO: 41733 - DNA, 320 bp, Gossypium hirsutum
  Clone ID: LIB3189-017-P1-K1-B12
cccacgcgtccggcgggattacccgctgtgtttttgcatatcaataagcggaggaaaagaaacttaccaggattcccctagtaacggcgagcgaaccgggaaaagcccagcttgagaatcggtcgccatcggcgtccgaattgtagtctggagaagcgtcctcagcgacggaccgggcccaagtcccctggaaaggggcgccggataggttgagagccccgttgtgcccggaccctgtctcaccaagaggcgctgtctacgagttgggttgtttgggattgatgccttattggtcgggttttttttttccaaggcttttt

SEQ ID NO: 41734 - DNA, 399 bp, Gossypium hirsutum
  Clone ID: LIB3189-017-P1-K1-B3
ccgcacaccagtccagagtttctatcaggaagaatgtctgtccctttgctgtcaaagaagattgtgaagaagcgtgttaagaagttcaagagaccacaaagtgaccgcaagatctccgtcaagacaaactggcgaaggcccaagggtattgactctcgtgttaggaggaagttcaagggatgcactttgatgcccaacatcggttatggctcagacaagaagactcgccactatcttcccaacgggtttaagaaattcgtcgtgcacaatgtccaagagctagaacttctcatgatgcacaacaggacatactgtgctgagatagcacatgatgtttcgacgaagaagaggaaggaaattgttgagcgagcggctcagttggatgttgtcgttaccaac

SEQ ID NO: 41735 - DNA, 440 bp, Gossypium hirsutum
  Clone ID: LIB3189-017-P1-K1-B4
gtctattgaattctttccttcactttctctagaaaaagaaaatgtcttcaggttgcaattgcggatctaactgcagctgcggtgacaactgctcatgcagcaggaaccttaaccttggatactcggagaagacaaccagcactcagaccatcatctccggagttgcgccagtaaagatgacctttgagggaccagagatgagcactactgaatcaggacatggatgcggctgtggatcaaactgcaaatgtaatccatgcaactgctgaaaagcttgatgaaagccatagattatgaaaaaagaaagcagcaaaataacaggcctctgtaatgatttaatttcaaggatggatgcgtgcaaggtctataattatgtctctgtctgtcttgtgtaatagaagctttgtttgtggtaaaaataatgtataagccatttggtt

SEQ ID NO: 41736 - DNA, 323 bp, Gossypium hirsutum
  unsure (1)..(323): unsure at all n locations; Clone ID: LIB3189-017-P1-K1-B5
tttttggggagttttaagagctgtgttttgtnttgcactctatttttccttggtgttttttttttgaacatttttttagtttatttttcttggtttttttttttcttttttttttctatttttttccgttttttctttttttttcctcttttttttctttttttaattttttttttctttttatcttttttttttttttttttctttctttttttttttttttttttttattttttttttttctcttttttttttttttggttgttttttttttcttttttttttcttatttttttttactcttttttttcttttttattttt

SEQ ID NO: 41737 - DNA, 442 bp, Gossypium hirsutum
  unsure (1)..(442): unsure at all n locations; Clone ID: LIB3189-017-P1-K1-B6
tccaaacactagtagaaggtttagttttacaaacatgtctagttccggtgtccttaagttggtttccatgattctcatggtgtgcatgacgatgatggagtgcacccaaggcagccaaagccgccatcacgtgcagcgacgtggtgaaccacttgatcccgtgcttgtcctacgtacaaaacggcggtacacccgctgctgcatgctgcagtggggtaaaatcactctacggcgaggttcagacctccccggaccgccaaaacgtgtgcaagtgcatcaaatcggcggtgaacggaatttcgtacaccagcaataacctcaatctcgcagccggcctacctgctaaatgtggtctncaactcccttacagcatcagccccttcactgactgcaacaaggtgcaagtgaggttgatgatgatgatatggaaggagtggaagaa

SEQ ID NO: 41738 - DNA, 389 bp, Gossypium hirsutum
  Clone ID: LIB3189-017-P1-K1-C1
gagacgagtggcgatggaccacacatcacaagccgttctagcctctgtaaacgaggaaagaagtgaggaatcgattgtggaaagaagctacgaagtgagtaatcgatcttgctgaagaaatgccgaggcatccggattctgcacaatcgagcctttcggcgatggcacaaattgcggtggagcaggaaccgttccatccaaaaaaccagtaggctcataaccttcaactattaacctaacatgttgcttccactgaacaaacgtgcctacatttagtttaacagtctcatgacgcggaaacgagtgaatgagtctggcactagtaaacaccggacctcaatgttcgacggaagtagaatcaaaagccgtggtggtcatgatcacaggtc

SEQ ID NO: 41739 - DNA, 340 bp, Gossypium hirsutum
  Clone ID: LIB3189-017-P1-K1-C2
ttttctttctgctaataaatttttgtcaccagttttgttggaagacaggaaaacaccggtgttgtttgaaatggcagcttcgagaatggatctggacgggagaccaataaagccaattacgatatgcatgattggagcgggaggcttcattggctctcacctctgcgagaaattaatgtcggaaacgccgcacaaggtgctcgccttggacgtttacaatgacatgattaagcaccttctcgagcctgactcttttccttgggctggtcgtattcagttccaccgacttaacatcaagcacgattctaggcttgaaggcctcatcaagatggcagattct

SEQ ID NO: 41740 - DNA, 369 bp, Gossypium hirsutum
  Clone ID: LIB3189-017-P1-K1-C4
agaaaataaaaaatcgaacggcgataatctctggcgatggttcgaccgacggcgataggcaccacgaacagatcgtcatcagcgatgtcctccatgacaaccaccgtgacgatcgagaacacctcgggcgcgtcctcctcgtcgtcgcagcctcaagaagccctcgtcctcgaactccgccctaggaagaagaaagttacgtggaaagaaggcaccgtggacaacgaattcatgaacaagaagagttccaagatctgttgtatttaccataaagaaaagcccttcgacgaagacgacagtgatgacgacggacatgatcatcatcatcaccatcatccgtccaacggacatgattcctccaaggatggc

SEQ ID NO: 41741 - DNA, 368 bp, Gossypium hirsutum
  Clone ID: LIB3189-017-P1-K1-C7
tgaaaaatggctggttacagagcagaagatgtctatgattaccttttcaaagtagtattaatcggtgattcaggtgtgggaaaatctaatttactctcaagattcacaaggaacgagttcagcttagaatccaaatccaccattggtgttgagttcgcaactcgaagcttaaatgttgatggcaaagtcatcaaagctcagatttgggatactgctggtcaagaaaggtaccgagccataacaagtgcttattaccgaggagccgttggtgcactccttgtgtacgacgttacccgtcattccacatttcgagaacatttgagagggtggttaaagagaggtttaggggatcacaacaattttcctaa

SEQ ID NO: 41742 - DNA, 306 bp, Gossypium hirsutum
  Clone ID: LIB3189-017-P1-K1-C9
caaaactgtcggaggaggtgatgatgctttttacacctttttcagtgaaactggtgctgggaagcacgtccctcgtgccgtcttcgtggatcttgaacccactgttattgatgaagtgagaactggtgcttaccgccagcttttccacccagaacatctcatcagcggcaaggaagacgctgctaacaactttgcccgtggtcactacaccattggcaaggagattgtcgacctctgtttggaccgcatcaggaaacttgctgataactgcactggtcttcaaggattcctttgttttaacgcttg

SEQ ID NO: 41743 - DNA, 302 bp, Gossypium hirsutum
  Clone ID: LIB3189-017-P1-K1-D1
cactctcccaccccgaccgctattttgatcagactgttatcatgccgatcagaaacatagccgttggccggcctgaagaagctactcatccagatgctcttaaagcagctttagctgagttcatatcaacgttaatcttcgtttttgctggatctggttcaggcatggcttttaataagctgaccgacggcggtgcaacaactccggctggtctcgttgccgcctctctagctcacggatttgcgcttttcgtcgctgtctcagtcggtgcttactcttttacgtggttttccttattggat

SEQ ID NO: 41744 - DNA, 262 bp, Gossypium hirsutum
  Clone ID: LIB3189-017-P1-K1-D7
aaaaaagaagagagagagcgaagaaccaaatgagcagtggtaaaggaggggagctgatcccatcaagctccgaattggacttggatcgacccaacattgaagattatctcccttccggatcctccattcacgaggccctcggcaagcttcgcctatgcgatttactcgatatttctcctactttaactgaagctgctggtgccatagttgatgattcgttcacgcgatgttttaagtcgaatccttccgaaccgtggaactg

SEQ ID NO: 41745 - DNA, 168 bp, Gossypium hirsutum
  Clone ID: LIB3189-017-P1-K1-E1
tttttaggccttatactactgataattcagtgtatgttgccagaccatactgcatcttcttttctgcttgagaccctcatactgattatcaagaaatggaacctcaatacacaccttttaagattgcccgttttgtatgactacgggattggacgtacaaacatggag

SEQ ID NO: 41746 - DNA, 349 bp, Gossypium hirsutum
  Clone ID: LIB3189-017-P1-K1-E2
gagcagacagactagaaaagaagagaagatggatcattcattcatcatgatcaagcctgatggggtccaaagaggcctggttggtgaaatcattggcagatttgagaagaaaggcttctatttgaaagggttgaagctcatcagtgtggatcgatcttttgccgagaagcactatgctgacctgtctgcaaagcccttctttaatgggctcgtagagtacattatctccggtccggtcgttgctatgatttgggaaggtaagaatgttgttaccacaggtcgcaagattatcggtgccacaaacccatcttgttccgctccgggaacaatccgttgtgactttgcaatt

SEQ ID NO: 41747 - DNA, 399 bp, Gossypium hirsutum
  Clone ID: LIB3189-017-P1-K1-E8
tcgtggacgcgtgtgctcgtgacatgaccattttctttaaagaagagctgataatgtactcattcaagaccatcgacggtaggggcgccagtgttcatattgcagggggtccatgcattaccgttcagtatgagaccaactttatcattcatggactcaacatacatgattgttaacaaggagggtatgctatggtgagggcttcccctcgtcactttggttggtggttcatatcatatggggttggcgcggccttttctgtagattttttatgttatgatggcctttatcttattttttttttcaatatatttttttttacaccatttttctttctctccactttttttcttcacacttttctgttacctagatcctgttttttaaataatttttttt

SEQ ID NO: 41748 - DNA, 332 bp, Gossypium hirsutum
  Clone ID: LIB3189-017-P1-K1-E9
gagagcgagagacagcgttttaatggcggttgtttcgtcgtcactgaaagtgttggctaaggtctttgtttaagccaagatttgattagttatggctgcctcttcttctcttctctttacactgcttttggttcttctcactttctcagattcatcagtacaaaccctttgtcttgaagtttgtattaactatggttcttatgcaaacatttttccatctccagtccgtgtctcataccttctcagatccctcatatttcagcagagttataacctttatgatgctgatccaaattgtttttcttgctttcgccatcacaaatgttgtattc

SEQ ID NO: 41749 - DNA, 372 bp, Gossypium hirsutum
  Clone ID: LIB3189-017-P1-K1-F3
aacaacactaaaagaactacttcctgcaataataaatgggggaaacaagttagaccatattttgagagttctactctctcatatcttaggctctgctcagcgttgcccacctctttctggtgttgaagggtctgcggagtcccaccttcgtgttttaggtgaacaagagcgttggaatcttgatgtttcattaagaatgctggctaaattgcttccttttattcatcagaaagcaattgagacttgcccattttcctctgtttcggactcaaatcggacattgttgtccagctccatacttgaactggatgcagggggacatgttgaatggcctgcatttgaatgggtgcatgtcgattgctttcttggttg

SEQ ID NO: 41750 - DNA, 109 bp, Gossypium hirsutum
  Clone ID: LIB3189-017-P1-K1-F7
tgcagatgctgtcaggttcgatctctatctcacttgtggaagacgtatgccgagcccatgtttttctggctgaacaagaatctgcatcgggtcgatatatatgcagtgc

SEQ ID NO: 41751 - DNA, 320 bp, Gossypium hirsutum
  unsure (1)..(320): unsure at all n locations; Clone ID: LIB3189-017-P1-K1-G1
aaggaagcaacagggaaaaaangggcaccgccnccacccggaagggccccccactgatcggcaacagagaagctcgaattctcgtactgggtcttgacaatgctggcaaaactactattctctatcggcttcagatgggtgaggtagactctacaattccaacgaattgtgtttaatgtagagactgttcaatacaacaatatcaagtttcaagtatgggatttaggtgggcagacaagcatcaggccatattggagatgctttttccccaatacatcagcaataatttatgttgatgattaagtgacactgatagaatt

SEQ ID NO: 41752 - DNA, 258 bp, Gossypium hirsutum
  unsure (1)..(258): unsure at all n locations; Clone ID: LIB3189-017-P1-K1-G2
cgacagcaagcanaccngacgaagaaaacccaaagccaaagcgagggaaaggagaagacgnagaagacgnngaaagaagaanagagannatgacgttggctctctcttcggcaacgtctgcttcttatttcatcactcgacataatgcaaagccttctccgggtatcaaaacgaccttcatgactctgaaaccagcgtcgtttccttcccctttaaccgccgtcattgtgtctgccggggcgcggaggatcgtttctt

SEQ ID NO: 41753 - DNA, 439 bp, Gossypium hirsutum
  Clone ID: LIB3189-017-P1-K1-G3
agataagtgagtggcgaaacaagggtgttgaaggtatgtttgaggacatacatgagatggacactgccagtattgaggattctcatctagcttctattgactttaagggccatttgggcatgaggcttggcaaccatggagcgtcatcctcaactgggagcatgacatcactatcctctacgaatactccaagaggaagtcactttgattctttctggttggagcgtaacaatccttctgaactagaggatttgcaacagatggttgaccttgcaaatatagctcgttgtgtagcagacacagacttgttgaaagaagggtctcatgagttcttgcttgcatgcatgcaagacttgcaggatgttttacggcatagtaagcttaaagctcttgtaatagatacttttggaggccgaatagaaactcttctgagggagaa

SEQ ID NO: 41754 - DNA, 326 bp, Gossypium hirsutum
  Clone ID: LIB3189-017-P1-K1-G7
aaaaaaaaaatcacctactctctcactttgttctcttcttgttcctgtcctctttcaccaaactatcgccgacaacctctccaaaagaatggcatatgaagggattctgttggggatgggtaatcctctccttgacatttcgttagtcgtggacgaagagttcttgaaaaaatatgatatcaagttgaacaatgcatttttagctgaggagaaacaccttcccatgtatcaagaaatggcatccaagcccaatgtagagtatattgctggaggtgctactcaaaattcaatcaaagttgcacagtggatgctttaaattcctggtg

SEQ ID NO: 41755 - DNA, 406 bp, Gossypium hirsutum
  Clone ID: LIB3189-017-P1-K1-G8
atcacgaccttcgatactcttttctgtcttctttttcttttttttttttaatttgtgttttgattcttttttggcgtgttcttttcttcttttggtttgttattaattttttttttttttacaattttttaattgatttttttccctctttttttccttttactttttttttttactttccttcttttttttatgtgttttacttgtttttcgggttacctatttctgtgtgtttgttgttttttttgtattttttcctttgtattttttttattatgtctttttttttgcaatttttttttttttattttttttcttttatatttttttttttccgtgttttttttttttttctttttttttctttgattttttttttttaattttttttttttcgttatttttt

SEQ ID NO: 41756 - DNA, 323 bp, Gossypium hirsutum
  Clone ID: LIB3189-017-P1-K1-G9
gttctcaacttttaagtctttttcaggatgggctttactgacggaaccagctatggtgcttacacctatgatgctctggagagggagccttactggccatctcagaaactccggatttccatcactggtgccggcgggttcattgcttcgcacattgctcgacgtctgaagagtgaaggccattacatcattgcttctgactggaagaagaacgagcacatgacagaagatatgttttgtaatgaattccacctcgttgatcttcgagtcatggagaattgctttgaagtttccaaaggagtggaccatgtcttcaacctcgc

SEQ ID NO: 41757 - DNA, 414 bp, Gossypium hirsutum
  Clone ID: LIB3189-017-P1-K1-H1
ttgacatctactatgtgtgataagagaacatttgtctctgcggtcaagtatttccgcgagaaatacaatgtggtgcttaaatatgcatccttgcctgcacttcaaagtggaagcgaagctagacctgtctacctgccaatggagctttgtagtatcgttgagggtcaaagattcacaaaataactaaatgaacaacaagttagatctctgctgagagcaacttgtcaacgtccgaacattagggaggggaatattacaaagatggtccaggtcaataatttttgaggtggaggagcttgttactaaagaatttggaatgcatgttcgcaaagaacttgcattgattaatgcacgagttctgaatccttcagggcttaagtatcacgattgtggacgtggcaaatttgttaatcc

SEQ ID NO: 41758 - DNA, 270 bp, Gossypium hirsutum
  unsure (1)..(270): unsure at all n locations; Clone ID: LIB3189-017-P1-K1-H8
acccacgcgaccgcccacgcgnccgcggaaaaagacacagcgngcatacgnngcaacgccaagaanncaagagcgggggcanncccaagccgaagagcacaaagcagcagcgggcgccaccagaagccacgcaaagaagaacgagccgccggggaacacaccagcagaaggagaggacaacaccgcaaaggccacccaaaaaaagaaaaagaaaaagcagaggaaggcagaacgagcgaagaagaggcagaggagaaaaaaggaggaaca

SEQ ID NO: 41759 - DNA, 219 bp, Gossypium hirsutum
  Clone ID: LIB3189-018-P1-K1-A1
atttgaagccttcttcgaatttcctaatccatgatgcaaattttcgccaagaccctaaccggaaagactttcacattggaggtggagagttctgatactattgacaatgtaaaggccaagattcaggacagggaaggcatccccccagaccagcaaaggttgatcttcgctggtaagcaatttgaggatggccgaacgttgcttgatacaacattcata

SEQ ID NO: 41760 - DNA, 314 bp, Gossypium hirsutum
  Clone ID: LIB3189-018-P1-K1-A10
ctctctcaatctttatctccttcaattgtttgtttttgggttagaaagctctgtttttttattacccttttcatcaaaaagcttcaatgtttcaaccatgttgcttaaagcttcccctgctttttctttgttgaagaatccccaagttgaaactcgggttcctctgttttcaagaaacggttctggggttgggtctggggctgttgttgttttgtgctctcactttagtcagttatttggcattaacagtgtttatttttgcgtctttctggtctatatttatgttctttattcttttttctactttctccttt

SEQ ID NO: 41761 - DNA, 382 bp, Gossypium hirsutum
  Clone ID: LIB3189-018-P1-K1-A11
cccacgcgtccggtggatgacgatgatgaggcacatgaggaggaagatgggctcgggctctttgatgggaatgatgaagaggatgaagatgacttggaaaatgccagatatgaagattttttcagtagaaaaaagaacaagagttccaaggagaaagccaaatctagagacatgttggaagaagattcaggatcagatgattaacaagatgtggataagagaaagaatggcccttttaagcatgtaaaagaacttgacatacttagatctaaaatagaggaaatggagaaggccaacttggatccaaatgtttggacattgtttggtgagtgtaactcatcatttaggctaaatattagtgtaattataaagttattttatt

SEQ ID NO: 41762 - DNA, 509 bp, Gossypium hirsutum
  unsure (1)..(509): unsure at all n locations; Clone ID: LIB3189-018-P1-K1-A12
aaaaaaaaaatccatccatcatgtctccaatttatatctagctttatatccttagttatcatcgttaccatgggcgttgccgttgccggcgccgggaagacgcatgtcatcgatttccgatggcctaacctctacccagaaggcatggcctgggacccattagcccagcacttcatcgtcggttccctaaaccaccgtacaatccactccgtttccgacgcaggcgttgtcgaaactctgatctccgaccccaccctccctgaaaacgttactgttttaggtctgacggtagatttcactaaaaaccgccttctcgcttgcctccactctgtttcccctctccctccattcaacgccctcgtcgcctacgacctacgcacccgccgncgnctttttctctccctcctcccctccgaccccgattccctcatcgcctcaatcggccgcgggcgtgacgttgcgaacgacgttgccgtcgacttcaagggaaacgcttacgtcaccaactc

SEQ ID NO: 41763 - DNA, 445 bp, Gossypium hirsutum
  unsure (1)..(445): unsure at all n locations; Clone ID: LIB3189-018-P1-K1-A3
gagctatgctccttcccaactgtctctttcgcatggttgtttcagcaatcctgttgtcgaaccgccgctcagagaggcggagagccaagtaccgacttgtccacgttgttcgaacccacaaaggggccgatgacaaggcctaccgatgcgtgtttgaagaagaagacaaagacggcaaagttgggatatcattatctaaagatctcatggctatagctggagaggctntaaaatccaacattaccacaatagggcctttggtgcttccagggtcggaacaactcctatttcttctcactctgatcgggcgtaaagtcttcaaccccaagtggaagccttatatcccagacttcaagctggcgtttgagcacttttgcattcatgcttgagggcgagcagtgatagatgaacttganaagaacctgcagctggcagcaaaacacgt

SEQ ID NO: 41764 - DNA, 392 bp, Gossypium hirsutum
  Clone ID: LIB3189-018-P1-K1-A5
gggaaagtgggttgtgcaaggagctattgatgttgtcaatgttgccaatccttcagccgaagatgctgatgaggatgaaggtgttgatgacgaatctgtgaaggttgttgacattgttgacactttcaggcttcaggagcaaccccctttcgacaagaagcagtttgtcgtgttcatgaagaagttcatcaagaacttgacaccgaaactggatgcggaaaagcaagagtcctttaagaaaaacattgagggagcaaccatagttttgctttcaaaattgaaggaccttcaatttttcatcggagagagcatgcacgatgatggatgtttggtatttgcttactacaaggatggtgctgttgacccgacatttttgttactttgcgtatgca

SEQ ID NO: 41765 - DNA, 195 bp, Gossypium hirsutum
  Clone ID: LIB3189-018-P1-K1-B10
tttcaaataattttcttccaatgttaaaggagttgttaataggcataactgaggttccatttagatgtgcagaagaagtctctttgtgggttttggctgcaatgaaagatgttggaattgggttcttaattgaagtcggctttgctgctttcagcttcgtttttgccttgggtgcattcacagccgttcaattgt

SEQ ID NO: 41766 - DNA, 509 bp, Gossypium hirsutum
  Clone ID: LIB3189-018-P1-K1-B11
atttgcttgagcatcaatatcacatgatgatttattctgtgcctccaaaggttcctatggctccaatacaaaatgggatccatcccatgcccgttaacaatttaccaatgggataccctgtgctgcaacaacctcaatttccagctgcagggcaacctcatatggactccatgggtatatcaagctgtcatgttgtcaacggagtccctgctaccagcaactttcaacctatgcggatgaattctgggaatgacatggtgatggacagcaatgccagtgatgtaatacctgcagttccaccaaccactgccatgtcatccatgtcagagatgcctttgagctgtacatcagtagcatccagtgggagttttcccttcagtgcatcagatatgtcagggatgggagtagacacatcggcacttgattcagccttcacaacagatgtggcaagttcagtaggattgcagctgggacaggataatgaaactgggaattctagagattccttt

SEQ ID NO: 41767 - DNA, 479 bp, Gossypium hirsutum
  Clone ID: LIB3189-018-P1-K1-B12
gttaggccactttgatggcaaaaagggagatttagtctgacatgcagagaagccgaatcaaacagatagggtgatggaactgagcattcaaaaaatagaagcctagattaggctagagtacgatggagatgttggatataacagctagtttaattgaggaggatccttaaacagaggtgagtcttatagcgacaaaagaaagcttctttcaaggattggcgtgctcttgtgggattgctgcatatcacttcatgggctgctgatgataacctacttcaactatgctgagcttgattctcagcttcttacaaaggaacctcgctgcaatcttacgcatatctggcttggctcagctatattttggatcaggcagtagtgtacgcagtgtttgcgggaaacctagcggttgtggagcactcattcttgggattaaccggagaagagaactttcaatggcttaagtggtgcaataaatatac

SEQ ID NO: 41768 - DNA, 342 bp, Gossypium hirsutum
  unsure (1)..(342): unsure at all n locations; Clone ID: LIB3189-018-P1-K1-B4
tnaaattccgggttgaagaaggggtcgggtaagtgatacttgaagcccgtgatcgacttgggcgatgatttcgagactgactttcaggagttcaaagatgaagaatctgatatagatgattatgatgttgatgatgttttggctgatgtaaagcccttttcttttaacgctagaacgaatcctgtttctgctgtatcttatggttcgaactttgaaaagttcatgcagttcgatggttaagctgagaaatgttcgaatagaaagatggtagaaccagtttttgtggtattcgttagatcccatttgtgtaaatgggcttgctgaatatcctttgactctaat

SEQ ID NO: 41769 - DNA, 492 bp, Gossypium hirsutum
  Clone ID: LIB3189-018-P1-K1-B5
cattgcccatggttagatctaaactaaaaaaaattccaccctgttgtatatttgacaaaaagacccatcaaagaaaaaaaaacaaaaaaaggggaagatttgctgctcaaaacaggtatctgacacctccccaaagacataggggtgttagaatctggtctggaaaatcaaacaaagtttaccctgtccatttttttcttcgatgaatcctagaatgcaaagcaattattattaagtctttcattaattgcctcaaaagaaccattactgaattcatcaaaggaaaaaaggggtgacatatggataggttccctgatgttctgtgtggttggagctgggaggagaacaagttgtttgagctggctttagcagtggtcgatgaacaacaccctgatcgttgggaagtggtagccgccatggttggagggaaaaaaactgcagaagatgtgcataaacattatgtcatacttttggaggatttgcagtttatcg

SEQ ID NO: 41770 - DNA, 479 bp, Gossypium hirsutum
  Clone ID: LIB3189-018-P1-K1-B6
caagatcagaataagaaaaacgctgcttgcagtattcatcatccgataagccagaattagttgaaagggatgttaaggacaaggtggatgacaaagaagacaacagtggatttatagacaaggtcaagggtttcattcatgacattggtgagaagatcgaggaaacaatcggctttggcaagcctactgcagatgtagctgagattcacctcccttgtatcaatcttgagaaagcagaaattgtcgttgatgtctctataaagaacccaaacctctgttccaattcctctcgttgacattgactaccttattgaaagtgatggttgaaaactctcttcatgcttgattccatatgctggaaccattcatgcttattttgaggtgactgtcaataatctcattactttgatttatgatgattcaaaaagtcttttgatgacattattcctggctttttcatttcattatggctgatagtt

SEQ ID NO: 41771 - DNA, 429 bp, Gossypium hirsutum
  Clone ID: LIB3189-018-P1-K1-B7
gaaatttccaagttcttcttcaataccctcacatttcattcgatcaaaagaactcaaatctttatgagtccaccatgggaggaggaaatgcccaaaaatccaagatggctcgtgagaagaacttggaaaagcaaaaagctgccgccaaaggaagccagcttgattctaacaagaaggccatgaccatccagtgcaaggtgtgcatgcaaacattcatctgtactacaacagaagtgaaatgccgggagcatgctgaggcgaagcatcctaaatccgacctatacacatgttttcctcatcttaaaaagtagcacactggggaagtggagatggctttgaacatgcatctatcttgtcccattggtactgtatgagtaaccttttaaaatctctctaacataagccctattagctttcacttggtgattt

SEQ ID NO: 41772 - DNA, 470 bp, Gossypium hirsutum
  Clone ID: LIB3189-018-P1-K1-B8
gttttcaacagagcgttggggacttgaaagaagctgatttgaaaggaaagaaagtgtttgttagagtcgatctgaacgttccattggatgataacttcaacataactgatgacacaaggatccgtgctgctgttcccaccaccaagtatttgatgggtcatggctctaaagtcatcctctctagtcatttggatttcgcccggcattgaagaattagtcaagaagctgaaggcaaggaataccgatgtttatctaatttccaggggcttctgccaaatgatcaatcctgttgcatcaatccttggaattctacaagaaaacatttttgccaatcagctgctctttggaagttctggggagtttttgggattcgatgctaatgatcccacttcgaggagtggaagaaaagctacaggttgtcaactaaatagaaatgttaagggatacaaggaactagtcatgattggtga

SEQ ID NO: 41773 - DNA, 106 bp, Gossypium hirsutum
  unsure (1)..(106): unsure at all n locations; Clone ID: LIB3189-018-P1-K1-B9
cggaccgtgggtactactcaagcagcatttttttacagttgttttctggattaatcgatatggctagctcaagtccctgagcttgcatgtgtggcggngngtgcat

SEQ ID NO: 41774 - DNA, 140 bp, Gossypium hirsutum
  Clone ID: LIB3189-018-P1-K1-C1
ctctagtccgactttgtgaaatgacttgagaggtgttggatatgtgggagctctcgggcgaaattgaagtaccactacttttaacgtggttttacttattccgggaatcggaggcggggcacggcccctttttttggacc

SEQ ID NO: 41775 - DNA, 413 bp, Gossypium hirsutum
  Clone ID: LIB3189-018-P1-K1-C10
cccacgcgtccgggcaaggagggcgtcttggtatgatcatctcttccattgagcagaaggaagagagcagaggaaatgaggatcatgttgcacaactaaaggagtataggggtaagattgaagctgagcttagcaagatctgtgatgggattttgagccttcttgaatctcacctcattcctttggcctcatctgctgagtcgaaggtgttctaccttaagatgaagggtgattatcacaggtatcttgcttagtttaagactggtgctgagaggaatgaagctgtcgagagtactttgcttgcttacaagtattgttatgatattgcttttgctgagctttcttctacttatactattaggttgttgcttgcatttatcttttatgtattattctatataatttattacatt

SEQ ID NO: 41776 - DNA, 320 bp, Gossypium hirsutum
  Clone ID: LIB3189-018-P1-K1-C11
ctcagctcaagcctgaagaaattagtgccattatgttatgactttaatgaaccgggttcactcgctccgaccgggttgcacctcggtggcacaaaatacatggtgatccaaggcgaaccgggagctgttatccgagggaagaagggacccggaggtgttactgttaagaagaccaatatggccttgattatcggaatctatgatgaaccaatgacacccggccaatgcaacatgatcgttgagaggctcggcgattatcttctcgaacagggtttatgattctcttcagtgtgtgttcttaatttgaatgcatttctttt

SEQ ID NO: 41777 - DNA, 499 bp, Gossypium hirsutum
  Clone ID: LIB3189-018-P1-K1-C12
gcaaatagagaagaatttagaaagcaaagattattatactcgtcaatgtttctatttgtgttctctttatttctgttactggcatcctagtaaaagccgataatgcaccttctccatcgccaaagacaactcctgtgtctccggcgaaagctcccaccacttcttcaagtcctccaatcacatcgccttctaaatctccttcatcatcacctccgtcggcaactcctgcgagttccccatcgataacatcgcccccgcctgcaacaactcccactgctatgcccacaccttctcaatctcctactgccactccgcctgcttcttctagccccccggctcaatccccagcgactccatcaccagcggcaagttctcctccgtccatgactccagtcggtgctccacctgttgcggaaggtccggttggaactcccgagtcttctgccaatattccttctagttcagcgacgccagcggagagtcctgcgatttcccatcg

SEQ ID NO: 41778 - DNA, 505 bp, Gossypium hirsutum
  Clone ID: LIB3189-018-P1-K1-C2
aaaaaaaaaaaaaagaaaaaaagtttaaacaaaatttatgttgaaaaatgctcttttcatcgatcgccaaagagcaaccgcgaacccccgtcgatcgcaggagagagggaatcgggataaatggggaagaaaaggaagtcgatagcgacgagcctcgatgaggttgatcggactatgtacgcctccttttgcagcgccgctaactccttgtcttacctttatactcagaccatgaatcagcaaaaactctccttccaagctggcaaacgccatggccttgaaaaaatctatcagtggatatggagacaacaagagggaggatcaagagttacaacaatggatatccttagttaccttcatgaatgaactggaccattgtgaagagccatcaacgtcacctatagcacctagcgaacagcagtattcccagcctgcaatgccattcattgaatacctgtttcatggtctttacaggctcatctggccaaactgttttgctaggtaa

SEQ ID NO: 41779 - DNA, 244 bp, Gossypium hirsutum
  unsure (1)..(244): unsure at all n locations; Clone ID: LIB3189-018-P1-K1-C3
tattttttattatgnacaaacaatagcagagtgatataaaagatgattaatttcaggtgtttggtaagaacagtacaaacagccaaataaaaacatacattccaaaagtttacaattacccttcttattttgtcgagcaagcactaaatttgccaaacaatctcataattgatcatagactctacgtaggcaatgaatagcagtctgaacatgttgtgatttaaacaaaactaactccaatttt

SEQ ID NO: 41780 - DNA, 252 bp, Gossypium hirsutum
  Clone ID: LIB3189-018-P1-K1-C4
actactactccaagcaagcattttccttacaagtttgtttttcttgtgattaatcgatatggctagctcaatgtcccttaagcttgcatgtgtggcggtgttgtgcatggtggtgggtgcacccctggctcaaggggccgtatcctgtggtcaagtcacaagctccctcgcaccctgcattggttatttgactgggattggagctggttgcgtttccccatgtcgctgctgtggcttttaatttttcatttt

SEQ ID NO: 41781 - DNA, 244 bp, Gossypium hirsutum
  Clone ID: LIB3189-018-P1-K1-C5
cttcctttacctccgttcttttgccgtcgcattttttattctcagagatttgttcttttcgcttctttcgttatggggaagatcaagatcggaatcaacggatttggaaggatcgggcgtttggttgccagagatgctctccaaagtgaagatgttgagctcgttgctgttaacgatcctttcatcaccaccgttttcatgacctacatgtttaagtttgacagtgtttacggtcaatggaagt

SEQ ID NO: 41782 - DNA, 444 bp, Gossypium hirsutum
  Clone ID: LIB3189-018-P1-K1-C6
ataaactatttaaacataaagaatagaatttggttttattttaacaattaggttatttaacttctgaactgaaatttgaactaactgaatttaacaacctaaccaaaagcaaaccgaagagaacactactgtttgaatcagttttcagttttctgctagcctagaacagagtagtaggaggttcaacaatggttgcagactataagcacttcatccaaataagaatggcataaaatgaaattttaaaaataaataagcattttcatgtagttgtaaccttacattcaaatttagtttctttaccttcagctgataattttttcacttgacacataacattatattaaagcactgacagtttgttatccttattttattatcacataatagactttttttttcttgttttgttagtctgttcgttcggttttttaataggaactt

SEQ ID NO: 41783 - DNA, 425 bp, Gossypium hirsutum
  Clone ID: LIB3189-018-P1-K1-C7
cccacgcgtccgcccagtggaaatatcttatgatgtatttcaaacatcaaacatcgacactctcattgatctttcttcttatgatgcctggttttgccctttctgatgtcaatcaagacaaagcagaatgttctaatcagctagtcgggcttgctccatgtctcccatacgtaggcggagaggcaaaaacacccaccatagattgttgcagtgggctcaaacaggtgctggataagagcaagaaatgcctgtgtgtgttgattaaagataaagacgacccgagcctcggcctcaagatcaacggtactcttgcgggaactcttcctagaacttgttgagccagtgctagcatgacagaatgttttttcctgctgcacttggcacccatattccatgtagtcaagttttttggaaggatattaaaa

SEQ ID NO: 41784 - DNA, 161 bp, Gossypium hirsutum
  Clone ID: LIB3189-018-P1-K1-C8
gttacagttcccgtgttatcgacttgatccgacacatgtctaaggcttaagtgagtgagtgattgtgcttggtgtatccaagctttagcaattttaatttagaagagatgttatgagagaataaacgaattgtacggagcatatttttgtgtgaagaaggg

SEQ ID NO: 41785 - DNA, 474 bp, Gossypium hirsutum
  Clone ID: LIB3189-018-P1-K1-C9
atcccattcatgtcgctgcctccaatgactttgatatgaaaataaatgggattcttagcattatcctgcaagatgagggagattcattcgccaagagggctgaaatgtactatcaaaagagacctcagctcatccaaatggttgaagacttgcacaaatcctaccactccttagctgataagtacgagcagctgagatcccaactcaaccacggttctcatccaacactattatcgtcgttgtcaagtcctgtcaaccaagtccaaggacatgttgagttgaatgctgaagatcctgatcttgagaccgaattcgacgatgatgtcccgaatcatgtgtctagcaaggagtcaaagatgaaggcagaggataaaattaggcagggagagaaaaagaaaaggagcaatggcattggaatgcagcggaatacaagtgatggttatgaagcggccatgttggaaaatgagaagctgt

SEQ ID NO: 41786 - DNA, 487 bp, Gossypium hirsutum
  unsure (1)..(487): unsure at all n locations; Clone ID: LIB3189-018-P1-K1-D1
cgaatcccggtcgccacgcgtcggccgcctttttttttttttttgaagaaaagttttttatactgagagttngcagntnttatattattacatcactaacatgaatgcgagagcaaataaattcagagagcaacatatgaagaaacanaccttcatttcacaacttatagtggcattttctgaaacacaacatataaaaaccaaaatcattttcaccagccatgactgccaataggcaaccttcaatcttttcaaccgggccaccagcggtatccgggctacatccacctagacgcctagacggatgcgagcaccgttactcttttggccagggctccttggtgcctggtagactgttgttcctccacctgaacttgatgaatcacaacctggggaattttttgttgatgggttccattgggggtgcatgtggtacacgttgctgcttcataatcataggtccttggcttcgaaccttggctttggc

SEQ ID NO: 41787 - DNA, 436 bp, Gossypium hirsutum
  unsure (1)..(436): unsure at all n locations; Clone ID: LIB3189-018-P1-K1-D11
gaagaaggcaaatagacttgagaaagaaaaacagtctcaaaatgcagcagaagtcaggcttcctcatcctcttcctctccctcattttccttcctctcatcttctccgacgccagaaaggaggctcccctcggaggttggaggccgatcaaagacaccaaggacccacacgtgatggagatcgcggaattcgccgtcgaggagtataacaagcagtcaaatgggagtttaaagttggataaggtggtgaaaggcgagactcaggtggtggccgggacaaattaccggctgattttgcaggcgaagaaaggggcagtcgataacacgtatcaggctgtggtgtgggagaagttgtggctgaatctcatgaatctcacctnctttaaccttgtcaagggttagattgggatataaagttatttatggtcatatatgtt

SEQ ID NO: 41788 - DNA, 214 bp, Gossypium hirsutum
  Clone ID: LIB3189-018-P1-K1-D12
cccactcgagcaccaacgcgaacgcccacattatctcactcgccaacgtggctatttgagggggttggatttttgtgacgggcggggggagtaaaaacatattatgcaccatctccattgccaaagacaacaactgtgtcttcggcgaaagcacccaccacttattcaagaacttcaaacacatctttctctaaatctacatcaacattaccta

SEQ ID NO: 41789 - DNA, 336 bp, Gossypium hirsutum
  Clone ID: LIB3189-018-P1-K1-D2
atcgcgagcgcgcgccctactgggagactaatcgtttgatgttagctgattgtgccattgggttcggcaggaacgccattggcggaagagatggtaagatttatgtggtcactgactcgggcgatgatgaccccgttaaccccaaaccagggacattactgtatgcggtgattcaagacgaacctgtgtggatcattttctctcgtgacatgaccattcatctaaatgatgagctgataatgtactcattcaagaccattttcggtaggggcgccagctttcatattgtatggggtctatgcattacctttcttatgtgaccaacattatcattca

SEQ ID NO: 41790 - DNA, 509 bp, Gossypium hirsutum
  Clone ID: LIB3189-018-P1-K1-D4
cattctcaaccgccggcagttggcggctcttcctctgccattagaaaccgcccacgtacgctggcggaactaaccgtaccgcttcctcaacgaaccgtatccctccccgtccctcttccacttcctccggcttccaacgctgctcggtcaacctgctccaacggtaacgctaactctaaacaagtcaacttatcggaaatcgatcgggtcaaccgaataggaagcggcgcgggaggcaccgtgtataaagtcatccaccgtccttcgtctcgcctttatgcacttaaggtcatctacgggaaccatgaagagaccgtccgtcgtcagatccgtagagagatcgaaatcctccgtgatgttaatcatcctaacgttgtcaaatgccatgaaatgtacgatcaaaatggcgaaattcaggtcctattggaattcatggatgttggatctttagaagggactcatatatcacacgaatctaacttatcggttctagctcgacaaattctcaa

SEQ ID NO: 41791 - DNA, 405 bp, Gossypium hirsutum
  Clone ID: LIB3189-018-P1-K1-D5
gggatttctgtgcagttaaagaactttctgatatataactttagggttaaataaaaggaaaacaaattacgcattgtaaagggatggaagaaattgctttcttttagtgtgacagacaaattcttagttcaaaagcttgaagatttgcttgctttcacggcaacacaaggggagattgtacctctgtatatgtttgctgtaataaaaatgttagagaaattaggcgttattttgttttaacaatgttatctagtgtttttatgtttcgttcaattgtcacctactatatgaatattactatttttttttattatctttcttataatatgttattctactattagggcttgctccttctattgttccaatattactttcttcttttttcattcttcttttttactt

SEQ ID NO: 41792 - DNA, 337 bp, Gossypium hirsutum
  Clone ID: LIB3189-018-P1-K1-D6
cggacgcgtgggcggacgcgtgggtttcataatattatttactctaaatttaatctctcaacatctttcaaacaatggcttcttttggtgttgcttcttttttcatcgttttggtcgtggcatttggtgtatcaaacttggaagcatgtactcatgactcatagtgtcaattgaactgtgatcatttcggcctttgtgacttaaaaaccaattaatgtagttgcttgccagtgactgagccattactctttgttggtgttccgatttctaatgctatatgcttctcggtttacttttgtatgaattttgttctactttttgcttactttatatttct

SEQ ID NO: 41793 - DNA, 410 bp, Gossypium hirsutum
  Clone ID: LIB3189-018-P1-K1-D7
cttattttttacactgtttttcacggtggtggtgttttctatattactgttcgaaacaaagcgataagaggctatttttgctgggtttttgttaggggtatagtgtttgagagagaaaaatcagagccatagatttctaatcctttctctcttttcctcttttcttttttccgctagatctagcagtatctaagtcgattttcttttcttctcgttttgggttctctggaaaaggcaaaacggcagagaggaggctttgttgagcgttgttttcggttgcgctttggaagagctaatggaggttgattagtgaatatatgtcggctgagtttgattttggctttgattggggcttaattgtcagttctgtttttcatcttctacaacaactgtctttgctcgctttgttc

SEQ ID NO: 41794 - DNA, 336 bp, Gossypium hirsutum
  Clone ID: LIB3189-018-P1-K1-D8
cccacgcgtccgaattaatgcaggggacttggcatgtacaatccagacaatcgcatttctcgctgctgtatatggaaaagacgaggaatatggtgactccagattactgaaggaaaaccagattggacagaaaggacctgtattaataatctgtcccacttctgtcatctgcaattggaagtgtgaattctccagatgggcaccctttaatgtctctctttaccatgggtcaagccgtgaactcattcttgagaagctacaagctaatggagttgaagttcttggtaccagttttgacacattctgaatttatggaaatcttttgtcaggtatcaa

SEQ ID NO: 41795 - DNA, 369 bp, Gossypium hirsutum
  Clone ID: LIB3189-018-P1-K1-D9
gggcttgaaggaggaaggtgatggcagagatctagtgtttaaaatggaggatccaatggcaggatcaaatgatcctgatccttaacttgctcaaaatcttgaaattcagatagaattctacatcacctacaaccggggaagttctgttgtcaacatgcctgttgggaaggtgtttttaattttttttgtgttttgtttttttttttttttattatttaatttttattttttctttaatatttttttgtactattttattttttttttatttttttttttattttctctttttttatttattttttctttattttttttattcttttttttttattttttttattatttttattatttttgttttttttt

SEQ ID NO: 41796 - DNA, 334 bp, Gossypium hirsutum
  Clone ID: LIB3189-018-P1-K1-E10
atagatcacgtgaatgttgatatgagaatgggaaatggagacgagtggtattaatttgtagataaagttaatattacgtagtcgcataaagcggcatagtacacaacccacaactctggaattttaacatccatatttattctgtagctatcgttattttggcttccactagctggtgaactttccatgccaaaacttcacttgacgctgatgcagtcagtgctagggctgatcttgtaagggatgttgacaccgtactttgccttgatttcgattttataaccatatttttatgtcaaaaattcccttattcgtttttttgtatttatgttta

SEQ ID NO: 41797 - DNA, 495 bp, Gossypium hirsutum
  unsure (1)..(495): unsure at all n locations; Clone ID: LIB3189-018-P1-K1-E12
cccacgcgtccggcagagatccccctaaatttgctctcttctcaaagcatttttctttcatctctacttcatggcacagtctactgtatcccaggtttctgtagctgttcccgttggaaacgacatttctctgaggagatctgtaactaagaggaacattataagctttggtaacaagtcatgggcttccaccttgtcttttgatttgaaatcacgaaatgcacagaagaacaaaccgtacatagtatgcatgtcagtgcaacaagccagcaaatccaagattgcagtttcacctttggagttggagattgcaaaagagcccccactaaatacattcaagcccaaggagccttacacagctaccatcgtttctgttgagagacttgtcggtccaaaagcttcaggcgagacttgtcatattgncattgatcatggcggtaatgttccatactgggaagggcagagctatggtgatatccctcctggtgaaaattc

SEQ ID NO: 41798 - DNA, 133 bp, Gossypium hirsutum
  unsure (1)..(133): unsure at all n locations; Clone ID: LIB3189-018-P1-K1-E2
ccacgcgtccgcttcaacaatngcagcttataatttcagtcaaggattctatttctgacagtggtngataacacgggaggggggttaatgacacaagggggggggcatcctcaactaaaccaccaagtaatgc

SEQ ID NO: 41799 - DNA, 242 bp, Gossypium hirsutum
  unsure (1)..(242): unsure at all n locations; Clone ID: LIB3189-018-P1-K1-E3
cgcttccgcttnctttccaattcctttcctcaaagctttaattatcaaggaaagggctcctccctntctttccgacactatcatctccttgtgtggttccctttcttcttcttcttctcttcctcgacttgccccttcaattcctttctctgcaaattcgttccaagtcaaccccaagacgaatcctgacctgtcgtccaagacagggagatcttatgcctgcctagtctacatgccgaggc

SEQ ID NO: 41800 - DNA, 472 bp, Gossypium hirsutum
  Clone ID: LIB3189-018-P1-K1-E4
acagcatcatccattgattcccttcccttctgctccctccctcttccattaaaaaagaagacagaaagcagctatcaaaatggctactttgctagcggctgcaggtcgtagagcaactactctatctcgatccccggctctgtctcaagccgcttctctcattcctcgccgtggtcttgccggcgctgcggatcaccatggacccccgaaggttaattgttggcaagacccaatgaacccatctaaatggaaagaagagcactttgttattgtctctttatccggttggggcctgcttttctttagcggatacaagttcttcactaaaggcaaaggcaagaaggaagagaacatggtggaaacgacacattaatgaggttggagtttctaaattttacatatagtccatgaataatgtgttgctggaacttccatgtccttgggcatcatcttcacttttctggtttccttt

SEQ ID NO: 41801 - DNA, 509 bp, Gossypium hirsutum
  unsure (1)..(509): unsure at all n locations; Clone ID: LIB3189-018-P1-K1-E5
tggagatccaaaataggacacatgcattctaccattggaaccgcaatgatgatgggaaaaaagtggcaactgactcgtttgtattacacaatcagtactggtcaagcaatctgagacgaagaaaactgaagaagcatcatttgagtagcgtgcttaagagtattgcttcttattgagaagatgaactttcgactagagtatttcatctctggtacagatttggttgattaaatttcagtaagaagatgaaaatgccaaaattaatcaaatcaagtaagcaaagatgctaaggagttttggcattntcttctttttcttcgaaatcatgcttcaaaatgaactctttaaatggctcataaattgtatgctgtagctagaattatcactgttcatgaattaggtggatttacttcgattctaaatctctcttttcttttttggctacacccacagttcgggttaaaataaacaggtctgtgtaaagcttgctgtttgataatttctgaatc

SEQ ID NO: 41802 - DNA, 317 bp, Gossypium hirsutum
  Clone ID: LIB3189-018-P1-K1-E8
aggttgctcttggaacatctagctttcatccaaaaatggttctccaaaacgatatcgatgtgttgatatcctccagcggagcgggagaagaagaagcacaaactcaaacgtcttgtccagtctccaaattctttcttcatgtatgtcaaattccaaggctttttctacttatcttcagattttagccattcttatacactgatttcatgtttattatttaaattaatgaatttttttatttttttttattttcctctgtaatatttacttttttatttttacttatctattttttctatattatcattatatatcta

SEQ ID NO: 41803 - DNA, 394 bp, Gossypium hirsutum
  Clone ID: LIB3189-018-P1-K1-E9
agtcaactaggggtcaagtgcagtagagattcatgttcccgacaatggagagtttcgggttttgtgtccttatgcttacaatcgcaatggtggcatcacccgcactttccgatctggtcctttccaaagtcgatcgacgcatatatttgacatcacatattgttcggatttcttcaactatgaaggtggagaatgcaggttccgaaaaggagtccaaggttttgctggcttttcctgagcaacaagccaaaaatatggcatatttgattgctactccacatgaagggaaagggaaaggaaaaaaccctgttgttgttctccctgttgaggctgccaacctaatatacatgcttgctgctttgcattctatttagtatctttgtctaaggtttta

SEQ ID NO: 41804 - DNA, 79 bp, Gossypium hirsutum
  Clone ID: LIB3189-018-P1-K1-F1
gctgttgaagtagtaatatctatagcatacagagatggagtagcaaagaagcaagcaggtttgtttgttgatgtgggtt

SEQ ID NO: 41805 - DNA, 496 bp, Gossypium hirsutum
  Clone ID: LIB3189-018-P1-K1-F10
gtgctacaacagctgctggaagattggtggcttctcatggatttcttgaggctgtttggccttacagtggtcattatctaccaactgaagacaatttcaaggaattcattattttccttgaagaacacaatgtggatttaaccaacgttaagagatgtgcagtagatgagggctacacctcaaacaaagttgtcggctatgagtccaagcatggggtaattaaagatacaatggaaacagaaaaatcgagagattcaaagactgtagaggtcgatgatgagcccgcaaatgatgagtgcatcagaactgaaagtcttgaagttagcatagacagcagtgcagcacaagcattcaacatggccaaacctttgtcttgcaagtggacaagtgggattggtcctcgaattggctgtgtcagagagtacccaaaagaactgcaattccaagctctggaacaagttaacctgtctcccagagtcacccctggtcgctttgg

SEQ ID NO: 41806 - DNA, 477 bp, Gossypium hirsutum
  Clone ID: LIB3189-018-P1-K1-F11
ttcatctctctctctatctttctgtatctctttgagttacttatttttggttctctctccggtttcacctccgttcacttcgaaaaatggcctctcacattgttggatatccccgcatgggacctaagagagagcttaaatttgctttggaatctttttgggacaagaagagcagtgccgaggatttgcaaaaggttgctgctgatctcaggtcatccatctggaaacaaatggctgctgctgggatcaagtacatcccgagcaacactttctcttattacgaccaggtgctcgatgcaacatcgatccttggagctgttccacctagatatggctggaacggtggagagatcggatttgacacttacttctcaatggccagaggaaatgcctttgtgcctgccatggaaatgaccaagtggtttgacaccaactaccacttcattgttccagaattgggccctgatgttaacttct

SEQ ID NO: 41807 - DNA, 373 bp, Gossypium hirsutum
  Clone ID: LIB3189-018-P1-K1-F12
gtttggccactttgatgggaaaaaggaaaaaagaggcagaaatttagagaagttgattcaaacagaaagggtgatggaactgagcattcagaaaatagaagccttgattaggctaagtacgatagtgatgttggttttaacagcttgtttaattgggttggattctcaaacaaaggtcatcttctacgttcaaaagaaagcttctttcaaggatttgcgtgctcttgatggattgctgtatatcacttcattggctgctgcttataatctacttcaactatgctgctcttgattctcagcttattacaaaggaaccttgctgcaatcttacgcatatttggcttggcttcgttatattttggatcaggcagta

SEQ ID NO: 41808 - DNA, 302 bp, Gossypium hirsutum
  unsure (1)..(302): unsure at all n locations; Clone ID: LIB3189-018-P1-K1-F2
cccggtcgaccacgcgtccttttatctattattntattttatatttttagtttttaatatattttggaactggttattgggggtttgaataaactatcctaaaccttggggcttattaactaaagatgacattttggtatcttgaactatttaattttataatattttatgtttagtacccaccaaagattatgtgatgtaagctggttgtttaggttgctttccgttccccctttagatcttatagttggctccttgttgcttgtctcccaaattaatatttcatgtagccactccagtgt

SEQ ID NO: 41809 - DNA, 243 bp, Gossypium hirsutum
  Clone ID: LIB3189-018-P1-K1-F3
tttcatcaagggctattatttctatagtccaattctgaactgctttgtactttatattcaagcgggtcgtaggactacgtggccaagcatctgacatttatagtgcaacagctgtcagtttacattagttactaaaatccatccaacatctagtttatcagctagcatttgcaactaatgttccaataggatggtgactttgttaatgtcaatgttgaggaacatacaactgtgcaatatacc

SEQ ID NO: 41810 - DNA, 349 bp, Gossypium hirsutum
  Clone ID: LIB3189-018-P1-K1-F4
aggaaatgggtttttgcccttgttttggttggaccaaagtcaagaagctgaagggtgatgacaagaaagaacttggcagaaaatgcaagcctcaattgtgttctggagttggttcagtaggatcaaaaagcattgcaggcttaagaaaggagtcatctgctacaactgatgaggctaatgatgacaagagggctcacactttcaactatcaacaactagcaaatgcaacacaaaatttcagaaaagaatccttgatagggcaaggtggatttggggctgtttataaagggcaattagaaagtactggtcaggttgtagctgttaaaccgctttattagattgtgtttct

SEQ ID NO: 41811 - DNA, 502 bp, Gossypium hirsutum
  Clone ID: LIB3189-018-P1-K1-F5
ctaatcttgccgctgtgtctgcaatacaaggtgaacttgagcgggcccaccattttgtgacacaagcgttgtccctggtaccaaacagcagcaaagccactatgactgcaatttacgtcgatctcatgctcggtaagtcacaagaagctctgcccaagttaaaacattgtagtcacgtcagattccttcccagcagtctacagttgaataaatcctcttaattgttgtgtgggtggttacaaattcgaccgggagtggaccaccacacggtagttagccagatagatcatcaatccttttagaggatttgtatcatatataatatagttcaaattcagataataagttttttggctttttcttcttccttttaaattttccacatctagggttcatttttcagtgatgggggctgattttccacctgtgaatttgagattatgtagtagtttccattcaggcttattttgggttctagtggctaaatcctctttgtatttta

SEQ ID NO: 41812 - DNA, 446 bp, Gossypium hirsutum
  Clone ID: LIB3189-018-P1-K1-F6
atcatccttgagcgtgtgtcaaagctcataactttaattttttgcacaaccagatgtagactcagaatggataccagttagggcaacaattcctccagcttgatctttcatgagacgttggtagaggtctcaacctgttacagggcgttttttgttatgctactatatttccgctacgtaggacttcttctgagctgactacatttccatcgaccctgtcaattgctgcatgtccgtactcggactaggactgttatttacctaactacaatatatattctcatatcttgtcagtcttatacttttttgctttcttatgattattgtttatgttacatattctttaattagttttactaattttttattatttacattttaggtttttttttaatagttttatttatattttttctttttttatttcttttttctttttaactttt

SEQ ID NO: 41813 - DNA, 424 bp, Gossypium hirsutum
  Clone ID: LIB3189-018-P1-K1-F7
cccacgcgtccgatttatatatcttgtgttctctagtattggtaggactggttttttggtgttttaattaactgtcctgaaccttctttctctatcacttaagcagtatcttggagtctgaactaatgtagtttcaagtttgatgtttcagtacccaccaaagattttgtgatgtaagctggttgttttaggttgctttccgttccccctttagatcttatagttggctccttgttgcttgtctcccaaattaatttttcatggagccactccagtgtttctttttagttattgtgtttcccttttttctaagaatgctgattcatctgaaactatcttgtgggttttatagcaatgttcgggggaaagagtgacttgggcaaatggacatgatgttgatgttgtggctgttgatgctgtttga

SEQ ID NO: 41814 - DNA, 452 bp, Gossypium hirsutum
  Clone ID: LIB3189-018-P1-K1-F8
caagcgataaggtcactttggctctgtactatgaaactttatgcccatattgtgccgactttatcacaaatgaccttgtaaaggtcttcctcagtgatctgtataccattgtcaatctaaaattagtcccttggggcaatgctgacattcttggcgatgaaccccattgccagcatggagaagatgaatgctacttaaatactatacatagctgtgtcatctactactggcctgatgtgaaaaagcactttgattttattcgctgcacggagcaacaaagctcaaagaaacggctggttaagaacagagcagcaatgtggaaacaatgcagtgaaaagctgggaatgagtgctcacagaatcaacaaatgctatacttctggatatggacttaagcttctgctacaatatgctaatgagactgcaaagctaaagccaccccatgagtatgtg

SEQ ID NO: 41815 - DNA, 380 bp, Gossypium hirsutum
  unsure (1)..(380): unsure at all n locations; Clone ID: LIB3189-018-P1-K1-F9
cccacgcgtacgntaatctgagcgggcgctctttttttttatgtcccataaagagccgactttagcacaaatgaccttgtaaagggatttctcagagatcagcactccattgtcaaactacaactagatcctcggggcaatgctgacattcatggcaatgaaccccattgacagcatggagaagatgaatgctacttaaatactatacatagctgtgtcatctactactggcctgatgtgaaaaagcacttagattttaatcgctgcacggagcaacacagctcaaagaaacggcttggtaaaaacagagcattaatgtggaaacaatgcattgaatagctgggaatgagtgctcacagaatcaacataagctatacttc

SEQ ID NO: 41816 - DNA, 508 bp, Gossypium hirsutum
  Clone ID: LIB3189-018-P1-K1-G1
accatttgtctcaaaccctaaccaaaggcaaaaggaaaaaaaatggcagaaagaggcggaggtgaacgcggcgctttcaggcgtggctttggtggtggtagaggtgaccgtggtccaagaggcaggcgccgcggccgcaaggacgaagaggaaaaatgggtacccgtcacgaaactcggccgcttagtcaaagccggcaagatcacatcccttgagcaaatctacctccattctctccctatcaaggagtaccaaatcatcgaccaactcgtcggcccttcactgaaagacgaggtcatgaagatcactccagttcagaaacaaactcgcgccggtcagcgtacgcgcttcaaggccttcgtcgtcgtcggtgacggaaatggacacgttggactcggtgtcaaatgtagcaaagaagttgcgacggctataagaagggcgatcatattggctaagttgtcagtgataccggttagaagaggttacttggggaataagatcggaaaac

SEQ ID NO: 41817 - DNA, 246 bp, Gossypium hirsutum
  Clone ID: LIB3189-018-P1-K1-G10
cccacgcgtacgctaatcggagcggccgctttttttttatatggcggaaaaaataaagtatgagtagtaatataaaaagtgtgtgaagatatatatgtaaacactagtaatattcaaaacttctcaatattcaggttgtcttttatctgaattctagactcaaagttcaactgtgttaggccgaaattttggtgcgttacaaagaaagcagactgtaaattgaagattggtagaggcaaattttat

SEQ ID NO: 41818 - DNA, 421 bp, Gossypium hirsutum
  Clone ID: LIB3189-018-P1-K1-G11
aaggtgtcttaataaacgccttctttcttcttcttcttattcctttattgctttttagaatttttcttaatcgaaaatgagagagtgcatttcgatccacatcggtcaggccggtatccaggtcggaaacgcttgctgggagctttactgtctcgagcatggaatccagcctgatggtcagatgccaagtgacaaaactgtcggaggaggtgatgatgcttttaacacctttttcagtgaaactggtgctgggaagcacgtccctcgtgccgtcttcgtggatcttgaacccactgttattgatgaagtgagaactggtgcttaccgccagctcttccacccagaacaactcatcagcggcaaggaagacgcagctaacaactttgcccgtggtcactacaccattggcaaggagattgtc

SEQ ID NO: 41819 - DNA, 369 bp, Gossypium hirsutum
  Clone ID: LIB3189-018-P1-K1-G12
tcggtgcatgaatggacgcaaaaaaatgtttttatttttacttggcgtttgttttctagacacttttggtcacttgataatgacagcgggcatttccatcaccagttcctcccagaagtttacgaaaaaccaactctacttcaactgtctacgaccttccttctctcgcctcattacctccacttcacttacgaccctcctaacactactctgtccgtcgccttcatctctactccttccaaactcggcggatggattttctgggccataaatcccaacgccaccggcatgggcggttcccaagcactcgttagttacaaaaactgcatcaccggcgtttgctgtcgtgcatacttttgacatcagctc

SEQ ID NO: 41820 - DNA, 407 bp, Gossypium hirsutum
  unsure (1)..(407): unsure at all n locations; Clone ID: LIB3189-018-P1-K1-G2
tagcatgcaatgaagggtgttaggcggaacctgttttctttctcccaaggaaggaagatggtccaactaccgnnngactgggaacctttctggtcttaagggccggactccatggcttccatgttcatgcccttggggacataactaacgggtgcatgtcaactggaccccattttaatcctgctggcaaagagcatggtgctcccgaagatgagaaccgccatgctggtgatctaggaaatgtcactgttggtgatgatggctgtgctagcttctccatcaccgacaaacagattccactcacaggcccaaactccattatcggaagagctggagttgtccatgcagatcccgatgaccttggcaagggcggccatgagctcagcaaaagcacaagaaatgctggc

SEQ ID NO: 41821 - DNA, 466 bp, Gossypium hirsutum
  unsure (1)..(466): unsure at all n locations; Clone ID: LIB3189-018-P1-K1-G3
cggacgcgtgggcggacgcgtgggcttgaaatagatcagaaccttttcttcttcttttattttccctttcttttccaataactctcatttgtttaggttagatctgcgagagaaaaaaagagagcgagaaatggggagaatgcgacagtatttggcaatgaaaacggatcctgttgctcaagaattgatcagttccgatatcaaagaactcaagctggctgcgattaaattgatggatgatgcaactaaacttggaggtcttggttttggaacttcttttcttaaatgggtcgcctcattttctgctatttatttattaatcctggaccgaacaaactggagaacaaacatgttgacctcactnttggtaccttacatcttctntagtcttccttcaggattgttcagatttctaaggggggatgttggaaaatggattgccttcattgctgtccttttaagactg

SEQ ID NO: 41822 - DNA, 453 bp, Gossypium hirsutum
  Clone ID: LIB3189-018-P1-K1-G4
cggaaaaccggggccgaccacacgcgtccgcccacgcgtccgattttctctcctttaagtaatttattttctggcctcttctaatctttaatatgggcttttttttttaagaaaaaagttgtaaatccttcttgctgtttttgtgccatgggtgttgcagttctaaaaccagaagactgtttaaagctacctaatcccatgaaacaacctcaaaacccttggcataatcctaatcccaacactaaccgcacgaatcgttcacaagggaaccgtaagaagcgttctcccaacacctccccttcttttcgtcccaccgtcggtcgccccaaagctccggccaagaatctcgtcatgggtcaagtcaagatccttaaacgcgtgcgagatcttaaactatctaagcctgataagccttttaggtttgcgaaggaaaatgttgatgtatatctggtt

SEQ ID NO: 41823 - DNA, 455 bp, Gossypium hirsutum
  Clone ID: LIB3189-018-P1-K1-G6
atctctccaaaaaaaaatggcagcttccaacgtttttattttattagcctgcttcatttccttgggtttttcaagcatggaggttagcctagcaacccgaaatcttcagcaagtgccacctgcatttccaccaataccattgccacctccattgtcgccaataccattgtcaccagtaccattgctacctccattgtcgccaataccattgccacctccatttttaccagtaccattgccatctgcatatttaccggtaccattgccacctccgatgtcaccacttcctttaatcccagaaccaccacctattccttcaatcccagaacttagaactaccaccacttcgtaagttgcccaacatactttcattgccttcaatcttagatctaccatcattttcagctcaaccctgcataccttcaatgccttagattccgaagcttccaacaatt

SEQ ID NO: 41824 - DNA, 440 bp, Gossypium hirsutum
  Clone ID: LIB3189-018-P1-K1-G7
ctacattcttcttcctccataatcaaaagctctctctcaaattttttaaaaaaacttaaaaggctcccttttttttaaagaaagatttaaatggccgtcgattccgcaatctcgtctcctttgggtccgccggcatgcgagaaagatgcaaaagctttgcgattcatcgaggaaatgactcggaacgccgacccggttcaagaacgagttttgtccgatatcttaactcaaaactcccaaaccgagtaccttcgaaggttcaaactcaatggggcaagcgatcgtgactcgttcaaatccaaacttccggtcattacttacgaagaccttcagcctgaaatccaacgtatcgctaatggcgaccgttccgtcaatttatcagctcacccaatctcagaattcctcaccagctcccggactttagctggtgagaggaaact

SEQ ID NO: 41825 - DNA, 466 bp, Gossypium hirsutum
  Clone ID: LIB3189-018-P1-K1-G8
aaaatgtcagtcaccttgaaatctccgccttcttcatttctttcatcttctttacctaaatcaagattgggatttgcaaatgggtcatcttcttcaactctactcttcaaattcaacagatcttttccagttcttcgtgcctcttctggttcctcttcttctgttgacactggtttgagtactgaattggatgctgtgtctactttcagtgagatagttcctgatactgtgatctttgacgattttgaaaagtttccaccaactgctgcaactgttagctcttcattgttgttgggcattttgagccttccagatactatttttagaaatgctgtggatatggctatggcggattcgacatgttctccgctggacaatcctgaactgaggttgtcttgttttgttaacaaggctttagtaaatgttggtggtgacttggcaaagctagttcctggtcgaagttcaa

SEQ ID NO: 41826 - DNA, 369 bp, Gossypium hirsutum
  Clone ID: LIB3189-018-P1-K1-G9
cagagctttcttcgacgagcagccatttgtaatcaatcatgggtcattctaacgtctggaactctgaccccaaaacctacggccctggctctcgcgcatgccgagtgtgtggaaaccctcatgccatcatcaggaagtacgggctcatgtgttgcagacagtgcttccgtagcaatgccaaggaaattggattcattaagtaccgctgaggaatgtttatatggctagaagttggaaacactttttagctagtatgaacctttgtttcgaaattgtagcaacttttaagataacattgctgttttattctaatttagcttaaaagcttgaaggctctgtttttgcaattggataactttgttgcttttt

SEQ ID NO: 41827 - DNA, 316 bp, Gossypium hirsutum
  Clone ID: LIB3189-018-P1-K1-H10
gatagcacgagccgtagtgcgccgattgcatcattttgaaatggcggtccctaagctgtctaagaagattgtgaagaagcgtggcaagaagttcaagaggccccaaagtgaccgcaagatctccgtcaagacaaactggcgaaggcctaaaggtatcgactcctgtgttaggaggaagttcaagggatgcactttgatgcccaacaatggttatgggaccgacaagaagactcgccactaacttaccaatgggtttaagaaatatgaaggcataacgtccaagagctggagctattcatggagcacaacaagacat

SEQ ID NO: 41828 - DNA, 405 bp, Gossypium hirsutum
  Clone ID: LIB3189-018-P1-K1-H4
ccacgcgtacgcgtacgcgtgggcagtttcgtcggaaaaaaatggcttcatttttcttggcgtctcttttcttcacctgttgggcgctgcttatttcaccggcgatttccctcacctgttcctcccagaagtttacgaaaaaccaagtttactccaactgcctcgaccttccttctctcgcctcttacctccacttcacttacgacccttctaacactactctctccgtcgccttcatctctactccttccaaacccggcggatggatttcctgggccataaattccaacgccaccggcatggccggttcccaagcactcgtcgcttacaaaaactccaccaccggcgttgtcgtcgtgcatacttttgacatcagctcttattcttcaattgtgcccgaaggat

SEQ ID NO: 41829 - DNA, 245 bp, Gossypium hirsutum
  Clone ID: LIB3189-018-P1-K1-H6
aaattttcccacgctttctggctttctcgagaacaaagaaaaaaaacatgagggtacagcagaggccgatccgcgcgctgtcgatgtgggtgagacgacagccgccgaaggtgaaggcttttttgggggtagtatcggggatggcagcgcttgttttttttcgattcatcgtacacgaccatgacaatttctttgatgcctgccaggctgtccactccattggaatctttgtccttatttataag

SEQ ID NO: 41830 - DNA, 339 bp, Gossypium hirsutum
  Clone ID: LIB3189-018-P1-K1-H7
ggcgactgaactggaagagctaataggcttcctctttgccccctctcctcctgtgaagaaggctggtgttgatattgtgcgtgatttaacaggctctgaggacggcttgcactctctttcaaactatgccaacaccgtgcttccatcgttatctaggcttttgagtgatgataaggaagtttcagaaccagctgccgaagctcttgtaaatctgtcccaaaatgcgggactggctgctaagatggttgaaatggggttgattaaaatagcctaggatatgttgtttaagctaggctttataattacacaattgctggctatgctcctggtttatttaac

SEQ ID NO: 41831 - DNA, 483 bp, Gossypium hirsutum
  Clone ID: LIB3189-018-P1-K1-H8
caaataccagccaaacatcgtcgtcttctacactcttctctggtaagttcatcgaaagatcaaatcaagatccctgccaaaatgaacgacgctgatgtatccaagcagatccagcagatggtgagattcatccgccaggaagcggaggaaaaggctaacgagatctctgtttccgctgaagaggagttcaacatcgagaagcttcaattggtggaagcggagaagaagaagattaggcaggagtacgagaagaaggagaagcaagttgaaatccgaaagaaaattgagtattcgatgcagcttaatgcatctaggatcaaggtccttcaggctcaagatgatgtggttaatgcaatgaaagaatcagcatccaaggaccttctcaatgtgagccatgatcaccatgtttacaaaaggcttttgaaagatctaatcgttcagagtttagttagactgaaagagcctggagtcctacttcgttgt

SEQ ID NO: 41832 - DNA, 153 bp, Gossypium hirsutum
  Clone ID: LIB3189-022-P1-K1-A10
gacccacgcgtccgctcatcctggacttctttatttgcatctggtgccaaacatgataattgagctcttgcagctgcatgttcaggttcctttattgttggaaaaaacgcatccaagtccagtttctgtccttgataccttggtttatagaga

SEQ ID NO: 41833 - DNA, 455 bp, Gossypium hirsutum
  Clone ID: LIB3189-022-P1-K1-A11
ggcgtgccgagacatgagcggaaggaggctaatttatgtaaatgccgagaagaggttggaggagtggtaatttaatgaagaatgggttaatttaaaaaatatatattaaaattttattaaaaattatttaaattttttgtttttttttttttattatttatttttattttttttttttttttttttttttatttttattttattttttttattttttatttttatttataattttattttatttttttattttattaatttaatatatatttttatattatattaatttttttttttttatgggtgtggattatattattattattatttatttttttttaattttttatatttttttatttttatatatttatttttatttatattttatatttttaaattatttttttttattattatttttttatatttttatttttatattatttaatttt

SEQ ID NO: 41834 - DNA, 230 bp, Gossypium hirsutum
  Clone ID: LIB3189-022-P1-K1-A12
ctcgaaatcttcttcattctcattctctctccactgaactcttgctaaacggtatcgttttagtcagtctttcatcaatggcgaaagaaccagttcgcgtcctcgttactggagctgcaggacaaatcgggtatgctcttgtacccatgattgctaggggagtcatgttgggtgctgaccaggccgtgatcctttacatgcttgatatcccatctgctgcggatgctaaa

SEQ ID NO: 41835 - DNA, 145 bp, Gossypium hirsutum
  Clone ID: LIB3189-022-P1-K1-A3
aaaaccaaagcttactttaagcgggtggaggtttcatacaaaagaaggtgagaaggaaagactgactaccgggctaggattcgcctaatcaatcaagacaagaataagtacaacactccgaaataccgattcgttgtcccaattt

SEQ ID NO: 41836 - DNA, 613 bp, Gossypium hirsutum
  unsure (1)..(613): unsure at all n locations; Clone ID: LIB3189-022-P1-K1-A4
cgcgacgaccgccctttttttttataaaaatngttaaattaccagagaataaaaaaacttgttgatattttaaaaaaattggggtaaaaaaaaataaaaactttataactataatctattaaaaatcttattatatatataatttattatttattaaatataattttattatcttttaaataataatattataatataatatattattatatctattaattattattaattaaataatattatatttttattataaatttactaatataatatatttatatattataattatatcatataataatattatattatttattattatattttaattatattattctaaattaatatattaacaatttgtatatgtaaatatatatattatattataaacattataattcattaaatacattaatatataataataattatagatcattcatttattatttcaataacttatatatatatatatatattatatcatatatatttattaatatatatataatatatatatatcttttataacaattatattataaatattattataattatatattaataataatacataaatattaaaattaatatttactcatat

SEQ ID NO: 41837 - DNA, 256 bp, Gossypium hirsutum
  Clone ID: LIB3189-022-P1-K1-A5
aaggaagacaacgatggtgtctttgaagttacagaatcgtctcgccgctagcgtcctgaagtgtggtccgttcaaggataggcttgggcctaataaaatcaatgaaatctccatggtcaactccaggcataatgttaggaaacttgttaaggatgtttttagtatctcttaatcttttcaatttttattctctatctttttctctacaatataattatatactattataataattattcaactttatttatttatt

SEQ ID NO: 41838 - DNA, 156 bp, Gossypium hirsutum
  Clone ID: LIB3189-022-P1-K1-A7
caaccttatttcttgtacaacttacccaaaatcactgggtgttatttataaaacacaagcgcccccaacaatactaaaaaataccgaagacctattgcctaactcaccctttcatactaattacctaattaattctacaacgttaacatccttttc

SEQ ID NO: 41839 - DNA, 81 bp, Gossypium hirsutum
  Clone ID: LIB3189-022-P1-K1-A8
cccacgcgtccgtaaaaatttgtttctatcagtattgctttgcattgctattgcaagagttttgggttaattttaatagaa

SEQ ID NO: 41840 - DNA, 459 bp, Gossypium hirsutum
  Clone ID: LIB3189-022-P1-K1-B4
ctttgcttcaagagagaaatgagtcctagccaggattactgtgatgattactacaaatacatgtatccatgtgcccctggagctcaatactacggccgtggtgctttgccaatttactggaactacaactatggagctgctggcgatggtataaaagttgatttgttgcaccaccctgagtatctcgagcagaacgcaactattgccttccaggctgccatctggaggtggatgaccccaatcaagaagaaccaaccttcagcacacgacattttcgtgggtaactggaaaccaaccaagaatgacacagaggaaaaacggggtcctacttttggctccaccatgaacgttctctacggagattacacttgcgggcaaggcgatatcgatcccatgaacatcatcatctcccattaccttcattaccttgacttactaggtgttgggcgagaggaagca

SEQ ID NO: 41841 - DNA, 429 bp, Gossypium hirsutum
  Clone ID: LIB3189-022-P1-K1-B5
cataaccaattctctgttttttcttcccttttttttttcaaaaacaatttagtaaaacatacacaaatattctctcttttttgcagttttttctttaaaaaaacagtttcaaggattgtttttgtgttgtttctctcccatgatcacaaaaatggcttgatttgcggttgatcctgcaaataatcgcatttcgttctcttttttaacagagattcattaatcaataaataaccatcagttttataaataaaaaaacgttataacgaggccttgcttttctttgttttacaaacccctttagccttacctcaagcttcatcccctttatatttctttgaaattttttcattaaaaatcctaacaaaagcatgggtaattctgggtttttagcaacattattattaccgacattcctttgggttcatctct

SEQ ID NO: 41842 - DNA, 287 bp, Gossypium hirsutum
  unsure (1)..(287): unsure at all n locations; Clone ID: LIB3189-022-P1-K1-B6
catacgcgatcgagtgctactactccaagcaagggtgntacttacacgttagttaaacatgcgcttaaatgatatggctagcgcagtgtcctttaaaaaagaacaggtggaaggattgtttttgtgttgcttctctcccatgatcacaaaaatggcttgatttgcgggtgatcctgcaaataatcgtatttcgttctcttttttaacagagatgtagtgatcaataaattaccatcatctttataaatttataaacgctttaacgaggcctttgctttactattgat

SEQ ID NO: 41843 - DNA, 466 bp, Gossypium hirsutum
  Clone ID: LIB3189-022-P1-K1-B7
atcaatttgagtactgtttcttgttctctcttttttggcatcccctgcaatggcgtctgatcttgagaccaaagccaaagaagccttcatcgatgaccacttcgagcttgcgctccatctctactctcaagccatccaacttaatcctaaacacgccgagctctatgctgaccgtgctcaagccaacatcaaactcaataatctcactgaggctgtggcggatgcgaacaaagcgattgagttggatccttccatgtctaaagcttatctgcgtaaagccactgcctgcatgaagcttgaagagtatcaaactgctaagtctgcactggagactggcgctgctttggcacctgcagaagcaagatttttcaagttgattaaagaatgtgaagagcgaattgcagaagaaactggtgatgtatcaatgcatatgccagagcattggcttaaaatggatgtcccgcaa

SEQ ID NO: 41844 - DNA, 270 bp, Gossypium hirsutum
  Clone ID: LIB3189-022-P1-K1-B8
gtccatttacttcaagcaagcatttcccttttttggtgtttaaccaacaaaggcatctgagtgggagactttagccaaagaggggggcatcgataaccacttcgagctcgcgctccatctttactctcaagccatccaacttaatcctaaacacgctgtgctttatgctgaccgtgctcaagccaacatcaaactcaataatctcactgatgctgtggcggatgcgaacaaagcgattgttttggatcctttcatgtctaaagcttatct

SEQ ID NO: 41845 - DNA, 74 bp, Gossypium hirsutum
  Clone ID: LIB3189-022-P1-K1-B9
cacttctcgtgcagcgacggcatagctctggggaggagtcacctaaattcaagggactggccgaagatatacaa

SEQ ID NO: 41846 - DNA, 67 bp, Gossypium hirsutum
  Clone ID: LIB3189-022-P1-K1-C11
ggtttgatgaaattgtcaaggaagtctcttttttttcttaagaaagccgggtaacaacacctggggg

SEQ ID NO: 41847 - DNA, 341 bp, Gossypium hirsutum
  Clone ID: LIB3189-022-P1-K1-C12
accacgcgtccgaccgactcattaggcatatcaaccggccccttcttgtttttctctaaaccaccacaacccgttgaaggccaaccttgcatgggcggccatcctgataaggcaccttatgttccttctcagacctatccaccaaacctgcgcctgccaccctcttagtaacccaatgggccttctttcttccaacagtattttgggaatccacctcaaatgcatgagccaccatttagaaagcctggtctaggatatttttctgaatatgtcccacaattcttggtcctattgacaatattcttatggtggattacctttacagtatggtatggtcttcc

SEQ ID NO: 41848 - DNA, 297 bp, Gossypium hirsutum
  Clone ID: LIB3189-022-P1-K1-C3
cccacgcgtccgcaaaatcatccatgggaatttcgttgcctccttgctatcttactctttttctggcgccttttcatctcattcaacagtgtcggccatcgaaacctcgttttcgccaacgatgccctgattgaagcccaatgtcacaatgctgaagtccccgaaacctgcataaaatgcgtaaaatctgattctcgaagtcaattatccaataaagttggcattgctgccattattatatcttgttttatcaacaatagccacgatcttgttatacatcatgacgactcttgcttt

SEQ ID NO: 41849 - DNA, 452 bp, Gossypium hirsutum
  Clone ID: LIB3189-022-P1-K1-C4
atcgactctaaatttcatctctcaacatctttctttcatatggcttcttttggtgttgcttgttttttcattgttttgatcgtggcatttggtgtatcaaactcggaagcatgtactcatgattcggagtgtcaattgaactgtgatcatcttggtctttgtgacttaaaaaccaataaatgtagttgcttgccggtgtctgagccattaccctttgatggtgtaccaatggcgaatgctaaatgcagcacggatgacgattgcaaggatgcttgtccaccaaattgcacagctaaatgttttcattgcttttgcttatgctattgtagtgcttgaaaaatatattgtttttcattcaaaggactttgaatttaatcctttcaataatatgtactaagaaattggtacataaaatgaatgaatagataaaggtgttgtgagaataatttttt

SEQ ID NO: 41850 - DNA, 224 bp, Gossypium hirsutum
  Clone ID: LIB3189-022-P1-K1-C5
gatcaaatccctaacttaccactcttctcgctatgcaccccactggaacccctaaattaatctttcctgaacaacatccaaataccttactttctcatttttcctttttccccatcccaacccaatatggaacaagaaactcggcaaaagatcgaggaaacagtgaaggatatgctgagcaaagccgatatggaagagatgactgagtttaaagtccgagtcac

SEQ ID NO: 41851 - DNA, 464 bp, Gossypium hirsutum
  Clone ID: LIB3189-022-P1-K1-C6
caccgactcatcaggcatatcaaccggcccctttttttttgtactctcaaccaccacaacccctgcaaggccaaccttccatgggccaccatcctgatgaggcagcttatgttccttctcagacctatccaccaaacctgcgccagccaccctctcagcaacccagtggccctccttcctcccaacagtattttgggattccacctcaaatgcatgagccaccatctagaaggcctggtctaggattttctactggatatgtcccacaatctgggcctagtgaacaatatgcttatggtggatcacctccacagtatggcagtgcctccccaatgaaattgcagcagctcccctcttctaccggaagtggttatccgcagcttccaacagctagggtactaccacatgcattacctactgtatccgggggtggtggtgaatcagcttcttctggatctggaaac

SEQ ID NO: 41852 - DNA, 261 bp, Gossypium hirsutum
  Clone ID: LIB3189-022-P1-K1-C8
atttcctctttgggtccaaacttggaggcggctggatataaaacaggatcgggaggatgttgtgtttttcttgccaatatagacaccaaatctgatgcgactgttaatttcaatggcaattcataccatttgcctgcatggtctgtcagcatcttaccagactgtaagaatgtagttatgaataccgccaaggttaactctatgagtgtgaattcaagcttcaagcatgaatatttgaatacaaatgctgattcaactgac

SEQ ID NO: 41853 - DNA, 217 bp, Gossypium hirsutum
  unsure (1)..(217): unsure at all n locations; Clone ID: LIB3189-022-P1-K1-D1
cccacgcgtccgcttgaatcagttgatgatgangataactatgatcagggttttaaaagtgatacaaaagttgatgaattggaagagtgaattggagaaagtttttggatcagcttctaaattcattgaacaagaatgagatttgggtatagggaatgatgtttaaatggaactatatggacttcacatgggtgcaacataatggccttgtcatgaa

SEQ ID NO: 41854 - DNA, 311 bp, Gossypium hirsutum
  Clone ID: LIB3189-022-P1-K1-D11
ccacgcgttcgcaacaaccacatgacccatcctttttggtgatgttgctagggcacagtggctggtacacaagggacaaggaggtgcaagtgaccattgcctacaaccatttcggagagggacttatccagagaatgccaaggtgtatgcatggatatttccatgtggtgaacaattactacactcactggtgaaatgtatgttattggtggaagttctaactttatatctcttctgtttttctattctttatttgattatttcattatatctattatgaattatgatgtatttctatttgttttatttta

SEQ ID NO: 41855 - DNA, 385 bp, Gossypium hirsutum
  Clone ID: LIB3189-022-P1-K1-D12
aactctccagttctcaacgaattttgtgtatttcaccaagaagaagaagaagatgtcgtggcaaacatatgtagatgagcacttgatgtgcgaaatcgatggcaaccatctctcctccgccgccatcgtcggccacgatggcagcatttgggcccagagctccaatttccctcagttcaaacaagaagagattaatgccatcatgaatgactttgctgaacctgggtcacttgctccaactggattgtaccttggtggcacaaaatatatggtgatccaaggcgaacccggatatgttattcgagggaaaaagggatctggaggtattactatttaaatgaccaatatggctttgctcatcggaatctacgatgagccaatggct

SEQ ID NO: 41856 - DNA, 301 bp, Gossypium hirsutum
  Clone ID: LIB3189-022-P1-K1-D2
cggacgcgtgggctcacacggacgggagggagacgtgaaaaggaagacaacgatggtgtctttgaagttacagaagcggctcgccgctagcgtcctgaagtgtggccgtggcaaggtttggcttgatcctaatgaaatcaatgaaatctccatggccaactccaggcagaatgttaggaaacttgttaaggatggttttgtcattcggaagcctaccaagattcactcccgatcttcgtgcacgcagaatgaaagaggtcaagagaaagggtcgtcattctggctatggtaagaggaaggg

SEQ ID NO: 41857 - DNA, 400 bp, Gossypium hirsutum
  Clone ID: LIB3189-022-P1-K1-D3
aagatatcataaaaaggaaaaaaaaatgaagctctttgttctaactttgctgctttgttctcttcttctatgttcttcaggttttgaaccaacaatggctcagcctcgttcacctttttgtgaagggaaatgcaaagggaggtgcaataaagcggcggtttgggatcgatgcttcaaatattgcggcatatgttgcgaggagtgtaaatgtgttccttccggtacttatgggaacaaacacgagtgtccttgctacagagacaaggtgaataacaagggcaaacccaaatgcccttgaaaatgaaatatattcgagttcgggatttcatcaagcttaaagatcgaggacgaagaggctatatatttatatatgcatgctgatgggggtaattataaaaat

SEQ ID NO: 41858 - DNA, 407 bp, Gossypium hirsutum
  Clone ID: LIB3189-022-P1-K1-D4
attcttattccttttatatttttcctctccaatttgccgtcactttcccgagaaaatgagagaaatccttcacatccaagttggccaatgcggcaatcagataggagccaagttctgggaagtcgtatgtgccgaacatggcatcgattcaacgggtcgatatggtggtgactcggagctccagcttgagcgaatcaatgtttactacaacgaagccagttgtggccgttttgttccccgcgcagttttaatggatctggaacccggaaccatggatagcgtaagatccggtccttacggacaaattttccgacccgataacttatttttcggacagtccggtgcgggaaacaatctggctaagggacattacactgaatgagcggaacttaccgatttccgttctt

SEQ ID NO: 41859 - DNA, 265 bp, Gossypium hirsutum
  unsure (1)..(265): unsure at all n locations; Clone ID: LIB3189-022-P1-K1-D6
tcctctttcaattaaaggtggtagcaaattgctgngttcnttcaatcttttctgccttgggaacgtgtgagttgttacatgcgattctgtgcaccaattgtttgtacaatctccgtgcttaagggtgctagatttgggcatgaataattcatgtgataatttgctttccatgatttcaagtaaattatgagatttgattcatttatagcatcttatcttatttttgatgtaagaatattcatttatctacctttatatctatatt

SEQ ID NO: 41860 - DNA, 210 bp, Gossypium hirsutum
  unsure (1)..(210): unsure at all n locations; Clone ID: LIB3189-022-P1-K1-D7
cnagnacnagaacgcgagcggccgcncgctttttgnccggccaccaccaccacnaccacgagggccnagaccaccaagcgccgccgccgacacaacgcccgggcaaacgccacccacgacggaccaagccggaggacgacgcccgggcaccaggaacgacccaacgggcaccaacgcaacaggaccccaccgccgccaggccaaccccga

SEQ ID NO: 41861 - DNA, 381 bp, Gossypium hirsutum
  unsure (1)..(381): unsure at all n locations; Clone ID: LIB3189-022-P1-K1-D8
tcctagctctcactcttacttactctgatttngtcntgcaaaattagttccttgctttctcacgttttcatcctcagcattctgggtgttattgctgggcaagccattgcagcacgtgacatctcgaagaatgatgatcaaatgaaacagcctgaatatctaaaacatgaccgtagtgtgctcattccaggccttggacgagtgttgctgccaccagttttcaaacattacaatccacacactatcggcactggcacccacaccggcagcagtggcggtcactttggcagcacaattggccgaaatcgccagattccaggtggtgatttcacattttgttccaaaccccttgtttttttatgtgtccaaatttcatgtatg

SEQ ID NO: 41862 - DNA, 89 bp, Gossypium hirsutum
  unsure (1)..(89): unsure at all n locations; Clone ID: LIB3189-022-P1-K1-E10
gattaacaggcaagtaacttttgctaagatangttatgggcttgtgaagaaagcctatgagctgtgccgttcttagagatacagggggc

SEQ ID NO: 41863 - DNA, 235 bp, Gossypium hirsutum
  Clone ID: LIB3189-022-P1-K1-E12
acaaagtcaaggtcaacggttatcatcagtgactgataaaggcttcagaagcacacgatcacggatgattatgatgcatcaggcggaatcacaggaatctgtaggttgagcagagatcagagcctgtaatttatctcccacactaactcatatgtaggtattttataaaatatctcatgggtacctgtactcctttgatatttaagatatagtcttcggtctttaaaattgtatc

SEQ ID NO: 41864 - DNA, 125 bp, Gossypium hirsutum
  unsure (1)..(125): unsure at all n locations; Clone ID: LIB3189-022-P1-K1-E2
cccacgccgtccggngaaaaacgcagtctctcaactcaatctcncgtgtttttttgcgataaacagaagagcttaatggggagataagcaaaaggccgtgggggggcaggaggccgagagaagag

SEQ ID NO: 41865 - DNA, 446 bp, Gossypium hirsutum
  unsure (1)..(446): unsure at all n locations; Clone ID: LIB3189-022-P1-K1-E4
gaatcggaggcggggcacggcccctctttttggactcaatgccggcttcggccggccgatccgggcggaagacattgtcaggtggggagtttggcttnnncggcacatatgttaaaagataacgtatgttttctaagattaatttaatgagaacataaatctcgagtggaacaaatatgtataagcttcacttatttttatttatattactaattataacttttaatatattttgttaaatatactataaatctattgaatttttgttgttataaaattatttttattgattttaaaaatattatactttttattgtttttttatatattttaaaattattatatcttcagattaaattataattttattaatataattctttcataatatatttatttatattagtatgtatattatttatttatattatatattttatattatt

SEQ ID NO: 41866 - DNA, 370 bp, Gossypium hirsutum
  unsure (1)..(370): unsure at all n locations; Clone ID: LIB3189-022-P1-K1-E5
gaagagaagaggaaaaacatgggcgccaaaggtnttttatgtccggaagaagcacaaacgaacaggggggaaaataaaataaaaaaaatggggggagtcaaaaaaaaaaacagaaaaaaacacaataaaatataaccaccaaataaaaaaacaaaaaaaacaaaaaaaaacaaaacaaatacagaaaaaaaaaaaaaaaaaaataaaaaccaaaataaaacacaaaacaataaaaaaacaaaaatcagaaaaaaaaaaaaaaaacaagaaaaaaatacaaaaaaaaacaaataaccacaaaaaatacacgataaaaaaaaagaaaaaaaaaataacaaaacaaaataaaaataaaaaataaaaataaaaa

SEQ ID NO: 41867 - DNA, 465 bp, Gossypium hirsutum
  Clone ID: LIB3189-022-P1-K1-E6
cctatttttaccagcgccactttctctgtacatatattgctttgctctttttttctaactacagatcaagaaccaaaaaggataaaactatggctgcggctgtcctccggaaccctaattcgaggcgccttttgtcattctcttccccgatttactggtcctgtcgtggctttatctctgcttccaacttctcagtttccgatcttctctctggaaatgaggaggcggcagctcacgctaacgctaacccttggtggagatccatggctactttcactcgcacaaaacctcatgttaatgtaggaacaattgggcatgttgatcatggaaagaccacactgactgcagcaatcacaaaggttctggctgaagaaggaaaagccaaggctattgcctttgatgaaattgacaaggctcctgaggagaagaagagaggaattacaattgccacggctcacgtggagt

SEQ ID NO: 41868 - DNA, 195 bp, Gossypium hirsutum
  Clone ID: LIB3189-022-P1-K1-E7
gatagaaaaatggagaacgcaatcaacagacaattagttttgcttaatcatttacaaccctcttgtcaatctcatcaatcatctgctgctattctgtttccttcaaactgcgcggcgggggatagcgctgcctatcaccggacggctgcttttggggatgatgttgtgattgttgcggcatgttacactgctctt

SEQ ID NO: 41869 - DNA, 319 bp, Gossypium hirsutum
  unsure (1)..(319): unsure at all n locations; Clone ID: LIB3189-022-P1-K1-E9
atagcatcagtcaaatccctacctggcatctttgttgatcctcccatccaanccctaaatttttgaatgatcaaagaaaaaattgggtaattcttcatcgatcccatgcaatttctttgagaaaatatatctaatacccagaacaaaataaaagaaatgtatagcattttcaaagaacaagcgatagagtatgtgaagcaagcggttcaagaagacattgctgggaactatagcatagcttttcctttatacatgaacgcgctcgagtatttcaagacccatttgaaatacgagaagaaccccataatttgggtggcta

SEQ ID NO: 41870 - DNA, 350 bp, Gossypium hirsutum
  Clone ID: LIB3189-022-P1-K1-F10
tcttctctcaactccgcgccgtttcgacgattcttctttcaagatccaccacacttctctggggctcctatgactacggagtgggcgaaggttcggccaccaggtaactcgtttctttctttctattctttctctcttttccaagaactaaagaacataaaaaaaccagaaaagaaacgggtaaccaacaaaatggaaaagaacccaaaaaacctttttgtttttcaattatcttttgtattctgaatgactatgtgtgttttgcattcaatctttgtgtaaaaagaaaaaaaaggtcctcaaacaatacagaaaatggggttttattgccccataattacatcaatttt

SEQ ID NO: 41871 - DNA, 221 bp, Gossypium hirsutum
  Clone ID: LIB3189-022-P1-K1-F12
aaacacctcattttcctgagaaaaaaaaaattatatgaagcgtaagtgaagaaggagaagaggaaaaatgaaaatggcggaccagcttaccgatgagcagatctctgagttcaaggaggcctttagcctctttgacaaggatggcgatggttgcattactaccaaggaactgggtactgtaatgcggtcactcggacagaaccctactgatgcagtacttc

SEQ ID NO: 41872 - DNA, 356 bp, Gossypium hirsutum
  Clone ID: LIB3189-022-P1-K1-F3
cggacgcgtgggcggacgcgtgggttttgggtgctttatctgaccaacaataacaccaccaactcctcatcgttatcttgaactcccaggattaatcctgtaatagccaaggcactgcgtactgaagcagctgccacagcacagcccataaaaatggtgaaagctatcagggttcatcaacttggtggacctcaggtccttaaatgggaggatgtggaacttggggaacccaaagagggtgagatacgtattaaaaacaaagctattggactgaatttcatcgatatctattttcggaaaggagtttataaggctgctaccatgcccttcactccaagaatggaagctgttggaga

SEQ ID NO: 41873 - DNA, 340 bp, Gossypium hirsutum
  Clone ID: LIB3189-022-P1-K1-F5
aaaagtggaaggctctctgaaccttacaagggtattggtgattgtttcaagcgaacaatcaaggatgaaggatttggttctttgtggagaggaaacactgccaatgttattcgttatttccccactcaggccttgaactttgccttcaaggattacttcaagaggcttttcaacttcaagaaagacagagatggttactggaaatggtttgctgggaacttggcatctggtggtgcagctggtgcttcttcccttctctttgtctactccttggattatgctcgaactcgtcttgcaaatgatgcaaaggcttcaaagaagggaggagagagacaattta

SEQ ID NO: 41874 - DNA, 187 bp, Gossypium hirsutum
  Clone ID: LIB3189-022-P1-K1-F6
aaaagtggaaggctctctgaaccttacaagggtagtggggattgtttcaagcgaacaatcaaggatgaaggatttggctctttgtggagaggaaacactgtcaatgttattcgatatttccccactcacgccttgaactttaccttcaaggattacttcaagaggcattttaactttatgaaagaca

SEQ ID NO: 41875 - DNA, 175 bp, Gossypium hirsutum
  Clone ID: LIB3189-022-P1-K1-F8
ctcgttgctgttaacgatcctttcatcactactggatacatgacctacatgtttaagtacgacggtgttcacggtcaatggaagcgtcatgagcttaaggagaaggactcaaagacccttctttttggtgaaatgcctgtcacagttttcgatatttgaaactctgtggtaatcc

SEQ ID NO: 41876 - DNA, 399 bp, Gossypium hirsutum
  Clone ID: LIB3189-022-P1-K1-F9
gttgtctccgaggctgatatctttgtcaccactactggtaacaaggacatcatcatggttatacgcacatgaggaagatgaagaacaatgccattgtttgcaacatcggtcacttcgacaatgaaattgacatgctcggtctcgagaattatcctggtgtcaagcgcattaccatcaagcctcaaaccgataggtgggtcttccctgaaaccaacaccggcatcattgtgttggctgaaggacgtctcatgaacttgggttgtgctactggccaccctagctttgtcatgtcatgctctttcaccaaccaggtgatcgcccagctcgagctgtggaaggagaaggcaaccggcaagtacgagaagtaagtgtacgttttgcctaatcacccttgttgag

SEQ ID NO: 41877 - DNA, 263 bp, Gossypium hirsutum
  unsure (1)..(263): unsure at all n locations; Clone ID: LIB3189-022-P1-K1-G1
cttttcaactctcaaaccttcaagtctcatttctgtcnttttctctttctctcactagagaattcaagtttttgtttggccaaagagaaaataattaatgatggtgggaaaagatcaagatctgggtttaagtctaagcttgagttattctcaaaatcatcattctcttcatttaaatctaggcccatctctcgttccatcttctgctaatcaatgctactcttcttctgattcaaacatggaatctttactgtccgagactt

SEQ ID NO: 41878 - DNA, 179 bp, Gossypium hirsutum
  unsure (1)..(179): unsure at all n locations; Clone ID: LIB3189-022-P1-K1-G10
cttaaccttctccgtagcttaattgaagggtttgtgnctgtctcaaaccctcaaacagctgtggtgtctctaactaacgttaatgggagtagaaaagccaacggggtgttaaggaaaccgatgatgcttatgagattgacggtgagagctgtttccaaagaggatatctatcgggggtg

SEQ ID NO: 41879 - DNA, 276 bp, Gossypium hirsutum
  unsure (1)..(276): unsure at all n locations; Clone ID: LIB3189-022-P1-K1-G11
cccacacatacaattacccccacaccaaccttctaccccaaagnttgnntccccccccccccccaacccctcgctcgcgtcttcacccccccgccgccccccccccccccccccccaccccaaacccccacccaccccccccccccctaccccaccctaccccacccctcacccccttcacccccccccccccccccacccccaccccacccccccccccccccccccccccccccccctccctccctcccacccccaccccctccccccaccccc

SEQ ID NO: 41880 - DNA, 112 bp, Gossypium hirsutum
  Clone ID: LIB3189-022-P1-K1-G3
gaactttttagggactttatttcaataaatggattttttttctcaattacttagatcgaaactcgaacgagagagaaaaaaaaggagcgttcttttctcaacagagggaaag

SEQ ID NO: 41881 - DNA, 398 bp, Gossypium hirsutum
  Clone ID: LIB3189-022-P1-K1-G5
aattgttgcgagggaatctccctaatttttgactgattgccatccccgatcgactccgatttggactgctctccaacaagctattgcttcagcggcgaatgcagagagcgcagcagaataaacgactttgacaaggattgagttgttcaaatacccagggcactctcgaaaaagatggtccaatgtttcagctcgtgcttcacaacggggacatgttgtgatgtttgaaagcttcctgtgctgcatattcacttttgtaggcaagaagttccatgataacctccatattgtaattacaattttagctggtagatttaggctccaaagttttttgtagaatttcctataagataagggtaatgcataagcactagggtcttcattcgaactctggaata

SEQ ID NO: 41882 - DNA, 260 bp, Gossypium hirsutum
  Clone ID: LIB3189-022-P1-K1-G6
catacgcgaaggggcgagagaacatcccacaatactcgtattgcgcacggaagccgatcgactgtgtgttttactgatgtacaacaggcgatccctaaaatggcgaatacggagagcgcaacagaataaacgacttgaacacggagtgagtagaccaaatacccagggcacttttaaaaaagatggctcaatgtgtgaactcgcgcttcacaacggggacatgctgggaagtgtaaaagctatctgggctgtatatttac

SEQ ID NO: 41883 - DNA, 200 bp, Gossypium hirsutum
  Clone ID: LIB3189-022-P1-K1-G8
atcaaaacaagggcacaatcttgtgggtttttttaacagaaacagggggacattatgcaatcccaaaaaaatactcacacgaccaaaccatacacagacttaacttatcaatgcaagagaacaaaaggaaatggaaaataaagcttcattttaaaagcagaaacgccaattgaaacaaacacaccctctctcccctcaca

SEQ ID NO: 41884 - DNA, 232 bp, Gossypium hirsutum
  unsure (1)..(232): unsure at all n locations; Clone ID: LIB3189-022-P1-K1-G9
gaaataagcaaaccggacagtctgaagggtcgtgntcgtggagtttagctctcgagcaacggttgaaattgttatacagagctgggatggttctctgatgccaaatacagagcagcctttccatctgaactgggcctcgttcggtgtgtacgaaagacgatctgtatgctggtttttatctgtctatattcctagtagacatgagattccaatgtaacttgagacgtgtttt

SEQ ID NO: 41885 - DNA, 458 bp, Gossypium hirsutum
  Clone ID: LIB3189-022-P1-K1-H1
gtagatcttctttcaaccgcgcctaataaccgcttttatttttctcagacgtgaaaaaaatggggctgtctttcaccaagctattcagccggctatttgccaaaaaggagatgcgtatactgatggttgggcttgatgctgctggtaaaaccaccattctttacaagctgaagttgggagagattgtcactaccattcccaccatcggtttcaatgttgagaccgttgaatacaagaacatcagcttcactgtttgggatgttggtggccaggacaagatccgaccattgtggagacactatttccaaaacatgcaaggacttattttcgtgggtgatagcaatgatcgggaccgtgtggttgaagctagagatgagttgcacaagatgttgaaagaggatgagttgaggatgctttcttttaatatttgcaaacaggcagatcttccaaaggtatga

SEQ ID NO: 41886 - DNA, 66 bp, Gossypium hirsutum
  unsure (1)..(66): unsure at all n locations; Clone ID: LIB3189-022-P1-K1-H11
aaaaacatataaaaaaaataaatagggttttcncgaaaaaaaaaaaaaaaattgtgtggaattttt

SEQ ID NO: 41887 - DNA, 453 bp, Gossypium hirsutum
  Clone ID: LIB3189-022-P1-K1-H12
gattcctaaacgaaaccctattttcctatctgttttctttgtttcgctcctcgccatcgcctccgctaaagtattcttcgaagaacgttttgatgagggatgggaaagtcggtgggtaaaatctgactggaaaaaggatgagaacatggctggggagtggaattacacttctggaaaatggaatggagatcctaacgacaaaggtattcaaactagtgaagactacaggttctatgctatttcagctgagttcccagaagtcaacaacaaagataagactctagtcttccaattttctgtcaagcatgagcaaaagcttgattggggtggtggctacatgaaagtgctcagcggtgacattgaccaaaagaaatttggtggggaaaccccatacaacatcatgttttgggcctgatatcttgctgtatagcactaaaaaagtgcatgcttttt

SEQ ID NO: 41888 - DNA, 367 bp, Gossypium hirsutum
  Clone ID: LIB3189-022-P1-K1-H3
ttccggaattcttattccttttatatttttcctctctatttttccgtcactttcccgagaaaatgggagaaattcttcacatccaaggtggccaatgcggcaataagataggagccaagttctgggaagtcgtatgtgccgaacatggcatcgattcaacgggtcgatatggtggtgactcggagctccagcttgagcgaatcaatgtttactacaacgaagccagttgtggccgttttgttccccgcgcagttttaatggatctggaacccggaaccatggatagcgtaagatccggtccttacggacaaattttccgacccgataacttcgttttcggacagtccggtgcgggaaacaattgggc

SEQ ID NO: 41889 - DNA, 388 bp, Gossypium hirsutum
  Clone ID: LIB3189-022-P1-K1-H4
gaggagagagccaggcaagaagctgctgctaaaatgtgcagcagaagagtcatcgaaacaagaaaagggtggggaagaacaggatgcgacgatgacagaacgtgctagtgagggagcttcagaagctgataataagaaaaatgaatttttgcaggctcttgcaatgtcgatggatgagcctgcctccagccatgatttacaggatactgagatgtcagatgcagctactgaggatccagagctggcattagctcttcaattatccgtgcaagacagtgcaaaagattcatctagtcaggcagatatgagtaagttattggcagaccagtcattcgtattcttcatccttgtatcgctttctggggtagatccaaacgattccttcatt

SEQ ID NO: 41890 - DNA, 78 bp, Gossypium hirsutum
  Clone ID: LIB3189-022-P1-K1-H5
aaaaaaaaaaaaaaaaaaaaaataaaaaaaaaaattttttaaaaaaaaaaaaaaaaaaaaaaaaaaaaaaaaaggcga

SEQ ID NO: 41891 - DNA, 234 bp, Gossypium hirsutum
  Clone ID: LIB3189-022-P1-K1-H6
ctcgacccacgcgtgcgttcgaattcataatcaaaaaactatgtagctatttttcttgcatgttctattcggatcccaatagatttgtggttttctggaactggcgcccacacactgtttgctaatgcatcttctaagccttgaaaatctttgtactacacttcgtcgttgtcattggcgtaaagttactatttgaaaagtacaaatacactctcaaaacacatgcaacttgca

SEQ ID NO: 41892 - DNA, 425 bp, Gossypium hirsutum
  Clone ID: LIB3189-022-P1-K1-H7
gcaaagcattagcaaccatagccatggctttctactcaaaactcttctctatgactatcctgtggctttttgccctcttctccatgcaaatccatgctagagagtacttcagcaaattcccaagagttaacaccaatgagaaagagacaacaaccagagagcaagagcacgagaccttcgttccccagaccacccaaaagccagaagagcaagagccaaggttcatccctgaaacccaaaatggttatggcctttacggccacgagtcaagctcaagctcatgctcaagctcaagccggcccagtttcaccaccaaagaaacctatgaaccctatgtcacccctgttagatttcacccttgtgaaccctataacagcattcccggaaccttcaacaattaaaacaattacttctacaacaaggat

SEQ ID NO: 41893 - DNA, 176 bp, Gossypium hirsutum
  Clone ID: LIB3189-022-P1-K1-H9
cccacgcgtccgcccacgcgtccgcccacgcgttcggttccgtcgccaggctccaaagcttctttctatcttggagaatttttaaggtttctgttgaatcggtattctttcagggcactagacaagtgcttcggttctatttaattcattttccaagatcagtgtttatgtgctac

SEQ ID NO: 41894 - DNA, 419 bp, Gossypium hirsutum
  Clone ID: LIB3189-023-P1-K1-A10
cggacgcgtgggtttttgcagaaaaagcttctgcttctcctatatatattttttatgatgcctagcgtcaacccagaccaatccgacaaggatcccgagcccttcgtggaggtcgatccgaccggtcgttacggtcggtacaccgaacttctaggatccggagccgtcaaaaaagtttaccgggcattcgatcaagaagaaggaattgaagttgcatggaaccaagtcaagctaaggaatttctccgacgatccggcgatgatcgatcggctttattcggaggttcgagtgataaggtcatgaaccaacaacaacataatctccttgcacaggacttggcgtgacgaggaacataacacactgaatgtcataaccgctgtatgtacttttggaaatttgatggtatataggaagaaaca

SEQ ID NO: 41895 - DNA, 388 bp, Gossypium hirsutum
  Clone ID: LIB3189-023-P1-K1-A11
cggacgcgtgggtttttttttctttttttttttgttaataagaattcaaaagtttcttttactgaaggaattaaatcatgtttatcttcgattggttctatgggatccttgcttcccttgggttatggcaaaaagaggccaagatcttgtttttagggcttgataatgccggcaaaaccacgctgcttcatatgctcaaagatgagagattagttcagcatcagccaacacagcatcccacatcggaggaattgagtattgggaaaatcaagttcaaggcattttgatttgggaggccatcagattgctcgaaaagtttggaaagattactaccccaaggtgggtgctggcgtgtacctagtggatgcttacgacaaggagaggtttg

SEQ ID NO: 41896 - DNA, 367 bp, Gossypium hirsutum
  Clone ID: LIB3189-023-P1-K1-A12
cccacgcgtccgctctgcaaaaatggcaaggaaaattgtgctcattctggtactgagatgcctgtgcattgggctagcagctgctgactggaacatcttgaacccaatatggaatatcaatgcaagacaagatagcttgaaaaactactgtgaaagttggaggatcaatgtggagctgaacaacataagggagttcgatgtagtgccccaagaatgcgttgctcacatcaagaagtacatgacttcatcacagtacgatgctgactgccagagagctatcgaggaagtgacactatacttaagccgctggtgctctttgataggtgatggcaagatgcatggattttcgatggtgatgatacactca

SEQ ID NO: 41897 - DNA, 444 bp, Gossypium hirsutum
  Clone ID: LIB3189-023-P1-K1-A2
ggcgggtggtgcaatcccccacgagaacactttgatttggccgaaccggcattcttgcagatcgcggaatatcgagctgggatcgtccctgttatgttcagaagggtgtcatgtgtgaagaaaggaggcatcaggtacaccatgaatggacattcgtacttcaacatggtgttgataaccaacgtgggaggggcaggggatataacgtcagtgtccatcaagggttccaaaacaggatggctacctatgtccagaaattggggccaaaactggcagagcaatgcttaccttaacggccaaagcctctctttcaaagtgactgccagcgatagcaggactatcacaaactacaatgtagtgcccgctggttggcaattcggacaaacttttgaaggaggccaagtttaagacaatattatagtgtccgtctaatattaaaactgg

SEQ ID NO: 41898 - DNA, 367 bp, Gossypium hirsutum
  Clone ID: LIB3189-023-P1-K1-A3
gctttttaatttttcattatgggaaagatcaagatcggaatcaatggatttggaaggatcgggcgcttggttgcgagagttgctctccaaagcgatgatattgagctcgttgctgctaacgatgctttcatcaccactgaatacacgacctacatgtttaagtacgacagtgctcacggccaatggaagcatcatgagctctatgagaaggactcaaagacccttctctttggtgaaaagcctgtaacaggtttcggtatgagaaaccctgtggaaatcccatgggctgaagctggagctgagtattgtgctgagtatacacggggctttactgacactgacaaggctagttatcacttgaaggggg

SEQ ID NO: 41899 - DNA, 146 bp, Gossypium hirsutum
  Clone ID: LIB3189-023-P1-K1-A5
gaacgaggcacttaggtcgtatgcggcccatgtagctcaacttcgcaataaaggattgcctacgattgggactacgttaaagacagagaaggcatgcaatcccttccttcggacgttaaggacagagattcggcaggcattagata

SEQ ID NO: 41900 - DNA, 253 bp, Gossypium hirsutum
  Clone ID: LIB3189-023-P1-K1-A7
gcgcccacgcgtccgcggacgcgtgggttgtaataccactactgctaacgtcttttcatttatttggagctaaaagtgtttagctcttcgcttcgagagagaccatgttggtttaccaggatctcatctccggtgacgagcttctttctgactcattcccctacaaggaaatcgagaatgggatgctgtgggaagttgagggaaagtgggttgtgcaaggagctattgatgttgacattggtgccaatccttc

SEQ ID NO: 41901 - DNA, 459 bp, Gossypium hirsutum
  unsure (1)..(459): unsure at all n locations; Clone ID: LIB3189-023-P1-K1-A8
ggcgggtggtgcaatcccccacgagaacactttgatttggccgaaccggcattcttgcagatcgcggaatatcgagctgggatcgtccctgttatgttcagaagggtgtcatgtgtgaagaaaggaggcatcaggtacaccatgaatggacattcgtacttcaacatggtgttgataaccaacgtgggaggggcaggggatataacgtcagtgtccatcaagggttccaaaacaggatggctacctatgtccagaaattggggccaaaactggcagagcaatgcttaccttaacggccaaagcctctctttcaaagtgactgccagcgatagcaagactatcacaaactacaatgtagtgcccgctggttggcaattcggacaaacttttgaaggaggccagttttaagacaatattatagtgtccgtctaatattaaaacttgaatngacatattact

SEQ ID NO: 41902 - DNA, 464 bp, Gossypium hirsutum
  unsure (1)..(464): unsure at all n locations; Clone ID: LIB3189-023-P1-K1-A9
gtcttctcttatttctttcgatacaatagaatagaatagaatagcaggcaaagcatggccatggcttttgcgaccttcaatctatctccttctctaagatttgttagcaacaacaaaggctttttcgattctcaattatccaacttttttttatcatcacatttgttccttgggacttcttctttctcggtgccaactctcagtttctccaccattcatcaaacctcgtgtcgcccccacatcaacgcctcaccatgctcctctacttccttcagatgctttgcccagaaatcaccggttgatggcctcggcagtaacggcgcttccgagagactggttgtgctagttattggtggaggaggaagagaacatgcactttgctatgcattgcagcgctctccttcttgtgatgccgtcttctgtgcaccaggcaatgctggtatttncagctctgggaatgcaac

SEQ ID NO: 41903 - DNA, 272 bp, Gossypium hirsutum
  Clone ID: LIB3189-023-P1-K1-B1
tcacgagatttgtggacaacaggtggcaatagattcagcaacacccgttgatgatgctggccctagtttcatgatgaatcctgctggaccatttagaggttttggtggtccaatgcgcccctttggtaggatgtatggaggactgccttatgatgattggggttatgcgatcaaaatacaatccgactttaatataggggtcttcatggtacttttaccacttatcaaccaaattgccattttattttccactaatgtgcagatattggggg

SEQ ID NO: 41904 - DNA, 420 bp, Gossypium hirsutum
  unsure (1)..(420): unsure at all n locations; Clone ID: LIB3189-023-P1-K1-B10
aaaaaattcaaaaaagaactagaaatttattatcgctcacagtctctttgagaaagcccaataattccctctctcatttttaattttggatattttttttgccctagattttctctctgtaagctctacctagagaagaagccatggctaatgcagcgtctggaatggctgtgcatgatgactgcaaactgaagttccttgagttaaaggccaaaagaacataccgctacatagtattcaagattgaggagaaacagaagcaggttgttgtggaaaagcttggtgagccaagtcaaagctatgatgatttcacttcaagcctccctgctgacgaatgtcggtatgctgtctatgattntgactttgtgactgctgagaattgccaaaaaagcaggattttcttcattgcatggtctcctg

SEQ ID NO: 41905 - DNA, 392 bp, Gossypium hirsutum
  Clone ID: LIB3189-023-P1-K1-B11
gacccacgcgtccgcccacgcgtccgcccacgcgtccgaaaaaacaaaagaaatccaatcaaactatcaatgcttcacactacacttcaatctccaaagaccaaatcaaagcgaagctcaaaaatgaggtatggcatttcaaggaggaagcgagctttgctacgttgcttattcattctcttcgcagcttttactttcattacccggctcatgctcactctaagatccctcgatgccccgcccaccaccactaccagcacttccaacggagcggtgctggatttgcctgcccagctcgagctcgtggacctcaaaagggtcgcctttttgtcttcggccgagacgcccattcaagctgggcccaagaccaaaaactgtgcaactgtggacga

SEQ ID NO: 41906 - DNA, 464 bp, Gossypium hirsutum
  Clone ID: LIB3189-023-P1-K1-B12
ctcaatcccaatcccaatcccaatcccaaccccaaccccaaccccatccccatcatcccttctttctttcccatgcctcgattcttcaatcctttcctcttatccttatttttctgtgttttagggttagggtttggcgttgatttcggtcaagctttcaaagtcccctttagggtcagtgatgttctcccggtgcttccgcaccaggtatcttggccggtcttgaacactcttcattccgccgttgacttgttgccggcttttgtcggctccgtgaccccgaacaatggctcaattgattggaaaggatcttgctttcatggaaacgaggctcgtctcgagttcaccaatagcgatcgcgacgattcgggattgggcggtggtgtgcttcacctcacgacatctgaagcgcacagctggacctgtatggatctttatgtctttgcaacaccttataggattac

SEQ ID NO: 41907 - DNA, 403 bp, Gossypium hirsutum
  Clone ID: LIB3189-023-P1-K1-B2
cccacgcgtccggggttatcttcaacaatttatcttctttattctggttgctctgccattcatgtttatttctccaactcattcctctttagctaatggtaatgttaatatattgcctcctaccaatacaagcgataaggtcactttggctctgtactatgaaactttatgcccatattgtgccgactttatcacaaatgaccttgtaaaggtcttcctcagtgatctgtataccattgtcaatctaaaattagtcccttggggcaatgctgacattcttggcgatgaaccccattgccagcatggagaagatgaatgctacttaaatactatacatagctgtgtcatctactactggcctgatgtgaaaaagcactttgattttattcgctgcacggagcaa

SEQ ID NO: 41908 - DNA, 183 bp, Gossypium hirsutum
  Clone ID: LIB3189-023-P1-K1-B3
tcaactctcaaaccttcaagtctcatttctttctctttctctttctctcactagagaatccaaggttctgtttggcccaagggaaaataattaacgatggtcggaaacggtcaagatctgggcctaagtctaacttgacatattctcaaatattcctgcgtagctaactatgcctttcctccc

SEQ ID NO: 41909 - DNA, 273 bp, Gossypium hirsutum
  Clone ID: LIB3189-023-P1-K1-B4
gtcgctttccaaaacaaaaaacctatacacatataggcagttggtcatccaaggccaaaaccagcagtggcattttgtagtctcagttcagtgtgtcttaggagctaaccagattggcttcacccttctctattctatagaaaaagcctcaccttccgcaacttcattcaaatttaacccaaaaagcagaccaactttttagggactgctctgtcactttatgatgatttgatcacttggtttgtgacttgaactctcttcataactggttgt

SEQ ID NO: 41910 - DNA, 278 bp, Gossypium hirsutum
  Clone ID: LIB3189-023-P1-K1-B5
cccacgcgtccgaattatttctctatctcttgcaatatgcctccagcctcgcccgatttctccagctgtgtcaagcttaagtatgttaagcttggctaccaatacgttgtggatcattttcttactctcttgttggttcctgtcatggttgggatccttattgaagttgttcgtttatgccctgtagagattgttaacctatggaattccctccattttgatcttattcagatatagtgctcttctttcttcatcattctttcttgccacatgtttac

SEQ ID NO: 41911 - DNA, 362 bp, Gossypium hirsutum
  Clone ID: LIB3189-023-P1-K1-B6
aaagaatctactgcgtctccaaatggcccttcgatcgttagccaccagtaaaaccctaaccttggctctgatctccaccaggctgtctcagttttcttccttgtattccttttctcttttcgttctatttctctattatttgtctcttttgctctcttatatttttttgttcttttaatttttttttttttttctaatctttcttcttactttttgtttttatttttttttattgttatttctattcttattgtattttttttgttttttattcttactaattattttttttttctttgtttttatttttctttttttttatatttcttattttattctttatttttattttttttattttt

SEQ ID NO: 41912 - DNA, 394 bp, Gossypium hirsutum
  Clone ID: LIB3189-023-P1-K1-B7
ggttgatggaataattagaaagtgaaatgtggtgtcagatgtatctcatgttgatgtagggatcagtttttaacaataaaattggatggaatttttaacagaaggctcatttgctctttgatttaatgtacaaggactaatttaccctttttttaaatagagggagcaaaatacaatccgactttaatataggggtcttcatggtacttttaccacttatcaaccaaattgccattttattttccactaatgtgcagatattgagggcagtgatctagttgcagctaaagaaaaatggtacacctacagcaccgaacaaaaaccaatcgttgagaaatatatttcatctttcaggtatcgaaagctgactatcttgccgcctcttttggaaaat

SEQ ID NO: 41913 - DNA, 243 bp, Gossypium hirsutum
  Clone ID: LIB3189-023-P1-K1-B8
ctttcattctttgctgttgaagtagtaatatctatagcatacagagatggagaggcaaagaagcaagcaggtttgtttgttgatgtgggttttggttgctgcctttttctcccacaatagggtcattgcagtgacctccactggccttggtgagcagaaaaactactatccagctcctgaccctcatgctggaactcccccttcaagttcacatggcacaccaccatcttcaggaggtggatc

SEQ ID NO: 41914 - DNA, 333 bp, Gossypium hirsutum
  Clone ID: LIB3189-023-P1-K1-B9
tcaactctcaaaccttcaagtctcatttctttctctttctctttctctcactagagaatccaagtttctgtttggccaaagagaaaataattaatgatggtgggaaaagatcaagatctgggtttaagtctaagcttgagttattctcaaaatcatcattcgcttcagttaaatctaggcccatctctcgttccatcttctgctaatcaatgctactctccttctgatccaaacatggaatctttacgggcagagactagatcatctcttaaagggatcgacgttaacaggctgccatccacggtcgattgtgaagaaaaagcctgagtttca

SEQ ID NO: 41915 - DNA, 431 bp, Gossypium hirsutum
  Clone ID: LIB3189-023-P1-K1-C1
gggaagtggaaacccttgaactccaaattttaaagcatttgaagaatttcactaacgagatggaaattgattccgagtcggaaaaaccaagtgttaaaatcccagaagaaggcggttcaatgcaaatgaattcctcggaaaaaaagggaggcgatgatgaaaaagagcagcttgctggtattatggacaagttaaatatcgagtcatcttcttccggcttcaagaaaaaaccagtaattatcattgttgttggaatggcagggagtgggaaaacgacgttgcttcataggcttgtttgccatactcaagcttcgaatattaggggttatgtgatgaatcttgaccccgctgtaatgacccttccatttggtgctaatattgatataagagatactgttaaatacaaggaagttatgaagcaattcaatctt

SEQ ID NO: 41916 - DNA, 461 bp, Gossypium hirsutum
  Clone ID: LIB3189-023-P1-K1-C10
ctctctctctctattctctttggcttatctatcgctttgatttcgcatccttgctgtgcactcgatggcaaatcgatggttgaggcctgaggtgtatccgctgtttgcggccgtaggtgttgctgtcggaatctgcgggtttcagttggtgcgcaatatctgcatcaaccctgaagtcagggtaaccaaggagaacagggctgctggggttttggacaactttgctgagggagaaaaatattctgaacatttcttgagaaaatatgtccgcaacaagacgccagaaatcatgcccagtatcaacagcttcttcactgacccaaagtgaggcttcactcttgctttatgctgaaactaaaaaataaaaaaaatagaagaacttagtcttattcaatcaataccaagttatgccctttctttttgctgactgtgatgcaaatttgtgttgggtttgcacttga

SEQ ID NO: 41917 - DNA, 375 bp, Gossypium hirsutum
  Clone ID: LIB3189-023-P1-K1-C11
cctagagaaaaagaagaatgaagactagtaatctatgcatgccaaggttcaaaggcaacaacaaaaacaaacgtttgtcgccgatgacccttttcgaacggttccgagaggcgatttttcgtctcataatgctatcggctctcactaagacctcgtcggatcaacactttaaccctttggctgtccctcagagatgttaccaccagccagatgacgccgtcgcagtgaaaacatggcggattgcattgagttcatcaagagaaaagcattcatagaagaaaatcgggagtcgagtgatcgtaattcgattgcgaatgatgttattggtgatgttgccatgcaggttctgtgatgccattcttttaatcatttttt

SEQ ID NO: 41918 - DNA, 366 bp, Gossypium hirsutum
  Clone ID: LIB3189-023-P1-K1-C12
ctcgtattcatcttcttacatactgtttgtcagaaaaaaaaaacatgaaaaccaaagtcttttactgttgtttggtcttgttttttctgggttttcagggttatgttgatgcaagactattagtagaatcaaaaccggatagagatgatactgctgcttatgctcgttggttggtctcccagaattcttgggggattttaactacattatcaattgagttggaagggtcaccatttgggaatgtcgtttcgtttagtgatggggtacctggaaaaggtactggtgtcccatatttctatttgtcaacccttgatccaacagcaagaaatgcattaaaagaccatcggtccttacttgcaattcagt

SEQ ID NO: 41919 - DNA, 424 bp, Gossypium hirsutum
  Clone ID: LIB3189-023-P1-K1-C2
aaaaggaaaaaaaaatgaagctcttgtttctaactctgctgctatgctctgttcttctatgtccttcagtgttttgaaccaacaatggctcatcctcgttcaccttttcgtgaagggaaatgcaaagggaggtgcaataaagcggcggtttgggatcgatgcttcaaatattgcggcatatgttgcgaggagtgtaaatgtgttccttccggtacttatgggaacaaacacgagtgtccttgctacagagacaaggtgaatttcatgtggctacccaaatgccctttaaaatgaaatatatccgagttcgggatttcatcaagcttaaagatcgaggacgaataggctatttatatatttatgcatgctgatggtgttatataaaaaaaaactgtttattgcctgttgttttctttgggttttg

SEQ ID NO: 41920 - DNA, 403 bp, Gossypium hirsutum
  Clone ID: LIB3189-023-P1-K1-C4
ggctgagggtgggtttggatccgttcatagaggacttctcccagatggtcaggcaattgcagtgaagcggacacaaattggctagttctcaaggagatcttgagttttgctcagaggtggaagtcctgagctgtgctcagcacaggaatgttgttatgctgattgggttctgtattgaggatagaaggcgactgctggtttatgagtacatatgcaatggatccctagattctcatctatatgggcgtcatcggtaacctttagaatggtctgcacggcaaaagattgcagttggtgcctctataggtctgagatacctttcatgaagaatgcacagtttgctgcattgttcaccgtgacatgcggtcgaacaacattttcattcacccttgatttttaacct

SEQ ID NO: 41921 - DNA, 278 bp, Gossypium hirsutum
  Clone ID: LIB3189-023-P1-K1-C5
tcgtttaaaaaaaactaaaaaaacctctgaaaaaagggctccgaccctcggagctccgacctcatggccggggtggctcgtcctagggtctggcgtgcttggtctccacgcgcttaacgagccgtcaccagagccaccgtatacggtggttagggtttctaaatccttcccttttatttgccgattctcaggtacttgtaaaaaaatctggcattagcaaaggcttgactattgtccactggttgcgttgatctcatcgttgagttggggcctataat

SEQ ID NO: 41922 - DNA, 459 bp, Gossypium hirsutum
  Clone ID: LIB3189-023-P1-K1-C6
atctctacaaaaacagtgggatttttccctaacttcgatttctcaaaaaaaaaaaattaatcctattttacataaaatgatctcttaagatctttgtttatttgctattacatctacattaaccttcatgttgaagatgaaaaactgctacttactgaagttagattttactcgtgctttgtggtacgatcctatataccacatcaaggggtggttacttattaatgtttgctaaaccccagtccagttcatttgttcccatcctaagggaggttctttgagatcgttaaccatctcccaaatatcatcttcatttgcttctggttgatcagagtggtctcctccagagtgtgaagtacttgaggagcttgttacctccatcatagaggctctctctgaaaatgttgcagtcctattctcatgaagttgtgttgctcgtgatacagtttcgagtgggcg

SEQ ID NO: 41923 - DNA, 232 bp, Gossypium hirsutum
  Clone ID: LIB3189-023-P1-K1-C7
ttaatgttctcttggtttagccctgcaagattcttacaggaaagtgattgggggactgtttttacaataattctctaatttgtcctgttttgtgttccatactcccacttttctttgcaattctcattccttggacaatagacattctatattttaaccctgctttagtatttaagttttgggtaattattttgtttgtcttcttatattcttggtctggttttttctaaaa

SEQ ID NO: 41924 - DNA, 322 bp, Gossypium hirsutum
  Clone ID: LIB3189-023-P1-K1-C8
gcggccgctcgcgatctagaactagtctcctaagattatgctttgccccatacctacaatacatgttttttcaagatatagttttatagtagtatatatggactgtaaatatgcatgttgggtttatgtgactttactagataacaacgttaagtagagcagcatgaaaataaacatttgataagccatgttgattacaatatatggaaatggaagatggcgggttagcctattgtttttattaaaaaaaaaaaaataaaaaaaaaaaatataaaaaaaaataataaaaaaaaaaaaaaaaaaaaaaataaataaaaataat

SEQ ID NO: 41925 - DNA, 106 bp, Gossypium hirsutum
  Clone ID: LIB3189-023-P1-K1-C9
cccacccttcgggactgataaccagaagcttacgattaagcttatccctatacctacaggacatgtttttaaatgagatagagctaacgtatacatatatggattc

SEQ ID NO: 41926 - DNA, 162 bp, Gossypium hirsutum
  Clone ID: LIB3189-023-P1-K1-D1
caaccgtgcccttcaaagttaacatttatttccctgttgatcattctgggtggtgctgttgggtatgttgccactgattcagcatttaccttgactgcatattcatgggcgttcgcatatttggtgacaattactactgaaatggtgtatattaagcatatg

SEQ ID NO: 41927 - DNA, 139 bp, Gossypium hirsutum
  Clone ID: LIB3189-023-P1-K1-D10
ctcactcgtgcggccagtcgtcagaggtagctagccttcactaagatggcagccatgccgaagaagtcgcgaatatgcaccatacagatatttgtggccattgaatggcacaatcgtttggcttgatgctaatgaagat

SEQ ID NO: 41928 - DNA, 385 bp, Gossypium hirsutum
  Clone ID: LIB3189-023-P1-K1-D11
cccacgcgtccgcccacgcgtccgtccacgcgtccggttcagagagctgtctgcatgatctccaactcaaccagcgttgcggaagtgttttcccgcattgatcataaatttgatctcatgtatgccaagcgtgcatttgtgcactggtatgttggtgagggcatggaggaaggagagttttccgaggcacgtgaagatctcgctgccctggaaaaagattatgaagaagttggcgctgagtctggtgaaggagacgaaggggatgaggaggagtattgagggatgtaccgttatccgtttgctactgtgatgtattttcttgttgattttggatgtgtgttttcagggttgaatacctgggtataatgactagtttttggtattt

SEQ ID NO: 41929 - DNA, 421 bp, Gossypium hirsutum
  Clone ID: LIB3189-023-P1-K1-D2
cccacgcgtccgaaaggactgaaaaagaaaaacagaaatggctccgaaagcagatacccaatctgccggcgctgtcgctgcagctgacgcatcctctcaattctcaatggacccactattccacatcttgaaagtcgtcccttactccttccttcgcgctccgcgcctccgcctcaagatcccctccgtctcccttccttccgccatgactgtcttttctctcgtcctcctcacttacttcatggtggtctccggcttcgtctacgacgtcatcgtggagccccctggcattggctctacccaagatcctgccactggcgccgtccgacctgttgttttcctttcaggtcgagtcaatggtcagtacatcatagaaggactctcctctgggtctatggttgtggctggtggcattgggatt

SEQ ID NO: 41930 - DNA, 139 bp, Gossypium hirsutum
  Clone ID: LIB3189-023-P1-K1-D3
acggctacaccttcaaaaaccggccatttttcttcttcattttccaacatcaccttctcacgcgccgccgccggctactcttccgccggcgggaaatatccattcccttttctttcccttccctctcctcccttttatt

SEQ ID NO: 41931 - DNA, 221 bp, Gossypium hirsutum
  Clone ID: LIB3189-023-P1-K1-D4
gatacagtcgccatcttcaattatctcccttttttttctgttctctctcttggaaaccctagaaattcattctcgtaataacagaaaacaagaaaagaaacctaaattttctcaaagaaccctcttccctagaaaatccttatcgattttaacagagtagaaagttttaaaaagctacaattccaggttaaggaaattactatttactctgggggaatatg

SEQ ID NO: 41932 - DNA, 212 bp, Gossypium hirsutum
  Clone ID: LIB3189-023-P1-K1-D5
aggcgtccgcgtacgcttggtaaacgattgactgttctggttctcattagtggaaaaaaacctttgaaagtaaatggggctggccttcctggggaatcgtttgccaaaattcttaaagtaccgaaacgtggaacttgaaaagcatgaacttttcttcagctttgtttctaaagggtttttctcatacaatggaggcctttataagatctatg

SEQ ID NO: 41933 - DNA, 176 bp, Gossypium hirsutum
  Clone ID: LIB3189-023-P1-K1-D6
cccacgcgtccggccaattgtttgagctagctagctcttactcaaatggcaaccaaaacgatgatgttgcaaatattttcacttttcttcgttttgttcagtatctgcaactccatttcccttggtgctaatggagatgacaatggcggttgtcatactgtccatgccaccttcta

SEQ ID NO: 41934 - DNA, 262 bp, Gossypium hirsutum
  Clone ID: LIB3189-023-P1-K1-D7
tcgcccacgcgttcgcccacgcgtcctggagagtgccccttctttagcactcactacaaacatatggctgcggctgacttatgacatcaaatctgaacaaagtggaatgcttgtatgcatatccattattgcaaaaatgggaccccactttacaatctgctgcagagcttaaagtcctgcttcgatggatgatttacctctttggatgcttgcagaccttttggaaactttacctaccaaggattcctgctctatcattctc

SEQ ID NO: 41935 - DNA, 395 bp, Gossypium hirsutum
  Clone ID: LIB3189-023-P1-K1-D8
aaaaaagttaaaaatccgaccaaaaatgaagaagaaaaagttgaaaaattggaaaagggttgttgttttttctttcttcttttctttgagcaaagctttctttctttcactttttgtttaaattgctttggtattattatataaatcacttcacattttccaaggatttgcagtctcctaagtttattttgggctctagaacaactgtcaacaacaagcaaatgccaatcacattccattgtgcaaagaagtgtacctttttcatacagaaggacaatactgggaattcccaacctctcgtttccattttttgttgcttcaatgttcacttgcaagatggcttccttttcaccctgtcattcttctcatgttgccattctgggctttaagtttct

SEQ ID NO: 41936 - DNA, 429 bp, Gossypium hirsutum
  Clone ID: LIB3189-023-P1-K1-D9
cccacgcgtccggccaattgtttgagctagctagctcttactcaaatggcaaccaaaacgatgatgttgcaaatattttcacttttcttctttttgttcagtatctgcaactccattttccttggtgctaatggagatgacaatggtggttggcaaactgcccatgccaccttctacggtggtgctgatgctaccggcacaatggggggagcttgtggttatggaaacctgtacagtcaagggtatggaacgagcacagcagctttgagcactgcacttttcaacaatggcttgagctgcggtgcctgctacgagctccggtgcaacaatgatcctcaatggtgcattagtcgaaccataaccgtgacagccaccaacttttgtccccctaactatgctttatctagtgacaatggcgggtggtgcaat

SEQ ID NO: 41937 - DNA, 384 bp, Gossypium hirsutum
  Clone ID: LIB3189-023-P1-K1-E1
ggcacaccgcctttcaagtcctctctaccgccgccgcctctcttcttcatttagcaccgccaccaaagacaaagttcctcttctttacaaaagcccagagatcaacgaagacaacggaaatgaagccgtgacactccaagtcctttcatggggcaggggagcatcaggccaactaggtggtggcattgaagaaatcagaatatacccatctccagtagccaatctcctcttaccgcgtgctttcttttccctctccccaaccccaggcaaaacccaaaaccaaaatcaaaaggatcaaactttgcactcggttgggatatcatgcgggttgttccattcgggtttgggtgtcggcggcaagttgtggatgtggggcaaaggtga

SEQ ID NO: 41938 - DNA, 237 bp, Gossypium hirsutum
  Clone ID: LIB3189-023-P1-K1-E10
cggacgcgtgggtggttgtctaaaagaaaaggccttaccaaagggaaagaaattttggggataggggttttttagaacatggaatcaattacttgcttttattttacctaattgttcctaaggagtaatgtttggggtggtaagttttgctgggaccggtttccaacatggttagttttgtttgaaccttttttcgtatagtgtttactttgtacctctcaacggaaattattgttt

SEQ ID NO: 41939 - DNA, 388 bp, Gossypium hirsutum
  Clone ID: LIB3189-023-P1-K1-E11
aaaaaaaagatgtctctagtgactgaagagatcaaaggcagcgcttcagaaatttaccatggagatgagatatgtcaagagaaatcaaagtttctgctggaggaaatgggcatgcccagtggacttttgcctctcaaagacattgaagaatgtgggtatgtgaaggacactggtttcgtgtggctgaaacaaaagaagagcataacccacaagtttgacaagattggtaagcttgtttcctatgcaactgaggtcacagctgtggttgagaaaaacaagatcaagaagctcactggggtgaagaccaaggagcttctggtttggatcacactcagtgatatctatgttgatgatccaccaactgggaatatcactttcaagacacctg

SEQ ID NO: 41940 - DNA, 241 bp, Gossypium hirsutum
  Clone ID: LIB3189-023-P1-K1-E12
gtctcttcctccttcactttcagatcatcaaaaccttcaacaatggcctttgtttagggtgaaggggccatttcttacttgaagcgtttttagttctattgaagagtagcgtattgagttagctttggtctatcaaagacattgtatattttgtgtatgtgtaggtcactgtttttgtgtgtctgtaacaaataaatattttttcttatttccttagataatgatttgtatgttttatgtt

SEQ ID NO: 41941 - DNA, 404 bp, Gossypium hirsutum
  Clone ID: LIB3189-023-P1-K1-E2
tttcatttcgagaaaaaaagcagcagaggccgcggctttcacttcccttctctcacctcttacagaagccagaagtcagtttagtagcaatggcgtatgctgcgatgaagcctaccaagccgggtttggaggagccccaagagcagattcacaagatccggatcactctctcctctaagaatgtgaaaaacctagaaaaagtttgtgctgatttggttcgcggtgcaaaggataagagactgagggttaagggaccagtaagaatgcccaccaaggttcttcacatcacgaccaggaagtctccctgtggtgaaggaacaaacacatgggatcggtttgagctccgtgttcacaagcgagttattgacctattcagctcccctgacgtggtgaagcagatcaca

SEQ ID NO: 41942 - DNA, 280 bp, Gossypium hirsutum
  Clone ID: LIB3189-023-P1-K1-E4
taaatacagaaaaacgaaatcaacggaaataaaatctctgaaaggggaaaaaaactcagaatcagcagatcgaagtgaaaatggagtgtgtgttcggtttagtgggcaacttctttgccatagtttcggctgccactgtgtcttttttacttcattctttgctttcttattctttctttcacaatttaccttgttccttatattctttctactcttcttctttctccttccgtgattatcttgtttctttcgtttctttcctactctttttttttttctt

SEQ ID NO: 41943 - DNA, 337 bp, Gossypium hirsutum
  Clone ID: LIB3189-023-P1-K1-E5
caatgctcaactataactggatctctctccgtttttcgtggagtctaaacatttttttgctgtatgcaggagttggctctatgggcttgatgacttctgtgttgttgtcatctgatgggaagacactagaagctgaggcagctcatgggactgtaactcgacatttcaggctttatcaaatgggacaagaaaccagttcatactgttttgcctctatatttccatggacaagaggactggagcatacggccaaactagataaaaatggaaggttgctggactttgttcacaagttggaggctgcttgcattgagacagttgatgcaggaaaaatgac

SEQ ID NO: 41944 - DNA, 253 bp, Gossypium hirsutum
  Clone ID: LIB3189-023-P1-K1-E7
ctcccagtttcccttaatcctccatgggcaaaggcggaggttgtgtcccaagcaaaaagagacggccttcctctgccgaaggctctgccactgccactgccactaccgccaccaacaacgcacccatcgaagccgatgaagaaactcacgaaactgccagtgtagctgtgaattctacgaatgcgcattcagttaccgccactttaaaaatctttattgtctactactccatgtattgtcacgtggtagaaac

SEQ ID NO: 41945 - DNA, 312 bp, Gossypium hirsutum
  Clone ID: LIB3189-023-P1-K1-E8
caatcctcaaaatctctgcaaactgagatttatatacatatctgaactttaattttctgtaaaatcgaaaccagatggagatgatccagtacaaccggttcaccgcacacctcttgctcctctcgttgattctagttgttcccttggcagtcgccaccgacgttcaatattgtgattagctcggtgagtatgttgtattggttctcggataataatttttctccataaatctattccttattggttacttcttatttctttcattattttttcttcattttttttatcctctttctctctttatcgttattt

SEQ ID NO: 41946 - DNA, 382 bp, Gossypium hirsutum
  unsure (1)..(382): unsure at all n locations; Clone ID: LIB3189-023-P1-K1-E9
gttctttttctttgtatatatgtttttgttggctgccttttttgggcgtgcttttgaatggaggggagtgggatcaaagggaaggatttgattgaggagatttttgggcggtaatggtgggatttgagagctagggtttttggttttttggttttttgctgtaatgttgtgctgttggggtttctgtattgtttggatctaaggatatttagattgagagcttaaaaaaatttaaattaaaaagttgcagcttttagtttncnctttcttttgtcaaatggaaggaagcaaaaaggttaaatctttggttttggtttgtttgatcttggtgctactgaattcattctggcttatttctgctaatgttgaatggtgttcattg

SEQ ID NO: 41947 - DNA, 352 bp, Gossypium hirsutum
  Clone ID: LIB3189-023-P1-K1-F1
attcattttctttctgccgaacgaagatatatttctagattctcagtgaataatgatcaagtgagacacaacttatttagttcggatttttcggataaaaaagaagagaggatttacgattattcagaattgaatcgaataataggtactgggcattgtgatttcatatattctgctattctccacgagaatgctgatttattggcaaagagacgaagaaatagatttattattccatttcaattgattcaagaccaagagaaagaactaatgctacattcccattccggtatctcgatggaaatacccataaatggtattttccgtagaaaaagtattctttgcttttttt

SEQ ID NO: 41948 - DNA, 256 bp, Gossypium hirsutum
  Clone ID: LIB3189-023-P1-K1-F10
tccgtgcccaaaacacccatcttcatttacatccatacaccaaatatatgtgtcatttttgtttgtaaatcgaaggtttctctgtcatttgcatcctcacctcctcactaaactctaaaaaagaaaaaaatcgaggtgagagggaatctttttaaaatttctcttttcatataagctcccttgtttctgctttgtttcctttgttgttgcttatttcataccttactcctcttttttttactttcgtatcctatta

SEQ ID NO: 41949 - DNA, 388 bp, Gossypium hirsutum
  Clone ID: LIB3189-023-P1-K1-F12
ggaaaaggaaagcttttctcattatttttatttcatttgtcaaacaaattcccaaccacaacagaaatgggaaaattacaaaaaaaaaaaagaaggaaaaaaaactacaaatggaaaaaaaaaatgcaaacaattcactccaaaatcttctctatatcatctatttggggggtcaaaacccataaacaaccttccattagctccttataattctctgtatgaagcatatgcattaccattacaacatatgtttctgtatttcccttaatcttcttggatattcacaaagataactaacttttctttttcgagttatcgaacttgaaaaaaaattcttttgctcaaccttaaaagatatacccttttaagatttggtttgttttttttc

SEQ ID NO: 41950 - DNA, 471 bp, Gossypium hirsutum
  Clone ID: LIB3189-023-P1-K1-F2
gctacctgcaaaggtggaccagctgaaatcattgtccacggtaaatctgggttcaacattgatccttaccatggtgatcaagctgcagaaatccttgttgatttcttcgacaaatgtaaaaaggaaccatctcactggaatgacatctctgagggtggcttgaaacgtatccaggagaaatacacatggcagatatattcggagaggctattaacattgacgggagtgtatggattctggaagcacgtttccaaccttgaccgtcgcgagagccgccgttacctggagatgttttacgctcttaagtaccgcaagctggctgaatcggttcctctggcagaggaggagtaaaacaaaggaagaggcgggttttccctggaggatttttctgagttcttcataataataataataataataataataataattatcctttggtggtttcataattatggccggacaagaaaa

SEQ ID NO: 41951 - DNA, 424 bp, Gossypium hirsutum
  Clone ID: LIB3189-023-P1-K1-F4
cgagatttcgggcctttacaatccgggttctccagtcgatgcttactcgtgcgatcattttcggatgtttgagttcaaagtccggcggtgcgggcgtggccggtcgcatgattggaccgagtgtccatacgctcatcccggcgagaaagctcgccggagggacccgaggaagtttcattattccggtatggcttgctccgatttcaagaaagggaattgtcggaaaggagactcttgcgagttcgctcatggagtttttgagtgctggctacaccctgctcgttaccgaaccctgccgtgtaaagacgggtcgggttgtcggcgtcgggtctgtttctttgctcatactccggaccagcttagggttatcaactttgctgattcttttgatagttcaccaccttgtacgaaagcaatgtcgttt

SEQ ID NO: 41952 - DNA, 307 bp, Gossypium hirsutum
  Clone ID: LIB3189-023-P1-K1-F6
gaagttgtctgcgcgtgacagatccgctttctgcagtcaatgtctttctcgtgcgatcattttcggatgtgggagttcaaagtccggcggtgcgggcgttgccggtcgcatgattggaccgagtgtccatacgctcatcccggcgagaaagctcgccggagggacccgaggaagtttcattattccggtatggcttgctccgatttcaagaaagggaattgtcggaaaggatactcttgcgagttcgctcatggagtttttgagtgctggctacaccctgctcgttaccgaaccctgccgtgttaag

SEQ ID NO: 41953 - DNA, 453 bp, Gossypium hirsutum
  Clone ID: LIB3189-023-P1-K1-F7
gttgaaactggtgtcctcaaacccggtatggttgttacttttggtcctactggtctgaccactgaagttaagtctgttgagatgcaccatgaatccctcccggaagctttccctggtgacaatgttgggttcaacgttaagaacgttgctgttaaggatcttaaacgtggttttgttgcttcaaactccaaggatgatccggccatggaagctgccaacttcacctcacaggttatcatcatgaaccaccctggccaaatcggaaatggttatgccccagtccttgactgccacacctttcacattgctgttaaattttctgagctgttgaccaagattgacagactatctggcaaggaactctgtaaggtacccatgttcttgtaaaacggagatgcaggtatggaaagatgattcccacccaacccatggtgcgttaaacttttttcgtat

SEQ ID NO: 41954 - DNA, 58 bp, Gossypium hirsutum
  Clone ID: LIB3189-023-P1-K1-F8
cccttccaaaaaaagaataataaaacccccaaaactcaatcttcaaataaattaaaaa

SEQ ID NO: 41955 - DNA, 269 bp, Gossypium hirsutum
  Clone ID: LIB3189-023-P1-K1-F9
cggacgcgtgggtttttttttaatttcaacacctaacatacatgtttcatttcacaaaagccatgtttttctgtttctcatgtgactctgaagcctccttctttccttcaacgtacgcaagctgaaggagctctcagccgtccgttcgaaatccccttccattcatcaattctctgtcgccttcaccaagacactgacccctctctttcaaattctaaagcgaactgccaccgttgaacggtttgtgcgctttgtttcagcaaggtcct

SEQ ID NO: 41956 - DNA, 389 bp, Gossypium hirsutum
  Clone ID: LIB3189-023-P1-K1-G1
gcggcttctgcttctatttactattttctcactctcctactcctttgtgccatcccttttaccttctccgagctcgttaaagagcagcctctggtgttgaagtaccacaatgggccactcttgaaggggaagatcaccgttaatctcatctggtacgggaagttctccccaacccagcgctccataatcgtcgatttcatcaactctttgagctctgccgtcaaacccaagattccgtcggcgtcgttttggtggaaaacgacggagaaatacaagttcggttcctccactttggtcgtgggcaaacaaatcctcctcgaaaattacccgctcggtaaaatccttaagaacccacacttgccagcgttggccgggaaattcaacggcgt

SEQ ID NO: 41957 - DNA, 390 bp, Gossypium hirsutum
  Clone ID: LIB3189-023-P1-K1-G10
cttctcaagaccgtttcttctcacgaatcctccatatttaagacagtcttcctgagttattagaggtttatcctaacaaatctgtgaagggttgagaaaaaataaacaactatttttaatggcatctagagtttcattaaagactaaaggtaaaggagggaaggggtctaagggctcggatgagaaatcaactacgcagtgcttgaaagagtggagcacatgggctatgaagaaagccaaagtggtaacgcactatggcttcattcctctggtgatcattatcggcatgaactctgaacccaagccccaactttatcaattgctaagccctgtctgattcagttgcttatttcttaaccacccagatcttgggttaactatgtaatttgt

SEQ ID NO: 41958 - DNA, 458 bp, Gossypium hirsutum
  Clone ID: LIB3189-023-P1-K1-G11
gcagaatacttaccaacaatatctggccgcaaaggaactgaagaagcagtcttggagataccacagaaaatacaacacatggtttcagcggcatgaggaaccaaaaatcgccactgatgaatttgaacagggaacctatgtatactttgattttcacatagcaaatgatgaccaccaacatggatggtgtcagagaattaagacggagttcacatttgagtataactatcttgaagatgaacttatttgctgaaacgtaatgtaagttgtgtcacccccggaaatttcattgcaacttttttgaaaagcctcatgatgaagatgagatgagatgtcaagctttgattagacggttcatcttccaattatgccttttttgttggatattagttctgttgaaattcattacgaccaaagatattgggaacattggtagcagtctttgttaatctattggc

SEQ ID NO: 41959 - DNA, 270 bp, Gossypium hirsutum
  Clone ID: LIB3189-023-P1-K1-G12
cccacgcgtccgcccacgcgtccgcccacgcgtccgagaacctcaagcttggtatccatgaggactctcagaacaggactaaaattgccgaattgctccgctaccactccaccaagagtggtgatgagatgaccagcttgaaggactatgtgaccagaatgaaggagggtcagaatgatatctactacatcactggtgagagtaaaaaggctgttgagaactctccctttcttgagaagctgaagaagaagggttatgaggtcctttaca

SEQ ID NO: 41960 - DNA, 335 bp, Gossypium hirsutum
  unsure (1)..(335): unsure at all n locations; Clone ID: LIB3189-023-P1-K1-G2
gtagggtttttcactgagaagaaactagaaacatagaaaccctttgcagatttgtttgttttcaacagttttaagctctaatactaacgaaatcgtaaatcatgcacgccccggttctcgttctaaaggattcgttgaaacgggagtctgggacgaaggttcaccatgctaacatccaagcctccaaggctgttgctgacattattcgaacaacattgggtcctcgatccatgttgaaaatgctccttgatgcttctggaggtattgttgttactaatgatggaaatgctatcctacgcgagttagatcttgcacatncagcagcaaagtcaatg

SEQ ID NO: 41961 - DNA, 51 bp, Gossypium hirsutum
  Clone ID: LIB3189-023-P1-K1-G3
ttttttttttttttttttttttttttttttttttttggggggttttttttt

SEQ ID NO: 41962 - DNA, 388 bp, Gossypium hirsutum
  Clone ID: LIB3189-023-P1-K1-G4
ttcaaaaaaaaaaagactaaaaatccagcagtgaggtgcagggaaacagaacacaaaatggcgacagttccaggacagttgatttgggaggtagtgaagaagaacaattgttttttggtgaaacaatttggaagaggaactgctggcgttcgattcagcaaagagcccaacaatctctacaatgtcaactcttacaaacactctggtttggcaaacaagaaaactgtcaccattcaacctgcaggcaaagaccagtctgtactcttagccacaaccaagtctaagaaacagaacaagccttcgagcttgctccataagtctgtcatgaaaaaggagttccctaggatggccaaggcagtcaaaaaccaggtgacagacaactactaca

SEQ ID NO: 41963 - DNA, 223 bp, Gossypium hirsutum
  Clone ID: LIB3189-023-P1-K1-G5
taccgtccgaatcccgtgtcgaccacgcgtcgccacgcgtcgaagttttcaatggttctacatcagctttaggatatataatctttatccaagatacttcggtcactggttccgggaagcagatcttttgagcaagaggtacttcaggacctatttaggagtgcggatcttgttataatcggcagcttctgagtggggtattccatgatctcaatttattctt

SEQ ID NO: 41964 - DNA, 461 bp, Gossypium hirsutum
  Clone ID: LIB3189-023-P1-K1-G7
cctcagcttaattcagctgaaaatggcaccttcatctccgccacaaacaccgccgtccgccgtggttattgtcctcctcttactcttctccacggcattgctttgtgaatcaaggttaagcttagattactactccaaaacctgtcccagtttcaccaaaatcatgcaagacaccataaccaacaagcaaatcaccagccccacaaccgccgccggtacactccgtctatttttccacgactgtcttcccaacggttgcgatggttccatcctcatatcttccaccgcattcaacaaagctgaacgtgatgccgacatcaacttatctctccctggagatccatttgacctcattgttcgagccaaaacagcccttgaactcgcctgtcccaacaccgtctcttgctccgacatcctcgccgtcgctactcgtgacttagtcaccatgcttggtggaccgt

SEQ ID NO: 41965 - DNA, 58 bp, Gossypium hirsutum
  Clone ID: LIB3189-023-P1-K1-G8
tctccttaacttaattcatttgataatggcaccttcctcttcgccacatacaccacct

SEQ ID NO: 41966 - DNA, 429 bp, Gossypium hirsutum
  Clone ID: LIB3189-023-P1-K1-G9
ccataatcaaccaagatgctctcctctagatctgcaacaacacacgcaaaatgaaaggcgggactttgaacaacagcttgtagattcaacagaaccttctccaaagttcaaagcaaaacttcagcgaccttgagtcctctgatcccaggcgaaccgatctttcctcaccatcgtctgaaccagatcaggtacatcgttaacccaactcccacagatccctcttctccatccctccattgtcaggacatgcgctgcttcatttacctcacgaggcacaaagatatagagcgtcaccttccacaaccagtcgttgaaagcacatcttacgcgcgaatactaaagctctctcacaagcccgtgcctttgccacaaaagaatcatctacatttttgaataagataagtttcgacccaacaacttcttaattgt

SEQ ID NO: 41967 - DNA, 278 bp, Gossypium hirsutum
  Clone ID: LIB3189-023-P1-K1-H10
gaactgtcaacaaattatatatactatggtttggtctttatgaaataaagccaaaaggcaaaccagaacccgataaacaaagcatatcaaagtctcacatcacgttatcacaatatatcgatattacttcaaagatatttacattttcaatattttcctttcatttttcttttcccgtctaaaatctaatttcattgtttctcttttggatttttttattacaatctccatgtgcggtggttgggacaagtttatactgacacatctgaatgcctggc

SEQ ID NO: 41968 - DNA, 350 bp, Gossypium hirsutum
  Clone ID: LIB3189-023-P1-K1-H12
gccacgcgtccgctattcggatccaccaaaatactccaagagagataccgtcttatgatcccggcatagacttcccaaaagtctcctcacatttcgagatatcactcccacattcgatttttaattccagtctcctaatccgaccattgatccagcctaaaattgatataggttgctctcctccaccctttctctgtcttcaaccgttcggattgataagcggagctccgacgccctaactgctgaaaaacccgaaagatgggttctcttctctttttatttatttatttatttggttgaatactgacttgtttggtttgcaaggtgtcactgttgagcttctctttctt

SEQ ID NO: 41969 - DNA, 379 bp, Gossypium hirsutum
  Clone ID: LIB3189-023-P1-K1-H2
aaaaaagataaagaaagagagaaagagagagagagagggggggcgacatggaaggaaagtgtaaggagcaaccatggttgaatggagagaaaaaagagccaaaatacagccatgggttttgttcagccgagatacagacgctggccagcgttgccgaagtgtttttcccttctttaccaccggattctggctttcaaggaaaggacacccagccaagcaaggctgttcaatccttcctaaaagcttctgcctctcaaccccctttccccgacgaggtagcagaattgctggggaaaagagcattcaattgaagtgtgatagtggtgagaattgtattaattgtactggggacgagggtaggaagcttgttgctattttg

SEQ ID NO: 41970 - DNA, 469 bp, Gossypium hirsutum
  Clone ID: LIB3189-023-P1-K1-H3
aaagggttgtaacattagttgttgatgcgttgatggaacaaggatcaatcaatggaggctactaatccgaatccgagttcaatgagcggcgtcgctgctgcttccgccgccgagcttctatgctgtgcgaacgcgagagcactgttggattccgtcgacgcatttctattcgattgcgatggtgttatttggaaaggcgacaagctgatcgatggagtcccacagacgttagatatgcttcgatccaaggggaagaaactggtattcgtgaccaacaactctaccaagtccagaatccaatatgctaacaagtttcagtctcttggactttctgtcaatcaggatgagatattttcgtcttcttttgctgctgctatgtacttgaaggtcaaccagtttcctcctcacaagaagtttatgtcataagcggggaaggcataagacaagagttgcaacttgctggatttac

SEQ ID NO: 41971 - DNA, 383 bp, Gossypium hirsutum
  Clone ID: LIB3189-023-P1-K1-H4
cccacgcgtccgcccacgcgtccgcccacgcgtccgtccacgcgttcgtagaaacagaaaaaatgtactagaatcggacactttgaattcatattgatcttgtgttgaaagcaggaattgaattctatgagaagtaacctcccattgttccccagtagctcagcttgtttgaggctttggcatggttaaaacagacaaatgccaaacatgttacctatgccattcttttttaaagaatctgtcattagtttgtttactcaagtgtttggtgatgatatatactcttgcttttggcagtcattatgaaagatttcacgtgtagtgttacttggtggggcttcctttcattcttaccttttagggaattacacaaccccacaaga

SEQ ID NO: 41972 - DNA, 463 bp, Gossypium hirsutum
  Clone ID: LIB3189-023-P1-K1-H5
cccgcgggtacggattcgcgattcgcgccacgcgtccgacttgcgactcttaaaagaaattaaccatggcaacgagtgatgccgaagtgaaagttttgggcacatgggcgagtccattcgtgatgagggtaaggattgccatgaacatcaagtctgtggcctatgaatttcatcaagagaggttatgggaaggcaaaagcgagcttctcctcaaatcaaacccagttcacagaaaggtccctgtcctcattcatggtgatgacaccatctgtgagtctctcattattgtccaatacatcgatgaggtttggccttctgctcccattcttccttctgatccccatgaacgtgccaccgcccgtttttgggctgcttatcttgacgacaagtggttcccttccttgagagctattggtatggctgaaggagaggatgcaaggaaagcagccatagggcaagtgga

SEQ ID NO: 41973 - DNA, 249 bp, Gossypium hirsutum
  Clone ID: LIB3189-023-P1-K1-H7
ctgacgcttgatctgactcatcagttaattttaaaacttctttttttacccttgatcattcacggtacattttaacaacaacaataattatcaaaacccatatttttaaacccatctttcaccatttaaaattaaaaataactagagttgtatcatttttcacatttttgaaagaattcgatcgatattaatgtttttttatatattattccattattccctgattttacatcctatattcatagtttc

SEQ ID NO: 41974 - DNA, 308 bp, Gossypium hirsutum
  Clone ID: LIB3189-023-P1-K1-H9
gcgaaaaaaaaaaaaaaaaaaaaaaaaaaaaaaaaaaaaaaaaaaaaaaaaaaaaaaaaaaaaaagagaaggaaaaaaaaaaaaaaaaaaaaaaaaaaaaaaaaaaaaaaaaaaaaaaaaaaaaaaaaaaaaaaaaaaatcatgaataatggtttccttggtttaacgctatctaaattgaaatgcgatggatttaattttaaaggctacaagcagaatcaatgaagtccacaaacattaatatttataaaaattacacatctattaatagcactattgtgatttaaaattataaataaaattatatt

SEQ ID NO: 41975 - DNA, 189 bp, Gossypium hirsutum
  Clone ID: LIB3189-024-P1-K1-A1
gaatcttaaaaaggaataaaaagtccttgaataaaattatcaagtaataagttttaagtataacaaaatttgagaaacaccaaaggaaaattcataaaagagcatccagcataagttcattttaggtgccaaacttaaaaactacaaaatctaagacacttgacattctccaaatttcaaatagatgac

SEQ ID NO: 41976 - DNA, 277 bp, Gossypium hirsutum
  Clone ID: LIB3189-024-P1-K1-A10
ctcacggtaaaaagatctcccttcccctctctttctctccggcggcgatctcaaatcaccgggggatcgcaccgtaacgcccgattactcgtcacctctgtgatctcctctgacacctcgtggtttcagtttattctaactcgtcgccatcatgaatcccgaatatgattatctgtttaagcttttgcttattggtgattctggtgttgggaaatcatgtctacttttgaggtttgctgatgattcatatctggatagctacattagtaccattggt

SEQ ID NO: 41977 - DNA, 399 bp, Gossypium hirsutum
  Clone ID: LIB3189-024-P1-K1-A11
ggttaatagataatgaatttattgaacgagttgtgtactcaagtgctcatgagctttccgtaaatgtttcttttttttccccctgtaaacatatatatatatatgattaatgatcaaacactgccttcaaatttaaaaaaaaaaacttttggtaactgttcttaatcattatcaatttaattattcaaaaattggggtaacaatttccattcagcagccaataggggaaaacattatactggtttacttcttatgcaggtatttgaaaccaacctacacagagatgccaacaattgccacggggatgtgtccaatattgctttgtcaggccatgagcttctcagagtacttaacggctttcctcttagaggaaatttcatgctctgatttgattgggga

SEQ ID NO: 41978 - DNA, 451 bp, Gossypium hirsutum
  Clone ID: LIB3189-024-P1-K1-A12
atatcttccatttcacgcctataaatatcctttcaatcacacctcaataaatcattgctttcactactttcaattcttcattccttctgtcattttgggttttactcttcttcttttttttgtgaaatcaagatggatcttgatctttctccaaagctggcaaagaaagtgtacggtgacgatgctggaagctactacgcatggtgccccgatgaacttcctatgttgcgtcaaggcaacattggtgcagccaagttggcccttgagaagaatggctttgccctccctctttactctgattcttccaaggttgcttatgtccttcaaggggctggtgttgctgggattattctccctgaatcagaggagaaagtgattgcaatcaagaagggtgatgcaattgctcttccatttggtgtcatcacctggtggtacaacaaggaggacactg

SEQ ID NO: 41979 - DNA, 437 bp, Gossypium hirsutum
  Clone ID: LIB3189-024-P1-K1-A2
catctctctcgtctctgggtctcgtaagttggtgaatagtgttgtaattagtgccaatggctcggattgggacctctgcagctcacattgtgttggcaatatttgctgtggccatgtttgttgtgtccgggaccatggcacaggatattgctccttctcctgcaatggctaccggagcaggctctgctttgccggtttccgctgtcttcttatgctcttccatgttggtctttttaattgctctcttggtgcattgaattcaaagcttttcaagactttatgacattggctacccttaatttcactctcactggtgatgaggggagtagcctctaatcttctccgagataatatttgggtgttatcaattttcaatttctctaaagttttaaatatctctatatatatcatgttacattagtgacataaatttgatt

SEQ ID NO: 41980 - DNA, 387 bp, Gossypium hirsutum
  Clone ID: LIB3189-024-P1-K1-A3
gttgtaattagtgccaatggctgggattgggacctctgcagctcacattgtgttggcaatatttgctgtggccatgtttgttgtgtccgggaccatggcacaggatattgctccttctcctgcaatggctaccggagcaggctctgctttgccggtttccgctgtcttcttatgctcttccatgttggtctttttaattgctctcttggtgcattgaattcaaagcttttcaagactttatgacattggctacccttaatttcactctcactggtgatgaggggagtatcctctaatcttcttcgagataattattgggtgttatcaattttcaatttctctaaagttataaatatctctatatttttcattgtacattagtgacat

SEQ ID NO: 41981 - DNA, 107 bp, Gossypium hirsutum
  Clone ID: LIB3189-024-P1-K1-A4
gaaaaataaaaggtcaagggcttaagaagatgtcgctagacgacctcatcaagcgcagccgtaaatccggatccggaaactcccgcggtcgcggtcgcggtcgtgga

SEQ ID NO: 41982 - DNA, 422 bp, Gossypium hirsutum
  Clone ID: LIB3189-024-P1-K1-A7
gcggatctatatcgtctctgggtctcgtaagttggtgaatagtgttgtaattagtgccaatggctaggatggggacctctgcagctcacattgtgttgtcaatatttgctgtggccatgtttgttgtgtccgggaccatggcacaggatattgctccttctcctgcaatggctaccggagcaggctctgctttgccggtttccgctgtcttcttatgctcttccatgttggtctttttaattgctcttttggtgcattgaattcaaagcttttcaagactttatgacattggctacccttaatttcactttcactggtgatgaggggagtagcctctattcttctccgagataatatttgggtgttatcaattttcaatctctctaaagttttaaatatctccatatatatcatggtacatt

SEQ ID NO: 41983 - DNA, 360 bp, Gossypium hirsutum
  Clone ID: LIB3189-024-P1-K1-A8
catctatctcgtgtgtgggcctcgtaagttggtgaatagtgttgtaattagtgccaatggctaagattgggacctctgcagctcacattgtgttggcaatatttgctgtggccatgtttgttgtgtccgggaccatggcacaggatattgctccttctcctgcaatggctaccggagcaggctctgctttgccggtttccgctgtcttcttatgctcttccatgttggtctttttaattgctctcttggtgcattgaattcaaagcttttcaagactttatgacattggctacccttaatttcactcttactggtgatgaggggagtagcctcttaccttctccgagataatatttgggt

SEQ ID NO: 41984 - DNA, 408 bp, Gossypium hirsutum
  Clone ID: LIB3189-024-P1-K1-B1
gctggggatgatgctccccgagccgtattccctagcatcgtcggtcggccacgtcacaccggtgtgatggttggcatgggccataaagatgcatatgttggtgatgaagctcaatcaaagagaggtattttgactttgaaataccctattgagcatggtattgtgagcaactgggatgatatggaaaagatttggcatcataccttctataacgagcttcgcgttgccccggaagagcacccagttctgcttactgaggctcctcttaacccaaaagcttatcgggagaaaatgacccaaattatgttcgagaccttcaatgcccctgctatgtatgtagctatccaggccgtgctctcactttatgccagtggtcgtacaaccggtattgtgatggactcgggagat

SEQ ID NO: 41985 - DNA, 189 bp, Gossypium hirsutum
  Clone ID: LIB3189-024-P1-K1-B10
cccacgcgtccgccgcttcgtgcacgattctgaaattttgcctgccgctccatctctacagcacaggaatggcgacagatgttgcagcccccgccaccgccgtacccaaagacccaacccaacctcaccttgaagtaaaactcttcaacctctggagcttccatgaagttcagggtgcttatctcttct

SEQ ID NO: 41986 - DNA, 296 bp, Gossypium hirsutum
  Clone ID: LIB3189-024-P1-K1-B11
ctttttctaacttcccttcgtttttccctttgtattttgtttcaagaacccccaaggttgtgtttttcacccatttttgggtttatattacaacaagatcagagagaaatcaaacaggatttctgggtttcgttgagttttcacgagaatataaacaattcgagtgattgaaggatttctttcttttttttgtttgaaaaatggtggtgaagatgatgaggtggagaccatggccgtctttggtttcaaaaaagtacgaggtttagttaattgtaagaagattagaagggtgggat

SEQ ID NO: 41987 - DNA, 353 bp, Gossypium hirsutum
  unsure (1)..(353): unsure at all n locations; Clone ID: LIB3189-024-P1-K1-B3
ctccaaacagaccggcccctttattttggataccggtggcaggtgaaagtggcgatttgcgagatttgcgaaggcaaaataatgaatctttattcttaattgaatcaagagattccaacttgaaatttaagaaatggaaaagtggtcaaaacggctcgttttcatgtttttttgcttatcagnttgtatccaaatcccatatgtttcttcgtctactgtcccccttcaaggaaatcagggttacaaagaatcttcagctgcaagaacctttaagctagaggatgctcatgaattacgtcgctcatgagaaaggagttgagttgcacgctatgttattgcataatctctaatgt

SEQ ID NO: 41988 - DNA, 54 bp, Gossypium hirsutum
  unsure (1)..(54): unsure at all n locations; Clone ID: LIB3189-024-P1-K1-B4
gtttatctcgctgaagctaggcgaagcgaatctctcgttntcaaaaatggcgtc

SEQ ID NO: 41989 - DNA, 460 bp, Gossypium hirsutum
  Clone ID: LIB3189-024-P1-K1-B5
cccacgcgtccgcccacgcgtccgtgaaaatcaagaaggaaaaaaaacccttaaaatcaaaaccctaatcctatttttttttcctttttgattgtagaaaacaaagcaagccctcaactggacaacatggggtctgaacagaatcaaggaaccagctttcccccgtcggagccgaagctttgcgctaacggttgcgggtttttcggaacggcggcgaacatgaacctctgctccaagtgttaccgggacctccgtgctggggaggagtaagcggcgaatgcgaaagctgccatggagaaatcccttagcgtcaaaccgaaagaagatgttgttgtggagacgtttaagcccgttgagaagctgcctcatgcgggttcatcatcagcggcggttgagcaaccggcggtggctttttccggtgatgaacagcccgagccaaaattggcgagcaggtgcttta

SEQ ID NO: 41990 - DNA, 194 bp, Gossypium hirsutum
  Clone ID: LIB3189-024-P1-K1-B6
agctaatctcttcaaagtcgaagtctcatctctgcgattctagtacggattgccgattatattggttttcattttcttatggattctcagcattttctcggattctttcttctaatcttgcttcagtcttgtttgggtgcggctgagagtaatggatcgagtcgtgagattgaaagcaggctcttttttttttg

SEQ ID NO: 41991 - DNA, 421 bp, Gossypium hirsutum
  Clone ID: LIB3189-024-P1-K1-B7
cccacgcgtccgctcctcctcctcctccagtgcggcggtgcctcacccaagccctcttttgccttcagatttccggcggaccagtaatttaaataaagtggggaagaaatgagtgctttcaataagttcaaagcaagtgttcctgttgcatggagcccgaacctctatataacccttgtgaggggaattcctggcacacgaaggcttcataggcgcaccttagaggcactaaggttacggaaatgtaaccgcactgtcatgcgttggaacactcccactgtccggggaatgcttcagcaggtgaaaaggttggttggtgttgagacagaagaaatgttcaaggcacgcaaagagaatgaagccaaacaccgagctctacttccccctatcggcattaatcatctcttggctttttgaaact

SEQ ID NO: 41992 - DNA, 212 bp, Gossypium hirsutum
  Clone ID: LIB3189-024-P1-K1-C1
ctcgaatttgacgcgattttcttttcagaaaaggaaaatccttttttcgcatgccataaatatgcagcgcgattcaaattttaatgcttcgagaaaacagaggaaaaaagagaatattacgcgctttttagttcgctgttgactgaaaaactccgctcattacttcgatccgatcattattctcaaacgaagttcaaattttctgacgggag

SEQ ID NO: 41993 - DNA, 348 bp, Gossypium hirsutum
  unsure (1)..(348): unsure at all n locations; Clone ID: LIB3189-024-P1-K1-C10
cgaattcccggtcagcccacctctctaaaacatagataggaagcttcacttntcatcttactgctctcacttttcataaaaagatgatttattataaacgaatagcccctcaatcctcttctttttccttattaattcatttatttaaattcttttctttcattcattattttaattttttgtattctattatattataatttcatttaatttttatattatcttttaattttttttttcttatttaattttttttatttaatttatttctttttctttaacttttttttaattacttttaatttctctattattttaaatataatttattattaatttttaataata

SEQ ID NO: 41994 - DNA, 178 bp, Gossypium hirsutum
  Clone ID: LIB3189-024-P1-K1-C2
cccggtcgaccacgcgtccggttatcagaaccctaaaatccttgcttcatatcatgtgacatgggaactgggatgtgggtgaggaggcgcgattcaatttctaacgcttcacttcatcagtggaaagaagtgattttaacgcgctttttttattggtgacctctgatattctatgttg

SEQ ID NO: 41995 - DNA, 374 bp, Gossypium hirsutum
  Clone ID: LIB3189-024-P1-K1-C3
tttttatttttccgacacaatccatccactgaatccattagaatgttttatcaaaacaagtttctcatacatacaacataacattacacaactttttgttatcccaatcattcctgatcaaaaccaccactacaattggaatttctaactttatcttatattaaaactgttaccctttttatattcttttcaaacattacatcctcattatatttattctttattcaataatttttttttttttttttttattacttctccattttaattctttttaaattatatttttttaattcattttttatttcctttatttattatattatttatttaattatttcttattcattattttatttctatacatttttttt

SEQ ID NO: 41996 - DNA, 233 bp, Gossypium hirsutum
  unsure (1)..(233): unsure at all n locations; Clone ID: LIB3189-024-P1-K1-C9
cccacgcgtccgctactccaagcaagtattttccttacacgtttgtttttcttgtgattaagcaatatggctagctcaatgtcccttaaacttgcatgtgtggtggtgttgttcattgtttattttattaatatttttntattttttttattttgttgtttctgtattttttttttattttattttttttattttttgtattgtttgtttatttttttttatgattttttttt

SEQ ID NO: 41997 - DNA, 176 bp, Gossypium hirsutum
  Clone ID: LIB3189-024-P1-K1-D10
cccactcgtccggttatcttcaacaatttatcttctttattctggttgctctaccattcaagaagatttctccaactcattcctctttaactaatggtaatgttaatatattgccttctaccaatacatgcaataaaagaacttttactctttactattaaaactttatacccata

SEQ ID NO: 41998 - DNA, 353 bp, Gossypium hirsutum
  Clone ID: LIB3189-024-P1-K1-D11
ggtacaaccaaagattagtgcttatatcgggactactttctaatccaaccattgcatgggacgtgcatttcaatttgcatgaattatttgaactgggacatgcaattcatgctaggcctgagtgcagctgccagtgttcgagtgagtaatgagctaggggcaggccatccaagggtagcaaaattttcagtgtttgtagtgaacgggacaagcatattgataagtattgtattcagcgcaattgctttgatattccgagttggattgaacaaagcatttacaagtgattctgaggctatagaagtagtttgcagacttgtctccactgcttgtcatctcttgttttcttaatg

SEQ ID NO: 41999 - DNA, 349 bp, Gossypium hirsutum
  Clone ID: LIB3189-024-P1-K1-D12
ggaagccaaaatttctagaatgaaaacttgtgttgatagcagctcgaaaattaccataaaagggacttacaaagaaaatacagtccgttttaagtttgagccatctgcaggatgcttccaagtatatgaagaagttgcaaaaaggttcaaaggtcaaaacgggacattccaactgaactatttagatgatgtaggggaatgggcattgttggttttcgtcttatttttattctagtgttttgttaaattttttattatatttattttatttcttcgtgttatattctttttttcttttagatctatgtatttttattgatttggggaattacattttatttatgtttaa

SEQ ID NO: 42000 - DNA, 412 bp, Gossypium hirsutum
  Clone ID: LIB3189-024-P1-K1-D3
agaacacaagtatccagtctagtcctccaatcaaacgccccttttgttaactgtctcaactttagccatttgccttgtttttagcaaaacaatgtctactttagttcctgatttcccaaatctttcttaatttttcttccgattttcattttcgggttttacaaatagatttcgtcttccaattttccctagaaaaagaaataaaaaaaatgatgccaagtgaacagcaaagtcatgatcaacatcgggatccgttatcgtgtgttatttacgagctgtcggcgctagtcctgaatctcctccgatcgccaccgacgccggttccgactaagatatcggcggtgggattcgcttggctgatgctagggatatcggtttctttaatgctttgtggatcagtgactttcttttt

SEQ ID NO: 42001 - DNA, 423 bp, Gossypium hirsutum
  Clone ID: LIB3189-024-P1-K1-D4
aaatgaaagaaaacgaacttaaacgatgatcaaaataatgaaccgaattttcaacaaccaacccagatgaaacacaatcagaagaaccttaaagacatcacatcaacaacaacgacaaccacaatgtgatgtcaaaagctgatgctgtcacataaatataacatttttcgaaatggataacaatgcttatagtatcccaagccacaagagttcatccatgtccttgctttttccttcaagctcctttcagggttaatgatcctcaatcttcttcaaccccttcatgtccgtcgtttccaccgttgatccatacaaagcaatcttctgaacctttgtaatttctgaacctgactgattatcttcaataaatattgtcaagctacggacattctgaaacttgacatactttacgactacaggttt

SEQ ID NO: 42002 - DNA, 284 bp, Gossypium hirsutum
  Clone ID: LIB3189-024-P1-K1-D5
gtccttttttgagggaaaaaagactattattatgattgacaaatttagctataactttctttgggggtctttgtacaatcaagcacatatatagcattttctgttaaatattccaggtttatttcaaggagctaatccaacctgtttccacactgttttttcattcccttgcaagggatatatttagtcaacacataaatgtgatcatatttggtatcccgttcatttccctgcagttgtcaagctttagacagcttcttaatttatggccttccttcttttcc

SEQ ID NO: 42003 - DNA, 252 bp, Gossypium hirsutum
  Clone ID: LIB3189-024-P1-K1-D7
taatatagttattattcaacttttcttttttttctctttttttattaaaaaaattcctatagtagttttttttcttcttttctctccatctcttttcctcccctacatcaattctctttcattatctccctttctccctttacccttcatcttctcacacctttttattatcctcttcttttcctctttcttactctctatatattttttatttcttcctactttctaccattttcttttccattatttttt

SEQ ID NO: 42004 - DNA, 367 bp, Gossypium hirsutum
  Clone ID: LIB3189-024-P1-K1-E1
tcccggtcgaccacgcgtccggtagaaggttaagttttacaaacatggctagttccggggtccttaagttggtttccatgattgtgatggtgtggcatgacgatgatgagtgcacccaaggcagccaaagccgccatcacgtgcagcgacgtggtgaaccacttgatcccgtgcttgtcctacgtacaaaacggcggtacacccgctgctgcatgctgcagtggggtaaaagcactctacggcgagggtcagaccttcccggaccgccaaaacgtgtgcaagtgcatcaaatcggcggtgaacggaatttcgtacaccagcaataacctcaatcttggaggcggcctacctgctaaatgtggtcttc

SEQ ID NO: 42005 - DNA, 445 bp, Gossypium hirsutum
  Clone ID: LIB3189-024-P1-K1-E3
aaatctctgagggaggtttgaaacgtatcgaagagaagtacacatggaaaatttactctgagagactattaaccttgaccggtgtctacgggttctggaagcatgtgtccaacctcgaccgcctcgagagccgtcgttaccttgagatgttttacgctcttaagtaccgtaagctggccgaatcggtacctttggcagttgaagagtaaattgaagttgccggggaaagaattgggagggatttccgagttcttgagaataatctttgttgttttggcattttgatccaactcttttgttttctctgttcttttatgtgtatttgtctttgttcatgttttgggcattgtttcaacatctgggcgttgagcccatcaattctaagtaaagaaaacatggcaacttttgcttcaaaaaaaaaaaaaaaaaaaaataaagggcgggc

SEQ ID NO: 42006 - DNA, 274 bp, Gossypium hirsutum
  Clone ID: LIB3189-024-P1-K1-E4
acataataaattctcaccttttttattctcttcaaagtttctttttcttattccaaagagaaatggagagccaaagaactgtaaacaaagaacccaaaaatctatcaccatgtagcagtggaagaagaagcagtacgagcagtcattcaagttcacccgaattcgagttctggatggttagaaacccgtcttttcctcaacccgatctaatcttcgccgatgaactcttcgttaacggagtgcttcgttcttttcattttttattctgcaaaca

SEQ ID NO: 42007 - DNA, 73 bp, Gossypium hirsutum
  Clone ID: LIB3189-024-P1-K1-E7
agcagtccgagatggggaatagagttccattgtgaaccggcaccttgcactattgggttatgtcgtatcctaa

SEQ ID NO: 42008 - DNA, 344 bp, Gossypium hirsutum
  Clone ID: LIB3189-024-P1-K1-E9
cccacgcgtccgccagggtttcaactcactcttcaatcttcgactgaaccgctagagttgcgggtgatcgtaaaagatggtgctttctcagaagattcacgaggctttcaaaggaactgtagagagaataacagggccccgcaccatctctgcttttaaagagaaaggggttttgagcgtctccgagttcatcctcgcgggcgacaatctcgtctccaaatgccctacctggtcttgggaatcaggagagccaagcaagaggaagtcctatttaccgcccgaaaagcaatacttgattactaggaatgttccttgcctgaggagggcttcatcggttgtacaag

SEQ ID NO: 42009 - DNA, 451 bp, Gossypium hirsutum
  Clone ID: LIB3189-024-P1-K1-F1
cccacgcgtccgaaattccattccattctattgaatatcttccaatcaatatctctctttcttgcatcacaataaaaagtttctctctgttaagaattcatgtcggaccagggtaaaccattgccgaaattcggtgaatgggatgtcaacgatcctgcatcagccgatggatttacggtgatctttaacaaggcaagggatgagaagaaaacaggtggcaaacccgagtcactggaaaaagctgacactcatggtaagcctggagccgaccccaacaaaccccaatccaaaaaatggctttgctgcgttcaagccccgcaggcggaatcttgaagaactcatgccgatataagagcttccactgcatgatgaagcccccaccttatatcctaaacaagatagggatgaatggggggcatttgataaagctcttttgggattggatttgatt

SEQ ID NO: 42010 - DNA, 247 bp, Gossypium hirsutum
  Clone ID: LIB3189-024-P1-K1-F11
aaaataaaaaccaaataaggtccaaggtaaatcagtccaaatattccacttacaaccttcaataaatccaaatgctaaatttattaccaaccaaaatacaaaacatttaccgatacccaaattaaaacccaaaatataacataaacttattgacctatttcccataacaccccaacttaatccctatcccaagttacaacaatccacttttaaaatatccatattttcccaacatttataatttacc

SEQ ID NO: 42011 - DNA, 207 bp, Gossypium hirsutum
  Clone ID: LIB3189-024-P1-K1-F12
agtggagccaattgtggtttggacgtttcattagtaggaggaggccgaaaattattgcaagaacggtaaatagaagatgagggacctctttttgatcttaatgggtagaataatggataatttcccgcctttacataattatggtttggatcatcatatttagcgtattttattcatttgtgtattattttgtctttgtttattttt

SEQ ID NO: 42012 - DNA, 470 bp, Gossypium hirsutum
  Clone ID: LIB3189-024-P1-K1-F2
attagctctgaagatcatgttggctatttttcacaaggcattcgctaatccaccagaggagctgaagagtccagcttgtcataaatctaccaagaagcctaaacagcctgaagaaaccctaaatgatttcctatctcatgaccctcacaacactttgtccatgagctttggcaacgctgctgttttggcttatgtccggcatgaacgtgctgcttcagttcatcagaggttgtgtagagagcttgcactcatagtcagcctgtagccaacccgctcaaaccccaatccaaaagctggctttactagattgaagccccgcaggcagaatcttgaagaactcatgccgatataagagcttccactgcatgatgaagcgcccaccttatatcctaaacaagatagggatgaatggggggcatttgataaagctcttttgggattggatttgatttttggttgtaaaaatttat

SEQ ID NO: 42013 - DNA, 198 bp, Gossypium hirsutum
  Clone ID: LIB3189-024-P1-K1-F4
cccacgcgttcgcccacgcgtccgaaattacttttagaggaaaatggggaaacagccggtgaagatgaggtgctgtggtatacgctttgtctccttttcaacataagattatgtatttttcctttggacaagattctatcaatatgatgatttttaacaatttttttttatttaaatttaatttattttctttttctt

SEQ ID NO: 42014 - DNA, 321 bp, Gossypium hirsutum
  Clone ID: LIB3189-024-P1-K1-F7
gttttctcagcgctaaactgttcttatgccttgttaacattatttcaacaccatgtgacgggtttgctttgaatcctactggtctaaccctaaggctgtcctggatgattctccaaactctcctttataccttattgaaaacatgtactatagctgaaagaatcgaaagatttatccaagttaccaatgctaaagacaattattcgatcttaatgcaagggaggccctgataattctaattctctatctgagtagaatggctcgagatggttatttattcaagatggcttttaataggaagcaaggccatgaagtgaagct

SEQ ID NO: 42015 - DNA, 158 bp, Gossypium hirsutum
  Clone ID: LIB3189-024-P1-K1-F8
tcttccttttctctcatctctaaactattcttatccctctttctaacattatctcatctccatcacagaattttttcttttaattctactcatctaacctcttaaacttatctattatctatatctctaattctcctatcttatcctaattttaaaca

SEQ ID NO: 42016 - DNA, 308 bp, Gossypium hirsutum
  unsure (1)..(308): unsure at all n locations; Clone ID: LIB3189-024-P1-K1-F9
gttccacttatgcttatgatttaatgtttatggtgtctttctcctttattatgatctcttctaagttgaattttcaattntaactttttttttattaattactatataaagagaacttttaaaaattttaaaaaattttcaattcttttataaaatcattgctttcatactttatttttcttattatttttattcatattatttttttatttaaatatattttatttatcctttattttttttattttatttattttttttattttctatttattttactttaattttatttaattataatttatttt

SEQ ID NO: 42017 - DNA, 469 bp, Gossypium hirsutum
  Clone ID: LIB3189-024-P1-K1-G1
cggacgcgtgggcggacgcgtggggtgacggaatgcgaacggtttttggacaagcccgttatcgtaagcggagtcttcctcatgctcgtctcacttgcgggactaatcggcgcgtgctgtcgcgtcacttggctactctggctttacctagtcgtcatgttcctcctcatcgtgctcggcatcgtcttcaccatctttgctttcgcggtgacgaataaaggtgctggagaagctttgtctgggaaagggtacaaggaataccgacttggtgattactccaactggttacagaagagagtcactagccagaagaactggaataagattaagagctgtttggctgatagtaaagtctgtactgatttccgcgataagtatctgaatgcttctgcctcggagttttaccagacgcatttgtccgccgttcagtctggttgctggaagccatcaaacgactgccaattcacgt

SEQ ID NO: 42018 - DNA, 222 bp, Gossypium hirsutum
  Clone ID: LIB3189-024-P1-K1-G10
aatcaaatgagaagggatccagtaataaggaaaactgaaaaattattacaatgggaagtgtttgctcctgttatagaccaaaaaaagaaaaagtgtttgctacacgcttggaatacttcctagttcctatcaacaaacttgcccatgatatggtgaactgcaacaaaagcaattaatccaatgcttatttcaagcaccacatttggagagattttgagttct

SEQ ID NO: 42019 - DNA, 433 bp, Gossypium hirsutum
  Clone ID: LIB3189-024-P1-K1-G2
gaagctttgaagcaacaaactttctcttcttctttaaagatggggctggaatctcctgaattcgccgaaatactttcaaccaaagaacactgcaaacctcaatgacactttgtatttaagaattgaagagagcaaattttctaagcatggaagtagtctcgctgcattcccctccatgctgtcatttaaacaggagattattagtaaagaaaagatcaagtggacagcaagtaaaaatccctttgtgtagaaaacgaagaattttgtgtagcaaggttcattacagaactgagtcacgggcattatctaataaagatcactctttgctgaatgggaaagttacaaggccatccaagcctgttgaaaggttcagtgaggattctaatggttacgtgattggtagtgaaaatgaaacttggaagcttgctatgaa

SEQ ID NO: 42020 - DNA, 437 bp, Gossypium hirsutum
  Clone ID: LIB3189-024-P1-K1-G3
attcccgttcgacccacgctccggataggctgtggttatcatggcagcgtccctcgtatggaaattgggtgcagcacaagtgcaccatgtgatcggatgtgaccgtaagtacaacttttacctttatttcactttatttttaataattgtatactgcaatatttgtatatatattatttttatggttttatttccatttttgtttattttttttcatttgttttcttttaattttaatatctagttttctggtattaaattttttttattttgtaaattataatcttctttttattgttattctgtatttttttttgttttttttaatattaattagttttttttttttctaatttattttattttaaattttttttttatttttttatttttttttttattttctcattatttattattttttatatttataattt

SEQ ID NO: 42021 - DNA, 133 bp, Gossypium hirsutum
  Clone ID: LIB3189-024-P1-K1-G5
cacattaactccctcgttccttggttttttatctaatgaacaccaacctgtaagagctgatcatgattaaccattttaggggctttccattaaccatcagtcaactgttctcataacaaattttactttgact

SEQ ID NO: 42022 - DNA, 432 bp, Gossypium hirsutum
  Clone ID: LIB3189-024-P1-K1-G6
gaaaaaaaaaactgaacctatcctctccctttcaaggttcccagcagccaaacatggcccacgccggcgagcggcggttccaaaggccaaagctccttcacgagcggtggtcggagcgagaaaaggagggctttttaaccccgttctcgacctccaccttaaggcccggtcctccagaccaaacaagccgaaacaaggagagacctttcgtctccttctcggtccgattccaacaccgaagatggtctccggcgacgggctttcgagaccggtactggtgaagtcaacgggtattggaagaataaacctagcctttttggtgcaaaactggtcgtgcttcgggcgttgagtgcgctgcaaatgcacgaggagacgtacggcgcactgaggctgctggttgtgagctgaattgggctagggttttgccatctt

SEQ ID NO: 42023 - DNA, 436 bp, Gossypium hirsutum
  Clone ID: LIB3189-024-P1-K1-G7
ctaagctctcgtttctcaaatttctctctcattcgcttttcttccgtttggctcaaattcaaaagtctctcgcggatccctctgcgattatctccaaagggatcaacaggtagagaggataaatggggctgtcattcgctaagcttttcagccggctttttgccaagaaggagatgcgaattttgatggtgggccttgatgcagccggtaagactaccattttgtacaagctcaagcttggagagattgtcaccactattcccaccatcggatttaatgtggaaactgttgaatataagaacatcagtttcactgtctgggatgttggtggtcaggacaagattcggcctttgtggaggcattacttccaaaatacacagggtctcatcttcgtggttgacagcaatgacagataccgtgttgttgaggccagggt

SEQ ID NO: 42024 - DNA, 186 bp, Gossypium hirsutum
  Clone ID: LIB3189-024-P1-K1-G8
cggacgcctagcatcttttatctttttcttacaaacttatataacaaggggcattacaacgagggcgatctttattatacccatgcgcatatctacatcaacctctgcagatatatcacattaattttctgcttttttatacacatgaatttattccattttattaccccaatctccatcccaatt

SEQ ID NO: 42025 - DNA, 384 bp, Gossypium hirsutum
  Clone ID: LIB3189-024-P1-K1-G9
cggctttcaaaaaattttcaacacacaaaattggttttaacaattaaacacaatctaaagcaagtttggttgcagccgttgcacggtttcgtggctgatcctctcttgtttcaaatctttgttgctgtggttgattgcccttctatcaggatggctggaccagcaccattcgttgatctgggaaaaaaagccaaagaccttctgacaaaagattacaattttgaccagaagtttactctttcaatgctgagcaccacgggaatgggacttacagccacaggactcaagaaggaccaaaatttttttggtgacataaatactgtgttttagagtggaagttcttctgtggatatgtaagttggtacctattcttatgtgtctcat

SEQ ID NO: 42026 - DNA, 436 bp, Gossypium hirsutum
  Clone ID: LIB3189-024-P1-K1-H10
caacgaaaagaaaggtcaaaagaaaaaaaaaattctggtttccatggaagaagaggctgaatcacgcgaggaagtcaagccaaacgtcgtcgttaaagagacaaatggagatattgtcggcgataacgatgcaggaaaattgggtaccattgaaacccctgattttctttcccagaaaatattccataactgttccctaccaattctggcatctggagtaattaccacaagccctgctcaatcccaactcaccatcttctatggcggaaaagtttctgtatttgatgcaatttccgctgaaaagatacaagaaattatgcttattgctgctactgtggctgctgctgatgttggctcttgtgacatgaagaatgctgcaaccgattatgccaccatttcacctgctcttacaaggtgtccttcacttcaaagtact

SEQ ID NO: 42027 - DNA, 289 bp, Gossypium hirsutum
  unsure (1)..(289): unsure at all n locations; Clone ID: LIB3189-024-P1-K1-H11
accgtccgaattcccggnnggnnnnnnnnnnnnaccaagattagtgcttatatcggctcctttctaatccaaccatgcatgggacggatttaatttgcatgaatcatttgaactggacatgcaattatgcttgcctgagtgcagctgccagtgttcgagtgagtaatgagctaggggcaggccatccaaggtgcaaaattttcatgtttgtagcgaacgggcatgcatattgatacgattgattcagtgcaatcgtctgatattccgaatggattggcaaagcatttca

SEQ ID NO: 42028 - DNA, 349 bp, Gossypium hirsutum
  Clone ID: LIB3189-024-P1-K1-H12
ctcgaaaccccctttttgtgtcgattattgtttaaataagatcaataggactttcgccaagcctatagcaggatgtgtgtgttacctggattcatcacaattgtgaatatcctacttcggttaacctggcatctcttacattttactatccacttattctactttgcgatcaatattgcaaatgcgctcgaaagccatcttatatccaagggattacttatgagatacaaatccctccatatatccaagcttcagtatctggctattgtgatagaaagcgaagattgccgaacttcgaatgttatcgagcttttgcaatggctggcagatcttggtgtcaaacatgttt

SEQ ID NO: 42029 - DNA, 418 bp, Gossypium hirsutum
  Clone ID: LIB3189-024-P1-K1-H2
gccaaccaacccgtccgaactaaaaaaaaaaaatgggaggcccttcacggtatttttaacgtagccaccaaactcattggaagaacatttctccaacgagtgaaatgcccctcctatctaaagcttgtttgaatacacaaaaaggtgctaactttgaaaaacaaatttccctacacttatctttacgctttttaatttgtcaaacaaatttattaccataaattttataaaattttataattcgctctttgtttgatcccttcttattattaatatagtttatcctattcttatattcattactcttacccttattttactttattttatattaatttttattatttatcttctctctactagttttcaataataatctttctctaattaattccaatatttttatattatttacgtg

SEQ ID NO: 42030 - DNA, 470 bp, Gossypium hirsutum
  Clone ID: LIB3189-024-P1-K1-H3
gtgaaaatggggagtgttgtgcacgcatcaatctcaactgttagggtggggctctacttctggtgctggtaatgggattcgggccaattcccaatatactgtgtgccgagatcttcccgacacgggttcgtggcatctgcattgctatatgcgcccttactttttggatttgcgacatcattgtcacgtattcgctcccgttgctgctgaaatcagttggccttgctggcgtctttggcatgtatgcagtcgtatgcgttatatcatgggtgtttgtcttcttaaaagttccagaaaccaaaggcatgcctcttgaagtcattacagaattctttgcagttggtgcaaagcagattgcagctaccaaggacaactgagatcggtttatttctttgattttcatggatattgaaagttttgatttttgttcaaaatttctcctcattcgaataggcagagtttgatttatg

SEQ ID NO: 42031 - DNA, 286 bp, Gossypium hirsutum
  Clone ID: LIB3189-024-P1-K1-H4
actcttgttcggacacgtttgttttcatgttattaatacataatctaagtaagtctttatattactaacattatgtataaatgacacgaaaaaaatttattgaaatatcattaaataattaaaaagtgactataaataatgtgatgagaagagttcataaaataatttttcctgttactttaatttcaattaaacatcatgttttaaattgaaatgtgtttattaatgctaactttttttaattaaaaattagaataatttggaaaatttaaatcaatttaaaatc

SEQ ID NO: 42032 - DNA, 388 bp, Gossypium hirsutum
  Clone ID: LIB3189-024-P1-K1-H5
acggatacaaccacagactggtgcctatatcttcacttttctctttcaagttttagggtttagatgcttgttttctctctaaatttcagctgtcctcaagaatacacttattttgctgcagatcgtctaattttctaggacatggactcgtttgagcaggatggaaatggggcggcacctgactctctgcctccacccccacctgtgcctcctgatgtggtgcctatcaaagcagaacctgaacctgcaaagaagaaggttgtgcgagtcccaatggccaagcgtggtcttggatctaaagggcagaagataactcttctcaccaatcacttcaaagtgaatgttggaagctctgattgacacttcttccattactgagtttctcttt

SEQ ID NO: 42033 - DNA, 419 bp, Gossypium hirsutum
  Clone ID: LIB3189-024-P1-K1-H6
ggtccggaacggcagggccgggccgacccatcgcgtccggctagatcgcgagcgtgggtctatttgtccatggatcttacacctcagcaacttatccgatggaacggctccgacccatccaagcccatctacgttgcaatcaatggtcgcatctacgatgtcaccgccggcaaatccttctacggtcctggtggtgcctactccatgttcgccggcaaagatgccagcagagctcttgcaaagatgagcaagaacgaagaagatgtctgtcccaacattgacggcctctctgaaaaggagatggatgtccttaacgattgggtcaagaaatttgaagctaaataccctgttgtcggcccgcgtgtctcctgaaaatttgcacctttcctctatgttgggtgtaatttggttcggtttta

SEQ ID NO: 42034 - DNA, 403 bp, Gossypium hirsutum
  Clone ID: LIB3189-024-P1-K1-H7
cggacgcgtgggatctttgagctttttcttccaaacttatagaagaaggggaaatccaacctggcgatcctcatttgagtcggctgcgtaacgaagtcaacctctgaagatatccacaggattgtctgtaggttgaaaaacatgaaattattgcctaattttgtccacatatccttcatcggtcatttgtcattagtgtcttttctcttcaacttgtccccatgtgccgttgcttcttcaaccaaatgatcttccatacattgttagtccctacactattttgttattaatccattccaagcttccggctttcattatctaaaagaatcacaaaaggatcgaagctcaaagatcaggttttgatggagaaatctgggtatggaagagatgggatttacaggtc

SEQ ID NO: 42035 - DNA, 360 bp, Gossypium hirsutum
  Clone ID: LIB3189-024-P1-K1-H8
acaccagaataataacttcattaatttgaatgtcctctttgcttacaaaaagcataaaaaaatcataataaagaaaaatcaatattacaggactcaaaagaacaggctttagccagttctagaaaggaatgtttagcgtcaaccacaagataagattgtgaggtcaaagaaatcttcacaattgagttatgcgtgcaacatgaacttagaacaacaaaaggaaggcttaattaagcaaagttgaaaatgctcgcagttattaaaagtatattgatggagatatgccacaatctgggactgatgatgaagaagaagaataagttaatggagataatacatcttctctttaccgcaacttcg

SEQ ID NO: 42036 - DNA, 378 bp, Gossypium hirsutum
  Clone ID: LIB3189-024-P1-K1-H9
aaaagtaaatcaaggagtttctactataaataacatatagcaatagaaaaagagtacataatttattcatagtaatgaaaaccccaagtaacaaacaagggcttgaaattacaccattttcattggccatacacacacacatcaagaacttccagcagcctcaaacagttgttttactttggtgatataatcccccattgcttcctcctttgatttcccttcaacagccttccatgcatcccacttgtacctttccctcatgttgaacattccaggacggccggtattcactggtccaacagtggcttgcttgtacagtccatagagaatgagcatgtcatcgttcgaaggggcggccgggagggtcttaactttctc

SEQ ID NO: 42037 - DNA, 446 bp, Gossypium hirsutum
  unsure (1)..(446): unsure at all n locations; Clone ID: LIB3189-025-P1-K1-A1
atttcccttttcttctcttcaaccccacctgctaaaatgcaccaatttccggtgcttcctagccggatcgcagtgtctgtactgctgatggtaactccagtcattgggtaccgtccatggcctcacttaaaacccaacagctccgatttaacgttgggaagctccaagaaattcgagggctcatcagagttcgtccaaatgagataccatatgggaccagttctcaccgccaacatcaccgtacacatagtttggtacggccgatggaaaaaatctcagaagaagatcatccgtgagttcatcaactcaatctccgccgttgatgccaagcacccttctgttggccggctggtggaagaccgtacaactttatacggaccaaacgggcgccaacatctnccatactgtgcatntagggggaagagaagaacgaccgattttactcg

SEQ ID NO: 42038 - DNA, 125 bp, Gossypium hirsutum
  unsure (1)..(125): unsure at all n locations; Clone ID: LIB3189-025-P1-K1-A11
tagtttgcagttgagaggatggtgagagnatctttttgaatgatgcactgaacagcatgtgcggtttttttaatacggtcaaaccacacgttatgatcaagcctttcttcaaagtgattatttta

SEQ ID NO: 42039 - DNA, 433 bp, Gossypium hirsutum
  Clone ID: LIB3189-025-P1-K1-A4
ctaatggaaaaaagtgaaaagggtaatggtgttgctcctgctacaaggtctccaatggctttaatggggtcatctagaaatgaaaaccaagaagtgaataccagcatgagaactgccgagaccatgctgcggttggtgcctatggctttaggggttgctgcacttgttgtcatgctcaaaaactcacagtccaatgactttggctccgtttcatactcagatcttggtgcttttaggtacttggtgcatgctaatggtatttgtgcaggctattcccttctttagctattatagcagctgtgccctagccttttactatgcctagagcttggactttttttcttactgatcagattcttaacatacgtaatttttgggagctggtttttttttaaactgaggttccttttcttatatcaactattgggtattt

SEQ ID NO: 42040 - DNA, 84 bp, Gossypium hirsutum
  Clone ID: LIB3189-025-P1-K1-A5
cgaagcttgctgataactgtactgggctccaggcttcttggttttcaatgctgttggtggtggtactggttctggttttggatc

SEQ ID NO: 42041 - DNA, 457 bp, Gossypium hirsutum
  Clone ID: LIB3189-025-P1-K1-A7
tttctgtttaacggcctgcccaccctggaaacggctcaaacggagcgtggggtccatacggtgggaagagcaccgtacgcttgcgtgtggtaacttgcgccatcgggggcccttgataatctggatgaacaagtgacagctgcgctcggacgttctgataatcgaataaagtctacaaggtgatacaaactctggcaaatgagacaccgtatgcaacgcaggttgaccgactgcatccgcgcactcatagtaaggatcggctcttgggaaagatctcggaagaagatcatccgtgagttcatgaactcaatctacggcgttgatgccaagcacccttatgttgccgcctgtggggaagaccgtacaactttatacggaccaaactggcgccaacatcttccatactgtgcatttaagggaaagagaagaacgaccggttttactcgcaccggaaaaa

SEQ ID NO: 42042 - DNA, 101 bp, Gossypium hirsutum
  Clone ID: LIB3189-025-P1-K1-A8
cccccgcgtcccgtgttgggtcctgtgtggagttgtatgttgagaaatagaaggtaaggggaccgccccacaaacgcgatgttggtcctccccttcccccc

SEQ ID NO: 42043 - DNA, 377 bp, Gossypium hirsutum
  Clone ID: LIB3189-025-P1-K1-A9
acattttcaaatttttcattgaccgagagatatagggattgttctccaatggcaacccaaattgattgtaacaatgaggaaagcttctcatatgccctccaaatcgtcacctcttcagtactgcccatgtcgatgcatgcggcggttcagctggacatcttcggaatcatggcgaaatgcgggccagacgctaaactctccgccaaggagatcgcggcacagttggctaccaacaactcagaggcggcctccatgctggaccgaatccttttattgttagccagccatggaatcgtgggctgcttcgtggtggatgaggaaaagggtaatcctcgtaagctgtacagtttgacgccagtcttcaaattctttgtgcg

SEQ ID NO: 42044 - DNA, 255 bp, Gossypium hirsutum
  Clone ID: LIB3189-025-P1-K1-B1
gaaggaaatatctaatacatgtacaaatgtgttgatcagatattacctcagttgctttattacttgtcgctgaagaatgatgcggaatctctcgattgggcaacgatagcagtatacacatgtgaagcctcttgtgaaggtgttggatacaaacaggaatttgcctgggtacaacttggtactgctattaattgcccttcatagttgctttgatttgatcatcgtctccattttaatctatattccactttcctt

SEQ ID NO: 42045 - DNA, 477 bp, Gossypium hirsutum
  unsure (1)..(477): unsure at all n locations; Clone ID: LIB3189-025-P1-K1-B10
aaaaaacagagagctaacttgctctgttttttctcatcatctttctttctccccctaaatgcggacttcatatatactttatatcaacgatgtcggtaaaagagtgcggcaatcacgggaaataccgccggaaaatcttccggcgaatcatcgccggcatcctaatcttcattataatcgttctgataacaattcttctcatatgggccatcctccgtcccagcaaacccaggttcatcctccaagacaccaccgtctacgctttcaacgcctccacccctaacctcctcacctncaatttccaagtcacttttatcttctcgaaaccccaacgacagaatcggcatttactacgaccggctcgacgtttacgccacctaccaaaaccaacaaatcaccctccgaacatncatccctccaacgtaccagggtcacaaagagatcaacgtttggtcacccttcggcaatgggaattca

SEQ ID NO: 42046 - DNA, 372 bp, Gossypium hirsutum
  Clone ID: LIB3189-025-P1-K1-B11
ggagcttcagaaacagtacgatgatgataaagctcgagtaaaggatgcagtgaagttgagagagatttgtttggcatcaacttggactctagaagacttgaaggctgccattttggaggatattagctctccacctatatctgatgttaacttgaagctgatttttgaggaattacttgaaagggtcaaggagaaggaggagaaagaagctaagaagcgtaaacgtcttgctgatgacttctttgatttattgcattctatgaaggagattacatcatcttcagcatgggaggattgcaaacatcttcttgaaagtagtcaggaattcagttccattggggatgaagacatctgcaagggggattttgatga

SEQ ID NO: 42047 - DNA, 71 bp, Gossypium hirsutum
  Clone ID: LIB3189-025-P1-K1-B12
ccgtccgatcccgtcacccacctcccccacctccgttctagatcctacaccccctttttttttttttaaaa

SEQ ID NO: 42048 - DNA, 474 bp, Gossypium hirsutum
  Clone ID: LIB3189-025-P1-K1-B2
ctgtgtccgacacccgtgtcccgagtccaggtaacataggagatagtttcaatttatcctgttctgtcacctccaaatctgactccagctcaatcaaatcgagtttgtaatgctcttgctctgcttcagtgtgtagcttctcatccagacacaaggatgttattcctgaatgctcatatacccttgtatctgtatcctttccttaatacgaccagtaagtcaaggccgtttgagtatttgaggcttactagcttaggtgtcattggtgccttggtgaaggttgatgatactgaagttatcagcttcctcctgtccactgagataatcccattatgtctgcgcacaatggagatgggcagtgaactgtcgaaaacagttgctacttttatagttcagaagattctactagatgatgttggcttggactatatttgcaccacttgaaagcggttcttgcagttggtcgagttctgg

SEQ ID NO: 42049 - DNA, 419 bp, Gossypium hirsutum
  Clone ID: LIB3189-025-P1-K1-B3
atgtgagaaggatctttctttctttattctgcacatcttaaccttaaccacatcataagatagagatcgcttaaacggtcgagttatggagactgtcttttcagcagcaagtagatccatttccaagctcattagcttcaccgctttgcttcttttcttgttttcctgctctactttcacttctactgaagcttatgatgcgcttgatccaactggaaatatcactatcaaatgggacgtaataagttggaccccagatgggctatgtgctgttgttacaatgtacaatttccaacagtatcgccatattcaggcacctggttggacattggggtggacatgggccaaaaaggaagtaatctggagcatgatgggaggccaaaccacggaacaaggggattgttcaaaatacaaaggga

SEQ ID NO: 42050 - DNA, 360 bp, Gossypium hirsutum
  Clone ID: LIB3189-025-P1-K1-B4
ggctcttcaaaatcctcgtcatcgtctcaccatcttgcggatggaacttgatatccagaggtttgtgcaaaattcagagcagcagcaatttgagttccaacattttcccacttcttatcttcggcttgctgcacatcgtgttgctcaacattatgggctggtaactatggtttatgataatggtttagatggcctaagaaacagaatcgtggcgaagaaagcaggggaaatcaaatggccctgtgtttgtttgtctgaaattcctgccaaaaactcggaaaatgataaaccagaacaggttaaaattgctattaagcctaagcccaaataatggatctgtaaatgaagctaaatcaaatc

SEQ ID NO: 42051 - DNA, 475 bp, Gossypium hirsutum
  unsure (1)..(475): unsure at all n locations; Clone ID: LIB3189-025-P1-K1-B5
gcgaagtctgcaaaatggatccgtaacctcgggaaaaggattggctctgagggctgggcacagggcggcttgatatatactttatatcaaccatctcactaaaagagttcgtcaatcacgggaaatacctccgcaaaatcttccggcgaatcatcgccggcatcctaatcttcattataatcgttctgataacaattcttctcatatgggccatcctccgtcccagcaaacccaagttcattctccaagacaccaccgtctacgctttcaacgccttcacccctaacctcctcacctccaatttccaagtcacctctatcttctcgaaaccccaacgacagaatcggcatttactacgaccggctcgacgtttacgccacctaccagaaccaacaaatcacccttcgaacattcattcctncaacgtaccaaggtcacaaagagatcaacgtttggtcacccttcgtcaatggga

SEQ ID NO: 42052 - DNA, 102 bp, Gossypium hirsutum
  unsure (1)..(102): unsure at all n locations; Clone ID: LIB3189-025-P1-K1-B7
attactggggggggtttttttatacactaaaacacccaactatancnataacaacaaacacattttaaataacaaacaaaacttattcatacaaaaccattt

SEQ ID NO: 42053 - DNA, 428 bp, Gossypium hirsutum
  Clone ID: LIB3189-025-P1-K1-B8
ccggcaacgcttattttcctccataaagatgcaagaaaaaaaggcagaaaccgcaaataaaaacgcgaagaaggcgaatctattggatcacggctccatcaaacacatcctcgatgaatccgtcactgagattgttaagagtcgcggatatgtagaagatgtgaggatgagcaatatcagattattgcttggaactattattattgtaatcgctcttgttgctcaattttacaaaaagaagttccccgaaaaccgtgatttcctcatcggttgcatcgtattatatatagtttttaatggagtactccagctggtcatatacactaaggaaaagaatgcaattctctttacttatccttctgctggaccgaaccagcactgtgttcgggctcttaaagtaccaagattcttgatctttatacacttac

SEQ ID NO: 42054 - DNA, 415 bp, Gossypium hirsutum
  Clone ID: LIB3189-025-P1-K1-B9
cccacgcgtccgcggacgcgtggggtaaaagtctctacttcgactcggacacgacagtggaagtgtgttgaatcaagaacagatagtaagcgcctttattatggacgctttattctgtctccacttatgaaaggccaagccgacacaataggcattgcgatgcgaagagctttgcttggagaactagaaggaacatgcattacacgtgcaaaatctgagaaaataccccacgaatattctaccatagtaggtattcaagaatcagtccatgaaattttaatgaatttgaaagaaattgtattgagagggaatttgtatggaactcgtaacgcctttatttgtgccaagggtcccggatatgtaactgctcaagacatcatcttaccaccttttgtggaaatcgttgataatacac

SEQ ID NO: 42055 - DNA, 241 bp, Gossypium hirsutum
  Clone ID: LIB3189-025-P1-K1-C1
gcggtttctatctctcttcctaacaattgagcaattttcagttattttctctctcgacaaacaatggaaggattctttgaatcgcgatcgagaagcaactggagttacgatacactcaagaatttccgtcagatttcttccgtcgttcaatctcatctcaaaagggtttatttgaccttatgttgtgccctggttgcctctgcttttggggcttatcttcatatcttatggaacattgggg

SEQ ID NO: 42056 - DNA, 127 bp, Gossypium hirsutum
  Clone ID: LIB3189-025-P1-K1-C11
tttaaaaaaattaattttattatttattttatatatttttatgttatttataaaaaattaaatggtgggtttttttttttataaatttttttatttttattatattttttttatatatttaattaat

SEQ ID NO: 42057 - DNA, 185 bp, Gossypium hirsutum
  Clone ID: LIB3189-025-P1-K1-C5
gagcaagttaagctactgtacaagcgacacaaaaacactgctttttcttggctgagaaacattttccatgactgtgctgtccagtcatgtgatgcttcactgctgctggactccacaagaaggagcttgtctgagaaggagacagacaggagctttggcctaaggaatttcaggtacattgagac

SEQ ID NO: 42058 - DNA, 105 bp, Gossypium hirsutum
  Clone ID: LIB3189-025-P1-K1-C7
gctctctcatcctgcttctggtcaagccaatctcaaaagactccccttttagctcacagctctgtcgagttctgtaatgggtaaggagaatgtttacattaacat

SEQ ID NO: 42059 - DNA, 289 bp, Gossypium hirsutum
  Clone ID: LIB3189-025-P1-K1-C8
gcccagagctctagaggttgaggactgttgtgaaagggcaaagagaactttatgtcatgggtaaacacatctaattgactcctttatgaggtatcattttctctccattccctaccaattttaaaactttcattttctatttaaaagttttttaaccttttttatatcttttttctttcttttttctttattttattttctatctttttttttctttttttatttttcttttatctttttctctttatttttttttttttttttatttctttttttttttatttttttc

SEQ ID NO: 42060 - DNA, 287 bp, Gossypium hirsutum
  Clone ID: LIB3189-025-P1-K1-C9
cccacgcgttcgctttcggaggcttataaataatataacatatataataattaaataaaagagaggggaaatttatataataaatagatatattcattttttaaatttaatttttattaaaataataatattaattataattttataattataatcaaaaattacaattatattatatattaaataaataaaatatattttatattaataaataaatttgaataatcttatttattatgtaatatataataatatatataataataataaatattatatattattta

SEQ ID NO: 42061 - DNA, 57 bp, Gossypium hirsutum
  Clone ID: LIB3189-025-P1-K1-D12
cgcagtctctcccgctccttctcgctgcgatttcttcttcaagatctcagttattaa

SEQ ID NO: 42062 - DNA, 241 bp, Gossypium hirsutum
  Clone ID: LIB3189-025-P1-K1-D3
ggcaaatggagaaacctccccaagagagctggtttgaagagatgtggcaaaagttgcagacttagatggctgaattatcttagaccagatattaaaagaggcaacatctctcatgatgaagaagaactcattataagactccataatcttcttggcaacagatgggctttaatagctggaaggctaccccggcgaacagacaatgaaatcaagaactactggaacactactttatgtaaga

SEQ ID NO: 42063 - DNA, 124 bp, Gossypium hirsutum
  Clone ID: LIB3189-025-P1-K1-D5
gcaacacggtcatcattaatcccatctagctttaaagatggttcggatcgttgttgtgcccttggcagttttattcggtaacaatgcgatttgcttaatgctttttggttgttattgtgtacaa

SEQ ID NO: 42064 - DNA, 473 bp, Gossypium hirsutum
  unsure (1)..(473): unsure at all n locations; Clone ID: LIB3189-025-P1-K1-D8
gcccacgcgtccgaaagaaagaaactgtaaaattttcgatcatccatagctgcaaaaatggctctaaatcctcagcttttccctaatggcatgcccatccctttcactaacgagatgtttgttctcgtcagacatggcgtcgaattcgaagttgacaagattcctggatctcaaggaggtcgtgttaaagcatggggcataatatatttgtcaaatatacggatggtctttgttgcaagtcgccctgttgggaatttctttgcttttgatatgcctctgctttatgtgcatgatgaaaagttcaaccaaccaatatttcattgcaataacatctctggtcaagtggagcctgtggtccctgaaaatgagcatagggctctctactccactcattcattcaagattntgttcaaagaaggtggatgcggaacctttgttccacttttcttgaacttgattgcttcagtgagacg

SEQ ID NO: 42065 - DNA, 120 bp, Gossypium hirsutum
  Clone ID: LIB3189-025-P1-K1-D9
cccacgcgtccgaaacaaaaacactgaaaaattttctatcatccatagctgcaaaaatggcggggaattctcatcttttccctaatgtcatgcccatccctttcactaacaatatgtttt

SEQ ID NO: 42066 - DNA, 348 bp, Gossypium hirsutum
  Clone ID: LIB3189-025-P1-K1-E1
attccggtcgaccacgcgtccggagagatcaaaaaaatttaaaaaatttcgcacagaaaaatttattcatccaagttggaaacgtcggcgcacaaatctccgctccgtttaccgatatctgaaaaatgtccggccaaagccagcgcttgaatgtggttccaactgttacaatgcttggaatcatgaaagctcggcttgtgggcgctacaagaggtcacgcacttttcaagaagaagagtgatgccctaaccgtacaatttcgttagattttttaagatgatagtgtctactattatgagtctatggttgtgttttttgaaattcttcttaattttctcttatctatgc

SEQ ID NO: 42067 - DNA, 126 bp, Gossypium hirsutum
  Clone ID: LIB3189-025-P1-K1-E11
agaagaaggaaacgaagagagaaacaaaaggaaatatggagattgtttggcaaacttctgctgatggctgttcataaacaagattatgtttttcacatcggtaagcgctatgtacgacctcactac

SEQ ID NO: 42068 - DNA, 54 bp, Gossypium hirsutum
  Clone ID: LIB3189-025-P1-K1-E6
cccacgcgtccgtgtaaaaacaaaagcctctttcttagctaactgttctaagcg

SEQ ID NO: 42069 - DNA, 105 bp, Gossypium hirsutum
  Clone ID: LIB3189-025-P1-K1-E7
aaacgccttctttcttcttcttcttattcctttattgctttttagaatttttcttaatcgggggggagagtgtgcattttgaggcacttctgggggctgtttttt

SEQ ID NO: 42070 - DNA, 457 bp, Gossypium hirsutum
  Clone ID: LIB3189-025-P1-K1-E8
cttgagcgtggccgagtttgatcagattctaaaggcttgtgaagaaaacggggttcagattatggacggtaccatgtgggtgcataatcccagaacccataaaatgaagcagtttttaaacgacaaggagcagtttggtcagcttagaacggtaaacagttgcttcacattttttgccgatccggattttctcaagaatgatattcgtgtgaagccagatcttgatgctcttggagctctcggtgatgccgggtggtatggcatcaggtcaatcttgtgggcagctgactatgagctaccgaaaactgttacagccttcagaaatccagttctaaatgaagcaggtgtactactagagtgtggagcgtcactactttgggcagatggcaaaattgcaaccttccattgttctttcttatcaaatttgacaatgaatcttactgttataggaacattg

SEQ ID NO: 42071 - DNA, 171 bp, Gossypium hirsutum
  Clone ID: LIB3189-025-P1-K1-E9
ctaacttttagattccctttccattgcactgctctttctttctatagaattagtcactcctgttctagatgaaggttctctccccaattcttgcttgcctagcgcttgctgtggtggtaagccatgctgctctcttacctgcgctatattgtagctattcgctctccaaat

SEQ ID NO: 42072 - DNA, 445 bp, Gossypium hirsutum
  Clone ID: LIB3189-025-P1-K1-F10
tgaaggctcatatcccataatcatattatgttggatatgaatactttacaagaaacaaaaagtgcggagtgcattgtatgcccacaatgaagtacagtacaaagacttgaaattgagtgcattcactacttgttttttgactagggtttactcatttttatttttagttattattttttgttttcttttaatattttgcttttattctttttttttttattaggttcttatttttcattatcttttttttttattatttttctgttttactttttatctttttcttttttttttttattgtttgtttttattattttttttttttatttctttttttgattttgtatcttgttgttaattattgttttcttttacatttttttttgtatttttattttttatttctttattttttttttctctttattagatatttatttctctt

SEQ ID NO: 42073 - DNA, 56 bp, Gossypium hirsutum
  Clone ID: LIB3189-025-P1-K1-F12
tcctgtcaaaagcttctcgctcctccatgtaatccactgtttatttatttttcaat

SEQ ID NO: 42074 - DNA, 236 bp, Gossypium hirsutum
  Clone ID: LIB3189-025-P1-K1-F2
ctctttgcaaagacttcagccacgcagcccctctaccgatccaaacaatgggacgcgtccgtacgaagaccgtgaagaaatcgtctcgtcaggtaatcgagcggtactactctcgcatgacccttgatttccacaccaacaaaaaggttatagaagaagtagctattatcccattcaagaggctccggaacaagattgctgggttctcaacccatttgatgaaacggatccagaag

SEQ ID NO: 42075 - DNA, 302 bp, Gossypium hirsutum
  Clone ID: LIB3189-025-P1-K1-F3
caaaaattttcaactcctcccatttcattcactatctcttttatctctgcaaacttccactcttcaatgtatttctctttgcattccatttgtttcagtggatccattcctttcttctttgcctcatggctcttgaaacatggctcataaaactcaaaaaaaccatatccaacacccttgatactgcaagatcttcaaatcataaagccaacgttggggttttatcctttgaaatcgctggacatatgtcaaagcttctacagctctggaattgtctttcatattcgactatattttcattt

SEQ ID NO: 42076 - DNA, 371 bp, Gossypium hirsutum
  Clone ID: LIB3189-025-P1-K1-F4
ttcaaactcaaaatgcaagaggtacttccacaaccgtttgaagccatcaaaacttacatggacagccatgtataggaagcaacataagaaggacattgctcaagaggccgttaagaagaggagacgtgccacaaagaagccatactccagatccatcgtcggtgccaccttagaggttatccaaaagaagaggagcgagaaacctgaagttcgtgacgctgctcgggaagctgcactccgagaaatcaaggaaaggatcaagaaaaccaaggatgaaaagaaagcaaaaaaagccgaagtagcggcgaagtaacaaaagacgcagggcaaatggtatcatttctaacggtggggtaccaaaagggttcaac

SEQ ID NO: 42077 - DNA, 467 bp, Gossypium hirsutum
  Clone ID: LIB3189-025-P1-K1-F8
aaaaaagagaaataaagggaaacccccctttctctgctagggttccaagattgaaaccccgccgccgctatgcctccgtcgtccgatgatcggagccgtgcgaggacgccccccaacggcgccttgaagtgcgctcataagtcgaggccgcgaacaccgagacgagggggaagagaagagcttcggcccctccttgaacccacatccggcgacgatgaagttccatcggcggtgggcctaagggccgactcaggtggtctgatgcacgaccgacatgcgaggccggtgattggagagcaacggcggtggcgtgagcaggaggcgtgcggcgctggaagcctgggcgtgcggcgcttaggcctagggtttctgtcttgtccctaatctgctggcgtagggtttttttttaatacttttgattttgtttttattattctatttttatatttctttttttgttatatttt

SEQ ID NO: 42078 - DNA, 138 bp, Gossypium hirsutum
  Clone ID: LIB3189-025-P1-K1-G1
caaatctcggttttttggtgaaatattcgctcatttgattgttttattttgattaaggggaatggtgctttacatgcagatgaagagccagggtctctatggcactaggcttttttttgcttactgtttttattgtct

SEQ ID NO: 42079 - DNA, 62 bp, Gossypium hirsutum
  Clone ID: LIB3189-025-P1-K1-G5
actaaaaccccagaattcaactgaaatccgatctctcacttccctaaattttgatttcagaa

SEQ ID NO: 42080 - DNA, 67 bp, Gossypium hirsutum
  Clone ID: LIB3189-025-P1-K1-G6
cgatcagccactttggcactgtttcccttttgttttaaacctttttgatcgtctctcattggatggt

SEQ ID NO: 42081 - DNA, 428 bp, Gossypium hirsutum
  Clone ID: LIB3189-025-P1-K1-G8
cccacgcgtccgtcccttttcattttcagccatctccttgccgattcattcctaagaaaattttcaacgttatttcaaaaagcaggcacagaaaagaacgttaaggaggaaagatgttgggaatagtaaggcaaaaaaatgttagggcagtcattgctgaagattcgtcctgcaatatcggtgttacgaagctactcatcagcagcaaaacagatgacagtgagagaggcattgaactctgctcttgatgaggaaatgtcagctgatccgaaagtctttttaatgggtgaagaggttggagaatatcagggtgcatacaagatatccaaggggcttttggagaagtatggacctgagagggttcttgatactccaattactgaggctggttttgctgggaatggggttggtgcggcttactatggtct

SEQ ID NO: 42082 - DNA, 69 bp, Gossypium hirsutum
  Clone ID: LIB3189-025-P1-K1-H1
gaaaaaccatgtgctttagtaatttagctgcaatctgtgcaggactatggcaacctacacagggagact

SEQ ID NO: 42083 - DNA, 299 bp, Gossypium hirsutum
  unsure (1)..(299): unsure at all n locations; Clone ID: LIB3189-025-P1-K1-H10
aacaatcacaaagtgattttgaaaattcccattccccttcgtaatggctgaagaattcggaacggcgtcttcatcatctagctcacaaccaagatcctcttctaacactttaaaaatatcccaggtcccttctgtatactcttgtctcccaactttnnttaatggcgatttttagatttttccctgtttgtaatttttcaattttatttttttttaactttctttcttttttttttcatttcatttttctttccttttttattttattttctctttttttttattctctcttttatctt

SEQ ID NO: 42084 - DNA, 231 bp, Gossypium hirsutum
  Clone ID: LIB3189-025-P1-K1-H11
gggagataagcacgtcaaagttccgtacagttatttggtcccaggatcagacggtaacggtgggaccatcgtggactcgggatcaacattcactttcatggatagaccagtgttcgaggtagtctcgaaagagttcgagaaacaaatgggaaattatataagagcgcgtgaaatagaaaacatttcgggtttatccctatgcttcatcattgtaggtgctatacttcaata

SEQ ID NO: 42085 - DNA, 303 bp, Gossypium hirsutum
  Clone ID: LIB3189-025-P1-K1-H12
ctctcgttctttttcctgttcaatcatgtcttgcttcattagcaaatatgctgatgagttggctaaaaacgctgcttacattggaacccctggaaagggtatccttgctgctgatgaatccactggcaccatcggcaagcgtctttcaagtattaatgtagagaatgttgaagacaacaggcgtgctctccgtgagctcctattcacaactcctggagctcttcagcacctcagtggtgttattctctttgaggaaaccctttatcaaaaaaccgcttcgggcaagctcttcgttgatgtttt

SEQ ID NO: 42086 - DNA, 136 bp, Gossypium hirsutum
  Clone ID: LIB3189-025-P1-K1-H2
ctttcttttccctcatttttcccggttcttcgctttttcctttatcttcactcactgccacttgcctggcaatcttacccctatagggatttcttatttaaaaatttattataacttttcatcttacccttcattt

SEQ ID NO: 42087 - DNA, 77 bp, Gossypium hirsutum
  Clone ID: LIB3189-025-P1-K1-H4
cacctatctctttacaaggagagcacagaaaaaaggggttcttgttcttgttcagttttgatcaatgctatgatgtt

SEQ ID NO: 42088 - DNA, 186 bp, Gossypium hirsutum
  Clone ID: LIB3189-025-P1-K1-H6
ctcatctccaatctcaaaccctttcttaaattaaaagaaaagaattacattaaaaaaaaaagcccgctaaaaaccactaaaagaatggcaactccagacgaaagtcctgcagctaagagatggcttcctcttgaagctaaccccgatgtcatgaaccagcttttttggggtctgtgtcttccagag

SEQ ID NO: 42089 - DNA, 210 bp, Gossypium hirsutum
  Clone ID: LIB3189-025-P1-K1-H8
caaacctgcttgaaacttgaaccctccatcaccaacacaaaaaacagagttcctttaatcacctgggtcatgaagcagctcacttgttcaggttccctggatgctttgaatcccatcttttcaccaaaagaggagatgatttcaatgaagaagcaaatttatagcagggagttccaggcgatgttagatgggttagaagatgaagacagc

SEQ ID NO: 42090 - DNA, 337 bp, Gossypium hirsutum
  Clone ID: LIB3189-027-P1-K1-B3
cttatccaccagcttaccttagcccagaagcattggtgtatgaaccttctgcttggagccaattttgcttcatctggctctggctatgatgacaaagctgccatggtgaatcatgccatcacattgacccagcaattagagtatttcaaggaataccaggcaaagctagcaaaggtagcaggcagcaccaaatcagcatccattaccaaggatgcactgtatgtattgagtgcaggaagcggagactttctacaaaactactatgtcaaccctttactttaccatgcctatacttcagaccagtacggcttattccttattgatcccttcacaaact

SEQ ID NO: 42091 - DNA, 332 bp, Gossypium hirsutum
  unsure (1)..(332): unsure at all n locations; Clone ID: LIB3189-027-P1-K1-B6
cccacgcgnccgaaaaaggcagaaagccagctttttattnccncaggaccagcggaaaacgagtggcggactcaagcggaagangcgagggccgacgancccaaanaccggcgagaangggggcgcaccccagaacgcaagcagcggagagccgcactgccagccgagaaaggtggggctgccaatctcctccatcaatatcaggggttttggcacaccactcgccagttacaagcagtgcttacttgccaaaaccacttttaagctcatgagacagatattttccttggtaccactccaaaatcaggagcaacatggttaaaggctattgt

SEQ ID NO: 42092 - DNA, 190 bp, Gossypium hirsutum
  Clone ID: LIB3189-027-P1-K1-C1
cccacgcgtacgcggacgcgtgggcgagccgattttttctacctcataaagctccttttgatcggcgacagcggtgtgggtaagagttgcctgcttttgcgttttactgatgcctcattcactacaagttttattacgtcaattggaattgactttaagataaggaccatctagcttgatggaataagga

SEQ ID NO: 42093 - DNA, 175 bp, Gossypium hirsutum
  Clone ID: LIB3189-027-P1-K1-D12
ctatcaaatcttggaaacaacttgcattgcggatagatgaaatattatagacaatatagccaaacaaatgttccacactagactattaacgactaatacttgtgtcgaggatattacacctttttaaatctaaaaataaaatatcaatttgtacatattacgatcaagaaaacaa

SEQ ID NO: 42094 - DNA, 448 bp, Gossypium hirsutum
  unsure (1)..(448): unsure at all n locations; Clone ID: LIB3189-027-P1-K1-D4
cnagaacgcgagcggccgcccnnnnnnnnnnttttttttaaanagacaaggccacaacgcatgcacaagcgggagaaagaagccagaggaaaaaacacaacaaaagggaaccangacggagggaagcgcaggacaaaagcaaaacaagcaaagacacaaggaaagagggcaacagagaaaggaccnagacacacagccaacggacgaagaaggaacgacaccggggagccgcaaacagagancaacgcgcgcgacaacaaccaggacaagggnccncgaaggcggccccaacagaacaggagaccacccggaacggagaccgcgggaaacgaggcgcgcgccagaaagccggnggcaagaaaccaaaaggcgacagaagacaggcaaaggggggccggacaaagagaccaagaagaggggaggaaccccccggagaagcgaagacaac

SEQ ID NO: 42095 - DNA, 457 bp, Gossypium hirsutum
  Clone ID: LIB3189-027-P1-K1-D7
ttttcacctaataatggaaggcggtggaccaccacaggcggcggacactgagatggcggagcaacccaacccacaaaaccaccagcaacagccgccacaaatggcaattgggttggagaatatcccggcaactcttagccatggcgggaggtttattcagtataatatattcggtaacatttttgaggtcactgctaaatataaacctcctattatgcccattggtaaaggagcctatggtatcgtatgctctgcgttgaattccgagacaaatgaacaagtggcgttgaagaagatagcgaatgcttttgataacaaaattgatgctaagagaactcttcgtgagatcaaattgcttcgttacatggatcatgaaaacgtagttgcaatcagggatataattctcgcaccaaagagagaatgcgttaatgatgtttatattgcatatgaactgatg

SEQ ID NO: 42096 - DNA, 363 bp, Gossypium hirsutum
  Clone ID: LIB3189-027-P1-K1-E11
cttttcagctgtctcggcatttgcacaggatgattaagaccaaggtcttgttatgaacttctgcaaggattcttgtcctcaggctgaagacattatcaaggagcaagttaagctactgtacaagcgacacaaaaacactgctttttcttggctgagaaacattttccatgactgttctttctagtcatgttattactttatttcttttatactttttattattgattttttattgactatttatttattcatttcattattatgatttctctcaattataattcaattctcttattatttatattttttttctattcaaattattttattcttttcttttatgttttaatattttttttatat

SEQ ID NO: 42097 - DNA, 381 bp, Gossypium hirsutum
  Clone ID: LIB3189-027-P1-K1-E12
ctctggtatttagaatcctaactcgcatgttatttagaagaaatggcgactgaacaaccaaaggctcaaaatgaagacataaatatggatttgtttgaagatgacgatgaatttgaagaatttgaaatcgatggagagtgggatgacaaggaagaaggaaaggatgaaggaaaggatgttacacagtagtgggaagatgaatgggatgacgatgatgttagtgacgacttctcactgtaactgatgaaggaactcgagaattacaccaagaactgaaccagagttgtgcttctctattgacttgctttctcggttgaatttattttggttttttgcaaaacttgatgttgagctttaactctttatgattgggatggttta

SEQ ID NO: 42098 - DNA, 178 bp, Gossypium hirsutum
  unsure (1)..(178): unsure at all n locations; Clone ID: LIB3189-027-P1-K1-E2
acggaanaccgggccgacccacgacgccgaagaaaacaagaaggagcgcgcaaaacacaccattgctttccaccattgaagaaactacaaaggatgggtatctcatatgtgctagagggcgaaaaagatgaagaaaactataaggattgcgcaaaactttccaaggcgttcgaacaag

SEQ ID NO: 42099 - DNA, 75 bp, Gossypium hirsutum
  Clone ID: LIB3189-027-P1-K1-F1
aggaagcgggcacatgtagttcaatcagtttaggaggaaactctttgaggggacaagttccagataggattggag

SEQ ID NO: 42100 - DNA, 144 bp, Gossypium hirsutum
  Clone ID: LIB3189-027-P1-K1-F10
attaaaattttttagaaaaaaaaagaggaaaaaaaaatggaaacaacataaagtaaacgagggacaaaaaataaaaaagcaaaaataaaaaaaaaaataaaaataataccacaataaaaaaaaataaaaacaaaaaaacaaaaa

SEQ ID NO: 42101 - DNA, 420 bp, Gossypium hirsutum
  Clone ID: LIB3189-027-P1-K1-F12
gctggtgctcatactaattacagcacaaagtcaatgagaaatgatggtggcatcaatgttatcaagaaggcgattgagaagttgggtctgcgccacaaggagcatattgccgcctacggagagggtaacgagagacgtctaactggtcgtcatgagactgcagatatcaactcattctcatggggtgttgcaaacaggggagcctccatccgtgttggtcgtgacactgagaaggatggaaaaggctacttcgaagacagaaggccagcatcaaacatggatccttacgttgttacatcaatgattgctgagaccaccattatctggaagccttaagagggggtggaaattgaaggttgtgaaagacgagaaggaaaaacctcattcagattaataaaaccccctctttcatctttcttt

SEQ ID NO: 42102 - DNA, 346 bp, Gossypium hirsutum
  Clone ID: LIB3189-027-P1-K1-F4
aaaagaaaaggcgactgaacaattgaagcctcataatgaagacataaatatggatttgtttgaagatgacgatgaatttgaagaatttgaaatcgatggagagtgggatgacaaggaagaaggaaaggaagaaggaaaggaagtaacacagcagtgggaagatgaatgggatgacgatgatgtcagtgacgacttctcactgcaactgaggaaggaactcgagaataacaccaagaactgaaccagagttgtgcttctctattggcttgcttcctcgattgaaattattttggtttcttggcaaactgatgtttgagctttaaacttttatgaatgggatggttta

SEQ ID NO: 42103 - DNA, 432 bp, Gossypium hirsutum
  Clone ID: LIB3189-027-P1-K1-F6
acaaacacttgttttgggagagttgtagtttcataaaagggaaagtgaaaggaaaaccaggaggaaaagagaaagttttctagtgatcatcatcatcttcttcttcttcttcttctttagataagattcataaggccatgaaccgaggtgtgttgcagagctcaccggtgcagcaactgatggccggaaaccctaactggtggaacatcaacaccatgcgcccaccaactcatcatcaccaacaagcggcggcggtggcggcagcaccttctcctttcttgcatcctcctcccactactttcttctctcacacacccacttcttcttcttcgtcttcttcatcttcttcacttcccgttccttcttggcatgataataaccaggagctttctgagtcatggaatcaacttctcttgggtggattgggaggag

SEQ ID NO: 42104 - DNA, 370 bp, Gossypium hirsutum
  Clone ID: LIB3189-027-P1-K1-F7
atttttatggtagccttcctgattcaatgaggaagcttggtacatgtagttcaatcagtttaggaggaaactctttgaggggacaagttccagattggattggagaattgacaagccttgaaagtttggatctttctgcaaataatttctctggtaaagttccatcttctctgggaaatctgcagttactgagagaattgaatctgtcaatgaaccagtttactggtgcattgcctgaatcgatggctaattgttataacctattggctatagatgtcagccagaatttgttaaccggcaatgttccatcatggatgtttaagatgggagtgcaggttgtcctgttttctgggaataaacttattggaaa

SEQ ID NO: 42105 - DNA, 453 bp, Gossypium hirsutum
  Clone ID: LIB3189-027-P1-K1-F8
cgcaaattccctttccttttcgctttctcatttcttctcatttccgtcaccatcctcctcttttcctactcctcctcttccccttccctcctcctctccaccaatttccaagtttccgatcctcttcctccaccgccgcgtccgttaccctcacgatctccgaacaatgtccccgtctcctccacgaaaccggttcccaagaccaccgccgcagcttctgacgtggacttgaatgtgagtttggatataaaatgggagaactgtcagttaggtccgttggcggtggattatataccgtgcttggataattggaaagcgattaaagaattgaaatccaggaagcggatggagcatagggaaaggcattgtccgaagcccaatccgagatgtttggcgcctttgccgattggttataaaggtccggttcattggcctaaaagcaggggacatgat

SEQ ID NO: 42106 - DNA, 108 bp, Gossypium hirsutum
  unsure (1)..(108): unsure at all n locations; Clone ID: LIB3189-027-P1-K1-F9
cggggcgacccacgcgnccgaaaaaaagaaaggaaagagaaaacaaagaattttttaaaaaaaaaaaaaggaaagaagagggggggggggagaaaaaaaggggggggg

SEQ ID NO: 42107 - DNA, 384 bp, Gossypium hirsutum
  Clone ID: LIB3189-027-P1-K1-G11
tccacgcgcctgccattaccgtccctgttggttatgacaaacaaggccttccgataggcttgcagctcataggccgtccgtggggtgaagcgacaattttacatttggcttctgcagttgaggaactttgtgctaaatccaggaagaaacctgcatccttctatgacattttaaatatcaaataaaaagccttttacagcttcaagatgcatggactacattttacagaagaccctcaacaaccctcaaccggctgctcaagaatgtagtatgatctaatcctgaaatgatgtttcttaatacatgtatgaataagctttgctctctgaactgatgttccaatcgattttactatagctttttccctatatttttttttatttt

SEQ ID NO: 42108 - DNA, 407 bp, Gossypium hirsutum
  Clone ID: LIB3189-027-P1-K1-G12
cccacgcgtacgccgcttttctgtttagtgcattcagagacaatccttaggttcgccgggctccaaactacggatgcatggcggagaagagagttccgtctccgaagatcagaaacgccaagtaatcatcgatgatgatgacagcaaagacatcaggactcgtcgattgtccttctctccaacctcctcggtgacatcgcctcctaagcctgagaagttcattcacttaattcctcttctcactcttctttgcttcctcattctttatctaaattctcacagtccttcacaatctgatttggctgaatttaatggatttaaacattccttaaagcattcagactcaactgcaatcggtgatggtgaccatttttttgtttctcggagagggtatgtttggggattcg

SEQ ID NO: 42109 - DNA, 297 bp, Gossypium hirsutum
  Clone ID: LIB3189-027-P1-K1-G4
caaatggcttctaaaagaagccggaaccggagttaactttacactttcagatatcctcgtttgtccgctctccaaacaagctttaagggtttgcgaggaaccaccttctcttatcagcgattctattggtgtctcttttcctataaaggatgggatcccatgtttggtgccgacagatgggaagatacttgatactgatgatacaatgaaacatgataatgctgctgatgattcagttaacaacaagtaacgtatggctagtcggggattccttgtattttgctatatccatggcgc

SEQ ID NO: 42110 - DNA, 444 bp, Gossypium hirsutum
  Clone ID: LIB3189-027-P1-K1-G5
ctccattctgtgagtgacttggcaaatatttaccatctatataatttactgtgcttgattaagttgcctttggattggggaataaaaacgaaggtactcattactggtaactagataacttctgatgttgctctttcaggttctagaacacaaaactccaaaggaactgctagttaacagagaaagcgcattctcgaaaatggttcagtgtacagggcctgcaaatgccaaatacttacgtagcttagttcttgaaggtgaggaaaaagggttcagtaaggaacatgccatgcggttagatggtcagaagagagggcaagcttcaccccactggattgctgatgcacagtctgccctgcctgttagtctcacttcttctctaaatgatattcaaagacttgatactggagatagagaaaatcacctatgatgactttcggtgag

SEQ ID NO: 42111 - DNA, 449 bp, Gossypium hirsutum
  Clone ID: LIB3189-027-P1-K1-G6
cccacgcgtccgcgaatacatggtcgactctcttctttataggccaaccactgaggacaaacgtgcagtggctgaatgttgtgggaatgtggaactctgtaggctcagtgagatatacaaagagtggagattgaagagaattgagcaaacatgggatcttttccaccaaaaactcaacaaggatgagtcagggaaggcttatcttccagcaatatataaccttatccaagaggaatatatgaaggaattgttccatgacacacttggttttggtattgctaagatgataaggagaattggtggtgttgaccatgttgaggactttgaatcaattagagaaggtagcataagagcagatagtgaggcaaaggcacttgaattagccaactctcatctcaaggagaagcaacaattcttggccattggtgaaggtatatcacccatcatgc

SEQ ID NO: 42112 - DNA, 460 bp, Gossypium hirsutum
  Clone ID: LIB3189-027-P1-K1-G7
gtcgatttctttgaaaagtgtaagaaagatccatctcactgggataagatctcccaaggaggcttgaaacgtatcgaggagaagtatacatggaagatttactcggagagactattgaccctgaccggagtgtatggattctggaagcatgtttccaaccttgaacgccgtgagagtcgtcgttaccttgagatgttttatgctcttaagtaccgcaagctggctgaatcagttccattggcagaggagtaaatttaagctgttaaataacattgggccggtttttcttggagaataatattctgttttgtaatttcaattggagaagctcttttgtatttcatcttgtcttttccttttccttttttcgccggcattgtttgaacatggggttgtgcgcccgtcaattccagttaaatatggtgacttttgtttttcacgttcctatcttttttatttt

SEQ ID NO: 42113 - DNA, 212 bp, Gossypium hirsutum
  Clone ID: LIB3189-027-P1-K1-G8
gcagtttagtccaacttcacacccaccacttttttttgtttgtaatcatgctaaaaagattggtgaccgttaaagaagtgagtggggccttaacgtcccaacgaccagacacacgtgaaggccatctagacatgaaccgctcctaactttgttgatcataacacataccctgactactacttccatatgacaaattgtgtgctccatcacca

SEQ ID NO: 42114 - DNA, 210 bp, Gossypium hirsutum
  Clone ID: LIB3189-027-P1-K1-H1
aaaaattgatataacagcaatttcctttgtattgaaactagagaaacaaatatattacaatatttatgaacaaccactctgctaaaactttataaaataaataatactttagttttacactcatgtcgtaagccaccatgcctacgtacatttaccaaggcattgcaaaactcacatatcggtctacattttttaacatcatatttagag

SEQ ID NO: 42115 - DNA, 422 bp, Gossypium hirsutum
  unsure (1)..(422): unsure at all n locations; Clone ID: LIB3189-027-P1-K1-H11
gccacgtgttcggaacttgctaaattaatactagtgcctaaaaaacatgcacaccaaggagagaaaacctacgatttctatgaaaacacccaacatacacaccatccttttatttgctcttctctcgctatttagaaagatcagtccactgccttattctacaaccaaacttgttcaaccaactcttctgcgaaatccggaacaccatttgaccagaaaaactccagtttcagtttaagcccttcactcgccaactggtgcgccactccatttgcggatcgccgaacatgcatgaagggaatccccttcaactcttaatctccttaaacccagatctaagcacaacttcatggncactgtgcaagccacttcttccgtggcaaaaagcgatgggatactctcatgatagtcgcgcacatgta

SEQ ID NO: 42116 - DNA, 438 bp, Gossypium hirsutum
  unsure (1)..(438): unsure at all n locations; Clone ID: LIB3189-027-P1-K1-H4
ccgagatctgaaaaaaaaaatcacctactctctcactttgctctcttcttgttcctgtcctctttcaccaaactatcgccgacaacctctccaaaagaatggcatatgaagggattctgttggggatgggtaatcctctccttgacatttcgttagtcgtggacgaagagttcttgaaaaaatatgatatcaagttgaacaatgcaattttagctgaggagaaacaccttcccatgtatcaagaaatggcatccaagcccaatgtagagtatattgctggaggtgctactcaaaattcaatcaaagttgcacagtggatgcttcaaattcctggtgcaactggttacattggctgcattgngaaggacaagtttggggaggaaatgaagaaaactcanaagctgctggtgttaatggtcaatatcttgggatgaaact

SEQ ID NO: 42117 - DNA, 342 bp, Gossypium hirsutum
  Clone ID: LIB3189-027-P1-K1-H5
accgtaccggaactcgcagtgttccgactcaacccacgcgtactggaaagctgtgagatacaataggagatggtgatgctgttgttacttttaacttccgagcagatcgaatggttatgctcgcaaaggcactcgagtatcaagatttcgacaaatttgatcgcgtaaaggttcctaaaattcgatatgctggaatgctccaatatgatggtgagttgaagcttccaggccgctaccttggttcttccccccggattgacacgaacattcggcgaatatttggtgcacaatggtgtacctacttttgcgtgccgggagaccgttaaatttgggccatggcac

SEQ ID NO: 42118 - DNA, 398 bp, Gossypium hirsutum
  Clone ID: LIB3189-027-P1-K1-H6
aacttgtgtactttatcaaagtgtatgcccaacaatgccgcccaagtttgacccaacacaagttgtcgatgtgttcgtccgcgtcaccggcggcgaagtcggagctgctagttccctcgctccgaagatcggtccactcggtttatctcccaaaaagatcggtgaagatattgccaaggaaaccgcaaaggaatggaagggtctccgcgtgaccgtcaagctcactgtccagaaccgtcaggcgaaagtcatggttgtcccgtcggcggcggcgctggtgattaaggctttgaaggagcctgaaagggataggaagaagaccaaaaacatcaagcttaatgggaacatcggccttgatgacgtcattgagaatgctaaaggaatgaggccaaggtcga

SEQ ID NO: 42119 - DNA, 413 bp, Gossypium hirsutum
  Clone ID: LIB3189-028-P1-K1-A10
ctacgtttgttataccaacaaacgatccatgcaccggatccatttattgatgagcggtctgcttttatttaaagctttgaatctgatctgcgctgccgaagataagcattacgttaaggttaccggaactcctcacggctgggatgttttattctacatttttcaatttattcgtgtcgttttgcttttcaccgtcatcattttgatcggcaccggttggtcctttttgaaaccatttttacaagaaagggaaaagaaggttttgatgatcgtgatcccgcttcaagttttagctaatggtgctttgatcgagatcggtgaaactgggccttttattaaagatttggtgacatggaatcagatgtttttgctggtcgttataatgtggtgttgggctattattatccccaatt

SEQ ID NO: 42120 - DNA, 264 bp, Gossypium hirsutum
  Clone ID: LIB3189-028-P1-K1-A11
atcgggttaaaattcctgaaccgggactctgcttttgacggcaacgttagggagtccggagacgtcggctggggcctcgggaagagttatcttttctgtttaacggcctgcccaccctggaaacggctcatccggaggttgggtccagcggccggaagagcaccgcacgtcgcgtggtgtacggtgcgcccccggcggtctttgaaaattcggaggaccgagtgccgtccgcgcccagtctttctcattaccgtattatgtttt

SEQ ID NO: 42121 - DNA, 421 bp, Gossypium hirsutum
  Clone ID: LIB3189-028-P1-K1-A12
ctcaaggcttaaagctagcaagagcagatctgcgtcatttcttcctcagaagacccatcaaacagaaatgaagttcaacattgcaaatccgactactggttgccaaaaaaagctggaaattgatgatgaccagaaacttcgagccttttttgacaagaggatctcacaggaagtcagtggtgatgccctcggtgaggagtttaagggctatgtattcaagatcatgggaggctgtgataaacaaggttttccaatgaagcaaggagttctcactcctgggcgtgttcgtcttttgcttcacagaggtactccctgcttccgtgggtatggtaggagaaatggagagcgtatgatgaagtcagttcgcggttgcattgtttgtcaggatctttcatgtttgaacttgtctttgtgaaaaagg

SEQ ID NO: 42122 - DNA, 184 bp, Gossypium hirsutum
  Clone ID: LIB3189-028-P1-K1-A4
gaccacccgtccggaaacatgttaaaccaggggctgccattgtccaatggtttttttagacctagagctcattcaagtgttggggctattagtaatgaggatagtttcattattcaaggagatggtttaaattatgctatgatcaataaggggcttgtttgttctagagggctaaacaaggcat

SEQ ID NO: 42123 - DNA, 73 bp, Gossypium hirsutum
  Clone ID: LIB3189-028-P1-K1-A6
cactctccaaaccataaccagaattttctttttgttctgcccctctaagaactcaatggctggggaaaaatgg

SEQ ID NO: 42124 - DNA, 254 bp, Gossypium hirsutum
  Clone ID: LIB3189-028-P1-K1-A7
aaagtggtagatcgatctcagccgttttttattgttcgctaaggcgactattgatacggggggaggagcatatgctgggcttcaagatcccaccaaagtcggactcgttcatgtcaacagcgattatgcggatttggatgtggccgcatttaaagctaccaaccatgtcgagtgtcctccaatagaaaggcatcctagaaaaataatcattgcgacatcagctattcggcctcgagcagatgttgcttattgaa

SEQ ID NO: 42125 - DNA, 181 bp, Gossypium hirsutum
  Clone ID: LIB3189-028-P1-K1-A8
tcgatgacccgagataataaataacactttttttttttttgggttgtccgagttatgaatctttgtcgcttgtagaggatgtgatgggcaacccagtatcaaaatctagctagtgcatgttgacttgtgcaggtgtttatatagaatcttgccaacggatcagaaactcgacctgggatta

SEQ ID NO: 42126 - DNA, 267 bp, Gossypium hirsutum
  Clone ID: LIB3189-028-P1-K1-B11
tcgcccacgcgttcgggacaacttggcgaattttatttttggggtggctgtcgctcctcagcaggatcatccaaagcccagcaaaggtgccaagaggcgaatgaaaagagctcaacaagaggcagctagagaacaaagaatcccaaaagagccgagccaccttgtgggagattgaatgatccacggtgagaaattggtgggaaaactgaaacccctggtgatcacaattaatgaaattaagccagatgggcatccggctttaccgag

SEQ ID NO: 42127 - DNA, 404 bp, Gossypium hirsutum
  Clone ID: LIB3189-028-P1-K1-B12
gtgaccttgggttgagtgtagagatgatgttttttatgggtgccaaagatctcttcttctttgctttgctttccttaacagctgtgtcggcatttgcacaggatgaggaagaccaaggtcttgttatgaacttctacaaggattcttgtcctcaggctgaagacattatcaaggagcaagttaagctactgtacaagcgacacaaaaacactgctttttcttggctgagaaacattatccattactgttctgtccagtcatgttatgcttaactgctgctggactccacaagaaagagcttgtctgataaggatacagacaggagctttggcctaagggattttaggttcattgagaccatctaagaagcttgagaaaggggatgtcccggtattgtttctttg

SEQ ID NO: 42128 - DNA, 361 bp, Gossypium hirsutum
  unsure (1)..(361): unsure at all n locations; Clone ID: LIB3189-028-P1-K1-B2
caaagccaacaaccaaagcagcaaggagaaccgtctagggaggcgaaagagcaggaaggagaaaaacanggaggcnccagagcagcagaacaagaccagagncgcgaagaacgacncngnngaaccccgggaccgcaacacnaaccaagcgacaaaacaaggcggcccaagcgaccgacacgagacagcagcaaggcggacgccgacagagaccaggaaccccgaccgcaaagaacgggccccagcaggacaagaggcccagggccacaccgcagaaggagaacgaagagaaaggaggagcaacgaggacggaggggaaaggcaaagcccacaagcccacggaggaaagggaggaaccgca

SEQ ID NO: 42129 - DNA, 298 bp, Gossypium hirsutum
  Clone ID: LIB3189-028-P1-K1-C10
catgtcttgacctcatccatcaaaaactttcattttttcattctacatgaaagatcaaacaatcataccaacaaatccctgaatcaaacttgaaaaaccctccaaaaaatccaacccaaatccaaaatgcccactttcaacttcaaattcatcttcatcagcatcttcctatcccttctctttctccatacctgtaaatctggctcgattttagacctcaatagtgcactggcaagcagtgaaatcgatgcaagggcaagaagggtttgcaccaaaaagctagaagattgtttagaaa

SEQ ID NO: 42130 - DNA, 243 bp, Gossypium hirsutum
  Clone ID: LIB3189-028-P1-K1-C11
atcctgctcgacctttgacgcaagtcaagatttgtgtgtcctttttcatccttctgcccagaatcgcctaatcaaaaatcaatcatggctgtgaccatcaagcgagcggccctcatcgttgccagtcttggcgtcttatcttttatctttggagtcattgccgaaaacaagaagcctgccgctggaactccaatttctggaaaagatgtggttatttgtaagtatccatcggatccttcggtg

SEQ ID NO: 42131 - DNA, 248 bp, Gossypium hirsutum
  Clone ID: LIB3189-028-P1-K1-C12
gtagataaagttaatattacgtagtcgcataaagcggcatagtacacaacccacaactctggaattttaacatccatatttattctgtagctatcgttattttggcttccactagctggtgaactttccatgccaaaacttcacttgacgctgttgcagtcagtgctagggctgatcttgtaagggatgttgacaccgcacttgcctgggagtccgcttgcaataccatagttgatgccagaaatgcc

SEQ ID NO: 42132 - DNA, 196 bp, Gossypium hirsutum
  Clone ID: LIB3189-028-P1-K1-C3
aaagacaaggaggttataatttcttggggagttcaaaacaaaagggagtggctctcactatgatacacacgacatgcagaagatgggcgccaagctcgggagtgcctttgaaaggtgggtgaccgctataagacacaaatatttgccaagatcgagaacatagaggggtgaaaccattatggtgagattctgtagg

SEQ ID NO: 42133 - DNA, 138 bp, Gossypium hirsutum
  Clone ID: LIB3189-028-P1-K1-C5
ccacgcgtccggctttccccaagtttcaaccactctctggtgtttttcttttttctcatgaccattcttcaccggagcttggactaaaggcatggagtcctaacccaatctttattttctcccgattctctctcactc

SEQ ID NO: 42134 - DNA, 298 bp, Gossypium hirsutum
  Clone ID: LIB3189-028-P1-K1-C6
acaatccaactaaaatgttggaggaaaccccatttttattccccctataggcagcagcgccgacggttccaacctataccacggtgacggactccaaatcacctgttggtttataaaaactagacctttcgccgccgtatcatttaccaatgtgggcctgttccctgataccagaaactctttctacgaactattgcctttaataggaagagcagtgctcctccacgcggaacccggcggcattggaacctgatccatcggataaagggtcagggaatgaggatctttcttagactcc

SEQ ID NO: 42135 - DNA, 407 bp, Gossypium hirsutum
  Clone ID: LIB3189-028-P1-K1-C7
gcaaccgaaaaccgaatcaagatcttctttttcttatcgagctacaaaaaagaaaaatggatctcagaatcatgggtttcgattctccgctcttgaatactctccaacacatgatggatctttctgacgatacggagaagatcccgaacgcaccatcaaaggtttacatgcgggatgccaaagccatggctgcaacaccagcggacattaaggagtaccccaagttttacgtgttcatggtgaacatgccggggctgaaataagggaccataaaggccaaggggagggccacaatatgctcttggtcatcggggaaagggaacgagaggtagtgtaagaatgagccatgttcgtgagaatggataggctggtcggtaagtttatgatgaaatatgcgttgtctgaga

SEQ ID NO: 42136 - DNA, 228 bp, Gossypium hirsutum
  Clone ID: LIB3189-028-P1-K1-C8
ctaatctgaagcatcatctcgtgtttttgttcttttagattctttgatagtgttcaaagttcacacaaggtttgagtgatggggaaggactcaaaatcaaaggaagcaaagggaaagggcaaacaagctggaggtggaagctatgatagtgctttaaagggtaaagggaaagctgtgaagggagatggccttgatacctgcacttacattatagtaaggctcatcttg

SEQ ID NO: 42137 - DNA, 168 bp, Gossypium hirsutum
  Clone ID: LIB3189-028-P1-K1-C9
gtcgtgtggaaccttttccagaaacaatatgcttgttgtttgtaatagtgataatgcttgtgatccttttgctttgttactgtgcttgcttgatggatggtattgtcaagatagtggagtgaggtactttgtctaaattttacaatgaattgttctaagtgatttggt

SEQ ID NO: 42138 - DNA, 413 bp, Gossypium hirsutum
  Clone ID: LIB3189-028-P1-K1-D10
gttgagacttggagatcccaaggaattaccaaaccatggaattcttaggctatacaaactttgcctttgttgttttcctcgtctcttttcactctctgtcggcttgctctcaatccgagtctgaggatcatgaatttaactatgacgaagaaacaaggaggggtccatcgcgttggggcacactcaaacccgaatggagaacctgcagcgacggacgaaagcaatctcctattgatattggaacagtccaagtcaattctgagttgggagagttgcaaaggaactatacatcagctcaagctattttgaggaataggactgaagatgttgcggtggtatggtcaggggatgctggaaacatcaccatctatggaacaacttatagagtggttaactgtcactggcattcacct

SEQ ID NO: 42139 - DNA, 361 bp, Gossypium hirsutum
  Clone ID: LIB3189-028-P1-K1-D12
cttgtacggccaaagattccctaccagcataaaatcggaaagaaagacaaaacatggggatgccgactgccacgtgcgcctacgcctcttcctcctacatcggcaactcttctacgatcggtggcgctggcggaggaggaggagagatcatgctcattggaggcagaggggaggcagattgcctgtggcaatgagggcgtgtggacagccgagtttagtacgagcagcctaatgagtcgaacacgcattacaacacgcgcgccagagagcaaagccatggtagcctgaccgctggttacgcctgcggagacaagccaatcctactgctctggaatagagagcgcaaagagggagcccgtgg

SEQ ID NO: 42140 - DNA, 398 bp, Gossypium hirsutum
  unsure (1)..(398): unsure at all n locations; Clone ID: LIB3189-028-P1-K1-D6
cccacgcgnccggccttnnnccaaggaaaaaaaattagattttaattcagttctatgtgcagaacaggcgaaattcccaaaaagacctgcaccaaccactccttcactgctattccattattcctcttccttccatcagtaaaacttacttacattcacgtaaaattcagttcctaagttcctattacaaccactttggattatataggacgtaaataaaataaatcataaataaaataaatcaaggttcgaaaaaaaaggtaattttgaaagagggagaaaaacttacggagcgaataaggtgaggagaagtgaggaggcatttggcactccagaggggatcgtttaggtcagcaccgtggagttccagctcggtcggcagtccaccatcggtaaca

SEQ ID NO: 42141 - DNA, 231 bp, Gossypium hirsutum
  Clone ID: LIB3189-028-P1-K1-D7
caactacagcgaagagagaaaaagggatataaagcgtcgtcgcttttggttcttcttctgcttcttcttcttccctctctgtctctctcttactctgaagctcctcttcgttctttcattcactcagtattgtaaaagatggccgacggggaggatattcaacccctcgtctgagataatggaactggaatggtgaaggccggttttgctggcgatgatgctccaagggca

SEQ ID NO: 42142 - DNA, 384 bp, Gossypium hirsutum
  Clone ID: LIB3189-028-P1-K1-D9
cggagagcagtccctagaaacaattattttgattcttaaaaaaaacacacacacacacacacagattaagacagaagcatggccagccagatcgtatgaacaaagaaagcttgtgtcgtgggtggcagcggattcgttgcgtcattgctggtcaagttgttgctcgagaagggttacgccgttaacactacagtcagggaccctgactaccagaagaagatctctcaccttgtaacactacaagagttgggagacttgaaaatcttttaggcggatttaactgatgaaaggagctttgatgcccctattgctggttgagaccttgtctttcatgttgcgacacccgtttactttggttttgtagatccagataatgacattatc

SEQ ID NO: 42143 - DNA, 154 bp, Gossypium hirsutum
  Clone ID: LIB3189-028-P1-K1-E10
gtgtagcgattctcagttaggctttgctttaagctcacagctgctctccacagccctataatgggtaaggagaaggttcacatcacccttgtcgtcattggccatgtcgactcttgcacgtcgaccaccactggtcatttcagcttcaatgcta

SEQ ID NO: 42144 - DNA, 130 bp, Gossypium hirsutum
  Clone ID: LIB3189-028-P1-K1-E11
tccaaccttacttttattactaagtgatagaagatgtattatgagtgcaggggtgtctgtcctgactatgctattccttgagcggggtatacttttctactgctttcatgaatgtttatccagccctgtg

SEQ ID NO: 42145 - DNA, 338 bp, Gossypium hirsutum
  Clone ID: LIB3189-028-P1-K1-E12
cccacgcgtccggggaatcatccaaagggggaatttgaacttgcaacgatgtccatatattttgaaggaccctacaagaccctaacaaatgcgctgtggtttctagatcttccttacacagtgggcatacaacctcctcacatagtgttcggcgtgccaagttcccatagtgtggcaccatgttattgaacaatctccaaacatgtatttttattttctctggaatatgtaaaacccaaagatccatgtaaaaaattttgtattcttcatttgtagaggacatgtgtagattgctctgtaaataatctgtaataagaactcggcacccactcctgaca

SEQ ID NO: 42146 - DNA, 114 bp, Gossypium hirsutum
  Clone ID: LIB3189-028-P1-K1-E2
gttattttacttattccgtgaatcggaggcggtttttttttctctttttggacccaaggacggcttgggccgttcgaaccgggcggaagacattgtcaggtggggagtttggct

SEQ ID NO: 42147 - DNA, 303 bp, Gossypium hirsutum
  Clone ID: LIB3189-028-P1-K1-E6
accaccaccaccaccaccaccaacccattttctttttcattatcaccgctcaaaatgtctctttaccatgtgcgttttcccatgctaatactcgcattctccactgcttcttcattagctgccactgcaaaagaccaaactttaaacactcatcaagctgagttatttaaccccaagctttcacccagaatcctttcctcttccaaaaagttcgatggctcatcggacaatgtcgacctccgttaccacatgggtcccggtctttcctcgttgtctatcaatatctacctcattaggggtcgg

SEQ ID NO: 42148 - DNA, 131 bp, Gossypium hirsutum
  Clone ID: LIB3189-028-P1-K1-E7
agagggtgcgcacgataaagctattcattattgtttcaacatgaaggttcgcaatataaaattgtgtctatcaaaattgcatcatgtctcttgatcatgaagctgacggtcaagatcacttgtcaatcctt

SEQ ID NO: 42149 - DNA, 405 bp, Gossypium hirsutum
  Clone ID: LIB3189-028-P1-K1-E8
ctttctttctatctttttattttatttttaattttttgcattatctctttcttcttcttctccatggagaaacttaacaatggcagactgcaaacatggcgatgaagagttcgacacccaatccaatgaggaaacagcataggcctaaaaatatggaggactggcgccaaagaagaaacccttaatcttcaaaggaccatgaacgtgctttctttgattcatcagattgggcattatgcaagcaaggttcgggagttaatcaaaaattaacttgggctatcgagacttttagaccaaagcttcagagaacacgctattaactattaccacctaaggagactacattgtcatctgggccagataacttggggcagatgaattgatgaattgttgcgagaatttgtt

SEQ ID NO: 42150 - DNA, 197 bp, Gossypium hirsutum
  Clone ID: LIB3189-028-P1-K1-F1
cggacgcgtgggattttcttctcaccatttttcttttcctagaggtttagatgcgttgatcaggtgaaaaagagaaagagggctggatttgggagatccgatcgtagaaatttggtgttatttgaaagaaagatagttcaattggtaaattaatttgaaatatggagtcgtttaatcaagcgtgagttctgtttact

SEQ ID NO: 42151 - DNA, 174 bp, Gossypium hirsutum
  Clone ID: LIB3189-028-P1-K1-F10
aatataagcggtttgcatattgcagtattttctctttcttcaaatgcaccaccggtttgaccgtgatccaccttcaatgcttgaagctgatacaagccttcaagctcaggacacaaggtttcgcacaggattagaacataccggatgggtagaagctcaaacaagtttgctttt

SEQ ID NO: 42152 - DNA, 411 bp, Gossypium hirsutum
  Clone ID: LIB3189-028-P1-K1-F11
agcagcgccgctcatctgcttctcttctccttctcttgcctttccaggttccaaactctcgttcttcctccagctcctatcctttaacaggaaatggcggttacattcaacgacttgggttctgctgccggcttgaagaagctcgatgagtatctcctcactcgcagttacatctctggataccaagcttcaaaggatgatatcaccgtctacacagctctatctggggccccatcgtctagctatctgaatgtttctcgatggtacaaacacatcgatgcccttttgaggatctcaggtgtttctgaagaaggctgtggtgtgactgttgagggatttgctcccgctgaggctgtggccactccttcaactgcagattcaaaggctgcagctgctgaagatgactacgat

SEQ ID NO: 42153 - DNA, 425 bp, Gossypium hirsutum
  Clone ID: LIB3189-028-P1-K1-F12
atcaatttgaagccttcttcgaatttcctcattcaagatgcaaattttcgtcaagaccctcaccggaaagaccatcacattggaggtggagagttctgatactattgacaatgtaaaggccaagattcaggacaaggaaggcatccccccagaccagcaaaggttgatcttcgctggtaagcaacttgaggatggccgcacgttggctgattacaacatccagaaggagtccacactccacttagtgcttcgcctccgtggaggaatgcaaatttttgttaagactttgactgggaagaccattacattggaggtagagagttcagataccattgataatgttaaggcaaaaattcaggacaaggagggaattcccccagaccaacagaggctgatttttgctggtaagcaactggaggatggcc

SEQ ID NO: 42154 - DNA, 264 bp, Gossypium hirsutum
  Clone ID: LIB3189-028-P1-K1-F2
gtccgcaaaaaacatggctctcaaatggttcctcagttcttcatttactcaagtttttggccataccgatggcggtcacttgcatgccaaggcagtggtatcgtgccctaacgaaggacttatcggttgcaaggaaatggaaggagggatcaccagcatcaaaacctgcatggaagactaccctaatggcttccaaatgccagttcattattctcgaatctcgaaggccgattatgagaagatggaagaatggaggatcgatat

SEQ ID NO: 42155 - DNA, 173 bp, Gossypium hirsutum
  Clone ID: LIB3189-028-P1-K1-F5
gccacgcgtcgccacgcgtcggaaactagatcctttttatctcgctcataccccaaatccccataccctttgttaacagcaagatggcaactggcagtaccttctcttgatcgtcaagcttcatcccaaccgattgagatgttctactccgattcatttttgttggattgttt

SEQ ID NO: 42156 - DNA, 426 bp, Gossypium hirsutum
  Clone ID: LIB3189-028-P1-K1-F6
aagcaaagcattagcaaccatagccatggcttcctcaccaaaactcttctctatgtctatcctcttcctttttgccctcttctccatgcaaatccatgctagagagtacttcagcaaattcccaagagttaacaccaatgagaaagagacaacaaccagagagcaagagcacgagaccttcgttccccagaccacccaaaagccagaagagcaagagccaaggttcatccctgaaacccaaaatggttatggcctttacggccacgagtcaggctcaggctcaggctcaggctcaagccggcccagtttcaccaccaaagaaacctatgaaccctatgtcacccctgttagattccaccctgatgaaccctataacagcatccccgaatccttcaacaataaagacacttactactacaacaagaa

SEQ ID NO: 42157 - DNA, 404 bp, Gossypium hirsutum
  Clone ID: LIB3189-028-P1-K1-F7
gaagctggtgcatcgtttgtacccagaggttgaccctgccctcaaccccgaccatgttccacacatactccataaatgccctgatcagatcccagaccccaaggccgtccagtatgtgagaaacgaccgtgggacacccatggttttggataacaactactacaggaacatactggacaacaagggtttgttgattgtggatcaccaactggcgtacgacaaaaggaccagaccttatgtgaagaaaatggccaagagccaagactatttcttcaaggagttctcaagggccattactctcctctctgagaacaatcctctcactggtagcaagggtgagatcaggaagcaatgcaatcttgcaaacaagcttcactaaaatgcctcgccaaagagaaagccga

SEQ ID NO: 42158 - DNA, 395 bp, Gossypium hirsutum
  Clone ID: LIB3189-028-P1-K1-F8
cggacgcgtgggtttcttctcattttcgagaacatttttttaaagattttttctatatattctttgaagatattaatcagaaaaatggcgctggtttctttcatcggaagggttctttttgcgtcagtgttcatcctctctgcttggcaagagttcaatgaatttggcgtcgatggtggtccagcggtgaaggagctgaggccaaagttcaacgtcttctcaaagactgtctcatctcacacagggttgcaagtgcctgaatttgatatcaagtatgtggttgctgctgctgtagcctttaaaggtgttgggaggattctctttacctttggcagcaccatcggagcttatcttctggttttgcatcaactcattcttactcccattgtttatga

SEQ ID NO: 42159 - DNA, 410 bp, Gossypium hirsutum
  Clone ID: LIB3189-028-P1-K1-F9
gttgagatggtctcgtttgtgaaggagaaagaatcatgggaaatggatacaccgcaaaagatcgaagctgctgggaagaagaaagaagaagggaacgcactattcaaggctggtaaatttgagagagcatcaaaacgatatgaaaaggctgttagcttcatagagtatgactcttctttcaacgatgaggagaagaaacaagcaaagttgctaaaagtaaattgtaacgttaacaatgcagcttccaaattgaagctcaaagattacaagcaggccgcaaaactgtgtactaaggtattggagcttgatagcgggaatgtgaaagcactctacaggagagctcaagcgtatattcaacttgttgacttggatttggcggaagctgatatcaaaaaagccttggagatcga

SEQ ID NO: 42160 - DNA, 205 bp, Gossypium hirsutum
  unsure (1)..(205): unsure at all n locations; Clone ID: LIB3189-028-P1-K1-G1
gatataaaatgggaaatggagacgagtgatattaatttgtagataaagttgggattacatagtctcataaagcggcatagtacacaacccacaactctggaattttaacatccatatttattcttgagctaccgtntatttgtcttcctctatctggtgaactttccattgccaaaacttcgcttgactctgtttcaattattgc

SEQ ID NO: 42161 - DNA, 420 bp, Gossypium hirsutum
  Clone ID: LIB3189-028-P1-K1-G10
cgggcacttgtctccactctccactcttcacttttatccaatccagtttccaggagaattgatttcaatcggctttctggttaaattcatctttgaaggttcttgtatgcatatatcataataagagaaaaggaatgttgctatgaattaatggcgagttttcattctatgaatcttagcactccttgcttatggacgagtctaccttgcattcggagacacttctcaaggaatctgaaggatggaaataaattattgagttttaacagattatatgtgatccgcccttcaccatttcaaaccctgaactactgtagcttatctggcaacttaagttctacttgtaactggtgatcatgcaattccccatgggaatgcagtgatttcttcaaaaaaagaacacatatttcaccatgaggc

SEQ ID NO: 42162 - DNA, 174 bp, Gossypium hirsutum
  Clone ID: LIB3189-028-P1-K1-G12
atataaaactcgagaagcaaccactcatatgtaatagcgggtatcgatctatggatctatctataaagtatgaaaaaccagataaaaaaattgggggtgggcctaggtgctacatgaaaacaagggaggcatgcttccaaaccaacagagggtaagcttcgccggaaaacaatc

SEQ ID NO: 42163 - DNA, 330 bp, Gossypium hirsutum
  Clone ID: LIB3189-028-P1-K1-G2
ctcgccgccgcctgcgtctctctcttcatctctctgaacctaaaagtctttagcttttcgcttcgagagagaccatgttggtttaccaggatctcatctccggtgacgagcttctttctgactcattcccctacaaggaaatcgagaatgggatgctgtgggaagttgagggaaagtgggttgtgcaaggagctattgatgttgacattggtgccaatccttcagccgaagatgctgatgaggatgaatgcggtgatgaccaatctgtgaaggttggtgactttgtgacactttcaggccttaggagcaaccccctttcgacaagaagca

SEQ ID NO: 42164 - DNA, 119 bp, Gossypium hirsutum
  Clone ID: LIB3189-028-P1-K1-G3
aaaaaaaaaagaagaataaaatcaaaaaaaggatatttaaaataaaaaaaaaaaaaaaaaaaaataagaaagggtaaaaaaaaaaaaagggtcaaaaaaaaaaaaaattatggaaaggg

SEQ ID NO: 42165 - DNA, 309 bp, Gossypium hirsutum
  Clone ID: LIB3189-028-P1-K1-G4
cagaaatgggttttcccgatgcattcgcaatctttgtgattttttaacccaaccctgaaaactccctactggtcatgacaatccaataggagggggagagatcttgatctattgacaatgtaaaggccaagttgtaggtaaggtaaggattccccccagaccagcaaaggttgatcttcgctggtaagcaacttgaggatggccgcacgttggctgattacaacatccagaaggagtccacactccacttagtgcttcacctccgtggaggaatgcaaatttttgttaagactttgactgggaagacca

SEQ ID NO: 42166 - DNA, 403 bp, Gossypium hirsutum
  Clone ID: LIB3189-028-P1-K1-G5
gcttccaatttcaatcccctctaaaacccattacctttccttcatccaccaccaaaagggtccccattttcaaatgcaaagcctcgttttccaccaccactactacagagctcgagcctgtcttcacctccgtcaagtccttcgctcccgccacggtagccaatctcggcccaggttttgacttcctcggcgctgccgttgatggtctaggcgacttcgtttccctcagcatcgacccttctgtcagccccggtcatgtcaccatctctgagatctctgggtcctctaaactctcttccaatcctctctttaactgtgccggcatcgctggcattggcactatgaaaatgttgaatgttcggtcttttggccttttactcaaactcgaaaagggcttaccttt

SEQ ID NO: 42167 - DNA, 415 bp, Gossypium hirsutum
  unsure (1)..(415): unsure at all n locations; Clone ID: LIB3189-028-P1-K1-G6
atcttttatgcctccgtctccaacgccgatcacggcgtgaacccaggttcctaggcgggtacgcctctgacgtggcttggtgaagggcgtacgactcanaggaggcgcgcgacgtgcggtggaggggcgctgggcgtgggcacgagcagcagcttgccactttgctagaaaaaaagtttaagttattgggctaaaagcttgggctagggtttagtctattttttatttattttgggcttaaagttggactgtttgattctttggtttgggagttgtgtttaatgaaccaccaaaaaaggagaagcctgaacctaagccaccggtttatgcacctccaaagaaagagaatcatggacccaaaccaccaatgtatgaaccttcaaagaaggagaagtctgagccaaagccaccagtt

SEQ ID NO: 42168 - DNA, 421 bp, Gossypium hirsutum
  Clone ID: LIB3189-028-P1-K1-G7
ctagaaccctcactattcttttcttttgtttgtttatatggcatctcaagccagcctcctccttcaaaaacagctcaaagatctttgtaagaatccggttgatgggttctcggccggattggttgatgaaaacaatatctttgaatggagtgttacaattatcggaccacctgatactctttatgaagggggatttttcaatgccatcatgagctttccgcccaattatccaaacagccctccaacagtgaaatttacatcagagatttggcatcctaatgtttatcctgatgggcgtgtttgcatatcaattcttcatcctccaggtgatgatccaaatggttacgagcttgcaagtgagcgctggatgccagtccattccggtggaaagtattgtattgagtatcatatcaatgctttc

SEQ ID NO: 42169 - DNA, 400 bp, Gossypium hirsutum
  Clone ID: LIB3189-028-P1-K1-G8
catcaacagaaaacccaaaaaacccgaagctcgaaaatgggaagctctagattctcggtcagtttcctcgcgatttgcgcaatcctggccatccacgtggcggcttccgcttcgtctcccatgctcgatttcggcggcaaccatttcctctcgattaaatcggagtgcagtggatccatcgcggaatgcctgatgctaagcggggaatattcctcggacttcgacgccgaattcgccatggactccgagatcaacaggcgcattttagcggcgaggcgttacattagctacggtgcgctgaggagaaacacggtgccatgttcgcgacgcggtgcgtcgtattattactgccggccgggagctcaagcaaatccttactcacgcgggtgcagtagaatta

SEQ ID NO: 42170 - DNA, 415 bp, Gossypium hirsutum
  Clone ID: LIB3189-028-P1-K1-G9
gcggctcctttttccttctcgctctctagggttttcttggtcaagtaaaaaatgaaggtggtcgctgcctacttgcttgccgtcttgggagggaacctttccccttctgccgatgatttgaaggatattctcggatctgttggagctgaggctgatgatgataggatagagttgctattgtccgaagttaaaggcaaagatatcaccgagctaactgcatctggaagggagaagttggcttcagtcccttcaggtgggggtgctgttgctgctgctgctcctaccactggtggcggtggtgccagtgctgcaccagctgctgaggccaagaaagaggagaaggtcgcagagaaggaagagtccgatgatgatatgggtctcagtcttttcgattaagcccagtaatgcaaatgtc

SEQ ID NO: 42171 - DNA, 349 bp, Gossypium hirsutum
  Clone ID: LIB3189-028-P1-K1-H1
gaaaatggaaggagatatcaaccagaagctgctaacagagactactaagaacgaagaggaagaagtgctatttaaagaaagattatggaccgagatgaagaaattgtggattgtggctggtcctgcaattttcacccggttttcaacctttggtgtcactgtaatcagtcaagcttttgttggtcatcttggtcctactgaacttgctgccttttccctttgtttcactgtccttttgaggtttggcaatggcgttctgcttggtatggccagtgcattggaaacactctgtggtcaagcatttggagcaaaacaataccatatgcttgggatataccttcaaagatca

SEQ ID NO: 42172 - DNA, 433 bp, Gossypium hirsutum
  Clone ID: LIB3189-028-P1-K1-H10
cacgcgtccgcgccataagttatccaaaagaaatcggttcgaatataatttgaaaattgaaaaactggtagccggagttgcagaaaagatgaagaataccggaaagagtagcaaaggtaccggaaaatcgtcggacgtgaggaaagataggagatctggtactggaatgattggatcgccaaagaaaggaggtcatggcgggaagttcacttgggccggagatggcttttcgccggctgagattggagttgagaaacaggtttttgatgttaaggatcctaactttgaagatcctgatgaaatcgtgaatgataattaattgtgttgtctatgatggtagtgtgagatcgttattattatcatcatcgatcgttgcctttggtttttttttctaatctagtttttatgatgagaccatgaaaagtgtttatga

SEQ ID NO: 42173 - DNA, 416 bp, Gossypium hirsutum
  Clone ID: LIB3189-028-P1-K1-H2
gacgtcaacgtcttctgtgaatggtgaatatcctgttgttattattccgaagtggccagacaggctaacaagagctccttcaagggccttggtcgtgaaaaacgggattgatttgtttcgggcagacacaaggaggtggacaaggagagtagcctattataagaatactctgaatctgaagcttgggagtccagcagtacgcaatgtcatggacatgaatgcattttttggaggttttgcagcagcacttgtatcagatccagtatgggtgatgaatgttgttcctgctcggaagccattaactcttagtgtaatatatgacagaggccttattggagtatatcatgattggtgtgaacctttctcaacatacccacgtacttacgattttattcatgtagctggcattgaatcac

SEQ ID NO: 42174 - DNA, 417 bp, Gossypium hirsutum
  Clone ID: LIB3189-028-P1-K1-H3
tcaattccaaaacacacaccaaattccagcacccaaaatattgtctcctctgcaagccgtattctaggttggtcctagcactggccatggcattggtggcagctacggtgcctgtttatgggcagagaactatcaacactccatgcaccccatcggcacttaacatcttcactccttgtatgaacttgcttaccaatagcagtgccaatggtacttcgcccactgcagattgttgcaactcgcttaaaacgctcacatcgagcggcatggactgtttgtgcctcattgtcaccgggagtgtcccgttccgtatacctatcaatagaactctagctatttctctttccccgagcttgtagcatgcctggtgtcccccttcaatgcaaagcctctgttggtgcacctgttcctgctcca

SEQ ID NO: 42175 - DNA, 357 bp, Gossypium hirsutum
  Clone ID: LIB3189-028-P1-K1-H4
acacggtcctggatgaccggagctcgtcccactcgtcacgcgccatactcttttagtcctctcgatcccaaagctagctctcgattccgaatctctcccagaagatgcagatctttgtgaaaacccttactggtaaaaccatcacccttgaggtggaaagctccgatacctttgattatggcaagggcaaaatccaagaccaagaagggatttcttcagaacaacaagaggcttttttttgccggaaaacaactcgaggatgggcgaactcttgccgactacaacatccaaaaggagtccaccctccacctaatccttcgtctaaggggggggcatgcagatatttgtgaaaaccct

SEQ ID NO: 42176 - DNA, 342 bp, Gossypium hirsutum
  Clone ID: LIB3189-028-P1-K1-H7
gttttaccttgtaagaaaacttaaggaatcggacataattgaggccttcgaactggaaattggtcctcacagattctcttaccaagaactcaaaaaagcaacaatgggtttcagggacaaagagctacttggatttggtggattcggtagagtttacaaaggaactttgcagagtacaaacactcaagttgctgtcaaacggatttctcatgaatcaaagcaaggtctaagagaattcgtgtcagagattgcgagtatcggccgtcttcgccatcggaatcttgttccgctccttggatggtgtcggggccggggtgatctgcttatttgctatgattatat

SEQ ID NO: 42177 - DNA, 396 bp, Gossypium hirsutum
  Clone ID: LIB3189-028-P1-K1-H8
aaaaaacccagactaaacaaaaacagagattgaatcatcatgtcacggcgatcatcagggacatggttgaggttatgcctcgtaatatttgcggtagtttcagcactggcagtatgtggacctgctctttattggagattcaagaaaactgtcagattcgtcgattccaaatcctcttgtcctccttgtatctgtgattgtcctcctcctctttccctcctcaagattgcccctgggttggccaatctctcagtcacagattgtggaagcaacgaccccgatctcaagaaagagatggagaagcaatttgtgggaccttttaacccaaagagttgaagttgcaagaagctgtcgccgaagagcacactcgccatatgaacatcacctttggggaag

SEQ ID NO: 42178 - DNA, 77 bp, Gossypium hirsutum
  Clone ID: LIB3189-028-P1-K1-H9
gccacgcgtcgcaaatcccaaggttttcttgattgacgatcggaggtaaccaccgcctggatcgttatgactttcga

SEQ ID NO: 42179 - DNA, 259 bp, Gossypium hirsutum
  Clone ID: LIB3189-030-P1-K1-A10
cttcatcatgttcctcgttgaaacaacacttccttgtgtttctcattgtaataataagcagcattattaattcaccagtaaatggatgtttcacatcgattttcagctttggtgattcattaactgatacaggcaatttacttgagctttcaatttcagaatccaccaaaccttctcattctgctgttcttccctatggctgcaccttctttgaccgtcccaccgtccgattctgcgatggccgctagttttagatttt

SEQ ID NO: 42180 - DNA, 238 bp, Gossypium hirsutum
  Clone ID: LIB3189-030-P1-K1-A11
ggaagccaaaaattctagaatgaaaacttgtgttgatagcaggtagaaaattaccataaaagctacttacaaagaaaatacagtccgttttaagtttgagccatctgcaggatgctgccaagtatatgaagaaggtgctagcaggagcaatgttcaaatcggtacatgccaactgaactgtttagaaggaagccgcgaaatgggagacagtaattgggattgatcttggtacaactta

SEQ ID NO: 42181 - DNA, 395 bp, Gossypium hirsutum
  unsure (1)..(395): unsure at all n locations; Clone ID: LIB3189-030-P1-K1-A12
gtgatgggcttaaagaattgccaaagaagattgaaaaattggtgaatcttacccatcttgagtgtgaacattgtattagtttaactcatatgccacgtggaatagggaagctgacttcacttgagacgtttaagcatgtttgtagtggataaagatgggtcccatggcggtgcagatctaagtgaattgagactgcttaacaacttaaggggacgtctagaaataagaaatttgggattcgtaaaaaatgcaaaagagaagtttgaggctgctaatttgaaagagaagcaacatttgagatcgttggttttagaatggngcggtggtaaccatgatgatgagaagtcacttgaagacctccaaccccatcctaatctcaaggagctctgtattgg

SEQ ID NO: 42182 - DNA, 413 bp, Gossypium hirsutum
  unsure (1)..(413): unsure at all n locations; Clone ID: LIB3189-030-P1-K1-A4
gtgtagcgattctcagttagtcttttctttaagcttacagcttctctccagagttttataatgggtaaggagaaggttcacatcaaccttgttgtcattggccatgtcgactctggcaagtcgaccactaccggtcatttgatctacaagcttggtggtattgacaagcgtgtgattgagaggttcgagaaggaggctgctgaaatgaacaaaaggtcattcaagtatgcttgggtgcttgacaagcttaaagctgagcgtgaacgtggtatcaccattgatattgccctgtggaagtttgggaccaccaaatactattgcaccgttattgatgcacctgtacaccgngactttatcaagaacatgattaccgattcctcacaggctgactgtgctgttctcattattgactc

SEQ ID NO: 42183 - DNA, 137 bp, Gossypium hirsutum
  Clone ID: LIB3189-030-P1-K1-B10
gacctccatttacatctgtttttttttttccatcaaatataagttttgcgtttcgtttttcaggtggaagaaatcctcctttggggttcgacctctggcttaaccaccaatgctagagatcggccatgcccccaggt

SEQ ID NO: 42184 - DNA, 163 bp, Gossypium hirsutum
  Clone ID: LIB3189-030-P1-K1-B12
caaaaccctaacggctacagctctagaattcaagcctttcgaccatggcggatgttgagacggaggtagcggcggctggagtgcccaagaagagaacattcaagaagtttagcttcagaggtgttgatttgaatgctctccttgatatgtccactgatgtgct

SEQ ID NO: 42185 - DNA, 347 bp, Gossypium hirsutum
  Clone ID: LIB3189-030-P1-K1-B2
catccgcatattctctctaccctaatctacaattcttcttcgatttcatgtaaatctgcatcatttaattttttttttcaaaagacaaaaccctcttatgttctatcgtagcagttttatttatttacttgtaatttattttcaagtagaaaattaaacatgacgaagaagagaaaatccgacgccacgcgccttgacgaggttgatcggaccatgtacaccagtttttgcagcgctgcgaactccctctcccagctttacacccaggctatgaaccaccaacgcctttctttttaggccggtgaacgttacgcgctggagaaactctatcaatggattctgaggca

SEQ ID NO: 42186 - DNA, 447 bp, Gossypium hirsutum
  unsure (1)..(447): unsure at all n locations; Clone ID: LIB3189-030-P1-K1-B3
cccacgcgtccggagcatcaatatattcccgattttattctgttcgataattgctttgtgttgtttaatccaaatggctgaatctacagacgcaacgaaatcatcttcggcggcggcggcggcggcgggtgggacggatgcggcggtccacatcgtttacaccgagaggcctcaggatgagcagcctgaagcctaccatatccggaccctctccaacgtcctcggcagcgaagaagctgctaaggaagccctgatctacagttacaagacggctgccagtggcttctccgccaagcttactccccaacaggttgccgaaatatcaaaacaacttggtgttcttcaagttgtcccgagcaggacactccagctacattctggaccaggcaagctgcactaaggctcaagaaactcttntaccctactaaaaacaaaatcctatggaac

SEQ ID NO: 42187 - DNA, 265 bp, Gossypium hirsutum
  unsure (1)..(265): unsure at all n locations; Clone ID: LIB3189-030-P1-K1-B4
attcttcacaaaaaagaaaagaaaaaatacagtgaaaatggcaacccttaaggttccagctcatgtacctgccccttctgaggatgctgagcaacttcgtaaagcttttgaaggatggggtacaaatgagcaattgattatcgacatattggctcacaggaatgcagctcagcgcaatttgattcgtanaacttatcgtgaagcttatggggaagatctccttaagtttttggatgaggaactttcaagagacttgaacgagtct

SEQ ID NO: 42188 - DNA, 311 bp, Gossypium hirsutum
  Clone ID: LIB3189-030-P1-K1-B8
gttctagatcgcgggcggccgctcgcgatctagagctattttcagcaactaaaaaaaaaaaaaggccccaaacagacaatagcctaggacaggaggatctctcagggtttaggtgatggcttcaaagcggatcttgaaggagctcaaggatctccagaaagatcctcctacctcttgcagcgcaggccctgttgctgaagacatgtttcattggcaagcaacttttatgggtcctcctgacagtccttatgctggtggagtgtttttattatctcttgttgtttttttgtcacttcatatttttttccatt

SEQ ID NO: 42189 - DNA, 255 bp, Gossypium hirsutum
  Clone ID: LIB3189-030-P1-K1-C11
ggatagccctatagcagcagcattagaagcagaagcaaagggtttagagacgaaatggcagcgaaaaggaagactcccgtcaagaccagaaacccggatctgatccgtggtgtgggaaagtattccaggtctaagatgtaccacaagcgtggcctttgggcaatcaaggccaaaaatggcggtgcttttccccgccatgatcccaaacctaaggcccccgctgccgctgagaaaccctccaagttttacccctct

SEQ ID NO: 42190 - DNA, 359 bp, Gossypium hirsutum
  Clone ID: LIB3189-030-P1-K1-C12
cggacgcgtggggagattatcaatttgaagccttcttcgaatttcctcattcaagatgcaaattttcgtcaagaccctcaccggaaagaccatcacattggaggtggagagttctgatactattgacaatgtaaaggccaagattcaggacaaggaaggcatccccccagaccagcaaaggttgatcttcgctggtaagcaacttgaggatggccgcacgttggctgattacaacatccagaaggagtccacactccacttagtgcttcgcctccgtggaggaatgcaaatttttgttaagactttgactgggaagaccattacattggaggtagagagttcatataccattgataatg

SEQ ID NO: 42191 - DNA, 453 bp, Gossypium hirsutum
  Clone ID: LIB3189-030-P1-K1-C3
gaagatttcacagtggccaaaagcttctggaacatacaagaggactactgttattactcagggtgcagatccggtaattgttgccgaggatgggaaagtgaagcaattccctgttattttgttacccaaggaaaagcttgttgatacaaatggtgcaggtgatgcctttgttggaggctttctttcacaattggttcaagggaagtccattgaggattgcgtaagggctggttgctatgcatccaacgttatcatccaaaggtctggatgcacatacccagaaaagcctgaatttaaataaagctattccactttcctgatctcctctccactgttgttttcaagtttctgattgttaagaaccctcttgctaattgaattttgtttttaattttcctatttggcggtgtcatttcgatgcctgcattcttgaatggcatatgagaataacat

SEQ ID NO: 42192 - DNA, 359 bp, Gossypium hirsutum
  Clone ID: LIB3189-030-P1-K1-C4
gtctgctactgctcctactaccccagcaatgaaccaagttgaccttccatttattttggagggtgtgtcggaggatgctcgtgtcgattgttggaacttgagccaggcagcaatgagacatgagacggagtcctgtttcgtttatgctgatcagttgaagcaaagatgtgtggaacagttcaaagaagggactttggggattgaacagcttgccgctgttgatggcttatgcgacttagtttctaaagtggttgatgcatctgaacctgctaggacattccatgtaaatctttcgatttttactttgaatccctgattttttggagatttggtcagattattttccataattccccatt

SEQ ID NO: 42193 - DNA, 437 bp, Gossypium hirsutum
  Clone ID: LIB3189-030-P1-K1-C5
gttttctcagcgctaaactgttcttatgcctctgtttaacattatttcaacaccatgtcacgtggtctgctttgaatcctactggtctaaccctaagggctgtcctggatgattctccaaactctcctttataccttattgaaaacatgactatagctgaaagaatcgaaagatttatccaagttaccaatgctaaagacaattatttgaatcttaatgcaagggtaggccctgataattctaattctctatctcgagtagtaatggctcgagatggtttaatttattcagtatggcttctaataggaagccaaggccaagaagtgaagctgttgatgggcacatgcggtggtcttacatggacgcagtgtcagccttgcctaaaatgttttccacagaatcttccaatttatgatttaggactttcactacttact

SEQ ID NO: 42194 - DNA, 269 bp, Gossypium hirsutum
  Clone ID: LIB3189-030-P1-K1-C6
ccctcgtccgcggacacttgttcaaagcctttatttagcatatgataaaaatagtaagaaaactataattctgggagtgttttaaacattagcacgactcatcaaagaacccactcccttgactttacgataatgcctctatacatgccttatatccacatttaaccttccttacatcttgaacccatctatctttccatttataaacacaatttttatgacccacttattgtcttttacacttttaagcttttatttttttaatttac

SEQ ID NO: 42195 - DNA, 366 bp, Gossypium hirsutum
  Clone ID: LIB3189-030-P1-K1-C8
gaaaaaaaaagtttctcttctttgctttctttcaagtaaaaatcaaacgaaaaacaacttaaataatattaaaagatattgattttgatcatcaaattttctgtttctgatccaccaatccaatcagagtgttgaagtattgaagctgtctgtgttctgtttgttttttgaaatctgatgtctccgccgcttcttggcgtggaggaagggggtcagaacaatgtgactttactgggttcttctggctctatggatagtgtgtgccagaactatgcctgattgaaagaacgcaatttcatgggcttggctgatttgttcttctattgatagcctttttgtgacccctgtgtttcttttctatttgca

SEQ ID NO: 42196 - DNA, 405 bp, Gossypium hirsutum
  Clone ID: LIB3189-030-P1-K1-C9
cggacgcgtgggattggcacactgaaaccttaagaatctccaaagctacgtcgtttctgaagtcatgggacaagtcctagacaaattccatgggaaggaatggagaaagagacagattaggaaaatcagtgataaggtttttgagcgtgtcaaaaatcaatcaggaagagctactttgacatttgaagatctatatatcgctgtcttgctggtgtataatgatattaataagcgtttgcctgggccgcactttgatccaccctctaaggaccaaatcagatcaatgatgcaggagtgtgacttgaaccttgacggacaaatcaaccatgatgaatttgtgaaattcattcagaagcttacaaccgacacgttggttgtcgttagtcagggactgcttgtcacttt

SEQ ID NO: 42197 - DNA, 422 bp, Gossypium hirsutum
  Clone ID: LIB3189-030-P1-K1-D1
ataacctccaagactttcttctcttgcacaaccttatcacctttgcattgtgggcaacgatccttatcgttgatggtttcaccagtacccttgcactcattgcaaggatgctgcatttgttgagaagggtatgcagaatggacaaaggattactttcccaggagaagctgatgaagcgcccgatacggttactggggacattgtattcgtcctgcaacagaaagatcatcctaaatttaaacgaaagggtgatgacttatttgtagagcatacattggcacttactgaggccctttgtggctttcagttcatactgactcacttagatggcagacaacttctcattaaaacccaacctggggaagtcgttaagcctgatcaattcaaagcaataaacgatgaaggaatgccgatttatcaga

SEQ ID NO: 42198 - DNA, 363 bp, Gossypium hirsutum
  Clone ID: LIB3189-030-P1-K1-D11
tgactaccaattgattgacatttctgaggatggatttgtgagtttgctgactgagagtggtgacactaaggacgatctgaggctcccaactgatgagaacttgttgaaacagatcaaggatgggtttggtgagggaaaagacctggtggtgtctgttatgtcggctatgggagaggagcagatctgtgctctcaaggacatcggtccgaaatagtttgagatttgatgattctaagtatgttattacaaatcttaaatggaattatttttataagtggcttttaatatcttgccctttcaagacttggggtagggtatataatgttgttgaatgggtcttttttgtttggttcggtatgctta

SEQ ID NO: 42199 - DNA, 419 bp, Gossypium hirsutum
  unsure (1)..(419): unsure at all n locations; Clone ID: LIB3189-030-P1-K1-D12
atggcatcatcccttctctctagaactcttttgggtcaccgcttaattcgattttcctcgtctctccctcagaaccccttgattttctctaatcttttcaataagagagagttccgtgtacaggctgagtcttaccataccacatataaggcctctggtcagcattctcgtttaatggcttctgcagcaattgagacaagaagtaattnttcgacacagtctctttctaccaatgatccggttgtttctgttgattggcttcatgctaatttaagggagcctgatttggtattggatgcatcatggtacatgccagatgagcagaggaatccaattcaagagtaccaggttgctcacattccctgtgctcttttctttgatggtggtggaatatctgatcgaactacaaagttgccgca

SEQ ID NO: 42200 - DNA, 385 bp, Gossypium hirsutum
  Clone ID: LIB3189-030-P1-K1-D2
ggattagaaggccattttcgtgatccgaaaccgaacatagcttacatgagatcagctttggacattctaggaacaatggggttacctatatggcttacggaagtcgatgtcggtggaggaccagatcaggcacacaacttggaagatatactaagggagggctattctcatcctgcagtcgaagggattatcattttcggtggtccgatagccgccggattcaagtgtttgacgctagcaaattatgatttcgaacctacgcctgtcggagaagttgtagacaagttgattaatgagtggaaatctgggaggagacaagttagaacagatagtagaggaatgtctgcaattttactctttcatggtgattacagggtagaagtga

SEQ ID NO: 42201 - DNA, 378 bp, Gossypium hirsutum
  Clone ID: LIB3189-030-P1-K1-D5
ctactactccaagcgagcattttccttacaagtttgttttcttgtgactaattgatatggctagctcaatgttccttaagcttacatgtgtggtggtgttttatatattgatagtttctccaatattttattattttatttttttttttatttttttttttttttttttccatttttttattatttttatattttatactttttaattatttttttatttttctttattttaatttttttttttttttttatttttttaaaatttttttttttttttttttttttatcttttttttttcttctattattagtttattattattattattattttttattattatttttttttttttttttttttattttaattatttt

SEQ ID NO: 42202 - DNA, 174 bp, Gossypium hirsutum
  Clone ID: LIB3189-030-P1-K1-D6
ctgacagtcgctcaaagcctcgatttagcagaagagaagaagagtaagaaagcttgaattctgaaatcgtttcaagccatgagcacgactcaacaaggaacccactcccttgccttcagggtgatgcggctttgcaagccttttttccacgtcttaccttcctttcgccttgac

SEQ ID NO: 42203 - DNA, 232 bp, Gossypium hirsutum
  Clone ID: LIB3189-030-P1-K1-D7
ctcaccgtcaatcgccttcctcccaaaaggaaaacataaaaaaatctcggccaccgctgctgctgccgccattggagtcttctttgacggccgcttcctcgaaatttctcctgcaaacatcttcacttacctgaagatggtgttgtagacacggtcaatttgcctttcaattcaactccttcaaggccttatacatttcatataccgtggttttgcagatgtgcactttttt

SEQ ID NO: 42204 - DNA, 404 bp, Gossypium hirsutum
  Clone ID: LIB3189-030-P1-K1-D9
cggacgcgtgggttttattccgctattttctctctccccaaacacccttttaagccaaaaggaggacaatggccgatcagctcaccgatgatcagatctctgagttcaaggaggcctttagcctattcgacaaggacggcgatggctgcattactaccaaggagctcgggactgtgatgcgatcacttgggcagaaccctactgaggcagaacttcaagatatgattaatgaagttgatgctgatggaaatgggaccatctattttcctgaattccttaacctgatggcgaggaagatgaaggatactgattctgaggaggaacttaaagaggctttcagggtttttgacaaggatcagaatggtttcatatcagctgctgagctgagccatgtcatgacaaat

SEQ ID NO: 42205 - DNA, 252 bp, Gossypium hirsutum
  Clone ID: LIB3189-030-P1-K1-E12
tcaaaacaagtgaaaatatctctctcttcactttcttctcttttcaacgcacggggaaaggcggggaggccgtagacaatctctcttgcgctcttctcgtagaatggatcagattcaacatccaactgtcatgcaaaaagtagctggcccgctcctttcttttagcattttccgagattttcaagggtatgatgggtctttcaagaggcccgccctattccaaagactttttgcatattggaatttttttca

SEQ ID NO: 42206 - DNA, 451 bp, Gossypium hirsutum
  Clone ID: LIB3189-030-P1-K1-E2
tcttagaaggtgtcttaataaacgccttctttcttcttcttcttattcctttattgctttttagaatttttcttaatcgaaaatgagagagtgcatttcgatccacatcggtcaggccggtatccaggtcggaaacgcttgctgggagctttactgtctcgagcatggaatccagcctgatggtcagatgccaagtgacaaaactgtcggaggaggtgatgatgcttttaacacctttttcagtgaaactggtgctgggaagcacgtccctcgtgccgtcttcgtggatcttgaacccactgttattgatgaagtgagaactggtgcttaccgccagctcttccacccagaacaactcatcagcggcaaggaagacgcagctaacaactttgcccgtggtcactacaccattggcaaggagattgtcgacctctgtttggaccgcatcagg

SEQ ID NO: 42207 - DNA, 293 bp, Gossypium hirsutum
  Clone ID: LIB3189-030-P1-K1-E4
gaacgcagtatctctaactacctccgcctgtctttcaacgagaagagaacaagaaaagaagctgagaaatggcacgcaagaagatcagagagtacgattccaagagattgttgaagcagcacttcaaaaggttttccgcctactatttgcccatcaaatctgcacaagtgacggagtcaactgatttcaatgagctagtagagaaggagccatggcttttgtcgcaaaaactggttgtcaagcctgatattgttgttggaaagcgtgggaagagtggtttgggtggcttggaa

SEQ ID NO: 42208 - DNA, 260 bp, Gossypium hirsutum
  Clone ID: LIB3189-030-P1-K1-E6
ggaaaataatttgtagataaaggtaatattacgtagtcgcataaagcggcatagtacacaacccacaactctggaattttaacatccatatttattctgtagctatcgttattttggcttccactagctggtgaactttccatgccaaaacttcacttgacgctgttgcagtcagtgctagggctgatcttgtaagggatgttgacaccgcacttgcctgggagtccgcttgcaataccatagttgatgccagaaatgcc

SEQ ID NO: 42209 - DNA, 53 bp, Gossypium hirsutum
  Clone ID: LIB3189-030-P1-K1-E7
cccacgcgtccgcccacgcgtccggtcgaagtgggcatatcctttttagtact

SEQ ID NO: 42210 - DNA, 331 bp, Gossypium hirsutum
  Clone ID: LIB3189-030-P1-K1-E8
gaaggtattaagacaatgaagaaaggtgaaaatgccatctttaccattccccctgcacttgcgtatggcgagtctggttcaccaccgaccattccccccaatgcaaccctccaatttgatgttgaattgttatcttggacaagtgtcaaggatatttgcaaagatggtgggttatttaaaaagatacttattgaaggtgacaaatgggagaatccaaaggaccttgatgaagtgctcgttaactatgaagctaagctcgaggatggcacatcggtggcaaaagccgaaggcgtagagctcactggtaatgatggtctattctgttctgctt

SEQ ID NO: 42211 - DNA, 299 bp, Gossypium hirsutum
  unsure (1)..(299): unsure at all n locations; Clone ID: LIB3189-030-P1-K1-E9
ggaaacccggggcgcgccagcggncgacaaaaccaaaaaaaaacacgcgcaaagagcagaacccggcaaaaccccaccgggggaccacaccccgaggggagagcccgacaccacgacacggaaggcaaaaccaagaaaggaaggcacccgaccagaccagcagcgacgcaagacgccggaaaacagcacgggacggccgacccaggccgagacaacagccagaaggaagcacccgccaccaggggcagcgacacacaggggggaagcagagcacgcgaaaaccgaaaccggaaagacca

SEQ ID NO: 42212 - DNA, 450 bp, Gossypium hirsutum
  Clone ID: LIB3189-030-P1-K1-F1
ccggtttacgagatgaaggactaccttgactggactgaagggaaggggatttgggctcattcagataaaggaccatcaccatctccatatgtagcaactctacgagcgcttgtccaagcttctttttgtatggccatgtttctttacctttcaccatctcatcccttgtcctggtttactgatcctgcctaccaagaatggggattctggaggaagttgagttaccagtatatgtctggttttacaatgcggtggaaatattatttcatctggtcaatttcagaggctgctttgattatatctggcctgggtttcagtggatggactgaatcttcaccaccaaaaccaaaatgggttcgagcaaaggttgttgatatcctaggatttgagttagcaaagagttcagtgctgttaccacttgtctggaacatacaagtcagcacctggctt

SEQ ID NO: 42213 - DNA, 375 bp, Gossypium hirsutum
  Clone ID: LIB3189-030-P1-K1-F10
gtcgacatctcaaaggaaattcatacgaattatccaacttccatccttccggcaccaatgccaccattgaacccaaaatatgggcagttttagttgctggctccaatggttttgtaaattataggcaccaggcagatatatgccatgcatatcaaatcttgaaaaatggtggactagaagacgaaaatattatcgtttttatgtatgatgatattgcattcgacgtagaaaatttgagacctggtgtcattatcaataaaccagatggagacaatgtttataaaggagttcccaaggattacacatgggaagatgtaaatggggacaatttacttgctgcaatacttggaaacaaaactggtgttaggggtggaa

SEQ ID NO: 42214 - DNA, 438 bp, Gossypium hirsutum
  Clone ID: LIB3189-030-P1-K1-F2
caaaagcaaagatgaggcctctagacgagaaagaaaccaccgccgttttcgaaaaaatctttaaattcaccgggaacaacctgaagaacatagtcgagaacccatctcatgaaggacccgacaaggaacccggtcgctattgtttcaggctacacaaaaacaaggtctattacgtcagcgactccctcgtcaaacgagccactaacgtcgccagaaccaagctggcttccattggaacctgcgtaggtaggttcacccacggtggcaacttccatctgaccatcgaatgcttaaacctcttggctgctaacgccaagcacaaggtttggctgaaacccacgtcggagatgtcgtttctttacgcgaatcacgttttgaaaggtgggctagggaggataacggagagcatcgcgcctggtgatggggttgtggtttttt

SEQ ID NO: 42215 - DNA, 450 bp, Gossypium hirsutum
  Clone ID: LIB3189-030-P1-K1-F3
cccacgcgtccgaaaaaaatgtccaaggaagtgactgaagaagggcagagccgaaaggactatgtagacccaccaccagcacagctggtggacattaacgagctcaagctctggtcattttacagagctctcatcgccgagttcatagccacactcctttttctctacgtcacaatagccaccgtaatcggccacaagaaacaacacgatgcgtgcaatggagttggtcttttaggcattgcatggtctttcggtgggatgatctttatcctcgtttattgcaccgccggtatctcaggtggtcacattaaccccgccgtgactttcgggttgtttttagcccgtaaagtgtcactaataagagctgttacttacatggtagcttaatgcctgggtgctatatgtggtggtgggctaggcaaagcttttatgaaccatgaatacaccacc

SEQ ID NO: 42216 - DNA, 441 bp, Gossypium hirsutum
  Clone ID: LIB3189-030-P1-K1-F4
gttctagatcgctagcgatctagaacgatcaatgtgcaaaacaagaactcatcatactttgtcgaatggattccgaacaatgtgaaatccacagtttgtgacattcctccgagtggattgaaaatggcatccacgtttatagggaactctacttcaatccaggagatgttccggagggtgagcgagcaattcactgccatgttccgaagaaaagctttcttgcattggtacactggagaagggatggatgaaatggagttcacagaagctgagagcaacatgaatgatttggtttcggagtaccaacaataccaggatgccactgcagaagacgaggagtacgaggaatatgaggaatacgaggaagaggcttaaaggatgctccttgttctttttatcatgtaggacattcggttgtgcaattttcgctttgctggtttt

SEQ ID NO: 42217 - DNA, 97 bp, Gossypium hirsutum
  Clone ID: LIB3189-030-P1-K1-F5
aaaataaaaaaaaaaaaacagcaagacagaaaaaaaacaaaaaaagaaataaaaaagaaaaagatgaaaaaaaacaaaaaaaaaaaatcaataaaaa

SEQ ID NO: 42218 - DNA, 304 bp, Gossypium hirsutum
  Clone ID: LIB3189-030-P1-K1-F7
ctttggcaaagaaaacacaggtgtacctcactagttttcacttatggagttctcgagaaaatcccttgtgatcaagatgttgatctcagcaatatttctattgggattatcgagttcgagtgtagcggagtttcgactcgccagacatgcgacgacgagtacgacgatcgagtatccggcgttaaactgtcggaaacacagtgcggttctgacggaattcggtggtgttggtgacggcaaaacatccaacacggaggcgtttaaagctgctatagcaattctcagccagctcgcggaagatggt

SEQ ID NO: 42219 - DNA, 318 bp, Gossypium hirsutum
  Clone ID: LIB3189-030-P1-K1-F9
tagaaaattcttaggatagagatctgagagacagagaaacaaaacagagtgagcggttttcgggatttggtaacggcgattcaagttatactgtgaggtgtttgttggagagcgaaagaagggggatgcaaaataaaacatcagcttcactcttacattacagctgcttcgccaacaaaggttaagcggtatttggagaccagacaaaagtagaaggcggtttcgtaacagaaacagagcaggccaaagtttattaaaataaatataaaaaaaaaaatatataatataaaaataaaaattaaaaaaaaaaaatataag

SEQ ID NO: 42220 - DNA, 448 bp, Gossypium hirsutum
  Clone ID: LIB3189-030-P1-K1-G1
caatgcccagccaccaccatcaccaccgctctactccgctgctgtccgccacggcagcttcctcctctggctcccaatccttcgtctctaagctcctgctcctcttaacactcctccctctctctttagctgccttagctttcgtcctccagtggcgcggagggggtgtatccgatcccaccatcgccacatccgccgcctattcccgatgggcaccacgtgggtcccaccacgagatcttccctggcatggagactttctcatctctctctcccaaatcgcattcttcttcggattgcatcaatctcggtcgtacctcttctcattctctcccttactatggggactggaaatttggttttgaagctaatttaaagccaaagatttgtattacaacaagtacatcagctggcttggagcagatttaccatggatgttctatcataga

SEQ ID NO: 42221 - DNA, 437 bp, Gossypium hirsutum
  Clone ID: LIB3189-030-P1-K1-G10
tacatatctcaagagagctgctggagcatcccatgccactaccaaatgactgattaattcggatcggcaacgatatcatctatctcacaaccaagatcctatcctaacactctaaaaatatcccaggttcctcctggatactctggtctcccaacttttcaaaatggcgattttcagatgtttccggttatgtatcctgcaattgttccaggtttaacttcgttacaaaatcaggaacagatgaatcgtggagcaggcatttatgctgttcctgttctaccatttatgggacatgtttctgggattccatctaacaatctcattcctcttacctataacatacctactcaatcagtgacagatgcaggggcagcagcttgaggatcaagggcaaggagcacagcatcctcaacatcaacagcagcaggtatgacctt

SEQ ID NO: 42222 - DNA, 447 bp, Gossypium hirsutum
  Clone ID: LIB3189-030-P1-K1-G11
ctttgtatgatcaccctggcaaggcagacatgttggagcaacttattcttgagttggagcattcaattaggattaatgggagatatcctgataggacagagaaggagcccccttcaacacttttgtggattttgttctttttggctcagcattatgacagaagaggacagtatgatgttgctctttcaaagattgatgaggctatacagcacacaccaaccgtaattgatttgtactctgtcaagagccggatattgaaacatgctggtgatttggtagctgcggcttcattggcagatgaagctaggtgtatggacctcgcagaccgttatattaacagtgaatgtgtcaagcgtatgttgcaggctgatcaggtggctttggcagaaaaaactgctgtgttgtttacaaaagatggggaccagcacaacaaccttcatgacatgc

SEQ ID NO: 42223 - DNA, 321 bp, Gossypium hirsutum
  Clone ID: LIB3189-030-P1-K1-G12
gttgaaaaagagagactatttttggtggaaatgttcagatgaattcatccatggcaaccaaagtgtacattgtatactattccatgtacggacacgtaaaaaaacttgcagaggagatacagaatggggccacatttgctgaaggtgttgaagccacattatgttcagtccctgagactatattcaaagaaaggctcgtatagatgagggcactaccaaaaagtgatgtaccggttattacatcgaacgatcttgctgatgccgatggatttgtttttgcttacccgactatgattcggaatgatgttcgcacaatttcaa

SEQ ID NO: 42224 - DNA, 454 bp, Gossypium hirsutum
  Clone ID: LIB3189-030-P1-K1-G2
tcctactccctctccatcgcactgctatttctttctatagaattagtcactcctgttctagatgaaggggctctccccaattcttgcttgcctagcgcttgctgtggtggtaagccatgctgctctctcacctgagcaatattggagctataagctgccaaatactccaatgccaaaggctgtcaaagaaattctacatccagaactgatggaggagaaaagcacctctgtaaatgtaggaggtggtggtgtaaacgtcaatacaggaaaagggaagcctgggggtgacacccatgtgaacgttggaggcaaaggagttggagtgaacacgggaaagccagggggtggcactcatgtgaatgttggagacccttttaattacctatatgcagccagtgaaactcaaattcatgaagacccgaatgtggctcttttctttctggaaaaggatatg

SEQ ID NO: 42225 - DNA, 448 bp, Gossypium hirsutum
  Clone ID: LIB3189-030-P1-K1-G3
ccacgcgtccgcttcactcccgtcctcacatttcccaacaaaaagcgaaggaaatcattttcatcaatcccccccatcacccttctttatctttcccacggaaacgaagagcaaatcagaaaaccttgtgaagaaaaaatgagggaaatcttgcatatccaaggaggccaatgtgggaaccagatcggggctaagttctgggaagtcatatgcgatgagcatggaatcgacaacactggaaagtataacggtgactccgatctccagctggagcgtatcaatgtctactacaatgaagccagtggcggtaggtatgttcctcgcgctgttctcatggatcttgaacctggcactatggactccgtcagaaccggtcttttcggccagatctttcgtcccgataaccttgtcttcgggcagtctggggctggcaacaactgggccaagg

SEQ ID NO: 42226 - DNA, 401 bp, Gossypium hirsutum
  Clone ID: LIB3189-030-P1-K1-G4
gatcaatgctactaatggaactgctggtgcatttgatgtcacaaccaagggaattcttcattcagctctggaaagatgtgagtattggagattatcggataagaaggggaagcctcctggggttgttggatggtggccatctcgtgctgttacctttatagagaatcatgacactggttctacccagggtcattggaggttcccaggtggaaaggaaatgcaaggatatgcttatatcttgactcacccaggaacgccggctgtgttctacgatcatattttctctcatcatcgatctgagattgccaatcttatctctgtcagaaacagaaacggaatccattgccggagtttagttaaaaatcgtcaaggcaggaagggatgtgtttgcagccattatt

SEQ ID NO: 42227 - DNA, 339 bp, Gossypium hirsutum
  Clone ID: LIB3189-030-P1-K1-G6
attagcatgatcaccctggcaaggcacacatgttggagcaacttattcttgagttggagcatggggtgaggattaatgggagatatcctgataggacatagaaggagccccattgaacagtcttgtggctttatagcctattggatactcttaatgacataggatgacgagttgatgatgctctatcaaagagtgatgaggctatactgcacacaccaaccgtaattgatttgtactctgtcaagagccggatattgaaacatgctggagattcggtagctgcgtcttcattggcagatgaagctaggtgtatggacctagcataccgttatattatac

SEQ ID NO: 42228 - DNA, 238 bp, Gossypium hirsutum
  Clone ID: LIB3189-030-P1-K1-G7
cccacgcgtccggaagcttaccaccctcagaacttcctcggagcctttggtactagtggtgggctagttccaacccctggtggaggtgttggccttaatttagggccgtcagtcttttgttcctatcctgggaccggatgtgttcgtgtccagcctactattcctggttgtactggtaccattggcgctggcacaccaccatgattgatgtcctgattcaggcttagagggtgttgaa

SEQ ID NO: 42229 - DNA, 271 bp, Gossypium hirsutum
  Clone ID: LIB3189-030-P1-K1-G8
aaaagggaaaaaaaaatgggaagaggaaaattcatgggcaagcccactggccaccgccacttgggtactccagaagagctccgtgctggtacctcatctcggccccgtacatttaggaaggaagaagctgaagtagaggaagaagaagaacgagaagagtctgaagaggaaattgaagaagagcccgagaaacgaaaagggacccaagggcttattgagattgagaatcctaatttggctaaacaaaataatgtcaaagccaaagatgttg

SEQ ID NO: 42230 - DNA, 442 bp, Gossypium hirsutum
  Clone ID: LIB3189-030-P1-K1-G9
cggacgcgtggggttgaattttacctgtaatttttttttgttttttcattgattaaagcttggaatttcctttttccttcggtgaaacgtttggttttgttcatttttcgtgacgctttttttccccgattcttgctttggcagtaatagcgttggcaatcacctcttaattcctttgccggtcccggataatcccgactttcagtcatattttccaaatcgaagcgccgattctaagaagtttgagcttccaggctcgaagctgaagttgtaaaatttggaaatattttgagcttttctgtttgttgacttcggttgaactttggggactagagaaaagggtcataaaactgtagacccaaaaagaaatccttttggttggatcataaacttgtttgggttttgattatttttaagcaaaaaaaatctatacagaagacag

SEQ ID NO: 42231 - DNA, 348 bp, Gossypium hirsutum
  Clone ID: LIB3189-030-P1-K1-H1
cacatatccaatggcttcgatcgctgtcggagacgtgttaccggacggtactctgtcctactgagacgccgacgattatctgcagcctgtgtgcgtacattccctggctgacggttaaaaggttatcatcactggcgttgccagggcctgtacccctacttgcagtttgaagcatgtctctggactatagagaaagcaggggagctgaaatccatcggcggtgatgtaatcatgtgcatcagcgcgaacgatccctttgcgatgaaggcatggaccacaacttaccctgagaacagagatgggacgtatccagctgatgggctagctacatacacccacgcccttggt

SEQ ID NO: 42232 - DNA, 222 bp, Gossypium hirsutum
  Clone ID: LIB3189-030-P1-K1-H10
ggtagtgtaaagatcacatctttgacacatcctgtgatagttttcgcctactttttattgtatcaaagcaccatagatcgatggggagaatcatgatgccctacttgatggtcttctcgtacctgtatgccaactgttccttaacattatagaaggttgcatctgttataaacactccttgaggttggactgtttagactaaaggagggacttcttttgttc

SEQ ID NO: 42233 - DNA, 441 bp, Gossypium hirsutum
  Clone ID: LIB3189-030-P1-K1-H11
cggacgcgtgggctgacgcgtgatatccatactttgctcaccaaaactcttctctatgtgtatggtgtacctttatgccctattctccatgcaaatccatgctagagagtacttcagcaaattcccaagagttaacaccaatgagaaagagacaacaaccagagagcaagagcacgagacctttgttccctaaaccacccaaaagccagaagagcatgacccatggttcatccctgaaacccagaatggttatggcctttacgttccacaagtcatgctaacgcttaggcttatgctcaagccgctccagtttgaccaccaaagaaacctattaaccctatgttacccatgtaatattcctccctgatgaaccttataacagaattctcgatccttcaacattataatactcatactattacacaaagatgcctacaattt

SEQ ID NO: 42234 - DNA, 443 bp, Gossypium hirsutum
  unsure (1)..(443): unsure at all n locations; Clone ID: LIB3189-030-P1-K1-H12
caaaaggaagatagtcagccatggatgttcttagagcttcttcttctacccttgttcattcaccatacatttcaacaacaacaagaagaaacaaaacccaatttcttaaacccatctttcaccatttaaagttaaaattaactgtgtttgattcatctttcacattgtttgaaagaaatggatcgaaattgaggttgtttatgacgttaccatcgtccccggcatcgacaacggaatccatcgagccacctatgctggaacttgaggctgatggttgcgagaaagagagattcgattggtactcacattggtacccggtgatgccaatatgtgatttggataagagggtgccccatgctaagaaagtattgngacttgacctagtggtgtggtgggataggaatgagaatgaatggaaagtgtttgatgatacttgtccccat

SEQ ID NO: 42235 - DNA, 441 bp, Gossypium hirsutum
  Clone ID: LIB3189-030-P1-K1-H3
attgtgggtggagaagaagcggtgacggatctaacttggaactccctttctcttcttaccgctattgccgacctatctctaaccccctcaatttctctcaggtagatattccttgtgttcaagcgtcttcatggcttcaaagcggattttgaaagaacttaaggatttgcagaaggatccaccaacttcctgtagtgcaggtcctgtagcagaagacatgtttcattggcaagcaacaattatgggcccctccgatagcccttttgcaggaggtgtgtttttggttaatattcattttcctccggattatccattcaagcctcctaaggttgcatttaggaccaaggtctttcatccaaacatcaacagcaatgggagcatttgtcttgatatcctaaaagacagttgagccctgcactgaccattttcaaggtgtggttt

SEQ ID NO: 42236 - DNA, 295 bp, Gossypium hirsutum
  Clone ID: LIB3189-030-P1-K1-H5
gtaagtgtaaagatcacatataagacacatactgtgatagtttccgcctacttttttatgtagggagacacataagatcgaaggggagaaacataaatgcacctacaatgatagggtttgcaccaatagcctaatatagaccaacatattgcacttaacattgataagaaaggctttgccaatcttgtttataacagaactaccaataaagtcgatgagactgttgtaagagcttataagggcggagaacttcctgtttatggtttccaacatcctgaagcccgagttgagtcaa

SEQ ID NO: 42237 - DNA, 460 bp, Gossypium hirsutum
  Clone ID: LIB3189-030-P1-K1-H6
cccacgcgtccgcaaagcattagcaaccatagccatggcttcctcaccaaaactcttctctatgtctatcctcttcctttttgccctcttctccatgcaaatccatgctagagagtacttcagcaaattcccaagagttaacaccaatgagaaagagacaacaaccagagagcaagagcacgagaccttcgttccccagaccacccaaaagccagaagagcaagagccaaggttcatccctgaaacccaaaatggttatggcctttacggccacgagtcaggctcaggctcaggctcaggctcaagccggcccagtttcaccaccaaagaaacctatgaaccctatgtcacccctgttagattccaccctgatgaaccctataacagcattcccgaatcctccaacaataaagacacttactactacaacaagaatgcctacaagtccactaagcagcaa

SEQ ID NO: 42238 - DNA, 295 bp, Gossypium hirsutum
  Clone ID: LIB3189-030-P1-K1-H7
gggattttctctaatggcacctggaactttgatgatcacaaaccttcatctacctttcttgcattgccatttcaccaagattatacttacaacttcaatccaatctactgtccctttggtgatgaattctttttacaaagcaacacatttgatacaccctcattcccacttctacaacaacatgtatgaccaagaatccaaattccttgacatcaacttcactagttggatgtttatagctcctgcaaaaccgagcctgttcaattacctcaccctgacaatccatctaataagt

SEQ ID NO: 42239 - DNA, 224 bp, Gossypium hirsutum
  Clone ID: LIB3189-031-P1-K1-G1
cttaataaacgccttctttcttcttcttctccctttctttgctttttcgaatttttcttaagcgagagtgagagagtgcatatcgattcacatcggtcaggccggtatccaggtcggaaacgcctgctgggagctttactgcctcgagcatggaatccagcctgatggtcagatgccaagtgacaaaactgtcggaggaggtgttgattctttttacacctttt

SEQ ID NO: 42240 - DNA, 337 bp, Gossypium hirsutum
  Clone ID: LIB3189-031-P1-K1-G7
cttcaataatttcttccgttgatctttgttagagatagctttttaatttttcattatgggaagatcaagatcggaatcaatggatttggaaggatcggcgtttggtgcagagttgctctcaaagcgatgatttggctcgtgctgttaacgatcctttcatcaccactgaatacatgacctacatgtttaagtcgcagtgtcacggtcaatggaagcatcatgagctaaggtgaaggactcaaagacccttcttttggtgaaagcctgcacagtttcggttcagaaaccctgaggaaatccagggctgaggctggagcttggtatgtgtgagtctact

SEQ ID NO: 42241 - DNA, 338 bp, Gossypium hirsutum
  Clone ID: LIB3189-032-P1-K1-D10
ggaagaaccggaggaagagagtgatgacgatatgggattcagtttgttcgattaggtgtgttttggtcaattactagttatataacattaaggtagtgactcttttagagttgtattgctattggtatttgcatgttaattagaaatattacgtttttgttgaatgaagttgacactaagtagctctttcttttgtgatctgtttttctgaatcttcctacatatagtaagtattatagattctggaccatataaaatgtattaacagctaccttttttttttattcatttttaaaaatctttattttttattatttcttatttttatttacttttct

SEQ ID NO: 42242 - DNA, 417 bp, Gossypium hirsutum
  Clone ID: LIB3189-032-P1-K1-D11
caagatgctcagcatattgtcaatgctgcaagaaatgcaaaaatggctagactgaaacaggccaaggaagaggcagagaaagagattgctgaatatcgtgctcaagtagagtatgagttcaagaagaaggtggcggagagtagcggatactcgggggctaatgtgaagcggctcgagacggaaacagatgcaaagatcaatcacttgaaaaacgaagctgcaaggatatctcatgatgttgtacagatgcttttgaagaatgtgacaactgtgaggaactagggggtcttccatgaagactgatggtttaattttctactacattctatcaattcccaaaactcagctcatgcttgggaacaattttatgtcattattttatcatttgttggtatttttgtttgggccatgttcctg

SEQ ID NO: 42243 - DNA, 395 bp, Gossypium hirsutum
  Clone ID: LIB3189-032-P1-K1-D12
cccacgcgtccggtttttgttcgattggttctatgggattcttgcttccctcggtctatggcataaagaggccaagatcttgtttttagggcttgataatgctggcaaaaccacgctccttcacatgctcaaagatgagagattagttcagcatcagccaacacagcatcccacatcagaggaattgagcattgggaaaatcaagtttaaagcttttgatttgggaggccatcagattgctcgaagagtttggaaagattactacgccaaggtggatgcagttgtttacctggtagatgcttacgacaaggagaggtttgctgagtcaaaaaaggagttggacgctctcctctctgatgaatccttggctaatgttccattccttgataattggt

SEQ ID NO: 42244 - DNA, 319 bp, Gossypium hirsutum
  unsure (1)..(319): unsure at all n locations; Clone ID: LIB3189-032-P1-K1-D5
attttatatattatatcaactttttttaatttttttaaatatnctataaaaatttcttatgggttggtgtttattctataatataacattaattattactctttaaattttattctattacattgcatttaatttaaatatactttttttttataactttcactaattcttattcttatttttatttatattacttattttatttattttatttattctatttattttttataatttttttttttattatttactactatattacttaatttttatcattcttacataattaattattaactattatttatattactta

SEQ ID NO: 42245 - DNA, 89 bp, Gossypium hirsutum
  Clone ID: LIB3189-032-P1-K1-E10
gctggagcttcgaggaagttcaggttgctgatatctccttgagtgattacattggtgggcaagcttctaagcatgctacctatgtgcca

SEQ ID NO: 42246 - DNA, 56 bp, Gossypium hirsutum
  Clone ID: LIB3189-032-P1-K1-E5
atcatctatactgactggcaaatagtgtgctagacttgaatatggtgctaaagact

SEQ ID NO: 42247 - DNA, 257 bp, Gossypium hirsutum
  Clone ID: LIB3189-032-P1-K1-E6
attagcaaccatagccatggcttcctcaccaaaactcttctctatgtctatcctcttcctttttgccctcttctccatgcaaatccatgctagagagtacttcagcaaattcccaagagttaacaccaatgagaaagagacaacaaccagagagcaagagcacgagaccttcgttccccagaccacccaaaagccagaagagcaagagccaaggttcattcctgaaacccaaaatggttatggcctttactgccacg

SEQ ID NO: 42248 - DNA, 437 bp, Gossypium hirsutum
  Clone ID: LIB3189-032-P1-K1-F11
gtagtttaagcagagagggtgcgcaggataaagctattcaccattgtttcaacatgaaggtttgtaataaaaatttgtttctatcagcattgctttgcattgctgttgcaggagttttgggtcaagctcctagtaatcctcctacgtctacgccggcgccacccacaccaccggcttgtactcctcctccgacgactcaagcaccggctacaccaaccgccactccgccactggtttctactcctcctcccacttcatcaccgcccccagtgacagcttgtgcacccccagtttcaactcctccacccagttctcctcctgctgcaactccaccacctgcttttgctccttctgcaactccacctgcagcttcttcaccttctgccactcctccaccagcttcttcaccttcccgcactccaccacctgtaacccca

SEQ ID NO: 42249 - DNA, 296 bp, Gossypium hirsutum
  Clone ID: LIB3189-032-P1-K1-F4
gctcgagctgctcccgcggcgagagcgggtcgccgcgtgccggccgggggacggacttgtaacggcatggtatgatatctttctcgggctccctctcttttgtctagtatcttaaatgtcctttcatgttcaccacttgttgttctgtcattaaattttaattcaagttttattcctacatttacttatgttctttaatgtataatactctttttatactcctatttattttccttttgtttaatatatcttttttttacttatgactttattcttctttagttttctttaaattt

SEQ ID NO: 42250 - DNA, 427 bp, Gossypium hirsutum
  Clone ID: LIB3189-032-P1-K1-F5
tttccctaacaaacctgcatcagatccgatcagatttaactcagatccatccgtatcgggtcttctaaattccagatctttacttttctcgagtaaaggaagaaagaggaagggagagatgagagagattattagcgtccacattggccaagctgggattcaggttgggaattcatgctgggagctttactgtcttgaacatgtaatccaccccgatggaacaatgccgagcgacacctcaatgggcgtcgcacacgatgctttcaacactttcttcagcgaaacgggttcgggaaagcatgtgcctagagctgtctttgttgatctggaacccactgttatcgatgaagtccggaccggcccttatcgccaacttttccaccctgagcagcttatttccggcaaggaagatgctgctaataatttt

SEQ ID NO: 42251 - DNA, 265 bp, Gossypium hirsutum
  Clone ID: LIB3189-032-P1-K1-F6
tttccctaacaaacctgcatcagatccgatcagatttaactctattatccatccgtatcgggtctgctaagggccagatctttacttttctcgagtaaaggaagaaagaggaagggagagatgagagagattattagcgtccacattggccaagctgtgattcaggttgggaattcatgctgggagctttactgtcttgaacatgtaatccaccctgatggaacaatgcctagcgacacctcaatgggcgtcgtacaccatgctt

SEQ ID NO: 42252 - DNA, 263 bp, Gossypium hirsutum
  Clone ID: LIB3189-032-P1-K1-G10
attacgtggagagccttttttttgtgtagcgattctcagatagtcttttctttaagcttacagcttctctccagagttttataatgggtaaggagaaggttcacatcaaccttgttgtcattggccatgtcgactctggcaagtcgaccactactggtcatttgatctacaagctaggtggtattgacaagcgtgtgattgagaggttcgagaaggaggctgctgatatgaacaaaaggtcattcatgtatgctttggtgctt

SEQ ID NO: 42253 - DNA, 345 bp, Gossypium hirsutum
  Clone ID: LIB3189-032-P1-K1-G11
catatgtagctcacagaatgggatgaattcactggagacacgtgtgcatggtctagaattggctgtggatgagatctcgtatgacttggctgtatcaactggaaggatgtctacttccagccggaccacttgttgcctactacctgctgcaggttttctgagatccaagttctggaggaaaacagggatgtacacaaatggtacctctacgttttctacatccagttgcaccccatccgctgctgccacacattttagagcttaatagaaattgctatgaaacatttgagaaccatatggtacgaccttaaggaggtggtggatttatttcgtatccattgtcag

SEQ ID NO: 42254 - DNA, 150 bp, Gossypium hirsutum
  Clone ID: LIB3189-032-P1-K1-G4
cagaaacaacaagggctgacatggctcctttatagggtgctaacagaacaagagccatagcagtagcagggggccactcagatccatcaacatggatccataagcatttggcttttcaagttctacaatgagaaccaggaaccataactg

SEQ ID NO: 42255 - DNA, 489 bp, Gossypium hirsutum
  Clone ID: LIB3189-032-P1-K1-G5
cccacgcgtccgctgatttgctatggattccttcacatgttaaaagcctctgctttaaaaatccaggtagagtttttttttcactgaattgctgtttcaaattttcaaagttcatctctttattagtaaagtgagttctggttgtaattcaatctataaatgcacactatgtactctaatttgacaaagaaccaagcttttccaattgttattaggttttcttcacaaacctcaaaaacccatctttggtcaattaggtattctccaaaaccctccttaaactccttatttggtgtttagcaccccataaaggtttccacttttcaccatataggtttttaaaacctagaaagtgttttaaggttagttttaggatttttaagtgcctttctatgtatttttcttttgttttgagtcttttactttttttctagtcttattttattttttggttttcatcgatttattggttttttttttcattctttt

SEQ ID NO: 42256 - DNA, 352 bp, Gossypium hirsutum
  Clone ID: LIB3189-032-P1-K1-H10
ggtgggtctaccgggctgttcatatacgcctactgtttgtattattacaatgcacggtcagacatgtcaggcttcatgcaaacttcgttcttctttgggtacatggcctgcatttgctatggctttttcctcatgcttggggctattggcttccgtgcatctctgctctttgttcgacacatttaccgttctatcaagtgtgagtaggaagttggatggtcttcccttttcacaagaagtaagcatacctttgctttatcagaaccagttgataggtagtttatcaaaagattctacgacgatgattacgaaaagagcagactggaagcgcatgggtgctttgggctgcttt

SEQ ID NO: 42257 - DNA, 432 bp, Gossypium hirsutum
  Clone ID: LIB3189-032-P1-K1-H11
cgtaagttatctgctggttcattttagtgattttgatgttttttggtccaaacgagattatcagggtctatgagtcagcatcaaagtttggtgcaggactgtttcttttggttcaagtcgtgcttttactcgactttgttcatggatggaatgacaaattggttggatctgatgagcaattcctgtattgttcgctgcttgttttttcttttgtcggcactttggcctcctttttattttttgtgttcttattatcctttgtttttctttttctctcttagtatgtatgcttcttttatcttttttattcgtttttttcgttgttttttttcatttattttttatcctgattattttcactttattttctttccttttttgttccttttatttttcttatattctttggtttttatttttgtcttttttctt

SEQ ID NO: 42258 - DNA, 335 bp, Gossypium hirsutum
  Clone ID: LIB3189-032-P1-K1-H12
ggaggaggcttcggatcaacctccgatgcctccccataaaaacatatggagagcactaatggtggcacagcttgcaggtagtaataaagcgagatcatatagttgagcggttaatgctcgaagaacatgctttgtagatgttctacacaaagagcatccgattcataagcatgctggtggcgggaccgacttttgtccatttaaagttttcaaggataaaattgtggaaccccattttatccacgactacaatacccttagcaatgcacatttggatgagtcaaagcataagcctgaaaccagtaagttatcacacctgttccgttggatctttc

SEQ ID NO: 42259 - DNA, 89 bp, Gossypium hirsutum
  Clone ID: LIB3189-032-P1-K1-H4
gttgaagtagtaatatctatagcatacagagatggaagtcaaagaacaagcaggtttgtttgtgatgtggcttcgatccctgcccaatt

SEQ ID NO: 42260 - DNA, 342 bp, Gossypium hirsutum
  unsure (1)..(342): unsure at all n locations; Clone ID: LIB3189-032-P1-K1-H6
agccgtcaggaaggaggcagcggatcaacctccgaagcctccccatgaaaagacaatggagagcactaatggtggcacagcttgcaaatagtaatcaagcgagaccattaggttgagcgtctaccgccgaagatccaagtcttgtagatgctccacccttagagctnctgattcatcaccatgctgtgctcgtgaaagacccaaaacgcctcaccgagtggacgagatgaaacaagtgcctcgctatttcgatggcgacgatgatgggaaaatctcggctctcgaacttagggcatacttcggctccatcggggagtacatgtcacatgaagatgctaaaat

SEQ ID NO: 42261 - DNA, 341 bp, Gossypium hirsutum
  Clone ID: LIB3189-033-P1-K1-A1
gaataaaattatcaagtaataagttttaagtataacaaaatttgagaaacacaaaaggaaaattcagaaaaaagcatccagcataagttcattttaggtgccaaacttaaaaactacaaaatctaagacacttaacatgctccaaatatcaaatagatgactatcataacagttatcattggctttaagccactggcggaagttcaatctcggtcggcacaggtgcttccaccttgataacttcatcctccttgggagggtggatggtgacaagatccgggagtggagttgttgggccttgcttaccctttggatcccagtcaagcatgatcttcaccttg

SEQ ID NO: 42262 - DNA, 344 bp, Gossypium hirsutum
  Clone ID: LIB3189-033-P1-K1-B11
cttaattatttctctatctcttgcaatatgcctccagcctcgcccgatttctccagctctgtcgagcttaagtatgttaagcttggctaccaatacgttgtggatcattttcttactctcttgttggttcctgtcatggttggtatccttattgaagttgttcggttcggccctcaagagattgctaacctatggaactccctccattttgatcttattcagatattgcgctcttgtttcttcatcattactattggcgctgtttactttatgtccaagccacgatgcatatacacttgggattatacatgctacaagccttctttgacttgcagggtttcttt

SEQ ID NO: 42263 - DNA, 283 bp, Gossypium hirsutum
  Clone ID: LIB3189-033-P1-K1-B12
cggacgcgtgggcagagactgagagtgaagacacccacccaatcaaccttgtgaaaatggcgacggcccaattcctatcatccttgcggtactcccacagtctaacagtcgaagctatctccttttgcactgccatagtctgcgaagccatctcatggctcttaatctaccgcaccaactcttacaaatccctcaaatcctctatcgacaaagccgtcaagaaacttgaaatcatgtaaaccgtccaaaaccctttcaaggtattctccaaaatatccaaaac

SEQ ID NO: 42264 - DNA, 437 bp, Gossypium hirsutum
  Clone ID: LIB3189-033-P1-K1-B5
cccacgcgtccggcagaattcgaagtttgaggaacacagaattagtagggaaagggatgtgattctaagggaaatggaagaggttgagggtcaaacggaggaggttatttttgaccatttgcattcaactgctttccagtacactcctcttggtagaactattctcggacctgctgataatattaggacgatcaccaaagagcatctgcaaaactatattcagacacactatactgctcctagaatggtcattgctgcatccggtgctgttaagcatgaggaaattgttgaccaagtgaagaagttgtttaccaagttatcgtctgatccaaccactggttctcagttagttatgaacgaaccagcaacttttactggttctgaggttagaatgatcaatgatgatgtttctctggcgcaatttgctgttgtttttg

SEQ ID NO: 42265 - DNA, 253 bp, Gossypium hirsutum
  Clone ID: LIB3189-033-P1-K1-C10
cccacgcgtccgctttgaatttgggagtggatttgcaggtactttcttgaccggtagtgaagggaatgatgagttctatactgatgaacatggaagaataaggacaagaacaaatcgctccggtgggatacagggtggaatatccaatggggaaattataaatatgagagtagctttcaagccaacagctacaattggttagaaacagcacacggtgactctagaaaaacaagagattgaactactagcccgt

SEQ ID NO: 42266 - DNA, 362 bp, Gossypium hirsutum
  Clone ID: LIB3189-033-P1-K1-C11
cggacgcgtgggcggacgcgtgggcggacgcgtgggcaaagttgtgataaaggcaatgtctgaggctagtgaaaataaaccggtttctgggttgccaattgacttgaaaggtaagagggcatttattgctggtgtagctgatgacaatggatatggctgggcaatagcgaaatctcttgctgctgcaggtgctgaaattctagttgggacatgggtgcctgctttgaacatatttgaaaccagcttgcgacgtggaaagttcgataaatctcgagtattgcccgatggctctttaatggagattaccaaagtatattccctagatgcaatctttgacaaccctgatgatgtacctggagata

SEQ ID NO: 42267 - DNA, 347 bp, Gossypium hirsutum
  Clone ID: LIB3189-033-P1-K1-C12
tgctggcaagaaggcatggctcaattaagcctaacgaggcctcaatccctgaaggaaatgagtgtgaggttggtttgaataagagttttgggttttcgaagcattttacgtctcattatgagcttggtgaggaagtggggcgtggacattttggatatacttgctccgctaaggccaagaaaggaagcctcaaaggcaatgacgctgctgtcaaagttattcctaagtccaagatgaccactgcatttgccatagaggatgtaagactagaggtgaagatactacgagctttaactggtcataagaacttggtttagttctacgatgcctattaagatgatgaaaat

SEQ ID NO: 42268 - DNA, 321 bp, Gossypium hirsutum
  Clone ID: LIB3189-033-P1-K1-C4
gtttgtttgttttctggtgctttctttctctatcctgaaaccacagccgtaaccatgtctttctgtggtagccaactgcatttccagcttttcaccacagcctactttctattcaaccaagttccttaaaggcttctttccaaagctcgattccgtcaaatccataaccccaaaactccaaagttcaaggctttttaaggtcatagcatatgtttgtttctattcttaaacttttatctcttattccatctctttatcatgttatattcctacttttacctaattttaaagtatatttctttttaactttgctattattat

SEQ ID NO: 42269 - DNA, 364 bp, Gossypium hirsutum
  Clone ID: LIB3189-033-P1-K1-C5
ccaacgcgtccgttcaatatcctttgaaactcagtgtttaagctttgattcccaagttttttttgtttaagaaatggctcaggcaagaggcggtgcaatagcggtggcagcggtggcggcggcggtgctctgcttgttgctgagtcactttgagttggctcaagcagcaacgtatactgttggtggaaccggtggttgggccattaacgtggctggttggaccaaagataagcgttttaaggctggtgatacacttgtattcaaatacaacccatcaatccacaatgtggtagctgtaaacagggcaggttacagttcatgcacaaccccaaaaggtgctaaagtttaccagtcgggcaaggat

SEQ ID NO: 42270 - DNA, 388 bp, Gossypium hirsutum
  Clone ID: LIB3189-033-P1-K1-C6
gtgaagggaaaagccctagccagctctgaagttaaatggaagccttagctgctgaacatttagagagaatctgtattgtttcgtcctgtatttagctaaaagggatagtattcttagcagttcgggttttgaagtattcatagcgttttagctttgcaatttctgaaaatggttggaaatacattagtccagattccagcatgcccgtctttgtcatcttcaactttgaccaccctcccgcattcttctccaaaagttttgccatgtcttccgcctaaactaagaatgaggttggcaaaagttagagctatgtctgctagtactgagcataacccacaaccccggtcttcggagcaaaagaatctgcttgctgttgttttagatattc

SEQ ID NO: 42271 - DNA, 358 bp, Gossypium hirsutum
  Clone ID: LIB3189-033-P1-K1-D10
ggctatgaaactttttatatcaatgaacctggggctcttctctttcattctcatcctcacacactttctgctgaaaagctcgattcgcgtccaagttcttggctggatttgtgttgccatctctgtatccgtctttgcagcacccttaaacattatggcacgagttatacgaacaaagagcgttgagttcatgcctttcaccttatcatttttcctcacattgagtgcagtaatgtggtttgcttatggactatttattaaggacctctgtgtagctctccctaacgtactaggcttcatctttgggatgctccagatgcttctctacgccatttacagacacagtgaaagggtaaca

SEQ ID NO: 42272 - DNA, 275 bp, Gossypium hirsutum
  Clone ID: LIB3189-033-P1-K1-D11
aactattaaatattcaacatcattagaccgggggctatgctctcccattctcatcctcagagggtgtcatcttaaaagatgggtgccacaccaaggtcactgctttattagatctaacaccttagcattcatgggtgcagctactctaaacattatggctcgagtcatactaacaaatagctttgattacattcctttcactttatcattttatctcacattcaatgcaataatattgcttgtttatggactatttattaatgttctttttgtat

SEQ ID NO: 42273 - DNA, 354 bp, Gossypium hirsutum
  Clone ID: LIB3189-033-P1-K1-D12
cccacgcgtccgtgaggttcggttaggcctgtataaaagaaaaaaggatttctctttcgtaggcttgtgttacgctgtggttgaagaaaggtctcataacatttgaagccaagcaaagttcagattaggatttagggttttttgttttcttttctttttgtgaaaggcaaaatggatctggatatgaacgtgaacgcccctcactcaatgggcacaacaatcatcggagtcacctacaatggtggtgtcgtcctcggcgccgactctcgtaccagcaccgggatgtatgttgctaatcgggcatttgacaaaattgcacagctcactgataacgtctacgtttgccgttctgga

SEQ ID NO: 42274 - DNA, 263 bp, Gossypium hirsutum
  unsure (1)..(263): unsure at all n locations; Clone ID: LIB3189-033-P1-K1-D5
gggtttcacgggtttagccctttgttctgattgcaacactttttctgagtatgtcaaggacaaaganttgatatctgactgcttgaaatgttgcacagaagactcagatgattctacaagtaagattacttattcaggtgcgatactggaagtttgcatgaggaaactagtattctatccggaaattgttggtttcattgaagaagagaaggacaagtttccaacagttaaagttcaatatcttttcaattctcctcccaagt

SEQ ID NO: 42275 - DNA, 335 bp, Gossypium hirsutum
  Clone ID: LIB3189-033-P1-K1-D6
gcaaaaataaatgacccattatttgtgaggtataaaaaaaggtatttcaataatgaaaaccataaatatcatggtcaatcatcaacaaacaaatttcagacattatggatatatcctctagagttcaaacttaatagtttggttcactataagaaatgtatagattataggctaatggcacttgctcgcctatttcacacataaagccagcgggcgccattttgctacctcggcataaaacgctcatgtgccttatataagtaatatgtcaattccaggtttatattagacagacactataatattgtcttaaaactggcctcccttcaaaagtt

SEQ ID NO: 42276 - DNA, 210 bp, Gossypium hirsutum
  Clone ID: LIB3189-033-P1-K1-E11
cctcaagcgagctcatcgtcgggcccaaccaaatgatgggtttgcaaggatactattggatctgtatcggaaactgcatggaaaggtttcaatggaatggcatcagcgaaaaccaatgatgaaagtatgtccaatttgcgggaagaatgcttgtttgagcagcagctcacttcaatctttatttgcagaaagcacacattaagctatctt

SEQ ID NO: 42277 - DNA, 490 bp, Gossypium hirsutum
  Clone ID: LIB3189-033-P1-K1-E12
aaaaaaaaaaaataaaaaaaaaaaaccaaacatattaaaaaaaaaaaaaaaaaaacaaaaaaaaaggggagatttaacatactaaaaaaaaccaaacttacatacacatacatacaaaaaaattacctcctcttttggcgccccctttaatataatccacttttccttcccctacaactcttttgtttatctttttctttattttcccccaatttaatttccttgcccccctttttccattttacccccttgaaaacccctctttttcccccctttaatctcccttccttacatccccttttttaaatttaaaaaaattcaaagattccccccccaaatccttttctccaaaatttttccatcctaatctgcaatttttactctcccctttaaccccctatttatcccccttctttcgctttttttctccccctatttttcccctttcccttttcccccccccttatacccttttatttttttttttttt

SEQ ID NO: 42278 - DNA, 299 bp, Gossypium hirsutum
  Clone ID: LIB3189-033-P1-K1-E2
caaatctctccatcttcttgtggtcaagcccatatcaaaagacttcccttttagcacacagggcgtgtgtcgagtactataatgtgtagggagaacgttcacatcaacattatggacattggccatgtcgactctggtaagactacaaccactgttcatctgaactacaagcttggtggtatcgacaagctgttgattgaagctttgagcacgaggcttcttttattaacaaaatgtcatttaactattcatgcgtgcttgacaagctttaggccgcgcgtgaacgttgccttaccatg

SEQ ID NO: 42279 - DNA, 362 bp, Gossypium hirsutum
  Clone ID: LIB3189-033-P1-K1-E4
gctcaagaagctaaggaagaaaatggaaatgccaccaaccaagtaataacagagttgggaactgtgaaatacaagcgctggatttgcatattgctctgtataatctttctcctctgcggccaatcagtagccgcattgctgggaagactttactttgacaaaggtggaaaaagcaaatggctatcaacactaattcaatttgcaggtttccctattctagtccctttctattgcatttctcggcccaaaatgctcactgccaatcattgtagcattggaagtaataaccaaccatcaattatgatgctgggtttgggctatgtaaccttcggcttgatgtcagcttggaatggctttcttta

SEQ ID NO: 42280 - DNA, 411 bp, Gossypium hirsutum
  unsure (1)..(411): unsure at all n locations; Clone ID: LIB3189-033-P1-K1-E6
gggaagccctatcaagacgtcaagcgctccgccgattcaatgtaccttccgtttgatgtagttggagattctagaggcgctgccaagattcgagtttcgagcgatgttagttactccgttgaggagttgttggggatgattttgaagtacgcgtcgaatttggcggagtttcattctaaagtgacggttaaagatgcggtgatttcggtgccgccgtattttggacaggcggagaggaaagggttgttgaaggcggcggaaatggccggaataaacgtcatttcgctgataaacgagcattctgnggcggcattacagtatgggatcgataaaaatttctcgaatgagtcgagacatgtgattttgtatgatatgggttcgagtaggacttatgcagctcttattttttat

SEQ ID NO: 42281 - DNA, 206 bp, Gossypium hirsutum
  Clone ID: LIB3189-033-P1-K1-E8
gaggaaaaccaacccatcaatccattaacatttttaggggtgatacaaactaaaactttacaacaattaccaaacaaaacaacccttattatttggggctacatataaaagggcatatatttatatattggttggcacttcccttaaaaaaataacacttatgattggaaggtgtttcccaatttaaaacgacccaaattttgaaa

SEQ ID NO: 42282 - DNA, 343 bp, Gossypium hirsutum
  unsure (1)..(343): unsure at all n locations; Clone ID: LIB3189-033-P1-K1-F1
ctaggttaccagctaattatgctgtttggttgggggaaataaagccagtttcctactttcaggaagggtatatggttagcatggtctactacactgatgagattgttcaactcttggttgaccaatacaagggatctggaaaacctttattgttcctcctacatgggcttaacactgatagcaataatttctcaaaacctgccgagtttaagggaatagaaaattttgagagagatttgacaactctgcatcccgtattgaccgagtgccgagtttgcaagtcagatttggagcttgctcttatccaaattgcanacaatataagttctgaagctcatgttga

SEQ ID NO: 42283 - DNA, 371 bp, Gossypium hirsutum
  Clone ID: LIB3189-033-P1-K1-F10
cgctcacctcatctccgtcccgatcgaagcacacgcctcctccctctttttctcctttttccgtaagctaaacaaacgcagctcgatcttcaaatccctacacctaataaatccatcggttttcgttttgtaaatccgacggaaagatggcggatcgcttgacgcgtatcgcgattgtcagctccgaccgctgcaagcccaagaagtgccgtcaggaatgcaagaagagctgtcctgttgttaaaactgggaaactttgcattgaggttacccctgcctcaaagattgctttcatctctgaggagttgtgcattggttgcggtatctgtgtcaagaaatgcccatttgaagcatattaaatcattcactta

SEQ ID NO: 42284 - DNA, 270 bp, Gossypium hirsutum
  Clone ID: LIB3189-033-P1-K1-F11
gtcagtcttcccaaacaccttctttccgaaaatttattaaaaaaaaaaaaaaaaaaaaaaaaaggaaaattaaaaaaaaaagaaaggcacttcaaaaaaaataaaactaacaaacccatgcttacaaaatatattacatttctttcgtcgctctattaattcaatttactcctcccctttctaataactttttacttattttaaccctttttttaccctacttaatcttccttgaatccacccccctctctccaatgttattctttgctt

SEQ ID NO: 42285 - DNA, 434 bp, Gossypium hirsutum
  Clone ID: LIB3189-033-P1-K1-F12
gcacactatctatctccttatgctgtgaaggttcagtctctaagtgttaaattgcctgattctggaattgaatcctatacaaaactggagaacacaaagattcatggttcagaaatcaaatatggtccttatgagaatattccttcattctcgtactcacccatagcagttcattttgaaagcaatttaccctttgctgttgctcatgaattggtgagagagatagaaatttcccattggggtaatgtgcaagtcactgagcattacaagctcatacatggtggtgcccagagcaagggtgaattttccaggcttgatttccaggccagacccaacgttcgtggtgcatcggcctttaagtatcttgttgcaaacttgccaccaaaggcacattctgtttattacagggatgaaattggcaatatattaacatc

SEQ ID NO: 42286 - DNA, 439 bp, Gossypium hirsutum
  unsure (1)..(439): unsure at all n locations; Clone ID: LIB3189-033-P1-K1-F2
actcacaagagaagcagccgctcctccttccatctcctaaacaaggttcagccataatggattcgcagattaagtttgctgtggtggtgaaaataatgggaaggaccggttcaagaggtcaagtgacgcaggtgagagtgaagttcttggacgatcagaaccggttcattatgaggaacgtgaagggaccggttcgtgagggagatatcctcacattgctggagtctgagagagaagctaggaggcttcgttgaagggttatttttatactttttggggtttatgcttgttttgaattgtctaccgtattgcttttgaattacgtttagtaggtattcgtatatcgagacttgcgatttgngagaatggttgttgcttaaaccctgggatttatgatgattatgttgaaatgaacttgaattggttttaggttttgttt

SEQ ID NO: 42287 - DNA, 70 bp, Gossypium hirsutum
  Clone ID: LIB3189-033-P1-K1-F3
ggcgaccacgcgtccgactacaagaaaatcatcctctccttctttcatctcttaaacaaggctcatccat

SEQ ID NO: 42288 - DNA, 235 bp, Gossypium hirsutum
  Clone ID: LIB3189-033-P1-K1-F4
cctccacatacaaaaaaaaccatctatttttattttcttatcaacgacaacaccaattgctggcgtgaggaaatgtcactgctgggagtgtcacacaggctatgctcctgaatatcactttaattgttgctgctgatatgtgaagttctttaacaatcttctacccatgaatcattatggacgtgaagtagatctttcaaaagatggagatatttcttacattgtcttaaatttt

SEQ ID NO: 42289 - DNA, 461 bp, Gossypium hirsutum
  unsure (1)..(461): unsure at all n locations; Clone ID: LIB3189-033-P1-K1-F5
tccgaagactaccgggtcttttcctttttcggttaagttcccagaagttaacaacaagggcaagactggagtcttccaattttctgtcaagcatgagcagcagcttgactgtggtggtggttacatgaaactactcagtggtgacattgaccagaagaattttggtggtgacaccccatacagcattatgtttgggcctgatatctgtggaagcacaaagaaagtacatgctattcttcattacaaggggacaaaccacttgatgaaaaaggaagttccatgtgagactgaccaacttactcatgtttacacatttattctgcatccggatgctacttacaaaattcttattgataatgttgggaaacgaactggtagcttgtacactgattgggatcttctcccaccgaagagaatcaaggatcccagtgcanagaagcctgaagattgtgatgacaagg

SEQ ID NO: 42290 - DNA, 459 bp, Gossypium hirsutum
  unsure (1)..(459): unsure at all n locations; Clone ID: LIB3189-033-P1-K1-F6
gagcggccgctcgcgatctagactcaacaacagccagcgggtcaaccggctaacgcagatgaggttcggactttgtggatcggagatttgcagtattatatggatgagaattatctcttgagctgttttgcccaaactggagaggttgcttctgtaaaagttatccgcaacaagcaaaccggtcaagtggagggctatgggtttattgagtttgtttcaagagctgctgctgagagagttttacaaacatacaatggtacacctatgccaaatggtgagagcaactataggctgaactgggcatcctttagttcaggtgataggcgagatgagacccctgagttcacaatctttgttggagacttggctgctgatgttacagattacatgcttcaagagaccttcnaggcacactttcctttcggtgaaggtgcaaggntgtgattgataggatcactg

SEQ ID NO: 42291 - DNA, 389 bp, Gossypium hirsutum
  Clone ID: LIB3189-033-P1-K1-F7
ggctaggatggctaaaaaagggataaataagaacacaaatatgacatatcctaatatatagtagtggaggattatgggacaaaaaataaatccacttggtttcagacttggtacaacccaaagtcatcattctctttggtttgcacaaccgaaaaagtattccgagggtctacaagaagataaaaaaataagagactgtatcaagaattatgtacaaaaaaatacgagactatcttctggtgtcgagggaattgcacgtatagagattcaaaaaagactggatctaattcaggtgataatctatatgggatttcctaaattattaattgaagataagccacgaaaactcgaagaactacagatgaatgtgcaaaaaagaacttaattgt

SEQ ID NO: 42292 - DNA, 367 bp, Gossypium hirsutum
  Clone ID: LIB3189-033-P1-K1-F8
ctttatggctgacatggatggttcttctgttgattctaaagaggaatccagtgaagattccaagcttgacttctcagaagatgaggaaaccctcattattagaatgttcaatttggttggagaaaggtggtctttgatagcagggagaatccctggaagaacagctgaggagattcagaagtattgggcttctagattctcttacaataatccaatgcccaatctgagttaggattacatccaagtgtttgggttttgcattgggtgattgtttcagttttggtttgcagcgtatatatatatataaaagcaaatgcctgtgttttgacaatgcctcatgggtgctaattgctttagtatgataatt

SEQ ID NO: 42293 - DNA, 412 bp, Gossypium hirsutum
  Clone ID: LIB3189-033-P1-K1-F9
aacaacaatggctacttcatcatcttcttcaaagctttcccttttcttcttgttttccttcttgtgtgcttccactttagctcgtaattccccttcaccaacaacaaaaatcctcgatgtcttagcttctttgaaacaagctcagcatattctttcctttgatcctcaaatttctaatggtttttccaaaagccaaccccttttcgtcaactcttcttcttcatcgggttctggtttttcgattccacttcattcacggggctctttgcgaaaaacccatcatgttgattataaaaacctggtccgatcccgactcgaccgtgattcagcccgagttaacacgctcaccaccgaggtactactcgctgtcaatggggttcgcaaaactgagctgaagccttgtgttaccgag

SEQ ID NO: 42294 - DNA, 433 bp, Gossypium hirsutum
  unsure (1)..(433): unsure at all n locations; Clone ID: LIB3189-033-P1-K1-G1
cacgccgtnctcggtaagttctcgacagcatcttcagctcttgtatttggcagtnncaggtgaacgaatgcaatcgttggttgtttcgaagagtgagtgagtagtaggaaacactgggcgcccatatctcttttacaatatgtattctctggcattcgctgtagggtattcttgcagcattccacttatggtagagccgtaagctcttgaaattctcaagtcatgattcatcactgcaggaactgttcatttgtatcaactgtagggtcctatgaactctttcgaaacttgtgtaggtattgtggctggcatgatgtatctaagctttactgagtcttgcttcttatatccttttcttttaatttattgtcttgcagatttatcatgctgatgacaggtttcgccccacccaaattgctgctgttttaaatgc

SEQ ID NO: 42295 - DNA, 229 bp, Gossypium hirsutum
  Clone ID: LIB3189-033-P1-K1-G10
cggacgcgtggtctgactcgtgtacccaagatggtaattattggtctacaaagaaacagagttgtaggtgttatttgaggatatgcggcttcactcacaagcgctgtcttctagccttcctagtgaatactctatagaggaacatgacattgacgcatttctttctgaggaaagggtgtaggatatccttcaacagtctaaagaaaagcatcggacagtgcaccgtaac

SEQ ID NO: 42296 - DNA, 372 bp, Gossypium hirsutum
  Clone ID: LIB3189-033-P1-K1-G11
gaaaaatggttctctgataaaaatttccgtttgtttcctgagcaaatctcgggaaggaatgggcgttttttccccctgttgttaactcgttgtgattgtgaagctttctttaaaagaatcctagttaactcgacgcgtttacccagaaagaggtgaagatgtcaactcctgcaaggaagagattgatgagggattttaagaggttgcagcaagatcctcctgcaggaattagtggtgcacctcaagataacaacattatgctttggaatgctgttatatttggacctgatgacaccccatgggatggaggtacgggtaagctgactctttagtttacgggggattatccaaacaaaccaccatctgttcgtt

SEQ ID NO: 42297 - DNA, 404 bp, Gossypium hirsutum
  Clone ID: LIB3189-033-P1-K1-G12
cccacgcgtccggttttctttgatgtttattggttcgttgcttgtaccttgagctcttcttgtagtgatgctttccctttggtctatagaattctggtgcttattttcattttgttaatagttggggttattgtttggatcattgtggctaattggcatcggatcgagttgactgtgaggattatcggggttgcttccgatgcgctttcgaggaatttagggttgtttttggtgataccgttgttgaccgttggattgttggcttattatgcgtcaattgttgtgttcttggtgttttctaggtttaatgggaaaattgtggctaaagaatcgaatggggagtatacttgtgtttggaaacaagatagctgggtgcctgcttattttacattggctatttgaca

SEQ ID NO: 42298 - DNA, 260 bp, Gossypium hirsutum
  Clone ID: LIB3189-033-P1-K1-G2
gtaagttccgaagcatttagctttgtatcgcagtcatgtgaacatgaatgttggtcagattgaagatgatgagatttttaaacatgggccccattctcttttacaattgtatttctggcatcgctggaattatcttgcacatttcattattgtgagacgcactcctttaaattctcaagtcatgactcaacactgtatgaactgtttcaattcatcaactataggtgaccatatatctttttcaaacatcttcaagtttt

SEQ ID NO: 42299 - DNA, 254 bp, Gossypium hirsutum
  Clone ID: LIB3189-033-P1-K1-G4
cggacgcgtgggttcgttttgttttttttctttgcatttaaactccaagctctcatcaatggctggtgcagctactatctcaccagccacgctgctgaaagatgagcttgacatcgtgattcccaccattaggaacttggatttcttggagatgtggagaccttttttccaaccttactatctcatcatagttcaagacggtgatccttcaaaggccatcaaagttcctgaaggctttgattacgagcttttca

SEQ ID NO: 42300 - DNA, 444 bp, Gossypium hirsutum
  Clone ID: LIB3189-033-P1-K1-G6
tttcggtttccatttacttctttatttctacgtttttgaatttttagtaagcgaaaatgagagagtgcatttcagttcacatcggtcaggctggtatccaagtcggaaatgcctgctgggagctttactgccttgaacatggaatccagcctgatggccagatgccaagtgacaagactgtcggaggaggtgatgatgcttttaacacctttttcagtgaaactggtgctggaaagcacgtccctcgtgctgtctttgtggatcttgagcctactgttattgatgaagtgaggactggtacttaccgtcagcttttccaccctgagcaactcatcagcggcaaggaagacgctgccaacaacttcgcccgtggccactacactattggcaaagagatcgttgacttgtgctttgaaccgtatcaggaagcttgcttataacctg

SEQ ID NO: 42301 - DNA, 387 bp, Gossypium hirsutum
  Clone ID: LIB3189-033-P1-K1-G7
cttcgctaaaatgtatgcctcaaagtttggagtcgatgagtccaaaatgatggaaagactttggggtgagaacttttttgatccagctaccaggaaatggaccaccaagaacactggcactgccacctgcaagcgtggttttgttcaattctgttatgagcccatcaagcagatcatcaacacttgtatgaatgaccagaaagataagctctggcccatgctacaaaagcttggtgtcaccatgaagtctgaagagaaggacttgatgggtaaggccctcatgaagcgtgttatgcagacctggcttcctgcaagcagtgctctccttgaaatgatgatctttcacctaccctctcctagcgtggctcaaaaatatcgtgttgagaa

SEQ ID NO: 42302 - DNA, 365 bp, Gossypium hirsutum
  Clone ID: LIB3189-033-P1-K1-G8
cccacgcgtccggtcaacagtctacgatatatggttggctgaggtctaaaaagggctcctcttaaaaggaaggtaggaagaaacacagaaagcaagcaaagaagcttttattttttttccaccttgccttgtcgattttgctctcttcaagccaaacccaccttcggaaaaaggacatcatatccaaaatcttgctaccctattaccacctactgccatcttttcttgctaccctattaccacctactgccatcttttttgatcttcatcgatttccctttttttccattaagaggaaataaagccaaaaagagaagattgaaagaaagaaaggtctgggttttactcttgtttgatgggagttt

SEQ ID NO: 42303 - DNA, 402 bp, Gossypium hirsutum
  Clone ID: LIB3189-033-P1-K1-G9
cggacgcgtgggcggacgcgtgggccccgttgaaaaaatatgggtttccaaagaaacatattgggtttccttttcttgatattggcttcactaacaagcctctcttctagccttcctagtgaatactccatagtggaacatgagattgacgcatttctttcggaggaaagggtgttggagatcttccaacagtggaaagaaaagcatcggaaagtgtaccggcacgccgaggaggctgagaaaaggtttgaaaatttcaaggggaatttgaagtatatcctagagaggaatgcaaagagaaaagcaaacaaatgggaacatcatgtgggattgaacaagtttgctgatatgagcaatgaggaagtcagaaaagcttacttgtcaaaagtgaaaaagcccatc

SEQ ID NO: 42304 - DNA, 377 bp, Gossypium hirsutum
  Clone ID: LIB3189-033-P1-K1-H11
ggcaatcagatttttgctgtacacgaacaatttccttaaatttctgtgttccagagctgagacttcttctagagatgagatcatttaaaaaattataattatgaattatccaccagagaaggttgtgaggttccaggactggaattcagagaaaacctgcgaagtacattatactaataataatgggataaattcagggaaatttacatttgcaataaattcattttcagaaaagtttcaaagaggggttgaatctggttctgagaggattaaagcgattagaaagtcatttaaatctagttcattcaaccatgttgttgctaaaggcttttgttctagtaagaaagttctttgatccacaggggccattccttcaa

SEQ ID NO: 42305 - DNA, 291 bp, Gossypium hirsutum
  Clone ID: LIB3189-033-P1-K1-H12
gattttgatgctttcatctgcaatagcggtagtgatctcttctattcaactattaaccctgaagatggtccctttgtaattgacttctattatcactcacacatcgagcaccgttggggtggggaagggttgagaaagactttggtccgttgggctggatcggttactgataagatggaagggaatgaggagcatattgtcactgtagctgaacacctttcgaccaattactgttacacatttgaagtgaaaaatgcagtgagggtttcccttgttaaagagctcctaaag

SEQ ID NO: 42306 - DNA, 377 bp, Gossypium hirsutum
  Clone ID: LIB3189-033-P1-K1-H3
cccacgcgtccgtagccagccctttccaccagtaaaagagaggctgaggctttgcaaaactcaggtgtgatgcctttgattagctcacttgttagggatccttttctacttcttcccctgctgctgctgctgctactctccaagcagaagacccatcaagttaagaaagaacacaattacaagcttcctcccagtcctaccaggctaccaattataggtaacctgcaccagctgggtgaattgccacacagttctttttcccaactttctcgcaaatatggttcagtcatgctccttcatcgaggtcgtataccgctgcctattgtttcatcagcctaggcagctaaacgtagttctaaaggtcaatggatcttgtt

SEQ ID NO: 42307 - DNA, 407 bp, Gossypium hirsutum
  Clone ID: LIB3189-033-P1-K1-H4
gaaagtctcaatggcaaccctcaaagttccagttcacgttccttctccttctgatgatgctgagcgacttcggaaagcttttgaaggctggggtacgaacgagcaattgattatcgacatattggctcacaggaatgcagcacagcgcaattcaattcggaaagtttatggcgaagcttatggggaagatcttgtcaagtgtttggagaaggaacttacaagtgatttcgagcgggctgagctgctttctacgttggaccctgcatagctgagatgctcatctggctaatgaagctacaaagaaggtcacatcaagcagttggatgtttatgggatagcttgcagaaggtcgtcgcatgaactactcaatgtgaaaaaggcgtatcatgctcgctataagaaattcc

SEQ ID NO: 42308 - DNA, 177 bp, Gossypium hirsutum
  Clone ID: LIB3189-033-P1-K1-H5
cccacgcgtccgttttgattttatcttgtgtggttacactatccctctcagttttggggctacgggccacttttcttgtagattgtagaatcacttggtctgattctcatattacgcaaatcgatggagtgagagccatccaacttgatttcgactcaagattaagctgatgaattt

SEQ ID NO: 42309 - DNA, 371 bp, Gossypium hirsutum
  Clone ID: LIB3189-033-P1-K1-H6
tggcaaccaaaacgatgatgttgcaaatattttcacttttcttctttttgttcagtatctgcaggtgcattttccttggtgctaatggagatgacaatggcggttggcaaactgcccatgccaccttctacggtggtgctgatgctaccggcacaatggggggagcttgtggttatggaaacctgtacagtcaagggtatggaacgagcacagcagctttgagcactgcacttttcaacaatggcttgagctgtggtgcctgctacgagctccggtgcaacaatgatcctcaatggtgcattagtcgaaccataaccgggacagccaccaacttttggtcacctaactaatgcttatctagtgacaatggc

SEQ ID NO: 42310 - DNA, 308 bp, Gossypium hirsutum
  Clone ID: LIB3189-034-P1-K1-A10
gtgaataaaaaaacaaactacaccaccttccaacaaacaaatatccaaaaagtgaaagttagggggtccactttccttcttctttttcattattttccctcctgattttcttttcccccaaacactactattcgacggatacggtttttctatccgaagatatttttttgtcgattgttctcgctatcagacgattcgttttctttcgaagaagaagattgataaaattagaaacaaataaggccttgaattttcttctttagagggttattttccccggaaaaatggcctcctttattttcccagct

SEQ ID NO: 42311 - DNA, 405 bp, Gossypium hirsutum
  Clone ID: LIB3189-034-P1-K1-A11
aagggaagtcggcaaaatggatccgtaacctcgggaaaaggattgtaccgaatttgatatcaaggaagcacacaaatagtgcagctacagttctctatgcattttttgggcttcggttactttacattgcttggagagcagatacaaaggggtctcagaaaaaggaaatggaagaagtagaagagaaacttgagactggccaagggaagacatattaccggcgctttcttaccagattttgtacacctatctttttggagtcatttattttaacatttctagccgaatggggggatcgaagccaaattgccacaattgctctagcaacacataaaaatgcagtgggggtagcggtgggagccataataggacacaccatctgtaccttactggccgtggtgggag

SEQ ID NO: 42312 - DNA, 436 bp, Gossypium hirsutum
  Clone ID: LIB3189-034-P1-K1-A12
cggggtacaacaagagggaacgagtcgcactgagtgactgcgtggagcaaatagatgagtcgatggaggagttgagcaagacattaggggagttgaagcacttgagaggggagacgttcgagtttcagatgagtaatgcgcggacatgggtgagtgcggcgctgacgaatgaggacacgtgtcttgatgggttcgaaggagttgacggcaaggttaaatctaatgtgaagaggaagatcacgaatgtggctaaagttaccagtaatgctctgtacatgatcaataggctcaatgaaagtcgtggtaggcaccgttgaatctttgatgatgatgatgatgaataatggatggttgtgatttatctagcttattatggttcttaaatatagtttttattttgattttggttgcaagctgtatatgtaaatgtttttat

SEQ ID NO: 42313 - DNA, 485 bp, Gossypium hirsutum
  unsure (1)..(485): unsure at all n locations; Clone ID: LIB3189-034-P1-K1-A4
cagaaataaagcattgggtcgaactcttctttggtgtcaaggtaatagctatgaatagtcatcgactccccggaaagggtagaagaatgggacctattatgggacatacaatgcattacaggcgtatgatcattacgcttcaaccgggttattctattccacctcttagaacgaaaagaacttaaatcaaaatacttaatagcatggcgatacatttatacaaaacttctaccccgggcacacgcaatggagccgtagacagtcaagtgaaatccaatccacgaaataatttgatctatggacagcatcgttgtggtaaaggtcgtaatgccagaggaatcattaccgctaggcatagagggggaggtcataagcgtctataccgtaaaattgattntcgacgaaatgaaaaagacatatatggtagaatcgtaaccatagaatacgaccctaaatcgaatgcatacatttgtctcatacactat

SEQ ID NO: 42314 - DNA, 319 bp, Gossypium hirsutum
  Clone ID: LIB3189-034-P1-K1-A5
aaagagagagagtagagagagagagagagcaaactaataacgagaagaagtagtaagaagataatggaggttgggttttttgtattagaatttctcctttttccttcatacttttcttttctagttctttatcctctactccaacctctttatatttttcctcttcttttaactaatttttcttcttccttttttttttttctttctctttttttttttcttttcttttttccctttccctcttctatgctttctttttcttgtcatcccttttttcttttccttcctattctcttattttttctttcttcgccttttt

SEQ ID NO: 42315 - DNA, 104 bp, Gossypium hirsutum
  Clone ID: LIB3189-034-P1-K1-A6
gactaataacgtaaaccttaccaatttcatcccatgtaaaacttctcctactctccttatcctgaatcccggcattcttcatctcgggccagagaaatttaatg

SEQ ID NO: 42316 - DNA, 450 bp, Gossypium hirsutum
  Clone ID: LIB3189-034-P1-K1-B11
cttcacttcatttcccactcaatctcaggtcaatctaaaatatggcagacgaagacattcagcctcttgttgttgataatggtactggaatggttaaggctgggtttgctggagatgatgctcctagggctgtcttccctagtattgttggacggcctagacacacaggtgtcatggtggggatgggacagaaagatgcctatgtgggggatgaggctcagtctaaaagaggtattctcacattgaaataccctattgaacatggtattgttagcaactgggatgacatggaaaagatctggcatcacactttctacaatgaacttcgtgttgctcctgaagaacaccctgtgcttcttactgaagcacctctcaatcctaaggccaacacggagaaaatgacgcaaataatgcttgaaacgtttaatggtcctgccatgtatgttgcaa

SEQ ID NO: 42317 - DNA, 243 bp, Gossypium hirsutum
  Clone ID: LIB3189-034-P1-K1-B4
caagaaggatccttggtaaaaaaaaaaaagaaaagaaaagagagaagaaaactgcttcttttgcagataaaaagacaggttcaaggggaaaaaaaaaattatggtcacactgtcttgctcctcttatctttttttttcgtctctattagtgaagaaaagggcgctttttctttttataaaaatctcttttttgcggggggtaaatttttgtctttggtgggagaaatggagtttgagtttcaa

SEQ ID NO: 42318 - DNA, 474 bp, Gossypium hirsutum
  Clone ID: LIB3189-034-P1-K1-B5
ctcattctaatctgtgcatcaatcagttggtgaggaatggaaaccctgcccagaaagagaaatacttaccaaagctcatcagtggagagcatgtaggagcccttgctatgagtgaacccaatgctggctctgatgttgttagcatgaagtgcaaagctgatcgggttgatgggggttatcttctaaatgggaacaagatgtggtgcactaatggtcccgttgctcaaacattggttgtttatgcaaagacagatgtcacagctggctcaaaaggaattacagcatttattgttgagaagggaatacctggatataccactgttaataaattgtacaatacttggcatgctaggatagtattcatgtgtgcttgttctttgagaattgtttttatatcattatgttatcttgatttttcttatattgcttatgtttgttctcttttgttatttttactatttcttttgtttatgt

SEQ ID NO: 42319 - DNA, 280 bp, Gossypium hirsutum
  Clone ID: LIB3189-034-P1-K1-C12
tctttttctccttcaattgtttgtttttgggttaaaaagctctgtttttttattacccttttcatcaaaaagcttcaatctttcgaccatgttgcttaaagcttcccctgctttttctttgttgaagaatccccaagttgaaactcgggttcctctgttttcaagaaacggttctgggtttgggtctggggctgttgttgtttgtgctaccaaaggagccaataataagccattaacaggtgtgatttttgagccttttgaggaagcttataaggtactt

SEQ ID NO: 42320 - DNA, 480 bp, Gossypium hirsutum
  Clone ID: LIB3189-034-P1-K1-D10
aaccctagcgccaagatttagtgttgaaaatctcgagcacaatggccaccggtgaactcgcctgtacttacgccgcgttgattctccatgacgatggaatctcaatcaccgccgagaagattgctacattggtgaaggcagcgaacttgagcgttgaatcttactggccaagccttttcgccaagctcctcgagaaagtcaacgtcgatgatctcatcaccagcgttggctccggtggtggtgctgcccctgttgccgttgctgctgcttctggtgcagctggcggtggtgctgctgcggctgccccggctgttgaggagaaaaaggaagaagagaaggaagagagtgatgatgacatgggattcagcttgtttgactagacacaattcttcccagttcggatatttcttttggtttggtgtttgaaattgcggaaacttaggactcgttttaaatattaattgaatttttgtattggga

SEQ ID NO: 42321 - DNA, 483 bp, Gossypium hirsutum
  Clone ID: LIB3189-034-P1-K1-D11
cccacgcgtccgcttaacccagtcaccatccaaatcctatattaaaaaacagccattttcctctcctaccacaatactgattttaaaacacctcatgcaaaggttagtgttagttcttacagtattgggttccttaatcatgttttagttcaatattttctctctttttgggtttgagtttctggtatgggtacttgggtattagtattacagtaccaaaacaagaggttcatcctcattctcatgaacatttcattcctcttggtggcatctgttttcctgatgatgtgttccagttcttcacaagttgttttagggagcaatggttctaaatttcgcaatagccagcaagattgtaaagccctggaggatttagatgattataaagccaagtgttcttatctcaagtctaataataacccatgtgtttatcaaggctatgttgattatctttaccatttttattgcaattttggaagattt

SEQ ID NO: 42322 - DNA, 468 bp, Gossypium hirsutum
  Clone ID: LIB3189-034-P1-K1-D12
ggcattatctagagaggagcacaaacttcgctgatctggtaattttaatcaggtgaaattctggaggtggtggaaatatcagaaccaagaagatttttgttggagggttgcctccgactttaactgaagatggatttcgccaatactttgaggcttatggtcatgtaactgatgtatatatgtatgaccagaatacccaaggcctcgggtttggttttatctccttcgacagtgaagaggcggtgatagggttttgcacaagagttttcatgatttgaatggcaaacaagttgaagtgaaaccggcccttcctaaagatgccaatcctggggggctagccggtctatgggtggtggtgccggtggttttggaggttaccagggatatggttcttttggtgggaattcaaagtcttatgatggtcgtatggactccaattacatgcgtgcccagggcactggagctggc

SEQ ID NO: 42323 - DNA, 483 bp, Gossypium hirsutum
  Clone ID: LIB3189-034-P1-K1-D5
cccacgcgtccggccatggcttcctcaccaaaactcttctctatgtctatcctcttcctttttgccctcttctccatgcaaatccatgctagagagtacttcagcaaattcccaagagttaacaccaatgagaaagagacaacaaccagagagcaagagcacgagaccttcgttccccagaccacccaaaagccagaagagcaagagccaaggttcatccctgaaacccaaaatggttatggcctttacggccacgagtcaggctcaggctcaggctcaggctcaagccggcccagtttcaccaccaaagaaacctatgaaccctatgtcacccctgttagattccaccctgatgaaccctataacagcatccccgaatcctccaacaataaagacacttactactacaacaagaatgcctacaagtccactaagcagcaaaacttgggcgaggccattttcaccgagaaaggatggagcacc

SEQ ID NO: 42324 - DNA, 492 bp, Gossypium hirsutum
  Clone ID: LIB3189-034-P1-K1-D6
atacgctagggttttaaaggtgaagttgcagcatacgagactcgagctttgtaaatttgtagccttttgaatatgggtttatcatcgggttccgttcataaaacagaggaagaatggcgggcgattctttccccagaacagtttcggatcctacgtcaaaaaggaaccgagttacgaggaactggagagtacgacaaagttttccaggaaggtgtttacaattgtgccggttgtggtacaccactttacaagtccacaaccaaatttaactccggctgcggttggcctgcattctacgagggtttccctggagccataaaccgaacccctgatcctgatgggagaagaaccgagattacttgtgcagcttgtgggggacacttgggtcatgtttttaaaggggaaggattttcggtgccgactgatgaacgccactgtgtcaacagcgtttcaatcaagtttgtcccagccgttgcaactccttcactatga

SEQ ID NO: 42325 - DNA, 432 bp, Gossypium hirsutum
  Clone ID: LIB3189-034-P1-K1-E10
actcgctcgaggaacaagacaagcaagtccagatcgatcgaagttcttatttaacgaagtacatggttgagttaggcattcaaatcccaacaacttttgatccttttgcggaggccgaggaattcggaagaacaggaaccaaagactatgttcatatccgaatccaacagagaaatggcaggaaaagcttgacaactgttgaaggtctgaaacaagaactgagttccgataagatccttaagtctcttaaaaaggagttctgctgtaacgggaatgttgtgcacgacaaagagctgggcaaaatcattcaattacaaggtgatcagcggaagaaagtagcacacttccttgttaatgctggaatagtgaagaaagagcaaatcaagattcatggtttttgagtggttttaaggatggaatggcttttgattt

SEQ ID NO: 42326 - DNA, 333 bp, Gossypium hirsutum
  Clone ID: LIB3189-034-P1-K1-E12
aatggaggtgcttcttgggctgatgaatttgctcatgatgaggcaagtagagatcttgtggaagctaaagaagctcatagattaatatgtcctgataatcagtcataaattccttttagcagttagacagtttcctcctttttttcttctgccttgcctacgtagactaaaatggaactaacatcactgaccttaagtagtaatctcattcaccaacctaggtggttgaaactagttttgatgatttgagaatgtcccagatgataatgatggtttggttagtgctattatctatatatctactataatttagcaaataaagtgtgaatgact

SEQ ID NO: 42327 - DNA, 445 bp, Gossypium hirsutum
  unsure (1)..(445): unsure at all n locations; Clone ID: LIB3189-034-P1-K1-E4
ngnncaantnnnttttcactacattactatttatattccaatttcttctcaagtactttattaactaaaggacgggggtgtgagtttggcaattcaagatcctcaaccaaccttttgatctctttttgcggaaggccgagggaattctgtgaagaacacggaacccaaaagactattgttcatatctcgaatccaaccagagaaatggcgaggaaaaggcttgacaacctgttgaaaggtctgaaactaagaactgaagttccgataatgatccttaagtcttcttaaaaaggagtntctgctgtaacgggaatgttgtgcacgacaaagagctgggcaaaatcattcaattacaaggtgatcagcggaagaaagtagcacaccttcttgttaatgctggaatagtgaagaaagagcaaatcaagattcatggtgtttgagtggt

SEQ ID NO: 42328 - DNA, 148 bp, Gossypium hirsutum
  Clone ID: LIB3189-034-P1-K1-E6
tctcatttcacacgggttgtggcgtattttaagcagagagggtgcgcaggataaagctattcaccattgggtcaacatgaaggtttgtaataaaaatttgtttctatcagcattgcttcgcattgctgttgtaagagttttgggtcaa

SEQ ID NO: 42329 - DNA, 272 bp, Gossypium hirsutum
  Clone ID: LIB3189-034-P1-K1-F10
catgatttttttatcgaagtcaatagtgatttttttttttttgagtcattttggaaaaaacagaggcctacactgtgtccatctactcaagaatttgatgctatataatttcagggcctctccctctttcttcagtcagtgtctctaaacaaagcgttcttcatatggttttcctgtttgtttccatggaaaacctggaccattaccttgtattcatcttatttattctttctactattaagcttttgatttattaaaccttaatttttttt

SEQ ID NO: 42330 - DNA, 339 bp, Gossypium hirsutum
  Clone ID: LIB3189-034-P1-K1-F11
aaagatgctcccaatgtagctgagaaagtttgtggggcaatctattaccttgttcaaggctatgacgatgcagggcctagtgcctctcttttgtcaccatatctcactgacatatttagttttctgattttaactgctgatcgtactgatggtgttgtctttatgtttatgtcttttgtcttattttactttattctatttcttacttttttattttttatttttattttttttttttcttttttttttattttctttgtctttttgttatttttttagttatttttatttcttgctctggtgttttttattttttcttttttttttttttctattttt

SEQ ID NO: 42331 - DNA, 488 bp, Gossypium hirsutum
  unsure (1)..(488): unsure at all n locations; Clone ID: LIB3189-034-P1-K1-F12
ctccgccttcttcaaggaattttaactctcaattcgatagctcatcaaagaattggaattggttcctagttgaaggtggtgaaatcggatatgcagagccagcttatctgtagtgggtgtaggagcattcttctttatcctagaggtgctaccagtgtttgctgttcattatgcaatacaattactccccctgggatggaaatggctcaactcatatgtggaggttgtcgaacattgctaatgtatacacgtggagcagcaagtataagatgctcttgctgtcacaccattaatgttgcaccagcatccaaccagatttctcacatcacttgcgggcactgccgtacaactntaatgtatccatatggagctccatcagtcaaatgtgctgtctgtcaatatgttactaatgttggtatgggcaatgtaagggttccccttcccgtaaacagacctaatgggaaagctgccacagggtctatggctac

SEQ ID NO: 42332 - DNA, 101 bp, Gossypium hirsutum
  Clone ID: LIB3189-034-P1-K1-F3
ttttttttttttttttttttttcctggggggaaatttggttttttgtcatggatgcttttttttggctcaatgaatggtgatttggtatatttatggtttc

SEQ ID NO: 42333 - DNA, 420 bp, Gossypium hirsutum
  Clone ID: LIB3189-034-P1-K1-F4
gaatgagcctagcttatactatactgatccctctggcacattttggcaatgcaatgcaaaggctataggctcaggttcctgaaggtgcagacagctatttgcaagagcaatacaacacggacctgacttttttagaacattaaactatggataggtgcattacaaagcacgtaatgcaagagaatgtgactacaaacacaagctatattgacaaagtagtaacaacataccatatatacacccataaataggtgaaagatatgcttactcttctaaaaaaacgcgctagcatcatacgaacttaccattcaacaaccacgtgcactgtgataaagatacataacttgtgggggagaaagcagtatctcgtaattgggcaccaacccgtggaacttcattattgatgaggcactttactta

SEQ ID NO: 42334 - DNA, 278 bp, Gossypium hirsutum
  Clone ID: LIB3189-034-P1-K1-F6
gcgttgcagaccaatgtgcaaggcggtcaagttttagcaactacgggagctgttttacgaagtgtgaatgaattagtgagttcgggagagacaggtgcgacatactttcaaccttccatggctggttttcttcatcatacatgctttggactacaacattacggttcggctgctgttgctgtgtttgcaaatcataacttgcgcttggggtttgattcctttattaatcttgtagactgtattgattttgtgattttttattatttttttctttttta

SEQ ID NO: 42335 - DNA, 477 bp, Gossypium hirsutum
  Clone ID: LIB3189-034-P1-K1-F9
ctcacttcctcctctctttggctatggctgccgatgttagctctttacatagagttttaagcggatacaaagatgatctaatggttgggaatgaatccggtggtgcaaaaccaacggctttgatcactagggacttgcttggaggcggaggcggtggcgcaggtggtgcctccccgttcatcaatatgaaaactgatcaatcagaagaacttaacctcgaccttcaagtccctaatggatgggaaaagcgcctagacttgaaattgggtaaggtgtacttgcaaagatgcaatttcttaagttcttcacaatcatcagatggaagcaagcaccaaatcaattaaacagtgccaaagctttaagatttgaattttccagcctcttcttttaacctttgctaaaccttttcgactacactcacctagaattggaatagtcttatcatccacttctatctattatcaaagtggttgcacc

SEQ ID NO: 42336 - DNA, 415 bp, Gossypium hirsutum
  unsure (1)..(415): unsure at all n locations; Clone ID: LIB3189-034-P1-K1-G1
cttgtctatttcaaatcatccgtttggccaagtacacaagatggtactttacaaactgtgacactaaatgtcgaggaaacaaatgatggttttgcttatgacgttttgttagactacacagcggctaactcggccatcgggaccggaaatctcatcttgataaggccgaaatataacagcacattgtcgattcttcgactcgggatcgatggaaacctgagggtttttacctactatgacaaggttgattcacaagcatgggaagagactttcactctcttctctagggactcaatatggggcaatgaatgcgaactgccggagaggtgtgggaactntggactctgtgaggagaaccaatgcgttgcttgcccgtcaccaaacggattaactcggttggagccagaattgtcag

SEQ ID NO: 42337 - DNA, 432 bp, Gossypium hirsutum
  unsure (1)..(432): unsure at all n locations; Clone ID: LIB3189-034-P1-K1-G10
gcgctcaacgctctccttctgtttctggtcaagccaatctcaaaagactccccnttagcgggagctcctctcttgagtactataatgggtaaggagaaggttcacatcaacattgtggtcattggccatgtcgactctgggaagtctacaaccactggtcatttgatctacaagcttggtggtattgacaagcgtgtgattgagaggtttgagaaggaggctgctgagatgaacaaaaggtcatttaagtatgcatgggtgcttgacaagcttaaggccgagcgtgaacgtggtattaccatcgatattgccctctggaagttagagactaccaaatactactgtactgtcattgatgcccctggacatcgagacttcatcaagaacatgatttctggtacctcacatgctgactgcgctgtttctattatc

SEQ ID NO: 42338 - DNA, 395 bp, Gossypium hirsutum
  Clone ID: LIB3189-034-P1-K1-G11
ggcggttgggatatgctcaaaatctttctttttttccctttcttttatggtttatgttattcagtgtggtatatcgttatgctttgttatgatgtttggggtttggctgcaaatttgattccttgttgtgattcttttagggactttatgtgtttgtgtctaccaaatgatcttgttttctttaaacttcgtatgtgttatttttttgttcttttctgtgttgcttttatttgatatagaaaaagacctaactttttttttcccaaaaaagaaccttgggtttcacttcaatctaatcttctcttttcaacggccaattatggaacaattgttcatctcttacatccctgtggttttgattgaatttttaattgctctcattcaatttgtgttga

SEQ ID NO: 42339 - DNA, 441 bp, Gossypium hirsutum
  Clone ID: LIB3189-034-P1-K1-G12
aaaagaattggccaaaacttccattggggatcaggcttctcattgctgctcattctaggggtgtagatgcttttagccgcaacgatggcagcgcagtaaatcgacgtctcatgaatcttttcgaccctaaagcctctccatcaagaaaacctgataatggcgtagtgtcttctgacatcgtggttgacaccacccgcaaactttggttccgcctatacagcaacactaccaccgctggcaaaatgttcgttcccattgtagtctacttccatggtggaggctttgcgtatatggcggccaattcaatgagctacgatgacttatgcaagctacttgcgcgtgaaattcctgctgtagttgtttccgtcaactaccgtctgtcgcctgagcaccgatattcgtcatcagtcgaatatggttttactgtttaaagtacattga

SEQ ID NO: 42340 - DNA, 258 bp, Gossypium hirsutum
  Clone ID: LIB3189-034-P1-K1-G2
gaagatcgctaaggtgtttggtgagcagacgactgaaatggagccgttggtttctgagagttgatctgctttgaatcctgtttatgtgggctatgacttgtgaatataataatctggacctgttttatgtttttacttgtgactgtctcttgtgatggatggaacaatgggttttagttttcatgtttgtttttgttgtattttatttttattgaaataaatttgtttttgatgggaaaaaaaaaaaaaaaatatttt

SEQ ID NO: 42341 - DNA, 366 bp, Gossypium hirsutum
  unsure (1)..(366): unsure at all n locations; Clone ID: LIB3189-034-P1-K1-G3
cccacgcgtccgttttcctccgcggctacatttccactctcgttcccgagatatcaaagtaaaatgaaggtggtcgccgcctacttgcttgccgtgctcggaggaaacgcttctccttccgccgatgacttgaaggttattctcggatcagttggagctgaggctgatgatgataggatagagttgctattgtctgaagttaaaggcaaagatatcaccgagctaattgcaagtggaagggagaagttggcttctgttccttctggtggtggtgctggtgcggttgccgctcctacagctggtgggtgcggcgnnactctcttatttcctaaaccatttacttccctcgatttctaaaggcagttg

SEQ ID NO: 42342 - DNA, 443 bp, Gossypium hirsutum
  Clone ID: LIB3189-034-P1-K1-G4
aaaaagtgtctcatttttagcaaagttacagtcgtcctcatcgaacaactatggcagccatcagagtccacggaagccctatgtccactgctacacagagggttcttgcatgccttcacgagaaaggtactgattttcagtttgttcccataaacatggctgccggtgaacataaatccgaaaactacctttccctcaatccattcggtcaagttccagcttttgaagacggggacttaaagctcttcgagtcaagagcaatcacccattacattgctcatgaatacagcgacaaagggacccaactcttaatccctggctctaacaaggatatggctgtcttagaattatggaaggaagtggaagcccaccagttcgattctccatcttcaaaaatagcctgggaggcgttttacaagccatttttcggcatggttaccgac

SEQ ID NO: 42343 - DNA, 249 bp, Gossypium hirsutum
  Clone ID: LIB3189-034-P1-K1-G7
ataagcgggagctctcgggcgaaattgaaataccactactaaaaacggtactttacttaggccgtgaatcggaggcggggcacggccccactttttggacccaaggccggcttcggccggccgatccgggcggaagacataggcaggtggggagtttggctcgggcgacacatctgaaaaaagataacgcaagactcctaagatgagctcaacgagaacagaaatctcgtgtggaacaaaagggtaaaa

SEQ ID NO: 42344 - DNA, 322 bp, Gossypium hirsutum
  Clone ID: LIB3189-034-P1-K1-G8
cccacgcgtccgtgtttttttagtctggttactcttctccgacacaatccgcaatcatcgaggatcttggactaacagtctcagagtctttaatgattgctgcaattcctaatataattggatggcttgctatatcttttgcaagagattcatcttttctttacatgggaaggttgttggaaggttttggtgtcggaataatctcttatacggtgcctgtatatatagctgagatagcacctcagaatttgaggggcagcttgcgttcagtgaatcagctatctgtcactctcggaataatgctggcctatctacttggact

SEQ ID NO: 42345 - DNA, 205 bp, Gossypium hirsutum
  Clone ID: LIB3189-034-P1-K1-G9
caaaaatgatctcagaaattaaaagaaaaaatatcaattttattttattactaaagcgtgaagagtgcaagcttgcaatcgaattcctcatttgaaattctgtattagaactgtaatagagaggataaaaaaagatcattgttgaggatggcttgtaaaggatgcctagaatgcttgttgaagctgtcgaactttcttgatgact

SEQ ID NO: 42346 - DNA, 126 bp, Gossypium hirsutum
  Clone ID: LIB3189-034-P1-K1-H1
tgctttataattgaagctaattgcatgtttcaggggaggcgattctttatttagagacaatggacatccttgtatgagttgctattaatgtgaaggccaagatgatcgaggttgaaggtcccagag

SEQ ID NO: 42347 - DNA, 196 bp, Gossypium hirsutum
  Clone ID: LIB3189-034-P1-K1-H10
tcggttcaacagtatggacagaccatcatcgatttacttgtatctcaagcagaacccatgggggtgtggttccgaattggattgtgtgctcttgatggcagacatggggttagcatgggcattgagaatgtggctgatgagagcaaccgcaaattgtctggaattctttatagtgctatgtgccctgcttgcgaga

SEQ ID NO: 42348 - DNA, 377 bp, Gossypium hirsutum
  Clone ID: LIB3189-034-P1-K1-H11
cccacgcgtccgaaaaaagtgaaaagggtaatggtgttgctcctgctacaaggtctccaatggctttaatggggtcatctagaaatgaaaaccaagaagtgaataccagcatgagaactgccgagaccatgctgcggttggtgcctatggctttaggggttgctgcacttgttgtcatgctcaaaaactcacagtccaatgactttggctccgtttcatactcagatcttggtgctttcaggtacttggtgcatgctaatggtatttgtgcaggctattcccttctttcagctattatagcagctgtgcctagttcttctactatgcctagagcttggactttctttctactcgatcagattctaacatacgtaatc

SEQ ID NO: 42349 - DNA, 473 bp, Gossypium hirsutum
  Clone ID: LIB3189-034-P1-K1-H2
gacccacgcgtccgttcttttgagcctttgagagagaaccctctctttggtccctcttcctccacattgaagaagttgggagctcttgaatggaccgaagttgtggttaaacatcaaggatggaggcttattacttgcatttggctgcatgccggtgttattcatcttctagccaacatgctgagcctggccttcattggtatacgccttgaacaacagtttgggtttgtgcgggttggaattatttatctcttgtcaggatttggcgcaagtgtggtttcttctctatttatccgaaacaacatctctgttggtgcctctggtgctctttttgggcttcttggtgcaatgctttctgaacttattaccaactggaccatatacacaaacaaggcagcagctttttttactcttctggtcatcattgccattaaccttgcaataggaattttgccccatgttgataactttgc

SEQ ID NO: 42350 - DNA, 426 bp, Gossypium hirsutum
  Clone ID: LIB3189-034-P1-K1-H3
acgcccgtttataagttagaagagatctgcgagctcttgagatcgtcgcatgttagtattgtcaaagaagtttctgagtttatcttgaaacgactcgatcacaaaagcccaatcgtcaagcagaaggctttgaggctgataaagtatgcagttggaaagtctggtttggagtttaggagagagatgcagaggaactcagtggctattcgtcagttaattcattacaagggacagctggatcccttgaaaggggatgcacttaataaggccgtgcgggaaacagctcgtgaggctatttctgcaatatttgcagaggacaataataccagtaagccttctccagcagacgactttaacaaaagaatagaaggatttggcaacacaaacttcgaaatgccatcaaatgagaagaaatcatttctaagt

SEQ ID NO: 42351 - DNA, 493 bp, Gossypium hirsutum
  Clone ID: LIB3189-034-P1-K1-H4
ggaaatttggctaggacgtttagagctacggaaacaaggatgattgcccctttggtcaaacttcttgacgaaagggaagccgaagtttccaaggaggctgcaattgcacttgccaagtttgcttgcacggacaactatctacaccttgatcactccaaggcaatcattaatgcaggaggtgcaaagcatttgattcagcttgtgtatttcggggaacatattgttcaacttccagcattacttctcctatgctacatttcccaccatgtacctgacagcgaggaacttgctgaagccaaggttcttaccgtcctcgaatgggcatccaggcaatccaacatgacccagaatgcaactggcaaactcttacaagaggccaaaagtagattggagctgtatcagtctagagggtcaaccggatttcattgatccaatcactttccctttgtaatttctctctttatacagtaccccatcattgagttcataattc

SEQ ID NO: 42352 - DNA, 354 bp, Gossypium hirsutum
  Clone ID: LIB3189-034-P1-K1-H5
cggacgcgtggggcgcgagcttcgaaagggaatcgggttaaaattcctgaaccgggacgcggcggctgacggcaacgttagggagtccggagacgtcggcgggggcctcgggaagagttatcttttctgtttaacggcctgcccaccctggaaacggctcagccggaggtagggtccagcggtcggaagagcaccgtacgttgcgtggtgttcggtgcgcccccgtcggtccttgaaaatccggaggaccgagtgccgtccgtgcccggtcgtactcataaccttattatgtttttaaggtttactgtctttggtcaatggaactttttatacaatgtgaattcgactgtttta

SEQ ID NO: 42353 - DNA, 237 bp, Gossypium hirsutum
  unsure (1)..(237): unsure at all n locations; Clone ID: LIB3189-034-P1-K1-H6
caganncaaaaagaacaaaaggnagaagaagcaanggccacncnnacagngcccacgacagnnccggcaggggcngaaganngngaacaacnaacaaaagccnccncaggacggggaacnaacgagggccnaancaaagagagaaggggccacagaaacgcggagcaacgaaacgagaagcgaaaaacccacgcagaaaccgaaggagaggaacncaccaaggcaccagacaaggaa

SEQ ID NO: 42354 - DNA, 451 bp, Gossypium hirsutum
  Clone ID: LIB3189-034-P1-K1-H7
ctctacttagtccctccatcgaagccgccccgagaaaggaagcagagggcaagtaaaatgaagaccattctttcttcagagacaatggacatccctgatggggttgctattaaggtgaaggccaagatgatcgaggttgaaggtcccaggggtaagctcatccgtaacttcaagcacctcaacctcgattttcacctcatcaaggacgaggagagcggcaagcgcaagctcaggatcgaggcttggtttggctccagaaagactagcgccgccatccgtactgctctcagccacgttgagaatctcatcaccggcgtcaccaagggttaccgttacaagatgaggtttgtttatgctcattttccgaacaacgcctgcatcactaaacggaacaagtccatcgagatccggaatttccttggcgagatgaaggtgcgaaaggtggatatgt

SEQ ID NO: 42355 - DNA, 455 bp, Gossypium hirsutum
  Clone ID: LIB3189-034-P1-K1-H8
cccacgcgtccggcggaagggaggaagtgacattggcaatatggctttgctgcattcttacttcttaagcgctggtgagtgtgtttcagggtccatggtcttggcagtggcaatgtccattgcttcctattttctgatccctatggtgtttggtggtcgacataaaaactggaagaatgcaccaccaggccctgttggttggcctatccttggcagccttccacacctctccaatcgtctccatgaagatttctttcacatggccaagatctacggtccccttttcagtctaaacttgggaataaagccggccatagtggtgtcatcaccggaaatggcagcccaagttttgaaggaaaaggaagggatgttcttcagtcggaccataaccgagaccattcgagtcatctcttatgatgcccattccatcattttctcgccctatggtcccaggt

SEQ ID NO: 42356 - DNA, 479 bp, Gossypium hirsutum
  Clone ID: LIB3189-034-P1-K1-H9
ctactccaagcaagtattttccttacacgtttgtttttcttgtgattaatcgatatggctagctcaatgtcccttaaacttgcatgtgtggtggtgttgtgcatggtagtgggtgcacccctggctcaaggggccgtaacctgtggtcaagtcacaaactccctcgcaccctgcattaattacttgagaggcagtggtgctggtgccgttcccccaggttgctgcagcggcatcaaatctctcaactccgccgcccaaacaacaccagaccggcaagcagcttgcagatgcatcaaaagtgcggccgccggcattactggcatcaactttggccttgcaagcggactcccaggcaagtgcggggtcaacatcccttacaagatcagccctagcactgactgcaacagcgttaagtgaaagtttggcatggaaagttcaccagctagtgggagccaaaataacgatagctacagaataaa

SEQ ID NO: 42357 - DNA, 328 bp, Gossypium hirsutum
  Clone ID: LIB3189-035-P1-K1-A1
attcctcgagttcttctttcatttctgattccgttctcaaaaaacccttgttttccccattctttatatcctatggctccaaaggttggtgggaagaatcccgccgtgaaaaaaccggcggtaaatgctccggcggagaagtggccataggcggagaagaagatctcaaatgaaggcggcgcttttaataagaagatggctaagatgagcgtttagacttacaagatttacatcttcaaggtattgaaacaggttcatcctgatttcgggatctctagctaagcgatggggataatgaacaattttatcatcgagatctttgagaaaa

SEQ ID NO: 42358 - DNA, 320 bp, Gossypium hirsutum
  Clone ID: LIB3189-035-P1-K1-A10
gattctcaaacaaaggtcatcttctacgttcaaaagaaagcttctttcaaggatttgcgtgctcttgttggattgctgtatatcacttcattggctgctgcttataatctacttcaactattcttgtcttcattctcagctacttacaaaagaacctcgttttaatcttacgcatatctggcttggcttttttatattttggatcacgccagaatgttcgcagccgtttttgtaaacctatctgctttggagcattcattttttggcttttaccgtagaaaagaatcttccaatggctcaaggggttcaataaattttct

SEQ ID NO: 42359 - DNA, 405 bp, Gossypium hirsutum
  Clone ID: LIB3189-035-P1-K1-A11
atggaagctgcaaaaagatatatatcttctttgagtacctcagcaagcacagctcaactggcaaatcatggtttggttgttataccgtttctcagtgcatttgtcagcttgaaggtgcttaatctatctggaaatgcaatagcaaggattactgctggtgctcttcctcgaggacttcacatgttgaatctgtcaaagaataatatatccaccattgagggtttacctgagcttactcgacttcgtgtgctgaatttgagcctcaatcggatatttaaaattggtcatgggttggcttcttgttcctttcttaaagagttatacttggcttgaaacaagataagtgagggtgagggtcttcatcctctttttaaattgactgttttggatctgcgtttcaacaaa

SEQ ID NO: 42360 - DNA, 305 bp, Gossypium hirsutum
  Clone ID: LIB3189-035-P1-K1-A12
ctaacttttagattccctttccattgcactgctctttctttctatagaattagtcactcctgttctagatgaaggttctctccccaattcttgcttgcctagcgcttgctgtggtggtaagccatgctgctctctcacctgagcaatattggagctataagctgccaaatactccaatgccaaatgctgtcaaagaaattctacatccaaaacctatggaggagaaaagcacctctgttaatgttggaggggggggtggtaacctctatacaagaaaagggtagcccgggggttacacccatgtt

SEQ ID NO: 42361 - DNA, 207 bp, Gossypium hirsutum
  Clone ID: LIB3189-035-P1-K1-A4
gcttttgctgggattctcttgttgggtttactttcaatggtctcagccgttcatggatatggtggtggatgtactaatgcttatgctactttctatgtgtgggagtgacgctttatgcacaataggttgtgctcatggttattgtaacccttatagccagggatatgggacaaacaccgcattttttatcacagctttgttcaacaa

SEQ ID NO: 42362 - DNA, 371 bp, Gossypium hirsutum
  Clone ID: LIB3189-035-P1-K1-A5
tatgaatctactgcgtcttcaaatggcccttcgatcgttagccaccaggaataccctaaccttggctgttaactccaccaggctggctcagtctcaagccttgcagacctttttgctccccaatctttcgtacgactatggcgcactcgagcaccgcatcagtggagagatcatgcagatccattatcagaagcattactaaactttcatcacttactataacaagtgtttggagcagctccatgcccctattcattaaggagattctttcaccgttcgtaattttgcaatgcggcattcaagttcaactggggtttggtaataatcaaaccacttcaatatttttgggaaaaatcttgggcccctatttt

SEQ ID NO: 42363 - DNA, 372 bp, Gossypium hirsutum
  Clone ID: LIB3189-035-P1-K1-A7
aaaaaacccccaaaattattttcagattggagagagagagggctcaaacctgctctctccctcctcggtttattctaaattcgaaagcaaaagaataaataaaccctaagtttttcttccttctttttccattatatccctttctttttcttccatttcgtttaaaatttcatttttttcataaaaaggaacaaattctgtgcagtgttgacaatcgtatgccccttccccaacaaagttcgatcttttgatgcgacgatcgcatgctcgaaatcgggttgaatccaaatccaaatcgactaccaacccacaaaagatggacccaattaagctccaaatccgatccaattcccgatctaccgctctcttttc

SEQ ID NO: 42364 - DNA, 290 bp, Gossypium hirsutum
  Clone ID: LIB3189-035-P1-K1-A8
gttgcctcatgacttttgatttacttttgttctttccttttccatttcatattctatagggctgtcctgaaactcgatctctgttactaaaacttcagttaaaactctttgatgatgacacatagtcgattggagatgttgtttacagcctccttcttcgtctgattcagttacaaactgttcatttatagatgtttttttgtcagcccctgtttaaagttgtcgtttgtatgcctggtgttagcatctgtatgcctgtccattttcatagccctgatgccagggtatgt

SEQ ID NO: 42365 - DNA, 272 bp, Gossypium hirsutum
  Clone ID: LIB3189-035-P1-K1-B1
gaaagaggttatacaggagcttatcctaagggggctccgtaagtgagtcacagagaaacaccctaccatgggacgctatgttcacaatgctggcatatttctctggaagatattaacatctctgtcaccatgagacaacatgtctccatagcacgcttgatccccacattggtggaaagaatctagacctctcatacccttatcacgatcaatcgcacatagtcatcttttacaccgattctgagcaagcacttccggctagctaccacagt

SEQ ID NO: 42366 - DNA, 282 bp, Gossypium hirsutum
  Clone ID: LIB3189-035-P1-K1-B10
cccacgcgtccgggctgggcgaatttgcggtttgttagttcgtgtgtgaaagaggtaataaaaggaaaaaaacgatgggtgttttcacatttgagtgcatgagcaaaggcggtgagtggtctgccaagcatttggagggagagattgaaaggcttgttgctttcatttactagctccagcgggaactcgtccaatgtttcaccggctgcgactcctttggtggtgtcacctactttttttgtggcgatacccctaattctggcggttttcaggaggttattt

SEQ ID NO: 42367 - DNA, 370 bp, Gossypium hirsutum
  Clone ID: LIB3189-035-P1-K1-B2
caaagggatttacaggtacttatcggtggatggcacctgaaatgattaaagagaaacatcatacaaagaaagtagatgtttacagttttggcatagtcctttgggagcttttaacagctttgacaccatttgacaacatgactccagaacaggctgcatttgcagtctgccaaaaggatgcaagaccactggtaccctcctcctgtccgcttgcgtttagtcatcttatcaaccgatgctgtgtcaagcaatcccgagaagcgaccacagtttgaggagatagtttcgattttggaaagttatgcggaattcctcgaagaggatctggaattttttaagacttataaaccttttttaagttgttctattt

SEQ ID NO: 42368 - DNA, 68 bp, Gossypium hirsutum
  Clone ID: LIB3189-035-P1-K1-B6
gttccagactaatcctggtcccatatctctaggatgccacatttattgcttttcttctatattgcccc

SEQ ID NO: 42369 - DNA, 360 bp, Gossypium hirsutum
  Clone ID: LIB3189-035-P1-K1-B8
aatttatcttctttattctggttgctcagccattcatgtttatttctctaactcattcctctgtagctaatggtaaggttaatatattgcctcctaccaatacaagtgataaggtcactttggccctgtactatgaaactttatgcccatattgtgccgactttatcacaaatgaccttgtaaaggtattcctcagcgatcttgtttaccattgtcaatctaaagatatgcccttggggcaatgctgacatttctggcgatgaaccccattgccagcgtggagaagatgaatgctacttaaataccatacatagctgtgttatctaccactggtctgatgtgaaaaagcactttgatttc

SEQ ID NO: 42370 - DNA, 422 bp, Gossypium hirsutum
  Clone ID: LIB3189-035-P1-K1-C1
ggagatcttataatggcagcacagttggtgacacctgaagctatggcatttatcgtgaagcatggaaccgggatagtttgtgtgagcatgaaagaggaggatctagagaggttgaatcttcctttaatggtgaaccaaagggaaaatgaagagaaactctgtactgcattcacggttacagtggatgcaaaacatggcactacaactggtgtgtcagcacatgatagagcaacgacgatattggccctagcttctaaagattccaaacccgaggatttcaaccgcccatgtcacattttcccactgaagtacagagaaagtggtgttctaaaaagagctggtcataccgaagcttcagttgatcttgcaatgctagccggactggaccctgttgcgattctctgtgagatcgtagatgatga

SEQ ID NO: 42371 - DNA, 320 bp, Gossypium hirsutum
  unsure (1)..(320): unsure at all n locations; Clone ID: LIB3189-035-P1-K1-C11
cggtcgaccacgcgtccgggaaaaaccaataaaatggcgaaaccccatcttttatttctattttacttttcccttctcggacggatatctantttccgccgtcgattcctccatcatagacgacttacgtgtagccggttccagttttccgtcggttcatgcaaagaatctgattagggaggtgaatttgttttctaaaggggaagttaatgtctttgacgatcatcgggatttttttcgcgggggttccaaaccggcggagaagcggtacaagttcccaacctttggaagtgcccggtggagttttcgttgaggatttt

SEQ ID NO: 42372 - DNA, 328 bp, Gossypium hirsutum
  Clone ID: LIB3189-035-P1-K1-C2
atcgggggcgcaacgcccgcgacctatgctcaaactttgaataggtaggacggcgcggcttcttcgttgtgccattctacagagtgaacagctcggagtgggccttctttggtgagcagaactcgggtctctggattaaccgaaagtcatgttacaggggccaactggacgctatcctatgacccagatagggtgtctgtcgatgctgacagccagacggtggggatcgtagtggagattctctcaagagtgtgctagctctcacctgacgattcaactagcctctataattgctggtgctgaaccgcgcaaggtataccctgtcatg

SEQ ID NO: 42373 - DNA, 416 bp, Gossypium hirsutum
  Clone ID: LIB3189-035-P1-K1-C3
gcctttaccctttgtttctttgatttgtttctaaggatttaatctctaaaccttcttcccatttcttcatttcattgttcaagaacaaacaaaaaaaataagaagcaaaaaaacatggccaaagttctgttgttcattgctctatgtgtgcttacagctttggttagtgctacacgcattctgaataaccaattggtggttgaaggctatgtgtactgtgatacttgccgtgctggttttgaaacccctaatactagaaggctagctgatgccatggttaagctggtatgctccgacaggaagaccggcggagttgttttcgagaaggagggatataccgacaaaaccggaaaataccagattcgtgtatccgaggatcacttggatcagatctgtgatgcagttcttgtgaagag

SEQ ID NO: 42374 - DNA, 232 bp, Gossypium hirsutum
  Clone ID: LIB3189-035-P1-K1-C4
cggacgcgtgggctcttcacaatcacatcttcattttcagaatttaaccaaaataatattagaaaaaaaaaatttaaaagaaatccaagaagaaaagataagtagcatcgaatctttttttattcgttatttttattttatttttttgcttgttttctcttcgcagctcactgccggcagatcggctcaatctcaagactttgtttgtattcttgtagctgccaagtggcgt

SEQ ID NO: 42375 - DNA, 341 bp, Gossypium hirsutum
  Clone ID: LIB3189-035-P1-K1-C5
ctttgactggtgagggcttgctggaattctgcaatgctgtgcaggaaaaactaaaggattccatggttccggtggaagctttagtcccatttgacaaaggggaacttctgagtaccatacatcaggttggaatggtgggagaaaactgaatataccgaaaacgggacatttgtcaaggcatttgtccctcttcgttttgctaggctgcttaccccaatgaggcaactgtgtaaatcataactttcaactctcttgaatgtaacctttcaatagtttgtattaaattcgatgagttttcaagagcaagagggcgatttgggaggacagcagcagcacatttt

SEQ ID NO: 42376 - DNA, 83 bp, Gossypium hirsutum
  Clone ID: LIB3189-035-P1-K1-C6
tacagcccataaaaatggtgaaagctatcatggttcatcaatctggtggatctcaagtccttaaatgggaggatgtggatctt

SEQ ID NO: 42377 - DNA, 387 bp, Gossypium hirsutum
  unsure (1)..(387): unsure at all n locations; Clone ID: LIB3189-035-P1-K1-C7
ataaaaaggaaagaaaaaaatgaagctcttgtttctaactttgctgctttgttctcttcttctatgttcttcagtttttgcaccaacaatggctcagcctcgttcacgtaagcaaacatatttttttcataatctaagccttgggtgtgtgtgtgtgtgttttaatctttgatgtaattttttttggggggggggaatggcagctttttgtgaagggtaatgcaaagggaggtgcaataaagcggcggtttgggatcggtgcttcaaatattgcggcatatgttgcgaggagtgtcaatgcgttccgtccggtacttacgggaacaaacacgagttgncttgctacttatattaggtgaacatcatgggccaacccaaatgcccttg

SEQ ID NO: 42378 - DNA, 147 bp, Gossypium hirsutum
  Clone ID: LIB3189-035-P1-K1-C8
aatcccggtcgacccacacgtactgtttctgtacccaactaattttcccgcaggatagcttgagcccataacgagttctatcgggggaagcttatgattagaggcattggtggcacaactcttttctcctaaagtcaatcttcaaat

SEQ ID NO: 42379 - DNA, 243 bp, Gossypium hirsutum
  Clone ID: LIB3189-035-P1-K1-C9
ctgggggtggttaaaaaaaataccggataatttttcaatttatcttgcatttttaaacccattttctaaaaaattttttttccctcaaatttacttccaaaactttttctccactaactttttaggaaaaatttttttctacaatctttcttatgtagcatgctttttatatcatattaacttactatcaaaatttttccttctattttattggtgcccttattatacctattcttttttttt

SEQ ID NO: 42380 - DNA, 378 bp, Gossypium hirsutum
  Clone ID: LIB3189-035-P1-K1-D11
gctgaatttcggtcgtgattagatatgggattctagagctttggaggattcttgggatatttatatgataataggtcataaatttttagtccaccccagtttctcggtactttttccgtttggtttgtaagaagaaggtaggtgttaaaacttatagctttttagggtttttttcctggttgatctaagagagaaacttggtttgattgaccgcaactaattgaatcgggtctgtgaggttgggtttctgttttattgaatattccagcaatagataaacaatggaactttaagctttttcctgcaaggaaacgataagttgggtgtttggatttcggcgtagatggatgattcgggtttggaatgcggatttttatc

SEQ ID NO: 42381 - DNA, 341 bp, Gossypium hirsutum
  Clone ID: LIB3189-035-P1-K1-D12
ccatcgcgtccgcccacgcgtccgggaaagccagccgttgttgaatatggtaacacaggggaagatgttgatccggaaactggtggtcctgcttctgtaccagttccattacctgatatggtcctgccaccttcatttgatggtgataatccagcattcatgtaccggttcttggaacctacttctcatttcttggcgaggccagttttggacactcacggttgggaccatgattgtggctatgatggtgttaatgttgaacatagtctatctatcgccagccagttttcccgctgcatttttctgttcaactttccatggataaaaatgagtttaacatc

SEQ ID NO: 42382 - DNA, 442 bp, Gossypium hirsutum
  Clone ID: LIB3189-035-P1-K1-D2
gcatgttcaagaatgatacgggaacggatgtcggatgctccggcgggtttaatgatggtcttacaaggagtactaaattagccatagtgtttggtgtgggagtacccttctcgttcatcctcggccttgtaatttacctccgtggcaaggtcgaggatcatcaaaatctgaacttgactgcatcttcggtcatggttgtcaaaggtcttgatgggcaaatcctcgaatcatatccgataacgttgttaggtgaaagtcgacgattaacacggccgagtgataatatttgctctatttgtcttagtgaatatcacgctaaagagatattacgaactattccagactgcaaccattacttccatgccgcttgtattgatgagtggttgaaattaaatgttgtgtgtcctttatgttgtagttctccgaaacttatttcgaatat

SEQ ID NO: 42383 - DNA, 484 bp, Gossypium hirsutum
  unsure (1)..(484): unsure at all n locations; Clone ID: LIB3189-035-P1-K1-D3
gtttcctttcttttacattaagccgtctgaccacgagcatgttattaggaagtattatcctgaggagaagggtcctgtgaagaatatcgatccaattggcaattctccagtgattattagaacgtctgtgctggagaaaattgcacctacatggatgaatatttctttgaggatgaaagatgacccagtgactgacaaagcatttggatgggtgctagaaatgtatgcatatgctgtggcatctgcactgcatgacgtgcaccacatacttcataaagacttcatgctccagccaccatgggatacggaagtagggaagaagtttataatccattatacttacggatgtgactacaatttgaagggagaattaacgtatggaaagattggagaatggcgtttcgataagagatcgtaccttagtgggcctnctccaagaacctctctttgccccctccangtgttcctgaaagtgtggtgagac

SEQ ID NO: 42384 - DNA, 411 bp, Gossypium hirsutum
  Clone ID: LIB3189-035-P1-K1-D4
caaattttgaggagtacttgagcaataatccaaatgtaaatccagggatcgacttgacagtaactgttttgacaactggcttctggccaagttacaagtcttttgatctcaaccttcctgctgagatggtcaagtgtgttgaagttttcagggacttctatcagacgaaaaccaaacatagaaaacttacttggatatattctttgggtacttgtaaccttatcgggaagtttgagccaaaaactatggagttgattgttacaacatatcaggcctctgccttactgctgttcaattccttggataggctcagctattcagagatcatgacacagttgaatttaactgacgatgatgtagttagacttcttcatttcgtgtcatgtgcaaagtataaaatttttaacaagg

SEQ ID NO: 42385 - DNA, 404 bp, Gossypium hirsutum
  Clone ID: LIB3189-035-P1-K1-D5
cagacgcgtgggtgggtttttttggaagtgaatcaaaagagaacatagttccctggacttgtggttgacttaactagagaagatggataggcacacagtgaagatttttgtcaaaggtggagttgctgcttaagatgggacgaggtaagagagccatcaagaggatcgagaaccaatctacacgggtcgttaccttctcgtagcgccgagctgggctttggaagaagactcacgagctctccgttgtctgcgatgctcatatcggccttatcatgttctcaagcaccggcaagatatgccagtattgcgcttaaccttatagaatggagcagatcattgaatggtaccagaaggtcactgagactcgcattctctgagcatgacaatttgggaaacatttgtac

SEQ ID NO: 42386 - DNA, 443 bp, Gossypium hirsutum
  Clone ID: LIB3189-035-P1-K1-D6
cccacgcgtccgctccatacgccgtatgtctgatgcatttcacgcaagggaggaaatcaaggcaatgaagctgcagagacagaatagggaagatgaacctgtagaggctgtgaagattccaaaagccacatggatggctgatggaactcattggcctgggacttggttaaatccagctaatgagcactcccggggtgaccatgctggtataatacaggtgatgctgaaaccacccagtgatgaaccattacacggaactgctgatgataggctcattgatctaactggatgtgatattcgtctccctttgctagtctatgtttctcgtgagaagcgcccatgctatgaccacaacaagaaggcaggtgccatgaatgcccttgttcgggcatctgcaattattttaatggcccattcattctgaaccttgactgcgatcactt

SEQ ID NO: 42387 - DNA, 187 bp, Gossypium hirsutum
  unsure (1)..(187): unsure at all n locations; Clone ID: LIB3189-035-P1-K1-D7
atcccctntttctctgcagcctttagcataatctggagtattgtcgaaccaaaaaaaaggggggatatctacaaggaaactgagactgagatatcatgaattcatagaaacttctgagtattcatctcctatctctttgtgtttaattattaactttaggaatatttatatttaatttaatttgttt

SEQ ID NO: 42388 - DNA, 270 bp, Gossypium hirsutum
  Clone ID: LIB3189-035-P1-K1-D8
agcttcatctttttttcgatgatgaattacttggattgaattcaagctgtcgtacctctcagaacttaggttaagaagttggcctttttttttcccgcaaatcttgatgaaggttttgcgataaagctaagacccctgtggagtttgcttttgtaagcagcgaaaagaagctgcccttgttgagggttatttttaggggattaagaaatggatgagaatatgaagcaactccagcaaagcttgattgagcttgaaactgaagcttaacat

SEQ ID NO: 42389 - DNA, 357 bp, Gossypium hirsutum
  Clone ID: LIB3189-035-P1-K1-D9
gagaaattctttgttttccatggcgacaactcttgcattctccctctcaaccccgatccgagcctcaaccggttcacttcaaagacccgatccaagtcgcagaaaacctgtttcttcctcctcctggtgggctcccctcttcgggttgtccttcaaccccgattacctcaacgatggccatatcggcgtcacatcggagagaaatcccgaagtatccgaatcggactcagatccgggtcgatccagatccaaatccacgctcatgtgcttcaccgaggagaaagcgaagcaacttcgcaggaagacaatggagaacgcgtcgtttcacgatatgatgtaccactcggcgatcgcgtc

SEQ ID NO: 42390 - DNA, 440 bp, Gossypium hirsutum
  Clone ID: LIB3189-035-P1-K1-E1
caagctttttctttccccatggctgctaaagctttttcaagaagtataactccttctttggtgcttttgttcatatttttaagctttgcacaaggtaaagaaatcatggttggtggcaaaacaggcgcttggaagataccttcttctgaatcagaatctctcaacaaatgggctgaaaaagctcgtttccaaatcggcgactctctcgtgtggaaatatgatggtggtaaagactcggtgcttcaagtgagtaaggaggattatacaagttgcaatacgtcgaacccgattgcagagtacaaagatgggaacaccaaggtcaagcttgacaagtcaggaccatatttcttcgtgagtggagcaaatggtcactgcgagcaaggccagaagatgattgtggttgtgatgtctcaaaagcatatgtacattggaatctcttc

SEQ ID NO: 42391 - DNA, 316 bp, Gossypium hirsutum
  Clone ID: LIB3189-035-P1-K1-E2
ctagctaaggcttttcgctacactgctaaagctatttcatgaagtatacctacttctccggcgcgtttggtcatatttcctagctatgcacatgggaaagaaatcatggcaggtgacataacacgcgcctggattataccctctaatgcatcataatctctcaacagacgggcgcaaaaaactcattctcatagccacatccctatcgagtggaattttgatggaggttaagactcggtgctctaagtgagtaaggaggcttatacacagttccacacgcctaaccccattgcagtggacatagatggtaacacca

SEQ ID NO: 42392 - DNA, 389 bp, Gossypium hirsutum
  Clone ID: LIB3189-035-P1-K1-E3
aaaaagaaaaatttacaatcatcatcagatctagtgttcttagcctgatgatgataatgacgcgttacgctcttcttctcctattagctttcgcttcgctgcaactcctctgcttcgccgctgatgatgacgtggtgttctatgattcatttgaagagtcatttgatggacgatggatcgtttctgataaagatgattataaaggtgtgtggaagcattccaagagcgaggggcatgatgactatggtcttctcgtgagtgagatggcaaagaagtatgcaatagtgaaagagcttgatgaggctgggaatctcaaagatggtaccactgtgcttcattttgagactcgcctacagggtggactgggatgtggcggtgcatatttgaaa

SEQ ID NO: 42393 - DNA, 243 bp, Gossypium hirsutum
  Clone ID: LIB3189-035-P1-K1-E4
aaaaaatatgggtttccaaagaaacatattgggtttccttttcttgatattggcttcactaacaagcctctcttctagccttcctagtgaatactccatagtggaacatgagattgacgcatttctttcggaggaaagggtgttggagatcttccaacagtggaaagaaaagattttgaaagtgttccggcacgccgaggaggctgagaaaagagttgaaaatgtcatggggaatttgaagtt

SEQ ID NO: 42394 - DNA, 196 bp, Gossypium hirsutum
  Clone ID: LIB3189-035-P1-K1-E5
gttgggacttgtatggggaaattaaaaaaatatttggaattagatgggtactgtttctactaatgttatattcccatgtttgggtaatgtactagtggttgccttttgcctttgtttagttggagaagttataaagtatcaatgtattggtatttttttgaattgtaatatgcacattacaattaaagtattaata

SEQ ID NO: 42395 - DNA, 293 bp, Gossypium hirsutum
  Clone ID: LIB3189-035-P1-K1-E7
tgcggtgggtttggcggatgatatggaggaggatttggaggctgaagctcaataccgttagtggagtaccttttaatctaacgaccgacatttttactttgaatttatataacttttttttatcatgttatattttttttataaaattttattttcattactatttctacttgtttttcactattcttattttttttaacattaatttttctaaaattttattttctgcaacaatttttcaaatgtaataaatttctcttctttttttcaatcatattttttaatatatattt

SEQ ID NO: 42396 - DNA, 373 bp, Gossypium hirsutum
  Clone ID: LIB3189-035-P1-K1-E9
gcgccataccagaaaacgggaaaggattcacctcaatggattccaccacagctcaacgtcgggtgaactccattcatgcccaccttgtctcagtcgttgactccgccttttctcattcccacctccgctcttccccaaccgctgctgagttcctctctgaacagaattacagtgttgtgctgccagagaaattgctgacaggaaaatggaatgtttacagatctgctcgctctccggtgtagcttggatcgggatttcccaatcattctgatattggtacattgcacgacaattttttactcgcccgtgatttctttggggaataccattattttggtaccagtattcgagtcgattggaccggtggtgtgtt

SEQ ID NO: 42397 - DNA, 421 bp, Gossypium hirsutum
  Clone ID: LIB3189-035-P1-K1-F1
gtccggcaaaaccgctcagcagctcccaaggcaatagccatgagtttcatggccgtctctttctcttcactcctctctatccctccacctccccattccctcattccacttcgccttgcttcttgccatcgttttcccactttcactcccggaccaagaatacaaatccaatgcgccaccaaagacaacaaggaagcaactccacccgctgcagcatcgatggggagcttcgatcccaagaaaggagtggcgctttacaagcctaagtcatacgatgttctcgtaaccgatgccgctaagtcccttgcttatgctattcaagatggcaaaacccgtctcgagattgatttcccgcccttgccaagcaacatttcttcatataagggatcttcagatgagttcattgatgccaacattcaac

SEQ ID NO: 42398 - DNA, 419 bp, Gossypium hirsutum
  Clone ID: LIB3189-035-P1-K1-F10
gtctttcgccgcctttctctcgcagtttgattctttgttcggggcaatttaaagacaagtcaagatggtgaagtttacagctgaggagctccgtgccattatggaccggaaacacaacatccgtaacatgtctgttattgcccatgtggatcacgggaaatcaactcttaccgattctcttgttgctgctgctggtatcattgcacaagaagttgctggtgatgttcgtatgacagatacccgtgcagatgaggctgagcgtggcatcacaatcaagtctactggaatctctttgtactatgaaatgagtgaggattctttgaagagctacaatggcgattggcatgggaatgagttcctcatcaatcttattgatttccctgtgcacgttgacttttcatctgaggtcacagctgctc

SEQ ID NO: 42399 - DNA, 387 bp, Gossypium hirsutum
  Clone ID: LIB3189-035-P1-K1-F12
aaaaggtcttcgatcttctaaaggaagcttggaacagattcaattcagaagagcggtaaaatgcaattttttttttaaatacaggtgcgatttgcttcattacaattaaataatgttgctgtaaattttacactgttagcatagtaaatgatcctctttttgtctattctatgtttctacggcatgtacttgtgtgtaattcaactatttataagcccaaagaaatagatgcaaagattcttagttaaaagaccatggaacacgaactccatgttattgggtttattttaactgttcattggctggacatgtttgttcctgccaactctttactcgagttcgagatttgttataatatggtattcgggtttattttttggtcttatt

SEQ ID NO: 42400 - DNA, 421 bp, Gossypium hirsutum
  Clone ID: LIB3189-035-P1-K1-F2
gatattaaggacaaaaagtcattggaagaaagcttacttttatctgtgggatgagccactgaacatggaacaatacgagtctctttgtaacatggcaagtgaggttcatgcttatgctcctgatgctcgtgttttaaccacttactattgtggaccaagcgatgctcctcttgcaccaactccttttgaggcttttctaaaagtgccaaagtttctacgccctcatactcaaatctattgtacaagtgagtgggtatttggtaaccgagaggatcttgttaaggatgttatttctgaattgcatccagaaaatggagaggaatggtggacatatgtctgcatgggtccatccgatcctcatcctaactggcatctgggaatgcgaggaacacagcatcgtgctgttttttggcgtgtgtgg

SEQ ID NO: 42401 - DNA, 59 bp, Gossypium hirsutum
  Clone ID: LIB3189-035-P1-K1-F3
gctctagatcgcgagcggccgccctgcttttgccatctttttcatggccgtcgagctcc

SEQ ID NO: 42402 - DNA, 344 bp, Gossypium hirsutum
  Clone ID: LIB3189-035-P1-K1-F4
gtcctaatcgagtgatactaagtcagtgaatgaattaacaaacaatcaaaacattaatgaaacaaatcataattagaatttcatccactcaaaatatacataactatacgaaacagaagagccgattatcagaatgaataaaaggcattcaaactaataccggacaacatcctggaggcagtcgtaaaagtgcgcaagcttaatcttctctcggccagagaagattgcctacgctgctccaccttgttctccttgagctgccatctcaatcaacatgtaaagcttttttataggcatatcattcagcgcttcagcagcctcactgatatcttcttcagcaaata

SEQ ID NO: 42403 - DNA, 409 bp, Gossypium hirsutum
  Clone ID: LIB3189-035-P1-K1-F5
attcgactatgatgacactccctttctttgtcctaaacatcctccttttgctctccagctccgcgggtacaccaaagagcggcgcagatcacgacctggtccgttcatcatgtgttcacgccagctatccaagcctctgttttcgcaccctttcttgctactccggcccagccaacaccccacgtgagttagcccaagccgccgcaaaagtcagcctgtcccgtgcccgtaaagtgtcgtactacttgtcgacgagtgtgacggggttcaacaagagggaacgagtcgcactgagtgactgcatggagcaaatatatgagtcgttggaggagttgatcaatacattagtgggagttgaagcacttgataggggagacgttcgggtctcagatgagtaatgctcggtcat

SEQ ID NO: 42404 - DNA, 124 bp, Gossypium hirsutum
  Clone ID: LIB3189-035-P1-K1-F6
gttcaatgaattggataggaccctcctttaaaatcagcagactctattttgttgacgaagctgggggcaggatatctaccttgattgcggcggcttagggttgccgattcttgcattgttgcgg

SEQ ID NO: 42405 - DNA, 107 bp, Gossypium hirsutum
  Clone ID: LIB3189-035-P1-K1-F7
gtcatcttaacgctagatcgaccacctatcatataacctgattttgactccgaagacactctggataactaatatttgccaagaaacgagaatcatgacttggatga

SEQ ID NO: 42406 - DNA, 150 bp, Gossypium hirsutum
  Clone ID: LIB3189-035-P1-K1-F9
agtttttcattctgctgatttctctaaaggaatttcgcatcagctaatatttcctagagtggcttcattttagctttccagatctccttaatcccatttatcaacattttttccataatctaattttagtccatcatgttaccaaatatt

SEQ ID NO: 42407 - DNA, 452 bp, Gossypium hirsutum
  Clone ID: LIB3189-035-P1-K1-G1
aatggctagactcgcttttctcttcacccttacttttctcctcttcaccttctctcaagcccgcttcatcacatctgaatcccaacatgatgtcacccccgaaaaatccgttaccgattttcccgaatccgaccccgaatccgccatccttctccccagcgagaaaccccactttgaaccccccaaattactcgacttcaagcacgatgatgatgcctccggcgtcgcctccgttcctttgaccaagatcagttttaaccctgtcaaccgccacttcccaaggcgtcccttgattccgttccgtcacaagcacaactgccgtttccataaacgcttcatgcctttgaatccacgcttccatcagaaacgcttcatttcttacggcaacgacatgatactgtccgacgagagaagtttgacccatagtcacgcggtgttgttcgccagatcga

SEQ ID NO: 42408 - DNA, 380 bp, Gossypium hirsutum
  unsure (1)..(380): unsure at all n locations; Clone ID: LIB3189-035-P1-K1-G2
gagagatttaatcaatctgagcgatagaggaaaatcacgaattcctgataaagtgacggaaaatatatacaatgcatagatcgcgatctccattgctaatagctttatcatttctcttcacatccttcaccatctctaacgctctttacgggccgtcgtcgccagtggttcagctcactccattctaatttcaagtccaaggttttaaattctaacggagttgttttggttgagttcttcgcgccttggtgtggccattgccaaactntaacacctacatgggagaaagcctccaatgtcttgaaaggtgtcgctacagtggcagccctcgatgctgatgctcataagtctctttcccaggaatacgggattagaggatt

SEQ ID NO: 42409 - DNA, 252 bp, Gossypium hirsutum
  Clone ID: LIB3189-035-P1-K1-G3
gagagatttaatcaatctgagcgatagaggaaaatcacgaattcctgataaagtgacggaaaatatatacaatgcatagatcgcgatctccattgctaatagctttatcatttctcttcacatccttcaccatctctaacgctctttacggtccgtcgtcgccagaggttcagctcactccatctaatttcaagtccaaaggtttaaattctaacggagtttgtttggttgagtttctttgggccttgtttg

SEQ ID NO: 42410 - DNA, 244 bp, Gossypium hirsutum
  Clone ID: LIB3189-035-P1-K1-G4
aacggatcgcctagatcctagatggtgacgcagtcacgaaagttactgtaactaaccccattttggcgacacaatgacggaaattgatccactactaccaagacacatgcctaggaaactttgtaaaggcactacataacttgatggacatattaatgctgctgtttgagctatgaactacgtaagagatggctgaacaacctagggcctatatgagatctacacattgatcatctgggctgag

SEQ ID NO: 42411 - DNA, 374 bp, Gossypium hirsutum
  Clone ID: LIB3189-035-P1-K1-G5
tagaaggtttagttttacaaacatggctagttccggtgtccttaagttggtttccatgattctcatggtgtgcatgacgatgatgagtgcacccaaggcagccaaagccgccatcacgtgcagcgacgtggtgaaccacttgatcccgagcttgtcctacgtacaaaacggcggtacacccgctgctgcatgctgcagtggggtaaaagcactctacggcgaggtttagaccttcccggaccgcctaaacttgttcaagtgcatcaatatttgcgggaacggaatttcgtacaccatctataacctcttttttgcaggcgggctacctgctaaatggtgtcttcaactccgttactgcttcagccccttcactg

SEQ ID NO: 42412 - DNA, 116 bp, Gossypium hirsutum
  Clone ID: LIB3189-035-P1-K1-G8
ggaaaatcaaacataaccattttaaaactttccggcataaatttcgtagttatcggagagtggtgccccctgaaaacccttttttctggccatacttttattactcaatcttgttc

SEQ ID NO: 42413 - DNA, 376 bp, Gossypium hirsutum
  Clone ID: LIB3189-035-P1-K1-G9
aacgcaagcaaaaaatttaaagttcgataatactttattttgataaaaataaaatgccgatggctcgaatcgcagtcgggtctccggccgaagccggccaagctgatgcactcaaggctgctttagccgagttcatttcagtgcttatttttgttttcgccggtgaaggctcgggcatggctttcaacaagttgaccgacgatggctccttgacaccggcgggtttagtagctgcggcattggctcacgccttggcgttttttgtggcgggttcgatcggggctaacatttcccggggacacgtaaaccccgccgtcacgttcggggctttcgtgggtggccacattacattggtgaggagtattttgtattggat

SEQ ID NO: 42414 - DNA, 465 bp, Gossypium hirsutum
  Clone ID: LIB3189-035-P1-K1-H1
aattttcggaggtaaggaggaaaagaagaaatggcggtgccgcttctaagtaagaaaatcgtgaagaagagggtcaagaagttcaagagacctcagagcgaccgcaaaatctccgttaagacaaactggcgtagaccaaagggtattgattctcgtgtcagaagaaagttcaagggatgtactttgatgcccaatattggctatggttcagacaagaagacccgacactatcttccaaatggctttaagaagtttgtcgtgcacaatgttggagagcttgaactgttaatgatgcacaacaggacatattgtgccgagattgcccatgatgtttcaacaaagaagagaaaggagattgtggaacgggcagcccagcttgatgttgttgttacgaacaagcttgctaggctgcgcagccaagaagatgaatgagattaagcctgtcttttatgtttatctttgagc

SEQ ID NO: 42415 - DNA, 398 bp, Gossypium hirsutum
  Clone ID: LIB3189-035-P1-K1-H11
tcttcacattgtttcaacattaatgttggtaataaaattttgtttcaaacatcatttcttggggatgttatgtgttatagtattattttatataatcttttttgaaaaaattttttaaacatttcatcaatttttttcgtttttttataattttttttttgttttttaaaatttttaacatttatatttagttttcaaatttttctaaatttttccttttttttttcttttttttccatgttttttcaatttttttactttttttttttaatatttttttgtctctttttttaagtttttttttaatacttttttctaattttttttttttagtttattttcataaaaaatttttttcccaaccttttttttctgtaaatttttttacactttttttt

SEQ ID NO: 42416 - DNA, 144 bp, Gossypium hirsutum
  Clone ID: LIB3189-035-P1-K1-H12
ttttttttttttttttaaaaaaaattttttttttttttttaaaaaagatatttttttataatattattttaaaaaattatttaattttaggtatttttttagaggggggaaaaaaaggggaaaatataaaaaaatttttggtat

SEQ ID NO: 42417 - DNA, 391 bp, Gossypium hirsutum
  Clone ID: LIB3189-035-P1-K1-H2
aaaaacaaaaaaatcaaaccaaatcaataaaagtccaaaatttgcagtccatgttttacaaatatctgggcccaatttacaacatgcatagcccaaatcaaaactacccaaacccaattaaaacccaattacaaagcccaaaacaaatcaaccctagcccactcttaacattttcagagagcaaaagaaccctagccacctttgcctttagccgccactctgtcccatgcgcgccgcacgttagcaaggctttttcctcacgctatcaccggcctttacgtgtatttaaaatccttcgtggttgtgtcgtccgagtccttctcaccggtcctaaaatcgtacccaaaagagggaagagagagacatttttctctcgatccgggggctgaga

SEQ ID NO: 42418 - DNA, 275 bp, Gossypium hirsutum
  Clone ID: LIB3189-035-P1-K1-H3
attaaaattatttttaaattttgtttttatatatatttgaattagaatttttttattttattttttttattattattttagaaaattttttaaatttttttttaatttttttataatttttttttttttttttttaattttttttagatttttttttattttttttatttttttttttttttttttatttttttttttatttttttgtattttttttttttatttttttttttttgtttttatttttttattttttttttttttttttatttttt

SEQ ID NO: 42419 - DNA, 349 bp, Gossypium hirsutum
  Clone ID: LIB3189-035-P1-K1-H4
atagcatacagagatggagaggcaaagaagcaagcaggtttgtttgttgatgtgggttttggttgctgcctttttctcccacaatagggtcattgcagtgacctccactggccttggtgagcagaaaaactactatccagctcctgaccctcatgctggaactcccccttcaggttcacatggcacaccaccatcttcaggaggtggatcacctccctctcatggaaccccgtcacatggaggtggttaccacccttcaccaacaccatcaacgccttcgggtggaaattgtggaactcccccacatgacccttcaactccatcaacaccatcacacactccttctcat

SEQ ID NO: 42420 - DNA, 481 bp, Gossypium hirsutum
  Clone ID: LIB3189-035-P1-K1-H5
gtttggaagccttatgcataggtcaacctgcacacaggttcctcaaaaacttgaaacatctggaagttagagaatgttgtaagttgcaagtggtgggtgagctccttcatgacgtggaacaaaatcatgagcacccactttctaatgtacaatctttgaagctctatcaattaccagcattgagatggatatccaaatgttcaccccattctttcaccctccatattatcaaggctgtattcataaatggatgcgcaaaattgaaatcccttttggcaccttttcttatttaaagactattgcttttagaacaatcagagatacaacattgctacgaatttttaactctttttcctgatccagaaattgttttgtgaaaatatatttaatgcccctcttccttctctctctgtctgcccaaattgaaaacctctttcataaaaaagctgtgcaaatctggaaattttttggcaaaaccttt

SEQ ID NO: 42421 - DNA, 168 bp, Gossypium hirsutum
  Clone ID: LIB3189-035-P1-K1-H6
acgcatcactcgtcctcttctacactcttctctggtaagttcatcgaatagatcaaatcaagatccctgcctgaatgaacgacgctgatgtatgcaagcagatccagcatatggcgagatttcatccgccatggaagcggaggtaaaggctaacgagttctctgtttt

SEQ ID NO: 42422 - DNA, 86 bp, Gossypium hirsutum
  Clone ID: LIB3189-035-P1-K1-H7
taaaatatctgctttttcttagttttactttttgtcccttgactatatgatatttcccccggagggccgccgctgatgtcgagttc

SEQ ID NO: 42423 - DNA, 91 bp, Gossypium hirsutum
  Clone ID: LIB3189-035-P1-K1-H8
aacatatggcataatagtcaaccctttgtacatttctatttctcacttaatactattttgcctggaggggggatattttttcttctggggt

SEQ ID NO: 42424 - DNA, 428 bp, Gossypium hirsutum
  Clone ID: LIB3189-036-P1-K1-A1
ctactccaagcaagtattttccttacacgtttgtttttcttgtgattaatcgatatggctagctcaatgtcccttaaacttgcatgtgtggtggtgttgtgcatggtagtgggtgcacccctggctcaaggggccgtaacctgtggtcaagtcacaaactccctcgcaccctgcattaattacttgagaggcagtggtgctggtgccgttcccccaggttgctgcagcggcatcaaatctctcaacttcgccgcccaaacaacaccagaccggcaagcagcttgcagatgcatcaaaagtgcggccgccggcattactggcatcaactttggccttgcaagcggactcccaggcaagtgcggtgtcaacatcccttacaagatcagccctagcactgactgcaacagcgtcaaatgaagttttggcat

SEQ ID NO: 42425 - DNA, 208 bp, Gossypium hirsutum
  Clone ID: LIB3189-036-P1-K1-A10
atcgcgagcggactctcttttttttttccaaaaagaactatatttattatgcgcatgtttccctttgcttcaaggaatcaaatgtctatttacaaaaaatgaaaaaaacaatgttatatgtgctttgatattgaataatgtatattgtgtattttgtcacctctcatgtttcatttacaatttgttttttaatacattatgttttata

SEQ ID NO: 42426 - DNA, 219 bp, Gossypium hirsutum
  Clone ID: LIB3189-036-P1-K1-A11
gagtgggcaactccctcttgatttcatacacattttacaaatctacatctttcacaaacacccaatttatagatgactcaaatcttcaactaaaaccacacatgtttttaatgttaaacaaactcacattttaattattactggaactgtcattaccactttacttgttcaactgctagctccgtacatccggtttttcttcttatacgactttttttt

SEQ ID NO: 42427 - DNA, 390 bp, Gossypium hirsutum
  Clone ID: LIB3189-036-P1-K1-A12
aaaatctcatctttccattagagcgcagctctcattcctctcgattttctttcactttgttcgcctcttcgattatcaattccgctctcagattcttgaagcaagcgaagttcaattctccaccctacatcagaagaaaactctgattccccaaaattagggtaatctcaatccctaaaagatgccggccaccgcagggagggttcgaatgcccgcgaacaaccgggtgcatagtagcgccgccttgcaaactcacgggatttggcaaagtgcaatccggtatgacccttatgctcctaataaagatgattcaaaaaattcatctagtcagatgactgcctctgcttaacctcgtggtgaaaacccctacgcttgcttttaaggggcttt

SEQ ID NO: 42428 - DNA, 420 bp, Gossypium hirsutum
  Clone ID: LIB3189-036-P1-K1-A2
gcttttcatatacatataaaagaagttcctagaaatgagctaaagtagctgagaaaaaaatggagttttggggagttttaatttctggggttttagtttcttggtgggttttgagtgtaaatggtgctaatttaccaccatgtcaattccctgctatttacaactttggtgactcaaactcagacactggtgggatttcagctgcttttgaacccattagagctccatatggtgtgccctattttcacaaaccatctggtagagactctgatggtcgcctcatcattgacttcatagctgagagacttaagttgccatatcttcatgcatatttgaattccttgggagcaaatttcaggcatggagcgaattttgctaatggtggatcaaccataagaagaccgaatgaaaccatttatg

SEQ ID NO: 42429 - DNA, 465 bp, Gossypium hirsutum
  unsure (1)..(465): unsure at all n locations; Clone ID: LIB3189-036-P1-K1-A3
caaagttgcttttctaaaaggagtgaaagcaggaaaaaattcgattaagagatagaaagatggcggtgatgcagaagctgaaaatattcgtggtgcaagagccagttgtcgcagcttcttgcctcatcgctggttttggtctctttctaccagctgttgtaaggcccattctagattccttagaatcatcgaagcaagtccctcagcctgctttaagagatgtggttgctggtgtgactggtaaaaagcagggctgatgtgatttatgagttgggaagaagcagacactcaaatgtagctagtaatcagcaacaaaataaacttgactttaaagttgaactcttgcgccttcaacttcatctttagcatgaggaatttgagtgttaatttgttttgattttcagtggtggaggattactcaaaaaacatggatgatncatatcagactggaatttgatatcatct

SEQ ID NO: 42430 - DNA, 299 bp, Gossypium hirsutum
  Clone ID: LIB3189-036-P1-K1-A4
ggaaccattaaaaattactccaaattcttattttataaaaaaataaactttattcacttcaaagacaatccataattggttaataccatcatcaagttttaaagcttaggaacaaacttacttcaaaaataaactttaaacatttgttataactgaaacacatgaaaaagattactcatttgattcccatttttgatccaaagattacttttttttgtttttgggaatcataaaatagcaaaatttgagatcaatcacccttttttctgaaagagcattcttcaaggaggttagctttt

SEQ ID NO: 42431 - DNA, 408 bp, Gossypium hirsutum
  Clone ID: LIB3189-036-P1-K1-A6
gccatttagtggtttaagggattttttcatttgtttcttcttacgctcgattacctcacgaaaagagaaaatgaccaagtgttacccaactgtgagcgaggaataccagaagtcagttgaaaaggctaagaggaagctcagaggtctcatcgctgagaagaactgtgctccactcatgctccgtctagcgtggcactcagctggaacttttgatgttaagaccaagacaggaggtccattcggaaccatgaagcatcctgctgagctcgcacatgctgctaacaacggccttgatatcgccgtcagacttctcgagccgatcaaggagcagttccctaacctcacctacgctgacttctatcagctcgctggtgtcgtcgccgttgagattactggtggacctgaaat

SEQ ID NO: 42432 - DNA, 457 bp, Gossypium hirsutum
  Clone ID: LIB3189-036-P1-K1-A8
ggtggatttcgacaagggcaacaaccttcgcagcattttggggctcttggatacccaaatttctaccattcacaaacaggagtattaggggaccatcagcagcaaaaccctatggatggatccctgagtgggtctcaaggccagccatcaaagcagacccaacagttgtggcaaaacaattactaatgttatcacctccgggtttttcagggtcttggtagtgagtttgaaagtggccaatccaaagcattcgtgcgattgaataattacatgtatgggtgataggggtctgaagagaccttgaatggctactggcctgtgccacgagggtggattctacttatttaatggctgggtatgttaacttaagaacacaatgtgctaatttgggataagggacgttggccttcaattctttttccccctcatatgttccctggtccccttttcccttttt

SEQ ID NO: 42433 - DNA, 114 bp, Gossypium hirsutum
  Clone ID: LIB3189-036-P1-K1-A9
gtggggagccgtcaaggtgtaccgcctccgaagtattctgtggctttaggttacccatactatcaccagatatataatggattaagaggaggcttacattaacctatcccgtat

SEQ ID NO: 42434 - DNA, 245 bp, Gossypium hirsutum
  Clone ID: LIB3189-036-P1-K1-B10
gaaaaacacaagtaattctacaactatttgtcgccagagttttttcaaagcaacaacaggtcggcaacagtgattgccggcggaaacatatttgcatcaagagtcgccactgtttaaatcagcacatgaaacccatgccattaatagcagccaccgacttctccgtccatatattttcaatcaaaaccctctacgcagttcattaaatcaaaacaaaggattaaatttttagctattaaatactt

SEQ ID NO: 42435 - DNA, 396 bp, Gossypium hirsutum
  Clone ID: LIB3189-036-P1-K1-B12
attaatgcaatgcaaaaccaggatattgcctagatatacataaaataaattctttctttctggatttgttattatattctaaaggtatgttcatcattggtgtttgttattttgtttggttagggttgaacggggatctaaaaaaggcaatgaaagatggaaagccagtaataatcgagggaatacatctggacccaagcatctatttaatgaatgacgagcttaaagctccaacctctgtagatggaccatcccagcagtccgtggcatcggatgataattcttcagttcaaaaggaaaataattttattactacatctcaaagtaacacagaaaatggtaaaaaccatcctgtgcgtttatctgaaggcgtgtcagcttgcaatgtgaacaaag

SEQ ID NO: 42436 - DNA, 419 bp, Gossypium hirsutum
  unsure (1)..(419): unsure at all n locations; Clone ID: LIB3189-036-P1-K1-B2
ctttntttttggttatttttgggaaaatcttaagatttgcattttcgtaacattgaattttaactcttcactttttgttttctcgtacgaatttttattattttttcaatcaattttgatctccgttttctattgtttttcttggtcgttcaacttgacgacttaggggaaaaaagggaaaggaaaaaaaaatacaattttgtttaattagggtttgatatggctgcaaatattaacacggctaatttcaatacctccgcggcggtgaccgctgttaatcactcttccagttgccctaaccaatcacattctgtcacgaattctggtttttcgcaacggaatcaagttgtttgtggagaattggagccgatcgctgcgggttctttatcgtcttcgtcggattcttcatcattcaccac

SEQ ID NO: 42437 - DNA, 77 bp, Gossypium hirsutum
  Clone ID: LIB3189-036-P1-K1-B4
tacagtatatcctttctataatgttacctaaattcaattaactggtcgtctttttacaacattgtgactgtgaaaac

SEQ ID NO: 42438 - DNA, 433 bp, Gossypium hirsutum
  Clone ID: LIB3189-036-P1-K1-B5
cggacgcgtgggcggacgcgtgggttttagaaaaaaatcagagagcttctttgctctctctcccttccctcttctcttaacctcccccatggccggccatgggctcatcggtggtcgtccgcgcccacaccctgaactgctgtcagtatcgggcgaaacaaatcctcttatcctcctccgaacggggccgaagacaaagccttcacaatccaccgcgacagaggagaaaaggggaggccttttggttcgtcgttcccttccacggcctttggctgaaccccctaggggttcaacgaccttcgagtcggagagggacaccagagtaccccctaacggtggatcggaggtctatggagggtcaacgggggtgaaaaccggccattttggtgcaaggaagcagccatcgggcgttctgcgtgcccagggcgcacat

SEQ ID NO: 42439 - DNA, 430 bp, Gossypium hirsutum
  Clone ID: LIB3189-036-P1-K1-B6
gaaagtttcaatggcaaccctcaaagttccagttcacgttccttctccttctgaggatgctgagcaacttcggaaagcttttgaaggctggggtacgaacgagcaattgattatcgacatattggctcacaggaatgcagcacagcgcaattcaattcggaaagtttatggtgaagcttatggggaagatcttctcaagtgtttggagaaggaacttacaagtgatttcgagcgggctgtgctgctttttacgttggaccctgcagagcgagatgctcatctggctaatgaagctacaaagaagttcacatcaagcaattggattctcatggagatagcttgcagtaggtcttcgcatgaactactcaatgtgaaaaaggcgtatcatgctcgttataagaaatcccttgaaaagatgttgttaccacac

SEQ ID NO: 42440 - DNA, 432 bp, Gossypium hirsutum
  unsure (1)..(432): unsure at all n locations; Clone ID: LIB3189-036-P1-K1-B7
caagattgcggtctctcaccttgctttgcactttggttcttcttggatctctagcttctactcaggcaaagaagtccaaggaagatctgaaagaagttactcacaaagtttactttgatgttgaaattgctggaaaacctgctggtcgaattgtcattggactcttcggaaaggcagttccaaaaacagcagaaaacttccgagcactatgcacaggtgaaaaaggtgttggaaagagtgggaaacctctccacttcaaaggaagtgctttccaccggattattccaaacttcatgattcaaggtggtgattntacacttggtgatggaagaggtggagaatcaatctatggtgagaaatttgctgatgagaatttcaagctgaagcacactggacctgggcttttgtcaatggcaaatgctggtcccgaca

SEQ ID NO: 42441 - DNA, 377 bp, Gossypium hirsutum
  Clone ID: LIB3189-036-P1-K1-B8
caaatatcaaatccctcgaaaaatcctccccatccaatcaccacccgaaaccatggccactccttccccacgcgaagaaaatgtctacatggccaaactcgccgagcaagccgagcgctacgaggagatggtcaagttcatggagaacgtcgtctccgccgtccccgctcccgacgaactctccgtcgaggaacgtaacctcctctctgtcgcctacaagaacgtcatcggcgcccgccgtgcttcctggaggatcgtctcctccatcgagcagaaggaggaaggccgtggcaacgccgaccacgtcgccgtcatccgtgactacagggccaagatcgaggccgagttgtccgagatttgcgctggaattttgaagc

SEQ ID NO: 42442 - DNA, 252 bp, Gossypium hirsutum
  Clone ID: LIB3189-036-P1-K1-B9
cccacgcgtccgagatatcataaaaaggaaaaaaaaatgaagctcttgttcctaattttgctgctttgttctcttcttctatgttctccagtttaagaaccaacaatgggtcagcctctttcacctttttgtgaagggaaatgcaaagggaggtgcaataaaccggctgtttgggatctatgcttcaaatatcgcggtatattttgcgaggagtgtaaaagtgttcctttccggtacttatggtaacataca

SEQ ID NO: 42443 - DNA, 389 bp, Gossypium hirsutum
  Clone ID: LIB3189-036-P1-K1-C1
cggacgcgtgggcgcttcccaaaaattcaattagattttgaaattccagcgaagggggaggagacacacacacacacacacagatcttcaaatttcatcaatggatcattcaaaggttcaagagatcgtggagaagcaggtattgaccgtggcgaaggccttcgaggaccagatcgacgaagagattgcggctttagatcgactcgaccatgacgatctggaagctattagagagcggaggttgcagcagatgaagaagaaggcggagaagcgaagtcgttggatcggattaggccatggtgaatacttttgagattccagcttgagaaagaacttcttttttcattggttaaaagctaggtgaaacgagttcttttggtctacttttt

SEQ ID NO: 42444 - DNA, 106 bp, Gossypium hirsutum
  Clone ID: LIB3189-036-P1-K1-C12
aaataattgaggaagctgttcaatacaaagatgagtttaacaacatcagggaggttatctttaataaaccttacataccaattatctcaaactataataatattta

SEQ ID NO: 42445 - DNA, 463 bp, Gossypium hirsutum
  Clone ID: LIB3189-036-P1-K1-C2
atttgagatgatttgagtcgttagaggctttggtttttatatgacagccttcaatttttggggaaattcttgcaattttctgatactagtgaattttatgattggtgtttgttttcgttccaattcgatttttgtaggaatcggagtttcggaggtctaggaaaagaaatggcaagtgggtttgaggaatcagcgagccattctccccacaatccatcttgctccaccaataatgctaatggtgatgctggtaattttgagtgcaatatttgctttgacttagctcaagaccctattgtcactttatgtgggcatcttttttgctggccttgcctttacaaatggcttcatactcattcccgttctcaagaatgtcctgtttgtaaagcccttgttgaggaacaaaaattggttcctttgtttggaagggggaaatcatctactgatcctaggtccaaatcta

SEQ ID NO: 42446 - DNA, 443 bp, Gossypium hirsutum
  Clone ID: LIB3189-036-P1-K1-C3
acccagcgtccgcttaataaacgccttcgatttactttcggtttccatttacttctttatttctacgtttttgaatttttagtaagcgaaaatgagagagtgcatttcagttcacatcggtcaggctggtatccaagtcggaaatgcctgctgggagctttactgccttgaacatggaatccagcctgatggccagatgccaagtgacaagactgtcggaggaggtgatgatgcttttaacacctttttcagtgaaactggtgctggaaagcacgtccctcgtgctgtctttgtggatcttgagcctactgttattgatgaagtgaggactggtacttaccgtcagcttttccaccctgagcaactcatcagcggcaaggaagacgctgccaacaacttcgcccgtggccactacactattggcaaagagatcgttgacttgt

SEQ ID NO: 42447 - DNA, 285 bp, Gossypium hirsutum
  Clone ID: LIB3189-036-P1-K1-C4
gttccatgtgaacggcacttgcacatgggttagtcgatcctaagagacggtggaagcccgtccgacagcgcgtccagcgcgagcttcgtaagggaatcgggataaaattcctgaaccgggacgcggcggctgacggcaactttagggagtcctgagactgtcgcgggggcctctggaagagtcatcttctttgtttaacggcctgcccaccctgtaaacaggttattcggaggttgggttcagttgttggtagagcacctcacgttctttggtgtctggtgcgcc

SEQ ID NO: 42448 - DNA, 452 bp, Gossypium hirsutum
  Clone ID: LIB3189-036-P1-K1-C5
gtctcttcctcctccactttcagatcaccaaaaccttcaacaatgggctttgttaaggctcaaaaaaccaaagcttactttaagcgttttcaggttccattcaagagaaggagagagggaaagactgattacagggctaggattcgcttaaccaatcaagacaagaacaaatacaacacgcctaaataccgatacgttgttcgatttagcaacaaagatatcaccgcacaaataatttctgccaatattactggtgatatggttcttgcttcggcttactcacatgagcttcctcgttatggacttgaagtcggtcttacaaactatgccgctgcttattgcactggattacttttgggacgccgtgtccttaagttgcttgaaatggacgatgaatatcaaggcaatgtggaggctaccggagaggatttctcagttgagccaactgagac

SEQ ID NO: 42449 - DNA, 477 bp, Gossypium hirsutum
  unsure (1)..(477): unsure at all n locations; Clone ID: LIB3189-036-P1-K1-C6
gcactgctctttctttctatagaattagtcactcctgttctagatgaaggttctctccccaattcttgcttgcctagcgcttgctgtggtggtaagccatgctgctctctcacctgagcaatattggagctataagctgccaaatactccaatgccaaaggctgtcaaagaaattctacatccagaactgatggaggagaaaagcacctctgtaaatgtaggaggtggtggtgtaaacgtcaatacaggaaaagggaagcctgggggtgacacccatgtgaacgttggaggcaaaggagttggagtgaacacgggaaagccagggggtggcactcatgtgaatgttggagaccctnttaattacctatatgcagccagtgaaactcaaatncatgaagacccgaatgtggctcttttctttctggaaaaagatatgcaccctcgggcaacaatgagcctgcatttcactgaaaatac

SEQ ID NO: 42450 - DNA, 478 bp, Gossypium hirsutum
  Clone ID: LIB3189-036-P1-K1-C7
ggatgttggtcgcagatcaccctcaaaacggggaaaacaaaggcatgacaggcagtggtgacgttaatggagaggactttagctttgctggaagagatggggaagaggagagagaaaaggaaggacccaatggtctcaataagttggggtctagttcaacggccgagttgcaccctaaagccgccggagggccggagtctggcgtaggcaaacaaatgccgccggcgagtgtaatgacccgcttaatcttgatcatggtctggcgcaagcttatacgaaaccccaacacatattccagtctcatcgggctggtttggtccctaattgctttcaggtggcatgtgagtatgccgaaaataatagagaagtctatctccatcctgtcagatgctggactaggaatggccatgtttagcttaagtctgtttatggcactgcaacccaagatcatcgcttgtgggaactctgtagctacatt

SEQ ID NO: 42451 - DNA, 460 bp, Gossypium hirsutum
  Clone ID: LIB3189-036-P1-K1-C8
atggagatgggggacttcttcgtcggaggttattacggcggcggagctacaggtgatttctcgccggagaagaggatgtccatggtggaggaaaagctgggggagaatttcatcgtcgacgacctcctcgacttctctaacgaagacgccgttatcggcgacggcttgttgttcgataatgtcgcgggtaattccaccgatttgtccaccgtcacttgcaattcctcagcgtccggtggcgaaaatcacttctcttccgctaatttcactcactcctctcagttctccggcgaactcggcgtcccgtacgatgaattggcggaacttgaatggctttcaaattttgttgaagattcattttcaacagtcccgaatttacaaagcaaccaccatatttttgctttacccacacccgaatcctcatcttcctcaacccgatccgattcattacctcggagct

SEQ ID NO: 42452 - DNA, 425 bp, Gossypium hirsutum
  Clone ID: LIB3189-036-P1-K1-C9
gtgattttgcagggtcaagttgatatagttcaatcttcaaagttccagaatacatggaaggtgaaccagttaatgttaatgagttccaagaattagctaggcaggcccttcccaaaatatactatgactattatagtggtggagctgaggatgagtacacactaaaacaaaatgtggaagcatttcaaggaattacgatccggccaagaatacttgttgatgtcagcagaatcgatttgtcaacaactgttctcggctaccaaatctcagtgcccattttgattgctccaagtgctaagcataagtgggcacaccctgaaagtgaggttggcacagccagaacaactgctgtttgtgatacaataatgaatttatcctacaggtctacctgtactattgaggaggtcgcttcaagcttgaatgct

SEQ ID NO: 42453 - DNA, 206 bp, Gossypium hirsutum
  Clone ID: LIB3189-036-P1-K1-D1
gacccacgcgtccgcggacgcgtgggtgaagaggcaacttatcatctccactgttctcatgactatcggaattgggattgttagttgtttaggggttatcattctatcttcaccattttcaatcttttgagatcagtatagtcttttctgaaatagtcaatttattttttaatatgttgtcataatctattaatctattatttatt

SEQ ID NO: 42454 - DNA, 99 bp, Gossypium hirsutum
  Clone ID: LIB3189-036-P1-K1-D10
tcgataccaatctctatctatatatgggtttagtaagtaagagaatagctgtggagttagtgtcaatggcatagattaggtactatattcaactatcat

SEQ ID NO: 42455 - DNA, 470 bp, Gossypium hirsutum
  Clone ID: LIB3189-036-P1-K1-D2
cgaccacgcgtcgggacgcgtggggggaaattggcacccaatggaaaggtagttgaggcacgttccaatctgaattccagtgatatcgagggcaggcttcagactccttgttctttgctctacgactcgaattgcccatcagaagaacacattaagagtgatctaagatatatgttagattctttgctcgaccctgaaaccatgttgacatacaggcctcattcaacaagggaacgcgtgatggatttggctactaaacttcttgattgcaagcaatttttgaaagactacaaaccaaatgctcacaatcccttcgctatttgtgtttggtgtcatttagagctttctaaccctactaaagatgatccagttccaccccccgagcttataattctacctctcagtgctactgtcggtgaccttaaaactgtagctacaaaaggttttgtagaagaatttgccatgtttaa

SEQ ID NO: 42456 - DNA, 385 bp, Gossypium hirsutum
  unsure (1)..(385): unsure at all n locations; Clone ID: LIB3189-036-P1-K1-D3
gaccacgcgtncgggacgcgtgggacagatcacagtgccggaattagtgccagcaagaaggtagcagatgctaaacttgcaaaagattttcaagcagttttgaaagagtttcagaaggctcaacgacttgcagctgaaagggaaacatcatacgctccatctgttcccaaggcagttcttccttcaagttactcggctgatgaggtagatgtaggttcagatggaggggctgtacagcaagcctttcttctggaatcaagaagacataaggttttgctgttggataatgagatcacatttaatgaggctgtcattgaagaaagagaacatggaattcaagaaattcagcagcaaattggtgaggtgaatgagatcttcaaagatc

SEQ ID NO: 42457 - DNA, 430 bp, Gossypium hirsutum
  Clone ID: LIB3189-036-P1-K1-D4
cggacgcgtggggttcaactcaattttacccttagaatttctcaagaaacaaatacccatttgaaggaagagggaaaaaaacccaaagaaaaaatttcccaaaatgcatgattttgcttcacaatcccttatggattgattcttgtggctggaggagttattgggtatttgaagaaaggtagcatggcatcacttggtgggggtgtaggcactggattgattctcattcttgctgcaaatttgagccttaaagcttttgagaagagaaagaactcatattttgctttggtacttgagactgttgcattgtggaatttaagaatcagtttggacattgtagatccagtgcggtgctattagctatttctcttgcaaaaactatattgctgctgtgctaacatgggtcatgggacaacgttactaccaaaca

SEQ ID NO: 42458 - DNA, 263 bp, Gossypium hirsutum
  Clone ID: LIB3189-036-P1-K1-D5
gaagagtttaggttgaaaggaaagttgtatgtataggggatgaagttgcaaaaaaaagaaaaaccatagtcatctaaagcccttacaatggtagcaacaagcaacacttgcttcatgttgctagcttgcttctagtttgtgggctttttttctttttattattgttattattctctcttattttttttatagtatattctcatgaacattttacatgtactttatcatcatttagccattcataatcaattctcccttgcttc

SEQ ID NO: 42459 - DNA, 314 bp, Gossypium hirsutum
  unsure (1)..(314): unsure at all n locations; Clone ID: LIB3189-036-P1-K1-D6
tgtcaattgaactgtgatcatctcggcctttgtgacttaaaaaccaataaatgtagttgcttgccagtgactgagccattaccctttgatggtgtaccgatggcgaatgctaaatgcagcacggatgacgattgcaaggatgcttgtccaccaaattgcacacctaaatgctttcattgcttttgcttatgttattgtaatgcttgaaaaatatattngtttcattcaaaagacttcaaatttaagcctttcaataatttgtattaaaaaattggtacataaaatgaatgaatagataaaggtgttgggagaaa

SEQ ID NO: 42460 - DNA, 474 bp, Gossypium hirsutum
  unsure (1)..(474): unsure at all n locations; Clone ID: LIB3189-036-P1-K1-D7
gttattttgccttttcgctatcgtctttgcctatcaactccacggcgcagatccgaggagtctctatttttcaatccaaacaacccctctaaacactctcttcttttattgctcctactcttccagtcatggcaggcttggcaccagaaggatcccaatttgatgctcgtcaatatgaccagaaaatgactgagctgctccagactgatggagatgactttttcacaagttatgatgaagtttatgacagttttgatgcaatgggacttcaagagaaccttctgaggggtatctatgcatatggttttgagaagccttctgccattcagcaaagaggaattgtaccattttgcaagggtcttgatgtgattcaacaggcacaatccggaactgggaaaacagcgactntctgctctggaattctacagcaacttgactatgctgtagtccaatgccaggctctggttttggcac

SEQ ID NO: 42461 - DNA, 471 bp, Gossypium hirsutum
  Clone ID: LIB3189-036-P1-K1-D8
ctctgagggtgtcttaataaacgccttcgatttactttcggtttccatttacttctttatttctacgtttttgaatttttagtaagcgaaaatgagagagtgcatttcagttcacatcggtcaggctggtatccaagtcggaaatgcctgctgggagctttactgccttgaacatggaatccagcctgatggccagatgccaagtgacaagactgtcggaggaggtgatgatgcttttaacacctttttcagtgaaactggtgctggaaagcacgtccctcgtgctgtctttgtggatcttgagcctactgttattgatgaagtgaggactggtacttaccgtcagcttttccaccctgagcaactcatcagcggcaaggaagacgctgccaacaacttcgcccgtggccactacactattggcaaagagatcgttgacttgtgcttggaccgtatcaggaagcttgctga

SEQ ID NO: 42462 - DNA, 470 bp, Gossypium hirsutum
  Clone ID: LIB3189-036-P1-K1-D9
ttccccatctctctcgtctctgggtctcgtaagttggtgaatagtgttgtaattagtgccaatggctcggattgggacctctgcagctcacattgtgttggcaatatttgctgtggccatgtttgttgtgtccgggaccatggcacaggatattgctccttctcctgcaatggctaccggagcaggctctgctttgccggtttccgctgtcttcttatgctcttccatgttggtctctttaattgctctcttggtgcattgaattcaaagcttttcaagactttatgacattggctacccttaatttcactctcactggtgatgaggggagtagcctctaatcttctccgagataatatttgggtgttatcaattttcaatttctctaaagttttaaatatctctatatatatcatgttacattagtgacataaaatttgatttgtaatgtaattggtgtgattttctta

SEQ ID NO: 42463 - DNA, 276 bp, Gossypium hirsutum
  unsure (1)..(276): unsure at all n locations; Clone ID: LIB3189-036-P1-K1-E1
gaccangcgnccgaatttcatcattcaaaggaagagaatagagagaaagagaggacttaatcagtaattattagaactatgatttatttttgatttttttacatgtttaattgtgtgttgatttgaagattaatttattctaagttgaagatatatatatataatatttctttttatattcatttatattttatttttagtgttataaaaaaattattgttttatttttgatgttgtagaaaacaaatttttttattactcggatttattttatta

SEQ ID NO: 42464 - DNA, 292 bp, Gossypium hirsutum
  Clone ID: LIB3189-036-P1-K1-E10
gcttagtgatgctgaacttgatgagttaaagagaagtcgctatggtgacgctagaggccgacagttaaatttggcagagagcccatcacagttattgcttgaagctgatttagcaaagcaaactactatcaaaaaagtagctttggacgttcaggagagtcagatacctgtaaaaccttctgatgagttggggctcacaaacaaaagttctgagccttagaatattgatgggaagaaaagtgtgcttgctgctagtgatggattaaataatacaatgtgctttgcacggttt

SEQ ID NO: 42465 - DNA, 330 bp, Gossypium hirsutum
  Clone ID: LIB3189-036-P1-K1-E11
cggacgcgtgggcgagtttgtatacatccatgctgcttctccggctgatgtctcagtttcaagttacaacgtggcttaacaacataagaaaattgctacaacttggtgtaagatttgtgcagctttactgaatgcattccatgggtaaagaaaagggttatttttcattttcttgtttaagggtttttaacttacttgttgattataggtaaaataacattctatgatgttatgagatagttgtgaagtgtgattttatttaatttgattgcttattctttttttctatcactatatttggttattagatttttatattttgttagtttt

SEQ ID NO: 42466 - DNA, 461 bp, Gossypium hirsutum
  Clone ID: LIB3189-036-P1-K1-E12
caaaaatgagatctacctaaccctctatccgtccttcaaaacatacaaacaaagggttgttttcttgattgcaagagaaaggaaatctttttggacacccaagtgtggttgaaggcttaaacatcagctgaagaactgataatttttctgttccaagctttgcttttgtactgtatttcctcaaaatttctagcgatgactccaattgggtttctgggtttactgtttttgctgctcgctctatactgtgggatagacccttttaagcacagtgcaatctctgaatttcctgactttgagtcttacaaggtggatttgcctccatgggaactggttccgacagacagggacaaggataatttgcttcagaagtcagagattaagttcttgaaccaggttcagggcccttgaagcatggcatttgaccctcttggtcgtggtccttacactggtgttgctga

SEQ ID NO: 42467 - DNA, 340 bp, Gossypium hirsutum
  Clone ID: LIB3189-036-P1-K1-E2
gcgcccttttttttttttttttttttatcggtcaatatagcttaattaatatcaaaatgggatggtctgcatatgcagtatgagtccagataaatattctggacaagcatcaatcttgatatatagcatcttacattaaacaatgtcaagaaacaaaattagtatgtggtctaatgctctcttagcaaactttagaaccccatatacaggatctggaaaccttaaaaattatggaaattgcaaagatttagtgtttttttttttgccatgttatgagtactgtccaaaacagagtgcatctgcgtgtgtttgcatagaatgggcagaaagcagatagtgc

SEQ ID NO: 42468 - DNA, 444 bp, Gossypium hirsutum
  Clone ID: LIB3189-036-P1-K1-E4
tttcgccaaagaaacgcaagatttgtagattcatttctattgtctatccacctccgaatcaatggctttgccgaaccagcaaacagttgattatccaagcttcaagctcgttatcgtcggcgatggaggaactggaaaaactaccttcgtgaagaggcatctaactggagagtttgaaaagaaatacgagccaaccattggtgtggaggttcatcccttggacttcttcactaactgtggcaaaatccgtttctactgctgggatactgctggacaggagaagttcggtggtctcagagatggttactatatccatgggcaatgcgccataattatgtttgatgtaactgcccggttgacatacaagaatgttccaacatggcatcgggatctttgcagagtgtgtgagaatatttctatttgtctatgtggaaacaaggttga

SEQ ID NO: 42469 - DNA, 192 bp, Gossypium hirsutum
  Clone ID: LIB3189-036-P1-K1-E5
aaaatgggaaatggggaccagtgatttttatttgtagataaagttaatttttccttgtcgctttaagcgggtttttacacaacccacaacttttgaattttaacatccattttttttttgtggcttttgttattttggctttcacttgctggtgaacttttcatgccaaaactttattttaccctttttcaa

SEQ ID NO: 42470 - DNA, 443 bp, Gossypium hirsutum
  unsure (1)..(443): unsure at all n locations; Clone ID: LIB3189-036-P1-K1-E6
atggagatgggggacttcttcgtcggaggttattacggcggcggagctacaggtgatttctcgccggagaagaggatgtccatggtggaggaaaagctgggggagaatttcatcgtcgacgacctcctcgacttctctaacgaagacgccgttatcggcgacggcttgttgttcgataatgtcgcgggtaattccaccgatttgtccaccgtcacttgcaattcctcagcgtccggtggcgaaaatcacttctcttccgctaatttcactcactcctctcagttctccggcgaactcggcgtcccgtacgatgaattggcggaacttgaatggctttcaaattttgttgaagattcattntcaacagtcccgaatttacaaagcaaccaccatatttttgctttacccacacccgaatcctcatctttctcaacccgatccga

SEQ ID NO: 42471 - DNA, 58 bp, Gossypium hirsutum
  Clone ID: LIB3189-036-P1-K1-E7
aaaaaaaaaaaaaaaaaaaaaaaaaaaaaaaaaaaaaaaaaaaaattaaaaaaaaaaa

SEQ ID NO: 42472 - DNA, 461 bp, Gossypium hirsutum
  Clone ID: LIB3189-036-P1-K1-E8
agcgtttgtctcagatttttgaagatggcccgtaccaagcagacagcccgtaagtcgactggtgggaaggctccaaggaagcaacttgctaccaaggctgcccgtaaatctgccccaaccaccggtggtgtgaagaagcctcatcgctaccgtcctggaactgttgctcttcgtgaaattcgaaagtaccaaaagagtactgagcttcttatcaggaaattgcctttccagaggcttgttcgtgaaattgcccaggacttcaagactgatttgcgtttccagagccatgctgttctagctctccaggaagctgcagaggcataccttgtgggtctttttgaagacaccaacctttgtgcgatccacgccaagcgtgtcacaattatgcccaaggacatccagttggctcgtaagatcagaggagagcgtgcttaatttccatgtgtgtggatcagtcgctt

SEQ ID NO: 42473 - DNA, 404 bp, Gossypium hirsutum
  Clone ID: LIB3189-036-P1-K1-E9
ctagttctcgaggcattctctgttcaaaagaaacttcttatcgagatcaagcagactcagaaacctgatatggcgggcttggtcgaatttctcaaaccactgaatgaagtgatcttgaaggttaatgctatgacggaagggaggcgatctgatttcttcaaccacttgaagagtgctggagacagtctttcagctttagcatggattgcttacacaggcaaagattgtggtatgagcatgcctatcgcacatgtggaagaaagttggcagatggctgaattttataacaacaaggttcttgtagagtacagaaacaaagatcagatccatgttgaatgggccaaagctttgaaggaactgtatttaccgggtctgagggattatgtcaaaagccattatcctct

SEQ ID NO: 42474 - DNA, 410 bp, Gossypium hirsutum
  Clone ID: LIB3189-036-P1-K1-F1
ggtttttgaaaagaacgagaagcgagaagggatggccaagcgtgtgggtatgagtcgggataacggcagaggcaggaaagggtggacgctgaccgccgccgtcactaacatcttcgaatttgtcagattggccgagttcgagatcctctttatcctcttcctcatcatcgcttttatcatcttcaaagatctcacatcgcggcctgaatacaatcaattgctcgtgaaaaaacccggcggtgtagattggtggccgtactaagaatgggaagtggatgcgatgggaattatgtcctgcataattccattccttaagattattttgtttcttttcccttcctctttcacttccagatggttgctttttttgttgattggttgtgaggtctatattctatagaggaaccccc

SEQ ID NO: 42475 - DNA, 387 bp, Gossypium hirsutum
  Clone ID: LIB3189-036-P1-K1-F10
gtgagaatacactcttagtatgtctgttttaagatccattatttttattgggataattagattaattttatttatttattaatttttgttttcattttcatatttaaagctcattataaattttattttattttaaatttacttgcttttgatatttataatatatattattttattattaattttaggtatattttataaaatttaggttatataatttgttatcttattatttatataatatttagttaacttattattttttaatttttttatatattttttttttgtatagttcgttttttttatattttatatatataattaatttttttattttatatataaatttttatttatatatttattaatttataatattttatc

SEQ ID NO: 42476 - DNA, 434 bp, Gossypium hirsutum
  Clone ID: LIB3189-036-P1-K1-F11
gcttattctcaacggctgccacccacttccacggcggcgttgcttctctaaaaccccgccaaagcccacttcctcccttcctcttaatccttttccaactgccctgcccgactcctctgtcatctggaccaaatactcctgtaaatcttttgcctgtcttttacaaaacaaccccatagactttgatcttaacgcccgacgctcatcccttctaaaatacgcttccgagctcgaccttcccgtttaccggttcatgcaattggcttagtcagcttactttgtgatccgtcttggcattgacataggcggtggaactggaaccttcgctgctttgaggaaaattttctacaatgtcacgatgctgaccaccaccttgaacgtctatgcgcctttcaatgaagccgcggctgcaagagggttgatgcctttacacg

SEQ ID NO: 42477 - DNA, 412 bp, Gossypium hirsutum
  Clone ID: LIB3189-036-P1-K1-F12
ctttaaccctaaaattggagattttgggttggctaaactttttccagataacatcactcatatgagtaccaggatagcaggaacaactggttatttggccccggaatatgctttgggtggtcagttaaccatgaaggctgacgtttatagtttcggtgtacttgtgctcgaaataattagtggacgaagtagctcaaagacaaactggggaggcacgatgaggttacttttggaatgggcatggcagctccattaagaaggcaagctcatagagtttgtggatcctgagctcgaagaattcccggaggaagaagtccttaggtacatgaataaagcctttttttgcactcaagcagaatccattccaaggtctttaatgatttatgttataaaattgccgaaagaaaatttt

SEQ ID NO: 42478 - DNA, 437 bp, Gossypium hirsutum
  Clone ID: LIB3189-036-P1-K1-F2
aaacaaaaatagatatttattatgcaaatatggagatcacatctcatcacaccagtatcaaactcatcatatagactctcttgggaccgaaaaccatacgtgcgtgcatgcatgcacacatgcatacatacatccataccacttcaaaatggaaaacctatagtttcttccatcagcatgttgacccctggacccaaaaggaagttcaatactaaatatcaaaccccaaagcagaaaaacaaccattaaagaaaaagaaagccctcatcatcccacatccgacatagtaatcataaataatagtagtatgactccgccaactatgacatacagcctatagaaaaaagaagctcctttaagcttttgccaccttacgtatggtattggtcgctctattcttcaactttctcaacaggaatctcttcagctttttcatc

SEQ ID NO: 42479 - DNA, 207 bp, Gossypium hirsutum
  Clone ID: LIB3189-036-P1-K1-F3
aaaaacccaaaggggggggggaatttaaatttcaattttaaaaaaaaaaaaaaggggcacttcgaacagggtgggggaaaaaaaatttaaaaaaaccccggcggatttttgggaaaattttttttttggggcctctcaaaaaatttttccaaattttttaaaataaatttttaaaaaaaaactcgggtggttttttagtttgggttc

SEQ ID NO: 42480 - DNA, 420 bp, Gossypium hirsutum
  Clone ID: LIB3189-036-P1-K1-F4
ctcaaatgctcgagcagtcttgcattttgttttcccttttttttccccacacctttttttaaacccatttgctaaaaatgcactgggttcttccagtgttgcttgccgttatcggagttactgcactgctcgttgtaactccggtaagtgggtaccgtccatggccgtacttaaaacccaacagctccgacttaatgttcggaggctctaagaaatttgagggctcatcggagtttatccatatgagatatcatatgggtccagtccttactgctaatatcaccatccacccaatctggtacggccggtggcagaaatcccagaagaaaatcatccgtgagttcatcaactcgatctccgccgttgattccaaacacccttcggtggctgggtggtggaagaccgtacagctttacaccg

SEQ ID NO: 42481 - DNA, 379 bp, Gossypium hirsutum
  Clone ID: LIB3189-036-P1-K1-F5
ccaaaaatcgaacacgaaattcctctttttcgccagatctgggcacgtcgccggtcttagcaacctccgatccaatcatttcacctattcatttcaattcattaaacgtgtgacgcgacccactggatcgaagatgccggtggccgcttctgccatctacttcttgaatcttcgcggcgatgtcctcatcaatcgtctctaccgagacgatgtcgggggaaacatggtggatgccttccggatgcacattatgcaaacaaaagaactcggaacttgtcccgtcagacagattggaggttgctctttcttttacatgagaatcagcaacgtatacatcgtaattgttgtcagcagtaatgctaatgtagcttgtgctttc

SEQ ID NO: 42482 - DNA, 397 bp, Gossypium hirsutum
  Clone ID: LIB3189-036-P1-K1-F7
ctactactccaagcaagtattttccttacacgtttgtttttcttgtgattaatcgatatggctagctcaatgtcccttaaacttgcatgtgtggtggtgttgtgcatggtagtgggtgcacccctggctcaaggggccgtaacctgtggtcaagtcacaaactccctcgcaccctgcattaattacttgagaggcagtggtgctggtgccgttcccccaggttgctgcagcggcatcaaatctctcaacttcgccgcccaaacaacaccagaccggcaagcagcttgcagatgcatcaaaagtgcggccgccggcattactggcatcaactttggccttgcaagcggactcccaagcaagtgcggtgtcaacatcccttacaagatcagccctagca

SEQ ID NO: 42483 - DNA, 471 bp, Gossypium hirsutum
  Clone ID: LIB3189-036-P1-K1-F8
ctttcccgaagaaaaccaaaaggcagaaaaacaatttgaactgatcattgctatgatgatgatataagccaaagtgggtctgtttcatttgttgtttcgagctgcatattgaagattaacgatggcgggaatagcaatattactagatctataccagaaaaaaccaagcttttgttctccacaaagcttccactcttctgggttattctctgcctccgctgccgccgcatcggccgccgctaccgtcgctgctggaaccccttttgcctccaggtttctttttggttatcccaaggtttcacattgtgatgctggtgctgtactgcctgaacattacatttcaaatacccaaagatcatctgaagatttctttaagaatgatgctctcaaattcagtgtgaaggagtttaagattgagctggagcctctggttctgcttttgaattgaggccatttgctttgacaaccttg

SEQ ID NO: 42484 - DNA, 146 bp, Gossypium hirsutum
  Clone ID: LIB3189-036-P1-K1-F9
tttttttttttttttttttttttttttttttttttttttttggttttttttttttttttttttttttttttttttttttttttttttttttttgtttttttgtttttgtttttttgtttttttttttttttttttttttttttttt

SEQ ID NO: 42485 - DNA, 405 bp, Gossypium hirsutum
  Clone ID: LIB3189-036-P1-K1-G1
tgagattatcaatttgaagccttcttcgaatttcctcattcaagatgcaaattttcgtcaagaccctcaccggaaagaccatcacattggaggtggagagttctgatactattgacaatgtaaaggccaagattcaggacaaggaaggcatccccccagaccagcaaaggttgatcttcgctggtaagcaacttgaggatggccgcacgttggctgattacaacatccagaaggagtccacactccacttagtgcttcgcctccgtggaggaatgcaaatttttgttaagactttgactgggaagaccattacattggaggtagagagttcagataccattgataatgttaaggcaaaaattcatgacaaggagggaattccccagaccaaagaggctgattttt

SEQ ID NO: 42486 - DNA, 456 bp, Gossypium hirsutum
  Clone ID: LIB3189-036-P1-K1-G12
actgctgtgaagccgcagaggtttgaagtgaagtgaagtgcattctggctggtcgacaatggggatttcgaggtttgttttactcgtgtttacgatctcaatgctggcatccccggcactctccgatctggttctctccaaagtcgatcgacgtatttatttgacatcccacattgttcgaatttcttcaactttagaggtggagaatgcaggtccagagactgtgtctaaggttttgttggcttttcctgaccttcaagcccaaaacttggcatatttgatggcttccccgcatgaagccaaagcgaaagtcaaagtctctgttgtttctttccctattgatgtcgccaaaccagaagatatgcctcctggtgtaacattctattctgtatcattgccacagggattaaaccggggcgctagcttcacttttgatgttttggcttgtattaccca

SEQ ID NO: 42487 - DNA, 422 bp, Gossypium hirsutum
  Clone ID: LIB3189-036-P1-K1-G2
gaaaccgtaaggagaagatcggagagaaaatatggcggccggcgatcgcaccgttttgcagtttaactcaccgtcatcggcgatcctgtcagcgaaagttcaccctctcgtcatatttaacatctgcgattgctacgtcaggcgtcccgaccaagccgagcgcgtcatcggcacgctcctcggctccgtcctccctgatggcaccgtcgatatccgtaactcctatgcagttcctcacacggagtccgctgaacaggttgctttggatattgaataccatcataatatgttagtctcccaccaaaaagtgaatcctaaagaagtgattgttggatggtattctaccgggctaggagtcacagggggcagtgcattgatccaagatttttattctagagaagtacctaaccctattcatttga

SEQ ID NO: 42488 - DNA, 417 bp, Gossypium hirsutum
  Clone ID: LIB3189-036-P1-K1-G3
cttttggcgcacgcctatttaaccaatggcgagtggtggttgcctggttggttaagtcattcatatcattcggggtgtgtgtacgttgctttgggcttcaaaatttttctttctgggtctgtgtttcattgcttccttttcctttttttcttctcaaaaactatgaattatttgggtgttggtattagtcctgggaatgtccccgtataccatggcactaatccgatggtaattgaaagaagagtgagcattgcagagttgctcttaaggtgtttgatatgtgtcctcagtgtactcacagctatcctagtgggaaacgatagccaggtcaaagaaatcttttcgattcagaagaaagctcggtttacagacatgaaagctcttgtgtttttggtcgtagctaatggggtagctgct

SEQ ID NO: 42489 - DNA, 194 bp, Gossypium hirsutum
  Clone ID: LIB3189-036-P1-K1-G4
gcgcacgcctatttaaccaatggcgagtggtggttgcctggtttgttaagtcattcatattattcggggtgtgtgtactttgctttgggctttaaaatttttcttttttggtctgtgttacatagcttccttatcctttttttctttatcaaaaactatgaatcatatgtttgttggttttattcctgttaatt

SEQ ID NO: 42490 - DNA, 307 bp, Gossypium hirsutum
  Clone ID: LIB3189-036-P1-K1-G5
agaaaaatggcaaaatcagcagaggaagagaaccaacaaaaagcttttggttgggctgctactgataattctggaatcctctcccctttcaatttttccagaagggaaaatggtgatgatgatgtcactttaaaaattctttactgtggagtgtgccattcagacctacatactttgagaaatgactggggtttctccttttaccctgttgttcctgggcatgaaatttcaggtgttgtgaccaaagtggggaagaatgtgacaaaattcaatattggtgaccgggttggggttggggttttggttg

SEQ ID NO: 42491 - DNA, 416 bp, Gossypium hirsutum
  Clone ID: LIB3189-036-P1-K1-G6
ccacgcgtccgggttagggagccaaaggaagagactacgacccttgggcctgctgtacgagacggagagcatgttttcggtgttgcccacatttttgcatcttttaatgacactttcattcatgtgactgatttgtctggaagagagactatggttcgtattacaggtggtatgaaggtgaaagccgacagggatgaatcttcaccttatgctgcgatgcttgcagcacaagatgtttcccagagatgcaaggaacttggaatcacggccctccacatcaaattacgtgctacaggaggtaacaaaaccaagacccctggtccgggtgctcagtcagctcttagggctcttgctcgctccgggatgaaaattggccgtatcgaggatgttacacccatttcgactgatatcaccct

SEQ ID NO: 42492 - DNA, 201 bp, Gossypium hirsutum
  Clone ID: LIB3189-036-P1-K1-G7
cgacccacgcgttcggaaaatttgaagaaataaattcatcaccgatctaagtgcctcaaattctggtatatcgccggcgaaattttgattctggtaatctaaaaatgtctttcacattcagcggcgatgaaactgctccttattttggcttcctcggtgccgctgctgcctctcgttttttactgtatgggagctgtttat

SEQ ID NO: 42493 - DNA, 370 bp, Gossypium hirsutum
  Clone ID: LIB3189-036-P1-K1-G8
tgaatattagagatgtcttgacagcatttagtccttctttggactatttggctattagttctggagatggtcgtattaagatttgggacactttgaagggtcaaattcaaactgaatttgcagacattatatcaagtgaggcaacaaacatatatgctaaggcagaaagagggcatttttcaattgattacaaatgtatgaagtggttgtcttttgacaaaaagaagaaaatgaaacttggaagttctttgctcattattgtgaacaggaagtggtgatgtcttagcactcgatgtgtttgctggtcagctgaagtggaaagtcattgattgccattctgggggtgtcagtgccattgcatttgctacaa

SEQ ID NO: 42494 - DNA, 359 bp, Gossypium hirsutum
  unsure (1)..(359): unsure at all n locations; Clone ID: LIB3189-036-P1-K1-G9
gacccacgcgnncgaccctancncccncnccncaacaacagncgccaggccaacacccnnccggggcgcnancncggggcgcnccgncnccaancaggaanncgaggagacggnccccagccaggcanccccggccncganccgaacccanccggaaannccncaaaccagncgcccnagcncgccnacgggacccgagaancagcgccagancgcaccgcnccaccncccncnnncagagcacnccggccanacagccancnaacggcgggcaggcanacaccacagccaaggacggcnnnccaggcnnagngccaacaccgacagacnacgggccccgngggccccagaggaagaag

SEQ ID NO: 42495 - DNA, 472 bp, Gossypium hirsutum
  Clone ID: LIB3189-036-P1-K1-H1
aaacgcaagaaaaaaaaaagagaaataaagggaaacccccctttctctgctagggttccaagattgaaaccccgccgccgctatgcctccgtcgtccgatgatcggagccgtgcgaggacgccccccaacggcgccttgaagtgcgctcataagtcgaggccgcgaacaccgagacgagggggaagagaagagcttcggcccctccttgaacccacatccggcgacgatgaagttccatcggcggtgggcctaagggccgactcaggtggtctgatgcacgaccgacatgcgaggccggtgattggagagcaactgcggtggcgtgagcaggaggcgtgcggcgctggaagcctgggcgtgcggcgcttaggcctaaggtttctgtctgttccctaatctgctgggttaggggttttttttaaaaattgggcctggtgagtattttgggccacttattagtggacccttttt

SEQ ID NO: 42496 - DNA, 438 bp, Gossypium hirsutum
  unsure (1)..(438): unsure at all n locations; Clone ID: LIB3189-036-P1-K1-H10
aaagcatcaacaaccatagccatggcttcctcaccaaaactcttgtctatgtgctatcctctgacggantgcccctcctccatgcaaatccatgctggagagtacttcagcaaagtcccaagagttaacaccaatgcgaaagagacaacagccagagagcatgagcacgagaccttcgtgccccagaccacccaaaagccataagagcatgagccaaggttcatccctgaaacccaaaatggttatggcctgtacggccacgagttatgcttaagctcaagctcaggcttaagccggtccagcatgaccacctaagaaacctatgaaccctatgtcacccctgatagattccaccctgatgaaccctataacagcatccccgtatgcttcaacattaaagacacttactgctacaacaagaatgcctacaagttcact

SEQ ID NO: 42497 - DNA, 367 bp, Gossypium hirsutum
  Clone ID: LIB3189-036-P1-K1-H2
ggagaacgaagcatccatatgaatcagattcgtaattacaaacaaaaaagaaagcaattgtacataatttatccacataaccctccatgaactataagaccagtagtttcaccccaaaggaatagaaacaaagatagaagtagaattgtagacataacatcaattgaacagcagaaaaaaaaagtacaacataacaataactgaaggaaaatgtaaccaataatcaaaagccccattaaaagaacttgttatactggctagtgagagaatccctgagattagaataaaggccaaacagtgagtactgccgaaggttctcaactttatactcatgtaatttaggcagaaaggtgcttatctgttccag

SEQ ID NO: 42498 - DNA, 412 bp, Gossypium hirsutum
  unsure (1)..(412): unsure at all n locations; Clone ID: LIB3189-036-P1-K1-H3
cccacgcgtccgaagagcaaaaaaagctttttcaagctcttttccttttcccttctaaagggggagaaagttggaaacaaagagcctaagcttataatttgatggacacgggagggaattcattaccgtcgggacccgacggcgtgaagaggaaagtgtcgtatttttacgatccggaggtcggcaattactattacggccaaggtcatcctatgaaacctcatagaatccgaatgacgcatgcccttttagcacactatggattgcttcaaaatatgcaagtttacaagccattacctgctcgagaaagagaccttngccgtttccatgccgatgattatgtgaattntcttcgcagtataacgccggaaacacagcaagatcagctccggcagcttaagcggtttaatgt

SEQ ID NO: 42499 - DNA, 340 bp, Gossypium hirsutum
  Clone ID: LIB3189-036-P1-K1-H4
aaagcataatcgaatcgtgaaattactttgagaggaaaatggggaaacagccggtgaagatgagggcggtggtatacgctatgtcgccgtttcaacagaagattatgagtgggctgtggaaggatctgccgggcaagatctctcacaaggtttccgagaattggatcagcgctactcttctccttactcctctcgttggaacctacgcatatgtccagaactttaaagaaaaggagaaattggaacacaggtattaaaaacctcatgaagcattccttttatcggagtaactctgagcttttatgttgtagatgcaaatttattgtggttcgatccaatg

SEQ ID NO: 42500 - DNA, 145 bp, Gossypium hirsutum
  Clone ID: LIB3189-036-P1-K1-H5
ggcagttttctgaatgtggtcctaccattcattcaatgcaccatagattttactatcaaagttgtcagtgttccttttgcaggagatccatattccattctgaactctcacagagactatacatgtgtggtggctagagaaaccc

SEQ ID NO: 42501 - DNA, 424 bp, Gossypium hirsutum
  unsure (1)..(424): unsure at all n locations; Clone ID: LIB3189-036-P1-K1-H6
cgcgnncgattttccacttaaaccagcaacaagaaccaaaaaggggaagaactgagaataatggagaaaagtgaaaagggtaatggtgttgctcctgctacaaggtctccaatggctttaatggggtcatctagaaatgaaaaccaagaagtgaataccagcatgagaactgtcgagaccatgctgcggttggtgcctatggctttaggggttgctgcacttgttgtcatgctcaaaaactcacagtccaatgactttggctccgtttcatactcagatcttggtgctttcaggtacttggtgcatgctaatggtatttgtgcaggctattcccttctttcagctattatagcagctgtgcctcgtccttctactatgcctagagcttggacttctttcttctcgatcagattctaacatacat

SEQ ID NO: 42502 - DNA, 264 bp, Gossypium hirsutum
  Clone ID: LIB3189-036-P1-K1-H7
atccggaggtggcctagtcttatagagagtacaagtttaagtagactgaaaattgatgaaacaactagatgaagtaagaagaacaagataggaagttaaggtagaaaaagagtcattgtcaaaccctttacaagcatcagcagctttagcccttttgttcttagtgggggcaatggttccattgttgctgcattatttataaaggagtttaaggtgagattaggtgtagtggtcggtgcagtgagtttggttttggcggtgttt

SEQ ID NO: 42503 - DNA, 289 bp, Gossypium hirsutum
  Clone ID: LIB3189-036-P1-K1-H8
ctcctctacatcctcacatttatagcaatggacatatttgtttagatattctgtatgatagctggtccccggctatgactgtcagttccatttgtatcagcatcctctccatgttatcaagctcaactgtgaagcaacggccaactgataatgatcgatacgattagaactgtcggaatgggagatcttccaaggagacgagatggtggttccatgatgataaagagtaatattttaagaactgttatttatctcttattactgctagggtttcatcacgagagatggg

SEQ ID NO: 42504 - DNA, 405 bp, Gossypium hirsutum
  Clone ID: LIB3189-036-P1-K1-H9
acgataaccatgtgattgctggagcattattaggagttgggattgtcaattgcggtgttaagaatgattgtgaccctgcactggctctattgagtgattatattagtaaagaggattcttcagttcgtattggtgcaattatgggtttgggaattgcatatgctggtgcccagaatgagcagatccgtagcagcttgactctgatacttaatgatgcaaaggctccccttgatgtgatagcatttactgcaatttcattgggtttgatatacgtgggttcctgcaatgaggaggttgcacaggctattatatttgctttaatggaccgaagtgagtcagagttgggggagcctctcactcgtcttctgccacttgctcttggtcttttataccttgggaagcaag

SEQ ID NO: 42505 - DNA, 460 bp, Gossypium hirsutum
  Clone ID: LIB3189-037-P1-K1-A1
gcacgttgtggaagctcaaaagatgagtgaaaatgagatagctgaaaagcagattgtttgtgaggataaaactgttggaaatcctgcccaagcttcagttgcaaagatagaaaccgcaacagtggtacaagaggaatcaagtttagaattaccaaagtcagatccagaaggtaccaagggttcagataatcagatttccagggaattagagccgattgaaaacacagagataacaagttcacctgttaaagaatatgttccaatagatttgcaggacaaagttgcagaatcctctgagaaagctgaagttgaagatgtcaaagaggtttacctaaaggaagcagaagttggccatggtggagacaaaataacagacgaatccagtgaagaaataaccaagaagtctacattcggggaggattcaactgagattttgagcttaaagatgaacatgcgggag

SEQ ID NO: 42506 - DNA, 177 bp, Gossypium hirsutum
  Clone ID: LIB3189-037-P1-K1-A10
agcatctggaaattgtggtatctgtagttatgccggaacatttaacgagaagaaatgtggaactaattgtggaggggcctctcaaagatggtaccacgttcctcgttcatggctcaacccaacagggaatttgttggttgtgtttgaggaatggggtggagatccgcatggaattac

SEQ ID NO: 42507 - DNA, 282 bp, Gossypium hirsutum
  Clone ID: LIB3189-037-P1-K1-A12
agaaaacatattaacaaatcggagcttatggctcaacgactcatcaaacgatggaactttaatggaaagcgacgcccatacctgttgcagaatatcgcaagaccacaccagatgattagtgtcttccagtttgtacttacacagcgggcaatatgtgtccacacacaacattctcctcgccagattaccgaaatgcggcaccagattattaaacagcctccaaatgtggattttgattttaatcggaatactttatgaccacaaatctttggaaaaatctat

SEQ ID NO: 42508 - DNA, 259 bp, Gossypium hirsutum
  Clone ID: LIB3189-037-P1-K1-A2
aagcagtatcgttgtatacactcgtctagttgtcaatgcacaaagggtcatctaagtgaagatgtgatcttcttagtgtttcaacaactcaactggaatccgaagttgattgcgactctttcatgcgtatgcaaatggtttgatgatcttgccaagagagtactatggaaagaattctgcataacaagggccccaaagatgatgcttgatctgcaatctagtggaagtcacagtgttgatgggaactggagagcccttg

SEQ ID NO: 42509 - DNA, 297 bp, Gossypium hirsutum
  Clone ID: LIB3189-037-P1-K1-A3
cccacgcgtccgcaaagcgtttgtcttagatctcagaagatggcccgtaccaagcaaactgcgcgtaagtcgactggtgggaaggctccaaggaagcaacttgctaccaaggctgcccgtaaatctgccccaaccaccggtggtgtgaagaagcctcatcgctaccgtcctggaactgttgctcttcgtgaaattcgaaagtaccagaagagtactgagcttcttatcaagaaattgcctttccagaggcttgttcgtgatattgcccaggacttcaagacttgattgcgttttcag

SEQ ID NO: 42510 - DNA, 268 bp, Gossypium hirsutum
  Clone ID: LIB3189-037-P1-K1-A4
ccgaggctacgacctcacgcgtacagtttgattatttagcagcaaaaagcctctttctcccaaaacatctttaactgttccttcacctactttcagtttgcttgtgcttcagcttttcgcatctctttccttttctttctctgtctgtaactctcaccatttccactcctaaacttccaattgtgggcaccccgaccaactacgccaccactaaaacatggtgtcttccaccgccaccaccaccctatgatcaccaccccaccaacat

SEQ ID NO: 42511 - DNA, 225 bp, Gossypium hirsutum
  Clone ID: LIB3189-037-P1-K1-A5
atggtcacgagtggaatgaagtcgggtttaatcattatattaacacactttaggttagccaaaacctatatttttttaattaatatacaaattgtatatatataatttaacagttttaatatgtttatttattacttctaatttctttagtgttagaaataatttaatatattaaaaaaataaaaaagcaataaaaaattggttttttattgggcggccactttt

SEQ ID NO: 42512 - DNA, 222 bp, Gossypium hirsutum
  Clone ID: LIB3189-037-P1-K1-A6
tccacgcgtaggtccactcgttcgggaagcgaatgtttatctctttccccctatgaagctgacctaccaacacctgctaagggaatcctacccacaactactactagtctactacccagcactagtagcaagtactaggccgtcatggttgaagcaggcgttgtcgtatgcataggaactggtctcaaggaatgcatcctcagcagggttctttctgtggac

SEQ ID NO: 42513 - DNA, 276 bp, Gossypium hirsutum
  Clone ID: LIB3189-037-P1-K1-A7
gcacgttgtggaagctcaaaagatgagtgaaaatgagatagctgaaaagcagattgtttgtgaggataaaactgttggaaatcctgcccaagcttcagttgcaaagatagaaaccgcaacagtggtacaagaggaatcaagtttagaattaccaaagtcagatccagaaggtaccaagggttcagataatcagatttccagggaattagagccgattgaaaacacagagataacatgttcacctgtaaaagaattgttcaatagatttgcaagaca

SEQ ID NO: 42514 - DNA, 127 bp, Gossypium hirsutum
  Clone ID: LIB3189-037-P1-K1-A8
gtcacgcgtgcgcttaaatgcaaatgcaaatggatagggcgtgccatggcaggctgggcgctaaatgcgactggtgggaaggctccaaggtagcatctcgctaccatagctgcccgtaaatctgccc

SEQ ID NO: 42515 - DNA, 184 bp, Gossypium hirsutum
  Clone ID: LIB3189-037-P1-K1-A9
aagaactatatttcgtttctccacaactaaaccttcaaatctttttaggttggattgccgatccaaacgacgccctaaaccaaaagtcatggccaccccttccgcacgtgacgaaaacgtttacctggcgaaactcgccgagcaagccgagcgctacgaggagatggtcaagctcatggagaac

SEQ ID NO: 42516 - DNA, 63 bp, Gossypium hirsutum
  Clone ID: LIB3189-037-P1-K1-B1
taccctcagatccagtcacccacctcgcccacctccttctgcctttatatatccccttaactt

SEQ ID NO: 42517 - DNA, 340 bp, Gossypium hirsutum
  Clone ID: LIB3189-037-P1-K1-B10
cttctttcaaccgcgcctaataaccgctcggatttttctcagacgtgaaaaaaatggggctgtctttcaccaagctattcagccggctatttgccaaaaaggagatgcgtatactgatggttgggcttgatgctgctggtaaaaccaccattctttacaagctgaagttgggagagattgtcactaccattcccaccatcggtttcaatgttgagaccgttgaatacaagaacatcagcttcactgtttggatgttggtggccaggacaagatccgaccattgtggagacactatttccaaaacatgcaagggactaattttcggggtgatagccatgat

SEQ ID NO: 42518 - DNA, 280 bp, Gossypium hirsutum
  Clone ID: LIB3189-037-P1-K1-B11
gaaaagatgcaggcgattacaaggcgattagggcaccaatctctgaggccaactgcttgaatctcttctatcaagtctatttaccctctctccggtcactactatggaggtgatcatccgcgatacggatctacactggcttcccacaagggcatgggccacctcgttcgcaagggcaccggtggccgatcttccgtcagtggcattatagctactgttttcggcgctactggattccttggtcgttatcttgtgcaacaactggctaaaatgggatctc

SEQ ID NO: 42519 - DNA, 346 bp, Gossypium hirsutum
  Clone ID: LIB3189-037-P1-K1-B12
tggatacaaagtggctgatttctgtatcgaagccgagtggcggccttgttattgctcctccgctaaagaggccatcactagcagcggcaagatcttagtctccgaacaaggggaatccaagattgtttccctgaattcaagcaagttgcaactggaggatatatcggataccctttattcacgtccttcgttagtggccgaggtctcgaaactcaccgttaacgagctgaagaagttcaagttagacggtaccgccgagacgaagaaagggtcgacgagatcgacatttaccatcaactccatcattgtagaaatgcttcaaggcaagatggtcggtagacaactg

SEQ ID NO: 42520 - DNA, 450 bp, Gossypium hirsutum
  Clone ID: LIB3189-037-P1-K1-B2
ctcaattattgctttttgtgctttattgttgttccccttaactctgcaaaaagaaaaaaaggaaatacacagttatcatcagccttgagaggggaggaggaagagagaatcaattctcagcctcgagaataaaagagaagatttgaagacaacggataaacacaaaagcatgaaatcatgtgaaagaaagttattagtatcttatctcagctcttaacctccatcacctctttctttttctcctttatttatttttggtttgcaaccaatcattcaaacaacaagacaaccaccaccgtcctacgaccacgttcactctctcttcttttatatttaataaaagaaaacagctggtcctttttgtataaaatcaagaggtttatccaagctttcatctctattgcttttcctctctttctggtgaagaagagagtgaacaaaaatggagat

SEQ ID NO: 42521 - DNA, 210 bp, Gossypium hirsutum
  Clone ID: LIB3189-037-P1-K1-B4
acgctaaactatacttttttttactttattgtccttccccttaactctgcaaaaagaaaaaaaggagaacgcggttctcatcagcctcctgaggcgaagaataagaaagactcacctctcaatctcgagattaaaagagaagatttcaagacaaccgatatacacacacacacgaaatcatgtgaaagaaagttcctagaatcttatccc

SEQ ID NO: 42522 - DNA, 399 bp, Gossypium hirsutum
  Clone ID: LIB3189-037-P1-K1-B5
cggacgcgtgggtaaagccaatgattagaggcatcgggggcgcaacgccctcgacctattctcaaacttgaaataggtaggacggcgcgagggcttgaggaagacagaatcaattctcagcctcgagaatcaaagcgacgattggtagacaacggatcatcacaaaagcatgacatcatgtgaaagaaagttcttagcatcttatctgagctattaacctccatgacctgtggtctttttctcctttatttactttgtggtttgcaacccatcatttcaaacaacaagacaaccaccaccgtcctacgaccacgttcactctctcttttgttatatttaataaagggaaacatgctgccctttttggataaaatcaaaaggtccatccaagctttcatc

SEQ ID NO: 42523 - DNA, 330 bp, Gossypium hirsutum
  unsure (1)..(330): unsure at all n locations; Clone ID: LIB3189-037-P1-K1-B6
ctcgtttcttccgccttctcctcactttcttgtctctttgattatatcgctcttcctcccccttgtttctcttcctctctcactctctgtcggactcagaactgaagtaacaaaatgaatagcgcttcttgtgcagccaagatcagtacgcagcctttctctctcaatcccacttcccctacatctcacgacaaccccctcgttttccccaaacccacctcctttttcctcggatctacccgcaaactccgcctcagttcttcttccaaattgaatctncaccgtcgatctgggaccgtcgctgccgtctccgatgttggtaagcaaaag

SEQ ID NO: 42524 - DNA, 371 bp, Gossypium hirsutum
  Clone ID: LIB3189-037-P1-K1-C10
cggacgcgtgggcttcactccacatttcacactctttttcaactttctcttcttctctttgtttgaaagaggggctggagttttagccaaagaaaactccatggctaaacttgttgctactttcttcttggctctcattgccatctccatggttcaaactttggttatggcatcacatggacatggtggtcaccattatgataacaaacgttatggacctggaagtctcaagccttaccaatgtccatctcagtgcacaaggaggtgtagccagacacagttccataaaccatgcatgttcttctgtcagaaatgttgcaagacatgccctttgtgttcctccagggtttattggaaaaaaccaagtttgc

SEQ ID NO: 42525 - DNA, 220 bp, Gossypium hirsutum
  unsure (1)..(220): unsure at all n locations; Clone ID: LIB3189-037-P1-K1-C11
agataaatcacaaagntcccagaagggactacaaattacattacccatctcttccatttctattagtgaaaacaatacaaatttatacttatctcctatttccatgtattttacaaaaacttattttataccatcacattgtcattttggccaccatcttgataacattacattttcaccctaaatgtttaagccttaccaattttcatcttaattctca

SEQ ID NO: 42526 - DNA, 242 bp, Gossypium hirsutum
  unsure (1)..(242): unsure at all n locations; Clone ID: LIB3189-037-P1-K1-C4
cggaannnnagggtcgacgccacgacgtacgcgtactcgtagaattcatgttctccaaccattcttttacattcatccatagaaccaatatattagacgagtgggatgcttttttacccatccaaatttctaatccaatcatcatcaccctcatagtttatatttccatgttattactttgttcacacccaaaaatagcttaacgaaccattattagacttttgcgtattcatcaaatgaca

SEQ ID NO: 42527 - DNA, 56 bp, Gossypium hirsutum
  unsure (1)..(56): unsure at all n locations; Clone ID: LIB3189-037-P1-K1-C5
cttacacctggacttcactccatatttttttttttttntaaacaaaatataaatct

SEQ ID NO: 42528 - DNA, 211 bp, Gossypium hirsutum
  Clone ID: LIB3189-037-P1-K1-E9
cccacgcgtccgtggttacaaccaagaggattctttggtaatgaaccgggcctcgatagagcgtgggatgttccgcaccgaacatgtaagaagttacaaagctgaagtagataacaaggaaatccaggagaagaggcggaaggctgaagatattgtaaactctggaaaaacggaaagtaagatcggacgggtggacagtcttgatgatgat

SEQ ID NO: 42529 - DNA, 238 bp, Gossypium hirsutum
  Clone ID: LIB3189-037-P1-K1-F1
gcgcccacgcgttcgggatgctgaaactcggcttgagcattgttttggataaagagaaggaagaaaagaaatggatgaagattaaggaggtgtcgcactagtggtctttggtgaacaaacagaagcccatctggatgaggaagcctgaggagattaccaaggaagaatatgctgctttttacaagagccttacatatgactgtgaagagcatttggccttcatagcacttttcatttt

SEQ ID NO: 42530 - DNA, 144 bp, Gossypium hirsutum
  Clone ID: LIB3189-037-P1-K1-F7
acgcatagccaaattatcatcaatgcaatcagcactaatgcacaatgacgagaatgaataaaagaaacggcttttaattatggtggtttctgccaacttggttttttttttacacacaaaatcccatcttaattatgaagcctg

SEQ ID NO: 42531 - DNA, 243 bp, Gossypium hirsutum
  Clone ID: LIB3189-037-P1-K1-F8
gaaatcagattcttttttttggaatcttggtggtttttatttaaatgtggatggccttcttttgggaacattgttatgtatacttttatttatctttttttttttatattatatttgttttatcttttttttcttttttttgtatttttttttgtttttttttgtttgttttttttttttttttttttttttttgatttttttttttttggttgttttttttttttttttgtttttttttttt

SEQ ID NO: 42532 - DNA, 101 bp, Gossypium hirsutum
  Clone ID: LIB3189-037-P1-K1-F9
catcaaaaaagttatatgcagtttcatatatatatcccaaaaaagagcttaacagttttccttacattttttctttcattggcttgtattctttgttacat

SEQ ID NO: 42533 - DNA, 203 bp, Gossypium hirsutum
  Clone ID: LIB3189-037-P1-K1-G1
atcaaaaaagtaatatgcagtttcatatatatatcccaaaaaagagcttaacagttggcctaacaaagcaacaaacaaaggcaggaatacagcggcacagcaataaaaaggtttaggaagatattatctacttaatatattgagagacccatttgaagccgtcaccatatcccattttgcgaacaatgctgcacataaacacc

SEQ ID NO: 42534 - DNA, 288 bp, Gossypium hirsutum
  Clone ID: LIB3189-037-P1-K1-G2
cccacgcgtacgctgtgttgtttggaaaggtgcttcaaccactcctctggttacaatagcaacagacaaaattagtggctgaagttttggaaaagaataacttacctggtgcaattttcacatcattttgtggcggtgctgaaattggggaagcaattgcaaaagatcgacgcatttatctagtttcatttacagggagttcgaaggtgggtgttaaagttcaacattcaggaaatgagaggtttggttaatgcttgctttgacttaattagtacttcgctattattt

SEQ ID NO: 42535 - DNA, 138 bp, Gossypium hirsutum
  Clone ID: LIB3189-037-P1-K1-G3
gcgcccacgcgtacgctgtagatgtttgaaaaggtacttctaccacttccatagatacaatagcaacagacagcgggcagtttctgttgattcggaaaataataacttacccgttgcattttctcacattattttttt

SEQ ID NO: 42536 - DNA, 459 bp, Gossypium hirsutum
  Clone ID: LIB3189-037-P1-K1-G7
ctaaatcgcgagctgtcgcgcttttttttgtttttttttcattaaaaaagttataatctcttggagatatatatcccaagaaagagcgtaacagtattccttacaaagcaacaatctaaggcatgaattcagcggtgcagtaattaaaagggttagggagattttatctacctaatatatttgtgagacccattttgtaggtcgtaccatattcctttttgtgaacaatgctttacataaacaacctaaggggttgatcgtgggattttgtaagaattgatcttgtcctttccagtcgtgatttaggcttgcctagttgattatgttagctaatttttttatcttattatgggatgtcaattcttgttgcctataattagtaatatggacttttgccaatgtgttttttatggagagaggcgcttttaatttcctttttgcgttttaaaatattttttt

SEQ ID NO: 42537 - DNA, 257 bp, Gossypium hirsutum
  Clone ID: LIB3189-037-P1-K1-G8
aaatcaaatgacaatcaggctcaagctcaattagtttcaaccagacataaaacatgaaacaagttggcttccatctatgtttaatgtgcttttcatatgattgcatagaagattccagaagggatgaaaagtttgctacaactaccatgatcctatagcaccctgtgcagggttctcaaaagcagagaattcccagtacggtttcaatgaatatgggttggaaattgttacaccattttttagtatttttagctatt

SEQ ID NO: 42538 - DNA, 251 bp, Gossypium hirsutum
  Clone ID: LIB3189-037-P1-K1-G9
acagacgcgtgggaaaaaaaaaaaaaaaaaaaaaaaaaaaaaaaaaaaaaaaaaaaaaaaggaaaaaggaaaataaaaaaaaaaggaaaaataaaaacatgaaacaaaaataaattaaatttaaatttaaagagtcttcataaaaaaaaattgggggggcgctttaaaaaagaacaaaaaaatatctgcatcaacaaaaatccaaaaactttataaagggaagccaaaaaaaaaaaaaaaggcgcactttt

SEQ ID NO: 42539 - DNA, 105 bp, Gossypium hirsutum
  Clone ID: LIB3189-037-P1-K1-H1
gcgtacgctccaacacctctctttctctctcgccaacgcaattgactgcttgatggcctgaatactttaacgagcagagctatctcaccttgggagcaagctctc

SEQ ID NO: 42540 - DNA, 97 bp, Gossypium hirsutum
  Clone ID: LIB3189-037-P1-K1-H2
cgctccgattaacatctaataattgtcactgctaagccctcgccttttgctgcggaatctgcggtgcgactcgctttggctagttctagtgcaatgg

SEQ ID NO: 42541 - DNA, 246 bp, Gossypium hirsutum
  Clone ID: LIB3189-037-P1-K1-H3
acgcataaatggatagcacaaaagttaagaatggatgtagaaaggatccgccaacaaaggctcctaaaatttgagcaaagctcccagcaggtgcaaaagaattgctcacctgctactcctcatgtaccgatatctgaaaccactatgactccaattgcacagaggatctgatctaaaacatgctccatgaccgctcctcgcatgtaatggactctaacgccatgtcccagaacaagaggtacatca

SEQ ID NO: 42542 - DNA, 192 bp, Gossypium hirsutum
  Clone ID: LIB3189-037-P1-K1-H7
ctttaccctccatctctctctccaaaaagattttattattgggaaagcaacattgcgagaatcagttagcttattgttgtttcacactttcaagctctcatggctgccattattgaatctgtgtggccgcatctgatcacgcatttcagtggactgcaactagcatatttatgaagtgtccattttcacata

SEQ ID NO: 42543 - DNA, 454 bp, Gossypium hirsutum
  Clone ID: LIB3189-037-P1-K1-H8
atcacagataactttattagttaggttagtgagtgagaaggtcttcattgcatgggtgaattcagcaatgctaaaagcttttcaatgggaaatgaacatatttgaatcaacatatacagagatctcaaacacttatgatgcagatggagcaaagggtttgtcaagaagttggattcaaaagcttccaatgcatgaaattcaagctagtcctatgtttcaatcttcttgttcaatttgcttacagggtctaaaacatggtgaaatggcaagaaatcttccgagatgtaagcatatgtttcacttaaattgcatagatgaatggctgagcaaggtaggcacctgtccaatgtgcagagaccatgttttttagatttggaaatcttcaaactttgatttatgaacagaaacatatatatatatattaatggggattgggtttttaaattgatttcat

SEQ ID NO: 42544 - DNA, 265 bp, Gossypium hirsutum
  unsure (1)..(265): unsure at all n locations; Clone ID: LIB3189-037-P1-K1-H9
cttagggattgaagaacagtagcttagcagccacacatttcccctcttttgaaccttccccctcctaaagaaaaatggattaataattcaaaatctccactggattagtcgtattaggtcagtttatcactccatttccctttgaatcaagtcagtttttatgccatggaagatacaaagtcagttgcaacactcataggctcgacagcctccaagatacagcagcttcaaaaagcatntgctgaaactgaaagtcaacgtgctc

SEQ ID NO: 42545 - DNA, 345 bp, Gossypium hirsutum
  unsure (1)..(345): unsure at all n locations; Clone ID: LIB3189-039-P1-K1-A2
cgcgtacgcggacgcccacgcgtccgttgcattttacttctattgattttattttctcttgtttgaattggatgcctgagtgactatatccctcgcgggtgcacctactaccgaccttgatcttttgagaagggtacgagagagagcatgcctgtcgggacccgtaagatggtgaacaatgcctgaccttggcgtggacacaggaaactctgagagtgggattcttctagactggtggagctgcngatcgaccgactcggggataggggcgaaagactgatcgggccccttaggggctggtttctccgctaagtttctttatgactattggagcctttttctaga

SEQ ID NO: 42546 - DNA, 360 bp, Gossypium hirsutum
  Clone ID: LIB3189-039-P1-K1-A7
cccacgcgtccgaagaagagagaaaaaaatgaagtctcagatctgtttagcctttggaactctggccttgttgttagcttcagctttggccgatgacgtcgtcgtactgaccgaagcgaacttcgataaggaagttggtcaagatagaggagctctcatcgagttctatgctccttggtgtggacactgtaagaagctagctcctgagtacgagaagctcggggcaagttttaagaaggctaaatccgtcttgattggaaaggtggattgtgatgaacataagagtttatgcagcaaatatggtgttcaaggctacccaactgttcaatggtttcctaaaggctctttggaacctaaaaa

SEQ ID NO: 42547 - DNA, 390 bp, Gossypium hirsutum
  Clone ID: LIB3189-039-P1-K1-A8
cccacgcgtccgttgcattttacttctattgattttattttctcttgtttgaattggatgcattcttattcatttgcttgcttccctgtttcatttctatagttgggcttttcaaggattacaatcaattcatatttctgagattcatgtttgagatgagttaattgtttttttccctcttcgttttagcttatttgaacattttgattcttctcgtctggtggagctgcacatggaccagtacgagaaagtagagaagattggtgagggaacctatggcgttgtttataaggctcgtgatcgtgtcaccaatgaaacaattgctttgaagaagattcgcttaaagcaagaagacgagggtgtacctagcactgcaattagagaaatctc

SEQ ID NO: 42548 - DNA, 476 bp, Gossypium hirsutum
  Clone ID: LIB3189-040-P1-K1-D11
ggaaaaggaaaacgaagaaaatggcgtccctctctgcccaaatccctctctgcttggccttaatgatggctgcctgtttgatgataggcatcaatggaagcatagatggagctcagagggagttcgattactttgctttgtctcttcaatggcccggcaccatctgccacaagactctccattgctgctcctccaatgcctgctgccgaggctcgaactctccaactgaatttaccattcatggattgtggccggattataatgatggaacctggccttcctgttgttaccgatctcagtttgatgtcaaagagatttcaacattgcttgatgcacttgagaagtactggccatcgttatattgtggcaaatcatcaacctgcttcagtggaaaagggttattttgggctcatgagtgggagaagcatggaacttgctcatctccggttattcgagatgaatacagctactttata

SEQ ID NO: 42549 - DNA, 480 bp, Gossypium hirsutum
  Clone ID: LIB3189-040-P1-K1-D12
gccaattgtttgagctagctagctcttactcaaatggcaaccaaaacgatgatgttgcaaatatttccacttttcttctttttgttcagtgtctgcaactccattttccttggtgctaatggagatgacaatggtggttggcaaactgcccatgccaccttctacggtggtgctgatgctaccggcacaatggggggagcttgtggttatggaaacctgtacagtcaagggtatggaacgagcacagcagctttgagcactgcacttttcaacaatggcttgagctgcggtgcctgctacgagctccggtgcaacaatgatcctcaatggtgcattagtcgaaccataaccgtgacagccaccaacttttgtccacctaactatgctttaattagtgacaatggcgggtggtgcaatcccccacgagaacactttgatttggccgaaccggcattcttgcggatagcaaaatatcgagct

SEQ ID NO: 42550 - DNA, 481 bp, Gossypium hirsutum
  Clone ID: LIB3189-040-P1-K1-E10
gaatagagaagaaaaggggctgaagatctagtcaagatcaagctagaaaataccaaaaaaagagaagcttgtgatggggagggaactgacagaggtgcacatggatgttaagccaaacggtttagtgaaatcgattgttaatcgtgttaacttgcagggcaccgagccaaataacttaactgtcaaaaaaggaacaaccgaaaactcggtcattgaggatggtcaggaaaagcaagatgtgctatgtgttaaaaccacaaattttagtaccgacatccctgaagagaaaaatgaaaaggctgaagatcagaagtctgctgacaatatgttgagcactgctgaatctactagagttgaaaatactcattcgaatgacactacttccgaaactggtgcaaatggcatggaaactgttaactctacaccttcccctacttctgcaaaggattcggagccaaaccgtcctatgactcctttgatg

SEQ ID NO: 42551 - DNA, 68 bp, Gossypium hirsutum
  Clone ID: LIB3189-040-P1-K1-E12
aaaaaaaaaaaaaaaaaaaaaaaaaaaaaaaaaaaaaaaaaaaaaaaaatgggaacactatatagggg

SEQ ID NO: 42552 - DNA, 486 bp, Gossypium hirsutum
  Clone ID: LIB3189-040-P1-K1-F10
accaaatcaaaatgtctctggtggcgaacgaagactttcagcacattttgcgtgtactgaacaccaacgttgatggaaagcagaagattatgtttgctttgacctccatcaagggtattggaaggcgtttcgctaacattgtttgcaagaaggctgatgtcgacatgaacaagagggctggtgaattgactgcacaggagctggacaatctcatgaccattgttgcaaaccccaggcagtttaagatacctgactggtttttgaataggcagaaggattacaaggatgggaagtattcccaagttgtgtctaatgctctcgacatgaagttgagagatgacttggagcgattgaagaagatcaggaaccaccgtgggctgaggcattattggggtcttcgtgtacgtggtcagcacaccaagaccactggtcgcagaggaaagactgtaggtgtctctaagaagcgttgaatgtttcatatatgtt

SEQ ID NO: 42553 - DNA, 456 bp, Gossypium hirsutum
  Clone ID: LIB3189-040-P1-K1-F11
acggtgcttctacctttccacgcaatctcaactcccccccttttagagatcggataattttcagttctcgaattatttcccctctgtatttgtatgatagctgtctggttcaagactaacacttagttacttattcaagggttctatttgatcaagttttctaggactttttacattgcattatattgttcagtgctttggagctttgcatcaggatttgtcatctgattttctttgtacaagttaacaagtgacgattctatagttttcagtttgcgtctcacagagatacagattacagaagcctgcggtaggaaatatattcaaagttcagtgtcctgcatgttcaagatggctggtgttaaacgaagaataattactgatttggatgtccgtgctctccataaagaactggatgaagtctcatgtccaatctgcatggaccatccacataat

SEQ ID NO: 42554 - DNA, 113 bp, Gossypium hirsutum
  Clone ID: LIB3189-040-P1-K1-F12
agagcgggggcatggaatacgctgattacttgcaacattatattctatagcccgagcaaggaaactttcgcacgtcagaagcttgcagatatcacactaaatgacttcttggt

SEQ ID NO: 42555 - DNA, 487 bp, Gossypium hirsutum
  Clone ID: LIB3189-040-P1-K1-G10
accaaaacaaatattagaaaccctactcccaaatagaagtttgattgagctctctcatggcgttttctacccgtctcctctacaaatctcgccagctttatgttagtcaagctgttctgcggcaggaggttgccattcctgtccggttttactctaaagaggcttctccccctggtttaaaaggagatgagatattgaaaaatatctttgtggaggttaagaacaaattcgagacagcattgggaatatttaggaaggagaaaatcaccattgacccagatgacccagctgctgtctctcagtatgcaaatgttatgaagactgttagaaaaaagggtggcttgttttcagaatctcaacggatcaaatacaccatcgaaacacgaactcaaggcattccagatgtccgaacatatttattgacacttgaggaaataagatccaagagaggactcactgatgaacttggtgctgaggctatgatgat

SEQ ID NO: 42556 - DNA, 456 bp, Gossypium hirsutum
  Clone ID: LIB3189-040-P1-K1-G11
tatcttaaccttttcttcttctttttttccctaaatgtcttactcctcattatggttgcagacatatgaagagtacctagaagcccatggcagaaccagcaaacaactatgccgccctgtgatgataccatctccgacagtacaagagtcaacaagtggaaagcatggagatgattcaaactcaagtttggtaaccgaccggcgccattctcgtaagaggacacataactcgtcctagattgtttccagctccagtgcttgagagatcgtggtttttttttctcctgtccattatcatctggtggagctcaaatttacctcaaggtggttattaagtgtaagtaaaaattgttaattgaatacgatacttgagaattgagatacaatttagacacataattttgtcatgctgtacacatttatgtactctattctatgaactgattgtagtatttt

SEQ ID NO: 42557 - DNA, 207 bp, Gossypium hirsutum
  Clone ID: LIB3189-040-P1-K1-G12
gcagtttcactcccttagagagggaaaaccatggcggccgcagctcaaatcagcaaaaagcgaaagttcgtcgctgacggagtcttcttcgctgaactcaatgaggtcttgactaggggactggccgcagatggatactctggtgtcgaagtcagagttactcccatgcctactgagatcattatcagagccactcgtacccaaaat

SEQ ID NO: 42558 - DNA, 464 bp, Gossypium hirsutum
  Clone ID: LIB3189-040-P1-K1-G4
ttttgttcaaggaccacttcttaccttccattttactttgttttacgtgccataacgtcaccttccaatacaacccacaatgaggcaacaatatgtcttcactactctcacgttgctcatcctgttttccctcagttgttcaacaacattagcccaagctccggcactggctccagcaccttctggtccgacaaacgtcaccaagatcctcgaaaaagccggtcaattcaccctcttcattcgtcttctaaagtgcactcaagtggccaaccagctgctcggtcagctcaacaattccaacaatggtatgaccgtttttgcaccaacggacaatgctttctccagccttaaatcgggcacattgaatttactcaccgatgaacaaaaaggggagctggtgcaattccacatcgtcccaaataccttaacctgtttgagttccaaaccattagcaatcctttgag

SEQ ID NO: 42559 - DNA, 402 bp, Gossypium hirsutum
  Clone ID: LIB3189-040-P1-K1-G6
cccacgcgtacggcgtcctgtgatggattcttgctggttttactagctggaggcccttctcgtgctttctctcgtcaggattctcaaattatagaggacgatttcaaagcccttaaagatctgttttgggccaatggtgatggtttgcctgctgacctcatagataagttttcagctacagtgagagatgtccttcccctattcagaaccgatacagagagcctaattgagcggttcaaacgtatgaccttggaggcatatggctcctccgcaaggtctaggcttccactacctccaacatcaggacagtggaatcctactgaaccaaacacgctcctgcgggtgttgtgttaccggaatgatgaggcagcttcaaggttgcttaagaagacttacaatcta

SEQ ID NO: 42560 - DNA, 466 bp, Gossypium hirsutum
  Clone ID: LIB3189-040-P1-K1-H10
cccacgcgtccgaaacttcaaaaaacatggctctcaaatggtttctcagttcggcatttactcaagtttttggccataccgatggcggtcacttgcatgccaaggcagtggtatcgtgccctaacgaaggacttatcggttgcaaggaaatggaaggagggatcaccagcatcaaaacctgcaaggaagactaccctaatggcttccaaatgccagttcattatcctcgatactcgaaggccgattatgagaagatggaagaatggaggatcgatatgttgttgaaggaatatggattcagctttaatggtggcaccgtcgatgagaaaagggcttttgccatgggagcttttctttggcctgaccaactttaagttacatatatacatgtatgtatatcatgtttgattggtagattgtgtgattaggaagtgcttgcaaaaaggatgcttttatttatgctttg

SEQ ID NO: 42561 - DNA, 481 bp, Gossypium hirsutum
  Clone ID: LIB3189-040-P1-K1-H11
attttacttattccgcgaatcggacgcggggcacggaccctctttttggacccaaggccggcttcggccggccgatccgggcggaagacattgtcaggtggggagtttggcttgggcccctcacctgggacttgataacgcgagtgaactaagatgaggtatcaccgaacagaaaactctggtggaacaataccctaatggcttgcaaaatgcctgattattatcactaatactaaccggccaagtatgagataatggaacaatggaggatcgatatgtggaggtaggaatatggattcagctataataggggcacctgcgatgagaaaagggcttttgccatgggagcttttttttggcctgaccaactttaaattacatatatacatgtatgtatatcatgcttgattgggagattgtgtgattaggaagtgcttgcaaaaaggatgcttttatttatgcttaggggatattgagatgt

SEQ ID NO: 42562 - DNA, 482 bp, Gossypium hirsutum
  Clone ID: LIB3189-040-P1-K1-H4
acttgaccgtgatgcttgtgggaacttgaattccatgatatatccttgttgtgacgatttgagagacctgaaaagtggtcactaccacaagattgtagaaattacagagaatgcttcacaatgcctcgaggacgaatacatggtggacaagccatcttgttcgactccaaggaagaggtcattcaaccttgcgagtgtttcatccattgacgaactcagaactcctccattcgaggagttattgaagttgttttgggaagcaaaatctgcaaaactagcgaatggagatgtaaaacatatgctggcagcatatgaagcagcccaagccttgaaagacttcaaagttccactcactggtataaactaaaagtgagatggaaaggaacaaacatatttaaaaaaacaaaggccgagtatagtatagtgttaagaaccaaaagtgtgtacagattcagaaccatttcaatcttttttttttcttt

SEQ ID NO: 42563 - DNA, 441 bp, Gossypium hirsutum
  Clone ID: LIB3189-040-P1-K1-H5
aaacctttaggcggcgactactactcgagcttcataacacacgaagcttttaactatggcgggtgtagagacggaggttgcggcggccggtgtgcccaagaagagaacattcaagaagtttagcttccgaggtgtcgatttggatgctctccttgatatgtccactgatgagcttgtcaagctcttccctgctcgagctcgcagaaggttccagaggggtttgaagagaaagcccatggctctaattaagaagcttcgcaaggcgaaaagggaggctccacctggtgagaagccggaaccagttagaacccacctgcgtaacatgatcattgtacccgaaatgattggaagcattatcggtgtgtacaatggcaagacattcaaccaagttgaaatcaagcctgaaatgattagccattaccttgctgagttttctatttc

SEQ ID NO: 42564 - DNA, 279 bp, Gossypium hirsutum
  Clone ID: LIB3189-041-P1-K1-A1
tttaggaaagcatcttcaagtttcaagcttttgggttcttttctttttccttcatcttctttctttctttctttctctttacatttgggaagcagaaggaaaaaagcaaagatgaagcttttgtgggtttgggttgttttaccatttgcttttgctcaactggttactgccttctttgattttaatgaaactgagctgtctcttatcgagtctttggaatatggggtctctaaaatcaattataatcctctcatgggtgggctcactcttattcatact

SEQ ID NO: 42565 - DNA, 340 bp, Gossypium hirsutum
  Clone ID: LIB3189-041-P1-K1-A10
gttgaggcaaggtctctggaggatatacataaagctgttcgacaacttccggaatctaatccaggtgagccgccgcattcttcaggcttaaggaatgaatcatcaacagatacgaatactgagactaatgtggtgcttccagttcttgaaacaaggtcagcagaagatattgatttggcttttaagcaacttcatgaaggagtcaatgttccgagtatgattgagaaactgccagatcttggagataacaaatcaaaattacctgttgttgaggcaagatctctggaggatttaaaccaaatctattcaacaacttgcgaaacctaatccagcatattct

SEQ ID NO: 42566 - DNA, 344 bp, Gossypium hirsutum
  Clone ID: LIB3189-041-P1-K1-A11
cggacgcgtggggcaaaaccccatcacaaagaatctctctcctttcattcttccaaaaaagaaagtggcaaatttcaaaacagatcgtaatagtattagcgatggatcaagaggtggtcggacgccacgcgctgctcttcgacgacgacgccatgggcgccttcgttaactctccggaggctctcgttgactggaactccctcgccatcgatcgctatgatgtgcgtcaccttctctctggacctcctccgcctcgaaagagacggcgccacctttcatcttctttcgggaccgccgatgataagttggagtccgatcttgaaccgtgagcgttatcttcgatt

SEQ ID NO: 42567 - DNA, 264 bp, Gossypium hirsutum
  Clone ID: LIB3189-041-P1-K1-A12
cggacgcgtgggaaaatattcttacgacgatctctttgatcatcactttcatgtctttcaagcggctttcacaaaacgctctcttaagcaacgcttatcgctaacccccaaaacgccattgctgcttcttcttcttctttttcatctgcaaatcatcaatgacgaaagcaaagtcccaagccgtggctggttctatagacccaaacaaaaacgggcttcattaccaccatcaagacggtgacgacgtcgcttttgacccttcat

SEQ ID NO: 42568 - DNA, 390 bp, Gossypium hirsutum
  Clone ID: LIB3189-041-P1-K1-A2
ttcccttccattttactttgttttagttgccataacgtcaccttccaatacaacccacaatgaggcagcaatatgtcttcactacggtcacgttgctcatcctgttttccctcagttgttcaacaacattagcccaatctccggcactggccccggcaccttctggcccgacaaacgtcaccaagatcctcgaaaaagccggtcaattcaccctcttcattcgtcttctaaagtccactcaagtggccaaccagctgctcggtcagctcaacaattccaacaatggtatgaccgtttttgcaccaacggacaatgctttctccagccttaaatcgggcacattgaattcactcaccgatgaacaaaaagtgcagctggtgcaatttcaca

SEQ ID NO: 42569 - DNA, 434 bp, Gossypium hirsutum
  unsure (1)..(434): unsure at all n locations; Clone ID: LIB3189-041-P1-K1-A3
gtgaagcgttagaggctaagggctgcggcgctaggaaaccctaggtttccgtttggctgaacctaggtctaggttttgggccattgggccttttaggcattgggttatttgattgggctaggttgttttgtaaatgggcttgtaactgggctattgggtctgatatgtaatggactgataattagattttttattatttggttttttttatattttgtattttggttcttctttgggcctaggcaaaaatggcccattacaattattattttattggattctaaaaataaatgacatcaatttaaactgaaagaatttcttttacttccnangaaaaaaagaataaaaataccgaagaacaaaaagagcaaaatggagcgattncacattaaacgaacaaaccttaaattagtttaatttccaaaccatataac

SEQ ID NO: 42570 - DNA, 264 bp, Gossypium hirsutum
  Clone ID: LIB3189-041-P1-K1-A4
ggaacgaggggcagaaaatgatgttgaaagtgaaaagacccagattagcaatggtagtgttacactctcggaggcagagaaaaagcatgaattttatgtttcaagccctgaaaagccaaatgaagttatgccagaagcttttgtgctccaggaaaaaaataatattccaaagttttacgcttcagcaaattcaaaagacaatggaatttctggtggatgtcaattttcagcgacatctataatatttgcaccttctttcatttt

SEQ ID NO: 42571 - DNA, 411 bp, Gossypium hirsutum
  Clone ID: LIB3189-041-P1-K1-A6
tgaaaagaagagaaaaaatgcataatccaccaccaccagacccccaccatcctcatcatccccaccacccacatccgcaaccccatgctccgcctccaggtccgccacatgctgatcatcctcctccaggccatgctcctcctcctgggccaggcccccatgcgccaccgccaggaccaggtggtccaggtcatcatcccgagccacacaagcctcgtccatgatccttataccgtgtatacaatattatgtaagcttaggctgggtaccgtacttatgtaataaattaagaaaacctatttctactataataataataaagatgtaatttctacgttatggaggccatggcttatatgggcacttttatttttgcttaatttgtcatgagcatgaggattaatttgtctt

SEQ ID NO: 42572 - DNA, 452 bp, Gossypium hirsutum
  Clone ID: LIB3189-041-P1-K1-A8
aagaaaccgatttaccacccttttgcgtttattccattgatttctagagcttcatggctgaaaccgcctctaactccgccggttgcaccactaccaccgccgaggcgccagcgcctcaagaaaccaaaaagaccaccgaggcaccagtaagatgggccgatttggaagacgaagcttcggaagaaccgagtgctttatcggaagacaaaggtgcgccggaactcggagttgaaaacctaaaaatcgatgagagcaaaaagatcaacaagttcctcgacgaacccgaggactccaacatcaaagccgtcacagctggggagacaccatacacttcagcatttacgtttgaggaattgaatctgtcccctgaattgttaaaagggctatatgttgagatgaaatttgaaaagcctagcaaaatccaagctattagtttaccgatgattttgacg

SEQ ID NO: 42573 - DNA, 426 bp, Gossypium hirsutum
  Clone ID: LIB3189-041-P1-K1-A9
atccaatatgttttcttctctacttcaaaaattgttggtatgcttcacccctatccccgggcagtatctgcttctgtgacggtctcatcaactagtttgtaaataagataccttgctccagaggcctccattctgcaattgtcggactaaagatagcccagatggtacagagaaaggatcgacaaatatccatactactgttcaaaacgatccagtttacctctccaagtcagaaagtcatcctgtggaacgagagcaagcaggatttgaaggattctctgggcatcttcttcggagaaggtatctttaatcaattatgttttccatgatctagttgtactatcaatcaggtctactaccttcgataaattctggatactcactgttttatcttaaatccattatttatgttatactgtcctgctt

SEQ ID NO: 42574 - DNA, 391 bp, Gossypium hirsutum
  Clone ID: LIB3189-041-P1-K1-B1
caaatcggcagccttctgcatctcctcaaaaggttatagcagaaggaggtctcgaactagcagggaaagtggtacagattcatggagtccttatggataccccacgccaccacaatctgcatattctcaacaaaattattactacacgtcgcaacatcctagttatgcaccaccgccatcatataattatatatcgtgaacgcctgggtgtgtacataggactatggagaggaaatactcaaggatttatgataactaccagacatgggaccaggccaatacttatgggacagcagtgccactcaaaatggatctcgacaggcaaattctctcgcgtgttggacaaattagcagcagaaccaaatgcatgaagctttaagcaaacagacta

SEQ ID NO: 42575 - DNA, 287 bp, Gossypium hirsutum
  Clone ID: LIB3189-041-P1-K1-B10
acgcgtccaacaaaatgtaaagcaaatatctctcaaacttttctttcacaaccctttaaattacaaactgggcgtcaattctgggaagatggggggcttccacaaaacaaatcccactctctatgcatcatacttctcacaagctctcatggtgagagtctccctgacacctatttaaatcttaaactgatgaagtttgtacacacgcaagcctataattaattgactattagatgatggaatcattttcctttatgccttcaacttgcacaattcatacttcttgt

SEQ ID NO: 42576 - DNA, 439 bp, Gossypium hirsutum
  Clone ID: LIB3189-041-P1-K1-B11
cggaccggaactgaatgcccgggtcgaggcgacgcgtccgaaaaagggtatttgctttgccaatatagttgccttcaaaattttgctcctgtttcatggaataagggttgcatatcaagttttgctctggctttaacgtggagaccgtagaatataagaacattagcttcactgtttgggatgttggtggtcaggacaagattcgacctttgtggaggcactacttccaaaacactcagggtctaatctttgttgttgatagcaatgaccgtgaccgtgtggttgaggccagggatgagcttcatcgtatgctaaatgaggacgagctgagggatgctgtgcttcttgtgtttgcaaacaagcaagatctgccgaatgctatgaatgctgctgagattactgataagcttggccttcactcccttcgtcagcgccactg

SEQ ID NO: 42577 - DNA, 207 bp, Gossypium hirsutum
  Clone ID: LIB3189-041-P1-K1-B12
aaatgaggaaggctggcttccacagctacatgatggatttaattttaagaacttcagacttgtcagctgcacgagaccttgtgacttatgatgatggttcaatagtggtggtaacagaagctgatctcgatggatacgaccagagtcttggaataagtgccacgggaagtacaatatgggcagatcttaacatggtttatcgagtta

SEQ ID NO: 42578 - DNA, 159 bp, Gossypium hirsutum
  Clone ID: LIB3189-041-P1-K1-B2
gaaagcttaaatccgatctacaaaaaatctcaaatttgaaatttgaacttcgaagggttaaaacaaaacggtggttcctctaatctcgttttaacttcgtgatagcgattcgatttgattcgaatcggtagcttagcaaggatgggcgatttcaacctg

SEQ ID NO: 42579 - DNA, 208 bp, Gossypium hirsutum
  Clone ID: LIB3189-041-P1-K1-B3
tccgcgccccggtccggtgttggaccgggagaggccggtcctccattcggttcgggccttgacccacgcggggtgtggcggggggccaaggcccggccttttatacccccgtggggacctcgtcgccttgatcgggggatttaacacgcgccccctttgggtggttttggacctgggtgcttcgggggttgggcttggggcttcccat

SEQ ID NO: 42580 - DNA, 199 bp, Gossypium hirsutum
  Clone ID: LIB3189-041-P1-K1-B4
cttccggccaaccattggggatttcttccatttctgaaaccctttgccaaaaccctttttcttataaacttgggctcagccctgttaagctcttttggtttcctttctcaaatcccagtctctattcagcattcttcttacaagctctcatggggagaggcttccttacacctatttgaaagggaaacttatgtggttt

SEQ ID NO: 42581 - DNA, 69 bp, Gossypium hirsutum
  Clone ID: LIB3189-041-P1-K1-B5
tcgggtttacttggtctcttctacaatcaacaaaaggggggttttaaaaccccatcccaaaatggggaa

SEQ ID NO: 42582 - DNA, 309 bp, Gossypium hirsutum
  Clone ID: LIB3189-041-P1-K1-B6
gtccgatctgatcagatcgtataaaaatatcaaaacatgtttgggagagcacccatgaaaagcgataattggaggactatgagattttgggagtatcgaaaaacgcttcccaagatgatctatagaaagcttattgaaaagccgctattaagaatgatacccataaaggcggcgatcctgaaaagattaaagagttggctcaagcttatgaggtgctgagtgacccggagaagcgtgagatttatgatcagtatggtgaggacgcccttaaagaaaggatgggcagcggtggcgcgggccatgaccctt

SEQ ID NO: 42583 - DNA, 474 bp, Gossypium hirsutum
  Clone ID: LIB3189-041-P1-K1-B7
tctagatcgcgagcggctgccctatcaaattatttttgtgagagcacccattaaaatcgggaggggcaaatactatgagatttggggagtatctaaaaacgcttcccaagatgatctaaataaagcttattgaaaagccgctattaagaatcataccgataaaggcggcaatcctgaaaagtttaaagagcaggctcaagcttatgaggagctgaatgacccggagaagcgtgagattcatgatcagtatggtgaggacgcccttaaagaacggatgggcagtggtggcggtcgccatgaccctttagaaaacttccagtctttctttggtggcaatccttttggtgctggtggcagcaacctgggcagaagacaaaaaaggggggaggatggaatccatcccctcaaggtatcattggaagatctgtacaatgggacatcgaaaaagctttctctctcacgaaacgtaatctg

SEQ ID NO: 42584 - DNA, 179 bp, Gossypium hirsutum
  unsure (1)..(179): unsure at all n locations; Clone ID: LIB3189-041-P1-K1-B8
gcgccacgcgnntccgattcttaactcgtgtttaattgtgtatttccaatatagtaacnctggcgaaggcgcaatcnncaacaaaatagcacagggngnnaatataatgcgctgtggtgcgttcacacaannaaagaagacagcaagaagcagggctgagccccatctggnntagcttt

SEQ ID NO: 42585 - DNA, 449 bp, Gossypium hirsutum
  Clone ID: LIB3189-041-P1-K1-B9
caagaatggaaagaaaattgctgcctttgtacccaatgacggttgcttaaactacattgagggagatgatgaggtattgattgctggatttggacaaaaggggcatgctgtgggagatattccccgagttcggttcaaggttgttaaggtttcgggtgtgtctcttctaactcttttcaaagagaagaaggggaagccacggtcttaaaagaatttaacttttaatggctcacttaatctttgctatttataaaaaacctagtgtttgggattttgtgatgaaggattttagatattcaactcaaactgtgttctgattttggtttcaaatctaattctgtttggtagattattatatatggtcttatgaacccattatgtttggtgttatcatgtatgaacagaatagtacttgctgattatgataacaatggctcgatttttaaaaa

SEQ ID NO: 42586 - DNA, 478 bp, Gossypium hirsutum
  Clone ID: LIB3189-041-P1-K1-C1
cccacacattcgcttagaaaatataacagcatatataattgtaaatgttgtttgaaggggagaggtttgtagacactttgagagtggagtggcaactattaatcagtctcatgctatattggatctcattgaagctaagtgggcagatttggtggcagaagtgccatttaagatatgttacccggcttttgaaggtcaaaagtgtcagatcatcactggctgtgatccgaagaacacgcctttgtcttaccacattgctggtttctgtcctactttactttggcagctcactttctcattcattaatattaattgaccgggacttgctgcaaaatctgtttcatttgctttgaaacgcatattccaattacatattgcctctagtcttttttttcttaaatggcattgtttattttgataataatttctacctgttccaaaccttggtctattgtcagatttctttttttaaaacttt

SEQ ID NO: 42587 - DNA, 395 bp, Gossypium hirsutum
  Clone ID: LIB3189-041-P1-K1-C10
cggacgcgtgggtaaaaccctaaccctagaattttctttggaactcatcgctggtgctatttgggctcattcacaatgcctcgccgtagctctggaaggtctgcttctcgtcctgcttctgctcgcagccctccacctcaaccagctcatcatgctcctcctccagctcctgctcagagtggaagtggtggatccttgctcggaggcataggctctaccatagctcagggcatggcttttggtactggaagtgctgtagctcacagggctgtggatgctgtgatgggtcctcgtactattcaacatgaaaccgtggtttccgaggctgcagctgcccctgcaccagcaactacttccaatagtttagctggcactgattcatgcagcatccacta

SEQ ID NO: 42588 - DNA, 426 bp, Gossypium hirsutum
  Clone ID: LIB3189-041-P1-K1-C11
gctctgtatattgaaattttctttctcgattttctctttagccaaaaaagatgcagatcttcgtgaagactctaaccggcaagacgatcactctcgaggtcgagagctccgacacgatcgacaacgtgaagaccaaaatccaagataaggaaggcatccctccagaccagcagcgtctgatcttcgccggaaaacagcttgaggacggccggaccttggccgattacaacatccaaaaggagtcaactctccacctcgtcctccgtttgcgcggtgggatgcaaatcttcgtgaaaaccttgaccggcaagacaatcactctcgaggtccagagctccgacacgatcgacaacgttaaggcgaagatccaagacaaggaaggcatccccccagaccagcaacgtctcatcttcgccggaaaacaac

SEQ ID NO: 42589 - DNA, 431 bp, Gossypium hirsutum
  unsure (1)..(431): unsure at all n locations; Clone ID: LIB3189-041-P1-K1-C12
cggacgcgtgggcggacgcgtgggaaacctaaggcccccgctgccgctgagaaacctcccgagggttacccggctgaggatgtcaagaagccgctccttaacaagcgcaaacctaaacccaccaaactcagagcaagcattacaccagggactgtgttgattttgttggctggaaggtttatggggaagagagttgttttcttgaagcaacttacttctgggctccttttggtcaccggaccattcaagatcaacggtgttcctttaaggcgcgttaaccaatcctatgtcattgctacttccaccaaggttgacatctcangggttaacgtagacaaagttgatgacaagtactttgccaaggaagtagagaagaggaagaaggaagactgagggagagttttttgaggcttgaaaaagagataagaaaa

SEQ ID NO: 42590 - DNA, 309 bp, Gossypium hirsutum
  Clone ID: LIB3189-041-P1-K1-C3
ccaacccttccgcggttttccacaaatggcgacccaatccctctctcgctatctcctctccaaaggcagatccctaacctccttgctcttcccttcatgccgccctttctctttcttttcccctgccgccgccgctttccccgtcaaaaccctaataacctcatcgccattccctttcctctcttttcttcggcggcttcgtgccccactttgctactcgctacttctgcgcgacttacttttccccactatcaaatcggtcttcactcgagcaggcaaggccttccttaatgacccgaattctaacta

SEQ ID NO: 42591 - DNA, 453 bp, Gossypium hirsutum
  Clone ID: LIB3189-041-P1-K1-C4
acacttacgtgcctttttttttcccaaaattcactccaaatttcttcctccccaaatcaagcgtcggttcacccctcatgtgcatctcccgtgaaatccaaaagtaccagcaaagtactgaactcctcatcaagaaactgcctttcgaaaggctcgttcgtgaaattgcccaagactttttaagttagctgatgattatgatctgtgctgatggatgctctatgattgatcgaagaatgggacaaagttctttgtagtttgtgaacctgggacacagcacatggaagctctcttgaaagttgtttatgagctctacacagattatgttttgaaaaaccccttctatgagatggagatacccatacaattcgaactctttgacatcaacctgccacaggcaatacagaaggacgtgttgcgcctttaggttgataagctgtcctggaacctttt

SEQ ID NO: 42592 - DNA, 402 bp, Gossypium hirsutum
  Clone ID: LIB3189-041-P1-K1-C6
ttttctatttagccaaacaagatgcagatcttcgttaagactctaaccggcgggacgatcactctcgaggtcgagagctccgatacgatcgacaacgtgaaggccaaaatccaagataaggaaggcatccctccagaccagcagcgtctgatcttcgccggaaaacagctcgaagacggccggaccttggccgattacaacatccaaaaggagtcaactctccacctcgtcctccgtctgcgcggtgggatgcaaatcttcgtgaaaaccttgactggcaagacaatcactctcgaggtcgagagctccgacacgatcgacaacgttaaagcgaagatccaagacaaggaaggcattcccccaaaccagcaacgtctcatcttttgccggaaaacaactcga

SEQ ID NO: 42593 - DNA, 466 bp, Gossypium hirsutum
  Clone ID: LIB3189-041-P1-K1-C7
aaaaaagtgtctcatttttagcaaagttacagtcgtcctcatcgaacaactatggcagccatcggagtccacggaagccctatgtccactgctacacagagggttcttgcatgccttcacgagaaaggtactgattttcagtttgttcccataaacatggctgccggtgaacataaatccgaaaactacctttccctcaatccattcggtcaagttccagcttttgaagacggggacttaaagctcttcgagtcaagagcaatcacccattacattgctcatgaatacagcgacaaagggacccaactcttaatccctggctctaacaaggatatggctgtcttagaattatggaaggaagtggaagcccaccagttcgattctccatcttcaaaaatagcctgggaggcgttttacaagccatttttcggcatggttcccgactccgcggctgtggaggaaaatg

SEQ ID NO: 42594 - DNA, 463 bp, Gossypium hirsutum
  Clone ID: LIB3189-041-P1-K1-C8
cggacgcgtgggtaaaaccctaaccctagaattttctttggaactcatcactggtgctggggggcctcattcacaatgcctggccgcatctcttgaaggtctgcttctcatcctgcttctgctcgcagccctccacctcaaccagctcatcatgctcctcctccagctcctgctcagagtggaagtggtggatccttgctcggaggcataagctctaccatagctcagggcatggcttttggtactggaagtgctgtagctcacaccgctgtggatgctgcgatgggtcctcgtactattcaacatgaaaccgtggtttccgaggctgcatctgcccctgcaccagcaactacttccaatagtttagctggcactgattcatgcaacatacactacaaagcattccaagattgcctgaacagctattgaagcgaactcacaagtggcagttctacatggatat

SEQ ID NO: 42595 - DNA, 64 bp, Gossypium hirsutum
  unsure (1)..(64): unsure at all n locations; Clone ID: LIB3189-041-P1-K1-C9
gtttaaaaaaaaaaatatatatttattatgcaaatatctnnncctctgttaaaacactatggtg

SEQ ID NO: 42596 - DNA, 353 bp, Gossypium hirsutum
  Clone ID: LIB3189-041-P1-K1-D1
cgaacccttggccggacccgtgggttgggctaaaaaaacctaacttccctgagcttaaaccctcgttggctgtcaaacccatagttgtttctttgaattgtagaaaaaaaacagcctttggtactttttgggggctcaaaaccctaacattccctgtgaaacccatagcagttttccttgcattgaagaagaaaaagaacagcctttggtactagaaaccagtgctgcaatatggaatcatcacaagctctgggggttttaacgaagcttattaaggtttaactttgaagccccatcaccccgtttcaagggcagcaccttcgtcatgtgtcttgcaaatgcgccttttcagc

SEQ ID NO: 42597 - DNA, 248 bp, Gossypium hirsutum
  Clone ID: LIB3189-041-P1-K1-D10
atcgagaaaagtattgtacaagctcatgaaaatctccaacctggatcaattttcgtgaacaagggagagctattagatgccggagtaaaccgtagtccgagtgcctatctcaataaccctgcatcagagaggagcaaatataagtacaatgttgataaagaaatgacccttttaaagtttgtagatgaccaatggggcccaatgggtagcttcaactggtttgcaactcatggaacaataatgagtcg

SEQ ID NO: 42598 - DNA, 233 bp, Gossypium hirsutum
  unsure (1)..(233): unsure at all n locations; Clone ID: LIB3189-041-P1-K1-D11
gataatgtctcacagtcgcctctccggtctctatcgtttactggttagagaagactcaccattgtcattcttctttattgttgcttagtttntttccagaaaaaaaggaaataaaattgctttttttgattgtcaaagtgtattaacaaattgtgatttggggattaatgggtttgtcttgggtttaaanttgattcttttggttttgatggattgtgagatatatttagagg

SEQ ID NO: 42599 - DNA, 445 bp, Gossypium hirsutum
  Clone ID: LIB3189-041-P1-K1-D12
cagacttcttgtacttcgactgcatctttagactttgaaattgctatttctcaacttccggtgagagatttcactcatcagatttgtgcttggggttttcctcatctcttagttaaaaccatggattttagccatttaaatcgtgggcagatgactctgatgggatctgcgttttgtgtggtgctttcgttgcatttcacactgcagcttgtgtcacagcatcttttttactggaaaaaccccaaggagcagaaagctatacttattattattcttatggctcctatatatgctgctgtctcctttgtgggtttatcggatattagaggaagcaaagccttcttcatgtttctggaatctgtcaaggaatgttacgaggcttttgtgatcgctaagttcatggctttgatgtatagttacttgaatatatctattagcaaaaata

SEQ ID NO: 42600 - DNA, 283 bp, Gossypium hirsutum
  Clone ID: LIB3189-041-P1-K1-D2
aatttttacatttttttctcactctttctcttttctttttctttcatttccggcatctccgaggtgtgaagctacacccactgttaagagagacaaaaattaaaggtgacaagaggtttcgagttttattcgctgttttattagaaataaacgacgacaatgaagaacgctgaaagactcgccaatttggctttagcagggttgacaatggcaccactagttgtgaaggtagaccccaacttgaatgttgttttgactgcatgcctaacagtatatgtgggtt

SEQ ID NO: 42601 - DNA, 469 bp, Gossypium hirsutum
  Clone ID: LIB3189-041-P1-K1-D3
tcgcccaacccttccggttcctagccacctttcttcattgccttatctccacggattttccggtcgactttgtttgaagttgctccattttgggggtgacaaaagctggattccattttttttattgtctttaaatatattttggtggctggaaaatagtttcatgcgctgactcagttgctgcataaaaggcattttttccagggtgtaattgtagttgggaaaaatcaactctttgttcggagggggactcatcaattcatctgccaataacactggcattatgaaggttcctgggatttgggttttcttctttgtgatcgggacagctttgttcgtctttgccttcagcagctcctccattcctggtatggatttgcagcatgttgatggtacgagtatgagtgaaacaagtagaaagctgaaggtgagtggatacagtctcaagcatgaaaagaggagcaatgtg

SEQ ID NO: 42602 - DNA, 469 bp, Gossypium hirsutum
  unsure (1)..(469): unsure at all n locations; Clone ID: LIB3189-041-P1-K1-D4
gcgcccacacgcttcgcatatagcgttcttacaatcctggttccaatattttcctagttttgggttacgggagggtccacttacaagacctgacaattttcttcagttaactctgcaaacttaatatctaattactctcctccagctttttcacatgggtgcagaaactattgaaggttgtgctataatggagaagtccaatggcaaagtgtccctgcttagtgtgaagcaaggagagccgaccctggtttgtcccgctgaagacacggaaaagggtctttactttctctccaaccttgaccaaaacattgcagtgattgttcgcaccatatattgctttaagtcagacgagaaagggaatggaaatgctgctcaagtgatcaaggatgctttaaaggaaggttctttcccattactatccnctngctgggcggctaacaatcagctcggagggaaactgattgtgact

SEQ ID NO: 42603 - DNA, 231 bp, Gossypium hirsutum
  Clone ID: LIB3189-041-P1-K1-D5
gtcggaaaaaaaacacaaaaaattggttttttttttgaaatttacacaaccggaatggttcttgttaaggaacaggattaccaattttcattttggttttctttattcaaacccttaatttcaactaaaagattcacttcaatggcttctgttgctacttcttaaactcttggcattttttaaaccttctctaaactgaaaaatcaaagcaaaattgcatttattccctac

SEQ ID NO: 42604 - DNA, 386 bp, Gossypium hirsutum
  Clone ID: LIB3189-041-P1-K1-D6
tccggaaggcgttagattcaggaatgatgttccggatggtggacttgcgaatgtggctgcaactgtcgggaagctccatggttatgtagctccaaatgactatgagccaacactcattgaagtagtgagcaattagaggcatatgttgcggtcgctgaatgggctaaacgagtttagaataaggatatatttggttcaaaaaaaaggtagtattttggtagacatatgtggtattgagtatttttccccaatgtgttgggaaaatttttgggcttcattgccccatttttaagaaaatgggatcgaatgttgaactgatttgcactatgaggtctttttatgattgtttgaaatttttaatgcccaaagattggattattttcatc

SEQ ID NO: 42605 - DNA, 468 bp, Gossypium hirsutum
  Clone ID: LIB3189-041-P1-K1-D7
ggaatagagctcaaatacaggcagttattgaggccaatattattcttcctcttgtacaccggctggaacttgcggagtttgacattaagaaggaggctgcatgggccatctcgaatgccacctctggaggatctcatgagcagattcaattccttgtgagccaaggttgcattaagccactctgtgacctactaatctgtccagatccacgaattgtgacggtgtgcctggaggggcttgagaacattctgaaggttggtgaggctgataaggaaatgggaatgaacggtggaatcaatctatatgcacaaatgatagatgagtgcgatgggttggataaaattgaaaacctgcaaactcatgacaaccatgagatatacgagaaggctgtgaagatcttggagagatactgggcttgagaggaagaagatgaacagaatatccaagatggtgggaatgaaaatcagc

SEQ ID NO: 42606 - DNA, 430 bp, Gossypium hirsutum
  Clone ID: LIB3189-041-P1-K1-D8
cggacgcgtgggtgatgtgttctcatctctaatgtacagtggcaagcttgatgctttcttgtcggagggcatggagtatgtcttcgttgcaaactcaaacaatctgggtgctattggtgacatgaaaattttaaaccatttggttccaaaccaggattgaatattgtatggaggttacacccaaaaccctagctgatgtcaagggtggtactcttatttcttatgaaggaaaagttcagctccttgaaattgctcaagtccctgatgaacatgtcaatgagttcaagtctatagaaaagtttaaaattttcaatacaaacaatttgtgggtcaacctgaatgctatcaagaggcttgtggaagctgatgcactcaagatggagatcattccaaacccgaaggaggtcaatggaatcaaggttcttcaact

SEQ ID NO: 42607 - DNA, 470 bp, Gossypium hirsutum
  Clone ID: LIB3189-041-P1-K1-D9
cccacgcgtccgctctctcactctttctctctcctctcttccctgatctcattagatccattcggagggcaacaaatcatcagaggaagaagtaaagcaaattaagaaaaatggcagcaacattaggagactcaagctcctggtccactgctcttgtcaagatttcaccttatactttctccgccgtcggtatcgccattgccatcggcgtttccgtcctcggcgccgcctggggaatttacataactgggagtagtttgatcggtgccgctattaaagctcctcgaatcacttccaagaatcttattagcgtgatcttctgcgaagctgttgctatctatggtgttattgtggcaattattttacaaacaaagttagagagtgttccttcatcacagatatatgaaccagagtctcttagagctggatatgcaatctttgcttcaggaattaattgtggatttgcaaac

SEQ ID NO: 42608 - DNA, 467 bp, Gossypium hirsutum
  Clone ID: LIB3189-041-P1-K1-E10
cggacgcgtgggcggacgcgtgggcaaaggttaaagaaagaaagaaaacatgtctcttgtgacaggggagataaaagcgagtgcatcagagatttaccatggagatgagatatgccaagagaaatccaagtttttgttggaggaagtaggcatgccaagggggcttttgccacttagagacatcgaagaatgtgggtacgtgaaggacacaggtttcgtgtggctcaaacaaaagaagagcatcacccacaagttcgaaaagatagggaagctggtttcctatgcaactgaagtcacggctgtcgttgagaaaggcaagatcaagaagctgactggggtgaagaccaaagagcttttggtttggatcacactgagtgatatccaagtggatgatcctcccactgggaagatcactttcaagaccccttcagggctgtttaggactttccctgtatcagcttttgaga

SEQ ID NO: 42609 - DNA, 420 bp, Gossypium hirsutum
  Clone ID: LIB3189-041-P1-K1-E11
gtcgaccccgcgtccgagcgccttcattccaatagagatgagagagaggtatgagatcttcgcttctctccgtcggtcgggtccatttgataaccgcttgcagttctctcagacgtgaaaaatggggttgtctttcacaaagctattcagccggcttttcgccaagaaggagatgcgtatactgatggttgggcttgatgctgctggtaaaaccaccattctttacaagcttaagttgggagagattgtcactaccattcctaccatcggtttcaatgttgagaccgtggaatacaagaacatcagcttcacggtttgggatgttggtggccaggacaagatccgaccattgtggaaacattacttccaaaacacacaaggacttatttttgtggttgatagcaacgatcgtgatcgtgt

SEQ ID NO: 42610 - DNA, 469 bp, Gossypium hirsutum
  Clone ID: LIB3189-041-P1-K1-E12
gaaaaacacagcaatggagagaagcaaggcgatgatgatggcagtggcagctgtcggattggctgtagtgctaatggtgcctcaggccgatgctacaaggtacattgttggagggggaggcatcggttggactactaatgtcaattacactgtctgggctcgaggaaagcacttctacaatggcgactggctttattttgtatatgatcggaaccagatgaatgtgctagaggtgaacaagactgactacgagtcatgcaatgctgatcatcctcttcacaactggacaaccggagctggaagggatgtggttccgcttaatgtgactcgccactactatttcattagtggcaaaggattctgctacggcggcatgaagctagcagtgcgtgttgagaaccctcctccgcctccaaaagctgctccattgaacgaaaagagtggctcctcaccaagttccattgtctac

SEQ ID NO: 42611 - DNA, 291 bp, Gossypium hirsutum
  Clone ID: LIB3189-041-P1-K1-E2
accaactctcaaaccatcaactcatcgccttacactaacaaccacttcattaaagatccgcatcattataagcgtcagcgatcaattgaactccattgcttcacaaaatcttgactacactacttctcttacaagattaccatctgctttcatacctgtccaccatcatcttgatcatttattgttcaaaatggctcctactggtgtaagaacacatgagtgtatccaaagaaactcaaagtgatttgagatattctttaagctattgatgcctcaacccatagttaaaat

SEQ ID NO: 42612 - DNA, 467 bp, Gossypium hirsutum
  Clone ID: LIB3189-041-P1-K1-E4
aaaaaaaaaaaaaacctgtatcaaaaagttgaaatcttcacaagaaaagctcttttttttccactgcaaaaggaatttttttttgggtggttgaagtttgggtccgggttgaactaaaattcggatcaagaaagcatgtcaatagaatcaaggtctgggtcagctgatcatggtatcaaaggagtagcaactcatggtggaggctatattaagtacaatgtttatggtagcctttttgaagtttccagaaaatatgttcctcctattcgccccgtcggtcgtggcgctaatggtattgtctgtgccgccgtgaattcagagacaccaaatgacgttgctatcaacaaaatcagcaatgcattcgacaacaggatcgatgccaagaggacattgcgagaaatcaagcttcttcgtcacatggatcatgagaatgtgatcgccattaaagacatcatccggcctccata

SEQ ID NO: 42613 - DNA, 291 bp, Gossypium hirsutum
  unsure (1)..(291): unsure at all n locations; Clone ID: LIB3189-041-P1-K1-E5
tctaaatcgcaaccgtcccccctttttttttttttgtatttaagacaggnattnnannaaacgcacgccatatttatacagtttttaaaaactaaaaataaattttatccatcattcaagactaaattcaaaatcttggatcaattccaccacaaagaaattctcctacttttttttttacttaattataaattaaaaccccatatacttcatattcaaaattataaatccatctttaccaacttttttctataatatatttatttaaatctataatttcttgtacccctt

SEQ ID NO: 42614 - DNA, 475 bp, Gossypium hirsutum
  unsure (1)..(475): unsure at all n locations; Clone ID: LIB3189-041-P1-K1-E6
ccacgcgtccccatgctggaataaccattctcccactattttcccaagccacaccaaaagccaatttgcctgaagaggagatcaaggctctaacaaagcgaacacaanatggaggcactgaagttgtggaagcaaaggctggaaagggatcagcaacattatcaatggcctatgctggtgcaattttcgctgatgcttgccttaagggactgaatggtgttcctgacgtcgtggaatgttcatttgtacagtcaactgtcactgaacttcccttctttgcttctaaggtaaggcttggaaagaatggtgtggaggaagttatgggggtgggtcctctctctgactatgagcaggcaggtttggagagccttaaaccagaacttaaagcatctatagagaagggaatcaagtttgccaaccagaattaaatttatattgtttgagatattctttcattagaacaatgaaaattttg

SEQ ID NO: 42615 - DNA, 415 bp, Gossypium hirsutum
  Clone ID: LIB3189-041-P1-K1-E7
aaaaaaataaaaaataaaaatcccattaaggcttgaactgttcttcagccaaaatggggatttctcgtgattcaatgcacaagaggcgtgccactggtggcaaaaagaaggcttggaggaagaagagaaagtatgagcttggaaggcaacctgctaacacaaagctgtcaagcaacaagacagtcaggaggattagggttcgtggtgggaatgtgaagtggcgtgctctgaggctcgacaccggaaactactcatggggaagtgaggctgtgactcgtaagaccaggattttggatgtggtgtacaatgcatccaacaatgagctggttcgcactcaaactctggtgaagagtgctattgttcaagttgatgctgctccattcaagcagtggtatctccaacactatggcattga

SEQ ID NO: 42616 - DNA, 90 bp, Gossypium hirsutum
  Clone ID: LIB3189-041-P1-K1-E8
gcatacttctaggacgagcttttgttattacgcggtcattttcatgttgttagctctaaaaacgataacatatatctacattttgcaatc

SEQ ID NO: 42617 - DNA, 405 bp, Gossypium hirsutum
  Clone ID: LIB3189-041-P1-K1-E9
ggactctgaaggactacagaagtttatttcagataatcgtaagaaccttgctgctctgaaggagaaattccttgggcgttgaaagctgcagcaagtccagctcgcttggtcctggaatcgttggaaggattttacccttcagaagttgatggaaagaaagatgcaaacctattggggcttaggcgaacttgtattatgttgatggaatgtcttagtgtcttgctttctaatctggatatggtttctgttttggctttgatctctgaagatattaaggaacaagcaaagctaattgctgaagaatggaaaccaaagctggatgctcttgacatggatgctagtaacggtaactcattggaagctcatgcttttctgcaacttatcgatacatttggtattgcttct

SEQ ID NO: 42618 - DNA, 93 bp, Gossypium hirsutum
  Clone ID: LIB3189-041-P1-K1-F10
gtttgagaatggaagctaaagagttctggaactttgtctccggccggaagaaagatatcgaattgttaagagagaaaattccagaagctttat

SEQ ID NO: 42619 - DNA, 469 bp, Gossypium hirsutum
  Clone ID: LIB3189-041-P1-K1-F12
cccacgcgtccgcttcgtcctctcaatctcttattcacaagtcaggcaatagagggtttgagtgagctggagtgaagaggatgggaggagggcatgggcatgatgaaccatattacctccatgctaagcatatgtacaacttggataggatgaaaaatcagaagctgacaatgtcgcttggagttttgacagccttcagcattggcgtgtttgttcccatctatgctgtcattttccagcagaaaaagactgcatctggttgattttttatgcttgccttcatggcggtatggctgcctgcaataatggaagcaactgcctttgtgatcttcagcttttgagccgatgtagtttgatgattatgatgatacttgcaggattttagtatttctgttggcaatcacctgttgttaattatgggaattgattatttgataataataataataaacaatatatttgattttgc

SEQ ID NO: 42620 - DNA, 303 bp, Gossypium hirsutum
  Clone ID: LIB3189-041-P1-K1-F2
cacgcggccgattatttcacataaagtcactagaagaaaccatctcccgttttcttactctctattatctttccaaccgataaatcactaaagaaatgttctctttaaacaaaaaaacataaaacgaaatactattcactgtctctcaagacatctcaacttacttacagtcgcttactattcttccttcttcatattctcacacaatctctttacccatttaccaactcacatagtgcttcttaaatgccatttccatctatagccatcaacaactccccgttcaccaatcccaacactccc

SEQ ID NO: 42621 - DNA, 173 bp, Gossypium hirsutum
  unsure (1)..(173): unsure at all n locations; Clone ID: LIB3189-041-P1-K1-F3
ttactgatggatcacctctccctccaccgacttcttcaccggcgcaatcattactcnanaaactcaactactaccgccaagaacacgttttcccccttttgcacaatctttctcctcatgaacgcctccacctcttctattatatccaccattataatctttccagaatatat

SEQ ID NO: 42622 - DNA, 471 bp, Gossypium hirsutum
  Clone ID: LIB3189-041-P1-K1-F6
cgatcttttgccgagaagcactatgctgacctgtctgcaaaacccttctttaatgggctcgtagagtacattatctccggtccggtcgttgctatgatttgggaaggtaagaatgttgttaccacaggtcgcaagattatcggagccacaaacccagctgaatctgctccgggaacaatccgtggtgactttgcaattgacattgggaggaatgtgatccatgggagtgattccgtcgagagtgcaaggaaggaaatcgccctttggttccctgaatgccctgttaactggcagagcagccttcacccttggatctacgagtagagatcatttggtcgaagctattggccgtcatggctctgtcctggttgtttgttgttggtggtgttgccagtcttttgatatttatattactattatagtttaaagtggtgaaagctttgtagcattttgggtgtatagggtaagttg

SEQ ID NO: 42623 - DNA, 395 bp, Gossypium hirsutum
  Clone ID: LIB3189-041-P1-K1-F7
atttctcaatctgaatctcagattttcagtcgggaaaatccaccatttttgctatccatttctcgtccagcacactaattgactaatacccagaggccagatattgtttatcggggtcgtctgattctatgatcaggctatgggaacttggtcagcaacgctgtgtgcattcatatgctatgcatacggattctgtttgggcacttgcaagcaccccaacctttagtcatgtttatagtggtggtagagatctttctttatatttgacagacttgacaactagagagtcttttgctttgcacaaaggagcatccgattttgcagctggcattgcatgatgatagtatatgggttgcaacgacagattcttcggttcatagatggtctgctgaagg

SEQ ID NO: 42624 - DNA, 466 bp, Gossypium hirsutum
  Clone ID: LIB3189-041-P1-K1-F8
cccacgcgtccggttgaaaactacaagagatatgccgagaggttggagcctttcattgctgatagggtgcacctaatgaatgaatcgattgcacagaagaagaggatattggtggaaggaggccaagctactatgctcgacattgatttcggtacttatccttttgtaacttcctccagtccatcagctggtggaatctgcactgggctcggtattgctcctagagttgtgggtgatctaattggagttgtgaaagcatataccacaagagttggctctggtcctttcccaaccgaaatccttggtcaaggtggtgatatccttaagtttgccgggcaagagtttggcaccacaactggcccgcctcgttcgtggggttggctcgatgtagttgctctcaagttcttgtgtgagattaacggcttttcttctctaaaccttaccaaattggatgttttatctgatc

SEQ ID NO: 42625 - DNA, 408 bp, Gossypium hirsutum
  unsure (1)..(408): unsure at all n locations; Clone ID: LIB3189-041-P1-K1-F9
acttcttcccttccattttactttgttttagttgccataacgtcaccttccaatacaaccgacagtgaggcaacaatatgtcttcactactctcacgttgctcatcctgttttccctcagttgttcaacaacattagcccaatctccggcactggccccggcaccttctggcccgacaaacgtcaccaagatcctcgaaaaagccggtcaattcaccctcttcattcgtcttctaaagtccactcaagtggccaaccagctgctcggtcagctcaacaattccaacaatggtatgaccgtttttgcaccaacggacaatgctttctccagccttaaatcgggcacattgaattcactcaccgatgaacaaaaagtgcagctggtgcaatttcacatcgtnccaacata

SEQ ID NO: 42626 - DNA, 444 bp, Gossypium hirsutum
  unsure (1)..(444): unsure at all n locations; Clone ID: LIB3189-041-P1-K1-G1
gtccgtttctttaatatccagtgtgcgtaacattataaacgatcaaatctcttggctttatagccgaagggatgaaaatgataaagataataaaaaaatacagtattctttttttgtttttgttttgttgtgcgttcgtcactttttacaagtatggggtgtgtgtggcgcgtgtaccagggctgtgtgctggcatacggaggcgatgtgctggaggctgctgaaatgctggaggttgtacgacgctggaggctaggggctgcggtgctaaggaaaccctaggattctgtttggctgaacctangtctaggttttgggccactgggacttttaggcattgggttatttgattgggctaggttgttttgtaaatgggcttgtaactgggctattgggtctgatattgtaatggactaataattggactttttattaattgggttt

SEQ ID NO: 42627 - DNA, 472 bp, Gossypium hirsutum
  Clone ID: LIB3189-041-P1-K1-G10
cgtccgatgacttgtatagggaaatgattgagagtggtgttattaagctaggtgaaaagcaggctggtgggaggtgtgctcttgtttatggtcaaatgaatgagccccctggtgctcgtgctcgtgttggccttactggtctgactgtggctgaacatttccgtgacgctgaagggcaggatgtgcttctcttcattgacaacattttccgttttactcaagcaaactctgaagtgtctgccttgctaggccgtattccatctgctgtcggttaccaaccaaccttggctactgatcttggaggtcttcaggaacgtattaccaccaccaagaaaggttctatcacttctgttcaagccatatatgtgcctgctgatgacttgacagatccagctcctgcaacaacctttgctcacttggatgccacaactgtgttgtcccgacagatctctgagcttggtatttatcctgc

SEQ ID NO: 42628 - DNA, 458 bp, Gossypium hirsutum
  Clone ID: LIB3189-041-P1-K1-G11
cctcatctatgatggctaagtgcgatccacgccatggaaagtacatggcttgctgtttggggtggcgtggtgatgttgttcccaaggacatcaatgctgcagtcgccaccattaagaccaagcgcaccattcagtttgtcgattggtgtcctactggattcaagtgcggtatcaactaccaaccacccactgttgtccctggtggtgatctcgccaaggtccagagagctgtttgcatgatttctaactccaccagtgttgctgaagtcttctctcgcattgaccataagtttgatcttatgtacgccaaacgtgccttcgttcactggtatgttggtgagggtatggaagaaggagaattctcagaggctcgtgaggatcttgctgcattggagaaggattatgaagaagttggtgctgagtcagctgagggtgatgagggtgaagatgatgagtac

SEQ ID NO: 42629 - DNA, 472 bp, Gossypium hirsutum
  Clone ID: LIB3189-041-P1-K1-G12
cggaaagttcattgttgaagccagtgtgaaagagggtcatcccacttttgctttcgtaagagagggttcagtttcagacccagttaagggaaaggttattaacaatttcaagaacttaggggttcatctgttgtatggggatctttacaatcatgagagtctggttaaggcaataaagcaagctgatgtggtgatatccgcggtaggttcgatgcagttagcagatcaagttaagatcattgctgccattaaagaagctgggaatgtgaagaggtttttcccatcggaattcggaaatgatgtggaccgggttcatgctgtaaagccagcaaaaacagcattcgcaaccaaggctcaaatccggcgtgctattgaggctgagggaatcccctacacctatgtgtccagtaactgctttgcaggctattttcttcctggtttgtcacagccaggagccactactcccccaaga

SEQ ID NO: 42630 - DNA, 468 bp, Gossypium hirsutum
  Clone ID: LIB3189-041-P1-K1-G4
cttccgccaatacggttactggggacattgtattcgtcctgcaacagaaagatcatccggaaggttaaactaaagggtgatgacttatttgtaaagcatacattggcacttactgaggccctttgtggctttcagttcatactgactcacttagatggcagacaacttctcattaaaacccaacctggggaagtcgttaagcctgatcaattcaaagcaataaacgatgaaggaatgccgatttatcagaggccatttatgagaggtaaactgtacattcagttcactgttgacttccctgactcgttgaccccggaccagtgcaaggcactagaggctgtgcttcctcccaaggcatcggttcagctgactgacatggagctggatgagtgcgaggaaacaaccctgcatgatgttaacattgaggaagtgatgcgtaggaaacagactcaagctcaacaagaagct

SEQ ID NO: 42631 - DNA, 452 bp, Gossypium hirsutum
  unsure (1)..(452): unsure at all n locations; Clone ID: LIB3189-041-P1-K1-G5
ttgtcgcacacaaggtggtcaggagagcaaaactgatcctccccggacactgggaaagggcaccagaaatggctgttggaggttttggcggcgtcnatggacctgtcagcagcttcaatggcaagatcacagcttcggtggtgatcacctgcattgttgctgcttcaagcggcctcatatttggttatgacattggaatttcaggaggtgtgacaactatgcaaccatttctccagaaatttttcccatcagttttaagaaaagcagcagaggctaaaaccaacatctattgcgtgtatgatagccaagttttaacatcctttacttcttcactgtacattgctggtttagctgcctcactggttgctagccgcctcagtgcggcaattggtcgacgaaacacaatggtcttaggtggtctcaccttccttgctggtgctgccatcaatggc

SEQ ID NO: 42632 - DNA, 395 bp, Gossypium hirsutum
  Clone ID: LIB3189-041-P1-K1-G6
cttctttcaaccgcgcctaataaccgctcggatttttctcagacgtggaaaaaatggggctgtgtgtcgcgcaagctattcagccggctatttgccaaaaaggagatgcgtatactgatggttgggcttgatgctgctggtaaaaccaccattctttacaagctgaagttgggagagattgtcactaccattcccaccatcggtttcaatgttgagaccgttgaatacaagaacatcagcttcactgtttgggatgttggtggccaggacaagatccgaccattgtggagacactatttccaaaacatgcaaggacttattttcgtggttgatagcaatgatcgtgaccgtgtggttgaagctagagatgagttgcacaggatgttgaatgagga

SEQ ID NO: 42633 - DNA, 434 bp, Gossypium hirsutum
  unsure (1)..(434): unsure at all n locations; Clone ID: LIB3189-041-P1-K1-G7
cttgttccttccttcgccgtctattgctttttgttacctcgatttcaagtgaatcagaatgggggaggaaaagactcacattaacattgtggttatcggccacgtcgattctgggaaatcaaccaccactggccacctgatttacaagcttggtggtattgacaagcgtgtgattgaaaggttcgagaaagaagctgctgagatgaacaagaggtcattcaagtatgcttgggtgcttgacaagctcaaggctgagcgtgagcgtggtatcaccattgatattgccttgtggaaatttgagaccacgaaatactactgcactgtgattgatgcacctggacaccgtgactntatcaagaatatgattactggtacgtcacaggctgactgtgctgtttgattatgattcaccactgtggtttgaggctgtatct

SEQ ID NO: 42634 - DNA, 379 bp, Gossypium hirsutum
  Clone ID: LIB3189-041-P1-K1-G9
ttaagagtggagcttgggacgagaatggtgtttttatttacaccaccttaaaccatgtaaagtgtgccttcccaatggagatagtggaatcatccgaacgcttgaggttcctatatacataactaaggtttctggcaatactatattttgcctggatcgtgatgggaagaataagactatcatcattgatgttaccgaatacgtttttaagctatctctgcttcggaagagatatgatcatgttatgagtatgatacggaactcccagctttgtggtgaggccatgattgcttatcttcaacagaaggggttccctgaagtggcactccattttgtcaaagatgaaaaaacacgctttaatttggctctagagagcggg

SEQ ID NO: 42635 - DNA, 216 bp, Gossypium hirsutum
  unsure (1)..(216): unsure at all n locations; Clone ID: LIB3189-041-P1-K1-H1
ccggaccgagccggccgaatttttttcattcgtttcttctcaccctcaattaccttacaaaaaaaaaaaataaccacatgtgaccgaactgttatcgaggaatactcaaaatcanttgaaaaggccaagaggaagctcagaggtctcatcgctgagaagaactgtgctccactcatgctccgtttagcgtggcactcagctggaacttttgatgtt

SEQ ID NO: 42636 - DNA, 475 bp, Gossypium hirsutum
  Clone ID: LIB3189-041-P1-K1-H10
gcgtccgcttgttttagcttgtgatgggatttgggactgtatgtcaagtcaacaactagtggattgggtaggagagcatttgaactctgaaactaaactttcagcaatctgtgagagagtattcgacaggtgcttggctccaacagctggtggggagggatgcgacaacatgacaatgattcttgttcagttcaaaaaacctgttggttcaggtacttctttgagcagcacccagcattgaaagatcgagcacccacgaaccaggtaaaacgtacatttggattttggaccttaagaagcattagtctcttctcccaagcaaacacgtaatgaatattacactttcttattatgtaagtgatttgcggtttatgatttgtaaatgatccaaggttttttatttcgcgactccgctatgtcgggtttttcattttgtaaatatggtggtaattggtatgtttttcctttgaaatgt

SEQ ID NO: 42637 - DNA, 364 bp, Gossypium hirsutum
  Clone ID: LIB3189-041-P1-K1-H11
gggaacttgaagatgtatttcgatgcaaccatcgagatagtgacttctaaagatgtaagggtctgtggagccctcggaccttgcatctctcttcggaaaacaaataatttggtgagcgagaatgagatcggggatggtggtacatatatatggaagctgggtacacttactagtaaaacatgtattgctttcttcttccaagtaaactatgagcataaacctcaacccggcgctgcgttcttggtacagttcataacacgctatagagatgggaacatgggaattcgaagacgggtgacaaccgctgcaagaagatgggttgcaaagcagtcaccagatattcgtgccgggtttgatcaggaag

SEQ ID NO: 42638 - DNA, 454 bp, Gossypium hirsutum
  Clone ID: LIB3189-041-P1-K1-H12
gcgtacgcaaatatggaaaactgtatgagaatcctggcaggtgtgcttttagcgattctaatttttcatttggacttgagctttcggctattatcaaggatgattcactttgtacttttaattagtcgacaagggaaagttaggttgacaaaatggtattctccttattctcagaaggaaagaacaaaggttatccgtgagctcggtggggtgattctcaatagagggccaaaactctgtaattttgtggattggagaggatttaaagttgtttataaaagatatgctagtctttacttctgcatgtgcattgatcaggatgacaacgaattagaggttctagaaatcattcatcactttgttgagatacttgatcgatactttggcagtgtctgtgaattggatttaatctttaacttccataaggcctattatatattggatgaactcttac

SEQ ID NO: 42639 - DNA, 415 bp, Gossypium hirsutum
  Clone ID: LIB3189-041-P1-K1-H2
tttcaacaactttagggtttttcatcttcttcgcccctcctctctagtttcatcgtaaagaaatgtgggtaggtatgatgaccgacgcggtggcactcgtttgtatgttggtcatttgtcttcaaggacaagatcacgtgatctagaggacatgtttagcagatatgggagagtacgtgatgtggatatgaagcgtgactatgcatttgttgaattcagtgatcctagagatgccgatgatgcaagatatgcattgaatggtcgagacatggatggaagccggatgattgttgaatttgccaaaggagtgccccgtggttcaagtggatctcgagattaccctggaagaggccccactcctgggtcaggacgctgcttcaactgtggaattgatggtcattgggctcgtgattgc

SEQ ID NO: 42640 - DNA, 388 bp, Gossypium hirsutum
  Clone ID: LIB3189-041-P1-K1-H3
cttccggaaaccttcattaatatataaattcccattctttcatgtccctcgctgagaaagagctttccgaggttgagtcacaaacgcctgcccaaccccagcccaacccacaccctgtcgccaagaaacgcacccgccaagacaaccactccccgtttcgcggggtacgtaagaggaggtgggggcgttacgtctccgagatacggtttccgggtcaaaagacacggatatggctggggtcgtttgggtcaccggagatggcagctcgggcatatgactcggcagctttcttcttgaaaggcgactctgctatcctcaacttcccggagttagtggggtcacttccccggccagggtcttgctcgaggagggatatacaatccgcggc

SEQ ID NO: 42641 - DNA, 380 bp, Gossypium hirsutum
  unsure (1)..(380): unsure at all n locations; Clone ID: LIB3189-041-P1-K1-H5
gacctatctctctcgtttctgggtctcgtaggttggtgaatagtgttgtaattaggcgcaatgtctcgtattgggacctctccanctcacattgtgttggcaatatttgctgtggccatgtttgttgtgtccgggaccatggcacaggatattgctccttctcctgcaatggctaccggagcaggctctgctttgccggtttccgctgtcttcttatgctcttccatgttggtctctttaattgctctcttggtgcattgaattcaaagcttttcaagactttatgacattggctacccttaaggggacgtggacgggtgaatattacacttccctttaatttttcttcgagataatatttaggttgttatcaaattttc

SEQ ID NO: 42642 - DNA, 432 bp, Gossypium hirsutum
  unsure (1)..(432): unsure at all n locations; Clone ID: LIB3189-041-P1-K1-H6
cgcaaacatggaagactgtatgagaattttgggaggtttgaatttagcaatcctgatggtgatgctgctattgagcaccgaccgacactgtgcggccnacncggttaagaagaacaagaacatcggcagccggtggtgcggtggttctttaaatagggaggagtgcctgcagctttcagacgacatggagacgatggagttgttgatggattcagaagtgagcaaaatggtatttgaagcaagtgcagcaatcaacttcgccggcagtaaacgttcaactaccagagcccttgtccgttctcaaagctcctgcgaccgtaatactggcaaacattgcattcctgatagtaattcaggcagaaagaaacctccaaattgttcactatacaacagaaattgccactgatttaactactttttcttgctatgcta

SEQ ID NO: 42643 - DNA, 465 bp, Gossypium hirsutum
  unsure (1)..(465): unsure at all n locations; Clone ID: LIB3189-041-P1-K1-H7
atttcaaaaccagcaaaaacaatggaaataatcgaaacccaaacagctgtttccaatttcgagccgttttacaacatgtcttgttcctcggagaataatggtggtggatttgaaatgtcgtcgttgatcgacggtcgagattattcaggcgagaatcacgcgcacggtggtggtgacggtggggtttttcgccactcgaacgcggcggctgttaaggttcagaaagtgtataggagttaccggacacggcgtaggttagcagattccgctgttgtagctgaagaactctggtggcaggttttagattatgcaaggcttaaccacagcacaatttcgttttttgataatttaaaacctgaaactgctgcttcaaggtggaatcgtgttcttttaaatgcttctaagatccggcaagggtntggctggagatgccaaagcacaaaaattggcttttcacattggatt

SEQ ID NO: 42644 - DNA, 475 bp, Gossypium hirsutum
  Clone ID: LIB3189-042-P1-K1-A1
atgatttaacacgagctgaagatgaattgtataaaattcctgagcatcttaaagtgaaaaaacggaattccgaagaaagttctactcaatggactaccgggattgccgaagttcagctccctattgaatacaagttaagaaatatagaggaaacagaggctgctaaaaagctactacaggaaaaacggctcatgggacgggcaaaatcagaagttagcatcccatcaagttacagtgctgattacttccagcgaggcagggattacgctgaaaaacttagaagagaacatcctgagctgtacaaggaccgaggttcacaggatgacaatgctggctccaaaccaactgacgcaagcaatgatgctgcaggaagtaggcaagctgcaacaaatcagtttatgctagagcgcttccgaaagcgagaacgccaacgagtaatgcggagataacacagttacaagagcagcatatcaaa

SEQ ID NO: 42645 - DNA, 420 bp, Gossypium hirsutum
  Clone ID: LIB3189-042-P1-K1-A2
cctgcacgctaccggtgaaaaattggggggacgacccacgcgtgcgaaacacgaagttcaaagaactcccttttaagttaacagttcctttttggagtcctataatgggtaaggagaaggttcacatcaacattgtggtcattggccatgtcgactctgggaagtctacaaccactggtcatttgatctacaagcttggtggtattgacaagcgtgtgattgagaggtttgagaaggaggctgctgagatgaacaaaaggtcatttaagtatgcatgggtgcttgacaagcttaaggccgagcgtgaacgtggtattaccatcgatatttgccctctgaagtttgagactaccaaatactactgtactgtcattgatgcccctggacatcgtgacttcatcaagaacatgattactggta

SEQ ID NO: 42646 - DNA, 152 bp, Gossypium hirsutum
  Clone ID: LIB3189-042-P1-K1-A7
aaacaagtagtacataaaaatcattgtttatttgtagcaccgaatccctaattaaattcccgtcgaggaatccaaagattcttttgttcaaccaagtttcaaaattcaaggtctaatctaatctgtacgttttgcttcccatcgacgttcga

SEQ ID NO: 42647 - DNA, 194 bp, Gossypium hirsutum
  unsure (1)..(194): unsure at all n locations; Clone ID: LIB3189-042-P1-K1-H10
acccaccatcaacttcaaacaaaaatttttataaacacattttttataccngaaaatccttcttccgcaacttttaaaacaacccgccctaaaaaatttttatattcattttcttcttatccactcccaacacttccttccttttctaaaccacccacccaaacccgtttttctttcatttttatcatctaccc

SEQ ID NO: 42648 - DNA, 448 bp, Gossypium hirsutum
  Clone ID: LIB3189-042-P1-K1-H5
atatttggtttttccggtacttcaccatgccatcattcgatactatcctccttccagatttgggagccatagcctgcctgtcgtgtatcacacattatttcatacgccgtcttctcattaaccccaaacgaacacttccttcgaatacaaaagggtggccgattgagggtgctcttccactcttaagttccatgccccatgtcaaactagccacgttagccaagaagtatggacctgtaatgtacctcaaaaacggaacctgcaacatggtggaggcttcaaccccagatgccgctcgagctttacttaagacccttgacttgaatttctctaatcgaccatccaatgctggggccacccacatatcctataactctcaagacatggtgtttgctgactatcgtcccaagtagaaattgctttgtaaactgagtaaccttcacatgct

SEQ ID NO: 42649 - DNA, 449 bp, Gossypium hirsutum
  unsure (1)..(449): unsure at all n locations; Clone ID: LIB3189-042-P1-K1-H6
tgccttgaaactacagctatggtctccagttcataaatttgcaggtgaacaggggccatggaaaaatgccagaggcgtttacgaataatatgctgaagaatcttctcctcaatgacaatcaattggaaggatcactgcctcgatcattggccaactgtacttncttggaagttctaaacttggggaacaacaacttaactgatacatttccccattggttagcttcacttccaagtctccaagttcttatcctgagatccaatagattccatggttccatctccaattctatagcttcatcgaacttctccgcactgcaaatcatcgatttctctcaaaacgaactcagtggccctttgcctgcaaattttttccgtaatttgagagcaatgaaagatgcacccaaagagaaactttcagggtcatatttattcaagactgatgctcga

SEQ ID NO: 42650 - DNA, 138 bp, Gossypium hirsutum
  Clone ID: LIB3189-043-P1-K1-A1
caaacgtgtgtgggccacagtagaacgcgcgcatatgggtatccatttgcgcccagatcaagacttgaagctgtgtaagatgagacgcggaaggccgccatgggcaaaatgagtgcggggtgtactatacccaactaa

SEQ ID NO: 42651 - DNA, 90 bp, Gossypium hirsutum
  unsure (1)..(90): unsure at all n locations; Clone ID: LIB3189-043-P1-K1-A10
ataatattgttttattattaaaaataaaggggcgtganaaaanaaaaanaataaaaaaatanaaattttttttattttaattttttttaa

SEQ ID NO: 42652 - DNA, 426 bp, Gossypium hirsutum
  Clone ID: LIB3189-043-P1-K1-A11
aaaaggttttcctctccttctctgattttctctgcatttttcttcgcccgatttcctatttctttttctttgaaatggataccaagattggatcacttgacaactgcaagcctgcttccaacgacgtttgctctccggtaaacggcaccgtttccaccattcaaggttccgtttaccccgccgttgtcaactgctctgaagccacactgggccgccacctggctaggcggcttgttcagatcggagtgaacgatgttttctctgttcccggggatttcaacttgactttgcttgaccatttgattgccgagcctgggcttaacctcatcggctgctgtaacgaactcaacgctgggtacgcggctgatggttatgctcgatcacgtggcgttggtggctgcgttgtcacattcacccgtggtgggc

SEQ ID NO: 42653 - DNA, 452 bp, Gossypium hirsutum
  unsure (1)..(452): unsure at all n locations; Clone ID: LIB3189-043-P1-K1-A12
cggacgcgtgggcggacgcgtgggtttggattcataaaagcaatccatcaaaatgagttatataagctgagataacgaaaaatagggttttgaaatctttcccaggtttaccagcagtctgctctctttctcttttgtagctaaccagcagagagcttcaaccatggccgtcgggaagaacaagaggatttccaagggaaagaagggaggaaagaagaaggcagctgatccatttgctaagaaagattggtatgatatcaaggctccatcagtttttacttccagaaatgtggggaagactctcgttacccgtactcagggtaccaagattgcttcagaaggactcaaacaccgtgtgtttgggtttcattggctgatcttcaaagcggggatgaggatcatgcttacagaangattcgtttgagagctggagatgttcaaggaaaagaatg

SEQ ID NO: 42654 - DNA, 309 bp, Gossypium hirsutum
  unsure (1)..(309): unsure at all n locations; Clone ID: LIB3189-043-P1-K1-A2
cccacgcagtacgaaacactagttgtaaggctaagtaatacaaacatggctagactactcgagctgaggcgaagatgacggtgactagttcgacgaatgcgatccgacgccttacggtggtggatacaatctcgaactaacttatggtcgtnctttggaaaccctcgatgagacttgctaccctttcgctacaccctccgatggcgactttgattacgcacgtcccgatttctcttacggtacgcgcacttagcttatgccgacgaagccatcgaaactgaatacagtagctatcttaaacccaagccc

SEQ ID NO: 42655 - DNA, 136 bp, Gossypium hirsutum
  Clone ID: LIB3189-043-P1-K1-A3
tcccggcacgacgcacgcgaaatcctatggccatgtgatcgagaggtactactctcgcatgacgcttgatttccacaccaacaagaagatcatcgaagaagtggctatcatcccttccaagcgtctccgcaacaag

SEQ ID NO: 42656 - DNA, 370 bp, Gossypium hirsutum
  Clone ID: LIB3189-043-P1-K1-A4
aaaaaaactgtccccccttaatttaaaggtactatttttttatgacccttgattcgcacaccagggtgaatatcatcgaggaagcggcggtgaaccctaccaagcgaatccgcaacaagatcgccatctgttacacccatgtgatgaagcggatccagaagggacaccgacgtggcatctatttcaagctccaacaagaagatcgagaacgtcggatggatttcgtactcaacgtatccaccatcaagcttgatcaaatcgaagtcgataaggaaactctcgatatgatctcagttctcgggatggctgatattgccggccttgttaaccacgatccgcttgctatcgcagttccccaaaccatgatcgg

SEQ ID NO: 42657 - DNA, 434 bp, Gossypium hirsutum
  unsure (1)..(434): unsure at all n locations; Clone ID: LIB3189-043-P1-K1-A5
ctcgaaatccccccattactctccggacactgcccaaaagttccaaaccaaaagaaatggccgaaactgaatctaccaccactgctgaggactcagccaccgcagaaacggagccccaccagacccaggctcaatcgcaaatagatgaaaccgccgccaagctcaataaccttactctccgaatttggccccccactcaacgaacccgcgatgccgttatcaaccgtcttgtcgagacgctctcttcccaatctgtactttccaaacgctacggcaccatccctgaggacgaggcctcctccctggccaaatctatcgagggggaagctttctcagtcgccggtgcggccttctcccccgacgatgatggcaatcggatncttcagatgtattccaaagggatcagcgagcgtatgctcgatactgtcaaatct

SEQ ID NO: 42658 - DNA, 436 bp, Gossypium hirsutum
  unsure (1)..(436): unsure at all n locations; Clone ID: LIB3189-043-P1-K1-A6
ctccattaaaaatcccccaattattttctcgttactcgattttattttccaaaccaaaagaaatcaccagggctgtgtttatcaacactgntgatgctcanccacacaanaaactgagccccaccatacccaggctcaatcgcaaatagatgaaaccgatcccaagctcaataaccttactcttctaatttgaccccccactcaacgaaccctcgatgccgttatcaaccgtcttgtccagacgctctcttaccaatctgtactttccaaacgctacggcaccatccctgatgacgaggcctcctccctggccaaatctatcgaggcggaagctttctcattcgcctgttcggccttctcccccgacgatgatggcatccagatccttcacatgtattccaaggagatcagcaagcgtatactcaatactgtcaaa

SEQ ID NO: 42659 - DNA, 385 bp, Gossypium hirsutum
  unsure (1)..(385): unsure at all n locations; Clone ID: LIB3189-043-P1-K1-A7
ccgtacgaaatactattcttaaggtttagttttacaaacatggctagttccggngtccttaagttggtttccatgattctcatggtgtgcatgacgatgatgagtgcacccaaggcagccaaagccgccatcacgtgcagcgacgtggtgaaccacttgatcccgtgcttgtcctacgtacaaaacggcggtacacccgctgctgcatgctgcagtggggtaaaagcactctaccgcgagggtcagaccttcccggaccggcaaaacgtgtgcaagtgcatcaaattcggggtgaacggaattccgtacaccagcaataacctcaatctcgcagccggcctacctgctaaatggggtctccaacttccttacaacatcaacccct

SEQ ID NO: 42660 - DNA, 460 bp, Gossypium hirsutum
  Clone ID: LIB3189-043-P1-K1-A8
cccacgcgtccgtttctttggaaactcggcttctttaagctattaccaataatggagttccagatatccttattccagctcctcatcagcttcctcctgtttttgtttatggtaatcacaagtgtaaggagatcaaaagctaagaatttaactcaaaagttgattccagggccatggaaattaccattgataggaaatctgcaccagctcgccgcttctggtctaccccatcgcaccttacgtgacttggctacgaaacatggtggcttcatgcatctgcaactcggtcaagtttccaccgtggtcgtttcttctccagaaatggctgaagagattatgaaaacacatgatatcgtctttgctaataggccttttcctggtgtggccaagatgacaacttatgagtgcactgatattgtctttgcaccatatggaacctattggagaaatctgcggaaaa

SEQ ID NO: 42661 - DNA, 261 bp, Gossypium hirsutum
  Clone ID: LIB3189-043-P1-K1-A9
gaagaatgagaagaagaaaaagaggaggaatgattgaaccgtaaaggcgtagcccagtaaagtttgctcatcagatataacctgccttggaaatatggaagttagttgacaatacaagttcgttttcttgcttttttttttgtggtgaatcactatgttaatatacctaaaagataggtgttaactgttacttcatctttatgttggtttttgttttggaacattggtcaaactaatgacatgttcatatttgcttctctc

SEQ ID NO: 42662 - DNA, 447 bp, Gossypium hirsutum
  Clone ID: LIB3189-043-P1-K1-B1
acgcatgggcttatatttcagtttgctttgctttgctgcatctcattctcacttcaccttttttttttattgtctggatcatcggaaagaaattaaagaaccaatcatgaagcttgacaccagcggactagaatcggctgctcctgtctggggtgctcccagtgaacttgttgacgggttttcggctgctccgtcgttcgatctcccaaacactactgattttgatgggtttcaaaaagaagctatccagatggtaaaacctgctaagggtaccaccacgctagctttcatctttaaggaaggggtcatggttgccgctgattctagagctagcatgggaggctatatctcttcacaatcagtgaagaaaattattgaaatcaatccttacatgcttggaacaatggcatgaggagctgctgacttgcagttttggcacagaaattt

SEQ ID NO: 42663 - DNA, 430 bp, Gossypium hirsutum
  Clone ID: LIB3189-043-P1-K1-B10
aaagaaaacatgtctcttgtgacagaagagataaaagcgagtgcatcagagatttaccatggagatgagatatgccaggagaaatccaagtttttgttggaggaagtaggcatgccaagggggcttttgccacttagagacatcgaagaatgtgggtacgtgaaggacacaggtttcgtgtggctcaaacaaaagaagagcatcacccacaggttcgaaaagatagggaagctggtttcctatgcaactgaagtcacggctgtcgttgagaaaggcaagatcaagaagctgactggggtgaagaccaaagagcttttggtttggatcacactgagtgatatccaagtggatgatcctcccactgggaagatcactttcaagactccttcaaggctgtttaggactttccctgtatcagcttttgagaatg

SEQ ID NO: 42664 - DNA, 406 bp, Gossypium hirsutum
  Clone ID: LIB3189-043-P1-K1-B11
aaagctcgctgacgatcgggctaggacatgaatatgtttaatggccccccaaacaggatttaaaccttacaaaaggtgttgatgaggacgccgatgaatgcagagtgatgaacacacgcagataaggtgaagagaaagatccaaagaggatccgcttgtaaagggaagctccgactggcattacgcaattgcatgcaatcaacaaaggaaattctgtttgctgcttgtgatctctaatattccccgtgtctgatttactaccatgtttaattttaagacttgcagctcacgagaccttatgttttaagtgtgtgtactatatgtctatattggcttaatcactttactggacaatgcaattgtaggtaaaaactactttgaaatagaatagaagctttaagtattt

SEQ ID NO: 42665 - DNA, 107 bp, Gossypium hirsutum
  Clone ID: LIB3189-043-P1-K1-B12
ctttttcatgtatgttttacagaggaaagttttgataccccattcagagggtattgttaacatttaccatactaagagaattgttttagtttcttgacacttaagtt

SEQ ID NO: 42666 - DNA, 458 bp, Gossypium hirsutum
  Clone ID: LIB3189-043-P1-K1-B2
cggacgcgtgggttgctatcaagacttatcttggtgtatcactacctgtgcaggtgaaagatattggattcactggagttttcaggttgatatttaaacccctggtgaatgagtttccttggttttggagctgttggtattctttgagaaaaaaaaaaaaggtggatttcaaccttgaagtcattggtggtgacatatgaactattcctggcctttgtaatgctattgagagcacgatacgggatgctattggagattctatcatgttgcctgtcaagaaaattattccaattttgactggagactacagtgattttgagttaaagccggttggaatgccagaggtgaagcttatccaggcacgtgacttgacaaacaaagatattattggaaaaataaatccctatgctgtattatttgtacgccctttaccttgcaggacaaaaaaaagtaaatta

SEQ ID NO: 42667 - DNA, 462 bp, Gossypium hirsutum
  Clone ID: LIB3189-043-P1-K1-B3
agttcctagggttcctttcgacggcatgttcaagcactttggtacctgcgtttactacaacagtaaatatcaagcaaagatagtggaggaagtaccatacttgaactacttctcgctgtttggattctttccgatgcatatgaacgccatttatgaggtgataagaagcttcacaatgaaggctaaatatggagcagattatacagatgggtggctgatgtttggtgtgagattattttgatgttaatccctggagttgcaaatcattgtccccaagactatgtcaactccactcgtcttggcaaacccgatgatgttttattccttcctctccacactaaaaaggcacttggtttttaagtccctttgcttgctgcctaatgcatcttcctccataataaatatctatctgtgtaaacttatcgggcttgggattttgagttcatgatggatttccatttc

SEQ ID NO: 42668 - DNA, 299 bp, Gossypium hirsutum
  unsure (1)..(299): unsure at all n locations; Clone ID: LIB3189-043-P1-K1-B4
naaaaataaaaaaaaaaaaaaaaaaaaaaaaaaaattttttttaacaaacaaaaactaaaaaaaataaatgtgaaacaaaaaacggaggaggggggtaccaaactggggcgcacgtttaacagcacccaggtttctttctctgtggtagctaaccatcagagagctttagccatggccgactggaagaacatgaggatttccaagggaaagaagggaggaaagaagattggggggagcccattttaatgggttgggagaaaatccctttttccccagctggaaaaatattaaaaaggcc

SEQ ID NO: 42669 - DNA, 462 bp, Gossypium hirsutum
  Clone ID: LIB3189-043-P1-K1-B5
ccacaggttccttttttaagttttcagaggaaaggtaactgaagtgatttttacaggctttgaaagctttgaattattattgggttaatgtaatctttagtccttgaacttgtcaactattccactttgatacttgaacttgaaaaatataaaagtttgacggaatccaaatttagggataagaacggatatagttgttatgttcaggtatcaaagttgaccccaaaaaagacataagataccaaagtaaatcaaattgccaaattcaaggactaaacatcatattaaccctattattattccataacgatttcatctttgattattggttaaatgagttttaaaaataattcaagactggaaggaccggagctgatgggatttgtgagatatgatacaggaagatgcaaatgatataatttatataaccaaatttcacatatatattatctctttatatat

SEQ ID NO: 42670 - DNA, 405 bp, Gossypium hirsutum
  Clone ID: LIB3189-043-P1-K1-B6
ccacgcgtgcggggggaatcctattatcccaccaactacctgcttgtattaaatatccatcctgtaactgagccgagaaagttgttgagtttttacatttcagagttctcaaacaatggtgcaatcaaaccaaaagccccatcttgtattactatccgcccctgctcatctccaacctgttattgagctcgggaaacgccttgtcacttgccaggatgttaaggcaacaattatagttgcctcttttgtccaatcggctccagcggaatcgcgtatggtccaagctgcgttggctacaaaactcttcgatgtcatccacctcccaccagctgacatatgcaacctcgttgaacctggtgataagggaatcacatgactttctgcggacatgcatgtcgtcaagcc

SEQ ID NO: 42671 - DNA, 459 bp, Gossypium hirsutum
  unsure (1)..(459): unsure at all n locations; Clone ID: LIB3189-043-P1-K1-B7
cgcttactgggaagtggtccccgatgtggccttggtgagctcattcttcctgaaaacgagccaggcagcagtataatgcctgggaaggtaaaccctacccagtgtgaggctatcactatggtctgtgcccaggtaatgggtaaccatgttgctatcacagtgggcggatccaatggccactttgaattgaatgtgttcaagccaatgattgctaatgcactcctgcattcattaagattgctgggtgacgcatctgcttcatttgagaagaactgcgtgaggggaattcaagccaatagggaaagaatttctaaattactgcatgagtctctaatgcttgtcacatctttgaaccctaaaattggttacgacaatgctngcacagttgccaagaaagcacacaaggaggggtccactttgaaggaagcagcattgagcccttgtgtgctcacaagcgaa

SEQ ID NO: 42672 - DNA, 459 bp, Gossypium hirsutum
  Clone ID: LIB3189-043-P1-K1-B8
tagttctccagtaaccaacaaaggtcccccacataaaaaacaaaaaaaaaaaaaagaggaagaagaagaagaagaagaagaggagatttaactatggcagaaacccagagccgtggccttgttttcgccgggaagaagagaggaacaggaaccgatgactttgacggggatgatattttcgtggctaagaaatcaatgttgcccacaatggcatcggaaagcgaccctgccgctgcattagccaacgctcgccatgaattcggtgaacatggtggtgttaacatgtccattgaagcctccgccaccttcaccgtcatggaacctgagaccatgcgccgtatgttcgccggtgaactcggtcctgatcgtgatttcttcatctatagccgtcattttaaccccaccgtcttaaatcttggccgtctcatggcagccctggaaggaaccgaagctgcttat

SEQ ID NO: 42673 - DNA, 410 bp, Gossypium hirsutum
  unsure (1)..(410): unsure at all n locations; Clone ID: LIB3189-043-P1-K1-C1
cgcttttctcttcacccttactttcctcctcttcaccttctctcacgcccgcttcatcacatctgaatgccaacatgatgtcacccccgagaaatccgaatccgaatccgaccccgaatccgccatccttctccccagcgagaaaccccactttgaaccccccaaattactcgacttcaagcacgatgatgatgcctccggcgtcgcctccgttcctttgaccaggatcagttttaaccctgtcaaccgccacttcccaaggcgtcccttgaatccgttccgtcacaagcacaactgccgtttccataaacgcttcangcttttgaatccacgcttccatcagaagcgcttcatttcttacggcaacgatatgatactgtccaacgagagaagtttgacccagagtcacg

SEQ ID NO: 42674 - DNA, 451 bp, Gossypium hirsutum
  Clone ID: LIB3189-043-P1-K1-C10
gttcctctctctgcttctcgttctctgaaatttcaaaaaaatcaaaatttttgggcttgaaagttaatctttactgtcatccaaaacagccaaatggtggaagcgcagacatggaccacaagaagaatgagcaatccaaggttggactcaacggctaccgccgaccacgaagttttggatattccagtgactccaacggctgatgtcaggaacagcatctacaacgttggatcccatctctctcctaaccttttaacggcgctgatcatttgcttgtggttcatgtccaacatcggagtcctcatacttaacaagtatctcttaagcttctatggctaccgttacccgatcttcctcaccatgcttcacatgatctcctgtgcttgttacagttacgctgccataaactttctggaaataggtccaaggcaacacattttatcgaggaagc

SEQ ID NO: 42675 - DNA, 465 bp, Gossypium hirsutum
  Clone ID: LIB3189-043-P1-K1-C11
tctctcctttgttttcccttttgtctctctctctctttttccaaccctaaccctacctcaccaaccaggattcaacatgaagggaggaaaatccaagtcagatactaagagtgccaagctatccgtgaaatccaaagctggaaagaaatcggggaaggctgccaaggatccaaacaagccaaagaggcctgctagtgccttctttgttttcatggaggagttccgtgagcaatacaagaaggatcaccctaaaaacaaatccgttgcggctgtcggcaaagctggtggagataaatggaagagcttgtctgaagctgaaaaggcaccttatgtagctaaggcagaaaagcgggaggttgagtatgaaaagaacatgaaggcctacaataagagacaggctgagggtcccaaagacgaagatgttgagtctgacaaatcaatgtctgaggggaatgatgaggatga

SEQ ID NO: 42676 - DNA, 465 bp, Gossypium hirsutum
  Clone ID: LIB3189-043-P1-K1-C12
attagaagatgcagtatcaaatggagtgttaagtgatatgattgaggaatccatgcatgttttatgggaattccttcgagccgacaaagacaacacgaatgcgacctcaaagactccccagcaagcgcaggttgctccacatgaccctattgacttggaacttttgatggatgttagaactgaacttcaaaaaaaggagaaaaggctaaaggaaatccagagaaatacaaactgcataataaagaggctccaaaggcaacatcagagaaatctattagatcatacattgttcatcgctcaagttgagctgaaattggtttcgagagttttaaacatgttgaaaataagcacagatcagttaatttggtgtcatgagaaattacaaaggattaattttggtagtaggaatacagagatagagccctcatttacactgttcccttgttgacattagtggtgaccgac

SEQ ID NO: 42677 - DNA, 432 bp, Gossypium hirsutum
  Clone ID: LIB3189-043-P1-K1-C2
ggcgccctgagaatgatcacatctaccactctgagctttttacactgacaaagaagatggctagagcagaatctcagaagctttcctttaccgtaccaatatttgaaccacatcctcctcagtactacattcgtgctgtttctgattcttggttgtatgctgaggctttctacactatatcattccaaaatctaagactgccagaggcttgtaccactcttacagagcttattgatttgaagcctctgcctgtaacttcactcggcaacagcacttatgaatcattgtatagcttttcacattttaatccgatacaaacgcagatctttcatgtcctgtatcacacagataacaatgttctattaggagctcctacgggtagcgggaaaactatatcggctgaacttgctatgctgcacctcttcaataccc

SEQ ID NO: 42678 - DNA, 464 bp, Gossypium hirsutum
  Clone ID: LIB3189-043-P1-K1-C3
gatttctacccagttgggcaaacatggagcttcaattgctattatgggtcgacgcaaacatgtccttcaagctgctgtttctgctcttcaatcccttgggattcatgctgttggctttgagggggatgttcgtaagcaggaagatgcaaaaagagtgattgaatcaactttcaaacattttggccatattgacattcttgtgaatgctgctgctggaaactttcttgtgcctgctgaagatttgtccactaacgggtttcgaacagttatggatattgattctgttggtaccttcacaatgtgccgcgaagcactcgagtatctcaaaaagggaggacgtggaaggaactcaccgagtggaggatcaatcttgaatatcagtgctactttacattatacagcctcttggtaccaaatacacgtctctgcagccaaggcagcagttgatagcattaccagaaact

SEQ ID NO: 42679 - DNA, 180 bp, Gossypium hirsutum
  Clone ID: LIB3189-043-P1-K1-C4
aaaaactcaaataaaaaaaaaattacaaagggggttttattttaaaaaaaaaaaaaaaaaaaaaaaggggggggttaatataaatggggtggggggaaattatgggtccctttttttaaaataaaaattaactaccccttgattgacaaaaaaaaaattcttttatagggaaccccccac

SEQ ID NO: 42680 - DNA, 439 bp, Gossypium hirsutum
  unsure (1)..(439): unsure at all n locations; Clone ID: LIB3189-043-P1-K1-C5
cccacgcgtccgaaaagggcggaggttactgcaggtaaacaagcaataccctcttgtttatatgggtggtaactcaagcagccctaatccaagttcattatgcttagagggaactttggatccacatgttgtttctgggaaaatcgtgatatgtgatcgaggaataaatcctagagtgcaaaagggtcaagtagtgaaagatgctggaggagtaaggatgattttgacaacactgcaccanatggggaggagcttgttgcagattgtcacctacttgcagcagttgcagtgggagagatggaagggaaagcaatcaaacattatgctttaacaaatgggaaaccaaccgcaactctagcctgtttaggtaccaaaattggtgttaggccatcaccagtggtggcagcattttcatctagaggaccaaatttgctcacac

SEQ ID NO: 42681 - DNA, 454 bp, Gossypium hirsutum
  unsure (1)..(454): unsure at all n locations; Clone ID: LIB3189-043-P1-K1-C6
aaaagaggaaaaatcctctgaacgagagcctggggtgagttctcggagtgccatcgtgcctccgtccaatgggctgcacgcgcttacgcgccactgtcaatgccgtcacatatggcggccggaagccaaaaaacctcatcgtttaccccgcatcaaaaggtattccattttttatctatttttaatatttttatatgtataaaatgcaaatattttgaaaaagaaaaataaaaaacaaatcacctttgctttctttgtgaaatctttctgatgtcttattgcaaaaaaatatttggtgtacaatcatccttttctgtgtggtgtatctctttatagatcaaagaaaaaggctttataacctcagtctattacataattttggaaagaaatccctgatttctttccatatttgtttaatctgtatattgtgttctttctttccatatttgntctt

SEQ ID NO: 42682 - DNA, 457 bp, Gossypium hirsutum
  Clone ID: LIB3189-043-P1-K1-C7
aaaatatgaaaaaaactgtcaacgagagtttgattttaacaatcaaaaaacaaaaaaggggatgggcaacatgatgaaacgcgcggagaaaaacaaaataaaacccaaacataaattcgccatccttctccccagcgagaaaccccactttgaaccccccaaattactcgactttaagcacgaagatgatacctacggaggaaactccaatattttgaaaaagaacagttttaaccctgtcaaccgccacattccaaggcgtcccttgaatccgttccgtcacaagcacaactgccgtttccataaacgcttcaggcttttgaatccacgcttccatcaaaagcgcttcatttcttacggcaacgatatgatactgtccaacgagagaagttttgacccagagtcacgcggtgttgttcgccagatcgaaggcagttggggcagttttgacgatgat

SEQ ID NO: 42683 - DNA, 467 bp, Gossypium hirsutum
  Clone ID: LIB3189-043-P1-K1-C8
aacaaacaggcagatcagtttgcgaaaggagaaaacttcgtgaagaaggcacagaaaatgctaaatggttggcgcttgttaaggtctaaatatgaagacgccccaccatttatccgactaagatgctaattgctttaagacatgccaaatcatgaacacaaagctggatcaacttatggaaaaggaggcaaattgcacattggacatcagaccacaagcatgaaacagatcacgcttatgatgatgctgctcattgttataagaaaacagctacaaaggaggctatatcttgcttgcaacacgcagcgaacttgatttgcgatataggaaggctcaacatgggtagaaggtattataaggaaattgctggattatacaagactgaacagaacattgggcaagccatggattattgtgaaaaggctgctgatttcttccaaaatggagatgtgtcttcttctgccaat

SEQ ID NO: 42684 - DNA, 415 bp, Gossypium hirsutum
  unsure (1)..(415): unsure at all n locations; Clone ID: LIB3189-043-P1-K1-C9
cggacgcgtgggcggacgcgtgcaaaaacaggtgaaaatatctctctcttcactttcttctcttttcaacgcacggtgaaaggcggggaggccgtagacaatctctcttgcgctcttctcgtagaatggatcagattcaacatccaactgtcatgcagaaggtagctggccagctcctttcttctagcatttcccgagattntcaagggtatgatgggtctttcaggaggcctgccctataccaaggacattgtgcatatgggaattattccaatgctggaatgcactatcctattgttccatcaacagctaccgcccattgtgttcaagcccctgcagagaaaggatttaccagctttgccattgatttcctcatggcggtgagttctgctgctgtgtcaaaaacagctgctgc

SEQ ID NO: 42685 - DNA, 461 bp, Gossypium hirsutum
  Clone ID: LIB3189-043-P1-K1-D10
gagcggccgctcgcgatctagacttgaattctactagttttcttctcttccaagcctagccatggttctcgaggcgactatgatatgcattgataactcagaatggatgcgaaacggcgattattcaccctctcgatttcaagcacaagctgacgccgttagtcttatttgtggagctaaaacccagtctaatccggagaatacggttgggattttgactatggcgggcaaaggagtacgtgtattgactactcctactagtgatctcggcaaaatcttggcttgcatgcacggtcttgaaatggggggtgagatgaacctagcagctggaattcagattgctcagctggccctcaagcatcgccaaaacaaacttcaacaccaaaagattatagttttttcctgaagtcccattaagtatgaaaagaaagtcctggagatgataggaaagaaactgaaaa

SEQ ID NO: 42686 - DNA, 375 bp, Gossypium hirsutum
  Clone ID: LIB3189-043-P1-K1-D11
caaagctggtttggtcacaattcaaggcgcgtatttgtctataacttcgttcccagatcaagcggagaagctgcttcagatgagtcttgcaaggtagccattgcaaaatgagtccgggttatactttacccaactaacatccgaggcagtccaaaatgattataccaccaagatttgaccaccaagatgatttcttacaaaattgctttagtcatcaagctgtcaaatgattttatcggctctctaggacaccagctcgtgaatagagtatggtgtgtctaatatcatttagcaatttctttctaatcgaaggtttgtttttaccactattcttttattaaaatttccttattatctcttttattttttgctttt

SEQ ID NO: 42687 - DNA, 443 bp, Gossypium hirsutum
  Clone ID: LIB3189-043-P1-K1-D12
aaaaaaaatctttccagtttctattttctaaaaacaaaactgaaaatgtcttgctgcggaggaaactgtggctgcagctctggttgcaagtgtggcaatggctgtggaggatgcaagatgttccctgacataatagagaagactacaactgagactattgttcttggtgtgacaactcagaaaatgcactttgagggatctgagatgggagttggggttgagaatggatgcaagtgtggagacaactgcacttgcaacccttgcaattgtaaataagagggggggaaaatgaacaacaaagagaagcagagaggcctttgtctttttaactaaataaattctattactttagtatgtatcagcaaatcttcatgaggatttggttcttaattatgtgtaatgtgggcttttctgctatgtcagaatgtattatgatatttaag

SEQ ID NO: 42688 - DNA, 438 bp, Gossypium hirsutum
  unsure (1)..(438): unsure at all n locations; Clone ID: LIB3189-043-P1-K1-D2
agcggctacgcgagccattgttgctgctgcatgctaatctattttcctccaggaaacccaaaggctgcctcgatccggaaaatttcagagagtttaagcttgtcaagcgccagcagctgagtcataatgtngggaagttcacatttgaacttcctactcctacttcaggtttgggtcttcccatcggacagcatataagttgcacgggcaaggatagccaaagtggaagggttattaaaccatatacacctactacattggattctgatgttggtcattttgaattaggtattaagatgtatcctcaaggaaggatgtcacaccatttcaaagaggtgcgttgtggtgattatccttgctgtgagggtcccaaaggggggttcaggtatcaacctggtaagttagagcatttgggatgattggtgagtctggcattac

SEQ ID NO: 42689 - DNA, 404 bp, Gossypium hirsutum
  Clone ID: LIB3189-043-P1-K1-D3
cgtagtttggatttatggaaggatgttcctggagtttgtgagcaagtctccaccacttctcaatccgactcatcttcaatagataatggtagcgttggatgctttacttcagtttccaaaggtatgaatgatgttggttttagaactccccaatcaaaaaaagttgtccctacgagcaggtcccctccttctgatgcctcggctgcgtccactgccaagaaagagacatccctgaaaagtaataatagcaacagtaacactcgtaggctggaccgctcaaaatcttctgattggaagattgaaactgttcaaccgaagtctttgttttctgaggcctctggtaattacaatatcaaaaggagtgtatcctttggcaaggcccatgacgaaaaagtgcaaaaatt

SEQ ID NO: 42690 - DNA, 443 bp, Gossypium hirsutum
  Clone ID: LIB3189-043-P1-K1-D4
gtgaaaaggtttaaccaggaagggttccaaggtcatagggagtggttggcggaggtgaattatctgggacagctttatcatcctcatcttgtgaaattgattggatattgcttagaggatgaacaccgtcttttggtgtatgaattcatgcctcgtggcagcttggagaatcatttattcagaagaggtacgtatttccagcctctttcatggagccttcggatgaaggttgctcttggtgcagcaaaggggctagcctttcttcacagtgctgaaacaaaagtgatctatcgagacttcaagacttccaatgtcttgcttgattcgaactacaatgcaaagctttctgatttttggttggccaaggatgggccaacaggtgatcagagccatgtttgtaccagggtcatgggaacctatggatatgctgctcctgagtattt

SEQ ID NO: 42691 - DNA, 101 bp, Gossypium hirsutum
  Clone ID: LIB3189-043-P1-K1-D5
aaaaaaaaaaaaaaaaaaaaaaataaaaaaaaaatttttgttggccgatataaaagaaaaaaaaattacgtacgcataaaatgaaaaagagataggctatt

SEQ ID NO: 42692 - DNA, 466 bp, Gossypium hirsutum
  unsure (1)..(466): unsure at all n locations; Clone ID: LIB3189-043-P1-K1-D6
cattcgtaacgttcgcgcgccgttgggattattatcgttcgaaaaatacccgctgcggcaacttaaagtgagttggtgggcgaagatnngagtcgtggtgggcagcacgtgggaccccaagcggtggaagannagaaagggagnnngacctttactttatcgactcgttgctaanngccggttgaaagataaagatacatgtgacatttgcctcacttcgaaaacgttcctttccaggaaccggatcaagggtagggcggcnnaaagccggtggctcttggggcgactccgtnncaccgtcacccgcgacaaggannncaaaatcaccgtcacgtcntgacttccaacttctccaagcgttatcttaagtacttgaccaagaagtacttgaagaagcacaatgtccgggattggcttcgagtgattgcttncaacaaggacagatctgtttacgaactccgctact

SEQ ID NO: 42693 - DNA, 374 bp, Gossypium hirsutum
  Clone ID: LIB3189-043-P1-K1-D7
cctacgcgtccgattgggtcttctgcaaaccaaaccatgtctgacctagacaggcaaatagagcagctaaagaagtgtgaacccttgaaagaatccgaagtgaaagctctttgtctcaaggtcatggaaatacttgtagaagagagtaatgttcaaagggtcgatgcccctgtaactatatgtggtgatatccatgggcagttttatgatatgaaagagctttttaaagtaggaggtgattgccctaagacaaattatttgtttcttggagattttgttgacagagggttttactacgtggaaacctggatgcttgtatcgccattgaaagacagatattctgatcgcataacactcattagagggaaccatga

SEQ ID NO: 42694 - DNA, 359 bp, Gossypium hirsutum
  Clone ID: LIB3189-043-P1-K1-D8
tgatcaaaatgggttttattgttttggccttgatggtggtttccgccgcgacggtggttacgggggctgacgagagtggggtagcgaatgagtgcagcaaagatttccagagcgtgatgacttgcttaagctttgctcaaggaaaagcagcgtcgccgtcgaaggagtgctgtaattcagtggcggggattaaagagaataaacccaaatgtttgtgttatattttgcaacaaacacaaacctctggtgctcaaaatctcaaaagcttaggtgttcaagaagataagctgtttcaagtaccatcggcttgtcaattgaaaaacgcttagcgtagtgattgcccaaagctttttgggtta

SEQ ID NO: 42695 - DNA, 458 bp, Gossypium hirsutum
  Clone ID: LIB3189-043-P1-K1-D9
accgattcaagctcttctcaaatcttttttcaattaactctctccaaagatgcagatcttcgtcaaaacccttaccggcaagaccatcaccctcgaggttgagagttctgacaccatcgacaatgtgaagtctaaaattcaagacaaggaaggcatcccaccagaccagcagcgtctcatcttcgccggaaaacagctcgaggacggccgtaccttggccgattacaacatccagaaggaatctaccctccaccttgtcctacgtcttcgtgggggtatgcagatcttcgtcaaaaccttaaccggcaagaccatcaccctcgaagtcgagagctccgacaccatcgataatgtgaagtctaaaattcaagacaaggaaggcatcccaccagaccagcagcgtcttatcttcgccggaaaacagctcgaggacggccgtaccttggccgattacaaca

SEQ ID NO: 42696 - DNA, 460 bp, Gossypium hirsutum
  Clone ID: LIB3189-043-P1-K1-E10
gaaagaaagaaagaaaaacaacagaaacgagtgaacggcatcggaaaatgagcggagaagaaggtcgtgaggccgccaccgctaccgtccccgctgctaattcttcaacaaagccatgggtggaggaattgccgacaatcgaaagccttatagactctaaagacttagcgattcgctctgctcaatcccttttccataactcctctacccatctacgctctttccaggattctctaccacaagcatcctctcactataaatcctatgaagatgcttttttcagcaaacttaaagagggggtgatgattgcaaaggaaaaccctggtgcagctgttgggattactttgactgctgctctctgtctcatgcgaggcccaagaaggtttctattccgtaatacgttgggtcgatttcagagtgaggaggcaaaattttctagggctgagaagaatggaaaagt

SEQ ID NO: 42697 - DNA, 463 bp, Gossypium hirsutum
  Clone ID: LIB3189-043-P1-K1-E11
agcaagtcagcagccatcatcaaggatgcactctatgtattgagtgctggaagcggtgactttctccagaactactatgtcaatcctttggttaaccatgcctatactccagaccagtatggctctttccttattgatgccttcacaagattcgtccagaacgtgtatggcttgggagcgaggaaaattggtgttacttctcttcctccgttaggttgcattcccttagcaagaacattgtttggttaccatgagaagggatgtgtgagcaggttcaataccgacgctcagcaattcaacaaaaagctcaacgcagcagcaaccaatctccagaagcaacaccctgatctcaagaatgtggtttttgacatttacaaggcccttcttgatgttgttaataccccttcaaactatggtttcgtagaagcgacgagaggctgctgtggcacaaggactgtagaga

SEQ ID NO: 42698 - DNA, 464 bp, Gossypium hirsutum
  Clone ID: LIB3189-043-P1-K1-E12
gcaactccattttccttggtgctaatggagatgacaatggtggttggcaaactgcccatgccaccttctacggtggtgctgatgctaccggcacaatggggggagcttgtggttatggaaacctgtacagtcaagggtatggaacgagcacagcagctttgagcactgcacttttcaacaatggcttgagctgcggtgcctgctacgagctccggtgcaacaatgatcctcaatggtgcattagtcgaaccataaccgtgacagccaccaacttttgtccacctaactatgctttatctagtgacaatggcgggtggtgcaatcccccacgagaacactttgatttggccgaaccggcattcttgcggatagcagaatatcgagctggaatcgtccctgttatgttcagaagggtgtcatgtgtgaagaaaggaggcatcaagtacaccatgaatggacattcg

SEQ ID NO: 42699 - DNA, 326 bp, Gossypium hirsutum
  unsure (1)..(326): unsure at all n locations; Clone ID: LIB3189-043-P1-K1-E2
tgtcaatggttttaacggcgtctacatcaattgaccaacgtctttttatttgagggatgctgatgcttagttggttggatcaatttacttgccccattcttcattacgttgtacggtatttagacacaaataaagcttctttcaccaacgtatggagctgccccattanntttgttcgaaatacttacgtctttaattggtgagggaaaaataaaccaatgaaaaataacctacancacttgagaacgaacatgatatgctatcaactcacanagtatatattgtgttccctttcacaataatgaatctatattttacaaacaaaa

SEQ ID NO: 42700 - DNA, 450 bp, Gossypium hirsutum
  unsure (1)..(450): unsure at all n locations; Clone ID: LIB3189-043-P1-K1-E3
ctcaatttacccatctgtctcgtctctgggtctcgtaagttggcgaatagcgttgtaattagtgccaatggctcagattgggacctctgcagctcacattgtgttggcaatatttgctgtggccatgtttgttgtgtccgggaccatggcacaggatattgctccttctcctgcaatggctaccggagcaggctctgctttgccggtttccgctgtcttcttatgctcttccatgttggtctctttaattgctctcttggtgcattgaattcaaagcttttcaagactttatgacattggctacccttaatttcactctcactggtgatgaggggagtagcctctaatcttctccgagatacatatttggtgtnatcaattttcaatttctctaaagttttaaatatctctatatatatcatgttacattagtgacataaatttgatttt

SEQ ID NO: 42701 - DNA, 252 bp, Gossypium hirsutum
  Clone ID: LIB3189-043-P1-K1-E4
attcttcaacaaagccatgggtggaggaattgccgacaatcgaaagccttatagactctaaagacttagcgattcgctctgctcaatcccttttccataactcctctacccatctacgctctttccaggattctctaccacaagcatcctctcactataaatcctatgaagatgcttttttcagcaaacttaaagagggggtgatgattgcaaaggaaaaccctggtgcatctgttgggattactttgactg

SEQ ID NO: 42702 - DNA, 420 bp, Gossypium hirsutum
  Clone ID: LIB3189-043-P1-K1-E6
cccacgcgtacgcttgggttgagtgtagagatgaggaaaatcatgggtgccaaagttcttttcttctttgctttgctttccttttcagctgtctcggcatttgcacaggatgaggaagaccaaggtcttgttatgaacttctacaaggattcttgtcctcaggctgaagacattatcaaggagcaagttaagctactgtacaagcgacacaaaaacactgctttttcttggctgagaaacattttccatgactgtgctgtccagtcatgtgatgcttcactgctgctggactccacaagaaggagcttgtctgagaaggagacagacaggagctttggcctaaggaatttcaagtacattgagaccatcaaagaagctgtagaaagggaatgtccctggagttgtttcttgcgctgatat

SEQ ID NO: 42703 - DNA, 142 bp, Gossypium hirsutum
  Clone ID: LIB3189-043-P1-K1-E7
cggacgcgtgggtaacaatgagggaaatccttcacgtgcaaggaggccaatgcgggaaccaaatcggatccaagttttgggaagtgatctgacacgagcacggtgctgatcctaccggaaagtacagttgagatggatcatc

SEQ ID NO: 42704 - DNA, 455 bp, Gossypium hirsutum
  Clone ID: LIB3189-043-P1-K1-E8
ataaattttcttctcgttcccgttagccccccacgaacttaggcaaagcagaggctagagagatgtcggcggcggcggcggcgacaagccgagcgactcgacggatgggagccgaggatgagaagctagtgttcgaaacgacggaaggaatcgagccgatattgagttttgatcagatgggactaaaagacgatctcctccgtggaatctacaattacggcttcgaaaagccatctgctatccagcagagagccgtcatgccgataatcaatggcccggacgtcattgcccaagctcagtctggtaccggtaaaacttccatgattgccctcaccgtttgccaagtggttgacacagctagcaaagaggttcaagcattgatactgtcacccacgagggaactggcttcacaaacggagaaagtgatacggacaattggtgatttcatgaacata

SEQ ID NO: 42705 - DNA, 461 bp, Gossypium hirsutum
  Clone ID: LIB3189-043-P1-K1-F1
ctcgagttgacagtataaaggctgtatttgaagaagcatggactgatttaggcaagaatgaaattgataaagaagtggtggagaaggtttgggataggattgctcctggtctagcctctcagttcgatgcacctaacacggtgccggctattgcacctcgccctttgttaattgtaaatggagctgaagatccccgttgccctcttgaaggcttagaaattcccaagacaagggcatacgaggcttatggagaggcccattcagacaactttaagcttgtggctgaacctggaatagggcatcaaatgacaccattaatggtgaaagaagcgagtgattggtttgaccagttcctcaaataataattgtaagggcctctgtctgggttgttattgtttggagatgtaatgtatttcctaatatgtatgcttcatcatgaatgatttgatgaactcagagat

SEQ ID NO: 42706 - DNA, 462 bp, Gossypium hirsutum
  Clone ID: LIB3189-043-P1-K1-F10
cccacgcgtccgcaaaaacaaccagaattcaatggggaagaaagctgtgttgattggaatcaactatccaggcacaaaggctgaactgaaaggctgcataaacgatgtgaagagaatgtacaaatgccttatagaacgctatggattctctgaagaagacatcacggtattgatagacaccgataattcttatgatcagcccacagggaagaacatcagaagggctttgaatgatcttgtgagatcggctgagcctggggattttctgtttgtgcactacagtggccatgggactaggcttcctgctgagactggggacgatgatgatactggctacgatgagtgcattgtcccctgcgatatgaatctcatcactgatgatgatttcagagagttggtggataaagtcccaaaaggtagccgcattacaatcgtatcagattcatgccacagtgggggatt

SEQ ID NO: 42707 - DNA, 254 bp, Gossypium hirsutum
  Clone ID: LIB3189-043-P1-K1-F11
atcatttggtttttgaagagcccttaaaagagcttattgatgggctctatcaaatctgttgtgatctcattctaaatggggccaacagtagctactttctaaaaattgtggaattttatggatccacgcttggtatgtagccaagcccaagaaaaaaggaacgaggggaagaatcgacaaggaatccataacgaacaaacaacaaggaaaaacatgaaaaaagactttgaatgatctcaaaaaaaagggctgac

SEQ ID NO: 42708 - DNA, 297 bp, Gossypium hirsutum
  unsure (1)..(297): unsure at all n locations; Clone ID: LIB3189-043-P1-K1-F2
aaagaaaaaaaaacacaaaataccctctccccaacttgtttatccgacgaatcagattccttcatcgcccgctgtaccaccaccgtactcgatggccgacggtgcgcgaagataggcttttcaaccccggtgtcagacgcgtggaaggccggtggttggtgccccgagcggtggtggcgcgcgtgaggaggctggtggcttaagagcggcggctgaaatgatgggggctagggttgctgaaatgttttgggttggtggggttagggttgatgtaatgggtcatttggttttggnttt

SEQ ID NO: 42709 - DNA, 464 bp, Gossypium hirsutum
  unsure (1)..(464): unsure at all n locations; Clone ID: LIB3189-043-P1-K1-F3
caaaaaaacgcatttattttgttatcgcaagagcgaaaaagtgaataaaataaaatatattattttattaaagtttttgtttgggggaaattgagagaaaattttgaaaaaaaaaaaatccaagatgaagatcacatcgttagtagtgctgaagtgcaacccggaaggatccgatccgataatactagcgaacgctaccgatttgagccattttggttacttccaaaggtcaagcgtcaaggagttcatcgttttcgtttctcgaactgttgctaaacgtactccttctggtcagcgccaatccgttcagcacgaagagtataaggtacatgcttacaacagaaatggactttgtgccttgggatttaatgatgatcattatccaanntcgagtgctttttcgcttctcaaccagattctagatgaatatcagaaaaattttggggagtcttggagaaatgcac

SEQ ID NO: 42710 - DNA, 477 bp, Gossypium hirsutum
  unsure (1)..(477): unsure at all n locations; Clone ID: LIB3189-043-P1-K1-F4
aaaaaaaaaaaaaaataaaaaaaaaaaaaaaaaaattaaattaaaagaaaaaaaaaaaaaaaaaaaaaaagggaaaaaaaaaaaaagggggggggggacaaaacaatgggaagaaaaaaaaaaaaaaaaaaaaaaaaaanggggggggcccttttaaagaacccaagtttacttccccgtgattgcaaagtaatagtttttttttggggccccctaaattaaattccctggccggggtttaaaaacgtggggattggaaaaaccctggggttaccaaatttaatcgctttgaaaaaaatccccttttccccagttggggaaaaaacaaaaaggccccaaccgatcgcctttccaaaaatttgcccaccctaaatggcaaatggacccccccttttaccggccatttaagcccggggggtggttggttacccccaatggaacctttacttttgccagggccttaacccccgttttttt

SEQ ID NO: 42711 - DNA, 470 bp, Gossypium hirsutum
  Clone ID: LIB3189-043-P1-K1-F5
gtaaaatcgaagggttgggtaaggggacaccaggtgttttgaaccggcaaggttttcccggggaccgtaaaggcgacggatcgaacaggagggaaaagaagttcgagccagccgaaccccctgcgaggtgggttcggaggcacgaaaacaaaaaggtccggaaggcggtgctcgactttccacaataaccccactcaggaagtgcaagctacggctgttaaaagttggagcggatcaaggattatttactaatggaagaagagttcgtagccaatcaagaaaggcttaagccccaggaagagaaagccgaggaagaccgatctaaggtcgatgatttgagaggctccccgatgagtgtgggcaatttagaggaactcatcgatgagaatcacgccattgtttccttttcggttggccctgaatactatgtgggcattttatcatttgttgataaagaccaacttgagccc

SEQ ID NO: 42712 - DNA, 471 bp, Gossypium hirsutum
  Clone ID: LIB3189-043-P1-K1-F6
ccacgcgtccgattctttgctgttgaagtagtaatatctatagcatacagagatggagaggcaaagaagcaagcaggtttgtttgttgatgtgggttttggttgctgcctttttctcccacaatagggtcattgcagtgacctccactggccttggtgagcagaaaaactactatccagctcctgaccctcatgctggaactcccccttcaggttcacatggcacaccaccatcttcaggaggtggatcacctccctctcatggaaccccgtcacatggaggtggttaccacccttcaccaacaccatcaacgccttcgggtggaaattgtggaactcccccacatgacccttcaactccatcaacaccatcacacactcctcctcatggtactccaccatcatctggaggtggtagtcccccatcgtatggaggaggcagtcccccatcgtatggaggaggcagtccccc

SEQ ID NO: 42713 - DNA, 458 bp, Gossypium hirsutum
  unsure (1)..(458): unsure at all n locations; Clone ID: LIB3189-043-P1-K1-F7
ccacgcgtccgattgcttttactcttcatcgaactgttgttagacacaaaactgatgttgaagatttggaggctatctttcacttgtatgtttggggaacttcgctggttatgactgtcatacgttctattggtaatgaccacacgcatttgggagcatggtgttgggcacaaacaggtcgcactggaaaggcagttcatttcataacgttttatgtcccactatggggtgcaattctttacaatggttttacatactttcaagtgatacgcatgctgaataatgccacccgtattgcagttggcatgtcagatcgtgcataccagtttgattcaaggacagacacgaaggctttgaaccgntggggttactatccactgatcctgattggatcatgggcattcggcacaatcaatcgcatccacgattttattgagcctggccacaagatcttttgg

SEQ ID NO: 42714 - DNA, 400 bp, Gossypium hirsutum
  unsure (1)..(400): unsure at all n locations; Clone ID: LIB3189-043-P1-K1-F8
ggctccttcttcttctccttcatcttcttgttctgcttcttcctctaaatctcctcctccacctcatcagtccccttttttcactccagtaagttccttttttcattttcttatcattatttgggtattttcttaaaggttcctcgttttggctgatgaagtagtttgattttctttttggtttgtggaacagattcaagaatgtgaaagggagggacaagaagatggtggtactaccccaaacgtatgcagggacaaagcggtgaccccaaagcacttcgcaacgcccctccatgctaaaaccactgcaaaatccaacgccaggaaacgtcacgagtctgctggaaatggtggggatgggtgagatggctctggttnttgcaacaagtgcaagcctcac

SEQ ID NO: 42715 - DNA, 459 bp, Gossypium hirsutum
  Clone ID: LIB3189-043-P1-K1-F9
cccacgcgtccgccgaggagtttgggaaaccctatctctctctaaatatcaaccgaaaaaagctctcaaaaaactaccctttcttgcccccccctctatctctctcactttctctcattctctttctttccagcctttctacactctttttttccccatcgctcctactgttttcatctgcttcaagtcatggcaggtttggcaccggaaggatcccaatttgatgctcgccaatatgatcagaaaatgactgagttgctccaaactgatggagatgattttttcacgagttatgatgaagtttatgacagttttgatgcaatgggacttcaagagaatcttctgaggggtatctatgcgtatggttttgagaagccttctgcaattcaacaacgaggtattgttccattttgcaagggtcttgatgttattcagcaagcacagtccggaactgggaag

SEQ ID NO: 42716 - DNA, 462 bp, Gossypium hirsutum
  Clone ID: LIB3189-043-P1-K1-G1
gtttctgctaccgtttgggccacttacgttaatcataatgctagggatgtggggttggtctaagaccttcctcttctctttctacaatcttcgttgccgtttgcaccagacatgggtcgttcctaggttcggctttcagtatttcttaccatttgcaacaaagggcatcaacaagcacatagaggaagccatattaagggcggacagattgggggtcaaggttattagcctcgccgctttaaataagaacgaggctctgaacggaggagggacactgtttgttaacaagcatccagagcttaaagtgagagtggttcatggcaataccttgacggctgcggttatccttaatgaattttccaaagatgttataagaagtgtttctaacaggagccacctcaaagctcggtagagcaaccgctctctacctctgtaggaaaagagtcgggttcttatgttgac

SEQ ID NO: 42717 - DNA, 177 bp, Gossypium hirsutum
  Clone ID: LIB3189-043-P1-K1-G10
gttgaagaaaatcagccgttgtggaaattaaccatttgtgaggactattataggttctttccatttctatttttctttgaaagaaaagacattttaagttttttcatcttggctatgatcaagtgtcacacatgatacgaactacttgtgatattctattacaaagttttgctgttg

SEQ ID NO: 42718 - DNA, 391 bp, Gossypium hirsutum
  unsure (1)..(391): unsure at all n locations; Clone ID: LIB3189-043-P1-K1-G11
atataaaattttgatggcttattaataaaggagtgagggggcatnaaaagtaaaaacatatgggctattaccaatgcaccccaccatcttaactacacaactaaccccaaaaccatgttaaattcccacaaattcaacaggacgaacccacttatcacaatcacgcctgacacaaagttaaaaaaccccgtttgtcgcaatattccccaatttaccacccaaaaagtggaaaaatccctctctcgacttcaaaaatattttccatttaccaccgcgctttcccaccaaatttcaaaaaaaaattcccctggcattttaccccaaccctccatttagttgctggccccatccaccaactgcaaatccccatcagccccattaacttgaccct

SEQ ID NO: 42719 - DNA, 388 bp, Gossypium hirsutum
  unsure (1)..(388): unsure at all n locations; Clone ID: LIB3189-043-P1-K1-G2
ggggggggnnnnnanggaagagggggagaaaaananattgatgcattaaaattttcaatataatcaaactttttgattaaaaatgacagaaaaaagaagcttataacccttttgtcaccattccatttaaaatagaagccaaagaaaaaggttacttttatttttatggccaaaacacaaaataacaaaatgcagcttacccacaactttgtttaacccatccaaacctattgtttgcgatatcaaattcgatgtaataattttgctgctgaaagctccctaatattattgcaagaccgctttttgagccttggccgaccacattgtttgaaaccatcattaaacacacaaccttattattaccgtcaaatgagaaatagttaaccaa

SEQ ID NO: 42720 - DNA, 434 bp, Gossypium hirsutum
  Clone ID: LIB3189-043-P1-K1-G3
gagaagccgacgttaccatggttaacgtaagtttttaccgcaactatgggaagacctttaagaagccacgacgtccgtatgagaaggaacgattggatgctgagttgaggcttgtaggagagtatgggctccgatgtaagagggagctgtggagggttcagtatgctttgagccgcatccgtaatgctgctagggaccttctcactcttgatgagaagaaccctcgtcgtatttttgaaggtgaagcccttcttcgtaggatgaacagatatggacttttggatgagagccagaacaagctcgattatgtgttggctttgactgttgaaaacttccttgaacgtcgtttgcaaacgctcgtgttcaagactggtatggccaagtcaattcaccatgcacgtgtgttgatcaggcaacgacacataagggtcggg

SEQ ID NO: 42721 - DNA, 471 bp, Gossypium hirsutum
  Clone ID: LIB3189-043-P1-K1-G4
cggacgcgtgggcggacgcgtgggtgcggggcttatctccattgatttagctcgggatcttctgcaagtgcacccgaattctaatgcaggtgttgtcagcacagagatcatcactcccaactactaccaggggaatgaaagagctatgctccttcccaactgtctcttccgcatgggtggcgcagcaatcctgttgtcgaaccgccgctcagagaggcggagagccaagtaccgacttgtccacgttgttcgaacccacaaaggggccgatgacaaggcctaccgatgcgtgtttgaagaagaagacaaagacggcaaagttgggatatcattatctaaagatctcatggctatagctggagaggctttaaaatccaacattaccacaatagggcctttggtgcttccagggtcggaacaactcctatttcttctcactctgatcgggcgtaaagtcttcaaccccaagtg

SEQ ID NO: 42722 - DNA, 456 bp, Gossypium hirsutum
  Clone ID: LIB3189-043-P1-K1-G6
catcgacatgcctactttgataagatgcaggtgctggctgttatatttgctcttttgcagatgatgtcttttttgttatggccatcttattcattgtctttgttgaaataagaactgtgtcctagttccttggacattgttgatttcaaatggcacctagaatgtattcaattaaaaaaaaatgctaacagattcattatacctattataggtttgggactatactggtttaagttacgcaaaatacaatgctagggatgcagacaaagaagtactcgggtgcgttgtggaaaatacggtgctacttagttctctgctgtcacgtgtgcaggaaacagatttgccgaagaaaatatacccatcaagattgaattcaatgtctatactaccaaattcttcatccttcggagttgacagcacattatcgatgacagcattgtttactcaatggcgttt

SEQ ID NO: 42723 - DNA, 440 bp, Gossypium hirsutum
  Clone ID: LIB3189-043-P1-K1-G7
cccacgcgtccgcatatttctttgctgctttactaactaaaaagaaaaacctttctttgtttaacgcttaagattcctttaacaacaatggctccctcaatgtctactctaatggttgttctcgtcgctgtatgcgctctcatgggttccgccattgccgccgacgctccggctccgagccccacctctggtgccagctctatctcgccgccatttgtctctgtttccgtcgccgctgccgctatggctctgcttttcggatctagacttcggatctgaatgatgctatctctggtgttcagatgatgctctgtttttcttttatatatgtattttttttctttttgatttgattttgaatttggtttgcaattttagtagctgcggtagtggatctagggagtgattatattatatataatttatcagacagagggaga

SEQ ID NO: 42724 - DNA, 428 bp, Gossypium hirsutum
  Clone ID: LIB3189-043-P1-K1-G8
gtgaatccattgaagagcgtgatggtaaatgatggtaagacgaggttttccaccatggatgggaaccccatctttcatttcctcaacacctccactttcagccagtacaccgttcttgattctgcctgtgtagtaaagattgacaccaaggcccccctcgagaaaatgagcctcttaagttgcggtgtctcaactggcgtgggagcagcttggaatgtagccaacgtgcaacctggctcaagcgtggcaatctttgggttgggtgccgtgggactcgctgtagctgaaggagcacgagtaagaggtgcatcgaaaataataggcgttgatatcaaccctagcaaatttttcaaaggcaaagcagtgggaattacagaattcataaacccaaaggatctagacgtaccagtgcatgagaaaatcggagc

SEQ ID NO: 42725 - DNA, 422 bp, Gossypium hirsutum
  Clone ID: LIB3189-043-P1-K1-G9
cggacgcgtgggtgttcacaaagttgaatcctttggccaaagaatttttcccatcttcttatcaacaaaatcagaccaaaaatgatggcaaatttaatcaggtgcctgttggtaacaaatcagttggaaatgagaatttctccaacagagggaggagaaataactccaaccaaggtaggagaaggcttaatggtaaagcttttcgagctcaacgagatgatagtattaggcaaacagtatatgtttctgatattgatcagaatgttactgaagagcaacttgctggcttatttagtaattgtggacaagttgttgattgccgagtttgtggtgatccacattcagttcttcggtttgcatttgtggaattcgcagatgaagaaggtgcacgagctgctttgaacctcaatgggataatgcta

SEQ ID NO: 42726 - DNA, 400 bp, Gossypium hirsutum
  unsure (1)..(400): unsure at all n locations; Clone ID: LIB3189-043-P1-K1-H1
agagcaatgctttctttgcaaaaggagattgttacctgggaaagatatttatatgtacaaaggggataagggtttttgcagtgtggagtgtaggtgcaagcaaattttcatggatgaagaagagagtttaaagaaagatagttgttctttggatgccattgttaaaccttcttcaacttctgtagcttcaacttcgtcttcttcctcagccgctcgtcaccaccggaaacctgagagaaaccgtgccggtggctttgcttattgactcaaaaaaaggaaaacggttttttatttttattttatataagttattattattgaattttggtttaaggtttttntaaggagtatatgatcctagctggttctttttaatgacnaatccgatcgtttttgcttc

SEQ ID NO: 42727 - DNA, 466 bp, Gossypium hirsutum
  Clone ID: LIB3189-043-P1-K1-H10
cttttgattactcctcttcccgatttcataaaattttattattctcccactccgaatcgatctatgatttgggcaattcctctgttttcgctgtaaatattattcaaaatcaatttcatcaattatgtttttattgtctttttcgttgatgacttgcaacgtgatattccaaaacctgcgtgtgttcggtcctggcttgaatcctttttcccctttctgcgtcgctcatcattcctctgcttctcgctaatctgtttccctcttctccttgttttcatctctatcatgtaatcatttttctcttcatcttaagctttcgaggggattgtttgttttccaagaaaaaaaaatgaaagggatctaactctttgtgaaaatttcacgtttttacaaaaatatcatgcgtttctttgcctaatcaatcaaatcttggtctggtgttctctttacttcttccgagttaaag

SEQ ID NO: 42728 - DNA, 374 bp, Gossypium hirsutum
  Clone ID: LIB3189-043-P1-K1-H11
gtttggatcagtttcaatggcatccaccaccaccttcctcaaacccatcccttccatcaacttgccttcccaatctcacagagctttagcttccaatttctcttattcaaagccttttcccttccatggcctcaacctctcatcggtcactgaaaccagttccttcacctcatcaagatcctccaaccccttcactaccactgccttcttcttcaacaagttcaagcaggaggccgctccacatactcccaagcccggtaagcacacttcctgattgttctttttcttattcaatttcaaatctttatttgattgactttaacgtttggggtttcagcaaaagttcaagagctacacgtttatgaaatgaacga

SEQ ID NO: 42729 - DNA, 449 bp, Gossypium hirsutum
  unsure (1)..(449): unsure at all n locations; Clone ID: LIB3189-043-P1-K1-H2
catgatgtttcatggaaaaatgcatggtgaccacttggtcgagctcctacgtccttttgttcagcaatggagtcaggctgattgttggatgcaattgtatgaccggtggtcttctgttgacgatctcggttccctagctgttgtacaccatatgttggctaatgaccccggaaagagccttctatggttcagacagtctctcctccttttaaggttaaattgccaaaaggctgcaatgcgtagtctacggttggctagaaaccattctacctcggatcatgaaaggctcgtctatgaaggatggatattgtacgacaccggccactgcgaagaagcactagctaaagctgaggaatcaatctccatcncgggatcatttgaagctttcttcctcaaagcatatgctttagcagatacaagtctcgatcaagagtcctcggcatatgtta

SEQ ID NO: 42730 - DNA, 236 bp, Gossypium hirsutum
  Clone ID: LIB3189-043-P1-K1-H3
atcccggtcgaccacgcgtccggaacgtcggagtctcgatggaaggaatataaccgtcaacgaagcacaatctcgccgaagcggcggcggaggtggtggtggaggatttggaggaaaaggtgggtacaaccgtggtggaggcggtggatatggtggtcgccgtgaaggtggatatggaggtggtggattcggaagagaactctgtatttgtgataaatactgttattgttgtttta

SEQ ID NO: 42731 - DNA, 391 bp, Gossypium hirsutum
  Clone ID: LIB3189-043-P1-K1-H4
gcgtacgcttttttatattactctcaattcccattgaaactttcagactttcagccataattaagcttcttcccttcagaaaacttcgactgaagctgctccaagattaaagaagcttcaatttataatactctgccccttaaactagcaagcctgatctgctgcataatcgtctaaagaaaatttgatggggataaataagttgctgtgttggtttgcagatttcttctttttgttgggtttctctgcttgcacttcgatttcggatggtgttttcgactctctcacttctactggaaggcaccttcttcaagctaagaaagcttgccctgtgaactttgagtttctgaactacacaattatcacaagccaatgcaaaggaccaaagtat

SEQ ID NO: 42732 - DNA, 230 bp, Gossypium hirsutum
  Clone ID: LIB3189-043-P1-K1-H5
acgctagatcgtgagcggacgaaattttttttaaatttttatttttaaaaaaaaaataaaaaattttgatggagaaaaattaaagagggggtgggaaaatataaaaattatataaaattaattaagtaaaataattattttttttaaaattaaaatgtggatagaagtgttaataataaaaaattgtgaaataatagaaattaatataatttttaaaattttaaataata

SEQ ID NO: 42733 - DNA, 93 bp, Gossypium hirsutum
  Clone ID: LIB3189-043-P1-K1-H6
tctgatcgactgtcacgtttggagtttcagctaaagttcaagagctacacgtttatgaaatgaacgagagagacttacccgtcaagctctaaa

SEQ ID NO: 42734 - DNA, 223 bp, Gossypium hirsutum
  unsure (1)..(223): unsure at all n locations; Clone ID: LIB3189-043-P1-K1-H7
tttttatataatattaaaaaaaaaaaagtggttaaaaaaaaagggggggggggtntaaaaaataaaaaattgggaaaaaatgaagagaaaaggaaaaagaaagaggaaaagaaaaaagaggggataaaaaaaataagtttaaaaaaagatgataaaaaataaaaaaaggagtgaaaaaaggaaaaaaaaaaaaaaggtgaaaaaaaaatggaaaatgggaatg

SEQ ID NO: 42735 - DNA, 456 bp, Gossypium hirsutum
  unsure (1)..(456): unsure at all n locations; Clone ID: LIB3189-043-P1-K1-H8
ctacagcacaacaaaaaaggcaactagacttgagaaagaaaaacagtctcaaaatgcagcagaagtcaggcttcctgatcctcttgctctccctcattttccttcctctcatcttctccgacgccagaaaggaggctcccctcggaggatggagtccgatcaaagacaccaaggacccacacgtgataaagatcgcggaattcgccgtcgaggagtataacaagcagtcaaatgggagtttaaagttggttaaggtggtgaaaggcgagacccaggtggtggccgggacaaactaccggttgattttgcaggcgaaggaagggaccttcgataacacgtataanagctgtgggtgtggggagagtgtggctgaatttcaggaatctcacctcctttaacctcgtcaagggttagatttgattataatggaatttatgttcatatatggtatccttg

SEQ ID NO: 42736 - DNA, 386 bp, Gossypium hirsutum
  Clone ID: LIB3189-043-P1-K1-H9
cccacgcgtccggaacagaagcaggtcaaataattacaactgttgttggtggtcgaggcgggcatccaaaacagacaatctcgtatatggctgagcgtgtggttgggactggttcatttggtgtcgtctttcaggctaaatgtatggagagaggtgaacctgttgctataaagaaggttctgcaggataaaagatacaagaatagggagctgcagattatgcatctacttgatcatcctaatacagtccaattgaagcactatttcttttcaatcaccgaaaagaatgagctctatcttaaccttattctggaatttgtacctgaaacagttttccgagtttcaaaacactattgtagaatgaatcgccatatgccctttttttat

SEQ ID NO: 42737 - DNA, 155 bp, Gossypium hirsutum
  Clone ID: LIB3189-044-P1-K1-A1
taacgatctcaagaactctcccggacctggaaaaggggagctcaggcaagctaccaaccaagcccttcacttgcttcaggacaattatccagagtttgtggccaaacaggtgtttatcaatgttccatggtggtacttggctttcaatatgatga

SEQ ID NO: 42738 - DNA, 398 bp, Gossypium hirsutum
  Clone ID: LIB3189-044-P1-K1-A10
aaaaataaaaaataaattaaaaataaaattttatttttataaaaaaaaaaaaaaaaaacagagaacaaagcctttatgctagcggggggggggattcaggggccgccttttttttggatccaacatttctctcacgctaatgctaggtattaccttttttttatggccacctaattcaaatgaaatgacccgtacttttacacaatgaagcattggcaaaactctgggttttcccaacttataatgatggtatgacattcctatttcaccaggtttcgtaacagagagttgctgctctcttatacaccttattactgatggcatatcttgaatgtcctactgccatggccctatgcggactcttatagcacttgagattgctagctttcgcatatgag

SEQ ID NO: 42739 - DNA, 396 bp, Gossypium hirsutum
  Clone ID: LIB3189-044-P1-K1-A12
acccgagccacccgccacgcgtccggagggggttagattagatctacttgctatttcactgcacggtgtgtttcgaggtcattgaactaactgatcacaatggctcccacttcctaccctggacctgctcaggttggttcatacttcgttggacaatactatcaggtacttcaacagcagcctgatctagttcatcagttgtattcagatgacagtaccatgatttgggtcgatggagattcctctgactctgcttcggcgatgctgcaaattcatgccatggtaatgtcactaaattttactgcaatcgagatcaagacaattaattctcttgattcttggaatggaggtgttctggtgatggtttctggttccgttaaaatcaaggatttcagt

SEQ ID NO: 42740 - DNA, 461 bp, Gossypium hirsutum
  Clone ID: LIB3189-044-P1-K1-A2
cgacgccacgcgtccggaaacgggggagaaataccctgtcgtttgcgggccttaccgtgtccctttcctcctcaacatgcctggttcaggacaccgagtcacgggcgagttgtacgccgtgtcgtcacgtggactcgcccgcgtcgatgagttggaaggcacgagtcgcggtcattacgagcggctgccgatcctgctgattcccgccggctacgggtacgaaagcgggaataacaaagaaaacgaggaagatcaggcggtgttaacccgagccgctgcggtgggaataacgtgcgcggcggaggcgtattacgcgcacaagagtttcgagaaggagatgtggatgaagaacgggggggaaaggtttgggatatattcagacaaagaagccaaagggtatgtgaaaaggaaagataggcctcaagatctcaagtttcttgatcatgttaggatttttattt

SEQ ID NO: 42741 - DNA, 407 bp, Gossypium hirsutum
  Clone ID: LIB3189-044-P1-K1-A3
tcgggattccaggcacgcgtcacgcccacgcgtagctaaaaaaaatggcagctttccaaacgttttcattttattacgcctgcttcatttcctccgggttgattcaaggcatggaggggtagcgctagcatcccccaaatcttctatcaagtgcgcacctccatgtttcaccaattccatctaacaacttcattgtcgccaataccattgtcaccagtaccattgctacctccattgtcgacaataccattgccaccttcatttttaccagtaccattgacatctgcatatttaccggtaccattgccaccttcgatgtcaccacttcctttaattccagaaccaccaccatgtacttcaatcccagaacttataactaccaccacttaggaagttgtccaacatac

SEQ ID NO: 42742 - DNA, 451 bp, Gossypium hirsutum
  Clone ID: LIB3189-044-P1-K1-A4
ccctctaaaagcatgtattttcctcacacgtttgtttttcttgtgattaatcgatatggctagctcaatgtcccttaaacttgcatgtgtggtggtgttgtgcatggtagtgggtgcacccctggctcaaggggccgtaacctgtggtcaagtcacaaactccctcgcaccctgcattaattacttgagaggcagtggtgctggtgccgttcccccaggttgctgcagcggcatcaaatctctcaactccgccgcccaaacaacaccagaccggcaagcagcttgcagatgcatcaaaagtgcggccgccggcattactggcatcaactttggccttgcaagcggactcccaggcaagtgcggtgtcaacatcccttacaagatcagccctagcactgactgcaacagcgtcaagtgaagttttggcatggaaagttcaccagctagtgga

SEQ ID NO: 42743 - DNA, 435 bp, Gossypium hirsutum
  Clone ID: LIB3189-044-P1-K1-A5
cggacgcgtgggcgacgattggtttcagttctctgttgcctctccttgctgggttcatttgcttcagcttccacaattagccttccatctgattctcgtaaagtctccttgactttgtattacgaatccctttgcccatacagtgccaatttcattgtcaattacctgcccaagctcttcaatgaggatctcatctccatcgtcgatctccgcctcgttccttggggaaacgctaagctcaaaggcaacggcacctttgattgccagcatggccctactgaatgcttgttgaacactgtggaagcttgtgcaattgatgcctggcctaaactgaatgaccatttcccatttatctattgcgttgagaatttggaattggagcgcaagccccttgaatgggaatcgtgctttaagaaattgggattggaatcaaag

SEQ ID NO: 42744 - DNA, 132 bp, Gossypium hirsutum
  Clone ID: LIB3189-044-P1-K1-A7
aaaacgggggtaaaaataaattgtggtttgtgggacttacggttttcatgttgtgatcaacaagcttgttagtttgattatcaacactttctacagcaacaaggagatctttcttcgtgagcttatagtaac

SEQ ID NO: 42745 - DNA, 429 bp, Gossypium hirsutum
  Clone ID: LIB3189-044-P1-K1-A8
aaagctatatactagagcacagttacatcaacatataaacacaggtgactctgaggtggacggaactgagagtgagagaggtggcttcatggggcatccaatgtgtgaattctgcaagaccccgttttatggggataatgaattatattcgcacatgtccacagagcactatacatgtcatatatgccaaaggcagcatccaggacaatatgaatattacaagaattatgatgaccttgagattcattttcgccgagatcattacctatgtgaggatgaggcttgccttgccaaaaagttcatcgtcttccagtctgaagctgaactaaagagacataataccattgaacatggaggtcgcatgtctcgagcacaacgtagtgctgctttacaaattccaacaagctttcggtattggcgaagtaatga

SEQ ID NO: 42746 - DNA, 416 bp, Gossypium hirsutum
  unsure (1)..(416): unsure at all n locations; Clone ID: LIB3189-044-P1-K1-A9
taaaattttatctcagtttaacaggggcagcagtgccatgcaacattatgtggcaacccgtccaatgttcattgatgtagaaatcatgaattcagacaccagattagttcttggcgaccagggttctcaagctagtcctagcaatgtcgctcgtgggctttcttcattatacaaagaaatcacagatactgtgcgcaaagaagcagcaacaattatggcagtattcccgtctcctaatgatgttatgtcaattttagttcagcgagttttggagcagagagttactgctcttttagacaaattattactgaagccatctcttgtgaatcctcctcccatggaggaaggcggactnttattgtatttgagaatgctagctgtggcatatgagaagacccaggaactngctagagagc

SEQ ID NO: 42747 - DNA, 459 bp, Gossypium hirsutum
  Clone ID: LIB3189-044-P1-K1-B1
ctttgtgccatcccttttaccttctccgagctcgttaaagagcagcctctggtgttgaagtaccacaatgggccactcttgaaggggaagatcaccgttaatctcatctggtacgggaagttctccccaacccagcgctccataatcgtcgatttcatcaactctttgagctctgccgtcaaacccaagattccgtcggcgtcgttttggtggaaaacgacggagaaatacaagtccggttcctccactttggtcgtgggcaaacaaatcctcctcgaaaattacccgctcggtaaaatccttaagaacccacacttgccagcgttggccgggaaattcaacggcgtaggtacggttagcgttatcctcacggccaaagacgtcgccgtcgatgggttctgcatgaggtgcgggactcacgggtcgaaccgggttggtcgggttcgaggtacttttatc

SEQ ID NO: 42748 - DNA, 88 bp, Gossypium hirsutum
  Clone ID: LIB3189-044-P1-K1-B10
tgactctgtcgtatctctccttctaaacccctacttatctcctcctcgcaaaaccctagccccttccttttttctttcggaggaatca

SEQ ID NO: 42749 - DNA, 382 bp, Gossypium hirsutum
  unsure (1)..(382): unsure at all n locations; Clone ID: LIB3189-044-P1-K1-B11
tgaccctgcaatccagtataaagcttacacagattatgctttggacatgggggtaattaaaaagtctgactatgatcgtatcaacaagctggtcccagtttgtgaaatggcaataaagctttgcggcactgatggtacaatctcttgcatggcttcatattttgtctgcaataacatattcaatggcatcatggcacttgctggcgatacaaattactatgacgttagaaagaaatgtgaagggagcctttgctatgacttctcaaacatggagtcatttctgaacaagaaatctgttagggatgcccttggtgttgggaacatagatttcgtgtcctgcagncctactgtgtatcaagccatgctggttgactggatgagg

SEQ ID NO: 42750 - DNA, 449 bp, Gossypium hirsutum
  Clone ID: LIB3189-044-P1-K1-B12
gtggaattgggaagccgaagaagaagctactgcgattgcgattgccaactcattcttccgtcatgggcaactgtggcactagagaggaatctgacgttgttactcatgctcaagttcagcagctccacaaccacatcttatccgacaagaagcttactcaaagtcagagccagactcagaatcgtaccctctcagatctgagcgacttcgaggattccaggaaaaatgcgcttctctatacccacattattgccttcactttattcgagcttgagactattaccaagagcttccgttctgactatattctcggggaaggtggcttcggaacagtctataaaggttatattgacgagaatgtgcgggtcggtctcaaatctcttcctgtcgctgtcaaggtcctcaacaaggagggccttcagggtcaccgcgaatggcttactgaggtc

SEQ ID NO: 42751 - DNA, 458 bp, Gossypium hirsutum
  unsure (1)..(458): unsure at all n locations; Clone ID: LIB3189-044-P1-K1-B3
aaacctgcattgggccttctttgggttttcgaaattgggcaattgacctttttttttgcctataaaaacccatcaaaaacagatcaatttttcatcatctcttcatcaactcaaagaaaaaattgagtgtcagtttgaaagtgttcttcagatatggctatgaaacaagttgctaattctgctatcaaagcaattgccaattctgggtcatcctctcttcttaccagacaacttcatgcttcttcagggagcaaaaagattgttggggtgttttacaaggccaacgagtactttacgaagaatcccaactttgttggttgtgtggagggagccctggngttgcgcccatggctggaatcacaggggcatcagtatattgttaccgacgacaaagaaagaccggactgcgaacttgaaaagcatatccctgatctccatgtgctcatatcgaccccatt

SEQ ID NO: 42752 - DNA, 217 bp, Gossypium hirsutum
  Clone ID: LIB3189-044-P1-K1-B4
gcttactctggaggtgagattacaagcatttttattcttctggcctgcgtctcaccatcgttgtgcattgaatggttacgtaggcactcatctctggcttttggacacttgttacggctactggagagaggtccagcctgaatatcatcctgtaatactgctcatgcataatgaattgctccagaacactgccatggattcagcttagagtccacac

SEQ ID NO: 42753 - DNA, 435 bp, Gossypium hirsutum
  Clone ID: LIB3189-044-P1-K1-B5
tcgttgagtcagtcaaaggaggaactagttgttaaagttagggaacttttgacactcaaagagttgcatgatatgcatgggagtcaatcatctgctcagataaaagaattagaggcacatgtaacaagcttggaacttgagttggaatcattgcaagcaactaacagagatatggcggagcagctagagaacaaagcaagtgaagcagaacagctgggagaacaaaatataggactccaatcccgcatttcagaactcgagatgatgttagaaaagagagaagaagaagtttttattctcacgaagaaacttgaggatgataacagagaatcattgtctggaatggagaacttgactgctcaggtaaataatctgctatcggagatggaagtcgtgcaagctgaaaaggctctgttggaagaaaatttagcgttt

SEQ ID NO: 42754 - DNA, 260 bp, Gossypium hirsutum
  Clone ID: LIB3189-044-P1-K1-B6
agattaaataaaaaaagaaagaaaaaatattttttttaaaaagagtatatttttggtggagattctcagaggaattcatccatggcaaccaaagtgtatattgtctactattccatgcacggacacgtagaaaaacttgccgaggacatatggcaaggggctgcatctgctgaaggtgaacaagccaaatcatggccagcctctgagactacataggatgaagctcctatcacgcatagcacacctcccgaatgtgtttg

SEQ ID NO: 42755 - DNA, 452 bp, Gossypium hirsutum
  Clone ID: LIB3189-044-P1-K1-B7
gatttcctcctgaaagatctttcctccgtggtcctcctctgccacaacaacgtcctcatcctgtgttgttggaggaagaacttgaaatgcagcatgcagaaattcggaggcttttgactgataacagcaggctggtagaagatcgaatagctatacgacaagagcttggtgctgcgaaagaggaaattcatcgtttaaatcttttcattggtgacgttcgtgctgagcaagagctgtactcaaggggacttattgacaaaggcttgaagctggaagcagatctgcgtgcaactgagccaattaaaaaagaggttgtgcaacttcgtgaagaagttcagaaactgaataataataagcaggaactaactggtcaagttcaggctctcaaacaagatgttggcaggctgcaagctgataatcaacagatacctgttctgagagcagaaattgat

SEQ ID NO: 42756 - DNA, 435 bp, Gossypium hirsutum
  Clone ID: LIB3189-044-P1-K1-B8
gcagaaatggcaattccgatccccagtcggcaactgttcatcaacggcgattgggctgagcctttgctcaagaaacgcatccctattattaaccctactactgaagaaatcatcggtgatattccggcggcgactgctgaagatgtggatgttgcggtgcaggctgctcggagcgcacttactcggaacaaaggtaaagattgggcctttgcttcgggtgctgtccgtgctaagtatttgcgtgccattgctgctaagataaaggagagaaaaccagtacttgcgaaacttgaaacagttgattgtgggaaaccacttagtgaatctgaagcagatatggatgatgtcatcggatgctttgagtactatgcagaccttgctgaaggtttggatgccaagcaaaaggcttctatctctcttccgatgaagacattt

SEQ ID NO: 42757 - DNA, 451 bp, Gossypium hirsutum
  Clone ID: LIB3189-044-P1-K1-B9
ttgagtcagtcaaaggaggaactagttgagaaagaaagggaacttttgacactcaaagagttgcatgatatgcatgggagtcaatcatctgctcagataaaagaattagaggcacatgtaacaagcttggaacttgagttggaatcattgcaagcaactaacagagatatggcggagcagctagagaacaaagcaagtgaagcagaacagctgggagaacaaaatataggactccaatcccgcatttcagaactcgagatgatgttagaaaagagagaagaagaagtttttattctcacgaagaaacttgaggatgataacagagaatcattgtctggaatggagaacttgactgctcaggtaaataatctgctatcggagatggagtcgttgcaagctgagaaggctcttgtggaagaaaatttagcgtttaaaggtgatgaaacatcaa

SEQ ID NO: 42758 - DNA, 263 bp, Gossypium hirsutum
  Clone ID: LIB3189-044-P1-K1-C10
catggatcgtcctgggaaagcgtatttggttcttccctaacatccttgctgaggaagcaacgctgcgagaattgttccggtttttgcccaaaaaagatgaagaagaacgtccaaaatggacagcaagactgttttatgcaattgtggctgtcttggctatattgctgctgatgcatcatgcttctgatgaggctggtagagcaagatatcataaacggatgttgaacataatcgacgacgtccttaaagggtctactagccta

SEQ ID NO: 42759 - DNA, 439 bp, Gossypium hirsutum
  Clone ID: LIB3189-044-P1-K1-C11
cccacgcgtccgcttttccttcttccctccccattaggaagaaaatggctacagctttctcaccttccaagttcgctgcccaaccattccctctcaacaccacttctcaaaacaaccctcttacaatccccactatcgcctcacccttcctcggatccacccgcaaactcatccgcctctgttcttcttccaatttgaatctccgccgtcgatctggtaccgtcgtcgccgtctccgatgtcgtcaaggaaaacaaatccaagtctacccccaatctgttaattacaaaagaggaagggttggaattatacgaagatatggtattaggaagagcgtttgaagatatgtgtgctcagatgtattacagaggcaaaatgtttggtttcgttcatctttacaatggccaagaagcttgttcaactggtttcattaagctctt

SEQ ID NO: 42760 - DNA, 401 bp, Gossypium hirsutum
  Clone ID: LIB3189-044-P1-K1-C12
aagggggtccacccactcttccgaccacgcgtcagaaaaaaaagaatctcttgtttatatctttgctgctttgttctcttcttctatggtcttcagttttggcaccaacagtggctcagcctcgttcacctttttgtgaagggaaatgcaaagggaggtgcaataaagcggcggtttgggatcggtgcttcaaatattgcggcatatgttgcgaggagtgtcaatgcgttccgtccggtacttacgggaacaaacacgagtgtccttgctacagagataaggtgaacaacaagggcaaacccaaatgcccttgaaaatgaaatatattcgagctcgggatttaatcaagcttaaagatcgaggaccaagaggccatatatatatatatatgcatgttggtg

SEQ ID NO: 42761 - DNA, 158 bp, Gossypium hirsutum
  Clone ID: LIB3189-044-P1-K1-C2
ccttccgttctggctttgttaaaggccaaatttgcaaagttacaaaaagaactccttacaccttattaaaagggaggaggtggtgcaggtgaaggttttgatgttaccaaaagtggagatgcaagagttggtctagtaggttttccttcgtgggggaa

SEQ ID NO: 42762 - DNA, 223 bp, Gossypium hirsutum
  Clone ID: LIB3189-044-P1-K1-C3
aacttgcttctaactttagaacggtgtatggccgattcaacaccgcttctgtctcactgtgataaaccggcagaaccaaaacgggcgcctcgatctctcgatgagaccatcgagggctgtatcggagacttcgggtggtggcaattcttgcaagcaatactcgtctctcttgcttgggtctttgatgctcagcaaaccttcatcagtgtattcactgatgctg

SEQ ID NO: 42763 - DNA, 405 bp, Gossypium hirsutum
  Clone ID: LIB3189-044-P1-K1-C4
cccacgcgtccgcggacgcgtgggtttagaaaggatgtttcttaattttgactttcccttttattacatgtcttccatgtctctatctatgtctgaaaatctttaaaagtttaacaagaacctccactagtttatccttttttgttgctctttgggtttgctttgcttcttcgtaaaaatatcactttccttttcaatatatatatatatatataaactaataagcatacttcagcaatccagcaactgctccagttctgggaacatgcaaaagttcgaacttttcagccactgttactctcttaccagggtttgattaataagaagttagggtttggtgtaaaatgttggttttaagcatgaattccaaaaggcaaaggcggcctaatggtatgttaggggaaa

SEQ ID NO: 42764 - DNA, 237 bp, Gossypium hirsutum
  Clone ID: LIB3189-044-P1-K1-C5
aaaaaggaataaaaaatccttgaataaaattatcaagtaataaggtttaagtataacaaaatttgagaaacacaaaaggaaaattcagaaaaaagcattcagcataagctcattttaggtgccaaacttaaaaactacaaaatctaagacacttaacatgctccaaatatcaaatagatgactatcataacagttatgatcggctttaagccactggcgcaagttcaatcttggtcc

SEQ ID NO: 42765 - DNA, 400 bp, Gossypium hirsutum
  Clone ID: LIB3189-044-P1-K1-C6
cactgtcgtcggggtcgtcaactacggcggatgagattgaagccgggaacctaatgggagaagaagataggattgcactgcagatgatagaagaattactcaattggaattgtcccgtgacttcttcaacttctctaattggagtttaagtgtgttatagctacttaaaacatatatgatattgtgaacagcgcagtggtgaagtcccattgctagatataaaaaggaatctctactcaaaagtccttctagcattttaccctttcaaggtcataaatcattgttctaccatccccgcatgtaaaactggtgcagtatgttgctaatagtgaaattttacaatatgaaagctaatgtagatcaccacctacataactgtttaaccttgtaatttaatcca

SEQ ID NO: 42766 - DNA, 211 bp, Gossypium hirsutum
  Clone ID: LIB3189-044-P1-K1-C7
cggacgcgtgggcggacgcgtgggtaatttcgaatatatcctcaaatatcttgttcaaaaagaaaccctaaatcatgggtcagggaacaccggttggtctgaaccgacaaggctttccaggggatcggaaacaggatggttccgataagaaggagaagatattcgagccggcggctccaccggccagggtgggccgcaagcaacgaaaaca

SEQ ID NO: 42767 - DNA, 440 bp, Gossypium hirsutum
  Clone ID: LIB3189-044-P1-K1-C9
ttccatttttctccacttcgaagctttttactttctcagctgaggaaaaaaaaaaaaagatttctctcagatcttcaagagaaaacaattatctccgtcaatctgaagtagaataaggataagaagatgggaacattggggaaagcaatctacacggttggattctggatccgagaaaccggccaagccctcgatcgccttggatgtcgcctccaaggcaattactacttccaagaacagctgtcgaggcatcggacgttgatgaacgtgttcgacaaagctccaattgttgatagggatgcctttgttgcacctagcgcttctgtcatcggcgatgttaaggttggacggagttcttctatctggtatggctgtgttttgagaggtgatgtcaatagcatcagtatcgggtctggaacaaatatccaagataactccct

SEQ ID NO: 42768 - DNA, 428 bp, Gossypium hirsutum
  Clone ID: LIB3189-044-P1-K1-D10
tgcaggaaacaccactgcagctattgggaagggtttcgcaatcggatcggcagccctcgtttcacttgctttatttggtgcctatgttagcagagcaggcatcaagaccgtagatgtattgacaccaaaggctttcattggtctcatagttggagccatgctcccttactggttttccgccatgacaatgaaaagtgtcggaagcgcagctctcaaaatggtcgaagaggttcgtcggcaattcaatacaattccaggactaatggaaggcagggtaaagccagactacgcaaactgcgtcaagatatcaaccgatgcctcactccgcgaaatgatcccacccggcgcactcgttatgcttactccacttatagtaggaaccctttttggagtcgaaactctagccggtgtcctagctggtgcactag

SEQ ID NO: 42769 - DNA, 411 bp, Gossypium hirsutum
  Clone ID: LIB3189-044-P1-K1-D3
ctttcactcccaaaatgtcagatcttcaagcaccccttcgcccaaagaggaagaagggcttggtggactttttggtccagtttcgttgggtttttgttatattttttgtccttcctttttcggctctgtattactttctcatatatcttggagatgtcagatccgagatgaagtcctacaagcagcgtcagaaggaacatgatgaaaatgttaagaaagtagtgaagcgtctcaaacagaggaatccaaaaaaggatggtcttgtatgcacagcccgcataccatggattgcggtggggatgcggaatgtagactataagagagctcgccattatgaagttgatttgtctgctttccgtaacattcttgaaattgattgagagagaatgattgcaagggttgagccacttt

SEQ ID NO: 42770 - DNA, 259 bp, Gossypium hirsutum
  Clone ID: LIB3189-044-P1-K1-D4
tcacccacgcgtccactcaacaaacaccactctacctatttttaaccgttttttttttttatccccaacccatcattcacttgggttatttttaaacagagggacgagcccaatcatcattaccgtatatatattcacaccaatagctttcattggtctcataaattataaccattctcccttactaaatttcctctatgacaatgcaaagagtttaaaccccaactctcaaaatgattctaaattttctctcatctat

SEQ ID NO: 42771 - DNA, 408 bp, Gossypium hirsutum
  Clone ID: LIB3189-044-P1-K1-D5
ctctctcttaccattttaacagctcattctctgcatcagcttttctttaacaatgcagacaagaactgtacaagtcaagaacctgtcagatctagctactgagagggagattcacgagttcttttctttctctggtgaaattgagcacattgatatcataagtgaagctagtcaatcaaagactgcatatgttacattcaaggatccgaaagctcttgaaatcgccttgttattatcgggggcaacaatcgttgacaagattgtgacgataatttctgttgaaaattatgtaccaaaacttgagattcatgaatcaagagcggcggacaacattgtgtctattgctcctgctgggcatagtgcattaaatgatgagcagggcagaacgagttcacctggcagtggaag

SEQ ID NO: 42772 - DNA, 241 bp, Gossypium hirsutum
  unsure (1)..(241): unsure at all n locations; Clone ID: LIB3189-044-P1-K1-D9
gaaactctctgctagggtttcttttccatgccgccgccgccaccgctcaagccattccacggcctccgacgacgccccgacctccgatcgcgacggaggtggaccgattcgacggtttcggctaaagattcagccaactggggatgtacgtgggacacgtacgtgcgcaaagggtggtggtgcagggctgatttgctgngggtagggttgtagggtgtttttctgttattggtgttgtttt

SEQ ID NO: 42773 - DNA, 303 bp, Gossypium hirsutum
  unsure (1)..(303): unsure at all n locations; Clone ID: LIB3189-044-P1-K1-E1
tagatagcggtctactaggtttacatttccatgcctttttcgccaccggtcaagccattacacggttgtgcgacgacgccccgaccttcgatcagaacagangtggaccgatttgacaggttctggtgaagactttttttggaatagagcttcgtttaaggggtcgtaacgcaggtgactagattttattttttagcaatttatggttttttcagggatacctggtgtttgcctttttttattcctgtcactttctattttttttttgtttttctaattcatatgttatatattctaaatatt

SEQ ID NO: 42774 - DNA, 367 bp, Gossypium hirsutum
  Clone ID: LIB3189-044-P1-K1-E10
ccacgcgtccgctactccgcccatcgtctgcttttgccaaaagacagctaaagacgccactttgaaaaccggaaatgtcggacgaggagcatcatttcgagtccaaggccgacgccggcgcttccaaaacctaccctcagcaggccggcaccatccgcaagaacggttacatcgtcatcaaaaatcgcccctgcaaggttgttgaagtttccacctccaagaccgggaagcatggtcatgcaaagtgtcactttgttggaatcgatatcttcactgccaagaagctcgaagatattgtcacttcttcccacaattgggatgctctgcatgccattcatactgacttccatctatttacatatctgat

SEQ ID NO: 42775 - DNA, 240 bp, Gossypium hirsutum
  Clone ID: LIB3189-044-P1-K1-E11
agattatctactccagttacagttgcactcagggctggtttctcacaccttgtgtgagtgatccaagtttaaggggactcaagagtgattttaaggatatatattaaaaaggccaggtgctcggaatgggagcaaattcccgtccctagaagtgtgagggcaattgttgctttaaatcttcataattacggaagtgggcgaaatccatgggttttgctaaaaccagagtatttttataag

SEQ ID NO: 42776 - DNA, 449 bp, Gossypium hirsutum
  Clone ID: LIB3189-044-P1-K1-E12
cccacgcgtccgattcagatgaaaatagcaataagaatgaagatatccctcctaatgaggtaccatcaaacccttctcatgaaactcctaatcgaagaaaggaaacacttggggttgtatacggcaaaggaaaaaaatcaagttcaagtagaaaatcatcaagaatttcattagctaatcatattgagaaattgtgtgagagtatggctagtccaaggaagtcagtgaatgaaattatttttcctcactctgaatattctatttcaaatgcaatggacgctttgcgtgatttggaagatgaaattccaaaaaaagatgaactgtactgttttgccatcaaaatgttccaaataccggtaaaatgagaagtgtttttgaacttagatccagatgttagagtttggtggcttcgacgtgagtatgctgaacaaaatccaattgcatcattt

SEQ ID NO: 42777 - DNA, 105 bp, Gossypium hirsutum
  Clone ID: LIB3189-044-P1-K1-E3
ctccttttcttctttttcattgccttaacctctagtggcactagcttgaaacctttttttttctggttccatttagttttgggggtggggccaataaaatacccc

SEQ ID NO: 42778 - DNA, 184 bp, Gossypium hirsutum
  unsure (1)..(184): unsure at all n locations; Clone ID: LIB3189-044-P1-K1-E4
aaaagggataaatctaacctcactctgcaatggcatcatccaagccaaaccttgctccagcgcctgatctttataattgcttggacttgcaggttanaaaaagtagctctaagttgcttatacagtaaagtgaatgaatgtgtcggtactattcgtgttttaagcgctctttcaattttactta

SEQ ID NO: 42779 - DNA, 252 bp, Gossypium hirsutum
  Clone ID: LIB3189-044-P1-K1-E7
cggaattcttattccttttatatttttcctctccaattttccgtcactttcccgagaaaatgagagaaatccttcacatccaaggtggccaatgcggcaatcagataggagccaagttctgggaagtcgtatgtgccgaacatggcatcgattcaacgggtcgatatggtggtgactcggagctccagcttgagcgaatcaatgtttactacaacgaatccagttgtggccgttttgtttccgtgcagtatt

SEQ ID NO: 42780 - DNA, 381 bp, Gossypium hirsutum
  Clone ID: LIB3189-044-P1-K1-E8
gcccacgcgtccgaaattcgggatcaagaacagctgctatgtatcgaaagaagactgaagacgctgttccatggcttatactggggaatactaccacagaaatcctgaaaaagcaccgcgggaacataccgtactttcaacacatgtgccagctcagctggattctggtcggataaaccaattccgccggagttccctgcaaccataactacaaaccccggcacctcctactctgaacatcagtctacatgatcccagacaaggacatgctccgggcaccgtctaccacgcgccttcacaagttccagcttcagcttctgcaccagtaacgctacaaaaggttcgaccgattaccgaacaagccggtcaaggctactacac

SEQ ID NO: 42781 - DNA, 230 bp, Gossypium hirsutum
  Clone ID: LIB3189-044-P1-K1-F1
tcggctttttttggttgggtggtttaacccaatcggaggttgggttttggcgggaggttttaaacggccatggccacctttggttccaacttcggaggagaatccggtcttcccggaggtcggtttaagggccgccctttttggggttgtggccggccctggggtgggggacccgaaggggccaggctttggattggaagcccaggagggattggggaggggaggagggt

SEQ ID NO: 42782 - DNA, 371 bp, Gossypium hirsutum
  Clone ID: LIB3189-044-P1-K1-F10
cttcttcttatctttctttataatctccacaacattgactttagccggcgccgccgacaacaccatgagggtctccctttataagtagccggagccttaataattccattcttaccaaattctcaacaacgttattcacttcttttgttgcaagagcccaccaccttaaacaccccaaaatcaaggtcgataatactaccttttcttttttcagggctttcctatttcctaacagttattgaggctacactatctcccttaaatttggaacttccactcaaaaccttccttttaatatttgacactgggagcagtcttttctgttttcctttgaacctttcgatacactttgttcccaattcgcttttccc

SEQ ID NO: 42783 - DNA, 425 bp, Gossypium hirsutum
  Clone ID: LIB3189-044-P1-K1-F11
cttgggcagaaaaattttgacatgaccatagtgttcaaggacttcaagaaagatgtactaaggattgattccatcccttcaacctcacttgatggcatcaaggaatggcttgatacaacagacatcaagtattacgagagcaggctgaatctgaactggcggcagattctgaagacaatcactgacgatccacagagcttcatagagaatgggggctgggaatttttgaacttggaagctagtgattcagattctgagcagtcagaggaatcagatcagggttacgagccatctgatgtggagcctgaatctgagtcggaggatgatgactccgatagtgagtctctggttgagtctgaggatgaagaggaggaagaatctgatgatgactccgaggaagagaaaggaaagacatgggaggagct

SEQ ID NO: 42784 - DNA, 431 bp, Gossypium hirsutum
  unsure (1)..(431): unsure at all n locations; Clone ID: LIB3189-044-P1-K1-F12
ctgaaggtgtcttaataaacgccttcgatttaccttcgatttccatttacttctctattgctacgttcttgaatttttagtgagcgaaaatgagagagtgcatttcagtccacatcggtcaggctggtattcaagtcggaaatgcctgctgggaactttactgccttgaacatggaatccagcctgatggccagatgccaagtgacaagactgtcggaggaggtgatgatgcttttaacacctttttcagtgaaactggtgctggaaagcacgtccctcgtgctgtctttgtggatcttgagcctactgttattgatgaagtgaggactggtacttaccgtcagcttttccaccctgagcaactcatcagcggcaaggaagacgctgccaacaacttcgctcgtggccactacactattggcanagagatc

SEQ ID NO: 42785 - DNA, 399 bp, Gossypium hirsutum
  Clone ID: LIB3189-044-P1-K1-F5
aaaaaaaaaaaaaaaataaaaaataaaatttaaatttaaaaaaaaaaaaaaaaaaaaaaaaaaaaagaaaaaaataaaaaaaaaaaaaagggaaaaaaaaaaaataaaataaaaaaaaacaaaaaaaaaaaaaaaaaaaaaaaaaggggggggccgttttaagggatcaaagtttacttacggttgtttgcaacgtaatagtttttttttgggggcacctaattaaatttaatgggcgggggttttaaaacttggggattggaaaaaccctgggttacccaaattaattggctttgaagaaaatcccctttttgcaagttgggttaataaaaaaaaggcccgaacctttcgcctttccaaaaatttgccaacccttattgggaattggaaccccccttt

SEQ ID NO: 42786 - DNA, 267 bp, Gossypium hirsutum
  unsure (1)..(267): unsure at all n locations; Clone ID: LIB3189-044-P1-K1-F8
gaaagatgatcaaaatgggttttattgttttggctctgatggcggnttccgccgcgacggtggttacggcttctgacgagagtgggttagcaaatgagtgcagcaaagatttccagagcgtgatgacttgcttaagctttgctcaaggaaaagcagcgtcgccgtcgaatgagtgctgtaattcagtggcggcgattaaagagaattaacccaaatgtttgtgttttattttgcaacaaacactattctaatttgcttatattttta

SEQ ID NO: 42787 - DNA, 516 bp, Gossypium hirsutum
  unsure (1)..(516): unsure at all n locations; Clone ID: LIB3189-044-P1-K1-G10
gcgcaacgcgtcccgattttcttttaagtggcaccctgggacactttgatgaatcatcaaacctttcattctanncctttcttccatttgccagtttcaaaccaagatnntatacttacgaacgnttcaatcncanatctaactngggtcccttttgtttgatggaaaattcctcttcacaaaagcaaacaaacatttgataccaccctttcattcccacttccaacaaacaaacatgattgaccaaagaatccaagaattccttgtacaatcaacttcacaaagttggatgttaaaagctacttgcaaaaccgagcctgttcaatcacctcaccctgacaatccagctaaaaagttggaaaggcagccttcaaagaatctgatggctgaaagaaagagacgaaaaaggctaaacgatcgccttttgatgttaagatccattgtgcctaagataagcaagatggaccgtacatccatacttggagataccatagattataccaacgaactcttgga

SEQ ID NO: 42788 - DNA, 433 bp, Gossypium hirsutum
  Clone ID: LIB3189-044-P1-K1-G12
ccccacccctccggtgagtgagtgagagagagaggagtctgctatttgctaaggtgcagtttggagtggttttcataatggaaagaggtgcaaggatgctgttgatctcagtcatggtcctgctggtccttgcttcaaatgctgaagggagaagactcaaagaggaagcttaccaccctcagaacttcctcggagcctttggtactagtggtgggctagttccaacccctggtggaggtgttggccttaatttagggccgtcagtcttttgttcctatcctgggaccggatgtgttcgtgtccagcctactattcctggtagtactggtaccattggcgctggcacaccaccatgatagatgtcctgattcatgcttagagggtgttgaatgagcttcagttatggaagtctaagctgttgtctctttagttt

SEQ ID NO: 42789 - DNA, 442 bp, Gossypium hirsutum
  unsure (1)..(442): unsure at all n locations; Clone ID: LIB3189-044-P1-K1-G2
attcgacctagcctggcgccgcacctgtgggtcatcggtgccttacacctccaccttggccgacggttcatggagcgaagtcaggtacatgtgcgggcataccactaacgtggcatggtggagcggcgcacgacgcggggcgtgtgaaggttgttcggcagctgagggctacggcgcgaaggaactctaggattcctgaaagagttttgattttgggccgtttgggcctggtttatcctatctaggtattgggccctgttgtaaatgggtattcgggtttgggcctattgtaattgggtgtggtatttgggttttgattggctgtnaatgaactttatattttggactatcgtttattgggccccgggctaaaattgggccctacaactataatgcatattttattatattaaaaacccacaattaatataataaatatttt

SEQ ID NO: 42790 - DNA, 295 bp, Gossypium hirsutum
  Clone ID: LIB3189-044-P1-K1-G3
tcccttaccaccggttctattattattccattacttttcttccggtggttttatttcttccttcatggtcaacccaaggtggggcggtggggggacccaagaccaattgtggccaaccgggggtcgggggaaccgggttagccgcttgggttttaattttttccaaaaaccccgcggtttaaaattttaaaaaggccctcacaaggttcaaaatttccaatccaatttttaggtttggcctcaatataaggcctactgccaaaagttactctttggttacctccccctccccttt

SEQ ID NO: 42791 - DNA, 287 bp, Gossypium hirsutum
  Clone ID: LIB3189-044-P1-K1-G4
gaaaaaaaaaaaaaaaaataaaataaaatttttattttttaaaaacaaaaaaaaaaaaaaggggattggctaaaataaaaaaaagggcatagaataaaatataatatatcataatataaaaaaaaaataataaaaaaaataacaaattgtctctcactttttaatttccaattattaacaacattgatttccaaatattcaattttcttttatattaacttaataaaaatgatttgtattcttattaaaaaaacttgtcctttataaaaaacctttatttttacaat

SEQ ID NO: 42792 - DNA, 60 bp, Gossypium hirsutum
  Clone ID: LIB3189-044-P1-K1-G5
tttttttgtggcaaaatgcaatattattgaattgtagaaatgaaactagaagctggtggc

SEQ ID NO: 42793 - DNA, 420 bp, Gossypium hirsutum
  Clone ID: LIB3189-044-P1-K1-G8
agttttaccagggttaggggaaattgtatacatgttacacaaaagacttcttgcacggaaatcaatcattgagaaaagaaaggaagaacaagagcgtcaattattggaaatggaacgtgaggaggagtcaaagaggcagaatttgctgaagaaaactgaagaagcataatagtagaggattgcttgttttttttgatcaatatcgatcttctaataatatccaaagtaattatttactatagtatgctgtctcataattttttaatattaatctgacaataattatattttttttatatacttatttcacttctctttttttttattattaatggtgtttttaacctttttttaaaattttgtaaataaccttaataaataaaccaaaaaaattttacaccccttatatttttttttttg

SEQ ID NO: 42794 - DNA, 441 bp, Gossypium hirsutum
  Clone ID: LIB3189-044-P1-K1-H1
gatttttgtggttgatagcaacgatcgtgatcgtgtggttgaagctagagatgagttgcacaggatgttgaatgaggatgagttgagggatgctgtcctgctagtatttgcaaacaagcaagatcttccaaatgctatgaatgctgctgagattactgacaagcttggccttcattctctccgccaacgccactggtacatccagagcacatgtgccacttctggtgaaggtctgtatgagggactggactggctttcgaacaacattgcaaacaaggcatagatggcatcattgagttgttagtctcaccaatgctggccccttttagagttccggatgttcatcccgttcaagtgtttttggtttttcgtgttcatttgtttcttgcaaacattgccatttgttacttgtagtttaacaataattaataaattgtttgt

SEQ ID NO: 42795 - DNA, 123 bp, Gossypium hirsutum
  Clone ID: LIB3189-044-P1-K1-H10
cggtccggaatcgcccgagctgactacgcgcggtgcggcgcatacataggaggatcttatgcttacgtacttcgtgcatgtcgacgtcatagcttcttctatagtgtcacgctaaattcaatt

SEQ ID NO: 42796 - DNA, 427 bp, Gossypium hirsutum
  unsure (1)..(427): unsure at all n locations; Clone ID: LIB3189-044-P1-K1-H11
gaaaactcttgaggttggatggaagaagagagaattggttatctgattgaaaaatgcccagatacacgcgtcatccgtcaaatccacgcgcatgttctcactcgcctccttcctatctccgccgtatccttcctcctctcgaaaatagttgggttttgtgctctttctcgccatggagatatcaatcatgctcgcaaagttttcgctcaaacccccaaccctaacatcttcacttggaattcccttattcggggttattatcttgtcggaagcccatcgaaagtgcccctttttttatataaaaaattggtcagaaaagggtatccttctgctaatacgtttaccctggctttcgtgcttaaggcnttgctccaatattttggctttcgatgagggaaaacaggttcatgcccgtgtgtttcgatct

SEQ ID NO: 42797 - DNA, 286 bp, Gossypium hirsutum
  unsure (1)..(286): unsure at all n locations; Clone ID: LIB3189-044-P1-K1-H12
cggacgcgtgggttttttttttttttnntatgattttagaatttcctacccgancaaaaaatacggatattcgacaccattataggcggaggctggcccatgatctcactcctcttcttcctatctcctccgtatactttcttctttcgaaaatacatgggctttgtgctctttcttcgccatttcaatattaatcattctcgcaaatccttttctaaatcccaccaccttcacatctatacttataattcccttaatcattgttattaatctttatgaagaccat

SEQ ID NO: 42798 - DNA, 455 bp, Gossypium hirsutum
  Clone ID: LIB3189-044-P1-K1-H2
attctatcctttactaaccggattcaatttcttcatttatcaacggttgtttggggcaaaattcataatccccattgttgcccaatctctgaaacatcatggaaatagcatttgccgcttcagtatacccgacaaatgtgaagagagtaatctacgagataagacctcacagctcaaaactcgttaccaacaagagacggtcttttcacaacaagtttctatgctcagtagctgttgctcctgacaggaatcgggttctaattcttgtgtcgcttacctttatttctctactcatcctgttttagaacatgttttctccttattagcatttgcggtagtgatgggatttgcttttctggatattaggtatccgaggttgagttggaaaacaagaaacacaatcttctcctggctgttcaagacacacaacggggacttgctgcaactgctgatca

SEQ ID NO: 42799 - DNA, 105 bp, Gossypium hirsutum
  Clone ID: LIB3189-044-P1-K1-H3
cccacgcgtccggaacctcttactttgtgcctcattcttttatccgtatctttcccgcatcagtcacgtcggcttttacaagagatgaaacggaaaacttaagaa

SEQ ID NO: 42800 - DNA, 403 bp, Gossypium hirsutum
  Clone ID: LIB3189-044-P1-K1-H4
caaaccaaaatgaatttttgcttcgctcatacatgcaaagcctagacactgtccgtaataaaccggagtgtcgacgaacaaatttgtttagacaaagaatcagaccatgttcggaataatacaacgaatgaaaccatacatcaaacgatcccatcactatacacacctcaacatcaaaaactttccacttacacgccatcgaaaaagcattgaagcgtagaaacggaacatagaagaagttacctttccaggagaaagcaagagtcacgcttgtgacaccatgagtggctcattggattcttccatggacttcgctttatatcggaagtacaacgcgagttgtagaatccccaaaatagttccaattccatttggaacgtaaataaaggcatcaaagttaaag

SEQ ID NO: 42801 - DNA, 340 bp, Gossypium hirsutum
  Clone ID: LIB3189-044-P1-K1-H5
gcaacccctcccctttcatcccctacttatctcaccaccaatttaggcgtcggctacgccatcgtcgtcgccctcggcttcctcctcctcctctccactctcctcctcgcttcctacatttgcttccgctcttcctcgccccttccacctcgtgccatttcccccaaccccatttcaacaccctaccgcttcaacttcaacggtatcgtcctccccaggattggtttcatcggcgaagaagaccatggacacgacgaagaaaacgtcgtcgtctttgggcttgatcgtgccgtcataaactcttaccccaagttccggttcagcaaagaggaggtgtcta

SEQ ID NO: 42802 - DNA, 454 bp, Gossypium hirsutum
  Clone ID: LIB3189-044-P1-K1-H8
aaaaaaaatggggagaggaagagtggagctgaagaggatagaaaacaagatcaacagacaagtgaccttctctaagagaagaaatggtttgcttaagaaagcttatgagctttctgttctttgtgatgctgaggttgctcttatcatcttctctagtcgtggcaagctctacgagtttggcagttcaggtatgagcaagacccttgagcgataccagcgttgctgctttactcctcaagacaacagccttgaacgcgaaacacagaattggtaccaagaggtaaccaagttaaaggcaaaatatgaagcactgcaacgcactcaaaggcatttgcttggagaagatcttggaccattgaatgttaaggagctgcaaaaccttgagaaacagcttgaaggagctcttgcactggctagacaaaggaagacacagatcatgatagaacaaatggaa

SEQ ID NO: 42803 - DNA, 397 bp, Gossypium hirsutum
  Clone ID: LIB3189-044-P1-K1-H9
aacagcttgggtgcatttgctacaatcaatcacctgcacttccaggcttactacttggctgtgggctttcccattgagaaagctcctaccaagaagataacctctctgaatgatggagtcatcatctcagagcttttaaagtatccggtcagaggtgttgtctttgagggtggtaacactcttcaagacttgtctgacgcagtgtctgatgcgtgcatttgccttcaagataacaacatagcatacaatgtcctcatctctgattgtggacagcggatcttcctccttcctcagtgttatgctgagaaacaagctcttggggaagtgagtgtagagcttttggacacccaagtgaacccggcttggggggaaattagtggtcatatggttgtggaaa

SEQ ID NO: 42804 - DNA, 307 bp, Gossypium hirsutum
  Clone ID: LIB3189-045-P1-K1-A1
tctagatcgcgagcggccgccctcgccctttttttttttttttttttttttattaagctccttgatctctttttttcttcaatatattctgctttagattatgataactctagacttgttgatcgattgtcttctctctttttctttttcatttttctttggttagattctttttttggcagtaagtcaaagaattttttgattgagaggaagatagaatgtctggcggaggcacacaaaatagcttgaggaaagcactcggagccatcaaagataccaccaccgcttcattggctaaaggcaatag

SEQ ID NO: 42805 - DNA, 321 bp, Gossypium hirsutum
  Clone ID: LIB3189-045-P1-K1-A2
tcgcgcgacgcgtcggtcgtaattctagcgtattatacactctgttgccacgtttattatctttccatgtgtctcatgaccataggccagttcacaagcacccaatctgtaaccaaaataaaacgccattgaaacaatatctttgttttatattactaaaatgccagcttataacccgtaataattgaatcgaaaaacatgttgagaagacccgcaacattgctatgcttttcaatcacaaccagaaatctgtggtctttgttgggattccgatttgccccaaattttgccttttgtactacacttcaactgtcttcattt

SEQ ID NO: 42806 - DNA, 297 bp, Gossypium hirsutum
  unsure (1)..(297): unsure at all n locations; Clone ID: LIB3189-045-P1-K1-A3
gaccggnnccggaaacccggggcgagccacgcgtccgaggacgcgtggggnnnaatagaaagctaatttgctatagctgcccacctctatgaccatcggcaggggtggcatatgccggggggcggaggggcacacaccaccgcaagcatgaaaccaaaagaaaacgccatgaaaagaataaacctgatttatatcactaaaaggccagcttataacccgtcgaaattgaatcgaaaaacatgctgagaagacccgcagcattgctatgctgttcaatcacagccagaaatctgaggg

SEQ ID NO: 42807 - DNA, 158 bp, Gossypium hirsutum
  Clone ID: LIB3189-045-P1-K1-A7
atggagagaagggggggggaaaaaggcgcaattggcatttgaaaattatttgaaatgattaggatattgctcattgagaaagaagaagattttgaataagcattcgaatgaggacagccatgagcaactggtcttttttcaaacatgaaagaaaacat

SEQ ID NO: 42808 - DNA, 445 bp, Gossypium hirsutum
  Clone ID: LIB3189-045-P1-K1-A8
cggacgcgtgggttttaattttaagtttataaacgatagctgcccacctctatgccggcgccatgtgtggctttgccattggccacttcacaatcacccaatctgaaaccaaaataaaacgccattaaaataatatctttgttttatattactaaaatgccagcttataacccgtaataattgaatcgaaaaacatgttgagaagacccgcagcattgctatgcttttcaatcacagccagaaatctgtggtctttgttgggattccgatttgccccaaatttggcctcttgtactacacttcaactgtctgcatcttcaactgctggctatagaaccagaactagattcagggccatgtcaacatcagtgaattcaacgccttgtaatgaaaaagatgaacaagtatttcaagatttgaagtacttaatgcagtcaatgataga

SEQ ID NO: 42809 - DNA, 341 bp, Gossypium hirsutum
  Clone ID: LIB3189-045-P1-K1-A9
aaaggaaagcaagcatccgagaattctacactgttatctatccctctttgctgcaacttcagagcggtgtcactgatagtgaagagaaacaacagaaagcggcatgcgtggaaaggtatcgtagaagagaagatgaagagtataagcagcttaccgatattgatttcgaaagagaagaagaatgtggaatatgcatggaaacaaacagtaaaatgttgctgcctaactgtaatcacaccatgtgcttgaaatggtatagggataggcggtcattatcatatttttgcccttttgtgttatgattgtattaaaaagtattttaattaggtgtttttttttgt

SEQ ID NO: 42810 - DNA, 434 bp, Gossypium hirsutum
  unsure (1)..(434): unsure at all n locations; Clone ID: LIB3189-045-P1-K1-B1
cgtcaaactctgcaaaagacagagagagagagacccagctttaaggcatgacagtttcattctttatttgccatattacccctctcacagggttttgtttccttctcctatcctcctcctccgccgctgatctcaacataaccttcatcctctccttcttccaaaacctaacctacttcttcttcctcctcacctcctcatcagtcgcctctgacctcacgcgtcgccaagaccccatcactttactcgccgtccccaactcttacctctccattccttctgcttgcgacctgacgcgccggcttccaccgtactgactcggcgacatgcttcgctaccacgtactgctacattatttattctggaccgacctgctccagatcccgccgtgcggcgtgatngtatccaccctcctccaaacaactagccgggcc

SEQ ID NO: 42811 - DNA, 411 bp, Gossypium hirsutum
  Clone ID: LIB3189-045-P1-K1-B2
gttcactttaaatttttgtcttatatacacattgtgggtattttaaaaaaaaaaaagatgagaatgtgtctattaccattcaaagattgatttaaaactaattattttgctaaatcatgtttaaaattggaaggattacatttcagaggatcattaaatagtagtccaacaagcaattctcttgaaactcctatgtcatgagcttgcttaactgtatcctctctggctggtatggccttacctttgtgtctaaaaacaacatcttggtatcaacaatcaatgggactggtgcagcaattgagtgcatttatgtattgatcttcatcatctatgccccaaaggaagagaaggcttatatatttgggcttttcaattttgttctcactgattgtacgggcgtgggactcattt

SEQ ID NO: 42812 - DNA, 462 bp, Gossypium hirsutum
  Clone ID: LIB3189-045-P1-K1-B3
aagtctcaaagatatcactgcaagaaaaaaaaaaaaccagacatggcttccaacactgttgcatccgctgctcttcttcttaccttgaacttgttgttcttcactttggttagctctacctacgtgccttgcccaccaccaccaaagagccacaagcctacccacaaaagcccaccctcggcacctgaacagccaggcacttgccccagagatgcactgaaactaggcgtttgtgctgatttgttgggctcagtgcgcgttgttgttggaccgtcgaggaccaaatgctgctctctcatttcgggtttggctgatctcgatgctgctgtttgcctttgcactgctattaaagctaatgtgttggggttaaccctaacgttcctgtttcattgtctttgctcctcaattcctgcgaaaagcaaatgccttgtggttaccaatgtgcttaagctcatttccact

SEQ ID NO: 42813 - DNA, 463 bp, Gossypium hirsutum
  Clone ID: LIB3189-045-P1-K1-B8
cggacgcgtgggtttcttttcaattttcttttcctttttctctctttctctaaaagaaaggttggcttcaatggccgaccggtgctgacgtaccataggcgcttccctcctcattcctctcatctcctttcaccagatccgggtttgttttcgataaatttcttctatttccatggctgctccacctgcaagagctcgagctgattacgactacctcatcaagctccttttaatcggcgacagcggtgtgggtaagagttgcctccttttgcgtttctcagatggctcatttactactagttttatcacgacaattggaattgactttaagataaggactatagagcttgatggaaaaaggatcaaactgcaaatttgggatactgctgtgcaagagcggttttgaacaattacaaccgcttactaccgtggagccatgggtattttgctcgtgtatgatgtg

SEQ ID NO: 42814 - DNA, 454 bp, Gossypium hirsutum
  Clone ID: LIB3189-045-P1-K1-B9
ggtggtggcccgaagaagaagcccgtttcaaggtctgtcaaagccggtctccagttcccagttggtaggatcggccgttacttgaagaaaggaaggtattcacagcgggtcgggaccggagccccggtttacttggctgcagttcttgagtacttggccgctgaggttctggaattggctgggaacgctgcacgtgacaacaagaaaaacaggatcatcccaaggcacgtgctacttgccgtgaggaacgacgaagaattagggaagcttctcgccggcgtaaccatcgctcacgggggtgtgttgccgaacattaacccagttcttttgccgaagaagactgaaaaggccgccggcaaagaacccaaatcttcatcaaaggccaccaagtctcctaagaaagcttaaattgatttaacaaaactagatccacagggctttatttttcttagtt

SEQ ID NO: 42815 - DNA, 232 bp, Gossypium hirsutum
  Clone ID: LIB3189-045-P1-K1-C1
accctcatgcagatgcatgcgtcttaccaaagggatacatgtgcgtaatgatgcaagtttgtaaatttgttcgacttaaatagacaacttaggtaccgtttagttcctgccaaatttcctcattattccagactacaaggcgaaaatgctgataatatataaagcttaatgagcgttttggtagtatacgtagattacaaaaagattaaccctaaaaatctacctgaataac

SEQ ID NO: 42816 - DNA, 230 bp, Gossypium hirsutum
  Clone ID: LIB3189-045-P1-K1-C2
ctcacgcctacataaaaactccatgtctaaactttttcttttctgcacttgcaacttcctcattgcgcgaagtttacatccctagaggaggcccattctctctcttcttattgccatgtctgtctgtcacagacatgtagctataccaactgaatatctcatcttctggagccattggtcagttcctaaagcactcattccaaaatctgccacttcgatctacttcttct

SEQ ID NO: 42817 - DNA, 465 bp, Gossypium hirsutum
  Clone ID: LIB3189-045-P1-K1-C3
ctttaaacttccttcagatgctaaagtgcccatcataatgattggccctggtactggattggctcctttcaggggattccttcaggaaaggcttgcactgaaagaagctggtgctgagttgggtccatctgtattgttctttggctgcagaaaccggaaaatggatttcatatatgaagatgagctcaacaactttgtcaacagtggtgcactatctgagcttgtggttgccttttcacgtgagggacctaccaaggaatatgtgcaacataaaatgatggagaaggccaaggacatatgggacatgatttctcagaagggttacctgtatgtgtgtggtgtgccaagggcatggctagagatgtccatcgagctcttcacactattttgcaagagcagggatcactagacagctcaaaggctgagagcatggtgaaaaatctgcaaatgagcggcaggtaccta

SEQ ID NO: 42818 - DNA, 462 bp, Gossypium hirsutum
  Clone ID: LIB3189-045-P1-K1-C7
aatcgatgtatctgctccagggccagggatttgtggtggagcacttgcaggatcccaaacatcagcgctaacagcaacttgatcaccccagttaattgcagggacacccgaaattggtggctgaaccacatcagctgaccactgatcacccatttgggagggccattggtcagttcctaaagcactcattccaaaatctgcagcagggagtccataatcaggagcagcaactgcttcctcctcttcctgttgtttagcttcctcaggctccctgtagaaaaatagatccaccatcacatcccacttctgtccaggagcaattgtaccacgcatctgaagaaccatcctagctaacagccagaaaagacagccaatgctgtgctttcccttgttattagcaggaataccaatgtcaacatatcgcattggtgagtctgtgtcacaaaaagcaatggtaggaat

SEQ ID NO: 42819 - DNA, 464 bp, Gossypium hirsutum
  Clone ID: LIB3189-045-P1-K1-C8
gcgagggatttggcttcggttgcggcggtgatgcggagagtgagaaagacaagtgaagacaacactggaagcggccagaaacatgtagatgaaaccaaaaaaatctgaggggagcgtgatgttctattttccaatatagttttcaatctgaatttcgatggctgctcgtgtttcttcttcttctccctcttcgctttcccttaatcaacttggccttccctcaatgcctccttcctggaccttgtgatgtttggcttttcatagctctgaaggttcaattttcttcttctgtcatccttccctcctttttctgattttctaattccaatttggtttccttttttatttcattttgtgggtgtgttaaagcttctttagtcgctagctatgtttgcttcatttttttagctaatcgcaaaatccaataatcttagtttaaatcaaggtttgaactgttttaatat

SEQ ID NO: 42820 - DNA, 193 bp, Gossypium hirsutum
  Clone ID: LIB3189-045-P1-K1-D1
tcgcggacgcctggggttttccggttctttttggtgggattttggcttcaagaactcaagtcttaaaatggagcgcccttttttattaaggccagggttttgtctttgcttgcgggaaaaccaaccaaaattgcccttaaggacccaattgtggcgaaaattaggggggggcaggcaaaaagggtgggaaatt

SEQ ID NO: 42821 - DNA, 444 bp, Gossypium hirsutum
  unsure (1)..(444): unsure at all n locations; Clone ID: LIB3189-045-P1-K1-D3
cgccctttttntttttttttttttgaacanaatttatatatctccaaaaaccattaaaaaataattggcgagagaaagtgggatgaagagcttgagggggccctttaaaatcccctatacaaacttctttggtaataaatataataaaaactccagaaaatttgagcaaatccaactacacataccatacaaacagtgaaagaaatgcacgacattcactgtgttttgatagttaaatgcttaacctgttacgaccagcattcagttaatcgacctccgcgtagcagtacaaacccaatcacacacaaacatgccactagattgatgattcgattacaccaacaacatggaaaatgttcaaccgttccctttaagttccgattcaagcacttatgaaagcatttttcaatataaatcctcgacattcattgtcatttctatcat

SEQ ID NO: 42822 - DNA, 263 bp, Gossypium hirsutum
  Clone ID: LIB3189-045-P1-K1-D7
gtttatcgtcgagcggaacccgcatatccatgaccctgacgatgttttccccggccttgttatgcaagatcatcgcttcaactgatgggaaattatagaggtagctgcttttacacattatacacacagaaaattttaatattgtatactgggttttggtctgttttcgattcataatgaatagtcattgtaataaggtgaagcctgtattctgaggcctttgatatttgatcatatcatattattatatatacatggagatt

SEQ ID NO: 42823 - DNA, 396 bp, Gossypium hirsutum
  Clone ID: LIB3189-045-P1-K1-D8
caaatgataaaataggatttgatttcacttctttctagtttcgtgtaccttatgttttggttttgagtcttcttcttctttcatgggttgttgttcatttttgcattgctgtttttttttttctggtctccggtttaaggtttctctttcaaagattttattttttttttccttttctcctttaaataccaacttgcattttgcttacatttcgtggttgtttcttcaagcttgtaacagatgcttatggagggaggagactaagaggagacacccatgttgctaaagtgatcttgaggttccaatatgagagaaatgcctaaacagacagtgatggctataaagtcttaccaaaaccaggctcagttgttggttaagaactacttatttgcagat

SEQ ID NO: 42824 - DNA, 366 bp, Gossypium hirsutum
  Clone ID: LIB3189-045-P1-K1-E1
cggacgcgtgggcggccccgtgggggggaaatcatatcctcggttgtcagctgctaaatccttgacaattctgatgctcatgagaggtgcaacctttaagggagctggtcaaaggccaaccaaaaaaattttttttcatatgcttggtccaggggggggctaaggatatacacttgccttaaaaccgaaaaaccggtgataagactgacactgggagcgataaaagattggggacaataatttgatcaataatgaggttgaacaaccagcatcgttgcatgaagtctatcaggtctaaacgaagaaccggatgagttctttgatgtacctgaagaatctgaattttcagattacgatcacttggag

SEQ ID NO: 42825 - DNA, 411 bp, Gossypium hirsutum
  unsure (1)..(411): unsure at all n locations; Clone ID: LIB3189-045-P1-K1-E3
gcccggaatttnngggttggaccaagccttcctaaaccacccccctccctcttccatcgtgatctccgtttttttttctaatatcgaacaaaaaaaaacccgatcccaatggttttttaaactggattttaactaaatttttcccttttttaaacttttttaaagcccaaccaggtccctaataatgggatctttaatgtcaacttacttagtctccaatttttaaaaatccgaccgggacctatgcgcctccgggttttttgtggggccaaacccgaaacggtggacaaagtttgtagcatagtgagggaagcaactagcactaccccgaagattcttctgttaccggagaaatctaagttggttgcactcggagctgattctcttgacancgtcgagattgtgatggga

SEQ ID NO: 42826 - DNA, 283 bp, Gossypium hirsutum
  Clone ID: LIB3189-045-P1-K1-E7
gccaagtcaagaggtgtgaaaataactgggagagtaggaaatttgattaagtttggcaaaattaggcctgaagcttctgaattgaggtccaaatttggtgtagcaaacagttctgatggatatggaattggtccactcaaacacacacgaattccctcgggcaaaggaagcatagatggaaataggcttgctgctgctccttcaggtgaggtctccaccctaagagggggtaaggtggtgtcaggaaagcagttggaagacagagctaatatgtatggtgaaa

SEQ ID NO: 42827 - DNA, 228 bp, Gossypium hirsutum
  unsure (1)..(228): unsure at all n locations; Clone ID: LIB3189-045-P1-K1-E8
cggacgcgtgggtccggacgctttggcaacaaagtttttgaacgtgtatggcccagcctttgtggctccatttcgagtgatggcgggccttattgaaaagganattgaattccatactgttcctgntgatttgcttaaaggagagcacaaagaccctgtatttcttaagcttcattcttttggaacattttctattactcaatatggagattattttttatatgaatt

SEQ ID NO: 42828 - DNA, 209 bp, Gossypium hirsutum
  Clone ID: LIB3189-045-P1-K1-E9
acggtcagccaattgtttgagctagctagctcttacctaaatggcaaccaaaacgatgatgttgcgagatatttccacttttcttctttgtgttcagtgtctgcaactccattttccttggtgctaatggagatgacaatggtggttggcaaactgcccatgccaccttctacggtggtgctgatgctaccggcacattggggggagct

SEQ ID NO: 42829 - DNA, 125 bp, Gossypium hirsutum
  Clone ID: LIB3189-045-P1-K1-F2
gcgacttcagccatgtcggaaaaacgggtcgtcctgctctgcggcgactatgccgaggactatgaggttatggtccctttccaggctctggtggcttatgggatatcaggggacgctgtttgtcc

SEQ ID NO: 42830 - DNA, 110 bp, Gossypium hirsutum
  Clone ID: LIB3189-045-P1-K1-F7
ttccgttttttcgttaatttcctcccaacgctgatcctatcacagttgccgacatgtcttgttgttcatcatcgggttcggaggaggaggaccagggaatcgactcttac

SEQ ID NO: 42831 - DNA, 149 bp, Gossypium hirsutum
  Clone ID: LIB3189-046-P1-K1-A1
tgaaaaaaaaatgggttgtgtttcttcaaaactggttaagaaagagatgaaacgagaaatggttctcaacaatggcggcgacttcgcccatcacgtggtttctctcaagtcaagcacttacggggtcctgaaacttgacaacgatgaac

SEQ ID NO: 42832 - DNA, 316 bp, Gossypium hirsutum
  Clone ID: LIB3189-046-P1-K1-A12
tttttattttattgggtgagacagggagtgaaaagaagttaacgaggcaaatgattaaacaaaaatagatatttattatgcaaatatggagatcacatctcattacaccagtattaaactcatcatatagactctgttgggaccgaaaaccatacgtgcgtgcatgcatgcacacatgcatacatacatccataccacttcaaaatggaaaacctatagtttctttcatcagcatgttgacccctggacccaaaaggaagttcaatactaaatatcaaaccccaaagcagaaaaacaaccatttaagaaaaagaaa

SEQ ID NO: 42833 - DNA, 466 bp, Gossypium hirsutum
  unsure (1)..(466): unsure at all n locations; Clone ID: LIB3189-046-P1-K1-A2
acgcggaagaggagttctaaacaagattagtcaacaatttagagaaccttaaaaaaaaatggcaaacgcggcttcaggaatggctgtgcatgatgattgcaagctgaagtttttagaactgaaggctaaaaggacttaccgcttcatagttttcaagattgaagaaaaacaaaagcaagttgttgtggaaaaggttggtgaacctactgatagctatgaggctttcactgctagccttccagccgatgagtgtcgatacgctgtgtatgactttgattttgtgaccgatgagaactgccagaagagcagaatttttttcattgcctggtctcctgatacatcaaaagtaagaagcaagatgatctatgcgagctcaaaggacaggttcaaaagggaatgggatggcatccaggtagagttgcaagctaccgatccttccgagatggatnctgatgtcataaggagc

SEQ ID NO: 42834 - DNA, 448 bp, Gossypium hirsutum
  Clone ID: LIB3189-046-P1-K1-A3
gatgtctacaacacacttgctagtattcctacttggagtggtgactctcaccactcccacatttggtacctatgagtcaccaaattatgggaaacgccctactcctgtattcaagcctcccaaggtgaaaccaccaccatatgaacctaagccaccagtgtatgaaccaccaaaaaaggagaagcctgtacctaacccaccggtttatgcacctccaaagaaagagaagcatggacccaaaccaccaatgtatgaacctccaaagaaggagaagcctgaaccaaagccaccagtttatacacctccaaagaaagaggagcctaaacctaaaccaccagttcttagatgccaaaaatccgggaaattatggtttgttgtaaaaatcagtagctttttgtgggtcttcctgtaatttgcggagcttaattggaaatttaaccatattttg

SEQ ID NO: 42835 - DNA, 468 bp, Gossypium hirsutum
  Clone ID: LIB3189-046-P1-K1-A4
ctctcaccatggcacaaacccttacacgtgccgccacatccaccctcacgcgccaccttactctctccgttatcctcccaaagcgcctgctttcctccaaatccatcacccatcctcctcccatcccttccctccgcttctcccgccgccctcttacccctctttcccacgccgtccgatgtctccctctcgctcccacgcgcttcacttccatccgttgccgcgtcaaccgctccgggaactccgcctactctccgctcaactcggggtcgaacttcagcgaccggccgccgactgaaatggccccgctgtttccgggttgtgattatgagcattggcttatcgttatggataagcccggtggagaaggagctactaagcaggaaatgatcgattgctatatcaaaacccttgctaaagtcgtcggcagtgaggaagaagccaagaagaagatctacaacgtttcgt

SEQ ID NO: 42836 - DNA, 329 bp, Gossypium hirsutum
  unsure (1)..(329): unsure at all n locations; Clone ID: LIB3189-046-P1-K1-A6
tacgcggtaccggttggctttcttttcgggaaaattataagtggacaaccttttgtgtttacacaatggcgggcggggagcaaagcgtagagtgctacctacgntactaaatgattaaacaaaaacaaatttttattctgccaatttgaggatcacattacactacacccggatcaaacttattatatagactttctttgcaacgaaaaccatacgggcgtgcatgcatgctcccattcctacatacatccataccaatttaaaatggaaaacctatagtttcttccattagcatgttgacccctggacccaaaaggaagttcaatact

SEQ ID NO: 42837 - DNA, 465 bp, Gossypium hirsutum
  Clone ID: LIB3189-046-P1-K1-A7
gcgcggaagaggagttctcaacaagattagccaacaatttagagaaccttattctgaaagagggtccagagacgattgctgcatttattgccgagcctgttatgggagcaggaggtgttatacctcctcctgctacttattttgagaagatacaagctgttgtgaaaaagtatgacatactttttatcgccgatgaggttatttgtgcatttggaaggcttgggacgatgtttggatgtgacaagtacaatattaaaccagatcttatttcactagcaaaggctctttcttctgcatatatgcccattggagcagtcatggtgagccctgaagtttcagaagtcatttattctcaaagcaacaaacttggtagtttctctcatggattcacctactctgggcaccctgtatcctgtgctgttgcaattgaagcactcaagctctacaaggagagaaatattgttg

SEQ ID NO: 42838 - DNA, 401 bp, Gossypium hirsutum
  Clone ID: LIB3189-046-P1-K1-A8
gatgtctacaacacactagctagtattcctacttggattttttttcattttgcctgatttttcgaggtttagagttcttatataatcaactacctaatcctcttgctctctcaaccacaagcttacttgcaaacacacacacatactaacatctattgggaggtcagggcagcaaggctcctggaaattggcggatcacccaacactttcaaaggggaagacccttgctctcatcggtctcgatggctggggccgggacaaacccgatgaggacaattgcattcatgttgctcaaactcccaccatggattctctcaaacagggggccccctgaaaagtggagattaatcagagctcatggtaaggctgtagggcttcccacagaggatgacatgggaaac

SEQ ID NO: 42839 - DNA, 363 bp, Gossypium hirsutum
  Clone ID: LIB3189-046-P1-K1-A9
aaaggaagaaaagccaaaacctaaaccaccagtttatgagcctccggcacatgagccaccatacgggcgctatccaggacatccacctttggggaagcctcaatagaatgctcccatcgactagccattcccaacaattgagctactagaaaaattagtatttataataagaggaactgccggctgatgttctgttttattcttgtatggaatgtagtaatgttttctttcatgtttgaagagagaccagttgctcatggctgtactcattcgaatgcttattctatatcttcttctttctcaatgagcaatatcctgatgatttcaaataaatttcaaatgccaattgcacgattatttatc

SEQ ID NO: 42840 - DNA, 54 bp, Gossypium hirsutum
  Clone ID: LIB3189-046-P1-K1-B1
aaaggaataaaagccaaaacctaatctcaccaatttattagcctgcaaatcttg

SEQ ID NO: 42841 - DNA, 251 bp, Gossypium hirsutum
  Clone ID: LIB3189-046-P1-K1-B10
gggttatcttcaacaaattatcttctttattttgggtgctcaaccattcatggttatttgtgtaactcattcctctttagctggggggaagggtaatatattggctcctaccaatacaagggataaggggacttttgccctgtactattaaactttatgcccatattgtgccgactttattacaaatgaccttgtaaagggatttctcaacgatctgtttaccattgtgaatctaaaggtagtgcctttgg

SEQ ID NO: 42842 - DNA, 350 bp, Gossypium hirsutum
  Clone ID: LIB3189-046-P1-K1-B11
gttaatatattgcctcctaccaatacaagtgataaggtcactttggccctgtactatgaaactttatgcccatattgtgccgactttatcacaaatgaccttgtaaagatattcctcagcgatctgtttaccattgtcaatctaaagttagtcccttggggcaatgctgacattcttggcgatgaaccccattgccagcatggagaagatgaatgctacttaaataccatacatagctgtgtcatctaccactggcctgatgtgaaaaagcactttgatttcattcgctgcacagagcaacaaagctcaaagaaaccgctgttcaagaacatagcatcaatgttgaaaca

SEQ ID NO: 42843 - DNA, 162 bp, Gossypium hirsutum
  Clone ID: LIB3189-046-P1-K1-B12
gctgctgaaactgccattaatattttactaacactttcatagcaggtttttcagaagattgtattgtatgtaccgggaccactgatagcatagcggcctttcttgcagcacgagcaacaaaacccgggaaagcggtttgtattttttatttctgacttacac

SEQ ID NO: 42844 - DNA, 451 bp, Gossypium hirsutum
  Clone ID: LIB3189-046-P1-K1-B2
cgcgtacgcgtgcgtaaaagctgaactcactctatgagataattttggatctgaaacagagagagagagtatgaatcgccaccacgatccaaaccctgtcgatgaaaaagaagtcaatccattttcgaatggtggttctgtcgcacctgcacgaccactggcatccgaacctttgggttttgggcagaaacatgatgctactgtggatatacctctggattcaatgaatgattctaagaaaagagaaaaggagctcgcagcttgggaagctgatcttaaaagaagggaaaaggatattaagagaagagaagatgctgtttctcaagctggtgtttctgtagaatgataaaatttgccactaattgttccggttatacatcatgatatagctaatgtgataccggttaatgctcagatgctgcattatcttgcattcgcaagttggcttgtc

SEQ ID NO: 42845 - DNA, 536 bp, Gossypium hirsutum
  unsure (1)..(536): unsure at all n locations; Clone ID: LIB3189-046-P1-K1-B3
agcgcacgacgctcacgcccacccagtacgtagacgcgtgcgaaaatacgcttgaccttttgctgtagctcacattnntttggttttaacacgtaagcggttcttcattgaagaaagcgcctggcacaatgagttcacacaaatggtcctcaactcgatgccattgaccgcttctaagactactttgctattgcaagtaaccaattataagttgtttgctgttctctgaaaggattacccattggcacgttacacttgaagcctggccctttgcacatgaaaccaattaaatggatgaaaaggggcactggtcaaggcattctctctgcattgtgaagacaaattgggttcttgctaagttgcattctgcacttgacaaagacaagggacacttaaccacanaaccaatatggtnagttaataaagatatgggatattgtgagaaaattaagtaacattgggtgataatgagaacaagaacattgatgagctggagatacaataaagtgttttcagtatctttctgcgttctattt

SEQ ID NO: 42846 - DNA, 420 bp, Gossypium hirsutum
  Clone ID: LIB3189-046-P1-K1-B5
attaaaattagaaaaagaaaaaaagaggaagaagaatatgaagtttgcatttgttttttacttttctagtttgtttttctttcctactccgggggcgtccacactaatttctacaatataaaaattaagaaaaatccaatttttttcaatatttgttatttttcctctataaataatcgtcttcctttgttcacttgctcattaactagcttcacacacactctctctccctctttttctggttcaaagttgggttctcagttgccctgattcagggattaaaaagaaaaaaaagctaagttctatattcgggtgtggcaatggctactaataacaataatagcaagttagagaagttggcttacattgatgcacagctacgtgctttggttccgctaaagtgagtgaagatgataaatt

SEQ ID NO: 42847 - DNA, 245 bp, Gossypium hirsutum
  Clone ID: LIB3189-046-P1-K1-B6
acctacgcgctcacgcgtatcgactgaaattgaaaagaagaaaaagaagaagaagaagaagagcaatgaaaatgaggatgctattgaggctattgctgttgttgatggtgcaattgatgtagagagtgatgaaattgaaaagaagacaaagaagaagaagaagaagaagaagaagaaagagaatgaggaggctattgaggctattgctgttgttgacggtgcaattgatgcacgggctgaggatg

SEQ ID NO: 42848 - DNA, 440 bp, Gossypium hirsutum
  Clone ID: LIB3189-046-P1-K1-B8
acaaactattgtggtactgcaaacaatgctggagccatattagtcgttggtagaggactggttatcgggccgaagttaatacatcgcttaccacctcccattcagtctccagaaacatcgccggagcgtgttggagacgacacatggatgcaagaactaaacatccaaagaccaccaacaccaactcgtggtcgccctcaacccgaccacgaccggagctcacttgcatatatatgaacacggcattacaaattcaaggacttacaacctttttctaattgacaaatctctgtgtacgtattattgctcgtgtagtttctcgaagatggaagccattggttattgtatgcatagctatggagtttgaagatcaagatttaaccagtgaaattcaatatatgcctatagttttggtaggtatttaaagagggattttatag

SEQ ID NO: 42849 - DNA, 266 bp, Gossypium hirsutum
  unsure (1)..(266): unsure at all n locations; Clone ID: LIB3189-046-P1-K1-B9
atattaaacacaaaaagcatacttggagtccgcgcgattttaaaacagcccccagcactaaatatacaaacatcatattcattttcataacctccanatatccactcttccaaatcacaaactcaacatccaaatatcctccaactctcctctcaatcccattcccaaaaaaaaaacacaaacctnttctcaccttcttaaatatccaacactttctttccaattccaaccacttacaaaccttttttaattcacacatcacttta

SEQ ID NO: 42850 - DNA, 459 bp, Gossypium hirsutum
  Clone ID: LIB3189-046-P1-K1-C1
cggacgcgtgggtccggacgcgtgggaaaaaaaaatcctctctcgtttcttctgaaacggaagggaggaaaagaaatttaaaggaaaaaaaaaatcattgcaatttcctcctccttctctctgtccctgcaacaatcgttcgacgatctataaaccttctctcctcaggattttagggtttttttcattttctactgtaaactccaaaatgcataaactgggcagaggtcatcgggacaaagtccagcagttcatgactataactggagcgagtgaaaaacttgctcttcaagctttgaaagcgagtgattggcatcttgaaggagcttttgattttttctatggcccgcagtctcatattaaaagttataccgatactacatattttgaagaactttataaaagatataaagatccttacacagatatgatactgcctgatggtattactcttctatg

SEQ ID NO: 42851 - DNA, 375 bp, Gossypium hirsutum
  Clone ID: LIB3189-046-P1-K1-C10
gtgaaagagcggctaaagaagatggcatctatgaagaagaagaaatccagtaaagacatggatgcagctgcaaaagctgctgcacaagaggctgctgcaaggagtgcaaggcttgctgctgcaaagaagaaagagaagaaccattacaatcagcaaccagtgcggtaaacgcctccttttttgttctacattacatatacatatatgaacatgttttctcgttgttcattcaacaatgcgaaataaacagtgggccaaaagatgactgttttagttttatttgaatggacgagaagaaagtttgatctgttttttttgctttttggatcctattgtttctcctttatcatggatttggaactcatttgttatggc

SEQ ID NO: 42852 - DNA, 461 bp, Gossypium hirsutum
  Clone ID: LIB3189-046-P1-K1-C11
gcgatgagacgagaacgagcccttgcttatgcctatagctatcagcaacagccacagcaacaactcatgcaaccgcaccccaatggcaaagatgttggagtccaccttaatgatcgcgagaaggcacaatggggttggaactggctcgagcattggatgtcatcgcaaccgtacgacgctcgtcaactaggccatcaagaaggttcttacatgacactgctgaccaccaccgcaaccactaccgttaccgataacatgtctgagaaaactgttgaaatggatgttgtgacagcaatggattcaggctcatactcaaccctgcagcaggctcaatcagggtcaagtaatgtacctagctacatggccccaacccaatctgccaaagccaaggttcgaagccaaggacctatgattatgaagcagcaacgtgtaccacatgcaccccaatggaacccatcaac

SEQ ID NO: 42853 - DNA, 466 bp, Gossypium hirsutum
  Clone ID: LIB3189-046-P1-K1-C12
gaaaaaagagcttgtgaaggagcaaatgatgagggagcaagctgttgctattgccttagctacatcagcttcggggaactctcgcagttcgtctaaacacttagccgatgatttgagtggtccgctttcaccagtgtcactgccagcccctaagcaactaaaatttacacctgggtttgttaatgtatctgttagagactcagcagcatttctagatcaaacacgaaagatggtaccagttggacatttatcaatgatgaaattgataaccaagggacaaaccggaaaactctggaggtggaagagaagtcatcaccaatggctacttcaatttagatggaaatggcagaaaccatggaaactatcagaatggatcaaacacagcgacgaaaccatcatgagatcaaagcctcgtgcacttgctctaactgaccggatatgataaaagcttacgttcaccatcttc

SEQ ID NO: 42854 - DNA, 223 bp, Gossypium hirsutum
  Clone ID: LIB3189-046-P1-K1-C3
cccacgcgtccggatgagatgggtgatagagtaggcttagaggttgaagaggcaacgtagcttctctctttttagtgcggtgactcacaaggtttggtttttattgagataaaccgtgttaaaacgatttctagaagcttcgtcggagagattcagtccggttgatgatcggagctccggttactcgttgaggagacgagttatagcgtttattttttttttg

SEQ ID NO: 42855 - DNA, 378 bp, Gossypium hirsutum
  Clone ID: LIB3189-046-P1-K1-C5
gttcatatgccggggagcatattgtagcagcagactatctagtgcctgtccctccttcggatgaccctattaccgctgcatccatcatgctgaagggtatgactgcccagtttctagtacgtcgttgcttcaaggtcgaatccggacacacggttcttgttcatgctgcagctggtggggttggatctttactatgcctatgcgcatatgcacatgtagactgtgtgccaccaccggaaccactaccagtaccggcgccaaaagatgactgatgtaggtttatttgaatggacaagaagaaagtttgatctgttttttttgctttttggatcctattgtttctcctttatcatggatttggaactcatttgttatggc

SEQ ID NO: 42856 - DNA, 191 bp, Gossypium hirsutum
  Clone ID: LIB3189-046-P1-K1-C6
cgcatccactaccggtaccggtaacatggctgagaaaactggggaaatgggtgttgggaccagcaatggattcaagctcatactcaaccctgcagcatgctcaatcagggtcaaggaatgtacctagctacatggccccaacccaatctgccaaagccaaggttcggagcccaggacctatgattatgcac

SEQ ID NO: 42857 - DNA, 484 bp, Gossypium hirsutum
  Clone ID: LIB3189-046-P1-K1-C9
ttcccggtccaccacgcgtccgcatttttaagccgaaaatcacagctttggaagcaaatttctagggtttctttcgctagcagccgaaccaccattgttgtggtgatcaacagcatgcacacagtacccatcttcctcgttgaaggcgttcgaccatgcctagagaaatttggtaagtattttcttccctcatttattattatttttttaaaaaaaaacttcaaatttcactctttttttttaaacgaagataggttcatagagcaaagattcaacactatttgttccctcgcctttacctcagtatttctgaagtattcgggctttcattgggattgactcacatactaaaaaaaaatccgaaccaaatgaaaaaaataaactaaaaaaaagaaatcataagagaggacaaaagaaggcttgaaatcaactttgctaatcttaaattgctttttctctattctctgtgcgtgtgtacagatac

SEQ ID NO: 42858 - DNA, 457 bp, Gossypium hirsutum
  Clone ID: LIB3189-046-P1-K1-D1
tgcaatccctaaaagatcccccaaaaccttctatcttataaccttagctctcattttccctctctcttttgccattttagctcactcgcttgtcacccatcctatcttaaatcaactcgcttccgatccgctggcagacccgtcccagacccgccacgagtggactctcctcttaaccttccagttctggtacctaattttcctctttgccttctctcttttatcaacggctgcagttgtatttacggttgcatctctctacacgtcgaagccagtctctttcacttcaacgatctcagccatacccaaggtttttaagcgcctttttataaccttcacatgggtttctctcctgatgtttgtttacaatgccttggtgatcggtttcctggtcttggttgtcattgccgttgattcccggaatgcctttttttccttcttctcatttatggtgatc

SEQ ID NO: 42859 - DNA, 386 bp, Gossypium hirsutum
  unsure (1)..(386): unsure at all n locations; Clone ID: LIB3189-046-P1-K1-D10
ctcttatcatcacataaaaaaaaagggcttatggctgaagttgatcaaagctttgttgaacatgaggaggaacaggtacaagaacctcagaacttggagcagaatccgaacctggaacataacttgaacttagggaactacgtggacttggaacccaatgtgaacttggaacacaatataagcttggtccacaacgttaacttggagcagaacttgcatgaggaggaagatcaggaagaggacctggaggagcaaaatttgcagcaggaatcaaaacatcaaccaaaagtagaacatgaagacgaggcagtagttggagtggtgaaaagaagtggnctggatgggctggagagagtgtgttttgaattgtggtttccgtccaaaag

SEQ ID NO: 42860 - DNA, 454 bp, Gossypium hirsutum
  unsure (1)..(454): unsure at all n locations; Clone ID: LIB3189-046-P1-K1-D11
atcttagaaggtgtcttaataaacgccttctttcttcttcttctccctttctttgctttttcgaagtgtttcttaagcgagaatgagagagtgcatttcgattcacatcggtcaggccggtatccaggtcggaaacgcctgctgggagctttactgcctcgagcatggaatccagcctgatggtcagatgccaagtgacaaaactgtcggaggaggtgatgatgcttttaacacctttttcagtgaaactggtgctgggaagcacgtncctcgtgccgtctttgtggatcttgaacccactgttattgatgaagtgagaactggtgcttaccgccagctcttccacccagaacaactcatcagcggcaaggaagacccaactaacaactttgccccgggtcactacactattggcaaggagattgttgacctttgtttggaccggataagaaac

SEQ ID NO: 42861 - DNA, 198 bp, Gossypium hirsutum
  Clone ID: LIB3189-046-P1-K1-D12
gggatttactcactgcccattggaaaccctatcttgaacgtgcaatcagtttgaaaccatgttatgagggaggaattaatggtggtgaggtggcaacttacatcttgcaagagactgctattggcaagaattatgcttcaaacaagtttagtggtgttagaaggttacgtgattctatattttttggttatcaacttc

SEQ ID NO: 42862 - DNA, 338 bp, Gossypium hirsutum
  Clone ID: LIB3189-046-P1-K1-D3
cagatctcaaagatgtatacatcaaggaagaagatccacaaagataaggatgctgaaccaacagaatttgaggagtctgttgcgcaggcattctttgatttggagaataccaatcaagatctgaaaagtgaccttaaagatctctatattaattcagcagtccaaattgatgtttctgggagccggaaagcttgtgttgtccatgtcccatatagattgaggaaagcttttcgcaagggtcatgttaagcttgtgagggaacttgaaaagaagttcagtggcaaggatgtgattcttattgccacccggaggatattaaggccttcaaagaaagggtt

SEQ ID NO: 42863 - DNA, 281 bp, Gossypium hirsutum
  unsure (1)..(281): unsure at all n locations; Clone ID: LIB3189-046-P1-K1-D4
acgcatggctgaactccaatccgaacccaccaccacccatatcctttaatcccacccggtttaacccaagacgagttccatgagttaaccgcggagtggaactcantaccacacctacactttaggtcaaggcaaatgctcttctttattagctcaacgtatcaactcaccaagcgacctcgtttggtcgatcgtccgccgtttctatcaaccacaaacgtataagcacttcataaaatgctgtgccgtcaaagacatttttcaaatggtcgtgggttgca

SEQ ID NO: 42864 - DNA, 339 bp, Gossypium hirsutum
  Clone ID: LIB3189-046-P1-K1-D7
ctccgattcgctctactttcgccaaagaaacgcaagatttgtagattcatttctattgtctatccacctccgaatcaatggctttgccgaaccagcaaacagttgattatccaagcttcaagctcgttatcgtcggcgatggaggaactggaaaaactaccttcgtgaagaggcatctaactggagagtttgaaaagaaatacgagccaaccattggtgtggagggtattcctcggacttcttcactcactgtggcataatcccattgtaccgatgtaatactgttggacaggagaaggttcgtgggctgaaatctgctttcgtattccttgggggacc

SEQ ID NO: 42865 - DNA, 224 bp, Gossypium hirsutum
  Clone ID: LIB3189-046-P1-K1-D8
ctccgattcgctctactttcgccaaagaaacgcatgatttgtagattcatttctattgtctatgcacctccgaatcaatggcttggccgaaccagcaaacagttgattatccaagcttcaagctcgttatcgtcggcgatggaggaactggaaaaactaccttcgtgaagaggcatctaactggagagtttgaaaagaaatacgagccaaccattggtgtggag

SEQ ID NO: 42866 - DNA, 351 bp, Gossypium hirsutum
  unsure (1)..(351): unsure at all n locations; Clone ID: LIB3189-046-P1-K1-D9
gttcgttactctctcttcttctcatgtacttaattctttttcccttttataatctcaaaattccatgagttcctttgccccaacatctgggaataccgttcaaatcactaaaccttttctctttctctccatgaatttatatatatatgcatataacaaatgattcattgatttggggttttgtttctctctaaatcaggacaaaagggtttttcgatctataccaaaagaccacagggattgatctatggaattcctttttcagcagtgtattttctttttcctntttcagttttattcgatttttttacttattttctttctctctccactgcttcgaagtcagctttt

SEQ ID NO: 42867 - DNA, 403 bp, Gossypium hirsutum
  Clone ID: LIB3189-046-P1-K1-E1
gcgtccgaagcagtcgacgcctctttgataaagtccattgagggagtcccagacttgaaggcctacctcgccgcaaggtgttctctcaagtctggcatgaaaccgcacgagcttgtcttctagagggtattttgcattcccttatgttaaagggattttacttttgaattcttttggtttagattatctatggttttattatggggtgctattgctatatgtccagaacctaaattttggatagtatcttctgttatgcaagaacttaaagtttccttatttgtttgtgttctgtgcttatttgattgaagcttgttctattttaatgatggccgatgggaacacaagtatttctacctgaataattttcatatcagtaaataaaatctcttaaatattgaac

SEQ ID NO: 42868 - DNA, 450 bp, Gossypium hirsutum
  Clone ID: LIB3189-046-P1-K1-E12
attctcctccatctcacggtaacaagatctcccttcccctctctttctctccggcggcgatctcagatcaccggtaaatcgcaccgtagcgcccgattactcgtcacctctgtgatctccgctgacacctcgtggtttcagtttattctaactcttcgccatcatgaatcctgaatatgattatctctttaagcttttgcttattggtgattctggtgttgggaaatcatgtctacttttgaggtttgctgatgattcatatctggatagctacatcagtaccattggtgttgactttaaaatccgtactgtggaaccgggttggaaaaaccatcaaactccaaatttgggacacttgctgcccaagaacgctttaggacaatcactagtagctattatcgtggggctcacggtatcatagttgtttatgacgtgccagaccaagagagt

SEQ ID NO: 42869 - DNA, 51 bp, Gossypium hirsutum
  Clone ID: LIB3189-046-P1-K1-E3
acatgatggcagtactgttggaatatcttggattaatggtttttggaataa

SEQ ID NO: 42870 - DNA, 466 bp, Gossypium hirsutum
  Clone ID: LIB3189-046-P1-K1-E5
taataataacaaaataaattcgattatttatacttctcacaaactagttaaaaaaatttccattgaattcacaaactactcgaatcaaacattgaaatattcaaattggattcgctccttactttaagcttagctccacaatgaaacttgagaagaaattcaagggaactgctgtattttaatcagtcctgatatcggtaggcattggagtaatcttcaagtagtagctaacaataaaataatcagcaacgtttgagtttgagttgttatgaattaggtgatgcacgcttgtcgattccattactataatattattcatacaaggtccactttaaatttcggatttgcaagaaaaagggtaagttccactcgccaagtacggtcaacgtgtcaaatatctgctagtcgtcaacctgtttgataaaagatctgaaagaatcagtatggaagggcaaaggcccagtgt

SEQ ID NO: 42871 - DNA, 439 bp, Gossypium hirsutum
  Clone ID: LIB3189-046-P1-K1-E6
gtttgaggtcgggggaattccactggttcggaatccatataatcgacggaaaaaactgtaaacaaggggaaggggtcccaagcctcgaatgttcggagcgcattcccacaccgctcctttatgcactcgcactcaccagatcgccgctctcatcctcgtaaccgccactttcttcttcactcgtctcttcgaccaatccttccctccgtctccctgctacctcgatcgccacctcaatcttcacgtcgccaaaaccaatgacggccggccacctattgtggcccgaccgagggtacggctcccacctttttctcaagatctatgtctacgacgagaacgagatcgacggcttaaaagaccttttgtacggtagagccggctccatttcctccaatgcctgtctcaaaggccagtggggttctcaggttaaaatccacag

SEQ ID NO: 42872 - DNA, 451 bp, Gossypium hirsutum
  Clone ID: LIB3189-046-P1-K1-E7
gtttattcaatacccaaacctccctttcccccccttttttggtttatcataaacaatcgtcatagcattaacatacagctaggatctttcttttgtttttttttgggggaaaaggttgtgtttttaacgaaaatgggttccatttctttcgttaattctcaaaccctgaagctattcccttctttcaattcctttcttcattctaagcaaccctgcattgtctccatataccattattcccataaagtggcactggcaccctccttgtctctccccaaacccaaagatggctcttttcgtcttgctgctgaacttatcaccaactctgttccctcaagaaatggaaattatactgtgggtgattttatgaccaggaaagaggatttacatgttgtcaaaactacaacaagtgtggatgaagcattggaggcacttgtggagaagagagtta

SEQ ID NO: 42873 - DNA, 400 bp, Gossypium hirsutum
  unsure (1)..(400): unsure at all n locations; Clone ID: LIB3189-046-P1-K1-E8
aaaggaccacccacgcattcgaataattcatatacccaaacctacnttttccccttttttttttttattccactcataaaacccaatcantcatgagcctgctaactatacaagaataggaggcgttcgcggtttatatattattttannnnaaaaaatattatcatttttaactaaaatcctatccatatttttccttaattctcaaaccctgaaactattcctttctttcaatcccttacttcattataaacaacccttcattgtctccatataccattattcccataaaattacactgccaccctccttgtctctccccaaacccaaaaattcctcttttctttcttctacttaacttatcaccaactcttttcctttaataaatcaaaattttatc

SEQ ID NO: 42874 - DNA, 437 bp, Gossypium hirsutum
  Clone ID: LIB3189-046-P1-K1-E9
caacaacccttctcaaatctcccatggaattaacccttcttttcccccttttcttcttcttcaccttagcttttgctacatacatatccactctaaccttaaaccaaaaccatccatcatcatcatcatcatcaagctggagaagcgataatgaagtgatgggattgtacaaatcttgggtcatccaacatggcaaagcttacaatggtatcagtgaagaagagaaaaggttcgaaatctttaaggataacttgatgttcattgatgaacataactctaacaacaacactacatataagcttgggttgaacaagtttgcggatttaaccaaccaagagtaccgagccaagttcttgggcaccaggactgaccctaggcgtcgactcatgaagtccaagatccccagctcacgttacgctcaccgtgccggcgataac

SEQ ID NO: 42875 - DNA, 195 bp, Gossypium hirsutum
  Clone ID: LIB3189-046-P1-K1-F1
gcagactaccatttttaataaaggaccggattccctttccaagtttcagcaagccagatatggctcaaaatatggccagtagaacagtcgttttggctctaaccttaaacctaaaccatccatcatcatcatcatcatcaagctggagaagcgataattaagtgatgggattgtacaaatcttgggtcatccaaa

SEQ ID NO: 42876 - DNA, 224 bp, Gossypium hirsutum
  Clone ID: LIB3189-046-P1-K1-F10
gggaaagaagagagaaagagaggcgacgaaaagaccgaattgacctcggctttcttttgaaattaccctttcttcttcttcttcctcgtcggcgtcgtcgacggcgttgttcctcagcgtcttagggatgaacttcgaactatatgtatcgctcgccggaggatacttttcatttcttaaacatgcacgcggaggccagtgttaccaaagagcctaacgccaga

SEQ ID NO: 42877 - DNA, 427 bp, Gossypium hirsutum
  Clone ID: LIB3189-046-P1-K1-F11
cattagcaaccatagccatggcttcctcaccaaaactcttctctatgtctatcctcttcctttttgcgctcttctccatgcaaatgcaggctagagagtacttcagcaaattcccaagagttaacatcaatgagaaagagacaacaaccagagagcaaaagcacgagaccttcgttccccagaccacccaaaagccagaagaacaagagccaaggttcattcctgaaacccaaaatggttatggcctttacggccacgagtcaggctcaagccggcccagtttcaccaccaaagaaacctatgaaccctatctcacccctgttagattccaccctgatgagccctataacagcatccccgaatcctccaacaataaagacacttactactacaacaggaatgcctacgagtcccctaagcagcaaaa

SEQ ID NO: 42878 - DNA, 383 bp, Gossypium hirsutum
  Clone ID: LIB3189-046-P1-K1-F12
gatataataagcacctccccgtaagcaaaccacaaaggaaagcttggagagagacccaaaaacaatgtctaaggaagttagtgaagaaggacagggtcgtaaggactatgtggaccctccaccggcacctctgattgacatggctgaactcaagtcatggtctttttacagagccctcatagctgagttcatagccactctcctcttcctctatgtcactgttgctactgtaattggtcacaagaaacaacaagatgcatgtgatggtgttggtctcttgggtattgcatgggctttcggtggcatgatctttatccttgtttactgcactgccggtatctcaggtggacacattaaccctgcggtgacttttgggttgtttt

SEQ ID NO: 42879 - DNA, 411 bp, Gossypium hirsutum
  unsure (1)..(411): unsure at all n locations; Clone ID: LIB3189-046-P1-K1-F2
cccacgcgtccggccaattgtttgagctagctagctcttactcaaatggcaaccaaaacgatgatgttgcaaatattttcacttttcttctttttgttcagtatctgcaactccattttccttggtgctaatggagatgacaatggtggttggcaaactgcccatgccaccttctacggtggtgctgatgctaccggcacaatggggggagcttgtggttatggaaacctgtacagtcaagggtatggaacgagcacagcagctttgagcactgcactnttcaacaatggcttgagctgcggtgcctgctacaagctccggtgcaacaatgatcctcaatggtgcattagtcgaaccataaccgtgacagccaaccatcttttgttcctctaactatgctttatctagtga

SEQ ID NO: 42880 - DNA, 422 bp, Gossypium hirsutum
  unsure (1)..(422): unsure at all n locations; Clone ID: LIB3189-046-P1-K1-F3
ttttactattattattctaataactaaactacacgctgctatgagtacgggntacaaggacaggcgggggggcgcattatttgcaacccaacacaacctgggccctactggtgttggcaatactcgtataaaccttttggatttcatttttttccaaaatctctacctttcacatcttaaaaaatcccttctcaaggttcttatattccattccaatattaattattcctctttattattgatctactgtcaacatatacttcttcatttcccttctctccccttttatttaaatttagcaccttaaacaattctacaacttgtcaaatctttgaaaacaaccaaaacatttcacccctttatttgattctctaacacgagcttaaacaaaacgctcgcgttagttcttcatgtaccaccaa

SEQ ID NO: 42881 - DNA, 262 bp, Gossypium hirsutum
  Clone ID: LIB3189-046-P1-K1-F4
ccgatagcgaacaagtaccgcgagggaaagatgaaaaggactttgaaaagagagtcaaagagtgcttgaaattgtcgggagggaagcggatgggggccggcgatgcgccccggtcggatgtggaacggcgagagccggtccgccgatcggctcggggcgtggcccgacacggatcgtggcggtggtcaaagcccggacgctttgatacgacccgtgggagacgttcggtcgccctcgaatcggtggggattcaagcaacggc

SEQ ID NO: 42882 - DNA, 284 bp, Gossypium hirsutum
  Clone ID: LIB3189-046-P1-K1-F5
ttttattgttccttccttcgccgtctactgctcttgtgacctcgatttcaagtgaaacagaatgggtaaggaaaagactcacattaacattgtggtcattggccatgtcgattccggaaaatcgaccaccactggccacctgatctacaagcttggtggtattgacaagcgtgtgattgaaaaggttgagaaaaaagctgctgagatgaacacgaagtcattcaagtatgcttgggtgcttgacaagctcaaggctgaacgtgagcgtggtatcaccattgata

SEQ ID NO: 42883 - DNA, 213 bp, Gossypium hirsutum
  Clone ID: LIB3189-046-P1-K1-F6
gattttagtgttcccaaaaaagcgggggcctataaatccttcaataagagcgctgatatacgcgataatggcaaggctacaggtaccacccgagggcgttccttttcgagacgaatggcctttcgcaattcatcttctgggtcacatctacatcgatgatattaatagtgcacggtttctctggaaatcaatacctcctgcaatcaaagagag

SEQ ID NO: 42884 - DNA, 341 bp, Gossypium hirsutum
  Clone ID: LIB3189-046-P1-K1-F7
ctcaacatccgattattcctttccacctctcacctctctcctccttttcatcgaacagctctcaaaagtcccaatttttccctaagaaaaaaccctaactccatctccacatttacgcaacatgtcattcgatgaagaagagtccttcgaacacaccctcctcgtggtccgcgaagtcactgtctacaaaatcccggctcgttccacctccggtggttacaaatgcggtgagtggctccaatccgacaagatctggtcgggtcggctccgggtcgtctcttgcaaggaccgatgcgagatccgattggaggatcccaacttggctgagctattcgccgctt

SEQ ID NO: 42885 - DNA, 266 bp, Gossypium hirsutum
  Clone ID: LIB3189-046-P1-K1-F8
gtaaaaatatcccctcaccaccgctactattattataccattactctactacagctgctatcattactacatacatgtccacccaaagtcgagcagttggcggcaccgagcacaactggtgccgagcggtggtcgggggaaccgggatagccgtcttggctatcatttcttccaaaaaccccgacgtttcacatcttaaaaatgccctccacaagctccaaatctcccatcccattcttaggtctcgcctccattacagtcctact

SEQ ID NO: 42886 - DNA, 380 bp, Gossypium hirsutum
  Clone ID: LIB3189-046-P1-K1-F9
gtttagtgctcaaatgggtctcagtgaccagcacattgttgctctttctggtggccacactctgggaaggtgccacaaggagaggtccgggtttgagggaccatggactaccaaccctctcatctttgacaactcttacttcaaggagcttttgtcgggagagaaggaaggccttcttcaactaccaactgacaaagatctcctgtcagatcctgttttacgttcattggttgaaaaatatgctggcgatgaggatgccttctttgctgactacaccgaagctcacctgaagctctctgagctaagatttgctgatgcataaactgatggttgccgaatagaatggaagcaacaacatctgccttcacaaaatgaatgta

SEQ ID NO: 42887 - DNA, 172 bp, Gossypium hirsutum
  Clone ID: LIB3189-046-P1-K1-G1
gggatgttaaagagttgcttctgctcgatgtaactcttttgtcacttgatattgacacactaggtgggatattcactacgctaagtaaccggaacacaaccatttcaacaaagaaaagctatgtgttctatactgcaactgataaccagacttaagtaggtatcaaggtgct

SEQ ID NO: 42888 - DNA, 326 bp, Gossypium hirsutum
  Clone ID: LIB3189-046-P1-K1-G10
cttttcgcttcaaaaatgtctttatcccttcgttttctcagcgctaaactgttcttatgcctctggttaacattatttcaacaccatgtgacgttttctgctttgaatcctactggtctaaccctaagggctgtcctggatgattctccaaactcttctttataccttattgaaaacatgactatagcttgaagaatcgaaagatttattcaagttaccaatgctaaagacaattatttgaatcttaatgcaagggtaggccctgataattctaattctctatctcgagtagtaatggctcgagatgggttattttattcagtatg

SEQ ID NO: 42889 - DNA, 446 bp, Gossypium hirsutum
  Clone ID: LIB3189-046-P1-K1-G11
ggagaaaccaggaaaccaaaccaaactagtgagccgcagcttctcttcttctgtatcccaaaatgggtgcttttaggtttcatcaataccaagtggtgggcagaggtcttcctacagacgcagatgagcatcccaagatttaccgtatgaagctttgggccactaacgaagtgcgtgccaaattcaagttttgggattttttgaggaagctgaagaaggtgaagaaaagcactggacaaggtttggccatgaatgagatctttgagaaaaaccctaccaagatcaagaactatggcatttggctgcgatatcaaagtcaaactggttatcacaatatgtgcaaggaataccgagacacaaccctcaatggtgctgtagaacagatgtacactgagatggcgtgtcgtcaacgggtgaggtttccttgtattcaaattatcaagaca

SEQ ID NO: 42890 - DNA, 463 bp, Gossypium hirsutum
  unsure (1)..(463): unsure at all n locations; Clone ID: LIB3189-046-P1-K1-G12
gctagggtttactgagccactctcacattactttttgtgtgttctcttgtctccccaatttcttaccttcctaacatcaaccttagatcttttcctttttcctcattaattcgcttacatggcttcaaccttatcttaggggttctcttgattgctgtttcttttttaagttagaaaaaaaaagaaaaaaagctgaagttttcagtgtcatctcttaaacgttaacaatggcaaccaagaaccctttcgatctcttggatgatgatactgaagacccaagtttgcttattgctgctgttgagcagcaaaagcttgaaaagcctaagaaagctcctgcttcgactccagctgcggctcagcctgctaagtctgccaagcttcccaccaagccactacctncttctcaagctgtgagagaggctaagaatgagcttggacgtggaggtggccgtggtactggaag

SEQ ID NO: 42891 - DNA, 400 bp, Gossypium hirsutum
  Clone ID: LIB3189-046-P1-K1-G2
cgcaaaggaaaacaaaacaaggggcgaaaccttaattccatcaaaataattcaaaggaaaatatctgcagaatcataatggagaattatctctttctgttctcgcttgttcttctctttggtcttttacccttttcctctcaaaccccaaaccctaaaaaccccaatcccaaacctccgctcacccaggcacacaccgagcttataaactatggttttccgatcggtcttcttccggcctcggtgacgaagtacactcttaaccaaacatccggtaacttcgccattgatctcggtggcacgtgcaagatcacgctcccgcctgacaactacctggctacttactcgaagcgggtaacggggaagattgaaaacggaaagatagcggaactcgatgggat

SEQ ID NO: 42892 - DNA, 455 bp, Gossypium hirsutum
  Clone ID: LIB3189-046-P1-K1-G3
catcaatttgctctgaagatcatgttggctatttttcacaaggcatttgctaatccaccagaggagctgaatagtccagcttctcataaatctaccaagaagcctaaacagcctgaagaaaccctaaatgatttcctatctcatcaccctcacaacactttctccatgagctttggcaacgctgctgttttggcttatgtccgccatgaacgtgctgcttcagttcatcagaggttgttttgtgggtttgatgacatatactgcctcttcttagggagcttgaacaatctatttatgctgaatagacaatatggtctttccaaagggagcaatgaggcgatgtttgtgattgaagcatataggacgctgagggattagggtccataccctgctgatcaggttgttaaggatcttgaaggaagctttgcctttgtgatctatgacagcaagactgg

SEQ ID NO: 42893 - DNA, 403 bp, Gossypium hirsutum
  Clone ID: LIB3189-046-P1-K1-G5
cggacgcgtgggcggacgcgtgggtccaaatacccaaaagtcaagagtagattaaactaatggccggaatcggacctttgactcaagattgggagcccgtcgttattcgtaaaaaagcccctaccgccgccgccaagaaggatgagaaagtcgttaacgccgcccgccgtgccggtgccgagatcgagtccatcaaaaaatcaaatgctgggacgaatagggcggcttcaagtagtacttctttgaacacaaggaagctcgatgaagacactgagaatcttgctcatgaccgagtgccaactgagctaaagaaagccatcatgcaagctcgaatggataagaaacttacccaggctcaacttgctcagatgatcaatgagaagccccagattatacaggagta

SEQ ID NO: 42894 - DNA, 464 bp, Gossypium hirsutum
  Clone ID: LIB3189-046-P1-K1-G6
gaagttaaaaaaatagagagagtaactaatcatgatgtaaaagcagtcgagtacttcttgaaacagaaatgccaatcacagccagaaattgccaaggtccttgaatttttccattttgcttgcacatccgaggacataaacaaccttgcccatgcattgatgttgaaagaagcaatgaccaaagtcatgtttccaaccatggataaattggtcgaggcaatatgtaagctggctaaggctaatgcaagcgtttctatgctttctcgcacgcatggccagccagcttcacctacaaccttgggaaaggagatggccattttttctgttaggctaagcagagaaaggcaagaaatttctcaagtcgagatgatgggaaaatttgctggtgcagttggaaactacaatgcccatattgttgcatatcctactgttaattggcctcaaatcgcaaaacagtttgtgac

SEQ ID NO: 42895 - DNA, 414 bp, Gossypium hirsutum
  Clone ID: LIB3189-046-P1-K1-G7
gggatgttaaagagttgcttctgctcgatgtaactcctttgtcacttggtattgagacactaggtggaatattcactaggctaatcaaccggaacacaaccattccaacaaagaaaagttatgtgttttttactgcagctgataaccagactcaagtaagtatcaaggtgctctaaggcgagcgtgaaatggctgctgacaacaagctcttgtgtgagtacgacttgcaaggaattccaaaatgctactagagggattgttgagaatgaggacacatttgacattgatgccgatagtattgacactgcttgagtcaatgttactgtcgctggctaagaaactactatccatgcggacctctggtggaatgaggatggaagagatctgaaacgataaaagtgtaccattttaaag

SEQ ID NO: 42896 - DNA, 456 bp, Gossypium hirsutum
  Clone ID: LIB3189-046-P1-K1-G8
attacccttttctacttaatctctcattgcttacttatattgtaagtgtgaccaagtaaaccaagtacagaagctcaatgcccaagatggaggccagcagcagcacctcccatgacccagcattgttccatgctcccttgctataccaccctcggagaaggagcagcagacccttaaagggtttcgcagtgataattgggtccgtcgttttcctactctcactggtcacattaatcgttaaccaaagcccggagccattagcaagtaaccccagtagtgtaacggaggcagggtcgtattcaatggcggcgcagccaagagggatagctgaaggtgtttcagccaagtcaaacccatcactttttgacaaagttgggtttaattggacaaacgctatgttttactggcaaagaactgcctaccactttcagcctcaaaagaattggatgaatgatc

SEQ ID NO: 42897 - DNA, 456 bp, Gossypium hirsutum
  Clone ID: LIB3189-046-P1-K1-G9
ttctctcaaaatatctgctttttcttagttatcctttttgtcccttgcacattagatactgaccagtcatggtcgtcgttgatgtacgaggacggcgctacagcctgagggaataccatggacgaccgacgaccgatcactctaacaacactttagtgcaggagggtgaacaacgctgatcgaatgggctgatgttccacatgaacgagctgatatatgacatgatacgacgcgatgtgggcgcgactgccatatcagccgtgatccttggagcgtgacaagcgatctatgcagtagagacaacatggtcgttacaaagggagcaatgaagcgatacttgtgcaatgaagcatatatgacgctggggcggtaggggacataccctgctgatcaggtgttaaggatcttgaaagaaagcttgcctttgtgatctatgacagcaagactggaaaccgg

SEQ ID NO: 42898 - DNA, 196 bp, Gossypium hirsutum
  Clone ID: LIB3189-046-P1-K1-H1
accacgcgtatcggtttttatttccactcttacacaaataccgagaacgactaggcatccatgcgctactatatttacaccttactctccggccagtggtgactataccgatgcaactctagtactctaccgaccacagttgcacccaattacaacatttaatgattaaccctgttctaagaacattaatctcacg

SEQ ID NO: 42899 - DNA, 443 bp, Gossypium hirsutum
  Clone ID: LIB3189-046-P1-K1-H10
gcaccgcgtttttacagtcgaaacgatttgtttaggtttggaccggccggcacttgacgtactctgggaaaatacccttcttttttttggttttgcttttcttaattgctggtaaaaggggaagatatataaaaatttcgagggaaaggaggtgggcaaccatttcccttggcaaaactagaatcgtctgattttagggggattacttatgtttacctggattggtattaagctcaagtgcattgaatactgtggttttacttataaaatatatctattggttattgttttggatattaattattagagacggctttaattcccaatagttttttaccttatgattttattgaatttactaattttttgtgttgtattcattgtctaataacttgatgtaatggtgagatttttaatttttttattttaaatctttttttttt

SEQ ID NO: 42900 - DNA, 91 bp, Gossypium hirsutum
  Clone ID: LIB3189-046-P1-K1-H11
ttgtgaaaagggccttttcctttaatccgttcaatttttctagaaggtggaaggctttggacctgaaatttggggcaatttggactttttt

SEQ ID NO: 42901 - DNA, 425 bp, Gossypium hirsutum
  unsure (1)..(425): unsure at all n locations; Clone ID: LIB3189-046-P1-K1-H12
gtctccttcggctttcaatgcaatacagaaactattcagacttcatagctattttgctaatcccaaaatgtattgggttgatcttctattgcttggactctctttcatttaattgtacccctaagattggaaattgagaataaataggttttttacatagagagagagagagagagagagagagagagagagagagagagagagatggggcgtggaaaattggaatttggagttagagtttggaaatttatggtggtatcagttaaaacaagttatagattgntttggaatcatccaatatttgttggtttggttggttttattatatatttggatagatcttttcctttcatgttttcaattttggtgactgcatctcctgttttggtttgcacttgtgttttgcttggtcttcttttgagttt

SEQ ID NO: 42902 - DNA, 467 bp, Gossypium hirsutum
  Clone ID: LIB3189-046-P1-K1-H2
aaaaagttgtggagaaaaaaatattacgtttgggaagcgagaaagtgcgagaaaatgagcggagcaggaaagaaagtagtggatgtggctttcaaagcaggaaagagcattgattgggaagggatggcgaagcttttggtctccgatgaggctcgcaaagagttcgccactcttcgtcgcactttcgatgaagttaactccactttgcagaccaagttcagtcaggaacctgagcctatcgattgggaatattatagaaaaggaatcggctcgcgattggtggatatgtacaaagaggcttatgagagcgtagagatccccaagtttgttgacacagtcactcctcaattcaaaccgaaatttgatgcattgttggttgaattgaaagaagcagaggagaaatctttgaaagagtccgagcgtttggagaaagaaattgccgacgttcacgaactgaagcaaaagat

SEQ ID NO: 42903 - DNA, 95 bp, Gossypium hirsutum
  Clone ID: LIB3189-046-P1-K1-H3
acgcttgatatttgtattaagaatcgccctttagtgatcagtgaggtgaagaaaaatgtcttgctgtggcggaaactgcagttgcggctgcgctt

SEQ ID NO: 42904 - DNA, 248 bp, Gossypium hirsutum
  unsure (1)..(248): unsure at all n locations; Clone ID: LIB3189-046-P1-K1-H4
tttataaataattatcttagtttataaatatcttaggggttctcttgattgctngttcttttttaagttagaaaaaaaaagaaaaaaagctgaagttttcagtgtcatctcttaaacgttaacaatggcaaccaagaaccctttcgatctcttggatgatgatactgaagacccaagtttgcttattgctgctgttgagcaccaaaagcttgaaaagcctaaaaaagcttctgtttcgactccagctg

SEQ ID NO: 42905 - DNA, 317 bp, Gossypium hirsutum
  Clone ID: LIB3189-046-P1-K1-H5
tgcagtcccatttggcgggttcaagatgagtggtcaaggaagagagaaagggatttatggcctttcaagttacttgcaagtcaaggcagttgtcactcctttgaagaacccagcatggttgtaatgtttgtttgtttgttttcttacaaattgccatgaatctaaacttgaactaataagctgccagttttttaaattttgaatgatcagcgtatggtaggatcattcctgaactgataatttgctcatatttggatgagtatggggcataatgttttaaatatatgaataagaaaaaaggcttaaaataatatttt

SEQ ID NO: 42906 - DNA, 253 bp, Gossypium hirsutum
  Clone ID: LIB3189-046-P1-K1-H6
gtctgcttaggctcccagcgttgctcttacactataggactccctagatatttcgctaatttccatggtcttcaccattccctttggctgcaaagagggtgggaaatttaaaaagccttttacgcctgcaaagggggtgcctgttcagatcacccactccatgccggcttacaagattgagatctttaaatctttggggggctgggctgagaaccacattctgactcaccttaaaccagttgagaaatgttgg

SEQ ID NO: 42907 - DNA, 463 bp, Gossypium hirsutum
  Clone ID: LIB3189-046-P1-K1-H7
cccacgcgtacggttttatttgcaacagtaaaatcccaattgaaaactttaaagaatccacgcgccactatctctgatctcactctccgcccatggcgaccattccgatgacaaactctcaatccaccgccggaagtggaccccaatcacaacccccaataaccaaccctgctttccgtacattcctctcacgactgacgtcgtcgatccgtcagggattctcccagcgtcggccatggttcgaactcatcgatcggactgccatggcccgtcccgacaatttaacggatgcctattctcggatccgtagaaacttttcctatttcaaagtcaattacattactctacttgcacttgttctcgctttctcgcttttatctcatcctttttccctcctcgtcctcctcggcctccttgccgcttggctcttcttatacttgttccgaccgtcggatcaacctct

SEQ ID NO: 42908 - DNA, 395 bp, Gossypium hirsutum
  Clone ID: LIB3189-046-P1-K1-H8
actatactacagaagctatcaggacggcatacatatccaactagaggggagcaattaacattacctagcaaaacttttactaaactgtggttagtggaccctattctcaacatttaataactaatccttgtttaaatacattactttaacgactgacgtagaccatccttaaggaattatctcagcgtatggcatggttataactcattcattgaactggcattggcaatactgacattttaacggatgcttatttttggatccgtaaaaacattttcctatttcaaagttaattacatttctatacttgcaattgttcttggtttgtcacttttattttatctttttttaactcctttgtttttctttggacttttttgtcgattagctttttt

SEQ ID NO: 42909 - DNA, 403 bp, Gossypium hirsutum
  Clone ID: LIB3189-046-P1-K1-H9
gctcttcactaaacaatccactgcttctcacttgctttcttttcttttctttttactggacttctcaaagcattccccaatttcctccctggttccagctctagtttccaagcagtttcagaggaaagaaagtaaagcctgtttaccgaagatggaaaaccccatcacttcaaaatgctgcaaccatcagccctggtttgtcttacttgtctttttcgttttctgtattgagctattttcctttgattactctggttttactgctaaaaaatctgccctcgtcactgttttggatgataatcatggaaacgtaatcaatacccaaagttctttacctcatgatttcactgaaattaccaatgctagcgtctatccattgcccaaaactgatgaaaagggagat

SEQ ID NO: 42910 - DNA, 133 bp, Gossypium hirsutum
  unsure (1)..(133): unsure at all n locations; Clone ID: LIB3189-047-P1-K1-A10
tctacccactcttcctcccactcttcctatctctatcgtccgcccttttttttttttttttttgctgnnantaaatttgtcagtgcattttttaaagattttacgtaacctattctttnttcctttttattct

SEQ ID NO: 42911 - DNA, 473 bp, Gossypium hirsutum
  Clone ID: LIB3189-047-P1-K1-A12
ggagtagtgaagcacatattgttggcaaagttcaaagatgaaatccaacctgagaagattgaggaactcatcaaaggctatgccaatcttgttaatctcattcaccccatgaaagctttccactgggggaaggatgttagtattgagaacctgcatcaagggttcactcatgtgtttgaatccacatttgaaagcacagaggggattgctgagtatatagctcatcctgctcacgtggagtttgcaaatctgtttctccccagcttggacaaggtcattgtatttgactacaaacccaccgttgtacgttgctaagttacaagcatagttctgtctcaatgtagcttttgtcctgttcatgtctgttgttattttgaataaagtttgacgtcttgtactatgaaatgcatccatccctagtgatcaaggcaaaagttggttggttttatcttctttaggttttacatacaata

SEQ ID NO: 42912 - DNA, 474 bp, Gossypium hirsutum
  Clone ID: LIB3189-047-P1-K1-A4
ggaccacttcttcccttccattttactttgttttagttgccataacgtcaccttccaatacaacccacggtgaggcaacaatatgtcttcactactctcacgttgctcatcctgttttccctcagttgttcaacaacattagcccaatctccggcactggccccggcaccttctggcccgacaaacgtcaccaagatcctcgaaaaagccggtcaattcaccctcttcattcgtcttctaaagtccactcaagtggccaaccagctgctcggtcagctcaacaattccaacaatggtatgaccgtttttgcaccaacggacaatgctttctccagccttaaatcgggcacattgaattcactcaccgatgaacaaaaagtgcagctggtgcaattccacatcgtcccaacatacctcacctcgtctcagttccaaaccattagcaaccctttgagaacccaagctggtgatagt

SEQ ID NO: 42913 - DNA, 208 bp, Gossypium hirsutum
  unsure (1)..(208): unsure at all n locations; Clone ID: LIB3189-047-P1-K1-A5
aatacaactgagagggatttaacaagagggggggggactantaaaattataataatattttatattaattatttaaaaacattattctaatttatnttactatcacccataaccttctaaccctacatacttcaccaatatcctataaaaaaccattcaattcaccctcttcattcgtcttctaaagtccactcaattcttcaaccat

SEQ ID NO: 42914 - DNA, 383 bp, Gossypium hirsutum
  Clone ID: LIB3189-047-P1-K1-A6
ctccattttgcccatttcactgctctcccctagatcgtctccaagagagagatctccttacagctacgcgtacacattcacacacacattggctgaatgggtcgagtcatccgagctcaacgtaagggtgctggttccgtcttcaaggcccacacccaccaccgcaagggtcctgctcgtttccgcagcctcgacttcggtgaacgaaatggctacctcaagggtgttgattacgatgttatacacgactctggccgtcaagcttcttgtggcgctgcttaacaattccaacattgtgttgaccggttttgcaccaacggtcaatgctttcttcaggcttaattctgtcacattgtattcattcaccgatgataaaatagtgc

SEQ ID NO: 42915 - DNA, 303 bp, Gossypium hirsutum
  Clone ID: LIB3189-047-P1-K1-B11
aaagaactcaaatctttatcatccaccatgggaggaggaaatgcccaaaaatccaagatggctcgtgagaagaacttggaaaggcagaaagctgccgccaaaggaagccagcttgattctaacaagaaggccatgaccatccagtgcaaggtgtgcatgcaaacattcatctgtactacaacagaagtgaaatgccgggagcatgctgaggcgaagcatcctaaatccgacctatacacatgttttcctcatcttaaaaagtagcacactggggaagtggagatggctttgatcattcatcta

SEQ ID NO: 42916 - DNA, 199 bp, Gossypium hirsutum
  Clone ID: LIB3189-047-P1-K1-B4
cggacccgtgggttgattttgctttttacactttttatttaatatatctttcaaaatctaaagccagagtaggtgttcgatattcgagggcgcccctcttcagtgcaaaaaaaccttcctttatatataatataaataatattttcgttttaaatttcaaaaagaaaaaaaattgaaagatttataaagaagcatcgat

SEQ ID NO: 42917 - DNA, 410 bp, Gossypium hirsutum
  Clone ID: LIB3189-047-P1-K1-B5
cccacgcgtccgctaatcttcagtttttgccttcccaccggcttaacaccgcctttcagttttcattgggtctaagaaaaggattaaaagggcgaagaatatgatgcgagccgttcaatacagtaaatataacggaggcgccgctgatctcaagcatgttgaagttccggttcccagtccaaaaaaggatgaagttttgatcaaagtagaggcagctagtattaacccaatcgactggaaaatacaggagggggtagcgcgcccatttttaccttgcaaattcccccacattcctggtaccgatgtagcaggagaaatcgtacaagttggatcaggtgttcagagtttcaaagtcggtgatacagttgttgccgtacttggtaatggaggtgcactagctgaatatgctg

SEQ ID NO: 42918 - DNA, 398 bp, Gossypium hirsutum
  Clone ID: LIB3189-047-P1-K1-B6
ctttgattactttgtattagcagcttgagtagggggaaaagagttatgaagaggaccagctttgctgtagttagacggtgtgagcgaaccggggagaagcccatcttgagaatcggtcgccatcggcgtccgaattgtagtctggagaagcgtcctcagcgacggaccgggcccaagtcccctggaaaggggcgccggagagggtgagagccccgtcgtgcccggaccctgtcgcaccaagaggcgctgtctacgagtaacgttgttttgaaacacagtcttaatagttctaacgataaaaaggatggttaaactcgggcgatacactattcgaatacttataccgggatttaaggattataaaactatctaaagggagaaactaagagagcttttaa

SEQ ID NO: 42919 - DNA, 426 bp, Gossypium hirsutum
  Clone ID: LIB3189-047-P1-K1-C10
tcttaataaacgccttctttcttcttcttcttattcctttattgctttttagaatttttcttaatggaaaatgagagagtgcatttggagccacatcggtcaggccggtatccaggtcggaaacgcttgctgggagctttactgtctcgagcatggaatccagcctgatggtcagatgccaagtgacaaaactgtcggaggaggtgatgatgcttttaacacctttttcagtgaaactggtgctgggaagcacgtccctcgtgccgtcttcgtggatcttgaacccactgttattgatgaagtgagaactggtgcttaccgccagctcttccacccagaacaactcatcagcggcaaggaagacgcaactaacaactttgcccgtggtcactacaccattggcaaggagattgtcgacccttgttt

SEQ ID NO: 42920 - DNA, 184 bp, Gossypium hirsutum
  Clone ID: LIB3189-047-P1-K1-C11
ctcgcactaccggtccttaattcccttctcgacgccacgcttccgtcttaataaacaccttctttcttcttcttcttatttttttattgctttctaaaacttttcttaatgtgaaattttagagtgcgattgcggtccacatcactcactccctcttccatttcctaaacactttcttatacct

SEQ ID NO: 42921 - DNA, 463 bp, Gossypium hirsutum
  Clone ID: LIB3189-047-P1-K1-C12
ctggaacagtgttgcataggccatcagggccagatcctacatcagagttcgagcattcctccattgcagcaacacttaagaagattttgaatctcaaagaatttctaacaaagcgtgatgcgtgggctggttcctttgatattgttgtcaatcgaagcaccccaagaacagactgtccagaaaaactggcagagccagtgaaaatgagagacagtgatgcaaaagaaacagcaaaactaagcgattttcaagaagagctagtgcaagcagcagcagcattgaaaggagatccattcaatcttgtcgaaaacatgacagtttcatctggtctcaagtacgttgaagatgccttcaaaaaattctatgatgacggccagaaagctaaggaaatcaatgaagttgaagatactgtttcagctgatgcatcaactaggaggacaacagcttccaaaactttcatgca

SEQ ID NO: 42922 - DNA, 475 bp, Gossypium hirsutum
  Clone ID: LIB3189-047-P1-K1-C4
gcgtttgtctgtcgattatggcaagaaatccaagttgggtttcactgtctacccatctcctcaggtctggacttctgttgtgtgagcctgacaacagtgttctctcaactcactcccttttggagcacactgatgtggctgttctccttgacaatgaagctatctacgacatttgcaggcgttctcttgacattgagcggcccacctacaccaatcttaaccgtcttgtctcccaggtcatttcctccttgactgcctcactgaggtttgatggtgccttgaatgtcgatgtgactgaattccaaaccaacttggttccctacccaagaatccacttcatgctttcctcgtatgctccagtcatctctgctgagaaggcttaccacgagcagctctcagttgctgaaatcaccaatagtgcctttgagccctcatctatgatggctaagtgcgatccacgccatggaaagtacat

SEQ ID NO: 42923 - DNA, 315 bp, Gossypium hirsutum
  Clone ID: LIB3189-047-P1-K1-C5
tcactaccggtcctaattccctttccaccacgcgtccccccatgtttactaccactttacattaaattcaaattattttttactaccatacacaattaatatactctttgcatctattcttacggcgcgcggcattaatctatcaactctctccccatattacaaaactttttatttcatccttacttctctcatcatagaatccaacctattactcacattccaattaacaaaactctccaatgaagttattattcttttaacaccctttttcatttaaactctaccttttaatcacttccctcttcccttctt

SEQ ID NO: 42924 - DNA, 65 bp, Gossypium hirsutum
  unsure (1)..(65): unsure at all n locations; Clone ID: LIB3189-047-P1-K1-C6
cccctttctacccactcttcctttctatatctctatcttccgccctttttttttngtttttttaa

SEQ ID NO: 42925 - DNA, 54 bp, Gossypium hirsutum
  unsure (1)..(54): unsure at all n locations; Clone ID: LIB3189-047-P1-K1-D10
ctctcggtttctgagtaatcgaagataaaaaaggatggggctgtnttttgctaa

SEQ ID NO: 42926 - DNA, 94 bp, Gossypium hirsutum
  unsure (1)..(94): unsure at all n locations; Clone ID: LIB3189-047-P1-K1-D11
ttnttttttttnnnnnnnnnnnnntnntttttggggggggttttttgggggggggggggttttttttttttttttttttttttttttttttttt

SEQ ID NO: 42927 - DNA, 242 bp, Gossypium hirsutum
  Clone ID: LIB3189-047-P1-K1-D12
tgaagtttgtaatagagaggataaacgaacaatagcacctgagcatgtactcaaggctttagagtggttgggtttggaaagtacatgggagagctctatgctgcatatgaacaacacaagaatgagacactgcaagactctttgaaaggtgggaaatggagcaatggggccgagatgaccgaagaagaaacagtagcttagcagcaaaaaatgtttgccgaggcacgagcaaaaatgaatgg

SEQ ID NO: 42928 - DNA, 469 bp, Gossypium hirsutum
  Clone ID: LIB3189-047-P1-K1-D4
cttatctctccaatttccctggaagataattaaacttaagagcaatccccatggctatctcctttttcggcttcctctctctgctttggaggcctttctcctccccctcatcagacggtccagaaaacttcatcatccacgtgtccaaatcacacaagccgccccttttctcctctcaccatcactggtactcttctatcctcgcttccctccctccttcccctcaccccatcaagctcctctacacctacgaacgtgtaatcaatggcttctccgctcgccttacggccgctcaggcagataagctcaggggacttcccggaatcctttcagtgattccggaccaggttcgtcagatccacactactcgaacccctcactttttaggcctttccgatggtgttggtctttggcaaaactcctattatggcgacggtgttataatcggagttttagataccggaatatg

SEQ ID NO: 42929 - DNA, 379 bp, Gossypium hirsutum
  Clone ID: LIB3189-047-P1-K1-D5
atagtggatggtcttctcgtaccagggctgttgccaagtatctccagaatttattcgaggatgaagctggacatggacgtaaggcactttctatggacagtctattggctcgtaaaacacgtaaagaagcatcgaggatgtttttcgaaacactggttcttaagacaaaagattacatccatgtagaacaggggaaacccttcgatgatatctgtataaagcctcgattgaagctcttaaaatcagatttctgatccctttgcataggaaaaaatagcagatacagtggaaattgccttgttggtgttgctttcatgctcagcctgcggtgctgattattttgcttcaatcaaaatgtcttcatattatttttactata

SEQ ID NO: 42930 - DNA, 83 bp, Gossypium hirsutum
  Clone ID: LIB3189-047-P1-K1-D6
aaaaaaaaaaaaaaaaaaaaaaaaaaaaaaaaaaaaataattaaaaaaaaaaaaaaaaaaaaaaaaaaggggggaaaaaaaaa

SEQ ID NO: 42931 - DNA, 395 bp, Gossypium hirsutum
  Clone ID: LIB3189-047-P1-K1-E10
cgaagtctagcaacaaggaagccgagaatgggacagggaaaggagaagaccctcaagacggaaggaggtcaaagaagaaaaccggagagcgacaagacgaggaatgcatggaaaacggtctctcagatacggatttcgagcattacgtgaaggtaatcagatggttagaatgcaaaggacatatcgaaaagaacttcagacagaaattcctcacctggtacagcttaagagcaaccccgcaagaagtaaggatcgtgaaagtattcgttgatatcttcatttccgatccagcatctcttgcggagcagctcgtggacacattctccgattgtatcttcagcaaaggatcatccgtcgtaccggctggcttttgcatgaagcttttgcattgacat

SEQ ID NO: 42932 - DNA, 420 bp, Gossypium hirsutum
  Clone ID: LIB3189-047-P1-K1-E11
cccacgcgtccgcgatgctgaggatattcaacccctcgtctgtgacaatggaactggaatggtgaaggctggttttgctggtgatgatgctcccagggctgtttttcccagtattgttggtcgaccccgacacactggtgtcatggttgggatgggtcagaaggatgcctatgtaggagatgaagcacaatccaaaagaggtattcttactttgaaatatcccattgagcatgggatcgtcagcaactgggatgatatggaaaagatctggcatcatacattctacaatgagctccgtgttgctcctgaggagcaccctgttcttctcacggaagcacctttcaaccccaaggccaacagagaaaagatgactcagatcatgtttgagaccttcaatgtacctgccatgtatgttgccat

SEQ ID NO: 42933 - DNA, 422 bp, Gossypium hirsutum
  Clone ID: LIB3189-047-P1-K1-E12
ggaacacaacttgcagcattcaacccatttctctcttcatctaaaccaccccttcctccatgtgggaggtatctttgagaacgcctatgtgaggttcacgcggtttatcctcaaaggacaacgctttcctcaggggccaatttaacaacagccggtttatgaatttttatgctagccgtgctcccagaaagcaaagaggtctcgttgtttcaccaagttgtgtccttccactaacggaggagaatgttgagaaggttttggatgaggtacgtcctggcttgatggccgatggagggaatgtgggtttgcatgaaatagatgggtttgccgtggtcttgaagttgcatggagcatgtggttcatgttccaactcatccatgacccctaagatggggattgatacttgggttcgaggtaaaatt

SEQ ID NO: 42934 - DNA, 377 bp, Gossypium hirsutum
  Clone ID: LIB3189-047-P1-K1-E2
ataagccactcgaattgcctgtttttcctttagtcatgggtcggaagcttattggaggaagtgatgtgtgagggatgaaagaaactcaggagatgctagacttctgtgccaagcacaatatcactgcagatatcgagctgattcggatagaggaaatcaatacggccatggaaaggcttgctaaatctgatgtcagataccgatttgtgattgatgtggcaaattccttgtcacagtagggttcattgtgaaagaactagtccagtaagtttaaagattatgatcttaatggagaagagaaaacagatgaactttgatggcttgggacttgtaatgctatataataataatttatatgaaatgattttgtggtgttc

SEQ ID NO: 42935 - DNA, 464 bp, Gossypium hirsutum
  Clone ID: LIB3189-047-P1-K1-E3
attttgcttcagaccactacaaggctagctcctaccctctctcttatttgatcattcactttacagagaggaacaataagtcctggggagagcgacatcaagaagatcgagaacgcttcaaacaggcaagtcacttattcaaaacgaaggaacggtttattcaagaaagcccaagagctcactgttctttgtgacgccaaggtttcattgatcatgttctccagcactggcaaattccatgagttccttagccccaacatctcgacaaaagggtttttcgatctttaccaaaagaccacagggattgatctatggaactcccattatgagagaatggaagaaaattacaggagcttgaaggagataaacaagaagctgagaagggagattaagcaaagaatgggtggagacttgaatgaacttaacattaaagaactgcaagctcttgaagctaaaatggtttc

SEQ ID NO: 42936 - DNA, 454 bp, Gossypium hirsutum
  Clone ID: LIB3189-047-P1-K1-E4
cccacgcgtccgtttcgtttgttttttttcaatcaatattttctttcagctctcaagctttcttgggagtgaataagcatgtctcatcgcgaagtttgagcatccgaggcacggttcattgggctttctcccgaggaaaagagcctcccgacatcgaggaaaagtaaaggctttccctaaagatgatccgactaagccatgcagattaactgcattcttgggttataaggctggaatgacccatattgtgagggaagttgaaaagcctggatcaaagcttcacaagaaggaaacttgcgaagcagttaccattgttgagaccccgcctatggttgttgttggagtagtcggatatgtcaaaactccgcgtggtcttcgtactttaggcaccgtgtgggctcaccatttgagtgaggagggtaaacgaaagttctattatgcactgttgcatgtc

SEQ ID NO: 42937 - DNA, 474 bp, Gossypium hirsutum
  Clone ID: LIB3189-047-P1-K1-E5
gtaactgccgctgcacgattgcctcttctgctacggtagccattttcattataatataccttatttgcatgtcctcaaaacccacgtctgccccggtttttattctacaaaccacaaccaagtttcggctttaccttcaaagccaaatccccaccgtctacataacacacttgttccggttctgggttcttttgcttttctgctgttttttctactctgaaaatggaggaagcgtcgaaacagcagatttacctacacggtgacttggatttaaccattgttgaagccaggagattgcccaacatggattttatggtcaatcatctccgcagttgcttaacctgtgagccttgcaagtctcccgcacagactgctgctaaagaaggggactccaaaatccgcggccaccgtaagatcatcaccagcgatccctacgtcaccgtttgcctcccccaagccaccgtggctcgcaca

SEQ ID NO: 42938 - DNA, 361 bp, Gossypium hirsutum
  Clone ID: LIB3189-047-P1-K1-E6
gcaaccaaaagcttcccactttaacagggcagcaataaaacttggttggctttataaacaaaggacttaaaagcaaataactcaaaacaccattttcaagcaaaatggaaaactgcaactttgatcattagtctttcatgctatcgtcaccatcttcctcttcgctcaactcgagatcagcaagcagctcttccaacggaactgaaggcacatcatcgccatctgacacagatgccatttctgatggttggtaatctttgttgcggtacagcgataagtttaaccgtaattcagggttctcttctaaatctttcaagaactcttcatacttcgtggtcatcttttctttgtaacctctacc

SEQ ID NO: 42939 - DNA, 287 bp, Gossypium hirsutum
  unsure (1)..(287): unsure at all n locations; Clone ID: LIB3189-047-P1-K1-E7
ggcttttggtgctttcgtcccgttttccctaattcttaacgaagaaagaaaagagaaagacagcgagggaaatcttcaaccgtgggaggtcaaatctttctctgcnaacaaacaaagactctagccatgggaaacacctagaagctcctgaaccagatcatggaactcaaattcacgtccaaatccctgcatcgccaggccaggaattgcgagaaggaccagaaatctgagaatattaaagtcaataaggccatctagaaaggtaacatcgacggagctcgtatcta

SEQ ID NO: 42940 - DNA, 218 bp, Gossypium hirsutum
  unsure (1)..(218): unsure at all n locations; Clone ID: LIB3189-047-P1-K1-E9
aggataagccaaaatgctaaattacacaaaacagtgtcttttantcatagaggggtagtacaaatcatacttaattaacacaccgatctacctaaattctcaccttccacgcatttaactatgccatcagctgtttccaaagagaatttattacctgcccagcgattatataatacattcttttcattcgatcaacatctacccataatacatttctt

SEQ ID NO: 42941 - DNA, 408 bp, Gossypium hirsutum
  Clone ID: LIB3189-047-P1-K1-F1
gcgcccacgcgttcgatcgtttttactcccacgggaaatccatcacgcgcttatcgatacagtccgttatgaaagagcgctgtaacatcccgtgcgaaaccgttaccgatcaatcccaaaagcgggttgtacctcttgctcacctccgacgatgtgtacgtcgaagatttttgcggccaagtttgtgggttccattacttcacgttcccgtcaatcgtggggtacacgctcccgtatgcatgggtgggtaactccgcgaagctttgcccaagagtatgcgcttaccctttcgccgtacctcaatacatgccggggttgaagccgttaaagtcacccaacagtgacgttggagttgacgggatgataagtgtgatcggacacgaagtcgtcgaattagcaaccaaccca

SEQ ID NO: 42942 - DNA, 417 bp, Gossypium hirsutum
  Clone ID: LIB3189-047-P1-K1-F10
ctttctcccaatttctatttatcttcttctccttctctttagtcttttacgctgcggccagaaaggaggaagaaaccatgccgaagaacaagggaaagggaggaaagaacaggaagagaggaaagaatgaagctgacgatgagaagcgtgaacttgtgttcaaggaagacgggcaagagtatgcccaagtgcttcgtatgctaggcaatggccggggtgaagccatgtgcatagatggtactaagcgcctttgccatatccgaggaaagatgcacaagaaggtttggattgcagctggtgatataattcttggtgggcttcgcgactatcaggatgataaggctgatgtgatccttaatacatgcctcttgaaagaagggtcttaaaggcatacggtgaggttccagagaacactct

SEQ ID NO: 42943 - DNA, 228 bp, Gossypium hirsutum
  Clone ID: LIB3189-047-P1-K1-F11
tttcctcccactttcaaactattctcttcgccctttttatagagtctgacattgctactaatagcagcccaaccactcgtgctggtgaggtgcttaaagcctttattataccctacatcttcaccttcgtccacgacaatatatccaaaaacattcattaaccctattacgtctacaaactcgcttatcaccaaacttcatctgaatcctggggtacctttcgatccg

SEQ ID NO: 42944 - DNA, 200 bp, Gossypium hirsutum
  unsure (1)..(200): unsure at all n locations; Clone ID: LIB3189-047-P1-K1-F12
aatatctatagcatacagagatggagaggcaaagattcatgcaggtttgtttgttnattntggggggggtttttttgggggggggggggggttttttatttttattttatttttatttattttttagttatatttatttgtatttttttggggtatttttttttttttgtttttttttttttattaggggtatattattt

SEQ ID NO: 42945 - DNA, 470 bp, Gossypium hirsutum
  Clone ID: LIB3189-047-P1-K1-F2
ttcaaatggcaaccaaaacgatgatgttgcaaatatttccacttttcttctttttgttcagtgtctggaactccattttccttggtgctaatggagatgacaatggtggttggcaaactgcccatgccaccttctacggtggtgctgatgctaccggcacaatggggggagcttgtggttatggaaacctgtacagtcaagggtatggaacgagcacagcagctttgagcactgcacttttcaacaatggcttgagctgcggtgcctgctacgagctccggtgcaacaatgatcctcaatggtgcattagtcgaaccataaccgtgacagccaccaacttttgtccacctaactatgctttatctagtgacaatggcgggtggtgcaatcccccacgagaacactttgatttggccgaaccggcattcttgcggatagcagaatatcgagctggaatcgtccctgttatg

SEQ ID NO: 42946 - DNA, 433 bp, Gossypium hirsutum
  Clone ID: LIB3189-047-P1-K1-F3
tcccacgcgtccgcttttattttgtgtcttctcatggggtaaatatgctttcaaattacaccctggcatgagtcaaaattacatagatatgtggatgatgtcaccctttaagattttagctcacaatgtattttgactccaacattccttcacatctatatctaatatatactagctcaccaaaatacatttgtattttagcatgtatcttgattgaatgtttcatgtgatttatgtgaatgtaacatatttagtcatgccagtcttaaaaccatttgaacagatataggttgaaacaacttatccaatcaaggggccgttcttttatattttccactaccacaccagtttctattatctcttcttagtcattttgtaatacttgattatttcactttgacttatttcttgtgtttttaatttttactatttt

SEQ ID NO: 42947 - DNA, 226 bp, Gossypium hirsutum
  Clone ID: LIB3189-047-P1-K1-F4
gcgagcggtcaccgaatcaaacatcaaccgggtccaggaaatctgttcgttggagcgccgagttaggtagtgaatcgcctgcgtgcggatgcacagcgtcaccatgtccgctgttaacggatccaatccttacattgctcagtctcctgctccggaatcattttcgacttccttcaaagagaaaatggacactgtgaaggatgtcttggggagatgggggagaaaa

SEQ ID NO: 42948 - DNA, 360 bp, Gossypium hirsutum
  Clone ID: LIB3189-047-P1-K1-F5
gtgagctctcaccaatggctttcaaagctctgctgctgttactattggccacttttctgcttgtttgaacgacagttgcttccaatgaagggggagtgaaaacttgaattaaatatgccgctcctggtccaatgaaagcacctattccttgttcacccggtaaggcttccaccaattcggtgtccggcgtacaagggttcaacttcaagacccccaacttaaggccccacttcatattaaacccctaccaagggccccacttcaacctttaaaccaacaacccagggttctaactcaacatataaacccccaagttcttgaacaacaaacaaaggctctacttcaacattttaagccccc

SEQ ID NO: 42949 - DNA, 327 bp, Gossypium hirsutum
  Clone ID: LIB3189-047-P1-K1-F6
gtgttattaagctaggtgaaaagcaggctgatagcaagtgtgctcttgtttatggtcaaatgaatgagccccctggtgctcgtgctcgtgttggccttactggtctgactgtggctgaacatttccgtgacgctgaagggcaggatgtgcttctcttcattgacaacattttccgttttactcaagcaaactctgaagtgtctgccttgctaggccgtattccatctgctgtcggttaccaaccaaccttggctactgatcttggaggtcttcacgaacctattaccaccaccaagaaaagtactatcacttcttgtcaagccatat

SEQ ID NO: 42950 - DNA, 174 bp, Gossypium hirsutum
  Clone ID: LIB3189-047-P1-K1-F7
gacttgagaggtgtaggataagtgggagctctcggtcgaaattgaaataccactacttttaacatgattttacttattccgggaatgagaggcggttcactgcccctctttttggacccaatgcccttttcttcctaccgctccttgcgcttcacattttgggcgggcagtttt

SEQ ID NO: 42951 - DNA, 320 bp, Gossypium hirsutum
  Clone ID: LIB3189-047-P1-K1-F8
cggacgcgtgggagaacgtctggaaagggaggccgccgaagctgagcagaaacggaaggaagaaggggaagctcatgaaagagcaggaggggaagctgctgaaaaagaggctgcccgggctagaatgcgagaacaaaaagccttatcacttggtgatgaacctgagaaaggaccaagtgttacacaggtattggtacggtttcccacgggtgaacgcaaagaaaggagatttcacagcacggcaacaatccaatcagtttatgactatgttgattcattgggttgcttagaagttgaggactacatccttttgttcaact

SEQ ID NO: 42952 - DNA, 424 bp, Gossypium hirsutum
  Clone ID: LIB3189-047-P1-K1-F9
gttagctgccttcgatgaggacaatttaattccttgctttggattcggtgatgcatcaacacatgatgcaagatgtcttcagtttctacgcggatgacagattttgtaatggatttgaggaagtcttaagccgctatagagaaattgtgccacatcttcgacttgcaggacctacatcgtttgctccaatcattgaaatggcaatgaccatagttgagcagagcagtggccagtaccacgtgttagtgataatcgcagatggccaggtaaccagaagtgttgatacccagcatggccagctaagtccgcaagagcagaaaactgttgatgccatagttcaagcaagcaagcttcctctgtcgattatattggttggtggtggagacggaccatgggatatgatgaaggagtttgatgattacat

SEQ ID NO: 42953 - DNA, 352 bp, Gossypium hirsutum
  Clone ID: LIB3189-047-P1-K1-G10
ctggagtctcttttaggtcttatatacctttcaactttcaagcaaatttggaacagtttaacggttgtttagtatatgatggggcgcatgatatactctttataatggacatagaggatgatgactcctgtttggtgctttacagtggcttggtagagttcccatttgtgtttaggcattcaggctgaacagcagctggtgatgacttgttgctcgttcttattttcacgaaagaagacagcttgctcagctgaacatacaacagaaattgatgatgaaggtttaagcattcaaaacacttaactcttttcttacaaggagctgaaaatggcaactggaaattttcattact

SEQ ID NO: 42954 - DNA, 277 bp, Gossypium hirsutum
  Clone ID: LIB3189-047-P1-K1-G12
gaagatcctctcattttcatctgtatcttctgaggcacaaactgagacatctgaaatgggtgcaccctcaatgtttgttgagtcaagtgataaggaacctgaagggcatggtgaaacaagagaacagggtacttctagttttcaagagatgcatgcagcatccttggatttgtttgaaaacgaaccaagggtaagggatctaccagagatcagtgtgcatgatggtatatatgctggttcatcaaggttttcttccacttttttcgatcataatgta

SEQ ID NO: 42955 - DNA, 487 bp, Gossypium hirsutum
  Clone ID: LIB3189-047-P1-K1-G2
gcgtccgcccacgcgtccgatagagagcacctatagactctctctcgccctctttttctccggcgagctagcgcgggggctccgccatagctccgtcggtgcgcgaaaaatataaacaattcgggacaccttctcccctttttaaaaacaagtttagatctacttgcaatcttttgaaataaataaaaaaacgaatagaatttggcccttgcactttacccgtttcatattcctcttctccgaagcttattcgaaaccttagggtttcttatggctttcatgaacgaaaaagggcttccaatggtggcgaggcgcgaagaacaggtgatttctcttttatttctttatatttgcttcgagtttcaagaaaataagagaaagggactacctttggaaatctttgtatttctttttagtattgattgtgtgtgtaaaaaattacaaaaacggattccttcggctttataaccgaatatatttttacaat

SEQ ID NO: 42956 - DNA, 206 bp, Gossypium hirsutum
  Clone ID: LIB3189-047-P1-K1-G4
acgcgtccggttccttgtgaacggcacttgcacatgggttagtcgatcctaagagacgggggaagcccgtccgacatgtcgtccagcgcgagcgtcggaagggaatcgggttaaaattcctgaaccgggacgcggcggctgacggcaacgttagggagtccggagacgtcggggggggcctctggaagagttatcttttctggtaa

SEQ ID NO: 42957 - DNA, 254 bp, Gossypium hirsutum
  unsure (1)..(254): unsure at all n locations; Clone ID: LIB3189-047-P1-K1-G5
agaaaacatgtctcttgtgacagaagagataaaagcgagtgcatcagagatttaccatggagatgaggtatgccaggagaaatccaagtgtttgttggaggaagtaggcatgccaagggggcttttgccacttagagacatcgaagaatgtgggtacgtgaaggacacaggtttcgtgtttctcaaacatnngatgagcattacccacaggttcgtaaagatatggaagctggtttcctatgcaactgaagtca

SEQ ID NO: 42958 - DNA, 474 bp, Gossypium hirsutum
  Clone ID: LIB3189-047-P1-K1-G6
accacgcgtccgcaaaatttgcatcagccaggtgtttattctcagattcagcaacagcagcaacaacgacaaatattgacaagcaatgggcagtcaactcaaaccacccttcctgctaataaggcttcatatcctttgacatcgttagctcaagatacacagattcagcaacaggtggaacagcaacctaacctcgtacagagccaacagcaacagacacagttgcagcaaaatctgtcccagaggtcacaacagcagccacaaattcaacaactggcacagcatggcctctcagagcaacaattccaattattacagaaattgcagcaacagcagcagtcgtctcaacaattactctcacctactggatcactgtcgcagtctccagtggtgcaacaacagccaatgcatcaacaaaaccaaccaatgcagcaagtgcctctttctcagagccaacagacacttggcagcaat

SEQ ID NO: 42959 - DNA, 374 bp, Gossypium hirsutum
  unsure (1)..(374): unsure at all n locations; Clone ID: LIB3189-047-P1-K1-G7
ccgcaaagaagcttgctgttctcttctcttctattcccaatagtgttcatcccgtgcttttaaatccatacgctcacaaagagtatgggntttgaaggaggaaggggcgaggagcatgccccagaaagttaatgaccccttccggctcgacccttttgaacgcatgacatagctcattctctatggactgtacaagcaagccactgttggaccagtgaataccggccgccctggaatgttcaacatgagggaaaggtacaagtgggatgcatggaacgctgttgaagggaaatcaaaggaggaagcaatggcggattatatcaccaaagtcaaacaaccgtttgaggctgctgcaagttcttgatgtgtatcag

SEQ ID NO: 42960 - DNA, 399 bp, Gossypium hirsutum
  Clone ID: LIB3189-047-P1-K1-G8
gaaagagatgggcaggaagaagggagtagcagagttctaagaaacggcgccggatgacttcgacgcgggccaatccctacaaagacccgggggccatgcttgaaatgagggagcatatagttcgagagaaatggattgacattgagaaagccaagatcctccgtgacaaggtcaggtggtgctaccgcatcgaaggggtcaaccatctccagaagtgccgccatctcgtacgccagtacctcgacgccacccgtggcatcggctggggcaaggatggccgtcatccctccctccacggtccaaaggttgaagagatcgattcagaatgaatggctgcatttggtcatgataggtgactgactttgggcatcaaaataaggagtgtgggatttgataatt

SEQ ID NO: 42961 - DNA, 313 bp, Gossypium hirsutum
  Clone ID: LIB3189-047-P1-K1-G9
agatcttctttcaaccgcgcctaataaccgctcggatttttctcagacgtgaaaaaaatggggctagctttcaccaagctattcagccgtgtatttgccaaaaaggagatgcgtatactgatggttgggcttgatgctgctggtaaaaccaccattctttacaagctgaagttgggagagattgtcactaccattcccaccatcggtttcaatgttgagaccgttgaatacaagaacatcagctttactgtttgggatgtctgtggccaggacaagatccaaccattttggatacactattttcaaaacattg

SEQ ID NO: 42962 - DNA, 477 bp, Gossypium hirsutum
  unsure (1)..(477): unsure at all n locations; Clone ID: LIB3189-047-P1-K1-H1
gcgcccacgcgtncgcggacctctcagttttcttccgatgtgcaatcaagggataccaagactcgctctacacggacacnatgcgtcaattgtgccgggaatgtaagatcaccggcactgtagacttcatattcggcgacggcgccgttttgttccaaaattgccaaatcttagccaagcaaggcttaccaaaccagaaaaataccatcaccgcgcaaggtcgcaaagacccgaaccaaccaactggcttctccatccagttctgcaacatctcggccgatacagacttattaccttcagttaactccactcctacatacttgggaagaccatggaaactatattcaaggaccattatcatgcaatcctacattagtgatgccataaggccacaagggtggcttgaatggaaccaagattttgccttggatacattatactatgccgagtacatgaatatatggccaggggctagcc

SEQ ID NO: 42963 - DNA, 187 bp, Gossypium hirsutum
  unsure (1)..(187): unsure at all n locations; Clone ID: LIB3189-047-P1-K1-H10
ttncaccgaccttagtttactttatattttatatatgataggatatataatataatactntaatatattatattttaatacctaaatattaagntaaaataatatataaaatccatctttatataaaaaacatcttaaaatttctaaaacaattaacccgcttatttttttaaaacctcatttttac

SEQ ID NO: 42964 - DNA, 440 bp, Gossypium hirsutum
  Clone ID: LIB3189-047-P1-K1-H11
tcgcccacgcgtccgtccacgcgtccgcccacgcgttcgtggacgcgtgggcgcgagcggccgcccgttgtttttttttttcaaaggtggggagtattcaagctaaaaataagttgttcattgtaatgcagtttattttaaaaatagggcaaggactgcatacattttattctacacccaccacaactcaaaattttaaaaacactaattttgaaagttttttttgacaaaagaatcaaaacaattcttccttagacatgttcgcaacgaagtatccgacagaaatatcagccatcccaactgaacttgaacgagaatataaaactcctacaaagcataatttacttaccatccgatgaggacatgaccgagcacgatgaagctgaactacgcctgcaaaaagctagcatatttggcacctaggaaaagcctttggatgc

SEQ ID NO: 42965 - DNA, 449 bp, Gossypium hirsutum
  Clone ID: LIB3189-047-P1-K1-H2
agcaatgtggcggttgaagatgacagagatggaaacgagtttgttatctctaagtcggagtggattcgggcaagtagaacggattcctcggagattccgttggatgctctacttatacaggagaaacctgcgccttcttctagattcggtcaccggaaacctgttaaagccaatcccgaaggtgggcgagcgttgaaagcggcgaagccaaaacggcatgagacgcttgaaaacacttggaaaatgataacggaagggaaatcaatgcccgtgtccagacacttgaagaagtcagacacgtgggagaatcacggccgtgatatcaacatggaggcgttgaccagctcccctctgatgaaaaaatcggaaacgttcagagaccggaccaattaccagcttgcacccgaacaaagtagctctttccccggtttaggaaagctgagaaaaga

SEQ ID NO: 42966 - DNA, 285 bp, Gossypium hirsutum
  Clone ID: LIB3189-047-P1-K1-H3
gcaactttgacgcagctgctatttcttttttgtggttttcaccagcaacttgtacttgcaataatgcgcgagctccatcgctaatagcggtagcatctctatccacatccttcaccatctctaacgctctctacaggccatcatccccccttgctcaaatcactccatctaatttcaagtccaaggttttaaattctaacggagttgttttggttgagttcttcgcgccttggtgtggccattgccaaactttaacacctacatgggagaaagcctccaatgtct

SEQ ID NO: 42967 - DNA, 259 bp, Gossypium hirsutum
  unsure (1)..(259): unsure at all n locations; Clone ID: LIB3189-047-P1-K1-H5
cccacgcatccttaaactggcgncatttttgctttcagcagcttgcatttgaaaagatggtgagggtcagtgttttaaacgatggactggaagagcatgtacaatgcggagaagaggggcaaacgacaggtcatgattaggccttcctcgaaagtgatcatcaagttccttttggttatgcagaagcacggttacatcggagaatttgagtatgttgatgaccacaggtctggcaaaaatgttgttgaacttaacagta

SEQ ID NO: 42968 - DNA, 358 bp, Gossypium hirsutum
  Clone ID: LIB3189-047-P1-K1-H6
tcacgcgaaaataataagtttattaagccttaactggacatatgattaagttctgaaaaaggctctgcacatactgaatgaacggtgtggagaggggatcaaaacttctttgggggaagacctaccctacattctacttattgacgaacttgatctttttgtcaccagaaaccaatctgatctatacaacattattgactactctactaagccccattccaagataattgtgacaggaatagcaaatacaatggatcttccagagaagttacttcctctcatttcaagccgtatgggtattcaaagactctgttttggtccctacaattatcagcatctacatgaaattatatcaaag

SEQ ID NO: 42969 - DNA, 396 bp, Gossypium hirsutum
  Clone ID: LIB3189-047-P1-K1-H7
caaggaacaattgattaccattcctactgctcctcctcagtcaccagcacctgcaccacctcccggagctcaagcgaccccacaaatacgaccgaatgatcctgcagctctactagctggtttgctgtcgtgaaaatggaagatttgttcagtatacacttagaaaccttggtttttatactctgccggccacccatttggcatttatccctcacacatatggaaaatttcatgatgcaagggcttgccggatcacggaggagcttaattatgtttgtcggcttagtgaaagaagggttggtcgggtattttgttattctttctgcacatccatggtgagagtatttttttttccaattttttttaatcacgttttctatttcttctcagcatacc

SEQ ID NO: 42970 - DNA, 237 bp, Gossypium hirsutum
  unsure (1)..(237): unsure at all n locations; Clone ID: LIB3189-047-P1-K1-H8
gcccgtccgaccaatgtggcggttgaagatgacagagatggaaactagtttgttatctttaactcggattgaattcctgcaagtagaacggattcctcggagattccgtttnatnctctacttatacaggagaaacctgcgccttcttctagattcggtcaccggaaacctgttaaagccaatcccgaaggtgggcgagcgttgaaagcggcgaagccaaaacggcatgagacgctg

SEQ ID NO: 42971 - DNA, 262 bp, Gossypium hirsutum
  Clone ID: LIB3189-047-P1-K1-H9
gagcgatagaggaaaatcacgaattcctgataaagtgacggaaaatatatacaatgcatagatcgcgagctccattgctaatagctttgaggatttctcttcacatccttcaccatctctaacgctctttacgggccgtcgtcgccagtggttcagctcactccatctaatttcaagtccaaagttttaaattctaacggaagttgttttggtgagttcttcgcgcctttgtgtggccattgccaaaactttaacacctaca

SEQ ID NO: 42972 - DNA, 340 bp, Gossypium hirsutum
  Clone ID: LIB3189-048-P1-K1-A1
cttggtttttcttcttcattttcccctttcctcgatcaaaatcctcagctctcttaccgccaaaggaggatcatgttttcaggttttacgatggcatcgaagcggatcttgaaggaattgaaggatttacagaaggatcctcctacatcttgcagcgctggtcctgttgctgaagacatgttccattggcaggcaacaatcatgggtccaccagacagtccttatgcgtgggggttttcctggtgaccatccattttcctccagattatcccttcaagcctcccaaggtggcatttagaacgaaagtattccaccctaatattaacagcaatgggagcat

SEQ ID NO: 42973 - DNA, 239 bp, Gossypium hirsutum
  Clone ID: LIB3189-048-P1-K1-A2
tctggtataatggaactgagtgagtcaccgggacgatttaacgaacgaaagaaagttcacgatggggtcgatccccgatccgggtgagttaaccgagttaactcatcctaatttcgatgagttccaacatcaaacatctcttatgacgggctgcactcttatgtggaaagaactcttcgatcacataagttcactttgggcaaatctgattagacaatcggaggccttggaacgcaaaa

SEQ ID NO: 42974 - DNA, 59 bp, Gossypium hirsutum
  Clone ID: LIB3189-048-P1-K1-A7
gttaaactgtcagagagaggtagacattttgtaattcaaaatgtgaacagttccctatt

SEQ ID NO: 42975 - DNA, 463 bp, Gossypium hirsutum
  unsure (1)..(463): unsure at all n locations; Clone ID: LIB3189-048-P1-K1-A8
accttctgcttagcttaaaaaatcttgaatctgcactctcctacttccctcgttatcgtcaatggcttcggacaagaagattaagatcgggattaacggatttggaagaatcggacgtttagttgccagagttgctcttcaaaggaacgatgttgaactcgtcgccggtaacgatcccttcatttccaccgattacatgacatacatgttcaaatacgacagcgttcacggtcaatggaagcaccatgatcttaaagtcaaagactctaaaaccctcctcttcggcgaaaaacccgtcactgttttcggaatcaggaaccctgaggagattccatgggctgaagccggggctgagtntcgtgttgagtcaacttgggtgttcactgacaaagacaaggctgctgctcacttgaagggggtgctaagaaagttggatctctgccctacaaagatcacccatgtt

SEQ ID NO: 42976 - DNA, 385 bp, Gossypium hirsutum
  Clone ID: LIB3189-048-P1-K1-A9
ggttaaaaacccattagctaaaggggcactgggttctttctgtgttgcttgcagttatcggagttactgcactgctcgttgtaactccggtaagggggtaccgtccatggccgtacgtaaaacccaacagctccgacttaatgttcggaggctctaagaaatttgagggctcatcggagtttgtacatatgagatatcatatgggtccaggccttactggtcatatcaccatccacccaatctggtacggccggtggcagaaatcacagaagaaaatcatccgggagttcatcaactcgatctccgccgttgattccaaacacccttcggtggctgggtggtggaagaccgtacaggtttacaccgaccaaacgggagccaacat

SEQ ID NO: 42977 - DNA, 386 bp, Gossypium hirsutum
  Clone ID: LIB3189-048-P1-K1-B2
gcggctcattattctctgtttcgtatttctcttaaaactctacaatggctaaaacctttgcttgctttggcctatgagctctcataggtaggtgcgcactggtcaggctcctagctcggccccaaccaagtcaccggcgtcttctaaccctactccggctcccaagggttctccaaccatgtctccaaccactacaccaaccgcatctgcgccggcaacatccactcccccgtcttcagcccctgaatcttcaccaacttcctctcccaccacttctcccccagctcctcccgctggttctcccgctggttctcccgctggctcttccgctggctcttccgctagcgctggttctcccacaaactccatcagcgatacaccaggca

SEQ ID NO: 42978 - DNA, 410 bp, Gossypium hirsutum
  Clone ID: LIB3189-048-P1-K1-B9
cggacgcgtgggttttttcgcaaaattttctaagttttagccatttagaaaaaaactttttgttgttgaaggccatgactatgagtaacaatattgggcaatttggtgacacaactttaaccaaagttttcgttggagggttagcttgggaaactcccagagaagccatgagagagcactttgagaagtatggtgagatccttgaagctgtgattatttttgataaaggtaatggcagatacaagggttatggattcagtacgtttaatgaagctagagctggtaaacaaggttgggaactttctctctctataataaacggacggcgtggttacttaaatcttgactcacttgaagcgtataacccgatgtccactctcactgtttattaacaacaaggaccacacgca

SEQ ID NO: 42979 - DNA, 267 bp, Gossypium hirsutum
  Clone ID: LIB3189-048-P1-K1-C1
cggagtataaataacaaagaacaacaaaactgccgcatcgacggtagacggaagctactcccatgtacgagcaccgcgaccttccaaactgcaccaccaaaatgcaaaatcaaaccgaaccaccggcggaaactaactcggacaaagacgatcaagcgattgaggttgatttatcatccaccaaccggtctcgatctcaccagcttccagctccacgatctcgactcggtggaattgccggcaaggcttaccgagttggaccttact

SEQ ID NO: 42980 - DNA, 150 bp, Gossypium hirsutum
  Clone ID: LIB3189-048-P1-K1-C11
cggacgcgtgggaaaaaattcacacataaaagtatttttaaaaaaattaaactttgaacaaatttcaaagattttgattttcttctgcgaatgtctcatccaccaattgaatcaggttgtgaagtattgagggtgtttattatttagttg

SEQ ID NO: 42981 - DNA, 189 bp, Gossypium hirsutum
  Clone ID: LIB3189-048-P1-K1-C12
cggacgcgtgggctagatcgcacacataacttatttttaaaaaaattaacctttgaacaaacgccagggattaccattttgttcggctcgggctcatccaccaattgaatcatgttctgaagtatttaatatgctatatcttactattttttttcctggtgctaggcacattttttttttattttaccc

SEQ ID NO: 42982 - DNA, 221 bp, Gossypium hirsutum
  Clone ID: LIB3189-048-P1-K1-C3
aagaaaatgggcacaggatatctttctgcatttccattttaactttttgatcgcttcaaaacaatatggcctgtctgggctccgtgctacgccattcacaagatcttggcacgtctcttacatcaatatacatttgctaatgatgctcaaactttacttattacaacatccatggtcaaatacttctataatctttttcagaatacgctcagaacactcac

SEQ ID NO: 42983 - DNA, 445 bp, Gossypium hirsutum
  Clone ID: LIB3189-048-P1-K1-C6
ggcttctctgcctttcatcttcttcttatctttctttataatctccacaacattgacgtcagccggcgccggcggcgccaccatcaaactgtccctgtctcccttccctcacccttcttcctcccatgcttaccaaattctcaacaacttagtcacttcttctggtgcaagagcccaccacctcaaacatcccaaagccaaggccgataatactacctcttctcttctcagggctcccctattttctcacaggtatgggggctacactatctccctcaaatttggaactccgcctcaaacccttcctttcgtcatggacaccgggagcagcctctcctggttcccttgcacctctcgttacctttgttcccaatgcgcattccccaatggtgaccctgcaaaaatccccacttttgcccctaaactttcatcttccagtaagctc

SEQ ID NO: 42984 - DNA, 424 bp, Gossypium hirsutum
  Clone ID: LIB3189-048-P1-K1-C8
aagaaaatgggcacaggatatctttctgcatttccatcggaactttttgatcgcttcgaagcaataaaacctgtctgggctccatactacaccattcacaagatcttggcaggtctcttagatcaatatacatttgctaatgatgctcaagctttagttatgacaacatggatggtcgaatacttctataatcgtgttcagaatgtgataagaacgcacactgtggagagacattggttgtctcttaatgaagaaactggtggtatgaatgatgtcctctacaggttgtttgccataacggggaacccaaagcatttgttcttggctcaccttttcgacaaaccctgttttctaggattgcttgcagttcaagctgatgatatatcggggttccatgccaatacgcacattcctatggttattg

SEQ ID NO: 42985 - DNA, 478 bp, Gossypium hirsutum
  Clone ID: LIB3189-048-P1-K1-C9
caagcagcgatacttcagaattcggattcccggaataaattatctagggtttgcaaaagaggtgaaagccgcaaatggaagggtgggaccggaatacgaagtcgacgctaacacagatcccgctactgacgacgaaggcgggtcccagagacggagcggcatggactcagcggctgaaggaggagtataaggctttgatcgcctacacgcagatgaataagtccaacgacaacgattggttccggatatccgccgccaatccggaagggacgcgttggaccggcaagtgttggtacgtccataaccttctcaagtacgaattcgatctccaggttgatatccccgttacttatccggccactgctcccgagctcgagttgcccgaacttgatggcaagactcagaagatgtacagaggagggaagatttgtctgaccgtgcatttcaagccactttgggcaaaaaattgtgctaggtt

SEQ ID NO: 42986 - DNA, 310 bp, Gossypium hirsutum
  Clone ID: LIB3189-048-P1-K1-D10
ccaagaccaaaacctttttttattacgttttccctgacaaggtttagatccatctcttgggagcaaagagaaatggccaacaacgacaatgtagaggaatccagccctcttttgagcaaacaagttagtgttgaagaagatgagaagaagaatctaaatggtaacaactccaccgacgtggcagcttcgccggcagctaggaccggagctgggttcgggtggaccgccaatggtctgcccttggtccacgggagttgtcgtggaaaacctatgggccggtctcagtgggatttctccctcctcgcttgtc

SEQ ID NO: 42987 - DNA, 455 bp, Gossypium hirsutum
  unsure (1)..(455): unsure at all n locations; Clone ID: LIB3189-048-P1-K1-D11
tcaaacctctcaaatctttttcagttttcatttccccatccaaacgacgccctaaaccaaaagtcatgggcaccccttccgcacgtgacgaaaacgtttacctggcgaaactcgccgagcaagccgagcgctacgaggagatggtcaagttcatggagaacgtcgtctccgccgtccctgcccccgacgaactcaccgtcgaggaacggaacctcctctctgtcgcctacaagaacgtgatcggcgctcgccgtgcctcttggcggatcgtttcctccatcgagcagaaagaggaaggacgtggcaacgccgaccacgtctctgtcatccgtgagtacagggccaagatcgaggccgaattgtccgagatttgcgccggaattntgaagcttctcgacgagaaactcgttccggccgccgggaccggtgattccaaggtcttttacctgaagatg

SEQ ID NO: 42988 - DNA, 415 bp, Gossypium hirsutum
  Clone ID: LIB3189-048-P1-K1-D12
gaaacaccatacagacaaataaaatatgaagaggtcattgctagtatctgttgtaatcagcttggtaatagttgcttcagccgccaactttaaccaagacatcgacgttacttggggagatgggaggggcaagattctcgaaaacggaaaccttctcactctcaccctcgacaaattctccgggtctggttttcaatccaagaaccaatatctgtttgggaagatcgatatgaacattaagctggttccaggcaactctgctggcactgttaccacttactatcttcgttcggaagggtcgacatgggatgaaattgacttcgaattcttggggaacctaagcggagacccatacatagtccacaccaatgtatatacacaaggcaaaagtgacaaagaacagcagttctacctt

SEQ ID NO: 42989 - DNA, 302 bp, Gossypium hirsutum
  Clone ID: LIB3189-048-P1-K1-D2
atctcccaccatcagatgaggaggaggatgagtacccttccggggaagaacaaactcagtctaacagacaagaaaggcagagcttgaagccacttgatacctccataagtgaaaaggaattgaagaagcgtgagaaaaaggaaatgcttgctacccatgctgctgagctggcaaaacaagaggcccttaaagatgatcatgatgctttcactgtggttatcggtagtcgggcttctgtccttgatgggtgagatgatgcggatgctaatgtcaaagatataaccatagacaatttctctgta

SEQ ID NO: 42990 - DNA, 132 bp, Gossypium hirsutum
  unsure (1)..(132): unsure at all n locations; Clone ID: LIB3189-048-P1-K1-D3
cccacgcgtncgcaacgctctccttctgtttctggtcaagccaatctcaaaagactccccttttagctcacagctcctctcttgaggtactataatgggtaaagagaaagttcacatcaacattggggcatt

SEQ ID NO: 42991 - DNA, 270 bp, Gossypium hirsutum
  Clone ID: LIB3189-048-P1-K1-D4
gcgaatggatagttgagagacacacctcaaaaaggatctagaaaagagaatatctccttttattttcatttcggcttgatttcatctcaaatccatcatcgaaattacttgtagttatcagaatggggacaataggcaaaactactacgggcactatttttctttggcttcttctggttcctattggcttttccacgcctaatgacagatttggtagaattggactcaaaaagagaaagattgaccgaaacaatcggatggctgcacacc

SEQ ID NO: 42992 - DNA, 284 bp, Gossypium hirsutum
  Clone ID: LIB3189-048-P1-K1-D5
ctttaactctatacttatctgtccaacccatgcgagtctcactctacacaaaccactactcactattcgcacacgtgagattatataaagcggattcgacaatccatctaaaaagataaactcatctcattatatgatttactaccctgggtttctttacgattcggcggggaaattatttatcgtttttttccctttatctatcatcatcaacgcattctcattttaactttacttttaattttccttttaatgccttatttttattcctttccttttaaatt

SEQ ID NO: 42993 - DNA, 235 bp, Gossypium hirsutum
  Clone ID: LIB3189-048-P1-K1-D6
gcgcccacgcgtccgcccacgcgtccgcccacgcgtccggtggatcaataagtgatgagcagagaaagaatggtatggttaactcatgccctggagcaggagcctgtggggggatgtatactgcaaacaccatggcttctgcaattgaagctatgggaatgtcacttgcttacgggtgttcaatacctgctgaagacccattgaaattggatgaatgcctgttggctgagaagta

SEQ ID NO: 42994 - DNA, 145 bp, Gossypium hirsutum
  unsure (1)..(145): unsure at all n locations; Clone ID: LIB3189-048-P1-K1-D7
tttttgtaatcttctctttcttgtcatccttggttttttaaaccaaaacaaatgtagttgtaaacttataatgacggtggcggaanncaatattacaacctnaaaaaataaaaaaaatttttttaaaattaaaattaccaaatcc

SEQ ID NO: 42995 - DNA, 310 bp, Gossypium hirsutum
  unsure (1)..(310): unsure at all n locations; Clone ID: LIB3189-048-P1-K1-D8
aacaatttctcgtcggttttgggttttgcttctatttctgcagatgttgacaattcaagtgcagcggtaaaaactgctaaacgcggcgggttnnaannnnaaacaaccaaatcanaatcaaangaattcaatgttcaaaaccatatttatattttcacataggtgaaccctttctccaaattaatttttcccatcatatataacttcataatcactaccataaaatcacataattctaatcacgttccttttaagcaatcaactttcaattataattttttcaacacaatttctacaaataaccttaacc

SEQ ID NO: 42996 - DNA, 405 bp, Gossypium hirsutum
  Clone ID: LIB3189-048-P1-K1-D9
atgggttatcttcaacaatttatcttctttattctggttgctctgccattcatgtttatttgtccaactcattcctctttagctggtggtgatgttaatatattgcctcctaccaatacaagcgataaggtcactttggctctgtactatgaaactttatgcccatattgtgccgactttatcacaaatgaccttgtaaaggtcttcctcagtgatctgtataccattgtcaatctaaaattagtcccttggggcaatgctgacattcttggcgatgaaccccattgccagcatggagaagatgaatgctacttaaatactatacatagctgtgtcatctactaactgcctgatgtgaaaaagcactttcattttatccactccacgcagcaacaacacctcaaa

SEQ ID NO: 42997 - DNA, 448 bp, Gossypium hirsutum
  unsure (1)..(448): unsure at all n locations; Clone ID: LIB3189-048-P1-K1-E1
aaacgattcaagttcaaatgaaaatgctgcacagagcaacaccaacaacaatgaaaacaataacaatgggaatgcgggtcaggacgggaagaatgccactcanagtaacactgacaacaatgaaaatgtgggtcagaatgagaacaatgctgctcagagcaacactgagaacaatgaaaatgcgggtcagaatgagagcaatgcaactcagagcaacactgagaacaatgagaatgcgggtcagaacgagaaaaatgctgctccaagtgacgctgagaacaatgagaatgtgggtcagaacgagaacaatgccgctccaagtaacactgagaacaatgagaatgcgggtcagaacgagaacaatgctgcttcgagtgacaccgacaacaatgagaatgcaggtcagaacgagaacaatgcgactcagagcaacaccggcggaaacaac

SEQ ID NO: 42998 - DNA, 195 bp, Gossypium hirsutum
  Clone ID: LIB3189-048-P1-K1-E10
tgataatttcgaaagaggttttcgattacgctgatcgaagaattaaagggataagtaaacgggattggtagaatggctctaggtgctggaggatcatcaacattgaaccccaatgcccctctgtttgttccggctgtttatcgccaagtggaggatttgtcacccgaatggttgaatctgtgttcgacaacatct

SEQ ID NO: 42999 - DNA, 258 bp, Gossypium hirsutum
  Clone ID: LIB3189-048-P1-K1-E11
gcgcccacgcgtacgcccacgcgtccggacaagcaaagattttaatttttattgaaaataatattttcttgggaagttaatttactggggtcgtgatgacattaaacctgaggatattaatgctttgcatctgattcccaaagaactttcacttaaaattgttagcaagattgaagcaagaaagaggtttaccgtttatgttggttgccctatgtggcccgaaggaatcccagagagtgcctcagttcaagcaatatt

SEQ ID NO: 43000 - DNA, 483 bp, Gossypium hirsutum
  Clone ID: LIB3189-048-P1-K1-E12
cacatactaacatctatggggaggtcagggcagcaagtctcctggaaattggcggatcacgcaacacgggcaaaggggaagaccgttggtgtcatcgttctcgatggctggggcgaggacaaacccgatgagtacaattgcattcatgttgctcaaactcccaccatggattctctcaaacagggtgcccctgaaaagtggagattaatcagagctcatggtaaggctgtagggctccccacagaggatgacatgggaaacagggaagttggtcacaatgctctcggtgcaggtcgcattttcgctcaaggggctaagcttggtgatattgctcttgcctctggaaaaatctatgaaggagaaggattcaagtacataagcgaatgctttgaaaagggaactttgcacctgattggattacttagtgatgggggcggccattcacgacttgatcaattgcagttgttgctgaagggagctagg

SEQ ID NO: 43001 - DNA, 307 bp, Gossypium hirsutum
  Clone ID: LIB3189-048-P1-K1-E2
ttcccggtcgacgacgcgtccgtgtagattagaaaactagagatcaaaagataggcaactaggaaaaaaaaaaagataagtgaaagatgtcaactggttcttcattgtgttcatcaactgagattaatggctttggagggggacttggggttctaagaacccatgtttctcaacccaagacactttctttcacaagaaggagaatttctacggtagtgaaggcaacatctcgaggtgataaattctcaaaaagcgatatcattggttctccatctattctctctgctaaattcgcaaaggtggggga

SEQ ID NO: 43002 - DNA, 293 bp, Gossypium hirsutum
  Clone ID: LIB3189-048-P1-K1-E3
acgcttactatgaaaccaaataaattattgttcttgatcttgctccttataccctaaacattaaaacttttgactgggtaataaccaagttggtgcctggggacacttatatcccaaccaaaaattcacaagttttcaccacttatcaggaccagcatactaccctcttcattcaggtcttttaaggtgaaatgattctcacaaaagattttatattattactaaaatcaattcttattcgaatcactacaacctcaatactaattccttaaattctaaaaacatttaaaatt

SEQ ID NO: 43003 - DNA, 270 bp, Gossypium hirsutum
  Clone ID: LIB3189-048-P1-K1-E4
cttcttcccaactcttcacgccaaaaccccttcccctttaacttcgatttggacaaaacgaaacaaacgatgccgacggcgcgcctctggtggtacgggcatcgtgcgaagctaccagacgtgggtgagacgacgtgggcagtttctatgcgttcatgcgtgaagacgattgctgcaacgtgggggcgagggtgacgccgatccgctacttattgccaaaggtttctactgttcatttttttgtgttgtaggctagtgggttagggattg

SEQ ID NO: 43004 - DNA, 162 bp, Gossypium hirsutum
  Clone ID: LIB3189-048-P1-K1-E5
atagctttggagtgtgggatacttagttctgcacaagatgttactgagcccactatcattgaaggaacggtgtgttcgtgccttaactggggtagagggagaacaagtggccaggaaaataatggtaatggggagatcttctctaaatgacatgctttttct

SEQ ID NO: 43005 - DNA, 172 bp, Gossypium hirsutum
  Clone ID: LIB3189-048-P1-K1-E6
gcgaagaagaagaagaagcagaaccaaaccgggttttgttttggttctctcttccaatggcttccaccattgtcatgcgaaccttcgtttacgtggaaggggttaaataaatccctgaatacccatttcgtcccttccttcaaactccccagtttggtctctttcaagcccc

SEQ ID NO: 43006 - DNA, 433 bp, Gossypium hirsutum
  Clone ID: LIB3189-048-P1-K1-E8
atgaaacgaaagatattcttctccttgatgtggctccacttacccttggcattgagactgtgtggtggagtaatgaccaagttgattcctagaaacactgttatcccaaccaagaagtcacaagttttcaccacttatcaggaccagcagactaccgtctccattcaggtctttgaaggtgaaaggagtctcacaaaagattgtaggttattgggaaaatttgatcttactggaattcctccagccccaagaggaacccctcaaattgaagtcacatttgaagttgatgcaaatggcatcttaaacgtcaaggcagaagataagggcactggaaaatctgagaagatcactatcacaaacgataagggtcgtctgagccaggaagagattgagagaatggttcgtgaggcagaagaattcgcagaggatgaca

SEQ ID NO: 43007 - DNA, 115 bp, Gossypium hirsutum
  unsure (1)..(115): unsure at all n locations; Clone ID: LIB3189-048-P1-K1-E9
aggacgcgtgggatcattcaataattcccatcaacgttgtaaaaacggaagagaggattaggggtcggaatggccaggcccagagggagggganaaagcttgtgggaacttactg

SEQ ID NO: 43008 - DNA, 440 bp, Gossypium hirsutum
  Clone ID: LIB3189-048-P1-K1-F1
cacgccccttcttacttttatcattcaataattttcatcaacgaagaaaaatgagagagtgtatttcgattcacattggccaggccggaattcaggtcggaaatgcttgttgggaactttactgtctcgagcatggcattcagcctgatggacaaatgcctagtgacaagactgttggtggaggagacgatgctttcaacacctttttcagcgaaaccggtgccggaaaacacgtgcctcgagctatatttgttgatctggagcctactggtatcgatgaagtgaggactggaacataccggcaactgttccaccctgagcaactcatcagcggtaaagaagacgctgcaaacaattttgctcgtggccattatacaattggaaaagagattgttgacctctgcttggatcgtatccgaaagcttgctgataattgtact

SEQ ID NO: 43009 - DNA, 276 bp, Gossypium hirsutum
  unsure (1)..(276): unsure at all n locations; Clone ID: LIB3189-048-P1-K1-F10
cggacgcgtgggtggatttcttactaaactatttggattttggttctctacccaaatttagacaagcggccggaaaaaagtgtgagttgtgtcaattttcanacaaggaaacaaagcagaaaaatcgggtcagaaaaaaaaatgagaattaacttgaaatcatggtcactgaacaaggaccatcttgtgaagcttgcaattggcattctcttagtgggttttgctttgaagctcttggttttttcttctaaaggatttggtgcttatttggaattc

SEQ ID NO: 43010 - DNA, 253 bp, Gossypium hirsutum
  Clone ID: LIB3189-048-P1-K1-F2
cgtcggattccgggtcgaccacgcgtgccgaaaaatggatggttattgtagcagaagggtaatcatgtttttggtgtttgcatttgcagcaataagcagagggtgtggacaagaatcaaccgctctggttcctgcaatcatcacctttggtgactctgtggcatatgatggcaactattactcatctgctaccatcttgaaggttactatacttcttattggcgggaccatttcaacaaaaaaactacttgga

SEQ ID NO: 43011 - DNA, 325 bp, Gossypium hirsutum
  unsure (1)..(325): unsure at all n locations; Clone ID: LIB3189-048-P1-K1-F3
gcgcccacgcgtccgcggcaagcaaaaaatttaaaggttgatagtactttattttgataaaaataaaatgccgatttctcgaattgcagtcgggtctgcggccgaagccggccaagcagatgcactcaaggcggctttagccgagttcatttcagtccttatttttgttttcgccggtgaaggctcgggcatggctttcaacaagttgaccgacgatgactcgtcgacaccagcgggtttagtagctgcggcattggctcacgcctttggcgttgttgtggcggtttcngtcggagctaacatttccggcgggcacgtaaacccc

SEQ ID NO: 43012 - DNA, 420 bp, Gossypium hirsutum
  Clone ID: LIB3189-048-P1-K1-F4
gcgtagatactcacaaaacaagtctctgtagctttaacaagaaatggcgaaagaattcacggtgccgccggtggtctgcccctccggcagcggagtcaacccttccgttggaaacatcaaccaacgccgcgtacccactgctccattccaaccctcacgccctccttcctcctcttccgctttacccttcatgtctttcgatatgggttcggccacatcgtcgtcggtatccttaggcggttcaatctcctcctccgcagcaaccggatccgcttcattcgaagacgaagagccccttctcgatgaactcggtatccacccggatcaaatctggtacaaaaccagatccatcctcaaccctctgcgggggaactcgacggcccataaagactccgacttatcaggccctatctttctcta

SEQ ID NO: 43013 - DNA, 435 bp, Gossypium hirsutum
  unsure (1)..(435): unsure at all n locations; Clone ID: LIB3189-048-P1-K1-F5
gcgcccacgcgtccggcaatagtactactactccaagcaagcattttccttacaagtttgtttttcttgtgattaatcgatatggctagctcaatgtcccttaagcttgcatgtgtggcggcgttgtccatggngcgctgctccattccaaccctaacgccctccttcctgctggtacgctttacccttcatgtctctcgatatgggttccgccacatcggcgtcggcatccttaggcggttcaatctgctcctccgcagcaaccggatccgattcattcgaagacgaagagccccttctcgatgaactctgcatccacccggatcaaatctgcgcaataccagattcatcctcaaccctctccgggtgaactcgaccgcccataaagactccgacttatcaggccctatcttctcttcttatccctctgcttat

SEQ ID NO: 43014 - DNA, 253 bp, Gossypium hirsutum
  unsure (1)..(253): unsure at all n locations; Clone ID: LIB3189-048-P1-K1-F6
gcggagaatagaatttctaataaaggaccggattccctttccaagcttcagcaagccagatatggctcaaaatatggccaggagaagggttgttttggtgcanattttggcactagccttggccgctgttatgccattgctctcaggaggtgtggatattcaacaagttagggtgctggcagctaaattcaacgtgacttgcgtagtggtattcggagacttcagcgtggatccaggcaataacaactatatt

SEQ ID NO: 43015 - DNA, 413 bp, Gossypium hirsutum
  Clone ID: LIB3189-048-P1-K1-F7
cccacgcgtccgctttatgtccctaaactaaattctctaattctaaaacaaatgaaaatctctcaaagggcacaaattttgcagggtttttattttatttgaactctataatttaatttccccttattggattcaccattcccagtaccaaaccctaggtttcttcttttcttttctctgtaattttttccaagaagattcttcaatcatcttattttaagttttttttgtgccatccggacgcggttccggctggaaaatgagtcaaaagctgtggacaagggactatgctggtgtctactaggctattcttggttttgattggacgtagcatacacaagatcttgttgctgctttttagagctttacattaataggatgttgtcacttttgcaattttttttttttactat

SEQ ID NO: 43016 - DNA, 329 bp, Gossypium hirsutum
  unsure (1)..(329): unsure at all n locations; Clone ID: LIB3189-048-P1-K1-F8
aagcgaaaacaaataaaaaattgtatatggtcacaaatataggcgggggtcgcgtncatcaaaaatcaatcaattactttccttttatagactaatgcactttcacaattaatcttttggtttacatttacatctattatattaatattgcaaagattatatataaatcaataccttctacaatcaataatagccaacctaaattaatttcttacttaataatttttaaaagctttaaacaaattactattctattatttacaaatctattcatcattctaatatcaactaaattatcacattatctttttattatatttcaaaatttt

SEQ ID NO: 43017 - DNA, 63 bp, Gossypium hirsutum
  Clone ID: LIB3189-048-P1-K1-F9
cgcgaacacacaacctaataagataaaaaggtttgaagttttacccagaggaggatacctaaa

SEQ ID NO: 43018 - DNA, 348 bp, Gossypium hirsutum
  Clone ID: LIB3189-048-P1-K1-G10
gacgcaagaaaaaaataaaaagggaaatcccctttctctgctagggttccaggcttagcatgggaacgccgccgccgtccctggttcccacgttctccgatcgtgccgccgtaatagttgacgggcagagacgaaagacgggcttttaatcccgcttttaagtgtggtgaatgacaccagtgagggggagcctaaagagaaaaaggagaagtctaacgccctttagcccaaccccgacgacgacgaaaggatctgcgtcgacggagccacgcggagggttcaggcgtgaaacgcagggacgaccgcgggatggctagacttgggcggatgaggattacaaataaaaat

SEQ ID NO: 43019 - DNA, 408 bp, Gossypium hirsutum
  Clone ID: LIB3189-048-P1-K1-G11
cccacgcgtccgcccacgcgtccgctgatttgagcagtagcagctaaagcagatcccaaaatgaaggtgaatatcgcaaatccgactactggttgccagaagaagctcgagatcgatgacgaccagaagcttcgggcatttttcgacaagcggatctcgcaggagggtgctggagatgctttaggcgaggaattcaagggctatgttttcaagatcatgggagggtgcgacaagcaaggattcccgatgaagcagggtgttctgactcctggtcgtgttcggctcttgcttcatagaggtaccccatgctttccgggatatggaagacgtaatggtgagcgtaaaaagaaagtctgttcgtggatgcattgttaagccaagacctttcctggtttgaaactgggttat

SEQ ID NO: 43020 - DNA, 432 bp, Gossypium hirsutum
  Clone ID: LIB3189-048-P1-K1-G12
cggacgcgtggggtttttgattccttcatctttatcttcgatcaatcaaccatgactggcggagccaagccaaagaagcacacggccaaggaaataacggcgaagatcgacgccgccacaaccaatagaggcggcggcaaggccggatttgctgaccgttcgggtgtggagaaaggtggacatgctaagtacgagtgtactcattgcaaaataacagcttcagatttgaagtcgatgcagattcatcatgatgccaagcaccccaaggttccctttgaagagtcaaagcttgtgaatctacatgctgttcatgtggttgagacttccaagccttgtcctggtgttaggggcaaccttaaaaaagtgataaaaaaacccaaaaaatgtggttttcgtcaagctttggtgttttgtgatgttttcaaaaatggg

SEQ ID NO: 43021 - DNA, 276 bp, Gossypium hirsutum
  unsure (1)..(276): unsure at all n locations; Clone ID: LIB3189-048-P1-K1-G2
gcgcccactcnaactatataaaacacttatacacaccatctttcccttttttactccagcaaaataacacgtaaactggtaaatatataaaacctgcctgggaataaaacatactaacctttttcactttttaaaacatctttacatctactaccattcttttaaaatatatattactacctattcaattttccctttcacttacccaaaaatattctttttctacaatcttattcaaaccttaccacttcttaacttttataatctaaatatact

SEQ ID NO: 43022 - DNA, 485 bp, Gossypium hirsutum
  Clone ID: LIB3189-048-P1-K1-G3
agtagttctaacaaaataaggtatcaggataaaatattagaatcatcaaaaaaattttggcaaatagtaaaaagaagaaatattcgattaatccggaaattctatttttttataaattttttcattgaaaagatatacatggatattcttctatatatcattaatattccaagaaccaatacccaactttttcttgaatcaacaaaaaaaatgattgagaacttcattcacaataatgaagcaaatcaagaaagaattaataaaacaactaaaaatacaactcattttatttcaactataaaaacctcactttcttcactttctaatattagtattagaaataaaaatgaaaaagctttttgtgacttatcctccctctcacaagcatatgtattttacaaattatcacaaacccaagttattagtttttataaattcaaacctatccttcaatatcatggaacatctctttttcttaaaaatga

SEQ ID NO: 43023 - DNA, 304 bp, Gossypium hirsutum
  Clone ID: LIB3189-048-P1-K1-G4
cccacgcgtccggatcagttccataagaaagaaagaaagaaatcaaatatgagttccatttccaagaggtgccttctccttgcccttttagctgctgctgttcttctcatttcatcggaagtgacagctcgagaccttgctgaaaccaccactgaaaagaacaatggtgaggtggctactgaaacaaccgaggctgaggctgaggtagaagagtccaaatatggatatggtggatacgggagccgtcgaggttatggaggatacggaaggcgcggtgggtacggaggatacggaaggcgtggtg

SEQ ID NO: 43024 - DNA, 249 bp, Gossypium hirsutum
  unsure (1)..(249): unsure at all n locations; Clone ID: LIB3189-048-P1-K1-G5
cccggtcgaccccgcgtccgcccacgcgtccggttcagttccacttgaaagaaagaataaaatttaatatgaatcccaaatccaattgtgttcctgctccattcccttttagctgctggtgttcttctcatttcatcnnaagtgacagctcgagaccttgcttaaaccaccacttaaaataacaatggtgaggtggctactgaaacatacctaggctgaggctgagatataaaaattcaaatatttata

SEQ ID NO: 43025 - DNA, 256 bp, Gossypium hirsutum
  unsure (1)..(256): unsure at all n locations; Clone ID: LIB3189-048-P1-K1-G6
ggcgcccacgcgtccgggaaaaaaaaatgaagctcttgtttctaactttgctgctttgttctcttcttctatgttcttgagtttttgaaccaacagtgggtgaacctcnttcacctttttgtgaagggaaatgcaaagggaggtgcaataaagcggcggtttgggatcgatgcttcaaatattgcggcatatgttgcgaggagtgtaaatgtgttccttccggtacttatgggaacaaacaccagtgtgcttgcta

SEQ ID NO: 43026 - DNA, 221 bp, Gossypium hirsutum
  Clone ID: LIB3189-048-P1-K1-G7
cgtggagagccttttttgtgtagcgattctcagttagtcttttctttaagcttacagcttctctccagagttttataatgggtaaggagaaggttcacatcaaccttgttgtcattggccatgtcgactctggcaagtcgaccactaccggtcattcgatctacaagcttggtggtacctacatgcttgtgactccgaggttaaataaggagtcttgctta

SEQ ID NO: 43027 - DNA, 458 bp, Gossypium hirsutum
  Clone ID: LIB3189-048-P1-K1-G8
catcattaaagaagtcaaacaactctggaccactgaatagacatggagatcctgtaaagaaatcatcgggtccacaatccggtggagtgagggcgagtggacctcaaaattctggtcctattcctcctgttctccctgcaacaggccttattacgtctggaccaatctcttcaggcccattgaattcctctggggttcctcggaaagtatctggtcccctggaatctttgggatcaatgaaagtacaagggtctgccgttcataatcaggctgtcaatgttcttagccaagatgatgacttttctttcaggaggaacttcccgaaaccaatattttgggcactgatactgcttttcgtaatgggtttcattgctggtgggtttatttttgcggcaggtcacaacgtcattctccttcttggtggtgggggtcttttcagtgctggcactgcattatat

SEQ ID NO: 43028 - DNA, 308 bp, Gossypium hirsutum
  Clone ID: LIB3189-048-P1-K1-H10
ctcacaccattttcatcttggttgtatttatgaatggttggaaaggagtgaaagttgtccgatatgtggcaaggagatggagtgctgtgagaacccctaaagtctggttgcatcttgattcaatgcaatggaacaaatacatatagaaccgcaagtattatcaggatgtataagctttctgatctttattgaagaggcacatcgtgtatataagagtttgttctttatccatcactagtagtactaccttggaatttttttctactcggactcgaatgatcatgacgttacctttgatgtaaaaagct

SEQ ID NO: 43029 - DNA, 157 bp, Gossypium hirsutum
  unsure (1)..(157): unsure at all n locations; Clone ID: LIB3189-048-P1-K1-H11
antgttataattataattattatttataaaattttaaaaatatatataaaaggattggccanttnaaactnttaaaatatactagttttaatttaaaggccaaaaacgaaaattaaacgaaaataatcataattgtcaactcaatccatcttttttc

SEQ ID NO: 43030 - DNA, 384 bp, Gossypium hirsutum
  unsure (1)..(384): unsure at all n locations; Clone ID: LIB3189-048-P1-K1-H4
ggctgatgctacttggtgatgaagctctgtactagataaaagggcatttccttgactgtctctggcgagaattgccactgccgattggcgaacattctcatcaaaggctacgtcaaagttaatctttacaaactgaccagattgcccaaagagcacaacaaaataccctacgcatattgggactattctattcgaaaacccaggacactcacgaaagatgtgatttgtggtttctgctgctctaccacacccagaacatgttgtttgacttaagagtcttctgtagtgcagattcacccacgttggaatataattctaggctatttgccaaattgtaatnttatcttcgaaggtagatttaggagccagatatttntgtaaaaa

SEQ ID NO: 43031 - DNA, 442 bp, Gossypium hirsutum
  unsure (1)..(442): unsure at all n locations; Clone ID: LIB3189-048-P1-K1-H5
ccgaaaaaaaaaangggaggccgcacgccgtaaactacancaaaatgaatctttgttctatttattaatgtctattaccttgactgtctactaacgacaattgggtactaatctattgagggacattgggcatcnaaaagctacttacaaaattatatctttacaatactgactcagattgncccataagagcaccaacataaatactcctacggcatatatggtatctattcttattcgaaaaccccaggacacttcactgaaagaatgtgattttgtggttttctgcttgctctaccacancccagaacatgtttgtttgacttaatgagtcttctgtagtgcaaattcacccacgttggaatataattctaggctatttgccaaattgtaattttatcttcaaaggtagatttaggaaccagatatttttgtaaaaatt

SEQ ID NO: 43032 - DNA, 168 bp, Gossypium hirsutum
  Clone ID: LIB3189-048-P1-K1-H6
ccagctggtcacgggtgacgttctcgaacaagggatttggtcgccaaaccctttaaaaagaaagggtacattcccttggctacttaccttaagacctacaagatcggcgactacgtcgaacgtaaggtaaaccgggccggtcacaaagggatgccccacaagatctac

SEQ ID NO: 43033 - DNA, 274 bp, Gossypium hirsutum
  Clone ID: LIB3189-049-P1-K1-A1
caacaatttatcttctttattctggttgctcagccattcatgtttatttctctaactcattcctctttagctaatggtaaggttaatatattgcctcctaccaatacaagtgataaggtcactttggccctgtactatgaaactttatgcccatattgtgccgactttatcacaaatgaccttgtaaaggtattcctcagcgatctgtttaccatcgtcaatctaaaggtagtcccttggggcaatgcttacatttttggcgatgaaccccatt

SEQ ID NO: 43034 - DNA, 462 bp, Gossypium hirsutum
  Clone ID: LIB3189-049-P1-K1-A2
cggacgcgtgggtgacaatggactatcacagaggggctcggagttgaggttaggatagccagaattttcaatacttacggacctcgtatgtgcatcgatgatggtcgtgttgttagcaactttgttgctcaggctttaaggaaggagcctttgactgtgtatggtgatgggaagcagacaaggagtttccaatatgtttctgatctggtggagggtctcatgcgtttaatggaaggagaacatgttggaccttttaatcttggaaacccgggcgaattcaccatgcttgagcttgctgaggtggtacaagaaacaatagacccgaatgcgaagatagaggtcaggccaaacacagaagatgaccccgacaagaggaagcctgatatctcaagagccaaagagttacttggttggcaacccaaggtcttcctcccaaagggtctccctctaatggtttcagac

SEQ ID NO: 43035 - DNA, 246 bp, Gossypium hirsutum
  Clone ID: LIB3189-049-P1-K1-A3
accgaatcgcagtttcgacccacgcgtacgaacgtttccagatccacaatggcttctacattcagcggcgatgaaacggctccgttcttcggctttctcggcgccgccgccgctcttgtcttctcttgtatgggagctgcatatgggaccgctaagagcggtgtcggtgtggcatctatgggtgtgatgaggccagaattggtgatgaaattgattgtacccgttgttatggctggtgtcttgggt

SEQ ID NO: 43036 - DNA, 489 bp, Gossypium hirsutum
  Clone ID: LIB3189-049-P1-K1-A7
gatcccggtcgaccacgcgtccgcggacgcgtgggtgacaatggactatcacagaggggtcgggtttgaggttaccgactcagtcacttgctcggtcggttacttacctcgtgctttcaacggtgttattcggaaatcctagccgacgatgtcgcttcgagtgttgaaccctaatgccgaagttctcaacaaatcggcggcactgcacatgaacatcaacgccgccaaaggtttacaagatgttctcaaaacaaatctgggacctaaaggcactatcaaaatgcttgttggtggcgccggtgatattaagctcactaaagatggaaacactctcttgaaagaaatgcaaattcaaaatccgacggctattatgatagcaaggacagctgttgcacaagatgacattagcggtgacggaactacatctactgtactcttcattggcgagctaatgaagcaatctgagcgctacattgacgaaggtatgca

SEQ ID NO: 43037 - DNA, 461 bp, Gossypium hirsutum
  Clone ID: LIB3189-049-P1-K1-A8
atgagaaggcaataatttcagtgttgggtcacagatatgcagttcaaaggaagcaaatcaggcttgcttatgaagacctttaccaggaagatctcatcaagcgtcttgaatcagagctttctggtgatttcgagaaagcagtgtatcgttggatattggatccagcagaccgagatgccgtgttagctaatgttgccataaagaaattaagccctgatcaccatgtgatcgttgaaatttcatgcaccagatcccctgaagagctcttggctgtgaggagagcttatcaggctcgatacaagcattccctggaagaagatgtggctgctcataccaagggagacactcgaaagctcttggttgccttagtgagtgcatttagataccgatgggaagaaataaatacgagagtagcaaattctgaagccaaaattctccatgaagctgtcaaagacatggaa

SEQ ID NO: 43038 - DNA, 118 bp, Gossypium hirsutum
  Clone ID: LIB3189-049-P1-K1-A9
accagatcggtgccaagttttgggaggtggtttgtttcgagcacggcataaagtcaacggggcgtgtgcaagttgacaatgatatgcaacagtaacgcggcaacgttgactacaagga

SEQ ID NO: 43039 - DNA, 251 bp, Gossypium hirsutum
  Clone ID: LIB3189-049-P1-K1-B7
cacgaaccgtaaattactgaataatatttggatagaacacgtatttatgtcggggcatattgctgaacgggcacgggtatacatcataaaaatgatcaatgaatgaacagaacattgctagggactgataaaaccaatcatagagctcatgcaccatccttggtcaacgggggatgccaagcatcctacttctaacagtccagtaattttacttagatcgagccttcttcatctccgacggcttttccacc

SEQ ID NO: 43040 - DNA, 276 bp, Gossypium hirsutum
  unsure (1)..(276): unsure at all n locations; Clone ID: LIB3189-049-P1-K1-B9
cccacgcgtccggcaaaagatctcctgaatctggccctcttgcatctgatggcataagttttcctgtgacttctgctggatctagtcctttacaagccatcaattaaggatcgagcctcgagactttttcggaccgtgggtctaatagataatgtaagagctcattgcagacatttgtttttgttggtaatcaaatgaactcgattattttgatgtcaaattttaggtcgagttatatacatacatatatatatatattggggtcatatgtntttg

SEQ ID NO: 43041 - DNA, 256 bp, Gossypium hirsutum
  Clone ID: LIB3189-049-P1-K1-C1
gtaaaagcaggaaagcagaactagaacgagatggtttgattttcttcccaaacagaatcttgggttgccagcagaaactcaatctacgaatcccagaaagaggcagatagcttcgaattggatctaaaacgtctagatctgataaagatagatcaagaagacgagaataataatattaacagccaagataagattagcaccaccaagaagaacaagaagaaaaatcaggtgttgctggaggggtacgtggaggcgg

SEQ ID NO: 43042 - DNA, 436 bp, Gossypium hirsutum
  Clone ID: LIB3189-049-P1-K1-C7
ccgcaccaaaaaagaaacgcgcatttacgttgagagtagttcagcgaaaatggcaggcgaagcagcagcggcggcgaatttctggggtgatacgccggaggaagactattacaggtcgcagggtgtacgcaacaccaagtcttacttcgacactcccaacggaacgctcttcacccagagcttcttacccttggataaaaaagtgaaggcctccgtctacatgacccacggctatggatccgacactggttggctcttccagaagatctgcatcaacttttccaattggggttacgctgttttcgccgctgatcttctcggccatggcagatccgagggtctccgctgctacttaggtgacatggagaaagttgctgcaacatccttatcattcttcaagcacgtccggaacagcgatgaatacaaagacttacct

SEQ ID NO: 43043 - DNA, 286 bp, Gossypium hirsutum
  Clone ID: LIB3189-049-P1-K1-C8
ggaattcttattccttttatatttttcctcttcaattttccgtcactttcccgagaaaatgagagaaatccttcacatccaaggtggccaatgcggcaatcagataggagccaagttctgggaagtcgtatgtgccgaacatggcatcgattcaacgggtcgatatggtggtgactcggagctccagcttgagcgaatcaatgtttactacaacgaagccagctgtggccgttttgttccccgctcagttttaatggatctggaacccgtaaccattggttagcgt

SEQ ID NO: 43044 - DNA, 178 bp, Gossypium hirsutum
  Clone ID: LIB3189-049-P1-K1-C9
ccacccacgcgtccgaaaaaacaaaaaaaaaaaattccccaaaattttaatattaccaacacaaaaaaaaaaaaaattatgaaagtttcaaaaaaaacaaagaccccccccccacaacacaccaaaaaacccaaaacacaaacaaacccaaaaacaacgaaacatcacacacactcaa

SEQ ID NO: 43045 - DNA, 450 bp, Gossypium hirsutum
  unsure (1)..(450): unsure at all n locations; Clone ID: LIB3189-049-P1-K1-D1
acaccattttgactaacctcaaaccagttgagaaatgttggcaacccgccgactttcttccagatcctaattctgatggatttcatgagcaagtcaaagagcttagggaaagggcaaaggagatcccagatgattactttgtagttttggttggtgatatgatcaccgaggaagccctttcaacttatcaaacaatgcttaataccttggatggaactcgtgatgagacaggtgctagccttaccccttgggccatttggaccagggcttggactgctgaagaaaacaggcatggggatctgcttaataagtatctctacttgtcctggagagtggacatgaggcanattgagaggacaatccagtacttgattggatcgggaatgatcctcatacagaagatagtccttaccgaggattcatatatacctcgttccaagaaagggcaac

SEQ ID NO: 43046 - DNA, 253 bp, Gossypium hirsutum
  Clone ID: LIB3189-049-P1-K1-D2
cccacgcgtccggtgaaatccctcctgagttgggacaggcttgtggagctctcgaggagcttgatctgtcatctaacaaactcacaggtggatcgccttcaggtcctacataatgctgctgtttgctactgttgaacctaggaaacaatctactttcaggagatttcctcagtgcaggtggcagcagattacgcaactggagaggcatctatggaccactccactgttgtaccagctgtgaccacgttgcctt

SEQ ID NO: 43047 - DNA, 293 bp, Gossypium hirsutum
  unsure (1)..(293): unsure at all n locations; Clone ID: LIB3189-049-P1-K1-D3
aatctaaanctcatgtatatgattagaaggtgctatatatacaaaataataataataataataacgccataatatgattagaaaacaggcaaactatccatggctttttttttttcaattcacaaatagaaagcaggaaaggattgtgctacatgcatataacattatcatctagggtcgtaccatactgcaaatcattttacatcttacccattcatattccaacaccaaatagaatacctgaaatctgcaattactttctaacaccaaaataatacattgtctcctttaaa

SEQ ID NO: 43048 - DNA, 208 bp, Gossypium hirsutum
  Clone ID: LIB3189-049-P1-K1-D7
gctagggttcccacattcagccccccaccgtctcctcgtatttttcccaaccgcacgacgccgccgattgaaaggtacaaggcgaggcgaggaaggcgcgcaactcgcgcggagagggaccctgtccccgagtcgtgcggcgactggactgctggaggcggcggccaagaattttctgtttagtgtttcggtagttagggtgtttgga

SEQ ID NO: 43049 - DNA, 453 bp, Gossypium hirsutum
  Clone ID: LIB3189-049-P1-K1-D8
cccacgcgtccgcacaaattatacatgctagtatttctggtgatatagttcttgcagcagcttatgctcatgaacttccccgctatggacttgaagtgggccttaccaattatgctgcagcttattgtgttggactcctcttggctcgccgaacactgaagcaactggagatggatgctgagtatgagggaaatgttgaggcaactggggaggacttcactgttgaaccagcagagaccaggaggcctttccgtgcgctccttgatgttggtcttatcagaactactactggtaaccgtgtttttggtgttctcaagggtgctctggatgggggaattgatattcctcacggtgacaagaggtttgctggatttaacaaggacagtaagcaacttgatcctgaagttcaccgtaaattcatttacggtggccatgttgctgcatacatgagga

SEQ ID NO: 43050 - DNA, 177 bp, Gossypium hirsutum
  unsure (1)..(177): unsure at all n locations; Clone ID: LIB3189-049-P1-K1-D9
gcagcaattctagagctaatacgcgcaacatttccttttttttggaagggaagcacnaattggatgaattttttaaaaaagcttttccccccccactcaccactcatgatcactcgacagatcgcacggtctttctgccggttacgcattattcatatttactatcctatactactt

SEQ ID NO: 43051 - DNA, 93 bp, Gossypium hirsutum
  unsure (1)..(93): unsure at all n locations; Clone ID: LIB3189-049-P1-K1-E1
atcttttttagttccgacaaaagaaaacgaaaaaattgatgtagaaatacaatcgttttctttttgaagtcgggttttagtttttggggngaa

SEQ ID NO: 43052 - DNA, 360 bp, Gossypium hirsutum
  Clone ID: LIB3189-049-P1-K1-E2
tgaaagaaagaaaaatggttctgctagagaaacttgggatgatgtagtggccggtcctcaaccggaacgtggccttggccggctgaggaagatcaccaccaccccacccttgtccaccaaagatgaggcttcatcaatggcgatgccgacgagtccgacgacacctgggacaccatcgacgccggtgtcggctcgtagggacaacgtgtggaggagcgtgttcaatccaggtagcaaccttgcaaccaaaggtattggcgctgaagttttcgacaagcctcaacctaactctcctactgtttatgactggctttacagcggggagacccggagcaagcatcaccgttgatttaggcggtg

SEQ ID NO: 43053 - DNA, 414 bp, Gossypium hirsutum
  Clone ID: LIB3189-049-P1-K1-E7
cggacgcgtgggatttttcctctccaatttttcgtactttcccgagaaaatgagagaaatccttgacatccaaggtggccaatgcggcaatcagataggagccaagttctgggaagtcgtatgtgccgaacatggcatcgattcaacgggtcgatatggtggtgactcggagctccagcttgagcgaatcaatgtttactacaacgaagccagttgtggccgttttgttccccgcgcagttttaatggatctggaacccggaaccatggatagcgtaagatccggtccttacggacaaattttccgacccgataactacgttttcggacagtccggtgcgggaaacaattgggctaagggacattacactgaatgagcggggcttatcgattccgttctcgacgtggtttgaaa

SEQ ID NO: 43054 - DNA, 59 bp, Gossypium hirsutum
  Clone ID: LIB3189-049-P1-K1-E8
cccacgcgtgcgaagcatccaggccaacgttttgcttcttttccgaaaaaaagagaaaa

SEQ ID NO: 43055 - DNA, 114 bp, Gossypium hirsutum
  Clone ID: LIB3189-049-P1-K1-G1
gcgtccgccacgcgtccgctcgggcgaaattgaaataccaccacttttaacgttattttacttattccgtgaatcggaggcggtgcacggcccctctttttggacccaaggccg

SEQ ID NO: 43056 - DNA, 208 bp, Gossypium hirsutum
  unsure (1)..(208): unsure at all n locations; Clone ID: LIB3189-049-P1-K1-G2
attcagaaagaaataaaggaagaagaagcaatggccactccnacagtgcccacgacagttccttcggtgtctgaagattgtgaacagctaagaaaagccttttcaggatggggaactaatgagggcttaatcatagatatattgggtcacagaaatgccgagcaactaaacttgattcgaaaaacctaccctgaaacctatgcgagag

SEQ ID NO: 43057 - DNA, 185 bp, Gossypium hirsutum
  Clone ID: LIB3189-049-P1-K1-G7
ccgtccgattccggtcgacccaccgtcgaatttaaaggaaacctaagagaggattccatatttcacggcacgacactgttgggtttatttgtgtataaacccacacaagagtcagaacaatcttaccctttgttttctaatgtatgaaacctttattttcacaacattctctattcgctcgatta

SEQ ID NO: 43058 - DNA, 139 bp, Gossypium hirsutum
  Clone ID: LIB3189-049-P1-K1-G8
gggttcacccacgcgtccgtcaaaatgtgtctttgacctaattcaaccccctccctcgttttattcaacgaacaccccacttttgtacggtttcttaaatgatccaaccaaccacaccaccacagcagccatgtttaaa

SEQ ID NO: 43059 - DNA, 230 bp, Gossypium hirsutum
  Clone ID: LIB3189-050-P1-K1-A1
agaaaatattacaagggactttcaatctcatacaattcactcagatggaacctccacttcatctatgagttcaccaagcaatagcccaaacccttcggcaagtcaaaagaaaggagattgcatcagttaccatactggttgcttgcagtttggtaattgcgggagtggaggattgaactgtatttaccccagcgacttaattccattcacacgaagaccactttttataa

SEQ ID NO: 43060 - DNA, 426 bp, Gossypium hirsutum
  Clone ID: LIB3189-050-P1-K1-A10
gtttaccagccaaaagaaaaagcctctgtaaaacaaacagagctactaatgcatagttaaacgcaagtagctttactgtcggaaaatttgatgaattttttgtttgtaagaacaattacatgaggattcaaaaactgggtcttaacctaaatggaacaatctttaccaaaacaaccccaaggggtcatcatcgccattgacgttgttgatgaagggaccagagcaacaagaaggaaacctgacaggtaacgaggaacaagaagatagcaaccgtcacggttcttcttcttctctggaactggatcttgagtctggggtagtgtctgaaaccaagtcacatttagcaaaagaactggaaagagattgcaggatttgtcatctcactttggacccgaccaaccatgaatctggtgttcctattaagta

SEQ ID NO: 43061 - DNA, 442 bp, Gossypium hirsutum
  Clone ID: LIB3189-050-P1-K1-A11
gaaattttcattttcttcttcctacattgctttctgttctctgctgccttctcttcttctcgacttctggagatttctcacatatctcttggcttctgattagaggatcaaaatcatgttgtttttttcgtatttcaaggacttagtgggaagagaagtgacagtggagctgaagaatgatttagcaattagaggaactcttcactccgttgatcaatatctcaacatcaagctcgagaatactagggttgtcgatcaagacaagtaccctcacatgctttcagtgaggaactgtttcatcaggggttcggttgtgaggtacgttcagctacctcccgaggaagtcgacattgaattgcttcatgatgccacaagaagagaagctcggtgaggctgaaatactttttaatgaacatctgatttgagatacttatagtttctg

SEQ ID NO: 43062 - DNA, 448 bp, Gossypium hirsutum
  Clone ID: LIB3189-050-P1-K1-A3
accggaccggcagttccgagcgcacgcgtccgctttcctctcctctcctctcctctacaaggaaatggcaatttcatcaacagcggcagccactgccgcttgttctaagcttagataccgacacgcctcccctttcccaactcactcctcaaccaccacctctgcctttttctcctcaattccctctaaactaacccctacccacctctcctcttccttcctccctcctttcctcactaccgtcgccaccacttccgtattccctcgccgtcgcggttctttcaccgtcaaagctgcccgtggcaaattcgaacgcaaaaagccccacgtcaacatcggcaccatcggccatgtcgaccacggcaaaaccaccttaactgccgctctaactatggccttagcctccatgggtaacagggccccaaaaaggtccgacgaaatttgatgc

SEQ ID NO: 43063 - DNA, 448 bp, Gossypium hirsutum
  Clone ID: LIB3189-050-P1-K1-A4
caaagctcggctgctaacccctgtgctcaaagctatgccttacgtgaaagctcaaaagtcaaaggcgtacttcaaaagatatcaagttaagttcaagagaagacgagagggcaagactgactaccgggctaggaaccgtcttatcaatcaggataagaacaagtacaataccccaaaatatcgtttggttgcaagatttaccaataaggatatagttgcacaaattatacatgctagtatttctggtgatatagttcttgcagcagcttatgctcatgaacttccccgctatggacttggaggtgggccttaccaattatgctgcagcttattgtgttggactcctcttggctcgccgaacactgaaagcactggagatggatgctgagtatgagggacatgttgaggcaactggagaggacttcacttgttgaccagcagagacaag

SEQ ID NO: 43064 - DNA, 454 bp, Gossypium hirsutum
  Clone ID: LIB3189-050-P1-K1-A5
aagctctatcattcaaccacttagcagccaacgcgaaaacaaagaaatttcaaaagcacgaataaaaaaatcccaataagtcaaataaaaaaggaaatctgggaggtttttattgaagagcctgttgtattttttttttatacgttatcaaacaaactcattgaactcatagccctctcaacttccctttttttatattcttctttttgttctttgcttttctcgctcaaatctcaaaagggtccttttctttatttctctccaagtttcttaaatctattcttctttggattctcactgttgggtttctttctttgatcgttacagtatagaatttgaatgctgcttatgcattcaaattccggagctatcaatttctgagtttgatgggttcaagatgagatacgacatgacatgatccgcctgtttcatacgatgacccttttccgtatgg

SEQ ID NO: 43065 - DNA, 355 bp, Gossypium hirsutum
  Clone ID: LIB3189-050-P1-K1-A7
tatttccccctcatggccgccgctgatgtcgagttccggtgcttcgtcggagggctcgcatgggccaccgacgaccgggccctcgaagaagccttcagtgcgtttggtgaaatcgtcgaatcgaagatcattaatgatcgtgagactggaagatcccgaggctttggattcgttactttccgtgacgagaaagctatgagggacgcgatcgaaggaatgaacggtcaaaatcttgatggaaggaacatcaccgtcaacgaagcccaatcgcgcagaagtggaggcggtggcggaggatttggaggaggaaacggtggttacagccgcggtggaggcggcggcggatatggtggtc

SEQ ID NO: 43066 - DNA, 184 bp, Gossypium hirsutum
  Clone ID: LIB3189-050-P1-K1-A8
gaaaaaatgaagctagggacgttgttcaaagtagggtcgtttgtgggtgtaattgctataggcagagcactatggaggtgcatgggggtgtcgaccaatacgccgctcttcgctatttccaccaatggtcggatcgattggggatttgggccatccctctttacgtagtcgtccacaccctcac

SEQ ID NO: 43067 - DNA, 419 bp, Gossypium hirsutum
  Clone ID: LIB3189-050-P1-K1-A9
gtcctttcttttactctttgcccctcaaatccttcctctcgggaaacaccggcaagttccgatctctgcccaggatgaactcgacgatctccatctcttccgtgaagctatcacggcggcatcatctcgtggtggctcttccaaggtttcccatctgggtactattaaccccaagcccaaaatcgctttccttttcctcacgaactcggatctcgtgttcgcccctttatgggaacgtttctttgaatcgaacgatggtctcttcaatgtctacatccatgccgatccatctaccaagctaaaccccctacagtggtcaataaaagccaacttcatcgctttcagaagaacagcacgcgcctccccgacgctaatcttcgccgcccggagactcctcgctaacgccatcatcgacgatc

SEQ ID NO: 43068 - DNA, 230 bp, Gossypium hirsutum
  Clone ID: LIB3189-050-P1-K1-B3
tggaggataggtacagagcatgaaaagtttggttttgagataaaaactctgcggcctatgaaatagtgaacaaatagcagaattgcttaatggtatttcagagagatttgattgggagaaagtaatgggaggtgataaaattataggacttaaacaggggaagcaaagtatttgccggagctccaggaggggaaccagatgtcggagaggcaaatgaagcggagcctgct

SEQ ID NO: 43069 - DNA, 372 bp, Gossypium hirsutum
  Clone ID: LIB3189-050-P1-K1-B7
cttcaacaatttatcttctttattctggttgctcagccattcatgtttatttctctaactgattgctctttagctaatggtaaggttaatatattgcctcctaccaatacaagtgataaggtcactttggccctgtactatgaaactttatgcccatattgtgccgactttatcacaaatgaccttgtaaaggtattcctcagcgatctgtttaccattgtcaatctaaagttagtcccttggggcaatgctgacattcttggcgatgaaccccattgccagcatggagaagatgaatgctacttaaataccatacatagctgggttatctaccactggcctgatgtgaaaaagcactttgatttcattcgc

SEQ ID NO: 43070 - DNA, 308 bp, Gossypium hirsutum
  Clone ID: LIB3189-050-P1-K1-B8
gtctccttcaccttgactgcaccgtattctcacattgtcaccagctctaaccctctccccgtgttgccctccatagctcaactactgattggatattttgaatcttttaaaaggaaaaaacgggaacccagtatgtgttcatggactgcagctgaatcagacatggtagtgaagaaccggttggtagggttcctactatggcaatcgatcctaagtagcttgattttcttggccttcactataacgatcgtcttctggcgctccgccactgcaatcttcgtctcctttttcagctttcatctgtccca

SEQ ID NO: 43071 - DNA, 448 bp, Gossypium hirsutum
  Clone ID: LIB3189-050-P1-K1-B9
aaccctttcactgctttccttcaattatttcccacttccttttgccttcaaaatttccttgggatgcctatggctaccgctgaggttgcatcagttcaaactgcacttcatgaggagaaaactgaagaatcagtgaaggatcaagaagctacaacagatgaagtagttgccgaagctccagcagcggaaccagttgccgaagagccaaaggaagcggagcctgcggcggtggtagtcgaggaacctgaagcctcagttgaagttgaaaccaaggaggtggtagaagaaccaaaggctgttactgaggagccagtagtagaggaggctcctaaggaaacaatgccagaaccagttgccgaggagatcaaggaaaccactggacaaaaccggtgaaaccaaagaaactacagagtctagtgagggagcagcagaagcacccaaagaggaa

SEQ ID NO: 43072 - DNA, 444 bp, Gossypium hirsutum
  Clone ID: LIB3189-050-P1-K1-C1
gggaattctcttgcctccttactatcttactccttttctcctccttttcatctttttcaacaatggcgaccagcgaaacctcgttttcgccgacgatgccctgattgaaacccaatgtcacaatgctgaagtccccgaaacctgcataaaatgcataaaatccgatcctcgaagtcaatctgccgataaagtaggcattgcagccatcatcataacttctctaagcaacaaagccacgaccttgataaacaacatgacgactcttgcttcgggcgctcgcgacaagtacttgaaattggctcttcgaggttgcgggaaagggttttactatgcaaaaaccaatctgactgttgcgacgaaccgattgaaggggaaagaatttgatcaaacgaatcttctggtgaaacaagcgctcgagggagaagttgtttgtaagatgaatgt

SEQ ID NO: 43073 - DNA, 401 bp, Gossypium hirsutum
  Clone ID: LIB3189-050-P1-K1-C2
cccacgcgtccgcccacgcgtccgcggacgcgtgggtttccttacaagtttgtttttcttgtgatgtgatccatatggctagctcaatgtcccttaagcttgcatgtctgttggtgttgtgcatggtgatgggtgcacccctggctcaaggggccataacccgtgctgatggcttagtcggcctcccacgctgccttcctttttgtcagggaatggtgatggtgctgatgccacaggttgctgtgccatcgtcatgaatgccttgggatcgctctgtggtgatacataggaaccgatctagcttgaaatcgggttcggatttgggtggaatttcaaattggtgtgttatggaatcccaacttaatcgtgttaaagggtgggatccaatcgtgtgatacatt

SEQ ID NO: 43074 - DNA, 419 bp, Gossypium hirsutum
  Clone ID: LIB3189-050-P1-K1-C7
atttgttctctcgattcaaacactagggtttgatcgataattttatttataatttcctttacttcaattgcaattattcagatattcaaaatccaagctattttctttcatttaatctgaaattgattggattttccttttaattttgtttaatttaatctaagaaagaagggggaaaaatgccggcagtttacggatccagattgacgactttcgaggattcagaaaaagagagcgaatacggttatgttcgtaaggtgtctggaccagtcgtcgttgctgatggaatggctggtgctgccatgtatgaattagtccgtgttggacatgataatctaattggtgaaattattcggttggaaggagactctgcttcaatccaagtttatgaagaaacaactggcctgatggttaatgat

SEQ ID NO: 43075 - DNA, 448 bp, Gossypium hirsutum
  Clone ID: LIB3189-050-P1-K1-C8
atctttcccagcaagcacctttcttcttaactataaatttcaaatctctcctcccttaatcatggcgtactatttaccaccttgccactctcatgctcttctgctttatccaactcagcttctccgagttggttcaagagcaacccttggttttaaagtaccacaacggtccactcttgaaaggcaagatcaccgttaatcttatctggtatggcaagtttacacccatccaacgctccataatcgttgatttcatcaactctttgaattccgataaggccacaatggttccttccacgtcgtcgtggtggaaaattactaaaaagtacaagggtggttcttctaccttagctgtaggcaaacaaatccttcttgaaaattacccgctcggtaaattccttaaaaacccacatttacgggcattggccagtaaggtcaatggcgttga

SEQ ID NO: 43076 - DNA, 429 bp, Gossypium hirsutum
  Clone ID: LIB3189-050-P1-K1-D2
ggagtggccgcctcctaatttacagttctcaggttctctcgattcagccgtagccatggtgaacgggccgaagaccaagaagacttattgcaagagcaaggagtgcaggaagcacacattgcacaaggttacacagtataagaagggtaaggatagtttggctgctcaagggaaacgccgttatgatcgcaaacaatccggttacggtggtcagaccaaaccagtgttccacaagaaggcaaaaaccaccaagaagattgtgctgaggctgcaatgccagggttgcaagcatgtgtcgcagcatccaatcaagaggtgcaagcactttgagattggtggagacaagaaagggaagggaacatctcttttctaaatgtggtgttcttgctctttttgtttttggtggttttgaggtcaatgctagtatgg

SEQ ID NO: 43077 - DNA, 446 bp, Gossypium hirsutum
  Clone ID: LIB3189-050-P1-K1-D3
ctttcaacagattcacaaaatatggaactatggttgttcatggttagactcggctcaatcacttatgggacgtacgtaaggctcttggtagagtcgagacactaccaacaattctgggttggatttggatgtgtagatttcattcatagatatatctaacttttccctgtttcttcaaatttcctatattgttaaaatcttgtttctttttaattagaatgcttcaatgaattctgtcaatgggaaagaaaaggagctggtttagttgggtgaaaaagatttttgcttctaatgcacaaccaaaaacacagaagaaatcaaggaggtggagatggattttcggaaaactaaagctcaagcaatgccgccctgcattaccggcgataccccaacagaaatcgttatgtcaagcaatcgaggataaaaaaagcatgctttgaatcttg

SEQ ID NO: 43078 - DNA, 391 bp, Gossypium hirsutum
  Clone ID: LIB3189-050-P1-K1-D8
gaataaatagaaaagtgcaaggactcaaatggggcgaaattaaaatacaaagacgtaaatttacaactttcgcagtggtgaataaccgcagaatttaaccgaaacaaaacttatggaccttctattgaaactggaaataatgatgccatttgctataaagaatgattacagtttttataatcgagttcgtgagaagctggggacgtagaaataaaaatcttacaaagccaaatatgatggaactgtttgaagatcttacaagcttcgcattagggaaaaggaacattgtttcaataagagggtaccttttcccaaatcgtgagcaaagtccacaagcttatcgcacaaaaatgtggacgatcgcccacaaataaccagccagctgtttcag

SEQ ID NO: 43079 - DNA, 403 bp, Gossypium hirsutum
  Clone ID: LIB3189-050-P1-K1-D9
aggggatcggtacaagaattgcagcaaagcacagcaggatttagcttggcccttaaagaaggcgcagaacgggtggccggtgattgtcgggaaggggttgggaaactcactcagaggttcagaacataagtctctccacctgtgatttatgttttggcctttcttgggcacggaaataaagaaattttgcagttgagaggcatgtaattcatctcatctctgatgaatatgcattagaatgagtgtactatgttaatcatttgtcatttaaatgatgtgtaaaagaaaataataagcaatgaaaattgctatttatggatttggtcctaaatagcacccgaaaagtttcttgttggacatttaatcatatcttgaaatctttaaaaacataatttgatgaatt

SEQ ID NO: 43080 - DNA, 438 bp, Gossypium hirsutum
  unsure (1)..(438): unsure at all n locations; Clone ID: LIB3189-050-P1-K1-E2
aaaggggaagagctaatggaaaaaagtgaaaagggtaatggtgttgctcctgctacaaggtctccaagggctttaatggggtcatctagaaatgaaaaccaagaagtgaataccagcatgagaactgccgagaccatgctgcggttggtgcctatggctttaggggttgctgcacttgttgtcatgctcaaaaactcacagtccaatgactttggctccgtttcatactcagatcttggtgctttcaggtacttggtgcatgctaatggtatttgtgcaggctattcccttctttcagctattatagcagctgtgcctagtccttctactatgcctagagcttggactntcttcctactcgatcagattctaacatacgtaatcttgggagctgctgctgtttcaaccgaggtgctttacttagcanacaaaggagac

SEQ ID NO: 43081 - DNA, 416 bp, Gossypium hirsutum
  Clone ID: LIB3189-050-P1-K1-E3
gctttattgcccagctgaacgagggccgccaccttaagaagaggccaactgagttccgtgtagatgggggtctccagcccttcgatgggaacaaattcaacttcaccaaagtcggacaagaagaggtgctcttccagtttgaagcaagtgaagatggcgaagttcagttcttcccaaatgctcccattgatgttgagaatcacccaagtgttgttgccataaacgttagtcctattgaatacggacatgtgctgttgatccctcgaattcttgaatgcttgcctcagaggatcgaccgtgagagctttttgcttgcgctctatatggcagctgaagctgggaatccgtactttagattgggttacaacagcttgggtgcatttgctacaatcaatcacctgcactttcaggcttac

SEQ ID NO: 43082 - DNA, 235 bp, Gossypium hirsutum
  unsure (1)..(235): unsure at all n locations; Clone ID: LIB3189-050-P1-K1-E8
caaggacttcaaggtggttaatttnatcacctaggggggaaaaccaataattgaataccaccatgagaactgtccagaccattcttcggtttgtgcctatgtctttaggggttgcttcacttgttttcatgctcaaaaacttacattccaatgacttagtcttcgttacatacttagatcttgatgctttcaagtacttttttcatgcttatattttttgtacatgcttttctct

SEQ ID NO: 43083 - DNA, 445 bp, Gossypium hirsutum
  Clone ID: LIB3189-050-P1-K1-E9
ggaaaaacaaataaccatgtctaccgctcaatcttgtccacttcccacagtttctctctctaaatggctggaagaagagggccagaataaaaatgcagaaagccagctcctcaaatcctcattaccagctgaaaatgattgccatactcaagctgaagattcagtttctgatgttcccaaatacctgctagaattgggtctcaccccagaatgcaagcagcttatatcctcactgccagccgagaaaggttgggttgccaatctcctccatcaatatcaggggttttggcacaccactcgccagttacaagcagtgcttacttgccaaaaccactttcaagctcaggagacagatatcctccttgttaccactccaaaatcaggaacaacatggttaaaggctattgtttttgccttgatgaaccgagtcaagtatcccaacact

SEQ ID NO: 43084 - DNA, 444 bp, Gossypium hirsutum
  Clone ID: LIB3189-050-P1-K1-F2
gttgcagaccaaggaatcacggacgataagggtgggaatccatcaggttcccctgaattgtcttctaacctaaatgttgaagattcattggaagcagcaaatgttcctcccgatgagaccagagatgctggtgaagttgaagacaagcctgtcatgcatgaaagcatagaaaatcagactattctatctgtgggtaatcgttcggtgcagccaacttcttggaagagttgctgtggactttttgaagttctaaggcgctctgacagataaattcaagtttggggaaaaaaacttaagcagaatctcaagttcttggtggagtgctttattttaattttttttccagcattttctgcaaaaataatgggtgagaagataagtggagttggttggggaatgaaattagggttttctttcgtgggatgtgcgattgccatacgtgga

SEQ ID NO: 43085 - DNA, 449 bp, Gossypium hirsutum
  Clone ID: LIB3189-050-P1-K1-F3
ctttcttccacttttacccttcctccccctcgattcccccattcctccctcgtttcctcgagggtgtgcgcgtcttttcgcacccaagcttcagccgccaccgcgaccatgggtgacgctccccacgttggtatggacgctgtccaaagacgcctcatgtttgaggatgaatgtattttagtggacgagagtgataatgttgttggccatgaatcgaagtacaactgtcatttgtgggaaaagattctaactggaaagatgctgcatagagcattcagtgtatttttgtttaacacaaaatatgagttgctccttcagcaacgatctgcaacaaaggtaacattccctcttgtctggacaaacacctgttgcagccatcctttatatcgtgaatctgagcttatttctgagaatcatctttgggtgaggaatgctgcccaaggaaggtt

SEQ ID NO: 43086 - DNA, 438 bp, Gossypium hirsutum
  Clone ID: LIB3189-050-P1-K1-F7
gttatctctgagggtgtcttaataaacgccttcgatttactttcggtttccatttacttctttattgctacgtttttgaatttttagtaagcgaaaatgagagagtgcatttcagttcacatcggtcaggctggtatccaagtcggaaatgcctgctgggagctttactgccttgaacatggaatccagcctgatggccagatgccaagtgacaagactgtcggaggaggtgatgatgcttttaacacttttttcagtgaaactggtgctggaaagcacgtccctcgtgctgtctttgtggatcttgagcctactgttattgatgaagtgaggactggtacttaccgtcagcttttccaccctgagcaactcatcagcggcaaggaagacgctgccaacaacttcgcccgtgccactacactattgggcaagagatcg

SEQ ID NO: 43087 - DNA, 444 bp, Gossypium hirsutum
  unsure (1)..(444): unsure at all n locations; Clone ID: LIB3189-050-P1-K1-F8
caggtctgtgtgtgggtatacctctggatagatgacaacagtgtggtggatttcattggaaaaatagtttattgctgtggtgtcatttatagctgcattaggattcttgttgtatggaggaagattatttttcatgctaagacgattccctattgaatcgaaaggaagaaggaagaagcttcacgaggttggatctgttacggccatttgtttcacctgcttccttattaggtgctttgtggtggttttatctgcctttgatgcagatgcgtcactggatgttttggaccatccagtactgaacttgatctattacacgctggttgagatcctaccttcggctctagtgctgtatatcttgcgtaaattgcctccaaagagagtatccgctcagtatcacccaatccgttagtcggaatgcatncttgttcgtagaaatgttta

SEQ ID NO: 43088 - DNA, 285 bp, Gossypium hirsutum
  Clone ID: LIB3189-050-P1-K1-F9
cccacgcgtccgattagtggttatcaagggtttttcctctctgggttaagaccagcttggtttatggggtttaggcaacgccttggcggtcatccacagatatgtgatggatctattgtagctttcactgttcttcataatgtaaactgtaatcatgggttcatatatgttacatcacagggtattctgaagatctgccaaaagccatctacatcgaactatgacaactattggcctgtgcaaaagaattcactgaggtgcactccacatcaagttacttacttt

SEQ ID NO: 43089 - DNA, 402 bp, Gossypium hirsutum
  Clone ID: LIB3189-050-P1-K1-G1
ataaaccctcttttccttctctttcatctatcctcttcttgaacatgacaaagaccccctatttcttgatcaaacaaccccccacaaactgcatttaacccaaaaaaaaagaaggttgtataccagacttcaggcatggcaactctaaggtttaactcactgacagggaccctagaaaagaacccgacatcatctttttcttcaaatccaaggctgtcttgggcttactttcagtgtaataacaaaggtggaaagaagggcatcgagaatgacagtcaaagcaatgggagcagccaaatacaaaggaactcaaatgagggaaaagaagctaactgagatgattgagaaaaaagttacagaagctaagcaagtttgtgaaggagatgagacatctgatgagtg

SEQ ID NO: 43090 - DNA, 459 bp, Gossypium hirsutum
  Clone ID: LIB3189-050-P1-K1-G2
gccaaaaccaccgatttatacacctccaaagaaagagaaacctgaacccaaaccacccgtatatgaacctgcaaagaaggagaagcccgagccaaagccaccggtttatacacctccaaagaaagagaaacctgaacccaaaccaccagtgtatgaacctccaaaaaaacctccaatgtacgaacctaagccaccaaaaccaccggtttatacacctccaaagaaagagaaacctgaacccaaaccaccaatgtatgaacctccaaaaaaacctccaatgtatgaacctaagccaccgaagccaccggtttatacacctccaaagaaagaaaaaccagaacccaagccaccaatgtatcaacctcccaacaacccaccaatatatgagccaaaaccacctaagccaccagtttatgcaccaccaaaggaagaaaagccaaaacctaaaccaccagttta

SEQ ID NO: 43091 - DNA, 379 bp, Gossypium hirsutum
  Clone ID: LIB3189-050-P1-K1-G7
gacgaagcggtcacctttgctttatatggtgatggggctgctaatcaagggcagttgtttgaggcgttgaacatctctgcactttgggatctgcctgcaattttggtctgcgagaataatcattatggtatggggacggctgagtggagagccgcaaagagtcctgcttactacaaacgtggggattatgctcctggtttgaaggtggatggaatggatgcttttgctgtgaagcaagcttgcacgtttgccaaagaacatgctttgaagaatggaccaattattcttgaaatggacacttataggtatcatggtcattccatgtctgatcctggaagcacctatcgaacccgtgatgagattactggtgttagacagg

SEQ ID NO: 43092 - DNA, 364 bp, Gossypium hirsutum
  Clone ID: LIB3189-050-P1-K1-H9
gcaacgatacttcaaatactgatacatttatcaccaaaccattgtgatacagaaagtaatatcattttatccattaccaagaacatgattcatggatagatttcacataactaaactcgtgggtatattattatagaacaaactggatattgctttaagctgttttaatgcacactatgatgaaacttatagtgtatgaatctactcttcaggatttttacttagggacccaaacaatgtgatcccgaggaaggaaatggcagacaggaatggttcctggttcaacttttaggacttgaaaagccaaatgcttagggttccatgctgatgtatctgtgtggcagactgctactgctttggcttt

SEQ ID NO: 43093 - DNA, 343 bp, Gossypium hirsutum
  Clone ID: LIB3189-051-P1-K1-A1
cttttcttttcaataaaagtgacatattattcaaacatttaaaccttgcatatatattacagaagtatctgtcatgatttataacatacttggaacattagtgtaatgccagagcctccagcaatcatcccgaatgctctaacttcaccaggttgatatctgacaagcagaaagacaagcagatgagtggtacaatgaagattgacaatggatttccttccttaaacctttgtgttgaagctgttgcttgcttcctgatatcctcagcatcaaatgaaatcaataatggtgttggggccttatgatatttacactaattgtccaagtatgttataaatcatga

SEQ ID NO: 43094 - DNA, 413 bp, Gossypium hirsutum
  Clone ID: LIB3189-051-P1-K1-A2
ggagccctgaatgtggatgtgactgagttccagactaacctggtcccatatcccaggatccactttatgctttcttcttatgcccctgtcatttcagctgagaaggcttaccatgagcagctatcggtggctgagataaccaacagtgcttttgaaccctcttcaatgatggccaaatgtgacccacgacacgggaagtacatggcttgctgccttatgtaccgaggagatgttgtgcccaaagatgtgaatgcggctgtggccaccattaagaccaaacgcacaatccaatttgtggattggtgccctactggattcaagtgcggtatcaactaccagccaccaactgttgttccaggaggggaccttgccaaggttcagagagctgtctgcatgatctccaactcaaccag

SEQ ID NO: 43095 - DNA, 433 bp, Gossypium hirsutum
  Clone ID: LIB3189-051-P1-K1-A3
taataaagcgtttgtctcagatctcagaagatggcccgtaccaagcaaaccgcccgtaagtctactggtgggaaggctccaaggaagcaacttgctaccaaggctgcccgtaaatctgccccaaccaccggtggtgtgaagaagcctcatcgataccgtcctggaactgttgctcttcgtgaaattcgtaaataccagaagagtactgagcttcttatcaggaaattgcctttccagaggcttgttcgtgaaattgcccaggacttcaagactgatttgcgtttccagagccatgctgttctagctctccaggaagctgcagaggcataccttgtgggtctttttgaagacaccaacctttgcgcgatccatgccaagcgtgtcacaattatgcccaaggacattcagttggctcgtaggatcaggggagagc

SEQ ID NO: 43096 - DNA, 436 bp, Gossypium hirsutum
  Clone ID: LIB3189-051-P1-K1-A7
ctaactctccaactgttgcttccacttcctctcttccagatctgaatcgcaaaagggaattttcagatgggtcgcggagttagcagtggtggtgggcagagctcattaggttatttgtttggtagcggagaagctcctaaagcagggacaaacaactcccaagctgctcccgctgaagcaccagctgtcttcaaacctgcccctgctcctgaaccagtagatatttccaagcaaattccggctggtattaacagtatttccgcaaacaattacatgcgtgctgatggtcagaatactggcaatttccttacggatcgaccttccaccaaggttcattctgcccctggaggcggatcttctctggactacctatttggtggacctggaggtagtaaatgagattgtgccttaataacatctttgataagggagagta

SEQ ID NO: 43097 - DNA, 455 bp, Gossypium hirsutum
  Clone ID: LIB3189-051-P1-K1-A8
gaggaagaagagaaagtatgagcttggaaggcaacctgcaaacacaaagctatccagcaacaagacggtcaggaggattagggtccgaggtggcaatgtgaagtggcgtgccttgaggcttgacacaggaaactactcctggggaagtgaggctgtgactcgtaagaccagaattttggatgtggtgtacaatgcgtctaacaatgagttggttcgtacacaaactctggtgaagagtgctattgttcaagtcgatgctgctccattcaagcaatggtatctccagcactatggtgttgacattggtcgcaagaagaaagcagcagcaggagccaagaaagaaggagaggaaggtaaaactgctactgaggaagtgaagaagagcagccatgtcttgaggaagctggagaaacgtcagcagagtcgcacacttgacccccatatcgaggagcaat

SEQ ID NO: 43098 - DNA, 380 bp, Gossypium hirsutum
  Clone ID: LIB3189-051-P1-K1-A9
gcttgatcagcaatatgctgccattagaagaacgcgaggagatggaaactgctttttccggagttttatgttttcataccttgaacatattttggaatctcaagaccgtgctgaggttgatcgtatcaaaggcaatgttgaagaatgtagaaagacgcttcagagcttaggccacacagattttacatttgaggactttttttcgttattccttgagcagctggaatgcgttcttcaaggaaaagaagattccataagtcaggatgagttaatactaaggagtcgagatcagtcaatttccgactatgttgtaatgttcttcaggtttgttacttctggtgaaatacgaaagcgatcagatgtttttggcaccctttatt

SEQ ID NO: 43099 - DNA, 463 bp, Gossypium hirsutum
  unsure (1)..(463): unsure at all n locations; Clone ID: LIB3189-051-P1-K1-B1
cccacgcgtncgcaaaaacctggtccgctctttctcttcttcttcttcttttatataaccaaagtaaggccgattttaaaccggctatttccttttgatggtagtatttcttgtttcatttaatcagattatcaagtgagaaaacgggagaatgaaaagggaagatacagttaggaatgggcatttcctcgccgataggagatggtttttccccatcgttatcaccggccttatagctggtgcgattgttacttccagcttcataaaagccgccgattactcgctgctatgctccgtcgccaacaccagatcaccccagggcgttggtaaagggtcggccacgccgatccaactccaagctatcatccactacgccacatcacgcatcacaccgcaacaaaacttcagggagatctccgttacctttgatgtcctcaagaaaacgtctccttgtaatttcctc

SEQ ID NO: 43100 - DNA, 196 bp, Gossypium hirsutum
  unsure (1)..(196): unsure at all n locations; Clone ID: LIB3189-051-P1-K1-B11
gtaaattccaaaggnctgcactgtattccaaaaggttaacacataatacaaagagaaggtcaaggtgaacatacaccatatgaacgaagggacttaccatctgaaccacatgtagcatgatcactctttaaagcgaatggtaaaggaaaactggtaaagatcatgaagcctaatctataccaatgactattaaaat

SEQ ID NO: 43101 - DNA, 460 bp, Gossypium hirsutum
  Clone ID: LIB3189-051-P1-K1-B12
cctaaacgaaaatcagctgaaaaaaaaaccatttatttttcttcagctctaagcgacaagaacaatggctgacttcaagaaagccactgctttgattctcacagtggctttgcttgtgaatctcgctttaatggttgatgctgatggtgatgatgataagaagattcgagtcaggaaacataagggtgagaaggagtgtatacaagggtgggaatgttcctactggtcgaaatattgttgcaaccaaacgatttcagatgtcttccaggtttatcaatttgaggacctgtttgctaaaaggaattcgccggtggctcatgctgttggattttgggattaccattcttttattttggctgcttccatttatgagcctttgggttttgggactactggtggtaagcatatgcacatgaaggaagtcgcggcttttcttgctcatgtcggcgccaagacatct

SEQ ID NO: 43102 - DNA, 385 bp, Gossypium hirsutum
  Clone ID: LIB3189-051-P1-K1-B2
cccacgcgtccgaaagaaagtagttacgtggtttcagatactaaccattgtgatcaaaatggctgaggagaggaattatataataaaggtagaggaagggaaggccgccaccgatgaaagaccgtcgatcggccccgtttatcgcagttgttttgccgagaatggtttccctgctccgattcctggaatggagagttgttgggacatcttccgaatgtcagttgagaaatatcctaaccaccatatgctcggtcaccggcagattgtggatgggaaagctggaaaatatgtgtggcaaacttacaaacaagtttacgacattgtaatgaaagtaggaaattccattcggagttgtggtgttgaggagggaggaaaatgtggtata

SEQ ID NO: 43103 - DNA, 454 bp, Gossypium hirsutum
  Clone ID: LIB3189-051-P1-K1-B3
ttccacaaatctcccatttttcttctccctaagacgcttcgccccataacccatctaacaatggtggcctcaaaattctgttttgctttttctcttgctattctttcaatcttggccgttgatgctgcccaacaccatgctctggcgccctctccttcttcccccgtggactgctcctctctgattctcaacatggcggattgtttgtcctttgtgtcgagcgggagcaaaacgtcgaagccggaaggaacctgttgttctggcttgaaaactgtgttgaaagctggaccccaatgcttgtgtgaggcttttaagagcagtgcttctctgggtgtcactttgaatgtcaccaaggccatgactttgcctgctgcttgcaaagtctctgctccttctgccactcaatgtgcattgtctcttagtcctactggtgcaccaggatggcaccgtcagc

SEQ ID NO: 43104 - DNA, 472 bp, Gossypium hirsutum
  Clone ID: LIB3189-051-P1-K1-B6
aaaacacttgaaaatatctctcttcactttcttctcttttcaacgcagagtgaaaggcggggaggccgtagacaatctctcttgcgctcttctcgtagaatggatcagattcaacatccatctgtcatgcagaaggtagctggccagctcctttcttctagcatttcccgagattttcaagggtatgatgggtctttcaggaggcctgctctataccaaggacattttgcatatgggaattattccaatgctggaatgcactatcctattgttccatcaacagctaccgccatttgtgttcaagcccctgcagagaaaggatttaccagctttgccattgatttcctcatgggtggagtttctgctgctgtgtcaaaaacagctgctgctccgattgagcgtgttaagcttttgatacagaaccaggatgaaatgatcaaaactggtaggctctctgagccctacaagggta

SEQ ID NO: 43105 - DNA, 365 bp, Gossypium hirsutum
  Clone ID: LIB3189-051-P1-K1-B7
ctttgctgttgaagtagtaatatctatagcatacagagatggagaggcaaagaagcaagcaggtttgtttgttgatgtgggttttggttgctgcctttttctcccacaatagggtcattgcagtgacctccactggccttggtgagcagaaaaactactatccagctcctgaccctcatgctggaactcccccttcaggttcacatggcacaccaccatcttcaggaggtggatcacctccctctcatggaaccccgtcacatggaggtggttaccacccttcaccaacaccatcaacgccttcgggtggaaattgtggaactcccccacatgacccttcaacttcatcaacaccatcacacact

SEQ ID NO: 43106 - DNA, 472 bp, Gossypium hirsutum
  unsure (1)..(472): unsure at all n locations; Clone ID: LIB3189-051-P1-K1-B8
atcgactttcgttctttccgttcatcttgtcaccgtcagcggcggaaccgttgtaatccaagctagcaattagcaatctgtgctcttgcaaagagaatggaattagcggatcgagcagttgggtttctcttatctattaccagtctatcaatattcacgtattatacgttttgggtcatcatcctgccatttgtggacagtgataacttcatccacaattattttctaccccaggaatatgccatactgatccctgtgtgtgccggtgtggtgctcctttgcctcctctgtatttttattgggttcgtgctgctcaaatccaagaagaagaaggcttgaagcttgatgctactttatcatctctgcttaaaacattgcctgggtatagctttgcttggtttcttccatatattttttgcttcgagtttaagntttgagatgagaatttgtgtttaggccatcataatttgtt

SEQ ID NO: 43107 - DNA, 441 bp, Gossypium hirsutum
  Clone ID: LIB3189-051-P1-K1-B9
cttccttaaactgatctacgcaaatcccaggaaaaccccacgtgtcaaaagagtaggagatggagatacggagattgcatattcggcttcttcttcaagggtttatgttgttctctgtgattgggaattgttacgcgagatttgtggtggaaaagaacagcttgagggtgacttcacccgagaagattaagggtacctatgacagtgcaattggcaactttgggatacctcaatatgggggaagcatggctggtgccgtggtttaccctaaggagaatcaaaagggttgtaaaagttttgatgactttgggatttcctttaaatccaagcctggggctcttcctacttttgtcttggtcgatcgtggagattgcttctttgctttaaaggtctggaatgtacagtacgcttgtgcttcttctgtgcttagttgcttgtgat

SEQ ID NO: 43108 - DNA, 376 bp, Gossypium hirsutum
  unsure (1)..(376): unsure at all n locations; Clone ID: LIB3189-051-P1-K1-C1
aagaaagaaaacatgtctcttgtgacagaagagataaaagcgagtgcatcagagatttaccatggagatgagatatgccaggagaaatgcaagtttttgttggaggaagtaggcatgccaagggggcttttgccacttagagacatcgaagaatgtgggtacgtgaaggacacaggtttcgtgtggctcaaacaaaagaagagcatcacccacaggttcgaaaagatagggaagctggtttcctatgcaactgaagtcacggctgtcgttgagaaaggcaagatcaagaagctgactggggtgaagaccaaagagcttttggtttggatcacactgagtgatatccaagtggatgatcctnccactgggaagatca

SEQ ID NO: 43109 - DNA, 466 bp, Gossypium hirsutum
  Clone ID: LIB3189-051-P1-K1-C10
atcagcttgtggaaaatgctgatgagtgtatggttcttgataacgaagctctctacgatatctgtttccgtaccctcaagctcaccactccaagttttggagatctcaaccatctaatttctgccaccatgagtggtgtaacatgctgccttcgcttccctggtcagcttaactcggatctccgcaaacttgccgtaaaccttattccattcccccgactacatttcttcatggtgggatttgcacctctcacctcacgcggttcccaacagtacagagccctcactgtccctgaacttacacagcaaatgtgggatgccaagaacatgatgtgtgcagctgatcctcgacacggccgatacctcacagcatcagcggtcttccgtgggaagatgagcacgaaagaggttgatgagcagatgatcaatgtgcaaaacaagaactcatcttactttgttgaatggat

SEQ ID NO: 43110 - DNA, 466 bp, Gossypium hirsutum
  Clone ID: LIB3189-051-P1-K1-C11
atcatcgtcatcgagtgccgtattgttttcatggatctagagcaaaatctggaatcactctcactgcaaaacagcggagaaacactaagtggaaagttgcggagattgaaggtttcttcgaatgtgttcttcgtttaccatgaccaagatgggttcggaaacgccatcgcccgagctctcagtcctactccccatccttgtagtaaagccttcgagttagtcgacctggaattaggggatgcaaaactgaatgcctctattactcaatttatggatggagaaaatctaaaggcaacaatggtaatgttggatcatttggagccgccactactgtcacaggctataaattcagttctgactaaaatagcagatgcagagcacataccatctaccgtacccactatcatagcccctttttttgtaccggcatcaaagctgaagttggaaggtaggttgttacaacaaa

SEQ ID NO: 43111 - DNA, 465 bp, Gossypium hirsutum
  Clone ID: LIB3189-051-P1-K1-C12
ggaaaatcatgggtgccaaagttcttttcttctttgctttgctttccttttcagctgtctcggcatttgcacaggatgaggaagaccaaggtcttgttatgaacttctacaaggattcttgtcctcaggctgaagacattatcaaggagcaagttaagctactgtacaagcgacacaaaaacactgctttttcttggctgagaaacattttccatgactgtgctgtccagtcatgtgatgcttcactgctgctggactccacaagaaggagcttgtctgagaaggagacagacaggagctttggcctaaggaatttcaggtacattgagaccatcaaagaagctgtagaaagggaatgtcctggagttgtttcttgtgctgatatccttgttctgtctgctagggaaggcatcgtttcgttgggaggcccctatattcctctcaaaactggaagaagagacggtt

SEQ ID NO: 43112 - DNA, 373 bp, Gossypium hirsutum
  Clone ID: LIB3189-051-P1-K1-C4
cggacgcgtgggtttgaatccagcttatgcgggtgcttatggtgcaacaccttctctatcacaattaccctacctgtgtgctagaccaattgttccagatgctcctgcaccaccaaataacatcctgtttgttcagaatcttcctcatgatgcaaccacaatgatgctgcaaatgctcttcaatcaataccccggtttaaaggatgtcagaacggtggaaacaaaaccaggtatagcctttgtcgagtatgaaaatgagatgcaatcaaccgtcgctatgcaggcactgcaaggtttcaagatacagcaaaaccagatgttgattacttacgcgaagaagtagatgaataaagacccaaatggtccttttatg

SEQ ID NO: 43113 - DNA, 365 bp, Gossypium hirsutum
  Clone ID: LIB3189-051-P1-K1-C6
cttcaaagaaatgaaataacatatgtctataatggtcaatgtcctcccatctcccaaacaataacttaaccaatgtcaaaattgtctagaacacaagtacaaaactacctcgtttagtagtttatggctttagacatatctagctttattagcatattcagtgtttctctcttcctttttgggtttttatgaaataaatatgcatacataggtggctcctccagagagagcccgactgtacctgtgaataccagaaacgttgcacccatgcatgacatgatccatgatgccgactgtgaggcctcttcatgtggaagattcaaagcttggagtaatgctgatattcttgtcctgtctgctaggga

SEQ ID NO: 43114 - DNA, 467 bp, Gossypium hirsutum
  Clone ID: LIB3189-051-P1-K1-D10
cccacgcgtccggaagaaccctgagcagccgaaccccccaaaagaccaactaaactcaccaaaaataatggtggccagcaagaaaacgaagaagacccatgagagcatcaacaacaggttggctctcgttatgaagagtgggaaatacactcttggttataaaacagtgcttaagtccctcaggagctccaaagggaaattgattatcatttcgaacaattgtccaccgctgaggaaatctgagattgaatactatgcaatgctctgtaaagttggagttcaccattacaatggaaacaataatgatctaggaactgcttgtgggaaatacttccgtgcatcctgcttgagtattgtcgaccccggtgattctgacatcatcaagtctctttcaggtgaccactaagtcaatgaaggtctggttctctatcacaccagaatgatgatgtttctttactttctcacga

SEQ ID NO: 43115 - DNA, 449 bp, Gossypium hirsutum
  Clone ID: LIB3189-051-P1-K1-D11
cagattttccgtgaaaatcaagaagaaaaaaaaacccttaaaatcaaaaccctaatcctatttttttttcctttttgattgtagaaaacaaagcaagccctcaactggacaacatggggtctgaacagaatcaaggaaccagctttcccccgtcggagccgaagctttgcgctaacggttgcgggtttttcggaacggcggcgaacatgaacctctgctccaagtgttaccgggacctccgtgctggggaggagcaagcggcgaaggcgaaagctgccatggagaaatcccttagcgtcaaaccgaaagaagatgttgttgtggagacgtttaagcccgttgagaagctgcctcatgcgggttcatcatcagcggcggttgagcaaccgggggtggctctctccggtgatgaacagtccgtgccaaaattggtcgagcaggtgctttat

SEQ ID NO: 43116 - DNA, 467 bp, Gossypium hirsutum
  Clone ID: LIB3189-051-P1-K1-D12
cccacgcgtccggttgaaagcagaaagtacagtgcttcattgacagactttggaggggttggtgatggagtaacatcaaatacgaaggcttttcaagctgccatttttaacctcagccaatatgcatcagatggtgggtctttactctttgttccaccaggaaaatggctaactggtagttttagccttaccagccatttcactttgcatatccacaaggatgctactcttcttgcttcgcaggatgagagtgaatgggctgtcattgatcctttaccatcctatggtcgaggaagggatgccgatggtggaagatatatcagtcttattttcggaaccaacctcactgatgtcgtgataacaggtgataatggcactattgatggtcagggtgttacctggtggaacaaattccataagggagagttgaaatacaccaggccttaccttattgagatcatgtattc

SEQ ID NO: 43117 - DNA, 440 bp, Gossypium hirsutum
  Clone ID: LIB3189-051-P1-K1-D4
cactcgaagcaaaagtaaaagggaaagtaaaaggagggttttgaggagggtgaaagatggctggttacagggcagaggatgactacgacttccttttcaaggtggtgctgatcggtgattcgggagtaggcaagtctaaccttctctcaaggttcaccaggaacgagtttagcctcgagtccaagtccactattggcgttgagttcgctactcgtagcttgaatgtcgatggtaaggtcatcaaggctcagattcgggacactgctgggcaagaaaggtaccgtgccatcacaagtgcctattaccgaggtgctgactgtgcgctactagtgcttgatggcacccgactctagacgtgtgaaaatggggagaggtggcttaattaaagtttctttcatgtgaccactatattaattgaatgtctgtttttttatcacacc

SEQ ID NO: 43118 - DNA, 470 bp, Gossypium hirsutum
  Clone ID: LIB3189-051-P1-K1-D5
ctcacctctctcctccttttcatcgaacagctctcaaaattcccaatttttccctaagaaaaaaccgtaactccatctccacatttacgcaacatgtcattcgatgaagaagagtccttcgaacacaccctcctcgtggtccgcgaagtcactgtctacaaaatcccgcctcgttccacctccggtggttacaaatgcggtgagtggctccaatccgacaagatctggtcgggtcggctccgggtcgtctcttgcaaggaccgatgcgagatccgattggaggatcccaactcggctgagctattcgccgcttgttttatctaccctggccagcgcgagagttccgtagagcccgcgctcgattcttcccggtacttcgtgctcaagattgaggacgggaatgggaaacacgccttcattgggctcgggtttaatgagcggtacgaggcgtttgatttcaacggggcctt

SEQ ID NO: 43119 - DNA, 407 bp, Gossypium hirsutum
  Clone ID: LIB3189-051-P1-K1-E10
ccagtccgtgtaggtcaagctgttgatgttgtcggtcaggctggtcgacccaagactatcactggggtccagacccattccactccgggtcttcttgctgccggtgatagagcagaactggctaccgaaaagtatattcccctttcacccatcctggaggggcatgttattttgaaagaaaacccagactacagagaggatagttaagttaaaaagcaagaactcggccgctacttccatggttggtgattgtaatgtgacactgttttcaaacaaattttcgaactttattattatttttttcatgataaagtttttcaagtcaaaacgactagatatgaaaatgttatgtaaacctggcaagctttcttttcgggttcatttaattcttattatatatttataat

SEQ ID NO: 43120 - DNA, 474 bp, Gossypium hirsutum
  Clone ID: LIB3189-051-P1-K1-E4
ctcttctctatgtctatcctcttcctttttgccctcttcttcatgcaaatccatgctagagagtacttgagcaaattcccaagagttaacagcaatgagaaagagacaacaaccagagagcaagagcacgagaccttcgttccccagaccacccaaaagccagaagagcaagagccaaggttcatccctgaaacccaaaatggttatggcctttacggccacgagtcaggctcaggctcaggctcaggctcaagccggcccagtttcaccaccaaagaaacctatgaaccctatgtcacccctgttagattccaccctgatgaaccctataacagcatccccgaatcctccaacaataaagacacttactactacaacaagaatgcctacaagtccactaagcagcaaaacttgggcgaggccattttcaccgagaaaggatggagcaccaaggaaaaccagaacaacaactac

SEQ ID NO: 43121 - DNA, 365 bp, Gossypium hirsutum
  Clone ID: LIB3189-051-P1-K1-E5
ctctatctctaggttttacttcatagagaaaaaaggggacgattagctgaaagaaagaaaaaaagcaaaaacaatggcgtcgtcaagaggaggaggaagccaacaagtgatcagaacgggggatatggagaagatgagcttagatcagctcaaagcagtcaaagaacaagcagatattgaagtcaatctcttacaagacagtcttaataacattcgcgccgtcaccggccgtctctagaacgccttcgtcgctctccacgacctttcccttcgccctcaagggaagaaattgatggttcctctcactgcttccctctatgtttccggcacactctactatgcctattaggtttatcgttgatata

SEQ ID NO: 43122 - DNA, 377 bp, Gossypium hirsutum
  Clone ID: LIB3189-051-P1-K1-E6
gtgtttatgcataatggcaaatggactgtttcacttcctgaagtgtttcattctgcaactctgaaaccagaagatactaccttcaggtctcgtgatgaaatatttcttaagagcagggacgaatcaaatcttgctggcttgtactcattgtatgtttctcagcaattatctcagtattcaacattatctgagactaataagcaaataggagccttaattatggaaccaattatccaaggtgctggaggaatgcacatggttgatccacttttccagcggatgcttgtcaatgagtgtcggcactgtagaattccagtaatctttgatgagggttttactggtttctggcgtttaggagtagagtctgcagcataact

SEQ ID NO: 43123 - DNA, 435 bp, Gossypium hirsutum
  Clone ID: LIB3189-051-P1-K1-F11
aaatagctgaaaccgttgccatctccgccactttatagctcctcgcatggctggatttcttgtcaaaatatttgcttggttcctggagtcaaggatcattggaacgttattgttgtatatattgaagaggaacaacctaattcacaagcttgtttcgaatgcaacgctggaggaggcacctatgtttgttcctttgcatccatttgttgaccttaatgaacaagaagttgaacaaattggctctgatgcatcgccagcagaacgagttcaacgggcaatgaattgtcttcctttgaccttagagaagtcagtagatgattcaaattccagcagcttccgacgctggacaatagcggattattcaagggcctatagttctggagaaataactccccggaaggttgcggagcaatttataaatgctgtgcatgaatc

SEQ ID NO: 43124 - DNA, 416 bp, Gossypium hirsutum
  Clone ID: LIB3189-051-P1-K1-F12
ctgtgaagaagcttggattatggggtctgtttacccgtggtcttcccctccgtattgtgatgattggaactctaactggagctcagtggggtatctatgatgctttcaaagtgtttgtggggctgccaactactggtggtgttgctcctgctcctgcggctgtggagcttgccaaggcatagaatgttggaaatcctgttgtcatgggggacaagtaaacataggattgctggaatggtttgtcaagctggtggaaggatattcttttttgcgttgagaacatttttatcaagtcgctctgttttgaaaaaaactgttggttctaggagaggatggttttgatctcatcctccaaactacggagactaattatttttgtaatagttagatcataaatgaaatttcatttgaagatc

SEQ ID NO: 43125 - DNA, 473 bp, Gossypium hirsutum
  Clone ID: LIB3189-051-P1-K1-F4
gtccccaaatggattctccctttcccttcaaatggcaacccctcccctttcatcccctacttatctgaccaccaatttaggcgtcggctacgccatcgtcgtcgccctcggcttcctcctcctcctctccactctcctcctcgcttcctacatttgcttccgctcttcctcgccccttccacctcgtgccatttcccccaaccccatttcaacacccaccgcctccaactccaacggtatcgtcctccccaggattgttttcatcggcgaagaagaccatgaacacgacgaagaaaacgtcgtcgtctttgggcttgatcgtgccgtcataaactcttaccccaagttccggttcagcaaagaggaggtgtctacggcggtggaggtgacgggttctagtgctgggaacaccatttgttcgatatgtttgtgtgagtatagagaatcagagatgttgaggatgatgcctggat

SEQ ID NO: 43126 - DNA, 425 bp, Gossypium hirsutum
  Clone ID: LIB3189-051-P1-K1-F5
accgcaaaagatatggctctagaatgggtagtgctaggctacaccgccggcgctgaagccatcatgttgctcctcctcacagttccaggcctcgacggactccgcaagggcttgatcgccgtcacacgtaacctcctcaagcccttcatgtcggtggttcctttctgcctcttcctcctcatggatatatactggaaatacgagatgcgtccaacctgtgacgccgatacctgtaccccttccgaatatctccgtcaccagaaatccatcatgaagagccagcgcaacgcgcttctcatcgctgccgctcttattttgtactggcttctttactctgttactaaccttgttgttaagatcgagcagttgaatcagcgagttgagaggcttaagaatcgtgattgatataagtgcctctaatttta

SEQ ID NO: 43127 - DNA, 469 bp, Gossypium hirsutum
  Clone ID: LIB3189-051-P1-K1-F6
gttgaaaagaaattctttgttaagtttgagttgatgttaatggcgattttgatgatggtttcgatggaatcttccatggcggcattacatcgtgttggaggcaagctaggttggaaccctaacgttaattattcagaatggtccgaccatgagcgattttatgtcggcgattggcttctcttcaacttcgacaagcgctacttcaatgttctggaagtgaacgagacaagttacgacaactgcaatgatcaaggtttcataaagaacatcactcgcggtggccgtgatgtggttgagctgacacagttgagaccctattacttcctcagcagcggtggctactgctaccatggaatgaaagttgctgttaacgttgaaatgcttccacctgctccggagccggctccggtcaaaaatggctcgctaacatccgatgctgttcgccttaagattttccactatatgattt

SEQ ID NO: 43128 - DNA, 370 bp, Gossypium hirsutum
  Clone ID: LIB3189-051-P1-K1-G10
agaagtagcagcctccatgggacttcttcgatacggtagctaaatagcatttctcatggcaggaatgtcaagtcctccttttacgattcttccaagcacccatttgccagagccatcccttcactaagtttcaaatcttgtcatttctgtgttcgttgcgctgtcagttttcgaccttgcattgatattcacaaggggaaagtgaaacaaattgttgggtcaactcttagagattccaaggaggatggatcaacccttgtaaccaattttgaatcggataagtcggcagctgagtttgctaacttgtacaaaaaagatgggctaaagggaggtcatgtaatcatgcttggagctgatcctctaagccaag

SEQ ID NO: 43129 - DNA, 442 bp, Gossypium hirsutum
  Clone ID: LIB3189-051-P1-K1-G11
cggacgcgtgggcggacgcgtgggcggacagcgtgggttctagatcagcgagcggccagccctatgtggaggttatattcattttatacatgtgtactaattactcattaaatattcaaggaaacaaatccagacatgaatttacttacacataatttgcagggacaaccaatccaatccaatccaatgctagtttaccaaagaaaaagtcaacaatcttttgatgtgtttttactttctaacctcgaataaatggctacaatggcccgggattggccttccgtcctaatattatggaatcagaatgtgattagatcatatttagatgcttggtgtttctttaaattttgccccctttcagatgaacccccaccttctttaccaaaaaaaattttattcagatcatccatcatgtcataattgctttcgccatgtagttcca

SEQ ID NO: 43130 - DNA, 161 bp, Gossypium hirsutum
  Clone ID: LIB3189-051-P1-K1-G12
tggcggctcaagccgaagtatgttccgcgagctgtggttgaccgacaccaacgtgtcaacgcgtccattcaggatcagagtatgctatcccttgaatgggtcctttctactcaccaaatatttatctaaacacatccagacataaaattaacttacacata

SEQ ID NO: 43131 - DNA, 423 bp, Gossypium hirsutum
  Clone ID: LIB3189-051-P1-K1-G4
agaactttcaggaattttctctctctagaactcgcctttctgtgtttgtttccctagaaaaaaacaccccggaatttcccccaattcaagattggtgttttcttcttcaaattgaatccgaatcttttataaaatttctcttttgggttttcaagtgatgtctttattgccaaagagcgattcaattcatatccgtgaggtatgggatgataacgttgaggaagaatttgctttgattcgtgaaatagttgatgattatccttatgttgccatggatactgaattcccaggcattgtattacgtcccgtaggatatttcaaaagcagttatgattatcactatcaaactttgaaagacaatgttggtatgtaatactttgtcaattaggtcttactttttcaaatagaatgggagctttcctt

SEQ ID NO: 43132 - DNA, 170 bp, Gossypium hirsutum
  unsure (1)..(170): unsure at all n locations; Clone ID: LIB3189-051-P1-K1-G5
tnnnnttaaagggtggacaaagatgacaaaaacggacgaaataaaatacattgaaagcaagaaaataagacacccttgttcataaatatttatttacatttcaatggtccacactgaacttaaggttttccattttttttttggttgaagttcttatgaaattgaaagct

SEQ ID NO: 43133 - DNA, 427 bp, Gossypium hirsutum
  Clone ID: LIB3189-051-P1-K1-G6
aatgttaattgaatgcagcagatatcaagtcatggatatgagagccatcccatccatgtatactctctactcatcaaatattcaagtaaacaaatccagacatgaatttacttacacataatttgcagggacaaccaatccaatccaatccaatcctagtataccaaagaaaaagtcaacaatcttctcatgtgtttttacttcctaacctcgaataaatggctacaatggcccggcataggccttccgtcctaatattatggaatcagaatgtgattagatcatctttagatgcttgctgcttctttaaatcttgccccctttcagatgaacccccacctttcttaccaaaaatcatttcatccagatcatccatcatgtcatcattgcttccgccatgtgttccatgtcgagtacttgttttcct

SEQ ID NO: 43134 - DNA, 395 bp, Gossypium hirsutum
  unsure (1)..(395): unsure at all n locations; Clone ID: LIB3189-051-P1-K1-H10
cccacgcgtncggtcttgagacctatcctggtgttgaacgcatcaccattaagcctcaaaccgataggtgggtcttccctgaaaccaaaactggcatcattgtgttggctgaaggacgtctgatgaacttgggatgtgccactggacacccaagttttgtcatgtcctgctcgttcactaaccaggtgattgcccagctcgagctatggaaggagaaggcaactgtgaattctgagacgatggttgacgtattgccaaagcacctcgacgagaaagttgatgcacttcacctccgcaagctcggagctaagctcactaatctcactaaagatcaagctgagtacattagtgtgcctgttgaaggtgcttacaagcgtactcattacaggtactga

SEQ ID NO: 43135 - DNA, 280 bp, Gossypium hirsutum
  Clone ID: LIB3189-051-P1-K1-H11
tgataagcttataatggactccattaacaagaactacgttgacatggatgaataccctgtcaccactgagcttcagaatcgttgtgtgaacattatagcacatttttttcaacgcaccattgggagagtcaaaggcagcagttgggggggaaccagttgggtcatcggaggcattaatgttggctggccttgctttcaagagaaaatggcaaaccaggcgtagggctgaaggcaaaccatttgacaggcccattttcggaactgaagccaaggttaaggt

SEQ ID NO: 43136 - DNA, 92 bp, Gossypium hirsutum
  Clone ID: LIB3189-051-P1-K1-H12
tccgatattcctcacttttgcaacataatccaccaagagactatcaccaacaaatggaggcattgacgataagactatttttggctatgatg

SEQ ID NO: 43137 - DNA, 450 bp, Gossypium hirsutum
  Clone ID: LIB3189-051-P1-K1-H4
ctcaaccactcaaatcactgaaaaaacaacccagcaaaatgtacggattcgaagctatgacgttcaacatgcacggcggttacctggaagcgatcgtgagaggtcaccgggccggtctcttaaccgccgccgattacaacaatctctgccaatgcgagacccttgacgatatcaagatgcacctctccgccaccgaatacggtccttacctccaaaatgaaccttcaccattgcatacgactactattgtggagaaatgcactcttaagctcgttgatgagtataagcatatgctatgccaggctaccgagccattgtccaccttcttagagtatatcacatatggtcacatgatagacaatgttgtcttgattgttactggaaccttgcatgagagagatgttcaagagcttttggagaaatgccatcctttgtgcatgtttgatagca

SEQ ID NO: 43138 - DNA, 162 bp, Gossypium hirsutum
  Clone ID: LIB3189-051-P1-K1-H5
caataattctctttctgtttctctggttttaacatgggtatgggtttaaggaatggatttcttttgggtgtatcttgtgttgctacaggctcgctctcaattttttggcgacctgaccctattcttaaaaattttagaatcactttggtctgacaccatatt

SEQ ID NO: 43139 - DNA, 341 bp, Gossypium hirsutum
  Clone ID: LIB3189-051-P1-K1-H6
gaacaatttcacaagtggtgaacctgcttggggatgaaacttcggcagcaaattatttaagcaaatgcatttactcgatcggactcggcagcaacgattaccttaacaactatttcatgcccctttattactccaccagcaggcagtatacccccgagcaatttgctgatgttcttattcaacaatacactgagcagcttcaggctttgtataactatggggcaaggaagtttgcgttgattggggtgggtcagatcggttgcagtcccaatgaattagctcaatacagtggagatggtaaaacatgtgtggagagaatcaatgctgcaaaccggattttc

SEQ ID NO: 43140 - DNA, 54 bp, Gossypium hirsutum
  Clone ID: LIB3189-052-P1-K1-A9
gcttcctccaacatggctagagggttgaagaaacacttgaagaggctcaatgcc

SEQ ID NO: 43141 - DNA, 426 bp, Gossypium hirsutum
  unsure (1)..(426): unsure at all n locations; Clone ID: LIB3189-052-P1-K1-B3
gcgaaaccatccagaaaaagacctaaaacggtatcaatgttagcttgagtctggcttcacttcacactgtcactgactaactcccttctctcaaacccaaaacaatcagacagacagcctgtaatggacacaacttcaaattcaaaacacaggccattttcgattaaactatggccccctagtgaaagcactcgactggtacttgtgcaacgcttgacgaacaatctctccagtaattctatttttacccagaagtatggtgctcttaacaaagaagatgccgaggagaatgctaagaaaattgaggatatagctttcaacgtggcaaatgaacagtatgatagggagcctgatnggtgatgaggtgctgcantgcagctttatgccaaggaatgtagcaagcttttgtttgaggttcttaaaaga

SEQ ID NO: 43142 - DNA, 489 bp, Gossypium hirsutum
  Clone ID: LIB3189-052-P1-K1-B7
aagacatggcttcatcatctcctctttctcccattctcctctctctgtttctagtattcatgggtggggtgtcagctcaaacgggtgccgcccctgccccctctggccccttgaatttcactggaatccttgacaaaaatggccaatacacctacttccttcagcttttggcacagactcaagttgggagccaagtacaaactcaactgaaaaccaccactgaaggctttaccgtctttgctcccacagataatgccttcaacaacctcaaacctggtaccgtcaataacctggacccacaacagaaagtacaactagttctataccacgttattcccaaatactactccttgaacgatctccaatttgttagcaaccccgttagaacccaagctggtcaggatttcggcctcaacgtcactggcctgaacaaccaggttaacgtctcaaggcgggttgtcgagactcagattaacaacgcattatatc

SEQ ID NO: 43143 - DNA, 493 bp, Gossypium hirsutum
  unsure (1)..(493): unsure at all n locations; Clone ID: LIB3189-052-P1-K1-B9
gaaataaacggggagactctgaggagaaataatatcagatcctccttctaaactctccacaggggaacctaattaaaagtcctttttctccttttttccccccctgaaatctaagttcttttatcgagaccaaagcagaaaagggaaaaaaaaagagggagatggggttgtcttttacaaagcttttcagccggcttttcgccaagaaggagatgcgtattttaatggtgggtcttgatgcagctggtaaaactactattttatacaagctcaagctcggtgaaatagtcaccactatcccaaccatcgggttcaatgtcgagacagtggaatacaagaacatcagcttcactgtttgggatgtcggtggccaagacaagatccgtcctttgtggaggcactatttccaaaacactcaaggtctcattntcgtggtggatagcaatgacagggaccgtgttgttgaacaagggatgaactgcacaggatgttg

SEQ ID NO: 43144 - DNA, 119 bp, Gossypium hirsutum
  Clone ID: LIB3189-052-P1-K1-C1
aaaaaaaaaaaaaaaaaaaaaaaaaaaaaaaaaaaaaaaaaaaaaaaaaaagggcaacccatataggggggtgccaactttacagaggcgggcgggcaacgggcctacccttttaaaaa

SEQ ID NO: 43145 - DNA, 405 bp, Gossypium hirsutum
  Clone ID: LIB3189-052-P1-K1-C3
ggatattattaataattaaacaagaagaagaagaagatgatgatgataaaatggtgaaatagcggtgacgtgcactgctgttctctggtagcttaaagtgttgattttgttacacaaagcggccaagcaacaaatattatcagaagaaagggaagaaaagtagaaaaaggcatcaacccaaaggcaaaagcaatagaattgttacaatcaagaagctacatttttcttttgataaagagaaaaaaaagggaggaactttacgtgtgtggctgtgttgttgtaagttaccggaaatgaggagaagaacagagattctggtgttgcttatttgtttggtaatagtaacgacgtcgtttgcatccaccgtcacgtacgatcaccgagcgattgtcatcgacgggaaac

SEQ ID NO: 43146 - DNA, 337 bp, Gossypium hirsutum
  Clone ID: LIB3189-052-P1-K1-C7
aagtaaattaaggcgtttattcaaagaggaaagagtggaaagttaaacacagaaaatgaacccggtagtggatacaaaaagctgttatctaaagatatgagatttcctccatggtgaaagtagtgtttcagggaaagcagcagctcctaaccatgaactttttcttgtacttcatccgtatcatctctcagtcctttcattttgcgtatgctgagttctcgtattttccatcccacctgcaatcttcctgttctggaactttgagctccaaatcctctgtaaatggccgaaatactaggtctatcttctcatcatccacttgatcaagagttctaga

SEQ ID NO: 43147 - DNA, 291 bp, Gossypium hirsutum
  Clone ID: LIB3189-052-P1-K1-C8
ctctgagggaggtttgaaacgtatcgaagagaagtacacatggaaaatttactctgagagacgtgtgaaccttgaccggtgtctacgggttctggaagcatgtgtccaacctcgaccgcctcgagagccgtcgttaccttgagatgttttacgctcttaagtaccgtaagctggccgaatcggtacctttggcagttgaagagtaaattgaagttgccggggaaagaattgggagggatttccgagttcttgagaataatctttgtttgtttgcattttgatccaactttt

SEQ ID NO: 43148 - DNA, 311 bp, Gossypium hirsutum
  Clone ID: LIB3189-052-P1-K1-C9
aaaccttgttcttctattttagcttctcttcacattgagaagctagctttttggtgcgttgggtgagcttcaacccacattgggtttgttgcgaagatggttgcacacaaatttaccgttgatttgaataaaccccttgtcttccaggttggtcaccttggagaaagttatcaggagtgggttcatcagcctattgtgagcaaggaaggtcctaggttctttgatagtgatttttgggagttcttgactcgcactgcctggggggcaattccaaccatatggctgcctgttgtttgctggggcattttaat

SEQ ID NO: 43149 - DNA, 299 bp, Gossypium hirsutum
  unsure (1)..(299): unsure at all n locations; Clone ID: LIB3189-052-P1-K1-D1
gttgcatttgacagcagaaggcaatgcagtagtgttcgaggaagttgtgaaggttttcaaggaaggatggcttgacgcctccggaaggcgcatatgattttcctcaccactccgaaattgatgggaagaacccagagaaggcttttcagcagaaatgcttgtagtttccttcactttttttgcttcatttattaaaaccacattattctaagggttttacatatgttcatgaaaaataattacaaatgttacattatttttgaaatccaagtcttcaatatttgtattatgacttngga

SEQ ID NO: 43150 - DNA, 497 bp, Gossypium hirsutum
  unsure (1)..(497): unsure at all n locations; Clone ID: LIB3189-052-P1-K1-D2
cccacgcgtccggtttgccatgacgttggatgatttttctactaatgatgatatcgttctgagggtagagagagcagatctcggagaacaagtctcgtctaagcaacggtcaattattagatgtgcgctcagctgtacatgttctaaattcaattgttcaagacgccatggaagctctccgactggtgattcaaaagattcgaggaactgttcgatatgttaaaagttcccaatcaatacaagggaagttcaaggagatggtcttgcaaactggaatcaatagccagaagaacttggttcttgattgtcctatccaatggaattcaacatacctaatgctcgagactgctatagaatacaggnaatgcttctgtcagttgccggagcttgatcttgaccttgctttaagcgatgaagagtgggaatgggcaagttccattaccggctatttgaaactatntatcgaaatcatcaatgtcttctccagcaacaaatgt

SEQ ID NO: 43151 - DNA, 426 bp, Gossypium hirsutum
  unsure (1)..(426): unsure at all n locations; Clone ID: LIB3189-052-P1-K1-D3
gaaaacaagaaaagcagagccgcatcactttttgctagctaagctactgtgggagttattgttctggaggacagcttctgcaggagctaataataacgttatatattatataaattttatacatcctttttaccctacgactccatatataagcaagtaaaaataaatatggctcgctctgtttcttcctttaagttccttggtgcttctgtttttgatgctctttatgtctccatatcaaggagaggttactcaggtgcaccgccggcggcagtgacggctagctttggtaggcctggagcgatggggaaagtggaacgaagatatgcgatgaaagagtcntcgtcgtcggagacaagggcttattcttcagcttgggcgcctgaccctgttacggggtattacccgggcggaaaactgtggggc

SEQ ID NO: 43152 - DNA, 429 bp, Gossypium hirsutum
  unsure (1)..(429): unsure at all n locations; Clone ID: LIB3189-052-P1-K1-D7
gagatctnagtatggattaaagtagggtgagtgggaaggtaaatttattaatttaacaaaatgtattttatttaataatatcttttaattatattatattgtggtttagtaaaaaattttttatttaattattaaataaataatatttttattattttatttatttttattttaaatattattataattttatatatttttatatatttttatttataattttattattatttaaattttatattatataattaatatagttttgtgtgtaataattattaatattatatattatattttatattaatttatataattatataattttatattatattatttttatttaatttattttttaatatattttatatattaaaattttatttattatatattttaataatttttatatttttaatatttttt

SEQ ID NO: 43153 - DNA, 413 bp, Gossypium hirsutum
  unsure (1)..(413): unsure at all n locations; Clone ID: LIB3189-052-P1-K1-D9
gtttggtatttgcttactacaaggatggtgctgttgacccgacatttttgtactttgcgtgagggattgaangaggtcaagtgctgaggtttgaagcaaagaaaaaaaaagtggttgctgaagaatttagtcctttttattattgcttttgtctcttattttcagtactctgctaaagacataaattatttatggtttttgatgtttttgatttaattgtttgttgttttatcatgaaatggtgtttatttttatgggtagtctaatcaagttttattcttatttttctatgtaataatataataattttatatctttatcgggggtggtttttttcttttcttcttttttgttttttattttttcacttttttaattttgttcgttttctttttttattctctgtttttatc

SEQ ID NO: 43154 - DNA, 445 bp, Gossypium hirsutum
  Clone ID: LIB3189-052-P1-K1-E1
attgttttctaagcgcattttttttataatcaagaactggctaacacaaaggatagcattctggaggaggccaacaagaaccaacaagtgggtctcgtcctctatgaggccataaacactcgagacgtccaaaccgttcatcaaatccttgcccctgaccttgaatggtggttccatggtcctccagcccaccagtttatgatgcgcctcctcacgggagcttcatcggaccaaactttcattttcgacgttgaccctctttcggtcaccacttttgggtccaccgtcatcgttgaaggctgtgatcataaacgttcaatctcttgggttcatgcttggactgtaagtactgatgggataataacagaagtgagagagtatttcaatacttctctcactgttactcgtcttgtgaactctagccaaacaccaccattcaactaca

SEQ ID NO: 43155 - DNA, 353 bp, Gossypium hirsutum
  Clone ID: LIB3189-052-P1-K1-E2
cccacgcgtccggatactcaagacaaagttgttggagaattgtgtctcaaattctgttaaatttagtgggctaaggtttggcaggtggaacatgaggaattcgagtctaccattcagtgcgatgatggcagtgagcttaaggcgagcttaatcgtagatgctagcggtttcagtagcagtttcgtagagtatgataaacctaggaactacgggtatcaaattgctcatggtatttttgctgagggtgatagtcatccttttgacttggataagatggttctcatggattggggagattcccatttaggaaacgaaccttatttacggggtaacaactccaagttagcaacgtt

SEQ ID NO: 43156 - DNA, 299 bp, Gossypium hirsutum
  Clone ID: LIB3189-052-P1-K1-E3
caaaatattaattaggatatatggcaggtgattcatggaagaaggaagagatgtcaaaggtgaaagtcatcatcacaagtcatgtgagagcctggaaagatgataggaagaaaagaatgtcaattggttacttttgatctcccatatttggcattccattataaccagaagctgttgttttacaagtgtggggagtttgaggagaaggtggaaaaactcaaggatgggctgagagtggttttggaggagttttattagtttgtatgttaggtttggtaatagatattgtttggggtttt

SEQ ID NO: 43157 - DNA, 165 bp, Gossypium hirsutum
  unsure (1)..(165): unsure at all n locations; Clone ID: LIB3189-052-P1-K1-E7
gagatgtcttgcttagcttcttgctgtgctgcgttcacatgcggcctttgctcaacggtnncgtctgggatctccagaggagggggcaggcttgcttattgtggtctctttgggctttcccttatcgtctcatggattcttcgagaagttgatgcgcctgttttg

SEQ ID NO: 43158 - DNA, 496 bp, Gossypium hirsutum
  Clone ID: LIB3189-052-P1-K1-F2
gcgaaaaaagtgaaaagggtaatggtgttgctcctgctacaaggtctccaatggctttaatggggtcgggtagaaatgaaaaccaagaagggagtaccaccatgagaactgccgagaccatgctgcggttggtgcctatggctttaggggttgctgcacttgttgtcatgctcaaaaactcacagtccaatgactcagacttcatttgatactaacatgtagaatgtaacacttgcttgaagacatctaagtgtaattgaggctgtatacgacacagatgagttcatgccaactgtatctacaaactcaaccacaatctcactggcattacgcacagaccgtattggaactgttggaaaacaaagggataccctttctgctgagtgcttaaagagactggttcttttgagttccaatactaggagtttgggtgtccctgatgatgaatcagtggacttaactgaacctcgactcgaatcgttcgatgtggcaaata

SEQ ID NO: 43159 - DNA, 90 bp, Gossypium hirsutum
  unsure (1)..(90): unsure at all n locations; Clone ID: LIB3189-052-P1-K1-F3
cccacgcgtncgctcccttgcaaataattgaaggagctaacaggaaatattgagatagaaaagaggaaggaaagggaaactatgacacac

SEQ ID NO: 43160 - DNA, 500 bp, Gossypium hirsutum
  Clone ID: LIB3189-052-P1-K1-F7
acgcgtaacaacagagatacctgacccacgtttgaaaggctacattgcatacaaagagatgcagataatggcgtacctagcaaaggagtgcttggtggtggaccctgatgctcgaccgacaatcagtgaagttgttcaaatcctctcaactattgctccggataaatctaaaagaagaattgttcatgtcaactttctccagatgtcatctgcccataacatgaagaatgaaactcttgtagaaagacatcaaagtgtaattgaggctttatacgacacagatgagtacatgccaactgaatctacaaactcaaccgaaatctcactgccattacgcacagacggtattggaactgttggaaaacaaagggataccctttctgctgagtgcttagagagactggttcttttgagttccaatactaggaggttgggtgtccctgatgatgaagcagtggacttaactgaacctcgacttgaatccttcgatgtggcaaata

SEQ ID NO: 43161 - DNA, 135 bp, Gossypium hirsutum
  Clone ID: LIB3189-052-P1-K1-F8
cgcgtccgctttgtggtccttaactacttgattgatgatcatttctatatacatatatcaataccacctttgtttcctttctttactccctttttgagttttcctctaatacgttatttatatatagggggggtt

SEQ ID NO: 43162 - DNA, 360 bp, Gossypium hirsutum
  Clone ID: LIB3189-052-P1-K1-F9
ggcgagcaagatccaaataatcctttcggagctcccccatcccctccaggcttttggatgtgcttgctccgtgtgatgcaagggggtggtaactgctttggcaggatatctattctgatagaccagaatacacaagcattccacatgtttatgactgctcttcttcagcttttcgatcgcacgggattattgtatggagagttagctagatttgtgttaagactgctgggaatcaaatcaaaacccctaaagatcaatcaaccaggaccagtgttactcccaggaccccataacccttatgggaatcaaaactacattgaagggccaaaggctgctcccagaggtgtattggacaatgta

SEQ ID NO: 43163 - DNA, 450 bp, Gossypium hirsutum
  Clone ID: LIB3189-052-P1-K1-G1
aaccgccgtgctcgttgggagagtagcagctggagagagagtgtggtgtccttaaagccaattatagtgctcttaagcttgactacaacaatcttgaacaagagaaacaagctttaactgcagagttgagggaactgaaagctaagctagaagagaattcagagagcagccactctgttaaagaagattctccaaaatcttcccagcaggtcaaagaccaaggtttcttcgacaacgatgatgattccaacgagattgtcaaagaagaaagcaatggaaatgctcagttactaatttcaccatcatcatcttcttcaattcagttcaatgggtattcttcatcttcagattcatcaaatcatctctggtttcaaccatttgactcgagtttgattctgggtaacatgtatcagccccagttagtgaaagtggaagagcaatgtgtgttta

SEQ ID NO: 43164 - DNA, 279 bp, Gossypium hirsutum
  unsure (1)..(279): unsure at all n locations; Clone ID: LIB3189-052-P1-K1-G2
gcgaatatctgctttttcttagttttcctttttggcccttgtttatttgatatttccccctcatgggcggcggtgatgtcgagttccggtgcttcgtcngagggctcgcatgggccaccgacgaccgggccctcgaagaagccttcagtgcgtttggtgaaatcgtcgaatcgaagatcattaatgatcgtgagactggaagatcccgaggctttggattcgttactttccgtgacgagaaagctatgagggacgcgatcgaaggaatgaacggtcaaa

SEQ ID NO: 43165 - DNA, 492 bp, Gossypium hirsutum
  unsure (1)..(492): unsure at all n locations; Clone ID: LIB3189-052-P1-K1-G3
cccacgcgtccgcccacgcgtccgcatttttattccgctattttctctctccccaaacaccctttgaaggcaaaaagaagacaatggccgatcagctcaccgatgatcagatctctgagttcaaggaggcctttagcctattcgacaaggacggcgatggctgcattactaccaaggagctcgggactgtgatgcgatcacttgggcagaaccctactgaggcagaacttcaagatatgattaatgaagttgatgctgatggaaatgggaccatcgattttcctgaattccttaacctgatggcgaggaagatgaaggatactgattctgaggaggaacttaaagaggctttcagggtttttgacaaggatcagaatggtttcatatcagctgctgagctgcgccatgtcatgacaaatctcggtgagaagcttacagatgnagaggttgatgaaatgatccgtgaagcccatgttgatggtgactggcaga

SEQ ID NO: 43166 - DNA, 202 bp, Gossypium hirsutum
  Clone ID: LIB3189-052-P1-K1-G7
gtttcccggttccatgatattaagatatagatttattcattgttcatgattccatacattgcagcaggaatacttagtaggttggacggagagagagaaaaaaaggcacgactagctcttataaagaaaaacagcaaaaccaatggcgcacctaacaggaggaggaagacaacaagtgatcagaacgggggatatggagaag

SEQ ID NO: 43167 - DNA, 482 bp, Gossypium hirsutum
  Clone ID: LIB3189-052-P1-K1-G8
tccaaatatactcactggtgaggcgagaggtgggaactttgcaagagataaaaaaaaattgagaatggtccaaaaatgaataaaggttcatcatcaatggcgaaagatcagtcaatctcagtttcagaagcagtacacaagattcaactccatctccttgacggaatccgagacgacaaacaactaatctcctctggttccttaatttctcgaagcgactatgaggatgtcataaccgagaggtcgatttccaacacttgcggttaccctctctgccgaaaccctttaccttccgaaccccgtcgaagaggccgttatcgaatctctttgaaagagcaccgagtttacgatttacaagaaaccagccgcttttgctccgccgattgcctgattaatagccgagctttcgctggagtttacaagaagagaggtgtccgttttgaatcatgcgaaacttaatgcgattttgagtttatttgatg

SEQ ID NO: 43168 - DNA, 353 bp, Gossypium hirsutum
  Clone ID: LIB3189-052-P1-K1-G9
cccacgcgtccgcggacgcgtgggattgcgagtttccttttttttttttgacaaacaatatgtctttttttcttcgggctggggtacagtgaaaaaagagatttcaaaaatgattcaacctcagacccatttgaatgtaacagataacagcggggcccgagaattgatgtgtattctagtcataggagctacgaatccccgatatgctcatattggtgacgttattcttgctgcgatcaaggcagccataccaaatacacctctagaaagatcagaagcgctcagagctgcaattgtacatactcgttaagtactcacacacaataacttgatgataatactatataattaca

SEQ ID NO: 43169 - DNA, 490 bp, Gossypium hirsutum
  unsure (1)..(490): unsure at all n locations; Clone ID: LIB3189-052-P1-K1-H1
gcgacgaaacaggggcgagctctctgtctctattatttttacattgcaccaatcaaagaacacctcttgctgtgttaaaaccacgggctcgagcgcaggcttcttctttaattagtcttcgaaaatgcctctcagactcgaaattaagagaaaacttgctcaaagatcagagagagtgaaatccgtagatctccatccaacagaaccatggattctagcaagtttgtattctggaactgtgtgcatctggaactaccagtcacagaccatggctaagtcatttgaagtcactgagttgccagttaggtcagccaagttcgttgcacgcaaacaatgggttgttgctggagctgatgacatggttattcgagtatacaattacaacacaatggataaggtcaaagtatttgaggcacataccgattacattagatgtggcggtgtccatcctactcttncttatgtggtggcttcatctgatgatatgctc

SEQ ID NO: 43170 - DNA, 495 bp, Gossypium hirsutum
  unsure (1)..(495): unsure at all n locations; Clone ID: LIB3189-052-P1-K1-H2
agattagaaagctctttaacctttcaaaggaagatgatgtccggaagtatgtcaacacttacaggaggagtttcaccacaaaatctggcaagaaggtgagcaaagccccaaaaatccagaggctggtaacaccattgacactgcagaggaagcgggctagaattgctgacaagaagaaaagaattgccaaggccaagtcagaggcagctgagtaccagaaactgcttgccacaaggttgaaggagcagcgggagcgccgtagcgagagtttagcgaagaggaggtccaagctctctgctgcttctaagccttctgtttcagcttagataagttttgataaaccaaaagggatcttggtcagtacccagttttttgcagtgccatatgctgtcataatttattgcttagtatccaatttnggaatgttatttttccatctactatgttaggtcatctttttgacaattatcattaactaaattgcttcatctaatg

SEQ ID NO: 43171 - DNA, 228 bp, Gossypium hirsutum
  unsure (1)..(228): unsure at all n locations; Clone ID: LIB3189-052-P1-K1-H7
canaatggttctttgaaagtcagttacaacgacctttctaaagaatctgtttaaacctggctttgccaaataaaaatggcagtggagtgtcttaaaccttataatattttcacaagaactctgattcacacacacctcatatagatataaagagatctaatatacttctcgatttcaactttaaagctcaactatatgactcttgcctctctgtgactactctatctc

SEQ ID NO: 43172 - DNA, 379 bp, Gossypium hirsutum
  Clone ID: LIB3189-053-P1-K1-E12
gagattcttcatattcagggagggcagtgcggcaaccagatcggtgccaagttttgggaggtggtttgcgccgagcacggcatagattcaacgggacgctatcaaggagacaatgatttgcagctggagcgcgttaacgtttactacaatgaagcgagttgcgggaggttcgttccacgagccgtccttatggacttggagcctggcactatggatagtgttagatccgggccgtacgggcagattttcaggcctgacaacttcgttttcggccagtccggtgcagggaataactgggccaagggtcattacacggaaggggctgagttgatcgactcagtgctagatgtggtgaggaaagaagccgaaaactgtgact

SEQ ID NO: 43173 - DNA, 391 bp, Gossypium hirsutum
  unsure (1)..(391): unsure at all n locations; Clone ID: LIB3189-053-P1-K1-F10
cccacgcgtccgttcttcttcactcaaaaagaacaatagatcagtgttaaaacttaaaagccttgggttttcctcttctccaccatgttttgacttgaacaagttttttttacatttttctgtcttgttcccacgtctcagaattgaaaacccagtttgagttttgagttcatttgctaaatttttgatctgggttttgaatctactggtttttgaaaatggctctaagttcagttgtggtcaccatggagaagcctaataagttctctttagtggaaatcaatggctcagattcaactctgctactcgagaaacaaaaagcagtgagtcccaaacagttcacatggttccttttnctcaaagctaacagagtttttgcttgtctttcatg

SEQ ID NO: 43174 - DNA, 239 bp, Gossypium hirsutum
  Clone ID: LIB3189-053-P1-K1-F11
ctgacactgaaaagagaagaacgaagtaatgatgttcctgcatgcgtgtggatgatctatagccggcattttagcgaaacatagttagaatttaagttttgggggttctttgttagtgccaaaaataaatgtcgttccgaagtatagttaacgatgtgagggatgctttggggagcttatctaggcgtagtttggaggagagattgactggttatttaaagggaaaattataatggtta

SEQ ID NO: 43175 - DNA, 337 bp, Gossypium hirsutum
  Clone ID: LIB3189-053-P1-K1-F12
ctttttagaaataataaaaaaagttctcatttctttttttgcacgcttcctctcccttctgcgaaacccctaaaaaaatggcgacatcttctagacgaacgagcggtccggttctccgatccctctccccatccggccgcttctgttctcactacgcttctcagtcttcatcttcttcctcttcctctgcttttgccttttcgagttcaagcttttcttcacgctcttcaactttctttaatcaacacagatctatctctccgccacgtgtcaatatgtacaaccactctttatcggcgccatctgtgcgtttctcgctggataaaccgccgatctc

SEQ ID NO: 43176 - DNA, 344 bp, Gossypium hirsutum
  Clone ID: LIB3189-053-P1-K1-F4
gcgtcctcagcgacggaccgggcccaagtcccctggaaaggggcgccggagagggtgagagccccgtcgtgcccggaccctgtcgcaccaagaggcgctgtctacgagtcgggttgtttgggaatgcagccctaatcgggcggtaaattccgtccaaggctaaatacgggcgagagaccgatagcgaacaagtaccgcgagggaaagatgaaaaggactttgaaaagagagtcaaagagtgcttgaaattgtcgggagggaagcggatgggggccggcgatgcgccccggtcggatgtggaacggcgagagccggtccgtcgatcggctcggtgcgtggaccga

SEQ ID NO: 43177 - DNA, 383 bp, Gossypium hirsutum
  Clone ID: LIB3189-053-P1-K1-F5
ctgaattgggataatactttgatttcaaaacacgagccatcaatgaatttgggtaattaacaaggtgcgatccttgtttcgctaataaaggaatattaaacttcataaaatatcgaaatccaagaccactattttcttttaataagcacagattttcccaggtacaccaatgaacactttttttattccatctattccgccaccagaaattagcaacaattcttttcaggtctgaccatagagtcttgggtagtagaaaacatgccattgaatacgttgttatagcttgttagaccgatttaattaaaactttatttgactctttggtattgataccttgaccttcaattattaatatctttggttgtgtattgttatttaaa

SEQ ID NO: 43178 - DNA, 477 bp, Gossypium hirsutum
  Clone ID: LIB3189-053-P1-K1-F6
caaacaagccaaaaccctaagcagcctctcccccacccccaccccccctctttttcgatggcaccaaaaggttcaaaccccattgaaggccgaccagccgcttcttcctctgaagaagatgaagaggtgacttcttctgaggaagaagaagaagggtcttcaactgaggaagaagatgaggaagaccccaaaaccgagtcaactccattgatccaaaagagcccaccacccagaaagccggaaaccgctacgcctggcgtcgttaacgatgaatctgatgaatccggttctgattccgaatccgaatccgacaccgctacaccgaatgttaaacctcttgcgacgaaacctatggaggaaagtttgaatgcaaagaaacccagatctaataagcccttgacttctcccattagggctttttcatctaaacggcctggggagttggaggtggatgctaaagaagccaaacgacccaag

SEQ ID NO: 43179 - DNA, 257 bp, Gossypium hirsutum
  Clone ID: LIB3189-053-P1-K1-G10
aaagaaagaagaagcaaccctttataccccactttaagttactcaaaatttccgtacttttcggtgttgcatggcagtaagtctattgtcacatgagttgtctgacctgtgtcttgggaagccagcactaaggtcactttccatcacatccaccattgctgaagctcttgaggtcttgaaaacctctgatgacaactttgttagtatctggaattgtgatgatgatgagtgctgtagtagatgtgtaggcaaaagtt

SEQ ID NO: 43180 - DNA, 385 bp, Gossypium hirsutum
  Clone ID: LIB3189-053-P1-K1-G11
ggaaactggaggcagcaaagatgattcagcacaaaattagaggagtccagaatgacgcgctgcgagtcgttctccacggtgttaggagcgaccttgtcggatctcaccctctctaatctacttaggaatcagcaatccctactaccgtttgtttccctggaaaatatacgagacttaatattattattttgtttatttatttgtgtgtgtgtttcatcttattgtgttcattactcagatctcaaacgcacgtttgagcatagttcatcgaccgcattatatttgtgaaaaaaaagtggtttagggttttttgtggcagaagggtcttatgattcttattaactcgacataatgattcttttttaaatttcctaaatatacctat

SEQ ID NO: 43181 - DNA, 419 bp, Gossypium hirsutum
  Clone ID: LIB3189-053-P1-K1-G12
acaatggctacttcatcatcttcttcaaagctttcccttttcttcttgttttccttcttgggtgggtccactttagctcgtaattccgcttcaccaacaacaaaaatcctcgatgtcttagcttctttgaaacaagctcagcatattctttcctttgatcctcaaatttctaatggtttttccaaaagccaaccccttttcgtcaactcttcttcttcatcgggttctggtttttcgattccacttcattcacggggctctttgcgaaaaacccatcatgttgattataaaaacctggtccgatcccgactcgaccgtgattcagcccgagttaacacgctcaccaccgaggtactactcgctgtcaatggggttcgcaaaactgagctgaagcctgttgttaccgagttagaaccaga

SEQ ID NO: 43182 - DNA, 354 bp, Gossypium hirsutum
  Clone ID: LIB3189-053-P1-K1-G5
cccacgcgtccggcgagatcaaaagccagcagcgcagcatctaaaagagcagtcttttgacaattgttcgccatgggtaaggttcacggatctctagctcgtgccgggaaggtgagaggccaaactcctaaagtggccaagcaagacaagaagaagaagccccgtggccgcgcttacaagcggatgcaatacaaccgacgcttcgtcacagcagtggttggatttggcaaaaagaggggacctaactcatctgagaagtaagagatctatgtaggtgaagaaggcaagaagccttgttgaaagctttgatggattttaagtctttgttttcttttgataatgtttttatgatat

SEQ ID NO: 43183 - DNA, 452 bp, Gossypium hirsutum
  Clone ID: LIB3189-053-P1-K1-G6
cggacgcgtgggttccattccacgggagtattttttttcccttttcattttttgccctcaccttggtctgcttctttcctttccatggccgggtttccatttttttccttcttatttcccttttttccttcattactgatgttgaaattccgctggaagaaccataaaaaagacatcaatatcagcttcaagaatcagaggagagaaattcaagattgctcctttttctctctataaattaattattattatcgaaaatggctatttcctctgtttatttgttaatcgacaatgagcgatcaatcggaggaattgcctctcatggcttttccaccgacactgaccccaacgagatcgacctcgaggccggtccagccgatcaaattcagtgtcgaatttgcctcgaaaccgacgatatgttctaactttaaaccccatttccttaaatttaa

SEQ ID NO: 43184 - DNA, 266 bp, Gossypium hirsutum
  Clone ID: LIB3189-053-P1-K1-H12
acaatttccgtgtctcgtgatactctaaaaccttataaactccaaaaagctaaagaccctcccttgtacacaacaaacaacgcgcctgccccttcttcttcctcctcttctagcattcctgtctatcacttaaaaaaaccatagctttgttgttggttttgttttttttttttatctaaaaacaaaaaaatgcatgcaaaaacggattcaaaaaggacgagtatcgatgcgtcatggccgtcaaggtcgccttgaaggcctgtata

SEQ ID NO: 43185 - DNA, 218 bp, Gossypium hirsutum
  unsure (1)..(218): unsure at all n locations; Clone ID: LIB3189-053-P1-K1-H4
gcgagaaagngagaggncgagagagaaanaaanncgcagggaannagcgagagccngcaannngggggggggnccccnncggaaggggggggggcnancnnancnanccgncancangacaacancaaggcgncnngcagaaagaaaggnggagaagnnccaaaagaacanaacaaagagaggagcngngccngaaacaaccacaaagaaggggaagg

SEQ ID NO: 43186 - DNA, 258 bp, Gossypium hirsutum
  Clone ID: LIB3189-053-P1-K1-H5
cttgatctctccttcaatgggttgtcaaggaatattcctaaagagattggaaattgttcaagtttggagggtctcaatctcaatgacggtgggtttgaagctcaaatccctaaagaactaggcaccctttcttttttgacaactctgaacatatacaacaacagattatcagggcctttccctgatgagattgggaacctttcttctttgtcacaattgcttgcatatagcaacaatatcagtggatccttgccaagc

SEQ ID NO: 43187 - DNA, 308 bp, Gossypium hirsutum
  unsure (1)..(308): unsure at all n locations; Clone ID: LIB3189-053-P1-K1-H6
ggaaggttaagaatgcaaagccatattcttttactcttgaggaggataccacccagttcggtacgtataggaaaggtggtattggtacacgagtgaaacancccaaggtattaaatttcaaaccactaagagatgctatcaaagaccctggtgattttctgctgagtgatttttcaaaatttgatcgtccacctctgttacacttagcattccaagcattggataagtttgactccgattagggacgctttcctgttgctggttcagaaggggatgctaataagcttatttctattgctgggaacatg

SEQ ID NO: 43188 - DNA, 370 bp, Gossypium hirsutum
  unsure (1)..(370): unsure at all n locations; Clone ID: LIB3189-010-P1-K1-A1
ttttctttttcatttgcttaaaacgatcgagccacagttttaagcttagcggagagagagagagagagagatgggtagctgcagcggcatggcatcggctgcctcggggttcttgttaatgcccaatctcaccggcactgctgcttctaagactaataacatcagcatgctcttttccccttccagaaacaactactacaatagctcaaggctcgtcgtaagggcggctgaggaggaggcttcgncaccagcaccaacaccagcaaccaccactgcgccaccagaaggtggtgaagctcctaagcctaagccaccaccgattggaccaaaaagaggaaccaaggtgaggatccttagaagggagtcctac

SEQ ID NO: 43189 - DNA, 454 bp, Gossypium hirsutum
  unsure (1)..(454): unsure at all n locations; Clone ID: LIB3189-010-P1-K1-A3
cccgtaatgtcccgggtcggacccacnngcgtccggctattactnttaaaagaaattcggtcactttactttaaagaatgagtattgnnnagctttctggagaaatcaaaaaggagaaaccgagaggatagagcatcttaatggctatatatnggntcaaccagatagtgtgcannatcagcagtatggaaggggaatatatganngatcaagctccatgcctataccaaatagaaaccagggtttcatagacatggacacagaaaaaagcctggaaaatatcgtaagcaaagtgggtgtggcaaggagcacttggcttcttgatgacctcagttttgccgactacaacaataccaacaagtcatgtgcagctcgtctaaagtaacagattctgatcaggccataggtttactctatggattatgtgggatatcactatcgtatatgacatata

SEQ ID NO: 43190 - DNA, 438 bp, Gossypium hirsutum
  Clone ID: LIB3189-010-P1-K1-A7
cccacgcgtccggttcctcttcttccctctcttttgtttgtctaaaaacagttgcttccctgcttgatttcgttgtcatggacactcccacccctctcttctccttgctttgtttcttcctcctctccctcttcttaggtgaggagcaacatgttgttgaagggtcaagggtgtggacctttggtttcagacccaagatgttgtttgtgttcggggattcctacgctgatacagggaacaacaggaaagctttggcaagttcctggaaacttccttatggaattacattccccgggaaacctgctggccgtttctctgatggtcgtgttttgactgatttcatcgctgggtacttggcgattaagacaccagtgccctacagatacaggaaagaactggggggtcgtctcaagtatgggttgaactttgcttatggag

SEQ ID NO: 43191 - DNA, 527 bp, Gossypium hirsutum
  unsure (1)..(527): unsure at all n locations; Clone ID: LIB3189-010-P1-K1-A8
tcggcagaagctttcattttttttcttctctatatatttctcanntctccttttccaaccgccgtcgatcgtcgagtgccttatctcccgttttcaataaaagtcctccaaaaagaaatggcccaatggctgcnnatcgggaatgggctgtnngcatgatgattgcnnaagttgaagttcttgggaaccttaagaggcaaaaaagaaaacccaccgnnctttattgggttttcaaaanntcgagganngaagcagannagcaagttattggggtggagaagcnnttggtgaggccaacccccgagagctanntgaggattttaccctaaatgggtcttccnnngctgatgaatggtcgttatgcctgtgtaccgattttgattnttctaaccggcccgagaaccgtnccaaaagagccagaaatctttttcattgcatntggtctcccgatacaatcaaggatcaaggagccaaaatgatatacgnctagctccaaagacagattcaagcgagaactggatggaatc

SEQ ID NO: 43192 - DNA, 450 bp, Gossypium hirsutum
  Clone ID: LIB3189-010-P1-K1-A9
tgaaaaactgctttgttctgtcgaacttgggtatttcatctgtctttcaacagtattattatgcatctgcatatcttaaagagttgtttttcataaaaatgatgcggttgaaaatatgaagttttaagctcttctattttgaacaaaataaattatttgtctctagctagtgagcaaaacatattagttaaaaataatagcttctgcaaacaatggggttcgcatgtttctgctgaattccatgattttggtcatggttagtccaaaaataaagtctctgtattcttttttttttactttgttttataaacccaaagtaaattctacgatggttgtggaacttagagcacaatatttgagtggcacaatttatatatgtcagtacatgtgcagtttatggcacaatttttcaaaaaaaaaaaaaaataaccttatttttaaatagataaa

SEQ ID NO: 43193 - DNA, 174 bp, Gossypium hirsutum
  Clone ID: LIB3189-010-P1-K1-B1
cacccaggcgtccgttaccattttatcaaaaaccaaatcagtaccccaatttcattttctcaaactcgaaaacaccgatgatcgcttgttgttatacaaggcaatttcctccccaacagccccactgaggtttgatggagcctagaaagacaatgaaactgaacacaaaacaca

SEQ ID NO: 43194 - DNA, 425 bp, Gossypium hirsutum
  Clone ID: LIB3189-010-P1-K1-B2
ctcttttcttcttcttctacttcttctctctctctttctttttctctctctctcttttaattttgcgaacgaccaaaccctaaattaatccctctgttaattcgttttcgcgatggtttagttcgaggtttttcttcagatccgatccgcctcagatagataaaatgtctgctccttcatctagggagcgcgcacagcgtctttatgagaagaatatcgaattggaaaaaaatcgtaggagatctgctcaggcacgagtgccttcagattccaatgcctggcagcagatgcgtgagaattacgaggctataatttttgaggaccatgcttttttcgatcagaccttttttgtttttcatttgtggatgtttcattatttgcggtttgatgaactgaatggtctttttcgagctttagtatcgtct

SEQ ID NO: 43195 - DNA, 403 bp, Gossypium hirsutum
  Clone ID: LIB3189-010-P1-K1-B3
aaaaaaccacagaccagagtagagaaaaaaagaaaatatatctagggagggagaaaaatataaaggcaaaaggcccaaactattaaatctaaaaaaaaaaattcaatttttttctttgtttcttccttgaatctctatgtatgcatgtcagctcggtaatggttctcgagtctgaaagtccatgagcttctgctttttgtttttgtaaacagaaaaaaatatatgaaaaaatattcggattggaaaatgtgcgcaaagtatgtacagcatgctcaggagttgatatccaagcttgactttccttctttttacaaagacgctattgttatgctcttaaagcatgctgctacatgtattattgagcttgatcaatctgctccatcaacaacagtggaatcaatgc

SEQ ID NO: 43196 - DNA, 258 bp, Gossypium hirsutum
  Clone ID: LIB3189-010-P1-K1-B8
ggagagtgagctcaataacttaattaagttatggttcttaacaacattttcattgtcttattcttatcatatttcagcaaagatatcaaagggcttcccaaggcttgtttcaatcttccctgtcatctttctattgtcaattctcccctttaacattcatggtttccatcttggagcagcccatgtgtttgtcttttcatggatggccaatttcaagctccttttatttgcctttgatcgaggtcccctttcaccccc

SEQ ID NO: 43197 - DNA, 395 bp, Gossypium hirsutum
  Clone ID: LIB3189-010-P1-K1-B9
gttggagataataatagcacactttcgagggtagattctggcagaaggcgtcaattacaaaggggtcagctttctcaatttctaccaacatctcggaggattgtacaattctcaaatggcaagggacctggaccaaatgctcgcattgtctacattgatggggcattcaatctctttcatgctggccttgtggggatcctcaagaaggcagggcagttggaaaacttttggttagttggtatctaccctgactatattgtgagtgagcagaggggaatgccgtacccagttatgcatttacttgagcgcactcttagtgtgttagcttgccgttatgttgatgaagttatcatcggtgcaccttgggaattacaaaggacatgattacaactttc

SEQ ID NO: 43198 - DNA, 465 bp, Gossypium hirsutum
  unsure (1)..(465): unsure at all n locations; Clone ID: LIB3189-010-P1-K1-C2
ggatcatgnttccggccgccgccgccgccggccgtcaaacgccgacgaaaatggctttcgagggattagttctccgcggcaccatgcgagcccacactgacatggtcacagccatcgccactcccatcgacaactccgatatgatcagtcacttactactcgcgacaagtgcatcatcctttggcacttgaccaaagacgaaaagacctacggtgtcgctcgccgccgtctcaccggccattcgcactttgttcaagacgttgttctctcttctgactcccagttcgctctctccggttcctgggacggtgagcttcgtctttgggatttgaacgccggaacatccgctcgtcgnttcgtcggccacaccaanaacgtgctctccgttgctttttcaattgataaccgtcagatcgtttcggcttctcgtgatcgaagcattaagctctggaacacccttggaga

SEQ ID NO: 43199 - DNA, 456 bp, Gossypium hirsutum
  Clone ID: LIB3189-010-P1-K1-C7
aacgaattgatctccagagtacaaactagatcgaggtattctgataaaagcttcaaattgatattgtctgggtagattgcttcttggtaaccaagatggttgtacttgctgcttcaattgtaagcaagtctggaaaagtgcttctctccaggcagtttgtggacatgactcgcataagaattgaaggtcttcttgctgcttttcctaagttggtgggtacaggaaagcaacacacatatgttgagactgagaatgtgcgatatgtttatcaaccaatagaagctctttatttgctttttgtaacaaacaaacagagcaacattcttgaagatttggagactttaagactgctctccaagctggtaactgagtattcttactctctagatgaggagggtattggcaagactgcttttgaactgatctttgcttttgatgaagtcatttgtcttgggc

SEQ ID NO: 43200 - DNA, 456 bp, Gossypium hirsutum
  Clone ID: LIB3189-010-P1-K1-C8
gaaaaacctaatgctccccaacccccccatctcttccttttctcttcagccgaaaaggccatcgtctgctcactcaatcgtcgccatggccagtggccggcgctgcggagaatgagcttttaagctccatcttgaaagaccctctcgaaggctaaaccttcagcaaccaaagagtgaggagaaagggagttctctgtccctttgtcgaacccgattacaacgacggagaaatcactccgacggcgagatcgaaagggattcaggtgagagatttttttcttcctttttagttagttttttgtttagacagatttacaaagagaaagaaaaaaagaaaatacagtaaacaaaaagaaaaaatggaaagaacccagaacaccttttttaaatctctgttttttgctttgtatttgtatttcaatgtgcgtagtatcgcgtaaaaattacatggatccc

SEQ ID NO: 43201 - DNA, 200 bp, Gossypium hirsutum
  unsure (1)..(200): unsure at all n locations; Clone ID: LIB3189-010-P1-K1-C9
gagaggaaagnactncgcgggggcatgctagcccacactgacatgcccacagccatcgccactcccatcgacaactccgatatgatcgtcacttactctcgcgacaagtccatcatacttaggcacttgaccaaagacgaaaagacctactgtgtcgctcgccgccgtattaccgaccattcgcactttgttcaagacga

SEQ ID NO: 43202 - DNA, 112 bp, Gossypium hirsutum
  Clone ID: LIB3189-010-P1-K1-D1
gcgaaatctgacaaaatcgatggcctcgcgtgacatgtaaacctgcgaagccgtcgagcagccgtgccggtggaatacgcacgctcttggatctgaaccggccctttgaccc

SEQ ID NO: 43203 - DNA, 326 bp, Gossypium hirsutum
  Clone ID: LIB3189-010-P1-K1-D2
gccatctctgtatccgtctttgcagcacccttaaacttttctgcacgagttatacgaacaaagagcgttgagttcatgcctttcaccttatcatttttcctcacattgagtgcagtaatgtggtttgcttatggactatttattaaggacctctgtgtagctctccctaacgtactaggcttcatcttggggatgctccagatgcttctctacgccatttacagacacagtgaaaaggttaacatagaggaaaagaagctaccagctgaacaaatgaaacgcatcagtgacttacttaccacattaagcgactctgtagtttaccc

SEQ ID NO: 43204 - DNA, 199 bp, Gossypium hirsutum
  Clone ID: LIB3189-010-P1-K1-D3
tcccggtcgaccacgcgtccgggtggaaccaagcctaatatttccaccatgggtgccgatcagttcgatgacttcgagcctaaggaaatgtttcaaaagctgactttctttaactggtggatgcttagcattttctttggcaccctctttttcaacacttttttgatctacatacacgacaatgtggggtggcttcttt

SEQ ID NO: 43205 - DNA, 438 bp, Gossypium hirsutum
  unsure (1)..(438): unsure at all n locations; Clone ID: LIB3189-010-P1-K1-D8
attgaaattcttctatataatttcaatttccaatactgaaatatatgtgttcatttttttgagttatttttgaggaagaagatgaagttcggtaaggaatttgcagcacaaatggtgcaagaatggcaggaagcatacatgcattacagtaaactgaagtcaatattgaaagatatcttaagattcaaacaaaaaaacaaggaaccattgacaatggctacaacaacaacaacaacaacaaaaggggcattgaatcgaagagcatcactttatagggcatttagtggacttacaaatcggtataaaccagnttctgcaatgaagaacaatgaagatgaagttatattagtgagtgcagttcaagaaggaggggttggaggggattaccaaacaatgtttcttatgccaggtgaagaaggaggtgcgttctagtttcct

SEQ ID NO: 43206 - DNA, 465 bp, Gossypium hirsutum
  Clone ID: LIB3189-010-P1-K1-E1
gacccacgcgtccgcggacgcgtgggcccacgcgttttctgacgcgtgggggcctctcattttctcgcaagccttctcagtccggcgtaactctggggaaggctccggtcgccgggctaccgtgacagacgctgattacccgcaatagcgccgcggcccatggcggctggaaaataaaaagttttcttttttgggttttttcggcttccctagtttaaaggcatctttcatcggagatgacagacctaggccaactcacggcggcagaatacgagaagtcaggtgagttttcggcccccttttttcttattttatgtttattttttaaaaaaacgcaagttaaaaaaataaagaagaagaatgaaagaataaaaagacccacctttttttatttccgattatttttctctatatttgtattcgattctctttttttcgtatttgatttctctctgtgtctcagaa

SEQ ID NO: 43207 - DNA, 329 bp, Gossypium hirsutum
  Clone ID: LIB3189-010-P1-K1-E2
gacacacgcttctgaaatcttttttcaatacacttttgctaaagatgcagatcttcgtcaaaacccttaccggtaagaccatcaccctcgaggttgagagtgctgacaccatcgacaatgcgaagcataaaattcaagacacggaaagcatcccaccacaccagcagcgggtaatcttcgacggaaaacagctgggggacggccgcacctttggcgattacaacattcagaaggaatataacctacaccttgcactccgtgttcgagggggcaagaagatcttcgagaaaaccttaaccggcaagaccatcaccctggaagtcgagagc

SEQ ID NO: 43208 - DNA, 460 bp, Gossypium hirsutum
  unsure (1)..(460): unsure at all n locations; Clone ID: LIB3189-010-P1-K1-E7
gttattgctcatgtggaccacgggaaatcatctcttaccgattctcttgtggctgctgctggaattattgcacaagaagttgctggtgatgttcgtatgacagatacccgtgctgatgaggctgagcgtggtatcacaatcaagtctactggtatctctctttattatgaaatgtctgatgactctttgaagagctacaaaggagagagacaagggaatgagtacctcatcaatcttatcgattcccctgggcacgttgacttttcatccgaggtcacagctgctctacgtattactgatggtgcccttgntggtgttgactgtattgaaggtgtctgtgtgcaaacagagactgttctccgtcaggctcttggagaaagaatcaggcctgtcttgactgttaacaagatggataggtgcttccttgagctccaggttgatgnagaggaggcttaccaga

SEQ ID NO: 43209 - DNA, 320 bp, Gossypium hirsutum
  Clone ID: LIB3189-047-P1-K1-A1
gaaaaaggaaacagaggacaagcccgagtcactgatcagaaaagacgagttatattgcgggactatctttacagtggggtaagaaacatgcagaagaagaagaaagcacccttttgtgcatgtgttaaacccgcaactaaaggagattgagcaatggttcatatcagtagagagaatttaattgcattgtccataaatatatacctttctagttgtggtggttcacatatttcttttgttacagaggcttcgttctatacttcatagattctactgtatatttcaggcaccatctaatagaaacaaattgcacttttata

SEQ ID NO: 43210 - DNA, 405 bp, Gossypium hirsutum
  Clone ID: LIB3189-047-P1-K1-A3
cccacgcgtccgaattgtttgagctagctagctcttactcaaatggcaaccaaaacgatgatgttgcgaaagattttcacttttcttctggggggtcagtatctgcaactccattttccttggtgctaatggagatgacaatggtggttggcaaactgcccatgccaccttctacggtggtgctgatgctaccggcacaatggggggagcttgtggttatggaaacctgtacagtcaagggtatggaacgagcacagcagctttgagcactgcacttttcaacaatggcttgagctgcggtgcctgctacgagctccggtgcaacaatgatcctcaatggtgcattagtcgaaccataaccgtgacagccaccaacttttgtccccctaactatgctttatctag

SEQ ID NO: 43211 - DNA, 228 bp, Gossypium hirsutum
  Clone ID: LIB3189-047-P1-K1-A7
gattattggaaggttacgccaatggttaagtctactggtctgtgtgcttgctgttatactactcaaatctgaaggcgctagtgtagggagtacttatctgcaggatgccgtagcgaaaggagctgtttgtttggatgggagtccaccagcttaccattttgacaagggctctggcgctggacttgataattggattgctcacatggagggtggaggagtggggtgaaa

SEQ ID NO: 43212 - DNA, 287 bp, Gossypium hirsutum
  Clone ID: LIB3189-047-P1-K1-B2
gccaattgtttgagctagctagctcttactcaaatggcaaccaaaacgatgatgttgcaaatatttcgacgttttcttctttttggtcagtggcgtgcaactccattttccttggtgctaatggagatgacaatggtggttggcaaactgcccatgccaccttctacggtggtgctgatgctaccggcacaatggggggagcttgtggttatggaaacctgtacagtcaagggtatggaacgagcacagcagctttgagcactgcacttttcaacaatggcttgagc

SEQ ID NO: 43213 - DNA, 371 bp, Gossypium hirsutum
  unsure (1)..(371): unsure at all n locations; Clone ID: LIB3189-047-P1-K1-B3
gcgctcacatcccattcgatcaaaagaactcaaatctttatcatccaccatgggaggaggaaatgcccaaaaagccaagatggctcgtgagaggagcttgnaaaagcaaaaagctgccgccaaaggaagccagcttgattctaacaagaaggccatgaccatccagtgcaaggtgtgcatgcaaacattcatctgtactacaacagaagtgaaatgccgggagcatgctgaggcgaagcatcctaaatccgacctatacacatgttttcctcaccttaaaaagtagcacactggggaagtggagatggcttgtagcatgcatctatcttgtnccattggtactgtatgagttacttctttaaaatctctct

SEQ ID NO: 43214 - DNA, 160 bp, Gossypium hirsutum
  Clone ID: LIB3189-047-P1-K1-B9
ctctatttgttttttttttttaaacttttctttacattgaatttgaattatttgtgtaatttatctgctgtttgctcaattgcgtgtgggggttgcccaataaaattggggaagttccgtaattctgtgtttttttagggttagtgttggtgatgctggg

SEQ ID NO: 43215 - DNA, 344 bp, Gossypium hirsutum
  unsure (1)..(344): unsure at all n locations; Clone ID: LIB3189-047-P1-K1-C1
tatatataatatactattaatatttacaaaaagagaaagaaatagggggagagagaggtgtatggttgtttgagcggatatggggatggtgttggggtganttattcctctcttctgtagtttgtgctttttttgcccggccttttgcaccaaatctattcattcgggcaaacattacatgatttttctcgcccatttctttcctcaatcttcttactaacaacctaattaacgaattattgtgtaactattttaatattctttcaagaattctcttcatattccattaataacaagtgcatttttgcataaattttacaattattctctaacttttcaatttt

SEQ ID NO: 43216 - DNA, 104 bp, Gossypium hirsutum
  Clone ID: LIB3189-047-P1-K1-C2
cccacgcgtccggttccttgtcatgaaatttcaggtgttgtgaccaaagtggggaagaatgtgacaagattcaatattggtgaccgggttggggttggggtttt

SEQ ID NO: 43217 - DNA, 433 bp, Gossypium hirsutum
  Clone ID: LIB3189-047-P1-K1-C3
caaatgtgtagttgcattgaaaatgaaagtcaaatcacttcaggttcctatacaagtgaataagtacttggcatatagtgatggaatgcgagttattgaatcagggaagctgtccgtacagtccacagcttcatatgttttaccacatgccgaactggaccagccaaatggttaaccttgtctcgattcagaggagttcaaaattgtcaacgacttaaatgaggctatttctcaggaacgttacaaggatgctgctgatttgagagacaaacttgataagttctgggcagcaaggaacttgaggaaattcacgtgacagttgtttatgctagagttttcaagtgtaaacagcaattattggtgaagctgacatctatcgatccggcagcaagcaattgtttctcatccttttttattaattcatatcaattta

SEQ ID NO: 43218 - DNA, 389 bp, Gossypium hirsutum
  Clone ID: LIB3189-047-P1-K1-C7
gtaagatccagactccaactgatgaagtggttgttccttatgacaccttgtctccctctcctgaggatcctgctgaaaccaagaaaggtgttggacaaacttgttgtcttaaagcttaatggaggtcttggaaccactatgggatgtactggtcccaaatccgtcattgaagttcgcaatggcttgacttttcttgacctaattgttattcagatcgagaatcttaattctaaatacggatgtaatgttccgttggttctgatgaactcattcaacacccatgatgacacattgaagattgtcgacaagtactcaaattcaaacattgagatttatactttcaatcagagccaatatcctcgtctggttgttgaaaattttacttcatt

SEQ ID NO: 43219 - DNA, 438 bp, Gossypium hirsutum
  Clone ID: LIB3189-047-P1-K1-C9
tttctcctttcttcctgttggagagattagtaaaaaccaaaaatggggagagaagtatcagaaaggtgcattgatagcctactaatcggaatggtttccacatattgcaaccgtttttacgccaataagcctgagctcgctgctcgtcggatcgaagccattgggtatcaggttggccaccagctctctgaacggtacacgatggagaggccacgttttagtgatcatttagaggcaatcaagttcatctgcaaggacttttggtctgaactctttaagaagcagatagacaacttgaagacaaatcatagaggtacctttgtattgcaagataatcgttttcgttggcttacacgcatgtcaatttgatcaatcacctgaaaatggagcatctttagagccttctatcattgctgatgagaaggctgtggaaagcat

SEQ ID NO: 43220 - DNA, 430 bp, Gossypium hirsutum
  Clone ID: LIB3189-047-P1-K1-D2
cctaaatgattccccaatggctaagatcaccaagcagggcagcaacaacaaaccccacaaagtcaccttcgcgatttctctttctcttcattcagagacattgatgctatcctcaaagaagaagaacaacaacaagtcctctatcctcaatcccctaaaagaccctccattttccaccgtgtcaagctctccaccaccgtcttacgcgcctggtccttcttcaaccgccgtccacttactctccccaacgctgaccaacgcgtcgttgtttacctcaccagcctccgtgtcgttcgaaaaacctttgaagattgcaagaccgttcgatcaatccttagaggactcaatgttcccatcgacgaacgagatgtgtcattggattctagtttcttagacgagttacaagggaccattgggcgtaacaaaagtt

SEQ ID NO: 43221 - DNA, 335 bp, Gossypium hirsutum
  Clone ID: LIB3189-047-P1-K1-D3
aaaaaaaaaaaaacagtgagatctgctacgagctgattcgaaaatggagtatcgcaaaatcaaagatgaggataatgatggaggaacagggagtaatgacattgagaatctacgaggcatagggttttcgggggttgcttctgtaagtaatgttcctccaagggaacaggccaagtggaaacgcaagacagttgttacagttgcattgacttttcttacaagttcacaagcaatacttattgtctggtcaaagagagctgggaagtacgagtacagtgttaccacagccaactttttggtggagactttgaaatgtgctttgtctcttgcaaccc

SEQ ID NO: 43222 - DNA, 460 bp, Gossypium hirsutum
  unsure (1)..(460): unsure at all n locations; Clone ID: LIB3189-047-P1-K1-D7
aaattatacaaagcatcatcatccattgaaaagatcttataagaaaaagaaaaaaaaaactctactgtgtggttttttctatgagtggggagacattnatactatcctcaaagaagaagaacaacaacaagtctttttttctttatcaataataaacctcgatttttcaccttttaagctcttcaccacgtgttaacaccttttcttcttaaacgcgttcacttcttttcccaaacttaccaacgcgtgttttttacctaccagccttcgtgtcgttcgaaaaacctttgaagattgcaagaccctttttattatttcttatatttttttatttttttcatttacttatcttaataataaattaataaatttaatttttttatactattattacatatttactatttattcatataaaattaattttactttattttttttttttcattttcattcaatt

SEQ ID NO: 43223 - DNA, 226 bp, Gossypium hirsutum
  unsure (1)..(226): unsure at all n locations; Clone ID: LIB3189-047-P1-K1-D8
atttaattcccgttttccaatcttttttgagaaatctgtagcgaaaaatgtcgtcgtcggggattgatatcacccttaagagctcaggcggcgaatcattcgaggttgatgaancggtggcgttgcagtctcatactttttaccctattttccttccacgggggcgcttattacttttttctttttcccttatttcctatcaaaatcttatccaatgttttccctc

SEQ ID NO: 43224 - DNA, 313 bp, Gossypium hirsutum
  Clone ID: LIB3189-047-P1-K1-D9
gaaaaagcagctcactttctccttcatcaaaccccaaaaacctagctttgcctcctttataatttcttggattttggtgaactttacgaatccaagatcagagtataaaggattcgagttttaacccagaattaagtacttctgttctttttgatctttgggttgaaattgtctacacaaagagggtgatttagaaatggatgctgatccatggactctttgtttttcttcaactgctaggagatatcaatcagatcttcagtgacgatctgatatgtttattggtttcatccttaaattattttattatttc

SEQ ID NO: 43225 - DNA, 330 bp, Gossypium hirsutum
  Clone ID: LIB3189-047-P1-K1-E1
gcgcacaaaagaaaccctaaagacgctccgattcccagaaaaccgaaatgaaaagggaccaatcgcacttgatagttcaataatacgtggaggtgtttatgtaacaacagcttagcaaaatttaaaaaagaaaaattcccccttctgtctcgatccaggatcagaatttccaggtaataacataagaattttcatgggtatttatttgttttaattttaattgattactactagtatttttttttttcgaatttttaacagttaacctgattgcttcaacagtaaatttcgattcatcatctttaattttcttttttcttcttgattaat

SEQ ID NO: 43226 - DNA, 468 bp, Gossypium hirsutum
  Clone ID: LIB3189-048-P1-K1-A10
aatacttctagatcgctaacaaaataccttttttttttttttttacttacataaatattatgtataggttcaaacaagtaaatggtgatggggattaataaattttaaataatcttacatttaattactaaaatttttctttatactaactatattgaactcgttgtatttaacaatctatttatttaaaatgattacattatatacatttttaaatactaaatctttcacttttaatttaatcactcatatattaattatattactctaaaatctcttttttattaaaatatcttttaatttttttaatcttgtacttatttataatttcatatattaaattttttattatttttttttattatactatatttattatttactatacatgttttttatattttaattttatttattttaaaattttatctatttttttataaaatttattattttatatttttttat

SEQ ID NO: 43227 - DNA, 477 bp, Gossypium hirsutum
  Clone ID: LIB3189-048-P1-K1-A11
ctcgttccccatcgacgcctctgcttatcgcatcatcagccatgtcgaggagaaaggttagggagccaaaggaagagactacagcgccttgggcctgctgtacgagacggagagcatgttttcggtgttgcccacatttttgcatcttttaatgacactttcattcatgtgactgatttgtctggaagagagactatggttcgtattacaggtggtatgaaggtgaaagccgacagggatgaatcttcaccttatgctgctatgcttgcagcacaagatgtttcccagagatgcaaggaacttggaatcacggccctccacatcaaattacgtgccacaggaggtaacaaaaccaagacccctggtccgggtgctcagtcagctctcaaggctcttgctcgctctgggatgaaaattggccgtatcgaggatgttacacccattccgacagatagcacccgaagaaagggtggtaga

SEQ ID NO: 43228 - DNA, 196 bp, Gossypium hirsutum
  Clone ID: LIB3189-048-P1-K1-A4
gcgcccttctttatctttcccacggaaacgaagagcaatcatgaaaaccttgtgaagaaaaaatgagggaaatgttggatatccaaggaggtgcagtgggcgagccagatccgggctaaattctcggaagtcatatgacatccgcatggaatctacatcacttgaaatgggtagggggtcttctaatctccttttt

SEQ ID NO: 43229 - DNA, 423 bp, Gossypium hirsutum
  unsure (1)..(423): unsure at all n locations; Clone ID: LIB3189-048-P1-K1-A5
ggccagatctatgatgtttctcaaagcagaatgttttatggacctggtggaccttatgcgttgttcgcgcggaaaagatgcaagcagagctcttgcaaagatgtctttcgaagaaaaagatctgacaggtgatatttcagatctcggtccattcgaattggacgcattgcaggattgggagtacaagttcatgagcaagtacgtgaaggttggatccatcaagaagacaatggttccagtaaccgaaggggatgccagtggtgaagcctcangagctgcagaaactgatactaagcaaactgaagatggtccatcacaaactccagttactgagtcagaggaaaaatcttctcctganatactaangaggagaacatgttnagctttagctgttctgttcaacagtgacactcgtgactggca

SEQ ID NO: 43230 - DNA, 467 bp, Gossypium hirsutum
  Clone ID: LIB3189-048-P1-K1-A6
gagagagagagaaacacagagagggagaaatggttgctgtgaagctacagaatcggctctccgcgagcgttctaaagtgtggaaaaggaaaggtttggctcgatcctaatgaagtcaacgagatctctatggccaactcccggcagaacataaggaagttggttaaagatggttttatcatcaggaagccaaccaagattcactctcgatctcgtgctcgtcgcatgaaggaagccaagagaaagggacgtcactctggatatggtaagcgcaagggtacaagggaggcaagggtgcccacaaagatcttatggatgagaaggatgcgtgtacttagacgcctactccgcatgtacagggaatcaaagaagattgacaagcacatgtaccatgacatgtacatgaaagtcaagggtaatgtgtttaagaacaagagagtgctcatggagagcatccacaaatccaag

SEQ ID NO: 43231 - DNA, 323 bp, Gossypium hirsutum
  Clone ID: LIB3189-048-P1-K1-B10
aaagaatcatgatattggctttgtattcactgaaaagggttttcaggacaagggttaaacagagagaaagctacatagctgacactcatatgaatgaaagaatgaagacatttgagttttgtttactcaaacattgggcaaggcttgaggaaccaaaatacatccaacgcccttgcttggcttccatccgtaacattaacattattaataacagaagaacaagaagatacactgcttgctgctttttctggcttaatatccttggtttgcttcacttcttgaaggatttcccttttcataaatttggatctggaaaccttgga

SEQ ID NO: 43232 - DNA, 173 bp, Gossypium hirsutum
  Clone ID: LIB3189-048-P1-K1-B11
aaataaaattttaggttcatgtgttgattttgccaagggattgggtaccataatacttatcatcatattaaagccagtgctttttttgtttgatggtcttcacaaaatacacgttaacatgtaaaatactgtacgataggggaaccagatttcatactcttcctcttcttttc

SEQ ID NO: 43233 - DNA, 397 bp, Gossypium hirsutum
  Clone ID: LIB3189-048-P1-K1-B4
gttctagatcgcgggcggccgctcgcgatctagacggtcgcgtgggtgaaggtgtcttaataaacgccggcgatttaccttcgattgccatggactggtctattgctacgtttttgaatttttagtgagcgaaaatgagagagtgcatttcagtccacattggggaggctggtattcaagttttaaatgcctgctgggaactttactgtcttgaacatggaattcatccttatgtcctaattccaagtgacaatactgtcacattaagtgattatactttttacacctttttttattcaaacttttactttaaatctacaattccttgatgtagtattttttatttcacgattcctaatctctaatctatctaattacttaactatatttctctata

SEQ ID NO: 43234 - DNA, 363 bp, Gossypium hirsutum
  Clone ID: LIB3189-048-P1-K1-B5
cggacgcgtgggttgcagaggccagcgttttacttgtgacatgcattgtcctgttttcaggacatggcgtctttgctttctcctatgacgaggctgcaacaatggagtgcttggcagcgcccaagagagctcaatatggtggagggatgattgggttcaatcaaagaacaaatggatccacattgtcgagtgaattaggagtttcaaatgatgggttacacaatacaacactctcattgaagactgtaaagctcgagaaaggaaatttatatacattttcagctttgggttcaaaatcagcaatggggagtgaaaagtgagacctgtaactgtgtgcattcaagggttttaaatggtgaattt

SEQ ID NO: 43235 - DNA, 258 bp, Gossypium hirsutum
  unsure (1)..(258): unsure at all n locations; Clone ID: LIB3189-048-P1-K1-B6
gtgggtgagcagtgaagaaagatgatggaaattggttttattggtttggccttgacagtggtgtttcgcctcaacagtggttacggggggtgacnaaaatnnnttanccaatgattncaacaaatattttcagaacgtgatgactttcttaaactttggttaaggaaaagcaaattcttcataataagaattttgtaaattaatagtttataattataaaatattaaactctaaatatttcagtttatattttttaat

SEQ ID NO: 43236 - DNA, 479 bp, Gossypium hirsutum
  Clone ID: LIB3189-048-P1-K1-C10
gttactctcccttcttctccttgtaaacttcatttttatctatcaatctcattcttctccagataacagtgtcaccaaagctcaatctcagatcaaaccaaagaaggttcatttgtctctgtattatgagtctctatgtccatattgccggagtttcattgtaagtcaacttgtgaaggtcttcaacactgatcttctcaatattatcaatctcaggctagttccatggggcaatgctcaatatgtaaaacctaagaagaccatcatttgccagcacggtgaagatgaatgttacctcaacactatacatgcctgcgccatcagcatctggcctgatccgagaaagcatttcaactttatctactgtattgaaaatcaaggccttcccatcaaggataatcagcactctgacggtatggaagcagtgtggaaagcctgctctgccagatccggtatggatcagaaactcatcaaggact

SEQ ID NO: 43237 - DNA, 366 bp, Gossypium hirsutum
  Clone ID: LIB3189-048-P1-K1-C4
acaaaatcagcgggtagagagagaaagcagagcaagggaagggaaaaggaagggaaagggaagctttatataacccatctcctttctctctaaacgctcttcctttccatctttcctttctttgctttgcttgtttctattgagagatttccactaacaaaagctctagacttttgtcttccccatttttctctcaccatgatttccttgcacagaagctgttttctgaataacactggcatttctgggtcatcaagccctttctcatacaagctgaagaagctgccaccagcttcagtcaaagtcacagctttaggccccaacagggatcgaaacagcagcgttttgattgaaaacaacaactca

SEQ ID NO: 43238 - DNA, 382 bp, Gossypium hirsutum
  Clone ID: LIB3189-048-P1-K1-C5
cccacacgtccggggttacagaatctgccaaaaaatggttttttttttaaaaaaaaaataaattttcagataacgcgcctactttctctctgagccctcttacttaacatatttcctttctttactttacttatttctatttaaagatttccactaacaaaagctctacacttttctcttccccatttttctctcaccatgattcccttacacaaaaccttttttcttaataacactaccatctcttcatcatcaacccctttctcatacaatctcaataacctttcaccatcttcattccaactcacatctttaatccccaacattgatctaaacattatccttcttattaaaaacaacatctcatttaaagaaataaaat

SEQ ID NO: 43239 - DNA, 130 bp, Gossypium hirsutum
  unsure (1)..(130): unsure at all n locations; Clone ID: LIB3189-048-P1-K1-H2
aaccgccattttgagccaaacttcgacttcagaaaaggcttctccggcgccgcgacggtgagtttaggtatgacagacgtggcttggacgtggtacgtggggatgtgcgtggtgaanggtggtggaggat

SEQ ID NO: 43240 - DNA, 401 bp, Gossypium hirsutum
  Clone ID: LIB3189-048-P1-K1-H3
aaatatccagattaaaacgaaactaaatgaagatcttcttcctttttctcttgttttgattctttactgcgttggtgaactcttggttcgctggcagtgtaacctatgaccgccgctctctcatcattgatggccaacgcaagcttctcatttccgctgccattcattacccccgcagcgttccggcgatgtggccagggctggttcaaacagcaaaggaaggaggggttgatgtcattgaatcttacgtattttggaatggacatgagctttctccaggaaaatacaattttgaagggcgatacgatctagtcaaatttgtaaagattgttcagcaagccgggatgtatatgattcttcgaattggcccctttgtagctgctgaatggaattttgggggg

SEQ ID NO: 43241 - DNA, 296 bp, Gossypium hirsutum
  Clone ID: LIB3189-048-P1-K1-H7
atattctgtttactcgatttgcaatcgttaatttctgcaggcctagtctgcaggtcatggactttaggagcaaatgataaccatgtatgggaattgcaatatacgatattctttggcagatcaaacaattcttctagaactaagacacagtggagtggtaaatcggtaaacaaggattatacattttggaaggagaatgtgaatactcgaactgatattgatctggaaagagacccttaaaaccacatatggaggcgactattcaaagccaattaatgtccagatggtaatactga

SEQ ID NO: 43242 - DNA, 379 bp, Gossypium hirsutum
  Clone ID: LIB3189-048-P1-K1-H8
ccgccgtccccggaatatcgtcggaggttcgatctatgtcgccgggatattcttcaaaccaacagctgtgtctttagtcgaaaggggggggggataacttgggagcccaacctggggtgcctaggccgcctgtaaatcctcaaccaacaccatttggtaatgcatgttatggtgctgaatctgttcttattctaggtcttcaaagtgcatatctgtagacaacttttctaccaatttcaatattagttttaaaacgttgttaatctgtcatttttcttatcatttcctaattcttgcgtgagttcttgtattatatctattttgtttatcgtgttgatggattttttacttcctatttatttcattttattattcttct

SEQ ID NO: 43243 - DNA, 405 bp, Gossypium hirsutum
  Clone ID: LIB3189-048-P1-K1-H9
cccacgcgtccggtttgctctgtatattgaaattttctttctcgattttctctttagccaaaaaagatgcagatcttcgtcaagactctggccggcaagacgatcactctcgaggtcgagagctccgacacgatcgacaacgtgaagaccaaaatccaagataaggaaggcatccctccagaccagcagcgtctgatcttcgccggaaaacagcttgaggacggccggaccttggccgattacaacatccaaaaggaggcaactctccacctcgtcctccgtttgcgcggtgggatgcaaatcttcgtgaaaaccttgaccggcaagacaatcactctcgaggtctaaagctccgacacgatcgacaacgttaaggctaagatccaagactaggaatgcatcccc

SEQ ID NO: 43244 - DNA, 447 bp, Gossypium hirsutum
  Clone ID: LIB3189-049-P1-K1-A11
aatatctactatatcattggtaattgctgctgtagtagagatgcggaggcttaaaattgcggaagaacatggattgatagacaagccaattgtggtggttccaatgagtatatcgtggctggtccctcaatacgcattgtatggattagctgatgtcttcaccatggttggtcttcaagaattcttttatgaccagatgccaaatgaattaaggagtgtcggtcttgcactctaccttagcatcttcggtgttggaagcttcttaagtagttttctcatctccgccatcgagaacttgaccagcagggatggccgagatagctggtttgcaaataatctgaatagagcacatcttgattacttttatttgctgcttgctgcgcttagtgctgtgggattgactctctatgtatgttgtacaaaatattacatttatgctagatgggg

SEQ ID NO: 43245 - DNA, 340 bp, Gossypium hirsutum
  Clone ID: LIB3189-049-P1-K1-A12
aagaaaatggagcagtggtggtggtatctttggtttacaatcatctctttgtttggtgcaagtttggggaactggattcacaggtggaggaaccctaaatgcaacggcaaactccctccaggttccatggtactcccacttataggagagacccttagtttttttgtcacttccaactccattgacatacatccttttgtcgctcaaagaatgaaaaggtatggttcattgttcaagacgagtttagcagggagaccagctgtggaatcattagatccagatttcaactattacctgctgcaacaagaggacaaacttgtcgcactatattacatggatt

SEQ ID NO: 43246 - DNA, 274 bp, Gossypium hirsutum
  Clone ID: LIB3189-049-P1-K1-A4
ctagaaccttctatctctctgttctccttcattccctaatttgaaagaaaaaaaaatggagatcgttttcgataattatattgtcggcacgttcttggtttccctttttgccttcctttttcttttcattttgcggcgctataataataataataatgataataacaccaggaagaagagattcgagaaagggtattctagggaatttaagatccaaaccggtaccggcaaaggagaatgctcgcctggaaatggttccggcgatgaagtcatt

SEQ ID NO: 43247 - DNA, 294 bp, Gossypium hirsutum
  Clone ID: LIB3189-049-P1-K1-A6
gtgtccagacactagagaaaaggatcggatctcatgggctgggcacgggggaaccagtcccgaactggttgggtgtctgcgcactgctagagctgctcccgcggcgagagcgggtcgccgcgtgccggccggtggacggactgggaacggctccctcggtggccttccccgggcgacgaacagtcgactcagaactggtacggacaaggggaatacgactgtctaattaaaacaatgcatcgcgatggtccctgcggaggctcacgcaatgagatgttctgtccagtccgccat

SEQ ID NO: 43248 - DNA, 441 bp, Gossypium hirsutum
  Clone ID: LIB3189-049-P1-K1-B10
gaaaaaaaaagtgaaaagggtaatggtgttgctcctgctacaaggtctccaatggctttaatggggtcatctagaaatgaaaaccaagaagtgaataccagcatgagaactgccgagaccatgctgcggttggtgcctatggctttaggggttgctgcacttgttgtcatgctcaaaaactcacagtccaatgactttggctccgtttcatactcagatcttggtgctttcaggtacttggtgcatgctaatggtatttgtgcaggctattcccttctttcagctattatagcagctgtgcctagtccttctactatgcctagagcttggactttcttcctactcgatcagattctaacatacgtaatcttgggagctgctgctgtttcaaccgaggtgccttacttagcaaacaaaggagactcagccatcacttggagt

SEQ ID NO: 43249 - DNA, 318 bp, Gossypium hirsutum
  Clone ID: LIB3189-049-P1-K1-B11
gaaaaaaaaagtgaaaaggataatggtgatgttgtctcttcagggcctacaacggatgtaatgggtgtgatttataaatgaaaaccaagaattgaataccatcatgagaactgccaagaccatgattcggttggagcctatggcttaaggatatggtgcaatcgtagtgatgatataagactcacagggcaatgacttggactccgttatatactcagatcttggtgctttcaggtacttgcagcatgctaatggtatatgggcaggctatttccttatttcagttaattttagatatgtgcctagttcttctactat

SEQ ID NO: 43250 - DNA, 406 bp, Gossypium hirsutum
  Clone ID: LIB3189-049-P1-K1-B12
gtgaatttgcaaccgaaaaccgaatcaaaatcttcgcaatctcatccagctacaaaaaagaaaaatggatctcagaatcatgggtttcgattctccgctcttgaatactctccaacatatgatggatctttctgacgatacggagaagatcccgaacgcaccatcaaaggtttacatgcgggatgccaaggccatggctgcaacaccagcggacattaaggagtaccccaagtcttatgtgttcatcgtcgacatgccggggctgaaatcaggggacatcaaggtccaagtggaggacgacaatatgctcttgatcagcggagaaaggaagcgagaggaagagaaagaaggagccaagtacgtaagaatggagaggcgggtcggcaagcttatgaagaaatttgcg

SEQ ID NO: 43251 - DNA, 206 bp, Gossypium hirsutum
  Clone ID: LIB3189-049-P1-K1-B4
aggagacagggttcgtgtggcttaaacagaagaagagctaacctcacaagtttgaaaagattgggaagcctggttcctatgcaactgaagtcactgcaccgattgagaaaaacaggataaagaagctgaatggggttaagagcactgatcggagagacccttagacaccttggcacttccaactccattgacatccatccttttgt

SEQ ID NO: 43252 - DNA, 191 bp, Gossypium hirsutum
  Clone ID: LIB3189-049-P1-K1-B5
tcgatccgtcgaccacgcgtcgtcggacagggaatccgactgtaaaaaactagtttgcatggcccgcggatgctcacgctgtgattttgccaggcttgagtacacgaaaaactgcaacacgtgaacgggctatcattacttttaaggaccaatcctcgtattaataggaccgcatgaggataacagattca

SEQ ID NO: 43253 - DNA, 454 bp, Gossypium hirsutum
  Clone ID: LIB3189-049-P1-K1-B6
ctgccattttcacaaaaaacaaatcagatccctaatgttagggcttcaacttggagacaccgctgaaccgtcttgtctcccaggtcatttcctccttgactgcctcactgaggtttgatggtgccttgaatgtcgatgtgactgaattccaaaccaacttggttccctacccaagaatccacttcatgctttcctcgtatgctccagtcatctctgctgagaaggcttaccacgagcagctctcagttgctgaaatcaccaatagtgcctttgagccctcatctatgatggctaagtgcgatccacgccatggaaagtacatggcttgctgtttgatgtaccgtggtgatgttggtcccaaggacgtcaatgctgcagtcggctccattaaaaccaagcgcaccattcagtttgtcgattggtgtcctactggattcaagtgccggatcaacta

SEQ ID NO: 43254 - DNA, 166 bp, Gossypium hirsutum
  Clone ID: LIB3189-049-P1-K1-B8
cccacgcgtccgaattgctgaagtttagtatttaatcctcggcttcgctgttaaacaagctcatgggtgcggatccatttttcttgttagcgggtcccaatgtgattgaatctgaagatcacattctaaggatgggttgttacattaagaatattacttacaaact

SEQ ID NO: 43255 - DNA, 447 bp, Gossypium hirsutum
  Clone ID: LIB3189-049-P1-K1-C10
cccacgcgtccggtttttttcttcttttcccatatttaaaggttaaatacagaaaaaaaaaaacccatagagccccctttcctttctttctctctctttcattagaaagaaaaccaaagatcatcaaaggagaagaggaggagaggagaggggcaaccttaaataccgtacctcagcaactctctccatcgcaaacaaatctctctttttcaatctaccatggcggataagggtcgcccattgccaaaatttggtgaatgggatgtcaatgacccatcatcagctgagggctttacagttatcttcaacaaggctcgaaatgagaaaaagacgggtggaaagattgagtcggcaggggccaatgaccctgcatgcaagcaagaggctgtcggttgaaaaccccaaaaaaaatgggtatgctgcgtacaagctacttatgcagactaa

SEQ ID NO: 43256 - DNA, 246 bp, Gossypium hirsutum
  unsure (1)..(246): unsure at all n locations; Clone ID: LIB3189-049-P1-K1-C11
accacgcgtccgcttcctttctttttccccttttattaaatttcaaacacagaaaaaaaaaaacgtgtagagttttnataacctttctttctctctctaacaccagaaagaaaaccaaagatcatcaaaggagaagaggaggagaggagaggctcaaccttaaataccgtacctcatcaactatctccattgcaaaacaaataaacttatttcaatctactcatggaggataaagcccatccattg

SEQ ID NO: 43257 - DNA, 454 bp, Gossypium hirsutum
  Clone ID: LIB3189-049-P1-K1-C6
atgctttgaatctcctcctcctttttgggtttcaaacgatcctttatttgggcgattaacagcagtttaccatggctgttatctcactgaattcactgccaatcggaatcagattccgaccaacggacgaggagttaatcgatttttacttgcgagctaaagtgaacgggaaaaggaaagatgagatcggggttatacgggaagttgatttttgtaaatgtgaaccgtgggatttgcctcatttgtctgctgtaaaggctcgtgacccggaatggtttttcttttgcccactggaccggaagtatccgaatggaaaccggcttaatagggctaccgaggcgggttattggaaggctacgggtaaggatagaaagataaagtctgggtcttgcttgattggcatgaagaaaactttggtgttttatacgggtcgggctcctaaaggggagcgaac

SEQ ID NO: 43258 - DNA, 216 bp, Gossypium hirsutum
  unsure (1)..(216): unsure at all n locations; Clone ID: LIB3189-049-P1-K1-D4
aatctccaccaccgcgttgccgtcgtgcatacttnttacatcagctcttattcttcaattgtgccgaaggatttgtcgttcgaagttccagataaaacggcggagactagaagcgacgggagtctggccattttcgctacaattaaggttccggcgaatttagcggcgaaagggacgattaatcaagtgtggcaagttggcccccgtgttggagaa

SEQ ID NO: 43259 - DNA, 176 bp, Gossypium hirsutum
  Clone ID: LIB3189-049-P1-K1-D6
cgcgtccgctttaagatatcataaaaaggaaaaaaaaatgaagtcgctgggtctaactttgctgcttaggtctgtgctggtatgttcttcaggttttgaaccaacaatggctcagcctcgttcacctttttgtgaagggaaatgcaaagggaggtgcaataaagcggcgggttggg

SEQ ID NO: 43260 - DNA, 239 bp, Gossypium hirsutum
  Clone ID: LIB3189-049-P1-K1-E11
gcgaaaccctagccactctctgctcaactcgctcaatgggggcttataagtacgtgtcggagctatggaggaagaagcagtcggatgtgatgaggtttttacagagggtgaggtgctgggaataccgccagcatccatcaattgttagggtcaaccattctactcgccctgacaaggcacgccgcttgtgttataaggccaaacaaggttatgtggtataccgtgttcgtgtttatgag

SEQ ID NO: 43261 - DNA, 165 bp, Gossypium hirsutum
  Clone ID: LIB3189-049-P1-K1-E12
gtcctattccggtcgacccacctcgatcaatctttcgaatctcgacgctaagctacctactgtgttccatcgatcttggcaaagagagagcttaaagaacctttgagccctcgctcaagaacatgctgtaagaaccgatatgtggtggaattcatgactgaaatg

SEQ ID NO: 43262 - DNA, 175 bp, Gossypium hirsutum
  unsure (1)..(175): unsure at all n locations; Clone ID: LIB3189-049-P1-K1-E6
tttccggtcgaccacgcgtccggattaaggaagctgattggagcccctgtttacaccgatacgatgttcaaagacacagcanaatgtgagagcggtctttgaagcgggcatcaaagccgacccacagccaccaaagcagaataagaaaaagaagagaaagtcacaaacagcctgc

SEQ ID NO: 43263 - DNA, 98 bp, Gossypium hirsutum
  Clone ID: LIB3189-049-P1-K1-F1
tcgatccgtcgaccactcgataatttgaagccttcttcgaatttcctcattagatcaattttcgcaagaccctaccggaaagaccatacattggaggg

SEQ ID NO: 43264 - DNA, 258 bp, Gossypium hirsutum
  Clone ID: LIB3189-049-P1-K1-F10
ctctgctcgaaatcttcttcattctcattcttgctcactgaactcttgctaaacggtatcgttttagtcagtctttcatcaatggcgaaagaaccagttcgcgtcctcgttactggagctgcaggacaaatcgggtatgctcttgtacccatgattgctaggggagtcatgttgggtgctgaccagcccgtgatccttcacatgcttgatatcccacctgctgcggaggctttgaatggtgtcaaaatggatttggtg

SEQ ID NO: 43265 - DNA, 274 bp, Gossypium hirsutum
  Clone ID: LIB3189-049-P1-K1-F3
caactttttccttttggcagttaagtgaaacgatgccttactactcgaggggtggcgaagatgacgttgacgagttcgacgaattcgatccgacgccttacggtggtggatacaatctcgaactaacttatggtcggtctttggaacccttcgatgagacttgctacccttccgctacaccctccgatggcgactttgattactcacgtcccgatttctctttcggttacccgcacttaacttatgccgactaagcccttgtaactgtatacaa

SEQ ID NO: 43266 - DNA, 61 bp, Gossypium hirsutum
  Clone ID: LIB3189-049-P1-K1-F4
aaacaaacgactgttggcacataacagaaacgcagctatattacacgaggagaggggacga

SEQ ID NO: 43267 - DNA, 427 bp, Gossypium hirsutum
  Clone ID: LIB3189-049-P1-K1-F6
cggacgcgtgggggcagaactagggtttcggccgcttaatacagttgtatataaactccttaaactctcactctcgcataagcattaagcaccgaggcacacactaggaggcgacgaactctgaggcggaaaagttacacaaagatggagcaaacattcatcatgatcaagcctgatggcgtccagaggggtttggttggtgaaatcattggcagatttgagaagaaaggtttctatttgaagggtttgaaactcatcaccgtggatcaatcttttgctgagaagcactatgcagacctctctgcaaaacccttctttaatgggctcgtaaagtacattatctctggtcctgttgttgctatgatttgggagggtaagaatggtgtcaccactggtcgcaagaatattggaggcacaaaccctgctg

SEQ ID NO: 43268 - DNA, 390 bp, Gossypium hirsutum
  unsure (1)..(390): unsure at all n locations; Clone ID: LIB3189-049-P1-K1-F7
gtcgtagaccccctcaaaaccaacatcacaatttttggttctctcgncctcccatcctccgggcagcgtcttcttcttcgccaccctaattcgccgccatttctttggcggagataaatccaaaacctccctatcaccgtcgtcgaagccatacatccccgactacaagctcgccttcgaacacttctgcgtccacgccgcaagcaagacggtgctagacgagctgcaaaagaacttggaactcagcgaaaacaacatggaagcatcgaggatgaccttacaccggttcggcaacacatctagcagcagcatatggtacgaattggcttaattggaagctaaagaaagggctaatagaggggataggatctggcaaatagcattccgttc

SEQ ID NO: 43269 - DNA, 190 bp, Gossypium hirsutum
  unsure (1)..(190): unsure at all n locations; Clone ID: LIB3189-049-P1-K1-G10
gcgtccgctcacttttcttattcagatcgatcatggccttnatggcctagcctgataaacacaacagaatgggggtttccttctctcagtaacctccacccaaaataaatccacttcattcgaacccgaattttcctttcaagaacccagattttcttttttcgtacgggattaccgggcggttgcccga

SEQ ID NO: 43270 - DNA, 289 bp, Gossypium hirsutum
  Clone ID: LIB3189-049-P1-K1-G11
accgaattgaagttccgagcagagccgcacccgccacgcatacgaaaaaagttagaaactctctgcagtggggaaaagaggggctccagcaccttccaccagagttacatttgaaaaggcttacgcacctcacgcgccaccacagaccgggttttacactaagaacccttgctttcacaaaagcctttccactgttctaaaagatctgaaatatgcggattctcatgagtgggtgaaggttgagggtgactctgccactattgggattactgatcatgctcaagatcat

SEQ ID NO: 43271 - DNA, 254 bp, Gossypium hirsutum
  Clone ID: LIB3189-049-P1-K1-G3
gcaaagcatacgagatgctgagacaaaatgcagcatgggtttgctggatgatatctacagaaatcctggacccctccagtttgatggtccaggtgctgatgctaaggctgtgacattatgtgttgaagaccaggattacatgggccgcatcaagaaactgcaggaataccttgacaaggtccgtaccattgtgaagcccgggtgttctcaagaagttctgaaagcttgtttaagtgtaatgggttctgtgacag

SEQ ID NO: 43272 - DNA, 248 bp, Gossypium hirsutum
  Clone ID: LIB3189-049-P1-K1-G4
tccgaccgagtatcacaccagctttcgcatatcagcaatggtctcctgctctacgaccactaccgtaaaagtggtactcttttgtacaccggcgctatctccatcgaccaagccaaccgatcttaaaacacgctctacatcatcatcggcctcacgtaattcgccgattccaaaatcactgagagctcatcatgtctttacaagggccaacgccattgtcgccaagaaggggacagtcccttcggcag

SEQ ID NO: 43273 - DNA, 263 bp, Gossypium hirsutum
  Clone ID: LIB3189-049-P1-K1-G5
gtcctattcacggtccacccacgcgtcgatcacctttctcaacttcacttctttattttattagcttccaaaaaggcttctttcggagaagcaccattgattagaactcataaagcacacctcttaatgatttcttcaatggaaacctttctttaccttctcaacaccacgtttataaacaatccaccctagccaacgcgcctctattacgtacaattcaccatcatagttaacataaccttcgcagcacgaaagccatttag

SEQ ID NO: 43274 - DNA, 302 bp, Gossypium hirsutum
  Clone ID: LIB3189-049-P1-K1-G6
acagaagcaagcagctagcagtttcctttgaattatactactataactccaccactttccaccagatttacattgcagatggcttcatcaatgctgggggcttcaagggcggcttcttacctcaggatctctgtcttccacagaggcttttccactgttctaaaggatctgaaatatgcggattctcatgagtgggtgaagggtgagggtgactctgccactattggtattactgatcatgctcaagatcatttaggtgatgttgtgtatgttgaattacccgaaaggggagctgctgtaaa

SEQ ID NO: 43275 - DNA, 185 bp, Gossypium hirsutum
  Clone ID: LIB3189-049-P1-K1-H1
ccgtccgaatcccggtcgaccacgcgccgtttaaataaaataggtgccaggaaattgagtcgtaattccttccttactaatttgttagtttaactataatcaaatggatttaggggagctgtgggcgatctttggtcctggcgtcgcgggcgccgtgttcggtaccggctggtggttttgggttg

SEQ ID NO: 43276 - DNA, 308 bp, Gossypium hirsutum
  Clone ID: LIB3189-049-P1-K1-H11
acggttcactttcctccgtctcctttacctgctctgtctctttctttgcttatggatccctacaagcaccgtgcttcttagtgctttcaattccccattctggacaaccaattctggtgctccaatttggaacaacaactcgtcacttactgttggacccagaggtccaatcctccttgaggactatcatttggtggtaaagctcgccaactttgacagatagaggattcctaatcttgttgaccattctaggttagcctgctccctatgttttctcttgatggtcatccatgaacattttttcatat

SEQ ID NO: 43277 - DNA, 75 bp, Gossypium hirsutum
  Clone ID: LIB3189-049-P1-K1-H12
cgaaaaaaaaaaaaaaaaaaaaaaaaaaaaaaaaaaaattttttttaaaaccaaaaaaaaaaaacggggcggggc

SEQ ID NO: 43278 - DNA, 316 bp, Gossypium hirsutum
  unsure (1)..(316): unsure at all n locations; Clone ID: LIB3189-049-P1-K1-H2
gcgttcgcacacttgctagtattcctacttggagtggggactttcattactcccacaatngnnacctanaaggggcgggtttatagaaaaccttctgctcccacaaacaaaccccacaaggccaaaccaccaccatatgaaccgaaggacccggaggaggaaccacacctaatagccgaaggttcaccgaacccgacgtttataggaccatcaaattaaatcaacctggtgcccgaaagagcactgcccaagcttgctaagaaagaaacaccacttgcaatctcaactgatgacaacccaacgctaaaagaacacc

SEQ ID NO: 43279 - DNA, 128 bp, Gossypium hirsutum
  Clone ID: LIB3189-049-P1-K1-H3
aagaagaagaagagcaaagcaaaaggaaggaaaccctttttaaacatctccatccatttctctcccaggaaaaaccctactcggtggattatagagaaataagggggatattatataagggggggggg

SEQ ID NO: 43280 - DNA, 219 bp, Gossypium hirsutum
  Clone ID: LIB3189-049-P1-K1-H7
gcttctttttctacttcactctcttgaaaattttttgaagaaaaacttgtacgtacttaagaaatccggttatctagcgggccccacaaaagaacaatccagtttgaatatctgttggagctttcaagcctgctgctaatcttgatcacattttcctatgctaaaacttgcaagcagtttgctactagatcactgtgatgtcaaatattttcacgagtc

SEQ ID NO: 43281 - DNA, 423 bp, Gossypium hirsutum
  Clone ID: LIB3189-049-P1-K1-H8
gaacaacttatcaggaatctttatccacctattgttctcttatagcacaggttttctcaaggtttctgatgttcacacaatctactgggagcagtcaggaaacccagatggccatccagtcgtgtttcttcatgggggacctggaggaggaacatcacctagtaaccgaaggttctttgatcctgaattttataggatcattttatttgatcagcgtggtgctggaaagagtactccccatgcttgcttggaaaataacaccacttgggatcttattgatgacattgaaaagctaagagaacacttgaaaattccagaatggcaggtctttggtggctctcggggaagtacactcgctcttgcttacagtgtatcacattctgacatggttactggtttgttcctaatagggatttttctttt

SEQ ID NO: 43282 - DNA, 232 bp, Gossypium hirsutum
  unsure (1)..(232): unsure at all n locations; Clone ID: LIB3189-049-P1-K1-H9
gcccacgcgtcgaaaaaagtgaaaagggtaaggtgntgtcctgctacaggctccaatggctgaatggtgtcatctagaaatgaaaaccaagaagtgaataccagcatgagaactgccgagaccatgctgcggttggtgcctatggctttaggggttgctgcactagttgtcatgctcaaaaactcacagttcaatgactttggctccgtttcatactcagatcttggtgctt

SEQ ID NO: 43283 - DNA, 420 bp, Gossypium hirsutum
  Clone ID: LIB3189-050-P1-K1-A12
cgagcggccgctcgcgatctagccaaatttttttttctaaaaacaatgtttggaattcaaccgttggtttcggttttgctttgttgcttcaccttttggttccacatttcatttgggtacttgataacgtgctcggggatagttccgatgaggtaccggaacgataaggtatcgataacggatttcggcggcgtcggtgacggaaagacactcaatacaaaggctttccgggaagctatataccggattcaacatctgagaaggagaggtgggaccttgctttatgtgcctcctggggtgtacttaacggagagctttaatcttactagtcatatgactctttatttggctagaggcgccgtcatcaaagccactcaggacacatggaaatggccaattgttgctcctttaccatcttat

SEQ ID NO: 43284 - DNA, 378 bp, Gossypium hirsutum
  Clone ID: LIB3189-050-P1-K1-A6
atccgcctctctcatcttccgttgtttatacgtttggttgttgttgaagaagtgctactaccatggctacaaagaagagcgttggggacttgaaggaagctgatttgaagggaaagaaagtgtttgttagagtcgatctgaacgttccattggatgataacttcaacataactgatgacacaaggatccgtgccgctgttcccaccatcaagtatttgatgggtcatggctctaaagtcatcctctctagtcatttgggacgcccaaagggtgtcactcccaagtacagtttgaagcctcttgtgccaaggttatctgaactccttggagtcgaggttaaaatggcaaatgactgtattggtgaagaagttgagaaat

SEQ ID NO: 43285 - DNA, 428 bp, Gossypium hirsutum
  unsure (1)..(428): unsure at all n locations; Clone ID: LIB3189-050-P1-K1-B10
tctacaacctcctccatgataccaaacagctatcgaaagcgtcagcgcgtgcctcaccgccacacggccgccacgcgcctctcctccaccgccactgtcgtcaattctttctcagacaaaacggtctccgaatcctcccaaaagctccaccgcacctcctcctccgcatccaccatcaccacctctcccaatgccgttacttcctccttcaatgatccctacaccgctgacgtcttactccgcctcttcgttgatcgttccccattcgattccgacgccccatccgattcttcccgccaatccgacatccagatctatctncactcctncgtcatccgccgcgccaaatatttcgcggcgattttatccgactgttggcaacaccgaacgaacgccgacgccaagagcaacaatggcgccgagggttc

SEQ ID NO: 43286 - DNA, 379 bp, Gossypium hirsutum
  Clone ID: LIB3189-050-P1-K1-B12
gttagatctagcaatacttctctcatctctagtgctaatgtcactgtgaagaattgctctagcagtaaccgaagtgcatagcataatgaggaacctcgtcagggagttgctcggaagagaagtttgactgaaactggcgaagaagaaaacggaagaagcatagatttgaatgttgagctaactccgacaggtcaacccccaaaagatcgtttatctactaaccgatcttcggagatctcatcaacatcgctatcggaaacgtcacgcatgcttctgaatcaacaagactcttctggtgaagaagttgagttcagcaacgcaacaccggaggaaccgccacttgttgcgatgggttgtacccggtgttagtatttgtgct

SEQ ID NO: 43287 - DNA, 444 bp, Gossypium hirsutum
  Clone ID: LIB3189-050-P1-K1-B4
gcaacctggatatgacattatagcccagttcataattggttatatcttgcccggaaagcccattgcgaacctgcttttcaagatatatgggcggatcagcaccatccatgctctttctttcttgtctgatctcaaacttgggcactacatgaaaatcccaccacgttgcatgtacactgctcagcttgtgggaactgtagttgcaggtatcgtcaaccttggagttgcatggtggatgttagatgacattgacaacatctgtgatgttgaaggaaatcatcctgatagcccatggacttgccctaaatacagggtcaccttcgacgcatctgttatctggggcctaatcggaccaaggagacttttcggaccaagagggatgtaccgtaacttagtgtggttgttcctcattggagcgttcttgcctgttcctgtttgggtttt

SEQ ID NO: 43288 - DNA, 230 bp, Gossypium hirsutum
  Clone ID: LIB3189-050-P1-K1-B5
agaaagcttatagaaaagccgctattaagaatcatcccgataaaggcggcgatcctgaaaagtttagagaaagttggctcaagcttatgaggtgctgagtgacccggagaagcgtgagatttatgatcagtatggtgaggacgcccttaaagaaaggatgggcagcggtggcggtggccatgacccttttgatatattccagtgtttctttgttggacaatccttttggt

SEQ ID NO: 43289 - DNA, 428 bp, Gossypium hirsutum
  Clone ID: LIB3189-050-P1-K1-B6
cttagctcttagcccagttcttcattttcattttcttgttccttccttcgccgtctattgctttttgttacctcgatttcaagtgaatcagaatgggtaaggaaaagactcacattaacattgtggttatcggccacgtcgattctgggaaatcaaccaccactggccacctgatttacaagcttggtggtattgacaagcgtgtgattgaaaggttcgagaaagaagctgctgagatgaacaagaggtcattcaagtatgcttgggtgcttgacaagctcaaggctgagcgtgagcgtggtatcaccattgatattgccttgtggaaatttgagaccacgaaatactactgcactgtgattgatgcacctggacaccgtgactttatcaagaatatgattactggtacgtcacaggctgactgtgct

SEQ ID NO: 43290 - DNA, 442 bp, Gossypium hirsutum
  Clone ID: LIB3189-050-P1-K1-C10
ctcctctccataaatctctctctcaacgcagagcgaataggcggagacttccaagaatctatcggatcagctaatcacgctccaaagaatggatcaggttcaacacccatctgtcatgcagaaggtagcaggccagctccttcgttctagccattctcaagattttcaaggttataatgggtctttcaggagtcctgctctataccaaaggcgtgctgcatatggcaattactccaatgctgcactgcagtatcctgtccgggcttgtggagacctgtctatggttccatcaacagcttcagctatttgcgttcaagcccctgctgagaaaggatttgccagctttgccattgatttcctcatgggtggagtttctgctgctgtatcaaaaacagctgctgcaccaattgagcgtgttaagcttttgattcagaaccaagat

SEQ ID NO: 43291 - DNA, 376 bp, Gossypium hirsutum
  Clone ID: LIB3189-050-P1-K1-C11
gagcgagaggaagagagacaaatggggtctagagacaaggaccaaacaacatcgcatcatcagccggtccttagcagccttgttgtaggaccatcggcaagcgacggagctgacggtggtgcaagcggaggacgaggccgtggtggtggtggtagcgattatgagcccggggaggtccggcgtgaaccgcatccttattctcgttctgatcgatacaaagatgaacctggatatagaattcgtgcaggttcaagttctcctatacgtcgtagggacgtagatcaccgtaatggttcccattttgatcgctcaggtggtccgtcacgtgtccgtgattttggtaatgggagggatcctggaagataccgagactctt

SEQ ID NO: 43292 - DNA, 448 bp, Gossypium hirsutum
  Clone ID: LIB3189-050-P1-K1-C12
gttttcgtaaggtaaagggagaggattgttaagcgacacgcctctctcactcaaaccctattcttggtcccaatttctcgaatctagggttttacattctccttttcctctccaaatcaaccttatttcattttttttcttctcttagaaataatatcgtcaatgagcaacgaattagttaacttcaacatgtccggtcttggcgatgctcttaatgccgaagcacgagctggtctcgttaacgctctcaagaataaacttcaaagtcttgctggggatcactccgatgtgctggagagcctatcaccgattgtcaggaagcgtgtcgaggttcttagggagatccagagccaacatgatgaattggaggctaggttttttgaggagagggctggacttgaagctaaatttcaaaaactatatcaacccttgtatgcaaagcgatatg

SEQ ID NO: 43293 - DNA, 451 bp, Gossypium hirsutum
  unsure (1)..(451): unsure at all n locations; Clone ID: LIB3189-050-P1-K1-C4
gcattttatttcttctttttttttttcccacactttttttaaaacccattagctaaaaatgcactggggggtttctgtgttgcttgcagttatcggagttactgcactgctcgttgtaactccggtaagtgggtaccgtccatggccgtacgtaaaacccaacagctccgacttaatgttcggaggctctaagaaatttgagggctcatcggagtttgtacatatgagatatcatatgggtccagtccttactgctcatatcaccatccacccaatctggtacggccggtggcagaaatcacagaagaaaatcatncgtgagctgatcaactagtcttccgccgtgattccaaacaccctttggtggctgggtgggggaagaccgacagatttacaccgaccaaacgggaggcaacatttcccgtacggtgctattaggtgaagagaaaaa

SEQ ID NO: 43294 - DNA, 454 bp, Gossypium hirsutum
  Clone ID: LIB3189-050-P1-K1-C5
caaagaacttgatttctctcatgtgctggagcatctgcgacggatacttagaggtcaggcttcattattggactggactagatcaacatcattagcaaggaccttatctccccgtgttttggaaagtcaagtagatgccaagaaggagctggagaaaagtttaaaagcaacttgcgaggagtttattatggcagtcactaagcttgtggatcctatgctgtcatttgttaccaaggtaacagctgtaaaagttgcattatcttctggtactcagaataaaaaagtagactcagtgatggccaagccactcaaagaacaagcctttgctacgccagaaaaggtggctgaacttgttcagaaggtaaattcagctatttagcaagaacttccactggtgatagcaaagatgaagctttatttacagaacccatcgacaagaacaattcttttaaac

SEQ ID NO: 43295 - DNA, 437 bp, Gossypium hirsutum
  Clone ID: LIB3189-050-P1-K1-C6
cccacgcgtccgcctgactccgccatcttcaataatttcttccgttgatctttgttagagattagctttgtaatttttcattatgggaaagatcaagatcggaatcaatggatttggaaggatcgggcgtttggttgcgagagttgctctccaaagcgatgatattgagctcgctgctgttaacgatcctttcatcaccactgaatacatgacctacatgtttaagcacgagctggttcacggacaatggaagcattatgagcttaaggtgaaggactcaaagacccttctgtctggtgaaaagtctgtcacagttttcggtatcagaaacccttgggaaatcccatgggcttgggctggagctgagtatgttgttgagtctactggggtttttactgacaaggacaaggcttttgctcacttgaagggtggtgcga

SEQ ID NO: 43296 - DNA, 364 bp, Gossypium hirsutum
  Clone ID: LIB3189-050-P1-K1-C9
cgagagtggcaggtttaatgcatgtattggagaaaatggtttcagtatgtggggaaccactccaacgattgggcgcttatgttcttgaagggcttagagcgaggttggaatcatcggggagtaatatctacaaagccttaaaatgtcaagaacctacaagctcggaactaatgtcttacatgcatattctctttcgaatctgcccgtactacaagtttgcatacacatcagctaatgctgtcatcaaggaagtcatggaatacgagcagagaattcatatcattgatttccaaatagcacagggtacccaatggatgtaccctaatgcagctctttcaaaacggccctggtgggcccccattta

SEQ ID NO: 43297 - DNA, 434 bp, Gossypium hirsutum
  Clone ID: LIB3189-050-P1-K1-D1
cggacgcgtgggaaaacttttgcctctgaaactatggctccattctctttacgtagccgtcttcaggcttctgcgctaagcaagaggcgtctcaaatccaaagccaagcatgggaggaaagggatgaagaacatggaggaaagcttcaaaagattgaaatctgaaatggaagaaataagcgaggaacaaaagaatatcagggaagggcaaaggcaagttaaagaaaaattcggaatcatcgaatccgagtgcgaggaattgaagagggaaactaggctcataatccagcaaagtgccagaactcaggttaaacttgctcttatgttccgcatactgaaagcaagggaagccggcgagttgaataccgctgccactctcactgaaatgctccgtgaaatagtaggaagagagagggaggaaaagcaagctgacat

SEQ ID NO: 43298 - DNA, 215 bp, Gossypium hirsutum
  Clone ID: LIB3189-050-P1-K1-D10
ggaattcttattccttttatatttttcctctccaattttccgtcactttcccgagaaaatgagagagatccttcacatccaaggtgggcaatgcggcaatcagataggagccaagttctgggaagtcgtatgtgccgaacatggcatcgattcaacgggtcgatatggtggtgactcggagctccagcttgagcgaatcaatgtttactacaacg

SEQ ID NO: 43299 - DNA, 322 bp, Gossypium hirsutum
  Clone ID: LIB3189-050-P1-K1-D11
gttccatgtgaacggcacttgcacatgggttagtcgatcctaagagacgggggaagcccgtccgacagcgcgtccagcgcgagcttcgaaagggaatcgggttaaaattcctgaaccgggacgcggcggctgacggcaacgttagggagtccggagacgtcggcgggggcctcgggaagagttatcttttctgtttaacggcctgcccaccctggaaacggctcagccggaggtagggtccagcggccggaagagcaccgcacgtcgcgtggtgtccggtgcgcccccggcggcccttgaaaatcccgaggaccgagtgccg

SEQ ID NO: 43300 - DNA, 414 bp, Gossypium hirsutum
  Clone ID: LIB3189-050-P1-K1-D12
gttcgctaaggtagttaagggaaggttaaaggaagattcagccaggaaatactttcaccaactagtcagctcggtcgacttttgtcacagtcgaggcgtctaccatcgtgatctgaagcctgagaatctgctactggacgagaatgacaacttgaaagtctcagattttggactctccgctttgcctgaacagctaagaaacgatgggttgcttcacacacaatgtgggactccgtcttatgttgcccccgaggttttgaggaagaacgggtatgacggagccaaagctgacatttggtcgtgtggggttgttttgtttgttctcctgacagggtttttgcctttccaagccggaaatgttatgcacatgtataggaaaatttttaaggcagaatatgagttccccccctggga

SEQ ID NO: 43301 - DNA, 399 bp, Gossypium hirsutum
  unsure (1)..(399): unsure at all n locations; Clone ID: LIB3189-050-P1-K1-D4
cccacgcgtccggtggtttatgccttggagacgattacttcctataagtatctttggaccgctgtgagtggctggggagttggccacacgttgcattttatgtgtttacagggtttaaattcaagccagaggctcataacccatactttgtgatcgatgatgaggaggaagaagctgcatcagagcagctgaagcttgaagatgagnttgaattgtgatagtattcattgaggaaaagaaatggagaatgattgaagaaggttcaggttgtcaaactggggcaattgaggtagaagccttatcatcttaatgggtaccatcgaaaaaaaaattgttatatttgatgcttgtttgtacttatttgtgccccttttgatcctactttcccttttttttata

SEQ ID NO: 43302 - DNA, 290 bp, Gossypium hirsutum
  unsure (1)..(290): unsure at all n locations; Clone ID: LIB3189-050-P1-K1-D5
cnaacaaatacataagcatttgcaatatttataatggggggcaacacacaatttttcaaacctcctgattacaaatctttttaccttttatatttcaacacctctttatttccaacaatcatttttcttttgtccttccaacattaattaaatatttcctaaatttttcaaccttttcccctcttttaaatcatttactcccaatttttttttctcttccctcctatataaattttttctcatatttcttttatttttttctacttctctcacatctcctttttaattat

SEQ ID NO: 43303 - DNA, 265 bp, Gossypium hirsutum
  Clone ID: LIB3189-050-P1-K1-D7
aaaaaaaaaaaaattaacaaaaataaaattattttttttttaacaaaaaacaaaaaaaacatgcgaagggttcataaaaacttaattggaagaacaaaaaattcccacccccttcacattacaacacatatttccccccctctttttaccaaaccctaatttttttttctttttcttaccactttttgttcttctccaattccccccccaattaactccctctaacccccttttcccaccctcatttttttccaccacctccatt

SEQ ID NO: 43304 - DNA, 399 bp, Gossypium hirsutum
  Clone ID: LIB3189-050-P1-K1-E10
gccaaaaccagcttccttctccgtgaaaaagactgttcagatatgagaagaaaactcaaatgcttgggaaccagctatggagattcagagaaccttctccactacaaaacaaactatgacagactttgattcgtctgcaaccagatcctccaatccctttccaaaacccgctttacagaagccggaactccatcaacccaaaacccaaatctttggctttttcgcccttccactgccagggtatgagctgcttcgttaacagcacgagaaacaaacagttttttaataacagtcaaagaatccccttctacgatcaggcactggaaacccatctgttgcacgaacagaagcgaactttcacatgcccttgcttcagcaatgaacgcattagcaacattc

SEQ ID NO: 43305 - DNA, 212 bp, Gossypium hirsutum
  Clone ID: LIB3189-050-P1-K1-E11
gtcaccatagccaccgtcatcggccacaagaaacaacacgatgcatgcgatggtgttggtctttttggtattgcttgggcttttggtggcatgattttcattcttggttactgcaccgccggtatctcaggtggtcacattaacccggcggtgacatttgggttgtttttggcttggaaggtgttgcttataagggcggaagagcttacatg

SEQ ID NO: 43306 - DNA, 439 bp, Gossypium hirsutum
  unsure (1)..(439): unsure at all n locations; Clone ID: LIB3189-050-P1-K1-E4
gggaggtgaagaaggagagaatacggaaagcttcaatatatggaaagttacctggttgggacctacgttgctgttattgtaaagagtggggatgattgtaggcaagagcaccttgctgtgcagcttatctctcatttttatgatatatttcaagaagctggtcttccgctgtggttgcgcccttatgaagttttagttacatcttcttacacagctcttattgaaacaattccagatacggcctcacttcattctatcaaaagcagatatcccaatttatctagcttacgcgaattctttgctgctaagtatcaggaaaattctccaagttttaaactggcacagagaaattntgttgaaagtatggctgggtattcccttgtgtgctatcttctgcaggtgaaagataggcattatggaaatctgctactggatgaag

SEQ ID NO: 43307 - DNA, 397 bp, Gossypium hirsutum
  Clone ID: LIB3189-050-P1-K1-E5
gatgatatgaaggaaaaccaagacggatggcaatcaaattaacttaaaagaagttatattcatgatacaagtccaatgccaaacatatttaacacaaacataagctgcatacatatagtcaacttgaagttattgaattaacctgtattcatagaacaaagttttttaaaaactttaagtacaatactttttattacattcgcatgtttctcataatattttcttatattctatttttctcttttaaattttatctctattttctttttttttacataatttcttccatatttttaatttttttcatattttataattatttttttattttttttatacaatttttttatttattttttcttatatttttacttcacaatttttattaatttttttt

SEQ ID NO: 43308 - DNA, 337 bp, Gossypium hirsutum
  Clone ID: LIB3189-050-P1-K1-F10
gttttaatataatagttctaaaaaaagaaaagaagatgaagaaagcatgcaaggaagaagatgggggtggcatacactatggctgtttggtttcagcttctacttttgatgtgtggcagtgggatacatggtgtgaaggatttgaaggaaaaacaaggggatgctcaacttgttagaaaggtggaggataaatattctgttgtttctaatataggacatgctgcagctgaggagtcatcttctcaagttggtaagcagctggaggatatatattctagtgtttctgtgttggcggacaaaagtactaagttgtcttctgaacaacttgctaaggagg

SEQ ID NO: 43309 - DNA, 451 bp, Gossypium hirsutum
  unsure (1)..(451): unsure at all n locations; Clone ID: LIB3189-050-P1-K1-F11
cccacgcgtccggcaagataacccatgtccgtatccatgtttcccaccaccaacaggcaccggcgggggaggcggcggcggcacagtgacacaaacacctccagctagttactcaccaccctcccaaacaggagcataccctccacctacagggaacttaccatattactatccaccaccaccttatggtggaggtaattctttatatggtcagccccctcctgaccctatcttgccttatttcccatactactatagaaaacctccacaccaaacagatgatcagtcagcagcagcaacagttggtcctggaaggtcattactcatcaccactgctaccacaaatcttgntgtatttattattctagntatttctagtttagggaatttctagctagtgaaaggagaaaaaaggaagatcttgtgtaaaagtaattatgattaagccatg

SEQ ID NO: 43310 - DNA, 370 bp, Gossypium hirsutum
  Clone ID: LIB3189-050-P1-K1-F12
gcttagcaaatcccaaaggagctctgtactctcgatccgatcaccggaaccgtaattttcgtgacgggcggcggcgtattcattggtgaggggttagagatatgaattgggttcaacgcaagatctatctctacaatgtcacctttggactctacatgttggattggtgggagcgttaccttttcatttttaagtccaagtatcactataattcccaattgttagttcctaaaccatggaagacacactggttattgtgttggtgtgggtcgacatctacaacagctcgcgatacgtaacggagttttacatgaggcatctatcctagggttgggaggtggcaatggtgatggaagtgaaaatacttttg

SEQ ID NO: 43311 - DNA, 268 bp, Gossypium hirsutum
  Clone ID: LIB3189-050-P1-K1-F4
atccaccagtgctttggacgaggtcaatgaggcccatttgtacgagaagatgaaggcggcgggcatcacatatatcagtatcggtcatcgtcgtaccttatatgcttatcataatagggtcctagatatatcatcggcagatgcagatagcagacaacgcaattggaacatcaaatccattgaggatgacactttacacaatttcttgaagttatagttatagctgccctaaagtttggtcaaaatgctttaaatcaatttcttcatc

SEQ ID NO: 43312 - DNA, 436 bp, Gossypium hirsutum
  Clone ID: LIB3189-050-P1-K1-F5
gcgaagccaatgcaattagatcatgtaaaaggtgatgaagaatttactatgccaactaaagttgtttctgaagagacatagcaccagaaggagtgggtcaagatattccggagacaacggtccatcctgtgccgccagtgccaagcaagacggtaagattttcgactgtgaatattgaagagatgggtgcaatgaatgagaaatatcagtcgcctaggattcctgaaatagagatctcaacttcaccttcaaatgatggaatggacaaggaaccaatgcatagcaggaagaaatggaacaatgaggagagccctcctaaagcagccaaagggtttagaaagcttcttttctttggaagaaaaggcaaaaactatgctactgcttagtgtatgcttgtcttttcatattgcttatgcttcgggttttcaaatttttt

SEQ ID NO: 43313 - DNA, 449 bp, Gossypium hirsutum
  Clone ID: LIB3189-050-P1-K1-F6
gcgcccacgcgtccgcttttagggaaccattctttaaagcaaattagagagaagagaaaaaagaaagctaaaaattccattactttgtctctttggagatatcttttttctgcaattaaaacctcccatgcttgtatctttaaaacctttgatctttacccttttgtctcctcttctgcctcagccttagatccataaaaaacaaccccttttttcttcgtctcttataattaaaaaagaaaatggcaactggttggagaagagccttttgtactgcaacccctagagaacctgaaaccactgttcctagtcctaaaaattgtgcaaagttaagcttttttagtagtggaagtaacccttctactcctcgtcttcaaccatcttccacaaatgaaaacacccctaaagcatcaaatccttcttctcctcgttcaccactaaagctctca

SEQ ID NO: 43314 - DNA, 449 bp, Gossypium hirsutum
  unsure (1)..(449): unsure at all n locations; Clone ID: LIB3189-050-P1-K1-G10
ggggcacaacacctgttgatatccatgggaagcctattgcagatctttcaaagactgggggatggagtgccgccttatttatgtttggaaatgagatggccgaacgaatggcttattttggcctatcggtgaacatggtggcctttatgttctatgttatgcatagacccttttcaagttcttcaaatgcagttaacaatttcctggggatatctcaagtatcctctgtccttggtggttttctagccgatgcttatctcggtcgatattggacaatagccattttcactactatttatcttgctggtttgatagggataactttatgtgcatccatgaaaatttttgtgccaaatcaagatcaatgcgatcaactgtccctgcttttgggtagttgcgagcctgcaaaaccatggcagatgctttacctgtatgttgncctttattta

SEQ ID NO: 43315 - DNA, 446 bp, Gossypium hirsutum
  unsure (1)..(446): unsure at all n locations; Clone ID: LIB3189-050-P1-K1-G11
ctcttagctttcaccgacaaaaaaatggcagcgaagcaaacgacgatcctcgttgccgccatcctggtaactgctttttacggcggcgcggtgacatcggcgcaggcaccggcagctggtccagcgatggccatgtcgccgtccgccatggcaccgacgccggactgtatgacgaacttgttcaacttatcggattgtttgacgtacgtggaggccggaagcaacttgacgaagccggacaagccttgctgtccggaattggctgggctagtggaaagtagccctcaatgcttgtgttatttgctggataagaacgcgacggcgaactatgggttcaacattgacatggatagagctcttaagcttnctgatgtttgccatgttaaaactcctcctgttagtctttgttcaactattgtcggggctccaatcggagttccaactca

SEQ ID NO: 43316 - DNA, 436 bp, Gossypium hirsutum
  Clone ID: LIB3189-050-P1-K1-G12
attttctctgtgaaaaaatcatggagtttttggacgaagacgctagacccagattcctctggcagggaaagcctcaatcttggggttgctccgagcgaccctccccacaaaaaccctcaaaaccattccttttcatttccctttcaatctcttccattatcctctcccttgccctcttctccattgaatccgaacccttcaaatctctcctcttttggctctctttctcccttttcctcggcccattcgcccctccttccctcaccggcggtgacatccgtgtcggcgttggccccaccatccctgatcccatcgaacaagacccacaacccgagactgaatctaagaaaaaatcatctcaaaaacgttcaaagcctgataaaatcgatgaaccaattggaaatcctggggagttagctggaaacgggaatgggtt

SEQ ID NO: 43317 - DNA, 230 bp, Gossypium hirsutum
  Clone ID: LIB3189-050-P1-K1-G3
ctagttctagatcgcgagcagcctccctttttttttttttttattgatgctatcatggaccaaggggtggcggcataactagatacctgtgaggtaatattctgcacatttagcatcatatctgtgcatttaatacaataaacaagggtcattttagcttaacgaagtttcttttggattcattaatttatccccccattatattattttttttttttctcactttcttt

SEQ ID NO: 43318 - DNA, 451 bp, Gossypium hirsutum
  Clone ID: LIB3189-050-P1-K1-G4
cggacgcgtgggttttaatttgattttttgccatctctgtcatgtcaacggctggggagatggagcgcatggacatcgggagcaagcggtcggataatcccgatcttaaaaaccctaagaactcctctgattttcattcaatcagtaatcttgtacatcctcatcctactcttccctcggcgccggcaatttcggacggatgttgcggcggttgacggtgctacttccgggccgcaatctccggctaaaacggcgaggctgaaatcgttatggaggctagaagaggaggacaccttaagaaggagatcgttggcggagggtttgaacatggggttcgaaaccgaggacggagagattcagtaccgctggaacacatctctgttctttggcgttcgaagaaatgccttggttagccggtcttggcttccggttaccggtgaactaaagggaa

SEQ ID NO: 43319 - DNA, 295 bp, Gossypium hirsutum
  Clone ID: LIB3189-050-P1-K1-G5
gcgaaaatatctcaaatctcctcctcctcctcagaaatcttagtatcatcaccatggcctcaaatcccgagagtgcgtctttgacatgactatgggtggtcagcccgctggtcggattgtgatggagcttttcgcagattgcactcctcgcactgctgagaacttccgtgccctctgtaccggcgagaaaggcgtcggccgcagcggtaagcccctccactacaaaggctcctctttccatcgtgggatccctaactttatgtgccaaggaggtgacttcacggccggaaacggt

SEQ ID NO: 43320 - DNA, 449 bp, Gossypium hirsutum
  unsure (1)..(449): unsure at all n locations; Clone ID: LIB3189-050-P1-K1-G6
cccgttgaaaaaatatgggtttccaaagaaacatattgggtttccttttcttgatattggcttcactaacaagcctctcttctagccttcctagtgaatactccatagtggaacatgagattgacgcatttctttcggaggaaagggtgttggagatcttccaacagtggaaagaaaagaatcagaaagtgtaccggcacgccgaggaggctgagaaaaggtttgaaaatttcaaggggaatttgaagtatatcctagagaggaatgcaatgagaaaagcaaacaaatgggaacaccatgtgggattgaacaagtttgctgatatgagcaatgaggagttcagaaaagcttacttgtcaaaggtgaaaaagcccatcaacaaagggataaccctgtcaaggaacatgaggagaaaggtgcagtcttgtgatgcaccctcctncttggat

SEQ ID NO: 43321 - DNA, 192 bp, Gossypium hirsutum
  Clone ID: LIB3189-050-P1-K1-G8
tgaggttgagaatgctacatggatgctaacggttttcagttgctttggtcagtacttttgccttcattttgaagcattccatatcggagtagctcctgtttatatagcattcttgcggtttatgggtgacaataatgaggcaaagaactatagctacagcctcgagggtgggtgggaacgggaggaagctgc

SEQ ID NO: 43322 - DNA, 296 bp, Gossypium hirsutum
  Clone ID: LIB3189-050-P1-K1-H1
ccccccccccttttttttttttttaattttttttttttttattaatttgtagataaagttaatattgcggagtcgcataaagcggcagaggacacaacccacaactctggaattttaacatccatatttattctgtagctatcgttattttggcttccactagctggtgaactttccatgccaaaacttcacttgacgctgttgcagtcagtgctagggctgatcttgtaagggatgttgacaccgcacttgcctgggagtccggttgcaataccatagttgatgccagaaatgcc

SEQ ID NO: 43323 - DNA, 442 bp, Gossypium hirsutum
  Clone ID: LIB3189-050-P1-K1-H10
tctctatttacaaatacgccgccgtctatcggagctcagagaggaacggttcgattgccgacggttttgatttatcttggtccgatattaattgaaggtgtttggagccggttgttttccttatgcagtaacacctatgctaattttgatcgagttcatttgccgggcaatgtgaatggtggttgtttgaatacttttagagaattagtttgtgttggggtggatcatgggggctgcatgttgtgttgctgctagagacaaaactatcgtaaatggatcaggtagtgaggttttacataggaatataaggtattctccaacttggagttttcgttgggataaccgagggcgtgtagctggtgaagacacttctataagttggttttcggatgcagttagtcggaatgatggatcagagatcaaatatgaatctgcatgtgca

SEQ ID NO: 43324 - DNA, 272 bp, Gossypium hirsutum
  Clone ID: LIB3189-050-P1-K1-H11
tctctatttacaaatacgccgccgtctatcttagctcatagaggaacggttcgattgccggcggggttgatttatcttggtgggatggtaattgaaagtgtttggagccgcttgttttccttatgcagtaacacctatgctaattttgatcgagttcatttgccgggcaatgtgaatggtggttgtttgaatacttttagagaattagtttgtgttggggaggatcaatggggctgcatgtttttgttcttgctagagacaaaactatctta

SEQ ID NO: 43325 - DNA, 450 bp, Gossypium hirsutum
  Clone ID: LIB3189-050-P1-K1-H12
gcgtgccaatgttctcagatacttccccacacaggctttgaactttgccttcaaggattatttcaagaggatggtcaacttcaagaaggacagagatggctactggaaatggtttgcaggaaacttggcatctggtggtgctgctggtgcttcatcacttctttttgtttactctctggattatgctcgtacacgtttggctaatgataacaaggctgctaaaaagggtggtcagaggcagtttaatggtttagttgatgtctacaggaagaccatccaatctgatggcattgctggtctttaccgagggttcaatatctcatgtgttggaattattgtttaccgtggactttactttggaatgtatgattctttgaagcctgttgttttgggtggtggattgcaggatagtttcttggcaagtttcttgctgggttgggtatcacaata

SEQ ID NO: 43326 - DNA, 441 bp, Gossypium hirsutum
  Clone ID: LIB3189-050-P1-K1-H3
cccacgcgtccgaagaagctgctgttctctctctctttcccatagtttcacccgtcttttaatccatcgctcacaaaattatgggtttgaaggaggaattcgaggagcatgccgagaaagttaagaccctcccggccgccccttcgaacgatgacatgctcattctctatggactgtacaagcaagccactgttggaccagtgaataccggccgtcctggaatgttcaacatgagggaaaggtacaagtgggatgcatggaaggctgttgaagggaaatcaaaggaggaagcaatgggggattatatcaccaaagtaaaacaactgtttgaggctgctggaagttcttgatgtgtgtgtgtatggccaatgaaaatggtgtaatttcaagccctttgttgttactttggggttttcattactatgaataaattatgtactc

SEQ ID NO: 43327 - DNA, 421 bp, Gossypium hirsutum
  Clone ID: LIB3189-050-P1-K1-H4
aaaaaacatctttctgttcaattcaatcctcctttttctattcaaccataatgtcttgcttcattagcaaatacgccgatgagttgggtaaaaacgctgcttacattggcacccctggaaagggtatccttgctgctgatgaatccaccggcaccatcggcaagcgtctttcaagcattaatgtagtaaatattgaagaaaacaggcgtgctctccgtgagctcctcttcactgctccaggagctcttcagtacctcagtggtgttattctcttcgaggaaaccctttatcaaaaaaccgcttcgggcaagcccttcgttgatgttttgaaggaaggtggtgtcctccctggcatcaaggtcgacaagggtaccgttgagcttaacggaaccaaccgcgagactttcacccagggtctgga

SEQ ID NO: 43328 - DNA, 60 bp, Gossypium hirsutum
  Clone ID: LIB3189-050-P1-K1-H5
ccaaaatctacccacgcgtccgcccacccattcttttacacaaaccccccctcctttttt

SEQ ID NO: 43329 - DNA, 373 bp, Gossypium hirsutum
  Clone ID: LIB3189-050-P1-K1-H8
taaatacgggcgagagaccgatagcgaacaagtaccgcgagggaaagatgaaaaggactttgaaaagagagtcaaagagtgcttgaaattgtcgggagggaagcggatgggggccggcgatgcgccccggtcggatgtggaacggcgagagccggtccgccgatcggctcggggcgtggaccgacgcgggtcgtggcggcggcccaagcccgggcctttgatacgcccgtggagacgtcgtcgcctcgatcgtgggattcagcacgcgccgccttggcgtgcttcggcacctgcgtgcttccggcgtcggcctgcgggcttcccattcggcccgtcttgtacacggaccaaggagttgacatgtgtgcgagtc

SEQ ID NO: 43330 - DNA, 414 bp, Gossypium hirsutum
  Clone ID: LIB3189-051-P1-K1-A10
catggatgttgcctttggaatggagtatctgcatggaaagaatatagtgcactttgatttgaagagtgacaatttacttgtcaatcttcgagatcctcaccgtccaatatgcaaggttggagatttgggcctatctaaggtgaaatgtcaaacccttatctcaggtggtgtccgtggaacccttccatggatggcaccagagcttctgaacggcagtagcagtcttgtctcggagaaggttgatgtcttctcattcggtattgttatgtgggagcttctcactggagaagaaccatatgcagacttgcattacggggctattattggtggtatcggaagtaatacactacgaccaccggttccagtaagctgtgacccaaaatggatatcattaattggagagatgctggtcat

SEQ ID NO: 43331 - DNA, 450 bp, Gossypium hirsutum
  Clone ID: LIB3189-051-P1-K1-A11
gtaactcagaaatagcccgtgtattcttcccttcatatcccatgttccaactttacaaagacggacgcgccgagagactccggaaaacggtaacggtcccagcgtccgacgaccccaaaaccggcgttcggtctaaagacgcaccggtgcctcccctatcgtcagctcgtattttcctccccaaaacctcagaccccaccgccaaactcccgctcctcatctacatccacggcggcgcgttttgcatcgagtcccctttctcccccacttaccacaactacctcacttccctcgtcgccaaagccaaggtaatagccgtttccgtacagtacaggaaagcttcggagcacaacctccccgccgcgtacgacgacgcctgggatgcaatcaactggatcgcttcccacattgaaaggaacggtcccgagccatggctcaacgaaaacgccg

SEQ ID NO: 43332 - DNA, 476 bp, Gossypium hirsutum
  unsure (1)..(476): unsure at all n locations; Clone ID: LIB3189-051-P1-K1-A4
ctgatcccaccattcattcaaaacaccaaaaatcttactatcaaagtaatcaattttccttttccaggtgatccagatcccagtcaaaactctcacagagaagaaacatgagtggtgacgagaaaaacccggctgtagttgtagatcaccagcatcatcaatatgggactttccaaggagtatccaactaccctcctccacctcctccccagcaccatggcccggctattgggtttcctcagcctgttccgccgcctggcctccatgagccctctgctcctcctccacagtattacccccaaggttatcaaaccgttccaggttatgctgttgctgaaggaagacctgtaagagagcgtcgtctaccatgctgtggcattggttttggatggttcttgtttatcattggtttcttccttggggccatccnctggtacattggattgtttgttctaacttgtgcgaggatagactac

SEQ ID NO: 43333 - DNA, 368 bp, Gossypium hirsutum
  Clone ID: LIB3189-051-P1-K1-A6
gtttgagcggctaccattgccgtcatcgttagtatcatcaaaaccactatcaatatgtcgttatcatgttccgatcgcttcacggacttactctgcgccgaggattcagacgaggtgttatccggcgagtcgccggcatgctcgtcggagctggactctcaagcgtcctgcatcgaggagtccagcatcgatggctttattgaagatgagacaaacttcgtccccggatttgattaccttgctcggtttcagtgtcaatctcttgacgcgtcggctcgagaagcatcggttgcatggattctaaaggtacaagcatattacaatttgcagcctttaacggcttatctttccgtcaactacttggatcg

SEQ ID NO: 43334 - DNA, 402 bp, Gossypium hirsutum
  Clone ID: LIB3189-051-P1-K1-B4
ctaacaatcgctgttgtgaacaaacaaacgcagacttgagcttcaatggcggtgaaaatcttgatagcggcaatcttagtaattgcagcatctctttgctgggtatcgtcggctgattcgtctgaagctgctttcgtcaaaaagaccatctctgcccacaagatcgtcatcttctcaaagtcctattgcccgtactgcaggaaggcaaaatctgtgttcaaggagttgaaacaagttccattcgttgcggagcttgatgagcgagatgatggatggaatattcaggatgccttgagtgagattgttagtaggcgtactgtaccacaggttctcattaatgggaaacacatcggggggtcagacgatactgttgaagcatatcagagtcggaaattggctaag

SEQ ID NO: 43335 - DNA, 260 bp, Gossypium hirsutum
  unsure (1)..(260): unsure at all n locations; Clone ID: LIB3189-051-P1-K1-C2
ctccgcttcctcaacaaggacgcccgctgcatcgtttccctcaaatccaaacctactctggtagatggtgtcagccgcgtggcggaagatgaggaggaactagatccgtgttctgcacgcgcttgcgtggaggacccggcaaggttggggaagatcgagtcgaggattttgaagagggttaaagaggaatttggggttggggaagaagtgggatttgtttgtttaggtgggtttgngnattaacgagagggttttaattg

SEQ ID NO: 43336 - DNA, 424 bp, Gossypium hirsutum
  Clone ID: LIB3189-051-P1-K1-C3
gctattagtcttatattctgatggacaactggtggcatgctctgtgagcaagaaaggtctaaagccagttgaatccattaaagctgaaaaaagtttgggaaatggtgatgctgtatgtacttccattgctggagatcaactgatccttgctgttggtaccagaagaggtgttgttgagttatttgacttggctgattctgggtcactcattcgtactgtctccttatatgactggggatatacaatggaggacactggttctgtcagttgtatttcatggacacccgataattctgcttttgcagttgggtggaagttaagaggacttactgtttggtctgtttctggatgtcgtctaatgtcaaccatccgtcaaattggtttgagttctggcttttttcccgtagttaagccaaaccaggat

SEQ ID NO: 43337 - DNA, 338 bp, Gossypium hirsutum
  Clone ID: LIB3189-051-P1-K1-C7
gcaatagcaacgatttaacaccaatccacaatttaattaagattgatttaatccctcttcttgctttccttcttaacttaagccgaaagcctaaggggttaatattttattaatctattaaatagaaaaagaagtaattcagaatcatctggttaggatcgatctaaaccagtctattatgtatataattcagtatgccaactattaaacaacttattagaaatgcaagacagccaattagaaatgtcacgaaatcccctgctcttgggggatgtccttagcgccgaggaacatgtactagggtgtattctatcacccccaaaataccatactctggc

SEQ ID NO: 43338 - DNA, 471 bp, Gossypium hirsutum
  Clone ID: LIB3189-051-P1-K1-C9
cccacgcgtccgtctcaggctatgatgaatttgttcccatggttgataaagctgttgattctagttggaagaaacaaacctccctcttgaggccttctgcttccaaaggtacattagcagctcctgaaactcccaaggcccaggaaggaattcgagcttggattttgctgatgctcatggcttttttcatgacactttatactctcttccactcagtggcactgaatataaccagaaagctacctaactcagtttctggtcattgtcaaaatgttactgaacctaaacctaatgcaactcaaaaggaagaatgtcgcgccccttctccaacagctcttcagactcaggcagatcttctatcttctgttattgagaggttgggtgagcttgaagagaaagttggtacactacaagcgaagccatctaagatgccttatgagaaagaggagttgttggaatctgctgtatgtc

SEQ ID NO: 43339 - DNA, 466 bp, Gossypium hirsutum
  unsure (1)..(466): unsure at all n locations; Clone ID: LIB3189-051-P1-K1-D1
cggacgcgtggggccgcttgtttgttttgcttgcactctcaagttttgtggtcgaaagtcgacatctcaaaggaaattcatacgaattatccaacttccatccttccggcaccaatgccaccattgaacccaaaatatgggcagttttagttgctggctccaatggttttgtaaattataggcaccaggcagatatatgccatgcatatcaaatcttgaaaaatggtggactagaagacgaaaatattatcgtttttatgtatgatgatattgcattcgacgtagaaaatttgagacctggtgtcattatcaataaaccagatggagacaatgtttataaaggagttcccaaggattacacaggggaagatgtaaatgtggacaatttacttgctgcaatacttggaaacaaaactggtgttaggggttgaagtgggaaagttgtggagagcggtccanatgatca

SEQ ID NO: 43340 - DNA, 473 bp, Gossypium hirsutum
  Clone ID: LIB3189-051-P1-K1-D2
gcggatcagcaccatccatgctctttctttcttgtctgatctcaaacttgggcactacatgaaaatcccaccacgttgcatgtacactgctcagcttgtgggaactgtagttgcaggtatcgtcaaccttggagttgcatggtggatgttagatgacattgacaacatctgtgatgttgaaggaaatcatcctgatagcccatggacttgccctaaatacagggtcaccttcgacgcatctgttatctggggcctaatcggaccaaggagacttttcggaccaggagggatgtaccgtaacttagtgtggttgttcctcattggagcgttcttgcccttcctgtttgggttttgagcaaaattttcccagaaaagaaatggattcccttgattaacataccggtcttatcttatggttttgccggaatgccacccgcaactcccaccaacattgcaagttggctcatcactgg

SEQ ID NO: 43341 - DNA, 406 bp, Gossypium hirsutum
  Clone ID: LIB3189-051-P1-K1-D3
gcttgcgcggctgggcttagtttaagcggagagggtgtgcaggattaaagggtcaccattgtttccaacatgatgcttaataacaagtttttgttcttatcagctttgttttgcattgctgtagctggcgctttaggccaagctcctcctactcctagtaatcctccgacatccacgccggtgccgtcgaccccacccgcttccacacctccgcctactacccaaccaccttcaacacccacaactacttctccgccaccagctttcactcctcctcctacatcatcaccacctccagtgacagcttctccaccaccagtttccactcctccttcagcgactcccccgcccgttagctccccaccaccagcttctcctccaccggctactcctcccccagctaccc

SEQ ID NO: 43342 - DNA, 215 bp, Gossypium hirsutum
  Clone ID: LIB3189-051-P1-K1-D7
atgattgcttgaactaccataaatctatatggaacctcttgttccgattcggctggggaacgttctgggctacatatgtaggctgtgctttatgtgggttattgtttacttcacttgctactagtgggattttgatgaggtatttggtggatgaaccattgtcgattaaggtaatgttgaactttgattattgttagagtgtttcggtttcatat

SEQ ID NO: 43343 - DNA, 398 bp, Gossypium hirsutum
  Clone ID: LIB3189-051-P1-K1-D8
ctaattcttacattcttcagcaatttgaaaaccctgccaacccaaagatccattatctgacaaccggaccggagatatggaaaggcagtggaggaaaggtagatgtccttgtctctggtatcgggactggaggtactgtaacaggagccgggaagtatctgaaagagcagaatcctggcattaagctcgttggcgtggaaccagttgagagtgcagtgctttctggagggaaacctggtccacataagatccaaggaattggtgctggcttcatccctggggttttagacgtcaatttaatcgatgaagtcgttcaaatatcaagtgaagtagctattgaaactgcaaaacaacttgctctgaaagaaggattgttggtaggtatatcatccggtgct

SEQ ID NO: 43344 - DNA, 439 bp, Gossypium hirsutum
  Clone ID: LIB3189-051-P1-K1-D9
gctcaacatagagaaaactcagaaacacgcaggaaacccaaagtttttctcttttttttccctcttttttttatacacaaaggtaataattttcgaaaatggcatttgctgttacctcctctccggctgcaatttctggttccagcttttctcgttcaagtgcctcatctgatctcagaattccgcaaattggttcatttcggctagcggatcgccatgcaacggtgaatctatctcaaaagcgttgcgcagtgaagcccgtgaatgcggagccaaagaggaacgattccatgctttctcatgctgcaaccacctctgctcctgaagtgtcggaaaaagttgaggtggaggattttgaccaattggccaaagaacttaacaatgcttctccactcgaaatcatggataaggctctggagaaaattggaaacgacatcgc

SEQ ID NO: 43345 - DNA, 463 bp, Gossypium hirsutum
  Clone ID: LIB3189-051-P1-K1-E1
gtatcatcactctcccaccccgaccgcttgattttgatcagacggtaatcatgccgatcagaaacatagccgttggccggcctgaagaagctactcatccagatgctcttaaagcagctttagctgagttcatatcaacgttaatcttcgtttttgctggatctggttcaggcatggcttttaataagctgaccgacggcggtgcaacaactccggctggtctcgttgccgcctctctagctcacggatttgcgcttttcgtcgctgtctcagtcggtgctaacatctccggtggccatgtgaatcccgccgttacattcggtgctttcgttggcgggaacattactcttttacgtgggatcctttattggattgctcaactccttggctcaaccgtcggttgcctgttacttagttcgccactagtggcctggtaaaaattatcatagctgcctttccctcc

SEQ ID NO: 43346 - DNA, 473 bp, Gossypium hirsutum
  Clone ID: LIB3189-051-P1-K1-E2
cggacgcgtgggcgaggaaccaaaaggaaatgggttccagaagaaaatgctgtgttggttgcttgtatggtcgacttgcacaatgctggaacctttaatacggatacgggattcaaagctggctatttaaatgagttagcaaaaatgttagaaaaagttttacccaatgccatgttgaaggctaaacctaatcttgaatcgatgattaagacattgaaaagggattggtcaatagtttatgacatgcttagtggaaaaaacaatagcggctttggttgggatgagcataggcagcttgttgttgctgaagatgcggtgtggtactcatatataaatagtcataaagaagcagctcaattcagatatcggagtttaccttattatgaacaacttactgccatctacgcaaaagatcgagccactggaaaagatgctcaaacagctgctgatattattgaagaaataaatgctga

SEQ ID NO: 43347 - DNA, 464 bp, Gossypium hirsutum
  Clone ID: LIB3189-051-P1-K1-E3
gtccgggatgatgagttgtcatggttccgcaaagcatccctgcttggagcgtgtaatggctttatactgaatagcattccagttgtggtgactgtgatttcatttggcttgtttactttgcttggaggcgacttaacacctgcaagggcatttacatctctttctctcttttccgttcttcgtttccccttattcatgcttccaaacgttattactcaggtggtaaatgcaaatgtatcactaaaacgtctggaggagctgttcttaactgaagagagagttcttctgccaaatcctcctcttgatcctgaacttccagcaatccaaataagagatggttttttttcatgggattttaaggcagagaggcccacattgtctaatattaatttagatataccatgttggtagcctggttgcagtagttcgtattactggtgaatgtaatacctcgcttatttttg

SEQ ID NO: 43348 - DNA, 138 bp, Gossypium hirsutum
  Clone ID: LIB3189-051-P1-K1-E7
gcgagaaagtgagagatcgagagagaaaatacttcgtagggaattagcgagatcctgaaatttgggggggttttctctcttcaatcgtgtccggctacctgatttattcgtcatcatgaccacatcaatgggacttgc

SEQ ID NO: 43349 - DNA, 471 bp, Gossypium hirsutum
  Clone ID: LIB3189-051-P1-K1-E8
gtaaagcattagcaaccatagccatggcttcctcaccaaaactcttctctatgtctatcctcttcctttttgccctcttctccatgcaaatccatgctagagagtacttcagcaaattcccaagagttaacatcaatgagaaagagacaacaaccagagagcaaaagcacgagaccttcgttccccagaccacccaaaagccagaagaacaagagccaaggttcattcctgaaacccaaaatggttatggcctttacggccacgagtcaggctcaagccggcccagtttcaccaccaaagaaacctatgaaccctatgtcacccctgttagattccaccctgatgagccctataacagcatccccgaatcctccaacaataaagacacttactactacaacaagaatgcctacgagtccactaagcagcaaaacttgggcgaggccattttcaccgagataggatggagca

SEQ ID NO: 43350 - DNA, 447 bp, Gossypium hirsutum
  Clone ID: LIB3189-051-P1-K1-E9
cggacgcgtgggcggacgcgtgggccgtccttcaaaacatacaaacaaagggttgttttcttgattgcaagagaaaggaaatctttttggacacccaagtgtggttgaaggcttaaacatcagctgaagaactgataatttttctgttccaagctttgcttttgtactgtatttcctcaaaatttctagcgatgactccaattgggtttctgggtttactgtttttgctgctcgctctatacttggggatagaccctttttaagcacagtgcaatctctgaatttcctgactttgagtcttacaagggggatttgccctcatgggaactggttccgacagacagggacaaggataatttgcttcaaaagtcagagattaagttcttgaaccaggttcagggccctgaaagcatggcatttgaccctcttggtcgtggtccttacact

SEQ ID NO: 43351 - DNA, 205 bp, Gossypium hirsutum
  Clone ID: LIB3189-051-P1-K1-F1
cttccgattttccttcattttctcagcgaattcgaaaccgaaaacgcaagaaatttttcattttttcttgattccagggcaacttttcaatctggggttttgcttgaatattcatattaactttgttttatacttaaaaaagatgacagaagcgagtaagaaaagcatgaaatccgaaccagttcatgttcaaagcacagcttcg

SEQ ID NO: 43352 - DNA, 471 bp, Gossypium hirsutum
  Clone ID: LIB3189-051-P1-K1-F2
atttgaagtaaatttccatatttttctttctttaaattaatcttaaccagggccggtagccactgggttacgattccttataataaaatgcaaatataaagtgtctgtattgcttggtgtaaggtgcagttgagatatccttgaagatagtttattcttctagtacaattattattataggaattattatggactgactgctgtttaacaacttcttttaacaagctacaaccagggcttctgggctgaaattggcttcatttgtgaaccaagaaagaaacaacctatcttttaagttgcgtcctgtgcctgctcgcttgcggatatcctgtgctgtacgtttctcaatcaattgaatgatattactttctgtactcatttgtgagggggcaaatgctactgactacacaatggggttcacattttttttgtatttttatattcattattcataaatgtctctgcatcttt

SEQ ID NO: 43353 - DNA, 213 bp, Gossypium hirsutum
  Clone ID: LIB3189-051-P1-K1-F3
aaggaaaaaaaaaaaaaaggggtaattaaatttttttattaaaaaaaaaaaaaaaagggaaaaagaactgattgcccgttgggtgaaaaataccccctacaaaaataaaaattctataccaataaaaagagggggagaggaaacaaccaaaaaaaataccaaatgtaaaaaagggaaacaaatgggaaaaaaaaaaaaaggggggtttaataa

SEQ ID NO: 43354 - DNA, 450 bp, Gossypium hirsutum
  Clone ID: LIB3189-051-P1-K1-F7
gccatttttagatccatcacttctctttgtaactgaaaaacaaaacccaatttgaaaccctaacgagagaaccagggaacaccgaaggaagaatctcgagaaccatggacagagactggggctccaaacccggttctggaggtgctgcctccgcccaaactgaagccatggaccgccgcgagcggctccgtcggcttgctcttgaaaccatcgatctcgccaaagatccctatttcatgcgcaaccacctcggcagttatgagtgtaagctttgtctgacgctacacaacaatgaagggaactatttggcacatacgcaagggaagcggcaccagaccaacttagctaagagagcggcgcgtgaggctaaggaggctccggctcagcctcagcctcacaagcgtaaagtttctgttcgtaaaacagtcaaaattggtaggccaggatatc

SEQ ID NO: 43355 - DNA, 469 bp, Gossypium hirsutum
  Clone ID: LIB3189-051-P1-K1-F8
ctttcctcgtatgccccagtcatctctgctgagaaggcttaccacgagcagctctcagttgctgaaatcaccaatagtgcctttgagccctcatctatgatggctaagtgcgatccacgccatggaaagtacatggcttgctgtttgatgtaccgtggtgatgttgttcccaaggacgtcaatgctgcagtcgccaccattaagaccaagcgcaccattcagtttgtcgattggtgtcctactggattcaagtgcggtatcaactaccaaccacccactgttgtccctggtggtgatctcgccaaggtccagagagctgtttgcatgatttctaactccaccagtgttgctgaagtcttctctcgcattgaccataagtttgatcttatgtacgccaaacgtgccttcgttcactggtatgttggtgagggtatggaaagaggagaattctcagaggctcgtgaggatc

SEQ ID NO: 43356 - DNA, 274 bp, Gossypium hirsutum
  Clone ID: LIB3189-051-P1-K1-F9
tctttttactaattccccattcatttatgctgttttttcttaccacgagcacttctcattttcggggagcaccaatagtgcctttgagccctcaactataatcccttattacaatccactccatttaaagtacatgtctacgcttttaatatacctttctaatgatatttccaagtactttaattcatctatctcccaccatttataccaaacgcaccatctaattttatcttaatactatctactactatcaaatactattttaacatccaac

SEQ ID NO: 43357 - DNA, 468 bp, Gossypium hirsutum
  Clone ID: LIB3189-051-P1-K1-G2
gaaaaatagaagaagcctttgtttggggttcttcaacttagctttccatatattcatccatggcttctaagcttcttttgattgctgtatttgttcttgatctcattgcttttggtttagctgttgcagctgagcaaagaagaagcactgccaagattgtgcaggataatgaaattcaatacaactattgtgtatataactcagacatagcaactggctatggtgttggtgcatttttgttcctcatggctagccaagcccttataatggttgccagccgatgcttttgctgtggaaaggctttgaaccctagtggttcaagggcttgggcagtcatccttttcattgtttgctggttatttttcctaatagccgagatatgtttgttggcgggatcagtacggaatgcataccacacaaaataccggaccatcttcagcgagcagccaccgtcttgtgaaactttga

SEQ ID NO: 43358 - DNA, 430 bp, Gossypium hirsutum
  Clone ID: LIB3189-051-P1-K1-G3
cggacgcgtgggctgaattggagctcagaaattccaaaaaagagatggagataaaatccttatttgatcgaattactatactgaggatggggctttatcaaatgctgaaggctcttgaaattgatgtccatggttatgatgataagatcaaacaagaccaattagtccttgactgtatatttggagggatccaaaagatgaagaactcacatttaaagtctctggatgataatcagcaattcataattgagaattcagttcttattggattgcttgggcaactgaaacttgaggcagaaaatcttgccacagagaagaactcactgcaccaggagttgaaggttcagttcgagaagttctcagaattggagacttccctttttaatacaaatgctgaacttgaaatatcaagaacgaaacttaagagctt

SEQ ID NO: 43359 - DNA, 469 bp, Gossypium hirsutum
  unsure (1)..(469): unsure at all n locations; Clone ID: LIB3189-051-P1-K1-G7
aaaaaggatgatcgcatacctacgaagatgcccaagtttaaccatcgtttgtggaaacaacgttggctccctccagcgttttctacacaatggtccggacaccttggaagagcttcttaacagacacctagtgaagaaggagaaatccctagatgatgaggaagaagaatcgctgaaccgacagcgtctcaccagcactcgacgagaggcgctgggtctctaccgcgacatccttcgagccacccgattcttcatgtggcccgattctcggggcattctgtggagggacatattgagagagaacgcgaggaaggagttcgaggaagctcgcttcgagaaggatccggaagttgtgacccgattgcttatcggtgggcgtgatgcggttgaatctgcattggagaagctagccgaaaagcagaggcatcagattcagaaggagcggngagatggtcggtgatgattgatt

SEQ ID NO: 43360 - DNA, 159 bp, Gossypium hirsutum
  Clone ID: LIB3189-051-P1-K1-G9
cttgaatctatttttttgaagatggagggtaaagaataagatgttaagctaggagcaaacaaggtgggatatttacaacctattgggagatcatcccatacattcaattacttcaatgtgccatcatcatcacccttcttttaacctgctgaactcaaa

SEQ ID NO: 43361 - DNA, 333 bp, Gossypium hirsutum
  Clone ID: LIB3189-051-P1-K1-H1
ctttacttgtgctctgttctaccaatgatagtttttttaacggttctttttttattaaatttcagggtcgttttgctgggggcggttccgtgtcccaaggacgttcgacggttgaagcaatcggacgtaggtggggagatcagcctaaatgaagcgtatgaaactctggattgcactttgtgagatagtgctagaggaatggatcacctagtaattccaacgagagatcattgattagctgcttcaatatcagaccttagcaaagctgtggcttagcaaagtgcgaaagatgaggcggttttgttttaaatagaaatggattattggatttcg

SEQ ID NO: 43362 - DNA, 434 bp, Gossypium hirsutum
  Clone ID: LIB3189-051-P1-K1-H2
gcttctgaaaaccctaatccccccgaaaataaaatccctcaaagagtcgaatccaaagaacaaagaaaaggaattcacagtttgaataagatgccgaaccttgaatgtcgtatgtacgaagcgaagtaccctgaggtggacatggcggtgatgatacaagtgaagaacatcgccgacatgggtgcctacgtttcgctccttgaatacaacaacatcgaaggcatgatcttgttctcggagctttcccgccgccgtattcgtagcgtcagcagtctgatcaaggtgggccgaaccgagcctgtgatggtccttcgtgtcgataaggaaaagggttacattgatttgagtaagaggagaagtagcgaggaagatattcaggcttgtgaagaaaggtataataagagtaagcttgttcactccattatgcgacacgt

SEQ ID NO: 43363 - DNA, 479 bp, Gossypium hirsutum
  Clone ID: LIB3189-051-P1-K1-H3
ggcttcctcaccaaaactcttctctatgtctatcctcttcctttttgccctcttctccatgcaaatccatgctagagagtacttcagcaaattcccaagagttaacaccaatgagaaagagacaacaaccagagagcaagagcacgagaccttcgttccccagaccacccaaaagccagaagagcaagagccaaggttcatccctgaaacccaatggttatggcctttacggccacgagtcaggctcaggctcaggctcaggctcaagccggcccagtttcaccaccaaagaaacctatgaaccctatgtcacccctgttagattccaccctgatgaaccctataacagcatccccgaatcctccaacaataaagacacttactactacaacaagaatgcctacaagtccactaagcagcaaaacttgtgcgaggccattttcaccgagaaaggatggagcaccaaggaaaaccagaac

SEQ ID NO: 43364 - DNA, 401 bp, Gossypium hirsutum
  Clone ID: LIB3189-051-P1-K1-H7
caaaatcaaaatgtcctttctctctctctctctctctctctcaactgaatcaataacagttccattttttcatagcttggatttcattttatgaacaagaatttccctcattctctctcttatctaaatcttgagatttgacctaatcttgagaatcataattagaattagaatttgagagagattctaagatttcagcattttcgtggcagaaaaaaaaaactacgtaagaaaattgtacattaaaaatccctatacagagggaaaataaaagcaaagtgcgaaagagtgaggcgtttttgtttttaaatagaattgaattattggatttcgaagcttaaggagagaaaaagaaagagagagtagggattagggattagggttttctggtgcgtcgaaag

SEQ ID NO: 43365 - DNA, 448 bp, Gossypium hirsutum
  Clone ID: LIB3189-051-P1-K1-H8
ccctaatatcataccgtgatttggttggtgttgcgtatacggaagaggagacgaaggctatggcagctgagattgaggtggttgacggtcctaatgatgagggtgagatgtttactcgtccgggtaaacttagtgaccgctttcctcagccatatgcaaacgaacaagcagctaggtttgcaaatggaggagcttatcctccagatctaagtctcatcaccaaagctcgtcataatggccagaactatgtgtttgcgcttctaactggttaccgtgaccctcctgctggtgttatgattcgtgaggggctacactataacccatactttccaggaggagcaattgccatgcctaaaatgcttattgatggtgctgtagagtatgaagatggcacccctgcaactgaagctcagatggggaaagatgtggtgacatttttgtcatgggc

SEQ ID NO: 43366 - DNA, 449 bp, Gossypium hirsutum
  Clone ID: LIB3189-051-P1-K1-H9
cccacgcgtccgggactttggccttgctgtgactactgaatctcagaacaaaaacgttaagttgtggggaacattgtgctatgtaggtgcagagtacctcttagagggtaaattgaccgataaaagtgatgtatatgctttcggagttgtacttttggagctgctaatcggaaagaaaccgatagagaaaatgtcaccaactcagcaccaatctattgttacatgggtcatgccccagcttaccgacagattgaaacttccgaagttagttgatccagtaataaaagacacaatggatttaaagcacttatatcaggtcgctgctgttgcggtgctgtgcatacagcccgaaccaagttataggccactcataactgatgtgctgcattgtctcattcgtcttgtaccgatagaactcggtggttcgttaagacttacatagccggtcg

SEQ ID NO: 43367 - DNA, 446 bp, Gossypium hirsutum
  unsure (1)..(446): unsure at all n locations; Clone ID: LIB3189-052-P1-K1-A1
gttaattccctgtttctccgatccccatccatgtcagaagctgaacaagccaattccccaaagccgactccatatttagaggtggtgtgcaacagttccaacacgaaaaccctgattgcacccaccactaaggcctgatttgcagtgtcattgataaatagacaggtgggtatcggagctccacttgccttgcatattgaatcctttagagaaggggaggaacccattatttttggccctgatgctgttcttgtgaattatggcaatggttggaatttgcaaactgttaatgaaatggattttcctggcattggaaaaggcaaacatgttcggggatttccgacacagctccctaatggaaagaacgttgatctcactaattctcgcaaaatggtttcaaaaccaggaataagttatctttacattgcanaagtcttgttagcttt

SEQ ID NO: 43368 - DNA, 483 bp, Gossypium hirsutum
  Clone ID: LIB3189-052-P1-K1-A10
cccacgcgtccgcccacgcgtccgcaaacctagttttagtttccttatcctcctctttctttgtgacaacctctcatctggtgactgtctaccgatgcctcacctccgcctactgtctgcatcgtcggcagcggcatcggcggttcctccgtcgcccacttcctacgccactactttcatccctccccttcccaacccagacctcctaacatcaagatcttcgagcgtagctacgtcgtcggtggtcgcatggccactgtctccattggcggtgaaacttttgaggctggtgcttcaattcttcaccccaagaactaccacgctcttaactactcgaatcttcttgggttgaaggtcaaaccgccgcctgcctcggaggatgatgattcgatgtcgcttgggatctgggatgggaagaaatttgatttcaaaacccttcaagtggattccaagtttccattggtgcagaagattgtttcctat

SEQ ID NO: 43369 - DNA, 402 bp, Gossypium hirsutum
  Clone ID: LIB3189-052-P1-K1-A11
cggacgcgtgggcggacgcgtggggaaatcatatgcgtctattgtgaagtttatgaaggagaatggagttcctttatccacccgtacgcattcccttgtgaagtctgcagttaagagccatgaccaaccaggaactgtggcaccacctatttctccggccccagtgtctgatgcacagatatccaacaacagtattacagaaaatgggaccaatcaagatgtggaagctgagggcccctccatttatgtcaaaggtctgcccctgcatgccacacctagcatgctggagaacgagtttaagaagtttggacctattaagaacggtggtattcaagttcgaagtcagaagggattctgttttggttttgtggagtttgaacttgcaagttctgctcaaagtgc

SEQ ID NO: 43370 - DNA, 239 bp, Gossypium hirsutum
  unsure (1)..(239): unsure at all n locations; Clone ID: LIB3189-052-P1-K1-A12
ggtcaagttgttgaaactgattcaggtcgaccaattctgagtgttcgcaggattcntcctgcaaagctggattttgcctctgtggaagcgacctcttaatttgataagcccaagcgtaacctgaggaaagtttccagtcgtccagctgagatggcagtgcaggaaaacccacaaaatgagcttgaaaaggttaaacgcaacttgagaaaggtttataatcctgttatagaaaattcaat

SEQ ID NO: 43371 - DNA, 415 bp, Gossypium hirsutum
  Clone ID: LIB3189-052-P1-K1-A2
tttaaactgagctttgctgaattttcgtgatcgtcgagaaagaaaattatgggaaggaaattctgcggtggcggcaattggaaatgcggtggaaccactgaggaagtgaataagattgtgagtactttgaatgctggagaggtgccttctcaggatgttgttgaggttgtggttagccctccatttgtgttccttcctttggtcaaaacttcactgagacccgatttccatgtcgctgcacaaaattgttgggtcaagaaaggaggtgctttcactggtgaagttagtgcaaagatgcttgtcaatttgagcattccttgggttattattggtcattctgagaggagacttattttgaaggagtcaaatgagttcgttgcggataaggttgtttatgcacttgctcaaggtttga

SEQ ID NO: 43372 - DNA, 150 bp, Gossypium hirsutum
  Clone ID: LIB3189-052-P1-K1-A3
cgaattccggtcgaccacgcgtgcggaaaaaattcattcatctcagttttttttcttgaaaaataagaagaaaacagggggtctgctgagtggcaaatagttagtttcaccggtgggataccaagacttacttcacatttggaattgcac

SEQ ID NO: 43373 - DNA, 488 bp, Gossypium hirsutum
  unsure (1)..(488): unsure at all n locations; Clone ID: LIB3189-052-P1-K1-A4
aaaggatgcaactggcaaggattatgatgggtggtgctggccaggctcctcctcctacccagatgtgtgaaatcccgagattaggtgcatggtgggctgagaagttctcctatgataattatgtcggttcaactccttcattgtacatttggaatgacatgaacgagccttctgtgtttaatggacctgaggtgacaatgcccagagatgctttacatcttggtggagtggaacatcgggagttacataatgcctatggatattacttccacatggcaacagctgaaggccttctaaagcgtggagatggtaaggacagaccttttgtcttgtccagagcattctttgcttgaagtcaaaggtatggagcagtctggactggtgataattcggcagattgggatcatctcagggtttcagtcccaatggttttgacgcttggtcttactggaatgacattctctgnggctgatgttgggggatttttt

SEQ ID NO: 43374 - DNA, 354 bp, Gossypium hirsutum
  Clone ID: LIB3189-052-P1-K1-A6
ccaaaaaaaaaaatggaataccgcaatgttttttttatttttgttattttttccttgttcagtcgtttcgtgattggggcgggcactttctcggcggagggatttgaagttgatccgttgatcgaacaagtaacggacggtcactaatgagccgagccgcaactgcttttttttagcatcacttctcgctgttcaagaagcggttcaagaaatcgtactgatcactagatgtgcactattataggttcaagatttttcaggttaaccttgtgactagcttagcttcatcataagcttaacccttttattactcacggtgtgactttattttttctttttttcattcataattat

SEQ ID NO: 43375 - DNA, 376 bp, Gossypium hirsutum
  unsure (1)..(376): unsure at all n locations; Clone ID: LIB3189-052-P1-K1-A7
caacaccaaaccaccccctctctctttcgctctctatctcaacgtattctcctccanatctcggggagtaatcccataaagatgggtgtttttccagcccttcctttggtatataggctttagacctgttataaaatccctcagccaacaacttcgatattacccatatgctcttttctttttgttgattcgatttttttctctcttctttggggtttctggcttctcttcctttcaggaaacctaataaggaaaacagtgtgcgtgtgtttttggtagagatacagcgtctgctgggatcttgtttggagagagaaaatggagaatgaagtataaagagagagtgggtcgatgatctttaacgatgaggagttta

SEQ ID NO: 43376 - DNA, 85 bp, Gossypium hirsutum
  Clone ID: LIB3189-052-P1-K1-A8
cagttgatattacactcatttaggaactataggccgtctaccaacatgatcatcggtggcatatggtattattggtctgaagttg

SEQ ID NO: 43377 - DNA, 177 bp, Gossypium hirsutum
  Clone ID: LIB3189-052-P1-K1-B10
cggacgcgtgggtttttaagttctctccaaaagctttctgttgaactcatttctggtttatgattgcagttgtgttgcagatcttcctttagtggattttcaggtttaaaatatttggtttaatgaattgttagtcacaccattattatggaatttaattttattgttagtgtttat

SEQ ID NO: 43378 - DNA, 370 bp, Gossypium hirsutum
  Clone ID: LIB3189-052-P1-K1-B11
gttctagactcgcttttctcttcacccttactttcctcctcttcaccttctctcacgcccggttgagcacatctgaatcccaacatgatgtcacccccgaaaaatccgaatccgaatccgaccccgaatccgccatccttctccccagcgagaaaccccactttgaaccccccaaattactcgacttcaagcacgatgatgatgcctccggcgtcgcctccgttcctttgaccaggatcagttttaaccctgtcaaccgccacttcccaaggcgtcccttgaatccgttccgtcacaagcacaactgccgtttccataaacgcttcaggcttttgaatccacgctttcatcagaggcgcttcatttctta

SEQ ID NO: 43379 - DNA, 440 bp, Gossypium hirsutum
  unsure (1)..(440): unsure at all n locations; Clone ID: LIB3189-052-P1-K1-B12
ggttgttgtactctggactgcaaacactgagaggtacagcaatgtcattgtggggctaaatggcggggtggaaagccttatgggttggttggagaanaatgaatcanagatttctccttccactttgtatgctattgcttgtgttcttgaaaatgttcctttcatcaatggcagcccacaaaacacctttgttccagggttgattgatttggctattcaaaggaactgtctgattggaggagatgacttcaagagtggccagaccaagatgaaatctgtcctcggggatttccttgttggggctggtatcaagccaacatcgatagtgagttacaaccatctgggaaataatgatggcatgaatctgtcagcaccccaaacctttcgttccaaggagatctcaaagagccatggtggtgatgacatgggttcaagcaatg

SEQ ID NO: 43380 - DNA, 451 bp, Gossypium hirsutum
  unsure (1)..(451): unsure at all n locations; Clone ID: LIB3189-052-P1-K1-B4
gcttcaaaggcttgtgaggtacgtatgtgaagagtgaagtacactcttcttttgttctgatgtatggagattaaaaaatcttcagccaggtggtgcgcgtggaaatttggaatcaccgggttagtgtagattaatattcatcaaattggtcagaatgatatgcacaagttgaggggatttttgtgttaattcttttttataatattgttttgtttgtgttttcgtttnccccattccccaccttttgtggcaaatacagtatgtccttttcatataaaaagaatagtacaagatatgtatgattgttgagagatggatactccgaggtggatgattcaatataatttcatttgtttcttcttaaaaatattaaaaataaattataattattatttataattatatatttttatatctattttcttaattcttatgataatttttttttttt

SEQ ID NO: 43381 - DNA, 487 bp, Gossypium hirsutum
  Clone ID: LIB3189-052-P1-K1-B5
gcggtcagccaattgtttgagctagctagctcttactcaaatggcaaccaaaacgatgatgttgcaaagattgccacttttcttctttttggtcagtgtctgcaactccattttccttggtgctaatggagatgacaatggtggttggcaaactgcccatgccaccttctacggtggtgctgatgctaccggcacaatggggggagcttgtggttatggaaacctgtacattcaagggtatggaacgagcacagcagctttgagcactgcacttttcaacaatggcttgagctgcggtgcctgctacgagctccggtgcaacaatgatcctcaatggtgcattagtcgaaccataaccgtgacagccaccaacttttgtccacctaactatgctttatctagtgacaatggcgggtggtgcaatcccccacgagaacactttgatttggccgaaccggcattcttgcggatagcagaatatcgagct

SEQ ID NO: 43382 - DNA, 282 bp, Gossypium hirsutum
  unsure (1)..(282): unsure at all n locations; Clone ID: LIB3189-052-P1-K1-B6
gccagccgtgcgctcttttttgtgtactctttactacaaacacttttatttacactaacatcattgttataactaaatgacggcgtttaaagccttatgggttggttgganaacaatgaatcatagatttctccttccactttgtatgctattgcttgtgttcttgaaaatgttcctttcatcaatggcagcccacaaaacacctttgttccagggttgattgatttggctattcaaaggaactgtctgattggaggagatgactttaagagtggccagacc

SEQ ID NO: 43383 - DNA, 487 bp, Gossypium hirsutum
  Clone ID: LIB3189-052-P1-K1-C10
cttttgcctctctcgttacgttaccgactttacattttcttttttatttcattttgccgctggggaagaaaccgccgtgaaaaatggaatctccagctcaacgccgcctcaacgctatccaatctcacctcctcccctccgccgtatccgccgccgaggatgaatccttgatcggacgtaatgttacctcctcctcttcatctccaccgttctttgttgatcaacagtacagtgtgattcttcctgagaaattgcaaactggaaaatggaatgtttacagatcagctcggtctccgatgaagcttttgagtcggtttgacgatcatcctgaaatcgggacgctgcatgaaaactttgtacatgctgtggagacatttagagattacaagtacttgggaacgcggattcgggtggatgtgacagttggggagtataagtggatgacatttggagaagcggctacagctcgggaggctataggttctgg

SEQ ID NO: 43384 - DNA, 447 bp, Gossypium hirsutum
  Clone ID: LIB3189-052-P1-K1-C11
cggacgcgtggtttaaactctgaaacaagagataacagagttattaagttcagtggcaattgtgttgtccattgccggacatcatcagcatccagaatcatattgcagagaatttaaagttcatgtttataagagcaataatggtggcaagggcataggagtatcggttggtctcattgttggaattgcagttctcattgtacttttggctattggccttctcattgtgtgtcgaagatactgccctcgcgtgatatcggagcaacatttactgcagaaatcagtaccagagaactcaacagcagggttatcatctgagattttaaccaatccaagacatgtttttgaatcttcaaagtcggaggtacaaattcttccaaggtgtcgatcattcagtctggaagagttaaaggaagctacaaacaatttcgatagctcggcttttct

SEQ ID NO: 43385 - DNA, 392 bp, Gossypium hirsutum
  Clone ID: LIB3189-052-P1-K1-C12
gaaaaaaccaaagggccaaaaccttgtcttgttccattgcagtttctcttacacattatcatgaggttgcccgttttctggtggtctagggtttttcaatctatacctcttctcactaatcatgagtcgtaatccagaggtaaagtgggctgaaagagctgacaaggtttacattacggtgctattaccggattcgaagaatgcgaaggtcaatcttgaacccgagggagtgtttacactttcggctaatgccggagctgacaacaacctttatgaattgaagttggatctttatgataaggtcaatgtggaggaaagcaaaattagtataggagtccggaacatagtttgtgtgttggagaaagccgagaaagtgaggtggaaaattcttt

SEQ ID NO: 43386 - DNA, 475 bp, Gossypium hirsutum
  Clone ID: LIB3189-052-P1-K1-C4
gcggccgcttttcgacgccaccaccgtcccctcaaccttttttctcccacttcctccgacccagaaccggagctccactcgaaacgcagggtggaacctgggttcaaaagcttaaacccggtttcaccccttccgacgtcgaatcagctttacgagcccaacgcgatgccgatctcgccctcgatatcttccgttggacggctttacaacgtgggtacaaacacaccgataccacctacctcaccatgattaaactcctcatctccgccaaacgttacggccatgccgaaacgttggtcgaggaagttatagccggtgcttgccctatcagcgtccctctttacaacgccgttatccgtttttgctgtggtcgtaagttccttttcaaccgagcttttgatgtttacaagaaaatgctgaaatcagatgattgtaaacccacacttgaaacatttgctatgttgtttaattcttt

SEQ ID NO: 43387 - DNA, 217 bp, Gossypium hirsutum
  Clone ID: LIB3189-052-P1-K1-C5
gccttcaggcaacttgcccttcagtatcatccggacgtttgcagaggaagcaattgtggggttcaggtggaaacgatcaatgaagctggatgatatattgatgagtagattgagaggagaaacaaaggcagcagaagtgtatgaggaagagatagatgagccaatgagaggaatggatgattcagattgggatttgtgggaagaatggatgggatgg

SEQ ID NO: 43388 - DNA, 488 bp, Gossypium hirsutum
  Clone ID: LIB3189-052-P1-K1-C6
cggacgcgtggggcaatttcagttgattctatgtgctgcttcttctccttcttcctcttcaacaactccaattttcctttcgaaaaggaataatcaataacaaaaagacaaatccaatcaatcagagcaaaatccaaatgggtaatcttttctgttgtgtacaagttgaccagtctacagtagccattaaggagagatttggcaggttttgagatgttcttgaacctggatgccattgcctaccttggtttctttgaagtcaacttgctggccacctgtcgctaagattgcagcagttggatgttcgttgtgaaaccaagactaaggacaatgtatttgttaatgttgttgcatctattcaataccgggcactggcagacaaggcaagtgatgccttttacaagctgacaaacacaaggacacaaattcaagcctatgtgtttgatgttataagagcatgagtttcgaagctaaatctggatgatgtt

SEQ ID NO: 43389 - DNA, 457 bp, Gossypium hirsutum
  Clone ID: LIB3189-052-P1-K1-D10
gtctttatcccttcgttttctcagcgctaaactgttcttatgcctctgtttaacattatttgaggcggcatgtcacgttttctgcgtttgaatcctactggtctaaccctaagggctgtcctggatgattctccaaactctcctttataccttattgaaaacatgactatagctgaaagaatcgaaagatttatccaagttaccaatgctaaagacaattatttgaatcttaatgcaagggtaggccctgataattctaattctctatctcgagtagtaatggctcgagatggtttattttattcagtatggcttctaataggaagccaaggcccagaagtgaagctgttgatggacacaggcggtggtctaacatggacgcagtgtcagccttgcctaaattgtttcccacagaatctttcaatttatgattctagaactttcactacttactcca

SEQ ID NO: 43390 - DNA, 249 bp, Gossypium hirsutum
  Clone ID: LIB3189-052-P1-K1-D11
cccacgcgtccgcggacgcgtgggtgattttgatggtgatcaagatggcgagtgttttttattttttcaataattatcatttaaaaaggttatgttctgtatgaagattgaattttgagtttgtcttgttgatttcatttatttttgttttgaaattttctttgttatctcttatttctcaattgtaattgtgaattttgtggcactttcttctaaaaataaaaataaaaaaaaaaaataaatcaaaat

SEQ ID NO: 43391 - DNA, 485 bp, Gossypium hirsutum
  Clone ID: LIB3189-052-P1-K1-D12
atttgtttgctctgtatattgaaattttctttctctattttctctttagccaaaaaagatgcagagcttcgtcaagactctaaccggcaagacgatcactctcgaggtcgagagctccgacacgatcgacaacgtgaagaccaaaatccaagataaggaaggcatccctccagaccagcagcgtctgatcttcgccggaaaacagcttgaggacggccggaccttggccgattacaacatccaaaaggagtcaactctccacctcgtcctccgtttgcgcggtgggatgcaaatcttcgtgaaaaccttgaccggcaagacaatcactcttgaggtcgagagctccgacacgatcgacaacgttaaggcgaagatccaagacaaggaaggcatccccccagaccagcaacgtctcatcttcgccggaaaacaacttgaagacggccgtaccttggccgactacaacatccaagaggagtcaacgc

SEQ ID NO: 43392 - DNA, 483 bp, Gossypium hirsutum
  unsure (1)..(483): unsure at all n locations; Clone ID: LIB3189-052-P1-K1-D4
tttcacattatttcccacaccaaaaatggctcagaaagtggtattgaaagttctaaccatgaccnacgaagagaccaagcaagaatgcatagaagctgctgcagatatcttcggggttgattcaatcgctgcggatctaaaggatcagaagctgacggtgataggacaaatggatgcagtggcggtggtgaagaaactgaagaaagtggcaaaagtggatataatatcaataggacctgctaaagaagagaagaaggaaggaaaaaaggaagaaaagaaagaggaaaagaaacaggagaagaaagaagagaataaggaagagaagaaagaggaaaataaagaagaaaagaaggaagaaaagaaataaatttaaaaaataaaatgaaaaaaccccaaaccatcttcaaggtttctcaacaaatctctgcttgtagtgttacagtgtatgctctgttttttcttttttctttttggtggaaataa

SEQ ID NO: 43393 - DNA, 439 bp, Gossypium hirsutum
  Clone ID: LIB3189-052-P1-K1-D5
aggcgtgcgcccacgcgtccgcggacgcgtgggtaaatttctacttcactctctccacttaactcttccatctgtaggggatcgttttgtgtggtctgcggtctccatcaatggcgaaagaaccagttcgcgtcctcgttactggagctgcaggacaaattgggtatgcccttgtacccatgattgctaggggagtcatgttgggtgctgatcagcctgtaatccttcacatgcttgatatcccacctgctgcagaggctttgaatggagtcaagatggagttggtggatgctgcttttccccttctaaaaggtgttgttgctactactgatgttgttgaggcgtgcactggagtcaacattgcagtcatggttggtggtttcccaaggaaggaaggaatggaaaggaaggatgttatttcaaagaatgtgtttattta

SEQ ID NO: 43394 - DNA, 273 bp, Gossypium hirsutum
  Clone ID: LIB3189-052-P1-K1-D6
gcgcaagtttgtttttcttgtgattaatcgatatggctagctcaatgtcccttaagcttgcatgtgtggcggtgttgtgcatggtggtgggtgcgacccctggctcaaggggccgtaacctgtggtcaagtcacaagctccctcgcaccctgcattggttacttgacagggaatggtgctggtggcgttcccccaggttgctgcggcggcataaaatctctcaactccgccgcccaaacaacaccagaccggcaagcagcttgcaaatgcatc

SEQ ID NO: 43395 - DNA, 322 bp, Gossypium hirsutum
  Clone ID: LIB3189-052-P1-K1-E10
aaaaccagtgccataaacatgtttctcccaatctttttcattttctctttcctattttcctgcacgaacgcatccgacttctgtgttggggacttgaatggccctgtaggccctgcaggctattcttgcaagaagacagccaccgaagatgacttctctttctccggcctccttcgtaccgcaggcaacacttcgaacctcgtaaaagctgcaataacaccagccttttcgactcaattcccgggtgttaacggacttcgcatttaaatagctcgtttggatttagctgttggatgaagtttttcctattcattcacaccct

SEQ ID NO: 43396 - DNA, 151 bp, Gossypium hirsutum
  Clone ID: LIB3189-052-P1-K1-E11
aaaccatataacataaacatttctctcccaatttctttcatttactctttcctattttcctgcaggaacacatcctacttatggggtgctaactcaaacttacctctattccctctaatctattctatcaataatacatccactaaatatt

SEQ ID NO: 43397 - DNA, 486 bp, Gossypium hirsutum
  unsure (1)..(486): unsure at all n locations; Clone ID: LIB3189-052-P1-K1-E12
caacaatttatcttctttattctggttgctcagccattcatgtttatttctctaactcattgctggttagctaatggtaagggtaagagtattgcctcctaccaatacaagtgataaggtcactttggccctgtactatgaaactttatgcccatattgtgccgactttatcacaaatgaccttgtaaaggtattcctcagcgatctgtttaccattgtcaatctaaagttagtcccttggggcaatgctgacattcttggcgatgaaccccattgccagcatggagaagatgaatgctacttaaataccatacatagctgggtcatctaccactggcctgatgtgaaaaagcactttgatttcattcgctgcacagagcaacaaaactcaaagaaaccgctggtcaagaacagagcagcaatgtggaaacaatgcatngaaaagctgggaatgagtgcttacagaatcaacaaatgctatacttt

SEQ ID NO: 43398 - DNA, 349 bp, Gossypium hirsutum
  Clone ID: LIB3189-052-P1-K1-E4
aatagtgcctttgagccctcatctatgatggctaagtgcgatccacgccatggaaagtacatggcttggtgtttgatgtaccgtggtgatgttgttcccaaggacgtcaatgctgcagtcgccaccattaagaccaagcgcaccattcagtttgtcgattggtgtcctactggattcaagtgcggtatcaactaccaaccacccactgttgtccctggtggtgatctcgccaaggtccagagagctgtttgcatgatttctaactccaccagtgttgctgaagtcttctctcgcattgaccataagtttgatcttatgtactccaaacgtgccttcgttcactggtatg

SEQ ID NO: 43399 - DNA, 307 bp, Gossypium hirsutum
  Clone ID: LIB3189-052-P1-K1-E6
ctgagatcacatagaaaaatggtgaaagcagtggctgttcttagcagcagtgaaggtgttagtgtgacggttttcttcactcaagagggagatggcccaactacagtgacgggcaacatttctggtcttaagcctggccttcatgggttccatgttcatgccctaggggacacaacaaatggttgcatgtcaacaggacctcactttaatcctgctggaaaagagcattgggctcctgaagatgttaatcgtcatcctgtttgatcttatgaaatgttacttttggttcttatggcttttcttagtt

SEQ ID NO: 43400 - DNA, 490 bp, Gossypium hirsutum
  unsure (1)..(490): unsure at all n locations; Clone ID: LIB3189-052-P1-K1-F10
gttttagttgccataacgtcaccttccaatacaacccacaatgaggcaacaatatgtcttcgctgctctcacgttgctcatcctggtgtccctcagttgttcaacaacattagcccaatctccggcactggccccggcaccttctggcccgacaaacgtcaccaagatcctcgaaaaagccggtcaattcaccctcttcattcgtcttctaaagtccactcaagtggccaaccagctgctcggtcagctcaacaattccaacaatggtatgaccgtttttgcaccaacggacaatgctttctccagccttaaatcgggcacattgaattcactcaccgatgaacaaaaagtgcagctggtgcaattccacatcgtcccaacatacctcacctcgtctcagttccaaaccattagcaaccctttgagaacccaagctggtgatagtggcgatggcaagttccctctcaatgtcaccacttcggngaactct

SEQ ID NO: 43401 - DNA, 333 bp, Gossypium hirsutum
  Clone ID: LIB3189-052-P1-K1-F11
cgaccgcttgattttgatcagacggtaatcatgcctatcagaaacatagccgttggccgggcttgagaagctactcatccagaggctgttaaagcagctttagctgagttcatatcaacgttaatcttcgtttttgctggatctggttcaggcatggcttttaataagctgaccgacggcggtgcaacaactccggctggtctcgttgccgcctctctagctcacggatttgcgcttttcgtcgctgtctcagtcggtgctaacatctccggtggccatgtgaatcccgccgttacattcggagcttttgtgggggggaacattgctctttta

SEQ ID NO: 43402 - DNA, 268 bp, Gossypium hirsutum
  unsure (1)..(268): unsure at all n locations; Clone ID: LIB3189-052-P1-K1-F12
cggacgcgtgggtttagatctttcttctcgcttcttattcaaatcagatcttaaggaaacggttgaccgcaccgatctgattggcaggattnctaannatttcntcnntcanaaaatataaacaaaagaagaaatggcggtggcagcatctgcactatttcttctagatataaagggcctggttctggtgtggcgtgactaccgttgcgacgtttccgctgctcaagcttaacgcttcttcaccaaactcatcgaaaaaaagggagat

SEQ ID NO: 43403 - DNA, 489 bp, Gossypium hirsutum
  unsure (1)..(489): unsure at all n locations; Clone ID: LIB3189-052-P1-K1-F4
ttttgttttctttagggagtttgccagaactttcagatttcataaattaatataaaataaaaattggacaaaggacagaaatggaaattaaaagactgccttaagttgacaagtgtgtgtaaaatttcctaatttttcgtattggccacatcaacagagatatcaatcaatcaaagaaagatcaaaccaaattaccattttttgttgttttgtttctctgatagttttggaaagaatatgttagcagtttttgagaaatcgattgccaagagccccgatgctcttaaagtttctggtgattctgaagcagcttcagccctcaacaagggcttcttggctacccattttgccactctccatcctggttcagtcactgtcaatcttggttcttctggnttcatggcttactctcttgataaacaaaacccacttctccccaggctctttgcagttgtggatgacattttctgcttgtttcaaggccacatt

SEQ ID NO: 43404 - DNA, 154 bp, Gossypium hirsutum
  unsure (1)..(154): unsure at all n locations; Clone ID: LIB3189-052-P1-K1-G10
tggatccgtaacctcgggaaaaggattggctctgagggctgggcacgggggtcccagtcccggacccgtctgctggcggcgcaggggtcnaactnctcccgcggcgagagcgggtcgccgcgtgccggccgggggacggactgggaacggctcc

SEQ ID NO: 43405 - DNA, 438 bp, Gossypium hirsutum
  unsure (1)..(438): unsure at all n locations; Clone ID: LIB3189-052-P1-K1-G11
gaagggatatgtctgtctcaatccctcaaactgcttttttctctcaaactaacgttaatgggaggagaagagccaacggggtggtaaggaaaccgctgatgcttaggagtttgacggtgagagctggtccaaagaggatctctttcgggggtgattgcagagaggcgttgcangctgggattgataagttagctgatgccgtttctgtcaccttgggtcctagaggacgaaatgttgttctttttgagtctgagaaacttaaagtagttaatgatggtgtcaccattgctcgggctatagaactatccgattctattgagaatgcgggagcaatgctaatacaagaggttgcaagttaaatgaatgatttggctggtgatggtactaccactgctattattttagttcgagccatgatcaagtttggattgttggtag

SEQ ID NO: 43406 - DNA, 488 bp, Gossypium hirsutum
  Clone ID: LIB3189-052-P1-K1-G12
ctcacttctttctttttatatctttgtctctctctacctctgtctgaattctaaggtctgtgttgtgtcctcccctgtgagagagggggttaaacaaaaaaatggagaataataacaaccaggtcacgggagagttgaagtctgggaataagaagcaagttcgattgttttactgtatggagtgtgaagagcttgcccgtaaagttgctgctcactcccaactcattacccttcaatctatcaactggaggagctttgatgatggatttccaaatcttttcataaacaatgcacatgatatccgaggtcagcatgttgcttttctcgcatccttcagctccccagctgttatctttgaacagctttccgtcatatataatcttccacgattgtttgttgcttccttcactttggttttgccattctttccaactggctcctttgagagaatggaagaagaaggtgatgttgcaactgcatttaccatg

SEQ ID NO: 43407 - DNA, 493 bp, Gossypium hirsutum
  Clone ID: LIB3189-052-P1-K1-G4
aaaaaaagagagaaatgggcactttctatctctactctcatcatcatcttcttcatcctacgactgggtgaaatttgacaaccctaattcccttaaacggaaaacgcaaatttctctcttccccaaaacactcttctccttctccgttcctctgtttctcctctaaaaacaatccttccccttccggcgatagtgttcccagtaacttttgcatcattgagggaccggagactgttcaagattttgtgaagatgcagcttcaggaaattgaagataatataaagagcaggcgcaataagatctttctcctcatggaagaggtaaggagattacggatacaacagcggataaaggaatgtgaagttatcaatgagaatggcgaagaagaaacagatgagatgcctgacattccatcttcaattccttttctctctcatgtgacaccaaagacaatgaagcagctctacttcacaagcctggcatttatatctgg

SEQ ID NO: 43408 - DNA, 477 bp, Gossypium hirsutum
  Clone ID: LIB3189-052-P1-K1-G5
atcaagagccaggtccagggtttggtcaaggcatcgacaccctggaggagctgtatctgagcggaggtgtgctttggggcgagaatctcttgggtttgcaagatgacgacgatgaagatgatgtgcgtgtaataagtgatgtaggtgaagacgcatccccaagcccaaggagacgcagacgcctgacgcggtcaaggtcagatgaagatcagtcatgaaataaatcagatatttttgcaggtaagtcccagttgcttgacattatttcgaatgggatttatttcgaactgcttttccctgatccggtcggtagtattcatcccaagtggtatgcataagcttttgctggtctcagaatccaccatcttgtgggtttctagtatgtgtcatctggaattatgtattcagacttttatgtattctggctttagacaaatgtatttagatgtactgaagctcaaaccagtatttctcttc

SEQ ID NO: 43409 - DNA, 460 bp, Gossypium hirsutum
  unsure (1)..(460): unsure at all n locations; Clone ID: LIB3189-052-P1-K1-H10
caaacagtgccatttggtgcccttttcctgaatgaaccagtaactggtaaagaancanactgcaggatttatgaagatgacaggtgcgctgtangtctaattaactcgaaccctagaagcataattattacatttagtttaaatgttacatccaaagtttatgatgtaacaaaagccagcgatatgtgttcaacactaaatggatcatgccggctccaacttcagtttccccacactcagtatgttatagtttcaactcctgataatggtgatattgccggacggtacgttgagctgtcttttgtcgctcgagttgttacttacattgcaattttaagtttcttcatcattatcattttattggtgctgaaatacctaggagcatgcaatgatgagagaacagtaattaatagtaatacaacgttcagggaaatatcgtggaggacggagactgacccta

SEQ ID NO: 43410 - DNA, 434 bp, Gossypium hirsutum
  unsure (1)..(434): unsure at all n locations; Clone ID: LIB3189-052-P1-K1-H11
gcaaagcccatagctgttaataaacacaacaaaaatctcagctagctagcttttcccctccattagaatccattgcttgcaccggtaggatgaanatnaccttggctatccttgctctctcattattctcctcttgcttacaagccacactaggggaaattatatgtgaacacctttaccaagacacctgtgcttacgcggtggcgtccacaggcaaacgctgtgtgctcgagaagcacgtcaagaggagcggtgaagaagaatacacttgccgtacctccgagatcgaagccgataagataaacaactggatcgaaaccgatcagtgcgttaaatcgttcggcctcgaccggaaatcattcggtatctcctccgattcccttcttgagtctcgcttcaccgaaatgctttgctctcctcaatgttacaatggt

SEQ ID NO: 43411 - DNA, 374 bp, Gossypium hirsutum
  Clone ID: LIB3189-052-P1-K1-H3
ctagatcgcgagcggccgcccgcgatctagcaagaatgctctcctctgcggtagggcagctgggcgaagcacccgaccgctctaagggaccatatgataaagaacgttgtgtggtgaatggatgaagatgattgaagagagtagagttttgcctctaatcttgatatgtatatctttaattatataatatagctcattatattgtgcttagcatctaatatttaagtctaaaattaatggacctcagctcgaggtcgcattctttgttactttagattagatctgtattccctttgtattgttcaggtttccaaccataaattattggtactatcttattgttatcataattgacgtgtgtttaagttcaacaa

SEQ ID NO: 43412 - DNA, 170 bp, Gossypium hirsutum
  unsure (1)..(170): unsure at all n locations; Clone ID: LIB3189-052-P1-K1-H4
caataattctctttctgtttctctggtttaaacatgggtatgggtttaaggaatggatttcttgtggttttatcttgtgttggtacacgttccctctcanttttnnngcaacctcccactttccttgaaaattttagaatcacttggtctgattctcatattaggcaaat

SEQ ID NO: 43413 - DNA, 203 bp, Gossypium hirsutum
  unsure (1)..(203): unsure at all n locations; Clone ID: LIB3189-052-P1-K1-H5
gcgcggacgcgtgggctcaacgctctccttctgtttcttgtcaagccaatctcaaaagactcccctttgaggtcacagctcctctctttaatgctataatggntaaagagaaagttcacatcaacattgtggtcattggccatgtccactctgggaagtctacaaccactggtcatttgatctacaagcttggtggtattgac

SEQ ID NO: 43414 - DNA, 416 bp, Gossypium hirsutum
  unsure (1)..(416): unsure at all n locations; Clone ID: LIB3189-052-P1-K1-H6
gtgggatgacaaggaaaaaggaaaggaaaaaggaaaggaagtaacacagcagtgggaagatgaatggnaggacnattatgtcagtgagcgacgtctcactncaactnangaaagaactcnagaataacaccaaaaacttaaccagaattgtgcttctttattgtcttgcttccttcgttgaatttaattttgggttcttgcaaaactgatgtttgagctttaactctttatgaatgggatgttttatagaaacaagtgtcaaaaacttgtctttattgttatcttaaatataaattttttgcttgtttctcttttaatactaattattatttttttttttacttttttttctttttttatttatttctaatatattattttctatctttattattttatatatatttatttttttt

SEQ ID NO: 43415 - DNA, 436 bp, Gossypium hirsutum
  unsure (1)..(436): unsure at all n locations; Clone ID: LIB3189-052-P1-K1-H9
tgacgttcaagaacttaccgaagctcttggggcattaaaaacacgtcttcacggctgctcctcgttcttaaaagctgcgtagtagagtggtctgcanagtttggtgctgacaagaacggtgatccgcagctgcatactatgctggctgagtacatatattctgaatctcttgaaatggacatggccaaagtatcgtatcatttcgttcgaggaaacaacctaaagaagtttgcaaatactttagtaaacttcatgagcaagtgttatccaggtgaagatgatatagccattgcacgagccattcttatgtatttggcaatgggtaatcttcaagatgcttgttcccttatggaggaattaaagaagcatgtgcaagcccaggagctggaatttcctgtatttgatttgattcaacttaacaatttactttttgctt

SEQ ID NO: 43416 - DNA, 347 bp, Gossypium hirsutum
  unsure (1)..(347): unsure at all n locations; Clone ID: LIB3189-053-P1-K1-A1
cggacgcgtgggtgtttcttcctcttttagattttctttctctccgttttctttccttacttgtatggcagccaatttgaagagtggtggagggatcgccagcttggggaagcgacttcttaaccgcacctccactcgcaccccttctcttttcatctccacttcttcacctaccaggagtcctcacgcgtcggnatacgacaagaacctggatgatcaggtccatgcgactgtggttcctgatgatgtgattcagccttaatcggacaagtactgggcttctgacccgcggacaggggtatttggtcctgctacggagcaacttaacgcatctgcggttggggagc

SEQ ID NO: 43417 - DNA, 252 bp, Gossypium hirsutum
  unsure (1)..(252): unsure at all n locations; Clone ID: LIB3189-053-P1-K1-A10
ctnccctttccccnncccccncccccancccggccanaccaancnacnacnngncgncagccggcggcggnnncacaaanacagaggcccaaaacaaaaaagagggaagaaagaaaccgaacgaccccnnnncncagncgcnancnccgacccggcganaaccgagggancacaccaaccccngcccagaagggggngccgagcancaaggcnagnggcccggcgaccccnnnnggcagcaagggcnagacc

SEQ ID NO: 43418 - DNA, 400 bp, Gossypium hirsutum
  Clone ID: LIB3189-053-P1-K1-A11
gatctgtctcaaggatttacaagaagatttcatgggtggtgctgagattattaaatcagaccctgttgtgtcattccgtgagactgtgcttgagaggtcttgcaggacagtgatgagcaaatctcttaacaagcacaatcgtttgtccatggaagctcgacctttggagaaggtcttgcttaggccattgaccatggacgcattggtccaagagaagatcctaagggtcgttccaagatacttgctgaggagtttgggtgggacaaagatatctctatgaagatatggtgttttgggcctgagaccactggccctaacatggtggttgatatgtgtaagggagttcaatatctgaatgaaattaaggattcagttgttgctgggttccagtgggcatcaa

SEQ ID NO: 43419 - DNA, 305 bp, Gossypium hirsutum
  Clone ID: LIB3189-053-P1-K1-A12
gaaagatgatggaaaggggttttattgttttggccttgacggtggttttcgccgcgacggtggtgtcgggttctgacgagagtggggcggccaatgagtgcagcaaagatttccagagcgtgatgacttgcttaagctttgctcaaggaaaagcagcgtcgccgtcgaaggagtgttgtaattcagtggcggggattaaagagaataaacccaaatgtttgtgttatattttgcaacaaacacaaacttccggtgctgataatctcaaaagcttaggtgaaaagaagattggcttggccatttta

SEQ ID NO: 43420 - DNA, 382 bp, Gossypium hirsutum
  Clone ID: LIB3189-053-P1-K1-A3
cccacgcgtccgagcagctgacggtagacaaattgtggctcgtgctaaatctgaagctaccaattaccaaagtgtgtatggtgaacccatccctgtcaaagaacttgctgaacgtgtagcaagttatgtgcatttatgtaccctttactggtggctccggccttttggctgtggcataattctcggtggttatgatagagatggtcctcaattatacatggttgaaccatctggcatctcttatagatactttggtgctgcaattgggaagggaaaacaagctgccaaaacagaaattgaaaagttgaatctgtccgaaatgacatgcaaagaaggggttattgaagtagccaaaatcatctacaaggtacatgatgaagca

SEQ ID NO: 43421 - DNA, 475 bp, Gossypium hirsutum
  Clone ID: LIB3189-053-P1-K1-A5
gttgaagccaagcactaatgctgcatcagcaccggtaactaacccaccgtcatcagctgctccagaacccgaaattgatcattcatctagacattctggagcttcaagacatgtgttacaaatgtcccctttggagcctttggagcccgatataacgcaagaacattcattaaccaaagaaagtacgatgcctaatgatccagctggagccaaagaaaataaacagtttctgccattcatttctcctccaccagtatctgcttcaccaacttctgaaagaccaagtgatccagcacctgcgattttgaaaacaaatagtgaggccaacatagatctggaggatgttttagccgctgctcagtcagctgctgaaactgctgagcgcgctgcagctgcagctcgggcggcagcaagtcttgcacaagtcagaattgccgaacttacacagaaaaggaatggccaggtcaatgagggt

SEQ ID NO: 43422 - DNA, 379 bp, Gossypium hirsutum
  Clone ID: LIB3189-053-P1-K1-A6
cgcgtttcatttactcacacgctcatcctctttcagcctcaagttctttcactcttcttcgttttggctttgcttttaagcttttgaagagcgccataatcgttaaaatacaaaagaaaaataaaccaacatatataatcctccatggatgttctcaaagcttctcctaccatagtttattcaccatacattccaacaacaacaagaaacaaaacccagttttctaaacccatctttcacaatttgaacttacaattaccatgttttacaagaaatggatcgaaatccaggttgtttacgaccttatcatccgccccaatatcaacaacggagtctattgagccacctatgccggaagttggggctgatgtcggttaag

SEQ ID NO: 43423 - DNA, 375 bp, Gossypium hirsutum
  Clone ID: LIB3189-053-P1-K1-A7
cgaaaataaggggtaaaagaacttcaataatttgagtttaggttttttagatcgaagattatggggcgttttgctcttctcctgttactagctttcgcttcatttcaagccctttgcttcgccgctgatgatgatacggccttttatgactcatttgatgagccatttgatggacgatggatcgtgtccgataaagatgattacaaaggtgtatggaaacattcaaagagcgaaggacatgatgactacgggcttcttgtgagcgagaaggcacggaagtatgcgatagtgaatgagctcaatgagcctgtgagtctcaaggatggaagcactgtgcttcaggttgagactcgcttttagaatgggcttgaatgt

SEQ ID NO: 43424 - DNA, 385 bp, Gossypium hirsutum
  Clone ID: LIB3189-053-P1-K1-A8
cccacgcgtccgctctcatcattttccttctgctaccttctctcaacccaaacacatatttgccaggaaaaagaaaaagcttgagcgaacaagaaaatggccgatcagcttaccgacgatcagatctctgaattcaaggaggcctttagcctgttcgacaaggatggagatggttgcattactaccaaggagttgggaactgtgatgcgatcacttgggcagaaccccactgaggcagaactgcaagatatgattaatgaagtcgatgctgatggaaatgggaccattgattttcctgaattccttaacctgatggcaagaaaaatgaaggatacagactctgaggaggagcttaaagaggcattcagggtgtttgacaaggatc

SEQ ID NO: 43425 - DNA, 424 bp, Gossypium hirsutum
  Clone ID: LIB3189-053-P1-K1-A9
tttatctttaaaacacgcacccaaaaaataaaaccctttgaaaaccaaagaaggaagaagaagatgtcgtggcaagcttatgtagatgatcacttgatgtgtgaaatcgaaggaaaccatctctctgccgccgctatcatcggccaggacggcagcgtttgggcccaaagcgccagtttccctcagctcaagcctgaagaaattagtgccatcatgaatgactttaatgaaccgggttcactcgctccgaccgggttgcacctcggtggcacaaaatacatggtgatccaaggcgaaccgggagctgttatccgagggaagaagggacccggaggtgttactgttaagaagaccaatatggccttgattatcggaatctatgatgaaccaatgacaccccggcaatgcaacatgatcgtcgaga

SEQ ID NO: 43426 - DNA, 374 bp, Gossypium hirsutum
  Clone ID: LIB3189-053-P1-K1-B1
ggaagacaatcttccacctcaacccatctggccgctttgtcattggtggtcctcacggtgatgcaggtcttaccggtcgtaagatcatcattgacacttacggtggctggggagcccatggtggcggtgctttctctggaaaggacccaaccaaggtggacaggagtggagcttacatcgttaggcaagctgccaagagcattgtagctaatgggcttgcacgcaggtgcctcgtgcaggtctcctatgctattggtgtgcccgagcccttgtctgtcttcgtaaacagctacggaacaggaaagattcctgacaaggaaatcctccaaattgtgaaggagaactttgatttcaggcctggaatgatcaccatc

SEQ ID NO: 43427 - DNA, 344 bp, Gossypium hirsutum
  Clone ID: LIB3189-053-P1-K1-B10
gacggcgccaatcagctgtccgccttgactgaccgtccggcatcgtcttggccctcgattttgccgttttgtaaaccttttttttcaccaattcccgaaatggcagtgaaaccctccaaggccgataagaaaatcgcgtacgacgcgaaactgtgccagctcttagatgagtacacgcagatcttgatcgccgcagccgacaatgttggctcgaagcagctccagaacattcggaaaggtctccgaggtgactcagttgttttaatgggtaagaacactatgatgaaaaggtctgttaggatgcatgctgagaagactgggaacgaagctttccttaaccttat

SEQ ID NO: 43428 - DNA, 372 bp, Gossypium hirsutum
  Clone ID: LIB3189-053-P1-K1-B11
caccgccgcggcggaattgccgcgaccgacccacgcgttcgaagatatggcaccacccatcctactcaccagagaggaatcagatgttctctacactgcgatccctgtgtctggaagaccttcccaaactcaaagatacctgctttgagaatagctttgaattcccatgcttaagagatttaacactaaaaaattgtcctctgctgaaaacattcatctctaaatctgtatgtgaagataagcctcaaattcaccaacctacacaaacaaataactctggtgtcctcaatgaaaagggtggtttccctcggttggagaagttgctgattcagggttgtgattcggtagaagaaataattgagctgcaagcac

SEQ ID NO: 43429 - DNA, 410 bp, Gossypium hirsutum
  Clone ID: LIB3189-053-P1-K1-B12
cggacgcgtgggtttccagcgactactaaacaaaataaaaattagcccaggacaggaggatctctgagctactttttctctcaaaatttctccaattagctctggtttaggcgatggcttcaaagcggatcttgaaggagctcaaggatctacagaaagatcctcctacctcttgcagtgcaggccctgttgctgaagacatgtttcattggcaagcgactattatgggtccacctgacagtccatatgccggtggagtgtttctagtcaccattcatttccctccggactatccatttaagccacccaaggttgcattcaggacaaaggtctttcaccctaatattaacagcaatggcagcatttgcctcgatattttgaaggagcagtggagccctgccctcaccata

SEQ ID NO: 43430 - DNA, 368 bp, Gossypium hirsutum
  Clone ID: LIB3189-053-P1-K1-B2
ctttgattgctgaagaagtgtgctttcttgatgtgattccagctataagaaagttcttgaaggatacaattgagccatggctggatgggacttttaatgggaacggtttcctgtatgaatcgaaatggggtggaattgtgactaaacaagggtcaacggattcaggggcagatttcgggtttggagtttacaatgaccaccattatcatattggttacttcctttatggaatagctgtcttgaccaagattgaccctgcatggggaaggaggtataagccccaagcttattcacttgtggctgattttatgaacttcggcaggagatcgaattcaaattattcaagagtgagggtgtttcgattttta

SEQ ID NO: 43431 - DNA, 390 bp, Gossypium hirsutum
  Clone ID: LIB3189-053-P1-K1-B3
gcgaaattcattcttcgatcttcgaacgccggcggcgaaacaccgctttgtttaccggtgacgtcgttgtcttcagatatctgaaagatgtccggtcaatcccagcgcttgaatgtggttccaactgttacaatgcttggaatcatgaaagctaggcttgtgggtgctacaagaggtcatgcacttctcaagaaaaagagtgatgcccttactgtacaatttcgtcagattcttaagaagatagtatctacaaaagaatcaatgggagagattatgaaaacctcttcattttccctaactgaggccaagtatgttgctggtgagaacatcaagcatgttgtccttgagaatgttcaaaatgcttctcttaaagttcgatcccgacaagag

SEQ ID NO: 43432 - DNA, 367 bp, Gossypium hirsutum
  Clone ID: LIB3189-053-P1-K1-B4
gcgtacaatctgtcaaggctgagaaagctgctaaatcggttggcattacgaaggagagttattccgtgatgcatttggaccttgcgtcgcttgaaagtgtgcggcaatttgcggataccttccgtcgctcgggcaggccgcttgatgctttggtttgcaatgctgctgtgtacttgccaactgctaaggaaccgacttatactgccgaagggttcgaactcaccgtcggaacaaaccatctcggtcatttcctcctagcaaggctactcctagatgacctcaagcagtcagattatccttataagcgtctcattattgtcggttcaattacaggaaacacaaacacattggccgggaatgtgccacc

SEQ ID NO: 43433 - DNA, 331 bp, Gossypium hirsutum
  Clone ID: LIB3189-053-P1-K1-B5
ctagagaaatggctgcaaggatacaacttggcaactatgctgtgtacatgttggatagaaagttgggtaaaggtggttttggacaagtttatgttggaagaaggatcactagtgccataggatgcactggtgctgatgcctttgaggttgctttgaaatttgagcatcgaaatggtaagggatgtagatctggtcctccttatgagtggcaagtatacagctctcttaatggctgctatggacttccatcggttcattacaagggtcaactaggggattactacatactcgtcatggatatgcttggaccaaggttatgggatggttggaa

SEQ ID NO: 43434 - DNA, 260 bp, Gossypium hirsutum
  Clone ID: LIB3189-053-P1-K1-B6
acaagtttagttcaataatccacgcaacaccaaactaactagatattgttgaactttggtgttaagagctatgttaattttatgattatgcgcttgtgaacattaaaaaaaaaaaaaaacaaaaaaaaaaaaaaaaaaaaaaaaaaaaaaaaaaaaaaaaaaaagtaaatagaaaaaaaaaaaaataaaaaaataaataaaaagaaaaaaaattaaaataaaaaaaaaaaatataaaaaattggggggggcgttttttgg

SEQ ID NO: 43435 - DNA, 166 bp, Gossypium hirsutum
  unsure (1)..(166): unsure at all n locations; Clone ID: LIB3189-053-P1-K1-B7
ggnggnacaagngancccgaaancagncaaagcacaannccaancanancaaacggaaagggggaggcannnaaaaaccnngccaggggaagagaaggnananggnaccaacngacannngaacaangganngggannaaganngnangnnacccnacaagaagag

SEQ ID NO: 43436 - DNA, 463 bp, Gossypium hirsutum
  Clone ID: LIB3189-053-P1-K1-B8
cattagcaaccatagccatggcttcctcaccaaaactcttctctatgtctatcctcttcctttttgccctcttctccatgcaaatccatgctagagagtacttcagcaaattcccaagagttaacatcaatgagaaagagacaacaaccagagagcaaaagcacgagaccttcgttccccagaccacccaaaagccagaagaacaagagccaaggttcattcctgaaacccaaaatggttatggcctttacggccacgagtcaggctcaagccggcccagtttcaccaccaaagaaacctatgaaccctatgtcacccctgttagattccaccctgatgagccctataacagcatccccgaattcttcaacaataaagacacttactactacaacaagaatgcctacgagtccactaagcaggaaaacttgggcgaggccaatttcaccgagaaaggatggag

SEQ ID NO: 43437 - DNA, 363 bp, Gossypium hirsutum
  Clone ID: LIB3189-053-P1-K1-B9
cggacgcgtgggtgataccctacaatggtgttctgaacttggagggccttcacagacctctcttgtctgtgcaggtaaccaagttgaaagacggagtggcaatggggtgcgcattcaaccacgccatccttgatggaacttccacttggcatttcatgagctcatgggcccaaatctgtagcgggtccaactccgtctcagtctcgccgtttctcgagcggaccaaagtccgaaacacccgcgtgaagctggatctctcgctcccacctaaccctgtcaacggtgacgccaaccaaggcccccagctgagggagaaacttttcaggttttctgaagctgccatcgacaagatcaaagtaaaag

SEQ ID NO: 43438 - DNA, 461 bp, Gossypium hirsutum
  Clone ID: LIB3189-053-P1-K1-C1
cccacgcgtccgcggacgcgtgggttgggtcgtgaaaaggatgagagtgaagctcttccagcagatgaactcattgagaaggcagatggctttgctggcgtattccctgaacacaagtatgaaatcgtaaagattttacaagaaaagaagcatgttgtgggaatgaccggagatggggtgaacgatgcacctgctttgaagaaagcagacattggaatagcagtggcagatgctacagatgctgcaaggagtgctgcagatatagtcttaactgagcctggcttaagtgtgataatcagtgctgtgttgacaagcagagctatattccaaaggatgaaaaactatacgatatatgctgtttccataaccattcgtattgttcttggttttgtgcttctagctctgatatgggaatatgatttcccacctttcatggttttgataattgcaatccttaatga

SEQ ID NO: 43439 - DNA, 113 bp, Gossypium hirsutum
  unsure (1)..(113): unsure at all n locations; Clone ID: LIB3189-053-P1-K1-C10
gcgccgcccacccccttcccccgaagcagcagngatcaccggcaangggnatcgannnggncggcggcggcaagagcaagaagacagagagaacngcnccgaagnccgangac

SEQ ID NO: 43440 - DNA, 389 bp, Gossypium hirsutum
  Clone ID: LIB3189-053-P1-K1-C11
tgcattttcaaccaaaaaattcaaaaaaaaaattctaaataagtgatggggtttccggcaaatgggtcatcggacaaaccattgaaggtcctgatctacggtcgaaccggttggatcggtggtttgttaggcaaactctgcgaatcccagggaatcgattacgagtacggctccggccgtttggagaaccggatttcacttgagtccgacatagccaacgtgaaaccgacccatgtattcaatgccgccggtgtcaccggtcgtccgaacgtcgattggtgcgaatcccataagggctagaccatcagaaccaatgtggtcgggacccttacccttgctgacgtttgaagagacaaaggcctcatattgattaattatgctacaggttg

SEQ ID NO: 43441 - DNA, 469 bp, Gossypium hirsutum
  Clone ID: LIB3189-053-P1-K1-C2
cggacgcgtgggcggacgcgtgggttaagaggagtggaataaccaaagaagaggaggagaaaagagagaaaaaggatttttttttaaagaaaatgaactataaaacctccacttctgtttccactatcatcatttctcatctcagatcttaatttccttcccattttctcatctgggtcatttccaatatggaattctgggttgtcttctgattagtgtataaagtattttttcagatgatcctatattggatttgacagatccccattttttctttgctaggattctatctgttcacaataaaaagataaagatggaatctgatcttggtaaactcttcattggtgggatatcgtgggacaccgatgaggaacgtcttaaggagtatttcggaaagtacggggaagtggtggaggcaatgatcatgagagatcgtgtaacttggcgtgcccgtggctttgggttcgtt

SEQ ID NO: 43442 - DNA, 177 bp, Gossypium hirsutum
  unsure (1)..(177): unsure at all n locations; Clone ID: LIB3189-053-P1-K1-C3
cggacgcgtgggcggacgcgtgggttcgtcgcagccaaacatcgggtctcctttttggcttgtctcagcttgcactttatgcttcggaagctctcatactctggtatggagctcaccttgttagcgaaggtgtttcaaccttctctaaggtgattaaggtttttgnggtattggtgg

SEQ ID NO: 43443 - DNA, 371 bp, Gossypium hirsutum
  Clone ID: LIB3189-053-P1-K1-C4
tccgtttcgagttggattttttaatatttgattcactttttcagtttcggccttgtttctcccatgcgggcggtttctctccggctcccggaaaaaaacgaaattcagggaatgaaattgcctataaaatcgtctcgtaggaaattccttttcggttttaatgaaacccgaattcctgatttctttttcttcatcgatcgtcgccggcgtaaaaacaagaaaaatcaaaagcaaaaagcttgccgaattagaaaaagaaattatgggttctgaacagaatgaaggaacaagctttccaccatcggagccaaagctttgtgccaacggatgagggtttttcgggacggcggcgaatatgaatttatgatcaa

SEQ ID NO: 43444 - DNA, 431 bp, Gossypium hirsutum
  Clone ID: LIB3189-053-P1-K1-C6
aattttcagtcgtcttctcttttagtcctctcgatcccaaagcaagctctcgattccgaatctctcccagaagatgcagatctttgtgaaaacccttactggtaaaaccatcacccttgaggtggaaagctccgatactattgataatgtcaaggccaaaatccaagacaaagaaggcattcctccagaccaacagaggcttatttttgccggaaaacaactcgaggatggccgaactcttgccgactacaacatccaaaaggagtccaccctccacctagtccttcgtctaaggggtggcatgcagatatttgtgaaaacccttacgggcaagaccatcaccctcgaggtggaaagttctgatacgattgataatgtcaaggccaagatccaagacagggaagggatccctccagaccaacagaggctta

SEQ ID NO: 43445 - DNA, 437 bp, Gossypium hirsutum
  Clone ID: LIB3189-053-P1-K1-C7
gcccttgaaactgtggggtttgggaaattccagggctttgttcttggatacgctggtcttggttggtttgctgaagccatggagattatgattctttcctttataggacaagctgttaagtctgagtggcaactttcctctggtcaggagagccttttaagtaccatcgtttttgctgggatgcttctcggagccaatacatggggccttttatcagataactacgggaggaggaaaggttttcttactatatctatggtaacttttggagctggattactgagcacattctctccaaactatttaacgcttgttgttcttcgaggtttggttggttttggccttgggggctcaactgtattcttatcctggtttctagagtttatttcagtttttaatagaggcatgtggatggtagtgtttataattttggacat

SEQ ID NO: 43446 - DNA, 298 bp, Gossypium hirsutum
  Clone ID: LIB3189-053-P1-K1-C8
accaaggtactgtcggagcgtgtgccgtggtgatgtacaagaaatcaaacaagggacttaaggggctataagggcggaatgcagagtggaaagctttgatggttcaatatctgtaaaggaggaagactttactgaaatgatggtcaaggtatggaaggacaggtgcaggagagaaatggctgggaaattcgcagggattgctgccagaataaaggaaagagataaagcgtgaaaaagcttatgtaaggggataaaatatcatcacctgattgtgacactgtacaccataagcgtatag

SEQ ID NO: 43447 - DNA, 443 bp, Gossypium hirsutum
  unsure (1)..(443): unsure at all n locations; Clone ID: LIB3189-053-P1-K1-C9
aaaactttttcaaggagctggaaatcgtttttgctgatgtggtaatggccataattgcagatttgatgcttgtgtatcttcctgctcctactgtttctctccggcctcctcttgcagtcagtgctggagctatttccaagttcttctatagctgccctgataatgctttccaggttgctcttcctggtacttcgtattcacttttgcagagattaggagcagtaatgcgtaacggcgcaaagctttttgcagtgggcaccacttcttcgctggttgggacagccatcacaaatgctttgattaatgctaggaaggccgttgataagacatcggcagctgaagttgaaaatgttcctatactatccaccagtgttgcctatggtgtatatatggcagnttcgagcaacctcaggtaccaagtgctgctgggtgtaattgacaac

SEQ ID NO: 43448 - DNA, 427 bp, Gossypium hirsutum
  Clone ID: LIB3189-053-P1-K1-D1
caaaaacatagcagccatggcagtccgtatgcttcttgggttaggtgtcctgctactctgccttgcaaaggtttcatctgatctgaaggcagaagaagttataaccaatgtcggtgaggtgggttctttggttaccagaggcggaaacagaagactgatgctagagattgattgtggaggattatgcaagaaaagatgcagtcaacactcgaggccaaacagatgcaacagggcgtgtgggacttgctgcttgaggtgcaagtgcgtgccaccggggacttcagggaacagggaggtctgcgggacctgctatactggcatgaccacccatggaaacgttgccaagtgcccttaacctttacgtcgcccaatatgtgttgcagccatcaaggggaaaaatgaaatgtttggttggggaatatgaatg

SEQ ID NO: 43449 - DNA, 313 bp, Gossypium hirsutum
  Clone ID: LIB3189-053-P1-K1-D10
ggaaaatcaacaggattaggaggacactcttttgtcttaaagatggcttccgtgggcatggtgcggacttctggtttaagagaatctagtactgccggtgttgagaagttacctgaggagatgaacgacatggaaaatcgagatggcaaaaaaatgggaggcaccagaaggggccggaaccggacctgaaccagggcatttattggggccacctatggggggtggaaatgggcagccaaaccagccaataagtaccatggttgaccgtggggtgggccatggatcattggaggtggttttccaggcaaagggc

SEQ ID NO: 43450 - DNA, 204 bp, Gossypium hirsutum
  unsure (1)..(204): unsure at all n locations; Clone ID: LIB3189-053-P1-K1-D11
cggacgcgtgggaaaaaaaaaaaaaaaaaaaaaaaaaaaaaaaaaaaaaaaaaaaaaaaaaagagaggggaaaaaaaaaaaaaaaggggggaaaaaaaaaaaaaaaaaaaaaaaaaaaaaaaaaaaaaaaaaaaaaaaaaaaaaaaaaaaaaaaaaaaaaaaaganggggggggggggnnaaaagaaaaaaaaannaggggggg

SEQ ID NO: 43451 - DNA, 416 bp, Gossypium hirsutum
  Clone ID: LIB3189-053-P1-K1-D12
aatatctctcttcactttcttctcttttcaacgcagagtgaaaggcggggaggccgtagacaatgggtcttgcgctcttctcgtagaggggatcagattcaacatccatctgtcatgcagaaggtagctggccagctcctttcttctagcatttcccgagattttcaagggtatgatgggtctttcaggaggcctgctctataccaaggacattttgcatatgggaattattccaatgctggaatgcactatcctattgttccatcaacagctaccgccatttgtgttcaagcccctgcagagaaaggatttaccagctttgccattgatttcctcatgggtggagtttctgctgctgtgtcaaaaacagctgctgctccgattgagcgtgttaagcttttgatacagaaccagga

SEQ ID NO: 43452 - DNA, 427 bp, Gossypium hirsutum
  Clone ID: LIB3189-053-P1-K1-D3
ggaacacatctcatcttcttttctctcttgtcagaccaactttgacttcaatcaaatttcaatcaacaggaatttgctttgaaaacataaagaaaattccttttttgggtttcgaaaattgtgagattttgggcttttagaagaaaagtggaatgggctgtgctggatcgacgccggccaaaggagacgggaatgtgaaaaagatccggaagcccaagccctggaaacatcctcagccgataacgaagtctcaacttgagcagatgcgtgaagagttttgggacactgcacctcattatggtggcagtaaagagatctgggatgcacttaaagctgctactaaacaggatttaacatttgctcaagctattgtggacagtgcaggggtcatagtgcaatctgccgattaactatctgctacgatgaa

SEQ ID NO: 43453 - DNA, 174 bp, Gossypium hirsutum
  unsure (1)..(174): unsure at all n locations; Clone ID: LIB3189-053-P1-K1-D4
gtggggggggaaagggaaaaatgtaatttttatttatataatattattaaataggaaaaaaaaaatataaaaatggttaggttatttttatgaggttttaaaagggttataattaaaaatattttataaaaaattnataaatttattttttattggagagttttaatattattt

SEQ ID NO: 43454 - DNA, 340 bp, Gossypium hirsutum
  Clone ID: LIB3189-053-P1-K1-D5
cggacgcgtgggttgcaaaactgcatttccatgaagatggaggtgaagttatttctgagtattgggggtctacggtggctgcactgcgaaaaccatggaaattcgatagtattttttttgcaaaaaagcaatcataccttgttcttatatgtggatgtgtatgtgaacttgtaaaaattgcatattagcaggcaaaatagcacaaatgactaaacttttgttgtggttagatgacaatgcccagagatgctttacatcttggtggagtggaacatcgggagttatataatgcctatggatattacttccacatggcaacagctggaggccttctaaagca

SEQ ID NO: 43455 - DNA, 335 bp, Gossypium hirsutum
  Clone ID: LIB3189-053-P1-K1-D6
cgatccaatcaatcgcttcaactatctcaccaaacacatatccaatggctccgatcgctgtcggcgaggtgttaccggacggtactctctgctacttcgacgccgatgataagctccagcaggtgtccgtacattccctggctgccggtaaaaaggttatcatctttggcgttcccggtgcctttacccctacttgcagcttgaagcatgttcctggattcatcgagaaagcaggggagctgaaatccaagggcgttgatgaaattatttgcattagcgtgaatgatccctttgtgatgaaggcatggaccaaaacttaccctgagaacaaagat

SEQ ID NO: 43456 - DNA, 195 bp, Gossypium hirsutum
  unsure (1)..(195): unsure at all n locations; Clone ID: LIB3189-053-P1-K1-D7
cttnnnttcccttaatttcaaagctctctttctctattctctttggcttatctatcgctttgatggggcgtccttactgtgcactcgatggcaaatcgatggttgaggcctgaggtgtatccgctgatcagcggacgtaggcgttgctgttagaatatgcaggtttaagtacgcgcgcatgctacgcaataactc

SEQ ID NO: 43457 - DNA, 458 bp, Gossypium hirsutum
  Clone ID: LIB3189-053-P1-K1-D8
attttaaaaaaaatcagatctgcagaaatggcaacttttgggtttctcaacattgcttttttggtagtttttgaactcaccttcggcacagattcgccggcgcctgctccctctctcggtgcagacacatcaccgctacttgctcctactccggttacgggatctccggactcagcaccattaatctcaccggtgatgcctgcttcgcctccggcgccaatcgcgccgtccccaacagatctggcagaaggagagtcatcgccttcaagttctcctgctccttcaccgggcgatgcgagtgatatcaaccacagcaacatcaatgcagaggaaagcgaaaacaagactggtggtggcggaggactgaacggaggaaaaaaagcaggaatcgtggtggcggtggtggcaacggcgtgtttgggtggcttcggggattgatttacaggagagacagacat

SEQ ID NO: 43458 - DNA, 360 bp, Gossypium hirsutum
  Clone ID: LIB3189-053-P1-K1-D9
cttagctttcaccgacaaaaaaatggcagcgaagcaaacgacgatcctagttgccgccatcctggggcggctttttacggcggcgcggggacatcggcgcaggcaccggcagctgatccagcgatggccatgtcgccgtccgccatggcaccgacgccggactgtatgacgaacttgctcaacttatcggattggttgacgtacgtggaggccggaagcaacttgacgaagccggacaagccttgctgtccggaattggctgggctagtggaaagtaagcctcaatgcttgtgctatttgatggataagaatgcgacggcgtactatgggatcaacattgtcatggaaagagctgttaag

SEQ ID NO: 43459 - DNA, 418 bp, Gossypium hirsutum
  Clone ID: LIB3189-053-P1-K1-E1
ccgggccaagtttttaccgacgtggttggcagtccatattacgttgctccggaagtacttctgaaacagtatggaccagaagcagatgtatggactgcaggagttatactctatatattgctaagtggtgtgccaccattttgggcagaaacacagcaaggaatatttgatgcagtgttaaaaggacatattgactttgattcagacccttggcccctaatatctgatagtgcaaaggacctaattcgaaagatgttatgctctcgaccttcagagcgactgactgctcatgaagtattatgtcatccttggatttgtgaaaatggggttgctcctgatagggctctggatccagctgtactttttcgccttaaaacattctctggaatgaataaactaaaggagatggtttacgggt

SEQ ID NO: 43460 - DNA, 433 bp, Gossypium hirsutum
  Clone ID: LIB3189-053-P1-K1-E10
cttttataatgagcttcgtgttgccccggaagagcacccagttctccttactgaggctccacttaggccaaaagctaatcgggagaaaatgacccaaattatgttcgagaccttcaatgcccctgctatgtatgtagctatccaggccgtgctctcactttatgccagtggtcgtacaaccggtattgtgatggactcgggtgatggtgtcagccacacagtgcctatttacgagggttatgccctcccacatgccattcttcgtcttgacttggctggtcgagacctcactgattacttgatgaaaattctgactgagcgtggatattccttcaccaccatagccgaacgggaaattgtgagagatgtttagggaaagctgacttacattggccttgactatgaacaggagctagagacctcaaaaacaagg

SEQ ID NO: 43461 - DNA, 407 bp, Gossypium hirsutum
  Clone ID: LIB3189-053-P1-K1-E11
tacaacgccaaattcaagtttaccaaccttattgtttatttgttcgagacttggcgagttttttggaatccccatggcttcaaagcggattaataaggagttgaaagatctgcagaaggaccctcctgcatcttgcagtgctggccctgttggtgacgatatgttccactggcaagcaacaattatgggcccagcagacagtccttttgctggaggactatttcttgtttccattcacttccccccagactatccattcaagcctcccaaggtttctttccgaacaaaggttttccatccaaacatcaacagcaatggaagcatctgtcttgacattctcaaggagcagtggagccctgcccttaccatattcaaggtgctgctttcaatatgctcacttcttacag

SEQ ID NO: 43462 - DNA, 470 bp, Gossypium hirsutum
  Clone ID: LIB3189-053-P1-K1-E2
acacccttctgaactgactgccggcttctataacacggcctcaagaaatggctatgaagcagttgcagagatgtttgcaaggaattcatgcaaaatcaacttgcctggaatggacctgtcagatgagcaccagccacacgatgctctttctagccctgaatcattacttgcacaaatccgaacaacgtgcaacaagcaccgggttgaggttgccgggcagaacctggcccctggagctcctggtggtatagagcagattaagaaaaatatgttgggtgagaataaaatagacttgttcacttatcagaggatgggagctcatttcttctcgccggagcattttccttcattcactgagtttgtccgaagcctgagtcaacctgaattacatccagacgatttaccctcggatgaggcagaagctactgaatctgtacaaacgagttcggatccaaacattcacttgcaga

SEQ ID NO: 43463 - DNA, 393 bp, Gossypium hirsutum
  Clone ID: LIB3189-053-P1-K1-E3
aaatttcttcctttaacgtcccaactttatcgctaatggctgagcaacaacaagatcaactgcaacacagatccgccggaaaggttctctggttcaatgaccaaaaaggcttcggatttattcgaactggcgatggaggcgaggatctcttcgtccatcattcttcaatcaaatccataggctatcgtagccttgctgagggcgaatccgttgagttcactatctcccaaggcaacggtggcaagactcaggctgttgatgtcatcgccgtaggtggctctgccatcaataagaaggaccgtcgcagtggtggcggttggagaggcggaaacgatcggaggaatggcaccggcggttgctataactggggggatttgaatcatcttgccagag

SEQ ID NO: 43464 - DNA, 192 bp, Gossypium hirsutum
  Clone ID: LIB3189-053-P1-K1-E4
gtgcatttggagagagggctgtcatagaagattgatcacacgactggttactaaaatatggatggacgctaatgtttttgcataggattaggaagaggcatttgtagctggactggaggttggactcacatagattgagaggtattaacttagcaatggaggctgtcttactatcaagagctgtcttatact

SEQ ID NO: 43465 - DNA, 248 bp, Gossypium hirsutum
  Clone ID: LIB3189-053-P1-K1-E5
gtagataaagttaatattacgtagtcgcataaagcggcataggacacaacccacaactctggaattttaacatccatatttattctgtagctatcgttattttggcttccactagctggtgaactttccatgccaaaacttcacttgacgctgttgcagtcagtgctagggctgatcttgtaagggatgttgacaccgcacttgcctgggagtccgcttgcaataccatagttgatgccagaaatgcc

SEQ ID NO: 43466 - DNA, 254 bp, Gossypium hirsutum
  unsure (1)..(254): unsure at all n locations; Clone ID: LIB3189-053-P1-K1-E7
cccacgcgaccgcttttcgaaagccaaagactncatannncnncgncaagcnaanaggcgaggggggggcnncaaccgaacgggagaggggggcaaggcaaaggaaacnggccaannangccnnncaaggggagagcnnaaaaaanangacnccagcagnagnngcnagcgnngaaaccaagccngagaaanggaaaagnaaggagggcaaagagaaagaagaggnccaagagnnaagacnaaagacggcagaa

SEQ ID NO: 43467 - DNA, 124 bp, Gossypium hirsutum
  unsure (1)..(124): unsure at all n locations; Clone ID: LIB3189-053-P1-K1-E8
aggntgngagatattaggaggaagagatgaagtatcaggagggacatggttggcttgttcgggggggggcataaatggttttgggagggatgtnttnnagcttcatccccgtcccgacgccaag

SEQ ID NO: 43468 - DNA, 396 bp, Gossypium hirsutum
  Clone ID: LIB3189-053-P1-K1-E9
ctaaatttcctcgcccatataaaaaccaataaaataaaagagatatatttcacatttatttttctggatttgggcctataaaaccactgaaaagatagtaacaaaatccaaaaatggcggctccggcagtggagggagtagccgtgacggccctccgatcggtcctactccgagtccgacaggcagctgaacgggcggctactcaacccgaacgggtccgggtcgtggccgtttcgaagactaaacccgtgtcactcatccgccaaatttacgacgccggtcaccactggttcggtgaaaattatgtccaagaatttggtcaaaaagcccttcaactgcctgaggatattgagtgggattttattggacatttacagagcaacaaaggttaaaacc

SEQ ID NO: 43469 - DNA, 451 bp, Gossypium hirsutum
  Clone ID: LIB3189-053-P1-K1-F2
caaaaagatccctctccaacaatggcttctaatcccaaggtcttcttcgacatgaccgtcggtggccaaccagctggtcggattgtgatggagctctttgccgattgcactccccggactgctgagaacttccgtgctctctgcaccggcgagaaaggggtaggccgtagcggcaaacctctccactacaaaggctcatccttccaccgggtgatccccaatttcatgtgtcaaggaggcgactttaccgccggaaacggtaccggaggtgaatccatctatggagccaagttcgcggacgagaacttcatcaagaagcacacgggacctggcatcctttccatggcgaacgctggacccggaacaaacggatctcaattcttcatctgcacgaccaagacggagtggctggacggaaagcacgtggtgttcggacaggtagttgaaggca

SEQ ID NO: 43470 - DNA, 446 bp, Gossypium hirsutum
  Clone ID: LIB3189-053-P1-K1-F3
aaatcaccaaataaaatcaacccaaaaaatagagaaaaaatctttctccgagtttcgcctttctcggtcgtcttgttttcgtaagcttgtttacctctcaatttcatagctatgactgttatggcccctgcccctatcgatcaacaagaagatgaggaaatgctcgtcccacagtctgatttgaccgacaatcaccagcccatggaagttgtagcgcaacccgaagctgcaaatactgtggaaaatcaaccagttgaggatcctccttcatcaagattcacttggaggattgaaaacttctctaggttaaacgctaagaagcattattctgaagtcttcgttgtcggtggttataaatggcgaatactgctatttccaaagggaaacaatgtggatcatttgtctatgtatttggatggtgctgactcagcaagcttaccctatgg

SEQ ID NO: 43471 - DNA, 261 bp, Gossypium hirsutum
  Clone ID: LIB3189-053-P1-K1-F7
attccggaaggcgtcttgatacacgcccccatttattttatttttcaaacaaattttcccttgaagtttcgtataatttcctaggaaaagaaatatgagagagtgcatttcagttcacatcggtcaggccggtattcaggtcggaaatgcttgctgggaactttactgtcttgagcatggcattcagcctgatggccaaatgccaagtgataagactgttggtggaggagacgatgcttttaacaccttttttagcggaac

SEQ ID NO: 43472 - DNA, 304 bp, Gossypium hirsutum
  Clone ID: LIB3189-053-P1-K1-F8
ataaattcctttatttactctgactcaaacctttttcaatgttttttagtttttatttttggttgggtggaaaatgatttctatgggttgattttcctcagggtttcagtcttctttggctgtcactttcctattcaaaaccgccttttatgatttccaagtctgaaaaaatataatacccatttctttagactttccgattcttctctcccttattgaaaaaccatttcaatggcacttctttttgattctccataactgtttttatattaagctctttcggcattttcttatctaacaactt

SEQ ID NO: 43473 - DNA, 234 bp, Gossypium hirsutum
  unsure (1)..(234): unsure at all n locations; Clone ID: LIB3189-053-P1-K1-F9
gtgatttggataaagatgatgtaaagggtttggtttgatgttnttnttnaaaggattatttggtgggaggtgaaaataggagggggggggtaaatctaatgaatacagtattgtttattgaaaatactgttaaataaggagggatagtttttggttttagagggaagttgattgtatatattgagtggatttttgttttaattgggaaaattaaggatgtgagttaattttatt

SEQ ID NO: 43474 - DNA, 436 bp, Gossypium hirsutum
  Clone ID: LIB3189-053-P1-K1-G1
gtttgtttttcttgtgattaatcgatatggctagctcaatgtcccttaagcttgcatgtgtggcggtgttgtgcatggtggtgggtgcacccctggctcaaggggccgtaacctgtggtcaagtcacaagctccctcgcaccctgcattggttacttgacagggaatggtgctggtggcgttcccccaggttgctgcggcggcataaaatctctcaactccgccgcccaaacaacaccagaccggcaagcagcttgcaaatgcatcaaaagtgcggccgccggcatttctggcatcaactatggtattgcaagcggactcccaggcaagtgcggtgtcaacatcccttacaagatcagccctagcactgactgcaacagcgtcaagtgaagttttggatgggaagttaccagctagtggaagccaaaataacgata

SEQ ID NO: 43475 - DNA, 332 bp, Gossypium hirsutum
  Clone ID: LIB3189-053-P1-K1-G2
ccaatacacagatacacttgcttctcactttagaacggtgtatggccgattcaacaccgcttctgtctcactgtgataaaccggcagaaccaaaacggccgcctcgatctctcgatgagaccatcgagggctgtatcggagacttcgggtggtggcaattcttgcaagcaatactcgtctctcttgcttgggtctttgatgctcagcaaaccttcatcagtgtattcactgatgctgagccatcctggcactgcacccaaggcggagacgagtctgtttgtaactctttgtccaacatttgcgagctccccaagaattcatggtcttgggat

SEQ ID NO: 43476 - DNA, 430 bp, Gossypium hirsutum
  Clone ID: LIB3189-053-P1-K1-G3
tgcaatagatcccggaaacaaggagggacttaggcaagaggtgattgttgatttggtggagcagtgccggacttacaaacaaagagttggacaccttgttaattcaacatcggatgagtcacttttatgtcaaggtttagcattgaatgatgatttgcaacgcgtactagcaaggcatgaagcaatagcttcaggaactccttctcaagcaaacaaacctaagcctgaacctgcaaaagaacttgtgaatgtcggtagtccactaattgatactggagacagtagcaagcagtctgaggggagatccacttcaagcactgttacaagttcaccatttaatcagttactggcttctgctccttctgcaactaatggttcaacttctccaccagctgccaattccaaaatggacttgcttaggggggatgac

SEQ ID NO: 43477 - DNA, 185 bp, Gossypium hirsutum
  unsure (1)..(185): unsure at all n locations; Clone ID: LIB3189-053-P1-K1-G7
gcgacaggtaccggtatagaaaacccgtaaggtgctaggaagctgaatgacgacatacctgggggggggaaattcaaggcggcgggagggtctcacaancatttctgtactagcaaagaggtccttgctggaaggactgctagctcccgcacttctaagaaggctgaagaggaagaagaagaaga

SEQ ID NO: 43478 - DNA, 292 bp, Gossypium hirsutum
  unsure (1)..(292): unsure at all n locations; Clone ID: LIB3189-053-P1-K1-G8
aaaaaggaataaaaaatccttgaataaaattgtgggggaataagttttaagtatgggagaatttgagaaacaccaaaggaaaattcataaaagagcatccagcataagttcattttaggtgccaaacttaaaaactacaaaatctaagacacttgacatgctccaaatatcaaatagatgactatcataacagtcatcatcggctttaagccactggcggaagttcaatctcggncggcacgggtgcttccaccttgataacttcatcatccttgggagggtggatggtgac

SEQ ID NO: 43479 - DNA, 422 bp, Gossypium hirsutum
  Clone ID: LIB3189-053-P1-K1-H1
acccaaccatctctcactctctcaaatatcctgttaccggcgtcgcaatcgctgctgttgccgtggggggctccaccggcgtattctggggctctcccgttgcgatcattttcctccctcttatttttcttctttcttcgcttcactgaattccccttcacttcttgtctgtttccggtggctcttcttgctttttcctcgctctgcgaccttcactaaactccccgacagcctcgcttccgtcactcctcattgctcggcctataacacaaggttttgatcttcaatggagtctggtaaacaaaatgagtatgctgctttcgaggagaaggtgaggaggacggtttacttggacaacctatcaccgaatgtaactggagtaatcgtgagaactggtcttggacagtatggaactggcaaga

SEQ ID NO: 43480 - DNA, 237 bp, Gossypium hirsutum
  unsure (1)..(237): unsure at all n locations; Clone ID: LIB3189-053-P1-K1-H7
nggntctctgnaccatngaagagnccggagagcacattgttgctggtgctggtgaactccaggtggggatctgtctcaaggattggggggaanatttcatgggtggtgctgagattattaaatcagaccctgttgtgtcattccgtgagactgtccttgagaggtcttgcaggacagtgatgagcaaatcttctaacaagcacaaccgtttgtacatggaggctcgacccttggagg

SEQ ID NO: 43481 - DNA, 304 bp, Gossypium hirsutum
  unsure (1)..(304): unsure at all n locations; Clone ID: LIB3189-053-P1-K1-H9
cccacgcgtccgaccctaaccaaaggcaaaaggaaaaaaaatggcagaaagaggcggaggtgaacgcggcgctttcaggcgtggcttgggtggtggtagaggtgaccgnggtccaagaggcaggcgccgcggccgcaaggacgaagaggaaaaangggnacccgtcacgaaactcggtcgcttagncaaagccggcaagatcacatcccttgagcaaatctacctccattctctccctatcaaggaggaccaaatcatcgaccaactcgncggcccttcactgaaagacgaggtcatgtaaatc

SEQ ID NO: 43482 - DNA, 351 bp, Gossypium hirsutum
  Clone ID: LIB3189-013-P1-K1-F10
ggctcagaaaaaacgaagagctcatcgttgatggataacttattgggccttcttcggattcggggtaaacggggctttaacctgggcgttcgtgatgttcgaagcagcgatccttacgttgttgttaaattggataaacagaaattgaagactcgtgtaataaagaaggatgttaatcctgagtggaatgaggatttaactctttccataacagatcctagtactccaataaaactgacagtttatgaccatgacacttttagcaaggatgataaaattggaaatgcatagattgacattcatgccggacatagaagccttgaaagtggatgtggatggtatttcgattgg

SEQ ID NO: 43483 - DNA, 436 bp, Gossypium hirsutum
  unsure (1)..(436): unsure at all n locations; Clone ID: LIB3189-013-P1-K1-F11
gccaatgaagtcccaccagccgcttcttcctcttaagaagaagatgaggaagactccaaaacggagatctactccgttgaaccaacagagcccgccacccagaaagcctgctaaacggcctggggagtcggagttggatgccaatgaagcgaaacgacccaagaagaaggttggggaagaagggatggcgactgcacctgttgtggaggaggtgaaaaaggcgaaacgccacaaatcccatcttttccccaaatcttttaaagtccatgaacaacatgtttgtgttgtctaaaaagatttggggcaaagacgggattagtgggaaagtctagtcttcaactgcaccgacaaaaaaaattgacgatgcggtgccaatagaggtttattaggtggnntcttaagatgtttccgttggtcgtttgattagaaatttttt

SEQ ID NO: 43484 - DNA, 365 bp, Gossypium hirsutum
  unsure (1)..(365): unsure at all n locations; Clone ID: LIB3189-013-P1-K1-F4
cgggtccgaccaacccttccgaatctgtttcgaagtctgtgatttggttctccatttttatgcaatccacagaggtggtggtcgtgtgattctaactggtcgacgatgtgtctatgcatctcancttacggccaagccaaggcttctcgagcccgtttacttagtcgagatccaagctcctgagcaagcacttgttggtttttcagtgttcttaaccagaaacgtggacacgttttctaggaaatgcatagtgcctggatcaccactctacaacataaaatttttcctttcattcatcgtgttatatttcttattcagcacactaatggctgttacatgtgtgacttgctttcccactatttgtt

SEQ ID NO: 43485 - DNA, 368 bp, Gossypium hirsutum
  unsure (1)..(368): unsure at all n locations; Clone ID: LIB3189-013-P1-K1-F5
ataacaacggnaaacgaaaatagnattgttggaatttaaggtgattactgcaaaactacacattattaacaaacttaactaccttaactaatcattcattaacacccatcctaccaaaacccacaaattccaatatatcctttnnanaatattattcaaatacaaaattccaatattttattacaagttttaaaaaaaatttatacaaaatatatatataaattactgttcaatatcatctatccttaatacattttttaaaaatattctatccaaacccacttatccttattccttctttctatttcatttatattttatttttaatacctaatttcattatttaataactttcccatttttttttg

SEQ ID NO: 43486 - DNA, 315 bp, Gossypium hirsutum
  Clone ID: LIB3189-014-P1-K1-A1
tacggaggtggcagtcccccatcatatggaggtttcagtccaccaactactcccattgatccaggaactccaagcattccctcacgtgcattctttcctgctccaactccaccaattggtggtacatgcgatttctggaggagtcaccccacactgatatggggtctgcttggttggtggggcactcgatgcaacgcatttggcgtgaccaacgctcctggacttggaacaagcatgagcttgccccaagcactctcaaacacacgtactgatggacttggggcagcttaccgggaaggaacagccttatttttt

SEQ ID NO: 43487 - DNA, 357 bp, Gossypium hirsutum
  Clone ID: LIB3189-014-P1-K1-A2
tattgatccacgccatcgttacgggcataatttgcatatttactatgaagagtggtgtaaagctgatgctggtcaaccatttttctactggttggatttaggtgatggcaaagatattaatcttaacgagtgcccgagatcgaagcttcgacaacaatgcatcaagtatctcggaccccaagagagggtaaattatgagtacattgttgctgaaggaaagattatccataaacaaaccagaaacgtactcgatacaatcgaaggattgaaagaagggaaatggatattcgttatgagcacctcgaagaaattgtatccggcaagaagaaagaaggaatgtttcatcaatcgagtttc

SEQ ID NO: 43488 - DNA, 293 bp, Gossypium hirsutum
  Clone ID: LIB3189-014-P1-K1-A3
ggccaatgctatgttgcaccaaacagttgggactcttctacttcatggcagttctggaattcatttccaaggtggaaataattcagagagattggttcccaaaggtttcaaggtggaagttgggttctgcgagagagggatttagtcttcctcaacagtagcatttaatatcttttttcctccatcagaggttataattcttgagtacatttgtccttgatgtgatagattttctcttatactaaccattaacgtttctctatacatttgttggattgtaatttaggtcttat

SEQ ID NO: 43489 - DNA, 211 bp, Gossypium hirsutum
  Clone ID: LIB3189-014-P1-K1-A7
gcgaactgagaacattgtctctgtaatgtgcaatggtcggtggattatgagagataagaagatcttaaatgtagatgaggaggaagttatatcattagcaaaagaagcttcaagcaaacttttgagaagagcaagtatcaaattaccaagcagaatgaataagatcctctgaccccaacactggtctctttttgatccattgcctttaaac

SEQ ID NO: 43490 - DNA, 277 bp, Gossypium hirsutum
  Clone ID: LIB3189-014-P1-K1-A8
accatctcaactacgaccccctagggtttatctagggtttcctattttctaccgttcctgtctttgtattccaccaatggcgaagccgacgagaggccgccgttctccttctgtctccggctccggttcctcttcccgttctcgttcacggtctaagtctcgctcccgctcttattccggttcagactccaagtccagttctcgctctcgctcagtgtcccgctccagatctgctttcccgtctagcttcttgtctcgctccagatttttatcctct

SEQ ID NO: 43491 - DNA, 351 bp, Gossypium hirsutum
  Clone ID: LIB3189-014-P1-K1-A9
acccacacatcctctcatctcaaaatctgtaactacatttacccaataccaaccccttcaaagaaattttctctaacaaaaaagaaaaccccatatcatcctccccctatcttcttttattttctcctttatttatttccttcacctttttctttctttccccaaatctctcttactttcttttaaacttacccaccatttcaactttcccattttttattttctatatccaaccattccccccattttattaaccccctaatccattataaatttttctttctcttttatctaattattatctttacatttcatttaattactttaaattttttttttctatcttttttt

SEQ ID NO: 43492 - DNA, 449 bp, Gossypium hirsutum
  Clone ID: LIB3189-014-P1-K1-B1
cttgatttcaaactcgaagtctccgccactactaccagctttctattcatcgctcaacccaatggcagtcgcttccaactcgctcgtttctttcatccacggctcattgagtcaacccggaaggacctcccactttcttccttcaccttctctttctttccccggatctcgctcgctctctctgaaactcacccgccgctccaactcgccccttctttgctctttagatgcaaccaacgccacagataaggacaccccaatcgaaacaaggttcccagcttatccaactgtgatggacatcaatcaaataagagagatattaccacacagattcccattcttgttagtggatagagtgatagaatataatccaggggtatcggctggtggtataaagaacgtgaccataaatgataacttttttcctggacattttcctgagaggccca

SEQ ID NO: 43493 - DNA, 306 bp, Gossypium hirsutum
  Clone ID: LIB3189-014-P1-K1-B3
caggttttgaaaaatataaatttagagatcaagaaaggtgaactcaccgccatcgttgggactggaggatccgggaagtcttctagactggcttcagttcttggtgagatgcacaaaatatcaggaaaggttaagctttgtgggacgaccgcatacatagctcagtcatcttggattcagaatgggacgattgaagacaatatcctattcggtttgccgatgaaccgggagaaatatagggaagttataagggcttgttgtttagagaaagacttggaaatgatggagtttggtgatcatacagaa

SEQ ID NO: 43494 - DNA, 334 bp, Gossypium hirsutum
  Clone ID: LIB3189-014-P1-K1-B7
cccacgcgtccgaaaaaaaaaaaagaagcaaaaatacatggccaaagttctgttgttcattgctgtatgtgtgcttccagctgggggtagtgctacacgcattctgaataaccaattggtggttgaaggctatgtgtactgtgatacttgccgtgctggttttgaaacccctaagactagaaggctagctgatgccatggttaagctggtatgctccgacaggaagaccggcggagttgttttcgagaaggagggatataccgacaaaaccggaaaataccagattcgtgtatccgaggatcacttggatcagatctgtgatgcaattcttgtg

SEQ ID NO: 43495 - DNA, 205 bp, Gossypium hirsutum
  unsure (1)..(205): unsure at all n locations; Clone ID: LIB3189-014-P1-K1-B8
gaaaaatatatagcccaatgtatcttttgccttgtataaactatatccatagttctctcaagatntgaagtgtgaaaaagaagaagaaacaaanaggaatcaaaaacatgcaatatcttttgcaattttgatttggtagatccactatggtcctttcatttatatacaatgaatcagttagtgaagttatatgcccccttaaaaa

SEQ ID NO: 43496 - DNA, 343 bp, Gossypium hirsutum
  Clone ID: LIB3189-014-P1-K1-B9
gtgaaaaagagaggtgttttttctttttgaaatttgagattacaaaaacacgaatgagctgagctctgattatttcgaaagcaagtggagttcagctctctttgaagactcgaatatcgcaataaactgtgaagatttggggatcaaagctcaaagggtaaaaagtacctccgttagatctttaccgtcaaacgagagaattaaaaaaaaaatgtcggttcaagagtacctcgacaagcatatgctctctcgcaaaatcgaagacgccgtcaatgccgctgttcgagctaaaacttcggatcccgtcctcttcatctctaatcatatgaaaaaaagcggttct

SEQ ID NO: 43497 - DNA, 443 bp, Gossypium hirsutum
  unsure (1)..(443): unsure at all n locations; Clone ID: LIB3189-014-P1-K1-C1
attagtttctcttcttctttgtactttttttttggtttctttctttggttttatttttggcccgatctgtctgttgttttaattgatccttctttttcagatttcactttttgtttattgatttaatcaaatttccatatcttactgttactgatgctttactgttacttttgttagttttacttctttcatggatgatttgatctggtcaatctgagatctgaaagtttctaatttatttttattgctgttgntttgcttttacttctttttggttttttgctttcggaaattataaaaaaaaatagattttacttgtttatctgatttggtgttgcattagatatggttatttatccattttttaatcaagtgtgatttgttttagcatcttaaaggagctcaagtnagttactaaaagcataactagaacgggaattgct

SEQ ID NO: 43498 - DNA, 252 bp, Gossypium hirsutum
  Clone ID: LIB3189-014-P1-K1-C2
gccagaggtcaatgaaacgcaatagtaataactcttcttctaatggcagtctctcacagcctgcagctgaaggtcctattgttgagagacgctgttaatagcccttcttctagggaccagacacagagaactggatttgcatcacagcctcatactggtagtaatgatcaccaacacccacggaattcattcagacaacgtaatggtggtccacatccacgaggagagggttctcaccattagaattttgga

SEQ ID NO: 43499 - DNA, 400 bp, Gossypium hirsutum
  Clone ID: LIB3189-014-P1-K1-C3
ttcttcaattcttgtttttgtggcaaacacatggcatgctcaaggactgtttgtgtaatggatgctggcggtcaccttggctccggcgttgtccacttgctcttacatagaggctacactgtccatgctgcccttcagccccatccaaatgggttccaatcagttgaggagctgtttccttgtagtaataaaaatttgaagatattcgatgcagacccttttgattaccacagcattacagctgcattgaagggatgttgtggtttattctactgctttgagcctccatctgaccattctacttatgatgaattcatggcggaaattgaggccagagctgcacacaatgtgttggaagcatgtgctcaaacagattcaattgagaaggtggttttcagat

SEQ ID NO: 43500 - DNA, 146 bp, Gossypium hirsutum
  Clone ID: LIB3189-014-P1-K1-C7
aaaaaaaaaaaaaaaaaaaaaataaaaaaaatttatattataaaaaaaaaaaaaaaaaaaaaagagggcctctcttaaagatccagaggttacttccccttccttgctacatcttaactcttctttaatgtcacctaatttcaatt

SEQ ID NO: 43501 - DNA, 114 bp, Gossypium hirsutum
  unsure (1)..(114): unsure at all n locations; Clone ID: LIB3189-014-P1-K1-C8
tgggatcccaagttcccaacacttttgttttttgtgctctttatcttgtcgatgttttgggggggcttctcctaggaatggggggggnttcntttattgttcctttttggtttt

SEQ ID NO: 43502 - DNA, 304 bp, Gossypium hirsutum
  Clone ID: LIB3189-014-P1-K1-C9
gttgaagcgaaagcttatctcttttcgtctctgtatctgatcaatcaacacctgaaaagaagaacttacaaacaacaactacgagtagtctactacccagcactagaagcagctcgtagccagccatggatgaagagtacgatgtcatagttctaggaactggtctcaaggaatgcatcctcagcggtcttctttctgttgacggactcaaggttctgcatatggattggaatgattactatggaagagagtctacatcactcaacctcattcagctctggaagaagtctataggaaatgatta

SEQ ID NO: 43503 - DNA, 390 bp, Gossypium hirsutum
  Clone ID: LIB3189-014-P1-K1-D1
ctaactttctttcccatcactatcaccactaccttccatggctgagcaacagcaggaacaacagcagtcaagatccacaggcaaggtcctttggttcgatgaccaaaagggtttcggctttattcatcccgacgatggtggcgaagatctcttcgttcatcaatcttccatcaaatccgaaggctatcgtagcctcgctgagggtgaatctgtcgagttcactgtttcccaaggcaacggaggcaagacccaggctgttgatgtcaccgcaatcggtggctctcaaatcagtaagaaggaccgtcgcactggcggcggcggttggagggctggaaacgatcggaggaacggaagcggcggttgttataactggcggggatctgaatcatc

SEQ ID NO: 43504 - DNA, 340 bp, Gossypium hirsutum
  Clone ID: LIB3189-014-P1-K1-D2
aatgaggaatggaaattgcaatgatttaggcagtgaaaaggactttggaaatcttggtagcactgggtacttttgctttgaaactgtttttggaccaaaagaatgaaaccttagatcaaaacaagaggaaacgcgcagctgaattgaggactatcttcaccagactaggccctactttcataaaattgggtcagggtttatccaccagacctgacctttgccctccggagtatctcgaggagctggctcagctgcaggtattcctgtattttatggcctagtacagcagtcaggactacatgcattagtagatgaaaaaaaagttcctataacaatggac

SEQ ID NO: 43505 - DNA, 330 bp, Gossypium hirsutum
  Clone ID: LIB3189-014-P1-K1-D7
cccacctccatttatttattttaaaattggcggactgttatgttgctgccctattaaaactgatggggttgtcaataggacagggcgtgaaaatagcccttcaatgaagaacatcattagaaacaagagaaaaaggagaggatgttatggataataaatagtctgattagttgttcatccaagtatcccctcttttcttatatgatattcatctgttattcataactctgtttagtataaaccttaaaagtttattatttattttttaattactcaatttgtatattgtttattttattcattctcttttttatttcttttaaattgttt

SEQ ID NO: 43506 - DNA, 377 bp, Gossypium hirsutum
  Clone ID: LIB3189-015-P1-K1-A12
gagcactcattcccagcttttcactgcattgtttccacattgctgctctgttcttgaccagcggtttctttgagctttgttgctctgtgcagcgaatgaaatcaaagtgctttttcacatcaggccagtggtagatgacacagctatgtatggtatttaagtagcattcatcttctccatgctggcaatggggttcacagaatcaacaaatgctatacttctggatatggacttaagcttctgctacaatatgctaatgagactgcaaagcttaagcccacttaatgagtatgtgccatgggtgggggtggtaatcagccactcaaagatgactttgaaaattttgtgaaatatgtctgtgaagcttataaaggtga

SEQ ID NO: 43507 - DNA, 177 bp, Gossypium hirsutum
  Clone ID: LIB3189-015-P1-K1-A2
cgaccacgcgtccgcccactctcactgaacacaacaaccatcaaaatcgtgtctctatcaacactcaataacaatatgctgtgcaatttgctatgcattgcgaggccccacttatccatctgacaaatgccaatgcaccaacctacatcaagaatcggcgaaagcagcggacgccca

SEQ ID NO: 43508 - DNA, 409 bp, Gossypium hirsutum
  unsure (1)..(409): unsure at all n locations; Clone ID: LIB3189-015-P1-K1-A3
ccggncgaccacgcgtccgctctcaagacctgggcaggaaaagaggagaatgttaatattgttcaagatgctttgctcgttatgtgcaaggctaactcagagggcggtttgggtacatacaaaggtgatgctgagctttgtgagggtgctgcatagagccttcatgtcaaagactacaaatattaagaaattaggcttgtagtcaaatatgtgatgtttagaggagtaaaattcagtattgatattatttttcttgattgtatactttttgtttttttattaaattatttcttatattattttataatttttttttttattattatacatgattttctatttttattttttttaaatattattttatttattttaattttatctatgtgtcattatatttttattttta

SEQ ID NO: 43509 - DNA, 325 bp, Gossypium hirsutum
  Clone ID: LIB3189-015-P1-K1-A4
atttgattgcgcaaaagacagccgctggtctatccaaattaggcattcaaaagggagatgccatgatgattctcctccacaactgtgccgaattcgtcttcgccttcatgggagcttccatgataggagccgtttctaccaccgctaacccgttttacacctccaaagaaatcttcaagcaattcaaagctgctcgagccaaactcatcatcactcaatcccaatacgttgacaagcttaaagacaccaataacaacaacgacggcgtcgaaaacttccccaaaataggtgaagatttcaaggtgatcaccatcgacgacccccc

SEQ ID NO: 43510 - DNA, 315 bp, Gossypium hirsutum
  Clone ID: LIB3189-015-P1-K1-A5
aattgaccttgctcgaaccctagctgatcgagatggattttcaaacatcaagtttctggttgatgatattcttgagacaaagttggatagacagtttcaacttgtcatggataaggggactctcgatgccattggcttgcatcctgatgggcctatcaaaaggattatgtattgggattcagtttcaaagttgttggcccccggtggaatattagtgattacatcttgcaaccatacaaaagatgaattggtccaagaggtggaaaatttcaatcaaaggaacattgcaatatcccaggagccaagtgcaacgaa

SEQ ID NO: 43511 - DNA, 305 bp, Gossypium hirsutum
  Clone ID: LIB3189-015-P1-K1-A6
acccttccgaccacgcgttcgtccacccgtacgtttttttcttttttttcacagctgcattttagacaattaggcagacacaaaggacaacagagaacgagacctattctctcatgtctttctctgcaactattccgtctcctcttcttgatttctcccaaaccaataagaacccagatttttcttcatcaaggcctaacatgtctttctcaattccttacatcaaatactacattgggtcttcatacacagccttttttcaaaatggatgctgcttgtcataatttactgatcattgcattatc

SEQ ID NO: 43512 - DNA, 61 bp, Gossypium hirsutum
  Clone ID: LIB3189-015-P1-K1-B10
caagaagtcccttcctctttttctctgctgtttctattgcgccgctcatgggtccagtcat

SEQ ID NO: 43513 - DNA, 338 bp, Gossypium hirsutum
  Clone ID: LIB3189-015-P1-K1-B11
ggaaggatgccttccacctgcgagtccgtgttcacccattccatgtcttgcgtatcaacaaaatgctttcatgtgctggagctgataggctccaaactggtatgcgaggtgcttttggcaagcctcagggaacatgtgctagagtagccattggtcaggtcctcctttcagttcgttgcaaggacagcaacagtcatcatgctcaagaggcccttcgacgtgctaagttcaagttccctggtcgccaaaagattattgtcagcaggaagtggggttttcacaaaagttcagtccaaactgatttattttgtaaatttaaagtcatgagaattaacatt

SEQ ID NO: 43514 - DNA, 268 bp, Gossypium hirsutum
  Clone ID: LIB3189-015-P1-K1-B12
gcgggaaaaaattccaggtttatttcaaggggctaatccaacctgtttccacactgttttttcattcccttgcaagggatccatttaattaacacataaatgggaccatattgggaatctatgggaattcatgacttgaaaagagaaaatggaaaaaggaagaggagagacaaattagttggagctaataaaaatacccaggggaaatgtaaaggcagaaattaaatttgttaaaaaggttattttttttttttttagcaaagttcta

SEQ ID NO: 43515 - DNA, 252 bp, Gossypium hirsutum
  Clone ID: LIB3189-015-P1-K1-B2
ggattttgagcctccttgagtctcatctcattccttctgcttcatctgccgagtccaaggtgttgtgccttaaaatgaagggtgattatcataggtatcttgctgagttcaagactggtgctgagaggaaggaagctgctgagagcactttgttggcttacaagtctgcacaggatattgctctcggtgacctatcgccaactcacccaattaggctggttcttgctcttaacttctttgttttcttctatg

SEQ ID NO: 43516 - DNA, 216 bp, Gossypium hirsutum
  Clone ID: LIB3189-015-P1-K1-B3
cggacgcgtggggatggatgtggagaggaggcattttattttcaagcctgttattaaaaaggcaggggtagaatttgatggtgcggcgggcaataaatttgcttccttgcggtaggagcgttccattaaaaactgcttcatttttccttgtcctattcaatatttttgcccaattttttaatgcatattaccatcacttttcttttttttatcttt

SEQ ID NO: 43517 - DNA, 426 bp, Gossypium hirsutum
  Clone ID: LIB3189-015-P1-K1-B4
ccaagctctctctatccccgtctatacacctatattattaccctctctacactctcttccatcactggccctacccagtacttgagagagatgggtctctcaagctcctttccttcatggattttttcttctgtattctgagctaagcaaagacaagaagatggcaatacagcaatatgaacagcagcaacaacaacaagagaatcacccttccttcttgctagatgctctctactgtgaggaagaagcggatgcaggggaagttttagaggaagagagttcttgtgtgggctgatacaatggcggaaaccctgtattttttccactgttgatgttagtgcaagatttttttttggtatcttttatttgtttcttttattttttatcttataataatattattacatttatctaactattttattt

SEQ ID NO: 43518 - DNA, 366 bp, Gossypium hirsutum
  Clone ID: LIB3189-015-P1-K1-B5
agaagaagtacgttgatctcgggtgcatcattgtcagccgcaagatctttgtctggacggttgggaccttggtcgtctcagccgtgcttgccggattaatcaccttaatcgtcaagaccgttccacgtcatcaccacggcaagcctcctcctgataactacactctcgcacttcacaaagccctcatgttcttcaatgctcagcgttccgggaagttacccaagcataataacgtgtcctggagaggaaactcgtgcctccgagatggaaagttcgatcccggcactacaatgaaggatctggtctgcggtttctactacgccttgatatgcttatcaagtttatctttcttttgattttttgccc

SEQ ID NO: 43519 - DNA, 320 bp, Gossypium hirsutum
  Clone ID: LIB3189-015-P1-K1-B6
ggattttgagcctccttgagcctcacctcattctttctgcttcatctgccgagtccaaggtgttgtaccttaaaatgaagggtgagtggcataggtatcttgctgagctcaagactgttgctgtgaggaaggaagctgcttagagcacttctttggcttacacgtttgcaccgtatcattgtcttagtgtcttaatgcttacttatccatttaggcttttacacgcttttatcttttttgcattcttcttttctttttctttgtcttatcatttatttttctccttctttccttttttatttttctttttttttttactt

SEQ ID NO: 43520 - DNA, 313 bp, Gossypium hirsutum
  unsure (1)..(313): unsure at all n locations; Clone ID: LIB3189-015-P1-K1-B7
atagaagtcatatggaactcgtttgtcgtagaggtcaactgccatagggttttgggagggcttgaggtgattaacttggtcaccgaacaagtttccaattngaaagtcaatggtctattctttgccatcgggcacgagcctgccaccaagtttttgggaggtcagctggagctttactcatatggctacgttgtcactaatccaggttcaacttataccatcatgcacttttttttttcttccttagtattttcattatatgatttatttacaagctttttttttttacttatacctttttcattttaactct

SEQ ID NO: 43521 - DNA, 166 bp, Gossypium hirsutum
  Clone ID: LIB3189-015-P1-K1-B8
cccacgcgtccgccacgctttaatttgtttttgcttctctcgctttatttctcgtatattgatggcggttctgagtaagacgctgggatccaaatcctcgaagaaggcaacatcaaggagtatcatggctggtctttatgttccacaatgttctatttttttttta

SEQ ID NO: 43522 - DNA, 357 bp, Gossypium hirsutum
  Clone ID: LIB3189-015-P1-K1-C1
cgcgacccacgcgtcctcggacgcgtgggcttgtaacgagcttcgtgggtggagctggctttccacgcgggaaacatcataggggggatattgccaccacagaggggggaaacaatgcagagcgattcatccatggtggcatttccattgctgactactcccatcgaatccaactacagggcatgcaccattccttacagattcccttccgataatcctcgaaaggctacccctactgaaattgcctggatcgaccttttccgcaattccattcccttccttcaagaagagagctgatagcgatactactgtggttgatgcttcaactaaagctgagaaatttgttcaaaggtattc

SEQ ID NO: 43523 - DNA, 266 bp, Gossypium hirsutum
  Clone ID: LIB3189-015-P1-K1-C10
tataaatccaaatttcagcaagccaaacgaagtacaggagtcgagaaaaaattcctcttttccttgcgtcaacgtttgaattttacagggcttaatctttgtttggttcccgagaatatcaacaatgactcgcggcaaccagagagaaaaagatagagaaagggctcaatccaggtcaggcaacaaagggaaagctggttctaaggacgatggattgacccctgaacaactccgtgaaagagatgcaaaggccttacaagaaaagg

SEQ ID NO: 43524 - DNA, 332 bp, Gossypium hirsutum
  Clone ID: LIB3189-015-P1-K1-C12
gttgaccagagcgggaaagggaagcataaggttcatagtcactttgacagagcgttggagagtgggccttatacgttgaagtacagaggaagcatgtggggctacaaacgattctttagaagaacaactttagaaagttctgactacattaaggatgattgcctaatcatgaactgcactgttggagtagtcagaactcgccttgagggaccaaaactgtcttctattcctgtaccgccatcagacatgggtcagaatcttagagctttgttagaatccgaagttgggtgtgatataatgtttcaaggtggtgatgagacatttaaagcaca

SEQ ID NO: 43525 - DNA, 133 bp, Gossypium hirsutum
  unsure (1)..(133): unsure at all n locations; Clone ID: LIB3189-015-P1-K1-C2
cgcgtccgtacttgagaagtgtattataagatgttagctctcgttcctaaattgaaatacccactacttttaacgtgtgttttactttattcacagagaatcgggaggcttaaacacanatctcctctttctt

SEQ ID NO: 43526 - DNA, 410 bp, Gossypium hirsutum
  unsure (1)..(410): unsure at all n locations; Clone ID: LIB3189-015-P1-K1-C3
gtgagaggcatagacaaggagaaaatggagaaagctttttctaaagtttgngagcttgaaagttggtggggtttttttttttttatggggtttataaaatttttttactttatttatgatttttctttttttttatttattttttatttttttttttttttttttttttttttttttttttttatttttatttttttttttatttttttttttttttttttttttttttttttttttttttttttttttttattttttttttttttttttttttttttttttttttttttttttttttgttttatatttttttgttttttttttttttttttttatttttttttattttttatttttttttttttatatttttttttttttatttttttttttttttttttttttttttt

SEQ ID NO: 43527 - DNA, 381 bp, Gossypium hirsutum
  Clone ID: LIB3189-015-P1-K1-C4
cttaatcacaaacccaaatctccaattctgtttcatttttcagcaaagctagaaagacaatgactagaggatattgagactgcagagcaacgtggaggggagttctcggccaaggactaccatgatccaccacctgctccattgattgatgctgaagagttaaccaaatggtcgttttacagggcagtgattgccgagttcattgctacacttctcttcctgtatgtcactgtgttgaccgtgattggttacaaggtccaaaccgacccttgttaagaacactgttgaccccgattgcggtggcgttggtattcttggtattgcttgggctttcggtggcatgaacttttttcctgtttactgtacctgtgtgtttttttg

SEQ ID NO: 43528 - DNA, 118 bp, Gossypium hirsutum
  Clone ID: LIB3189-015-P1-K1-C5
gtctatttaccctctctccggtcactactatggtgtttttcatccgcgatacggatctacacttggtgttcatcaaggcatgggccagcttcgtcgcaaggtcacctcttgcctatct

SEQ ID NO: 43529 - DNA, 350 bp, Gossypium hirsutum
  Clone ID: LIB3189-015-P1-K1-C6
gcaaagctcctctcttcttcctcttcattttcctctgaattctttgtctctatttaaaaaaaaagagcaatttttttgaggtggtagtgtacaaaaacaaaatgaagatctgttgcattggagctggttatgttggtgggcctacaatggctgtgatcgcgcttaaatgtccggatattgaagtggctgtcgttgatatctctgtacctaggatcgctgcctggaacagtgaccagctcccttttctatgagcctggtcttgatggtgttgtgaaggagtgttgtggcataaaccttttcttcattactgttgtagagaaacattgttgtttgaggctgtttattgcttt

SEQ ID NO: 43530 - DNA, 77 bp, Gossypium hirsutum
  Clone ID: LIB3189-015-P1-K1-C8
ccagcgtccgattgaaataccactcttttaacgttatttacttatccggaatcgggggggggcacgccctttgggga

SEQ ID NO: 43531 - DNA, 73 bp, Gossypium hirsutum
  unsure (1)..(73): unsure at all n locations; Clone ID: LIB3189-015-P1-K1-C9
cggacgcgtgggctgaggtgatgcgaccctttttttatcacattcactnnattaaggcttgggggggtttttt

SEQ ID NO: 43532 - DNA, 413 bp, Gossypium hirsutum
  Clone ID: LIB3189-015-P1-K1-D1
ggaaggatgccttccacctgcgagttcgtgttcaccctttccatgtcttgcgtatcaacaaaatgcgttcatgtgctggagctgatagggtccaaactggtatgcgaggtgcttttggcaagcctcagggaacatgtgctagagtagccattggtcaggtcctcctttcagttcgttgcaaggacagcaacagtcatcatgctcaagaggccctccgacgtgctaagttcaagttccctggtcgccaaaagattattgtcagcaggaagtggggtttcacaaagttcagccgaactgattatttgaaatataagtcagagaatcacattgtccctgatggtgttaatgctaaagctctttggatgtcatggacctctagctaatcgggagccaggaagagcattccttcatgc

SEQ ID NO: 43533 - DNA, 420 bp, Gossypium hirsutum
  Clone ID: LIB3189-015-P1-K1-D10
cccacgcgtccgagtacaacggatcttggtacataaagaaaactaaagaagcggacctttaaagttccactgaagatagtggaggagaacaacaggacctggaatgcctttttcaaaagaatctttggctgaatctaaacatagattggaagcattggacaagaaggatgcagagcgaagaagaacagcagagttaaaaaataaccttgaagaatatatatatgctacgaaagagaagcttgaaacatctgaagactttgaaaaagtatcttcaaatgatgagcgccaatctgttatcaaaaagcttgatgaggttcatgtatggttgtatactgatggtgtagattcgattgtcttattttttcaagttctgtttatgtttattttatgttacttttttttttcatttttttttttttt

SEQ ID NO: 43534 - DNA, 381 bp, Gossypium hirsutum
  Clone ID: LIB3189-015-P1-K1-D11
ctagttctagatcgcgagcggccgccaaaacgtgtgcaagtgcatcaaatcggcggtgaacgggattccgtacaccagcaataacgtcaatctcgcagccggcctacctgctaaatgtggtctccaactcccttacagcatcagcccctccactgactgcaacaaggtgcagtgaggttgatgatgatgatatggaaggagtggaagaaggttccagcttagcttatataagtatcttgctaaagttataaaattttatttaggttgttttttatttttagatatatatttgtttaatttttattaaaatgttgttattctttttttatatatttctttattttgttttttattattattattatattttatttttatatt

SEQ ID NO: 43535 - DNA, 365 bp, Gossypium hirsutum
  Clone ID: LIB3189-015-P1-K1-D12
cttcttcaaagctttcccttttcttcttgttttccttcttgtttgcttccactttagctcggggtgcccttcaccaacaacaggaggatcctcgatgtcttagcttctttgaaacaagctcagcatattctttcctttgatcctcaaatttctaatggtttttccaaaagccaaccccttttcgtcaactcttcttcttcatcgggttctggtttttcgattccacttcattcacggggctctttgcgaaaaacccatcatgttgattataaaaacctggtccgatcccgacttgaccgtgattcagcccgagttaacacgcttaccaccgaggtactactcgctgtcaatggggttcgcaaaac

SEQ ID NO: 43536 - DNA, 59 bp, Gossypium hirsutum
  Clone ID: LIB3189-015-P1-K1-D2
ctttgctgttgaagtagtaatatctatagcatacagagttttagagcgcaaagaagcaa

SEQ ID NO: 43537 - DNA, 320 bp, Gossypium hirsutum
  Clone ID: LIB3189-015-P1-K1-D3
ccacgatttccaccccttattctataagtttgatttaactgctagacacaccacgctcatttctgggttctgttttccttggtctgtggtacattcagcaaaggggggctctgagatcacataccaaaatggtgaaagccgttgccgtccttagcagcaatgaaggtgttagcggaacttgtttcttctcccaagaaggagatggttcaactaccgtgactgggaacctctctggtcttaaggccggactccatggctttcatgttcatgccctaggggtcataacttacgggtgcatgtctactggacccctatataat

SEQ ID NO: 43538 - DNA, 387 bp, Gossypium hirsutum
  Clone ID: LIB3189-015-P1-K1-D4
cccctaaaaagcttgtgcttggatatggctgaaaactccagtaaaatggctgtttctcattctagcaagctgcctgtgtttcgctttcgtgctctcggaaagcaacttattgataaagaagacctacatcgtccaaatgcacaagtctgcaatgccagcatcattctcaagtcctctggaatggtactcatcgaaattaaagtcggtaatgtccgatacccagagtgaaggtgaaggagatggtgaaaaataggatcatctatagctaccaaaatgcttttcatggtgttgccgctcagttaactgaagaagaagctgagaggctaaaacaagaagatggtgtagttgctatactttcagagaccaattatgaattacacaccacaa

SEQ ID NO: 43539 - DNA, 384 bp, Gossypium hirsutum
  Clone ID: LIB3189-015-P1-K1-D5
cccacgcgtccgatttcgaaagaggttttcgattactctgatcgaagaattaaagggataagtaaacaagattggtagaatggctctagttgctggaggatcgtcaacattgaaccccaatgcccctctgtttgttccggctgtttatcgccaagtggaggatttctcacccgaatggtggaaactggttacgacaacaacttggtaccgtgactattggatcagccagaaccaggatgaagatggcttttacgacaacaccgaggatgatgtatttgatgtcaatgacattgttgatttgctcgcagatccctttgactttgtctctgacgaagatctccagttcgaagagttcatccaatctaatgaaatggaaaccatagc

SEQ ID NO: 43540 - DNA, 269 bp, Gossypium hirsutum
  Clone ID: LIB3189-015-P1-K1-D6
atactctcttccactcagtggcactgaatataaccagtaagctacctaactcagtttctggtcatggtcaaaatgttactgaacctaggcctaatgcaactcaaaacgaagaatgtcgcgccccttctccaacagctcttcagactcaggcagatcttctatcttctgttattgagagggtgggtgagcttgaacagaaagtagttacactacaagcgaagccatctaatatgtcttatgagaaagaggagttgttgaattttgctgta

SEQ ID NO: 43541 - DNA, 443 bp, Gossypium hirsutum
  unsure (1)..(443): unsure at all n locations; Clone ID: LIB3189-015-P1-K1-D7
aaatgagttactagagaggtccttaagancatgatccttctcctggttatnccnctccttatccgccacctttctatgcatcaggccctcctcccccatcttacgaaggctatcctcctccgccaactggatatcctgcctatcctcctcagccgcctcgccagccctacgactgttaccaaggctattttgctgaagggtatccacctcctccgccccctcaacctcatcctcaatatcaacactaccaccactatgaccactaccattaccagaaccagtctgattctggctgtatctctttcttgcaaggctgtttggctgctctatgttgctgctgtgtgttggaggactgctgcttcttcccatgatataaatcatgacggatgagttatttcatttacatttttggttctgctattcttcgcttgttacttgtttgg

SEQ ID NO: 43542 - DNA, 294 bp, Gossypium hirsutum
  Clone ID: LIB3189-015-P1-K1-D8
gtcaagaagcttgctttgctggaaagcatctatatgatactcgtcggaagctctctcgattgaagactcggacacgaagaccacatgcaatattgaagcttgtattgtgtggaaaatgtctctcttcaaaatcttctagacgttgatgttgtcaagccttcttccatcttccatccgaccatggttgatcacggattttgattttccactcaacggcacatttccatttatgtatgagacattctattatgtctatcttatctcttatattttgtgaaatttattcttcttttt

SEQ ID NO: 43543 - DNA, 358 bp, Gossypium hirsutum
  Clone ID: LIB3189-015-P1-K1-D9
caggaggaagaatccttcccttttttcttttttttcccagaaagagcgattcctttcccttccgttctagttcctcgtttactgtgtcttcttctttcccttctgattataataagatttgggtttcgttatcctctgaaactctcgtctctggtttgaaaggagattgaaaaaatatggctgaagaacatagatgtcaagcaccacagttatgtgccaacaactgtggatttttcggaagcccgacgactcaaaatctttgctctaaatgttatcgcgatcctcaacttaaagaacaacaatctttctctgccaaacaagcctttaatcacactttcgttccttcgtcgtcttcatt

SEQ ID NO: 43544 - DNA, 249 bp, Gossypium hirsutum
  Clone ID: LIB3189-015-P1-K1-E1
gcgtccgctaggggggctttcctggagtcttttttaggtcgtttatacctttcaactttcaagcaaatttgtggttcggtagagtgggcatgggggtttaggcattcaggctgaacagcagctggtgatgacttgttgctcgttcttattttcacgaaagaagacagctcgctcagctgtacatacaacagaaattgatgatgaggtttcaggtattcagaacactaaactttcttctttcaaggagct

SEQ ID NO: 43545 - DNA, 322 bp, Gossypium hirsutum
  Clone ID: LIB3189-015-P1-K1-E10
tgcaaggaaaaaaaaaaaaaaccagacatggctttcaacactgttgcatccgctgctcttcttggtaccttgaacttgttggtctggactttggttagctctacctacgtgccttgcccaccaccaccaaagagccacaagcctacccacaagagcccaccctcggcacctaaacagccagccacttgccccaaagatacactgaaactaggtgtttgtgctgatttgttgggctcggtgcgcgttgttgttggacctgctaggtccaaatgctgctcactcatttcgggtttggctgattctcgatgctgttttttacctt

SEQ ID NO: 43546 - DNA, 198 bp, Gossypium hirsutum
  Clone ID: LIB3189-015-P1-K1-E11
gtaaatagatgtttgaggatccaaatagatgaatattatatgcttgaagattcaaatgattgcgagtgacatggtagagtgctgctggggggagatttgctgctgaaaagtttgtggcgaaactacctgacaaagtaatagagcacctcagtgattgcattttctcaaaacttacttttgatggtttgttttattatt

SEQ ID NO: 43547 - DNA, 400 bp, Gossypium hirsutum
  Clone ID: LIB3189-015-P1-K1-E2
tataaatccaaatttcagcaagccatacgaagacaggatttcgagaaaaaattcctcttttccttcctgcaacgtttgaattgtgacagggcgttaatctttgtttggttcccgagaatatcaacaatgactcgcggcaaccagagagaaaaagatagagaaagggctcaatccaggtcaggcaacaaagggaaagctggttctaaggacgatggattgacccctgaacaacgccgtgaaagagatgcaaaggccttacaagaaaaggcctcaaagaaggcagcgcatgctgcagcttgaggtaacacttcctgcggtgatggttggtagtaattcatgtaactacataattattgtcgtttttaatattttatccgtttttgtttaatatatgttttct

SEQ ID NO: 43548 - DNA, 303 bp, Gossypium hirsutum
  Clone ID: LIB3189-015-P1-K1-E3
cagaaccctctctctttctgtctttttccctcgcattttttctagggttgtccacctccaatccactgtatcatttcccagagctggggtgccccttgaaatggctgccgtgactgcagctcagccgcgctcttccaagaccgagtcctacgttgacaacaagcgcaaagaagacattctccaagccaacatcaaggctgcccgagctgtggctgactcctttcgaaccagcttatgacccaattgtatggacaaaattatctcaaccgccttctgctaattcttcaatattcaactatcttt

SEQ ID NO: 43549 - DNA, 194 bp, Gossypium hirsutum
  Clone ID: LIB3189-015-P1-K1-E4
tcccggtcgaccacgcgtccggcgagcggccgctcgcgatcttggcggtgccggttgtaaaagtttattgtttgtggaaagagcagagattcttatattagtaagctggagagagattcgcttagagaagctattttaaccattgtagctcatttaaatggataaacatttctattttactgagaccattgaac

SEQ ID NO: 43550 - DNA, 149 bp, Gossypium hirsutum
  Clone ID: LIB3189-015-P1-K1-E5
cggacgcgtgggttcagatattaggaaagtcattttattcgattcgggctggtgtgtatctctggggggggggttttttaaatacttggggggggtctttttttctttattttcttatttatttgttagttttttattgtttatctttc

SEQ ID NO: 43551 - DNA, 169 bp, Gossypium hirsutum
  unsure (1)..(169): unsure at all n locations; Clone ID: LIB3189-015-P1-K1-E7
ggtccacgccacgcgtccgctcacttcgccatcttcaatattttcttccgtggtactttgtctagagacagcnnnntaattttgcattattttaaaggtcaagggcgcaatcaaaggatttggaaggatcgggcttttggtttcgagagttcgctctccaaatcgatta

SEQ ID NO: 43552 - DNA, 382 bp, Gossypium hirsutum
  unsure (1)..(382): unsure at all n locations; Clone ID: LIB3189-015-P1-K1-E8
ctgagagatggaagagccgaaagcagcccagaactcaccaccgtcccaagatccaaacgcaccagcagcaaccgtaaacgctggtgggacaacggctcctcctccacagccaccaccaacagcaccagagcaaccagctagcaggaaaagacctctagaaaacagcaatgaccaataccaaaactccccgtatttcaagatgcgccttgtcctcaaagatcttcgtcctcatttcatcgaggttcttcgaacgcctgattttcgaaattgcaagggtgcccatgaaattaaagaaaagatgaagcatntagtggatttgtacaagcagatgatagtctctatagagaaaagtattaatggagcaggaaaccagacaatgcaa

SEQ ID NO: 43553 - DNA, 320 bp, Gossypium hirsutum
  unsure (1)..(320): unsure at all n locations; Clone ID: LIB3189-015-P1-K1-E9
ggaatgttacgtacggtgacatttaccctcttggtgatcgtcaaacgggtcttctcataaattggcaatttccaggccctgatatggactctgttaccaacnataacctcatcatcaacgtctataacaacttaaacgaatcttttctcctctcctggaatggagtccaacaaatgaggaactcgtatgaagacggcgtgtttggcacaacctgccctattccaccaggaaagaacttcacatacatgcttcatgttatggatcaaatagggagtttctattactacccatcacttggattccacaaggcagttggtgtc

SEQ ID NO: 43554 - DNA, 458 bp, Gossypium hirsutum
  Clone ID: LIB3189-015-P1-K1-F2
cccctaaaaagcttgtgcttggatatggctgaaaaccctgtaaaatggctgtttctcattctagcaagctgcctgtgtttcgctttggtgctctcggaaagcaacttattgataaagaagacctacatcgtccaaatgcacaagtctgcaatgccagcatcattctcaagtcctctggaatggtactcatcgaaattaaagtcggtaatgtccgatacccagagtgaaggtgaaggagatggtgaaaataggatcatctatagctaccaaaatgcttttcatggtgttgccgctcagttaactgaagaagaagctgagaggctaaaacaagaagatggtgtagttgctatacttccagagaccaagtatgaattacacaccacaaggagtcctatgttccttggattgaaccagaagaaagtactagcatttggtctcaaaacctgcagatcatgatg

SEQ ID NO: 43555 - DNA, 310 bp, Gossypium hirsutum
  Clone ID: LIB3189-015-P1-K1-F3
cccacccatccgatcgcgagcgacctcccttttttctcattaacatctctgtttctcattccagccgtctcatttttaccagctagggtgctctcaaaaaacaccttattgataaataatacctacatcgtccaaatgcacaactctgcaatgccagctttattcttaaattcttttttattttactcatctaaattaaatttctttaattcctatacccatagttaattttatttatttatttaaaatattatcatttataactaccaaaatgcttttcatttatttaccttttatttaacttaataat

SEQ ID NO: 43556 - DNA, 419 bp, Gossypium hirsutum
  Clone ID: LIB3189-015-P1-K1-F7
ctcgaacccagaattcgcagtttcttcctaacaattccctgttggatgcttggtagaaatcgtggaaaactctaataaagggagcgactttatttcatttatgtttgccaccaatggcatctccttcgcagtcaactaacttccccaccatcatcttcatcttgttttcattcgttctcatccgaaccataaatgccgttcctttcatcgtgttgcacggcattagtgataaatgtagtggccatggagttactcgatttactaagcttctaagcagctggtctaattctcaaggatactgcgtggaaattggagatggttcatgggattcatggactatgccccttttggaacagacatcaattgcttgtgaaaaggtgaaaaacatgactgaacttagccaaggttacaacatggtt

SEQ ID NO: 43557 - DNA, 224 bp, Gossypium hirsutum
  Clone ID: LIB3189-015-P1-K1-F8
atacatcttcaaagaagctggcaatccattttcatcatcttttaaagacttttctgaaagtcggtaaacttataaaggagcgggcggctttcttacatatatgtttgccaccaatggcatctccttcgcagtcaactaacttccccaccatcatgtccatcttgttttcattctttcttatcctaaccataaatgcccttcctttcatcattttgtacttcttt

SEQ ID NO: 43558 - DNA, 363 bp, Gossypium hirsutum
  Clone ID: LIB3189-015-P1-K1-G2
gcgagttaaagagaccgagggatctctttgtcttctcagattttctctttccatctctcaattctgagaaccctaatttctctgctggtccttttgcttaatcaatcgatcctcgtcaatggccaacagtaatctccctcgaagaatcatcaaggaaactcaacgtctcctcagtgaacctgcacctggaattagtgcttcaccatcagaggataacatgcggtatttcaatgtgatgatccttggtccaacacagtcaccatatgaaggtggggtttcaagttggaactatttttgcctgaagaatatcccatggctgctcccaaggttcgatttcttacaaagatatatcattctaacatt

SEQ ID NO: 43559 - DNA, 268 bp, Gossypium hirsutum
  Clone ID: LIB3189-015-P1-K1-G3
gccttttcaggatggggaactaatgagggcttaatcatagatatattgggtcacagaaatgccgagcgcgaaacttgattcgaagggctacgctgaaacctatggagaggatctcctcaaggcactagacaaggagctctcgaatgactttgagaggctggttttgctttgggctcttgatcctgctgaacgtgatgcccttttggctaatgaagccaccaaattgtagactttaagcatttatgtccttacagaaataatttgcaca

SEQ ID NO: 43560 - DNA, 298 bp, Gossypium hirsutum
  Clone ID: LIB3189-015-P1-K1-G7
gttcaccctacggaacaaggatttcgagctgtgttcacaactccagctcttcaaagcagtctgagtcaattttggtagacattagggtgaaatgcttaccttttatcactttatgatgtttttacatttagtttcttggtatctgtcaaatcccttcgtgatctctttattcatttgtgctggtcaaaagttgtatgaaatgaatggaatattaataataaatgttcttgtccaatgctactcctatttggttttatgtctgttgttataatgttaagttattttattcttttttgtt

SEQ ID NO: 43561 - DNA, 333 bp, Gossypium hirsutum
  Clone ID: LIB3189-015-P1-K1-G8
tgaatatctcctgaagggaataaaaacggtatatgctaatgttagaggtttagcaaatagaggaggaattaccaaggataaggcggaaaaagctctctcaatgcttaaaggagttctggattactctgaatttaaagacgtagacatggtcatagaggctgttattgaaaatgtcgctttaaagcaaaaaatattcagtgagatagagaaggcttgccctcctcactgcattttggcaacaaacacatccactattgacctcaatttaatatgaaaaaaaatgaactctcaagatctgtctatttgagctcactttttcaagtcctttccatc

SEQ ID NO: 43562 - DNA, 353 bp, Gossypium hirsutum
  Clone ID: LIB3189-015-P1-K1-G9
ggtaaacaaaaatggatggttattgtagcagaagggtaatcatgtttttggtgtttgcatttgcggcaataagcagagggtatggacaagaatcaaccactcttgttcctgcaatcatcacctttggtgactctgtggtagatgtgggcaataatgactatctccctaccatcttcaaggctaactatcctccttatggacgggactttgccaacaaaaagcctactgggaggttttgcaatggaaaattagccactgacatcactgctgaaactctggggtttacaacttatccaccagcttaccttagcccagaagcatcagggaagaaccttctgcttggagccaatttt

SEQ ID NO: 43563 - DNA, 428 bp, Gossypium hirsutum
  Clone ID: LIB3189-015-P1-K1-H1
gtggcctctggcattttccagatcatcaccgcagtcttcacctttcagcggctcgtcaacaccctcggtactcctaaggatacgccggagctccgagaaaagctgcataaaacaaggctacatattgggcaattagtgaaggacacttcggctaaacttaaacaagctagtgaaacagatcacagtgccggaattagtgccagcaagaaggtagcagatgctaaacttgcaaaagattttcaagcagttttgaaagagtttcagaaggctcaacgacttgcagctgaaagggaaacatcatacgctccatctgttcccaaggcagttcttccttcaagttactcggctgatgaggtagatgtagattcagatggaggggctggtcagcaaggctttctttttgaatcaagaagacagaatggttttgt

SEQ ID NO: 43564 - DNA, 253 bp, Gossypium hirsutum
  Clone ID: LIB3189-015-P1-K1-H2
atttgattttgattcgtagcttgtatcaggctgctagtaataggagaaggagatgagatgatcgacgggatgaaatctgctggatttggtgatcagcttggcaagaaagaatattatggatttctgaagattttgtgtgggattgaaagggttgagcatgcaatgagtgtttttaagaaaatgaaggctgatgggtgtaaacccggcattaagacttatgatttgttaatggggaaatggtgatctcattatc

SEQ ID NO: 43565 - DNA, 441 bp, Gossypium hirsutum
  Clone ID: LIB3189-015-P1-K1-H3
cggacgcgtgggctcagttcaggaaaatctctggctatgttacccaaactgacaatctttttcccctccttacagttgaagaaaccctcatgtttagtgccaagttacgtttaaggcttcctcaagctcagttgagtagtagggttaagtccttgatccaggaacttggactagagcatgtagccatggctcgagttggtgatgatcgggttcgtgggatatctggtggtgaaagacgacgggtttctataggtgtagatgtgattcatgatcccaaagtgttgattcttgatgaaccaacttcaggtcttgatagtacgtctgcacttcaaattatcgatatgctcaaggtcatggctgaaaccaggggaagaacgataattctcagtattcaccagccttggtttcgggttggttaggttatcaagtcgatgcttttga

SEQ ID NO: 43566 - DNA, 398 bp, Gossypium hirsutum
  Clone ID: LIB3189-015-P1-K1-H7
cccacgcgtccgccacgctttaatttgtttttgcttctctcgctttatttctcgtatattaatggcgggtcggggtaagactcgtgggatccggagcctcgaagaaggcaacatcaaggagtagcaaggctgggcttcagtttccggtgggtcgtattgctcggttccttaaagctgggaaatatgctgagcgggtcggagctggagctccggtttacctcgccgccgttcttgaatatcttgccgctgaggttcttgagctagccgggaatgcagccagggacaacaagaaaacccgaatcgtgccacgtcacatccaacttgccgtaaggaacgacaaagagctgagcaagctgttcggcgatgtgacgatcgccaatggtggtgtgatgcccaac

SEQ ID NO: 43567 - DNA, 182 bp, Gossypium hirsutum
  unsure (1)..(182): unsure at all n locations; Clone ID: LIB3189-015-P1-K1-H9
aacaatcaatcaaatggagttaggggaactgttttcgatcttcggtcccggcgtctctttcgcagttttctatagccggcttggggttttnnttanacnccttcatatacattctttacaatttatatttataatcactttttacaatttattaatatatttttatcttatttttttttttt

SEQ ID NO: 43568 - DNA, 415 bp, Gossypium hirsutum
  Clone ID: LIB3189-024-P1-K1-F6
gaacatggttggctcctccacttcttgctacattacaactggtgccttctctcgatcagcggttaatcacaatgcaggagcgaaaagtgcagtgtctaacatagtaatgtcgattacggttatggtgacccttctcttcctcatgcctttattccagtacaccccaaacgtggtgttgggagctatcattgtgtcagctgtagttggccttatagacattccagcagcctgtcaaatttggaagatcgacaaatttgatttcattgtgatgttgtgtgctttcttcggggttattttcatctcggtccaagatggtcttgccatggcagttgggatgtctattttcaagatccttctgcaaattactaggccaaagacagtgatgttggggaacattcccgggacagattttttc

SEQ ID NO: 43569 - DNA, 98 bp, Gossypium hirsutum
  Clone ID: LIB3189-025-P1-K1-D4
tcgcaaatattggttcttcatttcatcgcccttcctttgcttcttctttcttctttgttcagacctgagggctgtcagttctaagccatggcctagat

SEQ ID NO: 43570 - DNA, 216 bp, Gossypium hirsutum
  Clone ID: LIB3189-026-P1-K1-A10
gaagccacttctcatctcacttggcatgctcctagtatgacaaatagtgtcccatattgcgtgtgcaagtaaggtcactgttgctaatggtcagtctttgttaatatctagcactggccagagtacctttcttataaataataaacctctccatatgaaaaatttgatgtatgtacttggcataacaaagaacttgatgtctgtatcacagttctc

SEQ ID NO: 43571 - DNA, 467 bp, Gossypium hirsutum
  Clone ID: LIB3189-026-P1-K1-A11
gcagacccttccgaagcacacgattctcatgagacagctgaaggcgagacaggtgaagggaatggggacaattcggaaccgataactcggtcatgtacatacagctacgaccagctgaagtccaaatctgaaaatccagtaactggaattgacttcaaacgcagagagacttatttgtccgatgaggagttcgagacggtattcgggatgccgaaagaagcattttacaagttgccaaagtggaagcaagatcttcaaaagaaggaagttgatctattctagagcttcatgcacttgaacaagtgatttaagtgtttccgctgcattctacctagcaatccctcgtatatttgatctttaattccgcccaaaaatcatgggttcgtctacacgatgcctggattaccatttttgtgccctttttccttcttgataaacgtacgtgtaattagtattcggatggattt

SEQ ID NO: 43572 - DNA, 266 bp, Gossypium hirsutum
  Clone ID: LIB3189-026-P1-K1-A12
ctcatttcttctctctctctctccctcaaaggtcacccaaaagaaaattactagaagcaagtaaaaggcaaaaaaatggagcaaaatttgccagtgatcaccaaaagagtgtggagcattgtgagggcactttcttttatgacgagaaaaggggtttttttccatataaaattctttttgtttctcactcaaattttattttttattttatcttcttatgtcttttctatatttctattttacattcatttttcttttttttttat

SEQ ID NO: 43573 - DNA, 261 bp, Gossypium hirsutum
  Clone ID: LIB3189-026-P1-K1-A6
ggaaacgagctgcctttactcaacttcgcacttctcctttatcgttttctcgactcaacgtcctgttggtttgcccctaattgttaggggcaagttgatttcataacttcacgatcagttcataagctttgccaggttcgtactacagatgttagacggaattaatgaaaaaaaaaactggtcctttcagcgaaagattatgagtgattgtattcttgctatgttggtaagggattaattttaaaagtttcttgctttttt

SEQ ID NO: 43574 - DNA, 463 bp, Gossypium hirsutum
  Clone ID: LIB3189-026-P1-K1-A7
ctttatagttctggtctgctcaacactcttccttctctctaaatctaatactcagatccgcgggtaatttttgtcacagctcattagaatggagacctttctattcacatctgaatcagtgaatgagggtcaccccgacaagctctgcgaccagatctctgatgctgtgctggatgcttgccttgcccaggaccccgacagcaaggttgcctgtgaaacatgcaccaagaccaacatggtcatggtctttggagagattaccaccaaagccaatgtagactatgagaagattgttcgtgacacatgccgctctatcggatttgtttctgatgatgtggggcttgatgctgacaactgcaaggtcctggttaatattgagcaacagtgcccctgtattgcccagggtttccatggccacttcaccaagctccctaaaaaaatttgagtttgtgcccagtgttat

SEQ ID NO: 43575 - DNA, 189 bp, Gossypium hirsutum
  Clone ID: LIB3189-026-P1-K1-A8
tcgctgactcgtgggctttgggcgacagaaagtaaaaccccaaaagcttaagcttacccttaggttgctacacatccttgcctttgtttccctttgaagaaaccaaagaatcattgaagatgcccagaccaggttcaaggccttatgtctttgagaaaaaatcttggcacattgacatacaccaaccca

SEQ ID NO: 43576 - DNA, 215 bp, Gossypium hirsutum
  Clone ID: LIB3189-026-P1-K1-B10
gcgggattacccgctgagtttaagcatctctttctttttcttctattgattttttgttgaaacgtgttttatttcctttttgaaacaaagtaattgccttgttgatttgcaagcaaattttggtaaagttcttaagtatttgagtttagatcttctttgagagtgccgctatgggagagaagagttttgattttttataaatatttttaattttt

SEQ ID NO: 43577 - DNA, 166 bp, Gossypium hirsutum
  Clone ID: LIB3189-026-P1-K1-B11
gtccgtatcccgtcacccacctcccccacctccggtattgttggtcgtccccgcacactggtgttatggttggatgcggaggggagcctattattaatcaaccctttctaaaaacctccttacctttataatctatcgacatcttaatcccccactcttatatcca

SEQ ID NO: 43578 - DNA, 186 bp, Gossypium hirsutum
  Clone ID: LIB3189-026-P1-K1-B12
cttttgcacccgctctgtttctatctcggctctgacgagaagccggcgccgacatgggtcacgtgagcttctaccgcaattatgggaagacctttaagaagcctaggcgtccatatgaaaaggaacgattggatgcagagttgagacttgtaggagagtatggactccgatgtaagagggagttgt

SEQ ID NO: 43579 - DNA, 214 bp, Gossypium hirsutum
  Clone ID: LIB3189-026-P1-K1-B2
aacaatcacgataaaaagtattctgcttactctaataaagcagacaacaggcttacaaatatagctttggatacttatggacaagtcattatacgacccactattcagttatattgacagtagctagagcaggaaaaccagtacaacaaacctcccaagaaggattgtaaaactttaccagccaaaagaggagactttgatgctaatttattgt

SEQ ID NO: 43580 - DNA, 394 bp, Gossypium hirsutum
  unsure (1)..(394): unsure at all n locations; Clone ID: LIB3189-026-P1-K1-B3
naaaaaaaaaaaaataaaaaaaaaataaaaaagacgggcgttttataaaaataaaaaaaataaaggagaggttattttgttttaatttaattttattataaaatattaatttaatttgggctgtttttttttttttttttttaatgtttttttttatttatattttattttttttaattttttttaatttttttatttttttttgttttttttttttttttttttttatttatatattatttttattaatatatattaattttttttttttttttaattttaatatattataatttttttatagttttttttttatttttatattattaattaatttttatatnatattttatttttttatattttatatttattatattattttattattatt

SEQ ID NO: 43581 - DNA, 196 bp, Gossypium hirsutum
  Clone ID: LIB3189-026-P1-K1-B4
gcgcaaaaaaaaaaaatggcaaaatcatcataggaagagaaccaacaaaaagcttttgtttgggctggtgctgataattctggaatcctctcccctttcaatttttccagaagggaaaatggtgatgatgatgtcacattaaaaattctttactgtggagtgtgccattcagacctacatactttgtgaaatgact

SEQ ID NO: 43582 - DNA, 307 bp, Gossypium hirsutum
  Clone ID: LIB3189-026-P1-K1-B5
tatgttccccagctggctcaactcatttatgacataaaccaagggtcaagtccagattcctacagggatgtcaagggattcatgatcgggaatgctgcgatcaacgaaccgacagacacgttggggctgttcgattatgcatggagccacgccatcattttggaccaactctacgacaaaataaacaaggaatgtgactttaaacaaactaataatctaacggttcaatgcgccgatcatatgaaaggtttcatggatgcttatgctaacatcgatatgtacagcatctacactcctgtttgcatta

SEQ ID NO: 43583 - DNA, 370 bp, Gossypium hirsutum
  Clone ID: LIB3189-026-P1-K1-B7
caaaaagcaaataatggcagaaagaggcggcggcgaacgcggtgctttcaggcgtggcttcggcggcgggagatccgaccgtgggccaagaggtcggcgccgtggccgcaaggatgaggaggagaaatgggttcctgttacaaaacttggccgtttagtcaaatcgggaaaaatcacatccctcgaacaaatttacctccactccctccccatcaaggagtaccaaatcatcgaccaactcgttggcccttcactgaaagacgaggtgatgaagatcactcccgtccagaaacaaacacgtgccggccagcgcactcgtttcaaggcattcgttgtcgtcggcgacggaaacgggcacgttgggttgggg

SEQ ID NO: 43584 - DNA, 348 bp, Gossypium hirsutum
  Clone ID: LIB3189-026-P1-K1-B8
ttctggagccttctttattttctctaaatctcagtcatccattgaacaatctctcttataaagtgtatcccaaacccaaatcctttccctcaagcaatttgagtgattctttctttttcttgtggcctccaaagcatcttttttttttctcatattttcattctaccattaactcaacatttttctttacattctttattttcctttatttttatttattatctttatatatttttttactctttttcttaattttttttcttattccttattcctatttatatattccttaactcttttttctatttatatccatctttttcattaatcttcacatcactattccta

SEQ ID NO: 43585 - DNA, 376 bp, Gossypium hirsutum
  Clone ID: LIB3189-026-P1-K1-C1
cttagaagcagcagaatgttctcgtgacatagactgttcattcaagtgtaaatatggtggcatgtgtgagtggcacaaacaccagaaaatgcttttgttggccacctaaggtgttcatggaggttgtttgtttctttttatgactacttttgcttttatgatttgcacctctatgtttttatttctacttatgttctctttgtctttgtttttgtaaattgttgtctattctcttttttttattttaattttttttatttttattaaattttttttattttttctaatttctattataaattattagctatttattgttatttttattttcttatttttttttttcttattttatttttattaattatttatatta

SEQ ID NO: 43586 - DNA, 335 bp, Gossypium hirsutum
  Clone ID: LIB3189-026-P1-K1-C12
accgtcctgattcccgttcgaccacgcgtccggaccagacatcaagtcttttaacttaactggaatggggtgtagtgctagtctgattgcgctggcattgttcgcaatgtcttcaagtcttacaagaacaagttcgcattgcttgttacttcttaattctttgagtccgaatcttcttttcctgtaattatttatatattaattattttctatttttcttttaaactaattttattttcatatattttcttctatttattttattttttttttcaactttttctatatagaattttttttttatttattattcttctttaattactcaaattata

SEQ ID NO: 43587 - DNA, 123 bp, Gossypium hirsutum
  unsure (1)..(123): unsure at all n locations; Clone ID: LIB3189-026-P1-K1-C2
gcggcttcggatctgcaaaaagatcaataatggcgtttattggagcctggcaatcgtacccatgaggcgtggaggggtgtttgtactatctgactttncttccctagggttacattagtttac

SEQ ID NO: 43588 - DNA, 403 bp, Gossypium hirsutum
  Clone ID: LIB3189-026-P1-K1-C4
tgctacacaaattatagaatcctttcgacaatcctccgtgtctcagccaaaagctaccgccatgggaagggttggaaatctctctccacagcagcgccaatctttcgactctcaaggttttcttgtgattgaatcatttgcgagccctgcagaaattgaagctatgaggaagagaatggacggaatgcttcatgcctttgaccctaccaccaccgcttttattttctccaccaaaaattaggtaaaattgaccagtgaatacttctatgaaagtgctgaaaaccattcctttttctttgaagataaagcaattgatgaatatgggaaatttaaagcaaccgaaggatcttttctatttataatatgtcggcatgccttaccatgatgatttgatccacttttt

SEQ ID NO: 43589 - DNA, 165 bp, Gossypium hirsutum
  Clone ID: LIB3189-026-P1-K1-C9
atcccgttctttggcacagattctttcatatcatcgtagcattataagctatctacaggaaaggtatcctgatgaacacggaccgtttgttattacagccacttgtcttgaaacctttataaaaagttgtgctggctactctgttatcacatatatacatgtaat

SEQ ID NO: 43590 - DNA, 139 bp, Gossypium hirsutum
  Clone ID: LIB3189-026-P1-K1-D10
tctacaagccatcgaagaattcatcaaaagtaaacgagaccttccacgtgaggctttcaagagagatttcattttatagaagatcgccacccctcttttcactgaccacctcaacctattcaacacatacatctacatc

SEQ ID NO: 43591 - DNA, 52 bp, Gossypium hirsutum
  Clone ID: LIB3189-026-P1-K1-D12
gttctagatcgcgagcgtcgcccttttttttttttttttttttttttttttt

SEQ ID NO: 43592 - DNA, 396 bp, Gossypium hirsutum
  Clone ID: LIB3189-026-P1-K1-D3
cccacgcgtccgtccacgcgtccgaagatgaggtaaaatcttgggtgcccaaagtttctttttcttgggtggacgggtgtttttccttttacagcttggcttccacaatttttcacatggatttggaatagtcttagtttttttttttattctatatatgtttattattctttagacttgattctttattttatattcttttttttttttatcttattttatattctttttttttttttatttctttttttttttttcttttttttattttattctttttttttttgtgtttgtgtttctttttttgtctaatttttttttattttttttttttttttttattttctttttttttattttttttttattttttttttttttttttttttttttttt

SEQ ID NO: 43593 - DNA, 199 bp, Gossypium hirsutum
  Clone ID: LIB3189-026-P1-K1-D5
ttcttaaattaaactaatggctgcaattcataaacttgaggctgaagaggatgcggatcccaggtcaggtgttctcagcatcagcggcggtggagatgccgcaccgtcgaagaaccccaaagaagagcctgacatagacacaactttaggcgcgatgcccgtggcggtgcacgtgccgtcaggtgtaccggtaccgtca

SEQ ID NO: 43594 - DNA, 248 bp, Gossypium hirsutum
  Clone ID: LIB3189-026-P1-K1-D7
tccggctttgtctcttatcaattactgtcccctctcttgtttctcttatttcattgtttaagagtgcttttatggcggctgctaaggttttgcatgtcctttctccttgttgccctcttcagcatgcttgcttctgatcctgatcttctccaagatctctgcgtagctaataaagctgctgggataaaggtaatggatttccatgcaggacgaaccaatgttccgagctgatttttctatgcggatta

SEQ ID NO: 43595 - DNA, 135 bp, Gossypium hirsutum
  Clone ID: LIB3189-026-P1-K1-D8
attactttttgttagctagtaccacaatatatcttcaatcacatcaagaaaagaaaagggagggtttttattatttatttcaataattctatacaatctcctttaattctattttttatttttaaattaatatta

SEQ ID NO: 43596 - DNA, 199 bp, Gossypium hirsutum
  unsure (1)..(199): unsure at all n locations; Clone ID: LIB3189-026-P1-K1-E11
gttttctttaaaccaccatttaaagccttaaaaccatcattcatccaattatcatatgcttttgaatgtctatcttattttatacactcaanactttccatttaaattcctcataacatttttatatttttttatatttctcctattattttctcattctattctaatccaatttttactattcttatccttttctttt

SEQ ID NO: 43597 - DNA, 178 bp, Gossypium hirsutum
  Clone ID: LIB3189-026-P1-K1-E12
tataacgcaagcaaaaaatttaaagttcgataatactttattttgataaaaataaaatgccgggttctcgaatcgcagtcgggtctccggccgaagccggccaagctgatgcactcaaggctgctttagccgagttcatttcagtgcttatttttgttttctgccggttgaaggctcg

SEQ ID NO: 43598 - DNA, 82 bp, Gossypium hirsutum
  Clone ID: LIB3189-026-P1-K1-E2
gagcagtgcattgggtacgaaaagcaagactctgttcttcgcttttctgctactgttatccactgctgattccttctatctc

SEQ ID NO: 43599 - DNA, 57 bp, Gossypium hirsutum
  Clone ID: LIB3189-026-P1-K1-E3
cccacgcgtccggaactggtacggacaaggggaatccgattgtttaattaaaacaaa

SEQ ID NO: 43600 - DNA, 203 bp, Gossypium hirsutum
  Clone ID: LIB3189-026-P1-K1-E8
acgtcaccattctaaagaggtcatcgtaaattcgagtacaaagcgctaaccgagatgagagccaagtggaagaagaagcgtatgaggaggctgaagaggaagcgcctaaagatgagacagagatccaagtagatgcgccttggactgaatttgttttgtcctgacaatcccttgtcttcatatttatcctgcatatgttgcat

SEQ ID NO: 43601 - DNA, 141 bp, Gossypium hirsutum
  Clone ID: LIB3189-026-P1-K1-F1
aaaaattaaaacctcccttccctttttttctgcttctgctttaattccttaccacctcaaaatgattgtttttaattcaattcaagtctcttccttccttatcctttcaacctcctaatcaagtcttttcaagattttttc

SEQ ID NO: 43602 - DNA, 136 bp, Gossypium hirsutum
  unsure (1)..(136): unsure at all n locations; Clone ID: LIB3189-026-P1-K1-F10
atataanataaaaaaaaaaaataataatatatgggaaggtgtttatttaaataaatatttataaattntatattaaataatttatatatatatatatntaatatanataatatatatttaaatataatttaattta

SEQ ID NO: 43603 - DNA, 200 bp, Gossypium hirsutum
  Clone ID: LIB3189-026-P1-K1-F11
tcgagcgccagcgcgtccgaagggttctttagattttcttaccagttccttttattatgaaaatggcctcccacattgtttagtatggccgtatgggaccaaagagagagcttaagtttgctttggaatccttttgggataagaagagcagtgcctatgatttgcaaaaggttgctgctgatcttatgttatttatttgg

SEQ ID NO: 43604 - DNA, 90 bp, Gossypium hirsutum
  unsure (1)..(90): unsure at all n locations; Clone ID: LIB3189-026-P1-K1-F12
cttagaagcagcagaatgttctcgtgacatagactgttttttcaagngtaaatatggtggcatgtgtgggggcacaaacaccctaaaagc

SEQ ID NO: 43605 - DNA, 109 bp, Gossypium hirsutum
  Clone ID: LIB3189-026-P1-K1-F3
atttctcttcacctgaatataatcttttgcttacggtttttcctgcgtgcttttgaattgggggttggagttattctcaatggcggacacatatactttttcttttcaa

SEQ ID NO: 43606 - DNA, 220 bp, Gossypium hirsutum
  Clone ID: LIB3189-026-P1-K1-F4
aaaaggaaaaaaaaatgaagctcttgtttctaactttgctgctttgttctcttcttctatgtgtggtcgagtgtttgaaccaacaatggctcagcctcgttcacctttttgtgaagggaaatgcatagggaggtgcaataaagcggcggtttgggatcgatgcttcaaatattgcggcatttgttgcgaggagtgaaaatgtgttctttccggtacttat

SEQ ID NO: 43607 - DNA, 150 bp, Gossypium hirsutum
  Clone ID: LIB3189-026-P1-K1-F6
gctctagtccgactttgtgaaatgacttgagaggttatgataaggggagctctcgggcgatgttgaaataccactacttaacgttattttacttattccggaatcgaaggcgggcacgttccctttttttatacccaattccatttttat

SEQ ID NO: 43608 - DNA, 132 bp, Gossypium hirsutum
  Clone ID: LIB3189-026-P1-K1-F7
tgagaagcccctttactcctgccaagagtgatgggtcaagaagctatttaagcggttactcagaccacccaaattacatggctttcactgaatcttcaagggctaaagtaaggtctctgagtgctccaaaac

SEQ ID NO: 43609 - DNA, 222 bp, Gossypium hirsutum
  Clone ID: LIB3189-026-P1-K1-G1
gggaaccaagataaaaagtttttggcttggcctaatttgtaagcttggaggttaagggaaaaaactatggttgaagagggacaggtaattgcctgccacactgttgagtcatggcagcagcagttccagatgggaaacgagtccaccaaactgggggggggggatttaacagcatcatggggcgggccatgccgttttatttaaccaatcctggtggatctt

SEQ ID NO: 43610 - DNA, 370 bp, Gossypium hirsutum
  Clone ID: LIB3189-026-P1-K1-G10
gatgaaatttccttccatctgcaacaaatcgagaaccaaagggatgtcatggaaactgtcgcttttctgtaacttgaaagccattccattcataaacaagcctaaaaggttgaagcattccacttctgttttatcagacagcactgccaagtttatttctgccttggattgctcttggtctcagtcaagacattgtttcacagtgcccaaagattctgaagaactgttggatatggctatcgaggcactgcggtccaacaggctgttcttcgaaccgggtgacactggtttcattctagaggcagccaggttcccattcaagggttgtgtggcattggccatggaaacagtggttccatacatggtattt

SEQ ID NO: 43611 - DNA, 155 bp, Gossypium hirsutum
  Clone ID: LIB3189-026-P1-K1-G12
ggaggttgaggactgcttgtgagagagcaaagaggactcttttatcgacagctcaagcggccgtggagatcgattcattgtacgagggtattgtcttttacacctcgttaactcgtgcaaggtttgatgagctcaacaagtatcttttcttgtag

SEQ ID NO: 43612 - DNA, 123 bp, Gossypium hirsutum
  Clone ID: LIB3189-026-P1-K1-G3
aaaaagatgtctctagtgactgaagagatcaaaggcagcgcttcagaaatttaccatggagatgagatatgtcaagagaaatcaaagtttctgctggaggaaatggccatccccagtggactt

SEQ ID NO: 43613 - DNA, 132 bp, Gossypium hirsutum
  Clone ID: LIB3189-026-P1-K1-G5
ctggaaagttatttgagctccgtcctgagcagtatgtcatgaaagtgggcgagggagatggggctcagggcattagtggattcactgctcttgatgttccacctcctctcggacctctctggattctggttg

SEQ ID NO: 43614 - DNA, 354 bp, Gossypium hirsutum
  Clone ID: LIB3189-026-P1-K1-G6
gccaaagatgccgaagaacaaaggaaagggaggaaagaaccgtaagaggggaaagaacgaggccgatgacgagaaacgtgagcttatcttcaaagaagatggccaagaatacgcccaagtctcacgcatgttgggtaacggccgctgcgaagctatgtgcatcgacggcaccaagcgcctctgccacatccgggggaagatgcacaagaaggtctggatcgccgccggcgacatcattcttgtcggccttagggattatcaagatgacaaggcttgacgtatcttgaatatacattcccgtagaagctaggcttttaaaagcttattgtgagcttccctagaattaccatgttt

SEQ ID NO: 43615 - DNA, 51 bp, Gossypium hirsutum
  Clone ID: LIB3189-026-P1-K1-G7
cggacgcgtgggattttctatttagttttctcttcctccaattaagatgca

SEQ ID NO: 43616 - DNA, 90 bp, Gossypium hirsutum
  Clone ID: LIB3189-026-P1-K1-H1
tttgttttaagagtcgcccttgggggtttttctaattcattcagtgaggggaagaaaaatgtgtggcggggggggaaactgcggttgcgg

SEQ ID NO: 43617 - DNA, 154 bp, Gossypium hirsutum
  Clone ID: LIB3189-026-P1-K1-H10
aaataaaaaaaaaataataaataaacaaaaaaaatcccaatcaaaaatctaataatatagggtacagtgtcttaaataataaaaataataataaatctctttcttttttctattaaataaatttattataattgccgccctcctataaattatt

SEQ ID NO: 43618 - DNA, 240 bp, Gossypium hirsutum
  Clone ID: LIB3189-026-P1-K1-H12
gggtgtcttaataaacgccttcgatttactttcggtttccatttacttctttatttctacggtggtgaatttttagtaagcgaaaatgagagagtgcatttcagttcacatcggtcaggctggtatccaagtcggaaatgcctgctgggaggcttactgccttgaacatggaatccagcctgatggccagatgccaagtgtccagactgtcggaggaggtgttgttgcttttaaacacct

SEQ ID NO: 43619 - DNA, 369 bp, Gossypium hirsutum
  unsure (1)..(369): unsure at all n locations; Clone ID: LIB3189-026-P1-K1-H2
ttcccggggtcgacccccacgcgnntccgcgatattttgtatttaaagaaatcgcnncctttagtgggatcagtgggaggtgannagaaaaatggtcttgggctgtgggtgggagagactgggcggttggcggctttccggttgggcaagtngnctggctagcggcttgggcggcggttgggcaagattgttnaccctgaggaatgatacttttgcttgatgcataacncacatacncggtgacaaacttgttcttgggcgtgtgcaaccccgggaaaagtgctactnttgattgggagcctgaaaatgggaaacctgggggcttggatatatggctcgcaaaatgtgggagataaacttggcacttgc

SEQ ID NO: 43620 - DNA, 197 bp, Gossypium hirsutum
  unsure (1)..(197): unsure at all n locations; Clone ID: LIB3189-026-P1-K1-H3
gcgatatcccctcaccaccgctactattattataccattactctactacagctgctatcattactacatgcatnttcacccaaagtcgagcagttggcggcaccgagcacaactggtgccgagcggtggtcggtggaaccgggatagccgttttggcttatatttctttccaaaataccctaacgtttacattttta

SEQ ID NO: 43621 - DNA, 208 bp, Gossypium hirsutum
  Clone ID: LIB3189-026-P1-K1-H4
tcgcccacgcgtccgagaaaaacccagagccaaaaaaaaatggccaaattattgctgttcattgcactatttgtggttccatgtcttgttagtgctacacgcatggtgaagaacccgttggtggttcaaggttaagtttactgtttccattgccgtaacgtgttagtatcatacaataattttttatctttcttatgatacatttttt

SEQ ID NO: 43622 - DNA, 403 bp, Gossypium hirsutum
  Clone ID: LIB3189-026-P1-K1-H6
cccacgcgtccggtgaactgggtaaagtattgctaactgttgacaacccaacttcaaaaaagaagaagcttctctacaggtttaaggttaaacccttctgcgactgagggtattactcgtactatgatttaatttattcttgtctaaattttgggcaaatcacttgttcatttttctttgtttttgcatctttgtgaggagcatagttgacagcaagttgctcatggttttgaaatttgttcttggcatgttgggttaccctggtgttgtgcattgtatatttctctggtgtatcatgtctatattgtgggaccttttacactgtttagattttgaagaacacaagggatttgtattgtttatgtaattttttttttgtgattcatttttttttttttttttt

SEQ ID NO: 43623 - DNA, 234 bp, Gossypium hirsutum
  Clone ID: LIB3189-026-P1-K1-H7
agatacccaaaatttaaaggggaaagagagagatgggttcatgtgcatcagtacataaaagctcgcaagagtcagccatgaaagttggactttctttagggtctaaaacagacaatatcatcatcccaccttcacctgttaaagagaaatctgatgctgtcaatggtagtaaagatgaaactttttttgattccagagcatatttggattcggattgggatgacgatttcttaa

SEQ ID NO: 43624 - DNA, 306 bp, Gossypium hirsutum
  Clone ID: LIB3189-026-P1-K1-H8
cccacgcgtccggaaaacacaccctcctttccatttccattcattctttctctgtcgaaggaggcttgagtgatggcgtcccaacaacacctggagaagatgcagctccgtcagaactataggaatctttggcacactgatctcatcactaccattcatcgccaccctctttattgttgctttgctttatggtgtggaccatgtgcatcctacatgctccggaaacgagcgctttatggtgacatgtcaaggtatacatgttgtgctggttatttgccatgtagtggtacggagtaatacgatatt

SEQ ID NO: 43625 - DNA, 343 bp, Gossypium hirsutum
  Clone ID: LIB3189-030-P1-K1-A1
tagcaaagctaaagagtttgcaagatggggagcatggatagcttttggcagctgggggattatcttcgaggacaatcaaaagcctcagaggataaccaatggctgatggttgcctctaaattggctgagcagacgaggacaaagggtgaacgcctgagcaatcttgatctttcgaagggtccagccgaaataaggacaagggataaatttggtttccgggaagacaacatattcgagaaccttaacttcaatatgttaaacttggactccaagattggagataatgtaagcaaaagctcattccgaaatggtacctacaatataaatgctgtttaccagaaaa

SEQ ID NO: 43626 - DNA, 51 bp, Gossypium hirsutum
  Clone ID: LIB3189-030-P1-K1-A2
cggacgcgtgggttttgttcttaccttgttaccattctaacttccctataa

SEQ ID NO: 43627 - DNA, 444 bp, Gossypium hirsutum
  Clone ID: LIB3189-030-P1-K1-A3
gcaaaacaccctttaggtttttgattgagcaagcagattcccaaaacaaatactagaaaccctactcccaaatagaagtttgattgagctctctcatggcgttttctacccgtctcctttacaaatctcgccaggtctttcgtcttcactcccaaagctaaagccaacggtttttttttcagttccacaaacaattagacaatcaacttcttttcttctctgtttcaattttttttggcgttttggaggttgagttttttttttgagttgaagttcttggactcggtaactctacgagtccgagtcattgcgtacgagttttgattctggtgatgttattatctccaccgtcgattactcagtgagctgttgcaattatcaaataagtttgttactcgtattcggttttttgtttttgggcttacttggaaacttgtgatctcg

SEQ ID NO: 43628 - DNA, 85 bp, Gossypium hirsutum
  Clone ID: LIB3189-030-P1-K1-A8
atcaaatacactttcttcttcttctcttcatattggattacaaactctaaacaccatacgggcggattctatttttactcatctc

SEQ ID NO: 43629 - DNA, 199 bp, Gossypium hirsutum
  Clone ID: LIB3189-030-P1-K1-A9
atctgcaacagttgtgattcctgccaactttgatatcaatgtttttataaggtgttggcacagaggtagcgttgaagtcttatgtttcacttttacctttttcggcccttgtgattgtccagtttctgtcatctttttctaatatctcttgcttttgttcttcctttctgattgttttttttcttttttttttcatttt

SEQ ID NO: 43630 - DNA, 326 bp, Gossypium hirsutum
  Clone ID: LIB3189-030-P1-K1-B1
cggacgcgtgggcgataatagaacttcgagatctgcttcgggcttggttgtatgcggtatggagggggatatcatggcctctaaatcagttattcactccaacatttcgtcatcgtttgtagcggaggcacatacagggttaaaggcgattcagttagggattgaaatgagattacatagtttggatataaaaagagactcaagaacagtaatcaagaaatgtcagttcataaatcaagacaaatcgattacaagagcgataatcagatatataaacagcataaaagttgtctttcagaatatcgtgttttattttactctcaaaa

SEQ ID NO: 43631 - DNA, 445 bp, Gossypium hirsutum
  Clone ID: LIB3189-031-P1-K1-A10
tggagacctaattagcctttcagaacaagaacttgtagattgtgataccagcaactatgggtgtgaaggaggatacatggactatgctttcgagtgggttataaacaatggcgggatcgatagcaaaaccgactacccctacactggtgtggatggcacatgtaacaccaccaaggaggaaaccaaggttgtatctattgatggctatcaagatgtagagcaatcagatagtgctcttttatgtgccgtagctcatcaacctgttagtgtgggaatagatggttccgccattgattttcaactatacactggtggaatttatgatgggagctgctcggatgatccagattacatagaacatgctggtttaatagcgggctatggttcacaaggtagtgaagagtattggattgcgaataattcatggtggacatgttgggggata

SEQ ID NO: 43632 - DNA, 431 bp, Gossypium hirsutum
  Clone ID: LIB3189-031-P1-K1-A11
caacaggcagctcttcttccttttctgcgtctcatcatcaaaccccaaactcttaactagcctcttcctcctcctctttactttaatttcattttgctttcacaaatctaagaccagagctccaaaagattgaatttttaacccctcaaattaaaatccttcctttttcgcgttttcggttgaaaatttgtataaaaaagagggtgatttagaaacaatggatgctgattcatggagtgctcgtctttcttcagcttctaagagatatcaatcggctcttcaattacgatctgatatgcttatggggtttgaagaaattgatggagaagatgaaataagagaggagtttcgatgccctttttgttcagagtatttcgacatcgttggcttgtgttgtcacattgatgatgagcatccaatggaggctaaaa

SEQ ID NO: 43633 - DNA, 53 bp, Gossypium hirsutum
  Clone ID: LIB3189-031-P1-K1-A12
aaaaaaaaaaaaaaaaaaaaaaaaaaaaaaaaaaaaaaaaaaaaaaaaaaaaa

SEQ ID NO: 43634 - DNA, 282 bp, Gossypium hirsutum
  Clone ID: LIB3189-031-P1-K1-A2
cttaataaacgccttctatcttcttcttctccctttctttgctttttcgaatttttcttaagcgggaatgagagagtgcatttcgattcacatcggtcaggccggtatccaggtcggaaacgcctgctgggagctttactgcctcgagcatggaatccagcctgatggtcagatgccaagtgacaaaactgtctgaggaggtgatgatgcttttaacacctttttcaggggaactggtgctgggaagcacgttcctcgtgccgtctttggggatcttgaacc

SEQ ID NO: 43635 - DNA, 90 bp, Gossypium hirsutum
  Clone ID: LIB3189-031-P1-K1-A3
cggacgcgtggcgagggccttcgtcaagctcaaactctgtgctttcattaacttcacataagcgtgaatgagagaattcattttgattca

SEQ ID NO: 43636 - DNA, 164 bp, Gossypium hirsutum
  Clone ID: LIB3189-031-P1-K1-A4
tgacttcttcagaaactatctttccttaaaaaatggttactttaaggtttaaccagtcccaagtggttggaagggctcacccaccaaaaagcgatgagcatcccaagatctataggatgaagctctgggccaccaatgaggttcgggccaaaattcaagttctg

SEQ ID NO: 43637 - DNA, 406 bp, Gossypium hirsutum
  Clone ID: LIB3189-031-P1-K1-A5
tagaattccctaagaaaagccatggctccacagcgtttattgctccttttcatcttcctcttttatttctctacttttccatctactgcccgtgttatcaccggtccttcataccccaccgatctcgtttccgatggaatctccaccgtcaaaaacccacctttcctctcactcaagccccttgtttcagcggaggaatcgtgtgaacaaacctatgggttcttaccctgtaccaccacagttcttggcaacttgtttttgatcattggttatggataccttatgtttttagctgctacttacttgtctaatggaagtgagcttttgcttgggatcctcggtcccggtattgtcggaggattggtcttggctaatcttggagcactattccgattcaatggcttat

SEQ ID NO: 43638 - DNA, 342 bp, Gossypium hirsutum
  Clone ID: LIB3189-031-P1-K1-A6
cttaataaacgccttctttcttcttcttctccctttctttgctttttcgaatttttcttaagcgagaatgagagagtggcatttcgattcacatcggtcaggccggtatccaggtcggaaacgcctgctgggagctttactgcctcgagcatggaatccagcctgatggtcagatgccaagtgacaaaactgtcggaggaggtgatgatgcttttaacaaccttttcagtgaaactggtgctgggaagcacgtccctcgtgccggctttgtggatcttgaacccactgttattgatgaagtgagaactggtgcttaccgccagctttttcacccagaacaac

SEQ ID NO: 43639 - DNA, 317 bp, Gossypium hirsutum
  Clone ID: LIB3189-031-P1-K1-A7
acgctttcttctagattcgtaaacagcatttccaagagaagcttcatttcttctggatacaggtaccccgaacgtcacttgattttatcacagcaccgtccgatcttcaccacgtcacctgtccactcctcatggatggactcgatcaaagaggtcttcaccggcaagaagacctctccagatgatcatgtaactagtgccgaatccttcactctcctccgatttgccgatgaactgaagaatgctagaaatgtatggaaattaaagcatacatagttgggagaacccgggaggcttcgtttggaggtggttttggg

SEQ ID NO: 43640 - DNA, 237 bp, Gossypium hirsutum
  Clone ID: LIB3189-031-P1-K1-A8
gctaataaacgcgtggtctattagtcatctccctttctatgctttctcgaatatttcttaagcgggaatgagagagtgcatttcgattcacatcggtcaggccggtattcaggtcggaaacgcctgctgggagctttactgcctcgagcatggaatccagcctgatggtcagatgccaagtgacaaaactgtcggaggaggtgatgattctttttacacctttttcagagaaactgg

SEQ ID NO: 43641 - DNA, 340 bp, Gossypium hirsutum
  Clone ID: LIB3189-031-P1-K1-A9
cggacgcgtgggctgagattgcctaaagatgcaactgaggctccgattttgcctaccgataatttgcctcaagattttgactggagagaaaaaggagctgttacacccgtcaaaaatcagggttcatgcggatcatgctggtcttttagtacaacaggagccttggaaggagctaactttttggcaactgggaaacttgtgagcctcagcgagcaacagctcgtggattgtgatcacgagtgtgatccagaagaagcaggttcatgtgattctggatgcaatggggggttaatgaatagtgcttttgagtttacctctaaagctagtggacttattcgtg

SEQ ID NO: 43642 - DNA, 405 bp, Gossypium hirsutum
  Clone ID: LIB3189-031-P1-K1-B10
cattgatgttgactctattaagacaacattgctcacgtcgaatttaccacaaaaacttggtgtgcttgtctattgcaccacctgtctacgtatatagatagcaaccactgctagctttgcttttatataagaaaaacaaaaagagatttgcaaaaacattgtaaagtgtattaattttaagacaatggctagggttccttgcaagcatgttcttcttattgttttcatctttctttgcttcatctctacaactccagtagctcggagtttgccgagcgaaatgaagaagggtctcgacgaccgggtggttacgacggaaaacgaaagtggagcaccgcctgatgttgatgaattagaatctatggactatacttcagcaagaagggagcctccgatccataactt

SEQ ID NO: 43643 - DNA, 410 bp, Gossypium hirsutum
  Clone ID: LIB3189-031-P1-K1-B11
gtgcccggactcgacgccatcgcgtgcggcagtttgcacctacatatcatgattatgtactgtacaaccataatgatggtgatgagggaacaaggaaataccggtcgaggacttttgtgccaactgggcccgagatggatgctgctagaagaaacaaacacatgattggaaacaagctagaagatattcagctatccagtctcccttcatatggtacaagtgctccccaaaaccctagctctgtaccagattctacaagcggtgatcttacaaaatcatcactgcttgtggaccactcaaattcttattctgcgccatacgatatgtcacttattgacatggatctatccagttacccttcaaaagttcctgcagcgaaagatactgaacctaggtgaccagtgtgtagt

SEQ ID NO: 43644 - DNA, 130 bp, Gossypium hirsutum
  Clone ID: LIB3189-031-P1-K1-B12
aatgctgtgaaacggcatgctaatgggagactgttatttatatatctggataactgtgactggctagatggagaaaacactattgtcgtgaaggacaccgctgactctattttgaatcttgtgatgatag

SEQ ID NO: 43645 - DNA, 429 bp, Gossypium hirsutum
  Clone ID: LIB3189-031-P1-K1-B3
cggacgcgtggggaaaaataacagccacaacattgggaacctgtctgccaacaaatatagtggcaacaaccattgcaacaaagatattaataataacagcaacaccaactccaactccaacaacaacgagaacagcaacgcaaacaatgctgccgataaaaggttcaagactttgcctgccgccgagacactcccgagaaatgaggtgcttggtggatacatctttgtttgcaacaatgacacaatgcaagaagatcttaagcgccagctatttggtttaccgccaagatacaagggactctggtcgggccatcacacctggcttgccattggttctttataactacaccaatcaatcagtgcatggtatttttgaggcagcaaggtttgggggttctaacattgaaccaactgcttgggaagacaaaa

SEQ ID NO: 43646 - DNA, 411 bp, Gossypium hirsutum
  Clone ID: LIB3189-031-P1-K1-B5
cagttttggtttcacttatttttttccatccatcaatccacattttcattagacttttcatccctttcaatgggtatgaaaagggcagaaaagcaaccaacttctctgcttttaaataaactttgattaactcttcaaggaatttatgatgcttgtttgcatatgggggtgatatagaagccaagctattttggaaattccagggtcctctctttttggaagaaagctaaatcccatgaatacaagatgtttgactttttgcttgccaatctgctttaagccaaaatgaaggtcggcttgattttgttagtggacttaaagacaataacttcattgatggagggaaacacagtttttattgaaatagacctggaatgtgtttatatatttttttaaaagccagcttttttt

SEQ ID NO: 43647 - DNA, 431 bp, Gossypium hirsutum
  Clone ID: LIB3189-031-P1-K1-B6
cccacgcgtccgcttttccacacccccctcccttattatggcgatttcggcgctccaaaaactggggtggcaaatccaccgtctcgcatatctctcctcccaaatcctcacccgatcctccgccaccttaaccttctccccctcctcttccaaaaaagttgctgatcggctcgtcaagctcttcgccatcgaccctgaaggccagaagcgtgaggatgtcggccttgctggccagaccttactttgtgccttgactaacagcggcctgatcgaccccgactctcaccgttcttaggagatcgactcttgctccgtcgtagtgcgaggtcaacattttccaggagtggctcgtgaagcttcctccgcgtacctatgatgtgttgtatttgtttgtgtggtttacgaggggtcttattttgtatatgctttcc

SEQ ID NO: 43648 - DNA, 349 bp, Gossypium hirsutum
  Clone ID: LIB3189-031-P1-K1-B7
cttttcccaagctttcatcaaatggattttagttaaatctctctggattaaaatcaacaagttccataattgagaacagaaatcaagttctaacgaagaaggaacatccccgaattccaaaatgaagagacctaaatccatttcttccttcaacttgcttcttctcctttctgtattaataacccatctctgtttctctcttggtttcgccgattctcacttcgaaggattcgattcttaagacgacgacactgttgaagaagaactccttgatccccactctgttaaatcaccttctttacctcagtccgagtcacaggccttttttgattctgatctgaacactgtt

SEQ ID NO: 43649 - DNA, 433 bp, Gossypium hirsutum
  Clone ID: LIB3189-031-P1-K1-B8
gtgggaacggaaaggccttgtggtttgaagaatatatctgcttcttctgaaattaacaagccctcacctattgaatccccattgtcaaggtcacgttgtgctaccccaaaggcccaagatcttcaaacttctcctgtggatgatactaatgcaaatgagaaaaggacgtggcagatgtggagcagttctccccttggtcaggatggtctgggcttgatgggtgatccagcaagctggctcctaccactggaacataatagatcaaacaaggatgaccttttgcacctttcttctcagaaaactatggcgtcattgtttgcgaaagaggaccctatactagctggtaaacgatcttctcagaaggtttttcttggtaatggccagaatggtggtacattcagtcctgtccccggcctgagtgatcaccacccat

SEQ ID NO: 43650 - DNA, 290 bp, Gossypium hirsutum
  Clone ID: LIB3189-031-P1-K1-B9
cggacgcgtgggtcaattttgcattttttataataatttattccttttaatatttaaaacaaaggcttaacctttctctctcttcaatctttactttttttttcttgtgtgaacaaaaaaaagggaacatccaaagtctgccgcgtttcagaaagctttgagagtgtggatcgctagaaaggaagaagaaaagccctaattattctttgaattttagcttctgcattcgcaagttttacagttatacctgtcgtcggttatgtactcttttgatggctgtaaaaccattt

SEQ ID NO: 43651 - DNA, 466 bp, Gossypium hirsutum
  Clone ID: LIB3189-031-P1-K1-C10
gcaagtattgataataacgcacctaattattcgaattacgaatggggttcggatgtaaatgctggaaccacagtgggttataataattatgtaaattatgatcagtcgagtgttgatcaaaattcaggaaactatggaaacaatgatcaaaatattggtagttatgcaaattatgctgattatagtagctatcaatcgagtagtgatccgaatattgggggtgttgatgctgctactagttatgggagttatgagagttatggaaattaccatgtacaatatgagaataattggggtgatgggtcaacaacagcttctatgttgcctgagaccactgggatagctgactttggggtgaaaattaagggaaagagagggaggaatgatttaccagtggaaattgttgaggtgaagcaggatgatcttacgaagaatcggcccagggaagaccaagtcaagatgactg

SEQ ID NO: 43652 - DNA, 394 bp, Gossypium hirsutum
  Clone ID: LIB3189-031-P1-K1-C11
ctaggggggccagatcccagtcaaaactctcacgaagaagaaacatgagtggtgacgagaaaaacccggctgtagttgtagatcaccagcatcatcaatatgggactttccaaggagtatccaactaccctccttcaccttctccttagcaccatggcccggctattgggtttcctcagcctgttccgccgcctggccttcatgagccctctgctcctcctcctcagtattacccccaaggttatcaaaccgttccaggttatgctgttgctgaaggaagacctgtaagagagcgtcgtctaccatgctgtggcattggttttggatggttcttgattatcattggtttcttccttggggccattccctggtacattggattgtttgttctact

SEQ ID NO: 43653 - DNA, 434 bp, Gossypium hirsutum
  Clone ID: LIB3189-031-P1-K1-C12
cacgcccccatttattttatttttcaaacaaattttcccttcaattttcgtataatttcctaggaaaagaaatatgagagagtgcatttcagttcacatcggtcaggccggtattcaggtcggaaatgcttgctgggaactttactgtctcgagcatggcattcagcctgatggccaaatgccaagtgataagactgttggtggaggagacgatgctttcaacacctttttcagcgaaactggtgccgggaagcacgtccctcgcgccatctttgttgatctggagcctactgttatcgatgaagtgaggactggtacgtaccgccagttattccaccctgagcaactcatcagtggcaaagaagatgctgccaacaatttcgctcgtggccattatacaattggcaaagagattgttgatctctgcttggatc

SEQ ID NO: 43654 - DNA, 369 bp, Gossypium hirsutum
  Clone ID: LIB3189-031-P1-K1-C3
cggacgcgtgggctgagattgcctaaagatgcaactgaggctccgattttgcctaccgataatgtgcctcaagattttgactggagagaaaaaggagctgttacacccgtcaaaaatcagggttcatgcggatcatgctggtcttttagtacaacaggagccttggaaggagctaactttttggcaactgggaaacttgtgagcctcagcgagcaacagctcgtggattgtgatcacgagtgtgatccagaagaagcaggttcatgtgattctggatgcaatggggggttaatgaatagtgcttttgagtataccctcaaagctggtggacttatgcttgaggaagactacccttacaccggcacttat

SEQ ID NO: 43655 - DNA, 224 bp, Gossypium hirsutum
  Clone ID: LIB3189-031-P1-K1-C4
gttctacatcacaagcatccacccttttatttttttttcgaaaactcattctaatcaatgactgttatttatatatctgaataacagtaactaactttatctcatttacacttttttctaaatacacaacactatctaaacaatgatcaaaatattggtagttatgcaaattatgctgattatagtagctatcaatcgagtatctttcagaataaaaactttta

SEQ ID NO: 43656 - DNA, 396 bp, Gossypium hirsutum
  Clone ID: LIB3189-031-P1-K1-C6
ggtggccaatgcggcaaccaaatcggagccaagttctgggaagttgtttgtgctgagcatggcgtagatgcaactgggcgttaccaaggagacttggatcttcaacttgagcgaatcaatgtctactacaatgaagccagttgtggtagattcgttcctcgtgctgttctcatggatcttgaacctggaaccatggacagcatcagatctggccccgtcggtcagatttttagaccagataacttcgtttttggtcagtctggtgctggtaacaactgggctaagggccattacactgaaggtgctgagttaatcgactccgtacttgatgttgttcgtaaagaggctgaaaactgcgattgccttcaagggttttaaggttgtcattccctggga

SEQ ID NO: 43657 - DNA, 369 bp, Gossypium hirsutum
  Clone ID: LIB3189-031-P1-K1-C8
ctttgctgttgaagtagtaatatctatagcatacagagatggagaggcaaagaagcaagcaggtttgtttgttgatgtgggttttggttgctgcctttttctcccacaatagggtcattgcagtgacctccactggccttggtgagcagaaaaactactatccagctcctgaccctcatgctggaactcccccttcaggttcacatggcacaccaccatcttcaggaggtggatcacctccctctcatggaaccccgtcacatggaggtggttaccacccttcaccaacaccatcaacgccttctgttggaaattgtggaactcctccacatgaccctttaactccattaacaccatcacacacttctt

SEQ ID NO: 43658 - DNA, 451 bp, Gossypium hirsutum
  Clone ID: LIB3189-031-P1-K1-C9
tcaatttgctctgaagatcatgttggctatttttcacaaggcatttgctaatccaccagaggagctgaatagtccagcttctcataaatctaccaagaagcctaaacagcctgaagaaaccctaaatgatttcctatctcatcaccctcacaacactttctccatgagctttggcaacgctgctgttttggcttatgtccgccatgaacgtgctgcttcagttcatcagaggttgttttgtgggttttgatgacatatactgcctcttcttagggagcttgaacaatctatttattctgaatatacaatatggtctttccaaatggagcattatagcgttattttgtgattttagcatttaggacgcctgagggtatggggttccataccccttctgtatatggttggttatgggatctttgaagggatgctttttcttttttgtgtattc

SEQ ID NO: 43659 - DNA, 467 bp, Gossypium hirsutum
  Clone ID: LIB3189-031-P1-K1-D10
caccggtttatgcacctccaaagaaagagaagcatggacccaaaccaccaatgtatgaacctgcgaagaaggagaagcctgagccaaagccaccagtttatacacctccaaagaaagaggagcctaaacctaaaccaccagtatatgaacctccaaagaaggagaaacctgagccaaaaccaccgatttatacacctccaaagaaagagaaacctgaacccaaaccacccgtatatgaacctccaaagaaggagaagcccgagccaaagccaccggtttatacaccttcaaagaaagagaaacctgaacccaaaccaccagtgtatgaacctccaaaaaaaccttcaatgtacgaacctaaaccaccaaaaccaccggtttatacacctccaaagaaagaggaacctgaacccaaaccaccaatgtatgaaccttcaaaaaaacctccaatgtatgaacctaaacca

SEQ ID NO: 43660 - DNA, 470 bp, Gossypium hirsutum
  Clone ID: LIB3189-031-P1-K1-D11
ggctcaatgaaagtcagcctgtcccgtgcccgtaaagtgtcgaactacttgtcgacgagtgtgacggggtacaacaagagggaacgagtcgcactgagtgactgcgtggagcaaatagatgagtcgatggaggagttgagcaagacattaggggagttgaagcacttgagaggggagacgttcgagtttcagatgagtaatgcgcggacatgggtgagtgcggcgctgacgaatgaggacacgtgtcttgatgggttcgaaggagttgacggcaaggttaaatctaatgtgaagaggaagatcacgaatgtggctaaagttaccagtaatgctctgtacatgatcaataggcttaatgaaagtcgtggtaggcaccgttgaatctttgatgatgatgatgatgaataattggatggtgggatttatctagcttattatggttcttaaatataagttatattttgattttt

SEQ ID NO: 43661 - DNA, 422 bp, Gossypium hirsutum
  Clone ID: LIB3189-031-P1-K1-D12
attcctcacttttgcaacaaaatccaccaagagactacaccaacaaatggaggcattgaggataagactatttttggctatgatggtggtgttgatggccatctcagcggtccaatatgttgcggcagctgatgcaccggcccctactcctacctcagatgccaccgcattcgtgccgacggcatttgcttcccttgtcgctcttgcgtttggtctcctcttttaaaatggatgaattgtattggttgttgatatttcaatattgggggttatgtagagttcttttgtcttcttttattctttctgtctaaagggcatacaattcttatgagtccttcgtttatggagatggaaatatagatagataaaaggtggagattttattttcttttttctactttatatttttccttaattacaca

SEQ ID NO: 43662 - DNA, 461 bp, Gossypium hirsutum
  Clone ID: LIB3189-031-P1-K1-D3
gttttataaaaaccctaaacggcctgatatttatctcttagaacgaaaaatcccaaacgcctcgctctaagaaaaaaacaattatggcaagcaaagaacccgaacacgagcacagagaagatgaagaagctcctgccgccgaggatgaagacactggagctcaagtcgcccctattgtcaagttagaggaagtcgctgtcagtacaggcgaggaaaatgaagatccgatcctcgatctgaagtcgaagctgtatcgatttgataaagaagggaatcaatggaaagagagaggtgctggtactgtgaagctgttgaagcacaaagagacaggaaaagttcgccttgttatgaggcaatctaagactctcaagatctgcgccaatcatctagtgttgccgacaatgacggtgcaggagcacgctgggaatgataaatcgtgcttatggcacgcctctgactat

SEQ ID NO: 43663 - DNA, 209 bp, Gossypium hirsutum
  Clone ID: LIB3189-031-P1-K1-D4
atcaaatcagtttctcccctaaatttactgaaattttatagcatgactccttatttctccgatgtgggggttcgaatacaacgggagtgccctaatatccatggtaggcaagaactgcttcgccattgccagcgatcggagactcggagttcaactccaaactatcgccacctgatttcagaggatttataaagttcacgatcgcctct

SEQ ID NO: 43664 - DNA, 153 bp, Gossypium hirsutum
  Clone ID: LIB3189-031-P1-K1-D5
ctatctctctctgtatttctctctcccgcaaggatttaattttctaattaaaaacccatcttggatgcggagatgttttgcttgtcacttgcaagcatcactctcatggcttccatcattgaatctgggtggcctgaatcttgatcacccatt

SEQ ID NO: 43665 - DNA, 476 bp, Gossypium hirsutum
  Clone ID: LIB3189-031-P1-K1-D6
cttgtattccacttttgccttgtgaagattgtcattgcacctcgaggaggagttcaatctcctactgacaactttgaagtgttttatattgattatgggaatcaagaggaggttccatacagtcaattacgacctcttgatccttcattatcagcgtctcctgggcttgctcagctatgtagtcttgcattccttaaagttccgagcctggatgatgaatttggtaccgaagctgctcagtttttgagtgagcagacaatgggaagctcactgcagtttactgctatgatagaggaaagggatgtttctggcggaaaagtcaagggaaaaggaactggcaccgttctcattgtaactctcgttgctgagaagtcagaccttagcattaatgctgcaatgcttcaagagggactagcttggttggagaaaaggaagagatgggaatccaaggatagaaaatcggtgattgacaactt

SEQ ID NO: 43666 - DNA, 286 bp, Gossypium hirsutum
  Clone ID: LIB3189-031-P1-K1-D7
caaacaccccgccgcagcaaccatctaccatccatcttctcattctactctttacctaccaagagcaagaaacctcaacaatcaacaactaccaactagatttggattaagtcacccaaaaccaatcaaccaaccaagcaaccgagaagcaaaaagaatggattctgattatggcattcccagagaactttctgatcttcagaaactccgatctcaataccaaccacagctccctccttgcctcgagggaactactggcagggttgagtttggtgataccactaca

SEQ ID NO: 43667 - DNA, 347 bp, Gossypium hirsutum
  Clone ID: LIB3189-031-P1-K1-D8
gctatataacaggcggactgccaaagctattctgattactaagcagagaacaatgaatctggagtaataaaaatcttgctaactttgattgctagaaaatatcacagcatgacgcaactagctatctatataagctcgaacaaggacacgcgcactaacgttgcttgcagacgtagaagaataacggatgccttctctgcgctccggcaggatcttacattgacccgagacttgtgtcacaaatccagatggcgagacaattcaatggctgttgcagcagttggaaccatgtatcattgctgcatctagaactgggacgatgcccgcttcaactttggcatctgctg

SEQ ID NO: 43668 - DNA, 99 bp, Gossypium hirsutum
  Clone ID: LIB3189-031-P1-K1-D9
cggacgcaaggagcggacaataaaagataataaatattatatatcaaaaaaaattaaagggggagggggttaaaaaaaataaagggtaaaatataaaaa

SEQ ID NO: 43669 - DNA, 127 bp, Gossypium hirsutum
  Clone ID: LIB3189-031-P1-K1-E11
atataatattaaaaaggggatattattattataatttatatataaaaaattatttttattattataaattaataatatatattaaatatataaaaatatataattattttaaatttttattttttaa

SEQ ID NO: 43670 - DNA, 333 bp, Gossypium hirsutum
  Clone ID: LIB3189-031-P1-K1-E4
gcaatggaaagggttgaatccggtagagatttaagggccagaatgtacgcgaagcttagtaaagagaagtccctcgacggactcgatccaaccgaactggatctggatctcgattgggtctccgagttagtgaagtgaactcgatactggcaactcacccaactcagctttctgttatgatttatttcgggaattctttttatatattaaaaaaaacaaatcggtggctataatctgaccttttgtgaatattaatggggtttttttttttataatctgattttcgatcatcatttgcactgtgtaaatagacgacggtggaaaagaaagatg

SEQ ID NO: 43671 - DNA, 84 bp, Gossypium hirsutum
  Clone ID: LIB3189-031-P1-K1-E5
gaacgactcacgcgtgcgcaaaattaggggtttgataaccctaaccccataatagcccctacaaccttcgacattatttggggc

SEQ ID NO: 43672 - DNA, 240 bp, Gossypium hirsutum
  Clone ID: LIB3189-031-P1-K1-E6
cccacgcgtccgttaatttgaaaaaaaaaacatggaaggagacgatttagacatggcatctgctgaatgcgctgaagcatatcttggtgacatgaataaaaggttaaaagagatgtatgaagaatctcttgctcttcttgagatgcaagtttaagtcgattaaagagatttgttccctttctagatccttctgctgttttagttacaacttatttaaatttagatggattgtttttttat

SEQ ID NO: 43673 - DNA, 57 bp, Gossypium hirsutum
  Clone ID: LIB3189-031-P1-K1-E7
ttttaggtaaagtagtctatgtactttaaattaaaaattaaattggttatttttgtt

SEQ ID NO: 43674 - DNA, 311 bp, Gossypium hirsutum
  unsure (1)..(311): unsure at all n locations; Clone ID: LIB3189-031-P1-K1-E8
ctttgctgttgaagtagtaatatctatagcatacagagatggagaggcaaagaagcaagcagggttgtttgttgatgtgggttttggtttctncctttttttttcacaatagggtcattgcagtgtccttttactttctttgttgagctttataacttctatttatcttctgtccctcatgcttgtacttctcctttattgttctcattgttttccattcgttttctagtttattggattcttctctttttttttatatttcctttttttttttgtttgttttatttttttccgttcatcttatttttttt

SEQ ID NO: 43675 - DNA, 398 bp, Gossypium hirsutum
  Clone ID: LIB3189-031-P1-K1-E9
cacaggcttggaagggaactaagctagaggtagagagaaagaagggagttgccaaaatgtcgtcgttcttgcagtcatttctggatcccaagaaaagctggttggcagctctgcacatgaaatccctttccaagcgcctccgcaaatacggtcttcgctatgacgatttatacgaccgttactatgatttggatatcaaggaggcgttgaatcggctgccccgcgagatcgtcaatgcccgcaaccaacgccttaagcggtcgatggacctctttatgaagcacgagtattcttcccttaaaccttttgcaaatgctaacaccatttaggagcttatctcaagatatgttttgctcttggtaggtctttgacctgtataactttatttaccaaattcc

SEQ ID NO: 43676 - DNA, 432 bp, Gossypium hirsutum
  Clone ID: LIB3189-031-P1-K1-F1
cccacgcgtccggtttattgcattaaataaatcatgaaatctttccttcctttctttgcattcctctcacttctcctgtttgtagacaccattgcagcagctaggaaagatgctggagagtactggggagctgtaatgaaagatcagcctatgcctgaggcactccaagagcttgttcggattgaggctgccgttgccaaccccgatgagaaaaccaagtgccatacatcaggtaacattgagcttaaggaagagaagattattgttaatgaggagttcgaaccaaggccaaacatttcagcttacggtgatgacgctaatctaaaaggagataaatcatcatcttttgcaaaagattttgaaccgagacctaacatttcggcttacgggggcgatgatgctggtcttaaaggacagaaagaatcattcact

SEQ ID NO: 43677 - DNA, 424 bp, Gossypium hirsutum
  Clone ID: LIB3189-031-P1-K1-F10
gcaaagcaaagcattagcaaccatagccatggcttcctcaccaaaactcttctctatgtctatcctcttcctttttgccctcttctccatgcaaatccatgctagagagtacttcagcaaattcccaagagttaacaccaatgagaaagagacaacaaccagagagcaagagcacgagaccttcgttccccagaccacccaaaagccagaagagcaagagccaaggttcatccctgaaacccaaaatggttatggcctttacggccacgagtcaggctcaggctcaggctcaggctcaagccggcccagtttcaccaccaaagaaacctatgaaccctatgtcacccctgttagattccaccctgatgaaccctataacagcatccccgaatccttcaacattaaagacacttactactacaac

SEQ ID NO: 43678 - DNA, 184 bp, Gossypium hirsutum
  Clone ID: LIB3189-031-P1-K1-F11
gaaggtccacccaggcccacgcgtacgccaaaacaaagcattaacaaccatagccatggcttcctcaccaaaactcttctctatggggcgggctatttctttatgccctcttctccatacatatccatgctagagagtacttcatcaaattcccaagagataacaccaatgataaatagacatc

SEQ ID NO: 43679 - DNA, 296 bp, Gossypium hirsutum
  Clone ID: LIB3189-031-P1-K1-F12
aggaaacttgctgataactgcactggtcttcaaggattccttgttttcaacgctgttggtggaggtaccggatcaggtcttggttctctccttttggagcgtttgtctgtcgattatggcaagaaatccaagttgggtttcactgtctacccatctcctcaggtctccacttctgttgttgagccttacaacagtgttctctcaactcactcccttttggagcacactgatgtggctgttctccttgacaatgaagctatctacgacatttgcaggcgttctcttgacattgagcg

SEQ ID NO: 43680 - DNA, 395 bp, Gossypium hirsutum
  Clone ID: LIB3189-031-P1-K1-F2
cgtccgcccacgcgtccggtttattgcattaaataaatcatgaaatctttccttcctttctttgcattccgctcgggttcttctgtttgtagacaccattgcagcagctaggaaagatgctggagagtactggggagctgtaatgaaagatcagcctatgcctgaggcactccaagagcttgttcggattgaggctgccgttgccaaccccgatgagaaaaccaagtgccatacatcaggtaacattgagcttaaggaagagaagattattgttaatgaggagttctaaccaaggccaaacatttcagtttactgtggtgacgcgtagtaaaaggagataaatcatcatcttttgcagaaaatttttaaccgagacctaacattactgcttactg

SEQ ID NO: 43681 - DNA, 177 bp, Gossypium hirsutum
  Clone ID: LIB3189-031-P1-K1-F3
acgaccccgcgtccgaaaagacaacattgcataggccagcattatacttgagacattcattgtccttctttcacaacatggcagctattctttctttatacactaatccttcacattttaaaattctcttcaacaccatcttactacctattaatcttcatctttcctattccttta

SEQ ID NO: 43682 - DNA, 284 bp, Gossypium hirsutum
  Clone ID: LIB3189-031-P1-K1-F4
cttgaatatcttggacgagttgttttcaacaccaacggcatgctttaccctgatagtgtggttggaactgattcccatacaactatgatagatggtcttggagtagctggctggggagttggtggtattgaagctgaggcagccatgcttggtcagcctatgagcatggttttgcctggtgttgttggattcaagttatctggaaaattaagaaatggtgtgacagctacagacttggttctaactgtgacacaaatactgaggaagcacggtgttgttggcaa

SEQ ID NO: 43683 - DNA, 178 bp, Gossypium hirsutum
  Clone ID: LIB3189-031-P1-K1-F5
ctcacacgtccgatatgacgaattattatccattgctgttgagttgagccggaatgatgtgttggaacggagctagatacgcctaggattaattgattcggaagacccagatggggaagatgaagagaatgggataagaaagtgtttggtgaggggaaaccaatggttctactggaac

SEQ ID NO: 43684 - DNA, 299 bp, Gossypium hirsutum
  Clone ID: LIB3189-031-P1-K1-F6
cccacgcgtgaaggtgtcttaataaacgccttcgatttaccttcgatttccatttacttctctggtgctgacgtttttgaatttttagtgagcgaaaatgagagagtgcatttcagtccacatcggtcaggctggtattcaagtcggaaatgcctgctgggaactttactgccttgaacatggaatccagcctgatggccagatgccaagtgacaagactgtcggaggaggtgatgatgcttttaacacccttttcagtgaaacttggtgctggaaagcacgttcctcgtgctgtcttt

SEQ ID NO: 43685 - DNA, 471 bp, Gossypium hirsutum
  unsure (1)..(471): unsure at all n locations; Clone ID: LIB3189-031-P1-K1-F8
ctgcgctattctttcatttcaatagccttttccggctctctatcgcccccctcccatagctctagagattattcctttctcaaaaatttcttcttttctcataatacatataaaaaatcctccttcttttatactcttctctttgtcttatataatctcagggtgatagagcaacaaaaatacgaccatatatcaaaggaaaaaaaataaagagagattcaagggataatacgatgaccaagttaccttctttgtttctggttttgactttggtttctgtttttgtttgtgggtttggaaaaaggataccaattctgtcatttgatgaanggtatagtcagttgtttggagatgataatctagttcttcacagaaatggtaaagctgttcactcgtctttgaatgagagaacaaggtctggatttgtgttttaagacctttacttgcatgggttcttcaatgctttaatta

SEQ ID NO: 43686 - DNA, 139 bp, Gossypium hirsutum
  Clone ID: LIB3189-031-P1-K1-F9
tctgcactattctttcatttcaatatccttctccatctctctatcacccccctctcatagctctggtgattattcctttctcaaaaaattctactatcactcataatacatataaaaaattctccttcttttatactct

SEQ ID NO: 43687 - DNA, 263 bp, Gossypium hirsutum
  Clone ID: LIB3189-031-P1-K1-G10
cggacgcgtgggtggtgagcctattcccacaaacaagcgccaccgtgccgctgagatcgtggagggacaagaaggtggtcgatgaagtaccatggtttggtattgagcaagagtacactttacttcaacaaaatgtgaaatggcctttgggatggcctgttggaggctatcctggtcctcagggtccttattactgtgcagctggtgctgacaagtcatttgggcgtgatttcttagatgctcattacaaggcttgtttgtat

SEQ ID NO: 43688 - DNA, 338 bp, Gossypium hirsutum
  unsure (1)..(338): unsure at all n locations; Clone ID: LIB3189-031-P1-K1-G12
acnactagtcgaataatcgtacagtccagaggcacccactcctttctttcttgcttactggcgtgtcttcattaccataaaattatatttctctccatcgacccctatcccaagctctcagctgcaccaggaagtaatttgaaggttttatgaactctacaatctccgacgcgaaatcaattgagtttatttccgtttttatccatttattgcatagaatgctaatatctagcttntggggtcttgttgcatccactactcagtgttgagagaatacaaaaacttttttttcttccttttccccaatgcgtgacatgtattttcgattttaatggaac

SEQ ID NO: 43689 - DNA, 343 bp, Gossypium hirsutum
  Clone ID: LIB3189-031-P1-K1-G4
atatgtctgaagcaaagctgcgttctcatgttccaaaatttggtgactgggacaatggtgatcgaccatatacaacctactttgaaaatgctcgcaaagagaaagctggcataaggatgaaccctaatgaccctgaggagaatcctgaggccctcatgtatacgaggggaggcccggaaagcaactacgatggccggtccgtgccggccacggccgataaacaccatcagaatgccgctaataaagatggttcttcttatgatcatcaaaagagcgcaagaaggcaacggaacacagcactggaatccgaaaacaacaccggatcggaccgttcgattctgca

SEQ ID NO: 43690 - DNA, 103 bp, Gossypium hirsutum
  Clone ID: LIB3189-031-P1-K1-G5
ggagtataatatgaagaaagatatacatcggcggcgttatcagaggcaacgaccactgcggcagagacagagattcgcggccaatcaactgatgaagacgata

SEQ ID NO: 43691 - DNA, 369 bp, Gossypium hirsutum
  unsure (1)..(369): unsure at all n locations; Clone ID: LIB3189-031-P1-K1-G6
agcctctcgggtttgatgtccacaagaaaaactacaagatgagactccagaatttgaaagcagggggagaaggaaaccttaatgtcgccactganatatttcaagtggcacctagtttacatatggttgaggtccgaaaagcaaaggtggacacattggaattcaatacgttctacaaaagccttttgacctgtctggaagatgttgtcttgaaaactgatgaggacataaaatagttgcacgtatgaattgacctatgtttccaagttaataaaaattgtggatatttatacttttattattttcaattgtggggggtggggggggtttttttttaatatatttattatttcttatttacattaattt

SEQ ID NO: 43692 - DNA, 525 bp, Gossypium hirsutum
  unsure (1)..(525): unsure at all n locations; Clone ID: LIB3189-031-P1-K1-G8
cgtccgggnncttctgcttctatnttactattnnttctcactcnntcctactcnnctttgtgccanntcccttttacgcttgctgccgagcttttcgttaaagagcagcncnntctggtgttgannagtaccacaatgnnnggccactcnnttgaaggggaaggatcannccgttaatctcaatctggtaccgggaagggttctccccaaccccanngcgctccattaatcnngtcgatttcatcannactctttgagctcnntgccgtcaaacccaagattnccgtcgggcgtcgttttgtgtggaaaaccgacggagaaatacannagtccggttcctccactttgtgtcgtgggccaaacaagatcctgcctcgaaaattacctcgctcggtaaaaatccttaagaacccacactttgccagcgttggccgggaaattcaacggcgtaagtacggttagcgttattctcacgggccaagacgtcgccgtcgatgggttctgcatgaggtgccggacttacgg

SEQ ID NO: 43693 - DNA, 138 bp, Gossypium hirsutum
  Clone ID: LIB3189-031-P1-K1-G9
ccaaaaaattgaaattagcttcttctcttttaaatgtatagttttttttattttaaacggggacgtgggagaaagggtggaagcaggttatggtttttggtatcacttagaaagattttagcaggtgtgttttccggt

SEQ ID NO: 43694 - DNA, 121 bp, Gossypium hirsutum
  Clone ID: LIB3189-031-P1-K1-H1
ttaaaatatcttgttcaaaaagaaaccctaaatcatgggtcagggaaacaccggttggtcctgaaccgacagggttttccaggggatcggaaacaggttggttccgataggaaggggagga

SEQ ID NO: 43695 - DNA, 285 bp, Gossypium hirsutum
  Clone ID: LIB3189-031-P1-K1-H10
gttttcttattgattttgcagatcggttcttaatccttttttcgggtgtagcgttgttatacgtttggttgttgtgaagaaggctactaccatggctacaaagaagagcgtggggacttgaaggaagctgatttgaaggaaagaaagtgttgttagagtcgatctgaacgttcatggagatacttaacataactgtgacacaggatcggccgtgttccacataagtattgatggtatgctctaagtatcctcttagtattgggacgccaaaggtgtactccaagt

SEQ ID NO: 43696 - DNA, 149 bp, Gossypium hirsutum
  Clone ID: LIB3189-031-P1-K1-H12
atacatctctcatctgggttgtcgtttctatagctgaagaaactcttcaatggctgaaaagagcaaggttttgatcatcggaggaactggatatctgggaaagttcattgtggtagccaatgcaaaaaagggacatcccactttcgttt

SEQ ID NO: 43697 - DNA, 414 bp, Gossypium hirsutum
  Clone ID: LIB3189-031-P1-K1-H4
caaccatagccatggcttcctcaccaaaactcttctctatgtctatcctcttcctttttgccctcttctccatgcaaatccatgctagagagtacttcagcaaattcccaagagttaacatcaatgagaaagagacaacaaccagagagcaaaagcacgagaccttcgttccccagaccacccaaaagccagaagaacaagagccaaggttcattcctgaaacccaaaatggttatggcctttacggccacgagtcaggctcaagccggcccagtttcaccaccaaagaaacctatgaaccctatgtcacccctgttagattccaccctgatgagccctataacagcatccccgaatcctccaacaataaagacacttactactacaacaagaatgcctacgagtccactaagc

SEQ ID NO: 43698 - DNA, 172 bp, Gossypium hirsutum
  unsure (1)..(172): unsure at all n locations; Clone ID: LIB3189-031-P1-K1-H5
cgganntccggacgactcacgcgtccggctcaaccagagggtgggactgccgacgaatgagaaactacccttaattgtctgatcttgtgaggactagtgtttgttactctaatatacagatatttaataaataattttaaactgcttccatgaataaaaaccagattaaata

SEQ ID NO: 43699 - DNA, 371 bp, Gossypium hirsutum
  Clone ID: LIB3189-031-P1-K1-H6
cggacgcgtgggtcttgagcacgtgcaaacagccagagaggcaaagattaagacacttggttgggctggcatggcaacgaaaaccaaaaaattattattttaaaaaaacatttcgtttttgaaggaaggaaagaaagaaactcgggaaacatcaacagcaacaacaacatttgacaaagttgttgttcttcttcttcaaagaaaaccctttttctttactcatcgcaaggtttttgttgttgggttttggaaacatcattaacttaacaagaacagcacagcccagatcactttagttatcatttttggaaatctatggagcagcttgttaactttataattacgccctcccagagctgaatacaattcat

SEQ ID NO: 43700 - DNA, 396 bp, Gossypium hirsutum
  Clone ID: LIB3189-031-P1-K1-H7
gaacggtctctgattcaccagaagatagtccaaaccctaatccaccaccatcgccgcccagcgatttcccttctaaaagcgaatcgaatgctcccgaacaagtcactccatggatcgattccgctgtggagcaagctcttctataccagaagatcatcgaacagaacgttaacgacgctatcaaagcttctagatctcgactttcagaaattcgctccacctcctcagctcattttaatctaaccattgagtcacttaaagatgtcaaatcacaacttgatgtttacgaggatttggcattcggcaaagttaaagaggggattaatattgcagcttcgaatccattgatcaccggcggtgctgctgttggcttgggattcctggtacttaaaagta

SEQ ID NO: 43701 - DNA, 475 bp, Gossypium hirsutum
  Clone ID: LIB3189-031-P1-K1-H8
cccacgcgtccgcgagaatccacgacccttcccttcctccgtagacagattgtagtagtatctcgatcctatacaccgccgcagccgaccgccgtttattttttcataccgcggccttacggcgacgatgagggtcgactggggcgatcttcctgaagaaccacaacagccggagcaagattctaacctcaatttcgactttttttctcttatttccaagcccaaggattattataagatattggaagttgattacgatgctacggaggatgctattcgctccaattatatccgtcttgcactgaaatggcattctgataagcaaaaggacgatggggatagcgccactttaagatttcaagagataaatggggcttaccaggttctcattgatccagtcaaaaggagtgagtatgataatgaaggggatgttgcatgtgtatgactatgacataattgggtacctgaaccgttt

SEQ ID NO: 43702 - DNA, 456 bp, Gossypium hirsutum
  Clone ID: LIB3189-032-P1-K1-A1
gtgaaggactagtatttcctactgagcgaaatcttgttgataaaccaaatatattttgtgctgaagttggtctcaatataattggacaagctgctaatgtaggagaattagattctgatgtggcacaaagcaactcatttcttgaggttgatccaatacttattcctggtccgccaggatcgtttttgccaagtcctagagatatgggctctgatgattttcaaggaaatgcatcaacagccaaccagattcgatcctctcgagatcagcttgatttggtagatggggactcatcagattcacccctatccgtattgtcaacaatctctaattctatggaagccaggttcgatttgaagtatgaagaaccattagcatttcttggtgctcctgcagctatggaaacggatagatctggctactctactgccaagtctgacaccttagttgagaatg

SEQ ID NO: 43703 - DNA, 376 bp, Gossypium hirsutum
  Clone ID: LIB3189-032-P1-K1-A11
cttagcttaaaaaatcttgaatccgtactctcctacttccctcgttatcgtcaatggcttcggacaagaagattaagatcgggattaacggatttggaagaatcggacgtttggttgccagagttgctcttcagaggaacgatgttgaactcgtcgccgttaacgatcccttcatttccaccgattatatgacatacatgttcaaatacgacagcgttcacggtcaatggaagcaccatgatcttaaggtcaaagactctaaaaccctcctcttcggcgaaaaacccgtcactgttttcggaatcaggaaccctgaggagattccatgggctgaagccggggctgagttcgttgttgagtcaactggagtgtttac

SEQ ID NO: 43704 - DNA, 399 bp, Gossypium hirsutum
  Clone ID: LIB3189-032-P1-K1-A12
aaaatggttatggcctttacggccacgagtcaggctcaggctcaggctcaggctcaagccggcccagtttcaccaccaaagaaacctatgaaccctatgtcacccctgttagattccaccctgatgaaccctataacagcatccccgaatcctccaacaataaagacacttactactacaacaagaatgcctacaagtccactaagcagcaaaacttgggcgaggccattttcaccgagaaaggatggagcaccaaggaaaaccagaacaacaactactacaacggcaacattaatggcgagaagcaaggcatgagcgatactaggtacttggagaatggaaagtactactatgacgtcaagagtgagaacagctattatccaaaccagctcgacaact

SEQ ID NO: 43705 - DNA, 297 bp, Gossypium hirsutum
  Clone ID: LIB3189-032-P1-K1-A2
gacccacccgtcctctgaacgactagtatttcctactgagcgaattcttgttgataaaccaaatatattttgtgctggagttggtctcaatataattggacaagctgctaatgtatgagaattagattctgatgtgtcacaaatcatactcatttcttgaggttgatccaattcttattcctggtccgccaggatcgtttttgtcatgtcctagtaatctgtgactctgatgatttttaaggatttgcactaacacccaacctgttactgattcctctcgtgattaactttatattt

SEQ ID NO: 43706 - DNA, 165 bp, Gossypium hirsutum
  unsure (1)..(165): unsure at all n locations; Clone ID: LIB3189-032-P1-K1-A3
cggacgcgtgggatggcataagtgtgaatgtcactctcatattttcgcttgctagatacgaggctgttattgatgcttacttggacggccttgaggcttctgggttgagtgatctnttcagtgatacttagagtgcatttctttttggtcagtggtgtttatttt

SEQ ID NO: 43707 - DNA, 266 bp, Gossypium hirsutum
  Clone ID: LIB3189-032-P1-K1-A5
attttctcagcgaattcgaaaccgaaaacgcaagaaatttttcattttttcttgattccaggcaacttttcaatctgggttttgcttgaatattcatattaactttgttttatacttaaaaaagatgacagaagcgagtaagaaaagcatgaatccggaaccagttcatgttcaaagcacagcttcgtcaaacgaaacaagatcaaacaacaatctccccaattttcttttttcagtgaggcttaaatacgtgtagctcggcttcc

SEQ ID NO: 43708 - DNA, 438 bp, Gossypium hirsutum
  Clone ID: LIB3189-032-P1-K1-A6
ccacgcgtccgctttttctcccttttagcatatagacaatagcaaatacagcaatggcttccagtgggcagcttcatgtggatttcgagctcaagtctcctgcagaaaaagtgtggggaaccattagggactccaccacgattttccctcaagccttgtcccatgattacaagagcattcaagtgctagaaggcgatggcaaggcccctggatctgttcgtcttattaactatgccgaagggtctccaatcgttaaggtatcaaaagagagaatcgaatcagtggatgaagctgagaagaaatatgtttacagcatcattgatggggatctcctgaaatactacaagactttcattggcaagatcattgtggttcccaagggagagtcgagcttggttaaatggtcctgggagtttgagaaggcaagtgaagagatcc

SEQ ID NO: 43709 - DNA, 267 bp, Gossypium hirsutum
  Clone ID: LIB3189-032-P1-K1-A7
ttgaagtgactagtatttcctactgtgcgaaatcttgttgataaaccaaatatattttgtgctgaggttggtctcaatataattggacaggctgctaatgtatgagaattagattctgatgtggcacaaagcaactcatttcttgaggttgatccaatacttattcctggtccgccaggatcgtatttgccaagtcctagagatatggtctctgatgattttcaaggaaatgcattaacatcctaccagattctaacctctttagat

SEQ ID NO: 43710 - DNA, 324 bp, Gossypium hirsutum
  Clone ID: LIB3189-032-P1-K1-A8
cccacgcgtccgccatttctcaacacaaattttcatcacccatcaagcttttcatcaatggcttcccttcaacaagcttcaatctctcttcaacccaagcttctttcatcttctcaacaccccagatcccttccctctctcaacctctctttttcagccactttcccttccctcaaactctgcaccactcgccctcttcatggcggtgccaaaatgtcagcctccgccgctttcagctacgccaccgctttagccgatgtagccaagtccaacaacacccttgttgccaccagctccgactttttaatggttgttgtatttctt

SEQ ID NO: 43711 - DNA, 326 bp, Gossypium hirsutum
  Clone ID: LIB3189-032-P1-K1-A9
cccacgcgtccgatcatcctcttcctcacctattaatcttcagtttttgccttcccagcacctgtcacttttcatttcctctaagataaggaataaaatggcgacgaatatgatgcgagccgttcaatacagtaaatataacggaggagccgctgatctcaagcatgttgaagttccgattcccagtccaaaaaaggaagaagttttgatcaaagtagaggcagctagtattaacccaatcgactggaaaatacaggagggggtagcgcgcccatttttaccttgcaaattcccccacattcctggtaccgatgtagcaggagaaa

SEQ ID NO: 43712 - DNA, 416 bp, Gossypium hirsutum
  Clone ID: LIB3189-032-P1-K1-B1
cccacgcgtccgggtttcggttcttgcagatgcagaagctcttagaaaggcttgtaaaggatgggggacagatgagaaggcaataatttcagtgttgggtcacagaaatgcagttcaaaggaagcaaatcaggcttgcttatgaagacctttaccaggaagatctcatcaagcgtcttgaatcagagctttctggtgatttcgagaaagcagtgtatcgttggatattggatccagcagaccgagatgccgggttagctaatgttgccataaagaaattaagccctgatcaccatgtgatcgttgaaatttcatgcaccagatcccctgaagagctcttggctgtgaagagagcttatcatgctcgatacaagcattccctggaagaagatgtggcttgtcataccaagggagaca

SEQ ID NO: 43713 - DNA, 129 bp, Gossypium hirsutum
  Clone ID: LIB3189-032-P1-K1-B11
aaaaataatacaaatcttggagtggttttacctgaataacaagtgtttttcttaatcaagcaggtattgatttatgaggaaaatgttatttttcaaatttaatgtatattaatgtttcaatttatattg

SEQ ID NO: 43714 - DNA, 431 bp, Gossypium hirsutum
  Clone ID: LIB3189-032-P1-K1-B2
cttctctggtaagttcatcgaaagatcaaatcaagatccctgccaaaatgaacgacgctgatgtatccaagcagatccagcagatggtgagattcatccgccaggaagcggaggaaaaggctaacgagatctctgtttccgctgaagaggagttcaacatcgagaagcttcaattggtggaagcggagaagaagaagattaggcaggagtacgagaagaaggagaagcaagttgaaatccgaaagaaaattgagtattcgatgcagcttaatgcatctaggatcaaggtccttcaggctcaagatgatgtggttaatgcaatgaaagaatcagcatccaaggaccttctcaatgtgagccatgatcaccatgtttacataaggcttttgaaagatctaattgttcaaagtttagttagactgaaagagcct

SEQ ID NO: 43715 - DNA, 312 bp, Gossypium hirsutum
  Clone ID: LIB3189-032-P1-K1-B3
ctccaagcaaccattttccttacaagtttgtttttcttgtgattaatccatatggctagctcaatgtcccttaagcttgcatgtctgttggtgttgtgcatggtgatgggtgcacccctggctcaaggggccataacccgtgctgatggcttagtcggcctcccacgctgccttccttttttgtcagggaatggtgatggtgctgatgccacaggttgctgtgccatcgtcatgaatgccttgggatcgctctgtggtgatacataggaaccgatctagcttgaaatcgggttcggttttagggtggatttt

SEQ ID NO: 43716 - DNA, 247 bp, Gossypium hirsutum
  Clone ID: LIB3189-032-P1-K1-B4
caagtttcgaattttgctctttagtccctcaatttatatttgaaattcactaaggtcctaaaatgggcactgctcaaagcagggaagatcggatcaccgattcagaatccgatgaaggctatgaagaagaagaagaagaggaggaggagcaatacgacgacgctttaagcgatcatcaaaacactcaatctttatctttaactttaactttcttaggttcttaaaaaagctctgatgattttcgttg

SEQ ID NO: 43717 - DNA, 68 bp, Gossypium hirsutum
  Clone ID: LIB3189-032-P1-K1-B5
caagaacgaattttgttcataaaaacctgaatttataataaaaaaacaataagctataaaatgggcgg

SEQ ID NO: 43718 - DNA, 438 bp, Gossypium hirsutum
  Clone ID: LIB3189-032-P1-K1-B6
ctcacacggtaccgcttttcttttttttttcctgttttccatttctcactcttttttgctctcgggtttgtttcccgagaaaaaaaagtgaaaataaaaataaaccaagaaagagaaagaggaaaaagaggagaaggattgggatctcaacaactgtcactctaacctcaaaactgttgtcctccatttttctttttaatttcccgggaatcaaagggacagttattctttcggtccgttttaatttgattatcgtttcaagcagcgttaattttgatgggaaattggtgatcaatataaaagctgaatttctgttgaaataatagaggagatgaccaaagaacacccgcctgagccactcgatttcttcatttggactgttgaggatgttggaatgtggttggaagagattaaatctggtagctaccgtaagatttt

SEQ ID NO: 43719 - DNA, 391 bp, Gossypium hirsutum
  Clone ID: LIB3189-032-P1-K1-B7
ggcttcctcaccaaaactcttctctatgtctatcctcttcctttttgccctcttctggatgcaaatccatgctagagagtacttcagcaaattcccaagagttaacaccaatgagaaagagacaacaaccagagagcaagagcacgagaccttcgttccccagaccacccaaaagccagaagagcaagagccaaggttcatccctgaaacccaaaatggttatggcctttacggccacgagtcaggctcaagctcaggctcaggctcaagccggcccaatttcaccaccaaagaaacctatgaaccctatgtcacccctgttagattccaacctgatgaaccctataacagtatcctcgaatccttcaacaataaagacacttactactac

SEQ ID NO: 43720 - DNA, 370 bp, Gossypium hirsutum
  Clone ID: LIB3189-032-P1-K1-B8
gaaacaaaagatgctaatgtagatatataaatcatatatatatatcatatgctacaagccaccatttaatctctacataccacagacattcttgtcaagtagatttgatgaactaataaacatacaaatttcagtttatatatatatatatatatataatctcaagaacaagtaattaagttttttacttgcgcataagatgctcaaaacaccatatagctgcttaaaagatagcactcaaagagtgtataataagaacagaatctgcatagtgtacctctcaacatcgaagcatcggtgaagaagcttgattcccattgttgttgaaagggtgatcaccttctatggtgattggtggcttgggttcatt

SEQ ID NO: 43721 - DNA, 393 bp, Gossypium hirsutum
  Clone ID: LIB3189-032-P1-K1-C1
acgaaaatagtatattaggaatcaaagcttattactacagaagtacacatatttaacaaacttaactaccttaactaatcatgcatcatcacccacccgaccaaaacccacaaaggccaaaaaacctgtaaaaagaaaaagagacaaagacaaaatgccaagacaaaatcacaagtttcaaaaaaattaaacaaaataaaaataaaaattactgatcaagagcattaggcccagtacaataactcacaatatggtttcaaacccactgaaccaagtacctccggctgatcccattcatattatacgtggcaccatctttattattcaataactgtcctgtataagacccaccacctccaggtccatatatacccttacataaatccgcatttt

SEQ ID NO: 43722 - DNA, 339 bp, Gossypium hirsutum
  Clone ID: LIB3189-032-P1-K1-C10
gctatttcaaagtcaaaccaaaaggctacagacttgaaacaagaaacatcccaggataaagagggaaagtttctagatgatgatcattcacatgatacacctgctaaaatacttcgaaggcaacttagagatgatagacgtgagaagcgggccactgaattggtgaaacaagatgagaaagttaccgtgaaacttgaaagtgctgccattgaacgatccaaagctgtagactctgctgttttgggcaaatacaatctatggaggagagaaaatgagaatgttaactctgatttcacagtgcgcttgatgagggatcaaattataatgtcaaaggtttat

SEQ ID NO: 43723 - DNA, 319 bp, Gossypium hirsutum
  Clone ID: LIB3189-032-P1-K1-C11
ggaactggtcagcagagaagacttgataattattaagttttggtgatgaaattgagggtggattggaggattgtttaggtggtccagtttgataagttgcatgtcaagtcaactagttttcttctatgtaggtcaataaggatgtggtaatgtggctgatggaggcccaccgatagtagtctgggaatggctaagttaacatgcttttgcatatgtcaaagagtgacatacttcatgtcccattgtgggggaatttttatgggtcatttggtatctgtaaagggaatgggtttttgggcccaaacccacttttttgctt

SEQ ID NO: 43724 - DNA, 460 bp, Gossypium hirsutum
  unsure (1)..(460): unsure at all n locations; Clone ID: LIB3189-032-P1-K1-C2
gcttaataataagtttttgttcttatcagctttgttttgcattgctgtagctggcgttttaggcgcaagctcctcctactcctagtaatcctccgacatccacgccggcgccgccgactccacccgcttccacacctccacctactactcaaccacctccaacacccacaactacttctccgccaccagcttcctctcctcctcctacttcatcaccaccaccagtttccactcctcctccagcgactcccccgcccgttagctccccaccaccagcttctccttccccggctactccacctnccgcaactcccccaccggcttttccaccttcggctaccccaccacctgcttctncccctcctgctacttcttctncagctaccccaccaccagcttctttggctttttcttctgccacggttccagcttcggcccctagcaagaccaaagctaagtc

SEQ ID NO: 43725 - DNA, 442 bp, Gossypium hirsutum
  Clone ID: LIB3189-032-P1-K1-C3
ggttggcatccttcggcagctggtatagccgtggccacccttcattcttgttatgcaaatgagataaaacagttcatctcaggtattatggagttaactcctgatgctgttcaagtcctgagagctgcagataaacttgagaaagatcttgttcagattgcagttgaggatgcagtagacagtgaagatggtgggaaggccataatccgtgagatgccttcttatgaggctgaaacttcaattgccaatctggcttaagggttggttcttgacaagtttttatcagtcttaagttatgtgatgcctggaatttgctacttatgttgttttatcctaatacttatttattagggttttcttcgttttatatttgtatttttgtttattattgattagttcttttatttcttatctatactttatacttttttgtcttatttac

SEQ ID NO: 43726 - DNA, 418 bp, Gossypium hirsutum
  Clone ID: LIB3189-032-P1-K1-C4
gttctagatcgcgagcggccgctcgcccacgcgtccggataatccgaaaaattggccattttcccctcgcaatcttcctcattcaccatcaacactccatcgtcaatccctgctgtcatcacaccaaatctaaaaccacacaccaccaccatggcgccaccaccaccaccgtcagtttccatgtcttcttgaattgctcttgctctgattcttcctttgctcttcgattgcgtgtttgtgtaagttgattgaaacaacccaacgggaacaaagtattgatatcgtgtgtgttttggatttttttaataacaataaattattgttaagaagagatgaagttctgcaagaaatatcaagaatacatgcagggacaagagaaggaactacctggtggtggtttcaggaagcttaagaagat

SEQ ID NO: 43727 - DNA, 98 bp, Gossypium hirsutum
  Clone ID: LIB3189-032-P1-K1-C6
ttccggaacctgatccagcagagaagcctgagtaaatattaaagcttttgtgatgaaaatgagggtggcaatggaagattgttccaggtggctccagt

SEQ ID NO: 43728 - DNA, 260 bp, Gossypium hirsutum
  Clone ID: LIB3189-032-P1-K1-C7
ctcaaatcaatatcttattaatgcttaagtggcttgactgctacactacttaactggggggggatttttttttattttctgtatctttaattttttacattattttgttattaatgtgtaattcttttttttttttttctttttattatatttttattctttatttttttttttttttttttttttttatttgttttttttttatttttttttttgtttgattttttttttttttttttttttttttttttttttttttt

SEQ ID NO: 43729 - DNA, 52 bp, Gossypium hirsutum
  Clone ID: LIB3189-032-P1-K1-C9
tcggagacactagggtaataccaaaatttggtattagctcaacttttgtatt

SEQ ID NO: 43730 - DNA, 105 bp, Gossypium hirsutum
  Clone ID: LIB3189-032-P1-K1-D1
aacaaattgaggatgaaactatgaagtttgcacattatttaggtattaaggttgtttcaattgttggtggtcagtcaatagaggaacaagggtttaggattagac

SEQ ID NO: 43731 - DNA, 247 bp, Gossypium hirsutum
  Clone ID: LIB3189-032-P1-K1-D2
actaaacggagtttgaaagctttagtctcagtggcatcaaagtgacagaaataaactgcataaagatatggcattggatgacaagctactttctttggagattcaatctcctgaggggattctaaaattgtgtaactttgaaagagtggggttgttatggtgggactttctatctgtattaagtatcaagtaattaagcaataaaaagtatgtattagagttaaaatttattagtattgatttttat

SEQ ID NO: 43732 - DNA, 430 bp, Gossypium hirsutum
  Clone ID: LIB3189-032-P1-K1-D3
cccacgcgtccgcccacgcgtccgcccacgcgtccggaaaatatctctctcttcactttcttctcttttcaacgcagggtgaaaggcggggaggccgtagacaatctctcttgcgctcttctcgtagaatggatcagattcaacatccaactgtcatgcagaaggtagctggccagctcctttcttctagcatttcccgagattttcaagggtatgatgggtctttcaggaggcctgccctataccaaggacattttgcatatgggaattattccaatgctggaatgcactatcctattgttccatcaacagctaccgccatttgtgttcaagcccctgcagagaaaggatttaccagctttgccattgatttcctcatgggtggagtttctgctgctgtgtcaaaaacagctgctgctccgattgagcg

SEQ ID NO: 43733 - DNA, 209 bp, Gossypium hirsutum
  Clone ID: LIB3189-032-P1-K1-D4
cagccctaaataaaaccgatgagaaatttctttgaaaaaaaaataacagttcattgttcaggaatcacagctttatcccagacgaaaccaagcacttaaacatagaaaaccaaacgttcatacgcttaattacatgatgcctgcctgcctgtgttctatcccttacctgtatttaaacaagggtcttcctggttagaaagtgtggatta

SEQ ID NO: 43734 - DNA, 316 bp, Gossypium hirsutum
  Clone ID: LIB3189-032-P1-K1-D7
cggacgcgtgggattcccttccttcatcgctgaatagccattccattccacgggagtgttttttttcccttttcatttttttccctcagcttcatcttcttctttcctttccatatctgtgtctcccttttttccttcttatttccctttatcttatttcccttttttccttcattactgatgttgaaattccgctgtaagatccattaaaatgacattcttttcatcttcaagaatcatatattgtgaaattcatgattgctcatttttctctctcataatttatttttattatcgtatatggctattttctctt

SEQ ID NO: 43735 - DNA, 173 bp, Gossypium hirsutum
  Clone ID: LIB3189-032-P1-K1-D8
tttttttactgttaatttccatcgcttgtaagcagtgattgttagcatgcatacaaggtgttttgcaccttgtcgggtagaagggatgagaaccgaatccatccttttctgtaaatccgggattttatgccctctccatgtttcttttaagccgactttattagttttatttc

SEQ ID NO: 43736 - DNA, 55 bp, Gossypium hirsutum
  Clone ID: LIB3189-032-P1-K1-D9
aggatctagatcgcgagcccttactctattttccttacctacattcccaacttat

SEQ ID NO: 43737 - DNA, 95 bp, Gossypium hirsutum
  Clone ID: LIB3189-032-P1-K1-E1
gttctagatcgcgagcggcctcccttattactttttacctacattttccaaccctaaagccttgggtgatggcttattcttcttatataaactac

SEQ ID NO: 43738 - DNA, 148 bp, Gossypium hirsutum
  Clone ID: LIB3189-032-P1-K1-E8
gagactggcaaaatttgaccaattggggctctgaattttagttccttttttttttccctcttttatacagtcatctgctccaattctgaatacccattgtctagtttgtttaaagatcatatctttgatacatcctcggatttttttt

SEQ ID NO: 43739 - DNA, 138 bp, Gossypium hirsutum
  Clone ID: LIB3189-032-P1-K1-F1
ggatttctaactttaacacaagcatataagttcatttattatctgaatgaatttactcacatggggtacggtgatagttaaaattgatgtaaaacctttatgtcaaatcgtcttaaggactcttttaaattgctttat

SEQ ID NO: 43740 - DNA, 325 bp, Gossypium hirsutum
  Clone ID: LIB3189-032-P1-K1-F2
cccacgcgtccgaaaaaaaaaaaaaaaaaaaaaaaaaaaaaaaaaaaaaaaaaaaaaaaaaaaaggagaaaagataaaaaataataaaaaaagtgggctgccggtccttcggtttcataggttccaaactggggtgtccgtttttgaggctccttgtttcttgtcgcgtgcttgcaaaaattggccgttttttagcgtcctcgaaattgattaattggccgttttttcccacttttaagtttgggaaacccctgccctttcccatttttccggcttggcaaaaatttccttttttttcgcctttcttattattaaagaggcccgc

SEQ ID NO: 43741 - DNA, 452 bp, Gossypium hirsutum
  Clone ID: LIB3189-032-P1-K1-F3
attaaagctcatgaaaataggaaacagttattctccaaaagtacaataagagagaacccgtttcaacatcaaacgagatccgtagctgagccacctccttggtctagttcttcaaaggtccccacgagttcaccactgttaggaccgccaccaaatggagttcaagctggaagccaactgagacgaaggccagctgtggatggcacgccttcaaaccacatggaaatgcctatgttgcaacaggtagttcccaggcaagaggaatactctcaaggtagatcagttgcacttcaaaatgtcgaatctacaatttcagaacttagtgggatctttacacatctagcttcaatggtttgcacatttaaggtgaactagctttcaggattgatgaagatatggatcaatcattagctaatgtcgaaggtgctcgtagtgcttctattgggcatttt

SEQ ID NO: 43742 - DNA, 354 bp, Gossypium hirsutum
  Clone ID: LIB3189-032-P1-K1-F7
gccaacccgagattttctattttccgattctttttaggtctttttcccaattttttgggatttctaaaacagaaacaaataggtgtctcaatggcagaagagagcggtgcccctgtaagttgtgctgtttttcccgttaaaaggcccagagatgacgaataaaattgggtctcttttgctgctgttgtagtattccatgtatatgtatagcattttcttttaacacttttcaaggtagtttgttatttattttctttattattttatatgtttgttattttaatttttttatacttatttggccatttatgttactcatttttatatttcttaattttatttttcattttttat

SEQ ID NO: 43743 - DNA, 305 bp, Gossypium hirsutum
  Clone ID: LIB3189-032-P1-K1-F8
ttccacttcaatttttttccctctctctaacagcgacgatcgatttttattaattttgtttgccgtcggatctttggttttccattttgattcaatcaggattgcttcgttttgaacccaggcgacgatgaagaaggctatcggtcaaactgttagagagcttaagagagaggttaataagaaagttctcaaagttcctggaatagagcagaaggttcttgatgctaccagtaatgagccatggggtcctcatggatcactttttgcatatattgcaatggctacaagaaactatcatgagtttt

SEQ ID NO: 43744 - DNA, 160 bp, Gossypium hirsutum
  Clone ID: LIB3189-032-P1-K1-F9
aaagttccatgtgaacggcacttgcacatgggttagtcgatcctaagagacgggggaagcccgtccgacagcgcgtccagcgcgagcttcgaaagggaatcgggttaaaattcctgaaccgggacgcggcggctgacggcaacgttagggagtccggaga

SEQ ID NO: 43745 - DNA, 408 bp, Gossypium hirsutum
  Clone ID: LIB3189-032-P1-K1-G1
cgcttatccttttgcttgtttcctctgcttttagtcctgcaaatcctcagatctactttcgcctccctgctaagcttccttttttctcctttcctttagattttagctctgcaattcctcagatctactctgtccgtcttgctcatgtgcgcttctcggagaactgagttattccaaaaacagataagcttatttttaccagacacaactttgcgcccgcgaggtctgctcggaggtcaaggttggctttagatgtatcggtcgtcgctgtggaatacttaaggtgcacacagtatgcaggcggttaccgtaagctacaagcagctagcatgcacctgctgatcggagcctattatgtttcagctggctctggctatgatgacacagctggcatggagcatcatgcca

SEQ ID NO: 43746 - DNA, 201 bp, Gossypium hirsutum
  Clone ID: LIB3189-032-P1-K1-G2
gcatttctctgttgaaggtcagctcgagtttaaggcgattctgtttgtaccgaagagggctccagtttgatctctttgatacgaggaagaagatgaacaacatcaagctatatgttaggagggtgttcattatggacaattgtgaggagcttatccctgaataccttgggttagtgaaaggtgtcgtggattctgatgact

SEQ ID NO: 43747 - DNA, 406 bp, Gossypium hirsutum
  Clone ID: LIB3189-032-P1-K1-G3
cagaaacaacaagggcttacatggttcctttagagggtgctgacggaacaaaagccaaagcagtagcagtctgccacacagatacatcagcatggaaccctaagcatttggcttttcaagtcctaaaagttgaaccaggaaccattcctgtctgccatttccttcctcgggatcacattgtttgggtccctaagtaaaaatcctgaagagtagattcatacactataagtttcatcatagtgtgcattaaaacagcttaaagcaatatccagtttgttctataataatatacccacgagtttagttatgtgaaatctatccatgaatcatgttcttggtaatggataaaatgatattactttctgtatcacaatggtttggtgataaatgtattagtatttgaagt

SEQ ID NO: 43748 - DNA, 460 bp, Gossypium hirsutum
  Clone ID: LIB3189-032-P1-K1-G9
cgaatttccccagattctccctcctcccaacccaatttgaagagagtaaaggaagatcccgaaactggggggttcatgaatttggatgaaaaccttttgtacgaggttctgaaacacgttgatgccaggaccttagcaatggcctcctgcgttagtaagctgtggctcaaaactgctagagacgagcgtctttgggagttgatctgtaccaggcactgggctaacatcggttgtggaacccaacagcttagatccgtggttttacctctcggtggtttccgccgtctccactcccgttacctttggccgctttccaaaccccaagctgcttcacctttgccttgggctccgcccaagattataaattccaagccgcctgcaccggggggaaaagatgaggttcacctttgtttggcttttctctttatacagttttatgagaagaagcattttacaagct

SEQ ID NO: 43749 - DNA, 341 bp, Gossypium hirsutum
  Clone ID: LIB3189-032-P1-K1-H1
gcaccctgtgcttttcacggaagcaacctctcaaccccaaggccaatagagaaaagatgactcagatcatgtttgagaccttcaacgtacctgctatgtatgttgccatccaggccgtcctctctttgtatgccagtggtcgtacaacaggtattgtgctggattccggtgatggtgtttctcacactgtgccaatctatgaaggatatgcccttccacatgccatcctccgtcttgaccttgcaggtcgtgatctaaccgatgccttgatgaagattcttactcgagagaggttacatgttcaccatcactgctgaacgggaaattgtacgtggcatgaa

SEQ ID NO: 43750 - DNA, 441 bp, Gossypium hirsutum
  Clone ID: LIB3189-032-P1-K1-H2
gctttgaagatagtattagcatgctggtttcttctgcagtcccagagggtaaaggagtatcgtcttccgccgccgtggaagttgctagcatgtcagctatagcagtcgctcatggattgagcattagtccaagagagcttgccctactctgccaaaaggtggagaatcacattgtaggagccccatgtggtgttatggaccaaatgacttcagcatgtggtgaggcaaataaactacttgcaatggtttgtcagcctgctgagataattggtcttgtaacaattccaagtcatttccgattttggggaatcgattcaggaatacgacacagtgttggaggtgcagactatggatctgttcgaataggagcctttatgggtcgaaagattataaaagctacagcatcaactaggttgtctcaatcaatgtctactgctaatg

SEQ ID NO: 43751 - DNA, 447 bp, Gossypium hirsutum
  Clone ID: LIB3189-032-P1-K1-H3
cccacgcgtccgctttttttctcaccaatatctgctctttttcgtcattctcagtcaaagtttcattctcttccatgctatcccttctcaatttctttaagtggttccaatgcattttccggggtttcttgtatcttatcacagtaaaaagagatcaaaggcatggaggaaaggtttctgaagaaaccacccatgtcatcaacacatcgaaacagggctctgtctttcagcttaacccccaaggcaccttctccaatcaaatttcccataacctgccagtagttggttttaaagacccaaaggatgaagaaaccgagttggaattcgatgtaggggaccaagataacattacaccctgcacagagttgaagagcatagtggctggagaagatgattctcagcttcaagtatcttcagagaccgttatcaatgatgatcatagcattc

SEQ ID NO: 43752 - DNA, 166 bp, Gossypium hirsutum
  Clone ID: LIB3189-032-P1-K1-H8
cgcattttattttttctttttttttttcccacactttttttaaaacccattagctaagaatgcgctggtttctttctgtgttgcttgctattatcggagttacttcacttcatttttataactttttatttatttaatatctatatatttctttactttttatttt

SEQ ID NO: 43753 - DNA, 432 bp, Gossypium hirsutum
  Clone ID: LIB3189-032-P1-K1-H9
gaccattttgtccttcatcttcccaattagatcccgtttaactggtctgcaatccttggtctttgatccgcaaagagaatcagttacacttcaaattatcgaaaggaacttttctttttgcttttattttagttatgttgggggcaggattggaattcaggagaggtcgtggagaagatcggttttacaatccacccaaggcgagaagagagaaccagaatcagcaaaacgatcaaccgtggagggatcaagccgatgtttcaccgagtctatcaaaggataaatccaagtctgtcatagggattgttttaacttgaccattccaaagcggtttccattctcgctaccgaacccaatgtttcttctttgagtaatatagaaaggtttttggaattggttcaatcctttccgtccctgccctttttctttttt

SEQ ID NO: 43754 - DNA, 158 bp, Gossypium hirsutum
  Clone ID: LIB3189-033-P1-K1-A10
gagacatggcaatgccaagatatcgtccccttcatctctgtctactcatcttgctcatctacaccactccttccataggaggactcaatggcaccgagctcctcaaggcggcctgcaaccaaacgtccgactacgcattctgctatgctattttaact

SEQ ID NO: 43755 - DNA, 404 bp, Gossypium hirsutum
  Clone ID: LIB3189-033-P1-K1-A11
cctgtacaaagatttcatgatccagcctccttgggatacagaaataggtaacaagttcatcattcattacacatatggatgcgactatgatttgaagggtaggttaacctatggaaagattggagaatggaggttcgataaaagatcatttgatactgaagcaccaccaagaaaccttcccctgcctcctcctggtgttccggaaagtgtggtgacactggtgaaaatggtaaatgaagccacctcaaacattccaaattggggttcatagaaaagggaaaaaggaaggttaggggtgcaattgcaagatataggcaaagagggctcccttcatttcagttgttagctgcagatattgggttggtcatgggtgggaaagaaagaaagggagtgtttgggtatat

SEQ ID NO: 43756 - DNA, 283 bp, Gossypium hirsutum
  Clone ID: LIB3189-033-P1-K1-A12
cggacgcgtgggcggacgcgtgggattttgtgtgaagcaaggagaaccccttaactccttgcatgtgtaaagcttgatagccacttttttcttctcggtacttgtttatgcacgttgagcttcatcgaaatgaaactgtatttaacaaatgaagatgcttttagtatctgaaagctacaagggaaaagagcaaccgattaaagttcttaacctttaaaaaggagtacggtagagggtattgtctgatggaagccaaaaccaggaccagccagcaatgctagca

SEQ ID NO: 43757 - DNA, 114 bp, Gossypium hirsutum
  Clone ID: LIB3189-033-P1-K1-A3
caagtattttccttacacgtttgtttttcttgtgattaatcgatatggctagctcaatgtcccttaaacttgcatgtgtggtggtgtagacacaaaggaaaattcttaaatatt

SEQ ID NO: 43758 - DNA, 353 bp, Gossypium hirsutum
  Clone ID: LIB3189-033-P1-K1-A4
attaccgcaatcagggtttgatatttcccttttttgcatttttcacatttttgaagaaaatacttagagagggtaatttagaatttcaatctgaggtaggggtttttaaagcttccaatggcgtttttaggcgacgcgctacggcaagcgtttatgccgaagcacgagtacgagagcctacgggaggaagataaagcttggacgaagctacaaaggccgatcttaatcggttccatagtgatcatttgtgttgcgatcttcgttggcatgattataagcttgaagattgtgttttcgggagatgatttgaagcgaccgttttgcgatgaccggagactgcagcctttgccgtt

SEQ ID NO: 43759 - DNA, 335 bp, Gossypium hirsutum
  Clone ID: LIB3189-033-P1-K1-A6
atggtttgatgagagctactgatgtgatgattgccggcaaggtcgccgttgtctgtggttatggtgatgttggaaagggttgtgctgctgccttgaagcaagccggtgctcgtgtcattgttactgagattgatcccatctgtgcccttcaggctcttatggaaggacttcaggttttgaccctagaagacgttgtctccgaggctgatatcttcgtcaccacaaccggttacaaggacatcatcatggttgatcacatgaggaagatgaagaacaatgccattgtttgcaacattggtcactttgacaatgaaatcgaaatgctcggtcttgag

SEQ ID NO: 43760 - DNA, 323 bp, Gossypium hirsutum
  Clone ID: LIB3189-033-P1-K1-A8
gacggatcgacggtgagagccttcgtgactgacgaccaacagttcacgaagagcgtggatgagcgtttcgcagctcttgacctcaacaacgacggtgtcctctccaggtccgagcttcgcaaggccttcgagtctctgcgtctactggagtcccacttcggtgtcgacggcgccactccccccgacgagctcactcagctttacaacttcattttcgagaggtttgattgcgatggcagcggcaccgttgacctccaggagttcagatctgagaagaataagattctgcttgctattgctgatggattgggatcctgccctat

SEQ ID NO: 43761 - DNA, 98 bp, Gossypium hirsutum
  Clone ID: LIB3189-033-P1-K1-A9
ttttttttaatacagaatggaattttcgataaaagaatcacatgagaagtttctttcaacatacataggaaaacagaggtattccccaaatcaacgct

SEQ ID NO: 43762 - DNA, 421 bp, Gossypium hirsutum
  Clone ID: LIB3189-033-P1-K1-B1
ctagcaccaatatcaaagcccgagggacataaacttcaatttttgtgataagttagactaggatgaaaatgaatagcaaaagaaatgcactatctaatgccattcaattccattttacaaattggaatgaatatttacataaccaagaatcgaaatcacgacatatattattcattatccatcctacttccctcattagtaccagggatatgaatccagcaaatcttgaaatcaacagtcattaccaattgagtgctgaaacaaacctacaacaacaaatttgcttttcgcttaacatcgccaccatcaacaaatttttctatgacatgttcagtttagtcaccattattcttaaaatcggatctaatgtcttcagccaacatttccttatatttgcatttgtttcattatcattgagcat

SEQ ID NO: 43763 - DNA, 324 bp, Gossypium hirsutum
  unsure (1)..(324): unsure at all n locations; Clone ID: LIB3189-033-P1-K1-B10
caaaacagagaaaatggctgcatcttcccttataatctccccaagaaagcttcgatccgatctctactgttattcctatcaacgtgatgcaaacaccccactggttatatcagttcttgcttctcttatcgagagaacaatggcaaggaacgaaaggattgtcaagaactgtaaatgggcattgacgagaaaagatttcaggagcagggttttcgattgccacgaaacacccgacatgacgattcaatcttacctagagagaattttccgatacaccaaagccggtccctcgatttatgtggntgcttatgtgtatatcgatcg

SEQ ID NO: 43764 - DNA, 378 bp, Gossypium hirsutum
  Clone ID: LIB3189-033-P1-K1-B2
cacggggggtagttctctctccatttttctccacttcaaagctttttactttctgagctgaggaaagaaaaagatttctctcagatcttcaagagaaaacaattatctccgtttatctgaagtagaataaggataagaagatgggaacattggggaaagcaatctacacggttggattctggatccgagaaaccggccaagccctcgatcgccttggatgtcgcctccaaggcaattactacttccaagaacagctgtcgaggcatcggacgttgatgaacgtattcgacaaagctccaattgttgatagagatgcctttgttgcacctaacgcttttgtcatcggcgatgttcaagtttgacggaggttcttctatc

SEQ ID NO: 43765 - DNA, 287 bp, Gossypium hirsutum
  Clone ID: LIB3189-033-P1-K1-B3
gctttatttcatgttcttcatcttcttcttttagttgttcatcaattaagcaagcttatagatgggagccatggcggaaaagaaatggattctgatactttttttaactttcatcattgcagtgtctcaagttcaccatttatacatgggggaactagcaagcataatgcttgaaaagctttaacaatggcggaaaccattcaacaatggtggaaagaacttagcaattggacctaacttaacagcttgtcattcatcgtacggtcgaccagatcttatcgtatatt

SEQ ID NO: 43766 - DNA, 309 bp, Gossypium hirsutum
  Clone ID: LIB3189-033-P1-K1-B7
gaaagaaaagaaaaatggttctgctctagaaactttgggatgatgtagtggacggtcctcaaggcggaacgtggccttggccggctgaagaagatcaccaccaccccacccttgtccaccaaagatcaggcttgatgaatggcgatgtcgacgagtccgacgacacctgtgacaccattgactcacgtgtcggctagtactgacaacgtgtagaggagcgtgttcaatccacgttgcaaccttgcaaccaagggtattggcgctcgagttttccacacgcctcaacctaactcttctactgttatgact

SEQ ID NO: 43767 - DNA, 58 bp, Gossypium hirsutum
  Clone ID: LIB3189-033-P1-K1-B8
aaaaaataagataaattctcacttcctacactaccaaacaaaagttttcaaactcttc

SEQ ID NO: 43768 - DNA, 305 bp, Gossypium hirsutum
  Clone ID: LIB3189-033-P1-K1-B9
atttgaagccttcttcgaatttcctcattcaagatgcaaattttcgtcaagaccctcaccggagggaccatcacattggaggtggagagttctgatactattgacaatgtaaaggccaagattcaggacaaggaaggcatccccccagaccagcaaaggttgatcttcgctggtaagcaacttgaggatggccgcacgttggctgattacaacattcagaaggagttcacactccacttagtgcttctcctacgttgaggaatgcaaattttttgttaagaacttttacttgtgaagaccattac

SEQ ID NO: 43769 - DNA, 231 bp, Gossypium hirsutum
  Clone ID: LIB3189-033-P1-K1-C1
accacgcatacgttctgtaaaaggattggctctgatggctgggcacgggggtcccagtcccgaacggtgcatctgcctgcgcactgcgcgagctgcttccgcggcgagagcgggtctcctcgtgccggccgggggacttactgggaacggctccctcgggggcctttctccgtcgacgaacagtcgacttagaactggtacggacaaggggaatcctactgtttaattaaa

SEQ ID NO: 43770 - DNA, 440 bp, Gossypium hirsutum
  Clone ID: LIB3189-033-P1-K1-C2
cccacgcgtccgcccacgcgtacgattttccttctgctaccttctctcaacccaaacacatatgtggcgggaaaaagaaaaagcttgagcgaacaagaaaatggccgatcagcttaccgacgatcagatctttgaattcaaggaggcctttagcctgttcgacaaggatggagatggttgcattactaccaaggagttgggaactgtgatgcgatcactctggcagaaccccactgaggcagaactgcaagatatgattaatgaagtcgatgcttatggaaatgggaccatttgattttcctgaagttcttaacctgatggcaagaaaaatgaaggatacagactctgagggggagcttaaagaggcattcagggtgtttgacaaggataagaatggggttatttctgcaggcgaactgcgccatgtcatgacaaacctt

SEQ ID NO: 43771 - DNA, 253 bp, Gossypium hirsutum
  Clone ID: LIB3189-033-P1-K1-C3
ggctgccagaaggatttcctctctcttatcttcttctgcaacttctttgggaaggttttcaagtgggggaagaagaattaatagctttagtactgctgctgctgcgattgatgaacctatacatccatctattcaagtagatcatactcagcttctcatcaatggacaatttattgatgctgcatcaggaagaaccttccctacagttgatcctaggacaggagatgtaattgctcgagttgcataaggagat

SEQ ID NO: 43772 - DNA, 428 bp, Gossypium hirsutum
  Clone ID: LIB3189-033-P1-K1-C7
cgggatcctggcttcggtgctttcggagaatccagattttcatttggactttttctttcggctgtgatcaaggatgattcactttgtacttttaattagtcgacaagggaaagttaggttgacaaaatggtattctccttattctcagaaggaaagaacaaaggttatccgtgagctcggtggggtgattctcaatagagggccaaaactctgtaattttgtggattggagaggatttaaagttgtttataaaagatatgctagtccttacttctgcatgtgcattgatcaggatgacaaccaattagaggctctagaaatcattcatcaacttgttgagatacttgatcgatactttggcagtgtctgtgaattggatttaattttcaaccttccataggcccattatttattggatgaactcttac

SEQ ID NO: 43773 - DNA, 193 bp, Gossypium hirsutum
  Clone ID: LIB3189-033-P1-K1-C8
atatatactagcttaaaggatatgtgtcgatgctcttgactactagagacatacaatctcgggggtgatggcatgagatatacactgaaaaatccaggtgcgataaatggggaagatatacttggcagcaagcgtgatttaggtatttctggatatggaggggaacgagaaacgataaccttgagcttataat

SEQ ID NO: 43774 - DNA, 341 bp, Gossypium hirsutum
  Clone ID: LIB3189-033-P1-K1-C9
ggtttccgccgcgacggtggttacggcggctgacgagagtgggttagcgaatgagtgcagcagagatttccagagcgtgatgacttgcttaagctttgctcaaggaaaagcagcgtcgccgtcgaaggagtgctgtaattcagtggcggggattaaagagaataaacccaaatgtttgtgttatattttgcaacaaacacaaacctctggtgctcaaaatctcaaaagcttaggtgttcaagaagataagctgtttcagttaccatcggcttgtcaattgaagaacgctagcgtcagtgattgcccaaagcttcttgggttattttctagctcaccagacg

SEQ ID NO: 43775 - DNA, 283 bp, Gossypium hirsutum
  Clone ID: LIB3189-033-P1-K1-D1
cttcgaagctctttgtttaaaaattttcaaatttaatttttgcatattaagatctaaccttttcaggtgcagacgcactctcagatcccagctctagaacttcaattctctccctaaaagtttggagacaaatgggagaaacacgagacaacgatgcctacgaggaagagctcctcgattacgaggaagaagaagagaaagcccctgactctggcactgctaaagtcaatggcgaggccggcaagaatggctatgttgggattcacagctctggattcagaga

SEQ ID NO: 43776 - DNA, 221 bp, Gossypium hirsutum
  Clone ID: LIB3189-033-P1-K1-D2
ctactaacctatgtgtgcaaaaatacccaaatctaattttgccacatccagatctaccctatgtgtgcgcatacgcactactaaatgcgatccttaacaccatactgtctcttctaaaattttagctacactttacaattatcacgatacatccatcacctcctagaaatacctccttgtgttcttgattcaattaaactatccccctttttcaagttttc

SEQ ID NO: 43777 - DNA, 215 bp, Gossypium hirsutum
  Clone ID: LIB3189-033-P1-K1-D7
cccactcgtacggttagaatccccaattttctcctctgaagaaatacccttctaattatagtatggtctttttatacaaaagactccgatcttttaattttactattattataaaaaatcgtgccaaatccgcatctataatacacaatttaccgcagataagacggctataattaactctgtactcgaaactgtggaaagtatctagggctttt

SEQ ID NO: 43778 - DNA, 383 bp, Gossypium hirsutum
  Clone ID: LIB3189-033-P1-K1-D8
cctatttttactattaaaatttattataaaattatatataaaaaacatttttatatttaaatatgggacttattatataaaattatttatattttaattattatttttattatatttaaacaattaattatatttttttatttatttaatatactatttaatattattctttttattaaatttttacttaaattttatttaaagtattatttccttattaaatttatatttttaaatatatttaaattattttttatattttttaatttatatatattctattaatttaaatttatttattatattaataatttttatatatatattatttatatttatataaattactatttttttataatatatataataattattatata

SEQ ID NO: 43779 - DNA, 387 bp, Gossypium hirsutum
  Clone ID: LIB3189-033-P1-K1-D9
agccactctctgctcaactcgccaatgggggcttataagtacgtgtcggagctatggaggaagaagcagtcggatgtgatgaggtttttacagagggtgaggtgctgggaataccgccagcatccatcaattgttagggtcaaccatcctactcgccctgacaaggcacgccgcttgggttataaggccaaacaaggttatgtggtttaccgtgtccgtgttaggaggggtggtcgcaagaggcctgttcccaagggtatcgtgtatggtaagcccacaaaccaaggtgtcacccaattgaagttccagcgcagcaaacggtctgttgctgaagagcgtgctggccgaaagttgggaggtctcagagttgttaactcgtactggatc

SEQ ID NO: 43780 - DNA, 306 bp, Gossypium hirsutum
  Clone ID: LIB3189-033-P1-K1-E1
gtattcttccaccctctcttccgcaaacacttaatctcaaaattttctcaggaaagcgagggtgggttacaaacacagctatgtagtggggcaccaatcaacatctatcgagatctggcatccagacgggcattggtttctaggcaaaaccttatctgcggcacacaagactcctctcatgcagctgactcttgcatttttcatatcaacacgcgagtcttcagctatcagcggttagaccacgccctcggttctcctagggatacgcctgagcgccttgaaaggtggctaaaacatggctacata

SEQ ID NO: 43781 - DNA, 356 bp, Gossypium hirsutum
  Clone ID: LIB3189-033-P1-K1-E7
accagttggtaggtagagcttgtggttgatagagagaaaagatgttttacttgtaaaagacctgactctctaaacacttatctctctctctctctctctctcaaaatcatactagaaaagagcaaaaaaggtatagagcaagtgaacgttgtttggacagtgctggggggttggtgtgtgcgctttctattatggatagctatgaagcaaccagaattgtgttctcaagaatccaaaaccttgaaccagaaaacgcttccaaaatcatgggtctactgctgattcaggaccatggggagaaggagatgattcgtttagcctttggtcctgaagcttcacttcagtctgtcatcctc

SEQ ID NO: 43782 - DNA, 350 bp, Gossypium hirsutum
  Clone ID: LIB3189-033-P1-K1-H1
cccacgcgtccgattccacctgaccaacaacgtcttatcttcgccggcaagcaactcgaagatgggcgcaccttagccgactacaacatccagaaggaatccactctacaccttgtcctccgtctgaggggaggtgcgaagaagagaaagaagaagacctacaccaagcccaagaagatcaagcacaagaagaagaaggtcaagctcgctgtcctccagttttacaaggaggatgagtccgcgaaggttcatagactgagaaatgagtgccctaatgcggaatgtggcgcccggaccttcatggctaaccattttgataggcactattgctgcatgtgtgagctcactta

SEQ ID NO: 43783 - DNA, 380 bp, Gossypium hirsutum
  unsure (1)..(380): unsure at all n locations; Clone ID: LIB3189-033-P1-K1-H2
cccacgcgtccgtagccagccctttccaccagtaaaagagaggctgaggctttgcaaaactcaggtatgatgcctttgattagctcacttgtttgggttccttttctccttcttcccctgctgctgctgctgctactctccaagcagaagacccatcaagttaagaaagaacacaattacaagcttcctcccagtcctcccaggctaccaattataggtaacctgcaccagcttggtgaattgccacacagttctctttcccaactttctcgcanatatggtccagtcatgctccttcatctaggtcgtataccggtgcttattgtttcatcagccgaggcggcgaaggaagtcttaaaagtcaatgatcttgcttggtg

SEQ ID NO: 43784 - DNA, 394 bp, Gossypium hirsutum
  Clone ID: LIB3189-033-P1-K1-H7
gacccacgcgtccgcccacgcgtacgcataatctcagctttgattcaaatcgaaacctgatagctggattagaatctgaaggtaaggtttgtgtattcgcgcagactaattcttttttcacccaaataatattgtctaatattcatcctacaaacatagatgaaggtaaatataatttaatgctatttatcagcccaatttgagaaactttttataagcctggccagtacgacttttctaccgccgatagctataacaatggggaaagaagggtttctttttcgtcactgaaaatcgaacaaaaaatggcgatggcgagcgtgcgatctggtcttctccgaaccgccctttcgggcggatcttgttcttctgctcctcccaagcgaggcttttt

SEQ ID NO: 43785 - DNA, 339 bp, Gossypium hirsutum
  Clone ID: LIB3189-033-P1-K1-H8
cccacgcgtccggatcaattttcttagacctggtaagaatctcaaaaaatatggctcctggggtgttattactggaccaactgatggtatcggcaaaggatttgcctttcagctggctaggaaagggcttaatcttgtcttggtgggccgtaatcctgataaactcaaagacgtttccgattcaatcttggccaagaatgccaagattcagatcaagacagttgttgtggacttcactggcgatcttgatgaaggcgtgaagaagataaaagaaactattgaaggactggatgtgggggttttgattaacaatggtgggatttcatatccttatgccag

SEQ ID NO: 43786 - DNA, 377 bp, Gossypium hirsutum
  Clone ID: LIB3189-033-P1-K1-H9
gtccgaggaaattgcacaggttggaacaatatctgcgaatggagaaagggagattggcgagctcattgccaaggccatggagaaagttggcaaagaaggtgttattaccattgctgatgggaaaaccttgtacaatgaattagaggttgttgagggaatgaagcttgatagaggctacatatccccttactttatcaccaaccagaagaaccagaaatgtgaattggagaacccacttattttgatccatgagaaaaagatctctaacttgcctgctttggtgaaatttttggaattgttcttgacgaagcaaaggcctttactaattgttgctgaagatcttgaaagtgaagcacttgcaactcttatttttaaca

SEQ ID NO: 43787 - DNA, 472 bp, Gossypium hirsutum
  Clone ID: LIB3189-034-P1-K1-A1
cggacgcgtgggtcttcaccgagactttgatcaccaaaccaaaaatcgaacacgaaattcctctttttccccagatctggacccgtcgccggtcttagcaacctccgatccaatcatttcacctattgatttcaattcattaaacgtgtgacgcgacccactggatcgaagatgccggtggccgcttctgccatctacttcttgaatcttcgtggcgatgtcctcatcaatcgtctctaccgagatgatgtcgggggaaatatggtggatgccttccggatgcacattatgcaaacaaaagaactcggaacttgtcccgtgagacagattggaggttgctctttcttttacatgagaatcagcaacgtatacatcgtaattgttgtcagcagtaatgctaatgtagcttgtgctttcaagttcggcgttgaggctgttgccttgtttaaatcattttttggtggcgcttttg

SEQ ID NO: 43788 - DNA, 392 bp, Gossypium hirsutum
  Clone ID: LIB3189-034-P1-K1-A2
cccacgcgtccgcgaaattggcagaaaatgaaggtttccgtcaaaactctcaaaggcactcacttcgatatcgaagtcaaaccagaagatgcggttgcggatgtaaagaagaacatagaaactgttcaaggggcagatgtttatcctgctgcacaacaaatgcttatctataagggaaaagttcttaaagatgacacgacactggctgaaagcagtgtcactgaaaatagctttattgtgatcatgttgacaaagaataaggttgcatctggggagggttcaactgcttcagctgcttctacaatgaaagctcctgaggcaagtaggccaccaactgcttcagcttcagcttctactggaccttgtgcaatgtcagcttcggctggacttac

SEQ ID NO: 43789 - DNA, 382 bp, Gossypium hirsutum
  Clone ID: LIB3189-034-P1-K1-A3
cattttcacagcttaaaacacaatatgactaaagatattgagaccacggcggagcaaggcggcggagcggagttctcagcgaaggactaccatgacccaccaccggcaccgttgattgacatggaagaactcaccaaatggtcgctttatagggcggcgatcgctgagttcattgccacccttcttttcttgtatgtcacggtgttgactgtgatcgggtataaagtccaaaccgacccggtaaagaatactattgacccggattgtggtggtgttggtatacttggtattgcttgggcttttggtggcatgatctttatccttgtttactgcactgctggtatctctggaggacacatcaacccggcggtgacgtttggac

SEQ ID NO: 43790 - DNA, 130 bp, Gossypium hirsutum
  Clone ID: LIB3189-034-P1-K1-A8
ctctccgccgtttcgcatttcgtctttctctctccaattgcttctattgctggttcatgcatctgcatgcaacctcgcccctttgctaaaggcagtgtttctgggttgaaattgggttcatttatgaacc

SEQ ID NO: 43791 - DNA, 240 bp, Gossypium hirsutum
  Clone ID: LIB3189-034-P1-K1-A9
ccaatctttgctttcgacaaattgaagaccttggctctgttaatcgccacttgagatcgtgaaacaggaataaaatggggttcattatggaatttgcagagaatcttgtgttgatgttaatttcttttcccttctttcttttttctcttttattctactcttatagttttatttgtgtttgttttttctttatcatatagtcttctttttttttctttttttatctctttttctttttct

SEQ ID NO: 43792 - DNA, 439 bp, Gossypium hirsutum
  Clone ID: LIB3189-034-P1-K1-B1
gaaacgaaagaacaaaattgaatccaaaagcattattttatattttccatatttctttcaaacttgaaaatattggttctcaatttctaaatcccatgaaatacctaactaattcatagatcaatgacacgagacaacttctggatccggtttaataagaagtcaccttgtttaatagtggcctggtaaagagcattcttcgcatcagggcggttagtttcgaggacaccagcaaccttgtcaatcttgcaatgaagcttccctgctgcgataaaacgagatagctcctgatcaatgaattctaccgtcaccccaaaagcctttgccatggcttcaatagtaacactcttgtaggattccaaaaattgagaagtaacaacagtcctgatctctctcatgtaaaaccggaaatgtagatgcaaacagcggtccattttga

SEQ ID NO: 43793 - DNA, 337 bp, Gossypium hirsutum
  Clone ID: LIB3189-034-P1-K1-B2
acatgcgcattagttcactgtcgttctcctaggtcctcgtttgcttgttctaattcttgttaatcatcatcatattcctttttgctcgtcatggctgaaaataaggaaatgtcggcccctgttgttgacgtcaatgatccggttaccggtcacatcatttccacaacgattggaggcaaaaatggagagcctaaacagaccatcagttatatggctgagcgtgtagtcggcactggatcttttgggattgttttccaggcaaaatgcttggaaacgggtgagaccgtggctataaagaaagttttacaggacaggagatacaaaaatcgtgaactgc

SEQ ID NO: 43794 - DNA, 387 bp, Gossypium hirsutum
  Clone ID: LIB3189-034-P1-K1-B3
atttaatccttacgtttcttcttcttccgggaattaatcaaaatcatcactaccacaaccgacaccgatatgaggaaagaagcagtgccctccaccgcccctttcaccgccaccaccgttggcaagaagctattcctttgctttgaaactaaaccctttgttgttacattgcttgctcttactttagttatgcttctctggaacttccctccttactatcaaaacctctctactacccgtccctgttcagctgctcctctcgcctcagtagtcgctgccgcctccactagcttattctccaccaatgcatcactcccttatacagccacccccgcaggtgaaaagaagtactactcggatccctaagttaaacccagggaccccaac

SEQ ID NO: 43795 - DNA, 459 bp, Gossypium hirsutum
  unsure (1)..(459): unsure at all n locations; Clone ID: LIB3189-034-P1-K1-B7
agccaattgtttgagctagctagctcttactcaaatggcaaccaaaacgatgatgttgcaaatattttcacttttcttctttttgttcagtatctgcaactccattttccttggtgctaatggagatgacaatggtggttggcaaactgcccatgccaccttctacggtggtgctgatgctaccggcacaatggggggagcttgtggttatggaaacctgtacagtcaagggtatggaacgagcacagcagctttgagcactgcacttttcaacaatggcttgagctgcggtgcctgctacgagctccggtgcaacaatgatcctcaatggtgcattagtcgaaccataaccgtgacagccaccaactnttggccccctaactatgctttatctagtgacaatggcgggtggggcaatcccccacgagaacacnttgatttggccgaaccggcattttt

SEQ ID NO: 43796 - DNA, 73 bp, Gossypium hirsutum
  Clone ID: LIB3189-034-P1-K1-B8
tcggccacgcgtgcgaaacacttgaaaatacgtatttaaatacgtacggacgggttacttgggggggggtttt

SEQ ID NO: 43797 - DNA, 473 bp, Gossypium hirsutum
  Clone ID: LIB3189-034-P1-K1-C1
aaaaaatgggttatcttcaacaatttatcttctttattctggttgctctgccattcatgtttatttctccaactcattcctctttagctaatggtaatgttaatatattgcctcctaccaatacaagcgataaggtcactttggctctgtactatgaaactttatgcccatattgtgccgactttatcacaaatgaccttgtaaaggtcttcctcagtgatctgtataccattgtcaatctaaaattagtcccttggggcaatgctgacattcttggcgatgaaccccattgccagcatggagaagatgaatgctacttaaatactatacatagctgtgtcatctactactggcctgatgtgaaaaagcactttgatttattctgtgcacggagcaacaaaacttaaagaaaccgctggtttagaacagagcagccatgtggaaaccatgccagtgaaagcttgtaatgagtg

SEQ ID NO: 43798 - DNA, 309 bp, Gossypium hirsutum
  Clone ID: LIB3189-034-P1-K1-C2
cccacgcgtccggataaaggtctcggcactcgttctaggaggttcgcactcttggtcgatgacctcaaggtgaaggcagcaaatgtcgaatctggaggggagtttaccgtgtcaagtgctgatgatatccttaaagctctttagatttgctttgtgcctaataaggtctatgttttcttggcctcggctattaatatagattgctttatttagcacaccttttatggtattgttaataataaaatacgtctcttggaggatgtaagatcgaacgtgtttaagagcgaatatgttccgttttgtttctgg

SEQ ID NO: 43799 - DNA, 457 bp, Gossypium hirsutum
  Clone ID: LIB3189-034-P1-K1-C8
tcatctctaatataccctgtattctatcatgtcctaatcttttacattttaacaaattcaactaatccccgcatttttttattattcttgtgtgctttttcttattcttttatttcattaatttttaatttttccttttttttttttatttaattttatttttttttttctttttttttttattttatatttaatttttttttttctatatttaattttttattttattattctcttatcaaatttatttttattttctatttttatattataatttctttatatttttatctttcttttttttcttttatatcttttttttttttttttttatatctctttttctatatatcttaattattttttttattttttctttttattttattttcttattttttctttttatctttcttttttactttaatttatttcttattatacttctctttttttt

SEQ ID NO: 43800 - DNA, 447 bp, Gossypium hirsutum
  Clone ID: LIB3189-034-P1-K1-D1
cggacgcgtgggtttgagatttatcaatggcggagaagagtttcaagtacgtcatcctcggtggtggtgtcgctgccgggtatgcggcgagggagtttgccaaacagggagttcagcctggtgagctagccattatttccaaggaagcggttgctccatatgaacgtcctgctctgagtaaggcgtatctcttccctgagggagctgcaagacttcctggtttccatgtctgtgttggaagtggtggagagagattgcttcctgagtggtacaatgaaaaaggaattcagttgatccttagcactgaaatagtgaaagcagatctttctgccaagactctagtaagcgcagctggagaaacgttcaaatatcaaattttgatcattgcaactggttccacagttataaagttgacagatttttgccgtgaaggagctgattccaaaa

SEQ ID NO: 43801 - DNA, 78 bp, Gossypium hirsutum
  unsure (1)..(78): unsure at all n locations; Clone ID: LIB3189-034-P1-K1-D3
cggaanttcccgggntcggacccacgccgnntccgctcctaataatannttccaaacacgcgaacgtcctnnagagag

SEQ ID NO: 43802 - DNA, 468 bp, Gossypium hirsutum
  Clone ID: LIB3189-034-P1-K1-D7
cggacgcgtggggtggtgcaatcccccacgagaacactttgatttggccgaaccggcattcttgcagatcgcggaatatcgagctgggatcgtccctgttatgttcagaagggtgtcatgtgtgaagaaaggaggcatcaggtacaccatgaatggacattcgtacttcaacatggtgttgataaccaacgtgggaggggcaggggatataacgtcagtgtccatcaagggttccaaaacaggatggctacctatgtccagaaattggggccaaaactggcagagcaatgcttaccttaacggccaaagcctctctttcaaagtgactgccagcgatagcaggactatcacaaactacaatgtagtgcccgctggttggcaattcggacaaacttttgaaggaagccagttttaagacaatattatagtgtccgtctaatattaaaactggaattgacatattactta

SEQ ID NO: 43803 - DNA, 417 bp, Gossypium hirsutum
  Clone ID: LIB3189-034-P1-K1-D8
ccttcgtacaatgccacagggcaatttagaaacccttgtttccgcctgtgccgggggctcttgcgacaacaaaatcatttgcgagactttagcaaccagcgaaagtgattccgacgaccacctccacccggcggagaaacatattgaagaagaaatcccgtcggatttcccgccagaatcgttttgcttatccaaagacgccgagttcgactggttcgatcgtaacgctttttacgaacggaaagattcgcataaaggaaactcaggtcccaactctgcaaacctcaaccctaatcttaactcgatctccaattctcaacgcttttctctgagaaagtctaaagcttccatcattggcttaccgaaaccgcagaagtcttgctttgtcgaaacgaagaacaagaaacctgggaacac

SEQ ID NO: 43804 - DNA, 135 bp, Gossypium hirsutum
  Clone ID: LIB3189-034-P1-K1-E1
accataaggtagggtgatttttttattgattgctaataatgatatttagtacatttaggactttccctgtatcagcttttgagattgaaggtgaacaagtttaggggtttaagggtaaggtcgtatagaaactag

SEQ ID NO: 43805 - DNA, 443 bp, Gossypium hirsutum
  Clone ID: LIB3189-034-P1-K1-E2
cactaaaaggccgattaattaccattacaaataaaacattttcttaagccaaatcaagaactgacacgattaagcaagttttactcgcaacaaataaacaaccaaagccactactgtgtggcaaagcaactttcgattaagcaaaaacacatttaaacaagactataccagacatgagttattgtccattaacatatcagacgccccacttcatcatcacatcacattgaacctaccactaccatcatggcttaaaagatgattagaaaaaacaaaaaaccaatacatttgcctaaaaataaacaatagtttcttctaagcgactgatccacacttctggaaattaagcacgctctcccctgatcctacgagccaactggatgtccttgggcataattgtgacacgcttggcatggatcgcgcaaaggttggtgtcttcaaaa

SEQ ID NO: 43806 - DNA, 251 bp, Gossypium hirsutum
  Clone ID: LIB3189-034-P1-K1-E3
tcggcgaaattgaaataccactacttttaacgttattttacttattccgtgaatcggaggcggggcgcggcccctctttttggacccaaggccggcttcggccggccgatccgggcggaagacattgtcaggtggggagtttggctggggcggtacattttgtaaaagattacgcatgtgtctcaagatgagctcaatatgaacagtttttttgatggagattttaggttttacactcgtcagatgtttat

SEQ ID NO: 43807 - DNA, 182 bp, Gossypium hirsutum
  Clone ID: LIB3189-034-P1-K1-E7
ctttttctgagtctctatatggtttgcggaggagagcagcaaaaataagaacaaaacaggctgatatccgatcaaagtctaatgatgggatccaacactctagtctagaaaagcgccagagagttctttcagttgtattttttggttggttgccttaccttaattcaatatcgtattcaatc

SEQ ID NO: 43808 - DNA, 453 bp, Gossypium hirsutum
  Clone ID: LIB3189-034-P1-K1-E8
cggacgcgtgggtttaaatcaaagaataatcaataatatcaaagtatattgcctcctgcttagactgataaatccaaacgaaattgttatatcctctattcaacggggagagatgaatctggatattttgatgattcagaaggatttaactcttagagaattaatgaaaaaaggaatattgattatcgatccagttcgtctgtcggtaaaaaatgatggacaatttattctatatcaaactataagtattttgttggttcataaaaataaacaccaaattaatcaaagataccaagaaaaaaactatattgataaaaatcattttttatgaatttattgcaagacatcaaaagatgactgaaaataaagacaaaaatcattatgatttgtttgttcctgaaaatattttatcccctaaccaccggcgagaattgcgaattccgaattctttca

SEQ ID NO: 43809 - DNA, 376 bp, Gossypium hirsutum
  Clone ID: LIB3189-034-P1-K1-E9
gaaaaaccccattgtaaaacagcctcactttgaaagattttaagagcaatggtaaaatttccagtgatcaacatggagaaactcaatggtgaggagagagcagcaaccatggagttaatcaaagatgcatgcgagaattggggcttctttgaggtgctaaatcatgggattccctatgatttcatggacaaaattgaaagcttgacgaaagagcattacaagaaatgcatggagcaaaggtttaaggaattggtggcaagcaaggcccttgagggtcttcaggctgaggttactgatatggactgggaaagtaccttctatttgcgccatctccctgaattaaatatggctgaaatcccagatctaaccgatgaat

SEQ ID NO: 43810 - DNA, 430 bp, Gossypium hirsutum
  Clone ID: LIB3189-034-P1-K1-F1
cccacgcgtccgcccacgcgtccgcttttatcgaagaattgaaggttttcaataaagaaaggctgaatggatattatggagttgcggcttatacactttccaatttcttgtctgcatttccgttcctagttacgatttcacttatcacaggaaccataacattttacctggtgaaatttcgatccggattttcgcattatgccttcttttgtctcaatatcttcttcagcatcgctgtgattgagagcctcatgatggtggtagcttcgatggttcctaattaccttatgggaatcgtaaccggtgccggaattatcgggattctaatgatgacatcaggcttcttcaggttgctgcctgatcttcctaagatattctggcgttaccccatttcgtatatcaattttagctcatgggcactttagggggc

SEQ ID NO: 43811 - DNA, 476 bp, Gossypium hirsutum
  Clone ID: LIB3189-034-P1-K1-F2
gccctttctattggttcttttttgggttttcagacagtattttcttgggaggaaaatgactatccttatcgagaagcctgagctagtgtctcaatcagactgccagattcatgtggatgaaagtaaggaattggtgttggatggtggattcccagtgccgaaatctttgtcaggagaaggatttttggcaccagaggtcaattcatttggcaactcctttagggattacaatgcagaaagtgaaaggcaaaagagcgtggaggaattctacaagcagcaacatgttaaccagacatacgactttgtgcaaaagatgagggaagaatattcgaagctgaatagaatggaaatgagcatatgggaatgctgtgaattgctgaatgaggtggtggatgacagtgaccctgacctggatgaacctcaaattcagcacctcttgcagtcggctgaagctattagaaaagattatcctaatg

SEQ ID NO: 43812 - DNA, 422 bp, Gossypium hirsutum
  Clone ID: LIB3189-034-P1-K1-F7
gcagtccgcagtgacaaagaaaataggggtttgtgcaaggaaagtttgggcatggattcgggtattgaaaatagggtttttcggtttggagtaccttctaacgatgagttccaaggactgtcagttttattaccagccaaaggggattcacaacgtcgcaaaccgcctaatgagttagtaaatcgccagtagatactgtggatttagtggcagctatggagggcataatttttgggttgaagcatggtcatgtaaccatggagattttaactgaaaacccaaaaaatgatgaaccgatgggtcaattagattcgactaaacgccaaggttagctgctaacaattttgttgccgctagggttctcttttggtattttatatatagattccaaaatcattttttggaattgtcaaggtgagggc

SEQ ID NO: 43813 - DNA, 358 bp, Gossypium hirsutum
  Clone ID: LIB3189-034-P1-K1-F8
aaccttctgaggggcatctatgcatatggttttgagaagccctcagcgattcagcaaagaggaattgttccattctgcaagggtctcgatgtgatacaacaggcacagtctgggactggaaagacagcgactttttgctctggaattttgcagcaacttgattacggtatagtccaatgccaggctctggttttggcacccactagggagttggctcaacagatcgagaaggtgatgcgggcacttggtgattaccttggtgtgaaggtccacgcttgtgttggtgggactagtgttcgcgaggatcagcgaattcttcaaagtggtggtcatgttgttgtcgggacctcccgtcgtg

SEQ ID NO: 43814 - DNA, 422 bp, Gossypium hirsutum
  Clone ID: LIB3189-037-P1-K1-B3
acgctcaattatagctttttgtgctttatagttgttccccttaactctgcacaaagaaaaaaagggggtacagagttatcatcagccttgagaggggaggaggaagagagaatcaattctcagcctcgagaataaaagagaagatttgaagacaacggattaacacaaaagcatgaaatcatgtgaaagaaagttattagtatcttatctcagctcttaacctccatcacctctttctctttctcctttatttattttttgtttggcacccaatctttcaaccacaagacaaccaccaccgttctacgaacacgggcactctctgttcttttatatttaataaaagaaaacaactggtcctttttgcataaaatcaagaggtttaaacaagctttcatctctaatggctttcctctctttct

SEQ ID NO: 43815 - DNA, 365 bp, Gossypium hirsutum
  Clone ID: LIB3189-037-P1-K1-B8
acgatgacgcgtgggtgagtgtagagatgaggaaaatcatgggtgccaaagttcttttcttgttcgctgtgctttccttttcagctgactcggcatttgcacaggatgaggaagaccaaggtcttgttatgaacttctacaaggattcttgtcctcacgctgaagacattatcaatgagcaagttaagctactgtacaagcgacacataaacactgctttttcttggctgagaaacatcttccatgactgtgctgtccagtcatgtgatgcttcactgctgctggactccacaagaaggagcttgtctgagaaggagacagacaagagcttttgcctaaagaatttcaggtacattgagaccatc

SEQ ID NO: 43816 - DNA, 211 bp, Gossypium hirsutum
  Clone ID: LIB3189-037-P1-K1-B9
cacgacgccacgctcaactattagccttttagcgctttattagaagagccccctctactctgcagcaaagaaacaacaggagatacgcgaggtatcatcagcactcagagagggcgaggatggaagagagaatcaattctcaaactccataattaaagagaaaatccgaagacatccgattaacacagaagcctgtaaccatgtgaaagaa

SEQ ID NO: 43817 - DNA, 73 bp, Gossypium hirsutum
  Clone ID: LIB3189-037-P1-K1-C1
acccacgcgtacgaattttcctttctcgattttctatttaaccaaacattatcatatcttccgaaaaactcta

SEQ ID NO: 43818 - DNA, 217 bp, Gossypium hirsutum
  unsure (1)..(217): unsure at all n locations; Clone ID: LIB3189-037-P1-K1-C12
ggagagctacctgattgggaatttacaaccagcacatatggattttcgattcttttctctaggaaatttgtgggccgntgtgagtggtcttgcaacgattgatcagtctcatgctatattggatctcattgaagctaagtgggcagatttggtggcagaaatgccatttaagatatgttacccggctcttgaaggtcaagagtggcagatcatcact

SEQ ID NO: 43819 - DNA, 160 bp, Gossypium hirsutum
  Clone ID: LIB3189-037-P1-K1-C2
tctagatcgcgagcggccgctcgcgatctagaactgtctagatcgcgagcggccgctcgcgttggtgacgttcacttaatatgccccagagatctcgatccggttcctttcaaccttcaagctattaataataaaaatcatatttagacatcgcaataaa

SEQ ID NO: 43820 - DNA, 173 bp, Gossypium hirsutum
  Clone ID: LIB3189-037-P1-K1-C3
gtccgaatcggtcgcccacgcgtcgttaatctcgagcgaaatgaataccgattgttttatatgagcgggatgctttcctgggtcatgtgtgccgtgattcgtacggagactttctcggcggatggatttgaagttgatcctgtgttcgaacaagtaacggactggtacgaatg

SEQ ID NO: 43821 - DNA, 59 bp, Gossypium hirsutum
  Clone ID: LIB3189-037-P1-K1-C7
acgctagatcgcaagcggccgcacacgaaccagaactatatagatcgcgagcgaccgcc

SEQ ID NO: 43822 - DNA, 116 bp, Gossypium hirsutum
  Clone ID: LIB3189-037-P1-K1-C8
tccgagccacgacgtcacgcgtagatcgcagagcggtcgcacgatatctagatctattctgataacgagcggacgccctctagggtgacggtcactcagtacgcacgccaaatctc

SEQ ID NO: 43823 - DNA, 182 bp, Gossypium hirsutum
  Clone ID: LIB3189-037-P1-K1-C9
gaaatagtcttatgatggagttcaaacatcaaacatcgacactgtgattgatctttcttgttatgatgcctggttttgccctttctgatgtcaatcaaaacaaagcagaatgttctaatcagctagtcgggcttgctccatgtctcccatacgtaggcgggagaggcataaacacccaccat

SEQ ID NO: 43824 - DNA, 151 bp, Gossypium hirsutum
  Clone ID: LIB3189-037-P1-K1-D1
cgacagttcctttgattttgagagaaaagagagagtgagagaagagctgatcttggcttctctgggtcgttcgattccgcttaatcatagcccgcgtttctctcacacgtgaaaaatggggctgcctctcacaaagctatttagccggctt

SEQ ID NO: 43825 - DNA, 374 bp, Gossypium hirsutum
  Clone ID: LIB3189-037-P1-K1-D10
aaagaaaaccccataatcatggctcgattaacattggtctcctccatcatccttatgctatgctgcgttaccgcagcatcaactttcgaggattccaaccctattcggatggtatccgacggtctccgtggctacgagtcctctgttcttcgtgtcattggccatacacgtcacgctatctccttcgcccgctttgcttacaagcatggaaggaagtacgagacggtggaggaaatgaagcttcggtttcagattttcaaagagaatttggatttgatccgatccactaacaagaaaggcttatcttacactcttgctgttaatcggtttgctgattggagctgggacgagttccaaaacacaagcttggagct

SEQ ID NO: 43826 - DNA, 349 bp, Gossypium hirsutum
  Clone ID: LIB3189-037-P1-K1-D12
gaaatatccaaccacaatcttctaacctcgactccgaattcggtttcctcttttcttttacggtggttgtttgcggtgggtggacaacgatcatgatcgccgatcctaaatcttgtgacgttctgttggttttcgttttatttgcgattatatcctcttccagcgccttggtttccactccctatcctaaggccatttctgatttaaaagaggcagttgtgaagggattgggattccaagccgatgattttaagatttcaaggttcgatctcagagatgcccttgtgggccattctgtggcatatgaattcgacattgaaatcgataacaaaatgatttcctttaagct

SEQ ID NO: 43827 - DNA, 317 bp, Gossypium hirsutum
  Clone ID: LIB3189-037-P1-K1-D5
acgatttattttatgggaaaatcgctgcccggcgcatccaatcttcaacatctagcaaaggttaccggcgcggcccaccatcttaacacaactgggaaaaacccaaaacccactactctgtaccggcggattataagtgatgacaacaaacccaattccaagaagaagatggagagctccagtgccagtcaacgcctcccactttccgaagtcgtctccgattgcgttaaacgttggttcaaagatactcttaaggaagccaaatccggggacgtttacatgcatgttcttgtgggtcaaatgtattatatcggttt

SEQ ID NO: 43828 - DNA, 201 bp, Gossypium hirsutum
  Clone ID: LIB3189-037-P1-K1-D6
gcgtgcgctttctgtacatatactttgctgcaaattctcccatacttttcagaaaatctaacacaaggttttgtaaatgttagagatccttcatggtcaaggtgaacaatgcgggaaccatatctgttccaagttttgggaggttgtttgcgattagcacagcatagatccaactggtaggttcattgtttcttcggatct

SEQ ID NO: 43829 - DNA, 256 bp, Gossypium hirsutum
  Clone ID: LIB3189-037-P1-K1-D7
cgacagttcctttgattttgagagaaaagagagagagagtgaagagtagatcttggcttctgtgcgtcgttcgattccgcttaattatagcccgcgtttctctcagacgtgaaaaatggggctgtctttcacaaagctatttagccggcttttcgccaagaaggagatgcgtattctcatggttgggcttgatgctgctggttaaactaccattctttacaagcttaaggttggaggagattggtaccttccattt

SEQ ID NO: 43830 - DNA, 154 bp, Gossypium hirsutum
  Clone ID: LIB3189-037-P1-K1-D8
tcgctctctctgcaaactctttggagttcacagagattaaacgaaggtaaacaaaaaacagagaggggagtaggtggaatcaagggtgggatttgttcttcaatcaatctaagtccgataaaagcgaacaacattaccgttaattcggtcgatc

SEQ ID NO: 43831 - DNA, 345 bp, Gossypium hirsutum
  Clone ID: LIB3189-037-P1-K1-E10
ctgggaaatacaattccagtcagaaagaagagcaataccctacaaaatactgctacaggctacgagtgaagaagaatgaagatgccgtagccgtcacgtaacgttgactgttagtctccaccactatcacctgacggaagcaaagtaatagtaccattagtacaataccacgtgaactgaccctccttcctgaagcagattttgggggttaagagattttatctacagagaggatggtgacatctgagcaagaacacgattttgttaagtggggtttgcaactattcaatagtgatccctatgctaattggggatattgcggagtgttaactcaagaaatggaga

SEQ ID NO: 43832 - DNA, 248 bp, Gossypium hirsutum
  unsure (1)..(248): unsure at all n locations; Clone ID: LIB3189-037-P1-K1-E11
tttttttttttttttttttttttttttttttttttggggaggggtttaatattgatgtattattaataaaaaattttggttgagggtgtgtagtttgggaaaaaaaaaaagggaagggtgataaaggggggggaaaaaggaggaaagaaaaaaataagtgaagaaaaaaagaaaaaagttaagggtaaaaggagggaggggagaaacanattaaaaattaaaaaagggggggggggggggtggttttg

SEQ ID NO: 43833 - DNA, 422 bp, Gossypium hirsutum
  Clone ID: LIB3189-037-P1-K1-E12
cggacgcgtgggttctctcaaaccatcgcctcatcgcctcacggtggcagcggctgcagggaagatgaagatgattgagggcgtcagtgatgaattgaactccattgcttcacagaatcttgactacgctgctgctcgtagaagagttcgatctgctttcatccctgtccaccagcagcttgatcatttattgttcaagatggctcctactggtgtaagaacagaggagtggatcgaaagaaactcaaagggattggagattttctttaggcgatggatgcctgaacccggggttaaaattaaaggtgtcgtatgcttttgccatggatatggtgatacttgcactttcttctttgaaggcattgctaggttcattgcagcatctggatatggtgtttatgctattgatcatccaggattcg

SEQ ID NO: 43834 - DNA, 126 bp, Gossypium hirsutum
  Clone ID: LIB3189-037-P1-K1-E4
aatacatttacattcttaaactagagcatttccctacaaaatactttttcttgctacaaatgatttacaatgaagatgtcatctcccttacttaacgtttactattatttttcaccactatcacct

SEQ ID NO: 43835 - DNA, 263 bp, Gossypium hirsutum
  Clone ID: LIB3189-037-P1-K1-E5
agcagtccgatatcgcgagcagaccagccctcttttttattatcttttcccttcaaattacttttttctttctcgagttttttttaataaatattccttttccttctttttctttttcttttatttttcaccactttcaaaaaaaaaaacaaaattttttttctataacccaaaaccacccaaacttacccttatttctaaaaaaatccaaaaaccccatatatcttaaatacacttaaaacccccacatatccccaataaca

SEQ ID NO: 43836 - DNA, 387 bp, Gossypium hirsutum
  Clone ID: LIB3189-037-P1-K1-E6
ctatttttttattttcttactttttcattttttttttttaaggggaattttattgatgtctttttttttaatttatcttcatttctttacataatcttgactacactactaatcatagaagagttctatctgctttcatccctatgcaccagcagcttgatcatttattgttaaataatactcctactgttgttagaacaaaggaatggatccaaaaaaactcaaatggattggtgattttttttatgccatagatacctgaaacccagattaaaacttaaatttgtcctatagctttgccattaatttaaagatacttgcacttttttatttcaatgcattgcttagatcattgcaacatttatatattgtgtttatgctatttat

SEQ ID NO: 43837 - DNA, 298 bp, Gossypium hirsutum
  Clone ID: LIB3189-037-P1-K1-F11
gcttctcttgttgtggagtggaggtgcagcaccgtactggtggccttggtggcaatagcaacaggcaatggcaaatcattgaggtctttggtgaattatttgtcaggcaaagctagtgccaacatgcaaaatattgctgaagaaatacaaaaagttggcatagtaaatgtttcagctcatattttctacatttagagaactagtagttgctacagacaactgctatcctgattggctgataggtgaaggtggctttgggtgggttctataaatggattcattggtgaaaccttgatca

SEQ ID NO: 43838 - DNA, 193 bp, Gossypium hirsutum
  Clone ID: LIB3189-037-P1-K1-F12
gaaaaatcatattttggtttctgcagtttggttgaggggttcagggatgcagttgtctttcacaaacaaggtatctacagttcctcagttcttgtcgttcgatggtgctcgagacgataaaccaagaaaagccacgcatgacacgctgttgtcatccggttttatgactattccaactactgattctaacaag

SEQ ID NO: 43839 - DNA, 259 bp, Gossypium hirsutum
  Clone ID: LIB3189-037-P1-K1-F4
cgtgcgcacccattcacatctagggttttatctaacgttttagcttgctcttcccctttcaatttctggggattgggccacgagtgctaacgttaacatgtcctatctcagcggtgttattaacgagttagctcgagctgatctcctaaacgatctgaagatctgatttcatacctgttcaccagcagcctgatcatttattggtcaagatggctcctactggtggaagaacagaggagtggttcgaaagaaactcaaa

SEQ ID NO: 43840 - DNA, 186 bp, Gossypium hirsutum
  Clone ID: LIB3189-037-P1-K1-F6
gaaaaatcatattttggtttctgcagtttggttgaggggttcagggatgcagttgtctttcacagacaaggtatctacagttcctcagttcttgtcgttcgatggtgctcgagacgataaaccaagaaaagccacgcatgacacgctgttgtcatccggttttatgactattccaactactgattc

SEQ ID NO: 43841 - DNA, 230 bp, Gossypium hirsutum
  Clone ID: LIB3189-037-P1-K1-G10
agaactactacttcaaacaagcacagacctcccacgaaagatgttcttgagaataatcaatgcgggttgctctacgaacgaacagctaaaacttgtgacgcagcttgagattgccataaagcgcacacatttatcttgcaacctcaacacaacgagaaactaatagctttctagctcccagccatagaatcatgactctacttgatcatggcttccatggataccccaaa

SEQ ID NO: 43842 - DNA, 476 bp, Gossypium hirsutum
  unsure (1)..(476): unsure at all n locations; Clone ID: LIB3189-037-P1-K1-G11
agtactatctatctccaagcatagcnagttttccttacaaggtttagtttttcttagtgattaaatcgatataggctaagctcaatagtacccttaatgcttagcatagtgtagagcggtagttagtagcattggtaggtagggtagcaccccctaggcttcaagagggccagtaaccctagtggtcatagtcacatagctgccctcgcatccctgcattaggttaccttgacagaggaataggtgcctggtgagcagttcccccaggttagctgcgagcggcataaatatctctcaactccgccgcccaaacaacaccagaccggcaagcagcttgcaaatgcatcaaaagtgcggccgccggcatttctggcatcaactatggtattgcaagcggactcccaggcaagtgcggtgtcaacatcccttacaagatcagccctagcactgactgcaacagcgtcaagtgaagtttt

SEQ ID NO: 43843 - DNA, 425 bp, Gossypium hirsutum
  Clone ID: LIB3189-037-P1-K1-G12
ctcacttttgcaacaaaatccaccaagagactacaccaacaaatggaggcattgaggataagactatttttggctatgatggtggtgttgatggccatctcagcggtccaatatgttgcggcagctgatgcaccggcccctactcctacctcagatgccaccgcattcgtgccgacggcatttgcttcccttgtcgctcttgcgtttggtctcctcttttaaaatggatgaattgtattggttgttgatatttcaatattgggggttatgtagagttcttttgtcttcttttattctttctctctaaaggccatacaattcttatgagtccttcgtttatggagatggaaaaaagatagagaaaaggtggagattttttttctttttctactttaatttttccttatgacaattggttgatgtat

SEQ ID NO: 43844 - DNA, 279 bp, Gossypium hirsutum
  unsure (1)..(279): unsure at all n locations; Clone ID: LIB3189-037-P1-K1-G4
cgcgnncgctcctncatatgacggtaaaaagatctcccttcccctctctttctctccggcggcgatctcaaatcacagttgaatctcaccgtaacgcccgattactcttcacctctgtgatctcctctgacacctcgtggtttcagtttattctaactcgtcgccatcatgaatcccgaatatgattatctgtttaagcttttgcttattggtgattctggtgttgggaaatcatgtctacttttgaggtttgctgatgattcatatctggatagctac

SEQ ID NO: 43845 - DNA, 346 bp, Gossypium hirsutum
  Clone ID: LIB3189-037-P1-K1-G5
ataacccctacatccaatgtgcactgacgttcatcgtatagatcttgagcaccaagctgaataagggtcgctttacaaaactaaagctaaagctcctaacgatgatacagagagccatagtagacagatcctccatcccccatcttatacacagcgtctgaatgtatgagctcttatcggcagacttagaaagtccacttaactatctgccatctttatttcattcccaagatgacttcatctgtagggtttatactgtctgtccattatacactcacccggcatgtgagatgatgtatcatcgaaccttccagcgaccggctatctagaataaaatctttttttg

SEQ ID NO: 43846 - DNA, 303 bp, Gossypium hirsutum
  Clone ID: LIB3189-037-P1-K1-G6
atacttctactacaagctagcattttccttacaagctagtttttcttgcgattaatcgatatggctagctcaatgtcccttaagcttgcatgtgtggcggtgttgtgcatggtggtgggtgcacccctggctcaaggggccgtaacctgtggtcaagtcacaagctccctcgcaccctgcattggttacttgacagggaatggtgctggtggcgttcccccaagttgctgcagcggcattaaatctctcaacttcggcggccaaacaacaacaaaccggcaagcaggttgcgaatgcatcaaa

SEQ ID NO: 43847 - DNA, 361 bp, Gossypium hirsutum
  Clone ID: LIB3189-037-P1-K1-H11
gttatcttcaacaatttatcttctttattctggttgctctgccattcatgtttatttctgcaaggcattcctctttagctaatggtaatgttaatatattgcctcctaccaatacaagcgataaggtcactttggctctgtactatgaaactttatgcccatattgtgccgactctatcacaaatgaccctggtaaggtcttcctcagcgatctgtataccattgtcaatctaaaaataaccccttggggcaatgctgacattctgggcgataaccccattgccagcattgagaagatgaatgctactttaaatctatacatagctgggtcatctactactggcctggtgtgaaaaaacac

SEQ ID NO: 43848 - DNA, 286 bp, Gossypium hirsutum
  Clone ID: LIB3189-037-P1-K1-H12
ggttgctctgccattcatgtttatttctccaaggcattcctttttagctaatggtaatgttaatatattgcctcctaccaatacaagcgataaggtcactttggctctgtactatgaaactttatgcccatattgtgccgactttatcacaaatgaccctgtaaaggtcttcctcagcgatctgtataccattgtcaatctaaaattagtcccttggggcaatgctgacattcttggcgatgaaccccatggccagcatggaaaaaattaatgctacttaaatact

SEQ ID NO: 43849 - DNA, 262 bp, Gossypium hirsutum
  Clone ID: LIB3189-039-P1-K1-A10
cggacgcgtgggaaaagatataatctttttttttttcaggaaaatttccataccccattcttcacttcatttccccggataagtctttctctctctttcgccttgaactttttttttctttttgttttgaataaaggtcttctttcttttgctgaagttgagggattgggagattgctttggatctgtgttgattgggatatctttattcatagttttcacgtgcgactatttattgactcgttcgagttagtagattatta

SEQ ID NO: 43850 - DNA, 341 bp, Gossypium hirsutum
  Clone ID: LIB3189-039-P1-K1-A11
ctccgccatcttcaataatttcttccgttgatctttgttagagattagctttttaatttttcattatgggaaagatcaagatcggaatcaatggatttggaaggatcgggcgtttggttgcgagagttgctctccaaagcgatgatattgagctcgttgctgttaacgatcctttcatcaccactgaatacatgacgtacatgtttaagtacgacagtgttcacggtcaatggatgcatcatgagcttaaggtgaaggactcaaagacccttatcttaggtgaaaagcctgtcacagtttttggttttagataccgagacgaaattttatgggctgaggct

SEQ ID NO: 43851 - DNA, 156 bp, Gossypium hirsutum
  unsure (1)..(156): unsure at all n locations; Clone ID: LIB3189-039-P1-K1-A12
aaattatttatagaataatttcttccttttatcttttttataaattcnctttttaatttgccaggattataaagatcaagatcactttcattttattttcaattattcttcatttaattatcagttatttactacttacctaaattattaatttat

SEQ ID NO: 43852 - DNA, 438 bp, Gossypium hirsutum
  Clone ID: LIB3189-039-P1-K1-A3
ctgagagaagaaaatccaaatgcatgtagtaataataacactgctgtttggttcttttagcttgtatcctttgcatcattttatctttgctttgtgagtgttcagaaagatctgagttaaaaaaaaaaaacttattggcgaggggctgagtaaatcgttatctttcaagttgagatctgttggctgttttcgcttgctggtgttattggttacaagctttgagggacttaaaagagtttttctgactcaaatgggcacaccgtgaccagccccattgtatctcccttgcacagtcttttgggatcctttccccaagatgaaccgtccggtctgctcaacttgcctagatccaacccagtaataacatctgcagcatggccatctaagcgggctgctgttgaagttctggcatctggatctccacaatgtgttctgccc

SEQ ID NO: 43853 - DNA, 486 bp, Gossypium hirsutum
  Clone ID: LIB3189-039-P1-K1-A4
cacttctcatccttgttattttaaagttgtatccaatttctctagagttacgagaagaatctggtgatgatgattccattaccaatctctggttgtggggagggatataagataggacgagatcggcttacatgaccttgcctttggttttggtttaggctaagggcaatattaaatgaattatctggctcttttatgtgtataatacaaataaaaaaaattaaatattgaaatgacatttgaatattattatttattaaaaatggtatttttgaaacaatatcaaagtgggaagggggagagatgggctataccattttatttgattttatttaattatttttaaaagtgaggagagaggaatgcgcaacactagtataacaaaaattaacatactatattatacgaattcgtatatggcatcgagacttggagggctatagagtggtacccataggcggcactagtctgatggaggtttgacag

SEQ ID NO: 43854 - DNA, 472 bp, Gossypium hirsutum
  Clone ID: LIB3189-039-P1-K1-A5
aaaatgtgataatatacaaacagctataaagtagctttcctgtctatcagctatctcgagcaacttaagaagaaatgggggaaaagagtttaattgccaaggatgtcaccgaattgatcggtaacacgccactggtatatctcaacaatgttgtagatggatgtgcggctaaaattgctgccaagttggaggcaatggaaccctgctccagtgtcaaggacaggattggatatagtatgatcgcagatgcagaggagaagggtctcattgtaccaggcgagagcgtgctgatcgagccaactagtggtaataccggaatagggttggcattcatggcagctgctaagggttacagactcataattacgatgccttcttcaatgagtttagaaagaagaatggtcctccgagcttttggagctgagctggttcttacggatccagcccggtgcatgaaaggggctgttcaaaa

SEQ ID NO: 43855 - DNA, 321 bp, Gossypium hirsutum
  Clone ID: LIB3189-039-P1-K1-A6
aaaattcctgaaccgggacgcggcggctgacggcatctttagggagtccggagacgtcagcgggggccgaggaaagagttatcttttctgtttaacggcctgcccaccctggaaacagctcatccggaggtagggttcatcggccggtagagcaccgcgcgtcgcgtggtgtccggtgcgccccctgcgggccttgaaaatcctgtggaccgagagccgaccgagcccggtcgtactcataagcacatcaggtctacaaggtgaacagtctctgatacatgaaacaatttattcaggggacgactgctaattccattctta

SEQ ID NO: 43856 - DNA, 327 bp, Gossypium hirsutum
  Clone ID: LIB3189-039-P1-K1-A9
ggaatgccttctggagtagaccttactgccaaagatttaatgaatacgctgaagaaaaaacatgcagcgaaaagctacaaaagcatggttatctatgttgaggcatgtgaatcaggaagtatctttgaaggactattgccaaaaaatatgaatatatatgcaattacagcggcaaatgcaaatgaaagtagttgggggacttattgtcccggagaatttccaagtcccccttctgatttggacacttgtttgggtgatttatacagtatttgttggattgaagacagtgacattcatgatttgcggaaggaaactttggaccagcaa

SEQ ID NO: 43857 - DNA, 307 bp, Gossypium hirsutum
  Clone ID: LIB3189-039-P1-K1-B1
gcaaacaaacataaaccctttttatatagggttgtctgggcgtgatgctttgctttgtaatctaagagcaggttgagcttccccaaattcagatgggggaagaaacaccgacaagcaaagtgtgcggtgaatcatgaatgaagtagagctaaactcttctgtatacagatggtttaggtatgagaccttctgttttctaactaatagggatatgcaaccttgtttgggtaatgaaagtatttattgggtgagttgttaggtgtgtacatgtatttggaccatcctatggcaaatgctatataaaaag

SEQ ID NO: 43858 - DNA, 305 bp, Gossypium hirsutum
  Clone ID: LIB3189-039-P1-K1-B10
attctgtgtctctgaatgtagatgcagcatatgaatttactgacccaaaccaatcggcagcgggaggaaatgcagaagttattgttcttagtgattcagatgaagagaatgaaatattgatatctcctccaactgtgtataaggataatcacaaccaaaatgatggtgggggacttggtttttctgttgcaccttctggaatttcttatacgtattcagaagatccacctcttgtgccttcttgctaattcagttcttatttcatctcattgttgaatttgtccttccttttttgttttcttcct

SEQ ID NO: 43859 - DNA, 469 bp, Gossypium hirsutum
  Clone ID: LIB3189-039-P1-K1-B11
cccacgcgtccggcctctttggagcccatccaccaattctttatgtcatccattatctgggaaacaaaccatggctatgcttccgggactatgattgcaactggaatgtggacattttgcaggagtttgctagtgatgttgctcacaaaacatggtggaaggtacacgatgcgatgccagaaaatttacagaagtactgtctgcttaggtcgaaacagaaggcacagttagagtgggatcggaggcaagctgagaaaggtaattacacagatggccattggaaaattaagataaaagacaagcgtttaaagacgtgttttgaagaattctgcttctgggaaagtatgctgtggcattggggtgaaaagaattggacggataattcaactgctaacccatcaccacctgctataaagaaggtatctctctcttcattatgatttaattttcctttcattttctactacat

SEQ ID NO: 43860 - DNA, 465 bp, Gossypium hirsutum
  Clone ID: LIB3189-039-P1-K1-B12
aaaaaatcagagaaattctcacttgtcttgctaccaaagaaaagttcccaaaaactccgatcgacgatgtccggtatggaacgattgcacaggatgttcgccggcgctggtggtgcgttgggtcacccgccgccggattcgccgactctcgattcgtcggagcaggtctacatctcctctttggccctcctcaaaatgctcaagcacggaagagctggagttcccatggaagttatgggtttgatgttgggagagtttgtcgatgagtacaccgtacgtgttgtggatgtctttgcgatgccacagagtggtactggtgtcagtgttgaagctgtggatcatgttttccaaacaaatatgcttgatatgctcaaacaaactggaagaccagagatggtggtgggttggtaccattcacatcctggatttggctgctggctttctggtgttgacataaacacacag

SEQ ID NO: 43861 - DNA, 360 bp, Gossypium hirsutum
  Clone ID: LIB3189-039-P1-K1-B2
acaatggtggtgaaggtgtatggcccagcctttgcttctccaaagcgagtgattgcatgtcttattgaaaaggagattgaattcgagactgtccctgttgatttgcttaaaggagagcacaaagaccctgaatttctcaagctccagccttttggaacagttcctgtcactcaagatggagattatgttttatatgaatcccgtgcaatcataaggtactatgcagaaaaatacaaatcacaagggactgatctactgggaaagacagtagaggaaaggggtcaagtggaaaattggctagaaggtgaggcacacaatttcaacccatcaatttacgccttgaccctacatgtgatgttt

SEQ ID NO: 43862 - DNA, 302 bp, Gossypium hirsutum
  Clone ID: LIB3189-039-P1-K1-B3
acaatggtggtgaaggtgtatggcccaccctttgcttctccaaagcgagtgattgcatgtcttagggagggggagattgaattcgagactgtccctgtttatttgcttaaaggagagcacaaagaccctgaatttcttaagctccagccttttggaacagttcctgtcactcaagatggagattatgttttatatgaatcccgtgcaatcataaggtactatgcagtaaaatacaaatcacaagggactgatcttactgggaaagacatgtatggaaaggggtcaagtggaaaattggctaa

SEQ ID NO: 43863 - DNA, 478 bp, Gossypium hirsutum
  unsure (1)..(478): unsure at all n locations; Clone ID: LIB3189-039-P1-K1-B4
accgaacagagctctctccttctaggccttacatttcgtttggcgttctactatttccagcgtctctttgcggctgagtggtcttttgaattctttggtggaaacttttgaacaaaatcgaagttacagagacttaacgattaaaagagaaagaatggaaacacaaaagagccaggccgagaaacaagcgacgatggcttcatgtagaaagaaaaagaatgaagaagccaccttccttgaagacttgaaggatcacatcgatgagtttgttaatgcatcaatggatgagcataaaacttgctttaagaagaccatccanaagatgtttggaatgtcaaaatttgtagctgaaaggaatgctgaatcaaaggaaacaacagtatcaaaataaagtatgttcatctttaatagcatgatatgtagtagcatgatttggtttacactatatttaaaacaaagccttcggtactttttgatc

SEQ ID NO: 43864 - DNA, 458 bp, Gossypium hirsutum
  Clone ID: LIB3189-039-P1-K1-B5
accgaacagagctatctgcttctaggccttacatttcgtttggcgttctactatttccagcgtgtctgggcggctgagtggtcttttgaattctttggtggaaacttttgaacaaaatcgaagttacagagacttaacgatttaaagagaaagaatggaaacacaaaagagccaggccgagaaacaagcgacgatggcttcatgtagaaagaaaaagaatgaagaagccacctttcttgaagacttgaaggatcacatcgatgagtttgataatgcatcaatggatgagcataaaacttgctttaagaagaccattcaaaagatgtttggaatgtcaaaatttgtagctgaaaggaatgctgaatcaaaggatacaacagtatcaaaataaagtttgtacatttttaatagcatgatatgtagtaacatgatttgtttacacttatattttaaacata

SEQ ID NO: 43865 - DNA, 485 bp, Gossypium hirsutum
  Clone ID: LIB3189-039-P1-K1-B6
atcaaattcctttctcccaatttctatttatcttcttctccttctctttagtcttttacgctgcggccagaaagcaagaagaaaccatgccgaagaacaagggaaagggaggaaagaacaggaagagaggaaagaatgaagctgacgatgagaagcgtgaacttgtgttcaaggaagacgggcaagagtatgcccaagtgcttcgtatgctaggcaatggccggtgtgaagccatgtgcatagatggtactaagcgcctttgccatatccgaggaaagatgcacaagaaggtttggattgcagctggtgatataattcttgttgggcttcgcgactatcaggatgataaggctgatgtgatccttaagtacatgcccgatgaagcaaggctcttaaaggcatacggtgagctttcagagaacactcgtcttaatgaaggtattgtcgatgaggaagatgaaggaggtgcaaatgattacattgag

SEQ ID NO: 43866 - DNA, 113 bp, Gossypium hirsutum
  Clone ID: LIB3189-039-P1-K1-B7
gccaccatctcactttcatggcactttgatgatatagaacttaattccccatcttcatgtgtgggttataactcactgccggactcacaacttaataaacaaaaaaaataccg

SEQ ID NO: 43867 - DNA, 55 bp, Gossypium hirsutum
  Clone ID: LIB3189-039-P1-K1-B8
tttacaactactttagaactgtacattacaatttcataaacatatctaggaaatt

SEQ ID NO: 43868 - DNA, 67 bp, Gossypium hirsutum
  Clone ID: LIB3189-039-P1-K1-B9
ccttcacgtgaccgtttacacttccaattccctatctctccctccttttcctatttacctttccatt

SEQ ID NO: 43869 - DNA, 444 bp, Gossypium hirsutum
  Clone ID: LIB3189-039-P1-K1-C11
atagtcttctcttgattccaaatctctcccagaagatgcagatctttgtgaaaacccttactggtaagaccatcacccttgaggtagaaagttctgatactatcgataatgtcaaggctaaaatccaagacaaagaagggatccctcctgaccagcaaaggcttatctttgccggaaaacaactcgaggatggccgaactcttgccgactacaatatccaaaaggagtccaccctccacctagtccttcgtctaaggggtggcatgcagatattcgtgaaaactcttactggcaagaccatcaccctcgaggtggaaagttctgatacaattgataatgtcaaggccaagatccaagacaaggaagggatcccaccagaccaacagaggcttatctttgccggtaaacagcttgaagatggccgaacttttgcggattacaaca

SEQ ID NO: 43870 - DNA, 197 bp, Gossypium hirsutum
  Clone ID: LIB3189-039-P1-K1-C12
atatctaccacctcaaaggtcaggtatcgctgctctagacttctagtatctccaatctcttggatgatggcattagttatttacttaaaaatcgtggtgtgataaatttaaggatatacttttagtaagctgatttatttattttgtattcttgggatttaaaaagcaaacttcaatttaatttataaacatttttt

SEQ ID NO: 43871 - DNA, 338 bp, Gossypium hirsutum
  Clone ID: LIB3189-039-P1-K1-C2
ggggtttatggtgaggttaaagagataagggaaacaccatacaagcgacaccataagttcattgagtgttatgatgttagagctgcagaacaagctcttaagtcactgaatagaagtgatatagccggtgaacgtattaagcttgaacctagtcacactggaggagctcgtggcaatttgatgtcgcaactgaatcaagatctcgaacatgatgactcttggggatcctgacatgaaactgggactcgccctgccaaggctcattcagggcgcggggcgcagtggaaccgcccaatataacctattcccatgccagctccttagcagccccttctttt

SEQ ID NO: 43872 - DNA, 76 bp, Gossypium hirsutum
  Clone ID: LIB3189-039-P1-K1-C6
tcgacgaacaaacttctcagaacactttcggacaaaggtaatacgtctgctcaattataacaaagcatcgcgatgg

SEQ ID NO: 43873 - DNA, 212 bp, Gossypium hirsutum
  Clone ID: LIB3189-039-P1-K1-C7
attaaactaaaaacccttcacagatactgagattaatggcaccctcccattctacccggggagagtgaatacaccccgattcctaccatccttacctaactccgacagtctaacaagcatagctatctccttttgcactatcattgtctacctagccatttcatggctcttaatttaccgtaccaactctcacaaatccctcaaatcctcta

SEQ ID NO: 43874 - DNA, 392 bp, Gossypium hirsutum
  Clone ID: LIB3189-039-P1-K1-C8
aatatgttatatatctttatcctctttctttttgacctcttctccatgcaaatccattgtagaggggactttatcagattgccaagagtttacaccaatgagaaagagacaacaaccagagagcaagagcacgagaccttctttccccataccacccaaaagccagaagagcatgagccaaggatcatccctgaaacccaaaatggttattgtctttacagccactagtcacgctcaggctcatgctcatgctcaagccggcccagttttaccaccaaagaaacctaataaccctatgtctcccctggtagatttcaccctgatgaaccccttaacagcatccccgaattcttctacattaaagacactttcttctacaacaagaattgctt

SEQ ID NO: 43875 - DNA, 454 bp, Gossypium hirsutum
  Clone ID: LIB3189-039-P1-K1-D1
tgacaatccctttctttgtcctaaacatcctccttttcctctccagctccgcggctacaccaaagagcggtgcagatcacgacctggtccgttcatcatgtgtccacgccagctatccaagcctctgttttcgcaccctttcttcctactccggcccagccaacaccccacgtgagttagcccaagccgccgtaaaagtcagcctgtcccgtgcccgtaaagtgtcgaactacttgtcgacgagtgtgacggggtacaacaagagggaacgagtcgcactgagtgactgcgtggagcaaatagatgagtcgatggaggagttgagcaagacattaggggagttgaagcacttgagaggggagacgttcgagtttcagatgagtaatgcgcggacatgggtgagtgcggcgctgacgaatgaggacacgtgtcttgatgggttcgaaggagttga

SEQ ID NO: 43876 - DNA, 477 bp, Gossypium hirsutum
  unsure (1)..(477): unsure at all n locations; Clone ID: LIB3189-039-P1-K1-D11
gctatgaatagtagagggaggtatccaccaccggggatcggcgttggccgggggggcggagtgagtgctaaccctagttttcagtccaggccgtcacagcaacactacgtgcagaggaatttggttcataatcagcagcactttcaacaacacaatcagcagcattttcaacaacaacagcagtggctcaggcgtaaccagttacccggcggcaatgactccagtgtcatcgatgaggtcgaaaagaccgtacaatcggaagccgttgactcgagttcacaagattggaaggccaggctaaagataccaccagcagatacccgctacaaaacagaggatgtgacagctactaaaggaaatgaatttgaggactattttctgaaacgtgaacttcttatgggaatatatgagaagnggtttgaaagaccatctcctatcaggaagagagtattcccattgctttgaccggagtgatat

SEQ ID NO: 43877 - DNA, 435 bp, Gossypium hirsutum
  Clone ID: LIB3189-039-P1-K1-D12
cgaaatttgaaaaagaaaaagcaattgaaaattacaaaagaaaaacatgtcgagattcagagatcggactgaagatttcaaagacgctgtacggcaatctgcaatttcatcaggtttcaacgagcaattatggcgtctttcataatccataaaccacggcaaaggacgctctttcttaactctgcactcaaaacgttggagagtatcggagctttggatcagttcttgttaaagcaccgtaaagattacgtggatcgtcaccgaacaactgagcaagaaagggacagcattgaacatgaagttactgcttttgttaaagcttgcaaagaacaaattgatgttctcaaaaattgtataaatgatgaagaggcaagcttcaaggggtggcttgggattagggattcctcgaatgctgatacgatagcgcacaaacat

SEQ ID NO: 43878 - DNA, 351 bp, Gossypium hirsutum
  Clone ID: LIB3189-039-P1-K1-D2
agaagaataaggcagtgacgtactcgtacgccttcttccacatcattttttctctggcaagtatgtactcagcaatgcttttgacgggatggtctacctcagttggggagagcgggaagttggtagatgtagggtggccatctgtgtggatacggattctaacagcctgggtaattgcagctctctatatgtggtctctccttgctcctattctcttcccagacagggacttctaagtctctctaaaacaaagttgtcggatatctttgcaataaatttgctctgtatatgtatgtttgtatgtgtgtgggtgatctgagatggattgcagtcaacaaattgatgttggat

SEQ ID NO: 43879 - DNA, 473 bp, Gossypium hirsutum
  Clone ID: LIB3189-039-P1-K1-D3
cgagtttgtagccaccttcttgttcctttacatcaccgtcttgactgtcatgggtgtgtctcagtctaaaaccaaatgtgcaaccgttggtattcaaggcattgcttgggcttttggtggcatgatctttgcccttgtttactgtactgccggcatttcaggtggtcatattaaccctgctgtgacctttggattgtttctagcaaggaaactgtcacttacaagggcattgttctatatgatcatgcagtgcctgggtgctatctgtggagctggtgtggtgaagggattccaaggagataaccgatatgagatgttgggtggtggagctaatgttgtgaaccatggctacactaagggtgatggtcttggagctgagataatcgggactattgcgcttggttacactgtcttctctgctactgatgctaaaagaaatgccagagactcccatgttcctattctggcttcac

SEQ ID NO: 43880 - DNA, 437 bp, Gossypium hirsutum
  unsure (1)..(437): unsure at all n locations; Clone ID: LIB3189-039-P1-K1-D4
tgacgaactaatgtgtgctcttctaccagattccccttctgccacagccagcagaacaaaaagtggtcttatatggatcactaaatgggattctctacaacatcctgttgggtctgcatttttagctgttctttacagtgattacatgcgtgcatcagacaatgaaatactaagttgtggtgatgattcatttgaaccatctgatcttagaaagtttgcacaatcacaggctgattatgtgttgngtgataaccccatggacataagctacctagtgnggtatggtggtaaatacccagaatttgtacatcacagaggagcttcgatcccagttgatgcaaccactggttgctctgaagggttcaaatggcttagttcaaaaaaacctaaccctaatgtagcaataggagcccttgtagggggacctttcaaaaatg

SEQ ID NO: 43881 - DNA, 405 bp, Gossypium hirsutum
  Clone ID: LIB3189-039-P1-K1-D5
ctctctgtccagtcaggaaacaaaaagtggaccatatggatcactaacggggatcttgtacaacatcctgttgggtgtgcgcattcagctgttctccacagtgattacatgcgtgcatcatacaatgaaatactaaggagtggtgatgattcattggaaccatctgatgtgagacagttcgcacaatcacaggctgattatgtgctgggtgatcaccccatggacataagctacctagtggggtatggtggtaaatacccaccatttgtacatcacagaggtgcttcgacccgagttgatgcaaccactggttggtctgaagggttcaaatggcttagcataaagaaacctaaccctaatgtagcaattggagctcttgtagggggaccgttcaaaaatgaatta

SEQ ID NO: 43882 - DNA, 346 bp, Gossypium hirsutum
  Clone ID: LIB3189-039-P1-K1-D6
agaccaactaatgtgcgctctaatcccagatcacactactgcctcaggcagcaaatcaaatcgtgggcggacatgaatcactaaatgggatggtatacaacattccggtgagtctgtataacacgctgttgtttacagtgattacatgcgagcgtcatacatatatatactgagcattggtgatgatacatataaaccatctgatcttactaagtttgcgcaatatcacgctgaatatatgatgggtgatgacctcatggacataccctccctaatgtggtgtggtggacagatcccaaaatttgatcatcaccacggagcggtgatcccagaacatgcatcctct

SEQ ID NO: 43883 - DNA, 307 bp, Gossypium hirsutum
  unsure (1)..(307): unsure at all n locations; Clone ID: LIB3189-039-P1-K1-D7
atttttctctctaaacatcaaatcttttgaaaaagaatagtctggtttgattcttgaggggaagcttaaaccatgaagctggtgtttttagttcttgcaataacccaatggttcatttctcgagtctagtgcttttgtaagtaggggggttttctaacagcctgggtaattgcagctctctatatgtggtctctccttgctcctattctcttcccagacagggncnnttaannactcntaaaccaaagttgtccgatatctttgcaataaaattgctctgtatatgtatgtttgtatgtgtgtgggt

SEQ ID NO: 43884 - DNA, 433 bp, Gossypium hirsutum
  Clone ID: LIB3189-039-P1-K1-D8
cccacgcgtccggagaataatggagaaaagtgaaaagggtaatggtgttgctcctgctgcggggctccaatggctgtaatggggtcatctagaaatgaaaaccaagaagtgaataccagcatgagaactgtcgagaccatgctgcggttggtgcctatggctttaggggttgctgcacttgttgtcatgctcaaaaactcacagtccaatgactttggctccgtttcatactcagatcttggtgctttcaggtacttggtgcatgctaatggtatttgtgcaggctattcccttctttcagctattatagcagctgggccttgtccttctactatgcctagagcttggactttcttccttctcgatcagattctacatacataatcttgggagctgctgcttgttcaaccgaggggctttacttaacaaacaa

SEQ ID NO: 43885 - DNA, 299 bp, Gossypium hirsutum
  Clone ID: LIB3189-039-P1-K1-D9
ccttatccctccacagttcacacacagccgtctgtctttcaaaaaagtttgcgccagggatttaaaaggaacaaaaaatcttctactcaataaaagagagaaatatcttccttaccgtaactatttgcaggaaaattaaaaataacattgatgagttattacaatcaacaacaaccttcagttgttggtcctcctactcaaggtcatccaccctaaggatttcctaaggatgcttattcaccacctggatatcctcctacaaggatatccttaatgttatccttcttaaggatttcctt

SEQ ID NO: 43886 - DNA, 423 bp, Gossypium hirsutum
  Clone ID: LIB3189-039-P1-K1-E1
cttcaagatgcaaattttcgtcaagaccctcaccggcaagaccatcacccttgaggtggaaagctccgacaccatcgataatgtcaaggccaagatccaagataaagaaggaatcccaccagatcaacagaggcttatctttgctggtaagcagctagaggatggtcgtacacttgctgactacaacattcagaaggagtccaccctccacttggtccttcgtttgaggggtggtatgcaaatctttgttaagaccctcaccggcaagactatcaccctcgaggtggaaagctcggacaccattgataatgtcaaggccaagatccaagacaaagaagggatccctccagaccagcagagacttatctttgccggtaagcaactagaagatggccgtaccctggctgattacaacatccaaaa

SEQ ID NO: 43887 - DNA, 349 bp, Gossypium hirsutum
  Clone ID: LIB3189-039-P1-K1-E10
cccacgcgtccgaacattttgaagaaacaaagaatcaaacatgtcgaaggaagtgagtgagggaggggtgagccgaaaggactatgtggatcctccaccggcaccgctcatcgacgtggctgagatcaagctttggtctttttacagagctctcatcgccgaattcatcgctactctcctcttcctatacgtcaccatagccaccgtcatcggccacaagaaacaacacgatgcatgcgatggtgttggtcttttgggcattgcttgggcttttggtggcatgattttcattcttggttactgcaccggcgggatgttaggtgggtacattaacccggcggtgtcattt

SEQ ID NO: 43888 - DNA, 353 bp, Gossypium hirsutum
  Clone ID: LIB3189-039-P1-K1-E12
ctgcattttgctaagacaagccgagaaacaaagtgaaatattgctgagagtttgtggaggggagtgccttgagtgagggtcttacccaaattgtgatccctttaacttccttggtggtcattggagtcgcctggctttagtgatggttgtttctatcctgcgagctgttacatctggcatccaaaatcctgattgggttaagcatccactgatgttggctgacgctgttgacaaattgacagtcctagattttcagctcaagaaagatgcgtaaatagtaacagttgagaaggctacttctttgtcaactgcatctattgttgattcatcatttatcaacaaacttatcttca

SEQ ID NO: 43889 - DNA, 127 bp, Gossypium hirsutum
  Clone ID: LIB3189-039-P1-K1-E2
ttttggttacttgtctctccacgattatttccaatccttttcactttatctacccccccccctcctatctctttcactccccattgctggacgtagccaagattacattgcgatagcagaaattatc

SEQ ID NO: 43890 - DNA, 467 bp, Gossypium hirsutum
  Clone ID: LIB3189-039-P1-K1-E3
gccattgcagcccctgccaccgcctcactgcaagacccaaccaagtctcaccctgacgtcaagctcttcaatcgctggagcttcgaggaagttcaagtttctgatatctctttgagtgactacattggtgttcaaccttccaagcatgcaacctatgtgccacacactgctgggaggtactcagttaagcgttttagaaaggctcagtgccccattgttgagaggcttacaaactcattgatgatgcatggccgaaacaatggaaagaaacttatggcagtcaggattgtgaagcatgctatggaaattatttatctcctgactgatcagaacccaattcaagtcattgttgatgccattatcaacagtggacctcgtgaagatgctactcgtattggttctgctggtgttgtgaggcgtcaagctgttgatatttctcctcttcgtcgagtgaatcaggccatcta

SEQ ID NO: 43891 - DNA, 474 bp, Gossypium hirsutum
  unsure (1)..(474): unsure at all n locations; Clone ID: LIB3189-039-P1-K1-E4
acagtatccttagcaaaagggttccactaccaaatggaggttccttggtgattgaacaaacagaggccttagtctcaattgatgtgaatggaggacatgggatgtttggtcatggaacatcacaggaaaaagccactttggatgtcaatcttgctgctgcaaaacaaattgctagggagttacggcttagggatattggtggcattattgtagtggattttattgatatggcagatgactcaaacaagagattagtatatgaagaagttaagaaagcagttgagagagaccgatcaatggtgaaagtctctgaattatcgaaacatgggctcatggaaataacaagaaagagggttcggcctagcgtcacatttatggttagtgaaccatgcacttgttgtcatggtacggggagggtngaagcttttgagacctccttttcaaaaattgaacaagaaattggtcgattacttg

SEQ ID NO: 43892 - DNA, 470 bp, Gossypium hirsutum
  Clone ID: LIB3189-039-P1-K1-E5
accgaatcctaagcacaagggctccactcccaaatggacgtatctcggtgatcgaacacacagaggcctcactctcaattgatgtgaatggaggacatgggatgtctgttcatggaacatcacatgaaaaagccactttggatgtcaatcttgctgctgcaaaacaaattgctagggagttacggcttaaggatattggtggcattattgtagtggattttattgatatggcagatgactcaaacaagagattagtatatgaagaagttaagaaagcagttgatagagaccgatcaatggtgaaagtctctgaattatcgaaacatgggctcatggaaataacatgaaagagggttcggcctaacgtcacatttatggttagtgaaccatgcacttgttgtcatggtacggggagggttgaagctttggagactctcctttcaaaaattgaacaagaaattggtcgatta

SEQ ID NO: 43893 - DNA, 468 bp, Gossypium hirsutum
  unsure (1)..(468): unsure at all n locations; Clone ID: LIB3189-039-P1-K1-E6
acagtatccttagcaaaagggttccactaccaaatggaggttccttggtgattgaacaaacagaggccttagtctcaattgatgtgaatggaggacatgggatgtttggtcatggaacatcacaggaaaaagccactttggatgtcaatcttgctgctgcaaaacaaattgctagggagttacggcttagggatattggtggcattattgtagtggattttattgatatggcagatgactcaaacaagagattagtatatgaagaagttaagaaagcagttgagagagaccgatcaatggtgaaagtctctgaattatcgaaacatgggctcatggaaataacaagaaagagggttcggcctagcgtcacatttatggttagtgaaccatgcacttgttgtcatggtactgngaggggtgaagctttggaaaccttctcttcaaaaattgaacaataaattggtcgat

SEQ ID NO: 43894 - DNA, 205 bp, Gossypium hirsutum
  Clone ID: LIB3189-039-P1-K1-E7
ggaaagacttatcaagacgcaaagctctcccacaattctatcaacctacactatgatgtgggtggggattctagaggcgctgccaaaattcgagtttcgagcgatttaagatactccgttgtggagtcgttgcagatgattttgaagttcgcgtggaattaggccgagtttcatactaaagtgactgttaaagatccggtgattt

SEQ ID NO: 43895 - DNA, 227 bp, Gossypium hirsutum
  Clone ID: LIB3189-039-P1-K1-E8
aagatctgaaaaagaagatccgatggtggatattagctgaggtttcgaagcgactgagtgggtggagttttggtaggggtggtgaaagatgaacatcagcttatgctaagaagaagatgggtggagtcacgtcatctatcgcctcgaaattcgcttttttcccgccagattccccctcctacacagtattagaggacgacgcatgtgacggtcggctgtatatacct

SEQ ID NO: 43896 - DNA, 445 bp, Gossypium hirsutum
  Clone ID: LIB3189-039-P1-K1-F1
cggacgcgtgggattgaagtctaaactggaagctcttccttcatctctttctataattttccataactttcctttcaagattcagtttcccttcttttctgatcctctcgctttctcttttctgattctctcgctttcttccttccttcctttttgtcaagaaaaacaaaagatagtgtttcttttgctaatagtagttcagatagatatgtgtattttctttttctaaaaccctccactttttttaacaaatcccctctatcgaattcccacccatgtcttccacttctttatccgacgccacaactacgtcggcgtctgatcctcacgcgcccctcctccgcatgcgccagtctgatgcctccgcggctcgctcttccgcgctggctcttttgttggggcgggtcaccggacgccgtggcgcgtccatgcttgtgagggagac

SEQ ID NO: 43897 - DNA, 69 bp, Gossypium hirsutum
  Clone ID: LIB3189-039-P1-K1-F10
gaacagctgagctatattttctcggaaaattaaataaaagtccagaaaaaagaaggggggggagacata

SEQ ID NO: 43898 - DNA, 195 bp, Gossypium hirsutum
  Clone ID: LIB3189-039-P1-K1-F12
cccacgcgtccgcataaaccaaacagtactcaacaagttttgggaacttcttcatcttagggtgattggcattgctggtgggtatggcttgttcggtcgtagatatattgataatggtaatcttgatgattctcactcgcatgcttctggaatggtccatgtttcgtctatatttgttgatggtttcgaacattc

SEQ ID NO: 43899 - DNA, 455 bp, Gossypium hirsutum
  Clone ID: LIB3189-039-P1-K1-F2
acgcaagatagaggaagagagggataaacagtgtctggtctctttatatttgaaagtaaaatggccactctcaggcggagagagacgcattttatcaaactcttcatcacccaaatatgtgttccttctctctacactttttcaatctttgaattccttactttatgttactaggttggtgcttggttgtctcttctctttcttttttttttcttttaatcacgagcttcatggtttctgattttgtacttttgatgaactggaagtgtatgttttgcttcgtctgtctgatagtatgaatcccaaaagaaaaacatagtattcctttttgtcttgttttcagtggccttttttcgccacttcccaagcttgaaaggttaacagcttttcaattccttgaaatttggataaaaaacaccgctttctgatcctcgagcctcaaaattccattttct

SEQ ID NO: 43900 - DNA, 482 bp, Gossypium hirsutum
  Clone ID: LIB3189-039-P1-K1-F3
cccacgcgtccgaaaaaggaaaaaaaaatgaagctcttgtttctaactttgctgctttgttctcttcttctatgttcttcagtttttgaaccaacaatggctcagcctcgttcacctttttgtgaagggaaatgcaaagggaggtgcaataaagcggcggtttgggatcgatgcttcaaatattgcggcatatgttgcgaggagtgtaaatgtgttccttccggtacttatgggaacaaacacgagtgtccttgctacagagacaaggtgaataacaagggcaaacccaaatgcccttgaaaatgaaatatattcgagttcgggatttcatcaagcttaaagatcgaggacgaagaggctatatatatatatatgcatgctgatggtgttattataaaataaactgttttattgctgttgttttcctttgggtttttgttttggtagtgttgaataaaatttcccttatattttcccatcac

SEQ ID NO: 43901 - DNA, 458 bp, Gossypium hirsutum
  Clone ID: LIB3189-039-P1-K1-F4
tattttgtgaatcgtgtaaagcagctgatttatacatttcccgaagatgctgcaaccagtactggggctcccttctggtctgctccaaaacgattccctcatccacttcaagtctcaacagctgatccaagccacctgcagtttgttatggctgcttctatcctgcgtgctgaaacatttggcattcaaattcctgattgggttaagcatccacagatgttggcagacgctgttgacaaagtgacagtcccagatttccagccgaagaaagatgcgaaaatagtaacagatgagaaggctactactctgtcaactgcatctattgatgatgcagcagttatcaacgaactcatcttcaagctagaactttgcacaaaaaatttgcctcaaggattcaagatgaaacctattcagtttgaaaaggatgatgatacaaactaccacatggatctaatcgc

SEQ ID NO: 43902 - DNA, 363 bp, Gossypium hirsutum
  Clone ID: LIB3189-039-P1-K1-F5
aattctgcgaaatgtgtgctgcagaagcatggtccatatacctactatgctgcatctagctctggggatctcttccggcaaagctcaaaacgattgcgtctttcacttcaaggactaacacctgatccaagacaccaagctatggcaaaggctgccactataccgcaccgcaaaaacatctgatggttcaacacactgattgacataagcatacacaaacgatcgcggacgatgttctcaaagagacttttccagcttaccagcactagaaagatgatagattcatgacaactgggactgattctactcagctatctgcatctattgatgattcacactttatgaacgatcatgtttataggc

SEQ ID NO: 43903 - DNA, 472 bp, Gossypium hirsutum
  Clone ID: LIB3189-039-P1-K1-F6
cccactcgtactcctacgcagccgctgattcatccatttaccgaagatgctgcaaccagtactggggctcccttctggtatgctccaaaacgattccctcatccacttcaagtctcaacagctgatccaagccacctgcagtttgttatggctgcttctatcctgcgtgctgaaacatttggcattcaaattcctgattgggttaagcatccacagatgttggcagacgctgttgacaaagagacagttccagatttccagcccaagaaagatgcgaaaatcgtaacagatgagaaggctactactctgtcaactgcatctattgatgatgcatcatttatcaacgaactcatcttcaagctagaactttgcacacaaaatttgcctcaaggattcaagatgaaacctattcagtttgaaaaggatgatgatacatactaccacatggatctaatcgctgggcttgcaaaca

SEQ ID NO: 43904 - DNA, 348 bp, Gossypium hirsutum
  Clone ID: LIB3189-039-P1-K1-F7
gagcagagctatagcgagcatgcctgatgaacaggctattgaaattccagataccagctgtggagagacgtctgacagaactgggacaggacttatatgataccgtggactacatctggaaacccgttggctgaatatgaaaataaggtggctacctccatggtaaaatcttctccaacttcagttgtaaatcaggacaatcagcttatagaatctgactcactggaggaccaacacatattcaatccatctgtcgccgcttccacatatgggaatgttttaagccaatgtcctgcaatacctgctttatccaacatccagtgtggtgaattttatcacccggcctta

SEQ ID NO: 43905 - DNA, 215 bp, Gossypium hirsutum
  Clone ID: LIB3189-039-P1-K1-F8
atttcaccagcttttgccataaaccactaatcgggcgctcgggtccaacagagggggggatttctctcgcgctctctctctaaaaagacagatcaatattttttttatttcctttttaattatgacgagaaagtgtagaaaacttggagaaatcgcagtcatggagctctctgacgtctgacttgaaacacgagccatggctgctgccacaggaa

SEQ ID NO: 43906 - DNA, 141 bp, Gossypium hirsutum
  Clone ID: LIB3189-039-P1-K1-F9
agggacgtgcactcaagaggaggtttgtgatacgctaacaactccaactacaaaaacgacaccatgatccgcaaagaggtcttcctcactccttccgttcttaaggaatgccgccgcatcatcgccgacagcgagataatg

SEQ ID NO: 43907 - DNA, 403 bp, Gossypium hirsutum
  Clone ID: LIB3189-039-P1-K1-G1
gtagaaattgtgtttcgtcgagagagaataccagagggaaggctaagccatggccgccgcggaggacagcggagagatttaccttcgctactacgtgggccacaaagggaaattcgggcacgagtttttggagttcgagttcaggccagatgggaagctccgatacgctaacaactccaactacaaaaacgacaccatgatccgcaaagaggtcttcctcactccttccgttcttaaggaatgccgccgcatcatcgccgacagcgagataatgaaggaagatgataacaattggccagaaccagaccgtgttgggcggcaagagcttgagatagtgatggggaatgagcacatctctttcacaacttcaaagattgggtcccttgttgatgttcagagcagt

SEQ ID NO: 43908 - DNA, 481 bp, Gossypium hirsutum
  Clone ID: LIB3189-039-P1-K1-G10
cacctcttcctttgttcctcatcctctgatccgtctcttcccgcattcgtcccgccggggttaacaagttttcaaacgaaaaatgagggaaatccttcacgtacaaggcgggcaatgcgggaaccagatcggatccaagttctgggaagtggtttgcgacgagcacggcattgaccctaccggacgctataccggaaactccagtctacaattggagcgcgttaacgtttactacaatgaggcttcttgtggaaggtttgtcccacgcgccgtgctcatggatcttgagcccgggaccatggatagtgtgagaaccgggccttatggtcagatctttaggcccgataactttgtcttcggccaatctggagctggtaataattgggctaaggtgcattatactgaaggagccgagcttattgattctgttcttgatgttgtcagaaaaggagctgagaattgtgattgtctccaaggtttt

SEQ ID NO: 43909 - DNA, 258 bp, Gossypium hirsutum
  Clone ID: LIB3189-039-P1-K1-G11
cttttaccagattctcgactctgtctccttcatcgctctttttcatcgatcagatctggtgagacccatctgtcaaagcaacccttcactcattccatccatgacgcttggctcatgaggatccagtgttgtggtgcctttgttctttcatattgctgtgtgtgcttgtgcttggttttattgtattttgtgtaggttctttctgcttatgtttttatcgctttatcttttttttacattgtgtgcttttattttgta

SEQ ID NO: 43910 - DNA, 355 bp, Gossypium hirsutum
  Clone ID: LIB3189-039-P1-K1-G12
gtggaatctatttttcatttcttttataaataataatattaacataagtaattattttgcatgaaattttttaacttcacaaacattttatttttaaaaattttaaattatatggcaaaatatcaatcaatttataaagttaaaaatttttaataccacattaaccgtaatttatgattagagtttcaagtgcatgaacttggtgggggaatacagcctgaacaagttgaatgcggacatggtagcgatggaaaacattattaagcttgccacgaaaccccacagcaaggatcctccgatttgggtgcagaatcgagtatatttattgcaccacttgagccattggaagttctct

SEQ ID NO: 43911 - DNA, 487 bp, Gossypium hirsutum
  Clone ID: LIB3189-039-P1-K1-G2
acgggtctccatcgggatctaaaaccgcaaaatttgctgatagatcgccgtaccaatgcactaaagcttctgattttggtctggcccgagcatttggtattcctgtcagaacatttacacatgaggtcgttactttgtggtacagagcacctgaaatactgcttggatctcgccattactctactcctgttgatgtatggtcagtgggctgtatatttgctgagatggtgaatcaacggccattatttcctggggattctgagatcgatgagctgttcaagatcttcagaatcttgggtactccaaatgaggatacatggcctggagtgacttcattgcctgattttaagtcttcttttccaaagtggccagctaaggatttggcaactgttgttccaaatcttgaatctactggaattgaccttctttctaaaatgctgtgcatggatcccagcaaaagaattacagcaaggagtgctcttgagca

SEQ ID NO: 43912 - DNA, 344 bp, Gossypium hirsutum
  Clone ID: LIB3189-039-P1-K1-G3
gttctacatcgggatctaaaaccgcaaaatacgctgatagagcgccggaccaatgcactaaagcggatggttttggtctggcccgagcattctatattcctgacagaacataatacacatgacgtgtgttactttgtggtacagagcacctgaaatactgtttggatctcgccaatactctactactgaagatgtatggtcagcgggctggatatttgctgagatggtgaatcaacagccaatatttcctggggattctgagatcgatgagctggtcaagagcttaaaactcttgggcacaacaaaagaggatacatgggctggagtgacatatattgactgat

SEQ ID NO: 43913 - DNA, 452 bp, Gossypium hirsutum
  Clone ID: LIB3189-039-P1-K1-G4
cccacgcgtccgcccacgcgtccgcccacgcgtccgcccacgcgtccgccagtttcaactcataataatctagtgttccctttcgagggattttaccccttttttttttttctttttttttcttttgaatttttttgaaattttttcttttttgggtttaatttggtttagtttccgtttttgtcctcatcctcatcttctttttcgatttctccagaaatcctaaccctatagattttctcagaatcttcaaatttttaactaaactgaaagaagatgcagcagcaaaggctaaagcagcaacatgctctgatgcaacaggctttgtaccacaatcccagtctcatgagtggtcctcagatagaacctatcttgagtgggaatcttcctcctggctttgatgcagctacttgccgcagcgtatacgtgggaaatattcacccctacgtcac

SEQ ID NO: 43914 - DNA, 449 bp, Gossypium hirsutum
  Clone ID: LIB3189-039-P1-K1-G5
ctcaatctccccatctctctcgtgtctgggtctcgtaagttggtgaatagtgttgtaattagtgccaatggctcggattgggacctgtgcagctcacattgtgttggcaatatttgctgtggccatgtttgttgtgtccgggaccatggcacaggatattgctccttctcctgcaatggctaccggagcaggctctgctttgccggtttccgctgtcttcttatgctcttacatgttggtctctttaattgctctcttggtgcattgaattcaaagcttttcaagactttatgacattggctacccttaatttcactctcactggtgatgaggggagtagcctctaatcttgtccgagataatattcgggtgttatcaattatcaatttctctaaagttttaaatatctctatatatatcatgttacattagtgacataaatttgattt

SEQ ID NO: 43915 - DNA, 126 bp, Gossypium hirsutum
  Clone ID: LIB3189-039-P1-K1-G6
cccacgcgtccgattaatcttatggcgactcatagaaacgagcagaagacagactcaactagtgggacagtgcttgctagtgtaatgaggagtctacacacaagtgttgactgtctttaggcattc

SEQ ID NO: 43916 - DNA, 420 bp, Gossypium hirsutum
  Clone ID: LIB3189-039-P1-K1-G8
ctgacgcgtagattttctctctaatggctgcatttcatctcacgcatgacacatgcctgcgctggtagagtttccaaggctgaattttggagtttttgccgtgaggaggtcattgaatttgggattgaatatttcttgcaagcgttcagttaggtcaattagaatggagaatggtaataattgtaacctgatgggtgcaagcaatgaatctagaggtgccttggttgtttttgaaggattggatcgtattggtaaaacttcacaatgtgtgaagctgttttcgtatatagaggttatggtgcattcattcgagttatggcgattcccctacaaaactacaaacgtttggcagatgatattccgtatatctggcttatataattccattttgattgaccatcaccaatctcttcatctttt

SEQ ID NO: 43917 - DNA, 448 bp, Gossypium hirsutum
  Clone ID: LIB3189-039-P1-K1-G9
gcgggtctctgtactgagcggacccccgcgatctataacgcggacgacccgaagaagggcagcatcgagtgttagactacacattggcattggttacatcgggggtgccaatatcttatccggtggtgccttcgacggtgcgtccatgaaccccgcggtctcattcatggaggtcgtggcactcattcgcgaccaaacccataacctctactggccaggcacgttcatagtgattttcaaagtgggactggcttaccaggtgaaactcatattcgcaatgggaggcctcgaccagacggccgcggataaaacaaataatttgcgggttattggcctaggtttactgaccgagacctgcatcaatagctggagattcaaattctgtgatcactcctttgtttgagaaaaagttgagtgcttgtgatgctgggcgaatttggacgtctgg

SEQ ID NO: 43918 - DNA, 456 bp, Gossypium hirsutum
  unsure (1)..(456): unsure at all n locations; Clone ID: LIB3189-039-P1-K1-H1
attggtggctactgaactcatgtgaaccatttgttgtccaggaatcaattgcgaggaacagcataatccatgtttgactaaatttcagtcttctctaaaggaggaatctaatccacaatttggtttagctgtaccttatacatctccagatgaagcaaatggtcaaaatggagtttctggcactcatttgcgaccaaaccctcaacctccacttgccaagcaatttcatagtaatcttcaaaatgggactgactcatcaggtgaaactcagattcgaaatgggaggcctcgaccagatggccgtggaaaaaacaatttatttcctcgttattggcctaggtttactgaccaagacctgcagcaaataactggagattcaaattctgtaatcactcctttgtttgagaaaatgttgagtgctagtgatgnctggcgaattggacgtctggtgctacc

SEQ ID NO: 43919 - DNA, 253 bp, Gossypium hirsutum
  Clone ID: LIB3189-039-P1-K1-H10
gtcgcgccgccacgcgtccgatcgcgagcggcctttctcctttttctctttctttgagaaagaagaagtattagactgaggctttttattagctcagtcatgagcacctgatctctcttcaaacatgagagaaaacattagtacattccgtgcactaatcagacctaacatcagccggcaggtcctcttattataaatactaatattcctagcagctcaattagagcgaatgggtagctgatgggggcattct

SEQ ID NO: 43920 - DNA, 456 bp, Gossypium hirsutum
  Clone ID: LIB3189-039-P1-K1-H11
ggcgatggtgcgaatgcaagctgacggacgccttcccgtatctcaacgtcgtaactataccagcgttgtcgacgccatcacacgcatgaccaaacaagaaggcgtgacctccttgtggcgcggctcgtcgctgacggtgaatcgtgcgatgttggtgacggcatcgcagcttgcctcctacgatcagatcaaagagatgattttggaaaacgggctgatgaaagatgggctggggacacacgtggcagcgagcttttcagccgggtttgttgcggcagtggcgtccaatcctgttgatgtgataaaaacaagggtgatgaacatgaaggtggaggcagggcaaaagccgccttacgccggcgctttggattgtgctatcaagacggggaagtcggaagggccgatggctttgtataaaggtttatacccacaatctcgagacaagggaccatttac

SEQ ID NO: 43921 - DNA, 299 bp, Gossypium hirsutum
  Clone ID: LIB3189-039-P1-K1-H12
atcaaatatgagttccatttccaagagtttccttctccttgcccttttagctgctgctgttcttctcatttcatcggaagtgacagctcgagaccttgctgaaaccaccactgaaaagaacaatggtgaggtggctactgaaacaaccgaggctgaggctgaggtagaagagtccaaatatggatatggtggatacgggagccgtcgaggttatggaggatacggagggcgcggtgggtacggaggatacggagggcgtggtgggtacggaggatacggagggcgcggtgggtatggtg

SEQ ID NO: 43922 - DNA, 419 bp, Gossypium hirsutum
  Clone ID: LIB3189-039-P1-K1-H2
ccatttgttgttcatgaatcaattgcgaggaacagcatgatccatgtttgactaaatttcagtcctaccaaaagaatcagccattatttttgtagcaatgtatttttttaaaacaaagaaaaatgggtattcttgccaaaaaactggaaaatcccaaaaaaattgaacaaggaaaagaacaccgctctttgagtgaactgcccttgaaaagaacgatgggtctccaaaaataatcaagccgccaagggtttttggcatggattcaaacccagggtttccctttcccacttcaatgcaccaaactctccggacccgtattcgaccaacagacttgaacctcttacttgtgccccaccaagtgcatgttggtcccatttatgaaaaatggtttccacattcccagcaaatcctatcggaaa

SEQ ID NO: 43923 - DNA, 448 bp, Gossypium hirsutum
  unsure (1)..(448): unsure at all n locations; Clone ID: LIB3189-039-P1-K1-H3
cccacgcgtccgggaaagaaaaaaatgaagctcttgtttctaactttgctgctttgttctcttcttctatgttcttcagttnttgcaccaacaatggctcagcctcgttcacctttttgtgaagggaaatgcaaagggaggtgcaataaagcggcggtttgggatcggtgcttcaaatattgcggcatatgttgcgaggagtgtcaatgcgttccgtccggtacttacgggaacaaacacgagtgtccttgctacagagataaggtgaacaacaagggcaaacccaaatgcccttgaaaatgaaatatattcgagttcgggatttaatcaagcttaaagatcgagggcgaaagaggccatatatatatatatatgcatgttgatgatgatgttattataaaaataaacttgtttggttgctgttattttcctttgggtttttgtgttg

SEQ ID NO: 43924 - DNA, 413 bp, Gossypium hirsutum
  unsure (1)..(413): unsure at all n locations; Clone ID: LIB3189-039-P1-K1-H4
tttttgttttcattttccttttgtcctttttctctttcctaggttttcggttttctcagccaaaggctttcgtttagcttcatcaatggcacaggaggaggttcagaacggaggaccggagaaagtagcggaggtgagcttcacggcgctgaaaccgcagctcatggtcgaagcacccaaggcagctgatgcggtgcagttctacaagaccgcgtttggcgctgttgaggctggccgtaccgtgtaccctaagcgcaaggctgagcaggagcagcctcacgtnctctccgctcaacttgagcttgctggctctaccattctcgtttctgacatcgctgataactctactccggtgaaaaccgaggggactggatgtgtgctctgcctggagactgaggacgtcgaagctgcaa

SEQ ID NO: 43925 - DNA, 305 bp, Gossypium hirsutum
  Clone ID: LIB3189-039-P1-K1-H5
gttttgcttgcgattaatcgatatggctagctcaatgtcccttaagcttgcatgtgtagccgagggctgcatggtggctggatcacccgtgcatgaaggggcccaaacctgtggaccagtcacaagctcgctcgcgcgctgcattggtctctagccagagaatatggctggtgcacccaccgcagcttgttccgtgcagatatacaatatcaacttcggcgctcatacagctccacaccccgtggcccctaagcgctacgttaaacgtgcgcacgctgacattctttgcattaaacatgagcttg

SEQ ID NO: 43926 - DNA, 394 bp, Gossypium hirsutum
  Clone ID: LIB3189-039-P1-K1-H6
tttttgtttgcagttttccttttgtacctagcctatttcctaggatttcggcatgctcagccaaaggctggcgtttagcttcatcaatggcacatgaggaggttcagaacggaggaccggagaaagtagcggaggtgagcttcacggcgctgaaaccgcagctcatggtcgaagcacccaatgcagctgatgcggtgcagatctacaagaccgagtttggcgctgttgaggctggccgcaccgtgtaccctaagcgcaaggctgagcatgagcagcctcacgttctttgcgctcaacttgagcttgctggctctaccattctcgtttctgacatcgctgataactctactacggggaaaaccgcagggactggatgtgtgctctgactggagac

SEQ ID NO: 43927 - DNA, 466 bp, Gossypium hirsutum
  Clone ID: LIB3189-039-P1-K1-H7
acagaatctcttacaaggctagttcatgagtgtgaggcaaatctcgagcttctctttccactggaagctgaagtaattgaatctactccacaaggagaaccaaacccatcatcaaataacactgcaaagcgctcacaggaagcttcatcgtcgaatctgggagaggaaacattggatatttaccgtagcacactggctgcaatgaaagcaatacgcggtcttcaaaaggcaagttccacctgtaatccattatcgttctcggctttccttaagaaccaggatgatgacagtggtgctgtaacagctgaaaactctgcttcaaattcttcacccactttgcaaaaaggtaaggagtctgataaagaggatgcacaatctgcgcaacaacgataggttttcgattttcccggatactttttatctttgactttttctttgaacaactgacagaataataatgtgtttg

SEQ ID NO: 43928 - DNA, 481 bp, Gossypium hirsutum
  Clone ID: LIB3189-039-P1-K1-H8
aaatcgcagggcttttttaacctctccctctctctctagaaccctcactattcttttcttttggttgtttatatggcatctcaagccagcctcctccttcaaaaacagctcaaagatctttgtaagaatccggttgatgggttctcggccggattggttgatgaaaacaatatctttgaatggagtgttacaattatcggaccacctgatactctttatgaagggggatttttcaatgccatcatgagctttccgcccaattatccaaacagccctccaacagtgaaatttacatcagagatttggcatcctaatgtttatcctgatgggcgtgtttgcatatcaattcttcatcctccaggtgatgatccaaatggttacgagcttgcaagtgagcgctggatgccagtccatacagttgaaagtattgtattgagtatcatatcaatgctttcaagccctaatgatgaatctcctgcga

SEQ ID NO: 43929 - DNA, 462 bp, Gossypium hirsutum
  Clone ID: LIB3189-039-P1-K1-H9
cccgatttgtcttcttcattgccccgccatggcttgtgttagcttcgctaaactcaacgcgccggcgtcctcttggatcggcggccagcactctctccctcaacgctccggatcatccgctcggctcgccactcgcagaggctcactcccgatccgtgctggcgcttacaccgacgaactcatcaaaaccgccaaaactattgcttcacctggtcgtggaatactggcaattgatgaatcgaatgcaacatgtgggaagagattatcttctattggctcagacaatactgaacccaaccgccaggcttacagacagcttatgctcacaactcctggcctcggagaatatatttccggtgccattcttttcgaggaaacactttaccagtcaactacagatgggaagaagtttgttgatgtcttgcacgaccagaaaatcgtacctggcatcaaagtagataa

SEQ ID NO: 43930 - DNA, 263 bp, Gossypium hirsutum
  Clone ID: LIB3189-040-P1-K1-A1
atttttcctcatcaccatcgtctgctattcttcacaaaaaagaaaagaaaaattacagtgaaaatggcaacccttaaagttccagctcatgtacctgccccttctgaggatgctgagcaacttcgtaaagcttttgaaggatggggtacaaatgagcaattgattatcgacattttggctcacaggaatgcagctcagcgcaatttgattcgtaaaacttatcgtgaagcttattggggaagacttccctaagcctttggttg

SEQ ID NO: 43931 - DNA, 132 bp, Gossypium hirsutum
  Clone ID: LIB3189-040-P1-K1-A10
cgagtgaagacctctcaaacaagagggcgatgatgatgaagaagaactggaagtttgtaagactaacacaagaggtttgggttggtggttatatgactgaaatagtttaaagattaatttggagttgtacat

SEQ ID NO: 43932 - DNA, 374 bp, Gossypium hirsutum
  Clone ID: LIB3189-040-P1-K1-A11
cccacgcgtccggcagcccagatgatgtacctaagtattggattgcatttacggtatctgtaccacctcttggcttcagcacttacaccatctctgcctctaaaaagccaggagctggatcaaccaaatcatctatatacaaatttcagaagggtgagaagccagctattgaagttggtgaaggaaatttaacgcttactatttcagctccttcagggaagatcataaattatgtcaacaacagaaacttggttgaggaatcagtggaacaatcatttagctattacactggatataatggagttaacgacaaagcaccccagaactctggggcatatatcttccgtccaaatggcacataccacataaaagct

SEQ ID NO: 43933 - DNA, 382 bp, Gossypium hirsutum
  Clone ID: LIB3189-040-P1-K1-A12
ggaacatatggatatgctgcaccagaatatgtaatgactggacatttgacatcgaagagtgacgtatatagctttggggtagttttacttgaaatgttgactggccgaagatccatggacaaaaaccgatcaaatggggaacacaatctcgtggaatgggcaagacctcatctaggagacaagagaaggttctttcgaattttagatcctcgtcttgaaggccacttttcgataaaaggtgcacaaaaagctgcccagctggctgcccaatgtcttagccgtgatcccaaagccagacctcggatgagtgaagttgttgaaatcctaaagcctctaccaaacctgaaagatatggctagctcatcttattatttgcaaacta

SEQ ID NO: 43934 - DNA, 236 bp, Gossypium hirsutum
  Clone ID: LIB3189-040-P1-K1-A2
gcgaaagcttatctcttttcgtctctgaatctgatcaatcaacacctgaaaaggaaaacttacaaacaacaactactactagtctactacccagcactagaagcagctcgtagccagccatggatgaagagtacgatgtcatagttctaggaactggtctcaaggaatgcatcctcagcggtcttctttctgttgacggactcaaggttctgcatatggataggaatgattactat

SEQ ID NO: 43935 - DNA, 204 bp, Gossypium hirsutum
  Clone ID: LIB3189-040-P1-K1-A3
caatttgtgaagcaaggtttcagaaaaattcaaattcacaaaagagaacgatcgaaaataccactagtattttgaaataagctccaatccatggctaaacggttgatctattccagactctcactctctagactctctgcaatgggtggacccaagaatggaagatttgtttcaacagagtctaacaagaatgatgagcctttt

SEQ ID NO: 43936 - DNA, 109 bp, Gossypium hirsutum
  Clone ID: LIB3189-040-P1-K1-A5
agaacactacacgagtggttgtgaactgcaaaaggagatcgatttcgaagccttttcaccatgagagctaagtggaagaagaagcgtatgaggaggttcaaaagaacta

SEQ ID NO: 43937 - DNA, 344 bp, Gossypium hirsutum
  Clone ID: LIB3189-040-P1-K1-A6
gccatttccatcctgggatgtggttctgtcacagataatattctatttcatcctggaggattttgtggtgttactggggacatcgttttttacatacaaaatggctgtacaagcatgtgcacagtgttcatcatgagtatgctactccatttggactgacatccgagtatgctcaccctgccgagatattgttccttggctttgcaacaataattggtccagccatcactggcccacatcttattactctctggttatggatgactcttagagaactaaaaacaggtgaggcacattgtggttaccatttttcatggagcctcttaaactttttacctttatat

SEQ ID NO: 43938 - DNA, 141 bp, Gossypium hirsutum
  Clone ID: LIB3189-040-P1-K1-A8
acgcgtctgcaaaaatggcaaggaaaattgtgctcattctggtactgagatgcctctgcattgggctagcagctgctgactggaacatcttgaacccaatatggaatatcaatgcaagacaagatagctggaaaaactact

SEQ ID NO: 43939 - DNA, 126 bp, Gossypium hirsutum
  Clone ID: LIB3189-040-P1-K1-A9
gaaactaataattcgatgtttgacgagagatgattacaaatgaaccatgattgaaaaattaactaaaaacagtagaatgggactgtttctggaaaatcatttcagattaatcaaagaaccttttga

SEQ ID NO: 43940 - DNA, 258 bp, Gossypium hirsutum
  Clone ID: LIB3189-040-P1-K1-B1
agagcaccgatcgaatccgtacaatgcttcggccgcaagaagacggcggtggcggttacccactgcaagcgaggccgtgggcttatcaagattaacggttgtcctatcgagcttgttgagcccgaaatcctccgtttcaaggccgtcgagccaatttttttcctcggccgccagcgttttgccggcgtcgacatgaggatccgggttaaaggcggaggccacacttgtaagatttacgccatccgtcaaagctttgtt

SEQ ID NO: 43941 - DNA, 443 bp, Gossypium hirsutum
  Clone ID: LIB3189-040-P1-K1-B10
cttctgttacgatggcggctactaccttctctccttccttctccactccctcggtcaattcttcctccagagcccacaaaactttaaccaaccctaatctaggctttttggcctcagtttcgagatccttgaggtctctcaaagcaaccaggctgactactgataatgcttgtggctcagctatggcctctcgtatggtctccgttcctgccgtccagacacacatatctctcgattttgagacctttgtcttcaagaaggagaaagtctccctcgctggtcaggacgagtacattgtgagaggaggaagagatttgtttaagttgctgcctgacgctttcaaagggattaagcagattggtgttattggttggggttcgcaaggacccgctcaagctcaaaatttaagggattctcttgctgatgcaaaatctgatatcatt

SEQ ID NO: 43942 - DNA, 445 bp, Gossypium hirsutum
  Clone ID: LIB3189-040-P1-K1-B11
ttctgttttccttgttctcttctacattcagcgaaggggtgctctgagatcacataccaaaatggtgaaggccgttgccgtccttggcagcaatgaaggtgttagcggaactgttttcttctcccaagaaggagatggtccaactaccgtgactgggaacctttctggtcttaagccgggactccatggcttccatgttcatgcccttggggacacaactaacgggtgcatgtcaactggaccccattttaatcctgctggcaaagagcatggtgctccagaagatgagaaccgccatgctggtgatctagggaatgtcactgttggtgatgatggctgtgcaagcttctccatcaccgacaaacagattcctctcacaggcccaaactccattatcggaagagctgtagttgtccatgcagatcccgatgaccttggcaagggc

SEQ ID NO: 43943 - DNA, 464 bp, Gossypium hirsutum
  Clone ID: LIB3189-040-P1-K1-B12
ggaccacttcttcccttccattttactttgttttagttgccataacgtcaccttccaatacaacccacaatgaggcaacaatatgtcttcactactctcacgttgctcatcctgttttccctcagttgttcaacaacattagcccaagctccggcactggctccagcaccttctggtccgacaaacgtcaccaagatcctcgaaaaagccggtcaattcaccctcttcattcgtcttctaaagtccactcaagtggccaaccagctgctcggtcagctcaacaattccaacaatggtatgaccgtttttgcaccaacggacaatgctttctccagccttaaatcgggcacattgaattcactcaccgatgaacaaaaagtggagctggtgcaattccacatcgtcccaacataacctaactcgtctcagttccaaaccattagcaatcctttgagaacccaaac

SEQ ID NO: 43944 - DNA, 160 bp, Gossypium hirsutum
  Clone ID: LIB3189-040-P1-K1-B2
ggcgagagcaccgatcgaatccggacaatgcttcggccgcaagaagacggcggtggcggttacccacagcgggcgaggacgtgggcttatcaagaataacggacgacctaccgagcgggatgagccgcgaaaacgacgcatgaagggccgagagacaaaa

SEQ ID NO: 43945 - DNA, 51 bp, Gossypium hirsutum
  Clone ID: LIB3189-040-P1-K1-B3
cccaaagcaaaaagttggcatcttttacaatcacaactactggctattgat

SEQ ID NO: 43946 - DNA, 196 bp, Gossypium hirsutum
  Clone ID: LIB3189-040-P1-K1-B6
tttccccatctctctcgtctctgggtctcgtaagttggtgaatagtgttgtaattagtgccaatggctgggattgtgacctctgcagctcacattgtgttggcaatatttgctgtggccatgtttgttgtgtccgggaccatggcacaggatattgctccttctcctgcaatggctaccggagcaggctttgcttt

SEQ ID NO: 43947 - DNA, 244 bp, Gossypium hirsutum
  Clone ID: LIB3189-040-P1-K1-B7
ccaaacccttaattcaggatgaatttcatggctttaaaacaacctgaaaatagcttactcgggtctgaatctgactcccagaggactctgtaccccatatgtgactggaacatcagttgcggctttaaagtacaaagatgggattttaatggctgctgatatgggaggtcatgttcattcactttcattggccttttatctttttttctgaattggtcagtttcttttaatggtttgaatcatt

SEQ ID NO: 43948 - DNA, 413 bp, Gossypium hirsutum
  Clone ID: LIB3189-040-P1-K1-B8
agatttttcaggttaacctgagacgagcggcgcgtcatcagaagcttgacccttctgcgactcacggggtgactcagttctccgatttgactccaggcgagttcagaaaggcatatttgggattaaggagactgagattgcctaaagatgcaactgaggctccgattttgcctaccgataatttgcctcaagattttgactggagagaaaaaggagctgttacacccgtcaaaaatcagggttcatgcggatcatgctggtcttttagtacaacaggagccttggaaggagctaactttttggcaactgggaaacttgtgagcctcagcgagcaacagcttgtggattgggatcacgagtgtgatccaaataaaagcaggttcatgtggattctggatgcaattgggtgggtt

SEQ ID NO: 43949 - DNA, 278 bp, Gossypium hirsutum
  Clone ID: LIB3189-040-P1-K1-B9
gtgacgactaccattctgtcatctccttcttcaccttccaaggtgtcaaatactgtttccaatcaggtttataagcatcaaccgttctctgcaaacatgatcaaagaagtggagcatatggcatccaagtctctggtatctgattttggtgctgctttatctccttcactgcctgagcagcaatgccaggatgatgaacaagaaccagagttgattggtaaagaaaatgttcgagcacccaacatatttacatcacgttgggctttttgtagcgatga

SEQ ID NO: 43950 - DNA, 469 bp, Gossypium hirsutum
  Clone ID: LIB3189-040-P1-K1-C10
ctgttctctctctctctctttcccatagtttcacccatcttttaatccatcgctcacaaaattatgggtttgaaggaggaattcgaggagcatgccgagaaagttaagaccctcccggccgccccttcgaatgatgacatgctcattctctatggactgtacaagcaagctactgttggaccagtgaataccagccgtcctggaatgttcaacatgagggaaaagtacaagtgggatgcatggaaggctgttgaagggaaatcaaaggaggaagcaatgggggattatatcaccaaagtaaaacaactgtttgaggctgctggaagttcttgatgtgtgtgtgtatgaccaatgaaactggtgtaatttcaagcccttgtcggttacttggggttttcattactatgaataaattatgtactctttttctattgctattatgttatttacaggaaaaactctttgattt

SEQ ID NO: 43951 - DNA, 300 bp, Gossypium hirsutum
  Clone ID: LIB3189-040-P1-K1-C11
gctttccaatacaaagcttcatattatcttttttagttccgacaaaagaaaacgaaaaaaataggggaaatacaatcgttttctttttgaagtcgggttttagtttttggggagaaaaaaatgttgggagtatttagcagtgcgatagtgtctccgccggacgagctggtggcggccggttgccgaactccatcacctaagataacggcggatgctctggtgaaacggttccttgagacgaactcctccggcgtgtccatgcagatcggagaccatgtgcaattcgcttattctcaccat

SEQ ID NO: 43952 - DNA, 320 bp, Gossypium hirsutum
  unsure (1)..(320): unsure at all n locations; Clone ID: LIB3189-040-P1-K1-C12
cccacgcgtncgtacagattcaaaaagaaataaaggtagaagaagcaatggccactcttacagtgcccacgacagttccttcagtgtctgaagattgtgaacaactaagaaaagccttttcaggatggggaactaatgagggcttaatcatagatatattgggtcacagaaatgcggagcaacgaaacttgattcgaaaaacctacgctgaaacctatggagaggatctcctcaaggcactagacaaggaactctcgaatgactttgagaggctggttctgctttgggctcttgatcctgctgaacgtgatgcccttttg

SEQ ID NO: 43953 - DNA, 87 bp, Gossypium hirsutum
  Clone ID: LIB3189-040-P1-K1-C4
atagatcatggcaaaagtagatgaaccacagccacattcaccaaaggagcagcttgcccaacattttctgtgcttgcatttacaagt

SEQ ID NO: 43954 - DNA, 546 bp, Gossypium hirsutum
  unsure (1)..(546): unsure at all n locations; Clone ID: LIB3189-040-P1-K1-C5
cgtcncnngaatatttcaaattggatcgtgcataaatggtgtggcccgatctgtaaacaaagacctgcgaggtgcgtcaagnnaatttaatgtcctgatgngnnaattggcncnnttgaagatgtgcttagcaagaaataagggcgaaaagaaaagaatgttgcgggttatatgtgtgtataccaatgtnnggcctgagggtgaccctnnacttcagcttccgtgcgaagagatacctctgttggcaggcgcagaccaattcaaaatgatgtactggagtcgtagcacaaagaattgaaatccatgggtatcgacaattctcatccacaagactacctaaatttctactgccttggtaatagggaagaagttcccaaaagttctgggccaagttcatcccaatgtaaccatagtgaaacggtttcagcttcacaaaagttccaacgggttatggtttacgtacatgcaaagggaatgatagtagatgacgagtatgtgatattggggtctggcaatattaatgaacgattcttggctggatcaagg

SEQ ID NO: 43955 - DNA, 240 bp, Gossypium hirsutum
  unsure (1)..(240): unsure at all n locations; Clone ID: LIB3189-040-P1-K1-C6
nccacgcgttcgtacagattcaaaaagaaataaaggttgaagaagcaatggccactcttacagtgcccacgacagttccttcagtgtctgaagattgtgaacaactaagaaaagccttttcaggatggggaactaatgagggcttaatcatagatatattgggtcacagaaatgcggagcaacgaaacttgattcgaaaaacctacgctgaaacctatggagaggatctcctcaaggcac

SEQ ID NO: 43956 - DNA, 414 bp, Gossypium hirsutum
  Clone ID: LIB3189-040-P1-K1-C7
aacagatcagacagtcgatgagatctaaagggttattgcctttctttgacagtgcttaccagggatttgcaagtggtagcttagatgtagatgcacaacctgttcgcacgtttgttgcagatggcggggaatgctttatagctcaaagttatgcaaaaaacatgggactttatggggagcgtgttggtgctctcagcattgtctgtaaggcggctgatgttgcaagcagggttgagagccagttgaagcttgtgattaggcctatgtattccaatccaccaattcatggtgcctcaattgcaatgactatcctcaaaaatagtgatatgtataacgagtggaagattgaactgaaagccatggcagaccgaattattaagatgcggaaacaactattggatgctttaagtgcta

SEQ ID NO: 43957 - DNA, 55 bp, Gossypium hirsutum
  Clone ID: LIB3189-040-P1-K1-C8
aaagaggttctgctagttgtttatcgaggtctgcatcaaatgtcatggattttac

SEQ ID NO: 43958 - DNA, 114 bp, Gossypium hirsutum
  Clone ID: LIB3189-040-P1-K1-C9
cagaaaagaaaaatggccaccattgatgttcctgagcaggtttcggttcttgcagatgcagaggctcttaaaaaggcttgtaaaggatgggtgacagatgataaggcaattttt

SEQ ID NO: 43959 - DNA, 458 bp, Gossypium hirsutum
  Clone ID: LIB3189-040-P1-K1-D10
gttctagatcgcgagcggccgctcgcgatctagaacgaaatacaagctggttttcttgggggatcaatctgtggggaagaccagtatcatcagtcgcttcatgtatgataaattcgataacaattaccaggctaccattggtatcgactttctatccaaaacaatgtacctcgaagatcgaactgttcgattgcagctttgggatactgcagggcaggaaaggttcaggagtcttataccaagctacattagggattcctcggtggcagtcattgtctatgatgtagcaagcaggcagtccttcttaaatacttcaaattggattgaagaggtgcgggctgaacggggaagtgatgttatcattatgcttgtggggaacaaaacagatcttgtggacaaaaagcaagtctcggtggaggaaggagaagccaaagctcgtgacatcaatgttatgttta

SEQ ID NO: 43960 - DNA, 483 bp, Gossypium hirsutum
  Clone ID: LIB3189-040-P1-K1-D9
agaaagtggaaggaagggaagaaaacaatggtggatgatttcatggtatgtgtcgacaaaattatagcatctgcagcttgttttgagtcttcttcagtgaatgaaggacaaccaatctcaactacagctgctgggaatactaatgttgttgttcctatgacgaaagcaagtggtgatgatgatagtggaaaagaaggagaaggaaaaactgggtatagttcaaagaaggtgaaagaggtggtggagtgtaggatatgtcaagaggaagatgatttgctttctttggaagctccttgtgcttgcagtggcactctcaagtttgctcacaggaagtgcattcaaagatggtgcaacaagaaaggtgacataacttgcgaaatatgcaaacaggttttttcaccaaattattctctttctccgaccagaacaatccagatgtttttgcaattgacattaagcaaacatggagcccgcatattgatc

SEQ ID NO: 43961 - DNA, 274 bp, Gossypium hirsutum
  Clone ID: LIB3189-040-P1-K1-E1
gccgtttttctttttctaattcttttctgacacacacacaaatttcgaagctctggattccacctcttccgcgtcctcgccgacggtgcttatgccggttggtttccagattgcaccggacttggatttaaagggatttagcttttctttcaagacatgtagaaagcctgcttctgttcaaattgttacctttttccgtgatttattattaattgaaacgcttataacgttatatagtatttgtatttattttagttctctgtttatcatctta

SEQ ID NO: 43962 - DNA, 423 bp, Gossypium hirsutum
  Clone ID: LIB3189-040-P1-K1-E2
cgatgttcaaatcttatactttggagaacttcctggttcaacaggcattgaataatttagtagtctgtgcattctagatctcatttcatctacaatttataagcttctacgttatatatttatatctaatttatatataaggggatgacttcacatggagaactacaagatgattattaatttagtcaagttttagatttttgcagctatttctgatgaaatgtttttactcttccaggcagcatatacaggtggaggctactccttcagcgcagctgcaatcgaatatgtaattttgaagatgaaaccaccattgcatagaccacaaattgctttgcttcttgcccttcacaaactgaaggtgtcagaagagcaacgcatgtgtgccatcgatacatacgaaccactttgaacttttgcact

SEQ ID NO: 43963 - DNA, 204 bp, Gossypium hirsutum
  Clone ID: LIB3189-040-P1-K1-E3
cccacgcgtacggaaaagtgaaaaaaaaaactaaaaattctacagtaaacaaactttatgcaaaagtatgtgaacttttttttagtggagggacaacacataaaatttcacgaaatataagctatatttaatttatatattgggggatgactgtacatggagaactacaagatgattatttatttagtcatggtttaaattttt

SEQ ID NO: 43964 - DNA, 196 bp, Gossypium hirsutum
  Clone ID: LIB3189-040-P1-K1-E7
cccacgcgtccgcggacgcgtgggttcagagtagaagcttcactaagcttactccctcccggggggccgctctctggttctggggcttccatggctgtcttgtttaaaatgcctgtcgttttgggtttctttgtgggtcttatgatgctgggttggggtgtcgtcagttgagttcgattagctttttcaacctggt

SEQ ID NO: 43965 - DNA, 447 bp, Gossypium hirsutum
  Clone ID: LIB3189-040-P1-K1-E9
cttttccacaccccccccccccaatatggcgatttcggcgctccaaaaactcacctcccaaatccaccgtctcccatatctctcctcccaaatcctcacccgatcctccgccaccttaacctcctccccctcctcttccaaaaaagttgctgatcggctcgtcaagctcttcgccatcgaccctgaaggccagaagcgtgaggttgtcggcctcgctggccagaccttacttcgtgccttgactaacagcggcctgatcgaccccgactctcaccgcctcgaggagatcgacgcttgctccgccgaatgcgaggtcaacattgcccaggagtggctcgagaagcttccgccgcgtacctatgatgaggagtatgtgttggtgaggaattcgaggggtcgcatcttgaacaagcattccaagcttggatgtcaggtcgtgcttacgcc

SEQ ID NO: 43966 - DNA, 247 bp, Gossypium hirsutum
  Clone ID: LIB3189-040-P1-K1-F1
aaaaaaaaaaaaaaaaaaaaaaaaaaaaaaaaaaaatttttgctcaatataaaaaatataaaattggggggggcgtgtatgtaaaaagggtggctcctttattaatgacatctaaataatatcactcttctcttaatttttacaacctcttgttttgaaaaaactctggtatttaaaaaattttattctttttataatatattctcttgtttaaattttgtggctttttttataaaaaaaacccttt

SEQ ID NO: 43967 - DNA, 446 bp, Gossypium hirsutum
  Clone ID: LIB3189-040-P1-K1-F2
gcagctgcaccacaactacagagaagagagtaaaggggaaaaaaagcgtcgtcgtttttgcttcttcttctacttcgctctctctccttctccgaagttcctctttcgttctttcatttattcagtattgtaaaagatggccgacggtgaggatattcaacccctcgtctgtgataatggaactggaatggtgaaggctggttttgctgtgatgatgctccaagggcagtttttcccagtattgttggtcgtccccggcacactggtgttatggttgggatgggtcagaaggatgcctatgtaggagatgaagcacaatctaaaagaggtatccttactttgaaatatcctattgagcatggtattgtgagcaactgggatgatatggaaaagatctggcatcatacattctacaatgaactccgtgttgctcctgaggagcaccc

SEQ ID NO: 43968 - DNA, 467 bp, Gossypium hirsutum
  Clone ID: LIB3189-040-P1-K1-F3
cggacgcgtggggctgtgccggtccctggtaaatttggacgcggaggtggtgaagatgaaacggcgcgggatagggcccgtcttcgtcccgttggttccctcaaccttctttctgattcctgggagttgcacatcgatcgatttttgccttttttgactgagaatactgattttaaggtggctggaatcatcggtccacctggtgcaggcaagtcgacgataatgaatgagctttatggttttgatggggtatcacctgggatgttgccaccatttgctatacagtcagaagaaaccatagcaatggcaaggcattgtactgtaggtattgaaccacagatttctgctgaacggcttatactacttgatacccagtctgttatcagtccttcggctttatcttgagattatgagacctgatggcttatcacagtttcaggactaattggtgagtcactgtcttgctg

SEQ ID NO: 43969 - DNA, 479 bp, Gossypium hirsutum
  Clone ID: LIB3189-040-P1-K1-F8
gttagtgaagcttatccaaaaggttcttgttcagtgtactgcattaatggaaaagatgtggagggacccggatatgatttcgaacttgttgcagtgatttctgctgctagacttagcccacagaatttctgtactggaagttggcggtcgatatggaacattgagtgcaaagatgatattcaagttctggaattaaaaggcaaattgcaggtgggtgcgcactattttgaagagggaaatgtgcaattagatgcaaaacatgaatgtagagattctacaatgtttcagtcccccgatgatggtgcaattgccatagccagtttaattcgccaccatgagacagagtacctggcatctcttgaggcatcctatttgaatttgccagatgccactttcaaagatcttcgaaggaaacttccaattactcgggccttatttccatggcataacacttttcaattcaacctgacaagagagat

SEQ ID NO: 43970 - DNA, 306 bp, Gossypium hirsutum
  Clone ID: LIB3189-040-P1-K1-G1
gttagatcgtgtcaagacgagtatctaagcagttcagttacagtactactaactgaaccagaaacggcgcccaccacatttttatatgataaactaactcaaaaaccctaaacactccctccctcgctccctccctctttctcacaattcatctcaagcagttactgtacaacaatggcgacgccttctttgggtgaagatactgccaaggctgttctccgccaggttgagttttacttcggtgatagcaatcttccaaaagacgactttctcaagacaaaaatcaatgagagcgaaaatgatatg

SEQ ID NO: 43971 - DNA, 476 bp, Gossypium hirsutum
  Clone ID: LIB3189-040-P1-K1-G2
gtgtttgcatttaccggcgcatatatcgcatttattttctaccttgtttcttggggttttgcttcatccgcttggcgccgcttgtcaccctcgaaataggcagggaatccagtgatcaatcttacccttctcaagccacgagatcagcctatcgagttaggatcaatcaaacttcgctttcatagatgaatttctccagttaaaagcgtatgttcctttttggaaatgcatactcatatagggacttttatgtacaaagttcagtttagtaagctttgcatttttctggagtattcttaaaaaaaaaaaagcttgtaggttccatgttatggtgttaaagaatgtactgatcatatcctgctcaatgctataacactaaacattcatttgaaaatatttgaaggtaccaaaactatgtaactctttttattattataaataatgcagccataaatttggttcaagctagctatata

SEQ ID NO: 43972 - DNA, 394 bp, Gossypium hirsutum
  Clone ID: LIB3189-040-P1-K1-G3
atcaactcagaacagctcaaaaaagcttccaacattttgaagaaacaaagaatcaaacatgtcgaaggaagtgagtgaagaagggatgagccgaaaggactatgtggatcctccaccggcaccgctcatcgacgtggctgagatcaagctttggtctttttacagagctctcatcgccgaattcatcgctactctccttttcctatacgtcaccatagccaccgtcatcggccacaagaaacaacacgatgcatgcgatggtgttggtcttttgggtattgcttgggcttttggtggcatgattttcattcttgtttactgcaccgccggtatctcaagtggtcacattaaccccgcggtgacatttgggttgttttggctaggaaggtgtcgc

SEQ ID NO: 43973 - DNA, 215 bp, Gossypium hirsutum
  Clone ID: LIB3189-040-P1-K1-G7
gaagcagccgctcctccttccatcttctaaacaaggttcagccataatggattcgcaaattgagtttgctgttgtggtgaatgtaatgggaaggaccggttcatgaggttaagtgacgcatgttagagtgttgtattttgtacgatcagatattggttcattagttatttctttgttttgtctgttttttgtggttagttattttttttatttgc

SEQ ID NO: 43974 - DNA, 406 bp, Gossypium hirsutum
  Clone ID: LIB3189-040-P1-K1-G8
ggcagaaacatccaacgtcaggccaggatctgaaatcgttgtcaacatccacgctttttcggtgggcacccttcccaaaatccgcagccttttcaacttcccactctttctttcatctctcgcaaccaacaaagaggaaaggcgggcgccatactcctcactcatctgctaatgtttgcggctgcaaccacccaaccatgatctgcctttacctttctcaaccctattccgcttcttcattttctttaatcccttcactcataccctcttcaatacccaaatttaaacctgcttttcattgctttcctaaaacccacaaaaagaaaaagaagattaatagatgaatatgcagagcggagttttcaccggatgctccccttgcggcttcaatctttgcctgtatgct

SEQ ID NO: 43975 - DNA, 458 bp, Gossypium hirsutum
  Clone ID: LIB3189-040-P1-K1-G9
aaagcattagcaaccatagccatggcttcctcaccaaaactcttctctatgtctatcctcttcctttttgccctcttctccatgcaaatccatgctagagagtacttcagcaaattcccaagagttaacaccaatgagaaagagacaacaaccagagagcaagagcacgagaccttcgttccccagaccacccaaaagccagaagagcaagagccaaggttcatccctgaaacccaaaatggttatggcctttacggccacgagtcaggctcaggctcaggctcaagctcaagccggcccagtttcaccaccaaagaaacctatgaaccctatgtcacccctgttagattccaccctgatgaaccctataacagcatccccgaatccttcaacaataaagacacttactactacaacaagaatgcctacaagtccactaagcaacaaaacttgggcga

SEQ ID NO: 43976 - DNA, 462 bp, Gossypium hirsutum
  unsure (1)..(462): unsure at all n locations; Clone ID: LIB3189-040-P1-K1-H3
cttcgatacacttatccagtcctgttatgtatattgattttaatgcagggccgctggggatatgcagtgaaggacgaaattttccgggaaaatgaaacgaaaatttcccatcacattaaaagcgcagaggttgggttattcaccatggatgaactccttaattttcacgttggtcaaaaactccccatcttcttccccatccgaaacctctcactgtacccacctttctttttgcccccaaaataccaaaatatcatccctttcataaaacccgctgccatgttcaacctcttcaaggtcccaccgtcttccccaaaaggtaaagcctttttgggtactttatactcatgcgattccatcaatggcgaaaccaccaaaatctgcgccacctctttggactccatgctcggnttcgttaaaaaagctttcggacccgacgttgatttcaagttcatcaccacg

SEQ ID NO: 43977 - DNA, 337 bp, Gossypium hirsutum
  Clone ID: LIB3189-040-P1-K1-H7
aaacctttaggcggcgactactactcgagcttcataacacacgaagcttttaactattgcgggtgtagagactgaagttgcggcggccggtgtgcccaatattagaacattcaatatatttatgctttcgaggtgttagatttggatgctcttcttgatatgtccactgatgagcttgtgaagttctttcctgctcgagctcttagaaagttccagatgggtttgaagagaaagcccattgctctaattaagaatcttggcaaggcgaaatgggaggcttcaccttgtgatataccggaaccagttagaacccacctgtgtaacatgatcattgtac

SEQ ID NO: 43978 - DNA, 79 bp, Gossypium hirsutum
  Clone ID: LIB3189-040-P1-K1-H8
gaaaagcaaaaaaatggctcatcgatggcgttttctctgtgtgtcatttcatattttttattcatagacttgatatcat

SEQ ID NO: 43979 - DNA, 311 bp, Gossypium hirsutum
  Clone ID: LIB3189-040-P1-K1-H9
ctctgttcatagccacttatggtctatttcctgcgtcagctccaatgggaaagggaacagggcgtcttggtaaaagaaggaccatgccacacggcgactcaccccgatgctctcaacgcagctttgactgatagcatctcaaccttgatcttcgctttcgctggatcgggctcaggaatggcttttaacaagttgaccgacaactgagcaacaaccccagccggtctcgtagccgccgctctacctaatgcctaaagactttccgtcgctgaatccggtggcgccaacatatcatgtggacacgccaaccc

SEQ ID NO: 43980 - DNA, 351 bp, Gossypium hirsutum
  Clone ID: LIB3189-041-P1-K1-G3
gaatctgatcaatcaacacctgaaaggaaaactggcagcaacaactactactaggctactacccagcactagaagcagctcgtagccagccatggatgaagagtacgatgtcatagttctaggaactggtctcaaggaatgcatcctcagcggtcttctttctgttgacggactcaaggttctgcatatggataggaatgattactatggaggagagtctacatcactcaacctcattcagctcttgaagaagtttagaggaaatgataagccttctgctcatttgggctctagcagagattataatgtggacatggtccctaagtttatgatggcaaatggcactcttgt

SEQ ID NO: 43981 - DNA, 292 bp, Gossypium hirsutum
  Clone ID: LIB3189-042-P1-K1-A10
gtgccataaacatgtttcttctaatctttgttattttctctttcctatcttcctccaccaacgcagcctacttctgtggtggccgacgtttaatgaccctgtaagccctactctattcttgcaagaagacagccaccgaagatgactcctctttctccggcctacctcgtaccttatgcaacacttcgaacctcgtaaaagctgcattaacaccatcctttttgactcaattcccgtatgataacagactcgtaaattcaatacgcattttaggatttagcttatcgatgta

SEQ ID NO: 43982 - DNA, 426 bp, Gossypium hirsutum
  Clone ID: LIB3189-042-P1-K1-A11
cccctttcatcccctacttatctcaccaccaatttaggcgtcggctacgccatcgtcgtcggcctcggcttactcctactccggggcactctcctgctcgcttcctacatttgcttccgctcttcctcaccccttccacctcgtgccatttccccaaaccccatttcaacacccaccgccgccaactccgacggtatcgtcctccccaggattggtttcatcggcgaagaagaccatgaaaacgacgaggaaaacgtcgtcgtctttgggcttgatcgtgccgtcataaactcttaccccaagttccggttcagcaaaaaggaggtgtctacggcggtggaggtgacgggttctagtgctgggaacaccatttgttcgatatgtttgtgtgagtatagagaatcagagatgttgaggatgatgcct

SEQ ID NO: 43983 - DNA, 468 bp, Gossypium hirsutum
  Clone ID: LIB3189-042-P1-K1-A12
agaaggggttccctgaagtggctctccattttgtcaaagatgagaaaactcggtttaacttggctatagagagtgggaacattcaaattgctgttgcatcagctaaggagattgatgacaaggatcactggtataggttgggtgtggaagcccttcgccaaggcaatgcaggtatagttgaatatgcctaccagaggacaaagaactttgagaggttgtcttttctttatctcataaatggtaacctggaaaagctgtccaagatgctgaagattgcagaagtcaagaacgatgttatgggccagtttcacaatgccttgtatcttggtgatatccaagaacgtgtaaagatcttggagaatgctggtcatttgcctcttgcttatgttacagcatcagtccatgggctacatgatgttgcagaaaggttagctgctgagttgagagatgattgtcctttttttccgg

SEQ ID NO: 43984 - DNA, 187 bp, Gossypium hirsutum
  unsure (1)..(187): unsure at all n locations; Clone ID: LIB3189-042-P1-K1-A3
ccgtccgaaggactctatcttgttgacagttttcctaactcttancttctcgccgaaaaatactataatgtgcggggaatatattaacatcggcgctatcttcatttcttacactttctctnnnaagtttacaaccaccggccactttatctacaaactttacaatcacctcatccgattcttatat

SEQ ID NO: 43985 - DNA, 428 bp, Gossypium hirsutum
  unsure (1)..(428): unsure at all n locations; Clone ID: LIB3189-042-P1-K1-A4
aaaaaaggggagggggtttctttctagggcttccttctctggcgatcggaccaccgtcggtggtggccagagaggcacccgaagctgaatctaggcctcttttctcgcttagaaataggcttaagacctagaaacccctgaaccaaccccgaaacccttaaaacaacaaagaacttccgaccattggtcttctccgccgtgacttcaagcggatccccaaggatccgacaatttttggactagagaagcaagcaccgaggccaccaacaccaaatacgggtttatgagggaagtcaacgggcaaaggctcccattttggtgcaaagggacaaaaggagacgagccccgggcgttggacatgccgacgaggcacgtgaggtgtgcggcgctaggnggaaactagggtttccaggtctgccgaaattggc

SEQ ID NO: 43986 - DNA, 305 bp, Gossypium hirsutum
  Clone ID: LIB3189-042-P1-K1-A5
ccacgcgtccgaaaaaaaatttctctggaaacatagcaactatcaactacttttacctcagatctaaaacacctgccgctcatatccactaaattcaccggctctactactttcatcggctatgtaacggcttccttttttcgcttcctcgtctccgccttctttctcgtctcttcctttttgctttttgttttttctttctctccttactattatctttttttctattttcttctttccctttctctctgtcttctctctttctctctttttcttttcttcattctctcttcttttctctctct

SEQ ID NO: 43987 - DNA, 455 bp, Gossypium hirsutum
  Clone ID: LIB3189-042-P1-K1-A6
cccacgcgtccgaaaaacttttaaacactcccccctctcttatttcttctctgctagggttaggaaacccatcattgccgccatcggcgaactaccgctcctccaccttgcacggtggtcggagggatgcaaaacggtccctttaggctcgttttgaccggatctagaggcctatcctcttatttgcaacaaaaaccgaataaaagaggactatttggtccttttacttagccgacgcagccgtcaaagccaaagccaaaccttaaacggtcttggggccctcggcgtaggtgaatcgccctcgacgacggatgagcgtgaggctacttaagtaagtttttcttttcctcttttatttgaaagatttgtgttataaaaataaaataaataaaataaaagaagcaaaaaaatgaaaatagatggtgaaaagattaacctttcgaaacttttgtcta

SEQ ID NO: 43988 - DNA, 387 bp, Gossypium hirsutum
  Clone ID: LIB3189-042-P1-K1-A8
aattgtttgagctagctagctcttactcaaatggcaaccaaaacgatgatgttgcaaatatttccacttttcttctttttgttcagtgtctgcaactccattttccttggtgctaatggagatgacaatggtggttggcaaactgcccatgccaccttctacggtggtgctgatgctaccggcacaatggggggagcttgtggttatggaaacctgtacagtcaagggtatggaacgagcacagcagctttgagcactgcacttttcaacaatggcttgagctgcggtgcctgctacgagctccggtgcaacaatgatcctcaatggtgcattagtcgaaccataaccgggacagccaccaacttttgtccacctaactatgcttta

SEQ ID NO: 43989 - DNA, 447 bp, Gossypium hirsutum
  Clone ID: LIB3189-042-P1-K1-A9
cccacgcgtccgataacaataattctctttctgtttctctggtttaaacatgggtatgggtttaaggaatggatttcttttgattctatcttgtgttgttacactttccctctcagttttggggcgacctgccactttccttgaagattttagaatcacttgctctgattctcatattacgcaaatccatggagggagagccatccacctcgttctcgaccaaaattcaggctgtggatttcgcttctaaacggcagtatttgttcggacgtgtcagcatgaaaatcaagctcatccccggcgactccgcctgaacagtcaccgccttttatatgaattctggtacagatgctgtgcgagatgagctagacttcgagctcttgggaaaccgtaccggtcagtcatatacggttcaaaccaatatctatgcccatggaaagggtgaca

SEQ ID NO: 43990 - DNA, 479 bp, Gossypium hirsutum
  Clone ID: LIB3189-042-P1-K1-B1
gtacttgagcttactgaagatggggatttactgttgaagggtgccgaagatcaagtcggatggcggaccggcacttctggccaagagattaagaatcctgaagacaggtaatctcgtacttgtggatgttttcgaccaaataaaatggcagagtttcaatttcccaactgatgtaatgctttggggacaaagactagacctagccactcagttaacttcatatccaagaaactcaacttcattctacacatttgaaatccaacacaacaagcttgctcttcacctcaattctgattccatcgtggtggagatcggttcagcccctgagcgtgaggtttttagcactgggaaatgagacagggaatttaggactatactcttactcacctaaaaaacaaagttttgaagcttcatttcaagttctcaactccaaatgtgactttcctttagcttgtaaaccttatgggatatgtacattc

SEQ ID NO: 43991 - DNA, 467 bp, Gossypium hirsutum
  Clone ID: LIB3189-042-P1-K1-B10
ggaaaaacaacgctgaaatgaaattttattgagaaaaaaaaaagagagagagttattgagattgaagaattttgttcttcttgaggatggtttgtttgagtcgagtgttgacgatttcttgtatggtaaagccttcgcctccatacaagcctccttctttgagctctagatttgttcatacgaaatgcgaattgaaatcgagttggcgatctatggctaccgagccggattcatcttcctccgcgcagtctgttgaatccgattctcccgccgataaaactgccgccggattttgcatcatagaagggcctgaaacagtccaggatttcgctaagatggaacttcaagaaattgaggataatattcgaagtcggcgaaacaaaatctttctccaaatggaagaggttcggaggctaaggatacaacagagaattaaaagtgctgaactaagtattttcaaggaagag

SEQ ID NO: 43992 - DNA, 429 bp, Gossypium hirsutum
  Clone ID: LIB3189-042-P1-K1-B11
gaaggtttagttttacaaacatggctagttccggtgtccttaagttggtttccatgattctcatggtgtgcatgacgatgatgagtgcacccaaggcagccaaagccgccatcacgtgcagcgacgtggtgaaccacttgatcccgtgcttgtcctacgtacaaaacggcggtacacccgctgctgcatgctgcagtggggtaaaagcactctacggcgaggttcagacctccccggaccgccaaaacgtgtgcaagtgcatcaaatcggcggtgaacggaattccgtacaccagcaataacctcaatctcgcagccggcctacctgctaaatgtggtctccaactcccttacagcatcagcccctccactgactgcaacaaggtgcagtgaggttgatgatgatgatatggaaggagtggaagaggtt

SEQ ID NO: 43993 - DNA, 461 bp, Gossypium hirsutum
  Clone ID: LIB3189-042-P1-K1-B12
cccacgcgtccgaaagggcgttgcaacaattatgacatcctattctagctggaatggaaaaaagatgcatgctaatcacgatcttgtgaccgacttcttgaaaaacaagcttaagttcaggggtttcgttatatcagattggcagggtcttgataggattacctctcctccacatgctaactactcatattctgtagaagctggagtcggtgccgggattgatatggtcatggttccttataacttcacagaatttattgatgacctaacctatcaggttaaaaacaatatcattccaatgagccggattgatgatgctgtaaagcgaatcttgagggttaaatttgtgatgggtctctttgagaatccaatggctgataacagcctggtcaaccaacttgggagtcaggaacatcgggagttggcaagggaagctgtgaggaaaagtcttgtcctactga

SEQ ID NO: 43994 - DNA, 429 bp, Gossypium hirsutum
  Clone ID: LIB3189-042-P1-K1-B2
ttaattctaactttgtcttctctgatttcataagaaagtaagaagatatccatggacccttcagagcttaggtattatgaggatgatgacactccaacaatgaaaacaatcaagggcgcaactacaggttttgttgctggaactatctggggaactgttgttgctacatggtatgatgtgcctcgtgttgagagaagtgttgccctacctgggcttgtaaggacactgaagatgatgggcaattatggaatgacatttgctgccattggcggagtctatattggtgttgagcagctgttgcagaattataggatgaaaagatcctttgtcaacggtgctgttggtgggtttgtggctggggcttccattcttggtttcaaaggcaggagcatctcaacagctatttctgctggaacagcactggctttc

SEQ ID NO: 43995 - DNA, 483 bp, Gossypium hirsutum
  Clone ID: LIB3189-042-P1-K1-B3
aattctctggcctccttactatcttactccttttctcctccttttcatctttttcaacaatgtcgaccagcgaaacctcgttttcgccgacgatgccctgattgaaacccaatgtcacaatgctgaagtccccgaaacctgcataaaatgcataaaatccgatcctcgaagtcaatctgccgataaagtaggcattgcagccatcatcataacttgtctaagcaacaaagccacgaccttgataaacaacatgacgactcttgcttcgggcgctcgcgacaagtacttgaaattggctctttgaggttgcgggaaagggttttactatgcaaaaaccaatctgactgttgcgacgaaccgattgaaggggaaagaatatgatcaaacgaatcttctggtgaaacaagcgctcgaagggagagttgtttgtaagaatgaatgtgcggctttacggtttaactttccaaatagtgtcacgtttgg

SEQ ID NO: 43996 - DNA, 298 bp, Gossypium hirsutum
  unsure (1)..(298): unsure at all n locations; Clone ID: LIB3189-042-P1-K1-B4
gaaaaacccggnccgccccacccgtccgcaagaaccgtcgccttcattgcttatacaccacttatatgtaattctattgcttgcaagatggggcgccatattgtgggaattctcagagggtttatatatgatcagtgtttggcctgattccttactccttgttgcaatttatggtgttgtggaatcatcctttactgcattatttggtccaatcatagtacgatggctggataggctaacatatgtaaaggtgcttcaactatgtatggtaacccataatctctccttcatacatgct

SEQ ID NO: 43997 - DNA, 72 bp, Gossypium hirsutum
  Clone ID: LIB3189-042-P1-K1-B5
aaaaaaaaaaaaaaaaaaaaaaaaaaaaaaaaaattttttaaaaaaaaaaaaaaaaaaaaaaaaaagggaga

SEQ ID NO: 43998 - DNA, 460 bp, Gossypium hirsutum
  Clone ID: LIB3189-042-P1-K1-B6
tgagggtgtcttaataaacgccttcgatttactttcggtttccatttacttctttatttctacgtttttgaatttttagtaagcgaaaatgagagagtgcatttcagttcacatcggtcaggctggtatccaagtcggaaatgcctgctgggagctttactgccttgaacatggaatccagcctgatggccagatgccaagtgacaagactgtcggaggaggtgatgatgcttttaacaccttttcagtgaaactggtgctggaaagcacgtccctcgtgctgtctttgtggatcttgagcctactgttattgatgaagtgaggactggtacttaccgtcagcttttccaccctgagcaactcatcagcggcaaggaagacgctgccaacaacttcgcccgtggccactacactattggcaaagagatcgttgacttgtgcttggaccgtatcaggaagc

SEQ ID NO: 43999 - DNA, 299 bp, Gossypium hirsutum
  Clone ID: LIB3189-042-P1-K1-B8
gaaaaatcggacacggctactactctgaagatatgtatgctggagaggatggtcagctttcatggtttaatgctggtgttagagttggggttggaattggccttgggatgtgccttggggttggaattggagttggactgctaatgcgatcatatcaagcaactacccggaactttaggagaaggtttttctaagatagatcccatcactttgcagtgtgacgatgtcctcttttaattacgaagaagttaaaaggaaaatgaaattcacgattctttgtagcattcttagtagatttt

SEQ ID NO: 44000 - DNA, 407 bp, Gossypium hirsutum
  Clone ID: LIB3189-042-P1-K1-B9
attttagtccttagatagaacattcacataacctttcggcatctctcagtttcttcctctgcattcaatttgcactcatcggagaaaacaaaagatgtcgggcatgggagacgggtacgtcggcacggcccaagatgccgttaggatccgccgtctcgagaagcagagagaaaccgaacgccgtaaaatccaagagcttaaaaccaagtccgcctccgctaaaggtcaacccggtcttctccaattcggttcaagtacttctgagattctcgagactgcatttaagaaggaaactggtggtttggttacaagagagcaatatgtagagaagagagttaatatccgaaacaaaatcgaagaggaagagaaggagaaactccagaagcttcaacaagaggaagaagagc

SEQ ID NO: 44001 - DNA, 259 bp, Gossypium hirsutum
  Clone ID: LIB3189-042-P1-K1-C10
gatactaatttgtagataaagattatattacgtagtcgcataaagcggcatagtacacaacgcataactctggaattttaacatccatatttattctgtagctatcgttattttggcttccactagctggtgaactttccatgccaaaacttcacttgacgctgttgcagtcagtgctagggctgatcttgtaagggatgttgacaccgcacttgcctgggagtccgcttgcaaggccaaagttgatgccagtaatgcc

SEQ ID NO: 44002 - DNA, 486 bp, Gossypium hirsutum
  Clone ID: LIB3189-042-P1-K1-C12
cgactgccgggtatttcatcttgggttggtggtgacatgggtgattttccaatccaaattagcaccaggcttatcgaccgactaactgaagatgatgagaaggtgaagaaaagaacaaagaaaactaaaaccagggtgccacgagagcctcgactgccagaaactaaggtagatcagccgcaaatatctgatggttctgaacaacagaaagggactagtacaggcaccggctgggctgttccgcctcccttgtttatgcctgtaaaccaacctccttactctgtcagtgcagaattggatgcaattcgatctgtcgttaaagagagcgagaacgtagtagaaaagctgcggaagcaggaaaagaacatggtgcaggaagtaacacaaaaagccaaggatcttcatgataaggagttcaagataccagaaccaaagcctatgccttgttcggtgagagtaatgcttggtgacatgctacaaggagaa

SEQ ID NO: 44003 - DNA, 478 bp, Gossypium hirsutum
  Clone ID: LIB3189-042-P1-K1-C2
attttgggtttaaaatatctgtcctttttttttatgaacaaagaaaactcatccaccacaaggtttagggaagaaccaacatatttggatttttgagttgctgaaagtctcaggaaagaacaagtttaccttcttcagcttgtgatgagataattgcctttgatcctgatggccaaagagtacagtggatcaccaaagcatcatcatcgactcgaagtgcagaggaaccgcctcacttggattctaggggttagtttcctctgcatattgttttatatgttgggagcttggcagcgttcttctacccccaccactactcaatttagtgcatacaataaaggtggctgtgatagtcatgttactacatccgacaacggcaatgctgcagttggtcatccatcatcaaccaacttggactttgcaagccatcatcaagttgtgcttaacagttctaaaacagtcaatcagttcccatcat

SEQ ID NO: 44004 - DNA, 392 bp, Gossypium hirsutum
  Clone ID: LIB3189-042-P1-K1-C3
gccccaaagcaaaaaagttctcatcttttacaatcacagctactgcttatttattttcatggctcaaggagattctaacttccagcaagacatggctaaagaggaagaagaacagaggctgaaatacttggaattcgtgcaagtagccgccgttcacgccgctttgtgcttcaccaacctttacctttacgctaaggaaagatcggggccgttgaaacctagcgtcgagaccgttgagggaacggttaagtgcgtggttggaccggtttatgataaataccatgatgtccctgttgaattccttaaattcgttgattccaaggtgggtgaatcagtgaccaagcttgatcgtcgagtccctccagtcatcaaacaggtctcaaccgaagcca

SEQ ID NO: 44005 - DNA, 289 bp, Gossypium hirsutum
  unsure (1)..(289): unsure at all n locations; Clone ID: LIB3189-042-P1-K1-C4
aaaaaaaanaaaaaaaaaatttgggatattttaaaaaaagggggggggtacaaaaatgttttttttttaattttaacatacatatttattctttacctatccttatttttgcttccactaacttgtgaactttccattccaaaactttactttaccctttttcacaccatgctaagccttttctcttaaaggaattttacaccccactttccttggaattcctcttcctaagcccaaatttattcccattattcccccctccctttctaaaaatccaactttccttccc

SEQ ID NO: 44006 - DNA, 457 bp, Gossypium hirsutum
  Clone ID: LIB3189-042-P1-K1-C6
cccacgcgtccgcaaatgcttgcaaaatgtcagaggacgagtagcgattcttgagcgggtgtgctttgcagaatcctaagaatcagcctctatcaaagttgccgtatatattctttgaacatggagatgcacttcggtgataactttttagttctgcaggatacgggttggttaaccaagtattctttgcttttgttcttatgttaattttccttggttctttaaaccaaaagacttggatagaaataggacacacctccaaaattctgtatagagaagtaagactcctaaaagggtacagaattgtgcgaggaactctcatctagctgactttgtgtatacagcttcaggtggaaccaaagaattctttctcagctgcgaaaaacctcagctgctgtttttttttttaaaacttgaaaaccatcaaataatggcccaaggttttaaactataccta

SEQ ID NO: 44007 - DNA, 431 bp, Gossypium hirsutum
  Clone ID: LIB3189-042-P1-K1-C7
gaacaacaagcttttcttaatactaaaattttaacgctttcctttccttcgtctttcctttgctttcctctgtgtgatttttaataaaagggaaacgagaaggaaaaatgcaggcaatttctcaagtgcaaaatcttaattcgtaccttataattcgccggtcgaagcctcggtttgataagccggttcggttagctgtacctgtacgttgtgtgtatcactctgattcagttccattccccaatggagtccgttcaagccgggtggattggcaaagctcgtgtgctattttgtctagcaaagtcttctctcaggatcaagattccggtgagaaatcgaacactttctccgcctccgatcacctggcggcggcagttaacggccataaaacttccttggatctgaacttaatttcgctagataagaagaac

SEQ ID NO: 44008 - DNA, 429 bp, Gossypium hirsutum
  unsure (1)..(429): unsure at all n locations; Clone ID: LIB3189-042-P1-K1-C8
cccacgcgtccgaagcaaagcattagcaaccatagccatggcttcctcaccaaaactcttctctatgtctatcctcttccttttggccctcttctccatgcaaatccatgctagagagtacttcagcaaattcccaagagttaacaccaatgagaaagagacaacaaccagagagcaagagcacgagaccttcgttccccagaccacccaaaagccagaagagcaagagccaaggttcatccctgaaacccaaaatggttatggcctttacggccacgagtcaggctcaggctcaggctcaggctcaagccggcccagtttcaccaccaaagaaacctatgaaccctatgtcacccctgttagattccaccctgatgaaccctataacagcattccccgatcctncaacaataaagacacttactacta

SEQ ID NO: 44009 - DNA, 474 bp, Gossypium hirsutum
  Clone ID: LIB3189-042-P1-K1-D1
gggaactcaaagaaaaaaaaaaaggagagagagagagaggaagagtcagtttatttgaaatttagacgctccaattctttaattctgcttcaccaaattccacgaaattcaaaacccagctttaaaaacctagcctttccaatacccagatctcaatttccttcagtttgattaaatttgcctcgtttaattcatttcccctgtttctcgttcaaccagagcatcttctcttatagttcaaaaaaactgagcttttcattcatctttctttgttattagtttcgcagctagctatctttgattcctcttttgttcttaaattatctctaaattctctagaatttatatatcctctgccttgtatttttttcccaaacgctcaattcccagaccaaaaccaaattttacctctgtggttgatccaggattcttgaaactttgaccaagagtcgagccattggagtccaaaaagat

SEQ ID NO: 44010 - DNA, 200 bp, Gossypium hirsutum
  Clone ID: LIB3189-042-P1-K1-D10
ccccgcgtccgcggaccgtgtggtttttatgttttatcccatcgaattaaattcatatgcgcacattttaatcgttagggattttttaattcctcacaattctccattttcctgagttttaaggcagtagagctccatttaagaagaaaaaaatgttgaaatctttttgatcaatgtaaggatcattttttacttatcat

SEQ ID NO: 44011 - DNA, 418 bp, Gossypium hirsutum
  Clone ID: LIB3189-042-P1-K1-D11
aataaatcaccaaacttactataaatgagaaaccaatgtaaggtgtaacacacgtacaagcatgtaccaggacatgaattattgctttctttttatatttgtaaaatatagagaactgaaattctagaaaataaaaaatcaaaaggacaaattgtggttttctgtagtaatttgaaatcaggcagctgtcttgagtttctttgtgattccggcaatgtacttcccttggtggaaagcttgcgccaacttgagttcggatggcattcttgttccgtccccagcataggttcctgctccgtaagggcttccacccttcacttgctccatctcaaacatgccagcaccaaagctgtatccgatgggaacaaatatcatcccgtggtgaacaagctgagtgattgcagtcaacggtgtagtt

SEQ ID NO: 44012 - DNA, 387 bp, Gossypium hirsutum
  Clone ID: LIB3189-042-P1-K1-D12
aaagaatacattttgtcaacagcatgccctggatctcatattcacagaagaggatgatagccatcttactgcagaaatgtacattaatatggatggtactgcagaggaggtggaatggtttccatctccaatatttcaggaactctttgcaaaactaaacagcattgctagcttggcagcagatatgtttgtaggaagggaaagatttgctacattgctattgatgcgacttacagaaactgtcatcatatggctttcggaagatcaaagcttttgggatgatattgaggaaggaccaaggcctttaggtccattaggtttacagcagctttatctggatataaaatttgtcatatgctttgcttcccaaggtcggtacctatcaag

SEQ ID NO: 44013 - DNA, 461 bp, Gossypium hirsutum
  Clone ID: LIB3189-042-P1-K1-D2
cccacgcgtccgcaactttccaatctatctctttccttatgatttgattcgtggacataagcgatgaagcctgtagatctcactcttcgttccatagctaccaccaccaccaccactgcgtgaacccccatctgagcccagaacctttgaagaaggatttcaatattccctaccctttaattctcacggcggacgaaaatgagcgcctcgagattcataaagtgcgtcaccgtcggcgatggagccgtcggaaagacctgcttgctgatttcctacaccagcaacactttccctacggactatgtcccgactgttttcgacaatttcagtgcaaatgtcgtcgtcgatggcagcactgtcaacttaggtttatgggacactgctggtcaggaggattacaatagactacgaccactgagctatcgtgggctgatgtgttattctggcatttctctcatcag

SEQ ID NO: 44014 - DNA, 316 bp, Gossypium hirsutum
  Clone ID: LIB3189-042-P1-K1-D3
tccactcgtacacaactttccaatctatctcttgctgtatgatatgattcgcggacataaactatcgagcctttacaactcactctggggtccataattaccatcaccaccaccactgctttaacccccatctgagcccataacctttgaagaacgatctcaatattccctaccctttaatttttacggcgcactaaaatgatcgcttctacattcataaagttcttcaccgtccccaatgcatcacatagaaataccttcttgctgattctctacaccatcaacactctccctacgaactatctccccactctct

SEQ ID NO: 44015 - DNA, 484 bp, Gossypium hirsutum
  Clone ID: LIB3189-042-P1-K1-D4
cgtccgtagttctaagatcgcgggcgttttttcgcgatttatttaggtgtaaaaagaaaacaaggaagacgtccctacagatctcggatcggggagccaaatcgaactaactcaaagtcagagaaaagggaagatgttaccaacggtgagcaaaacgcgttccacgccctccacatctcgacctaactccatgttcccccagtacctacgtcgaattgtcaagtggcaacaaatggatattgaatatactttctggcaaatgcttcacctatgtactgcaccaaaggttgtctatcagcacacaaaatatcacaaacaaaccaagaaccagtgggcacgtgacgaccctgcttttgttgtaatctgtagccttcttttggcagttgcaacaatagcttattgtgctgcgtatgatcacagtgctgcacatgctgtttttgtagtatttcagtattgcttttccatttttaacttactggagtat

SEQ ID NO: 44016 - DNA, 484 bp, Gossypium hirsutum
  unsure (1)..(484): unsure at all n locations; Clone ID: LIB3189-042-P1-K1-D5
gaaaatttaataaattaataaagctctctgattttcttctttttttcgtcctcttccgcttccttcccttctttattcctttgtcctctttctttgaatgtttcagttcctgtctgtttcacctcataatccctcgtttttcctttcagtttccaagaaatttctgtagggttttccttagctgggcataaaaaagatgggtatatatctcagcacccccaaaactgaaaaattctctgaagatggcgagaatgacagggttagatatggtttatcatctatgcaaggatggcgtgctactatggaagatgctcatgctgcataccctgatcttgatgcttctacttcgttctttggtgtttatgatggtcatggaggcaacgtggttgcaaagttctgtgccaaatatcttcatcagcaggttctcaagcatgaagcatatgcagctggggacataggaacatcacttcangaagcatttttc

SEQ ID NO: 44017 - DNA, 381 bp, Gossypium hirsutum
  Clone ID: LIB3189-042-P1-K1-D6
cccagcccaacccacaccctgtcgccaagaaacgcacccgccaagacaaccactccccgtttcgcggggtacgtaagaggaggtgggggcgttacgtctccgagatacggtttccgggtcaaaagacacggatatggctggggtcgtttgggtcaccggagatggcagctcgggcatatgactcggcagctttcttcttgaaaggcgactctgctatcctcaacttcccggagttagtggggtcactttcccggccagggtcttgctcgaggagggatatacaatccgcggcggccaaagcggctttggaggaaccggtgggcagggtaaaagatgaggggggttcggaaagcatctggtggtgggatgatgaggggatgg

SEQ ID NO: 44018 - DNA, 401 bp, Gossypium hirsutum
  Clone ID: LIB3189-042-P1-K1-D8
agctccactccattaaacaaacaccaaaaagaaagataaaccccaaattctcatttttactctatccaaaccctagattcaatcgtcgcccatcttccctccgatggcaaattcaaagaaaccgggcggtctccgcgagatgctggaatcgatgtactctgtcatcgctctgctcttcattttagtagcctgcgtcgaactctgcgacgccgccgctgctgtcgacgtctaccgtctaatccaatacgacatgtccggttcacctttcggatctcgattcgccgccctcaaccatcacgccgcctccttacatttccctcccggtgtcgatctttccagaaccgttctcatcatccctctacgtgaactgaatatcactttcgttcgagaatatatcaatc

SEQ ID NO: 44019 - DNA, 388 bp, Gossypium hirsutum
  Clone ID: LIB3189-042-P1-K1-E1
tttttttttttttttttttttgtttttttttttttttttggtgtttttttttttttttttttaaaaaaaaataaattcataaaaatttttattttattttatgaaaacatagttgccaaaattacaagttttttttcaaaaacaataatttttttaatttttatttttttaaaaaattttaaacattttttcacttaacaaaccccagcaaggaaacccctttttaatttaaaaagctgccattgatgtatttttaatttgaatttgaattattttccatacttcccatgggtttaaatttaaaaaaattttcatacttccctgggcttaaatacttttggtgtttttttaaaaattttttttttttataccaatttttccattttac

SEQ ID NO: 44020 - DNA, 271 bp, Gossypium hirsutum
  Clone ID: LIB3189-042-P1-K1-E11
gcctgccggcatcgctgcttctggtggtggggtgggcttgaatccgggagtggttcctggggagtatttgaatcggggtcttggcgatgatgagagatcgcatcatggggttcctgtgggatataggaaaacacaaactccagtgattcagcctcagggtttacctcttcagaatcaacagaagtatagcagtggtcaagatttgtcttttccagatttcatctgaagtgaccgaagttttacaaatacattatcacaccaaaggcctgcg

SEQ ID NO: 44021 - DNA, 403 bp, Gossypium hirsutum
  Clone ID: LIB3189-042-P1-K1-E12
ctggactctgttctttctcaattgtcagttccagtatctgtaactggtcatttatcaggagtacctagtggtgttggtggtcaattgcctgctcatgcggccaatatgaatgtggcaccttccactgctgcattcacggggcagatccaaacaatgccttttggtgctggtgctcctgcatttgcaccagttggcaatttctcaacattgcctcctacaggtcctctggtagctgcttctggactaacgcatacagtgcctggcagcagtggcagttcccagattggtgttaataatgctgggcaatggcctaatatgcagcaccaacagactcattttttctccacagctggcggtcagactagccaacaacttaacggagcctcgccaagtcagccatgga

SEQ ID NO: 44022 - DNA, 539 bp, Gossypium hirsutum
  unsure (1)..(539): unsure at all n locations; Clone ID: LIB3189-042-P1-K1-E2
ccttaaaaaccttccgggttacggttccggttcccaaccagttaagccttacacagccgttcaatacacagttggagcaccgccgccacctcaaccgtacggtactccatacgccgctgcaccatacggggcaccttctgcttccctactctgcncccttcaggcggagaaaaccaccaaagggacaaaagcaccaaggcgcaatggncnngtcggtggtggcttcnnctccagtntcaacaagccggaaaggctatttcctttcccgcagggaaggctttatgcnngagcccgtnntcgcaatctttctgttgcncnngtcggcattttcccaaaccggggaacagggatcnctannacgtccgttgcctggggctttcannaatggctgnnnatcaagaatggaaggtgnggnntttattggatgnnataaaggagggttgcaaaaggggcgcttttcttttcgtattaacccaaaggcttcaagtttgaggaactggttcggtttgcctcatggtattctcttcacttaatactaa

SEQ ID NO: 44023 - DNA, 87 bp, Gossypium hirsutum
  Clone ID: LIB3189-042-P1-K1-E3
tccgttaaaaaggaagaggcattctttcactcccaaattgttagatcttcaagccaccccttcgcccaagaggaagaagggcttggt

SEQ ID NO: 44024 - DNA, 482 bp, Gossypium hirsutum
  Clone ID: LIB3189-042-P1-K1-E4
gacaattttgggggggggtttttattggacttaaaattttctgggttcaagagcaatggcgacaacagtgtttctacagcagtctggtttattttctttctcttcatttactcacaacagccgccctttaactaaacttttcgatagtagtaccgcaacaattgtccctttctctaaccggcgtcgtttcagagttgtttctgactctgtttctgtatctgctctgcccactgttcgtggaaactcaagttcatcagttggttcaattaacgagttgattgagtgtttgattaatcgagttgatttaacggagtccgaggctgaggcatctcttgagtttttgttaaccgaagctaatgaggctttgatcagtgcttttcttgttttgttgagggctaaaggcgagactttttgagaagttgtgggattggcgagggcaatgttaaagcatgcttggaaggtagaagggttaaatgatgctg

SEQ ID NO: 44025 - DNA, 462 bp, Gossypium hirsutum
  Clone ID: LIB3189-042-P1-K1-E6
cagaaaacggttacttccttgcaactgctgctcatgatggtgttaagttgtgggatctacgcagattgaagaactttcgatcttttgaattatatgatcaagacacaccaaccaactcagtggattttgaccatagtgggagttaccttgcaattgctggctcagatataagagtttaccaagttggcagcgtaaaagctgaatggaattgcatcaaaactttacctgatctgtccggcacaggtaaagcaacttgtgtcaaatttggtacagatgcgaagtacttggcagtgggatcaatggatcgcaaccttcgcatatttggccttcccgaaggtgatgatgcttcaacagaatcataaaaagagatcccttctgttcatatatgataagttgcgactgctcggtttcgtggttaaagtagaactgtcagattttgaggtgggtttaaatcttttagtc

SEQ ID NO: 44026 - DNA, 475 bp, Gossypium hirsutum
  Clone ID: LIB3189-042-P1-K1-E7
ggttgagtgtagagatgaggaaaatcatgggtgccaaagttcttttcttctttgctttgctttccttttcagctgtctcggcatttgcacaggatgaggaagaccaaggtcttgttatgaacttctacaaggattcttgtcctcaggctgaagacattatcaaggagcaagttaagctactgtacaagcgacacaaaaacactgctttttcttggctgagaaacattttccatgactgtgctgtccagtcatgtgatgcttcactgctgctggactccacaagaaggagcttgtctgagaaggagacagacaggagctttggcctaaggaatttcaggtacattgagaccatcaaagaagctgtagaaagggaatgtcctggagttgtttcttgtgctgatatccttggtctgtctgctagggaaggcatcggttcgttgggaggcccttatattcctttcaaaactggaagaag

SEQ ID NO: 44027 - DNA, 419 bp, Gossypium hirsutum
  unsure (1)..(419): unsure at all n locations; Clone ID: LIB3189-042-P1-K1-E8
gtggtgcgaaatcggactatggaaatactctcgccacccaaactattttggtgatattttacttacctggggatactttgtggcctctcttcccataattgaaggtgccgaatggcttgtactcatcgggcctgtctttttgacattgctgctgctttttgttagtggcctaacaattctcgagaagtcaggagacaagaagtttggtaatgtggaagcatatagggtttacaagaaaagaactagccctcttattccactgccacgatcaatatatgggaacctgccatattggttcaaagctgtttttctctttgaatttcctatctacaaccgttatttaaacagaaaccgtacaaagcaaggataaaaacagaagttgagtttgtgctttcttatctttggnattcacgagttcg

SEQ ID NO: 44028 - DNA, 219 bp, Gossypium hirsutum
  Clone ID: LIB3189-042-P1-K1-E9
aaaaaataaaaaaaaaaaatatttaaaaaaattcatattaaaaaaaaaaaaaaaaaacatcctccgcggtatattataaaaaaatcgagccgactcctacattcaaaaataacttctttttttataaatacctcctaaattttactttttctcccatatcttttccatctttaatcactcaataattctcctttctttaccttttttaatcctttttca

SEQ ID NO: 44029 - DNA, 320 bp, Gossypium hirsutum
  Clone ID: LIB3189-042-P1-K1-F1
atatgctgggtttattaaattactccgagtcattcctaaattcaccaactgggccaacaaaaccgaacaaactgcctaaaaccttctttctatctatacaactaaattcttaaattcgacccatggttttaccaaacccacccacctttttttaatctattccccactcataaactttaaatcccttcccccgaaaatctcccatatttcacccctctaaataaaatccaccatttttcttttccaaaatttaaccaaattttttaaacaaaaccttttccataccctttttttttatcgaattttttttttttaaacta

SEQ ID NO: 44030 - DNA, 402 bp, Gossypium hirsutum
  unsure (1)..(402): unsure at all n locations; Clone ID: LIB3189-042-P1-K1-F10
cccacgccgtccggaacgatctgtgcttcaactttttatttattactatcagcacataacnaacgccgcgataatctataaaacgacgcaccgcgcactaataaatattattatttaccccccaccaccaccatcattaagttgctctataaccttttaaaaaaatcattttacacaacatacttatttcttaatatatttcacctatactcttcctttacacaacacacttaactctgatatttcacacaagccacatttccccctcccctcacacatattctgctgttgcccttcttggtattgcttgggccttttgtggcatgatcttcatccttgtttactgcactgctggtatttctgccggtcatattaacccagcagtgacatttgggctgtttt

SEQ ID NO: 44031 - DNA, 352 bp, Gossypium hirsutum
  Clone ID: LIB3189-042-P1-K1-F12
tttttgtcggatcttctttctccctctcagcaaagatctttgattctttctgtctctttttcgttcgctctctgaggctggaaacaggctcgtcaaacccccatcgtcagtcgctgagctcatccctttcctagacatgggccatgagttccttaactcttaaaggcaaagcttctgatcaagctccagccttggcaaatattcagacagctcagaagcgtcctgtttcgcaaccagtttcacagcctaaaccacaagcctctttgaatcttcggtactttttcacctttggtttgggaagcaatatttggatagaaaacctttcaaaaagccttctaaggttttttttggt

SEQ ID NO: 44032 - DNA, 486 bp, Gossypium hirsutum
  Clone ID: LIB3189-042-P1-K1-F2
aaaaaccacaccactggcttatagaccaccatgaaatagaccttcgatctaacacctttccttttcatttcccctttccttaaaaacaagctcaatcaattcccccattaaccctaaacgaaaatcagctgaaaaaaaaaccatttatttttcttcagctctaagcgacaacaacaatggctgacttcaagaaagccactgctttgattctcacagtggctttgcttgtgaatctcgctttaatggttgatgctgatggtgatgatgataagaagattcgagtcaggaaacataagggtgagaagcagtgtatacaaggatgggaatgttcctactggtcgaaatattgttgcaacaaaacggtttcagatgtcttccaggtttatcaatttgaggacctgtttgctaaaaggaattcgccggtggctcatgctgttggattttgggattaccattcttttattttggctgcttccatttatgagc

SEQ ID NO: 44033 - DNA, 416 bp, Gossypium hirsutum
  Clone ID: LIB3189-042-P1-K1-F4
gtgttatccaagatatggacaacaagtactccaaggttacatgggttgaacactcggaatatgatgagagcacagtccaccatctctttcgccccttactcagttctggttttggctttggtgcacaaaggtggattgccactctccgaagacagtacagcagcttggcacaactaatgtcccctgacatccacggtgaagacattaatacagtggggaagaaaagcatgttaaagcttgcacagcgcatggcatacaacttcagtgctggaattggtgcttcaagtgtgaataaatgggacaaacttaatgttggtaatgtgggtgaagatgtaacggtgatgactcggaagaatgtaaatgatcctggtgagcctctaaggatggttttgagtgctgctacttttgtttggatg

SEQ ID NO: 44034 - DNA, 447 bp, Gossypium hirsutum
  Clone ID: LIB3189-042-P1-K1-F5
ctcttcctctctactatttccttctttaagctaatttcttagtttcttgctagctaagcatggcaaaggaaggagagaacagcactttccatgccagggattatgttgaccctccaccagcaccattgattgatgcttcagagcttaagaaatggtcattttacagagcattgatagctgagttcattgcaactatgctcttcctttacatcacagtcttgactgtgattggtcacaagagccaagttgccacctcccctgacgcatgttctggtgttggccttcttggtattgcttgggcctttggtggcatgatcttcatccttgtttactgcactgctggtatttctgggggtcatattaacccagcagtgacatttgggctgttttggctcgaaggtctcattgatccgagccattgcatacatgggggtcagtcgtgggagc

SEQ ID NO: 44035 - DNA, 271 bp, Gossypium hirsutum
  Clone ID: LIB3189-042-P1-K1-F6
caagtcctttcaggaacgaatttcatactgaagaaaaacagcttggctgtcatggtctcaaaaatgatccagctgagtttattacagctggtaaggtggactatccgatatgtctggaggaacagcatgccaaaggtggcggtgctggaaagaccgactctagcaactttcatcatggatgagttcaagagagaatagaacgtgatgcgatggaaacgagaccactgatgcctatggacatgatagggcgcatgcttgtagctctaacaac

SEQ ID NO: 44036 - DNA, 434 bp, Gossypium hirsutum
  unsure (1)..(434): unsure at all n locations; Clone ID: LIB3189-042-P1-K1-F7
cccaaatacaccaaacatgaacaacaccatctctttaactctgcttcacattgcattttgcttcactttagtttcattcactcctatttcagccctggaattgcacggaactggtgccaacatggtcgaaacaacctgccaaaagacacccttttacaatctatgcgtctcggctcttaaatccgaccctcgaagttccggtgccgacgtagcggggctagcgcaaatcggaactgataaactgaaggccaaagccaccgcaacgctgcggcagatcacagcgctgcttaaagtggccaaagatccgaagctgaaaatggccttgcgtgactgtgctgattattacaacgccattgttaaatacgatatcccggtagctgtagaagctgtcacgaaaggcgaccctaagttcgtgtcgagggggcgacngatgc

SEQ ID NO: 44037 - DNA, 464 bp, Gossypium hirsutum
  Clone ID: LIB3189-042-P1-K1-F8
cccacgcgtccgcccacgcgtccgctccaagcaagcattttccttacaagtttgtttttcttgtgattaatcgatatggctagctgaatgtcccttaagcttgcatgtgtggcggtgttgtgcatggtggtgggtgcacccctggctcaaggggccgtaacctgtggtcaagtcacaagctccctcgcaccctgcattggttacttgacagggaatggtgctggtggcgttcccccaggttgctgcggcggcataaaatctctcaactccgccgcccaaacaacaccagaccggcaagcagcttgcaaatgcatcaaaagtgcggccgccggcatttctggcatcaactatggtattgcaagcggactcccaagcaagtgcggtgtcaacatcccttacaagatcaagcctagcactgactgcaacagcgtcaagtgaagttttggcatggaaagttcaccagc

SEQ ID NO: 44038 - DNA, 284 bp, Gossypium hirsutum
  Clone ID: LIB3189-042-P1-K1-F9
acttgctagtattcctacttggagtggtgacttctttttactcccacatttggtacctatgagtcgaccaaattttacgagactcggggcgtcctctattaatcttcctaaggtgaaaccaccaccatatgaacctatgccaccattgtatgaaccaccaaaaaaggagaagcctgaacctaagccaccggtttattccacctccaaagaaagagaagcatggacccaaaccaccaatgtatgaacctccaaagaaagagaagcctgagccaaaaccaccagtt

SEQ ID NO: 44039 - DNA, 494 bp, Gossypium hirsutum
  unsure (1)..(494): unsure at all n locations; Clone ID: LIB3189-042-P1-K1-G1
acttgctagtattcctacttggagtggtgactctcaccactcccacatttggtacctatgagtcaccaaattatgggaaaccccctactcctgtattcaagcctcccaaggtgaaaccaccaccatatgaacctaagccaccagtgtatgaaccaccaaaaaaggagaagcctgaacctaagccaccggtttatgcacctccaaagaaagagaagcatggacccaaaccaccaatgtatgaacctccaaagaaggagaagcctgagccaaagccaccagtttatacacctccaaagaaagaggagcctaaacctaaaccaccagtatatgaacctccaaagaaggagaaacctgagccaaaaccaccgatttatacacctccaaagaaagagaaacctgaacccaaaccacccgtatatgaacctccaaagaaggagaagcccgagccaaagccaccggtttatacacctncaaagaaagagaaacctgaaccc

SEQ ID NO: 44040 - DNA, 338 bp, Gossypium hirsutum
  Clone ID: LIB3189-042-P1-K1-G10
acagcttgtattcagaccaaacccttcctttcaatcagtttaatggaaggcaagttaaggcaagtaactggcatgcacaggttcaacaacagcaccagcaccagcaccagattcagactagattaaggaacaatgttgttggtgggagaccattggggcttccacaatcttcatggcctccacttcaagttcagccccaacagcagaaacaggcacaaaatgggatgagagctatgttccttggtggatctagtggtgtcaaaagggaatcaactggcactggtgtgtttatacctcgcaaatatggcaacaccaccaacaccaccacttatgaacct

SEQ ID NO: 44041 - DNA, 401 bp, Gossypium hirsutum
  Clone ID: LIB3189-042-P1-K1-G11
atagcctctcttttggggtttgttttcttgtactgcaattccctaatcagatttaggggacagaggaagctaaacagagcagcttcaatggagtttccaaagaaaaacagtgtaaacaaaactggaagtgagggtgttggcactgcggatattatcatagtcggcgccggtgttgccggtgctgctcttgcctattctcttggaaaggatggacgtcgagtacgagcgatagaaagggacttaaatgcgcctaatagaatggcctgtgaaagtctaataccagggggctacttaaagttaattgaattaagcgttgagggtaaacaagaaaaatcatggatttaaatagtagatgtaatataatggtataatggtatttctttaataaaatacttaattta

SEQ ID NO: 44042 - DNA, 287 bp, Gossypium hirsutum
  Clone ID: LIB3189-042-P1-K1-G12
gagtaaaataaaacattaaaacgcttaaacatgctccacttcggggcataagaaaggttcttcctcaaacaagctattaaacaatccatgaataagatgcaaacataagcaagtaaacaactgaaaatgaaaacctaaataacaaacaggcctcaaaatcaaagagtgcagtcatattaaactctaaaccccttgctgatccgtgttactctagcccattcatactggcttgctttagagcacacatatacattgatgtagattttgcggatactgaaagcccaccc

SEQ ID NO: 44043 - DNA, 492 bp, Gossypium hirsutum
  Clone ID: LIB3189-042-P1-K1-G2
gagctcactagttgcgctgctatataccctgatcatattccctttgttttcatcgatcaaaatccccttctcataaattttctctcttgatggaagagacgcgatgtgcaatttgactgttccaatttccttttcaatgttcaattaaaaccctagcctcttccttttgcttctattggggggggggaaggaatcatgtctttcgatctcatatgctgaagccgtcctgcagctgctttggatcctcccaagatctgtacggttgaggaccaaaagaagaaagatgatgacgatttggtgagtggccgttcgggatttcgccctcgctggttctctacaccgcaaatccgaatcatttcaacttttaccgtattccccgaagcttttgaatggtatgtcctgagaatcagattgattatgtcctgttatttgcctagggcttcctttatatgtcaagatcattcgtatagaatatatgtcatggtgtgcatt

SEQ ID NO: 44044 - DNA, 120 bp, Gossypium hirsutum
  Clone ID: LIB3189-042-P1-K1-G4
tttttggttctttccctttggcttttattttgagttattatgaattatatcactgtccaaaagaaaatcacacagcgggtaaaggtggtcatttatgaaaattgaagatattagtaattc

SEQ ID NO: 44045 - DNA, 403 bp, Gossypium hirsutum
  Clone ID: LIB3189-042-P1-K1-G5
cccacgcgtccgcccacgcgtccgattctggttgctctgccattcatgtttatttctccaactcattcctctttagctaatggtaatgttaatatattgcctcctaccaatacaagcgataaggtcactttggctctgtactatgaaactttatgcccatattgtgccgactttatcacaaatgaccttgtaaaggtcttcctcagtgatctgtataccattgtcaatctaaaattagtcccttggggcaatgctgacattcttggcgatgaaccccattgccagcatggagaagatgaatgctacttaaatactatacatagctgtgtcatctactactggcctgatgtgaaaaagcaacttgattttattcgctgcacggagcaacaaaactcaaagaaac

SEQ ID NO: 44046 - DNA, 417 bp, Gossypium hirsutum
  Clone ID: LIB3189-042-P1-K1-G6
cggacgcgtgggctttgcagagaggtgaagtgagccagccagccagccagccagccaaccaagcagtcgagctcggaactccgcaaccatgggtcgtatgcacagccgagggttgtaagggtatttccgcatctgctttaccctacaagaggactccaccaagttggttgaagatctcttctcaagatgtggaggagaacatttgtaagtttgcaaagaaaggtttgaccccatcacaaattggtgtcattctccgtgattctcacgggattgctcaggtgaagagtgttacaggcagcaagattttgcggatactgaaagcccacggacttgctcctgaaatccccgaggatctgtaccacttgatcaagaaagccggtgccatcagaaaacatcttgagaggaacaggaaagaca

SEQ ID NO: 44047 - DNA, 479 bp, Gossypium hirsutum
  Clone ID: LIB3189-042-P1-K1-G8
cgagacatggctgtatttgctgctggaatgatccaggcggaactgaaggggaagtctttcttatgccgttccgcggccagctttgtttctgcccgcattggaattatccccaaagctccaatccgcccaaaggatctaggaataagtaaagagaggagcggtggactaatagttgtgggttcatatgttccaaaaacaacaaaacaggttgaagagcttcagacacaacatggacatatgttaaaaagccttgaggtttctgttcataaagttgctatgaagtcatcagaagagagggaggaggaaattaatagaactgcagagatggcttctgtttttcttgcaactcgtaaagatactctgataatgagcagcagagaactcatcactggaaaaaatgcttctgagagtttgagatcaatttcaaagtgagctctgcacttggtgaagtagttaggcggataactacaagacctcgt

SEQ ID NO: 44048 - DNA, 255 bp, Gossypium hirsutum
  Clone ID: LIB3189-042-P1-K1-H1
tagaaaaccagatcgaaaaatgtcgggaatcatgcacaagatcgaagaaacccttcacatgggagggcacatgaaggaagaagagaggcggaagggagaagctcatcacgaaggcggccatggctatggcgctgctgagcacaagggagaagttcatcacgaaggcggccatggctatggttatggcgccgctgagcacaagggagaagttcatcacgaaggcggccatggctatggtgccgttgttgccgtcgg

SEQ ID NO: 44049 - DNA, 471 bp, Gossypium hirsutum
  unsure (1)..(471): unsure at all n locations; Clone ID: LIB3189-042-P1-K1-H2
cccacgcgtccgcccacgcgtccgcaaaattttaacaatttcagagctgatctctagcttggccgggccataacacccctaatcgctcgctctcgatcagatataaaagagctgtgaattggagttcgaaagatgcctgcacagaaaatagagacaggtcatgaggatgcactccatgatgttgccatggattattatggaaaacgattggcaactgcttcatctgatactaccattaagatcattggcataactggatctagttcacagcaacttgctgttctacatggccataaaggacctgtttgggggttgcttgggcacatcccaagtttggatcaatccttgcatcgtgttcttacgatggccaggtgataatctggaaggaaaataatcaaaacgagtggctgcaggcccatgtttntaatgatcataagtcatctgtgaactccattgcatgggcaccccatg

SEQ ID NO: 44050 - DNA, 400 bp, Gossypium hirsutum
  Clone ID: LIB3189-042-P1-K1-H3
tcgcaaaaatcctttggtttcttcattcctcaaatcaattcctttctttttccccaccattaaaaaaggggccttcccttaaaccagggcgagggggagttaaaccaaagaccagccaggcttctaaaaatgccgggcttaaccatggggtccttaattacccctgcttccataataatcaaccccaccaccttcttaaaaatcccttttttccttttaattaaaccagcttcaaccttttacccctcctcttccaggggtttttaatgaatattcaatcccccaaatttggaagcatgtaagagctactcaaagttgtcgatcttctttccgaccgtgtcttcccgagaatgttgtttcgggaggcacggttaagaggatttgttgggaaagtagcttg

SEQ ID NO: 44051 - DNA, 472 bp, Gossypium hirsutum
  Clone ID: LIB3189-042-P1-K1-H4
ctatttttaataatcttttcttttcttttcaattaattttccctgctagacaatcacagcttagcgaaggccgaaaaaacgagcgatggcggcggcgacgacgagcagagcggctcggcggatgggagccgaggatgagaagctagtgttcgagacgacggaaggaatcgagccgatattgagtttcgatcagatggggttaaaagacgatctcctccgtggaatctacaattacggctttgaaaagccgtcggctattcagcagagagccgttatgccgataatcaatggccgcgatgtgattgctcaagcccaatctggtaccggtaaaacttccatgattgctctcaccgtttgtcaagtggtcgacaccgctagcagagaggttcaagcgttgatattgtcacctacaagagaactggcgtctcaaacagagaaagtgataaggacaattggcgatttcatgaatata

SEQ ID NO: 44052 - DNA, 360 bp, Gossypium hirsutum
  Clone ID: LIB3189-042-P1-K1-H7
cagaaagaaataaaggaagaagaagcaatggccactcttacagtgcccacgacagttccttcggtgtctgaagattgtgaacagctgggaaaagccttttcaggatggggaactaatgagggcttaatcatagatatattgggtcacagaaatgccgagcaacgaaacttgattcgaaaaacctacgctgaaacctatggagaggatctcctcaaggcactagacaaggagctctcgaatgactttgagaggctggttttgctttgggctcttgatcctgctgaacgtgatgcccttttggctaatgaagccaccaaaaggtggacttcaagcaatcaggtccttatggaaatagcttgc

SEQ ID NO: 44053 - DNA, 484 bp, Gossypium hirsutum
  Clone ID: LIB3189-042-P1-K1-H8
gattatcaatttgaagccttcttcgaatttcctcattcaagatgcaaattttcgtcaagaccgggaccgtaaagaccatcacattgcaggtggagagttctgatactattgacaatgtaaaggccaagattcaggacaaggaaggcatccccccagaccagcaaaggttgatcttcgctggtaagcaacttgaggatggccgcacgttggctgattacaacatccagaaggagtccacactccacttagtgcttcgcctccgtggaggaatgcaaatttttgttaagactttgactgggaagaccattacattggaggtagagagttcagataccattgataatgttaaggcaaaaattcaagacaaggagggaattcctccagaccaacagaggctgatttttgctggtaagcaactggaggatggccggaccctggctgactataacatccagaaggaggccaccctacacttggtgcttcg

SEQ ID NO: 44054 - DNA, 463 bp, Gossypium hirsutum
  unsure (1)..(463): unsure at all n locations; Clone ID: LIB3189-042-P1-K1-H9
aataaaaaancgacccgcgcgtncataaaatttctttacttccttcatacttcaatccattctctttctctcccccaacaatcaaaaaatccgcatattttaaaacagacccccgcgctaaataaaactaaatacaatcaattcttctacaaatccatatcttaacatttcatacttcacttacactctctccatcatcatcatttccaacaccttcctcaaaatcccctctttcccttttaatcaaacaacctccacccttttaccctccttctcccaacttttttaatcaattatcaatccccacatttttaccatctaaagctactcaaattgtctatctctttcccaccgtttcttcccaaatttttttttcctaaccacccttataccaatttttttaaataactcatacccactccaacttcttcttcccccaatattcctttcctatcaatttctc

SEQ ID NO: 44055 - DNA, 54 bp, Gossypium hirsutum
  unsure (1)..(54): unsure at all n locations; Clone ID: LIB3189-044-P1-K1-D1
naaaaaaaaaaaaaaaaaaaaaaaaaaaaaaaaaaatttttttttttataaaaa

SEQ ID NO: 44056 - DNA, 166 bp, Gossypium hirsutum
  Clone ID: LIB3189-044-P1-K1-D11
cgccgctacaagcagattaagcgcactgaaggtgtttctagcacggatattgtaggaaggatactttcatctgtaaatgataataaaggtgtgggagacactaatcgcacactttcgagggtagatcctggcagatggcgtcaattacataggtgtccgctcttct

SEQ ID NO: 44057 - DNA, 271 bp, Gossypium hirsutum
  Clone ID: LIB3189-044-P1-K1-D12
gaacagctcaaaaaagcttccaacattttgaagaatcaaataatcaaacatgtcgaaggaagtgagtgaagaaggggtgagccgaaaggactatgtggatcctccaccggcaccgctcatcgacgcggctgagagcaagcttcgggctctttacagagctcttatcgcccaattcatcgctactttcctcttgctatacgtcaccataggcaccgtcattggtcccatgaaacacccctatgcatgctattgtgttcgtcttcatagcatc

SEQ ID NO: 44058 - DNA, 181 bp, Gossypium hirsutum
  Clone ID: LIB3189-044-P1-K1-D2
caagctctaattttagcccataagcctactcccagttacccttaaccctccatgggcaaaggcggaggtggtgtcccaagcaaaaagagacaacctttctatgacgaaggctgtgccactgggactgccactgccgccaccaacatcgcacccatagaagccgatgaacaaactcaccaaa

SEQ ID NO: 44059 - DNA, 133 bp, Gossypium hirsutum
  Clone ID: LIB3189-044-P1-K1-D6
tcgctctctcttaccattttaacagctcattctctgttttattttttctttaacaatccaggcaagagactgtcaagctaagaggggtgtcacacccatcctctgttagggagattcaccgagttcttatcat

SEQ ID NO: 44060 - DNA, 124 bp, Gossypium hirsutum
  Clone ID: LIB3189-044-P1-K1-D7
cacatctttgccctttcattgctttcttgcctgccttaaacctccttcaagcatagccatgactactgaaattttaatggttgattgacccccctaacctcccctcctccaccttcctattccc

SEQ ID NO: 44061 - DNA, 100 bp, Gossypium hirsutum
  Clone ID: LIB3189-045-P1-K1-A10
cgaaagctggttttgcttgtgattattctccaagggcagttttttccaatattgttggtcggtcccggcacacttgtgttattgttgggatgggtcaaaa

SEQ ID NO: 44062 - DNA, 372 bp, Gossypium hirsutum
  Clone ID: LIB3189-045-P1-K1-A11
gtttcatccattagattctcatcattctaacatcggttctcaggtgaagttcatggctccagaaggcatgatccatcatgatgcaccaccaaatcatcatttacctgcaaatatgcttcatcctctccatcatcctagcagtggactaactggatttgatcctccgattcatcatcctatgttacaacaaatgcatatacccagaaactttcctcctccaatcatgcaatgtggaattcccggtgttccactgctggcacctcattcaactaatcagatggctggtttgctacctgaattgaatccaatgcaatgttttccattggggcatggtcaccggcagccccaacccaactttgctggtcttggaat

SEQ ID NO: 44063 - DNA, 441 bp, Gossypium hirsutum
  Clone ID: LIB3189-045-P1-K1-A12
cccacgcgtccgggccactgccggagacactcacctgggaggcgaagatttcgacatccgaatggggaaccatttagtgcaagagttcaagagaaagaacatgaaagacattagtgggaaccctagagctcttaaaagggtgcgaactttttgcgagagggcaaaaagaactgtctcgttcaccggtgaaacgaccattgaaatagatacggtatacgaaagtattgactattactgaaccataacccgtgccagatttgatgagctcaacatggatctattcagaaagtgtatggaaccaagtgagaaatgcttgaaggatgccaagatggacaagagcagtgtccatgatgacagccctcgtgtgtggttccactagaattcccaaagttcaacaactatagcaagatttcttcaatggtaaagagctttgcaaaagca

SEQ ID NO: 44064 - DNA, 282 bp, Gossypium hirsutum
  Clone ID: LIB3189-045-P1-K1-A6
gatttcgggtctgcacaaacatgttacacaactcaaacacgtggctcaagagatctagaactgatgcacggatacagaatgaatttgtgtccgatctgcaaatgctaatgagcagagctcaggcaggagtaaaaagcgggatgacaaagctgaatcgaactgttgctcagcagagatcgaatcacattttgcaagtgataatctttggtcttacatgtttctccatcgtctacttatggccatagcacttccagagatgacaacattggcttcgaggcttcc

SEQ ID NO: 44065 - DNA, 187 bp, Gossypium hirsutum
  Clone ID: LIB3189-045-P1-K1-B10
cggacgcgtgggctgaagtcattggtttggaagagaaaggacttcgattaaaggcaaatgggctaaaattggggaggacaattgggaactcacaggctgtaatttcttctttaaaaaagaaaatgcaagcttagagaaagatcgtcaggatttgctgtcaactattgaagctcttcaagaagagaag

SEQ ID NO: 44066 - DNA, 473 bp, Gossypium hirsutum
  Clone ID: LIB3189-045-P1-K1-B11
gccgtttttgctttcagaaaatctaccgcagtttgcagttgagaggatggtgagagtcagcgttttgaatgatgcactcaagagcatgtacaatgccgagaagaggggcaaacgacaggtcatgatcaggccttcctccaaagtgatcattaagtttcttttggtcatgcagaagcatggttatattggagagtttgagtatgtcgatgatcacagatctggaaaaattgtggttgaattgaacggaaggctgaacaagtgtggggtgattagccctcgtttcgatgtcggagttaaagagattgaaggttggactgctaggctacttccttccagacagttcggatacattgtgcttaccacttcagctggtatcatggaccatgaagaagcaagaagaaagaatgtcggtggaaaagtacttggtttcttctattgagacaaatctgagttctttttatttggtttatttc

SEQ ID NO: 44067 - DNA, 63 bp, Gossypium hirsutum
  Clone ID: LIB3189-045-P1-K1-B4
aaaaaaaaaaaaaaaaaaaaaaaaaaaaaaaaaaaaaaaaaaaaaaaaaaaaaaaaaaaaaaa

SEQ ID NO: 44068 - DNA, 253 bp, Gossypium hirsutum
  Clone ID: LIB3189-045-P1-K1-C10
gttttactcaaaaagatccctctcaacaatttctttaatcccaaggtcttttcgacatgaccgtcgtggccaaccagctggtcggattgtgatggagctctttgccgatgcactccgactgtgaaacttcggctcttgaccggcgagaaagggtaggccgtacggcaaaccttccactacaagctatccttccaccggggatcccatttatgtgcaaggaggcgctttaccgcgaaacggtaccggaggtgaa

SEQ ID NO: 44069 - DNA, 441 bp, Gossypium hirsutum
  Clone ID: LIB3189-045-P1-K1-C11
aatgaatgaataccgagaccgtgttgtattgcctactgccactgagaagtatggacggcatatcagcacttgtctgaaggttttggatatgactggcttgaagctttcagcattgaatcaaataaagatactgaccactatatcaacaatcgatgacttgaattatcctgagaagacacagacatattatattgtcaatgcgccatatatattttcggcatgttggaaggctgtaaaacctctcttgcaagaaaggacaaagaggaaaattcaagtgcttcaaggttctggaaaggatgagttgctgaaaataatggattattcatcccttccacatttttgtagaaaagaaagttctggatcaacaacgtacaacagcgatggaactggagataattggttctcggtggatcacacctaccatcaacaggtttacactta

SEQ ID NO: 44070 - DNA, 460 bp, Gossypium hirsutum
  Clone ID: LIB3189-045-P1-K1-C12
cccacgcgtccggacatttttgccaaggaatgaggatgagcgtcaaatgtgtgcgagaactatctactgtacaaacattgacaagaaggttactcaagctgatgttaaactctttttcgagacagtctgtggggaggtttaccgcctgaggttgcttggggactatcagcattcaactcgcattgcttttgtcgagtttgtaatggctgaaagtgcgattgctgctctcaactgtagtggtgtggttctgggatcattgcctataagggtcagcccatcaaagaccccagttcggccacgagctcctcgccttccctcgtactaaatcattcactccaaaccgattttagttccaagtttatatatatatatatttaaatacatacacagccatgtaaagatgtttccccatgttgctcttgctgatctacatatatatcgtccactgctgctatgtttc

SEQ ID NO: 44071 - DNA, 64 bp, Gossypium hirsutum
  Clone ID: LIB3189-045-P1-K1-C5
aaaaaaaaaaaaaaaaaaaaaaaaaaaaaaggaatttttttataaaaaaaaaaaaaataaaatg

SEQ ID NO: 44072 - DNA, 178 bp, Gossypium hirsutum
  Clone ID: LIB3189-045-P1-K1-C6
cgaccacgcgtccgacacatctggtgtatactccggttttcgcgttctttttctaattcaaggccaagaggagaagcatgacagcattgccaagaagctggcgtctgcttcctctgattctcaccattgatccactaagagtggagaaaaaaaaaagccaaacttatccccatctatc

SEQ ID NO: 44073 - DNA, 467 bp, Gossypium hirsutum
  Clone ID: LIB3189-045-P1-K1-D10
ctgaatggagacctcaagaatcaatttgttgaaaccaatgttggttttgatactatatgcaaggtcaattcccaactcatcagtaatgtctgcactgatgctctctctgcggagaagtactattattttatccgtcttatgggaaggaaggcatcacatgttgccctggaatgcaccctccaatctcatcccaatatggtaattcttggtgaagaagtggctgcatcaaagcttacactctttgacataacaaagcaaatttgtgatgcagttcaagctagggccgagcaagacaagaaccatggggtcatcctcctgcctgaaaggcttatagagagcattcctgaagtgtatgcgctattgaaggaaattcacagtttgctcaggcaaaatgtatctgctgataaaatttcttcccagttatcaccttgggcatctgctttgtttgaatttttgccacatttcat

SEQ ID NO: 44074 - DNA, 414 bp, Gossypium hirsutum
  Clone ID: LIB3189-045-P1-K1-D11
cccacgcgtccgcccacgcgtccggaaaactaaacgccaggctctaaacgcgggtagcagttgaagaaaataacctcaaataacgtgaaatctcttaacacaaaatttttttttgaagattgtagaagatggctgagggtgaggatattcaaccccttgtctgcgataatggaactggaatggtgaaggctggatttgctggtgacgatgctcctagggcagtgtttcctagcattgtcggtcgtccacgtcatactggggtaatggttggtatgggacagaaagatgcgtatgtaggcgacgaggctcaatcgaaacgtggtattttaactttaaagtacccaatcgaacatggcattgtcaataattgggatgacatggagaaaatttggcattataccgtttacaatgaac

SEQ ID NO: 44075 - DNA, 420 bp, Gossypium hirsutum
  Clone ID: LIB3189-045-P1-K1-D12
atcgaaatggtttccacatattgcaaccgtttttacgccaataagcctgagctcgctgctcgtcggatcgaagccattgggtatcaggttggccaccagctctctgaacggtacacgatggagaggccacgttttagtgatcatttagaggcaatcaagttcatctgcaaggacttttggtctgaactctttaagaagcagatagacaacttgaagacaaatcatagaggtacctttgtattgcaagataatcgttttcgttggcttacacgcatgtcaattgatcaatcacctgaaaatggagcatctgaagagccttctatcatggctgatgagaaggctgtggaaagcatgcatctatattttccatgtggaatcatcaggggagctctttcaaacttgggaataccttgtgcaggt

SEQ ID NO: 44076 - DNA, 79 bp, Gossypium hirsutum
  unsure (1)..(79): unsure at all n locations; Clone ID: LIB3189-045-P1-K1-D4
aaaaaaaaaaaaaaaaaaaaaaaataaaaaaaaaattttttaaacgaaaaagaaacaacttgnactagggggctactat

SEQ ID NO: 44077 - DNA, 171 bp, Gossypium hirsutum
  Clone ID: LIB3189-045-P1-K1-D5
gttgctgtggattatcaaccatgagcaacgtggctaagtttctcagatactcttcactcactatcttcgaacaacccattgcaaaggacctttggccatcctctacttcttctttctagcttcttcttctagggttcttgcctttgggtaatctttgttgttgggtttttt

SEQ ID NO: 44078 - DNA, 441 bp, Gossypium hirsutum
  Clone ID: LIB3189-045-P1-K1-E11
gtcaaacatttttctcacttatttattctttcatttatttatttgtaaaaactcacacaagtttaggaagaagaagaagatgtcgtggcaagcgtatgttgatgatcacctgttgtgtgatatcgaaggcaaccatctctctgccgctgctatcatcggccaagacggcagtgtttgggctcagagctccaatttccctcagtttaagcaagaagaaatcaatggcatcatgaatgactttgctgaacccggatcacttgccccaaccggattgtaccttggtggcactaaatacatggtgatccaaggtgaaccaggagctgttattcgagggaagaagggacccggaggtgttactgttaaaaagaccaatcaggccttgatcatcggcatctatgatgagccaatgactcccgggcagtgcaacaatggttgtggaaa

SEQ ID NO: 44079 - DNA, 466 bp, Gossypium hirsutum
  Clone ID: LIB3189-045-P1-K1-E12
gagcttcttctttgccggcaaacagaccacttccaatttgctcacttggaccgccgttcttcttgcaatgcacccacagtggcaggtgcaagcacgtgaggaggttcttagggtgtgtggattacgtgacatacccaacaaagataatttcgtaaagcttaagacgctgagtatgatattgaatgaatcgctgcgattgtatcctccaaccgtagctacaataagacgcaccaaagttgatgcagagttaggaggttacatgatcccacatgggaccgagcttttgataccaatcttagccgttcatcatgataaagccatatggggcaatgatgcaaatgagttcaaccctgcgcggttttccgggggcgtggcacgtgcggccaaacatcctattgggttcatcccattcggccttggggtccgtacctgcattggccaaaacctagccattttgcaagcaaaa

SEQ ID NO: 44080 - DNA, 51 bp, Gossypium hirsutum
  Clone ID: LIB3189-045-P1-K1-E4
ttccgggtcgggcacgcgtccgtcactttagttactctctaccttccacag

SEQ ID NO: 44081 - DNA, 153 bp, Gossypium hirsutum
  unsure (1)..(153): unsure at all n locations; Clone ID: LIB3189-045-P1-K1-E5
cccggtcgaccacgcgtccggtgagattggaggctgatcagctggttggtgacatctctagattcagtagcacaacaagtcattggagagactatcaaagctctcatggcggttgatnctcaaaatgaagaaaaaatgaagcctgaagagagt

SEQ ID NO: 44082 - DNA, 399 bp, Gossypium hirsutum
  Clone ID: LIB3189-045-P1-K1-E6
cgcggctttacacttcccttctctcacctcttccagaagccagaagtcagtttagtagcaatggcgtgtgctgcgatgaagcctaccaagccgggtttggaggagccccaagagcagattcacaagatccggatcactctctcctctaagaatgtgaaaaacctagaaaaagtttgtgctgatttggttcgcggggcaaaggataagagactgagggttaagggaccagtaagaatgcccaccaaggttcttcacatcactaccaggaagtctccctgtggtgaaggaacaaacacatgggatcggtttgagctccgtgttcacaagcgagctattgacctattcagctcccctgacgtggggaagcagatcacatctatcaccattgaacccggtgtt

SEQ ID NO: 44083 - DNA, 467 bp, Gossypium hirsutum
  Clone ID: LIB3189-045-P1-K1-F10
caacaaatggacgttctgggaaggttgaggcatcccaatctggttagcttgaaagcttactattttgccagggaagagaagctgttggtctacgactacatgcccaatggtagcttgttctggctacttcatgggaaccgaggacctgggagaacaccattggactggactacaaggctcaaaatagcagccggagcagctcgtggcttggcttttattcactacacatgcaaggctcttaaactcacccatggtaacatcaaatccacgaatgtcctccttgataaatcaggggatgcacgcgtgtcagacttcgggctcaccatcttcgcatcacccaccaacaatgccccaagatcaaacggctaccgtgcaccggaattatcatctgatggtcggaaacccacccagaaatccgatgtgtactcctttggtgtgttgctacttgagatactgacagggaagtg

SEQ ID NO: 44084 - DNA, 253 bp, Gossypium hirsutum
  Clone ID: LIB3189-045-P1-K1-F11
cggacaaagaaccttctattaactgtgaggtatttgtttagacctagcgagaaagctcaatattttgccatttaagagaaggtgagggactacaactacatgcccaatggtagcttgtgtctgaatactttatgggaaccgaggacctgacaatacaccattgatactgaatacaatgcttaaaatatcatacatagcagttcgtgtcttgtcttttattcactacacatgcaaggcttttaatactacccat

SEQ ID NO: 44085 - DNA, 470 bp, Gossypium hirsutum
  Clone ID: LIB3189-045-P1-K1-F12
aaaccccccaattctttactcactgtatatgaaatcggaggtttctgaaatgggaagcggtgttggcggcggtggaggagggaacaagtatggcagtttaaaccttactgatctaccgcaagattgcatcgctaccgtgttttcattcacttcccctcgagatgcgtgtcggttgtcactcgtttcaactactttcaaatcggcttccgaatccgacgccgtttgggagagtttcttgccgtcggatcaccaggcttcgattccttcgtcgctctctttttcttcgaagaaagaactttatcttagcctttgtgaaaatcatatcctaatcgatggtggccgaaagagccttcaattggaaagagtgagtggcaagaaagtttacatgctatctgccagggacctctttattgtatggggtgacactccaacctactggagatggatctcattacctgagtccaggtttg

SEQ ID NO: 44086 - DNA, 419 bp, Gossypium hirsutum
  Clone ID: LIB3189-045-P1-K1-F3
cggctttcgattcaaatcccttttggaactgtccttcaattgaaaacaagcagccaacatggggaagacacgaggtatgggagctggacgtaagctgaggacccaccgaaggaggcaaaggtgggccgataagtcatacaaaaaatccaaccttggtaatgaatggaagaagccatttgctggttcttcccatgccaaaggcattgtccttgaaaagataggtattgaagctaagcaacctaactctgctatccgaaagtgtgctcgagttcaattgatcaagaatggaaaaaagattgccgcgttcgttccaaacgacggttgtttaaactacatcgaagaaaatgatgaggtgttgattgctggatttggacgaaagggtcatgccgtcggtgatatttccggtgttagattcaagg

SEQ ID NO: 44087 - DNA, 271 bp, Gossypium hirsutum
  Clone ID: LIB3189-045-P1-K1-F4
gagagctcatctctctgcttcaaagctcctgtccgggtagaattctcttcttcctttgcgttgtgttctttgttgttcaatcgccatggcttcaaagcggattttgaaggaactcaaggatttgcagaaagatccacccacttcttgtagtgctggtccagtagctgaagacatgtttcattggcaagcaacaatcatgggaccctcagatagcccttatgctggaggtgtgtttttagttactatccatttccctccagattatcctttc

SEQ ID NO: 44088 - DNA, 444 bp, Gossypium hirsutum
  Clone ID: LIB3189-045-P1-K1-F5
gtccgggagaaagatctcttgttcttattataagatcgtgtgattggaatccgcagatgttgggtaaaaaaaatcttctcttttgggaataatcaaaaatggaaagtgttcaattggaacatgaaaacgtgactgaatttgtcctagttactcttcgggacagagtggaagaagggaggagattctcgaacgaggaaaaggacccaatgacttcgaaagaattgaacgaggagccgtatgaggtgaaaatctcatgtacggttctgtagagtggcagtaagggtgacttatctgtcaactttttcactatcacccccaaaaaaccaaactctgccttacgtaaagttgccagagttcgattaacctctgggtttgaaatcactgcttatatacctggtattggcataattacaagaacattttgtagtcttagtaagagggggt

SEQ ID NO: 44089 - DNA, 208 bp, Gossypium hirsutum
  Clone ID: LIB3189-045-P1-K1-F6
cggacgcgtgggtttcaacccaaaattttttttaaaaaaaattctaaataagtgatggggtttccggccaatggctcatcggacaaaccattgaagttcctgatctacggtcgaactggttggatcggtggtttattaggcaaactctgggaatcccaaggaatcgattacgagtacggctccggccggttagagagccggatttcgc

SEQ ID NO: 44090 - DNA, 369 bp, Gossypium hirsutum
  Clone ID: LIB3189-045-P1-K1-F9
cccacgcgtccgcaaaaatccaagatggctcgtgtgaagaacttggaaaagcaaaaagctgccgccaaaggaagccagcttgattctaacaagaaggccatgaccatccagtgcaaggtgtgcatgcaaacattcatctgtactacaacagaagtgaaatgccgggagcatgctgaggcgaagcatcctaaatccgacctatacacatgttttcctcatcttaaaaagtagcacactggggaagtggagatggctttgtagcatgcatctatcttgtcccattggtactgtatgagtaacttcttaaaatctctgttacaaaagcccttataagcttctactttgtgatttcgatgatgcaattgtcat

SEQ ID NO: 44091 - DNA, 472 bp, Gossypium hirsutum
  unsure (1)..(472): unsure at all n locations; Clone ID: LIB3189-045-P1-K1-G1
atctaaatgacctccatgttctagatttgagaagctggacttggtcaaaggtcgaagctaaggttgtacctaagtcagtggaatcaccatccccagtgaatatagccccgtgtgctggtcattcattgatcccttgggagaacaagcttctttcaattgctggccatacaaaagtgccttctgaaactatccaggtgaaggcatttgatctgcaaactggtacatggtcagtgttgagtacttatggcaaagcaccggtcactcgtgctggtcaatctgtgacccttgttggaacaaccctagtgatatttggtggacaggatgcaaaaagaacactcttgaatgatctacatatacttaacctagaaacgatgacctggaatgaaattgatgctgtgggggctcctncatcaccacgagctgatcatgctgctgctatacatgcagagcgttaccttcttggttttggtgg

SEQ ID NO: 44092 - DNA, 433 bp, Gossypium hirsutum
  unsure (1)..(433): unsure at all n locations; Clone ID: LIB3189-045-P1-K1-G10
agcttttccgggacatgccttatctgttgatcattgacaatcttgagacagagcgagagtggtgggaaggaaaagacctgcatgacttgattcctaggaacactggagggactcatgtgatcatcacaactaggctaccaaaggtgatgacttttgacatgatgcagcttcctccattgcctttatccgatgctatgattttagtacgaggtagaaagaaaaaggattatccgaccaaggagttggagttcttgacaaaatttgatgagaaattgggaagattgagctttggtttgtggattattggntcattacttttcgagctgtccattttttcatctgcactctttgaagctgtgaaccaagtctctacctcacttgaagatgcctctacttcacccactgatgagcagttctttaaacacaacccttt

SEQ ID NO: 44093 - DNA, 295 bp, Gossypium hirsutum
  Clone ID: LIB3189-045-P1-K1-G11
ggcagccacaaactccgataaactgaaagaaaatggttcagacctcctgttggggctccatcaggtgcagtttgtgaaaatactacagaagggaagcagagaagaagcactcaagtatgcaagaactaacttcgttccttttgccggaaaccatatggccgagatccagaaactcatggggtgtctcttgtatttcgatagacttagtgagtccccatatgctcatttattatcaccaaccaattgggatatagtggctgttgagcttaatttacagttatgcaactcacttggt

SEQ ID NO: 44094 - DNA, 469 bp, Gossypium hirsutum
  Clone ID: LIB3189-045-P1-K1-G12
gtgcctgcttattttacattggctattttgacaatgttgtggtccttgaccagtatggtggaagctcaggtttatgttaccagtggcaccattgctcagtggtacttctccaaagatgatacgaaacctcaccggagcataaggagatctttgagaaatgcatttggtccttcttctggcaccatctgtctatctggattacttgtctttgttgttcgagtggtgcgtgctgctgttgatagtgcaagagaagaagatgttcctgggatagtgaatcttgttctgcggtgttgtgttaatgccctaatgtctgcgatagactttcttaacaagttcacaatcaactttgctgcaataactggcgaggcatattgcacctctgcgaggatgacatatgagcttctaagacgtaacctactctctgctgtttttgggagaccgtttaactcgttattatcagagttatttt

SEQ ID NO: 44095 - DNA, 206 bp, Gossypium hirsutum
  Clone ID: LIB3189-045-P1-K1-G4
cggacgcgtgggcgcaaacctccaatcttttcagcgttctatggcataagccaagctccattgcgcatggattggtactcttggttgggaaaaactgcccttgagccctcactaatctatgactatgggcttggcttttcccgtaatgaggtttaaaaagaggatttaacctacttcaattatgaagttctttaaaacatgggcat

SEQ ID NO: 44096 - DNA, 249 bp, Gossypium hirsutum
  Clone ID: LIB3189-045-P1-K1-G6
cggtcgaccacgcgtccgggaaagtgaaaagcttgtctcgaaccttttcgagatgtcgcgtgatagtgctccttccatcatattgattgatgaaatagattccttgtgcggccagcgtggagagggcaatgagagtgaagctttaagacgtatcaaaactgaacttcttgtgcagatgcaaggtgttggacataatgatcaaaaagtcctagttcttgcgggaacaaatacctcccttgctcttgatca

SEQ ID NO: 44097 - DNA, 275 bp, Gossypium hirsutum
  Clone ID: LIB3189-045-P1-K1-G8
ctcttgcaaccaaagagcttgagtggtttgcggtttctgctctattggctctacctattattagggtgttcagaatattttgagcagttttctgcaaaaagacaaagaagcgtgttcgacatactaacgcaacccaccatggtcgtcgtaagggcaaaagggggcacacagacaagtagactgcgtgtatttaggttttggtctattaatgttggtaaaaattagagccttcatggacgtgtgatcttgctttctactgtacttttttgtcttta

SEQ ID NO: 44098 - DNA, 411 bp, Gossypium hirsutum
  Clone ID: LIB3189-045-P1-K1-G9
gttgtttcgatatttgtattaagaatcgccctttagtgatcagtgaggtgaagaaaaatgtcttgctgtggtggaaactgcggttgcggctccggttgcaagtgcggcagcggctgcggcggttgcaagatgtaccctgagatgaactttgctgagcaaaccacaaccgggacacttgttcttggcgtggcaccccggaaagtgcactttgatggagctgaaatggaaactggggctgaaaatggctgcaaatgtggagataactgcacttgcaacccttgcaattgtaaatgagaaaaaaaagctaagcatattattggaagctgatctaaataatatatgatgtatttgggtttttactattagaataaagcagcctatggttcattgggtgttttcttcttgtattca

SEQ ID NO: 44099 - DNA, 444 bp, Gossypium hirsutum
  Clone ID: LIB3189-045-P1-K1-H11
agagactaaatatctaatggcattgaagaatttatgtgatgttggcattgttcagccgtatcctcctctctgcgacatcaagggcagctatgtttctcagtttgaacacaccatcctactgcggccaacctgcaaagaagttatatcgagaggagatgactattaaggtggaagaccaaaaaagtttagttggtactcatctcctcagatattttgcgaataattttagttgtgtactttgtgttttttaacataaggaaggtccctaaatagcggatgatacccatgtttgtcacttgtttgtacttttgctttgccgtgtttgatgatagatggtgtgattgagacttgaatcaggcaatacatggtgataggaagactagaattttccattgcagtcaaagttatgtcttacaactacaaaacatgaatgatgttttactt

SEQ ID NO: 44100 - DNA, 317 bp, Gossypium hirsutum
  Clone ID: LIB3189-045-P1-K1-H12
tcgcccacgcgttcgggccactgccggagacactcacctcggaggcgaagatttcgacaaccgaatggtgaaccatttcgtgcaagagttcaagagaaagaacaagaaagacattagtggtaaccctagagctcttagaaggttgagaacttcttgcgagagggcgaaaagaactctttcgttcaccgctcaaaccaccattgaaatagattcgttatacgaaagtattgacttttactcaaccataacccgagccagatttgaggagctcaacatggatctattcagaaagtgtatggaaccagttgagaaatgct

SEQ ID NO: 44101 - DNA, 423 bp, Gossypium hirsutum
  Clone ID: LIB3189-045-P1-K1-H2
tgtttactgagaaaacggagaaagaaagagacaccgctgaatgcaattttagcaggttgcattgcaggattgtcgattttagctctggatgatcccaatcgaaggcgaacactttcattgtatcttttggctagagtagctcagtgtgcttataattctgcgaaatcgaaaaataagtttcatttatggggaagccattggaggcatggtgactctctactcttttctttagcttgtgcccaggttatgtacgcctttgtgatgcgtcctgaaagcttgccaaaatcatataaagattttattcagaagactggtcctgttgcagctcctgtatataaggctgtacgggagagttgttagagtgggccagtggatgttgaatctatatcagcctacttaaatagccgagggaagtctgatact

SEQ ID NO: 44102 - DNA, 231 bp, Gossypium hirsutum
  Clone ID: LIB3189-045-P1-K1-H4
aaaaggaaagcagtcacatttattacttgggagataagtttggatggtaatagatgaaaatagtagcggaagcaagagcaacgaaaaaaagcttaaaactggattattaaatatattaccgggcactacagaaaacacatgtttagcaacagcagccagtatatgactagaaagggggaggaccaatatcagggcgtttaccaaaagcattcttgtagtattccaacaaca

SEQ ID NO: 44103 - DNA, 259 bp, Gossypium hirsutum; identical to SEQ ID NO: 44001
  Clone ID: LIB3189-045-P1-K1-H5

SEQ ID NO: 44104 - DNA, 418 bp, Gossypium hirsutum
  Clone ID: LIB3189-045-P1-K1-H6
cgagcgtccgatgagccaaaaccacatggtttctcccgcctgaaatctttcattccttttgacccatcacaaacttcaccaatttctcttgcagttcccagttcttgctcttcttttgatggggactcaactttgagtaccggttgtaactcagtgatgaaaagaatggtacgaatatgagatcagcctcgctggaatttttcactctgatggcttctcggctgcttggattctcggaaaattctgaagctaagaggtccaatgttagccagtattctatgctgtgttgtgaattcaatccacctggatatgatggaatttttgttctaatatcaagccaaacactgtttccttgtggttccagtccaacaatccgaagtggaactctggatctaaaatatacaagaaaaatttcaat

SEQ ID NO: 44105 - DNA, 401 bp, Gossypium hirsutum
  Clone ID: LIB3189-045-P1-K1-H7
aaaaaagagcagagaatcattatttccttttcttctcgttatacgaatttggttgtaccatgcaaaacctggattcatgagcttctcaattctaaagagattacctttattttctccaccatttgtcaacgtaatggcttcatcatctttctactgtggagttcaatcaaagagattcttagtgttagcccagcagctgcgtcattataagcctccaccttgttcctgggatgacaacgaggaacgaatcatcgaggaagccgccgggaaatttgtttcccaagtgggttttcaagaatccgttacccgagtggctcaaaacccagaaaagtttagatccaaaagagctgctgttttgatctgcctctttgaaagggatgcttgggactttgcgtttcatt

SEQ ID NO: 44106 - DNA, 316 bp, Gossypium hirsutum
  Clone ID: LIB3189-045-P1-K1-H8
aaaaaaaaaaaaaaaaaaaaaaaaaaaaaaaaatttttacaaaataaaaaaaaacaaaattacatgcgcatacttaaatacataatgggtggtactatatagccccctttttccgttccagtgtcccttgtctttcatcgttgtttctggttattcttttgggttacccaatttcattgcctggctttactttgcccctttctccccctggcgtcacccctgaagtttcccttttttttcgccctgtccatcttccctttttcccccttgtccttactgactctcaaattcggacacgccttttcctctccccttt

SEQ ID NO: 44107 - DNA, 219 bp, Gossypium hirsutum
  Clone ID: LIB3189-017-P1-K1-C10
gtactactactccaagcaagtatttcccttactttttggtttttctggggattaaccgatatggctagctcaaggtccctaaaacttgcatgtgtggtggtgttgtccttggtattggttgccccctggctcaaggggccgcgacccgtggtcaagatacaaacttccttgcaccctgttttttttactcttgaggcacaggtgcttttgcccctcccc

SEQ ID NO: 44108 - DNA, 413 bp, Gossypium hirsutum
  unsure (1)..(413): unsure at all n locations; Clone ID: LIB3189-017-P1-K1-C12
cccacgcgtccggaaaatgaaggtttccgttatttctctcaaaggcactcacttcgatatcgaagtcaaacccgaagatgcggttgcagatgtaaaaaagaacatagaaactgttcaaggggctgatgtttatcctgctgcacaacaagtgcttatctttaagggaaaagttcttaaagatgacacgacactggctgaaaacagtgtcaatgaaaatagctntattgtgatcatgttgacaaagaataagggtgcatctggtgagtgttcaactgcttcagcagctcctacaaagaaagctcctgaggcaagtagtctgccaacagctacagtacgagcttcgactgcacctgttgtgacgtttggtgtggctgcaccttccgctgaaatctgctcctgttgcttaaagtact

SEQ ID NO: 44109 - DNA, 380 bp, Gossypium hirsutum
  Clone ID: LIB3189-017-P1-K1-C5
tcgtccacgcgttcgtccacgcgtccgcccacgcgtccgttccaagtttatgaagaaacagctggcctgatggttaatgatccagttctgcggacacacaagcccctgtctgttgagttgggaccaggaatattgggaaacatttttgatggcattcagaggcctttgaaaactattgccaaaagatcgggtgatgtgtatatccctagaggagtttctgtcccagctcttgacaaagatgctctttgggactttcagcctaaaaaaatcggtgagggagaccttctaactggtggagacttgtatgctaccgtctttgaaaacagtttgatgcaacatcatgttgccctgcctcctgatgcaattgggaagataactta

SEQ ID NO: 44110 - DNA, 376 bp, Gossypium hirsutum
  Clone ID: LIB3189-017-P1-K1-C6
cccacgcgtccgctaatggaaaaaagtgaaaaggtgtatggtgttgctcctgctacaaggtctccaatggctttaatggggtcatctagaaatgaaaaccaagaagtgaataccagcatgagaactgccgagaccatgctgcggttggtgcctatggctttaggggttgctgcacttgttgtcatgctcaaaaactcacagtccaatgactttggctccgtttcatactcagatcttggtgctttcaggtacttggtgcatgctaatggtatttgtgcaggctattcccttctttcagctattatagcagctgtgcctagtccttctactatgcctagagcttggacttctttctactcgatcagattctaacata

SEQ ID NO: 44111 - DNA, 350 bp, Gossypium hirsutum
  Clone ID: LIB3189-017-P1-K1-D10
tatgaattccagaggcattattatttccaatgttatttttaaaaattcacctttttggaacattcaccctgtttattgcagcaatgttgttattcgatatgttaccatcctggctccgaccgactcgccgaacaccgatgggatcgatccagattcaagctccaatgtttgcatagaagactcgttcatttcaaccggagatgatcttgttgctgtaaaaagtggatgggacgaatacgggattgcttacggacgtcccagctctcacatcaccatccgacgtgtaacagggtcatccccatttgccggtatcgcagtgggaagcgaaaccttcggcggagtggagcacg

SEQ ID NO: 44112 - DNA, 284 bp, Gossypium hirsutum
  Clone ID: LIB3189-017-P1-K1-D11
aaaacatcatgcctcagggaaagcttcaagttgttcttgttagtgccaaaggtctcgagaacacagattttctctgtaacatggatccttacgtgcttcttacttgccgaacccaggagcagaaaagcagtgttgcatcaggaaaaggatcagaaccagaatggaacgaggatttcatattcaacatctccgaaggtgcttcggaactcgcactgaaaataatggacagggatgctggttctcaagatgatttcgtgggagaagtttctataccactggagcct

SEQ ID NO: 44113 - DNA, 316 bp, Gossypium hirsutum
  unsure (1)..(316): unsure at all n locations; Clone ID: LIB3189-017-P1-K1-D12
cccacgcgtccgctcatctgcaccagccgtctttatggggaggagacctgcaaggngttagtgcgccaaatcaagaataagccataccccaaatctcgatactgccgtggtgtcccagatcctaagatcagaatttatgatgttgggatgaagaaaaaaggcgttgatgagtttcctttctgtgtccatcttgtgagttgggagaaggagaacgtctcaagttaggcattggaagttgtccgtattgactgcatcaatgacatgtgcaagtttgcagtgtaggatgctttccatttgagagtgcgggtttatccct

SEQ ID NO: 44114 - DNA, 298 bp, Gossypium hirsutum
  Clone ID: LIB3189-017-P1-K1-D3
ttttcctccaacaggagttatgattcggctgtttaaagtaaaggaaaagcagagagaacttgctgaaaatgcaaatgggggagctcctaccaaaaagcaaagtccaggagagtagcgtttgcacaaagatatttctgagcttaaactacccaaatcttgggctataacaattccaaatggaaaggataacctgatgaattctgaggtttcaactcgacccgatgaaggatattatttctgcggcacaattttattctccctttaagtgtgtcccggctatcccgatgaggcacccaaa

SEQ ID NO: 44115 - DNA, 413 bp, Gossypium hirsutum
  Clone ID: LIB3189-017-P1-K1-D4
ctcccatttcttctcatctccgtcgtgcgccctatattccccaaataaaagtttgtttttcttcagctgaaatcccccaaatttcccatttccaacaacagacttgaaggaagaaaaccagaagatgggatggaatcacccagacatatcgctggaagaactgatgaaactgatagaagggtttgttgatatcctggttttttgttttgttttacttttttaattttatttacttttgggactttttaaggaatgacaagtaaaaaagatattggcgatttcgacaaacccatatcagagactagggtctcaagggaagaatgtggttcaaatgggagaaatctaaataagaagagaagtattgcacagtttcatttaaaggtaggtcaatcttgttttcttttcatgccttt

SEQ ID NO: 44116 - DNA, 298 bp, Gossypium hirsutum
  Clone ID: LIB3189-017-P1-K1-D5
attttctcaaacattcttcaatcttttcatctcttctttgacccgatcgatctatcttcttgctccgttccctctttcaagaactggctaacacacaggaaccacttgtggaggaaactaacaagaaccaagaggtggttcttgccctctatgaggccttaaacactcgagacgtctaaactgttcacaaaatccttgcccctgaccttgaatggtggttccacggtcccccgactcaccagttcttgatgcgccttgtcaccggtgcttcatcctacgattctttccgtttcgaggt

SEQ ID NO: 44117 - DNA, 438 bp, Gossypium hirsutum
  Clone ID: LIB3189-017-P1-K1-D6
ctcttttcttctcttgagacactgctaatattttttttattgtcgtctccggcgttcgaagatcataaaaaaccggagtcgtttcaaatggctacgagaacggatctagatgggaggccaataaagccgatgacgatatgcatgatcggtgccggaggcttcatcggctcccacctttgcgagaaattgatgtcggagacgccgcacaaggtgctcgccttggacgtttacaatgacaagatcaagcacctcctcgagcctgactctctcccttgggctggccgtattcagttccaccgacttaacatcaagcacgattctaggctcgaaggcctcatcaagatggcagatctcgtgataatcttgctgccatctgtactccggcagattataatacgcgttcactagacacgatttacagcaattttattgatgcac

SEQ ID NO: 44118 - DNA, 313 bp, Gossypium hirsutum
  Clone ID: LIB3189-017-P1-K1-D8
aatagttgtgtttttccacatttaaatacatattatcagagcccctaattcaattaaacatcatttttctttccccagtttttcaatttcaggggctctgattgggagctgttacaatgtatcgacctgtggctacagctgcagccacgggtggagtcccaactgacaatggggactatgttgtgacttttgatcaagtcccacggtggtacgatgcatatatctggtctctcttggagtatgagaattaagatccttcatttttaaaaaccttttttttcgtccccttttattctcatgtgatagtttttgt

SEQ ID NO: 44119 - DNA, 213 bp, Gossypium hirsutum
  Clone ID: LIB3189-017-P1-K1-D9
aaaaatttcaaatatttttcttcctttcgatttatcgcttaaagagagaatttcaatttttcatcaaaaaatggcttcctccatggaattttttttgcttgttttcgtctctgattttgctctaatggcttctgccatggctgctgaagctccagctccaagttctacctcaggaaccggctctatcacttcctcattcagttcttgtttcgc

SEQ ID NO: 44120 - DNA, 370 bp, Gossypium hirsutum
  Clone ID: LIB3189-017-P1-K1-E10
gaattgcctgatggacaagtaattactatctgtttctgagagattccgttgtccagaagtgctgttccagccatctctcattggaatggaagctgctggaatccatgaaactacctacaactctatcatgaagtgtgatgtggatatcaggaaggatctctacggtaacattgtgctcagtggtggttcaaccatgttccctggtattgcagaccgcatgagcatggagatcactgctcttgccccaagcagcatgaagatcaaggttgttgctccaccagagagatagtacagttgcctggatcggaggatctattttggtttactttatctcccttttattatttgttggatttcctagtggtgagtt

SEQ ID NO: 44121 - DNA, 350 bp, Gossypium hirsutum
  unsure (1)..(350): unsure at all n locations; Clone ID: LIB3189-017-P1-K1-E11
aagaaagatgatggaaaggggttttattgtttctgtcttgacggaggntttcgccgcgacggtggttacggcggctgacgagagtgggttagcgaatgagtgcagcaaagattttcagagcgtgatgacttgcttaagctttgctcaaggaaaagcagcgtcgccgtcgaaggagtgttgttattcaaaggcgtgtgtataaagtgtttttacccaaatgtttttgatatatttttcaacaaacacaatacttcttctgctatattttcaaattcttttgtcttcaattagatttagctgctttattttccgccaatttttctattgcatactatttttttaaaaatttt

SEQ ID NO: 44122 - DNA, 297 bp, Gossypium hirsutum
  unsure (1)..(297): unsure at all n locations; Clone ID: LIB3189-017-P1-K1-E5
aaaagagaaaaaaacaaagncaggaccccagagctgttcgaanccaccaacanngganncngcaaggggagcnggncacgnngagaagcgngccggncncaacacttatgtttctgggtctcttcaatctaagcttgctgaaattcttatctctgatattttcggatatgaggctccaaactttagaaaactcgcggacaaggttgcagcctctgggttctatagaggtggctcctgacttcttttatggagaacctctatgaccacaataaccctgatagacctttatctggaagg

SEQ ID NO: 44123 - DNA, 303 bp, Gossypium hirsutum
  Clone ID: LIB3189-017-P1-K1-E6
ggcaacggtctctgattcaccagaagatagtccatttcctaatccaccaccatcgccgcccagcgatttcccttctaaaagcgaatcgaatgctcccgaacaagtcactccatggatcgattccgctgtggagcaagctcttctataccagaagatcatcgaacagaacgttaacgacgctatcaaagcttctagatctcgactttcagaaattcgctccacctcctcagctcattttaatctaaccattgagtcacttaaagatgtcaaatcacaacttgatgtctacgtggatttggcatt

SEQ ID NO: 44124 - DNA, 385 bp, Gossypium hirsutum
  Clone ID: LIB3189-017-P1-K1-F11
gtcgagagagaataacagagggaaagcttaagctttggcggccgaggaggacagcggagagttttacctccgctactacgtgggccacaaagggaaattcgggcacgagtttttggagttcgagttcaggccagatgggaagctccgatacgctaacaactccaactacaaaaacgacaccatgatccgcatagaggtcttcctcactccttccgttcttaaggaatgccgccgcatcatcgccgacagcgagataatgaaggaagatgataacaattggccagaaccagaccgtgttgggcggcaagagcttgagatagtgatggggaatgagcacatctcttttacaacttcaaagattgtgtcccttgttgatgttcagagc

SEQ ID NO: 44125 - DNA, 351 bp, Gossypium hirsutum
  unsure (1)..(351): unsure at all n locations; Clone ID: LIB3189-017-P1-K1-F12
gtctgtttggaggattttaatcttactgagtgcttcttttgcagntaggtgcatggaaaagagagatggcggcagttcccggacagttgatttgggaggtagtgaagaagaacaattgctttttggtgaggcagtttggaagaggaactgctagccttcagttcatcatagagcccaacaatctctacaaccttcactcctacaaacactctgggttggcatacaagaaaacatgtcaccattcaaagtgggggcaaagaccattctgtgcttcttgcaaccaccaagactaagaagcagtacaagccttctgccttgcttcacgagtcctttatgaaaaaggtgttcccc

SEQ ID NO: 44126 - DNA, 377 bp, Gossypium hirsutum
  Clone ID: LIB3189-017-P1-K1-F4
cggacgcgtgggcaaaaaagcaacaaatattttccctttgattccctgccaaaaaggtaacgctcacacagtttcaggaaatggatcttgacgacgacggaggcacctctgatcttagcaccagtgctggagaacctaacgctgccaccgataaaatttgtgaaagctcagcgtttcagattaagccatttaaagaagagccaatagattcccaccctccgccgcctatcggggtggtccctgtttccatgcggcctctacccactgttaaacgctcctccaccaaggaccgtcataccaaagtcgagggccgcggtcgaagaattcgtatacccgccacttccggcgccaggatctttcagctgactcatgaactc

SEQ ID NO: 44127 - DNA, 272 bp, Gossypium hirsutum
  Clone ID: LIB3189-017-P1-K1-F5
caaacgcgagatttgtagatttatttcccttgtctatttgcctccgaatcaatggctttgccgaaccagcaaactgttgattatccgagcttcaagctcgttatcgtcggtgatggaggaactggaaaaactaccttcgagaagaggcatctaactggagagtttgaaaagaaatacgagccaaccattggtgtggagggtcattccttgaacttcgtcactaactgtggcaaataccgctgctactgctgggatactgctggacaggagaa

SEQ ID NO: 44128 - DNA, 320 bp, Gossypium hirsutum
  Clone ID: LIB3189-017-P1-K1-F6
gattcctatcgacaatggccgccgccgccacttctttaccccgcgaggaaaatgtctacatggcgaaactcgccgagcaagccgaacgctacaaggaaatggctgacatcatggagaaaggctctggctcacgcgacaacgaggagctcaccgccgaggaaaggaacctcctctccgtcgcttacaagaatgttatcggtgctcgccgtgcttcctggcgcatcatctcctccattgagcagaaagaggagagccgttgttacaatgaccacgtcgctactatccgttgttaccgggccatgatcgagtcctagcttact

SEQ ID NO: 44129 - DNA, 378 bp, Gossypium hirsutum
  unsure (1)..(378): unsure at all n locations; Clone ID: LIB3189-017-P1-K1-G10
aaaagaaataactaagaagcatcaatactcaatttcgacggtggatatcgagaggaagcaagcggcatcggcggaagagatatgcaccgccaagagcggcgccaagcaaggggaagggctccggcaatactatatccaacacatccacgagcttcagctcaacctccgccaaaaaacccacaatctcaaccgtcttgaagcccaacgcaacgagctcaattcccgagtgagaatgcttagagaggaactgcagctgcttcaggaacctggancctatgttggtgaggttgtgaaagttatgggtaaaaacaagggcttagtcaagggtcattcagaaggaaaatatgttgtcgatattgataagaatattgatatcac

SEQ ID NO: 44130 - DNA, 387 bp, Gossypium hirsutum
  Clone ID: LIB3189-017-P1-K1-G11
caggagttgagagcggatattgggttgtttgtgtgtaggattgacaagattccccatcagttgttaggttcggtatctagggagctgtttgatattttgagtaaagttagaagtttgggtgaagagggtccaaattcgatggagttgctttctgacaagccttattcagatgacctgttgtttggggagaatgttttagctcactggtgtgatcaccatgatcggatatacggtgatggcaaggatgcattattgattgaagatgttgaagacagttttggaaggactcttgtgatagttgtttttgtcaccctattcctccaatatttattttatcaatttatttttttatcattcatttttaataacttttttttttaattattt

SEQ ID NO: 44131 - DNA, 333 bp, Gossypium hirsutum
  Clone ID: LIB3189-017-P1-K1-G12
agatctcactcatcaatcgttttgccattttcctatgacggggacaagctgacagggctgtgaccttatcgtaccttgaagcaattgctagccctcccaaatttttcatccagagatatgtttctgcagtaccgatgcctaggaatgttcctgataaggtacaatgtcttccactttgatgattagctaattgggtttttccggttcaagagttgactggatactggctgacttataagtgaaatcttctgaagatttctcagctgcaaattacttataatgtgtggtaaatatagattgtcagctttaggattatttttctctatatttttt

SEQ ID NO: 44132 - DNA, 237 bp, Gossypium hirsutum
  unsure (1)..(237): unsure at all n locations; Clone ID: LIB3189-017-P1-K1-G5
ggcacttgcacatgagttagcacgatccccccnntcttttgaagcccgttcgacagcgcagtcagcgcgagcttcgaaagggaatcgggttaaaattccagaaccgtgacgcggaggctgacgacaacattagggagtccggagacgtcagcaggggcccaaataagaggacatataacacacaatctttctatccataagtggaaacggcagaaacggtagttggctactgagaac

SEQ ID NO: 44133 - DNA, 246 bp, Gossypium hirsutum
  Clone ID: LIB3189-017-P1-K1-H4
ggatcatccaaatttaaacccgaacttaatatcaaccaaaacctcaaatcaaaggaagccttttgacacagaatcaatgacttggttcgaattgtctaatccagttttctacgattcctcgatttttgtactcaatacaagactagacaaacctttagttagtggtccaattgaccagatttttgccctcttggacaattagcccaagtttactcaaagcatgcaatgtgttctcttatgttatca

SEQ ID NO: 44134 - DNA, 482 bp, Gossypium hirsutum
  Clone ID: LIB3189-018-P1-K1-E11
cccacgcgtccgaaatcactgctacgctctctaactccaagtccgacgccccaattcggtccccgaaatacccacacacactatctactcgtcatgcaaacgctactgctcccggctactcgctccggtatatgtgcggtggcggcgggtcccctccgaccaccgctcactctctctcctccaaattttctcacttcaatcaaaactcggaaaccaaaacctccgttgtcccctttcgcatcctacgaccctcttaatgttctaagatctacgcttttttcgcccaaagtctcttcgtcctcagtttcacccagatttaccttctttaatgatgatactgacaaggcgaagcttgcttaggttttgaagaggctagagaacacgttgaggtactttaagcgattgtgcaatttatggtattggggacagttagcgtgcactttggttcagcggtgatactctaattatctgaggttttactg

SEQ ID NO: 44135 - DNA, 265 bp, Gossypium hirsutum
  Clone ID: LIB3189-021-P1-K1-A10
aattttcgtacctctactaattcccatgtttttttcttattgcaaaacataaaatatatttgtggtcttttatgaaaataacggagcacttatacatttattttaaataacgccagattagttacgtctaggtaaaaataacggaccaccgcccattccgattaaagttctaccacatgctattatgttgccgtcagtccatgaacatcctttcgctataggcctatgctcaatgccacctcacccattttaactggatgaacta

SEQ ID NO: 44136 - DNA, 133 bp, Gossypium hirsutum
  Clone ID: LIB3189-021-P1-K1-A11
ctctgaccttacaagggtattggtgattttcttgcgaacaatcaaggatgaaggatttagttctttgtggagagggaacactgccaaccttattcgtgattaccctactcaggcctcgaactttgccttcaag

SEQ ID NO: 44137 - DNA, 421 bp, Gossypium hirsutum
  Clone ID: LIB3189-021-P1-K1-A12
aacactagtagaaggtttagttttacaaacatggctagttccggtgtccttaagttggtttccatgattctcatggtgtgcatgacgatgatgagtgcacccaaggcagccaaagccgccatcacgtgcagcgacgtggtgaaccacttgatcccgtgcttgtcctacgtacaaaacggcggtacacccgctgctgcatgctgcagtggggtaaaagcactctacggcgaggttcagacctccccggaccgccaaaacgtgtgcaagtgcatcaaatcggcggtgaacgggaattccgtacaccagcaataacctcaatctcgcagccggcctacctgctaaatgtggtctccaactcccttacagcatcagccccttcactgactgcaacaaggtgcagtgaggttgatgatgatgatat

SEQ ID NO: 44138 - DNA, 86 bp, Gossypium hirsutum
  unsure (1)..(86): unsure at all n locations; Clone ID: LIB3189-021-P1-K1-A2
cccgtccaaaaaaaaatggcagcttccaacgttaccatttnatcagcctgctaaatttagccccttccttttttctttcgtagtaa

SEQ ID NO: 44139 - DNA, 420 bp, Gossypium hirsutum
  Clone ID: LIB3189-021-P1-K1-A4
cccacgcgtccgcccacgcgtccgggcggcttctgcttctatttacaatcttctcactctcctgctcctttctggcatcccttttaccttctccgagctcgttaaagagcagcctctggtgttgaaataccacaatgggccactcttgaaggggaagatcactgttaatctcatttggtacgggaagttctccccaacccaacgctccataatcgtcgatttcatcaactctttgagctccgccgtcaaacccaaggttccgtcggcgtcgttttggtggaaaacgacggagaaatacaagtccgggttcttcactttggtcgtgggcaaacaaattcttcttgtaaattacccgctcggtaaaatccttaagtacccacacttgccggcggtggccggggaatttaacggcgttggttc

SEQ ID NO: 44140 - DNA, 451 bp, Gossypium hirsutum
  Clone ID: LIB3189-021-P1-K1-A6
aataaaaatagaagatctgttttgacatgaaatggttatatccatatatctctgacttatctttatgaaatgataaaatatggcaaaacctataccaaaagttggttcacgtaggaatgggcgcagtagtgcacggaaaagtgcacgtagaataccaaagggagttattcatgttcaagcaagtttcaacaataccattgttactgttacagatgtacggggtcgggtaatctcttggtcctccgccggcacttgtggattcaagggtacaagaagggggaccccttttgctgctcaaaccgcagcgggaaatgctattcgagcagtagtagaccaaggtatgcaacgagcggaagttatgataaagggtcctggtctcggaagagatgcagcattacgagctattcgtagaaagggtatactattaagtttcgtacgggatgtaacccct

SEQ ID NO: 44141 - DNA, 379 bp, Gossypium hirsutum
  Clone ID: LIB3189-021-P1-K1-A7
gtcgtatctctccttctaaaaccctacttatctcctcctcgcaaaaccctagccccttccttttttctttcgtagtaatcatccatggagttctggggtattgaagttaagtctgggcagcctattaaagcagatcctggtgctaactacgttatccattttttcccaggcttcacttggagagtccaagaacaaagcagaatccgttccactctatgtgaatgttgatggaaagaaacttattctgggaaccctttcccaccagatttgccctcaattatcttttgatttagtatttgatgaagagtttactggaacatgttgaaagctttactttattagttcaaaagcttcttcgacatgatccactctctttctt

SEQ ID NO: 44142 - DNA, 373 bp, Gossypium hirsutum
  unsure (1)..(373): unsure at all n locations; Clone ID: LIB3189-021-P1-K1-A8
gaaaatcctgcacccgctcctgacgctctacggtttaaagagcaggccataacaaatctatctgatcttcttagacaagagaaccgagcagaggagctcagaagccttctgacccaactgaggcccttttttgcactaattccaaaggcaaaaactgctaaaattgtccgtggtataattgatgatgtagcttaagataccaggaacatcagatctccagatttctctttgcaaagaagtggtgcattggactctggctgataaatgaattttttttttttaaaataaataaagaaaaggggggggggggggggtggggggatatacaaaaaanccaaaaaaaggatatgtattgttaggttttttggtatat

SEQ ID NO: 44143 - DNA, 447 bp, Gossypium hirsutum
  Clone ID: LIB3189-021-P1-K1-A9
aattttcttccgtctccaaatagccagctagtgtttgtattgcaaaatttcaattagaattttgttttctcattaattttcccgaacacttttacattgattttaaagaacgatagtttagttatgtctggaagaaatcgtgggccaccgcccattccgatgaaagggccacctcatgctggattgctgccgccggtgcatgaacatccttatgctagaggcctaggaccaatgccaccacacccagctttactggatgaaataagagaaccccaatttgtgttgggtcctagagggtttcctcctcatccagctatcattgaggagcgtcttggagttcaactgcaagaaattcaagccctcctggcggataatcaaaggctggcagcgactcatgttgcgttaaagcaggaattggaggctgctcagcatgaattaaaacagatg

SEQ ID NO: 44144 - DNA, 182 bp, Gossypium hirsutum
  Clone ID: LIB3189-021-P1-K1-B1
cggacgcgtgggtgtttaacggcctgcccacccttgaatcggctcagccggaggtagggtccagcggccggaagagcaccgcacggcgcgtggttcccagtgcgcccccggaaagactgcaactcggaggaccgagagctgtcgcgcccggtcgtactataaccagtatatgtctcccaagg

SEQ ID NO: 44145 - DNA, 98 bp, Gossypium hirsutum
  unsure (1)..(98): unsure at all n locations; Clone ID: LIB3189-021-P1-K1-B11
gtcctttttccatttcatgtgatcaacacnctggataaaaagatggtagcagagtcttggtttcgtagtttttggaaagggcgagggacctcatgaag

SEQ ID NO: 44146 - DNA, 270 bp, Gossypium hirsutum
  Clone ID: LIB3189-021-P1-K1-B12
cggacgcgtgggcggacgcgtggatcaactttggccttgcaagcggactcccaggcaagtgcggtgtcaacatcccttacaagatcagccctagcactgactgcaacagcgtcaagtgaagttttggcatggaaagttcaccagctagtggaagccaaaataacgatagctacagaataaatatggatgttaaaattccagagttatgcgttgtgtactatgccgctttatgcgactacgtaatataatctttatctacaaattagtatc

SEQ ID NO: 44147 - DNA, 278 bp, Gossypium hirsutum
  Clone ID: LIB3189-021-P1-K1-B2
agcttttctccgtgtcttgcttgtaacttttcttcttattattttctttaaataaaacccattgtcaagactcaacctgtgttcaaatttccaagctgcaagcttgaaaagattgacactttcatggttcaaagcttgtagcttcctctcattctttgacaaagcccttgctaacctttttcttcttttctcttgatctatcaaggacgggaaaaaaatgtttggtcccaaagtaaaagagaccttgctttggaattggcagcacaatttccaatttt

SEQ ID NO: 44148 - DNA, 236 bp, Gossypium hirsutum
  Clone ID: LIB3189-021-P1-K1-B4
ctcatatctctaattgaaggcttagttttacaaatcatgtttagtgtcacggagtcacttgaggtagtttcacatagatatagatgctgcacgaacagaatttgaggagtctgttgcgcaggcattctttgatatggcgaatgacgtggtgaaccacttgatcccgtgcttgtcctacgtacaaaacggttgttgaccagattgatgatgctgtaatggggtaaaagcactctacg

SEQ ID NO: 44149 - DNA, 74 bp, Gossypium hirsutum
  unsure (1)..(74): unsure at all n locations; Clone ID: LIB3189-021-P1-K1-B5
cgccgtttagatttttaattacggaagctnggattttgatgnncaaaaaaatgggccctaagagagggggaaag

SEQ ID NO: 44150 - DNA, 55 bp, Gossypium hirsutum
  Clone ID: LIB3189-021-P1-K1-B6
cggactcgtgtcttagaaggcatcttaataatctctttttattttcacctacccc

SEQ ID NO: 44151 - DNA, 353 bp, Gossypium hirsutum
  Clone ID: LIB3189-021-P1-K1-B7
agcttttctccgtgtcttgcttgtaactcatcctcttattattttctttaaataaaacccattttcaagactcagcctttgttcaaatttccaagctgcaagcttgaaaagattgacactttcatggttcaaagcttgtagctccctctcattctttgacaaagcccttgttaacctttttcttcttttctcttgatctatcaaggacgggaaaaaaatgtttggtacccaaagtaaaagagaccttgctttggaattgcaagcacaatttccaattttaaggccaagcatccatgccaggaggagctaatcttacagtgaaattccaagacctttatgggtttactgttgaa

SEQ ID NO: 44152 - DNA, 281 bp, Gossypium hirsutum
  Clone ID: LIB3189-021-P1-K1-B8
gtgtatcttaatcggcgttcgttagtatctgtcttgtgatgcttggtgtattgtgcacacgacctcccaagccttggatcctcaactccctatctctgatcgcccacggtggttcagcggctcaccatcacgaaaatcgtttattgcactggccttcacatttcgccgatttatctgccgataatcggcgctgccggcaccattcaacggcttgtcggcttggtggcggctcagagggtggtgcaacttctatatggcatgcgaatttgccatgcttagga

SEQ ID NO: 44153 - DNA, 409 bp, Gossypium hirsutum
  Clone ID: LIB3189-021-P1-K1-B9
ctttttccctctttcgtgatcttcgatcttcgttctttttcccttttgggtttaccatataatcttcgcaattgaatcaaagtgagaaaacagttatcgagcggcgtcgtaatggaggcacacggcgccggactccggcgagttttggtgttggcattttgcgttgccgggatttggtctgcctatatttaccaaggctttcttcaggaaactctgtccaccaagcgatttggttccgacgggaagaggtttgagcatcttgcatttcttaacttggcgcaaaatgtggtctgcttagtttggtcttacataatgataaagctttggtccagtagaagcaatggtggtgctcccttgtggacttattggagtgctggaatcacaaatacaattggtccggccatgggta

SEQ ID NO: 44154 - DNA, 324 bp, Gossypium hirsutum
  Clone ID: LIB3189-021-P1-K1-C1
catgaatgaccttgtttctgaatatcaacaataccaggatgcaacagctgaggatgaacttgaatacgaggatgaagacgaggaagctgttcatgagatgtaaaggtggtatgctacttgatactatgtcatgtggtaatgcctcgttatactagagagcgaagtttggcgattatgtgctgttttgtgtagtttaatatatgtgaaaagcttgtgtgtattactcgttatgtttgcattccagccttgttccattggtttacaataatgaaaattagtagtattggcttaaaaaaaaaaaaaaaaaaaaaaaaatataataag

SEQ ID NO: 44155 - DNA, 299 bp, Gossypium hirsutum
  unsure (1)..(299): unsure at all n locations; Clone ID: LIB3189-021-P1-K1-C11
gtcgtcccaagggctcaaagcagatggnttacattgaaagaacacctttgatggttgctgctacatatggtagcatcgatggtattaaacttatcctatctttattcgatgctgatattaatcgtgtgtgcggccatgacaaaagcactgcactccactgtgctgcctctggtggggcttcaaatgctgttgatgttgtgaagctgttattagcatcttggtgccgatgccaatattgttgatgcatatgttcatttttctctatagttaggtttcttcttttttattcttaactcttt

SEQ ID NO: 44156 - DNA, 436 bp, Gossypium hirsutum
  Clone ID: LIB3189-021-P1-K1-C12
ctttgttattatcgccctaagcactttccccagttcccacgagtcatggaagctcttcaagcctcatctcttcgagcttcccctctaaaacctctccaaaaacccaaactcaatatccatttccccaatgcatcgagactcgttcccaggccaaccaagaaattctcttccatcaccgcttcatcccccaccgtatctgctcccaagcgcgagaaggaccccaaaaaacgggtcgttattacgggtatgggattggtttccgtttttgggaatgatgtcgatgcttattacgataagttgctggctggggaaagcgggatcggactcatcgaccggttcgatgcttccaagtttcctacccggttcgccggtcagatccggggtttctcttctcagggttacattgacggaaagaacgataggcgacttgacgatt

SEQ ID NO: 44157 - DNA, 250 bp, Gossypium hirsutum
  Clone ID: LIB3189-021-P1-K1-C2
atttctggcatgcagcttccgccgcagggaaaatatttatggaggcagcgagaactgtgaaagacgtttctccccacgagttcgcgaagggctacgccgcccacctgaaacactgcggcaagattgagcttcctccatggaccgatattgtcaagggtggtaaattgaaggagcttccaccgttcgaccctgattggtactatattatagctgctatcatggcaagggaaatctacttgtggggaggtct

SEQ ID NO: 44158 - DNA, 197 bp, Gossypium hirsutum
  Clone ID: LIB3189-021-P1-K1-C3
gagactgagttcatttagtgggcctacggtaatttttggttctcgactctccaccgcttatcacgaaatgcttatctttaatgcccggcctcacttgttgtcttgttgctccactgtgcacggtttccatatcttttctctcctccattccccaataatttttctccctttctaatggttttcgttttccctatttt

SEQ ID NO: 44159 - DNA, 114 bp, Gossypium hirsutum
  Clone ID: LIB3189-021-P1-K1-C4
ctaaggtgtctgacactgttgtcgaaccttacaatgcttctctctctgttcaccagcttgctgagactgcgtttaaatgtatggttggggacaaccaatctttttatgatattt

SEQ ID NO: 44160 - DNA, 188 bp, Gossypium hirsutum
  Clone ID: LIB3189-021-P1-K1-C5
cttctctgtcatctccatcaagatttctaagagctaagtctgctggagaagaagctgatttgtgagagcgtttcttaggctactgggatggaacctgctgtaatgattggtaccgaggatcttattattatattgatggctcatattgcaaagaaatatttgttttttctactaattggttattggct

SEQ ID NO: 44161 - DNA, 181 bp, Gossypium hirsutum
  Clone ID: LIB3189-021-P1-K1-C6
cccacgcgtcatggcttcctaccaaaactagcatatatgtactttgtaatgaacacctttgatggtctccatgcacaaatcatgccatagaggacttgaacctaatcccatcttcatccaccaatgagatagagacagcatccagacagcacgaaagcgagaccttctattctcagacctc

SEQ ID NO: 44162 - DNA, 192 bp, Gossypium hirsutum
  Clone ID: LIB3189-021-P1-K1-C7
tgacaatattattatctcacatagtgtatttattttttctacccatgaaactggcactggtgtccaattcatgaaaaatgggcggatcttcctttaaaggctttgttatcctttactgcataacatacctaactatcaccaatcgttcaccattaatgtatacaagaattattaccctacttaacttacttc

SEQ ID NO: 44163 - DNA, 447 bp, Gossypium hirsutum
  Clone ID: LIB3189-021-P1-K1-D1
gccatttccaatggagaactcgttcacattggttacgattttcggtctgctgtttactttaggcaatgtaggtcctcaagctgaggccgcgagggcgtttttcgtgttcggagattcattagtcgataacggtaacaacaactatctagctaccacggctcgtgctgatgcttacccttacggtatcgactatcctactcatagagctactggccggttctctaatggccttaacatcccagatcttataagtgagcaaattggctctgaaccaacattgccatatctgagcccggagctaaacggacaaaggcttcttattggtgccaactttgcttcagctggaatcggcattctcaacgacaccggagtccaattcgtcaatataattagaatcggcgagcaatcacagtacttcaggcaatatcagcaacgagtgagtgcact

SEQ ID NO: 44164 - DNA, 127 bp, Gossypium hirsutum
  Clone ID: LIB3189-021-P1-K1-D10
atcctttcatcaccactgaatacatgacgtactttgttaagtacgacagggttcacgggcaatggaagcatcatgagctgggggggaacgactcaaagacccttctctttggtgaaaagcctgtcac

SEQ ID NO: 44165 - DNA, 399 bp, Gossypium hirsutum
  Clone ID: LIB3189-021-P1-K1-D11
gtttaaagaatttggttgaggaaaaggactagttttttaaagagctgcaggaaaatattgctgctgttagttttactcctcaaagcaaaatgggaaagatgctgatggcaaagtgtagaacattgcaagaggaaaatgaggagattggtactcaagcagaggaaggaaagatgcatgaattggccatgaaacttgccttacaaaaatctcaaaatgcagaacttagaagccagtttgaagcattatacaaacaaatggaagggctgacaaatgatgcggaaagatcaaatgaaatggtgtttatcttgcattagttaaattaatttttttctgtataataaattttctattatatttttttatatgtacttaatattaattcttttgattttttttttt

SEQ ID NO: 44166 - DNA, 399 bp, Gossypium hirsutum
  Clone ID: LIB3189-021-P1-K1-D12
attgatcttggtatcaagtatgacccttctactggtatctatggtatggacttctatgttgttctcgaacgagctgggtaccgtgtgggtcgtcgtcgcaggtgcaagtcacgtgtcggtattcagcaccgagtcaccaaggaggattccatgaagtggttccaagtcaaatatgaaggtgttatccttaacaagtctcaaaatatcggggcataggaatagccaggtaaacaagatcaatcgagttgtttttaagatttttgctacttgatattggttttaagtttgtgtatcagttgtagtttggctgaagagatttgtgaaatgctaaagtaattttgctgttggattaaatggcttcatttaatatagcacttggaaaacacaatgtcttttctt

SEQ ID NO: 44167 - DNA, 135 bp, Gossypium hirsutum
  Clone ID: LIB3189-021-P1-K1-D2
cccacgcgtccgcggacgcgtgggcacaacttaatattttaactttggtgagtagaagtttagtggtacccatatcttttgtaagggggaaaacatatctctctcttgtaattttgcttacggtttgtttttttt

SEQ ID NO: 44168 - DNA, 437 bp, Gossypium hirsutum
  Clone ID: LIB3189-021-P1-K1-D4
ctttgctgttgaagtagtaatatctatagcatacatagatggagaggcaaagaagcaagcaggtttgtttgttgatgtgggttttgggggctacctttttctcccacaatagggtcattgcacatgacctccactcaccttgatgagcataaaaactactatccatctcctgaccctcacgcgttaactccccacccatgttcactattcacaccaccatcttcatgaagcggatcaccttcccctcatggaacctcgtcttatgtaattgtgaaccatccttatcctaattaccaaaagctatctagctagattaatttctattttcttaacttctccctttaacttcctttacacctattacattattcttactttcataacatcctatcttcttatagtacttatatccctacatttatcatataacatctctt

SEQ ID NO: 44169 - DNA, 209 bp, Gossypium hirsutum
  Clone ID: LIB3189-021-P1-K1-D5
gggagaatgcctgttatgtgctccagtttgttgctgaagttggaggaatttcttattacagatgagcagttgatcaaggaggaacctgtaggaaagatttagccttcccttttctcggagtcattgtcaatgtgctctttgttatttacttattgtgtttattttttgttctccttatttccattactttaatcttattatttgtagtt

SEQ ID NO: 44170 - DNA, 173 bp, Gossypium hirsutum
  Clone ID: LIB3189-021-P1-K1-D7
tctctctctcactctttctctctcctctttttctttatctcattagatccattcaaagggcatcaaatcatcagaggaagaaggggagcaaattttcataaatggcagcaacattaggagactcaatctcctggtacaccgctcttgctaagactgtaccttatactttcttc

SEQ ID NO: 44171 - DNA, 233 bp, Gossypium hirsutum
  Clone ID: LIB3189-021-P1-K1-D8
ggaagggaggaaaagaaatttaaaggaatttaaaatatcattgcaatttcctcctccttctctctgtccctgcaacaatcgttcgacgatctataaaccttctctcctcaggattttagggtttttttcattttctactgttaactccaaaatgcataaactgggcattggtcatcggtactaagttcatcattttattactatatctggagcgagtgtaatacttgctcttt

SEQ ID NO: 44172 - DNA, 457 bp, Gossypium hirsutum
  Clone ID: LIB3189-021-P1-K1-E1
aaggaaagaaaaaaatgaagctcttgtttctaactttgctgctttgttctcttcttctatgttcttcagtttttgcaccaacaatggctcagcctcgttcacctttttgtgaagggaaatgcaaagggaggtgcaataaagcggcggtttgggatcggtgcttcaaatattgcggcatatgttgcgaggagtgtcaatgcgttccgtccggtacttacgggaacaaacacgagtgtccttgctacagagataaggtgaacaacaagggcaaacccaaatgcccttgaaaatgaaatatattcgagttcgggatttaatcaagcttaaagatcgaggacgaagaggccatatatatatatatatgcatgttgatgatgatgttattataaaaataaacttgttttgttgcttgtattttcccttgggtttttgtgttggtagtgttgaataatatttt

SEQ ID NO: 44173 - DNA, 180 bp, Gossypium hirsutum
  Clone ID: LIB3189-021-P1-K1-E11
gtggatgttactgagttccaaaccatctttttgtcatacccccgtatacatttcatgctctctggatatgcacctgtcatctcagctgagaaagcataccatgaacaattgtcggttcccgagatcacaaatgctgtgtttgagccttcaagcatgatggcaaaatgtgtccctaggctt

SEQ ID NO: 44174 - DNA, 428 bp, Gossypium hirsutum
  Clone ID: LIB3189-021-P1-K1-E12
cggacgcgtgggctttgttgcaagtcgttctgtttggaatttctttgcttttgatatgcctctgctttatgtgcatgatgaaaagttcaaccaaccaatatttcattgcaataacatctctggtcaagtggagcctgtggtccctgaaaatgagcatagggctctctactccactcattcattcaagattttgttcaaagaaggtggatgcggaacctttgttccacttttcttgaacttgattgcttcagtgagacgatataatcaacaagtaaatcatgaaccacagcctcgtgtggatcctttacaagcagcacaaactccagtcgatgaaatgatgcgacatgcatatgttgatcctaatgatccaacaaaaaatcttcttacaagcatccaactacggagtcttaagttaaggcgacgtacgt

SEQ ID NO: 44175 - DNA, 451 bp, Gossypium hirsutum
  unsure (1)..(451): unsure at all n locations; Clone ID: LIB3189-021-P1-K1-E3
cccacgcgttcgtccacgcgttcgcccacgcgtctgttatancatcttaccaccttctgtggaaatcgttgataatacacagcatgtagccagcctaaccgaaccaattgatttgtgtattggattacaaatcgagagaaatagaggatacggtataaaaacgccaaagaactttcacgacggaagttatcctatagatgctgtattcatgcctgttcgaaatgcgaatcatagtattcattgttatgggaatgattatgaataacaggagatactttttctagaattatggacaaatggtaatgtttaattggtagttgttctttattaattattcttttaatatttggttttttatatttttatttgttttataatttattaaatcattatatgttatattggtgaatctaatttatttatggtgggttattcgatttctttgatattt

SEQ ID NO: 44176 - DNA, 364 bp, Gossypium hirsutum
  Clone ID: LIB3189-021-P1-K1-E4
cattctatagaagtcattttcactgattaccctgtataatctatgtctattgggaggactctttctactgaatgtcacccgctagatgcggtgtgcatcgtcgtcacaggtgcaagtcacgtgtctgtattcaacaccgagtcaccaaggaggatttcatgaagtggttccaagtcaaatatgaaggtgttatccttaacaagtctcaaaatatcggggcataagaatagccaggtaaacaagatcaatcgagttgtttttaaagatttttgctacttgatattggttttaagtttgagtatcagttgtagattggctgaagagatttgttaaaatgctaaagttatttttgctgttggattta

SEQ ID NO: 44177 - DNA, 218 bp, Gossypium hirsutum
  Clone ID: LIB3189-021-P1-K1-E5
gcaaatctggtcctttttttctgatgctggagagttagtgtattagatttaaattagtttgaagggctttcgagttctgggttttccattttggggtaacacccaggttagtcaaattgtggacatcacggctatacacagagtttaccggcctttttttattcatgcccgatctgtacgacgtaagagttgtgtgatcgagaggaaccctgctgccg

SEQ ID NO: 44178 - DNA, 236 bp, Gossypium hirsutum
  Clone ID: LIB3189-021-P1-K1-E6
accacgcgtccgaatacacagatacacttgcttctcactttagaatgttgttttttcgattcaacaccgcttatgtgttagtgtgataaaccgggagaaccaagacagactgctagatctatcaatgagacgcgatccgggatgacaagtagtcttttggaggcttcaagcatgatttgaaattgtgaccttaggcttgggaagttcatgtacttgttacttgttgtattatagga

SEQ ID NO: 44179 - DNA, 148 bp, Gossypium hirsutum
  Clone ID: LIB3189-021-P1-K1-E7
cgagaacagaaatctcgtgtggaacaaagtttttttgctcgtttgattctgatttccaggacgaattctaaccgtgaaaggggggcctatctatcctttagaccttcggaatttgaagctagaggtgtcttaaatgtttccacttttt

SEQ ID NO: 44180 - DNA, 437 bp, Gossypium hirsutum
  Clone ID: LIB3189-021-P1-K1-E9
cccacgcgtccgcccacgcgtccggctttcctatatgtccagaacctaatctggccgagctgccactttccacagactggagaaatggatcatcagaaatggagcagcatgatgtggtttctaataaagagattgaagttggccgtgccgtctctggcattcaagaaaatagtcagaattctgccggtgaaccaaaaaatgaccatgaagaaacagaggaaatgaagatggagaccaatgcagagctgcctgttcttgaagcaagatcattggaagacattgatttggcttttaagcaatttcatgaaggagttgatgttgaggaaataattcttccaagcatgattgtgaatcatcagggtgatgcatgttccaattcggatttaccagttgttgatgcgagatcttttggagatatacagagtgctttttaacat

SEQ ID NO: 44181 - DNA, 261 bp, Gossypium hirsutum
  unsure (1)..(261): unsure at all n locations; Clone ID: LIB3189-021-P1-K1-F10
ctccgtaaagatattctatcccgaaagcctcattttactttcaatgcaaccgnctactatgtgtgcattccagggccaatgggggggccaaggttttcagagatgttgagaaggctctccatgttccaattccctacacgaactggaattgcaagaattctactttgaaagctcttctggttataattttggggggatctcttatcactcttcatccttctcctgcagtttacatttcagaacggtcatccaatctagtat

SEQ ID NO: 44182 - DNA, 197 bp, Gossypium hirsutum
  Clone ID: LIB3189-021-P1-K1-F11
cccacgcgtccgcccacgcgtccggctttttcttatttttcctttttgtcccttgtttatgtggtatttccccctcatggccgccgctgatgtcgagttccggtgcttcgtcggagggctcgcatgggccaccgacgaccggaccctctaagaagccttcagtgcgattggtgaattcgtcgaactcgaatatcact

SEQ ID NO: 44183 - DNA, 431 bp, Gossypium hirsutum
  Clone ID: LIB3189-021-P1-K1-F12
cggacgcgtgggttgaaatcaagcagtttttatttcgtctcaactcaatcactattcaggataatttacaagattatggatgaaagtattgaaagaaagaaaggagatgtacctcatcgtgtcgcatgcctgttgagaaagattgtagaagagatagaatggcgagtttcaactagggcaagaaatttaaaaaatcaaaacaagctttttagggcacaggaggaaaagtatcaatcaaggataagagcacttgagaccctagcatagggaaccatggaggaaaatatggttgttctaaagaatctacaacatataaagtttgaaaagagcaaactagaggagaagggtaaagttgaagagcaggatgtgctttagcttaagaaggagaaggttcagaaagacctttagatttctggctaaaataggaacta

SEQ ID NO: 44184 - DNA, 270 bp, Gossypium hirsutum
  Clone ID: LIB3189-021-P1-K1-F2
tctaaatttccccgcataccaaaaaaccatttttttttttttgtgaaaaagatccacctcgaatttgaccagcaccaccggagacgccgtggtttgtcacgccgtcgtttccgccaatctgttcgaacattacttatataaaaaaatttacaacgataagccatgaagcgaggcttcttttttttctgtaaccgtttgtctatttggccatcgttttcatttacttttgtacggtcattttttttattttattgttagttttttaatatt

SEQ ID NO: 44185 - DNA, 259 bp, Gossypium hirsutum
  Clone ID: LIB3189-021-P1-K1-F3
aaagctcccaaggatgttgtccgtggggttcatgtatatttagcataagcagaagagaagatttgtctgaccaataaccgattggcttggctgaaatcaactgttatgctttcacaatagtgcttcatattggtcattttttcaggtttagcaatactacactaatcttttttgattatttctaaatgtttactgcttgtatttttcttgtttcctttctatcttttctgtttttcccgatttatattttttttttatt

SEQ ID NO: 44186 - DNA, 352 bp, Gossypium hirsutum
  Clone ID: LIB3189-021-P1-K1-F4
gatgagaggcccctctctgagtcccaaagagccctgtctctcgcgttgctgcttccgccgctgaagaaacaagcagaagagggttccaaaggaacaaggttttcagagatgttgagaaggctctccatgttcctattcggtacaggaactggaattgcaagatttctactttgaaagttcttctggttataattttggtgggatctctcatcactctccttcgctctcctgcagtttacatttcatatcgtgcatccaatcttgtatttcgcaggcctggttttgtagacagatggattagagacagtggtgccgtagatccatgttatttatcaatgatggatgtgaattg

SEQ ID NO: 44187 - DNA, 116 bp, Gossypium hirsutum
  unsure (1)..(116): unsure at all n locations; Clone ID: LIB3189-021-P1-K1-F5
cccacgcgttcgctccacgcgttcgcccacgcgncctanctctcggagaagattaaaggaacccatgatagtgcgattgggaactttgggatacctcaatatggtggaagcatggc

SEQ ID NO: 44188 - DNA, 348 bp, Gossypium hirsutum
  Clone ID: LIB3189-021-P1-K1-F7
cgcgagcggccgctcgcgatctagaactttcatttgattatgttacaattgaatcccgatctacgatagtgaaatgttctctttgtttaaccgttatgaatgatgtttttcttggaattagtgatgatgttttcttgtatatgatatctggaacctgggttttggaagtcttaagtaatggcaagtgagtttggggaatctgcttgccattcgccccaaaatccatcttgctctagtaacaatggtaatggtgatgctggtaactttgagtgcaatatctgctttgaaataactcatgatcccattcgtactttatgcggtcatttttattgctgtccttgtttgttc

SEQ ID NO: 44189 - DNA, 205 bp, Gossypium hirsutum
  Clone ID: LIB3189-021-P1-K1-F8
cccacgcgtccggaggatttaatgtccagttattccttctgctttattttactttgaaattgtgtgatctggagtatgcatatagtccttatgttgggactcacatccttaaaattcattgtgtagtaattgtttggtttcatttcttaaatagggaattttattattttttatattatatttcaattttatattattttttact

SEQ ID NO: 44190 - DNA, 442 bp, Gossypium hirsutum
  Clone ID: LIB3189-021-P1-K1-G1
gcccacaactacagagaagagagtaaaggggaaattatagcgtcgttgttcttgcttcttcttctacttcgctctctctctttctgcgaagttcctccttcgttcttttatttattcagtattgtaaaagatggccgacggtgaggatattcaacccctcgtctgtgataatggaactggaatggtgaaggccggttttgctggtgatgatgctccaagggcagtttttcccagtattgttggtcgtccccggcacactggtgttatggttgggatgggtcaaaaggatgcctatgtaggagatgaagcacaatctaaaagaggtatccttactttgaaatatcctattgagcatggtattgtgagcaactgggatgatatggaaaagatttggcatcatacattctacaacgaactccgtgttgctcctgaggagcaccct

SEQ ID NO: 44191 - DNA, 152 bp, Gossypium hirsutum
  Clone ID: LIB3189-021-P1-K1-G11
aattcccgcacgacccacgcgtcctgttacttcaaccaattttttgagctagctcgcttttactcaaatggcaaccaaaactatgatgtttcaaatatagtcactgttcttctctttcctcattatctccaactccattttcctttaagcta

SEQ ID NO: 44192 - DNA, 104 bp, Gossypium hirsutum
  unsure (1)..(104): unsure at all n locations; Clone ID: LIB3189-021-P1-K1-G3
aaaaccagtgccataaacatgtttctcccaatcctcncttctttctctttcctattttcctccaccagacgcatcctacttctgaggtggggacttaaattgcc

SEQ ID NO: 44193 - DNA, 83 bp, Gossypium hirsutum
  Clone ID: LIB3189-021-P1-K1-G4
gttccatgtgaacggcactgcacatgggttagtttatctctaaagacgggggaagccctccgacagcgctcacgcgagctgga

SEQ ID NO: 44194 - DNA, 130 bp, Gossypium hirsutum
  Clone ID: LIB3189-021-P1-K1-G5
cggctgagtatcaatacaagtcagaccccgttgtagtctcttctcgtttgtactgtccttagagagagtcttgcagggactgttgatgtagcaagtgctgggtaacgaagcatcaaccgttctgtacatt

SEQ ID NO: 44195 - DNA, 455 bp, Gossypium hirsutum
  Clone ID: LIB3189-021-P1-K1-G7
aaccattaaagcttggaacaagcttaaggaagttcttaaatggccccaaagagaggtgtaaaggttgctgccccggccaagaagaaacaagagaaggttgtgaatccactgttcgagaagcgtccaaagcagtttggtattggcggggcactacctccaaagaaggatctacatcgatttgtaaagtggcctaaggttgtccgcattcaaaggaaaaagaggatccttaagcagaggttgaaggtcccaccagcattgaaccagtttaccaagactcttgataagaaccttgctacgagtctattcaagctgcttctcaagtacagaccggatgacatggcagccaagaaggaacgtctactgaaaaaggctcaggctgaggctgaaggcaaagcttctgagtctaaaaaaccaattgttgtgaaatatggacttaaccatgttacctaccttat

SEQ ID NO: 44196 - DNA, 400 bp, Gossypium hirsutum
  Clone ID: LIB3189-021-P1-K1-G8
gcagccgcagccagcaagcagcagtagcatcagttttagcggaagaatgtctcacaggaaatttgagcacccaaggcatggttcccttggatttcttccaaggaagcgagcctctcgtcacagaggaaaagtgaaggcattcccaaaggatgaccctaccaaaccttgcaagctcactgcctttctggggtacaaggctggtatgacacacattgtcagagaggtcgaaaaacccggatctaagcttcacaagaaggagacatgtgaagctgttacaatcattgaaacccctcctatggtgattgttggggtggttggatatgtgaagacaccacgtggccttcgctccttgaacaccgtctgggctcagcatctgagtgaggaaagtcagcgcccgttc

SEQ ID NO: 44197 - DNA, 51 bp, Gossypium hirsutum
  Clone ID: LIB3189-021-P1-K1-G9
gcaaagttctctttggaagagaaattgatggtctttggactcaatatagaa

SEQ ID NO: 44198 - DNA, 404 bp, Gossypium hirsutum
  unsure (1)..(404): unsure at all n locations; Clone ID: LIB3189-021-P1-K1-H1
ctataaggcagctttgcttctccctggatcattatcgttatgggtatcattggcttcggcaagcatttatggggcaaaagagagttccagttttgactacatgaatatgcgatgctacataatgtctccttttacttgggtgcttggatattttgtggtgagtccccatattatctcagtagtccctgcaagtggctttgtcatctcctgcttggttaatgaggataccgaaaacaggaggtgcattttagacagaatatgataggtttgctcacaaatactagcgccaagatgatgcgctnggaatgttgggatccaggtgcattttaaacagagaatatgacagttttgcattttaacatttggttgtccaatatgctttgagacttcccggtcaatcaatc

SEQ ID NO: 44199 - DNA, 127 bp, Gossypium hirsutum
  Clone ID: LIB3189-021-P1-K1-H10
ctcacttctcgcttcccttccacccacttcttttgattcacctctttcttccattttcgcctagtccatcatgaatgtgaggaaggggctcatccccaagcgtctctttcgatctaacaaaaaagat

SEQ ID NO: 44200 - DNA, 404 bp, Gossypium hirsutum
  Clone ID: LIB3189-021-P1-K1-H11
ttccagggacgacgccacgcgttcgaccacgcgtacggaacatccttgcagctttgtctttagaattgagtccatcaagtcttgcaacagatcataggagagtgagattcaacataccatcagggacttcaatgtcatgccctcatgtgagtggaatcgcttgcttgatcaaggccagacacccagattggagtcctgcagcagttaaatctgctctaatgacaaccgcttatgttcatgataacatccataatccactccaagactctttcactgcagcaggcttcactccctatgatcatggagctgggtatatcaaccctttgaaagctctagacccaaggtttgatctatgacatttcaacccagggattactttttaatttcctttgtacacagaaatt

SEQ ID NO: 44201 - DNA, 345 bp, Gossypium hirsutum
  Clone ID: LIB3189-021-P1-K1-H2
gaaaaatatcagctattgccaaagactgagagcgtaaatctatgaattcgctgctcaagtttcgaaggcctttaagttcttctctcacttcactatctttgcagcgcctctctacaactctccactatgttttcgaagagaaaaaggaggggacgagctttatacaccccactgcaattgttcatcccaatgctgtgattggccagggtgtttcagtaggtcctttatgtacaattggtccttcggcaaaactaggaaatgggtgtcaaatgcatccttccagccatatttttgggaatacagaatttggggagccacttgcgtttgatgacgcattgttgcggt

SEQ ID NO: 44202 - DNA, 401 bp, Gossypium hirsutum
  Clone ID: LIB3189-021-P1-K1-H3
gacatgaggaataagctttgtgataaataccatgtttttgtcactgcttcggataaggaagagttaatggctaagcttcaggagacagaggattggttatacgaagatggagaggatgaaactaaaggtgtttatattgccaagcttgaagagcttaagaagcaaggtgatcctattgaagaacgttacaaagagtattctgagaggggaactatcattgatcagcttgcttactgcattaacagttacagggaggccgtcatgtcaaacgataccaaatttgatcacattgaacttgccgaaaagcagaaggtttttgaatgagtgtgttgaagctgaggcctggctcatagagaaataacagcatctagatcatacttccaagttttgtcacacctgtt

SEQ ID NO: 44203 - DNA, 304 bp, Gossypium hirsutum
  Clone ID: LIB3189-021-P1-K1-H5
acggattccggttcgagccacgcgtcacgcgtgctaacaacattagcccaagctccggcacctgctcttgcaccttctggtccgacaaacgtcaccaagatcctcgaaaaagccggtcaattcaccctcttcattcgtcttctaaagtccactcaagtggccaaccagctgctcggtcagctcaacaattccaacaatggtatgaccgtttttgcaccaacggacaatgctttctccagccttaaatcgggcacattgaattcactcaccgatgaacataaagtggagctggtgcaattccaca

SEQ ID NO: 44204 - DNA, 262 bp, Gossypium hirsutum
  Clone ID: LIB3189-021-P1-K1-H6
ttacgcccacgcgtgcgcacgagcgaccgactttttttttgttttgtgcgatccctataaccttcaacgagctcgctaaaaaggagcctctggtgttgaactaccacaatgggccactcttgaaggggaagatcaccgctaatctcatctggtgccggaagttcttcccaacccagcgctccataatcgttgatttcattaactctttgtgctttgccgtcaaacccaaaattcccgctgcgtggttttggtggaaaaccaa

SEQ ID NO: 44205 - DNA, 299 bp, Gossypium hirsutum
  Clone ID: LIB3189-021-P1-K1-H7
gataaactttctaaaacaatctcttttccttttctaaaaccaaaaaccaccatagccatggcggtgatgtcaaagcaagatccatgaccagcttttgtagaaacggtacaagaaatcatgagactttacagatcacttccaccaaggccttcaattgaagacgttgcagcagccaaattccgttctcaaaactgttagaaaatgaataaaaaataaagcttgaggagatctcaatggaacaaccacctgaagatgttcctgatgaactcttatccgttctgcatcatgttaagaagatc

SEQ ID NO: 44206 - DNA, 72 bp, Gossypium hirsutum
  unsure (1)..(72): unsure at all n locations; Clone ID: LIB3189-021-P1-K1-H8
cccacgcgtccgctgggttgtcgnnnctattttnttagaaacaattcaatggctgaaaagaggggggattta

SEQ ID NO: 44207 - DNA, 104 bp, Gossypium hirsutum
  Clone ID: LIB3189-021-P1-K1-H9
cggacgcgtggtctcgaagtagaatcctattttttgatcagaaaaaagaggtcttccgggtgatattctttgacccaagggaaagctacataccacatcaagaa

SEQ ID NO: 44208 - DNA, 103 bp, Gossypium hirsutum
  Clone ID: LIB3189-027-P1-K1-A5
ctctatctgctcagggaaaaaggggggggatacaaaggaggagggggacgcccggactactcaaccggatcgcggctatcaaaagggaggtggattgggggtc

SEQ ID NO: 44209 - DNA, 193 bp, Gossypium hirsutum
  Clone ID: LIB3189-027-P1-K1-A6
gaaaaagggcgaccagcgccgagaagcaagcagacaacagagggaagggtagttttaagcactgattaatgccctaattgtggaggtccaactgctggaggacaaacgatctgtgatgaacaccaattaaagcttgaaaatgctcgactaaaagaagagactgaccgaataagaacaatagctagaaatggat

SEQ ID NO: 44210 - DNA, 174 bp, Gossypium hirsutum
  unsure (1)..(174): unsure at all n locations; Clone ID: LIB3189-027-P1-K1-B5
caaccnactttgaaaatgctcgtaaagagaaagctggcataaggatgaaccctaatgaccctgaggagaatcctgaggccctcatgtatacgaggggaggcccggaaagcaactacgatgggcgttccgtgtctgtcaccggacgataaacaccatcagaatgccggtaataaa

SEQ ID NO: 44211 - DNA, 354 bp, Gossypium hirsutum
  unsure (1)..(354): unsure at all n locations; Clone ID: LIB3189-027-P1-K1-H2
atcgcgagcggtcgntcgccgcgagcggcctcttttttttttatcttagatcatttctagacgcagcgaacgatggagaaagcgatcaaccgacagcaagttttgcttcaacaccttaatccttcagcttcttctttttcgtcgtaccaaaacaactctgccctctctgcattggctttgttagctggagatagcgctgcttatctaagaactaatgtatttggagatgatgtggtgatagtagcagcatataagaccgcgctttgcaaatccaagcgagggggtttcaaaggttcctattcctgatgaattacctggaccttgtttttaactgccagtgattggagaaaacaa

SEQ ID NO: 44212 - DNA, 382 bp, Gossypium hirsutum
  Clone ID: LIB3189-027-P1-K1-H3
gagcagcagcagcagccatggttctcaagacggagctttgccgatttagtggtgccaagatataccctgggaaaggcatcagatttgttcgtggagattctcaggttttcctcttttccaattcgaaatgcaagaggtacttccacaaccgtctgaagccctcaaaacttacatggacagccatgtataggaagcagcataagaaggatattgcccaagaggccgtgaagaagagaagacgtgcagcaaagaagccttactcccgatccattgttggtgccaccttagaggttatccagaagaagagaagtgagaaacccgaagttcacgatgctgacagggaaaccgcttttcgattcatcatggaatgaggatattgttc

SEQ ID NO: 44213 - DNA, 413 bp, Gossypium hirsutum
  Clone ID: LIB3189-027-P1-K1-H8
cattatttttcctgcattttctccctcgccaaacagaaatcttagatcatttctagacgcagcgaacgatggagaaagcgatcaaccgacagcaagttttgcttcaacaccttaatccttcagcttcttctttttcgtcgcaccaaaacaactctgccctctctgcatcggcttgtttagctggagatagcgctgcttatctaagaactaatgtatttggagatgatgtggtgatagtagcagcatataggaccgcgctttgcaaatccaagcgagggggtttcaaggatacttatcctgatgatttacttgcacctgttttaacggcagtgatagagaaaacaaatttgaatcctagtgaagttggggatattgttgtgggaacggtattggcaccaggatctcaacgagct

SEQ ID NO: 44214 - DNA, 291 bp, Gossypium hirsutum
  unsure (1)..(291): unsure at all n locations; Clone ID: LIB3189-027-P1-K1-H9
cgggacgacccacgcgnccgcggacgcgngggcgacaacgccacaaacgcgcgccgcgaaacaaggccanacncagcacgcacgccgccgaacgccgacggagaggaaagcggcgggccgaaaaccccacggccacaggganggcaggaacccaagcccgacgggccacaagaacaaaggcaacaagggggggaaaaccgagaacagaagcgccgacagagcgangggagaagggaagcgaaccnccgacgagagggaccgggaagccgaggcgacgaacgacggaaagag

SEQ ID NO: 44215 - DNA, 277 bp, Gossypium hirsutum
  Clone ID: LIB3189-005-P1-K1-A10
caaaaatggatggttattgtagcagaagggtaatcatgtttttggtgtttgcatttgcagcaataagcagagggtatggacaagaatcaaccactcttgttcctgcaatcatcacctttggtgactctgtggtagatgtgggcaataatgactatctccctaccatcttcaaggctaactattctccttatggacgggactttgtcaacaaaaagcctactgggaggttttgtcatggaaaattatccattgacatcacttgttaatttttgatgtt

SEQ ID NO: 44216 - DNA, 417 bp, Gossypium hirsutum
  Clone ID: LIB3189-005-P1-K1-A11
aaaacacgcacccaaaaaataaaaccctttgaaaaccaaagaaggaagaagaagatgtcgtggcaagcttatgtagatgatcacttgatgtgtgaaatcgaaggaaaccatctctctgccgccgctatcatcggccaggacggcagcgtttgggcccaaagcgccagtttccctcagctcaagcctgaagaaattagtgccatcatgaatgactttaatgaaccgggttcactcgctccgaccgggttgcaccttggtggcacaaaatacatggtgatccaaggcgaaccgggagctgttatccgtgggaagaagggacccggaggtgttactgctaagaaaccaatatggtctcgcttatcggaatctatcaagaacctatgacacccgtccaatgcaacatgatcgtattgaggc

SEQ ID NO: 44217 - DNA, 269 bp, Gossypium hirsutum
  Clone ID: LIB3189-005-P1-K1-A12
ctagagtttagtttgatcagcaaccctctgctcttcttcttccttaaacaagcaaaacaaaaaaaaaaaaaattatgggtggcgaaggaaaggtctatactttggctgaggtttctcaacacaacaatgccaaagactgttggcttatcattgagggcaaggtatatgatgtgactaaattcttggaggatcatcctggtggtgatgaggtcctgttgtctgcaacagggaaagatgcaagtgatgattttgaggatgttggctatagt

SEQ ID NO: 44218 - DNA, 474 bp, Gossypium hirsutum
  Clone ID: LIB3189-005-P1-K1-A2
gtgaaaaaagaaacacaaaaggaaacctttaaattctctcgtttcctctcagaatattcttctttttcttcttcttcttcttcttcttcttcttcatcattgtctgctagggtttctttaaactcttttcatttgaccaaaatggcggatttgcctgaggcgactcgtcggaacactaacgttgtttcccgcgatatttccattgatgtttcctgcgatgattccaattgtgctgattcttcaggttgttcaagtgatatgcctgatgttgaaattgtcagtgaagatgataagagttcttcagcatcagattcaggatctaatcagctatcaaaatctcggagactaacacacagcaaactggttaaatatgcgtccaaatttttggatgatacagttccatttagaaagaagatcaagtggttgcctcgacttgctattgtgaaacatgatggaaccgtacaatgtgatttt

SEQ ID NO: 44219 - DNA, 289 bp, Gossypium hirsutum
  Clone ID: LIB3189-005-P1-K1-A3
gccttcccccttttacactcccccttcagatatcttcattttcatcttcttcctctttctttctggtctttgttttcttcaaatactgccctttcattttccttagttcttgttaaaaagaaaatgtgtgggattttagctgttttgggctgttctgatgattctcaggcaaaaagggttcgggtgctggaactttcccgtaggctcaagcaccgtggtcctgactggagtggcctctaccaacatggagactggtatttggcccatcaacgccttgccatcattgatc

SEQ ID NO: 44220 - DNA, 259 bp, Gossypium hirsutum
  Clone ID: LIB3189-005-P1-K1-A4
ttcctttcttgtggcaaatctgctaacaggcctggtaaatttatctgtggataccatatttgtgtcaccattatcagctgttttgatcttggtttcttattctttgacattgtgttttgtcatggtactcgtagatttttctggggtgaaatataaattttggtcggtttagggatttgttttttacattactgacacatgtacctaataacttttggcattttaattttatttctttatgaactttggctccttttcg

SEQ ID NO: 44221 - DNA, 369 bp, Gossypium hirsutum
  Clone ID: LIB3189-005-P1-K1-A5
aaagtaccagtttatataatggaaatagattaacaatggttcaaaacctctaatcaataatataatcagttcaatatttcctggtaaacaggaaggcattgcagtaggaaggacttttgctgctcttaagaattataaagtggatggtaacaaggaaatgatggctattgggctgatgaacatggttggctcctccacttcttgctacattacaactggggccttgtttcgatcagtggttaatcacaatgcaggagcgaaaagtgctgtgtttaacatagaaatgtccattacggttatggtgacccttagaattctcatgccgatattacagtacacaccaaacgtggtgggtgtgagctatttttg

SEQ ID NO: 44222 - DNA, 471 bp, Gossypium hirsutum
  Clone ID: LIB3189-005-P1-K1-A6
atttgttgggtaaattcgagctctctggcattccaccagcacccagaggcgttccccaaattacagtttgcttcgacattgatgctaatggcatcttgaatgtctctgccgaggacaagactactggccagaagaacaagattaccataacaaatgataagggtcggttgtcgaaggaagaaatcgagaagatggttcaagaagccgagaagtacaagtccgaggatgaggagcacaagaagaaggttgaagccaagaattcattggagaactatgcctacaacatgaggaatactatcaaggatgagaagattggttcaaagcttgacccggctgacaagaagaagattgaagatgccattgatggagcaatccaatggttggatggcaaccagctagccgaggctgatgaattcgaggataagatgaaggagctcgagagcatctgcaatcctatcattgccaagatgt

SEQ ID NO: 44223 - DNA, 291 bp, Gossypium hirsutum
  Clone ID: LIB3189-005-P1-K1-A7
aatggtcgatcgacgcgtgcgtccgaaaccgttacccaaaaggaaacctcactaaccagtaaccaacctttggatttttatccgcttttgtgtttagagcatgcagagacaatccttatgttcgccaagctccaaacttccaatccattgtggataagccaaaatggccgatttgctcagaaacgccaaggaatcatcgatgatgatgacagctaagacatcatgactcgttgattgtccttctcttcaacctgctcgttgacatcgcctgctaagcctgagaaggccatt

SEQ ID NO: 44224 - DNA, 154 bp, Gossypium hirsutum
  Clone ID: LIB3189-005-P1-K1-A8
gcggacgcgtgggcctaagggagtgcacgtcttcaccgagctaatgtgaacctggggcattttacttggtgggcatgcccgtgcggtcggactcggattctatgtcggagtcgattttctgggttggtggcctacttcgccggtgtgagcctgg

SEQ ID NO: 44225 - DNA, 78 bp, Gossypium hirsutum
  Clone ID: LIB3189-005-P1-K1-A9
ggattcccctagtaacggcgagcgaaccgtttaaagcccagcttgagaatcggtcgccatcggcgttctaattgtaaa

SEQ ID NO: 44226 - DNA, 474 bp, Gossypium hirsutum
  Clone ID: LIB3189-005-P1-K1-B1
cccacgcgtccggcaagaagctgctgttctctctctctctctttcccatagtttcacccatcttttaatccatcgctcacaaaattatgggtttgaaggaggaattcgaggagcatgccgagaaagttaagaccctcccggccgccccttcgaatgatgacatgctcattctctatggactgtacaagcaagctactgttggaccagtgaataccagccgtcctggaatgttcaacatgagggaaaagtacaagtgggatgcatggaaggctgttgaagggaaatcaaaggaggaagcaatgggggattatatcaccaaagtaaaacaactgtttgaggctgctggaagttcttgatgtgtgtgtgtatgaccaatgaaactggtgtaatttcaagcccttgtcggttacttggggttttcattactatgaataaattatgtacctcttttctattgctattatgttatttaca

SEQ ID NO: 44227 - DNA, 312 bp, Gossypium hirsutum
  unsure (1)..(312): unsure at all n locations; Clone ID: LIB3189-005-P1-K1-B10
aacaaanccganncnncacncnccaccccaaacaaanggcnganccngaaacccccacggcgagggacncagccgcaccaaccacggagccccaccacacccaaacccaaggagacgacacggccgccaaacacagcaaccgcaccggaaaaagaaggccccacacccaacgaacccgagacgcagaccgcaaccgacacgaagagacgcgagacngcgaagacgaccaaaacaaacgcaaaggaaccagcccgaaagaggaggcaaacggcgcggccaaagagaacgaggaggaggcaacaaaggacgcca

SEQ ID NO: 44228 - DNA, 85 bp, Gossypium hirsutum
  unsure (1)..(85): unsure at all n locations; Clone ID: LIB3189-005-P1-K1-B11
cccacgcgnccgcgccgctcggagggaannacgcaccagggaggcgcccgcgacncgaccgggggggccgcagcaccaacgacac

SEQ ID NO: 44229 - DNA, 409 bp, Gossypium hirsutum
  Clone ID: LIB3189-005-P1-K1-B12
ctttctcatttcacacgggttgtggcgtagtttaagcagagagggtgcgcaggataaagctattcaccattgtttcaacatgaaggtttgtaataaaaatttgtttctatcagcattgctttgcattgctgttgcaggagttttgggtcaagctcctagtaatcctcctacgtctacgccggcgccacccacaccaccggcttctactccttctccgacgactcaagcaccgcctacaccaaccgccactccgccactggtttctacttctcctcccacttcatcaccgcccccagtgacagcttctccacccccagtttcaactccttcacccagttcttcttcttctgcaactccaccacctgcttttccttcttctgcaactccacctccagctttttcaccttct

SEQ ID NO: 44230 - DNA, 449 bp, Gossypium hirsutum
  Clone ID: LIB3189-005-P1-K1-B2
cgtgaatctaatcggctattgtgcagatggggatcaaaggattttagtttatgaatacatggcaaatggatctttggaacatcatcttcttgatttgccccctggtaaggagccattggattggaataccaggatgaaagtagctgaaggagcggctaaaggactagaatatttacacgattttgctgatccgctgataatttatcgcgactttaaagcttcaaacatattactagatgagaacttcaatcccaaactctcggatttcggacttgcaaagttaggtcctactgaagggaaagaccatgtatcaactagggtcatggggacctatggttattgtgctgctgaatatgcaatgacaggccagctgacgacaaaatccgatgtttacagctttggtgtaatgtttctggagcttatcttggggaggagagcttttgattttt

SEQ ID NO: 44231 - DNA, 465 bp, Gossypium hirsutum
  Clone ID: LIB3189-005-P1-K1-B3
cttctgtatctttattttctcgcctttgacgaggagccgacgctaccatggttcacgtcagtttctaccgcaactatgggaagacctttaagaagccacgacgtccgtatgagaaggaacgattggatgctgagttgaggcttgtaggagagtatgggctccgatgcaagagggagctgtggagggttcagtatgctttgagccgcatccgtaatgctgctagggaccttctcactcttgatgagaagaaccctcgtcgtatttttgaaggtgaagcccttcttcgtaggatgaacaggtatggacttttggatgagagccagaacaagcttgattatgtcttggctttgactgttgaaaacttccttgagcgtcgtttgcaaactctcgtgttcaagactggtatggccaagtcaattcaccatgcacgtgtgttgatcaggcaacgacacataagggtcggga

SEQ ID NO: 44232 - DNA, 329 bp, Gossypium hirsutum
  Clone ID: LIB3189-005-P1-K1-B4
cattaccattcacggtaccgttctgaactatattttgcataggagaaaaaggcatgcaaagtgtgagaaactagaaaaaaaatagtggttaattttagttcatggtgctgaaagtgtgaagggtttgttgccagcatttcagctccttaatttcgtttcaatgttgggaattaggacccccaatttgaggagaggataaattttgtgcggcgaccccttagaaaaaagaaaaaaaagatggctactgagggctttttctttttaaaccattattggtgaaaaaagagaaagaggttattgatgtattacaaaattcaattctttctagt

SEQ ID NO: 44233 - DNA, 470 bp, Gossypium hirsutum
  Clone ID: LIB3189-005-P1-K1-B5
caccactgagatttgttaggtccggcaatcagatttttgctgtacacgaacaatttccttaaatttctgtgttccagagctgatacttcttctagagatgagatcatttaaaaaattataattatgaattatccaccagagaaggttgtgaggttccaggactggaattcagagaaaacctgcgaagtacattatactaataataatgggataaattcagggaaatttacatttgcaataaattcattttcagaaaagtttcaaagaggggttgaatctggttctgagaggattaaagcgattagaaagtcatttaaatctagttcattcaaccatgttgttgctaaaggctttggttctagtaagaaagttcttgatccacaggggccattccttcaacgctggaacaagatatttgtattatcatgtataatagcagtctcaattgatccactgttcttttacgttct

SEQ ID NO: 44234 - DNA, 429 bp, Gossypium hirsutum
  Clone ID: LIB3189-005-P1-K1-B6
cccacgcgtccgcggacgcgtggggggaagtcggttgaagactgattttattttcactgccagctacagaagcactagcagtgttgcaaatgttggcaacgatgatgatggtaccgatgcacggcgttttcttgcatgttccatgcggaaggccctgaattctgtcctggagaaggcttctatttcaccggaacactccccattcttgacatttccgaacaagaggcgaaggatctcctacattgattccccaagctcatcttgatttttcaaaaaaagattagccttttcaacgtttggggtaaatggacgacacatccatttatctctgtatggatgtttgtctgatatgcccaaaaattggtttgaaatcaatactattaatagcatgtaattgattccagaagaccagaacgttttcaaactgct

SEQ ID NO: 44235 - DNA, 317 bp, Gossypium hirsutum
  Clone ID: LIB3189-005-P1-K1-B7
gaaatacacaagaaaaaaaaacaagtgatctgataatattgaagactttatttctgttaacatgcattatgagtactgctggtcaagtcatccgttgcaaagctgcggtagcatgggagtcggggaagccactgtcaatagaggaagtggaagtggcaccaccgcagaaggatgaagtccgtattaagatactcttcacttctttatgtcacaccgatgtctacttctgggatgctaagggacaaaacccttttgtttctcgcatactaggtcatgaagctggagggattgtggagagtgtaagtgagggggtgact

SEQ ID NO: 44236 - DNA, 430 bp, Gossypium hirsutum
  Clone ID: LIB3189-005-P1-K1-B8
caaccaaaaatttcttgatggcctcaccagtacccttgacatcggccgccggaagcggaggagggggcggctgtggtgttgcaccttttcttttgaagacatacgacatggtggacgactctgcgaccgacgatatagtgtcatggagctcccacaataagagctttgttgtttggaaccctcctgaattcgctcgtcttttgcttgccacttatttcaagcacaataacttctccagtttcatcaggcagcttaatactgatggattccgtaagattgatcctgaacgatgggaatttgctaatgaagattttgtgaaaggtcaaaagcatttccttaagaacattcacccggaaaaagccgattcacagcccacagtaatccttatgggtttttcgtagattccgaaagggctggattcgaagaagaa

SEQ ID NO: 44237 - DNA, 276 bp, Gossypium hirsutum
  Clone ID: LIB3189-005-P1-K1-B9
ggaactggggattttcttttagctcgaggaagtggcgattttcagtagaaaaaagcttgaggagttgaaatctgatgtgggcgactttaagatcccgatatctgcatctatctgcaactacgttgccttcctcctctctcacaaatggctcgtggaagctggggttttcaggtttaaatcagacgttctcttcatccactgtcgagagaataagcaatgagtggctcgagcctgcaagaggtggaaaaagctctaagcgacttttgagcagacaac

SEQ ID NO: 44238 - DNA, 472 bp, Gossypium hirsutum
  Clone ID: LIB3189-005-P1-K1-C1
ggaaaagatgcagatattcgtgaaaaccctaaccggcaagactataactctcgaggtcgagagcagcgataccattgacaacgtcaaagccgagatccaagacaaagaaggaatcccaccggaccaacaacgtctcatcttcgccggaaaacagctcgaagatggccgtaccttggctgactacaacatccagaaagaatcaacacttcatcttgttctgaggttgagaggtggaattattgagccttctttgatggctttggctcgcaaatacaaccaagacaagatgatttgccgcaagtgttatgctcgtctgcatccaagagccgtgaactgccgcaagaagaagtgtggtcacagcaatcagttgaggccgaagaagaagatcaagtagacactggctggtgttatcctgtctgctttaaaagaaattgaatgtcagaccaggaaaatatttccatggagttctttt

SEQ ID NO: 44239 - DNA, 431 bp, Gossypium hirsutum
  Clone ID: LIB3189-005-P1-K1-C11
cccacgcgtccgcgacgagttctctctcatcgacgaccacgaaactaaccctagccaccaccacgttctccaccaccaccattcttacgcgcaggtccacgcgccgccacccgataaccacaacggcgatgatgactctgattctgctttccgcggagccaacttcgttaacaacaacagtagtaacgcgacgtcctccgatgtacggatcgagaagaggagggaccaagaagagataaacgatggagttttgaagagatcgaagcaatcggcggcgactgagtaccggaaagacagagaagaatggagcgatgccgcgatcgggtgtttgttggaggcgtatatggagaagttaacgcagcttgaacagggggaatcttagaggaagggattgcgaagaggtggctgtggtggttattgagcggtgcgag

SEQ ID NO: 44240 - DNA, 445 bp, Gossypium hirsutum
  Clone ID: LIB3189-005-P1-K1-C12
cccacgcgtccgctttccttcctctttctctccttttatcttggcttttcatttataacttaccaagtttttgctttagtttttcttccagtgtttgattacttggaatctgataaaaaatggaatatgaagatcagatcaaccaggccatggaccccaaatacgaatgtcttttatttgatctagatgacactctttatcctctgacttctggtatatcaagtgaagttaccaagaacattcaagaatatatgattaagaagcttggaatcaaggacaatgttcctgaattatgtgtttcactgtataagcattatggcacaacaatggctggtttaaaggctattggttataactttgagtatgatgattttcatagtttcgttcatgggagactggcctatgcaaagctaaaacctgaccctggtttaaaggatctcttgct

SEQ ID NO: 44241 - DNA, 470 bp, Gossypium hirsutum
  Clone ID: LIB3189-005-P1-K1-C2
gcaaaggcagatgaacttgatgctgaagcagcttctcactgagatattgtttcgagatggtggggtttatcttttacttggttcgagaggtgctggagaggaaggtgaactgagacgatttttgactgatcataaagcaagacaacagtttctgctagaagctgcccgccaatgccaagattctgggctgtacgacaagtctatagagattcagaagagaattggagcattttcgatggcattggatacgataaataagtgcctctctgaagcaatttgtgccttatcacgtggtagattggatggtgagagtcaaactgttggcctcattcactccgtgaacgagatcttggagactttcaaatattatcctgaagtcaggttccaagagagggaacattgttttggacaacaaaccatattaagacagctcgagactatattattgatccataaattgacgagacttg

SEQ ID NO: 44242 - DNA, 474 bp, Gossypium hirsutum
  Clone ID: LIB3189-005-P1-K1-C3
gaaagaattaggagaagaaggcctcacgggtaatgaatgggaagatcgaaaaattggaagaagaaaggattttttggttagacgcatggaattggctaagcattttattcgaacaaatatagaaccagaatggatggttttatgtctattaccggttcttcctcccgagttgagaccgatcattcagatagatgggggtaaactaatgagttcggatattaatgaactctatagaagagttatctatcgaaataatactcttaccgatctattaacaacaagtagatctacgccaggggaattagtaatgtgtcaggaaaaattggtacaagaagccgtggatacacttcttgataatggaatccgcggacaaccaatgagggacggtcataataagggttacaagtcgttttcagatgtaattgaaagcaaagagggaagatttcgcgagactttgcttggcaaacgagtcga

SEQ ID NO: 44243 - DNA, 467 bp, Gossypium hirsutum
  Clone ID: LIB3189-005-P1-K1-C4
gcgtccgattatgtgatagataggggtggggcattttattgggggacaagtgagtggtctgcacaacagattacggaagcatggggagtagctgagaggttggacctggtaggcccaattgtggagcagccggagtataatctattgactaggcacaaggttgaatccgagtaccttcctctgtataccaactatggtctaggtcttacaacatggagtccgcttgcttctgtagtgcttactggaaaatacaacaaaggaaatataccatctgacagtcggtttgctttggaaaatttcaaaaatcttgctaaccgatcactaattgatgatgtgttgaggaaagttaatggactgaagccaattgctgatgaacttggtgtaccgttagctcaacttgcaatcgcatggtgcgctgcaaatcccaacatatcatcggttattactggtgctacaaaggaatctca

SEQ ID NO: 44244 - DNA, 193 bp, Gossypium hirsutum
  Clone ID: LIB3189-005-P1-K1-C5
gagacctgaaattgttcagagcaaaacttacacatgttttattagtaattattgttacaacagttacattattactaatgttatattgtgacaaagaattgaaatacaatgaatgaaaattttgatcttaatgggtttattgtttcggaaaagtccaatattaagaaaaacaattttcttgacaataggatca

SEQ ID NO: 44245 - DNA, 448 bp, Gossypium hirsutum
  Clone ID: LIB3189-005-P1-K1-C6
aaatggaagctatcaaagaaagaaactacatcatcatcatcatcgaagggacgttctttatcatcatcttcaacttcaaattcgtcatcattcatgatcaaaaccaccccgtcatcatcatcaacatcaccaccctcatcatcaaaaacaaaaagatgtgctttcactaggaaatgtgctaggctattcaaagaacaaagggctcgtttttacatcatgaggcgttgtgttatcatgctcatttgctggcgcgaatacactgattcttaagtatttttaatggaggatttaatggcatccaaccaagcaagcaagcaagaagaacaagaagaggaggatattatcaagctctatatataaatatatacacatgtgtataaaggattgggttttttagggttttagaacttattagaacttagattattacgattgttttttcgaattt

SEQ ID NO: 44246 - DNA, 109 bp, Gossypium hirsutum
  Clone ID: LIB3189-005-P1-K1-C7
cgggtgcgacaccgacgtcgtccgacccacgacgtaccgtcggacgcccagtgggtctaccccgtccgcttcggtagtgagacattacgcgtccagaggaggcggcccg

SEQ ID NO: 44247 - DNA, 407 bp, Gossypium hirsutum
  Clone ID: LIB3189-005-P1-K1-C8
tagatcgcgggcggccgctcgcgatctagaaataataacaataattctctttctgtttctctggtttaaacatgggtatgggtttaaggaatggatttcttttgattttatcttgtgttgttacactttccctctcagttttggggcgacctgccactttccttgaagattttagaatcacttggtctgattctcatattaggcaaatcgatggagggagagccatccaacttgttctcgaccaaaattcaggctgtggatttgcttctaaaaggcagtatttgctcggacgtgtcagcatgaaaatcaagcttatcccctgcgactccgcccgaacagtcaccttcttttatatgaattcttgttacagatgctgtgccatgattagctagacttcttgttcttgg

SEQ ID NO: 44248 - DNA, 392 bp, Gossypium hirsutum
  Clone ID: LIB3189-005-P1-K1-D1
ctaatctacctctcagttgaaacaccaccgcccatcatcttttgttttctttcgaaggaaatttttttttttctttctttctaacttattaaacaaacatgggatctgagacaaatgcatcagtgaagacatctgttggcaggtcttgtgttccgaagacgaagggaaaggttcctaaaagagttcacaaagctgagagggagaagctcaagcgtgagcatttgaatgagctcttccttgacctggcaaatgctctcgatcccaattagcccaacaatgggaaggcctctattctttgggaagcaacttgactattaaaggaattgttcggtcaaatcgagtccctcaaaaaggaaaacgcttctttggtatctgaatctcactatgtgaac

SEQ ID NO: 44249 - DNA, 383 bp, Gossypium hirsutum
  Clone ID: LIB3189-005-P1-K1-D10
ctttgttttgctttgaaacaacccaaagatcagaccttctctaaaaccaaaaaaccgaaccaaaacgctaaaaatggaatcatctggacgttcaaggaggccttgtttcattgaagaagataatgggttggcttctcttgcagttatggagtctgggtatgcaggaattcattgccaaactcataagcaaaatggatttttttcaagacctctttgttactcaaggagaagtagtttgaggaatctgccatcatcatcatcttcatctttttattgttcttcggcttcttctccaaggtctggtaggttttgtgatgccagatttgaagaccatcagccccatttcttggatgcttggtttctttgcaagaagcctattgggg

SEQ ID NO: 44250 - DNA, 466 bp, Gossypium hirsutum
  Clone ID: LIB3189-005-P1-K1-D12
tatctattgaaatggctgcggtgagagaagctttgctaaagcgcctgagggtgaacgcaacatctctgtcgctgctccgtaaccctaaacctagccttaacggtctctttgctctcaccttcaacgccgtccatcgtcgtttttccgacgacgtcatgggctcatttctcgacaaatctgaggtcaccgatcgcgtcgtctccgtcgtcaaaaacttccagaaagtagatccttccaaggttaccccaaatgcccattttcaaaatgatctcgggttagatagtttggacactgtggaggtagtcatggcccttgaagaagaatctgggtttgagatacctgataatgaggcagacaagatcagcactatcaatcatgctgttgagttcattgcttctcaccctcaggcaaagtagagtgaaacgtataaactctctttctttgctttcactttgctcatgtgaga

SEQ ID NO: 44251 - DNA, 298 bp, Gossypium hirsutum
  Clone ID: LIB3189-005-P1-K1-D2
agaagtaaaactttttctaaagccttgcatatgaaagtaactataatcacatacaaattttctgatacaacatagtttcctttaaaaaaggaaaaagacttgtgatcataaaattcaaaccaaaaggtgataaactaaacatagcaatcagatttttacaaatcaaattctcataaaaaccaactattattcttcatcccaaatgcacaggctgggttatcaacatacgtatctgcttctggcattgtacagcaaatatctggtctacattcagacttgatggctcttcaatttgacc

SEQ ID NO: 44252 - DNA, 285 bp, Gossypium hirsutum
  Clone ID: LIB3189-005-P1-K1-D4
agtacctctaattctcttgctctttctttcatttccatcccaaggaaaaccatgcccttcttctgggctgcattaacggtcacttgtttttctttttttatattactggctatcagctacatagggacatatgtgaattatattaaccaggtcatggatccgaaattacaatggcttttattttatctagaagacaccttttttcctttgacttatggtatattaagtgaaggtactcaagtcattttagaatttatgatttagaagcttggaaacaagggcaat

SEQ ID NO: 44253 - DNA, 446 bp, Gossypium hirsutum
  Clone ID: LIB3189-005-P1-K1-D6
aagaaaaacgctgcttgcaggtatgtcatcatccgataagccagaattagttgaaagggatgttaaggacaaggtggatgacaaagaagacaacagtggatttatagacaaggtcaagggtttcattcatgacattggtgagaagatcgaggaaacaatcggctttggcaagcctactgcagatgtagctgagattcacctcccttgtatcaatcttgagaaagcagaaattgtcgttgatgtcctcataaagaacccaaaccctgttccaatccccctcgtcgacattgactacctcattgaaagtgatggtagaaaactcctttcaggcttgattccagatgctggaaccatccatgctcatggtgaggagactgtcaaaataccagttactttgatatatgatgatatcaaaagtacatatgatgacattaagcctggcagca

SEQ ID NO: 44254 - DNA, 316 bp, Gossypium hirsutum
  Clone ID: LIB3189-005-P1-K1-D8
gcgaaaccctagccactctctgctcaactcgccaatgggggcttataagtacgtgtcggagctatggaggaagaagcagtcggatgtgatgaggtttttacagagggtgaggtgctgggaataccgccagcatccgtcaattgttagggtcaaccatcctactcgccctgacaaggcacgccgcttgggttataaggccaaacaaggttatgtggtttaccgtgtccgtgttaggaggggtggtcgcaagaggcctgttcctaagggtattcgcgtatggttagcccacaaaccagggtgtcacccaattgaagtt

SEQ ID NO: 44255 - DNA, 438 bp, Gossypium hirsutum
  Clone ID: LIB3189-005-P1-K1-D9
tgaggagccagtagtagaggaggctcctaaggaaacaatgccagaaccagttgccgaggagatgaaggaaaccactgaacaaaccgttgaaaccaaagaaactacagagtctagtgaggcagcagcagaagcacccaaagaggaagttaagaaggaagaagaagcaaaaccagctgaagtggaggagaaagttgaaacagaagctgatccagcagagaagactgagtgaataataaagcttttgtgatgaaaatgcgggtgtcaatggaagtgtgtttcaaatggctacagttggataagtttgcatgtcaagtcaactagttatcttctatgtaggtcaaataaggatgtagtaatgtggctgatggaggcccaccgatagtatgtctgcaatgtggctaggttaacatgcatttggatatgtcaaagagtgacata

SEQ ID NO: 44256 - DNA, 472 bp, Gossypium hirsutum
  Clone ID: LIB3189-005-P1-K1-E1
ccacgcgtccgcaataaatcacttgcctcgtttccatcgacaacttctctatatctctctcttctctctatttccccatctccctgtctcactacattgctctgattcttgttcacgtcaagcttggtagcactgaagctttggcttaaatgggtatttgctattgtaggcattttctgtttttctcaatggcaatggatgcttcactgactatgtgcaaatcggtcacatcacctcctggcttattcttggggagaagtagagttattaggagttcccagtgtacctttatggtgggaagcaggatcaactttcctaggcagaaagctcagtcaacccaagttaaatgtaaatctagcaggtgtggagtagctcttggtgctaaatgccgtgctgagaaaattttggtggcaaatagaggagaaattgctgttcgtgttatccgaacagctcatgagatgggaataccatg

SEQ ID NO: 44257 - DNA, 382 bp, Gossypium hirsutum
  Clone ID: LIB3189-005-P1-K1-E2
cccaaagcaaaacaaaagccatgtctcagactgttgtgctcaaggttggcatgtcatgccaaggatgtgttggagccgtgaagagagttctggggaaaatggaaggtgtggaatcatatgaagtagatttggagcaacagaaagtgactgtgaagggcaacgtccagcctgatgctgtgctgcagaccgtgtcaaagaccggaaagaagactgccttttgggaagcagaagctttggctgaatccgaggcgaagccagccgaatccgaggtgcagccagccgaaaccgaggcgaatccagccgaaaccaaggtgaagccagccgaaactgaggcgaaaccaacagaacccgaggcaaagcccacggaagctgttgctgcagc

SEQ ID NO: 44258 - DNA, 412 bp, Gossypium hirsutum
  Clone ID: LIB3189-005-P1-K1-E4
ttctgaaaatttttgtgctgaacttcttttttctctttgtaccaccatgtgtggaggtgctattatctccgatttcataccgccgtcgcggtcgcgacgattgacggccgatttcttgtggcccgatctgaaaaaatccgggttgaagaaggggtcgggtaagagatactcgaagcccgtgatcgacttgggcgatgatttcgagactgactttcaggagttcaaagatgaagaatctgatatagatgattatgatgttgatgatgttttggctgatgtaaagccctttgcttttaacgctacaaagaaacctgcttctgctgtatctcatggttcgaactctgaaaaatccatgcaattcaatggtcaagctgagaaatgtgcgaaaagaaagaggaagaaccagtatcgt

SEQ ID NO: 44259 - DNA, 363 bp, Gossypium hirsutum
  Clone ID: LIB3189-005-P1-K1-E7
cccacgcgtccggggctccaaggcttcttggttttcaatgctgttggtggtggtactggttctggtcttggatctcttctcttggagcgtctctctgttgactatggaaagaagtcgaagcttggtttcaccgtctatccttcacctcaggtttctacatcagttgtagagccttacaacagtgtgctgtccactcattcactccttgagcacactgatgtcgctgttcttctggataacgaagcaatatatgacatctgcaggcgttctttggacattgaacgacccacttatacgaatcttaaccgccttgtctctcacgttatctcatctcttaccgcatctttgagggttgatggagcc

SEQ ID NO: 44260 - DNA, 457 bp, Gossypium hirsutum
  Clone ID: LIB3189-005-P1-K1-E8
gtacatactagtgtatgacagttggataacagagcctctccgatctccatatttagggttctgatgcacttgttttccctttgttgcctatccattcccattaaaacagctgagatttacgaagcctgaagcccgcctagtgcctactttgatgaagcctgcctaaaccggaagaccagatgaaccagggcccaccttgatgctactacctagaaggaccaaatatatgtggagatattactattctctttgaaatttgccatgtccatgccaccaaaataccaagctctataatatgtgctcccaagaaccttgctagccggaaatgcctgttgctgccttacagttccttttttgtttgatgtcgtttctgcttagtagttttgcatttgtttagtcgttcaaaaccttgttgctttcttccatcttctgactggtgtaccaagtgcctggttta

SEQ ID NO: 44261 - DNA, 450 bp, Gossypium hirsutum
  Clone ID: LIB3189-005-P1-K1-E9
ccacgcgtccggccttatccgcttattgcgctgccgcgggtattccttccattgtctttttacctgcgaataagatctccattgcacaattagttcaaccaattgcgaacggcgcgttcgttttgagcattgacaccgatttcgacggttgcatgaagttaatccgggaagttaccgccgagctaccaatttaccttgccaattcattgaacagtttaagactcgaagggcagaaaacggctgcgattgagattttacagcagtttgattgggaagttccagattgggttattgttcctggtggtaatttgggtaatatttatgctttttacaaagggtttaaaatgtgtcaagaactagggcttgttgataggatacctagattggtttgtgcccaagcagccaatgccaatccactttatctgtattataaatctgagtggaatgagt

SEQ ID NO: 44262 - DNA, 456 bp, Gossypium hirsutum
  Clone ID: LIB3189-005-P1-K1-F1
cccacgcgtccgatggttactcctagtaaggttcattaccttagacctcgtaggcatttagctggagccactaagaatgtttcagaaacattggaagccactgctgatgtttatgtttcatcagatgaaaatcatgcttgtcatgaagcaacgaggatcaagaatgcctcctctgtcatgcctaatcgccttggaaggagtatgggaccttcaggctatttcacaccttctagccaaaggagaacactggggagagatgctcaaaatctcctcaattatttcaaaaagatgcaggctgaaaatcctggcttctattatgctatacagcttgatgatgataatcggatgactaatgttttctgggctgatgcaagatcaagggcagcttacaattactttggagatgcagttacttttgatacaatgtatcgaccaaatcagtatcagatcccattt

SEQ ID NO: 44263 - DNA, 453 bp, Gossypium hirsutum
  Clone ID: LIB3189-005-P1-K1-F2
caaattcctggtgcaactggttacattggctgcattgggaaggacaagtttggggaggaaatgaagaagaactcaaaagctgctggtgttaatgtgagccttctttctaaaccacttaccaaacctctaaaacaattgaaaacttgaagtgggaaaaaaaattatatatataaatggagcgagagagagagagatttgtttcagttccacacagctttagccgaatggttatgcacttctgctatgtccattgaccttcctctttctggatgcatatttattttgagttgtaattttgtatttcttaagatagatctggagctgagaataatggtattattgatgttgtatgatcatgttaaatcaggttcaatatctcgaggatgaaactgcaccaacaggaacttgtgctgtttgtgttgttggtggtgaaaggtaagtttgagaatgacc

SEQ ID NO: 44264 - DNA, 470 bp, Gossypium hirsutum
  Clone ID: LIB3189-005-P1-K1-F3
attcatacctgtgtttttctttcatcttttcacttaaattttgcttttagaagaggaaaaaagagagccaatttaggctctgagatgtatatgaaattcattgttcttcctctgatgcttgttgctgaaaatcaagttaaattccaagaaagggagtgggaaaaagagagataaacaaagttcctcatctaggtggactccaatggcggcatcggttatgaaagaaggtaaaaaaacggagtccgttgttattgtgaagcttgcggagtgcgattgttgcggtttaacggaggagtgtacgcaagcttacattgctagcgtaagagaaaaattcgaagggcggtggctttgcgggctttgctcggaggccgttaacgacgagacggttagatcggaggaagatatcacgactaacgaagcaatggatcggcacatgaagttttgtgagcagtttaaatcgtcgagtccac

SEQ ID NO: 44265 - DNA, 376 bp, Gossypium hirsutum
  Clone ID: LIB3189-005-P1-K1-F8
cccacgcgtccgctcagctatggaagatgattattctttttatcctgatgaagccgatgatgaacctcgtgatggtgagaatgaaggaaagaaaagagattttaccaaattagaactaaaactcgatcatggtaatcgcccattatgggcttgtgctgatgggcgtatatttttggagacattctcccctttatacaagcaagcttatgattttctcattgctatagctgaacccgtttgcaggccggagtcaatgcacgagtataatctcacaccacattccttgtatgctgcggtatctgtggggatggagacagaaacaattatatcggtcttgaataaattattcaagacttagcttcctaatgaatgattg

SEQ ID NO: 44266 - DNA, 431 bp, Gossypium hirsutum
  Clone ID: LIB3189-005-P1-K1-F9
ctctgccaaaacagagccaatctcctctcaacccttccttaacgctgccgccggcgtcggtggcgtcgccgctgccatcctcaaatccggattcaacagcggcaatggaagcaccaaagtatgtatgggaaggcgcaattcctcttcaaatccatctccacgaatcccaagtcaccactcttcctcctcctcctcctgctctgatcttagctccacggatcgggtatctgccgctgttagcgcctttgattaagccctattttagcagcacacttcctccaggtgttgataccatttggtttgattacaatggcctccctctcagatggtacataccgactggagttctttttgatcttctgtgccctgagcctgaaaggccttggaagatcactgtccattttagaggatatcccggaaatgtattgata

SEQ ID NO: 44267 - DNA, 125 bp, Gossypium hirsutum
  Clone ID: LIB3189-005-P1-K1-G1
cccacgcgtccgaaaaaaaaaaaaaaaaaaaaaaaaaaaaaaaaaaaaaaaaaaaaaaaaaaaaaaaggggaaaaaaaaaataaaaaaaaaaataaaaaaaaataaaaaaaataaaaataaattg

SEQ ID NO: 44268 - DNA, 461 bp, Gossypium hirsutum
  Clone ID: LIB3189-005-P1-K1-G2
agctgctgggttagaagatcggcttgtccatggcttgcttgttgcttcactgtttccttggattatttcctcccacttttctggagctatatatgtttcccaaagcttgcacttcaggtctcctgtttacgtcggagatgaaattgtgggtgaggtaaaagctatcagcattaaacaaagcaagaagagatacatagcaaaactatcaacaaagtgcttcaagaatggcgagcttcttgttcttgatggtgaggccatggcaattctaccaactctagctctggaacatgatagtagaagaagctgatataaagttgaacttgtaagtcatgaattcattacacagcttgataactgttgggattgcagaaagttgactgacatgttttcaattttggattaatattatttaggttacatatcaactctaaaacccaagtgcttcagtcaaaacacatttc

SEQ ID NO: 44269 - DNA, 358 bp, Gossypium hirsutum
  unsure (1)..(358): unsure at all n locations; Clone ID: LIB3189-005-P1-K1-G7
gtggagcagtaatcatgagctttcgagatctggaagccggacggccattggtgtcgaggcaaaacctgatcaacggcaagcaagacgccacgcaagcagtggcctctggcattttccagatcaacaccgcagtcaccacctttcagcggctcgtcaacaccctcggtactcctaaggatacgcctgagctccgagaaaagctgcataaaacaaggctacatattgggcaattagtgaaggacacttcggctaaacttaaacaagctagtgaaacagatcacagtgccggaattagtgccagcaagaaggtagcagatgctaaactngcaaaagattttcaagcagttttggaaagagt

SEQ ID NO: 44270 - DNA, 387 bp, Gossypium hirsutum
  Clone ID: LIB3189-005-P1-K1-G8
gcgagcggccgctcgcgatctagaaccggacgcgtggggaaaaaaaagaagaagaaggaaccaccttgatggctactttggcggcggttgcagctcgtaggatagcgactgtacctcgaacaccacctccctgtcaagccgcttctctcattacccgccggggtcttgccggcgctgcagatcaccatggacccccaaaagttaattgttggcaagaaccaatgaacccagctaattggaaggaagagcattttgttatcgtctctttaactggttggggtctggttttctatggcggatacaagttcttaactaaaggcaaaggcaagaaagaagagaacacagtggaaacggcaaaaaaaatgaggttggagcttttaattttta

SEQ ID NO: 44271 - DNA, 457 bp, Gossypium hirsutum
  Clone ID: LIB3189-005-P1-K1-G9
cttcactcacgtccttcacttagcggctcaggccggcgtacgttacgccatgcaaaacccacagtcgtacatcagctccaacattgcaggctttgttaacttgctcgaagtagccaaagcagccaatcctcagccatccattgtttgggcatcatcgagctccgtttacggcctcaacaccgaaaacccattctccgaacgcgaccggacagaccaaccggctagcctttacgccgccacaaagaaagccggcgaagaaatcgcccacacttacaaccatatctacggtctttcccttacggggctaagattcttcacggtttacggtccttggggaagacccgacatggcttatttcttcttcactaaagacatcctacaggggaagtcgattgacatatacaagaacgcatgatcaggaaagaggtggcgcgtgacttcacctacatagacgacg

SEQ ID NO: 44272 - DNA, 463 bp, Gossypium hirsutum
  Clone ID: LIB3189-005-P1-K1-H2
caggttcctttcttttctgtcgatccatctccaaagttttattgcttaaggatcctttcaatcaggggcggatgtaaagcctttaggcttggcacttggtgcccatgtgtgttccagagggatgttagcctacaagctaggcagttgatgcccaatttttgtagattaaggtttgtggaaatggacgatcgaatcaactcaaagaatcattctatccagatatcttttggttattttttatatgtttatctttgggttatatggcatgtaataggtgtgttttgttaatgttttgaatatttactacatgtgttacatatgagattgatccaaagatgattaagcttagtattagcttgcttgtgtatgtgcctttaatcatgggtgaatatggtcatataaaattgttttggtcattggatataaacgttatgtaaggatttgaattatggtatgaatgaat

SEQ ID NO: 44273 - DNA, 122 bp, Gossypium hirsutum
  Clone ID: LIB3189-005-P1-K1-H3
ccatatccttatgactagctatattagtatttaagttttatttctttcacccccacatttccaaacctaaaacaatgcttggaaaggaaaggctgttgcaatgataaaaccaatacacgatc

SEQ ID NO: 44274 - DNA, 377 bp, Gossypium hirsutum
  Clone ID: LIB3189-005-P1-K1-H7
gcttctcttcctttcatcttcttcttatctttctttataatctccacaacattgacgtcagccggcgccgccgccgccaccatcaaactctccctctctcccttccctcacccttcttcctcccatccttaccaaattctcaacaacttagtcacttcttctgttgcaagagcccaccacctcaaacaccccaaagccaaggccgataatactacctcttctcttctcagggcttccctatttcctcacagttatgggggctacactatctccctcaaatttggaactccgcctcaaacccttcctttcattatggacactgggagcagcctctcctggttcccttgcacctctcgttacctttgttcccaatgcgc

SEQ ID NO: 44275 - DNA, 457 bp, Gossypium hirsutum
  Clone ID: LIB3189-005-P1-K1-H8
accacaactacagcgaagagagaaaaagggaaaaaagcgtcgtcgtttttggttcttcttcttcttcttcttcttccctctctctctctctcttactctgaagctcctcttcgttctttcatttactcagtattgtaaaagatggccgacggtgaggatattcaacccctcgtctgtgataatggaactggaatggtgaaggccggttttgctggtgatgatgctccaagggcagtttttcccagtatcgttggtcgtccccggcacactggtgttatggttgggatgggtcagaaggatgcctatgtaggagatgaagcacaatctaaaagaggtatccttactttgaaatatcctattgagcatggtattgtgagcaactgggatgatatggaaaagatctggcatcatacattctacaacgaactccgtgttgctcctgaggagcaccctgtgc

SEQ ID NO: 44276 - DNA, 315 bp, Gossypium hirsutum
  Clone ID: LIB3189-005-P1-K1-H9
gtgcgatcctaggcatgggaagtacatggcatgctgcctgatgtatcgaggagatgttgtgcccaaggatgttaatgctgctgttgctactattaaaacaaagaggactgtgcagtttgttgactggtgcccaactggtttcaaatgcggtattaactatcagcccccaactgttgtacctggaggagatcttgctaaggtgcagcgagctgtttgcatgataagcaataatacagcagtggctgaggtgtttgcacgcattgaccacaagtttgatctcatgtactcaaagagagcttttgtgcattggtatgt

SEQ ID NO: 44277 - DNA, 338 bp, Gossypium hirsutum
  Clone ID: LIB3189-001-P1-K1-A1
gcaatactcgaacaagaatgcggcccatgtcatcaagataccctgggagtatacagcaatcttgcagcaacttatgatgctatgggaagggtcgaagatgcaatcgagatattggagtatgtactaaaattacgagaagaaaaacttggaatagcaaatcctgattttgaagacgaaaagaataggctggctgagctcctgaaagaagcgggcaggccacgcaacagaaaagcaaaatcactggaaaatctcatcgatccgaactcaaagaggacggcgaagaaaagaggggacgaaaaaaatggggtttcagaaatttgaaaggaaggcatttccca

SEQ ID NO: 44278 - DNA, 393 bp, Gossypium hirsutum; identical to SEQ ID NO: 40787
  Clone ID: LIB3189-001-P1-K1-A10

SEQ ID NO: 44279 - DNA, 391 bp, Gossypium hirsutum; identical to SEQ ID NO: 40788
  Clone ID: LIB3189-001-P1-K1-A11

SEQ ID NO: 44280 - DNA, 395 bp, Gossypium hirsutum; identical to SEQ ID NO: 40791
  unsure (1)..(395): unsure at all n locations; Clone ID: LIB3189-001-P1-K1-A12

SEQ ID NO: 44281 - DNA, 343 bp, Gossypium hirsutum
  Clone ID: LIB3189-001-P1-K1-A2
ggaagatgcttacgatgactgcaacactgtaaatgccatatctactttgaccaccgggccggcaaggattacccttaacaagaccggtgaccattacttcatttgcagtgtccccggtcattgttccgccggccaaaagctcaaggttgaagttcgaactggtaacaccaccggtggcgttgctccgtcgccgcctgtaacttcaagcaccaccacttttacagtgggtgactctactggttggcgtgtccctaccaatgatgatttttatgaagattgtgctgatcataaacacttcgttgttggggatgatttaatgtttaattttacgaccttacagctt

SEQ ID NO: 44282 - DNA, 333 bp, Gossypium hirsutum
  Clone ID: LIB3189-001-P1-K1-A3
atccaaccaaacatgcaacagggtaccggaggatctgagacggaggttacttgggaggatcaacagaatattaacaagtttggaagattaaacaatcgatttcatgagcttgacgatgaaatcaaggttgccaaggaagcaattgataacctggaggatgctagtaatgagttgattttaactgatgaggaagtagtacggttccaaatcggagaagtctttgctcatgtccccaaagaggaagtggagaccaggatagaagagatgaaggaagtgaatagcaagaacttggaaaagctcgaggaggagaaagaatcggttctggcacaaatg

SEQ ID NO: 44283 - DNA, 198 bp, Gossypium hirsutum; identical to SEQ ID NO: 40789
  unsure (1)..(198): unsure at all n locations; Clone ID: LIB3189-001-P1-K1-A4

SEQ ID NO: 44284 - DNA, 53 bp, Gossypium hirsutum; identical to SEQ ID NO: 40790
  Clone ID: LIB3189-001-P1-K1-A5

SEQ ID NO: 44285 - DNA, 184 bp, Gossypium hirsutum; identical to SEQ ID NO: 40794
  unsure (1)..(184): unsure at all n locations; Clone ID: LIB3189-001-P1-K1-A6

SEQ ID NO: 44286 - DNA, 383 bp, Gossypium hirsutum
  Clone ID: LIB3189-001-P1-K1-A7
ctttttgcatcttcgaaatatcctgaaagattttaaagatttcccttcactttttcttttgatcaactccattcttcagatcaccttacattgactgatcggagaatctgtgttcgtttccgaatttgcggcttttataatttggggaagaagagaattgcatgaatataaagttgtggtgtttgtactagatgaagggagcgcaggcgtggcgactaggcagcatgggtgatatgcaaatcttgcctgggtctcgccaccgccctcctttgaagaggccgatatggattatttcattggttcaattagttggccttttcctagtttgtgcttatatctattcaccacaaggcagtgctgcttgttatgtattttcttcaaga

SEQ ID NO: 44287 - DNA, 384 bp, Gossypium hirsutum
  Clone ID: LIB3189-001-P1-K1-A8
attatttcttttgtttccgctggtattctgatacagtttaaaagggaacttgaatatgagcaaacaatgcgattgtgggaagtattgtggacgcattatttgtcggagcacctccatctgtatgtgtgcgtagctatcttgaagcgctatcgagggaagataatgggagagcaaatggactttgataccctcttgaagttcatcaatgagctgagtgggcagattgagcttgatgcgatcctcagggatgcggaagctttatgtatatgtgcgggtgagaatggagctgcctgcatcccacctggaactgtaccttctttgccagttgacaatggtttattctatagtcagctagatgatgaatcactgtaaattgatttacca

SEQ ID NO: 44288 - DNA, 88 bp, Gossypium hirsutum
  unsure (1)..(88): unsure at all n locations; Clone ID: LIB3189-001-P1-K1-A9
ggnganccgaccctcncancattttattcactttatttaggcttcctattggggggcttttttcttttttttgggtgagtctcaaaga

SEQ ID NO: 44289 - DNA, 393 bp, Gossypium hirsutum
  Clone ID: LIB3189-001-P1-K1-B1
ccacgcgtccgtacccccgctgctcttaaccccttccgcttcgccatggcatcagagaagaagctttcgaacccaatgagggagatcaaagtccagaaacttgtcctcaacatctccgtcggtgagagcggcgatcgtcttacacgtgccgccaaggtcttggaacagctcagtggtcaaaccccagtcttctccaaggctagatacactgtgagatcttttggaattcggcgtaatgagaagattgcttgttatgtgactgtgaggggggagaaagctatgcagcttcttgagagtggtttgaaggttaaggaatatgagcttttgaggaggaacttcagtgatactggctgctttggattcggtatccaagagcacattgatcttggtatc

SEQ ID NO: 44290 - DNA, 359 bp, Gossypium hirsutum; identical to SEQ ID NO: 40796
  Clone ID: LIB3189-001-P1-K1-B12

SEQ ID NO: 44291 - DNA, 153 bp, Gossypium hirsutum
  unsure (1)..(153): unsure at all n locations; Clone ID: LIB3189-001-P1-K1-B2
ccttccatcgcgagcggccgttcctttttttnntttatttgaaagttcaaaccaagtattcagtgcattatcataattttttatatatggtatttttcaatatgaagccagaatttattccaaacctaacacatcanataaaaaaaaaaatat

SEQ ID NO: 44292 - DNA, 388 bp, Gossypium hirsutum
  unsure (1)..(388): unsure at all n locations; Clone ID: LIB3189-001-P1-K1-B3
cttagaaggtgtcttaataaacgccttctttcttcttcttctccctttctttgctgtggcgaatttttcttaagcgagaatgagagagtgcatttcgattcacatcggtcaggccggtatccaggtcggaaacgcctgctgggagctttactgcctcgagcatggaatccagcctgatggtcagatgccaagtgacaaaactgtcggaggaggtgatgatgcttttaacacctttttcagtgaaactggtgctgggaagcacgtccctcgtgccgtctntgtggatcttgaacccactgttattgatgaagtgagaactggtgcttaccgccagctcttccacccagaacaactcatcagcggcaaggaagacgcagctaacaacttt

SEQ ID NO: 44293 - DNA, 133 bp, Gossypium hirsutum; identical to SEQ ID NO: 40795
  Clone ID: LIB3189-001-P1-K1-B4

SEQ ID NO: 44294 - DNA, 397 bp, Gossypium hirsutum
  Clone ID: LIB3189-001-P1-K1-B7
aaaggtaccattccaatacctgtgtgttaaaacagtgaaacaagcagaggaaagatctgggtgctctcggatggcgcctaagttcaaatgagctgcttcagttagattatgcggctcaggaatcaccacgaagaatgatccaaaacattttccagacaaattaaacagtttagaatcgcaacattttcacttggatatcatatggaattttgatccaatgccatagcgttcttgaggaaacagaacgattatgggggcacaaactaaagcaatcagagatcatgggggcagaatttctatcaactaaaagagcctggggattccttaaatccggcatatgctaacagagagaaaaaaagggagggttggagcaaatatgtagccaaatttgaagctg

SEQ ID NO: 44295 - DNA, 341 bp, Gossypium hirsutum
  Clone ID: LIB3189-001-P1-K1-B8
gaaagaattagggggtaaagttaatttagcttattgttaattgtacaagcccaaatttacccgggctcataccagtaaaacaaaaaaagaggcccaattacaatgttgactcaacaggctcaaagtctttagcccaaactgctaaggcccattacaaaccagatcagcccaacaagcccattacaaacccaatcctgaacaaaacctaaacggcccaaatggcccaacacaaagaagaaacagaaaactccaacccgcaccttagggccttctgcccttctgccaccgttcctttgcttcttttatgaaataaaaaaaatattttattctttttttttttt

SEQ ID NO: 44296 - DNA, 345 bp, Gossypium hirsutum
  unsure (1)..(345): unsure at all n locations; Clone ID: LIB3189-001-P1-K1-B9
gagaaggtgggcttacagggaagggtttccccaatagtatctcgatataaagctctttgccattggcaggctttccatggcaggaaagtatcgatttatgggaatataataggttttccttttttttctttttgggtgtgtaaacttcaaccaaaaggtaagttagagatgtcaaagaataaattagattcattgcttgtgcagaattagataaataaataaaggcagtttctgaatatgatcggagaatatagggaagagtggtccaagtggagaggatgacttagggatgccaactttatttggatntaatccgataattctagcattttttttttcgatttt

SEQ ID NO: 44297 - DNA, 396 bp, Gossypium hirsutum
  Clone ID: LIB3189-001-P1-K1-C2
gtttgttgttccacttcaccgctccttctctacaggcatccacactacccttatcgggctcccaaccccaccgcgcctgacaaaccctcctcccattcctcacgcctctaaagtcaactgctacttcagttttggtttcatagataaagaatggcaagcgcgtgcttttcgacatcgccctcgtctcttcgattcagttctttcctcttctctccgaactcaagcaccaatgtcgattctaataagttgtctcttcctttccatccccttcgtcccaggaaattgaagaagtttctcagtaatcaaaagaatgcggtgaattatcagccaaaagctgtttacacaggtgagttttgggctcctccgacaacttctcgacagggaatttggtcaata

SEQ ID NO: 44298 - DNA, 326 bp, Gossypium hirsutum
  Clone ID: LIB3189-001-P1-K1-C3
gaccacttcttcccttccattttactttgttttagttgccataacgtcaccttccaggcaacccacaatgaggcaacaatatgtcttcactactctcacgttgctcatcctgttttccctcagttgttcaacaacattagcccaatctccggcactggccccggcaccttctggcccgacaaacgtcaccaagatcctcgaaaaagccggtcaattcaccctcttcattcgtcttctaaagtccactcaagtggccaaccagctgctcggtcagctcaacaattccaacaatggtatgacccgttttgcaccaacggacaatgctt

SEQ ID NO: 44299 - DNA, 350 bp, Gossypium hirsutum
  unsure (1)..(350): unsure at all n locations; Clone ID: LIB3189-001-P1-K1-C7
atctgacggaaatgatgttttccaggcctcaaaatggaggcagccactgtggttggatcttctatgtctctacatcgaacttcatgctccgctgccagatccgcccttttagctgccaatggcccgctctttccacgtttcgctgctaaccctcgctcctccttctcgatcaagctttattcttcagtttcatattcaaaatcacggaataggagaatgggtttggggggtaggagaggcatggtggtaaaggcgtnttcatctnctgactcanctgaacccaatgctcaaattgcgtcacttcggatggaatctccaattggccagtttttgtctcaaattttgataag

SEQ ID NO: 44300 - DNA, 376 bp, Gossypium hirsutum
  Clone ID: LIB3189-001-P1-K1-C9
gtgggaagctgaagctgaagggaaaagccttggatgttaaggctggtggaatcaagaagaaaaagaaacataaggagcaaattcaacatgatgaccaaattacccagaacgatccctctgatgccgcttctgctggtgaaaccacggaagtttctgttgatcccaatgaagaagatatcaacaatgcagagaagtcaagtggggagaaggcggctcctcattatgatgatcatcttaccccagcagagagacgatacattgagcagagggagcaactcgacgttcataggttggctaagcaagctaataaatctcaccgtgatagaatccaggatttcaatcaatatctggcaaacatgagtgagcattatgacat

SEQ ID NO: 44301 - DNA, 69 bp, Gossypium hirsutum
  Clone ID: LIB3189-001-P1-K1-D1
gccttttgattcttcccttctcatgtttttggttttggtgcattaactatcctccagggaacttaataa

SEQ ID NO: 44302 - DNA, 396 bp, Gossypium hirsutum
  Clone ID: LIB3189-001-P1-K1-D2
ctctccataaatctctcactcaacgcagagcgaataggcggagacttccaagaatctatcgcatcagctaatcacgctctaaagaatggatcaggttcaacacccatctatcatgcagaaggtagcaggccagctccttcgttctagccattctcaagattttcaaggttataatgggtctttcaggagtcctgctctataccaaaggcgtgctgcatatggcaattactccaatgctgctctgcagcatcctgtccgggcttttggagacctgtctatggttccatcaacagcttctgctatttgcgttcaggctcctgctgagaaaggatttagcggctttgctattgatttcctcatgggtggagtttctgctgctgtatcaaaaacagctgc

SEQ ID NO: 44303 - DNA, 393 bp, Gossypium hirsutum
  Clone ID: LIB3189-001-P1-K1-D3
gtcaaggccttgctcatggacattgtggtcggtggaactgatacaacatcaaccatgatggaatggacaatggctgaactaattgcaaatcctgaagcaatgaaaaaggtgaagcaagaaatagacgatgttgtcggttcggatgccgccgtcgatgagactcacttgcctaagttgcgctatctagatgctgcagtaaaggagaccttccgattgcacccaccgatgccactccttgtaccccgttgcccaggtgacttaagcaacgttggtggctatagcgtaccaaagggcaccagggtcttcttaaacatttggtgtattcagagggatccacagctttgggaaaatcctttagaattcaagcctgagaggttcttgactgatcatcaa

SEQ ID NO: 44304 - DNA, 103 bp, Gossypium hirsutum; identical to SEQ ID NO: 40802
  Clone ID: LIB3189-001-P1-K1-D4

SEQ ID NO: 44305 - DNA, 395 bp, Gossypium hirsutum
  Clone ID: LIB3189-001-P1-K1-D7
gcggaggatcaaattaagcggctggcgaaggatccgcaagtcgttccggctctcgttcagcaccttcgcactggcaagactcccaacgtccgtcaactcgccgcagttctcctaaggaagaagatcactggacactgggctaagctcgctcctcaggttaagcaacttgtcaagcagtccctcattgaaagcatcacaatggaacatagtccaccagtgaggcgagccagcgcgaacgtagtgagtatagttgcgaaatacgctgttccggctggagaatggcctgatctgctgccgtttctgtttcagtgtagtcaaagtccacaggaagatcatagagaagtggctttgatacttttcagctctttgactgaaacaattgggagcacctttag

SEQ ID NO: 44306 - DNA, 390 bp, Gossypium hirsutum
  Clone ID: LIB3189-001-P1-K1-D8
taggaggtaagctcgggaaagatgtctatggggttcttagagttgattatgacggtgatatggatggtgttggaggggtggaagccgtggcagaggggattaccgtcgatgaattgaccggtgatgatggtacgagctcatttaaggaattgataccttttaatggcgtcttgaacttggagggtcttcacaggcctcttttgtccatacagttgacgaagttgaaagatggtgttgcaatggggtgtgctttcaaccatgccatcctcgacggaacctccacttggcattttatgagctcttgggctcaaatctgtaacggtacttcgagctccgtcgttgtgccgccgtttcttgatcggaccacagttcgaaacacccgcgtgaagc

SEQ ID NO: 44307 - DNA, 385 bp, Gossypium hirsutum
  Clone ID: LIB3189-001-P1-K1-E1
cccacgcgtccgatttttctctcctataaataacacagccgcagtgaggaaccgaatggcggggaaaaataacctggtccttttttttttgttcaaaagcgaagccctaactcgcatgctgttcggatcttaatcgtcgaagatccgattcatatctatctctgatctgatccaaaacgaaaccacccggcctctgagaaatgacgcgtcgctgctcgcattgcagccacaacgggcacaactccagaacctgcccgaatcgtggtgtcaagttgttcggagttcggttgactgacgggttggttcggaagagtgccagtatgagtaacttatcccaattcgccgggtccaattctgccgggcataacgggaatgggtcgggttc

SEQ ID NO: 44308 - DNA, 407 bp, Gossypium hirsutum
  unsure (1)..(407): unsure at all n locations; Clone ID: LIB3189-001-P1-K1-E2
acccttccgttgatgcttaatgaaaatgcaaagaatttacttacgagacaactgtataaagacgcacgtggaagtacttaccatgggcggagggaggctttctctttttgtgatcccaaggtccttgagtttattgacaatgtaccgatactgcanatagacatggtgtggtgctatttcttgcttcgagacatcagttggctttcagttgcaggaatacgccttgaaaaagccagagaaggacttgagcgttgtcacgggaaggatttttcacgtgttagactccttcaagctggttgccagccagagcttgcactgtggacatatgaggttggagttgttggaagggggtggggcatatcataatggtcagttggataaatctaaaaaggcactgacatctgcac

SEQ ID NO: 44309 - DNA, 405 bp, Gossypium hirsutum
  unsure (1)..(405): unsure at all n locations; Clone ID: LIB3189-001-P1-K1-E3
ccgaagaacaaaaaccacttggtatcaaaagaacccaaaatcaccatcacaaagcgagcaagggctcgacttctccaaagagagaaattgnaaaagatggttcaagggaagcagagaaatacanaatccgaagatgaagaacataaaaagaaggtcgaggcaaagaatgcattggaaaactatgcatacaatatgaggaacacagttaaggacgaaaagattggtgccaaactcccagcaactgataaaaagaagatcgaagatgctattgaacaagccattcaatggctagacagcaaccaactcgccgaatccgatgaatttgaagacaagatgaaggagttggagagtatttgcaaccccatcattgctaagatgtaccagggtgccggcggtgacatgggt

SEQ ID NO: 44310 - DNA, 392 bp, Gossypium hirsutum
  Clone ID: LIB3189-001-P1-K1-E7
agagcagtgaagaaagatgatcaaaatgggttttattgttttggccttgatggtgggttccgccgcgacggtggtgacggcggctgacgagagtgggttagcgaatgagtgcagcaaagatttccagagcgtgatgacttgcttaagctttgctcaaggaaaagcagcgtcgccgtcgaaggagtgctgtaattcagtggcggggattaaagagaataaacccaaatgtttgtgttatattttgcaacaaacacaaacctctggtgctcaaaatctcaaaagcttaggtgttcaagaagataagctgtttcagttaccatcggcttgtcaattgaagaacgctagcgtcagtgattgcccaaagctttttgggttatctccgagctcaccag

SEQ ID NO: 44311 - DNA, 394 bp, Gossypium hirsutum
  Clone ID: LIB3189-001-P1-K1-E8
gaacggtatgcctgtaactgttggggtcggaaatatcatttccgacgaaggttttgcattgttgatgtcaccagcggcagccgattccgtctggaaaactcttctatctcaaggtgctattcctttaggttctaatgcctgggaaaagctaaggattacacaaggtagaccagctcctggaaaggaacttaccaatgactttaatgttctggaggctggtctttggaactcaatttcattgaacaaaggctgttacaagggacaagagacaatatcaagactcattacatatgatggagttaaacagagactgtggggtattcatttatcagcacctgcagaaccaggcagccccattacagttaatgggaaaaaggtgggaaagctgacaagc

SEQ ID NO: 44312 - DNA, 395 bp, Gossypium hirsutum
  Clone ID: LIB3189-001-P1-K1-E9
cggacgcgtgggcaaaaatggctttcagagggaaggagatgatgaagctgttgaagaaggtgggggagaaaaacctagcgcatggagttaaggaacagcttcaaaaatccattccagacagcaaggtcgtcatgaaccgcgccaaacgcggcctttacgctggccgtcacatccagttcggcaaccgtataagcgaagacggtggaaacaaatcgaggaggatttggaagcctaatgtacaagagaagcgtctatttagttatatcttagatcgccatattcgagtcaaagtaaccactcatgccctccgttgcattgacaaggcaggcgggatcgatgagtacctgctgaaaactccctaccacaagatggatacagaaatgggtctgttctgg

SEQ ID NO: 44313 - DNA, 392 bp, Gossypium hirsutum
  Clone ID: LIB3189-001-P1-K1-F1
tcggccaacccttccgccaacccgtccggcttttggttaagcagttgaaggttcattcttccaatccttttttaatgggctggttaaagaaggcaaggtttttggtccatttgggccaggaattaattggcctccaactgtttcggttatggttcaaaaggggggggtggatctttttttttaccaaaccttttttatagctattacacttttcataaactggaaatttccagcctattaagtacttgcagccagatttcctgaagcatcccactgttacagcattgttcacccttaatgattgagatgttggatgctgctattgaggatgcaattgaacgtggtagctggcttgaatctctttctttattggccacatcttttggagccca

SEQ ID NO: 44314 - DNA, 402 bp, Gossypium hirsutum
  Clone ID: LIB3189-001-P1-K1-F2
tcggccacgcgttcggggacccctggggtgtaaatttcgttcccaatcaacgcctttgtggatcgcataataagccatgtcgaggagaaaggttagggagccaaaggaggagactacaaccttgggccctgctgtacgagacggagagcatgtttttcggtgttgcccacatttttgcatcttttaatgacactttcattcatgtgactgatttgtctggaagagagactatggttcgtattacaggtggtatgaaggtgaaagccgacagggatgaatcttcaccttatgctgctatgcttgcagcacaagatgtttcccagagatgcaaggaacttggaaacacggccctccacatcaaattacgtgccacaagaggtaacaaaaccaagacccctggtc

SEQ ID NO: 44315 - DNA, 162 bp, Gossypium hirsutum
  Clone ID: LIB3189-001-P1-K1-F3
agccttccgccaacccttccggaaaccaaaaaataatgaccaggaaaatttctgagcttccttttggttattttgtagatctttgtggtaattcttttaaggtttcctacacttctgtaaatttaaattaaaactgaatttatctaaagggttcaaaaggaa

SEQ ID NO: 44316 - DNA, 395 bp, Gossypium hirsutum
  Clone ID: LIB3189-001-P1-K1-F7
gaatagcccaagtgaaagttcctcacaatcatttgtcattcaaagaggggaagctcaaaacagtgatcaatgagaaaagggcaagtgaatgtgttctttttgttactgtttttgagtctctcttcagcttctgatcagaaatggaggaaagcaatgatgtcagcttacaatggttcttcttcttcttcttccatgatgatgaatagagttgggtcctccatcctgttcccaattcatggaaatgtgtatccaacagggtactataatgttaccatcaatataggtcaccctcccaagccttactttcttgattttgatactggaagcgacctcacatggctccaatgcaacgctccatgcgtccattgtattgaggcacctcacccgctttacca

SEQ ID NO: 44317 - DNA, 347 bp, Gossypium hirsutum
  Clone ID: LIB3189-001-P1-K1-F8
aaaaaaacgggaacatagcattaaaaaaaccagaacatagcattcattaccggaaacgacgttgaaagtgatgtacacaaatatgagcaagcactccgcaaattttggaaaaatgttgaaaaactcagctttcataccataaattttcatcaacttaaataggtcaaagcataaagcatcatgtgctgaaggcagcgccaagaatttactgaggatttgggggtcggctattcgcagcagaaaccctggagccccactccaacagctctttgctagtatcatccttgtgaacgatcacttcaatgaagcataagcagtccttcttcgctcctgttgccgtctcaatt

SEQ ID NO: 44318 - DNA, 395 bp, Gossypium hirsutum; identical to SEQ ID NO: 40776
  Clone ID: LIB3189-001-P1-K1-F9

SEQ ID NO: 44319 - DNA, 393 bp, Gossypium hirsutum; identical to SEQ ID NO: 40778
  Clone ID: LIB3189-001-P1-K1-G1

SEQ ID NO: 44320 - DNA, 303 bp, Gossypium hirsutum; identical to SEQ ID NO: 40779
  Clone ID: LIB3189-001-P1-K1-G2

SEQ ID NO: 44321 - DNA, 92 bp, Gossypium hirsutum; identical to SEQ ID NO: 40783
  Clone ID: LIB3189-001-P1-K1-G3

SEQ ID NO: 44322 - DNA, 231 bp, Gossypium hirsutum; identical to SEQ ID NO: 40777
  Clone ID: LIB3189-001-P1-K1-G7

SEQ ID NO: 44323 - DNA, 393 bp, Gossypium hirsutum; identical to SEQ ID NO: 40780
  Clone ID: LIB3189-001-P1-K1-G9

SEQ ID NO: 44324 - DNA, 380 bp, Gossypium hirsutum; identical to SEQ ID NO: 40784
  Clone ID: LIB3189-001-P1-K1-H1

SEQ ID NO: 44325 - DNA, 385 bp, Gossypium hirsutum; identical to SEQ ID NO: 40785
  Clone ID: LIB3189-001-P1-K1-H2

SEQ ID NO: 44326 - DNA, 393 bp, Gossypium hirsutum; identical to SEQ ID NO: 40781
  Clone ID: LIB3189-001-P1-K1-H7

SEQ ID NO: 44327 - DNA, 396 bp, Gossypium hirsutum; identical to SEQ ID NO: 40782
  Clone ID: LIB3189-001-P1-K1-H8

SEQ ID NO: 44328 - DNA, 391 bp, Gossypium hirsutum; identical to SEQ ID NO: 40786
  Clone ID: LIB3189-001-P1-K1-H9

SEQ ID NO: 44329 - DNA, 378 bp, Gossypium hirsutum
  Clone ID: LIB3189-002-P1-K1-A2
caataattctctttctgtttctcttttttaaacatgggtatgggtttaagggggggatttcttttgattttagcttgtgttgttacactttccctctcagttttggggcgacctgccactttccttgaagattttagaatcacttggtctgattctcatattaggcaaatcgatggagggagagccatccaacttgttctcgaccaaaattcaggctgtggatttgcttctaaaaggcagtatttgttcggacgtgtcagcatgaaaatcaagctcatccccggcgactccgccggaacagtcaccgccttttatatgaattctgttacagatgctgtgcgagatgagctagacttcgagttcttgggaaaccgtacc

SEQ ID NO: 44330 - DNA, 379 bp, Gossypium hirsutum
  Clone ID: LIB3189-002-P1-K1-A3
ccttacccttccaatttcttgttctgtattttgaaaaccgaatatcaagggctctgtgttcttcttttctacttagttaaagaaaagagatgcagcacgacgaggtgatatggcaagtcatcaggcacaagcactgcagtttcatgtccaaaatcactactggtattttctgtagaaacccttataacgtcactgggatctgcaatcgtagttcctgccctctcgctaacagtcgctacgccactatccgtgaccacgatggggtcttttacttatatatgaagactatagaaagagctcataaacccaatgatttatgggaaagagtaaaattgcccagaaattatgagaaagcacttgaacttattgacaagcatct

SEQ ID NO: 44331 - DNA, 381 bp, Gossypium hirsutum
  Clone ID: LIB3189-002-P1-K1-A8
accatcttcctttttatcagatcctttccattttccttcgctacttccttctaggctgcattcccatggagttttgagttgtcgcacgctttacaagtgtgtgatggattccgataccgtatcgtccgcgggtgggcttgaggttgcccatcaaaatggtgtttatccgtccggggatgcgtatgacagtggggttacagataatgcgaacgggaccattgcggaaagtttcgagacttgtttatataatgaaatggatgacaatggagcaactgaacaagctagagaagggccaaatgagtgtgtggaaagcagtggattgattgattctaaggaagggggagtcaaagataatccgaaacaatccgaacctgataagtt

SEQ ID NO: 44332 - DNA, 381 bp, Gossypium hirsutum
  Clone ID: LIB3189-002-P1-K1-A9
gttatttggcaatgaggagtgagctagatgcaactgatctcatcgcatctgacgtggcgagatctaatctttgctactggagaagcttgctaaccatgctatcaaattgggttcttggggatttgggaccacccttcttgaatggatcgcttccttcgctgcaatttatctattgatattggaccgtacaaactggaaaaccaatattcttacagcactgttaatcccatacatcttcttgagcctgccttccttcctgttcaacatcttgaggggagaagttgggaaatggattgcttttattgcagtcgttttgcgcttgttcttccctacacgtttcccagattggctggaacttcctggagcattgatacttctaat

SEQ ID NO: 44333 - DNA, 357 bp, Gossypium hirsutum
  Clone ID: LIB3189-002-P1-K1-B1
cccacgcgtccgaaaatcacttcatcatggcttcctcgtgtgcttcctctgccattgcagctgttgccatctccacaccaagttcccagaagaatggatcactcttgggaagcacaaaagcttcttttcttagtgggaggaaactgaaggtgaacaactttacagcaccagttggagcacgatccagcactacagtttgcgcagttgctgagcctgataggcctctgtggttcccaggcagcacccctcctccatggctagatggcagtttgccaggagattttggctttgatcctctaggtcttgcatctgatcctgagagcctgagatggaatgtccaagcagagcttgtgcact

SEQ ID NO: 44334 - DNA, 255 bp, Gossypium hirsutum
  Clone ID: LIB3189-002-P1-K1-B2
ctcacgcgatcgtatatatgttcatttttccgtcactgactcataccatttgggtgtatagctttgctacggggatcagtctttcaacttcccaccgttctaaaaccttagacttcctcatgttccatcgaattcagaattttttggcctcaagctatctcattcttgcttttccacaaaaaccttttcttctttttcacgtcgggcgcttcattttttccaaggtgactaaaggttcaaagccacctaatatta

SEQ ID NO: 44335 - DNA, 378 bp, Gossypium hirsutum
  Clone ID: LIB3189-002-P1-K1-B3
atttgatctttctcttccaaaatcaattccaaaaagagagaaaatcccaccaaaaaaatggcgaattctaatggcaacaacaacgacgagcaccatgaatcgagtcctcttttgagcaaacaagtggcagaccaagatttgaaggaaaaacctagtggtaaaaaggcaaaagaagctgccgccgaggtgccagctcatccggtagttgctaccggagatgggtttgggtggacggctgatgggttgccgttggtccaccggagtgtcgtcggagaacccttgggtcgatctcaatggaactcatctctccttgcttgtcttggccgtaacgatgaattttgcagcagcgacattgaagtctgtttccttggaagcttg

SEQ ID NO: 44336 - DNA, 373 bp, Gossypium hirsutum; identical to SEQ ID NO: 40833
  Clone ID: LIB3189-002-P1-K1-B4

SEQ ID NO: 44337 - DNA, 349 bp, Gossypium hirsutum
  Clone ID: LIB3189-002-P1-K1-B7
atcatattttcaaaacgcataaccattattgtctttcccctttaaccactctcaccggggggaccacgacgacggggacgaaccaccccccctttacccttcttcgggttataccttcaacaacccttcaccacccttatacgggatccttcatgcataatacttactttaccttttttagcaagatccaacacttccgtttgcgcaactgctgagcctgataagactctgtggtttccaagcagcacccctcctccatggttagatggcagtttgccaggagattattgctttgatcctctaggtcttggatttgatcctgatagcctgtgatggaatgtccaatcat

SEQ ID NO: 44338 - DNA, 381 bp, Gossypium hirsutum
  Clone ID: LIB3189-002-P1-K1-B8
ctaacttttagattccctttccattgcactgctctttctttctatagaattagtcactcctgttctagatgaagggtctctccccaattcttgcttgcctagcgcttgctgtggtggtaagccatgctgctctctcacctgagcaatattggagctataagctgccaaatactccaatgccaaaggctgtcaaagaaattctacatccagaactgatggaggagaaaagcacctctgtaaatgtaggaggtggtggtgtaaacgtcaatacaggaaaagggaagcctgggggtgacacccatgtgaacgttggaggcaaaggagttggagtgaacacgggaaagccagggggtggcactcatgtgaatgttggagaccctt

SEQ ID NO: 44339 - DNA, 331 bp, Gossypium hirsutum
  Clone ID: LIB3189-002-P1-K1-C1
cccacgcgtccgcccacgcgtccgaactcctttttttacctcttcacattctccatttcacagggttctgatcatgttggggaagaggccccggccaatgatcggaaagttgtcggagttgttggtctcgagaggccttacggtggcatatttggacaccaccggaagccctagaggcccattagacatgaagatgatgcattcatcaccaagaggcttaaaaaactatgatcttggtggtgttggtcttggaattgtattggctcttgataaattcaacgaggttgttgtacgtgaagttttcccaaacacaccgtttgtaccctcaatt

SEQ ID NO: 44340 - DNA, 372 bp, Gossypium hirsutum; identical to SEQ ID NO: 40837
  Clone ID: LIB3189-002-P1-K1-C11

SEQ ID NO: 44341 - DNA, 377 bp, Gossypium hirsutum
  Clone ID: LIB3189-002-P1-K1-C2
tacaaacaccccctccctctttcattgtgatctccgctctcttctctctttcagatcgaaccaaaaaaacccgagcccaatggcttcttcaactggattttcactcaatttctcccctctttcaacttctttgaagcacaaccaggtacctcttcatgggatctctaatgtcaacttacttagtctcccatctcttagaatccgaccgggacctatgcgcctccgggtttcttgtgcggccaaacctgagacggtggacaaagtttgtagcatagtgaggaagcaactagcactaccagaagattcttctgttaccggagaatctaagtttgctgcactcggagccgattctcttgacacggtcgagattgtgatgg

SEQ ID NO: 44342 - DNA, 375 bp, Gossypium hirsutum; identical to SEQ ID NO: 40834
  Clone ID: LIB3189-002-P1-K1-C3

SEQ ID NO: 44343 - DNA, 373 bp, Gossypium hirsutum
  Clone ID: LIB3189-002-P1-K1-C7
cctcaagtgcatggctggcttccccaccagaaagaccaacaatgacattacctccattgctagcaacggtggaagagtgcaatgcatgcaggtgtggccaccagttggcaagaagaagtttgagactctttcctacctgccagaccttgatgatgcacaattggcaaaggaagtagaataccttcttaggaagggatggattccttgcttggaattcgagttggagcacggtttcgtgtaccgtgagcacaacaggtcaccaggatactacgatggacgctactggaccatgtggaagctgcctatgtttggttgcactgatgcttctcaagtgttgaaggagcttcaagaggctaagactgcataccccaac

SEQ ID NO: 44344 - DNA, 374 bp, Gossypium hirsutum; identical to SEQ ID NO: 40843
  Clone ID: LIB3189-002-P1-K1-C9

SEQ ID NO: 44345 - DNA, 364 bp, Gossypium hirsutum; identical to SEQ ID NO: 40844
  Clone ID: LIB3189-002-P1-K1-D1

SEQ ID NO: 44346 - DNA, 185 bp, Gossypium hirsutum
  unsure (1)..(185): unsure at all n locations; Clone ID: LIB3189-002-P1-K1-D10
gtgaaagaacattatttnaaaaaaattcatttttgaaatgaaggagaaaatttatttttaccaattatacattgacatttttttctaaacaatattttaaaaaaaatatttttcgaacaaaaattttttcatactatcaaacatacctttcttaaatacatggttggggaatttgaactttaaat

SEQ ID NO: 44347 - DNA, 267 bp, Gossypium hirsutum; identical to SEQ ID NO: 40846
  unsure (1)..(267): unsure at all n locations; Clone ID: LIB3189-002-P1-K1-D2

SEQ ID NO: 44348 - DNA, 371 bp, Gossypium hirsutum; identical to SEQ ID NO: 40848
  Clone ID: LIB3189-002-P1-K1-D3

SEQ ID NO: 44349 - DNA, 161 bp, Gossypium hirsutum; identical to SEQ ID NO: 40845
  Clone ID: LIB3189-002-P1-K1-D7

SEQ ID NO: 44350 - DNA, 426 bp, Gossypium hirsutum; identical to SEQ ID NO: 40847
  unsure (1)..(426): unsure at all n locations; Clone ID: LIB3189-002-P1-K1-D8

SEQ ID NO: 44351 - DNA, 245 bp, Gossypium hirsutum; identical to SEQ ID NO: 40853
  Clone ID: LIB3189-002-P1-K1-D9

SEQ ID NO: 44352 - DNA, 107 bp, Gossypium hirsutum; identical to SEQ ID NO: 40854
  Clone ID: LIB3189-002-P1-K1-E1

SEQ ID NO: 44353 - DNA, 377 bp, Gossypium hirsutum; identical to SEQ ID NO: 40855
  Clone ID: LIB3189-002-P1-K1-E2

SEQ ID NO: 44354 - DNA, 376 bp, Gossypium hirsutum
  Clone ID: LIB3189-002-P1-K1-E6
cccacgcgtccggcagaacatattatcatttcctcttttttttttttttttttttttttggaggtttaacaaatggcaacaaccactgtgatcatgaccactctcccccaattcagtggtcttagacctcaattctcagctgcccctgtgaagaacttggttgctgtccaacaacctatgaggcccaaggggaagggtgctttgggagctcgatgtgactacattggttcatccactaatctgattatggtggcttctacaaccctgatgctgtttgctggaaggtttggattggctccatcagcaaacaggaaagccactgcagggctaaagctggaggtgagggacttaggcttgcaaactggtgaccctgctg

SEQ ID NO: 44355 - DNA, 356 bp, Gossypium hirsutum; identical to SEQ ID NO: 40856
  unsure (1)..(356): unsure at all n locations; Clone ID: LIB3189-002-P1-K1-E7

SEQ ID NO: 44356 - DNA, 375 bp, Gossypium hirsutum; identical to SEQ ID NO: 40857
  Clone ID: LIB3189-002-P1-K1-E8

SEQ ID NO: 44357 - DNA, 381 bp, Gossypium hirsutum
  Clone ID: LIB3189-002-P1-K1-F10
cccacgcgtccgcttttctctgcgagcattttccgctatggccgaagaatttgtgaagggcactgttcatcaaaacggcgtcgctgtcatcaccctcgatcgccccaaagctctcaacgccatgaacctagatatggatgtaaagtataaaagttatcttgatgaatgggaatctgatccaagggtcaaatgcgtactggttgatagtagctcgcctcgtgccttttgcgctggtatggatattaaaggggttgttgctgaaatacaaaaggacaaaaacactcctttagtgcagaaggtcttcactgctgagtattctttgatatgcaaaatttctgattacaagaagccatacataagcttcatggatggaataactat

SEQ ID NO: 44358 - DNA, 378 bp, Gossypium hirsutum
  Clone ID: LIB3189-002-P1-K1-G10
cccacgcgtccgcccacgcgtccggtaagcagcggctaccctaacctcgtcttgctctctactaatttcagctatggccgacgaagctgtggttgttccagatcccacccagatcgatgtcaagctctttaaccgctggagcttcgaggatattgaggttactgacatttcactggctgattacattggagttgcggcatccaagcacgccacatatgttcctcacaccgccggaaggtactccgtgaagcggttcaggaaggcgcagtgccccattgttgagaggctcaccaactctctcatgatgcacggtagaaacaatggcaagaaactcttggctgttaggatcatcaagcatgctatggagattattcattt

SEQ ID NO: 44359 - DNA, 379 bp, Gossypium hirsutum
  Clone ID: LIB3189-002-P1-K1-G12
cccacctcaacaacaagatggcttctcccctctccctggttggattattgagtggctcaaggctgtgaagttcattgattcaaagcatttcaatgtcccatttgggctgggagcagtggagcttgtggcaggtagggaaagtgccattgcccaaatcatcagaacagttaccaacaaagtctacaacatcacattctcagttggagatgccaaaaatgggtgccatggatcaatgatggttgaagcatttgccgccaaagataccttcaaagctcccttcaaatctgaagggaagggaacattcaagactgtaagcttcaagttcaaagcaattgcaccaagaactagactcactttctacagctccttctaccatacc

SEQ ID NO: 44360 - DNA, 323 bp, Gossypium hirsutum
  Clone ID: LIB3189-002-P1-K1-G5
ggaaacagcagcatcagaaggcatcatcaacaatcaacagccatagtagttgtgaattctgttggttgactcaagaggatgtgattaggttccttcttggttccattggggtcttcactccacttcctgctttgtctattgactctcttggcatcgttagctctgatgtgcttgccattgactactactcccctgcatcttctacagttggagccatctcaaagtcccttgcccagcaaacttctgttgccattgtggacagtgatggcactttcattggagagatatcacccttcactctcgcttgttgcgacgagacggtc

SEQ ID NO: 44361 - DNA, 374 bp, Gossypium hirsutum
  unsure (1)..(374): unsure at all n locations; Clone ID: LIB3189-002-P1-K1-G6
cttctccccaattctcaaaccttacctagtattttcgtttctgaacccaattaatgaagcacacaaggaccataacatacctatacctcaatatcacaagtcttatggaggcagagcgagacaagtacaagatgatcaactntgaagaaaccgagttacgactcggcctgccactcagtggaaacgagacgctcaaaaacacttgcagcactgggaagagggttttttcggatactgccgtggatttgaagcttaacctttcctcaacctcaaacagtgcttcttctgacctggctaaagagaagaacatcactgctgctgcacctnctgctaacgacccagcaaagccacctgcaaaggcacaagtggtgggg

SEQ ID NO: 44362 - DNA, 378 bp, Gossypium hirsutum
  Clone ID: LIB3189-002-P1-K1-H10
caactctcaaaaaattcccgaaccaatccccatcgttgaccgaccctctgcgcaaagaccacgtgtccttccccgcccgccgcgccgatcggactctcagcctcgcgccccctcctcgtgcggtggctcgtgaggtttccgacggagcattggcggcgatgaagaaggggttggagaaagatccgcgcgcgctgtggcggagatacgtggattggctgtaccagcacaaggaacttgggatttacttggatgtgagtcgggtcgggttcagcgatgagttcgttaaggaaatggagccctgtttcgaagcggcgtttcgggcgatggaggagttggagaaaggtgcgatcgcgaatcccgacgagggtcgcatggtgg

SEQ ID NO: 44363 - DNA, 381 bp, Gossypium hirsutum
  Clone ID: LIB3189-002-P1-K1-H11
cccacgcgtccgcccacgcgtccggttactcagcatcacctccttttacactctcgaattcgcattctcttcactcattttccaatccatggccaagggagagaaaaaacctgcagagaagaagcccgcggcggagaaggctccggcggagaaaacaaaagccgagaagaagatcccgaaggacgcagcctccggcgagaagaagaagaagaggacgaagaagagcgtggagacgtacaagatctacatcttcaaggtgctgaagcaggttcaccctgacatcgggatctccagcaaggccatggggatcatgaacagcttcatcaacgacatcttcgagaagctcgctcaagaatcttccagactcgcgcgctacaacaa

SEQ ID NO: 44364 - DNA, 232 bp, Gossypium hirsutum
  Clone ID: LIB3189-002-P1-K1-H12
atggtttcttcattcacttgcctcaaatccatggctggctttcccaccaggaagaccaacaatgacattacctccattgcttgcaaccgtctaagagtgcaatgcattcatgtgtctccaccaattgtcaagaagaaatttgatactttttcctacctgccatacctttattattcacaattgtctaacgaagtataataccttcttacgaagggattgattcctttctttg

SEQ ID NO: 44365 - DNA, 382 bp, Gossypium hirsutum
  Clone ID: LIB3189-002-P1-K1-H5
ctgtgaagaaactcaagttgtggtccaaatagaaaaggaagaaaaagacccatggccatgagcatcctcctcactattgctgcagctgctattgttcctcatccatccaaccatcagctccacccttaccttcatcctcatgccttgattttgaatacagcaactatggaacattcttaccaaccccggagccggagccggagccggaaccgcaaccacaagagattgccagcctaaactcatcgtatcagcaatatatggtatcagtttcggaacctgtttatggcattccagtcccggtaattcatgcatctcgaacagaaagatcagctggtcaatttggatgtctttttagctttggttcttatttgttccgctgctt

SEQ ID NO: 44366 - DNA, 379 bp, Gossypium hirsutum
  Clone ID: LIB3189-002-P1-K1-H6
cccacgcgtccggttgagaactaagaaggagaagcaaatggcttcctcaatgatctctgccccagctgttaccactgtcaaccgtgccggtgccggcatggttgctccattcactggcctcaagtccatggctggcttccccaccaggaagaccaacaatgacattacctccattgctagcaacggtggaagagtgcaatgcatgcaggtgtggccaccagttggcaagaagaagtttgagactctttcctacctgccagaccttgatgatgcacaattggcaaaggaagtagaataccttcttaggaagggatggattccttgcttggaattcgagttggagcacggtttcgtgtaccgtgagcacaacaggtcacca

SEQ ID NO: 44367 - DNA, 325 bp, Gossypium hirsutum
  Clone ID: LIB3196-001-P1-M1-C10
cggacgcgtggggttgaagttggggcgcttttgtatcaatggctgaagtccatgaccgcaacctgcctaaccaagttcaagttcacccacagtaccgtttcgacaatacaacccgaggcggttacggtgcaaagaactatcacagcggaccatcaacaagccaagttctagccgttcctacacttcttcccattggtggtacactgcttgcattaaccggcttaacactggccggcaccggcattgggcttatgctagtcacaccgctgctcatcatcttcagcccagttcttgtcccagctgccattgccattgccatggcagt

SEQ ID NO: 44368 - DNA, 423 bp, Gossypium hirsutum
  unsure (1)..(423): unsure at all n locations; Clone ID: LIB3196-001-P1-M1-C11
atcttttgtgggggattttttttcctatctggagtgtatccaagtggtgagaatgtccagttcacacggagtttgatgtcgtataaagagctgtatcaaaatttgtttgatgcacacgttgtctcatttttttatgtgaaacgtctacaacctccatactctaactggtatgatacgaacgtacaatgtgactaccatgcgggaattacggggcactcaatagagaattgcactgccttcaaaaagcaagttgaaagactcatcaacatgggtattgttaagcttgatcgctcatctagtgcagaaagcccgctacccaatcatgattgataatgaagtgaatacagtgtattaaaaggtgttggaagtgtccacattaatgacatatttgaagacangaatgaaaagggaccttgctagata

SEQ ID NO: 44369 - DNA, 162 bp, Gossypium hirsutum
  Clone ID: LIB3196-001-P1-M1-C5
gcttggccagccattcctggggacacaatggggaaggggagggtcgaattcaacgaatttggtcgatttggccccctggtaaccagggttgttttaacttttgttaaagggatattggtggccttaaatacccctttaattaccttaaattccttggttaca

SEQ ID NO: 44370 - DNA, 317 bp, Gossypium hirsutum
  Clone ID: LIB3196-001-P1-M1-C6
tttgaggcatattgggcgccttgtcaccaaggctgcttttaactcttgtaaagtggatattgttgccatcaatgaccccttcattgacctcaactacatggtttacatgtttcagtatgattccacccatggcaagttccatggcaccgtgaaagcttagaacgggaaactcgtcatcaatggaagccccatcaccatcttccaagagcgagatccctccaaaatcaagttgggcgatgcttgcgcttagtacgtcgtggagtccacttgcgtcttcaccaccaccgagaaagcttgggcttatttgcaagggggag

SEQ ID NO: 44371 - DNA, 274 bp, Gossypium hirsutum
  Clone ID: LIB3196-001-P1-M1-D3
ttctgctgcttacttgaagggtggcgcgaagaacgttatcattcactgatctcagtgacgattctcccatatgtgttgtgggtgtcaatgtgaacgacatctatgcactgactcttacatatgaatccaatgctagttgataccaacaactgtatagatcaatttgctaatgagatcaacggttactgagctattgatgtgggacatatgaccaccgaccattctattactgatactcaatataatgactatagggcttacctgaacgactcgc

SEQ ID NO: 44372 - DNA, 297 bp, Gossypium hirsutum
  Clone ID: LIB3196-001-P1-M1-D8
atggaaatgtcagttttacaataagagtttgaggcttcctactccaatttcaaaaacgaatagaaccagacataagatccataagaaaataaagaacttgaacaacacaatgaaacaactactctacataataacagcagaatacacattctgctgaagtgcacacagaacatgctccagcacagaccataattaagacacaaatcttcataccatttaaaaacctgaaatcataaaaggtatctttttcctaacacactaaaatattttattaatattcaaaggccaattcacaaa

SEQ ID NO: 44373 - DNA, 403 bp, Gossypium hirsutum
  Clone ID: LIB3196-001-P1-M1-E1
atgtcgtttctgtcgccgtccccgtctcctgccaggcgcggagccctgcgggccgctggtgggccccaggcgcgcaaacatgggcggccccaccaaagcgcgctgggctgccgcggcgctgggcgtcgcggggctgctgtgcgcggtgctgggcgctgtcatgatcgtgatggtgccctcgctcatcaagcagcaggtcctcaagaacgtgcgcatcgaccccagcagcctgtcctttaacatgtggaaggagatcccaatccccttctatctctccgtctacttctttaacgtgatgaaccccagcgagatcctgaagggcgagaagccgcatgtgcaagagcgcgggccctacgtgtacagggagttcaggcacaagaccaacattacctttaacaacaat

SEQ ID NO: 44374 - DNA, 409 bp, Gossypium hirsutum
  Clone ID: LIB3196-001-P1-M1-E2
caaaaaagcaggctggtaccgatccgcaattatctcaatacgaattgcagttagaattcctataatcacctacattacaagggttgctctactttgaaagggatagtttctatatattataaatacttgtgctctgccttcttgcatatacttgttttgggcctttgtttgataaaaactatcttattagccagttatgacatacatgaccttatgctggatgtagtatatacaaaggtttgtacaagacaacccctgaacacaaggaggttctagtctgggaggagactggtaggagacaaagttctttcctgtccaagaaatcttaatatgtaatgtttttctgctttgtttgcatagtgatggaagaagctttttacacttttcaagcttgctgctaacttaattt

SEQ ID NO: 44375 - DNA, 402 bp, Gossypium hirsutum
  unsure (1)..(402): unsure at all n locations; Clone ID: LIB3196-001-P1-M1-E7
atgcccgagtttgccaaagaaccgccgcagagagacaggtaccggctggacgatggccgccgcgtgcgggacctggaccgagtgctcatgggctaccagacctacccacaggccctcaccctcgtctttgatgatgtgcaaggtcatgacctcatgggcagtgtcaccctggaccactttggggaggtgccaggtggcccagctagagccggccagggccgtgaagtccagtggcaggtgtttgtccccagtgccgagagccgagagaagctcatctcgctgctggctcgccagtgggaggccctgtgtggccgtgagctgcctgtcgagctcaccggctagcccaagccacaggcagccatcaccgnctgccgtgtctagcctggtgcctactggggcagg

SEQ ID NO: 44376 - DNA, 367 bp, Gossypium hirsutum
  unsure (1)..(367): unsure at all n locations; Clone ID: LIB3196-001-P1-M1-E8
ccccaatcctgtttctcttttgcatcctttgtttctctcttcatctcctgcactacttgcaaaataacgagctgaagccgtgctacaataacactagtgttttcaacaataaattaatcatagccgcagcttgtttcttttaaactctaaatataaaggaggccaaacatgccgcctcgtagataccaatttgngagggctgatgaggccactcatcccgactccatgagagccaccttggctgaattcctctccactatcattttcgtctttgccggcgaaggctcaattcttgctcttgacaagatgtacaaggatacgagtgcgacgcctgcaagactggtgatgatagcacttgcccatgggt

SEQ ID NO: 44377 - DNA, 246 bp, Gossypium hirsutum
  Clone ID: LIB3196-001-P1-M1-F11
attctcaatcctgctctcaccatgagcctccgcctgcagagctcgtgcgccagctattgaggtggtttgggggtggctcttgccagctgggaggaggccccggtgtctctagctgttcaactcggcttggctctgggggatcaactggaggctacggaggcggggtgacctgtggctttggtggaggggctggtagtggctttagaggtggctactgaggtggccttcgagggggctttggtgggg

SEQ ID NO: 44378 - DNA, 184 bp, Gossypium hirsutum
  unsure (1)..(184): unsure at all n locations; Clone ID: LIB3196-001-P1-M1-F6
atcagtggtttccttttttgtttcaaataatggtcagaagatattcagcgttgactcaccaaggctatcaagntcctttttcctttgttttttttgttttttttgacattttatatttttgctcttttttattttagggtattttatttatttttttgaacggagtttcactctgtcaccaggc

SEQ ID NO: 44379 - DNA, 117 bp, Gossypium hirsutum
  Clone ID: LIB3196-001-P1-M1-G9
atctttttgcgtttgagccccccgcctgtgagaagcattagcgcggtgaacttgtctgagaacaggagtgttatcattctgccacctgactacttggaatgcttgtccatgggggca

SEQ ID NO: 44380 - DNA, 347 bp, Gossypium hirsutum
  Clone ID: LIB3196-001-P1-M1-H1
atcagcctctcacgctctccatagccctctcatctcctggaaccatggccgccacattcaccaccatgagcggccacaacatcatccgcaggggcttcagtgccggctcagccaggctccctggggtcagccgctctggcttcagcagcgtctccgtgtcccgctccaggggcagtggtggcctgggtggcgcatgtggaggagctggctttggcagccccaacctgtatggcctgtggggctccaagaggatctccattggagggggcagctgtgccatcggtggcggctatggcagcagagccttaggcagctatggctttcgtggccccgggagtggatttggt

SEQ ID NO: 44381 - DNA, 421 bp, Gossypium hirsutum
  Clone ID: LIB3196-001-P1-M1-H2
atgtgacagagcaagactctgtctcaaaaaaaaaaaaaaaaaaaaaagaggggcagttggataatgggtagggaatgatagaaaagctatgacaggaattctcagcctgttggagggagttgggtatgacgtttgtgaaagggaggagaggaaatagtgtacgtcataatactctcagaatatacaattttccatactcagagctgtcctgatggtgttttgttactgagacaaggcaggactcaaactcccagccttaaggaacgcctctgccttgactgctcaaagagctaggattacagttgttagccaccatacttcgtctgataactttagaatcctttaggtcccacacattttaaaatggctaatatagatgaaatttttgttaatcctggaactttacatatttaaaatatca

SEQ ID NO: 44382 - DNA, 413 bp, Gossypium hirsutum
  Clone ID: LIB3196-001-P1-M1-H7
attgctgtaaacggagctggcttggagccttagccctctgcctggctctcctcttccatcttttggtaggaatcttgggttctcctcttctctctgggaagccagagcccaagtgctccattcccagggagggagtgccctctagggccagggagagtgaaggccggaggaggcaccagctggagaagaagggcagggcctggagaccaagtctcaaagggaaggagctgctggccaatcaggggcgagccgactgcaccctgacctgctgggctgggacagcacagaacctacagttttcctgaatgaatggaatcctggatgttatctgctaagtggttgcttgtcctgacccaggaagcttctacatgctctactcttcagatgtggttttaaaatttttccatctgggg

SEQ ID NO: 44383 - DNA, 414 bp, Gossypium hirsutum
  Clone ID: LIB3196-001-P1-M1-H8
atctgccaacaaggatccttaccccacaggggcccttctcccaggctgtgctgggcatattcaccgtgccgcttcacttctgcccagatttttaacttcacccggggtctctgcttgcacaaggactatgtggctgacagagagtttgtggcctggaaagacagacacccagacgcctcccccaaccatctcacccccatgcgggactgcctgtacctggtggacggaggctttgccatcaactctccgttcccactggctctgcggcctcagagagccgtggacctcattctgtccttcgactattccttggaagctccttttgaggtgtggagcgacaaacagctgaggagaaggcctttggggactttgtcatcaacaggccagacaccccctatggcatgatgaacttca

SEQ ID NO: 44384 - DNA, 402 bp, Gossypium hirsutum
  Clone ID: LIB3196-002-P1-M1-B11
atcctccctcagaatacaagttaatgcatgttactcagtcgcccagtatgtgaaagaagatgtgagggagacaaatgagttgatggtttgaattatatgatttttgccacgttaccttgatgcaaatttgccaaatctgatactgtgaaaagatttgataacttttctaatgcctgactagtaagttttaaaacatcattctttaaaaaaataatttaatatttttggttattccaatcttcagtgttaacccaaacgattctgagataaaaattatgtgtcatctgaacttcagtttacagacaaattagaactttgctttatttggagaagggggatgcattcatttggttttgatttttattttgcttttaattcattggagatgatgggatacctagc

SEQ ID NO: 44385 - DNA, 371 bp, Gossypium hirsutum
  Clone ID: LIB3196-002-P1-M1-B12
tcggtctaaaacataaagttttaatttattcaaattcgtttaaatacataattttataaactattattatatttaggagatataattatgggttaatcattctattatgctgaaatttaagatttaatcccttaactttaatttggcatgattcaatctctttacttttataatgttattaggaggtccagattgataacactgatagtagttgttgttaagtgatgatgtggattaatttttgcgattactcaatcacacaatcaagggcatgttgtaatgccattaaacatattcaacatatgattagtttacacgtaagttgaatgactaagattatataaaataaataatatttcatcactttaacg

SEQ ID NO: 44386 - DNA, 406 bp, Gossypium hirsutum
  Clone ID: LIB3196-002-P1-M1-B6
atatcagggctcctatgctcagtagtagctctggcttagacaccagctggagtgatcaactcttagggaccctgcctatcccacttcacaggtgaggcatggcaattctgggagctgattaaaacacacgtaaaccaaaaccaaacaacaggcccttgggtgaaaggtgctatataattgtgaagtattaagcatactatatttcagccatgataagaacagagtgcctgcattcccaggaaaatgagaaaatcccatgagataaataaaaatctaggtgatgggcagatcttttctttaaaatagaaaaggaaaaactcttgtagtacctagtcagatggtagatgagctgcctgcagctgcaggagcacctctatatagtacttagaagtagtatgttattcct

SEQ ID NO: 44387 - DNA, 411 bp, Gossypium hirsutum
  Clone ID: LIB3196-002-P1-M1-C4
atgtgagaggaacgtggttttctcctctctccgccatggcgtgtggtcgcccactgatatcggtgtgctccgaaaagggggagtcatctggcaaaaatgtcactttgcctgctgtattcaaggctcctattcgaccagatattgtgaactttgttcacaccaacctgcgcaaaaacaacagacagccctacgctgtcagtgaattagcaggtcatcagaccagtgctgagtcttggggtactggcagagctgtggctcgaattcccagagttcgaggtggtgggactcaccggtctggccagggtgcttttggaaacatgtgtcgtggaggccgaatgtgtttaccaaccaaaacctggcgccgttgcatcgtatagtgaacacaacccaaaaacgatatgccctctgttc

SEQ ID NO: 44388 - DNA, 418 bp, Gossypium hirsutum
  Clone ID: LIB3196-002-P1-M1-C9
atgtgaaactggtcgatccaagggatatggatttattacattttctgattcagaatgtgccaaaaaggctttggaacaacttaatggatttgaactagcaggaaggccaatgaaagttggtcatgttactgaacgtactgatgcttcgagtgctagttcatttttggacagtgatgaactggaaaggactggaattgatttgggaacaactggtcgtcttcagttaatggcaagacttgcagagggtacaggtttgcagattccaccagcagcacagcaagctctacagatgagtggctctttggcatttggtgctgtggcagaattctcttttgttatagatttgcaaacaagactttcccagcagactgaagcttcagctttagctgcagctgcctctgttcagccacttgcaaca

SEQ ID NO: 44389 - DNA, 423 bp, Gossypium hirsutum
  Clone ID: LIB3196-002-P1-M1-D1
atgcgaggggcccaccctttctccagaaccaggctcatcgaacctgctctgcacccaggacgcaacagtgcggtgcagaaagcgcatgtcagagacagagccatctggggacaaccttctttcttcaaaactagagcgaccatctgggggttctaagcctttccacaggtcaaggccaggaagacctcagagcctaatcttattcagtcctcctttccccattatggaccacctgcccccctcatccacagtgacagattccaaggtcctgctgtcccctatcagaagtcccacccagacagtttcccctggccttctttgtggagagttggcagaaaacacatgggtcacaccagaaggggttacacttaggaataaaatgaccatccctaagaatggccagagactagagacctcaactag

SEQ ID NO: 44390 - DNA, 352 bp, Gossypium hirsutum
  Clone ID: LIB3196-002-P1-M1-D2
ataccacccctccttattccttaacgaacagcctgacacatacgcaccgggccgcctcccctagtaggtgggcttgtacatgcgcagtgtcctagtgcccatcgtctgttttcctggccttgcccccgcctgccccatgccgtggacatctgggcccactcatcgccccttcaggcccccggcgccccaccccctagagtgctctgtgtatgcggatgatttagagttgtcatttctctttactggatgtttatttataaagatcttgcctgttcccgcgtctgcggagcggccctcgtctcccagctttctattaccttagctagagtgtctccttgtgggttcctgttgc

SEQ ID NO: 44391 - DNA, 328 bp, Gossypium hirsutum
  Clone ID: LIB3196-002-P1-M1-D7
atgcttaatccagacaactctccaatcccaaatgaagttgtccaggtgcatctgaaggacaaagtggtgggcaactacaccacagatgcaaatggcatcgctcagtttttcttggacacatctacgtttacatacccaaatatcactttgaaagcagcctataaggccaatgaaaattgcgaggctcatggctgggtgttgcctcaataccctcagcccgagtactttgcataccgattttactccaagactaacagcttcctaaagattgtccaagagatggaagaactgagatgcaaccagcaaaagaaggtgctagtgcactaca

SEQ ID NO: 44392 - DNA, 406 bp, Gossypium hirsutum
  Clone ID: LIB3196-002-P1-M1-D8
atctcaaagcctccatccggacctcggctctgctctccggcttcgccatggtggcaatggtggaggtgcagctggacgctgaccacgactacccgccagggctgctcatcgccttcagtgcctgcaccacggtgctggtggctgtgcacctgtttgcactcatgatcagcacctgcatcctgcccaacatcgaggcggtgagcaacgtgcacaacctcaactcggtcaaggagtccccccacgagcgcatgcaccgccacatcgagctggcctgggccttctccaccgtcatcggcacgctgcttttcctggccgaggtcgtgctgctctgctgggtcaagttcttgcccctcaagaagcagccaggccagccgaggcccaccagcaagccccccgccagtggtgc

SEQ ID NO: 44393 - DNA, 336 bp, Gossypium hirsutum
  Clone ID: LIB3196-002-P1-M1-D9
atgaactgatctgctcacactcgctggcttgtgcatcaggactggctttttctcctgactcacagggcaaaggagctctctgtgaacgttaagtccgtccccagcgcttggaatcctacggcctcctcagccggatcccctcagccttccaggtcctcaacctccgcggacgctgagcgatggcctccatggggctacaggtgacgggcatcgcgctggccgtcctgggctggctggccgacatgctgtgctgcgcgctgcccatgtggcgcgtgacggccttcatcggcagcaacatcttcacctcgcagaccatctgggacggcctgtgtatga

SEQ ID NO: 44394 - DNA, 101 bp, Gossypium hirsutum
  Clone ID: LIB3196-002-P1-M1-E1
atgaaaaccgcttcgggagagaggcttgggctttttggagggcaattccggggggattaaaagccttaagagccccccccttaccggggggcaaaaccaca

SEQ ID NO: 44395 - DNA, 342 bp, Gossypium hirsutum
  Clone ID: LIB3196-002-P1-M1-E12
atggccaagcaagcttgtgtctgcacctgctctcaatcctgctctcaccatgagcctccggctgcagagctcctccgccagctatggaggtggttttgggggtggctcttgccagctggtaggaggccgcggtgtctctagctgcccaactcgagttgtctctgcaggatcagctggtggctacacaggcggcatgacctgtgcctaaggcggagggactgagggtggctttcaaggaggcttcctctgtcctgcatggaactgccttctctgtgctcctttgggggcggaagacagagggaggggacaccagtcaaatttaaggcctacggacattagaag

SEQ ID NO: 44396 - DNA, 418 bp, Gossypium hirsutum
  Clone ID: LIB3196-002-P1-M1-F4
atgccgcatcctgaatgagatgcgcgaccagtacgagcagatgggagagaaaaaccgcagagatggggaggcctggttcctgagcaagaccgaggagctaaacaaagaagtggcctccaacagcgaactggtacagagcagccgcactgaggtgacggagctccggagggtgttccagggcctggagattgagctgcagtcccagctcagcatggtatgaaggacccggtacagcagcagcccccaagccaccagtaatggccaccaccccctcaacaagccacaatctagttgcacctttcttttctcaggatgggaccagatgactcatgggacccattatatagacagagaaattaagccctagaatagtgggctagcttttttccatattgtctggcccgtcagtaccccaact

SEQ ID NO: 44397 - DNA, 387 bp, Gossypium hirsutum
  Clone ID: LIB3196-002-P1-M1-G2
atgcgccgctgacaccacagctccgacctccctcagcgtggctgggaccctgagcagctgcgcagagccatgcgccccgatgtacttaggtggcacagccctgagacctctggccagcgccaggcaggcgtcggggccggcagaggcctggatctgagtctttgggctctgcctctccctggggacaggagggagcctgggggtgtgggtggggagctggccgaccctgacccagcgcctggctctgcccccaggagtggacagagcgatgaaggcgggagtgcagaggctgcaggccagggtggacctattggaggaggtgaggccaggcttgaggcacgttactctcgacagcagtagcccaggccaggatatagggtgcatagt

SEQ ID NO: 44398 - DNA, 366 bp, Gossypium hirsutum
  Clone ID: LIB3196-002-P1-M1-G7
atgccattcctagagtagaggcgatgggcccatttgtttggtgctggcaccaactcgggaactggccgaacaggtgcagcaagtagctgctgaatattgtagagcatgtcgcttgaagtctacttgtatctatggtggtgctcccaagggaccacaaatacgtgatttggagagaggtgtggaaatctgtattgcaactcctggaagactgattgactttttagagtgtgggaaaaccaatctgagaagaacaacctatcttgtccttgatgaagcagacagaatgcttgatatgggttttgaaccccaaataaggaagattgtggatcaaataagacctgataggcaaactctaatgtggagtgc

SEQ ID NO: 44399 - DNA, 404 bp, Gossypium hirsutum
  Clone ID: LIB3196-002-P1-M1-G8
atgggatgaccccaatgttaaccccttttcttccacctcaaaaatgcacgagtctcccaaactgcggcaacaatcatacagactttgacccagacacctgtgatgagtccgctgacccctttaagacatactgtaggacccccagctcaccttctaaattctcagactcctttgagatcccagccagagctatcgaagccaatggagtggacggggatgggctaaacaagcccgacaagaagaagaagacgcccctaaagacggtgaaaaagtcgcacaaaacggtctcctgtctctgatccacctttccaggaccccaccgcagctgctacaccagaaacaccaccagtgatctctgcagtggtccacgccacagatgaggaaaagctggcggtcaccaacca

SEQ ID NO: 44400 - DNA, 416 bp, Gossypium hirsutum
  Clone ID: LIB3196-002-P1-M1-G9
atgtcatgcttaagagtttactttcgttctcagagcaatgggaaggaattgcagagctttgagccgggaacggaaagacaggtactaggccgcatcctcagtggaattaggtaggtatggtgtggaacctgtgaagttcctggcatgttccactagacctagttgtaacatgacgttctgactgaagtgcagaccacaacaactatagtgcttcacttagaaggatatggccatgaggaacttgtctgactaaacaatgctataaattaaaagctcttgcaaaacattaaccatggtaatggttatttgcaccataaaatggtggcatccagcttaagtggcccacataccaacaatttaaaatgaagatagaatccagacgttaactctttttgtctctccataggtgtggtcac

SEQ ID NO: 44401 - DNA, 323 bp, Gossypium hirsutum
  Clone ID: LIB3196-002-P1-M1-H1
atgttcccttaccctctcacagggcatgcagtgggggtgtgactcacttgttcagtgccccgcgggtcaaacccctagggtgagcacgcggacgggcaggtcgtggggaggatggattaccaccccacagcatcatctagggttgagggtgtacagctgctggagacccagagggtgagtgttgcagtgcactgcttcagcttaagtcaagtggaccctgtcttatacgaaggacagagggctctatgtatcctgggttcttggcctagtgtactgaaaaaatcaggtcatgtgggcttggagaatgcatgcaggatttattg

SEQ ID NO: 44402 - DNA, 398 bp, Gossypium hirsutum
  Clone ID: LIB3196-004-P1-M1-F12
aattcccgggatgtaagaagtacatgaaaatctaatactttctttttcacgattcatggggagaactgtgattctttacatcgctactttatttaagcctgtttattttcctacaaaataccctccttcaaaaggttgaagtgacatggaacaaaacttacatgtgggaattgcaagtgtttctcaaatacaaggttgtcatgaaaaaggggaaaagaaggaattttgttggtgaggatactgtgagatagtgtgttgagtggtaatagttggaaaactgccacctcagagtatatcacataaactgttcaagtccttaaccagcctcaggttcctgaaatcctgggagtatttccttctcagtttttggtgaatgtgtaatttaccattgagaataa

SEQ ID NO: 44403 - DNA, 378 bp, Gossypium hirsutum
  Clone ID: LIB3196-045-P1-M1-H4
gctgtcgcggtcccgctgtgtgtcccgggcattcagccgctcgctctctgccttccagaaggggaactgccctctagggagacgttccctgcctggggtctccttatgccagggaccaggttaccctaacagcaggaaggttgtcattaacaacaacagtgtcttcagtgttcgcttcttcagaactacagctgtatgcaaggatgacttggttacagtcaaaaccccagcatttgcagaatctgtcacagagggagatgtcaggtgggagaaagctgttggagacaccgttgcagaagatgaagtggtttgtgagattgaaactgacaagacatctgtgcaggttccatcaccagcaaatggcgtgattgaagctct

SEQ ID NO: 44404 - DNA, 301 bp, Gossypium hirsutum
  Clone ID: LIB3196-001-P1-M1-A1
ataagctctacctgcagcctggggccctgctggagcagccagtgtccatcccagacgatgacttggtccaggccaccttacagcagctgcagaagccaccgagtactgcccggccacgccttcttcaggacacagtgcagcagctgatgctgcaccatgggaggctgagcctggtgacagggcagtcaggacagggcaagacagccttcctggcatctcttgtgtcagccctgcaagctcctgatggggccaaggtggcaccattagtcttcttccacttttccggggctcgtcctgacca

SEQ ID NO: 44405 - DNA, 362 bp, Gossypium hirsutum
  Clone ID: LIB3196-001-P1-M1-A10
atttttggaatatgatacctaaaataattttcagtggggcttgggacaaaagcatttccaacttttcttagttgcttgtcgtgtacattttcaaggaggaacgcgtgtaccaactaattgcaactcttaaagttcattgagaacatttctgcatattaccaaagtgatcaggctattaaactggccactatgatcattctagctggtcttataagaaatttaatttatgaacaagggatcaacttggatgcttctcttgcagggaggcttacttgacctgccaccttccattcatacagtgttaacaataacttgtcatgtgtttcttgaacactttgacttcttcatacaatatttaagat

SEQ ID NO: 44406 - DNA, 396 bp, Gossypium hirsutum
  Clone ID: LIB3196-001-P1-M1-A11
atagcagggttcctgatctatttggatccagccaaagaatcctcagaaatctgtaactgatttgctcaagtatgaaatgtacatctgagttggcagacttcccataaagagccaagtggtcaatatttttggctttgtaggacattggtctctgtcacaagtattttcaaaaacaggtggcaagctgcattggctcacaggccaaagtttgctgacccctgatctacactgcttttccttctaaatattgcctgattatcttagcttcttggcaaacatgctaggccggatggggcagaggtttctgttacatgctgtggtctcttagtaatgaatcaatccatgaacacattagagaatctgaagtcaacacatacagatgtcatatgttttaac

SEQ ID NO: 44407 - DNA, 316 bp, Gossypium hirsutum
  Clone ID: LIB3196-001-P1-M1-A12
tcgaattcatgaataaagtcaatcagattacaatattttaatttatgtaatttgattttttttgaagtggagaagttaaaattgatctttacttactagaagttggctttaaccaagaattataaatttgatctaatttgtgaataaaatatgtaaagtaaaaaaaaaaagtgattgaagattaactcaattgattttattgaataaaatgtgtaaaagtgatttgtgaataaaaaacgtgattcaattattcattttatgaattgatttgtatatttggactagagttgttcatgggccaggccgggcccggaaa

SEQ ID NO: 44408 - DNA, 252 bp, Gossypium hirsutum
  Clone ID: LIB3196-001-P1-M1-A2
gtgacgatggatcttgaactgttgatatacgtttcggtgatcaaatggttttggttttgcatcacttacaccattattgaagaaacaacatagtttggtatctatctcccttgaacttgtacatgctagcctgcaagtttacaacataaacacaatttccaatacagattatatatattcgtgattacgtatatatagccttacccttagtatctgcctttggctcgaatagcatagtagtgattagaaaaa

SEQ ID NO: 44409 - DNA, 338 bp, Gossypium hirsutum
  Clone ID: LIB3196-001-P1-M1-A3
tcagccacgcgttcgcaaagtcatcagtggcggcacagagtcacctgtcacatgccaaaatagggcctaaaaggaaaaatggttgcgaaaccgcgaatccaagatagaaacgattattccaattaattcttataatttaccaagtgattagatgcatgtgttagagtatcgatggaaaattttatagatagcatgcttaatttgcctactagggcttaattgcaaaagttgctaaatatgagttttagatgctcaaggattaaattgcagagtgtaattgaagtagaggtccttaaatggtagtaagaccattacgttttcatggacaaaaatggaca

SEQ ID NO: 44410 - DNA, 179 bp, Gossypium hirsutum
  Clone ID: LIB3196-001-P1-M1-A5
atctttgtaagagacaggatttggattcttcagaaattacagaagaattcatttttccttaaccaggtgtgcaaggacagcaacaaccaatctctataatgatgagagtgtacttatattttgttttgctattaacctacttaccgggttagggatttgccgggggtggggggtgggct

SEQ ID NO: 44411 - DNA, 411 bp, Gossypium hirsutum
  Clone ID: LIB3196-001-P1-M1-A6
ctcccagccaggataaatgtttattgatctcctaggtgtcagaccctatgctggcagagtctatggtttctgcagtgaaccatactcctgtactcacggcgccccagtcgaggagatacacacctaattagacaactactacccagaaggtcagacctggagtgaggaacacaggggactatgggagcctaagaggcgcctgccccggcctatggttctagaaaggcttccaggaggtggtgatccttaagccaagtacgaataggagccagctagaatgggaatggatctggcagagtgaacaagcgccaaggcccagaggccaaaaaaaaaaaaaaagcacatggtttgattgaggaagcaagagcagcatagtatgcctagaaccgaactggagaggggaaatggtct

SEQ ID NO: 44412 - DNA, 161 bp, Gossypium hirsutum
  Clone ID: LIB3196-001-P1-M1-A8
tctgggatcaggccaagcaagcttctgtctgcacctgctctcaggcctgctctcaccatgagcgctgcgcctgcagagctcctccgccagctatggaggtggttttgggggtggctcttgccagctgggaggaggccgcggtgtctctagctgttcaactc

SEQ ID NO: 44413 - DNA, 382 bp, Gossypium hirsutum
  Clone ID: LIB3196-001-P1-M1-A9
atgtcgcaatcagctgggtgattcccgtgattgcgttacaagctttgtctccttcgactgggagtgtttgtccaggacgatgagacactcaaagagaacttactgtcctgattgggatgacaaggattgggattatggaaaatggaggagcagcagctagcatcaacggagggagagttcacataacattgcctgggagaacaagcgcttcaaatacactcactctaaaatgtgtgatagccattatttggaaagcaggtgtataaatgagaaagattatcatagtcgacgctacattgatgagtacagaaatgactacaatcaagatgtgaacctgggcatcgccatagagaccatgaaaagccgtattcagaaccatagt

SEQ ID NO: 44414 - DNA, 349 bp, Gossypium hirsutum
  Clone ID: LIB3196-001-P1-M1-B1
gggaaagcggctgcgcgtgcctgtaccgatcctcaattcccgactcaacccactcgtttaccctgttccacaataggctaagatcggggcacacatttttagacggcgcgagaatgtactattatcaatcgatgtgggttcaattttgaatgaattgttgctgatgcatagagattaggtgctcatcatggtcagaggaagttagagacttaaagcttcctctcactctaatatgaagaacccaaacatggggtcaaacgcttctccttgaattatgtgagtcaatcttgtgaagattatgacaagtgaagatacttcttcttactatggacaaggagttcacacgtta

SEQ ID NO: 44415 - DNA, 418 bp, Gossypium hirsutum
  unsure (1)..(418): unsure at all n locations; Clone ID: LIB3196-001-P1-M1-B10
atctcggaaggcgggcacgcgggccatggctccctgggcggaggcgcgagctctcggcgctgaacccgctgcgcgcggtgtggctcacgctgaccgccgccttcctgctcaccctactgctgcagctcctgccgcctggcctgctcccgggctgcgcgatctttcaggacctgatacgctatgggaaaacgaagtgtggggagccgccgcgccccgccgcctgccgcgcctttgatgtccccaagagatatttttcccacttttatatcatctcagtgctgtggaatggcttcctgctttggtgcctttctcaatctctgttcctgggagcaccttttccaagctggcttcatggtttgctcagaattctcggngcggcacagttccagggaggggagctggcgctgtctgcattctt

SEQ ID NO: 44416 - DNA, 402 bp, Gossypium hirsutum
  Clone ID: LIB3196-001-P1-M1-B11
attgcggctgccagcaggcagatcatgagccatcagctcctctggggccagctataggacaacagaactctcaccaaaggaccagacgcagcgggtaccatgggacagtgtcggtcagccaacgcagaggatgctcaggaattcagtgacgtggagagggccattaagaccctcatcaagaacttccaccagtactccgtggagggtgggaaggagacgctgaccccctctgagctacgggacctggtcacccagcagctgccccacctcatgccgagcaactgtggcctggaagagaaaattgccaacctgggcagctgcaatgactctaaactggagttcgggagtttctgggagctgattagagaagcggctaagagtgtgaagccagagaggcctgtc

SEQ ID NO: 44417 - DNA, 395 bp, Gossypium hirsutum
  Clone ID: LIB3196-001-P1-M1-B12
atgacctttacctcaccacctcagcttcaacagcagcaggtgaaacaacccagccagcctgcacctcaggaaccatttgttcccataaccaaggagccatgccacccaaaggttccacaacctggaaacacaaagattccagagccagattgcaccaaggtccctaagccaggctacaccaaggaccctgagccaggcagcaccaaggtccctgacataggctgcaccaaggtccctgagccaggcagtaccaaggtccctgacaaaggctgcaccaaggtccctgagccaggcagcaccaaggtccctgacaaaagctgcatcaacttttctgagccaggcgccattaaaatccttgagcgaggctacaccaaagttcctgagccaggctacac

SEQ ID NO: 44418 - DNA, 416 bp, Gossypium hirsutum
  Clone ID: LIB3196-001-P1-M1-B2
atccgggaggaaagatggtgctggatctggatttgtttcgggtggataaaggaggggacccagccctcattcgagagacgcaggagaagcgcttcaaggacccgggactagtggaccagctggtgaaggcagacagcgagtggcgacgatgtagatttcgggcagacaacttgaacaagctgaagaacctatgcagcaagacgatcggagagaaaatgaagaaaaaagagccagtggaagatgatgagtctgtcccagagaacgtgttgaatttcgatgaccttactgcagacgctttagctaacctgaaagtctcacaaatcaaaaaagtccgactcctcattgacgaagccatcctgaagtgtgacgcagagcggataaagctggaagcagagcgatttgagaaccttcgagag

SEQ ID NO: 44419 - DNA, 348 bp, Gossypium hirsutum
  Clone ID: LIB3196-001-P1-M1-B3
atctcggacagcagtgcagagggggcttcggtccctgagcggccggaccaaggcattgacaggcacacatgtgagagcatcagagaaaatgactgattcttgtaccacctcaagtcatatatgaccaactactttggtgcagctgagcgattggcctgtcaggagaaagaccatatgctggcttggagggtcacacctgagggcaaggctcagaacctggaggagtgggaagggaccacctcttactgactagcccccacgggtgccaggggtactgaaaaccaaaggtggagcagaccaagccatatgcttcccagctatatgcaagctggggtgggagacggtagc

SEQ ID NO: 44420 - DNA, 419 bp, Gossypium hirsutum
  Clone ID: LIB3196-001-P1-M1-B4
atgaagaatttccccttagttctttgcaagaaggtagagataaagacactttttcaaaaatggcagtggtatcagaattcctcaagcaggcctggtttattgaaaatgaagagcaggaatatgttcaaactgtgaaatcatccaaaggtggtcctggatcagcagtgagcccctatcctaccttcaatccatcctcggatgtcgctgccttgcacaaggccataatggttaaaggtgtggatgaagcaaccatcattgacattctaactaagcgaaacaatgcacagcgtcaacagatcaaagcagcatatctccaggaaacaagaaagcccctggatgaaacactgaagaaagcccttatgggtcaccttgaggaggttgttttagctctgctaaaaacttcaacgcaatttgatgct

SEQ ID NO: 44421 - DNA, 419 bp, Gossypium hirsutum
  Clone ID: LIB3196-001-P1-M1-B5
atctcttcatcttcctcctcctcctcctcctcctcctcttcctcctcctggtcttcctcttcctcttcctgctcctcttcctcttcctcctcctcttcctcgccttcccctgctaagcctggccctcaggccttgcccaaacctgcaagccccaagaagccaccccctggcgagcggaggtgagtgctgccttgcctgagatggaaggagggtgggggagtgacttatccagagacagggccctggggtgtgagctcccggctgggtgtctcacgtgaccttgggcatctggttgtgggggaagaggcgcttgttctctcccccgcttgttgcaccttgttctggcgaagggctgcgccatccacaggggcgctcaggccaggactggggggtccttggtttcttcctctccctccctc

SEQ ID NO: 44422 - DNA, 313 bp, Gossypium hirsutum
  Clone ID: LIB3196-001-P1-M1-B6
attcttctggacagactctaacctggatcgaatagaagtggcgaagctggatggcacgcagcgccgggtactctttgagaccgacctggtgaatcccagaggcattgtaacggattccgtgagagggaacctttactggacagactggaacagagataaccccaagattgaaacttcctacatggatggcacgaaccggaggatcctggtgcaggatgacctgggcttgcccaatggactgacctttgacgcgttctcatctcagctctgctgggtggatgcaagcaccaatcgggcggaatgcctgaaccct

SEQ ID NO: 44423 - DNA, 400 bp, Gossypium hirsutum
  Clone ID: LIB3196-001-P1-M1-B7
ccctgttccacaagagggtaatatcaagccacgcatctttagactgcggcaagaaggtgctattatcaatcgctgtgggttcaatagtgaaggaattgttgctgttgcaaagagattaggtgctcagcatggtaagaggaagttagagacttcgagttcctcgtcaccctcgaatgaagaagccaaacatgggggcaaagctggtcctggaattctgggagtcaatcttgggaagaataagacaagtgaagatgctgctgctgactatgtacaaggagttcacacgttatcccagtatgctgattacttggttattaatgtttcatcaccaaacactcctggattacgtatgcttcaaggaaggaaacagttgaaggatcttgttaagagggttcaagct

SEQ ID NO: 44424 - DNA, 420 bp, Gossypium hirsutum
  Clone ID: LIB3196-001-P1-M1-B8
ataacagaataaggtcctggagaccaaatggaagctgctccagcagcagacgaccagcacctccagcaaaaaccttgagcccctctttgagacctacctcagtgtcctgaggaagcaactagataccttggtcaatgacaaagggcgcctgcagtctgagctgaagaccatgcaggacagcgtggaggacttcaagaccaaatatgaagaggagatcaacaaacgcacagcagctgagaatgactttgtggtcctcaagaaggacgtggatgctgcctatatgaacaaggtggagctggaggccaaggtggacagtcttaatgatgagatcaacttcctgaaggtcctctatgatgcggagctgtcccagatgcagacccacgtcagcgacatgtccgtggtcctctccatggacaacaa

SEQ ID NO: 44425 - DNA, 391 bp, Gossypium hirsutum
  Clone ID: LIB3196-001-P1-M1-B9
atggtttttcggatcatgtctggtggctccgcggattataacagagaacatggcggcccagagggaatggaccccgatggtgtcatcgagagcaactggaatgagattgttgataactttgatgatatgaatttaaaggagtctcttcttcgtggcatctatgcttacggttttgagaagccttccgctattcagcagagagctattattccctgtattaaagggtatgatgtgattgctcaagctcagtcaggtactggcaagacagccacatttgctatttccatcctgcaacagttggagattgagttcaaggagacccaagcactagtattggcccccaccagagaactggctcaacagatccaaaaggtaattctggcacttggag

SEQ ID NO: 44426 - DNA, 370 bp, Gossypium hirsutum
  Clone ID: LIB3196-001-P1-M1-C1
atcggagccggagacgagaccagaggccgaactcgggttctgacaagatgggcgggctgccccgcaggagcgtcaaggaaacccagcgtttgctggcagaaccagttcctggcatcaaagcagaaccagatgagagcaacgcccgttattttcatgtggtcattgctggccctcaagattccccctttgagggagggacttttaaacttgaactattccttcctgaagaatacccaatggcagcccctaaagtacgtttcatgaccaaaatttatcatcctaatgtagacaagttgggaagaatatgtttagatattttgaaagataagtggtccccaacactgcaaatccgcacagttctgctatcgat

SEQ ID NO: 44427 - DNA, 381 bp, Gossypium hirsutum
  Clone ID: LIB3196-001-P1-M1-C12
atccgccatggaggccgccaggggcagataatctacaactggcagggtgcccagtctacccaggatgaggtcgctgcatctgccatcctgactgctcagctggatgaggagctgggaggtacccctgttcagagcctggtggtccaaggcaaggagcccgcacacctcatgagcctgtttggtgggaagcccatgatcatctacaagggcggcacccttccgcgagggtgggcagacagcccctgccagcacccgactcttgcaggtccgtgccaacagtgctggagccactcaggctgttgaggtattgcctaaggctggtgcactgaactccaacgatgcctttgtactgaaaacacgctgagctgcctacctgtgggt

SEQ ID NO: 44428 - DNA, 379 bp, Gossypium hirsutum
  Clone ID: LIB3196-001-P1-M1-C2
atccatcccgctgcgctcctcctgggtcatgacctgtgcctatgcgcccggagggaactttgtggcctgtggggggcttgacaacatctgctccatctacagccctaaaacccgcgagggcaacgtcagggtcagccgggagctgcctggccacactgggtacctgtcgtgctgccgctttctggatgacaaccaaatcatcaccagctctggggataccacctgtgccctgtgggacattgagacaggccagcagacagtgggttttgctggacacagtggggatgtgatgtccctgtccctggctcccgatggccgcacgtttgtgtcaggcgcctgtgatgcttctatcaagctgtgggacgtacgggatttcatg

SEQ ID NO: 44429 - DNA, 302 bp, Gossypium hirsutum
  Clone ID: LIB3196-001-P1-M1-C3
atcccgcgggtagtggagcccgtttgttccgcccgcgtccagcctggagccagaacctgtgaggaacgggagggccaaaggacctcttcttcacgccggttcgacttcaacaaagccgggggcccctcttcgtcctaaggctgagaaccgtgggtaccgatggatgtggccgagagccctgaacgggatcctcgctctccagaggatgaagagcagccacaggggctctcggacgacgacattctgagggacagcgggtccgatcaagatttggacggggccggggtgagggcttctgatct

SEQ ID NO: 44430 - DNA, 376 bp, Gossypium hirsutum
  Clone ID: LIB3196-001-P1-M1-C4
ttggaaaaaattttgcttatggtccatatttggggaccagggttctaaggttaagaggaagttttgcttaaacacccacttggggggataaattttaagggcccttgcttttccaacttacaagggaaggcttggcaattttggaggctgtttaaaccccacgtaacccaaacccaaccaccaggccttgggtggaaaggggctatataatggtgaagaattaagcatactatttttcagccatgataggaacagagtgcctgcattcccaggaaaatgagaaaatcccatgagataaataaaaatctaggtgatgggcagatctttttcttaaaatagaaaaggaaaaactcttgtagtacctagtcagatggtg

SEQ ID NO: 44431 - DNA, 399 bp, Gossypium hirsutum
  Clone ID: LIB3196-001-P1-M1-C7
atccacttttcagcaatggtaccacactccactcatctcactggcgtactcagcaggaatgcccgcaagcctgggactgctgctgggactggcagagaagccaggttcttacaaaggataaaaggtcagacttgccttatcccccaccgtcgacttacatttcagctctttggagggaggagacagactgcttgggccaccagtgagctcccagcgccttctacactcactgcccataataggcacgaaatctgtgtttggtaaatgaaagttagggaagacaggaaagagtgggagaaggagataaagtgggagaaagagaaagaggcgaggaaaagagggaatgagggagagaaagtagagagggaggaagaaagtgaaatggaaaaacaagggggg

SEQ ID NO: 44432 - DNA, 351 bp, Gossypium hirsutum
  unsure (1)..(351): unsure at all n locations; Clone ID: LIB3196-001-P1-M1-C8
atggtgtattgtggctacttacagaccagcatctctacactgggtcctcatcaagcatgttaataagattgctggcctcaaacactgaaggttctctgaacatacaatggggtacatttattatattgtgtcttcatctttgacaaaactcggctataattcctggactaaaagagaaatctcgattggtatcctgtgacatgcctatttttgcaattaggaatgtaccctaaggcaagtaatgtgacaaactgtggcttaaaactaattaatgggtttgtttttctcatgttatanaagtctcgggaaaattgtccagggcttcagctactcaaaagtgacttgaagcag

SEQ ID NO: 44433 - DNA, 311 bp, Gossypium hirsutum
  Clone ID: LIB3196-001-P1-M1-D10
atcattttcatcttctgatggagcagcggagggcccggtcttatggggttctgcggctgtctcatcagatgcatccctcaagaaaactcctgcttcaaatgctaaatctgaaaggattaataaggggaagttcgcaccatctggtgggaagttggcaaaaatcgaggaaaaggtatcaatgatgatacaacaaaaacaagttctgaaggtgttgaacctcgtagatctaatcgcaggattcagccaacatcaacacttttgggagggctacacagctctttagccattttgaaaattcctttgggttcatt

SEQ ID NO: 44434 - DNA, 402 bp, Gossypium hirsutum
  Clone ID: LIB3196-001-P1-M1-D12
tgctctggatgcagttcctgtgaatggtgataggaatggaaactctgaagctgctgctgaaaatatgtcagcaagcagcttagtatctgggtacagtatggttgaactggaatccgaagaataccagtttctgtggggctttgctttgcttggtatatttcagggacaacatccagccctttgtaaacaagttataccgttagcctcagctaaagcgaaacatgatggagatactcctgctgaggatacaacttctccaggcttgaagttttatgaaattgttttgccagtgttccagtttcttttaacacagaagtttttctcagctggttttcttaccgtaaacatctgtgaagaactgctcctggtcttctcttattccatctacatggataattcatg

SEQ ID NO: 44435 - DNA, 362 bp, Gossypium hirsutum
  Clone ID: LIB3196-001-P1-M1-D2
tcgtttactcgtccggtggtttaagggatttttggtattcgtttcttctgacgcgcgattaccttacaaaaagagaaaatgaccaagtgttacccaactgtgagcgaggaataccagaagtcagttgaaaaggccaagaggaagctcagaggtctcatcgctgagaagaactgtgctccactcatgctccgtttagcgtggcactcagctggaacttttgatgttaagaccaagaccggaggtccattcggaaccatgaagcatcctgctgagctcgcacatgctgctaacaacggcctaaatatcgtcgtcagacttctcgagccgatcaaagagcagttccctaaccttaactacgctga

SEQ ID NO: 44436 - DNA, 58 bp, Gossypium hirsutum
  Clone ID: LIB3196-001-P1-M1-D4
acactatagaacaagttagtacaaaaaagcaggctggtaccggttcttaatttccggg

SEQ ID NO: 44437 - DNA, 197 bp, Gossypium hirsutum
  Clone ID: LIB3196-001-P1-M1-D6
atggcgtttgtatgatcttcggagattgctgcatcggaccttggccagtcataaaagatgacaacagcagccaggccaacctttgaacctgcaagaggtggaaggggaaaaggagaaggtgatttgagccaactttcaaagcagtatttaaggagagacctaccctctcacacaaaggttaaattccgaccaacttc

SEQ ID NO: 44438 - DNA, 397 bp, Gossypium hirsutum
  Clone ID: LIB3196-001-P1-M1-D7
tcgcatccttctgaagtagcttcgccatgggtgtggctatcatcgagaagcccttaacgaatcatcgatagtacccagtgagtcccaaaaagctccgaactttagaaacattcctcggaggtttccaatcaagaatggctgaaattttattcgaatcaactctaataccagaagcggatacaacatgtcccagaaagctgacctcccttaaccagaattcacatttactgaattttgcatacaactgattatctggcaaaatctgaagtacaagcctcaagtgttcggcgtgttcagactcgttgtgagaagtaatcagaatatcatctatgaacaccactacaaattgatctaaatactgtctgaatacccgattcatcagatccatgaaaactgc

SEQ ID NO: 44439 - DNA, 416 bp, Gossypium hirsutum
  Clone ID: LIB3196-001-P1-M1-E10
atcaagaatattgaatgctcagaacattgagaccaacgtagaacctttcttaaaatttagtaacttctttcttttctcatttatatatgcatttaacaaatatatttattgatttctaacaatataccagaccccattctagaaatttagggatataccagtgaacaaatggatataggaatcctggcttctattttaatggaaaaatgattaccgaaggtcaaattctacttttaattggcatggtatgatgtatcaaatggtataaggagcccattctctttccttgctagcatacttacagtcttccagatttggtgaatctggttattagttactatatcatgttcttgcaggatacatgtttcactcgataggtaaaaataattcagtgcattaaagaagttaaaatatga

SEQ ID NO: 44440 - DNA, 422 bp, Gossypium hirsutum
  Clone ID: LIB3196-001-P1-M1-E11
attgcgctctcacagtctggccaagaaggcacaggatgagggacgcctttctgatgtcgtaccctgcagagtaccaggaaaagatacagttaccaaagataatgggattcgtccttcctcactggagcagatggccaaactaaaacctgcattcatcaagccctatggcacagtgacagctgcaaattcttctttcttgactgatggcgcatctgcaatgttgattatggcagaagaaaaggctttggccatgggttataagccgaaggcatatttgagggattttatgtatgtgtctcaagatccaaaagatcaactgttactcgggccaacatatgctactccaaaagttctagaaaaggcaggattaaccatgaatgatattgatgcttttgaatttcatgaagctttctcgggtcaga

SEQ ID NO: 44441 - DNA, 422 bp, Gossypium hirsutum
  unsure (1)..(422): unsure at all n locations; Clone ID: LIB3196-001-P1-M1-E12
acaaccaaatacaaaacttgatactcggtaccgaaattcccggaatttttttttttttttttttttnanntttttttttttttttggggantttttttttttttatctggacagttataactcatttaccattcttagcttactgtaacctttagctacaagtttaagacctttttttgtattaaactaccaacaacttgcctctacaaaaaagcaccaccactcctaggttatttttttaaaatatttagtatacacaaaggttcaccacgttaaacaagactatgtcgaaataattactttattatctcaacgcataggccttctaaagagcttttattacaagtgttaaccacctatctcgaccaaaattgaactcacttttttactgtttttcaaattcattacatgattatttaaat

SEQ ID NO: 44442 - DNA, 400 bp, Gossypium hirsutum
  Clone ID: LIB3196-001-P1-M1-E3
ctctttctctctctgctcccaacgatccctcgttccttttctcttcaaaattcagccaacttttaagtatgtggggttttgcttctaacgccattgcaagcattgggttaaagaattcaaaagagtcgagtcgagcttgttccgagttttcagacgatgatgtatgttctaatggtagtagagatgaagggttggaatgtcccatttgttgggaatctttcaacatcgttgagaatgttccttatgttttatggtgcggtcataccctttgccaaaactgcatcttggggcttcaacctgctgttttgaaactccccacttctcaattcgagatccctttgatcgtttcttgcccatggtgccacttgctatcgctccgacttctttataaagggaacct

SEQ ID NO: 44443 - DNA, 146 bp, Gossypium hirsutum
  Clone ID: LIB3196-001-P1-M1-E5
gtttgtacaaaaaagcaggctggtacccgtcccgaatttcccggatcagccaggcagcacattacaccgggaggagctgttccacgtggcgcaactcaacaatggcaatggggggccccaaaggcattatgctctaactctttggg

SEQ ID NO: 44444 - DNA, 383 bp, Gossypium hirsutum
  Clone ID: LIB3196-001-P1-M1-E6
atgcttcccttctggtcccaatacagctgtggtagtttgagacttacatccttctaattggaaggctagtgggaacaatttctatcccatgattcctgacaaactgtccttttcatctctttggctccagttggctcatagatccgcctaaaaaatgaagcactgttgtaagggagctggcatgactgcttgactcacgcccatgtcatatgcgtcactcctgagatggaattggaaccctctgtcccaagcacacgggctaagaataggaggatagtttcctggagggaatttggtgtccagctatcacaacagggaatagataggtagcaagaaaatcacaaatgctcagtcttcctacctacttccggaaggatttgcag

SEQ ID NO: 44445 - DNA, 400 bp, Gossypium hirsutum
  Clone ID: LIB3196-001-P1-M1-F1
atccccgactcaacgtgagactcaccgcccggactcaccatgcgtgaatggatctcagtccacgtggggcgggcaggtgtccagatgggcaatgcctgctgggagctctattgcttggaacatgggattcagcctgatgggcagatgcccagtgacaagaccattggtggaggggacgactccttcaccaccttcttctgtgaaactggtgctggaaaacacgtgccacgggcagtttttgtggatctggagcctacagacattgatgagatcctaaatggcccataccgacagctctttcacccagagcagcttatcactgggaaagaggatgctgccaacaactaatcccgtggtcactataccattggcaaggagatcattgacccagtgctggatc

SEQ ID NO: 44446 - DNA, 411 bp, Gossypium hirsutum
  unsure (1)..(411): unsure at all n locations; Clone ID: LIB3196-001-P1-M1-F10
tcgcctacgcgtccgttcccctccgcaaggagccagccgtttcacacactgaagaagagagagagctcgtaaatcatggcggaacagaccgaaaaagcttttttgaagcaacccaaagtgtttttgagctcgaagaaaggtgggaaagggaagagaccaggaaagggtgggaatcgcttctggaaaagcattggattgggcttcaagactccccgtgaagctattgaaggaacctacatcgataagaaatgcccgttcactggcatggtttcaatccggggtcgtatcttagccggtacttgccatagtgccaagatggtcaggacaatcattgttcgacggaactaccttcattatatcaagaaataccaaaggtacgagaagcgccattcaaacatccntgcacatatt

SEQ ID NO: 44447 - DNA, 113 bp, Gossypium hirsutum
  Clone ID: LIB3196-001-P1-M1-F12
cggatctttttccttttaacttcaagcttttaagcttttcacaagccggttatgttctggaaccatgggcgggacattcaccaccattaggggccacaacaacagccccaagg

SEQ ID NO: 44448 - DNA, 401 bp, Gossypium hirsutum
  Clone ID: LIB3196-001-P1-M1-F2
gactaattcatcaatttccataaagtaaagggatggaattttagtagtaaaaaaagcagctgtttgtgtgagtttcgatgagtttcgaagatcacgtattttgttttctgcactgagtttggaaagattttaaagcttcttcaacaattctatttacacccaaattcctttttttttaaataaaataaattgaattattaaactttttagagtattaaaaatataagttttcattaaattaaaagaataaaagggttaaattaaaatatatatatttaaaagggactaaaaaaaattgtaccatttaatcaagggagcgaagcaaggtagtgagttctaaaccgatgaacatacctttcttgctctagtattggtatgtatttgtatctgtgtattttagt

SEQ ID NO: 44449 - DNA, 202 bp, Gossypium hirsutum
  Clone ID: LIB3196-001-P1-M1-F3
atgggctggccaccccccaccgcaaccatggacgccatcaaaaagaagatgccgattcttaaactgggcaaggggaaccccatttaccccgcccaggaagcccaaacccacaagaaacaaactctggacccctttaaagaacttgaggaggggccacaagcccttccaaaaaaactttaagggaccaaaggttaggggggaa

SEQ ID NO: 44450 - DNA, 142 bp, Gossypium hirsutum
  Clone ID: LIB3196-001-P1-M1-F7
attgactcgaccaaggcttatgttacagttctgggagacatcatgggcacagccctgcagaaccgagatggtctggtgcaaatgcccagtggctgtggcgagcagaacatggtgttgtgtgctcctatcatctatgtgttgc

SEQ ID NO: 44451 - DNA, 406 bp, Gossypium hirsutum
  Clone ID: LIB3196-001-P1-M1-F8
atgttgaattctagttgtgccagaattgtcttgggttttattagacttcttgaaagctacatttgcttgtctccatgatgctttctgtctctttcatcatttttagcaggtgacatgtttcttactttagctaatagctagaggtcactcaaaggaaacaatttgacaaatcaacttcagaatgaaaccctttgcatccagttgaagaatacacagcaatgtcttgtaaatgtagcacactgtggagcttttaaggtctccatagtaagtaagtgttaaacgtacctgtgattaaactctactgccatggtttactttatatactaaagaaattcttggaagtttatagtttatagggaaatctaatgtcccaattaggttatattatacaggcaccaggaaaact

SEQ ID NO: 44452 - DNA, 373 bp, Gossypium hirsutum
  Clone ID: LIB3196-001-P1-M1-F9
atgggccctcttgcttctctgatagctcccagcttactctctgcggccatgattgccagacagcggggtgtccaaagcggctctcggggcttcagctgtggctcacccatcgtaggcagtggcaagagaggtgccttcagctcagtctgcgtgtctggaggcgctcgccgatgctcttctgggggctttggcagcaggagcctatacaacctgagcgggaacaagagcatctccatgagcgtggctgcgtcacgacaaggcgcctgctttggaagggctcgaggcttcggcactggtggctttcgcggaggattagggggctccttcagcggtaggatggccctggcttacctgtctgccctgctgggggaat

SEQ ID NO: 44453 - DNA, 261 bp, Gossypium hirsutum
  unsure (1)..(261): unsure at all n locations; Clone ID: LIB3196-001-P1-M1-G1
atcccggcccgaccttgccctctccttcgccaccgcctcggaccggagaggtcgccttttccccacgctgggggtattttcaaatccaagagcggccctgagtatgcttcgtttttcgccgtcatgggcccctcggccgccattgtcttcaacgccctgggcgcttcctatggcacaaccaaaaacggcaccggcattgcggccatttctgtcatgccgccagagctgatcatgaaagccatcattccagtggncatggct

SEQ ID NO: 44454 - DNA, 124 bp, Gossypium hirsutum
  Clone ID: LIB3196-001-P1-M1-G11
aggagcctccacctgcagagctgctccgacagctatggaggtgggtatgggggtacacacttgccagatgccaggcggccggggtatctttagctaagaaacaacgcacgtcgctggcgtatca

SEQ ID NO: 44455 - DNA, 291 bp, Gossypium hirsutum
  Clone ID: LIB3196-001-P1-M1-G12
atggagcaagcgagtaggtctgcgcgcagtctgagcggcgcgcgtacagtcccgaggtccacgccagcacgccctcatggcccccgcagcggcgtcggggggcagcaccctgcccaggggcttgtcggtcttcaccaccttccccgacttgctcttgatgtttgagtttatcttcaggggcctgctgtggatcctggtggcctactacctggtgccgtggcccttgagagatggctcagggatgttcgtgtatctgttgtgctttgtgagcgccagtacctagatcatact

SEQ ID NO: 44456 - DNA, 146 bp, Gossypium hirsutum
  unsure (1)..(146): unsure at all n locations; Clone ID: LIB3196-001-P1-M1-G2
accagaaagagagngggaaagagaaccaccccacncngncnncagagnggcgtttcacgnnnaaccgccgggtggaaanagaaagcannccccnagcgangagganaaaagaaagggggnaanncaacagggggaagaaaacggag

SEQ ID NO: 44457 - DNA, 208 bp, Gossypium hirsutum
  Clone ID: LIB3196-001-P1-M1-G3
atgtttttcagctgctatgttgggagagaaacaagggtagaatgtgcattcgttagtttggataggggcgggccccattattcctcctgtccaggtccaatgaaacctcaagtggcaataaaagtaaaccgaggctttgcccctaaaacaacccattggatttcgattaaatcaacccacattgcctttttggacaaaggggagaggg

SEQ ID NO: 44458 - DNA, 61 bp, Gossypium hirsutum
  Clone ID: LIB3196-001-P1-M1-G4
cggatcacgttgttctcttaagcagccaagcggagcgatcaggggccagcacagacttcta

SEQ ID NO: 44459 - DNA, 225 bp, Gossypium hirsutum
  Clone ID: LIB3196-001-P1-M1-G5
atctcgtcaatcgcgtgagtagagcgatgagcctccgcctgcagagctgctccgccagctatggaggtgggtttgggggtggctcttgccagctgcgaggaggccgcggtatctttagctgagcaacatcgtttgtctctgggggatcagcttgaggctaccgaagcagcatgacctgtggatctaacagaggcacccttggtggctttcgaggccgctacgaag

SEQ ID NO: 44460 - DNA, 273 bp, Gossypium hirsutum
  Clone ID: LIB3196-001-P1-M1-G6
attctcaatcctgcttgtaccattagcctccgcctgcaaagctccggcgccagctattgaggtggtgtggggggtggctcttgccagctgggaggaggccccggtgtctctagctgttcaactcggtttgtctctgggggatcagcttgaggctactgaggcggcgtgacctgtggctttggtggaggggctggttgttgcttttgaggtggcttcagaggtggcctttgaggtagctttttttgggggttattctagttgctttttttattt

SEQ ID NO: 44461 - DNA, 370 bp, Gossypium hirsutum
  unsure (1)..(370): unsure at all n locations; Clone ID: LIB3196-001-P1-M1-G7
atgggacaaatacgttagtttttgctaaagcttttaagttaagaggcatagaattgggggaatgggtaataaatcagatttcatttagttatttaccacatgaatcactttccttccaacagttgtcgtaagagccatgtgttcatgtgtaatgaagaccagtatttaactgtgggaaccgtgggtggcgtggcgaaggagactgnccgtgactgtgccagtctccgcagccccgactgctgtcctgagtcctcggctccttggcgtctggactggtttttttttttgtccagccgaaaactaaagggccagacaggtgaaaacacacacacaacttggcaggtgaagatattaaagattgaaattgcaa

SEQ ID NO: 44462 - DNA, 391 bp, Gossypium hirsutum
  unsure (1)..(391): unsure at all n locations; Clone ID: LIB3196-001-P1-M1-G8
tcggtgctgtcgtgtgacttggctactcgggctctacctggtcggcgtgtggctactcatcgtcctcggcatagtcttcaccatcttcgctttcgtagtgacgaacaaaggtgcgggacacgtattatccgggaaaggttataaagaataccgacttggagattactcaaactggttgcagaaaagagttactgataacaagaattggaataagattaaaagctgtttggctgatagtaaaaggngnaccgatttccatgataaatatctcaatgctgctctcccagagatttaccagcctcacttatctgccgcacagacgggttgctgtaaaccatcaaacgattgccagctcaattacgttgggccaactaactggacaagggggagt

SEQ ID NO: 44463 - DNA, 404 bp, Gossypium hirsutum
  Clone ID: LIB3196-001-P1-M1-H10
atggcagtcctattttgtgttgcatcgccagcgcattcctgagacaccatggggaaggtgaaggtgggagtcaacggatttggtcgaattgggcgcctggtcaccagggctgcttttaactctggtaaagcggatattgttgccatcaatgacccgttcattgacctcaactacatggtttacatgttccagtatgattccacccatggcaagttccatggcaccgtgaaggctgagaacgggaagctcgtcatcaatggaagccccatcaccatcttccaggagcgagatccctccaaaatcaagtggggcgatgctggcgctgagtacgtcgaggagtccactggcgtcttcaccaccacggaaaaagctggggctcatttgcaagggggagccaaaagggt

SEQ ID NO: 44464 - DNA, 430 bp, Gossypium hirsutum
  Clone ID: LIB3196-001-P1-M1-H4
atcgggtttgccgccagaactcaggtgtcgtgaaaactacccctaaaagccaaaatgggaaaggaaaagactcatatcaacattgtcgtcattggacacgtagattcgggcaagtccaccactactggccatctgatctacaaatgcggtggcatcgacaaaagaaccattgaaaaatttgagaaggaggctgctgagatgggaaagggctccttcaagtatgcctgggtcttggataaactgaaagctgagcgggaacgtggtatcaccattgatatctccttgtggaaatttgagaccagcaagtattatgtgactatcattgatgccccaggacacagagacttcatcaaaaacatgattacagggacatctcaagctgactgtgctgtcctgattgttgctgctggtgttggtgaaattgaagctg

SEQ ID NO: 44465 - DNA, 242 bp, Gossypium hirsutum
  Clone ID: LIB3196-001-P1-M1-H9
attgctgtgcgtcgtagcgaccatccgctttctggtgccggctgcgatcttcgcccacctggagggggcctggagcttcctagatgccttctacttctgctttatctctctgtccaccattggcctgggcgactacatgcccggggaagcccctggccagccctaccgggccctttacaaggtgctggtcacagactacctcttcctgggcctgatggccatggtgctggtgctacagacct

SEQ ID NO: 44466 - DNA, 314 bp, Gossypium hirsutum
  Clone ID: LIB3196-002-P1-M1-A1
tcgaaaacataagaataagggatgaagttgaattggtgaacctaggggtggaagtggaaatatgcaaaagtttatgggcaaaattttaattttgtaaaagtttgagttaaggattgttttgaatattacattaattaaataaataaaatatgatgttttagatcccgaaaaacgagatttgtacctagaatgagagaaaaatcgaaaatttggaaagctggttaaatggtcgtttttggatcgaggtaagttcatatgtataattagcattaatttatgcatgtttcaatgtaaaatttatatatttattatga

SEQ ID NO: 44467 - DNA, 403 bp, Gossypium hirsutum
  Clone ID: LIB3196-002-P1-M1-A10
atggccaagctagcttctgtctgcacctgctctcaatccggctgtgaccatgagcctccggctgcagagctcctccgccagctatggaggtggttttgggggtggctcttgcccgctgagatgaggccgccgtgtctctagctgttcaactcggtttgactctcgcggatcacctatcggctacggcagccgcgttacctgtggctttaatcgaagggcttgtagcttctttccaggtggctaccctgtgtgctccaggaagctgccatctctctgcttctgcgggtgctgaagacagatggagggcacaccatgcagatttaaggcctacggacatcaaaagtgccgctgccagaggcattagacgtggtggtagcatacacactggaagttgtggcaacag

SEQ ID NO: 44468 - DNA, 233 bp, Gossypium hirsutum
  Clone ID: LIB3196-002-P1-M1-A12
atgcagagaagacgggggcccaggagctgctcagggtgctacgggcccaacctgtgcaggtgggagaaggcatcgagccacatggcttctgggaggccctgggcggggaggcttgctaccgcacatgcctactgcttgaggccgagaagatcgatgcccctacttctcgcctctttgactgctataacaagattggacgttttgtgatcaaagcggtttctggtgagctcatg

SEQ ID NO: 44469 - DNA, 316 bp, Gossypium hirsutum
  unsure (1)..(316): unsure at all n locations; Clone ID: LIB3196-002-P1-M1-A2
ccctacttaatcttncttttataatttaaaattaccttcctgttcattttaagaatacacaaaaaactttcttatttttccaaatttttcctattacctattcttatctttttttaaaactttttattaaaaaataatttatatttttattctattttaaatatattctcttttttcttaaaaatttatatattaatttatatacctctctttattttttcaaatttcttatattttaatattttttttatctaaaatatatcattttttttttatttttttatttattatttattctcctataaaatttcatttt

SEQ ID NO: 44470 - DNA, 319 bp, Gossypium hirsutum
  unsure (1)..(319): unsure at all n locations; Clone ID: LIB3196-002-P1-M1-A3
tcgcccacgcgtccgcgaacccatgggtggtgattgaactataactatagggcgcgctaaaacnacttcantggcttcttcgcatcagcaaatatctgttgcagttgtgacaaagtttgtaccgtggaatgaaaaagcattaaccagatgcactttattttcgtctcagcctgcaacacttgcagccaatgtaaaagcagtgttcacttgcctacttgaccaagtcagccaatatattactgattgactggaacgggctaaagatagcttgactgaggcttgcaccattacgtaaaggtttgtgctaggtacaaatctt

SEQ ID NO: 44471 - DNA, 417 bp, Gossypium hirsutum
  Clone ID: LIB3196-002-P1-M1-A4
ataccgctgaacgtgtcccagtggctgatggtgctgaaaatctcgtggcgcgtgattctcatggacgagaggctcaagtttgtggcccgcaactacctggaacctggtaaagagtgtgtgcagcctgccaccaaatcctgctcgttctcggcatgcaccgatgggatttcctggccgtttgtgctgctcataatgcccctggtgatctgggtctatagcacagacactaactttagtgatatgttctggtcttgactgacagttttccataaagaagatgtttaacttaatcaattttttttattgtttaaagcaactgtctatttctgctgaattttcacatgaacatactggctggtgatggaggtttcatactctagattttgttttgctttttctgactccagtggggcaaga

SEQ ID NO: 44472 - DNA, 407 bp, Gossypium hirsutum
  Clone ID: LIB3196-002-P1-M1-A5
tcggtagtcccatataagctagggataagagtgaagcggatgaaatagaagcatacgattgtgagtggtgtcaaatattctcttcgacaagtgtggatttcttgctttgacacagtccacttagaacctggaactgtaagttccttgagaatttcttgcaaattttcaggctccatattgctcattaagggagaatattcatcgttttcaaaattcagcaattcaaagaactcattaatagcatttgaagttaatggtaccttgattctgcgaactggaacttctgtcaactcacttgaggttaaattcacatagaactctcgcactaactcctcatccacactaggtttcttctcataaaacaactcccaattgagagttttagcaacctgatggatatgcgccat

SEQ ID NO: 44473 - DNA, 163 bp, Gossypium hirsutum
  Clone ID: LIB3196-002-P1-M1-A6
aaaagcggctggtgccggtcccgaatttcccggatcagctttaaaccattatacttattttttaacttagtggaaatattgggggcggttattcctttatggacgttatataaaggaaccttttaaaatcttttatgacctaaattatggctttattttggtg

SEQ ID NO: 44474 - DNA, 386 bp, Gossypium hirsutum
  Clone ID: LIB3196-002-P1-M1-A7
tctaccaactggtaccaacacagcggcaggggccattgtgaagtagtgaagggaaccggacaaccctactaaatcttgcaaagctaggggttctgaccttcgtgttcattttaagaatacacgagaaactgcctttgcaatccgaaagctacctttgacgaaggcaaaaaggtacttcgaagatgttattgcccacaagcaagcaattccattcaggcgcttctgtggtggagttgggcgaaccgcacaggctaagaatcgccattctaatggacaaggccgttggcctgtgaaatcagcaaaattcattctcgatttgctcaagaatgccgagagcaatgctgaggtgaaaggcttggatgtagattcacttatcgtatctcaca

SEQ ID NO: 44475 - DNA, 75 bp, Gossypium hirsutum
  Clone ID: LIB3196-002-P1-M1-A8
tgcgcgctagccggtaccgaaccgcaatttccacctacacctacgcctacgcggacgcgtgcggttctagagcgc

SEQ ID NO: 44476 - DNA, 414 bp, Gossypium hirsutum
  unsure (1)..(414): unsure at all n locations; Clone ID: LIB3196-002-P1-M1-A9
atggactattctggatcaggttccggctccggctctggatcaggagtctgtagtggcttggtaacgtgaaatggaacaagattaccaaccagtagatgaaagtgatgctttccatgacaaccttaggtctcttgacaggagtctgccctcagacagccaggacttgggtcaacatggattagaagaggattttatgatataaaagagaattttcccaccttgacaccaggcaatgtatttagcatattttgcgtaccatggttagatgatcaaccttgggacaaaggattttatagacatttttaaacatctgaaaaagaagcttaagttttatcatcctttttttctcatgaattcttaaaggattatgctttaatgctgntatctatcttattgttcttgaaaatacctgca

SEQ ID NO: 44477 - DNA, 422 bp, Gossypium hirsutum
  Clone ID: LIB3196-002-P1-M1-B1
atggcccggccaccctctaccctccccatgcctctctcttctctgctttgcttctcacttccaagtccacgggcagtgcttgatagaatcactcccacctggaggggctggctcttgccctcccggagcctatgggttgagccgtaccccaaggccccctgcccagctgggcttgtgctgtgcttcattcacctctccatagtctctaaatcttcctcttttttcctaaagacagaaggtttttggtctgttttttcagtcggagcttctcttctctaagaggctttggaatgatgaaagcatgtaccctccacccttttcctggccccctaatggggcccgggccctttcccaacccctcctaggatgtgtgggcagtgtcctggcgcctcacagccagccgggctgcccattcacgcaga

SEQ ID NO: 44478 - DNA, 404 bp, Gossypium hirsutum
  Clone ID: LIB3196-002-P1-M1-B10
tatctggaacctctcatactctctctcaatctcaattttctcaatggtaaagtttatctaatatgttggtggtgaggtaatcatattattatctcaaataggcgattgtatatgaaagggctctggaaaggcaaatcccataatttgcttaaatccacttcttcctccaaacaagatatctcatataagaatgcgaacttaatctgtatgtgtcatttctttcaagtcctatctgatgtcgcttgtgactttctgagatttcctttcgcatctcaccaggttggctttccaaaaaaacgcaacaaagaaattagactgaaagataggacgacccagcctcaattacttaggcttgcggctcctaagactgattctagcttgaccaggacctgttgagatatact

SEQ ID NO: 44479 - DNA, 468 bp, Gossypium hirsutum
  Clone ID: LIB3196-002-P1-M1-B2
gggaacgctgaagcgccttcatgcaccgccccaatattcccgatctgacccacgcgttcgctagtagctgacattttgcatctaaggatggcaaacaacaatgtgggctgagcggatcccattctcttccaatgttgctcatgcatgtaagctatgcacgcatgaacattacatcaaagctggccctggaatctgggatgtaacctcttattcttgttgctcaccggcaaatctttgccactactagccattggtgcttctgactttttcttagagcggaaaacaaggcctacgctgaccatgccaattcttttccagattttcttatgctcactgacaggggcaacagcaaaccaggttttttattttgtagggctgcaaaatactactgcaacgattgcatgtgcattgaacaatgtactgccagcagccacatttcttctcgcagccatttgcaggcaagaagct

SEQ ID NO: 44480 - DNA, 386 bp, Gossypium hirsutum
  Clone ID: LIB3196-002-P1-M1-B3
attgaaggcctcgcagtgctgctgctgtctcagccacctcttggcttccggcctcctcctgctgctgctggctgagctaagcgggcccctggcagtcctgctgcaggcagccgaggccgcgcaaggtcctgggcctcctgaccctagaccacggacattgccgccgctgccaccgggccctaccgctgcccagcagccgggccgtggtctggctgaagctgcggggccgcagggctccgagggaggcaatggaagcagccctgtggccgggcttgaggcggacgatcacggagggaaggccgtggaaggctcactgggtggcggccttgctgagagccccaaccctggcgacaagcccatgacctaacgcaccctgaccgtgttga

SEQ ID NO: 44481 - DNA, 406 bp, Gossypium hirsutum
  Clone ID: LIB3196-002-P1-M1-B4
tcggaaaaaaatgggagatcagttagcgaaaggagaagaattcgtgaagaaagcagagaaaaagctaaatggttggggcttgtttagttctaaatacgaagacgccgccgatttatttgataaagctgctaattgcttcaagcttgccaaatcatgggacaaagctggatcaacttatgtaaagttggcgaattgccatttgaaatcagacagcaagcatgaaacagctcaagcttatgttgatgctgctcattgttataagaaaacagctacaaaggaggctatatcttgcttgcagcaagcagtgaacttgttttgtgatattggaaggctaagcatggctgcaaggtattataaggaaattgctgaattatacgagtctgaacagaacattgagcaggccatg

SEQ ID NO: 44482 - DNA, 68 bp, Gossypium hirsutum
  Clone ID: LIB3196-002-P1-M1-B5
atgccaccttactcttcctgggtttcccttcggttttcccttcttagggagtgggaggatttttgtgt

SEQ ID NO: 44483 - DNA, 423 bp, Gossypium hirsutum
  Clone ID: LIB3196-002-P1-M1-B7
atggctgaacaactcaaccttctctgcacagtgggtccagcatcctttgaagcatgagttcttaccaggagaagcagacctttaccccaccacctcagcttcaacagcagcaggtgaaacaacccagccagcctccacctcaggaaccatttgttcccataaccaaggagccatgccacccaaaggttccacaacctggaaacacaaagattccagagccagattgcaccaaggtccctaagccaggctacaccaaggaccctgagccaggcagcaccaaggtccctgacaaaggctgcaccaaggtccctgagccaggtagcaccaaggtccctgacaaaggctgcaccaaggtccctgagccaggcagcaccaaggtccctgagccaggcagcaccaaggtccctgacaaaggctgcatca

SEQ ID NO: 44484 - DNA, 422 bp, Gossypium hirsutum
  Clone ID: LIB3196-002-P1-M1-B8
attcctgaagtaaagcaagacacagtgtcagaaccagtcacacgtgcatctcttgctgccttacagagtgatgtgcagccagtgggccatgattatgtggaggaggtacgaaacgatgaaggaaaagtaattcgcttccattgtaaattatgtgagtgcagctttaatgatcccaatgctaaggagatgcacttaaaagggcgaagacacagacttcaatataaaaaaaaagtaaatccagatttgcaagtagaagtaaagcctagtattcgagcaagaaagattcaagaagagaaaatgaggaagcaaatgcagaaggaggagtactggcgaaggcgagaagaagaggagcgttggagaatggaaatgagacgttatgaagaggacatgtactggagaagaatggaggaagaacagcatca

SEQ ID NO: 44485 - DNA, 399 bp, Gossypium hirsutum
  Clone ID: LIB3196-002-P1-M1-B9
atgagtttgaaaaacaagatgaattaaagcgatctgccatgagagcgagagcagcactgctgaccagtccaaaagcaaaaaagagtccactgatgagtgaatttcagtcacagatcagttctaaccctgagctggcggctatctttgaaagtattcagaaagattcatcatctactaacttagaatcaatggacactagttagatggttgatcaccatggggaccattacagatgaccatacaatgcactgaattgacaggttaatcataagacatggaaagagaagtgtctaaaagcttcaaaatgttccacttttttttccttcgtggagacttgatgcttggctttcttccattgaagtactgtagcatttatgtcagaaatgtgtattttcataa

SEQ ID NO: 44486 - DNA, 423 bp, Gossypium hirsutum
  Clone ID: LIB3196-002-P1-M1-C1
atcaaaaatgctactgatcaaataagcttttaagaattggaaaaataaaaatacaaaagtccttcaccattatcctcaggtgatcagtagcattgccttgtcttggatcctcagtgctgccaaaaggccagtataaagaatttatatttgcactgtaaactctgcaaaaatatggtttaaagtgacatgattgcactgaaaagggatagtgcttttgtgaaatttttcaaatttgagtaatagatgcctttttaaggcagtgaatttacacaaatatgggaggggtatatggtgttactgatttttagacctctttgaccatcttctagtttttacttctagtttttacatctaggagaattgtgaataacaccaactgttcttaaactctttaattccatgtcttaaatgccggtatttgct

SEQ ID NO: 44487 - DNA, 524 bp, Gossypium hirsutum
  unsure (1)..(524): unsure at all n locations; Clone ID: LIB3196-002-P1-M1-C12
cgacactatagtaacaagctttgtacaaacaaagcaggcttggtacccggtcacggaatgtcccgggtatcagcgtatccgtcctcgcagagcaccagagctctcgctctttgcccggtctcgccgccctgttcacaccgcgcgcgccaggctcgctcatgttnnatgattgatatcgctcgcgccttcgttgtcgacagacggcttccggcattgtgccaaggggccggcttcgctgggccgacgagtgccccccgggcccgtcttccctctccatcgtggggnncgccccaggcaccagggcgtgatggntgggcatcggtgtcagaaggattcatattgtgtggcgacgaggctccagagcaaggagaggcanttctcaaccctgaagtactcccatcgagcacggctatcgtcaccaactgggacgacatggagaagatctggcaccacaccttctacaatgagctgcgtgtggcttctgaggagcaccccgtgctgctgaccgaggccctcctgaaccc

SEQ ID NO: 44488 - DNA, 356 bp, Gossypium hirsutum
  Clone ID: LIB3196-002-P1-M1-C2
tcgcccacgcgtccgttttttttttttttgtttttgaaagcaaacttcttctttttatataacttctcatacaaattgaaatccacatgatatgacaaattaaatcacaaactctaaagaaaaatatacatagaaatccaagcatttttcactgcaaatcaagacgaaaagacgtgagaacccaacaacaataacaccatgtaataactgaaaccaagcttcctattaagcaaggaattagctccattggcgaggctcccagttggcttattggaagaaagaaccaccaccattcaatcattttcggcactgagtccgattccagtgaaggtggaatcgtttatgtatttaagaga

SEQ ID NO: 44489 - DNA, 415 bp, Gossypium hirsutum
  unsure (1)..(415): unsure at all n locations; Clone ID: LIB3196-002-P1-M1-C6
atgaaaaagaaggaagaggaggaagatgaggaagatgaagaggatgaggaggaggaggaagatgaagaagatgaanatgaagaagaagatgatgatgatgaataagttggttctagcgcagnttttttttcttgtctataaagcatttaacccccctgtacacaactcacttcttttaaagaaaaaaattgaaatgtaaggctgtgtaagatttgtttttaaactgtacagtgtctttttttgtatagttaacacactaccgaatgtgtctttagatagccctgtcctggtggtattttcaatagccactaaccttgcctggtacagtatgggggttgtaaattggcatggaaatttaaagcaggttcttgttggtgcacagcacaaattagttttatatggggatgtttgtttt

SEQ ID NO: 44490 - DNA, 187 bp, Gossypium hirsutum
  Clone ID: LIB3196-002-P1-M1-C7
acgaagttcggccatgcttgtaactagattgaggtatgtttgatattattctttaaaattcatgtatattttaagttgttagtttgaattctacctagcccatggttcaaattttgctatttgatggagatgatattctgccatggatgttgtatttcttgggtggtgttttgatgttttcgttatg

SEQ ID NO: 44491 - DNA, 330 bp, Gossypium hirsutum
  Clone ID: LIB3196-002-P1-M1-C8
atggagattgtcgttcatcctcgagccgttgagcagctgaacaggggcaatgctggggcgcgcccgggcctgagacgaccacgcctgtgccactgaggaccttcagcagggctccattcacctggcccacttggctgtccagtcacactccagtgtcaaccactggcacccagcagccaagagaggtgtggcgtggccctggggacccatggctgatgcagggacaggtgagccgtcccccaacgtggagggcgagcacgttacggagtatgacacgcttactttcgacacagtctttttttagcgtctttggacttttgacctcaattt

SEQ ID NO: 44492 - DNA, 130 bp, Gossypium hirsutum
  Clone ID: LIB3196-002-P1-M1-D11
atgtcctatctgggggttaatcaggctttttctctattgcgtcgctcctactgtgcgtgcgcgatagtgtgtgttggggtgacagttggaatttctggaatggtggatgctggggggaggagtttgctgg

SEQ ID NO: 44493 - DNA, 414 bp, Gossypium hirsutum
  Clone ID: LIB3196-002-P1-M1-D12
atcgtcaacagatcaaagcagcatatctccaggaaacaggaaagcccctggatgaaacactgaagaaagcccttatgggtcaccttgaggaggttgttttagctctgctaaaaactccagcgcaatttgatgctgatgaacttcgggctgccatgaagggccttggaactgatgaagacactctgattgagattttggcatcaagaactaacaaagaaatcagagacatttacagggtctacagagaggaactgaagagagatctggccaaagacataacctcagacacatctggagattttcggaacgctttgctttctcttgctaagggtgaccgatctgaggactttggtgtgaatgaagacttggctgattcagatgccagggccttgtatgaagcgggagaaaggagaa

SEQ ID NO: 44494 - DNA, 354 bp, Gossypium hirsutum
  Clone ID: LIB3196-002-P1-M1-D4
atgcattgtgcacgatatagagaatgtgtcagtatttcagggttcgacattgtatctgtaaaatgtgacttggtttttttatcacaacagaagtaaaatgttgctttgtacctggtgtcttttattaagaatttactccccccatttctcacagagaataacagtcgggagtcattgtcacaatataatagaaatgttagcaaccagattcatgtaaggactaagtggtccttatgaattgcattaagactctgtactgctcatattacactccatcctttttttagtttgctgggtagtggaaggtgttaagcttaattgtagtttctggcattaacctggaaggatttttct

SEQ ID NO: 44495 - DNA, 366 bp, Gossypium hirsutum
  unsure (1)..(366): unsure at all n locations; Clone ID: LIB3196-002-P1-M1-D6
tcgcccacgcgtccgggcagttaaaggaagtgttgggtaccttgaccctgggtgtttcanaanacaacaactgacagagaaatctgatgtgtattcatttggtgtggtcttgtttgaagttctttgtgcaagaccagtgatcgatcccactcttccaagggaaatggtaaatctagctgaatgggcaatgaaatggcagaagaaaggacagctggagcaaataattgatcctagtctcaaaggaaacatcatgcctaattctttaaggaagtttggagaaacttcctataaatgtttagcttattttggtgtctacaggcccttcatgggagaagttttatggaacctgtagtatgctctttaact

SEQ ID NO: 44496 - DNA, 385 bp, Gossypium hirsutum
  Clone ID: LIB3196-002-P1-M1-E10
tatccggaaagaagacatggctgtgcatgtccgtcgtgaccatgtggttgaagactcctatcgggaggtgcatcgcaaatcccctgaagaaatgaagaatcgattgtatatagtgtttgaaggagaagaagggcaggatgctggcgggctcctgcgggagtggtacatgatcatctctcgggagatgtttaaccctatgtatgccttgttccgtacctcacctggtgatcgagttacctacaccatcaatccatctttccactgcaaccccaaccaccttagctacttcaaggtttgtctgacgcatttgtggccaaagcttgtatatgacaaccctacttctaggagttgctactttactttgatccttttacaaacacaattt

SEQ ID NO: 44497 - DNA, 266 bp, Gossypium hirsutum
  Clone ID: LIB3196-002-P1-M1-E11
atcaagccgcaggtgagacctggtacaggttaagaatgggatcagtggagagcctgccattccttcagctaaggtcaggcccctggggcgctcccccttctgttgatagcatgtgggagtgagaaaacaaagtcattgagcataaggaatgagtgcttctgtgcccatatttaaggggtgaccttggagaagctactctgtgggcatgacagcaaaggagaaaatcatttggcatattaaggtctgtcatgctttattatgcatag

SEQ ID NO: 44498 - DNA, 402 bp, Gossypium hirsutum
  Clone ID: LIB3196-002-P1-M1-E2
tcggagcaaaacgaaccaagatggaaggcttaggggtaaagctcccttcttttccatttctaagccctaatatttcatcatcatcttcttcttcgacttttcggcttggtttccgccgcttatccgcttcgacttcagccgccgttaaagaaggttccggctcattaggccaattaacccgacccgacttccccatactccatcaggaagtaaaccggtcgaagcttgtttattcagataatgcggcaacctcccagaaaccaacggcagtgtctaaatctctgcagaattattatgtagcttacaattcaaatgctcatagaggaatccactacttgagtgccaaggcaacttattaatattagttggcacgcaagaatgtggcagcttttattaatgcat

SEQ ID NO: 44499 - DNA, 433 bp, Gossypium hirsutum
  Clone ID: LIB3196-002-P1-M1-E3
atcccggggcagagtttcgctcctccacctctttttttcccaccaacccggccttttaccactgaggctgggccccaacatcacacctcttcataatcatcattattctccaccttattcacaactttatgactttcattcttcttgacttactctttttttaccttaaactttacttctatttacaaccatattaatttcattcctcttcattaagatattattatgtttattcatcctttttactttattcaaataataattttattttatttttttcttcatctcatttttaattcgtattttatatatttttctttctttcttttttataatcttttttttataaattttattttattttttttcttaatgattttcttttttttttatattttttatttttcttaataaatttttatttatttttttt

SEQ ID NO: 44500 - DNA, 297 bp, Gossypium hirsutum
  unsure (1)..(297): unsure at all n locations; Clone ID: LIB3196-002-P1-M1-E6
atcccttttttttttttnttttttccnnnnncanaacaaaaccgggggtaggttttaaatctgcgggggcttggctaaattaagacatctttagttaattagngatatcgctttttgaaatcgaccatatttctcttgtccttcttcatcatgaattagtgtttcattttccaaatttaaagtgagtccttttcttatttactctgtgggcattacagcagaagagtaaatcatttgccatcttaaggtcttgcatgctttattattcatagtttcttatacatgttttttttttgt

SEQ ID NO: 44501 - DNA, 250 bp, Gossypium hirsutum
  Clone ID: LIB3196-002-P1-M1-E8
atggaaacccaaggttgtggtatgccgctttactgtctttcacaagcgccttttatatcctgtcaggcatctgtattgggctgctctatacatactacaccaaaccagatggctgcacacaaaacaagttcttcatcactattaacctgatcctctgcgttgacgcttctattatatcgaaccacccacaaaatcaggtacaccagccctgcttccgcctattgcaaccctatcttatcaccctttacac

SEQ ID NO: 44502 - DNA, 189 bp, Gossypium hirsutum
  Clone ID: LIB3196-002-P1-M1-E9
cggatcacagacatactcttccgattggggtgtttttcgagtgtgagagggaagctcccaagcctgcatgggcagaccttccctcctaaatcactgcgccttgtgaccccccatccctgccttctgcaagtcagcaaccgcgctgtgctcctgcactgtagcctagggttttaccgccttctacaccct

SEQ ID NO: 44503 - DNA, 392 bp, Gossypium hirsutum
  Clone ID: LIB3196-002-P1-M1-F1
tcgcccacgcgtccggttttgttcggactgcaagcggaacacagaggtcgttttcgaccattccgccggcgacaccgtctgttcggagtgcggcttggtcttagagtcgcattctatcgacgagacatcggagtggagaaccttcgccaacgagtccggcgataatgatcccgtccgtgtcggcggtcccaccaatccgcttttggcggatggcggtttatccaccgttatcgctaagcctaatggtgcttccggggagttcctctcgtcctcgctgggtcggtggcagaatcgcgggtcgaattcggatcgggggttgattctcgcttttaagactattgctacaatgtctgataggttgggtcttgtcgcgaccattaaggatcgagcca

SEQ ID NO: 44504 - DNA, 418 bp, Gossypium hirsutum
  Clone ID: LIB3196-002-P1-M1-F10
atatcgagttcaccatgaattcactcagtgaagccaacaccaaggtcatgttcgatctgttgcaacagttcagaaaatcacaaaagaacaacaccttctattcccctatcagcatcacaacagcattagggatggtcctcttaggggccaaagacaacactgcacaacaaattaacaaggttcttcacttcgatcaagtcccagagaacaccacagaaaaagctgcaacatatcacgttgataggtcaggaaatggtcatcaccagcttcaaaagcttctgactgaattaaacaaatccactgatgcatatgagctgaagatcgccaacaagctcttcggagaaatgacgtttcaatttttacaggaatatttagatgccatcaagaaattttaccagaccagtgtggaatctgttga

SEQ ID NO: 44505 - DNA, 344 bp, Gossypium hirsutum
  Clone ID: LIB3196-002-P1-M1-F11
atccgcccttttttttgtctttacttttataactgacccggccagactttattgcgcttaaaggcgcagagacagtaccaactccacatgcctacgtggccctggacctgcccaggttcccgagggtccttcacccccatgtgacaaataacctctggtgttcatcgggatgagaaaacctagggctgatctgaattgactccaaggctcgactagatcattgacagggccttcctgcctgaccctgataatacctggggctacaggcgcaccacaacaagcacggctggtttttaaaaggattagggcctacgagggatgactcacaaatccaggatggtcta

SEQ ID NO: 44506 - DNA, 402 bp, Gossypium hirsutum
  unsure (1)..(402): unsure at all n locations; Clone ID: LIB3196-002-P1-M1-F12
tcggtttggaacctggtatgtggtggcgcttaccggttgtttctccgatggcggttcaagaattatgatatgagaaaggttattagaaaaataacanccattcttcatatccttattctatnaacaaacatgtcatctgccttgcttgcaattagaacgttggttttatggagtcccaattatttcaatttcaacttgcttgtgcttacctccaattatctgcttttatgctgctgctaatcacatccgtcgaggtgaggctgaattgatgattgctggtggaactgaggctgcaatcattcctattgggctgggaaggtttgatgcctgtagggcattgtctcaaagaaatgatgatcctcgaactgcttcaagaccatgggacaaagatcgagatggctt

SEQ ID NO: 44507 - DNA, 249 bp, Gossypium hirsutum
  Clone ID: LIB3196-002-P1-M1-F5
tcgatttgtttctcgtcctcttaaccataggctctgtttgcagttaagaggggcaggtcatggctactaccacggtcccagccgccgcatggcagctatctcctaaagacgccgatatccagatgatgttggctgcccagggccatctctgtaccaaaaactgacattgctcataacagcgttacgtcttcaagcgtcgcaatgacggaattttcatctttaaccttggcaagacctgggagaagcttc

SEQ ID NO: 44508 - DNA, 305 bp, Gossypium hirsutum
  unsure (1)..(305): unsure at all n locations; Clone ID: LIB3196-002-P1-M1-F6
aggcgtggtacccgcgtccggcaattcccgcggatctccagccctctcacgctgcttctcagnctctctcatcnatcctggaggcatggggcagcacantccaccgagcatgagggagccacagcagcagcccgcaggtggcttcagttgccggctcagcccaggctccctggggtcaggccgctctggcttcagcagcgtctccgtgtcccgctccaggggcagtggtggcctgggtggcgcatgtggaggagctggctttggcagccgcagcctgtatggcctggggggccccaagaggatct

SEQ ID NO: 44509 - DNA, 168 bp, Gossypium hirsutum
  Clone ID: LIB3196-002-P1-M1-F7
atgcggggcatgaagctgacgctggcctgcccgggccccctggcggacagctcggtcacactgtcgcccgtggactcgctggactccccgcggcctttccgtgggccccctgcttcccctggtggctttccccttgaggggccctatgcagctgccactgccactgca

SEQ ID NO: 44510 - DNA, 394 bp, Gossypium hirsutum
  Clone ID: LIB3196-002-P1-M1-F8
atgagaaaggcatcatgcagaaggtggctggtgagcgttacgtgtgcaagtttgtgtgcgagcccggggccctcttctctttggccttcccggacaatcagcgtccagctctcaaggccgagtttgaccggcctgtcagtgaggaggacacagtccctttgtctcacttggacgagagccccgcctacctcccagagctggctggccctgcccagccgtttggccccaagggtggctactcttactagcccccagcggctgttccccctgccgcaagtgggtgctgccctgtgtacatatagatgaatttggtgttggggaaaccttcatctgaaacccacagatgtctctgggtcagatctccactgtcctaccagttggcctagcccagact

SEQ ID NO: 44511 - DNA, 392 bp, Gossypium hirsutum
  unsure (1)..(392): unsure at all n locations; Clone ID: LIB3196-002-P1-M1-F9
atggacgctctcagctctcggcgcacggcccagcttccttcaaagtgtctactgttcatgaaatcgggtgcaagctcagcttggagggtgatcactctacacccccaagtgcatatgggtcagtcaaagcctacaccaactttgatgctgagcgcgatgctttgaacattgaaacagccatcaagaccaaaggtgtggatgaggtcaccattgtcaacattttgaccaaccgcagcaatgcacagagacaggatattgccttcgcctaccanagaaggaccaaaaaggaacttgcatcatcactgaagtcagccttatctggccacctggagacggtgattttgggcctattgaagacacctgctcagtatgacgcttctgagctaaaagct

SEQ ID NO: 44512 - DNA, 184 bp, Gossypium hirsutum
  Clone ID: LIB3196-002-P1-M1-G1
atagatcaacattcaaaaccttaacgaccggcttgctttctaacttgagaaagggcccccccttgaggagggcaacccccaccttgaggggaaaatcccgtacttgcacctgaaacagaacccaacttggccttagcgggactaccagccctaacacaagaacatttaaaagcttcgggacaag

SEQ ID NO: 44513 - DNA, 310 bp, Gossypium hirsutum
  Clone ID: LIB3196-002-P1-M1-G10
atggcgggggtagcggctgtgctgctcgtttctctgagccatccagtgccatcctcgtcggtgcagggacacacgcgctagacgtctacatgactgagcagatgacccttcatggcaccctcaagggccacaacggctgcagaacacagatcgctactaccccgcaactaccggacatgagcccactcggctctctagataagaccattatcacgtggaaactgaccagggatgagaccaactatggaatttcacagcaagctctacagggtcactcccactttggtagtgatgcacatatcttctcaga

SEQ ID NO: 44514 - DNA, 413 bp, Gossypium hirsutum
  unsure (1)..(413): unsure at all n locations; Clone ID: LIB3196-002-P1-M1-G11
atgtcatttttctcaagaaaagtgatctcttctgaatctgatttcgtcagtaatgagaactggactggtttcacttgacctctgtttcctgttagtgggaaacccctccccagaggtgctgtgtgaaagattgctggggaaagggtttctagatcccagcataacaagttcaaaagagcccagtgatattgtcattagaataatggtcttcattaagtactggttttcataatcttgaagcttcattttcaccaatttgaaaggcagtaactagggaggagagactatgcagggaacaaggaaaactcangagtgcatcacagaccttgagttaaggcagggaagaagcagatttgctgtccactgaatgaaaataaaaagaattccattgtccaaggtcagagcaagaacat

SEQ ID NO: 44515 - DNA, 249 bp, Gossypium hirsutum
  Clone ID: LIB3196-002-P1-M1-G12
tcccctatctcacttcttgtgggcactctgccatttctaaattgggtggagacataaatcggcacaggtcccttacacttttattgccaatgctgtcaacatggactgaatgctgtacttgtattccttgtcctagacacacaccctgaacgtgtttataccgcctttattaaagcgttgaatatacactatcttagtggcagtatcctccaaaacttatacccatgttggccagagacgggagaaaac

SEQ ID NO: 44516 - DNA, 357 bp, Gossypium hirsutum
  Clone ID: LIB3196-002-P1-M1-G4
atggacgagcggcgtttccgggtggccgaccaggatggggactggatggccactcgggaggagctggcgggcttcctgcaccccgaggagttccctcacatgagggacatcgtgattgctgaaaccctggaggacctggacagaaacaaagatggctatgtccaggtggaggagtacattgcggatctgtactccgccgagcctggggaggaggagccggcatgggtgcagacggagaggcagcatttcccggactttcgggatctaaacaaggactggcacctggacgggagtgaaagtggccactgggtgctttcctcgtaccaagaccagcccctggtggaaggcaactcacct

SEQ ID NO: 44517 - DNA, 431 bp, Gossypium hirsutum
  Clone ID: LIB3196-002-P1-M1-G6
aagaagcaaactgctgcctggtcaccgaattcccgggatggccagtggaggttctgggtctggacgagctcgggaggagtggttgtggccatagcgcacaggcggatctgaggctcggcgaccccactggtcgcagcccgggacaggacaaccacaggaacaccgccgagcccacgtccccccgcccgccaacagagtcatggctgcagcggctgctctgagggaccccgctcaggaggagttccgcctcacaggttgttccctacaggcgcctgtggaccccaagttccatcctcccggatccgtccatctccaggccattgccctcgcccctccctgtacctgtcgttctccccaccgcatcccaccggtgtctgaaacagggatcccttccgagagcgtctcagtgtcccgacgccaggtccgggttg

SEQ ID NO: 44518 - DNA, 241 bp, Gossypium hirsutum
  Clone ID: LIB3196-002-P1-M1-H10
atgccggatttttgtgtgtggcggacatggcacaataggctgggggctagagaccattggcaaagggaacttgccggaacagcctcctgttgctgtgtagcccctgcgtactgagaaattatcttgctcgatgcctaaaatggggaggccgatatgaacgacagaatctggcacagatcctcaaggctttagaggcacgtacagtggttcatattgatcgatgctcccttgagggcattcc

SEQ ID NO: 44519 - DNA, 376 bp, Gossypium hirsutum
  Clone ID: LIB3196-002-P1-M1-H11
atcggccttctcgctctgggtctccaggccttcaaccgggcgtgagtcttctcgagaatgttgggggcaccaaaccgttagcggatctaaccaaaacgttctcttacttctgcctcccacccagcggctcttcaccttcaccattagcctggacatacagtgtgagcagctgaatgacgctaggtgggccgagctccttcccctgctccagcagtgccaagtggtcaggcttgacgactgtggcctaacagaggcacggtgcggcgacatcagctcggcactccgagtcaaccctgcactgacagaactcagcctgcgcaccaatgagctgggtgatgccggcgtgcactgcatgctccagggcctgcagagcccc

SEQ ID NO: 44520 - DNA, 419 bp, Gossypium hirsutum
  Clone ID: LIB3196-002-P1-M1-H12
atcggcacgcgaggatcccacaacacaatttgctttcacgtgtgcgtacaaagagctgaagcggctactgaactagtcactagccatactgtcacggtcccaccatgcctatctgagaccccccaagcagaagtggggcccacaggctgcccccacctctcagggccacattcggcacaggggagcctggagaaggggctcccacgggataaggaagccaaggagcccctgtggatccggcccgatgccccgagcaggtgcacctggcagctgggccggcctgcctctgagtccacgcatcaccacactgtcccggaaaaatctccaaaaatcttgccagatattctgaagaaaattggggacacccctatgatcagaatcaacaagattgggaagatgttcggtctgaagtgtgagct

SEQ ID NO: 44521 - DNA, 425 bp, Gossypium hirsutum
  Clone ID: LIB3196-002-P1-M1-H2
atccgggtctgagtgaagctccccgcagggttcagcatgtttgtgcgtcgacaccacaagcagggctgctgacagacgtgcacagacctgaccggcagaccctccctgggcacggagccaccaggaccccaggaggagagtcttgccgtgcctcctgtgctcacccacagggctccccaaccaggcccctcacggtccgagaagcccggaaagacccagagcgagatctcgaccttccttagacagaggccagcagggactgtgggggcgggcggtgaggctgcagggcccagccagtccccaggacctccccatgggcctgcagcatctgagtggggtgagcctcctgggagagaccttgctgggcagcaagctgcgggagcttcgagcgtgcccctcttagcaggctgtgtgtgccagggctg

SEQ ID NO: 44522 - DNA, 421 bp, Gossypium hirsutum
  Clone ID: LIB3196-002-P1-M1-H3
atgccaggtaggggaacgcagcggccagacacctcagcgctacctggcagaactggatttctctccgaccggcggcttaagtctgactgccagcctgcctgccacagccggactccaccactccggtagcctcatggctgcaacctgtgagattagcaacatttttagcaactacgtcagtgcgatgtacagctcagaggactccgccctggcccctgttccccctgctgccgcctttggggccgatgacttggtgctgaccctgagcaacccccagatgtcattggagggtacagagaagaccagctggtcgggagaacagccccagttctggtcgaagacacaggttctggactggatcagctaccaagtggagaagaacaagtacgacgcaagcgccattgacttctcacggtgtgac

SEQ ID NO: 44523 - DNA, 418 bp, Gossypium hirsutum
  Clone ID: LIB3196-002-P1-M1-H4
ataccgtcggcaccaccctccggacacatgaggccagctgcctgagccctgccatgggccagcctagcccttgtcccttttaatataaaagatatatatatatatataaatatatatatataaaatatctatattctatacacaccctgcccctgcaaagacagtatttattggtgggttgaatatagcctgccttagtggcagcatcctccaaaacttagacccatgttggtcagagacggcagaaaacagagccagcctaaacaggcccagccagttggtggggccaggccaggaccacacaagtcccagactcagctggaagtctacctgcttgacagccttcaccaagatctacaggacaaagggagggaacaagccctgctcgaatggggcacggactgtccaccttttctga

SEQ ID NO: 44524 - DNA, 458 bp, Gossypium hirsutum
  Clone ID: LIB3196-002-P1-M1-H5
cacatggaacaacaaagacacaaactgcatgccggtaccgaattcccgggattgaacgcaacatgaaggtgctccttgccgccgccctcatcgcggggtgcgtcttcttcctgctggtgccgggaccttctgcggccgatgagaagaagaaggggcccaaagtcaccgtcaaggtgtattttgacctgcgaattggagatgaagatgtaggccgggtgatctttggtctcttcggaaagactgttccaaaaacagtggataattttgtggccttagctacaggagagaaaggatttggctacaaaaacagcaaattccatcgtgtaatcaaggacttcatgatccagggcggatacttcaccaggggagatggcacacgaggaaagagcatctatggtgagcgctttcccgattgagaactttaagctgaagcactactggcccggctgggtgagcat

SEQ ID NO: 44525 - DNA, 341 bp, Gossypium hirsutum
  Clone ID: LIB3196-002-P1-M1-H6
tatagaacaagtttgtacaaaaaagacaaaaagcaggctggtaccggtctcgcaatatcatgattcgtgatctgatagaaattgactaatagatgatttcaagagagaggagaagaggaaagtgctagagaaaagtacttgagtacttcaggatgttcataatgaagggattggccttactcaatctgttttgttttgatttgttttgttttacctatcagaagagaaagtagagtatattgatgtagatggggtggtgggaattttgtttgagctttcttgatgagttgggcatattgtactttcaatgcttggtatatttttttctgccaattttatgt

SEQ ID NO: 44526 - DNA, 412 bp, Gossypium hirsutum
  Clone ID: LIB3196-002-P1-M1-H7
atgacgtgagcaacagggaggaggccacagagaagccgtggctgaagtccctggtgagccggaaggatcacgtcctggacatcatgctggaggccgtgaacaaccttagagattcaatgcccaagctccaaatcagggctccagaagcccagccgactctgttctccataaaccagtcctgcctccctgggttctataccccagctgaactaaagcccttctgggaacggccaccacaggatcccaatgcccctggggcagatggaaaagcatttcagaagagcaagtggacccccctagagacccaggaaaaggaagaaggctataagaagcactgctttaatgcctttgccagcgaccggatcttcctgcagaggtccctagggccagacacccgaccacctgagttagt

SEQ ID NO: 44527 - DNA, 339 bp, Gossypium hirsutum
  Clone ID: LIB3196-002-P1-M1-H8
atcccacttctctcatgctgcagtgcccgccctaccactatgtcggaacaattcatttacggggccacacactttttatccacacgcataatcatctacatctacaacacagtctgtgcttcgaaccagcgtgtcaagctactgctgcagatccaccacgccagcaagcagatcaacagctacacgcactacaaggtcatcactgactgcatcgttcgtatccacaatgagcagggcttgctgtctttctggagaggcaacctggccaactttattcgctacttgctcactcaagccctcaacttcgccttcaaagataagtacaagcatatctttctt

SEQ ID NO: 44528 - DNA, 326 bp, Gossypium hirsutum
  Clone ID: LIB3196-002-P1-M1-H9
atgcggcggttaccggccacactgccgcacaggacaactggacgtgtcccaccaacaagatgaccgtgtgcagccccgacggccccggtggccgctgccagtgccgtgcgctgggctcaagcgtggcggtcgactgctccacgctgacctccaagtgtctgctgctcaaggcgcgcatgagcgctcccaagaacgcccgcacgctggtgcggtcgaatgagcaccctctcgtggacaacgatggtctctacaacccctactgtcacccatacggccgcttcaaggcgcgccagtgcaaccagacgtcggtgttctggtgcgtgaac

SEQ ID NO: 44529 - DNA, 349 bp, Gossypium hirsutum
  Clone ID: LIB3196-003-P1-M1-A1
atgcattgtgtgcccttttgtggacatagaggtggctggagctgagtttgacagcaccaagcataatacagtgattgtggcggacaatggactcaaccctgtttggcctgtcaagccctttcacttacatatcagtgaccctgcatttgcctttgtgcgctatgtggtgtctgatgaatacatgtttagtgaccagaatattctggctaaagctacttttccggttaaaggtctgcatacaggatacagagcagtgcctttgaatatcaactacagagtggatctgacgttggcctccctgcttgtcaagattgacattttacctgacaagcaggaaaatggtgacctt

SEQ ID NO: 44530 - DNA, 369 bp, Gossypium hirsutum
  Clone ID: LIB3196-003-P1-M1-A10
acgctaatgagaaaagagctgataccaatgtcaggtccttagagctgatcgaatgcaccaacattggattctgcaaggggggcataggtcacttatgagaattgacgatggtctcaacacttatattcgtggaaaactacaacactaagcttgcactgcctgttatatagtgaatgtgggacttcaggctgcagaactttagaaagatcgcaggcacgggtgcataccttatgtactatgtgctgtactcaggctaaggttcaggagaaccctatgaccctaagaaccctgatagacctctatcttaaaggataaaggatcatggaccggattaaggttacgaggatgcagagctcggaattgactctt

SEQ ID NO: 44531 - DNA, 362 bp, Gossypium hirsutum
  Clone ID: LIB3196-003-P1-M1-A11
gcgagggaatctccttcaagaatcagaaactgccatcccttcccggttcctatttggactgctctccagcaggttattgcttcagcagcaaaggccgatgagatattagaatgaatctctgaacatgagaagaggatatttcgttccgaatctctggccacaatacccgaagccgaccgattctggcttttatcgtaggcaccatcaaagttgatgttgatgaaactctcctgtgggtacgaccatctctggttctctccgcccaaagtgcacaacagaatattcaactttgataaaggctgagctcctctactacccagctccttctccacatcggggacagcttggattgactgctaact

SEQ ID NO: 44532 - DNA, 380 bp, Gossypium hirsutum
  Clone ID: LIB3196-003-P1-M1-A12
attccggaaacaaaatccttttctcatttcgggaggggggtaacagtgacgtgcagggacctcttttaaacaggcaaaacaggaagggggaaaaggtgggatttatgttgaggctagaggcatttggaacaaccaatctatgtagttaacttgaagaaacagatttttaaagttggtgcatctagaaagctttgaatgcagaagcaaacaagcttgatttttctaacatcctcttaatgtgcagcaaaagcaggcaacaaaatctcctggctttacagacaaaaatgtttcagcaaacgttgcacctcatggtttttgaaggctttagttctgctttctgcctcttctccacagcccaacttcccacccctgatacgtga

SEQ ID NO: 44533 - DNA, 370 bp, Gossypium hirsutum
  Clone ID: LIB3196-003-P1-M1-A2
cttcgacagccattagcatctctccctgaagaagttttaacgcgatagatcaagaagcgttacgtcagaaaacccaagaagaaaccatgagtggtaactcggaggcgaagtctttgtttgatgaattgcgcttcgataagggagatttcttcgacctgggacaccctcttctcaactggtctgctcagagctttgtcaaaactgctggtattggagcacttcaagctatcgccagggaggcttgtcatatagcttttgaaggaactggacccattaaatcgactgatatcactggtgtcaagaataagaagcaaggcttccctggcctcagaggggaaaccagtcgaaattctcttgaagcaatggtgaa

SEQ ID NO: 44534 - DNA, 381 bp, Gossypium hirsutum
  Clone ID: LIB3196-003-P1-M1-A4
atcagccaggcgcgcactgcacagctctcttctctcgccgccgcccgagcgcacccttcagcccgcgcgccggccgtgagtccttggtgctcgcccgccggccagacaaacagcccgcccgaccccgtcccgaccctgcccgtcctccggaccctggccgccccgagcggagcctggagcaaaatgatgcttcaacacccaggccaggtctctgcctcggaagtgagtgcttctgccatcgtcccctgcctgtcccctcctgggtcactggtgtttgaggattttgccaacctgacgccctttgtcaaggaagagctgaggtttgccatccagaacaagcacctctgccaccggatgtcctctgcgctggagtcagtcacg

SEQ ID NO: 44535 - DNA, 136 bp, Gossypium hirsutum
  Clone ID: LIB3196-003-P1-M1-A5
acatttgatatcttcaaggggggccagacacacagagaatctttcctgtgtcaacccttatatctctggaaaactccaaactaaccttgcacggcctgtaacaaaatgaagcttcaacacccagctccagaacttt

SEQ ID NO: 44536 - DNA, 385 bp, Gossypium hirsutum
  Clone ID: LIB3196-003-P1-M1-A6
atgcaactgcctaagaggcgcggcgtcgcaccgcccaaagctgaggaagtcggcgccagttcgtgaggctccgggccgccagtcagagccatgagctacggtcgcccccctcccgatgtggagggtatgacctccctcaaggtggacaacctgacctaccgcacctcgcccgacacgctgaggcgcgtcttcgagaagtacgggcgcgttggcgacgtgtacatcccgcgggaccgctacaccaaggagtcccgcggcttcgccttcgtccgcttccacgacaagcgggacgccgaggacgctatggatgccatggacggagccgtgctggacggccgcgagctgcgggtgcaaatggcgcgctacggccgccccccggactcac

SEQ ID NO: 44537 - DNA, 382 bp, Gossypium hirsutum
  Clone ID: LIB3196-003-P1-M1-A7
atggaacttgggaagaagacagatggttattcaggggcagatataagtatcatcgtacgtgatgcacttatgcagcctgttaggaaagtacagtcagctactcattttaaaaaggttcgcggaccttcccgagctgatcctaaccatcttgtagatgatctgctaacaccttgctctccaggtgaccctggtgccattgaaatgacatggatggatgtccctggagataaacttttggagccagttgtttccatgtcggatatgttgcggtcactatctaacacaaaacctacagtcaatgaacatgacttgttgaaattaaagaagtttacagaagattttggtcaagaaggctaaaccaaagacaaggaagatgcttacc

SEQ ID NO: 44538 - DNA, 362 bp, Gossypium hirsutum
  Clone ID: LIB3196-003-P1-M1-A8
cccacgcgtccgcactgatctctctaaaagagcaaccttctcctcgcatatgcatttctcctcgctccctgcgcaccgcctgctccattattacgtgccccgcaagctactccaccggctgccctcacttctaaatcttatctaacgctttttctttactcaaaatgggtttagttcaaaaccccgacaataatactgctagtcctgaaaccggaactgcaactcatctctcgtcttctgcttcttacaatgatggcgactgcactgaaacgccgcgtctcagtgaagacttcgattcaacctgctcctctccctacgttagtgcaccatcgagccctggccgtggtcccacctcgggatac

SEQ ID NO: 44539 - DNA, 267 bp, Gossypium hirsutum
  Clone ID: LIB3196-003-P1-M1-A9
agtaaggaagagcagccgctgctggttctcaggcgcggctctttatcggtggttctggctcccggccgcgccgcagcccctgcccagtctctcttcctcagctcggcgggctcctccgcgccgcacgtgagcgcgcccgccaacagggccactgccgcgggtaagtcgtgcccgcgccctgcccggcgtccagtcctcagccgctgggcgaagccggaggagcctggcgtctcctccccggcggcccgcgggacctttcccaggtcc

SEQ ID NO: 44540 - DNA, 388 bp, Gossypium hirsutum
  Clone ID: LIB3196-003-P1-M1-B1
atgggcgggccgtcatcatgtttggcgtcccctacgtctacacacagagtcgcattctcaaggcacggctggaatacctgcgggaccagttccagattcgtgagaatgactttctcaccttcgatgccatgcgccatgcggcccagtgtgtgggtcgggccatccggggcaagacggactacggcctcatggtctttgccgacaagcggtttgcccgtggggacaagcgggggaaactgccccgctggatccaggagcacctcacagatgccaacctcaacctgactgtggatgagggtgtccaggtggccaagtacttcctgcggcagatggcacagcccttccaccgggaggatcagctgggcctgtccttgctcagcctggagca

SEQ ID NO: 44541 - DNA, 377 bp, Gossypium hirsutum
  Clone ID: LIB3196-003-P1-M1-B10
atccccaggtccctctgtgcttcttggaaattctcctttgctgcttgttttagctttaaggaaagccctgaggtctcagccctgatcctcagggttcctggtgactgtggtcactctttgtccacccacttccaatcatacaactgtggcttccccaggtctggtgtggcccttcaaattcatgggcagaggttggaggcatgcattgcctttcgctacattaagattttgaaccccacctgctttgaggctttggggttattgggcaaatatacccatccctgcctgtcagactgtacctaggaattttggagagcaaaaaaaaaatcctcctttgtggaaaaaggaattggtgtgggctgtgattgggttgaagc

SEQ ID NO: 44542 - DNA, 296 bp, Gossypium hirsutum
  Clone ID: LIB3196-003-P1-M1-B11
atccttatgttcctatgtgcttcttggaaattctgctttgttgtttgttttagctttaaggaaagctctgtggtcttagccttgatcctcagggttcctggtgactgtggtcactctttgtacacccactttcaattatacaactgtggctttctcaggtctggtgtggccttttaaatgtattggtcagtatttggaggcatgcatatgacttttgcttctttaatattgagaactcctttttttttgatgttttggggttattggtccaatttacttattcctgcctggcaaac

SEQ ID NO: 44543 - DNA, 362 bp, Gossypium hirsutum
  Clone ID: LIB3196-003-P1-M1-B12
taacactagtgttttcaacaataaattaatcatagctgcagcttgtttcttttaaactctaaatataaaggaggccaaacatgccgcctcgtagataccaatttgggagggctgatgaggccactcatcccgactccatgagagccaccttggctgaattcctctccactatcattttcgtctttgccggcgaaggctcaattcttgctcttgacaagatgtacaaggatacgagtgcgacgcctgcaagactggtgatgatagcacttgcgcatgggttgtctctgtttgcagctgtggcatctagtgtaaacgtatctggtggccatgtgaatccagcagtcactttcggtgccttgctc

SEQ ID NO: 44544 - DNA, 388 bp, Gossypium hirsutum
  Clone ID: LIB3196-003-P1-M1-B2
atggagattgacaatgccaggctggctgcggatgacttcaggctcaagtatgagaacgagctggccctgcgccagagcgtggaggctgacatcaacggcctgcgccgggtgctggatgagctcaccctgtctaagactgacctggagatgcagatcgagagcctgaatgaggagctggcctacatgaagaagaaccacgaggaggagatgaaggaattcagcaaccaggtggtcggccaggtcaatgtggagatggacgccaccccgggcattgacctgacccgcgtgctggcggagatgcgggagcagtacgaggccatggcagagaggaaccgccgggatgctgaggaatggttccacgccaagagtgcagagctgaacaaggagg

SEQ ID NO: 44545 - DNA, 366 bp, Gossypium hirsutum
  Clone ID: LIB3196-003-P1-M1-B3
cagaaaagccgaatcacgaaaagaaaagcgcctcctgcaggcttccctttcccttttaacgccgctctctctttcggccgttaagccgcccgttgtctgtttctaagttccctcctctctattttcttctcatatcaatcctcttttatatttcaaatttcgcaaatatctaatgccgcaaattaaccctgcctctaaaccctagagtcccccccccctttcacttctcggctttactttatactttaattattattattatttctttgattttgtgacgtggaatggatggagtgagtagcagtagcaacaaccaaaccgatgcatcgacgagcggcggaggaacccaaacagcaacacaacctc

SEQ ID NO: 44546 - DNA, 387 bp, Gossypium hirsutum
  Clone ID: LIB3196-003-P1-M1-B4
atggcgtcgcccttcagtggagcgctgcagctgacggacctggatgacttcatcgggccgtctcaggaatgcatcaagcctgtcaaagtggaaaaaagaccgggaagtggcgtggccaagattcgcatagaagatgacgggagctacttccaagttaaccaagatggcgggacccggaggctggagaaggccaaggtctccctaaacgactgcctggcgtgcagcggctgcatcacctctgcagagaccgtgcttatcacccagcagagccacgaagagctgaagaaggttctagatgctaacaaaatggcggcgcccagtcagcagaggctggttgtagtctcagtctcgccacagtctagagcatcgctggctgcacggtttcag

SEQ ID NO: 44547 - DNA, 383 bp, Gossypium hirsutum
  Clone ID: LIB3196-003-P1-M1-B7
atcgagggttcgagggaggggcacggaccaggaacctgagctaggtcaaagacgcccgggccaggtgccccgtcgcaggtgcccctggccggagatgcagtaggaggggcgcgcgcgagaagccccttcctcggcgctgccaacccgccacccagcccatggcgaaccccgggctggggctgctcctggtgctgggcctgccgttcgtgctggcccgctggggccgagtctgggggcaaagattggcctcttctgcatatgacagtagcactgttgtgccttcacccaccagctccagctccaatggcaacttgtctcaggaggccatcactgctatcattgtggtcttctccatcctggccatcttgctcctggctgtgggg

SEQ ID NO: 44548 - DNA, 383 bp, Gossypium hirsutum
  Clone ID: LIB3196-003-P1-M1-B8
atgccgagagtcggagccattactgcaggaaaaggtcccgcagagctgagcagtcaagatgtgtgacttcaccgaagaccagaccgcagagttcaaggaggccttccagctgtttgaccgaacaggtgatggcaagatcctgtacagccagtgtggggacgtgatgagggccctgggccagaaccctaccaacgccgaggtgctcaaggtcctggggaaccccaagagtgatgagatgaacgtgaaggtgctggactttgagcactttctgcccatgctgcagacagtggccaagaacaaggaccagggcacctatgaggattatgtcgaaagacttcgggtgtttgacaaggaaggaaatggcactgtcatgggtgctgaaa

SEQ ID NO: 44549 - DNA, 379 bp, Gossypium hirsutum
  Clone ID: LIB3196-003-P1-M1-B9
attctgcacagcctggtgaaccacacaggcccgcgctctgacatgcagaaggtgaccctgggcctgcttgtgttcctggtaggcttgcctgtcctggacgccaatgacccagaagataaaaacagtcctttctactatgactggcacagcctccaggttggcgggctcatctgcgctggggttctgtgcgccatgggcatcatcattgtcatgagtggaaaatgcaaatgtaagttcggccagaagcccagtcaccatccaggggagactccacctctcatcaccccaggctcagctcataactgatgaagacggaccagctgaaagtgggtggaggaccgttctctgtccccaggtcctgtctctgcacagaaacttg

SEQ ID NO: 44550 - DNA, 387 bp, Gossypium hirsutum
  Clone ID: LIB3196-003-P1-M1-C1
atcgcgcgtcctgcccgtctgtccccgcaggtagtcgcccgccacagccgcgccatgaccacccagcagatcgtcctccagggcccggggccgtggggcttccgcctcgtgggcggcaaggacttcgagcagcctctcgccatttcccgggtcactcctggaagcaaggcggctctagctaatttatgtatcggagatgtaatcacagccattgatggggaaagtactagcaatatgacgcacttggaagctcagaacagaatcaaaggctgcacagacaacatgactctcactgtcgccagatctgaacataaagtctggtctcctctggtgacggaggaaggggggaagcgtcatccatacaagatgaatttagcctctgaaccc

SEQ ID NO: 44551 - DNA, 368 bp, Gossypium hirsutum
  unsure (1)..(368): unsure at all n locations; Clone ID: LIB3196-003-P1-M1-C10
naaaaaaaaaaaaaaaaaaaaaaaaaaaaaaaaaaaaaaaaaaaaaaaaaaaaaaaaaaaaaaaaaaaaaaaaaaaaaaaaaaaaaaaaaaaaaaaaaaaaaaaaaaaaaaaaaaaaaaaaaaggggggggcctttttaaaggatcaaagtttacttccccgtgtttgcaagataatatttttttttttgtgccccttaatttaaattaatgggccgtgttttaaaaacgtgtggattggaaaaaccttgggtttaccaaatttaaacgttttgaagaaaatccctttttttccattttgcgaaatacgaaaaaggcccccactatttgcttttccaaaaatttgccaaccctaattggcaaatggac

SEQ ID NO: 44552 - DNA, 380 bp, Gossypium hirsutum
  Clone ID: LIB3196-003-P1-M1-C12
ataatattcaaatatatttaaattatcttagtacttatactcaagtaaaattgatttattagattttcagccgattcatatttatattcaaagaagaaaaatccttatgtttctgactatttgtagcttctttcatccgaagaaaactactacagcacttcttacagccagtcagatagtcagtgtggttctcctccaaggggttggtcagaagagttggatgaacgtgggcataccttatataccagtgactatactaatgaaaaggtacattctttttttctcatctagtgtttttttggcagaattctctcataaaatagttgtgtactgaaggtttagtagtattttaaaaaacatgaaaatagtcttcattgtaa

SEQ ID NO: 44553 - DNA, 367 bp, Gossypium hirsutum
  Clone ID: LIB3196-003-P1-M1-C2
ggaagaggaacgcttacgttcttgacacatgaaaacaaagagtcctacaatatagtaccgggagttgtagtcaaagtcccagcaggaagcactgtgtacttggctaaccaagacaacaaggaaaagctaatcatagcagtgcttcaccgccctgttaataaccctggacaattcgaggaattcttcccagctggaagccaacgccctcagtcatatctccgagcctttagtcgtgaaattcttgagcctgccttcaatacacgaagtgagcagctagacgagctgtttggtgggaggcaaagccgtcgaaagcagcagggacagggaatgttccgtaaagccagccaggaacaaataaaggcattga

SEQ ID NO: 44554 - DNA, 386 bp, Gossypium hirsutum
  Clone ID: LIB3196-003-P1-M1-C3
ataagccagttcacccggcctggtagttctgactcttaatccctagacacattcttcagaaacaactgtacatggtgagagaaaagtccaaaggaaaaaagttttccttcctttaaaatagactaaatgtgcttatcacctttaaaatttggactgaatgtttaaactttaaacacaaagcaaagggagatgctcttaaatgtcaaatctgaagcaaagattgcatttttgcaaagctatccagaggatgtgttcattattgagacatgggattcattaacacatcagcgcccaaccactgtctctcctgtcccattcacacagtatcgacaaccaaataagcagctgggcaggggagacctatcactgttaatgtcataatcaca

SEQ ID NO: 44555 - DNA, 384 bp, Gossypium hirsutum
  Clone ID: LIB3196-003-P1-M1-C4
atgggattttatctgtcccgatttttatgaagctgtttgtggcacagatgggaaaacatatggcaacagatgtgaactgtgtgctgagaatgcgaaaaccgggtcccaaattggtgtaaagagtgaaggggaatgtaagagcagtaatccagagcaggatgtatgcagtgcttttcggccctttgttaaagatggaagacttggatgcacaagggaaaatgatcctgttcttggtcctgatgggaagacacatggcaataaatgtgcgatgtgtgctgagctgtttttaaaagaaactgaaaatgccaagcgacagggtgaaactagaattcgacgaaatgctgaaaaggatttttgcaaggaatatgaaaaacaagtgagaaa

SEQ ID NO: 44556 - DNA, 368 bp, Gossypium hirsutum
  Clone ID: LIB3196-003-P1-M1-C5
cgaggcttgccctcgtaatttccagcagcaactccgagaagtggattcctccgttgttgccttcgaaataaacaaaggatcgatcttcgtaccgcactacaattcaaaggctacattcgtggtcctcgtcaccgaaggaaacggccacgtcgaaatggtctgccctcacctttctaggcagagctcacactggtcctcccgagaggaagaagaacaagaagaacaagaagttgaaaggagaagtggacaatacaagagagtgagagcccagttatcaaccggtgacctatttgtagtcccagcaggccatccagtcacattcgttgcctcccaaaacgaggacctaggattgctcgggttcggactct

SEQ ID NO: 44557 - DNA, 223 bp, Gossypium hirsutum
  Clone ID: LIB3196-003-P1-M1-C6
aaaaaaaaaaaaaaaaaaaaaaaaaaaaaaaaaaaaaaaaaaaaaattaaaaaaaaaaaaaggggccaaacttttataaaagggccggccgctttcggggttcctggctttctttcgctttctttcatcctcagaaatcttctatagcgcttcctacattcaattcacatggtcagtgtgtaaatcctgccaagtgttgaacacatgagtttgcccaacttaa

SEQ ID NO: 44558 - DNA, 366 bp, Gossypium hirsutum
  Clone ID: LIB3196-003-P1-M1-C7
gcgaaccttcttctccactcctccatctatatatatagttagaggcggaagggaggaagtgacattggcaatatggctttgctgcattcttacttcttaagcgctggtgagtgtgtttcagggtccatggtcttggcagtggcaatgtccattgcttcctattttctgatccctatggtgtttggtggtcgacataaaaactggaagaatgcaccaccaggccctgttggttggcctatccttggcagccttccacacctctccaatcgtctccatgaagatttctttcacatggccaagatctacggtccccttttcagtctaaacttgggaataaagccggccatagtggtgtcatcaccggaa

SEQ ID NO: 44559 - DNA, 382 bp, Gossypium hirsutum
  Clone ID: LIB3196-003-P1-M1-C8
atccgcactaatagcggccaccccggcagcggcggcagcagcagcgacgcagcggcgacagctcagagcagggaggccgcgccacctgcgggccggccggagcgggcagccccaggccccctccccgggcacccgcgttcatgcaacgcctggtggcctgggacccagcatgtctccccctgccgccgccgcctgcctttaaatccatggaagtggccaacttctactacgaggcggactgcttggctgctgcgtacggcggcaaggcggcccccgcggcgccccccgcggccagacccgggccgcgccccccagccggcgagctgggcagcatcggcgaccacgagcgcgccatcgacttcagcccgtacctggagccgct

SEQ ID NO: 44560 - DNA, 363 bp, Gossypium hirsutum
  Clone ID: LIB3196-003-P1-M1-C9
gcgagagattcgccttcaacttattgagccaaacccctcgctactccaaccaaaacggccgcttcttcgaggcttgcccacgtgaattccggcaactcagggacatcaatgtcaccgtttcagccttgcaattaaaccaaggatcaatctttgtgccgcactacaattcaaaggctacattcgtgatccttgttaccgaaggaaatggatacgctgaaatggtttctcctcatcttcctaggcaaagctcatatgaagaagaagaagaagaagacgaagaagaagaacaagaacaagaagaggaaaggagaagtggacaatacaggaaaataaggtcccggttgtcgcgtggagacatatttg

SEQ ID NO: 44561 - DNA, 364 bp, Gossypium hirsutum
  Clone ID: LIB3196-003-P1-M1-D1
ggaattttgcagcaacttgattacggtatagtccaatgccaggctctggttttggcacccactagggagttggctcaacagatcgagaaggtgatgcgggcacttggtgattaccttggtgtgaaggtccacgcttgtgttggtgggactagtgttcgcgaggatcagcgaattcttcaaagtggtgttcatgttgttgtcggtactcccggtcgtgtcttcgatatgttgagaaggcaatcactccgtccagattatattaagatgtttgtcttggatgaggctgatgaaatgctctcccgtggttttaaggatcagatctatgacatcttccagcttcttccgggcaagattcaggttgggg

SEQ ID NO: 44562 - DNA, 84 bp, Gossypium hirsutum
  Clone ID: LIB3196-003-P1-M1-D10
cccacgcgttcgtggacgcgtgaacagacgcgttgtttgacctgggtttatcgtatccgttacctgctgtctgtttctcaattt

SEQ ID NO: 44563 - DNA, 361 bp, Gossypium hirsutum
  Clone ID: LIB3196-003-P1-M1-D11
ctcactcaacattcccatttccaatctccagctcccaaggtaaatatgccgatcagaaacatagcggttggccggcccgaagaggctactcaccccgatgctctcaaggctgctttggctgagttcatctcaaccttgatcttcgttttcgctggatcgggctcaggaatggcctttaacaagttgactgacaacggagcaaccaccccggctggtctcgtagccgccgctctagctcatggcttcggtcttttcgtcgctgtctccgttggcgccaacatctcaggtggccacgtcaaccctgccgtcaccttcggtgcttttgttggcgggaacatcactctcttgcgcggcattcttt

SEQ ID NO: 44564 - DNA, 381 bp, Gossypium hirsutum
  Clone ID: LIB3196-003-P1-M1-D12
atggattcgaaacatcagtgtgtgaagctgaatgatggtcacttcatgcctgtcctgggatttggcacctatgcgcctgcagaggttcctaaaaataaagctatagaggccaccaaattggcaatagaagctgggttccgccatattgattctgctcatttataataatgaggagtacgttggactggccattcgcagcaagattgtacatggctctgtgcagagagaagacatattttacacttcaaagctttggtgcaattcccatcggccagagttcgttcgaccagccttggaaaggtcactgaaaaatcttcaattagactatgttgacctttatcttattcattttccagtgtctctaaagccaggtgaggaact

SEQ ID NO: 44565 - DNA, 369 bp, Gossypium hirsutum
  Clone ID: LIB3196-003-P1-M1-D2
acccttcctcgaagcttccaaagaacaaatcgaggccatgagtagccatgaggaaggcagcaaaggcggtggtttgtggccatttggaagtgagtcaaaatcagagagtgcattcaacctcttcagaaagcgtcagccttcacattgtaacagatatggtcagctctttgaagttgaagaagaagaattcaagggccttaaagacttcgatctcagggtctcctatgtcaacatcaccaagggatgtatgtcagccccattctacaactcaagggcaataaagatagccattgttgtgaaaggtgaaggatactttgaaatggtatcacctcctgtttcccccaagtccagtcaggaggattcagcagg

SEQ ID NO: 44566 - DNA, 364 bp, Gossypium hirsutum
  Clone ID: LIB3196-003-P1-M1-D3
ggcggattcaccgaagggtacgagtggcattgatgacaagaagaattttatttacggtggagttggtggctttgctgggatgggtggctatggtggaattgctggtggaatcccttttcttggcggccttggtgggattgggaaatttggtggaatcggtggtgccgccggaatagccggttatacgggtatcggtggcctgggcggtttaggcggtgttggaggacttggtggtggtattggcggtggcggcagcctcagaggtggcagtggcattttcccatccccttgatgtttcgtgatttggtgatgtctagattttaggtgttgtatgttagatgttagatgttcatgtcttaagtgg

SEQ ID NO: 44567 - DNA, 365 bp, Gossypium hirsutum
  Clone ID: LIB3196-003-P1-M1-D4
cttgtttcaggtaagaatacttcgatatttgttgcgaacttgcctatgagcgcaactgaggaaatgctgaaggaggttttccaaaaatttggaccaattaaacccaatggcatccaagtcagaagctttaaggacaacaaaaactgctttgggtttgtagagttcgagtctgctacttctgtgcaaagtgctgttatggcttctcctattaaaatcggcaacaggcaggccaatatcgaagaaaagcgaggacccagcagtggtgggaaaccagggtatggtggttatagagatgaaaatggctaccgaaatgacaacttcagaggccgtgggaacttcaatggcagccgtaactttagaagaaa

SEQ ID NO: 44568 - DNA, 386 bp, Gossypium hirsutum
  Clone ID: LIB3196-003-P1-M1-D5
atggcagaggagcattttgtttcaaatgaactgcggctttgacccccaaaatgcaaggaggaactgtgctgggccaagctggagcggcgctgtcttgctggagtggggacctggagtcagagaaaatccacaggctccctgcccctcctcctccatctgcacacgcctcagcttaggaccttcaccactctatggtgaggaatgccatggccagggagaactgagtttcatccaatgtggagaggagtcccagagcagggcagctcccaaactgtgccctctgatcatcgtcccttccagcttgctggagtgtccagagagacagatttgccacaagctaggcttacttataatgctccaccccatagaaatgggaccccaagtac

SEQ ID NO: 44569 - DNA, 366 bp, Gossypium hirsutum
  Clone ID: LIB3196-003-P1-M1-D6
atttattttactttttatttactttacttttaataataatatttaatatacttatataataagcaaacataaatgtgtattacaagtgtatgtatactattggtacacattatttttaccatacacttgtcttatatttaatttatttatcatataatattaatttaataataataaatacattaattatttacttaaataataaccaaatacatacatgtattacaaatgtgtgtattatatttattacacttgtattttattttttccatacacttggcactctttttggcttatttacttatttcgtcctttcaattttctttattctataattaaactttaacttcatagtctctatacttc

SEQ ID NO: 44570 - DNA, 361 bp, Gossypium hirsutum
  Clone ID: LIB3196-003-P1-M1-D7
cttatgagaaaagagaagaaaacaatgtcaggtcctcagagctgttcgaatccaccaacattggattctgcaagtggggctgagtacgttgagaatcttcgtatttgtcaacacttatgtttgtggagatcttcaatctaagcttgttcggcctgttatctctcgaatatatacacttgacggctgcaaactttataaagctcgcggtcaaggttgcagtcgttgggtactatgtggtggatactgacattccttatggagaaccctatgaccctaataaccctggtagacctctatctgtttggatcaaggatcatggaccggataaaggttacgaggatgctgagcttgtaattgacgc

SEQ ID NO: 44571 - DNA, 379 bp, Gossypium hirsutum
  Clone ID: LIB3196-003-P1-M1-D8
atcaaagatgttactaagggctttttactactgtgagataaccagcatgatgtgaagacaacgaacattttaagaagtttgactagtagacgtttcttttaagtcttttggagggtcttggtcgacgacccacaattttattgtggctccccaggatttgagaacatgtgggcttggatgatcactgttgacctatgaaagagcacaggtctcttgagagtttattgacacaactactgattacacccccacaatatgtctcaacctctgttgaagggctattgatatttttaaaaacgttacttccaatcagaaattcaagtaagttttatgtcttctactccatcaaaatttatgtttctcagcataaggtagtcta

SEQ ID NO: 44572 - DNA, 380 bp, Gossypium hirsutum
  Clone ID: LIB3196-003-P1-M1-D9
atggcctctcccgcccccctggtgctgagcttcagcgggaaccccctgcactgcaactgtgagctgctgtggctgcggcggctggcgcggccggacgacctggagacctgcgcctccccgcccggcctggccggccgctacttctgggcagtgcctgagggcgagttctcctgcgagccgcccctcattgcccgccacacgcagcgcctctgggtgctggaaggccagcgggccacactgcggtgccgggccctgggtgaccccgcgcccaccatgcactgggttggtcctgatgaccggttggttggcaactcctcccgagcccgggctttccccaacgggaccttagagattggggtgactggcgctggggatgctgg

SEQ ID NO: 44573 - DNA, 364 bp, Gossypium hirsutum
  Clone ID: LIB3196-003-P1-M1-E1
gccgcgaaggcctacaagctcaacaattcgctgcttctcttcactcctctaatgtcgaaaagaagctggagagtcttccttcgatggttgctggcgtttggtccgataacggtgctgcacagctggaggcgactactcagtttcgaaaattgctttcgattgagcgaagtcctccaattgaggaagttatacagtcaggcgtcgttccccgttttgttgagttccttggtagggaagattttccacagcttcagtttgaggctgcttgggcgcttacgaatattgcttctggaacctcagacaatacaaaggtagtaattgatcttggtgctgttccgatttttgtaaagcttcttgcttcacc

SEQ ID NO: 44574 - DNA, 363 bp, Gossypium hirsutum
  Clone ID: LIB3196-003-P1-M1-E10
tcttggtatccctaaatggagatcattatccattcactagtaaattggattttgattgtacgaataacatggtggaatacgaagcgtgcatcatgggtatccgcgcagccatagatcgcaagattaaagtgctagaggtgtttagggattctgcgctagtgatttatcaactcaagggagaatgggagaccagagacctcaagttaatcgattatcagaagctggtccttgaattggttaaagagtttgatgacattaccttctactacctttcacgagacgaatatcagatggctgatgctttggctaccttagcctccatgatcaaggtgaacaaacaagatgtcaaacccatctggttga

SEQ ID NO: 44575 - DNA, 381 bp, Gossypium hirsutum
  Clone ID: LIB3196-003-P1-M1-E11
atgcctcccgaacctcctcagccgcccggagccgcgcccggagcccggctatagaggctgcagtcgcagccgggagcccgcagcccgcgccccgagcccgccgccgcccttcgagggcgtcccaggccgcgccatggtgaaagtgacgttcaactccgctctggcccagaaggaagccaagaaggatgagcccaagagcggcgaggaggcgcttatcatcccccccgacgccgtcgctgtggactgcaaggacccagatgatgtggtaccagttggccaaagaagagcctggtgttggtgcatgtgctttggactggcatttatgcttgcaggtgttattctaggaggagcatacttgtacaaatattttgcactttaacc

SEQ ID NO: 44576 - DNA, 365 bp, Gossypium hirsutum
  Clone ID: LIB3196-003-P1-M1-E12
aaaaaagaaaataaccattgccagcatgaagtttctctgattttcttttcactgattggtggaaacataaactcatttccgagtaatgatttacttaaaatattatattgtttattatcaaacattatttagacaagtgaagagttttttattcagggctaccgggtcatttctgttgatattccccaggtttggaatcatcaagagtggattcaaagttttgagaagttcttggatgtcatcaatgttcatcatatacatttatatggtacatctctaggaggattcctagctcaactttttgctcaacatcgtccaagacgggttaaatccttaattctatcaaatgcatttttggagacatg

SEQ ID NO: 44577 - DNA, 361 bp, Gossypium hirsutum
  Clone ID: LIB3196-003-P1-M1-E2
aagatggcttacattaattccctactcatcatcttctttgttttctgttttccttcaatggttctttccgaatcgttccgatcgattcaattgccaccgaatgtcacgggtcccgaatccattgcctttgagctggcaactggacgtttttacgtcggtgtaactgatggtagaattttgcaatataacggaccgactgttggatttgtggagtttggttctaccggtcgaaataggactaagacgatgtgcgatggcattactgatccggatttgggtccgatgtgtggaagaccattcggtttagggttccattacgctacgaatcagttgtatgtttgtgatgcataccttggtctca

SEQ ID NO: 44578 - DNA, 366 bp, Gossypium hirsutum
  Clone ID: LIB3196-003-P1-M1-E3
cccacgcgtccggttgaattaatccgaatttttatttattaagttatgaagttgatggattaattggaaatgatgaaatggtgactaagtagggattggatattggtataaggagagcaagagttgataggtgaattcaaaatttccattacaaaagcttaatgattaaaggccattcataccgttagatagtaaatggtgagagaaaaaggatgtatctcacgtacatatatatatataaatatcaagaattgctaaagcatgattttcattacatatggctccattttcttatcaccacttatttttccttcacttcatgtttgttttggaccagacatgatgatcaatttgttcaacattcat

SEQ ID NO: 44579 - DNA, 362 bp, Gossypium hirsutum
  Clone ID: LIB3196-003-P1-M1-E4
atatcaccacccgcgagctgggcacggtcatgcggtccctgggccagaaccccacggaggccgagctgcgggacatgatgagcgagatcgaccgtgacggcaacggcaccgtggactttcccgagttcctgggcatgatggccaggaagatgaaggacacggacaacgaggaggagatccgcgaggcctttcgcgtgttcgacaaggacggcgaccgcttcgtcagcgccgcggagctgcgacacgtcatgacccggctgggggagaagctgagtgaccaggaggtggacgagatgatccgggccgcggacacagatggagacggacaggtgaactactaggagttcgtccgtgtgctggtg

SEQ ID NO: 44580 - DNA, 367 bp, Gossypium hirsutum
  Clone ID: LIB3196-003-P1-M1-E5
cagatattttatcttttgagggacctttgcagttgtgttcattttgtttgccatactctgctatgtataatataattatgtggtagaaatagatgtttgtcaagtttttgctgcgtatgtaagggtgccatagctcttcccatttgtggtagtggataatgatgaatgaaacgaaggggcatagtcgattctaacatgtaaggtacttgggcagacattcaaagttgtagcaatcacctcatcaacccaattgcttaggcccagctctttatcacacagggtctaggataataataacccaaactccataattaccccaaacaaaccaaatattaaaataaattgtatgaattaatgaatgaatgaa

SEQ ID NO: 44581 - DNA, 371 bp, Gossypium hirsutum
  Clone ID: LIB3196-003-P1-M1-E6
cggacgcgtgggaaaaagctgaaaaacatattttcatggaatgatggttagtgatgagctaagctttcatgacatttctcagctgttgagtttatttggttccaaatatggtaatgaaattgctgtcaatgcgagtaaaaatacaaagctagaagaaacctaagttttcatggccaaaagtaaaggtggattgctaaagaagaaaggttgatttttttttttgaagaagaagaagaaggaggaagagggaacaaaaaaagaaaaaaaatgccaacagtttggttttcattgaagagatctttacactgcaaatcagagccatcagatgttcatgacccagaaaccaggaagcaattgagtacaatattgac

SEQ ID NO: 44582 - DNA, 380 bp, Gossypium hirsutum
  Clone ID: LIB3196-003-P1-M1-E7
atattttcattcttttttgagacagggtcttgcccaggctgaagtacagcctcacaatcgcagctcactgcagcctcaacctcctgggctcaagtgatcctcctgcctcagcctccagagcagttaggactataagcgcataccaccacattccactattttttttccctagagatgaggtcctactgtgtggcccaggctaagattatttttatgttatccttgctctgacttgaaatcccactctaggttggggatcactcttctttgctttaatgaatgtatactttgtcctttagagacatctagacgatcagaattcataaatatcagaatgggtgtattttaaaataatgtttctggtcatatatggccattgg

SEQ ID NO: 44583 - DNA, 359 bp, Gossypium hirsutum
  Clone ID: LIB3196-003-P1-M1-E8
cccacgcgtccgtttctttcaaaatgtaattggctgtgctataccaaaagcttaccaccttgctaactctttcagtcgctcctttattatatgtacatgagattgaattcctcccaaagactaaaccgctacctcaatactcgaccgtcaggctttacagacagacctatagtcgaccctctcacttccttcgtatttattcctttttccagctatgcttgaactataattataatagaaaactcatcgtagagaaagttatggatggaatgatctcctctcttgtaccccgcgaaagctgaagaatggctttagaatcttccattccgctgctccaaaaatccttatttgctgcgtta

SEQ ID NO: 44584 - DNA, 378 bp, Gossypium hirsutum
  Clone ID: LIB3196-003-P1-M1-E9
atgccgggcaaatgccaacatggcagcggttggggctggtggttccaccgcggcggccgggccaggggcgctttccgcgggtgcattagagccggggactgctagtgcggctcacaggcgcctgaagtacatatccctagctgtgctggtggtccagaatgcctccctcatcctcagcatccgctacgcccgcacgttgccaggggaccgcttctttgccaccactgctgtggtcatggcggaagtgctcaaaggtctcacctgcctgctgctgctcttcgcacagaagaggggtaacgtgaagcacctggttctcttccttcatgaggctgtcctggtgcagtatgtggacacactcaagctcgcagtgccctctct

SEQ ID NO: 44585 - DNA, 363 bp, Gossypium hirsutum
  Clone ID: LIB3196-003-P1-M1-F1
gtacgaactctcgatttaacgcaaaataaattagttgaaattcctatggagatcagcgaactagtcaacatgcagcgactgattttagcctctaatcatattgagcaattaccaagtactatggggaatcttcagtctctgaaagctatgatacttgatgggaaccgaattacttctttgccagatgaattgggcgagctggtaaaactcgagaagttatcaatttctggaaatatgttaatgtccttgcccaatactattggcagtttgcgcaatttgtctctgcttaatgtgtctaataataaattgaagtatcttcctgaatcaattgggatctgctcttctttggaagaactgcaagca

SEQ ID NO: 44586 - DNA, 365 bp, Gossypium hirsutum
  Clone ID: LIB3196-003-P1-M1-F10
atggcgattaacccttctttgctctttctttcccttctttttctcttcaatggctgcctagctcgccagaccttttcgtcacagcagtcccaaaatgagtgtcaaatcaataggctccgcgcctctgcaccccagacccgaattcgctccgaagccggcaccaccgagtggtggaaccccaactgtcaacagctcaggtgtgctggtgtatctgtaatgaggcagactattgaacctaatggccttgttttgccttccttcaccaatgctcctcagcttctctacattgtccaaggaagaggtattcaaggtattgtgatgcctggatgtgccgaaacattccaggattcacagcaatggcagca

SEQ ID NO: 44587 - DNA, 382 bp, Gossypium hirsutum
  Clone ID: LIB3196-003-P1-M1-F11
atgccccagccagagaggaggtttttccgtcgtggctgggtgaccttcgaccgcagtgttaacattaaagagatctgttggaacctgcagaacatccgtctccgggagtgtgagctgagccctggtgtgaacagggacctgacccggcgcgttcgcaatatcaatggcatcacccagcacaagcagattgtgcgcaacgacatcaagctggcagccaagctgatccacacgctggacgacaggacccagctttgggcctcggaaccagggacgcctcccctgccaacgagcctgccctcacaaaacccgatcttgaagaatatcaccgactacctgatcgaggaagtgagcgctgaggaggaggagctgctggggagcagcg

SEQ ID NO: 44588 - DNA, 385 bp, Gossypium hirsutum
  Clone ID: LIB3196-003-P1-M1-F12
atacttaacagccacttgtttcatcccacctgggcattaggttgacttcaaagatgcctcagttactgagaaacattaatgggatcatcgaggccttcaggcgctacgcaaggacggagggcagctgcacagcgctcacccgaggggagctgaaaagactcttggagcaagagtttgccgatgtgattgtgaaaccccacgatccagccactgtggacgaggtcctgcgtctgctggatgaagaccacacagggactgtggaattcaaggaattcctggtcttggtgtttaaagtcgcccaggcctgtttcaagacactgagcgagagtcctgagggagcctgcagctctcaagagtctggaagcctccattctggggcctggca

SEQ ID NO: 44589 - DNA, 385 bp, Gossypium hirsutum
  Clone ID: LIB3196-003-P1-M1-F2
atcgcatcccggccctcctccttcccgcctccacagagactgtgttctccgaggtcgccaaacatgttttccaaaaagtgcagcctttttctggtcgtaaaagtacagaagcagaaaacaaaacctgactgccacccttccgggataatcactattaatgttttagtgtattgtctgccctctaaacatttaatgttttttgaatagataatacggtataatgtttcagaaatgataaccagattttaaagtaaatagacctttcttagaagagtcttcctactcctccacaggttaccgcttacattagtttattatgtttccatttagttttgtaaaaaaaaaaaaaaaaaaaggacactttcccttcttaattagtgtattt

SEQ ID NO: 44590 - DNA, 369 bp, Gossypium hirsutum
  Clone ID: LIB3196-003-P1-M1-F3
tcgtccacgcgtccgctaagtctgaagtgggagatgcagagttccagtttgaaattgactgtgaggagccagaattggagttcatcccaaaaatggtaactgatgattctatgaccagagcatcattccaatttggaaatggatttgtgaataaccaccaccgtttaccactttcgaagctggaggaatgctttgaggaagatgaagaaagtgaattggaagctgagcagaatggtttttctcctttcgaagctcttgaaaggatcccatccatttcgaagctttcaatgtcacttagagatacttgcttatgtgacaagagccagaaatattccaaattttcaggaacaaaacaagaaaatgggtatt

SEQ ID NO: 44591 - DNA, 386 bp, Gossypium hirsutum
  Clone ID: LIB3196-003-P1-M1-F4
atggacaagatgcagctgctggagattatcacgactgagaaaacttccagagacaccagtgcttcagctgtagcagtcggtctcaagcaggggaaggtcatcattgtggttaaggatggacctggcttctatactaccaggtgccttgcgcccatgatgtctgaagtcatccgaatcctccaggaaggagttgacccgaagaagctggattccctgaccacaagttttggctttcctgtgggtgccgccacactggtggatgaagttggcgtggatgtagcaaaacatgtggcggaagatctgggcaaagtctttggggagcggtttggaggcggaaacccagaactgctgacacagatggtgtccaagggcttcctaggtcgcaa

SEQ ID NO: 44592 - DNA, 388 bp, Gossypium hirsutum
  Clone ID: LIB3196-003-P1-M1-F5
atctgcggactacgacgactttgtgaatgcgatccggagcgcccgcagcgccttctgcctgacgcccatgggcatgatgcagttcaacgacatcctacagaacctcaagcgcagcaaacagaccaaggagctgtggcagcgggtctcactcgagatggccaccttctccccctgagtctttcacccgtagggtcctatacagggacccaggcctgtggctatgggggcccctcacacagggggagtgaagcttggctggacagatcatcctcactcagctccctggtagcccagactgacagctgctcttgggctgtagcctggggccaagatgtctcagaccctagaagcctagggctgggggagacagccctgtctgggagggggc

SEQ ID NO: 44593 - DNA, 323 bp, Gossypium hirsutum
  Clone ID: LIB3196-003-P1-M1-F6
ccacaatctaaaaagattgttaaaactcttctaaaaaaaactcaagaacaattcttgaaaagaaaaactcaaagagaatttaaataataatcaattgaatgaattgtatacaatgcaaaggcctatatataagctagctaaataaatctaaataaaactcttaagtatagtaaaactctaattaatctaaacaagaagtagttttaaactaaactttcttgttgacataaaactcctaaatagcttaaactacttaataattattaaaaattcggaataataaaataataataacttatagatacaatattggaatcataaaa

SEQ ID NO: 44594 - DNA, 361 bp, Gossypium hirsutum
  Clone ID: LIB3196-003-P1-M1-F7
cccacgcgtccgcccacgcgtccgcggacgcgtggggtttttctccaatggcgaccgtctctccaactcctctgttgaaagatgagctcgacatcgtgattcccacgattaggaacttggactttttggagatgtggagaccctttttccagccttaccatctcatcattgttcaagatggtgatcctaccaagactatcaaggtccctgaaggcttcgattatgagctttacaataggaacgacatcaacaggattttgggtcctaaggcttcttgtatctctttcaaggattctgcttgtaggtgctttgggtacatggtttccaagaagaaatacatctataccattgatgatgactg

SEQ ID NO: 44595 - DNA, 361 bp, Gossypium hirsutum
  Clone ID: LIB3196-003-P1-M1-F8
ggcgattcggattccaggagggtgtcttcggcctcggattgctcggtggaggtgcgggctccaagtggagctaatgaactcaagctgcatttggccaaagttgagaaagattgtagaatttgccatttgggtttagagagcaacagccatgaatctggtgcccctattgaattgggttgttcttgcaaggatgaccttgctgctgctcataaacactgtgctgaagcatggtttaagatcagaggaaataagacctgtgaaatttgtcattctattgcacgcaacgtagttggagtgaacgaggtcgagtcgacagagcaaccaaacgagacaaacagttccactgcaaccactgcagtct

SEQ ID NO: 44596 - DNA, 379 bp, Gossypium hirsutum
  Clone ID: LIB3196-003-P1-M1-F9
attgctgggattataggcgtgagtcaacacacccagccataaaatgactttttaaaaaactgacaataccaattgctggtgaggatatggagcaactagaactcttgtacattgctagtgtgaatataaaaatagtacagccaccttgaataacaacttgcagttttttatacagttaaacatacacttaccatacgacacagcaataccactctgacatattgacacgagtgaaatgaaaacttatgtttgcacaaaaacctgcacatgaatacagcctgtatttgcaagtgcccagaactggaagcaactcacctatctttcatctggggaatgaatcaacaaactatagtattcataacataatgtacccagcaat

SEQ ID NO: 44597 - DNA, 364 bp, Gossypium hirsutum
  Clone ID: LIB3196-003-P1-M1-G1
gggaaagctttcactaataaaatgcactaattggctagaccaaaaattctggaaaaaaaactattaagaagatatatgagtctagtttcaagaaaaattcacgaatttaaattttgagttttgtgtctcgagttatgatttatttagtgactatgatgcaggtgggcagttttataaggaataatgaaaaaaattgttttgatttgtctaagtattcgaaaaatttttaatgttcccgatttggtcctgaaccatttcaattgcatattttagggcctcgagggccctttttagggacatattgaatgaatgtaaataaattaaatttaaaagcaaattttatgcccgaattagtaagttaagt

SEQ ID NO: 44598 - DNA, 383 bp, Gossypium hirsutum
  Clone ID: LIB3196-003-P1-M1-G10
atgcaggatgcggggccgcgtggcagggagctgcgctcccctgggcctgcttctggtctgtcttcgtctcccaggcctctttgcccggagcattggtgctgtggaggagaaagtttcccaaaacctggggaccaacttgcctcagcttggacaaccttccctgactggcccccctaactctgaacatcctcagcccgctctggacccgaggtctaacgatttggcaagggctcctctgaagctcagcatgcccccatcagacggcttcccacccgcaggaggctctgcagtgcagaggtggcctccgtccgggaggctgcctgccatgtactcctggccccctgaggatccttggctgatgatggctgctgcggctgcggacc

SEQ ID NO: 44599 - DNA, 367 bp, Gossypium hirsutum
  Clone ID: LIB3196-003-P1-M1-G11
ctcgctactcactttgatacattttccttcattttgcgtaattttcttgactagcaaatagagagtagatccttcagctgttaggaaatgagatttcatcttaattatgtggctgcctaactccatccacacgtaattgcaaattacaagaaaaatgataataattattaaaaaaaaaggttagtgagagtattcatttgatgagagtaattacgatgtcttttgataatttgttatgagagtattcatctttaattatgtggctacttaactccactcacaactgtaataggaaaaaaaaaagataccaataattataaaatggaggttaactagactattcattttgatgaaaactatctcagct

SEQ ID NO: 44600 - DNA, 351 bp, Gossypium hirsutum
  Clone ID: LIB3196-003-P1-M1-G12
atgatcaatagcaatgatgacaacggtgtgcttgctgggaattggagcggcacttacacgggtggtcgtgacccaaggaactggaacggcagcgtggagatcctcaaggactggaaaaaatctggcttcagcccagtccgatatggccagtgctgggtctttgctgggaccctcaacacagcgctgcggtctttggggattccttcccgggtgatcaccaacttcagctcaactaatgacacagaccgaaatctcagtgtggatgtgtactacgaccgcatgggaaaccccctggacaagggtagtgatagtgtatggaatttccatgtctggaatgaaggctggtttgtt

SEQ ID NO: 44601 - DNA, 365 bp, Gossypium hirsutum
  Clone ID: LIB3196-003-P1-M1-G2
cacgcataacatcccatattttctttcttagccaaaaaccttgataagattatctcttgactagccaccttgaggagccattaacaaaggaacaacacaaggaccgaaggaaaacatcttcaatcagagttcatgagactgctgattcaacagagtttattcttattatactttgttattttgattttaatcatgtttgcaatgggttttattatcttgtcatctacaatggtagcttaattatatttaactaggatgattgcatttatttaatgaagtttgtttaaatcatatctatagtgtttgtgcctcagtcgatcatgttttcaattaaactcaagtatgtattttattcatatgtgacc

SEQ ID NO: 44602 - DNA, 384 bp, Gossypium hirsutum
  Clone ID: LIB3196-003-P1-M1-G3
atggccgatgctcttctgggggctttggcagcaggagcctctacaacctcggggggaacaagagcatctccatgagtgtggctgggtcacgacaaggcgcctgctttggaggtgctggaggcttcggcactggtggctttggcggtggatttgggggctccttcagcggtaagggtggccctggcttccctgtctgccctgctgggggaattcaggaggtaactatcaaccagagcttgctgactcccctccacgtggagattgaccctgagatccaaaaagtccggacagaggagcgagaacagatcaagctcctcaacaacaagtttgcctccttcatcgacaaggtgcggttcttagagcaacagaataaggtcctggaga

SEQ ID NO: 44603 - DNA, 369 bp, Gossypium hirsutum
  Clone ID: LIB3196-003-P1-M1-G4
gccgccgcctgcgtctctctcttcatctctctgaaccaaaaagtctttagcttttcgcttcgagagagaccatgttggtttaccaggatctcatctccggtgacgagcttctttctgactcattcccctacaaggaaatcgagaatgggatgctgtgggaagttgagggaaagtgggttgtgcaaggagctgtcgatgttgacattggtgccaatccttcagccgaaggtgctgatgaggatgaaggtgttgatgaccaagctgtgaaggttgttgacattgttgacactttcaggcttcaggagcaaccccctttcgacaagaagcagtttgtcgtgttcatcaagaagttcatcaagaacttgacac

SEQ ID NO: 44604 - DNA, 369 bp, Gossypium hirsutum
  Clone ID: LIB3196-003-P1-M1-G5
gagaaagctcttactgagcatcgcaatcctgacacgttgaagaaactaaatgatgctgaaaaagccaagaaagaactagagcagcatgaatattttgatccaaagatagctgatgaggaccgtgagaaagggaatgaaagtttcaaacagcacaagtatccagaggctgtgaagtattataccgagtcattgagacgattcctcaaatatgcaaaagctatacatctctttagcagcatgctacacgaaattgggcgctttgcctgagggattgaaagatgctgagaagtgcattgagctagatccaacattttcaaagggttacacaagaaagggagctgcttagttcttcatgaaagagtatgacaa

SEQ ID NO: 44605 - DNA, 371 bp, Gossypium hirsutum
  Clone ID: LIB3196-003-P1-M1-G6
gttcggtgaggctactaggagaagagatgtcaaagctattgttttgactggcaagggtggaaggttttcagggggttttgacatcaatgcttttcagaatcccagcggtgatacttcggatcgaacaattgaatcaattgatcttgttctcaacactatagaggattgcaagaagccagttgttgcggctattgaaggattggctcttggtggtggcttagaattggcaatgggttgccatgctcgtattgctgctccaaaaactcaattagggttgccagagttgacacttggggtgattcctggactcggaggtactcaaagtcttccaaggcttgttggggtatcaaaggctattgaaatgatgctga

SEQ ID NO: 44606 - DNA, 342 bp, Gossypium hirsutum
  Clone ID: LIB3196-003-P1-M1-G7
cgatatggggaagatcaagatcggaatcaacggatttggaaggatcgggcgtttggttgccagagttgctctccaaagtgaagatgttgagctcgttgctgttaacgatcctttcatcaccaccgattacatgacctacatgtttaagtatgacagtgttcacggtcaatggaagcaccatgagcttaaggtgaaggactcaaaaacccttctctttggtgaaaagcctgtcactgttttcggcatcagaaaccctgaagaaatcccttggggtgagactggagctgattatgtcgttgagtctactggtgttttcactgacaaggacaaagctgctgccca

SEQ ID NO: 44607 - DNA, 232 bp, Gossypium hirsutum
  Clone ID: LIB3196-003-P1-M1-G8
cccacgcgtccgggtgtacgtacgtacgtaattgcatcaacaataaaacccagatcccaatatctggattcggaataaatatatatataaataaaataaaacatggccttaacaggcatgcaactctagtttctactctacaacttgcatgtatttatatatgtgcgggagcaatgttttgtaatccagctaaattaaataaaagtaatagtaaacaaggtttttcttcttt

SEQ ID NO: 44608 - DNA, 381 bp, Gossypium hirsutum
  Clone ID: LIB3196-003-P1-M1-G9
atgttggggaacggggccgcctggactcagagctgagaaacatgcaggacctggtggaggacttcaagaacaagtatgaggatgaaatcaacaagcgcaccactgccgagaatgagtttgtgatgctgaagaaggatgtagatgctgcctacatgaacaaggtggagctagaggccagggtcgatgcgctgatggatgagattaacttcatgaagatgttctttgatgcggagctgtcccagatgcagacgcacgtctctgacacctccgtggtcctctccatggacaacaaccgcaacctggacctggacagcatcatcgccgaggtcaaggcccagtatgaggagatcgccaaccgcagccggaccgaagctgagtctt

SEQ ID NO: 44609 - DNA, 387 bp, Gossypium hirsutum
  Clone ID: LIB3196-003-P1-M1-H1
atagcaggaggagctgtcaggaagatcagaagccagtcatggatgaccagcgcgacctgatctccaacaatgagcaactgcccatgctgggccggcgccctggaaccccggagagcaagtgcagccgcggagccctgtacacaggcttttccatcctggtgactctgcttctggctggccaggccaccactgcctacttcctgtaccagcagcagggccggctggacaaactgacagtcaccacccagagcctgcagctggagaacctgcgcatgaagcttcccaagcctcccaagcctgtgagcaagatgcgcatggcaaccccgctgctgatgcaggcgctacccatgggagcccaggggcccatgcagaatgccaccaagtatg

SEQ ID NO: 44610 - DNA, 383 bp, Gossypium hirsutum
  Clone ID: LIB3196-003-P1-M1-H10
atctcaggcctggaactcattaccttgcctcacggacaccagctgcgcctggacatcattgaaagacacagcacgatggccatcggcattgcagtgtacattctgggctgcacgggcactttggaggaccgagcagccactctgagtaaggtcatccaggtggcagtggaactgaaggattccatgggggacctctattccttctcagctctcatgaaagccctggaaatgccacagatcacaaggttagaaaagacgtggactgctctgcggcaccagtacacccaaactgccattctctatgagaaacagctgaagcccttcagcaaaatcctgcatgaaggcagagagtccacatgtgttcccccaaataatgtatcagt

SEQ ID NO: 44611 - DNA, 384 bp, Gossypium hirsutum
  Clone ID: LIB3196-003-P1-M1-H11
atcgcaccgcggcgccggctgcaaagttgagcgaaaagtttgaggccggagggagcgaggccggggagtcctctccagcggggcgctccagtccctcagacgtgggctgagcttgggacgagctgctttccgccccaggccactgtagggaacggcggtggcgcctccccagcaaaccggaccgactggatccagccgccgcagggaatgacgccggtgctcctacagccacagctccggacggggagggcgagccccacagccggccctgcgacgcccgcctgggcagcaccgataaggagctgaaggcaggagccgccgccacgggcagtgccccgacagcgccagggaccccccggcagagggagcccagggtcgaggtta

SEQ ID NO: 44612 - DNA, 387 bp, Gossypium hirsutum
  Clone ID: LIB3196-003-P1-M1-H12
atcagccaccgccgccgccgccgccagtggcgagaccccgacctggcgggtcagcgctgggcgtgcgtgcgggcaggcgggggcgctgacgaggagcaggaagaggctgcagtgccggcgtgggcggctggccgaggcggaggcgcaggaactgggcggcgagtcgtgagaggctgcccgcctcactcagcattatggatccaagcctgttgagagaaagggagctgttcaaaaaacgagctctttccactcctgtagtagaaaaacgttcagcatcttctgagtcatcatcgtcatcgtcgaagaagaagaaaacaaaggtagaacatggaggatcgtcaggctctaaacaaaaatctgatcatagcaatggatcatttaacttgg

SEQ ID NO: 44613 - DNA, 366 bp, Gossypium hirsutum
  Clone ID: LIB3196-003-P1-M1-H2
acagtctccgcctagcttcttccgctcattcccagtctctcttcacaatgtccgccgcctccgcttcccttgctctcccttctcccctttcttcgtttcgctccaatggacctcttccttctagatgcttcctccgcctcaacaacccctcaagatctagggttttcatgagtgtctccgttggatcccaaactgtcgtcgatgatgccttgttcgctgattacaagcccacatccgccttcctctttcccggtcagggcgctcaagccgttggaatgggaaaagaagctcaggctgtgcctgctgctgcagaattgtataagaaggcaaataatatattaggttttgatcttctagatctttgca

SEQ ID NO: 44614 - DNA, 366 bp, Gossypium hirsutum
  Clone ID: LIB3196-003-P1-M1-H3
gcttggaagcttgaaaaaccctagccatggtttctccttgctatattcggccatggggttgaagatgagcaaaattgacttttaattttgtattttaattcattttacccctaaatgaccaaaatgcccttactactaaactttccaaaaattccatccatgtccaatttttgtccatagacttagaaattggtaaaattctatttaagacctcctaattaatatttcaaaacaatttcatgctagaaacttctagaatgcaagttttgcaatttattcgatttagtccctaatttcaatttaagcactttatgcataaaatttcttcacaaaattttcacacaatcatgcaatcatatcatagac

SEQ ID NO: 44615 - DNA, 391 bp, Gossypium hirsutum
  Clone ID: LIB3196-003-P1-M1-H4
atcgcagccggaccgaagctgagtcttggtaccagaccaagtatgaggagctgcagcagacagctggccggcatggcgatgacctccgcaacaccaagcatgagatctctgagatgaaccggatgatccagaggctgagagctgagattgacaatgtcaagaaacagtgtgccaacctgcagaacgccattgcggatgccgagcagcgtggggagctggcgctcaaggacgccagaaacaagctggccgagctggaggaggccctgcagaaggccaagcaggacatggcccggctgctgcgtgagtaccaggagctcatgaacaccaagctggccctggacgtggagatcgccacttaccgcaagctgctggagggcgaggagtgcagact

SEQ ID NO: 44616 - DNA, 384 bp, Gossypium hirsutum
  Clone ID: LIB3196-003-P1-M1-H5
atctccacccgcgcttggtcccagcgcccgcggcgccgcgtccccggcccagccatggcgtcctccgcggccggctgcgtggtgatcgtcggcagtggagtcattgggcgaagctgggccatgctgtttgccagtggaggcttccaggtgaaactctatgacattgagcaacagcagataaggaatgccctggagaacatcagaaaggagatgaagttgctggagcaggcaggtgctctgaaaggctccctgagtgccgaagagcaactgtccctcatcagtggctgccccaatatccaagaagcagtagagggcgccatgcacattcaggtgaatccgccgtactacatcccgctggttgagctggtcccccacccggagacg

SEQ ID NO: 44617 - DNA, 388 bp, Gossypium hirsutum
  Clone ID: LIB3196-003-P1-M1-H6
atgtcaggataaattaaaagaacatttgtctggaaatgctgccaggagcctattatgtaaatgttaggtattttgtaaaataaccttgaaattgtaaattgacacgtgtttggtcagattgtgtcaagtttaatttgttttgttttctttttttttatttgaaaactactttagcaataattaattccatgattatcacattctgccattaagggatattagtaccgtaatactgaagaaatcttactaagtctgaacttttggggtaggcagcttctttgtttcttttctatccacccttgtcggttgaggtatttgtttcttgactaataaaccctttgatacttttagccagaaatcggtctcataaagctatttttgagtatag

SEQ ID NO: 44618 - DNA, 378 bp, Gossypium hirsutum
  Clone ID: LIB3196-003-P1-M1-H7
atctgaggaacaagattctcacggccacagtggacaatgccaacgtccttctgcagattgacaatgcccgtctggccgcggatgacttccgcaccaagtatgagacagagctgaacctgcgcatgagtgtggaggccgacatcaatggcctgcgcagggtgctggatgaactgaccctggccagagctgacctggagatgcagattgagagcctgaaggaggagctggcctacctgaaaaagaaccacgaggaggagatgaatgccctgagaggccaggtgggtggagatgtcaacgtggagatggacgctgcacctggcgtggacctgagccgcattctgaacgagatgcgtgaccagtatgagaagatggcagaga

SEQ ID NO: 44619 - DNA, 363 bp, Gossypium hirsutum
  Clone ID: LIB3196-003-P1-M1-H8
ttccgcttccatctcctctctcttttccttccttttctcttcacccacagagaaaaggggtctcactcaaatgctctgctactaaaaacccattttttgcaatcatctttccttccttctctctctctctctctctcaaacaaaaccagttctcttccaaagaatcagtctgggttatggacggcggtgcttcctataacccacgtacagtcgaagaagtctttcgagatttcaagggtcgtcgagctgccatgattaaagccctcaccactgatgtggaagagttctacaagcagtgcgatccagaaaaggagaatctttgcctttatggatatcccagtgagcagtgggaggtgaatttac

SEQ ID NO: 44620 - DNA, 382 bp, Gossypium hirsutum
  Clone ID: LIB3196-003-P1-M1-H9
atctcattttcatctgttttttgaagaaaaatggaaaaatgtaaaaggcggcccctccccaggctttgtgagcctggcccgagccagtataagagggcctggggcacgatgtggtcagccaggaagcatacgatgccatttcttttatagactcctcggtatttctggtagggtaaggggcaggccagggctgttcctgcccatgatggaagaggaaagtgctactgggcaaggtgtcccaccctcccctcctgaccctccttctacgaggcttatcctggcaatggggtagtcactgccacccttccatcaaaaaaaaaaaaaaaaatcccttccttgtgggattcttgggcatctcctgcctccctcactctcacggtaa

SEQ ID NO: 44621 - DNA, 377 bp, Gossypium hirsutum
  Clone ID: LIB3196-004-P1-M1-A10
atacttgcaccactaagaaagaaatgtagaaccatttggaaaaatgaaatttagtagttccaagtttcaaagaaatgtcaacattttattccattcaataaagaacaaaaccaatagtatttttattactttcatctgaaacattccatgttttaatctgagccttgcagactttgatttggagtttgaacctgttttggttgcatttcatttttggagaacttcattaacgtgagattggcgattcaaatgcaggtgcagttttctgttaatgtcatgctgttgtttaggtaataagaaatattaagtaattggctttagattttgtaattttttccctgagttcctgctagatttcgtattctagtagcaatgta

SEQ ID NO: 44622 - DNA, 364 bp, Gossypium hirsutum
  Clone ID: LIB3196-004-P1-M1-A11
atcgaggccgtgcggcatggcagctacaaagccatgaagctgctgctgctctacggggccgagctgggggtgcggaacgcggcctccgtgaccccggtgcagctggctcgagactggcagcgcggcatccgggaggccctgcaggcccacgtggcgcatccccgcacccggtgctgaccctgaccgcagcccgggtcttgcgcacctgccaccattccatcccatgcccagcccccgcgtctgtgcctctgtggttcctgccctcagccccggttcctgcctctggggtctgtgcctgctcagcagcccttgcagaactgagtggtggcaccgggccctgcaagcagagagaggggcctccctg

SEQ ID NO: 44623 - DNA, 379 bp, Gossypium hirsutum
  Clone ID: LIB3196-004-P1-M1-A12
atgtttattaaaataattaaaaatactttataagaagagatatttttgatattaggactgatgttgaaatatataggggcaatttataaaaaggtagttagagaaatatattttagtgaactataaccacagagcacagatgactcccaatgagctgatctgtctttagatttctccctttccctgacccatccctgttctctaggggctgggagtggggatgtggacacaggagggggagctccttcacattttgcacaaagcacaagtctaaacagcctatgctctggccagagccatttctaagagctttaaaccagaagacctatcctgggccaattttcctttttctttatattattttccgggaaaaaaagta

SEQ ID NO: 44624 - DNA, 377 bp, Gossypium hirsutum
  Clone ID: LIB3196-004-P1-M1-A2
atggtggctctgcagagggcgatggcatgcagccgggcgctcctgttgcccacgcctcccaggccctcacccctcaccatgcctgcgcccagctgctcctccagcgccattcatcccagcaggcagcatggacacggcagctgagaaaagatgccagcagaacgcgcttattttataatatttaataactcagtgccaatctgcattaacacagtcatcctcaggtttttcagagggctgtgtacacatctgtgagaataaatgttagcctctaagttttgaatgaagattctctgaagacgggcagccggtgacctttgttttacattgagcaatttttcaccatctcagccgctctggccattttgaaaagggct

SEQ ID NO: 44625 - DNA, 324 bp, Gossypium hirsutum
  Clone ID: LIB3196-004-P1-M1-A3
gaggctgcacactttagataacttggggtcaggggtgcacactcttggtcgtatgtgtccggtcctgccttctttgatggcataccctttttccctactaacccgtgtagacctttatctcgctggataaatgatcatggtccggctcaaggttgtgatgatgctaagactcagtattgacgctttgaaaagtaaatgatttccatgcattgcagctgatgatttctcctggggcgctaagagctgggctagactggctaaagatacccttattcaagctcctgacaggggagatccttcagttggcaatgagggtgatttcaa

SEQ ID NO: 44626 - DNA, 366 bp, Gossypium hirsutum
  unsure (1)..(366): unsure at all n locations; Clone ID: LIB3196-004-P1-M1-A4
atccaggaacaagccatcatgtctcgccagtcaagtgtgtccttccggagtgggggcagtcgtagcttcagcaccgcctctgccatcaccccgtctgtcacccgcaccagcttcacctctgtgtcccggtctgggggtggcgggggtggctttggcagggtcagccttgggggtgcttgtggagtgggtggctatggcagccggagcctctacaatctggggggctccaaaaggatatccatcagcactagtggtggcagcttcaggaaccgatttggtgctggtgctggaggcggctatggcttttgaggtggtgccgggagtggatttggtttncgcnggggagcttgtggtggctttgggctc

SEQ ID NO: 44627 - DNA, 375 bp, Gossypium hirsutum
  Clone ID: LIB3196-004-P1-M1-A5
atgtgcgacctacatgtattcttggagtcactcagaaaaccatctggacgcagggaccgagcccccggaaagcaaaggagggtagcagcaaacaagtgtctgtacacaggagtcaaagagggggaaccgccgtcccaacatcacaaaaagtgaaagaagccggaagagattttacctatttaatagtggtgctttttggaatcagcattacaggtggcttgttttacacgattttcaaagaacttttttcttcatccagtcctagcaagatatatgggagagccttagaaaaatgcagatcacatcccgaggtaatcgctgtctttggtgagcctgttaaaggctatggggaggtgacaaggcggggtcgccgga

SEQ ID NO: 44628 - DNA, 363 bp, Gossypium hirsutum
  Clone ID: LIB3196-004-P1-M1-A8
atgccggctggtgaatgacacataacagctgtacaatgtggggaaaagacaaattgtccgaagtgctaagaactccatgagagaagatgccataaaataaacacctccctattcctattatctttcaatggttaccttgacttaacctattgagttacctggtcagcactgtgatctttttttctctccaaaggacctgcgttggacaacaataaagaaaaatttaacctatcatgcactgtacacatttcctgttcataagtttgggatttacataacccgcaaccaccatgttcctttgtatatgatgcaacagcataaatgtaagcttttatatcataagttctggtctttccagtcaca

SEQ ID NO: 44629 - DNA, 381 bp, Gossypium hirsutum
  Clone ID: LIB3196-004-P1-M1-A9
atccaggaaacaggaaagcccctggatgaaacactgaagaaagcccttatgggtcaccttgaggaggttgttttagctctgctaaaaactccagcgcaatttgatgctgatgaacttcgggctgccatgaagggccttggaactgatgaagacactctgattgagattttggcatcaagaactaacaaagaaatcagagacattaacagggtctacagagaggaactgaagagagatctggccaaagacataacttcagacacatctggagattttcggaacgctttgctttctcttgctaagggtgaccgatctgaggactttggtgtgaatgaagacttggctgattcagatgccagggccttgtatgaacgggagaaa

SEQ ID NO: 44630 - DNA, 360 bp, Gossypium hirsutum
  unsure (1)..(360): unsure at all n locations; Clone ID: LIB3196-004-P1-M1-B1
cagcaataggacgtggatggtgcctgatgctaagggcattccgtggacatccagaactgggggtaaacaatttgtggattatgatcgaaacattgttgtgaagaatgaaggcaatagctcaggagacatttcagcgtcccaacactctattctgactatggataaagccatttcagatttggagataaaattgatggcttctagggccgaacatgagacaattcagaaagaccctacgatgtctgaaggtgtgaagaatatagaatcgattttaaaaaggaaatattttatggttataggaatcaatacggcttttagtagtcgnaagcggagagattcagtacgtgcgacttggatgct

SEQ ID NO: 44631 - DNA, 378 bp, Gossypium hirsutum
  Clone ID: LIB3196-004-P1-M1-B11
atggagctggaagggacaacggagaacattgcagcccaggctctggagcacattcactccaatgaggtgatcatgaccattggcttctcccgaacagtagaggccttcctccaagaggctgcccgaaagaggaaattccatgtcattgtagcagagtgcgctcctttctgccagaatcagcctttccctcccattgcagggtcatgaaatggctgtgaatttgtccaaagcaggtattgagacaactgtcatgactgatgctgccatttttgctgttatgtcaagagtcaacaaggtaatcattggcacgaagaccatcctggccaatggtgccctgagagctgtgacaggaactcacactctggcactgcagcaaaa

SEQ ID NO: 44632 - DNA, 385 bp, Gossypium hirsutum
  Clone ID: LIB3196-004-P1-M1-B3
atcacggaacgaacggcactcttaccaggtttaccggcagccaatcccagtccaggagctggtcctagaagacctgcaggatggagatgtgagaatgggaggctcttttcgaggggctttcagcaactcagagaaagctaaaaatatctttagaattcgcttccacgacccatctccaggccagtctcacactctgcaagccaatgacgtattccacaagcagcagtggttcaactgtattcgggcggccattgcccccttccggtcggcaggcagtccgcctgagctgcagggcctgccagagctgcacgaagagtgtgaggggaaccacccctctgcgaggaagctcccagcccagaggagggcatctacagtttcagtgtta

SEQ ID NO: 44633 - DNA, 377 bp, Gossypium hirsutum
  Clone ID: LIB3196-004-P1-M1-B5
atcgcgtgtgcaattagcaatgcagtgtatatacaagaagccatgctgttaacagtttatctcaagtaatttggtgtcatttacaaaaggaagaaattcctgccatcagaagggacagaaggagatggaatgatcaaatcacagagaaacactaaaattactaaatctacaacagctcgccttatttttcttggacccaaactgtcagggtataaacactatttgtttcttttttaaaacatcgatagttttgctgtaaataataacactgtataaattctaacagaaaaatagaataaaatgttgataaggcactgcctcttagaacacaaacagaatattgcaaatgcatttaacaaataggggtctcaagtact

SEQ ID NO: 44634 - DNA, 377 bp, Gossypium hirsutum
  Clone ID: LIB3196-004-P1-M1-B7
atctgagctttttatcagaaagcttttttgatgttttaagtgttatgtgacttgttgaactttttaaaaagtgctacttttaaaatcccagatactctgaattttagaaaacaaactaattctgattgtgtcgtgcccaagtaccctttttttttttttaaacgaatagggaccaatgccacattgctttttatatttctttcttttttaatgttgccaaaaccaaaagtagctttgttttcctttgtattttgctactttgcagtatttgtgtgtggttttttttccttaatttgaaagggacagcactgtgtatgtttataaactaaatgaagataagatattattttgtataaacattcatctgagacaatcaa

SEQ ID NO: 44635 - DNA, 336 bp, Gossypium hirsutum
  unsure (1)..(336): unsure at all n locations; Clone ID: LIB3196-004-P1-M1-C1
gcgcccacgcgtccgggggaaaggacaaaaaggaaaaaccgttctagggttgccttgaatctctctctttccagatattagataattagaaatagatatgtagggcttttcaatcgattccttctttattttcttacaattagggttntcgaaagaggtaagttgatttaactgctgggtctcattttcttttcttatctttcttgggacagtggtgtcggagtttgggttttaatcgacccaacccttaaatcggtgcttttgggaatcggacttttaacattttacctagaatcgaagctggaaaaggatcatttttttagcgactctttctta

SEQ ID NO: 44636 - DNA, 380 bp, Gossypium hirsutum
  Clone ID: LIB3196-004-P1-M1-C10
atggagagggaaaaggagagggagagggagtgagagagagagaggagaggtgaagcattggatctatgtcaagggacaggcagatatacccagagaggaaaaaaatacttaataaaggaagagtacagctgcaaaacaagacatacaggagctgaagcagacatggcagaaaccagctggagaaagcacaggacaactaggacaatttagttaagcacaatctgtcattccagtatggactaccaagttcaattcaggatgcttcagttgaagacacgtggggtaatgtgctcagctgacgagggtccaaggaggccccattttccctgtcaccctatcctatgctcgtgctttggatcgttagcacactaggaatttca

SEQ ID NO: 44637 - DNA, 379 bp, Gossypium hirsutum
  Clone ID: LIB3196-004-P1-M1-C11
atcgcagctcggagtcagggcttctgggtgagccccagttcccccgcagctcggagtcagggcttccgggtgagccccagttcccccgcagctcggcgtcagggcttccgggtgagccccagctccccccgcagctcggcgtcagggcttcctggtgagccccagctccccccgcagctcggaggcagggcttccgggtgagccccagttcccccgcagctcggagtcagggcttccgggtgagccccagctgcaagcctgtgggtcttcagtgcatgctggctgccactgcgatcacacatgtgatctcacaaagagcagatcaacagcatggtagattcaaggaaacgttaacactgtgtgtttccgatctatccga

SEQ ID NO: 44638 - DNA, 362 bp, Gossypium hirsutum
  Clone ID: LIB3196-004-P1-M1-C12
atggctgctgaggacgagttactgctgccgcggctccccgagctgttcgaaacgggcaaacagttactggacgaagtagaagtagcgactgaacctgccggttcccggatagtccaggagaaggtgttcaagggcctggaccttcttgagaaggctgccgaaatgttatcgcagctcgacttgttcagccgaaatgaagatttggaagagattgcttccaccgacctgaagtacctgttggtgccagcgtttcaaggagccctcaccatgaaacaagtcaaccccagcaagcgtctagatcatttgcagcgggctcgagaacactttatgaactacttaactcagtgccattgctatcatgt

SEQ ID NO: 44639 - DNA, 382 bp, Gossypium hirsutum
  Clone ID: LIB3196-004-P1-M1-C2
ataggtgaccatgcagaacctcaacgaccgcctggcctcctacctggacaaggtgcgtgctctggaggaggccaacgctgacctggaggtgaagatccgtgactggtaccagaggcagcggcccagtgagatcaaagactacagtccctacttcaagaccattgaggacctgaggaacaagattctcacggccacagtggacaatgccaacgtccttctgcagattgacaatgcccgtctggccgcggatgacttccgcaccaagtatgagacagagctgaacctgcgcatgagtgtggaggccgacatcaatggcctgcgcagggtgctggatgaactgaccctggccagagctgacctggagatgcagattgaagcctga

SEQ ID NO: 44640 - DNA, 377 bp, Gossypium hirsutum
  Clone ID: LIB3196-004-P1-M1-C3
atgtcttaatgatgagatcaacttcctgaaggtcctctatgatgcggagctgtcccagatgcagacccacgtcagcgacatgtccgtggtcctctccatggacaacaaccgcaacctggacctggacagcattattgctgaggtccgtgcccagtacgaggagattgcccagaggagcaagggtgaagccgaggccctgtaccagacccaaggtccagcagctccagatctcagctgaccaacatggtgacaacctgaagaacaccaagagtgaaatcgcagagctcaacaggatgatccagaggctgcgggcagagatcgagaacatcaagaagcagtgccagactcttcaggcatccgtggctgatgcagagcac

SEQ ID NO: 44641 - DNA, 369 bp, Gossypium hirsutum
  unsure (1)..(369): unsure at all n locations; Clone ID: LIB3196-004-P1-M1-C5
atcaaagaccctggggccaccaggccaggagtgtggaggtggctcccagaggggcctgcccccaagccctccccgctgcactgcctggagagcgccctgagggggatcttgcctttacggcccttgcgctttacctgcgtggcatgccccagccccagccccggctccagctcgagcttcagcggctctgaaggagaagacccgaggccagagcccgagctctggaggccgctcctccaggagagggaccgccttcccaactgtnagcctcctgtccctctgtccccatgtcctggtgggacccctgctggaagcagtggcagcagccctggtgaagaccccaggagaacagagcccaggtactgcagc

SEQ ID NO: 44642 - DNA, 403 bp, Gossypium hirsutum
  unsure (1)..(403): unsure at all n locations; Clone ID: LIB3196-004-P1-M1-C6
aaaaagcannnnnnnttgaattcccgggatcccaggcagcagttagcccgccgcccgcctgtgtgtccccagagccatggagagagccagtctgatccagaaggccaagctggcagagcaggccgaacgttatgaggacatggcagccttcatgaagggcgccgtggagaaaggtgaggagctcttctgcgaagagcgaaacctgctctcagtagcctacaagaatgtggtgggcggccagagggctgcctggagggtcctgtccagtattgagcagaaaagcaacgaggagggctcggaggagaagggccccgaggtgcgtgagtaccgggagaaggtggagactgagctccggggcgtgtgcgacaccgtgctgggcctgctggacagccatctcatcaag

SEQ ID NO: 44643 - DNA, 97 bp, Gossypium hirsutum
  Clone ID: LIB3196-004-P1-M1-C7
ggaacttttgcgacgttacgatacgtttgagattgaagttgggacatcgacgttgggggccgccattaccataaagtcgttaaataaaacaggcttt

SEQ ID NO: 44644 - DNA, 349 bp, Gossypium hirsutum
  Clone ID: LIB3196-004-P1-M1-C8
aattgagggaaagaaagatttaaaaaggatacaacaatggtgccttaaactttttatagatctgtgttttatctaacattttgcaaaaacaagaattcctgttttttcctgtttttctttttgtatcctaaagtaagtaaacgaagtcaacaaaatgggagacagcaagcttatcctttgttgcttcattgcttgcattttgttcctcggcgttaatggagaaaacccttatcgttatatcacttggaaagtcacctacggtgatatttaccctcttggagttaagcaacaggaacggtgtgcagcaaaggaggaactcatggcaggatggagtttctggcacaaactg

SEQ ID NO: 44645 - DNA, 372 bp, Gossypium hirsutum
  Clone ID: LIB3196-004-P1-M1-C9
atgtcaaccagagtctcctgactcccctcaacctgcaaatcgaccccaccatccagcgagtgcgggccgaggagcgtgaacagatcaagaccctcaacaacaagttcgcctccttcatcgacaaggtgcggttcctggagcagcagaacaaggttctggaaaccaagtggaccctgctgcaggagcagggcaccaagaccgtgaggcagaacctggagccattgttcgagcagtacatcaacaacctcaggaggcagctggacagcatcgttggggaacggggccgcctggactcggagctcagaggcatgcaagacctggtggaggacttcaagaacaaatatgaggatgaaatcaacaagcgcacagcag

SEQ ID NO: 44646 - DNA, 326 bp, Gossypium hirsutum
  unsure (1)..(326): unsure at all n locations; Clone ID: LIB3196-004-P1-M1-D1
gcgcccacgcgtccgggagaactaaggccatatcaattctctttcggcaaacacagaaaaattttggttagatcaacgatgcaacaaggagattacagatcctattataaatatgcttactttataaagctcaactccaaccccaagcctaaccctaaccgcaaccggaattcagtgccgtcctgatttcaccaagcaccttacgcatctgcaccaccttttagctccaggtatgcctcctgtgantgctccggtgatcccccaaattaccctccgtgttcccaaaatcttgatgctgaccctcccactgcttccgcttatactcc

SEQ ID NO: 44647 - DNA, 301 bp, Gossypium hirsutum
  Clone ID: LIB3196-004-P1-M1-D10
aattttcttggttttttttcaatccaaatcctatctgttaaccgtcagttaacccctatggttggtcccaagcaaccagcagggaaatcaacgggggttaaggttcacgttaggaacttgcttccaaggccgcttggtagtccgcttcggcaaccggaggagtgaagaagcctcatcgttttaggcccggaactgttgctctgagagaaatcaagaagttccagaagagcaccgagcttttgatcaggaaacttccattccaaaggttggtgagagaaatagctcaagatttcaagactga

SEQ ID NO: 44648 - DNA, 362 bp, Gossypium hirsutum
  Clone ID: LIB3196-004-P1-M1-D12
gcctgagtgaaagttctttgaaaataacgaattgtttcaattcggtaattttgtgaattagtgtttaatttaagtataaggactaattgcataagtgattaatatgaattgatattagttataagatgaaacttgattaggggatttattaaataaataaattgtaacaccccttacctgaatccgacatcgggacagggttcgaggcattatagggctaaaacattaacattcacagaaaaccagccaataatttcgttaaaatttaaaacttttcaatttcatgcaaattacaagggcctacgaggcccaaaacatacattgaaggtggttcaggactaatcgaggactttgaaaacttt

SEQ ID NO: 44649 - DNA, 379 bp, Gossypium hirsutum
  unsure (1)..(379): unsure at all n locations; Clone ID: LIB3196-004-P1-M1-D2
acaagnnngacaaaaaagcaggctgnnnaatgccgcggtttcccgggttcgccccacccgtgcattccaaacacacttgttcggggactgaaaggtcaaataaatgaaacccatcgacctatgtcgctactaggaacattccgcccttaacgagtgtgatcaaaccctgtgttactggcggtatgtgggattatnactaaattgtgtnagcgctaagtgttagtgtgtttaatgtgattgaccgatttatgcgctcttagactaaactgaatgatactcntttagaatgagatttatttgaatttgttgngaacaacagaccaaggaattggatttagatccactaaaatagaaagttgttggttagtcnatcatttag

SEQ ID NO: 44650 - DNA, 378 bp, Gossypium hirsutum
  Clone ID: LIB3196-004-P1-M1-D3
ataccgacgacaccttctgcgaggcctgcaagtccaccgtgggtgttgacttcaaaatcaaaactgtagagctaagaggaaagaaaattagattacagatctgggatacagcaggtcaggagagattcaacagcattacctcagcttattacagaagtgccaaggggatcatattagtttatgatatcactaagaaggagacgtttgatgatttgccaaaatggatgaagatgattgataagtatgcttcagaagatgcagagcttctcttagttggaaataagctggactgtgaaacggacagagaaatcaccaggcagcagggggaaaagtttgcacagcaaataactgggatgcggttctgtgaagcaagtgcaa

SEQ ID NO: 44651 - DNA, 291 bp, Gossypium hirsutum
  unsure (1)..(291): unsure at all n locations; Clone ID: LIB3196-004-P1-M1-D5
tcggccacgcgtncgaaaaaagaaaacagagggcctttaccctctcttcctctccctggttattttgggtaggggtcttagaaccttcatcgccgctttaccgcagcgccacgacaggcggtggttggggtgtaaaccgggctttcaagcccctgtttaaggcgaactcaacagcgaaaacttgcttaaccaaagaagatccaaagaaggaaccccctacgacctctttgggtcgaatccgacgaccgaagagcgatctccgacgacggtcacttcgattcgggtcatggg

SEQ ID NO: 44652 - DNA, 355 bp, Gossypium hirsutum
  unsure (1)..(355): unsure at all n locations; Clone ID: LIB3196-004-P1-M1-D6
taagagtcctatactcttaactcttatcctttttgcggctagggttcttctttctacagtacctcttctaactttttttttttaatttattagaagattggtttggtttcataatataaaaatctaatggaagttttgtaagagtaagggattttgtggttattataaaagaaagattctaaggggtttggaagtggttagtgtggattgttcattaaaaaaaaagaaatggctggtttgaacccttttgatttgttgggggatgacgacactggggaactatcattgctgatcgctgctcagcaaaaggccctcncancnnccactgccactgctgctgctccaaagaagggcc

SEQ ID NO: 44653 - DNA, 327 bp, Gossypium hirsutum
  unsure (1)..(327): unsure at all n locations; Clone ID: LIB3196-004-P1-M1-D7
gtcaaccagagcttcctgactcccctcagccggcaaatcgaccccaccatccatcgagtgcgggccgaggagcgtgaacagatcaagaccctcaacaacaagttcgcctccttcattgtcatggttcggttcatggatctgtataacaaggttttggtgactatgtggaccttgttgtgtttgcanttcaccattaccgtgaagcagaacctggagccattgttcgngctttacttcaacatccttaggaggcaatttgacagcatcgttggggaacggggccgtctggactcggagcttaaaagcatgcangacctggtggaggac

SEQ ID NO: 44654 - DNA, 375 bp, Gossypium hirsutum
  unsure (1)..(375): unsure at all n locations; Clone ID: LIB3196-004-P1-M1-E1
atcttggatgaaactggcgaagaaagggaaaggggagtaaccatggatgttggtatgacaaagtttgaaaccacaaccaaagttattacattaatggatgcaccaggccataaggacttcattgcaaatatgattacaggagcagtccaggcggatgtagctgttttagttgtagatgccagcaggggagagtttgaagctggatttgagactggaggacaaacacgagagcatggactcttggtccgttctctgggagtgacncancttgctgttgcagttaataaaatggatcaggttaattggcaacaagaaagatttcaagagattactggaaaactnnggcactttcttaagcaagcaggttttaaggag

SEQ ID NO: 44655 - DNA, 85 bp, Gossypium hirsutum
  unsure (1)..(85): unsure at all n locations; Clone ID: LIB3196-004-P1-M1-E10
gtttgaaaataactaatcctttcaatccggtnattttgtgaattagtgtttaatttaaggctgaggactactcgcatatgtgatt

SEQ ID NO: 44656 - DNA, 360 bp, Gossypium hirsutum
  Clone ID: LIB3196-004-P1-M1-E11
ggaacagtaccaagtaccatgattttacaacttgaataaattgaataactagaataacaaattggtataaatacctctcgtatcttagccaagttcgaaaatgaacaaattggtccctgaattaaaaaaaaatcaaaattatcttcaaaaattcaactaaatttttttctaaattttataaaaaaaattataaagataacttttatgaaaaaaatataaaaatcacaaaaataatatatataattctaaaaaattatataaaaatgttaattataaattttataagaaaacacaaaatataaatatgaggtcttaaatgagtaaatggccaaatcaagttcaacatactaaattattttt

SEQ ID NO: 44657 - DNA, 363 bp, Gossypium hirsutum
  Clone ID: LIB3196-004-P1-M1-E12
cggacgcgtgggcagagaatgaagcttgcaaaggagctggaattgcagaggatgcagtttttcatgaagacacagctggagatttcacagttgaagcatggtagaagaagtggtggaattgggaaatctagtgatcaccacactaaaattaataatagcaacaataataacgacaacaataacattagtggtaatagtaactaaaattctgtaggtttgtaattggattaggttttagatttaatgtgtcttcttggggcaaatgccctggatttgttgtatttgaactggtagttcttgagtgtattttcatgctttatctgttgtactctttttttttttctggccaacagttcattattg

SEQ ID NO: 44658 - DNA, 417 bp, Gossypium hirsutum
  unsure (1)..(417): unsure at all n locations; Clone ID: LIB3196-004-P1-M1-E2
gctggnncncctgcnnnnntccggcaattcccgggatggaagaggtcctgttactacagctataattcaaagaggaactttaagaaaaggctgtgttctggttgctggaaattgttgggcaaaagtacgcttaatgtttgatgaaaatggaaaaacaatccatgaggcccatcccagcatgccagtgggaattacaggctggagagaccttccttctgcaggagaagaaattcttgaagtagaatctgagccaagggcacgtgaagttgttgactggaggaagtatgaacaagaacaggagaaaggtaaagaggatgtgaaaataatagaagaaaagcgaaaggaacaccaagaagcatatcagaaagcccgngagaagtatagcaatgtgcagtggaagaagagatcactctacag

SEQ ID NO: 44659 - DNA, 367 bp, Gossypium hirsutum
  Clone ID: LIB3196-004-P1-M1-E3
cccacgcgtccgtgtctactcagattttgtctattacatagaggtgacagttatacacctataaggctataacatcatgttgttatagagagatagttattgtaaacttaccatatcatttatgtcgtgaatttccatccaatacaaaaaaatgaaaattatgtttaaaaaaaagaaagagaaagtgataatcaaatcaacaaaattaaaagacgtataacaagcacatttattattgcttttatacatttttttttattctacattctttcacatgattaattataaagttcataaatttaacaagttcaattaattaatataagttatcaaattaaattaattaattaattaattatcataagtt

SEQ ID NO: 44660 - DNA, 387 bp, Gossypium hirsutum
  Clone ID: LIB3196-004-P1-M1-E4
aattcccgggatgggccgcccggctccggcaccaggagctgttccggctgcgcgggatcaaggcccaggtggccctgaggctggcggagctggcgcggcggcggaggcagcggcaggcgcggcgggaggctgaggctgacaagccccgaaggctggggcggctcaagtaccaggcacccgacattgacgtgcagctgagctcggagctgacagactcgctcaggaccctgaaggtgctcatcgctggcgccgcagagccctgtgcccaatgatgacaccatccttgctccccgtgccccccaggggctatgggcgacaccaatgctgcccctgggctgggccagtggggccaatgcccaggggctgaaggcacatggtgctgggggg

SEQ ID NO: 44661 - DNA, 377 bp, Gossypium hirsutum
  Clone ID: LIB3196-004-P1-M1-E9
atgaattttagagtaccattttctttcaggctgccatattatccctgtttccatttgccatggataattggagggtcatagtatagaagcaagagttaataacagaacttgcataagtgtgttaaagttcgtgggggaggggtggcaaataccatattttaagttatgcaattgccattttaagaaagtcaattctattcacttgttaactagaaacattgcctagattgagtttattgaagcaaaaagaaaaggcaatgagagagaacttttatcttccttcctgtcaccttctatatagttgattatgacttctgccagacttagaggaacaactttagttcatttcaacacttttttttgtttttataagagca

SEQ ID NO: 44662 - DNA, 375 bp, Gossypium hirsutum
  Clone ID: LIB3196-004-P1-M1-F1
atcaagattctcacggccacagtggacaatgccaacgtccttctgcagattgacaatgcccgtctggccgcggatgacttccgcaccaagtatgagacagagctgaacctgcgcatgagtgtggaggccgacatcaatggcctgcgcagggtgctggatgaactgaccctggccagagctgacctggagatgcagattgagagcctgaaggaggagctggcctacctgaaaaagaaccacgaggaggagatgaatgccctgagaggccaggtgggtggagatgtcaacgtggagatggacgctgcacctggcgtggacctgagccgcattctgaacgagatgcgtgaccagtatgagaagatggcagagaagaac

SEQ ID NO: 44663 - DNA, 362 bp, Gossypium hirsutum
  Clone ID: LIB3196-004-P1-M1-F10
cttgtattacccttaatattaacccttaacccattattgctgaaatcccctaaattaatttgatccctatttttgttgagaatctgagttggaataattgcttagctatgttttattatattttgtatctagttaacttgttcttaaaaaaaacactatgtaagtctatattctgaaacgaagccctattgtacgcaaataatgattaactctttttctagttaagcaactttttaattcaatcccgattctaaccctttctttcaacttgtgaccacacccccaaaccaagcctcattactaccctctaaagaccttttgattgatgtatcatcttaaattacagtggtggaatttgattt

SEQ ID NO: 44664 - DNA, 374 bp, Gossypium hirsutum
  unsure (1)..(374): unsure at all n locations; Clone ID: LIB3196-004-P1-M1-F2
atcctcaatctcagacctacagatggtgaacatctccctgcgagtgctgtctcgacccaatgctcaggagcttcctagcatgtaccagcgcctagggctggactacgaggaacgagtgttgccgtccattgtcaacgaggtgctcaagagtgtggtggccaagttcaatgcctcacagctgatcacccagcgggcccaggtatccctgttgatccgccgggagctgacagagagggccaaggacttcagcctcatcctggatgacgtggccatcacagagctgagctttagccgagagtacacagctgctgtagaagccaaacaagtggcccancatgaggcccagcgggcccaattcttggtagaaaaagcga

SEQ ID NO: 44665 - DNA, 350 bp, Gossypium hirsutum
  unsure (1)..(350): unsure at all n locations; Clone ID: LIB3196-004-P1-M1-F3
cccacgcgtccggtgggttagtgggttttgttgtattgggcctgatggcatataagtgggccggttggtttagtgggttaggtggtgggtaaacgggcttaataggttagttgggctgagggtgtatggattttgtaaaggggttgagggtaattagggtctggggttgagcccaaaattggtctgtacatatcaattcaacccctatctccagtttggtttacaaaacactagttttaatcgacgaaataactttttcgatatctcttggttcagcaagcatatgatgaactaagcgataaattgtttaacaacnncnanttgagcaattatcgatgtcaatggaacta

SEQ ID NO: 44666 - DNA, 363 bp, Gossypium hirsutum
  Clone ID: LIB3196-004-P1-M1-F5
gttaaatgtatcattagagccattgtgggaagaattgagtaattgtattggcatgactgaggcacagctggctcagagctcactctgtccaactgtatctaatataaatgttggggagcatcttcaaggagcatcctcgtcatcaccacttcctcctgggactcagagacttcttcctttcattgaggccttcttcgttttgtgtgaaaagctacatgccaatcattctatcatgcaacaagatcatgtaaatgtgactgcacaagaagtaaaagagtctgctgagtgttctgttaccttaccctctaaatgcggtggggattatcagaagaagcttgatggttctgtcacattcgcaggttt

SEQ ID NO: 44667 - DNA, 366 bp, Gossypium hirsutum
  Clone ID: LIB3196-004-P1-M1-F6
aaagacgatcactctcgaggtcgagagctctgacacgatcgacaacgtgaaagccaaaatccaagacaaggaaggcatcccgccagaccagcaacgtctcatcttcgccggaaagcaactcgaggacgggcggactttagccgattacaatatccagaaggaatcgactcttcatctggttctacgtcttcgaggtgggatgcagatcttcgtcaagactttgaccggtaagaccattactttagaagtggagagctcggatacgattgataacgtgaaagcgaagattcaggacaaagaaggaattccaccagatcagcaaaggttgatttttgctgggaaacagctggaagatggaggactttg

SEQ ID NO: 44668 - DNA, 359 bp, Gossypium hirsutum
  Clone ID: LIB3196-004-P1-M1-F7
cccacgcgtccggttttctctatcgatttgcggagtctctctctttttcttttttttcctttttctttcttgtatttctcagtgtatgaagtgacgatcttaaggttttcttttggattttacatcaatggaagccatttagataaggcgggaaaatctgaaccagaccgttctttcataaaaggggaattttttttcccattcgatcatggcggttgctgagaatgacgggtcgaaaatcgggtcatcgggtcaaaatttggtgccggttgacaccgatacggtcagcgattccggtaaaccgaaaaccaactccgattccatgactgttactaagactaccgaggaacacgagcagc

SEQ ID NO: 44669 - DNA, 272 bp, Gossypium hirsutum
  Clone ID: LIB3196-004-P1-M1-F9
atgtaaactttaagaatatgattctcccattcaaattcacagcaaacatctagccaccttcaaaacgaagatacagaccatcatttagcaatactaatacatgattttccttggggatggcgggtttgaaaattctttagcaacaggacatacttgccctaaattacagggaattatttataacgaggaaaaagttttcaggtccaacctgaagcgagggggtttaccacctacaacctttaattaattttcaagaggaaggttttggaaaa

SEQ ID NO: 44670 - DNA, 394 bp, Gossypium hirsutum
  Clone ID: LIB3196-004-P1-M1-G10
aattcccgggatctcagcacccgcagcgccgcatctctacccgattgtgcagggatgccggggggggggggtcatcaggagagaatcctgcgtcgggatgcggggttcatgaatgtttaaaagctttagtctgtggagttcctagtccatcttttttctcttaaaaatctgtggaagtcaccgcaaaaatattgaagaatttaatcaaagagcaatgcacgaattgtagaacacccacctgcggtttgtaatttgttctccatgggagggacttaagaaaatactactataaggtgcatgataaaggaaagcaaattcaataattggttagggagagctatgcagcttcttagttttagatcaaggtggaaattttctggtcacgtatcatagc

SEQ ID NO: 44671 - DNA, 266 bp, Gossypium hirsutum
  Clone ID: LIB3196-004-P1-M1-G2
gaaccatcgagaatctttgtattacggattttgatgagatccttagtggcttctctctagcttgattttatattatctcatcttaatgtgagtgcatggtattgaactttactttggtaattgctttaatttaccttatatgtcaaacaattctcacctgcatgatagctatgtgcttgagggtagctttatcaaatttattactttattctaaacctgaggaagaaaaaaattaagagcatataatgagaaaatataaaaatacc

SEQ ID NO: 44672 - DNA, 381 bp, Gossypium hirsutum
  Clone ID: LIB3196-004-P1-M1-G3
atgtttgcaagacataacaaaatctatacttactctataatcccaaatagatgcttcggcagcagtgactctccaaaaccactgaggcctagacctcctcactgctgagaaaggaggactttgcaccttcttaggggaagagtgttgtttttacactaaccagtcagggatagtatgtgatgccacccagtgtttacaggaaaaggcttctgaaatcagacaaaagctttcaaactcttataccaacctctggagttgggcgacatggcttctcccctttttaggtcccatgacagatatcttgctattactcgccttcgggacctatatttttaacctccttgtcaaatttgtctcttccagtatccaggcctaaagcta

SEQ ID NO: 44673 - DNA, 368 bp, Gossypium hirsutum
  Clone ID: LIB3196-004-P1-M1-G4
atccaggccaagcaagcttctgtctgcacctgctctcaatcctgctctcaccatgagcctccgcctgcagagctcctccgccagctatggaggtggttttgggggtagctcttgccagctgggaggaggccgcggtgtctctagctgttcaactcggtttgtctctgggggatcagctggaggctacggaggcggcgtgacctgtggctttggtggaggggctggtagtggctttggaggtggctacggaggtggccttggaggtggctttggtgggggttatgctggtggctttgttgattttggtgcttgtgatggtggcctcctcactggcaatgagaagatcaccatgcagaacctcaacgacc

SEQ ID NO: 44674 - DNA, 367 bp, Gossypium hirsutum
  Clone ID: LIB3196-004-P1-M1-G5
cggacgcgtgggccataccagcataaatcaacaatggcaaagctcgcagtttacttagccaccctggctctcattttgttccttgccaatgcttcaatcacatctgtgacggtcgaaagcgaggaaaaccgggatagctgtgaacagcagataaggaagcaagcccacctgaagcactgccagaagtacatggaggaagagtggggtggcgaaggcagcgacaatatagccggcgggtacattgactcatgttgccagcagctagagaagatggatacgcaatgcagatgtcaaggtctaagacatgcaacgatgcaacagatgcaacagatgcaagaacaaatggggagcaaacagagcgagagat

SEQ ID NO: 44675 - DNA, 373 bp, Gossypium hirsutum
  unsure (1)..(373): unsure at all n locations; Clone ID: LIB3196-004-P1-M1-G6
atgtggtgcctttgcctaagggtgccaatgtctcctgggagcctggctttgatggtggctatctgcagagattcagtgtctggtacacgccactggccaagcgtcctgaccgaatgcaccatgactgggtgtccttggcagtgcctgtgggggctgctcacctcctagtgccagggctgcagccccacacccagtaccagttcagcgtactggctcagaacaagctggggagtggtcccttcagcgaaatcgtcttgtctgctcctgaagggcttcctaccacgccagctgcacccaggcttcctccaacagagatatcccctcccctgtcccctccacggggtctggtggcagtgaggacaccccggngggt

SEQ ID NO: 44676 - DNA, 377 bp, Gossypium hirsutum
  Clone ID: LIB3196-004-P1-M1-G7
atccatggatgaagcggaccggcggctcctgcggcggtgccggctgcggctggtggaggagctgcaggtggatcagctctgggacgccctgctgagccgcgagctgttcaagccccacatgatcgaggacatccagcgggcaggctctggatctcggcgggatcaggccaggcaactgatcacagatctagagactcgagggagtcaagctcttccttcgttcatctcctgcttagtggacacaggccaggacatgttggcttcgttcctgcgaactaacaggcaagcagtaaagttgtcgaagccaaccctagaaaaccttaccccggtggtgctcagaccagagattcgcaaaccagaggttctcaaccggaaac

SEQ ID NO: 44677 - DNA, 360 bp, Gossypium hirsutum
  Clone ID: LIB3196-004-P1-M1-G8
aagaagggctgcaaaattgaatgtttgattaggtttcaggctattctgattcacattatcaatatataaaatttcttgggttatcccagatccaatccgtctattttgtttgtaaaattaaatgtcgattccacataccatggtgaggtggcaaagtctttgatatcagtctcgggatcaaaacttcgtatttgatcctggaacaatttctacctttcctttgtaaaaaggaaaatgaggagttggagcccaagtgaaaaccaggcttatccaagtcaaaacaaaaaattagccccataacaagaagttgcatggtaaacagagagacaggtgcctcaccttatccaaatcttatatttt

SEQ ID NO: 44678 - DNA, 357 bp, Gossypium hirsutum
  Clone ID: LIB3196-004-P1-M1-H11
cggacgcgtgggtgatgagatgctttcccgtggttttaaggatcagatctatgatatcttccagctgcttccagccaagattcaggttggagtgttttctgccacaatgccgccggaggccctcgagattactaggaaatttatgaataagcctgtgagaattttggtaaagcgtgatgagctaaccctggagggtatcaagcagttttatgtgaatgttgaaaaggaagagtggaagcttgaaactctgtgtgatctttacgagaccctagccattacccagagtgtcatttttgtgaataccaggcgtaaggttgactggttaactgacaagatgcgaagccgtgaccacacagt

SEQ ID NO: 44679 - DNA, 379 bp, Gossypium hirsutum
  Clone ID: LIB3196-004-P1-M1-H12
atcagagcttgctgacccccctccacgtggagattgaccctgagatccagaaagtccggacagaggagcgagaacagatcaagctcctcaacaacaagtttgcctccttcatcgacaaggtgcggttcttagagcaacagaataaggtcctggagaccaaatggaagctgctccagcagcagacgaccagcacctccagcaaaaaccttgagcccctctttgagacctacctcagtgtcctgaggaagcaactagataccttggtcaatgacaaagggcgcctgcagtctgagctgaagaccatgcaagacagcgtggaggacttcaagaccaaatatgaagaggagatcaacaaacgcacagcagctgagaatgactt

SEQ ID NO: 44680 - DNA, 356 bp, Gossypium hirsutum
  unsure (1)..(356): unsure at all n locations; Clone ID: LIB3196-004-P1-M1-H2
tgcagagctcacactggtcctcccgagaggaagaagaacaagaagaacaagaagttgaaaggagaagtggacaatacaagagagtgagagcccagttatcaaccggggacctatttatagtaccagcaggccatccagtcacattcgttgcctcccaaaacgaggacctaggattgctcgggttcggactctacaacggccaagacaacaagaggatcttcgtggctgggaaaaccaacaatgngagacaatgggatcgccaggccaaggagctggcgtttggggtggagtcaaggttggtggatgaggtattcaacaacancccggaagaatcttacttcgtgtctggacagagt

SEQ ID NO: 44681 - DNA, 358 bp, Gossypium hirsutum
  unsure (1)..(358): unsure at all n locations; Clone ID: LIB3196-004-P1-M1-H3
gataaagttatcatttacccattcttacaacttatctccaccagtctgtactcttataatcttggtagaagttagcgcgatgtgtcggatgtagtaaatggatctccatggcataccggaatgcctaatggcggcaattaatcctttccttatatcgaaaatgatgtaaatattatcgttactaataacaaaccactgcaagttcgtaaagttatcatttacgatggtaagcgctatcgggagcacgttcttgttcctaccttgaccaaccgcaacaagtaggatctgtgtatatttgtcgtatagtcaggtctcatctactngcaaaaacggcttgtaatggggacatgcgcgccgc

SEQ ID NO: 44682 - DNA, 367 bp, Gossypium hirsutum
  Clone ID: LIB3196-004-P1-M1-H4
gttgtcccaccactgtcacaaatgtggagacagtggctgtttcacccacaatactgagacgtggtcctgagtggtttgccagttttgggaggaagaataattccgggacaaaattgttttgtgtctcaggtcatgtcaacaagccttgcacagttgaggaggagatgagtataccacttaaggagttgatagagaggcactgtggaggtgtcagaggtggatgggacaatttacttgcagtaatacctggaggttcatctgttccacttttacccaagcacatatgtgatgatgtcttgatggattacgatgcactcaaggctgtccagtcaggactgggaactgctgcagtaattgtgtggataaa

SEQ ID NO: 44683 - DNA, 386 bp, Gossypium hirsutum
  unsure (1)..(386): unsure at all n locations; Clone ID: LIB3196-004-P1-M1-H5
attcccgggattgtggctccagggagggagcgagggcccggggctgggacacctgggactcggaggaggggcaggcggggactggggtgtcctgggtccgctgaggggggcgtgggaatttcagcacttgtctaggggccagcaaccctgcttgtgaggtgggaggtgtgtggttgctaatagaccaaatgaccttccaggtctcactggatctggattttctgtaattctctgatcctgcaggcaacatgagtgagaatgaggaagaggaaatntctcagcaagaaggcactggggactatgaagtcgaagagataccatttgggcttgaaccccaaagccctgggtttgagccacaaagccccgagtttgaaccccaaagcccc

SEQ ID NO: 44684 - DNA, 373 bp, Gossypium hirsutum
  Clone ID: LIB3196-004-P1-M1-H6
gttttacaagcttattaaaagccgaatgaacaaaatataattttactaatagatgaataatattaatttaccaaactcacatctgagcacttgagtgatcgactctagtaattgcttgggggatgatgaatccattaattcgacggatttaatgttggaccagatttcattgcccttcaaaacacaggcttgcttttgacccgtagcaagctctaaatcaatcacgtttcttattatcttgtgactcttacaaaaaaaaattcacgttcgtaatcgtcttgcaaaaatttacagttttctccatcacctctagggttatgttcgcacgttcttaagctatctatttattaattgctctatcaaaattacaaat

SEQ ID NO: 44685 - DNA, 330 bp, Gossypium hirsutum
  Clone ID: LIB3196-004-P1-M1-H8
atgtgtaacaatgatttacatagcatttacattatattaaatattataagtaatctagagatgatttaaagcatacagaaggatgtatgtaggttatttgcaaatcctgctctttccttggattttggaatctgcgggagattctggggatcccctactcccactgtgcatgctgagagacaactgtatttatttgggatttaagcattggggtttgttgttgtttttgagaccacttctctctatgttcccaggctcatcttgaactcctgggctcaagcagtctttctgccttggcttccaaagtgctgggagaattacagcatgagc

SEQ ID NO: 44686 - DNA, 379 bp, Gossypium hirsutum
  Clone ID: LIB3196-004-P1-M1-H9
atgaaaggagaataatagcatgtggcttgtaaacttaacaaatgtaatcacagtaattgagaagcccaggaaataatttgaccagcataattatattacaaattgcatattgcgcaattaaacaattgcattttggccacaaatggaactccaagtatacaatttgtagtgaagtggagaggtaatttaaaataagaaaagaaaagcaaaggcccagaaatacatttacatttatatccatattggagggcataaacaaagtaataaggaaaaaggtcagtgttttcaagagaaaataatacaactgactcaaacgaattttgccaaatcctttgtggatgttttaccgctatttaactttccaatgtgcataaacatt

SEQ ID NO: 44687 - DNA, 399 bp, Gossypium hirsutum
  Clone ID: LIB3196-005-P1-M1-A1
atgcggcagcggctgcagcaggcatcatggcggagctgcaggaggtgcagatcacagaggagaagccactgctgccaggacagacgcctgaggcggccaagattcactctgtggagacaccgtatggctctgtcactttcactgtctatggcacccccaaacccaaacgcccagcgatccttacctaccacgatgtgggactcaactataaatcttgcttccagccactgtttcaattcggggacatgcaggaaatcattcagaacttcgtgcgggttcatgtggatgcccctggaatggaagagggagcccctgtgttccctttgggatatcagtacccatctctggaccagcttgcagacatgatcccttgcgtgctacagtacctaaatttttcta

SEQ ID NO: 44688 - DNA, 385 bp, Gossypium hirsutum
  Clone ID: LIB3196-005-P1-M1-A10
atctctgatagctcccagcttactctctgcagccatgattgccagacagcagtgtgtccgaggcgggcctcggggcttcagctgtggctcagccatcgtaggcagtggcaagagaggtgccttcagctcagtctccgtgtctgaaggtgctggccgatgctcttctgggggctttggcagcaggagcctctacaacctcggggggaacaagagcatctccatgagtgtggctgggtcacgacaaggcgcctgctttggaggtgctggaggcttcggcactggtggctttggcggtggatttgggggctccttcagcggtaagggtggccctggcttccctgtctgccctgctgggggaattcaggaggtcactatcaaccagagc

SEQ ID NO: 44689 - DNA, 386 bp, Gossypium hirsutum
  Clone ID: LIB3196-005-P1-M1-A11
tcaaagtatccatttcacagcatttaccaatacgtccctttcatctcgagtattcctccatttgagtagaattttacccgttgaacacatcggaatataattcggatacatggaaattttgcacataagtgccacatatgtagccaagctaccatgtaacccgcccataagtgaactcagactcaactcaacgagctcgggcgttcgcatccataagttaactcggactcaactcaacgagctcggatgcctagttacatctcacgaactcggactcaactcaactcaacgagttcgaacatttgcatccataagtgaactcggactcaactcaacgagctcggatgcccaaatattccagtgacatgtcacttgtatcctaatct

SEQ ID NO: 44690 - DNA, 369 bp, Gossypium hirsutum
  Clone ID: LIB3196-005-P1-M1-A12
cggacgcgtggggtcgattgattcttcgaaaaccataaacgaaaccaaatatggcggagaaagcaatcgagtcggttcaatgctttggccggaagaagacggcggtagccgtaacacactgcaagagaggccgtggtttgatcaagatcaatggttgtcccattgagcttgtcgagcccgagatcctccgtttcaaggccgtcgagccaatccttctcctcggccgtcagcgttttgccggcgttgacatgaggatccgagtcaaaggtggaggtcacacttctcagatctacgctatccgtcaaagcatcgctaaagcccttgtcgctttttaccagaagtacgttgatgagcagagcaagaaggaga

SEQ ID NO: 44691 - DNA, 203 bp, Gossypium hirsutum
  Clone ID: LIB3196-005-P1-M1-A2
catcaaaagcagctggtccttgtgccgctcaactgtcctagtccttcgtcggtaagcgccccgccccggggcctgagctgcatgtctcaggcctgcgcctctcgaccccggctggccttgctttgagctgcggaggcctcgccgcgccttcaccgggaacaaaaagcggggtgggccgggccgggcggactggcgttgtgcgg

SEQ ID NO: 44692 - DNA, 370 bp, Gossypium hirsutum
  Clone ID: LIB3196-005-P1-M1-A3
gcgtctaactcatcttcctccaccgttgcacctcaactcttacaactgctttctgaagcgctccagccctggttgagtttagtttttaagtgaaggaacactctttgaaatggcagattgggctcctgtacttgttggggtggtgctatttgtgttgctatcaccaggacttgtgttttcatttccagggaacggcaagcaactggagtttgggagcatgaagactaatggcatggccattgctatccacactcttcttttctttgccatctatgctgacttgatcatggctgttcacctacatatctacactggctgaccacttccctgacggagagagtctacgatattgatctctatattggagatc

SEQ ID NO: 44693 - DNA, 401 bp, Gossypium hirsutum
  Clone ID: LIB3196-005-P1-M1-A4
tatacaacagactgagcaaaaggcgggctgctccggtcccgaatcgccgggatcccggcgcccctcgcgtgccaagcccagcgcaagtcagctaagctcagccgagcgagcgcggcgcgatggacgggtctttgcttgtgcagaacgcactcctgttccgcacggtatacccccatgtgcgttgctggttgaacgcaggtctttttacatcgacgattgatggcgataccgaccggctcccggagttcatcgtgcagacgggctcctacatgttcgtggacgagaacacgttctccaacgacgccctgaaggtgacgttcctcatcacccgcctcacggggcccgccctgcagtgggtgatcccctacatcaagaaggacagtcccctcctcagtgactac

SEQ ID NO: 44694 - DNA, 401 bp, Gossypium hirsutum
  Clone ID: LIB3196-005-P1-M1-A5
atctctgatagctaccagcttaatgtacccagcattcagcgagacacacagcgcaccgacagaggggacatgggcagagcaatggtggtcagacttgggctggggctgctgctgatggcactgctgctacccacgcagatttattccactgtaacgactcttgcaccactttcaagtaactcctcccagaatacttcgactaccccaaatgcagctaataccaccaccaaggccgttggtggtgccctgcagtcaacagccagtctcttcgtggtctcactctctcttctacatctctactgttaagagactcaggccaagaaacatcttctaaacttccccatcttctaaacccaatccaaatggcgtcttggcaaggaaaaacaggtcttcattgaatc

SEQ ID NO: 44695 - DNA, 396 bp, Gossypium hirsutum
  Clone ID: LIB3196-005-P1-M1-A6
atcgaatagactcatacggggctcaggcctctctgcggggctgactctgcacttcaccatggctttcattgccaagtccttctatgacctcagtgccatcagcctggatggggagaaggtagatttcaatacgttccggggcagggccgtgctgattgaaaatgtggcttcactctgaggcacaaccactcgggacttcacccagctcaacgagctgcaatgccgctttcccaggcgcctggtggtccttggcttcccttgcaaccaatttggacatcatgagaactgtcagaatgaggagatcctgaacagtctcaagtatgtgcgtcctgggggtggataccagtctactatcacccttgtccaaaaatgtgaggtgaatgggcagaatgagca

SEQ ID NO: 44696 - DNA, 391 bp, Gossypium hirsutum
  Clone ID: LIB3196-005-P1-M1-A8
tgaaggaggagcagcagcgtgacggagaagatcctcagaggagataccaggattgccgacaacactgccaacaggaagaaagaaggctgcgtccacattgcgaacaaagctgcagggaacaatacgagaaacagcagcagcagcagcctgacaagcaattcaaggagtgtcaacagcgttgccaatggcaagagcaaaggcccgaacggaagcaacaatgtgtgaaggaatgcagggaacagtaccaagaggatccatggaagggagagagagaaaacaagtggagagaagaagaagaagaggaaagtgacgaaggagagcaacaacaaaggaacaacccttactacttgcatcgcagatcgttccaagaacgattcaaggaagaacatgg

SEQ ID NO: 44697 - DNA, 303 bp, Gossypium hirsutum
  Clone ID: LIB3196-005-P1-M1-A9
aggacgcgtggggccagctttggtagagaaagcgagttctgagtctggtttcttagaacgccaccttccacatcaaccagttgaagtgggtgaattcaggatcccgagattcaagatctcatttggacttaaagcttctgaggttctgaaaagattaggacttgtgttacctttctctggtgaaggaggtttgacagagatggtggattcgcctcaaggtcgggacctatttgtttcaaacatattccataagtgttttatcgaagttaatgaagaagggactgtagctggtgctgctacttc

SEQ ID NO: 44698 - DNA, 405 bp, Gossypium hirsutum
  Clone ID: LIB3196-005-P1-M1-B1
atgcggtgttgtgctgtggggaagggagacggatttgtaaatcccggagcgaggttctgcctacccgaggccgctgctgtgcggagacccccgggtgaagccaccgtcatcatgtctgaccaggaggcaaaaccttcaactgaggacttgggggataagaaggaaggtgaatatattaaactcaaagtcattggacaggatagcagtgagattcacttcaaagtgaaaatgacaacacatctcaagaaactcaaagaatcatactgtcaaagacagggcgttccaatgaattcactcaggtttctctttgagggtcagagaattgctgataatcatactccaaaagaactgggaatggaggaagaagatgtgattgaagtttatcaggaacaaacggggggtcat

SEQ ID NO: 44699 - DNA, 386 bp, Gossypium hirsutum
  Clone ID: LIB3196-005-P1-M1-B10
gtggatttttgtctcattgcgggtggaattcaagtctggagagtatcgtcaacggtgttccgatgatcgtgtggccattatacgccgaacaaaagatgaatgctacggtactagctgagcacattggggtggcaaccagatcgaagttattagcgccaaagggtgtggttgggagagatgcgatagcggcaatgatccaaaagattatggtcgataaagaaggtgaagcaattagagccaaagtgaaaatgctaaaatcatgcgctgtaaaggctgttagcaatggcggctcctcttataatgctctggctatagtcgccgaagagtgcaagattggaatgcaacgccggaatgcaaaaacaggctgatcttcatctctagtttga

SEQ ID NO: 44700 - DNA, 453 bp, Gossypium hirsutum
  Clone ID: LIB3196-005-P1-M1-B11
cactatataacaagagggaacgaagaagcacgctgatgccccgccgcaatatccccgatgcgtacccaaacgcttgcgggatgggttcttcgcgacgggactgaccgaacacttgttacatgcatgatgactgcatcattgcattgggtccctagagcccgctcgcgaagccacaggtggccaaggactcataggaagaagaaccaagacaagacgcaccccatacccaagtccgccatggagctcctgattgagaaactaaaccagatgaggaagaaggcttagcgcctacatcaaactaccgtgaggctgaacaagctccacgctgatctgaagatacatgctagggatgaacatcgccgcaagaaactaaagatcgacactggcacaaagattgggagaaggaagcaagactcatacgcaaccttaaaggcatcttggccaaaaatggac

SEQ ID NO: 44701 - DNA, 349 bp, Gossypium hirsutum
  Clone ID: LIB3196-005-P1-M1-B12
cttaaaccaagtaagaagactgttgatctagttggtaatgagaagatgaaggctagtaccaatgttaggcatattgttttgccctgttctaaatctgcaaggtcacagttgatcccagatattatacgttgttatagcagtggtggacgaactattatatttactgagacaaaagattctgcctctgagcttgctggcttattgcctggatcccgggctttgcatggtgacatacagcaggcccaacgtgaggtcactcttaatgggttccgctcagggaagttcatgacattagtggctaccaatgtggcagctaggggattagatatcaatgatgtgcagttaatca

SEQ ID NO: 44702 - DNA, 402 bp, Gossypium hirsutum
  unsure (1)..(402): unsure at all n locations; Clone ID: LIB3196-005-P1-M1-B2
atccggcctcgctatgtctgccattttcaactttcagagtctattgactgtaatcttgctgcttatatgtacttgtgcttatattcgatccttggcacccagcctcctggacagaaataaaacgggattgttgggtatattttggaaatgtgccagaattggtgaacggaagagtccttatgtagcagtatgctgtatagtaatggccttcagcatcctcttcatacagtagctggggaaaatgccagaatttaattgccgtcagatttcattgtgaacaaggacttactgcagaaaataatggaaaggatggttaacccttttatctctgaacattgaatgagataaatttccagatgctgntctctatttttatgttattggaccaatgttctgtataat

SEQ ID NO: 44703 - DNA, 390 bp, Gossypium hirsutum
  unsure (1)..(390): unsure at all n locations; Clone ID: LIB3196-005-P1-M1-B3
gcgtccacgcgtccggatcgaagcattaagctctggaacacccttggagagtgcaaatacacgatccaagatggtgatgctcataccgattgggtcagctgtgttcgtttcagcccaaatactcttcagcctaccattgtttcagcttcttgggataagaccgtgaaggtttggaacttgactaactgtaagattcgcaacacactggccggtcactccggttatgtgaacactgttgcggtttcacctgatggttcattgtgtgctagtggcggaaaagatggtgttattttgttgtgggatttggctgaaggaaagaagctntacagacttgatgctggttctgttattcattcgctatgctttagccccaacaggtactggctttgt

SEQ ID NO: 44704 - DNA, 408 bp, Gossypium hirsutum
  Clone ID: LIB3196-005-P1-M1-B4
atgcggatgacttccgcaccaagtatgagacagagctgaacctgcgcatgagtgtggaggccgacatcaatggcctgcgcagggtgctggatgaactgaccctggccagagctgacctggagatgcagattgagagcctgaaggaggagctggcctacctgaaaaagaaccacgaggaggagatgaatgccctgagaggccaggtgggtggagatgtcaacgtggagatggacgctgcacctggcgtggacctgagccgcattctgaacgagatgcgtgaccagtatgagaagatggcagagaagaaccgcaaggatgccgaggaatggttcttcaccaagacagaggagctgaaccgcgaggtggccaccaacagcgagctggtgcaaagtggcataagcgagatct

SEQ ID NO: 44705 - DNA, 366 bp, Gossypium hirsutum
  Clone ID: LIB3196-005-P1-M1-B5
gttggaggcaccattttcgaccgatttggccgtcgtcatacggcggctgagcttcttgcttctgctaacccgaaaatgcttactgttttagtgtatgccactgtccaaaaagtcttattcgataaatcagcagggaagaggccaaagtcaatgggagtgatgttcaaagatgaaaatgggaaccaacatcaggcatttttgactaataatcgaaggagtgaagtgattttatcatgtggtgcaattgggactcctcaattgctaatgcttagtggcattggacccaaagctgaactccagaggttgaacatttccatggtgttgcataatgagtttgttggaaagggcatggctgataacccgatg

SEQ ID NO: 44706 - DNA, 354 bp, Gossypium hirsutum
  Clone ID: LIB3196-005-P1-M1-B6
gccaaccaagacaacagggaaaagctaaccatagcagtgctccaccgccctgtcaataaccctggacaattccagaaattcttcccttctggacaggaaaatcctcagtcatatttacgaatcttcagccgtgaaattcttgaggctgtcttcaatacacgaagtgagcagctagacgagctgtttggtgggaggcaaagccatcgaaggcagcagggacagggaatgttccgtaaagccagccaagaacaaataagggcattgagccaagaagctacttcaccaaggggaaaaggtagcgagggatacgccttcaacttattgagccaaacccctcgctactgcaaccaaaac

SEQ ID NO: 44707 - DNA, 401 bp, Gossypium hirsutum
  Clone ID: LIB3196-005-P1-M1-B7
atcacaggtgtcgtgaaaactacccctaaaagccaaaatgggaaaggaaaagactcatatcaacattgtcgtcattggacacgtagattcgggcaagtccaccactactggccatctgatctacaaatgcggtggcatcgacaaaagaaccattgaaaaatttgagaaggaggctgctgagatgggaaagggctccttcaagtatgcctgggtcttggataaactgaaagctgagcgggaacgtggtatcaccattgatatctccttgaggaaatttgagaccagcaagtattatgtgactatcattgatgccccaggacacagagacttcatcaaaaacatgattacagggacatctcaggctgactgtgctggcctgattggtgctgctggtgttggtg

SEQ ID NO: 44708 - DNA, 341 bp, Gossypium hirsutum
  Clone ID: LIB3196-005-P1-M1-B8
cggacgcgtgggcaaagagtcatacaatgtagctcctggagttgtagtaagaattccagcaggaagcactgtgtacttggccaaccaagacaacagggaaaagctaaccatagcagtgctccaccgccctgtcaataaccctggacaattccagaaattcttcccttctggacaggaaaatcctcagtcatatttacgaatcttcagccgtgaaattcttgaggctgtcttcaatacacgaagtgagcagctagacgagctgtttggtgggaggcaaagccatcgaaggcagcagggacagggaatgttccgtaaagccagccaaagacaaataagggcat

SEQ ID NO: 44709 - DNA, 392 bp, Gossypium hirsutum
  Clone ID: LIB3196-005-P1-M1-B9
atctcacctgcagcctctcacgctctcctcagctgtgtgatctcctggaaccatggccagcacatccaccaccatcaggagccacagcagcagccgcaggggcttcagtgccggctcagccaggctccctggggtcagccgctctggcttcagcagcgtctccgtgtcccgctccaggggcagtggtggcctgggtggcgcatgtggaggagctggctttggcagccgcagcctgtatggcctggggggctccaagaggatctccattggagggggcagctgtgccatcggtggcggctatggcagcagagccggaggcagctatggctttggtggcgccgggagtggatttggtttcggtggtggagccggcattggctttggtctgggtg

SEQ ID NO: 44710 - DNA, 291 bp, Gossypium hirsutum
  Clone ID: LIB3196-005-P1-M1-C1
gcaccagctccaaacaatgtgaacgccgccatgaatgtaatagccaatttgcagcagcaaaatcagaggattttgtttgatgtcgcaaattctcgcttggggatatctcgtgaagcttgtaactaggcttatttcttgtcgtttaggctaagtttctggttttatttaactaaaaaaagaagaagatggtgtagtaagttcaataaacacaggacaagaaaaaccctgttgcattggttattttaagttttcaatgaaatatcaaagggatggaagaaacctctgaagttt

SEQ ID NO: 44711 - DNA, 343 bp, Gossypium hirsutum
  Clone ID: LIB3196-005-P1-M1-C10
attgaaaccccacgatccagccactgtggacgaggtcctgcgtctgctggatgaagaccacacagggactgtggaattcaaggaattcctggtcttggtgtttaaagtcgcccaggcctgtttcaagacactgagcgagagtcctgagggagcctgcagctctcaagggtctggaagcctccattctggggcctggcaggagctgagtgaaggacagagaagtggcactgaagtgggaagggcagggaaagggcagcattatgaggggagcagccatggacagagcaagcagccttccagagggcagagcaagcctggggctcagacccagggtcaggccact

SEQ ID NO: 44712 - DNA, 286 bp, Gossypium hirsutum
  Clone ID: LIB3196-005-P1-M1-C11
atgcgtgattcaagccaggatggaggagggagaactggcatgcagttccaaagtagagctgataggacttgcacagtgtctaggatcttatccagtgaatgcccagagcttgggtctggaggatgagaatggggccagaagcgggtttaatctgccaagggttggggatgtcatttgctcctggagctcccaagggacttggggaagtttgatcccaacccctttctttccttcccaggggctgccgggaggctatcaaaaggatcgcctacgagtttatagagat

SEQ ID NO: 44713 - DNA, 388 bp, Gossypium hirsutum
  Clone ID: LIB3196-005-P1-M1-C12
ctaggccagcaccagaggcagctccaaaatggttcagcggctcacttaccgcacgcgtcacagctacgccaccaagtccaaccagcaccgcgtcgtcaaaaccccaggagggaagcttgtttatcaaacgacaaagaaaagagctagtggacctaaatgtcctgttaccggcaagaggattcaaggaattcctcatttgaggcctgctgagtataaaaggtctaggttgcctagaaaccgtaggactgtgaaccgtgcttatggtggagttctatctggaagtgctgttcgagataagatcataagggccttcttggtggaagagcaaaagattgtgaagaaggtactgaagattcagaagacaaaggaaaagcaatcatccaagtga

SEQ ID NO: 44714 - DNA, 358 bp, Gossypium hirsutum
  Clone ID: LIB3196-005-P1-M1-C2
cggacgcgtgggctttagatgaagggtggcaagaagccaattcgaaaggtcggtcaggaaatgccactggaaagaagtatggaaggaagaaaccagtttttgcaaagctaaaggtgaatggttgtgaatattcaaatggtagagagagtgggagtaggcgagacattatctcaccagcaggaaaaactgccccgaagaacattatacgggaaatgcaaacagtaaagtaatccaagtcttccagcttgaatcctagagggacttcaattggtttacctgcttctgtttccagaggttcctccccttcagcaaatcttagtgccattgcttcaaaatcactttcttacaaagaagtagc

SEQ ID NO: 44715 - DNA, 382 bp, Gossypium hirsutum
  Clone ID: LIB3196-005-P1-M1-C3
cccacgcgtccgctcaaaaccctaatttctctgctttcccttttgcttaatcaatcgatccttgtcaatggccaacagtaatctccctcgaagaatcatcaaggaaactcagcgtctcctcagtgaacctgcacctggaattagtgcttcaccatcagaggataacatgcgatatttcaatgtgatgatccttggtccaacacagtcaccatatgaaggtggggttttcaagttggaactatttttgcctgaagaatatcccatggctgctcccaaggttcgatttcttacaaagatatatcatcctaacattgacaagcttggaagaatatgccttgatattctcaaagacaaatggagtccagctctccagatacgaact

SEQ ID NO: 44716 - DNA, 397 bp, Gossypium hirsutum
  Clone ID: LIB3196-005-P1-M1-C4
ataaataacctgcgtgtgaatgttgaaaatcaaatcaagataaagatatacatcaatcaagtctgtgaggatgtcttctctggtcctctgaactctgctgtgcagctggccggactgagattgttgacaaacatgactgttaccaatgaccaccagcacatgcttcacaattacattacagacctgttccaggtattacttactggaaatggaaacacgaaggtgcaagttttgaaactgcttttgaatttgtctgaaaatccagccatgacagaaggacttcttcatgcccaagtggattcatcattcctttccctttatgacagccacgtagcaaaggagattcttcttcgagtacttacactatttcagaatataaataactgcctcaaaatag

SEQ ID NO: 44717 - DNA, 391 bp, Gossypium hirsutum
  Clone ID: LIB3196-005-P1-M1-C5
tgaagacactgagaatcttgctcatgaccgagtgccaactgagctaaagaaagccatcatgcaagctcgaatggataagaaacttacccaggctcaacttgctcagatgatcaatgagaagcctcagattatacaggagtatgaatccggaaaagccatccctaaccaacaaataattggtaaactggagagggctcttggtgcgaagctgcgagggaagaagtgagtgagtaagagtctcgtagaaagaacaaacagaacttgaatatcgcccagaatcttgagtcctaaaacttggtgatgtaaatgaatgttttatgccgttatgggtcgcttgtaagaacactgtttttgactttgtgtgatgacttatgtctgcgactgcttatga

SEQ ID NO: 44718 - DNA, 405 bp, Gossypium hirsutum
  Clone ID: LIB3196-005-P1-M1-C6
atggtacttgataaataatcatagtcttaaatgttagaaatcctatataatattatttatttaaaattgcagatttttagtttaaaatacatttttatttttaaattttgtcttttcccttttttttcagatcaacaacccctccccgtcgtaaacgctgaggaatgatgtggcaagaatgccatgatgttgtttaaaaaaattccatgagttttaagggcttgtctcattatagaggcacattgtggctgttttatgtgaagaaccagctcagttggatactacagattaaaccaggggttttcaatgaatacagaaccatgtggttcaaatcctacaggatgaccttttcctgtctgaacagaataaagagtttcaggtaccgttgggcgagactgtacagta

SEQ ID NO: 44719 - DNA, 372 bp, Gossypium hirsutum
  Clone ID: LIB3196-005-P1-M1-C7
gctctgaactctatgagggtggaaacatccggccaaggtccggtcaccagaccactgtagtggccgtcggtcgtcgatgacggcgctgccatccacgcccattttttatcccttttcagatggatttgaggatcaagccctcctagcccaaaaatgttttaaaaaaactttgtcctctacttagaacgattgtaacatcggggaggagctcttacgacaacgagaaggccaaacgactccggggagtctatatctttctttacctttgtcgcatatgtatataaatataaaatatgcgtgaaaaaaataaatgcaaaataaacaagaacttaaaacataagtcgacaactttgaagcttttttttctctgca

SEQ ID NO: 44720 - DNA, 383 bp, Gossypium hirsutum
  Clone ID: LIB3196-005-P1-M1-C8
gatcctttctcttttttttcactaaattgacgttaacccaatcttcccaacacaatcaggccatcgaattctctggtgtttgaattgaatatctcatatatggcttacatccctccacacaagcgacattcgaaggatgcggagagtccaacgccaacgccaacaccaactccagagtcctttattcccaaatttaaaagaaatgtacagttaagagcttcaaacaccaaagctgataggagtggaagaatcgtatattcaaactatgccatctctagatggtttgctgttggtttggatgatggaaatggggacacatcttccgttcatcttaagccagtttcagttgaatctattgagaggaaaacaggtgagaaacctgc

SEQ ID NO: 44721 - DNA, 327 bp, Gossypium hirsutum
  Clone ID: LIB3196-005-P1-M1-C9
atctacattgcctggaggaagcctaacgaagtcaggcatccagctgcccacactgagcccaagattcttcccaggaacacaaacgtaggagacatatgctcctggaagcaccagcctttatctcttcaccttcaagtaccctttctcaagaatcctctgttcttcgccctctaaagacttggtacatctaggacccaggcatcttgctttccagccacaaagagacagatgaagatgcagaaaggaaatgttctccttacattttgtctactattgcatttagaagccgcaataaataccattgggactcgcatctatgacaacact

SEQ ID NO: 44722 - DNA, 366 bp, Gossypium hirsutum
  Clone ID: LIB3196-005-P1-M1-D1
aatttggaaaaacgcaagcgcaaacagggatcgcattaggttatcttcttcttctttttttctttttctttttgcaattccttcaactgaaaggggaaaataaccctaattttgtctctggattggtctcccaagtgaggaaagggagaaaaagaaagaaactttgaagaataaaaatggtgttttacttcaaagcccgaccagaggttggcgattacacaattttcatgggtctcgacaagtacgagaacgaggaactcattaaatacggctttcccgaagacatttggttccatgttgataaaatgtcttctgctcatgtttatgtaagacttcataaaggtcaaaccattgatgatataagcg

SEQ ID NO: 44723 - DNA, 382 bp, Gossypium hirsutum
  Clone ID: LIB3196-005-P1-M1-D12
cccacgcgtccgtttggcagttttactacaatattgagtggcttgaccacaatgttattggatggcttggccacaacgttattgagtggcttgaccacaatgctattgagtagcttggccacaacgttattgagtgacttatccacaacgtgcaacttgattgcaatattgagtggcttggtcacaacatggtgtgttattggatggacgagttctagggaactctataattgtgtgtagcgaagattggtaggaattgttttgtaaaaattgcactaatttctgaaaaagctgcatcaacattctcatgcaccttgctatatgtgatattatgttgaaatataagtgtttccatatatataaaatatatggcttaaatatt

SEQ ID NO: 44724 - DNA, 384 bp, Gossypium hirsutum
  Clone ID: LIB3196-005-P1-M1-D2
atgtcccaggcagcagttagcccgccgcccgcctgtgtgtccgcagagccatggagagagccagtctgatccagaaggccaagctggcagagcaggccgaacgttatgaggacatggcagccttcatgaagggcgccgtggagaaaggtgaggagctctcctgcgaagagcgaaacctgctctcagtagcctacaagaatgtggtgggcggccagaagggctgcctggagggtcctgtccagtattgagcagaaaagcaatgaggagggctcggaggagaagggccccgaggtgcgtgagtaccgggagaaggtggagactgagctccggggcgtgtgcgacaccgtgctgggcctgctggacagccatctcatcaaggaggct

SEQ ID NO: 44725 - DNA, 407 bp, Gossypium hirsutum
  Clone ID: LIB3196-005-P1-M1-D4
atgtcagtgccagccttgccagatcattttgaaccaggtatgctattgcggcagcacctgccgagatgtgttatgtggaaccgatgtaggaaagtctgatggatttggggatttcagctgtttaaagatatgtggcaaggacttgaaatgcggtaaccatacatgttcacaagtatgccaccctcagccctgccagccatgcccacggctccccccactggtgcgctgttgcccctgtggccaaactcctctcagccaattgctagaacttggaagtagtggtcggaaaacatgcatggatcctgtgccttcatgtggaaaagtgtgcggcaagcctctgccttgtggctccttagatttcattcatacctgtgaaaagctctgccatgaaggagactgtggaccat

SEQ ID NO: 44726 - DNA, 388 bp, Gossypium hirsutum
  Clone ID: LIB3196-005-P1-M1-D5
cccacgcgtccgggcatgtatagactagattatgttttggaatattgtattttggtctatgttaaatgtgagtcattcgaaaatggcttaattgctatgcttgagttcggtgttggttaaattatagtttaagtttattttgattattatgacgagtaccatggttgactataagttatgttatgtgcttgtattcggaaatgatatggataattaggttgtattatgttttaatgaatgaaacttggtttgattattaatggtttaaaaatgttaatgagatacgtggatgttcgaatatgaattgattttgttggtatggtttgcatggtaaacgtatgtgtacttaaagtgatttaatgttatatgaaagttgtataatgtatat

SEQ ID NO: 44727 - DNA, 394 bp, Gossypium hirsutum
  Clone ID: LIB3196-005-P1-M1-D6
gcgtccacgcgttcgaatgtatgaagttatagaaaacacaagacccaaaagttaggaaaaaagcatttaggcaacaccaagcattaaaaataaatacctcatctgggcctgctgtgaagaaatatatgagattaatagtagagaaaccagatttggtgatctatggaagagcactgtaacaaaaagaaatactcagcatcatacatacacaacacaaatatatatatcagataaaacatcagggcacagaagaatatctgaccatgagacttagaaatctcaaatgaaaaacattttaaacctcataataaagtagatacccattttcaactaacctttgcaccttgttttcctcacaatactttgcagcatctgcaggttccatatcagcaag

SEQ ID NO: 44728 - DNA, 233 bp, Gossypium hirsutum
  Clone ID: LIB3196-005-P1-M1-D7
cccacgcgtccacaccggtggactcattaaaaacttagaacccataattcaggaaaaaatcatttatccaacaccaagcattaaaaataaataccttatcctttactgctgcgatcaaatatattagattaaaactatacaaacacagacttaacatgttcttaagagcactctaacatatagaaatacctatgatgactcatacacaacacatatttagatatcagttaaaa

SEQ ID NO: 44729 - DNA, 296 bp, Gossypium hirsutum
  Clone ID: LIB3196-005-P1-M1-D8
atgctctcaggagggaggctgccccagccagggggggggggcccagaagccgttaagcggaagcacttgccttcaaaagccgtggccaaagggggcctcacgggcgacgacggagccgggatccgtgcctcagcgttcgggctggagacgaggccaggtctacagtcggggtggacgtgcccaccagctgacgaaggccgggacgccaggttcggcggacttgccgagcgggacatgacatggttcggtgtgactgcgaggacagaatgggcgcgtacggccttactgaacaccct

SEQ ID NO: 44730 - DNA, 361 bp, Gossypium hirsutum
  unsure (1)..(361): unsure at all n locations; Clone ID: LIB3196-005-P1-M1-E1
atccctcttcttcagtggccccatgccaggtgctcagaccacccagacctggccacagtgccaccaaatctagcccgtggtggccatgaccacctgggccacaccctctttggacgctcagcaaggcaggggcctaatgcccttcaggcgttactcaggcgagtcaggcctggcctgcctctgccaaggcgtggggcacgctgggagaccatctgggggtcaggatggggctgtaggtggagacacccttaaggccagtgcctcccgtgcacccaggccttagccctgtgctctgagctggcctggccaaggggtggaaacggccctgtgcccaccggctcccaggagagcttncagggga

SEQ ID NO: 44731 - DNA, 382 bp, Gossypium hirsutum
  Clone ID: LIB3196-005-P1-M1-E12
gttttctctctctctcgcggtgtctctctctctctctctctctctctatttcttctccacaaaaatcccatattttgttcttaatctctctctcctttgcttacgataataacatatacgtattcaccaatgcatgatcttccgatccaatgtaattttgatccttagctttgaattttttaccgagtttgacccacctgattgactcactgagttggggcttctttttgttggagaaactatgttggaggcaatggagagttccgtcaatggcgggggtttctcgcagtttcagagctgcggagacagtagtgaagaagagctctcggttctgccacgtcatactaaggtggttgtcaccgggaataaccgtactaaatct

SEQ ID NO: 44732 - DNA, 348 bp, Gossypium hirsutum
  Clone ID: LIB3196-005-P1-M1-E2
atctctgataatgagagggaggacaagggggcccatgggcccaggccagacactgttgggcagaggggaggttcccggcccagcccgggtcctatccgctgcaggcatcgatccaaggtttccagtaaccaacatacaccatctcatccggaacagcggggttcggcttctcctatggcaggatctggggcgaaaagatcaagagatggtgaactggagaccagtctaaacatccaaggttgtaccacagagggagacctgctgtttgcccagaagtgtaaagaactccaaggatttatacctcctctcacagatctactcaatgggctgaagatgggtcgttttgag

SEQ ID NO: 44733 - DNA, 363 bp, Gossypium hirsutum
  Clone ID: LIB3196-005-P1-M1-E3
atgttgctatggggattgctggctcagatgtgtccaagcaagctgctgacatgattcttttggatgacaactttgcctcaattgtgactggagtagaggaaggtcgtctgatctttgataacttgaagaaatccattgcttataccttaaccagtaacattcccgagatcaccctcttcctgatatttattattgcaaacattccactaccactggggactgtcaccatcctctgcattgacttgggtactgacatggttcctgccatctccctggcttatgagcaggctgagagtgacatcatgaagagacagcccagaaatcccaaaacagacaaacttgtgaatgagaggctgatcagca

SEQ ID NO: 44734 - DNA, 408 bp, Gossypium hirsutum
  Clone ID: LIB3196-005-P1-M1-E4
atggatcacttgagcctgggaaatcaaggatgcagtaagtcgtgattttgccactgcactctagcctgggtaacagaggaagacctcatctcgaaaaaacaaaacaagattactttcttgttacatttagtcttcagaggattttgctaaaaaatagctaacactatacaaattcttttagcatccttgtggttttctaaaataatcatgctatcttttttactataccgaatgttgctatttataatatttatccaggatactttatttctggctcttctttttggtcccacagctcagtttctacatggaatgaagtggacaagaaatttacatttgatatttcattaattcaggcattcatttagtaaacatctcataacaattactttatactcggcactacgt

SEQ ID NO: 44735 - DNA, 407 bp, Gossypium hirsutum
  Clone ID: LIB3196-005-P1-M1-E5
atgcaagtacgaggagctgcaggtcacagcgggcagacatggggacgacctgcgcaacaccaagcaggagattgctgagatcaaccgcatgatccagaggctaagatctgagatcgaccacgtcaagaagcagtgtgccagcctgcaggccgccattgctgatgctgagcagcgtggggaaatggcactcaaggatgccaagaacaagctggaagggctggaggatgccctgcagaaggccaagcaggacctggcccggctgctgaaggagtaccaggagttgatgaacgtgaagctggccctggacgtggagattgccacctaccgcaagctgctggagggcgaggagtgcaggctgaatggcgaaggcgttggacaagtcaacatctctgtggtacaatccaccg

SEQ ID NO: 44736 - DNA, 407 bp, Gossypium hirsutum
  Clone ID: LIB3196-005-P1-M1-E6
atcgccgcggagcctgccgaacctcctcagccgcccggagccgcgcccggagcccggctatagaggctgcagtcgcagccgggagcccgcagcccgcgccccgagcccgccgccgcccttcgagggcgtaccaggccgcgccatggtgaaagtgacgttcaactccgctctggcccagaaggaagccaagaaggatgagcccaagagcggcgaggaggcgcttatcatcctccccgacgccgtcgctgtggactgcaaggacccagatgatgtggtaccagttggccaaagaagagcctggtgttggtgcatgtgctttggactggcatttatgcttgcaggtgttattctaggaggagcatacttgtacaaatattttgcacttcaaccagatgacgtgtactact

SEQ ID NO: 44737 - DNA, 389 bp, Gossypium hirsutum
  Clone ID: LIB3196-005-P1-M1-E7
atgccccagttaccaggagaggctgtgtcaaaggcaccatgagcaagatcagcgaggccgtgaagcgcgcccgcgccgccttcagctcggggaggacccgaccgctgcagttccggatccagcagctggaggcgctgcggcgcctgatccaggagcgcgagcaggagctggtgggcgcgctggccgcagacctgcacaagaacgaatggaatgcctactacgaggaggtggtgtacgtcctggaggagatagagtacatgatccagaagctccccgagtgggctgcggatgagcccgtggagaagacgccccagactcagcaggatgagctctacatccactcggagcctctgggcgtggtccttgtcatcggcacctggaactacccc

SEQ ID NO: 44738 - DNA, 257 bp, Gossypium hirsutum
  unsure (1)..(257): unsure at all n locations; Clone ID: LIB3196-005-P1-M1-E8
caagagggaacgcaggagcgcgcgcaggcaccggcccggaaccccgggggcgacccacgcgagcggaggacgcggggaacggacgcgggggcagacacgagggcggacgcgaagggcgcagacacaaaaaacaccgagaaaggaaggacaaaangcgagnnaaagggccaaacagngcaaaggcagcgacgccggaaccaaaagcgcgagaagcagggagncagggaganggcgcgagaggacaagaaaaaacaaag

SEQ ID NO: 44739 - DNA, 331 bp, Gossypium hirsutum
  Clone ID: LIB3196-005-P1-M1-E9
tttgcatttactagcaattgcttcaagttcttttctttgtctttttagtcaatggctgaccaccacctccaaaacactcaaccaatgactcaccaaatggtgaaagccggtactgccgcaacagccggtggttccctcctcattctctccggtttaatcctagctggcaccgttattgcactcactatagccactccactcttcggtattttcagtccagttcttgtccctgctctcattgcaacagctctgctagcaacgggtttcgtcggcttcggcggtttcggtgttgcagtcgtcacagttctgtcctggatttacaggtatgtga

SEQ ID NO: 44740 - DNA, 271 bp, Gossypium hirsutum
  Clone ID: LIB3196-005-P1-M1-F1
atgcggcaccgcgggacgggacggagcgatgtcaggccgaggcgcgggcgggttcccgctgcccccgctaagccctggcggcggcgccgtggccgcggtcctgggagcgcctactacatgcggcaagcccggtaatgccgcaacaaacggtggttccgtgctcattctttcctgttgaataatagctggcaccgttattgcactcactataggcacgccacttttctttattttaagccaagttattggccctgctctcattgcaacagct

SEQ ID NO: 44741 - DNA, 387 bp, Gossypium hirsutum
  Clone ID: LIB3196-005-P1-M1-F10
cagcctccatttcccatatcatggcatcggagaagaagctgtcgaacccaatgagggagattaaagttcaaaaacttgtcctcaacatctccgtcggtgaaagtggcgatcgtctcacccgtgccgccaaggtcttggaacaactcagtggtcaaacccccgtcttctccaaagctaggtacactgtgagatctttcggaattcggcgtaatgagaagattgcttgctacgtgactgtgaggggagagaaagctatgcagcttcttgagagtgggttgaaggttaaggagtatgaacttttgaggaggaacttcagtgataccggctgcttcggattcggtatccaggaacacattgatcttggcatcaagtacgatccttcaactg

SEQ ID NO: 44742 - DNA, 380 bp, Gossypium hirsutum
  Clone ID: LIB3196-005-P1-M1-F11
gtctacatgtttttgatgattttagagaggcttatgcatggttgagccataatacagatgtcaatgataaagttgcatcatggtgggactatggttaccaaaccactgccatggctaatcgcactgttattgtcgacaataatacctggaacaatactcatatcgcaactgtcggtactgccatgtcttctcctgaaagggcagcttgggaaattttccactccttggatgtcaaatatgttcttgtagtctttggaggtctcattggttaccccagtgatgatattaataagttcctgtggatggttcgaatcggaagtggtgtctttcctcatatcaaggaaccagattatcttagagacggacaatatcgaattgac

SEQ ID NO: 44743 - DNA, 382 bp, Gossypium hirsutum
  Clone ID: LIB3196-005-P1-M1-F12
ctcatgccatgaaaagcctacctccacgattaacccctagtaaacccccttgagcccaacaaaccaattcttgtattacccttattatattaactctttttctagttaggaaacttttcaattcaatctcgattctaaccctttctttcagcttgtgaccacaccccctaaccaagcctcattacaaccctctaaagaccttttgattgatgtatcatcttaaaattaaagtggtggagatttgattttcatgcaagcctatggtaatgactttccattattgactattgagtgcttcctttattatccttaaaacacctcgagcgatttgagtgaatctttagtgaggatgtaaaactctgtgatatcctgaattaaaggt

SEQ ID NO: 44744 - DNA, 318 bp, Gossypium hirsutum
  Clone ID: LIB3196-005-P1-M1-F2
atagcgtgtaccttaaatgaattttggggtaagaatgtgaagtatcaaaaaaaaaaagtagcctcttctgtattattacctatttatgcctagtgttccgttattggaacgctaagcttatggaagttatttatatcctactgatcaaggtcactcaggtctgatttttcatttaaaaaaaaaaagtgcaacctccagcataaattggttaataacttagattcacgcctgtaatccgagcacccttgggagggccggggcgggtggatcactttcggtcaggctggtcttgaactcctgacctgaggtgagccacct

SEQ ID NO: 44745 - DNA, 364 bp, Gossypium hirsutum
  Clone ID: LIB3196-005-P1-M1-F3
atcaagcaagcttctgtctgcacctgctctcaatcctgctctcactatgagcctccgcctgcagagctccttcgccagctatggaggtggttttgggggtggctcttgccagctgggaggaggccgcggtgtctctagctgttcaactcggtttgtctctgggggatcagctggaggctacggagggcggcgtgacctgtggctttggtggaggggctggtagtggctctggaggtggctaccgaggtggccttggaggtggctttggtgggggttatgctggtggctttgttgattttggtgcttgtgatggtggcctcctcactggcaatgagaagatcaccatgcagaacctcaacgaccg

SEQ ID NO: 44746 - DNA, 385 bp, Gossypium hirsutum
  Clone ID: LIB3196-005-P1-M1-F4
gaaatatgtaagtatgtatgccatatgatttatgatatatgtaagtatgatatatgattatgttttgtttttgtttttgggtggggttatgatatgatggatgaaatgttatatggcagtttatactgcaattatagtggctagactacaaatttatgtacgacagctcagctgcaattatatgagtggcacaccgccacctattggtgtgattggatggatggactctagtagccctatatggtgtgaacggctagatggagatggtgtgtagtggatgggggtaggacataatatgctttggtatgtcacgttatgatatgatatgatatggcacaatatgttatgttatgataaaatatatcttgatatgaaatctgatatg

SEQ ID NO: 44747 - DNA, 404 bp, Gossypium hirsutum
  Clone ID: LIB3196-005-P1-M1-F6
atatatcgacatgatttaccactattatggcgatgcttggtgcggtgtatcatattatacagctgaagctactaaacacaaaccactaccaaccaccccttacaaaaaaccacactctttaactaaacaacatccactgtcaaccaacatgaactaaaaccaatataccccttaatcaacactaacatattaaaatcaaccacttacaatccttattatgcaatgccatatcctactaatcttcactccttagatctccaatattaacttactatctatcaaggaataattccttactccagtcatcatattactaagaatctcatcatacatcgcttaaggacaaagcctatttccttatatcacagaaccagattattttataaacgcaccatatcgaattg

SEQ ID NO: 44748 - DNA, 358 bp, Gossypium hirsutum
  Clone ID: LIB3196-005-P1-M1-F7
caaagaactagaagaaaaatactccaaggagagtttaattccaaagcctaaatactggggaggatatagacttaaaccagaacgtttcgagttttggcaaggacagccatcccgtttacatgacaggttggaatattcccctcaagagactgacggaaaacgagtttggaaaattgttcggttggccccctgagttcatattttcagcttcttcactgtcaagttagcctgtggttttcacaaaccttctaacttgcaagtatgtattttctgtggcattgaggggcgggggggtgtgcatgacattttactataaaaattttacatccttgactcttaaataccgaaaaggatcaaa

SEQ ID NO: 44749 - DNA, 369 bp, Gossypium hirsutum
  Clone ID: LIB3196-005-P1-M1-F8
cccacacgtgcgtggatatacgtttgaaccaactattgggtttactgtgggcacgttgttttaagaattacactacgactgattataattaagatgggtctaatattttatattgtgaaaaagaaattctcaagttttggaagggtgttaaggatggacttgcattgccattgttgatagatctttcttttaagatcggattgcctattgcaggttgtgacatgcgtctctcagctgacttaaagctccagattctggactcattgttctgcactgatgttgcatggatggcgatgcgtttcagctgagatgcgatatgtggcttttgataatgatctatggatgaagaaagttcaagagtgagtttga

SEQ ID NO: 44750 - DNA, 386 bp, Gossypium hirsutum
  Clone ID: LIB3196-005-P1-M1-F9
atggggacgctctcagctctcggcgcacggcccagcttgcttcaaaatgtctactgttcatgaaatcctgtgcaagctcagcttggagggtgatcactctacacccccaagtgcatatgggtcagtcaaagcctacaccaactttgatgctgagcgcgatgctttgaacattgaaacagccatcaagaccaaaggtgtggatgaggtcaccattgtcaacattttgaccaaccgcagcaatgcacagagacaggatattgccttcgcctaccagagaaggaccaaaaaggaacttgcatcagcactgaagtcagccttatctggccacctggagacggtgattttgggcctattgaagacacctgctcagtatgacgcttctgagc

SEQ ID NO: 44751 - DNA, 387 bp, Gossypium hirsutum
  Clone ID: LIB3196-005-P1-M1-G1
caatggatgaaggtcgaagttgctttaagagatctgatactttccgactatgccaaaaagaacaatgtgaacacatcagccctgacacagtctgagattcgtgacatcatccttggagctgagattactccaccctctcaacagaggcagcagatagcagagattgagaaacaggcgaaggaggcaagccagctaacagctgtgacaactaggactacaaacgtgcatggagatgagctcattgtcaccaccacaagtccctatgaacaagcagcatttgggtccaagacggattggcgtgttagagcaatatcagctactaatctttatcttcgagtgaatcatatatatgtgaactcagaggacataaaggaaactgggtacaca

SEQ ID NO: 44752 - DNA, 384 bp, Gossypium hirsutum
  Clone ID: LIB3196-005-P1-M1-G10
ccgacacgctccaggccaaggatctgcgtgttttattaaaatggttttatttccgttttagtccattcgctttttatcattttacaattaactttgttatgcttttaaattcgcccctcttattttgtttcattttcactttggtcccgtttaagtgcagcgctttggaaggaagggaaaatttactttttaatcccccatgccatttgtgcatttcaaataagtcctccccctttccttttatttcagattcaccccaaatgtttgttttaacttcgatttcgtcccttttcgccttttaattaatattttgcattatttctattattattattactattattatactttattattattgtattttaatatcatatctattat

SEQ ID NO: 44753 - DNA, 376 bp, Gossypium hirsutum
  Clone ID: LIB3196-005-P1-M1-G11
tcgggtctttatcatttataactataaactggtacgggcaaagatccctttccagcgaaaaatgggagcgaaagaaaaaacacggggatgccagctgccacgtgcgcctacggctattgctgctgcatcgccaactcttgtgctatcggctgaggaggccgtggcacgaggaggtggagagatcatgctttttggagacagagaggcgggtgatggcatgaggaatagtgtgagtctgaacaatcatgatcactacgatcaacctgatgaatgggacaagaattacaacaaggacgacagagatcaaggcgatgatactctgaccggcaggtacgcgtccagcgacgatacctgtcgtcactctaccggaaatcga

SEQ ID NO: 44754 - DNA, 400 bp, Gossypium hirsutum
  Clone ID: LIB3196-005-P1-M1-G12
atctcacctccagcctctcacgctctcctcagctctctcatctcctggaaccatggccagcacatccaccaccatcaggagccacagcagcagccgcaggggcttcagtgccggctcagccaggctccctggggtcagccgctctggcttcagcagcgtctccgtgtcccgctccaggggcagtggtggcctgggtggcgcatgtggaggagctggctttggcagccgcagcctgtatggcctggggggctccaagaggatctccattggagggggcagctgtgccatcggtggcggctatggcagcagagccggaggcagctatggctttggtggcgccgggagtggatttggtttcggtggtggagccggcattggctttggtctgggtggtggagcc

SEQ ID NO: 44755 - DNA, 450 bp, Gossypium hirsutum
  Clone ID: LIB3196-005-P1-M1-G3
caacaggaaagctcatacgcgtgcacttacaccgccccggtattcccgtcgtggcattcgctgcgattagacccttctgtcgctctgctcggggccatataaactctctatcaatggctagactactctcgccacactctttacatcacagacatactgaaagtctgtgtcaaatcaataggctccgcgcctctgcaccccagacccgaattcgctccgaagccggcaccaccgagtggtggaaccccaactgtcaacagctcacgtgtgctggtgtatctgtaatgaggcagactattgaacctaatggccttgttttgccttccttcaccaatgctcctcagcttctctacattgtacacggaagaggtattcaaggtattgtgatgcctggatgtgccgaaacattccaagattcacagcaatggcagcatcaaagccgtggcaggt

SEQ ID NO: 44756 - DNA, 260 bp, Gossypium hirsutum
  Clone ID: LIB3196-005-P1-M1-G4
tctcaacacactactttaaaacagcccgccttatattttatactaactgacaacccaataagccacaaccattacatcttatccctaacacaatttgacattcactacaaaacactctaatcttagatctctcaaccttatttactaacaattcatgatcctcataataaagcaacttgatcaactttcataccatattccatttggactatctagtattgcacactttcatacataataacttattattaccatcttat

SEQ ID NO: 44757 - DNA, 393 bp, Gossypium hirsutum
  Clone ID: LIB3196-005-P1-M1-G5
tcggctacaaaacgaaagagataacaggggagccattgttagaatggagcatggatttgagtggcccgaggaagggcagaggcgacaaggacgtgaagaggagggagaagaagaaagagaaccgaaatggcagaggcgacaagaaagtcaagaagagggatctgaggaagaagaaagagaagaacgaggaagaggaaggagaaggtcaggaaacggcttagaagaaacattctgctcaatgagactgaaacacaggacccctgcttcctctgctgatgttttcaacccacgaggtggtcgcatcaccacagttaacagtttcaatcttcccattctccaatacctccaactcagcgccgagaggggagtcctttacaataatgctatctacgc

SEQ ID NO: 44758 - DNA, 385 bp, Gossypium hirsutum
  Clone ID: LIB3196-005-P1-M1-G6
cttgcccaacgacctttcgaaggcgagtcatgcaaattcggttctccttgtaccaggtaagaggtgactccgctctctaaagcttcttttgcaatctgatgggcacgtatattatctgatcgggggatatgcttgaactctattgtttgaaaatgaatgcacctcttctgaatatctcgaataattacttctatgactgatttgtctgtttctgttgtttgacacttcctgattactgctattgaatcccctctgatttgttattcacgaaaacccaataaaatctctaaccgaattgcttccaatcctgcatatgtttctgccgcgaacggagatggcacattattgtgaaggactgactctgatgccaaaagctcatcaacac

SEQ ID NO: 44759 - DNA, 380 bp, Gossypium hirsutum
  Clone ID: LIB3196-005-P1-M1-G7
cccacgcgtccgctcaggcctaaagctttctcaatctcagcagtgggcatccaccttttggcttagcttagtcagttccctgccctatggttgttgaataagaagagcttataaaaggagttggtcaacaagaccgaggaattagaactagtatccactcattacacagaagaaagagtaacgcttgaagttcaatctccccacattctatctccatctgggctattgacggctaccaacccccgctctatctcttgtgagtcatcaggggtgacccgaacttcggtgtcagaggatccatctcttcgacgggtataaaggctggttgcagtgctccaaaccttatccatgttggtagtcgcttgtcttatgagtgaatc

SEQ ID NO: 44760 - DNA, 277 bp, Gossypium hirsutum
  Clone ID: LIB3196-005-P1-M1-G8
cccacgcgtccgctcaggccgaaagctttctcaatttcagcagcgggcatccaccttttggcttagcttaatcagttccctgccctatggttgttgaataagaagagcttataaaaggagttggtcaacaagaccgacgaattagaactagtatccactcattacacagaagaaagagtaacgcttgaagttcaatctccccacattctatctccatctgggctattgacggctaccaacccccgctctatctcttctgagtcaataagggtgaccc

SEQ ID NO: 44761 - DNA, 336 bp, Gossypium hirsutum
  Clone ID: LIB3196-005-P1-M1-G9
atggaatttgcaggggaagataattgggcttttgctagacttagaaaaacttctatttagtggagatccttgttagacatgagtacaatggtgactactgaaggactcactgctatggtatctttaagcaattggggcaaattcaaattaacaaagtttagccaaatggacaagtcccagttttgtcagagagataatttggatccacctatcttttattaaaaagtgaactgtgttactatttcatggctagagttccaagtaaaagctattggactaagttttggttccctatcttaaaacaggttttttgttttttttttaattggctttatt

SEQ ID NO: 44762 - DNA, 341 bp, Gossypium hirsutum
  unsure (1)..(341): unsure at all n locations; Clone ID: LIB3196-005-P1-M1-H1
tcgcccacgcgttcgcccacgcgtgcgtggttggataagaacacaggtggggtttgtttatcaatgtcttctaaggcgttgacaattacagggattgatgatcggagatattggaaccatatttccaccgaggaatctagatatcgaacagtagcctacctgcaacaaacatggtggttcgaagtcgatggagagctcgagtttcaattccctgccggaacatattccctattctttagactgcacctcggaaaatcctcaaaaagactcggccgtcgggtttgcaacaccgagcacgtncacggatgggacataaaacctgtccaattncaactaacaac

SEQ ID NO: 44763 - DNA, 370 bp, Gossypium hirsutum
  Clone ID: LIB3196-005-P1-M1-H10
ccgagaagtaaacagaaaagggaagaattttggtgaccggtgattcgtgagtattgtaaacagcagcagcagcaatggagctgttctacttcgtggagttcagggcattgggagcggtggtggcagcattagagctaagcaagaacagcaaagatcgaatcaacacatcctctgctttcaattccttcaagaacaattatcttgtcggttattctctcatgatggctggagactggcttgacggtccgtatgttgactatctttacagtacatatgggttcggaaaaggtgaaattggacaactttttattgccggttttgggtcctctatgttgttcgggacaattgtcggatctttatcagacaaaca

SEQ ID NO: 44764 - DNA, 383 bp, Gossypium hirsutum
  Clone ID: LIB3196-005-P1-M1-H11
atggccccctcagttggccaagatctttggcacaggggccctgctgccagagaagcctcagagtcagttttggctttactgtgtgttgtccagctgagtcatcctgggtaaaggtcttctgaggatcagtttcccacctgcacgatggggatagggtatcagcagaacacagcagggtaaggcactcaggaagccatcagtgggtgttagccaataacactgctctcattcttcttcttagagccccggacccaggaggcccaaggagctggaggtgaccctcaggcagcaagaaccccgcggaagggcgtgagccctgcagacagctgtgcggcacctcgggctgggctcctgttaggaggaagtgcctgcgcccaggcagc

SEQ ID NO: 44765 - DNA, 359 bp, Gossypium hirsutum
  Clone ID: LIB3196-005-P1-M1-H12
gcgagacctttgcctcttgtgtggtttgtcgtcgtctttttttccaggaaaattcgaatcctaaaccctagctctgggaaaacaaaatctgataactaaagtaaaaaaaaatggctttgttgagaggtcgtacagcttctttgaacctcttcaataggcttctccatcaatcgtttcgtgctccaaatcgcaatctctcttctgttgcggccgatgttcataatcaatcaacgattgagaatatgaaaagagatttacttaatcttgacattaattcacacattgggagttgtatgccaattgcttcaatgcgaatcgggacctttatccacaacattgaggtgaacccgggtcaaggc

SEQ ID NO: 44766 - DNA, 335 bp, Gossypium hirsutum
  Clone ID: LIB3196-005-P1-M1-H2
gaacaagagggaacgaaaaagcacgttggtacccgtccgcaattttcgcgataaaaaaaaaaattgttttcacctgttgcctttcaaacgtcagagttgcagtagtataaacaacaaagcacaagtatagagaatgcattattttcaaacctattaaaaatgcatatcaataggatgttcttgcaagttggttacctagctgtgctgatatgctaacacctgctatctccaacactcatggtggctgaggctggaatgtaggttgagcttacaagttcgtgaccagacttatcaacatttcatgatactatacttcacaaaatggtaaaaaagac

SEQ ID NO: 44767 - DNA, 391 bp, Gossypium hirsutum
  Clone ID: LIB3196-005-P1-M1-H3
gtcctacgacttgtctaaagtcacttaatgacatcactaaactagcctgataatcattaccatgaggatcattttgagtataatgatatctcattcataatggataaatatgttgatcaaatcggctacattggcttgccttgaccaaaagctggccatggctaaacgctgttctcatgagggtgtggttgctggagctaaggccgccgttgttgctaccattgccaccgcaattccaactctagctagtgtaaggatgttgccttgggcaagagccaatcttaatcacactgcacaagctctcatcatctgcactgcggacggagctgcttattttatagttgcagacaagaccgttttggctactgcacggaagaactccttcaagcag

SEQ ID NO: 44768 - DNA, 392 bp, Gossypium hirsutum
  Clone ID: LIB3196-005-P1-M1-H4
atgtccccagcctctcactcggagccgatatggggagtaaagtggcggacttgctgtactggaaggacacgaggacgtcaggagtggtcttcacaggcctcatggtctccctcctctgcctcctgcactttagcatcgtgtccgtggccgcgcacgtggctctgttgctgctctgcggcaccatctctctcagggtttaccgcaaagtgctgcaggccgtgcaccggggggacggagccaaccctttccaggcctacctggatgtggacctcaccctgactcgggagcagacggaacgtttgtcccagcagatcgcctcccgcgtggtctcggcggccacgcagctgcggcatttcttcctggtagaagacctcgtggattccctcaagctg

SEQ ID NO: 44769 - DNA, 387 bp, Gossypium hirsutum
  Clone ID: LIB3196-005-P1-M1-H5
cattcctaaaaaattgattgcatgaagagtgacctgattcttgttacctttgcttgtcgcaggattttaacgttgcttatagacagatatattgaaagaatttcatgtagaatgtgcaacctggcttatgttacttgggtggtggctcaaaatctacaggtattgcaacatcttctgcttcttcctctctatataaaatttcttgagttaattgcaccaaacatcctcaatttctttttattacagttaagaagaggattggatggtactggttctatgattatatgtgcttgtcaactactagtttgagtgaaaaacaaagacattttgtgagcaaagtgtcctttccttctaagatgtattttggtggagctattaaacttagtt

SEQ ID NO: 44770 - DNA, 164 bp, Gossypium hirsutum
  Clone ID: LIB3196-005-P1-M1-H6
tattcctaaatatttgattgcgtggcgcgtgacctgattatggtcaacgaaaattctcatactaaaccctagctctgggaaaacaaaatctgataactaaagtaaaaaaaaatggctttgctcataggctctacagcttgtgtgaacctctaaaatacacttgt

SEQ ID NO: 44771 - DNA, 399 bp, Gossypium hirsutum
  Clone ID: LIB3196-005-P1-M1-H7
atgcggagctgtcccagatgcagacccacgtcagcgacatgtccgtggtcctctccatggacaacaaccgcaacctggacctggacagcattattgctgaggtccgtgcccagtacgaggagattgcccagaggagcaaggctgaggccgaggccctgtaccagaccaaggtccagcagctccagatctcagttgaccaacatggtgacaacctgaagaacaccaagagtgaaatcgcagagctcaacaggatgatccagaggctgcgggcagagatcgagaacatcaagaagcagtgccagactcttcaggcatccgtggctgatgcagagcagcgtggtgagaatgcccttaaagatgcccacagcaagcgcatagagctggagactgccctgcagc

SEQ ID NO: 44772 - DNA, 390 bp, Gossypium hirsutum
  unsure (1)..(390): unsure at all n locations; Clone ID: LIB3196-005-P1-M1-H8
acgtntagccaaaagacacccaaagacaccactttgaaacccggaaatgtcggacgaggagcatcatttcgagtccaaggccgacgccggcgcttccaaaacctaccctcagcaggccggcaccatccgcaagaacggttacatcgtcataaaaaatcgcccctgcaaggttgttgaagtttccacctccaagaccgggaagcatggtcatgcgaagtgtcactttgttggaatcgatatcttcactgccaagaagctcgaagatattgctccttcttcccacaattgtgatgttccgcatgtcaatcgtactgactaccagttgattgacatttctgaggatggatttgtgagtttgctgactgagagtggagacactaaggatgatct

SEQ ID NO: 44773 - DNA, 382 bp, Gossypium hirsutum
  Clone ID: LIB3196-005-P1-M1-H9
atagcctttgttagtattagcagtttgtgtagtttttgggtccatcatctatgggtcttccattgtccagtactcagtccccttttccagggaatacggccattttccttgtttcttttttgcaggtctctttacatcagagatctgttaccaggttttgaatcccaataatgggtgtttgtttcttcatggccggagttccctgagaatatagtcgctgctgggttccggattttagggaatcttttcttccttcctcgtaaaggttttagtctgctgggtttctggcgttattgctgagcaatgttcatttctgcttgagctaagctttttgttatttgttactgtctttcgtccatcatagttggttttaccgagtctc

SEQ ID NO: 44774 - DNA, 354 bp, Gossypium hirsutum
  Clone ID: LIB3196-006-P1-M1-A1
cgaaaatgaagactatactttcctccgagacaatggacatccccgacggggttagcattaaggtcaaggctaaggtgatcgaggttgaaggtccaaggggtaagcttacccgcaacttcaagcacgtcaaccttgatttccatctcatcaaggacgaagagaccggcaagcgtaagctcaggatcgaggcttggtttggctccaggaagaccagcgccgccatccgtacagctcttagccacgttgagaacctcatcaccggtgtcactaaaggataccgttacaagatgaggttcgtctacgctcactttccgattaatgccttcatcacttatggcaacaagtcgatcgaga

SEQ ID NO: 44775 - DNA, 374 bp, Gossypium hirsutum
  Clone ID: LIB3196-006-P1-M1-A10
cccacgcgtccgattgtaagccattatataaatgctagataatcttttacaaatgtgaaattgttggcatggttgaatttatgaaatgtatataggtcttagctatggttgttggttgataaatcatattaagttagattttgatatgttgattggtattaaattgtgtttcagggtggcacagggctttgtaaatagccttatattgtccacacgggtagacacacgggcgtgtcttgtaataacctgaattttaccgttacagaaaaagtgtattttcgggtctccgtttctgaaaagtagattcgtaaatatttttaataaatgtttacgaagttaatcgagtggttaattagagtttaattaagtgaatt

SEQ ID NO: 44776 - DNA, 343 bp, Gossypium hirsutum
  Clone ID: LIB3196-006-P1-M1-A11
atgttcgagaccagtctggccaacatggcgaaaccctgtctctactaaaaacccaaaaaaattaactgggcatggtggcgtgcacctggagtcccagctatttgggaggctgacgcatgagaattgctcgaacccaggaggtggaggactgcagtgagccactatcgtgccactgactccgacctgccttggaagaaagaaaaaactgcctgagactggtgatgtataatgaatagaggttgaattgactcacagattctcatggctgtggtggcttcacgaaacttcctatcatggttgaaggcgaaccgaaagcatgctccttcacattgcaacatacaga

SEQ ID NO: 44777 - DNA, 376 bp, Gossypium hirsutum
  Clone ID: LIB3196-006-P1-M1-A12
attagctttcgcattcatccgtctcattctttatcactcatccccaccaaaaatattgttgcccctaactctatcacaggttatagtaacgagctcaccgcctttagtggagatggataaaacaaattacttgattatactgaaaggcccctatgttttttgtctttaacttatgtatgggttttatagagtatcatcctttgatgaggtgaaactcattgtcatggtcgcataaccactgccaaccggggcctcatttatgctttatctcttgacaacataatttttgtaaacttgaagccctagttacacttcaacccaagaccgtataatcaccgtcaattgggaccttgagttgcaacacgatttggtttct

SEQ ID NO: 44778 - DNA, 327 bp, Gossypium hirsutum
  Clone ID: LIB3196-006-P1-M1-A3
ttatgtttcactggcggaaacaagttattctcaaagatttggtctgtattaaatttaaatgtccatgtcgatatggtttaaattctacatgctgtaaagctgcagagcagaggaaccataccagttttatttgcgctaccattaggtttttttactgtgaacagactctttatctttagtcacattttacaggattattttcattatttctttagtgtttgattttttcccttctttttattccatcttgttttataatctatatatatattaagtctttttttctcatattatcttatttagccttaattttaatatttttattat

SEQ ID NO: 44779 - DNA, 293 bp, Gossypium hirsutum
  Clone ID: LIB3196-006-P1-M1-A4
cttgatttttatgtatgggtgcgggggtcacttccatctgctggagaacttgttccacacgattacattctcggaagatctggttgactgattcgtcttgtcgaccatataatggacatatagcatcaaacctcatcctacgagcctttatgttacttagtgtaagcaaataattgcttgtaattctgcataagctgattcctaccttgctaggaacttttaggctccataatgtccgaataaacattttttgttggatctggatgatttgccttcccatagaccagcatgtc

SEQ ID NO: 44780 - DNA, 382 bp, Gossypium hirsutum
  Clone ID: LIB3196-006-P1-M1-A5
aaaaaacataatcatggagcggtgcaagaagttcgcttttctgatggttgcaatggctctgcttcttcaatccatggtgcctccgacagcattagctgctcgtaacaatgttatggaatacaatccattggcaagcgtattctcgagggaaggccctggctgcatcgcaaaaggcgggttttgcttgtttgacctaaccagttgctgtaggccatgcggatgccttgcagggtggtgctataacattgatcataattgcaatgagtacataatggtcgctactgagttaaaaaaaacagttctgagtcaaaaaatgacatgggattcgattataaatgttctatatataacatatgtttttgaataaagaatctcgtgttat

SEQ ID NO: 44781 - DNA, 352 bp, Gossypium hirsutum
  Clone ID: LIB3196-006-P1-M1-A7
atgcagagtggagcggggttgggagcaaagcgctgagggagctcggtacgccgccacctcgcacccgcagcctcgcgcccgccgccgcccgtccccagagaaccatggagtctggcagtactgccgccagtgaggaggcacgcagccttcgagaatgtgaactctacgtccagaagcataacattcaagcactgcttaaagattctattgtgcagttgtgcactgctcgacctgagagacccatggcattcctcagggaatactttgagaggttggagaaggaggaggcaaaacagattcagaatctgcagaaagcaagcactcgtacagactcaagggaggatgaaatctc

SEQ ID NO: 44782 - DNA, 401 bp, Gossypium hirsutum
  Clone ID: LIB3196-006-P1-M1-A8
atgtttcactgggggaaacaagttattctcaaatatttgcactgtattaaatttaaatgttaatgtgaaatggtttaaattttacatgctgaaaagctgcagagcagaggaaccaaaccaggtttatttgtgctaccaggaggtgttcttactgggaacaggcctcctatctttagtcacattgtacaggatgatatccatgagtactttagtgtttgtgtatgtttttttcttttaaatagaacttgtttttataattgatttaaaatagggctttttttctataaaagccttaatgagccataattttaagaatataagaataatgactatgatattggtcagtcttagaacataaaaattgtagacaatgaatttaatcgggcccctggtggaaacat

SEQ ID NO: 44783 - DNA, 366 bp, Gossypium hirsutum
  Clone ID: LIB3196-006-P1-M1-A9
gctagaccattcgctgatcttggagtatattattcaaaccttactctgctaggtctggactgtagttgttgaatatcatgaatatagacccctatttgcgatttatcttcccctttcaccttgcatttctttattaccgataaagagtcgccttcaataatgatttccttctcttgcatgtcgagtgctatttgggtcgcttttctacaagtgagtgcttcggctgggaaggcggaaagaactctgtagtgaatctctgtgcatgttaagaggacaaaaccttcgctatttctgactactatcccgaaagccgattgtcagatgcgctcattatatgctccgtcaaagtttatttttactatttga

SEQ ID NO: 44784 - DNA, 302 bp, Gossypium hirsutum
  Clone ID: LIB3196-006-P1-M1-B1
caagtgtgaacgaagaagcacgctggtgccgggccggaatttccgggatgcagcacagccggaggcagatatggctttggtggcgccgtgagtggatttggtttcggtggtggaaccgccattggctgttggactgggtggaggagccggccttgctgatggctttgggggccctggcttccctgtgtgccccactggaggcattcaagaggtcaccgtgaaccagagtcttctgactcccctcaacctgcaaattgaccccaccatccagctgagttgcgtgccgtggagcgtgaacagat

SEQ ID NO: 44785 - DNA, 374 bp, Gossypium hirsutum
  Clone ID: LIB3196-006-P1-M1-B10
gctttaattcatcaataaaaaaaaacttgatagtgaattatagtagtaaatgagactttaatttaatgaagcttttagttattatgctcaagttcctagtttagatttaactttgatttgttagtttaatagttgaattagtaatttaattatttaataataaaaagggatctatgtatactgatgtaaaatttaagttgttttacattcttctgtaattttttatattattaatattttaaaaatccaaacattatattttatgttccatttatatagatcatacatgtcaagtttggcataaattaaacatttctaactattcgttttacgtaaaataaaaattcaaccgttaaatatatattaatataaac

SEQ ID NO: 44786 - DNA, 376 bp, Gossypium hirsutum
  Clone ID: LIB3196-006-P1-M1-B11
aaacaacactgatccagagccaggaaggtgtcgcagaactgatggaaagaaatggcggtgctcgagagatgctgttgctggccagaagtactgcgagcggcacatgaacagaggtcgccatcgttcaagaaagcctgtggaaggccaacctggccattccgtcacagccactgccgccactacttccaagctgatgcctaatgtctcatcctcttcagcatcagcggtagggccagttggtggtagtggtgagcccaacagcctcaccagtgctcggcagaagtacgagaatttgcagcttggtggcacatctaatctttctgctgcagcttcactgaacaggtcgattctgaataaagacactgtaggtgaaaaa

SEQ ID NO: 44787 - DNA, 379 bp, Gossypium hirsutum
  Clone ID: LIB3196-006-P1-M1-B12
cccacgcgtccgattccagcaggaagcactgtgtacttggccaaccaagacaacagggaaaagctaaccatagcagtgctccaccgacctgtcaataaccctggacaattccagaaattcttccctgctggacaggaaaatcctcagtcatacttacgaatcttcagccgtgaaattcttgaggctgtcttcaatacacgaagtgagcagctagacgagctgtttggtgggaggcaaagccatcgaaggcagcagggacagggaatgttccgtaaagccagccaagaacaaataagggcattgagccaaggagctacttcaccaagggggaaaggtagcgagggatacgccttcaacttattgagccaaacccctcgct

SEQ ID NO: 44788 - DNA, 282 bp, Gossypium hirsutum
  Clone ID: LIB3196-006-P1-M1-B2
aaattcgcaggctgggtccggtcccggatccccattatcccgatgacgaccaagttatgctgaagaaggatgtagatgctgagtacatgaacaagtgtggagctttaggccaaaatcaatgcgctgatagatgagattaacttcatgaagatgtaatacgatgcaatgctggcccagatgcagactcacgtctctgacacatcttaggtcctttttatagtcaacaaccgcaaactggacctggtcagtattatacacgatgttaaggcctattattgagga

SEQ ID NO: 44789 - DNA, 376 bp, Gossypium hirsutum
  Clone ID: LIB3196-006-P1-M1-B3
gaagattctacagagaattgcctatgtaaatgttggaatctaccccttcacctccattttcttgattgtctactgttttctcccggcactttcgttgttctctggccagttcattgtccagactctcaacgtaacattccttacttacctcctcatcataacagttactctttgtttactagctgtgcttgaaattaagtggtctggcattgagttagaagagtggtggagaaacgagcagttttggttgatcggggggacaagtgctcatcttgctgccgtgcttcagggtctgttgaaagtgattgctgggattgagatttctttcaccttgacatcaaaatcagcaggagatgacttggatgatgagtttgct

SEQ ID NO: 44790 - DNA, 400 bp, Gossypium hirsutum
  Clone ID: LIB3196-006-P1-M1-B4
atcggcagcagcgggagcctctccacgtcctcgtcgtccagcccgcccggcacgccgagccccgccgacgccaaggcgcccccggccgcctgctacgcgggggccgcgccgccgccctcgcaggtcaagagcaaggccaagaagacagtggacaagcacagcgacgagtacaagatccggcgcgagcgcaacaacatcgccgtgcgcaagagccgcgacaaggccaagatgcgcaacctggagacgcagcacaaggtcctggagctcacggccgagaacgagcggctgcagaagaaggtggagcagctgtcgcgcgagctcagcaccctgcggaacttgttcaagcagctgcccgagcccctgctcgccttctccggccactgctagcgcggcccccgcg

SEQ ID NO: 44791 - DNA, 379 bp, Gossypium hirsutum
  Clone ID: LIB3196-006-P1-M1-B5
cccacgcgtccgatggtttttgcttctcggtgtagggttggagcaccacctgtccaaaggagggctacaaatgggggttttactgccaagccacagcggcagcaacaacaactacagcaagaccaacaagagaacatagtaacaaaacaaaggcctaaaacattggattccctctttgccaatatgaaagaagagcgattgagggtattgtcacatcagaacaatggtgtacaacctaatggccgtggccgacaaagaatgccctggggaagaggccgttttggcaactgatatatgagatactacgagtgttatatgataggttgtttgttgcccttggttttctcttttcatgtctgcatgccaatggggatattgt

SEQ ID NO: 44792 - DNA, 380 bp, Gossypium hirsutum
  Clone ID: LIB3196-006-P1-M1-B6
ggaagatgcattttggatgcttgctgtcctccttgaaaatgttttagttaatgactgctatacaactaacttatccggatgccatgtcgaacaaagggtttttaaggatttgcttgctaaaaagtgcccaaggattgctgctcatttggaagcattggagtttgatgtctcccttgttgctactgaatggttcctgtgcctcttctctaaaagcttgccttcagagacaactctgcgggtatgggatgtccttttctatgagggggcaaaggttctttttcatgtagctttggctatatttaagatgaaagaacatgaattgcttctaacgcatcaggttggtgacattattaacatattacagagaactacccatcacc

SEQ ID NO: 44793 - DNA, 296 bp, Gossypium hirsutum
  Clone ID: LIB3196-006-P1-M1-B7
acactatataacaagagggaacgcaaaagcacgctggtgccccgccgcaatttccgggatgggcccctatcctcagccctctattgcggcgcctgctcaatggccccgttgtaaaggaggccggctgaatggaggggtagagtggtctgcctctactgtcattaccctctctcaattgagctaaactgagacattaatcatagctacttgaacccctgaactgatccttgaggcaaagaagttcgaagcacatacacacaaatgccactcggctaagaatccaaccccgtgagagc

SEQ ID NO: 44794 - DNA, 369 bp, Gossypium hirsutum
  Clone ID: LIB3196-006-P1-M1-B8
atgccgcccaagatgccgaaaggaaagaaggccaagggaaagaaggtggctccggcccctgctgtcgtgaaaaagcaggaggccaagaaagtggtgaatcccctgtttgagaaaagacctaagaattttggcattggacaggacatccagcccaaaagagacctcacccgctttgtgaaatggcctcgctatatcaggttgcagcggcagagagccatcctctataagcggctgaaagtgcctcctgctattaaccagttcacccaggccctggaccgccaaacagctactcagctgcttaagctggcccacaagtacagaccagagacaaaacaagagaagaagcagaggctgttggcccgggccgag

SEQ ID NO: 44795 - DNA, 369 bp, Gossypium hirsutum
  Clone ID: LIB3196-006-P1-M1-B9
cggacgcgtgggaactcgacattctagatttggaattttggtgttgattactgatgtaaatggtcatttttcagcctttaaaacactccttttgagttgcccaaagttgtccccacaattgtcaccgttggtggtggttgtggcccaaaaatctttcctttttgtgactatcgatttgagttttatttagtaaagtatgctgctgttccagccttgatttttttttcaagcttaaaacagtcccttatcatcctttaaacaaatatttttggtgtttctcaaaatagtcccttcgtagccaattttgttgatgtgttgctcctagatctaccattaggggctgccgatttttattatttttaccactta

SEQ ID NO: 44796 - DNA, 402 bp, Gossypium hirsutum
  Clone ID: LIB3196-006-P1-M1-C1
atggaggtgtctaccaacactgccatgattcagaccagcaagacagagatcacggagctcaggcgcacgctccagggcctggagattgagttgcagtcccagctgagcatgaaagccgggctggagaacacggtggcggagacggagtgccgctacgccctgcagctgcagcagatccaggggctcatcagcagcatcgaggcccagctgagcgagctccgcagcgagatggagtgccagaaccaggagtacaagatgctgctggacatcaagacgcggctggagcaggagatcgccacctaccgcagcctgctcgagggccaggacgccaagatgactggtgttccttcctcagcaggaagcgtcagcccccgaagcacctctgttaccacaactttcagt

SEQ ID NO: 44797 - DNA, 393 bp, Gossypium hirsutum
  Clone ID: LIB3196-006-P1-M1-C10
atcccaccctgcagaacgtggcccaggcctcgcctggcgccagcacaattgtgacagtgcccacaggggctgcccccgggcccgaggagcacacggccaccattgaggtggctgccgtggcagaggaccacgagcggaagtagccgacgggagggcgaggcccctgggacggacggggctggctgcctctcagctgcggcagcagggaacgggcagaggccgcagggctggctcgggcaggtgcgtcacgtgggctgcagaaccaaagagaggaatcgccaaaacaaatcacgagaagagagaaggggacagaacagcgagagcaacctggaaatcggtcttcaggtcccacgtttcccccccttttttcttgggaaatatatttttccatct

SEQ ID NO: 44798 - DNA, 387 bp, Gossypium hirsutum
  Clone ID: LIB3196-006-P1-M1-C11
atggccaggaccgacctggagatgcagatcgaaggcctgaaggaggagctggcctacctgaggaagaaccatgaggaggtgcggttgctgctggcttccggggtgggaggctggtttggtggggttgccagatgcacccagggccaggagaggagtctgctgagctgactgcctcctgccatcccttcccaggagatgcttgctcttcgaggtcagagcggtggagatgtgaacgtggagatggatgccgcacctggcgtggacctgagccgcatcctgaatgagatgcgcgaccagtacgagcagatggcagagaaaaaccgcagagatgctgaggcctggttcctgagcaaggtggggctcgggccctcagtgagcctgtagcac

SEQ ID NO: 44799 - DNA, 391 bp, Gossypium hirsutum
  Clone ID: LIB3196-006-P1-M1-C12
atcgcctcgtgttctcttcgcaggcagctacgtcagcgaccccagcaacacggccaacgtctccacttctggtctggaggtctacccttcgcgcacgcagctgccgggtctcctgccccagcctgtgttggccggcgtggtgggcggggtctgcttcctaggcgtggccgtcctcgtgagcattctggccgcctgcctcatgaacaggcgcagggctgcccgccgccgccgcaagcgcctccgccaagatccacctcttatcttctctccgaccggaacatcagctgcaccctctgctctgggctcaggcagtcctgacagcgtggcgaagctgaagctccagggttccccagttcccagcctgcgccacagtctgctctggggggatcct

SEQ ID NO: 44800 - DNA, 370 bp, Gossypium hirsutum
  unsure (1)..(370): unsure at all n locations; Clone ID: LIB3196-006-P1-M1-C2
aagaaatcaggctgttcaacagtgttactaccagcaaaggttgttcaagctctaaatctcaacttcgatgataccaaaaaccatgttcaacctcaattcaatcccacttttgcatcaaactatgatgctttggtagcaagaagaaatgcactgttgacacaagcaagaagaaattatagaccagatggaagcttaaacttgcctcaagaatggacttactgaaaatttagtccaaattttgtccaaattttctctcaaaatagtgtttattttgatggaaaaagatagtagggtagtagcttttatgatagggtatatggtattttggnttatatatatatatatatatatataaagaagaattcaagaa

SEQ ID NO: 44801 - DNA, 343 bp, Gossypium hirsutum
  Clone ID: LIB3196-006-P1-M1-C3
gaaattgtgaaggaagtctcctcatatcttaagaaagttggttacaaccctgacaagatcccatttgtcccaatctctggatttgagggtgataacatgattgagaggtctaccaaccttgactggtacaagggtcccactctccttgaggctcttgaccagatcaatgagcccaagaggccttcagacaagccacttcggctcccacttcaggatgtctacaagattggtggcattggaactgtccctgttggtcgtgttgagactggtgtccttaagcctggaatggttgtgaccttttgcccctctggtctgaccactgaagttaagtcttgtgagatgc

SEQ ID NO: 44802 - DNA, 372 bp, Gossypium hirsutum
  Clone ID: LIB3196-006-P1-M1-C4
cggacgcgtgggcttcaaagaacgctggtaccatcaaaaccagctagctaaatcaaccgcatttcaccaggatggctagagggttgaagaaacacttgaagaggctcaatgcccctaggcattggatgcttgacaagcttggtggtgcttttgcacccaagccatcatctggaccccacaaatccagggaatgcttgccattaattctcattctgcgaaacagattgaagtatgctctcacgtacagagaagttattgctattctcatgcagaggcatgtcatggttgatgggaaggttcggaccgacaagacttatcctgctggtttcatggatgttgtgtcaattcctaaaaccaatgaggacttccgtc

SEQ ID NO: 44803 - DNA, 379 bp, Gossypium hirsutum
  Clone ID: LIB3196-006-P1-M1-C5
ctttcccaaccaagaagagcagccgccgcagagcaaagggttcagagaggaaatggcagcaaaaaggaagacccctgttaagacccgaaacccagatcttatacgtggcgtaggcaagtattccaggtctaagatgtaccacaagcgcggcctttgggctatcaaggccaaacacggtggcgtcttcccccgccatgaccccaagcctaaagcacccgtcgcccccgagaaggctcccaaattttaccccgctgaagatgtcaagaagccgctacttaataagcgcaagcctaaacccaccaagctcagagcaagcattactccagggacagtcttgattttgttggctggaagatttatggggaagagaattgttttc

SEQ ID NO: 44804 - DNA, 317 bp, Gossypium hirsutum
  Clone ID: LIB3196-006-P1-M1-C6
gttctagatcgcgagcgccggccttgtttttttttttttttttttttttttttttttttttttttttttttttttttttttttttttttttttttttttttttttttttggaaaagggaaaaaagaaaaagttttttaattttttttaaaaaaaaattaacttaatttggcaaccaagcacaggttaaaacctaactaaagggtggaaggttgttaataaattgggcgaattctttttaaaaggaataaacctttccaatgcttttacaaaaaataccttatggttgggatttatgagcattttaattgaagttttt

SEQ ID NO: 44805 - DNA, 382 bp, Gossypium hirsutum
  Clone ID: LIB3196-006-P1-M1-C7
cccacgcgtccgccccaactgaacggctttgagacccagtctcagtagtaggcgaaaccgtcgtcttactcatatccaagcttggcatactgcccagagaggaacactcagctcgagccccctacagcctctaccacggctgcaagttccacgtgtgctcattgtgtatttcaatttttatctatattataaagttttatgcatcaattctagtgtttattagtagatattttatgcataaattattagtaattcagaagtgtttcagagatttcagtctctatctagctctgtatagtttcagaaagtactaactacagtgtgtccaaaatattcttatcaaagctcaaaaatatttatagaatcagcgttggagactttg

SEQ ID NO: 44806 - DNA, 376 bp, Gossypium hirsutum
  Clone ID: LIB3196-006-P1-M1-C8
atgtgaagcaagtacgatatggtaaatttgtgcatatgaaattatccgtttagctatatgaatgctatacttttgttgtgctggaattccttgctcaaaacttactaagcataaattgcttactccgtttcattgctcctctgttttatagatttggttctccagctatcggactcgggatctttaggtcaaagtcgcccacactatcaaagctcccttttggtacaattttggttgaacttcgaaatggcatgtataggactacccgtttgttgtgggtcgtggaccctttggacttgtataaattttggatagccatgcgaaaatggcttatatgtgtttgagtatattgttataatcaattggtgtggatatg

SEQ ID NO: 44807 - DNA, 377 bp, Gossypium hirsutum
  Clone ID: LIB3196-006-P1-M1-C9
cccacgcgtccgatttcccttcttcaccacatgatcaaaacccaaccttcgttttcacccgaccgatcaactcaccacgtcttgctctcacaatcttgcaaagcacccgattcctccctctccgccgttaaccaaatcctcaacctaatgatcaataacgggctaaaacctaatcaggtcaccaccgatattgctatccggtcgctttgtgaagttgggcgtattgatcatgctgttgaattggtaaaagaactttctttaaaacaatctccgcctgataattatacgttcaatttgcttgttaagaatttatgcaagtgtagaactttaagtacggtttacagttttattgatcatatgaagagttcttttggcat

SEQ ID NO: 44808 - DNA, 301 bp, Gossypium hirsutum
  Clone ID: LIB3196-006-P1-M1-D1
gttttgtatttcatactcatttagcccctttcattagcatcgaaatcactccagttttctttatcactgaaaaatgtcttgctgtggtggaaactgtggctgcggttctggctgcaagtgtggcagtggctgtggaggatgcaagatgtacccagacctgaacgttgccgtgatgaccacaactgagactctggttcttggtgtagcaccccagaaagcacactttgagggagctgagatggaattcggggctgagaacggctgcaagtgtggagacaactgcacctgcaacccttgcaat

SEQ ID NO: 44809 - DNA, 395 bp, Gossypium hirsutum
  Clone ID: LIB3196-006-P1-M1-D10
atgtactaagcacaagacaattctggaggcccgaagtgggctggggcccatcaaagcttaccctcggctggggcctcccaccccgggggaaccagaggctcctgcccaggaccgaactttccactgtgagatctgcaatgtcaaggtcaactcggaggtccaactgaaacagcacatctccagccggcggcaccgagacggagtggccgggaagcccaacccactactgagccgtcacaagaagtctaggggcgccggggagctggcgggcacgctgactttctccaaggagctgcccaagtccctggcgggcggccttctccccagccccctggcggtggctgcagtgatggcagcggcagcaggctcgccgctgtccctgcgcccggctccag

SEQ ID NO: 44810 - DNA, 376 bp, Gossypium hirsutum
  Clone ID: LIB3196-006-P1-M1-D11
ccggaagacgtcgcagccgcagccctagatatcgtaggagcccaagctatgggcgcagaagttacagtcctcgtggacgatcccctaggcgtcgcagtccctctcctcgtggtcgtagctacagcaggtctccaccataccgtggtcgtgaggaattgccatatgctaatggaaatggtgcaagggaacgccgacggagcaggagttaagtgctgcaaggatgtaactcttatgtgaagggactgattaagtgtgtttagtttgttgacttcagtgctactgttttaattgggcaacgcccgcagcatcttggatttggttaagttactttctgtttttccttatttctatgatggttttatttgctttatctatg

SEQ ID NO: 44811 - DNA, 361 bp, Gossypium hirsutum
  Clone ID: LIB3196-006-P1-M1-D3
atgggttttccactggatatggggctgctgttaaaactggcaaggtcaaacctggttccacttgcgtcgtctttggcctgggaggagttggcctgtcagtcatcatgggctgtaagtcagctggtgcatctaggatcattgggattgacctcaacaaagacaaatttgagaaggccatggctgtaggtgccactgagtgtatcagccccaaggactctaccaaacccatcagtgaagtgctgtcagaaatgacaggcaacaatgtggggtacacctttgaagttattgggcgtcttgaaaccatgattgatgctctggcatcctgccatatgaactatgggaccagcgtggtagtaggagc

SEQ ID NO: 44812 - DNA, 382 bp, Gossypium hirsutum
  Clone ID: LIB3196-006-P1-M1-D4
cggacgcgtgggcgcattctttcacgggataaactgaaattgagtcgaacggcgggattgaaggggaagaagaagggagttaccttcactatcgattgttcgaagccagtggaggataaaatcatggacattgcccctctggaaaagttccttcaagagagaatcaaggttggaggcaaggctggtgcacttggtgaaaccgtagccctcactcgcgagaagagcaaaattaccgtcacttccgatggcgacttctctaagaggtatctgaagtacttaacaaaaaaatacttgaagaaacacaatgtacgggattggctccgagtaattgcttccaacaaagatcaaactgtttacgagttaaggtacttcaacattgctg

SEQ ID NO: 44813 - DNA, 395 bp, Gossypium hirsutum
  Clone ID: LIB3196-006-P1-M1-D5
ataaaaataaagtctctagtaattgaaaactatatctaggggttataaccactcactgaaaaaaaaatacattttaaattaaaatttctttttttagatagctgacattaatttgtatcattttctttcaaatacagatatgtaatgggaaataatccagctgaccttctagctgtcgatccaagaacaggcataatcactttgaaaaataaagttaccagggaacagtataatatgctcggaggaaaataccaaggaacgattctctctagatgatgctcttcaaagaacttgcactggtacaattaatattgacattcaaaatgttgatggagatgacaggactaatacacaggcgagcactgaagttaccaatactggcagagaagaaagta

SEQ ID NO: 44814 - DNA, 381 bp, Gossypium hirsutum
  Clone ID: LIB3196-006-P1-M1-D6
cagaaagtccgacggttccgccagggtgacatcattgctttgccgcagggtgtggttcactggagctacaatgatggcaatgagcgtgttgttactatcaatctacttgacactggcaacagtgctaatcagctcgacaacatccctagaagattccatcttgctggtaacccagaagaggaacagaggcaactgaggaggctagcacagcagatgcagggaagaagtgagaggggggaggagtctgaggaagaagaaggagaaggagaagaagaagaagaagaagacaaccccagccgccgcagccgccaccaggaggaggaggagcaggggcgggaaagctcatcatgcaacaaccttctctgtgccttcgacagaaac

SEQ ID NO: 44815 - DNA, 243 bp, Gossypium hirsutum
  Clone ID: LIB3196-006-P1-M1-D7
atccgctccgggcgggtcccaaacacggttttcccgcggcagaacccttggcccgcccggggcagccgccgcccgaacccccgggttccggggggcattgagggggcatgggaaggggcactgttcctcggccattacttaaagaaacgggacaatccggccttcccgccggccctccttttcttgtgccggggcccgcgcaattctgcgacagagggacagtcgccccaatatgtaaagacc

SEQ ID NO: 44816 - DNA, 386 bp, Gossypium hirsutum
  Clone ID: LIB3196-006-P1-M1-D8
atgtcagccgcattttctcttgcatcgccagcgcatccctgagacaccatggggaaggtgaaggtcggagtcaacggatttggtcgtattgggcgcctggtcaccagggctgcttttaactctggtaaagtggatattgttgccatcaatgaccccttcattgacctcaactacatggtttacatgttccagtatgattccacccatggcaagttccatggcaccgtgaaggctgagaacgggaagctcgtcatcaatggaagccccatcaccatctttcaggagcgagatccctccaaaatcaagtggggcgatgctggcgctgagtacgtcgtggagtccactggcgtcttcaccaccacggagaaagctggtgctcatttgca

SEQ ID NO: 44817 - DNA, 380 bp, Gossypium hirsutum
  unsure (1)..(380): unsure at all n locations; Clone ID: LIB3196-006-P1-M1-D9
attatttnccttaaaacaaaaggagtttttttaagaaaaattttccctcaatcctcttactgccctctttcccttcgatcgatctacgtgcgacggtggcaccaaacacacctactccgtcatggtttaagtcgaatcctcaagatccatctacctttggaccggtgaaacaaccaccgactagatctgcgcagatcgataggtaagagatctttctttttcctttgtatttgctatgtcgatttcttctaaaaaaatgatctaggatcctttctctttttttaatatccgtgtatacggattgaggaaataaaaacaaaaatcaaagaagaaaacgatctaaaatccncttaaaaattgatttcgaattgatttttctc

SEQ ID NO: 44818 - DNA, 380 bp, Gossypium hirsutum
  Clone ID: LIB3196-006-P1-M1-E11
accatgtcgccccaaaatgaatggtagagtggagaaaaaaaacaaaaaacaaaaaacaaaaacaaaaacaaaaaaacaagaaaataaaaaacaaaaaaaacctctaccggggcaactcatttctcattggtatatggaatagagacaattttacccgtcgaagttgatattccttcccttcgagtcttgttagagctaaagttggatgaagcagaatggatccaagcccgatatgatcagttaaatttgattgaagagaaaaggttgaaagctatccgtcatggtcaaatataccaaaaacaaatgatgcgagctcaccaaaaaggttcaccccagtgaattccatgaggtggacctgatatcgaagaagatccttccca

SEQ ID NO: 44819 - DNA, 374 bp, Gossypium hirsutum
  Clone ID: LIB3196-006-P1-M1-E12
aacacgtagatatggcgattaacccttctttgctctttctttcccttctttttctcttcaatggctgcctagctcgccagaccttttcgtcacagcagtcccaaaatgagtgtcaaatcaataggctccgcgcctctgcaccccagacccgaattcgctccgaagccggcaccaccgagtggtggaaccccaactgtcaacagctcaggtgtgctggtgtatctgtaatgaggcagactattgaacctaatggccttgttttgccttccttcaccaatgctcctcagcttctctacattgtccaaggaagaggtattcaaggtattgtgatgcctggatgtgccgaaacattccaggattcacagcaatggcag

SEQ ID NO: 44820 - DNA, 343 bp, Gossypium hirsutum
  Clone ID: LIB3196-006-P1-M1-E2
ataaaaacaggggagcttgtgactttatccgaacaagagctggttgattgtgataaggagaaccaaggttgtgagggaggattgatggaacaagcatttcagttcatcaagcaaagtgatggaataacaactgagaattattatccctacagagccaaagatgagtcttgtgactcatccaagttgaatggtcctgtagtgatcattgatggctatgaaatggttcccgaaaaggatgaaaaagctctaatgaaagctgttgcaaaccaacctgtgtctattgctatagatgctggtggtacggatttccagttctactcggagggagttttcattggagact

SEQ ID NO: 44821 - DNA, 370 bp, Gossypium hirsutum
  Clone ID: LIB3196-006-P1-M1-E3
atccctccttggcaccatgaccacctgcagccgccagttcacctgctccagctccatgaagggctcctgcggcatcgggggcggcatcgggggcggctccagccgcatctcctccgtcttggccggagggtcctgccgcgcccccagcacctacggcgggggcctgtctgtctcctcctcccgcttctcctctgggggagcctatgggctggggggcggctatggcggtggcttcagcagcagcagcagctttggtagtggcttcgggggaggatatggtggtggcttgggtagtggcttgggtggtggctttggtggtggctttgctggtggtgatgggcttctggtgggcagtgagaaggtgaccatg

SEQ ID NO: 44822 - DNA, 380 bp, Gossypium hirsutum
  Clone ID: LIB3196-006-P1-M1-E5
attttaacaaaaaaacagcagccctgggattaaatttgcttgggttcttagtgtttgccgaatcccccattttgcttggtaaacggcgatggaccaacatcgatcaaattcaatgcgcgcccatataaaatcgaggaggcgtgtgaaggaggccgcgcgaggagccactcgtgggagtcccaattctctggcctattctggcacgttccagaagcttctagtgctgctgagataattttgggtgtattgggcctcgggttttaaggcttattgggattgattctagggttgtgggtttattttagtattttgaaaattgtaaatggactttttgaactaattagtcttggaccttatttatttatttgggtttatttatt

SEQ ID NO: 44823 - DNA, 382 bp, Gossypium hirsutum
  Clone ID: LIB3196-006-P1-M1-E6
aaagcattcttctccactcaggccggaaaacagaaccctccatttccatctttcaaagccgcgaaatacgccataataaccgagaaggaccctgaaaagctagcggaaatcttcgaacaatgttcccatttgcccactttcctccgccaccgccccatctaccacctctccatccgcaagctagcccgtgccaaccgcctcgacctcgtcgaccggctcctcgagacccaaaagctccattctcaagacacccctgcgctcaaatccgaaggtttttggattcgtctcattatgctttactcaaacgctgggatggttccacaagcactccaaacgctcgacgatttgtctagaaacaggtattgtaatatatctgaaaaat

SEQ ID NO: 44824 - DNA, 390 bp, Gossypium hirsutum
  Clone ID: LIB3196-006-P1-M1-E7
atgtttgctgtgatgtttggggatgtgggccacgggctgctcatgttcctcttcgccctggccatggtgcttgcggagaaccagccggcagtgaaggccgcgcagaatgagatctggcagactttcttcaggggccgctacctgctcctgctcatgggcctgttctccatctacaccggcttcatctacaacgagtgcttcagtcgcgccaccagcatcttcccctcgggctggagtgtggccgccatggccaaccagtctggctggagtgatgcattcctggcccagcacgcgatgcttaccctggatcccaacgtcaccggtgtcttcctgggaccctacccctttggcatcgaccctgtctggagcctggctgccaaccacttgagc

SEQ ID NO: 44825 - DNA, 399 bp, Gossypium hirsutum
  Clone ID: LIB3196-006-P1-M1-E8
atgccggcgcggcgctcccctgctctctggctccgggctgcggcgccgcggctggagcgagcccctgtcccggcgcggggcggcggcgggcggccggcaggcactgccttgcgtgtgagtgcacctcactcacatgtgctggagaatctggtaaaagcaccattgtgaagcagatgaggatcctgcatgttaatgggtttaatggagacagtgagaaggcaaccaaagtgcaggacatcaaaaacaacctgaaagaggcaatcgaaaccattgtggccgccatgagcaacctggtgccccccgtggagctggccaaccctgagaaccagttcagagtggactacattctgagtgtgatgaacgtgcctgactttgacttccctcccgaattctacgagc

SEQ ID NO: 44826 - DNA, 382 bp, Gossypium hirsutum
  Clone ID: LIB3196-006-P1-M1-E9
agccataaccctttccacttgcatcgcagatcattccaatctcgattcagggaagaacatggcaatttcagggtcctccaaaggtttgcttcaaggcatcctattcttaggggcatcaatgagttccgcttatctatcttagaagcaaaccccaacactttcgttctcccacaccattgtgacgctgagaaaatttaccttgtcaccaacggaagaggaacgcttacgttcttgacacatgaaaacaaagagtcttacaatgtagtaccgggagttgtagtcagagtcccagcaggaagcactgtgtacttggctaaccaagacaacaaggaaaagctaatcatagcagtgcttcaccgccctgttaataaccctggacaat

SEQ ID NO: 44827 - DNA, 377 bp, Gossypium hirsutum
  Clone ID: LIB3196-006-P1-M1-F1
ccttcaccaatttttacaatctccaacaatagaagtgagtagtggatttcatagggaagcgtattgatgctgatagaatgaggattagcaatttgtaatctgtcttggtaccaaagaaaataattttttgaagtttgtggtgtacttccatggtgtgtgtaggggtttatttatagtgttaaaaaaaaagttcagtgaaaaattaaacttataaaatttgatttttttaaaacttatcaggtatatttaaaacttttttttattgaaataacttatccgtataataaattaggctaaaaataaatcatgttatattaatattttaaagatttactaatatctattttatcaatataaattttttagtattttataaa

SEQ ID NO: 44828 - DNA, 391 bp, Gossypium hirsutum
  Clone ID: LIB3196-006-P1-M1-F10
atgcagatgaaataaatacttcatcctgctctggaaacgactgcaatgacattattcccagtgctgttgttcctggttgctgggctgcttccatccttcccagcaaatgaagacaaggatcccgcttttactgctttgttaaccacccaaacacaagtgcaaagggagattgtaaataaacacaatgaactgaggagagcagtctctccacctgccagcaacatgctaaagatggaatggaacaaagaggctgcagcaaatgcccaaaagtgggcaaaccagtgcaattacagacacagtaacccaagggatcgaaagactagtctaaaatgtggtgagaatctctacatgtcaagtgcccccaattcatggtcacaagcaatccaaagct

SEQ ID NO: 44829 - DNA, 377 bp, Gossypium hirsutum
  Clone ID: LIB3196-006-P1-M1-F11
ctcccctcgttgttcatcaatcccttcatctaaatctaacccctagttaagttctctgactattgaagaaatttgaattccttaattatcattcaatttatcagttcatattaaatattcttccggataaaaaaaaaagaacaacacttgctatggcttctttgcaaaggtcagcgagttcatccgattcggatccgcagtacgcaaacatcgatgagaggaaaaggaagagaatgctatcaaaccgtgaatcggcaaggcgatcaagaatgaggaagcagaagcggctccaagatttggttcaggaagtgaacgcattacagaaagataacagtcagatctctgaaaagatcggcgtcgccacccaatactacatc

SEQ ID NO: 44830 - DNA, 377 bp, Gossypium hirsutum
  Clone ID: LIB3196-006-P1-M1-F12
ctagatttcaccccttaggtttctctttcctcacagagacagagagagaatcagaggagcttaatcgagatttgatattcctcaccacagatggatcagatattgaacaaggtgggctcctattggctcggccagaaggccaacaaggagatcgattccgtcggcgacgacctcaactcattatccaccagtattgaagggggagccaaatggttggttaataaaatcaaaggaaaaatgcaaaagccgttgccagagctgttaagagagtataacctgccaataggaatcttccctcgtgatgccacaaattatgaattcaatgaagagactgggaagctcactgtttttattccagcaatatgtgaagtgggata

SEQ ID NO: 44831 - DNA, 398 bp, Gossypium hirsutum
  Clone ID: LIB3196-006-P1-M1-F2
atcaacaatcggactcatagcaaagagtgttgaaatcccaactactaaccttcactcaaatgtaattccaagttgtgaacctcagagtttggtggaaaatctaacacagaagttaaataatgttaacaatcagttatttatgactgatgtaaaagagaatttcaaaaccagtattgagtcccatacagtgttagcccctttaacattaaaaactgaaaatggtgattcccaaatgatggctttgaattcatgcacaacttcaataaattctgatttgcagatttctgaagacaatgttatacaaaactttgagaagactcttgaaattattaaaactgctatgaattctcaaatacttgaggtaaaaagtggatctcagggtgctggtgaaacatcac

SEQ ID NO: 44832 - DNA, 375 bp, Gossypium hirsutum
  Clone ID: LIB3196-006-P1-M1-F4
aataaatcgtccggttcagagtcggggaacaagtgaaatctaggtggattcctccttgggtgtcgtctttatcaattgcttttcttcaagtctttttccaaactttctctttgctttaattaaatcagttaattagtttaaataattagttattaaaacaaacccttttattcttaggctagataataaaaagatatttattactagtacttttggttcccttgggtacgatatcccggtcttgccattgctatactattgttcgataggtgcgcttgccttttccttgtgataatagttagtctaggtttgatcttcattataaatatttattacttgttacgaatcacgtgatcaggttgtcattcacgtact

SEQ ID NO: 44833 - DNA, 380 bp, Gossypium hirsutum
  Clone ID: LIB3196-006-P1-M1-F5
gttccaagagtccaatcagaacagacgttgctctcctttggttagagtcgagaaaatgtttgaggatatccaatctaaacttcctggagctccacagtttcttctttgtcttttacctgataggaaaaattctgatctttatggtccatggaagaagaagaatctttctgagtttggcatagtcactcagtgcatggctccaactagggtcaatgatcagtaccttacaaacctgcttctaaaaatcaatgcaaagcttggaggactgaattccatgctagcaattgagcaaacaccttcaattccagttgtttcaaaggttccaaccatcatccttggcatggatgtgtctcatggctctcctgggcagtctgatattc

SEQ ID NO: 44834 - DNA, 398 bp, Gossypium hirsutum
  Clone ID: LIB3196-006-P1-M1-F6
atggctgaaggggacctcaccccagacgaggtggtggccctagtggcccagggcctgcaggagggggagcgagacttcggggtcaaggcccggtccatcctgtgctgcatgcgccaccagcccaactggtccctcgaggtggtggagctgtgtaagaagtaccagcagcagactgtggtagccattgacctggctggagatgagaccatcccaggaagcagcctctttcctggacatgtcgaggcctaccaggaggctgtgaagagcggcattcaccgtactgtccacgctggggaggtgggctcggccgaagtagtaaaagaggctgtggatatactcaagacagagcggctgggacacggctaccacaccctggaagaccaggccctttatgacag

SEQ ID NO: 44835 - DNA, 399 bp, Gossypium hirsutum
  Clone ID: LIB3196-006-P1-M1-F8
atgcatcctccatacagaagcacaggacagtggacggggggagcatcctccatacagaagcacaggacagtggacggggggagcatcctccatacagaagcacaggacagtggatggggtgcttcctctttctcccgtggacactatagtctcagcactgtttctggcacaatctgtgttctcaacaaatatgtatagttgactgactaataactatagtgatgaaacccaggatatcttagaagagttgtcagtgatctgtcccttttccctcaaacctcagcctctttcagagcctgagactggattgctccatttcctggtgacaaattaggaggaagaaggaaactgcacatcccccacaatcctcgtctgttttctgtcaccataaaaatacct

SEQ ID NO: 44836 - DNA, 377 bp, Gossypium hirsutum
  Clone ID: LIB3196-006-P1-M1-F9
cttgcttgggctgctttaatggtagtctttacattttccctttcactcgtagtatggggaagaagtgggctctaggggtactcctaattggggttgaggaatcaaaccgtatcaattgttttctagatcgttttgcaaagcctttttttattttaactattttattagtcttcatttcgaaattcttggattctagtggagtaatgtattctatgaataacaccttttcaatcaaaatcaaataaacatttcaataatccccatgttcgtatttcgaaagtaaaagggatccggatgataggcaataaaaaaaaagaattcttcctaaattttctattttgatgaaccagctcttaccagagttatgaacggacaat

SEQ ID NO: 44837 - DNA, 353 bp, Gossypium hirsutum
  Clone ID: LIB3196-006-P1-M1-G1
atcccaggccaagcaagcttctgtctgcacctgctctcaatcctgctctcaccatgagcctccgcctgcagagctcctccgccagctatggaggtggttttgggggtggctcttgccagctgggaggaggccgcggtgtctctagctgttcaactcggtttgtctctgggggatcagctggaggctacggaggcggcgtgacctgtggctttggtggaggggctggtagtggctttggaggtggctacggaggtggccttggaggtggctttggtgggggttatgctggtggctttgttgattttggtgcttgtgatggtggcctcctcactggcaatgagaagatcaccatg

SEQ ID NO: 44838 - DNA, 375 bp, Gossypium hirsutum
  Clone ID: LIB3196-006-P1-M1-G10
tgtcgtccgttcagaaacacattttcaaacctgaaatttccatttgtccattccaagctctcaccaatgggtctctcagttgagaattcggtaacacaatctcatacccgaacccacaaaaccttcctcatcaccaactacatcctcttgggagctgcttccgcctgtatcttcctcatcctctccctccgcttgctcccgtccttgtgtggattcttccttatcctcctccatgtcgtcaccatagccgctgccgtctcgggttgctccgtcgtcacttccgggtccaacaagttctacgcagctcacatggtggtgatggtgttgacatcgatattccagggctcggtttcggtgcttatattgacccgaact

SEQ ID NO: 44839 - DNA, 372 bp, Gossypium hirsutum
  Clone ID: LIB3196-006-P1-M1-G11
cggacgcgtgggcgggccataacgggttacatgaaaatgatgaagagtgcctctgggaaagagcaaacagtgtttgatgctgacaactcgatgaataatatgaaacttccactcatctacctgatggattgcacattgaacgactgcagtttaatcctaaaatcagtaaaccagagggaagtttatcctgctctgatgttattcccagctgaaactgaagcagttatctcttacaatggagatgtgtcagtagctaatataatcaagtttatagctcatcatggaagtaattcccatcatctctatggtgagaaaggaattttattgacgaccgctgaagctgtgaagaatcaggctatactccaggattct

SEQ ID NO: 44840 - DNA, 384 bp, Gossypium hirsutum
  Clone ID: LIB3196-006-P1-M1-G12
atgtttgagacagagcaggccctgcgcctgagcgtggaggccgacatcaatggcctgcgcagggtgctggatgagctgaccctggccagagccgacctggagatgcagattgagaacctcaaggaggagctggcctacctgaagaagaaccacgaggaggagatgaatgccctgcgaggccaggtgggcggtgagatcaatgtagagatggacgctgccccaggtgtggacctgagccgcatcctgaacgagatgcgtgaccagtatgagaagatggcagagaagaaccgcaaggatgccgaggattggttcttcagcaagacagaggagctgaaccgcgaggtggccaccaacagcgagctagtgcaaagccgcaagagcgag

SEQ ID NO: 44841 - DNA, 394 bp, Gossypium hirsutum
  Clone ID: LIB3196-006-P1-M1-G2
atctttgaaggcacaaccatggcacgatctactacctatgtttgtgcctgatggcagtcatcaaaatgccagcccaagtacacaaggcaattcggagccaaaactgagtagggatagctgtgttatttacgtgcactaaacacagagctgagaagaaggagttctaatctccagtccattactgacttacttatagggaacagtcacttacacattttgtgggtcagttttccttgacacataaaggtatttcaaaggttactagtaaacaaccccagcacactttccaaacagtcaaagctgtatgactttccccccttagaggatggagcatggcccaactccacattcttcactacctatcaccttgccattgtggcaggtacacataaat

SEQ ID NO: 44842 - DNA, 345 bp, Gossypium hirsutum
  Clone ID: LIB3196-006-P1-M1-G3
cttaactactaaaaccctaatttttcatttttcatttgagatatatatatgtgtatgtatgtttaattgtatataccatcattttattttctattttgcagttgggcaggagagactgagccagaggttattttccgtgacattgttcaaagacttcgccataaatccactggtatttttgctttattcaaattatttttaacaaaaacgaaaaaaagaagaaggaaattctctaaattatacgagttatatatataatatcaaaataatatttacgtatacaaagccaaatttacagtaataagaaaacctaaaaacgacaagcactttcaaatgaaacgcaag

SEQ ID NO: 44843 - DNA, 392 bp, Gossypium hirsutum
  Clone ID: LIB3196-006-P1-M1-G4
atccacgtgtcgagcaccttgttcctgggggtgttagtggcactgccccccgacctccaggctttcccagttcccaccctgcccctcagagactgaaattacgggtacctgaagatgggagcctctaccttttatccaaaaggtttattccagaaactagtgtacatttctataaatagatgctgtgtatatggtatatatacatatatataaaatatatggaagaggaaaagactggtacaacggaggcctgcgaccctgggggcacaggaggcaggccccaggggtctcacccatgcaagcaggagcagggccttttctggcactgcagttttgttttaaaactggacctgtatatttgtaaagctatttatgggcccccggcaccctcg

SEQ ID NO: 44844 - DNA, 396 bp, Gossypium hirsutum
  Clone ID: LIB3196-006-P1-M1-G6
atgttttaaattctgacctcctgagatactgactagcaaccatggaatgaatgtgtgaccagaaagtggctttgacaccaagtgctgctgtccctttgtaattggcttctaatggattcaaccagaaacaattgataatgtgaatttttgttaattgttcacttgtaggaaaatagaacatgtatcacccttaggtagacatgaacttttcctgcacaaagccttgcttttagagaatgcccaataaggcaagaaaaagcatagtaacttgtgctttgagagctcaatatttgtatcttatcagtacagaagaaatatttctgtgtaacttgatcttctgtctagtacttgtcttataggtaaccaacactgaaaactttgtagtgatgactacca

SEQ ID NO: 44845 - DNA, 377 bp, Gossypium hirsutum
  Clone ID: LIB3196-006-P1-M1-G8
gtagttcctggagttgtagtaagaattccagcaggaagcactgtgtacttggccaaccaagacaacagggaaaagctaaccatagcagtgctccaccgacctgtcaataaccctggacaattccagaaattcttccctgctggacaggaaaatcctcagtcatacttacgaatcttcagccgtgaaattcttgaggctgtcttcaatacacgaagtgagcagctagacgagctgtttggtgggaggcaaagccatcgaaggcagcagggacagggaatgttccgtaaagccagccaagaacaaataagggcattgagccaaggagctacttcaccaagggggaaaggtagcgagggatacgccttcaacttattgag

SEQ ID NO: 44846 - DNA, 395 bp, Gossypium hirsutum
  Clone ID: LIB3196-006-P1-M1-G9
atccagtacgaggagattgcccagaggagcaaggctgaggccgaggccctgtaccagaccaaggtccagcagctccagatctcagttgaccaacatggtgacaacctgaagaacaccaagagtgaaatcgcagagctcaacaggatgatccagaggctgcgggcagagatcgagaacatcaagaagcagtgccagactcttcaggcatccgtggctgatgcagagcagcgtggtgagaatgcccttaaagatgcccacagcaagcgcatagagctggagactgccctgcagcaggccaaggaggagctggcacgaatgctgcgtgagtaccaggagctcatgagtgtgaagctggccctggacatcgagatcgccacctaccgcaaactcctgga

SEQ ID NO: 44847 - DNA, 386 bp, Gossypium hirsutum
  Clone ID: LIB3196-006-P1-M1-H1
attcccgcttctcctctgggggagcctatgggctggggggcggctatggcggtggcttcagcagcagcagcagctttggtagtggcttcgggggaggatatggtggtggcttgggtagtggcttgggtggtggctttggtggtggctttgctggtggtgatgggcttctggtgggcagtgagaaggtgaccatgcagaacctcaacgaccgcctggcctcctacctggacaaggtgcgtgctctggaggaggccaacgccgacctggaggtgaagatccgtgactggtaccagaggcagcggcccgctgagatcaaagactacagtccctacttcaagaccattgaggacctgaggaacaagattctcacggccacagtggacaat

SEQ ID NO: 44848 - DNA, 361 bp, Gossypium hirsutum
  Clone ID: LIB3196-006-P1-M1-H11
ctcggttatgcttctattcggccaagggatgaaacaaacaaacttgatattattatgccattcttttaaatgatttcattatttaaaacttactaagcatcgaaatgcttattctctgttttatagattttgttcgtgaactatcggactcgggagtgtcaaagtcgaagtcatccacactatctaagccactttttggtactcttcagttgaacttgataatggcatgtatagggctgacccttgatgttaattaagtgtcttttggtaatgtatattcgtatagccgtgcgaaaatggcttgcttattttaacattatggtcattttgtatatatgatcttatgacatggttattaagt

SEQ ID NO: 44849 - DNA, 289 bp, Gossypium hirsutum
  Clone ID: LIB3196-006-P1-M1-H12
ataaaagatgcagacttcattaattttattttgctttatcactttctccttgactaaggaaagcctcaggtgttgaaagttagagtaaaaatgcatttgcagcagaggtagaatgaaacatgatttagcttaatttgtgtactggattctacatttaaacattaagttatttaaacctttagttttttagccatatttgtccatttagcagaacttgaaatattcctttggaaattaaaataatttagcaatccagtcacctgcaaaaatttaatatttttgtttactt

SEQ ID NO: 44850 - DNA, 372 bp, Gossypium hirsutum
  Clone ID: LIB3196-006-P1-M1-H3
atgaaatcaacaagcgcacagcagcagagaatgaatttgtgactctgaagaaggacgtggatgctgcctacatgaacaaggttgaactgcaagccaaggcagacactctcacagacgagatcaatttcctgagagccttgtatgaagcagagctgtcccagatgcagacccacatctcagacacatccgtggtgctgtccatggacaacaaccgcaacctggacctggacagcatcattgctgaggtcaaggcccaatacgaggagattgctcagaggagccgggctgaggccgagtcctggtaccagaccaagtacgaggagctgcagatcacagcgggcagacatggggacgacctgcgcaacaccaagc

SEQ ID NO: 44851 - DNA, 325 bp, Gossypium hirsutum
  Clone ID: LIB3196-006-P1-M1-H4
atgccaaagtggcctccaagaatgtcatccctgccttggaactggtggagcccattaagaagcacgaggtcccagcaaagtctgatgtttactgtgaggtgtgtgaattcctggtgaaggaggtgaccaagctgattgacaacaacaagactgagaaagaaatactcgacacttttgacaaaatgtgctcgaagctgccgaagtccctgtcggaagagtgccaggaggtggtggacacgtacggcagctcaatcctgtccatcctgctgcaggaggtcagccctgagctggtgtgcagcatgctgcgcctctgctcttgcacgcg

SEQ ID NO: 44852 - DNA, 378 bp, Gossypium hirsutum
  Clone ID: LIB3196-006-P1-M1-H5
gatttgagtgatgttcccgtttgtttcttttgaaaataaactcattcaggattctaaacatataaatttaagtccttatttttattcaatttttgatgattttccaaagtcagaacaagggaacccgaaatcattctgaccttgtctcacaaaatttattatatctcatgatttacaattccattgtttacatcatttcttctataagaaattagactcaataagatttaatttcatgttttattcatcctctaattcgatttctattttttggtgatttttcaaagtgatacaactgctgctgtccaaaattgttttatgcaagatgttaactaccatttttgcctcttaagctttaataagtgacaatttcatcac

SEQ ID NO: 44853 - DNA, 353 bp, Gossypium hirsutum
  Clone ID: LIB3196-006-P1-M1-H6
ataaaagatgcagacttcattaattttattttgctttatcactttctccttgactaaggaaagcctcaggtgttgaaagttagagtaaaaatgcatttgcagcagaggtagaatgaaacatgatttagcttaatttgtgtactggattctacatttaaacattaagttatttaaacctttagttttttagccatatttgtccatttagcagaacttgaaatattcctttggaaattaaaataatttagcaatccagtcacctgcaaaaatttaatatttttgtttacttactgcttttattctagttggtagatcttaaggccgaactcttccgaaagcaagaagaattcaaa

SEQ ID NO: 44854 - DNA, 378 bp, Gossypium hirsutum
  Clone ID: LIB3196-006-P1-M1-H7
ctctattcggccaaagttccaattctaatacagttccccaggatatcaacttgaatgcaggcttaatggatgatgataataactgtcaagatacagaacagtctaatctgtataagcctagtggatctcaaaatgagcggatttcagcttttactggtcccgaagcttttcttctttcatctggaagtggtgggtatgtcatgggtgataatgatagaagacctgtttgcccttatgagggccgtcgtgcatcctgcaaaagaaagacacttgaaggaaatgttgggcagtcctcatcaagtggaagttctagctactttcatcgaggtgaaaatagtgggtgccgtggacttcctgttagctatagcactggaagta

SEQ ID NO: 44855 - DNA, 379 bp, Gossypium hirsutum
  Clone ID: LIB3196-006-P1-M1-H8
cattcgagtaacccaaaatttcgtagctggatccgcctccgcctccgaacagttgtcaccggaatcggaaattcagataagtgaagatgaatggagaagtccccaacataaagaaatgggttgttttctatcctgtttatattaattcgaagaaaacagtagctgagggaaggcgaatcagtttggctaaagcctgtgaaaatcccacttgtgttgaaattgctgattgctgcaaccatctcaaagtccctaatgccattgagattgataaggcgtaccctcgtgatttcatgcaaagagggagagtgagggtccagttgaaaaaggaagatgggactttatggaatccagccatttcttcaaggaagcagctgatgct

SEQ ID NO: 44856 - DNA, 377 bp, Gossypium hirsutum
  Clone ID: LIB3196-006-P1-M1-H9
agaacttatgcctatatggacttccaaatgaaacctgggaagttaacttgcctgttgaggaggtgcctcctgagcttccagagccagcattgggcataaactttgctagagatggaatgcaggagaaggactggctatcattggttgcagttcacagtgattcgtggttgcttgctgttgctttctattttggtgcacgatttgggtttggaaagaatgagaggaaaagactcttccagatgataaatgaccttccgaccatatttgaagttgtcacaggaaatgtcaagcaactgaaagaccaatctgcgaatcacaatggcagcagcaaaagcaaatcaagtgctaagtctcgccaatctgaaccccagagtaaa

SEQ ID NO: 44857 - DNA, 289 bp, Gossypium hirsutum
  Clone ID: LIB3196-007-P1-M1-A1
atcatcttatcccctttccttctactttgaatagccaaggcgatttggctttggttcatcacagatcgatcgtgaagtctctcccaccaggtgcttccgctgcaaacagatatgcaacattgtcatgaaggatcgattttgcttcaacgattctaccctcctcattcttaacaataagacctgatgcagatctgtggttctgtgagtcaaaagctgcatcgaaaaagatggacttatttgccccttgtacactctgtctaggccttgcgctgacttccaagcgattacc

SEQ ID NO: 44858 - DNA, 403 bp, Gossypium hirsutum
  Clone ID: LIB3196-007-P1-M1-A10
attgcaaactctcttacttgagctgaatatttagtgtaattacatctcagctttgagggctcctgtggcaaattcccggattaaaaggttccctggttgtgaaaatacatgagataagtcatgaaggtcactatcatcctccttctgcttgcacaagtttcctgggccggaccgtttcaacagagaggcttatttgactttatgctaaaagatgaggcttctgggataggcccagaacttcctgatgaccgcgactatgagccccctttaggcccaatgtgccccttccgctgtcaatgccatcttcgagtggtccaatgttctgacttgggtctggacaaagtgccaaaggatctttccccttgacacaactctgctagacctgcaaaacaacataataact

SEQ ID NO: 44859 - DNA, 159 bp, Gossypium hirsutum
  Clone ID: LIB3196-007-P1-M1-A11
ctttaaccttgcaggtgggccttgatgtgagcgtcttgtaccactggtgaattacatttacatttacccttgagtgacccttgcttttgggtttttctttattctcctttccgaggctgatcaagggcattgaatgaatggttattttgttttcttggt

SEQ ID NO: 44860 - DNA, 386 bp, Gossypium hirsutum
  Clone ID: LIB3196-007-P1-M1-A12
gctgtttttgccattactaatgctttagagaagcacaggaaattatcatctgggcagcctgctgataatggagataatggtgaactcttagttgaggagaaacaacctgaggatatcaaaagttctttcgagaatggaaatctcgaggtgaaatcttatcctcaattggtaaaactatgtgaagaaatggactctgaaggactacagaagtttatttcagataatcgtaagaaccttgctgctctgaaagaggaaattccttgggcgttgaaagctgcagcaagtccagctcgcttggtcctggaatcgttggaaggattttacccttcagaagttgatggaaagaaagatgcaaacctattggggcttatgcgaacttgtattat

SEQ ID NO: 44861 - DNA, 325 bp, Gossypium hirsutum
  Clone ID: LIB3196-007-P1-M1-A2
atggacaatgccaacgtccttctgcagattgacaatgcccgtctggccgcggatgacttccgcaccaagtatgagacagagctgaacctgcgcatgagtgtggaggccgacatcaatggcctgcgcagggtgctggatgaactgaccctggccagagctgacctggagatgcagattgagagcctgaaggaggagctggcctacctgaaaaagaaccacgaggaggagatgaatgccctgagaggccaggtgggtggagatgtcaacgtggagatggacgctgcacctggcgtggacctgagccgcattctgaacgagatgcgtg

SEQ ID NO: 44862 - DNA, 404 bp, Gossypium hirsutum
  Clone ID: LIB3196-007-P1-M1-A4
attgaccagggaacaggacagagcccaccagaccagcgagactgtgactggatctggaactcagacccaggcaggtgccacccacactgtggagcatgacagcagccaccagacaggaagcaccagctcccagacacatgggtccaccaatggccagaacagtgggactgagatccacggtcaaggcaggagccagaccagccaggctgtgacaggacatgctcagatacaggcagggacacacaccctgacacccacccagaccagggagcaagacagcggccaccagacagaaagcaccagcacccagacacaggggtccaccaatgaccagaacagggggactgagatccaaggtcaaggcgggagccagaccagccaggctgtggcatgaggacatgctc

SEQ ID NO: 44863 - DNA, 379 bp, Gossypium hirsutum
  Clone ID: LIB3196-007-P1-M1-A5
atctattgtgtacagatttcttagtgattcaatccgtcgatcaaattagggggaaaaaatgggagggggagagcatgggcatgggcatgggcatggagttcaagatttcagggagaaggtgtggagcatgtcggggggtccgtactgccggcccaagcactggcgccgcaacactgccattgccatgttcggcgttttcctcatttgcatccccattgccatgaaatcaaccgagctcgagcaacgacctcatcagcctgtccgtccgattccttcacagctttggtgcaagaacttcggaaacaaagattattgaagtctgcctggggctgttggagtaccgatggcatatcagagcagcctatgatctgtatttgag

SEQ ID NO: 44864 - DNA, 405 bp, Gossypium hirsutum
  unsure (1)..(405): unsure at all n locations; Clone ID: LIB3196-007-P1-M1-A6
atcctgtcctgtatttagaaaaagcagctagaatatttctccattaactcttgagattcacaggactgtctagctctgagtcctagcaatagactccttagaggagtagtaaatttatctagactttctctagataatgcaggcggaagacctgggttcccggggtggggcgctgcagctcttcctgtgtttggcttccaggaattacatgaacgacagccttcgtaccgacgtcttcgtgcggttccagcctgagagcatcgcctgtgcctgcatttatcttgctgcccggacactggagatccctttgcccaatcgtccccattggtttcttttgtttggagcaactgaagaagaaattcaggaaatctgcttgaagatcttgcangcttatgctcggaaaaa

SEQ ID NO: 44865 - DNA, 339 bp, Gossypium hirsutum
  Clone ID: LIB3196-007-P1-M1-A7
attttataaaagtaaaataatttaaaatttttttgatatatattaattctaatctggtgtccttaaaagtcattttctattcttacctcaccgctacagttgcatttgaatccaaacacacactccaccgccgtttctaatctcaccattacaatatccaatctcactactatagtaactaatctcatagccaccactgtttttaacctcaccagagctaaacacaccgcccatccaaactaagcctgagttctcaaatgtcgaaattttcaaacgaaattttcacgaaattatttcgtgaaaattgtagatcatttaaatataataagaataaatttt

SEQ ID NO: 44866 - DNA, 374 bp, Gossypium hirsutum
  Clone ID: LIB3196-007-P1-M1-A8
ggtttaatcagtattatagattgttcatccagagatctaagcttattagcttaagctataaaaatggtgaaaagatcgttgggctttttctttcttctcctcattgtcttagcctcgcaatggggggtgcagccaactgaggcaagggtttgccagtcacagagccataagttccacggtgcatgtttgagtagccacaactgtgcgatggtgtgcaggaacgaaggtttctccggcggcagatgtcgaggattccgtcgccgctgcttctgcactaagctttgctaatgcaagcttgcccttagctcatattttaaggatcatttcatgaagtaaagacctttatgtttttcgtgcatgcatgtcaatgtttc

SEQ ID NO: 44867 - DNA, 275 bp, Gossypium hirsutum
  Clone ID: LIB3196-007-P1-M1-A9
tgttgacccacaacgttctcgtacagcctacgctagccccggagcactgcaaaagaattcaagtcgacagagaagtcccattgattctgccgaccctaagcgttcaatgtctgcaagaaacaccagtcatgtcaagaactatgaagcggccctcaaaggaatcgagggcctgcaatttgaaagcgacgagagaattcactattaaacgcttggatatacaaaatttgttgtaaaaccgtaaaaatggttgatgtactaatacattttccaacaga

SEQ ID NO: 44868 - DNA, 365 bp, Gossypium hirsutum
  Clone ID: LIB3196-007-P1-M1-B1
atgctagacaaagctacccagatttgtcttataatttttgagttaaccacagtatacctattgtgattatagtaaacagactagtgggtagtaatgctaaattaccatcacagttatgtaccatccccccatcccatttttttttttttttttttgatcagcaaagaaatacaggagaccagcctcgagtggtgctgtacttgttatgagagaggcagcagcacagtgtgtggcatttacatggtacccgggctccacagagtaccgagatgttgctctctgggaccacatttagttcaaagaatatggggtccttacttgtattcttttatcagctgatttcaaaacatataataataattttc

SEQ ID NO: 44869 - DNA, 455 bp, Gossypium hirsutum
  unsure (1)..(455): unsure at all n locations; Clone ID: LIB3196-007-P1-M1-B10
gccaagctcctaatacgnnactcactatatgggataatgctggtacccgcctgcatggtacccgtgtccgtgatattcccgggtcagaccccacgtccgtccggagaaaccttcccatcttgtgagaacctagataagcttttagcatttagagcaattcaatatttccgcgaagtttaaatttaaagcgaagatatcttntgctaagtagattcaatcgagttacctgcgccaagtgtgggattgatttcaaagaagaataaccgagaaaggtatcgatgtgaagcggttcggtgagcttttgatgtcgtctggggtcgtgttgaatgatgatgtccattgggtcacctttcatagtggatacgacttcgggtacttgcttaagcttttgacttgcaagagtttgcctgatagtcaagctgggttttttgatttgatccaaatatatttcccca

SEQ ID NO: 44870 - DNA, 356 bp, Gossypium hirsutum
  unsure (1)..(356): unsure at all n locations; Clone ID: LIB3196-007-P1-M1-B11
gataaagatgaccactccggtttgcccattcgtgaaagcggctcgaccggacgataatggttcggccaaaaaatccaccgtcggcggcagcgaagcaacaaggaaagattccggtgactccgccaccgtgtctccgaaatgcccttttggttacgattccaataattttaagctcggtcctctcagttgtatgatctgtcaagcacttctctttgactgcaccaaatgtatcccttgttctcatctcttttgcaaagtgtgtatatctcggtttaaggattgtccactatgtggagctgacatagagaaactggaagctgacaccaatcttcaaagcatggntgatcgatttatcg

SEQ ID NO: 44871 - DNA, 258 bp, Gossypium hirsutum
  Clone ID: LIB3196-007-P1-M1-B12
gacgtcgaggcagctgcggtagcagtaccggtggctgcttctccggcgaagccagatcctgtggctcctgggattgaattgggaacagtggttccttttaccacaatgcagggtgctgtgagtaggaatatggtcgagagcttgtcagtgcctacgttccgagttgggtacaccatcaccacaaatgcacttgatgccttgtacaaaaagatcaagtccaagggtgtaacaatgacagcattgcttgcaaaggcaact

SEQ ID NO: 44872 - DNA, 393 bp, Gossypium hirsutum
  Clone ID: LIB3196-007-P1-M1-B2
ccatatcttagggtttctcctcctctctacctccaatgggaaagggaactgggagttttggtaaacgaaggaacaagacccacacgctctgcgtcagatgtggccgccgcagcttccacctccagaagagccgttgctctgcctgtgctttccccgctgcccgtaagaggacatataactggagtgtgaaggctatccgaagaaagacaactggcactggtaggatgaggtatcttcgccacgttccacgcaggttcaagacgggtttcagggaaggtactgaagcagcaccaaggaagaaagttgcagcagcttttgcttaaaaggcaaattgtaatggtatgaggttttgttttggatgaagccatgtttatgaggaaacatttagtgatg

SEQ ID NO: 44873 - DNA, 381 bp, Gossypium hirsutum
  unsure (1)..(381): unsure at all n locations; Clone ID: LIB3196-007-P1-M1-B3
gcttcaagtccaaggaatatgtccgcgagacttttgcttggatgcactactactggtaccttactaatgatggaattgagtttctcagaacttaccttaatcttccatccgaaattgttcctgctactttaaagaaatctgcaaggcccccgggtaggctaggcggcccacctggtgatcgccctcggggtcctcctcgctttgaaggagaccgaccaaggtttggtgacagagatgggtaccgtggaggtcctcgtgggggtgactttggtggtgataagggaggtgccccagcagatttgcaaccatcattcangggtcctggtggaaggcctgcctttggtcgtggaggtggagggtacagtgcagctncatctggtt

SEQ ID NO: 44874 - DNA, 389 bp, Gossypium hirsutum
  Clone ID: LIB3196-007-P1-M1-B5
acgatatgaggaaaatgatggttgccaaagttactgtcttgtttgctgtgctttcctttccagctgtcttgccatttgcgcaggatgaggaagaccaaggtcttgttatgaactcatacaaagattcttgtactgaagctgaagacattatcaaggagccagtttagctactgtacacgcgacacacaaacactgctttttcttggctgagaaacattttccatgactgtgctgtccaggcatgtgatgcttcactgctgctggactccacaagaaggagctcgtctgatatggagacagacaggagctttggcctaaggaatttcaggtacattgagaccatcaaagaagctgtagaaagggaatgtcctggagttgtttcttgtgct

SEQ ID NO: 44875 - DNA, 386 bp, Gossypium hirsutum
  Clone ID: LIB3196-007-P1-M1-B6
acactatataacaagtgggtacgcagaagcacgctggtgccgggccgcggtttccgggatcactccgacacaggcgcgggttcctaccatgcacattacaaaggctcacactatgaaaccagctgcacggctaacacctgtgagggcagctgctgcctccccgattgaggaagagccaggccgagacaagtgcgatgtcaaagatgcaaagcctgtgggcaaggacagtgtggaggttgccactactgcactgacctgacgaagcttgggcggcctggactcatgaatcagaaacgtgtcctacgacagtgcttggcacccatactgcgttactcagtcacatgacccctctgtggagaggtggatcagaaaggagagacacaaga

SEQ ID NO: 44876 - DNA, 180 bp, Gossypium hirsutum
  Clone ID: LIB3196-007-P1-M1-B7
ctataaaacaagaaggtacaacgaagcaggctgctgccgggccggtatttccgggatcaccccgtccctgatgcgggtctggaacttgaccatgaccacctcggacactttcaggacttctacgttgctgtaaccggtggggcaggatacaaactctctcgatgagatatgatccacgct

SEQ ID NO: 44877 - DNA, 352 bp, Gossypium hirsutum
  Clone ID: LIB3196-007-P1-M1-B8
agcaagttgaggaattgcttattattttcatacggtcttaataagctataaagcttactcccttcctttcctttcctttagtatttttaggttagctcagggttggagatcgtcagaggccgtatcagactatcaaaccatcgcctttggaatatgaatatatgttacgcgtgttcaagtgagtggcatgtataatggctaggattttatgatatgttttaatatgattagccaaatgtattggcccttattgaattatttgtatttggccatgagatgtggcttatattggttattggctggtaagcctaagcatatgtatgcatgattaaatgcctcatgggatgtgatc

SEQ ID NO: 44878 - DNA, 355 bp, Gossypium hirsutum
  Clone ID: LIB3196-007-P1-M1-B9
cggacgcgtgggattattttaaaattctttttcaacccaaattgattattttcactaatgattatttaaaatctttaaaataatttttttaattttctagattattgtttaatcgattttaggtgaaattaacctcctaaattaaattaaaaaaatactaaaaaccctataaatttctagtttcacacttggaacccgaaaaatatacttgaaactactagacccagtttaaggatattacaaacaacatctatttacatttcacatgaacaaaagtgaacttcatagagatcacattagtcaatttattactcttttgaatgatttaaagaatgttgaggttgatattgacgat

SEQ ID NO: 44879 - DNA, 413 bp, Gossypium hirsutum
  unsure (1)..(413): unsure at all n locations; Clone ID: LIB3196-007-P1-M1-C1
atggcggagcaagagcaaagaaaaatccctttggttccagaaaatctgctgaaaaagaggaaggcttatcaagccctcaaagccacccaggcaaagcaggcacttttggcaaagaaggagcagaggaaaggaaaagggctcaggtttaagcgactggaatcattcctacatgattcctggcggcagaaacgtgacaaggtgcgtctcagacgactagaagtgaaacctcatgccttggaattgccagacaaacattccttggcctttgttgtacgcatcgaaaggattgatggcgtgagtttattggtgcagagaaccattgcaagacttcgcctaaagaaaatttttagtggtgtctttgtaaaagtcacccnccagaacctaaaaatgctgcgtatagtggaaccttatgt

SEQ ID NO: 44880 - DNA, 387 bp, Gossypium hirsutum
  Clone ID: LIB3196-007-P1-M1-C11
atctggagatgcagattgagaacctcaaggaggagctggcctacctgaagaagaaccacgaggaggagatgaatgccctgcgaggccaggtgggcggtgagatcaatgtggagatggacgctgccccaggtgtggacctgagccgcatcctgaacgagatgcgtgaccagtatgagaagatggcagagaagaaccgcaaggatgccgaggattggttcttcagcaagacagaggagctgaaccgcgaggtggccaccaacagcgagctagtgcagagcggcaagagcgagatctcggagctccggcgcaccatgcaggccttggagatcgagctgcagtcccagctcagcatgaaagcatccctggagggcagcctggcagagacag

SEQ ID NO: 44881 - DNA, 402 bp, Gossypium hirsutum
  unsure (1)..(402): unsure at all n locations; Clone ID: LIB3196-007-P1-M1-C12
atgctcccccctccccccgagcgccgctccggctgcaccgcgctcgctccgagtttcgggctcctgctaagctagcgccgccgtcgtctcccttcagtcgccgtcatgattatctaccgggacctcatcagccacgatgagatgttctccgacatctacaagatccgggagatcgcggacgggctgtgcctggaggtggaggggaagatggtcagtaggacagaaggtaacattgatgactcgctcattggtggaaatgcctccgctgaaggcccagagggcgaaggtaccgaaagcacagtaatcactggtgtcgatattgtcatgaaccatcacctgcaggaaacaagtttcacgaaagaagcctacaagaagtacatcanagattacatgaaatcaatc

SEQ ID NO: 44882 - DNA, 358 bp, Gossypium hirsutum
  Clone ID: LIB3196-007-P1-M1-C2
ggacaattcgaggaattcttcccagctggaagccaacgccctcagtcatatctccgagcctttagtcgtgaaattcttgagcctgccttcaatacacgaagtgagcagctagacgagctgtttggtgggaggcaaagccgtcgaaggcagcagggacagggaatgttccgtaaagccagccaggaacaaataagggcattgagccaagaagctacttcaccaagggagaaaagtggcgagagattcgccttcaacttattgagccaaacccctcgctactccaaccaaaacggccgcttcttcgaggcttgcccacgtgaattccggcaactcagggacatcaatgtcaccgtttcag

SEQ ID NO: 44883 - DNA, 407 bp, Gossypium hirsutum
  Clone ID: LIB3196-007-P1-M1-C3
atctttcctgtgcgccacctagcgtttctatcgcgccagttcctcagcctgagtgctgtgaaggtgacagcctgaggtgacccagctggccccccgcgatgctggcagcacggcggctgctcggcgggtcgctcccctctcgggtatctgtgcgtttcagcggcgacacgacagcacccaagaaaacctcatttggctcgctgaaggatgaagaccggatcttcaccaacctgtacggccgccatgactggaggctgaaaggtgccctgagtcgaggtgactggtacaagacaaaagagatcctgctgaaggggcccgattggatcctgggtgagatcaagacatcgggtttgcggggccgtggaggcgctggcttccccactggcctcaagtggagcttcatgaat

SEQ ID NO: 44884 - DNA, 289 bp, Gossypium hirsutum
  Clone ID: LIB3196-007-P1-M1-C5
cactgtgcgagcacataggtgacgccgttgctgctattcagcacttgcttgattaaaccggacccaagtcagtgaaataaaacgatgttcttcaaaagcctggacaaaaccctctgttagatggaggccatatgacaggcacaatctacttcaaatagcttaaactcaattctaatggtggactaagggtgggcttactgcttacccattagaacctatcgttagaagagcacatcggatgcttctccaacttgctgagacatgaaagattcaaaacctagttatccgg

SEQ ID NO: 44885 - DNA, 389 bp, Gossypium hirsutum
  Clone ID: LIB3196-007-P1-M1-C6
gattcccaaacgaaaccctattttcctgtctgtaatctttgtttcgctcctcgcaatcgcctccgctaaagtattcttcgaagaacgttttgatgagggatgggaaagtcggtgggtaaaatctgactggaaaaaggatgagaacatggctggggagtggaattacacttctggaaaatggaatggagatcctaatgacaaaggtattcaaactagtgaagactacaggttctatgctatttcagctgagttcccagaagtcaacaacaaagataagactctagtcttccaattttctgtcaagcatgagcaaaagcttgattgtggtggtggctacatgaagttgctcagcggtgacattgaccagaaaaaaattggtggtgaaaccc

SEQ ID NO: 44886 - DNA, 331 bp, Gossypium hirsutum
  Clone ID: LIB3196-007-P1-M1-C7
cccacgcgtccgcccacgcgtccgcccacgcgtccggccgttttatggggaaagaaggaaagatgggtagggttttcgcatctcttgtgcttgttttggtggttgtgcaagctagccatgcacgtaatgtgcctagccatgtcggcctcgataaccgacaaacaacgatgccaggtgcctcaacggaggagcaaacgttgcaagccgatgcaccgaaggcggattcaccgaagggtacgagtggcattgatgacaagaagaattttatttacggtggaattggtggctttgctgggatgggtggctatggtggaattgctggtggaatccc

SEQ ID NO: 44887 - DNA, 385 bp, Gossypium hirsutum
  Clone ID: LIB3196-007-P1-M1-C8
ctttccatctctccaaacacaattcactaaagcaaaaacagctagaagaagaaggaatggccgcctcggataaagttcaagaactgcatgtatatgagatgaatgaaagagatcgtggtagtccagcttaccttcgtttaagtcagaaacctgttaactcacttggtgatattgtcccttttagcaacaaaatatataggggagatatggagaaacggataggaataactgcagggatgtgtatattgatagagcataaacccgaactgaaaggtgaccgctacgaagccatcttcagcttttacttcggagactacggtcacatagcggtgcatggaccttacttgacttaccaggactcgtatctcgctattactggtggatc

SEQ ID NO: 44888 - DNA, 359 bp, Gossypium hirsutum
  unsure (1)..(359): unsure at all n locations; Clone ID: LIB3196-007-P1-M1-C9
aatggctgactctgctttcaagaaagttcagattcagagagatgacactgcatttgatgcatatgtggttggcaaagaagatgcacccggaattgttgttcttcaggagtggtggggtgtggattttgagataaaaaaccatgccttgaagatctctcaactgggcccaggattcaaagctcttattccagatttgtatcgaggaaaggttggtcttgatgttgcagaggcacaacacctaatggatggtcttgactggcaaggtgctgtaaaggatatctgtgcttcggttgattggcttaaagctaatgggtcaaaaaaggttggagtgaccggattttgcatggngggtgctctct

SEQ ID NO: 44889 - DNA, 379 bp, Gossypium hirsutum
  Clone ID: LIB3196-007-P1-M1-D1
cttttcacttctcttccgcagcctaaacaatccctcaaatcctccacaaaacaccacgacgaagaccgaaacggcggcggaggaggtgaagtagctgttcgtgttcccaaaccctctcttcctcatccccaaaactcatccaatcttttctctcatcttccgcaacccaaaccacaacagccacccaatcctcctgtcgccaaaagaattgttcaattcaagcctcctataaaccccaatacccacgtggattccgacgatgacgaggaggaggagaaagaaaggccaaagcggggagaatccgaaaccctagctcaaggtccttccgtgaaatcctttctatcaagcatacctgctcccaggaactccactacattag

SEQ ID NO: 44890 - DNA, 394 bp, Gossypium hirsutum
  Clone ID: LIB3196-007-P1-M1-D10
atgtcttggttgcctcattcctccccaaaattggcccactgaaatctgtagaataccaaggattgccattgcttatctctttagactcatgacttcttgctttttttacttttaaagacttccttattttcttgtcagcttagccatatgcttaaaagaatttttaaaactatgttaactagggaagtttcaaaatactttgcaaatagaactaacattgaagccataccaacaaaagggtggcagaaacttgcagcctgaatttaaccaggctgattgtctgctaaaacaaaaatattgacattctttataggattcaaataagacccagggcctaagaacataatatttaaaattccaaggatacaattcaaaattacatggtctatgaaaa

SEQ ID NO: 44891 - DNA, 385 bp, Gossypium hirsutum
  Clone ID: LIB3196-007-P1-M1-D11
atcaggaatgggtttaaaagcacaagtttggtagcttatcatctataccatggacagtgaacccttttacgaaatgaaagtcaaacgagaccatcctagaaaaagaagatgctcataggcatttgtaccataatcaaccccacgcataatgaaaactatgaccaagtgacgtgcctgggagctttgacacatgagccatttgaattcactaggaaacatgtaataaggtaatggaagagaaaatcgtgtgtaaattttgcctttaactttaggcagcagtatattatacatttgatatctgaaatacctttacttttttaagaataagattccatatgtctgtctggaagggagccatggttatgctcacgaatatcgacgtcac

SEQ ID NO: 44892 - DNA, 174 bp, Gossypium hirsutum
  Clone ID: LIB3196-007-P1-M1-D12
tcggccagaaggaggctgattgtttggtaatgcaggaacgggtatcaagtaaattagatgtgattcattcagcggtatgggaagatgtcatcaacctagaaactctacatgttttcccaatagatagggacccgcctagttccgtggacaaagtggtttttaggtaagcatttg

SEQ ID NO: 44893 - DNA, 381 bp, Gossypium hirsutum
  Clone ID: LIB3196-007-P1-M1-D2
aggcctgcaattttctgctgtccaaacagctcccctcaggtggctggggagaaagttatctttcatgtcaaaacaaggtttactcaaatgttgagggcaacaaaccacatatggtaaacactggctgggctatgttggctctaattgatgctgggcaggccgagagagatccaacaccactccacaaaggagctaaatatttgataaattcccaaatggaggacggtgatttcccgcaacaggaaattatgggagtgttcaacaggaattgtatgatcagttactccgcgtatcgcagcattttccctatttgggcattaggcgaatatcggactcgagtgttgcagctgcggacaacgtcgtagaacaatggtaataact

SEQ ID NO: 44894 - DNA, 406 bp, Gossypium hirsutum
  Clone ID: LIB3196-007-P1-M1-D3
atctcggcccagagctgcccagggcgaggagggctgggggtatcgggggcaggccgggcggtgctcatctctctgtctcccctcactgctgctgctgcaggatctgtgtgaggtagggtcctgagtcctccccctgccctcccctccctgcacctcccctccctgcaacccctgttgcagcctcttctccccaccccacgccccccggctcccccagggaggcgacctggcatggcaatcaagggtatgggcatcagacaggcctggatttgaaccctgaccttcctgctatggactgtgcaaccctggcatgtctcaccctctctgagcctcattctcctcctctgcaatggggaatagaggtgtccctacaaggtgtagctatatggggaggttcagagcatca

SEQ ID NO: 44895 - DNA, 313 bp, Gossypium hirsutum
  Clone ID: LIB3196-007-P1-M1-D5
atctaacgcacaggggctgcaattgaatttgcgggactaaagaaggacgtggctgctgtctatctgaacaaggcgaaactcaaagccacagttgacacacttaatgaggggatcaaatggacagaaagccctatattatgcctagacagcccagatgctgacgcaagtgcgaacatgtgcgagggctctacatagacaactaccgcccctgtagtgcacagactagtcgaggagccgagaccacacgaggagacagggagaggagctgggctcacgaagcaggccattgccagaaccaagcccatgatccaca

SEQ ID NO: 44896 - DNA, 364 bp, Gossypium hirsutum
  Clone ID: LIB3196-007-P1-M1-D6
attcctcgtggaagtgacatcgtctttaaaccctgcgtggcaatccctgacgcaccgccgtgatgcccagggaagacagggcgacctggaagtccaactacttccttaagatcatccaactattggatgattatccgaaatgtttcatcgtgggagcggacaatgtgggctccaagcagatgcagcagatccgcatgtcccttcgagggaaggccgtggtgctgatgggcaagaacaccatgatgcgcaaggccatccgagggcacctggaaaacaacccagctctggagaaactgctgcctcatatccgggggaatgtgggctttgtgttcaccaaggaggatctcactgagatcagggacat

SEQ ID NO: 44897 - DNA, 212 bp, Gossypium hirsutum
  Clone ID: LIB3196-007-P1-M1-D7
gttcctcgcggacgtgacatagtgtttaaggggggcgtggcaatccctgacacaccggcgtgatgcccaacgtagacagtgcgacctgaaagtgcaactactttcttaagagcatccaactcttggatgattatccgaaatgtttcatcttgggagcagtcaatgtgggctccacgcagatgcatcagatccacttgtcacttggagggaag

SEQ ID NO: 44898 - DNA, 313 bp, Gossypium hirsutum
  Clone ID: LIB3196-007-P1-M1-D9
gctttgtattctagacaaaatggagccaaattaatggagctttagatactccaattctttttattattcgaatacgtcaaggcgtggtgaatcacgatctgatctgtctctatgaggaggatatgaagaaattgacggatacgaggatttcacggcacagttcgtatgtccattgagcgctgaggatactgacattgttggactttgacgccatatcgctcaataacatgctgctgaaaccaaatacggggcgtgcaccggttgcgcgaatagggacagcatggatatcgtcagtcgcattaccatgcgacat

SEQ ID NO: 44899 - DNA, 364 bp, Gossypium hirsutum
  Clone ID: LIB3196-007-P1-M1-E1
gcgacaccgacgaactatgtggaacgctggagcgcgctggtgccccgccccggttttccgggtctggccctgccgttcgggggcctatatgtggctctgggctacctgactacgaaccacggggaggtgccttacgcccttcggggactggcttaccgattgattattggggagacattctcttaccgctgtgatgccttgttctgcattcatgccgagaggcttcttcattctttgttgttggttgattacttccaattggctgccttggatggtttattctggttgacaactgagctccaccgctaggtggtcgccgacagaaagctagctcatgacggcatgagcgggatctaattgctcc

SEQ ID NO: 44900 - DNA, 398 bp, Gossypium hirsutum
  Clone ID: LIB3196-007-P1-M1-E10
atgttctccactggactcagaagccaagccgcttcccgcccggactcggcgcaaggccctgcacctgtgaggaaggtgcttttggccccattgcgaggggccttggctaggactggccctgtggccagggggcgagaaggtggctgttcccggatcaacggctttttcccgggggcctttggaagatttggtggaaggacaagagggccggtccctgtccccaggaggcaccgacagtccctgtactggttagacacacggagcgctgcacaccgaaagtccaaattgggagctctgcctgccagcagttttgctgagggggtgatcgctgcttctggggggtaaggaaacaagttacagaaattactgcgttctgtgtgaaggggctggggggtgtg

SEQ ID NO: 44901 - DNA, 373 bp, Gossypium hirsutum
  Clone ID: LIB3196-007-P1-M1-E11
atcgagtggccaacgagccggcagagacccaccgagcgtcggcggagggagcagcgccggggcgcacgcggccaccatgacccagacgcccgccttcgacaagcccaaagtagaactgcacgtccacctagacggagccatcaagcctgaaaccatcttatactatggcaggaggagagggatcgccctcccagctaacacagcagaggggctgctgaacgtcattggcatggacaagccgctcaccctgccggaattcctggccaagtttgactactacatgcctgctattgcgggctgccgggaggctatcaaaaggatcgcctacgagtttatagagatgaaggccaaagagggcgtggtgtatgtggag

SEQ ID NO: 44902 - DNA, 373 bp, Gossypium hirsutum
  Clone ID: LIB3196-007-P1-M1-E12
acactatataacaagttggtacgcaaaagcacgctggtgcccctccgcaatttccgggatgtgacccactcttactggaacgaattgcagcgcaaaggatctcgataggcatgacggtgcctttactgtcccgccttatagtgccacaattcaagctcttgaacccaatggctgaagttgcataccagctgtgatgagtgaccaaatacccattctggcatatcatgcaccggtaaccattgaaccagaattccttgactggttactgctgttagtgagccacgagcttctaaccaacatatgcgagtcaataaatcagaccaaattttctactcaatgcatcttgcattatgatggcgaaagaaacaagaag

SEQ ID NO: 44903 - DNA, 354 bp, Gossypium hirsutum
  Clone ID: LIB3196-007-P1-M1-E2
gccacacttgcgggtgatcgcactcgtcaacttgattgatcccatgttgaatatttacggcgagttgatcatgctcttgacatagaggggagcaatgagatgtaccctaatgaactagccaggctcattgaaatgacatatcctcagaacaagccaacctgaataacacatcattgtgatgatgggagctgagaatatgcgtgagtaacttccgcatttgctcacagcacatcgtggcgctccataagctgaaactcgtgttagctaccccattcatgcatgcacgactatagcttcgtgtagactgagaactgcgctctttggtgccattaaggccgaagggtgagcattttt

SEQ ID NO: 44904 - DNA, 403 bp, Gossypium hirsutum
  Clone ID: LIB3196-007-P1-M1-E3
atgactctaacgctctccacagccctctcatctcctggaaccatggccagcacatccaccaccatcaggagccacagcagcagccgcaggggcttcagtgccggctcagccaggctccctggggtcagccgctctggcttcagcagcgtctccgtgtcccgctccaggggcagtggtggcctgggtggtgcatgtggaggagctggctttggcagccgcagcctgtatggcctggggggctccaagaggatctccattggagggggcagctgtgccatcggtggcggctatggcagcagagccggaggcagctatggctttggtggcgccgggagtggatttggtttcggtggtggaagccgcattggctttggtctgggtggtggagccggccttgctggtg

SEQ ID NO: 44905 - DNA, 404 bp, Gossypium hirsutum
  Clone ID: LIB3196-007-P1-M1-E4
atgtcgttcggcttgggtacgagcctcagcgccatggacaccagcgacttgttcgccagctgcaggaagggggatgtgggccgagtgcggtacctgctggagcagcgagacgtggaggtgaatgtgcgggacaagtgggacagcacccccttgtactatgcctgcttgtgtgggcacgaggagctggtactctaccttctggccaatggagcccgctgtgaggccaacaccttcgatggtgagcgctgcctctatggggcactgagtgaccccatccgccgggctctacgcgattacaagcaggtcacagcttcctgcaggaggcgggattactatgatgacttcttgcagcggcttctagagcagggcatccacagtgatgtggtctttgtagtacacggaaa

SEQ ID NO: 44906 - DNA, 409 bp, Gossypium hirsutum
  Clone ID: LIB3196-007-P1-M1-E5
attgccagtctaaagctttaatcgctttgtgttttcttcccagccctggtttataggggaggtaattagacttaaagcaggtatttctaccaagtcaccaagcttacaacaagtacctctgagtgaagctctgtgcccgtcctttctaaaagtgacacatacacccaccacccactcttggccttctgctgactaactgcagaggggcctcttcccaaacctgtgccaccaggaccagctgctgtgtatgttggtgggaaggggcggtggggggttgtactctgcgccatgtctcaaaatttgcatgagcacatccacggagacagaggctcctctacagacacacaagctgaaggagagcgtatctcccgtgctgagcgtgctgaccgtatgtgctctgatgcaccgc

SEQ ID NO: 44907 - DNA, 381 bp, Gossypium hirsutum
  Clone ID: LIB3196-007-P1-M1-E7
atgccaccttgtaggctcagggctcaggtggagggttgtgggtttgggcgatccagagggaggacgaacgccctgaatcttgtggctagtaatatctcccctagagacctctcagacagacagacaggcaagacagacaggcacctgatgctgctgtctcttgagctgggggcacagctaggaggcactagagtctagcccaggggctccaagtgacaagccgaggcactcccccagaggaacaggtaggcacctgccctcagttaccctctgctcatggccacctctctcctttctcccaggatgactggtgtcccttcctcagcaggtaagagaacagccccatggagtggggggaggcggagttaggctcctgttcac

SEQ ID NO: 44908 - DNA, 385 bp, Gossypium hirsutum
  Clone ID: LIB3196-007-P1-M1-E8
atctttaaaaagcctgcattgtgtattaaacaccaggtaatatgtgcaaaaccgagggctccagtaacaccttttaacctgtgaattggcagaaaagggtagcggtatcatgtatattaaaattggctaatattaagttattgcagataccacattcattatgctgcagtactgtatatatttttcttagaaattagctatttgtgcatatcagtatttgtaactttaacacattgttatgtgagaaatgttactggggaaatagatcagccacttttaaggtgctgtcatatatcttggaatgaatgacctaaaatcgttttaaccattgctactggaaagttacagagtcaaaattggaaggttttattcattcttgaatttt

SEQ ID NO: 44909 - DNA, 356 bp, Gossypium hirsutum
  Clone ID: LIB3196-007-P1-M1-E9
gtttatctgtttgccctttttaatgaaaacaacaaagtcgggcctacatccgaacgaaattacggcctcttttacccgaccgaggaaaaagtttacgatatccctttcactgtagaagggttgaagaattaccatgacaggcggtcgccggtggccgggaatcaacccgtcaacagaggaaaagggggtgtgtcgaagagtacgacggggaacacgtggtgcgttgcgaacggtgaagctggaaaagagaagctgcaggcagctctagatttcgcctgcggtgaaggaggtgcagattgccatccgatccaaccaagtgccacgtgttacgatcccacaccctggaagcccacgct

SEQ ID NO: 44910 - DNA, 404 bp, Gossypium hirsutum
  Clone ID: LIB3196-007-P1-M1-F1
atgtccgcctgacctacctcaggaaccagctggcagagaaggacgagttcgacatcccggacctcaccgacaacagccggcgccagctgttccgcaccaagagcaagcgccgcttctttttccgcgtgtcggaggagcagcagaagcagcagcgcagggagatgctaaaggacccctttgtgcgctccaagctcatctcaccgcctaccaacttcaaccacctggtacacgtgggccctgccaacgggcggcccggcgccagggacacgtcccgggctctggaagagaagggccgagtttctcgcggctcctctggcccacagcggccccacagcttctccgaggcgttgcggcgcccagcctccatgggcagcgaaggcctcggtggagacgcagaccccatg

SEQ ID NO: 44911 - DNA, 388 bp, Gossypium hirsutum
  Clone ID: LIB3196-007-P1-M1-F10
atttcaacctcgcagctcgcacgctctcatcattttcctccgggaccgtcagtctccccaaacaccttctttccgagaaaaagaaaagctcaagagagaagaccatggccgatcaacttacggacgatcagatctctgagttcaaggaggctttcagcctttttgacaaggatggcgatggttgcattactaccaaggagctggggactgtgatgcgatcacttggtcagaaccctactgaggcagaactccaagatatgatcaatgaagttgatgctgatggaaatgggaccattgattttcctgaattccttaacctaatggcaaggaagatgaaggatactgattccgaggaagaacttaaagagggctttcaggtgtttgacaa

SEQ ID NO: 44912 - DNA, 235 bp, Gossypium hirsutum
  Clone ID: LIB3196-007-P1-M1-F12
gccatacatcgggagcgcgcactatcaaagatccaatcttacatcctcatgcttactgcgaaatgtctcttttatagtgtcaccaaaattaaattgaatctcctgactggtccaacgccgggtctgtataaacaatataatgtcccaactctatctgatcatattacattctcctttcagcaactgaatttatagcatagaggccatctaagatcggcctatcctacagaagatc

SEQ ID NO: 44913 - DNA, 385 bp, Gossypium hirsutum
  unsure (1)..(385): unsure at all n locations; Clone ID: LIB3196-007-P1-M1-F3
cccacgcgtccgtttctttgtctactgttttgccatgaagaacaaattttttatcctcgtaatcttattccaaaccgtcgacttagctttatcgacccccaaaaaatatgagtcaattttcaacttcggtgactccctaagcgacactggcaatttacttctctccggtgcccttgtatttccagtcatcgggcagctaccttacggtgaaaccttctttcaacacgcaacggggcggtgctctgacggacgtcttattatcgacttcattgctgaggcattcagtttgccttatttgcaaccttacctagcagtaaaacaaggccagagttctcaacatggagtcaacttcgcattctccggagctactgcactngatgctgag

SEQ ID NO: 44914 - DNA, 392 bp, Gossypium hirsutum
  Clone ID: LIB3196-007-P1-M1-F4
tctcaagttaactactcctagctttggtgatttgaaccatctaatctctgcaaccatgagcggtgtgacatgctgccttaggttccctggccagctcaactctgacctccggaaacttgctgtcaacctcattcctttccctcggctccacttttttatggttggatttgctcctctcacctcacggggatcacagcagtatcgttctttaaccgtcccagaactcactcagcagatgtgggatgctaagaacatgatgtgtgctgcagaccctcgacatggttgttacctcacagcctcagccatgttcaggggtaagatgagcaccaaagaggttgatgagcaaatgattaacgttcaaaacaagaactcatcctacttcgttgagtgga

SEQ ID NO: 44915 - DNA, 400 bp, Gossypium hirsutum
  Clone ID: LIB3196-007-P1-M1-F5
cccacgcgtccgcgaaaaagggccatgatggagaaggtcaatgtgaggaagatgatgtttgtatttctgaactgccttcaaatgagaaacaacaagaagatccttctcagttgtctgatattcattcacatgggaatcctgcaagttccaatccaattcttataggagaggagcattctaatgagaaagagtgtgggcagaaaaaagggagaaacaggggccggggtaaaggacgtgggcggactcaataccataataaccatcatagtagtcacggaaatcatgtaggcactcccccttcagcttcaagtaattgggtcagcaatgagcaagctactggagcaaagcagccccctggtcctcgtatgccagatggcacaagaggatttgctatgggtcg

SEQ ID NO: 44916 - DNA, 392 bp, Gossypium hirsutum
  Clone ID: LIB3196-007-P1-M1-F6
gcttccagagcgttgggctgatcattggagtcaccggcatagtcggcaatagcttggctgaaatcctcccgttatccgacacccccggcggcccatggaaagtatacggggtggctcgtcggcccagacccaactggaacgccgaccatccaatcgagtacattcagtgcgacatatccgacccgaatgataccgaatcgaagctctctcaacttaccgacgtcacccatatcttctacgtcagctggatcaaccgaacatccgaagccgagaattgcgaaatcaacggttccatgctccgcaatgttttgcattccgtgatcccaaacgcacccaatctccgccacatctgtctacaaacaggagccaaacattatcttggaccgttcgag

SEQ ID NO: 44917 - DNA, 336 bp, Gossypium hirsutum
  Clone ID: LIB3196-007-P1-M1-F7
ctcgatctcatcccatccccttattccaacgaccaaggacgaaccctaacttgggcgtttcgactcggtttttctcaagctaacgcagctcccacccgagatctttatcctctggcaatgccactctggttctccgccatatccctctcgatagaggactcctttagtttgcctagaaccttcccctcttttcagatttatttaataagttcaagaaatgaccaacgattcccagccccctaattccaggagtctcctttgcaatgccggtgctggcgctgccgccggtgttattgctgcaacattcgtgtgtcctttagatgttataaagacgag

SEQ ID NO: 44918 - DNA, 403 bp, Gossypium hirsutum
  Clone ID: LIB3196-007-P1-M1-F8
attgcctatttttgtctcaaatataaggttccagtgctggaaaacgatattcacctcagtttgtaaaggctgccaaattactccattggaatggacattttaagccatggggaaggactgcttcatatactgatgtttgggaaaaatggtatattccagacccaacaggcaaattcaacctaatccgaagatataccgagatctcaaacataaagtgaaacagaatttaaactataagcatttctcaggaagtcctggaagatggcatgtatgcaaagtaacagttgctaggcttcaatgcctatcgtagcaagccatggaaaaagatgtgtcagctgggtaaagatgacaaactgccctgtctggaagtcagcttcccagactatagactataaatatgtct

SEQ ID NO: 44919 - DNA, 252 bp, Gossypium hirsutum
  Clone ID: LIB3196-007-P1-M1-G1
gctaggttcagaggactgtatttcatgaagttgttgagttttatccagtatcagttagaatcctgcttttatccttttcttttgtagtaactgggttcaaaatgatgatgaatatggaaactttttttttcttaacatctttggttctgctgtcatacatgggagctgtcccatggatttatatgctatgtgagacaatatgttattttattgcatgttgattaatggattgtacaccgaattgcaagttta

SEQ ID NO: 44920 - DNA, 415 bp, Gossypium hirsutum
  Clone ID: LIB3196-007-P1-M1-G10
atcatgatcctggggtactgggacatccgcgggctggcccacgccatccgcctgctcctggaatacacagactcaaactacgaggaaaagaagtaccggatggggcacgctcctgactatgacagaagccagtggctgaatgaaaaattcaagctgggcctggactttcccaatctgccctacttgattgatgggactcacaagatcacccagagcaacgccatcctgcgctacattgcccgcaagcacaacctgtgtggggagacagaagaggagaagattcttgtggacattttggagaaccagcttatggacagccgcatggagatggtcagactctgctttgacccaaattttgagaaactgaagccaaaatacttggaggaactccctgaaaagctaaagctctactcac

SEQ ID NO: 44921 - DNA, 393 bp, Gossypium hirsutum
  Clone ID: LIB3196-007-P1-M1-G11
atgcaagcttctgtctgcacctgctctcaatcctgctctcaccatgagcctccgcctgcagagctcctccgccagctatggaggtggttttgggggtggctcttgccagctgggaggaggccgcggtgtctctagctgttcaactcggtttgtctctgggggatcagctggaggctacggaggcggcgtgacctgtggctttggtggaggggctggtagtggctttggaggtggctacggaggtggccttggaggtggctttggtgggggttatgctggtggctttgttgattttggtgcttgtgatggtggcctcctcactggcaatgagaagatcaccatgcagaacctcaacgaccgcctggcttcctacctggagaaggtgcgcgccct

SEQ ID NO: 44922 - DNA, 242 bp, Gossypium hirsutum
  Clone ID: LIB3196-007-P1-M1-G12
gaggaatatgacgatgaaggagatgaagagatggggaagctatgttgtggacacagttttcacattcaatgtataaagcagtggctgctgcagaaaaatgcttgccctgtttgtaagactgaggcatcacctcggtgatagtagcagcagcagcagcagccatggatggattcaatttaatccacttgttgttggtttacttactgtttcatttattttagtttagtccaaaattagtgttt

SEQ ID NO: 44923 - DNA, 385 bp, Gossypium hirsutum
  Clone ID: LIB3196-007-P1-M1-G2
aacacactggccggtcactccggttatgtgaacactgttgcggtttcacctgatggttcattgtgtgctagtggcggaaaagatggtgttattttgttgtgggatttggctgaaggaaagaagctttacagtcttgatgctggttctgttattcattcgctttgctttagccccaacaggtactggctttgtgctgccactgagcagagcatcaagatctgggatctggaaagtaagagtattgtggaagacttgaaggttgatctcaaagctgaggctgagaaatctgatgtcaccgacaatgcaaacaagaagaaggtgatatactgcacaagcttgaactggagtgcagatggaagcaccttatttagtggttatacagatg

SEQ ID NO: 44924 - DNA, 390 bp, Gossypium hirsutum
  Clone ID: LIB3196-007-P1-M1-G3
ctttttgctcagatctcctcatctccactttttttccttcttcaaatacccaatggccgtcactttctcaaatctccacaccgagtctggtcttaaagctcttaatgacttcctctctggaaaatcttacatctctgggaataagctgaccaaggatgacataaaagtttatgccgctgttctgaagaaccctggtgattctttccccaatgttagccagtggtataattctgtttcttctcaacttgccgccagcttccctggtaaagctgttggcgttgggtttggtggcaaagctgctccagctgagtctgctaaagctgaggctgctgatgatgaggacgacttggatctatttggtgatgagacggaggaggataagaaggctgc

SEQ ID NO: 44925 - DNA, 321 bp, Gossypium hirsutum
  Clone ID: LIB3196-007-P1-M1-G5
cccacgcgtccgactccataacaggtatgtgcatcactgccattagatgtgaaacggcaaaatccaaaaagccgaaaagtgaagagtcgacaccactagggcgtgtgactgcccgtatggcaagtcctgtgataaaacttggtcgtgtggtcgatgagatggccatgagcactttcatggaccaagatgatgtcgggccattttgggccgaactagatcatgtgggcccaatgggcctgtgggctccacacgaggaaatcactcaagagttaggaaatattgggccaggctatgtaaaccacatggctaaggccattttgt

SEQ ID NO: 44926 - DNA, 417 bp, Gossypium hirsutum
  Clone ID: LIB3196-007-P1-M1-G6
atacacagcccattctgctccatataccagaaaaaaaacacatttgaagcatgaattcccagcaacagaagcagccctgcaccctaccccctcagcctcagcagcagcagcaggtgaaacagccttgccagcctccaccccaggaaccatgcatccccaaaaccaaggagccctgcctccccaaggtgcctgagccctgccaccccaagtttccagagccctgccaccccaaggtgcctgagccctgccaccccaaggtgcctgagccctgcccttcaacagtcacaccagcaccagcccagcagaagaccaagcagaagtaatgtggtccacagccatgcccttgaggagccagccactggatactgaacaccttaccccattctgcttatgaataccatttgcctattgaccctg

SEQ ID NO: 44927 - DNA, 384 bp, Gossypium hirsutum
  Clone ID: LIB3196-007-P1-M1-G8
ctcgtgaataggtgatgaatttttactcattataacaattagttgacatttttttggatgatattactctaacagtttgttttcatagatggagcactaatctgggtatcgaaaggtcatacacggttccaatataccgtctgatgatcgagaatcatgctagagaagggataagtttttctaatattcatgacattttattattttatttcactcgacctgcgttaatataaccatgttattaactgtgtagttcatttggatgtcgttttctatcctagaaattatggcggtgattccctcgtgtctgtccacgtccactcaaacctatggtgcataagcgcacctgttatcaatttccaaacagtagagtggtatcatggt

SEQ ID NO: 44928 - DNA, 335 bp, Gossypium hirsutum
  Clone ID: LIB3196-007-P1-M1-G9
atcgggatccttgcagggattgcgtgagggggatgctctcttacctacacgcgcactcgcgggtcctcggagccgactgtcctatttgtactggcccctgggactactgacccgttcagtccgctttaggtacggccagactgcacggcgaagatacgctgagggtcgccccagattgttatcgaccggagaacccgaaagtatgcaagaggaagagagcgcgcggagagcaatcgagcgggccgagtgcagcggcagcatctcctgggaccattgtgctgccggcgcctgctccgctggcgtgaaggcggggcgtctactcccttcccggactt

SEQ ID NO: 44929 - DNA, 394 bp, Gossypium hirsutum
  Clone ID: LIB3196-007-P1-M1-H1
atggaagagcctcgtcctgggcagcggtggtgcggcggtcgccgttatggccacgggactaggcggctgaccgccgggctaggagagggctaagagccccgaatctgggtggccgctgctcgagcgcgtcctgcgccatggccgcctccgccgccttctcggagcatttcgagaagctgcacgagatcttccgcggcctccatgaagacctacaaggggtgcccgagcggctgctggggactgctgggaccgaagagaagaagaagttgatcagggattttgatgaaaagcaacaggaagcaaatgaaacgctggcagagatggaggaggaactacgttacgcacccctggctttccgtaaccccatgatgtctaagcttcgaaactaccggaa

SEQ ID NO: 44930 - DNA, 412 bp, Gossypium hirsutum
  Clone ID: LIB3196-007-P1-M1-H11
attgcgctttcagaccgtaaggagcgtgctgggagcccggaagggaaactacgcagcgaaggtgaccggggaccaagcatttcagatctgcttggtagacctggtgcaccaccaccatgttggctgcaaggcttgtgtgtctccggacactaccttctagggttttccacccagctttcaccaaggcctcccctgttgtgaagaattccatcacgaagaatcaatggctgttaacacccagcagggaatatgccaccaaaacaagaattgggatgcggcgtgggagaactggtcaagaactcaaagaggcagcatttgaaccatcgatggaaaaaatatttaaaattgatcagatgggaagatggtttgttgctggaggggctgctgttggtcttggagcattgtgctacta

SEQ ID NO: 44931 - DNA, 323 bp, Gossypium hirsutum
  Clone ID: LIB3196-007-P1-M1-H12
atgtctctagatatcagcataaccaatgccttaaaacatgactctacttctccgcaatgatacttaatctaccttctttccttaaatatcacctgctttgaaccctttaagatgcacctcatatgccacttcctgtgaaatattttccctcaatatctcacacagtttttctcccacactcttgcgcaggactataggaccattaaactctgtttatattatcttcatagcacggacatcatcctcttaactaatggattgttcattcgctctgtctttcacaactttgtcttcgatcaaaagtggtaaaggaaccttttagt

SEQ ID NO: 44932 - DNA, 392 bp, Gossypium hirsutum
  Clone ID: LIB3196-007-P1-M1-H3
atatcaagctggaggaagaccttgtgccggagccagctactggagatgacagtgatgccgccacctttaagccaactctccccgatctgtcccctgacgagccttcagaagcactcggcttccctatgttagagaaggaggaggaagcccagagacccccaagccccactgaggcccctactgaggccagccccgagccagccccagacccagccccggtggctgaagaggctgccccctcagctgccgaggagggggccgtcgcggaccctggcagcgatgggtctccaggcaagtccccgtccaaaaagaagaagaagtttcgtaccccggcctttctgaagatgagcaagaagaagagtgactcctgaaggccccacgctaacactgtc

SEQ ID NO: 44933 - DNA, 403 bp, Gossypium hirsutum
  Clone ID: LIB3196-007-P1-M1-H5
agccactggaatccagcagtgcagagcttgactctgaatgtccgcaagattttctcggataccgaccctgagctctttgaggagtgcttgcataagtttgaggaagaccaagcacaagagaacgaggtcaaatcgaaacgcgaaaccacatggaaacgattagaagagattgctgcaatgaaagctgcaagtaatgaacccgtgctcgtctccccgaaagcaactactcgcaacccatcttgctaggacaagagattgccgttttagctacctgacattttcatgtcaagaacggttcggggaaccataggtcggtggacatgatggtttcaagaacaaaaatgaagatgaagcggagttttccatcatatcaagtgttcactcacaccttctgaaaatctgg

SEQ ID NO: 44934 - DNA, 370 bp, Gossypium hirsutum
  Clone ID: LIB3196-007-P1-M1-H6
acgagccacttggaattcagctgtgcaccagcttgtactcttaatgtgtcgcaagattctctcgaataccgaccctgagctctttgaggagtgcttgcataagtttgaggaagaccaagcacaagagaacgaggtcaaatcgaaacgcgaaaccacatggaaacgattagaagagattgctgcaatgaaagctgcaagtaatgaacccgtgctcgtctccccgaaagcaactactcgcaacccatcttgctaggacaagagattgccgttttagctacctgacattttcattgtaagaacggctcggggaaccataaggcggtggacatgatggtttcaagaacaaaaatgaagatgaagcggtgctttc

SEQ ID NO: 44935 - DNA, 360 bp, Gossypium hirsutum
  Clone ID: LIB3196-007-P1-M1-H7
aaaactaggataataaaaataatttaataataaaaaaagggcaaaaaaagagactaaatcgaaagtaaaaccaaaattaaagtatgaaaaatgcaattcgagatgtccaaaggctgccttgaaatgcgcgcgtaatatttgggatcaaaaaggtaaataatcccttgcccaaaacgcagcgctttaatgtggattagaatgaaacaaaaacaaaatgagagattaaatctaaaaagaaataaaatgattggattgaagcgcatttgaaaagcggagggactggggttgtaaataacccattaatcaatacacgtggatccccatggaacgggtcgggccgcgcacggatctgggtcaata

SEQ ID NO: 44936 - DNA, 401 bp, Gossypium hirsutum
  Clone ID: LIB3196-007-P1-M1-H8
atcctggggcatggtccgtgtgggcggccccgggcggccttggctacactgcttctgggggaagagctgcagccccagtttcctccaccctggatgggccctgggcctgcctgctaaccaggacccactcaggtggctgccgagaacctgcgctcttgcttctatctctcaagtgaagctcatccacgatcagacttctccaaaccccaagtacagaggattcttccacggggttagggagattgtgcgggaacaagggctgaagggtgcgtaccaaggcctcacaggcaccgtcctgaagcatggctcgaaccaggccatccgctctttggtcatgacctacctgcgcaactggtaccgaggggacaaccccaacaagcccatgaaccctctgatcactg

SEQ ID NO: 44937 - DNA, 403 bp, Gossypium hirsutum
  Clone ID: LIB3196-007-P1-M1-H9
atggaaaatatagagtagacctgagatgctagtcaagccccctttgattgagttcatcatgggccgttgctaatgccgggccagtaaaagtataacagcaaataaccattggttaatctgtacttatttttggacttagtgcagcaggttgaggctaaaacaaatctcagaacagtctcaaatacctttgcctggatacctctggctccttcagcggctagagctcagtatactaatgccctgtcttagcagagatttcatagctatttagagatattttccattttaagaaaacccagcaacatttctgccaagtttgttaggaggccgcatgatactcattcaaaaaaaaatcctagaaattgttagctctcgggacactggcttggcccactggagcatg

SEQ ID NO: 44938 - DNA, 293 bp, Gossypium hirsutum
  Clone ID: LIB3196-008-P1-M1-A1
atatttttacacagggctttgtccagggacttgggtttcacacacacagcggttaactgggatgggtttttggtaagggaggtaaaaaaaatatgtagctgatgaaatagcatgtgctgggccccaccactgggcctgggaggtgcagcgcgttccaacagaggctgcctcctgcctgccacgcctgctgttctcacaggcaggggctctgctgcttagagcagtgtggccatctcggcttttctcctcatcgtctgtcgcacactggtccccaccacgcctttcgccggccc

SEQ ID NO: 44939 - DNA, 192 bp, Gossypium hirsutum
  Clone ID: LIB3196-008-P1-M1-A11
gtcagctgcaaatggagtaagacgcgtatgggttggtcaaaatggattgcttcaactcctgctgtatcagctgtaatacgtgaaagagttggtgtcgatggatccaaagcaactggtgcctttattttgacagctagtcataaccctggcggtcctcatgaggattttggaattaaatacaacatggaaaat

SEQ ID NO: 44940 - DNA, 374 bp, Gossypium hirsutum
  Clone ID: LIB3196-008-P1-M1-A12
acgggggaaaaaaatcactaaagctctttatgtttttgtcatctcacttggtcctctcaacactgccatcaggtgcgggggttccctctgtacccgtgaagctcagtggggtgtgtggttcagggaagcccggtggttggcctagcatggcatgacatcgtcccaggacagtaaccccccaaatattcttttccagtgccctgtcctgtccctccaggacgtggtgaagggcctgttcgtgtgctgcctgttcctggagtatgtggctttgtcccaaaggtttatacctgagcttattaattttcttcttgggattctttacatagcaacttcaaacaaagccagccaagagcacttgggaagcactcggaact

SEQ ID NO: 44941 - DNA, 357 bp, Gossypium hirsutum
  Clone ID: LIB3196-008-P1-M1-A3
atcgaaatcactccagttttctttatcactgaaaaatgtcttgctgtggtggaaactgtggctgcggttctggctgcaagtgtggcagtggctgtggaggatgcaagatgtacccagacctgaacgttgccgagatgaccacaactgagactctggttcttggtgtagcaccccagaaagcacactttgagggagctgagatggaattcggggctgagaacggctgcaagtgtggagacaactgcacctgcaacccttgcaattgtaaatgattagagaccaaagccaaagctccctggaagcagagacgcctttgtctttaagaaataatatggtttggtggttatgtgtttttag

SEQ ID NO: 44942 - DNA, 388 bp, Gossypium hirsutum
  unsure (1)..(388): unsure at all n locations; Clone ID: LIB3196-008-P1-M1-A4
atccgcaaagcatcaaacgaggctaagcgctacaccaggcgccccctggtggttgtctactacagtgtggacttcagctttgattacagagctgcaactcagttttggcggagcaaagtcctagaggtggccaaggacttccctgagtacacctttgccattgcggacgaggaggactatgctggggaggtgaaggacctggggctcagcgagagcggngaggatgtcaacgccgccatcctggacgagagcgggaagaagttcgccatggagccggaggagtttgactccgacaccctccgcgagtttgtcactgctttcaaaaaaggaaaactgaagccagtcatcaaatcccagccagtgcccaagaacaacaagggacccgtca

SEQ ID NO: 44943 - DNA, 314 bp, Gossypium hirsutum
  Clone ID: LIB3196-008-P1-M1-A5
atcggggatcttccaagtctggaaagttgaaaggagatgaccttcaggccattaagaaggagttgacccagataaaacaaaaagtggattctctcctggaaaacctggaaaaaattgaaaaggaacagagcaaacaagcagtagagatgaagaacgataagtcagaagaggagcagagcagcagctccgtgaagaaagatgagactaatgtgaagatggagtctgaggggggtgcagatgactctgctgaggagggggacctactggatgatgatgataatgaagatcggggggatgaccaacttgagttgatc

SEQ ID NO: 44944 - DNA, 171 bp, Gossypium hirsutum
  Clone ID: LIB3196-008-P1-M1-A6
ctcagcctggatttggatatcagcagcagcttgttccaggtatgaggcctggcagtgctccaatgccaaattttttcgtaccaatggttcagcaaggccaacagggtcagcgtcccggtgggagaagggctggagctgttcagcaaaaccagcaaccagttccatttatgc

SEQ ID NO: 44945 - DNA, 331 bp, Gossypium hirsutum
  Clone ID: LIB3196-008-P1-M1-A8
acggcagcctgctagatctgagagtgtgtgtcggtagctatcctctcgccacttcactcatcagctcagctgtactcaaactgaagttgcatgtttctaaacaagcccatggctgcagtttctccacctttggatccgcctctcttatttgctagaatatcagggatcctagtggcagctttggtcctctcgtgggctcttcttttcaagtctaagcttcttcctcactcttctttaccctcccaagaagccctcatctatgcagtcctccatcctttgctcatggttatgggcttcattctcataagtggggaacctatattgatacaca

SEQ ID NO: 44946 - DNA, 270 bp, Gossypium hirsutum
  Clone ID: LIB3196-008-P1-M1-A9
attcaccggagggataaaggggactgtttatttttttacctatcctcaaaccacttcactcattacttaatgtgaactcaaactgaacttgcatgtttgtaaacaagcccatggcttcagcttctccaactttaccaccacctatgttctaagctaaaatataacgcatcctaaaggcaattttgagcctctctaagactattcttttcaagaaaacgcttgcttgctcactcacaattacccttgcaagactaccacatgtatacaatt

SEQ ID NO: 44947 - DNA, 375 bp, Gossypium hirsutum
  Clone ID: LIB3196-008-P1-M1-B1
cggacgcgtgggtaaaaaaaaagttacattttgttctcttggctatatagccaaatacatctctgttgcgtgttgtgttgtttctatttccttttttggtttgcttgcaggttgggagcaaggtcaacgagaggggcttccgttttggtgcaaaggacaggcagagccgaccctcgagcggtgttggcgccgaggacgcacgtggctggtagaagggaggcacggtgctagggctagctagggtttctgcctctgctgaaaccgtttgggtctttgggcctgctaattgggtcataagattttttgtattttgggctatttaggctttgggccttatgtaaaaggactgctcttattctttaagattttggtttt

SEQ ID NO: 44948 - DNA, 348 bp, Gossypium hirsutum
  Clone ID: LIB3196-008-P1-M1-B10
atcagggaaggatgacaaaatggaaatttaaatgacatcctagaggtagaaaaaccgtggagatcacttttctcagactcaccagattttaatgggatttcatggggtttggttgtgctgatggggttaaggggaggcttctttctgcccttatgcccactcccatctgatttacctaattcagtctcagctgctgacatttggaaaggaccaaattgctttacagagtttttctttggggtatatctttaaaaactggaaaattctatggaatagttctggatataggacacaagtaaagggctatgcccaagaatatttatttatttattaccttatgagaaagct

SEQ ID NO: 44949 - DNA, 279 bp, Gossypium hirsutum
  Clone ID: LIB3196-008-P1-M1-B11
atccacaagaccattgaagagctgcgggacaagatcctgaccgccactattgaaaacaaccgggtcatcctggagattgacaatgccaggctggctgcggatgacttcaggctcaagtatgagaacgagctggccctgcgccagagcgtggaggctgacatcaacggcctgcgccgggtgctggatgagctcaccctgtctaagactgacctggagatgcagatcgagagcctgaatgaggagctggcctacatgaagaagaaccacgaggaggagatg

SEQ ID NO: 44950 - DNA, 325 bp, Gossypium hirsutum
  unsure (1)..(325): unsure at all n locations; Clone ID: LIB3196-008-P1-M1-B12
atgatcaaccgcatgatccagaggctgagatctgagatcgaccacgtcaagaagcagtgtgccagcctgcaggccgccattgctgatgctgagcagcgtggggaaatggcactcaaggatgccaagaacaagctggaagggctggaggatgccctgcagaaggccaagcaggacctggcccggctgctgaaggagtaccaggagttgatgaacgtgaagctggccctggacgtggagattgccacctaccgcaagctgctggagggcgaggagtgcangctgaatggcgaaggcgttggacaagtcaacatctctgtggtacaat

SEQ ID NO: 44951 - DNA, 213 bp, Gossypium hirsutum
  Clone ID: LIB3196-008-P1-M1-B2
gataccttgtaatgtgtcaataaaccattccacagaggttgtttgctaagaactttggggtttccaagaattacaataccatatcgagcacgtgttaaggcaacattaagcctgcggggatcatctagaaatccaataccctaaaaagtttatagaacagtttaaaaagtagcatgttagtttggtccataattaaagcatatatagagagag

SEQ ID NO: 44952 - DNA, 399 bp, Gossypium hirsutum
  Clone ID: LIB3196-008-P1-M1-B3
atgggccctcttgcttctctgatagctcccagcgtactctctgcagccatgattgccagacagcagtgtgtccgaggcgggtctcggggcttcagctgtggctcagccatcgtaggcagtggcaagagaggtgccttcagctcagtctccgtgtctggaggtgctggccgatgctcttctgggggctttggcagcaggagcctctacaacctcggggggaacaagagcatctccatgagcgtggctgggtcacgacaaggcgcctgctttggaggtgctggaggcttcggcactggtggctttggcggtggatttgggggctccttcagcggtaagggtggccctggcttccctgtctgccctgctgggggaattcacgaggtcactatcaaccagagc

SEQ ID NO: 44953 - DNA, 379 bp, Gossypium hirsutum
  Clone ID: LIB3196-008-P1-M1-B4
aagagagtgagagcccagttatcaaccggtgacctatttgtagtcccagcaggccatccagtcacattcgttgcctcccaaaacgaggacctaggattgctcgggttcggactctacaacggccaagacaacaagaggatcttcgtggctgggaaaaccaacaatgtgagacaatgggatcgccaggccaaggagctggcgtttggggtggagtcaaggttggtggatgaggtattcaacaacaacccgcaagaatcttacttcgtgtctggacagagtcggcgtggatttgatgagaggaggggaagtaataaccccttatcgccgttcctggactttgcacgcttgttctaagtagtagttttgtaaggcatgtaat

SEQ ID NO: 44954 - DNA, 370 bp, Gossypium hirsutum
  Clone ID: LIB3196-008-P1-M1-B5
attgtttctatttgactttgattagaataagatttttaaacctataaatagactagtcatctctcctcttgtatcattcgaatttaacagttagtgaatttttcttctcctctgcgttctatttttctttctttgtgattattgtcattatcgacgttcgatttttcatacacttcttcaaattcaaagctgtggttgcttaaaccatttttctttgtctaagttgaatgatcttcaagaattcattaaccatgattgatgagtaggggagagcaaaactcgattcgactaaaaaaattggaaaaaatttccaatttcgagttaaacaaactgagttatttgaatcaactaaaatcttttttttttttga

SEQ ID NO: 44955 - DNA, 101 bp, Gossypium hirsutum
  Clone ID: LIB3196-008-P1-M1-B7
atgagaattaaatgagttaatatatgtagaatacttagaagagtacctggcacatagtaaacactcaatgttaattattacttttaagtattttacagttc

SEQ ID NO: 44956 - DNA, 159 bp, Gossypium hirsutum
  Clone ID: LIB3196-008-P1-M1-B8
tagatggttagaccaaaccatggatcttattcacaggttcctcaacctcgtagctcctacattcaccttcttttcattggtctttttatggccaccctttaatgtgtctaactttttcctttccatcttacgctccgttttcagtgatattgtggggtg

SEQ ID NO: 44957 - DNA, 240 bp, Gossypium hirsutum
  Clone ID: LIB3196-008-P1-M1-B9
atgaatttatctcactaatatcttgaaaacagaagaaggcaaccctgaggtcctaaaaagacatggaaaagagcttataaactttagcaaaaggaggaaagtagcaaaaataaccagggagaacccacaagtcccaaattaagcctaactgtttccgagtggaatcagatttcaaaagattctttgaaaacttgaatccgatgggaaacagcttggaaaaagaatttacagataattttt

SEQ ID NO: 44958 - DNA, 262 bp, Gossypium hirsutum
  Clone ID: LIB3196-008-P1-M1-C1
acgcagactctcccgctccttctgactgcgatttcgttttcaagatctcagttctcaaatcgtagcgctcttttctatcaagccatggctctgatcttgcatgcaggaaaaacaaacaaaaatgcctttaaggcactcattgctgcagaatatagtggtgtgcacgtcaaaatggttgagaattttgagatgggtgtgtcaaataagactcctgagttcatcaagatgaacccttttgggaaagttcctgtgttggaaacac

SEQ ID NO: 44959 - DNA, 223 bp, Gossypium hirsutum
  unsure (1)..(223): unsure at all n locations; Clone ID: LIB3196-008-P1-M1-C10
atggccgccctttttttttttttttgttttttggtttttttttttgccagntggttatattactttgtttgggaagcttttttgccggggcagtctaccaaaattgggttccctttacaaaacataccgattcttggaaatgatgaggccatggaagccccggccagggcctgacctggcaggaacaaacctggctggtggctctgaggtacccggggaccga

SEQ ID NO: 44960 - DNA, 344 bp, Gossypium hirsutum
  Clone ID: LIB3196-008-P1-M1-C11
cccacgcgtccgcttctacactcttctctggtaagttcatcgaaagatcaaatcaagatccctgccaaaatgaacgacgctgatgtatccaagcagatccagcagatggtgagattcatccgccaggaagcggaggaaaaggctaacgagatctctgtttccgctgaagaggagttcaacatcgagaagcttcaattggtggaagcggagaagaagaagattaggcaggagtacgagaagaaggagaagcaagttgaaatccgaaagaaaattgagtattcgatgcagcttaatgcatctaggatcaaagtccttcaggctcaagatgatgtggttaatgcaat

SEQ ID NO: 44961 - DNA, 351 bp, Gossypium hirsutum
  Clone ID: LIB3196-008-P1-M1-C12
atctacccttgggactccctgagcctcccttgggctgtcagatcacccccaggttcagtgtgttagaacatacaaggcactgcagccagatgagctgaccttggagaagactgacatcctggcagtgaggacctggaccagtgacggctggctggaaggggtccgcctggcagatggtgagaaggggtgggtgccccaggcctacgtggaagagatcagcagcctcagcgcccgcctccgaaacctccgggagaataagcgagtcacgagtgccaccagcaaactgggggaggcccctgtgtgaggggcagccgtggcctgggacagcacctccatgcctggttcccggat

SEQ ID NO: 44962 - DNA, 359 bp, Gossypium hirsutum
  Clone ID: LIB3196-008-P1-M1-C2
tctccacaaaacacttgaaaagatctctcttcactttcttctcttttcaacgcagagtgaaaggcggggaggccgtagacaatctctcttgcgctcttctcgtagaatggatcagattcaacatccatctgtcatgcagaaggtagctggccagctcctttcttctagcatttcccgagattttcaagggtatgatgggtctttcaggaggcctgctctataccaaggacattttgcatatgggaattattccaatgctggaatgcactatcctattgttccatcaacagctaccgccatttgtgttcaagcccctgcagagaaaggatttaccagctttgccattgatttcctcatgg

SEQ ID NO: 44963 - DNA, 384 bp, Gossypium hirsutum
  Clone ID: LIB3196-008-P1-M1-C3
cggacacgtgggcggtacgcgtgggggaatttaaccgttttcttgtaagttttcagtgtaagaatgtagatagacaccactggcgaaagcatgtgatgccatattgcgttacgagcctataggggggagaaatcttaatgagtatggaatgcgcatctaactggatctagtgaataatgaacataagcgaagtgagacaattattcgagtgaaaaagaataataaagtttatggaccattataaaatttcgaaatgattgaaaggaatatgaattattagaggcatatatatgctcttgacttggaacagattaataggaagcgtttaaaatatgaagccaaatttacgattttgcatacttgaagagtggttacaaaaatgat

SEQ ID NO: 44964 - DNA, 181 bp, Gossypium hirsutum
  Clone ID: LIB3196-008-P1-M1-C5
ctcgttttttttttgagtctcccatcgtaaaaggatggcaggtaaacaggaggaacaagcgtttttgacaggtttatagtgggatgggcttgtattcggctctattgcagccatacatttggagagggcaaggtcacactatttacttagctaaggttctgcgcattaactaccaaattta

SEQ ID NO: 44965 - DNA, 338 bp, Gossypium hirsutum
  Clone ID: LIB3196-008-P1-M1-C6
atgttcatatatttgccattctcaattgactctaaaaaggtatgagcagcagcgggacaatctcgcccaacagtcattcaacatggaacaagccaattataccatccagtcattgaaggacaccaagaccacggttgatgctatgaaactgggagtaaaggaaatgaagaaggcatacaagcaagtgaagatcgaccagattgaggatttacaagaccagctagaggatatgatggaagatgcaaatgaaatccaagaagcactgagtcgcagttatggcaccccagaactggatgaagatgatttagaagcagagttggatgcactgggtgatgagc

SEQ ID NO: 44966 - DNA, 382 bp, Gossypium hirsutum
  Clone ID: LIB3196-008-P1-M1-C7
atcaccgacaaatctgaagcgggtttgccagaggagtgtacccgtcttcctgggctgggccaccgggtccacagggatcccatttccggccctacaccccgctccacgatcccatacgggcgctgcagctgtgttctgcatgctgcagggacgcgctgagacgaatccccggacgaggtgatggctgggccggcggaggaggcgggagcccattgttccgagggcctgtggcctctgcccccgcaggtgtcaccaagagtgacctacacacgagtgagcccaggacgggctgaggatgtcaacttactataccacccctgtgcccaaccctggctgaagctccaggtttgccttttggcctatgcttgtatggctaaaccct

SEQ ID NO: 44967 - DNA, 218 bp, Gossypium hirsutum
  Clone ID: LIB3196-008-P1-M1-C8
ccgatgcggtcagagggctgaaaaatattcacgtgctattggctggggtttacaaggagctacgtcaggcatggaggatgccaaagagcaaatcgaacaggagtccaaaaattccaagccaccatctcaagatgaggaggcagctataaagaaaaaatatggagggattattccccagaaaccagcactaatctataatgaccatgaacgggcctact

SEQ ID NO: 44968 - DNA, 352 bp, Gossypium hirsutum
  Clone ID: LIB3196-008-P1-M1-C9
atccgaatgggaccacgggacccaaataagcccccgtccctcctggacgtaaaggcacgcgcacatacctctaggagtgtgagacttctgccacctgttgggttggttctaggccccacctgccctcagggagcctcgacagggccggtgggagatgggcttgtgtcctgggaggcagctgcagctctcaccccagcggctgtctctgcctcaggctcccctccctgaagcgtgtctcgaggcgcacgggcacggctgctccgcgccagcgcgtaagtggattgcagctcctcccgcgcctgcgctcgctggccaccccccagcccctcaggcaccaggactggccactccc

SEQ ID NO: 44969 - DNA, 383 bp, Gossypium hirsutum
  Clone ID: LIB3196-008-P1-M1-D10
atgcgtgtggctcctgaggagcaccccgtgctgctgaccgaggcccccctgaaccccaaggccaaccgcgagaagatgacccagatcatgtttgagaccttcaacaccccagccatgtacgtggccatccaggctgtgctgtccctgtacgcctctggccgtaccactggcatcgtgatggactccggtgacggggtcacccacactgtgcccatctacgaggggtatgccctcccccatgccatcctgcgtctggacctggctggccgggacctgactgactacctcatgaagatcctcactgagcgcggctacagcttcaccaccacggccgagcgggaaatcgtgcgtgacattaaggagaagctgtgctatgtcgccct

SEQ ID NO: 44970 - DNA, 268 bp, Gossypium hirsutum
  Clone ID: LIB3196-008-P1-M1-D11
atcgatgtcaaatcatgcgcaagttccaggcgagcccactgaaaccaccacttccctcgtcgagaccgccaccggtgccatccaaggcttccgccccatcaaacaaatccatgaacatctctgcgcatttcatttctacggctacgacatgacccgtcaagtcgaagcgcaccatttctgcgcacatcaaaacgaagaaatgcgacaatgtctcatatatgacacccccgaagccgatgcaaagctcatcgggttggagtacatgata

SEQ ID NO: 44971 - DNA, 349 bp, Gossypium hirsutum
  Clone ID: LIB3196-008-P1-M1-D12
atgcctaaggaagtcaggcatccagctgcccacccctgagcccaagattcttcccaggaacacaaacgtaggagacatatgctcctggaagcaccagcctttatctcttcaccttcaagtcccctttctcaagaatcctctgttcttcgccctctaaaatcttggtacatctaggacccaggcatcttgctttccagccacaaagagacagatgaagatgcagaaaggaaatgttctccttacattttgtctactattgcatttagaagctgcaataaatcccagtgggactagcacctctgccaacactggacccactgtgacctccagtgggatcagcacagtcatg

SEQ ID NO: 44972 - DNA, 290 bp, Gossypium hirsutum
  unsure (1)..(290): unsure at all n locations; Clone ID: LIB3196-008-P1-M1-D2
ctgggttatttctttgtctaacgaagaaaagaaaatgacaatatctgcttcatttttgcttgcttttaccttgctgctcactgggtgtgttttgggtcctatatctcttgtttcagccaaacatggtgttccatcttatgctcataagaaaatcgcttctaaaccttttgaagggtatcttgaaaatggcaactttgaagaacagcccaacccgactgccataaagaaaacagtactcataggagcacacgcacttnccaaatggactatcacagggttagtcgagtaca

SEQ ID NO: 44973 - DNA, 332 bp, Gossypium hirsutum
  Clone ID: LIB3196-008-P1-M1-D3
tcgtgcgtaaatccttgcacgagcttcaatgaataccatgttttgcatgacctttattataccaaaatatagcgataatcgcttgcatttcagcacataatgatttaggaagtatgaagtgagtggttaaagattaatcatacaaaaatataccaaatgataaaaaattattggaatgtgtatattagggtgaggggatggctttctctgctgcactctgtatgtctatataagctaaagaatgatatcaagtttgggtggatggaatagcctatgcattggaattctattcaatgggcccagtacaaactgctgttgaggttaacggaata

SEQ ID NO: 44974 - DNA, 165 bp, Gossypium hirsutum
  Clone ID: LIB3196-008-P1-M1-D4
gcgcagtattccgggtgggacccacacctctcacaactactaactgggggcacgtatggttgatgctattgcgggttccatctattgtatgacgcatacatactcattgggcaggacgatagtagaaattttgagagctttagaggcatatactgtatatgataa

SEQ ID NO: 44975 - DNA, 394 bp, Gossypium hirsutum
  Clone ID: LIB3196-008-P1-M1-D5
attctcagatcattttgtctattcacagaaactaatttgctgccagtgatagggataatccatgatttctgagacatctacttccataatttcacagttctaagtctagaaaaattattagaagaaaattattgggtggtcttggaaccaacccaaagaaaaatcatgtcctgtgaacagtaggatagatactgaatctagcttgtctcactttggagctagttcttataatttcccttggactatatatttttgtccaatcactactgttcaggacatgggtttgatttgcttttccctcccatgagccactcaattgctttgctaaaagccccatcacttttcctctggtttcctttggtacaccaacctcaacacagagtccacttggttt

SEQ ID NO: 44976 - DNA, 354 bp, Gossypium hirsutum
  Clone ID: LIB3196-008-P1-M1-D7
atagaatgcacaaaatgtcaacatcagcagagatgcccagatctatttatctctaagtatatttgaagtgattgctgtttatatgttgtcattttaaaattgtgtgtcagtaaagctacctgtaaaatttcagtccaaaaaaataaagctctcagggagacatgaataaaaacaatgaacattagaaaataaaatatagatgcttaccattaacctaccaactcttaatatccttaaattatgtgatatataaagaggactgttacttttttttttttgctttgctttatttatttgtagtcggggatgaaggcttacggtttctcttttctttctatcgaacctcgtgggggt

SEQ ID NO: 44977 - DNA, 383 bp, Gossypium hirsutum
  Clone ID: LIB3196-008-P1-M1-D8
atggagatttgcttttgtaggacagttcatttgccacttctaccagaatgagtcattttgtgtataagtgtcaagcttggagaggttctaattaagtgcaaattacaatgaaattaataaatggcaccaatttttagattttaaaatgtgctttgagagaatgcaatgtgggcttagattgattgtaattctcgtgttttaagttgtgattcaatattatgtagcattaaaactcaattaagtaaaaaataaatgaagactcaaagagagagaacactcatctctcaaatgcctcaacttctccaatgataacttaaaatctgttaaatgcttagattggaattctccttattggtcactacattccaaaataattgcacata

SEQ ID NO: 44978 - DNA, 376 bp, Gossypium hirsutum
  Clone ID: LIB3196-008-P1-M1-D9
gatgctgcaagcccacagcagtttgaaaacaatcaagaaaaaactcatcaggaaagcccttgatatgattcgtaaaattgccgaggaggatcctgatgagtcgagtggcaaagatgagaaagaagtggaaacatctggtgatgatgatgagaaaaagggacaatacaccaagttctggaatgaatttggaaaatccattaaactcggcatcattgaggatgcaaccaatagaaatcgcttggcaaaactccttcgatttgagagcaccaagtcggatggtaaattgacatcacttgatcagtacatctcaaggatgaaattcggacagaaagatatattctacattacaggaaccagcaaggaacaattagaaaaa

SEQ ID NO: 44979 - DNA, 203 bp, Gossypium hirsutum
  Clone ID: LIB3196-008-P1-M1-E1
cctactctaacctctgttaaaagacctccgtcgccgccagacaagcctctcgccaccactttcgacagtccgttttttggattttttgatttctgggtgaagtgcggaaagagttgctttcctaaaggggacagaaatcttaacacaaaggtgccagaactacctacaacatgtcaggcaggaaggaaacagtgttggatttg

SEQ ID NO: 44980 - DNA, 370 bp, Gossypium hirsutum
  Clone ID: LIB3196-008-P1-M1-E10
atgcagcagtgatggcacacaagaagtatgaaccatttttgaataaaagcattggtcattatgatgaaatggctttggttgttggcaaagatatggcaacatggagttttgccagaacatttgttgacatagatttggatgatgataaccaagattcagtgcctgtagactgcgacaatgaagaggctgaagaggtaagaacaaaagtatcttcatctaacacatccaaacgtaaaagaaaaaatattcaagaaaatgtcgttgatgaaaaaattaaatttgtgggtgaacaacttggcaaaattgctaatgctttggaacaatttactgcggataagacaccacatctttacgaagaagtgatgtcgat

SEQ ID NO: 44981 - DNA, 338 bp, Gossypium hirsutum
  Clone ID: LIB3196-008-P1-M1-E12
cccacgcgtccgatggcgaaagaattcacggtgccgccggtggtcttcccctccggcagcggagtcaacccttccgttggaaacatcaaccaacgccgcgtacccactgctccattccaaccctcacgccctccttcctcctcttccgctttacccttcatgtctttcgatatgggttcggccacatcgtcgtcggtatccttaggcggttcaatctcctcctccgcagcaaccggatccgcttcattcgaagacgaagagccccttctcgatgaactcggtatccacccggatcaaatctggtacaaaaccagatccatcctcaaccctcttcgggt

SEQ ID NO: 44982 - DNA, 358 bp, Gossypium hirsutum
  Clone ID: LIB3196-008-P1-M1-E2
aaggattttctagaccgagtttctcacctttgggtgctcatgttctatttgtaaaaaagaaaggcgacacgatgagaatgtgtatagattattgtcagttgaataaagtggctatcatgaataagtatcctctgcccccaattgatgatttgtttgattagttgaaaggagctgctgtgtttttgaaaatagatttgagattaagctattatcagttacgagtaaaagactcaaacattttgaaaactactttcagaacaaggtatggccaccatgaattcttagttatgcctttcggattaactaatgcacctgctatctttatggatttgatgaatagaattttcatactgtatct

SEQ ID NO: 44983 - DNA, 181 bp, Gossypium hirsutum
  Clone ID: LIB3196-008-P1-M1-E3
atgtaacatacacgtgtaaactctcgtgtttaaagagagagaacatttgatggtgtgtacttttaaaaagggaaccaaaccgccttccacaacttggaaatgtgtattccaggtttaaaggctccatacttggtaaaaaaaacttaaggccttccaccggggagctgcctttattttattc

SEQ ID NO: 44984 - DNA, 388 bp, Gossypium hirsutum
  Clone ID: LIB3196-008-P1-M1-E4
atgcggctgggaccctgcgtacatatcctgagaacggcgagggccttcaaggctatcatcgctgcacaatactatatggataaggtgcgcgtgctctccaaaccaccccactttcatgatgagcacaccaacctgaccgctgtatatgttcccaaattttctgacatgcaggctccagcatttgacggggacgatggattctgcgtgtacgagagccacgccattgactactataggagcaatgatgagctgcggggacatactccagaggcagcacaccaggtcgtgcattgggtcagctttgctgattacaacatagtgcccccagtccggacctgagtattccccaccttgggcatcatgcaccacaacaaacatgccactgaga

SEQ ID NO: 44985 - DNA, 236 bp, Gossypium hirsutum
  Clone ID: LIB3196-008-P1-M1-E5
gccaattcttgtgtcaacttctcggcacgatcatcatgtccgccggcaaatgtgtaaacctggaaagcgaattggaaaaccctccatagcagcttaacgccgccatttttgttttgcccatcaccttctcttctctcctgaaataagtcccaaaaaaatagaatggaaaatccaattatgataagctcgacatatacacacacgagtataattgagtctagctaagctcaagttgt

SEQ ID NO: 44986 - DNA, 377 bp, Gossypium hirsutum
  Clone ID: LIB3196-008-P1-M1-E6
atccctgatgtagcgcgtgtattctgccggaaggtcgcaggcctgccttgttcgcctctggttctgagtacctctcctccttactgcagcgtgccctgatggtgcactctggctgcttcccacacactggtgcctgcttgcctgatgctagttctcctgtgtctcacacacgcagggcaggaggttcgtctatgctggctctaactcgggcgtggtccaggcccctctggccttctgtgggaagcacggcacctgcgaggactgtgtgctggctcgggacccctactgcgcctggagcccacccacagcgacgtgtgtggctctgtaccagactgagagccccagcaggggtttgattcaagagatgagcggcgatg

SEQ ID NO: 44987 - DNA, 253 bp, Gossypium hirsutum
  Clone ID: LIB3196-008-P1-M1-E7
gaccttctgtaattagttcaaaacaccttttttttgtttatttgcaacataagactaaagcatgtaaggtttctttttttcctttcttgtcatttatttcctaggaaaaataataaataaataaataaggtgttttggacaaattacaaagaagtgtctaagttttgtcaaaagttaaagaaaatgttatgtgaactatctgttaataggttaatgagatttttaatgtaatgaccaatttgaataattatat

SEQ ID NO: 44988 - DNA, 308 bp, Gossypium hirsutum
  Clone ID: LIB3196-008-P1-M1-E8
gagatgaggaaaatcatgggtgccaaagttcttttcttctttgctttgctttccttttcagctgtctcggcatttgcacaggatgaggaagaccaaggtcttgttatgaacttctacaaggattcttgtcctcaggctgaagacattatcaaggagcaagttaagctactgtacaagcgacacaaaaacactgctttttcttggctgagaaacattttccatgactgtgctgtccagtcatgtgatgcttcactgctgctggactccacaagaaagagcttgtctgaaaaagagacagacaggagctt

SEQ ID NO: 44989 - DNA, 251 bp, Gossypium hirsutum
  Clone ID: LIB3196-008-P1-M1-F1
atgctctcagctctcggcgcacggcccagcttccttcaaaatgtctactgttcatgaaatcctgtgcaagctcagcttggagggtgatcactctacacccccaagtgcatatgggtcagtcaaagcctacaccaactttgatgctgagcgcgatgctttgaacattgaaacagccatcaagaccaaaggtgtggatgaggtcaccattgtcaacattttgaccaaccgcagcaatgcacaaagacaggata

SEQ ID NO: 44990 - DNA, 222 bp, Gossypium hirsutum
  Clone ID: LIB3196-008-P1-M1-F10
aagagatctttttataagaactcttccaaggattatttcgttattattatttctacaatctaaagagacagagcaatgggaaaaacagagcaaaattcagttcttttagtcccaattttcttctatatattgacaatatcattgcctgtctctgtttatgccaaaaaaccagtggcgatactcgaaaagaagacattccttatattaaatgtcaaatttgtg

SEQ ID NO: 44991 - DNA, 336 bp, Gossypium hirsutum
  Clone ID: LIB3196-008-P1-M1-F11
ctctacttcgttatctccaatcccccctctcgaggtggatggaaacttcctggacagagcattgacttccaaacagagaaatggtcacgtttccgtgctcctttatgcttcttggtgcccattttcacgaagattgcgtccgaattttgacattatcggttccatgtttcctcagttggagcatctggcagttgaggagtcttcagcttcaccaagtatattttcaagatacggaattcatagtttgccatcaattctaattgtcaaccagacatcaagggtacaatatcgtggtccaaaagatctcccttcaatagaacaattttatgagaaaat

SEQ ID NO: 44992 - DNA, 322 bp, Gossypium hirsutum
  Clone ID: LIB3196-008-P1-M1-F12
atctttaagatgacttgtttcctttgaaaatacatatgtactgagggttatgatttatgtcagaaattgacataagtgcttttacaagcaccaaagttgaatgaattttcaacaaaatgtaattcaagtctatgttttcagatgtgactcaggttaagaaatgtgttttaggatctacttgctggtttttctttttgatccaaatgtatgatctgccctgataaataacaagttatagtaccatctcccccgccaaaaaaaaaagaaagaaaagaaaaaagagaaaacctgtggcactatgtaaataaaagtagcatacttt

SEQ ID NO: 44993 - DNA, 276 bp, Gossypium hirsutum
  Clone ID: LIB3196-008-P1-M1-F2
attcgctcagttgttgctcaagtgcgctcgctggcggagcttgtctgccctgttttcctgcaaggcctttcccagcgtgcccacgcggaaagcaactgcctaagaggcgcggcgtcgcaccgcccagagctgaggaagtcggcgccagttcgtggggctccgggccgccagtcagagccatgagctacgggcgcccccctcccgatgtggagggtatgacctccctcaaggtggacaacctgaactaaccaacctcgtccgacacgctgaggcgcg

SEQ ID NO: 44994 - DNA, 283 bp, Gossypium hirsutum
  Clone ID: LIB3196-008-P1-M1-F3
gcgggaagtctgagaatgtcccatctcccccaaatgggatttctgaaatacccccatcacaaccacaatcaatctagtattattacttgtgggcttagaggaggaacaaagaaacccttgtggaaatcaagggtgctttccaccgaagccatccaagctgttcattccctcaagttagccaactccaattccaaattacaccatgttttatccaccaggctttccaggttactcaaagctgaccttttggatactttggctgagttacaaaaacaaaatgaat

SEQ ID NO: 44995 - DNA, 389 bp, Gossypium hirsutum
  Clone ID: LIB3196-008-P1-M1-F6
atgctgaacgttaatacgtgtagtaaacgcacctccttgtattcccactttcgtagtcatttcggttctgatcttgtcaaacccagcctgaccgcttctgacgccaggatggcctcgttactagacttttctttttaaggaagtgctgtttttaagggttttcaaaacattttgaaaagcacttcagatttacttttttgaccacgagccatgagttttcaaaaaaatcgggggttgtgtgggtttttggttttttagtttttggttgtgttgcctttttttcttttggtggggttggccccatgaagtgggtgccccactcactcctctgagatcgaacggactgtgaatccgctctttgtcggaagctgagcaagctgtggcttttt

SEQ ID NO: 44996 - DNA, 325 bp, Gossypium hirsutum
  Clone ID: LIB3196-008-P1-M1-F7
agaagatgcagatattcgtcaaaaccctaacagggaagactatcactctcgaggttgaaagcagcgataccatcgacaatgtcaaggccaagattcaggataaagaaggcatccctcctgatcagcagaggttgatttttgctggtaagcaactggaagatggccgaaccctcgctgattataacatccaaaaggagtccactcttcacctagttttaaggcttaggggaagaaccatgatcaaggtgaagactctcaccgggaaagaaattgaaattgacattgaaccaactgataccattgatcgtatcaaggaacgggtcga

SEQ ID NO: 44997 - DNA, 273 bp, Gossypium hirsutum
  Clone ID: LIB3196-008-P1-M1-F8
ggcaaagccatcgaaggcagcagggacagggaatgttccgtaaagccagccaagaacaaataagggcattgagccaaggagctacttcaccaagggggaaaggtagcgagggatacgccttcgacttattgagccaaacccctcgctactccaaccaaaacggccgcttttacgaggcttgccctcgtaatttccagcagcaactccgagaagtggattcctccgttgttgccttcgaaataaacaaaagatcgatcttcgtaccgcactaca

SEQ ID NO: 44998 - DNA, 388 bp, Gossypium hirsutum
  Clone ID: LIB3196-008-P1-M1-F9
atctcctacagatccatgcacttgcgtataggcgtgagattttttttaaatgattcccccttgggttacgtgggcatatgcatttttcggaagtcatagcctgtatactcaagatgtgtgcattttgctatatggaaattacacagtttttaaaaaatgagttcttcctccccttaagttgatagtggagcttgcataaatgtgcaagtggttgccatggcccacggggatccatttgtggttaccagctgggaggagatacacctgcttgcatgtctctagcaagagggtgtgacctggccccaacttctggcaatttgggcccctttcttaggcctttattctatattcattttgccttgggttcttaatacctttacttcttttc

SEQ ID NO: 44999 - DNA, 355 bp, Gossypium hirsutum
  Clone ID: LIB3196-008-P1-M1-G1
gaaaggaccaaaagggtttaatctgctgtgcacgttgtagctcaccacccaaactttaacaatggccgtcggtaagaacaagaggatttccaagggaaagaagggaggaaagaagaaagcagctgatccatttgcgaagaaggattggtatgatatcaaggctccatcagtttttacgagcagaaatgttgggaagactcttgttacccgtactcagggtaccaagattgcttcagaaggactcaaacacagagtgtttgaggtttcactgggtgatcttcaaagaagtgatgaagatcatgcttacagaaagattcgtttgagagctgaagatgttcaaagaaaaaatgttttg

SEQ ID NO: 45000 - DNA, 359 bp, Gossypium hirsutum
  Clone ID: LIB3196-008-P1-M1-G10
caacaaataagaaatgttaagggatacaaggaactagtcatgattggtgatggtgctactgatcttgaggatttcgcccggcattgaagaattagtcaagaagctaaaggcaaggaataccgatgtttatctaatttccgggggctttcgccaaatgatcaatggagtatgttggaattcacagttcgggatttagagactttctgctgaaaccggagctgcttcgatctattgtggattctggttttgaacatccttccgagggcaaagttttaaactcatgtctgatgttaacattcgtgaattcaatgaattaagtcatttgtttttcttgcttttagtgacttataatggggggc

SEQ ID NO: 45001 - DNA, 315 bp, Gossypium hirsutum
  Clone ID: LIB3196-008-P1-M1-G11
atggcatccaccacgatgctgtcatcttcctggccgagcagcttcctggagcccagcgttgccagcactataagttccgttaccaccagcagggagagggccaggaggagccgcccctgaatccccatggggctgctcgggcagaggtctatctccggaagtgcacctttgacatgttcaacttcctggcctcccagcaccgggtgctccctgagggggccacctgtgacgaggaagaagatgaggtgcagctcaagtcaaccagacgtgccaccagcctggagctgcccatggccatgcgctttcgtcacctta

SEQ ID NO: 45002 - DNA, 344 bp, Gossypium hirsutum
  Clone ID: LIB3196-008-P1-M1-G12
acactatagaacaagatggaacaaaaaagcacgctggtgcccgtccgcaatttccgggatgggcccaactcagcacgttgagccatgtggcgcgtctgacagtatggctcctatacagactgatcatgaaactgatcatgatctacacaccagccatcaccctcgaaagatccaacatcaagtactccatgcggttcatcgaccggaagatcataatgcatgacacccgacgcttgcgctgtgccctgacagcatctgaacatatcctgggcctgcctgtcgaacagcacatgtacctctcgagtcgaattgacagaaacctggtcataccgccctatacacct

SEQ ID NO: 45003 - DNA, 334 bp, Gossypium hirsutum
  unsure (1)..(334): unsure at all n locations; Clone ID: LIB3196-008-P1-M1-G2
gcaacttactaagctgtatgcttattccctttcctttccattttcttatagtattgccaagctagtgtcggggatcaagggacgtcggaggcatcgatcacactatcacttgaagcttttggtatagttagtttaaatgttttgattgtggcatgtatagggacttgaatcttttgtttagagccttgatagtttagccgcaagtgttggctcatatgatggatgtaatattcaatttgtataggccattaatatntgttaatattgattattattaaatgcatttgatgcaaatttctcatggttgtgggtggtttgggtatttggggtatac

SEQ ID NO: 45004 - DNA, 335 bp, Gossypium hirsutum
  Clone ID: LIB3196-008-P1-M1-G3
tttctctttctttctatttagggatttttttctctgtggattctctctcctctttctctctccagaaaaaaggaaaaaaaaaccctaaagagctattttacacccccaaatagctttatggatgacgatgcgttgaatatgcgtaattggggttactacgaaccgtcgattaaaggacatctcggtctgcagctaatgtcgagcatggttgaacgggatgcaaaggcttttattcccggccgtgatcccaatctcatgattactaccaataccacctttcaccagcgggaccccattgtttccgaggcacatatgcccatgaattatgttaggga

SEQ ID NO: 45005 - DNA, 262 bp, Gossypium hirsutum
  Clone ID: LIB3196-008-P1-M1-G4
ggaagaaaaatcaagatttttattgaatgtatgtattatatatattaaaattattattatggttttataattattatgattatttaatgaatattatattttaaataaattaaatagctgataaaaatatggtagtaaaatatacatgtgtgaaaaaaattatattggtacatttggaatttaaatacttaattacttattatttaaagtaaaagaatatttgtaaattaaatattaaattatttaattattgaaatttttg

SEQ ID NO: 45006 - DNA, 381 bp, Gossypium hirsutum
  Clone ID: LIB3196-008-P1-M1-G5
ggctgcatcaaagcttacactctttgacataacaaagcaaatttgtgatgcagttcaagctagggccgagcaagacaagaaccatggggtcatcctcctgcctgaagggcttatagagagcattcctgaagtgtatgcgctattgaaggaaattcacagtttgctcaggcaaaatgtatctgctgataaaatttcttcccagttatcaccttgggcatctgctttgtttgaatttttgccacatttcataaggaaacagcttcttctccaacctgagtcagacgattctgcacagctatcacagattgagacggagaaactactggcgcaccttgtagagaatgaaattaataagcgcctgaaagcaggcacttacaaggg

SEQ ID NO: 45007 - DNA, 337 bp, Gossypium hirsutum
  Clone ID: LIB3196-008-P1-M1-G6
agccttccggggggaaaaaaaggtaaccttgtctgcttaattaaattcattttgggcgaattaaataccaaagttccacctaacttggaccatgtttatattctgcggcctatagggcggacatcacttattccaggggctattttgcctttgaaagacccccacagtgggcttctggaaattgaacaccctgatgctataaagaggacttatgcactttatgcagatgattgctttgttacaatggggatcacattcggtaacatttatttactccaacctgttatgcacctatatgatcatgctttaacacatgagacggagaaactactggcgc

SEQ ID NO: 45008 - DNA, 343 bp, Gossypium hirsutum
  Clone ID: LIB3196-008-P1-M1-G8
atgtgctaagtatttactccctgacttcatatcacgatatagccagttaatggtagagatgggcttaaaatccatgtctgtcaactctagaaatattcccaaaattccacaccgtccctttttctcttcctaccacaccacctcacacgtgtttgtaatgatttctgaacagtaatataacaattgctgcaattagacttttctacagtctgataaaaacaatacaatttttaccatttgcagtgatgatttcccttttggttcctatctaaggaggaagctccatggtcttaccttcccaattatgaagcaacgatgacctctttaaactcgtgaatctaaa

SEQ ID NO: 45009 - DNA, 327 bp, Gossypium hirsutum
  Clone ID: LIB3196-008-P1-M1-G9
atctctctcagacctgggctgaattttgctgatcagccgggtggctttggccgagaacttcacttgcctcagtattctcatctgtgaaataaggaccctcatacccacattgtagagtcacgaaggtcagagattattctgagtggcagccagcacctggcctggctgaggacattgcaccattcattatcctggaaattgaggcagacactccagcccctttctgggatcctggccacgccactgtgctcctgccctgcaagctggctcccacgggtctctgatggcccaccaaggggctgcccaaggacctgactccatatattc

SEQ ID NO: 45010 - DNA, 241 bp, Gossypium hirsutum
  Clone ID: LIB3196-008-P1-M1-H1
gacaccctagaacaagagggaacgcaaaagcacgctcgtgccccgccccaatatccccgatgggccctattccttctgtgatagcttccaggttactctttgcactcttgaatgtcaaacagcattatgtaacaaagcggaactcgaggcttaagctgaggctcaaacatcaaatgcaggggcaacagaggtgcctaaagctcatgctcctgactttgaggtgctggacaatactcttctg

SEQ ID NO: 45011 - DNA, 367 bp, Gossypium hirsutum
  Clone ID: LIB3196-008-P1-M1-H10
caccatttttcccaaagagagaaagatccctaacactccaccgatctctccatctcccctaaatctgatgcacccaccatttccagtaaggtggagagagagagagatataagtgaagtcttttaaaagatatcattttctttttgatactttacttcttctagtaacaataagaatcctagcttttttagctttcagggtgataaaaataaacaatggaaccgttttttaaacacccttttttcatctgctgtatgggctttattcaggtttttcattgaagggcgggttgaggtttggtaaattaaacccgttcagactttgttgaaaggaagatgaaaggcgaggatcaaacaaggtctttgtt

SEQ ID NO: 45012 - DNA, 380 bp, Gossypium hirsutum
  Clone ID: LIB3196-008-P1-M1-H11
atcatcaacaggggaagcaagctaaagcagccaccccccttcccctttttctccaattattatctttattcatccattattctctctctgtgtctatgcttttgttcttctcatagtcttcttagtgttgcctaaatggcgtctttgagcttctttttcccttctggttaatggagtcctttggttattggatgatttgaggttatatcagttctaagttgtaacagatactagtagaaactcaaagcttcagtttgatttcggagatttcctcgagtttcggatttgttctgagtcctgtattggaacgatgatgatgtttgaggagatggggatttgtggggatatggatttctttggtgcttctttgggggaaaagg

SEQ ID NO: 45013 - DNA, 312 bp, Gossypium hirsutum
  Clone ID: LIB3196-008-P1-M1-H12
cccacgcgtccggccaaacatcatttacttaggggcatcaacgagttccgcattgccattttagaagcaaaccccaacactttcgttctcccacaccattgtgacgcggagaaaatttacgttgtcactaacggaagaggaacaattacgttcgtgacacatgaaaacaaagagtcatacaatgtagctcctggagttgtagtaagaattccagcaggaagcactgtgtacttggccaaccaagacaacagggaaaagctaaccatagcagtgctccaccgccctgtcaataaccctggacaattccagaaa

SEQ ID NO: 45014 - DNA, 389 bp, Gossypium hirsutum
  Clone ID: LIB3196-008-P1-M1-H2
atcgggcacggtcgtggcgtgacgtcgggaggagggcagacacgccgctttttggatgcctcctgtgcctggcgagagtcttgtctgagccggcaccaccacacggcccacaacatcttctcagggaagcctgtggaccctctgccaggcactgcaagaggtcaggacaggacagtgtgttcacaaggccagtttctgattgtccgccctgagggtgaggaccagtaggcagttcccaagatgggtgaaaggaaaggggtcaacaagtactatcctccggacttcaaccctgagaagcatggctctctcaaccgataccacaacagccacccgcttcgggagcgggctcggaagctgtcacagggcatcctcatcatccgattcgaaat

SEQ ID NO: 45015 - DNA, 402 bp, Gossypium hirsutum
  Clone ID: LIB3196-008-P1-M1-H3
ataaaaaccttgaaaaaagattagacgaatgactaactagaataaacaacgtagagaagactttaaatgacctgatggagctgaaaaccatggcacgagaactatgcgacgcatgcacaagctttagtagccaattcgatcaagtggaagaaagggtatcagtgattgaagatcaaatgaatgaaatgaagcgagaagttcagagaaaaaagagttaaaagaaacgaataaagcctccaagaaatataggactatgtgaaaagaccaaatctatgtctgataggtgtacctgaaaatgacgaggagaatggaaccaagctggaaaacactcttcaagatattattcaagggaactttcccaacttagcaaggcaggccaatgttcaaattcaggaaatacag

SEQ ID NO: 45016 - DNA, 451 bp, Gossypium hirsutum
  Clone ID: LIB3196-008-P1-M1-H4
gacaccatctaacaagagggaacgcagaagcacgctggtgccccgccgcaatttcccgggtgcgacccaatcgttcgttttctcttaagtggggtggcaggggaagcctaatgtgactatgagagactagtttacggagctaccgatacgctgctgatatatgacctttgtttaacgggtttcacgacttgaacctaataattgtgtgaactgctctctccttttttccctcccttattattgtttggggtgagcatttatatggttggacaacacatacaagactggtgttaaacgactgcctgtgaaagggccttaactggtggtgctgtacagatccgctggtctatgcttagagctctcactccttgctgtcttccttgggattgaaactttatataactggagcaagtggagagccaaaattttgcttgtcactgcacatcaatat

SEQ ID NO: 45017 - DNA, 350 bp, Gossypium hirsutum
  Clone ID: LIB3196-008-P1-M1-H5
atgggaagcaccgtctgtgcccggatccaagccctgccacctagagtccagagccaggaaggggctgctgagggagggcatcctgctgggctctctactcggcccgcccctccaagggtctggcctgtgagccttgactgggcttcatgctgtggaggcccccccactccctgaagcagctgggactctgctcacacaagcgactgggctggccctggcccctaaaccccaagcccgtgctggctgcctgcacaaagagcagctgaggcccaggcagggcccccacaccagaccccagcatagcttccccacccaagcacccccttcccaaggcagcaggtgtgggagtc

SEQ ID NO: 45018 - DNA, 433 bp, Gossypium hirsutum
  unsure (1)..(433): unsure at all n locations; Clone ID: LIB3196-008-P1-M1-H6
aagantgaacaaaaaagcaggctggtcccgggccggacttcccgcgatctttatattagtaaagctgaaaagaaagcacccttcacttatcttagcctggcaaccctcctccttgttgacccccatgctttcttcctcttagtacctttgcgttggatgaatttaagcgcaagtactccaatgaggacacactctctgtggcactgccatatttctgggaacactttgataaggacggctggtccctgtggtactcagagtatcgcttccctgaagaactcactcagaccttcatgagctgcaatctcatcactggtaagagagcgggtctgagacgaggaaggagaacaaagagtagcaagtgctgtgattccaaaagctgaatgttcttgctagccccttcacgaatgttccagcgactggacaagctgag

SEQ ID NO: 45019 - DNA, 373 bp, Gossypium hirsutum
  Clone ID: LIB3196-008-P1-M1-H7
acgatcttcgctttgagattagatccaaaattctcctttcctcttatttccgattccgcaatttttcctgacaccctaatcctaatcccagattcctgctgtctacatcggttagcaaatggcaaccgaggacccggcagtcgtggcagaccccgcaccccagacggaggaggacacgactggtgagaccaaagctacttcaaaatccggcagagcaaagaaagccaaagaacccaaaaccaagaaagctgcagcttctaagaaaccacgggctgctcctacttatcctccttacgaagagatgatcaaagatgcgatcgttactttggaagagaggacagggtcaagtcagtacgccattgctaagttcatt

SEQ ID NO: 45020 - DNA, 329 bp, Gossypium hirsutum
  Clone ID: LIB3196-008-P1-M1-H8
atccttctgacctctatgctgaggggtgtgaggctctagttgtgaagaagctacaagaaatcatgatgcatgtgatctgggctggactggcatttgcagatattcagctgctgggcatgctgtgtgcctgcatcgggttgcgcagaacgagtagagatcctgcttatgagctcctcatcactggtgggacctatgcatagttgacaactcaagcctgagctttttggtattgttctgagttggaaggcgaattgaccaagtgtgctgctgttgagctactgagttcatgtaagtaaagcacatgtacactggagatggacagagcagct

SEQ ID NO: 45021 - DNA, 311 bp, Gossypium hirsutum
  Clone ID: LIB3196-008-P1-M1-H9
actatagggaaagctgatacaccttcatacccctccccaatatccccgatcctacccacccgtatgatcatgcgggggagggtatatttaaaattatccttcactaaaatatccaacaacccaatttttcttgacaccctaatccaaatatcaaattcctgctctttacatgtatcatcaaatggcaacccagaaccacttaaaatactcattatcagctcctcataaattggaagacctaactattgataccaaatctactctaaaattccttcgaataaaataagctctaaaacccaaaaaaccaaaaa

SEQ ID NO: 45022 - DNA, 81 bp, Gossypium hirsutum
  Clone ID: LIB3196-009-P1-M1-A1
attattgaatgaggggactaagggttgggcaggcattacccaccaaagggcacacaggaactaggacaggtctgactgggg

SEQ ID NO: 45023 - DNA, 279 bp, Gossypium hirsutum
  Clone ID: LIB3196-009-P1-M1-A10
gactcactagagggaaagctgaggcgcgttcatgccccgccgcaatttccgggatcagctcccccccctccacccaccctttgagagtcaccaccacgaccccacgtgatatccaaccaaagaggaggaaacaccgattcttgaatcatgggagttggaggagcatttcactcttctactagtatgccttttctcagcactgctgactgatgtgcggatcaactgtaatggacaggaggtcctgttcctggcagaaggtgataatgccatgctgggctg

SEQ ID NO: 45024 - DNA, 341 bp, Gossypium hirsutum
  Clone ID: LIB3196-009-P1-M1-A11
gtaagaattccagcaggaagcactgtgtacttggccaaccaagacaacagggaaaagctaaccatagcagtgctccaccgacctgtcaataaccctggacaattccagaaattcttccctgctggacaggaaaatcctcagtcatacttacgaatcttcagccgtgaaattcttgaggctgtcttcaatacacgaagtgagcagctagacgagctgtttggtgggaggcaaagccatcgaaagcagcagggacagggaatgttccgtaaagccagccaagaacaaataaaggcattgagccaaggagctacttcaccaagggggaaaggtagcgagggata

SEQ ID NO: 45025 - DNA, 354 bp, Gossypium hirsutum
  Clone ID: LIB3196-009-P1-M1-A12
cacatgctttgatgctacagcagaagctgaggcacctttaataacattacatttcgaagccttgtcgatgccattgccaatggaaaacagcttcttacacaccagtgccgggtctcgggcatgcttggccatagcaccggtccccaacaatgtgaacgccgccatgaatgtgatagccaatttgcagcagcagaatcataggattctctttgatgtcatcaattctcgcttgggaattgctcgtgaagcttgcaattagtttcttattggctttatttttttttgtttgttctttgtttgctttcttgtctttatgcgtaagctcttttttttagtggttttatatgatgaaaa

SEQ ID NO: 45026 - DNA, 298 bp, Gossypium hirsutum
  Clone ID: LIB3196-009-P1-M1-A2
tcacggccgcgtggggaaaatgatgctcagccacaaaagaagccgttcaagatattgcggtatttttcgctgataccaaggctttaaaggcttttcatgtattcgaagacagtggagtcaatgacgtggcaccatgaaagacgaaccgatgatggactattaaggcataccgcagattctttagcttggaaatcatttgacaatatatttacaagctttgcaagcgatcccaggagtgtgaggcttggactagcatctgatggatttaatccttacaagatcatgagtactgcataca

SEQ ID NO: 45027 - DNA, 319 bp, Gossypium hirsutum
  Clone ID: LIB3196-009-P1-M1-A3
atcaaacctggtcgcaccactcgtgtgagtaaaaactacttgtgactccagtgccatatgcaaactgcttggcaagggctgtaggtttacagtcctgacgaagaggtttactgcaaaaacttcattttgcttgcctactgaagggagtctatctcccgctacatgggactatttgttagatatgacaagggcactaacacctgtcggacctgcactgatgttgttttatctgctcatagtaccagtgctctgactctccgtcctgaccaaactgtctcttgtagttcacaggacagagagcaggtgactattctgtgag

SEQ ID NO: 45028 - DNA, 333 bp, Gossypium hirsutum
  unsure (1)..(333): unsure at all n locations; Clone ID: LIB3196-009-P1-M1-A4
attgcatacttctggaatctccgggaagtgcctgtcgaagctgatgatgccagcgactgtgaaatcaactatgagggcctggacaacctcctcctcctgaaggagctccagtacttgtcgctgcaacgctcgcctcacttggaccactggtgtctcacccgcctttacccactggccgactcgttgcaggagctatagctggcccggtgtccccgcgtatacgaacggtggcttggctggctacaacacctccagaacctacacaagctggacatttcggacctncatgccgtgtgcaacccaggcctcactcagatcttagcggaggagatg

SEQ ID NO: 45029 - DNA, 312 bp, Gossypium hirsutum
  Clone ID: LIB3196-009-P1-M1-A5
atgcctaggcatcccttaactcagcacctctgacatttccacagagccatgagggtatgtgcccccaagagagtgtctactgtgagaataagtgtggtgcccgcatgatgcggcggctgctggcccagcatgccacctctgagtgccccaagcgcactcagccctgcacctactgcaccaaggagttcgtctttgacaccatccaggtgaggcccttcctgagctgtggttgcagggcaggtgacagggagtcaggatattgactcctgcctctctgcctctgtggccccagagccaccagtaccagtgccc

SEQ ID NO: 45030 - DNA, 380 bp, Gossypium hirsutum
  Clone ID: LIB3196-009-P1-M1-A6
atcagaagatgaaaggcacatcttacatagcggcaggcaggagagaatgagagccaagcaagacgggaaaccgcgtatcagaacatcagatctcatgagtcttattcactatcacgataacagtataggggaaaccacccccatgattcagttacctcccacctggtccttcccacaatgcatgagaattatgggagctacaattcgacatgagatttgggcagggatggagccaaataatatcactcagtctcaggtacttctttatagcagtgtgagaacagactaatacactggttcatttggctcctggtgagggccctcatcctggtttgtaaacagctgctttcttgctatatcctcacatggtggagggagag

SEQ ID NO: 45031 - DNA, 303 bp, Gossypium hirsutum
  Clone ID: LIB3196-009-P1-M1-A7
tgataacttcaagcttactcattgacaacatgattgccagacatctgagtgagctcagctgagcaacgggctaaagtagaggctcagccatcacaggccacaggacgagaggcgccgtctggtcagactccacaactggaggtgctaaccgatgcagagttgagggctaagagcgtagcgagcgtatgaacctattgggggacccgagcgtgttcaagagcgaaaataaagcatgacatagctcatgttacgaaggagcaggccgctaatggcctgagagctttggcgaacgattaagacatc

SEQ ID NO: 45032 - DNA, 133 bp, Gossypium hirsutum
  Clone ID: LIB3196-009-P1-M1-A8
gcgaattttcttggttttcagccatctcctcggttgtggttgaagtatcgtcctcttgctcgtcctttgtgtatcttaggcttcgccttatttctctttggtttttgtgaactgcgcggtcgatctcaccctc

SEQ ID NO: 45033 - DNA, 319 bp, Gossypium hirsutum
  Clone ID: LIB3196-009-P1-M1-A9
atcagctcccccccctccacccaccccctcacacgtaccaccacgaccccacgggatatccagcccaggaggaggaaacacccagtctagaaacatgggagtcggaggagcattccaccttctactcgtgtgcctgagcccagcactgctgtctgctgtgcggatcaacggggatggacaggaggtactgtacctggcagaaggtgataatgagaggctgggctgcccctacggactggaccctgaggactatggtcccaatgggctggacatcgagtggatgcagcgtaactcagacacctcccaccaccgagagaac

SEQ ID NO: 45034 - DNA, 402 bp, Gossypium hirsutum
  unsure (1)..(402): unsure at all n locations; Clone ID: LIB3196-009-P1-M1-B1
atgccaagagaacctttgtcaccgagtaactcgcgcacaccgagtcccaaaagccttccgtcttacctcaatggggtcatgcccccaacacagagctttgcccctgatcccaagtatgtcagcagcaaagcactgcaaagacagaacagcgaaggatctgccaataaggttccttgcattctgcccattattgaaaatgggaagaaggttagttcaacccattattacctactacctgaacgaccaccatacctggacaaatatgaaaaattttttagggaagcggaagaaacaactgcaagcgcccaaatccagccattacctgctgactgcggcatatcttcagccacagaaaagccagactcaaaaacanaagtggatctgggtggncacgtgaagcgt

SEQ ID NO: 45035 - DNA, 359 bp, Gossypium hirsutum
  Clone ID: LIB3196-009-P1-M1-B11
gatttttgttttttccaaaaagaaacttccttagttccgctaagcgaaaccgtaggttcatcatgtcgccgtccggagacggagccatcaatggtggatgttgctgctcttgttctcccggcgagaatggtggttatgatggagccaataatttcggtatctccgcatcgcaagacgagacatgcatgcattgcccgaggtctgaaccttcatcatgttcttcctctgagctcggttttgattcggtcctgttaactaattccgagatgttgcctagaattttcgtcgcttcagctaaaggcttctcaattgtagctggcctgcaaggtggcttagctatcttctccattctcgcacgc

SEQ ID NO: 45036 - DNA, 400 bp, Gossypium hirsutum
  Clone ID: LIB3196-009-P1-M1-B2
atcccaagtaagagcaaatctgtatgataacattgttttctctggacataagacataacagtaacacgatgtacatttacaagcggccttatgtacatttcccaacaatctttttaaggcaaaattgtgaccatatgtgtataattaaaatcgtttttaatcctttgcctatgaaaatattttggaaaaaaacttgctgtgtatattcagtttctgaaagataaagaaagtgctttgtattttgttgaagtcagtattttgtataaacatttatgttgacccagttatgtttagtgctgaaaactaaaatgaacatgctatctctgtcagctgaatatggaagaaatcttttttactagagatctgcagaagaaaagcaatcttctgagcacaatatgga

SEQ ID NO: 45037 - DNA, 374 bp, Gossypium hirsutum
  Clone ID: LIB3196-009-P1-M1-B4
ataaattctctaagagccggggtgtgggagtgtttggggacatggcccaggacacggggatccctgccgacatctggcgcttctatctgctgtacattcggcctgagggccaggacagtgctttctcctggacggacctgctgctgaagaataattctgagctgcttaacaacctgggcaacttcatcaacaggtgggaattggtaaggggtcagagttagcagtgagctggggtggggctcattttccctcaggagatgggaatgtggagagaactagaaaatgggcaggaggctgtgaggacagtgtggaaagttgatttctattaattgggatctgttcctagcacatatgaggctatgtatgcttgatgg

SEQ ID NO: 45038 - DNA, 362 bp, Gossypium hirsutum
  Clone ID: LIB3196-009-P1-M1-B5
gacactatagaacaagagggtacgcagaagcacgctggtgccgggccggagtttccgggatgtgacccacgcgctcactgacgcgacaccacatactgcagcactttctaatgagaacatcacggatgagccactaggaaatgctgcactctcatatgctcacctgggcagttgtttctaaaaatgtgtgctgcttcggacgtcctgtgctcctaccactgttgctgccctgcagcccctggtcaagtgtacagacccttatcctgccttacagtgtctctgtctgacatgacacacgcttccacccaagtacctgtgacccccaggctggaacagggctagtcggagatacgtgtgctttc

SEQ ID NO: 45039 - DNA, 356 bp, Gossypium hirsutum
  Clone ID: LIB3196-009-P1-M1-B7
atgcctcaggaagaacttcaaagagagtctgggcctctccagggtaaggggaagcctcgggcttgggctcgggcctgggcagctgccttggagaattctagccctaagaacttggagagaagtgctggacaacgtagtcctgctaaagaaggccctctagacctctaccccaagttgactgacactatccaagccaaccctgtaccaacccatctctcattggtcaactctgcccaagccagccccatgccagttgactctgttgaagctgatcccactgcagtaggctctgttctagctggccctgtacctgttgaccctgggttggttgaccttgcttcaaccagctcagaact

SEQ ID NO: 45040 - DNA, 352 bp, Gossypium hirsutum
  Clone ID: LIB3196-009-P1-M1-B8
cccacgcgtccggacccacgcgtccgtcctgattatatcaagatgtttgtcttggatgaggctgatgagatgctttcccgtggttttaaggatcagatctatgatatcttccagctgcttccagccaagattcaggttggagtgttttctgccacaatgccgccggaggccctcgagattactaggaaatttatgaataagcctgtgagaattttggtaaagcgtgatgagctaaccctggagggtatcaagcagttttatgtgaatgttgaaaaggaagagtggaagcttgaaactctgtgtgatctttacgagaccctagccattacccagagtgtcatttttgtgaata

SEQ ID NO: 45041 - DNA, 356 bp, Gossypium hirsutum
  Clone ID: LIB3196-009-P1-M1-B9
ttactgcacttcaaaatattaaaagcggaacaaaaaaaaaaaaaaactacccattttttctgttcaccaagttctagataatcggagatatggcttggataacacgattcttaacggcggtagctttcttggctgtcggcataatattctcgccggagactttcggatcaaaatcggatggtacaaaatctccaaatctctcctcattcattaagctggctcatctgctgagcttctcaaccgactggggcgctgccctttgggtcactttcatcggcggtatcatcatgttcaagaatctgcctaggcatcaatttggtaatctacaaagcaagatgttcccggcttatttctcg

SEQ ID NO: 45042 - DNA, 342 bp, Gossypium hirsutum
  Clone ID: LIB3196-009-P1-M1-C1
atgcgcgggccttccccggtggcctggccgaggacatcaattaaggccaggtgtctgcccggcaggagctcaagcagctggcacgctacctgaccttaaagtaccagtgggacgtggcctgggcccgcaagatctgatgctttgggcctgactgcaccggccccaacatcctgaccgacattaccaagggcgtgcattacgctaacgagatcaaggacagtgtggtggccggcttacagtaggcctccaaggagggtgcgctctgttaggtgaacatgcggaatgtgctcttcgacctacaccacgtgactctgcatgctgacgccatacaccctgggggcg

SEQ ID NO: 45043 - DNA, 298 bp, Gossypium hirsutum
  Clone ID: LIB3196-009-P1-M1-C10
atcagggccctgccggtcccccaggtccccctggactctcagggcccactttatttacagggcctcacaggcagactatcagcgttccccgccctccgggcctcactgggcccactgggcctcctgagaccatggtcaccttctcaggggtgaggctctggtccacgccccaggtcatgctggggcaggggcacgaggttcctgagggctctctcatgttacaagaccatcaggatgagctttacttccgtgtgccaaaccggctcctgaaggggcacttgaagctcccgacctcact

SEQ ID NO: 45044 - DNA, 392 bp, Gossypium hirsutum
  Clone ID: LIB3196-009-P1-M1-C11
attgcgacgaagacgagaccaccgccctcgtgtgcgacaatggctccggcctggtgaaagccggcttcgccggggatgacgcccctagggccgtgttcccgtccatcgtgggccgcccccgacaccagggcgtcatggtcggtatgggtcagaaagattcctacgtgggcgacgaggctcagagcaagagaggtatcctgaccctgaagtaccctatcgagcatggcatcatcaccaactgggacgacatggagaagatctggcaccacaccttctacaacgagctccgcgtggctcccgaggagcaccccaccctgctcaccgaggcccccctcaatcccaaggccaaccgcgagaagatgacccagatcatgtttgagacctttaacgtg

SEQ ID NO: 45045 - DNA, 375 bp, Gossypium hirsutum
  Clone ID: LIB3196-009-P1-M1-C12
accaaaccatggatcttattcacaagttcctcaacctcgtagctcctacattcaccttcttttcatttgtctttttattgccacccttttatttcttcaacttcttcctttccatcttacgctccgttttcagtgagaatgttgctaggaaagtcatcgtcatcacaggcgcttcttccggtataggagagcatttggcatacgaatatggtagaagaggagcaaggttagctctgacagcaagaagagagaaatcactgcaagaaattgctgatagagctcgtgatttggggtctcccgatgttattgtaattcgtgctgatgtttctaaagttgatgactgtagacgacttgttgaggaaaccgtgaatcatt

SEQ ID NO: 45046 - DNA, 402 bp, Gossypium hirsutum
  Clone ID: LIB3196-009-P1-M1-C2
atcggccggggacggtgtgagagcagtaagatggcggcggcggcagtggtggagttccagagagcccagtctctgctcagcaccgaccgggaggcctccatcgacatcctccactccatcgtgaagcgtgacattcaggaaaacgatgaggaggcagtgcaagtcaaagagcagagcatcctggaactgggatctctcctggcaaagactggacaagctgcagagcttgggggactcctgaagtatgtacgacccttcttgaattccatcagcaaggctaaagcagctcgcctggtccgatctcttcttgatctgtttcttgatatggaagcagctacagggcaggaggttgagctgtgtttagagtgcatcgaatgggccaaatcagagaaaagaactttc

SEQ ID NO: 45047 - DNA, 347 bp, Gossypium hirsutum
  Clone ID: LIB3196-009-P1-M1-C3
ggtgattcggtaactccagctgataacagtggttacaattacagtcaacctccagcttctagctatatgcaaccaggacaaggatattctcagtatggctatggtggataccatcaatctggttatgggcagccatcatcatacgatcagcaacaaagttatggttctgcttcgagctacggtaatgtgacaaatccaactcaaggtggtcaaggggattcaggtcaggcacctacgtctacccaaccgtctgcaacaggccaacaagggtataatactagtcagcagcctaacccaaaccctggaagttatccaccttcaggaagtactcaacctggttatggaat

SEQ ID NO: 45048 - DNA, 376 bp, Gossypium hirsutum
  Clone ID: LIB3196-009-P1-M1-C4
ccaaaacttaccttaatctcaatacattagctaacacatacctgtaccttttaattcaatttcacattcggtctttacttaaaattgcccattgaatcatttaaaattaaataggatactcggatagtcgcacttatagtacaatgccaacgtcccagacgtggtcttacatgtaattacatatcaatgccattgtctcagacagggtcttactcgtaaacacatatcggaatcatctatcgatgccaacgtattaaacgtggtcttacttgcacacacatataaaaattacatatcgatgccaatgtattaaacgtggtcttactcgtacacacaaaccagaatcacatatcgatgccaacatattaaacgtggt

SEQ ID NO: 45049 - DNA, 391 bp, Gossypium hirsutum
  Clone ID: LIB3196-009-P1-M1-C5
atgacaatctgtctgtccgtctgcagctgcgtgactgtctgtctctgccatgtctctctccccatgccgggcccagaggggcttcagctctcgctcagcctgttctgctcgctcaaggggctgcagcaggggaggcttcagcagcaggagccttaattcctttggggggtgcctgggaggctctcgtgggagtacctgggggtcagggggaaggctgggggtgcagtttggggagtggagtgctgggcctgggctctccctgtgccctccggggggcatccaagaagtgaccattaaccagaatctgctgaccccactgaagattgagatcgacccccagttccaggtggtgcggacgcaggagacccaggagatcaggaccctcaacaac

SEQ ID NO: 45050 - DNA, 396 bp, Gossypium hirsutum
  Clone ID: LIB3196-009-P1-M1-C6
atcgcctatgatgtccttgacatgaggcgtatagttgagcccggctgcctggatgccttcccaaacctgaaggacttcatctcccgctttgagggtttgaagaagatctctgcctacatgaagtccagccgattccaccgaggtcttttgtttggaacgacagccacgtggaacagcacatagggccccgtgatgccagaagatggaagggaagagccgacccttctgcctgtgacccgggagaacagcctgactccctggacccgccttctttctttctccttctttctgctctcttctcttccccaaggcctcattggcttcctttcttctaacatcatccctccctgcatcaaggctctttaaagcttcagctccccaccgtcttccatcaca

SEQ ID NO: 45051 - DNA, 377 bp, Gossypium hirsutum
  Clone ID: LIB3196-009-P1-M1-C7
attgattttgcagatcggttctctaatccttttttcgggtgtagcgttgtttatacgtttggttgttgttgaagaagtgctactaccatggctacaaagaagagcgttggggacttgaaggaagctgatttgaagggaaagaaagtgtttgttagagtcgatctgaacgttccattggatgataacttcaacataactgatgacacaaggatccgtgccgctgttcccaccatcaagtatttgatgggtcatggctctaaagtcatcctctctagtcatttgggacgcccaaagggtgtcactcccaagtacagtttgaagcctcttgtgccaaggttatctgaactccttggagtcgaggttaaaatggcaaatga

SEQ ID NO: 45052 - DNA, 397 bp, Gossypium hirsutum
  Clone ID: LIB3196-009-P1-M1-C8
atgcttggtagcctagtacaggttgtttttttaaaaaagaaaaagcaggaaggaggagtgaattttattaacatgtttgccaaatgtattgagatttggcctctgaagaacactttttcagtgttaagttgtctttaccttaagattgagaaatactttagaatattattaattttaagtcctgtcttcacgtccttttggaaaacttgtgttaccatgggtttggaaaaaggacaacaaaaggcttttcgtgtaaagataagatctctagctgtctctaaccctgtccttttttcacagcattttttctagttttgcttcattgcttatcattaggatagggtaagttaagtttgctatgctgctagcatcctaagatgatacctttgttgaaaga

SEQ ID NO: 45053 - DNA, 389 bp, Gossypium hirsutum
  Clone ID: LIB3196-009-P1-M1-C9
atggccctcttgcttctctgatagctcccagcttactctctgcagccatgattgccagacagcagtgtgtccgaggcgggtctcggggcttcagctgtggctcagccatcgtaggcagtggcaagagaggtgccttcagctcagtctccgtgtctggaggtgctggccgatgctcttctgggggctttggcagcaggagcctctacaacctcggggggaacaagagcatctccatgagcgtggctgggtcacgacaaggcgcctgctttggaggtgctggaggcttctgcactggtggctttggcggtggatttgggggctccttcagcggtaagggtggccctggcttccctgtctgccctgctgggggaattcaggaggtcactatc

SEQ ID NO: 45054 - DNA, 351 bp, Gossypium hirsutum
  Clone ID: LIB3196-009-P1-M1-D1
tgttcatccagagatctaagcttattagcttaagctataaaaatggtgaaaagatcgttgggctttttctttcttctcctcattgtcttagcctcccaatggggggtgcagccaactgaggcacgggtttgccagtcacaaagccataagttccacggtgcatgtgtgagtagccacaactgtgcgatggtgtgcatggacaaaggtttctccggcggcagatgtcgaggattccgtcgccgctgcttctgcactaagctttgctaatgcaagcttggccttagctcatattttaaggatttttcttgagtaaaagacctttatgtttttcgtgcatgcatgttaatggtt

SEQ ID NO: 45055 - DNA, 345 bp, Gossypium hirsutum
  unsure (1)..(345): unsure at all n locations; Clone ID: LIB3196-009-P1-M1-D10
ccaaaaggtcgngagaagggtgaagaggttgttagagatggaagtaacagccagagggtggaggaggagaaggcggaggaagaagaagcagctgctgctgccgccgcctttgcagctaaagcaagagcgaaaaggaagtcttcacggccaaatccacggctgagtaacccacccaggcacgtccacggcgaacaagtcgccgccggctggccatcttggctgtcgaacgtcgccggtgaagccatcagcggctggactcctcgccgtgctgattcttttgagaagattgataagattggtcaaggaacatacagtaatgtgtacaaagctagggatactttgact

SEQ ID NO: 45056 - DNA, 372 bp, Gossypium hirsutum
  Clone ID: LIB3196-009-P1-M1-D11
caaaaatggaagatttcccttagatttatctaaggtagttgaccttttaatggaagatttcccttcttgtttaggtggttgggcatcttgctgcaaaaaattaaacataatcattggttaaacaaaataaaaaaaaattaaataaaaaatgtactcaatatttataactaaagaacaacactgtacctgtttcgaatttttgcaagaccgcttgttatggccatgttggccacattgagtatatgtcatgagtagacctttcctactcaaatgaccaggctttaattttttgggttcatctttggccatcctcctattctttttgggcctcccaggcatattcctttcaatggaggtagcacaggctgaata

SEQ ID NO: 45057 - DNA, 376 bp, Gossypium hirsutum
  unsure (1)..(376): unsure at all n locations; Clone ID: LIB3196-009-P1-M1-D12
ccatcttgttaatcagttcaagggttgaaaccgatacttttgatttttcttttttcctgcaggagcgtgaaaagaaagcaaagaagaaggcagcagcagcatctgcaagcagcgcaaatgttgaggaaccaaccgaaactgttgcagaggttccagaaccagagaaagatgttaatgctgaggaacctgttcctgcccccgttccggtgaagaataaagttcagaaggagaatacagtaaggtacaagaatcgaagtagagcacgggagtcacttcctagacctgtcctgaaacgtaagaagtcgaccaactactggatatgggcggctcctgctgcggntgtggtgctgatacttatagctttggcttactatta

SEQ ID NO: 45058 - DNA, 364 bp, Gossypium hirsutum
  Clone ID: LIB3196-009-P1-M1-D2
atagccagttctggagcttgaagtccgacggcaggatttatagcaagttgaagccaaatttagttttagatgtcaaagggggcacacagtatgatcaaaatcacattatcctcaacactgtcagcaaagagaagtttacacaagtgtgggaagccatggtcctataaacctgaacaaagaaggaagaagaatcttctggaggtccttccagtcaccttattttttaaaaaggacaatgctgatggaagatccaactggaaagtggatcaactcctccttcattgattctaaattcaaccttaaatcatgctgccatgactcagagaacttactcatcgtttcaaaagactatcatagctttaag

SEQ ID NO: 45059 - DNA, 303 bp, Gossypium hirsutum
  Clone ID: LIB3196-009-P1-M1-D3
gctcgtattgcttgcaacaagtatatggccaagtatgctgggaaggatgccttccacctgcgagtccgtgttcacccattccatgtcttgcgtatcaacaaaatgctttcatgtgctggagctgataggctccaaactggtatgcgaggtgcttttggcaagcctcagggaacatgtgctagagtagccattggtcaggtcctcctttcagttcgttgcaaggacagcaacagtcatcatgctcaagaggccctccgacgtgctaagttcaagttccctggtcgccaaaagattattgtcagc

SEQ ID NO: 45060 - DNA, 375 bp, Gossypium hirsutum
  unsure (1)..(375): unsure at all n locations; Clone ID: LIB3196-009-P1-M1-D4
gagaaatcttcgaattctgtaccggtagttgacatgaagtctaaagctgcattgccaaaggaagatgataaatctactggcaatacaataccggatgttgcagcaatctcggctttcatgacacaagtatcggaccttgttaagcttgttgattcgagagatattacagagttgcaactgaagcaatcggattgtgaacttataataagaaaaaaggaagctttgcagccaccggaacaagcacccccagttttcatgccacagtacatgcctcatcatgccatgtttcaaaccccatttccggcagcagccccaacagcatcaccggcaccttcaaacccagcccctncaccactagcactgccctcagctgca

SEQ ID NO: 45061 - DNA, 396 bp, Gossypium hirsutum
  unsure (1)..(396): unsure at all n locations; Clone ID: LIB3196-009-P1-M1-D5
atgaagccctcacacactgaagattttattgaggatattgtaaagctcattaatgggagatacaaagggcaatcaggaatcatatattgtttttctcagaaagactctgaacaagttacggttagtttgcagaatctgggaattcatgcaggtgcttaccatgccaatttggagccagaagataagaccacagttcatagaaaatggtcagccaatgaaattcaagtagtagtggcaactgttgcatttggtatgggaattgataagccagatgtgaggcttgtcatccatcattcaatgagtaaatccatggaaaattattaccaaaagagtggacagtcangtcgagatgacatgaaagcagactgtatttcgtactatggctatggagatata

SEQ ID NO: 45062 - DNA, 365 bp, Gossypium hirsutum
  Clone ID: LIB3196-009-P1-M1-D6
cccacgcgtccgattgaattggcaaatttttttcggttggctggatttgatgatttagtgcaggactgtgctgctctgctggcatatgaacatccacaggagtcctgtgtgggataccttctagaagagtcgcaacgtgatcttgtggcagacacagttaatgcgatgatattgtcaacaaatccgaacacgcaagatatggaagggtgcttacagtcgtatcttgagagattactgaggcagctaacagcttgctgtttggagagaaggtcggcaaatggggaacagggtgaagcatttcttttacgtcgtgttcttaacagctgatgtgatgatgtttgactaattccatcccaatttacaag

SEQ ID NO: 45063 - DNA, 381 bp, Gossypium hirsutum
  Clone ID: LIB3196-009-P1-M1-D7
atgaaggagctcttgcaggagcagctggagcagctgcagagggagtacagcaaactgaaggccagctgtcaggagtcggccaggatcgaggacatgaggaagcggcatgttgaggtctcccaggcccccttgccccccgcccccggtgagtgagtgagcattgggcctgtgggaggaggtgggtggggagggcaggtgctgcgccgcgggaggtcacagttcgaccttcctgtcgctctccggagacttgacggcgggagctcgtataggccaccccatcggtagcccacccccttccctgaggctaagggaggcgtgccgtggtatcggcggctcctggttttacatgagtggcctgtgagaccaggcctgccattgaca

SEQ ID NO: 45064 - DNA, 373 bp, Gossypium hirsutum
  Clone ID: LIB3196-009-P1-M1-D8
atctgggagagcggtccgcggggtacgttcgtcgtattgccggagagaaccggagtcttctaggtggtgtccatcatgttctctatcaacatgttcgaccacccgaataccaacgtcttccaaaaccgcttctccacacagtaccgctgcttttctgtgtccatgctggcagggcctaatgacatgtcacatgtggagaaaggagggaagataattatgcctgcctaagacctggaccaactcaccagacttaatattacctatcccatgctgtacaaactgaccaataagaattcggaccgcatgacgcattgtggcgtgctggagtatgcggctgatgagggcatctgctaccttccacactggatgatgc

SEQ ID NO: 45065 - DNA, 393 bp, Gossypium hirsutum
  Clone ID: LIB3196-009-P1-M1-D9
atgcggtagcggctgtgttgctcgtttctctgagccatccagtgccatcctcgtcgctgcagcgacacacgcgctcgccgccgccatgactgagcagatgacccttcgtggcaccctcaagggccacaacggctgggtaacccagatcgctactaccccgcagttcccggacatgatcctgtccgcctctcgagataagaccatcatcatgtggaaactgaccagggatgagaccaactatggaattccacagcgtgctctgcggggtcactcccactttgttagtgatgtggttatctcctcagatggccaggttggcctctcaggctcctgggatggaaccctgcgcctctgggatctcacaacgggcaccaccacgaggcgatttgtggg

SEQ ID NO: 45066 - DNA, 382 bp, Gossypium hirsutum
  Clone ID: LIB3196-009-P1-M1-E1
atcacctttacacctgtcttcttatcctcacatctgttttcacaccttcacccctgtctttctcatgttcacacttgtcttccctgtgttcatgcctgactttctcaccattttggtttgaaggacagtcttctctggcttgtatttttgttttgtttcttttttttttccccagaaaatcagtattattttttaaataagagaaaccttcctaaaagatgataattgtgaaaacctcctttggcttgtttgctcttccagattttagtctcctttctccccatccaggaaagatggtggaagacaaaggctaaatttctccagcctcacagtggtcttcacttggtctgacttgtaccagttctagcacccactgaaaaac

SEQ ID NO: 45067 - DNA, 372 bp, Gossypium hirsutum
  Clone ID: LIB3196-009-P1-M1-E10
atagaaaaataaagtagggcaaagtggataggaagtggtgggtggtagtgggacggatcctttatacagggtggttcaagggaggctttgctgtgagggatatgccatatgcatatttgggggaagagcattcttggcattgataacagcaggtgccaaggccctgaggtgggattgtgtttagagcattcaagcaagaaggccagggaggctggattaaataatctccaaatgcctcttaaaggaggtggtggtaactctaatttaaatgtcagataaatggttgaaagaaagttttcactctggctaggtgggaatcctaaatcatctctttacaatcaatactttctgattaatgtatctaattaaata

SEQ ID NO: 45068 - DNA, 359 bp, Gossypium hirsutum
  Clone ID: LIB3196-009-P1-M1-E11
gaaaggttaggggcaaaacggtcatttggaccgggggtagatattaaacttgaaatatataatgtagtgtattaatgagttaaattttgttgtttagaccccgaggaacaaattccggaggtcgatcgaggtaagcgccaggtttcgaaataaccgaaacacaactctgaaaagaataccagttaagttcagataacttaaagtaaacccctaatatgcatatttgatggtaacatgtgaaaaatgtctcggatgaggttgacaaagggaattcgatggataaaccctcattgatatgtgtaaagagatcctgcgtgtgttgtagtaaggatttagcctggacaggtaatccgttgatc

SEQ ID NO: 45069 - DNA, 283 bp, Gossypium hirsutum
  Clone ID: LIB3196-009-P1-M1-E12
cggacgcgtgggagaaaattgggagattggaaaaagagaaacaaagaagagaaagaatggcttggatatggttggaagcagcacttcccctcggaatcatagctggaatgctctgcgttatgggcaatgctcagtatttcatccacaaagcttatcacggccggcccaagcacatcgggaacgatatgtgggacgtcgccatggaaagaaaggataagaagctcttcgagaacctctcttcctccgattgatccctttttagttttcttctggaaacttggtc

SEQ ID NO: 45070 - DNA, 398 bp, Gossypium hirsutum
  Clone ID: LIB3196-009-P1-M1-E2
atggcattttgactgtccattgcagtgttctgatcttaaaattgacatccactttcctaatgtatatgagattctcttagttgaagtaggagaatcaaatggagcagttgtcctgcccccaccccatgttcttacaagcagctgtgatggagttattctgaccttgagtcactgcctcccatcatttcccagacgtttggaccttgctctccctttgagaatcatcttccacattttttctttcttctcccacctctatttgaggtagtggcatctgtgccattgggtggtttcactgctcctttacttcatttgcagtttctttcccatgatagtttttagttgggcagtcttaaaacccctctgataggaaggaaaatagatgtaatgtgagagag

SEQ ID NO: 45071 - DNA, 381 bp, Gossypium hirsutum
  Clone ID: LIB3196-009-P1-M1-E3
ctcactccgccatcttcaataatttcttccgttgatctttgttagagattagctttttaatttttcattatgggaaagatcaagatcggaatcaatggatttggaaggatcgggcgtttggttgcgagagttgctctccaaagcgatgatattgagctcgttgctgttaacgatcctttcatcaccactgaatacatgacgtacatgtttaagtacgacagtgttcacggtcaatggaagcatcatgagcttaaggtgaaggactcaaagacccttctctttggtgaaaagcctgtcacagttttcggtatcagaaaccctgaggaaatcccatgggctgaagctggagctgagtatgttgttgagtctactggtgttttt

SEQ ID NO: 45072 - DNA, 361 bp, Gossypium hirsutum
  unsure (1)..(361): unsure at all n locations; Clone ID: LIB3196-009-P1-M1-E4
cccacgcgtccggctttttcttagttttcctttttgtcccttgtttatttgatatttccccctcatggccgccgctgatgtcgagttccggtgcttcgtcggagggctcgcatgggccaccgacgaccgggccctcgaagaagccttcagtgcgtttggtgaaatcgtcgaatcgaaggtccgtttgttgcagggatcggactccagatctgacttgatccgacccgatctgggcgcccctgtcatatgatctgtgatccttgttctgttcttttgtgttacttgttacttgatactactctcttgntactattctctnttaaaactctcaccgatcattaatgatcgtgagactggaaga

SEQ ID NO: 45073 - DNA, 366 bp, Gossypium hirsutum
  Clone ID: LIB3196-009-P1-M1-E5
gttcaagtgtcgagtatgcggagaaaaaggccataacagaagaacttgtccaaggtcaatgttgagcaatgaaggaaggtcaagtagaaggcgtcaccgttgcaaagtttgtcgcaaaagtggtcataatcgtcgcacatgccctcaagtgataggggtgagagacattttgaccgctggaagtagaatatacacctgcaagttatgccgaaaggaggggcacaatgcaaggacatgccctagtagcagttaataacaaaacagtttgattttgggaggttatgtgaagtcacaaacttagtgtttatgttgtatgatggacggatggtaaatattgagaatgtagaacaagttatatatatatat

SEQ ID NO: 45074 - DNA, 356 bp, Gossypium hirsutum
  Clone ID: LIB3196-009-P1-M1-E6
atgccaggctccctggggtcagccgctctggcttcagcagcgtctccgtgtcccgctccaggggcagtggtggcctgggtggcgcatgtggaggagctggctttggcagccgcagcctgtatggcctggggggctccaagaggatctccattggagggggcagctgtggcatcggtggcggctatggcagcagagccggaggcagctatggctttggtggcgccgggagtggatttggtttctgtggtggagccggcattggctttggtctgggtggtggagccggccttgctggtggctttgggggccctggcttccctgtgtgcccccctggaggcatccaagaggtcaccgtc

SEQ ID NO: 45075 - DNA, 363 bp, Gossypium hirsutum
  Clone ID: LIB3196-009-P1-M1-E7
atggagcttgcagtgagccaagatgggaccactgcattccagcctgggcaacaaagcgagactacgtctcaaaaaaaaaaaaaaagaaagaaaagaaagattctgaaagatggaaagaagaaggcagactacctgggaacctcaggaattaagaaatgacatgcagtgagttatttgggtttccttattatctcatgtatattctggagaggatactgaagaaagccttcaacctggaaccaccaacggatggcacaaacaaaaaatgcccctacaaaagcctatctgtttagccaacagaccaagacaaggctcacctaagaggcaagaatggcttttcagcaatatttgccctactacagc

SEQ ID NO: 45076 - DNA, 401 bp, Gossypium hirsutum
  Clone ID: LIB3196-009-P1-M1-F1
atcagctgagcaatgcacggagtggacctgtaggcgacttgcatcatcttcaacatgaagatagccacagtgtcagtgcttctgcccttggctctttgcctcatacaagatgctgccagtgagaatgaagatcaggaaatatgccatgaatttcaggcatttatgaaaaatggaaaactgttctgtccccaggataagaaattttttctaagtcttgatggaataatgttcatcaataaatgtgccacatgcaaaatgatactggaaaaagaagcaaaatcacagaagagggtcaggcatttagcaagagctaccaaggctactgctccaacagagctgaattgtgatgattttaaaaaaggagaaagagaaggggattttatctgtcccgaattttatga

SEQ ID NO: 45077 - DNA, 385 bp, Gossypium hirsutum
  Clone ID: LIB3196-009-P1-M1-F10
ataacgcagcggccggccatggtgcagacggaggatgagtaccagttctgttaccaggcggcactggagtacctcggaagctttgaccactatgcaacctaaagccatggtcccccccggcctgacaccaccggccccggatgcctctgcccttcccgggtggacctcctgaggcctggacccccagtgggcagggcaggaggcggcagcagctgcgtttctgcaccgtttccggggaccatcagcccctcaggccccccactggccccggccgccccagcgacctccctggcaccggccgccgccttcaaatacttggcacattcctcctttccttccaattccaaaaccagattccggggtggggggtggggggaacggtgag

SEQ ID NO: 45078 - DNA, 328 bp, Gossypium hirsutum
  Clone ID: LIB3196-009-P1-M1-F11
tgaccttgggttgagtgtagagatgaggaaaatcatgggtgccaaagttcttttcttctttgctttgctttccttttcagctgtctcggcatttgcacaggatgaggaagaccaaggtcttgttatgaacttctacaaggattcttgtcctcaggctgaagacattatcaaggagcaagttaagctactgtacaagcgacacaaaaacactgctttttcttggctgagaaacattttccatgactgtgctgtccagtcatgtgatgcttcactgctgctggactccacaagaaggagcttgtctgagaaggagacagacaggagcttt

SEQ ID NO: 45079 - DNA, 388 bp, Gossypium hirsutum
  unsure (1)..(388): unsure at all n locations; Clone ID: LIB3196-009-P1-M1-F12
atgctggcttggcaggcagtacagcatccaggggagtcaagggcatggggcgagaccagactaggcgaggcgggcggggcggagtgaatgagagctctcaggagggaggctggcgcaggcaggggtgaggagcacagcaggcggcgagcgggaggcactggcctccagagcccgtggccaaggcgggcctcacgggcgacgacggagccgggatcggtgcctcagcgttcgggctggagacgaggccaggtctccagtcggggtggacgtgcccaccagctgccgaaggccgggacgccaggtccggcggacttgccgagcgggacatgacatggtccggtgtgacggcgaggacagaaggggcgcgtncggccttcctgaacaccct

SEQ ID NO: 45080 - DNA, 381 bp, Gossypium hirsutum
  Clone ID: LIB3196-009-P1-M1-F2
cggacgcgtgggcggtttctcgtttccgacgcaaagtcgagttccaatgattttttatagcgttatcagtacgtccaggcaacaacctagcaattgtagcccatttattcccatgaaccgcatgcgcttgtataataacagcatcctccgcagccgtgaaaggacggtgttgcacggcgggactgagttgattgcaccaccgcagcctgcaagacttgccggatcttccagggattgaggagcttatcatggaccagttcctgggaccatgctgttccactagcttgatcaggttagcgtcctcttgtgggctccatgaacctttcacacgatcaccaccattgatcatcttcaacgataaaaagaaaaaagaaaacccca

SEQ ID NO: 45081 - DNA, 377 bp, Gossypium hirsutum
  Clone ID: LIB3196-009-P1-M1-F3
atgggaatttaaagaccagatggtatggttgatcagtaccctcaattatcaattaattatatattataggacatcatcctgaagactttcagcatttcctagatatgatatttcttacttggaacattgatacacctttgactttcaaatctatgacatagggacaattttatctattatgctatcttaaaattatgattttggtatttaataactaaattacttaggatgggtataccttgcaccactttgttcaattagacatgaagaagaaaacttacaacatagaaatgctctaaattttttgtgttcatttgaaaaataaaataccaactctgcatttggttaatgttcattttataaaataccttaaaaga

SEQ ID NO: 45082 - DNA, 353 bp, Gossypium hirsutum
  Clone ID: LIB3196-009-P1-M1-F4
cgatccttgagattacctaagctatgttattattcctttcgagactaataacgtctaaccctcagaggaattaatcgaaatctctttcttaattaaaacccttagggatgcacaaaatcactctatgtacttccatattaagtttcaccctaatccggtaaaatctcgtaaccctatttttaggcgatcgatcaactccgcttaattatgccaaatctactcttaggcagggtctattcctcctctacataagcacatcaaatcatgaattaataccccgaatattaactcaagcattaagaacacataattaagaacaaatcaagtatttatcatacaattcagataataat

SEQ ID NO: 45083 - DNA, 369 bp, Gossypium hirsutum
  unsure (1)..(369): unsure at all n locations; Clone ID: LIB3196-009-P1-M1-F5
ccatgtcagcaatccggtagggggttaatggatttttaacacaattatcttaattagaggggctaaattgggagaaaaaaattagagtggcccaaatagaacaaattctattttagagggatcattggtgtagtttaccctaactttttttttgggagcaatatttatactttacgtcacttactttgaccatttttctcaaacatttattggttttttttaattataaatttacaacatatttttttcaaattgaaccacttagtaatggacaatatgtggagcaaacaactacttaaaacaaaatctttcactctcattaaattttacatttaattcttacttatttgnctntacaatttttatatt

SEQ ID NO: 45084 - DNA, 386 bp, Gossypium hirsutum
  Clone ID: LIB3196-009-P1-M1-F7
atgccccgtgctgacccgtctaacccatgtgggggtgctccactcacataggcccttggcagaaaagattgtccgttctgcccacacactgcctggatacagtctccaactctaggagatggaattggtttgctccatttagaaatagatcgaaattgggcattcagtagattctaccagtttcttcctgtgctgggaaatattaaatttaggttgtgaatgtttacttaatgataatttttagagaaggagatacagatgagtatgattggaaagttcagaaaactaaaatttgatttttacagccatccaactatagaatcattggaattcagtcatttatggataaattaaaatgaacacctggactcttgttaaaatcaaaa

SEQ ID NO: 45085 - DNA, 372 bp, Gossypium hirsutum
  Clone ID: LIB3196-009-P1-M1-F8
ataaccctgcagcaaagtgaatttctgtctgactgcaatttaaaattgaaaacttaggtagattgactcttctgcatgtttctcatagagcagagaagtgctaatcatttagccacttagtgatgtaagcaagaagcataggagataaagcccccactgaggtgcctcttgtgcctcagctgggacccaccgtgtagacacacgacatgcaagagttgcagcggctgctccaactcactgctcaccctcttctgtgagcaggaaaagaacttactgacatgcatggtttaacttcctcatcagaactctgcccttccttctgttcttttgtgctttcaaatgactaacacgaatttccagaaaattaacatt

SEQ ID NO: 45086 - DNA, 300 bp, Gossypium hirsutum
  Clone ID: LIB3196-009-P1-M1-F9
caacacgtagatatggcgattaacccttctttgctctttctttcccttctttttctcttcaatggctgcctagctcgccagaccttttcgtcacagcagtcccaaaatgagtgtcaaatcaataggctccgcgcctctgcaccccagacccgaattcgctccgaagccggcaccaccgagtggtggaaccccaactgtcaacagctcaggtgtgctggtgtatctgtaatgaggcagactattgaacctaatggccttgttttgccttccttcaccaatgctcctcagcttctctacatt

SEQ ID NO: 45087 - DNA, 322 bp, Gossypium hirsutum
  Clone ID: LIB3196-009-P1-M1-G1
gggatcacagggcgtgcccgctgtgtgtggctggagtgccccatccctgatgcccccgttgtcaccaacgtgactgtgaaggcacgagtgtggaacagcaccttcattgaggattacagagactttgaccgagtccgggtaaatggctgggctaccctgttcctccgaaccagtatccccaccatcaacatggagaacaagaccacgtggttctccgtggacattgactcggagctggtggaggagctgccggctgagatcgagctgtggctggtgctggtggccgtgggtgcggggctgctgcttctggggctgatcattc

SEQ ID NO: 45088 - DNA, 361 bp, Gossypium hirsutum
  Clone ID: LIB3196-009-P1-M1-G10
ttttgtctccgacaataccaaagacatgcaaacccttgctctaaacgaaccaccgccatcagctgctgacatcgatcattgggaaagagctaaatgcaaggccgagataatggggcaccctatgtacgaccagttgctggaagctcatgtcgcctgtctacgtgttgctacgcctgttgaccagctcgctcagatcgatgctcagttagctaggtcccaagatgtgttggctaagtactcctcggccgctgctgccgccggttctgctgaagaagaactcgatcacttcatggcaaattatgttctattgcttggtttcttcaaagaccaattgcaacaacatgttcgtgttcatgcaatg

SEQ ID NO: 45089 - DNA, 238 bp, Gossypium hirsutum
  Clone ID: LIB3196-009-P1-M1-G11
atccagtggcttctacactgtggaagacacgcgctacgtcaccaggatgtatcgtgtgtatgggaaaaagaacatcaagttggaacctgtgcccctcaagggagcctctctggacccaaggtttggtttccttctggaccgggggctagacatctacgtgtggcggggggcccaagccacactgagcagcaccaccaaagccaggctctttgcagagaaaattaacaagaatgagcgg

SEQ ID NO: 45090 - DNA, 306 bp, Gossypium hirsutum
  Clone ID: LIB3196-009-P1-M1-G12
acgcggacgctgggttttatatttaatagggcttacattaataccctactcatcatgcaatttggttaatgacttgcttaaaggggcttgtacggactgactatagcgcttgaaaagccagcgaacgctacgcatgcctaatccaatgcctttgagctgcccactgaacaaatgtacgactgtgggactgatggtcgaattttataatttatcatgaccaactgactgaaaagccgagaaggcctccacctaacgaaataggactatacacgctgagcgatggccaaactgaatctgatggggtta

SEQ ID NO: 45091 - DNA, 378 bp, Gossypium hirsutum
  Clone ID: LIB3196-009-P1-M1-G2
cccacgcgtccgcccttattcttattctccctccttcattcttcaattaaaaatcaataaaaaagaaaaaaaatcagatttttggctttttgatgcgcctcaggatgaagggaaccccttacaaaatgaggtggagggctaaagaactctctctggctctcattattcttgtttgtacgactatttttattttgacatgggacagaagtccaacacttacttcaaccctgccatcaaaaaatcagttgcaggtctctccagatattaaaactgtaccagtagatcccaaaacacatgtgaaagaagatatttctacattgacacggagtgaaacagtaaataacaaagagggacaacatgtggataagacacgttcta

SEQ ID NO: 45092 - DNA, 343 bp, Gossypium hirsutum
  Clone ID: LIB3196-009-P1-M1-G3
gtcgaaaatgtcgaagcgagggcgtggaggttcagctggtaacaagtttaggatgtcactgggtctgccagtggcagctacagtgaactgtgctgataacactggcgctaagaacttatacatcatttcggtgaagggaatcaagggccgtcttaaccgattgccatcagcttgtgttggagatatggtaatggctactgtcaagaaagggaagcctgatcttaagaagaaggtcttgcctgctgtcattgtgagacagcgcaagccctggcgcacaaaggatggtgtttacatgtactttgaagataatgcttgtgtcattgcgaacccaaagggagaaatg

SEQ ID NO: 45093 - DNA, 376 bp, Gossypium hirsutum
  Clone ID: LIB3196-009-P1-M1-G4
gtaaaagggggagaaagactaatgattggcagccggttgactagaatgaaggagactgatgaatgatttataagaggtttaaccaaaattatagcatggtatttgttttttttctcaaagtgattgaaattcgggctgaaagtcttggtctcaaattgttatacaactacatctaatattgatatatttgaagcatgatctttagattttttattttttataattgcattaaaatattatatatttatattaaaatttatttgtgatatgtcttctttttcaagttaatcataatatatcttgtatgtatctataaatctgaatggtacatgatttttttattgtgttacttatatttattttgtaaaatataaaa

SEQ ID NO: 45094 - DNA, 247 bp, Gossypium hirsutum
  Clone ID: LIB3196-009-P1-M1-G5
tacaacgcgtgggaaaaacggttccttaacaaatggttttttttttcagaggcctaaatcaggaattttcatcttcccaaatggacattcttagatgtccatctttgagaaacattaactagccaactaacttttccttctactttgccttgcctttccccatgccggctcgcggagccaacggatcaatattcgaagatggacccattttcaacatggcattcaggcttttccatgaacttaccct

SEQ ID NO: 45095 - DNA, 387 bp, Gossypium hirsutum
  Clone ID: LIB3196-009-P1-M1-G6
gaaagtctagttgtattaaagatgttttcttgtcaaactagaaaaatgtccatatgtagcattccaataaccttttgcatttccttttagtaacaagaatttgggtagacttgattttctcctagttttttgatgtatttagaggatccttgtaagttcatatttacatagcatgtctggatatatgttggacatggtatttcaaaaacttgaagagtcatagcagcatagaattcatcttgtttctattcttgctgtgagcatctccttacctgtggaatggattatatagcctttgatgtctgctctatttcaatcttttgatcttgtgacaacattctcacagctctagtgatgaagagggtaattgggagttgacgagatctg

SEQ ID NO: 45096 - DNA, 357 bp, Gossypium hirsutum
  Clone ID: LIB3196-009-P1-M1-G7
cggacgcgtggggcgtaatttgagaagtcaaaattaatttaagaaacttttattcagttttaaattattaaaaaaaaagttatttgtcaatagaccttttaaattctgaaagagattagagaattattatacatctcattaagatatatttaagatattaataagatcatctatcaaaaaaatccaacaacctgtaaattttagcaaaccacgctaagacctatagagataaaatccaagcacacaagacattatccaaaatattacgcaaaacaaacaaccaaggcagataaactcaagtttatacgtgattgagtaggttacattatcgctcctttttttaagtttttttccccc

SEQ ID NO: 45097 - DNA, 353 bp, Gossypium hirsutum
  Clone ID: LIB3196-009-P1-M1-G8
gtgcagagagcgtttacatgagctggtgaaagaagagttagccagtgaggaggaatggaaaggtgctatggagcgtagcttcacgcgcatggataaggaagtgataaagtggaacgagagcgtggatggtgctaattgccgatgcgagttacagtcacccgagtgtgatgcggttggatctacagctgttgtcgctatcgtaacgcctgataaagttgttgttgctaactgtggtgattcgagagctgttttgtgtcgtaacggcaggcctgttgctttatcgtccgatcataagccggatcgtccggatgagctgaaccggatccaagaagcgggagggtcgggtatttttt

SEQ ID NO: 45098 - DNA, 313 bp, Gossypium hirsutum
  Clone ID: LIB3196-009-P1-M1-G9
atttacttaggggcatcaacgagttccgcattgccattttagaagcaaaccccaacactttcgttctcccacaccattgtgacgcggagaaaatttacgttgtcactaacggaagaggaacagttacgttcgtgacacatgaaaacaaagagtcatacaatgtagttcctggagttgtagtaagaattccagcaggaagcactgtgtacttggccaaccaagacaacagggaaaagctaaccatagcagtgctccaccgacctgtcaataaccctggacaattccagaaattcttccctgctggacaggaaaa

SEQ ID NO: 45099 - DNA, 328 bp, Gossypium hirsutum
  Clone ID: LIB3196-009-P1-M1-H10
gtttgtaccggagaggtttatgggtgttgaaggggagaaattgttgaaacatgtgttttggtcgaacggaccggaaacggagcatccgacggtcgagaataaacagtgtgccggtaaggaatccgtggcgttgatttctaggatgctagtggtggcacttttgcgacgtttcgatacgtttgggattgaagttgcgacatcatcgttgtgagccgccaattccataaaatgcgctgatagaacaagcttataagtacactctatatatgcccaatgcagggcctactgaatatagtggatgtatttccattgaatgaattatgtttta

SEQ ID NO: 45100 - DNA, 342 bp, Gossypium hirsutum
  Clone ID: LIB3196-009-P1-M1-H11
atggtgtcttggcccaggccccacttcataaggttaagagccgagtccgtgtaaggcgggcaagcatctctgaacccagtgatacggacccggagccccgaactctgaaaccctctccagctggatggttcgtgcagcagcaccgggagctggagctcatgagcagcttccgggaacggtttggccgcaactggctgcagtacaggagtcacctggaggcctttggaaaccctttgacgggcacccccagctctgctgacctcagcacacctgtagccagcttccagggccctgacactacacccagaccttcacccctgcaagagggaggcagaggccccc

SEQ ID NO: 45101 - DNA, 381 bp, Gossypium hirsutum
  Clone ID: LIB3196-009-P1-M1-H12
gctggcaccgttattgcactcactatagccactccactcttcgttattttcagtccagttcttgtccctgctctcattgcaacagctctcctagcaacgggtttcgtcgcctccggcggtttcggtgttgcagccgccacggttctgtcctggatttacaggtatgtgacggggaggcacccaccggcggcggatcagttggatagtgcggggatgaaattggctagcaaggcacgggagatgaaagatagggcggcacagctcaccggtgcggcggcttcttaaattagttctctactgcatgcttttgtaatggagctgtgcaaaagttcaggatcaagtggccattaaaccgatccttaatgatgttgttgttatgtt

SEQ ID NO: 45102 - DNA, 379 bp, Gossypium hirsutum
  unsure (1)..(379): unsure at all n locations; Clone ID: LIB3196-009-P1-M1-H2
atccagaacacaggtgtcgtgaaaactacccctaaaagccaaaatgggaaaggaaaagactcatatcaacattgtcgtcattggacacgtagattcgggcaagtccaccactactggccatctgatctacaaatgcggtggcatcgacaaaagaaccattgaaaaatttgagaaggaggctgctgagatgggaaagggctccttcaagtatgcctgggtcttggataaactgaaagctgagcgggaacgtggtatcaccattgatatctccttgtggaaatttgagaccagcaagtattatgtgactatcattgatgccccaggacacagagacttcatcaaaaacatgattacagggacatctcangctgactgtgct

SEQ ID NO: 45103 - DNA, 405 bp, Gossypium hirsutum
  Clone ID: LIB3196-009-P1-M1-H3
aaaaaagcgggctgctaccggaccggccttcccgggatcaatttttatggccacgcccacccgtctcatgtctcgatgtatatactaatccaaaaggatatgaacgagaagtcaagcgggtataaatctcctgctcacttctctggttctctgcccagggaggggaggtgagccccgtagaggttcctgtcctcccagggagtattttccagaaaacagccttcttccggtaggggagaaccaggccctgctttaagtaatgtatacattctccaagggccgcatgattacatgaaatctcagtaaatcagatttcatgtttccaataacgttggatgcgttttatctttatttctgatgacaaaaccaaaaaaaatcctttcatgaaatgtgcacacttgaaaa

SEQ ID NO: 45104 - DNA, 383 bp, Gossypium hirsutum
  Clone ID: LIB3196-009-P1-M1-H4
aaatgcgaaccctggcttaaattattgctagaataagcttaatcaagttatcgggattccaaaatagtaaataacttgaaaaatggggctagaacggacttactattgagcttggaaagcttgaaaaccctagccatggcttcccccatgctaatttcggcctccatgaaaaagatgagtcaattttggctttattttccctttttatttcttttaattaccaaatgactaaaatgcccttaaggcctttctttaaaattttgtcctattcatgcccatttttgtccaaacgaaatataatggtctaattaccatttaaggacctcctctttaaacccccatttcaatcaagtacttatgaattagaacacatatttttgtac

SEQ ID NO: 45105 - DNA, 288 bp, Gossypium hirsutum
  Clone ID: LIB3196-009-P1-M1-H5
tcggttgtaccgaaggtatgtgtgaggagaatgtgacatttttgtgaacgccgaaccggcatctacgtgaaataaacagtgggcggtaggaaattcgtggttgtttttaggagcctgttgtgggaccttttttcgaccgatatcagttctctttgtgcacttaagttggtgacaatcctctttagggcaccgtcattaaccataaagtcctttaatggaacaagcttttcagtaccctgctattaatgcccttgcacggcccttggacatatacccatgtttttttaa

SEQ ID NO: 45106 - DNA, 388 bp, Gossypium hirsutum
  Clone ID: LIB3196-009-P1-M1-H6
tttatttttctgaaggtgggagaaaagataaaacttattattaatttaatccaaattagagtttgaaactcatgtaattaaccccttttggttaacccgagacaaatcaatagatctatgagaaatctcattcaattggatatatggtagggtaaaaaaatgggataccaaaagaattgactgccgagccgtatgaggtaggaaactctcaagtacggttctaagggaaggaattgaaccgcctatttcgaccggggagaacaggccattcgacagggggattctgaaatagcggaggcttggttcgatcaagccgctgagtattggaaacaggctatagcgcttactcctggtaattatattgaagcgcaaaatttgttaaagatca

SEQ ID NO: 45107 - DNA, 141 bp, Gossypium hirsutum
  Clone ID: LIB3196-009-P1-M1-H8
atccagaacacaggtgtcgtgaaaactacccctgaaagccaaaatgggaaaggaaaagactcatatcaacattgtcgtcatgggacacgtagattcaggcaggtccaccacattctctacgaatatggtcctggtctgccg

SEQ ID NO: 45108 - DNA, 248 bp, Gossypium hirsutum
  Clone ID: LIB3196-009-P1-M1-H9
caaaatacagagctatcgtaatcatggtgaggaataagtcagcttgcgtagttttgctcttttctcttttcctttcctttggcttgctttgttctgccaaagactttcccggcagaagaggcgacgatgatccttcgaagaggtacgaggactgccggaggcgatgcgaatgggatacacgtggacaaaaggagcaacagcagtgtggaaaaaagttgtaaaagtcagtatggggagaaaggtcaaca

SEQ ID NO: 45109 - DNA, 383 bp, Gossypium hirsutum
  Clone ID: LIB3196-010-P1-M1-A3
gtcatgctgaaaatgaacatttcatttatgacatttcttctaaagtgaaaaccaaatttttgggaaactcaatagatatctatccacttggaaggacccgtgtgactctcaaaagagatggcacagtttttgatttggttcctcctctcacgaaagttaacaacttaatttttggacgaacctgggttgactcatcaggggagatgatcatgacaaacttgacaacaggcgacaaagccgtgctatattttcaaccgtgtggttggtttggagctggccggtatgagattgatggatacgtgtataattccgctgaggagccaaagatattgatgactgggaaatggaatgagtcaatgagttatcaaccttgtgatagtgaa

SEQ ID NO: 45110 - DNA, 385 bp, Gossypium hirsutum
  Clone ID: LIB3196-010-P1-M1-A4
ggtttacgggattttattgattgggttcttctcacgctcgattaccttacaaaaagagaaaatgaccaagtgttacccaactgtgagcgaggaataccagaagtcagttgaaaaggccaagaggaagctcagaggtctcatcgctgagaagaactgtgctccactcatgctccgtttagcgtgggactcagctggaacttttgatgttaagaccaagaccggaggtccattcggaaccatgaagcatcctgctgagctcgcacatgctgctaacaacggcctagatatcgccgtcagacttctcgagccgatcaaggagcagttccctaacctcacctacgctgacttctatcagcttgctggtgtcgatgccgttgagattact

SEQ ID NO: 45111 - DNA, 194 bp, Gossypium hirsutum
  Clone ID: LIB3196-010-P1-M1-A5
gtttgaagctcatagcactattacaatgtttggcaataatgccgggtcgtcactagattttggaatatttcaaaattctctaatcaagactgcacagaaggatcactcaaaaggctggtgcttcagaaaagccttgtaactccgttaaaaataaaccggttttggcttctatttttgtcagcaagcctgagcaa

SEQ ID NO: 45112 - DNA, 299 bp, Gossypium hirsutum
  Clone ID: LIB3196-010-P1-M1-A6
gccgggcccataaaaaaattttggcccgttttcaaggcccgggcccgacccggcccgaaatatgggcctgaaaatttgtccaagcccggcccgagaaaaaatggtaggcccagcccagcccggtcatattaatttttttttttgctttttttattaaataaaaaactttaaaatataataaatcaaatacatttaaaacataaaaacaaatattaaaacaaaaaataaataaataatgggactaaaataattattaaaataatacataaattaaaaatataataaaatgtaattatatt

SEQ ID NO: 45113 - DNA, 330 bp, Gossypium hirsutum
  Clone ID: LIB3196-010-P1-M1-B1
atatttcattggcgtttgagtcagcaaagaagtcaagatggccaaagttccggacatgtttgaagacctgaagaactgttacagtgaaaatgaagaagacagttcctccattgaccatctgtctctgaatcagaaatccttctatgatgtaagctatggcccactccatgaaggctgcatggatcagtctgtgtccctgagtatctctgaaatctctaaaacatccaagctgaccttcaagcagagcatggtggtagtatcaaccaatgggaaggttctgaagaagagacggttgagttaaagccagtccatcactgataataacctggg

SEQ ID NO: 45114 - DNA, 319 bp, Gossypium hirsutum
  Clone ID: LIB3196-010-P1-M1-B10
atgggccctcttgcttctctgatagctcccagcttactctctgcagccatgattgccagacagcagtgtgtccgaggcgggcctcggggcttcagctgtggctcagccatcgtaggcagtggcaagagaggtgccttcagctcagtctccgtgtctggaggtgctggccgatgctcttttgggggctttggcaggaggagcctctacaacctcggggggaacaagagcatctccatgagtgtggctgggtcacgacaaggcgcctgctttggaggtgctggaggcttcggcactggtggctttggcgggggatttgggg

SEQ ID NO: 45115 - DNA, 381 bp, Gossypium hirsutum
  Clone ID: LIB3196-010-P1-M1-B12
taagtattttgtcgctcgatttgccttaagctgtgaatcaatgacctagtaagccttgaattggttcattatccttcccccattctttagaatattttactatatatttactaacgctcacatgctactttgtatgtctggacttaagagagcctttaagaagaaaaacttggtaacaaaattttgtgattctagtctaaccaactcagcataagaatgattacctgactacaatatggggtaactaagttatgcgtcctataatattcttttgcctttttttcttaatctttctcttagtaagttacctgttgtggttattacattacaagaaaagtggtgccaatgtttatagtggcattggctattggtacggtttta

SEQ ID NO: 45116 - DNA, 400 bp, Gossypium hirsutum
  Clone ID: LIB3196-010-P1-M1-B2
atgttaaaagttcataaagaaaagttacctagatagactgatgctcgcaaacaggccgccattctctgcagcgaagagcctcataaattcccattcacaaggggctttttcatcattaggagacccaagtcctcaggaaaatccttttctggaaggatttgctccttcagaacgttttacagaaaacactaatgtaaaagacacaactgaaagaaatgcctttgaagaaaacattattatggaaaacactactatgccagaaggcaccatctgtgaaaaaacaaactacaatccttcttctgaggcagattccgatgggactgcgttcaacttagggccagctgttaaacgaactaatcagacacaatgggaatacaacaacatgggcactgacctgtac

SEQ ID NO: 45117 - DNA, 389 bp, Gossypium hirsutum
  Clone ID: LIB3196-010-P1-M1-B3
cccacgcgtccgggtatttacaacaccgatgctgtttaccagaaaaataacagccacaacattgggaacctgtctgccaacaaatatagcggcaacaaccatagcaacaaagatattaataataacagcaacaccaactccaacaacaacgagaacagcaatgcaaacaatgctgtcgataaaaggttcaagactttgcctgccaccgagacactccctagaaatgaggtgcttggtggatacatctttgtttgcaataatgacacaatgcaagaagatcttaagcgtcagctatttggtttaccgccaagatacagggactctgttcgggcaatcacacctggcctgccattgattctctataactacaccactcatcaattgcatgg

SEQ ID NO: 45118 - DNA, 401 bp, Gossypium hirsutum
  Clone ID: LIB3196-010-P1-M1-B4
atgttttttcttagccaagtcatgcaataattgaatgtacctcaaatttttagagaggggagggtgggttagggactgatactccctaataattgggtaataattgaattgatttttaaaggcaacgtagcattctacagcagggttaaactattaccaagaacagtcaccctggttaataacaagttttactgatcagttgctgattggttggttggcgtgtgggcgtgtgggtgtgtaggtgtgtgtgggtatgggtgtgtgtgtgtatcttttcccatgagccctttttgtaatcctgtggctttttcacttacaactagcctaaccctgtaatttttctatatccaagaacacaatcacaaagtagtggttacaatactttgttgtatttggctaat

SEQ ID NO: 45119 - DNA, 430 bp, Gossypium hirsutum
  Clone ID: LIB3196-010-P1-M1-B5
ggctggctgtttccgtaccggatattcccgggatgaaattatccttacccaacttatggagtgtaaatgacggacgggatggttttatgtctttagaaatgttttgcctttttaagcctcgtgctaaaggcgtttaacgttggtgcctatctacttagggggcattctagtctttaaagttgtctgaactgtcccgacctggcgttttttgatttggggtaaacctaagggtgtttgttagtctcaaaactgtgaagagacatagcagatcagaccagactggtgaagaaaataaagggctctactttaatgtaaaccagctctacataggaaaaaaaccagcctcctcatttgctttttcaattggagtgaaacattccatattttataacaagtaaggctgccattgttaaataaatagcatttaatg

SEQ ID NO: 45120 - DNA, 457 bp, Gossypium hirsutum
  Clone ID: LIB3196-010-P1-M1-B6
gggcgcactataacacagttgcacaaaaagcaggctggccgggcccggacttcccggcatccggctccagccttctcagatccctggggagggtcacctgccaaacccagcaccaatggcaccacagccaccgggggattcgacacggagcctgacgagttctctgactataaccgactatctacagaactgccgtcctacgctagcatcgctggagagccgtaactgatgccatgagaggtgccggcccgaagccctggggcgtttgacatgagtggggtcaggggatctctggctgaggctgtgggcagccccccacctgcagccacgccaactcccacgccccccacccggaagacgccggagtcattcctggggcccaatgcagccctcgtcgacctggactcgctggtgagccggccgggccccacgccgtctggagccaaggcctccaacc

SEQ ID NO: 45121 - DNA, 283 bp, Gossypium hirsutum
  Clone ID: LIB3196-010-P1-M1-B7
caacattatgctttggaatgctgttatatttggacttgatgacaccccatgggatggagggtacatgaagattggataaccaggaatgtagcagatgtagtttgcattgtattttttattaccaagatttacttgattaagaaaatgcattgtattttttattaccttgcaatgtgtatggtcataggcaagttcaactagtcagtctatttctcatatgtattattttttagttttgattctaaatttttatttttactttaatatttacgataattttatt

SEQ ID NO: 45122 - DNA, 371 bp, Gossypium hirsutum
  Clone ID: LIB3196-010-P1-M1-B8
atcggacctcaccgacaacagccggcgccagctgttccgcaccaagagcaagcgccgcttctttttccgcgtgtcggaggagcagcagaagcagcagcgcagggagatgctaaaggacccctttgtgcgctccaagctcatctcaccgcctaccaacttcaaccacctggtacacgtgggccctgccaacgggcggcccggcgccagggacacgtcccgggctctggaagagaagggccgagtttctcgcggcttctctggcccacagcggccccacagctttttcgaggcgttgcggtgcccaaccttcatgggcagggaaagcctttgtggaaacgcaaaccctcagaaaaggaaaccttggacaatcc

SEQ ID NO: 45123 - DNA, 383 bp, Gossypium hirsutum
  Clone ID: LIB3196-010-P1-M1-B9
catttttacgatttagtccctaagctcgtataatgaaacacatgaaatttctatcttacccaagcctagccgaacactttttttcctcttatggaagcccacattttccattattttcacagttctaccacacatttaacaacttttgcaaaaaggtccctttaggagtttttcatgaaaatcacctaggaaaagatgtttaacacacatgcaactttcatattcctctataaaccatcaaaaaacaagtaactcatgcatgggtaaatttttaaacataaatcttatcatgaaaatatgggtagaaatggagagagcaagctatcgggatctcaaaaatgcaaagaacattaaaaacggggcttgggagtacttactaataa

SEQ ID NO: 45124 - DNA, 401 bp, Gossypium hirsutum
  Clone ID: LIB3196-010-P1-M1-C1
atggccccgccatgggcctcaccgtgtccgcgctcttttcgcggatcttcgggaagaagcagatgcggattctcatggttggcttggatgcggctggcaagaccacaatcctgtacaaactgaagttgggggagattgtcaccaccatcccaaccataggcttcaatgtagaaacagtggaatataagaacatctgtttcacagtctgggacgtgggaggccaggacaagattcggcctctgtggcggcactacttccagaacactcagggcctcatctttgtggtggacagtaatgaccgggagcgggtccaagaatctgctgatgaactccagaagatgctgcaggaggacgagctgcgggatgcagtgctgctggtatttgccaacaagcaagacatg

SEQ ID NO: 45125 - DNA, 346 bp, Gossypium hirsutum
  Clone ID: LIB3196-010-P1-M1-C10
attgaaggtgcagctggagcacgtgcagactcggctgcgggagatccagccctgcctggcagagagccgggctgctcgtgagaaagagagtttcaacctcaagagggctcaggaggacatctcacggctgcggcgcaagctggaaaagcagaggaaggtggaggtctatgcggatgctgacgaaatcctccaggaggagatcaaggagtataaggcgcggttgacctgcccctgctgtaatacccgcaagaaggatgcagtccttaccaagtgctttcacgttttctgcttcgagtgcgtgcggggccgctttgaggcccgccagaggaagtgccccaagtgcaac

SEQ ID NO: 45126 - DNA, 371 bp, Gossypium hirsutum
  Clone ID: LIB3196-010-P1-M1-C2
cccacgcgtccggatggaagtgatgcgattcttcttggtgctgagaccttgcgtggattataccccgttgaaaccatttctactgttggcaaaatttgtgctgaggcagagaaggtattcaaccaggacatgtatttcaagaagactgtcaaatatgttggagagccaatgacccacttggaatccattgcttcctctgcggtacgagcagcaattaaggtgaaggcatcagttattatatgtttcacatcctcaggaagagctgctagattgattgcaaagtacaggccaacgatgccagttctctcagttgtcatccctcgccttaagacgaatcaattaaagtggagtttcagtggggcctttgaggc

SEQ ID NO: 45127 - DNA, 381 bp, Gossypium hirsutum
  Clone ID: LIB3196-010-P1-M1-C3
caagaacaaataagggcattgagccaagaagctacttcaccaaggggaaaaggtagcgagggatacgccttcaacttattgagccaaacccctcgctactccaaccaaaacggccgcttctatgaggcttgccctcgtaatttccagcagcaactccaagaagtggattcctccgttgttgccttcgaaataaacaaaggatcgatcttcgtaccgcactacaattcaaaggctacattcgtggtcctcgtcaccgacggaaacggccacgtcgaaatggtctgccctcacctttctaggcagagctcacactggtcctcccgagaacaagaagaacaagaagaacaagaagaacaagaagatgaaaggagaagtggacaa

SEQ ID NO: 45128 - DNA, 377 bp, Gossypium hirsutum
  Clone ID: LIB3196-010-P1-M1-C4
ctctaattcatgctttttaaaggatgtcttaaaactcccaccaatatgtcgcacatcggaaggatcaacatggtaaaagatgggaagaacaatatgtttgtcagtggactcgcgcttgcgatccatgatgctagaaagttcaaccaagcacgatatcgaagaagcatagtctttagataaaatgaggattgagagatttgaggccgaaattgctcgagaatatattggtggaagtttctctccttttcctagtgtttcgttatgagggaagacattaattcctacgttttccaaataattgactaggtgattggagaagttgaggcgtgtgtcttcacctaagcttaaagaaaatttgatgctttcataaaattttg

SEQ ID NO: 45129 - DNA, 383 bp, Gossypium hirsutum
  Clone ID: LIB3196-010-P1-M1-C6
gtcacagcaaagaagatggaaaatgggaaaatagaaaatgactgccctgagcaatctgtcattcgtcgtgtttctagtgctgataagataactcttagagacatcgcaagagaaagagttgatgttatctctgaaaagatgcatcgcctacctgatgaatttctagatgagctaaagaatcaactcaaggctattctggaaggcaatggagggtcacaaaacagggaagagtttttgattctgcagaagcttgttcaaagtagatctgatttgacagcaaagacattgattagagcacaccgggcacagctcgaaatcctcgttgcaataaatacaggaattcaagcattcctgcattcaaacatcagtttatcccaaacttc

SEQ ID NO: 45130 - DNA, 194 bp, Gossypium hirsutum
  Clone ID: LIB3196-010-P1-M1-C7
cggacgcgtgggtatttttgggcctgacgatactccttggtattgaggcacgttcaagttgactttgcagttttcagagttatcttttatatgtgctcttcatatttgatgtcttttttttatatatttgtttattttattagttttataattttattttgaggtttataattatttttttatttattattttt

SEQ ID NO: 45131 - DNA, 283 bp, Gossypium hirsutum
  Clone ID: LIB3196-010-P1-M1-C8
cggacgcgtgggtttaggtagctatgtggagccattgctcctcttcatcatctttttaattctcaccggtataaattttgagacgatgtctatttaccttaaaagggtcctgtgatggatggcttacctctactgagccatattgaaacactattttgaactactaataggaccttgcccatcttgaattaaagcttttctaaggaaacaaatttctagcccttgagtttatattaatattgacaaagaatctctcaacttttaaaattagtccttttttttt

SEQ ID NO: 45132 - DNA, 346 bp, Gossypium hirsutum
  Clone ID: LIB3196-010-P1-M1-C9
cccacgcgtccgcccacgcgtccggcatcatctattgaccatgttggttctgagtactctgatgcaactctagctgctggacgatatacttccagcctttccaacacttacaattcccacaagctacggcctgctgatacattcatcaggtcctcctggggttctcctagcaaagaaaatcatgccatttgttcgtctgaatgggagaatgaatttccagcttctgttgtgagggctgtgatgaagtttgggatgaaacattttgcagtagatgagaacgggcggtgcacctacaaccaatcatcgacttctggacatgagcaacgtacccttttcaccttggttg

SEQ ID NO: 45133 - DNA, 367 bp, Gossypium hirsutum
  Clone ID: LIB3196-010-P1-M1-D10
atgaaccagtgtcgctggttccgcgcgtgactaccttttttttgcaaaccagttattccagtttctggtctaaaaaactctgtggctgtacggtagccgaggaggttccagcgcggcggaagtacccagtagggaggagagagaatgtcttttcgaggcggaggtcgtggaggctttaatcgaggtggtggaggtggcggcttcaaccgaggcggcagcagcaaccacttccgaggtggaagcggcggtggaggcggcggcaatttcagaggcggcggcaggggaggatttggacgagggggtggccgcggaggctttaacaaaggccaagaccaaggacctgcagaacgtgtagtgttattaggag

SEQ ID NO: 45134 - DNA, 145 bp, Gossypium hirsutum
  Clone ID: LIB3196-010-P1-M1-D11
atgaaccacagtcgctggaaacgcgcgtgactaccttggttttgcaaaccagctattccagtttacggtctaaaaaactctgtggctgtacggaagccgaggaggttacagcgcggcggaagaacccagttgggaggagagagaa

SEQ ID NO: 45135 - DNA, 387 bp, Gossypium hirsutum
  Clone ID: LIB3196-010-P1-M1-D2
ggaaactggagctatagtacaagtttacggcattaaagcaaatactggagagaaggttgaaatttctactcccgatggtaatgaaacccaggatgcttatgaagagctgtatgttcatctatcagctgacacttttgagaaagttgatggagcggtggcgctgattgagttgctagttagttcaatatcaggaaatttaggtgctggttcagtgcctgcgatatctggtaatgatgtgaatgttctaagtcaaatccctgacacagctgtatcatgtgtgactgatgctgctttaaatcagcaagtgccacaacttacaatagcatctccacaaggtcagtttcaatatcagaattcatggttccctaccagctctatgccgctgaa

SEQ ID NO: 45136 - DNA, 163 bp, Gossypium hirsutum
  Clone ID: LIB3196-010-P1-M1-D3
tggaaatcttctatagggatagacctattttagatgatgatagtcaagagataagacttttgaaaatgctaaatttttagaaatacaataataataaacatagaaaatataatattatatagcaaggtggcttctagacttctccaactagtactagtgttgg

SEQ ID NO: 45137 - DNA, 386 bp, Gossypium hirsutum
  Clone ID: LIB3196-010-P1-M1-D4
gacaacctttgcaggccagtgaccgatttgctgccactgattgcaagtggggttagaggtgtaactagcaacccagcgattttccagaaagctatatcttcatcaaatgcttacaatgatcaattcagggaacttgtgcaatcaggaaaagatatcgaaagtgcttattgggagttagtggtgaaggacatccaagatgcctgcaaactttttgagccaatctatgaccaaacagatggaggtgatggttatgtttctgttgaggtttctcccagacttgctgatgatactaatgggaccattgaggcagccaaatatcttcataaagtggttgatcgtcccaatgtgtacattaagatccctgcaacagcaccatgcattccttc

SEQ ID NO: 45138 - DNA, 400 bp, Gossypium hirsutum
  Clone ID: LIB3196-010-P1-M1-D6
atctcttccctctcacctccagcctctcacgctctccacagccctctcatctcctggaaccatggccagcacatccaccaccatcaggagccacagcagcagccgcaggggcttcagtgccggctcagccaggctccctggggtcagccgctctggcttcagcagcgtctccgtgtcccgctccaggggcagtggtggcctgggtggcgcatgtggaggagctggctttggcagccgcagcctgtatggcctggggggctccaagaggatctccattggagggggcagctgtgccatcggtggcggctatggcagcagagccggaggcagctatggctttggtggcgccgggagtggatttggtttcggtggtggagccggcattggctttggtctgggt

SEQ ID NO: 45139 - DNA, 388 bp, Gossypium hirsutum
  Clone ID: LIB3196-010-P1-M1-D8
cggacgcgtgggggaggtcaaagcagagaccgaaaccaaaggcaaagcaaaacccaaagaggggaaccggaggaggaaaaattccaaggaaaccgccgaaaccattgtgttaattgcttttggcaccattttcttgccccaggttttggaattgataccaggctagcaaggaagctacaaaacgaaagagataacaggggagccattgttagaatggagcatggatttgagtggcccgaggaagggcagaggcgacaaggacgtgaagaggagggagaagaagaaagagaaccgaaatggcagaggcgacaagaaagtcaagaagagggatctgaggaagaagaaagagaagaacgaggaagatgaaggagaaggtcatgaaacggtt

SEQ ID NO: 45140 - DNA, 338 bp, Gossypium hirsutum
  Clone ID: LIB3196-010-P1-M1-D9
attgtctacatcaacctcaataagctctgcctcacggtgtaccagctgcatgccctgcagcccaactccaccaagaacttccgcccagccggaggcgcggtgctgcacagccctggggccatgttgtaagtaggcaggggagaggggttcgggcatgcctaccccatccctctgcacctagagggccgggccccccctcagggaccctctcaccgcccacagcgagtggggctctcagcgcctggaggtgagccacgtgcacaaggtggagtgcgtgatcccctggctcaacgacgccctggtctacttcaccgtctccttgcagctcttgcagcagc

SEQ ID NO: 45141 - DNA, 407 bp, Gossypium hirsutum
  Clone ID: LIB3196-010-P1-M1-E1
atgttttcccaaaaaccgtgttattggaagtggttgcaatctggattcagccagattccgttacctgatgggggaaagactgggagttcacccattaagctgtcatgggtgggtccttggggaacatggagattccagtgtgcctgtatggagtggaatgaatgttgctggtgtctccctgaagactctgcacccagatttagggactgataaagataaggaacagtggaaagaggttcacaagcaggtggttgagagtgcttatgaggtgatcaaactcaaaggctacacatcctgggccattggactctctgtagcagatttggcagagagtataatgaagaatcttaggcgagtgcacccagtttccaccatgattaagggtctctatggaataaaggatgatg

SEQ ID NO: 45142 - DNA, 403 bp, Gossypium hirsutum
  Clone ID: LIB3196-010-P1-M1-E10
atcagcggcggccgtccgagcgccgagaggtgagggttcccccggcctcacctgcggaggggccgttccgggctcgaacccggcaccttccggaaaatggcggctgccaggcccatcctgggccgagtccttccaggatcctctatcctgttcctatgtgacatgcaggagaagttccgccacaacatcgcctacttcccacagatcgtctcagtggcagcccgcatgctcagggtggcccggctgctggaggtgccagtcttgctgacagaacagtacccacaaggcctgggccccacggtgcctgagctgggggctgagggccttcagccgctgaccaagacctgcttcagcatggtgcccgccctgcagcaggagctggacagccggccccagctgcgtt

SEQ ID NO: 45143 - DNA, 358 bp, Gossypium hirsutum
  Clone ID: LIB3196-010-P1-M1-E11
gattcatacgtttatcgctaccagtggtatccatttggagtataagttaaggaagagtaaagaggaggttttggatatcatgcgtgtgaagcaaggatcacccgcgatcgggcttcgatctaagacccatgtagttttaggttgcgtcaacaaggctaactccgagttatctttttattacaaaaagattttctaagtttgacgaccacatctgcgttgccattcgccggtttcaccgcttacggccgcgtactttctcggtatatgagaaatgagtgtattaactacaacttcacgtatgaatcgccactttctgttggcagacttgtcgtccaacttgccgataaaaagcaggtct

SEQ ID NO: 45144 - DNA, 394 bp, Gossypium hirsutum
  Clone ID: LIB3196-010-P1-M1-E12
atgcccggcccggcccttatccctctttctactatatagatgtggtcaagattctaatctttaaaaaggacattccccccaaccaccaaaaaaaaaaacccttataattgcatgtctctgtttgctgccattcccacagtccttcccttcagtctagcttttaggaaaagtagtctgttctttactttctctcttttcttgactctgttcacccttccacgcactgcattctgatggtggcgggttttattctgtgtcctgactgtgccactgaagctgtgctcactgaggccaccctgacctctttgacatatgtaatgggcagtgcagcttttgtcttatgagtcctctgttacccttcacgtagctgcttttcttgttgaagcttcttgat

SEQ ID NO: 45145 - DNA, 311 bp, Gossypium hirsutum
  Clone ID: LIB3196-010-P1-M1-E2
caagagggaacgcagagcgcccgggacccggccggacaacagggagggataccttataaccgtgttattggaagtggtcgcaatcgggattcagccagatttcgttacctgatgggggaaagactgggagttcatccattaagctgtcatgggtgggttcttgtcgaacatggagattccagtgcgcctgtaatgagtgaaatgaatgtagctgccgtattctagatgactttgaatccataattgattgactgtattatatgatgaacagtggatagatggttatacgcatgtgattttgagtgcttaat

SEQ ID NO: 45146 - DNA, 389 bp, Gossypium hirsutum
  Clone ID: LIB3196-010-P1-M1-E3
atcgcctattcatcttcactagatggtgctcttcgagcctggaggaatttcagccccaaaatctttcctcaactttgatttcaacgaagaaaggagaagaaatccatggcctgttcgcacggttcggttgtacggagaagatgaccctggtgacgtggaggccgcacgcggggatctcacgtgggaagccaaccctctggccattccagtgtattccagaagcttctggcgctctcaggctgctgagcttctttttgggtcctgttgggcctcgggtttgggctatttgtaaactgggttagggatgtgggtttagtatttggattttgaaaattgtaagtggactttgtggactattttagtcatggactttattttaatttatttgg

SEQ ID NO: 45147 - DNA, 385 bp, Gossypium hirsutum
  Clone ID: LIB3196-010-P1-M1-E4
ggacaaggtgtcagatgttggttgggatgcatctggatggaataaaaatgttgaggatgttgacaaatttgctgcagctgcgaccagttcggagaagcaaaatgagtggtctggttggggtgcgagcaaatctaactctcaagttgtctctccaaaagtggatgttggttgggatgctttgtctggatggaataaaaatgcggaggaaggtgacaaatttgcagctgctgcaaccagttcgaagaagaaaaatgagtgttctgattggggggcgaggaaatctaaatcacaagatgttgtctctccaaaagtggatgttggttgggatgccttgtctgcatggaataaaaatgcagaggatggtgacaattttgcagcagctgca

SEQ ID NO: 45148 - DNA, 388 bp, Gossypium hirsutum
  Clone ID: LIB3196-010-P1-M1-E5
ggaaaatgttcaggaaccagtacgatacagacgttaccacatggagtcctgcggggcggttgttccaagtggaatacgcgatggaagctgtgaagcaaggttcagccgcgatcgggcttcgatctaagacccatgtagttttaggttgcgtcaacaaggctaactccgagttgtcttctcaccagaaaaagattttcaaagtcgacgaccacatcggcgttgccatcgccggtctcaccgctgacggccgcgtcctttctcggtatatgagaaatgagtgtattaactacaacttcacgtatgaatcgccacttcctgttggcagacttgtcgtccaacttgccgataaagagcaggtctttcatttcttgaaatcctaaatctttga

SEQ ID NO: 45149 - DNA, 364 bp, Gossypium hirsutum
  Clone ID: LIB3196-010-P1-M1-E6
cggacgcgtgggtgtacaaaaagctgtatcaaagcttattcgatgcacatgttgtttctcctttacatgtgaagccttcacagcctgcgtatcccaaatagtatgacgcaagtgcacaatgcgattatcatgcaggaattacgggacactcaatagagaatttcattaccttcaaaaagctagttgaaaaattcatcatcatgggtattgacaagttggatggctcatttaatgcagaaaattcgctacccaatcatgattgacaatagggtgaatgcaatgtattaggagatgttggaagttgtcacatcaatgacatatacggagacacaaatgaaaaggggaccttttgatatctgccctt

SEQ ID NO: 45150 - DNA, 389 bp, Gossypium hirsutum
  unsure (1)..(389): unsure at all n locations; Clone ID: LIB3196-010-P1-M1-E7
atgcggctcagtatactccagaaccgcctcctattcaacagcatttcaccaatgtggaggcctcagaaagtgaggaagttaggcgatttcggcaacaatttacacagctggctggaccagatatggaggtgggtgccactgacctgatgaatattctcaacaaagtcctttctaagcacaaggatctgaagaccgacggttttagtcttgacacctgccggagcattgtatctgtcatggacagtgacacgactgggaagctgggctttgaagaatttaaatatctatggaacaacatcaagaaatggcagtgtgtttataagcagtatgacagggaccattctgggtgtcttggaagttctcagctgcggngagctctgcaggctgca

SEQ ID NO: 45151 - DNA, 400 bp, Gossypium hirsutum
  Clone ID: LIB3196-010-P1-M1-E8
atcttttccattcttccaggtctccagtatctattattctactctgtatgtctatgtttacacactgttatctcccatcttaaaaccttttaaaatatgaacttacttaccttattttctcctccccccttaattattgtatcactttgttaaaataacttctgtaacaatattttacttattatttaagaaatgatgattcattatatcataagcaaaaaagtgtaaagtctggagttcatttatgactttgtgacatttgctgtcaaattataatgctgaatattatgtctttttattttagataggttaatccatttaaaaagtcatgccctggaagtggagaggatattctagagatatttgctaacatataagatcaatatccggtgtcagaaag

SEQ ID NO: 45152 - DNA, 385 bp, Gossypium hirsutum
  Clone ID: LIB3196-010-P1-M1-E9
gcttatagtaatcatggtgaggaacaagtcagttttcgtagttttgctcttttctcttttcctttcctttggcttgctttgctttgccaaagacttccccggcagaagaagcgaggatgatcctcaacagaggtacgaggactgccggaagcgatgccaattggagacacgtggacaaacggagcaagacaagtgtgaagacaggtgtgaaacgcagttgaaggaggagcagcatcgtgacggagaagatcctcagaggagataccaggattgccgacaacactgccaacaggaagaaagaaggctgcgtccacattgcgaacaaagctgcatggaacaatacgagaaacagcagcagtagcagcctgacagctattcatggagt

SEQ ID NO: 45153 - DNA, 289 bp, Gossypium hirsutum
  Clone ID: LIB3196-010-P1-M1-F1
gctcttcctcctcgcgaaacgacgcggaggatgctgtcgcaaatgacacgtggcggggtgttttgataaagcatgacactcattccagcacgagtcttgacgattgaagtgcccttaagcttcttcacgtctgactatgactgcccacccacacagaacatatcctgtgctccagctatgtataccattacctgtgctggttcgacctactgataaagggcgtagcacttgacgttcaaaacccgatcaatgacctttgccagaacacaattggggccgttacccaatt

SEQ ID NO: 45154 - DNA, 402 bp, Gossypium hirsutum
  unsure (1)..(402): unsure at all n locations; Clone ID: LIB3196-010-P1-M1-F11
atccaaggtggacagtcttaatgatgagatcaacttcctgaaggtcctctatgatgcggagctgtcccagatgcagacccacgtcagcgacatgtccgtggtcctctccatggacaacaaccgcaacctggacctggacagcattattgctgaggtccgtgcccagtacgaggagattgcccagaggagcaaggctgaggccgaggccctgtaccagaccaaggtccagcagctccagatctcagttgaccaacatggtgacaacctgaagaacaccaagagtgaaatcgcagagctcaacaggatgatccagaggctgcgggcagagatcgagaacatcaagaagcagtgccagactttttangcatccgtggctgatgcagagcagcgtggtgagaatgc

SEQ ID NO: 45155 - DNA, 388 bp, Gossypium hirsutum
  Clone ID: LIB3196-010-P1-M1-F3
cttctgcatctttattgggactcttgtgaacatttgcgaactcaggcgacattacggcttgtccagacaagcaacagaagccatgcttgtggttgaagcttacaaggttcttcgagaccgagctccatatccacccgaccaagtcattaaagatcttgaaggaaaatttgctttcattattttcgatgctaaatctggtaccctctttgtggccagagaccgtgaaggaagcattcaacttaaatggggaatggctggagatggctccctggtattatcagatgatccaaacaccatagaaaaggcttgtggaaaatcctctgcttcgtttcctccaggctgcattttcatgaatggcaatggccttataagcattgatcatccactc

SEQ ID NO: 45156 - DNA, 387 bp, Gossypium hirsutum
  Clone ID: LIB3196-010-P1-M1-F4
cccacgcgtccgtcccattttcttattgattttgcagatcggttctctaatccttttttcgggtgtagcgttgtttatacgtttgttgttgttgaagaagtgctactaccatggctacaaagaagagcgttggggacttgaaggaagctgatttgaagggaaagaaagtgtttgttagagtcgatctgaacgttccattggatgataacttcaacataactgatgacacaaggatccgtgccgctgttcccaccatcaagtatttgatgggtcatggctctaaagtcatcctctctagtcatttgggacgcccaaagggtgtcactcccaagtacagtttgaagcctcttgtgccaaggttatctgaactccttggagtcgaggtta

SEQ ID NO: 45157 - DNA, 354 bp, Gossypium hirsutum
  Clone ID: LIB3196-010-P1-M1-F5
atgtttgttcatctgtagctctaaaagatcctttttatccttttaaaattcagtcctaagaatgagtgcttgtcccctaacagtgtttaatggcaaggcagccttgtccgaaggacacctccagcctaaaggtgagcgggatctgcatactagaattctagtgctgctgaatcaatgggaaatactactcctgtaagttttacctccctgcaaccaactacaaccaagctctctgcatctacttccacgtacgggattcaagagagtaatgggtttcatatttcttatcaccacagtaagttcccactaggcaaaatgagagggcaatgtttccttattggtacttattactgc

SEQ ID NO: 45158 - DNA, 384 bp, Gossypium hirsutum
  Clone ID: LIB3196-010-P1-M1-F6
atacccctaatttgtgaaattaccaaaatacccctaatttgtgaaattactgaaataccctcgacctataaaattattgaaatacccttgacttgtaaaattaccaaagtacccccgatttacagaattattgttttaccctcgatttacaaaattattaaaatacccctataaggtagaattaccgaaatacccttgtagggtagaattatcgagatacccttgtggggtaaaattaccattttgcccctagggtgttgaatgaatgttttgcccttgtgggcaagtgactaacgtggactgtgtggttgacggaattgattgtgaatatatgttggtgatatgaatgacttgactgcgactggttgattcaaatatgggcat

SEQ ID NO: 45159 - DNA, 384 bp, Gossypium hirsutum
  Clone ID: LIB3196-010-P1-M1-F8
gttacggccgaattcggcgtgtcacattgaagtgtttttcgaaaaccatgttttcattaaaaacccttcttgatgtaaaactcattggagcgttattgtaaaactcatgttttaattaaaaatctttgagaagaatattttcgttatagattaaagtgaatggaagctgtgcaccaagtaggaagccaaaaaagaagaggtgagtctattggactgcttaagtaccaagctcttcatggatccaatcctagacatgcacacatccattgccacacttaaagcatattacttgtccatgaacaacaaattaagtttaagtccatttaaaatatttatttcctttgaaaatatttacgttgcggaagctttgctcggtaatcgtga

SEQ ID NO: 45160 - DNA, 382 bp, Gossypium hirsutum
  Clone ID: LIB3196-010-P1-M1-F9
gttgaagttttccatctcaaacaaaggttgcaatcaatggagaaccgagcacccactcctaggaaaccattcaatgtatagtatctcagatcagatcttacccattgtggtcattcatgtatctatttgccatacgtgatccctggtacatgaaaaactgtcgaacctggccggagtcgagcctttgtctgcaaaacaaagcatgagatctgtattctgtagtctacctcattcccatgtaaatataaacaattaagtcgcatgtttcctcgtatgtatcctgtttctagttcaaagacaacgggcgaacttacagcaaggttgcggttagagttggaaaattggtgctgctgaggagttttagcctgtttctttgcctctc

SEQ ID NO: 45161 - DNA, 278 bp, Gossypium hirsutum
  unsure (1)..(278): unsure at all n locations; Clone ID: LIB3196-010-P1-M1-G1
tgctgactacaccgaagctcacctgaagctctctgagctaggatttgctgatgcataagctgatggttgcggaatagaatgaagccaacaacatttgcctccacaaaatgaatgtattgggttttgtcgtctcttagtagtttataggcagttgttgcttgatgaatatgggtatttccagttttattttgttgaacatgttgaattgagtttgtgggagatttcgatggactaactaaaaagctctttcgtaataaataatatacaatttattcana

SEQ ID NO: 45162 - DNA, 380 bp, Gossypium hirsutum
  unsure (1)..(380): unsure at all n locations; Clone ID: LIB3196-010-P1-M1-G10
atgtgcggactccgctcctccgcggcccgcccgcccgccggtctagccgccgcctccctcgctccgtgaacgcgccaggcgagggccagcggccggggcgacgcggcgcggagagggcgggcgggcgggctgtgggagcgccggtctctatatggcggcggctctgtcgggcctggctgtccggctctcgcgctcggccgccgcccgctcctatggggtcttctgcaaggggctgactcgcacgctgctcatcttcttcgacctggcgtggcggctgcgcatcaacttcccctacctctacatcgtggcttccatgatgctcaacgtccgcctgcaggttcatatngagatccattgaaggccctcccagagtgatgaag

SEQ ID NO: 45163 - DNA, 187 bp, Gossypium hirsutum
  Clone ID: LIB3196-010-P1-M1-G11
acacgccttacctgcaggtgacgatccgcgactggcacctgatgcagagccacagctagccctgagcggtactacagcctctaccacaagaccattgaagagctgcgggacaagatcctgaccggcactattgaaaacaaccgggtcatcctggagattgacaatgccaggctggctgcggatgact

SEQ ID NO: 45164 - DNA, 284 bp, Gossypium hirsutum
  Clone ID: LIB3196-010-P1-M1-G12
cggactgaaattccgggtccaacccaaccttccaaatggaaaagaagggtgtgaataataaaaaaaattttaaaggaaaggccaatttgggggggggtctaaacaagggctcttcgtgaagagtttccccaacatctatactataacctctattattgaccgcacggctgcttcaaacatggttgaggcagaaccatacatcattaagctgacggaggatcagataatgcagctactgtcaggtttctggatacagaccacacattcttataatttgccttcaa

SEQ ID NO: 45165 - DNA, 378 bp, Gossypium hirsutum
  Clone ID: LIB3196-010-P1-M1-G2
gcgaacgagagtttctcatccgcggttcctacatggaatttgacattgaagaaaataaccaccttgttgctgaagagagtgcttgccagcatattcatcatacaaaagaggccgacttttacactggccaaattccatagacaaatgccagcaagcctgcactatttatgagcctgtttatcttctattggtgacaaacatcaaacttcgtttgagactgagactacacatattctttttcttcgtattacccatccagacctcatatagttccaataatgagcatataatcattttctagcttaatgccaaattgatggcacctagagtcattcatcacacacacaaaaaaaacataatgattacacgatcaaagct

SEQ ID NO: 45166 - DNA, 142 bp, Gossypium hirsutum
  Clone ID: LIB3196-010-P1-M1-G3
ctggtgccggattttcttcttacccatttgggccggattttaaaacggattttgggcaattttaagaccattttgttttgaggccgattagttaagcaggcccgacaaccggcaacaaccggttgaccggcctggccggctt

SEQ ID NO: 45167 - DNA, 346 bp, Gossypium hirsutum
  Clone ID: LIB3196-010-P1-M1-G5
atgctaatttgtggcttttacgaccctaccccaccccctattttcaggggtttagactacatttgaaatccaaacttggagtatataacttcttatcgagcccaaatgctttttttttttttttttttttttgcttctctgccccttgtccatttcttttgtatttgttttctgtgagagcgctgaaatggcggccctggaatctagaatttggctctccactgagcaccttatcttgccaccttagccttaagaatgaatatgaagaaaaatacacagccatctctgtccagggcagtaagaagggggctgcaaggaaggggagattggggataaggaaaggaac

SEQ ID NO: 45168 - DNA, 386 bp, Gossypium hirsutum
  Clone ID: LIB3196-010-P1-M1-G8
atcgagagtttctcatccgagtttcctacatggaaatttacaatgaagaaattaacgacctttttgctgtagagaatcagaaattgcagattcatgagaatttagagcgtgggattttcgttgcgggtcttagggaggaaattgtgaacaatgctgaacaagtgatgaagctcctggagtctggagaagttaataggcattttggtgagacaaatatgaatgcacgaagtagtaggtctcatacaatattcagagtggtgatagaaagcaagggaaaggatacgggctcttttggtgattattcaatcagtgatgccatacgcgtctcagttttgaatttggttgatttggctggttctgagcggattgctaagactggaactggt

SEQ ID NO: 45169 - DNA, 349 bp, Gossypium hirsutum
  Clone ID: LIB3196-010-P1-M1-G9
atgggagtttgagaccagcctgaccgacatggagaaaccccgtttataccaaaaatacaaatgttagcctggcgtggtggcgcatgcctatgatttcagcctctcaagttgctggaattgcaggggcccactaccacacccagctaatttttttgggttattagtagcgacgctgatcaaccatgttggctagtctggtcaggagctgttgacctgagatgagctgcgactcttgtgcgtgctcacagtattctgggatatccgacattgaccgctgcgctcggacgacagggaaaggattcatactatattggagcttatttaatgagtgatgccatacgcgtgttaa

SEQ ID NO: 45170 - DNA, 241 bp, Gossypium hirsutum
  Clone ID: LIB3196-010-P1-M1-H1
acggttctatcacttagaattacactgccaattttgatctttctaccagaagaagtgttaggctaataaatcatcatatctatctcttcaatttgttcctgcaatgcataatgacattcatggatattacagggattaatgactaatgtgcatgactagcgctaggtggacatctgctaatgatgtttacattacactgctagacgaaccacattagctacaagtgcaaaatctgcgtaaa

SEQ ID NO: 45171 - DNA, 385 bp, Gossypium hirsutum
  Clone ID: LIB3196-010-P1-M1-H10
aagggacccagatgtttgggtggacccactcaagttcatgcctgagagattcgtgtccaaggacagtggtgacgtggaagtagtgtcagtgttggggtctgacctcaggctggcgccattcggctcaggccgtagggcttgccctggaaagactttgggtctggcaaccgtgaccttttgggtggcctctttgttgcatcagtacgtgtgggtgcaatcagatgagaaccctgtcgttgatctctctgaaatgcttaggctctcatgcgaaatggctaacccacttaaggtcaaagtgcacccgaggctcagataaaaaagaacaggaccaaatcaataagtgaagagataatcataatatggtcgagataaaaatgtaaattta

SEQ ID NO: 45172 - DNA, 388 bp, Gossypium hirsutum
  Clone ID: LIB3196-010-P1-M1-H11
gcgatgaatagtagatgacataaattaactgtaattgaactgtaaactgcggtaatgctccataaccctggtctagcgacggatacagattaggggtattacatttattggtatcagatctaccgtttagctgattctcagactaacgtaacaagtatagagtgatatcttctgaccattataaacatgttttccatagagtaatgtcatacaaccaagctagacttgaattaaaggagctgagagcattgatcaagctttagttcaaagaactgcatgtagtattactagaaggctttcgattgataaaattcaaaaatataaggtcgaagaatttaggggtactaccaaaactgaactgggaagagctgtattttggctggaaaat

SEQ ID NO: 45173 - DNA, 228 bp, Gossypium hirsutum
  Clone ID: LIB3196-010-P1-M1-H12
atgtttaccctcagaacacaggtgtcgtgaaaactacccctaaaagccaaaatgggaaaggaaaagactcatatcaacattgtcgtcattggacacgtagattctggcaagttcaccactactggccatttgatttaaaaatccgggggatttccaaaaaaccatttaaaattttgaaggaggctgctgataatggaaagggtccttcaaaattcctgggtcttggat

SEQ ID NO: 45174 - DNA, 134 bp, Gossypium hirsutum
  Clone ID: LIB3196-010-P1-M1-H2
acgtggctcgtcccaaacgttcagttcttgcaatcaattaagggaagccgtctattatcctattacaaccagacttatggtgctaataaatgattttttcgttgccatgaattcgcctagcataccaatcttta

SEQ ID NO: 45175 - DNA, 387 bp, Gossypium hirsutum
  Clone ID: LIB3196-010-P1-M1-H3
gaaagaaaagaaaaatggttctgctagagaaactttgggatgatgtagtggccggtcctcaaccggaacgtggccttggccggctgaggaagatcaccaccaccccacccttgtccaccaaaggtaaaaacaattagcttttgcattacatcatttgtattgtggacatttaagtttcactctgaaattgaatcttttcattagatgaggcttcatcaatggcgatgccgacgagtccgacgacacctgggacaccatcgacgccggtgtaggttcgtagggacaacgtgtggaggagcgtgttcaatccaggtagcaaccttgcaaccaaaggtattggcgctgaagttttcgacaagccttaacctaactatactactgattatg

SEQ ID NO: 45176 - DNA, 362 bp, Gossypium hirsutum
  Clone ID: LIB3196-010-P1-M1-H4
ggcaaaggacccttcctcgaagcttccaaagaacaaatcgaggccatgagtagccatgaggaaggcagcaaaggcggtggtttgtggccatttggaagtgagtcaaaatcagagagtgcattcaacctcttcagaaagcgtcagccttcacattgtaacagatatggtcagctctttgaagttgaagaagaagaattcaagggccttaaagacttcgatctcagggtctcctatgtcaacatcaccaagggatgtatgtcagccccattctacaactcaagggcaataaaaataggcattggtgggaaagggggaagatacttttgaatgggattaccttctggtttccccaagtccagtca

SEQ ID NO: 45177 - DNA, 101 bp, Gossypium hirsutum
  Clone ID: LIB3196-010-P1-M1-H6
gcagaacacagctgtcgtgaaaactacccctaaaagccaaaatgggaaaggaaaagactcatatcaacattgtcgtcattggacacgtagattcgggcaag

SEQ ID NO: 45178 - DNA, 262 bp, Gossypium hirsutum
  Clone ID: LIB3196-010-P1-M1-H7
gaggatggccatatgatgcatttcacctgaatactgacgttgtaaagtgggcgggaaaaaaagagagctactgtctaatcatcagatggtttacgccctgcaattatggatcctgatgacctaacgatttcaaaagttttcatcgtcatgcatactggaaaggaaaaaacaattgagtttgtaagcagattgcctaacgcttttactgtgattactatttacgctagagatcacgaccctttacatttgaatagaccttatg

SEQ ID NO: 45179 - DNA, 379 bp, Gossypium hirsutum
  Clone ID: LIB3196-010-P1-M1-H8
gagcacacttcattgcgaaagctatggtacatgcagacaaagcaacaactgtatcacacacgtattcgaaggaagttgctggaaatcctgcaatagctcctcatcttcacaagttccatggaatattaaacggaattgatttagatatttgggatccttttaacgataagttcattcctgtatcttacaattcggaaaatgtcatcgaaggcaaacaagctgctaagaaagccttacaacaaaggcttggtttgagaaaatctgatcttcctttggtcggaattatttctcgtttaactcatcagaaaggaatccatctcatcaagcatgcaatttcacgtgccttggaactcaatggacaggttgtattgcttggctc

SEQ ID NO: 45180 - DNA, 329 bp, Gossypium hirsutum
  Clone ID: LIB3196-010-P1-M1-H9
gtagcttccttgctagcctggtatcaattccgaaagcctgcgccaggagattgtcgcgaaagccactgagcacattgtttccgccgctctcttgcgactcttcctcctcccgttcccctctctgggttctgctttgcctttggtttcggtctctgctttgacctcctcttaccacacctccttgtggactaccagcaaggaagaatttcctgaagttctcatcgagctggttggcatcattgccaacatcaacaagtgcgaccaacacaagttgagaccgcccattgttgaaaatccagtgagctactccagcaggcaaggcaaccaca

SEQ ID NO: 45181 - DNA, 384 bp, Gossypium hirsutum
  Clone ID: LIB3196-011-P1-M1-A10
atggagattgacaatgccccggaggagcgagctcggggtatcaccatcaatgcggcccatgtggagtatagcactgccgcccgccactacgcccacacagactgcccgggtcatgcagattatgttaagaatatgatcacaggcactgcacccctcgacggctgcatcctggttgtagcagccaatgatggccccatgccccagacccgagagcacttattactggccagacagattggggtggagcatgtggtggtgtatgtgaacaaagctgacgctgtccaagactctgagatggtggagctggtggagctggagatccgggagctgctcaccgagtttggctataaaggggaggagaccccagtcattgtaggctctgct

SEQ ID NO: 45182 - DNA, 360 bp, Gossypium hirsutum
  Clone ID: LIB3196-011-P1-M1-A11
gggaactccggaatagtgccgaaaccacggcagacaggcaagcagcttgcaactgtgttaaacaagccgccgctcgtatccccactatcaaagaagatgacgccgcaactcttcctgcaaagtgccatgtccaagttgatttcccaatctccaagaacaccaactgcgaggacattcactaagatggaagccatcaagacgcaaatataatgccagtaggcgttgccgccatctattcaagtattattagccatatgtcgtacttgtgtcagaatagtaatgaagcacgcacatgtaagagtttttacaagcctttgtattagtaataaaaaggaatttgatgaaaaattcctgcacttt

SEQ ID NO: 45183 - DNA, 320 bp, Gossypium hirsutum
  Clone ID: LIB3196-011-P1-M1-A12
atctccggatggctcacttcagaccagaagcacagaacgggctgtttctggcgcttgggcattgggaggtggggagctggtgggcaatgggcttgccattccctggcactggacattcaggcctgcagaacaggcaggtgacgaaggcaggggagagacgccctttctcctcccggcgtgcctgtgggtgaggcctccagagaggacgtggagacgaggtaaagaggatggggacataatctgtcaatttccttagaccagaagcgggtgggggctggacagaaagggatgaaaagggaagtggaagccatgagcctcac

SEQ ID NO: 45184 - DNA, 370 bp, Gossypium hirsutum
  Clone ID: LIB3196-011-P1-M1-A5
ccggaactgaatataaaaggacaatgggagacctttttctttccattttttgagggtaaggaggctagaccctcaaaacatgggaaacgagggctaaaaagccctattttgcacgactccgaccaccgtctgtagtggagccacggtggagatgcagtggattgacggtgggctccaaagttgggttgaaaccctagcagagaaagggagtgttttaattttttttaaaacaaaacattagaatgagttttttttttaaaaaatttgcttttataaagggtatgaaacggcgtcgtttatggcctatagtggcctcaaaacgacgtcgtatagggacacccacacgcgacccaacccattccatggggat

SEQ ID NO: 45185 - DNA, 376 bp, Gossypium hirsutum
  Clone ID: LIB3196-011-P1-M1-A9
catacatggaaccttatacatgatcgttctgataattcgttctgcaacgctgttttgctgtgaagtatgacgaactgtaaagtgtattatgaccccttctaacttgtacaatctattaaactcattataacagaattctaagccattgtctgtgcggaggtattttatctggtttcccatctgtttttcaatcataattttacaagacttaaatgcggaaaacacatcatttttctgcttcaggaagaacgcccaaacttttgtagaaaaattattaataaaagttgcatataattagctccacctttcgaaggcactctggatggccctcacagatcagaatgaatatactccaacgtttccttccgggtatgga

SEQ ID NO: 45186 - DNA, 363 bp, Gossypium hirsutum
  Clone ID: LIB3196-011-P1-M1-B1
gattgaagctgaaggtaagcttactggtattcttagcttacgagcattacagcctggggaatctcgaaaatatgggacacatgattgccccgggtttatatgcacctgttcatcaacacttatttgttgctcgtatggacatggctatcgattgcaaaccaggcgaagcttttaatcaggttgttgaggttaatgctaaagttgaggaacctggggaaaataacattcataataatgcattctatgcggaagaaaccctgcttaaaacagaactccaagcaatgcgtgattgtaatcccttaacagctcgccactggattgggaggaatacaaggacagtaaacaggagtggtcaactgactg

SEQ ID NO: 45187 - DNA, 385 bp, Gossypium hirsutum
  Clone ID: LIB3196-011-P1-M1-B10
atggagctgcggctgctcaagcacctgaagcacgagaacgtcatcgggcttctggacgtcttcacgccggccacgtccatcgaggacttcagcgaagtgtacttggtgaccaccctcatgggtgccgacctgaacaacatcgtcaagtgccaggcgctgagcgacgagcacgttcagttcctggtttaccaactgctgcgcgggctaaagtacatccactcggccgggatcatccaccgggacctgaagcccagcaacgtggctgtgaacgaggactgtgagctcaagatcctggacttcgggctggcgcgccaggcagatgaggagatgaccggctacgtggccacgcgctggtaccgggcacctgagataatgctaaactggg

SEQ ID NO: 45188 - DNA, 352 bp, Gossypium hirsutum
  Clone ID: LIB3196-011-P1-M1-B11
cccacgcgtccgaaaacttgtcagaagaaaataaatgaagagttagaaaagaaaagaaaattttaaattgcaataaaagtaaaatggctaaagtaataaaatcgagtgttcctaatatcttagttcctcagcaacggcgccaaaaacttgatacgtgatattcgtgacaagttttaaatatttataatgaatcattcttaaaactaactattatcacgatgaaggcaagtgtacctatcgaacagtagtatagatttagcaagaccgaattatcgaacccaaaggaactaaaagaactaggatcaactttcttttattatctagcctaaaaaaataaatggggtttgtttat

SEQ ID NO: 45189 - DNA, 316 bp, Gossypium hirsutum
  Clone ID: LIB3196-011-P1-M1-B12
attattaccgatgccgaaagctatcacatctgttgatgccatcatatgaaacagaagcaactatgtccattacaaagaatacttcttgatcaaactagttttttaaacatacatatcacatagtatccaccatgactagacatgcacagaagctaatgaattgcttatcatacccctactacaacaaagacaataatgaattttaacaccaaagtatgttaacattgcctatggcatctattggatgacatatcaagattgacgaccttacgctctgtaatcctacccaaacggacattaatgccaatatcgcatg

SEQ ID NO: 45190 - DNA, 231 bp, Gossypium hirsutum
  Clone ID: LIB3196-011-P1-M1-B2
atcaggaacacagtccagcaaacagcagcacgcagttaaaaggaagactcataggagacagttgaagaaggaaaggggcgttggacctaatcccaaatttggccatggaaacctggtttttcctggttgtaaacctggggcttctttttttttacgggacccgttaatttggactttttaaaaaaaaaggaattccagggcccaacacttttgcttttttgggaaaatttt

SEQ ID NO: 45191 - DNA, 370 bp, Gossypium hirsutum
  Clone ID: LIB3196-011-P1-M1-B3
cggacccgtgggttagccgccaaattggagggatggggttttaatctaaaattattaaactaatttaactaaaaccgtaccaaaaggggaaaggggaaaatattcgaggatacccaatgggatagacattgccggggaaggaataaggagacggtaattcctagcacttttagtcctgggggatccgtattctttactcaccatagctatactatggttcgataggtgcacttgcctttgtggtatttatagttagtttaatgaccataaagttttgggcgctgttgccggggattaaaatattatgaacactttatttttattaatataggcatttttttattatttttatattttttttagtttaaat

SEQ ID NO: 45192 - DNA, 367 bp, Gossypium hirsutum
  Clone ID: LIB3196-011-P1-M1-B4
gaggaaactgaggaaaaaagaacaaactagttaagagcaatggaagatgatgcaatggcaaccgaggctcctttagcaccagtcacttgtggaaggagagtccgaaatgacttggaagataaacttcctaaaccttatatggcgagagctttggtggctccggatgtcgatcacccgaacggaacgccgggccattaccataacggaatgagtgttcttcaacaacatgcggcatatttcgaccaggacgacaatggaatcatttatcctttggagacttacgccggttgtcgagccatgggatttaatccgattgcctctctttttttaccattcttattaatggatctatgagctatcctacact

SEQ ID NO: 45193 - DNA, 372 bp, Gossypium hirsutum
  Clone ID: LIB3196-011-P1-M1-B5
cttcacatcatctgcagcattgatccctcagagagtttgaatttggatactttccagtctttcttcattggcggaggaacccatccaacatctgtccttgctggttttggtcctgaaactctttctaccgccttcaatgtgtcgatgtcgaaattggaggaaataatgagagggcaacaagagggtccaattgtgcatgtgaccaagtctcatgcaccaagcatttggacaaagttgtctcaacttcaagagcaagataggctaaagcaggtgaagagaatggtccacggagaagctgatgaagaagagaaagagtggtcatggtggaaactgtttggtattttttctggaaatgaaagaagaattttcggg

SEQ ID NO: 45194 - DNA, 372 bp, Gossypium hirsutum
  Clone ID: LIB3196-011-P1-M1-B6
ctcctttttatctttaaaacacgcacccaaaaaaaaataaaaccctttgaaaaccaaagaaggaagaagaagatgtcgtggcaagcttacgtagatgatcacttgatgtgtgaaatcgaaggaaaccatctctctgccgccgctatcatcgcccacgacggcagcgtttgggcccaaagcgccaatttccctcagttcaagcccgaagaaattaatgccatcatgaatgactttaatgaaccgggtacgctcgctcccaccgggttgcacctcggtggcacgaaatacatggtgatccaaggcgaaccgggagctgttatccgagggaagaagggacccggaggtgttactgttaagaagaccaatatggcc

SEQ ID NO: 45195 - DNA, 382 bp, Gossypium hirsutum
  Clone ID: LIB3196-011-P1-M1-B7
atctggaactcagaccccagggcagttgagggttttttaggcggcttccccactctgtgttttggccactcacacctcttttctcctccctgtttctccctgtccatctgtccccacgtccaccatgcagggtttccaggcctgaggtgcccgccttggccccaggagaatgaaccagccgcaaaggatggcgcctgtgggcacagacaaggagctcagtgacctcctggacttcagcatgatgttcccgctgcctgtcaccaacgggaagggccggcccgcctccttggccggggcgcagttcggaggttcaggttttgaggaccgccccagctcaggttcctggggcagcggagaccagaacagctcctcctttgacccc

SEQ ID NO: 45196 - DNA, 165 bp, Gossypium hirsutum
  Clone ID: LIB3196-011-P1-M1-B8
ggaacctaaccttcgggacgggtgaggaaaaaggagattacttgggtaaaattttttaacaaaaacgggaatagtttgggtaactggtaactttggatgctgaaggttcacgttttagggcaaatagttcacgataacctacatattgtgacctttatttttgtt

SEQ ID NO: 45197 - DNA, 368 bp, Gossypium hirsutum
  Clone ID: LIB3196-011-P1-M1-B9
gaggaagaagaaggagaaggagaagaagaagaagaagaagacaaccccagccgccgcagccgccaccaggaggaggaggagcaggggcgggaaagctcatcatgcaacaaccttctctgtgccttcgacagaaacttcctcgctcaagctttcaacgttgaccacgacatcattaggaaaatccaacgtgtacgaggaaatagaggcaccatcatcagagtcagggacagactccaagtcgtaacaccacccagaatggaggaagaagaacgtgaggagcgccagcaggagcagcgatcccgccatacgagaggagggtctcaagataatggcctcgaggaaactttctgctccatgaggatcaagga

SEQ ID NO: 45198 - DNA, 355 bp, Gossypium hirsutum
  Clone ID: LIB3196-011-P1-M1-C10
ctgctctcatgctttgttatgcagataatggactttttacccaggctgaggcaatatgggaggaaatgctaaatatatcatcttttatgcctgctattcctctggtttcaaaatttttggatgcttacggaaatatggggcaatttcaccgagtacagaaaattttggatcatgtaattcttgaaaaggttaacttggtacccccaagtgtacccagtggctatctcttgctttggaaagcatgggcaggttgatctaatggagaatacattgaaggagatggtttcaaagggcttgtccatagattctgccactggaaatgcttttgttagatattataacattttttgtttct

SEQ ID NO: 45199 - DNA, 362 bp, Gossypium hirsutum
  Clone ID: LIB3196-011-P1-M1-C12
ggggacggggaccgttgatggtgaagacagtggcggcaacgatagcggtagtgatgatatcgagcgtttacagcatgatgatgatccagaagcgatggatcgatgatggatcggctaatccgacggaacagatccttatggtcaaacaccttctcgaagctactctaatggggggagtactattcctagcactgatgatagacagattgcaccattatatccgagaactttggattcgaaggaagagcatggaagctatcaagaaacagggtcctgaggatggaaagtcgggtggctccgacaaagttaaggccttggagggagaagtaactatcctgcaggcaaaattgaagcagctagaa

SEQ ID NO: 45200 - DNA, 125 bp, Gossypium hirsutum
  Clone ID: LIB3196-011-P1-M1-C2
atcgggcacatgcggacaagcacgcaggttaacggagtgggttgacttagggttgaatgaaaacccagttaagcttgcctttatccccacttgggaaaattattgaaaaggtgtatcaaatgttg

SEQ ID NO: 45201 - DNA, 372 bp, Gossypium hirsutum
  Clone ID: LIB3196-011-P1-M1-C3
aagacatttgccgctggaatcattgtaccaaagtgttatatatggcctgtagatggagctctttacttgcaaccttctacctctattgtcttggatgctcacaaagaagggctagaagtttttgcgtcagacttttataatgatgttccattcagcttcaattactcatatgacccagtagctgagtaccttcagtttgttgacaatggtaaattctctgttgatggggttttaaccgacttcccaataactccagcagcagctatagattgttttgctcacataggaaaaaatgcttcaaaacaagcggaccttttggtcatatcaaataatggagcaagtggagactatcctggttgtactaacatggca

SEQ ID NO: 45202 - DNA, 294 bp, Gossypium hirsutum
  Clone ID: LIB3196-011-P1-M1-C4
gttattaccgagtccgaaaggtatcacatctgttgatggcatcatatgatacagaagcgactatttccattacagagaatacttcttgatctaactagttatttaaacatacatatcacatagtacgaccatgactagacatgcaaagagctaatgaattgcatacatacccctactaaaaaaaagacaataatgaattttaagaccaaagtatgttaacattgcctatgccatctattggatgacatatcaagattttcgacctaacgctctgaaaccctacccaaccggaca

SEQ ID NO: 45203 - DNA, 244 bp, Gossypium hirsutum
  Clone ID: LIB3196-011-P1-M1-C6
ttttgtatcaaggttgccattggttctgagcatgaaagatgggatctggcatgttgttgatagattcacaatgttgggtcaatttattcccgtacgtatagataattaacttgatatgttaaacgaaatatatgatattcatattgtaaagttaccacggggtacctacttttattgggtaggatagagatcctagatttacattacaagtttagaagattttgtatgtaacatagaactcttt

SEQ ID NO: 45204 - DNA, 380 bp, Gossypium hirsutum
  Clone ID: LIB3196-011-P1-M1-C7
aacgcgacactaaagtaacaagagggaacgcaaaagcacccggagacccggcccaaaaacccggggtaaagacaaccgaacggcaaaattaaaatcccgggggcccaaggtaaaaaagggatccaaataatggaaacccagggaacacaaagggggaataaatgaacacggggcctccaaagtggaaaaaaaaaaaggggtaaaggggtgaaaaacaacacaaagaggacgcaaggcacaccactaagggggggggaacaggaaaagccaaacccccactaatagaaaatacccctacacagtgcacccccgaacaaaaataaaatggcaaaaaaaaaaaaaaagggggggacgagctcaaagaaaccccccgagggggg

SEQ ID NO: 45205 - DNA, 361 bp, Gossypium hirsutum
  Clone ID: LIB3196-011-P1-M1-C9
cccacgcgtccggggtgttgaaacatacgagagtggaatcgctgttggtgtgaccgaagaagtggtcgcgttcgcgagggatctcgcgatgcatccagagacttggcttgattttccggtgcccgatgatgatggttttgatgattttgacatgtctgatgagcaacaagaacatgctttagctgttgaacgtcttgcaccaagattggctgctcttaggattgaactttgcccaggatatatgagtgagggttgcttttggaagatctattttgtacttcttcatcctcggcttaataaacaagatgcagaacttctgtctacttcccaaatagatgaagcaagagcaatgttaatgcaa

SEQ ID NO: 45206 - DNA, 388 bp, Gossypium hirsutum
  Clone ID: LIB3196-011-P1-M1-D10
atcggcagtggcttaggcctgggtggaggaagcagctactcctatggcagtggtcttggcgttggaggtggcttcagttccagcagcggcagagccattggaggtggcctcagctctgttggaggcggcagttccaccatcaagtacaccaccacctcctcctccagcaggaagagctacaagcactgaagtgctgccaccagctctcggtcccacagttctcaggcccctctctggctgcagagccctctcctcaggctgcctgtcctctcgtggcctccagtctcccctgctctcccaggtagagccggggatggatgcttagtgccctcacctttttctctctgtctataccagccccatttgagcacccattgctcaccatcag

SEQ ID NO: 45207 - DNA, 240 bp, Gossypium hirsutum
  Clone ID: LIB3196-011-P1-M1-D11
ttgattttaaggttcaattaaatattttgttattaaaacacacatgttaaatatttattatatcaatagtatcaaattaaatattgaaatcaattttaaatactaaaaaaaaaaaaatcaaataagtaataaaaaaaaataataatataatataaaatatataaataatataaaataatattaataaattatagttaataaataatgggggggccgtttttgggattccaatctaacttc

SEQ ID NO: 45208 - DNA, 383 bp, Gossypium hirsutum
  Clone ID: LIB3196-011-P1-M1-D12
atgccagtgaattgtacacctaaaaatgggtaaagtggtaaatttcattacaagtttttcaccacaataataaaataataataccagaagctgaagagtaatcaggacctcagtattactcatagccatgttgtatctaatattgggcagagcagaagcagaaaaaggaagaagttggagatttagaaactagctcaaaagaaaaaaaagtatagatttttatttaactgttttagtaaaagtttagtttttactttttttctcagttatcaggaaacacatgttttaaatttaaaagatgggagggaaactacctattactactatcacctaatgtttatcttaaaaaatttgtcacctactgatatggtttggatttgtgt

SEQ ID NO: 45209 - DNA, 388 bp, Gossypium hirsutum
  Clone ID: LIB3196-011-P1-M1-D3
atgtttttagcatttgcttttatttttttactttgatgccttttcagattggcatgtctctaaagtatttttcttcctgattaaaaatgtgtgtgtatgtgtgtgtgtatatgtatatatttttttaatcacattaactttaccaagtgaaaccaagccatactgtgtttgagccaattaagaaaattgccatttttaaagtgtagcatttcagggtaaagatccataaaatgacttgatgtattctagactactgaaagaaaaccacttcaaagattttgttgaaagttttagtgttgtctgaaaagcaagagggaaggtgattggtagtgagctaaaagaaaaagagagaaaaagagagtagttttgtcttcaggtaaaatgtctg

SEQ ID NO: 45210 - DNA, 312 bp, Gossypium hirsutum
  Clone ID: LIB3196-011-P1-M1-D4
cccacgcgtccgttaatactcgaaaaacatcccaatattgggatatgttacgtaagtgttgaatttaatcgagcccttacaaataaatattcgctcagttgatgaacgagctaccggccttcggctaagttggtcttttgtgtatgtacataagggttaacgttgtgaagtaagtttgatgtcggaaaattgtgtattatgaaatattccgtgtagctaaatgtgtgctattctttcgttatgctggaatgtctgctcaaacttactaacataaattgttacttcgtccattgctccctgtttatagatttt

SEQ ID NO: 45211 - DNA, 369 bp, Gossypium hirsutum
  Clone ID: LIB3196-011-P1-M1-D5
gcttatcgtaatcatggtgaggaataagtcagcttgcgtagttttgctcttttctcttttcctttcctttggctttctgccaaagactttcccggaagaagaggcgacgatgatcctccgaagaggtacgaggactgccggaggcgatgcgaatgggatacacgtggacaaaaggagcaacagcagtgtgaagaaagttgtaaaagtcagtatggggagaaagatcaacagcagcgccaccgccctgaagatccccagaggagatacgaggagtgtcagcaagaatgccgacaacaagaagaaaggcaacgaccacaatgccaacaaaggtgcttggaacgattcgagcaagaacaacaacaatcccag

SEQ ID NO: 45212 - DNA, 207 bp, Gossypium hirsutum
  Clone ID: LIB3196-011-P1-M1-D6
cccacgcgtacaattggactgggaaaacaaatcaattttgggatatggtacgtaagtgtagaattaaattgacccctgacaaataagaattcgctcagcagatgaacgagatacacgtcttttgttaaattggactttacatgtatgtacataaaggttaacgacgagaagtaagcttgattaagaaaaatagagtatgatgaaaat

SEQ ID NO: 45213 - DNA, 387 bp, Gossypium hirsutum
  Clone ID: LIB3196-011-P1-M1-D7
attgtgcttattcaggtctatgaaggagagcgtgccatgaccaaggataacaacctgcttggcaagtttgaactcacgggcatacctcctgcaccccgaggtgttcctcagattgaagtcacttttgacattgatgccaatggtatcctgaatgtctctgctgtggacaagagtacaggaaaagagaataagattactatcactaatgacaagggccgtttgagcaaggaagacattgaacgtatggtccaggaagctgagaagtacaaagctgaagatgagaagcagagggacaaggtatcatccaagaattcacttgagtcctatgcattcaacatgaaagcaactgtcgaagacgagaaacttcaaagcaagattaacgatgag

SEQ ID NO: 45214 - DNA, 268 bp, Gossypium hirsutum
  Clone ID: LIB3196-011-P1-M1-D8
atggccttcattgctgcctatgggtgcggggcagagtggcaaagtgatggcggagaggcacagggcaccatgggggcccaattcctacttcggggatctctgggatagagccgagggtcccctttgtgggggtagatcactagggttaggcgttcctactgtctgtgcggacctgagtcctggacatgcccaagtgcctcaagtacggatgctaggacggtctcgatcgctctaagatgtcatacatttctggaactggacaggtgca

SEQ ID NO: 45215 - DNA, 357 bp, Gossypium hirsutum
  Clone ID: LIB3196-011-P1-M1-D9
gtctatgaccatgcatgtctgcctacgacgaggggtaggacctttgaaggagcatgtatgtctccactcgaagaacgggcctgcgcatgagcttacagcgacgctcataggtgtctgtccaactgatgccatatgcgctgatgtggacgaaacaaatgagccgatgcgagcatttgcatactgtacattatatcatcgagaggaattgcaacacatgactttgataaggcctgaactatcacaagctggatacacattctagcgggtgccgtactcatggctgttaaagagctagactacacatacatggatggtgctgagaatgtgcacgcgaccgaccttattgacataaacagc

SEQ ID NO: 45216 - DNA, 148 bp, Gossypium hirsutum
  Clone ID: LIB3196-011-P1-M1-E1
gtgaccttgggttgagtgtagagatgaggaaaatcatggttgccaaatttttcttcttatttctttatctttcctattaaaatgtattttaatttatttcatatttattttttaaattttttttattttacaatttatttttattaat

SEQ ID NO: 45217 - DNA, 370 bp, Gossypium hirsutum
  Clone ID: LIB3196-011-P1-M1-E10
attgagtcgaatcgaattttactcaccttaacgaaagctgtggtaatgagaacttgttagctaagaaggaaaaaaggaggccaagtctaaaatgcagacaaaatccaatgcaaaaatacagacaaaatccaatgcaaaaatattgacaatgacttcacgttttatttccgcaaggagttggaactctgctgaccataaatgagaaatgccatatttatataatcatatatactaattatagaagtattgattaagttccgccgtgttaaaaacacattaatacttgaataatttatcttactatttattgttttgaattaagtgaaattaaaatcaatcaaattaattgctttcgttatttcattaaatg

SEQ ID NO: 45218 - DNA, 367 bp, Gossypium hirsutum
  Clone ID: LIB3196-011-P1-M1-E11
aaacacctccttccacccaccttttcaaaatatcagtttgtttctttgattccactcccttgtattaaccattttgtttgaaatttagtaaaattgtttgtttgaaattaattaataatatttttatttaaatatatactagcttttaaggtaataataatactaatcttcttcttcttaaaaacagtggataaggtaagaaagtctaattttgttttgtttgtttttaaatttgaggtggttttctttcagttattaaaccctaaacagaaccgaacatgaaacagaaagaatcagcagcagcctctggttttagttttatcatacttatctctctctctaaaacagtctcttctcttcgtctttt

SEQ ID NO: 45219 - DNA, 369 bp, Gossypium hirsutum
  Clone ID: LIB3196-011-P1-M1-E12
gctttgaaggccaaagaagcacagaagaagactgcacaagcagatgaagaaggtgggagattgttggaagagagggaaggtgaaggaagtggcaagagcagtgaatctcaggattagatcagttcatggttcgtatttcatattaggattatgaaatatggaaggatgttgcaaataagggctaaagggagatattttgatgatatgatccaaaaagggcttgtattcaatggaaaaaaacaatgaggggataatgcattttgggttttggtatgttgtttctttctattttttaggtttacttattatggccatttcatattaaaaacatcaggggtttgagatcatatttgtttcttattgcaccgg

SEQ ID NO: 45220 - DNA, 364 bp, Gossypium hirsutum
  Clone ID: LIB3196-011-P1-M1-E2
gacacgcgtacggtactaattggtgctgccgctgatggctctaaagttaatgctgatgatgctgcctatggtgaagatgcaaatgtattttgaaagccagaaacagacacagaatgcatgccatacaatgggtgatggatttaagctgtagataccatcgaaatggaacccaagcaaagaggtggagttcccaggtcaagtgctgaggtatgaggacaacttcgacaccaccagcaatttgagcgtcatgatcactcccaccgacaagaagtccataaccgactacggttcccctgaggaggtcctctcttcggtggattatcttcttggaaaacaagcttactttggtaaaaccgattctgag

SEQ ID NO: 45221 - DNA, 371 bp, Gossypium hirsutum
  Clone ID: LIB3196-011-P1-M1-E3
aaaaaatttcattttttttcctttctctttataagctatcattctctctctctctctctctctctctcattacgagaaggggtttctctttcaagaattcatgtcggaaaagggtcggcctttgccaaaatttggtgaatgggatgtcaatgatcctgcatcagctgagggatttactgtgatctttaacaaggcgagggacgagaagaaaacaggtggcaaacccgaatcaccatcaggaggtgatcctcatcttaagcctggagcggatcccagcaaaacccagcctaaaaaatggctttgctgcatgcacgccccgcctgcggaatcttgaagtgatcctgcccgtataagagcttttccacaagtat

SEQ ID NO: 45222 - DNA, 383 bp, Gossypium hirsutum
  Clone ID: LIB3196-011-P1-M1-E4
atccgggctgggcagagtgatgcggactcttctgctgctactgtggttggcgacgcgcggaagcgcgctctactttcacatcggagagacggagaagaagtgctttattgaggagatcccggacgagaccatggtcataggaaactaccggacgcagctgtatgacaagcagcgggaggagtaccagccggccaccccggggcttggcatgtttgtggaggtgaaggacccagaggacaaggtcatcctggcccggcagtatggctccgagggcaggttcactttcacctcccatacccctggcgagcaccagatctgtcttcactccaattccaccaagttctccctgtttgctggaggcatgctgagagttcacctggaca

SEQ ID NO: 45223 - DNA, 385 bp, Gossypium hirsutum
  Clone ID: LIB3196-011-P1-M1-E7
atggcacgattgactttttcgacattggataaaatctacaaatcagcccttgagttattcaatggtaactgacaactaaaatatttccctagaaaggaagatgaaaggagtggagtgtggtttggcagaacaactgcatttcacagcttttccagtcaaattggagcactgaacgttcagatgcataccaaattatgcatgggtcctaatcacacctataaggctggctaccagctttgacacagcactgttcatctggccaaacaactgtggttaaaaacacatgtaaaatgcttttaacagctgatactgtataagacaaagccaagatgcaaaattaggctttgattggcactttttgaaaaatatgcaacaaatatgggat

SEQ ID NO: 45224 - DNA, 362 bp, Gossypium hirsutum
  Clone ID: LIB3196-011-P1-M1-E8
cgaagactacattcagaacgagatatggtcactatgaatacttagctatgccttttggacttacgaatgcacgtgctacctttatggacttaatgaaccaaatttttagactgtacctagatcaatttgttgtagtgttcatagatgatattttgatatattcacgagatgaaactgagcatgccgagcatttgagaagtgtattacagattctacgtgataagcagttatatgcaaagtttagtaaatgtgaattctggttgcgcgaggttggttttttggggcatattgtgtcagcatcgggtattcgagttgatctaagcaagatttcagctattctggattggaagcctccgagaaat

SEQ ID NO: 45225 - DNA, 364 bp, Gossypium hirsutum
  Clone ID: LIB3196-011-P1-M1-E9
cttcctggtttcaagcctgcaaaacatatggtgttttctggtctctatcctgcagatggatccgattttgatgcgcttaaccatgctatagagagactaacatgcaatgatgccagtgtttctattactaaggagagtagcacagcacttggactgggttttaggtgtgggtttttaggcttacttcacatggatgtttttcatcaaagacttgaacaggagcatgaagctcatgtcatttccactgttccaactgttccttatatttttgagtattctgatggaagtaaggtagaagttcagaatcctgctgcattgtcctcagatcccaagaaacgagttacagcttgttgggaacctactg

SEQ ID NO: 45226 - DNA, 448 bp, Gossypium hirsutum
  Clone ID: LIB3196-011-P1-M1-F1
cgacactatagaacacgtttgtacaaaaaagcacgactgcgtaccggagccgtttggcacagggaagcgggtatctacaatgaccctcttctttctgtttagctctgcttattccaggggcttggttcgacgagaagcatataagagtgagattgctcatcggcacaatgatttgggagaagaacatttcataggcctggtgctggttgccttttctcaatatctccagcagtgtccatttgaggatcatgtgaaactagccaaggaagtgactgagtttgcaaaagcctgtgctgatgaagagtcaggggccaactgtgacaaatccattcacaccctgttcggtgacaagctgtgcacgacggactccctccgtgacacgaacagggacatggccgactgctgtgagaagccagagcccgacaggaacgagtgctttctgatgcac

SEQ ID NO: 45227 - DNA, 367 bp, Gossypium hirsutum
  Clone ID: LIB3196-011-P1-M1-F10
gggaattgaagatgggatcttatctcggagttgctgcagcatctgcaaatcctcctcattttattcatttatgctacaaaccaccaagcggacctgttaaaaccaagttagcattagttggaaaaggattgactttcgacagtggtggctacaatatcaagactggacctggttgctcgatcgaaaccatgaaagcagacatgggaggttcggcagctgtttttggtgcggcaaaagcccttggacaaatcaaaccttctggagtagaggttcattttattgttgcatcttgtgaaaacatgataagtggaaagggtatgaggcctggagatattgtcacagcttcaaatggaaagacaattgaggt

SEQ ID NO: 45228 - DNA, 319 bp, Gossypium hirsutum
  Clone ID: LIB3196-011-P1-M1-F2
atgtccaccctgtcccatgacttgattacttttgcacattccctggccacttctccccagggctgcctgctctgtgggccccacagccctgctcatccctcacgcccttcaatgctgcaggatggactggcccctgacctagggactctccaaatgggacacaggagaaaagctggtctagattgtttgctgatccccaacctgcacggggcattcctgctcctctctcaggccaccacagagggcaggggatggttagccagctgccccagcacccacaccctaactcaaaataaatgttaaataagtgcgatcacac

SEQ ID NO: 45229 - DNA, 391 bp, Gossypium hirsutum
  Clone ID: LIB3196-011-P1-M1-F3
atagcgaaggtgaccggggaccaagcatttcagatctgcttggtagacctggtgcaccaccaccatgttggctgcaaggcttgtgtgtctccggacactaccttctagggttttccacccagctttcaccaaggcctcccctgttgtgaagaattccatcacgaagaatcaatggctgttaacacccagcagggaatatgccaccaaaacaagaattgggatgcggcgtgggagaactggtcaagaactcaaagaggcagcatttgaaccatcgatggaaaaaatatttaaaattgatcagatgggaagatggtttgttgctggaggggctgctgttggtcttggagcattgtgctactatgggttgggactgtctaatgagattggagct

SEQ ID NO: 45230 - DNA, 391 bp, Gossypium hirsutum
  Clone ID: LIB3196-011-P1-M1-F4
atgcaaacatggagagaatcatgaaagctcaagccctaagagacaactcaacaatgggttacatggcagcaaagaaacacctggagataaaccctgaccattccattattgagaccttaaggcaaaaggcagaggctgataagaacgacaagtctgtgaaggatctggtcatcttgctttacgaaactgcactcctgtcttctggcttcagtctggaagatccccagacacatgccaacaggatctacaggatgatcaaacttggtctgggtatcgatgaagatgatcctactgctgatgataccagtgcagctgtaactgaagaaatgccgcccctcgaaggagatgacgacacatcacgcatggaagaagtagactaacctccggctga

SEQ ID NO: 45231 - DNA, 384 bp, Gossypium hirsutum
  Clone ID: LIB3196-011-P1-M1-F5
atgcaaacatggagagaatcatgaaagctcaagccctaagagacaactcaacaatgggttacatggcagcaaagaaacacctggagataaaccctgaccattccattattgagaccttaaggcaaaaggcagaggctgataagaacgacaagtctgtgaaggatctggtcatcttgctttacaaaactgcactcctgtattctggcttcagactggaagatccccagacacatgccaacaggatctacaggatgatcaaacttggtctggctatcgatgaagatgatcctactgctgatgataccagtgcagctgtgactgaagaaatgccgcccctcgaaggagatgactacacatctcgcatggaagaaggagactaaccta

SEQ ID NO: 45232 - DNA, 265 bp, Gossypium hirsutum
  Clone ID: LIB3196-011-P1-M1-F6
aagaagcccaccatcactttcagggaaatccaaaacggttgttaaattggtttttcttgaaaacttggccaaaccccccgtttttaagggccccaaacccgggcccaatttaattagttttggatttggaggaatttaagggtaagggtttccccttcatttttgcaaccgaagtttgaagaccgtgaagacctggggtaattattgatttgaaaaggaagaacctttttttttttggaatatataaaatgcttatggttggctt

SEQ ID NO: 45233 - DNA, 281 bp, Gossypium hirsutum
  Clone ID: LIB3196-011-P1-M1-F7
atggatttgtgtataccactcttattaccgtcgagagagctgatctacttctctgcatgttctatcgaaggtcattggacggaggacggcttccactaccttacgatactctgtttctcactgacatgtacattacacactatggcagcgtgttaaaaccccatatggaggtcagagagaaaatatacatggatttgatcattgaactacgatccaagcttgagacaatgagagttgcggcgacattccagaaaatatgcatggactagatgaatgaactt

SEQ ID NO: 45234 - DNA, 217 bp, Gossypium hirsutum
  Clone ID: LIB3196-011-P1-M1-F8
atggatttgggtattccactattattacagtcgaaaaaaatgatctactgaagtgatgagttatttagcaatatatgagaaggtttcaactactttaaacccttctaataaatgaattcacatatgcatcgttttaatacatattgggtagctaaaacacattttttttattaacaaaatccaatttctaaaggggagtcttttacatttctgaaaa

SEQ ID NO: 45235 - DNA, 230 bp, Gossypium hirsutum
  Clone ID: LIB3196-011-P1-M1-F9
cccacgcgtgcgactaaggtcaagcaaagtgcctccagagcttccacaaaacgatgcaatggaatgttacttgttgtctagcaatcgactggtaatactgggttttaacacaacattaaccgaaccagtggatactccggggagtagaggtgatcaaataaaagaaatggaacttaaattgcatccggcgttgagagaacccttaacagccctctgtaatgatccgaaga

SEQ ID NO: 45236 - DNA, 367 bp, Gossypium hirsutum
  Clone ID: LIB3196-011-P1-M1-G1
cccacgcgtccgatgaggatgagctgtaatggctgcagggtcctgcgtaagggctgcaccgaaaactgcaccattagaccttgtcttcaatggatcaagtcctctgattctcaagccaatgctactctcttccttgccaaattctatggccgagctggtctcctcaacctaattgaagccggccccgaaaaccttcgccctgctatttttaggtcacttttatacgaggcctgtgggcgtgtggtaaatccagtttatgggtcaattgggatgctttggtccgggaactggggtgagtgccaagcagccgttgatgctgtgctaaaaggctcccccataacccaaacttcatcatctttggaatcag

SEQ ID NO: 45237 - DNA, 352 bp, Gossypium hirsutum
  Clone ID: LIB3196-011-P1-M1-G10
atcatggagtggtgcaagaagctcgcttttctgatggttgcaatggctctgcttcttcaggccatggtgcccccgacagcattagctgctcgtaacaatgtcatggaatacaatccattggcaagcgtattctcgagggaaggccctggctgcatcgcaaaaggcgggttttgcttgtttgacctaaccagttgctgtaggccttgcggatgccttgcagggtggtgctataacattgatcatgattgcaatgagtacacataatggtcgctactaagttaaaaaaaaaaaaacagctctgagtcaaaaaatgacacgggattcgattataaatgttctatatataacatat

SEQ ID NO: 45238 - DNA, 369 bp, Gossypium hirsutum
  Clone ID: LIB3196-011-P1-M1-G11
gttcaatattaattcgacatggaaatgagaaagtatgtaagtttgtatgtaaataatacattatctttattatgtttttgtatttcagcatattttatgtattgtagctgatttttgaatcataattgactattggaagtatggaatcaagtattagaaagagagagaaatcccggttaaaccttcagaaagattggatgatacagatggtatgtagctaggtcacatgtatggtgctgagtgcacatcatgtgtacaagagagctacgggatatatgtagctgggtcgcatgcgtggttccaggtgaaggacaccatgtagacaagagagctacgagataaactggctaggtcacatgggtggtacta

SEQ ID NO: 45239 - DNA, 264 bp, Gossypium hirsutum
  Clone ID: LIB3196-011-P1-M1-G12
cccacgcgttcgcattgttgaatctcacctgcaaaatgcaaattgctgtgtgtgatttaaaacatggatggcacaataaacttaaagtcctaaagcggaaggagataaaattttagagaagagaatccaaggccattttgtttctccagtaaaatttttgtgttatataaactgaaaactcacggtctctaattgcttgtcgcttgctacatgaaaagctgtcaataaatggatccatcaattttcataacgttcttgcgccaa

SEQ ID NO: 45240 - DNA, 178 bp, Gossypium hirsutum
  Clone ID: LIB3196-011-P1-M1-G2
gccacgcgttacatcaggatgagctggaatgacttcaaggtcctgcgtaagggctgcaccgaaaactgcaccattagaccttgtcttcaatggatcaaatcctctgattctcaaaccaatgcttctctctttcttgccaaattctattgacgaactggtatccttaacctaatatgaa

SEQ ID NO: 45241 - DNA, 241 bp, Gossypium hirsutum
  Clone ID: LIB3196-011-P1-M1-G3
ctagagggaaagctggaacgcctggaggcaccggcccgaaatccggggtgcgacacacacgtttgaatacgtgtgctttgaggaccagacataccgactgtatgctgaggatggaggctttgagctataattttaccattggaactttcttctatgggaccaagatacttgatggttaatcaaatgctataccccaaagaaacaaaaattataataaaagctgctgtctttatgctaacgg

SEQ ID NO: 45242 - DNA, 305 bp, Gossypium hirsutum
  Clone ID: LIB3196-011-P1-M1-G5
gggaggcatgtctgttgtcccagctactcgaggtgaggggaggactgtggcccagaaaaggggctgaggaccaggacatgcactgactcaacctggcaacaacagaccctactaaaaaattattgagaaaaagataattgggcatagggctggcctgagcccatactcagagctgagtggaggatgctgattagaagtgagtgagtgagcaaaggaccatggaccacctggcaacagggagacctgctaaaaagaaaggaggtttataatactctgacatgatcaaagatcattgagtaataaca

SEQ ID NO: 45243 - DNA, 332 bp, Gossypium hirsutum
  Clone ID: LIB3196-011-P1-M1-G6
atcctgcattaatcagccccagttccgggctgtcttgggggaagtgaagctgtgtgagaagatggcccagtttgatgctaaaaagtttgcagagacccagcctaaaaaagatacaccacggaaagagaagggttcacgggaagagaagcagaagccccaggctgagcggaaggaggagaaaaaggcggctgcccctgctcctgaggaggagatggatgaatgtgagcaggcgctggctgctgagcccaaagccaaggaccccttcgctcacttgcccaagagtacctttgtgttggatgaatttaagcgcaagtactccaatgaggacacac

SEQ ID NO: 45244 - DNA, 367 bp, Gossypium hirsutum
  Clone ID: LIB3196-011-P1-M1-G7
cttaacccattcaggtatagtctcagaaatacattagggtcttggcccatattagatacagaatgcagatacagtaaatcaaaatcctacccaccagcctctacacaccatctccgttcaaccctatacaccatgtggggattaaatcaacccacccatccctacacaccatgttataccgaaatgcggcacttaatcagaaggttacagctgagctgccagataacaagcttaatagcctttcagacacttcttccaaatatcaacccaccccgatgcaatgaaacatacaaaatatgtcatgtcattatgtaattaatagtacatacattcggatatcataagtcatgctcggtatagaaatcaa

SEQ ID NO: 45245 - DNA, 366 bp, Gossypium hirsutum
  Clone ID: LIB3196-011-P1-M1-G8
cttaacccattcaggtatagtctcagaaatacattagggtcttggcccatattagatacagaatgcagatacagtaaatcaaaatcctacccaccagcctctacacaccatctccgttcaaccctatacaccatgtggggattaaatcaacccacccatccctacacaccatgttataccgaaatgcggcacttaatcagaaggttacagctgagctgccagataacaagcttaatagcctttcagacacttcttccaaatatcaacccaccccgatgcaatgaaacatacaaaatatgtcatgtcattatgtaattaatagtacatacattcggatatcataagtcatggctcggtatagaaatc

SEQ ID NO: 45246 - DNA, 308 bp, Gossypium hirsutum
  Clone ID: LIB3196-011-P1-M1-G9
cccacgcgaggaacttctatccacactgaccctttaggtcctaaccctaatatcctgaattgaacccatgccatgtttgtcggacggaacttggaatccccccaaacagttgtaatgttggcatggataacctgctttgagaccaaaaactcccccccctggcctcggacaatcatacccaaaagggatcctgcattttgctgatcaaagggcgcatcaaaatacactgagattttcgcacatttctcaacagttcgcaagacaccatttcctgtcaaatgatcccaataccgtatccaaaaaaataa

SEQ ID NO: 45247 - DNA, 363 bp, Gossypium hirsutum
  Clone ID: LIB3196-011-P1-M1-H1
atttttcacaaattttacgaacggaagcccttattttcatagttgttattccttaaatttttccgaattcgcttattggaagaaaataactttcttgaaatttgaattggatccccccgaaagaaatcttgaagttgaaaaaactacctaatcgttcgaatccttggtgcgaagtctataaattatacgcccccctggttgaatcataagcacttacttcacttttggtgactctattccacgttggtaaaactcttccgaaacataacctaaaatcagatcttcattatttaaaagaatccagagtgggagtgatttacttattaaattaaacctttatgaatccaattttttggtccttta

SEQ ID NO: 45248 - DNA, 336 bp, Gossypium hirsutum
  Clone ID: LIB3196-011-P1-M1-H10
ggtgctgggaagcacgtccctcgtgccgtcttcgtggatcttgaacccactgttattgatgaagtgagaactggtgcttaccgccagctcttccacccagaacaactcatcagcggcaaggaagacgcagctaacaactttgcccgtggtcactacaccattggcaaggagattgtcgacctctgtttggaccgcatcaggaaacttgctgataactgcactggtcttcaaggattccttgttttcaacgctgttggtggaggtaccggatcaggtcttggttctctccttttggagcgtttgtctgtcgattatggcaagaaatccaagttgggt

SEQ ID NO: 45249 - DNA, 368 bp, Gossypium hirsutum
  Clone ID: LIB3196-011-P1-M1-H11
gtatcgaaggaagaaaaggttccatcacccaaattcctattttgaccatgcctaatgatgatataacgcatcctacaccagatcttactggctatattactgaaggacagatatacattgatagacaactccacaaccgacagatatacccaccaattaatgttctcccttcactctctcgattaatgaagagtgctattggtgaggggatgactcgtagagatcatgctgacgtgtccaaccagctatatgcaaattatgctattggaaaagatgttcaagcaatgaaagctgtggttggcgaggaagcactttcttctgaggatctgctttatctggagttcctagataaatttgagagaaaattc

SEQ ID NO: 45250 - DNA, 365 bp, Gossypium hirsutum
  unsure (1)..(365): unsure at all n locations; Clone ID: LIB3196-011-P1-M1-H12
caatctttgtaccatcaactgagggtcaatgagactgatgtttacaagacagtgtttaggactcgttatagtcattacgagttcctagtgatgtcgtttggactgacgaatgcaccaacgacttttatggatttgatgaaccgagtgttctagccctacttggatcagttcatagtggtgtttatagatgaaattctagtgtattcgagaactaatgatgaacatgatgcacatctccaagtggttctgcaacttctgaaagaaaaaaactgtatgctaattcagcgagtgtgaattttggttacaagaggtaactattctgngtcatgtggtatctgctgagggaaattaggttgatcatcgaa

SEQ ID NO: 45251 - DNA, 297 bp, Gossypium hirsutum
  Clone ID: LIB3196-011-P1-M1-H2
atttttaaaaaattttacaaacggaaaccctaattttaatagtggtaattcctaaaatttttccaaatcgcttatttgaagaaaataaaattttttgaaatttgaattgaatcccccaaaaaaaatatttgaaattaaaaaaaatactaaaagtgcgaaaacttttgtcgaaaactataaaatatacacccccctggttgaattataaaaacttaatttaaatttgttgaactatataccacaatagtgtaaaaaacttttcaaaaataatactctaaaaataattttttttatttt

SEQ ID NO: 45252 - DNA, 324 bp, Gossypium hirsutum
  Clone ID: LIB3196-011-P1-M1-H3
gcgcccacacgtccgcggacgcgtgggcacagcctaaaaccctccacgcggtctgacacacaatcgtgtcttctctgtagatgaagaaggcatgttgcacacggccatagtctattatacggcctagccacacgactgtgtaacccttccacatggcttaaagcattgcacacgacgatgaggggcccttatacaacagtgtgcagcatagttgactactcaatcaagtccctacattattattaaaatatttttagaataattctctttcaattagttctatgatattatgaaaaatgtagaatctgtgatttgatggatgaa

SEQ ID NO: 45253 - DNA, 346 bp, Gossypium hirsutum
  Clone ID: LIB3196-011-P1-M1-H4
gcaagaagttcgcttttcagatggttgcaatggctctgcttcttcaagccatggtgcctccgacagcattagctgctcgtaacaatgttatggaatacaatccattggcaagcatagtctcgagggaaggccctggctgcatcgcaaaaggcgggttttgcttgtttgacctaaccagttgctgtaggccttgcggatgccttgcagggtggtgctacaacattgatcatgattgcaatgagtacgcataatggtcgctactgagttaaaaaaaaaaaacagctccgagtcaaaaaatgacatgggattcgcattcgattataaatgttctatatataacatatgt

SEQ ID NO: 45254 - DNA, 301 bp, Gossypium hirsutum
  Clone ID: LIB3196-011-P1-M1-H5
cccagacgttcgcttttgagatggtagaaacgactatgcttcttgaagccatgcaccctacgacagcattagttgatcttaacaatgatatggaatacaatccattggctatgcatattctctaagggaaggacctggctgcatcttaaaatgcgggatttgcttgtatgacataaccagctgctgataggacttgcggatgcatagaaggaaactgctacaacaaggatcatgattgcaatgtaaacacataatgaacgctactgtgttaaaaaaaaaaatcaaattataattaaatata

SEQ ID NO: 45255 - DNA, 345 bp, Gossypium hirsutum
  Clone ID: LIB3196-011-P1-M1-H7
acgaacgggagcccttattttcataggtggtattccttaaaatttttccaattcccttattggaagaaaataactttcttgaaatttgaattggatccccccgaaagaaatcttgaaggtggaaaaactacctaatcggtcgaattcttggtgcgaaggctattaaatattccccccccttgttgaaacattagcacttaatttaattttggtgacttttttccaacgtgggtaaacttttccgaaacataacctaaaatcagatcttgattatctaaaagaatccagagtgggagtgatttacttattaaattaaacctttatgaatccatttttttggtcttt

SEQ ID NO: 45256 - DNA, 138 bp, Gossypium hirsutum
  Clone ID: LIB3196-011-P1-M1-H8
atttttcacaaattgtacgaacggaagcccttattctcatagctcgaattcctataaattgttccgaaatcgcttattggaagaaaataactttcttgaaatatgaattggatccccccaaatgaaatcttgaagttg

SEQ ID NO: 45257 - DNA, 371 bp, Gossypium hirsutum
  Clone ID: LIB3196-011-P1-M1-H9
cccacgcgtccgcggacgcgtgggcacagcctaaaaccctccacgcggtctgacacacaatcgtgtctcctctgtagcttaagtttgcatgttccacacggccatagtctattatacggcctagccacacgactgtgtaacccttccacatggcttaaagcattgcacacgaccatgtgcccttattttacagttttgtccagaattgtaaactattcaatttagtccctacattattcttaaattatttttagaatttttctctttcaattagttctatgatattatgaaaaatgtagaatctgtgatttgattgattagattattactatttgtacgtgatatgtgattaagtacatgtcttttatgac

SEQ ID NO: 45258 - DNA, 330 bp, Gossypium hirsutum
  Clone ID: LIB3196-012-P1-M1-A10
agatacttctctttctcaaatactgcactggttgctaaaatcagagttgcatgcttgcttctcacgcctagaatgtcaggtgcatttgtgcttgagattcctgactgatctgttagccgcaacaggctgatgctgcaggatgcgcatgtgtgggggctgagatgactttcttgcatcatgaagatgaattgggagagatcttctcctggatgaatagaagtgccatgtatcacaatcaagttccttactcttctctgctcaaaactgagtttgcagatggacaaatcttgcaccattcattttgtacttggttcatagagaagatttatc

SEQ ID NO: 45259 - DNA, 226 bp, Gossypium hirsutum
  Clone ID: LIB3196-012-P1-M1-A11
atagtttcttatcataattcttaacacaatgtttctgtgtgggggagaagtttatggtgagttggaatgtctctggtcagaggggaggttatcttggggctgacatctctcagattagaggggaggatgtctcggggctggcgtgtctctggtcagggaggggtttatcttatggttggaatgtcgctggttggaggagacatttgtgatttttggtcattctaac

SEQ ID NO: 45260 - DNA, 323 bp, Gossypium hirsutum
  Clone ID: LIB3196-012-P1-M1-A12
caatgttttaccactctgattagtggtagtagttgtgttggtaaaatattagatttcaaatcttgttaggtaagcttagtctttttatttcaagggcaatagtggtagtagtgggatttcaagaacaacatttattaaatgattattttaaattaaaatccaaggtaagcagaggtgtcaaattatgaaactttcagttcataagagccttagtgtgaattatggaattttgtgaaccaattggtagatagttgaatttcaatttcggttttaatatattttggactagatagaatgagtggggaacaacatgattacaactt

SEQ ID NO: 45261 - DNA, 336 bp, Gossypium hirsutum
  Clone ID: LIB3196-012-P1-M1-A4
tccgggacgcgtgggcaacatctaatctcgggcatcttaataagcctctattcaagcattaatacatgggctaaacagacattactactccattagccattaactaccggaagaatgaactcgaggaaaagatgctgttgaatcttcacaagaagaagtggacagatggactgacacttatacgtttcgatactcattccaaaacttatgagcagactgttcaggaaatgctgaatttagctataaaatacaataaggcagtgcatgaggaaagatgaattacctcccgagaagctggcgatcgcaaatgtcggcagacaagatgccaagaagcac

SEQ ID NO: 45262 - DNA, 345 bp, Gossypium hirsutum
  Clone ID: LIB3196-012-P1-M1-A5
tcgaaaagaaaaaaaaaacaccaataaatgagccttcgcatgacaagaacgagcaatagggtttttattcatttcccttttctctgcacccaaagcctcaccttcgtggattttgtgtgcaattttttcttataggcagccgagcggtggctttgtgcaactatggctggtattgagcaatgtgaggcaaatgattctgcttcttctctgatagagcaactttataaggcggttcatgaactggaagctttcaaggatgcttctgagaacaaggttcattggacagaaattgaacaatttttctgcaatcttgaagtgacgtttaagaagaaatctgaagagcta

SEQ ID NO: 45263 - DNA, 164 bp, Gossypium hirsutum
  Clone ID: LIB3196-012-P1-M1-A6
gcgtccacacaaacgaatcttttttttttgtgccataccaggaattgaactagcaatgggcttaaattcgaccgcattctgtctgtaaccatagactaaaaatcttggacaatgagagctatgaacacttataggctcacaacccttgaatattaactactata

SEQ ID NO: 45264 - DNA, 311 bp, Gossypium hirsutum
  Clone ID: LIB3196-012-P1-M1-A7
atgggaaatcaaagttgctacaactatctgtataggatgaaagctctggatgccattcgacctctgaaatcccatttcattctgaaggccggcatccccgttccttaatgggcaagattttccgctcctacctgcttgatctgcgaaacactagtacacctttcaagggtgtacgcaaagccctcatcgataccctattgggtggcttttagacagcccgctatgggacaggggtctttggccagaatgaagtccttccctatcaagaagccctgagtgagccggccactggggtttaagcacgaattggg

SEQ ID NO: 45265 - DNA, 282 bp, Gossypium hirsutum
  Clone ID: LIB3196-012-P1-M1-A9
gagattatcaatttgaagccttcttcgaatttcctcattcagatgcaaattttcgtcaagaccctcaccggaaagaccatcacattggaggtggagagttctgatactattgacaatgtaaaggccaagattcaggacaaggaaggcatccccccagaccagcaaaggttgatcttcgctggtaagcaacttgaggatggccgcacgttggctgattacaacatccagaaggagtccacactccacttagtgcttcgcctccgtggaggaatgcaaaatttt

SEQ ID NO: 45266 - DNA, 405 bp, Gossypium hirsutum
  Clone ID: LIB3196-012-P1-M1-B1
atgtagctgtctccgcgttgtcggacagcggcacctagaggttgagacttggcattgcatctatttaatgaacttaagtctgtgaataagcctttgtgttaacgactggtatttggtcacagcatatttagagaaaagacttggagcttaaataaaaacgaaggcaaaatagacgctaagctgctgatctacagagaacttcttgtaattaaaatagttcaattcatagcgaactagggttttaaactattgcagtagctggaactttttacggtaaccatcatttattggagaagtgagtcacaaagaaattaaaatgagtaaaagcaaagatgatgcttctcacgaactggagagccagtttatcttacgtctgcctccagaatatgcctctactgtgagaag

SEQ ID NO: 45267 - DNA, 278 bp, Gossypium hirsutum
  Clone ID: LIB3196-012-P1-M1-B12
gctctcttctgcacctggaatacaaaaacaaatcgaaaggcctccacgtgcttttgctcccttacttggcagccatgattattccagagaagaaccgcagagaaatctgcaaatacctatttcaagagggagtttgctatgcaaagaaggattacaatcttgcgaagcaccccgagatcgatgttcccaatttgcaggtcatttaactgatgcagagcttcaagttcatggtatatgtacgcgagacttttgcttggatgcactactactggtacctt

SEQ ID NO: 45268 - DNA, 342 bp, Gossypium hirsutum
  Clone ID: LIB3196-012-P1-M1-B5
ggacagtaatgcaaaatcctatctttgttacatcatggacactctgggcatgagaacttttctgatgaaatgaccgctgctcttaagcttgctgacagagctgtgttagattgttgatgctgctgaaggagtgatggtaaacactgagagggctatacgccatgcaatacaagagcgcctacctattgtagttgttataaacaaggttgaccggctgataacagaacttaagttttcccccaaaagatgcttattatatattaaggcatacactggaagttttcatataaccacatatctgtccgctctacaactgctggtaaatggttctgttatttgatc

SEQ ID NO: 45269 - DNA, 316 bp, Gossypium hirsutum
  Clone ID: LIB3196-012-P1-M1-B6
tcgtccacgcgttcgattaccaccaaggccaatgtagactacgagaagattgtccgtgacacatgccgctccattggatttgcttctgatgatgtgggtctcgaaggtcatatctggacggtccttgttaatattgagcatcagagttctgatattgcccatggtgtccatggccactttacaaagcgccccgaagagataggagccggtgaccagggccacatgtttggttatgctactaatgagacccctgtacttatgcccctaagccatgttcttgcaactaagcttggggctcgtctttactgaggttagg

SEQ ID NO: 45270 - DNA, 442 bp, Gossypium hirsutum
  unsure (1)..(442): unsure at all n locations; Clone ID: LIB3196-012-P1-M1-B7
tatttaggtagacacctatatgaacaaggttagtacaataaaagccaggctaggtaccaggtcccggaanttcccgggatcttaggtaagtctgttagtagggagataccttgtcagcccttcgncctccttcaacagccgcaatccccttcaagttctagtcatgcgtgagtgcatctccatccatgttggccaggctggtgtccagattggcaatgcctgctgggagctctactgcctggaacatggcatccagcctgatggccagatgccaagtgacaagaccattgggggaggagatgattccttcaacacctttttcagtgagacaggcgctggcaagcatgtgccccgggccgtgtttgtagacctaaaacctactgtcattgatgaagttcgtactggcccctaccgttagttctttcccccctgagcaactcat

SEQ ID NO: 45271 - DNA, 392 bp, Gossypium hirsutum
  Clone ID: LIB3196-012-P1-M1-B8
gcccttacattcctctcaaaactggaagaagagacggtaaaggagcagagcagatgttgtggaggagtatcttccggaccacaatgagaccatctctggcgttctcgacaggtttgccgccatgggtattgacacccctggagtcgttgccctcctaggagctcacagtgtcggcagaactcactgtgtgaagctggtgcatcggttgtacccagaggttgaccctgccctcagccccgaccatgttccacacatgctccataaatgccctgatcaaattccagaccccaaggccgtccagtatgtgagaaacgatcgtgggacacccatggttttggacaacaactactacaggaacattctggacaacaagggtttgttgattgtggatc

SEQ ID NO: 45272 - DNA, 152 bp, Gossypium hirsutum
  Clone ID: LIB3196-012-P1-M1-C12
aagctattcaagggacatcaacataatgattagttaatttatatggagagtcaaaaacagacaatagtcaatgcaatattgaagacatgcagagttccagtctccaacttccaacgcgagcgtcactgataaccggtgatttctgcattttt

SEQ ID NO: 45273 - DNA, 285 bp, Gossypium hirsutum
  Clone ID: LIB3196-012-P1-M1-C6
atctttgcttaagagcgccataaatattcacagggagctaggctcctatttcataggttttagaaaaaaaaaattctaatatacacacatgagtcaaacagtctgcagtaaaaagcattcaatgtgtaattgttataatacactataagagggagtaaagccttgtcactcaccagatgaaatctgatctctctcaaattatttcacccaacaatgtcaaagacattactactgtgacatatttcaacctcaaaacatcttatgggaaacacaaggtaagtttta

SEQ ID NO: 45274 - DNA, 382 bp, Gossypium hirsutum
  Clone ID: LIB3196-012-P1-M1-D1
cggacgcgtgggcttcgttcacacgctatcgtttttgggtttatcagaaacctaatcctgtcactttttaattacctcggactctccgatttcctcgaaaccgacaccgtttggccggaaaacccgacccgaaccacaccttttaaaccgccggtatccgctctcttgatccgtgaaatcctacccgtcgtaaagttcgaggaactcgcgttggtcggtggtggagatccgccggagagttgcgccgtttgcttgtgcgagttcgaaggaaaggaagagatcaggtggttgaagaatcgtaagcatgtttttcatagaacgtgtttagaccgctggatggatcacgatcaggtgacgtgtccgctttgtaggacatctgttg

SEQ ID NO: 45275 - DNA, 270 bp, Gossypium hirsutum
  Clone ID: LIB3196-012-P1-M1-D10
cccacgcgtccgcggacgcgtgggtgcgcatgccataagttgttgactgctgggagtgaccatgcagaaatgcttttacatgaagagcgttagaacttggggggaataagcatagaggagcttcatcgacttgtttatgctcaagtcctatcttcatttccattaacttggcaaattgctccaatttatcttatttcatgcatgaagcacgggatgattctgtttcagatattattgtccaagctacctggtcaagataaattagttatt

SEQ ID NO: 45276 - DNA, 246 bp, Gossypium hirsutum
  Clone ID: LIB3196-012-P1-M1-D11
cattagtttatgagatattggaaaaaccagcaacaagtgtataataggaatatgtagcggtatatggttttacatacagataataaacattggatatcagcatgttggcttaagttactaaacctcgatcgaaggtgaccattggagggtaattacttcagcgttttcacacataaggcgtcttaatctagattgtaacatgagagccctttggagtcttgggggtattgaacagttagatcattt

SEQ ID NO: 45277 - DNA, 194 bp, Gossypium hirsutum
  Clone ID: LIB3196-012-P1-M1-D12
tcgatgaccagtatgaacattctgatggagaggtggctctaacttgttggctcggattaggtggatttgctgaaccaaaattcaatgatctaacctacttactatgattgttggactgagatataaaaagttagtgatctttgaaataaaggctcaaatctaaaatctttcatttaaaagctttttctaattta

SEQ ID NO: 45278 - DNA, 120 bp, Gossypium hirsutum
  Clone ID: LIB3196-012-P1-M1-D2
tcgcccacgcgtacgtgctgagcagttttctggagccttctctggattttcctccatgggttggagttctatctagcaggcaaattgtacaccttttgtactgcttaggctattatttct

SEQ ID NO: 45279 - DNA, 224 bp, Gossypium hirsutum
  Clone ID: LIB3196-012-P1-M1-D5
atcttttctcagccacaacaaaccccagtctgcattctatctctgaggattagcctattttgaaccataccatatggggccttccatttctgacaactcattgagtgtcatagttttcaagactggcatttgtcagagcttcattacttttttataggtagcacagtattacattatgtgtgtgtaccacaatttacctgctcatccactgatggacattcaag

SEQ ID NO: 45280 - DNA, 164 bp, Gossypium hirsutum
  Clone ID: LIB3196-012-P1-M1-D6
gcaggctggtgccgcgccgcggtttccgggatgggccctattgcttctctgattgctacgagcttactatacgcagacatgattgacagaagcagtgtgtccaaagcgggcctcggtgcttcagctgaggctcaaccattcgtagcagtggcaagagaggcgcc

SEQ ID NO: 45281 - DNA, 329 bp, Gossypium hirsutum
  Clone ID: LIB3196-012-P1-M1-D7
cccacgcgtccgatttgtttgaggagttgagcaagtacgtcaaattgagagtttgaacatatgtgataacttggctgaccatatggtaggcaatgtgtatgttcagtttagagaggaagaacacgctgcaaatgcagtaaagaatcttagcggaagattttatgctgcccgtcctatcattgttgacttctcacctgtgacggacttccgagaggccacctgtaggcagtatgatgagaatacttgcagtcgtgggggatactgcaattttatgcaccttaaaagaataagcagggagttgaggcgccaggtatttggaaggtcaaaaa

SEQ ID NO: 45282 - DNA, 384 bp, Gossypium hirsutum
  Clone ID: LIB3196-012-P1-M1-D8
attttatctttatgatatattcataatatatagtaaatttataaataattataaaatagtaatatatgatgcaataatataataaattattgataaatctaagctattatttaaatttctgtttgagttagtgttacgagtcaatcgggcaccaaatcaattaaaaaaattactcaaatatttctttggaagtaaaataattatattatttgaagatatttttatcattttattttaacaaaaatcatttgaaatatactttactttgtcttaattcgttctaatgcctttggtttacttattttaatttaaagatttcaaatgaatagaatattatgacattttgcttattcattatttcttttttttttccttaaatttaat

SEQ ID NO: 45283 - DNA, 311 bp, Gossypium hirsutum
  Clone ID: LIB3196-012-P1-M1-E10
atagttccgattatgttaccaagcagaggtctcactcccagatgcacattgaagccatacaaaggtaccagcttttcaggaaaaaaaaaaaaaaaaaaaaaagcttctttattgccatgtcaattgacaaggagacaggagacctcattctcccagagctggggtctcagggagggttttatgggaagagtaaaacggtgagggagacggaaaaatgcagtgaggtatgatttgattgagctctgcaatgaaggcatgctaggccttttgctcttaaattcctgttgcaacaaaacaagactccctttagt

SEQ ID NO: 45284 - DNA, 355 bp, Gossypium hirsutum
  Clone ID: LIB3196-012-P1-M1-E12
atgtactaaggaaggcgcacagccagccgcgctcgcctcgccgccccgcgttcagctgcccagcgtccgccgcgcctcggccaaggcttcaacagaccacaccaaaatgccgtctcaaatggagcatgccatggaaaccatgatgtttacatttcacaaattcgcgggggataaaggctacttaacaaaggaggacctgagagtactcatggaaaaggagtttcctggatttttggaaaatcaaaaagaccctctggccgtggtcaaaataatgaaggacctggaccagtgcagagatggcatagtgggcttccagagcttcttttccctaattgcgggccttaccattgcatgc

SEQ ID NO: 45285 - DNA, 355 bp, Gossypium hirsutum
  Clone ID: LIB3196-012-P1-M1-E2
gctccaccgacctgtaataaccctggacaattccagaaatttttcctgctggacaggaaaatcctcagtcatacttacgaatcttcagccgtgaaattcttgaggctgtcttcaatacacgaagagagcagctagacgagctgtttggtgggaggcaaagtcatcgaaggcagcagggacagggaatgttccgtatagccagccaagaacaaataagggcattgagccaaggagctacttcaccaagggagaaaggtagcgagggatacgccttcaacttattgagccaaacccctcgctacttcaaccaaaacggccgttttacgaggcttgccctcgtattttcagcaacaac

SEQ ID NO: 45286 - DNA, 236 bp, Gossypium hirsutum
  unsure (1)..(236): unsure at all n locations; Clone ID: LIB3196-012-P1-M1-E4
atatttgcttttcttgttggagtcattctcttaccttggtagagctggtgtaatgnatttttcttgttgtgtcctgctaggtgagtttagtaggtcatgaggcaaccatctaccatatataaattgctgcatgatatcaaatagaattggtatctatgcttgcgtgtgcctgaggtggtgtttttttatttacttacatgctgctctgcctggcataggttagtgacgtgcttttt

SEQ ID NO: 45287 - DNA, 402 bp, Gossypium hirsutum
  Clone ID: LIB3196-012-P1-M1-E5
atgcgactgacatgatgtttccacaaagcaagcattcgggctcttcgcacctaccccagcactcaaattcaccacctcggactcctgcgaccgcatcaaagacgaatttcagctactgcaagctcagtatcacagcctcaagctcgaatgtgacaagttggccagtgagaagtcggagatgcagcgtcactatgtgatgtactatgagatgtcctacggtttgaacatcgagatgcacaaacaggcggagattgtcaaaaggctgaacgggatttgtgcccaggtcctgccctacctctcccaagagcaccagcagcaggtcttgggagccatcgagagggccaagcaagtcaccgctcctggattgaactctttcattcgacagcagcgtcaagtccacca

SEQ ID NO: 45288 - DNA, 386 bp, Gossypium hirsutum
  Clone ID: LIB3196-012-P1-M1-E6
ggcgacaaggacgtgaagaggagggagaagaagaaagagaaccaaatggcagaggcgacaagaaagtcaagaagagggatctgaggaagaagaaagagaagaatgaggaagaggaaggagaaggtcaggaaacggcttataagaaacattctgctcaatgagactgaaacacaggacccctgcttcctctgctgatgttttcaacccacgaggtggtcgcatcaccacagttaacagtttcaatcttcccattcttcaatacctccaactcagcgccgagaggggagtcctttacaataatgctatctacgctcctcactggaacatgaatgcccacagcattgtttacatcacaaggggaaatggaaggattcaaattgtgtcgg

SEQ ID NO: 45289 - DNA, 312 bp, Gossypium hirsutum
  Clone ID: LIB3196-012-P1-M1-E7
cccacgcgtccgcccacgcgtccgcttgtcgtccggggattcgggttgacggggctgtcctcgctctcctacgtatttaaccgcttcagacaggcgactggcaccgagcagctcgacgcggaccgggccaagaggggcatgcaagatatggtggggtatgtgggacaaaagactaaggaaactgggcagactatcgaaaacaaggctcatgagggtggtaggacatgaatgtgaaccatggaagggtactttgcttgcttgtaaaatgtacttttaagtggttttaattttcgagaagtccttttggctttg

SEQ ID NO: 45290 - DNA, 352 bp, Gossypium hirsutum
  Clone ID: LIB3196-012-P1-M1-E8
atggcccagtgagatcaaagactacagtccctacttcaagaccatcgaggacctgagaacaagatcattgcagccaccattgagaatgcgcagcccattttgcagattgacaatgccaggctggcagccgatgacttcaggacaaagtacgagcatgaactggccctgcggcagaccgtggaggccgatgtcaatggcctgcgccgggtgttggatgagctgaccctggccaggaccgacctggagatgcagatcgaaggcctgaaggaggagctggcctacctgaggaagaaccatgaggaggagatgcttagcttttgagggcagagcgggggagatgtgaacgtggaga

SEQ ID NO: 45291 - DNA, 363 bp, Gossypium hirsutum
  Clone ID: LIB3196-012-P1-M1-F1
attctctctctctctctcttcctctccccttctctgcctaaaccaaattaaaacaattgtctccaaccgacaccaatgtccaccgcagttccacccgttattcctgtctcctccgtgcaatccgtcgaatcccaaccgcccgttgccagccccgcctttctctctttcgtttcccgtctcaatgaattccttcgcaacggcctcttccagcgccgtccttgggctgagctcgttgaccgttccgccttctccaagcccgagtcattctctgatgctctcgttcgcgtccgcaagaactactcgtatttccgagtcaattacctgttggggatcggtctcatccttgccttttgccttttttcc

SEQ ID NO: 45292 - DNA, 376 bp, Gossypium hirsutum
  Clone ID: LIB3196-012-P1-M1-F10
actgaaagagaaaaattttgctcagttaactgtgtcgggaagtcgttcagatgggaagcgtgtccaccttttaagattgtgattctggatgaagcagattctatgacctcagctgctcaggcagctttaagacgtaccatggagaaggagtctaaaaccacccgattctgtcttatctgtaactatgtcagtcgaataattgaacctctgacctctagatgttcaaaattccgcttcaagcctctgtcagataaaattcaacagcagcgattactagacattgctgagaaggaaaatgtcaaaattagtgatgaggtaataccagctgagaaaattgatggagtatttgctgcctgtcagagtggctcttttgaca

SEQ ID NO: 45293 - DNA, 328 bp, Gossypium hirsutum
  Clone ID: LIB3196-012-P1-M1-F11
tccacgcgtacggtgggttcaaacttttgtttctaatataaaaaagattgcacatgtgattacgcaaggaataattgaagcttagaagtcattgtcaaggtggcaaacagtacttatcatatatcaaacaaaaggtcatacaatttatgacattctcatgttcaataccttcagcatcaaagtgtaaggtctttgaattatgttttcatcaagctttctatcagattattctttagcttacgggttaactggtagagtataatatgatgggtgcacatatttaaaatatttgagaataattttttaacaccgccgcgtctttattttt

SEQ ID NO: 45294 - DNA, 329 bp, Gossypium hirsutum
  Clone ID: LIB3196-012-P1-M1-F12
attctgcgtcctgctgagctctgttctctccagcacctcccaacccactagtgcccggtcttttgctccaccaggaacaagccatcatgtctcgccagtcaagtgtgtccttccggagtgggggcagtcgtagcttcagcaccgcctctgccatcaccccgtctgtcacccgcaccagcttcacctctgtagtccggtctgggggtggcggaggtggctctggcagggtcagccttgggggtgcttgtggagtgggtggctatggcagcccgagcctctacaatctggggggctcccaaaggatatccatcagctctaagtggtggcag

SEQ ID NO: 45295 - DNA, 278 bp, Gossypium hirsutum
  Clone ID: LIB3196-012-P1-M1-F5
gagaaaagtgagaaaaaaaaagaacaaactagttaagagccatgaagatgaatcaatgacaaccgaggctcctgtagcaccagtcacttctggaaggagagtcagaaatgacttggaagataagcttactaaacattatatggtgagagctttggtaggctcagatgttgatcacccgaacggaacgccgggccattacgcataacggattgagtgatcttcaacaacatgcggcatatttcgaccaggacgactgaggaatcatttattcctgggag

SEQ ID NO: 45296 - DNA, 284 bp, Gossypium hirsutum
  Clone ID: LIB3196-012-P1-M1-F6
ccaaatggaaaagaaaggcttgacaatattttgatttctgtaaacgcatagaagagagagtactttatctttaaaaccataccggtaaagagaaagttccgattttttttttttcatttctttcaagctcaaccaaaatatattaaaggaaacctaacttgccggagctctggatacagttaagaatccgatggacttcttgggtccgaatcggtttgatatcttcgagatttattggcgattctgtgaacttagaacaggatatgagcatgtttgtgatggag

SEQ ID NO: 45297 - DNA, 373 bp, Gossypium hirsutum
  Clone ID: LIB3196-012-P1-M1-F7
ataaaaactcttacagataatattataattgttacccttcacaattccacatgagaaatatcagacaaaatgtatacaaatatattccttatggcataatttactgcatttctgactgaaatcaaaattctgatttgatggcaattgaattttaattttacaataaataaatgcttgtgttacctaaagcacttagcacacagttaaattatactgacatcctaaacccaaagaaataagattgtgtgtatatttgggatatttattaaagaaaaaaaaaacctgaaagataatggacatgttttatgtcatattttaaaaataatttaaacaactattttggtttaataattaaaactctggataacccttc

SEQ ID NO: 45298 - DNA, 123 bp, Gossypium hirsutum
  Clone ID: LIB3196-012-P1-M1-F8
cacatagtctcgtgtttatggactaatgtgaaattttcagttttaagcaggcatgtaatgaaataaaaatggtgacctatgtaaaggaggagacccttgttttgtagtgcaataacttgtatg

SEQ ID NO: 45299 - DNA, 171 bp, Gossypium hirsutum
  Clone ID: LIB3196-012-P1-M1-G1
tagtttgtacgctgaagcacgctggtgccgggccgcaattcccgggatgcgacctgctccaccgggacctcaacaggggtgtctctcccataaatgcccgcgcttcatcttcttatccgagtgacccgcaaaagcctatgagtccaagccgagtacactcaataccaaact

SEQ ID NO: 45300 - DNA, 384 bp, Gossypium hirsutum
  Clone ID: LIB3196-012-P1-M1-G10
atacagcttcagtaatgtgtgctgagtttgtaaaaaggagaagtcctttattggcatttctaagccctctgacattgttagtgtctggattggttggtttgcattttaccattatggttgaatctttgttccttcaccattagttaagtctgaggaactaactgtgaaattccttgatggccaacttggataaaaatgaagaatggtattttcccagtttactacacatggaccaatagtgattatttgggagagaacactgggtagtgttgcttgacttaaaaaccttaaatgtattgaaaagtaacagcattcttactcatggtttgcatttgttactgagatctcaccatattatttaatggagcttcttacttaaaattt

SEQ ID NO: 45301 - DNA, 200 bp, Gossypium hirsutum
  Clone ID: LIB3196-012-P1-M1-G11
atgcccaggccaagcaagcttctgtctgcacctagctctcaatcctgctctcactatgagctccgcctgcagagctcctccgccagctatggaggaggttttgggggtggctcttgccagctgggaggaggccgcggtgtctctagctgttcaactcggtttgtctctgggggatcagctggaggctacggaggcggtgt

SEQ ID NO: 45302 - DNA, 404 bp, Gossypium hirsutum
  Clone ID: LIB3196-012-P1-M1-G12
atgattccctctcaaaaaactttatagtcaactttgtaatagtttcattattaaatggtgagaaaatcattaaataatactaaccttaactttcataaacctgcaatatggcctccctttgtttgaaatgtattgataggcagcatatttaaatcagatacatacgattaaacatataaaataacttcttaccttatgactggtggagatgtcaatgatttgctattatttttatcacattacgtttgtttttattaagactttcattgtttttattggtataatttacatatagtaaaattgacccttagtgtacagttctgagttttgacaagcgtacacaatcattgtaccaccccaattaaaatacaagacatctttaatacaaaaactttcccttacac

SEQ ID NO: 45303 - DNA, 408 bp, Gossypium hirsutum
  Clone ID: LIB3196-012-P1-M1-G2
atggcttctggaaaaaataattaaacaagcaaagcatatttttctaaggagtagagctgctcaaccattgacagcttagcaagccgaattgaggatcctcagatacaagctcattggtcaaatatcaatgatgtttatgaatctagtgtgaaagttttaatcacatcacaaggctatgagcaaatatgcaagtccattcaactgcaattgaatattggagttgagcagattcgagctgcacatttagatggaagagtaatcacactatcgtatcaagagcaggagcttcaggattttcttctgtctcagatgtcacagcaccaggtacatgcggttcagcaactcgccaaggttatgggctggctagtactgagcttcagtaatcatgtgggacttgggcccatagag

SEQ ID NO: 45304 - DNA, 235 bp, Gossypium hirsutum
  Clone ID: LIB3196-012-P1-M1-G3
taaatagaataggtgagtgctcattttgtaacttactataatttagtgacaaaaaaaattacttataattgtgcaaccattgtaactttttatagttgggcacaaaaaaaaacataattagataaactacttgaaattgggataatataatttttacccctcataatttaagtatatttttgatactggtccttcataatataatggattacttttataatataatcttatacca

SEQ ID NO: 45305 - DNA, 316 bp, Gossypium hirsutum
  Clone ID: LIB3196-012-P1-M1-G4
agcgaagccaccatcaccccaatggctggaagtgtcttcttcatcgagcactgtcgtaagaagtggtggcagcgtcttatcagagtgtcaagagaagatgcaaggcggattaagttcaacaacaaaaacacctttttcttcactccttcacagtccgagaggagggccgatgcttaatctccagccgatgccaatgcaatcaaaatcagggggatctttgtagggtaacgtatgtaggaagtaataaaaagagttgcagaactatgttcgccatggattttgttgttgttcgttgaagtactgactgattttggtt

SEQ ID NO: 45306 - DNA, 83 bp, Gossypium hirsutum
  Clone ID: LIB3196-012-P1-M1-G5
atggatgagctggttgcagaggctgctgccgtggcggcggcgctaagaggacacgagctctagcctttccggctgatcatctc

SEQ ID NO: 45307 - DNA, 231 bp, Gossypium hirsutum
  Clone ID: LIB3196-012-P1-M1-G7
cccacgcgtgcggccgccgcctgcgtgtctctcttcattttctgaacccaaaagtctttagcttttcgcttcgagagagaccatgttggtttaccaggatctcatctccaatgacgagcttctttctgactcattcccctacaaggaaatcgagaatgggttgctgtgggaagttgagggaaagtgggttgggcaaggagctgtctattgtgacattggtgccaattcttc

SEQ ID NO: 45308 - DNA, 381 bp, Gossypium hirsutum
  Clone ID: LIB3196-012-P1-M1-G8
cccacgcgtccgcggacgcgtgggttggtctggaagtgagaatggatatggtttaacagaaacatccccttgcattgctggtcgacgaccttattataatgttcttggttctgttgggcatccaactccactcacagaattcaaagttgtagattccgaaactggtgaaatcctcccacctggctccaagggcattataaaggtcaggggaccgccagtgatgaaaggttactataagaatccattggctacgaggcaagccctatacgaagatggttggctaaatactggtgatataggttggattgctcctcatcattcagtaaggcgaagtcgtcgatgtggaggtgtgatagttttcggaggacgtgccaaggacac

SEQ ID NO: 45309 - DNA, 74 bp, Gossypium hirsutum
  Clone ID: LIB3196-012-P1-M1-H1
gataaaaaaagatagggggcggtcaaacaatagggcaattagaaacaagaaaacctggagggcgactggagtac

SEQ ID NO: 45310 - DNA, 328 bp, Gossypium hirsutum
  Clone ID: LIB3196-012-P1-M1-H10
ctctcttcacactctgaagaaagaaattaaaaactaaaaaataccgagtttttctcgggattgattttttaactctttaaatcaattccaggtcactgatcaccgataccctgcatttctttccaattttgaaacggaccgacgaggatggccatggcagaaaaaaccttacgaaaagactggaaccgacaagcagggggttgtatctgacggaaccagagcttctttgtcttccttagcacctcttggagatcaggaaaagtgtatgaagggcaattatggtctaatatgcatgggattttacctgcaattgactgggttaaaggat

SEQ ID NO: 45311 - DNA, 109 bp, Gossypium hirsutum
  Clone ID: LIB3196-012-P1-M1-H11
tcgctcaaacacagatttgttctatctctctttctatttctatttcaattaattaattcctccattggaggagcttatgagttgttagtgttcttgttcatattttgtt

SEQ ID NO: 45312 - DNA, 369 bp, Gossypium hirsutum
  Clone ID: LIB3196-012-P1-M1-H12
atgaagattcttatagaaagcaagttgaagtagatgcacaacagtgtatgcttgaaatctggatactgcaggaacggaacaatttacagcaatgagggatttgtacatgaaaaatggacaaggatttgcattagtttattccatcacagcacagtccacatttaacgatttacaagacctgagagaacagattcttcgagttaaagacactgatgatgttccgatgattcttgttggtaataagtgtgacttggaagatgaaagagttgtaggaaaggaacaaggtcaaaatctagcaagacaatggaacaactgtgcattcttagaatcttctgcaaaatcaaaaataaatgttaatgagatctttta

SEQ ID NO: 45313 - DNA, 242 bp, Gossypium hirsutum
  Clone ID: LIB3196-012-P1-M1-H2
tgtattttgcctctggaacgtgaaggcagaaagaaggcatggcctgataaataaagccggcgaatagagaatcaatctgtggaaaaatcacaaagaaacaggaaatcagcgatgggagagagcaacagcagcgttgatgaggatttagctctcaaaaaatttttcgctgaagtcagcgaattcgaaagagacaacgaagtcgtcaggaccctttcatgcttcaaattaaaaccgtctagaag

SEQ ID NO: 45314 - DNA, 332 bp, Gossypium hirsutum
  Clone ID: LIB3196-012-P1-M1-H6
atgccggcgccttcaaccactcggacctggacgcggagctgaggcggctctttcgcgagcgctacggctgcaccccaagtttgtggcggccgtgcactacgagcagcccaccatccagatcgagctgcggctgaacacgtcgcataaggccgcaggtgacgtggacatcggtgatgcagcctactacttcgagagggacgtcaagggcgagtctctattccagggccgtgggggcctggacttgtgcgtgcgctgtgagcccctgcatgtggagctgcacgctcatctattacctggacgagatttcccctaagttcttcatgatgcgcctt

SEQ ID NO: 45315 - DNA, 362 bp, Gossypium hirsutum
  Clone ID: LIB3196-012-P1-M1-H8
cagcaattgcgccgaactgatgacatgaagaatttcttcatgaaaatggaccctcaacatcaaaagttcttatggttgccaccctccttcctgttggtggcatcctcctcttgcttgctggtttgagccttattggatccctcataggtcttgctattgccgccccacttttccttattttcagccctgttttggtacctgctgcttttctcattgcgggttccatagccggattcttgacctccggagcatttgggatcactggactgtcatcgctgtcgtggattgctacttatattcgtggaagcaggggctctatgtctcaagggctagacccagtgaagtggcccttgccggacacg

SEQ ID NO: 45316 - DNA, 379 bp, Gossypium hirsutum
  Clone ID: LIB3196-013-P1-M1-A1
atgtggcccacattggggcatggcatcctgctcgtgtggccttctctgtggcacgtgctgggcaaaaaggctaccatcaccgcactgagatcaataagaagatctataagattggccagggctaccttatcaaggatggcaagctgatcaagaacaatgcctccactgactatgacctgtctgacaagagcatcaaccctctgggtggctttgtccactatggtgaagtgaccaatgactttgtcatgctgaaaggctgtgtggtgggaaccaagaagcgggtgctcaccctccgcaagtccttgctggtgcaaacgaaacggcgggctctggaaaaaattgaccttaagttcattgacaccaccttcaagtttggcca

SEQ ID NO: 45317 - DNA, 360 bp, Gossypium hirsutum
  Clone ID: LIB3196-013-P1-M1-A10
atccggacgccagctcctgcaagcgttgctgtccacagggagctccagcccttataacactcaacccgcagaaaccacccacctttaccatgtatgacagaggaagttgaacaggtggaggagcagcccgaagaaaaagaggaagcccaggaggaagctgcataagtccatgaggaagcccatgaggttcatgaaccatatgagaagccaagacccaaactcactgctcctaagatgccagaaggggagaaagtggacttcgatgacattcagaagaagcgccactatcaatgatctaatggagctccaggccctcatggactgccacttttgaagcccggatgaaggatgaggaggtgc

SEQ ID NO: 45318 - DNA, 191 bp, Gossypium hirsutum
  Clone ID: LIB3196-013-P1-M1-A12
atacctagaatatacaacctccatctttaatgtgttcaaccatacacaccatgcaaacagtgaattaaaccaaaaaccactaggggctagtaccaaagatgccacctgtggagccctcatatcataccaccttttcctgttgaacaggaatgaccagtactcaaggtgaccttacaactagctcatattat

SEQ ID NO: 45319 - DNA, 261 bp, Gossypium hirsutum
  unsure (1)..(261): unsure at all n locations; Clone ID: LIB3196-013-P1-M1-A2
gcgcggacgcgtgggctcatcacaggctgcagtggcaaatggggaaccatatgcccagcagcataaatgaggctgcagtctccagctatagtaataaggattaaggagtgcttgttgggttttttcagaggaaaaaaaagagtaaatgaatgcttgctggtctaactatgtgacagtactaattaagttagtgaactctttttatatgttgatttgacctgcatggacttctgcttcatttacatnnnnnnnaaaaanaaa

SEQ ID NO: 45320 - DNA, 366 bp, Gossypium hirsutum
  Clone ID: LIB3196-013-P1-M1-A3
tattgctcctctcccccaaacgctcttttctctttaaaaacataaaccatcaacccctggcggtctggtcctgcccctcggccgccgtctcctgctccatgcaacattttcatgaggtggagcttaaagccgaatcatgctcttggccgtgttcgctgtgcttcttttggtgctgcctctggtgttgccgccattgccgcctccgcccttcgtccttctcttaatcccagttgtgatgatgctggctctccttttcctcgcattttcaccgtctaagatgccagacttggatatctcctcctctgtgtgatctaaaacgcatgtaatgcatgtatattccgaggagaatctagattcgacatatat

SEQ ID NO: 45321 - DNA, 348 bp, Gossypium hirsutum
  Clone ID: LIB3196-013-P1-M1-A4
aataaaaacagcgctttcgttctaggttttggactctggaaacctcaattccttccaactttactgttctaattacaattcttacctctcttgctttctgctcaagcgctttgaggatttgggcatgcgagtgccggacgctgatctttttaatccacaatcgattatggactccgacttctctcccggcggagcttccgcctctgcttccgtcgacccggactttggttttgcttttgacgacagtaatttcttcgatcggaccctgaggatcgagatcatgcctgatttgcccgagactaaattcgacggtggcggatgctgctctatcgctgattgggcccggaa

SEQ ID NO: 45322 - DNA, 362 bp, Gossypium hirsutum
  Clone ID: LIB3196-013-P1-M1-A6
ctaatgtctgacatgcaggtgactcagatgaagtctgatgggacacttgaggaaagtggtgaagcacgaaggcttcgaatatctttagaggaaatggcagatgaagtcaagagctctggccttttgaaggaatgtggacttcctgaggatgctctattggtaactccagaaaattttaaagagaacagatggtcctggtcagacgtaaaatctctctctggcagccttcttctggcccttgatgctagtctggagcatgcactgttgggctctgtaatgtccatggatagatatgcagcagcagaaagcttttacaagcttgcaatggcatttgccccttgtccagatcttcacataatgtg

SEQ ID NO: 45323 - DNA, 239 bp, Gossypium hirsutum
  unsure (1)..(239): unsure at all n locations; Clone ID: LIB3196-013-P1-M1-A7
aattggtggaactattaaggttcgttacacgtgaacgcatcacattcttcgagggaatcatgagagcatactgacacacacgtttatgagggttatgattagagcttaagaaaatatgggaaatgcagcagtgttttggaagatatttttacagagggttaaaaaacgatcnttcctatcactgccttggtggaatgtgacagctcttatttacatggtgggctctttttatatattga

SEQ ID NO: 45324 - DNA, 325 bp, Gossypium hirsutum
  Clone ID: LIB3196-013-P1-M1-A8
tattgctcctctccgggcaaacgctctttttctttaaaacataaaccctcaccccccgggggtatgggcctgccccttcccccttctttactagtgcatgaggacatcttcatggggtgggcttaaaacccaaaaaatgctcttggccgggttcgctgggcttcttttggggcggcccttgaggtggggccattggcaatcccccctttcgccttctcttaatcccagttgtgatgatgctggctctccttttcctcgcattttcaccgtctaagatgccagacttggatatctcctcctctgtgtgatctaaaacgcatgtaat

SEQ ID NO: 45325 - DNA, 356 bp, Gossypium hirsutum
  Clone ID: LIB3196-013-P1-M1-A9
aaaactttgaattattcatacaaaacaatgaaaacccacttttttcccctggtttttctcctcatttttttcttagcccaaggtctgaaccccaaatgtgccatccaagaccatggctcaaacctgcaagtgttccatgtttacagtccatgctcacccttcaaaccctcaaaaccactctcatgggaagaggatgtgctgcaaacgctagccaaggaccaagccagggtgcagtttttgtccagcctggtggctaagaaatctgtggtgcctatagcttcaggcaggcagattgtgcaaagcccaacttacattgtgaaggccaatattggaaccccacctcagcccatgcttat

SEQ ID NO: 45326 - DNA, 338 bp, Gossypium hirsutum
  Clone ID: LIB3196-013-P1-M1-B1
gtcaggaaagctggctcggaccggtccgcgagttcccgggatggagcctctacaacctcggggggaacaagagcatctccatgagcgtggctgggtcacgacaaggcgcctgctttggaggtgctggaggcttcggcactggtggctttggcggtggatttgggggctccttcagcggtaagggtggccctggcttccctgtctgccctgctgggggaattcaggaggtcactatcaaccagagcttgctgacccccctccacgtggagattgaccctgagatccagaaagtccggacagaggagcgagaacagatcaagctcctcaacaacaagttt

SEQ ID NO: 45327 - DNA, 354 bp, Gossypium hirsutum
  Clone ID: LIB3196-013-P1-M1-B11
gtattgtcaggcatttttcttagttaagttgcagcaaatattttctgctattgggatgtgatttagaatggaaatttctttttagaattttatttggctattacgcttgttttgctgtctaacgagaaggaagagagtattttagaaaacattgaaaagaatttaatctcccctattcttattgaaaatgaccttgatattctgtgaatctgttaatagcatagctagcctaaaagtttaagttattatattagtgcctttattttgttgtttttggttctaatgtccacttttgcccttagctgtctttatagttttatgatctattagttcctctattttttatatgataag

SEQ ID NO: 45328 - DNA, 333 bp, Gossypium hirsutum
  Clone ID: LIB3196-013-P1-M1-B12
accaacccctaatacacactcactatcgggaaagctggctcgcccccatgtcccgttcccgaattgccgcctccacccacgcgttcagaaaatttttgcgttctgcaaaacggacccgtacaactacttgcacagagtatgtaatctctatggatgcagataacatatccagatctagcagcacattcatcggaaaactaatgtgcaacttttttgttaccaaatccataatttatgacactctccctctatacaacattgcttagcttttaccactctggcctgatccaacttgttgctatttctaaaaacgtctatcttataagtacccac

SEQ ID NO: 45329 - DNA, 349 bp, Gossypium hirsutum
  Clone ID: LIB3196-013-P1-M1-B2
gatgtggttgccttgcctggtggagtagctcactggattttcaacaatctgcgggctcaacttgtgctgggcgcacttgttgatgttggcaatgatgccaaccagctcgatgagaacttcaggaaaatcttccttgctggtagcccacaaggaggtgtggtaagaggaggtcaaagcagagaccgaaaccaaaggcaaagcagaacccatagaggggaacgggaggaggaagagtctcaagagagcggcggaaacaatgtgctcagtggctttcgcgacaatctcctggcgcaggctttcggaattgataccaagctagcaaggaagctacaaaacgaaagagataaca

SEQ ID NO: 45330 - DNA, 379 bp, Gossypium hirsutum
  Clone ID: LIB3196-013-P1-M1-B3
atcagacttagaagcatcaacgagatctataataataaagaatgcaggggataactgaggttagattgaactgttttcaaggagtctaacaaaaataattgttttactttcctcaggtctgcagtttggcagatctagaaactccattttgaaattgtttgcagggttaaacaggtccagaggcaatggctcttacttccagactcaaaagagatagtcatataacaaattgtttattcctttatgtgcgattgtcaggtgtgccaaaggactcttcagcacattctttctcctgtatgacaacatatgtggcaaagtgttgcttggtgagaatgaactcaaaacaggatgagttagttggatggattgtatcatcaag

SEQ ID NO: 45331 - DNA, 296 bp, Gossypium hirsutum
  Clone ID: LIB3196-013-P1-M1-B4
atgggtgaccaacgcaagagcatatgccagttggtggtagagattggactggctaaggacgatcaactgaaggttcatgggttttaagtgcttgtggctcactgaagcttaagtgaggatttccttgcaatgagtagaatttcccttctgtcccttgtcacaagggtaaaaaccttacagcttgtataatggaaccatttttgggtccgtttttaacttggactagtgtaactccttcatgcaataaactgaaaagagccatgctgtctagtcttgaagtccctcatttaaacaaa

SEQ ID NO: 45332 - DNA, 402 bp, Gossypium hirsutum
  Clone ID: LIB3196-013-P1-M1-B5
gtttgtacaaaaaagcaggctggtaccggtgcgcagttcccgggatgcgagactgcatctcacgaacagaaactaatggcacactttttaggtaggtggcaagaacgccactgtgcccagccatctataattttctggtagtcacactggcaacaaaacaccttagaaccagagatcaaccccctccaagcaatacgtgaattcccttcacaagaaacgtcagggctacgtgaggatctgtgttgaatgcaatctgaaatgaccctgtggattatcctggctgggtgccactactgtacaacattcagtgcccacacccaccttggccattaagggtttttgagacatgagagaagcctctttccttgtgtgtgacacggatttgggaagttggaaagaaat

SEQ ID NO: 45333 - DNA, 320 bp, Gossypium hirsutum
  Clone ID: LIB3196-013-P1-M1-B6
atgccacctacagttcgcactacagttggtctctgcaggacctgtcatgccccggcccccaatggcatctgtggttcggctgccctcaggctcagtgatcgctcccatgccgcccatcatccacccgcccagacatcaacgtggtgcccatgcctccctcggaccctcctatcatggccccccgcccaccccctatgattgtgccaacagcctttgagcctgctccacctgtggcacctgtcccagctccagcgccaatgcccactgttcatgcgccaccttccatggaagatgagcctacctgcaaaaaactgaagaca

SEQ ID NO: 45334 - DNA, 358 bp, Gossypium hirsutum
  Clone ID: LIB3196-013-P1-M1-B7
gttttgtttatttttgttgttatgtctattgttggatgggaactgagagtaagaaagaaactgtgtgaaagaagaacaaaaatggtggagaagttaagacaggacagtggttgttggtttcatgttgtaaactattacaactttgtacaatttggtcttgttttaaacaagtcagtttgagtttcaatcttagttgaatctcttttaacaacaaaatccattgaaaatcttttaaagaaaaaaaaaagattgttgatttcatcattaagttcatcatcaaccatgaagagacttggcagctcagattcattgagtgctttgatgtcaatctgcccaacttcagatgaacatagtccaa

SEQ ID NO: 45335 - DNA, 306 bp, Gossypium hirsutum
  Clone ID: LIB3196-013-P1-M1-B9
atcttgaaagacagttactttaggtccagttggaaccctcgggctagagatcgtaccagtgttgattggccacattgtttggtctagcagtttttctttatcattctgaaactgggtttgcctaatacattgataaattattttgaaggaatttttatagttccagtcacttcacttttaccctgactcatattaatgactaggaatgaccttcagatcgcatttagcatctgtatccaatctgacaataatgtgttcatcagggacctatggattaaatttcattctggcataaataaactggat

SEQ ID NO: 45336 - DNA, 366 bp, Gossypium hirsutum
  Clone ID: LIB3196-013-P1-M1-C1
tcaaaatcaaaatcgtaatcaaaaagaagaaacagaaaaatcaaaatcaaattcaaattcaaaatgaaaatgaaaaaagagagaagaaaaaaaggaaaaaaggaaaaaagaaaaggagaggccacggcgaaaacccgcaaagggcgctttgtgaccaaaggtggttttgagttgaaaacccgaaaaggacgactcaaattttgagcaaaatggggcatggacattaccattatcgaagacttctaatgggcattgcttcactattgatatcattaattacttcatcaaatggatagaggctactgcatgcgtcaatgtcatcatatgccgatggtattggaaaatgcattgaacttgaattataac

SEQ ID NO: 45337 - DNA, 356 bp, Gossypium hirsutum
  Clone ID: LIB3196-013-P1-M1-C10
ggataagatgtcgtgtcttagtagagagcttgtccttttgatcttacagtttctagatgaggaaaagtttaaagagactgttcacaaatttttttgaaacttaaatggatttgattttaattagtattttattgttaatagataaaatataaaatatgattattattttaaatttaaataggcttgaacatgaatctgggtttttctttaatatgaaatattttgaggatgatgtacataatggaaattgggatgaagttgagaaatacttattaggttgatgataactggtattcaatgaaaatctttttcgacattagaaagcatgtaacaccctagattttgaggttaaaagt

SEQ ID NO: 45338 - DNA, 353 bp, Gossypium hirsutum
  Clone ID: LIB3196-013-P1-M1-C11
cggacgcgtgggctaattttcactgaaactagactcacgtatcttcttaccataaaattttcataatttttggtttaaccaataagtacagtttattctttaaattcacctctgttctactgtctaacagtttcgacccttcttcactgaaaattaattatctcctcgtacaggaattgaatgatgttcccgtttgtttctcttgaaaatagactcattcagaattctaaaaatataaaattaagcccttaattatttttattaatttttttatgatttttcaaagtcaaaacagggcacccgaattcattctgaccttgtcttacaaattttattatatttcatgatttaca

SEQ ID NO: 45339 - DNA, 247 bp, Gossypium hirsutum
  Clone ID: LIB3196-013-P1-M1-C2
ctttatatatgtatcattatgttaaaaatatttttaattaataatttctttatttatataactaaattaataaatatgtaattatataatgaaattatattttttatatctatcattttgttaaatatatttatataaaaaagtatttttattatagaattattatttattagtataaaaaaaacatttattaattaaaaatattttgaacttaattttttataataagtattcttaagattataaa

SEQ ID NO: 45340 - DNA, 360 bp, Gossypium hirsutum
  Clone ID: LIB3196-013-P1-M1-C4
gtagccgccgcctgcgtctctctcttcatctctctgaaccaaaaagtctttagcttttcgcttcgagagaggaccatgttggtttaccaggatctcatctccggtgacgagcttctttctgactcattcccctacaaggaaatcgagaatgggatgctgtgggaagttgagggaaagtgggttgtgcaaggagctgtcgatgttgacattggtgccaatccttcagccgaaggtgctgatgaggatgaaggtgttgatgaccaagctgtgaaggttgttgacattgttgacactttcaggcttcaggagcaaccctctttcgacaagaagcagtttgtcgtgttcatcaagaagttcatc

SEQ ID NO: 45341 - DNA, 332 bp, Gossypium hirsutum
  Clone ID: LIB3196-013-P1-M1-C6
ctgtaccggccgaattccggatgaataagctgccaacttgaaatgaggtggagaatcttgctaagcagtttctaccttcaagcaatgaagaatcctaacaattgagattactttggtgaccatgatgggaggaaatgaaacttgtaagattgggacagttgttatttttatgaaatgactctaaatatgaattgtactaactggacctaaatagcaaagccctgtgtagattctggtaatgatctatctcaaggtatgtgtatttttgaagagtgttatgtccttagttttaattttgggtaaagaaagggctaaaatcatggattaggtac

SEQ ID NO: 45342 - DNA, 337 bp, Gossypium hirsutum
  Clone ID: LIB3196-013-P1-M1-C7
acggaatattgcggccgagtatgagaaaacagcatacatttttcgaatacaagatcctgcgaaattgatagctaaaggtggtgcctatggttaaaaagtcaaagatatagtgaggcaacagggaaaaaacggctagggctcttttttacaaaaggagatattgaggagagaaccttcaaaagtacacacatacattgagaaaaaagtggcatggtcaagtctataaagaaacaattctaactggcatttgttgaattaaaatataaataataaccccatcacattattggaggctactagatgcgtaattgtgtgtataatccgataatatttggaa

SEQ ID NO: 45343 - DNA, 222 bp, Gossypium hirsutum
  Clone ID: LIB3196-013-P1-M1-C8
atcttgggtgcccgcggcagggcgtgggtggtgctggcagtgtcccttgccgacctgatcgctgtctacaccgacctgcttctattatgcacataccaggcggatacctgcactgtggcccctctggccagcctggacccattcatggagcttactttcttcttggtcatgggaccctgggtctggctaggtagtactgtttcttacttttaagatgcccgt

SEQ ID NO: 45344 - DNA, 342 bp, Gossypium hirsutum
  Clone ID: LIB3196-013-P1-M1-C9
aatcgtggatgggaccaagcgttccaccactcagggcggttgaacaacacaaacacctttttgttcactcactcacagacagagaggagggccgatgcttaaactccaggcgatgccaatgcaatcaaaatcagggggatctttgtagggtaacgtaagtaggaagtaataaaaagagttgcagagctatgtccgacatggattttgttgttgatcgttgaggcactgaaagattaaggtttagaggatgaataataaaaagaaagggtattacaaggcggtcctttcatttcatgtaatctgctgaaatgttacaacttcaatatatgtaactttctattt

SEQ ID NO: 45345 - DNA, 302 bp, Gossypium hirsutum
  Clone ID: LIB3196-013-P1-M1-D1
atcgtgtatgtgatgaaagtatacaacctgaggcgcctgtacgaatcaaagcatatcctgagctaccaccagttcacagagcagactcgagacgccatcctcagcgtactgataaagggactcagaggtcagtaggagctgtcttgcttagagaattaccataagtcgtgcggcagtggtaccccactccggactcacgtgcgaagaatgacctgagtactacctgctacaggagcaggcgagatgataaaagagcaaagcgtcgtgttcttgacagaaacacatgactgactcgaccatta

SEQ ID NO: 45346 - DNA, 349 bp, Gossypium hirsutum
  Clone ID: LIB3196-013-P1-M1-D10
atgtggagaatgcgcagagcccagccccgccagcacccccggccctggaccgagagccgccggcgcccgagcgtcccccggaggttgacctcgcgtcagcgccgggcctgcagttcccgctgctggaacctttcacgacccccgcccctgccgccaccggaccgttcgtgccctacttgatccctgcgccctttggcctaagccccccgcgcctgtgccccttcctggccgctgcacccgggccgccggctttcagcgccgccgtctggaaaaagagccaaggtgctggcagcagcccccgaagaccccagggcggttccggcgcgccctcaggtgcgtgcatgtgacc

SEQ ID NO: 45347 - DNA, 357 bp, Gossypium hirsutum
  Clone ID: LIB3196-013-P1-M1-D11
atagaatctcacttttttgttttctggacttctttgacgaaaataggaactcttagaaatggcgatgaaaagcttcagcgttttcttcttcgttctactcctcctcgcttctcctattctccaagaagctgttgaagaaggtgaacttgggattgttggtgaggaagctcaggatttcggttctgggaattttgactcggctccaggagttgaaactctctgtcttttccctaaaaacagtgccaaatttatatcagccggagaagagactgaactccttgttggggtggaaaatgttggtgagtcacctgtgaatgtcattgcaatcacagccagtgttcatcttccttttgatca

SEQ ID NO: 45348 - DNA, 356 bp, Gossypium hirsutum
  Clone ID: LIB3196-013-P1-M1-D12
tatttttgtagtttatcctataaaaattgaaggttgaatttatcattatatcatataatatctataaatattttatttcttagttagtgcccaaaatcaagcatcatcaaaaatcattacaaatttataaatgtgacacattgtttgtatgatgtttgataatttgatttccataacattaatcaataggtggttgaatatatatttgtgcctaaaaactacaaagaaagactcaatattttggcataaaacaaaaacctttaagatggtggatacttttttttgaataatctcattatagattctgatcatatctattctttttgacacaatgcttagaactactcataacatct

SEQ ID NO: 45349 - DNA, 79 bp, Gossypium hirsutum
  Clone ID: LIB3196-013-P1-M1-D2
cccacgcgtacgttgggacaggctctaagctacctctactagtgttcatgaccggctacacagccttgagacctgtatc

SEQ ID NO: 45350 - DNA, 270 bp, Gossypium hirsutum
  Clone ID: LIB3196-013-P1-M1-D5
gctcgatcccctcgagtatgggtcttatgccaattatgatttcattagataagaacttgatcagtattagtctaaaaccatgatatagtctgtagttactgtgctatagcaagataccttaaacttacattagtctaaaaccatgatatagtgaggagtaaccggcactataatggaggaatactttaggtatcaaaatggggaaaaatgctaaagggggaaaatgggtatgctgtaagagcctaatcctgaattaagactttgcttttc

SEQ ID NO: 45351 - DNA, 290 bp, Gossypium hirsutum
  unsure (1)..(290): unsure at all n locations; Clone ID: LIB3196-013-P1-M1-D6
cttcgcggacgcgtgggatcccccaaaatctttaaccttctgctacacgtttccaagagaccatttcaattcctcaatctggagcctgtggccttctcctttccagaactcttcgaacatgctcaggaattcctccatccaggaaatgaccttcattttcttttaaacgcttactttgcaaacacattagcaaaangtgttttctgactttggaatatgggaaaaagacaagtttttgggaagaaaatgcttacataatcttggaatggtccccttaattaatagccccc

SEQ ID NO: 45352 - DNA, 354 bp, Gossypium hirsutum
  Clone ID: LIB3196-013-P1-M1-D7
gaagaaagggcttaacgcaatttgaagaagagcagagtttggattagaatttagggttttacggaaggaacggacgaagacaaacaagaaccagatggatctggaaatgaacttgaacgccccccactccatgggcacaaccatcatcggtgtcacctacaacggcggtgtcgtcctcggcgccgattctcgtaccagcactgggatgtatgttgctaaccgggcatctgacaaaattacacagctcactgataacgtctacgtttgccgctctggatccgctgctgattctcagattgtttccgattatgtccgctatttccttcaccaacatacgattcagcttggccaatc

SEQ ID NO: 45353 - DNA, 194 bp, Gossypium hirsutum
  Clone ID: LIB3196-013-P1-M1-D9
cggacgcgtgggcggacgcgtgcggtgtaggataagtgggagctctcgggcgaaattgaaataccactacttttaacgttattttacttattccgtgaatcggaggcggggcacggcccctctttttggacccaaggccggcttcggtctgtcgatccattcggaagacattgtcagggggggagtttttctgg

SEQ ID NO: 45354 - DNA, 326 bp, Gossypium hirsutum
  Clone ID: LIB3196-013-P1-M1-E10
tttaaggaccgccaaggaaattctgaaactgaaagctgattgatcggatgtgtatgccagctttcatcaactacattcgaaggccttactaggaattgaaatggtgtgtaaagagattgcttcttctgatcagatttttcgatataaatactggacaaagtatggatattttactgctgttagtaaaataggattctcttcttaggatcttagtttcttcgcttgtattagactcaacaatggcttgcattgcattggtgttgattttaccaaaatttcgaggtttacaattaactatttttattaaaaaaaaaaaagtttgaaat

SEQ ID NO: 45355 - DNA, 375 bp, Gossypium hirsutum
  Clone ID: LIB3196-013-P1-M1-E11
atcgcgtccactcaaggaaactttgacggaaattttgagtcactggaccttgcggaatttgctaagaagcagccatggtggcgtaagctattcgggcaggaatctggaccttcagcagaaaagtatagcgtggcaacccagctgttcattggaggtgtcactggatggtgcacgggtttcatattccagaaggttggaaagttggctgcaacagctgtgggaggtggattttttctccttcagcttgcaaaccatactgggtacatcaaagttgactggcaacgagtggagaaggacatgaagaaagccaaagagcagctgaagatccgtaagagcaatcagatgcctactgaggtcaggagcaaagctgaggag

SEQ ID NO: 45356 - DNA, 377 bp, Gossypium hirsutum
  Clone ID: LIB3196-013-P1-M1-E12
atagagtattggttcatacggagaaactgtgggcctttataaatagccagcccgcatcaccctcttccccaatttgtaggtgtattctatgctcttaaggcttcatcttctccctgttaagtgaggtttctaccacacctttgaacaatgttctttcccctctggttatctgaagactgtcctgagaggaagacgtaagtgttgtgattagtagaagctttctagtagaccatgtttcttctggattgtaataaaattgttagctccttttactttgtgcctgtctctggaaagccatttttgaatcgctaattactttggctttaatcagaggtcacctggtaaaagctttgtaatcataacacaatcaattcttg

SEQ ID NO: 45357 - DNA, 377 bp, Gossypium hirsutum
  Clone ID: LIB3196-013-P1-M1-E2
atcgtggaagtgacatcgtctttaaaccctgcgtggcaatccctgacgcaccgccgtgatgcccagggaagacagggcgacctggaagtccaactacttccttaagatcatccaactattggatgattatccgaaatgtttcatcgtgggagcggacaatgtgggctccaagcagatgcagcagatccgcatgtcccttcgagggaaggccgtggtgctgatgggcaagaacaccatgatgcgcaaggccatccgagggcacctggaaaacaacccagctctggagaaactgctgcctcatatccgggggaatgtgggctttgtgttcaccaaggaggatctcactgagatcagggacatgttgctggccaataagg

SEQ ID NO: 45358 - DNA, 377 bp, Gossypium hirsutum
  Clone ID: LIB3196-013-P1-M1-E3
atggcaaccaagcaagactctgtcttgaaagagaaataaaaaagaaagcgataggtctttattatgggacattaagaaaaacctaaatatcatgttcaaagtaattttggggaagcttgataaactaattctaaaataaaggaacagtggtctcagaagacccaagacatccctggaaaagaacttttcctctagatatggaaacttataaagccgtcttaattcctatagatttattttgtcgatgcagtatacaaaagtcaaacagaacagagagcctagaaacagaccccacatgtgtatgaaaacacgtgtatatggaagatgacagaaagagcgttgccgatttgtgccccatgcaaatctatttcagattg

SEQ ID NO: 45359 - DNA, 385 bp, Gossypium hirsutum
  Clone ID: LIB3196-013-P1-M1-E4
atgtggagctggtggtggctttgggctcggtgcggcggagctggctttggaggtggcttcggtggccctggctttcctgtctgcccccctggaggcatccaagaggtcaccgtcaaccagagtctcctgactcccctcaacctgcaaatcgaccccagcatccagagggtgaggaccgaggagcgtgagcagatcaagaccctcaacaacaagtttgcctccttcatcgacaaggtgcggttcctggagcagcagaacaaggttctggacaccaagtggaccctgctgcaggagcagggcaccaagaccgtgaggcagaacctggagccgttgtttgagcagtacatcaacaacctcaggaggcagctggacagtatcgttgggg

SEQ ID NO: 45360 - DNA, 159 bp, Gossypium hirsutum
  Clone ID: LIB3196-013-P1-M1-E5
gtgagtgggtatagccactccggtgatccaagcttctccaagagcccactacgccttggttattctttcaggaatctgccccttctgttgaaaggtgtccccgtgcggcccacacgctcattggaggtgccacttgatggtgcacgggtttcatttttc

SEQ ID NO: 45361 - DNA, 367 bp, Gossypium hirsutum
  Clone ID: LIB3196-013-P1-M1-E6
gcatcttgctcccgagtatgagaaagcagcatccattttgagtaaacatgatcctccaatctttctagctaaagttgatgccgatgatgaagcaaacaaagatttagcaagccaatatgatgtcaagggctaccctacgcttcaaattttgagaaatggaggaaagaatgttcaagaatacaaaggtccacgtgaagctgatggtattgtagagtatttaaagaaacaaagtggccttgcttctgttgaaataaaattaacagaagatgccagtaaccttattgatgacaagaagatagtaattgttggggtgttcccaaaattttctggggaagagtttgagagctatatggcactcgctgagaaa

SEQ ID NO: 45362 - DNA, 295 bp, Gossypium hirsutum
  Clone ID: LIB3196-013-P1-M1-E9
ataattgcctagccatggacacaagaaagctaggaggaagagttatacttgtggatcaattttatttattttaaatatcaggagcaatccagggccatacaaccatgaatcgcttagcgaaatgaacacaggaagatttactatctgaagctagcgttagtgattagaaaacaaaactgccagttttgagcttcattaacgtgaactcatctttcacgcaaggagggaaaacttgctttccctagcagatggtgcatatgtgtgtacagactgcacaattctaagaaattatgca

SEQ ID NO: 45363 - DNA, 372 bp, Gossypium hirsutum
  Clone ID: LIB3196-013-P1-M1-F1
atgggtagaaaagcacctggggctggtgcagactgcggagcgggccgcaccctgtgtgcagaaagaggaggcgctcttgtgggaaatcctgaagatggccaaagacgactccactgttcgttgcttccagggcctgctgatttttggaaatgtgattattggttgttgcggcattgccctgaccgcggagtgcattttctttgtatctgaccaacacagcctctacccactgcttgaagccactgacaatgatgacatctatggggctgcctggatcggcatatttgtgggcatctgcctcttctgcctgtccgttcttggcatcgtaggcatcatgaagtccagcaggaaaattcttctggcgtatttcat

SEQ ID NO: 45364 - DNA, 377 bp, Gossypium hirsutum
  Clone ID: LIB3196-013-P1-M1-F10
atagaaggacgtggatgctgcctacatgaacaaggttgaactgcaagccaaggcagacactctcacagatgagatcaatttcctgagagccttgtatgaagcagagctgtcccagatgcagacccacatctcagacacatccgtggtgctgtccatggacaacaaccgcaacctggacctggacagcatcattgctgaggtcaaggcccaatacgaggagattgctcagaggagccgggctgaggccgagtcctggtaccagaccaagtacgaggagctgcagatcacagcgggcagacatggggacgacctgcgcaacaccaagcaggagattgctgagatcaaccgcatgatccagaggctgagatctgagatcg

SEQ ID NO: 45365 - DNA, 266 bp, Gossypium hirsutum
  Clone ID: LIB3196-013-P1-M1-F11
atatcgtatgggaccattattggtgggttatggcatcatatgggaaaatttaatgaaggttattacctaatgtgggtctttgtgtgtcctagaatgataaggggcaaacctcattaaatgtaaggttaggcaaatacctatcgtttaaaacatcagttaaaggacaacctttgtggaaaaactctagaaaggtaagcctttatggcgaacatgttataaaagattgcctttttggcaaatctctagaatggtaagtccttgtggcc

SEQ ID NO: 45366 - DNA, 357 bp, Gossypium hirsutum
  Clone ID: LIB3196-013-P1-M1-F12
gaaatcgatgccccatacatcaaagatttcgcatacatgaatcggggaaaggggcatttgattttgtttagtgatgttacctgcatgttggcacctatcgcaagacttacagaagttatatgcgtctcgaaaaattgtgggccaatatagcccacattctaacaccttatgagcggtccgcttagggccaaagtgacctccgcaagcttcagcatgacaaaaattaaagatagaagttacctcagtttctggaacacatcttcgtattatctggtctgaacagtgtttccacaagtatgggtcatcccaaatgtaatatcgagcgttgcctctaagcttgtccctcacggaacgtgc

SEQ ID NO: 45367 - DNA, 359 bp, Gossypium hirsutum
  Clone ID: LIB3196-013-P1-M1-F2
ctcaccctaagttcaattcccaggaaagagaggtggatcacgtggatcacttaattaccaggtctttcctaaccagaatatccctctatcgtaatttaatcgcacaataaatcactacaatcactctcacaaaatatgcaaaataaacaataaagaacacaagaattttaacgaggttcagcaaattttgcctacgtcctcgggcactaacaaatatatttcactctaaaatacaagtgaaaatttacaaataaagagagaaaataatgccttgaggagagaatgtcaaatgtgggggataatcaaaatgagaaatggttaggcctatttatagttgagatttagggatcaacttgcaa

SEQ ID NO: 45368 - DNA, 380 bp, Gossypium hirsutum
  Clone ID: LIB3196-013-P1-M1-F4
attgttttttgacttctgcctgtgggcctgaggaagggagaaggcagacccataggcagtccctgggcaagggaggattttcccagctgcagcacagctttccattcatgtgcatgtgagtctggtgaaaatggccttgtgtagtccagtgtctgtcatgcccctgagttcttgtggtcccagagaggcagcctgggcagtctgtttacagctggcaaacactggctggcaagttgtggtgctgggtcagaaagtgtctggactggtaatcgggtgccctgctgtccacaggtggactctggggaagccaggcccctggatcccaaggcctttgtgtctggagccttacctggcctgtgcctggaacatagcacattttt

SEQ ID NO: 45369 - DNA, 318 bp, Gossypium hirsutum
  Clone ID: LIB3196-013-P1-M1-F5
atgctgtgactggtgggtgagcaggctcatcgcggagcggatgcggtccacagctctcacctaagcaagacatcccaacaacggtctggtgtcacaatgaccatgtgacctaaaacaccgactgcttcctaactgcattaaacaagagcgtgaaaagccaggcaccacgctctacctgacgaatatgcctattgccagactgactaaaaccttgaggtgagcggcactgcgggttgcgaccacaagatgaccttatcttccacggggagctcgctgtgctgattcatacacaacaggacctcaactagctgttatgcc

SEQ ID NO: 45370 - DNA, 309 bp, Gossypium hirsutum
  Clone ID: LIB3196-013-P1-M1-F6
atgccggagtcaaagccggttcccggcccagtgccgtcccgcagcagcctgccgcctctttcctttcaacatgacagatgccgctgtgtccttcgccaaggacttcctggcaggtggagtggccgcagccatctccaagacggcggtagcgcctatcgagcgggtcaagcttctgctgcaggtgcagcatgccagcaagcagatcactgcagataagcaatacaaaggcattatagactgcgtggtccgtatttccaaggagcagggagttttgtccttttggcgcgggaacctgggcaatgtcatcag

SEQ ID NO: 45371 - DNA, 370 bp, Gossypium hirsutum
  Clone ID: LIB3196-013-P1-M1-F7
atgtttgttttaacagagatgccttttgtgatggcagtctactagaagtatcctcacaacatctaggttgctgaaaatttgttcccagtagaaagccaggagaggatcaacctcgggggtttgttttcgttcccaagatggcctttttgaatgataatggtctgagaccatacttgctgatgactcagggcctggctttggcaggaggacagcatcagacacaggaatcagtgatgagatgagcttatgtagtgtagcagggggtttcataccagtacagttcccagttagcactattgacattattattaggtcacaacaatacttgtcttttgagagcaatatttagattttacatgcattcacatgg

SEQ ID NO: 45372 - DNA, 344 bp, Gossypium hirsutum
  Clone ID: LIB3196-013-P1-M1-F8
cctctgcccccaactccctcaggtcatcttgcttgactgcaattatctggtacgaatgtaaagaaagaaatcatcagtaaggataaaaaatctgacaaaaattacttggataaaggagtaaagacgtcaactttgagccttacctccccttgcattgttaaagctgcaatccctgatcgatttacaagcgctattgccaaggccccatcatctcttggatcttttaagagcatctccaaatctcttggcttgaaatattcctccaattgcagaacccttatggcgacctacaagattaagcttgtaggaccaaagggtgaggtgacggagtttgaagcccccaa

SEQ ID NO: 45373 - DNA, 368 bp, Gossypium hirsutum
  Clone ID: LIB3196-013-P1-M1-F9
atggcaagattgactttttcgacattggataaaatctacaaatcagcccttgagttattcaatggtaactgacaactaaaatatttccctagaaaggaagatgaaaggagtggagtgtggtttggcagaacaactgcatttcacagcttttccagtcaaattggagcactgaacgttcagatgcataccaaattatgcatgggtcctaatcacacctataaggctggctaccagctttgacacagcactgttcatctggccaaacaactgtggttaaaaacacatgtaaaatgcttttaacagctgatactgtataagacaaagccaagatgcaaaattaggctttgattggcactttttgaaaaata

SEQ ID NO: 45374 - DNA, 373 bp, Gossypium hirsutum
  Clone ID: LIB3196-013-P1-M1-G1
atggtggcttgggtggtggcttgggtggtggctttggtggtggctttgctagtggtgatgggcttctggtgggcagtgagaaggtgaccatgcagaacctcaacgaccgcctggcctcctacctggacaaggtgcgtgctctggaggaggccaacgccgacctggaggtgaagatccgtgactggtaccagaggcagtggcccgctgagatcaaagactacagaccctacttcaagaccattgaggacctgaggaacaagattctcacggccacagtggacaatgccaacgttcttctgcagattgacaatgcccgtctggccgcggatgacttccgcaccaagtatgagacagagctgaacctgcgcatgag

SEQ ID NO: 45375 - DNA, 382 bp, Gossypium hirsutum
  Clone ID: LIB3196-013-P1-M1-G10
atcagcctcctacaagagtttgatgtccaggagcaggacatcgagactttacatggctccgttcacgtcacgctgtgtgggactcccaagggaaaccggcctgtcatcctcacctaccatgacatcggcatgaaccacaaaacctgctacaatcccctcttcaactacgaggacatgcaggagatcacccagcacttcgctgtctgccacgtggacgcccctggccagcaggacggcgcagcctccttccccgcagggtacatgtacccctccatggatcagctggctgaaatgcttcctggagtccttcaacagtttgggctgaaaagcattattggcatgggaacaggagcaggcgcctacatcctaactcgatttgctc

SEQ ID NO: 45376 - DNA, 364 bp, Gossypium hirsutum
  Clone ID: LIB3196-013-P1-M1-G11
ggacaaagaaggaatcccaccagaccaacaaagattgatttttgctggaaaacaacttgaagatggaagaactcttgccgattataatatccagaaggagtctactctccatttggttctccgccttcggggtggtatgcagatctttgtaaagactcttaccggaaagaccatcactttggaggttgaaagttccgataccattgacaatgtgaaggcaaagatccaagacaaggagggtatccccccagaccagcaaaggctcatctttgctggcaagcagctcgaagatggtaggacattggccgactacaatatccaaaaggagtctacccttcatttggtgttgcggctgcgtggtggg

SEQ ID NO: 45377 - DNA, 415 bp, Gossypium hirsutum
  Clone ID: LIB3196-013-P1-M1-G12
cacaattccgaacgctggaacacgttgcagctccggcccggaattcctggttcggctgacgcattatcagggggggatatctgtctaatgcttgaaaaactgtgtctgcgaacactctgtaatggacaagatcaggatttgagcggaagaacgaatgctactttcttaaggcaggaaagacaaattttattcttcatcaagtgatgagcatataataattccaggcacatggcaatagaggccctctaaataaagaaataattaccctttagacaggttggagataatgatcagagtaaaaggtaattacacattttatcttcagaaagccaaggggctatatattgacagtgacctgaattaaaaaaagtactctttcacatttccacaggttgcatgttaactttaaatgctt

SEQ ID NO: 45378 - DNA, 371 bp, Gossypium hirsutum
  Clone ID: LIB3196-013-P1-M1-G2
ataaattttatgaatgtaagcagtgtgggaaagcattatcctctcttacaagttttcaaacacacataagaatgcactctggagaaagaccttatgaatgtaagatatgtgggaaaggcttttgttctgcaaattcatttcaaagacatgaaaaaattcacagtggagataaaccctataaatgcacgcaatgtggtaaagccttccctcattccagttcccttcgatatcatgaaaggactcacactggagagaaaccctatgagtgtaggcaatgtgggaaagccttcagatctgcctcacaccttcgagtgcatagtagaactcacactggagagaaaccctatgaatgtaaggaatgtgggaaagcc

SEQ ID NO: 45379 - DNA, 355 bp, Gossypium hirsutum
  Clone ID: LIB3196-013-P1-M1-G3
gaaacctaaaaacttcgagagaaattggagggagatcttcagtcttgaaggagatcctacttcctagctgaatccattggcgttctttgagtaatttatgtgttctactctgcgtgtctccttaggtcttcttctagtatgtatttatagacttttgaatgctcaaaaaccctaaaaattgactttttctgcgtgtttgggaaataggaagcgatatcgacacaagttggcacatgggtgtgtgacctgcccgtgtggatcacattggcgtgtggcctgcccatgtagatcctgaaaactccgattttggcccccttttcgctcctttttctcccaaatgctctcctaagtatag

SEQ ID NO: 45380 - DNA, 375 bp, Gossypium hirsutum
  Clone ID: LIB3196-013-P1-M1-G4
atcccgcctcgtccaactgctggtcaaggcccaccaggatgcccagcgccacgtagctgcaggcacacagcagccctacacggatggtgtgaggatggaggagattgtggagggctgcaccggagccctgcacatcctcgcccgggaccccatgaaccgcatggagatcttccggctcaacaccatccctctgtttgtgcagctcctgtactcatcggtggagaacatccagcgtgtggccgccggggtgctgtgtgagctggcccaggacaaggaggcggctgacgccattgatgcagagggggccttggtcccactcatggagttgctgcactcccgcaacgagggcactgccccctaccctgctgctgtcct

SEQ ID NO: 45381 - DNA, 369 bp, Gossypium hirsutum
  Clone ID: LIB3196-013-P1-M1-G5
atttgagagacctgaaaagtggtcactaccacaagattgtagaaattacagagaatgcttcacaatgcctcgaggacgaatacatggtggacaagccatcttgttcgactccaaggaagaggtcattcaaccttccgagtgtttcatccattgacgaactcagaactcctccattcgaggagttattgaagttgttttgggaagcaaaatctgcaaaactagcgaatggagatgtaaaacatatgctggcagcatatgaagcagcccaagccttgaaagactccagagttccactcactgctataaactaaaagtgagatggaaaggaacaaacatatttaagaaaacaaaggccgagtatagtatagt

SEQ ID NO: 45382 - DNA, 385 bp, Gossypium hirsutum
  Clone ID: LIB3196-013-P1-M1-G6
atagtattattaaaatacaatgtttatatgtgtatttgtgtattatagatgtatcaagtgatttctaattttttctcatatgaatatgccagattactctagaactagatgcctcttctttaaataattttagttttcctgaataaatttgtaatggttaaagtaccaaggaaggaaggcgagaagggattctgtttttaaaatcacatctgaactgttcctctactaagattaaattaaatgtgaaatactcgtaattgcaattcttaaacttaggcacatgtgctcactgtgcacctgctcctggactctattcaccagagtaccagtaaatgtgtgtcccaagattcacaggcttttgattaatcaatattcttttcaagtt

SEQ ID NO: 45383 - DNA, 369 bp, Gossypium hirsutum
  Clone ID: LIB3196-013-P1-M1-G7
atcgtcaacttccgcctctaccagttgctcaacctgcactaccccccgaagctcgaggggcaggcccaagcagaggcaaaggccagtgagggcacctacgcgttggactccgagagctctatggagaaactggcggccctcagtgccagcctggcccgcgtggtggtgcctgccacagaggaggaggccgaggtggatgagtttcccaccgatggggaggaagaccgcaggaaggagctggaggcacaggagaagcacaagaagctttttgaaggcctgaagttcttcctgaaccgagaggtgccccgtgaggccctggccttcatcatcaggagttttgggggggaaagtgtctgggacaagtctttg

SEQ ID NO: 45384 - DNA, 333 bp, Gossypium hirsutum
  Clone ID: LIB3196-013-P1-M1-G8
gcctttcctctccacaaaacacttgaaaatatctctcttcactttcttctcttttcaacgcagagtgaaaggcggggaggccgtagacaatctctcttgcgctcttctcgtagaatggatcagattcaacatccatctgtcatgcagaaggtagctggccagctcctttcttctagcatttcccgagattttcaagggtatgatgggtctttcaggaggcctgctctataccaaggacattttgcatatgggaattattccaatgctggaatgcactatcctattgttccatcaacagctaccgccatttgtgttcaagcccctgcagagaaa

SEQ ID NO: 45385 - DNA, 365 bp, Gossypium hirsutum
  Clone ID: LIB3196-013-P1-M1-G9
atggccaagcaagcttctgtctgcacctgctctcaatcctgctctcaccatgagcctccgcctgcagagctcctccgccagctatggaggtggttttgggggtggctcttgccagctgggaggaggccgcggtgtctctagctgttcaactcggtttgtctctgggggatcagctggaggctactgaggcggcgtgacctgtggctttggtggagggactggaagcggctttggagcaggctgcacaatgggtcttggacctggccttgtggatcacatttgccggggggcctgcccatgtaagattcttaaaactcctattttggtccccctttttgctccttttttctcccaaatgctctcct

SEQ ID NO: 45386 - DNA, 369 bp, Gossypium hirsutum
  Clone ID: LIB3196-013-P1-M1-H1
atagggatacagggtccttcgtaacattatcagtgtggcctatgttggaaagtctggtgacctctgattttgtcttgcttctgggtctttgactttggcactctttgccatattagagttcctgggcctagggctgagcaggattcataggtgcagctgcttttgctggaggtagactgcatccaagaaaggaagtgtgctgggtgagttctgggcgtagagattctgactggggtcaccgctgggctggccaccggtcttgcttctgacccagggttaaactgtggcttgggactgactcaagtcctctcttggggtcggtctgcacataaaaggactcctatccttggcagttctgaagcaacacca

SEQ ID NO: 45387 - DNA, 218 bp, Gossypium hirsutum
  Clone ID: LIB3196-013-P1-M1-H10
acgcacctgttcccaagggtatcgatgtattgccttgtctacaaaccatggtgtcacccaaccgaagttccagcgcagcaaacggtctgttgctgaggagcgagctggcctaaagttgggaggtctcacagttgttacctcgtactggatcaatgtggattctacttacaagtactttcaggtaattctgatggatgtcatactcaattctatacctc

SEQ ID NO: 45388 - DNA, 367 bp, Gossypium hirsutum
  Clone ID: LIB3196-013-P1-M1-H11
caaaaatcaaccccaatacaaccccatttgcggattcctcttcttcttctttgttcttcatcttcttcatcattttctgtgtttaacccacaaatttgctgctccttcagctaataacagaagcttaacaatctctctctctctctctctcttttttaacaccatgttcacttgttattagaaagctttcaactcctctgtcccttttctctgctttgctcttcacacacatttttttgaggctacattattctaaaaccacaacacaacctagctaattgacctaaagatgacaaagataagtcccgatattgacgaaacaatgctgaaagagtcgattgtggctgtttcagctgatgtgagtttt

SEQ ID NO: 45389 - DNA, 362 bp, Gossypium hirsutum
  Clone ID: LIB3196-013-P1-M1-H12
cttcttagtcggtttaggagaacatttcggcatgtataggctattatgttgtgtttgaactttggtatgtaaactttcagccatgcgaaaatggcataaatgttaatttggactttgggtcctatgatacttagttataaaacgtagtaaatgggttttataatgtggtcatgactgatattgggccaattcggttttggttgaataatagttgaggcctaatcgatttttatgccatatgtcatggttgattaattttggtgttaaaattcatgatatggcaatagtgtaatagggagatgtttgtcaatgattagcctttggcatggctagccatgatcataatttgtgaaatgcatgat

SEQ ID NO: 45390 - DNA, 377 bp, Gossypium hirsutum
  Clone ID: LIB3196-013-P1-M1-H2
atctgggaggtacccctgttcagagccgtgtggtccaaggcaaggagcccgcacacctcatgagcctgtttggtgggaagcccatgatcatctacaagggcggcacctcccgcgagggcgggcagacagcccctgccagcacccgcctcttccaggtccgcgccaacagcgctggagccacccgggctgttgaggtactgcctaaggctggtgcactgaactccaacgatgcctttgtcctgaaaaccccctcagctgcctacctgtgggtgggtacaggagccagtgaggcagagaagacggtggcccaggagctactcagggtgctacgggcccaacctgtgcaggtggcaaaaggcagcgagccagatggcttc

SEQ ID NO: 45391 - DNA, 354 bp, Gossypium hirsutum
  Clone ID: LIB3196-013-P1-M1-H3
gaggggcgaactatcaacccttcaataattgtgtcatgatggccttactgtatctggcacccgtttacgcagagtacgtgatgtggatatgaagcgtgactatgcatttgttgtacgtatttctttactctttttgtttaatcccgacggacatttcttatctataatattcttcactattttagtaaatatgatcattttgcttggaacttttttccttctttatgttttgtatattgttggcctccttgattgtaggaattcagtgatcctagagatgccggtgatgcaagatatgcattgaatggtcgagacttggatggaagccggatgattgttgaattatccaaagga

SEQ ID NO: 45392 - DNA, 193 bp, Gossypium hirsutum
  Clone ID: LIB3196-013-P1-M1-H4
gaagcacatatatgtctctagcttgcatgtctgcctttctcataatcatgtagtatatctacctttgttattgtacatttggcacatacttatatggcctcaactatgactagtttctaggatgtctaccttgtgcctccttttggagaaaagcttcggtcttctttttgaaatatgcagtaaatcattactc

SEQ ID NO: 45393 - DNA, 361 bp, Gossypium hirsutum
  Clone ID: LIB3196-013-P1-M1-H5
atgttctcggagcctcctccgttcaggggctgagtcaggggccggcggtgcctttgagaggggcctgctttgtccctgaagttccgaatggatagtttacactcttctccacttggatctgtttctttctcccctctttatctttttcaaatccgcaattattaagtacttagtgtgcacacaggactatgaacctgaactgaagaagaatcccattctgatttcttcctccagtaggccaccttaggcctaccggtggcttcccgggatcgtgcagaaaccaaagagctaagggaattgccgcccaacccacccctgcacacacactaagactttgccgatttggccgaaaagctgtgac

SEQ ID NO: 45394 - DNA, 294 bp, Gossypium hirsutum
  Clone ID: LIB3196-013-P1-M1-H6
attatgggcaaaaaagtggaagttaaacgagctgagcctcgcgacagcaagagccaagcgccgggacagccaggtgccattccagtgggggagcagggtcgtgcccaacactgccaatggctgggcaggccagcccccgcccacgtggcagcaaggatactgtccgcaaggaatgtgggtgccggcaggacaggctattggtggctattgaccgccccctgcaagtagaggagtccccccgacacccccacttgtcaaccttctacatggtatccacccctcctggaggctttt

SEQ ID NO: 45395 - DNA, 351 bp, Gossypium hirsutum
  Clone ID: LIB3196-013-P1-M1-H7
gcagaacagaaaaaagaggtcttccgtctcatattcttcgatcctctggaaagttgtagaccagagcaagaatacattatggctggacatagtgattcaagttcgtctgaaaagaaatcaagtgaagccatgaatgatgtaccgacctttagcacggagaatatgcaaaataacatgaaagttatatattacagccgaacgtttatgtctatcatcggaggagttattgctggaattttagggttcacaggctttatggggtttatcttttattttcttgtcatggcaattacttcaattggactcatagcaaaggcaaagttctcagtccatttatattttgatagctgg

SEQ ID NO: 45396 - DNA, 324 bp, Gossypium hirsutum
  Clone ID: LIB3196-013-P1-M1-H8
caaattgcataaaaaatgaatagagatgggaaaatcgcataaaatgcttctattctagaacaaaaaaacaatataaccccttttttatttatattccatacactatccagaaaaaaaaaagaagaatttgtatttaatttattggtacctttcttttttatatctccattcaaatctataggatagaataggatctatatctattatgatatataaatcgaattgatgaaatcaaaaaaacgcaaaaaaagtctttctttttctatctacgcccagttttttgttgtcttacatttataatttatacatctccatttatacatg

SEQ ID NO: 45397 - DNA, 371 bp, Gossypium hirsutum
  Clone ID: LIB3196-013-P1-M1-H9
atctcttttaatcctcatttaagtcttcattaatcccctcataatccattttgcagatgaggaagttgaggctcagaaagtccagatcctgtagccagaactgagatacaaaacaagatcttgttccaaaggctgtattcttagccacatgttgtattcacctgggaagctttaaaaacacacacacagtgtgcaggccccactacagatgagtttatcagttcctggcaccagctgtacttgctagccattgccccctaattctccaaggcaaggcgaggctcagagccccccagggtggctcagctggccccagagggcagcaggtgggcctttcttagcctatggaccctggcaactttccaaacaga

SEQ ID NO: 45398 - DNA, 280 bp, Gossypium hirsutum
  Clone ID: LIB3196-014-P1-M1-A1
atctcaatcctgctctcactatgagcctccgcctgcagagctcctccgccagctatggaggtggttttgggggtggctcttgccagctgggaggaggccgcggtgtctctagctgttcaactcggtttgtctctgggggatcagctggaggctacggaggcggcgtgacctgtggctttggtggaggggctggtagtggctttggaggtggctaccgaggtggccttggaggtggctttggcgggggttatgctggaggcttcgatgattctggtgcttg

SEQ ID NO: 45399 - DNA, 361 bp, Gossypium hirsutum
  Clone ID: LIB3196-014-P1-M1-A10
atccaggtttccacagctgtagttgagccctacaactccatcctcaccacccacaccaccctggagcactctgattgtgccttcatggtagacaatgaggccatctatgacatctgtcgtagaaacctagatattgagcgtccaacctatactaacctgaataggttaataggtcaaattgtgtcctccatcactgcttccctgagatttgatggagccctgaatgttgacctgacagaattccagaccaacctggggccctacccccgcattcactttcctctggccacatacgcccctggcatctttgctgaaaaagcctaccatgaacagctttctgttgcaaaaatcaacaatgctt

SEQ ID NO: 45400 - DNA, 379 bp, Gossypium hirsutum
  Clone ID: LIB3196-014-P1-M1-A11
tttctgaattcgtatctatatgtttaatatgtcagcaagttaaggctaaacatcaagtaccttcgggtttgctacagccagtgacgatatcagaatggaaatgggaaagagttattatgggctttgtatcaaggtttccctgtctctgaaaaagaaagatgccatttgggtaattgttgaccgtttgacaaagtttgcacactttattccagtacgtatggatttttccctaaatagattagcagagttatatgtttctgagattgttagactgcatgaagtgccagtctccactattttagataaagatccacggttcacgtcctgattctggaacaagttgcaaaaaactttgggtacgaaattacatttcagtact

SEQ ID NO: 45401 - DNA, 375 bp, Gossypium hirsutum
  Clone ID: LIB3196-014-P1-M1-A12
cccacgcgtccgaaaaatcgattcgagagcaaaaataaaataaagaaaaaaaaaaggaacagagagtgaaattccacctttttgttttttttgattgcttaatcgtgtgttacaatttttttgtgtttgtggctatatagccgaatacaaaaatctattgtttgctactgttttggcactgctttttgctgtttccctttctttgccatgtttgcaggtccatggagggtcaacgggcgagggagtttccactttcatgcaagggcgttgatcctcaagccgagtggccgctgatgcacatggtcaatggctgcggcgcgagggaagctcgaaaaccctaaggtttctgagttggcttaatgttttgggcttatt

SEQ ID NO: 45402 - DNA, 400 bp, Gossypium hirsutum
  Clone ID: LIB3196-014-P1-M1-A2
atctcctggttcttagaccaggctgagggtcaggaaggcacgtcctcatggagatggagagcagccacagcagcagtgccccggggacctcaggcaatagcgctgtctccgctcttcctggaattctgctgtccctgcccgtgtgttgttaggtcacattccatgccacacacagacacaagcatgatggctttgtctggaggagtgggcccagtgcgacatagaaggactgaggcctgcccccaaggtccctgactcgctttcctgtctccctgccagagccgtgtggtccaaggcaaggagcccgcacacctcatgagcctgtttggtgggaagcccatgatcatctacaagggcggcacctcccgcgagggcgggcagacagcccctgccagcaccc

SEQ ID NO: 45403 - DNA, 382 bp, Gossypium hirsutum
  Clone ID: LIB3196-014-P1-M1-A3
aaacagctgaaaatatctctctcttcactttcttctcttttcaacgcagggtgaaaggcggggaggccgtagacaatctctcttgcgctcttctcgtagaatggatcagattcaacatccaactgtcatgcagaaggtagctggccagctcctttcttctagcatttcccgagattttcaagggtatgatgggtctttcaggaggcctgccctataccaaggacattttgcatatgggaattattccaatgctggaatgcactatcctattgttccatcaacagctaccgccatttgtgttcaagcccctgcagagaaaggatttaccagctttgccattgatttcctcatgggtggagtttctgctgctgtgtcaaaaaca

SEQ ID NO: 45404 - DNA, 341 bp, Gossypium hirsutum
  Clone ID: LIB3196-014-P1-M1-A4
atagctggcctacctgaaaaagaaccacgaggaggagatgaatgccctgagaggccaggtgggtggagatgtcaacgtggagatggacgctgcacctggcgtggacctgagccgcattctgaacgagatgcgtgaccagtatgagaagatggcagagaagaaccgcaaggatgccgaggaatggttcttcaccaagacagaggagctgaaccgcgaggtggccaccaacagcgagctggtgcagagtggcaaaagcgagatctcggagctccggcgcaccatgcagaacctggagattgagctgcagtcccagctcagcatgaaagcatctctggagaaca

SEQ ID NO: 45405 - DNA, 318 bp, Gossypium hirsutum
  Clone ID: LIB3196-014-P1-M1-A5
aatatgcgtaaaggaggcctatgaaaaccatagcatctacccagcgagcgaagttacgtagctatagcctcctcatgcagtcttgagcgtgccacctatgtaaaagcgaaattgagaccacagcgccaagattgaggttgatggccggatggtctgcttagaaagttactgcgttcaacaagacgaggagaaccgatttgcacgacgccaagtcgacaaggtttggcgtatgagagataatgcgagttttaacaccgttctgtagtgaaactgctaatgctaaacccaccggtagggccaactgagtggatcacaaga

SEQ ID NO: 45406 - DNA, 387 bp, Gossypium hirsutum
  Clone ID: LIB3196-014-P1-M1-A6
cccacgcgtccggggtattgacgactcagaggaccttcctttgaacatctcaagagaaatgttgcagcaaaacaagatcttgaaggttatccgcaagaacttggtaaagaagtgcattgagctcttctctgaaatagcagagaacaaggaagattacaacaagctttatgaggcattctcgaagaacctcaagcttggtatccatgaagattctcagaacaggactaaaattgccgaattgctccggtaccactccaccaagagaggtgatgagatgaccagcttgaaggactatgtcaccagaatgaaggagggtcagaatgatatctactacattactggggagagtaaaaaggccgttgagaactctcccttccttgagaagct

SEQ ID NO: 45407 - DNA, 351 bp, Gossypium hirsutum
  Clone ID: LIB3196-014-P1-M1-A7
atgcaaaaatgtatatatcaggaattaataagctaatggggaaattttaagactttgatgcctattagttttttcagtatgcttgtttgtcttcagaacatattttaagtcagaatgaacaaagatagtggtcaaagttgaaagaaggtgtaattttactgatttttttctttttgacttatttgaactttgatacgtgctatgggtgagtttagataggtgtgtacaaatatttcagcctgggatgccttactctaactatatcttgatttcttagcataacttaatgaaagcttgggttaagaaaccttagatttttaaatagtgtaaatttaacaggtggggggaaat

SEQ ID NO: 45408 - DNA, 283 bp, Gossypium hirsutum
  Clone ID: LIB3196-014-P1-M1-A8
cttgaaggcatggagtgctcagaaagctagagctgctgctattcttgaagctgacagcaaggatgagcccttgattaccatggatacccctgaagaagaaaatgctaatgctgtatacctgcagaacatcaccattctatcagcccttatcagtaaataactaggggacagcctaaagaaggcccttaacggtggggagatggttaatatgaatcttgactggagggaagtacttacttatcccgatgaacggggcgaagattatatttttacaaaaaacaac

SEQ ID NO: 45409 - DNA, 194 bp, Gossypium hirsutum
  Clone ID: LIB3196-014-P1-M1-A9
tccgctccgttatttcattcccgacccaccccacccatccagattgaatgtatggcagggtgaaaaagctgaagctgttaacattcttggagaatgacagtaaaggccgagcccttgattaccatgcatacctctgaaaaagaatcagatactgctgaatacctgcaaaccatcaccatgctatcaatccttat

SEQ ID NO: 45410 - DNA, 107 bp, Gossypium hirsutum
  Clone ID: LIB3196-014-P1-M1-B1
atctatgaactcccctccttcgactatgttggtgttttgaggtcttgccgttcattttagatcaagtacactctgcaaaatattatacacttctgaaacctagattt

SEQ ID NO: 45411 - DNA, 339 bp, Gossypium hirsutum
  Clone ID: LIB3196-014-P1-M1-B10
gaaaacctaacactcaattatttttgctagttgaatgtaatttactaatgattgagtaaatatgtgtggagttatgcctcatattttttggcttttattctcccaatggaactctgtttttagtttcccatttaaactctgattagtgtaggctattttaatattagtttctcacttaaactctgattagtataagttattttaatattatttgacctacaaatgtagcctataaattggcccatttttccacctagaaagataatcaatttcacatttaaggtttagcttttacaaggtttcaaagaaatatgtgttaacattttgaggggtcttatt

SEQ ID NO: 45412 - DNA, 286 bp, Gossypium hirsutum
  Clone ID: LIB3196-014-P1-M1-B11
ctttccatttactagcaatttcttcaagttcttttctttgtttttttaggcaatggctgaccaccacctccaaaacactcatccaatgactcaccaaatggtgaaagccgctactgccgcaacagccggaggttccctcctcattctctccggtttaatcctagctggcaccgttattgcactcactatagccactccactcttcgttattttcagcccagatcttgtccctgctcttattgcaacagttttcctccaacgggtttttgtagtctccggacggttt

SEQ ID NO: 45413 - DNA, 269 bp, Gossypium hirsutum
  Clone ID: LIB3196-014-P1-M1-B12
atgcaggttgaagggaaattctctggggctttgggaagttttgtgcggtgggtgagccaagaaaatactaattaataatagtaagtgttggttaagttgttgcttggaagtgaaaagttgcttagaaaggttagaacttttagtgcatttataagataatgatattatcccattacaattgtttttctttgctgcatggtggggattgacctgtaaaatttgttaaccaaatttcttttttgtcagcatttctctactccttttttttt

SEQ ID NO: 45414 - DNA, 379 bp, Gossypium hirsutum
  Clone ID: LIB3196-014-P1-M1-B2
cggacgcgtgggctagctgctcaacaactccaccacctcctgttccttaactaattcccgtgattcctcaaggtacggaaccagtccgagttagtaagcctcttgttgttaagattcgtaagtaaggggttgaagatttctaagctactgctgaaaatgatcctgaaagagctgaattttggtttgagaatactattagggtttttgacgagttatcttgttccctgactgaatgtgtaaagtgtgcagtatttttattaaaagatttggcttaccagtggtggaatccattgactcctgtagtgccgaaagagcatttcacttggaagttctttcaaaccaagttttgtaagaaatacatcagccagaggtttctgga

SEQ ID NO: 45415 - DNA, 384 bp, Gossypium hirsutum
  Clone ID: LIB3196-014-P1-M1-B3
gcaagaagaaaggcaacaaccacaatgccaacaaaggtgcttgaaacgattcgagcaagaacaacaacaatcccagaggcaattccaggagtgtcagcaacattgccaccagcaagaacaaaggccggaaaagaagcaacaatgtgtgagggaatgcagggaaaagtaccaggagaatccatggaggggagagagagaagaagaagcagaagaggaggaaactgaagaaggagagcaagaacaaagccataaccctttccacttccatcgcagatcattccaatctcgattcagggaagaacatggcaatttcagggtcctccaaaggtttgcttcaaggcatcctattcttaggggcatcaatgagttccgcttatctatctt

SEQ ID NO: 45416 - DNA, 283 bp, Gossypium hirsutum
  Clone ID: LIB3196-014-P1-M1-B4
tcaagaagaaaggcatcaactacattgccaacaaatgtgcttgtaacgattcaagcaagaacaacaacattgccatcaggcactttccaggagtgtgagcaacatttccaccagcaagaacataggccggaaaagaagcaacactgcgtgacggaatgcatagaaaaggaccaggagaatccatggagggtagagagagaaaaagaatctcaaaaggtagaaactgacaatggagagcacgatcaaagacatatcccttttcattaacatagcagattatccc

SEQ ID NO: 45417 - DNA, 396 bp, Gossypium hirsutum
  Clone ID: LIB3196-014-P1-M1-B5
atatggacaggaactgaagcagaggttgggctgtggcttgacccctggatgatgctctattcatgaagcaaatgtaattctaatcatggaggaattctcaagttagatatgagtgaagcctgacagtaaaaagcctgcttgcttgctgtgcctccagggtggagccctcattctgaagtcactgtgcatcctagctgtttcctaggtttctgtgcactcaaggctccatgagatttagagcattgggattcccagagacttttcttccctatgtaatctgaggttgacaagatggagctgagcctagtcaatcttgaattgagagagaaacaaataccaggtaccagctgtgtctacctgctggcctctactggggcttttttgtgtgctttgctg

SEQ ID NO: 45418 - DNA, 395 bp, Gossypium hirsutum
  Clone ID: LIB3196-014-P1-M1-B6
atccggggagcgaatgaatagggccgcgcagaccaaggcgtccgatccacgcgcgctccacacccggaccctctccaagttggaaaggacaaaaagaaggcaataaatgctaaaaagggagagaaggggagctggatcgagcggcaactcccagcctctgctggaacagagaggggagggagggagccggagcgagcgagcgcgcgcgagggcgagccctgcacgtaaagaaactgacacccggaccccccacttctcctgcacgttgctggcaatcagatcgcgtttaagcaatttcctgagcccaagaatagcaatgagtcgggagactttcgcgggctgaaattgggagcttcaagcacttttgtcccccacattttttttttttttttttt

SEQ ID NO: 45419 - DNA, 329 bp, Gossypium hirsutum
  Clone ID: LIB3196-014-P1-M1-B7
tagtcactcgccctgtgcgcaatcaccgatcaaagctgaagatgggaagccttggaaaagcaatatacactgtcggattctggattcgggagaccggtcaggctctcgatcgccttggttgccgcctacaaggcaactatttcttccaggagcaactttctaggcatcggactctgatgaacgtatttgataaatctcctctggtggacaaggatgcattcgtagcccctagcgcatctgtcattggcgatgttcaggtgggaagaggatcttctatttggtatggatgtgttttaaggggggatggcaacagcattagtgttggatct

SEQ ID NO: 45420 - DNA, 245 bp, Gossypium hirsutum
  Clone ID: LIB3196-014-P1-M1-B8
taggtactggccctgggaggaatgaccaaggaagggtgcataactgaggactgggatagtatctttacagtggaggatcttggattctataaaatgaccaggatgaacatcaattttgagggcgtaaactagactactattgataggtgaagccacttaatagggacctgtatctctggttcgttgatagtttataacctcctgagtgcaggtatgaacaagttgctgataaatcatgtgccata

SEQ ID NO: 45421 - DNA, 330 bp, Gossypium hirsutum
  Clone ID: LIB3196-014-P1-M1-C1
atgccgcccgttcagcccatcaccccagctccccctcagccccgcgcagcccagctgaccccaccgactggggagggcagacctccccccgccgcactggcttctccttctccacccaggagcctagaccccagacccagaatcttggcacccctggtccagctctgtcccaccctcgaggtcccagccatcccctggacctggggacctcttctcctaacgcctctcagatacactggaccccgtaccgggcgatgtaccagtacaggccccagaacgaagactagctggagctgcgcgagggggacagggtggatgtcttgcagcagt

SEQ ID NO: 45422 - DNA, 254 bp, Gossypium hirsutum
  Clone ID: LIB3196-014-P1-M1-C10
aagaagcaaaaataaattaactaaaaaatttattaaaattggcaggaaaaaatttatatggagagtttatatatgttttggctaagccagactatcatctattcctaatctgcatttggggggtccttttttcctccttccttccaagttttaggagaggaaacccagtaaggagtggttgccttcctgcctaaaaggtgggggtttattgataaagccaggtgagaaaaacctcctcattggccaggtccatt

SEQ ID NO: 45423 - DNA, 302 bp, Gossypium hirsutum
  Clone ID: LIB3196-014-P1-M1-C11
cccaagcgtccgatgtggtaacttgaaaataagactcattaaagtgtttggaatatatatgtcatctccttaatagcttggtacaacagacgatgattttacaaagataaaacattggtactccattctgaccttgctctacaaaagctattatatatgataatctacaatgttggtgcttacatcatgttttacggacaaaattggactagataatatttaattgaatacttaattaacctgcaacttaattgctatgattttcggtgatttatcaaagtttagccactactactgtgcaa

SEQ ID NO: 45424 - DNA, 145 bp, Gossypium hirsutum
  unsure (1)..(145): unsure at all n locations; Clone ID: LIB3196-014-P1-M1-C12
cactatanaacaagcatgtacaaaaaagcaggctgttcccgggcccgttaccccaagatcaggacctgccaacccactagagcccggttcttaagctttaccaggaacatgccatcgtgttttgtcaaataaacatgtccgatta

SEQ ID NO: 45425 - DNA, 286 bp, Gossypium hirsutum
  Clone ID: LIB3196-014-P1-M1-C2
cggacgcgtgggctcgtgacaggtgtaggaccataccagaacctgttggatcacttggctgaccctttcaacaacaatgtcttgactaacctcaagttccattagatgaaagtgcctatatttgttccatggaactatccccccggctaaaagctccattgccaaatccctttctgctcctttcttgatctcagtaaaacatgtgtaaatttattctgtaatctgcgagaaagaactgaaatagactttgttaatgccactgtaatatcatgagcttctctttcaa

SEQ ID NO: 45426 - DNA, 377 bp, Gossypium hirsutum
  Clone ID: LIB3196-014-P1-M1-C3
acaagaacaaagaagggtttggttttgatttgagagagaatcgaagaaggaatggagaagccaaggcaaatctcagcaatggaggcattcgagaaattggagaaggtgggagagggaacctacggaaaggtatacagagcaagagagagagcgacggggaagatcgtagccttaaagaagactcgtctccatgaggacgatgaaggcgttcctcccaccactctccgcgaggtctccatcttgcgcatgctctctcgggatcctcatgtcgtcagatagatggatgttaaacaaggacaaaacaaagaaggaaagacggttctatacttggtttttgagtacatggatactgatctcaagaaatacatccgctcatt

SEQ ID NO: 45427 - DNA, 277 bp, Gossypium hirsutum
  Clone ID: LIB3196-014-P1-M1-C4
caagtttgtacagaacagcaggctaggaccggcccggaactccagggattggtgagagaccatgccacgctgtagcagacctcctgacagtgagtgagactgccaatgagccccctcaagatgaaggtaattgcttcaattcaccccgcaacctggccatggaggcaacctacatcaaccacaatttctcccagcagtgcttgagaatggggaaggaaagatacaacttccccaacccaaacccggttggagaggtcgacataaagatgaatgaaat

SEQ ID NO: 45428 - DNA, 56 bp, Gossypium hirsutum
  Clone ID: LIB3196-014-P1-M1-C7
tccttccgttaaaaatttattataattttcctttgaaataattatttatacatata

SEQ ID NO: 45429 - DNA, 385 bp, Gossypium hirsutum
  Clone ID: LIB3196-014-P1-M1-D1
tcgcccacgcgtgcgaaaaaattatttatttatttttctttacttcccattttaaatgttttccttttcccaacgaagtaaagcgacggaagaagtgacaccatctacgatgtctcagggtggcggcgccggtgccggaggaggaggtgccggtggagggggcatggagtttgatctgtcggaagagattctggcggtgataccgacggatccttacgagcaattggatctggcacgtaagataacgtcgatggctatcgcctcgagagtatcgaagatggaaacggagattgggaggatgagagcaaagattttcgaaaaggatcgtatggtttacgaattggaagataaagtatcaagattgcagcaagcgaatcatgaggcc

SEQ ID NO: 45430 - DNA, 282 bp, Gossypium hirsutum
  Clone ID: LIB3196-014-P1-M1-D10
atacttgatgccctgaactgaatcttccttggagcccaccgcgcccggccaagtgatgatgatttaaaagaaagaaggaagtgattaccatgtaaatctggatattttttgttgtaggggtgtgaggatatggtgatcgggaagggcactattgggagacttttgggtactgatgattcttggcctgagtagcaattccacaagtggttgctttgtgatattaattgagctgtatgtctcaattttatgtattcttttttttaactattgacagaaaaggtt

SEQ ID NO: 45431 - DNA, 169 bp, Gossypium hirsutum
  Clone ID: LIB3196-014-P1-M1-D12
cccacgcgtacgattctctctagatttttagaccaaaccatggatcttattcacaagttcctcaacctcgtagctcctacattcaccttcttttcatttgtctttttattgccacccttttatttcttcaacttctttctttccattttacgctccgttttcagagaga

SEQ ID NO: 45432 - DNA, 378 bp, Gossypium hirsutum
  Clone ID: LIB3196-014-P1-M1-D2
atggcaggggccttagcaatccaagaagcttaaaatgtctgctgaatcttccccttcagtgaccttatactgtggtggcaggtggaaacagtagatgtataacataaaccagtcaacagataccaaggaagcagcagccatcgaggccagaagaaatcgagaaaaagagcgacaaaaccgattcttcaatgtgcggaaccgagtcatgggggtggatgtccaggccctgaacaaccaggtgggagaccgaaagcgtcgggaagcagcagaaagaagcaaggaggcagcttatggtaccagccaggtgcagtatgatgtggtagtccagatgttatagaaggaagaggctgatcgaacacgtcagttttccaagaaagt

SEQ ID NO: 45433 - DNA, 380 bp, Gossypium hirsutum
  Clone ID: LIB3196-014-P1-M1-D3
cccacgcgtccgatggctctatgttttcagatgggcagcacaggcccgtctcaagccctgcaatgaactctttggtttcaaaagcaaatggttttccatcttcaaggaatcaaaacttcagatcgaattctaattacatgggactgcaccaccctgggacaatgtccggcatgggcacagctcatggttatgtcaatagaatgtacccaaacaaaccatatggccagtatgggaccacattcagatctggaatgggctttggatctaatggttatgatttgcgaacaaatgaaaggggttggttggcagacaacaagtacagaccaaggggacggggcaatggttattttggttcaggcaatgatatcatggacggtttt

SEQ ID NO: 45434 - DNA, 242 bp, Gossypium hirsutum
  Clone ID: LIB3196-014-P1-M1-D4
cccacgcgtccgcttatgctggatgctcttttatgaattttcctttggtgtttctcaaattttgttatacttaaaacttattacttgataattttattcaaggattttttattcctttttaagattcatgacatccttttggcttctgcatgtgattatttggttcgtatattatacatgtatatgtaaccacggagtagctattaaaggttttttttgcgaaaattattaataaaatatag

SEQ ID NO: 45435 - DNA, 181 bp, Gossypium hirsutum
  Clone ID: LIB3196-014-P1-M1-D5
gtgagtatgcgaacacttgtgaggagaaaaccgataggttatttgaggcccatgggcaactccatgaactttagatctgaatagtccatatttttctttaatagattgcatcatacctttataccaattattacttacttttgactgctgcatgttagtattttgttcgtctatgatacat

SEQ ID NO: 45436 - DNA, 386 bp, Gossypium hirsutum
  Clone ID: LIB3196-014-P1-M1-D6
atgcctgctgctgctgggtgctgtagaatctggtaaaagcaccattgtgaagcagatgacgatcctgcatgctaatgggtctaatggagagggcggcgaacaggacccgcaggctgcaaggagcaacagcgatggtgcgaaggcaaccaaagtgcaggacatcaaaaacaacctgatagaggcaatggaaaccattgtggccggcatgagcaacctggtgccccccgtggagctgtccaaccctgataaccagttcagagtggactacattctgagtgtgatgaacgcgcctgactctgactttcctcccgaattctacgagcatgccaaggctttgtgggaggaccattgagtacgcgcctgctatgaacgcttcaacgagttcc

SEQ ID NO: 45437 - DNA, 278 bp, Gossypium hirsutum
  Clone ID: LIB3196-014-P1-M1-D7
cccacgcgtccgcttatccattatggtatgaattgttacatatctggaaaaataaaatataggattgatggtaaccatctctggaaggattcaaatgttgcctggtactatgagttgaggttctaagccattgagtgcttggtggtgattggtaaaacccctttgctttcgaacctcttgtcctctgtctctatggttttctgatttcagttctttattcttaaaaatcaaatctctaatttggttaaattatattgattgtggaaatttgttttatt

SEQ ID NO: 45438 - DNA, 350 bp, Gossypium hirsutum
  Clone ID: LIB3196-014-P1-M1-D8
tccacgcgtccgcttatccattatggtatgaattgtttcatatctgcaaaaaaaaaatataacattgatggtaaccatctctggaaggattcatatgttgcctggtactatgaattgaggttctaagacattgagagcttgaaggtgattggtaaaacctctatgcttttgaacctatttggctatatctctatggttatctgatttcaaccttttattattaaaaattaaatctctaatttgtttaaattatattaattgcggaaatttgtgatattaccattgaaaaaacaatatgtgtagttatttacacaatgtataaccatgattatagtgaatttgttattttt

SEQ ID NO: 45439 - DNA, 381 bp, Gossypium hirsutum
  Clone ID: LIB3196-014-P1-M1-E1
gttatatatatgtgatttatttggtaataggaaatttgttaaaatgcttagtaaatggatatttggctaatgttgtgtatataaattacttaaaatattaactttaaatgagtactaaaggttgtatatgaattcggccttgggagatatgttagtataaaaatgcttgaaagttaaataggtgattgctttaatgaccaaatgttccaaagaataatgcatgatctagttgaccaatatgtgttaagggaacatgaatagatatattttgatgagctattcattcggttatagtatgaaatgcaatgttaatacttaagtgctaggatgtatatgggtgctagccgaaattgaacttgaataatgatttgaacaccatgt

SEQ ID NO: 45440 - DNA, 231 bp, Gossypium hirsutum
  Clone ID: LIB3196-014-P1-M1-E10
aaccatctcactatgagggacgctggtgcaccctgctgcccccccgcaattcccgggatagcttctgcccgcacctgctctcaatcctggtctcaccatgagcctccgcctgcagagctcctccgccagctatggaggtggttttgggggtggctcctgccagctgagaagaggccgcggtgtctctagctgttcaactcggttagtctctgagggatcacctggaggcta

SEQ ID NO: 45441 - DNA, 311 bp, Gossypium hirsutum
  Clone ID: LIB3196-014-P1-M1-E11
ggaagatttgggagaaaaggtgttgccatcaactttgtaaccacagatgatgagaggatgctatatgacatccagaggttttataatgttgtaattgaggagctgccatcaaatgttgctgatctaatttgattctggttcaagctggctaggtaaatggctctctgggaatgacaaagcttaagaggtccagttacaactgggagggatttcgttcctgcacatttagttgagcttccattaccatataaaaaacccaatgttcaaaatttgatttggtgtgtgtctaagcaagaaatatctgtagtatt

SEQ ID NO: 45442 - DNA, 386 bp, Gossypium hirsutum
  Clone ID: LIB3196-014-P1-M1-E12
gaagaagagagaaaaaaaaatgaagtctcagatctgtttagcctttggaactctggccttgttgttagcttcagctttggccgatgacgtcgtcgtactgaccgaagcgaacttcgataaggaagttggtcaagatagaggagctctcatcgagttctatgctccttggtgtggacactgtaagaagctagctcctgagtacgagaagctcggggcaagttttaagaaggctaaatccgtcttgattggaaaggtggattgtgatgaacataagagtttatgcagcaaatatggtgttcaaggctacccaactgttcaatggtttcctaaaggctctttggaacctaaaaagtatgaaggaccacgcacggctgaggcacttgctg

SEQ ID NO: 45443 - DNA, 381 bp, Gossypium hirsutum
  Clone ID: LIB3196-014-P1-M1-E2
atcaactcggtgctgtaatctctgtttctcagctcactgaatctaatggctttcactcattatttgtttgcagttccaatggacacttcaattcaccccaaaatttcaattcccccttcgttttgttccactgaatccccatcttccttacctttcccttctttttcttccccttttcctccattgtctaaagctcgaaatctctctattttccccagaatcaacagagtgggacacaaagcaaaagctgagcctcgagaatctgaagtgaatatagaagctgatgcgttttctcatttcaagcatttgcttcttccaataactgatagaaatccttatctttctgaaagtactagacaggctgctgcaactactgctgct

SEQ ID NO: 45444 - DNA, 371 bp, Gossypium hirsutum
  Clone ID: LIB3196-014-P1-M1-E3
cccacgcgtccgtaactacaagacataaagaaacttaataaaacttcgaaagaaattaaaaggagatcttcgatcttgatggatatctgcttccgagttgattctaatggtgttcttctagtgttttctttgatcttctctaattgcccccgtatgtattcttctaatgggtatttatagattttagaatactcaaaaaccctaaaaattgggtatttccacgtatttggaaagtagggtgcgaaatcgacatgggctggcacattggcgtgtggctagcccgtgtgagcgtgtcaagcctgtgtgcaaatgcccagcctgcgtggatcttgaaaacaactctttttgtctaattttgacttgcttttcgc

SEQ ID NO: 45445 - DNA, 87 bp, Gossypium hirsutum
  Clone ID: LIB3196-014-P1-M1-E4
ctctccacacacttaccttaattaagcatggctccgaagctgttacaatgaatggacacacgtgaccgcttttaccgattgaccact

SEQ ID NO: 45446 - DNA, 386 bp, Gossypium hirsutum
  Clone ID: LIB3196-014-P1-M1-E5
cgaaatcattctgactatatcttacaacaatttaaatatttcaaaatatgaaactattgttgttacatagtttcttctatgggaaactagactcattaagctggaattgcatattttatccaacctctaactcaatttccacaattttttgtggattttcaaaatcaaactatggctgctgtccaaaactattttagtgtcaattgatgagactaagtttatcacaccatattaattcattttcaccacactggtaaagatacatatttatacatcataagtatagacttataatcacaaggtcatcacaaatcattctcataggcatgaattacctatttacatcttcaccaaatgtgtatcataaaccgaaatcatttctcatg

SEQ ID NO: 45447 - DNA, 389 bp, Gossypium hirsutum
  Clone ID: LIB3196-014-P1-M1-E6
atactgcaagaatgtagaccattctcagcaatcagactgtcgacattccagaaattgtcgacattaccctgaagggacgctcagttattgtgtagggtccgagaggaaccctgttgaggctctccaatcacatctatgtttaggttattgttcatgaaaagggagcttttagcgagttctatgctccttggggtggacactgtaagaagctagctcctgagtacgagaagctcggggcaagtttttaattggcaaaatccttcttgattgtaagggtggtttgtgttgaacataataattttatgcagcaaatatggtgttcaaggctacccaactgttcaatggtttcctaaaggctctttggatcctaaaaagtttgaaggaccacg

SEQ ID NO: 45448 - DNA, 327 bp, Gossypium hirsutum
  Clone ID: LIB3196-014-P1-M1-E7
atggcaactacaagtcctttggtgacaccaagtttgttcccaacttgcccaaggaaaagctggaacaggtgatcctagggagtgaggctgctcagcagcaccccgaagaagtcaggggcctctggcagacctgtggggagcttatgttctctctggagccaaggcttcgacacctcggactggggaaagagggaatcaccacctatttctctgggaattgtaccatggaagatgccaaattggcccaggactttctggactcacagaacctcagtgcctataacacccggctcttcaaaagaggtcgatggagaagggaagccccac

SEQ ID NO: 45449 - DNA, 331 bp, Gossypium hirsutum
  Clone ID: LIB3196-014-P1-M1-E8
catttatggctcctacctagttcaccttgttttaattccaaccattaattcggattctaaagctgcgttagtgtatacaatctattatgctccaagcttagcgtgtagtgattttgtatcagatttcctagcataccattggacccaagagacattcacagctcgaaattgttgtggcataggacatcaaatatgaggcagtttcttgattgtagacaaccagtttttagccttttgtttaacttagatgacatattactgtcttaatctggacaaaaaaggccttcagtattttaaataatcccacttccaatttttgaattaatctttt

SEQ ID NO: 45450 - DNA, 336 bp, Gossypium hirsutum
  unsure (1)..(336): unsure at all n locations; Clone ID: LIB3196-014-P1-M1-E9
acactatagaacaagattgtacgaagaagcaggctggtgccggggcgcggttttcggggtgggacctacgcgtccgcatttatgactaatacatagttcaccttgttttaagaacaactattaatagggattctaaagcgtgaggagtgtatacaatatattatactacaaggttaantgttagtgactgtgtataagatttcttagcataccagtggacccaagagaaattcagagtttggaatagttgagtaacagaatatcaaacttgaggcagttccatggtagaagaaaaacaggtcttatgactttcgggtaacacagatgctcaatgac

SEQ ID NO: 45451 - DNA, 383 bp, Gossypium hirsutum
  Clone ID: LIB3196-014-P1-M1-F1
tccacgcgtacgggttgatgatcagaatagggatgaatattctaggtggcggaaagacgaccggcctatgcatgaatattcttggcgggggctgagtgaccggcctaagggcgaatactctagatagtgaaaagatgactcagaataggacatgaatatttctaggtacgcagaaagatgatctgtgaccggatgaccattgtagggcagatagatctagaggcgatagtgactcgaacattcgttgacaacacgacagacttcaatgtatgatcaccacacctgatcatggatcgatgagagactatcaggattatgatttctacagaggatgtctgaagcgtgttagaaatgattcgctacctctgtggaaagaacatgtt

SEQ ID NO: 45452 - DNA, 411 bp, Gossypium hirsutum
  Clone ID: LIB3196-014-P1-M1-F12
ataagaaatcgtactcaccttcgaaaagatcaataaaagccgcaatgccagagcccagtgtgttggctggcactccaagaaaaggagatgggatgagaaagcatgccaaatgatatcggatatcaagaacgaagtgaaatgccgctgtaactacaccagtacagtgatgtctttttccattctaatgtcccccaaatcaatgacggacaaagttctggactacatcacctgcattgggctcagcgtctcaatcctaagcttggttctttgcctgatcattgaagccacggtgtggtcccgggtggtggtgacggagatatcatacatgcgtcacgtgtgcatcgtgaatatagcagtgtcccttctgactgccaatgtgtgagttatcataggctctaactttaaccctaa

SEQ ID NO: 45453 - DNA, 384 bp, Gossypium hirsutum
  Clone ID: LIB3196-014-P1-M1-F2
attgcaactcttgttggcagaggaaaacagcatgtgggtatttgtcgaccaaaatgatgccaatttgtaaattaaaatgtcacctagtggccctttttcttatgtgtttttttgtataagaaattttctgtgaaatatccttccattgtttaagcttttgttttggtcatctttatttagtttgcatgaagttgaaaattaaggcatttttaaaaattttacttcatgcccatttttgtggctgggctggggggaggaggcaaattcgatttgaacatatacttgtaattctaatgcaaaattatacaatttttcctgtaaacaataccaatttttaattagggagcattttctttctagtctatttcaagctaaaaagaaaga

SEQ ID NO: 45454 - DNA, 323 bp, Gossypium hirsutum
  Clone ID: LIB3196-014-P1-M1-F3
atggatgctccccacacaagatgacaacggtgaaccgcgcgccggacgcgaacatatgaaccgatgcagacgatgcgggggagaccatacacggacatttgtcgatgggagtgcaccaatgcggtatgggtccccccggacagaatgaccttgatcggtatcttaacgggcttttgacgttcatccagctgcaagagagcactcatgaccgctactacgacaagcttaaccttacctcgcggtcgctcgtcccgggctgtagatgcgagtgcctacccaaccaacggcatggagagacacagacttgtgggcctgaaccgcga

SEQ ID NO: 45455 - DNA, 292 bp, Gossypium hirsutum
  Clone ID: LIB3196-014-P1-M1-F5
atctggagtgcagcacgatctcagatcactgtaacctgtacctcctggggtcaagccatcctcctacctcgccctccttaggagctggggctacaggctcaagccaccataccacgtagcggttgggacattagagaaagacaggattttgccatgttggccaggcgggcctagaactcctggtctcaagtgaaccacctgcctgagcctgccaaagtgctgccattacacgcgtgagtcaccaccccagcctgcttgagatattctttccttataggataatctacatggg

SEQ ID NO: 45456 - DNA, 261 bp, Gossypium hirsutum
  Clone ID: LIB3196-014-P1-M1-F6
aggtattgccgggagtggaatcgcagttcttgtttgagtgtcggtgtcatcgacactggacaatgcaaatcttcacaaagcaccgtaagtggcaagaccatcaccttggaggttgagcccagtgacaccattgagaatgacaaggcaaacatccaatataaggaaggtatttctcctgaccagcagagttttctctttgccggaaagcatctgaaagatgggcgcaccctatttgactacaacattcaaaatgagatcacc

SEQ ID NO: 45457 - DNA, 370 bp, Gossypium hirsutum
  Clone ID: LIB3196-014-P1-M1-F7
atcacgcctgcaactgaaattaatatcccttgtacacatttaactagagttgggcagcagcatctcagtcttgcacaagagactctccgatgaggatgagtatgtttttaaacttattttttcttaaacacaacaacaaaactcttgaaagacttcaaattcttcccccttctagttttacaaggagagataaatctttccagtctgttctttggttttgatctgttaccattgtcaatgctgatccctagatgaggccttaagagggttgtgtcaatgaaaattgtttgaggcaggcctttagaaggaggcacaatttaactcacattttattaaactttgaggattttttggaacttcacatgtgaca

SEQ ID NO: 45458 - DNA, 319 bp, Gossypium hirsutum
  Clone ID: LIB3196-014-P1-M1-F8
atttcttccgaaattcaagtcgaaaaaagtctttattcactctatctcttaatacaatcgctatcaacgtagaccaccaatgttaagtttcatcttttaacaataacaagacacatctcaaacaatcattaggggtacaagccatttcatcgaaaactctctatgtgttctctagccaatattcaaccttgaccgaataatcttccgcttttcctcacaactctttagccccacattttttgatcttatctattgaaggttgttttacactttctgtattatgaggatgaagggttattagggggagcacaatacggaa

SEQ ID NO: 45459 - DNA, 375 bp, Gossypium hirsutum
  Clone ID: LIB3196-014-P1-M1-F9
atttcttccgaaattcaagtcgaaaaaagtctttattcactctatctcttaatacaatcgctatcaacgtagaccaccaatgttaagtttcatcttttaacaataacaagacacatctcaaacaatcattaggggtacaagccatttcatcgaaaactctctatgtgttctctagccaatattcaaccttgaccgaataatcttccgcttttcctcacaactctttagccccacattttttgatcttatctattgaaggttgttttacactttctgtattatgaggatgaagggttattaggtgaagcacaatagggaatggagtttgcgacgtcataggattagttcttataaattcagtaaaccaccgattca

SEQ ID NO: 45460 - DNA, 380 bp, Gossypium hirsutum
  Clone ID: LIB3196-014-P1-M1-G1
atggcggcaggaggccgtggaggtggtgggaagcacagctcgaaaagtgatgccgattctggtttcctggggctgcggcctacttcggtggacccagcgctgaggcggcggcggcgaggcccaagaaataagaagcggggctggcggcggctagctcaggagccgctggggttggaggttgaccagttcctggaagacgtgcggctacaggagcgcacgagcggtggcttgttgtcagaggctccaaatgaaaaacttttcttcgtggacactggctccaaggaaaaagggctgactaagaagagaaccaaaggccagaagaagtcactgcttctcaagaaaccccttcgggttgacctcattctcgagaacacatccaa

SEQ ID NO: 45461 - DNA, 381 bp, Gossypium hirsutum
  Clone ID: LIB3196-014-P1-M1-G10
gcccccacagctagaggaccagtggttcttcaaggtatcaattatgcttctgggggaggtgggattctcaaccacactggaaacatctttggtggtcgaatcaactttgatgcacagttggacaattttgaaaatacgaggcaagatataatctccaccattggtgtttctgcaactctagagctgcttcaaagctctcttttctcggttacgatgggatccaatgatttcatcaataactactttacacccattgtctcagctgaagagcaaaaattagtccctccacaagtgtttgtggcctccatgattgcaagattcaagctacagcttactaaactttacacttcgagtgctagaaagatttttgtggtaaatgta

SEQ ID NO: 45462 - DNA, 349 bp, Gossypium hirsutum
  Clone ID: LIB3196-014-P1-M1-G11
gtttgtgcagctgagattgatacagaaaacatatatggctgcctttgcaactgccgaggcctgcgattcaaacacagcgcttttggcaagcggtgaactgcgtgctctagaaccgattttcaagatatacgggcaacgtcgttcattctcaggacccattgtaacactcaaggtgtttgaggacaatgtcctggtgaggcagcttcttgaaacccggggtgaaggaagagttctagtcatagatggcgggggaagcaaaaggcgtgctttgatcggaggaaacttggcgcaagcggctcaaaacataggttggcctggtattgtagtgaacggatgcattcgagatgtg

SEQ ID NO: 45463 - DNA, 385 bp, Gossypium hirsutum
  Clone ID: LIB3196-014-P1-M1-G2
ctctaaagaagaggccaagaagaaggggaataaaattaacaatgtaggttggtggtttaaaccctggttctaccaacatgcgcaaacggccttaaagaagggagagtttgtagagtacattcctacaagagaatattaccacaggcacacaagatgtttgtattgggaggggaagcttatacttccattcggagatcaatggtggtttaggtttcttttgggctggttgatgccacccaaggtttccttgctcaaggctactcaaggtgaatctataagaaactattaccatgagatgcatgtcattcaagacatgcttgttcctctttacaaggttggggatgcccttgagtgggtccaccatgagatggagatctattccatt

SEQ ID NO: 45464 - DNA, 400 bp, Gossypium hirsutum
  Clone ID: LIB3196-014-P1-M1-G3
atggagagagcagctctgagctgtggtctgcaggccctgggttaaaagtgccaccagacctaagcgaagccactcagagggctgagcctcctaaggggcagagcagtcctattcctgttgctagggctgccaggaagcccaaagacatgcagtgtgctaggagctggcccttgagatcagccactgggtcccagcaggccagtgctggctccgtcccgtgccatggccctcgggaactgctgggcacactgctctgtggccgcgggaggtcatgtggaagaactaggggcatgaatgctcacaggatctcaaggcctgcctgttggtgaccctgggtccttgaagccgagggtcagagcctctgtctctggctgctgcctcagggcaggggcctgggaca

SEQ ID NO: 45465 - DNA, 391 bp, Gossypium hirsutum
  Clone ID: LIB3196-014-P1-M1-G4
atttaccttgtcaccaacggaagaggaacgcttacgttcttgacacatgaaaacaaagagtcttacaatgtagtaccgggagttgtagtcagagtcccagcaggaaacactggggtactgggcaacccaggccaccagggaaaggttattattagaagggtttaacggcctggtaattaccctggacaattcgaggaattcttcccagctggaagccaacgccctcagtcatatctccgagcctttagtcgtgaaattcttgagcctgccttcaatacacgaagtgagcagctagaccagctgtttggtgggaggcaaagccaccgaaggcagcagggacagggaatgttccgttaagccagccaagaacaaataagggcattgagccaag

SEQ ID NO: 45466 - DNA, 292 bp, Gossypium hirsutum
  Clone ID: LIB3196-014-P1-M1-G6
tttctggatcggcccacgagaggtgctgcagcagctggagactcacaagtcacatatatagctgcctttgctgctgaacgcagaccgtggctcaaacacagagctgtttgcaagcgaacaactgcgttctgtagaaccgattctcacgatactcgctgctaggccgcctgcctgaacccaactgggcccgatagctggagctctgtgcccgcttcctggaagggaatgagctgaaccccgactggtaggactatctccagtttttgatcacacaggcagccataccccctgc

SEQ ID NO: 45467 - DNA, 392 bp, Gossypium hirsutum
  Clone ID: LIB3196-014-P1-M1-G8
atctgtcactctgggcatcctgattgctggccaggtctctggtcccatgtcccctctgcccagaggcccacctgaaccctgccgtgacctttggcatgtgcttcctgattcgtgagccctggatcaagctgaccgcctataccctggcacagacactgggagccttcttgggtgctggaatcgtttctgggatgcattatgatgcaatctggcgctttgtcgacaaccagatctgtgtttagggccccaatggcacaactggcatctatgctacctacccctttggacacttggatataatcaatggcttctttgaccagttcataagcacaggctccctcatagagtgtgagctggccattgttgacccctacaacaacccagttccccga

SEQ ID NO: 45468 - DNA, 383 bp, Gossypium hirsutum
  Clone ID: LIB3196-014-P1-M1-G9
atcggacactctgggcatgctcattgctgggcgggtctatggtgccatgttcactctgcccaggggcccacctgaaccctgctcctacggtgcgccatgagcttactggctcgggtgccgcggatcaagctgcccgagtcttccctggcacagacgctgggagccttcttgcctgctggaatcgcccttgggtcgcatcatgatgcaatctggggctttgccgacaaccaactttttgactctggccccaatggcacagctggcatctttgctacctacccctctggacacttgaatatgatcaatggcttctttgaccagttcataggcacagcctccctcatcgtgagaccgctggccattgttgacccctacaacaaccc

SEQ ID NO: 45469 - DNA, 385 bp, Gossypium hirsutum
  Clone ID: LIB3196-014-P1-M1-H1
ctttcatctcgtctcttctgctctcaacttggctgccttaatctacgattttccttctcgcgacgagcatggcctgggtcctccccttgcagacccgaagttgatctgaaggatctcttgtcaaaagccgcatcaaagaaggctgtaacgccccatacccgagaccgtcgccggagtcgaacacgaggtgttaatagacttaattcattacttaaacaactcaaacaatttatttttaaaattttcagtcaagctaacaatctgcgtcatagtcgcttaaaaattcatatatcgagttacgaaacttgaaatttaatttcgtaaattttcgttgaaactatactcatatatatatttacctaattttttatagaatttttggtcg

SEQ ID NO: 45470 - DNA, 396 bp, Gossypium hirsutum
  Clone ID: LIB3196-014-P1-M1-H10
ctcaacatctcgatgggccgaagcattgcgtgaaatttctggacggctggcagaaatgcctgctgatagtggatatcccgcgtatctggctgctagattagcctcattttatgaacgtgctggtaaagttaaatgccttggtgggccagaacgtacaggtagtgtgacaattgttggtgctgtttctcctcctggaggagatttctctgaccctgtgacatctgcgaccctcagtattgtccaggttttctggggtcttgacaagaaacttgctcagaggaagcatttcccttctgtcaactggcttatttcatactcaaagtactcaggggcactggaatctttctatgacaaatttgatcccgactttattagcattaggactaaggcccgaga

SEQ ID NO: 45471 - DNA, 388 bp, Gossypium hirsutum
  Clone ID: LIB3196-014-P1-M1-H11
atttaccgtaaaagtatttacatcaaatattccttttcttctggtatgataacaaagggatttgaaccatagcattgccttttggctatccaatagcactttttggcagcaaaagcaatgttaaacaaaggcttttgccatccaaaacacgttttacttttggaaccaaacaaagaaattgacagctaaatgcttttcaacatcaattttgaactgcaacagtattgctaaattagccttttataaggaactaagcatacaacacttttcaatcgcaactgttatgcattcataaggaattaagtatattgactagcatataatttgctcttgatttcgaagctgactgctaagtgcttttcaaatactaaactagtatacaatcttt

SEQ ID NO: 45472 - DNA, 485 bp, Gossypium hirsutum
  Clone ID: LIB3196-014-P1-M1-H12
aggtgacactatagaacagtttgagcaaagaacgcaagctggtgccggtccgggaccgcagggacggggaagtgctgaagtggctgtccatagccctggtgtcaaagaactagaacttaatacgacatttagggggccagcatgactgatcctcttagagttttgaagctatgctcacagcttctgagctccctcagtcaccaaagatgtgaagtatgattgctctctctctcctgaagcttaggaaactagatgatgcaatagaagactgcacaaatgcagtgaagcttgatgacacttacataaaagcctacttgagaagagcccagtgttacatggacacagaacagtatgaagaagcagtacgagactatgaaaaagtgtatcagacggagaaaacaaaagaacacaaacagctcctaaaaaatgcacagctggaactgaagaagagtaagaggaaagattactacaagattctgggagtg

SEQ ID NO: 45473 - DNA, 373 bp, Gossypium hirsutum
  Clone ID: LIB3196-014-P1-M1-H2
gtagatatggcgattaacccttctttgctctttctttcccttctttttctcttcaatggctgcctagctcgccagaccttttcgtcacagcagtcccaaaatgagtgtcaaatcaataggctccgcgcctctgcaccccagacccgaattcgctccgaagccggcaccaccgagtggtggaaccccaactgtcaacagctcaggtgtgctggtgtatctgtaatgaggcagactattgaacctaatggccttgttttgccttccttcaccaatgctcctcagcttctctacattgtccaaggaagaggtattcaaggtattgggatgcctggatgtgccgaaacattccaggattcacagcaatggcagcatc

SEQ ID NO: 45474 - DNA, 384 bp, Gossypium hirsutum
  Clone ID: LIB3196-014-P1-M1-H3
tcgtctctctctctctctctctctctctctttataaaaaaacctccggctattggggtttttggcttcgtagattcggtccgcttcatttttgtctcgttttcaaacagtaatttccttttttttttcattgttatttttcttggaattttttgaagtgtttaatccaaaaaaatggcgttagtttcattcgtcgggagggttcttttcgcttcaatgttcatcctctctgcttggcaagagttcaatgaatttggtgttgatggagggcctgcagctaaggcactcaaaccaaaattcaatgtcttctcaaagactgtgacagctcatacaggggtggaagtgccagaatttaatattaaagttctagttgctgctgctgtag

SEQ ID NO: 45475 - DNA, 280 bp, Gossypium hirsutum
  Clone ID: LIB3196-014-P1-M1-H4
attgccggcagggttggaaacaggcaggtacggaagctgagccgcagagttagctggcatctgacagaaaaacgtttgtctacagattttgagcatccgaagttgatccctgactaagtatactttgctgctccctcagcctttgaagaaatgtctgtcacgtatgatgattccgttggagtagaagtatccagcgacagcttctgggaggtcgggaactacaagcgtactgtgaagcggattgacgatggccaccgcctgtgcagcgacctaatgtact

SEQ ID NO: 45476 - DNA, 398 bp, Gossypium hirsutum
  Clone ID: LIB3196-014-P1-M1-H5
atgacacctccgtggtcctctccatggacaacaaccgcaacctggacctggacagcatcatcgccgaggtcaaggcccagtatgaggagatcgccaaccgcagccggaccgaagctgagtcttggtaccagaccaagtatgaggagctgcagcagacagctggccggcatggcgatgacctccgcaacaccaagcatgagatctctgagatgaaccggatgatccagaggctgagagctgaaattgacaatgtcaagaaacagtgtgccaacctgcagaacgccattgcggatgccgagcagcgtggggagctggcgctcaaggacgccagaaacaagctggccgtgctggaggaggccctgcagaaggccatgcaggacatgttccggctgctgcgt

SEQ ID NO: 45477 - DNA, 428 bp, Gossypium hirsutum
  Clone ID: LIB3196-014-P1-M1-H6
atgaggaagtgctgacgtgaatatatagactaccgttgtacattatcgacctggtgatgctgcctgacactgcgtgcgaactctgggaagcatacacacgtatcaacagccaaatggatcaatcacttgaaaggatatcatagattgcagatcaacttactgaaaaaagccttagtgtcatagattagtgaaaaaagagttaaatggaacgaacacaagccttccaaaaatatgtgactgtgctaaaaaaccacacctacatttgattggtgtacctgaaagtgacggacacaaaggaaccaagctgaaaacactctttagggtattatccatgaccaacctaacaagacaggtcaatatgtaaattcatgaactacagactccaccacatagatccttctgatgaagagcaaccccaagacacataa

SEQ ID NO: 45478 - DNA, 352 bp, Gossypium hirsutum
  Clone ID: LIB3196-014-P1-M1-H7
cggacgcgtgggtttagagcaaacacaactacagccaattccaaatcatgagtaggataattattctcgtgtggcttaagttttcgagaaacataggcaatcacctttccatcttgcatcaatacacaacccagaccattcaatgaggcatcattgaaaacaaaaaattctttcccagatttagtttgagtcaaaactagagcttctgttaacattgctttcaactattcaaaactctactagcatttatttgaccaaaaaaaaagtgacattcttctgtagcaattcagtcaatgggagagctatcaacaaatttcctttaacaaaccactgataatatccaaccagccct

SEQ ID NO: 45479 - DNA, 382 bp, Gossypium hirsutum
  Clone ID: LIB3196-014-P1-M1-H9
atgcattttcttgaactgatcatgaaaacctataaacctaatagacaagccacataatatttagcttcattatgcaataatcacattgcctttgtgttaatagtcacatacttacctttggaggaatgtatgggttctcagactatctcaagcagagtcctggatgtaggcaaaagtaatttatgaagtaaactttagtcgcttaatcaaactaatgatagtctaacaactgagcaagaatgctcatctgagaggtgcttaaatgggatccccagagaccattaaccactactggaactggatctagctacttatgccttactttgagtttatgcttcagaatacagtggtttgccctgggcttgaacatacccatatttgg

SEQ ID NO: 45480 - DNA, 154 bp, Gossypium hirsutum
  Clone ID: LIB3196-015-P1-M1-A1
tctaactatttggtacgctggtgcgcgtgggggccccgccgcggtttcccgggttcgacccatgcttacagacactgttaggtagcctgttgtgagtgtgaggctcagtcttcaaacttgccccgacagctcaagaaacggtcttgcttgttga

SEQ ID NO: 45481 - DNA, 361 bp, Gossypium hirsutum
  Clone ID: LIB3196-015-P1-M1-A10
cccacgcgtacgcccacgcgtacgcattgattggaaaggacccaaccgagcagactgcaattgacaatttcatggttcaacaactggatggaacccaaaatgagtggggttggtgcaaacaaaagctcggtgcaaatgccattcttgccgtgtcccttgctgtttgcaaagctggagctgaagtcaagaaacttcccctttacaagcacattgctaaccttgctggtaacagcaaagaggttcttcctgtccctgctttcaatgtcatcaacggtggttcacatgcaggaaacaaattggctatgcatgagttcatgattcttgctgtaggagcatcatcctttaaggaggccatgaaaat

SEQ ID NO: 45482 - DNA, 364 bp, Gossypium hirsutum
  Clone ID: LIB3196-015-P1-M1-A11
caacgttcctggacttggaacaagcatgagcttgccccaagcactttcaaacacacgtactgatggacttggggcgctttaccgagaaggaacagcctcatttctcaactccatggtgaataataggttcccattctcgactaagcaagttagggagacttttgttgcagcacttggttcaaacagcgctgcagcagctcaggctcgtctcttcaagcttgccaatgaaggccacctcaagcaaaggacctaagcaaacaccttttggtttgtcagtttcttgaagcattttatccactagtgtgtgctacttagattttatgttcctagtattcgacatctataatgctacagctttcatttg

SEQ ID NO: 45483 - DNA, 233 bp, Gossypium hirsutum
  Clone ID: LIB3196-015-P1-M1-A3
gacattataatggatatgccgctttgaaaccgaagtattctctttggtgtctcgaacaacctgtcccgacgcctacctgtatagatgtgggtcactaccctcatgctttcatcgtcatggttcaaaatgctttctgtatccgagataccttgagaagcttctaagctttgcaactctgagatacatctgcttatcagtcgagagatttctatacctatactattgctactttg

SEQ ID NO: 45484 - DNA, 378 bp, Gossypium hirsutum
  Clone ID: LIB3196-015-P1-M1-A4
atcgggaagtcgcggagacttcggaggtggcggatgtggctgtgagctggcgggggagaggccaacacgcggctgaaccaggctgaactgaggaaagctagaacgtcatcgtggtttacgtcttgcccttgccacagcagagactctgcctgactttggaggtgctgctgctgcctccactgtactcagacccgggtagcacaagattgtccatcctccagcagttcagtgcaacggtgtgaactcagcctgtttcagagcctccccaccatgacctccaagaagctggtgaactcggtggctggctgtgctgatgacgcccttgctggcctggtggcctgcaaccccaacctgcagcttctgcagggccaccgcgtg

SEQ ID NO: 45485 - DNA, 367 bp, Gossypium hirsutum
  Clone ID: LIB3196-015-P1-M1-A5
aaataaatgagtgttatctttctcctcctaatctctatctccatggcggataaaacgagagcctcaccttaccactctcatctcttcaaactcccttcttcttcttcaatttgatctatctgtttctttcttctttgcttcttttcaagctctattattataacagctgcctctgtttcttcttcttcctttcaattgccattagtttgattgtagctatggcttctgctgctaactgtgtagtgtattttagcagcaacactaactaccttactgtctctgaactcaaaaaccattctttgcctgctagctttgtcagcagaccacccaacaacaacactcttgggagaagaagtcgttacagtgt

SEQ ID NO: 45486 - DNA, 383 bp, Gossypium hirsutum
  Clone ID: LIB3196-015-P1-M1-A6
atccgtgaggcagaacctggagccgttgtttgagcagtacatcaacaacctcaggaggcagctggacagtatcgttggggaacggggccgcctggactcagagctgagaaacatgcaggacctggtggaagacttcaagaacaagtatgaggatgaaatcaacaagcgcaccactgccgagaatgagtttgtgatgctgaagaaggatgtagatgctgcctacatgaacaaggtggagctagaggccagggtcgatgcactgatggatgagattaacttcatgaagatgttctttgatgcggagctgtcccagatgcagacgcacgtctctgacacctccgtggtcctctccatggacaacaaccggaacctggacctggaca

SEQ ID NO: 45487 - DNA, 331 bp, Gossypium hirsutum
  Clone ID: LIB3196-015-P1-M1-A7
ttctccttcagtcgaaacctaaatcaccactcaaaccgccgattctcatcccccaaacaacaacccacacattcaagcctaggggacgacttttcagccttgagatctcctcttggctttgatttcaacaaagcaaaaggaaatctatggcgtatttacaaggtgagaccctccttcttttttttccttttctatttttgctttcgaatacaaaaacaacaaatccaaaagaatggagccgaaaaaaataaaatatctagagatttgaaccggaaatcacctttcgattttgggggccctttgggtatttcaatatgcgtgaaaatttaca

SEQ ID NO: 45488 - DNA, 204 bp, Gossypium hirsutum
  Clone ID: LIB3196-015-P1-M1-A8
cccacgcgtccgatttattattattattaagcttcttttctttggctgctgaaatttcttttcttcctggtaataatggttgcaagaaccccaccaaagcaaaggaaacttgtggtggctcctcttgatcctgtcctactcagagaaactgtaaagaaagtggaaaaatgtatggcaagattgcaagagttgcagtatacagta

SEQ ID NO: 45489 - DNA, 357 bp, Gossypium hirsutum
  Clone ID: LIB3196-015-P1-M1-A9
attcggggcatgccaaaaccagaacctgacgatgactgggttcggtctttacaaccagaacatttacccagaccatatccagaggatcttcgtggctgggaaaatcaaccatgtgagacaatgggatggccaagccaaggagttggactctggagtgtcatagaggttgttggatgagatattcaacagctacccacaagagtcttacttcgtgtctcgacagacgcagcgagcatatgaataaagagttaaaggcaataataactacatagtctcgtgcatatgcgactaatgtgaaatattctagctttaagcaagcactgaatgaaataaaaatggtgagctatgtaaaggagg

SEQ ID NO: 45490 - DNA, 153 bp, Gossypium hirsutum
  Clone ID: LIB3196-015-P1-M1-B1
atccgcgtccgccccgcgagcacagagcctcgcctttgccgctccgccgcccgttcacacccgccgccagctcgccatggatgatgatatcgccgcgctcgttgtcgacaacggctccggcatgtgcaaggccgggcttcgcgggcgacgatg

SEQ ID NO: 45491 - DNA, 331 bp, Gossypium hirsutum
  Clone ID: LIB3196-015-P1-M1-B10
caaaaatcaatggtactcagcttgctgctattctgccacttgctgtggtgcataccttgggcaacctctttacgaatatgagtcttggaaaagtggctgtttcgttcactcacacgattaaagctatggagccatttttctcagttgtgctttctgcaatgtttctaggagagttgccaactctttgggtagttgcttcccttgtaccaattgttggaggagttgcacttgcatccgtcactgaggcctctttcaattgggctggattctggactgcaatggctttcgaatttgacaaaccagtctcgtaatgttctcagcaaaaaagtca

SEQ ID NO: 45492 - DNA, 330 bp, Gossypium hirsutum
  Clone ID: LIB3196-015-P1-M1-B11
atatccccactggggaggctgtgtgtgtctacactgcaaaagaccctgacaaggagaatcaaaagatcagctaccgcatcctgagagacccagcagggtggctagccatggacccagacagtgggcaggtcactgttgcgggcaccctagaccgtgaggatgagcggtttgtgagaaacaacatctatgaagtcatggtcttggctgtggacaatggaagccctcccaccactggcacgggaaccctcctgctaacactgattgatgtcaacgaccatggcccagtccctgagccccgtgagatcaccattttgcaaccaaagccctgag

SEQ ID NO: 45493 - DNA, 301 bp, Gossypium hirsutum
  Clone ID: LIB3196-015-P1-M1-B12
cccacgcgtccggtaaattgttcaattttattaatgatttcaacctcttgtcttattatgtgagaaatagaaaaattcctaaaagaacctaagtctaaaaacttaaaatatcctaaaaaataaaataaaataaagtaaagacaagatataccccttattttatttagttgcagacccctcatgattcgacccatcttttacttcatcgtccttgttttttcttaaatctcctcgtgcattcttcgacattcgagtccacgagaatataaagtctggaaattcagacacaaaagcaaatgga

SEQ ID NO: 45494 - DNA, 389 bp, Gossypium hirsutum
  Clone ID: LIB3196-015-P1-M1-B2
atggaagctattagaagtcaaacgtccagatgcattactgctatcttagtttaaagggggaaagaaaagggaagaagaaaggaaaagagaaatccaactcctttttcatgttttgcttttgaacgatgagggtttgtgtgacaggcattcctctttgctgaggtgatagcaatggcctgagattttagcaagctcctggagtctgacgcttttgcagcactctgatcgcaactaaacatttgtctttgttttattagaagctagcgaaacaaagcaggttgtcccacgtgtataaaatacagggcagctatttcgttttctttacggagaatgatccttttggcttgtaaggccctctggtttggacaaaaaaccccactggagacgag

SEQ ID NO: 45495 - DNA, 371 bp, Gossypium hirsutum
  Clone ID: LIB3196-015-P1-M1-B3
agaagctttccagtgcatagcaaagaacgccctgaagagcggtgaagaggaagaaatatacttgcctgacaccattgacgtcgccagcagtagccaaccaaggtcaactggatgtgactgttgaagcatatgatgtgataatttttttcctgtcggtaagcattatgaatgatttggccaaaccaaccattgttatggattcacgtgggagatatactgtacattagtgtatgtgtgaggaacaaaatagtctgttaattctcttttggtgcccttgtatttgtaacgtcttaatttgtttagttttcttgttttttagtcagcagcacccaaagtatggttatttcaaaatatcaatccagggagcaact

SEQ ID NO: 45496 - DNA, 370 bp, Gossypium hirsutum
  Clone ID: LIB3196-015-P1-M1-B4
agagattgataattccacatttatcataactttgggtaccacataaatgatttgtactaaagaacgaatagtcatcttttaatgattatattcttgaaaacgttcagctacaaaatggaccactatatatatacacacatataacagttctttagctgaaaacaataagaaattaaaagctaacaaaaaaaaatcaatatatttaagatgatgtaaaggtcccatgtagaaaagaagtggagattcatgtgtaaatctatgagctgatggatgattacacactttaattagttttcagctaattaattaaaatttaatgttgttaatggttaggtttaggtatgtaatgagaaagtaggaccacgcccac

SEQ ID NO: 45497 - DNA, 368 bp, Gossypium hirsutum
  Clone ID: LIB3196-015-P1-M1-B5
tttttcttcttttctcttaccatcatcataatcatgccgatcaacgatcaaaacagacccatggctcaaaagctctacgactcagctccgtcgtctcgccaggtggctaagttcttgaccgcctcgacgttgggcgcaacgctgcttttcttgtctgggttaaccttgaccgggacggtcattgccttgataatagctacgccgttgatggttatcttcagtccggttctagtcccggccgggataaccatattcttggtgacgacggggttcttgttttcgggcgggtgtggggtggcggcattaacggcgttgtcgtggatatacaattacgtgcaagggaaacacccaccaggagctgatcagct

SEQ ID NO: 45498 - DNA, 301 bp, Gossypium hirsutum
  Clone ID: LIB3196-015-P1-M1-B6
gattcgcttcagttggaggatcgtcgggagaccattgaagattttgagtgggaggaagtggatggtagggttgatgagagggatgttttaagcgtgtttgttgatggtgatgattatatcaattcaacttcactttccattgtcgctttgattgcacctgaagatgcggcctagatcgagagcgcagctgggttggctactttggagtgtgaagttctctcccatgctaatcatttggaaacatcccccgaaatgtgtgagaacactgacccattttttgctgatcgtgatgactatcttg

SEQ ID NO: 45499 - DNA, 247 bp, Gossypium hirsutum
  Clone ID: LIB3196-015-P1-M1-B7
atgcagaatcagttgtctgggaacctgctgaggaaattcaaaaacagcaatgggtggcagaagctgtgggtggtgttcacaaacttctgcctgttcttctacaagtcacaccaggacaatcatcccctcgccagcctgcctctgctcggctactcgctcaccatcccctccgagtccgagaacatccacaaagactacgtgttcaagctgcacttcaagtcccatgtctactacttcagggcggaaa

SEQ ID NO: 45500 - DNA, 257 bp, Gossypium hirsutum
  Clone ID: LIB3196-015-P1-M1-B8
tcgatccatagtaaggccggtcttgccccggttttaatgattttcacgggtttgagatccttgtgacatgatctacctattgcgtccatttttttgagttatgatgaaagttcaagggttgaaccatgtgctaaaattgtgtattttgatgtttaatggtggagtatacatgtttatggttagagaaacaacttttgctaagtgatttttaatgacaatgcttaaaaggactaatttgtaaaagttataaaactttt

SEQ ID NO: 45501 - DNA, 344 bp, Gossypium hirsutum
  Clone ID: LIB3196-015-P1-M1-B9
ctatacccattttttttcacattttcactttcaaagttctttgttcaggttctttgttcctcttctgccgattgctaggctgcaatcattgggctctgatggttttgacttgaagtggattgaaggatttaatattggcagtgtcattgaggcaaaaattggagaggcaaaggatattggagtagttgtcagcttcgacaaatataacgatgttttaggctttatcacacactctcaattgatgcatttgctcggctatattatagaaggatgctgccaccattgacctcctgccagaaaagaatgttaccacctacttgtgttaattatttcggcccaatgca

SEQ ID NO: 45502 - DNA, 371 bp, Gossypium hirsutum
  Clone ID: LIB3196-015-P1-M1-C1
ctaatccctagattgaataaccgagacttttctctaattaccactctagggttgcattaactcgatctatggatccccttattaggtttcaccctaatccggcaaaatcttgtcaccctatttctaggcacgcaatcaactccgcttaattatgacaaaagtactcttagacagggtctattcctcctctgaataagagcatgtcttgaatcagtatcctgggatatcaaaacaagaattaagaacacataattaagaacaaattaaatatttatcatacgattcagaaaataataacaggattcgtcttaggttttattccccttaagtatttaagggatttagttcataactaaataagaaaacatctc

SEQ ID NO: 45503 - DNA, 208 bp, Gossypium hirsutum
  Clone ID: LIB3196-015-P1-M1-C10
acgggcacgcgtgggatgagccgatgctctctttcaccacccatttaactactaaaataacgtcggttatgcgggaatctcgtacactgtgtgccaacctgtggtccaaaccactactatctgatatgtgcgataacactctctttcaagccttaaatgggtctggtcacacaagttatcattcaagacgtatctacagaggcggtgc

SEQ ID NO: 45504 - DNA, 364 bp, Gossypium hirsutum
  Clone ID: LIB3196-015-P1-M1-C11
ttatttccataattaagtgaaatatgtcaatttttttttacaaaattatctaatacaaaataaatcttcgacaggaggttgatcggttaattcaataagaaatgggggttagcgctcgatttcgttggtcccatccaattcaagtgcatgcaattggattgtttccttattcaatgaaggaatttttaagttcaaccaacctattttcaaaataggaagtggataaataaaaattttcggagagtctttcatttgtccatcattataggcaacaccatccatattatctatggaattcgaacccgaactctatttatgattccttatttctatctcattagccttgttacaacttcatatcata

SEQ ID NO: 45505 - DNA, 364 bp, Gossypium hirsutum
  Clone ID: LIB3196-015-P1-M1-C2
cggacgcgtgggatatcttcaacattgtccgatcctggtccaatttgggatgctgaaccaaagtgggacactgaggctaattgggatgtggaaaatccaatcgagttaccagggccatcagatgatgttgattcaggaataaataaggaagttgtcccaagacttgaagataaatgggttttgaccaaggggccatttcttggcatcattgtgtgcaaccatgcatgcagaactgtgcaaagttctcaagtggttgctccaagagctgaacatgatgacaataccatggatatgctcttagttcatgagagtgggcggttgaagttgatgagatttttcttgctgctacagatgggttaacacc

SEQ ID NO: 45506 - DNA, 248 bp, Gossypium hirsutum
  Clone ID: LIB3196-015-P1-M1-C3
atgaaagaaaaaagaaagatgaagagaaatcaagtagcaagccctcaaataatgcaaaggatgagtgcagtgaatttcgaaactatataaggaacaatgagctcatctgccctagagagaatgacccagtgcgcggtgctgatggaaagttctatacaaacaagtgctacatgtgcagagctgtctttctaacagaagctttggaaagggcaaaacttcaagaaaagccatcccatgttagagcttct

SEQ ID NO: 45507 - DNA, 386 bp, Gossypium hirsutum
  Clone ID: LIB3196-015-P1-M1-C5
atcggggagctccgcgaggctactggtacctgcgtccgcccggcggacggctgctctggtttgtgacttccggacacgacggccatcctctccagaatgaagatcttcttgccggtgctgctggctgcgcttctgggtgtggagcgagccagctcgctgatgtgcttctcctgcctgaaccagaagagcaatctgtactgcctgaagccgaccatctgctccgaccaggacaactactgcgtgaccgtgtctactagtgctggcattgggaatctcgtgacatttggccacagcctgagcaagacctgttccccggcctgccccctcccagaaagcatcaatgttggtgtagcttccatgggcattagctgctgccagagctttct

SEQ ID NO: 45508 - DNA, 164 bp, Gossypium hirsutum
  Clone ID: LIB3196-015-P1-M1-C6
atgtcgtcccttcccccgagttctaaaatccaggggcggtgttgtgggcatcaaggtagacaagggcctggttaccctggcagggacaataggcgagactaccacccaagggtggatggtctgtctgagcgctggcccagtaaagaaggattggttgacttttc

SEQ ID NO: 45509 - DNA, 250 bp, Gossypium hirsutum
  Clone ID: LIB3196-015-P1-M1-C7
cacgcctcctagaggaggctaaagatgctgctatcctcggccaacctggaatgctggaccaaacaggggcactgaagctacatttggatgaacaaaaagcaatggagttacctacggcacgagcagacggtgcactacgaattaataaggatgctggcccaagagctgaagataaacgtggtattgaccacatggccatgactcagacatagtgcgtgcaaccatgcatgctgaacacagcaaagttgtg

SEQ ID NO: 45510 - DNA, 229 bp, Gossypium hirsutum
  Clone ID: LIB3196-015-P1-M1-C9
cccacgcgtccgataaacaattaaatattcacaaaatcatgcatattgtaacaccccaaacctggcccagacgttatggctgaatctgacgtgccacattaaagttaaaaatccatttttcattttagtgttttataaaccgacttttgttgagctaacagagtgaatggaagctaggcaccaggtaggaatctgtaacagaggaggtgagccatgaacgttgcttaag

SEQ ID NO: 45511 - DNA, 349 bp, Gossypium hirsutum
  Clone ID: LIB3196-015-P1-M1-D10
gtcaggtgtttacttccccttccgccacttacgtcggcgtctacgacggccatggtggacctgaggcttcccgtttcatcactcaacatttgttcccttttcttcataagtttgcatcagagcatggggggttatcggcagaagtaataaagaaagcctttgatgctactgaggaggagtttctgcacttagtgaaacgatcgtggccagccaggccacaaatcgcttctgttggttcctgttgtcttgttggggcaattgcaaacgatgttttatatgtggctaatcttggtgactcaagggcggttcttggccggagagtgtctccaaatggacctaataatcaagt

SEQ ID NO: 45512 - DNA, 364 bp, Gossypium hirsutum
  Clone ID: LIB3196-015-P1-M1-D11
atgcaatacgcagcattaacttggatgatctacattgatagcatggattgtgataagcacattgtttccacttcttgatatgactgagatcatatgtatctgttttagactaaattgctgatactccatgtgcacgagcttgctgaaaacacttgtaatgcatgactcataaagctgaaagtagacatagtagcacccaaaatagacaaaaatgttgatcgatactgtgaagctgctcacttacaaatacaagctctggcacacttgattacatcagatcacaacagtaattttctgtgtgaccaaatgttgctaagagttgagcatcatggccacatttcacttgatattccactactgggac

SEQ ID NO: 45513 - DNA, 331 bp, Gossypium hirsutum
  Clone ID: LIB3196-015-P1-M1-D12
ctcgataatcatcataacattgttggatttcctccatttaatttcatgaaaaatagtacatgaatatatagatcaatataacatttaattaccaaataaacacgtctatttgcttataaacttacctcggacggtacaaaatgaaatcgggcagctagtcgacaactttcgtttttccccgatccaaatctgatttctttagttcttgatctaaaaatattcaaattaagctcattcaaatatattttcattcaatttagtctaaaagcacataaataggaaaattactattttacccctgacatttacaatttttacaatttaatcccta

SEQ ID NO: 45514 - DNA, 322 bp, Gossypium hirsutum
  Clone ID: LIB3196-015-P1-M1-D2
gtcttgccttaaaaatcgtttttgtgcataccgagctatcttgtgtgacggtgctgttttctaagttagagggggggcacatatattgtatcttatagccaaagctggttcggaacttgctgatgatcgcgccggtccgatctgtaatggtatcaagtacattataaaggcgcgaattcggaggaaaagattctatgatgtgaccgacataagtcttcattcgaatgcgaccacaaagttgcgtcaagatgtgcgtgtgagactgcattatacttatctgatgattgagtcttctgttcactatcaagatgtgctcgagtat

SEQ ID NO: 45515 - DNA, 353 bp, Gossypium hirsutum
  Clone ID: LIB3196-015-P1-M1-D3
atgggcgctgcgtttattctcagaacgatctttattgataagacctgagctggccttcctatcatggatgtggaatgcattggtgaccttacaaagttggtgggaacagatacttcccttaaacaggagtttaggagcagtgggtccccatcttttggactacctcataacgttaccttgtggtgtagcacagccactccccttcagtgggagacttcaatgagttggtcacgctctcttggccttacatgtggcagttgttttcttgtttgcaggtgcggccgggtgtgtggcaacattacttcatgatgcagccatgaaccctgcagaagtggtcaagcagaggatgcaga

SEQ ID NO: 45516 - DNA, 337 bp, Gossypium hirsutum
  Clone ID: LIB3196-015-P1-M1-D4
gaaacctgtctataagccgtactagagacatattttctcccaaaatcgtatcttactaagatcacaatctctttctaaaatgcgagttcatcgggctcaaaaacatcacagacccggactctgcctttccctctaaccaccatgaatgttgtttcttctctcatgatttatcaaaatctccactgcatgcggtgcttcctctatccaaaatcgaggatgctcgtagcgccctccttctttcgccatcgtatgagccgctttgttggcctccctagagttcagtttacgtattatggttaacgcatccccttcaatgcaaacttcctggaaccccata

SEQ ID NO: 45517 - DNA, 359 bp, Gossypium hirsutum
  Clone ID: LIB3196-015-P1-M1-D5
atccgagatgcgggtcgtggcgccccgaaccctcctcctgctgctctcgggggccctggccctgaccgagacctgggccggctcgcactccatgaggtatttcaccaccgccctgtcccggcccggccgcgggcagccccgcttcatctccgtgggctacgtggacgacacgcagttcgtgcagttcgacagcgacgccgagagtccgaggatggagccgcgggcgcggtggatagagcaggaggggccggagtattgggaagaggagacgcggagagccaagggccacgcacagactgacctagggggcctggggatcctgcgcggctactacaaccagagcgagggggggtctcaca

SEQ ID NO: 45518 - DNA, 371 bp, Gossypium hirsutum
  Clone ID: LIB3196-015-P1-M1-D6
ctgaacagtactcttctttgcttgcttaaatacttgaacaaaattcatttaaagaaccaaaaatatggggaagaagatgctgaattttgaagaacagtgtaagatagtcaacttattgaaatcttcatctgagcagaaatcaatcgaagagacgctcactgaattcttcaccaatcccaagctccggcatttcaatgtctgctattctctttcactcttattgcaggacaaaatgatgctcagttctactgaacgattggttgcatttgctattcttcatcgaagctattcctctcaaaagtctgctgcaaacccatttatatcttttcttgtaaatgctgcatgtgatgagggagctgaaaattatgaaa

SEQ ID NO: 45519 - DNA, 209 bp, Gossypium hirsutum
  Clone ID: LIB3196-015-P1-M1-D7
cccacgcgtccgggaagaagaaggagaaggagaagatgaagaagaagaagacaacctcagccggcggagccggcaccagaaggaggaggagcaggggcggaaaagctcataatgcaacaaccttctctgtgccttgaacagaaacttcctggttaaagctttaaccgttgaccacgacatcattaggaaaatccaacgtgtccgaggaa

SEQ ID NO: 45520 - DNA, 339 bp, Gossypium hirsutum
  Clone ID: LIB3196-015-P1-M1-D8
gtttgaattctttttttgttaaatctgtggaggaacttccttacaatatatctgtgattcagatcagcaaggctttgccttctgttgtagctgaggctcctactccagggccaagtgagctgaatatcactggcattatgtcagcacatgggtgtaaagtgtttgctgatacccttttggctaaccctgaagccatgagaacatatgaggataatgttaatggaggattgactgtgttctgccctatggatgatccattcaaagcctttttaccaaagtacaagaacttgacagcttctaagaaagcatctttcctcgaattcttttgtgtgcctgtgt

SEQ ID NO: 45521 - DNA, 235 bp, Gossypium hirsutum
  Clone ID: LIB3196-015-P1-M1-D9
cacggacaaacctgcagatgtggcttaatgtaacagtgcagacttgaattcaaaggatgcatgccacataggcctcacattcggttcatagccgcgctaaaaccttgttgcacaaccactacttatgcctaggacatttgccataattaactccacccatgttcaagctcgtgcacataggattatgtcaggtggacacttacatattcctccaaaccccctggtttaaggtatc

SEQ ID NO: 45522 - DNA, 368 bp, Gossypium hirsutum
  Clone ID: LIB3196-015-P1-M1-E1
ggcaaaaagtgaaggagtctgttggcagcagtaagcgcaagggaattgagtcggatgaggactcacctcctagaaaagctcccacacatcgtcgcctggcagttgtttatgatagtgatgaggaatgaaacaagattacaggggaataatcgtatcctcaaacaatgaactattgacacacaactttggtggctggaaaggatgttggagctgagcttgctgctaacttcactgagttatataacactgctggagacaacttaaggtttaaatgttaattgttatatatgacttccaaattaagttgagctcagaaaagtaattgctctagaatttgaggaaaagaattgcaggcaagttattatttt

SEQ ID NO: 45523 - DNA, 364 bp, Gossypium hirsutum
  Clone ID: LIB3196-015-P1-M1-E12
ctgcctttggatcggagaagcgaatgtcgactaggtcgacaccaaattaacaggtgagagagccttcttctcttttttttaatatattagtatgacagatcaaagaaaaaataaataaataagaaatgaaagagaaaaataagagagcaaaaatagtgaatgaaccaccttgaagtatttacatcttctatttgattgctttgtatgcgtatgcgtaaaaaaaaaaggatacattgatgtttcttggctttttatagccacaacaaaagagaaaaaaaaaacaaagtttctgcttggttttttgctcttgttgctgtgtccgtcccttgtttgtcttcttttgcaggtacggaggcaacgtggc

SEQ ID NO: 45524 - DNA, 364 bp, Gossypium hirsutum
  Clone ID: LIB3196-015-P1-M1-E2
cggacgcgtgggctctttcctgcaaggaataaggaaatagttgcatcttcaaagcatcatcaggaacaccttgttgactaaaggaaacacaaatcaataaaaatgatttaagatgttcccgtgcatcttcatgtggcaatccaacatattgcccattcgaattcagcatttgaaacattactggcttgagttcaaaatttccaacttggattgctggcctaacaactcctgattgtaagtcatccacgacaggtactacaaaatctcgtatagtcctattttgtatttgaacgtcttgtggcaacggtgggtcattagtgttttggtttcgtatcgggggtatgacttcatagtttcttagtaa

SEQ ID NO: 45525 - DNA, 370 bp, Gossypium hirsutum
  Clone ID: LIB3196-015-P1-M1-E3
cccacgcgtccgaaaaatcacagaagagtttgtaagagatagcagagcaatagggtaactttgaacaagatgcggctgaagatttactatcacagctgctgatcatcaaaatcccatttcccgggttttttttgtgttttgggttgatgaaactggtgctgaagagcaaactgatactgacaggaatatggcagtgatgtttgaaattttaaggagaaagagacaagtgaaacttgaaagttttatcttgaatagaagttcatttgcacagactgcggagaatttattttctctttcattcttagttaaagatggaagagtcgaaatagtggtgcatggatctggttctcatattgtctcacctaaaaag

SEQ ID NO: 45526 - DNA, 367 bp, Gossypium hirsutum
  Clone ID: LIB3196-015-P1-M1-E4
ctttccttttgctttgctttgccccctctgttaatggagatcaatgccgtaaaccagacaaatacacccactttttacagcaaaacccagcaaaaccctttgatgggaagtgcattgcatgaagcttttcccactttccaaacaacccggggcaccaccaggaaaaggacagtctacttgaagtctcaaaacaaggattctttgagagaggaagaagaagaagaagaagaagacgacgatgatgatgatgatgagaggatagaagtaaaaagaaagattgtggcattgcaaaagatagttccaggaggtgaagcattaggggtggataagctgtttgaagaaactgctgggtatatattaactttgc

SEQ ID NO: 45527 - DNA, 291 bp, Gossypium hirsutum
  unsure (1)..(291): unsure at all n locations; Clone ID: LIB3196-015-P1-M1-E5
ctttgatatgttgatacaaggaaattatgtaagttgagactattattaaactcaagtgcgatatgtcgagaaaatagatatatcaatgttgaatttatatcagatatgtgcaagtatactaacaatgctgctgtttgatgcttatacaagtgtcaaaactgttgattgaatggcaatatatttatttatatgatgcattgaatcggtaagtatttaaattttttttaatgatctgtgaatggnagtaatgctctgaaaccctggtcttgcaacggataccggttatgggtg

SEQ ID NO: 45528 - DNA, 358 bp, Gossypium hirsutum
  Clone ID: LIB3196-015-P1-M1-E7
cgctaacagatggaagtcacaatttttaggtttatttggcactttaataaggtataaataaggaaataaaagagaaaagaagcagtcgtcaaaggatagcacaaaaatgacttaaagaacatcattgaaaccgatttccaagcaattttccatcaagattcaagggtccaagcttatttccaagggagttaaaatggatttcatttattttagtggtcatattgtattttaggtgtttattcttgcaatgaaataattctcttaacatctagggaagatgaaccttaagatgaattctattgtttgatttctagttttatgcaataaatcttagttctttggtttcaattatgaatgc

SEQ ID NO: 45529 - DNA, 74 bp, Gossypium hirsutum
  unsure (1)..(74): unsure at all n locations; Clone ID: LIB3196-015-P1-M1-E8
caacattgtctcacattgttggttttnccagccacnaanatcctattgttgtcttgaccgatgtagagtacgaa

SEQ ID NO: 45530 - DNA, 383 bp, Gossypium hirsutum
  Clone ID: LIB3196-015-P1-M1-E9
atggaggcgctgcggctgtaccagcatgcggtggagtacttcctccacgccatcaagtatgaggcccacagcgacaaggccaaggagagcattcgagccaagtgcgtgcagtacctagaccgggctgagaagctgaaggattatttacgaagcaaagagaaacacggcaagaaaccagtcaaagagaaccagagtgagggcaagggcagtgacagtgacagtgaaggggataatccggagaagaagaaactgcaggaacagctgatgggtgccgttgtgatggagaagcccaacatacggtggaacgacgtggccgggctggagggggccaaggaggccctcaaagaagctgtcattttgccaatcaaattcccacacttgtt

SEQ ID NO: 45531 - DNA, 370 bp, Gossypium hirsutum
  Clone ID: LIB3196-015-P1-M1-F1
cggacgcgtgggcagtttacaaacaaacttgaaggaatgttcaaggatattgaactatcaaaggagataaatgaatcattcaagcagtcatcccaagccaggacaaaacttcgatcaggaattgagatgagtgtccatgtcttaacaactgggtactggccaacatatccacctatggatgttaggattccacatgaattgaatgtctatcaggacatcttcaaggagttctacttgagtaagtacagtgggagacgcctaatgtggcaaaattcattgggtcattgtgtgttgaaagcagattttcccaaaggtaaaaaggagctggcagtttccctgttccagactgtagttctgatgttgttcaacg

SEQ ID NO: 45532 - DNA, 344 bp, Gossypium hirsutum
  Clone ID: LIB3196-015-P1-M1-F10
ctcatttagcccctttcattagcatcgaaatcactccagttttctttatcactgaaaaatgtcttgctgtggtggaaactgtggctgcggttctggctgcaagtgtggcagtggctgtggaggatgcaagatgtacccagacctgaacgttgccgagatgaccacaactgagactctggttcttggtgtagcaccccagaaagcacactttgagggagctgagatggaattcggtgctgagaacggctgcaagtgtggagacaactgcacctgcaacccttgcaattgtaaatgattagagaccaaagccaaagctccctggaagcagagacgcctttgtcttt

SEQ ID NO: 45533 - DNA, 296 bp, Gossypium hirsutum
  Clone ID: LIB3196-015-P1-M1-F11
caagtcccaacttggacctaaggggcagtctggtatctacgcgcgtaatataagaccaaatgaaatgaccgagatctcgttattcgatccttccttccgacgaagcattgtctaaacaaatcacaagaacacttggcgagatatggcagcgagcagtgcaaccggagcctccccggaggcgcctaagatagtgtggaacgagacccaaaggaggttcgagactgaagacaagaaagcctacatagaatacgtgttaagacatgatggcaaagtgatggacatcatccacacttttg

SEQ ID NO: 45534 - DNA, 369 bp, Gossypium hirsutum
  Clone ID: LIB3196-015-P1-M1-F12
atcgtgtattatgttaacaatgtctgcagattttgtaggaatacaaaacatggccttttttataagaaaaaagggccaatgactagaataacacatggggcaatctgtgaatatgcattataagcagcatttcagaaaagtagttggtgaaataactttcaagtcaaaaagggatatggaaaggcacttatgagtaacctctatttttttaagccttgcttttaaattaaacagctacagccatttaaggcttgagggtaataaagcttgagagtaataatgttagcttagcaaaggtttagatgtattacttcatgcatgctaccatgatagtaatgcagctcttcgagtcatttctggtcattcaag

SEQ ID NO: 45535 - DNA, 386 bp, Gossypium hirsutum
  Clone ID: LIB3196-015-P1-M1-F2
atgaaccagcccgcgaacccaggccgggagggggtttcggcctggggggaaggggattgacatgtctctcgaagacccctttttttgtagtccgaggcgaggtgcagaaggcggtgaacacggcccgcgggctataccagcgctggtgcgagcttctgcaggaaagcgcggcggtcggacgcgaggagctggactggacgaccaatgagctacggaatggcctgcgcagcatcgagtgggacctcgaggacctggaagagaccatcggtatagtggaagccaacccaggcaagttcaagctcccggccggggacctgcaggagagaaaggtgttcgtggagcggatgcgagaggcagtccaggaaatgaaggaccatatggtcagc

SEQ ID NO: 45536 - DNA, 353 bp, Gossypium hirsutum
  Clone ID: LIB3196-015-P1-M1-F3
ggggccttttgggggattggggtaaatggaatttaacaaccctaaaggttctaagaagcccggagggggagcactttctggtttgcttaagaatggaggcacatggtgggcttggcctctatggagttgccaatagtctctacaacattgatgggggggaccccgcacttgttttcaatatgattttgggcatcaaagataaggtgtattcacaggggacgcaccttatgataccatgggttgagagggctatcatatatgatgtccgcgcaagacctcatttagttgagagtactttcgggagtcgtgatctccacatgggcaagattggggttcgtgttctcactcgcccc

SEQ ID NO: 45537 - DNA, 375 bp, Gossypium hirsutum
  Clone ID: LIB3196-015-P1-M1-F4
cccacgcgtccgcatcgtttcgttgggaggcccttatattcctctcaaaactggaagaagagacggtagaaggagcagagcagatgttgtggaggagtatcttccggaccacaatgagaccatctctggcgttcttgacaggtttgccgccatgggtattgacacccctggagtcgttgccctcctaggagctcacagtgtcggcagaactcactgtgtgaagctggtgcatcgtttgtacccagaggttgaccctgccctcaaccccgaccatgttccacacatactccataaatgccctgatcagatcccagaccccaaggccgtccagtatgtgagatacgaccgtgggacacccatggtttttgataacaa

SEQ ID NO: 45538 - DNA, 333 bp, Gossypium hirsutum
  unsure (1)..(333): unsure at all n locations; Clone ID: LIB3196-015-P1-M1-F5
atcgctcacctccctcctcggcaccatgaccacctgcagtcgccagttcacctcctccagctccatgaagggctcctgcggcatcgggggcggcatcgggggcggctccagccgcatctcctccgtcctggccggagggtcctgccgcgcccccagcacctacggcggnggcctgtctgtctcctcctcccgcttctcctctgggggagcctgcgggctggggggcggctatggcggtggcttcagcagcagcagcagctttggtagtggcttcggnggaggatatggtgctggcttcggtgctggcttgggtgctggcttgggtggtggctt

SEQ ID NO: 45539 - DNA, 330 bp, Gossypium hirsutum
  Clone ID: LIB3196-015-P1-M1-F6
atggagcgatggcagccgggggtctgagccgctcggaacgcaaagctgcggagcgggtccgaaggttgcgggaggagcagcagagggagcgcctccgccaggtgtcgcgcatcctgagaaaggcggcggcggagcgcagcgccgaggagggccggctgctggccgagagcgcggacctggtaacggagctgcagggccggagccggcggcgcgagggcctgaagcggcggcaggaggaggtgtgcgacgacccggaggagctgcgagggaaggtccgggagctggccagcgccgtccggaacgccaaatacttggtcgtctacacaggcg

SEQ ID NO: 45540 - DNA, 314 bp, Gossypium hirsutum
  Clone ID: LIB3196-015-P1-M1-F7
atgcacaattggtgtggatttcaaaataagaactatagagttagacgggaaaacaatcaagcttcaaatatgggacacagcaggccaggaaagatttcgaacaatcacctccagttattacagaggagcccatggcatcatagttgtgtatgatgtgacagatcaggagtccttcaataatgttaaacagtggctgcaggaaatagatcgttatgccagtgaaaatgtcaacaaattgttggtagggaacaaatgtgatctgaccacaaagaaagtagtagactacacaacagcaaaggaatttgctgattccc

SEQ ID NO: 45541 - DNA, 203 bp, Gossypium hirsutum
  unsure (1)..(203): unsure at all n locations; Clone ID: LIB3196-015-P1-M1-F8
atctgaactttggacatttattggactgttataaatttattttatgttttatggtttgtttgtnaaaaaaaaaaaaaaaaaaaaaaaaaaaaaaaaaaaaaaaaaaaaaaacaataacataaaaaaaaaaaaaaaaaaaataccgttcagtattacaaaaaaaaaaattaaacacgcccccaaacaaaaaaaaaaatttattt

SEQ ID NO: 45542 - DNA, 161 bp, Gossypium hirsutum
  Clone ID: LIB3196-015-P1-M1-F9
ataggagtttgcaggagcaaagctggaggattcggaggtccggtccgttgcctcaaaccagtcagagatggagttctcttcacttcaagacatgcccaaggagctggatccctctgctgggctccccttggactggctgcttgcttttgtgttctttgatg

SEQ ID NO: 45543 - DNA, 384 bp, Gossypium hirsutum
  Clone ID: LIB3196-015-P1-M1-G1
atcttctctccactcagccaactgctcgctcgctcacctccctccttggcaccatgaccacctgcagccgccagttcacctcctccagctccatgaagggctcctgcggcatcgggggcggcatcgggggcggcatcgggggcggctccagccgcatctcctccgtcttggccggagggtcctgccgcgcccccagcacctacggcgggggcctgtctgtctcctcctcccgcttctcctctgggggagcctatgggctggggggcggctatggcggtggcttcagcagcagcagcagctttggtagtggcttcgggggaggatatggtggtggcttgggtagtggcttgggtggtggctttggtggtggctttgctggtggtg

SEQ ID NO: 45544 - DNA, 314 bp, Gossypium hirsutum
  unsure (1)..(314): unsure at all n locations; Clone ID: LIB3196-015-P1-M1-G10
ctgcctttggatcggagaagcgaatgtcgactaggtcgacaccaaattaacaggtgagagagccttcttctcttttttttaatatattagtatgacagatcaaagaaaaaataaataaataagaaatgaaagagaaaaataagagagcaaaaatagtgaatgaaccaccttgaagtatttacatcttctatttgattgctttgtatgcgtatgcgtaaaaaaaaaaggatacattgatgtttcttggctttttatagccacaacaaaagagaaaaaaaaaacaaaagttctgcttggntttttgctcttggtgg

SEQ ID NO: 45545 - DNA, 261 bp, Gossypium hirsutum
  Clone ID: LIB3196-015-P1-M1-G11
atcttttgatttaggcgctagatccattaataaagtatcagctcctaaaagataaaagaataatcctgtgtttccaccacagattaaatttacttcgtatgtgttcctgaaaagttagatgtcagttataataatataaactcagtctagcatgataaagtgaaaacatttgttctgtatgttctggcttccggcggggggctttgcatgtatcctatattaattttgcatgtatcctatagataatttggctcttcatat

SEQ ID NO: 45546 - DNA, 347 bp, Gossypium hirsutum
  Clone ID: LIB3196-015-P1-M1-G12
atgccgcgggagacgtggtgccgctgcgggctcgctctgcggtgcgctaggcttggtgggaaggcctgttctcgagtccgcgcttttcgtcaccgccatgtcgggaggtggtgtgattcgtggccccgcagggaacaacgattgccgcatctacgtgggtaacttacctccagacatccgaaccaaggacattgaggacgtgttctacaaatacggcgctatccgcgacatcgacctcaagaatcgccgcgggggaccgcccttcgccttcgttgagttcgaggacccgcgagacgcggaagacgcggtgtatggtcgcgacggctatgattacgatgggtaccgtc

SEQ ID NO: 45547 - DNA, 365 bp, Gossypium hirsutum
  Clone ID: LIB3196-015-P1-M1-G2
cggacgcgtgggcaccaacccacaggttgcttttgaaacaatggctgaaagaagaagaactcattctcaacagaatatcctttaaggagactcaaatcgactccgtccgtaaagaaatcacgcagctttacatcttcttcttcctcttccactccatttctcttctcctcctcttcaactcttcttcccgggactctcctgtgggtgcctgccacaggtcttggatcccatctctatgttctttactatgctccatggggatcatttgggctgttaggtataaaaccgatgtggaagggcacttggagaagctgctggaaagggaaaaagaggatgggaagctgttgggtaagtgtgtggaggag

SEQ ID NO: 45548 - DNA, 366 bp, Gossypium hirsutum
  Clone ID: LIB3196-015-P1-M1-G3
cggacgcgtgggcggacgcgtgggcggacgcgtgggcggacgcgtgggcggacgcgtgggattttttatgatttttataaaaaatttataatttttaataaattttaaatattttttatattttttattaaaatttaataatttttagactatgacatgtgatagctttaactggagaaagttaggggcggttaactttaacggtcaactgctaaagttaatgatcaaatgacattttgacagttcaagtacccaattgagtaaaaaaacagaggcttaatttcttcttcttcttcttcttttttaaaaaagtttgaagacatttttgatgtattttgaaagttcaagtactcaactgagtgcaaa

SEQ ID NO: 45549 - DNA, 93 bp, Gossypium hirsutum
  Clone ID: LIB3196-015-P1-M1-G4
cccacgcgtccggagttaaatgaaaggctgttctacaaacttctgatcgacaatgttgaggagttactgcctgttgtctataccccaactgtt

SEQ ID NO: 45550 - DNA, 374 bp, Gossypium hirsutum
  Clone ID: LIB3196-015-P1-M1-G5
tttgtctcgagacatatgccaaattgtctagagattgacctattgtgtattgagaccacaggctcaagtaattatatttatgttcttcttgtctcgagataagggcattatgtctcaagacgcactgatgtaggttgcattaaatgtgcgaaataaatactctcaacgactagaaaaactctctcaaacgtcaaaaactctctcaaacatctccaaacatccataaattaatgaaaaaaatataaatatcattcaaagacactcaaatggagacatgaaacaaatttacaaagatcaagacctaaaacccaatcaattctcgttgttgtccttatttacaaagacaacatcccactttttgtaaaatgatttaa

SEQ ID NO: 45551 - DNA, 196 bp, Gossypium hirsutum
  Clone ID: LIB3196-015-P1-M1-G6
agggattctttctgagaggcctgttggttcaaaagatgacaaatggcaagttttagaggatagtcaggatccttttgcttttgatgaagaggaattcgtgccgccaaagggggactaagcctctgggagtaaaaaaccatcccaaactaaaaagcatgggaacctggggccagaaatagagaagtccaaattgagc

SEQ ID NO: 45552 - DNA, 301 bp, Gossypium hirsutum
  Clone ID: LIB3196-015-P1-M1-G7
cccacgcgtccgcccacgcgtccgcccacgcgtccgcatggggttccaattaagccactttcttttcatttcaaaacaaagtcttcccattgcaacgcatccatttccatgtctgcagcatcacctccaccctatgattttaataatttcaggtttgaccccatcaaggagtccatcgtctcacgtgagatgacacgcaggtacatgatggacatgatcatctatgctgataccgatgtggtggtcgtcggtgccggctccgctgggctctcttgtgcctatgagcttagcaagaacccct

SEQ ID NO: 45553 - DNA, 252 bp, Gossypium hirsutum
  Clone ID: LIB3196-015-P1-M1-G8
agctgcaccgccttgctcatttgtgtgctgccgctctcagtcgtcaccacagccagccggccatcgttccgccgctgcacctgctccagaccgccactgccttctcacgctcctgctccaggccgccctgcctagctcgccggccatcgttccgccacttcccagcttgtcaccacatcctgtcgattacagcagcagcttgttgcaccgacagttgtagcctcccgaccctgcttctagggaaaagaaaac

SEQ ID NO: 45554 - DNA, 356 bp, Gossypium hirsutum
  unsure (1)..(356): unsure at all n locations; Clone ID: LIB3196-015-P1-M1-G9
aaacaatacaataataaaataaacaaaccaaatcctatttattatattaattctataatttgaattttcaaaataggattttagaaatagagatagggataggattctttttagaaatattagaaataaggaataaagaaatcatggataaatccaagcgactctttcttaaatccaagcgatcttttcgtaggcgtttgcccccgatccaatcgggggatcgaattgattatagaaacatgagtttaattagtcgatttattagtgaacaaggaaaaatattatctaggcgangtaatagattgaccttaatacaacaacgattaattactattgctataaaacaagctcgtttt

SEQ ID NO: 45555 - DNA, 366 bp, Gossypium hirsutum
  Clone ID: LIB3196-015-P1-M1-H1
gtcgagcctaaagactcaataccaccctccaaattgaggttggcaaggttgaaagccaatagcgtgtacacggccccatgcaacacctcggtgttgtatcccacaacaggaggcaatatccatcaattcaccgccgtaacaccttgtgcggtgctcgatgtactcggccctccctattctaaagaagacgatcgcgactgctcctattacaaagatttcccatactcagctttctcaaatgagggagaaactacaagagtgagtgaagaagagagagagggacttggatggctagaagaaattgaagcaccagagaatgcaatgatggatagaattgactgggtcctcaaattatagaaaactact

SEQ ID NO: 45556 - DNA, 370 bp, Gossypium hirsutum
  Clone ID: LIB3196-015-P1-M1-H10
atcaaaggtccaaggttcacttcatatactgggcacactgaagggggttcttccaccttcttaaagagcatgtggctttctttccttggttcttcccattctccaggctctggctacagttgtaccaggctgacacccgccggaagatcctcagctatgaacgccagtaccgcacatcagcagaaagaatggctgagctgagactccaggaagacctgcacattcttaaagatgcccaggttgtaggaatgacaaccacaggtgagaaactgtggagaaatttacctgttgcatctaagttcacttctggtgccagattatctaaggacaaggtaagaggaactttcttggtaggtagaggaaaatacat

SEQ ID NO: 45557 - DNA, 375 bp, Gossypium hirsutum
  Clone ID: LIB3196-015-P1-M1-H11
aatgactctgtcaccaagagcaagttcgataacttgtatggatgccgtcactctcttcccgatgggttgatgagagctaccgatgtcatgattgctggtaaggtcgctgttgtctgtggttatggtgatgtcggcaagggttgtgctgctgccttgaagcaagccggtgctcgcgtcattgtcaccgagatcgatcccatctgtgcccttcaggctctcatggaaggacttcaagttttgacccttgaggatgttgtctccgaggctgatatctttgtcaccaccactggtaacaaggacatcatcatggttaaccacatgaggaagatgaagaacaatgccattgtttgcaacatcggtcacttcgacaatgaa

SEQ ID NO: 45558 - DNA, 369 bp, Gossypium hirsutum
  Clone ID: LIB3196-015-P1-M1-H12
gttgtaaccaagaaggagttggctcaacgtccctctaatcggaaaggaaaaactagcaaaagagtccattttgtgaggaacttgattagggaagttgctggttttgcaccatatgagaagaggattactgagcttctgaaagttggtaaggacaaacgagcgctcaaggttgctaaaagaaagttgggaactcacaaaagggcaaagaagaagcgtgaggagatgtctagtgtgctccgcaagatgagggctcaccctggaggtggagaaaagaagaagtgaagctctctggtgacaagtcaccttgatgatttcattagagaactttgtttagcatatgttttaacgtattggtttgagactgaaaac

SEQ ID NO: 45559 - DNA, 386 bp, Gossypium hirsutum
  Clone ID: LIB3196-015-P1-M1-H2
atcctattttgagaaggacttttcatcaaaaccaatttaattatcttttcaagggcatgtaagtgtttagaaaaagtagtatttctgtatttgaaaatttcaaagttacagaatgaaattcaatgttttgttatgaaaatgagaagagtaaatagaagaactaaactttttctgatttcctaatgtttacaatcaaggcctgttaaggacagcacagaaattaattacaaccaatagtaacgtgcagctttgtaatattgattgaattgggactttaacttttgctttttattagcattacactggtgaaatggaaatggaattgagtaaagataaatagccactctcaatcagatgtgaagcacgattcagatatgaaagaatga

SEQ ID NO: 45560 - DNA, 385 bp, Gossypium hirsutum
  Clone ID: LIB3196-015-P1-M1-H3
atcagccttcctgagcaccttcctttctttcagccaactgctcgctcgctcacctccctcctcggcaccatgaccacctgcagtcgccagttcacctcctccagctccatgaagggctcctgcggcatcgggggcggcatcgggggcggctccagccgcatctcctccgtcctggccggagggtcctgccgcgcccccagcacctacggcgggggcctgtctgtctcctcctcccgcttctcctctgggggagcctgcgggctggggggcggctatggcggtggcttcagcagcagcagcagctttggtagtggcttcgggggaggatatggtgctggcttcggtgctggcttgggtgctggcttgggtggtggctttggtggtg

SEQ ID NO: 45561 - DNA, 394 bp, Gossypium hirsutum
  Clone ID: LIB3196-015-P1-M1-H4
tgctgccttcacaggcagtcacgatgcagatgcttcttgtttttgttcttaaaacctgtagtctaacctatttggtgtaagaagtttgaagcaagtatgatgagtttttactttttttttttttttttttggcaggttaaacccatccagagtaatggctgcggccttacccaggaccctgggggagttgcagctgtatagaatattacaaaaagccaatctactttcttatttcgatgcctttatccaacaaggtggtgatgatgtccagcaactctgtgaagcaggagaagaggagtttttggaaatcatggcactcgtgggcatggctagcaagccccttcatgttagaaggctgcaaaaagctttgagagactgggtcacaaaccctggg

SEQ ID NO: 45562 - DNA, 377 bp, Gossypium hirsutum
  Clone ID: LIB3196-015-P1-M1-H5
gacccatccatccacgcacgcgtacgactctatctacaagatgcgcgaattgctgcttcggtaattttcaagcttatggtttccgtgaaccccaacccggctcaaggtttttacttcttcgatccgatgaatatgggtcttcctggtgttaattcggccccgcctgccaatacggtggcgccgccgcttcaggttccacctactcctgccacctccggtgctggtaatactacagtgtatccggaggatcccagtaagaaaatccggaagccttacactattaccaagtctagagagagctggactgagcaggagcacgagaagtttctcgaagctcttcaattatttgatcgtgattggaaaaagattgaaacttt

SEQ ID NO: 45563 - DNA, 313 bp, Gossypium hirsutum
  unsure (1)..(313): unsure at all n locations; Clone ID: LIB3196-015-P1-M1-H6
cccacgcgtccgcaatggttaaaattcgggaggttgctactggtgaagttgttaggatcataggtgcgctaactcctgttagtgacgtgaatgcaacagaggtgattatcattagtgagactagtacaacaaaggtattggcaacgtctacgtccatgactaccttcactgcccttactcatgatttcttaaagaacttgggttcttttaggagtcagatgatgaggggaagtggacaaaaaatgcctctattagttctcaagggttaaagtccatcntantaaaaaacaccactggtaaaaaggacataatg

SEQ ID NO: 45564 - DNA, 367 bp, Gossypium hirsutum
  Clone ID: LIB3196-015-P1-M1-H7
atcggtgccgtcctttccatgaagtcaggggtggaccagacttgtgtgttctgttctgtgctgctttttgggtcttatcattgaatatcattgataactacttttaagagttccaaaatcttatatttataagtgggcagaagcaattctttgatatttgagtcacatagagacttttgaccgtttgctttctaaagccacacagtgaatggagagcttgccattgtctagttgctttcattttctttcaggtgttgagccagtgcaggttcaggaaactgtggaaaatcacttgaagagtttgctgatcaaacattttgacccccgcaaagcagattctatttttactgaagaaggagaggtgaga

SEQ ID NO: 45565 - DNA, 244 bp, Gossypium hirsutum
  Clone ID: LIB3196-015-P1-M1-H8
ggcttggaggcattaaaaagcctatttaaacaccctagaggaggactaaagaggagacagagagtagggagtaagaaattactccaagaaagtcgattgatctatctcaaaagccagattcatcatcaagattgaagatctctcctcaatttcccttcagaagttttgggttttctttatgttttgtattcattatttttctgagatgttttcctttttagttatgaactaaatcccctaaata

SEQ ID NO: 45566 - DNA, 362 bp, Gossypium hirsutum
  Clone ID: LIB3196-015-P1-M1-H9
aggacttcccaaggggtcacccatcctagtactactctcgcccaagcacacttaactgcggagttctgatgggatccggagcattagtgctggtatgatcgcacccgtcaactcttgcgcaatctattcatataaaggctgccccttatcgcacttgcgcctcgaatttaaatgcaaattcgaccaaatatcgttccaaattatttatttcacaaaacgcaaataatgaatgaggtacaccacgtggagaaaatgcaactaaaaaaaacattgtatcaaataaaacgggaggggtgcaacacgaggacttcccacgaggtcacccatcctagtactactctcgcccaagcaggcttaactgg

SEQ ID NO: 45567 - DNA, 190 bp, Gossypium hirsutum
  Clone ID: LIB3196-016-P1-M1-A1
ctggtggcaaagtgaggagaggctacctttaaccttaatgccatgaacaagctccagaccaagaaaccatggtcactctcattctcatttggacgtccccttcagcagagcactttaaaggcctgggctggaaaggaggaaaacgtggaagaaagcacaagatgcttttccttgttaggtgccaaggctt

SEQ ID NO: 45568 - DNA, 374 bp, Gossypium hirsutum
  Clone ID: LIB3196-016-P1-M1-A10
atgtgcccgcgccagagactcagccgcgctcccaccacccacacccaccgggccctcgtgcgcctgttctctaggagccagtccgcgccaccgccgcagcccagcccatggccaccctacgcagccatgaccaccaggtggaccagctaaccaacgacaaagcccgcgtcgaggtggagcgcgacaacctgaccgaggacatcatgcgcctccgggagaaattgcaggaggagatgcttcagagagaggaagccgagaacaccctgcaatctttcagacaggatgttgacaatgcgtctctggcacgtcttgaccttgaacgcaaagtggaatctttgcaagaagagattgcctttttgaaggaactccatgaa

SEQ ID NO: 45569 - DNA, 335 bp, Gossypium hirsutum
  Clone ID: LIB3196-016-P1-M1-A11
atcgcggagcctcccgaacctactcaggcgcccggagccgcgcccggagcccggctatagaggctgcagtcgcagccgggagcccgcagcccgcgccccgagcccgccgccgcccttagagggcgtcccaggccgcgccatggtgaaagtgacgttcaactccgctctggcccagaaggaagccaagaaggatgagcccaagagcggggaggaggcgcttatcatcccccccgacgccgtcgctggggactgcaaggacccaaatgatgtggtaccaaatggccaaagaaaagcctggtgttggtgcatgtgctttggactggcatttatgcttg

SEQ ID NO: 45570 - DNA, 363 bp, Gossypium hirsutum
  Clone ID: LIB3196-016-P1-M1-A12
atcgcggagcctcccaaacctactcaggcgcccggagccgagcccggagcccggctatagaggctgcagtcgcaggcgggagcccgcagcccgcgccccgagcccgccgccgaccttagagggcgtcccacgccgggccatggtgaaagtgacgttcaactccgctctggcccacgaaggaagccaagaaggatgagcccaagagcggcgaggaggcgcttatcatccaccccgacgccggcgctggggactgcaaggacccacatgaagtggtgcacaaccggccaaagaagagcctggtgttggcgcatgagctttggactggcatttatgcttgcaggtgttattctaggatgagcatac

SEQ ID NO: 45571 - DNA, 345 bp, Gossypium hirsutum
  Clone ID: LIB3196-016-P1-M1-A2
atagaagagcggaccagggctgctgccagcacccgccactcagagcgcctctgtcgctgggactctccagaactctttgctcacgagttaccaaaaaaccaaaagccaagatgttggtattgctggctggtatatttgtggtccacatcgccactgttattatgctatttgtttgcaccattgccaatgtctgggtggtttccaacgcgggaaatgcatcagtaggtctttggaataactgtaccaacactctctgcaatgggaccctgtcatacgcccatgaagatgccctgaagacagtgcaagccttcatgattctctctatcatattctctgccatatctc

SEQ ID NO: 45572 - DNA, 385 bp, Gossypium hirsutum
  Clone ID: LIB3196-016-P1-M1-A3
ggcaggatttgttaaagaatacatggccgtcgatgatgttgtaggaactgaattgcacactgttgggaaccgattcacaggcttgttatccagctccggtttgctggtcaagcacaaagctttaaaggcatactttggtgataaaaagccagatgttggccattgaagttcaagcctgcatgaccatcactttatctgcctttgcaaggaagcctatgtggtgcacaaggaagatggtagaaacaatcaaagttgtttgatgccaagggacaagtacccgaagccacttatatttcatgatgggagactagctttcttgccaacaccatttgcaacactttgcatgttcttgtggcttccattagggatagttctcgctatattt

SEQ ID NO: 45573 - DNA, 367 bp, Gossypium hirsutum
  Clone ID: LIB3196-016-P1-M1-A4
atgctcgctcgctcacctccctccttggcaccatgaccacctgcagccgccagttcacctcctccagctccatgaagggctcctgcggcatcgggggcggcatcgggggcggctccacccgcatctcctccgtcttggccggagggtcctgccgcgcccccagcacctacggcgggggcctgtctgtctcctcctcccgcttctcctctgggggagcctacgggctggggggcggctatggcggtggcttcagcagcagcagcagctttggtagtggcttcgggggaggatatggtggtggcttgggtggtggcttgggtggtggctttggtggtggctttgctggtggtgatgggcttctggtggg

SEQ ID NO: 45574 - DNA, 361 bp, Gossypium hirsutum
  unsure (1)..(361): unsure at all n locations; Clone ID: LIB3196-016-P1-M1-A6
atccaaatcccgcgacagcaagaggctcgtagcgacctgcggtgctaaggaacgcagtgctttcaaaattggcgtacgctgttcgcctctcctcccgggagtcttctacctcctcccagaagatgagggaagcacagtatgaagactttggagactcaaccgttagctccggactgctgtccctcagaccaggatccagctccggcccatccttctccccacgcttccccgatggataaaaatgcggaccctgaactgatgccaccgcctctcgaaagggaggatccgccccggttgtccccagatcctgtggctggctcagctgtgccccangagctaggggagggggacccagtttctc

SEQ ID NO: 45575 - DNA, 386 bp, Gossypium hirsutum
  Clone ID: LIB3196-016-P1-M1-A7
agcaatctcacgaccttctagtgcagcaccagttgggcaatcgatggcaccagccccacctgccagtacagttccagccatttcaaatcccgcttcagctggatttattgcttctcgggaagatgtgctaacaagagcggctgctcttggacgtggtgctgcgacaacagggttcaagaggttccttgctttaaccgaagctgccaaggaccgtaaagatggacctttcagaaagctcttcaatgcatgagtattgcaaatattcctgtgttatattctcttctctctttttggcatgtttcttttataaccttttttcttccccctccccccctctttttttctttcatacaattttgcattagaaaacaaaatgtattatgatg

SEQ ID NO: 45576 - DNA, 299 bp, Gossypium hirsutum
  unsure (1)..(299): unsure at all n locations; Clone ID: LIB3196-016-P1-M1-A8
ggatgtgaactgtccgtaccgtgctcgagtggccaactaccagcgtgacggccccatgtgcatgcaggacaatcagggtggtgctccaaattactaccctaacagctttggtgctccagaacaacaaccttctgtcctggagcatagcacccaatattctggagaagtgcggagattcaacactgccagtgatgataatgttactcaggtgcgggcattctatgtgaacgtgctgaatgaggaacagaggaaacgtctgtgtgagaacattgcangccacctgaaagatgcacaaattt

SEQ ID NO: 45577 - DNA, 204 bp, Gossypium hirsutum
  Clone ID: LIB3196-016-P1-M1-A9
caagtattttcaagatgctctgggtttctgaagttgaaaatgcagagtacgtatggagctccagttgcatttgttgatttccaggatactgcttgttcaactggtgcaatcaactctctgcaagggacaattctatactcatcaccagccggagacggcatgcgcttggaatatgcgaaatcccggatgggattgcgaaggaaa

SEQ ID NO: 45578 - DNA, 392 bp, Gossypium hirsutum
  unsure (1)..(392): unsure at all n locations; Clone ID: LIB3196-016-P1-M1-B1
cggacgcgtgggggagaccgctggtgaacttttgcataagtgccatgtatatgttaggattcatcttaatttggtacttaaagttgtagtgatcaattgaaatgaacctacctgttaattatttccgatattctgccaatttgattttggatgacttgctgaagtcaaggcctgcaatagacggatgtcacatgctcattttgctttcattgcctagtatattgttgattttcaatgtaagtaacggacaacttctcaaatttatgcagaaatgtatctcgaagtgggttaacacgcagcactcaatgacaaaaaattttagttgcagcagcggcaaggagcaaatttgcataagtctcctcggacctttgttntatttttctctttatata

SEQ ID NO: 45579 - DNA, 287 bp, Gossypium hirsutum
  Clone ID: LIB3196-016-P1-M1-B10
gatggaacgctggacgcccgcatgcccgttccggaatcgcggacgagccacgcgacgcgtccgatcattgtactctttacctaccaagatcaagaaaccttaacaatcaacaactgcgaactccatttggattaaatgacccaaaacccattaaccaaccaagcaacctggaagcaaaaaaaatggacgctgattatggtattcccagaaaacgatctgatgttaagaaactactatctcaataccaaccacagctttctccttgcctcgagggaactactgtcaag

SEQ ID NO: 45580 - DNA, 399 bp, Gossypium hirsutum
  Clone ID: LIB3196-016-P1-M1-B11
cccacgcgtccgataaccttgagattatcaatttgaagccttcttcgaatttcctcattcaagatgcaaattttcgtcaagaccctcaccggaaagaccatcacattggaggtggagagttctgatactattgacaatgtaaaggccaagattcaggacaaggaaggcatccccccagaccagcaaaggttgatcttcgctggtaagcaacttgaggatggccgcacgttggctgattacaacatccagaaggagtccacactccacttagtgcttcgcctccgtggaggaatgcaaatttttgttaagactttgactgggaagaccattacattggaaggagagagttcaaataccattgataatgttgaagcaaaaattcaagacaaggagggaatt

SEQ ID NO: 45581 - DNA, 388 bp, Gossypium hirsutum
  Clone ID: LIB3196-016-P1-M1-B12
gtgttttggtaaatctacaaaccaagggtatttcagtaattttgtaaaccaatggtatttctataatttttagaaagtcaagggtatttctgtaattttgtaaatcaggggtattttggtaattttacaaattgagggtatttcggtaatttcacaaaccagtggtattttggtaattttataaactaggggtattttggtaattctaccctataggggtatttcagtaatttcacaatcgagggtaaaatggtaattttgtaaatcgagggtaaaacagtaattctgtaaatcaagggtaaaaagtaattctataaatcgagggtactttggtaattttacaagtcgagggcatttctgtaattggtaaactaaaatattctaaaca

SEQ ID NO: 45582 - DNA, 368 bp, Gossypium hirsutum
  Clone ID: LIB3196-016-P1-M1-B2
atctggccaagctgggccatgccagtgaccgcatcatcgccctggatggagacaccaaaaattccaccttctcggagatcttcaaaaaggagcacccggaccgcttcatcgagtgctacattgctgagcagaacatggtgagcatcgcggtgggctgtgccacccgcaacaggacggtgcccttctgcagcacttttgcagccttcttcacacgggcctttgaccagattcgcatggccgccatctccgagagcaacatcaacctctgtggctcccactgtggcgtttccatcggggaagacgggccctcccagatggccctggaagatctggccatgtttcgatcagtccccacgtcaactgtcttt

SEQ ID NO: 45583 - DNA, 425 bp, Gossypium hirsutum
  Clone ID: LIB3196-016-P1-M1-B3
atgtttccacttcttgatatgactgagatttatttctctcttttagatgaaattgttgatactttaggtgaaggagcttttggaaaagttgtggagtgcatcgatcataaagcgggaggtagacatgtagcagtaaaaatagttaaaaatgtggatagatactgtgaagctgctcgctcagaaatacaagttctggaacacttgaatacaacagaccccaacagtactttccgctgtgtccagatgttggaatggtttgagcatcatggtcacatttgcattgtttttgaactactgggacttagtacttacgacttcattaaagaaaatggttttctaccatttcgactggatcatatcagaaagatggcatatcagatatgcaagtctgtgaattttttgcacagtaataagttgactcacac

SEQ ID NO: 45584 - DNA, 73 bp, Gossypium hirsutum
  Clone ID: LIB3196-016-P1-M1-B4
atgtcatgtatgaagaggaacctttaaaggattattatacactaatggatattgcctacatttatacctggag

SEQ ID NO: 45585 - DNA, 390 bp, Gossypium hirsutum
  Clone ID: LIB3196-016-P1-M1-B5
accacgcgtacgctcattctactctttacctaccaagatcaagaaaccttaacaatcaacaactaccaactagatttggattaaatgacccaaaaccaatcaaccaaccaagcaaccgagaagcaaaaaaaatggactctgattatggcattcccagagaactttctgatcttcagaaactccgatctcaataccaaccacggcttcctccttgcctcgagggaactactgtcagggttgagtttggtgataccactacatctttagacccggctgatgctcataccatagcccgagcttttcctcacacttatggcaagcccttggctcactttctcaaggcaactgccaaagtacctgatgctcagattataactgagcatccaacta

SEQ ID NO: 45586 - DNA, 392 bp, Gossypium hirsutum
  unsure (1)..(392): unsure at all n locations; Clone ID: LIB3196-016-P1-M1-B6
accacgcgtacgatcattctactgtttacctaccaagatcaagaaaccttaacaatcaacaactaccaactagatttggattaaatcacccaaaaccaatgaaccaaccaagcaaccgagaagcaaaaaaaatggactctgattatggcatacccagagaactttctgatcttcagaaactccgatctcaataccaaccacggnttcctccttgcctcgagggaactactgtcaaggttgagtttggtgataccactacatctttagacccggatgatgctcataccatagcccgagcttttcctcacacttatggcaagcccttggctcactgtctcagggcaactgccaaagtacctgatgctcagattataactgagcatgcaactatt

SEQ ID NO: 45587 - DNA, 371 bp, Gossypium hirsutum
  Clone ID: LIB3196-016-P1-M1-B7
ctcttaccatcatcataatcatgccgatcaacgatcaaaacagacccatggctcaaaagctctacgactcaactccgtcgtctcgccaggtggctaagttcttgaccgcctcgacgttgggcgcaacgctgatttgcttgtctgggtgaaccttgaccgggacggtcattgccttgataatagctacgccgctgatggttatcttcagtccggttctagtcccggccgggataaccatattcttggtgacgacggggttcttgttttcaggcgggtgtggggtggcggcattaacggcgttgtcgtggatatacaattacgtgcaagggaaacacccaccaagagctgatcagctcgattacgcaagaaac

SEQ ID NO: 45588 - DNA, 338 bp, Gossypium hirsutum
  Clone ID: LIB3196-016-P1-M1-B8
gacttgcacttgttatatccctcttttgccttccgaaaagagcagcaaaatcaagtaaggttgatttaaacccagcttctttatcacagagcttcttcctttctgttcttatctttttgatcaatcgtctctgcttgataatggcaactaggcttcaatttgaaaattcatgtgaagttggagtcttttccaagctgaccaatgcctactgcttggttgcaattggagggtcagaaaacttctatagtacttctagtcggagctggcagaagtcattccacctgttaagacctctattgctggcactagaataataagacgtctatgtgctggaaata

SEQ ID NO: 45589 - DNA, 278 bp, Gossypium hirsutum
  Clone ID: LIB3196-016-P1-M1-B9
gtttaggattagattcacagactttacttcctgtcggcatcacgaatacgcacgaattttggcctcatcaatttgtcctggaaaagggaaccataggcaatagtcaaagatggggtgtggtgtgtggtatggatgcaaacgaacgcacagttaaggtacaggggagaactatagctgtgaatcaaataaatggttttgatgggaagccggtggaggaaactgctagtgcttatgaacttgttgagcacccagactactcttactgttttggggatatc

SEQ ID NO: 45590 - DNA, 398 bp, Gossypium hirsutum
  Clone ID: LIB3196-016-P1-M1-C1
gaaatatctagatttctcttcatttctcttcaattccagcagctaaaaatgccataggagggttctataagctggtactccataatttttgcaccaagtgagttaatccttacctttttcttgtaatttttgtgtttctaagacttttacaactaggtcctactattaaattcattagtttttgatttcatggatgaaattgaaagtcgccatggtttaatgctgtaattttatgatgaaatagaatgaaattaaagctttaatttgtttatgagatgattttattaggtaatttcaatagaaattgatttttaggacctaattgtgaaaatgtttggaattaaagtctattgctgaaattttgattcctaaaagcgtgaagctagtttaaggtgata

SEQ ID NO: 45591 - DNA, 358 bp, Gossypium hirsutum
  Clone ID: LIB3196-016-P1-M1-C10
ctttttaaaagcttttgcttgtaattttaatggctaccctcattgctcctgaacatacttcagctgttgaagatgctgaaaagcttcaaaaagcttgtaaaggatgggggacagatgagaaggcaataatttcagtgttgggtcacagaaatgcagttcaaaggaagcaaatcaggcttgcttatgaagacctttaccaggaagatctcatcaagcgtcttgaatcagagctttctggtgatttcgagaaagcagtgtatcgttggatattggatccagcagaccgagatgccgtgttagctaatgttgccataaagaaattaagccctgatcaccatgtgatcgttgaaatttcatg

SEQ ID NO: 45592 - DNA, 363 bp, Gossypium hirsutum
  Clone ID: LIB3196-016-P1-M1-C11
tgcttattgtcctattgcacaaggtgcccttaccgggaaatataaaccagaaaatccgccatctggacctagaggccagatttacactccggagtttttaactaagctccaacctctccttatcagaattaaggaaataggagggaattatgggaaaactccaacacaggtggtactcaactggttaatagcacaggagaatgttgtgccaatcccaggagccaaaaatgctgcacaagctgaggaatttgcaggtgcccttggctggagactaagcaacgaagaagtggacgagctacgctcactggcatcagaaataagtcctgttatcggttttcctgtggagaagctgtaattcttttt

SEQ ID NO: 45593 - DNA, 396 bp, Gossypium hirsutum
  Clone ID: LIB3196-016-P1-M1-C12
cgcttatggggctattgcacaaggtgcccttaccgggaaatataaaccagaaaattcgtcatctggacctagaggccagatttacactccggagtttttaactaagctccaacctctacttatcagaattaaggaaataggagggaattatgggaaaactacaacacaggtggtacttaactggttaatagcacaggagaatgttgtgccaataccaggagccataaatgctgcacaagctgaggaatttgcaggtgccctttgctgtagactaagcaacgaaaaagtggacgagctacgctcactggcattagagataagttctgttataagatttacttgggagaaactgtaattatttttgctccaattaaagatgacttaactcttgaatga

SEQ ID NO: 45594 - DNA, 374 bp, Gossypium hirsutum
  Clone ID: LIB3196-016-P1-M1-C2
atcagtgctggacttcttgactgatcagttggtctgtctagatggtgatgcatatatatcatcaccgaactgtgaaactggcctacgcttaaaataacattaactggcgtgttataactggtgcttcctgctaacacagagctttaattacaactatgagccaccacgcctgtgcctacagtaatgattcacataggcaagtatgtactgggattcccattcatgtgaaatgccgggtttgggggacacctcttgctggaagacctggatagaggcctggagattaaccagcttttgccacatcaaacggaaatacggggtcggactgagtggctctctataggtactgaaagcttcagggcaactgatgcatg

SEQ ID NO: 45595 - DNA, 405 bp, Gossypium hirsutum
  Clone ID: LIB3196-016-P1-M1-C3
accccattagagccgcgtgggagggttggtttccaacatcaaatgatgactatggcctgctactcgaggacgatatcgaagaatatccttactactatctatggatcaaatatgctctcttagcctaccattatgaccctcaaatatcacttaccgagctctcatcgatctctctttacactcctcggatagttgaagtcgtgaaagaaaggccgaaatggaatccaaccgactttttcaaacgcattcacccaaacacaccgtatcttcaccagctaccttgtaattggggtgctgttttcttccccaaacattggagagaattctatgtgtatatgaacatgagggtgacaaaagatgccaaatcaaatccagttcaaatcccaaagtctagaacaaatggat

SEQ ID NO: 45596 - DNA, 398 bp, Gossypium hirsutum
  Clone ID: LIB3196-016-P1-M1-C4
tgttgctcagaaaaaaaatagcttgtgctgaatttacgattatgttgtaaaccttgataaaactatttgagttgcttataagctatcgattaaatattggtaatcaagtaccaaatccgtactaaggtgaagatatgagccgggaatgactagtatacctagacaattttgttacgatgaatgtgaaagagaatgtatatgtgataaggccgaatggccaatgtgatgaatgtgaaagtgtgtgtatgtgataaggccgaatggccaatgtgatgaatgtgaaagtgtatgtatgtgataaggccgaatgttcaatgtgatgaatgtgaaagtgtatgtatatgtgataaggccgaatggccaatgtgatgaatgtgaaagtgtatgtatatgtgata

SEQ ID NO: 45597 - DNA, 356 bp, Gossypium hirsutum
  Clone ID: LIB3196-016-P1-M1-C5
atgggagctgggggagttccatgccttcattgtctcggacctgcgggagctgcaggatcaggcgggccagagcatcctgctgctgcggatccagaacccctggggccggcggtgctggcaggggctctggagagaggggggtgaagggtggagccaggtagatgcagcggtaacgtctgagttcctgtcccagctccaggaaggggagttctgggtggaggaggaagagttcctcacggagtttgacgagatcaccattggctacccaatcacggaggccggccacctgcagagcctctacacagagaagctgctctgccacactcgggcgctgcctggggcctgggtcaaggggc

SEQ ID NO: 45598 - DNA, 403 bp, Gossypium hirsutum
  Clone ID: LIB3196-016-P1-M1-C6
gcgacaactcttctttgtcatcatccatggctgaccgtaacacgaaccctgaccgaaaccagccttaagagagatagatacttcaccctgcaccccactaccgtaaaacagatccatcaagcacccagattgttgctgtcctcactctactccctgtcagaggctcattgcttgctatggcagcgcttacactcaccggcaccctcatcgggcttagcatcgccatacccctcttcattatcttcagcccagatattgtccctgccaccatcgtcatttccatgtcagaggctggtttcttgtcgacagtagcattctggttgacggcgctgtcttcgctcaactatggggagaagcacatgataagggctaacgcccgcgccggagttggaaaagggcaggc

SEQ ID NO: 45599 - DNA, 263 bp, Gossypium hirsutum
  Clone ID: LIB3196-016-P1-M1-C7
gcggaaatattttgataacgatgctgttgtcttgaaggacatcaccagatgaatgcaatctgagtcttgtgtgttgggttgctacctaatcacatgtgcccttgggagctaaacgtagcagggaggatctaactgaatggatgtgagactggtacgactaagttctactgacaaacaaacttcattctggacagttggggaaggtagtcaaggcacgaagcacagcacgtgcaaaggcatggaggcatgacaacacagggtct

SEQ ID NO: 45600 - DNA, 330 bp, Gossypium hirsutum
  Clone ID: LIB3196-016-P1-M1-C8
ctcactttgaatactcccattttcttattgattttgcagatcggctctctaatccttttttcgggtgtagcgatgtttatacgcttggttgttgttgaagaagtgctactaccatggctacaaagaagagcgttggggacttgaaggaagctgatttgaagggaaagaaagtgtttgttagagtcgatctgaacgttacattggatgataacttcaacataactgatgacacaaggatccctgccgctgttcccaccatcaagtatttgatgggtcatggctctaaagtcatcctctctagtcatttgggacgcccaaagggtgtcactt

SEQ ID NO: 45601 - DNA, 378 bp, Gossypium hirsutum
  Clone ID: LIB3196-016-P1-M1-C9
cggacgcgtgggcaaaattgaaaagaaaataaaagagaaaatctcacttagggttcaacactctgaattggtgaattaggtatgcgttttgcttggttttttattatttctatgtttctgtaatcggaggttcgagtattatcgaacccatgcctcaatttctaatttttttggtgattttgaaatgtgccgtggatgaattcatgagctttgtgatgttatatgatgaaataagaaagtctgatgttgggtttacatgttttgtctttggatttttgatgaaattgagtaatttgggctaaattgtaaaaatgttattttgagggactaaaatgtgaaataaatgaaatttttggacttgtatgaaagctatgaaaa

SEQ ID NO: 45602 - DNA, 409 bp, Gossypium hirsutum
  Clone ID: LIB3196-016-P1-M1-D1
ccaaaacaacgctatgacggtggtcgagtctagattgaaacttaggaattcataggaaacaaatgacatgtcattaggtatttcatgtttcgggtgctggtcttgaatgttctaccagtggctaaggtcctgcatttgttatggatactctacaactcatgtgagtagcatcgtgtagcttacattccaacctacagctcgtgtgagcaatgatataaaggaaaggttacgattatatgtttaagcacattttgtgtgagctttcctgagtatccgatgatattataggtggttcaacgggaaagaaaagatattgaaatggtaagtttcgaaatggaattattcatatgcttataaaaagatgaatgaacaaatgatgtatgttcatacagaaatgacttatcttaag

SEQ ID NO: 45603 - DNA, 362 bp, Gossypium hirsutum
  Clone ID: LIB3196-016-P1-M1-D10
cggacgcgtgggcacccatcctactactactctcgcccaagcgcgcttaactgcggagttctgatggggtccggtgcattagtgctggtatgatcgcacacatcaaatctttcgcattctatttatataaaggatacccctgatcgagcctgatcctcgaatttgaatttaaataccaccaaataacgttgcgagtgatttattccgtaaataactaattagttatacgacgcgatataaaaaaaatagaaaaaaaatgtaatgagatataaaattggattggtgcaacacgaggactttccaagaggtcacccataccagtactactgtcggccaagcacgctttactgcggagttgtgat

SEQ ID NO: 45604 - DNA, 328 bp, Gossypium hirsutum
  Clone ID: LIB3196-016-P1-M1-D11
ggcacattttcttcaaacgaagaaagctcgatgaatacaccttttaatctttcgaatccatgcaccatctcaaatctgccagttgttgcaccttctgtagctaacatgtctaatttggaagcttcaattggttttgaatcacctgctggggcacactatggatccttcacccactcaacctcttgcaaggaaatttgtaaggaaggcagatcacagattgaattagagatgaatcatggtgggaatagctcttcatcaggcgtgtcttagccaaagcagaattcccccaagaaacagcatgtacaataataaaaccgagaccgaactc

SEQ ID NO: 45605 - DNA, 390 bp, Gossypium hirsutum
  Clone ID: LIB3196-016-P1-M1-D12
atccgggatgtcgagaactgcaagaccacgtttgggcgtggaaatatgaacaggcgctttgagagcagccagaagtacaaagaggggaagtacatcattgaactcaaccacatgatcaaagacaacggctgggactgacccccgctccccgacgcatgtggctccagcccggcctggccgccagggagcgccaccggcttccctccgcccaaagggagctctggaccctcagggcccccgcagaggacggatccagctcctgtacatatattttattgcatgcactgtgaccttggggggagaacagaagggggacgacgcccccgcaccttctgcgatctggctggcttggatctcgtttttaaccccctacttccccgcttgccctat

SEQ ID NO: 45606 - DNA, 401 bp, Gossypium hirsutum
  Clone ID: LIB3196-016-P1-M1-D2
atgccccaggggtctttggacagacagcctttgggcaggcctcagtctttgggcagtcagcgagcagtgccgcaagtggtttttccttcagtcagcctgggttcacttccgtgcctgccttcggtcagcctgcttcctccacccccacatccaccagtggaagtgtctttggtgccgcctcaagtaccagtagctccagttccttctcatttggacagtcttctgccaacacaggaggggggctgtttggccaaagcaaccctcctgcttttgggcagagtcctggctttggacagggaggctctgtatttggtggtacctcagctgccaccacaacagcggcatcctctgggttcagcttttgtcaagcttcaagttttgggtctagtaatactggttct

SEQ ID NO: 45607 - DNA, 408 bp, Gossypium hirsutum
  Clone ID: LIB3196-016-P1-M1-D3
atgccctgggctccgcggcccctgcgtcctccggttagctgtgccactgcatctgagtgtcttctctccccacggctccccgagtttctaactctttctgcctcctcgcctcgaagctgttccttccccgcactcgagaatccccggaggcccggaggcctgcagcaggagcgaccatgaagaagctgatggtggtgctgagcctgatcgctgcagcctgggcagaggagcagaataagttggtgcatggcggaccctgcgacaagatatctcacccctaccaagctgctctctacacctccggtcacttgctgtgtggcggggtccttatccatccactgtgggtcctcacaactggccactgcaaaaaaccgaatctttaggttttactggggaagcataaccttc

SEQ ID NO: 45608 - DNA, 403 bp, Gossypium hirsutum
  unsure (1)..(403): unsure at all n locations; Clone ID: LIB3196-016-P1-M1-D4
ccccggagcaggcacttggtggtatttacagtgttcttaaccagaagcgtggacatgtatttgaggaaatgcaaagacctggcactccactttacaacatcaaggcataccttcctgtcattgagtcctttggattctctagcactttgagggctgcaacatcaggacaagctttcccacaatgtgtgtttgatcactgggatatgatgtcatcagacccattggaacctggctctcangcagcagcccatgtcgccgaaatccgcaagaggaaaggattgaaggaacagatgaccccactttccgagtacgaagacaaactgtaagctaagagagagtaactgtgattgtgcggcataaccttcgctgcaatttaaattttgtttctgtctggntatatttt

SEQ ID NO: 45609 - DNA, 402 bp, Gossypium hirsutum
  Clone ID: LIB3196-016-P1-M1-D5
gttgaaaaagaacagtgtaacgcttgatattgtaaatttcggtgaagatgatgaagggaagacagagaagctcgaagcgcttcttgctgctgttaacaataatgatactagtcacatcgttcatattcctgctggtcctaatgctctctctgatgtacttctaagtacacccatcttcactggggacggggaaggtggaagtggttttgcagcttcggcagcagcagctgcagctggtggcatctatggttttgagttcggcgtggatcccaaccttgatcctgaactggcccttgctcttagagtttcaatggaagaggagagagccaggcaagaagctgctgctaaaaaggcagcagaagagtcatcgaaacacgaaaagggtggggaagaacaggatgc

SEQ ID NO: 45610 - DNA, 379 bp, Gossypium hirsutum
  Clone ID: LIB3196-016-P1-M1-D6
tttagatggttttctaccccctgaacaataaataggatgaggttttactgtaattggataaagtttactcttggacattatttcaatgctaaattaaggattctatggatgtcttcagttacttaaagagaaaataatgagagcatgaagcatatctgagaatatctttcgcctttaaggtgattcattcttgtctagagggaaaatttggttgatttgggaataaagtataattgagtattcaacaccatgaagataaatcttattttggaaatctactgaccgtaataccccaagcttgccctgaatactttgattggaattggaatatatcaaaaaaagttattatttttgttgtagttaggatactaaaagaata

SEQ ID NO: 45611 - DNA, 389 bp, Gossypium hirsutum
  Clone ID: LIB3196-016-P1-M1-D7
atcggagtacgacttgactactcgcatcgcgcactttttggatcggcatctagtctttccgctccttgagtttctctctgtaaaggagatatataatgaaaaggaattattacaaggtaaattggaccttcttagtgataccaacatggtagactttgctatggatgtatacaaaaacctttattctgatgatattcctcatgctttgagagagaaaagaaccacagtggttgcacaactgaaacagcttcaggcagaaacagaaccaattgtgaagatgtttgaagatccagaaactacgaggcaaatgcagtcaaccaaggatggtaggatgctctttgactacctggcggacaagcatggttttaagcaagaatatttaaatacac

SEQ ID NO: 45612 - DNA, 351 bp, Gossypium hirsutum
  Clone ID: LIB3196-016-P1-M1-D8
aggtggtacatgaatcttgtctccataaatctgacatttatggcattttttggcgtagttgatacaatccccttccaaagtagaccaataatatccaaacctcatgatttgtctagccatcgcgaaaccattagcgtgcatcccacaaacgccttcgtgaacttcttccaagattaacttagcttccacggcgtcaatacatctcaacagtacttggtcctttcttcttttatacaagatgtccccatccaaaacatagtcgcaagctaatctccttaagttcgcttatcattttcagttacctgttctgggtatttacgatctctcacatatcgcaatatatcctgatac

SEQ ID NO: 45613 - DNA, 332 bp, Gossypium hirsutum
  Clone ID: LIB3196-016-P1-M1-D9
tatatgaaagatggtgcgccatgaagtaccggtgcgccgttcccggattgacccactcaaactggatggaagggacaccagaaccttgattaaataacatgacacgggcactgcttttagattaaaatgaatgtgatttaaacagagcttaaacgttgtttgaaaagttgttggtgattaaaataatttgaaggcgatcatttgaaatgagattaaatcgaaagtcattaaaagaccttgaactccatgacgcaaggagagttgcgtcatttaaagcctaattaatcttaacgcgtttgctaaacgcagacgaaaaattggaaagatttatt

SEQ ID NO: 45614 - DNA, 380 bp, Gossypium hirsutum
  Clone ID: LIB3196-016-P1-M1-E1
acgggttgtagtgttcatcaagaacttgattaagaacttgacaccgaaactggatgcggaaaagcaagagtgcttcaagaaaaacattgagggagcaaccaagtttttgctttcaaaattgaaggaccttcaatttttcgtaggagagagcatgcatgatgatggatgcttggtgtttgcttactacaaggatggtgctgttgacccaacatttttgtactttgcatatgcattgaaagaggtcaagtgctgaggtttgaagcaaaaaaaaaaaaaagggttgctgaagaatttaatcctttttattattgcttttgtctcttgttttcaagactctgctaaagacataaattatttgtgggttttgatggttttggttt

SEQ ID NO: 45615 - DNA, 416 bp, Gossypium hirsutum
  Clone ID: LIB3196-016-P1-M1-E10
atctcaaaaaaaaagagtcaagggctgggaaatgatgcacggattgcattgtggtttcaggtctgccagggaaaaggaaggtctcatctttttgtatatacagatgtatatatctttatgtatatacatatatacatctatgtatataaaactgcctcagtttaaaaacactgagtacctacgatacctcaacactggagatctaagtggacactgagaaatttagaaaatgaaccacagttaagaaggaaatgaatcattaccggatcaaaagtcatctatgatgaagagtttcaaaatgagcagtatccgtccaccatgaacaacactgaacaaactcagtgtttttacagagtagctacagtacctcatactgtaggtatatgtatacataagggtatgtatacatagatgta

SEQ ID NO: 45616 - DNA, 410 bp, Gossypium hirsutum
  Clone ID: LIB3196-016-P1-M1-E12
atgctattttaagttaacttttgtataacgtgtaacgtctctgtctaggttcatttttttgcatatagttgttcaatttatccagcactttttactgaaggctatcttctctccattaaattgtctttgcccctttatcaaacttcagttgactatatttatgtggatctatttctcttctctatattctgtttcactgatctgtgtgactatcttcaattagtaatatgctgtcttgattactatagatgtataataagatttgaaattgggtagtgtcattcctccaaatttgttcttctttaatattgcgttggctactctagatctcctgccttttcatataaagtttagaattagtttgttgctatctacaataaccttctgggattttgattgggactgcattg

SEQ ID NO: 45617 - DNA, 406 bp, Gossypium hirsutum
  Clone ID: LIB3196-016-P1-M1-E3
cggtgcggcctttccgggattcccgggatggaatctggacgtgaactgtgtacaaacagcttccacatatatgctgcaaaggatcttgtgagctgacactgctttaaatgaaatatggcatcagtcttaaccaatattgcatccacagattgtcgttgctaatatgccaaacgctcttggaagtgagtggccatgatgcaccaagagcggaagttcaatttgactgttatcgacgacccgtcaatgaaggaacttgtgctcagatacaatggtggcataaacatgtacgttctgctgcctgagaatgacctctgtgaaattgaaaacaaactgacctttgagaatctcatggaatggaccaatccaaggcgaatgacctctaagtatgttgaggtattttttgctc

SEQ ID NO: 45618 - DNA, 396 bp, Gossypium hirsutum
  Clone ID: LIB3196-016-P1-M1-E4
cggacgcgtgggttcttcaccaacttctattctggcttcacctccgatatccccaccttctgagtcacctcctatgtcacccagtggctcatttaactcggtgagtgaacttgctgcttctatgcgaagtttgcagctgggtaagtctaaaatgaatggtgcttgttcctggggcctgcaaatgggatcgggtttcagttctccacgtggttccacactccgacccggtttttgcagctctccttcaactccaactcgtacgccgactcggtctagcctcggtcagtttgacatctgggaattcaacgctgtccaagaggaacctgcaatggaaagagtggagtctgggagaaacctgagggcaaggatgtacgcaaaactgagcaaagaaaattc

SEQ ID NO: 45619 - DNA, 427 bp, Gossypium hirsutum
  Clone ID: LIB3196-016-P1-M1-E5
atctcggattctctgctctcctcgacggagtcctccccgcaggccagcccagagcccctggtactccatgaggagacaccgcccaccaccagcagcgactctgaggaggaacaagaagaggaggaagaaatcgatgttgtttctgtggaaaagaggcaggcccctggcaaaaggtcagagtcgggatcaccttctgctggaggccacagcaaacctcctcacagaccactggtcctcaagaggtgccacgtctgcacacatcagcacaactacgcggcgcctccctccactcggaaggactatcctgctgccaagagggtcaagttggacagtgtcagagtcctgagacagatcagcaacaaccgaaaatgcaccagccccaggtcctcggacaccgaggagaatgacaagaggcgaacacacaacg

SEQ ID NO: 45620 - DNA, 411 bp, Gossypium hirsutum
  Clone ID: LIB3196-016-P1-M1-E6
atctccagtccgcggtgccatggcccccgcccgtctgttcgcgctgctgctgatcttcgtaggcggagtcgccgagtcgatccgagagactgaagtcatcgacccccaggacctcctagaaggacgatacttcttcggagccctaccagatgatgaggatgtagtgggacccgggcaggaatctgatgactttgagctgtctggctctggagatctggatgacttggaagactccacgatcagccctgaagttatccatcccttggtgcctctagataaccatatccctgggaaggcagggtctgggagccaagtccccactgaaaccaagaaactggaggagaatgaggttattgccaagaggatctcacccattgaaacaagtgaggatgtgtctaacaaggtgtgcat

SEQ ID NO: 45621 - DNA, 368 bp, Gossypium hirsutum
  Clone ID: LIB3196-016-P1-M1-E7
atgatggcgggtgaaaaagttgagaagccagatactaaagagaagaaacccgaagccaagaaggctgatgctggtggcaaggtgaaaaagggtaacctcaaggctaagaagcccaagaaggggaagccccattgcagccgcaaccctgtccttgtcagaggaattggcaggtattcccgatctgccatgtattccagaaaggccatgtacaagaggaagtactcagccgctaaatccaaggttgaaaagaaaaagaaggagaaggttcttgcaactcttacaaaaccagttggtggtgacaagaacggcggtacccgggtggttaaacttcgcaaaatgcctagatattatcctactgaagatgtacc

SEQ ID NO: 45622 - DNA, 327 bp, Gossypium hirsutum
  Clone ID: LIB3196-016-P1-M1-E8
atggaatctggacgtgaactttctaaaacagttgccacattcatcctgcaaaagatcttgttagatgacactggtttggcttatatatgtcagacgtatgagcgtttctcccatgttgccatgatcttgggtaagatggtcctgcagctatccaaagagccttctgcccgtctgctgaagcatgtagtgagatgttaccttcggctttcagataaccccaaggcacgtgaagcacttacgcagtgcctccctgaccagctgaaagacacaaccttcgcccaggtgcttaaagatgacaccaccacgaaacgctggcttgcacaactg

SEQ ID NO: 45623 - DNA, 397 bp, Gossypium hirsutum
  Clone ID: LIB3196-016-P1-M1-E9
ttttcaatttgatttggtggttgtgctgcaaaactgttagacccattagtagtaagatttttaagcattgaggatattgatgatacctgagacgcgagtgaagtaagagcgtctacttcatgtattccagcaactcgtattcctgacactgctcggttggttgaccattggtaattgttgctggcaatcctctcgataatttcataagcctcattataagacttagaaaggagagcaccattagcaaaagcgtccactaccatcctcgtgtgagcattgagaccattataaaatgtctcaagttggatgcaatgtgggattccatgatgagggcaatttcgtaataactttttatacctttcccatgcttaatacaaggacttataatccatttgtt

SEQ ID NO: 45624 - DNA, 408 bp, Gossypium hirsutum
  unsure (1)..(408): unsure at all n locations; Clone ID: LIB3196-016-P1-M1-F1
ataccgtgtaccactgtgaggtcgagagcggagtctatttgctgaccccacagcctgcatcctgcccagaagtgtccagctgcaggggtagcctcaggaaaaccggctgctgctactcctgtgaggaggactcctgtcaggtccgcatcaacacaaccgtcctgtggcaccagggctgcaagactgaggtcaacatcaccttctgtgagggctcctgccccggagagtccaggtactcggcagaggcccaggccatgcagcaccagtgcacctgctgccaggagaggcgggtccacgaggagacggtgcccttgcgctgtcccgacggctcgactgtnctgcacacctacaaccatgtggatgagtgtggctgcacgcccttctgtgtcctgccccatggctccatat

SEQ ID NO: 45625 - DNA, 392 bp, Gossypium hirsutum
  Clone ID: LIB3196-016-P1-M1-F10
tgaattcatagagaaagcaaaggcacgtgcattgaggcgtgttgttggtgatcctttcaggaagggtgtcgaacaaggtcctcagattgacacggagcagtttgagaaagttttaagatacataagagcaggcatcgaaagcaatgcaacccttgaatgcggaggtgacagacttggaacgaaaggatactttgtccaaccaaccgttttctcaaacgttatggatgatatgctgatagcaaaagacgaaatcttcggtccagtacaatctatcctaaagttcaaggatattgatgaagtaattcgaagggcgaacaacacccgttacggtttatcagctggagttttcaccaaaagtgtagagacagcgagtaccttgactcgtgcgttaa

SEQ ID NO: 45626 - DNA, 367 bp, Gossypium hirsutum
  Clone ID: LIB3196-016-P1-M1-F11
ggtacttggagcttgggacgagcatgttgaaattaacgatactgctttaccttctaagtggatctgcgggatcggtcgatcaaaacatgtggtctctacttgtacccggtgaaaaaaatcggatcacttcttatgggttgattgagaatgattttgttataggtcatgacctattaaaagaagaaggagctctggtaggatcctgacggacagaaaaagaatgcggtaagcttgataatgatcgagtgacattgcttctttggtacgagccagggaataccttatatattatgcaaaatggatcttgttctattggcgatcatagaaatttatatgaaaaatacgaatcaaaggttgaagaaaggga

SEQ ID NO: 45627 - DNA, 444 bp, Gossypium hirsutum
  Clone ID: LIB3196-016-P1-M1-F12
acactatagaacaaggggaacgaaaaagcacgctggtaccccgccgcaatttccgggatagaacagatgctggcaaatacatgagaggagaatgaaggaacagtaccttatggctatttcagataaagatcagcagctcagtcatgtgcagaatcttataagggaattgaggtcttattcctaccaggctcagcccctcaaagcgcaataccaaagacaggcatccccagagacatcagcttccccagatgggtcacaaaatctgatttatgagacagaacttctcacgaaccagctcaatgacagcttaaaggaaattcaccaaacggaattaagaattcagcaactgaacagcaagttctctcaactactggaagagaaaaacaccctttccattcagctgtgcgataccagtcaaagtcttcgtgagaaccagcagcacta

SEQ ID NO: 45628 - DNA, 427 bp, Gossypium hirsutum
  Clone ID: LIB3196-016-P1-M1-F2
atgggacacaacatggcggccggatgctaacgctctccttcgagggaccaccacggagatcctagtgcgggaccccgcctcagggaagtggaaagcagggggacacccttcctgcgtttttcttttccgtccagtgtcggcaaggggttgtcgccagcttccgcatccaagatgaagaactataaagcaattggcaaaatatgagagggaacgttttctgaagttatgaagatgcaaagcctgagagatggaaactactatgcatgtaaacaaatgaagcagcgctttgaaagtattgagcaagtcaacaacctacgagagatccaagcactgaggcgcctgaatccgcacccaaacattcttacgttgcatgaagtggtttttgacagaaaatctggttctcttgcactaatatgtgaacttatgg

SEQ ID NO: 45629 - DNA, 366 bp, Gossypium hirsutum
  Clone ID: LIB3196-016-P1-M1-F5
atggatattttgaggggtaatgatgagactattggatttgaggatattcttaatgatccatcacaaagtgaagtcatgggagagccacacttcatggtggaatataaactcggtttactgtagtagtgtgctgttcatggaaactgagggctgcatcttgtttatagtcgtctttgtactgtaatttgatgtacacaacattaaaagtactgacacctgagaatttctgctcaagtagcatcagtgatcatttaaaatttgggggcatctttggtttacagccatgtgacaattaaaagcaactttaggggatcatgttaaagctcttaaattattttaaagacaaaggctatggctttaatataa

SEQ ID NO: 45630 - DNA, 338 bp, Gossypium hirsutum
  Clone ID: LIB3196-016-P1-M1-F6
acgattaccttctattgggagccgactgcagttgcatcttgctcaccctattcctccggttattccctgccctgtgtggatacttccttatactcctccatgtcatcaccatcgccgacgtcgtattgggttgctacgtcgccatttcgggttccaacaaacgctacttggcttacatggtgtcgatggtgctgacatcaatattcaaaggctctgtttcagttcttatcatgacccgaacgtcagatttcttggcgtacttgatgtcttatgtgaaggacgatgatggagtttgatattgaaactggctggcaggttatgcgtggctgtaatcttct

SEQ ID NO: 45631 - DNA, 351 bp, Gossypium hirsutum
  Clone ID: LIB3196-016-P1-M1-F7
cccacgcgtccgtttgcacacacttaacttaattaagcaagctcgtaagctgttttcatcaatggccgaccgtgaccgctcttaccgatttgaccaggttgttcgtggtgatagaacgaactatcaaagcggaccatcaacaacccaagttctaaccgtcctcaccctactttccatcggcggcactctccttgcattagccgggctaaccctcaccggcaccgtcatcggcctatgcgtggcaacgccactcttcgtcatcttcagcccggttctgctcccaactgccatcgcggttttcatggctgtggccgagttcttgtcgtccggggcttttgggttgacgggact

SEQ ID NO: 45632 - DNA, 364 bp, Gossypium hirsutum
  Clone ID: LIB3196-016-P1-M1-F8
atcaacaagtttgcagtggccctgctagatgactcagtccgtgtgtataatgccagcagcaccatagtcccctccctgaagcaccggctgcagcgaaatgtggcggctctggcctggaaacctcttagtgcctctgtcttggctgtggcctgccagagctgcattctcatctggaccctggaccctacctccttgtatacccgaccctcttctggctgtgcccaagtgctgtctcaccctgggcatacacctgttactagcttggcctgggcccccagtggggggcggctgctctcagcttcacccgtggatgctgctatccgggtatgggatgtctcaacaaaaacctgtgtacccctttcct

SEQ ID NO: 45633 - DNA, 374 bp, Gossypium hirsutum
  Clone ID: LIB3196-016-P1-M1-F9
atctaatgctctcagagggtttcgagttcaagctccattggttgattctgtatcttgctattgtaaagtggattctggattgaagacagttgttgaggcaagaaaatttgtcccgggatcaaagctttgtatccagcctgatatcaatcccaatgctcacaagagtaaaagctctcgcaaagagaggagtcgagtccagccacctctcctccctggccttcctgacgatcttgccattgcatgtctgattcgagttcctcatgctgaacacagaaaactccgcctagtttgtaagaaatggtatcaccttttggctggtaacttctttttttctcttaggaaaagtcttggaatggcagaagaatgggtttatg

SEQ ID NO: 45634 - DNA, 310 bp, Gossypium hirsutum
  Clone ID: LIB3196-016-P1-M1-G10
cggacgcctggtttgtctaaaaaaaaaagctatgtggcggtgaaaatggcgactctatattgctcagcggatgtttctgtctctactgtggaagcgcagtaactttgtaacgcgtctgaagagggggtacgaatccgccactgattatctacattttgggtctcagaaaatgggttcaatgcaatgatgatgccttgaacggattgtgtagctaatgtggaagatctgattaagtttttgtataaggaacttttgagtaaatattagcgaactgatgtagtgattactttgtacagtgcagagcgtgatg

SEQ ID NO: 45635 - DNA, 395 bp, Gossypium hirsutum
  Clone ID: LIB3196-016-P1-M1-G11
atcactgagccagctcagcgggcagggctgggagggagtgggacagattctgggagtgcagtggggaggagtcccggctgggctgagtgcacggagctgcttggtagtgccagagcccaagccccagagccctgctggagcggaggcagaccgaggcagcaggccccaccagcaggcgaagcagggagatgtcagactgctacacggagctggagaaggcggtcattgtcctggtggaaaacttctacaaatatgtgtctaagtacagcctggtgaagaacaagatcagcaagagcagcttccgcgagatgctccagaaagagctgaaccacatgctgtcggacacagggaaccggaaggctgcggataagctcatccagaacctggatgccaat

SEQ ID NO: 45636 - DNA, 294 bp, Gossypium hirsutum
  Clone ID: LIB3196-016-P1-M1-G12
ctctggaagaatccaaaaccggtcaaggatctggccgttccccccgcagtggctccgccgtgccggccaccgtgaacggtagccggaaatcgcctcgaggaagaattttctccccttttttttttgccttctatatatttatatttaatatatatgctcttttaaataaagggaagattgtgggtatgaacagattcaaaagaaaaaaaggagaaattggggtaaccttcgatttttgctcttcgttctgattttgctgcgaaattgaatttttctctttttccttttttaaaa

SEQ ID NO: 45637 - DNA, 248 bp, Gossypium hirsutum
  Clone ID: LIB3196-016-P1-M1-G2
cggacgcgtggggtttttttataaccaatagtaatgttggggttaatttatttaaaatcataattgtgttactaaaaaaatcataattgaattaacagaatatgtaagagttaaatttgttattatgctaattttgaattttttttatttttttatcaatgtaatataagttaatgaaattggaagaaaaaaaacacaattaattaggtgactaacttgtaattttttttataattgggtggcaaaaa

SEQ ID NO: 45638 - DNA, 330 bp, Gossypium hirsutum
  unsure (1)..(330): unsure at all n locations; Clone ID: LIB3196-016-P1-M1-G4
gcgagccactgtaatcttttcctttcgttacaactttctcttcaggtctctttgagtcgaagccatggccaccggacagttgttttctcgaacaactcaagccttattctataactacaaacaacttcctattcaacgcatgcttgatttcgatttcctttgcgggagggatacaccgtccgtcgctggtatcattaatcctggtgccgagggatttcagaaactcttctttggtcaagaagaaatagcgatcccagtgcattcaaccattgaggcagcatgcgctgcacatncaactgccgatgtttntattaactttgcatcatatcg

SEQ ID NO: 45639 - DNA, 448 bp, Gossypium hirsutum
  Clone ID: LIB3196-016-P1-M1-G5
ccagctgaggccggtccgcaatttccgggatgcaagatggccgttgaaaaagttgagaagccagatactaaagagaagaaacccgaagccaagaaggctgatgctggtggcaaggtgaaaaagggtaacctcaaggctaagaagcccaagaaggggaagccccattgcagccgcaaccctgtccttgtcagaggaattggcaggtattcccgatctgccatgtattccagaaaggccatgtacaagaggaagtactcagccgctaaatccaaggttgaaaagaaaaagaaggagaaggttcttgcaactcttacaaaaccagttggtggtgacaagaacggcggtacccgggtggttaaacttcgcaaaatgcctagatattatcctactgaagatgtgcctcgaaagctgttgagccacggcaaaaaacccttcaatcagcacgtga

SEQ ID NO: 45640 - DNA, 435 bp, Gossypium hirsutum
  Clone ID: LIB3196-016-P1-M1-G6
caagaggacaaaaaagcacgctggtgcccggccggaatttccgggatgtgtcccaaaacctggggaccaacttgcctgagcttggacaaccttccctgactggcccccctaactctgaacatcctcagcctgctctggacccgaggtctaacgatttggcaagggctcctctgaagctcagcatgcccccatcagacggcttaccacccacaggaggctctgcagtgcacaggtggcctctgtccgggaggctgcctgccgagtactcctggccccctgaggatccttggctgatgatggctgctgcggctgcggaccgcctgggggaagcgctgcctgaagaactctcttacctctccagtgctgcggccctcgctccatgcagaggccctttgcctggagagtcttctcctgacgccacagacctctcacccg

SEQ ID NO: 45641 - DNA, 392 bp, Gossypium hirsutum
  Clone ID: LIB3196-016-P1-M1-G7
catacaattcagaaaataataacaagattcgtcttaggtttcattccccttaggtatttaggggctttagtccataactaaaaaggaaaacatctcagaagaataatgaatacaaaacataaagaaaacccaaaactcctgaagggaaattgaggggaaatcttcagtcttgatggtgaattcggctttccttgagcagttccctacctctttttctccgtctcccttttcttcctcctctagggtgtatttataggctttggaatgcctaagaaccctcaaaattggccttttccgaattggacacaacttgggctcgggagggacacgcccgtgtgacacgcccgtgtgacacgcccgtgtgcgattattttaagctgtgctcgaaccta

SEQ ID NO: 45642 - DNA, 386 bp, Gossypium hirsutum
  unsure (1)..(386): unsure at all n locations; Clone ID: LIB3196-016-P1-M1-G8
attggttactggtttcatcgccaccacttaatggatgtttagtttagaaccattttgtctgctccctctggaagccttgggcagagcttactttgtaattgttggagaataactgctgaatttttagctgttttgagttgattcgcaccactgcaccacaacttaatatgaaaaaaactatttaacttatttattatcttgggaaaagtatacaatgaaaattttggtcatactggatttatcaaggatgatgaaaaacaatagatatatattcttttattatgttaaaatatgattgccattattaatcggcaaaatgtggaatgtatgttcttttcacagaaatatatgccttttgtgactttaattggntattttattggaaa

SEQ ID NO: 45643 - DNA, 344 bp, Gossypium hirsutum
  Clone ID: LIB3196-016-P1-M1-G9
aaacgggagccaacatttcccgtacggtgctattaggtgaagagaaaaacgatcgtttttactcccacgggaaatccttcacgcgcttatcgatacagtccgttatcaaaagcgctgtaacggaccgtacgaaaccgttacccatcaatcccaaaagcgggttgtacctcttgctcacctccgacgatgtgtacgtcgaagatttttgcggccaagtctgtgggttccattacttcacgttcccctcaatcgtggggtacacgctcccgtacgcatgggtgggtaactccgccaagctttgcccaggaatatgcgcttaccctttttgcgtacctcaatacatg

SEQ ID NO: 45644 - DNA, 322 bp, Gossypium hirsutum
  Clone ID: LIB3196-016-P1-M1-H1
atcaatactacaacaaacttcaaggcaagtttggctgaaaacagttgacaacaaagggccccctataaacttatccctcaaattgtaagtgatatgaaacacttgtcatatctttggccaaatcagaagatactcaccctgcttcaagtcagcttcagaaatgttttaaaagggactttcgctctggaactcaaaatcaatttttaaagaatatggctcttaataaaaaaaaaaaaaactggataatattatctgtaatacttcagtcctttacaagccaaatacatgtgtcaatgttcctagtatttcaaggaagcaatta

SEQ ID NO: 45645 - DNA, 407 bp, Gossypium hirsutum
  Clone ID: LIB3196-016-P1-M1-H10
cgctggtgcacgctgcggcacctccccgattttcccgatcagcccccaccataataaaggtctgctatcgatcacgaacagatggcatttggtcttaacaaaagaaaactgattcatcttgctgtatttaaagaacttgtgaagctttgcgaccctgcagttaaggactggacacacactaaccgaaaacaaaatgtgactatgtaagatggattgcaacggagtggctaaacaccaacatgttcaaagtcagcgattattaccacaggcaaagttgcaagacctgttaatatgtcagacacttcactgctacgacttttaaccaattaaaacagattgctaccaacacaagaattaccttttattggaactatacataaatcggtcctggttcattgcttatgaag

SEQ ID NO: 45646 - DNA, 255 bp, Gossypium hirsutum
  unsure (1)..(255): unsure at all n locations; Clone ID: LIB3196-016-P1-M1-H11
attctgtggaagggggccgggagcaaaccctcagcgctctgtcgagcccccctcattgggtttccacgtgctcacgcgcagccgatgactttaccgagccccgcgcgcagaataagaaacgtgttgccgttattacagcnaaacgtgatagatcggatatatatagattgttacctcctaagccggcatggaaccttgctctctcagaaaagacaaaaacatcaccgttgtgtgtctaacaacatgaacaaatcc

SEQ ID NO: 45647 - DNA, 426 bp, Gossypium hirsutum
  Clone ID: LIB3196-016-P1-M1-H4
atgtggccttgcgggcggggaagaagagttttctccgcgctctcagccgctccttcgtctgccgcggctgtcaactcgctccggagcgcggcgccgagcgcagggatacggcgcccagcggcgtatcaagattctgccctccaagaaagtcttgccatgactggataggacccccagacaaatattcaaaccttcgacctgttcacttttacatacctgaaaatgaatcgccatcggaacaaaagcttagaaaattaagacaagaaacacaagaatggaatcaacagttctgggcaaaccagaatttgacttttagtaaggaaaaagaagaatttattcacttgagactaaaaactaaaggcctgggcctgagaactgaatcaagtcagaaggcaacattgaatgcagaagaaatggcagactttt

SEQ ID NO: 45648 - DNA, 390 bp, Gossypium hirsutum
  unsure (1)..(390): unsure at all n locations; Clone ID: LIB3196-016-P1-M1-H5
aatcaatccagttatatatatcaaaaaacgtaccatggcaaagttcgctctcctcgtagccactttcgctctcgctttcttcctcgtcaacgcctccatctaccggaccacggacggcgacgaagaaaactggtaccgacacgatcggcgatcgtgtcaagaccagatatggcagcaaggctacctcccaaactgtcagtggtacatgaacgaacaggccggccgcagccacagcggatatggcacccactacctcaactcgtgctgctacgagctccagaacctaaagcaggattgccggtgccaaggcttgaaacaggcgttaggacaacagctgaagctgcagggagtacggtgggagagtcgagaggctgaanatatgtgtgaagc

SEQ ID NO: 45649 - DNA, 324 bp, Gossypium hirsutum
  Clone ID: LIB3196-016-P1-M1-H7
aaaaataataactttttaagttttagatgatggtgtgccataatgtgttatatcatcactttttttttatgaaattcaaatttaacaataaaaaaaatgttaaatttaatatcaaaatggataaaaaaaaagtacaataccaaaataaactatgttttatgctttttctcgaccaccgttttggcttttgattggctttgcgagacgtacctaagctctcttcagagttgagaacaaaacttcaaaaatgtgttgctttttaacaacataaaaaatgataatacttttacattattagcacgatatactctaataacacttatc

SEQ ID NO: 45650 - DNA, 387 bp, Gossypium hirsutum
  Clone ID: LIB3196-016-P1-M1-H9
tttgtgatctcagcctttcatctaatctttccttagcttctcttgctactcctccaagcttatcgtcttgataagtctgagttaatatgctcctttgcttttttccccaaataaaacccaagttagtcccaaacataatttcctcgtttgaattttggaaccggaattactgtatatataatcttgaaatttaaagaattacctgtgaagaaacagagctgtgatgagtttcgttgttgcttgtatacaaacaaaaagaggacctccttgttaaaccaatcactgccacacttgacgaatcaaatgaccctccgctttgatggaaccgtcttcttcttgcacattcaacaccaggaagcatgccagccattggtgaaacatataaat

SEQ ID NO: 45651 - DNA, 374 bp, Gossypium hirsutum
  Clone ID: LIB3196-017-P1-M1-A1
gtttaatcagtattatagattgttcatccagagatctaagcttattagcttaagctataaaaatggtgaaaagatcgttgggctttttctttcttctcctcattgtcttagcctcccaatggggggtgcagccaactgaggcaagggtttgccagtcacaaagccataagttccacggtgcatgtgtgagtagccacaactgtgcgatggtgtgcagggacgaaggtttctccggcggcagatgtcgaggattccgtcgccgctgcttctgcactaagctttgctaatgcaagcttgcccttagctcatattttaaggatttttcttgagtaaaagacctttatgtttttcgtgcatgcatgtcaatgtttcaa

SEQ ID NO: 45652 - DNA, 365 bp, Gossypium hirsutum
  Clone ID: LIB3196-017-P1-M1-A10
ctctcctcatctccaccgtttcgaactttaccgatttattcttaaaacctctgcccaaacttcgaccacggcgaagcgagcagagatctaacggtgtgcttcaagaaggtaaaacctccctctcttttctcttttatttttcgccaagaaaagagaaaaaggaaaaaaaactaaaagaaaacgaaaaaagatccagagaaaatcgagaaatcgcctttccttattcagtttttctgtatttcgtaatgatttctccctttttattcaacaataaataaatttcaaaacaaagaagcagaaacaatgaacaatccaaaggagaaaatcaaatctctgatccttttgaaactttttctggtttttgg

SEQ ID NO: 45653 - DNA, 353 bp, Gossypium hirsutum
  Clone ID: LIB3196-017-P1-M1-A11
ataaccacagtactagttgaatcttatacactcccagatggacgtatcatcaaagttgggggagagagatttgaagcaccagaagctttatttcagcctcacttgatcaatgttgaaggagttggtgttgctgaattgctttttaacacaattcaggcggctgacattgataccagatctgaattctacaaacacattgtgctttctggagggtctactatgtatcctggcctgccatcacggttggaacgagaacttaaacagctttacttagaacgagttttgaagggtgatgtggaaaaactttctaaatttaagatccgcattgaagacccaccccgcagaaagcacat

SEQ ID NO: 45654 - DNA, 363 bp, Gossypium hirsutum
  Clone ID: LIB3196-017-P1-M1-A12
atggcggctgcaggccctgcggctggagcgagaggagtacgttctactgaaggccctggcccttgccaattcagactctgtgcacatcgaagatgctgaggctgtggagcagctgcgagaagctctgcatgaggccctgctggagtacgaagccggccgggctggccccggagggggtgctgagcggcggagggcgggcaggctgctgctcacgctaccgctcctccgccagacagcgggcaaagtgctggcccatttctatggggtgaagctggaaggcaaggtgcccatgcacaagctcttcttggaaatgctcgaggccatgatggactgaggcaaggggtggtcctggtgggggttctg

SEQ ID NO: 45655 - DNA, 352 bp, Gossypium hirsutum
  unsure (1)..(352): unsure at all n locations; Clone ID: LIB3196-017-P1-M1-A2
cacatatgaagatcttatgcgttgtatgaggtatgccaaagctgtcaaggtttgcatctacagtgcctattttgaggcaaacatgaagcatgaaggctataaaaggttgaagaaagaaagccaaagctagtattgattntagagaggaacacgaagatgaaaatagaaatatgagccagcttgagtgaaatctgtggtaaaatgttgtgtgtaattaacaaacgttgatgaattgtgtgtctattttgcaatgtttgggtcagtttgaatttccgattatcatatgtaatgagtgctaatgatcaaagtttggttttggtttccttctttgataaaaaaaccttatgttttt

SEQ ID NO: 45656 - DNA, 285 bp, Gossypium hirsutum
  Clone ID: LIB3196-017-P1-M1-A3
ataaaaaaaaaaaaaaaatagggacacctatcgagtgctgaccctgccagtggggtggccacattttgcatacgtaatagtgaaaattactcagtgcttctctgaaatttaacattaactgggaatgctgaatttttgtggtctgaatttgacaatcctgtctacttggcacctgttcaagccgcgtacgtgtattgacttatttaatcctcaaagcagttctgtgagttaggtgctattactgcccacgttgaggccccaagagtaacctgcccaagatcacac

SEQ ID NO: 45657 - DNA, 372 bp, Gossypium hirsutum
  Clone ID: LIB3196-017-P1-M1-A4
cagctggtgtgttttcattaactaatcctgttattgctacgacaaattgagcacatattcatcgattcgacaatgtcggtgttctctccttgggatttgccgttcccgtatgcttcaaaccactcgaatcttcaatgctttcttcggtgcatcactcccgttgttcctactcgattgctacctaagaaatgtaatgaagattcaaattgtggcaatctggaaacaaatgagaaagaaagagatgaagaagggtacagtttgagtgaggtttgggagtcatatagcgagtggagtgcttatggtgttgatgtcccaattgtggtgaacaatggcgactgtgtcgttcagtactattctccttcattatcagct

SEQ ID NO: 45658 - DNA, 375 bp, Gossypium hirsutum
  Clone ID: LIB3196-017-P1-M1-A5
atgggaaactttgggtctcactgttgcctggctggagcactttggtttatagctggaatactgagttcagttcagaaggcaggaaagacagtcacaccgacgtgtcctgaaggtgtaggctctccacttaggcgcacaagctgatggccgcagccagcaggccccggtgacgagacacttccagcccccatggtggggacgcctctcagtgccagtcccgctactgctgaggtagcctggtgttcttgccttcttggaaaatactgctcacctggtatctgtatgttaatgtttcttgctgagttacggttttgataaagaggctctcatttcttgcctcttgtattttcagtcctttcaatatgtccacctgga

SEQ ID NO: 45659 - DNA, 318 bp, Gossypium hirsutum
  Clone ID: LIB3196-017-P1-M1-A6
atgcctggaccggggtcttaacctaagatctgacctcgggcctaacccaggtgcttctgacccttgtagggatgccaaggctgctgtggtgactggcatggagctgaaggacatgagctcggaacaggtggatgagatcttagccaactaccaggagattgtctttgcacggacatccccccagcagaagctgatcatagtggagggctgtcagaggcatgatgccgctgctgctgcgacagaggatggagctaatgactctacggctctaaagaaggcaaacatagcggttgccatggggatagcatgttctgacgc

SEQ ID NO: 45660 - DNA, 372 bp, Gossypium hirsutum
  Clone ID: LIB3196-017-P1-M1-A8
gtttattcaacgcttcagcaccatttcaaattctaattaaaagaccaggagaaagaaaaatcagctacgccacacttatggcaaggcttatcagaaattcgctgatgaaggcattgattcttattttctttgcatcagtagccaccgccacaggcgatgccccattcatcgtcgctcacaagaaggcatcgttgaccagactcaaatcaggttcagaacgcgtttctgtctccatcgacatctacaatcaaggcttttcgacagcatatgatgtgagtctcctcgatgatagctggcctcaagatatgtttgatattgtcagtggcaacacttcacggtcatgggaaagacttgatgctggtggtcttctat

SEQ ID NO: 45661 - DNA, 351 bp, Gossypium hirsutum
  Clone ID: LIB3196-017-P1-M1-A9
tgcgtgttatccttgcatccaaccgtggaaccgttatggaacttgggattacccccattgttacttccggtttggtgatgcaactcttggctggttcaaagatcattgaggttgacaacagtgttcgtgaggatcgtgcgcttttaaatggggctcaaaagctgttggggatcctaattgctgttggtgaggcagtggcgtacgttctgtctggtatgtacggcagtgttggtcagctcggggttggaaatgccattcttattattattcaactttgctttgctggaattgggatctgccttgatgaactcttccaaaaagggtatggtttgggctctgggatctcccttt

SEQ ID NO: 45662 - DNA, 370 bp, Gossypium hirsutum
  Clone ID: LIB3196-017-P1-M1-B1
ccgaataacagtccttcctaatgcatcctcagatgataaggcctgcacgtttgtggggacagccgcttatgttcctcctgaagtcttgaactcttctccagcaacatttggaaatgacctctgggcactcggctgcatcttgtaccaaatgctttcagggacttctccctttaaagatacaagtgaatggcttatatttcaaagaattatagccagagatataagattgccagattatttttctgaagaagccagagacctcattgaaaagctattggtaagatttacgtttacgcatgttgtatttggtttctaatcttcacaaaacttgtttgcttaagactttttgtatatccttttagttcttgtt

SEQ ID NO: 45663 - DNA, 260 bp, Gossypium hirsutum
  Clone ID: LIB3196-017-P1-M1-B10
gttatagttggatcgatggtcttaaggcgcatgctgcggatcatgtgagtgataagatgatggttaatgcttcttgtatctttcctcacaacaccccgaagacaaaagaagcatattactacaggatgattttcgagagattcttccctcagaactcggctagattgacagtccctggaggagctagcgtggcatgcagcactgctaaagctgttgagtgggatgttgcctggaagaacaaccttgatccttcaaggagg

SEQ ID NO: 45664 - DNA, 380 bp, Gossypium hirsutum
  Clone ID: LIB3196-017-P1-M1-B11
atcccgggccgagatgtctcgctcagtggccttagccgtgctggcgctactctctctttctggcctggaggctatccagcgtactccaaagattcaggtttactcacgccatccaccagagaatggaaagccaaatttcctgaattgctatgtgtctggatttcatccatctgatattgaagttgacttactgaagaatggagagaaaatgggaaaagtggagcattcagacttgtctttcagcaaagactggtctttctatctcttgtactacactgaattcacccccaatgaaaaagatgagtatgcctgccgtgtgaaccatgtgactttgtcagggcccaggacagttaagtgggatcgagacatgtaagcagcat

SEQ ID NO: 45665 - DNA, 369 bp, Gossypium hirsutum
  Clone ID: LIB3196-017-P1-M1-B12
atcgctgacgctgctgcaggcggacacggtgcgcggcgcggtgctgggctctcgcggcgcttgggccgtggagttcttcgcctcctggtgcggccactgcatcgccttcgccccgacgtggaaggcgctggccgaagacgtcaaagcctggaggccggccctgaatctcgctgccctggactgtgctgaggagaccaacagcgcagtctgcagagacttcaacatccctggcttcccaactgtgaggttcttcaaggccttttccaagaacggctcgggagcagtatttccagtggctggtgctgacatgcagacgctgcgggagaggctcattgacgccctggagtcccatcatgacacgtggccccc

SEQ ID NO: 45666 - DNA, 399 bp, Gossypium hirsutum
  Clone ID: LIB3196-017-P1-M1-B2
atggacactagatgtagtattctgaactacctaaagctaattaagaagagagcatctggagaactaatgacagttgccagatggatgagggagtttatcgcaaaccatcctgactacaagcaagacagtgtcataactgatgaaatgaattatagccttattttgaagtgtaaccaaattgcaaatgaattatgtgaatgcccagagttacttggatcagcatttatgaaagtaaaatatggtggaagcaaaactgactcatgcaactagacgttctacagaaagaaaaatgcgttactgttttattgacgacactgacgggaggtccatgcctctcaggccatgtgtatgatacgaagacccaatgatagaattgttctgggccagggtaacagaaat

SEQ ID NO: 45667 - DNA, 396 bp, Gossypium hirsutum
  Clone ID: LIB3196-017-P1-M1-B3
atcttttcagtttctgtacactgtgtgactttgaagtttgacaattaaattgactcccaacttaaggagaaatagggaaagtgatttgcaaggagaggtggccaataccagaacaccccgacagcagggatatctgccctgtcaggctcactagcttgtgtgtgtgttttcagaacaagcgcgtgagtatcaataaagatgagctgaagtcaacgtcgaaagctgttgaaactgttcacaatttgtgttgcaacgagaacaaaggggcctctgaactagtggcagaattgagcacactttatcagtgtattaggtaagtaaaacgaaacttagttcttcaatcagtcctttggggaggaggtggtttgagtttcatattgaaagctcaaataacaa

SEQ ID NO: 45668 - DNA, 368 bp, Gossypium hirsutum
  Clone ID: LIB3196-017-P1-M1-B4
aaatctgtcattttatttttataggggattgtcctttgcatggtacctaccaaaagttcaaaaccaaaaaaagaataaaaaagaaaggaaaaaagctttgtaaggtgataatgattaatgaggtagaatgagagccataatgacttgaatgggtaggcagagaggattgtgcctctactttcacaaaggatgggagcaataaataccttgtttttgaaatttggggaaaaagtgtatataaatcataatctagaaacctctttgttatgcatgccataaatgataaaaccatggcacatcaaataacaggcagttaaaaaaactatctgtttgctttatcttttcacacttttgatgttaataatcaa

SEQ ID NO: 45669 - DNA, 330 bp, Gossypium hirsutum
  Clone ID: LIB3196-017-P1-M1-B5
gtgctgcaaacgcttgccaaggaccaagccagggtgcagtttttgtccagcctcgtggctaaaaaatctgtggtgcctatagcttcaggcaggcagattgtgcaaaggccaacttacattgtgaagggcaatattggaaccccacctcaaaccatgcttatggccatggatacaagcagtgatgctgcttgggtgccttgcactggctgcattggctgctcttctactgcttttgactttgctaaatccaccactttcaagacccttggctggcaagctgctcaatgcaagcagatgccaaaccccacttgcggtggaagcgcgtgcaca

SEQ ID NO: 45670 - DNA, 122 bp, Gossypium hirsutum
  Clone ID: LIB3196-017-P1-M1-B6
cccacgcgtccgattttgtatttgatttataattattttaatatttttatgatgaaaacattttatataaaatatattgagaaaaatcatgttgaatttttatttttagaaatatttataaa

SEQ ID NO: 45671 - DNA, 299 bp, Gossypium hirsutum
  unsure (1)..(299): unsure at all n locations; Clone ID: LIB3196-017-P1-M1-B7
cttctttgtagccaaaaagaaaatatgagccgaattaaagaaactttatccaacatttctaattctgccaaacacatttccttcaccaagaaacacaagaaaattttcttggcactatttgcatctttagtcattggtgctgctataatcggcattgttgctggagtgagctcacggaataactccgatgagtccgatacttnccatcatgccgttgtgaaatcagcttgtagtgggtcgttctaccctgatttatgtttctcgggtgttactaccgtccctgctggtactgccaaaaa

SEQ ID NO: 45672 - DNA, 258 bp, Gossypium hirsutum
  Clone ID: LIB3196-017-P1-M1-B8
aatagcttgtgtattcttgtgtgcttgagcattagcagctacttttagtttaagggaaaaaggtgccatttcctatatgggacttttggttgtataagtgtttgtggattgatggatccatatactgataagcttaatgaaggaaaaatagaaattggctccttatcttggccttatactaaaaaaaaaaaaaaaaagctaagaaaaataaaaaaaatttaatttgaaacaagaacaaagagacatatcaaattaatg

SEQ ID NO: 45673 - DNA, 369 bp, Gossypium hirsutum
  Clone ID: LIB3196-017-P1-M1-B9
tgtaaatattgtacaagattgcccttttttttgctttgcatgaaacattattcaagacgagcaatggattaagtttgggggtgtgtaagctttaaactatatagatttttttatagttgtttatagaacccttttacttagaatttttgttaatctcgagtgtttgatatcaaaatttttttgttaatctcgggtgattttaattcatattaaaaaattagacataaattaagtgaagttttcaattttatacaaataagtattaatttggcataattttattattttatgttggatgttaatttttactcaaatattccagatggactgttgaattaataaagaatgggagctgaataatatcacaca

SEQ ID NO: 45674 - DNA, 383 bp, Gossypium hirsutum
  Clone ID: LIB3196-017-P1-M1-C1
atccctttttttttttttttttttttttacgtttgcagaaaggcaggaaactttattgaattatcgtttctttggggtagagaagttgagaaaccaaagagtatccaggtcacagaggagagagatccaatgggaagagaagagcacagagggcccatcctcaggagacagtcgggatgtggggtcctgaaagcagagggattgaggcttgggtccagcagcccctcctctcttctgcagggaactgccagctctctcctcctctgggtgctgaagacagagggaggggacaccaggcagatttaaggcctacggacatcagaagtgcggcggccagaggcattagaggtggtggtagcagagacactggaagttgtggtaac

SEQ ID NO: 45675 - DNA, 360 bp, Gossypium hirsutum
  Clone ID: LIB3196-017-P1-M1-C10
gccaggaacaaataagggcattgagccaagaagctacttcaccaagggagaaaagtggcgagagattcgccttcaacttattgagccaaacccctcgctactccaaccaaaacggccgcttcttcgaggcttgcccacgtgaattccggcaactcagggacatcaatgtcaccgtttcagccttgcaattaaaccaaggatcaatctttgtgccgcactacaattcaaaggctacattcgtgatccttgttaccgaaggaaatggatacgctgaaatggtttctcctcatcttcctaggcaaagctcatatgaagaagaagaagaagaagacgaagaagaagaacaagaacaagaagagg

SEQ ID NO: 45676 - DNA, 379 bp, Gossypium hirsutum
  Clone ID: LIB3196-017-P1-M1-C11
atctctccactcagccaactgctcgctcgctcacctccctccttggcaccatgaccacctgcagccgccagttcacctcctccagctccatgaagggctcctgcggcatcgggggcggcatcgggggcggctccacccgcatctcctccgtcttggccggagggtcctgccgcgcccccagcacctacggcgggggcctgtctgtctcctcctcccgcttctcctctgggggagcctacgggctggggggcggctatggcggtggcttcagcagcagcagcagctttggtagtggcttcgggggaggatatggtggtggcttgggtggtggcttgggtggtggctttggtggtggctttgctggtggtgatgggcttct

SEQ ID NO: 45677 - DNA, 368 bp, Gossypium hirsutum
  Clone ID: LIB3196-017-P1-M1-C12
atccgggccatgctgcctgcagccacagcctccctcctggggcccctcctcactgcctgggccctgctgccttttgcccagggccagacccccaactacaccagacccgtgttcctgtgcggaggggatgtgaagggggaatcaggttacgtggcaagtgaggggttccccaacctctacccccctaataaggagtgcatctggaccataacggtccccgagggtcagactgtgtccctctcattccgagtcttcgacctggagctgcaccccgcctgccgctacgacgcactggaggtcttcgctgggtctgggacttctggccagcggctcggacgcttttgcgggacctttcggcctgcgcccct

SEQ ID NO: 45678 - DNA, 394 bp, Gossypium hirsutum
  Clone ID: LIB3196-017-P1-M1-C2
atcccatgggtataaagcactcgcatccctttccaatttacccgagcaccttctctccactcagccaactgctcgctcgctcacctccctccttggcaccatgaccacctgcagccgccagttcacctcctccagctccatgaagggctcctgcggcatcgggggcggcatcgggggcggctccacccgcatctcctccgtcttggccggagggtcctgccgcgcccccagcacctacggcgggggcctgtctgtctcctcctcccgcttctcctctgggggagcctacgggctggggggcggctatggcggtggcttcagcagcagcagcagctttggtagtggcttcgggggaggatatggtggcggcttgggtgggggcttgggtggtggc

SEQ ID NO: 45679 - DNA, 372 bp, Gossypium hirsutum
  Clone ID: LIB3196-017-P1-M1-C3
aaagaagggagccggaggaaggaaaggtggtggcccgaagaagaagcccgtttcaaggtctgtcaaagccggtctccagttcccagttggtaggatcggccgttacttgaagaaaggaaggtattcacagcgggtcgggaccggagccccggtttacttggctgcagttcttgagtacttggccgctgaggttctggaattggctgggaacgctgcacgtgacaacaagaaaaacaggatcatcccaaggcacgtgctacttgccgtgaggaacgacgaagaattagggaagcttctcgccggcgtaaccatcgctcacggtggtgtgttgccgaacattaacccagttcttttgccgaagaagactgaaaa

SEQ ID NO: 45680 - DNA, 360 bp, Gossypium hirsutum
  Clone ID: LIB3196-017-P1-M1-C4
gttagctgcttcaaacttttttttaaaccctcaaagcttcacaaggtctttctttctttcttttcttttcttttttagggataaataatgggagggttcaagcatcttgttgttgtgaagttcaaggaagatgtggtggcggaggagattttgaaaggtatggaaaagctggtttctgaggttgatgctgtcaagtcctttgaatggggacaggacatagaaagccaagagatgcttagacaaggatacactcatgccttcttgatgacgctcgaaaagaaagaagattacactgcatttaccagccatcccagtcacattgaattctccgccacttttgttactgccattgacaagttc

SEQ ID NO: 45681 - DNA, 314 bp, Gossypium hirsutum
  Clone ID: LIB3196-017-P1-M1-C5
cccacgcgtccgaaaaaaaagaataatccctaaaaaccatgacaaagcccaaactaaaaatatatcctttacattttccaaaaataaattctgccgaaccctcacggcactttgtataaagacaactttcatgggcggcggctccttctgatgaatcctttcttccgatgggcatcaatggcattcttttttttttttttgtcccaccctaaattcatttgccggccgtttttaccccagagacgcttattacacctccctgctctcaccttattgatttccttggaaatgcctttcttctcatcttccttggc

SEQ ID NO: 45682 - DNA, 89 bp, Gossypium hirsutum
  unsure (1)..(89): unsure at all n locations; Clone ID: LIB3196-017-P1-M1-C6
catctgcaaatagtaaatgattgtattttgtncggcgaagctacaaaaggcggttcacgtttttccaaggaccttcctgggattcccca

SEQ ID NO: 45683 - DNA, 161 bp, Gossypium hirsutum
  Clone ID: LIB3196-017-P1-M1-C7
ttgattcacctgtccaactttttgtggacactgatgtctattctagaaatcgctgctttcgcctggctctatcatataaggcaggaaagaattcctttctcttacctactgggcgtttcaaatgtaaggacattggtgagggaggacatgttcatgacatt

SEQ ID NO: 45684 - DNA, 204 bp, Gossypium hirsutum
  Clone ID: LIB3196-017-P1-M1-C8
caagagtctatttttatacatttttatcgcttaaaaagaaaagcataattaccacaaattccaaaggactaaagcaggactagaataatgaatggatcactctagcctggaaagcagatactctcaaaactattaatgttataattcaagcgtattcaatgtttttacactgttttttgggcctttaaaaattatatcttatcc

SEQ ID NO: 45685 - DNA, 238 bp, Gossypium hirsutum
  Clone ID: LIB3196-017-P1-M1-C9
acggccaaggagttggcctttggggtgtcatcgaggttggtggatgagatattcaacaacaacccacaagagtcttacttcgtgtctcgacagaggcagcgtgcatgtgaataaagagttagaggcaataataaccacatagtctcgtgtttacagactaatgtgaaattttctagttttaagcaggcatgttatgaaataaaaatggggacctaatgaaaggaggagacccttggtt

SEQ ID NO: 45686 - DNA, 367 bp, Gossypium hirsutum
  Clone ID: LIB3196-017-P1-M1-D1
ggcagtggctgtggaggatgcaagatgtatccagacctgaacgctgccgagatgaccacaactgagactctggttcttggtgtagcaccccagaaagcacactttgagggagctgagatggaattcggggctgagaacggctgcaagtgtggagacaactgcacctgcaacccttgcaattgtaaatgattagagaccaaagccaaagctccctggaagcagaggcgcctttgtctttaagaaataatatgttttgttgtttatgtgtttttagaataaagtagccatggcttgtcgtaggttttgcctgttgccgccacggttacttggtgcttgccaatagatagagtgaagtactaatatttac

SEQ ID NO: 45687 - DNA, 286 bp, Gossypium hirsutum
  Clone ID: LIB3196-017-P1-M1-D10
accggcgacaagagctaacttcagcactcgatttttcgctgaccacctcaacttgggactgcctgtggctactgtctatttcaacgcccaaaaagagcccgtcagccgaaggcgttgaatctcccacgcacacttctcactctacatatatataaaaaatatataaatataaaactggttcgactctttaactttataaattagctttggccaagtgtagtcctagtacgtacgtttgagaagtgtatgtctctttgttgggtttatatttgatgctaagttatcg

SEQ ID NO: 45688 - DNA, 363 bp, Gossypium hirsutum
  Clone ID: LIB3196-017-P1-M1-D11
ggaaagtaccaacactctctatataaagaaccaattaccaaaactcaaatgttttcctttaacatcaccaaatttctttatcttttctcattgttgtaaggtcgttgtttatgattagcatggagaacagaggttttaatgttagatttatggtacttctgggtttatgttgtcttctgatttcttgtgctgctgttcctgctataagtgagggaaatctcaagtcaaataaggagctactcccttcttccgcccgaaatttacttacccaggatgtgaaaaaatcaagtgaagctgaggaaatgtttggggaatatttaggacatgaattcaatgaagaaaggatgctaatggaaacaacag

SEQ ID NO: 45689 - DNA, 354 bp, Gossypium hirsutum
  Clone ID: LIB3196-017-P1-M1-D12
atcagccacttgtttcatcccacctgggcattaggttgacttcaaagatgcctcagttactgagaaacattaatgggatcatcgaggccttcaggcgctacgcaaggacggagggcagctgcacagcgctcacccgaggggagctgaaaagactcttggagcaagagtttgccgatgtgattgtgaaaccccacgatccagccactgtggacgaggtcctgcgtctgctggatgaagaccacacagggactgtggaattcaaggaattcctggtcttggtgtttaaagtcgcccaggcctgtttcaagacactgagcgagagtcctgagggagcctgcagctctcaagagtctg

SEQ ID NO: 45690 - DNA, 373 bp, Gossypium hirsutum
  Clone ID: LIB3196-017-P1-M1-D2
cggacgcgtgggcaaaccttcaaccttcctcccctgaaaacttcctagtctggttcctttctcatctcatatcggccttgctcctcagcgtattccggaacacccatatccaggtatatttcttctcctctccttagcgtttctgttgctagaatatgtgctagactatttgccgatcttggtgcatgttggaatcttatcttatcaagcccgtatatttgctgttggatatcataaatgtatgttcctatcattgatctatcttgaccctttatattgcatttcttgatgactgcgagggaatctccttcaaaaatcagaaactgccatcccttcccggttcctatttggactgctttccggcaggctattg

SEQ ID NO: 45691 - DNA, 392 bp, Gossypium hirsutum
  Clone ID: LIB3196-017-P1-M1-D3
atggacacaatgacagaagtactctccacagtaaagcagaccttccacaacagtcactctgtgtcctaaaattttccaacatagatgtgatttatataactttgttgatacataaattgtcttggggtttacggaaattaactattatgtttgcactaagatttgctgggagtggtaggtggacatatctatatatcaataaggactaaccgccttttttgtacataggagattgataatactgtatttgttttaaccccacagtgttttactccactttcaaaaagatcaatttggcactttttttcatttttttaatggaaataagatttggtctctcattttaggttaaatgataactagaaagattaaactagacagatagtttatgt

SEQ ID NO: 45692 - DNA, 384 bp, Gossypium hirsutum
  Clone ID: LIB3196-017-P1-M1-D4
atcttaaaaaacaagcatacaaatcccatttttcctcctcacttttagtatttgcatacaacaatatattattttcctattttgtgagatgcctttgtacatattgtgactattttgtgcggtacttgttttattttgacttgtatttactactcccacatagggaatcagcagtccccactgtattatcttatcctcattcccttcccatttatttttatcttacacttcgcctcctttggtgtttagcattctacatactatttattcagcatctgtttatttaatgccctctgcatagtaggtactgggaatgtagcaattagcaagatagatacagccctgacctgcacaatttactgtctgtctggagctaatgtctat

SEQ ID NO: 45693 - DNA, 358 bp, Gossypium hirsutum
  Clone ID: LIB3196-017-P1-M1-D5
ctttgctttcttttagcgtgtgcttgcttgttctcttccatggctgctgtgctcagatagatctcgtcactaaccatcaccaggatccaccttgggggcagcctcagcaacctcagccacgtcaccaatcccaatgccaactccagaacttgaatgctcttcagcctaagcaccggtttaggtcagaggctggtgaaactgagttctgggaccaaaatgaggatcaattccagtgtgctggtgttgctttcctacgtcataagatccagcgcaaaggacttttattgccttcatttaccagtgctcctatgcttttctatgttgaacaaggggagggtattcatggggcggtcttccc

SEQ ID NO: 45694 - DNA, 363 bp, Gossypium hirsutum
  Clone ID: LIB3196-017-P1-M1-D6
gatgacttttctttcaggaggaacttcccgaaaccaatattttgggcactgatactgcttttcgcaatgggtttcattgctggtggttttatttttgcggcagttcacaacgtcattctccttcttgttgttgtggttcttttcagtgctgtcactgcattatatgtttggaactcctgttggaggagaaaagctattacagatttcattgctcgttatccgaatgcagagcttagaaatgcaaagaatgggcaattcgtaaaaatatctggggtggtaacatgtggtaatgtacctcttgagtcatccttccagaaagttcccagatgtgtttatacatctagtccgttgtatgagtaccga

SEQ ID NO: 45695 - DNA, 239 bp, Gossypium hirsutum
  Clone ID: LIB3196-017-P1-M1-D7
atttcatactcatttagcccctttcattagcatcgaaatcactccagttttctttatcactgaaaaatgtcttgctgtggtggaaactgtggctgcggttctggctgcaagtgtggcagtggctgtggaggatgcatgatgtacccagacctgaacgttgccgagatgaccacaactgagactctggttcttggtgtagcaccccagaaagcacactttgagggagctgagatggaatt

SEQ ID NO: 45696 - DNA, 369 bp, Gossypium hirsutum
  Clone ID: LIB3196-017-P1-M1-D8
gcagaatccccagtttatgaccatggctgagcgccttggtaatgcattaatgcaggatccagctatgtctaccatgcttgacagtttggctaatcctcaacaaaaggaccagattgaggaaaggatggcacgtattaaagaagatccatctttgaagcctattttggaagaaatagaaagtggtggtcccgcagcaatgatgaggtattggaatgataaagacgtcctgcagaagttgggtgaagcaatgggtcttgcagttacaggagatgcagccacttctgctggtaattccgcggcagatgaagaggatgaagcaggaaatgaggatgagtcaattgtacatcattgtgctagtgttggtgatgt

SEQ ID NO: 45697 - DNA, 320 bp, Gossypium hirsutum
  Clone ID: LIB3196-017-P1-M1-D9
tcgggaagggcagaggcgacaaggacgtgaagaggtgggagtagaagaatgagaaccgatatggcagaggcgacaagatagtcaagatagagggatctgaggaagaagaaagagaagaacgaggtagaggaaggagaaggtcatgaaacggcttagtagaaacattctgctcaatgagactgaaacacaggacccctgctttctctgttggtgttttcaacccacgaggtggtcgcatcaccacagttaacagtttcaattttaccattatgcaatacctgcaactcatcgctcgagaggggagtcctttacaataatgc

SEQ ID NO: 45698 - DNA, 395 bp, Gossypium hirsutum
  Clone ID: LIB3196-017-P1-M1-E1
atccgcgggcagccaccgagccgcgaagcgacatggtgctgctcaaggagtatcgagtaatcctgcctgtgtccgtagatgagtatcaagtagggcagctgtattctgtggctgaggccagtaaaaacgaaacgggtggtggtgaaggcgtggaggtcctggtgaacgagccctatgagaaggacggtgagaaaggccagtacacacacaagatctaccacctgcagagcaaagtacccacgtttgttcgaatgctggccccagagggagccctgaatatacacgagaaagcgtggaatgcctacccttattgcagaaccgttatcacaaatgagtacatgaaagaagactttctgattaaaattgaaacctggcacaaaccagatcttggcacg

SEQ ID NO: 45699 - DNA, 342 bp, Gossypium hirsutum
  Clone ID: LIB3196-017-P1-M1-E10
attgtgcgagatgtcataaaacaagctcaaaatgaaaagagctttttcaaaaggaaaaccgtcctttttattgatgagattcatcggttcaataaatctcagcaggtcaacgctgctcttctgagccgctgtcgagtgattgttcttgagaagcttccagtagaggcaatggtgactattttaatgcgagcgatcaactccctgggaatccacgtcctagactctagccgtcccactgaccctctgagccacagcagcaacagcagctcagagccggccatgttcatagaggataaagcagtagacaccctggcttacctcagtgacggtgacgcccgagct

SEQ ID NO: 45700 - DNA, 343 bp, Gossypium hirsutum
  Clone ID: LIB3196-017-P1-M1-E11
ctacaacagtgtcctctcaactcactcccttttggagcacactgatgtggctgttcttcttgacaatgaggctatctatgacatttgcaggcgctctcttgacattgagcgacccacttacaccaatcttaaccgtcttgtctcccaggtgatctcctctttgactgcttcacttaggttcgatggtgccttgaacgtggatgtaacagaattccagaccaacttggtcccttacccaagaatacacttcatgctttcttcatacgctccagtcatctctgctgagaaggcttaccatgagcagctatcagttgctgaaatcaccaatagtgcctttgagccc

SEQ ID NO: 45701 - DNA, 367 bp, Gossypium hirsutum
  Clone ID: LIB3196-017-P1-M1-E12
atgaggaaagttaaaaagatgagcaatagagtagaaaatatcttttaaactagttggcctagattgtattaataactacttgagatgtttcaaagataggaagctattacttggacagagaacttgaaataagtggacccatgtataaaacctttgacttaaacattgatatttcagaatgtgttaaatagattaagacatagtaagttaaccctacatgttagaaagatggcgactgttaacaaaggctgtaacagattaagtactattttatatccagaaagtcttctctatgtagagaagtcagagagactagatgctttcactagggaatatcttcccacccagccatcacaagtgtggacaa

SEQ ID NO: 45702 - DNA, 372 bp, Gossypium hirsutum
  Clone ID: LIB3196-017-P1-M1-E2
gaaaaattcatatcttggttagtggaaacattcctcactagcctttcctcgtctttttcttttgtttctttttctaactcattttctcttctttcttcaacttctttttcaattttcttttctgtttcacattccttttcactctcaatctctttttgctctttttcattctctttttctttttcctcacttgttttaacagaatttctcagtttgatttggtcctcatggacttgttccggagtgagcggcactaaggtaagtttctttccttgatgcttgaaagaatacctattggtacgaccatcgtgagtgacttttcgatccagttgccatggttctcctagcaacaaatggcaggcttgaataggc

SEQ ID NO: 45703 - DNA, 358 bp, Gossypium hirsutum
  Clone ID: LIB3196-017-P1-M1-E3
atcggcggccggcggggcgcgggcggccacgcggggctcctgcagcatggctgtcagcaggaaggactggtccgcgctgtccagccttgcccggcagtggactctggaggatgaggaggagcaggagcgtgagcgcaggcggcggcaccgcaacctgagctccacgacggatgatgaggctcccaggctcagccagaatggggaccggcagacctctgcttctgagagactaccgagcgtggaagaagcagaggtgcccaagccactgcccccagccttcaaagatgagggtgaggacatccagagcatcctcagaacacggcatgagcggaggcagaggcggcaggtggtggaggct

SEQ ID NO: 45704 - DNA, 368 bp, Gossypium hirsutum
  Clone ID: LIB3196-017-P1-M1-E4
gatactttagacatgataaacgttgttaaccttgaaaattgggattgtagttgcagggaatggcagatcaacggattgccatgtttacatgcagtggcaattgaacacgttggcaagaatgtgtatgaggcttttaaagttacatattcagagtctataaacccaataccgccgttagacaggtgcatgaaaagagaatcatcaccggtgcttgtgcatcctccttgtgtgacccgtccggtggggcggcccaaggaaagaaaatacgcacttaaatccaatcaagctgttaagagaacacttcagtgcagcaagtgcaaaaagcttgtgcacaacaaaaggaaatgcaagcaatctgcttagggagt

SEQ ID NO: 45705 - DNA, 369 bp, Gossypium hirsutum
  Clone ID: LIB3196-017-P1-M1-E5
agagaatagggaaaagaaaaccctttttaaggtgaaaaaatggagagtaaggaggaagttttttctgttgagcttccagcacctgcttcttggaagaaaatgttttttcccaagaaagtcggttcacccaggaagactgagatcatgttcattgcaccaactggggaggagattagtagcaggaaacagttggagcaatatctaaaatcacaccctggtaatcctccaataacggagtttgattggggtaccggtgagacccctagaagatcagcaaggatcagtgaaaaggccaaggctactccaacaccagaaaaggaacccccaaagaagcgaggccgaaaatcgctgagtgcaaagaaggaaaac

SEQ ID NO: 45706 - DNA, 368 bp, Gossypium hirsutum
  Clone ID: LIB3196-017-P1-M1-E6
aaacggtaaaagcatcaaatcggctggaaaacaggattctcggattattagagggcatctcttacacactttatcaacaagtacgtattgacccaaagggtttgacactcgaattacgaactcagtagactcgacaggtagagtcttactggatgctaaggtttcacatacgtatgaatgagtagagccagggtcaatcaatgcaatcacactagtatcaaagagagtgaaagtaccagtgataacatcaggggaggatgcctcctctcgtgcgcgaatggcatatgctctagcaggagtacgggtctcggttcgaatagccgtatcagaggcccctctctgactaccacctctacctcctgaaattc

SEQ ID NO: 45707 - DNA, 331 bp, Gossypium hirsutum
  Clone ID: LIB3196-017-P1-M1-E7
atgcaagattgagtccacatttttcaaggacccctttggcttctgttgaacggattggtcgggagcccctggaaggctgtggcagcaatgaagtcaagaaataataagcactttaattacagtggtgggacttcacttttccttgctcttcccattgaaatacagcaaaataccctgcacataactcatcaggcaacgaggaaaggagcttgagagttgacagcaagacagatggtctagagacctctggactggaaaaatagcaaggtggtgggtcccctggggtttctttttctctcgggtgttcctacactagtccccaaggaaggct

SEQ ID NO: 45708 - DNA, 182 bp, Gossypium hirsutum
  Clone ID: LIB3196-017-P1-M1-E8
tgcaaacagagaacgatcagttgtactatcttcagaagcaaagcaggctgcttccgaaattgagcttcggctgcaattgggatcaaaactcagtgatattgtcagcaacaaggaggatgtactggcactattcaatctgtataaagatgaaagttacatactgactgaacaagaaggaaaat

SEQ ID NO: 45709 - DNA, 342 bp, Gossypium hirsutum
  Clone ID: LIB3196-017-P1-M1-E9
cccacgcgtccgaaagaaaaccatctaagttgaaggcttacatctttctccaaagaggctcgttggttcactgaaatattcttgttgccataagcagagcaatcatgaagaggacttcgagtcctacaagcccttgttgataatggagattcctgaaactttttcacatttgaaaaacagtaaaagggtaaataaatagaaaaagaagtatgcataattctcatactcggtcaacactgcaaaacaagggctatttttattacctcaatccctttatataacatgagatggccctaagttggaattggtcaaaaaatggattcctaccatgaccttaatttg

SEQ ID NO: 45710 - DNA, 390 bp, Gossypium hirsutum
  Clone ID: LIB3196-017-P1-M1-F1
ataagatggcggctgccgcacaatcccgggttgtccgggtcctgccaatgtcacgttctgccattactgcaatagccacatcagtgtgtcatggcccgccctgtcgccagcttcatcatgccgtcatacctcatgggaaaggtggacgttcctcagtcagtgggatcgtggccactgtgtttggagcaacaggattcctggggcgatacgttgtcaaccaccttggacgcatagggtcacaggtaatcataccccatcggtgtgatatatatgacaccatgcaccttcgtcccatgggtgacctgggccagcttctgtttctggaatgggacgcgagagataaagattctatccgacgagcagtggaacacaacaatgtggtcatcaatc

SEQ ID NO: 45711 - DNA, 353 bp, Gossypium hirsutum
  Clone ID: LIB3196-017-P1-M1-F10
gcagctgtcacggtcctgtcctggatttacaggtatgtgacggggaggcacccaccggctgcggatcagttggatagtgcagggatgaaattggctagcaaggcacgggagatgaaagatagggcggcacaactcaccggtgcggcggcttcttaaattagttctctactgcatgcttttgtaaaggagctgtgcaaaagttcaggatcaagtggccataaaccgatccttaatgatgttgttgttatgttgttgatgatgaaaagatgtttttttctaaatttaaaagcagcattagaaacttaactttggggggatgatgtggctgtctgtttatggttaaaactcccgag

SEQ ID NO: 45712 - DNA, 383 bp, Gossypium hirsutum
  unsure (1)..(383): unsure at all n locations; Clone ID: LIB3196-017-P1-M1-F11
atggcgccttcgcccagctcggtcagctctcccgcctggacctcacctacaaccgcctggccacgctggctccggatccgctcttctctcgtgggcgtgaggcagaggcctctcccgcccccctggtgctgagcttcagcgggaaccccctgcactgcaactgtgagctgctgaggctgcggcggctggcgcggccggacgacctggagacctgcgcctacccgtccggtctggccggccgctacttctgggcagtgcctgagggcgagttctcctgcgagccgcccctgattgcccgccacacgcagcgcctntgagtgctggaaggccagcgggccacactgctgtgccggaccctgggtgaccccgcgcccaccatgcac

SEQ ID NO: 45713 - DNA, 367 bp, Gossypium hirsutum
  Clone ID: LIB3196-017-P1-M1-F12
cccacgcgtccgaatcaatccagttatatatatcaaaaaacgtaccatggcaaagttcgctctcctcgtagccactttcgctctcgctttcttcctcgtcaacgcctccatctaccggaccacggacggcgacgaagaaaactggtaccgacacgatcggcgatcgtgtcaagaccagatatggcagcaaggctacctcccaaactgtcagtggtacatgaacgaacaggccggccgcagccacagcggatatggcacccactacctcaactcgtgctgctacgagctccagaacctaaggcaggattgccggtgccaaggcttgaaacaggcgttaggacaacagctgaagctgcaaggagtacgg

SEQ ID NO: 45714 - DNA, 393 bp, Gossypium hirsutum
  Clone ID: LIB3196-017-P1-M1-F2
ataaaaaaaaaaaaaaaatccagaaagaaagaggaggcaaagacagagcaaggcatgtggtgcttgtggggaggtgggcaacacaggaagagcatgggggaggaactgggcagagaggaggcattcccctccccctgcccttctcattgttcccaacccccggtccgttctcttcagcccccctcaacatcgttcgccagagaggctggataccgggacagggtgtgtggaggagagtgagggaatgatcatgactgcacctcctgctcacttttacactcctgttctcacttcctgcctctggcagaaaacagccctgcccctctggcttatctcagcaaagagcagtgcccatcccaactcaaagggcaatgggacagatcccagaagccc

SEQ ID NO: 45715 - DNA, 374 bp, Gossypium hirsutum
  Clone ID: LIB3196-017-P1-M1-F3
cccacgcgtccggtggaagacctcctataatggatctgaaaacagcttatgatgttgaactcagtggatctagaattcagcatgaactatggccattagatgaaattgatccgaggaaagcaaagtttccttgctgtctggtttggaccccactcccagttgtctcatggttggcacctttcattggccacgttggcatttgccgagaagctggcgcgattttggacttttcaggatcatattttgtgaatgtcgaggattttgcttttggtgctgcagctcgatacgttcaactcgatagagaaaagtgctgctttcctcccaacctggctggtcacaaatgcaagcacgggtatcagcatgaagagtttggg

SEQ ID NO: 45716 - DNA, 354 bp, Gossypium hirsutum
  Clone ID: LIB3196-017-P1-M1-F4
gtctaatttaatttatgtttaattagtgtgtctaaattatattaatgtttgttcagctaaattttatgtgatttaattttggttcatgtgtttttgtaggtgagttgaatttggagagtaatgaaacaaggttcatgcatgataggttcaatgtatgggacggtgcatgtaaggcctctttcaatgaatggtggctgatccatttggctccccaaggcacctatttggccaaaaggtgtccagcaacttaaagcacaagcttggccgatcgtattcccaaggcagcatctaagccattcacacctcaatttgaccaatcagctcctatacatgtatgggtggattcatgaacgt

SEQ ID NO: 45717 - DNA, 366 bp, Gossypium hirsutum
  Clone ID: LIB3196-017-P1-M1-F5
cggacgcgtgggatcgcctgtgctacagtatctttattatttggcacagattggcttggctatgtctcctctgagcaacaattccttgtttttggactatcatcggaacccttttccaatgtttttcttgcggggtctgaatgtttccctttctacggatgatcctcttcaaatacacttaacaaaggaacctttggtggaagagtatagcatagctgcttctgtgtggaagctgagttcatgtgatctatgtgagattgcccgtaattcagtctaccagtcaggtttttctcatgctttgaagtcccactggattgggaagcactactacaagagagggcctgatgggaatggtatacacaagac

SEQ ID NO: 45718 - DNA, 369 bp, Gossypium hirsutum
  Clone ID: LIB3196-017-P1-M1-F6
ggtatatttaactcctcttaaatctttaaatctattctttccatgccggttcggttttagttcgactggcatgaacattgttgcttatacaagagaactgaccattcgaatgcattaaagtgcaatatcttcctataaataaattacaatgattagactgttaacaaatccatgttatccataaaaaaaacatctacttctagaatgagaattctagattgacagaatgctaaataatgaggtacatttgtacaagatatatatgctgaacaaaaaaaactattatattcttttgacatacacaaaactacaaggcaattgagtggccaattcaaaaatagatgaacattgctagaggatggctggatg

SEQ ID NO: 45719 - DNA, 372 bp, Gossypium hirsutum
  unsure (1)..(372): unsure at all n locations; Clone ID: LIB3196-017-P1-M1-F7
ctcaaatgcaaaatctcaatcctttctcaagtgtaatgcacgcatatacgaactcgttgccgagcactttgttgacatcaactgttcagactgcaagggagccagatcttccatattcaccctttcctgtgactcagtcgatgccaacaagatacaagaatgccaacctttccaataagggtccaaccatttctatgccagaggctctaagagcaactggtattttctgcagcgcaaccccacacaacagtcactgnctcgggcgagtgttgttacaggacctgcacttccggaacatatagccatgcaccctttttcccaacctacacttccattgtgccactttgccaacatgattagttatcctttctt

SEQ ID NO: 45720 - DNA, 357 bp, Gossypium hirsutum
  Clone ID: LIB3196-017-P1-M1-F8
gttgattttcgattatctcgtcatatatatgcggactagcgattataaatgcttctccagctgctaaaacaaatctatggacgaattttttcaggcaatttcgtgggaggagcctcatccctctcagaagttccccagcgaaagctgctctgatgctgatgaagatgtgatcaagtctaaggtttttttttcccagaattggagatcagcttgtccgtcgctacaaccatgggatcctggatctttactgtactccaactgggctcagagccataatcagcctggaataagcagtggaggagttgtcccaaaccagatcagtaatcatcctccaaccctaaaggaacttactaataa

SEQ ID NO: 45721 - DNA, 380 bp, Gossypium hirsutum
  Clone ID: LIB3196-017-P1-M1-F9
atggaggaagccggcagccaggagcggcagcggcagcagcgtccggagcagccgcagccttctggaagctccaggcggtctttctgccgagcctcggtcccggcccccatcctccccgccccatcggttgttgtctgggcggatttaaacagtcaagtaaaatcaagctgggtaatcatggcagaaggtggattcgatccctgtgaatgtgtttgctctcatgaacatgcaatgggaagactgatcaatctggtgttggaactgaccaaaaaagtgcagagacatggtcaatcctgaccatttaacttcccggtggttctttaacatcggggtcttcttgggtggtcctcctttaacaacctaaaaaggccctttttttc

SEQ ID NO: 45722 - DNA, 321 bp, Gossypium hirsutum
  Clone ID: LIB3196-017-P1-M1-G1
aaacactcgaaaatacgtatttaaatacgtacggacgggttactcagcagatcgttacgtatgtggtagcgtcggctgcggttggatatttgatcagatcgcgatccaaatggctgaggacaagtataacctaaagaatccggcggggaagaggatattacaagaggtcaaggagacgcaatccaatccctctgatgatttcacgagcctacctcttgaggagaatatatttgtatggcaactttcaattaggggtccgagggtttctgcatttgtgggagggatttatcatggaaggatacaattacctgctgagtatgc

SEQ ID NO: 45723 - DNA, 328 bp, Gossypium hirsutum
  Clone ID: LIB3196-017-P1-M1-G10
atgtggcggctggtgtggggttgagtcagttgtgagacccggagctggtgacccagcgggtggcccaccgaaccggcgacacagcgacaggcgtcagggctcgggagctgcgagcctggcctcgtcttagagctcggccgagccgccgtcgacccccgcccccagtcagcaaaccgccgccgcgggcgcgcccccgctctgcgctgtctctccgatggcgtccgcctcaggggccatggcgaagcacgagcagatcctggtcctcgacccgcccacagacctcaaattcaaaggccccttcacagatgtagtcactacaaatcttaaa

SEQ ID NO: 45724 - DNA, 317 bp, Gossypium hirsutum
  Clone ID: LIB3196-017-P1-M1-G11
atcaacggaaatcaaagatgtgtgtagtcaaagagctttccatttttgttctctttgttttgatttttggaaatgtaattcaagcccaaaattcaccttttccatctcctaaatccactccaaccacaactcctccctccaaatctacttcatcatcgcctcctgcgagttccccaacaacatcatcgccgtctgcagcatctccgactactcctcctcctccacagatccaaccaccggctgcgactccgccttcttcttctagcccatcgatttctcccccaactgcttctcctccggctttcactccttcaagc

SEQ ID NO: 45725 - DNA, 374 bp, Gossypium hirsutum
  Clone ID: LIB3196-017-P1-M1-G12
atgggccctcttgcttctctgatagctcccagcttactctctgcagccatgattgccagacagcagtgtgtccgaggcgggtctcggggcttcagctgtggctcagccatcgtaggcagtggcaagagaggtgccttcagctcagtctccgtgtctggaggtgctggccgatgctcttctgggggctttggcagcaggagcctctacaacctcggggggaacaagagcatctccatgagcgtggctgggtcacgacaaggcgcctgctttggaggtgctggaggcttcggcactggtggctttggcggtggatttgggggctccttcagcggtaagggtggccctggcttccctgtcttgcctgctgggggaat

SEQ ID NO: 45726 - DNA, 371 bp, Gossypium hirsutum
  Clone ID: LIB3196-017-P1-M1-G3
taaccattgaaagcagctatgcataattgaattggtacattaaaaatctatcacacaacctgtttaagtggagcctctctagtttaggtcacagctaatacaattttaaggcttatagttaaggcaacagctggtggctaatgtttattgcttattggctttgaatgcatagaggtaagctatctatagtagattacttgtataaaacaagatatttgaagaaattttgaacccaatttaaaaaaaaaaatcactaataatttcactcgataagatcactatcatcaattatttacattagaggtaaatctgaagaggatagataggagtgttggcctcccaaataaacttgtattttaatctctaaaaga

SEQ ID NO: 45727 - DNA, 366 bp, Gossypium hirsutum
  Clone ID: LIB3196-017-P1-M1-G4
attctctctgacaccaccgtttaatcatcatcttgccctctctacctctttttgcatacctttcagaagggctcacaccttcaaaacacagggagggacactctcaaaagataatggaagattggataacaaaatttcaaaatgaaatattcttttttccccttcttttttccaaaatcgattccccccacttttttttcccaaaccctttgttccctaccccgattccctttattttttcccccaatttccccaaatcggcagcccttcttttattttttccaaaccattttttccctaccccgattccctttgtcacctcctttgtacgaccacccaaccttcgcctcatgtctccgcttccaa

SEQ ID NO: 45728 - DNA, 384 bp, Gossypium hirsutum
  Clone ID: LIB3196-017-P1-M1-G5
tcaccttgacttctttgttacaatgctaacatctttttttttgtgcagttatccatggttattaagcagggtggaagttcagtattttgtcatttaaaaagattagttatataatgtctgcttccagccagtgagaaacatctagccatacctttcttatgcaagccattcagttatcaggactgtgaattaacactgtatgaataaatttctgtacaccttattgtttggccagaaggccaccaagtgtacttatatgtgatccttaaattttaaagtagctgtaatcattaaatatttctaaacttttcttaaaccactaaaattaagctcttactacttagtcaactatcctcagctgtattcgtactcaattgtcagtat

SEQ ID NO: 45729 - DNA, 375 bp, Gossypium hirsutum
  Clone ID: LIB3196-017-P1-M1-G6
cttctggaagagatctcaaatccttctcccaacattttgctgaatcaaggcaacaccagtgacatcaccttacccactcgtggagtagttgatgagcttccaaggcctcctgttatcaacagacctacggagaaacgacagagagtcccctcagcgtacaaccgattcatcaaggacgagatccaacgcatcaaggcaggaaaccctgatataactcacagagaagccttcagtgcagctgcaaagaattgggctcacttcccacatattcactttggcctaatgcctgatcagcctgccaagaggactaacgtgcgccagcaagaaagcgaggacgttctcatgaaagatggattttttgcttcagctaacgtc

SEQ ID NO: 45730 - DNA, 281 bp, Gossypium hirsutum
  Clone ID: LIB3196-017-P1-M1-G7
atcgcgcctcagaggccggtgaggcgccggcggccacgccgcggagggcgcgggccgagcagagccgggcgttgaggcccgcgcgcgcatggaggcgttgccggcaggcccctgagggcagcggggagacacgacccggcgacctcgcgcattcctcgagccgccacgcgctctcgccaccgggcggcgacgggccgcggagccggagcggccatggcgacgggcggtcagcagaaggagaacacgcttgttcaccttttcgccggcgggtgtggaggcac

SEQ ID NO: 45731 - DNA, 370 bp, Gossypium hirsutum
  Clone ID: LIB3196-017-P1-M1-G8
cccacgcgtccgacaaaatacaatgggaaatgttactactgcaagaagtgaagtaataatggaatgagcagagagttgtcagcatctacgcccctagaagatataatgtagctctcatttctcctgctgtcggattggtgttccataggataggagacaagacaaaattagacccatgtgaatgccagttaaacgacctttgctgcaataaaagactcaatttttcaaagagctggtactgggaatgtcatgactgctacagagggttggttgtttgtttttttggaccactagtgaacatgttcttagacgtatcaaaataatttcattatcaaaagcctatttcttttatggtcattaaaacctggtt

SEQ ID NO: 45732 - DNA, 280 bp, Gossypium hirsutum
  Clone ID: LIB3196-017-P1-M1-G9
atcgccgccggagggtcgtcttaaagggcccgcgcgccgacgccccctcggcccgccatgctgctatccgtgccgctgctgctcggcctcctcggcttggccggcgccgagcccgccgtctacttcaaggagcagtttctggacggagacgggtggacttcccgctggatcgaatccaaacacaagtcagattttggcaaattcgtcctcaggtccggcaagttctacggtgacgaggagaaagaaaaaggtttgcagacaagccaagatgcacgctttt

SEQ ID NO: 45733 - DNA, 357 bp, Gossypium hirsutum
  Clone ID: LIB3196-017-P1-M1-H1
cccacgcgtccgggatcttcactttacaggcattttaatcccttaaatctctctcaaccaaaaaaatgtcgggacgtggaaagggaggcaagggtttgggaaaaggtggagcgaagaggcaccggaaagttctccgggataacattcaaggcattacgaagccggcaatccggaggttggctcgtagaggtggcgtgaagagaatcagtggtttgatctacgaggagacgcgaggtgtgctcaaaatctttctggaaaatgtgattcgtgatgccgttacctatacggagcacgctaggcgcaagactgttacggccatggatgttgtttatgctctcaaaaggcagggcaggacac

SEQ ID NO: 45734 - DNA, 357 bp, Gossypium hirsutum
  Clone ID: LIB3196-017-P1-M1-H10
gtaaaaaaaggcttaagcttgatatcattagggaaactgatgtttacaagtcggatcctgaggaattacttgggaaatcggtactgaagaatggggatcgacagtggttctttttctgtccaagagacaggaaataccctaatggagcaaggtcaaacagggctaccatacatgggtattggaaggcaacgggaaaggatcgttctattacttgcaattctcgagttgttggaatcaagaaaactttagttttctacagagggcgagcacctaatggcgagcgaactgactgggtgatgcatgaatacacccttgatgaagaggaactaaagaggtgccagaacgtaaaggattata

SEQ ID NO: 45735 - DNA, 276 bp, Gossypium hirsutum
  Clone ID: LIB3196-017-P1-M1-H11
ggggaatgcatcagggttggcagtgatgactgtgatgctggtgacaacatgcctcatgtccctcgttattatcctctgttggaacaagcctcccgctgtagctctttcctttcttcttttctttggttctattgagttgctttacttctcagcttcactcactaagttcacagaaggtgcttggcttcctattctgttggcccttttcctcatgacaatcatgtttgtatggcattatgccaccattaagaaatatgaatttgatctccacaataa

SEQ ID NO: 45736 - DNA, 365 bp, Gossypium hirsutum
  Clone ID: LIB3196-017-P1-M1-H12
atgccagggtcaggcctcagggcgtctgtcggcacggggcgtccactggcgcggggagacctgcccgctgccctgcaaaggccccaggagcagttcttcctggaccccctcttggtttgcaggagcctgggggcagctctgactgagacagggagagagagaacacaggtgaggtcccgccagggaacacctcgcagagccgtgcgtccctgtaccgtctccctccctcggacacaagccaaggccccacggaggacagacagtggcccccgcgtgccctctgacctgatcaggcccagtgtgagcaggaagcaaactccactgacctccactgagcggagagcctggcgccttctttctttccc

SEQ ID NO: 45737 - DNA, 375 bp, Gossypium hirsutum
  Clone ID: LIB3196-017-P1-M1-H2
aatcaatccagttatatatatcaaaaaacgtaccatggcaaagttcgctctcctcgtagccactttcgctctcgctttcttcctcgtcaacgcctccatctaccggaccacggacggcgacgaagaaaactggtaccgacacgatcggcgatcgtgtcaagaccagatatggcagcaaggctacctcccaaactgtcagtggtacatgaacgaacaggccggccgcagccacagcggatatggcacccactacctcaactcgtgctgctacgagctccagaacctaaggcaggattgccggtgccaaggcttgaaacaggcgttaggacaacagctgaagctgcagggagtacggtgggagagtcgagaggctga

SEQ ID NO: 45738 - DNA, 391 bp, Gossypium hirsutum
  Clone ID: LIB3196-017-P1-M1-H4
atgcttgcttcaatattttccttaatttaatatgaggaaattcacagtttgctctggcctcttaattctttttaagtgaaacgaaattctttgtgcagagaaagaataagaatgctgataggcgaatgagacagaggtatgtatacacacaattacatatgttatcataatgtgtatatattacatatcacaatcaaataagcagtgcagtgatatttctaaagacacagaagtatctacagtgagaagtcatcctcccattcactcctgtctgcctagccagagatcctttctccagaaacaaccactttaaacagtttcttgtatagctttccggacataatctacttatatttaaataattatgtaaatattcattaaaacccacaaa

SEQ ID NO: 45739 - DNA, 352 bp, Gossypium hirsutum
  Clone ID: LIB3196-017-P1-M1-H5
gcaatttcttaaagttcttttctttgctgttttagtcaatggctgaccaccacctacaaaacactcaaccaatgactcaccaaatggtgaaagccgctactgccgcaacagccggtggttccctcctcattctctcccgtttaatcctagctggcaccgttattgcactcactatagccactccactcttcgttattttcagtccagctcttgtccctgctctcattgcaacagctctcctagcaacgggtttcgtcgtctccggcggtttctgtgttgcagccgccacggttctgtcctggatttacaggtatgcgaccgtgaggcacccaccggcagcggatcagttgga

SEQ ID NO: 45740 - DNA, 381 bp, Gossypium hirsutum
  Clone ID: LIB3196-017-P1-M1-H6
atgccagggtcaggcctaatggcgtctgtcgtcacggggcgtggtgtgccatgggaaactgttacagcttgcataaagaccacgaaactgctctgaaaaatttccaacgagctgtgcaactgaattcaaaatttgcatatgcacacaccctttgtggtcacgagtatgttgccttagaggattttgagaatggaatcaagtgctaccagaatgcacttcgtattgattcaaggcattataatgcctggtatggtctaggaatgatctatcttcgccaagagaagtttgagttttcagagcatcactttggaatggctttccaaataaatccacgttcttctgttataatgtcctatcttggaactgctcttcatgccttaa

SEQ ID NO: 45741 - DNA, 350 bp, Gossypium hirsutum
  Clone ID: LIB3196-017-P1-M1-H7
cggacgcgtgggcagccttcagagccggtgcaacgcatccttttccgagctggagtattgcctccgccacccatggtggcaatgggacgcaagggtggaccacgtgacacgcgtcccgttgatcctatgaccggtcgtgttttaaacgaagagaaaccaattgctggcaaccaagaaaaaagtggcgaatatgaggctgttgatgagtcaaactctgcatgaaaagttaatattatccctaagactcctcactctgcaatatctaaaagttgagaaaaatgaaaaggtggattatattggatgattggaaatttttgtctgaaaaataacatttgccatttgcagaaact

SEQ ID NO: 45742 - DNA, 388 bp, Gossypium hirsutum
  Clone ID: LIB3196-017-P1-M1-H8
atgtcggcgggcattcacgagaccacctacaacagcatcatgaagtgcgacatcgacatcaggaaggacctgtatgcgaacaatgtcatgtcggggggcaccacgatgtaccccgggatcgctgaccgcatgcagaaagagatcaccgcgctggcccccagcaccatgaagatcaagatcatcgccccgccagagcgcaagtactcggtgtggatcggcggctccatcctggcctcgctgtccaccttccagcagatgtggatcaccaagcaggagtacgacgaggccggcccttccatcgtccaccgcaaatgcttctagacacactccaccttcagcgcgagacttctcaggacgacgaatttgctcaatcggctggcgactgacc

SEQ ID NO: 45743 - DNA, 369 bp, Gossypium hirsutum
  Clone ID: LIB3196-017-P1-M1-H9
atatttttttatctaaaatgaaaatatttctcatactgtttattaatacaaaaccatcggattttattttttaaaaataaataagattgatttactcatttcaagaaatgcattaatttaatggaaatgagtgaaggattcacgaccatacattaaactggaaaattaccttatacacatgaagattgtttaatatcatttcatgaatgcaacaataaaatcaaatcaaatcaaataagcttaaattaacctcaaatacaagaaaattggtcatgaattccaaaatatcataacacatacacaaagttgtttataggtcggatatccgttcaagtttgaaggcttgtttcaaaaatgaaaggatttaaa

SEQ ID NO: 45744 - DNA, 191 bp, Gossypium hirsutum
  Clone ID: LIB3196-018-P1-M1-A1
caagattggaattttaaaagatcacaaagggcaaaatggtcaattggaggagagagaaatctagagacactgatgatgttggggatatttttgataaattaaataaatatttgttttttaaaactttaaatagatttttaatgaaagtttattaatttaataataatttaattgaaaaaatatatgtaagg

SEQ ID NO: 45745 - DNA, 335 bp, Gossypium hirsutum
  Clone ID: LIB3196-018-P1-M1-A10
cccacgcgtccgcgtagcggcaaacctctccactacaaaggctcatccttccaccgggtgatccccaatttcatgtgtcaaggaggcgactttaccgccgcaaacggtaccggaggtgaatccatctatggagccaagttcgcggacgagaacttcatcaagaagcacacgggacctggcatcctttccatggcgaacgctggacccggaacaaacggatctcaattcttcatctgcacgaccaagacggagtggctggacggaaagcacgtggtggtcggacaggtagttgaaggcatggatgtggctaaagcgattgagaaagtggtgtctag

SEQ ID NO: 45746 - DNA, 361 bp, Gossypium hirsutum
  Clone ID: LIB3196-018-P1-M1-A11
cccacgcgtccgccaagttaggcccacctattctgaaatctcactaatgctatatcggttacccacaatttgttcgtaacgaaaaacatggtgggtattttttccagattttctgttggcaggtctgcccatcgacgctccaagagtgcctttgtggaaaccaatgttatgccccaaaatgccgatgtagttgatgctgctacagctaccgcccatggaattgaagtagcagttgagttcaagcctgtcgaatgtccaaccgagcctttggacaatgaccgaccaattcagtgccccctacctgaacctttaattctaaacgatggaaggatctggaaggagcgagtttcggctaatgtaa

SEQ ID NO: 45747 - DNA, 313 bp, Gossypium hirsutum
  Clone ID: LIB3196-018-P1-M1-A12
gcaatagacactgttaaccaggtttttcatgtgctgactgattggcagaattactatgcaatgaaacattggttcctccggaatacttttagggatgctgttgttcaggtgttgaacattgaagatccagattcctatggtaaagcgactctatctcacctgacattacctgtggagtttcgagtttcctttcctagcaatgatagtgcaccagcaataaataatagaacacaatatgtatccattttttctcattctcattatcttcttcctgagatatttaaaaacttggagaaaggtgtggttttggatg

SEQ ID NO: 45748 - DNA, 352 bp, Gossypium hirsutum
  Clone ID: LIB3196-018-P1-M1-A2
atgcaatcgaatagaaataatatcctctcatttgatggagattatgggacgcagggaatggctacaacctcaagagcactgaggaccccaagagataatgcaagaacaatcacatcgttgcccgtatctccttgttcaagccccttaagatacggtccagtacacaggagttgttttctttctcctcctcatccagcttatcagattgtaggacagagtggtcataacttaggcgacttctctgggaacacatcaagaccaaacccgagatacactcatgatccttggtttgaagcgccacaactaaaagtacaaacaacaagcacctcgtcaagaacaagacctatttgag

SEQ ID NO: 45749 - DNA, 386 bp, Gossypium hirsutum
  Clone ID: LIB3196-018-P1-M1-A3
attgcaactccaggacccaaataaatgataatgatttcccaagttctccccctaggaaacctctggagccatttactggatacccatatactagggaaatacaaacactcaaatatttcaaggacccttggaatctggatccaagttgcctatggtacgcagatcatggaaagtcatcataaaatacctgttaaaataggaagttagggcctcaaggttataaatgtagtcttggcccacatgaacttattgcaatacagtatttgtttcaaattaaaagctaaggtttgtttgaagacaaataccttgcttatttttctgtccatccccttgggagtatgttgaggcataagatgtgctaaataagcttcttttataaaaacaat

SEQ ID NO: 45750 - DNA, 368 bp, Gossypium hirsutum
  Clone ID: LIB3196-018-P1-M1-A4
cggacgcgtgggagaggatccatggaagggagagagagaaaacaagtggagagaagaagaagaggaggaaagtgacgaaggagagcaacaacaaaggaacaacccttactacttccatcgcagatcgttccaagaacgattcagggaagaacatggcaatttcagagtcctccagaggtttgctgccaaacatcatttacttaggggcatcaacgagttccgcattgccattttagaagcaaaccccaacactttcgttctcccacaccattgtgacgcggagaaaatttacgttgtcactaacggaagaggaacaattacgttcgtgacacatgaaaacaaagagtcatacaatgtagctcctggag

SEQ ID NO: 45751 - DNA, 365 bp, Gossypium hirsutum
  Clone ID: LIB3196-018-P1-M1-A6
aactcggaaaatggacccaactgcaccctccgcgtcggtcgtcggcggcggctgtggtggtggcagaggagggccggcacctttccttataaaaacatacgacatggtagacgactcatcgaccgacgacatcgtttcatggagttctaacaaaaagagctttgtggtttggaaccctcctgattttgctcgccttttgcttcccacttatttcaagcacaataatttctccagctttatcaggcagcttaatacctatgggttccggaaaattgatcccgaacgatgggaatttgccaatgaagattttgtgaaagatcaaaggcatcttcttaagaatattcatcgaagaaaacctatttaca

SEQ ID NO: 45752 - DNA, 279 bp, Gossypium hirsutum
  Clone ID: LIB3196-018-P1-M1-A7
aagtgagccttatatctctataaccgtacataagtctagtttcgtttaaaataggagatgagccttagagttatatattaagagttattaatttttgaatgagaaaaggttagaatgctaaggtagcagactgacacatctcattagttaatattttagctagaatgataagcaagttgaaacgagtatgagactcaaatgtaatgtcatggttgtatctttgtgactatatgtttgatgttttgtttacgctcagacttcgggctataacctaactag

SEQ ID NO: 45753 - DNA, 365 bp, Gossypium hirsutum
  Clone ID: LIB3196-018-P1-M1-A9
atcgcgtgtgtctgtgcgaggcctgcgccgcccaggagcaccgcggccacgagctggtgccgctggagcaggagcgcgcgcttcaggaggctgagcagccgaaagtcttgagcgccgtggaggaccgcatggacgaactgggtgctggcattgcacagtccaggcgcacagtggccctcatcaagagtgcagccgtggcggagcgggagagggtgagccggctgtttgcagaggctgcggctgccctgcagggctttcagacccaagtgctggccttcatcgaggagggggaagctgctatgctgggccgctcccagggtgacctgcggggacaggaggaacagcgcagcccgctgagccgagcc

SEQ ID NO: 45754 - DNA, 67 bp, Gossypium hirsutum
  Clone ID: LIB3196-018-P1-M1-B1
atgataggagtacttgctacttacagggatttaaacgcttttcatgtcatactttctacaagacact

SEQ ID NO: 45755 - DNA, 283 bp, Gossypium hirsutum
  Clone ID: LIB3196-018-P1-M1-B11
ggagcatgcatttccacttgacgagttgagaccgctatcgtgtgaaggagaagatacacttggtggttatgccttgacactgattgattctttagacacattggctttacttggagaccgagaacgctttacagcctctgttgaatggattgaataaaacagtttctatttttgagaccaccatcagggtccttggaggtttactttccgctcatcttattgcaagtgactatgctacgggcatgagaattccttcatatgacaatgaattacttgacttaac

SEQ ID NO: 45756 - DNA, 346 bp, Gossypium hirsutum
  Clone ID: LIB3196-018-P1-M1-B12
gcttcgctgccgtctttcaactctatatctccggtctccgtgtcggaaatgtcaatatcatcagccccaagcttcaacctctcaactttctccaatggcggagctaactatacaactacgaataaggtgatagggactagagctttcgcttgtcttaaatatattaatagcatcgaatctcggttgaaattaacttgaccagtatcagttcatacgcacgttttaactttcacgaaccgcgacttttcggttcgctgcgttaggccggattctaccgggaacacaaataggggttcactagaaagggaaaaaggtaattttgatgatgaatctaaggttgcagaga

SEQ ID NO: 45757 - DNA, 366 bp, Gossypium hirsutum
  Clone ID: LIB3196-018-P1-M1-B2
ggcagcttctgacaggcagaagtcttatgtggatctaaagagacacgagattgagtattccgtgaaggatttcgtgtttctcaaggtctcgccatagaagaagattttgaggttcggtcgtaagggcaagttaagctctaggtttattggtccatactgtattctgaagcgagtagggctagtcacctatcagttggagctaccttcagagttggatcggattcacgacgtgttccacgtctctatgttgaggcggtaccattctaatcccatgcatattgttcctgttggggaaattgagattcgatcagatctagccttcaaggtggaaccggttaagattctaaaacacgatgttaaagtttt

SEQ ID NO: 45758 - DNA, 357 bp, Gossypium hirsutum
  Clone ID: LIB3196-018-P1-M1-B3
gtttctcattatagatatcatcccttcttccttcattttcatttcatcccataggaatattcttcttcctttttctacatatactctaggtgtttgataaaagtccgatactgtttttttttgaagcgtggaggttgggtatttggttaaggtagttttgaaggggtttcgaattctgggtttaattcgttttggtgggggtaatacccaggtttagacaaattgtgggcatcacggctatacacggagtttctggggctcttattcatgttcgtactgtacgacgtaagggttgtgtgaacgagagcaacccttcgccgcacggggggcgtggagcttttccttttgaaggtggta

SEQ ID NO: 45759 - DNA, 365 bp, Gossypium hirsutum
  Clone ID: LIB3196-018-P1-M1-B4
gtttttccatggctgaacttgatgatactggaggtgatattagttgggacattgaagttagtgagttaaagcgtgacaatatgggtgaggaagatgttagcgatgaagagatcagagcggatgaattggagagacgaatgtggaaagattctgttagactcagaaggattaaggagagggaaagggttgcagctcaacaggctgcggaactgaatcaaacctcggaactggctcggaggaagaagatttcccgagtgcaagatgggattcttaagaacatgttgatgttaatggaagtttataatgcgcgtggatttgtgtacggtattgttcctgaaaatggtaaggctgtgagtggtgcttcg

SEQ ID NO: 45760 - DNA, 240 bp, Gossypium hirsutum
  Clone ID: LIB3196-018-P1-M1-B6
atggatgagtgagtatctgcctcccttatgggcgactgcgtaacattgtttggtcgtgaataacctggactatgacacctttagactggccgaggcttcaacgatgtcgggtgagacagaaatagggtctaccccagaacccctctatggggaatgtggcgagagccgtattcaggctactggctcccgaagctgcagacctatgcaggattcaaccggagacctcaatggctacgtgga

SEQ ID NO: 45761 - DNA, 380 bp, Gossypium hirsutum
  Clone ID: LIB3196-018-P1-M1-B7
ataaacaatggaggtaaataccttcagtagggaaatgtatatatataatttcatatgcataggacgaagtaaaaacatagttctatgattgaggtgattggatctcaataatgttgaacaaaatgttggcaaatttttactggatcaaagtcctttcatgtttaaattttccagtgaatgattggagtacttgctaattaaagggatttaaatgcttttcatgtcatactttaaagtgaagactattgatattctgttacaaaaatatagaaatctcttaatcccacccagatgaagaattatcccttttccccatggagaaagtctataaacttgcccacctgcaagtctcaatttattttcaaaaagagcctttgcat

SEQ ID NO: 45762 - DNA, 346 bp, Gossypium hirsutum
  Clone ID: LIB3196-018-P1-M1-B8
tgcacattatgtattctctttacagaacattgattgtttttttttctgtcatgtgtttattttgtaataaacagaaatatttatatttgacatatgattatttatattattataatattttaattaagtggcatcaacttgattaaagtaatcatataaaattaaaatatatacatatttttataatttttttaaataattaatattttaatgatttgtctgtttcctaaaatagtatattttttttgctcataaatgagtgggatgagatttaatgtctaaaattatatagcatcattgaattgagtcatgtgagttcatttacgtaaaattatttaaaaataaa

SEQ ID NO: 45763 - DNA, 220 bp, Gossypium hirsutum
  Clone ID: LIB3196-018-P1-M1-B9
atccttgctgggcgtgccctgacctcccggtaccgtgtgccgcactgtgggccgggacgcctggtgctgccggctgggtgtgagccctgaggagctgagggtggctgtgacttggaggacgagtgggagctcaccaggagggtgtggagccggctgtttcatatcaggagcaacacggggctcagaaggcaggcacacttgctgtcccttcagagccatg

SEQ ID NO: 45764 - DNA, 382 bp, Gossypium hirsutum
  Clone ID: LIB3196-018-P1-M1-C1
atgtgaacgaagattcgaaaagccaattgaagaaaagggtgaaggaggcgaattttcagttgatcgaccgattattgaccgacctattcgaggtcgtggtggtcttggaagaggtcgagggggccgtggacgtggaatgggccgaggagatggatttgattctcgtggcaaacgtgaatttgatacggcatagtggaagtgatagatctggcctgaagcactaggacaaacgtggaggtagcggatctcacaactggggaactgtcaaagatgaattaactgacttggatcaatcaaatgtgactgaggaaacacctgcaggtgaagaacattatccagtggcagacactgaaaataaggagaatgaagttgaagaggtaaa

SEQ ID NO: 45765 - DNA, 317 bp, Gossypium hirsutum
  Clone ID: LIB3196-018-P1-M1-C10
gaattcagagacttaactagtgaaccaacaggatcattcttgacacagatttatactaaattaaatttaactatgtaattcatggattgaggtttgttttaaaataacaaaactactaacgatgtgactcgaactcttgacctcgatcccaaaagcaaagctcagaacctcagatacagagatttaattacttcaaaatgacacaaggtaacattcaaaattttgggacgttacagtgaatcattggtcgagtgaaataaagaaaggaggccggaaagcaatggttcggttgaattatttaaaggacttggctttct

SEQ ID NO: 45766 - DNA, 381 bp, Gossypium hirsutum
  Clone ID: LIB3196-018-P1-M1-C2
ataaggttggtaagggaggtgagtggtgtgactcttactccttaggtgcccagaatttaccatcatctctgaaggagttacagggaagtggtctccccaattgtcccctccctccagtattgcctcctctcactttagcatatattaattagcaggttgggctagagaaatcagctgctatgcgggttgattattattattatttttaatccttttccttatttgccttctactccccttaatctaatctaaaagctctgttccatgcaactttatccctctcttccccttcccttatatattgaggctatggggtaggagaaaagtgcacaacccaccaccccctttactcgtgcattaaaatttctcatttaccctttc

SEQ ID NO: 45767 - DNA, 381 bp, Gossypium hirsutum
  Clone ID: LIB3196-018-P1-M1-C3
atgtttcaagacactgagcgagagtcctgagggagcctgcagctctcaagagtctggaagcctccattctggggcctggcaggagctgagtgaaggacagagaagtggcactgaagtgggaagggcagggaaagggcagcattatgaggggagcagccatggacagagcaagcagccttccagagggcagagcaggcctggggctcagacccagggtcaggccactggctctgcgtgggtcagcagctatgacaggcaagctgagtcccagagccaggagagaacaagtccgcagatacaatgctctgggcacacagagcagacccagagagctggtgaaggcaagaggcatcagaccacacagatgaggccagagagaga

SEQ ID NO: 45768 - DNA, 383 bp, Gossypium hirsutum
  Clone ID: LIB3196-018-P1-M1-C4
atgcgggctgggccgccaaggcaagatggtggactacagcgtgtgggaccacattgaggtgtctgatgatgaagacgagacgcaccccaacatcgacacggccagcctcttccgctggcggcatcaggcccgggtggagcgcatggagcagttccagaaggagaaggaggaactggacaggggctgccgcgagtgcaagcgcaaggtggccgaatgccagaggaagctgaaggagctggaggtggctgagggcggcaaggcagagctggagcggctgcaggccgaggcacagcagctgcgcaaagaggagcggagctgggagcagaagctggaagagatgcgcaagaaggagaagagcatgccctggaacgtggacacgctca

SEQ ID NO: 45769 - DNA, 366 bp, Gossypium hirsutum
  Clone ID: LIB3196-018-P1-M1-C5
atgcggcgtgacctgtggctttggtggaggggctggtagtggctttggaggtggctacggaggtggccttggaggtggctttggtgggggttatgctggtggctttgttgattttggtgcttgtgatggtggcctcctcactggcaatgagaagatcaccatgcagaacctcaacgaccgcctggcttcctacctggagaaggtgcgcgccctggaggaggccaacgccgacctggaggtgaagatccgtgactggcacctgaagcagagcccagctagccctgagcgggactacagcccctaccacaagaccattgaagagctgcgggacaagatcctgaccgccactattgaaaacaaccgggt

SEQ ID NO: 45770 - DNA, 379 bp, Gossypium hirsutum
  Clone ID: LIB3196-018-P1-M1-C6
atcagctttgcctgcagccctagtgcaggatccactgggtgaagccagctgggctcctgaaatgaatggggacttggagaacttctgtatctagccagaggattgtatgtacaccaatcagcactctgtgtctagctcagggtttgtgaatgcaccagttggaactctgtatctagctaacctagtagagacttggaggactagcactctgtgactctgtgtctagctcaaggattgtaaatgcaccaatcagcactcagtgtctagctcaaggtttgtaaatgcaccaatcagcactctgtgtctagctcaaggtttgtaaatacaccaattggtactgtgtatctagctaactctgtatctagctaactagcactct

SEQ ID NO: 45771 - DNA, 303 bp, Gossypium hirsutum
  Clone ID: LIB3196-018-P1-M1-C7
acgtgtttacttgctttatacataaaaagagaaatattatgatcatatttatttggaaggagaggtttatttttctgggcattgggctgagattgatggagggctcgagaacacaactgagaggtacttgtagattgagagaggggcgccaaagctaaggaggagacatgctttgaaagtgagtgagcaatattcagcttttagggaagaattcctgaaggaagctggtaatgagaaagggagtttgaggagaccattgttcacttatttcacgggttgttagacttgtagtggggaccataa

SEQ ID NO: 45772 - DNA, 297 bp, Gossypium hirsutum
  Clone ID: LIB3196-018-P1-M1-C8
ggagtcgctggtcgtcggttgtggtaaactcgtgtgggacgcacgtgccatcgcttctcattacgttcgttccctcaaaggtttctggtttgatgtctttgtgattctgccggttcctcaggcagtattttggttagttgtaccaaaattaataatggaagagcagatcaagattataatgacaatattgttattaatcttcttgttccaattcttaccaaaggtttttccacatcatttgcttaatgagaagggtgcaaaaaggttacccggttaacatcttttggcaccaatttt

SEQ ID NO: 45773 - DNA, 370 bp, Gossypium hirsutum
  Clone ID: LIB3196-018-P1-M1-C9
atctgcggtcgagcggcagacgcaaacatgcagatctttgtgaagaccctcacgggcaaaaccatcaccctcgaggtcgagcccagtgacaccattgagaatgtcaaagccaaaattcaagacaaggagggtatcccacctgaccagcagcgtctgatatttgctggcaaacagctggaagatggccgcactctctcagactacaacatccagaaagagtccaccctgcacctggtgttgcgcctgcgaggtggcattattgagccttccctccgccagcttgcccagaaatacaactgtgacaagatgatctgccgcaagtgctatgctcgccttcaccctcgtgctgtcaactgccgcaagaagaagt

SEQ ID NO: 45774 - DNA, 330 bp, Gossypium hirsutum
  Clone ID: LIB3196-018-P1-M1-D10
atggagtctcttagtttagacaaaagcccatctgaccaatgacattggagcatcccaggagtgaaggtctagaagtattggagtccagtgcaggggtggggggagtgtttcgtatcatttatgtcttgctctttcaaaaaacatttttttttttttttcactattttaggtatgagaacgagctggccctgcgccagagcgtggaggctgacatcaacggcctgcgccgggtgctggatgagctcaccctgtctaagactgacctggagatgcagatcgagagcctgaatgaggagctggcctacatgaataaaaaccccgagggggtga

SEQ ID NO: 45775 - DNA, 256 bp, Gossypium hirsutum
  Clone ID: LIB3196-018-P1-M1-D12
gcgattcctcggaaccaatatgaaactgaccctaagcatcaagacaagtcctaagaaatgtaatacgaggatacaagagcaagtatgagtggtaaaaggcatacagtgcgtaagggcatattagagtgctggaaaaaagccttaaaacgagcggagcatgagtgtgagtgcacattcagtatttctttccaagtgaattagtgcagcttgtcttgaggtttgcaaatactatgttactaactgccgaaagaaacat

SEQ ID NO: 45776 - DNA, 312 bp, Gossypium hirsutum
  Clone ID: LIB3196-018-P1-M1-D2
atagttttgcgaacgctcttggcgcgtcccgggccggaagcattctgcacacgcctttttcccacggcaggatgcccaagaggaaggccagctccgtcgaaagggccgccaaggtagagcccaagaggaaatcggcgcggttggcaactaaacctcctgcccaagttgaagccaaaccgttaaaggcagcaactaatgataaatctttagacaaaaaagtgcaaacaaaagggaaaaggggagcaaaaggtaaacaagccgaagtggctttccgagaaactaaagaagatttacctgccgaaaaccgggaaa

SEQ ID NO: 45777 - DNA, 364 bp, Gossypium hirsutum
  Clone ID: LIB3196-018-P1-M1-D3
ggcagttttcttgggcaatccaactggaaaaagggaatgtgctggaactggcgttttcttgcctcgccgtattggtgcaccttctgaaccccgcaagaagccagcttgtcctactgttctgcttccagctagagtggttcaggccttgaacttaaatcttgatgaacttggtgctcaaccccagcttaatcctcggttgaacgctaatgtcaccgccgaaattgatgctgctttgaaacttggaagtggttggaaccagaagcaggggaatttcaggcaacatcaaggaataaaccatgaagttgcgttacctcaggaatggacatattgagcagctttgggtggttgggttttcatgatctct

SEQ ID NO: 45778 - DNA, 353 bp, Gossypium hirsutum
  Clone ID: LIB3196-018-P1-M1-D4
cccacgcgtccgaagaattctcatgtcccttatagaaacagcaaactggctcaagttctccagagttctttgggtggccaggcgaaaacccttatgtttgtgcagcttaatcctgatgtagaatcatatgctgaaaccataagtactttgaagtttgccgaaagagtttctggtgttgagttaggtgctgcacggactaacagagaaggaagagatatcagagaacttatggaacaagtttcatcgctcaaagaaaccatcacaaagaaagatcaggagattgagcgtttgcaactgcttaagggtaatggcaatagtactaagcgtggtatgagctcactgaggtacgagtc

SEQ ID NO: 45779 - DNA, 357 bp, Gossypium hirsutum
  Clone ID: LIB3196-018-P1-M1-D5
cccacgcgtccgagaaaatcgcctacgatgctaaattatgtcaactcttagacgagtacacccagatcttaattgcggcagccgacaatgtgggttcgaatcagctccagaacattcgcaaaggtcttcgaggtgactcagttgttctcatgggtaaaaatacaatgatgaaaaggtccgtccgtatgcacgctgagaaaaccggaaaccaggctttccttaaccttatccccttgcttcagggaaatgttggtttgacttttaccaagggtgatttgaaggaagtcagtgaggaagttgccaagtacaaggttggagctcctgctcgtgttggtctggttgcacccattgatgtgg

SEQ ID NO: 45780 - DNA, 364 bp, Gossypium hirsutum
  Clone ID: LIB3196-018-P1-M1-D6
ccatcattgaagaagctggagcatttggaagtgttgtcagtagcagggttggagtctgtaactgatagttttatcaaggaatttcttattgcaagaggtgatggtatcaaggaactgattttgatggattgttggaaattaactgattcttccttgaaaatcattgcggaaacctgttcaaatttacgagctcttgacattggtaacatatccaaactgacagacacttctttcggctatctggccagtggttgtcggtcattgcagtcattgaaactctgccacaatgcattcagtgatgatgctatagctgcatttcttgaaatgtctggggaggttttgaaagagctagcactgaacaatg

SEQ ID NO: 45781 - DNA, 310 bp, Gossypium hirsutum
  Clone ID: LIB3196-018-P1-M1-D7
atcgcggagcaagcgagaggtctgcgcgcagtctgagcggcgcgtccagtcccgaggcccacgccagcacgccctcatggcccccgcagcggcgtcggggggcagcaccctgcccagaggcttctcggtcttcaccaccttccccgacttgctcttcatctttgagtttatcttcgggggcctggtgtggatcctggtggcctcctccctggtgccctggcccctggtccagggctgggtgatgttcgtgtctgtgttctgcttcgtggccaccaccaccttgatcattctgtacctaattggaggccac

SEQ ID NO: 45782 - DNA, 359 bp, Gossypium hirsutum
  Clone ID: LIB3196-018-P1-M1-D8
gttggccatgacacaacattactgaacaatctctttttcaatgtttctatgaacgcttgtttcatatggagttgaagatgattgatgttgtaaatcgaaggtgtaatagcccggtttagaccctagtcggaatagtggttttgagaccaaaaatttgaatcagaaaattattttaatattattttctgtgtttataatatgtgaatgagcatgtgtgaaagtttcgtatgaaaatttgatcttttgtgtgcttaatttgtgaaaaggacctaatcgcgtaaaatgtaaaagtggccttctatttgttaaagtgcttattttttatgtcttcttaaatgtgaggtccctattatgttatt

SEQ ID NO: 45783 - DNA, 337 bp, Gossypium hirsutum
  Clone ID: LIB3196-018-P1-M1-D9
atcaaagatgggaaaagactggcaataaacacatgtaaagaaatgctaggtgaattcaaagcaaaagttgcatgggtcaacagtagttccctgaattgatagggaatattggtaaagtgatccttgtttttactttgatatgcacaataacgcttagggtccagctgtcacatacagacctggaacttcatcggagaagggagcagatcgtacagcgcactcttagagaggctcagcttgctgccctgcaatatgaagaggtgaaaataaggaccaagcagattcatagagattctgttctggactttgtcaaagggagttctttgaatgacactgt

SEQ ID NO: 45784 - DNA, 365 bp, Gossypium hirsutum
  Clone ID: LIB3196-018-P1-M1-E1
agcctttttccttttcctccgcggctacatttccactctcgttcccacaatatcaaagtaaaaatgaaggtggtcgccgtttacttacttgccgtactcggaggaaacgcttctccttccaccgatgacttgaaggtgtggaaccaaagcaaagagaaaaggagtaggggaattaaattttataataatggaagcagcctcgtgctgtctcgagctttgtgaggaattgagaaggaaagaggatgcaatagcacgaggtatgatcatgggtgcagcagcttcaactgaaaagtacttgtacaggaattaaattgacaattgtagtatgcttgtagttaaagtttcttatagtgaacatcatgttg

SEQ ID NO: 45785 - DNA, 363 bp, Gossypium hirsutum
  Clone ID: LIB3196-018-P1-M1-E10
cgaagcagaaaatatctcaaatctcctcctcctcctcagaaatcttagtatcatcaccatggcctcaaatcccaaggtcttctttgacatgactatcggtggtcagcccgctggtcggattgtgatggagcttttcgcagattgcactcctcgcactgctgagaacttccgtgccctctgtaccggcgagaaaggcgtcggccgcagcggtaagcccctccactacaaaggctcctctttccatcgtgtgatccctaactttatgtgccaaggaggtgacttcacggccggaaacggtaccggaggtgaatccatctacggatccaagttcgctgacgagaacttcatcaagaagcacactgg

SEQ ID NO: 45786 - DNA, 280 bp, Gossypium hirsutum
  Clone ID: LIB3196-018-P1-M1-E11
atgccagaggtggaagagaccagcatgcccatgaccatggtgttccagaaccaggtggtggagctcatcctgcagcagtgcgcggacatcttcccgccgcactgactgcgggcctgcgactggggcggcggccgcgggcctgccacacaagctgggcggaggaggccacgcagcccggccttctctctgggaccttccggcagggcacaggcgcaggcaggtgtgacttttgcaccctcggcatttggggtgccgtgacccctactgtggcttttgcaaa

SEQ ID NO: 45787 - DNA, 395 bp, Gossypium hirsutum
  Clone ID: LIB3196-018-P1-M1-E12
gacactatagaacaagttggtacgaagaagcacgctggtaccgcgccgcaatatccgggatcacaatcatgcgggctagcactctgggctgggatcaacaggtcagagctgctgatcgcacctgagatccctaatggagataaagtaacttgaggacctaaactgatcttaggatggatataggatagcacacactcacttgcctgcaagaagacagcctaacggctggaggagataggttcatcttcatgcagccttttcagcaggatagacaaggcttatacacatgatagctaaaaggtttccagagagtgcaagcaaaagatgaaagacttcttttgttcttggcctggaacttgaacttagacaaggtttcttaagccaaaattattttt

SEQ ID NO: 45788 - DNA, 363 bp, Gossypium hirsutum
  Clone ID: LIB3196-018-P1-M1-E3
gtgatttgtcatatgtgaaaagatagatgtgtgaataagattcgtgctaagataagaccttggcccctagagtaaaccttagaaaaaaatttggtgtatgagtaggatctatcaaatgtgaatgaggtgatctttgcagtttttgaaacttatgaatgaaagtgatatctatgtttcttattaagtacatgtaactcattcttaagaccttatgatctttatttgagaaaagttgaatgtttggatttatggatatatatacatttgatgcaactttgagaatggattctgaatctgaaatatgtaaaagtgcgacatacatgtgtaattgatttgtatgaaagaatagcttcaactccttaa

SEQ ID NO: 45789 - DNA, 383 bp, Gossypium hirsutum
  Clone ID: LIB3196-018-P1-M1-E4
atccgccggccgcccagatctccacctgccaccccagagctgggacagcagccgggctccggcactgggagggagaccccgccgtggcctcttctgccacccacgcccccacccctggcatggccgaccagctgacagaagaacagatcacagaattcaaggaggccttctccctgtttgacaaggacggggacggctgcatcaccacccgcgagctgggcacggtcatgcggtccctgggccagaaccctacggaggccgagctgcgggacatgatgagcgagatcgaccgggacggcaacggcaccgtggacttccccgagttcctgggcatgatggccaggaagatgaaggacacggacaacgaggaggagatccgcgag

SEQ ID NO: 45790 - DNA, 367 bp, Gossypium hirsutum
  Clone ID: LIB3196-018-P1-M1-E5
aagaacttgggcagaaacttgtaacgagaatgcgtgcaatggcaaaccgttttattgcagtccatttgagatttgaaccggatatgcttgcattttctggttgttactttggtggcggtgacaaggagaggaatgagcttggagagatacgaaagagatgggaaacattgacagatgtagatgctgatgaaaagaggaggcgaggtagatgtccacttactcctcatgaagtaggattgatgctgagggcacttggttttgcaaatgactcgtacatctatgttgcatctggagaaatatatggtggagaagagacgcttcgaccactaagagatctctttcccaacttttatacgaaagagatgct

SEQ ID NO: 45791 - DNA, 339 bp, Gossypium hirsutum
  Clone ID: LIB3196-018-P1-M1-E7
atggccaaatgcaggactctctcatgttattgtcattatgaatatcttatctaaattttagttcatgcatgttcttacttaatcctggtgtttctgctgttagatgttagagtttaataaattgtgatatgcatatatttttttacatgaaggattctagtttctaattttacttttctgatctcaaaaaaattaaacttgaaaaacagggttaaattcttcaactattgcctcaagatcagttttgtcctattgtccttaaaaaggagatttagacttgtctgcctaacaagtattttttagggcatggtcctattccatagaaagagttgagatacc

SEQ ID NO: 45792 - DNA, 351 bp, Gossypium hirsutum
  Clone ID: LIB3196-018-P1-M1-E8
attttattaaggaaaaatgtaaaaataagggggaagtggtgcacgccgagcttctattgcagctagatcatgatttgttggtaggagaggggtttgatagaagtagaaaagtagcaaaaggaaaagccgcttcttgtctgttgaaggaccttgagaacagaggaatctccaggaagaaaaggaaacatgactgtgtggattcaagtcaaaccatggaagatgactcgttagaaccaacaatccctaagaggcaaaggagagccgaaattcagttgcttgatgaatcaaagaaagcatgcagtgctacgcctgccaccccagttattgtaacagtaaaaacgaagaaaggag

SEQ ID NO: 45793 - DNA, 343 bp, Gossypium hirsutum
  Clone ID: LIB3196-018-P1-M1-E9
ctttgttttttttttttctttcatttgcttataattatttttttatttttagttttcaatttctgaatggctaaatcttcgaatccggaagggaagcccggtgttcgaatcgtggtggccggagaccgaggcactggaaagtcgagcttgatcgtaacagccgccgccgagactttcccgacaaatgtgcttcggttgttgccgccaacaaggttgccgggagatttctaccccgaccgtgtccccatcaccatcattgatacctccgctaatccggaggatagaggtaaactagcagaagaactgaagcgagctgatgcagtagtgcttacttatgcgtgtg

SEQ ID NO: 45794 - DNA, 358 bp, Gossypium hirsutum
  Clone ID: LIB3196-018-P1-M1-F1
atcacattttattgtgcttctctctcagatcttcaagatgtatacgtcaatgaaaaagatccacaaagataaggatgttgaaccaacagaatttgaggaatcagttgcccaggcattcttcgatttggagaataccaacaaggatctgaaaagtgacctcaaggatctctacattaattcagcagtccaaattgatgtgtctgggagccggaaagctgttgttatccatgtcccgtaccgattgaggaaagcttttcgcaaggttcatgttaagcttgtgagggagcttgaaaagaagttcagtggaaaggatgtgattcttattgctacccggaggatattgaggcccccaaagaaa

SEQ ID NO: 45795 - DNA, 360 bp, Gossypium hirsutum
  Clone ID: LIB3196-018-P1-M1-F10
atagcgagtccggagcctggcggatgtggacgcgatcctggcacgtactgtaggagatgtgcgtcgtgccgagcagttattgcaggatgcacggcgggcaaggagccgggctgagggtgagaaacagaaggcggagacagtacaggcagcactggaggaggcccaacgggcacagggtgttgcccaaggtgccatccggggggcagtggctgacacacgggacacagagcagaccctataccaggtacaggagaggatgacaggtgcagagcaggcactgagatctgcaggtgaaagggctcggcagttggatgctctcctggaggctctgaagttgaaatgggcgggaaatagtctggc

SEQ ID NO: 45796 - DNA, 358 bp, Gossypium hirsutum
  Clone ID: LIB3196-018-P1-M1-F11
atcagcagatgagatgacaggcaggtaggtggacggacagatagcagcgacgcggacaggtcgaacagtgacggccacgtagaggatctggcagacaaagagacaagactttggaggtgacccgccatggggcccagcatgtttttgctcctgtgtgttcttggtctcagccaggcagccacaccgaagattttcaatggcaccgagtgtggacgtaacttcacagccgtggcaggtggggttgtttgagggcagcagcctgcgctgcgggggtgtccttattgacagcaggtgggtccttacagcggctcactgcatcggcagcaggtactgggtgcgcctgggggaacacagactt

SEQ ID NO: 45797 - DNA, 382 bp, Gossypium hirsutum
  Clone ID: LIB3196-018-P1-M1-F12
atccatcacgggagggaccgtcacagaatgtgggcaacaccttctgggaaaagatcttaggacagacgcctcaaccacctcaggcacatgttagaaagctacaggaatgtcttaagaatattttgcagtaatgtgtatagtactggatgcagtgactgctgcctgggccagagggtggcagaaggctttaggggcagaaacgttggaagaaagattgtcacaagtcaatctggggaagagaaaaatatttcccaaatcatttttctcacgcactccctctgacacgagagtttctcatctgccttcctccctccctcccgccctccttcttgctttctaaaatcagcatgtcctttacttacatagtttccccacggttgat

SEQ ID NO: 45798 - DNA, 380 bp, Gossypium hirsutum
  Clone ID: LIB3196-018-P1-M1-F3
atcttttctacgccttcccatcgttagaggagatgttactgagatgggtgcgttaaagtttaggcttttcagagtttattttactaacaactgaaaggaaaaaagctaactagaactgactggtctgatttgttttagattctgggctttactaggacttcctactctcagaatctctggattataaaatctgggtggggtgggagctggaaaattaatcacggatgaaaagaaaatcaactctaaggctccagttagaagatttttgaaaatggcagaacatgactggccttcattcaagtcaaaatatttaaagcaatccttgctaagaagaacttgattttgtataagcagtcccttaaatagagttgcttctcaag

SEQ ID NO: 45799 - DNA, 360 bp, Gossypium hirsutum
  Clone ID: LIB3196-018-P1-M1-F4
caacaaaaactagggaacaaaatcaaatttttcttaaagaagagcgaaaagtaaactgttttttctaaaacaacactattaacaataaaatgaatcctaaatatacatgatataatgaatgaatgcttttaagctaactcaaagtacaactacaattttctttaaaatgagtttattttaggtcttcaaaagtaacgtaagttagcttagccatttcggtggttaatgtagccttctcaatctagccataatgtctaggccggatttgggaggttacaattttcatcccaaagttaatatcgtgacacaccaggccttgtgttgcgacataacgaccaatatgctcttttgtagccatct

SEQ ID NO: 45800 - DNA, 328 bp, Gossypium hirsutum
  Clone ID: LIB3196-018-P1-M1-F5
atccgtttcccagctgaattaggttcttattttgcacaggtgcgtgcagtggccccagggatccggaaaaagtaacactgaacctcttgtaacatccagcaatggggcccgggaacctgggcgcactagtgtgccgcgcttaaggcttcagttcgctggcttcgcacttttttctacaaaggcgagtatctcctatctgcgggctcatacttactaccgcctgaggtgccatggcccccaagccgggggccgagtggagcacagccctgtcccatctggtgctgggagtggtgtctctggacgcagccgtgagcacagcccacgcaag

SEQ ID NO: 45801 - DNA, 304 bp, Gossypium hirsutum
  Clone ID: LIB3196-018-P1-M1-F6
ggaagaggaaagccaaaactccaaactttctattttgcttttatattatatttttttttggttcaattcagtttcgccatttgctttgcatgtagatgctctttggttagtctctaacgccgctacttggactcactttccgctgctatctttttttcggctttctcatggctaataacaccaacgaggcccccggcgccgatgattttcttgagcaaattctctgactccctaactttgcgccctctgaaacgggcttatctggatccgacgctggattggctgcaacctgctttttgagctg

SEQ ID NO: 45802 - DNA, 275 bp, Gossypium hirsutum
  Clone ID: LIB3196-018-P1-M1-F7
gtaagaattagggttgtgtttagaaatggcggtggcagcgcgcttcagatccactctccctatctttcacaggcttttgagatccgattccctgccttctcacactcccagagctactcttcaccgaactctactttgccccgagctgtcgaggaaatattctacttctctgaagaaggacgagaatgttaaggtgcctttggctttgtttggtggatctggaaactatgcatctgcactgtaccttgcagccgtaaaaggaaatgctctggaca

SEQ ID NO: 45803 - DNA, 320 bp, Gossypium hirsutum
  Clone ID: LIB3196-018-P1-M1-F9
taaaaaaaaaacttttttaaatggcgatgaaaaattttaggcgttttcttatttggttttcccttcctcggataggcattactttaagttgctaggtgtcaatcagaaatcatatgcagattgtgcataagctggtcaaggaggtgatctcagttttgtggtgtaagatgttcaggagtttggggaccctaatatcagatacggatgaaaagaaaatcaactcttacgctccctcaagaaaattccaaaatggcagaacatgactggccttcattccagtcaaaatatttaaagcaattcttggtaagaagaacttgatt

SEQ ID NO: 45804 - DNA, 61 bp, Gossypium hirsutum
  Clone ID: LIB3196-018-P1-M1-G1
tctcccagctatcactacttgggaagctgtcgcctgggtccggtccggattccgggtcgcc

SEQ ID NO: 45805 - DNA, 382 bp, Gossypium hirsutum
  Clone ID: LIB3196-018-P1-M1-G10
atgtttggccttcttacctctatacagtctgataacggaccagcctttaatagtcaaatcacccaagcagtttctcaggctcttggtattcagtgaaacctttatatcttttactgtcctcaatcttcaggaaaggtagaatggactaatggtcttttaaaaacacaccttaccaagctcagtcaccaacttaaaaaggactagacaatacttttgccactttcctttctcagaattcaggcctgtcctcggaatgctacaggttacagcccatttgagctcctgtgtggacactcctttttattaagccccagtctcattccagacaccagaacaacttgaacggcaccccaaaaacttagagcctaaaaactcactaacc

SEQ ID NO: 45806 - DNA, 366 bp, Gossypium hirsutum
  Clone ID: LIB3196-018-P1-M1-G11
attgagagatactcccaaagtgaaataagatttaacctcatggcagttatcaagaacaggaaagagttgtacactgctgaacttaaggagctccaaaagaagagggaacgcatcttgcagcagttggctaccatacagtctgaaagacccacagacaaaaccagttttgaagcactaaacaagcaactttcagaagttaattcagggattgagggtgccactgagaaaattttgatggaggaggagaaattcaagaagtggagaaccgaaaacattcgaaggaaacacaactacatacccttcttgttcaacttccttaaaattcttgctgaaaagaaacaactgaaaccccttattgagaaagct

SEQ ID NO: 45807 - DNA, 365 bp, Gossypium hirsutum
  unsure (1)..(365): unsure at all n locations; Clone ID: LIB3196-018-P1-M1-G12
atctcgctccgaggtccccgcgccagagactcagccgcgctcccaccacccacacccaccgcgccctcgtccgcctcttctctaggagccagtccgcgccaccgccgcagcccagcccatcgccaccctccgcagccatgaccaccaggtccgtgtcctcgtcctcctaccgcaggatgttcggcggcccgggcaccgcgagccggccgagctccagccggagctacgtgactacgtncacccgcacctacagcctgggcagcgcgctgcgccccagcaccagccgcagcctctacgcctcgtccccgggcggcgtgtatgccacgcgctcctcttgggtgcgcctgcggagcagcgtgcccggg

SEQ ID NO: 45808 - DNA, 356 bp, Gossypium hirsutum
  Clone ID: LIB3196-018-P1-M1-G2
cggacgcgtgggcgctcgtgggttgcattatcttcactcgggtgcaaaacacatcatcattcatcgagacgtgaagacaacgaacatcttgttggatgagaagtgggtggctaaagtttcggattttgggttgtctagaataggccctaccaacatgtccaaggcacatgttagcacagtggtgaaaggtagctttgggtatttagacccggagtattatcgtcgtcaacaattgacggaaaaatctgacgtatattcatttggtgtggtactatgtgaaatactatgtgcgaggcccccaattagtcgaacggtcgagaaggcgcacataagcttaacagcatgggctcaacaat

SEQ ID NO: 45809 - DNA, 360 bp, Gossypium hirsutum
  Clone ID: LIB3196-018-P1-M1-G3
cccacgcgtacgctttgtttctctcttcatctcctgcactacttgcaaagtaacgagctgaagccgtgctacaataacactagtgttttcaacaataaattaatcatagctgcagcttgtttcttttaaactctaaatataaaggaggccaaacatgccgcctcgtagataccaatttgggagggctgatgaggccactcatcccgactccatgagagccaccttggctgaattcctctccactatcattttcgtctttgccggcgaaggctcaattcttgctcttgacaagatgtacaaggatacgagtgcgacgcctgcaagactggtgatgatagcacttgcgcatgggttgtctct

SEQ ID NO: 45810 - DNA, 377 bp, Gossypium hirsutum
  Clone ID: LIB3196-018-P1-M1-G4
atggcctctgcagagatgggggcagctggtcaggatggccattcgggctcagcacagcaaggcagcccagactcagactggggaagcaaacaggggctggacaggccaggagagcctgtcggacagtgatcctgagatgtgggagttgctgcagagggagaaggacaggcagtgtcgtggcctggagctcattgcctcagagaacttctgcagccgagctgcgctggaggccctggggtcctgtctgaacaacaagtactcggagggttatcctggcaagagatattatgggggagcagaggtggtggatgaaatcgagctgctgtgccagcgccgggccttggaagcctttgacctggatcctgcacagtggggag

SEQ ID NO: 45811 - DNA, 385 bp, Gossypium hirsutum
  Clone ID: LIB3196-018-P1-M1-G5
atgtggacattggcgtcaagtactcggagaagcaggagcggaatttcgatgatgccaccatgaaggccggccagtgtgtcatcgggctgcagatgggcaccaacaaatgcgccagccagtcgggcatgaccgcgtacggcacgaggaggcatctctatgaccccaagaaccatatcctgccccccatggaccactcgaccatcagcctccagatgggcacaaacaagtgtgcgagccaggtgggcatgacggctcccgggacgcggcggcacatttatgacaccaagctgggaaccgacaagtgtgacaacttctccatgttcctgcagatgggctacacgcagggcgccaaccagagcggacaggtctttggcctgggccgaca

SEQ ID NO: 45812 - DNA, 365 bp, Gossypium hirsutum
  Clone ID: LIB3196-018-P1-M1-G7
atcgaagcgtctgcggccgtcgtttgagtcgtcgctgccggtgccactgccacctcgcggatcaggagccagcgttgttcgcctgacgcctcgctgccggtgggaggaagcgagagggaagccgcttgcgggtttgtcgccgctgcttgcccaccgcctgggagagccgagccccgggccacacggtcgcttgccaccgctcgtagccgttacccgttggccgccacagtcttcgggcgggagaggcgcgcgccatggcttctggagccgattcaaaaggtgatgacctatcaacagccattctcaaacagaagaaccgttccaatcggttaattgttgatgaagccatcaatgaggacaacagt

SEQ ID NO: 45813 - DNA, 283 bp, Gossypium hirsutum
  Clone ID: LIB3196-018-P1-M1-G8
aatctacttacgagtcagcaattcctactaccgtttgtttccctggaaaatatatgagacttaatattattattttgtttgtttatttatgtgtgtgtttcatcttgttgtgttcattactcagatccctatcgctttttatttctgttccatttttcctctttattttctaattttgggtgttatttgttccatatagatttttaattataattttgaccatctttcaaaagagggaacttatttttgaaaaccctaagcagaaggaagaaatcgaagtgag

SEQ ID NO: 45814 - DNA, 335 bp, Gossypium hirsutum
  Clone ID: LIB3196-018-P1-M1-G9
caagaatcaaagatcttatgaatagatgtttttagaatgcaaaaacacgaaatcaatctccaagattgattttcaacaagccgaatctgtccaagaactaaaccgatgaataaagccccaaattccagcaacttgatttttcccaaaattccaacaacctaaaacaatcagttttgacaagaagaattcgacaagattaattggaaaagataaggttagtcgaatttggctaccaagaatgagtaccgatcgatctttttgaggaataaaaatgggtgtggattcacaagaagaataaacaagtttgatcaaaagaatctgcattaaccgaattt

SEQ ID NO: 45815 - DNA, 356 bp, Gossypium hirsutum
  Clone ID: LIB3196-018-P1-M1-H1
cccacgcgtccgcaaaaacttgtggagaatggactgcaatgaagatgatatgtgtcagattgacaaagatgattctatggtaagcaaagtgaggctttgttctgcttcgatgattgataacgttaaccagagctctaatcccacttgtggaacttctcatgatgggaagggcaaatttgatgatgatcctgaagtggtagcagttggtttccctactgcttgtgttgaagggggagatgacttttcatatactggtgggccatcgttctctgaagatgatgatgaactcactgaatcaaaaattagagcctttttagatgagaaggcattagaactaaagaagctacaaacaccat

SEQ ID NO: 45816 - DNA, 381 bp, Gossypium hirsutum
  Clone ID: LIB3196-018-P1-M1-H10
atcttgtagttctgacctgggatggcaagatgtcggcggtcagtcaggattctattgaagacagcagactggcccagactgagaccgtggttgatgactgggatgaagagtttgaccgagggaaggaaaagaaaattaaaaaatttaagagagagaagaggagaaacttcaacgcctttcagaaacttcagactcgacggaacttctggtctgtgactcacccagcgaaggctgccagcctcagctatcgccgttgactgtgcctctgtggaaggagccttctggagacaaggcatcccttcctgggagctgtccgtctggacctgagggagctctctgtgtgggctctgctgcgctgtgagcctgcaacggtaggagccc

SEQ ID NO: 45817 - DNA, 370 bp, Gossypium hirsutum
  Clone ID: LIB3196-018-P1-M1-H11
cccacgcgtgcgcccacgcgtccgaaaatattttttttaaaaattaaaaaattaaaaaattaaaatatatattaaaaaattaatatttttaaaaaaaattataaatctgtaaaatattattaaatatataaaaaaatttaaaaagttaaaaaaaataaaaacgatttaaaagttaagtccataacaaatctggacatatggttatttggatttgcattgaatctggacaaccatgtgaccagattcattcaagaagatttttctaaaattatataaagtttaaaaatattaaaaattaattttctttgaaaattgatggggataatgttttaattgtattggtagcttttaagatatataaaaaaatatt

SEQ ID NO: 45818 - DNA, 230 bp, Gossypium hirsutum
  Clone ID: LIB3196-018-P1-M1-H12
cggacgcgtgggcggacgcgtgggcggacgcgtgggcggacgcgtgggcggacgcgtgggggatggcaaggcaaagaaggtttgcatcacaccatagaaatcacggtcatcatcataataatcaacaagggcagcttcagaaccaaagtattgaccaacatgaaaggattgtgaacggtaactgggttgccttaacccaagccaaccccggaaactgggtctattggcca

SEQ ID NO: 45819 - DNA, 379 bp, Gossypium hirsutum
  Clone ID: LIB3196-018-P1-M1-H2
atgctgagagtgcggagtgtgtgctccgggctcggaacacacatttattattaaaaaatccaaaaaaaatctaaaaaaatcttttaaaaaaccccaaaaaaatttacaaaaaatccgcgtctcccccgccggagacttttatttttttttcttcctcttttataaaataacccggtgaagcagccgagaccgacccgcccgcccgcggccccgcagcagctccaagaaggaaccaagagaccgaggccttcccgctgcccggacccgacaccggcacccttcctccccgccggcagacggcagccagcggcagtggatcgaccccgttctgcggccggtgagtagttttcaattccggttgatgtttgtccctctgcgc

SEQ ID NO: 45820 - DNA, 292 bp, Gossypium hirsutum
  Clone ID: LIB3196-018-P1-M1-H3
atgccaaagggcctggattacaggcttgagccactgaggctgtgctgatttccttgtgctataagattatagtcccttccacttgcttatagactctgttgaggcacactatgcactctggtgttgatactgatgtggaatgccttgatcttaactatccaccaactatacctgactgcctgaagtggtgatattaccttagccctaatcctgtggagtatctgtgaccacaagtgtgctctggccttattttaagtttaatgaaaaatgtcgtctatacacaccttctaca

SEQ ID NO: 45821 - DNA, 375 bp, Gossypium hirsutum
  Clone ID: LIB3196-018-P1-M1-H4
tcggaagtcgtatgacgcattttaaaagaaccttacgctagatatacatgaggactgtcaaaacaggactaaaattgccgaattggtccgctaccactccaccaatagtggtgatgagctgaccagctagcacgactatgtgaccagaatgaatgaggttcagaatgatatttactacattactggtgagagtcaaaaggcagttgagaactctcccttccttgagaagctgaagaagaagggttatgaggtcctttacatgtgtgatgctattgatgagcatgctagtcggacagctcaaagaatttgaggccaaaaagcttgtgtcagctaccaaagaaggtcttaaacttgatgagagtgaggatgagaaga

SEQ ID NO: 45822 - DNA, 358 bp, Gossypium hirsutum
  Clone ID: LIB3196-018-P1-M1-H5
tctcagcaaaatcaaaattgcagaaaactttctccaacttcttcatctcttcttccccaaacctcacccacgacctccatcctcctcctgtcttcagccatcgcctccaccgcaccagcaggtaccatatttgtcagtttcctgatgatccttcgagaatcaccttcaacctcaatctccctccacccaagctgtaaccccagcttcagtgcctgaagacacgctactgcttctgcagaaaaaacagacgctacgtcaaagttcactttcaatctggatcctatcggcgcagaccatctgtcaacacagatccgtcttccagcgcagacaatcattctatagaaagccatgggtctac

SEQ ID NO: 45823 - DNA, 385 bp, Gossypium hirsutum
  Clone ID: LIB3196-018-P1-M1-H6
atctggtagttctgacctgggatggcaagatgtcggcggtcagtcaggattctattgaagacagcagactggcccagactgagaccgtggttgatgactgggatgaagagtttgaccgagggaaggaatagaaaattaataaatttaagagagagaagaggagaaacttcaacgcctttcacaaacttcagactcggcggaacttctggtctgagaattagccatcgaaggctgccatgcttatgtatcgccgttgactgagccttatttgaaagaaccttcttgaaacaatgtaaacctttctgggagttgatcttattgttctttgggagctctctgggttgagcgctttgatactgtattgggcgctcttaggattatatta

SEQ ID NO: 45824 - DNA, 362 bp, Gossypium hirsutum
  Clone ID: LIB3196-018-P1-M1-H7
tttttctctccagacccattggactcagtcgcaggaattgcgccaatgcaactccggtgatggatcagtcagttggtgaaaggagctcttcggtccccactattgttgaggtggatttgggtaatcggagttatccgatctacatcggctccgggttgcttgatcagcatgagcttcttcaaaagcatgttcatgggaagaaagttcttgtggtaactaacactacaattgctcctttgtatttggataaagtcgttgatgcgttaacaaagggaaacccgaatgtttctgttgaaaatgtgatactacctgatggtgagaagtacaaaaacatggagactcttatgaaagtttttgacaag

SEQ ID NO: 45825 - DNA, 339 bp, Gossypium hirsutum
  Clone ID: LIB3196-018-P1-M1-H8
gccaagttcacttcctacaccccttggccatacctcgggatctctctccacgcacgagatagagctttcggaagattatacttgtatcatttctcatggtccgaacccaaaaacaactcgcatttttggtgactgtattttggaatgtcacaacgatgagttgaccaattttgataaaacagctgaacaagtgcctcgattcggtaagaacacggagccatcaactgcttacccttctgatgagttcttgagcttctgttactcttgcaagaaaaagttcgagaaagaagacgacatttatatgtacaggggggaaaaggcgttttgcagtacttgatt

SEQ ID NO: 45826 - DNA, 98 bp, Gossypium hirsutum
  Clone ID: LIB3196-018-P1-M1-H9
tccaatctttcattctttgctgttgaagtagtaatatctatagcatacagagatggagaggcaaagaagcaagcaggtttgtttgttgatgtgggttt

SEQ ID NO: 45827 - DNA, 367 bp, Gossypium hirsutum
  Clone ID: LIB3196-019-P1-M1-A1
gaaagatttccttgtttaatatgatgacattcaagacaatggcgactttcatgccaccaccaccactagcgacttttcttgcattccaccctcaagataacaatattattgctataggcatggacgattcaacgattcagatatataatgttcgtgtggatgaggtgaagagtaagcttaaaggccactccaaaagaataactggccttgccttctctcatgtactgagtgtgcttgtctcatcaggagcagattctcagctttgtgtatggaacactgatggatgggaaaagcagaggtctagattcttgcaggttccatctgggagaacaccaacggcactgtcagacacacgtgtacaattcca

SEQ ID NO: 45828 - DNA, 366 bp, Gossypium hirsutum
  Clone ID: LIB3196-019-P1-M1-A10
atagcgagaacagatcaagctcctcaacaacaagtttgcctccttcatcgacaaggtgcggttcttagagcaacagaataaggtcctggagaccaaatggaagctgctccagcagcagacgaccagcacctccagcaaaaaccttgagcccctctttgagacctacctcagtgtcctgaggaagcaactagataccttggtcaatgacaaagggcgcctgcagtctgagctgaagaccatgcaggacagcgtggaggacttcaagaccaaatatgaagaggagatcaacaaacgcacagcagctgagaatgactttgtggtcctcaagaaggacgtggatgctgcctatatgaacaaggtggagct

SEQ ID NO: 45829 - DNA, 168 bp, Gossypium hirsutum
  Clone ID: LIB3196-019-P1-M1-A11
actttgcacgcttgttctaagtagtagttttgttagtaaggcatgtaatggtggaataaaataagggtggcctatgtaaagaggaagagccttttttgttgtgtgttttggagtccttttgttttaaggaataaaataagagggaaatctttacttttcctttaacat

SEQ ID NO: 45830 - DNA, 332 bp, Gossypium hirsutum
  Clone ID: LIB3196-019-P1-M1-A12
cggacgcgtgggatttaccttgtcaccaacggaagaggaacgcttacgttcttgacacatgaaaacaaagagtcctacaatatagtaccgggagttgtagtcaaagtcccagcaggaagcactgtgtacttggctaaccaagacaacaaggaaaagctaatcatagcagtgcttcaccgccctgttaataaccctggacaattcgaggaattcttcccagctggaagccaacgccctcagtcatatctccgagcctttagtcgtgaaattcttgagcctgccttcaatacacgaagtgagcagctagacgagctgtttggtgggaggcaaag

SEQ ID NO: 45831 - DNA, 311 bp, Gossypium hirsutum
  Clone ID: LIB3196-019-P1-M1-A2
attgcccaccgacaggatgggccttatgacctcactgaagggggcagttgagcacagactgctctgtcctgctctcctgcccattggtttctcaagccccttctcctggttgctttcttcttccccatcaagccccatcccctgccagtgccacctgggtagtttacacacatatccctccgctccccaagctgctgaagatgaaatggggaacagaccccgaggcctcatgcaggagcttaccctgcccagacccggctgtcaagcgagggcttctgtttctgaagactctggataccagggagccagga

SEQ ID NO: 45832 - DNA, 310 bp, Gossypium hirsutum
  Clone ID: LIB3196-019-P1-M1-A3
caaaaaagaaaagaaaaaatacagtgaaaatggcaacccttaaggttccagctcatgtacctgccccttctgaggatgctgagcaacttcgtaaagcttttgaaggatggggtacaaatgagcaattgattatcgacatattggctcacaggaatgcagctcagcgcaatttgattcgtaaaacttatcgtgaagcttatggggaagatctccttaagtctttggatgaggaactttcaagtgactttgagcgagctgtggtgctgtttactttggaccctgcagagcgtgatgcatttctggctcatga

SEQ ID NO: 45833 - DNA, 353 bp, Gossypium hirsutum
  unsure (1)..(353): unsure at all n locations; Clone ID: LIB3196-019-P1-M1-A4
cccacgcgtncgctctcctgaaaaactccttatatattaccatttctgaattttcttctcttgcttcaaaatccgaaaatcactcaaaggtataagttgtagaatcatctttagtgatggacagaggcctttcgatcattcctatgtaggcagagaattgagacttgctctgttgaacctgatggcaggttttgatccttcaagtaaatgataaaacaagccggatatggcatccaaaaagccgcagagtggagtggatgacaaacattgtgaagttaaacacacatctaagacaaccctcatggaaaccgatattccttatttgatttcagccacaccttgatccaaaccat

SEQ ID NO: 45834 - DNA, 360 bp, Gossypium hirsutum
  Clone ID: LIB3196-019-P1-M1-A5
cttgtgaatgttagcaaagcaggggagaatattgttataaatgctgtggatcagactgaaactattcaagaaaatgggacatctttgttaaaagttgatccaaatggaaaaccaaataaaaaaagagctgctcctgatccagaccttgctacgacaagaagcacgaatgatactggtcacggagagaatgttgatggagttctcgtcaatgatgatccgagtgagcctaccatggctgagaaacttgcaagtttaaatttaatagaaaatggaaaaaatgaaaccaatgaaaaccaagaaagaaaagaaccctctactcatggtaagcctcccatcgcggattcagttatggttctgctt

SEQ ID NO: 45835 - DNA, 356 bp, Gossypium hirsutum
  Clone ID: LIB3196-019-P1-M1-A6
gttcgagtctcgttctgacttatctagctcgctagtggcgtcaacccgacttcttgaacttatcaccatcctggtgtggcgttcatccacctttttatacctttggttcctacctctctataggtaacggatcaaggtccatcttcgacaatccattaaacccaccttaagcaatataagtcccggggcaatacttcatatagtattgaatcgttcttcgcttgagttctatttttccattccattttaactattaaattataaacaatatttctttatttcaccgagcctatcaaacattctatccaaatgatcttttgaacccattttctcaacttccactataaaaaatcatc

SEQ ID NO: 45836 - DNA, 335 bp, Gossypium hirsutum
  Clone ID: LIB3196-019-P1-M1-A7
attccagatcctgctcctgctcagactgaatgctctcctgctcctccagattcagatgctgataaacttaaagaaaaagaacctcaaacccaaggagagagcacaagcctgagtttagctttgagtttgggccaatccacagatagcttaagttcctatccagctgatccacaagcaggaggagataatccagaagttcatggtcaagtagaagtgaaaaccgagaagagaccaaacttggttgatcgacaagcattcacagttgagtatcttccaagcatgctacattcaaattgccctaaaggtctgctacccaaattctccagctggtcttt

SEQ ID NO: 45837 - DNA, 349 bp, Gossypium hirsutum
  unsure (1)..(349): unsure at all n locations; Clone ID: LIB3196-019-P1-M1-A8
gcaccagatccagagccggagccgaaggcagagacggaactacattctagggatagttcttatcatccagatttggggggcgatactatttcccaggctcgccaggccacggatatcattcagagtttgacatcttctgcccactaccaccttagtactccagtcatcctagctcgtatccacctcagtactccgctccttccggcccgtatccaccgccatactccactcctgccggctcaagttcatcaatggcatttgagacatatgatttttcatctatgtttcgcacacccctacataccgatgacgagatacgtgatcaccataatcgtncgcaacgtgaacg

SEQ ID NO: 45838 - DNA, 199 bp, Gossypium hirsutum
  Clone ID: LIB3196-019-P1-M1-A9
gaaaaatggagtgccaacaccgaggaggaagctcttcttttgatgtgcaagcttatgatcccttcagtgacagcaatgctgggcaacggctcatgggttaaagcgcctggcgagcatatgaagcctaaaggaaagtcccataaaggtacaataactctgcctacccttgtgagacccgcaaaaatgttggcaccggttg

SEQ ID NO: 45839 - DNA, 365 bp, Gossypium hirsutum
  Clone ID: LIB3196-019-P1-M1-B1
gaaaaatggagtccaacaccaaaatgtcagctcttcttttgctttgcatgcttttcatttcttcagtgacaccaattcttgggtgtggctcatgtgggaaagcaccacacaagcatggaaagcctaagggaaagtcccctaaaggtcccatcactctgcctccccttgtgaaacctccaatcaagttgccaccggttgttgctccgatatttaagccacccattgacctccctccggttacagtgccttcaattaacctccctccagggacggttcctgcagtaacttagccaccaagtggtgaaccctgcccaacaccaccaagcaaggacacttgccccattgacacaccgaaattgggcgct

SEQ ID NO: 45840 - DNA, 350 bp, Gossypium hirsutum
  Clone ID: LIB3196-019-P1-M1-B10
gctgatttgagcagcagcagctaaagcagatcccaaaatgaagtttaatatcgcaaatccgactactggttgccagaagaagctcgagatcgatgacgaccagaagcttcgggcatttttcgacaagcggatctcgcaggaggttgctggagatgctttaggcgaggaattcaagggctatgttttcaagatcatgggaggttgcgacaagcaaggattcccgatgaagcagggtgttctgactcctggtcgtgttcggctcttgcttcatagaggtaccccatgcttccgtggatatggaagacgtaatggtgagcgtagaaggaagtctgttcgtggatgcattgtta

SEQ ID NO: 45841 - DNA, 374 bp, Gossypium hirsutum
  Clone ID: LIB3196-019-P1-M1-B11
atcgcataacatgggaactattcacatgtcagaaatttgtactgaattaaaaaatttaagatctttagtccgagtatgtgaaattcaagcaactttgcgagagcaaaggatactatttttgagacaacaaattaaggaacttgaaaagctaaaaaatcagaattccttcatggtgtgaagatgtgaataattgcacatggttttgagaacaggaactgtaaatctgttgcccagtcttaacatttttgagctgcatttaagtagactttggaccgttaaggtgggcaaaggaaatgacaaggggatggggtctgtgagagtcaattcaggggaaagatacaagattgatttgtaaaacccttgaaatgtagatt

SEQ ID NO: 45842 - DNA, 326 bp, Gossypium hirsutum
  Clone ID: LIB3196-019-P1-M1-B2
atggacaacaaccgcaacctggacctggacagcatcatcgccgaggtcaaggcccagtatgaggagatcgccaaccgcagccggaccgaagctgagtcttggtaccagaccaagtatgaggagctgcagcagacagctggccggcatggcgatgacctccgcaacaccaagcatgagatctctgagatgaaccggatgatccagaggctgagagctgagattgacaatgtcaagaaacagtgcgccaacctgcagaacgccattgcggatgccgagcagcgtggggagctggcgctcaaggatgccagaaacaagctggccgagct

SEQ ID NO: 45843 - DNA, 360 bp, Gossypium hirsutum
  Clone ID: LIB3196-019-P1-M1-B4
cggacgcgtgggcccagcatcttctattgaacctggaggtgttgctcccacacagactgaattcctacacagtaatctggataccttcccatcactgctgttctttagatcaaaatcaacccgttcagagagtttccagtctggacctttgtctgaccagaaagatggaatgctagtattgaggaacaagtcaccgaggtggcatgaacaactccagtgctggtgtctgaacttcaatggacgggtaacagttgcatcagtcaaaaactttcagctggttgcatctcctgaaaatgcagctgctggtcaggagcatgagaatgtcattctccaattcggtaaagtgggaaaggatgtatt

SEQ ID NO: 45844 - DNA, 378 bp, Gossypium hirsutum
  Clone ID: LIB3196-019-P1-M1-B5
atctgctgccggagccctgccagctgtccgacgatgtcgtcccacctagtcgagccgccgccgcccctgcacaacaacaacaacaactgcgaggaaagtggccagtctctgccgcagccggccggcctcaatagttcctgggtggagctccccatgagcaacagcaatggcaatgataatggcaatgggaaaaatggggggctggaacacgtaccgtcctcatcctccatccacaatggagacatggagaagattctattggatgcacaacatgaatcaggacagagtagttcaagaggcagttctcactgtgacagcccttcgccacaagaagatgggcagatcatgtttgatgtggaaatgcacacaagcagggac

SEQ ID NO: 45845 - DNA, 380 bp, Gossypium hirsutum
  Clone ID: LIB3196-019-P1-M1-B6
atcgtgactggcacctgaagcagagcccagctagccctgagcgggactacagcccctaccacaagaccattgaagagctgcgggacaagatcctgaccgccactattgaaaacaaccgggtcatcctggagattgacaatgccaggctggctgcggatgacttcaggctcaagtatgagaacgagctggccctgcgccagagcgtggaggctgacatcaacggcctgcgccgggtgctggatgagctcaccctgtctaagactgacctggagatgcagatcgagagcctgaatgaggagctggcctacatgaagaagaaccacgaggaggagatgaaggaattcagcaaccaggtggtcggccaggtcaatgtggagatg

SEQ ID NO: 45846 - DNA, 361 bp, Gossypium hirsutum
  Clone ID: LIB3196-019-P1-M1-B7
atgggatcaatagcctcgtgtcatgcctgctgtttttgttttgttcagaaagtccattgcattcagaagcaacgaacttcttaggaagctcagagctgctggtgttggggataggccggtggtttggatatcacatagcatgggaggtcttctcgtcaaaaagatgctgttggaagcctctaagaagccagaaatgagtgctgttatcaacaataccagaggaataattttttatagtgtccctcatcatggatcacatttggctgaatactctgttaatattcgctatcttctctttccctctttggaagtcaaagaactcagcaaggattctcctgcacttaaaacactgcaagatgac

SEQ ID NO: 45847 - DNA, 355 bp, Gossypium hirsutum
  Clone ID: LIB3196-019-P1-M1-B8
aaatttttaatctttctttttgggtgaaactaattaattcaccatatgtaagttttcatatataaaatacctctgtaattttctcttatttgatttctaactttttctcctagaaaggtaggaaatcctactagaaacttttatttccagaatggttgttggttatcagatctttgcataactctagtcataaagatatatttgtaccatttaaaatcggttatttttttgtattttaaatttgataataattcttaatttctatctttaagatgagaaggatctcctataaagtgcttagagattgagaaaaataaagttgctactgcatattggatttctcttccttgttcat

SEQ ID NO: 45848 - DNA, 320 bp, Gossypium hirsutum
  Clone ID: LIB3196-019-P1-M1-C1
atgtggctttggcggtcgatttgggggctccttcaacggtaagggtggccctggcttccctgtctgccctgctgggggaattcaggaggtaactatcaaccagagcttgctgacccccctccacgtggagattgaccctgagatccaaaaagtccggacagaggagcgagatcagatcaagctcctgaacaacaagattgccttcttcatcgacaaggtgcggctcttagagcaacagaataaggtcctggagaccaaatggaagctgctccagcagcagacgaccagcaccttcagcaaaaaccttgagcccctctttg

SEQ ID NO: 45849 - DNA, 369 bp, Gossypium hirsutum
  Clone ID: LIB3196-019-P1-M1-C10
atggcagactcctctcagcctgccccccagctcagctacccccaggaagagggaggaccttttaagacacccattaaggaaacgctgcccatctcctccaccccgagcaaatctgtcctccccagaacgcctgaatcctggaggctcacgcccccagccaaagtaggggggctggatttcagcccagtacaaaccccccagggcgcctctggccccttgcctgaccccctggagctgatggatctcagcaccactccactgaaaagcgttcccccctttgaatcaccgcaaaggcttctcagttcagaacccttagacctcgcctccgtcccctttggcaactcttctccctcaaatatagaagtcccc

SEQ ID NO: 45850 - DNA, 356 bp, Gossypium hirsutum
  Clone ID: LIB3196-019-P1-M1-C11
tcgcccacgcgttcgcggacgcgtgggtttgaatacaaaaggtgattttccattttattttctcagtgttcttcattcttagtttcgttttgttattttttttcttttttcctttttctttttttatttatttttcgtttgaagtataaagaaaggaggaagagacttacttggttgccggggtcgtcaagccaatgtcttctccgtcgaaatcggggcatgagcactaggcatgatcggcggcgcaaagagtgggttaaaaaaaaaccctaacagagccactactctcctttaaaaaaaaaacagaatggttttctaatgtttttttctttctgttttgtttatttttgaataaa

SEQ ID NO: 45851 - DNA, 343 bp, Gossypium hirsutum
  Clone ID: LIB3196-019-P1-M1-C12
ctgcaacaaatgagacttttgcagcaagaaatcagaagttctctgatctggttgtcaaatgccttatcaaactcacaaaggttcttcaaagcacaatttatgatgttgatcttgaccgcatccttcaaagtgtccatgtctacctgcaagaactaggaatggaagaaatccggagaagagctggagctgatgataaaccattacgaatggtaaaaactgttctacatgaacttgtcaaacttagaggggctgcaataaagggtcacctatctttggtgcccatagacatgaagcctcaaccaattattcttgcctatattgatctcaatcttgagactttggc

SEQ ID NO: 45852 - DNA, 73 bp, Gossypium hirsutum
  unsure (1)..(73): unsure at all n locations; Clone ID: LIB3196-019-P1-M1-C2
ntcangcgtncgntgacncgtggtcggtcgcgtgggttgtnccgggtgncctggtccggttcctgctggcgtg

SEQ ID NO: 45853 - DNA, 351 bp, Gossypium hirsutum
  Clone ID: LIB3196-019-P1-M1-C3
gaaaaatgtcttgctgtggtggaaactgtggctgcggtactggctgcaagtgtggcagtggctgtggaggatgcaagatgtatccagacctgaacgctgccgagatgaccacaactgagactctggttcttggtgtagcaccccagaaagcacactttgagggagctgagatggaattcggggctgagaacggctgcaagtgtggagacaactgcacctgcaacccttgcaattgtaaatgattagagaccaaagccaaagctccctggaagcagaggcgcctttgtctttaagaaataatatgttttgttggttatgtgtttttagaataaagtagccatggcttgtcgt

SEQ ID NO: 45854 - DNA, 360 bp, Gossypium hirsutum
  Clone ID: LIB3196-019-P1-M1-C4
cccaaccccaatcctgtttctcttttgcatcctttgtttctctcttcatctcctgcactacttgcaaaataacgagctgaagccgtgctacaataacactagtgttttcaacaataaattaatcatagccgcagcttgtttcttttaaactctaaatataaaggaggccaaacatgccgcctcgtagataccaatttgggagggctgatgaggccactcatcccgactccatgagagccaccttggctgaattcctctccactatcattttcgtctttgccggcgaaggctcaattcttgctcttgacaagatgtacaaggatacgagtgcgacgcctgcaagactggtgatgatagcac

SEQ ID NO: 45855 - DNA, 362 bp, Gossypium hirsutum
  Clone ID: LIB3196-019-P1-M1-C5
ctcagaggtacccattagggcacataatcaggaagcacactctcgagccacatatcatgatacttagatgagccatgtaacaggacgtttatccaggctaaacaagaaactcataagagttttaattagggagcttatagagcttaacagataactccggagagttaatatcaaggagaaccgtataagctaacagagaattcaagcgaaccatgtcagaaagcccacaagagcttagattaagacgctcatgtagagttgcgtttgtgtccgaattatctactagatcacaatcgatcaagtcatgtaacaggacactcacacacaactgcgatagtgtgcaacacgtgcaaaatcactac

SEQ ID NO: 45856 - DNA, 355 bp, Gossypium hirsutum
  Clone ID: LIB3196-019-P1-M1-C8
cccacgcgtccgtgctttgagatgaatatactgctctcgtccctcttttcacttgtgattgtgaggtcgcccagcaaaattcgagccatcttcatcaacaacgattgtttcagttcttgatgggtctcaatgagacctatgctgccgttcgtagtcagatcctcttgatgcagcctttaccttcggtaaatagagcttattccatgatcgtccaagaagaaggtcaacggagtctttcctctgttctacctcatgcttccgaacctatcgatttgctttctaccgtttctggcaaccataaaaaattcaatggtacttgtgatttttgtaaagtgaaagggcataagaaggaatc

SEQ ID NO: 45857 - DNA, 231 bp, Gossypium hirsutum
  Clone ID: LIB3196-019-P1-M1-C9
caggggaaagtgggcgcgcggggcaccggcccgacatcccgggtatgcccagcgtccgccacgcgtgcttatgtgcggggttgggatattattgtgtatgaacgtttactctatacttggggaaatgatgcaaaacagtactggagtctttggaccggagaagaacatttggactgtttcacagtgtttaaaaattatttctttaattgtgaaatcatggggagagaaatg

SEQ ID NO: 45858 - DNA, 355 bp, Gossypium hirsutum
  Clone ID: LIB3196-019-P1-M1-D1
cccacgcgtccggtaggaacatttctcgtcattatgatctgagtaatgaacttttcactctatacttgggtaaaatgatgcaatactcttctggagtctttaggacgggagaagaacatttggacgttgcacagcgtagaaaaatcagctctctaattgagaaagcaaggatagagaaatggcacgaagttctcgacattgggtgcggttggggaagtttagctattgaaactgtgaaaagaacaggatgcaaatatactggcatcactctatcagaacagcaactgaaatatgctcaagaaaaagtgaaagaagctggactccaagataacatcaaaatacttctctgtgacta

SEQ ID NO: 45859 - DNA, 339 bp, Gossypium hirsutum
  Clone ID: LIB3196-019-P1-M1-D10
agcaccttcctttgtttaaaccaactgctcactcgctcacctacgtgctaaacaccatgaccacctgcaggcacctgttcacctcctccagctccatgcagggctactgcggcatcaggcgcggcatcgggggcggctccagccgaatctaccccgtcctggccggagagtactgccgcgcccccagcacctactgcgggggcctgtctgtctcctccttccgcttctcactctgggggagcctgcgggctggggggcggctatagcggtggcttcagcagcagtagcagctctggttgtggcttcaaaggaggatatggtgctggcttttgttctggc

SEQ ID NO: 45860 - DNA, 268 bp, Gossypium hirsutum
  Clone ID: LIB3196-019-P1-M1-D11
caatatcagagccgggtcccatgactatgtacaatgtttgtgggtctgcgaaatgtgttgttgttgtcatctgtggtcggccggttgttgtacagccatttgtctagtcggttgatgcacttgtagctgctcggcttactgagaccgatggccaaggtgtctctcatggcttgtttggtgactccaggttcaccgggcagctagcatggacatggatgaagaccggtgaccagcttgcaatgaatgtctgagatccacattatgaccc

SEQ ID NO: 45861 - DNA, 354 bp, Gossypium hirsutum
  Clone ID: LIB3196-019-P1-M1-D12
tgagttttgaatctagggatttgcgggtggagaagacgagagctcatctctctgcttcaaagctcctgtccaggtagaattctcttcttcctttgcgttgtgttctttgttgttcagtcgccatggcttcaaagcggattttgaaggaactcaaggatttgcagaaagatccacccacttcttgcagtgctggtccagtagctgaagacatgtttcattggcaagcaacaatcatgggaccctcagatagcccttatgctggaggtgtgtttttagttaccatccatttccctccagattatcctttcaagcctcctaaggtcacgtttaggaccaaggtcttccatcctaaca

SEQ ID NO: 45862 - DNA, 360 bp, Gossypium hirsutum
  Clone ID: LIB3196-019-P1-M1-D2
cccacgcgtccgctgacttcggtcgtctcgagatcgagttggccgaggtcgaaatgcccggtctcatggcttgccgagccgagttcggccctgcccaacctttcaagggagccaaaatcaccggttctcttcacatgaccatccagaccgccgtcctcatcgaaaccctcaccgccctcggagctgaagtccgttggtgctcttgcaatatcttctctacccaagaccatgccgccgccgccattgcccgtgactcggcagccgtgttcgcctggaaaggtgagaccctccaggaatactggtggtgtaccgagagagcccttgactggggtcccaccggtggacctgatctgatcgtgg

SEQ ID NO: 45863 - DNA, 358 bp, Gossypium hirsutum
  Clone ID: LIB3196-019-P1-M1-D3
gtcggagcaccgccgggaacctaaccggtggtggggggcactgacgcccgggcatgcgatgggcgtgggcattgccctggataacccctgctcgctcaatgtctcctcccccctaaagagctaaaaaaacttggtccatgcgctaccaggagacgtacatgtgtctgaaatagggacacttttttttttagtttccatatgtccgaaacagggacactttttttagcccaatgcttccgcaccaacaggggccgaagttgtcgatggtgctcgtggctcccgtacatccgaggcaccaaggtgccgacagtggggagctcccccacatgtctgaaacggtgacaattttttttgtgcc

SEQ ID NO: 45864 - DNA, 365 bp, Gossypium hirsutum
  Clone ID: LIB3196-019-P1-M1-D4
gacccacaagagggaaagctggtccccctggtggccccgccccggttttccgggtttgacccacgcgtttcgtcacacgtacgtgttaacatagtgacaaatattcgaggctcatgtactaaataaacttggcagtggaccgattccatgtccgtgtagggactgtagcaaagtcaagtgagatgcaagcacatgtagcccttgcttgacgaataaatctaactctcgcgcatgaactacaagatcaaggtgattatttccttcttagtgttatgagtcttctgtggcatggtgcttcagttcatgattctcggttgatttatgcttcaaatcaggttgcttaaggtctattaacactgacatac

SEQ ID NO: 45865 - DNA, 354 bp, Gossypium hirsutum
  Clone ID: LIB3196-019-P1-M1-D5
agcacttcgatttattgaagaagtttgataccctgatatagttgactcgggacaccattttccaatctcgaagtcgacagccggtgccttcaaaacctacccacaacatgccggaaccattcgtaagaatggttacatcgtcataaaaaaccgtccctgcaaggttgttgaagtttctacctccaagactgggaagcatggtcatgctaagtgtcactttgttggaattgacatcttcaccgccaagaagctggaagatattgttccctcttcccacaactgtgatgttccacatgttaatcgtacttactaccagttgatcgacatttcttaggatggatttgtgagtttgct

SEQ ID NO: 45866 - DNA, 359 bp, Gossypium hirsutum
  Clone ID: LIB3196-019-P1-M1-D6
aattactctctcctctctgtaactcttctcctcgaagaagaagagaaagaggaggaaaagaaaaaagcttacatagatattcaaaaagaaaggagaaaaaacagttataaagaagggtaagaaggaaagtcaacatttgtaaaatggggaaacttctctgtgatccaaccgccgttgcggagacatttcaaacgtcttctccgacggtcacttggagggagcctaacgccgtcactcttgaagccgttgatctagttgaccagaccctcaccgcggctgccggcactacctgggacgacgtgattggcctagaggaccaacagagactgcatctctcgaagcttcacgccaagggggtg

SEQ ID NO: 45867 - DNA, 357 bp, Gossypium hirsutum
  Clone ID: LIB3196-019-P1-M1-D7
cggacgcgtgggtgcccagccaaaagaaactaaaccaaaggctgaaccaaagaaagaagccaaaaaggaggttgagaaacaggcagcaaaggcagaggccgctgaggaggaggaggcaccaaaggccaaaccaaagaatcctcttgatttgctgcctccaagtaagatggtactggatgactggaaaaggctttactctaacacaaagaccaatttccgagaggttgcaattaaaggattctgggacatgtatgatcccgagggatactcactgtggttttgtgactacaagtacaatgaggagaatacagtttcatttgtcacaatgaacaaggttggaggattcctgcagagaat

SEQ ID NO: 45868 - DNA, 332 bp, Gossypium hirsutum
  Clone ID: LIB3196-019-P1-M1-D8
ccaagactcaaacgcagtgtaagaacaagatcgagtccatgaaaaaacggtatcggtcggaatcggccacggcggagggatcgtcttggcctttatatccacggcttgatcttttattacgtggtaacgctgccgctgctgctgctgcaccgtctcctccaccattacagccgctgccttcgccaccgcagcagctgcatctgacagcaatggttcaaccacaaccacctggccctctttttactaaccttcccttgacgttaccagaagcgtccacgctggtggtgctgcaacaacaacatcaacaacaaccaccaccggcactaccaata

SEQ ID NO: 45869 - DNA, 347 bp, Gossypium hirsutum
  Clone ID: LIB3196-019-P1-M1-D9
aattactctctcctctctgtaactcttctcctcgaagaagaagagaaagaggaggaaaagaaaaaagcttagatagatattcaaaaagaaaggagaaaaaacagttataaagaagggtaagaaggaaagtcaacatttgtaaaatggggaaacttctctgtgatccaaccgccgttgcggagacatttcaaacgtcttctccgacggtcacttggagggagcctaacgccgccactcttgaagccgttgatctagttgaccagaccctcacggcggcagccggcactacctgggacgacgtgattggcctagaggaccaacagagacggcatctctcgaagcttcac

SEQ ID NO: 45870 - DNA, 374 bp, Gossypium hirsutum
  Clone ID: LIB3196-019-P1-M1-E1
atggcttcggtgctggcttgggtggtggcttgggtggtggcttgggtggtggctttgctggtggtgatgggcttctggtgggcagtgagaaggtgaccatgcataacctcaacgaccgcctggcctcctacctggacaaggtgcgtgctctggaggaggccaacgccgacctggaggtgaagatccgcgactggtaccagaggcagcggcccactgagatcaaagactacagtccctacttcaagaccatcgaggacctgaggaacaagatcattgcagccaccattgataatgcacagcccattttgcagattgacaatgccaggctggcagccgatgacttcaggacaaagtacgagcatgaactggccctg

SEQ ID NO: 45871 - DNA, 354 bp, Gossypium hirsutum
  Clone ID: LIB3196-019-P1-M1-E10
cggacgcgtgggcggacgcgtgggggagcagcgataccgccatacgagaggagggtctcaagataatggcctcgaggaaactttctgctccatgaggatcaaggagaaccttgctgaccctgaacgtgccgacattttcaacccacaagccggtcgtatttccaccctcaacaggtttaacctccccatcctccaacgacttgagctcagcgccgagaggggtgtcctctacaacagagctggtttgattccacaatggaacgtcaacgctcacaaaatactctacatgttaagaggctgtgccagagtccaagtggtgaaccacaacggcgacgcagtgttcgacgataacgt

SEQ ID NO: 45872 - DNA, 376 bp, Gossypium hirsutum
  Clone ID: LIB3196-019-P1-M1-E11
atgtggccatccaggctgtgctgtccctgtacgcctctggccgtaccactggcatcgtgatggactccggtgacggggtcacccacactgtgcccatctacgaggggtatgccctcccccatgccatcctgcgtctggacctggctggccgggacctgactgactacctcatgaagatcctcactgagcgcggctacagcttcaccaccacggccgagcgggaaatcgtgcgtgacattaaggagaagctgtgctatgtcgccctagacttcgagcaggagatggccacggcggcttccagctcctccctggagaagagctacgagctgcccgatggccaggtcatcaccattggcaacgagcggttccgctgccc

SEQ ID NO: 45873 - DNA, 377 bp, Gossypium hirsutum
  Clone ID: LIB3196-019-P1-M1-E12
atcggggcgtgggccggggggccggcggcggggaggccggggcctgcaggccgccggtacgtcaagatccggactccggcccggactacgaggcgctgccggctggagccactgtcaccacgcacatggtggcaggcgccgtggcagggatcctggagcactgcgtgatgtaccccatcgactgcgtcaagacccggatgcagagtctacagcctgacccagctgcccgctatcgcaatgtgttggaagccctctggaggattataagaacggagggcctatggaggcccatgagggggctgaacgtcacagcaacaggcgcagggcctgcccatgccctttattttgcctgctacgaaaagttaaaaaagacattg

SEQ ID NO: 45874 - DNA, 362 bp, Gossypium hirsutum
  Clone ID: LIB3196-019-P1-M1-E2
gaaaaacacgaagtaggtaagggtgagcgtagacggggcaactgcaaggaggataatgtctcaaaaagggatgagatcatatttccacctaaacaggaatttgctgttgaggggtaccagccacatcatgtcagggagcaagcttctgcaaggaagaatgatctcaacattccatcatggcaaaaacaggaagtctctgctggtaaggttgaattttggaatgggaaggatgatgttgccttcaaaacagcaagattgagcagttcttctcatggaaaaataatggaaagagctgatggtggagccaaactacaagatggtaggcagaatggtacgcctagaatatataaccaagatgttct

SEQ ID NO: 45875 - DNA, 359 bp, Gossypium hirsutum
  Clone ID: LIB3196-019-P1-M1-E3
attttgcgagtgttaaacattgtttgcctttcatttctttctctattccttgctgcttcctcaggcagcctttcggtttctgagtaacccaagattaaaaaggatggggctgtctgttgctaacctgattagtcgactgtttgccaagaaagagacaccaattcttatggtgggtctagaggctgctggtaacactaccattttatacaagctcaagctcggtgtgaatgctactaccattcccaccaccggcttctacgtggtgaccgtaaaatataataacattaacgtcactgtttgggatgttgatggtcacgacaagattcgaccatgtggatgcactatatacaaaacactca

SEQ ID NO: 45876 - DNA, 380 bp, Gossypium hirsutum
  Clone ID: LIB3196-019-P1-M1-E4
atgcatgcagtcttgggaaagatggtgttggtttgagatatatcattaagtatagtaagaatatattaagagaatatgaagctttagaaaaatttagaaactctcattatagttatctttgttctataagaaggagcttctattcacctcagggtcaattgcttttcctgacagcttgttttctgactgagttatgagatttttgttttctttttgcttgggtagtggggagaatttcattgagaagtcaccctcaatgaaattgatttgtatttcattgatttggatcatttaccttactagcctcttccctgtgaaatgcttactttggcctgatcatcctcaggactcagttcaatgtgatatgtctttgtataagc

SEQ ID NO: 45877 - DNA, 363 bp, Gossypium hirsutum
  Clone ID: LIB3196-019-P1-M1-E5
gaatttttagtttttttttgtttcagatgatcaaagaaaaacaacaatgtcacaaccagtgggtccatctttgcccctgaacaattcctcttgcatcttctacaagttaattgtggcttccatccttcaagacaagaagctaaggatcccgaataagttcgttaagaaatttggtaatgaactctcttcggttgctacgctcaccgtcccgggtggttgtcaatggctagtggaattgagggaagataacaaaagaatatggctggataatggttggaactcgtttgttgaatactattccatctgcatcgggtacttcgtggtctttaaatacgaagggaattcgcattttggtgttcatgt

SEQ ID NO: 45878 - DNA, 360 bp, Gossypium hirsutum
  Clone ID: LIB3196-019-P1-M1-E6
cgtagatatggcgattaacccttctttgctctttctttcccttctttttctcttcaatggctgcctagctcgccagaccttttcgtcacagcagtcccaaaatgagtgtcaaatcaataggctccgcgcctctgcaccccagacccgaattcgctccgaagccggcaccaccgagtggtggaaccccaactgtcaacagctcaggtgtgctggtgtatctgtaatgaggcagactattgaacctaatggccttgttttgccttccttcaccaatgctcctcagcttctctacattgtccaaggaagaggtattcaaggtattgtgatgcctggatgtgccgaaacattccaggattcaca

SEQ ID NO: 45879 - DNA, 339 bp, Gossypium hirsutum
  Clone ID: LIB3196-019-P1-M1-E7
agagagcagagctggctactgaaaagtatgtccccctctcgcccatcctagagggatacgttattttggtagaaaataccgagtacatggaagataattaggttaatagctggaattttggaggcatggtaggctacgttagcttctagtttttggttactttatgatttgttgtgtatagtaaaattcccgttttttctttacaactgcccctctgcttataatcgcaaaaaaaaaaaaaaaaacaatttggaggaaaaaaatttagggtttttaagcgttacttaataggcttttttcaatgaaagaaataatataaaactcttacaatattatagt

SEQ ID NO: 45880 - DNA, 352 bp, Gossypium hirsutum
  Clone ID: LIB3196-019-P1-M1-E8
gatttaacaaaagaaattcaatatgaatattttcaagggatttcccactattttccttttcatttgctttgttttaattattgcagattgtttcatggttgaagcagatacttgcaaacccagtggcaagctgagagggaaaaagcctccgccagggcaatgcgattctaattgttgtgaagacggaaagttttatacaacgtataaatgttcaccgcctgtgtcgagccatacaaaaggaaaattgacaattaacagctttgcagctggtggggaaggtggaggaccgtcggaatgcgacaaccgttaccactcggatgatgaacctgtggtggcactttcgaccgggtgg

SEQ ID NO: 45881 - DNA, 338 bp, Gossypium hirsutum
  Clone ID: LIB3196-019-P1-M1-E9
cgtagatatggcgattaacccttctttgctctttctttcccttctttttctcttcaatggctgcctagctcgccagaccttttcgtcacagcagtcccaaaatgagtgtcaaatcaataggctccgcgcctctgcaccccagacccgaattcgctccgaagccggcaccaccgagtggtggaaccccaactgtcaacagctcaggtgtgctggtgtatctgtaatgaggcagactattgaacctaatggccttgttttgccttccttcaccaatgctcctcagcttctctacattgtccaaggaagaagtattcaaggtattgtgatgcctggatgtg

SEQ ID NO: 45882 - DNA, 344 bp, Gossypium hirsutum
  Clone ID: LIB3196-019-P1-M1-F1
gaagaaccgaagtcaccggaaagtgacgtcaccagcatgagtttcgaggagacgaagctgactttaggattgccaggggagggacgatcgtcggcgggagctgtaaagtgttctgcaaaacgtggcttcgttgagaccgtagtcgatcttaaagtcgggagttctggtaactgcatgcctggtggacgtgatgacactactactgttatcgattccggtgccggaaaacctcctcccgccaaggaacaagttgtgggttggccaccagtgagatcaagtagaaagaaggctataaatgagaggtttaggtatgtgaaagtagccatggatggagctccatttct

SEQ ID NO: 45883 - DNA, 359 bp, Gossypium hirsutum
  Clone ID: LIB3196-019-P1-M1-F10
gtgatttgcattcccgattaatactcttgaagtatgaacctttgcattttggtatgctcggttttgtcaaatcaacatgtgtgttaaaactagactcaactcaccaccaagctttaaacaaacatggcctactcataccagcaattgctagtgtttctgccatttcattaccgttaagattagctattgaaaacgataacttttcaacacaggcaatcctcctatctaagtctgcaaatgaagcttgtcgcctatctaagtctgcaaatgaagcttgtttcgacgatggtctccttttttttatccaaaatccagtgtagactgttggtacaatcgacgtggtttaggctcaagaattg

SEQ ID NO: 45884 - DNA, 359 bp, Gossypium hirsutum
  Clone ID: LIB3196-019-P1-M1-F11
aaaaaatcttacagggactcccttctaggtagtaacatggaaaatctacgccaagtgatcttgtaataggaggttaactccatggaaattaaagttcttagtgatgatggtgaggattctttggaggaaacactagcgactcaagtggctcatatctcgcttacacaaggtgaaaaaggaagaaccaggtagaaacgggaaaaagcgttaattgtgaaggtctttgggaaacctctaggttatcattttcttaatcaaaagctggcttagttatggaatcctttagggattataaaaatgattgatcttgggtgcaacttcttcttaataaattccagcaacagaagtggattatgata

SEQ ID NO: 45885 - DNA, 378 bp, Gossypium hirsutum
  Clone ID: LIB3196-019-P1-M1-F12
atgacagtacctttccccccccctttcatggcccattttattgtctacctttcactactaagtatgaccgttcctgtctcagatcttaataaaaaacaaaacaaaacaaaaaaccaaaacaaaaactcattcaggttaaatttggccttaatttaatatacttgttagcaagcgtgtgtgacagagagtggggaaagctacatcactgaatattttgataaactttacctacttgagtttggtttatttttcccttttcctaaattgactagcactgactgtaatttatttccctgtttcatgtctctctcttccattctgcaggagttttagctatttgagattgtggaccatcagttttgcactttagagagcgtt

SEQ ID NO: 45886 - DNA, 376 bp, Gossypium hirsutum
  Clone ID: LIB3196-019-P1-M1-F2
atcgccacttcagggccgtcccccgcagcttttggcaggcgtccttgtccctgtcaccgccacgtcgcggacatggtgatttcagaaagtatggatatactcttcagaataagaggaggccttgatttagcttttcagctagctactcctaatgaaatttttctcaagaaggcactgaaacatgtgttgagtgacctgtcaaccaagctttcttcaaacgcccttgtgttcagaatttgccacagttcagtgtatatatggcctagcagtgacgtaaacaccattcctggagaactgactgatgcttccgcttgtaagaacatactgcgctttattcaatttgagccggaagaagatataaaacgaaaattcatga

SEQ ID NO: 45887 - DNA, 295 bp, Gossypium hirsutum
  Clone ID: LIB3196-019-P1-M1-F3
cggacgcgtgggtaattttccacttcattatgtattggtttcaaaccaaaatatgcaatgtgtctgacacaatcaactaacatttgccatgtatgtgacaaatcaaaagtaattttccattagttttagatagttttcaaagttaataaaagaggatttgagtctgtatcaatcctaagaacactatgtctatataatgcgaacgcggcccacatagtattttttatacaaattttcaatccaatataaaatgcatatatgacccatagtgagacttttttctgtcacaacacac

SEQ ID NO: 45888 - DNA, 374 bp, Gossypium hirsutum
  Clone ID: LIB3196-019-P1-M1-F4
atcgggcagacatggggatgacctgcgcaacaccaagcaggagattgctgagatcaaccgcatgatccagaggctgagatctgagatcgaccacgtcaagaagcagtgtgccagcctgcaggccgccattgctgatgctgagcagcgtggggaaatggcactcaaggatgccaagaacaagctggaagggctggaggatgccctgcagaaggccaagcaggacctggcccggctgctgaaggagtaccaggagttgatgaacgtgaagctggccctggacgtggagattgccacctaccgcaagctgctggagggcgaggagtgcacgctgaatggcgaatgcgttggacaagtcaacatctctgtggtacaat

SEQ ID NO: 45889 - DNA, 364 bp, Gossypium hirsutum
  Clone ID: LIB3196-019-P1-M1-F5
ggacttttatgaatatgggtaaaattcggcctaacttgggtatattgaaattttgcatattttgtgttttgtgcaataaggactaaattgtaagaaaatgtgaaatgttaggggcaaaagtgtaattttcttatttatctatttttggactaaattgagtgaaaatatgtttgaatgagtttaatttgaatatgtttaaatcaagaatcaaagaaatcagatttggaccggggaaaaactaaagttgtcgattagtcgttccgtaccgattactgttgtccaaggtaagtctataagcaaatagatgttattcatttgattaaatatgaattatatgtgctgaaatgtataatgtgataatata

SEQ ID NO: 45890 - DNA, 322 bp, Gossypium hirsutum
  Clone ID: LIB3196-019-P1-M1-F6
caaaaccttcttttgttttcttcttctaatcaatggcatcttccatagctacaactctcacttcctcttcaaagctttgcaggaacacttctctcttcgagtcttccttccatggggttccaattaaaccactttcttttcatttcaaaacaaagtcttccccgtgcaacgcatccatttccatgtctgcagcatcacctccaccctatgatctgaataatttcaggtttgaccccatcaaggagtccatcgtctcacgtgagatgacacgcaagtacatgatggacatgatcacctatgctgataccgatgtggtggtcgt

SEQ ID NO: 45891 - DNA, 350 bp, Gossypium hirsutum
  Clone ID: LIB3196-019-P1-M1-F7
cccacgcgtccggaaaggcgtctactcggcgcccggagattatatccacttcaagtcccaagtccctcttcacaagatccctattggcacaaagcagtggcgatattatgattttggtcccaaagtagttcctccacttatatgtcttcctggaactgctgggacagcagatgtctactacaaacagatcatgtccttgtccatgaagggttatcgggtaatttctgttgatattccatgtgtttggaatcatcaagagtggattcaaagtttcgaaaagttcttggatgccattgatgttcaccatatacatttatatggcacatctcttggaggcttcctagctcaac

SEQ ID NO: 45892 - DNA, 303 bp, Gossypium hirsutum
  Clone ID: LIB3196-019-P1-M1-F8
cggacgcgtgggcccagttatcaaccggtgacatatttgttgtaccagcatgccatccaatcacattctttgcctgacaaatcaagaacctaagattggtcgagttcggactctacatccgccaagacaacatgaggatcttggtggctgggaaaaccaacaatgtgagacagtgtaatcgacacgccaaagagctgtcgtcaggagtggagatcaaggttgttggatgaggtattcaacaacaacccgatcgaatctaacttagtgaatggacagaatcgtcgtggatttccttagaggtgg

SEQ ID NO: 45893 - DNA, 274 bp, Gossypium hirsutum
  unsure (1)..(274): unsure at all n locations; Clone ID: LIB3196-019-P1-M1-F9
tcttcttctaatcaatggcatctttcatagctacaactctcacttcctcttcaaagctttgcaggaacacttctctcttcgagtcttccttccatggggttccaattaaaccactttcttttcatttcaaaacaaagtctttcccgtgcaacgcatccatttccatgtctgcagcatcacctccaccctatgatctgaataattcagggttgaccccataaggagtccatcgtctcacgtgagatgacacgcangtacatgatggacatgatca

SEQ ID NO: 45894 - DNA, 381 bp, Gossypium hirsutum
  Clone ID: LIB3196-019-P1-M1-G1
atgagaatcgttgtcagagccttactgaggacttggagtttcgcaaaaacatgtatgaagaggagattaatgagaccagaaggaagcatgaaacacgcttggtagaggtggattctgggcgtcaaattgagtatgagtacaagctggctcaggcccttcatgagatgagagagcaacatgatgcccaagtgaggctgtataaggaagagctggagcagacttaccatgccaaacttgagaatgccagactgtcatcagagatgaatacttctactgtcaacagtgccagggaagagctgatggaaagccgcatgagaattgagagtctttcatcccagctttctaatctacagaaagagtctagagcatgtttggaaaggt

SEQ ID NO: 45895 - DNA, 363 bp, Gossypium hirsutum
  Clone ID: LIB3196-019-P1-M1-G10
ctagcttatacatgccatacttaaaaaatatttacactttcaaaagtaccaaaataaggtttgatagtgtggtgacaatccttgactatccccgagatttcagcagctttgatatctataaaacaatgcaaatacacataaagtaagcattccaaagcttagtaagctcgtactaaaattatcaacaatatataaaacataaacatcaaaccataagtatataaacattttcaatctttatgttcataccaatccactaaacttcatctaccacctaagtatcatacatacttgaatcttcccatacctattagttttcattcttacctcttgatgaatattttaagcctttcatacattatt

SEQ ID NO: 45896 - DNA, 343 bp, Gossypium hirsutum
  Clone ID: LIB3196-019-P1-M1-G11
atgagattccaggcccgatgcctcccctaatccgagagatgctggagaaccctgaaatgtttgaggatgactcctcgcagcctggtccccatcccaatgcctctagcgaggatgaggtccccgggggccagggcaaagggggcctgaagtccccagcctgaccagggcccctgacctctccgctgtgggggttggggctccaggcagcagactgaccatctcccagactgccagtgactgggggaggacctgctctgccctctccccaccccttccaatgagctccttgtttttgccaaagtttccaggggtgcctctgtgttcatccccttcccgatctaac

SEQ ID NO: 45897 - DNA, 369 bp, Gossypium hirsutum
  Clone ID: LIB3196-019-P1-M1-G12
attgcagggattacaggcttaagccaccacgcctggcctgtttgagatctttatttgtttttgttctgttacctttattgtgtatcctttggtgataatactttgtgtgtttttgtgtgccagaaggaaaaaaacccatcatattgggctttttttagactgtcaggaagttcgaatatttaccctacttaagtcaatgtgtttaatttttggaaagatgaaccttttctcagattattgtaagcccttgttctttttatcctttagcatttcaataggtgaagcaccataccggctttatcttttggagagcttgaaccctcccatgaactgaagagtccctccaggtttccctaggagtccatattt

SEQ ID NO: 45898 - DNA, 363 bp, Gossypium hirsutum
  Clone ID: LIB3196-019-P1-M1-G2
ggaagtcactgctttggaacaggattcagttgttccaaaagaaaagaccgatgaacataatttagaaaacggggttgaaggcattcctgatgaattgattcttaaaagagttaactctagaaaagaaatgaagtcctatcaattagggaagcagttgtcatgcaagtggactacaggagcagggccccggattggttatctgagggactatcccttggaactccaattccaggctttggagcatgtgaaattgtccccaagaagtgcaagctattcaaaattgtactttttcttctgggtctactagtagcctcagtcaaaagtttccacaccagcaagtgcaagtgaagaaatgagaaccct

SEQ ID NO: 45899 - DNA, 379 bp, Gossypium hirsutum
  Clone ID: LIB3196-019-P1-M1-G3
atgccgggctggcggcgggagtcggcgcctcaggttcctgcctcgcgtccctaggcggcggcggccgggcgtcccgggatggccttcatggagaagccgccagccggcaaggtgctgctggacgacacggtgccgctgacagcagccatcgaggcgagccagagcctgcagtcccacacggaatatattattcgagtgcaaagaggaatttctgtggaaaacagctggcagattgttagaagatacagtgactttgatttgcttaacaacagcttacagattgcaggcttaagtctgcctcttcctcccaaaaaattgattggtaacatggatcgggaattcatagctgtgaaggcagaaaggtcttcagaactatctc

SEQ ID NO: 45900 - DNA, 363 bp, Gossypium hirsutum
  Clone ID: LIB3196-019-P1-M1-G4
caagagggtacgcaaaagcacgctggtgcccctccgcaatatccgggattcgaccctttcgtccggtgtgacactcgcttgtacgtgccttgcgtaaataaaaggctgagggctgactttcaccattactgaccatggagcatgggccttcctagtgagatggatgctatacagacacgggaactcttcgacaacaaactagtcgctaagcctgatactggatcaccaaggtgttctctcggctcgctaacagggactattgcctcgactccgaaggtactggcactaacagctttcaatctttatgttcataccaatccacgggcgcgcgcttcactgctgtacttaacgagtgaattaact

SEQ ID NO: 45901 - DNA, 360 bp, Gossypium hirsutum
  Clone ID: LIB3196-019-P1-M1-G5
ggaagaagaaggagaaggagaagaagaagaagaagacaaccccagccgccgcagccgccaccaggaggaggaggagcaggggcgggaaagctcatcatgcaacaaccttctctgtgccttcgacagaaacttcctcgctcaagctttcaacgttgaccacgacatcattaggaaaatccaacgtgtacgaggaaatagaggcaccatcatcagagtcagggacagactccaagtcgtaacaccacccagaatggaggaagaagaacgtgaggagcgccagcaggagcagcgataccgccatacgagaggagggtctcaagataatggcctcgaggaaactttctgctccatgaggatcaa

SEQ ID NO: 45902 - DNA, 368 bp, Gossypium hirsutum
  Clone ID: LIB3196-019-P1-M1-G6
gcctgagacacccattgattggccaacaaggatgagaatagcaaagggtgttacaagaggtctgatgtaccttcacactcaagaaaacatcatccatgggaaccttacatcaagcaatgtcttacttgatgaggacacaagtgctaaaatatcagattttggcctttctcgtctaatgacagctgctgcaaatgcaaatgtaattgcgaccgcaggagcgttaggttaccgagcaccggagctttcgaagctcaagaaagccaacacaaaaactgatgcctatagccttggtgttatcatattagaactcctaacagggaagtcccccggagaggcaatgaatggagtggatttgccacaatgggttg

SEQ ID NO: 45903 - DNA, 368 bp, Gossypium hirsutum
  Clone ID: LIB3196-019-P1-M1-G7
ataaaagccagttctctcaggcccctctcgagatccagtgagacaattttccaggggtaggccccagaaatctattttaagagctcctcagagtaattctaatggtcaggtttaggaaccaactgatgtatcttaaaatactaatatcaaaagcataaactagtataaacttgtcactctctcctccccaccccacccttttttaaaaaagatctcaaatcatgttatacccccagaactctcacctctgggcaagtaatttcaattcaagatacagagaaacattttataaaaatgtatcctaattagtgagacttggattccaataataacttaagtagcatttcaatataagatacccaattttg

SEQ ID NO: 45904 - DNA, 355 bp, Gossypium hirsutum
  Clone ID: LIB3196-019-P1-M1-G8
aaaaattaaaaaaaataaagaaaagaagaagaagagataattgacacttttataaaaagtaataatggacccaaaattaatggatgaaatcaaatcatagtttaatttactccatggatgggaccaactcaatctgattcaacccatattaaaacgatttgggtagtgatgggttaataggaatgtagtcgagtaagttgcgaggtttatgtttcgagtctatcatatataaactcgattagattttggtttggatgcatagatggatttaatcaaatgtgtatgatattgataatatatacaataacttgataaatggacaccaaatgagtgatgttgggtggggatgaaggtg

SEQ ID NO: 45905 - DNA, 308 bp, Gossypium hirsutum
  Clone ID: LIB3196-019-P1-M1-G9
gcctgagacacccattgattggccaacaaggatgagaatagcaaagggtgttacaagaggtctgatgtaccttcacactcaagaaaacatcatccatgggaaccttacatcaagcaatgtcttacttgatgaggacacaagtgctaaaatatcagattttggcctttctcgtctaatgacagctgctgcaaatgcaaatgtaattgcgaccgcaggagcgttaggttaccgagcaccggaacctttcgaagctcaagaaagccaacacaaaaactgatgcctatagccctggtgttatcatattaaaa

SEQ ID NO: 45906 - DNA, 105 bp, Gossypium hirsutum
  Clone ID: LIB3196-019-P1-M1-H10
ctgttaccgagtgtcgatgatattgttgatcaactaaagggaagcctaatggtttcaaagatagatctgagatcgggccattactaagcgcgaattcgagattcg

SEQ ID NO: 45907 - DNA, 367 bp, Gossypium hirsutum
  Clone ID: LIB3196-019-P1-M1-H11
atcaaggaactggtctgtatgaaggacttgactggctgtcaaatgagctttcaaaacgttaaatgaaactggatatctaaccaaggacatgtttgataaaattggcctaggcttgttacaacaaaattagtttgtatcttggttattaaacagtatctgggactcgtttgggcagaatattattttgttgccaattattgtttaccaagtataatgttgctatttagcaattgtgcttggttttaaagaaattctccttgggaaaaaagtatcctttttaaattttacttcccataagtgtaaatgcctggacatagctattgtgaaacctttaaataaattggtttgagtgctttttaagccccag

SEQ ID NO: 45908 - DNA, 314 bp, Gossypium hirsutum
  Clone ID: LIB3196-019-P1-M1-H12
cccacgcgtccggccggttaagtaatgtgatcgtatatggagcaaaaacaacttaccgtcaagtagtttgtgacaaatctgtcacgcaggaaatgtgcaatgcgaggtagcaaagaagttatgctaaggcgaacaaggcgatctcgatgctctaggtatctaagcacaatttcagctacttctctgtaccttgacatcatgaactcaccagtgttcctgataaagatgaagtttatgtcactaacaacacatatacacttatatatcatttcatatgacaataaaatatttcctaaatgaaatggataatcttc

SEQ ID NO: 45909 - DNA, 378 bp, Gossypium hirsutum
  Clone ID: LIB3196-019-P1-M1-H2
atcaaagtttaaatacccctttctagtaatgccaaagacatacattgttttaaattctctactttatagataacaaaataatgtttagctcagtaagaaatgaagtaatgagtgatcaatttgaaggatttttagattatttaatctttgcttatgttgctttttcacatgattaatgatgaaaatgaaatgttaaatcaacaaaataacatccagtgtttcataacatttttagtaagtttggtaaactttagtcccattatatacttttgggggacagtgttataaatcagaattttacaacagtttgcagcacactgatttgaaagtttccactgcaaaatgagaaagggttcaaaaatattaattattattaag

SEQ ID NO: 45910 - DNA, 376 bp, Gossypium hirsutum
  Clone ID: LIB3196-019-P1-M1-H3
atcccaggccaagcaagcttctgtctgcacctgctctcaatcctgctctcaccatgagcctccgcctgcagagctcctccgccagctatggaggtggttttgggggtggctcttgccagctgggaggaggccgcggtgtctctagctgttcaactcggtttgtctctgggggatcagctggaggctacggaggcggcgtgacctgtggctttggtggaggggctggtagtggctttggaggtggctacggaggtggccttggaggtggctttggtgggggttatgctggtggctttgttgattttggtgcttgtgatggtggcctcctcactggcaatgagaagatcaccatgcagaacctcaacgaccgcctggc

SEQ ID NO: 45911 - DNA, 354 bp, Gossypium hirsutum
  Clone ID: LIB3196-019-P1-M1-H5
gcagagtgtgtgagaatattcctattgttctatgtggaaacaaggttgatgtaaagaacaggcaggtcaaggcaaagcaagtcacattccacaggaagaagaatctgcaatactatgaaatttcggccaagagtaactacaatttcgagaaacctttcttgtaccttgctaggaagcttgcagggtaatatataacattgtatttgttgtgcaattaatgttttaatgctgatgcctcgatcaatgtctaaaattggtgttgttttgatgattctagtgatcctaatctccacttcgtggagtctcctgcacttgctcctccggaagtacacattgacttggctgcacagcaac

SEQ ID NO: 45912 - DNA, 359 bp, Gossypium hirsutum
  Clone ID: LIB3196-019-P1-M1-H6
tgctccagctgcggccgacgcgtcgagcagtacatcaacaaccttaggaggcagctggacagcatcgttggggaacggtgccgcctggactcggagctcaaaggcatgcaggacctggtggaggacttcaagaacaaatatgaggatgaaatcaacaagcgcgcagcatcagagaatgaatttgtgactctgaagaaagacgtggatgctgcctacatgaacaaggttgaactgcaagccatggcagacactctcacagacgagatcaacttcctgagagccttgtatgaagcagagctgtcccagatgcagacccacatctgagacacattcgtggtgctgtccatggacaacaaccg

SEQ ID NO: 45913 - DNA, 347 bp, Gossypium hirsutum
  Clone ID: LIB3196-019-P1-M1-H7
tttcagtttcagcgtctctgtcaacaacaagttgttttttattttcttcctattttttttttttttgcttaaacaaggttaacaagagatggcggatgaggatattcaacctcttgtgtgtgacaatggaactggaatggtcaaggctggttttgctggtgatgatgcccctagggcagtcttccctagtattgtcggtcgtccacgccacacaggtgtcatggttgggatgggtcaaaaggatgcttatgtaggtgatgaagcccagtcaaagagaggtatcctcactttaaagtaccctatcgaacattgcattgtcagcaattgggatgaccttgagaagattt

SEQ ID NO: 45914 - DNA, 394 bp, Gossypium hirsutum
  Clone ID: LIB3196-020-P1-M1-A1
aacatatcaagaggatgttttatacttgttagcatgctagaatggttaaatcatactaagtttagatgaagatgcttcggtaacgaatgtggcatactatagctcatactcgatgattgtgtcggttaaaaggtcttacacaaaagcttgcattgtaatcgatcgcaactcgtatgctagctgctctattaaaaatgatgcatctcctatcttgcggcatgacattgcttatcaagttcgtgcatgagacatctgaagcattcgcggattcctgttcaacaatagtaaatgctattggtcggatgtggcgagtagtgtcttatgcaactactaacagtcggtgatgctcatatcatttgtactcgagtgtaccatgtatatgcacgaatgactt

SEQ ID NO: 45915 - DNA, 398 bp, Gossypium hirsutum
  Clone ID: LIB3196-020-P1-M1-A10
atgagaaaacaagcatgcaacctgcacacttttccggtctgccccacgtgtagaattagtctagcgatagaaaactggtgactgacaaggatctacacacgtggtcatgcttgaagcaaaaattctgaccttctttgggcttggcatctgggtacagaatattaattaactttcttacttcctttctttctccatccttagttattccttttcaacatttagagttgccaggtaaaatacaggatacccagtgaaatttaaatttcagataaacattattcctttagtgtatttctcatatattttatcagaaatattttcacttaaaaaaagtttatctgaaattcaaatgtaactgggtgtgtcctatatattttttcttaaatctcacagttcta

SEQ ID NO: 45916 - DNA, 286 bp, Gossypium hirsutum
  Clone ID: LIB3196-020-P1-M1-A11
cccacgcgtgcgggttgatgaacaatgccgaacgatgcacgaaaagtgttgttggagatccttcttgctcaagttgtcagaatgttgcagaatctattcttcatgttatgtgagattgcgataatgcacgagaggtgtagacgtacgtacactccttcgaggatttggggcgcatttttctttgttctgttggacgaggggctctagctaaattgaactgatgctagcgcctcggttgttactcatgttgaatgacagtcttgctttggaagtatttgctgtaatc

SEQ ID NO: 45917 - DNA, 380 bp, Gossypium hirsutum
  Clone ID: LIB3196-020-P1-M1-A12
aaacagagagcctttgctctctccttctcccttcctcctttcagctagggtttcgacctcaaccttggagcgtcacctcaccaccatcggactcggtggccgaccacgcgaagaaggaacgcaatgagaggccggaggtaaggattattctccttttattctctttatgcaaaagaaaagaaagaaagactaaagaatagaaaagaagtgagattcgaaaactaaaaaaattgaaatcgcaaatcaccttttgaaactaattttttttatttcttttcgtgtttaatacaatcttttttttccaaaatcccccctttttttcatagccgaatccctatttattttgctacccatttctatttggtgcttctggttttcta

SEQ ID NO: 45918 - DNA, 413 bp, Gossypium hirsutum
  Clone ID: LIB3196-020-P1-M1-A2
acacgcgatgtcttccgtgatctaatagcctgaaaatggaccgcaccatacaacgagtgcgtaccgaggaacatgaacagatcaagaccctcaacaacaagttcgcctccttcatcgacaaggagcagggcaccaagaccgtgaggcagaacctggagccattgttcgagcagtacatcaacaacctcaggaggcagctggacagcatcgttggggaacggggccgcctggactcggagctcagaggcatgcaggacctggtggaggacttcaagaacaaatatgaggatgaaatcaacaagcgcacagcagcagagaatgaatttgtgactctgaagaaggacgtggatgctgcctacatgaacaaggttgaactgcaagccaaggcagacactctcacagacgagatcaat

SEQ ID NO: 45919 - DNA, 168 bp, Gossypium hirsutum
  Clone ID: LIB3196-020-P1-M1-A4
gtgctcggctgaggcgaccggctaattacaaatgcacgttcaatgcatgaacatatataatcaaattcaagcatggaagttaaactcttttggcattgctatttacacaataggattcaaaattatacaaaacatcctcaagcctatacatgccataggatcgagttc

SEQ ID NO: 45920 - DNA, 358 bp, Gossypium hirsutum
  Clone ID: LIB3196-020-P1-M1-A5
atgacattaaaaagtgtgctgcggtgacagagcgtgttcttgctgcttgctacaaggctttgaatgatcaccatgtcatgctagaaggtactcttttgaagcctaacatggtgacccctggttccgactccccgaaggttgccccagaggttattgctgagtacactgtccgtgccttgcagcgtaccgtccctgctgcagtccctgctattgtgttcttgtctggtgggcaaagtgaggaggaggctacccttaaccttaatgccatgaacaagctccagaccaagaaaccatggtcactctcattctcatttggacgtgcccttcagcagagcactctcaaggcctgggctggaaa

SEQ ID NO: 45921 - DNA, 361 bp, Gossypium hirsutum
  Clone ID: LIB3196-020-P1-M1-A6
gcggttcaaacgaaggaaatgttgtcgaaacaagctgttaagatcgctaaacaagctgaagaacacgagcgctttatcaataaggtgactcatcttttgggggttcttggatttggagggttttgctttctattgggagcaagaccacaagatattccttatgtatattgtgtgttctatgttacctttgttcctcttagatggatatactaccgttttaagaaatggcattattatcttctggatttctgctattatgccaacacaatcttcttggttgaccttcttctgtatccgaagaatgaaaaacttttcatgatttgtttctcatttgccgagggaccgctagcgtgggcgctca

SEQ ID NO: 45922 - DNA, 470 bp, Gossypium hirsutum
  unsure (1)..(470): unsure at all n locations; Clone ID: LIB3196-020-P1-M1-A7
actatagaacaagtttgtacaaaaaagccggctgggcccgcgtccgcacttccgggaattcccgcgatatctttcttgatttaattgtaagaatctgagttgctttccactaccatttcctaagtccaaacatcggtgtcttcctgggggctaatttgcaagggaaagaatgaggaacagcaggactcttacgagctgcaaaggtaatttgcttatttaactattactaagggcaggaggaacagccaggccaaaatggtctgtgcttttgcatagcaacgtggctattagaatattagaataggggcctaccatcccattttaaaaagtggggaagaaataaaacaggataagagacaaagaaaacctgaaattgagcgcatcttgaagacaattatgagaatagaatagctattgacttagaaaaatcctattcatttcattgctttttctttaaaacattntctact

SEQ ID NO: 45923 - DNA, 395 bp, Gossypium hirsutum
  unsure (1)..(395): unsure at all n locations; Clone ID: LIB3196-020-P1-M1-A8
tagcgtacgaccacgcgtacggtctgagcgaatttgcggtttgttagttcgtgtgtgaaagaggttataaaaggaaaaaaacgatgggtgttttcacatttgtgtgcaggagcaaaggcggtgagtggtctgccaagcagttggagggagagattgaaagctctgctgcttccacttacgagctccagcggaaactcgtccaggctgccaccgcctgcgactcctctggtggtgtcacctcctctttctctgtcgttacccctaattctgccgttttccaggtggttattggaggtgctgtaggcggagccttcatcggnggtggaggtgctgctgctgctccggctggaggcgctgccgctgccgctgaagctcctgcagctgaggagaaaaag

SEQ ID NO: 45924 - DNA, 406 bp, Gossypium hirsutum
  Clone ID: LIB3196-020-P1-M1-A9
attccaagatctgcagcgaggacatcgagtgcagtgggctgaccatccccaaggctgtgcagtacctgagctcccaggatgagaagtaccaggccattggggcctattacatccagcatacctgcttccaggatgaatctgccaagcaacaggtctatcagctgggaggcatctgcaagctggtggacctcctccgcagccccaaccagaacgtccagcaggccgcggcgggggccctgcgcaacctggtgttcaggagcaccaccaacaagctggagacccggaggcagaatgggatccgcgaggcagtcaccctcctgaggagaactgggaacgccgagatccagaagcagctgactggactgctctggaacctgtcttccactgacgagctgaaggaggagct

SEQ ID NO: 45925 - DNA, 354 bp, Gossypium hirsutum
  Clone ID: LIB3196-020-P1-M1-B1
gcggccacgcgttcggttgagcgagaataagattgacggggttgatttaagtggccagacacaggaaaaagtgcaattaattccatataattcgaaagtggcgtcagatcgacagaaatcttacgcatatttgaaactgaaagatattgagtttcacatcggggataaagtgtttttaaaagtgtcaccgtggaagaaaataatctgattcaatcgtaaatgcacattatagtcccagattcatcagaccatatgaaattatcgcacgagttggactagtggattatcgaatttcattaccgattgaattagaaatgatacataatgtatgccatgtgtcgatgcttccatcat

SEQ ID NO: 45926 - DNA, 334 bp, Gossypium hirsutum
  Clone ID: LIB3196-020-P1-M1-B10
ttttgttttcattttccttttgtcctttttctctttcctaggttttcggttttctcagccaaaggctttcgtttagcttcatcaatggcacaggaggaggttcagaacggaggaccggagaaagtagcggaggtgagcttcacggcgctgaaaccgcagctcatggtcgaagcacccaaggcagctgatgcggtgcagttctacaagaccgcgtttggctgctgatgaggctggccgtaccgtgtaccctaagcgcaaggctgagcaggagcagccttacgtgctctacgctcaacttgagcttgctggctctaccattctcgtttctgacatc

SEQ ID NO: 45927 - DNA, 378 bp, Gossypium hirsutum
  unsure (1)..(378): unsure at all n locations; Clone ID: LIB3196-020-P1-M1-B11
atcggccctgcaggccaagtcagtagctgtcaagaccacacgatttgcctcattccctgactacctggtcatccagatcaagaagttcaccttcggcttagactgggtgcccaagaaactggatgtgtccatcgagatgccagaggagcttgacatctcccagttgaggggcacagggctgcagcctggagaggaggagctgccagacattgccccacccctggtcactccggatgagcccaaagcacccatgctggatgaatccgtcatcatccagttggtggagatgggcttccctatggacgcctgccgcaaagctgtctactacacgggcaacagcggngccgaggccgccatgaactgggtcatgtcacacat

SEQ ID NO: 45928 - DNA, 363 bp, Gossypium hirsutum
  Clone ID: LIB3196-020-P1-M1-B12
gctccttcaagtttttgaaaaacgcaatatattaaaaaaaggataactaaaaacacctttttgaggttttgcgatggcatcgaagcggatcttgaaggaattgaaggatttgcagaaggaccctcctacatcatgcagtgctggtcctgttgctgaagacatgtttcattggcaggcaacaatcatgggtccaccagacagtccatattctgggggtgttttcctagtgactattcattttcctccagattatccctttaagcctcccaaggtggcatttaggacaaaggtattccaccccaatattaacagcaacggaagcatttgcctagacatcttgaaggagcaatggagtcctgcact

SEQ ID NO: 45929 - DNA, 408 bp, Gossypium hirsutum
  Clone ID: LIB3196-020-P1-M1-B2
atcagcgtctgcagcgctcttgtctactgcggctctcggtgcccgctccttttcgtttccggaaacatggcctccggtgtggctgtctctgatggtgtcatcaaggtgttcaacgacatgaaggtgcgtaagtcttcaacgccagaggaggtgaagaagcgcaagaaggcggtgctcttctgcctgagtgaggacaagaagaacatcatcctggaggagggcaaggagatcttggtgggcgatgtgggccagactgtcgacgacccctatgccacctttgtcaagatgctgccagacaaggactgccgctacgccctctatgacgcaacctatgagaccaaagagagcaagaaggaggacctggtgtttatcttctgggcccctgagtgtgcgccccttaagagcaaa

SEQ ID NO: 45930 - DNA, 386 bp, Gossypium hirsutum
  Clone ID: LIB3196-020-P1-M1-B3
atgtgcagagcagcagccgccggcgtcctcggatgttgtgttacccgccatcatgagctacacaggctttgtccagggatctgaaaccactttgcagtcgacatactcggataccagtgctcagcccacctgtgattatggatatggaacttggaactctgggacaaatagaggctacgagggctatggctatggctatggctatggccaggataacaccaccaactatgggtatggtatggccacttcacactcttgggaaatgcctagctctgacacaaatgcaaacactagtgcctcgggtagcgccagtgccgattccgttttatccagaattaaccagcgcttagatatggtgccgcatttggagacagacatgatgcaag

SEQ ID NO: 45931 - DNA, 352 bp, Gossypium hirsutum
  Clone ID: LIB3196-020-P1-M1-B4
cccacgcgtccggagatgacatcctcattaaagattcactcaaatcactcaaagtgtttaaggttcaagattaagcactcgattgtctaacatgaaaagttattaccataggcttgcatgaaaatcaaatctccaccacttgtaaatgatatgatacactaatcaaaaggtctttgcatggttgttatggggtttaggttacaggtatggatacaagctgaagagacaagggttagaattgagataatttcaatatcttaccccactatcagaaacttaattactgaaccacaaacaaatatctagaactattttacatgagttcatgacaactttagcttgttgagaatta

SEQ ID NO: 45932 - DNA, 269 bp, Gossypium hirsutum
  Clone ID: LIB3196-020-P1-M1-B5
accgaccgcctgtgattgtctgcttgcgatcagaacaccctagctctgtgaatgcgagatataagtactggcttgtgctgttagtcaatcgctttcgcttggccttcacgattcgtgctttgggggcagcgctttctgggaactttcaccgtgattgctacgaaataatttcccttcagaaataacaccttcaactgaaaaaagaacaacgtacggctaggataagtacgaagaacgccgggcaccctaatactatactcattcatgtt

SEQ ID NO: 45933 - DNA, 329 bp, Gossypium hirsutum
  Clone ID: LIB3196-020-P1-M1-B6
atgggtgggtcaagggaggctttgctgtgagggatatgccatatgcatatttgggggaagagcattcttggcattgataacagcaggtgccaaggccctgaggtgggattgtgtttagagcattcaaggaagaaggccggggaggctggattaaataatctccaaatgtctcttaaaggaggtggtggtaactctactttaaatgtcagataagtggttgaaagttttcactctggctaggtgggaatcttgaaccatctctttacaatccagactttctgattaaggcatctaaggagatatatcagacagaggtgtctggcatttat

SEQ ID NO: 45934 - DNA, 382 bp, Gossypium hirsutum
  Clone ID: LIB3196-020-P1-M1-B7
cccttccacgctttaatttgtttctgcatctctcgttttatttctcgtatattaatgacgggtcggggtaagactctcggatccggagcctcgaagaaggcaacatcaaggagtagcaaggctgggcttcagtttccggtgggtcgtattgctcggttccttaaagctgggaaatatgctgagcgggtcggagctggagctccggtttacctcgccgccgttcttgaatatcttgccgctgaggttcttgaactagcagggaatgcagccagggacaacaagaaaacccgaatcgtgccacgtcacatccaacttgccgtaaggaacgacgaagagctgagcaagctgctcggcgatgtgacgatcgccaatggtggtgtga

SEQ ID NO: 45935 - DNA, 385 bp, Gossypium hirsutum
  Clone ID: LIB3196-020-P1-M1-B8
cccacgcgtccggaacaaataagaaaaaatggcaaaagcttcacagagggccctggtttcaatggcaatctgcttattgccttccctcgttggcttcgcctatgccagcagtctcggcaacaagttcgtcgtactcggcaaagtttattgcgacacttgccgcgtagagttcgaaaccaaactcagcgaacccataccaggtgccaaggtgaagttggagtgcaggaaagaaggggacgaaactgttacgtacagccacgaaggcggaacagacgcaaacggtgtgtacaagatcccggtggaaggcgaccactaggaacagatttgcgcagtgagcacagtgagcagtccaagggcagattgtaacgagaagatggaagcattt

SEQ ID NO: 45936 - DNA, 337 bp, Gossypium hirsutum
  Clone ID: LIB3196-020-P1-M1-B9
ggggaaaggtagcgagggatacgccttcaacttattgagccaaacccctcgctactccaaccaaaacggccgcttttacgaggcttgccctcgtaatttccagcagcaactccgagaagtggattcctccgttgttgccttcgaaataaacaaaggatcgatcttcgtaccgcactacaattcaaaggctacattcgtggtcctcgtcaccgaaggaaacggccacgtcgaaatggtctgccctcacctttctaggcagagctcacactggtcctcccgagaggaagaagaacaagaagaacaagaagttgaaaggagaagtggacaatacaagaga

SEQ ID NO: 45937 - DNA, 410 bp, Gossypium hirsutum
  Clone ID: LIB3196-020-P1-M1-C1
atgaatttccccttagttctttgcaagaaggtagagataaagacactttttcaaaaatggcaatggtatcagaattcctcaagcaggcctggtttattgaaaatgaagagcaggaatatgttcaaactgtgaaatcatccaaaggtggtcctggatcagcagtgagcccctatcctaccttcaatccatcctcggatgtcgctgccttgcacaaggccataatggttaaaggtgtggatgaagcaaccatcattgacattctaactaagcgaaacaatgcacagcgtcaacagatcaaagcagcatatctccaggaaacaggaaagcccctggatgaaacactgaagaaagcccttatgggtcaccttgaggaggttgttttagctctgctaaaaactccagcgcaattt

SEQ ID NO: 45938 - DNA, 343 bp, Gossypium hirsutum
  Clone ID: LIB3196-020-P1-M1-C10
atcgtccctcagccatgctgcacttgggccacacagagctatgtactgcttcccaggcgtgcctccaggtccttgttcatgcatgttcctgctctccctcctctgcctcacttccttgtatatcaaaatcctactcaacctgtaagtcccaactcaaatacattttcccagctcaattagtccctgttagagttaatgacagagcacagtctgggttgtgtatgtcaccaactgtgtacattgaggtctctgatagattgagaatgtgaggaggggagagagaccactttgtattcacctttatccttgcgtacctcacatgacacctggcacgtagctcatg

SEQ ID NO: 45939 - DNA, 377 bp, Gossypium hirsutum
  Clone ID: LIB3196-020-P1-M1-C11
taaattgagtatacaaatggcgaaaattttttaacgaaatttttataccataattctaacatgacatagaccataaaataatattaaaataaattttacgatatcaaatttgtggtctcaaaaccactgttccaatttaactgaaaacgggctattacactctatggttaggattggaagaaatttaggaatggtgttgagtctctttgaaaatttgcctaatgctactactagtcttgcacagatggataaatggtcgatttctagatgtttagagaactacaatgattctggtgcttagattcttataattgtctttggcaaccaaagagaaactctaggttaaccttgaactaagcaatcaaagaaaatgttgt

SEQ ID NO: 45940 - DNA, 383 bp, Gossypium hirsutum
  unsure (1)..(383): unsure at all n locations; Clone ID: LIB3196-020-P1-M1-C12
cccacgcgtccgtaaaaagtaaataaatttggaagaattaaacaaagacttgatgatcaaattagttaaataccttgaatttgttatgtgatgagactggttcgtcgtccttgatatatatatatatggggaagaaaatagatgtcagaagctaactgcgaacaggtccaagagagttggataaaatagtaccgatgaataattgtcacctagtgtcggatttactttcgccgtggtccacggacacacaaatatatataatagttttaatgtcaataatcgagttggagaacaagggcagggatgtgaacgggaggaagcatggttaaggagtgagaataccacntgtttggagtggagtggaggtgatgataaggttataa

SEQ ID NO: 45941 - DNA, 346 bp, Gossypium hirsutum
  Clone ID: LIB3196-020-P1-M1-C2
atctctcacctccagcctctcacgctctcctcagctctctcatctcctggaaccatggccagcacatccaccaccatcaggagccacagcagcagccgcaggggcttcagtgccggctcagccaggctccctggggtcagccgctctggcttcagcagcgtctccgtgtcccgctccaggggcagtggtggcctgggtggcgcatgtggaggagctggctttggcagccgcagcctgtatggcctggggggctccaagaggatctccattggagggggcagctgtgccatcggtggcggctatggcagcagagccggaggcagctatggctttggtggcgccggga

SEQ ID NO: 45942 - DNA, 386 bp, Gossypium hirsutum
  Clone ID: LIB3196-020-P1-M1-C3
attctataatttgaattttcaaaataggattttagaaatagagatagggataggattctttttagaaatattagaaataaggaataaagaaatcatggataaatccaagcgactctttcttaaatccaagcgatcttttcgtaggcgtttgcccccgatccaatcgggggatcgaattgattatagaaacatgagtttaattagtcgatttattagtgaacaaggaaaaatattatctaggcgagtaaatagattgaccttaaaacaacaacgattaattactattgctataaaacaagctcgtattttatcttcgttaccctttcttaataatgagaaacagtttgaaagaagcgagtcgaccactagaactactgctcttagaa

SEQ ID NO: 45943 - DNA, 371 bp, Gossypium hirsutum
  Clone ID: LIB3196-020-P1-M1-C4
atcccgtctttgggttctcagatttaagcagtttacgaagctccaagatcgaattttctgaaagttaagattcgtaagatttgggtttttctcgcggtttttaagaagatggatatcatttcccaattacaagaacaagtaaattcaatagcatccctaactttcaacacatttgggacactgcaacgagatgctccacccgttaggctctcccctaattacccagaaccccctcccaaccccaccgaggactctgccaattttgccgaccaacctaagctcatgagtgctgctcttgttaaggctgctaaacagttcgatgcattggttgctgcacttccaccttcagagggcggtgaagaagctcaact

SEQ ID NO: 45944 - DNA, 386 bp, Gossypium hirsutum
  Clone ID: LIB3196-020-P1-M1-C5
aagagcttccttttttttttgtctcctgttccaccgccgtcgatctcgatccttatcctcgttttcaaacaagctcgaaaaagatggccaacgctgcatcgggaatggctgtgcatgatgattgcaagttgaagttcttggagctcaaggcaaaaagaacccaccgcttcattgttttcaaaattgaggagaagcaaaagcaagttattgtggagaagcttggtgaaccaaccgaaagctatgaggattttactaaatgtctccccgctgatgaatgtcgatatgctgcgtacgattttgattttctaacggccgagaacgtaccgaagagcagaatctttttcatagcatggtctcccgacacgtcaaggatcaggagcaagatg

SEQ ID NO: 45945 - DNA, 388 bp, Gossypium hirsutum
  Clone ID: LIB3196-020-P1-M1-C6
cggacgcgtgggttggttgggatggttgaaatgaaaaatgaaaaggcctatttatagttgaagttcagggactaacttgcaaatggcctaaaaaattagggaccaaaattgcaattatcccattcaacttttctacatttggtgcaacttgctcaacctttttaacaagttgcttcctacctttgttgacctttcaacacaaaatccatattagcaactatgagaatattctaaaatgataacattgtccaaacttccactgtaacaggacactcccaaagtaagtggtcaattgtttcagctcgttctccacaccaagggcagcttgagttattagctaacttcctatactgcatatttaccttcataggcagatagttccatgaaa

SEQ ID NO: 45946 - DNA, 380 bp, Gossypium hirsutum
  Clone ID: LIB3196-020-P1-M1-C7
cggacgcgtgggtttcattttaactggtctttcaactctttctataaacctgaagaaaggaaggaagctagccgaatcctgacagcctaaacccaatggctaaaacctgtatctcaaactgcatcaatgacaccagggtccctctcccagtcaggccaacctacgtgaacctctataagtggccggaatctgatgctgagtttgtaaggtcactgagctctgactggcgcagtaatggaggtcgtgcacaccccacggttgttgatagcatttcatgcaggcaaatatacctgaggagctacacgtttcataggaacaaccaaaccgagactgaaaacacaaaatgttttggcagatcatcagttaataagaaggaaaag

SEQ ID NO: 45947 - DNA, 372 bp, Gossypium hirsutum
  Clone ID: LIB3196-020-P1-M1-C8
gtggttttgctgctcagattgcggtaggatccattctacactacagaagttgctcattcatggagctgaaaggctccctgactcccttttggatgtattaaagaagaaatatgtggaaaaaggtttagatgctgatatcaatattgatgtgagatggaggcttcttagcggcaaattcgcttctcctgaaactagattgttgctttctcaagcagttggtatcttccatgaatgtttcaaccccatagttgatgcagcaactgggagggaccttatcccgtgcatggtttatggaaggaacttaaaaggccaagaatatggaggaatgtattgtgctgtattgacaattaactcattcgttgtatcagctgg

SEQ ID NO: 45948 - DNA, 381 bp, Gossypium hirsutum
  Clone ID: LIB3196-020-P1-M1-C9
aacaaatttccccacccaaacaaggcattatcatcttcagtctttttcttatattgggggcattcgagaataatcagaaactgcaaagggaagccacaatgttgtcattttcttactcattacctctcttcctctgttttatctcaagctttaacggaatctttgctgccacagagttcgatttcggtacgttaaacctcagcagcttgaagctccttggtgacgctcacttaaacaatgggagcgtcagactcactcgcgacctccaagtacccgcttccgtcgccggcagagccttgtactcgaaacccgtcagattccgggaaccccagactcattctccttgtagcttctccaccttcttctccttctacattacca

SEQ ID NO: 45949 - DNA, 378 bp, Gossypium hirsutum
  Clone ID: LIB3196-020-P1-M1-D1
atcacggctgcagccttggctacgggtgcctgcatcgtaggaatcctctgcctccccctcatcctgctcctggtctacaagcaaaggcaggcggcctccaaccgtcgtgcccaggagctggtgcggatggacagcaacactcaagggattgaaaaccctggctttgaggcctcgtcacctgcccaggggatactggaggccaaagtcaggcaccccctgtcctatgtggcccagcggcagccttctgagtctgggcggcatctgctttcggagcccggcacccccctgtctcctccaggccccggagacgtcttcttcccatccctggaccctgttcctgactcttcaaactttgaggtcatctagaccagctggggg

SEQ ID NO: 45950 - DNA, 371 bp, Gossypium hirsutum
  Clone ID: LIB3196-020-P1-M1-D10
ggagaaactcacagccggtgagaacaccaatttattcctttctagacttgaatttttttgtatataatttaaactcagagagtaactctcaataacagcaaacatcttggtaacagatcaaccattctgaaacttgcatttctttttcatccaagaataggggaggaataaaacatgtgaaaaatatcaaattatgacattctaaactataatttagttagaacaaaatccccctctaaggttcttgtactgagcgtacttggcccataataagatgatttcagaatcgcatttgtattcgaaatacaaattccataatcaagaggcgcacgttggaagaagaaaaagatcaaatgtgcagctatacacaa

SEQ ID NO: 45951 - DNA, 358 bp, Gossypium hirsutum
  Clone ID: LIB3196-020-P1-M1-D11
gccatgttctcgaggttactgttgttggatgcaatagattgaaagataccgaatggctttcaaggcaagatccttacgtttgtcttgaatatggcagcactaaataccgtactagaacttgcactgatggtggcaaagcacctgtattccaagagaggttcacattcacattgattgaagggcttagagagatcaatgttgtggtttggaacagcaatacattgacttatgacgattttatcggcagtggaaagattcaattgcagaaggttctttctcagggttttgatgatactgcttggtcacttcagactaaaaccggaagatatgccggagaagtacggctgataatgcatta

SEQ ID NO: 45952 - DNA, 167 bp, Gossypium hirsutum
  Clone ID: LIB3196-020-P1-M1-D12
aagacattgcccaaaatctaacaaaactggttacagagcaagattgcccgcatttactcttctatggaccatctgggtctggcaagaaaaccctaatcatggcccttcttagacaaatatttggtcccagtgctgaaaaggtgaaagtggagaataggaaatggaaa

SEQ ID NO: 45953 - DNA, 397 bp, Gossypium hirsutum
  Clone ID: LIB3196-020-P1-M1-D2
atccgcccctcacgccctctcttcctctcagccttctgcccggtgaggaagcccggggtggccgctccgccgtcggggccgcgccgccgagccccggccgccccgggccgtccccgcacgccgcccccatgcattccttctacacccgggccgacaccatgataggcgagatcgccgccgccgtgtccttcatcttcaagttcctccgtaccaaggggctcacgagcgagcgacagctgcagaccttcagccagagcctgcaggagctgctggcagaacattataaacatcactggttcccagaaaagccatgcaagggatcgggttaccggtgtattcgcatcaaccataaaatggatcctctgattggacaggcagcacagcggattggactgag

SEQ ID NO: 45954 - DNA, 238 bp, Gossypium hirsutum
  Clone ID: LIB3196-020-P1-M1-D3
atcggcgggggaggagaggggaaagacacgtttgcttggtttagtgaaacacacgtgactttatagctctgtggtcagcctacctgtctgttctgagggagagtgcgtgggagggaacccatgctcaccgtggcaaacaccggaaccccatgactagcccctcacctggcatggagctgcctggtttgggctggagcagagctggtttcccagaatgttcctttggctcacatgtggt

SEQ ID NO: 45955 - DNA, 388 bp, Gossypium hirsutum
  Clone ID: LIB3196-020-P1-M1-D5
atttcatactcatttagcccctttcattagcatcgaaatcactccagttttctttatcactgaaaaatgtcttgctgtggtggaaactgtggctgcggttctggctgcaagtgtggcagtggctgtggaggatgcaagatgtacccagacctgaacgttgccgagatgaccacaactgagactctggttcttggtgtagcaccccagaaagcacactttgagggagctgagatggaattcggggctgagaacggctgcaagtgtggagacaactgcacctgcaacccttgcaattgtaaatgattagagaccaaagccaaagctccctggaagcagagacgcctttgtctttaagaaataatatgttttgttggttatgtgtttttag

SEQ ID NO: 45956 - DNA, 389 bp, Gossypium hirsutum
  Clone ID: LIB3196-020-P1-M1-D6
agtaaataagccaaaaagagtgccaagtgtatggcaaaaataaaatacaagtgtaataaatataatacacatatttgtaatacatgtatgtatttgcttattatttaagtaaatattaatgtatttattattattaaattgatattatacgataaataaataaaagtaaggcaaatgtgtggtaatggttgggtacaagtgtattaataaaaatacatacacttgtaatgcttgtatttaagtattaaaagatatttattatttataaaaggtatttattaattaaataattatattataagatttttatgtgaaaaataaataaaaagttgacaaatgtatggtatgtatagtgacatgtgtaatattagtatatgtaaatttgtaaa

SEQ ID NO: 45957 - DNA, 381 bp, Gossypium hirsutum
  Clone ID: LIB3196-020-P1-M1-D7
accgaccgccggcgattgttcgccggagaacggaagaatctcgcagggggaaagagagatgaaggcactggtgagtgatgatgttcgcgtgaattcccaaggcaatcacgttacgtcctcgtgccgtcgcgtatttcgggaactttaaccgtatctgaaaagaaataaaaaccctcaagcaaaagcgacttaacttagcagagttttgaagttattctatgctttgtccggcaaaactgaggcagaattagtatataataatcaaagcttatgagtcccgagtcttggtaaaccgcattgaattttggccctccccagaaaaatattatgaatttctgtgttgatggcctttggcaggcctcatcgctaagccataatatg

SEQ ID NO: 45958 - DNA, 364 bp, Gossypium hirsutum
  Clone ID: LIB3196-020-P1-M1-D8
atgccgccggcaggacgtccggcatggaaaccccatcaggcagtgccgtgggttcaactccaatgccaacaagaatgccgtggagtctgtgcagtatggcgtggccggcagtgcagccttcctggagtgccagccccgctcgccccaagccactgttaagtggctgttccagcgagatcctggtgaccggcgccgagagattcgtgcagaggaccgcttcctgcgcacagagcagggcttgttgctccgtgccctgcagctcagcgatcgtggcctctactcctgcacagccactgagaacaactttaagcacgtcgtcacacgagtgcagctgcatgtactgggccgggaagccgtccatgct

SEQ ID NO: 45959 - DNA, 395 bp, Gossypium hirsutum
  Clone ID: LIB3196-020-P1-M1-D9
atcgagaatgagtttgtgatgctgaagaaggatgtagatgctgcctacatgaacaaggtggagctagaggccagggtcgatgcactgatggatgagattaacttcatgaagatgttctttgatgcggagctgtcccagatgcagacgcacgtctctgacaccttcgtggtcctctacatggacaacaaccgcaacctggacctggacagcatcatcgccgaggtcaaggcccagtatgaggagatcgccaaccgcagcctgaccgaagctgagtcttggtaccagaccaagtatgaggagctgcagcagacagctggccggcatggcgatgaccttcgcaacaccaagcatgagatctctgagatgaactcgatgatccagaggctgagagctga

SEQ ID NO: 45960 - DNA, 343 bp, Gossypium hirsutum
  Clone ID: LIB3196-020-P1-M1-E10
atgccgggttctgaggcgttggttctctttacttttccacttcaggccacgatgccgcagtaccagacctgggaggagttcagccgcgctgccgaaaaactttacctcgctgatcctatgaaggcacgtgtggttctcaaatataggcattctgatgggaacttgtgtgttaaagtaacagatgatttagtttgtttggtgtataaaacagagcaagctcaagatgtaaagaagattgagaaattccacagtcaactaatgcgacttatggtagccaaggaatcccgcaatgttaccatgggaactgagtgactggtttgaaatgaagactttgtcatgtact

SEQ ID NO: 45961 - DNA, 400 bp, Gossypium hirsutum
  Clone ID: LIB3196-020-P1-M1-E11
atgcggccacatggcgggttcgggagctggtgaccctctggatgctaagcgtggagaggccactttcgctcagcgtatcgaccagacgcgggagaagctgacatcctagcaactgtattgcatgcggcgggcgcaattagcccagtggcagaaggtcctaccgcatcggtggacccggaacatcgtgaccggtctaggcatcgtggccctggtgttagctatttatggatacactatctactcgatctcccaggagcgtttcctagatgagctagaagacgaggccaaagctgcccgagctcgagctctggcgagggcatcaagatcctaatctggatgggtattgatcatgtccaacctgctggagcccattcacatggtggatgatgccccatgaccc

SEQ ID NO: 45962 - DNA, 359 bp, Gossypium hirsutum
  Clone ID: LIB3196-020-P1-M1-E12
gcgaagaagtgcaaggttcaagatagtgactatgagcgtgatcgtgaccatgatagagaccgtgatcgtgatctagaccgagagcgttatatggagagggagcggcatcgagagcgtgagcagtaatctgtgagcctgatcgtgaccattatagagaacgtgacacgcatcgcgatcacgaccatgatcgtgattatgatactcaatgggatcgagaccgatatcatgatcgcgaccgttgttacagtgatcgggacatggatagagatcatgaccgtgacgactttcatgattaacggaggagttcaagaatcaaatacagtaggggatggaaacgatctcctgatgatagcgatgat

SEQ ID NO: 45963 - DNA, 369 bp, Gossypium hirsutum
  unsure (1)..(369): unsure at all n locations; Clone ID: LIB3196-020-P1-M1-E2
cccacgcgtncgctactattacacttccggaaaaaaatcatggccaccgtcacgacgcaagcctctgccgctgttttccggccatgtgcatcgaaaacacggttccttactggttcttccggtaagttaaaccgagacgtttcatttaaaccagtggcttctacatcgactagctcattcaaagttgaagcaaagaaaggggagtggttacctggtcttccttcaccagcttacctcaatggcagtcttccaggtgataatggctttgatcctcttggattggctgaggaccctgagaacttaagatggtatgtacaagctgagcttgtgaatggacgttgggctatgttgggtgttgcanggatgctt

SEQ ID NO: 45964 - DNA, 330 bp, Gossypium hirsutum
  Clone ID: LIB3196-020-P1-M1-E3
cggacgcgtgcggtcgatttacattgtggtaaccaaaaaattctcagctggatccgtctccccctccgaacagttgtcaccggagtccgtaattcagataagtgtatatgaatggagaagtccccaacataaagaaatgggttgtttactatcctggctatatcaattccgagctaacactaagttggggaaggcgaatgagactggctaaagcatgtgaaaataccacttgcgttgaaattgctgattgctgcaaccatctcatagtccctaatgccattgagattggtcaggcgtaccctcgtgatttcatgccaagagggagagtga

SEQ ID NO: 45965 - DNA, 267 bp, Gossypium hirsutum
  Clone ID: LIB3196-020-P1-M1-E4
cccacgcgtccgctcgaagtcgagagttccgacacgatcgacaacgttaaggcgaatattcaagacaaggaagggatcccaccagaccaacaacgtctcatcttctccggaaaacagctcgaatatggccggaccttggccgattacaacatccagagggagtacaccctgcatctcgaacttcgtctacgtggtggcatgcacatctttgtcaaaacagtgaccggcaaaaccataactttggaagttgacagctctgataccatt

SEQ ID NO: 45966 - DNA, 385 bp, Gossypium hirsutum
  Clone ID: LIB3196-020-P1-M1-E5
aaacaaggaaaagaaaatcattcagctcagattcatggctacgcttatgacaaatctgctgctcacggcatgcattgctcttttcttggtatcagctgccaccgccgtcggcgactcccccttcatcatcgctcacaagaaggcatcgctcaccagactcaaatccggcgccgagtgcgtctccgtctctatcgacatctacaatcaaggcttctcgacggcatatgatttgagtcttgtggattatagctggccccaagatgcatttgatgttatcagtggaaatatttctcagtcatgggagaaacttgacgctggtggtattctatcacattcatttgaattagaggccaaaaaacaaggcatgttctatggtgccccagca

SEQ ID NO: 45967 - DNA, 388 bp, Gossypium hirsutum
  Clone ID: LIB3196-020-P1-M1-E6
cttatagtaatcatggtgaggaacaagtcagttttcgtagttttgctcttttctcttttcctttcctttggcttgctttgctctgccaaagacttccccggcagaagaagcgaggatgatcctcaacagaggtacgaggactgccggaagcgatgccaattggagacacgtggacaaacggagcaagacaagtgtgaagacaggtgtgaaacgcagttgaaggaggagcagcagcgtgacggagaagatcctcagaggagataccaggattgccgacaacactgccaacaggaagaaagaaggctgcgtccacattgcgaacaaagctgcagggaacaatacgagaaacagcagcagcagcagcctgacaagcaattcaaggagtgtc

SEQ ID NO: 45968 - DNA, 381 bp, Gossypium hirsutum
  unsure (1)..(381): unsure at all n locations; Clone ID: LIB3196-020-P1-M1-E7
aaatgataataatgatcaactttgacataattttatttattttggtagatattgatggatggcaaggtgggtcaagtacaagtccatggagaaaaggggagttgagttttggaaagctaatcaaaatcaacaaaaatgcagctaatgatatcaacctctctcttatagatttgtaccaaaacctgcttccttttttttctcttcaactgttaatcaagcaaccatcttttttcatagataactttctcttgtttccttttttattttattttattttattttattattatagtaaggttatcaatttcaattatttgaaatttaaaattgaattaatataaaatttgaagctacataaacaacanatcaaatcacatgctt

SEQ ID NO: 45969 - DNA, 380 bp, Gossypium hirsutum
  unsure (1)..(380): unsure at all n locations; Clone ID: LIB3196-020-P1-M1-E8
caactgtgcactactctactctactcaactcaactcaactcagcgccatctttgctctattttctcaccacacgaaaaatggcagctaatattataacccaatcatctctgcttcagccaaaacctgcactttctgctaaaacccttcaaatcccatctctgcatcgcttatccggcctacctcctccatcaagggttggcttttttctggaaaagaaaacggggattgttggaaaagctccattaaaatcggctgtatcggactcaacctcgtcagttttggagaacatgaaaaacagcaagaatcccattgtcgtcattgacaattacgacagtttcacttacaatctttgccagtatattggagagctnggatgtta

SEQ ID NO: 45970 - DNA, 375 bp, Gossypium hirsutum
  Clone ID: LIB3196-020-P1-M1-E9
gcggtttttcttctttcttctttttcttcatagaaaggaccccattgattgaggggaaacagcattgagggcctttgttttgattagcacgagagagagagagagagagaaagaaaatgaatgttttggcctctgagtgtagtaatgggtgtgaatctggttggactagatacttagaacaggcttttctttctggtgatatttctcataaatcaagtggtttttgtgatgaacgtggcaagtataaaggtaaagaagaggttgttgatgaagaagaagaccttgccatggattctgatgcatcttatgggccttcacacttgaacgtagataatggttattttaatgatgataatcattttcaatatactgtac

SEQ ID NO: 45971 - DNA, 365 bp, Gossypium hirsutum
  Clone ID: LIB3196-020-P1-M1-F1
ggcggagcagacagaggaggaggcggcggcggagaaagaggaggaaacgatgtggagctggtttgcaaaacacttcaggtagaacacaagctgttctacttcgatctcaaggagaacccacgcgggcgttatcttaaaatctcggaaaagacatcggctaccaggtcaaccatcatcgtcccttcttccggcatctcctggttcctcgatcttttcaattactacgtcaactccgacgaccacgacctcttcagcaaggaattgcagcttgacactaaagtcttttactttgacattggcgagaaccggaggggtcgtttcttgaaggtgtctgaagcatctgtgagcagaaaccgcagtaccat

SEQ ID NO: 45972 - DNA, 373 bp, Gossypium hirsutum
  Clone ID: LIB3196-020-P1-M1-F10
gcacgaaattgcacatactgtagttttatcactttagattaccaaaaatattaacccacttatcttacgagcattcgcacactcgtaagttcccaaaataccgacttttcgacatttcggcttttcggcttttgccgatctagtctataagagggtgtcagttacacacctatttgcgatgattcgttgacgagatccacgcactaactacctgcaattatattactaccacgttaatctaactaccgaaacgaactacatattaaccccttaccctattcggccaataacagcttaggcactagcaatcctacctttgcctgaattagcgactagattaatatctggttgttccccttgcccaagcccttga

SEQ ID NO: 45973 - DNA, 334 bp, Gossypium hirsutum
  Clone ID: LIB3196-020-P1-M1-F11
atgcggccgtagcgagcagccctctacatcctcggggacaaagcctatattaagggtgtgcggccagacccactgcagcatggggagctggtgcccattgaggtatttgaggcacggcaggtgaaggccagcttaaagaatctgctgaaggcgtgtgtccaaggctgccctgctgctgagcccaacccagcctccttcctgcgctcgctggaggactcgtaatggctgatccagatccacaagctgctgcaggtgtctgtgctggtggaggagctcctggattcacgctcctctgtgctggtgggcctggaggacgactggaacatcaccaccc

SEQ ID NO: 45974 - DNA, 167 bp, Gossypium hirsutum
  Clone ID: LIB3196-020-P1-M1-F12
gcggtgaattacaagattcaggacaggggctttatagacgattctaacactgttccaccgcaacttcgatatctgatgccaaatcactcatttacctgtttggatccatccataagaaaatagactctgcaagcgttgtttatataactcagtcatgcttgaatgcc

SEQ ID NO: 45975 - DNA, 351 bp, Gossypium hirsutum
  Clone ID: LIB3196-020-P1-M1-F2
gttctttgggccttttgtgtttatttggaagcagtttcagtgatgccacagcttcgtatgatgcagaatgcaaagatgattgaaccatttacagcccattatgtgtttgcacttggtatggccagattcctagcctgcgctcattggattatccaggtgtatgagacaggagggaggtatctgttcttggtgggatatggttacctttggtttcccatggctatacttgcagaaattgttcaaacattcatcttggttgacttctgttactattatattaagagtttcatgcagggccaactgataattagaatgccagtttagatgtattgaaattatgttagacaaaga

SEQ ID NO: 45976 - DNA, 379 bp, Gossypium hirsutum
  Clone ID: LIB3196-020-P1-M1-F3
gaccttcaaatcagtacagtattttgtgacagtcagagtgccatcttctttacaaagatcaaatgcttcatgagagaacaaaaacacattgatgttcggtatcatttggttcgtgatattattgctcgtggtgatattgttctaagcaaaattagtactaatgaaaatcctacaaatatgatgactaagtcacatttcataaccaagtttgagcattgcttagacttggttggtgttcattgttgaagttaacccttaaggggttttctggaagaggtggagaacttgttcgttgagagttcgagataaagaacttgttcattgagagttcacgatgaagaacttgttcattgagaattcgcgatgaagaaattgttca

SEQ ID NO: 45977 - DNA, 360 bp, Gossypium hirsutum
  Clone ID: LIB3196-020-P1-M1-F4
gtatagaaaaatggctactccatcaacactttgctgtgctatacttctcttcctatttccattacaattcatggcaacaacaaccccttcttgccccggtgattgcgagcctaatgatgccgatgacaatgatcgatttcattttgctcaaaacttagagttccttgaagctgagttcttcttgtatggtgcacttggcaaaggcctcgacgcctttgaacccgaatttgctaaaggcggaccacctccgattggtggcagacgggccaatctcgactaccttacccgtcggatcatcgaggaattcggttatcaagaaatcggtcataatagggaaattgtgagaagaaccggtgggat

SEQ ID NO: 45978 - DNA, 388 bp, Gossypium hirsutum
  Clone ID: LIB3196-020-P1-M1-F5
cttttatatctaagatggcttacattaataccctactcatcatgttctttgttttctgttttccttcaatggttctttccgaatcgttccgatcgattcaattgccaccgaatgtcacgggtcccgaatccattgccttgagctggcaactggacgattttacgtcggtgtaactgatggtagaattttgcaatataacggaccaactgttggatttatggagtttggttccaccggtcgaaataggactaagacgatgtgcgatggcattactgatccggatttgggtccgatgtgtggaagaccattaggtttagggttccattacgctacgaatcagttgtatgtttgtgatgcataccttggtctcatggtgttagggtccggc

SEQ ID NO: 45979 - DNA, 387 bp, Gossypium hirsutum
  Clone ID: LIB3196-020-P1-M1-F6
ggtctgtcaaagccggtctccagttcccagttggtaggatcggccgttacttgaagaaaggaaggtattcacagcgggtcgggaccggagccccggtttacttggctgcagttcttgagtacttggccgctgaggttctggaattggctgggaacgctgcacgtgacaacaagaaaaacaggatcatcccaaggcacgtgctacttgccgtgaggaacgacgaagaattagggaagcttctcgccggcgtaaccatcgctcacggtggtgtgttgccgaacattaacccagttcttttgccgaagaagactgaaaggccgccggcaaagaacccaaatctccatcaaaggccaccaagtctcctaagaaagcttaaattgatttaac

SEQ ID NO: 45980 - DNA, 382 bp, Gossypium hirsutum
  Clone ID: LIB3196-020-P1-M1-F7
atctttaaagcgctatagatttggaaaggatactgttggagagcgatataagcataaggaaaagcaccgttgtcacatgtcctgccctcatctctctccttcaaaaagcttaataaacagagaggaacagtgggtccaccgagagccttcagaatctagtccattggctttgggattgcagacacctttacagattgactgttcagaaagttctccaagtttatcccttggaggattcactcctaactctgagccagccagcagtgatgaacatacaaaccttttcacaagtgcaataggcagctgcagagtttcaaaccctaactccagtggccggaagaaattaactgacagccctggactcttttctgcacaggacact

SEQ ID NO: 45981 - DNA, 382 bp, Gossypium hirsutum
  Clone ID: LIB3196-020-P1-M1-F8
caagacccttcgacagtgtgaacgtgatataactccggtaagtctctcgttctctctatacctcgtatttctgtcgaaatagaaacagaataacagaataaaaaacaaaaaaaatcacctttggagtattcttggctgatctttattgattttagtttgcttgtggtactaaaaaacgtaactcgtttttcttgaaaagaaagtgaaaaacccccctttagtacaatctcttctctccgaaatacaatcgattcctctctaaaatcccccctttcaaaatttttctcttttcggtttttataaccgattacaatcaccataaaaactcccattcctctgttggtgctgcttgttttgttggttgtgtttgcagggtatgagt

SEQ ID NO: 45982 - DNA, 367 bp, Gossypium hirsutum
  Clone ID: LIB3196-020-P1-M1-F9
gagcctggcatctttgctgatcctgaaggaaagggtcttcgggcacttaccaaagcccagttggatgagattctaggtccagctgaatgcaccattgtttcttcattatctaacaagcaagtggactcctatgtcctttctgagtctagcctctttgtctatccatacaagattataatcaaaacctgtgggacaactaagttgcttcttgctatcccacccatcttgaaattggctggcagtctatcccttgctgtaaaatctgttaggtatactcgtgggagttttatattccctggtgctcagccatttcctcaccgaaacttctctgaagaggttgctgttcttgataactatttcgggaagc

SEQ ID NO: 45983 - DNA, 368 bp, Gossypium hirsutum
  Clone ID: LIB3196-020-P1-M1-G1
atagtttgcctccttcatcgacaaggtgcggttcttagagcaacagaataaggtcctggagaccaaatggaagctgctccagcagcagacgaccagcacctccagcaaaaaccttgagcccctctttgagacctacctcagtgtcctgaggaagcaactagataccttggtcaatgacaaagggcgcctgcagtctgagctgaagaccatgcaggacagcgtggaggacttcaagaccaaatatgaagaggagatcaacaaacgcacagcagctgagaatgactttgtggtcctcaagaaggacgtggatgctgcctatatgaacaaggtggagctggaggccaaagtggacagtcttaatgatgaga

SEQ ID NO: 45984 - DNA, 385 bp, Gossypium hirsutum
  Clone ID: LIB3196-020-P1-M1-G10
tagagctttattttagccaaagacaaatgcaagatttaaaaaaaaaaaatcaagtaattcttcgtgtggtctccgtatgaaaaagaatttctataaatacctattaagcgttagatgttaaaatgcacccatccaacggccaccaatacacacatgaatcgctctatgaaaaacagcgaaagcagacggtaatttgcgtcctcttatttcttccggtccgcggcagcatcttcatctccccttacccttaaaagaacaggttagctatttattttgaacctaaaaaacaaacaagaaaaaggaaaaaaaaagcctatatatgttttaattggttcagttttctgggattttggtgtttctattttcatcctttatttttgaaggg

SEQ ID NO: 45985 - DNA, 395 bp, Gossypium hirsutum
  Clone ID: LIB3196-020-P1-M1-G11
ataactccctaaaaaaacacatttcaaataggcttcgcactgaactctataatttatataacttagtgtaaaccaggaattggcacactttttaaaaaatgggccagaaggtaaatatttatgcttcatgggccatacagtctgtcacaactatagcatgaaagcagctgtacacaatacagaaatgaatgagtgtggttatgttctaataaaactttatttataaaaacaaggggaggctgggtttaacctgtgggccatagtttgtcaaccactggtgtaaaaccttagttatatatgttctgcattttcttgaactgatcatgaaaacctataaacctaatagacaagccacataatatttagcttcattatgcaataatcacattgccttt

SEQ ID NO: 45986 - DNA, 249 bp, Gossypium hirsutum
  Clone ID: LIB3196-020-P1-M1-G12
gtccagcagatgaaaagtgtatggttctttcggaagtaatacatagccttgggaggtcaatgtcaacaactagtgacaatcccggtcattcactgtggagatttgctgataagggcttaaattgtgtgctagttgttgatatcaagcaaacatccgtggacagcggaccaaatacaaaattgagttgcctgcaaggttgcgtatatggaaaaaagttgctgatgtctatcaaattttccttgtgggtga

SEQ ID NO: 45987 - DNA, 370 bp, Gossypium hirsutum
  Clone ID: LIB3196-020-P1-M1-G3
cccacgcgtccgatatggtgccaaagtatatacatatgcacttgaatgaagtgatgattaaaactcttgttagacactcgtttacgacggattcaaaccgtgtggccccatctcttaccatatatattgtatataaaaaagtacatacatatacatatatagtgtgaaagtattacataaaacagtaactctgaataccacctgtataaacatgtgaattcttctatatatttgttctaattattagtcaatttcaattaaattaatttttgacttaaatatccagtttaatgcttggaattattgattctattaaagctataataatttttttaaaaaaataagtaatttaatttttctcaaaaattac

SEQ ID NO: 45988 - DNA, 106 bp, Gossypium hirsutum
  Clone ID: LIB3196-020-P1-M1-G4
actgaactcattttttaagcagggggtaaagcagtttcttttgtgtagatttcattgttaaacttgaatgttaatctggaatgttaaacaaaccatttccacgttc

SEQ ID NO: 45989 - DNA, 375 bp, Gossypium hirsutum
  Clone ID: LIB3196-020-P1-M1-G5
cggacgcgtgggtgaatgcccacagcattgtttacatcacaaggggaaatggaaggattcaaattgtgtcggaaaatggagaggcgatattcgatgagcaggttgagaggggtcaggtcataaccgtaccccagaatcatgcagtggtgaaaaaagcaggaaggcgagggtttgaatggatagcattcaagacaaatgccaatgctaagattagtcagattgctggacgtgtctccattatgcgaggattgccggtggacgtgctggccaactcctttggtatatcccgggaggaggccatgaggttgaagcataacagacaggaggtgtcggtttttagcccaaggcaaggctcgcaacagtagatcaaacaac

SEQ ID NO: 45990 - DNA, 337 bp, Gossypium hirsutum
  Clone ID: LIB3196-020-P1-M1-G6
cccacgcgtccgagaaagaacatctatggcaagcgaggcggctgtggaagttaacgccatatcggcggcggcgccagaggcggcaacaacaacaggggcagagaagcaaccacataagctcgagagaaagtggaccttttggtttgataaccaaacagggcataaacaaggcgccgattggggtacctctctacgcaaggtttacacatttgacaccgcagaagaatgctggtgtttgcatgatcaactattcaagcccaccacggtggccaaaaatactgactatcagttgtgcaaggccgggaacgggcccaaatgggcagatcccctgtgtgct

SEQ ID NO: 45991 - DNA, 337 bp, Gossypium hirsutum
  Clone ID: LIB3196-020-P1-M1-G7
agaaaatgagggaatccgatgatatagcagtggacaccaacagcagtactccactgcttgaagaatcagaggttaaagataaaaaagaagtaagtggaatggagcagtggagaggagagattgttaagagcatcgtatatgcgggccttgaagccgttttcacttgcttctttctcatttcctccgtatctgctaccaatctctcatcagtggaggtgttggcgctgggcattgcgaacctcgttgcagatgggatatcgtcgagccttggggattttttgtcttccagcaccaaggaaggcttagctatcaaggaaatggcggtgactcaatggga

SEQ ID NO: 45992 - DNA, 64 bp, Gossypium hirsutum
  Clone ID: LIB3196-020-P1-M1-G8
aaaaaaaaaaaaaaaaaaaagaaaaaaaaaaaaaaaaacccacgcgtccggttcttgatcgcga

SEQ ID NO: 45993 - DNA, 402 bp, Gossypium hirsutum
  Clone ID: LIB3196-020-P1-M1-G9
atggcaggccccggggcccgcccgtgactacagccagtaccacaggacgatcgaggagctgcagaacaagatcctcacagccaccgtggacaatgccaacatcctgttgcagatcgacaatgcccgtctggctgctgatgacttccgcaccaagtttgagacagagcaggccctgcgcctgagcgtggaggccgacatcaatggcctgcgcagggtgctggatgagctgaccctggccagagccgacctggagatgcagattgagaacctcaaggaggagctggcctacctgaagaagaaccacgaggaggagatgaatgccctgcgaggccaggtgggcggtgagatcaatgtggagatggacgctgccccaggtgtggacctgagccgcatcctgaacga

SEQ ID NO: 45994 - DNA, 276 bp, Gossypium hirsutum
  Clone ID: LIB3196-020-P1-M1-H1
atcgtgcacagtcacctaaaaaaacctttgaagaagtactgaaaccaccgttaccgatttataagtatatgatcttgtcaacctacataattctagacgaagcatggggtataagaaaaggaaagagcaagaaccgttgaatctagagtgtaacaaacaaaaaccttgatgaacgtcagggctggtattgagttaggagtcgggtacgagtacctagagatagatcaacagctgaacaatactacatactctcttgctctttaccaagcaattaac

SEQ ID NO: 45995 - DNA, 314 bp, Gossypium hirsutum
  Clone ID: LIB3196-020-P1-M1-H10
acgcgtgtctgtcactccgctcagcttcggccctttacagccaaatacctttctcgagcgtttcttttttaactctccaggtcttcacgaatccataaaatttcaccaagaagaagaagaagatgtcgtggcaaacatatgtagatgagcacttgatgtgcgaaatcgatggcaatcatctctcctccgccgccatcgtcggccacgatggcagcatttgggcccagagctccaatttccctcagttcaaacaagaagagattaatgccatcatgaatgacttttctgaacctgggtcacttgcttcaactgga

SEQ ID NO: 45996 - DNA, 255 bp, Gossypium hirsutum
  Clone ID: LIB3196-020-P1-M1-H11
gcagaaaatatcacaaatcttcttctccttctcagaaatcttagtatcatcactatggcctcaaatcccaaggtcttctttgacatgacgatcggtggtcagcccgctggtcggattgtgatggagcttttcgcagattgcactcctcgcactgcggagaacttccgtgccctctgtactggctaaaaaagccgtcggccccaacggtgagcccctccactactaaagctcttctttccatcgtgtgatccctaa

SEQ ID NO: 45997 - DNA, 242 bp, Gossypium hirsutum
  Clone ID: LIB3196-020-P1-M1-H12
ctgacgcatgtgaaaaaactaaaaaaacctctgaagaaagggctcccaccctcagggctacgacctcatggacggactggctcgttctatggcttggcgtgcttggtcttcacgcgcttaacgagccgccacctgaggcacccaatacggcggttagggtttcaaaaacccttccttttatttgccgattctgaagggtcaaccttatcccataagagttgaggatgtatatcaaagatctc

SEQ ID NO: 45998 - DNA, 196 bp, Gossypium hirsutum
  Clone ID: LIB3196-020-P1-M1-H2
ctcatcttgcccctcccattacagggccatataaacaccatgattaagctggctgaactgctacctatcgccggcttcaagcttactttcctcaactcccaccacaaccataaacgctcggacagggtcaacaatattgctgcccattttgaaagatacccagggttcgaattcaagaccataaccgatggtctca

SEQ ID NO: 45999 - DNA, 361 bp, Gossypium hirsutum
  Clone ID: LIB3196-020-P1-M1-H3
cccacgcgttcataatcactacacatcggattgtttccagaaatgaaagaggtttaatctataaacaatttgataggagtcctgtcctaaccgtaccccaaacacgtgcggtagttattatatgggtagttattacatgcaaagaaacatcttctaataccaaggctcatgctaagatatgtcaaattgcttgacgtttctccaatcatctaggattgcctgtcgacgtgctggccaacttcttttgtatatccccggaggaggccatgaggtttaaacataacaaacatgaagtgttggtttttaacccaatgccatgcccatgtcgagttcatacacagttccccagatgggagacaca

SEQ ID NO: 46000 - DNA, 387 bp, Gossypium hirsutum
  Clone ID: LIB3196-020-P1-M1-H4
atcaccctgaaaaccacaaaagcttgagtgattcttcttttcatcatcttctcagtcacaccatcatcctttttgtttggtgtggccaacgctacaaatgaacctgtgctcgacactgatggcaacgaactccaaacaggcaccgaatactacgttgtgtcggcgatatggggcgctggtggtggtgggcttgccctaggcaggccaagctggaacccatgcccggaagtcgttgctcaaagacgatctggcgacgacggtataccggtgatattttctagttcgcactccgacgatggagtagcgcgcctatcctctgtcataaacatagagtttgctccgctcagacccagactttgtcgaacaacaacggtgtcgaaggtcgat

SEQ ID NO: 46001 - DNA, 401 bp, Gossypium hirsutum
  Clone ID: LIB3196-020-P1-M1-H5
aagaatgccccgggggagctgaagctcaagctggagcgggtgatgaagaacccggacaaagcagtaccaataccagagaaaatgagtgaatgggcacctagacctaccccatgaatttgtccgagatgtaatggggtcaagagctggggctggcaatggagagctacatgtgtacagacatatgcgccggagagaataccagccacaggactacatggatgccatggatgccaagcaaaaataggatgcatagtttcagatgagactgcaaaagaataaaattgctgtataggagcagactgcaaagcgccggaagaagcgccagacgttaaaagagaagaaattactggcaaagaagatggaacttgaacagaagaaacaagaaggaagccggggaggga

SEQ ID NO: 46002 - DNA, 398 bp, Gossypium hirsutum
  Clone ID: LIB3196-020-P1-M1-H6
atgcagaatacagcactcggagtgatcctaaacgtgtttttcagggcaaataattattcacatattgttataagcacatgacttctgatgtttattaaaaccacaaaactaagccctgagaagcaaaatacaaaggactgaagagaaaatttgcgaataaaatgagaaaccagatctcttcagacgtgaaccaaaggagcccgcgtttctcagcagacaggagaagcacaggaggcggcttgtcgacatttcatccatttggcgctggaatggccagatctactttttactttttcttgggttttgtaatacttggctcatgataaagggacttttcagcgttcgtttatactactgggctgggggaacactgctcacatgatccacatgattacttt

SEQ ID NO: 46003 - DNA, 197 bp, Gossypium hirsutum
  Clone ID: LIB3196-020-P1-M1-H7
gcggttgttcatctcgtgatagagtcggctcattttatagcacacacagctgattgcacactacacaagatcgcaattacttctacccaactaattctgagactgtatggtataatggtctcagtagactatgaccgcattacacaggttacctcatcgttttagacgtaagcccatggatccctcggttctagact

SEQ ID NO: 46004 - DNA, 371 bp, Gossypium hirsutum
  Clone ID: LIB3196-020-P1-M1-H9
atcaccactattattattattaataataattacacataggattgttgtaagaattgaaagaggttaaatatgtcaaatatttgttaagagtacttgtcatataataagccataagcgtgtggtagttattatatgggtagttattacatgcaaagaagcatttgctaatttcatgaatctttttattttatgttattttaattttagtcacagcaacagtgaaagtaaatttgccatttgggaagcctagggtactgcagaagaacgtggacaactgtctcctttaccacatggaatatgtcagtcgatttggaaaagctatgacgatgcgcatgtggagttcatacacagttccgcagttatgagacaca

SEQ ID NO: 46005 - DNA, 379 bp, Gossypium hirsutum
  Clone ID: LIB3196-021-P1-M1-A1
atttgccccttggaaattataagataattcattttgttgttgtgcaagttgaaaggagtttaagtaccgaactgatgtcgattcttgggttaatttgtaggaatgttgcatttgcctttctgcttacgatgatggagttgagctacgggaacttcgttgcggtcaccattttcattgtgcctgtgtagataagtggctacgcatcaatgctacctgtccactctgcaaatacaacattttaaagagtagtagccacgaggaagtgtagtaagaagggaaacaaatatttagggtcacatctacaacctctgattgctattttagctcgacagaatatatgcacggcattcaatattggcctttgtgggggtcttatcat

SEQ ID NO: 46006 - DNA, 369 bp, Gossypium hirsutum
  Clone ID: LIB3196-021-P1-M1-A10
gtgatggtgaaattagatactggagtatcaaccacgggagctgtgcaagagttttcaagggtggtactgctcctggtacggcccagttaagatttcaacctcgctttggaaagtatcttgctttagctgcggagaatgttgtatcaatattggatgccgaaactcaaacttgtcgacactcattacagggacatacaaagctgatccattccgtatgctgggacttgtcaggtgagcttctagcatctgtcagtgaggactctgtcagagtttggagctttagatcagggagtgaaggggaatgtgttcatgaatggagttgtaatggcaacaagtttcactcttgtgttttcaatcctacgagtcctt

SEQ ID NO: 46007 - DNA, 334 bp, Gossypium hirsutum
  Clone ID: LIB3196-021-P1-M1-A11
cggacgcgtgggtttgaaataaaatttcgtttgtatttttcgccggtgcaaatccaatggctgcgatctttcaaggagttggagctgccgcagctttgtcatcctcaccgtccaattctttcgattccaagaaattcgtttcctctccttgtagacccttctccgtgaggaaaggagccagctttgcagttgtcagatccgatggaagagtaaatctgaaccctaagggccgaagggcccaacaattgatttgcaatgcagtcgcaaccaaatctgatagcgccgctgcttcttcatccctcgaaccagggcatgagcttttaatttttggaac

SEQ ID NO: 46008 - DNA, 246 bp, Gossypium hirsutum
  Clone ID: LIB3196-021-P1-M1-A12
acgagcgagcaattttagaggctacacatgcgctaatggatcatcgctgataccgagcatttggcatgattttacaataacccagagctatatgaatgtggcgcttgatgatatgcagatacattttatagctaaaagctatatttgttgcatgtgcatgatttattgaagtacttgtatttgctgatcttatttaatgcatctccgaatatatgtatctaaatatggtacggataaaactcttta

SEQ ID NO: 46009 - DNA, 391 bp, Gossypium hirsutum
  Clone ID: LIB3196-021-P1-M1-A2
cccacgcgttcgcacgtcgcctgcagacctcaagtgcggatatatttctagcatataacctgcggatctcatgtccggatatttttccagaatatagcctgcggacctcatgtccggatatatttccaatctcatgtatatttgatcatattttaacacatctcaatcatcttatcacttaataatcgtatattacattcgaatataaactcgatacgcacatcatcattcacattttagctcaatggttatatctcatatcactcattctcttcaccatttaatcttaaattcaaagtgaccatcaaactataagtcatatacatgcattatctattatccatctgaattcaagtgcaagccaaagatcacaatttacttactatactct

SEQ ID NO: 46010 - DNA, 380 bp, Gossypium hirsutum
  Clone ID: LIB3196-021-P1-M1-A3
tgcaaatgtgggagtcttgaacttgcagtgagagttttcaatcaggtgaaggaaaggaatatagtgacatacaacacaataatctctgctcatgggatttatggacttggagaacatgtttttcagttctttgaggaaatgaaggaggcaagaattaaacccaataaagtcacatttatcgcgctcttgacagcttgcaatcattgtggtcttcttgatagaagctggtcaatgtatcatgctatgatgtatgattacaatattccactaggcatggaacattactcgtgcattgtggaccttcttggtagagcagggcaccttgatgatgcatatgatctcataaaaaaaatgccagcggaacctgacatgaacatttt

SEQ ID NO: 46011 - DNA, 388 bp, Gossypium hirsutum
  Clone ID: LIB3196-021-P1-M1-A4
ctcttttagaacggataacaacaccacccttttcaagaacatcaactcagcttacttagatgccattaccatagccgatgaaaatgaaacacccccatccgacgactgtttagagactgtcatccgtggtttaaggtctgataggctgttcttcaagcctggtgaaaccagttcaatcatggaagaagcaacaaaaccaagtgaagaagaagaagaagaagaagaagaagaagaagatggggtgccttttaaagaaagtgtggtcttatcaatggagtcacgagatccatacgttgatttcagggaatccatggaagaaatggttgaagctcaagggttaaatgattgggaagagcttgaacaactcttgggttggtatttaaaagct

SEQ ID NO: 46012 - DNA, 381 bp, Gossypium hirsutum
  Clone ID: LIB3196-021-P1-M1-A5
ctctacttttaggaaagcgttcctcaccgagtttcaaccaaacccttttgagttttccacagatttcaccagtttatctggtatctcactcgatcaaaacagggtctccaaggtctctcgtgggtagtttgagatttgatcatactatggctgctgagtcctccaaggggtcagttcatgacttcactgttaaggatgcaaaaggaaatgacgtcgatttaagcatttacaagggcaaggtcctcttgattgtcaatgttgcatctcaatgtggcttgaccaactccaactacactgagctgagtaaattgtatgagaaatataaagatcaaggtttcgagattctggcatttccatgtaaccagtttgggggtcaagagc

SEQ ID NO: 46013 - DNA, 388 bp, Gossypium hirsutum
  Clone ID: LIB3196-021-P1-M1-A6
gtcaaagtttctctctctctctctctctctctattgttgaagttcataagcttttgtatcaatggctgaagtccgtgaccgcaacctgcctcaccaagttcaagttcacccacagtaccgtttcgacaatacaaccggaggcggttacggtgcaaagaactatcacagtggaccatcaacaagccaagttctagccgtccttacacttctccccattggtggtacactgcttgcattagccgggttaacactggccggcaccgtcattgggctgatgctagccacaccgctgttcatcatcttcagcccagttcttgtcccagctgccattgccattgccatggcagtgacggggttcttgtcgtcgggggcgtttgggttaacaggg

SEQ ID NO: 46014 - DNA, 290 bp, Gossypium hirsutum
  Clone ID: LIB3196-021-P1-M1-A7
cccacgcgtgcgcccacgcgtccggttggactctttttttgctttgattatttattgcaatccaaagcacctatctagagtgtgcaatcccccaaggctattagcaataaacattgggaagagatacctcaaattattgcagatttcaacttttacttcccttaaactttggaagcttatgtttgacacatttgagctttagattatttcttcttattggaagccaacacttatctgcgtggtttgcaaactttactaaagctattagccatagaaatttgggagagaga

SEQ ID NO: 46015 - DNA, 275 bp, Gossypium hirsutum
  Clone ID: LIB3196-021-P1-M1-A8
acgcggacgcgtgggcggacgcgtggggagagattagaggatcaaaggcttattgatgatatatgtaagcataatgatgctgtattgcatttgttggtcccgaaatctgccaaagttagggctaagcctggtgccaagaatttcgagttgtctatcatggcaccaaaatcgaaaggtaagcgagataatgatgttggtgagacaaacggtggagtacaatatgaagctgatagaaagtttgtaccaagaaaaccttccgagagggatgttatatt

SEQ ID NO: 46016 - DNA, 397 bp, Gossypium hirsutum
  unsure (1)..(397): unsure at all n locations; Clone ID: LIB3196-021-P1-M1-A9
atcaaaaactctataatggaaaacactaatttagagtaatcgaatatattttttccattgatttattatttttgtgttcccttgtctctagggtactctttcttggtatgggagtacccaagaaacagaatcagtaatggaaagattgctcgaggagcaagaaattgaaaagaatggaaaattagtagatgagagacactaagtctgggccacagttgaggctgatcaactagctactgtcttctaaagcacctgccttgctagtggtcagaatcatgtcattccacctaatctgtcttagcatagctggagagacactagcattattacttttccactcttttcctatattccttngggataaaaccctataaacatgagttttttctttgttttt

SEQ ID NO: 46017 - DNA, 372 bp, Gossypium hirsutum
  Clone ID: LIB3196-021-P1-M1-B1
atggccaagcaagcttctgtctgcacctgctctcaatcctgctctcaccatgagcctccgcctgcagagctcctccgccagctatggaggtggttttgggggtggctcttgccagctgggaggaggccgcggtgtctctagctgttcaactcggtttgtctctgggggatcagctggaggctacggaggcggcgtgacctgtggctttggtggaggggctggtagtggctttggaggtggctacggaggtggccttggaagtggctttggtgggggttatgctggtggctttggtgattttggtgcttgtgatggtggcctcctcactggcaatgagaagatcaccatgcaaaacctcaacgaccgcctggg

SEQ ID NO: 46018 - DNA, 334 bp, Gossypium hirsutum
  Clone ID: LIB3196-021-P1-M1-B10
atcaaccgcaacctggacctggacagcatcatcgccgaggtcaaggcccagtatgaggagatcgccaaccgcagccggaccgaagctgagtcttggtaccagaccaagtatgaggagctgcagcagacagctggccggcatggcgatgacctccgcaacaccaagcatgagatctctgagatgaaccggatgatccagaggctgagagctgagattgacaatgtcaagaaacagtgtgccaacctgcaaaacgccattgcggatgccgagcagcgtggggagctggcgctcaaagacgccagaaacaagctggccgagctggaggaggccctgc

SEQ ID NO: 46019 - DNA, 324 bp, Gossypium hirsutum
  Clone ID: LIB3196-021-P1-M1-B12
atgttttaaactctaatcctcagaactgttctctgaaataggtactaatactaaagcttattgtttaaggaaggcagaaattaagtaacttggcctaagtttgcataattatgatctgggatcaatatttgaacccatacaggctgattgcagagcctgcactcttaattgagtgtgatatttatgtgcagtacctggctataagtacccacaaaacatttcaaattctttataaaatttgcttagttaaaaaaaagtaccaattgcatagtatggttataagtctggtagtagttaggctttttacgagacatgcctcttact

SEQ ID NO: 46020 - DNA, 402 bp, Gossypium hirsutum
  Clone ID: LIB3196-021-P1-M1-B2
atgacttggtgtgtctcgccccaggaaggagctgaaggaccccgaccagctctacacaaccctcaaaaacctgctggcccaaatcaaggtggggagaccaggttgcctttccggggcccctgcaccaatggctgtggcctcttgatgcagtgtgaggtgggtggcgttctcgggctggcgtgggtgcagcaaggctgtccccagctcggctcttctctccagtcgcaccccattgcctggcccttcatggagcctgtgaagaagtcggaggcccctgactactacgaggtcatccgcttccccattggtgaggaccctccattccatcttcttcccccctcttccatccccatacctgctcctgccctcactgggccctgcagccccatggggcccaccccg

SEQ ID NO: 46021 - DNA, 391 bp, Gossypium hirsutum
  Clone ID: LIB3196-021-P1-M1-B3
aatcggtcgaaacttttctgacatttttttgagcattcaaactcaacatctttttgaagtagtttcgtcatcggtgtagctatcatcgaaaaaccctttacaaaccgttggtagtaaccagcaagtcccaaaaagctcctaacttcagtagcattccttggaggcttccaatcgagtatggccgaaattttgctcggatcaactctaatacccgatacggatactacatgccccaaaaagctaacctctctcaaccaaaactcgcatttattgaattccgcgtataactgcttgtctcgtaaaatctgtaatactaatatcaaatgcttggcatgttcagtttcatctcgtgaataaatcaagatgtcatctataaacacaaccacaatcc

SEQ ID NO: 46022 - DNA, 396 bp, Gossypium hirsutum
  Clone ID: LIB3196-021-P1-M1-B4
atcattgatgccccaggacacagagacttcatcaaaaacatgattacagggacatctcaggctgactgtgctgtcctgattgttgctgctggtgttggtgaatttgaagctggtatctccaagaatgggcagacccgagagcatgctcttctggcttacacactgggtgtgaaacaactaattgttggtgttaacaaaatggattccactgagccaccctacagccagaagagatacgaggaaattgttaaggaagtcagcacttacattaagaaaattggctacaaccccgacacagtagcatttgtgccaatttctggttggaatggtgacaacatgctggagccaagtgctaacatgccttggttcaagggatggaaggtcacccgtaaggat

SEQ ID NO: 46023 - DNA, 388 bp, Gossypium hirsutum
  Clone ID: LIB3196-021-P1-M1-B6
ctcaacactttattcttctctctccattaatcttcattgaaagaaaatcatctttgctttcgcccatgaccactgtttatgacccttcacaccatctcacctccaaaaatttgtgtttcaaggaccttgaaatccctccaaggaaaaagcaactccattgttgccccaacgccgccgccatggaacttccccaccacgaagctaggctccacaaatacctcccctccaatgaagacgatgacggtaccgatgatccatacggcaccgaccatttccgtatgtacgagttcaaagtaagaaggtgtacaaggagccgtagccatgactggactgactgtcccttcgctcatccaggtgaaaaagcccgccgtcgtgaccctactcggta

SEQ ID NO: 46024 - DNA, 368 bp, Gossypium hirsutum
  Clone ID: LIB3196-021-P1-M1-B7
catcatcgtagcggctttccacaaatggcgacccaatccctttctcgctatctcctctccaaaccaaaatccctaacctcctttctcttcccttcatgccgccctttctcttccttttcccccgccggcgccgcttcccccgtgaaaaccctaataacctcatcgccatccccttccctctttttcctccgtcgcctccgtgccccactttgctactcgctcctgcttcgcgactcacttttccccactgtcaaatcgttctccactcgagcagccaggtcctctctcaatgacccgagtcctaattactcgaatcgtcccccgaaggagacaatattgctcgacggctgtgattttgagcattggct

SEQ ID NO: 46025 - DNA, 286 bp, Gossypium hirsutum
  Clone ID: LIB3196-021-P1-M1-B8
gaaactttctgctccatgaggatcaaggagaaccttgctgaccctgaacgtgccgacattttcaacccacaagccggtcgtatttccaccctcaacaggtttaacctgcccatcctccaacgacttgagctcaacgccgagaggggtgtcctctacaacagaactggtttgattccacaatggaacgtcaacgctcacaaaatactctacatgttaagaggctgcgccagaagccaagtggtgaaccacaacagtgacagcaggttcgacgataacgtggagcaag

SEQ ID NO: 46026 - DNA, 184 bp, Gossypium hirsutum
  Clone ID: LIB3196-021-P1-M1-B9
atttctcccatcttggcctcccaaagtgcgaaggttacaggtgtgagtctccacaccctgcctggattttgaagccacagtttctttgtttatatagtcaggataataataacacctaatatggattctaaagattaaataggaaaatgcatgtcatgtacttagcacagggtctgttacacac

SEQ ID NO: 46027 - DNA, 370 bp, Gossypium hirsutum
  Clone ID: LIB3196-021-P1-M1-C1
atggatgagtcatggagggaggagcagcctggcttctgacagcatcccagcctccctgggccaggtgtgtgcatcctgtccccctgatggatccctccctccatcagtgccatctccctcttctacgagctctcggagaatgacttgaacttcatcaagcagagcaaggacggcgccggcttcctcattaacctcatcgactcccccgggcacgtcgacttctcctcggaggtgaccgctgccctccgagtcactgatggtgcattggttgtggtggactgcgtgtcaagcgtgtgtgtgcagacggagacagtgctgcggcaggccattgcggagcgcatcaagcctgtgctgatgatgaacaagatgg

SEQ ID NO: 46028 - DNA, 326 bp, Gossypium hirsutum
  Clone ID: LIB3196-021-P1-M1-C10
gagaaacggcgcctccgccctacaacaatggttcacgtctccttttaccgcaactatgggaagacatttaagaagcctcgtcgtccttatgaaaaggaacgattggatgctgagttgaggctggtgggagagtacgggctgcgatgcaagagggaactctggagagttcagtatgctttaagccgaatcagaaatgctgctagggatctattgaccctcgatgagaagaacccgcgtcggatctttgagggtgaagcccttcttcgcaggatgaatcgataccgactattggatgagagccagaacaagcttgattatgtcttggc

SEQ ID NO: 46029 - DNA, 291 bp, Gossypium hirsutum
  Clone ID: LIB3196-021-P1-M1-C11
atgccaagcaagcttctgtctgcacctgctctcaatcctgctctcaccatgagcctccgcctgcagagctcctccgccagctatggaggtggttttgggggtggctcttgccagctgggaggaggccgcggtgtctctagctgttcaactcggtttgtctctgggggatcagctggaggctacggaggcggcgtgacctgtggctttggtggaggggctggtagtggctttggagggtgctacagaggtggccttggaagtggctttggtgggggttatgctgggggcttt

SEQ ID NO: 46030 - DNA, 243 bp, Gossypium hirsutum
  Clone ID: LIB3196-021-P1-M1-C12
catcctagtactactctcgcccaagcaggcttaacagcggagttctgatgggatccggtgcattagtgctggtatgatcgcacccgtcaactcttgcgcaatctattcatataaaggctgcctcttatcgcacttgcgcctcgaactttaatacaaattcaaccaaatatcggtccaaattatttatttcgcaaaacgcaaaaaacgaatgagttacaccacgtggagaaaacgcaactaaaa

SEQ ID NO: 46031 - DNA, 390 bp, Gossypium hirsutum
  Clone ID: LIB3196-021-P1-M1-C2
gaagaacatggcaatttcagggtcctccaaaggtttgcttcaaggcatcctattcttaggggcatcaatgagttccgcttatctatcttagaagcaaaccccaacactttcgttctcccacaccattgtgacgctgagaaaatttaccttgtcaccaacggaagaggaacgcttacgttcttgacacatgaaaacaaagagtcctacaatatagtaccgggagttgtagtcaaagtcccagcaggaagcactgtgtacttggctaaccaagacaacaaggaaaagctaatcatagcagtgcttcaccgccctgttaataaccctggacaattcgaggaattcttcccagctggaagccaacgccctcagtcatatctccgagcctttagt

SEQ ID NO: 46032 - DNA, 342 bp, Gossypium hirsutum
  Clone ID: LIB3196-021-P1-M1-C3
gtccaaaaatgatgatcggagaatcaatccaaccaaatcccaccatcaaaatccccgtaggggacccattcaacgatccgacggctagctttcactccgttaactttaactacaacaatgcagtcagtagtccttgccccgtcgattacctcgggtctctccaccgttacctaccgtcaaacgactacgagtccgattcgctgagtgatgattcggacttacctgttgatgcattctcatgcgaccatttccggatgtacgagttaaaggtgaggaggtgtgctcgtggaaggtcacatgactggactggggtcccgacccctaacctggttgggaaggccc

SEQ ID NO: 46033 - DNA, 365 bp, Gossypium hirsutum
  Clone ID: LIB3196-021-P1-M1-C4
atcacccaccttcaccatgtctgacgaggaagttgaacaggtggaggagcagtacgaagaagaagaggaagcccaggaggaagaggaagttcaagaagaggagaaaccaagacccaaactcactgctcctaagattccagaaggggagaaagtggacttcgatgacatccagaagaagcgtcagaacaaagatctaatggagctccaggccctcatcgacagccactttgaagcccggaagaaggaggaggaggagctggtcgccctcaaggagagaattgagaagcgccgtgcggagagagcggagcaacaaaagattcgtgcagagaaagagagggagcgccagaacagactggcggaggaaa

SEQ ID NO: 46034 - DNA, 396 bp, Gossypium hirsutum
  Clone ID: LIB3196-021-P1-M1-C5
atcggactgcggcccgctgatttctgtggtcatgcatgttagatagtcttccggcctccactgcctcatcttcctgcccactgacgacacgtgggactggttactggccaatatacatgtgcgcaatgtccagttcttcttccatgaagccctcacacatctgatgcacttacacctgatacatagtgacttaaccctgactaccctgcgccagttgtgcgactgacacattgtcttcaagatgctgattccgcacacccggtacacgctacacatcaacatgctcgcacgtgagcttgtaatcgtgacactccatgatgcggacaaattcacaggcatcgaggtcgaacgcttctctgagattgttccaacgaacatgctgcagctcgactatta

SEQ ID NO: 46035 - DNA, 306 bp, Gossypium hirsutum
  Clone ID: LIB3196-021-P1-M1-C6
atccgctcgctccactcagctcggccccgcgccgtccgtcaacatgatccgctgcggcctggcctgcgagcgctgccgctggatcctgcccctgctcctactcagcgccatcgccttcgacatcatcgcgctggccggccgcggctggttgcagtcgaacgaccacacgcagacgtcctcgctgtggtggaaatgttcccaagagggtggcggcagcgggtcctacgaggagggctgtcagagcctcatggagtacgcatggggtagagcagcggctgccatgctcttctgtggcttcatcatcct

SEQ ID NO: 46036 - DNA, 215 bp, Gossypium hirsutum
  Clone ID: LIB3196-021-P1-M1-C7
atggggtggagtaggacactggtccttaccttggagatcctagtttgatggaggggacaggttcctgctgtgcagattgtcatttggtgggtagacaggaacatggtgccatgatctttgcttttgacaacattatggtgaccaaaagcagatctatctgtggggactctggcctggtaggagttaggtacatggaccttgaaacccaaagttct

SEQ ID NO: 46037 - DNA, 330 bp, Gossypium hirsutum
  Clone ID: LIB3196-021-P1-M1-C8
cggacgcgtgggacaaaacgtagatagtcattgggctttattgtatcttcaaggttcacttggcagtaacttttttacacatcataatataggcaggagcggatagaactttaaagaaagtggcattgatacatgccttgaaaccttcattaatttctcctaagtttattttatccctacacaccaaaaatgtatgtctgtgtgtattattttcatgaatataatatttttctattgtagataatatttagtcatttttactgaatcagattcattatatgttatattaccttatgtcaaaacctttttgaaaatcgactttttattttt

SEQ ID NO: 46038 - DNA, 173 bp, Gossypium hirsutum
  Clone ID: LIB3196-021-P1-M1-C9
agggtttgcacgagccgtagtgcgccgtttgcatcaggaagaaatggcggtccctttgctgtctaagaagattgtgaagaagcgtgttaagaagttcaagaggccccaaagtgaccgcaagatcttcgtcagacaaactggcgaaggcctaaaggtattgactcccgtgttag

SEQ ID NO: 46039 - DNA, 402 bp, Gossypium hirsutum
  Clone ID: LIB3196-021-P1-M1-D1
atcatgtgcacgcacaggaagcctttccacatatcacctcatttctaagaaataaactgcaaggtgccaagaaggttttatttcctttttttttttaaagatgacaaatgtacagatgttaatatatttttggtgccaatggcgatgtttttaagagcgggacggagctggcttttctccattcccatgcgcttctatttatcctggacatttcaaacctcctctgtgccttggctctgggcaggggctgccccagcccacccccattctttgtacgtgctgagacagtcactggaagatcttcctccagcggtgccctggatggctgctcctgcaaacagcacgtggcatcttctgctcttccctccaggctctgccctgcacatcctgtcaaggcaagcc

SEQ ID NO: 46040 - DNA, 287 bp, Gossypium hirsutum
  Clone ID: LIB3196-021-P1-M1-D10
cgaaaacctaaagattctctctcccaaaccaaaccttcaaatttcagcaagagagagagagagagagaacttacatagctcagatttcgatcatcaatttacggtttcttagttcgatccccgattacccaatacccccattttacagatcaggtctgagtggtctagttgttcggctggacttatcctctaaggttcatggctgatcttgacatacagattcctactgcctttgatccgtttgctgatgcacatgctgaaaacgcttgtgctggtgccaaaggata

SEQ ID NO: 46041 - DNA, 288 bp, Gossypium hirsutum
  Clone ID: LIB3196-021-P1-M1-D11
aaacgatgttatcccaaattttgcttttggatgtattaacagcatctctggtaattcaatcccaccccaagggctattgggtatgggccggggacccatgtcactactttcacaatccgggtcgctatacaaaagtgtgttttcctattgtttgcccagtttcaagtccaattacttttcgggctcccttatactcgggcctgcaggtcaacccaagaatattcgaaccaccccgctgttaaaaagcccacaccggcccttcctttactacgtaaacctaaccgaggt

SEQ ID NO: 46042 - DNA, 378 bp, Gossypium hirsutum
  unsure (1)..(378): unsure at all n locations; Clone ID: LIB3196-021-P1-M1-D12
atttgaaagaaaaaattcgagttgattcgaataactcgattaactcgaataactcgattcgtttaatttgaaatttgaatttttttcattttttcgagtcaaatcgagttttgctcacccctagttttgagatgctcgactaatggagtttttacggttaactcagcttatagttctctcatggaaaatattttacatcttattgagggaaaatggaggctttcttggcatttcgatggcccattacctgtcagacaattcctttggttggttattagagaacggttacttactaatgctgaacactacataagaggtatgtctgataacgcttcatgtaagctntgtggtactgctgatgagtctattatccatgtt

SEQ ID NO: 46043 - DNA, 363 bp, Gossypium hirsutum
  Clone ID: LIB3196-021-P1-M1-D3
atggtgagcctcgccacgcgaatattggaccgcgtgtgcattcaaaacctctggcattacaggtctgagcacctgacccctggcgtcaataattaattagtacttagatgtatgcaaactgtatctattatataagaacgtattgttttaccgttacacacctcctggcatagctagtaaggctgccttaggcttgaaatatgacatactaaaagcattcttttaaagatacagacacggatagggtgattgaaaatgctctatctacaaacaaatagctccttgcgcatatatgtctaaaaccagaacaactggatcgaaagattgactgcatacgatctaatacgatcaagcttatttatc

SEQ ID NO: 46044 - DNA, 385 bp, Gossypium hirsutum
  Clone ID: LIB3196-021-P1-M1-D4
cccacgcgtccgctcacatttgagctactcacgggcccttttatcaagtcaggacctggacccccataattatcaggtaacgctcactcattgagctactcacgggactgtacacagagtcagtacctggacccatgttacgtacaacattcatctcatgaactcaaagtcaactcatgagttcagactagataatttttgtagcatgcccctttgtatcctatgttatgtctaaggtttaacgggattccacatctaaccgaataacattgtatttgctcgcaatgtaatttactcagacaacatgtcatttacacattcatggcaacaaatagactttagatacatgacaaaaataagccaattacgcatgtatattatcaaa

SEQ ID NO: 46045 - DNA, 402 bp, Gossypium hirsutum
  Clone ID: LIB3196-021-P1-M1-D5
atgtggattcgagaagtgacaggctatgtcctcgtggccatgaatgagttctctactctaccattgcccaacctccgagtggtgcgagggacccaggtctacgatgggaagtttgccatcttcgtcatgttgaactataacaccaactccagccacgctctgcgccagctacgcttgactcagctcaccgagattctgtcagggggtgtttatattgagaagaatgataagctgtgtcacatggacacaattgactggaaggacatcgtgagggaccaagacgctgagatagtggtgaaggacaatggcagaagctgtcccctctgtcatgaggtatgcaaggggcgatgctggggtcctggaccagaagactgccaaacattgacccataccatctgtgct

SEQ ID NO: 46046 - DNA, 365 bp, Gossypium hirsutum
  Clone ID: LIB3196-021-P1-M1-D6
atccgcctgtccgctcgcgccgctcttcgctctgctcaacaactgggtggagatccgcctggacgcgcgcaagttcgtctgcgagtaccggcgcccggtggccgagcgcgcccaggacatcggcatctggttccacatcctggcgggcatcacgcacctggcggtcaccagcaacgccttcctcctggccttctcgtccgacttcctgccgcgcgcctactaccagtggaccagcgcccacgacctgcgcggctttgtcaacttcacgctggcgcgcgccccgccctcgttctccgcggcgcacaaccgcacgtgcaggtatcgggctttccgggatgatgatgggcattattcccagacctact

SEQ ID NO: 46047 - DNA, 359 bp, Gossypium hirsutum
  Clone ID: LIB3196-021-P1-M1-D7
atcgattgtatggacgttatggagaatttagggtacatggatctgatcgataacaatgatttattcgatcacatcttcaatattttaccatgatgataatggcctagaagagttccaacaagatcaggaaaaccaacagcagcaagaacatgattcgactcaacagcagctggggaaacaagtgggggcaatgatgtacaggaagaacgaatgatcagcccaacaagagaaagcttcggatgatttaaccatggggttcttggagtggctcaagaccaacaaagagactgggctaggataagacttgtggggagttaaaatcaagaaagctaccatagagtgtgccgcccggcgtttgg

SEQ ID NO: 46048 - DNA, 394 bp, Gossypium hirsutum
  Clone ID: LIB3196-021-P1-M1-D8
atctttggattccaggaacagctaagcctgggcgctggacttacacactgaacaatacccaccattctctgcaagccctgaaagtggcagtgacctctcgtgcctccaactcagctgtgcccccagccactgtggaagcctttgtggaaagagacagcctccattttccccagcctgtgatgatttatgccaatgtgagacagggattttatcccattcttaatgccactgtcactgccacagttgagccagagactggagatcctgttacactgagacttctcgatgatggagcaggtgctgatgttataaaaaatgatggaatttactcgaggtattttttctcctttgctgtaaatggtagatatagcttgaaagtgcatgtcaatcactc

SEQ ID NO: 46049 - DNA, 295 bp, Gossypium hirsutum
  Clone ID: LIB3196-021-P1-M1-D9
acggttattttattaattaggtttaatttttattagttacttgtgagattaggatttgttggaggcctatataagtattggccagccaccctttgtaaacaacatcttattattatttttttctatcaaatttcaaatttgatgagcgcgggattttctttggggatttctccaagaatgctcttttgagtgctctataaaagaagttgaacaaacttttgattgggggcgccattttataacctaatgctgccattgatattatttggaggggagatttaagccgcttgaagga

SEQ ID NO: 46050 - DNA, 365 bp, Gossypium hirsutum
  Clone ID: LIB3196-021-P1-M1-E1
gggagatagagtttggtattgagcttgtacctgggactacgccgatttcgatggctccttggaaatttcggcaatgagggaggaagatggacacaatttttgacttattttccctttttattcttttattaaccaaatgacaaaaatgcccttaaggcatttctttcaaaattttcctattcatgtccatttttgtccaaaaatatgaaaattggtcaaatttccattaaggccctctaattaataattcaaagctatttcatacttaaagcttctagaatctcatattttgcaacttttgcaatttaatcctaaaaagtaaattggacccttattcaaaaaatttgttcatggaactttcacac

SEQ ID NO: 46051 - DNA, 380 bp, Gossypium hirsutum
  Clone ID: LIB3196-021-P1-M1-E10
cccacgcgtccggaaattacttgaatttattttaataaaatttaatgacatgttataatctaattcatatattgtcaatttatcaaatataagcttttatttttcataaaaaagaaacatctctctctccttttctttttttagaaagaataacgggatgcttgataaattcataaattagcatttaaatatgaagtattaagtgtttttttgttttcattatatattttttacaaaataaaactaaataataacaatattaataatacacatcgataaaagtagatatattctttcttaccttttattgacgataatcatgcctaaaatcaataaataggatttttctcaaagctactgaatgtcactttttagggatg

SEQ ID NO: 46052 - DNA, 352 bp, Gossypium hirsutum
  Clone ID: LIB3196-021-P1-M1-E11
cccacgcgtccgactggcgcaccttgtagagaatgaaattaataagcgcctgaaagcaggcacttacaaggggaagaaatttaatgctatttgccacttctttggctatcaagctcgtggatccttaccatcaaaatttgattgtgactatgcctatgttcttggacatatctgctatcatattcttgcagctggtctaaatggttatatggcaactataaccaacctaaagaatcctgtgaacaagtggcgttgtggtgctgcacctcttccagcaatgatgactgtgaagcgctggtctcaaaatcccaatgccgcgtcaattggaaaacctgctatacatccagctact

SEQ ID NO: 46053 - DNA, 396 bp, Gossypium hirsutum
  Clone ID: LIB3196-021-P1-M1-E12
atgtcctttctcctccactcctcccagcctccaccgcaaaagaatggctacgagaacccccagcctggagctccccttgccctgggcacattgttcaccacgtctttgtttttcatacccctcccctctccatggcagcatcttggtgaacatggatgacaacatcatcgagcactactcgaacgaggacaccttcatcctcaacatggagagcatggtggagggcttcaaggtcacgctcatggaaatctagccctgggtttggcatccgctttggctggagctctcagtgtgttcctccttgggagagacagaagccccggccccagaacccggagacccgtctccctcatctcacaactgctgttacaagactatgctggggagtggggcaag

SEQ ID NO: 46054 - DNA, 386 bp, Gossypium hirsutum
  Clone ID: LIB3196-021-P1-M1-E2
cccacgcgtccgaaattcttcccttctggacaggaaaatcctcagtcatatttacgaatcttcagccgtgaaattcttgaggctgtcttcaatacacgaagtgagcagctagacgagctgtttggtgggaggcaaagccatcgaaggcagcagggacagggaatgttccgtaaagccagccaagaacaaataagggcattgagccaagaagctacttcaccaaggggaaaaggtagcgagggatacgccttcaacttattgagccaaacccctcgctactccaaccaaaacggccgcttctatgaggcttgccctcgtaatttccagcagcaactccaaaaaagggattcctccgttgttgccttcgaaataaacaaaagatcgat

SEQ ID NO: 46055 - DNA, 406 bp, Gossypium hirsutum
  Clone ID: LIB3196-021-P1-M1-E3
atgaagctacaggaagccagaattcttttgacttggtgggtaccggagggttggaagaatctagattgagtattccttggcctttggggagcttgctctatgcaaagtcacctaggaaatgatacttcccccactgtgaaacactagctagagatgacagacaaaaagcacatttgttgtaatctccctttgacgggatctaggttggaatagatgtcgaagcagctgcttctaggtagtcaacgaagatgtcaactagtaaatgacagcagacaaggaggatcacagcagagttgtaagattctagatatcaaaaagtgcaagcagtctattgtactcaccatcgcatcctcagctgcccagtgcccggttttaacttgctgctcaatgtatgtgtcaagtttta

SEQ ID NO: 46056 - DNA, 379 bp, Gossypium hirsutum
  Clone ID: LIB3196-021-P1-M1-E5
atgtgaatgggaaggggtcactcaagggacagcccggagacatctaccaccagacctgggccagatactttgtgaagttcctggatgcctatgccgagcacaagttacagttctgggcagtgacagctgaaaatgagccttctgctgggctattgagtggataccccttccagtgcctgggcttcacccctgaacatcagcgagactttattgcccgtgacctaagtcctaccctcgccaacagtactcaccacaatgtccgcctgctcatgctggatgaccaacgcttgctgctgccccactgggcaaaggtggtactgacagacccagaggcagctaagtatgttcatggcattgctgtacattggtacctggactt

SEQ ID NO: 46057 - DNA, 384 bp, Gossypium hirsutum
  Clone ID: LIB3196-021-P1-M1-E6
atgctttgctggtggtgatgggcttctggtgggcagtgagaaggtgaccatgcagaacctcaacgaccgcctggcctcctacctggacaaggtgcgtgctctggaggaggccaacgccgacctggaggtgaagatccgtgactggtaccagaggcagcggcccgctgagatcaaagactacagtccctacttcaagaccattgaggacctgaggaacaagattctgacggacacagtggacaatgccaacgtacttctgcagattgacaatgcccgtctggccgcggatgactttcgcaccaagtatgagacagagctgaacctgcgcatgagtgtggaggccgacatcaatggcctgcgcaaggtgctggatgaactgaccct

SEQ ID NO: 46058 - DNA, 362 bp, Gossypium hirsutum
  Clone ID: LIB3196-021-P1-M1-E7
acgggcaggttccaggaccagcaccagaaagtccgacggttccgccagggtgacatcattgctttgccgcagggtgtggttcactggagctacaatgatggcaatgagcgtgttgatactatcaatctacttgacactggcaacagtgctaatcatctcgacaacatacctagaagatttcatcttgctggtaacccagaagaggaacagatgcaactgaggaggctggcacagcagatgcaaggaagaagtgtgaggtgctaggagtttgtagaatatgatattgtgcgacttttggaatttaatgctgacaattccattcgacacttattcaaaaaatttgttgatgacactttcacaca

SEQ ID NO: 46059 - DNA, 321 bp, Gossypium hirsutum
  Clone ID: LIB3196-021-P1-M1-E8
attgcgggaccagactattgtgacctggagaatgtacaggaattattcactgtgcaggatcaacacgatctcctcactctaggatggattcatacccatcccactcaaactgcattcttatccaccgttgatcttaacactcactgttgctatcaactcatgtcaccagcggccattgccattgtttgctcaccaaagcataaagacactggcatcttcaggctcaccaatgctggcatgcttgaggtttctgctcgtaaaaaaaagggcttgcatccacacaccaaggagcccacgctgctcagtatatgcaaacatgtg

SEQ ID NO: 46060 - DNA, 380 bp, Gossypium hirsutum
  Clone ID: LIB3196-021-P1-M1-E9
atgccatttctgttggagcaacctcttttctctttactgaatacaagtatcttggtatcttcatgtgtgtatttggtgctatcatattcctcttccttggttcagttaagggcttcagcaccaaaagcgaaccatgcacatacagccagggaaacacttgcaaaccagccctggcaaatgccatctttagcacaattgctttcttgctaggggctcttacttcagtcctctcaggttatctagggatgaagattgcaacttatgccaatgccagaacaacattagaagcaaggaaaggtgttggcaaggcatttataacagctttccgctctggagctgtcatgggtttcctgcttgcagccaatggccttttggtgctc

SEQ ID NO: 46061 - DNA, 401 bp, Gossypium hirsutum
  Clone ID: LIB3196-021-P1-M1-F1
atgtttttatgtggatagtgatatggtcaatgaattcaagttggaattggtagaaaaactttttgctgaagacacagaagcaaagaacccattttccactcaggacacagatttagacttggagatgttagctccctatatcccaatggatgatgacttccagttacgttccttcgatcagttgtcaccattagaaagcagttccgcaagccctgaaagcgcaagtcctcaaagcacagttacagtattccagcagactcaaatacaagaacctactgctaatgccaccactaccactgccaccactgatgaattaaaaacagtgacaaaagaccgtatggaagacattaaaatattgattgcatctccatcttctacccacatacataaagaaactacta

SEQ ID NO: 46062 - DNA, 339 bp, Gossypium hirsutum
  Clone ID: LIB3196-021-P1-M1-F10
cccacgcgtccgttcatttaatattgtgcagatgtatacaccattaatgtttcaaaagggaagaactatcttctcagaatcatcaatgcagcccttaacatggagcactttttcatggttgctaaccatactatgactgttgtggaaactgatggagaatacacaaaacccttcaaaaccacgttcctaatgctgactccaggccagacatacaacgtcttgatcaaagcagacctgtccattggcaaaaacatggcaatggcccctcacatgccagccaaaaacgtccccttcttgatgaaaacttcttgtgggattctccgttatgcatcacccaca

SEQ ID NO: 46063 - DNA, 354 bp, Gossypium hirsutum
  Clone ID: LIB3196-021-P1-M1-F11
atgacatttctatcatccaaaagcccactgcagcagtgggagctggagccacaaaaccagaagggatcgcagtacagcaagagagagagaaatgatcagctccactcaatttctcagaagttgcaacttaccaaaataaaaagatatggcatatgaaccatttacacttggcaaatgccatactgttggctcctataaaaggtcatcagctccaatggacatttctcatcttgaggactgggttgaaagcagatggtgacaaaggtggtaaggtgagggagatggtaatttggcagtggccacaataaaacctaacataaaaattgtactttacagtttttgaacattttcctg

SEQ ID NO: 46064 - DNA, 382 bp, Gossypium hirsutum
  Clone ID: LIB3196-021-P1-M1-F12
catcacttatgagttttacgtacataccagtaccaacttgaaacattagcacatcctttcacaactttgacattcctgatgaacacttggaatattaacggatactcagaaatcttgcacataagtgccatatatgtagatgaagctacctcatatctcacaatacatatggactcgttttcgagctactcacgggcctgctcacacaagctgttagtcaggacgtagctacacagtgttgctcacacaagctgtcaggtatctgcaacacatgctgaactacccagccgctagtaggacgttcgagaccagcacccggattacataatcacatatagacatgggttcctagtgacatgtcactcgtatcctattatattct

SEQ ID NO: 46065 - DNA, 202 bp, Gossypium hirsutum
  Clone ID: LIB3196-021-P1-M1-F2
ctctgctgcattttttgtttgtgtctgtaggtacggcgtacagagggtggacgtggcatgtatggaggtagccgtacggaggcgtgcgtggctggggcagcagactagggtttctttgtttgcacattaatcgggctaggttaattgggtttaggtttgggctaggttaatgtgcaacccagtacaaaaattaaataaaaca

SEQ ID NO: 46066 - DNA, 352 bp, Gossypium hirsutum
  Clone ID: LIB3196-021-P1-M1-F3
cggacgcgtgggcggatccacctcgggtgagaaaggtaagttcgggttgacaacgatccagattttaagggttgttaaaaagcttcaggattcggggatgcttgattgtctgcaattgctacacttccatattggatcccaaatcccttcaacagctttgcttcaagctggtgtcgtcgaagctgctcaaatctattccgaattagcccgtcttggtgctgacatgaaagttattgacattggaggcggccttggaatcgattacgacgggtcaaaatccggtaattctgatctctctgtttcttatggccttcaggaatatgcttcaacttgtgttaatgctgttcgggtt

SEQ ID NO: 46067 - DNA, 403 bp, Gossypium hirsutum
  Clone ID: LIB3196-021-P1-M1-F6
attgctagtctgtcccaagtttttcttcacctatccaccttggatcgtagtgtgatttggtctaaatctatactgaatgcgcgctgcaagatatgtagaaagaaaggcgatgctgaaaacatggttctttgtgatggctgtgataggggtcatcatacctactgtgttcgaccaaagctcaagactgtgcctgaaggagattggttttgtccagaatgtcgaccaaagcaacgtcctagaagactctcctctagacagagaccatccttggaaagtgatgaagatgtggaagacagtatgggaggtgaggatgatgaagttgatggtgatgaaaaagaaggtcaaagtgaggaggaagagtatgaggtagaacaagatgaagatgactctcaagaagaggaag

SEQ ID NO: 46068 - DNA, 288 bp, Gossypium hirsutum
  Clone ID: LIB3196-021-P1-M1-F7
acactgtcgaacaagttggaacgctaaagcgcgctggtgcccggccccagtttccgggatgtgagacttgtacctgctcacttagaattatctctgcaccaaccatggccacctttgtgcagctcagtaccaaacccaacatgcctattgtgggcctgggcacttgtacgtctactgttcataaactgaaagaagcagcgaaggtggacactgatgcatgggctcgacacattgactgagcctatgcctatgagaatgaacatgacgtggcggatgccatgcacgaga

SEQ ID NO: 46069 - DNA, 376 bp, Gossypium hirsutum
  Clone ID: LIB3196-021-P1-M1-F8
gctgcagctatggttgccgctcatgtttctgaactatttagacagtcaaaggcttgtatgcatgcgctctctgtcctaatgcgatgcaagtgggacaatgaaatttacactagggcatcatcgttatacaatctcattgacattcacagcaaggcagttgcgtccatcgttgacaaggctgaacctttagaagcacaattgatatatgcacctgtttgttttgatagcagaacacaatgcaagcgtacaaatactgcttgctgggatcctctgcgagtatcttcttcagaatatgaagattcaattcattcagccaataatcttagatgtcagatggtgttaacatcagatgaacgcttaggaaatccacgggaaa

SEQ ID NO: 46070 - DNA, 307 bp, Gossypium hirsutum
  Clone ID: LIB3196-021-P1-M1-F9
cccacgcgtccgcaaagacttccccggcagaagaagcgaggatgatcctcgacagaggtacgaggactgccagaggcgatgccagtcggagacacgtggacaaacggagcaagacaagtgtgaagacaggtgtgaaaggcagtttaaggaggagcagcagcgtgacggagacgatcctcagaggagataccaggattgccgacaacactgccaacaggaagaaagaaggctgcgtccacagtgcgaacaaagctgccaggaacaatacgagagacaacagcagcagcagcctgacaagcgattcaag

SEQ ID NO: 46071 - DNA, 342 bp, Gossypium hirsutum
  Clone ID: LIB3196-021-P1-M1-G1
cccacgcgtccgactggcgcaccttgtagagaatgaaattaataagcgcctgaaagcaggcacttacaaggggaagaaatttaatgctatttgccacttctttggctatcaagctcgtggatccttaccatcaaaatttgattgtgactatgcctatgttcttggacatatctgctatcatattcttgcagctggtctaaatggttatatggcaactataaccaacctaaagaatcctgtgaacaagtggcgttgtggtgctgcacctcttccagcaatgatgactgtgaagcgctggtctcaaaatcccaatgccgcgtcaattggaaaacctgctataca

SEQ ID NO: 46072 - DNA, 380 bp, Gossypium hirsutum
  Clone ID: LIB3196-021-P1-M1-G10
atttctcgcataataaaacaagaggttgaaatcataaataaaaattgaacaatttacaaagcaggttaaggtgaatagaagttttgcaccaggtaggaaaccaggaagaagaggaggtgagtccgtcggactgcttaagtaccaagctcccttcggatccaatcctagacatgcacaccaccattgccacaccttaacgactcgtataattttgagaaaaccgtctggttatgtctatcttaagaaaatgattaagtttgaaaacgtttgcttagtggaagtcttacttgtaatcgtgttattttgaagtcccttaatgtttttgaaaacacgtgctaaagctaacctaatttgctttggcaacaatattttttttaata

SEQ ID NO: 46073 - DNA, 396 bp, Gossypium hirsutum
  Clone ID: LIB3196-021-P1-M1-G11
atcgttgggctggtggggaggccaagtttgggagcaaatagggtctgattgagcttgtgttgcactggagggacagccctgggtctaggggagagaatccctgagtgtgagacccgccttccctggccccagcccctcccagttcccccagcgacggccacttcctggtccccgacgcaaccatggctgaagaacaaccgcaggtcgaattgttcgtgaaggctggtagtgatggggccaagattgggaactgcccgttctcccagagactgttcatggtactgtggctcaagggagtcaccttcaatgttaccaccgttgacaccaaaaggcggaccgagacagtgcagaagctgtgcccaggagggcagctcccattcctgctgtatggcactg

SEQ ID NO: 46074 - DNA, 378 bp, Gossypium hirsutum
  Clone ID: LIB3196-021-P1-M1-G12
cgcttctcgaaatttgcaaatccgctaatccccagccagccgttgtctgggcctcctccagttccgtttacggtctcaacgaaaaggttcctttctctgaggccgacaggaccgaccagccggctagtttgtatgccgccaccaagaaggcaggcgaagaaataacccacacttataatcatatctacgggctttcagttactggattaagatttttcaccgtgtacggtccatggggaaggcctgatatggcgtatttttcgtttacgagaaatattctgcaggggaagcccatcaccatttatcggggaaagaatcgggttgatttggcacgagattttacctacattgacgatatcgtgaaaagctgtttgggat

SEQ ID NO: 46075 - DNA, 384 bp, Gossypium hirsutum
  Clone ID: LIB3196-021-P1-M1-G2
gctgttgcagccataactagtgatgagattgtggggaatgggatgagtacttgcatcgtttctgcttcagataataaaggctttggaggcgcagctattgatgttattaatacaggtgatggtggtcagaagttagcaaaccaatcaaaggctgaagagtctctcaacgtttctcttcctgcagatctttctgttgagaacccaccaatttctttatggccgcctttacctactccccagaattctttaagccagatgatttctcattttcctggaggccctacttcgcacttacccttctatgacatgaatcccatgatggggggtccaatctttgcctttggaccacatgaggaatcatcggctacccaatcgcaagtccag

SEQ ID NO: 46076 - DNA, 331 bp, Gossypium hirsutum
  Clone ID: LIB3196-021-P1-M1-G4
cccacgcgtccgcagaatactgatagattacagatctgtaaccttcattccaagtgtttgttaatcatctacaaatggcgctgtgggcaacttcttgttcgtcttctgagaagcttttcctcgcatcttcagctgcaacaagaagaaggatgggaagcagaagaagagatttagttcatgttgggatgacagaccaggctgagacggagactatatcaatagcctacaaggagggagatcgtgaaaggcctaaatgggcagatgagacccctttctctcgccttgttgaagctctcatttcatttaaacccttttactccctgcttaagct

SEQ ID NO: 46077 - DNA, 407 bp, Gossypium hirsutum
  Clone ID: LIB3196-021-P1-M1-G5
atgcggctggctcaattaagatgaggcttctgctgcttctcctagtggcggcgtcggcgatggtccggagcgaggcctcggccaatctgggcggcgtgcccagcaagagattaaagatgcagtacgccacggggccgctgctcaagttccagatttgtgtctcctgaggttataggcgggtgtttgaggagtacatgcgggttatcagccagcggtacccagacatccgcattgaaggagagaattacctgcctcaaccaatatatagacacatagcatctttcctatcagtcttcaaactagtattaataggcttaataattgttggcaaggatccttttgctttctttggcatgcaagctgctaacatctggcagtggggccaagaaaataaggtctatgcatgt

SEQ ID NO: 46078 - DNA, 408 bp, Gossypium hirsutum
  Clone ID: LIB3196-021-P1-M1-G6
ataacgaaccgcagtgttcaccggcgaggagccagccctgtcccggtcagagaaagacgacgaggatacctgggagcgggcgtcggccgggctgggccgcgccggtgcgggctggcgactctgctcctacgcttgctgctgtctctgggaactgggtgccagcgctgaggggcttccagcggacagggacccccttccccggctcccctgcccaccctgccggggagggcggaagatgccggtgaagaagaagagaaaatcccctggggtggcagccgcagtagcggaagacggaggcctcaaaaagtgtaaaatctccagctattgcagatcccaaccccctgctagactaataagtggagaggaacatttttcaagcaagaagtgcctggcttggttttatgaata

SEQ ID NO: 46079 - DNA, 383 bp, Gossypium hirsutum
  Clone ID: LIB3196-021-P1-M1-G7
cccacgcgtccgcgagaatcatcagaatcagaaaaaagggaaaagggtgattaaagaaaagactcccatccccactgattctggccttgcttcccaacacgtagcatctaaccataacgcctgaaatccaccactcctctatttatttcaaaaccacttggattaaactccccctccgctccattccactctcccaaaaccaacacgccttctttgcctcgtgtttcatcagctggcgttaaactgctttctttaaagcctgcaaaatgggtgccggtggtaggatgctagttgacggtaaaaaggaggaaaaacgaggctcggtcaatcgagttccgatcgagaggcctccgtttacgctcggtcagatcaagcaagccatt

SEQ ID NO: 46080 - DNA, 382 bp, Gossypium hirsutum
  Clone ID: LIB3196-021-P1-M1-G8
cccacgcgtccgaaaaaattgaccaagataacaatgttattcaagttgtcatacttgttccaacacgagaactggctcttcagacatcacaagtgtgcaaggagctcgggaagcatttacaaattcaagtcatggtcacaactggaggtaccagtctcaaggatgatatcatgcgactgtatcaaccagttcatttgctggttggaactactggcaaaattcttgaccttgctaaaaagggtgtttgcattttgaaagattgttcaatgctgattatggacgaagcagataaacttctgtctgcagagtttcaaccttctatagagcaggtgatacattttcttgcagcaaatcgtcaaattttgatgttttcagccacatt

SEQ ID NO: 46081 - DNA, 272 bp, Gossypium hirsutum
  Clone ID: LIB3196-021-P1-M1-G9
cggacgcgtgggggataaaggcaccagtggtttgcttgttgttgcaaaggatgaacattcccatgcccatttgtcggaacagtttaagcaacacactatccagagggtctacattagtcttacttgtggagtgccttcagcttctgctgggcgtgtggacattcccattggccgtgattcaaataaccgcattcggatggttgctgtaccatgattaagtcatcatggtcgggctcgtcatgctgctagtagatataaagtaattgaagtgc

SEQ ID NO: 46082 - DNA, 387 bp, Gossypium hirsutum
  Clone ID: LIB3196-021-P1-M1-H1
cccacgcgtccgcacatattgattgcgtgctttcagagataagttctaattgttacaccggtttaataattaaaagaattaaaagctttttcctagcatcttttaaatgtctaaaactaaaaattgatatatatttattatttaggttgaatctccagaaaagatacttcaatatctaactccacatccaagagaaaacggtaaaaggatggcattgatggaaaataatttcttgaacatttgaaagtaagcttattatatttaaactttgcaatttggcttgtttatttcaaagattccttttaaataccaaagaataatattacatttttaatcattaaattagtttatatcatatttatcacatggtattattatatcatcccc

SEQ ID NO: 46083 - DNA, 397 bp, Gossypium hirsutum
  Clone ID: LIB3196-021-P1-M1-H11
attacctggcctctgtcaaagccatgcacgaggcttccaagaagctgaatgagtgtctgcaggaggtgtatgagcctgactggcctggtagggatgaggcaaacaagattgcagagaacaacgacctgctgtggatggattaccaccagaagctggtggaccaggcgctgctgaccatggacacgtacctgggccagttccctgacatcaagtcacgcatcgccaaacgggggcgcaagctggtggactacgacagtgcccggcaccactacgagtcccttcaaactgccaaaaagaaggatgaagccaaaatcgccaaggccgaggaggagctcatcaaagcccagaaagtgtttgaggagatgaatgtggatctgcaagaagagctggcctccct

SEQ ID NO: 46084 - DNA, 385 bp, Gossypium hirsutum
  Clone ID: LIB3196-021-P1-M1-H12
ggctgtacttggaggcaatgcctctccttcagctgatgatcttaagaacattcttgccagcgttggagctgacgctgaagaggaaaggctccagcttcttttatctgaagtgaagggaaaagatataaccgagcttattgcatctgggagggaaaagcttgcctctgttcccagcggtggtggtgttgctgtggcggcatctgcacccggagccgccgccgccgccgctcctgctgcagctgagactaagaaggaagagaaagttgaggagaaagaggaatccgatgatgatatgggcttcagtctcttcgactaaaactaccacgcaccgccagcaacctatcaatgaaatacggatggtttttggtttctacggaggatttct

SEQ ID NO: 46085 - DNA, 382 bp, Gossypium hirsutum
  Clone ID: LIB3196-021-P1-M1-H2
cccacgcgtccgcaaaaaacgtaccatggcaaagttcgctctcctcgtagccactttcgctctcgctttcttcctcgtgaacgcctccatctaccggaccacggacggcgacgaagaaaactggtaccgacacgatcggcgatcgtgtcaagaccagatatggcagcaaggctacctcccaaactgtcagtggtacatgaacgaacaggccggccgcagccacagcggatatggcacccactacctcaactcgtgctgctacgagctccagaacctaaggcaggattgccggtgccaaggcttgaaacaagcgttaggacaacagctgaagctgcaaggagtacggtgggagagtcgagaggcttgaaatattgtgtgaagc

SEQ ID NO: 46086 - DNA, 401 bp, Gossypium hirsutum
  Clone ID: LIB3196-021-P1-M1-H3
attgtatgcgtccgtggtggaggacatgatcctgaaggctacagaacagctggtgaatgatatcctgagacaggctttggcagttggataccagacagcttctcacaacaggattcccaaagaaattacagtgagtaatattcaccaggccatttgcaacattccttttctggatttcctcacaaacaaacacatgggaatattgaatgaggaccagtgagcggagtgaggtgccctggagaagcaagctttgaaggcgcagcgaagctgtaactgaggaccctgctgctcgggaaggaggtggtttccagtgcgcctcgggatgtcatggctacccaaccattggcgcttctgttcccgcgtgccaccaacatgctccactccagatgaaatccattgga

SEQ ID NO: 46087 - DNA, 370 bp, Gossypium hirsutum
  Clone ID: LIB3196-021-P1-M1-H5
ttgacgcgtgggcggcaagcattggccttgggaatcttgggtttttctgcaaaaatgttggcggtttttgagaaagcaacaggaaatccaccggaggagctcaggcttccttcaattggattggattctgacggtaagggaactcgagaagaaatcttgcagactttcaggttgctgtggccagagtcgaccttttaccacctttcaaatggaaatttcatgacactgtcacatggagctcagagtcctttgcatccaaggtccatggttgtcatggatgacatcttctgcatctttattgggactcttgtgaacatttgcgaactcaggcgacattacggcttgtccagacaagcaacagaagccatgc

SEQ ID NO: 46088 - DNA, 306 bp, Gossypium hirsutum
  Clone ID: LIB3196-021-P1-M1-H7
atgttactgaggtctccagcgtcttctccctcctgtgtaaaatggcaactcttaaggaaaaactcattgcaccagttgcggaagaagaggcaacagtcccaaacaataagatcactgtagtgggtgttggacaagttggtatggcgtgtgctatcagcattctgggaaagtctctggctgatgaacttgctcttgtggatgttttggaagataagcttaaaggagaaatgatggatctgcagcatgggagcttatttcttcagacgcctaaaattgtggcagataaagattattctgggacttgcc

SEQ ID NO: 46089 - DNA, 318 bp, Gossypium hirsutum
  Clone ID: LIB3196-021-P1-M1-H8
atgctggaggctacggaggcggcgtgacctgtggctttggtggaggggctggtagtggctttggaggtggctacggaggtggccttggaggtggctttggtgggggttatgctggtggctttgttgattttggtgcttgtgatggtggcctactcactggcaatgagaagatcaccatgcagaacctcaacgaccgactggcttcctacctggagaaggtgcgcgccctggaggaggccaacgccgacctggaggtgaagatccgggactggcacctgaagcaaaagccagctagccctgagcgggactacagcccct

SEQ ID NO: 46090 - DNA, 326 bp, Gossypium hirsutum
  Clone ID: LIB3196-021-P1-M1-H9
cagatttttgggataaatggagggagtttgaggtgcaacatggtaatgaagataccttcagagaaatgttgcgtattaaacggagtgtctctgcaagttatagccagacacacttcattctccctgagtatctgatgcagaaggatcagaacatcgatgaagctaacgacaaaatgaaacaggctggtatctctgaggatgaaatggctgctcttgaaaggcagttactacctgcggctgataatgctattgccaaagacaactctaggaaagtagggtttgtgagtgctgcagttgagtcacaagccgatggtgggttgaaaaca

SEQ ID NO: 46091 - DNA, 396 bp, Gossypium hirsutum
  Clone ID: LIB3196-022-P1-M1-A1
atctctgatagctcccagcttactctctgcagccatgattgccagacagcagtgtgtccgaggcgggtctcggggcttcagctgtggctcagccatcgtaggcagtggcaagagaggtgccttcagctcagtctccgtgtctggaggtgctggccgatgctcttctgggggctttggcagcaggagcctctacaacctcggggggaacaagagcatctccatgagcgtggctgggtcacgacaaggcgcctgctttggaggtgctggaggcttcagcactggtggctttggcggtggatttgggggctccttcagcggtaagggtggccctggcttccctgtctgccctgctgggggaattcaggaggtcactatcaaccagagcttgctgacccc

SEQ ID NO: 46092 - DNA, 364 bp, Gossypium hirsutum
  Clone ID: LIB3196-022-P1-M1-A10
cggacgcgtgggtttgaaatcttttctgttgggggagatgtatccgatgctaatgttgtgaagttcagcaatgatggacgactcatgcttttgacaactatggatggacatattcatgtgctcgattcatttcgtggcacgcatttatccacttacaatgtgaagccagttcctagcaattgcacgttagaggcatcatttagccccgagggaatgtttgttatatcaggttcaggggatggtcgtgcatatgcttggagtgtacgcagtggaaaagaagtcgcaagctggatgatgaatagtgaaccttctgtaataaactggaattggatgaacaccgacactgagcctcccgtcattaagt

SEQ ID NO: 46093 - DNA, 365 bp, Gossypium hirsutum
  Clone ID: LIB3196-022-P1-M1-A11
gtggagacatatttgtagtcccagcaaactttccagttacattcgttgcatcccaaaaccagaacctgaggatgactgggttcggtctttacaaccagaacattaacccagaccataaccagaggatcttcgtggctgggaaaatcaaccatgtgagacaatgggatagccaagccaaggagttggcctttggggtgtcatcgaggttggtggatgagatattcaacagcaacccacaagagtcttacttcgtgtctcgacagaggcagcgtgcatctgaataaagagttaaaggcaataataatcacatagtctcgtgtttatggactaatgtgaaattttctagttttaagcaggcatgtaat

SEQ ID NO: 46094 - DNA, 384 bp, Gossypium hirsutum
  Clone ID: LIB3196-022-P1-M1-A12
atcatcatccaagtcatcctcaaggcagctaagcgagagcttcaagagcaaagagtttgtgtctagtgatgagagctcttccggagagaacaagagcaaaaagaagaggaggaggagcgaggactctgaagaagaagaactagccagtactccccccagctcagaagactcagcgtcaggatccgatgagtagaaatggaggaaggttctctttgcgcttgccttctcacacccccagactccccacattttggtaccagtttctcctcatgaaatgtagtccctggattctgtgccatctgaacatgctctcctgctggtgtgtatgtcactagggccgtggggagacttcttaactctgttgcttcccaaggatggctgttt

SEQ ID NO: 46095 - DNA, 376 bp, Gossypium hirsutum
  Clone ID: LIB3196-022-P1-M1-A2
gttgattatgcttgcacaccatgtagaaagtgcacctacatttgcattcttgtggcactgtaaacagagtaactattctgacggacaagtatggacaaccgaaaggattcgcttatgtaaagttgctggaagcaaaagctgttcaagaggctcgtgtgctgaatgaatctgaattacatgaccgacagttgaaggtaatgcctaaaaggactaatgttcctgggatgaagcaatgaccgtcaatgcgattcaatccttacatgggctaccggatcatgagggcctatataccgccttattcctattctccttatggattctgcaagattcctagattcacgaggccgatgcggtatatgccctactactagaagac

SEQ ID NO: 46096 - DNA, 331 bp, Gossypium hirsutum
  Clone ID: LIB3196-022-P1-M1-A3
acgcggacgcgtagggttatttcacatttgcattgtttctttttttcttagaaactcaagaaatgttcaacacaatgtccatggaggaatcacttataactccaataccaacaggtacaatggagtgttatacctagtacaaaccaagaatgcctgcctttttcctaatccctaatgccaaacgaccgactgttctatgacacttacagaattgcccctggcggataccagactatacagcacggactgtacagaatttaaacacctcttccgaaattcaaagaatcgaacgtcagttcactaggcgcttgagagttcttaggtccctttt

SEQ ID NO: 46097 - DNA, 367 bp, Gossypium hirsutum
  Clone ID: LIB3196-022-P1-M1-A4
cccacgcgtccgggcctcttctctttttccagttttcttcttcttttttctttttttttccttttttttttcttctctcactttctcgaggcctccatttttgaaccctagctggagaaaaaaaacgtaattttcttggaaaccaaacacttcgattaatttatctccagtcaatcgccaagaaaaaaaatgcagcaccagaggctgaagcaacagcaacaagccttgatgcaacaagctcttcttcaacagcagtctctctatcatcccggcatattagctcctcctcagatagagccaattcccagtggaaatctgcctgctggttttgatccaagcacttgccgcagtgtgtatgtgggaaata

SEQ ID NO: 46098 - DNA, 370 bp, Gossypium hirsutum
  Clone ID: LIB3196-022-P1-M1-A5
aaccaagatgctctcctctagatctgcaacaacacacgcaaaatgaaaggcaagactttgaacaacagcttggagattcaacagaaccttctccaaagttcaaagcaaaacttcagcgaccttgagtcctctgatcccaggcgaaccgatctttcctcaccatcgtctgaaccagatcaggtacatcgttaacccaactcccacagatccctcttctccatccctccattgtcaggacatgcgctgcttcatttacctcacgaggcacaaagatatagagcgtcaccttccacaaccagccgctgaaagcacatcttacgcgcgaatactaaagctctctcacaagcccgtgcctttgccacaaaagaat

SEQ ID NO: 46099 - DNA, 365 bp, Gossypium hirsutum
  Clone ID: LIB3196-022-P1-M1-A6
ccctgagaccacaggtcctaacatggtggttgatatgtgtaagggagttcagtacctgaacgaaattaaggattctgtagtcgctgggttccaatgggcatcaaaggaaggtgcaatggccgaagagaacatgaggggtatatgctttgaagtttgtgatgtggttcttcatactgatgctatccatagaggtgggggtcagatcattccaactgctaggagggttttctatgcttctcagctgactgccaagccgaggctgcttgagccagtgtacttggtggagatccaagccccagagcaagcacttggtggtatttacagtgttcttaaccagaagcgaggacatgtgtttgaggagatgc

SEQ ID NO: 46100 - DNA, 359 bp, Gossypium hirsutum
  Clone ID: LIB3196-022-P1-M1-A7
atctttgctgctcagccgcctccctctgaggccaacttaggccaacctacctgggactccatctgaagtcagacgccagagaaactgagtggcgaccacgggtctgcttttgtctctgatcctaggggacttgttgacatgggagtatctgttcccacatggaaggatgtgggttgctctctcatctctgaatagatgtaatgtatgacaagtctagtggccatggtttaaaatgttgctgtgaggattctccatgctgtataagaagaatgactttcttcagattataatcgttattaaagctgtttgtaccctttacttaaaaactattaacagtttttcatgttgcactggtcatt

SEQ ID NO: 46101 - DNA, 457 bp, Gossypium hirsutum
  Clone ID: LIB3196-022-P1-M1-A8
taggtcccactatagaacaagtaggtgcaacaaagcaggctgctgccgccgccgtaattcccgggattcccagcggagcctgagaagaggctgaggacggcgaaacatggctgctctaggactccagagtatcaactggcacacagtctttaaccgacaagcgcatcacacacacaagttctctagccgggagctcatcttgcggagaggccaaaacttccaggtcttaatgctcatgaacaaaggccttgtctctaacgaaagactggagtgcattgtctacacagggccttacccctgcgagtcggccatgacgaacgctgtgtttccactcttcaatggcacttacggtggctggagtgcggagctccaggccatcaatggcaatactctgactattagcatctccagtcctgccagcgcacccataggacagtacacaatggcccttcagatc

SEQ ID NO: 46102 - DNA, 370 bp, Gossypium hirsutum
  Clone ID: LIB3196-022-P1-M1-A9
gaacatgttaaatacctgtgtgaacagaatttaagttagtgtgaacaacatagatgccgaatatcaataggcattttaggcttataaatagcttacttgtttattgtaaaaggttacagaatttgattattgaaaacttgattgtgaggtttcctcctatcctatttcgtacgagtctcgttctgacttatctagctcgctagtggcgtcaacccgacttcttgaacttatcaccatcctggtgtggcattcatccacctttttatacctttggttcctacctttctataggtaacgggtcaaggtccatcttcgacaatccattaaacccaccttaagcaatataagtcccggggcaatacttcatata

SEQ ID NO: 46103 - DNA, 363 bp, Gossypium hirsutum
  Clone ID: LIB3196-022-P1-M1-B1
atcacagctcaaatcgataggcccaattgcattatcatttcccctgggcttctgaattttccagtttaatggtgaattctacataatctctctccatatcttttgccccattacattttgcaatttcttctaagtatgtttcgatattactgtaaatgtgaattcatgctatctaatcaactcaccaaaggacatgatttgcatcgttgtgaaaattcttcagtatgacagatatattattgttcgttcactgaaaatcctcaaatagaatcttttttggttaggcatatctttcgtcaaaaccaagagcgataaaagctttagttcttcacctagcaattcaattattacatctccatgttg

SEQ ID NO: 46104 - DNA, 360 bp, Gossypium hirsutum
  Clone ID: LIB3196-022-P1-M1-B10
ccattttccaccacaagcgtgtccagaaggttcagagattttagagagaacaaacaacaatggctgctacatctggggctgtactaaatggattaggctcttcatttctttgtgggggaaagaggagccaagcccttttgggtgccagcattggggccaaaggctcgccctcccctactgctggaactagaaagttgatcgttgtggcagccgccgcacctaaaaagtcttggatccctgctgttagaggtggtggcaacttcattgaccctgaatggctcgatggatcgctccctggagactacggatttgacccactaggtcttggaaaagacccagcattcctcaaatggtaccgag

SEQ ID NO: 46105 - DNA, 351 bp, Gossypium hirsutum
  Clone ID: LIB3196-022-P1-M1-B11
agcaaatgttgctgcacccctcttgtcatccgttaagcaacaattaactgaggtagacctttcagattttattgctggaaggccagagtctgaagcacttgaagtcatgaatcttttttcttctgtcctggaaggttgtcagttaaggtacctgaacctttcaaacaatgccttgggtgaaaagggtgttcgggcatttggggctctcctgaagtcacagaataatttggaggagctttatttgattaatgatggtatttcagaagaagctgcacaagcagtttctgagctaattccttctaccaaaaagctgaaagttcttcattttcacaataacatgacaggggatga

SEQ ID NO: 46106 - DNA, 364 bp, Gossypium hirsutum
  Clone ID: LIB3196-022-P1-M1-B12
attgagtaaagaaactggcgtgctcgctctaaacagaacccttgccaagccttgtttatcagatattgagcaagtcttggctggccagggtgctggtgacggtctcaatcaagtttgttcgattcattcatcaaaccttactgaagcatcttgtcccgtaaaagatgttgatgaatttgagaacatggtaaactcttctgagcttcttgcttgatgtgaaaagattgatcctgttaaagaatgttgtgaccaagtctgtcaaggtgcaatatctgatgctgcaacaagacttgcattgaaagcttctgatcctctaagcatggatggacctcatgttttacctgagcacacaacaaggataaat

SEQ ID NO: 46107 - DNA, 395 bp, Gossypium hirsutum
  Clone ID: LIB3196-022-P1-M1-B2
atcgccgatggcggagggaacggcggaggcccctctagagaacggtggtggcggcgactcaggagccggagcgttggaacggggagtggcgcccattaagcctcaataccttaccaccaaggagcagtttgaccaattcctggaagccaaagggcaggagaagccttgccgggaaaccgaggtaggagactcagctggcaatgacctggctgagcctgaggctaagcggatccgactggaggatggacagacggaggacgggcagacggaggaggcagcagagcccagggagcagtcgcagactcagaagagggcccggggacaaaacaagggccggcctcatgtgaagcccacacactacgacaagaacaggctgtgcccctccctgatccagg

SEQ ID NO: 46108 - DNA, 360 bp, Gossypium hirsutum
  Clone ID: LIB3196-022-P1-M1-B3
tcgcccacgcgtccgcccacgcgtgcgcggacgcgtgggttccttttttatcaaaaaaccagatgtgcttggatgagcaattgagttgccagaactgcatcgatttgaaagtggatagtgaagatgcttattcatcgtgcattctggatataaacattgagaaagagactcccgacctactgaaatctaatgatgaaactgttggttattcaaaaagtgaaggcgtggttacacatttgcagaaggtgttacagagacaagcaagcttaaacagaaatcatcgaacgagagggttcatgatgcaccaagcaacagatggagaagatacaaaagagctgcatcatttgattcgaggaaaat

SEQ ID NO: 46109 - DNA, 335 bp, Gossypium hirsutum
  Clone ID: LIB3196-022-P1-M1-B4
caacgtggttatactgagctgcttgagtataagcttgttttgcaaaaggctggtgagttttttacttctgctcagcgcagtgctacagctcagcagagagaaatggaatcacagcaaatgggtgatgaaaccctagaaactcctttattgcgtgagcaagaaaccgcaacagatttatcaaagcaagtgaaattggggtttattactggtcttgttcctagggaaaaatctatggcatttgagaggattttatttcgtgcaaccaggggtaatgtgttcctcaagcaagttcctgcagaggaacccatcacagatcctgtttctggagagaagat

SEQ ID NO: 46110 - DNA, 362 bp, Gossypium hirsutum
  Clone ID: LIB3196-022-P1-M1-B5
gtttcttataaatgggaacaaaaagttttacgataaattagtttgtattcttgtgcgatatacggatcatttgtgtatatatacttttttagttttatatattatttggtattcgagtttgacattttttttaatgtgatgcctatgttattttctggtccaatttgatacctatatttgataaaagtaacgtggtacctatgttaactttttagtgtttaattcaagttctaaggttgatttgatggatgttaattggtaattaggtttgaatatttcatgattttattaatagaataaatttagtgttaattgtaaatttgtttagtttttcatttaatttgtcaaatacagtatgatag

SEQ ID NO: 46111 - DNA, 383 bp, Gossypium hirsutum
  Clone ID: LIB3196-022-P1-M1-B6
atgtttggtggttttcttcctgtttccgcattcagtccttgtggatgatgacggcatcaaagtggtgaaagtcacatttaataagcaagactcccttgtaattctcaccatcatggtaagccttagggtctcattctctgggttatgcacctgccaggctgggacccgggacacttacattcgtttcctgacttgccctgatgtaggccaccctgaaaatcaggaactcgaacttctacccggtggcagtgaccagcttgtccagccagattcagtacatgaacacagtggtcggtacatatgtgactactaacgtctcccttattccacctcggagtgagcaactggtatgctgttcttttaggaaccttgccccacaggcc

SEQ ID NO: 46112 - DNA, 392 bp, Gossypium hirsutum
  Clone ID: LIB3196-022-P1-M1-B7
atcagattagaatattggaagataaagggacaagtactgaattagttagagaaaatcagaaacttaagcagcatttggaagaggaaaagcagaaaaaacacagctttcttagtcaaagagagactctgttggcagaagcaaagatgctaaagagggaactggagagagaacgactagtaactacggctttaaggggggaactccagcagataagtggtagtcaggtacatggcaagtcagattctcccaatgtatacactgaaaaaaaggaaatagcagtcttacgggaaagactctctgagctggaacggaagctaaccttcgaacagcagcgttctgatttgtgggaaagattgtatgttgaggcgaaagatcaaagtggaaaacaagaa

SEQ ID NO: 46113 - DNA, 371 bp, Gossypium hirsutum
  Clone ID: LIB3196-022-P1-M1-B8
caagttcaaggttctgtacaatgcgtaaaatttcatgttgctgagaaaagatcaaagcttaagcttgagctaggtccagctttcaagaagttgaaatttgataagatgggtgaagacgttgcatctgcttggaaggaaggagaacagaagatgttttcgaatatagtgaagtcaaatccttcatcacaacagaaatgtttctgggatgagatctgcaaacattttcgtaacaaaagtagggaagaacttgtttgctattactacaatgtctttcttttgcagcgtagagcataccagaatcgggtcactccaagcaacattgacagtgatgatgaacctgaatctgcattagttgctaaaggcattgggca

SEQ ID NO: 46114 - DNA, 281 bp, Gossypium hirsutum
  Clone ID: LIB3196-022-P1-M1-B9
atctggaggtctccgggagtccccacgcaccaccagggaagcattcgctgggtccagaggttaaacgaagaggcctccctgcgccggctgctcgttcctgtgtgccggtgtcgtgatgctggggagcgctgagactcgcaagcgggacttctgaactgctggggagtcggggggcaggcagacagcgcggacggtgggcaccggcccggccgccaccttgctcacaatctggccacttgggaagaaaacgtatattgtttccccttctctgcatcactttt

SEQ ID NO: 46115 - DNA, 369 bp, Gossypium hirsutum
  Clone ID: LIB3196-022-P1-M1-C1
gccaatcccacttggtgtcacctttgcttgaacccatatcttccttgttgccataacaatgttggcagaaaactcacatactatacaattaaaaataatctaaattgctttttttttaaatatctaaattgagtttaggggtgagcaaaatctgatttaattcaaaaaattttataaaaattttaaattttgaattaaatagttcaagttatttgagttaatcaaattattcggatcaactcgaataaaaatttaagtttttcggtttaactcaaatatgaattacacagttcgagttatccgaaaatccgaataagaaaatgaaaaactacgtcgttttgataaatatttaccttttctaaagttaaa

SEQ ID NO: 46116 - DNA, 355 bp, Gossypium hirsutum
  Clone ID: LIB3196-022-P1-M1-C10
atggcagccggtgtgtggtctcgcgcccgacctccggaggcctagtcgagccgtgacccttcctgccgcctgcaccccaccttgccttcatgcaccttagccggctagcgctattcccattcgtggcgctgtttatcgacaagtgccgaatgatcgctgcctccgatgtgttagaactcacggacgacaacttcgatagtcgcgtatccgacacgggctctgggggcctcatgctcgtggagttacttaccccctggtgtgtacactgcaagatacttgctcctgaatattaagctgcagctacctatataaaaggaatggtcccattagcaaaggttgagtgcactgtcaacac

SEQ ID NO: 46117 - DNA, 128 bp, Gossypium hirsutum
  Clone ID: LIB3196-022-P1-M1-C11
acttagaacgtgcaagcgctgtaccgtccatccggtcccattaccgcccagcgcaagggagcagcactcataggtgtgccaccgaatgcttggggcttttactagaactgttgtttagcttgcatcca

SEQ ID NO: 46118 - DNA, 366 bp, Gossypium hirsutum
  Clone ID: LIB3196-022-P1-M1-C12
cggacgcgtgggctagcttcgatttatctaaaaaacaaggaaagaacacacaaagtaagctttaaaagctactaagacatatacaaataaagtcatcataggaatatttacatatcaattcaaatatgctaagcatagctaaacacatacaagttcacaaacctttcttattaaatacatattcaatatcataattgaattcatcgaaatattcccatttcaatacttgtatgaatctcgtacgtacctaagtcacttagctcatttacacattctttctcgacttgactttgcccgttgaaccattcaaagttaaggatactcggaaatcacataaagctcatataatgccatatcccagatatg

SEQ ID NO: 46119 - DNA, 355 bp, Gossypium hirsutum
  Clone ID: LIB3196-022-P1-M1-C2
cacaattgaagttctgatcggtccggtttaaaaaattatttatattatcattcaagccactttattataaatattggatgcagatcaattaacattaatcggccatacctttgtgtgaaaatatggcccttgtgatagagatttcgcgtatccacactttgtttgcattgaagacttttcatttaactttgtaaaaaataaagccaaccgtggtgcatgtgatacgtcttgtcaaagaagaccgagggctttctctcctactgctcctggaagtgctgatgcagttacacattttgttaataggcagaaatgctacactattcttaattcaaagaattctggccatgtattcggc

SEQ ID NO: 46120 - DNA, 389 bp, Gossypium hirsutum
  Clone ID: LIB3196-022-P1-M1-C3
atagaggcgcaccggggccgccagctggggtcggagcggagcggggtcaggatggacgaggacgtgctgacgaccctgaagatcctcatcatcggcgagagtggggtgggcaagtccagcctgctcttgaggttcacagatgatacatttgatccagaacttgcagcaacaataggtgttgactttaaggtgaaaacaatttcagtggatggaaataaggctaaacttgcaatatgggatactgctggtcaagagaggtttagaacattaactcccagctattatagaggtgcacagggtgttatattagctcatgatgtcacaagaagagacacatttgctaaactggataattggttaaatgaattggaaacatactgtacaagaaa

SEQ ID NO: 46121 - DNA, 386 bp, Gossypium hirsutum
  Clone ID: LIB3196-022-P1-M1-C4
atcagagggtgacgaccgaggagcgtgagcagatcaagaccctcaacaacaagttcgcctccttcatcgacaaggtgcggtacctggagcagcagaacaaggttctggacaccaagtggaccctgctgcaagagcagggcaccaagaccgcgaggcagaacctggagccattgtttgagcagtacatcaacaacctcatgaggcagctggacagtatcgtcggggaacggagccgcctggactcagagctgagaaacatgcatgacctggtggaggacttcaagaacaagtatgaggatgaaatcaacaagcgcaccactgccgagaatgaggtttgtgatgctgaagaaggatgtagatgctgcctacatgaacaaggtggagct

SEQ ID NO: 46122 - DNA, 366 bp, Gossypium hirsutum
  Clone ID: LIB3196-022-P1-M1-C5
aaattttattagtgaaaatcaagaaaataatgaggtgaccgccattgatgagacgagcaagagacaggcaaaaaagaaagcaaaggaagagagggagagtgaaattagagctgctgaggaaagacaattggagaaggatgtaccaagaactactgatgaattcgagaaacttgttaggagctctcctaatagtagttttgtgtggattaaatacatggctttcatgcttaattcagctaatatcgagaaagctcgtgctattgctgaaagggctttgagaaccattaacattcgagaagaaacggagaagctaaatatctgggtggcttactttaatttggagaatcagtatgggaatcctccaga

SEQ ID NO: 46123 - DNA, 385 bp, Gossypium hirsutum
  unsure (1)..(385): unsure at all n locations; Clone ID: LIB3196-022-P1-M1-C6
atcagcctctcacgctctcctcagctctctcatctcctggaaccatggccagcacatccaccaccatcaggagccacagcagcagccgcaggggcttcagtgccggctcagccaggctccctggggtcagccgctctggcttcagcagcgtctccgtgtcccgctccaggggcagtggtggcctgggtggcgcatgtggaggagctggctttggcagccgcagcctgtatggcctggggggctccaagaggatctccattggagggggcagctgtgccatcggtggcggctatggcagcagagccggaggcagctatggctttggtggcgccgggagtggatttggnttcggtggtggagccggcattggctttggtctgggtgg

SEQ ID NO: 46124 - DNA, 78 bp, Gossypium hirsutum
  Clone ID: LIB3196-022-P1-M1-C7
aattggacaaacaaacttatgctatacttgtattaaatgtcttatttatttatacaagtggaactattttatgttgct

SEQ ID NO: 46125 - DNA, 369 bp, Gossypium hirsutum
  Clone ID: LIB3196-022-P1-M1-C8
catagagctcctcgaccgggcgggcgaggtccctgtggacctcctcgggccagctgaatccatgtcctatcctgatcatgagccgccacctcctcctccctttccagcagcactgaaaccaccgcttccgctttataagcagcgatcctggtcacccgacatcatccgtaacgaagcatggcttagaagaaaaggaaagagcaagaaccggcgaagcaagagtgtaacagacgaagaccttgatgaactcagggcttgtattgagttaggatttgggtttgattccctagagatagatcaacgcttgtcgaatactttgccagctcttggtctttaccaagcagttaacaagaactacaaccacaccat

SEQ ID NO: 46126 - DNA, 367 bp, Gossypium hirsutum
  Clone ID: LIB3196-022-P1-M1-C9
gtagatatggcgattaacccttctttgctctttctttcccttctttttctcttcaatggctgcctagctcgccagaccttttcgtcacagcagtcccaaaatgagtgtcaaatcaataggctccgcgcctctgcaccccagacccgaattcgctccgaagccggcaccaccgagtggtggaaccccaactgtcaacagctcaggtgtgctggtgtatctgtaatgaggcagactattgaacctaatggccttgttttgccttccttcaccaatgctcctcagcttctctacattgtccaaggaagaggtattcaaggtatttgtgatgcctggatgtgccgaaacattccaggattcacagcaatgg

SEQ ID NO: 46127 - DNA, 359 bp, Gossypium hirsutum
  Clone ID: LIB3196-022-P1-M1-D10
gtgctagatcaattttaacctaaacactagccacccttgggttttgtacatatgtacatattaggggaagggtgaggattgttcgatttatgtggtaatcgaatttgttaattgtaataatattgaaatggtgggattatgaatctattgtgatacaaaacgcacaagaacactaagaagattgaggtaatgttaaagtgattgggtagcttgcatgtttccaaatatcactgcaagaggtgcaggcattatgatatatgatgtcataaaaatgagaatgtagcattctatatgtactgggtgtttatgaattataagtcatgttatgctggtggaaataatttaagacatgagggaat

SEQ ID NO: 46128 - DNA, 367 bp, Gossypium hirsutum
  Clone ID: LIB3196-022-P1-M1-D11
tgagccaagaagccacttcttcaagggagaaaagtggcgagagattcgccttcaacttattgtaccaaacccctcgctactccaaccaaaacggccggttctatgaggcttgcccacgtgaattccggcaactcagggacatcaatgtcaccgtttcagccttgcaattaaaccaaggatcaatctttgtgccgcactacaattcaaaggctacattcgtggtccttgttaacgaaggaaatggatacgttgaaatggtttctcctcatcttcctaggcaaagctcatttgaagaagaagaagaacaacaacaggaacaagaacaagaagaggaaaggagaagtgggcaatacaggaaaataaggtc

SEQ ID NO: 46129 - DNA, 366 bp, Gossypium hirsutum
  Clone ID: LIB3196-022-P1-M1-D12
cccacgcgtccggcgacaactacttattgaaattgttctaaggagcaggttgacagctcttatggttgatggtgacacgacgtgttgggttctggagcaggaacttcttcgttcttatggggttcaaactttaggtgtcgacaacggcagggatgcaatcgacctcattgcatccgatgcagcattcaatctcatcatcatcgaaaagattcttcctgtcctgaatggccttgaggtaacaaggcagatttgtgaaatagggatgcgttgtaagatgttggcggtcacagcttattcgggagaaagtgaaaggcaggcatttctggcaactagtgttgatgtgttcattgagaaacctttggatct

SEQ ID NO: 46130 - DNA, 381 bp, Gossypium hirsutum
  Clone ID: LIB3196-022-P1-M1-D2
atagttcctattcatacgttttattgaagttctgattggaccccttcagaaaattttttatattattattcaagttactctcttatttatattgaatgcgcattttatccattaatgtttcatactttctgagagtataatacccttttaaaagatatttggtgtatcaacacttttcctggattgaaaactttgtttttaactttttaaaatttgggccaccctctatgcatgtgtctggtcatgttaaagaggaagaaaggatgtgtgttatactgtacctgcgaatgctgatacagttacaattcatttgacaaggttgtaatgctagaatatgcttaattaaatgaaaactgggcatgactacagccagaattgcta

SEQ ID NO: 46131 - DNA, 206 bp, Gossypium hirsutum
  Clone ID: LIB3196-022-P1-M1-D3
atgcatgtgactcaggggcgtcctattttgatgatgcatgccgcaagctgatctaagtcgctggtactatagatgggctatatgttgtgtgtatgatgaagatgccttcaacagttgctattgctcatggactgaatataatgcagtgtttgaagaacatgctggtgttggacatgcgaggcgtaaccagtgatatgattcacttc

SEQ ID NO: 46132 - DNA, 369 bp, Gossypium hirsutum
  Clone ID: LIB3196-022-P1-M1-D4
ctcaaaaccttcattccatcccactcaccccgaacaacctctctgcaccaacatggggaaaacacgtggtatgggagcggagcgcaagctgaggacccaccgcaggaggcagaggtgggctgataaggcatacaagaagtctaaccttggaaatgaatggaagaagccatttgccggttcttcccatgctaaaggaattgtccttgagaagataggtatcgaggctaagcagccgaactctgccatccgaaagtgtgctagagttcaattgatcaaaaacggcaagaagattgctgcttttgttccaaatgatggttgcttaaactacattgaagagaatgatgaggtgttgattgctggatttggacg

SEQ ID NO: 46133 - DNA, 368 bp, Gossypium hirsutum
  Clone ID: LIB3196-022-P1-M1-D5
gcgagagaaacaaaatccgaagggaatcccaatttcttcgctcttcatttctcccgattccatttctccgtttttttcacctccggcaatggctaccaaatctgattctttcaaacaatcccttctccctagcttcctttactcttcttcccccaactcattctctctggatcggctcctcaacgccaacagccctgctttctctgcttcgcgctccactatacccgatgctcctgcggcctcttcctcgccatcgatcaaggcgagaactttcatgatcccctcccccaatgagcccgggaagaagatcgagatgtattcgcctcagttctacgctgcttgtacctttggcggtatccttagctgtg

SEQ ID NO: 46134 - DNA, 370 bp, Gossypium hirsutum
  Clone ID: LIB3196-022-P1-M1-D6
tggaaaggagcccaacaagggtgttaacccagatgaagctgttgcttatggtgctgcagtacaaggaggcatcctgagtggagagggtggtgatgaaacgaaagatattcttctccttgacgtggctccacttacccttggcattgagactgttggtggagtaatgaccaagttgattcctagaaacactgttatcccaaccaagaagtcacaagttttcaccacttatcaggaccagcagactaccgtctcgattcaggtctttgaaggtgaaaggagtctcacaaaagattgtaggttgttgggaaaattcgatcttactggaattcctccagccccaagaggaacccctcaaattgaagtcacattt

SEQ ID NO: 46135 - DNA, 360 bp, Gossypium hirsutum
  Clone ID: LIB3196-022-P1-M1-D7
gctgtgaaatcaacaatggaggatgttggagagaaacacgggaaggaaggacatactctgcttgtattgatgatcattcacatggttgcaagtgcccatacggattcaggggtgatggagtcaagagctgtgaagatgttgatgagtgcaaggagaagctggcctgccaatgtcctggttgcaaatgcaaaaatacctggggcagttatgagtgcagctgtagtggtggttcattgtacatgcgagagcatgacacatgtatcagtaagaatgttaaaacagaggtaagctggggctctgtttgggtaataattcttggattggttgctgctggagctggagggtatgccatttacaaat

SEQ ID NO: 46136 - DNA, 366 bp, Gossypium hirsutum
  Clone ID: LIB3196-022-P1-M1-D8
cggcaaattttgtgtattttgtgttttatgtaatagggactaaattgcaaaaaatgtaaatattaggggtaaaatggtaattttaccatttatgtgtttttgaaataagttgaatgtaataatatttaatttatctcattttgaatatatttagatcaagaaccaaagaaatcggagttagatcgaggaaaagttaaagtcatcgactaatcgtccggtttcgattttacactgtccgaggtaagtctattagctatttaatgtcataaaaatcagtatataggtatgtatatgtgctgtatttttatgaattataatttaaaatatgttggttgaaataattaaaagtatgagtgaattatatgc

SEQ ID NO: 46137 - DNA, 368 bp, Gossypium hirsutum
  Clone ID: LIB3196-022-P1-M1-D9
cggacgcgtgggctgcaagagcaaggagtgcaggaagcacactttgcacaaggttacacagtacaagaagggcaaagatagtttggctgctcaagggaagcgccgttacgatcgcaaacaatcaggttatggtggtcagaccaaaccagtgttccacaagaaggccaagaccaccaagaagattgtgctgaggctgcaatgccagggttgcaagcatgtatcccaacatccaatcaagaggtgcaagcattttgaaattggtggcgacaagaaggggaagggaacatctcttttctaaatggtgtttatttatttcatgtcatgtcatggttgtgggaaccttttaagacagtattgaatttttggtt

SEQ ID NO: 46138 - DNA, 385 bp, Gossypium hirsutum
  Clone ID: LIB3196-022-P1-M1-E1
atgagcaatgcacggagtggacctgtaggcgacttgcatcatcttcaacatgaagatagccacagtgtcagtgcttctgcccttggctctttgcctcatacaagatgctgccagtgagaatgaagatcaggaaatatgccatgaatttcaggcatttatgaaaaatggaaaactgttctgtccccaggataagaaattttttctaagtcttgatggaataatgttcatcaataaatgtgccacatgcaaaatgatactggaaaaagaagcaaaatcacagaagagggtcaggcatttagcaagagctaccaaggctactgctccaacagagctgaattgtgatgattttaaaaaaggagaaagagatggggattttatctgtccc

SEQ ID NO: 46139 - DNA, 385 bp, Gossypium hirsutum
  Clone ID: LIB3196-022-P1-M1-E10
atgtcagggggaaggctgggggtgcagtttggggagtggagtgctgggcctgggctctccctgtgccctccggggggcatccaagaagtgaccattaaccagaatctgctgaccccactgaagattgagatcgacccccagttccaggtggtgcggacgcaggagacccaggagatcaggaccctcaacaaccagtttgcttccttcattgacaaggtgcggttcctggagcagcataacaaggtcctggagaccaagtggcacctgctgcagcaacaggggttgagtggcagccagcagggcctggagcctgtctttgaggcctgcctggatcagctcatgaagcagctgcagcagctccagggagaacgaggggctctggatg

SEQ ID NO: 46140 - DNA, 379 bp, Gossypium hirsutum
  Clone ID: LIB3196-022-P1-M1-E11
atggccgctcggtgtagggggcttcgagcgccagaaatggcttctcagcgagggacacccaactccgccgcgtgggcgctggcagacgcctgcagcatgggtttgacagccgctgccgacacgaggtacacggcggacgcggtaacagctgacggcacctactacctcgagcacgtgaccataactgaagcatctgacgatgactatgaatatgaagagataccagatgataattgtagcatcccagaccgggtagaacatctgcgctaagcacttgacatcgcccaagaacacgctacacatactgaaatcttggaacgggaaacaggcgttgcttgaaagcatgcagtacctgaagtcatagcatacttcctctgca

SEQ ID NO: 46141 - DNA, 387 bp, Gossypium hirsutum
  Clone ID: LIB3196-022-P1-M1-E12
atcttggctcgctgtgtggcggctcggcggttagcagggagttcgctgagcgtctctgcctagccgcggtcatgagccggcacagccggctgcagcggcaggttctgagcctgtaccgcgatctgctgcgtgccggacgcgggaaaccgggcgccgaggcgcgagtgcgggccgagttccggcagcacgcgggcctgccgcgctccgacgtgctgcgcatcgagtacctgtaccgccgcgggcggcgccagctgcagctgctacgctcgggccacgccaccgccatgggcgccttcgtacgcccgcgggccccgaccgaggagcctggcggcgtgggttcccagcctgacgacggcgacggtccaaggaacccccacgacagcacgg

SEQ ID NO: 46142 - DNA, 256 bp, Gossypium hirsutum
  Clone ID: LIB3196-022-P1-M1-E2
attctcaatcctgctctcaccatgagcctccgcctgcagagctcctccgccagctatggaggtggttttgggggtggctcttgccagctgggaggaggccgcggtgtctctagctggtcaactcggtttgtctctgggggatcagctggaggctacagaggcggcgtgacctgtggctttggtggaggggctggtagtggctttggaggtggctacggaggtggcctaggaggtggctttggtgcgggttatgcct

SEQ ID NO: 46143 - DNA, 366 bp, Gossypium hirsutum
  Clone ID: LIB3196-022-P1-M1-E3
cccacgcgtccgcccacgcgtacggagaaaaaaagggaaaacacaacaaacatgggcagaagtggtaacttgaaaaatgctatagtagcatttcttgttcctctcccttcaattctcttctatctttttttccttgaccatttccacagtaatagtagttctctttcttctctttggtcgtggtgcttccatcaccctctcctattagccaatgtcttctttttcttcaatgtcaacgtcctcttctggatcatcggtcacatccaatccagcaactggatgattgatttgtattggactgtgataccggtgttgctaattcattactatgcaacccacccttcggcgcaatttgatgggttgaga

SEQ ID NO: 46144 - DNA, 388 bp, Gossypium hirsutum
  Clone ID: LIB3196-022-P1-M1-E4
atcgggcactgatgactctgcaacagaaaatgacaccatcttcccaggcaaaagcaacatctggttgaccatgattttaatccagaacttcctcataaaatgcatgaaggactttgatcgtgaatttttttaggtgttaaatatatacaactgattaaattattgtatataaaccagaagcaggacccttatccgggtttgaccactttttatacatgttcatatgcatatggcagcaacaagagaaccctacttttcttcttcccatcaccagaaacatcttttcagggaatcgggggggtctataaaaacagcaatagaaattaagcataaagcatcaacctcgtagcaactgagtagcccttccattataaataactatgagagt

SEQ ID NO: 46145 - DNA, 349 bp, Gossypium hirsutum
  Clone ID: LIB3196-022-P1-M1-E6
gagccaaccgagcttgcaatccaagaaaatgccaacgggctagctatgtatgctgccatctgccagcaatgtggccttgtccccattgttgagcctgaaattcttgttgacggatcacatgacattaaaaagtgtgctgcggtgacagagcgtgttcttgctgcttgctacaaggctttgaatgatcaccatgtcatgctagaaggtactcttttgaagcctaacatggtgacccctggttccgactccccgaaggttgccccagaggttattgctgagtacactgtccgtgccttgcagcgtaccgtccctgctgcagtccctgctattgtgttcttgtctggtgggc

SEQ ID NO: 46146 - DNA, 356 bp, Gossypium hirsutum
  Clone ID: LIB3196-022-P1-M1-E7
cggacgcgtgggaaggcatggcatgggccgcccttaggcactagagacatagttactagccaccttacttcattgccttatctccacggattttccggtcgactttgtttgaagttgctcaattctgggggtgacgaaagctggattccattttttcttttttgtctttaaatatattttggtagctggaaaatagtttcatgcgctcagttgctgcataaaaggcgttttttccagggtgtaattgtagttgggaaaaatcaactctttgttcggaggggaactcatcaattcatctgccaataacactggcattatgaaggttcctgggatttgagttttcttctttgtgatcg

SEQ ID NO: 46147 - DNA, 381 bp, Gossypium hirsutum
  Clone ID: LIB3196-022-P1-M1-E8
atccaagatgctggatgccgaagacatcgttggaactgcccgaccggatgagaaagccatcatgacttacgtgtctagcttctaccacgccttctctggagcccagaaggcggagacagcagccaatcgcatctgcaaggtgttggccgtcaaccaggagaacgagcagcttatggaagactacgagaagctggccagtgatctgttggagtggatccgccgcaccatcccgtggctggagaaccgggtgcccgagaacaccatgcatgccatgcagcagaagctggaggacttccgggactaccggcgcctgcacaagccgcccaaggtgcaggagaagtgccagctggagatcaacttcaacacgctgcagaccaagct

SEQ ID NO: 46148 - DNA, 444 bp, Gossypium hirsutum
  Clone ID: LIB3196-022-P1-M1-E9
ccaactaacaagagggaacgctgaagcacgcgggtgcccgcgccccggtatccggggtctcgaactcacagcgctctcacgactctgtgacagggcactcttagtggttctgagaatccatgagccgagccacatctcagcacagacatcaaggatgccacaacgacctagactgcagagggctataagctgctcggtatcagcgcagagcttacaatgggagtcagacctggtcctggcgtttagacagacgtcctccgacgtgccagaatacaggtggcggtgcgcgagactgaagtggtgcatcgtggacgagagctggtcttcggcagctcggagtactgtatgagactggggggcatccaagaggatctccatacgaagggggcagcctggccatcgaatgggactctcgctgcagagccgcatgcagctctggctttg

SEQ ID NO: 46149 - DNA, 384 bp, Gossypium hirsutum
  Clone ID: LIB3196-022-P1-M1-F1
atctctgaagctcaagggcatattcatctgcttctccatgctgaaggctgctctcagtgggagttacgtcaattttggagtctttcgtctctatggagatgatgccctggacaatgctctgcataccttcatcaagctgctcctctctattccccacagtgatctcttggattaccccaagctcagccagtcttattattcactactggaagtcctgacccaggaccatatgaactttattgcaagcctggaacctcgtgtcatcatgtatattctctcttccatttctgaaggacttactgcacttgacaccatggtgtgcacaggctgctgctcctgcctggaccatattgtaacatacctcttcaagcagctatcacgtag

SEQ ID NO: 46150 - DNA, 368 bp, Gossypium hirsutum
  Clone ID: LIB3196-022-P1-M1-F10
gatatagagaaataaggaaacaagcatccgagtatgatgataaattgttaaatttatggttgtttggttgattagagttgtgaatattgagatacctaaggataacctaaggcgttgtttggtatatacccagactaaaaagctaaccctattatttatctttagtacctatttttgagcaagaaaacacttcttgatgaaccttcttacaaaacctaagccaaaatataaacttgtacttaccctttttttttgggtcctaaactgcacgactatagacgtctcgccatatgtattgagggttaagtaaatacattatggtggattttgtaaaaatagagtgaaataggagggatcagtgtgatata

SEQ ID NO: 46151 - DNA, 365 bp, Gossypium hirsutum
  Clone ID: LIB3196-022-P1-M1-F11
acgcccacgcgtccgatctgctgtgattgaggagcagaagcaaataatgcaaaagcatggaagcaaggttgatcatgatatcttatctgagatggacaccttgtatcggtgcattaaggaagctctgagacttcaccctccactgattatgcttgtacgtagttcacacagtgattttagtgtaaaaacgcgagatgggaaagaatatgacatcccaaagggtcacatcgttgcaacatctacagcatttgccaacaggcttccttacatttacaaggatcctgacacatatgatcctgatagattctctgttgggaggggagaaaacaaggtagctggggctttctcatatatttgctttggag

SEQ ID NO: 46152 - DNA, 360 bp, Gossypium hirsutum
  Clone ID: LIB3196-022-P1-M1-F12
atgcccagtgagatcaaagactacagtccctacttcaagaccatcgaggacctgaggaacaagatcattgcagccaccattgagaatgcgcagcccattttgcagattgacaatgccaggctggcagccgatgacttcaggacaaagtacgagcatgaactggccctgcggcagaccgtggaggccgatgtcaatggcctgcgccgggtgttggatgagctgaccctggccaggaccgacctggagatgcagatcgaaggcctgaaggaggagctggcctacctgaggaagaaccatgaggaggagatgcttgctcttcgaggtcagagcggtggagatgtgaacgtggagatggatgcc

SEQ ID NO: 46153 - DNA, 369 bp, Gossypium hirsutum
  Clone ID: LIB3196-022-P1-M1-F2
cccacgcgtccgcgtaatttgacattccgtacagggacatttccgtcaataccggccaaggtatgatacagcgaaagattagctcctgagagctgagagaaaaaatgagggagtatgtgaaaacaaaccttggatctggaaggtgcggctagtggggagcgtaagacttgtttactggtctcttcaaagccatcggcagcggaaggagatgcagcgccgccgccaccactccaagaaaggggcgtagtggggctacgtctagtgctaacgttgaaatctccgtctctcttggcgtcacaccgcatcaacatagatttagacctcggctgacgtatcccccatttaagtgcaaccaccgcagatttcgga

SEQ ID NO: 46154 - DNA, 381 bp, Gossypium hirsutum
  Clone ID: LIB3196-022-P1-M1-F3
tgcgttccatggttcaaaatttggtccacaacttccggagcctttttgttggggaaaatcccaaaaaccgggccttcttgaaaactgttttgacccaatttattgggaaattctttggattagaggcttccttagaaaacaaatttacaaacatttccctaaggttatatatgaaaacagacattttaatggtgttgctgaacttcttgaaatattaggaagtattatcaatggctttgcattgccctgaaagcagaacataaacaatttctaatgaagggtcttattcctatgcatactgcaaaaggattagctttgtttcatgctcagctagcatattgtgtcgtacagttcctggagaaagatacaacacttacagag

SEQ ID NO: 46155 - DNA, 314 bp, Gossypium hirsutum
  Clone ID: LIB3196-022-P1-M1-F4
aatggcgcaagtacttaacgttttattccttaacatagaaagacaaaaaaggcactcaaaaagttcatacaagttattgcactacaaaacaggggtctccatactttacataggtcaccatttttatttcattacatgcctgcttaaaacttgaaaatgtcacatttgtacgtaaacacgagactatgtggatattattggctttaactttgtatttaaatgcacgctgtctatgttgagtcacgaaggaagacatttgtatgcatgctgcgaatagattatccacgaaccatgctgacatcgcatatggcgac

SEQ ID NO: 46156 - DNA, 390 bp, Gossypium hirsutum
  Clone ID: LIB3196-022-P1-M1-F5
atcgagctgtgaggggattcacttgtgtgcggaattcctcggaactatggcgtccctttcccttgcacctgttaacatcttcaaggcaggagctgatgaagagagagcagagacagctcgcctgacttcttttattggtgccatcgccattggagacttggtaaagagcaccttgggacccaaaggcatggacaaaattcttctaagcagcggacgagatgcctctcttatggtaaccaatgatggtgccactattctgaaaaacattggtgttgacaatccagcagctaaagttttagttgatatgtcaagggttcaagatgatgaagttggtgatggcactacctctgttaccgttttagcagcagaattattaagggaagcagaatc

SEQ ID NO: 46157 - DNA, 301 bp, Gossypium hirsutum
  Clone ID: LIB3196-022-P1-M1-F6
atgcgactggcccctgggctgcctctccccatggcttcatgctgactccataaacattctctgttgaggatgtccagtcagggcttgacaggcccaggctcagcttccagtggttgggaaggttccctgtagcacctgtgctccagcagggagagctaggcagaagcagcgagggggcccagctggtgggactccagccccctcccactcccacactcactcttgcagagccttgtgtctttaagcagctggcgtgttacatctctatttaaggtttccttcgaataaaaggtctgtgact

SEQ ID NO: 46158 - DNA, 351 bp, Gossypium hirsutum
  Clone ID: LIB3196-022-P1-M1-F7
tgaaccttctttttagcattatatatttcttttcagtcgtgcatttggaaattgtagtattgggaactttttatttcaagcaagaagattagcttaacattttgatatgaaagaagtggctgaagtgttgaatttgcttgttcttttagactgaatggtgtttgtctccttctcggtttgccgtggatctttttaggcgaactaattgaaattgaaagctttgatgagatagttgaatcagttataattccttgattatattttgcccttgtggacttcattcatgtaaattgggactaaacaagaaccttcctttggatgcattttaatggtgttaccaggtatttgaga

SEQ ID NO: 46159 - DNA, 365 bp, Gossypium hirsutum
  Clone ID: LIB3196-022-P1-M1-F8
ggtatcggcaaaggatttgcctttcaactggctaggaaagggcttaatcttgtcttggtgggccggaatcctgataaactcaaagacctttcccattcaatcttggcccaatatgcccagattccgatcaagacagttgttgtggacttcactggcgatcttgatgaaggcgtgaagaagataaaagaaactattgaaggactggatgtgggggttttgattaacaatgttgggatttcatatccttatgccaggttcttccacgaggttgatgaggagctgttgatgaatttgattaaagttaatgttgaaggtaccacataggttactcaagctgttttgcctgggatggtgaaaagaaagag

SEQ ID NO: 46160 - DNA, 217 bp, Gossypium hirsutum
  Clone ID: LIB3196-022-P1-M1-F9
attgcagacccacatctcagacacatccgtggtgctgtccatggacaacaaccgcaacctggacctggacagcatcatcgctgaggtcaaggcccaatatgaggagattgctcagaggagccgggctgaggccgaatcctggtaccagaccaagtccgaggtgctgcatatcacagcggcctgacatggggatgacctgcgcaacaccaatcatgag

SEQ ID NO: 46161 - DNA, 385 bp, Gossypium hirsutum
  Clone ID: LIB3196-022-P1-M1-G1
atggcacgtggtgcggaaccggcgccgcgctttctgctgaaccttcaagatctgcggtctgggctttggttgaaagatggcggccctcacgaccctgtttaagtacattgatgaaaatcaggatcgctacattaagaaactcgcaaaatgggtagctatccagagtgtgtccgcgtggcccgagaagagaggcgaaatcaggaggatgatggaggttgctgccgcagatgttaagcagttgggcggctctgtggaactggtggatatcggaaaacaaaagctccctgatggctcggagatcccgctccctcctattctgctcggcaaactgggctccgacccacagaagaagacggtgtgcatttacgggcacctggacgtgcag

SEQ ID NO: 46162 - DNA, 302 bp, Gossypium hirsutum
  Clone ID: LIB3196-022-P1-M1-G10
cttctttaacttttcaaatgatttctattagtcccaaaatgttttcaagggaactttaaatttagaatttagggacaaatcgcattttaatgattgaattagaatatgcatatgattacttatgaattggttgttaaatgctttgattagtggtaatattccgtaaccctactccggcgacggatacgagtttggggtgttacataacaaatgtgataatatgtgatccaaagactctttgacatcatcttaaactcttaatccaatatcttcctccacccattatctagttaccactatca

SEQ ID NO: 46163 - DNA, 374 bp, Gossypium hirsutum
  Clone ID: LIB3196-022-P1-M1-G11
atgccgctcccagtcaggctgtggggtctgaccgcctggagcttctgaggttccccagggcgcccacacgtgctcccagccaggctgtggggtctgaccacctctgtcctgggctgtgtccaagaatcaggtgcccagtgggtcgggatgacagtgccaggagtcctggatgggcaccctgctcccatcatcccggaggtccggcttcatttctagctgggggcggggcctgtgactgccagctccagagccctgtagggagctccctgggagggcacggcaggactggcaagggagaggcctgggaccatcccagagggagccttatgcccagagacctgtcccacatctgctgaggtggagcaagccatggt

SEQ ID NO: 46164 - DNA, 372 bp, Gossypium hirsutum
  Clone ID: LIB3196-022-P1-M1-G12
cttaaaacttactaagcattgtaatgcttactccgtttactttgtttcctctgttttatagatctcatttggaagctacaggctcggggatcgtcagcagctagtcacactatcactatccactgcttgttactgttatgctttgaattattttatggcatgtaaagaatagaccagtggtcgaagaatattttggttaatgtatataagccatgcgaaaatggcatcttttgaatgtgtgcttataaaagttaaaattgtatccctgactgcctttagtatttacctaaagggatgttctttataaaaaagatatttcaaaatttttactgttctgatatgagtttcaagtgcggtaatgcccatttacct

SEQ ID NO: 46165 - DNA, 379 bp, Gossypium hirsutum
  Clone ID: LIB3196-022-P1-M1-G4
atccggagatcaagtgagtctaggcgctgcatcttacatccaggctacatatgcgctgaggcacatgaacagcagctgcagcccctaatgttgttggaggacctacaggttgatgcggagaccattggcactctttcacacgcgggacctgtatagcattatccaccagtatggagaagttgtacagcagcctgttccagctgagctcgcacgtggaggcctgggcctgaccatctatgctgagccggagctgggaatgcgaagccatgcctgcagatgcggtcactgaactagcgcttgcaccagcagcagggtgacaccgaggacaagcggaggcctcaacctgaaatcatccgagagatagaggcacgactgattg

SEQ ID NO: 46166 - DNA, 87 bp, Gossypium hirsutum
  Clone ID: LIB3196-022-P1-M1-G5
aaaaaaaaaaaaaaaaaaaaaaagaaaaaaaaaaaaaacgcagacgagaaaaaaaaatctatcccaggctcggtccacctgcaggcc

SEQ ID NO: 46167 - DNA, 369 bp, Gossypium hirsutum
  Clone ID: LIB3196-022-P1-M1-G6
cggacgcgtgggtaatctctcttctgctttgtcgccacgatttcagcttcagatcgcttctatttcttagcttgaagctaatactgcagaatgggcacggaaaagactcacattaacattgtcgtaattggccatgtcgactctggaaagtcaaccaccactggccacttgatctacaagcttggaggtattgacaagcgtgtcattgaaaggtttgagaaggaagctgccgagatgaacaagaggtcattcaagtatgcttgggtgcttgacaagttgaaggctgagcgtgaacgtggtattaccattgacattgccctgtggaagtttgagaccaccaaatattactgcactgtcatcgatgcccct

SEQ ID NO: 46168 - DNA, 320 bp, Gossypium hirsutum
  Clone ID: LIB3196-022-P1-M1-G7
ccgcgcttggcttcagcggcctttggcgtaatgttgcgaggtttttaagttcactttcagtcgttcctttggtatctctagttggttttgggctttacgaatttggctttcctggggttgccaaatgtgtggagattggactgactcagctaattcttatagtatttgtctcacagcacgcgcctcatgtgataaagtctggaagaaatgtctttgatcgatttgctgtcttgttttcagtggtgattgcttggatttatgctcatttactcactgtgggtggagcttataatggttcagcaccaaaaacacaaacaagc

SEQ ID NO: 46169 - DNA, 366 bp, Gossypium hirsutum
  Clone ID: LIB3196-022-P1-M1-G8
catgtacaaaggggagaacgaatttagaaggtacatgcttccattcatgaaccagcccatcattaaagctttaattaagagagatacatgacccatgcacctagcatttgtccaagaggggttggatatgaattgaagatgcacattcatggaacaaggaagctttcttattggttaagcatgcattgatacggccacgcctcgggcacacttttggaccagctccctaagcattgcttgcaaatccatgcaagctgaaatagttcaatttcttttcgttgagctccgtttagctcgtttccagctcactcgagctcaagtcagctcaatcgagctcaatttagcttctttccagctcgttaattt

SEQ ID NO: 46170 - DNA, 364 bp, Gossypium hirsutum
  Clone ID: LIB3196-022-P1-M1-G9
ggaaaatcctcagtcatacttacgaatcttcagccgtgaaattcttgaggctgtcttcaatacacgaagtgagcagctagacgagctgtttggtgggaggcaaagccatcgaaggcagcagggacagggaatgttccgtaaagccagccaagaacaaataagggcattgagccaaggagctacttcaccaagggggaaaggtagcgagggatacgccttcaacttattgagccaaacccctcgctactccaaccaaaacggccgcttttacgaggcttgccctcgtaatttccagcagcaactccgagaagtggattcctccgttgttgccttcgaaataaacaaaggatcgatcttcgtaccg

SEQ ID NO: 46171 - DNA, 343 bp, Gossypium hirsutum
  Clone ID: LIB3196-022-P1-M1-H1
gagatatgtgaaaatgtgttcataacaagttggaaatttgaaatgtttgaatcaatatgcgtaaagctatactgttgttgaatatgtatttgcttgagagtcaaaagtttagaggctttacaatcttcgcccccttaccagaacagagttataccatgagattcttgagagatatgttgcataagcttgcaaaagtgaaacttaaaagtattataatggaatagtatgggattagtgaagacagaattagttagaggaataatgtccgacttgcactgatgtttgagtatgtcggattcaatcaaataaaagtgatggctatctttctcttctaagagttcta

SEQ ID NO: 46172 - DNA, 372 bp, Gossypium hirsutum
  Clone ID: LIB3196-022-P1-M1-H10
cccacgcgtccgcatacccaaaaaccaatctaaaatggcttcctctaagcttagaagctccttttccttcctaaatcttctcctgtcatccttgaacttcatcctctttatcctctctgcagcctctcttgctcccattatcctcctcaaaatgccaccaacttcactgggtgtagccttcctcatggtctcctccatctcccttctttcctccttcctgggcttctactctcagctcacccacttctgcttcataacccatgtttcactcctcatcgcctccttgatcggccaagttttaagcgtactatcattgtttacaagagagaaagctagtctctcgatgctgaaatctccgcgggacattaaaga

SEQ ID NO: 46173 - DNA, 369 bp, Gossypium hirsutum
  Clone ID: LIB3196-022-P1-M1-H11
cccacgcgtccgcactatttgggaaaggaattggtccaaaacctgctggttcttcgttttgcaaatctcttcttcttacccctttggaatcttgacaacattgataatgtacagattgtgttcagagaggactctggaactgaaggtctaggtggatattttgatgaatacagctgtgtttgatatcatatattttgcctagcatcttgtatgtgacttctatggtacagatttgcttattagttcattttccttttgcgctctttgtgcagcattatccgcgatattatccaaaatcacctgttgcatgtcctttgacttgttgctatggagaagcctgtatctctcatacctgatcgcattcgtgat

SEQ ID NO: 46174 - DNA, 283 bp, Gossypium hirsutum
  Clone ID: LIB3196-022-P1-M1-H12
agaacaagtttgtacaaaaaagcaggcctggcccgtgccggtacactggaatttccgggatcccagcttcctagctgtgggaccttaagcaacttgtagcccctgtgaagctgttttctcaactgtgaagtggacgcaccctacttcattgattctaagaggcacgcatttccacctggtgacttctctgaaattgaggtgcgtctttcagtcagtggcgtctcatagtcgctgtcagccagctggtattcgagatggagtcgtggaaaacccggggacacct

SEQ ID NO: 46175 - DNA, 363 bp, Gossypium hirsutum
  Clone ID: LIB3196-022-P1-M1-H2
ggaccaccatagctgaaaaagaaaaagaagggatgggagttttaggcaaagtggtggatgggattctattgctaacattcgtgtccatgtcggtggtgccagcgtgcttggacgcccaggtacttttgcctaaagcgcttttccccgatgtgctgggtcgtgtatattcatggtatacgaccacataccaagattatttgctgttggatgagcctcattttttcatggcacttatgaaattggagcttgttttagtattgccgcttgctatacttaacacttatggcttgttgacctccaagccctggttcaacaccacctgcctcatcttcggttctgctcttgttacctccacgacagcta

SEQ ID NO: 46176 - DNA, 383 bp, Gossypium hirsutum
  Clone ID: LIB3196-022-P1-M1-H3
atgcgcgcctaggctgccgcccagcgccctcaccgcggccatgcccgggccgtagagcgcctgccgcagcccgcgccccgcagccccgcagcctcgcgcccgccgccgcctcttcaatgggcaacctgctcggcggggtcagcttccgcgagcccaccaccgtggaggactgcgactccacctggcagaccgactcggagcccgagcccgaggagccagggccgggcggcggcagcgagggcccggcgcaggagcccgagcagcccgcgcagcccccggagcgagccggtggccggtcccactgcagccccgcgccggacgaggacgccgaggcggcgggcgcctagcatggcggtgatctcactgaagcaacagtctaacca

SEQ ID NO: 46177 - DNA, 392 bp, Gossypium hirsutum
  Clone ID: LIB3196-022-P1-M1-H4
atcaaccctgcttgcctccactttgggggcatggaaggtgacagtgctgctgatagaagtggctttctaatccctaggagacagcttctcaagtagaatcacaaagctagaaaaggcctcagcaacttctgtatagatgaggaaacgggggtgcagaaaggctgtgagatttgcttaagatcacacaggatcagaaccctagcctctgctcacttgttcttccaccccatgccgtctctgtaagtctgctgtttgattcttgaattccagaccctaaaaagtcagccagtcgccctgggagtcgggctgggagtcgagccgggagtcgagccagcagccggcgaggaagcgatgcctctgactttgacctcttagagacacagtctgcttgt

SEQ ID NO: 46178 - DNA, 391 bp, Gossypium hirsutum
  Clone ID: LIB3196-022-P1-M1-H5
atgggggatcagctggaggctacggaggcggcgtgacctgtggctttggtggaggggctggtagtggctttggaggtggctacggaggtggccttggaggtggctttggtgggggttatgctggtggctttgttgattttggtgcttgtgatggtggcctcctcactggcaatgagaagatcaccatgcagaacctcaacgaccgcctggcttcctacctggagaaggtgcgcgccctggaggaggccaacgccgacctggaggtgaagatccgtgactggcacctgaagcagagcccagctagccctgagcgggactacagcccctaccacaagaccattgaagagctgcgggacaagatcctgaccgacactattgaaaacaaccgggt

SEQ ID NO: 46179 - DNA, 273 bp, Gossypium hirsutum
  Clone ID: LIB3196-022-P1-M1-H6
atgcgacggaacgtcccatgcgcagcctggagtcagagtcacagccaggggcgcgccggcgaccagtccagaggggcccacggacccgctccgcgctccaggtcggccgtcccatgcgccgcaccccgcagcccccatggcctggctggctccacctgctgccagggaagaccctcggcctgagagccgagtgctgctgggaggtggccgggcgcggccgggctgtgctctgggaaccgccggggtcggcgcgctggctcgaccacgctcctg

SEQ ID NO: 46180 - DNA, 380 bp, Gossypium hirsutum
  Clone ID: LIB3196-022-P1-M1-H7
atcggagacacgcggcggtgtcctgttgaccatggccgactacctgattagtgggggcacgtcctacgtgccagacgacggactcacagcacagcagctcttcaactgcggagacggcctcacctacaatgactttctcattctccctgggtacatcgacttcactgcagaccaggtggacctgacttctgctctgaccaagaaaatcactcttaagaccccactggtttcctctcccatggacacagtcacagaggctgggatggccatagcaatggcgcttacaggtggtattggcttcatccaccacaactgtacacctgaattccaggccaatgaagttcggaaagtgaagaaatacgaacagggattcatcacag

SEQ ID NO: 46181 - DNA, 378 bp, Gossypium hirsutum
  Clone ID: LIB3196-022-P1-M1-H8
atgcagtttgggacttacgaagtagtctgttggatagtttagttctcaagattctcaaggctaagtagaaccagatccaagcattagtgatttgaggatgatccttggcgtttgtaaacaactttatgagattgctttcctagtttcctcccactccataatctctccactacttcctggttccctgggctccctttcttggttggtcctctggccagaaacttggggatctagttactctactctgttgctatttcatacctttatgactgggcctgcattctgacccatgtggagggggtacagagagaaaaaaaagcaacagggttgctgtacccttttaaaaccataactcgaccaaacagaaatattcccctc

SEQ ID NO: 46182 - DNA, 267 bp, Gossypium hirsutum
  Clone ID: LIB3196-022-P1-M1-H9
cggacgcgtgggtgacacctccatgcagcatattcaccaatccttctaagtctgctgtgataatcattcctgcaaatattggtcagtttttgtgcccagtcttacttagtgcgtgatttttggtgtttctggcattatcgtttcttttttgggttggagtttgttaaaaacccaaactaccccttcatgttgtgtgtgcctatggttaaaacatgattaataggtgagaaagttttagcctaaaaaaaaaaatataaataaataaaa

SEQ ID NO: 46183 - DNA, 385 bp, Gossypium hirsutum
  Clone ID: LIB3196-023-P1-M1-A1
gctgaccgtgtgtgagacaaatgcccgtgtgtctacccgtgtggacctttttggaggctattttccatgccaatggtcaccctcaacatccatacacatttataaacttcaatggtattttgcatggcctaaatatgtccataacctacctttgcatagtcttttgcatgttaacctcatctcattggtttagtacatgctaggttatcctttttgtattaatgattaccactccaataatcacattttatacttgaactcgtttataactcattgccaattatgacctaaccttctcctagtgattcgaccacattacacatatccttccggggtatatcatattaaccatctaatgaaatattcaagcctgacatgcataatt

SEQ ID NO: 46184 - DNA, 320 bp, Gossypium hirsutum
  Clone ID: LIB3196-023-P1-M1-A10
cccacgcgtccgatcggaagagatctcagtagcagtcgtcgcgaatcatgtgtgtaccagacaccctttcttagttcaatttggtaaaagccgaaatgccaaaatttccggcatttcatgggcttgtgagtatgcgaatgctctcaagacgtagagtaaattttagatctagcatcgcaaggtggtaagtaagtttgtgtgacgtcttaacatgcttcggaaaaagagggcctcgatgggccaaaattgggccaaatgggcttacggactaatatgggtaagagatgggcaaattagcctgttagttagatggtgggacc

SEQ ID NO: 46185 - DNA, 319 bp, Gossypium hirsutum
  Clone ID: LIB3196-023-P1-M1-A11
cttggaatataaagaaccaaagtcccctcttttgtcgcttaaacccgaaacagaagccccctcttctcatcggatgtccggtttccagtttataacagcctcttcttcttaacttcattcctaagctttgctttttctcaaggtgcatttttgcatattgttggttaaatctaagagtaaaagaatggcacatttgatgtcaacttcatgctcaataaagatctcctctagctacagaccttgtggtcaacctctaaatcaggatcgaaccgtacttcctaactcttttaccattaagacttccaagtcacccttcaaa

SEQ ID NO: 46186 - DNA, 340 bp, Gossypium hirsutum
  Clone ID: LIB3196-023-P1-M1-A12
cccacgcgtccgctagactcatgtccccacctatatatttttttctagaatttttggtcgggcccattagtacagtttattagtcaaagtctctcatgttacaggggtcgactacactgaccttttcccattacgactgggatatctctctgcacagggcttcaatactaatgccgtttgtttctatggaaactagactcagagaggaatccatacatatatggtatgacccctaattatctctggtcaatttatagtgaaatttccaaaggcggaacagtgaatccagaaactgttctggccctgtttcacaagaacccgaatatctctttctgtactg

SEQ ID NO: 46187 - DNA, 337 bp, Gossypium hirsutum
  Clone ID: LIB3196-023-P1-M1-A2
cccacgcgtccgcggacgcgtgggtttaaaagtgtgcacaattctttctcggtgcgacacaaatcagttggtgtctcgtcacttttttggactcctaatgcaattaggattatttggtagttacggttcatactctttctaattgattgatatagactctactaaagaactcacaagactgaattctacctctttgagaatttgattttcctttttgagtgattaacgatgaggtttattaaattttttttcgagtgttgagtgtttgtttttcaagtattccaaaagaaaaaaaataagatgcatagactgggtcaagtcgatgatgcgaataatg

SEQ ID NO: 46188 - DNA, 373 bp, Gossypium hirsutum
  Clone ID: LIB3196-023-P1-M1-A3
atgccttcctgagcaccttcctttctttcagccaactgctcgctcgctcacctccctcctcggcaccatgaccacctgcagtcgccagttcacctcctccagctccatgaagggctcctgcggcatcgggggcagcatcgggggcggctccagccgcatctcccccgtcctggccggagggtcctgccgcgcccccagcacctacggcgggggcctgtctgtctcctcctcccgcttctcctctgggggagcctgcgggctggggggcggctatggcggtggcttcagcagcagcagcagctttggtagtggcttcgggggaggatatggtggtggcttcggtgctggcttgggtggtggcttgggtggtggc

SEQ ID NO: 46189 - DNA, 361 bp, Gossypium hirsutum
  Clone ID: LIB3196-023-P1-M1-A4
atcttctctgatagctcccagcttactctctgcagccatgattgccagacagcagtgtgtccgaggcgggcctcggggcttcagctgtggctcagccatcgtaggcagtggcaagagaggtgccttcagctcagtctccgtgtctggaggtgctggccgatgctcttctgggggctttggcagcaggagcctctacaacctcggggggaacaagagcatctccatgagtgtggctgggtcacgacaaggcgcctgctttggaggtgctggaggcttcggcactggtggctttggcggtggatttgggggctccttcagcggtaagggtggccctggcttccctgtctgccctggtggggga

SEQ ID NO: 46190 - DNA, 390 bp, Gossypium hirsutum
  Clone ID: LIB3196-023-P1-M1-A5
atggcatgcgctatcacacctggctacttctgtatttttagtagagaaggagtttcaccatgttggccaggctggtctcaaattcttggcttcgcgtgagccactgtgcccgacctgctctgatctctctcaactctgcagcctgagagattggggctgataaagactggttgccaaacatcactagaaacgtgggttaggggtttatggaagacgaactgatgccccatggcttgtaaaggctgggcgttcccttatttctccttaaggcctcatggggctgaagaacctggaagggtgtgccagagccatttgtcctccaatttacttgatgccaaatttctcctgtgagccagttggactcgtaaaacaaggatcattgatgttgtc

SEQ ID NO: 46191 - DNA, 345 bp, Gossypium hirsutum
  Clone ID: LIB3196-023-P1-M1-A6
cccacgcgtccgcaacaaaatcatgaggagcatttgtgttgtgcttcttatctctttgcctttccttctccgcattgcccagggtttcgatttccacgacaaggatttagcgtcggaggatagtttgtgggatctatacgagcgctggcggagccaccacacggtttccaggagtctcgacgagaaacatcggaggttcaatgtgttcaagcagaatgttttgcatgttcacaacaccaacaacaaggacaaaccttataagttgaagatcaacaagtttgctgatatgaccaaccacgaatttaggaatgcttacgctagttccaagattaaacatcataagat

SEQ ID NO: 46192 - DNA, 281 bp, Gossypium hirsutum
  Clone ID: LIB3196-023-P1-M1-A7
atgcaatggtgaaagactgcaggggcaagcgaggcttctggaaggaacttggacctcactgccactggcttgtctcctccagggtttcttgatcactgatgtttcaggttgatattggcagtttgaagaagcctttgttcttcatgaatgtgagagaaaaggaataaaaaggaggggaaaaccacaattgaagctgctaatcctgaacaagcccgaggctgtacaagacaaaaagcattgtgcaaaataaattgcataagataaacaagaaaacacacaac

SEQ ID NO: 46193 - DNA, 306 bp, Gossypium hirsutum
  Clone ID: LIB3196-023-P1-M1-A8
cggacgcgtgggggtggaagaggacaatgcacaatccatcacaactgttcaagatgctgcagaacttattgagaagctgtgcagtgagaaaagtgcctagaaaacaaggatcgcagttggttggtttatttgccgatatttgatattcacatactagaccgcaaacttgggggaaatcatgtgtgaacttttattatgttgaatatgtaggaaatttcgtaataaagttgttgggattcttagttaaattgtggaacttaaaatgtgtcatttcgttttaccgtagtggtttatgtagaagttttt

SEQ ID NO: 46194 - DNA, 351 bp, Gossypium hirsutum
  Clone ID: LIB3196-023-P1-M1-A9
agaagcgatgtctctatagtttcctggttgtgttctcaggttaatctgcaagggatattgtcaatgaaaccatgtccactgagccaaggagtattgctgtcactttttcagcaactggcttttgatgtcaacaaggaaactagtagaaagcttgtatggatgactgatgtagctgttgccataatcccctcttatcccacaatatccatgcatgttggtaccaatatttaaacaggtgtttcaaattggggatcatttacaaagcattgtcccacatctgcctcagaaaccggcagcatacggattcttaagattgtcataaacagagtgttgaactgtaaatgatttttt

SEQ ID NO: 46195 - DNA, 346 bp, Gossypium hirsutum
  Clone ID: LIB3196-023-P1-M1-B1
aactaatcctatgcacttgccacactttagaacatacattgcccttaatgaaaaataattaaagtgcaaggaagaaaactttcctgagtagggcaacctccttgttgttatgataatctcgagatttgtctgctccaagtagatgaaaaattacctaaaaaaatagtgcaacaagaaatatgaaatataatataaaaagaaaaagaaaaaataagaataaaaagaagaagtgtcaataatggatgacagaatgtctaaaaatattttgatgaacttgggcttttaatgttgcaaggtgcgttctgtctaggatgtcatgacattagggggatgtcatgacatcgac

SEQ ID NO: 46196 - DNA, 372 bp, Gossypium hirsutum
  Clone ID: LIB3196-023-P1-M1-B11
gcgaagcaaccagggttggtagattatacatatagagtcattgttgataggtaactcaagatgacaggataatcagattgtgaaaaccattattgttgggcaactcagagttgtaatatgtacatattttgagtcatcattgtcaggaaacctggggtgatagattcgtatatccattctaagtctttgtttgattagtaaggttgtaaaaacatgaaatttttataaagtatatgaaatgaaatgagttgaaaactagccctgatggccgattgagtttaatgagccaatacgctcggaaatggttgaaatgcttatatgtaatggaacatatgtgtacaaatgttgatcatggtaaacaaataattattt

SEQ ID NO: 46197 - DNA, 311 bp, Gossypium hirsutum
  Clone ID: LIB3196-023-P1-M1-B12
ataaaatagttatcctggggcctacagccataccattttgaaggtgtcttatctcctcggatctagggaggtaagcagggtcggcctggtagtacttggatgggagaccacctgggaataccaggtgctaaaagctttaagaataaaaaattgtgatcttactttgcgtttatcccatgttgagttctgcgctgggcatagggaacacacggtaaatgcgttgtggtgaattacaggctacttgagggagtgacagtatggtcgttactcccggcttccattatcaatgccacactggcatgctattacgc

SEQ ID NO: 46198 - DNA, 397 bp, Gossypium hirsutum
  Clone ID: LIB3196-023-P1-M1-B3
atcctggaggcccggcctggccgctcccggccctggggggcacatcggccctgagtctcgtcccaggctctgggctcaggcagctgccgccaccgctgcccagggcgtcgggcctcctgccttcctcccaggcccccacgctgctggccgcctggccgagtggccgccatgcgcctgccttgggccacctctgcccccggcctggcctgggggcctctggtgctgggcctcttcgggctcctggcagcatcccagccccaggtgcctccatacgggtcggagaaccagacctgcagggaccaggaaaaggaatactatgagcccaggcaccgcatctgctgctcccgctgcccgccaggcacctatgtctcagctaaatgtagccgcagccgggaca

SEQ ID NO: 46199 - DNA, 356 bp, Gossypium hirsutum
  Clone ID: LIB3196-023-P1-M1-B4
aatgacatatggggcacaaaataactggtgtcttgtaaatgttctggtttttttttttttttttttttttaaataaaacttctatactttagtctttactttaaaaatatgtactgcttccttttttgatttttttggtcgttttttttcttttgcactgagctcatcatatactaatactaccttaatgttaaaatttgaattttctttagcattttgcttaaaagcaatatgctatttccttattccgtgccctgacatagataatttttgaatttctgatagaatacaagtgtggtaaatgccatgttttgactttatctaacatcttctctttcaagaagcttggttttttt

SEQ ID NO: 46200 - DNA, 289 bp, Gossypium hirsutum
  Clone ID: LIB3196-023-P1-M1-B5
caaagatccttcatttaatcaaatggccgagcagctcactaaaacgtttcaaggggcagcagctgaagagaccacgccgcagtttgatccacagcagtattattctactatgcaacaggttatgcataatccccagtttatgaccatggctgagcgccttggtaatgcattaatgcaggatccagctatgtctaccatgcttgacagtttggctaatcctcaacaaaaggaccagattgaggaaaggatggcacgtattaaagaagatccatctttgaagcctattttg

SEQ ID NO: 46201 - DNA, 339 bp, Gossypium hirsutum
  Clone ID: LIB3196-023-P1-M1-B6
ataaaatagttatcctggggcctacagccataccattttgaaggtgtcttatctcctcggatctagggaggtaagcagggtcggcctggtagtacttggatgggagaccacctgggaataccaggtgctaaaagctttaagaataaaaaattgtgatcttactttgtgtttatcccatgttgagttctgtgctgggcagagggaacacacggtaaatgcgttgtggggaattacaggctacttgagggagtgacagtctggtcgtaactcccgccttcctccatcaatgccacgttggcatcctcttacacagtcaggctttagggctgatgggttcag

SEQ ID NO: 46202 - DNA, 224 bp, Gossypium hirsutum
  Clone ID: LIB3196-023-P1-M1-B7
aagcgaaaaggggaacggaaacaactctccttccttccgacgataaaaacccttccccttcctcttgctcttcatttcaattcaatcttcctgagtcaaaggactgtgatggggcagcaatcgctgatctacgccttcgtggcacgaggcaccgtcgctttatccgactacactgaggtttttcgggaacttaaccttcattggtttttaaggcctccaaaaac

SEQ ID NO: 46203 - DNA, 397 bp, Gossypium hirsutum
  Clone ID: LIB3196-023-P1-M1-B8
atcttgccctttaccttcagccttttacgctgtcctcagctctctcatctcctggaaccatggccagcacatccaccaccatcaggagccacagcagcagccgcaggggcttcagtgccggctcagccaggctccctggggtcagccgctctggcttcagcagcgtctccgtgtcccgctccaggggcagtggtggcctgggtggcgcatgtggaggagctggctttggcagccgcagcctgtatggcctggggggctccaagaggatctccattggagggggcagctgtgccatcggtggcggctatggcagcagagccggaggcagctatggctttggtggcgccgggagtggatttggtttcggtggtggagccggcattggctttggtctggg

SEQ ID NO: 46204 - DNA, 375 bp, Gossypium hirsutum
  Clone ID: LIB3196-023-P1-M1-C1
atgaggacctgaggaacaagattctcacggccacagtggacaatgccaacgtccttctgcagattgacaatgcccgtctggccggggatgacttccgcaccaagtatgagacagagctgaacctgcgcatgagtgtggaggccgacatcaatggcctgcgcagggtgctggatgaactgaccctggccagagctgacctggagatgcagattgagagcctgaaggaggagctggcctacctgaaaaagaaccacgaggaggagatgaatgccctgagaggccaggtgggtggagatgtcaacgtagagatggacgctgcacctggcgtggacctgatccggattctgaacgagatgcgtgaccagtttgagaaga

SEQ ID NO: 46205 - DNA, 344 bp, Gossypium hirsutum
  Clone ID: LIB3196-023-P1-M1-C10
tgaacagcagataaggaagcaagcccacctgaagcactgccagaagtacatggaggaagagtggggtggcgaaggcagcgacaatatagccggcgggtacattgactcatgttgccagcagctagagaagatggatacgcaatgcagatgtcaaggtctaagacatgcaacgatgcaacagatgcaacagatgcaagaacaaatggggagcaaacagatgcgagagatcatgcaaaaggttaccaagaatataatgtccgaatgtgagatggagcctgggaggtgtgacacgccatctcgcagtttgatttaaacaaaatatgttctcaagaataaatgtaatg

SEQ ID NO: 46206 - DNA, 338 bp, Gossypium hirsutum
  Clone ID: LIB3196-023-P1-M1-C12
attttggcaagaatggtgggttgcaaactcattggattttaacaaggactatgatgccagtgttttcgagacaaccataagagttgtaggtggacttcttagtgcatatgatctttcaagggacaacgttttcctcgaaaaagctagagatattgcagatagattgctacctgcttgggatactactactgggatcccttataatgttatcaacttggctcatggaaatgcacataaccctggttgggctgggggtcaaagtattcttgcagactcagggactgagcaactagagtttattgctctttctcaaagaacaggagatcccaagtatcaag

SEQ ID NO: 46207 - DNA, 384 bp, Gossypium hirsutum
  Clone ID: LIB3196-023-P1-M1-C2
cacacacttaacttaattaagcaagctcgtaagctgttttcatcaatggccgaccgtgaccgctcttaccgatttgaccaggttgttcgtggtgatagaacgaactatcaaagcggaccatcaacaacccaagttctaaccgtcctcaccctccttcccatcggcggcactctccttgcattagccgggctaaccctcaccggcaccgtcatcggcctatgcgtggcaacgccactcttcgtcatcttcagcccggttctgctcccagctgccatcgcggttttcatggctgtggccggtttcttgtcgtccggggcttttgggttgacgggactgtcctcgctctcctacgtatttaaccgcttcagacaggcgactggcacc

SEQ ID NO: 46208 - DNA, 347 bp, Gossypium hirsutum
  Clone ID: LIB3196-023-P1-M1-C4
atcgccagctccgtttggggaccagagccattcagaacctgagtcctggaatgcagcccagcactgccaacagggccggtcccaagggggctggggccaccggctggatggcttcccacctgggcggccttctccagaaaatctgaaccaaatctgccttcctgaccgtcagcatgtggtatatggtccctggaacctaccacagtccggctactcccacctcactcgccagggtgagaccctcaatttcctggagattggatattcccgctgctgccactgccgcagccacacaaaccggctagagtgtgccaaacttgtggtaaggttgggttcttgatgccggg

SEQ ID NO: 46209 - DNA, 361 bp, Gossypium hirsutum
  Clone ID: LIB3196-023-P1-M1-C5
tacacgcgtacgaaaacattctcaactctgttgagcccaaagagaggatcaaccgggaactattttatgatgaatttaaataacagtgtattacaccaaaatccatacaccaaatgaatacagatttgctccaatcacactgcggacgcatgacagtgtcatattatgaacgagaaatctctaagcttctctagattccactagagtgcatatttatagaaacctgcatgtgacatatgattgaagactgtctatattaaaacatatgaagagctgatttaagagaggatgtaaccaacttttgaatctactgattcaaagtaaaaatggatggggaaatcacattcattgccatactaaa

SEQ ID NO: 46210 - DNA, 394 bp, Gossypium hirsutum
  Clone ID: LIB3196-023-P1-M1-C6
atcaggatcgtgtagatgcccaggacgagacagctgcagagttcacgttacggctgaatctcactgcggcccggctaggccaactggaggggctgctgcaggcccatggggatgagggatgtggggcctgtggtggagttcaagaggaactaggccgccttcgggatggtgtggagcgctgctcctgccccctgttgcctcctcggggtcctggggctggtccaggtgttgggggaccaagccgtgggcccctggacggcttcagcgtgtttgggggcagctcaggctcagccctgcaggccctgcaaggagagctttctgaggttattctcaccttcagctccctcaatgactcactgaatgagctccagaccactgtggagggccagggcgc

SEQ ID NO: 46211 - DNA, 367 bp, Gossypium hirsutum
  Clone ID: LIB3196-023-P1-M1-C7
cggatttacaaaaagaaatcgactgaaagtttccagtcactgtcataccaggttgcattgttcaactgcatgctatggctgtattacgcgttgattaaaaagggtgctttccttgtgatcaccatcaactcttttggatgtgttgttgagactatttatatatctatgttctgggcttatgctttaaagaataccaggatgtcggctatgaaactttatatatcaatgaacctggggctcttctctttcattctcatcctcacacactttctgctgtaaagctcgattcgcatccaagttcttggctggatttgagttgccatctctgtatccgtctttgcagcacccttaaacattatggcaagag

SEQ ID NO: 46212 - DNA, 345 bp, Gossypium hirsutum
  Clone ID: LIB3196-023-P1-M1-C8
tacaactagtaactaatcccaacattgaagtattgaacaaactcatataagcaaaaaatctcaaatatccttcatcatgagacatataattgtcactataaataagaacaaaaattccaacagtagtgattaatattgacataatagaggtaagtgaatcaataaagtagccaaactcgaaagaaaaatcattattgatggtccaagaccatacatattgatagatagaacttctatttatttgctgaatagacagatcgagtgaaaaaatcataactatacttaacaataaaatattgggaaaagcccacataccacgaaaattttttgttgccgtccgaaaaa

SEQ ID NO: 46213 - DNA, 384 bp, Gossypium hirsutum
  Clone ID: LIB3196-023-P1-M1-C9
atgcaactcaacattaggtttaagaaagccacagggaagagaaagctgatggtatgacacccacctcctgaagtataaactcttagattaagagcttgtgtctccacaaggcattctgagcttatttgttttctttgtggatcaaagggcagatatcaaatgatataaattatgccttggggtattactatttattctctactctttgccagtctgtgaggaaaacctttttagcaataaaaattggatggaaatgaataatagattgtgtagatgttgaccagtttgatattttgcaaaaatgtttgaactcaataaaaccatacaccataagttaatatatatctaggagactaggtcttctacatttgagagttctttcag

SEQ ID NO: 46214 - DNA, 381 bp, Gossypium hirsutum
  Clone ID: LIB3196-023-P1-M1-D1
ccgatctttttaaacccctctctcgctctctctcgccgccgcctgcgtctctctcttcatctctctgaacctaaaagtctttagcttttcgcttcgagagagaccatgttggtttaccaggatctcatctccggtgacgagcttctttctgactcattcccctacaaggaaatcgagaatgggatgctgtgggaagttgagggaaagtgggttgtgcaaggagctattgatgttgacattggtgccaatccttcagccgaagatgctgatgaggatgaaggtgttgatgaccaatctgtgaaggttgttgacattgttgacactttcaggcttcaggagcaaccccctttcgacaagaagcagtttgtcgtgttcatgaag

SEQ ID NO: 46215 - DNA, 377 bp, Gossypium hirsutum
  Clone ID: LIB3196-023-P1-M1-D10
atgcactcaaggccaagaacatcaagcagacggaactggtggctgacctccgggaagccatcctgcgcgtggcgcgtcacttccagtgcgcagaccccaaaaactgcagcgtggagctgactccagactacagcatggagagccaccagcgggaccacgagaactacgtggcatgttcacgcggccaccggcgccgagccaaggccctgctggacttcgagcggcacgacgacgatgagctgggcttccgcaagaacgacatcatcacaatcgtgtctcagaaggacgagcactgctgggtgggggagctcaacggccttcgaggcgtggttccagccaagtttgtggaagtcctggatgagcgcagcaaagagtat

SEQ ID NO: 46216 - DNA, 376 bp, Gossypium hirsutum
  Clone ID: LIB3196-023-P1-M1-D12
aacctatatgatatgctatgacatgagctataagcttgggatgactgttgtgaaagagaatatgtaggtatgttattcatgtcatatgacaataaatatgtgggtatgttttcataccatgtgtgtaacaccccaaacccggcctagacgttatggccagatccgacgtgtcacattgaagtttttaagaaaacccatgcctctttcaacgtctttcttcgtgtttcaaaagatagtctttgctaagttaataaagtgaatggaagctgtgcaccaggtatgtatccgaaacagaggaggtgagccatgaaggctgcttaagtgccaagcttttgattggatccaatcctagacatgcccacaaccattgccacac

SEQ ID NO: 46217 - DNA, 241 bp, Gossypium hirsutum
  unsure (1)..(241): unsure at all n locations; Clone ID: LIB3196-023-P1-M1-D2
cccacgcgtccgcgatatctgaactcgcttgtgtgtgatggtgtagtgtgtgagagagtttgagattatattttgtaaaaaaatcttatatggatatgggtaaggtgcgttactagccatttgcaaatataaaaaaaaaaaaaaatataaaaaaaaaaaaaaatacaaaaaaataaaaaaataaaaaaattatgaaaagttgagggaatatgaagaaccncaaaaaagctttaggtgaact

SEQ ID NO: 46218 - DNA, 378 bp, Gossypium hirsutum
  Clone ID: LIB3196-023-P1-M1-D3
gcagcttaggcaaccagttcgcagccatggtgaagtattcgaaggagtcagataatcccaccaagtcctgcaaggcaaggggctctgatctcagggttcatttcaagaacacaagggagactgcgtttgctatcaggaagttgcctttgggtaaggctaagaggtatttggaggatgttatggctcacaaacaggccgtacccttcagacgcttctgtggtggtgttggacgtacagctcaggcaaagaacaggcattctaacggacaaggtcgctggcctgtaaaatctgccaaattcattctagatttgctgaagaatgctgagagcaatgccgaggtcaagggtttggatgtggatgcactctatatttctcaca

SEQ ID NO: 46219 - DNA, 109 bp, Gossypium hirsutum
  Clone ID: LIB3196-023-P1-M1-D4
gggctacactttttgttgtgatgttttaaatttagaattccctctctgttgtgtttggctactatgaaggattttattatcttacaagaattacatggtcatattgttt

SEQ ID NO: 46220 - DNA, 393 bp, Gossypium hirsutum
  Clone ID: LIB3196-023-P1-M1-D5
atgcagaacctcaacgaccgcctggcctcctacctggacaaggtgcgtgctctggaggaggccaacgccgacctggaggtgaagatccgcgactggtaccagaggcagcggcccgctgagatcaaagactacagtccctacttcaagaccatcgaggacctgaggaacaagatcattgcagccaccattgagaatgcgcagcccattttgcagattgacaatgccaggctggcagccgatgacttcaggacaaagtacgagcatgaactggccctgcggcagaccgtggaggccgatgtcaatggcctgcgccgggtgttggatgagctgaccctggccaggaccgacctggagatgcagatcgaaggcctgaaggaggagctggcctacctg

SEQ ID NO: 46221 - DNA, 378 bp, Gossypium hirsutum
  unsure (1)..(378): unsure at all n locations; Clone ID: LIB3196-023-P1-M1-D7
atggctggtcttgaactcctgacctcgtgatccacctgcctaggcctgtaaaagtgctgggattacaagcatgagccactgcgccgaccgctaggagattttttaactgtgtccattataggcactagaaatcttgactcttaaaattatagcatggttcacctggtccatgattccgtatttaacagtaccacaggaggtcgtaaattctggactttttgaagaccatgaaaaagtttgttgagactaacataaaacttcgcctctggccccggttgtcatagctaggagtggatttaggaagtttagtacacttactttgagaatggatntctctaagggcattttctattttgaaatgttctgagttctgtatga

SEQ ID NO: 46222 - DNA, 295 bp, Gossypium hirsutum
  Clone ID: LIB3196-023-P1-M1-D8
ggttggtccaaatgcggccgtcattcattactcacctcagcctgaaacatgtgctgagcttgatccagatagcatttatctatttgattcaggagcgcaggtattctatcacatcctaatattttgcttctatcattaaccaaaaccatcagtaaagcctactatttcttattctagattcttagtctgattcttaatctataactgacaatcttgatggcatcattgaagtatctagatggaacaactgatataactcggacagttcattttggaaagccttcagaacatgaga

SEQ ID NO: 46223 - DNA, 372 bp, Gossypium hirsutum
  Clone ID: LIB3196-023-P1-M1-D9
ctgctatcagttgcaatggtggcggcgacagttggcctgagaggcttatctttatgtaccttatcgcttcccatcctccgtagtgcgaagattaagctgcccattcactcatttccaacgagtcgaagcctaaaacctctgttttcccctttcaatcctaccattctcaggggttttccctcgttttgtgcgtctccggacgtcaacgtggaggccaccgccacagctccgccggctacggaggcggaaaattctcagtcggcggacgatataaagaacgcagccaacctcctcgacataagggttggccgaataatcaaagcgtggagacatgaagaagccgattctctatacgtggaagaagtggatgta

SEQ ID NO: 46224 - DNA, 380 bp, Gossypium hirsutum
  Clone ID: LIB3196-023-P1-M1-E1
cggacgcgtgggcggacgcgtgggggcgattaacccttctttgctctttctttcccttctttttctcttcaatggctgcctagctcgccagaccttttcgtcacagcagtcccaaaatgagtgtcaaatcaataggctccgcgcctctgcaccccagacccgaattcgctccgaagccggcaccaccgagtggtggaaccccaactgtcaacagctcaggtgtgctggtgtatctgtaatgaggcagactattgaacctaatggccttgttttgccttccttcaccaatgctcctcagcttctctacattgtccaaggaagaggtattcaaggtattgtgatgcctggatgtgccgaaacattccaggattcacagcaat

SEQ ID NO: 46225 - DNA, 362 bp, Gossypium hirsutum
  Clone ID: LIB3196-023-P1-M1-E10
gttagaatttgtataaggcaaagaccagtgcaatatacttccctggttagacgcttggagaaggcattcagcataggttgtagtccaactttggaaacccagggtggaatctttggtcaaagatatatgcagtacaacttccattgcagaaactaaaacttggtggattttggctatacatagtggcggaacttggctggaaaaagtgaacctccacctccaattttaagtcctcctcctgtcagtgtcagcaccaataaaactgttgaagcacctaagtcaaatgggaccgtttcaacaccttcattagctatcaccagaccgctatcttcttcagggagaattgaatcattccttgataa

SEQ ID NO: 46226 - DNA, 380 bp, Gossypium hirsutum
  Clone ID: LIB3196-023-P1-M1-E12
ttcaactgatgtcttgcgtgaatttgccaaaacccagatggattacatccttggcaaaaatcctcggaaaatgagctatgttgtgggttttggtaaccattacccaaaacatgttcaccatagaggtgcatctatccctaagaataagatcagatataactgtaaggggggatggaaatggagggattcaaaaaagccaaacccgaatacgctggtgggagccatggttgctggacctgacaagcatgatggatttcacgatgttcgcaccaactacaactacactgaaccaactcttgcaggcaatgctggtttggttgctgcacttgtggcattgtctggtgacaagtcaactggaattgacaagaataccatatttt

SEQ ID NO: 46227 - DNA, 375 bp, Gossypium hirsutum
  Clone ID: LIB3196-023-P1-M1-E2
ctctcatcattttcctccgggaccgtcagtcttcccaaacaccttctttccgagaaaaaaaaagctcaagagagaagaccatggccgatcaacttacggacgatcagatctctgagttcaaggaggctttcagcctctttgacaaggatggcgatggttgcattactaccaaggagctggggactgtgatgcggtcacttggtcagaaccctactgaggcagaactccaagatatgatcaatgaagttgatgctgatggaaatgggaccattgattttcctgaattccttaacctaatggcaaggaagatgaaggatactgattccgaggaagaacttaaagaggctttcagggtgtttgacaaggaccagaatg

SEQ ID NO: 46228 - DNA, 381 bp, Gossypium hirsutum
  Clone ID: LIB3196-023-P1-M1-E3
gttttgtatttcatactcatttagcccctttcattagcatcgaaatcactccagttttctttatcactgaaaaatgtcttgctgtggtggaaactgtggctgcggttctggctgcaagtgtggcagtggctgtggaggatgcaagatgtacccagacctgaacgttgccgagatgaccacaactgagactctggttcttggtgtagcaccccagaaagcacactttgagggagctgagatggaattcggggctgagaacggctgcaagtgtggagacaactgcacctgcaacccttgcaattgtaaatgattagagaccaaagccaaagctccctggaagcagagacgcctttgtctttaagaaataatatgttttggtgg

SEQ ID NO: 46229 - DNA, 399 bp, Gossypium hirsutum
  Clone ID: LIB3196-023-P1-M1-E4
atgctgagctcagcaaacacccgcttcgccttggacctgttcctggccttgagtgagcacaatccggctggaaatatcttcatctctcccttcagcatttcatctgcgatggccatggtctttctggggaccagagggaacacggcagcacagctgtccaagacttttcatttcaacacggttgaagagattcattcaagattccagagtctgaacgctgagatcaacaaacctggagcgtcttatattctgaaacttgctaatagattatatggagagaaaacttacaatttcctccctgagttcttggcttcgactcagaaaacatatggtgctgacctggccagtgtggattttcagcatgccactgaagaggcaaggaagaccataaaccagtgg

SEQ ID NO: 46230 - DNA, 392 bp, Gossypium hirsutum
  Clone ID: LIB3196-023-P1-M1-E5
atgtcctcttataatttaggctggactgtcacagacactctggcagacacagcatacgtggtgcagccagagtgcaaacatgccagcagcagccatgctccccagggtgggggtccagttagtaagccacgcgcagccaagaggcgaggcatgccctccgccacacacggacttaccccgctcactgtgcccgtggtatcaaaatgtacctgcatgtttaattcataaaggagaggctgatgtcattgaaagaaaagtttgttacttgcatttctggagaaaaggagcgcaccaggccatgcagggccacaggaggaggaggcactggagtggtcaggaggcagaactaggcgcaagcatgggcaagcagctttcctttgtgtctccgtggc

SEQ ID NO: 46231 - DNA, 334 bp, Gossypium hirsutum
  Clone ID: LIB3196-023-P1-M1-E6
atcgcggctgtccggccaccgcaagtaggcttatctctgactgcctctccttctgccaggccggggagctgcttatgctgaccctgacttttccttacagggcaagcccccagggccattcctggcacacagagatgctggacttcaagccccaggccccttccctgccccagatggtgacaagggggaccttctgctccaggcagtgcaacagagctgactggcggaccatctgctgacagcgtaatggggggcagacccagtcccagcccaagctcctggagagggacacgagggtcttaccctgactggggcccgtgctggaggtgtgggc

SEQ ID NO: 46232 - DNA, 291 bp, Gossypium hirsutum
  Clone ID: LIB3196-023-P1-M1-E7
ggaggctggggctgctgaaacgttggggcgtacggaggcacgaagctgatgtccgattgttgttgctgcgcatgaaggaggagtgacctacggttactgaagttgtttcaacttttgagctgttttgggcctcgaagctttggactattttgtaaatgggctagggtattaattttagtgggctgtttgggcttgtaataagacactaactaaatggactttgttttatggggggcagacccagtcccagcccaagctcctggagagggacaagaaggtcttaccctgact

SEQ ID NO: 46233 - DNA, 208 bp, Gossypium hirsutum
  Clone ID: LIB3196-023-P1-M1-E8
atcgggggcctgtgtgctggggcagcgggcgctcccttgacctagtcctcctcatcctgtgcggccggccgggtgaggccgggcccgcgtagggggcaggcggcggctgcctccggcggaggtgcctcgcggctcccgggcgggcccgcgcctcggcggcgtgctccatgcattcggagcccggcccggccccgagccgcagcagccc

SEQ ID NO: 46234 - DNA, 392 bp, Gossypium hirsutum
  Clone ID: LIB3196-023-P1-M1-E9
atgaggaactaccctaagacaagagggaaaggggagagatattgagaagagtgagccatccatgacagtggtttagaggatttctccagagaaataaagaattctaagatggaagagcaatggagaactatagaaaattatgagcgaaccaaaatgatcaagatatatgaaagtaaaaaggaagaataaaatattgtaaaaatcagaggcactgataatccaaaaaaaggaagataaatattaatagagaataaatattcattgttatcaaataaaaagtttaaaaataatatcaaaataagtattaaattaatactaactgaacactgagtgttaaatatttttgagaaacttctttataaaagaccatgtttgactggacatagtggctc

SEQ ID NO: 46235 - DNA, 378 bp, Gossypium hirsutum
  Clone ID: LIB3196-023-P1-M1-F10
cccacgcgtccgcaaaatgctaccctcggcactaatgtgccacacgaacaacgatctgcgcgttcgagccctaaaagagtggttttggcccttgagaccccattcagacttcgatttcgacgaagtgaaggggaaacgacggctagcttcgcaaggtaaactcctctttcgttttctttttgcgtttttgatagatttcgaagcagaaatggaaaaatggaggcgtaaaaaaaaaataaaaaggaaccacctttgaagaatattcaacctctgtattcgattgctattgtatgtgtatattccttttttttcgcgtttttttgtattcagtgtgtagaaatgtgcttgtatccctccttcaaaaaagagtttacaatc

SEQ ID NO: 46236 - DNA, 314 bp, Gossypium hirsutum
  Clone ID: LIB3196-023-P1-M1-F11
atgcggcggcggcggcaactggggacagggcgggtggcgcatcaccggcgcggaggcaggaggagcagtctcattgttccgggagccgtcaccacagtaggtcctcggctcgctcggcccagcccctctcagtcctccccaacccccacaaccgccggcggctctgagacgcggctccggcggcggcagcagcagctgcagcatcatctccacccgccagccatggaagacctggaccagtcgcctctggtctcgtcctcggacagcccaccccggccgcagcccgcgttcaagtaccagttcgtgagggagcc

SEQ ID NO: 46237 - DNA, 393 bp, Gossypium hirsutum
  Clone ID: LIB3196-023-P1-M1-F12
atgtcagccgcattttctcttgcatcgccagcgcatccctgagacaccatggggaaggtgaaggtcggagtcaacggatttggtcgtattgggcgcctggtcaccagggctgcttttaactctggtaaagtggatattgttgccatcaatgaccccttcattgacctcaactacatggtttacatgttccagtatgattccacccatggcaagttccatggcaccgtgaaggctgagaacgggaagctcgtcatcaatggaagccccatcaccatcttccaggagcgagatccctccaaaatcaagtggggcgatgctggcgctgagtacgtcctggagtccactggcgtcttcaccaccacggagaaggctggggctcatttgcagggggga

SEQ ID NO: 46238 - DNA, 391 bp, Gossypium hirsutum
  Clone ID: LIB3196-023-P1-M1-F3
aaggtgcggttcttagagcaacagaataaggtcctggagaccaaatggaagctgctccagcagcagacgaccagcacctccagcaaaaaccttgagcccctctttgagacctacctcagtgtcctgaggaagcaactagataccttggtcaatgacaaagggcgcctgcagtctgagctgaagaccatgcaggacagcgtggaggacttcaagaccaaatatgaagaggagatcaacaaacgcacagcagctgagaatgactttgtggtcctcaagaaggacgtggatgctgcctatatgaacaaggtggagctggaggccaaggtggacagtcttaatgatgagatcaacttcctgaaggtcctctatgatgcggagctgtcccagatgc

SEQ ID NO: 46239 - DNA, 379 bp, Gossypium hirsutum
  Clone ID: LIB3196-023-P1-M1-F4
gtttttctcaaaaagaacattggttttttttcctaacctgttgttcctgtttctaagatctcattaaagttatggtttttgtatagtttgtctttttcttaagagctaaaagattttggacggctaagatggaccgggaaggaggatcccacggcggatcttgctactacactattctcgggattcgcaaggacgcctccttctccgatatccgtactgcttaccgtaagcttgctctgaaatggcacccggacagatacgtcacaaatccggcggtagccggcgaagcgaaactcacgtttcagcaaatccaacaagcttattccgttctctcaaacgggtgcaagagatcaatgtatgacgccagtctctacgatcc

SEQ ID NO: 46240 - DNA, 69 bp, Gossypium hirsutum
  Clone ID: LIB3196-023-P1-M1-F6
atgcggccaccagtgccacctctcacacgcggtccctgaatagcatcatccagcagatggagaagttct

SEQ ID NO: 46241 - DNA, 384 bp, Gossypium hirsutum
  Clone ID: LIB3196-023-P1-M1-F7
atgtgaagctggccctggacatcgagatcgccacctaccgcaaactcctggagggcgaggagtgcagaatgtctggagaatgccagagtgccgtgagcatctctgtggttggaggtagcaccagcactggaggcatcagtggaggattaggaagtggctctgggtttggcctgagtagtggctttggctccggctctggaagtggctttgggtttggtggcagtgtctctggcagttccagtagcaagatcatgtctaccaccaccctgaacaagagacgatagaagaaatgaggtcccttgagcttactgtgtcccgctgggcccagcactggtatctctgggcttacttcaatttaacttcaatcttcctcttttgggcctg

SEQ ID NO: 46242 - DNA, 373 bp, Gossypium hirsutum
  Clone ID: LIB3196-023-P1-M1-F8
ataaaattgatagatcttaggatctgacacaaatgtggctgtatcctaatactaatgttatgaaggtcgtgggtattattattatatttaagtgaatccatacattcccttctacctataaaatcataaaaccacagtgctcttttattatatattatttttgtaacatatagtgaaaagttaatttcagtattttttttcttattaggttactcctgattcagccattctaggagttcttcagtccaacattcagcatgtgctggtctatgaaaatcctgctcttcaggagaaagcgttggcttgtattccagtccaagaactaaaaaggaaatcacaagaaaagttatcaagagttagaaaattggataaa

SEQ ID NO: 46243 - DNA, 358 bp, Gossypium hirsutum
  Clone ID: LIB3196-023-P1-M1-F9
tttttctacttattttttgtgcagggtagtgatgccttgtcaatggctgaaggacaaaatgaaatgcaaaagcttttcaaggaatatggcgtgactccatttactctgctgaaagggatttttattcagggtcccatctttgtgtctgagtcacaaaaaagactacctacagaagataaaagtggtgctggtatcagaattcatgataacaatgaaggagaggaatccgcggcaaggggaagtgtcactgggagatttaatatggctcaaactccttggggaaacatggtggcctgcagtggtatgcctattgctgtggttgtttgatctagcaactagttctctttttcggcctttt

SEQ ID NO: 46244 - DNA, 367 bp, Gossypium hirsutum
  Clone ID: LIB3196-023-P1-M1-G1
aacatcagcagagtttcatcctacccactgtaatacgttggcatatagcagttcaaagggctcaattcgcgtaattgatttgcggcagtcagcattgtgtgattctcatgccaaattgtaagtgttttgcttgatttatgtacatttttactaagaaaagcatgctatggatcttgatctgtgagggtatatttgcaattagcttttggtatcctttactaataatgattgctattctatgccacaggtttgaagaaccagaggcacctggttctagatcattttttacagagataattgcctcaatctccgatatcaaatttgcaagggatggaagatatattctaagccgtgattacatgactct

SEQ ID NO: 46245 - DNA, 370 bp, Gossypium hirsutum
  Clone ID: LIB3196-023-P1-M1-G10
atgtggatgctgcctacatgaacaaggttgaactgcaagccaaggcagacactctcacagacgagatcaacttcctgagagccttgtatgaagcagagctgtcccagatgcagacccacatctcagacacatccgtggtgctgtccatggacaacaaccgcaacctggacctggacagcatcatcgctgaggtcaaggcccaatacgaggagattgctcagaggagccgggctgaggccgagtcctggtaccagaccaagtacgaggagctgcaggtcacagcgggcagacatggggacgacctgcgcaacaccaagcaggagaatgctgagatcaaccgcatgatccagaggctgagatctgagatcga

SEQ ID NO: 46246 - DNA, 389 bp, Gossypium hirsutum
  Clone ID: LIB3196-023-P1-M1-G11
atgaaaacctcttgccatctgatggtgacttctggattgggctcaggaggcgtgaggagaaacaaagcaatagcacagcctgcgaggacctttatgcttggactgatggcagcatatcacaatttaggaactggtatgtggatgagccgtcctgcggcagcgaggtctgtgtggtcatgtaccatcagccatcggcacccgccggcatcggaggcccctacatgttccagtggaatgatgaccggtgcaacatgaaaaacaatttcatttgcaaatattctgatgagaaaccagcagttccttctagagaacctgaaagtgaggaaacagagccgacaacacctgtacttctagaagaaacacaggaggaagatgccaaaaaaacattt

SEQ ID NO: 46247 - DNA, 349 bp, Gossypium hirsutum
  unsure (1)..(349): unsure at all n locations; Clone ID: LIB3196-023-P1-M1-G12
cccacgcgtccgattttctatttaacttatctcttgtctatttttgtccaacaagttaaccaatggtctaattaccatttaacgacctccaatttaaaatttcataataattggacacttctaacatgtagaactcaacttttgcacttttttacaatttagtccttttagctaaattgagtgccctaacgtcaaaatttttaaacgaaatttttacgaaatcattctgtgaaattgtagaccttaaaaatataataaaaaataaaattttcctcgtcgaatttgtggtctcaaaaccactattctgactaggcncaaaatcgaattgttacaacgtatatgcaattca

SEQ ID NO: 46248 - DNA, 369 bp, Gossypium hirsutum
  Clone ID: LIB3196-023-P1-M1-G2
aaaaaagacttcttttttttctttttcattgtacaacgaccaattttaaaaaccataggatttgatttttttttattcatgaaaactatctataaaaataattatatagaatagtttcgactttctcacctgataatgagagaacgaaatccggataaataccaatacctattactggtagaaagatagagatcgaaacaaataactctcgtggtccagaatcaaaaaaataagaacttggagcattaaatagcttgtatccatagaacatttgacgtgacatagataatgaataaataggagttaatatcattcccaatgccctttacgaaagtaattatattttttgcattaaaaaataattttggc

SEQ ID NO: 46249 - DNA, 399 bp, Gossypium hirsutum
  Clone ID: LIB3196-023-P1-M1-G4
atccgggtcctgccaatgtcacgttctgccattactgcaatagccacatcagtgtgtcatggcccgccctgtcgccagcttcatcatgccgtcatacctcatgggaaaggtggacgttcctcagtcagtgggatcgtggccactgtgtttggagcaacaggattcctggggcgatacgttgtcaaccaccttggacgcatagggtcacaggtaatcataccccatcggtgtgatatatatgacaccatgcaccttcgtcccatgggtgacctgggccagcttctgtttctggaatgggacgcgagagataaagattctatccgacgagcagtggaacacagcaatgtggtcatcaatcttattggacgagactgggaaaccaaaaacttcgattttgat

SEQ ID NO: 46250 - DNA, 396 bp, Gossypium hirsutum
  Clone ID: LIB3196-023-P1-M1-G5
atggcccagactggcggcggcgatggcctcggcggctgtggagagcttcgtgaccaagcagctggacctgctggagctcgagagagacgcggaggtggaggagcgcaggtcctggcaggagaacatctctctgaaagagctccagagccgaggcgtgtgtttgctgaagctccaggtatccagtcagcgcactgggctgtatggacggctgctggtcacctttgagcccaggcgatgcgggtctgtggcagctcttcccagtaacagctttacttctggtgatatagtgggcctgtatgatgctgctaatgagggcagtcagctggccaccgggatcctgacccgggtcacccagaagtcggtcacggtggcctttgatgagtcccacgatttcca

SEQ ID NO: 46251 - DNA, 380 bp, Gossypium hirsutum
  Clone ID: LIB3196-023-P1-M1-G6
cggacgcgtgggctggaatattggaatcacatagagtcttgactgtaagcccatactatgcccaggagcttgtatctggtgaagacaaaggtgtagaacttgataacatcattcgtaaaactggcatcaccggcattgtgaatggcatggatgttcaagaatggaatcctgcctctgacaaatacatcagtgtcaaatatgatgcaacaactgtaatgaaggcaaagccattgttaaaggaagctcttcaagctgaggtgggattgccttgcgacggagatgttcctttgatcggattcattggtaggctagaagagcagaagggttcagatattttggcagaagctattccgaaattagttgctgaaaattgccagatt

SEQ ID NO: 46252 - DNA, 342 bp, Gossypium hirsutum
  Clone ID: LIB3196-023-P1-M1-G7
attgacacactgaaattgggtgcttgtgtggatctgctgggagggttggtgcacattggactaggtgacccggttgtgaaccaatgttgtgcggttctttcaggactcgccgagctcgaagctgcggtctgcttgtgcaccaccctcaaacttaaggttctcaaccttaaaatttatgtgccactggctcttcaactccttgtcacatgtgggaaaacaccccctcctggttacacttgctctcttttaaaaccaaggttgctagggtgatggactctatatgatggaatggccatgaaaggatgtcgagcttttctctttgttcttaagttggatgggaaa

SEQ ID NO: 46253 - DNA, 379 bp, Gossypium hirsutum
  Clone ID: LIB3196-023-P1-M1-G8
atagaatttatttcttgaagttatagaggctgagaaatccaagatcgaggggccccatgtggtgagcaccttacttgtggggactctgaaggttcccaaggcagtgcagggtatcacatggggagggggctgagtgtgctaactgggtagctcggatctccagttcccctgatgggaaactgtgtaatttataaagaaatacgttaatccactaatggattaattcatttgtgagggtggaaccctcatgatccaatcacttcttaaagaccccacctctcagtgctgccacataggggattaaatttcaatatgaagtttaaaaggggacagatactcaaaccatagcagcatggaattcaaaagcactccaccgtgt

SEQ ID NO: 46254 - DNA, 324 bp, Gossypium hirsutum
  Clone ID: LIB3196-023-P1-M1-G9
atcctatctacaccccagggcagcaagtactccatggtggaactacaggatccaaacagcaacaggattgcacagtggctggaagtggcacctgagcaaggcattgtagacctgtccttccaactggcaccagaggcaatgctgggcacctacactgtggcagtggctgagggcaagacctttggcactttcagtgtggaggaatatgtgctgccgaagtttaaggtggaagtggtggaacccaaagagttatcaacggtgcaggaatctttcttagtaaaaaattggtggaaggtacacctatggaaggcccatgctaggggc

SEQ ID NO: 46255 - DNA, 367 bp, Gossypium hirsutum
  Clone ID: LIB3196-023-P1-M1-H1
atttccaagcgataagttttagggttttgagttctattctcttgacaatggctgcgatttacagtctttacataatcaacaaatcaggaggtttgatattttataaggattatggatccaagggcgcatggatacgaatgatagcttgagagtggctagtctatggcattcgatgcacgctatctcacagcagctatcgcctaccactggttgttctggaattgagctacttgaagctgatacatttgatctccattgttttcaatctcttaccgggacaaagttctttgtagtttgcgaacctgggacacaacacaatgaggctctctttgaaagtgtttatgagctctacacagattatgttttg

SEQ ID NO: 46256 - DNA, 363 bp, Gossypium hirsutum
  Clone ID: LIB3196-023-P1-M1-H10
ctccaaaacactcttgtcaaacaaaacacgcttcagccagcggccctcctcttacctccttcactcgtttctcgattttgtttccctcagcttcacttcctcttaagaaattcctctctttctgtcgcctctaatattgttaatttctagggttacgttgagtaatggattggggcaacgttaccgccgaggatctgatcgacgctcttcgtgaagttgactggtcatgaccgccgcgacctgtctccgaattcttttccgcttaacatccctgggcatacgtgaaatggaacaagcgcattaaatgcagtctctactactatcggactaattatttcattctgatagctctcattctcggtt

SEQ ID NO: 46257 - DNA, 332 bp, Gossypium hirsutum
  Clone ID: LIB3196-023-P1-M1-H11
cttgaggctgtcttcaatacacgaagtgagcagctagacgagctgtttggtgggaggcaaagccatcgaaggcagcagggacagggaatgttccgtaaagccagccaagaacaaataagggcattgagccaagaagctacttcaccaaggggaaaaggtagcgagggatacgccttcaacttattgagccaaacccctcgctactccaaccaaaacggccgcttctatgaggcttgccctcgtaatttccagcagcaactccaagaagtggattcctccgttgttgccttcgaaataaacaaaggatcgatctttcgtccggactacaattc

SEQ ID NO: 46258 - DNA, 68 bp, Gossypium hirsutum
  Clone ID: LIB3196-023-P1-M1-H12
gcggccacgcgtacggcggatagtgaggtgcgtacaggtttttatttctgcaattgcgataagaaacg

SEQ ID NO: 46259 - DNA, 304 bp, Gossypium hirsutum
  unsure (1)..(304): unsure at all n locations; Clone ID: LIB3196-023-P1-M1-H2
ctttgttccttcatccttctgatacatcgggaacggttcttgtttctcatcgtttgactggtgttgaaaatgacactgtttggagtcgctcgcttcggattgctttgctcgcgaagaacaagctcgaattcattgatggtgtttgccttcgttcggtttatcccgaatctctccgtgctcaatgggatcggtgtaatacttttgtgctttcctggattntcaacactgtcagtccagatttgtcagcgggactcgtctttgcttctgatgctgctgcagtttggaaagatctcaaggatcattt

SEQ ID NO: 46260 - DNA, 377 bp, Gossypium hirsutum
  Clone ID: LIB3196-023-P1-M1-H3
atttttaatgcccattgtgacacactgctctcttttcccctttttcctctcgtaagttacttgaatgggcgtacaagaaacttgttgctccattaagtggttttgtgggtgcttgtgaggactcaaagtggagacacaagcaaaatggctgacttgtcggtaagcgtgtgtacaattgggaaggcatccaatacttgagcccctcgaaaacaagtggcacccatgcattcattatctgccaaaatgaataaaagaaaagcaacgcttgtggggttcaaaatttcaaacttttcagcttaagcagttataagttcttctaacgggccttttccttgcatgcttaactgcgtgtatataaaacccgaatatacgtagag

SEQ ID NO: 46261 - DNA, 398 bp, Gossypium hirsutum
  Clone ID: LIB3196-023-P1-M1-H5
atcgccctttttttttttttttttttttttttttttttaaataacaaacatttattggtgtcacttatggtagaaaaaacttcctacaccagatgcacatgacccaattgttaaatagaacattttgaaggtgaacacacaccctaacccaggttttttacccactttttaagatggccaattctttttttcccccccacccaaagacatgtgagcaactgctaatgaaaagcagtaaacagccgcttgggctatatcattttcaactccactctgaggtgaagattccaattacattcgagacttaagttctctcaattttttcctaacaaaggtcctgagtccagtatttacaatattacagcactagtggatcagtatctacaacttatcttttt

SEQ ID NO: 46262 - DNA, 385 bp, Gossypium hirsutum
  Clone ID: LIB3196-023-P1-M1-H6
gcaaccctttcactgctttccttcaattatttcccacttccttttgccttcaaaatttccttgggattcctatggctaccgctgaggttgcatcagttcaaactgcacttcatgaggagaaaactgaagaatcagtgaaggatcaagaagctacaacagatgaagtagttgccgaagctccagcagcggaaccagttgccgaagagccaaaggaagcggagcctgcggcggtggtagtcgaggaacctgaagcctcagttgaagttgaaaccaaggaggtggtagaagaaccaaaggctgttactgaggagccagtagtagaggaggctcctaaggaaacaatgccagaaccagttgccgaggagatcaaggaaaccactgaaca

SEQ ID NO: 46263 - DNA, 288 bp, Gossypium hirsutum
  Clone ID: LIB3196-023-P1-M1-H7
atcccaggccaagcaagcttctgtctgcacctgctctcaatcctgctctcaccatgagcctccgcctgcagagctcctccgccagctatggaggtggttttgggggtggctcttgccagctgggaggaggccgcggtgtctctagctgttcaactcggtttgtctctgggggatcagctggaggctacggaggcggcgtgacctgtggctttggtggaggggctggtagtggctttggaggtggctacggaggtggccttggaggtggctttggtggggggttatgct

SEQ ID NO: 46264 - DNA, 349 bp, Gossypium hirsutum
  Clone ID: LIB3196-023-P1-M1-H8
ctttgctttcttttagcgtttgcttgcttgttctcttccatggctgctgtgctcagatagatctcgtcactaaccatcaccaggatccaccttgggggcagcctcaccaacctcagccacgtcaccaatcccaatgccaactccagaacttgaatgctcttcagcctaagcaccggtttaggtcagaggctggtgaaactgagttctgggaccaaaatgaggatcaattccagtgtgctggtgttgctttcctacgtcataagatccagcgcaaaggacttttattgccttcatttaccagtgctcctatgcttttctatgttgaacaaggggagggtattcatggggc

SEQ ID NO: 46265 - DNA, 316 bp, Gossypium hirsutum
  Clone ID: LIB3196-023-P1-M1-H9
cgacaccatagaacaagttggtacgcaaaagcacgctggtgcccctccccaattccccggattcttcccacgccatctggggcacacaataactggcgccttgataatgatcggaatcactccagttttctttatcacaaaaaaaagtcttgctctggaggcaactctggcaaaagatgtacctgcaacttttgcagtggctgtggaggatgcatgatgttcccacacgtgctcgttgtcgacatgacctcccctgatgctctagttctaggtgtcctcaccattatgctcactagcagggagctgttatcgtatt

SEQ ID NO: 46266 - DNA, 376 bp, Gossypium hirsutum
  Clone ID: LIB3196-024-P1-M1-A1
ctgaactgaaacatcgatttgagcagacaatgaaagaggcagcggattaatttcaaggagcgaacttgtatgtcaagaattcggatgatagcataagtgacgaaaagcttaaagagctattctctcaatatggtaccataacatcatgcaaggttatgcgggaccctagtggaataagtaaaggatcagggtttgttgcgttttcaaccccagaagaagcttctagagctcttgcagagatgaatggcaaaatggttgtcaacaaacctctctatgttgcacaggctcaaaagaaggaagacaggagggccaggttgcacgctcagttttctcaaatgcgaccacttacaatggcaccttctgttgcaccacgaat

SEQ ID NO: 46267 - DNA, 239 bp, Gossypium hirsutum
  Clone ID: LIB3196-024-P1-M1-A10
cctatttaggtgacactatagaacaagtttgtacaaaaaaaccaggttgtacccgtcccggatttcccgggttgccaaattattcccttcttcttattttgaagggcctttttgagcctgcccccgcaagaatggaagggcgcttgtgggccagggcgcctctcccgggccccttgtctagaggtgtctagatctgacacgcacaggcccttgtctggtgtggtgcccgacatctcatc

SEQ ID NO: 46268 - DNA, 359 bp, Gossypium hirsutum
  Clone ID: LIB3196-024-P1-M1-A11
ctcagatgcttgaaagagaaattagtttccttgaggaagagttaaaatcggtagagggtcttcaaccggcttcgagattctgcaaagaggttacagattttgtgatggccaactctgatcctttaatacctacaagccggaagaatcggaagtcatgtcgattctggaagtggctttgtgggattccttgctttaacttatcgtggatctgttgttgctgttattcggcatgctcttgccatctgaaatgcctgcagtgttgtgattgcgatttatgtaactgcagctcatgcatttgcagcttatgtaaatgcaggtgctgcagttgcggctcatcggaacacagttcgtgcaaatgc

SEQ ID NO: 46269 - DNA, 353 bp, Gossypium hirsutum
  Clone ID: LIB3196-024-P1-M1-A12
atcaaacagcccccagaggcattttgaaattcatcccaactgtaggctgagtgatcggcaggtgggacggactgccaaagtccaaaagcttcagcatttcctcagtgtcaggatctacttcaatgatctcctgatccggggctgagaccttgggaacataatcgtctctcctttctctctccttctcctgcagcttaatggaaacacctctcaatgggcccctctgcatccgcttcatcagatgattgacacagcctgctatgttattacggagcttcttgctggggataatggccatctcctcacgcatgcatttgtttctgtggaagttgttacctacgcacatgtaatac

SEQ ID NO: 46270 - DNA, 65 bp, Gossypium hirsutum
  Clone ID: LIB3196-024-P1-M1-A2
ccgtgtccggtacttcccggggatgccttcctgagcaccttcctttctttcaaccaactgctcgc

SEQ ID NO: 46271 - DNA, 289 bp, Gossypium hirsutum
  Clone ID: LIB3196-024-P1-M1-A3
ctctgccaagagttcatatcgagttccaacccccaagcaccgtcctgagaaatccagtgtctccctaactgtcatctcaccatggtgaaggtcatgttgacttatataagcacttgtcctttgagggatgaattcatgaaattcatgaccacaataagtaatttttcctgatacctattcaaggattgaacattgttcatcagtaaacttaaccaaacgtttcaaggcatgttatttataattattataattattattattattattattattattattattattaata

SEQ ID NO: 46272 - DNA, 397 bp, Gossypium hirsutum
  Clone ID: LIB3196-024-P1-M1-A4
atcaacgaccgcctggcttcctacctggagaaggtgcgcgccctggaggaggccaacgccgacctggaggtgaagatccgtgactggcacctgaagcagagcccagctagccctgagcgggactacagcccctaccacaagaccattgaagagctgcgggacaagatcctgaccgccactattgaaaacaaccgggtcatcctggagattgacaatgccaggctggctgcggatgacttcaggctcaagtatgagaacgagctggccctgcgccagagcgtggaggctgacatcaacggcctgcgccgggtgctggatgagctcaccctgtctaagactgacctggagatgcagatcgagagcctgaatgaggagctggcctacatgaagaagaacc

SEQ ID NO: 46273 - DNA, 376 bp, Gossypium hirsutum
  Clone ID: LIB3196-024-P1-M1-A5
aaaattcaggacaaataaattggaaccattaactattgactgcaaatttatggacgattcttcttcacttgtctttttctaatggtataagaaaataaaactggatacataactaaattgatttttttttcaataaaaaaaactttcttaatttcaagtatattataataatataacagcaattatgagtctatgtaaaccccagagcataagttgttacacagttatagttatctaatgaggtattttatctatctagatatgatgtccatagggaatcagcaagaaattatcgtgtttcaatttttcattgaatagattaaaataaaagaaaaaatcgaatttttgatagagcacgccatgtcttgtctccatt

SEQ ID NO: 46274 - DNA, 379 bp, Gossypium hirsutum
  Clone ID: LIB3196-024-P1-M1-A6
tggatcagaagataatgctgaaaatgcaaatgatgactatttgctaaaattgaggtggttaaaaaggtttctttctgcaaaatttggttggaaactacgagatgaattccggcatttgagaaaactatccattcttcgagaactttgccataaggttggtctagagttggttcctaaagactatgacatggaatgcaaagaacctttcaaaggttgcaatattattagcatttatcctgtttgtaagcatatagtatgcacttctgccgatggcagaacattgttagagtcatccaaagcggctcttgacaaaggaaaactagaggatgcggttaattatgggacaaaggcattagcaaagatgatagctgtatgtggt

SEQ ID NO: 46275 - DNA, 300 bp, Gossypium hirsutum
  Clone ID: LIB3196-024-P1-M1-A7
tcgaggggatgtccgtgctctggtggcatttccaaatgcctcttgactacctccagacataccaatgtctagagtgagaatcctacacaaaagatatgaaataagcagtgtctgcaagtatacttcaggttgtaattagttacaacgaagtaggtaattactctaaggatcgtacctaatgaaggttagcactaaattaattataacctaagcacaaataaatctaattagtaatttacataaattatagtacgataaaaaaaatatttttagatctttataaataatgaaatagaaaaa

SEQ ID NO: 46276 - DNA, 144 bp, Gossypium hirsutum
  Clone ID: LIB3196-024-P1-M1-A8
attttaggcattgcagtattatgcttattatggtagaatcatggatcttggctatagatccactgcgttaatgtaattgcttcagttcgttgctgatgttactgtgattcttaatatttgaaatgctctcaaaggatttgtatc

SEQ ID NO: 46277 - DNA, 326 bp, Gossypium hirsutum
  Clone ID: LIB3196-024-P1-M1-A9
atgggagggtgagaagggcccaccccgcgcctgccctcagtgtctttggtggcgccttccttgccggcctccagggcgctcagcaccgcgtctgtaaggacccgcccgccgctctcagcctgacacgccagccaggaggtctgtagtcggtgaccagtaagggcacgggatggtgcaggtaaaagcacatctttctcacaccttgctctttggaaggcccaggagaacatctgtgaaggccgttggaggtgctctgagcaccgtggcatgtctggcacgtggtctccaagctgcaattgcccgggttggttggggaaagggagtgg

SEQ ID NO: 46278 - DNA, 286 bp, Gossypium hirsutum
  Clone ID: LIB3196-024-P1-M1-B1
ctcaacggtgttttgtgattaaaaaaactaccaagattgtggcaaaacaagatggcttccctgcatgaaccatggctagtggagaacgggttgaaggggtctagcaaggagattcgccatggcaggactgcacacaacatgtcgtcttcgtcgttgcggaaaaaatcggacctgacgcttgtttccaaggttcggtatgcaatgcttaggcagttcctcgccaatcttcaagaggtcatattatggaccaagctctccgttctcttaccagctattccattggcca

SEQ ID NO: 46279 - DNA, 334 bp, Gossypium hirsutum
  Clone ID: LIB3196-024-P1-M1-B10
gccaaccaaaaaattaaaccatgtatcaccctcaagttccaggcgagcccacccaaaccaccacttccctcgtcgagaccgccaccggcgccatccaaagcttccgccctatcaaacaaatccatcaacacctctgcgcatttcatttctatggctacgacatgacccgtcaagtgcaagcgcaccatttctgcgcacatcaaaacgaagaaatgcgacaatgtctcatatatgacacccccgaagccgatgcaaagctcatcggattggagtacatcatatcggagaatttgtttttgacgttgccggaccaagaagaaccgctttggcattc

SEQ ID NO: 46280 - DNA, 166 bp, Gossypium hirsutum
  Clone ID: LIB3196-024-P1-M1-B11
gggggccaccgaaaaactgaccgatgtgtaaaactaaaaaaacaggcgcacactcccaaaccaccactttcctcgtagagaccggcaccggagccatgcaaagcttaacgcctatacaacaaatgcatcgacccctctgaccatcatatttctatggggaccccat

SEQ ID NO: 46281 - DNA, 395 bp, Gossypium hirsutum
  unsure (1)..(395): unsure at all n locations; Clone ID: LIB3196-024-P1-M1-B2
atcatcactggagatgagggaggcagctgccacggagatccgccgagccatcacaggtcgcatcccagaaagcttaagaaactgtgtgaacaaggaattttttgtcacatcagcgccttggtcagtaatagaccagcaagcaattcatcctgagctcaatggtgccacatacagatatccgccaggcatcgtgggggtggctccaagaggacttcctgcagccatggaagggatcatccctggaggcatcccagtgactcacaacctcccgacagtggcacattcttnccaagcgccctcttccaaccagcccacaaaacatggggacaatcgagagcaccccaacgagcaatagcagagaatgccagaaggtaatcattcagatacacttggga

SEQ ID NO: 46282 - DNA, 289 bp, Gossypium hirsutum
  Clone ID: LIB3196-024-P1-M1-B3
acgggcgattaacccgtctttgcgctttctttcccgtgtttttctcttcaaaggatgcctagctcgccagaccttttcgtcacagcaatgccaaaatgagtgtctaatcaataggctccgcgcctgtggaccccagacccgaattcgctccgaagccggcaccaccgagtggtggaaccccaactgtcaacagctcaggtgtgctggtgtatctgtaatgaggcagactattgaacctaatggccttgttttgccttccttcaccaatgctcctcagcttctctacatt

SEQ ID NO: 46283 - DNA, 378 bp, Gossypium hirsutum
  Clone ID: LIB3196-024-P1-M1-B4
cccacgcgttcttcagatcagtggcgaaggagttggatggattctatttcgagcaaaggcatgcaaaggccacggtgaaaatgggtagagtttggaggaacataaatggatgccgccacttcatagtcgaatggaatgttaacatcagcttgctttccaattgcgttgccgcttatgtacgctatgacaaacatgacatagtggctactgacaccatgaaaaactctgtttattgtcaagcaaaggaatgttcagaacgaacctctgccagagaattagctattctactttgctcgcacttcacattattttatacacaggttgttactgcaattgtttatatagcggaaaagccatcggaacgcatttctgtctatg

SEQ ID NO: 46284 - DNA, 180 bp, Gossypium hirsutum
  Clone ID: LIB3196-024-P1-M1-B5
accaggcggtcagggtttaacagacaaaccagctagctaaatcaaccgcatttcactcccagcgcagaaaaatctaaaaagcgctgggggaggctaaaacccccccacgcaattggatgccagacaaggttgggggcgcttttgcacccaagccatcatctggaccccacaaatccaggg

SEQ ID NO: 46285 - DNA, 305 bp, Gossypium hirsutum
  Clone ID: LIB3196-024-P1-M1-B6
cccacgcgtccgcgctttaccatcaaaaccagctagctaaatcaaccgcatttcaccaggatggctagaggattgaagaaacacttgaagaggctcaatgcccctaggcattggatgcttgacaagcttggtggtgcttttgcacccaagccatcatctggaccccacaaatccagggaatgcttgccattaattctcattctgcgaaacagattgaagtatgctctcacgtacagagaagttattgctattctcatgcagaggcatgtcatggctgatgggaaggttcggaccgataagactta

SEQ ID NO: 46286 - DNA, 292 bp, Gossypium hirsutum
  Clone ID: LIB3196-024-P1-M1-B8
cccacgcgtgcggttaaaaccctttcaagcaaacccccatttcttcaaagcaatggcggagtcaagagatagactcgggagagccgttgatatagcggaagtcttcgctcgaagacggtctgggcctttggggattctctcagatgaatcgatggatcttttaggctctcccgttcgacaatcagtcacgcgtaggtcaatgggtgttgttggtgttactacttcgacggcgcgtggtgtagggctccgacgaggtggcagttttgggactccgagaatcggtattcgacgt

SEQ ID NO: 46287 - DNA, 387 bp, Gossypium hirsutum
  Clone ID: LIB3196-024-P1-M1-B9
atggacagccccgggccccgcgggccgtccgttcggctccggggtgtgttacccaaagaatgataaagttggttttatttcaagaagtcgatcgaaaagaaagcctcagcgtctagagttcagctgacgggaaagggggtgcgcagcctccagtttgagagctatccggagccccaaaacaggggtgggcgccagctccctgcacgccctgagcttctatcgtaggccggaccatgggaaccccaaagccacggatcctgccctggctggtgtcgcagctggacctggggcaactggagggcgtggcctgggtgaacgagagccgcacgcgcttccgcatcccttggaagcacggcctacggcaggatgcacaggaggaggatttca

SEQ ID NO: 46288 - DNA, 376 bp, Gossypium hirsutum
  Clone ID: LIB3196-024-P1-M1-C1
aagaaatttcatgtacatttctttatttttctcagatttttctcactctctgcctcctttttctctccaatgttagttgaatcgatccaggaggaaaaaccattcttatcagggatggtggatggaagcaccaatttgccagtcaacctttcttgctttgagctgattaaaccaagcttggatgagaccaaccagcattgttctcttgatgtcttgcctattctactagaggaaacttcattttcagcaagagaaaaatgcagcttaaacacttcacaaggccaggatgtctatagcatttctgtcttgcctgaggaaggaaacatgaatccaaaatgcacaccacagttaacttttttgagcctcttagaagttc

SEQ ID NO: 46289 - DNA, 367 bp, Gossypium hirsutum
  Clone ID: LIB3196-024-P1-M1-C10
cccacgcgtccgggctggagaacttgccagagctgagtgctcttcaaaaactgaagattctcaatctaaatggttgcagcaacctcaaaagccttccagacttaacatccctattgaaacttgagaagctcgatctacatggtactgaactttggagcgaagatgtggttaaatccctgagtcatattaaagacctccaaatatgaccctaaaggtgagcacatagccccccttcttgacagccataatttcttcatgtaactttcgatgagaggttgttcaagcttaccaagaggtctattgggaactggagttgaaatttgctttattaaggtttgcacatttaaagcaccttcatctgctggac

SEQ ID NO: 46290 - DNA, 368 bp, Gossypium hirsutum
  Clone ID: LIB3196-024-P1-M1-C12
caacaattctcatgcgggtcttgaagaatgatctcattaagtacggtcaagatgaagaagcagctgatgatcaagaagagactggatggaagtatattcatggagacgtattccgtttcccaaagtacaaatctctctttgctgctgctctcggatctggaacacagctgttcactttaacggtcttcatttttatgcttgcactggttggtgtcttttatccatacaacagaggagctctatttactgccctggtggtaatatatgcccttacgtcagggattgcaggctacgtagcaacttctttttactgtcagcttgaagggacaaactgggttaggaatctgttattgactggctgccttttc

SEQ ID NO: 46291 - DNA, 378 bp, Gossypium hirsutum
  Clone ID: LIB3196-024-P1-M1-C2
cggacgcgtggggaaaccctaaaacaacaaaaatgaaaccaggagggcaaagcttagctctaaccaccaccaccatagccattcaaatcttaaccttcagcctaattttttcgttcagcttcgctctcctcaaaaccccacaagaaccaaccatacaccaagtcactgaaaattcagatatcccaactctgaagaccaaattctggagaaaccacgtccacaaacagttccgagttttcatggaaacgtacggaaagaactattcgaccagggaggagtacatgcaccgcctcgggatctttgcgaagaacttggtgagggctgctgagcaccagctgcttgatcctatggctgtgcatggtgtgactcagttctctg

SEQ ID NO: 46292 - DNA, 365 bp, Gossypium hirsutum
  Clone ID: LIB3196-024-P1-M1-C3
ggcgaatcgttcacgacaacgacgccgagtccaagctcgacgacgatgtttccagcatatctaaatccctcgacctacatggcagcatcgaaaagggtgatgttagcagtctacccagtaaagatttcggcggtctttattcggttaagcccttgttcttaatcaaaccctctggagcggaagatataagtcggatcgttaagctcgcatcgaggacctccaatttgacggtggcggcaaggggtaacggccactcaattaacggtcaggcgatggccgagggggggctcgtgatagacatgtcttcgacggagaaaaaccatttcgaattcttgccaatcaatggctctcattatatcgatgtt

SEQ ID NO: 46293 - DNA, 385 bp, Gossypium hirsutum
  Clone ID: LIB3196-024-P1-M1-C4
cggacgcgtgggggctagccaagctgccttccagtatttcggagttgaagaaagccaagttcctctaatcatcattcagagtgatgatgggaagaagtattttaaaccaaatttgaaggctgatgacattgcaccatgggtgaaggatttcaaggaaggaaaagttgcaccgtatgtgaagtctgaacctattcccaaggagaacaatgaaccagtgaaagtggtggttgctgacacccttcaagacatggttttgaaatcagggaaaaatgttctgctcgagttctatgccccttggtgtggacattgcaaaaaattggcaccaatcttggatgaagttgctgtccattatgaaaaagatgccgatgttttaatcgcaaaactt

SEQ ID NO: 46294 - DNA, 385 bp, Gossypium hirsutum
  Clone ID: LIB3196-024-P1-M1-C5
acgcccacgcgtacggtttgattcaccagagaggaactgaggatgcgatgaactatctatctaaagaagctgcaaaagggaaagtgaaaagtatcgttttcctaatgccttgccatgccacaccctactattccactctgcataacaacctgcctatgcgtttcttggattgtgcacccagtaagggaatgcctgctgaatcggaccgtttcatgatggatccagttagttttgcggtagattttgcaaaaaattggtctcgccctagtcacattgtattgtttgattcaaaggagaggcacttgaaagattttctagtttcacattcttttagaagaggtagaaggttcttccatgctcactttaaggtggaccgtgatcttca

SEQ ID NO: 46295 - DNA, 385 bp, Gossypium hirsutum
  Clone ID: LIB3196-024-P1-M1-C6
ggagaagtgggcaatacaggaaaataaggtcccagttgtcgcgtggagacatatttgtagtcccagcaaacttcccagttacattcgttgcatcccaaaaccagaacctgcggatgactgggttcggtctttacaaccagaacattaacccagaccataaccagaggatcttcgtggctggaaaaatcaaccatgtgagacaatgggatagccaagccaaggagttggcctttggggtgtcatcgaggttggtggatgagatattcaacaacaacccacaagagtcttacttcgtgtctcgacagaggcagcgtgcatctgaataaagagttagaggcaataataaccacatagtctcgtgtttacggactaatgtgaaattttc

SEQ ID NO: 46296 - DNA, 184 bp, Gossypium hirsutum
  Clone ID: LIB3196-024-P1-M1-C7
caagcaaccgcaggcgcgtgaccttattttgctcaaattttcactactctctgtctacatgttatccccaactggacagacatcgatccacgaggataaaccaattctaattcgggatagtggaggggagcgccaatgtaccaataccccatttttgctctgagccgataaaaccaagcttggg

SEQ ID NO: 46297 - DNA, 368 bp, Gossypium hirsutum
  unsure (1)..(368): unsure at all n locations; Clone ID: LIB3196-024-P1-M1-C8
gtaagtcaatgatgaagaaatatgagagtgtgctacgagttagtacaggtacttacttataactcatgagtaaaggactcggtatactatggaaatgtggtaagaatgcatacgattaaatatgtgactatattacgtgtggtataggtatgtacacagaactcatgtgaaatgaatttggtatatgatgaatcgttggtaagaatgcacacgaacaagttatgcttgtgagatactggtaaccatgtgattaatgatttacatttatgatgaatggatgcatgataagatttgaaaatgatcatatgttaagtttatgagcctaattgngttgtgatatagtacggtgtatgtacttaaaccgtgat

SEQ ID NO: 46298 - DNA, 387 bp, Gossypium hirsutum
  Clone ID: LIB3196-024-P1-M1-C9
atcaacgaccggctggctttctacctggagaaggtgcgcgccctggaggaggccaacgccgacctggaggtgaagatccgtgactggcacctgaagcagagcccagctagccctgagcgggactacagcccctaccacaagaccattgaagagctgcgggacaagatcctgaccgccactattgaaaacaaccgggtcatcctggagattgacaatgccaggctggctgcggatgacttcaggctcaagtatgagaacaagctggccctgcgccagagcgtggaggctgacatcaacggcctgcgccgggtgctggatgagctcaccctgtctaagactgacctggagatgcagatcgagagcctgaatgaagagctggcctacatg

SEQ ID NO: 46299 - DNA, 379 bp, Gossypium hirsutum
  Clone ID: LIB3196-024-P1-M1-D1
gtgcacgattctgaaattttgcctgccgctccatctctacatcacaggaatggcgacagatgttgcagcccccgccaccgtcgcacccaaagacccaacccaacctcaccttgaagtaaaactcttcaaccgctggagcttcgaggaagttcaggttgctgatatctccttgagtgattacattggtgtccaagcttcgaagcatgctacctatgtgccacacactgctgggaggtactcagttaaacgtttcaggaaggctcagtgcccaattgttgaaaggcttacaaactcacttatgatgcatggccgaaacaatgggaagaagcttatggcagccaggattgtgaagcatgccatggatattatttatctcttg

SEQ ID NO: 46300 - DNA, 345 bp, Gossypium hirsutum
  Clone ID: LIB3196-024-P1-M1-D10
atcagagggcttgtcccttgcattccggcacatggccagctccctgctgggccactgcagccaagtctcctgtgaaagcctccttcatgaggtcatcgtctgtgtgggctacttcactgttaaccacccagataaccaggtgatagtgcagtccggccgccaccccacagtgctgcagaagctctgccaattgcccttccagtatttcagtgacccacggctgatcaaaatactgttcccttcacttatcgctgcttgttacaacaatcatcagaacaagatcattctggagcaagagatgagctgtgttttactggccactttcattcaagatttggcacaaac

SEQ ID NO: 46301 - DNA, 252 bp, Gossypium hirsutum
  Clone ID: LIB3196-024-P1-M1-D11
atgctaggacatggtgcgtgggctgctgcccttgctcaatcctgaggtcccagatcagttctacaggctctggctgtctctttttctacacgctgtcgtggtgcactgcctcgtgtctgtggtctttcaaatgaccatcctgagggacctggagaagctggccggctggcaccgtatcgacatcatcttcatcctcagcagcatcacaggcaacctcgccagcgccatattccttccataccggtcagaggt

SEQ ID NO: 46302 - DNA, 265 bp, Gossypium hirsutum
  unsure (1)..(265): unsure at all n locations; Clone ID: LIB3196-024-P1-M1-D12
ccgatctcttccttccttattatctaaaacatagatcctccacctttagtggacgaagccaacaccgtcacttcgattgctccatctttccccatgacttctagtaattgttattcatctctttatccttttcctattgacctaaacgaagatgatcaacaccaacaccaccagcttttcaacttaatatctcaaccttcttcttcatcatcatcatcatcttcttcttcgncgccttctacttcacttactttgcctttttcct

SEQ ID NO: 46303 - DNA, 335 bp, Gossypium hirsutum
  Clone ID: LIB3196-024-P1-M1-D2
cttcgcaaagatccaaaacaaggaagggattccaccaaaccaacaaaagctcatattttccgggaaacaacttgaggacggtcgcacctttgccgatttcaacatccaaaaggagtccaccctccatttggtattgaggcttcgtggtgggatgcagattttcgtcaagacgttgactgggaaaaccataactttggaggtggagagttccgatacgatcgacaatgttaaggcgaagattcaggacaaagaaggaattccaccagatcagcaaaggttgattttcgctgggaaacaattggaagatggaaggaacttggctgattacaatattc

SEQ ID NO: 46304 - DNA, 141 bp, Gossypium hirsutum
  unsure (1)..(141): unsure at all n locations; Clone ID: LIB3196-024-P1-M1-D3
cggtccaatgttttcccacatatgagtgagatttacacatataaggcttacgggcccattaagctcgtacgacccaactcggcccaacatggcctattatggccacagnccatgagttcgctcatggtggcctctactatc

SEQ ID NO: 46305 - DNA, 387 bp, Gossypium hirsutum
  Clone ID: LIB3196-024-P1-M1-D4
tgacacttttaatccagctcagtcaaaagagcgcgctggcgccggtccggcatttccgggatcagcctttctgagcacccttctttctttcagccaactgctcgctcgctcacctccctcctcggcaccatgaccacctgcagtcgccagttcacctcctccagctccatgaagggctcctgcggcatccggggcggcatcgggggcggatccagccgcatctgctccgtcctggccggagggtcctgccgcgcccccagcacctacggcgggggcctgtctggctcttactgccgcttctcctccgggggagcctgcgggctggggggctgctctggcggtggcttcagcagcagcagcagcttttgtagtggcttctggggagga

SEQ ID NO: 46306 - DNA, 406 bp, Gossypium hirsutum
  Clone ID: LIB3196-024-P1-M1-D5
atgcgagtggcctggaccccgcgggtgactgctgcagggcttctccccagctggactgtgcgctactcgaaagcgctctctccactcgcacggcttgttgggctcatcatgaagcgcttgggctccgtgcagcggaaaatgccgtgtgtgtttgtgacggaggtgaaagaggagccttccgccaaaagggagcatcagccatttaaaggtttggcaactgaaactataagtcacaaggcattagatgcagatatatacagtgcaattccaacagaaaaagtggatggaacatgttgttatgttactacctataaagatcagccatacctttgggctcgactagatagaaaacccaacaaacaagctgaaaaaagatttaaaaattttctacattcaaaagaaaacc

SEQ ID NO: 46307 - DNA, 372 bp, Gossypium hirsutum
  Clone ID: LIB3196-024-P1-M1-D6
cccacgcgtccggttaagaagcgaatgaagaagcctatctatgtctactaccaactggacaatttctaccagaatcatcggaggtatgtgaagagccgaagtgactcacagttgaaagaaaatagcagttgggatgatgttagttcttgtaagcctgaagatatgtctaaggaccagccaattgttccctgtggtcttatagcttggagtttatttaatgatacctatagtttctccctcaacgatcagcaattggcagtgaacaagaagggcatctcctggaaaagtgatagggacagtaaattcgggaaagatgtatttccccaaaattttcagaatgggagtcttaaaagtggtgcaacgcttaatcta

SEQ ID NO: 46308 - DNA, 322 bp, Gossypium hirsutum
  Clone ID: LIB3196-024-P1-M1-D7
attgcgggtcagtgtacaggaagaggcaggcactggctggctcagctccactcggttggagtggaagtggccaaaccatttggatggacagggtcctcaccctacccctttcctgtgaggcaagggtgatggtggagttgctggaggtagaggagctatgtggagcaaaggccaacacaagggaaggaatggacctgtgagaggaagggaaggtggcacaaagtctcatttcacgaaggaggggaagaaagaaaggcagggagggaacaccccccccaaaaaaatcaaagcgcgaagaaaatcacagggaatggttagggtg

SEQ ID NO: 46309 - DNA, 323 bp, Gossypium hirsutum
  Clone ID: LIB3196-024-P1-M1-D8
cgtttgtctcaaatgtcaaaaaatggcccgtaccaagcaaaccggccgtaagtctactggtgggaagggtccaaggaagcaacttgctaccaaggctgcccgtaaatctgccccaaccaccggtggtgtgaagaagcctcatcgataccgtcctggaactgttgctcttcgtgaaattcgtaaataccagaagagtactgagcttcttatcaagaaattgcctttccagaggcttgttcgtgaaattgcccaggacttcaagactgatttgcgtttccagagccatgctgttctagctctccaggaagctgcagaggcatacc

SEQ ID NO: 46310 - DNA, 372 bp, Gossypium hirsutum
  Clone ID: LIB3196-024-P1-M1-D9
cttactctcaaccaaaaatgactgctcaggccgacaaagagatcgaagagatcctggcagctcatctcgaccaacaaaaaatcgattccgagataccagagcaacctgttgttgaagatgacgacgaggaagatgacgatgacgatgatgatgaagatgatgccgaaggtcatcatgagggagaaggagatggaactggtaggtcaaagcaaagccgaagtgaaaagaagagtcgcaaagctatgttgaagcttgggatgaaaccgatccctggtgttagccgggtcactgtgaagaagagcaagaatattttatttgtcatctcaaaaccagacgtgttcaagagcccagcatcagatacttatgtaatat

SEQ ID NO: 46311 - DNA, 372 bp, Gossypium hirsutum
  Clone ID: LIB3196-024-P1-M1-E1
ctttcccttctttttctcttcaatggctgcctagctcgccagaccttttcgtcacagcagtcccaaaatgagtgtcaaatcaataggctccgcgcctctgcaccccagacccgaattcgctccgaagccggcaccaccgagtggtggaaccccaactgtcaacagctcaggtgtgctggtgtatctgtaatgaggcagactattgaacctaatggccttgttttgccttccttcaccaatgctcctcagcttctctacattgtccaaggaagaggtattcaaggtattgtgatgcctggatgtgccgaaacattccaggattcacagcaatggcagcatcaaagccgtggcaggttccaggaccagcaccag

SEQ ID NO: 46312 - DNA, 372 bp, Gossypium hirsutum
  Clone ID: LIB3196-024-P1-M1-E10
ctcagccaaaggccggtagctcgtttatcaactgagcgaatacttagttgagcccttacaaataagtattcgcttagttgataaagagttgatcttttgtgtatgtacataagggttgataatgtgaagcaagtacgatatcgtaaatttgtgcatatgaaattatccgtttagctatatgaatgctatacttttgttgtgctggaattccttgctcaaaacttactaagcataaattgcttactccgtttcattgctcctctgttttatagatttggttctccagctatcggactcgggatcttgaagtcaaagtcgcccacactatcaaagcccccccttttggtacaattttggttgaacttcgaaatg

SEQ ID NO: 46313 - DNA, 362 bp, Gossypium hirsutum
  Clone ID: LIB3196-024-P1-M1-E11
aaaatacagagctatcgtaatcatggtgaggaataagtcagcttgcgtagttttgctcttttctcttttcctttcctttggcttgctttgttctgccaaagactttcccggcagaagaggcgacgatgatccttcgaagaggtacgaggactgccggaggcgatgcgaatgggatacacgtggacaaaaggagcaacagcagtgtgaagaaagttgtaaaagtcagtatggggagaaaggtcaacagcagcgccaccgccctgaagatccccagaggagatacgaggagtgtcagcaagaatgccgacagcaagaagaaaggcaacaaccacaatgccaacaaaggtgcttgaaacgattcg

SEQ ID NO: 46314 - DNA, 401 bp, Gossypium hirsutum
  Clone ID: LIB3196-024-P1-M1-E12
atgcactgtgcccatctatgaggggtatgccctgccccatgccatcctgcgtctggacccgtctggccgggacctgactgactacctcatgaaaatcctgactgagcgcggctacagcttcaccaccacaggcgagcggaaaatcgctgcgtacattaatgagaaactgtgctatgtcgccctagacttcgagcaggagatggccacaggaggcttccagctcctccctggagaatatctaccagctgcccgatggccaagccatcaccatcggcaacgagcggttacgctgacctgaggctctcttgcaacctttctttctgggcatggagtgctgtggcatccacgaaactaccttcaactgcatcatgaagtgcgacgtggacatccgttaagacctg

SEQ ID NO: 46315 - DNA, 379 bp, Gossypium hirsutum
  Clone ID: LIB3196-024-P1-M1-E2
cctcgctcaagctttcaacgttgaccacgacatcattaggaaaatccaacgtgtacgaggaaatagaggcaccatcatcagagtcagggacagactccaagtcgtaacaccacccagaatggaggaagaagaacgtgaggagcgccagcaggagcagcgataccgccatacgagaggagggtctcaagataatggcctcgaggaaactttctgctccatgaggatcaaggagaaccttgctgaccctgaacgtgccgacattttcaacccacaagccggtcgtatttccaccctcaacaggtttaacctccccatcctccaacgacttgagctcagcgccgagaggggtgtcctctacaacagagctggtttgattcca

SEQ ID NO: 46316 - DNA, 320 bp, Gossypium hirsutum
  Clone ID: LIB3196-024-P1-M1-E4
aattcccttcttaagttagccatggataacgcagctagtgcattcttcacctcttccttgagtcgtttcatcactgtgtcctcaatttctttcgccacttttctgagcatctgctccacctttgctgtcatggcattcgctttctatttcctcttcaagttcctgtctggaggtaacgggaaaacaaagcaagcccctctcccacccctcctcctgaaaccttggcctattgtgggaaatctccctgagatgcttataaacaagcccacatttaggtggatacatgaactgatgaagggtattactacgggcattgcatg

SEQ ID NO: 46317 - DNA, 366 bp, Gossypium hirsutum
  unsure (1)..(366): unsure at all n locations; Clone ID: LIB3196-024-P1-M1-E5
atcgaggctgtcaccagggtgttccctcaggtcaatgtcacgaagatgggcagttggggacacttcaactgttcctactcctgctccttccttctggctccggaagaccccatgttccccgtcatcgggagcctcttcctgcgagagctggtcaaagagtttggcacagaccacatctatggggccgacactttcaacgagatgcaaccaccctcctcagcgccctcctaccttgccgcagccaccacgggcgtctatgaggccatgattgcagtggatactgaggctgtgtggctgcttcaaggctggctcttccagcaccagccccagttctgggggcccgcccagattanggctgcgctgggg

SEQ ID NO: 46318 - DNA, 384 bp, Gossypium hirsutum
  Clone ID: LIB3196-024-P1-M1-E6
ttgtcttgtgtttgattgcaaggaatccatcccaacttcctatagaatctattttatgaatactgagtgttggaataaaattattgaccaccctccacagatgtattcttattttacttaagatcgggagattccagatctttgaataaaattctttagtgatagtttggtctgtaatataattatgtaggtgtggattcttagatattagccatttgtaagcactttgttctgtatattcgcctgatttgtcccctctctagactagaacatccggctgtatcctattcactaagggaatcgacaatactacctctgtttgctctacttcgagtgtgggtagccaagtattattccaaatatttgttgattcgccattcccta

SEQ ID NO: 46319 - DNA, 370 bp, Gossypium hirsutum
  Clone ID: LIB3196-024-P1-M1-E7
atgcccaggccaagcaagcttctgtctgcacctgctctcaatcctgctctcaccatgagcctccgcctgcagagctcctccgccagctatggaggtggttttgggggtggctcttgccagctgggaggaggccgcggtgtctctagctgttcaactcggtttgtctctgggggatcagctggaggctacggaggcggcgtgacctgtggctttggtggaggggctggtagtggctttggaggtggctacggaggtggccttggaggtggctttggtgggggttatgctggtggctttgttgattttggtgcttgagatggtggcctcctcactggcaatgagaagatcaccatgcagaacctcaacgacc

SEQ ID NO: 46320 - DNA, 390 bp, Gossypium hirsutum
  Clone ID: LIB3196-024-P1-M1-E8
atgcacagcaggcggcgagcgggaggcactggcctccagagcccgtggccaaggcgggcctcacgggcgacgacggagccgggatcggtgcctcagcgttcgggctggagacgaggccaggtctccagtcggggtggacgtgcccaccagctgccgaaggccgggacgccaggtccggcggacttgccgagcgggacatgacatggtccggtgtgacggcgaggacagaaggggcgcgtccggccttcctgaacaccctatgctggtggggctgcggcaagaagcgggtctgtttctttacttctcccacggagtcggcacactacagctgccctctgggctcccagaacccacaacatgaaagaatggtgctacccagctcaagcctgg

SEQ ID NO: 46321 - DNA, 278 bp, Gossypium hirsutum
  Clone ID: LIB3196-024-P1-M1-E9
cccacgcgtccgtctcactcaaaaatatatggggttaattgtaattgatagagaataattgaattaggcttaattgtttagacctaagctttccccattatggtcttaggttcgaactacctaccacccatttcctttccttttatttgcaagattccaatgtttttttttgcttgcaaaaaaaaaaatccaaatttaaacaactagcataatagcaaaaaatgtcaaaagggcgggcgctttcaaagagacacgctttcttactcgcgaatgggacg

SEQ ID NO: 46322 - DNA, 372 bp, Gossypium hirsutum
  unsure (1)..(372): unsure at all n locations; Clone ID: LIB3196-024-P1-M1-F1
cgaaaatatccactccgagatgtacagtctccttctcgagacttacataaaagattccgatgaaaagaaccgtcttttccgcgccatcgagacggtgccgtgtgtggctaaaaaagccgagtgggctatgaaatggatcgacggcggagaaactttcgccgaacggttaatcgcttttgcttgcgtagaggggatctttttctccggaagtttctgtgccatattttggttaaaaaagagggggttaatgcccggattaactttctcaaacgagttaatctcacgagatgaaggtctccactgtgatttcgcttgcttgctgtactctctcctncggtcaaagctgagtgaagaacgcgtgagagggatagt

SEQ ID NO: 46323 - DNA, 393 bp, Gossypium hirsutum
  Clone ID: LIB3196-024-P1-M1-F10
acagtagcatttgtgccaatttctggttggaatggtgacaacatgctggagccaagtgctaacatgccttggttcaagggatggaaggtcacccgtaaggatggcaatgccagtggaaccacgctgcttgaggctctggactgcatcctaccaccaactcgtccaactgacaagcccttgcgcctgcctctccaggatgtctacaaaattggtggtattggtactgttcctgttggccgagtggagactggtgttctcaaacccggtatggtggtcacctttgctccagtcaacgttacaactgaagtaaaatctgtcgaaatgcaccatgaagctttgagtgaagctcttcctggggacaatgtgggcttcaatgtcaagaatgtgtctgtc

SEQ ID NO: 46324 - DNA, 399 bp, Gossypium hirsutum
  Clone ID: LIB3196-024-P1-M1-F11
atggctcaccctgggggaaatggtgtatatccctgcaggcagaattcctgaattccccactctccaggctgcaaggtgttgaccaaaggcctgggtgtgtcctctctctagcaccaccacgcactggaatggctaacaggggacctgcatatggcctgagccgggaggtgcagcagaagattgagaaacagtatgatgcagatctggagcagatcctgatccagtggatcaccacccagtgccgaaaggatgtgggccggccccagcctggacgcgagaacttccagaactggctcaaggatggcacggtgctatgtgagctcattaatgcactgtaccccgaggggcaggccccagtaaagaagatccaggcctccaccatggccttcaagcagatgg

SEQ ID NO: 46325 - DNA, 380 bp, Gossypium hirsutum
  Clone ID: LIB3196-024-P1-M1-F2
ctcaaagtgccctttgcgggttttcactttggcccttttccatttttattaggtctcaaagcgccctttgtgggttttcactttggcttcttcccctcattttttcgagttttcactttggcttcttcccctcattaggtataatactttttgactaaattcgagttcactggattagacaagttttttcatctatttcagccaggattaatgctcctccgaagaaagcttttttcaccacataagactcctcccaatttggcatctattttcttctgaaatccttctgtataggaagaatctttttcagaaccaaatctccctcgtgaaattctcttgggtgaacctctttgtcataagccagcatcattcttttttgt

SEQ ID NO: 46326 - DNA, 314 bp, Gossypium hirsutum
  Clone ID: LIB3196-024-P1-M1-F3
atcgataatctgtgctttgctgggctcatctccatgattgaccctccacgggcggccgttcctgatgccgtgggcaaatgtcgaagtgctggaattaaggtcatcatggtcacaggagaccatccaatcacagctaaagctattgccaaaggtgtgggcatcatctcagaaggcaatgagaccgtagaagacattgctgcccgtctcaacatcccagtcagccaggtgaaccccagggatgccaaggcctgcgtagtgcatggcagtgatctaaaagacatgacctccgagcagctcgatgacattttgaagta

SEQ ID NO: 46327 - DNA, 363 bp, Gossypium hirsutum
  Clone ID: LIB3196-024-P1-M1-F4
atgtccagcagctccagatctcagttgaccaacatggtgacaacctgaagaacaccaagagtgaaatcgcagagctcaacaggatgatccagaggctgcgggcagagatcgagaacatcaagaagcagtgccagactcttcaggcatccgtggctgatgcagagcagcgtggtgagaatgcccttaaagatgcccacagcaagcgcatagagctggagactgccctgcagcaggccaaggaggagctggcacgaatgctgcgtgagtaccaggagctcatgagtgtgaagctggccctggacatcgagatcgccacctaccgcaaactcctggagggcgaggagtgcagaatgtctggagaat

SEQ ID NO: 46328 - DNA, 362 bp, Gossypium hirsutum
  Clone ID: LIB3196-024-P1-M1-F5
acggttgatgaaacccttgaaagggattcttttaaaagtcaggggggttattaacaccaacctacagaaaggcacgaccaattcagactcaattaaaattcaagcaacatcaagttgaatatttcttcatttcaaaggattaatgatcctaaagcttaattagtgtgggaacgaatacgcttttctatcgccttaatcttttcaaggtgataaaggtgaaccttgctgctattgagctaactaactatgcttttatttggcggagatcaatttgatcttaacttggccacaaaatggtgaacgccctattaactcttgggaagaaatgaatgctgtgattctacaaaatgtcattctgaatc

SEQ ID NO: 46329 - DNA, 380 bp, Gossypium hirsutum
  Clone ID: LIB3196-024-P1-M1-F6
cgaagataaagacaatgctaggaaagatgaaattgctgctcttggaggtcaaacggctactggaattaatgtctttagtgcattttatgatagattgaaggagattcgtgagtaccatagaaagcacccggctgctcgacttgtcaatgctaatgaagatgatgaggctttactcaaggaagaaccagttattgagttcagtggcgaggaagcctttggtcggtacctggacctgcacgaattgttcaatcagtacattaattctaaatttggatccaaaattgaatactcagcttacctcgacgtctgttcacagccgcacaatatcccttggaaattgaagtcaacacggcaatacaaaaagtacatggagaatttgc

SEQ ID NO: 46330 - DNA, 386 bp, Gossypium hirsutum
  unsure (1)..(386): unsure at all n locations; Clone ID: LIB3196-024-P1-M1-F7
atgaattatagaaataaatacttttgggaaccacattcagtatttatgtgtcaacaaaatgagattataaaatcaaacatatattatagtaactgaaagtctgttcatagtttatatcaattggctaattcattttaaaaaacacataaaaacttctgagaacctattttactgtaggcatgatgtttataatatttagagataaaacaagtattttttcagtaaaagatgtagcagtaagcaataaatctgtattacactgaattcactgaacctcattttctatgctgaagaggcagatcacactcctcctaaattcattccatccctatgtatcaccgacccatcaatacagntattctgttatgattaattcagaagtatag

SEQ ID NO: 46331 - DNA, 337 bp, Gossypium hirsutum
  Clone ID: LIB3196-024-P1-M1-F8
caacattgtcatgaaggatcgactttgcttctatgatcctacctttctcattcttaacaataagacctgatgcagatctgtggttctgtgagtcaaaagccgcgtcaaaaaagatggacttatttgcccttcgtaccctctgtctgggccttgcgctgacttctaagatttcccacagctctcaacaaaatcccaagcactgttcattcgtccctacgctgaagatccaggaaagccaactccataaatcaaaatggttattgttaagtacccaggggaaatttaactaactccaaatttctttcactataaggcatctttggaaaacgtggaagct

SEQ ID NO: 46332 - DNA, 362 bp, Gossypium hirsutum
  Clone ID: LIB3196-024-P1-M1-F9
aaaaattaaattttagagatttgtaaaataaaacaatatagcttatttaacatttatggaattaaaattttatattaaatatgtatgtcattataagtgaatagttaaaagttaattcggtaaagacaatcgaccaaaatatttggtaattaattaaaatgatagttagcaaataatatttttatttatagcaaatgatataaatggtaaaatgtatttaaaataatggacacagcataaattcatatttaaaaggtaaattcttggtcatacaattggtaaaagttttttttaatttgggcacttattttcaattgtatcacttaacttttagggattttttcatttaattgtggtaaatt

SEQ ID NO: 46333 - DNA, 372 bp, Gossypium hirsutum
  Clone ID: LIB3196-024-P1-M1-G1
atttagtggtgagagtatcaatcttcaaggtgcaaagctaagaaaattatcataagtgtgtgatatattaggataacttattataagtgttgaagatagtgaatatttctcgctaatctaggctctacaaacatagggaaattgaactacataaacaaaccttatgtcccctatttgttttctatttcacacagtactcggagtgcccactcccttaaccactccttccaagcacataacttatatctcagcaactactttaaagttttaattggtatcagggctaaccagttaaagtaattagtgaagaactctagtgttgctagattcaagccaaggaaggttcatttacttcaagaccctctaagctag

SEQ ID NO: 46334 - DNA, 405 bp, Gossypium hirsutum
  Clone ID: LIB3196-024-P1-M1-G10
ataccattttctaagccactactagatacattaaattgtataaattgtatacaaccattgtataaagtatagatataatgaataatcaatactgttttgcacagaaaaaaaccagaactcagagaggttaaggaacatgtcccatgtcacacagttagtgagtggcagcctggattcagctccacgcctgtctgacccagagcctgagctcttttctttcactccatccctcaactcttacctggatctgtgtcccccagttcccctcctactcagaccgccacctgctgtcatgctctccctctgtctagagactctctggactggacaaggagatccaggggcagtagcagggctggtaaagagtcaggcccttcaaggcaagggacttcaggctgagctggc

SEQ ID NO: 46335 - DNA, 384 bp, Gossypium hirsutum
  Clone ID: LIB3196-024-P1-M1-G11
cccacgcgtccgatagtttgcgaacctaggacaaaacaaatggaggctctcttgaaagttgtttatgagctctacacagattacgttttgaagaaccccttctatgagatggtgatgcccatacgattcgaactctttgacatcaacctgacacaggcagtacagaaggatcgtgttgcacttttggggtgataagttgtcctggaacctttattttaccaaaatgtcaccatctcttatattcatccgtacacttttgatggaagattgctatcaagtttgtataaacctgtgtattgggatatcatcaagctcctatgtttagctcataagtgctgaattatttacaacatatgatgatttctagagttgcttctcccaatt

SEQ ID NO: 46336 - DNA, 365 bp, Gossypium hirsutum
  Clone ID: LIB3196-024-P1-M1-G12
ggtggacaaggtggttgtactctggactgcaaacactgagaggtacagcaatgtcgttgtggggctaaacgacaccatggagaacctcttggcttcttttgagaagaatgagtcagagatttctccttccactttgtacgctatcgcttgtgtttttgaggatgttcccttcatcaatggaagccctcaaaacacatttgttccagggttaattgatttggctatccagaggaactgtctgattggaggagacgattttaagagtggccagaccaagatgaaatccgttctagtggatttccttgttggggcttgtatcaagccaacatcaatagtgagctacaaccatcttggaaacaatgatg

SEQ ID NO: 46337 - DNA, 390 bp, Gossypium hirsutum
  Clone ID: LIB3196-024-P1-M1-G2
atgccggagaccagcccacagccgcctgtatctgtgtccagcccgggtcccgcctgtcccagctgcgctcgcccctcagtcccgcacccgttcgacccaggctaggttagccctcaccatgccggtcaaaggaggcaccaagtgcatcaaatacctgctgttcggatttaacttcatcttctggcttgccgggattgctgtccttgccattggactatggctgcgattcgactctcagaccaagagcatcttcgagcaagaaactaataataataattccagcttctacacaggagtctatattctgatcggagccggcgccctcatgatgctggtgggcttcctgggctgctgtggggctgtgcaagagtcccagtgcatgctgggact

SEQ ID NO: 46338 - DNA, 389 bp, Gossypium hirsutum
  Clone ID: LIB3196-024-P1-M1-G4
attcactgaatcagttgatgcagaatccagctatttcacaaatgatgcgaagcctcctgtccagtcctcagtacttgaaccaggttcttagtctcagtcctcaacttcaaaacatgcttggatctaattctcaaccaagagaaacgatgcagaactctcaatttcttcgtcagttgacttctcctgagatgatgcagcaactattgactttgcagcagactcttttttcacaacttagtcggccacagtcaacccaggagcctgcccagactggtggaggtgcaggaacgctcaacatgggtttggaagcactgatgaccatgtttagcggacttggaactggcagcttgagtgttcctaatagattagatgtaccttcagagcaacta

SEQ ID NO: 46339 - DNA, 401 bp, Gossypium hirsutum
  Clone ID: LIB3196-024-P1-M1-G5
atcggcgcgatcctcgcttacgtgagagttggcccgggaggaaagatggtgctggatctggatttgtttcgggtggataaaggaggggacccagccctcattcgagagacgcaggagaagcgcttcaaggacccgggactagtggaccagctggtgaaggcagacagcgagtggcgacgatgtagatttcgggcagacaacttgaacaagctgaagaacctatgcagcaagacgattggagagaaaatgaagaaaaaagagccagtggaagatgatgagtctgtcccagagaacgtgttgaatttcgatgaccttactgcagacgctttagctaacctgaaagtctcacaaatcaaaaaagtccgactgctcattgacgaagccatcctgaagtgtgacgc

SEQ ID NO: 46340 - DNA, 361 bp, Gossypium hirsutum
  Clone ID: LIB3196-024-P1-M1-G6
atggtgggcatcgtccccatgaaggtcctggtggaggcatgggcaacagcagtggacatcgtccccacgaaggccctggcagtggcatgggcagtgggcatcgcccccatgaaggccctggcagtagcatgggtgggggtggaggacatcgtccccacgaaggccctggtggtggcatcagtggtggcagtggccatcgtccccatgaaggccctggtggaggaatgcatggcttgtggagacatctatcccacgaaagccctggctgaagcatggctggaagtggaggacatcgtccccatgaaggtcctggacacggggggccccatggccaccggccttatgatgttcctggtcaccg

SEQ ID NO: 46341 - DNA, 359 bp, Gossypium hirsutum
  Clone ID: LIB3196-024-P1-M1-G7
gtacctctagcccgacctgaattcaatttaattataaaacataattttaatatgtatatttttaataatttattattttttaacaacaaaatgagctttttggaaccggaccgaaaatggacctaggcatggaatttttttggaaccgagcctcaacccagcctgacccatgggtatctctagatacatggtgttaataccggcaatgaattgccaaaccaaccaataaaaaattgaaatgttgattttctttttcaaatcatcaagtccatgtgaataacataacattaagtggaagactaaataaaaaaattaaattaaactaaaaacaaataattaaacatatggttaataaaaag

SEQ ID NO: 46342 - DNA, 96 bp, Gossypium hirsutum
  Clone ID: LIB3196-024-P1-M1-G8
atgcttctcctctgggggagcctgcgggctggggggcggctatggcggtggcttcagcaccagcagcagctttggtaggggcttcgggggaggata

SEQ ID NO: 46343 - DNA, 394 bp, Gossypium hirsutum
  Clone ID: LIB3196-024-P1-M1-G9
atgcatttctacataagataaaataaacagtgtacaggaagccatcagatgtgcagttgtctcaggggagcagagggatgactttgagttctgtcctttgtcctgtatgtgtaaagaataagctgtcaatttacattgttggggtgaaattcaacagaactgttccagggtaaagatcttggggctcataaggaatttctaagtggggaattgtgagggaggtatgtagctttttttgtctttgtagctatcttattcgggagcaaaatgggaggcaggtttgtgtgacgcagtccccagcttgtcttttcccttttgcttagtgatttgggggtcctgagatttactttcctttcacactttcctcagtaaaagaggaaggcaggcaaattgg

SEQ ID NO: 46344 - DNA, 377 bp, Gossypium hirsutum
  Clone ID: LIB3196-024-P1-M1-H1
attttacctcgttctaagatggtgaatgctgatcttggtaggatcattaactccgatgaggttcagtcggtcgttaagccaattaagaaggagatcaagagggcacctttgaagaagaatccactcaagaacttgaatgctatgctgaagttgaacccttacgcaaagactgctagaaggatgtctcttttggctgaggcacaacgtgttaaggccaagaaggagaagcttgacaagaagaggaagcctatatctaaggaggaagcaaccgcaatcaagtcagctggcaaagcatggtatcaaactatgatctccgacagcgattacacagagttcgagaacttctccaagtggttgggcgtgtcgcagtaaatttt

SEQ ID NO: 46345 - DNA, 356 bp, Gossypium hirsutum
  Clone ID: LIB3196-024-P1-M1-H10
atcaacagtcctcaggcccctctctggctgcagagccctctcctcaggttgcttgtcctcccctggcctccagtctcccctgccctcccaggcagagctgagatgccctcacttttcttctcatcagtacctgttcctctgagttcctgttgctcaccatcaggtcaacagttatcatcactcagacatgcaagtgttctttttatgctcccatattattacaggtatctgagtctgccataattctgagaagaaaatgacccatacacccatgagaactgaaactcagtctaagcccagctgcagacaaggagtcctctctttaattgctaactgttctgccccatatagctaca

SEQ ID NO: 46346 - DNA, 369 bp, Gossypium hirsutum
  Clone ID: LIB3196-024-P1-M1-H11
cggacgcgtgggctttaacgcggatcttcaaaagttaagaactttccctttcctgggttttcgcttttttcttttttgggatttgatcgacagctccatcgtcttcttttaaagttttcatctttgtcaatggcatcttcttcagactcatggatcaaagactatcatgaagcaggggaaatggctgatgatatcaatgccatgatatctggaaggagttccctgcctgtttcgggtccagaaactcagcggcatgcatcggctattcgaagaaagattactattttaaggactagacctgatggaatgcagtcccttttgtctagaccgaccgggaagcccttaacggggaaggagatgaatcgtcgc

SEQ ID NO: 46347 - DNA, 473 bp, Gossypium hirsutum
  Clone ID: LIB3196-024-P1-M1-H12
agtgacactatagaacagtttgcacagaaaagcaagctggcaccgtgccgccgttcccgggttggcgacggcaacagcgagatggctcttattctaatgaggcatagacaatggctggacggaatggcatttcctcctaggagtttaggacacaaagagcctcccgaaagcagagggactgagtgcaaccactggtgacccttgtcatctcagtcttttttattataacctctttccttctacttttttcacttgtcttctatttctaatatttaagatttatgctttagccagtttcttaaaacttgtgtacctaatattctcttggtcatcaattatttgaggataagaattccccctactgttaaaacattagcaaggtacattggtaattctcaggcttaaggatttcttgaaataacattatctgatttattgggatctgaagcatagttgactcgactagatacttc

SEQ ID NO: 46348 - DNA, 380 bp, Gossypium hirsutum
  Clone ID: LIB3196-024-P1-M1-H2
aagcaatggaagatacttcatcagcaaaggaagtaacgttgcaaggaactccagctaattacttcccaaggtccttccatgaagttgtaggcgccattctcaggtgtttgggacttgaaactggattccaacaaaaccctaatccatgtccaaaaaaagaagatgacagtaaagccaatcataatcaacctatttctccaaaggaaaatgcagatccaccttcatcaacagacaattcagatccatcaaccaccgtgatcgacccaccagctgatcctcctccttcccccactgtaagatatgttgctttgcttgctagctaacttctttgatatctttgaaactgacccagcagtgggtcacatttggtctccactatt

SEQ ID NO: 46349 - DNA, 392 bp, Gossypium hirsutum
  Clone ID: LIB3196-024-P1-M1-H3
atgttctttgatgcggagctgtcccagatgcagacgcatgtctctgacacctccgtggtcctctccatggacaacaaccgcaacctggacctggacagcatcatcgccgaggtcaaggcccagtatgaggagatcgccaaccgcagccggaccgaagctgagtcttggtaccagaccaagtatgaggagctgcagcagacagctggccggcatggcgatgacctccgcaacaccaagcatgagatctctgagatgaaccggatgatccagaggctgagagctgaaattgacaatgtcaagaaacagtgtgccaacctgcagaacgccattgcggatgccgagcagcgtggggagctggcgctcaaggacgccagaaacaagctggccgagct

SEQ ID NO: 46350 - DNA, 124 bp, Gossypium hirsutum
  Clone ID: LIB3196-024-P1-M1-H4
ctcactcgttcggaaaatatatggatttaacctttattgcctattcaaaaatatatgtatggttatatgcctccaaaggaaactatgcatactcatttatatatgtacctttgtgtgttacaaa

SEQ ID NO: 46351 - DNA, 303 bp, Gossypium hirsutum
  Clone ID: LIB3196-024-P1-M1-H5
attaaaagttgcaactgttaattttaaataaaagtttaacactaaacaatataaactttatttccaaaagaccataaaatgaaaacatcgggtacaacatttaattacttttagaccgtgaagattgaccaaaatagacatttctattgggacacttgcttcgattatggccaactgctttatatatggtgcaatgctttggatcgacctgttttcttatatccatgtcgttctgaatcctcattgttggtggtcgacctttgactctcttacatagtgaccgatttggcaacatcttaaacg

SEQ ID NO: 46352 - DNA, 400 bp, Gossypium hirsutum
  Clone ID: LIB3196-024-P1-M1-H6
tatttaggtgacactatataacaagtttgtacaaaaaagcacgctggtgccggtcccggaatggcgacatcaaagagcgagatggccgtctatctatggaggcatagacgggggcggcacacggtccaaagtccttttagtctcggaggatgggaagatcctggcagaagcagatggactgagcacaaaccactggctgatcgggactgacaagcgtgtggagaggatcaatgagacggtgaacagggccaaacggaaagcatgggtggatcctctggtaccgctgcgaagcttgggcctatctctgagtggtggggatcaggaggacgcggggaggatcctgatcgaggagctgacggaccgatttccctacctgagtgaaagctacttaatgaccacc

SEQ ID NO: 46353 - DNA, 370 bp, Gossypium hirsutum
  Clone ID: LIB3196-024-P1-M1-H7
ggggtgatcggttgggttaggcgcgactctcgtctcctgctaaggtgtttttgtgttagcagaactttgttgggtaagccttagttccatttctttcctttcggatggtttcactttgttgacccttcttctaacttgggtctcttcttgccgattatctcctttgtcgtttagaacaattcttttacgggcttctgtgtgtgctactttaatagtctgtacgttgcttggttgttgtagttagtatggttcggtgatgatgttgatatgctttaagtgcgagtctaatgttggaaaattatgcctttcatgtaagtaggggtcaagttgatcggtacctcccctaggaccaagaggggcgaatttgggg

SEQ ID NO: 46354 - DNA, 393 bp, Gossypium hirsutum
  Clone ID: LIB3196-024-P1-M1-H8
attggagtcgcccggcccagtgagagcctagtcccggccagggtcgccccggcaagcacgagtccagccaatcagcgccctggactgcaccagcgccatggtcggcaaaagagcactgatcgtactggctcactcagaaaggacatccttcaactatgccatgaaggaggctgctgtagcagctttgaagaagaaagggtgggaggtggcggagtcggacctctatgccatgaacttcaatcccatcatttccagaaaggacatcacaggtaaactgaaggaccctgcgaactttcagtatgctgccgaatctactctggcttataaagagggccgtctgagcccagatattgtggctgaacaaaagaagctggaagctgcagaccttgtgat

SEQ ID NO: 46355 - DNA, 373 bp, Gossypium hirsutum
  Clone ID: LIB3196-024-P1-M1-H9
caaagccttttctcttctcctctgaaatctcgctctaagatttcgtcgtttatatttctccatctggattttgattgagctctctctcctttcgtcttaattggtttcactatgtcttcttatacccctaagaacatcctcataactggggcagctggttttattgcgtcacatattgctaaccggctcataaggaactacccggactacaagattgttgtgcttgacaagcttgattactgctcgaacctgaaaaacctccttccttccaagtcatctccgaactttaagtttgtgaaaggtgacattggtagtgctgaccttgttaactacctccttattaccgagtctatcgacacaataatgcactttg

SEQ ID NO: 46356 - DNA, 270 bp, Gossypium hirsutum
  Clone ID: LIB3196-025-P1-M1-A1
attgcattttatcaatgccagaatgcacatcacactgacaacagctctttgttaacaccggggagcccccaaagccccagggtaattccatcaccacccaagttgtaagactgtagaatgaacaggccagaatgcgataaagtaaaatgaaagaaaataaaaggaggcagggcaaaagagagagggagaagcagatagaaggaaggaaggaagaaggaaagagaaagggagggagacagggaaggaaggaagtctggcaagagggcacca

SEQ ID NO: 46357 - DNA, 356 bp, Gossypium hirsutum
  Clone ID: LIB3196-025-P1-M1-A11
atggcaatggcagatttggcatctggtgagggcgtcttcctggttcgtggatgggccttgctgtgtcctcacatggtggaaggagctagctctctgtggtcttttttatgtgggtactaatttcaacgtcccaaaggccgcacctcttaatatcattacattaaggctgaggatttcaacataggagttttgagggggaagacatcataaacatttagacattgtaataacataagagactttggcctaatcttggagaggggagaatctttagaaccatgacaaaaaaaaccagcggccctaaaggaaatattaaggtaatttgggcacccaaaacttccaaattttctataggc

SEQ ID NO: 46358 - DNA, 275 bp, Gossypium hirsutum
  Clone ID: LIB3196-025-P1-M1-A12
tcttgtgtttctctgtgccggctgcttagcctttgctaagcaagaccctgagctaaaacaatgcacccaccaatgcagagtccagcaacaatacgatgaaaaacaaaaggaagagtgtgtgaggacatgtgaagagtaccaccgtgagaaaaaggatagagagtcccttaaagaagttgggcaagaccctgatgtcgaatttcaccctggcgacggattgagtgagtgccagagccggtgcgcgggactagcaggagaggtgcggcagctgtgcc

SEQ ID NO: 46359 - DNA, 342 bp, Gossypium hirsutum
  Clone ID: LIB3196-025-P1-M1-A2
tttcactatgttctgatgtagggtcattacacagtaccgcagattcagccccgaagatgaggaaagtgagattgagacgatcgaaccgtcgaggtcaagtcgacggtccatccgctcaacaagcttcaagcagattattgactttgtagataagaaagaagaagagattaaggagatgttgaagagaaagaacagtaatagtaataaacaacagactagcatccatagtttctcagatggtcaagcaagttcaccttcctaagagagacaaaaatccaaacacatttttgattggatcatttggaacttcaaatatttcttttttaatctgttatattatag

SEQ ID NO: 46360 - DNA, 335 bp, Gossypium hirsutum
  Clone ID: LIB3196-025-P1-M1-A3
atgcagtcgttcggctcaaaaacgaccaggctaactactcactcaacacagatgacccgctcatcttcaagtccaccctggacactgattaccagatgaccaaacgggacatgggctttactgaagaggagtttaagaggctgaacatcaatgcggccaaatctagtttcctcccagaagatgagaagagggagctactcgacctgctctataaagcctatgggatgccacctccagcctctgcagggcagcacctctgaggacaacacccctccaagcctttgccctgtggagtcaccccaattctgtggcgctgagcaacatttttacattta

SEQ ID NO: 46361 - DNA, 327 bp, Gossypium hirsutum
  Clone ID: LIB3196-025-P1-M1-A4
ttaccatatgaccaaactgtacatgtgctttactgaagaggatttctaagaagctgaacatcaatgcttccaaatctagtttcctcccaaaagatgacaagagggagctactcgacctgctctataaagcctatgggatgccacctccagcctctgcagggcatcacctctgaggacaacacccctccaagcctttgccctgtggagtcaccccaattctgtggcgctgagcaacatttttacatttattccttccaagaagaccatgatctcaatcgtcagttactgatgcttctgaagcctgtgtgtccatttctgcacacacct

SEQ ID NO: 46362 - DNA, 388 bp, Gossypium hirsutum
  Clone ID: LIB3196-025-P1-M1-A5
gagaaaagtgagaaaaaaaaagaacaaactagttaagagccatggaagatgatgcaatggcaaccgaggctcctttagcaccagtcacttctggaaggagagtcagaaatgacttggaagataagcttcctaaaccttatatggcgagagctttggtggctccggatgtcgatcacccgaacggaacgccgggccattaccataacggaatgagtgttcttcaacaacatgcggcatatttcgaccaggacgacaatggaatcatttattcttgggagacttacgccagttgtcgagccttgggatttaatcccattgcctctctttttttcaccattcttattaatggatctatgagctatcctacacttccaggatggttaccttc

SEQ ID NO: 46363 - DNA, 381 bp, Gossypium hirsutum
  Clone ID: LIB3196-025-P1-M1-A6
caccaatgctcctcagcttctctacattgtccaaggaagaggtattcaaggtattgtgatgcctggatgtgccgaaacattccaggattcacagcaatggcagcatcaaagccgtggcaggttccaggaccagcaccagaaagtccgacggttccgccagggtgacatcattgctttgccgcagggtgtggttcactggagctacaatgatggcaatgagcgtgttgttactatcaatctacttgacactggcaacagtgctaatcagctcgacaacatccctagaagattccatcttgctggtaacccagaagaggaacagaggcaactgaggaggctagcacagcagatgcaaggaagaagtgagaggggggaggagtc

SEQ ID NO: 46364 - DNA, 294 bp, Gossypium hirsutum
  Clone ID: LIB3196-025-P1-M1-A7
tcgctctgcttcgagttaggctcattttgaggcttctctcgttttaaaaatagaaacaacttcaaactgtgcctaaccgccttagttcgctctttgacgacgaaattaccctttgagtattcactccagccaccatccgtttcttccaacttcttctccaggctttaagtggattgattgtattgagatagcagaaagatgtctactgaagcacccaccagcatggagactgaaacagtggcttctaaaactaaacttgaatccaatacattgcccccaaagccgaaattcgag

SEQ ID NO: 46365 - DNA, 361 bp, Gossypium hirsutum
  Clone ID: LIB3196-025-P1-M1-A8
gtaaaagcatttggtcggatcgatattctggttaacaatgcggctgaacagtacaaggctagcagtgtggaggagattgatgaggagaggcttgatagggtgtttaggaccaacatctattcccaattcttcctggccaggcatgctctgaagtacatgaaagaaggcagctccataatcaatactacatccgtaaatgcatataaagggaatgacaagctacttgattacacagcaaccaagggtgcaattgtggctttcactagaggcctttcactacagctgatgaagcgaggcatacgtgtgaatgccgtagcacccgggcccatatggactccattgataccagcatcatttgatg

SEQ ID NO: 46366 - DNA, 350 bp, Gossypium hirsutum
  Clone ID: LIB3196-025-P1-M1-A9
atggccaagcaagcttctgtctgcacctgctctgaatcctgctctcaccatgagcctccgcctgcagagctcctccgccagctatggaggtggttttgggggtggctcttgccagctgggaggaggccgcggtgtctctagctgttcaactcggtttgtctctgggggatcagctggaggctacggaggcggcgtgacctgtggctttggtggaggggctggtagtggctttggaggtggctacggaggtggccttggaggtggctttggtgggggttatgctggtggctttgttgattttggtgcttgtgatggtggcctcctcactggcaatgagaagatcaccatgc

SEQ ID NO: 46367 - DNA, 381 bp, Gossypium hirsutum
  Clone ID: LIB3196-025-P1-M1-B11
ggaaaacgaagaaaggaaattttcccaaacatgtcgttactcagcagccataccatccctccccgacctttactccaccttcctccccgaaaccataactttccaatcttcaccttcaaacccattttccttcccctttctcctcccattaaaccctcaaactccgtctccaaaccccccaaatttatccctttagcttccatttctcctcccccggcaacaccctgcaaatctcccgaaatcccagctctggccccactcgacggttcaactcgaaccctcaaaaactttttctccttgggcctctctgccaccatcggcttcaccaaaatgatccaaaattatgctctcaaaacaatctcccagaaccccaacgcactt

SEQ ID NO: 46368 - DNA, 317 bp, Gossypium hirsutum
  Clone ID: LIB3196-025-P1-M1-B12
cggacgcgtgggcggacgcgtggggttatgaaatttgttaatgtacacagtcaaggggctgaagcaagttggatgctaaatttgtcttccatatctcagccaattgatacttctccaagttgccatttccgttcatttcttcctcagatttgaaccttcattgcatttgctcgattttgctaatgacaaacacttgtttttagatacatcgtcactttgctgctgattttttatcttcccccttctaaacttcgattgaagagtggtgataacataagacgtagtcattactttgtcttgttccaaattatggggtc

SEQ ID NO: 46369 - DNA, 263 bp, Gossypium hirsutum
  Clone ID: LIB3196-025-P1-M1-B2
acggacaaagtggacagagagagcgctgaaatggttttgaagctacggccgagtggtctaacaggctagaattggagcaccagcggctttgggcatactgcgcttcacgctccatcgtatgaaccacgcatgcacaagttgctaggagctataaaaactgatgtttctgtgaggaatgaacaggcctatacactatgatttcgacggacgagaggctgctgatacacgccttcgattggcgcgaaacatgatgttaactgctg

SEQ ID NO: 46370 - DNA, 354 bp, Gossypium hirsutum
  Clone ID: LIB3196-025-P1-M1-B3
ggcattcgcaaatttattgtttatatctaagaaatggttgcttaattttggaaaacaaaagttattgtagttagttttgcttcttgcgtgtccagccagcaaaatgggtgccggtggtaggatgccaattgacggtataaaggaggaaaatcgaggctcggtcaatcgagttccgatcgagaagcctccgtttacgctcggtcagatcaagcaagccattccgccccactgttttcgccgctccctccttcgatccttctcctacgtggaccatgacctatgcttagcctctctcttttactacattgcaacatcatattttcactttctcccacaaccctttttctacattgc

SEQ ID NO: 46371 - DNA, 384 bp, Gossypium hirsutum
  Clone ID: LIB3196-025-P1-M1-B4
ggtcccgattccgaattcccacctagacccacgcgtacggctcaactataactggggtctcgtgtggagcagatggttaaaaacaccctatattctaatattcaactcacctacgcaccgtgcaagcataatccatcccacctctagacgaacagtgtttgaagccacgtgtggaagatcagcgaccacacaaataactgacttcctcaaacaagcgttcatactcacgttgctttatcatccttctatgtcccatttttctattatttcgaaccataattcatcaagggggggagtgttcacccaccaataaggcactctagcttatattatacaccgccagacatgacagtcttaccctactcatttcctagttttaatagt

SEQ ID NO: 46372 - DNA, 395 bp, Gossypium hirsutum
  Clone ID: LIB3196-025-P1-M1-B5
cggacgcgtgggttaaaacacacatattaaaacttaaaaacttttttcacttaaaactaaaccctttttaacttctaaattctctcaaatctcttaaaaccatcttaaaccctaaacccctattctatcattccttattgttttgtttcaaatctcttcttttcatcttcattggtgcatgctacacatcaaacattcatacgagagatcacaacaactactttgtaggaaacaagatttcaaggaaaaagtgaaaagttccaactcttaaattatattgttctattacttttgaaatatattgtttgaatcgattagtttttctaggttttgaaattgaatattccttcttggaagagtagaaaacttagtgtgtgagaaccaccgacaatttc

SEQ ID NO: 46373 - DNA, 393 bp, Gossypium hirsutum
  Clone ID: LIB3196-025-P1-M1-B6
atgctgcccggggcttcaacttcctagggcctccagacatgtctgaggtgaagagccggaagaagtcggggcccaagggagcccccgctgcggagcccgggaagcggagcgagggcgggaagacccccgaggaccggggcggcggaggcgggggctgggcagacccccgaacgggcctgagcctgctgtcgctggggacgtgcctgggcctggcctggtttgtatttcagcagtcggaaaaatttgcaaaggtggaaaaccaataccagttactgaaactagaaaccaatgaatttcaacaacttcaaagtaaaatcagtttaatttcagaaaagcttgagtctactgaaagcatccttcaggaagctacatcttccatgtctttgatgaccc

SEQ ID NO: 46374 - DNA, 384 bp, Gossypium hirsutum
  Clone ID: LIB3196-025-P1-M1-B7
gaaactctcagcatagagcaaaattctagaacactttcttcagccccttcatttcttctccacctctcctcacccactacctccgtccacctcctgtcttcagccaccgcctctaccgcactaggagataccaggtttgtcagataagtagattctcttttcttgagtccttcttgtgctaaacaataggcaactctgttagcctccctgtttgcaaaaggaaaaacacaaagattaaattgacagctgagattctgagcatctttgatatacacagaaatctcaaatctgtcatccttttcctcttgcagcttccggatgatcgttcgagaatcaccttcaacctcaatctccctcaacccaagttgtaaccccaacttcagt

SEQ ID NO: 46375 - DNA, 326 bp, Gossypium hirsutum
  Clone ID: LIB3196-025-P1-M1-B8
atggccactatggagcccgtgtgaccaactccagtgtgatcgtgcgagtccatctgtcctagtccaggactatccttcttgcaagacagcctgactgtgccttccagggcccgggaccattggctgggactcaccattaaccaattgaccacttgtacctccctggcatactgagaattcctgggtccaatcaaaggccctgacgggccccgtcttcaggttctagaaactaccagaagaagcttcttccatcttatctacctactgtagctgctgctttgggggggcctactctactgaggggaccccacagtgagccctggggg

SEQ ID NO: 46376 - DNA, 382 bp, Gossypium hirsutum
  Clone ID: LIB3196-025-P1-M1-B9
ccctcactccgccatgttcaataatttcttgcgttgatctttgttagagattagctttttaatttttcattatgggaaagatcaagatcggaatcaatggatttggaaggatcgggcgtttggttgcgagagttgctctccaaagcgatgatattgagctcgttgctgttaacgatcctttcatcaccactgaatacatgacgtacatgtttaagtacgacagtgttcacggtcaatggaagcatcatgagcttaaggtgaaggactcaaagacccttctctttggtgaaaagcctgtcacagttttcggtatcagaaaccctgaggaaatcccatgggctgaggctggagctgagtatgttgttgagtctactggtgtttt

SEQ ID NO: 46377 - DNA, 349 bp, Gossypium hirsutum
  Clone ID: LIB3196-025-P1-M1-C10
atatgccgcattgttcgtggcagtagaccccatgggttcgtctgcacagctatgaggcgacactgttccgtctgcacatgaaggacccccatacagcctctctcccacccctgacaacccgagaaggcatgtggggccctgccaacgccacttcctcagcagaaacccgtcatgacgcggctgcttcggaagcagacgtctggggacacagcctcagtacccagtcttttccctagttcctgaaacttccctaggaccttaagggaataggaggaggtcatatagcattcccaggggcacctagattttgaagaccaaaggaaagggggggtaagttgggggccttttt

SEQ ID NO: 46378 - DNA, 303 bp, Gossypium hirsutum
  Clone ID: LIB3196-025-P1-M1-C11
atggcgacttgcgccgaaatcctgcggggcgaggtccccgaaattgacggacaagtcttcgactacgtgacgggcgtcttgcacagcggcagcgcggacttcgagtccgtggatgacctggtggaagctgtgggggaactattgcaagaggtgtccggggacagcaaggatgacgcgggcatcagggccgtgtgccagcgcatgtacaacactctgcgcctggctgagccacagagccagggaaataaccaggtgctactggacgctcccatccagttgtcaaagataacagagaacttcgac

SEQ ID NO: 46379 - DNA, 261 bp, Gossypium hirsutum
  Clone ID: LIB3196-025-P1-M1-C12
atctttgggatgggcatctcgacccctcgctcggtacccacgtttggcccccaaatcctgaagagggaaccagaaccagcgccccgccgcggggcgggccggccagcgcacctcctgagggtcacaccgacaaatctgaagcgggtttgccagaggagtgtacccgtctccctggcctgggccaccgggtccacagggatcccatttccggccctacaccccgctccacgatcccatacgggcgctgcagctgtgttctgc

SEQ ID NO: 46380 - DNA, 377 bp, Gossypium hirsutum
  Clone ID: LIB3196-025-P1-M1-C2
tcggtttttgttggtcagtggtgtacttacaattcaagtgcgtctaaaatgggcaacctatcgtttaagggtcattggcttgggacacgagtgtgtgactcaactatctgggacatacgaccatgcgacacatggcttgtgtcccctgtatgtttaaagctcacagggctgacagttacacaggctcaaacgcggcctggcacacaggcgtctgaggctattttgagtgttgcacaacactacacacgagcgtatggctcaggcacgtgactcccatcactgcgttccatgggcgaggacatacgttgggacaaggtcttgtgtgcatattttgagcgttgcatatcctgagacaagggcctatgtcttaactatgt

SEQ ID NO: 46381 - DNA, 385 bp, Gossypium hirsutum
  Clone ID: LIB3196-025-P1-M1-C3
cgaacaccgatcgggggctcaaaatcggaagcttcctaaagaacctaagcaaatttgcggttgattccgccattaacgtctccctcaaaggtttcactggtgggaagaaactgtatcagacatttttgcatgaaaagttaaaagatgagccaagcaatgtgaaactaatgaagaaggaggaggagacacaatcaacaaaaatggaagacactgcaaacaaagctgtaggaggaacagagcctgtgaagaagaagaagaagatggtacctgaagacttgaaggaaatggagctcgaagatcctaagaggaaaacaattttcattcgatctcgcctgtaaaatactaggaaaggttaataggtaaattgatacttcaattataaata

SEQ ID NO: 46382 - DNA, 357 bp, Gossypium hirsutum
  Clone ID: LIB3196-025-P1-M1-C4
cgaacaccgatcggggcctcgggatccgaagcttcctaaagaacctaacctaatttgcggtcgattccaccattaacgtgtacctcaaaggtctcactggtgggaagaaactgtatcagacatttttgcatgaaacgtttaaagatgagccaagcactgtgaaactaatgatgatggaggaggagacacagtcaacaaaaatggaacacactgtaaacaaagctgtaggacgaacacatcctgtctagaagaagacgatgatggtacctgaagacttgaaggaaactgagctcgttgatcctaccaggaaaacagttttcattcgatctctcctgtgaaatactaggaaaggttaat

SEQ ID NO: 46383 - DNA, 380 bp, Gossypium hirsutum
  Clone ID: LIB3196-025-P1-M1-C5
atcgcgcgtgcgcgcggccgggcagcctgggcagggggtcctgcctgtgacgggcggcggcggtcggtcctgcctgtaacggcggcggcggctgctgctccagacacctgcggcggcggcggcggcgaccccgcggcgggcgcagagatgtggcccctggtagcggcgctgttgctgggctcggcgtgctgcggatcagctcagctactatttaataaaacaaaatctgtagaattcacgttctgtaatgacactgtcgtcattccatgctttgttactaatatggaggcacaaaacactaccgaagtatatgtaaagtggaaatttaaaggaagagatatttacacgtttgatggagctctaaacaaggtcaccggccc

SEQ ID NO: 46384 - DNA, 97 bp, Gossypium hirsutum
  Clone ID: LIB3196-025-P1-M1-C6
cccacgcgttcgatcgcgaatgacattacattgaaaatatgtttaaaaaggttgatcttttcaacaatatactggcatcaacacccatgaatcctca

SEQ ID NO: 46385 - DNA, 337 bp, Gossypium hirsutum
  Clone ID: LIB3196-025-P1-M1-C7
atcgaggacacggagttctgaggagaccaagctagtgtgggtgctgacctttgagtcaccacctaagaggtgacctctcccgcatctgttctgcagcttgataacaatgaagctgctaccaaccagagcccagccgcagtggacacgggagggaacgggatgggaaggcagggaccgcaggcagctttcccgaactggggcgggtgtggctgtgagaggctcccaggcccgcctgatgccgctttccctttttggcaggtggcaggatcccattttctcactggcgactcccctgcgtgctggcgaagaaggcagccacagtcggaagtcgctgtgc

SEQ ID NO: 46386 - DNA, 399 bp, Gossypium hirsutum
  Clone ID: LIB3196-025-P1-M1-C8
atgagcagggtagtgagtggcgttgtggggataggatgccctgggtgtgcacacaggccaggagccctgatggcatgaacaccccccaacagaggcagaggagtcgtttgaatttgtggtggtgtccctcaccgggcagacgtggcacttcgaggcctcaacggcggaggagcgggagctgtgggttcagagtgtgcaggcccagatccttgccagcctgcaaggctgccgcagtgccaaggacaagactcgactggggaaccagaacacagctctggctgtgcaggcggtccgcaccgttcgtggcaacagcttttgtatcgactgcgatgcacctaatccagactgggccagcctgaacctgggtgccctgatgtgcattgagtgctcaggcattca

SEQ ID NO: 46387 - DNA, 382 bp, Gossypium hirsutum
  Clone ID: LIB3196-025-P1-M1-C9
attttggatattgttgctagactgagtttttccatgaagcacattattttgctttcccagctctaaaacctacatttttcctctgcttccatgtgaaaaattcagtcattccttgaacagctgaaatcattcttcagggaaaggaagattccgttaggtgtatacatcttgattctttgccttgatattattcctctatttgagtccagcatgcattcataatcgtcatcaactgatcatcatgtggcttgaattgaatccaaacttttctgttccctacataaattgaaaactaaacgagtctgagttgacaaggttctttctctgtgtcagtctagatgagttaataatgaggagtcgagatcagtcaatatccgactat

SEQ ID NO: 46388 - DNA, 268 bp, Gossypium hirsutum
  Clone ID: LIB3196-025-P1-M1-D1
atctcagccttgctgagcaccttgctttctttcagccaacgtgctcgctcgctcacctccctcctcggcaccatgaccacctgcagtcgccagttcacctcctccagctccatgaagggctcctgcggcatctggggcggatacaggcgcatatcctccgtcctggccggagggtcctgccgcgcccccagcacctacggcgggggcctgtctgtctcctcctcccgcttctcctctgggggagcctgcgggctggggggcggctatg

SEQ ID NO: 46389 - DNA, 317 bp, Gossypium hirsutum
  Clone ID: LIB3196-025-P1-M1-D10
ataagcaagcttctgtctgcacctgctctcaatgctgctctcactatgagcctccgcctgcagagctcctccgccagctatggaggtggttttgggggtggctcttgccagctgggaggaggccgcggtgtctctagctgttcaactcggtttgtctctgggggatcagctggaggctacggaggcggcgtgacctgtggctttggtggaggggctggtagtggctttggaggtggctacggaggtggccttggaagtggctttggtggggggtatgctggtggctttgttgattttggtgcctggggaggggggcc

SEQ ID NO: 46390 - DNA, 299 bp, Gossypium hirsutum
  unsure (1)..(299): unsure at all n locations; Clone ID: LIB3196-025-P1-M1-D2
cccacgcgtccggtaggtcaataaggatgtagtaatgtggctgatggaggcccaccgatagtagtcctgcaatgtggctaggttaacatgcatttgcatatgtcaaagagtgacatacttcaagttccattgtgggggaatttttatgggtcatctgttatctgtaaagggatgggtttcttgggtcccaaaccacctttctttgcttatgtttattgttttgcttgtatggttattangagaggcagtatcaagtatgcatgttgtcttggttataataaatcttagtccttttgttt

SEQ ID NO: 46391 - DNA, 112 bp, Gossypium hirsutum
  unsure (1)..(112): unsure at all n locations; Clone ID: LIB3196-025-P1-M1-D3
taccagcataaatcaacaatggcgaagctcgcagtttacttanccaccctggctctcatttagttacttgccaatgcttgaatcacatctgagacagtcgaaagcgaggaaa

SEQ ID NO: 46392 - DNA, 177 bp, Gossypium hirsutum
  Clone ID: LIB3196-025-P1-M1-D4
ggccgggttttttcggctctggtattgatggcaaggtgttttgggcttattttccgggaaaggagtattcaagggtaccccaagccattaccaaaacggcctttctttaaccaagaaaaataaaacccaacaaaaccctgggggccattttctttttgaactctagtcttggttcca

SEQ ID NO: 46393 - DNA, 395 bp, Gossypium hirsutum
  Clone ID: LIB3196-025-P1-M1-D5
cggacgcgtgggttcatttttatttttctgcttcatcaatggctgcttcttccagtagggaagctatgaacaagcaacttcttgactttatccattcaatggaacaagaaggtttggtcgactaccgtttcgctaaggttcatatgttgaaggaatcaagtggtcctttcttctttgcttcattgctccccacattctgccatgactcgacagcaaccttaagagacttgactgttgctttgggtcaacctctgctgaattatcacgatctgggtgaattgtgctttaagataaaagggggtgcggcatgccttggagtttgtcgtatggctcatgcctgtggtcaacttcatcaagctgttcagaacagagcaactaaagaaagcttaatcact

SEQ ID NO: 46394 - DNA, 361 bp, Gossypium hirsutum
  unsure (1)..(361): unsure at all n locations; Clone ID: LIB3196-025-P1-M1-D6
gcaatcctcaaatggagtggcttgctaaaactttgtttcttccctttctgctgcaactgttggtgttactgccaattgagacggcagaagctaatgtaaaaccaaaatgggtgctacagaatgagactactgatggagcgtcgccatggctcaagaatgcagcaaattcgaggccaagacctcgggggtgcatgttcaagccgcggatatgtgaacacagagaacattcccaacacctctcatacgcttttgtatgagcccatatgtgtacacctacactctgaagacgctcactggggcttatgcgcgcttagatgtccatttacttggcaatgctgcaggggggtntgtattaatacca

SEQ ID NO: 46395 - DNA, 382 bp, Gossypium hirsutum
  unsure (1)..(382): unsure at all n locations; Clone ID: LIB3196-025-P1-M1-D8
atgaattatagcatatgtgtgagtcgttcaactctcattgttcttggtgattcaaattaacttatctagcttgctagtggcatcaatctatttcctttccaatcttatcactctttgagtgtggcattcacccctttataccgactgattcctatcttcctagatagagggtcacgatcctatccatctatccattgatcaccttaatagccttataagattcgggtctctattctttagtagaggttctttcttcccctgttaagttcaatttccatatttccatcattttatcttctgttgttatctttgttttaaactaccaacctttttgaaaacaaccaatttgtttatcaagactntgttacttaattntacgatc

SEQ ID NO: 46396 - DNA, 296 bp, Gossypium hirsutum
  Clone ID: LIB3196-025-P1-M1-D9
acactatctaactagtttgtacgctggagcacgctggtgcccctccccaatttccgggatggtgacggtgcccccgaagggttgagggagggctaatccgggctctgaggcctaacttgtttacagttacacacctattccaggaggctacacactgatgggggggacattcctgagactggcacaggacaaggactccaagggtgacaaggactgctgactggaggtgactggccatctggaggaggtgatgaatgtgtgcgtccgcgtagacttcaccttagacagggccttcc

SEQ ID NO: 46397 - DNA, 328 bp, Gossypium hirsutum
  Clone ID: LIB3196-025-P1-M1-E1
aaaagaatagaggtatctagtgtgtgacaattaaatttctgatagatctgcttcttgcttatttacatgttggggtttgtatttttggaataatatcttgaaaatctttcatgatctccaaattcaagctgtctggttcttttagtttcatgctttgattttcattattggaccaatcgttactttttactttgtcatgttttaaacagtcaggcagtgctctgccattatgagcagaatccagagggaaggggatgagaatattattttccttggatgttcttagatttggtcttggacttatcttctttcctcttgggttttaaaa

SEQ ID NO: 46398 - DNA, 263 bp, Gossypium hirsutum
  Clone ID: LIB3196-025-P1-M1-E10
gaaagattggcacaacgaggaccgggtaatggagaaagatcatcatcatcattatgtgctggaaataaccttaagctccgcacaaggacttaaagaaccatctggtcaactccgccgtatgcaaacttacgcccttgcatggatcgatccttctcttaaactccgtacttgtattgatcgttccggcggtggaaaccctacttggaacgacaggttccttttcaaaagctcttctgattttctttctaaagaaacttgcgggg

SEQ ID NO: 46399 - DNA, 380 bp, Gossypium hirsutum
  Clone ID: LIB3196-025-P1-M1-E11
atcagccttcctgagcaccttcctttctttcaggcaactgctcgctcgctcacctccctcctcggcaccatgaccacctgcagtcgccagttcacctcctccagctccatgaagggctcctgcggcatcgggggcggcatcgggggcggctccagccgcatctcctccgtcctggccggagggtcctgccgcgcccccagcacctacggcgggggcctgtctgtctcctcctcccgcttctcctctgggggagcctgcgggctggggggcggctatggcggtggcttcagcaacagcagcagctttggtagtggcttcaggggaggatatggtgctggcttgggtggtggcttgggtgggggcttgggtggtggctttgg

SEQ ID NO: 46400 - DNA, 295 bp, Gossypium hirsutum
  Clone ID: LIB3196-025-P1-M1-E12
atgcgccaccccgttctttccccatcatcatcgagtgtatccgcctcatgtgtgtctccatttggtgtaggctgtatttctctcggtgtgggtttgttcttcagtggaggttctgtcctgctgggtgctcagggcagtggctcggggtagattctgattgcttctgcgtgtgctctcctttgattggattaatgggaataatgaagcagcttacgcctctgagaagtgtctgtgaatcccaagcctgatctcaggtcatgctaactgctgttttcttacaagatgtgctaatgca

SEQ ID NO: 46401 - DNA, 239 bp, Gossypium hirsutum
  Clone ID: LIB3196-025-P1-M1-E2
atgtttttatgtgtaagcaatatttatttaactagtctataaaattattgagtgcctcctgaggcctttaaacacccctaacattccttttccttcattcttttaaatgacataaagtaattgggcaatgttcccgatgatgtaccccgcaagctgcattgaaactcaaatctcttggaatgagtgactcaccaaaatgtaattggaatcgaatcctaatccttggactatgggaaaaa

SEQ ID NO: 46402 - DNA, 339 bp, Gossypium hirsutum
  unsure (1)..(339): unsure at all n locations; Clone ID: LIB3196-025-P1-M1-E3
ctttctctgagtacccaccccgtggacggtttgctgtcagggacatgcttcagactgtggctgttggtgtcatcaagagcgttgagaagaaggatccaaccggggctaaggtcaccaaatctgctgccaagaagaaatgagattgcatttgatagtatcaaagccttttgattttggttttctatgtagtctggtacttaacagttttttagaccaattttgatatgtgttcatttggttgagactggcatctggccacggattgggtgtttgctttttccgtgtcaattgtagttgaattccttcagaaaaaaatttgtgaagaagaagaaaaanagg

SEQ ID NO: 46403 - DNA, 227 bp, Gossypium hirsutum
  Clone ID: LIB3196-025-P1-M1-E4
agtttagagatatttcccccgggtccataccatctagtggtggatgtactccatctaacactctcaactgaaataaccaccgacatcattttagaatgacggattctagaaccttttcctacacagcggtcagatagcatcagacctgcattgaacagtcccgtggaaaggccaagcagtgaccatgaagagggagaaacttctgctcagaccgagcgtgtgccact

SEQ ID NO: 46404 - DNA, 396 bp, Gossypium hirsutum
  Clone ID: LIB3196-025-P1-M1-E6
aatcactatgcgtagagaaccaaatatggcgagatttggctcaaaccaacgaggcaactgccaacgcgttacggaccaacttataacaagtactcgccgccgctgccaacacccgtgaggaggctgaagcggcggctgcagacgaggtggacgatgcacaatcttgttgcgggagcaactgggaagcaactgcggagaaaaccgtctccggcggtggaggacaggagtgtacgaattgcaggaaagagatagcgtgtgtgttgctgttgccgtgtaagcatttgtgcttgtgtacgatttgtgggtccacacttcacgtttgccccgtttgtaaatccactaaaaatgctagtggtcatgttaacttgtgaataacccccaaaccaaaagaaaata

SEQ ID NO: 46405 - DNA, 313 bp, Gossypium hirsutum
  Clone ID: LIB3196-025-P1-M1-E7
gaacgagtcgtatgtgaccggatcaacagatgaagaaaaccgatacgtaatagacagaactttcattggcttcgttccgaatagtttacgcataattcttttacgaagttctatcaaatctatgttctggttaaaatccagtcgcactgttttctctgataaaaaacaacaccgttctcggtgtgacgaacctcaccatcatagtaaataacagcactaatacgttcactcatcttcaatttttatctttcttagccgttctaacttttttgctggaacttatgcaatctgagaaaaaaagttgggttattta

SEQ ID NO: 46406 - DNA, 406 bp, Gossypium hirsutum
  Clone ID: LIB3196-025-P1-M1-E8
atcgccaagggagcaggacggagccatggacccggccaggaaagcaggtgcccaggccgtgatctggaacgcaggctggctgctgctgctgctgctgctgctttgcagaggagcgcaggccctggagtgctacagctgcgtgcaaaaagcagatgacggatgctccccacacaagatgaagacggtgaagtgcgcgccgggcgtggacgtctgcaccgaggcagtcggggcggtggagaccatccacggacaattctcgatgggagtgcggggttgcggttcgggactccccggcaagaatgaccgcggcctggatcttcacgggcttctggcgttcatccagctgcagcaatgcgctcaggaccgctgcaacgccaagctcaacctcacctcgcgggcgctcgac

SEQ ID NO: 46407 - DNA, 344 bp, Gossypium hirsutum
  Clone ID: LIB3196-025-P1-M1-E9
cccacgcgtccgcaccgttgccaacggcaagagcaagggcccgaacggaagcaacaatgtgtgaaggaatgcagggaacagtaccaagaggatccatggaagggagagagagaaaacaagtggagagaagaagaagaggaggaaagtgacgaaggagagcaacaacaaaggaacaacccttactacttccatcgcagatcgttccaagaacgattcagggaagaacatggcaatttcagagtcctccagaggtttggtggccaacattatttacttaagggcattaaccaggtccggattggcattttaggaggcaaccccaacactttcggtcttccacacca

SEQ ID NO: 46408 - DNA, 307 bp, Gossypium hirsutum
  Clone ID: LIB3196-025-P1-M1-F1
acagggacgcttgatgttgatctgggaattcaattggcgagattttgacttggaaggagatcctgacgccccggattacatggaggttttgatgaggacagggattgattttgacaacgaataaggaaatggggatcgaatcgctttcgtacgcttagctgatgatggcgagaggactctggtgaaacgactcattgagaactgtgacaattcataccgactataatgtctggatatttggttaatatcctgacctgtcgagatctggccgcgaaattacaccagtttttgacgattgttaaagtgt

SEQ ID NO: 46409 - DNA, 403 bp, Gossypium hirsutum
  Clone ID: LIB3196-025-P1-M1-F10
atcaagggagaatgttttgtccttcatcttagcgtcctccttgttcagtttgaagaagctgtattgaaaagtaaggaaatttcagaccttagtaattcactagttctttgccgtttataataattacaaatactgaacagtgttctgtaccttggagagttatatattttaacgtggcccttataatagtgatactgaggcttaggagggttgattgaggcactgagtccggaagtggcagggaatctgtgtcttcggaatccaagtcccatgctctttatttcatactgtgccacctcccagccttcaagggtggagagctgagtatacccctcctctcttagccaggggcaggtgctcactgttgggccatggaaatttcattctgagatagggccctatg

SEQ ID NO: 46410 - DNA, 433 bp, Gossypium hirsutum
  Clone ID: LIB3196-025-P1-M1-F11
acactatataacaagttggtacgcaagagcacgctggtacccctccccaatttccgggatcaaagccaagcgttctgtccttcatgggagcgggctgattgttcaggctgacaaaaccgtattaccacgtcaggtcatttcagaccgtagataataactagttcttcgccgtttataatatttacaaatacttaacattattctgtacatcgaatagtgatctatcttaacctgcacctacttatactgatactcgtgctaactaccgttcattgacagcactgattcaggaagtggcactgaatcactgtcttccgaattcagggtgagggctgtatattacatactgtgccagctacaagtcttcaacggcagacacctgaggatacacttcctctattagacatgggcaccaactacaatcttggccttg

SEQ ID NO: 46411 - DNA, 173 bp, Gossypium hirsutum
  Clone ID: LIB3196-025-P1-M1-F12
ttcaattatcccccggcttgaatctcctcttgctttttgtttttttttccagctccaggccaacccaagggttaaacctgcagtggggctttaagggtggtccttgggataaagaacggcttaaaataaaaaactcttttttattttttatttacctaaaaagcagggatgga

SEQ ID NO: 46412 - DNA, 344 bp, Gossypium hirsutum
  Clone ID: LIB3196-025-P1-M1-F3
cttcattttgtctaagaaagggaaatgccaggcctcaccattggagacacagtgcccaaccttgaagttgaaaccacccacggaacattcaaccttcatgactacttcaacaatgggtggaccatcattttctctcatccttctgatttcactcctgtgtgtacaacggaactggggaagatggcggcttacctgtctgagtttgaaaaacgagggattaagcttctaggcttctcttgcgacgatgtgcagtcacacaaggagtggatcaaagatgttgaagcctacacgcctgggtgcaaggtggcatacccaatcgttgcagatcccaggagagagatcat

SEQ ID NO: 46413 - DNA, 364 bp, Gossypium hirsutum
  unsure (1)..(364): unsure at all n locations; Clone ID: LIB3196-025-P1-M1-F4
gtttttactatacttcgactgtgtaatcaacttgttgattaacacaaaccatggtcctcttattctttgttgtaacagcaacgaccataccctgaagcaaatcccagaaaggggagctcaccaccccccagtttcttagaagaaaataaactagttaaagaacgagtaaattgtcttttaattgctactcccgccaaggaaaatgagcgcctacagattcataaagtgtgtcaccgtcnnaaatcatgccaactgcaggacctgtacactaatttcttataccagctatactttccctacggactatgtgcagacagtcttggacaatttcagcacaaatgttgccatggatcgtagcactgtc

SEQ ID NO: 46414 - DNA, 390 bp, Gossypium hirsutum
  Clone ID: LIB3196-025-P1-M1-F6
cttaaaaccgagtagcacaagttgtccaatataatttaaaacctcatattgtatcataaaacactagaatacacaaattttacctatgggtatttttccaaatatgaaccctaggttgaattattgctagcataagctaaatcaagttaccgggactcaaaaaacgtaaagaacttgaaaaacggggttagaacagacttacaattgagcttgggaagcttgaaaaccctagccatggagtctcccttggtatacacgtccatggtgaagaagatgagcaaaattggcttttaattttgtattttaattcattttacccctaaatgaccaaaatacccttactactaaactttccaaaaattccatccatgtccaatttttgtccataac

SEQ ID NO: 46415 - DNA, 262 bp, Gossypium hirsutum
  Clone ID: LIB3196-025-P1-M1-F7
acgattatctcaagagcatgattacactggaatctccccaacaccttctacggcagaaatagagggtcctgccattgctcctaccaacagagctgctgggatgaaggctgacctcttggccacactggacggtgacgtcttggagttcttctacgatgtcaggggccttttgaagaggtaagatagctgtggaacggccaaacccaccagagaacatttcattctgattttaatgtcaacggatggaagagcaggggggggg

SEQ ID NO: 46416 - DNA, 395 bp, Gossypium hirsutum
  unsure (1)..(395): unsure at all n locations; Clone ID: LIB3196-025-P1-M1-F8
atgtcacaaatggttcatatatttcagtttccatgttagctatttttggggcagaattttattttaatggaaaagatccttccactcagctgctaaaataaagattaaataagaatatcccagagtaattggagtttttctttaaaagagaaagtatgttttactgaggtatgatgattttgactacaactaaatgttatctattttagtttttgtaaattaatgttacagtaatgttgtaaacataagaccaagtgttcttatagttatttaaaaactacaactactcaatagataagaaaatagataaggtctccttattgtaccaggtttaccttatatgctttttttttctttttgaagtttatatgccagccnggcctttttgttttttt

SEQ ID NO: 46417 - DNA, 407 bp, Gossypium hirsutum
  Clone ID: LIB3196-025-P1-M1-F9
attgccatcctgcgtctggacctggctggccgggacctgactgactacctcatgaagatcctcactgagcgcggctacagcttcaccaccacggccgagcgggaaatcgtgcgtgacattaaggagaagctgtgctatgtcgccctagacttcgagcaggagatggccacggcggcttccagctcctccctggagaagagctacgagctgcccgatggccaggtcatcaccattggcaacgagcggttccgctgccctgaggctctcttccaaccttccttcctgggtgagtggagacccgcctcccggccctgcctgacctgggggtcacccttggggctgggctttggaagctaagtccgccctcatttcttcctcaggcatggagtcctgtggcatccacgaaa

SEQ ID NO: 46418 - DNA, 374 bp, Gossypium hirsutum
  Clone ID: LIB3196-025-P1-M1-G1
cggacgcgtgggttcgaaatcttcgaaatctctctctaacatcttaacatacgattttggttgtgtgggagagagagatggacgcccttgacaacgtggtagatcctttgagagacttcgccaaggacagcgtccgcctcgtcaagcgttgccacaagcctgatcgtaaagagttcacgaaggtggctttccgtacagcgatcggtttcgtagtgatgggattcgtcggattcttcgtcaagctcatctttattcctattaacaacatcatcgttggctccgcttaggctcgtagaaattggtgggggatatgaccagttggcgtagttgcagattctcatagaaaatgaatgttagaatgcagcagttggggg

SEQ ID NO: 46419 - DNA, 76 bp, Gossypium hirsutum
  Clone ID: LIB3196-025-P1-M1-G10
ggctgacgagcctccgatcgcaacttttctccttaaagcgcccaacatcaccgatattcaatcccttctattttcc

SEQ ID NO: 46420 - DNA, 470 bp, Gossypium hirsutum
  Clone ID: LIB3196-025-P1-M1-G12
gacactctataacaaaagctggtcgaagggccagctcctacccctccattatttcctcgatcccagccccccttatataaaaatattgatgagggtgcactggaaggaggatagaaatccccccccaacctttttccaaccctaattaaccctaaccccttcaagggccttctttttgatttttgttaaaacaccatcatttatttcccttcctttaaaccctttatctcccaaggcttttcccttggtctacaacttcggtgtcaccaaattagattcaaaccttaaacttcaatatttcctgcaaattttttttttaaaattgtgtggtaatgacatcgaaaaaattattaaagacaatttttagtgtttgggttctaggtttaatgttcaagtttggcctaatttttttaaaattatatattaatgacatgaaaaaattattaaaatatcattaaataattaaaata

SEQ ID NO: 46421 - DNA, 355 bp, Gossypium hirsutum
  Clone ID: LIB3196-025-P1-M1-G2
caaggtttaatcagtgttatagattgttcatccagagatctaagcttattagcttaagctataaaaatggtgaaaagatcgttgggctttttctttcttctcctcattggcttagcctcccaatggggggtgcagccaactgaggcaagggtttgccagtcacaaagccataagttccacggtgcatgtgtgagtagccacaactgtgcgatggtgtgcaaggacgaaggtttctccggcggcagatgtcgaggattccgtcgccgctgcttctgcactaagctttgctaatgcaagcttgcccttagctcatattttaaggatttttcttgagtaaaagacctttatgtttttc

SEQ ID NO: 46422 - DNA, 363 bp, Gossypium hirsutum
  Clone ID: LIB3196-025-P1-M1-G3
atcgaggatggcgatcatggcgccccgaaccctgctcctggtgctctcaggggtgctggccctgacccagacccgggcgggctcccactccttgaggtatttccacaccgccgtgtcccggcccggccgcggggagccccgcttcttcaccgtgggctacgtggacgacacgcagttcgtgcggttcgacagcgacgccgcgagtccgagaaaggagccgcgggcgccgtgggtggagcaggaggggccggagtattgggaccgggagacacggatcttcaagaccaacacacagacctaccgagagggcctgcagatcctgcgcggctactacaaccagagcgaggctgggtctcacaccta

SEQ ID NO: 46423 - DNA, 399 bp, Gossypium hirsutum
  Clone ID: LIB3196-025-P1-M1-G4
catcatgtattaattttttcaactttttttcaagtaatgtacaattaaagggttaatactcatgtacccctgatagtattatacccaaaccacacacattaaattcaaagaaatttgctcaaataaaaggttaccactgtttctcgaaagttcaaacctgagtaggttgtatggtgaacaactttagtcaccatgtcaataaagggagctcatttaatttttccagttgattgtagattgagagtagggataacaatgggtccaacatatattatttttgtaaaatttgaattagaatctataaatttacttttaaaattagaaaatattaaatttgcagttacaaatttaatttttttcaaattaaattatctattggatatttaaattcacttaaca

SEQ ID NO: 46424 - DNA, 401 bp, Gossypium hirsutum
  Clone ID: LIB3196-025-P1-M1-G5
tttaaagaaaaaaaaaactgaacctatcctctccctttcaaggttcccagcagccaaacatggcccacgccggcgagcggcggttccaaaggccaaagctccttcacgagcggtggtcggagcgagaaaaggagggctttttaaccccgttctcgacctccaccttaaggcccggtcctccagaccaaacaagccgaaacaaggagagacctttcgtcttcttctcggtccgattccaacaccgaagatggtctccggcgacgggctttcgagaccggtactggtgaagtcaacgggtattggaagaataaacctagcctttttggtgcaaaactggtcgtgcttcgggcgttgagtgcgctgcaaatgcacgaggagacgtacggcgcactgaggctgct

SEQ ID NO: 46425 - DNA, 287 bp, Gossypium hirsutum
  Clone ID: LIB3196-025-P1-M1-G6
aatttaaaaaaaatagtaatttttgtgcaattttttctatgttatttacacaataatttgggtattaattcaatttggattccaaaatcttgaaccctaaatcttaaattttgagctgatacatcgagatttagggtttggattcaagatatatggttcagggtttgtgtttggggtcacgagtttggggtcacaagtttggattcagaggtttaaggctcagtgtgtggcgcaaatttttttttcaaaattgtgtgttgacgacatggaaataattattgacgaca

SEQ ID NO: 46426 - DNA, 394 bp, Gossypium hirsutum
  Clone ID: LIB3196-025-P1-M1-G8
atccggtccacctcacagccttcctgggatacaaggctggcatgacccacatcgtgcgggaagtcgacaggccaggatctaaggtgaacaagaaggaggtggtggaggctgtaaccattgtggagacgccacccatggtggttgtgggcattgtgggctacgtggaaacccctcgaggcctccggaccttcaagactgtcttcgctgagcacatcagtgatgaatgcaagaggcgtttctataagaactggcataaatctaagaagaaggcctttaccaagtactgcaagaaatggcaggatgaggatggcaagaagcagctggagaaggacttcagcagcatgaagaagtactgccaagtcatccgtgtcattgcccacacccagatgcgcct

SEQ ID NO: 46427 - DNA, 319 bp, Gossypium hirsutum
  Clone ID: LIB3196-025-P1-M1-G9
atgctgaaggccccccgggcccggaccagcccaggggaggacgaggacgaccttctccccccagagcagaaggccgagcgggagaaggagcgccgggtggccaataacgcccgggagcggctgcgggtccgtgacatcaacgaggcctttaaggagctggggcgcatgtgccagctgcacctcaacagcgagaagccccagaccaaactgctcatcctgcaccaggccgtctcggtcatcctgaacttggaacagcaagtgcgagagcggaacctgaatcccaaagcagcctgtttgaaacggcgagaagaggaaaagg

SEQ ID NO: 46428 - DNA, 367 bp, Gossypium hirsutum
  Clone ID: LIB3196-025-P1-M1-H1
gaagcagaaggcaagcaaaatgaagaccattctttcttcagagacaatggacatccctgatggggttgatattaaggtgaaggccaagatgatcgaggttgaaggtcccaggggtaagctcatccgtaacttcaagcacctcaacctcgattttcatcttatcaaggacgaggagagcggcaaacgcaagctcaggatcgaggcttggtttggctctagaaagactagcgccgccatccgtactgctctcagccacgttgagaatctcatcaccggcgtcaccaagggctaccgttacaagatgaggtttgtttatgctcattttcccatcaacgcctccatcactaacggcaacaagtccatcgag

SEQ ID NO: 46429 - DNA, 390 bp, Gossypium hirsutum
  Clone ID: LIB3196-025-P1-M1-H10
atttcaactagaaatatacaagaggatgattctggaggctcatctctttatgataataacttacataaggatgccaattcctatcagcctcaaaggcatgcttttgagcatgatgaagccgaagatggttcttcatcggttgctgtgaatatgcagcaacttaatttgcataatgatgaccaggaggcatcatctgaagaggataatccatctgtaatcataccaaaccacctgcaagtccacaccccagactgttcacatttgagttttggaagttttggacctgcaattggttctgtcttttccggatcatttgcatcaaggcccttgaagaataatttggatgaagctcctgaatcagctgatatctcttctattgggcactccgag

SEQ ID NO: 46430 - DNA, 375 bp, Gossypium hirsutum
  Clone ID: LIB3196-025-P1-M1-H11
cccacgcgtgcgattgttaaatacacatgtttattattattacacatgaatttaccaacaccatctacttgtcaatttatggcttaatttcttatttagtcccttcacttttcctctaatctataattcaactttctctctatatgcaatctagtcattacacctaattactcttaatttaaacaaattcacctaatcaaaacctaattaaccacacaactaactttgtaaatgtttttaataaatatttacgaatccgttttacgaaaacagagacccgaaagtacactttccaatactcgtgactatcgagtcgttacataatcaaacaagtaattactctcataattttacactaaaatttggactataatg

SEQ ID NO: 46431 - DNA, 231 bp, Gossypium hirsutum
  Clone ID: LIB3196-025-P1-M1-H12
gccacgcgttcggtggagtggggcggacactaaaggtaggtctgatatttatcaaaatggttttctctcaaattatgactacggatcactttttctgctacatgactaagtggatgaaggttggagaatattatttatatataaaactaggattaaacttattgaaaataatcattaagatcaatcgggtgttggaaataaatcataatattttttaaaccagcttagttt

SEQ ID NO: 46432 - DNA, 391 bp, Gossypium hirsutum
  Clone ID: LIB3196-025-P1-M1-H2
gccgtgtaaattttggaagagcggagatggatgccgccacttcatggtcgaatggaatgttaacatcagcttgctttccaattgcgttggcggttatgttcgcgatgacaactctgacatcgtcgctactgacaccatgaaaaactctgtttatgtcaaagcaaaggaatgttcaaaacaactttcggcagaggaatttgctattctacttggcaagcacttcacatcattttatccacaggtttttactggaatagtaaagatagtggaaaagccatgggaacgcatttctgtcaatggccaaccacatgaacatggctttaaactgggatctgaaaagcatacaactgaagcgattgtacagaagtctggtgttttacagctgactttt

SEQ ID NO: 46433 - DNA, 350 bp, Gossypium hirsutum
  unsure (1)..(350): unsure at all n locations; Clone ID: LIB3196-025-P1-M1-H3
attgccagtgctgagccaggccctcgctgggctggacctggcggactacctgatgaagatcctcactgagcgcggctacagcttcaccaccacgggcgagcgggaaatcgtgcgtgacattaaggagaagctgtgctatgtcggcctagacttccagcaggagatggccacggcggcttccagctccttcctggagaagagctacgagctgcccgatggccaggtcatcaccattggcaacgagcggttccgctgccctgaggctctcttncaaccttncttcctgggggaggggagacccggcttccgggcctgcctgacctgagggtcacccttggggctgtgctggg

SEQ ID NO: 46434 - DNA, 350 bp, Gossypium hirsutum
  Clone ID: LIB3196-025-P1-M1-H4
atccgggaccgctttgcaggtcgctagtcagggccgagcaggggaggaggataggaatccccgccgcacctttgtacgagcctgactgagcctgaccgcctccaggggcttgctcttgggtcgtcgtgaagccgcggtctctcctcccccgcccttcagccccgcggtcgccaggggcggcgccctgggtctggaacgcggttgccaccgaggaggcggcggccccgggcgcgcctggaagccccgggcaaccggccagggccgggcacaggtggggtccgtcaagccgcccgggggtcctttgtcccagctctgcggcccggggggtgacgtgatggcggcagcggtgc

SEQ ID NO: 46435 - DNA, 398 bp, Gossypium hirsutum
  Clone ID: LIB3196-025-P1-M1-H5
caaagaaccggttcctgaatctgtctaatcctcactttcttccccatcaaacacaccttcgattttcccaaggttgtagaagatggcagaaggtgaggatattcagccacttgtttgtgacaatggaactggaatggttaaggctggatttgctggggatgatgctccccgagccgtattccctagcatcgttggtcggccacgtcacaccggtgtgatggttggcatgggccagaaagatgcatatgttggtgatgaagctcaatcaaagagaggtattttgactttgaaataccctattgagcatggtattgtgagcaactgggatgatatggaaaagatttggcatcataccttttataatgagcttcgtgttgcccccgaagagcacccagttc

SEQ ID NO: 46436 - DNA, 385 bp, Gossypium hirsutum
  Clone ID: LIB3196-025-P1-M1-H6
cccacgcgtccggagaaatggatcgaagtcaagtggaaggactgttgataatcaagagaaattacactcaggttggtattgccgtgttgatgagcaaacatgggtgcattcaacaagaattggtcctaatgatgatgaaaaaaatgacaaaatccttgaagttgacactgggaaaccaaatttcatctctaaacggagaaacctctttcattcaacacatctttctctgaattctgatttatatagctgtagtttcactaattcgagagactcacaccaaacagctcctagtccttcatctggtgaagttcagtctttaactccattgatgctgtctcactctgaagcaatacaggaaagccctttctgcgatgctgttgatgat

SEQ ID NO: 46437 - DNA, 336 bp, Gossypium hirsutum
  Clone ID: LIB3196-025-P1-M1-H7
gcttcctcaaaggtggagcaagacatctcaaagacggccaattccaagcaggaaacccccaaaatttcgtcccaatctaagggtgagtctcttaagagtgggggcaaatccaattctaatggcactggtaagtcaaaatctggttcgtcaaaggtgaaaggaagtgaaagcgtgaaggagagctcaactgattcagcaaaagttgtgggaagtgtgaagcggaaagcaccaactttgttgaatgcgcacggaagtgattctaattcttgaaaaaagcggcaaaaatgagttgaaaggcgcacctactgcattgtcatttgcaaggggtggttcttt

SEQ ID NO: 46438 - DNA, 354 bp, Gossypium hirsutum
  Clone ID: LIB3196-025-P1-M1-H8
atctagggagagccgtggaactgtcgccaggtcgctgtcgctccacgccgcccgtcgcgctgcccgcccgctcagcgtccgccgccgccatgggagtgcaggtggaaaccatctccccaggagacgggcgcaccttcccgaagcgcggccagacctgcgtggtgcactacaccgggatgcttgaagatggaaagaaatttgattcctcccgggacagaaacaagccctttaagtttatgctaggcaagcaggaggtgatccgaggctgggaagaaggggttgcccagatgagtgtgggtcagagagccaaactgactatatctccagattatgcctatggtgccactgggcacc

SEQ ID NO: 46439 - DNA, 325 bp, Gossypium hirsutum
  Clone ID: LIB3196-025-P1-M1-H9
tcgctgtgatcctgctgctgggactgtgagatgccgatgtgaaaacacagcgattatcggtgagaggaaaaatgtcaaccttactggtgtcgtggcggatcttcccacactcactgagaaggataaagaagacatcttgggatggggagttcccaacagtattgatatgattgctctttcctttgtacgcaaagggtctgatcttgtcaatgttcgtaaggtcctcggtccccatgctaagaagattcaattgatgtcaaaggttgagaatcaggagggtgttatcaacttcgacgagatcttgcgtgagactgatgcatttatg

SEQ ID NO: 46440 - DNA, 430 bp, Gossypium hirsutum
  Clone ID: LIB3196-027-P1-M1-A1
gcgacaccatctaactagagggaacgctgaagcgcgctcaggccccgccccgatatccccgattcttgccacacactcggcactgtgaacagcacgtcgttgttgatgatggagtgcgtgtcaaatgggagccaaatctatacaaactgccaaggctagcgaaatgagccatcaaggttgaaatcgaagagagcagcgtttaaaaggtactaagccttttacaaattgaccagtacctgaccatcacatctagagcaggggcagctcgtcccacatagacagtgcgaagaagaaagctctcaacaaagaatctacttcacgcacacagatttatggatgatcagacctgtcagagagagacacattctctagtgaaccctgtgttatatgaagcgcttgcctacactagacacagagcgtaaaaacaact

SEQ ID NO: 46441 - DNA, 339 bp, Gossypium hirsutum
  Clone ID: LIB3196-027-P1-M1-A10
atatccgaaaatagatacactaccatcacacacactagggggataacaaacatgtgaccttcatgagctatacatatatctatacctgcgcccgcacatcacataatgtgagactatactgtacaacaaacaaactgttttatgcggaagtgagatcatgaactacaataagatggtgcatgattactacataggcatacgaataaatgagcaagtcatctaccaatacatgaacacacacatagcagagatttaccgatcacacacagacattactaaacacacttgtggcactacaccagctttaccaatacacacagaattactatgacgagatca

SEQ ID NO: 46442 - DNA, 353 bp, Gossypium hirsutum
  Clone ID: LIB3196-027-P1-M1-A11
gaaaagttagggttttcgctccttacgattatcgagatcgtcctcttgaattgaagtatgggaaagaggaaatcaagagcaaagcctgctcctaagaagcgaatggataagcttgacactgtgttcagctgccccttttgtaaccatggaaccagtgttgagtgccgacttgatatgaagaacttgattggcgaagcctcttgcagaatatgccaggaaagctttagcactgttataacagctttgactgaaccaatagacatatacagtgaatggattgatgaatgtgaacgtgttaacaaccttgaagaagaggatgatggggatcaggatgaaggttatgtacctagaaa

SEQ ID NO: 46443 - DNA, 374 bp, Gossypium hirsutum
  Clone ID: LIB3196-027-P1-M1-A12
atcctgggcatggagtcctgtggcatccacgaaactaccttcaactccatcatgaagtgtgacgtggacatccgtaaagacctgtacgccaacacagtgctgtctggtggcaccaccatgtaccctggcattgctgacaggatgcagaaggagattactgccctggcgcccagcacgatgaagatcaagatcattgctcctcctgagcgcaagtactctgtgtggatcggcggctccatcctggcctcgctgtccaccttccagcagatgtggatcagcaagcaggagtatgacgagtctggcccttccatcgtccaccgcaaatgcttctaggcggactgtgacttagttgcgttacaccctttcttgacaaa

SEQ ID NO: 46444 - DNA, 371 bp, Gossypium hirsutum
  Clone ID: LIB3196-027-P1-M1-A3
caaaaatgaaaatggaaacttacaatcctatatagaactacttaaaaactgatggaagaatgagtttatgtttttggactattttgaagcctaaaaatgaaaataaataattcagtcatagtgagcatgttgagttgtgacacattgaatggatttttctagaaattttaccaatgataaaatcatcaaaattttaccacgagtaaaattgtcaaaattttattaggataaaattgggatgagaaaattatttaatatgtaaatattaaagtttattttgggaaatagaaaaactgaatcaaattggacatattatagagtactaggtctaaaaggcccgagaagtactcgtaattggacctgatgcaaga

SEQ ID NO: 46445 - DNA, 373 bp, Gossypium hirsutum
  Clone ID: LIB3196-027-P1-M1-A4
atcacccgggccgagatgtctcgctcagtggccttagccgtgctggcgctactctctctttctggcctggaggctatccagcgtactccaaagattcaggtttactcacgccatccaccagagaatggaaagccaaatttcctgaattgctatgtgtctggatttcatccatctgatattgaagttgacttactgaagaatggagagaaaatgggaaaagtggagcattcagacttgtctttcagcaaagactggtctttctatctcttgtactacactgaattcacccccaatgaaaaagatgagtatgcctgccgtgtgaaccatgtgactttgtcagggcccaggacagttaagtgggatcgagacatgt

SEQ ID NO: 46446 - DNA, 349 bp, Gossypium hirsutum
  Clone ID: LIB3196-027-P1-M1-A5
gttagctcagaaatcacggtttgtgtttctataatccgaacttaatatttaattgttgaatttattatttaatgtgtaggttgatgcatagaaaagtgaaatttaattgttaattattatattatgattgaatgttatggtaagtaatccaggtaagcattattgtgttttatgattattgaaatgaatcaaaatatatattgtattgaaattaaatcgcatgttcattgatatggaaaaatgtattaaattgaattcaaattaaaatgcaaatgaaattgaaaatttgaaagttcacttaataccctattaactgtatcgggctagtcgaatatagctggtatgccat

SEQ ID NO: 46447 - DNA, 91 bp, Gossypium hirsutum
  Clone ID: LIB3196-027-P1-M1-A6
gttctagatcgcgagcgcccggcccaaataaaaattgctaagcccgagcccggcccgacccatattaattttttagcttattttattatat

SEQ ID NO: 46448 - DNA, 223 bp, Gossypium hirsutum
  Clone ID: LIB3196-027-P1-M1-A7
acaccatctaactagagggaacgctgaagcacgctcatgccccgccccgatatccccgatccgtgccacacactggtcacggtgaacagcacgtctttgttgatgattgagtgcatctcaaatgggagccaaatctatacaaactgccaaggctagcgaaatgagccatcaaggttgaaatgaaagagagcagcgtttaaaaggtacaaagccttttacaaat

SEQ ID NO: 46449 - DNA, 364 bp, Gossypium hirsutum
  Clone ID: LIB3196-027-P1-M1-A9
cccacgcgtccggtggccgacaaaggaaagaagatgaaagtagcatagaaagtataggaagagaaccatgaacaaatagatggagacctcgtcatttccatcgagaagcttcaagagatccaagatgagcttgagaagatcaatgaagaggcaagcgagaaagtcttggaagtggagcataaatacaatgaggttcgcaagccggtctatgataagcggaatgaaatcatcaattcaattcctgatttctggttaacagctttcttgagccatcctgctcttggtgatcttttgactgaagaggaccagaagatattcaaatatattaactcacttgaagtggaggattttaaagatctgaaat

SEQ ID NO: 46450 - DNA, 360 bp, Gossypium hirsutum
  Clone ID: LIB3196-027-P1-M1-B1
gccacgcctacggtgggcgggggaggaaagaatatgaaagtagtagagaaagtagaggaagagaaccatgaacaaatagatggtgacctctacattttcatcgagaattgtgactacaaccatagagctgccttgataagatcaatgaaaaggcaaacggaagaatgttggaagtgaagcactaatacaatgaggctcgcaagccggtctatgataattccttttgaaattattaatttaattccaatttctgcttgacacttttcttgagccatactgctcttggtgatcttttgactgataatgaccatatgatattcaaatattttaactcacttgaagtggtggattttaaagatc

SEQ ID NO: 46451 - DNA, 374 bp, Gossypium hirsutum
  Clone ID: LIB3196-027-P1-M1-B10
atgtttaaatagtgctggttaaacaaacacttctgcagctggatttagattgcaagctgccaagttgcaacctctttcattctagaaacttctgtcattttcatcatagcaaatctatgtggacaaaagcctccaaactttccaactgtgtaggccagtacagctggcaaggttcatagaatataatgactatccccctctgccaaataagactatccacaacccagctcagacacagtggttatatggattttgtgtccatacaggggaggccttggtgtcctcacatacattctcctagccaacatctatccagcagccctgacctcctgctataatttaagtctatttccttttagtctaataagagttga

SEQ ID NO: 46452 - DNA, 354 bp, Gossypium hirsutum
  Clone ID: LIB3196-027-P1-M1-B11
ctcacttcggaaggtcaggcccgcccgacatcaccgacacctactcccttctcgtcctcaacattaccttccgcacgactgctgatgatttgtttccgctcttcgacaagtacgggaaggtcgtcgacatcttcattcccaaagatcgaaggactggtgattctcgaggctttgcatttgtgcgctacaagtatgccgatgaggctcagaaagctgtagataggctcgatgggagagttgttgatggtcgggagataactgtcagtttgcaaaatatgggcctaatgcagagagaattcagaaaggaaggattattgaatcatttccaaggtcaagaagccgcagtcctcgcag

SEQ ID NO: 46453 - DNA, 357 bp, Gossypium hirsutum
  Clone ID: LIB3196-027-P1-M1-B12
tcacatttgatcttaacttaatattcccgttgaaccattaggaatcaataaggatactcggatagctcgaaaagctcgtacaatgcctacgtcccagacgaggtcttacatataatcgactatcgataccactgtcccagatggggtcttacacgaactcatatacgatgccgatgtcctagacatggtcttacacgtaaactacaaatcgatgccaacatcctagatgtggtcttacacaaatcacatattgaaatcctatgtcatgacatatatacctgatagtcgctaaaactaactaaaaattcgactaaggcaagtgcacctatcgaacagtagtatagttatgatgagaca

SEQ ID NO: 46454 - DNA, 370 bp, Gossypium hirsutum
  Clone ID: LIB3196-027-P1-M1-B3
ctgaggatcaccatagcaaacaaccaagggagataggacttttatcacaaaaagaaatgagctctgaagaagcaaagagaagcatcaatggagctctgaaggccgtgaaaccgaaaaccgacgatccgaagctttctccggagtccaccacttcaccacccaaaaaagtcatcatcaaaagcgccgacatgaaggaagaacagcaaaaagaggctgtcaatatacccatctccgttacttcccttttctcttccttcccccaaatcttccatttttctgcccgttttggatttgatttcgttcctgggttttgttcattattgtaaatttattaacttggagtgttttggatttttttttctgggggcat

SEQ ID NO: 46455 - DNA, 339 bp, Gossypium hirsutum
  Clone ID: LIB3196-027-P1-M1-B4
gcttgtaataataaggatactaaattatgtgatttgcggattgatgatagagttttttcggatggtagggctcaacaaggaactcatatggcgggtgagactagtaacagcaaagatcacatttgggatgcatctagctgcacgaggataaaaacaatggatgggcatatgattaccacattgacgccttagctaggagctctactatgatatcttgtggaagtcgagataagagcaaccttcaaagagatatacgtgagcacgatgatcatcctcgtcaactgtctgaaaacaagtcacaggtctgcaggctgaagtggtcatatgacaaccgtgaac

SEQ ID NO: 46456 - DNA, 341 bp, Gossypium hirsutum
  Clone ID: LIB3196-027-P1-M1-B7
gggaggctaaacaagtgtggggtgattagtcctcgttttgatgtcggagtcaaagagattgagggttggactgctaggctacttccttctagacaatttggatatattgtgctaaccacatctgctggcatcatggaccatgaagaagctagaaggaagaatgttggtgggaaagtacttggctttttctactgagtcaaatttttgatattttcctttgttcttttttaatttcactccatgtagaacttgatactttactgcaattttaattttgtattgggagttataattatgtttttggttataatgtttgagattatgaattgttggtttgcctt

SEQ ID NO: 46457 - DNA, 364 bp, Gossypium hirsutum
  Clone ID: LIB3196-027-P1-M1-B8
tgaaagttcaggtaaaagcataataaatagattcaggtgagttataatggttaagaatatctcagttatcagttgagaaagaaatttcagcaagggaagagtaagttatattcatgagttatttaagcaagtaagtaaacaagtaagagagtaagtaaagaagaagcaaagaccatgatacttgatgatgatttatgagtataattatttatgataaatattgttatttatttgcttgtaaacttactaagctttacgcttactccctttattttccttctttttttatagtatcaccaagcaaattcagggatcgtaaggacgtcagagatcatttcacactatcaacagaccaactcggtat

SEQ ID NO: 46458 - DNA, 363 bp, Gossypium hirsutum
  Clone ID: LIB3196-027-P1-M1-B9
atttgctgctacttgcatggccatggaaggtgttgaactggttaatggtttagagaataagatagcttgcaactcatacaagatctcttatgtgttggacaccgaagatttcttcttccgtaggagaagaaagtcaccgcaatgcagatcttcatacaataatcaagcaagagtacaacggttccagaaatttttatctgcttcgcagtaattcagtattctttctcagaccggcataaatgcagcccttgctttaacccaaccttgaaaaggccttcaaaactgaaacatgtttcttgaatgttcatagtttgatgctaattggtcatactagtagtgaaggatgatgaatggttaggaaat

SEQ ID NO: 46459 - DNA, 371 bp, Gossypium hirsutum
  Clone ID: LIB3196-027-P1-M1-C10
atgtctttgactacctgcatgccacagcattccagggcacacctctagcccaggctgtggaggggcccagtgagaatgtcaggaagctgtctcgtgcagacttgaccgagtacttcagcactcattacaaggcccctcgaatggtgctggcagcagctggaggagtggagcaccagcaactgttagaccttgcccagaagcaccttggtgacatcccttggacatacgcagaggacactgtgcccgctcttactccgtgccgcttcactggcagtgagatccgccaccgtgacgatgctctaccttttgctcatgtggccattgcagtagagggtcctggctgggccagcccggacaatgtggccttgcaa

SEQ ID NO: 46460 - DNA, 351 bp, Gossypium hirsutum
  Clone ID: LIB3196-027-P1-M1-C11
cccacgcgtccgcttaaaaagcacattgatgctaccctgggcagtggaaacctaagggaagcagtgaggctacctcctggggaggatttaaatgaatggctcgcagtcaacactgtggatttcttcaatcaggtgaatctgctctatggtaccctgactgagttttgtactcctgagaactgtcctacaatgaccgcaggccctaagtatgaatatagatgggcagatggcgtgcaaatcaagaaacctatcgaggtttctgccccaaaatacgtcgaatatctaatggactggatcgaaacacaacttgatgatgaatcaatatttcctcaaaaactgggtgcaccattt

SEQ ID NO: 46461 - DNA, 340 bp, Gossypium hirsutum
  Clone ID: LIB3196-027-P1-M1-C12
cctatctcttcaacgttcacaatgggcgcatttcaccgactcaacttgctccatttcacgctctctttagttgtcattgccgtcaatggccacaatataacggccattctcgaaggttttccagattactctgtttacaatagtttcctcacccaaacaaagctggccgatgagattaacacccgagagaccatcacttgccttgtcctcaacaatggggctatgtctgccctcacatccaaacaccccctttccgtcgtcaaaaacatcctcagccttcacgttcttctggactactatgacccccaaaagctccacaaaatctttgatggcactaccc

SEQ ID NO: 46462 - DNA, 366 bp, Gossypium hirsutum
  Clone ID: LIB3196-027-P1-M1-C2
tatccctttatttcctttgccgaacgtggggttttattacattcgccacatggcttctgcagatgtcgagtacacagtgctttgtcggaggtatcacatggaccattaacgaccgggctctccaagaatccttgagtgcttacggagagatcgttgattcgaagatcattaacgatcgtgagactggaagatccagaggctttggcttctgtactttccgtgatgagaaatctatgaaagatgctatagaaggaatgaacggtcggagactctatggaaggaatataactcgtaacgaagcacaaactcgcctaagccacagcagcagtggtggtggaggataaagaggaaacggggggtacaacc

SEQ ID NO: 46463 - DNA, 368 bp, Gossypium hirsutum
  Clone ID: LIB3196-027-P1-M1-C3
tccatgtgtctttgatgcctttggaaattagatccgtataggattacctgtgttggtttgtgataggacatgatagagtccatgtgtcgcatgattagcgaagtattctagcaaattatagtcctttgacgagatacagaaagtatgacttggtatcttgatggacaagatgtgagccatgcgaggtacacttatgtctgaggtctaaccaactccaacattacatttaacatataatttatttatgtaattcgtataacacaaaatattaaatatttgtaacaatttctcttattacataaatattattaatgttgtaataatttgtgtaattaaataatattttataagattacactaaatacttt

SEQ ID NO: 46464 - DNA, 362 bp, Gossypium hirsutum
  Clone ID: LIB3196-027-P1-M1-C4
gggcgttcttcttgaagcagaaaagcgatatgtttttctcatttaagttttggaaaatcatgattgaaaaatagatggaaaaacaaataaaatacctccgtacaaacaatggcttaaagttctgttatgatgagtttaatagactgtgcaagtcagaagggatcgagagacacttgacagtttgtcatactgcacagcaaaatggcgttgcagaacgaatgaacaaaacgatcatggagaaggttcgatgtatgtaaatgtcaacttaccaaagtcattatgggccgaagcaacctctacttcatgttttttgatcaaccgatccccatccgttgccattgagaaaaagactccacacgaag

SEQ ID NO: 46465 - DNA, 81 bp, Gossypium hirsutum
  Clone ID: LIB3196-027-P1-M1-C5
aaaaaaaaaaaaaaaaaaaaaaaaaaagaaaaaaaaaaaaaaaaaaaaaaaaaaaaaaaaaaaaaaaaaaaaaaaaaaaaa

SEQ ID NO: 46466 - DNA, 378 bp, Gossypium hirsutum
  Clone ID: LIB3196-027-P1-M1-C6
ataacccccacttcatcttcgacgtgcacgtccacgaggtggtggacgcctcgctgtcagtcatcgcccagaccttcatggacgcctgcacgcgcacggagcataagctgagccgcgactctcccagcaacaagctgctgtatgccaaggagatctccacctacaagaagatggtggaggattactacaagggcatccggcagatggtgcaggtcagcgaccaggacatgaacacacacctggcagagatttcccgggcacacacggactccctaaacaccctcgtggcactacaccagctctaccaatacacacagaagtactatgacgagatcatcaatgccttggaggaggaccccgccgcccagaagatgcagc

SEQ ID NO: 46467 - DNA, 380 bp, Gossypium hirsutum
  Clone ID: LIB3196-027-P1-M1-C8
atgtcgcggcagtggtggcttcctatctccaaaaggcgccctccgactcctggcgccgcgctgctcgccgggccagtccggaaacaggtcgtggagccccgcaccactcccgctggttcccgaacgcggatcccttcttctgagagttgcgagcaactttcccttgtccccggcgctgcagcggctcggggaccgtggcagccgcaggtttctgaaccctgggccactctccccgtgcctcggcttcgcgctcgtgtagatcgttccctgtctggttgcacgctggggatcccggacctcgattctgcgggcgagatgcccctgggacacatcatgaggctggacctggagaaaattgccctggagtacatcgtgccctg

SEQ ID NO: 46468 - DNA, 378 bp, Gossypium hirsutum
  Clone ID: LIB3196-027-P1-M1-C9
atgcaagaactctgcgatgagaactgaaccaacaacggagagcaacagaaaggcagattccaggccggtggacgtgtcccctgacgggggttctcctccttcctgtgtgcctcaggcacttaacttttctccagaggaaagcgatactgttttctccaaaagcaccaccacagaagcagctcgggaggaaaccaagccgggtggagacgcagcccctagtgaggctcttcttgtagatatcaaactggacccactcgcagtcactccagatgctgcaagccagcccctcgttgacccccctctcattgacttctgcaataccccagaagcaaacgtggctgtgggatctgaaagcaggcctctgatcgacctcatgat

SEQ ID NO: 46469 - DNA, 141 bp, Gossypium hirsutum
  Clone ID: LIB3196-027-P1-M1-D1
attcaacacttttttattagtacttaacccacaacctgtgactacaattaagcttattccatctcttttgacgttttcccttatttcgttactccgcaatcattttgccttaagcacttaaactttttttcacactgaacc

SEQ ID NO: 46470 - DNA, 358 bp, Gossypium hirsutum
  Clone ID: LIB3196-027-P1-M1-D10
cgtacacaaggacgtacgcgtgggttttttatttattcactaataataacattcgtattcatactaataatacctgaaacattaacattatttaaccaagaaacgaaattccacataataggactaatatagtactaaaaacagtgtattggtgcatatttaaaaagaaatcaagggaaaaggatcaaaaagcaacacgcgcgtcacttggaaggaccgaaacagaaattattcctttctctcaaaacgcagtgcaacactgggagaccaaattgcggagcatatcgaatttcggtgccacattccaatctatagaaacttaattgctgaacctataaaaaaggggaagggcctaatg

SEQ ID NO: 46471 - DNA, 354 bp, Gossypium hirsutum
  Clone ID: LIB3196-027-P1-M1-D11
gtttgagaaggaggctgctgagatgaacaaaaggtcatttaagtatgcatgggtgcttgacaagcttaaggccgagcgtgaacgtggtattaccatcgatattgccctctggaagtttgagactaccaaatactactgtactgtcattgatgcccctggacatcgtgacttcatcaagaacatgattactggtacctcacaggctgactgcgctgttctcattatcgactcgaccactggtggtttcgaagctggtatctcaaaggatggtcagacacgtgagcatgctttgcttgcgtttacccttggtgtcaagcagatgatttgctgctgcaacaagatggatgcaacaac

SEQ ID NO: 46472 - DNA, 372 bp, Gossypium hirsutum
  Clone ID: LIB3196-027-P1-M1-D12
atcccggataggcagtggcagaagagcatttggcagtgggtatcgcagggatgatgactacagaggaggcggggaccgctatgaagaccgatacgacagacgggatgatcggtcgtggagctccagagatgattactctcgggatgattataggcgcgatgacagaggtccccctcaaagacccaaactgaatctaaagcctcggagtactcctaaggaagatgattcctctgctagtacctcccagtccagtcgagctgcttctatctttggaggggcaaagcctgttgacacagctgctagagaaagagaagtagaagaacggctacagaaggaacaagagaagttgcagcgtcagctggatgagccaaa

SEQ ID NO: 46473 - DNA, 366 bp, Gossypium hirsutum
  Clone ID: LIB3196-027-P1-M1-D2
ggaagaactaacttttcaatattcaaggttaaccagatattgcgggaacttagtagagagtggcctggaagttcctatgacttgttatccaaaaattgcaaccacttctgcgatgacttctgtgaaaggcttggtgtccaaaagcttccaggtaaacttaagtgtcatattgttgggttaaacagctttagatatatctactgattacttctttttctatcccttcaactttgtagcctagctttttagttgaactaaaaaaaacctctttttattcctgaattttcttttactaatattattccattattggatgcaattgttcagtgaatattaagtatgatctaaatagaactatatgcctca

SEQ ID NO: 46474 - DNA, 372 bp, Gossypium hirsutum
  Clone ID: LIB3196-027-P1-M1-D3
atggaccgccttaaaggctgctccattggaatagtagaaagaagtattgccttaaatgatgtcattcacatttaattgatgaaaaaaccctagaaccacatctgacatgtcatctgctcactagttatctgttttggttagtgttttcattcatctagagtcttgagatttaaactcttcaggactttagattctgaaaaagctcatgcttggaacgtctgatctcacatgatgatccaaaggtgctggccaagatccaggacattaataagcagtgccagacttttcaggcattccctgcttattcaaaaccagcttgtgaggaatgcccttaaagatgctcacagaagcgcatatagcttgagacttgcc

SEQ ID NO: 46475 - DNA, 231 bp, Gossypium hirsutum
  Clone ID: LIB3196-027-P1-M1-D4
tgccctaaggacctagagcctgtcttttgatgttctaatgaattggattaaatagctaaatgggattaaaaatgcgtatgaccattatgtatttgagctaacagtggccatataacccatcgaattcattgtcatgttcttccataagctagcatacatgcgactttaataagttaaatgtgatggaattagctcaagagcttagaggaccaaagttgtactatggcaaat

SEQ ID NO: 46476 - DNA, 377 bp, Gossypium hirsutum
  Clone ID: LIB3196-027-P1-M1-D5
atgacctgactctctgaggctcattttgcagttgttgaaattgtccccgcagttttcagccatgtctgaaccaatcagagtccttgtgactggagcagctggtcaaattgcatattcactgctgtatagtattggaaatggatccgtctttggtaaagatcagcctataattcttgtgctgttggatatcacccccatgatgggtgtcctggacggtgtcctaatggaactgcaagactgtgcccttcccctcctgaaagatgtcatcgcaacagataaagaagaggttgccttcaaagacctggatgtggccattctcgtgggctccatgccaagaagagaaggcatggagagaaaagatttactgaaagcaaatg

SEQ ID NO: 46477 - DNA, 314 bp, Gossypium hirsutum
  Clone ID: LIB3196-027-P1-M1-D6
aacatacaaactagttataactgaaactgacaatgggtagcctatataataatatacactatgcgaaaggcacaatccggctaatgcacaaacgatggggttacataccaaggctttcaaaggtaaatgggcgaacctccacaaacagcactaatacaattttaggaactatatcaaaataaaagtagccaaaagcctctttatcgaattaatagcactcatgaaaggattaactatatgtacactgcccctgaatactatacaaacaaacctcagtgcaagtatcttattaaaatgtaatgagattgatagac

SEQ ID NO: 46478 - DNA, 362 bp, Gossypium hirsutum
  Clone ID: LIB3196-027-P1-M1-D7
caaaggatcgatcttcgtaccgcactacaattcaaaggctacattcgtggtcctcgtcaccgacggaaacggccacgtcgaaatggtctgccctcacctttctaggcagagctcacactggtcctcccgagaacaagaagaacaagaagaacaagaagaacaagaagatgaaaggagaagtggacaatacaagagagtgagagcccagttatcaaccggtgacatatttgtagtcccagcaggccatccagtcacattcgttgcctcccaaaacaagaacctaggattgctcgggttcggactctacaacggccaagacaacaagaggatcttcgtggctgggaaaaccaacaatgtgagac

SEQ ID NO: 46479 - DNA, 379 bp, Gossypium hirsutum
  Clone ID: LIB3196-027-P1-M1-D8
atgtcagcgacatgtccgtggtcctctccatggacaacaaccgcaacctggacctggacagcattattgctgaggtccgtgcccagtacgaggagattgcccagaggagcaaggctgaggccgaggccctgtaccagaccaaggtccagcagctccagatctcagttgaccaacatggtgacaacctgaagaacaccaagagtgaaatcgcagagctcaacaggatgatccagaggctgcgggcagagatcgagaacatcaagaagcagtgccagactcttcaggcatccgtggctgatgcagagcagcgtggtgagaatgcccttaaagatgctcacagcaagcgcatagagctggagactgccctgcagcaggccaa

SEQ ID NO: 46480 - DNA, 386 bp, Gossypium hirsutum
  Clone ID: LIB3196-027-P1-M1-D9
gcccaactctttcatcctcacatcagcttagcgcttgcttcacttgtttgcattcattactagcgagctgcatcagtaggcaaagtgatcattactcattaaacgaggcttggactgcatgcaacagaaagcacgcttctcttgctgctcgtctctgtcagaatgtacaaaaggctttgctgcaatcagatgttcaatccaaaactgataaaactcctgtaacagcagctgattatggctcacaggcactggttagttttgtgctgcagcacgaacttcatgctgacattctcattagttgccgaggaggattctaaagatcttcgcaaagatggtgcctcagaaatagtagagcgcattacataacttgtgaacgactctttaac

SEQ ID NO: 46481 - DNA, 375 bp, Gossypium hirsutum
  Clone ID: LIB3196-027-P1-M1-E10
atggccaacttctctggactggaccagaagtttctagccggccagttgctacctccctttatcgcctccttcccctctggcaccgaggaggctatttccagacacttccacccctctctggccacgtcacccccgcctttaattcataaaggtgcccggcgccggcttcccggacacgtcggcggcagagaggggcccacggcggcggcccggccagagactcggcgcccggagcccgcgccccacacccgcgccccggcgggcagaccccgacccggcatgagcgccgccacccactcgcccatgatgcaggtggcgtccggcaacggtgaccgcgaccccctgccccccggctgggagatcaagatcgacccg

SEQ ID NO: 46482 - DNA, 357 bp, Gossypium hirsutum
  Clone ID: LIB3196-027-P1-M1-E11
taatttttcacttcactcccacactgcttcaacaatggcgacgcccacatttcgccggctagaccttacccttttaaccctttctttactcgccgtcgccgtcaatgctcacaacatcaccgccatactcgaaggtttccctgattactccgtttacaacgatttcctcactaaaaccaagctcgccgatgagatcaatactcgacaaaccatcacttgccttgttcttaataatggagctatgtctgctctcactgctaaacacccactttccgtcgttaaaaacatccttagccttcatgttcttttagattattatgacccacaaaaactccataaaatttccgatggtactac

SEQ ID NO: 46483 - DNA, 358 bp, Gossypium hirsutum
  Clone ID: LIB3196-027-P1-M1-E12
cccacgcgtccggcacaagacgtgcacctgattaaatgcaccttgtctgaaaggtttgaggcgcttttgttatctggtgctaaagcgcaggtgcgcctaggcacacaccttgactacactggatgtcaagatcagctcaatggaagggtttgaaagtactgctacaaaattgttagaagagaaaagtccttatgaaggtattcatctttatatgggaagcatcttgaaaagaatttcaccatcaataacctttacaagagaacttccaagtagattgtggatggagcgcaattggttcaaattcctgtagggtttcttcagaaaaaaaattgatattatgcaatgctgggtgtctctt

SEQ ID NO: 46484 - DNA, 368 bp, Gossypium hirsutum
  Clone ID: LIB3196-027-P1-M1-E2
tacgagcctcaaactgacgattgaaaactattcaagactatgccgggtccttaaactaactatgaaaattttatccctaaaacagggcacacgcctgtgtggaagggcaacatgtccatgtgaccaactcgacatggttgtgctgatggcctatatgactcacacggcctaagtaacctgggacacgcccgtgtcctgcacccgtgtagaattaatttctaattcacacctacaggggttttcatgcggctagacacaagcccgtgtcattggcccgtgtccctcacacggctatgacacaccgtgtcctagcccatgtgcaaaaacatggacattttgtttctgacgtaagcatgctcataatgtca

SEQ ID NO: 46485 - DNA, 376 bp, Gossypium hirsutum
  Clone ID: LIB3196-027-P1-M1-E4
atcttctgcgtcctgctgagctctgttctctccagcacctcccaacccactagtgcccggttcttttgctccaccaggaacaagccatcatgtctcgccagtcaagtgtgtccttccggagtgggggcagtcgtagcttcagcaccgcctctgccatcaccccgtctgtctcccgcaccagcttcacctctgtgtcccggtccgggggtggcggtggtggctttggcagggtcagccttgggggtgcttgtggagtgggtggctatggcagccggagcctctacaatctggggggctccaaaaggatatccatcagcactagtggtggcagctctaggaaccgatttggtgctggtgctggaggcggctatggctt

SEQ ID NO: 46486 - DNA, 379 bp, Gossypium hirsutum
  Clone ID: LIB3196-027-P1-M1-E7
atggccgtgagtggtgcgagcgccgctttcgctttcccttcgcggtgcccactccgttcctcgtgcggcgctaggccccccgtcccggtcatggccacgctcagggtccagcccgaggcccaagccaaggtggatgtgtttcgtgaagacctctgtaccaagacagagaacctgctcgggagctatttccccaagaagatttctgagctggatgcatttttaaaggagccagctctcaatgaagccaacctgagcaatctgaaggccccgttggacatcccagtgcctgatccagtcaaggagaaagagaaagaggaacggaagaaacagcaggagaaggaagacaaggatgaaaagaagaagggggaggatgaagaca

SEQ ID NO: 46487 - DNA, 376 bp, Gossypium hirsutum
  Clone ID: LIB3196-027-P1-M1-E8
ataagcctttaattgagagccgctctctgtaagtgtttgcttgtgcaaaagggaatagtgccgtggaggtgtgtgtgtccatggcatccggagcgaggcaactgtcctgtgtgggtagccctcggccggggagtgaggccgccaaccaaagtcagttccttcccacctgtgtttttttttttttttctatatatattttttgttgaattctattttatttttaattctctcttctcctccagacacaatggcactgcttatctccgaaatggtgtgatcgtctcctcattgagcagcggctaccaccgcgctgtgggtagtgtgtgaccgtggctgtactgtatagtgaacatagttggcatatctttgtttgaag

SEQ ID NO: 46488 - DNA, 378 bp, Gossypium hirsutum
  Clone ID: LIB3196-027-P1-M1-E9
atctgccccagcacccaaatcagccacatccttgacaggtaggggtggctgtccactgggatggaggggggatctcaaaaaggcccccaacccacacatacagctcagcctgccccttccctaggcagctgccccggctgccccagctcttgtccagtgaaagtgtgaacctgcggatcgctgctggtgaaaccattgcactgctctttgagcttgcccgggaccttgaggtgcgagggacaaggatggggggtgcttggtgataccacctgcccatcacaggctggatgcagggggtgccacaaaaaacagagcagctttaggtcattatgcagaggaggtggccccaacacagattcatctgctagatgtcatgat

SEQ ID NO: 46489 - DNA, 365 bp, Gossypium hirsutum
  Clone ID: LIB3196-027-P1-M1-F1
tataagcacctacccataagcgaaccacggaggaaagcttggagagagacccaaaaacaatgtctaaggaagtgagtgaagaaggacagggtcgtaaggactatgtggaccctccaccggcacctctgattgatatggctgaactcaagtcatggtctttttacagagccctcatagctgagttcatagccactctcctcttcctctatgtcactgttgctaccgcaattggtcacaagaaacaacaagatgcatgtgatggtgttggtctcttgggtattgcatgggctttcggtggcatgatctttatccttgtttactgcactgccggtatctcaagtggacacattaaccctgcggtgact

SEQ ID NO: 46490 - DNA, 353 bp, Gossypium hirsutum
  Clone ID: LIB3196-027-P1-M1-F10
ccttgaccttaacccaatattactaatgattgattgatatatgtacatatacatatacatatatatgtagctaagctaggctaagataagcttttgaaagatcttggttatggggaagaaaagagagaaaataggttcaagatcttaaacactacccttatcttcattccactcttagttttcatctttctctttcgactttgagttcaccatatgcctttccccacgcgccgccacctattccttcctatgtccagcctacgacctatcctacaaaggccagtctttacatctccacctttttccttgttttttgcatggtccgtacccttcttttagcttcctccagcact

SEQ ID NO: 46491 - DNA, 377 bp, Gossypium hirsutum
  Clone ID: LIB3196-027-P1-M1-F11
ataacaaggtggagctggaggccaaggtggacagtcttaatgatgagatcaacttcctgaaggtcctctatgatgcggagctgtcccagatgcagacccacgtcagcgacatgtccgtggtcctctccatggacaacaaccgcaacctggacctggacagcattattgctgaggtccgtgcccagtacgaggagattgcccagaggagcaaggctgaggccgaggccctgtaccagaccaaggtccagcagctccagatctcagttgaccaacatggtgacaacctgaagaacaccaagagtgaaatcgcagagctcaacaggatgatccagaggctgcgggcagagatcgagaacatcaagaagcagtgccagact

SEQ ID NO: 46492 - DNA, 365 bp, Gossypium hirsutum
  Clone ID: LIB3196-027-P1-M1-F12
cgttgaccaacatggtgaccgggtggggagcaccaagagtgaaaccgcagagctcaacaggatgatccacaggctgcgggcagagatcgagaacatcaagaagcagggccagactcttcaggcatccgtggctgatgcagagcagagtggtgagaatgcccttaaagatgcccacagcaagcgcatagagctggagactgccctgcagcaggccaaggaggagctggcacgaatgctgcgtgagtaccaggagctcatgagtgtgaagctggccctggacatcgagatcgccacctaccggaaactactggagggcgaggagggcagaatgtctggagaatgccagagtgccgtgagcatctctg

SEQ ID NO: 46493 - DNA, 279 bp, Gossypium hirsutum
  Clone ID: LIB3196-027-P1-M1-F2
atcgccgaatcaggacatcgagtgggccaatgtcctgaatcaccaccttcatttggtccagaaattgctcctatagaaataaaaacaccagtatgtatagacttgcatgtaggatttttattggttccagggttggtggggcaaaacctggaaacaaagttaatacctgattgagaaatgactggcgtagaacacttacatatgtaatattgtaaaaccattggaaattcctttttgactttagaaactggctaattttcaatgtcactaagttgactt

SEQ ID NO: 46494 - DNA, 365 bp, Gossypium hirsutum
  Clone ID: LIB3196-027-P1-M1-F3
ctgaaagcttactggcgatctttctccggtaaccatggcggctaacggtgaacgtgaggttcaaaagaactactggatggagcactccattgatttaacagaggatggtacgatacttgattccaaggacgcagatctcgacaaagaagaccgactcgaagtgctctccctgctcccgccatatgaagagaaatctattttggagttaggagctggcattggtcgatttaccggtgaattagctcagaaggctgatagtgttatagctttagacttcattgaggatgttatcaagaagaatgaaagcatcaatggacactataagaacatcaaattcctttgtgcagatgcgacttccccagatt

SEQ ID NO: 46495 - DNA, 378 bp, Gossypium hirsutum
  Clone ID: LIB3196-027-P1-M1-F4
atgctggtccttaccgtttccgctccggcggaagtgaggaggagggtccttcgacccgtgcggagctggatggaccgcgagacgctcgcccttgctgaccgccacttccgaggcctggggggtggtgtccccggcgtcggccaggctccaggccgggtagccttcgtctcggagccgggcgccttctcctacgccgactttgtgcggggcttcctcctgcccaacctgccctgcgtgttctccagcgccttcacgcagggctggggcagccggcggcgctgggtgacgcccgcggggaggcccgacttcgaccacctgctacggacctacggagacgtggttgtaccagttgcaaactgtggggtccaagaatacaac

SEQ ID NO: 46496 - DNA, 379 bp, Gossypium hirsutum
  Clone ID: LIB3196-027-P1-M1-F5
atcattagtataggtttaggtggcgtgtttgtgtgtttttggtgaaacattagtataggtgtaggtggtggttgtgtgcttaactgaccccctaaaaacaagaccaaataagtaacttaagacacggaatgtattcctgtttatgacatggaattcaatacagcccgtcagtggtataaagacttttcctggattcctttaggatagggtcagagttggtttagtatctggccttcagtttttaaaagggcccattctttgatatagcagtggcgttaattttttttttcttttgcctttacaggtgagaaaccttaccactgtgactgggacggctgtggatggaaatttgcccgctcagatgaactgaccaggcact

SEQ ID NO: 46497 - DNA, 363 bp, Gossypium hirsutum
  Clone ID: LIB3196-027-P1-M1-F6
cggacgcgtgggaaaatcatgaggagcatttgtgttgtgcttgttatctctttgcctttccttctcggcattgcccagggtttcgatttctacgacaatgatttagcgtcggaggatagtttgtgggatctatacgagcgctggcggagccaccacacggtttccaggagtctcgacgagaaacatcggaggttcaatgtgttcaagcagaatgttttgcatgttcacaacaccaacaacaaggacaaaccttacaagttgaagatcaacaagtttgctgatatgaccaaccacgaatttaggaatgcttacgctagttccaagattaaacatcataagatgttccaaggacagtcccgtggc

SEQ ID NO: 46498 - DNA, 357 bp, Gossypium hirsutum
  Clone ID: LIB3196-027-P1-M1-F9
gcgaggcgatcgcgtatgaagaaacaaaagctactcgaagatttagttaacgaagtgagtgcattgcagaaaaataacacccagatctgtgaaaagatcaagttcacaacccaacgcttcgtcaaaatggaagcttccaacagtgtcttaagagctcaagtaattgaattgaccgagagcttgcagtccttgaactcgatgctgcatatggtggaagacataagcgggtacgacgtcgatatcccggagatccccgatcctctgatgaagccatggcaacttccttgtgcgacgcagccgatatgctcgacttttgatggataaaaattaaaaaaaaaacaaaaaaaaaaacccttc

SEQ ID NO: 46499 - DNA, 367 bp, Gossypium hirsutum
  Clone ID: LIB3196-027-P1-M1-G1
cggacgcgtgggttattatcgattaatggcaagtaaaaaagaagataagcacttgaaaacaagaaaaatccgagaagcagaagaggctgctcgaagatcaagaataacaaaggctgttgttaggattcgctttccagataaccacacattagaggttacatttcatccatccgagacacttcagagcttggttgaccttatttctaaagtgactgctcgaccagatttgccattctacttatatactacgcctcctaagaagcaaatgaaggacatgacacaggatttcttctctgccggtttcattcctggtgcaatcgtgtatttttcatatgatctgccaaaaggtttgtgcatgctttcacat

SEQ ID NO: 46500 - DNA, 375 bp, Gossypium hirsutum
  Clone ID: LIB3196-027-P1-M1-G10
atgggacagcgcggctgggacacgccatactcggtgccacattcacctccagttcctcggtgtggtgagctgctggctgttaggaaggctttccctcggctccggccccccccccacggctcctggaccccagactgcagggtgggcgggcatgtcaggtgaggcgctctggccggcccacttggcagcagggccacagctcctcgcagggctttgtgggatttcgaaggatgaatcatcttgttccccattctccccctgctgcccatgcacgtcatgctctgtgtgaggatgaactggagggactggccatgctcggtggcttttttcgtggttggggcgggggggtgttgggtggaatgaacatcaagggaa

SEQ ID NO: 46501 - DNA, 355 bp, Gossypium hirsutum
  Clone ID: LIB3196-027-P1-M1-G11
tcggaaaacgccctcgctccgattacgttgtctctggtggccatgagctctctggttattattcacgggacgatgataaaagaacaatgcgggcaaccagagatagtgactccatcggagaatcttatgatcgttaccttcgcagcacgcaactgtcatcatatagtaggagtcagtctggtagaccaatgagtggtggaatgcccggctgtgctgttgatgatcctcgaatggtgggtattggtggtcttgatcctggacaaacaataaaagataggactataggatttggtagtggaaggcccgaacctcgccttcctcctgatgcatccagtactctttttgttgagggttt

SEQ ID NO: 46502 - DNA, 376 bp, Gossypium hirsutum
  Clone ID: LIB3196-027-P1-M1-G12
atggagccggagcgcatagacctcgcagacctcgccggcttcacactcacctcggtgtctgctgcacccgccgcttcttctcctaggccacgagacccagcggctagaaattcaccatgtctattctcaaggtccatgccagggagatctttgactctcgtgggaatcccactgttgaggttgatctcttcacctcaaaaggtctcttcagagctgctgtgcccagtggtgcttcaactggtatctatgaggccctagaactccgggacaatgataagactcgctatatggggaagggtgtctcaaaggctgttgagcacatcaataaaactattgcgcctgccctggttagcaagaaactgaacgtcacagaaca

SEQ ID NO: 46503 - DNA, 383 bp, Gossypium hirsutum
  Clone ID: LIB3196-027-P1-M1-G2
attcagcatctgctcaaggacagtcctgcctcacctgctccttctgaccatcttcctgcccagggctcaggattccgctggaagaatctcagccagagtcctgaacagcagcggaaagtgctgacgttggagaaggaggataaccagacctttggctttgagatccagacttatggccttcaccaccgggaggagcagcgtgtggaaatggtgacctttgtctgccgagttcatgagtctagccctgcccagctggctgggctcacaccaggggacaccatcgccagcgtcaatggcctgaacgtagaaggcatccggcatcgagagattgtggacatcataaaggcgtcaggcaacgttctcagactggaaactctatatgg

SEQ ID NO: 46504 - DNA, 275 bp, Gossypium hirsutum
  Clone ID: LIB3196-027-P1-M1-G3
cggacgcgtgggcgccgataaggttcctccctccttttatgaaatgggaaacaagatcatttatgaaactgaagccaaagggttgaacccgggattgatagtgctactagttgttctggggctgctgctgatattccttgtagggaactatgtactttactcgtatgcgcaaaagactctttcacctaagaaaaagaagctagtatccaagaagaagatgaagagaagagaaggctgaagcaaggaagtcttcagcgcccaggagagtagggact

SEQ ID NO: 46505 - DNA, 362 bp, Gossypium hirsutum
  Clone ID: LIB3196-027-P1-M1-G4
ctccaagccgttgcagcatcttcttctttttttcatttttcttcccatttccttccaaccttttccctccttttcatgcttctatcctgaccaaccctttaacaaaccctaacaaccctcaacaaggccttcaattacgaatcgtatgaggtaacagagtaacagagagtagcagcaatggttcccaagttcgtgctactcctggtcatacaatgggttgtgttacctatgtcacgggagatggacctgatcaacctcagccaaggatggctttcacaggagatgctctgttgataaggggatgtgggaggacagattttcagatttttacattaccgaaagagacattgctatatccagct

SEQ ID NO: 46506 - DNA, 364 bp, Gossypium hirsutum
  Clone ID: LIB3196-027-P1-M1-G5
ggttgaagcatctgaaacatcataggtttcaattcaaactgcagtgcctcaatctctgatctcctaattcccagatttaactcattaaaaaagggtacatcgtactgtcttatagcccgatccctatcgtcagcaataaggattagattgtgagcttcattttgatttctaaggtccatttttatgacttgtctttgggctattctttctcgtattcattgtctaaatgtccgcttgatttcagggtctacaggtaataaattgatgattcgatctatgctcataaacacctaaaaataaaatcacaaaaaaattaattagtaaagtgaaaaatgaaataaaataaaataaaaaaaattgcaaa

SEQ ID NO: 46507 - DNA, 383 bp, Gossypium hirsutum
  Clone ID: LIB3196-027-P1-M1-G6
atgtaagtagagacctgacatttcagtcaatacgaggttataatagcaatagccttatagtaggaatagatacaactttcaatattccctgaggtactacatgccctgacaatcaaatcagcatgcaagttgagcaaacataactcttttgaacatcagagagacaatagatgaaacccttagtattcataagaagcagtggtaaataatatatttattacttaatgtattttccctttaatttgtttcctgttttttgtattttctaacactttcattgaggtataattgacataaaataaacttcaaatatttaaagtgtccaatttggtgttttaggtatatatgtgtgtgtgtatctccacaaaatcatcaatacagtc

SEQ ID NO: 46508 - DNA, 359 bp, Gossypium hirsutum
  Clone ID: LIB3196-027-P1-M1-G7
gcgccgagaggggtgtcctctacaacagagctggtttgattccacaatggaacgtcaacgctcacaaaatactctacatgttaagaggctgtgccagagtccaagtggtgaaccacaacggcgacgcagtgttcgacgataacgtggagcaaggtcagctcctgacggtgccacagaactttgcgttcatgaaacaagcaggaaacgaaggagccgaatggatttccttcttcaccaatagcgaagccaccaacaccccaatggctggaagtgtctccttcatgcgagcactgccggaggaagtggtggcagcgtcgtatcaggtgtcaagagaagatgcaaggcggattaagttcaac

SEQ ID NO: 46509 - DNA, 331 bp, Gossypium hirsutum
  Clone ID: LIB3196-027-P1-M1-G8
gtttttgttttgctaactgtgcatgcatgtcatgcacgtaacgtgccaggcaataatgggctcaatggctccaagaaggaacaaataatggaagccaatgcacccaaggcggaatcacccaaggggaatggcattgatgacaagaagcactttgtttacggtggagttggtgggtttgctggggtgggaagctatgctggggtagctggggggctgccattggttggtggtcttggggggattggaaaatttggtgggattggtggtgcagctggaataggtggttacaaaagcattggtggtctagggggtttaggcggtggaattggag

SEQ ID NO: 46510 - DNA, 357 bp, Gossypium hirsutum
  Clone ID: LIB3196-027-P1-M1-G9
cccacgcgtccgcggacgcgtgggctttagcttcttcagcttccagagtggatcagaaaactttcatcgttagagtccaaaacgaagccaagccttccgttttcaccactcacaagcactggtatgaatcttcactttcctctgttctctccccatcaactcctatccaacttcttcacgtctacgacagcgttttccacggtttctcggctaagctttcgccgactgaagccctcaagcttcaaacgcttccccatttcatcgccgtcatacccgaacaagtccggcacttgcaaaccacgcgttctcctctcttcttaggtctcaaaaccaccgacagtgctggccttttgaaag

SEQ ID NO: 46511 - DNA, 382 bp, Gossypium hirsutum
  unsure (1)..(382): unsure at all n locations; Clone ID: LIB3196-027-P1-M1-H1
atgcaggacacaaaggagagatgggggagcctggtgtgccgggccagtcgggggcccctggcaaggagggcctgatcggtcccaagggtgaccgaggctttgatgggcagccaggccccaagggtgaccagggcgagaaaggggaacggggaaccccaggaattgggggcttcccaggccccaggggtagtgatggctctgctggttccccggggccacctggcggtgttggtcccagaggccctgaaggacttcagggccagaagggtgagcgaggtccccctggagagagagtggtgggggctcctggggcccctggagcccctggcgagagaggggagcaggggcngccagggcctgcttgcccccgaggcgagaaggg

SEQ ID NO: 46512 - DNA, 360 bp, Gossypium hirsutum
  Clone ID: LIB3196-027-P1-M1-H10
cccacgcgtccggtgaggcagccgccggttcctttgaccaccaccaccaccaccaccacctctctgtgatcaaccttcactctctttttcaaggaaattagctgaaatggctggaggattaatccaccaggttttaaggaggaaatttcaatcacagtctgctgttcaagctttatcatggttttcatcaaggaaagttaatgacgatgcgggttctgctggtatgaggaccgttgcactccttggagctggtgtttcaggtttactaggttttgcaacagtagcatctgctgatgaggcagaacacggtttaggagttccaaattatccttggcctcacgcaggcatcctcagttcata

SEQ ID NO: 46513 - DNA, 259 bp, Gossypium hirsutum
  Clone ID: LIB3196-027-P1-M1-H11
gccaaactaagaagacatgtacatgcatgtgagagaactgcgttatgatcatgttctatcaacatagaaaccgcctgatacatagcttcaatataaagatctacaggccagtgaattcatggccacctttaccgtcggaaaaggccaagcctgtgaggaaccgtaatgagcctcacatacgccctgtctacaggaataggctggcgagtcaactcggtggtaaaggtaagagtaagccagtgctgcttctctctgacta

SEQ ID NO: 46514 - DNA, 377 bp, Gossypium hirsutum
  Clone ID: LIB3196-027-P1-M1-H12
atgactggtctaggtgctgctcctgaacttggtctctgagccatggcttcccatagacactcaggtccctccagctataaggtgggcaccatggcggagaagtttgactgccactactgcagggaccccttgcaggggaagaagtatgtgcaaaaggatggccaccactgctgcctgaaatgctttgacaagttctgtgccaacacctgtgtggaatgccgcaagcccatcggtgcggactccaaggaggtgcactataagaaccgcttctggcacgacacctgcttccgctgtgccaagtgccttcaccccttggccaatgagacctttgtggccaaggacaacaagatcctgtgcaacaagtgcaccactcggga

SEQ ID NO: 46515 - DNA, 380 bp, Gossypium hirsutum
  Clone ID: LIB3196-027-P1-M1-H2
attccagattggaaaccaaatctgactcccaagcttgtaactatacatcatcagtcaatatgttctttattttctgtgaaaggaaaattagtatgttaaaatgtaatgagcctctgtctggcattctctaataatgaggacaggattgctaacaattttgtcaatggcttgcattataaaagtaccagcagaacaggggatagttgcaaagtaatttctttttacaataataacttttgtgaaaatggaagtttcaggtttttataattgtattttcctatttttaataggatgcctcaccaagagtcccaggaggctccccgcgaacaccaaatagatctgtatcatctaatgttgccagcgtatcacccatccctgct

SEQ ID NO: 46516 - DNA, 361 bp, Gossypium hirsutum
  Clone ID: LIB3196-027-P1-M1-H3
ggaaagagtacaccccatgcttgcttggaaaataacaccacttgggatcttattgatgacattgaaaagctaagagaacacttgaaaattccagaatggcaggtctttggtggctcttggggaagtacacttgctcttgcttacagtgaatcacatcctgacaaggttactggcttggtcctaagagggatattccttttgcggaagaaagagatcgattggttttatgaaggtggtgctgctgttatttatcctgatgcttgggaaccgtttagagatcttattccagaaaaggagagggagagttttgttactggttatcacaggagactgaattctgaggatttggaaatacaatatg

SEQ ID NO: 46517 - DNA, 363 bp, Gossypium hirsutum
  Clone ID: LIB3196-027-P1-M1-H4
gctaagctttgagatttatcaatggcggagaagagtttcaagtacgtcatcctcggtggtggtgtcgctgccgggtatgcggcgagggagtttgccaaacagggagttcagcctggtgagctagccattatttccaaggaagcggttgctccatatgaacgtcctgctctgagtaaggcgtatctcttccctgagggagctgcaagacttcctggtttccatgtctgtgttggaagtggtggagagagattgcttcctgagtggtacaatgaaaaaggaattcagttgatccttagcactgaaatagtgaaagcagatcttcctgccaagactctagtaagcgcagctggagaaacgttcaaa

SEQ ID NO: 46518 - DNA, 367 bp, Gossypium hirsutum
  Clone ID: LIB3196-027-P1-M1-H5
gtccgtttagtgagtttgcttcgcttcgataaatagtgaaaaaaagaagatgaagtaattgtcgatctctgtgtaacggctactttttagggtgttgttgtagaagtgaagactgggattgaaaaaaaagaagggtgttatttgattcagttttgaagggaggaagaagaagaagaagaagaagaaatggattacaactatgatcaggagccatggaattggcatggagatcaaaagaacaacgattttggtgcctccgaaggtgcatggactcaagtgaccttgaacgaggaagacctttcctacatgtttgttgaagcaacccctgttaaggaatgtggggatctgtcataccatgttactcaaa

SEQ ID NO: 46519 - DNA, 366 bp, Gossypium hirsutum
  Clone ID: LIB3196-027-P1-M1-H6
cggacgcgtgggctagccttcttccttttcctccgcggctacatttccactctcgttcccgcgatatcaaagtaaaaatgaaggtggtcgccgcctacttgcttgccgtactcggaggaaacgcttctccttccgccgatgacttgaaggttattctcggatcagttggagctgaggctgatgatgataggatagagttgctattgtctgaagttaaaggcaaagatatcaccgagctaattgcaagtggaagggagaagttggcttctgttccttctggtggtggtgctgttgcggttgccgctcctacagctggtggtggcagtgctgctgcacctgccgctgaggccaagaaagaggagaagg

SEQ ID NO: 46520 - DNA, 314 bp, Gossypium hirsutum
  Clone ID: LIB3196-027-P1-M1-H7
ggaagaaatggaggtgcagcaaagaagcagtcccagaccataaatactgtgagagacacatgcatagaggccgacagcgttcaggaaagcttgtggaagcttctcaagctaccagtagtggtagtcgtattatcaggcatggaaatgctgacaccaacctctccatttctctgcaacttgataacagtaatactagcagtagtggcagcagcagcaatctttcttccggctttattggtttctccccaaagagtgttcttcgtggaagtaacccaaaatctgaatcttcaatacaatttcaagaaatttagaag

SEQ ID NO: 46521 - DNA, 374 bp, Gossypium hirsutum
  Clone ID: LIB3196-027-P1-M1-H8
atcggacacctccagtagcactcaacagctccagaatgagctgctttagtcgtcctagcatgtccccaacacctcttgaccgctgcagatcacctggaatgcttgaaccccttggcagctctagaacacccatgtctgtcctgcagcaagccggtggctccatgatggatggtccaggtccccgaatacctgaccaccagagaacatctgtgccagaaaatcatgctcagtccaggattgcacttgccctgaccgctatcagtcttggcactgctcggcctcctccgtccatgtctgctgctggccttgctgcaagaatgtcccaggttccagccccggtgcctctcatgagtctcagaaccgctccagcagcc

SEQ ID NO: 46522 - DNA, 369 bp, Gossypium hirsutum
  Clone ID: LIB3196-027-P1-M1-H9
atgcagtacatccaggaccggattccctcctggactggagccggcttcgtccgagtgcctgaaggggcttatttggagtttttcattgacgacataccatattccatggagtatgacatcctaattcgctatgagccacagctacccgaccactgggaaaaagctgtcatcacagtgcagcgacctggaaagattccacccagcagccgatgtggtaataccatccctgatgatgacaaccaggtggtgtcattatcaccaggctcaagatatgtcgtccttcctcggccggtgtgctttgagaagggaacgaactacacggtgaggttggagctgcctcagtacacttcctctgatagcgacgtggag

SEQ ID NO: 46523 - DNA, 224 bp, Gossypium hirsutum
  Clone ID: LIB3196-028-P1-M1-A1
agctctaatacgactcactataacaagagcttgcacaaaatcaggctgctgccgctgcataatttcctcgatgcccgcctgcgcgggaacattcggccccggaagctccgcgggctcgcgctcccgctaatcttattgctgcttttataggccccgacgaaaccttgcacaaatcgacgcgcttgcacatcaactgggagtgccccgacaccctgcaaatattc

SEQ ID NO: 46524 - DNA, 345 bp, Gossypium hirsutum
  Clone ID: LIB3196-028-P1-M1-A10
attgctctgaaagaacactctatgtctaatatagccagtgtcaagagtccttatgaggcagagaactctggggaagagctggatcagaggtattccaaggccaagccaatgtgtaacacatgtgggaaagtattttcagaagccagcagtttgagaaggcacatgagaatacacaaaggagttaaaccttacgtctgccacttatgtggaaaggcatttacccaatgtaaccagctgaaaacgcatgtaagaactcatacaggtgagaagccatacaaatgtgaattgtgtgataaaggatttgctcagaaatgtcagctagtcttccatagtcgcatgcatcat

SEQ ID NO: 46525 - DNA, 356 bp, Gossypium hirsutum
  Clone ID: LIB3196-028-P1-M1-A11
tcgcggacccctgggcgaggggatgtgaactctctacttcttttgcttggattaatgtgccattcgctgccattgctgagccgtatgagtggagcatacggtgttctcacagtcgacccaacgctgcagttgtcaagagcaagcagcattgtcatgttgattgcatacgtgtcatacatagactttccactattcactcacaggcagttgtttgaagctccagaggaagcagaaggcgacgactattgaatatcagaagaagagccaataattggattttggagcgggcttatatcgctagttggaatgactgttgccatttctcttctctctggatatgtagtggacactattga

SEQ ID NO: 46526 - DNA, 312 bp, Gossypium hirsutum
  Clone ID: LIB3196-028-P1-M1-A12
atgtcttcctcagggtgctccacagcaattcccctatccaccaaactatggtacaaatccaggaaccccacctgcttctaccagcccgttttcacaactagcagcaaatcctgaagcatccttggccaaccgcaacagcatggtgagcagaggcatgacaggaaacatgggaggacagtttggcactggaatcaatcctcagatacagcagaatgtcttccagtatccaggagcaggaatggttccccaaggtgaggccagctttgctccatctctaagccctgggagctccatggtgccgatgccaatccc

SEQ ID NO: 46527 - DNA, 352 bp, Gossypium hirsutum
  Clone ID: LIB3196-028-P1-M1-A3
cccacgcgttcggtgtattagaaaaagattcgaagctcctatacctcaatctaatacaatatttaataatattaaattaaataataggagactcacaatgaaagtgtctttttcgcactcactctccattacattggcagaacaaaagtgttatatgtatcgatatggaaatatttgatatgtgaagacatgatttgatttagggttctatctattatagaatcgatagaatatattgatagaaatggatcttgttgtgttctggaatcaaagaaagataagatcgtgaaaaaggctcttaagttgtaacttgaaatgaatgtttctctttatcttcaaaggaatagaatat

SEQ ID NO: 46528 - DNA, 350 bp, Gossypium hirsutum
  Clone ID: LIB3196-028-P1-M1-A5
cggacgcgtgggcaagcggatgtgaactctctccttcttttgcttggattattgtgccattcgctgccattgctgttccgtatgagtggagcatccgctgctctcacagccgacccaacgctgcagttgtcaagagcaagcagcattgtcatgttgattgcatacgtgtcatacatagtcttccaactattcactcacaggcagttgtttgaagctccagaggaagcagaaggcgacgacgatggaatatcagaagaagagccagtaattggattttggagtgggtttatatggctagttggaatgactgttgtcatttctctcctctctgaatatgttgtagaaactat

SEQ ID NO: 46529 - DNA, 412 bp, Gossypium hirsutum
  Clone ID: LIB3196-028-P1-M1-A6
tgtacgcaaaagcacgctggtgccggtcccggatttccgggatgagatctatgctctggttgacccgagctcgagttgcctgtctctgagaactggagacctatctacgagttgaactgtgtctcaccgctccagtcccatcacttgaaccatcagtttctctcatatgttacacgagagggctacggactctacccaccggtcccgggatgtcattcacggccccatcatattggatgctgccctgagtatttggcaggcatggtggaccacccacggccgctgagtagccacccaaagcttacccgttgttctagggaatagaaaagagctcatggccaagcatctaacctaaagtcccaggattggctgcaggcagcaattatatcataacttattgaacttttgagca

SEQ ID NO: 46530 - DNA, 71 bp, Gossypium hirsutum
  Clone ID: LIB3196-028-P1-M1-A7
cggatgcacggcgcttgcgcgggaacaatgcggccgccgggaaggctctctgcgggctcgcgccctcccgc

SEQ ID NO: 46531 - DNA, 158 bp, Gossypium hirsutum
  unsure (1)..(158): unsure at all n locations; Clone ID: LIB3196-028-P1-M1-A8
atcagatggccaggaaaagaagttctgggaatcagcctcacaggcattcccggagacctccggcatcagctcggtcttcagcagcacctagtncttctcaggctccaccacacccgtggctgtcacacgcacccacaagcgctccgtctcagggctct

SEQ ID NO: 46532 - DNA, 351 bp, Gossypium hirsutum
  Clone ID: LIB3196-028-P1-M1-A9
gttttataaccctttcagccccacactcccaactccattcattctctctcttttcttttgcttaatacaaatggcattaatggcagatcaccattccttggcagttgcatttggtgtcttaggtaacatcatctcagtccttggatatctggctccactaccaacattctacagaatatacaaaaagaaatcaacggaaagtttccaatcactgccttaccaggtggcattgttcagctcaatgctatggctttattacgcgttaatgaaaaaaggtgccttccttctcatcaccatcaactcctttgggtgtgttgtagagactatatacatagctatgtacatagctta

SEQ ID NO: 46533 - DNA, 373 bp, Gossypium hirsutum
  Clone ID: LIB3196-028-P1-M1-B1
agaggcgatattcgatgagcaggttgagaggggtcaggtcataaccgtaccccataatcatgcagaggtgaaaaaagcaggaaggcgagggtttgaatggatagcattcaagacaaatgccaatgctaagattagtcagattgctggacgtgtcttcattatgcgaggattgccggtggacgtgctggccaactcctttggtatatcccgggaggaggccatgaggttgaagcataacacacaggaggcgtcggtttttagcccaaggcaaggctcgcaacagtagatcaaacaactaatctaagtgtacgtacgttcgttattgcatcaacaataaaacccagatccccatatctggattctgaataaatat

SEQ ID NO: 46534 - DNA, 293 bp, Gossypium hirsutum
  Clone ID: LIB3196-028-P1-M1-B10
tcgcggacacgtggggagcttagtagttttcttgtagcaatgggtgatatttctttgagaaagactggggtagatgagaagagggctaaagtgcacacagagtccaaaactcttcttgagtatactcgaaaagcaatagctaggttaacctatttgaaaaggacattagcacaactagaagatgatgtggctccatgtgatgctcaaatggaaaaatgggagaccaactctggtggtatggcatcaaaggagcggcagtgcatgcaacagtataacaactataaagcattact

SEQ ID NO: 46535 - DNA, 347 bp, Gossypium hirsutum
  Clone ID: LIB3196-028-P1-M1-B12
cccacgcgtccggaagaagaagacaaccccagccgccgcagccgccaccaggaggaggaggagcaggggcgggaaagctcatcatgcaacaaccttctctgtgccttcgacagaaacttcctcgctcaagctttcaacgttgaccacgacatcattaggaaaatccaacgtgtacgaggaaatagaggcaccatcatcagagtcagggacagactccaagtcgtaacaccacccataatggaagaagaagaacgtgaggagcgccagcaggagcagcgataccgccatacgagaggagggtctcaagataatggcctcgaggaaactttctgctccatgaggatcaa

SEQ ID NO: 46536 - DNA, 372 bp, Gossypium hirsutum
  Clone ID: LIB3196-028-P1-M1-B2
atcaacactttcaacattacgcctccgctcttactcccttctccttttctaaacccctaaaccctaaatccactttgttctctttctctcagtctccactccttggccctgtcgccgacctttcttattcttttcctctaaggactatctcctccattcccaaacgcctacaccgccgtttggagtgcgtctcttctggtaccggcggcggatttggtggaaatgatgggagtagcccctgctgtggcggcggcggcggtgaacgaacggttggaggtgattcgaaggcgaaattgggagctggagtcggtgacgatctctctgccttgtctcccgatgttatcattcttaatgttgggggaatgatgtgcg

SEQ ID NO: 46537 - DNA, 374 bp, Gossypium hirsutum
  Clone ID: LIB3196-028-P1-M1-B3
ggaaagaaagacattcatatttggattactttgctataaattcaaactatctgacgccaaaatatattatctgatccttctccaccttgtctttctcacagtttttcttgatttttgcctttcccagacttaaaagcttcggtttttattttcactttgaaaaacgaaaatggataagattaagagtatgatgcgcgctgttcagtacagtaaatatggcggaggagtcgccgatctcaagcatgttgaagttccggttcccagtccaaaaaaggatgaagttttgatcaaagtagagacagctagtattaacccaatcgactggaaactacaggatggggtagctcggccatttttacctcggaaattccccc

SEQ ID NO: 46538 - DNA, 385 bp, Gossypium hirsutum
  Clone ID: LIB3196-028-P1-M1-B5
attcatcctctcagtgggcgaggaagatgaagggtccatcaatgaggcagcctaggcggttgtggaggccatttacttccatggggagggcacctttgatacatccaagtcggatgggcagtttaagaagacagccagtaacaacaagctgaggacctacctgcctgacttccggttcacacctttcaagcaggcggtgaaggagacctgtgcttggttcactgacaactactagcaggcccggaaatgaaactggaaggcaggagcaagtgccagtggaccatctgctggcatagccaccacccatcaaccctgccaggagctgagggcaccacctgggcccacattccgtgcgctctgcagccccaagcatatatccagtggg

SEQ ID NO: 46539 - DNA, 339 bp, Gossypium hirsutum
  Clone ID: LIB3196-028-P1-M1-B6
gcgctgaaatggaggagaggggagcagaagtagtggaagcaccaaaaccagctgactggttcaataccttattatctcttcaagctgatctcctttacaactgtttcaccactctttcttgccctttcttcaccctcttatcggcgggctttgagtcataccgccgtgccgaagagacgacagccaacgtcgaaacggcggttcaaaatctaccttccagcatcacccacggtagcactgtcttgctcaagagagtcgggctaggactttttcgtgctgctcaaatgagcatggtgttggtctttctcatggttttcgctgcttttgtgggaattgggt

SEQ ID NO: 46540 - DNA, 312 bp, Gossypium hirsutum
  Clone ID: LIB3196-028-P1-M1-B7
cggactcgtgggcggacgcgtggggtaaaggattgggggtttttcttttttgtgcgtgaaaaaagagtggagctgtgcttgtagctgttgcagcaacaattggtaacttgctgcaaggatgggataatgccaccattgcaggcgctgttctatacataaagagagagtttagtttggaaagcgaaccaactatagaaggcctgattgtagccatgtctcttattggagccacctgcattactacctgctcgggaggcatatcggactggctaggccgccggccaatgctaattatctcggctggtctttatt

SEQ ID NO: 46541 - DNA, 83 bp, Gossypium hirsutum
  Clone ID: LIB3196-028-P1-M1-B8
tcgcagaaaccaaactcggcaggttattaaatttaattaaatggtttaccccttgaaaatggcctaatttccaaatttccaaa

SEQ ID NO: 46542 - DNA, 281 bp, Gossypium hirsutum
  Clone ID: LIB3196-028-P1-M1-B9
tttatttttaatttttaatcgagtgtcctgcttgtaaaattagtagctgaaattaatttgaaagaaaaattcttactagaaatagttgaaaagatgatggaggtaaagaatcataattctgacgaacttatcatatacttctaaattatgtgaattagattaagaattaagatggcttatgataacagtgctctcttgttcatagttgagggcattctttcaccacaagacttgacctttttcttcttttagatgtagatattttgatatagatattgtac

SEQ ID NO: 46543 - DNA, 379 bp, Gossypium hirsutum
  Clone ID: LIB3196-028-P1-M1-C1
atctactaatgaaaagctgttcttttttttttcatcttgcccctgcacttacgttactattatctgctcccagccttcatgcttttctaaaaaggagcaaatgcccactctacgctttatcatgttgactttgtcattacacttgacttggatctctagttttctatacaaacaccaatgggttccatctttctgggctcctgattgctcaagcacagtttggcctaatgaaggggatttcaactacacaatcctatcattgtggggactatgaccttgggcactctaaacatatgttttgtttggtcagcacagcgtttcaaaaaggggaggcactttataaatacatggcgatttttcaggaaaatctggatcccca

SEQ ID NO: 46544 - DNA, 352 bp, Gossypium hirsutum
  Clone ID: LIB3196-028-P1-M1-C10
ttctctcttgatctgctgcactacttgcaaagtaacgagctgaagccgtgctacaataacactagtgttttcaacaataaattaatcatagctgcagcttgtttcttttaaactctaaatataaaggaggccaaacatgccgcctcgtagataccaatttgggagggctgatgaggccactcatcccgactccatgagagccaccttggctgaattcctctccactatcattttcgtctttgccggcgaaggctcaattcttgctcttgacaagatgtacaaggatacgagtgcgacgcctgcaagactggtgatgatagcacttgcgcatgggttgtctctgtttgcagct

SEQ ID NO: 46545 - DNA, 340 bp, Gossypium hirsutum
  Clone ID: LIB3196-028-P1-M1-C11
ttttaaaattcaatccgggtgctctcaccatcttccttctggatcggttgcgctgtggatcctcccttcctttaccaggtatgccccttccctcctctttagtgcttctttcgctaaattaagggcttcaacattctccgctctgtgaataaactggaaactcacctctggaaggctggttcttttgctctgaatatctcgaataattgctccaagaactgatttgtctatttcttgcgattgacatttcttaataactgttttcgagtctcattgtattactactgaggataaacccattgatattactaatttgatagcctctaaccctgcatgagct

SEQ ID NO: 46546 - DNA, 308 bp, Gossypium hirsutum
  Clone ID: LIB3196-028-P1-M1-C12
atgtaacaggcaaaaatttccttgactgtccagatgagcttatggaaaagtcatttgatgtgaatttcaaagcacatttatggacttataaagcctttctacctgctatgattgctaatgaccatggacatttggtttgcatttcaagttcagctggattagttggagtaaatgggctggcagattattgtgcaagtaaatttgcagcctttgggcttgctgaatctgtatttgtagaaacatttgtccaaaatcaaaaggggatcaaaaccacaattgtgtgcccctttttttataaaaactggaat

SEQ ID NO: 46547 - DNA, 390 bp, Gossypium hirsutum
  Clone ID: LIB3196-028-P1-M1-C3
atgttaggacacacacaggagaaagaccttattactgcacagagccaggatgtgggagggcatttgccagtgcaacaaattataaaaaccacgtgaggatacacacaggggaaaagccatatgtttgtacagttcctgggtgtgacaaaaggtttacagaatattccagtttgtacaaacatcatgttgtccacactcattccaaaccttacaactgtaaccactgtgggaagacatacaagcagatctccacgctggccatgcacaaacggacagcccacaacgatactgagcccatcgaggaggagcaggaagccttctttgagccacccccaggtcaaggtgaagatgttcttaaggggtcccagattacatatgtaacaggtgtag

SEQ ID NO: 46548 - DNA, 370 bp, Gossypium hirsutum
  Clone ID: LIB3196-028-P1-M1-C4
cccacgcgttcgcccacgcgtgcgcccacgcgttcgcccacgcgttcgcccacgcgttcgacggcccatttcatttgccattagccacttgccggcaatatattctcggagattgcccttgtttccctctttcctgtttgcggcaacatgaggacgtcgtttcgagccttccctgttgttacagttccccctcttccttctctcggccccaccgcttcctttcctgctcgcttcccctcacttcctcaacgccgcttgggcaagtttggtgtgaaatgtagctatgcagaagcaggaatcagtgatgactcaagatcagctacaatagatgttgtggctgatgtcagaaacgaacggattgtagtcttag

SEQ ID NO: 46549 - DNA, 385 bp, Gossypium hirsutum
  Clone ID: LIB3196-028-P1-M1-C8
atgtctaaaaaaaaaaaaaagaaaagaaaagggggcttaaataatatttctttttgtgtgttgtcatttagttttaaaaataataacgtggttctcagtacaccaagcccttgccaagattaggcccatcttcccagtagccttctcaagacaaagttgcctttgtgtaactacaactgggagggtttggtgacatagaaaactcaatggggcactgcaactttttattaacagaaaatgcaatggcctaatgtttttgtgggtttctgtttttgctttatgttctaccacttcatatctctgatctatttctccatgaggatgatcttactgttttagacttgtccagggaagagtgaggtggttgtggcttaaccttagaatt

SEQ ID NO: 46550 - DNA, 368 bp, Gossypium hirsutum
  Clone ID: LIB3196-028-P1-M1-C9
gagaaatacacaagagaaaaaaaaaaaaacaagtgagcagataaattgaagacttttatttctgttaacatccattatgagtactgctggtcaagtcatccgttgcaaagctgcggtagcatgggagtcggggaagccactgtcaatagaggaagtggaagtggcaccaccgcagaaggatgaagtccgtattaagatactcttcacttctttatgtcacaccgatgtctacttctgggatgctaagggacaaaaccctctgtttcctcgcatactaggtcatgaagctggagggattgtggagagtgtaagtgagggggtgactgatctaaaggcaggtgatcatgttctccccatcttcacggggg

SEQ ID NO: 46551 - DNA, 373 bp, Gossypium hirsutum
  Clone ID: LIB3196-028-P1-M1-D1
atgcaagcttctgtctgcacctgctctcaatcctgctctcaccatgagcctccgcctgcagagctcctccgccagctatggaggtggttttgggggtggctcttgccagctgggaggaggccgcggtgtctctagctgttcaactcggtttgtctctgggggatcagctggaggctacggaggcggcgtgacctgtggctttggtggaggggctggtagcggctttggaggtggctacggacgtggccttacatgtggctttggtgggggatatgctggtggctttgttgattttggtgcttgtgatggtggcctcctcactggcaatgagaagatcaccatgcagaacctcaacgaccgcctggcttcctac

SEQ ID NO: 46552 - DNA, 285 bp, Gossypium hirsutum
  Clone ID: LIB3196-028-P1-M1-D10
atctctcgccctagtgagggccccatgtgaatccactctgatgctggggaaccagtgctcccttattgggaagaggattccaggaccccttttttgtcgtggctgccatgaagccacaactcaccttagggaagtgacctgctctcctctggctgtatgcacgtggaagggggccttgagtggcaagttgctaacaggaacagatccataggcagcctgcaggctaggaagtggcctgggtcaagatgagctgggaacaagagaggagcgagcgggagctagggc

SEQ ID NO: 46553 - DNA, 341 bp, Gossypium hirsutum
  Clone ID: LIB3196-028-P1-M1-D12
aaaatggttgtttacttgtttcttttccaagagacaagtttgttaatgtgcagtgagtaatggtgcaatggtactagtttgatacgatcgacccattgcatttttttttagcataagccaggttgccttctcttgatgttggtcatgggcgtagtggatgtagggatggatgtaatgtatgtatgtaaggatggtgttgactgtgtatgatgcatgaatttcaaagatttaaaagttatgatgattcatgcataatcccttccttctccattacgatgcaatactatgagcaatattattggatttggatcaatttaatggggaagagacggggaggcacc

SEQ ID NO: 46554 - DNA, 372 bp, Gossypium hirsutum
  Clone ID: LIB3196-028-P1-M1-D2
caaggtttaatcagtattatagattgttcatccagagatctaagcttattagcttaagctataaaaatggtgaaaagatcgttgggctttttctttcttctcctcattgtcttagcctcgcaatggggggtgcagccaactgaggcaagggtttgccagtcacagagccataagttccacggtgcatgtttgagtagccacaactgtgcgatggtgtgcaggaacgaaggtttctccggcggcagatgtcgaggattccgtcgccgctgcttctgcactaagctttgctaatgcaagcttgcccttagctcatattttaaggatcatttcatgagtaaaagacctttatgtttttcgtgcatgcatgtcaat

SEQ ID NO: 46555 - DNA, 373 bp, Gossypium hirsutum
  Clone ID: LIB3196-028-P1-M1-D3
gataccttgtaatgtgtcaataaaccattccacagaggttgtttgctaagaactttggggtttccaagaattacaataccatatcgagcacgtgttaaggcaacattaagcctgcggggatcatctagaaatccaataccctaaaaagtttatagaacagtttaaaagtagcatgttagtttgttccataattaaagcatatagagagagagaggacagagagggttaaaatattagtattagacttggaatgaacaccataactagaggttaatccaccaaacaaatgaaaaatatcacaaagaaaaactttcaacaaacttatgaatagtgcagaaattgaatattagtttgacataagactgagattcaa

SEQ ID NO: 46556 - DNA, 372 bp, Gossypium hirsutum
  Clone ID: LIB3196-028-P1-M1-D5
atcgggtttgccgccagaacacaggtgtcgtgaaaactacccctaaaagccaaaatgggaaaggaaaagactcatatcaacattgtcgtcattggacacgtagattcgggcaagtccaccactactggccatctgatctacaaatgcggtggcatcgacaaaagaaccattgaaaaatttgagaaggaggctgctgagatgggaaagggctccttcaagtatgcctgggtcttggataaactgaaagctgagcgggaacgtggtatcaccattgatatctccttgtggaaatttgagaccagcaagtattatgtgactatcattgatgccccaggacacagagacttcatcaaaaacatgattacagggaca

SEQ ID NO: 46557 - DNA, 362 bp, Gossypium hirsutum
  Clone ID: LIB3196-028-P1-M1-D6
catactttccatttactagcaatttcttcaagttcttttctttgtttttttagtcaatggctgaccaccaccttcaaaacactcaaccaatgactcaccaaatggtgaaagccgctactgccgcaacagccggtggttccctcctcattctctccggtttaatcctagctggcaccgatattgcactcactatagccactccactcttcgttattttcagtccagttcttgtccctgctctcattgcaacagctctcctagcaacgggtttagtcgcctccggcggtttcggtgttgcagcctccacggttctgtcctggatttacaggtatgtgacggggaggcacccaccggcggcggat

SEQ ID NO: 46558 - DNA, 361 bp, Gossypium hirsutum
  Clone ID: LIB3196-028-P1-M1-D7
cggacgcgtggggagaaaacagaggcaggcagccatggcaaggatcaaggtgcacgagttaaggagcaaatcaaagacagagctgttgactcagctcaaggatttaaaagccgaactttctctccttcgtgttgccaaggtcactggtggtgcccccaataagctctccaagattaaggtggtgaggctatccattgctcaagtattgacggtgatatcccaaaaacagaaggctgctttgagggaagcttatacgaagaagaagtttttgcctcttgatctccgtcccaagaagaccagagctattcgccgccgccttaccaagcaccagcaatctttgaaaaccgagcgggagaaaaag

SEQ ID NO: 46559 - DNA, 382 bp, Gossypium hirsutum
  Clone ID: LIB3196-028-P1-M1-D8
atgtttttccaaaaccagtgactgcattggaatgtacattcagtaggtctgatccaacttcttatgcagggtacattgaagaccttaagaagtttctaaaaccgtatactttagaagaacagaagaacctcacagtctgtcctgatggagcactttttgaacagaagggtccagtttatgttgcatgtcagtttcctatttcattacttcaagcatgcagtggtatgaatgatcctgattttggctattcccaaggaaacccttgtattcttgtgaaaatgaacagaataattggattaaagcctgaaggagtgccaaggatagattgtgtttttgagaatgaagatataccaaatgtagcaggttatcctcataatggaat

SEQ ID NO: 46560 - DNA, 362 bp, Gossypium hirsutum
  Clone ID: LIB3196-028-P1-M1-D9
atctctgttctctccagcacctcccaacccactagtgcccggttcttttgctccaccaggaacaagccatcatgtctcgccagtcaagtgtgtccttccggagtgggggcagtcgtagcttcagcaccgcctctgccatcaccccgtctgtctcccgcaccagcttcacctctgtgtcccggtccgggggtggcggtggtggctttggcagggtcagccttgggggtgcttgtggagtgggtggctatggcagccggagcctctacaatctggggggctccaaaaggatatccatcagcactagtggtggcagcttcaagaaccgatttggtgctggggctggaggcggctatggcttttga

SEQ ID NO: 46561 - DNA, 352 bp, Gossypium hirsutum
  unsure (1)..(352): unsure at all n locations; Clone ID: LIB3196-028-P1-M1-E1
gcgagatctccaagtacctcttcaagagggtgtttgctatgcaaagaaagattacaacttggcgaagcacccagaaatcgatgttcccaatcttcaagtcataaagctgatgcaaagcttcaagtcaaaagaatacgtgcgtgaaacttttgcatggatgcattattactggtaccttaccaatgatggcattgagttccttaggacatatctgaatcttccttctgagattgttcccgctactttgaagaaacaagctaagcctgctggtcgtnccatgggccctcctggtgaccgcccacgtggtcctcctcgctttggtgacggtgagaggagaattggtgatagagat

SEQ ID NO: 46562 - DNA, 364 bp, Gossypium hirsutum
  Clone ID: LIB3196-028-P1-M1-E10
cccacgcgtccgaaagagtcctgttactactcctcagctccaaacagcttcattcacagcagatacttgtcatgtagtagatcatgtttcatctaggtaccccaaagcaagtatttatgctgttggttggtctcttggaggcaatatccttgtcaattacttgggaagggagcaccataggtgctctctctctggtgctgtatcactgtgcaatcctttcaacttagtgattgcagatgaaaatctccgaaagggcttcaacaatatttatgacagagcacttaggggaggtctttctagaacttttgacaaacatgcttccctcttcgaagaaatgcatgatgaatataatgtccaagcgggt

SEQ ID NO: 46563 - DNA, 120 bp, Gossypium hirsutum
  Clone ID: LIB3196-028-P1-M1-E11
aggttttggggccgagctgccaacttcagtggctcagcaacccacacggtctcaacaatactgagaccctgtgtgggttgggggggccaaaaaaaaccccctgtgtgcgaaagtggttag

SEQ ID NO: 46564 - DNA, 365 bp, Gossypium hirsutum
  Clone ID: LIB3196-028-P1-M1-E12
gcaatttcttcaagggcttttctttgtttttttaatcaatggctgaccactacctccaaaacactcaaccaatgactcaccaaatggtgaaagccgctactgccgcaacagccggtggttccctcctcattctctccggtttaatcctagctggcaccgttattgcgctcaccatagccactccactcttcgttattttcagtccaggtcttgtccctgctctcattccaacagctctcctagcaacgggtttcgttgcctccggcggtttcggtgttgcagctgtcacggtcctgtcctggatttacaggtatgtgacggggaggcacccaccggctgcggatcaattggatagtgcagggatg

SEQ ID NO: 46565 - DNA, 357 bp, Gossypium hirsutum
  Clone ID: LIB3196-028-P1-M1-E2
gtcccctctcctccttgaacctctcccacggctccgtcgttttcctctactaccagggtgaacgcaccgtccgcggcggaccccccgtctgtcccgccggatccttcgggcgtaagatgacgatggacgacctcatcgctaagcagacacggatcacccgccaggaatcgcctcactgcgattcggtttccttcgaccgcgattccgccaatgctttccagcggtacgtcaacgaaacgctggtgttcgccgtgaaacgcggcggctttatgtacggcaccgtctccgaagaaggtagggtggaagtcgatttcatttacgagccgcctcagcaagggatggaagatgatttgattc

SEQ ID NO: 46566 - DNA, 315 bp, Gossypium hirsutum
  unsure (1)..(315): unsure at all n locations; Clone ID: LIB3196-028-P1-M1-E3
aaacgacaccaaaaaacaaaaagcnacgaagaaaggcaggtggcgccccgcccgaatttccgggattcatttgtcacagttccgaaatattcattttgggagtctagcaaaaggggagtgtggggctttttataaacacataactttctaaggtatgtgttgctcactgtatctaaatacccaaccttaaaacgttcctgatgctaaattaccgcgttgattagaaaatgtagaacagtatggaagtatcatgtgactcccaaacattctgcggtttctctaaaatagaatttatttgtttttggtgcgaaaacc

SEQ ID NO: 46567 - DNA, 185 bp, Gossypium hirsutum
  Clone ID: LIB3196-028-P1-M1-E4
ccctcaccaaaatagttgataacgggtttctttttctagagacaactaaattaattgtcattgggggatggcgcaatggcactagttctatactaacgaacacctctagttttatttaatataggccaggttgccagtttcttatttgaatcatgggcctattggacctaaggagggattggaag

SEQ ID NO: 46568 - DNA, 346 bp, Gossypium hirsutum
  Clone ID: LIB3196-028-P1-M1-E5
ccttgtcccacccttccgagagagaaacgctcagactgtctctagcttacatacaccaacagggaatggcggtgacattcaacgactcgggttctgctgccgtcttgagaaagctcgatgagtatgtcctcactcgcaaatacatgtctcgtgaccaagcttcaaaggatgatatcaccgtctacacagctctatctggggccccatcgtctagctatctgaatgtttctcgatggtacaaacacatcgatgcccttttgaggatcttacgggtgtattaagaacgctgcggtgtgactgctgaaggatttttttccactgaggctgtggccactcctccaattgc

SEQ ID NO: 46569 - DNA, 357 bp, Gossypium hirsutum
  Clone ID: LIB3196-028-P1-M1-E6
atcagggtgggggctgtgcagtccggtcagggcgggaggggaaacgcagctctgcatgtgaaacttaccaacccaggcagatgccccttccccttagcactaccctggcctcctgcagcccctcacctcatgttcttcccacccccacaggatgaagagccccatgggcccagcccctgccctgggaaccaggcagccttccagacctcaggggctgaggtggacagttagggtaggccttactttggtgaccttgctctttccctcccaggccagctcaggtcacctgggccactgacccaggcctgtcactttgagaggggcaaaactgagaggggcttttcttagagaaagaga

SEQ ID NO: 46570 - DNA, 340 bp, Gossypium hirsutum
  Clone ID: LIB3196-028-P1-M1-E7
cccacgcgtccgcccacgcgtccgcaagttttatgaggcattctcaaagaacctcaagcttggtatccatgaggactctcagaacaggactaaaattgccgaattgctccgctaccactccaccaagagtggtgatgagctgaccagcttgaaggactatgtgaccagaatgaaggagggtcagaatgatatctactacatcactggtgagagtaaaaaggcagttgagaactctcccttccttgagaagctgaagaagaagggttatgaggtcctttacatggttgatgctattgatgagtatgctgtcggacagctcaaagaatttgagggcaaaaag

SEQ ID NO: 46571 - DNA, 365 bp, Gossypium hirsutum
  Clone ID: LIB3196-028-P1-M1-E8
ataaaaaaaaaaaaaaaagaaattgggaagttgacagtatgatgtaatcaatctgtactttacataattacatatattgataaaatatatcatgctaattatatgcaaatagataactttttaatagttctcttatgctaagtacttgtctaaaatagtcacttttgtttggaattcgtatctcatgtgattccctagtacactgtactttttctattatagtttctataaaattatactacaattgcctggttattattttactagactttaagttttttgagggctggaatctgtcttggtgcctgtctactgccaggtatagagatgttcatgtagatcatataaaacttggattaatatga

SEQ ID NO: 46572 - DNA, 260 bp, Gossypium hirsutum
  Clone ID: LIB3196-028-P1-M1-E9
atgctttgacgagctccagcgcatccatttccgcagtgacaaagggcactgtgtggatctgccagacacaggactctgcaaggagagcatcccgcgctggtactacaaccccttcagtgaacactgtgcccgctttacctatggcggttgttatggcaacaagaacaactttgaggaagagcagcagtgcctcgagtcttgtggcggcatctccaagaaggatgtgtttggcctgaggcgggaaaaccccattcccaaca

SEQ ID NO: 46573 - DNA, 370 bp, Gossypium hirsutum
  Clone ID: LIB3196-028-P1-M1-F1
caaaaaacatctttctgttcaattcaatcctcctttttctattcaaccataatgtcttgcttcattagcaaatacgccgatgagttggctaaaaacgctgcttacattggcacccctggaaagggtatccttgctgctgatgaatccaccggcaccatcggcaagcgtctttcaagcattaatgtagtaaatattgaagaaaacaggcgtgctctccgtgagctcctcttcactgctccaggagctcttcagtacctcagtggtgttattctcttcgaggaaaccctttatcaaaaaaccgcttcgggcaagcccttcgttgatgttttgaaagaaggtggtgtcctccctggcatcaaggtcgacaagg

SEQ ID NO: 46574 - DNA, 403 bp, Gossypium hirsutum
  Clone ID: LIB3196-028-P1-M1-F10
ggcggccccggccccaaattcccgatgtgcatattattaagagaggagtccccacacgagcgggtttaatgctcatttaatgcatatttacattagggcacctatgtaagctttaaatattttgaccacgactaaaaaattttgactagggcctatttcaatattttgattgagccatttggaggtttggaggaaaaaaataaaatctcctctaacaagagtgttaaaaaactctggaaagcactcctgtatggtcttttttcacataaccttatttttttttttaccttcatgtgttttagccgcacaatatttcattaacccaatctctcatatatttttttggtttccttgtaccataaaaaccaagaacattttttttaaaaaactgctcccgctttta

SEQ ID NO: 46575 - DNA, 356 bp, Gossypium hirsutum
  Clone ID: LIB3196-028-P1-M1-F11
gcgtccacgcgtgcgggactctgagaaatacttctatgatacttacgaataccggcatgttggttttactcctgaaggggccaaacttcttcctaagagtcgccttctctttgaaaatgagtggcgtgcgattggagtacagcagagtcgaggttgggtccattatgctattcatcgccctgaaccacacatcatggtattgaggaggcctcttaactatcagcagcagcaggagaatcaggctcagcaagctatgcttgccaagtaattaaaatagcttttggtattttgaaagaaaaagggaggaaaacccgaatatggttatatctgcataaacaggatggatgttatggaat

SEQ ID NO: 46576 - DNA, 384 bp, Gossypium hirsutum
  unsure (1)..(384): unsure at all n locations; Clone ID: LIB3196-028-P1-M1-F12
atggccaagcaagcttctgtctgcacctgctctgaatcctgctctcaccatgagcctccgcctgcagagctcctccgccagctatggaggtggttttgggggtggctcttgccagctgggaggaggccgcggtgtctctagctgttcaactcggtttgtctctgggggatcagctggaggctacggaggcggcgtgacctgtggctttggtggaggggctggtagtggctttggaggtggctacggaggtggccttggaggtggctttggtgggggttatgctggtggctttgttgattttggtgcttgtgatggtggcctcctcactggcaatgggaagatcaccatgcagaacctcaacgaccgcctggcttnctacctgga

SEQ ID NO: 46577 - DNA, 362 bp, Gossypium hirsutum
  Clone ID: LIB3196-028-P1-M1-F2
atttgacaaacataattatcatacattcactcatccaacccaaacaagcatgcacatccatgtaatgcttcatcatagacttataacataacaaatattggtcacactaaatggccttatacaacaatgaccttgaattagcataggccaatattctaggccaactcataatttcatgtacacaataaccaaatccctgtacatgccatacacttaaaatgctagaaaatcatggatacccatcaatagcttgttagtgtgataggatctctgacgacctccaactcgagctagtatatgtgacactataggaaaaaggaaaggaaaagaaagtaagaatatagcttagtaagtaggtatgt

SEQ ID NO: 46578 - DNA, 371 bp, Gossypium hirsutum
  Clone ID: LIB3196-028-P1-M1-F3
cggacgcgtgggctagttctagatcgcgagggccgccctttttttttttttttcttttatagctaagcaaatccaaaccttcacaccgtttcttgagtcacaagtcacaaaaaccttttctactacatacatacatacatatatgtttaattattatcatcattcatgataatcacacaaaagacgaggaaaagaggggaaaaaaaagggttttaattagttagaaattgggttttagttacgtatatgcatctgggctactgctttgatgtcgtcccatgcaatgcattattgttgcctggatatgtctaaatgtcaattcataatcatctacaaatcaaggagtgagtggaccggtggcctttggatgg

SEQ ID NO: 46579 - DNA, 323 bp, Gossypium hirsutum
  Clone ID: LIB3196-028-P1-M1-F4
ataggtttcggcactgtgctacttattcaatggctgaatgctttgtagaatatgtccctatgtaagttcaaatatgcagggaagttctttatgttctgcagcatctaggtaaacagacggtatgtacctcatggctgtatgctgtttaagaataatgtcctctctatgttgagataagcatagccactccactattcgttgttttgagttcatttcttgtacctgctttcattttaacagctcttctagccacgggtttcaatgtcttcatcggccactgtgttacagctgtcactggcctgtcttggacttacaggcaagtg

SEQ ID NO: 46580 - DNA, 388 bp, Gossypium hirsutum
  Clone ID: LIB3196-028-P1-M1-F5
atgtgcatcttatagagagatgagtacccacacagtgaatttcaggctcagggcatgcatatgtcttttgtgcagttggtttgctttagtcttttgagcactctgaatcttctgactggtcctatttccatttctgattgagccatttggaggtttggaggtaaaatttcagctctcctctagcaagtgtgtagaaccctctggaatgcactcctgtatggtcttcttccacatgaccttcttcttctttttcccttcatgttctttagcctcacaatctctcattcacccattctctcatctctctctttgctctccttgtaccatcacaccagtgaactgctttcttaaaaccctggcacctgctgtcactgaatcccaaattgat

SEQ ID NO: 46581 - DNA, 374 bp, Gossypium hirsutum
  Clone ID: LIB3196-028-P1-M1-F6
gttctagatcgcgaggggccgcccttttctttctttttctcctaaaccatcatgaatctcattaataggctcagccccaagcgtctctttcgatctaataaaaaagatagatccatcgtctgcaagttcgacccctcctcctatagttccggttccgccgcttcctcctcttcctcctccgaatccgtctgttccaccctcaaaggacatcagtacccttccgcggctaccgctggcttcgtaacgcccaccagtgttttgccccaaacatcacgtgactggtccgattttcccgctaatttttatctagaactctgtcaggcgtttaaaatgttagacaaagataacgacggcgttatatcaagaagcgagct

SEQ ID NO: 46582 - DNA, 361 bp, Gossypium hirsutum
  Clone ID: LIB3196-028-P1-M1-F8
gttttccttaacatcaaacataatctacactaagcattttcataatttatcattatcaagcatttcctcaaccgttccacaaccataccataagatcatttacacaaaataggtatattgctatacatgccatacttaaatttacaagccatttaccaaaagttttctggatagtgtgactgagccttcgacctatcccgactcctgagctggcttgtccaaaactacaatgagtaagaaggagggagtaagtataaatgcttagtaagttcatatgcaaataataagtaacataacaaacagttataccaatcaacattagcatacatcactaaaacacatatcacatttctaaacatca

SEQ ID NO: 46583 - DNA, 249 bp, Gossypium hirsutum
  Clone ID: LIB3196-028-P1-M1-F9
cccacgcgtgcgcaacactttcgttctcccacaccattgtgacgctgagaaaatttaccttgtcaccaacggaagaggaacgcttacgttcttgacacatgaaaacaaagagtcttacaatgtagtaccgggagttgtagtcagagtcccagcaggaagcactgtgtacttggctaaccaagacaacaaggaaaagctaatcatagcagtgcttcaccgccctgttaataaccctggacaaattcgggg

SEQ ID NO: 46584 - DNA, 348 bp, Gossypium hirsutum
  Clone ID: LIB3196-028-P1-M1-G1
cacagcttccctttctttctcttattctctatccatttttaatccggttctcgcacactatcatttactttctgaaattcggcatattcaggaacactatccaccagtttggactgctctgcgacaagcgagtgccttcgcagcgaaagctgagcctatctggtgatgaatctctgagcaagatattagggcctttccttctctgtttctaaccactatccccgaagccgcttgactagatctttcatcatatgctgcgtaaaaattaatcttcactgtctgatcagattgcccataacgcccaaaaaaataatctgcatagggaaatgttattctgagcaaacacct

SEQ ID NO: 46585 - DNA, 287 bp, Gossypium hirsutum
  Clone ID: LIB3196-028-P1-M1-G10
gcgaccacgcgtgcggggacaacaatgcccttgatgaagccatctatgggtctgatgaattccggatgtacgcttacaagatcaaacgctgtaccaggatgcgtagccacgattggacggagtgcccctacgcccaccgtggtgagaaggcttaacgccgggaccttctgaagatcccctacaccggcattgcctgccctgcctttcgtaacgggaaatgccaaaagggcgacgcctgcgagttcgctcacagcgtattagagtactggctgcaccccatgaagtac

SEQ ID NO: 46586 - DNA, 364 bp, Gossypium hirsutum
  Clone ID: LIB3196-028-P1-M1-G11
aggaaaaatggtgataggaatagaatatggtacggtaaaacagcagctagaagaagctgaggaagccatcatgcagctatttgatgtcaatcgcaaactgatgacacacgttgaagatcgttctcggtctctagatgggaaacctgcattagaatctgatgagagtggttcctttaggaggcggagagtatcagaacaagttcgaagagggtctgaaaaaatagtgcggttgcaattggaggtgcagaaaatacagttcatgttactgaaacttgacgaaaaagaaagcaaaggacgaaccaggatcatggagcgcaaaacaagagttgtattgcgggactatctttatggcgggataagaaag

SEQ ID NO: 46587 - DNA, 368 bp, Gossypium hirsutum
  Clone ID: LIB3196-028-P1-M1-G12
cggacgcgtggggtgctaacctttttcctttgcagactctctttgaacttaatcctaaaccccaaaattccctcctctttcaattaacttctcagaatgggagaaacgagggacaacgatgcttacgaggaagagcttctcgactacgaggaagaagaagagaaagcacctgactccgtgactgctaaagtcaacggcgaggccgggaagaagggctatgttgggattcacagttcaggattcagagacttccttttgaagccagagcttcttcgggcaattgttgactctgggtttgagcacccttccgaagtgcaacatgaatgtattccccaagccatactgggtatggatgtcatttgccaagc

SEQ ID NO: 46588 - DNA, 371 bp, Gossypium hirsutum
  Clone ID: LIB3196-028-P1-M1-G2
gataaataagcgtttgtctcagatttttgaagatggcccgtaccaagcagacagcccgtaagtcgactggtgggaaggctccaaggaagcaacttgctaccaaggctgcccgtaaatctgccccaaccaccggtggtgtgaagaagcctcatcgctaccgtcctggaactgttgctcttcgtgaaattcgaaagtaccaaaagagtactgagcttcttatcaggaaattgcctttccagaggcttgttcgtgaaattgcccaggacttcaagactgatttgcgtttccagagccatgctgttctagctctacaggaagctgcagaggcataccttgtgggtctttttgaagacaccaacctttgtgcgatc

SEQ ID NO: 46589 - DNA, 385 bp, Gossypium hirsutum
  Clone ID: LIB3196-028-P1-M1-G3
atctcaggctgcccacccccatcagtcacccagcctggtcaggcagcagacattccctcattacgaggcaagcagtgctaccaccagtcccttctttaagcctcctgctcagcacctcaacggttctgcagctttcaatggtatagatgatggcaggttggcctcagcagacaagcatacagaggttcctacaggcacctgcccggtggatccttttgaagcccagtgggctgcattagaaaacaagtccaagcagcgtactaatccctcccctaccaaccctttctccagtgacttacagaagacgtttgaaattgaactttaagcaatccctatggctgtgtatcttgtccataccagacagggagcaaggggtagaggtcaa

SEQ ID NO: 46590 - DNA, 357 bp, Gossypium hirsutum
  Clone ID: LIB3196-028-P1-M1-G4
cttaattatgtacctgctagtggtactgctatcatcaaaagtctcattgttcttagtttctttactagtaatcaccttgtcggtcgctgaaggagcaagctggtgcgtggccagcagtgatgcaagcaaccaagctcttcaaaccgcactcgactatgcatgcgcctctggagctgactgcacccctctacagtcagatgggcttggtttccttgccaacaccatccaagctcatgcttcttatgctttcaatagttactatcaacgtacagcaatagctcctggttcctgtgactttgctggcactgccactgttgccaaaactgatcccagttatggatcttgtatgtacccatc

SEQ ID NO: 46591 - DNA, 392 bp, Gossypium hirsutum
  Clone ID: LIB3196-028-P1-M1-G5
atggaatgcgcccgcgccggcttcccgcgcgcgcaccggcacaagctctgctgcctgcgccaggagctggtggacgcctttgtggagcacaggtacctcctctttatgaagctggctgccctgcagctgatgcagcagaaagccagccagctggagaccccctcctccctggaaaatggtggtccttcctccttggagtccaagtctgaggaccctccaggaccggaggcgggaagtgaggaggagggtagcagcgccagcggcctggccaaggtgaaggagctggcagagaccatcgccgcagacgacggcacagcagaccctcggagccgggaggtgatccgcaacgcgtgcaaggcggtcggctccatcagcagcaccgccttcgacat

SEQ ID NO: 46592 - DNA, 313 bp, Gossypium hirsutum
  Clone ID: LIB3196-028-P1-M1-G6
gaaagctggttcgcccccgtgcgccgttcccggattgccatgtggccccacccgttctccgaacacgggcgggggcaagctatgctggctgggccagcagctgcttgaagaatttgtggaagacatctacctcctttttatgaagcttcgcaaactgatgacacaccttgaaaatggttctcggcttttaaatgggtaacctctgtaaaaaggtgatccttactccttggattccaagtctgatgaccctacacgaccggccgcggggagtgaggaagttgggagcatcgccttggggctgcccaaagtgaag

SEQ ID NO: 46593 - DNA, 316 bp, Gossypium hirsutum
  Clone ID: LIB3196-028-P1-M1-G7
atcagcgacatgtccgtggtcctctccatggacaacaaccgcaacctggacctggacagcattattgctgaggtccgtgcccagtacgaggagattgcccagaggagcaaggctgaggccgaagccctgtaccagaccaaggtccagcaggctgcagatctcagttgaccaacatggtgacaacctgaagaacaccaagagtgaaatcgcacagctcaacaggatgatccagaggctgcgggcagagatcgagaacatcaagaagcagtgccagactctttaagcattcgtggctgatgcaaaacaagcgggtgag

SEQ ID NO: 46594 - DNA, 298 bp, Gossypium hirsutum
  Clone ID: LIB3196-028-P1-M1-G8
ggaaaggttccatgtgaacggcacttgcacatgggttagtcgatcctaagagacgggggaagcccgtccgacagcgcgtccagcgcgagcttcgaaagggaatcgggttaaaattcctgaaccgggacgcggcggctgacggcaacgttagggagtccggagacgtcggcgggggcctcgggaagagttatcttttctgtttaacggcctgcccaccctggaaacggctcagccggaggtagggtccagcggccggaagagcaccgcacgtcgcgtggtgtccggtgcgcccccggcg

SEQ ID NO: 46595 - DNA, 357 bp, Gossypium hirsutum
  unsure (1)..(357): unsure at all n locations; Clone ID: LIB3196-028-P1-M1-G9
ctttgttcatcaatactaccttatcttacatcaatcccctgagctggttcaccggttttaccatgatagcagcaaacttggccgccccgaagaaaatggcggcatgagtattacaactactatgcaagccatcaatgagaagatactctcacttggttatggagaattcactgcagaaataacaactgtagacgcacaagactctcacaatggaggagtacttgttcttgtgactgggtatttaactggaaaggacaaagtgaagaggaaattcactcaaagtttttttttggcacctcaagacaagggctattntcgtttaaatgatgtttttagatttgtcgatgatacgaaaca

SEQ ID NO: 46596 - DNA, 352 bp, Gossypium hirsutum
  Clone ID: LIB3196-028-P1-M1-H1
gattcatcagtcttcttctctgagtagaggttttggatttgtaagcatttacaatgtcttcgtcctatctcccagcaaccactgactcaattgctctggccttagaagccaaaacaccatctgaagccatctcaatcctttaccgtgtactagaaaatcctgcatctgctcccgatgctctacggattaaagagcaggccataacaaatctatctgatcttcttagacaagagaaccgagcagaggagctcagaagccttctgacccaactgaggcccttttttgcactaattccaaaggcaaaaactgctaaaattgtccgtggtataattgatgatgtagctaagatacc

SEQ ID NO: 46597 - DNA, 387 bp, Gossypium hirsutum
  Clone ID: LIB3196-028-P1-M1-H10
attggaattatataaaatgacagtaagactctctccaaagactaataaagatagagatgacaaagaagaagaagaagatgatgatgatatcaaagaaggagaaggacgaagaagaggtagaagaaaaggaaagaaggaaaagaaataatcataatgctaaaagtaaactaggattccacatgggccattattaaccaaagattctgtagtttctcatttccttatctctgcattgcgaaacaaataaaagagctttcttccttcctaggcttggataacattgtggagggttaacgtgtttggcacctatcagctgcttagaataacaaagttcagtatggactttcgggcatgagattttctccacaccaggtgtgctagtcacgc

SEQ ID NO: 46598 - DNA, 388 bp, Gossypium hirsutum
  Clone ID: LIB3196-028-P1-M1-H11
atggtcaatccaggttacattcctttttctaatttggggtgcaggcatgctgagaatggaatcacctcctctaatataattttaaatgaaaacaatattaagccataaaaactgtatgagaaacttcagtgagattctagtatttttgctctgatgactaattgggaacagttttgaaatatcaaattgaaattgtctcaaagtgtctaactgatagggtttggatctgtgtccccacccaaatctcatgttaaattttaatcctcagtgttggaggtggggccttgtgggaggtgatttgatcgtgggggcagatttctcatgaatggtttagcaccatccctcttggtactgtcctcacgacagtgagttctcatgaaatctgatt

SEQ ID NO: 46599 - DNA, 333 bp, Gossypium hirsutum
  Clone ID: LIB3196-028-P1-M1-H12
tcgcggacgcgtgggtacggaggtggcagtcccccatcatacggaggtggcagtcccccatcatatggaggtggcagtccaactactcctattgatccaggaactccaagcattccctcacctccattcttttctgctccaactccaccaattggtggtacatgcgatttctggaggagtcaccccacactgatatggggtctgcttggttggtggggcactgtacgcaacgcatttggcgtgaccaacctttctggacttggaacaagcatgagcttgccccaagcactttcaaacacacttactgatggacttggggcgctttacccagaa

SEQ ID NO: 46600 - DNA, 347 bp, Gossypium hirsutum
  Clone ID: LIB3196-028-P1-M1-H2
cccacgcgtccgaccggagctaaattcgaggaggatcttgatgcaatgcttccaaaatgtgacattattgtcataaatatgcctctaactgagaagacaagagggatgtttgacaaagatcggatcgcgaagatgaagaagggagtcctgattgttaacaatgctcgaggagcgatcatggatactcaaagctgagctgatgctcgttcaagttgacacattgcaggtcacagttgagatgttcggtacccgcaacctgctacgaaagaccatccatggcgttacatgctaaatcaagctaagactcctcatatgtctggtaccaccattaatacgcagctgcgata

SEQ ID NO: 46601 - DNA, 372 bp, Gossypium hirsutum
  Clone ID: LIB3196-028-P1-M1-H3
aaaggtttcatccggccacgatatttcttccaacgattgccgcatttccggttcatgataaacaccatttttactaattgatgaatgtaaatttatccttgactcaaaaaccagtagtggctgagatttctcttctttttgagcgccatggagagtgccaaagccgaaactagagcaagaagattagttttgtacgagagaagcgtgataaaaaatcaaggcaccattcgagtctgtgactttgtcttcacggtttaccattgtagctgtgtgataaatcatggcaatgcattttcagtttatagctttattatactctttgctaaagtactctatatttgctaatcaatagataatcaaacattggtcttt

SEQ ID NO: 46602 - DNA, 112 bp, Gossypium hirsutum
  Clone ID: LIB3196-028-P1-M1-H5
cggacgcgtgggtttgtaagtttttgagggaggatgaaacccgaataagaagcctcctcctcctagctaatatgtaaattatctttggttttacgagtttgggcccatgttt

SEQ ID NO: 46603 - DNA, 367 bp, Gossypium hirsutum
  Clone ID: LIB3196-028-P1-M1-H6
gagcctggtgccttggttgaccctgaaggaaagggtctcagatcattgtcgagagcccagctggatgagattctaggaccagctgagtgcactatagtttcttcactatcaaactatcatttggactcctatgtcctttctgagtctagcctctttgtatatccatacaagatcatcatcaaaacctgcgggacaacaaagctacttgtttcgatcccacccatcctgaagttggcgggtagcctttctcttaccgtaaaatctgttcggtacactcgtgggagttttatcttccctgctgctcagccatatcctcatcgttacttcactgaagaagttgttattcttgatagctattttggcaagc

SEQ ID NO: 46604 - DNA, 353 bp, Gossypium hirsutum
  Clone ID: LIB3196-028-P1-M1-H7
cttgtttccttttaaaagttcacctcttctctcttttttcttttcttcaactcaagaaaacataaaacccaatgctccaatctaatcacatatgatctcatctcttgcatcgagtttgagtttgcccttatgtgtcgtactttctcgatcttatcaccacctttctctcttcaaatccttctaaaactcagccatacaagcccaactcttcactcctttgctcctcccttttccactacaagatggttcaatgtagaaagcaactagttctacttctttggctcttattaatcttcactttccttgcttgtcattgccatggttcaagattaaccaccaatgtcttcaaaatc

SEQ ID NO: 46605 - DNA, 286 bp, Gossypium hirsutum
  Clone ID: LIB3196-028-P1-M1-H8
ctaactagagggaacgctgaagcacgctggggccccgccccgatattccgggtcaaacctacactttatttatatcctatatatgacttctttaacgaggtacatactattcagatctggagctgaccttgtggattcgagtgatttataaaaataaataataataggcagcatactattactaaggcagtgtgagttgtgtgcaggctctacagggcgggatgaattaaatttaccgctcgcgactaaacttagtgagtgaacatgacattattaatgaaaccaa

SEQ ID NO: 46606 - DNA, 312 bp, Gossypium hirsutum
  Clone ID: LIB3196-028-P1-M1-H9
ctcaagataatggcctcgaggaaactttctgctccatgaggatcaaggagaaccttgctgaccctgaacgtgccgacattttcaacccacaagccggtcgtatttccaccctcaacaggtttaacctccccatcctccaacgacttgagctcagcgccgagaggggtgtcctctacaacagagctggtttgattccacaatggaacgtcaacgctcacaaaatactctacatgttaagaggctgtgccagagtccaagtggtgaaccacaacggcgacgcagtgttcgacgataacgtggagcaaggtcagc

SEQ ID NO: 46607 - DNA, 346 bp, Gossypium hirsutum
  Clone ID: LIB3196-029-P1-M1-A1
aacatggctggtctatgacttcagagtatcaactggcagacggtctttaaccgacaagggcattacacacacaagttctctagccgggagctcatcttgcggagaggccaaaactttcaggtcttaatgctcatgaacaaaggccttggctctaacgaaagactggagttcattgtctccacagggccttaccccttcgagtcggccatgacgaaggctgtgtttccactctccaatggcagtagcggtggctggagtgcggtgcttcaggccatcaatggcaatactctgactattagcatctccagtcctgccagcgcacccataggacagtacacaatggccc

SEQ ID NO: 46608 - DNA, 381 bp, Gossypium hirsutum
  Clone ID: LIB3196-029-P1-M1-A10
attgcgattctacgacggcatctgcaaatgggaggagggcagtcccacacctgtgctgcacgtgggctgggccacctttcttgtgcagtccctaggccgtttcgagggacaggtgcggcagaaggtgcgcatagtgagccgagaggccgaggcagctgaggccgaggagccatggggcgaggaagcccgggaaggccggcggcggggcccacggcgggagtccaagccagaggagcccccgccacccaagaagccagcactggacaagggcctgggtgccagccagggtgcagtgtcaggacccccccggaagccccctgggacggtccctggcacagcccgaggccctgaaggtggcagcacggctcaagtgccagcgcc

SEQ ID NO: 46609 - DNA, 380 bp, Gossypium hirsutum
  Clone ID: LIB3196-029-P1-M1-A11
atggtgtgaaatatgtgacacttaagaacagtgatttttattgggaattttcttagggttataacacttaaagcaacaaccaattagtaacagccacagaaaaggggaatgaatcaactcttggttctttcctcaacccggcagtgttgtggataagtgcgtttgtaatgccctggcaatggctacatttgacactagaaaaaataaacatatttaataatttttgtttctccttaggaataagactttagaactgttttgtactgtgaattacggatgctctttgaaggaaagaaatatcgattctaatgttcttcagaagctggcagggataagcaggacatcgactggaacgtatgctaaatgaaagcagacaaatt

SEQ ID NO: 46610 - DNA, 277 bp, Gossypium hirsutum
  Clone ID: LIB3196-029-P1-M1-A12
gctttccaatacaaagcttcatattatcttttttagttccgacaaaagaaaacgaaaaaaatagaagaaatacaatcgttttctttttgaagtcgggttttagtttttggggagaaaaaaatgttgggagtatttagcagtgcgatagtgtctccgccggacgagctggtggcggccggttgccgaactccatcacctaagataacggcggatgctctggtgaaacggttccttgagacgaacttctccggcgtgttcatgcagatcggagaccatg

SEQ ID NO: 46611 - DNA, 336 bp, Gossypium hirsutum
  Clone ID: LIB3196-029-P1-M1-A2
gcgtttgtctcagatttttgaagatggcccgtaccaagcagacagcccgtaagtcgactggtgggaaggctccaaggaagcaacttgctaccaaggctgcccgtaaatctgccccaaccaccggtggtgtgaagaagcctcatcgctaccgtcctggaactgttgctcttcgtgaaattcgaaagtaccaaaagagtactgagcttcttatcaagaaattgccttttcaaaagcttgttcgtgaaattgcccaagacttcaagactgatttgcgtttccagagccatgctgttctaactcttcaggaagctgcagaggcataccttgtgggtcttt

SEQ ID NO: 46612 - DNA, 381 bp, Gossypium hirsutum
  Clone ID: LIB3196-029-P1-M1-A4
atctttttcatacgtagacgcctcctgtataatagatttgatctggagctcttcactcccggtgacgtagaacgagagtgcaatgaagaactttgcaattatgaggaagccagagagatttttgtggatgaagataaaacgatcgcattttggcagaaatattcagctaaaggaccaaccacaaaatcagatggcaacagagagaaaattgacgttatgggccttctgactggattgattgctgctggagtatttttggttatttttggattacttggctactatctttgtatcactaagtgtaataggctacaacatccacagtaagtactaagtaaaattatttaattcattactagacattctatattattattttaa

SEQ ID NO: 46613 - DNA, 382 bp, Gossypium hirsutum
  Clone ID: LIB3196-029-P1-M1-A5
attcctgttgaatagtccaccctccttgcactctacctgagacagctgcagcctgcaattcactcccacctcctgggattgcactggatcggtgtgctcagaacaaggtgcccgcccagttgcagccatgaggatccgtagcctcaccctgctctccttcctcctactggctgctcaggtgctcctggtggagggagaaaaaaaaagtgaagaatggacttcacagcaaagtggtctcagaacaaaaggacactctaggcaacacccagattaagcagaaaaacaggcctgggaacaaaagcaagtttgtcaccaaagaccaagccaactgcagatgggctgcgactgagcaggaggagggcatctctctcaaggttgagtg

SEQ ID NO: 46614 - DNA, 365 bp, Gossypium hirsutum
  Clone ID: LIB3196-029-P1-M1-A6
gttggccgccctttttttttttttttgtttttttttttagacaagtcctcaactcatccacaatctttataaagaatccagatgaaaaaacacaacaaaattgaaccattactgatttaatctcatgacaaaatcaaaacaagcaaagacacaagtaaagattgcaacatagaaaggacctagacacacatccaacttactaataagtaatgacactgttgatcttcaatcagatatcaactctctcgacatcttccagtacaagggtcttcgatggctttcccaacagatcagtatactcctggaatggagaccttgtgaaacgagtctctctccagaaatccggtgtcaagaaaccatatgtt

SEQ ID NO: 46615 - DNA, 381 bp, Gossypium hirsutum
  Clone ID: LIB3196-029-P1-M1-A7
atcagaggagcctgagaagaggcagaggagggcgaaacatggctgctctaggactccagagtatcaactggcagacggccttcaaccgacaagcgcatcacacacacaagttctctagccgggagctcatcttgcggagaggccaaaacttccaggtcttaatgctcatgaacaaaggccttggctctaacgaaagactggagttcattgtctccacagggccttacccctccgagtcggccatgacgaaggctgtgtttccactctccaatggcagtagcggtggctggagtgcggtgcttcaggccatcaatggcaatactctgactattagcatctccagtcctgccagcgcacccataggacagtacacaatggccc

SEQ ID NO: 46616 - DNA, 307 bp, Gossypium hirsutum
  Clone ID: LIB3196-029-P1-M1-A8
atgcgggctggggggcggctatggcggtggcttcagcagcagcagcagctttggtagtggcttcgggggaggatatggtgctggcttgggtggtggctttggtggtggctttggtggtggctttgctggtggtgatgggcttctggtgggcagtgagaaggtgaccatgcagaacctcaacgaccgcctggcctcctacctggacaaggtgcgtgctctggaggaggccaacgccgacctggaagtgaagatccgcgactggtaccagaggcagcggcccagtgagatcaaagactacagtccctac

SEQ ID NO: 46617 - DNA, 356 bp, Gossypium hirsutum
  Clone ID: LIB3196-029-P1-M1-A9
aacagaacccttgctctgtgtgggttcatttcatcacgcagcccttaacctccatcaatttgatggccagtggcgcggataagggccagatctagccaacgaaggtcacctttccaaaaatcaggtaacttcgctcctttttcttttgttttccacgaaaaaacgtaaatcttatactgttttttttaaaaaaacaaaataaatttcacatatattcaaacaaaactttaatctcactcgaccctcgcccacatctatgtatatctgagatgtttggggcttttcatcggcgtcagtctagatttcccccttttaatactcgtactaaatatgcgaatcaatccaagaaaataaag

SEQ ID NO: 46618 - DNA, 388 bp, Gossypium hirsutum
  Clone ID: LIB3196-029-P1-M1-B1
atccagatgcagacccacatctcagacacatccgtggtgctgtccatggacaacaaccgcaacctggacctggacagcatcattgctgaggtcaaggcccaatacgaggagattgctcagaggagccgggctgaggccgagtcctggtaccagaccaagtacgaggagctgcagatcacagcgggcagacatggggacgacctgcgcaacaccaagcaggagattgctgagatcaaccgcatgatccagaggctgagatctgagatcgaccacgtcaagaagcagtgtgccagcctgcaggccgccattgctgatgctgagcagcgtggggaaatggcactcaaggatgccaagaacaagctggaagggctggaggatgccctgcaga

SEQ ID NO: 46619 - DNA, 379 bp, Gossypium hirsutum
  Clone ID: LIB3196-029-P1-M1-B10
atcctctacctcacgaaggttggaatatctccagataaactccgcttccggcagcacatggagaatgagatggcccattacgcctgtgactgttgggatgcagaatccaaaacatcctacggttggattgagattgttggatgtgctgatcgttcctgttatgacctctcctgtcatgcacgagccaccaaagtcccacttgtagctgagaaacctctgaaagaacccaaaacagtcagtgttgttcagtttgaacccaataagggagcaattggtaaggcgtataagaaggatgcaaaactggtgatggagtatcttgccatttgtgatgagtgctacattacagaaatggagatgctgctgaatgagaaaggggaat

SEQ ID NO: 46620 - DNA, 358 bp, Gossypium hirsutum
  Clone ID: LIB3196-029-P1-M1-B11
atgtgaaagccggcttcgccggggatgacgcccctagggccgtgttcccgtccatcgtgggccgcccccgacaccagggcgtcatggtcggtatgggtcagaaagattcctacgtgggcgacgaggctcagagcaagagaggtatcctgaccctgaagtaccctatcgagcatggcatcatcaccaactgggacgacatggagaagatctggcaccacaccttctacaacgagctccgcgtggctcccgaggagcaccccaccctgctcaccgaggcccccctcaatcccaaggccaaccgcgagaagatgacccagatcatgtttgagaccttcaacgtgcccgccatgtacgtggc

SEQ ID NO: 46621 - DNA, 326 bp, Gossypium hirsutum
  Clone ID: LIB3196-029-P1-M1-B12
gcaaaccgactccataatcacgtgtattgggagcacagctgaatgactaaaacacacttaactatgggcttggcggaactaaaggtcataactggtaattgccaaagctacacatgaaatttattgcaatatgcactattatacatgaacttttctatgcaactctatgcattaaattgtatttgaggcaaggttcacagatagctagcacgagtggacgcttatatatattgcgtacataaggtattatatattcagtctgaagatcaagatatgtatgcattgttgtaaaagtatctgatatactgagagtgaagcttttttac

SEQ ID NO: 46622 - DNA, 282 bp, Gossypium hirsutum
  Clone ID: LIB3196-029-P1-M1-B2
cgggccaccaatccggccttccagggggggggtttaaggttattggccttggggaacctttttcttccatgtggataagggagaacttggtttcccttgacgagccggcatttttaacccacaagcccggcgtattttcacccttaacaagtttaaccttcccattcttcaacgacttgagctcaacgcccagaggggttgccttttaaaccaaacttgtttggttcccaaatggaaccttaacctttaaaaaatacttttcattttaaaaggctttgccaa

SEQ ID NO: 46623 - DNA, 387 bp, Gossypium hirsutum
  Clone ID: LIB3196-029-P1-M1-B3
atagacaagccccaggctgtgcccgtggatgtccatatatggcagattgcccaacgtgactacagctggcaccctaccacgtcccaggcgaagggaccaagcccccagagcaacaaggaactgggaaactttttccggagcctgtggggacctcatgctggctgggcccaagcggtgctgttcagtgctgacctgcaccaatcccaccgtgctcaggagccaccagcaaagcgcagaaagggttccaaagggctggaagtctagatggggcaccctggacaaaggaattcccccaagccccttcccctccattccccacttctctctccccatccccacccagtctcatgttggggaggggcctccctgtgaccacctcaagggcca

SEQ ID NO: 46624 - DNA, 216 bp, Gossypium hirsutum
  Clone ID: LIB3196-029-P1-M1-B4
ggatagtgcacactatctatctccttatgctgtgaaggttcagtctctaagtgttaaattgcctgcttctagaattgaattctatacaaaactggagaacacaaagattcatggttcagaaaatcaaatatggcccttatcagaatgatcctttattctccggcccagccatagcaggtcattttgcaagctacataccctatgatgacgctcatt

SEQ ID NO: 46625 - DNA, 130 bp, Gossypium hirsutum
  Clone ID: LIB3196-029-P1-M1-B5
taggccatacccatactgtgtcgggatcactacatgtatggtaaagttccgaaggttaatactctaagcatactaccacgtgctatgagaagggactaatctccaaaatcatcagatcactaagaaacat

SEQ ID NO: 46626 - DNA, 345 bp, Gossypium hirsutum
  unsure (1)..(345): unsure at all n locations; Clone ID: LIB3196-029-P1-M1-B6
atcaacagcttcttcactgacccaaagtgaggcttcactcttgctttatgctgaaactaaaaaataaaaaaaatagaagaactaagtcttattcaatcaataccaagttatgccctttctttctgctgactgtgatgcaaatttgtgttggttttgcacttggatgaggtgtgttctttaagagaataaaaggtggtgtggatatttcgaagttgtgttgttttagcttaaatgaatgacttttatttgcantcnacaaaaaaaaaagaactaacatagaaaaacccttagacgaaataataacaacacacaaaacgtaaatgaaaaacctgatacttaatgctt

SEQ ID NO: 46627 - DNA, 366 bp, Gossypium hirsutum
  Clone ID: LIB3196-029-P1-M1-B7
gaatctgataaactggatggattacctaatgtgatttcagcaatatcagcacagaaatatgtccaaaagggttatgatgcttaccttgcatatgtgctggatactaaggcatttgagttaaagattcaatcagtgctggttgtatgtgaatttcctgatgtattcccagaagaattacctagtttaccatcagatagagaagtggaattctctatagatctcatttcgggaacaacacctatatctatagcaccttacaaaatggctcttactaaattgaaagagttgaaagtgcagttgcaagagttgattgaaaaaagttttgctcgacctaatttctcaacttggggtgcgttggttctattt

SEQ ID NO: 46628 - DNA, 383 bp, Gossypium hirsutum
  Clone ID: LIB3196-029-P1-M1-B8
atggcaaccgcatcacgccgtcctatgtggccttcactcctgaaggggaacgtcttatcggcgatgccgccaagaaccagctcacctccaaccccgagaacacggtctttgacgccaagcggctcatcggccgcacgtggaacgacccatctgtgcagcaggacatcaagttcttgccgttcaaggtggttgaaaagaaaactaaaccatacattcaagttgatattggaggtgggcaaacaaagacgtttgctcctgaagaaatttctgccatggttctcactaaaatgaaagaaaccgccgaggcttatttgggaaagaaggttacccatgcagttgttactgtaccggcctatttcaatgatgcccaacgccaagcaacc

SEQ ID NO: 46629 - DNA, 367 bp, Gossypium hirsutum
  Clone ID: LIB3196-029-P1-M1-B9
agtttatctagatactgtatcagagaccaaaaattacagttgttatacccttgtctacccacattcattcacacatgtggtgtattcacgcactcattatcaatttccaaatagtcaagtgatatcatggggatcgagtacttcgatagtttggttgcatccagtatatctcaactccgccaatacagttggggaagatccaagagattaacaagagaggaaaatatggaaataattgggggttgtgcactagaaatatattgcagtgtgggataatcgaatggcgcggaaacctcaaatggatatttctttcgatttgcaaccatcgttagagtacatacaatggtactccagtacgggaaaacta

SEQ ID NO: 46630 - DNA, 368 bp, Gossypium hirsutum
  Clone ID: LIB3196-029-P1-M1-C1
cttaatttccatttactagcaatttcttcaagttcttttctttgtttttttaatcaatggctgaccactacctccaaaacactcaaccaatgactcaccaaatggtgaaagccgctactgccgcaacagccggtggttccctcctcattctctccggtttaatcctagctggcaccgttattgcgctcaccatagccactccactcttcgttattttcagtccagttcttgtccctgctctcattgcaacagctctcctagcaacgggtttcgttgcctccggcggtttcggtgttgcagctgtcacggtcctgtcctggatttacaggtatgtgacggggaggcacccaccggctgcggatcagttg

SEQ ID NO: 46631 - DNA, 358 bp, Gossypium hirsutum
  Clone ID: LIB3196-029-P1-M1-C10
ttcttgtcctcaggctgaagacattatcaaggagcaagttaagctactgtacaagcgacacaaaaacactgctttttcttggctgagaaacattttccatgactgtgctgtccagtcatgtgatgcttcactgctgctggactccacaagaaggagcttgtctgagaaggagacagacaggagctttggcctaaggaatttcaggtacattgagaccatcaaagaagctgtagaaagggaatgtcctggagttgtttcttgtgctgatatccttgttctgtctgctagagaaggcatcgtttcgttgggaggcccttacattcctctcaaaactggaagaagagacggtagaaggagc

SEQ ID NO: 46632 - DNA, 356 bp, Gossypium hirsutum
  Clone ID: LIB3196-029-P1-M1-C11
gcacaattgaggttcaatggatggcatttaaaggggcacatgtatttgggatgttcatgcaagagggagctgtcgaatgtttatgtatttgaagatttatggattgtatttatggaggaaaatacattgggacgtttcatgcataatttatgcattttcaagatgacaaatcaagtattttaggcacattaaagcctcattcagccaagggagatgtatgagcattaaagggctgcatattcatggaattatggctattcttcaaggttaagtatgcatgaatacatcaagtgaagcaacatgatggttcagccaattcatgtaccatcttcaagcatgaacaaaatgttaatgca

SEQ ID NO: 46633 - DNA, 360 bp, Gossypium hirsutum
  Clone ID: LIB3196-029-P1-M1-C12
gaaaaccacaaaagcttcagtgtttcttcttttcatcatcttcttagtcacaccatcatcctttttgtttggtgtggccaacgctacaaatgaacctgtgctcgacactgatggcaacgaagtccaaacaggcaccgaatactacgttgtgtcggcgatatggggtgctggtggtggtgggcttgccctaggcaggccaagcggaaacccatgcccggaagtcgttgctcaaagacgatctggtgacgacggtataccggtgatattttctagttcggactccgacgatggagttgttcgcctatcctctgacataaacatagagtttgttccgctcagacccagactttgccgaacaac

SEQ ID NO: 46634 - DNA, 383 bp, Gossypium hirsutum
  Clone ID: LIB3196-029-P1-M1-C3
atgcccaggccaagcaagcttctgtctgcacctgctctcaatcctgctctcactatgagcctccgcctgcagagctcctccgccagctatggaggtggttttgggggtggctcttgccagctgggaggaggccgcggtgtctctagctgttcaactcggtttgtctctgggggatcagctggaggctacggaggcggcgtgacctgtggctttggtggaggggctggtagtggctttggaggtggctacggaggtggccttggaggtggctttggtgggggttatgctggtggctttgttgattttggcgcttgtgatggtggcctcctcactggcaatgagaagatcaccatgcagaacctcaacgaccgcctggcttccta

SEQ ID NO: 46635 - DNA, 366 bp, Gossypium hirsutum
  Clone ID: LIB3196-029-P1-M1-C4
atcgatgcatgagctgactgtggagaaactggaatcagcctgcatgggtccgtgtcctgggtccgtgtcatttgcctcccttgggcctccctcagtgctgcctctctcctgtgacctggcaggcgggtccgcctggggagctgtgttattcatgtgctgcctggttctcccagggtgttcaggatgcatgatgggtgaccgcaccctggcgtgggaaccaggaggcctggcttccgttggaggctccactgcccctggtgtgatggggcccgtctgccctctccagactccttccagctccgtctgtaaagtgatgtggccggaaatgatctctgagggtccctattgcagttggaggcagaaatg

SEQ ID NO: 46636 - DNA, 383 bp, Gossypium hirsutum
  Clone ID: LIB3196-029-P1-M1-C5
atgccatgatctgctgcaccgtcttctccagatggcgccatggagggagctgggtgcagtggaaaagccccagcctgggagtccaggatctgggctcaagccccacacgccccacatcgctgtgtggccctggtgaggcactcctgcgagcctctgtgcccagtctcccacggcaccctcccatggcactgctaggaaggaacttgaggcccacagaggtcaagcacctaatctttgaggcccgaggtcaagttgagcttttggccacccaacccaggccccctctgctcggccctgcacgccccccaggccctccttccccacaccacaggcaaacctgcccttgctgcagcgggagctcctgcactgtgcacgcctggcca

SEQ ID NO: 46637 - DNA, 363 bp, Gossypium hirsutum
  Clone ID: LIB3196-029-P1-M1-C6
tgaaggcaaagaagaaggatacaggaatagtgtatgctttgaagatcatggacaaaaagttcatcaccaaggaaaataaaacagcttacgtaaaattggaacgtatcgtgcttgaccaactggaccatcctggtattatgcgactctattttacatttcaagataatttctcactatacatggcacttgaaccctgtgaaggtggagaactttttgaccaaataaacagaaaaggtcggttaccggaggatgaagctcggttctatgctgcaaaagttgtagatgctcttgaatatatacacagcatgggattgatacatagagatattaagccggagaacttgcttcttactaaagatgggc

SEQ ID NO: 46638 - DNA, 364 bp, Gossypium hirsutum
  Clone ID: LIB3196-029-P1-M1-C7
atcaagacatattaaacacttgtaataaattaagacatatttaaaagctgtaatgaaacttatttacatgcttatttaaatggtctaaaactccagcaaataaagttaatttagctaaagagctaataatgagctgaattgaatttaaaccaagctcaaacgagctgaattaagctcatgtgagctaaaataaaattcggtgagctgaaccaagctaaatggagcttgaggagctgaattcaagctgaggtcaagggcatccttgaccagggtcatatcagaaacccactgatttctttataacctctgtcaatggggcagcaatagtagagaaatctttcacaaatcgtctataaaaactagc

SEQ ID NO: 46639 - DNA, 369 bp, Gossypium hirsutum
  Clone ID: LIB3196-029-P1-M1-C8
ctttccttcaatccaatccaatccaatccaggtaagggctaaggcaagagggagtgaaaatggttgagaaaacaagaggaagaaaggaagaggtggtgaccagggagtacaccatcaaccttcacaagcgcctccatggctgcacattcaagaagaaggctcccaaggctataaaggagattaggaagtttgcagaaaaagcaatggggacaaaggatgtgagagttgatgtcaagctgaacaaacatatctggagccgagggatccgaagtgttcctagaaggattagggtccgcattgcccgcaagagaaatgatgatgaagatgcgaaggaagagctctactctctagtaactgttcctgaaatcc

SEQ ID NO: 46640 - DNA, 382 bp, Gossypium hirsutum
  Clone ID: LIB3196-029-P1-M1-C9
atcacaaaacatgggcctgccccagaaccgtatcattttttcacctgttgctcctaaagaggaacatgtcaggagaggccagctggctgatgtctgcttggacactccactctgtaatgggcacaccacagggatggatgtcctctgggcagggacccccatggtgactatgccaggagagactcttgcttctcgagttgcagcttcccagcttacttgcttaggctgtcttgagcttattgctaaaaacagacaagagtatgaagacatagctgtgaagctgggaactgatctagaatacctgaagaaaattcgtggcaaagtctggaaacaaagaatatctagccctctgttcaacaccaaacaatacacaatggaacta

SEQ ID NO: 46641 - DNA, 243 bp, Gossypium hirsutum
  Clone ID: LIB3196-029-P1-M1-D1
cgtttctgcaattaccccgaacattttgaactatctatggcttagttcatacaaaacctacattcgagccctcaaccctcgtcacagttcactaaactgaagaaaacaacggtaactccgtgaccttcctttcatccaagccaatgggcaacacagcaccagcaacagatctacgccttcaagctcttccgagctctccgtcattctccttcgacctcctcttccttcgatgccaaacaagtc

SEQ ID NO: 46642 - DNA, 377 bp, Gossypium hirsutum
  Clone ID: LIB3196-029-P1-M1-D10
atcccacactgtgcccatctacgaggggtatgccctcccccatgccatcctgcgtctggacctggctggccgggacctgactgactacctcatgaagatcctcactgagcgcggctacagcttcaccaccacggccgagcgggaaatcgtgcgtgacattaaggagaagctgtgctatgtcgccctagacttcgagcaggagatggccacggcggcttccagctcctccctggagaagagctacgagctgcccgatggccaggtcatcaccattggcaacgagcggttccgctgccctgaggctctcttccaaccttccttcctgggcatggagtcctgtggcatccacgaaactaccttcaactccatcatgaagt

SEQ ID NO: 46643 - DNA, 364 bp, Gossypium hirsutum
  unsure (1)..(364): unsure at all n locations; Clone ID: LIB3196-029-P1-M1-D11
caaggcggagaaatcccgctccctctgtggagctatcaaaacccgcaggctatcacggagaccatcctcaaatcggacgcagcgctcatattcgattgccaccatgcccctcgcataacggctcaatctaatgaactcagcctcgtactcaaccactgaacagtcaccctgagtgacatttaggaactcctgtcgcctagcctcaatgtagctagctcccacgtacttattctgataagtggtcttaagcatatcccaagttagttggtcgggctgagtgccctccttaacggatagccaccactgatacgcctcatctcgcagcgacggtctcgggtacggngcgttacatgacctgagtcgt

SEQ ID NO: 46644 - DNA, 360 bp, Gossypium hirsutum
  Clone ID: LIB3196-029-P1-M1-D12
agcatagaatgcttagtaagttcgtaatacaaagaaataaacttataacttcactttataaacataatcctctttagccaatttaatatatcttagccttagcctaaacaacattagcctttcaatttttagttatcacataattagtaattttaatcaaagaatttgacgatctttaccttttcctcatattcgttgaactacaatttaagtgagtaaaacaaggtcacaatttaatttggcccaaaagcctaacacataatcatcaatcaagtttactattcaatcaccatttaagtaaaataacaaaatacactaccaaaccattaatcacaatattattacatattcattcccaca

SEQ ID NO: 46645 - DNA, 366 bp, Gossypium hirsutum
  Clone ID: LIB3196-029-P1-M1-D2
taaaggcataagttaaacttaatgattgcaacttaatcttgaataaggaaataaaatcaaattattaagggttaacatgtcttgttaaggaagcatttagtctaattgtgctatcataatagttgttgagattaatttgaaagatatgtatacttaagtagcataactataaaatttcttgtttttaagcataagtatattaaattcataattctgggaagaatgttattctgaaagaatttttcaaaggtgttttctgagtaattctttttaatttgtgcattacttgggatgagaaatgatttaagtttgggggttcagaaacatggaaatttacacatttttacataccctttttaacttaaa

SEQ ID NO: 46646 - DNA, 377 bp, Gossypium hirsutum
  Clone ID: LIB3196-029-P1-M1-D4
atggctgctggagggtatgaagggggacgtgttgacatgatcgctggctgctttgtggtgagtggattctaggaggtagaagtagaatcaggaagccgagggaggagactccctgagtgaagatgacggcgggtagggactgcgtgagctccgcaagcagcatagcccctggacctgggggccttcctatacctctctgctctccggggtctggctgctttccggtcagcactgtaccggggcctttactgactccctaagggccccatgagccccaggatggcaaaggacctgtgcccagactcaccctcattagctgctttgcagccctcaggtcctggtgccctcagagacctggggatatgggagcgggtctg

SEQ ID NO: 46647 - DNA, 364 bp, Gossypium hirsutum
  Clone ID: LIB3196-029-P1-M1-D5
cggacgcgtggggcgatttgcaatctcaactcaccgtttctcacgattggattctccttaaaatcatggctgctcagattagcaagaagcgcaagtttgttgcggatggagtgttctacgcggagctaaatgaggttttgacaagggagcttgctgaggatggatactccggagttgaagtcagagttactcctatgcgtactgagatcatcatcagagctactcgtactcaaaatgttcttggtgagaagggtagaaggattagagagttgacttctgttgttcagaaacgattcaagtttccggagaacagtgtggagctctatgctgagaaagttaacaacaggggtctttgcgccattgc

SEQ ID NO: 46648 - DNA, 362 bp, Gossypium hirsutum
  Clone ID: LIB3196-029-P1-M1-D6
ctgtaaataacaataatttgcctggactagcttcaattctcccacatcaattgtctaactctccaaagattgcacctattgggaaggatcaaagcaagaccaataatacaaacccaatttttactaattctggagcaatgcaaggagcatcctaccagcattcgagatccttctctgagcaaaaggtaagtgcaagccctggaccaatctctgccttcggtgaatctacttcaagttcatctggtattggaacattgactggtcctcagtttctatggggaagtcccactccttactctgagcgtgctaattctgcttggccaacaccatcagtgacgcaccctttttcatcaagtggacaa

SEQ ID NO: 46649 - DNA, 408 bp, Gossypium hirsutum
  Clone ID: LIB3196-029-P1-M1-D7
acactatataacaagttggaacgaagaagcacgctggtgccccgccgcaatatccgggatggaagccacgcggtaccagcggcgaatagatgagctactggcaggaagctttactgaggaggatgaacacaccatcctggaggagctgaacgcgatcactcaggaacatatagagctgacagaggctgcctccgagcccctttctgagaagataccacaaaacgtacctgacaaggccaggcccaggcacgcggagctggtggcagcttctttatgtggtcttcttttgcggtactcgcggtggtgccccaaggactgtggcccacagagagtcagagtcatcgccagcccctgtccgggttccctggagcccagcacgcacagtgctgagcatgagccacagccaca

SEQ ID NO: 46650 - DNA, 363 bp, Gossypium hirsutum
  Clone ID: LIB3196-029-P1-M1-D8
atgattcaatttaaagaaataattatagtaacatatttttgcataaattgtatttaaaaaaaaaagtaggttatgacatattcgtacgtattaatgtttttttttgttcaatgtatgataaatgtatggataagttttcgttttggtcacttaactagaaaaaagttacaatttgatcactgaattattcaaaagttttcatttaagtctttgagctattaaaattgatgctatatgattttctctatttgcactggttgcaccaattaaacaactttatttccccttctcttttaaaattttttttatgaaacaattttgaacgtcacaaatttgcttactaaaatttaatcaatttttttt

SEQ ID NO: 46651 - DNA, 365 bp, Gossypium hirsutum
  Clone ID: LIB3196-029-P1-M1-D9
cccacgcgtccgatatactattacttttctttttcatcatccatggctgaccgtgaccgtgaccctgaccgcaaccagcctcaagagattcagctacttcaccctccaccccactaccgtcaaacagaaccatcaagcacccagattgtagctgtcctcactctcctccctgtcggtggctcattgcttgctttggcagcgcttacactcaccggcaccctcatcgggcttagcatcgccatacccctcttcattatcttcagcccagttattgtccctgccaccatcgccatttccatggcggtggctggtttcttgtcgtcgggagcattcgggttgacggggctgtcttcgctcaactatgg

SEQ ID NO: 46652 - DNA, 368 bp, Gossypium hirsutum
  Clone ID: LIB3196-029-P1-M1-E1
cggacgcgtggggtgttttgcttttcatactcatttagcccctttcattagcatcaaaattactccagttttctttatcactgaaaaatgtcttgctgtggtggaaactgtggctgcggtactggctgcaagtgtggcagtggctgtggaggatgcaagatgtatccagacctgaacgctgccgagatgaccacaactgagactctggttcttggtgtagcaccccagaaagcacactttgagggagctgagatggaattcggggctgagaacggctgcaagtgtggagacaactgcacctgcaacccttgcaattgtaaatgattagagaccaaagccaaagctccctggaagcagaggcgcctttg

SEQ ID NO: 46653 - DNA, 379 bp, Gossypium hirsutum
  Clone ID: LIB3196-029-P1-M1-E10
atccactagctcgatctagtatattggggaatgcaggtggggggtgtcaccatattttttctgagctggcctttttttctcattagattgtctaggctatataccacctgcctcttttgccctgttgaatagagttgcacacagcacacgggcaactgacgcagggttgagggactctctctctgtctctctctgcctctgctgatgggacccttttccctcaccctctgcccttctaggtcatagactaggtaggaaggccctgtattggtctgcagcatctactgaggcagacctgcaacagaagtggcattcagtccccagcagacatgagtgagctcaccccagcactgctgttgggaaggtgactgcaggaaac

SEQ ID NO: 46654 - DNA, 334 bp, Gossypium hirsutum
  Clone ID: LIB3196-029-P1-M1-E11
atccactagctccatctagtctattgtggaatgcaggtggggggtgtcaccatattatttctgagctgccctttatttatcattagattgactacgctatataccacctgcctattttgccctgttgaatagagttgcacacagcacacgggcaactgacgcaagtttgaaagactctctctctgtctctctctgcctctgctgatgggacccttttccctcaccctctgcccttctaggtcatagactaggtatgaaggccctgtattggactgcagcatctactgaggcagacctgcaacagatgtgtcattcatgtcccagcaaacatgat

SEQ ID NO: 46655 - DNA, 365 bp, Gossypium hirsutum
  Clone ID: LIB3196-029-P1-M1-E12
caattgtggtccaaatgtatatttgaaactttaattttgatttaatcatacacatttaaagaaataaatacatcaatttatttttatattggataaatataattattcatgtatgcaatatatagacataaaatgatgttatatcaataattgcattaataatttacaagaattagatcaaatcaaaatttcatgtataaaattgcacaaaatcaaagttcatgtatacaattgcacattaaaccatagttaatgtataattttggtatgtatccctaattaattaatttaaaattaaaaaaatctaattttacttaaaagtcatgagataaatgattagattatatatgaattttattttggta

SEQ ID NO: 46656 - DNA, 385 bp, Gossypium hirsutum
  Clone ID: LIB3196-029-P1-M1-E2
atcagctccctccgatggggtctcagggctgtgtcccagctcgcctccctgtggcctccccctagaactcctgggtctgtcaggacatgccccacctggcacacacaccctgtgtgactcccactgcctgtgggaggacgccgggcccctgagccagcctctgctttcccctcctgcctttggggtgccccgtaccgcactgttcccccagactgccttccactttctctgcctttgcacaggctgttctcctgcctccagtgaactctgacttctccatagcctcctgaagggccccttgctcacaatggccccagccaggccctctgacccagccctcctgcatggccacgttggtctctgagccttaagcctttggatgtgt

SEQ ID NO: 46657 - DNA, 384 bp, Gossypium hirsutum
  Clone ID: LIB3196-029-P1-M1-E3
atggagaagaacggggagctagcatcatggcagaacaggatgtggaaaatgatcttttggattacgatgaagaggaagagccccaggctcctcaagagagcacaccggctccccctaagaaagacatcaagggatcctacgtttccatccacagctctggcttccgggactttctgctgaagccggagctcctgcgggccatcgtggactgtggctttgagcatccgtctgaggtccagcacgagtgcattccccaggccatcctgggcatggacgtcctgtgccaagccaagtctgggatgggcaagacagcggtcttcgtgctggccaccctacagcagattgagcctgttaacggacaggtgacggtcctggtcatgtgcc

SEQ ID NO: 46658 - DNA, 367 bp, Gossypium hirsutum
  Clone ID: LIB3196-029-P1-M1-E4
gaaaaaacagaaaaacaaacagtcactgctaacaaaccaaccttcccgacgatcaaaactactcttgaaaacgtgcagaaccgggaaatgctttatttttcactgctcgctagattcgtcggacctggaggcagaagcagaggcacctcttgctaagagttcacaactcctcaagaacgctgatatttaatcagcttgaaaccgagtgggaccatggagttaataattacgagaagatgattttaattatacatggacatgagctatattctaccttatttggacggaaaaggcaagcaaattgggtcaggagaatgtcactttgatctagttaaagttggtttaatcgaagaacaagtctgacaag

SEQ ID NO: 46659 - DNA, 364 bp, Gossypium hirsutum
  Clone ID: LIB3196-029-P1-M1-E5
cccacgcgtccgagcctcactccgccatcttcaataatttcttccgttgatctttgttagagattagctttttaatttttcattatgggaaagatcaagatcggaatcaatggatttggaaggatcgggcgtttggttgcgagagttgctctccaaagcgatgatattgagctcgttgctgttaacgatcctttcatcaccactgaatacatgacctacatgtttaagtacgacagtgttcacggtcaatggaagcatcatgagcttaaagtgaaggactcaaagacccttctctttggtgaaaagcctgtcacagttttcggtattagaaaccctgaggaaattccatgggctgaggctggag

SEQ ID NO: 46660 - DNA, 365 bp, Gossypium hirsutum
  Clone ID: LIB3196-029-P1-M1-E6
ctcttctctcccgaaggaaggaaatcggggaaaaatgaaaatggaaggaatcgaaggcgacgcctcggtgggaggagcagggcgttacattttgaatccgacgcgaataaacagcgaggacataatattttgcgttgatgtggacgcagagtcgcttgttgaaatgaaaacagcaggagtcaccagattggattccataaagcaagctatccttctctttgtcaattccaagctctctatcaaccccgaccaccgcttcgctttcgccactctctccaaaaccgcctcttggcttagaaaagagtttagtagtgatgttgagtctaccattggtgctgttcgagcactctcggctaccactgtct

SEQ ID NO: 46661 - DNA, 317 bp, Gossypium hirsutum
  Clone ID: LIB3196-029-P1-M1-E7
cccacgcgtccgaaaaaaaaaataaaataaaataaaaactaaaaataagaatcaataaaaaaaataaaaaaatgaaaaaaacaggaacacacgccctgtgtggctcccactgtctgtgggggggctccggtccctttgagccagcctgtgctttcctcttatggctttggagtgccccgtgcctcactggtttgccatactggcttccagtttttctgcctttgtacaggctgatctcctgtctccactgaactctggcttttgcatagcctactgtagggtcccttgctcacattctacctagttaggccctttgt

SEQ ID NO: 46662 - DNA, 359 bp, Gossypium hirsutum
  unsure (1)..(359): unsure at all n locations; Clone ID: LIB3196-029-P1-M1-E8
atgtccagcagcggtccagagcgcgcgaggttcggggagctcggcgaggctgctggtacctgcgtccgcccggcggacggctgctctggtttgtgacttccggacaggacggccatcctctccagaatgaagatcttcttgccggtgctgctggctgcgcttctgggtgtggagcgagccagctcgctgatgtgcttctcctgcctgaaccagaagagcaatctgtactgcctgaagccgaccatctgctccgaccaggacaactactgcgtgaccgtgtctactagtgccggcattgggaatctcgtgacatttggccacagcctgagcaagacctgttncccggcctgccccctccc

SEQ ID NO: 46663 - DNA, 363 bp, Gossypium hirsutum
  Clone ID: LIB3196-029-P1-M1-E9
gccgaatatgtgcttgatcaatgaaggaattgttgaagaatataggtgaacttgttaaaaactataatttctaatactcatatgtgtaatagccgaacctagactttgcttaatgtcttgagcaaatgccgattgggtgttttgaaatggataaattaggtgcttgatttcctaaaggtacggcatagtacatgatatttttgttagtatgctttcgaagaatttgagtagtgttatgtataagtaagattattacgtaggtcttggcggtatatatgtacaattgatctatttagctaattatatctagggtgataaataattaaataatatgtatacaaagaatgtgtgaaagagtgaatt

SEQ ID NO: 46664 - DNA, 365 bp, Gossypium hirsutum
  Clone ID: LIB3196-029-P1-M1-F1
cccacgcgtccgataattttgatcaactgctagcgctgcgacgtgaacaaaatcctcggtttattaatgaactgatctctatgttcaccaacgatgctgaagcttacattgccgaaatcactaatgctctgagcttaactgaggtggacttttcaaccatcataagcaaactccatcagctcaaaggcagcacctctggcattggcggtcaccggatgtatcaagcttgttgcgagttacgtgtcgccgccgacgacggcgacaaagacaggtgcgatgaattatttctgcgagtgaaggaggagttcaatactttgaagcaatgcttggattccatatcccagatgcggagcaacatcatcagc

SEQ ID NO: 46665 - DNA, 365 bp, Gossypium hirsutum
  Clone ID: LIB3196-029-P1-M1-F10
aatccttgaagtatctctgtctgaatagtatgggtataagatccttttaaggtcctccaaatacatggaaatcttggaatatactagtgtcggatactcacacccgattccaagtaacatttgcttaaaattacttttagtctccacctgattcatcttatgagtgattctcgtaatccagctcccatacgaactcttatgtcagatggttcttctcttttccattgacaattcaggcaaaatacataacagatgctgaagagaggtatgacaatttattgaaaactttggatcctcagttgtcctcgaaataccagagaagatgcgaagaagccactaaagaaggtggcaaggtttcaggacac

SEQ ID NO: 46666 - DNA, 357 bp, Gossypium hirsutum
  Clone ID: LIB3196-029-P1-M1-F11
agaaaagaagatttctttggaaattaaaagcagtagctcttaattaattattttattttttatttttacaaggctcaacggcaggagtaagcagaatcctgcaatcaaattccatccatagaatctggagtcgggactgtaaattatgagaacagttgacattcaattgtattggtgaagaccggaaggaacgtgtaattaattagagagtaaacaagacagagatgttctcactcttttatggactttataagtacctatttagcaagacagagtttcatgtactcattcttggaatcgacaaggctgggaaaacaactttgttggagaaattgaaatccgtatactcaaacttgg

SEQ ID NO: 46667 - DNA, 366 bp, Gossypium hirsutum
  Clone ID: LIB3196-029-P1-M1-F12
cccacgcgtccggaagcactgtgtacttggccaaccaagacaacagggaaaagctaaccatagcagtgctgcaccgacctgtcaataaccctggacaattccagaaattcttccctgctggacaggaaaatcctcagtcatacttacgaatcttcagccgggaaattcttgaggctgtcttcaatacacgaagtgagcagctagacgagctgtttggtgggaggcaaagccatcgaaggcagcagggacagggaatgttccgtaaagccagccaagaacaaataagggcattgagccaaggagctacttcaccaagggggaaaggtagcgagggatacgccttcaacttattgagccaaacccctc

SEQ ID NO: 46668 - DNA, 383 bp, Gossypium hirsutum
  Clone ID: LIB3196-029-P1-M1-F2
atcatgggaaagaaatcttaaatgaaaaacgcatctcattgtaggcattcttgcctcatattttactgggccatgtttgtttcctggtactcatgtattttttttttccagatctctttccccaagttgctattgtaggagtattctgctgcgtgtggatgcagttatactcattaaagcagatctggagtctgaagtagctataaagcagctataaaactgagaaatacattcatagctgcagaaactatgataggtagaggactttgttttgttttgttttttggttttacagagaagagatttttattagaaaaaaattccagtgaattgttgcagaaatgctggtttctacaccatcctaaagaaaagctaaagggtgt

SEQ ID NO: 46669 - DNA, 385 bp, Gossypium hirsutum
  Clone ID: LIB3196-029-P1-M1-F3
atctgggcaagagggccagacactgtctcaaccaactaactaaacagcacaaataactaccacgtatcagctcaacccaccagcctcttgctctgcaagtacagataccatgtatggagggctctgggctagatgcttgggaatccagagaggaaacatcaacagttcttccccatggcgcacagtctacacgaggctttttcctttggcatctggaccacacctcctctgagggctaataatgcagcctgtggtccaggcaacaccttgccattctatcaagaaaaggctcactgagcccatgctgcagtggctagaaagaatggctagcagcagttcccaaccagtagcaattttctttctcaggggacctttgtcaatatct

SEQ ID NO: 46670 - DNA, 335 bp, Gossypium hirsutum
  Clone ID: LIB3196-029-P1-M1-F4
atctgggcaagagggccagacactggttcaaccaggtaacttaacaggacaaataactaccacgtatgagctcaacccaccagcctgtagctctgcatgtacagataccatgtatggagggctctgggctagatgcttgggaatccatagaggaaacataaacagttattccccatggcgcacagtttacacgaggctttttccttaggcatctggaccacacctcctctgagggctaataatgcagcctgtggaccaggcaacaccttgccattctatcaagaaaaggctcactgtacccatgctgcagtggctagaaagattgtctagcatca

SEQ ID NO: 46671 - DNA, 318 bp, Gossypium hirsutum
  Clone ID: LIB3196-029-P1-M1-F5
atggaaaggcttcaatgaagggctgtgggagatccagaacaacccccacgccagctacagcgcccctccgccggtgagctcttccgacagcgaggcccccgaggccaaccccgccggcggcagtgaggctgacgaggacgacgaggaccggggagtcatggccgtcacagcggtgactgccacagctgccagcgacaggatggagagcgactcggactcagacaagagtagcgacaacagtggcctgaagaggaagacgcctgcgctaaagatgtcggtctcgaaacgagcccgaaaggcctccagcgacctgaatca

SEQ ID NO: 46672 - DNA, 382 bp, Gossypium hirsutum
  Clone ID: LIB3196-029-P1-M1-F6
atcaaatacattccactgtgttctgatcacctgcagtatatagtacagtaacatgctgtacaggttttgtagcctaggagcaacaggctatcccatttggcataagtgtgtagtcggttacgccatcttggtttgtttaagagcagtttataacgttcgcagaatgaagttgcctaatatttctaagaacgtatccccattattaagtgaagcataactgtagttcagttatagtaaggtttacaaagtaaaatgatatctatttgcacatttcatgacaggccttcctaggagtgatagaggaaattactggcaacatgtgtgtgaagtagtttttgtaagtagaggaaatgcataggctacaaaactgtatggtagtttt

SEQ ID NO: 46673 - DNA, 339 bp, Gossypium hirsutum
  Clone ID: LIB3196-029-P1-M1-F7
atttttcaagaaccctagtttcctaaatcacctttccaaaatgccttcaattccagaagagccactgctggccgcgaacccagaccgattctgtatgtttccgatccaatacccagaagtatgggaaatgtacaagaaagccgaagcgtccttttggaccgcagaggaagtcgatctggcttccgatcttcgccactgggtaactcttacccccgatgagcatcacttcattagtcacgttctcgactttttcgccgtctccgatggcatagtcctggagaaccttgctgttcggatcatgaaagaggtccagatctccgaggcgcgtgctttttatgg

SEQ ID NO: 46674 - DNA, 366 bp, Gossypium hirsutum
  Clone ID: LIB3196-029-P1-M1-F8
aaaaaacatggtagttttcgtaacttgtttggaaaccagaacccaatggctacccctcttcaacaagttcaatctttattagagaagaaaggtgcaaagctgaaggagctgtgtaagaaacggaaaggatggaaaaagaatacgtggccaatatcgcacgaggatgttccgttgttgtttgggcttattgaccttaaaataatatcaagggttcttcggatgggaaggataagtaaagaggagttgttttggtgtgaagagaagatgaaaaagcttcatttttgtgatgggaaattggagagagacccttcacccatacttttccctgttttgatgaaaggttaggtggtgtaaagctatgttact

SEQ ID NO: 46675 - DNA, 361 bp, Gossypium hirsutum
  Clone ID: LIB3196-029-P1-M1-F9
cggacgcgtggggtgaacatgaaggcctgaagtacccggttttatcggtttgtatcgataagaagacggtgattcgagtaaagaggctgcaatggaattttagaggaaaccagacgatatttgttgatggattgtttcttcagccatatcgcctaaaacaaggcctatctcggaatcaaccatgactaaaacatagaacccatcaacaggttcgggtcccgtatcatacttagcagtggaaagatcccagaagacttcgatcttggaatgatcggattcgatcactttgttgcctttcttcttcctgaagaatctcaagttggtgttgagcttgaaagatgtggaagggtcatcaccgatg

SEQ ID NO: 46676 - DNA, 362 bp, Gossypium hirsutum
  Clone ID: LIB3196-029-P1-M1-G10
cgacactatctaacaagagggaacgctgaagcacgctggtgccccgccccgatatccccgatcggacccagccggcctactaaaccggtctacattgtggcctatgacctggaaggtgcattgatcgttgatgtaacagtcattgcaaagatgacatgccttgttacaagaagtgcctagacctccttaccgccaccccacttttttctaatgagaaaggaccactcctgtacgaagtccacacaaggaaactgtaagcattgtttatttgtaaatgatgaaaagcaaagactttttaatgtgactcatagcacttgactattaggtctgactatgaagagtgagccttgaagccccctatc

SEQ ID NO: 46677 - DNA, 388 bp, Gossypium hirsutum
  Clone ID: LIB3196-029-P1-M1-G11
attccaaagagagcatctcaccttgtcactgaaaatgtagagtttctgcacctgaattaaggcaaggggaaaaaataaaggtgcaagccctgagaccgtccatcatctgcacatcatgctgtgatgtggtgaaaatcctggggagatcctcaaccttcactgctcaccaccaaaccccgactcatgctctcactagctcataatgcagtcacactttctaataagaagaactaccaccagctcatcaatggaaaattgtgctgaataattgccgcgtgggaataaaaatacctctcccaatagcatcttctctcatgaaacaaagagaagcccttcccttaactattatcctttaggtgagacaacatagaccccacttgcatgggaa

SEQ ID NO: 46678 - DNA, 365 bp, Gossypium hirsutum
  Clone ID: LIB3196-029-P1-M1-G12
ctttaagctttctttccaaccttacttgtattactaagtgaaagaagaagattatgagtgcaggggtgtctctcctcactatgctattccttgagttgtttatgcttttcgcctgcttccatgaatgtttatccagccctgtggatcaacttaaaagttatatcttaacacaaagaggagctgatgctttcttacctgaaattactccgagtgcagctcctcagccatttcttcctcttcttgcaccttctccgttgtcaccatttacaaatagtactattccgaaattatcaagactttgtatgttaaacttcactgcttctcaaagcttaatgaccatgacctcaactgattgttgggctgca

SEQ ID NO: 46679 - DNA, 370 bp, Gossypium hirsutum
  Clone ID: LIB3196-029-P1-M1-G2
cggacgcgtgggcggcagaagaagcgaggatgatcctcaacagaggtacgaggactgccggaagcgatgccaattggagacacgtggacaaacggagcaagacaagtgtgaagacaggtgtgaaacgcagttgaaggaggagcagcagcgtgacggagaagatcctcagaggagataccaggattgccgacaacactgccaacaggaagaaagaaggctgcgtccacattgcgaacaaagctgcagggaacaatacgagaaacagcagcagcagcagcctgacaagcaattcaaggagtgtcaacagcgttgccaatggcaagagcaaaggcccgaacggaagcaacaatgtgtgaaggaatgcagggaa

SEQ ID NO: 46680 - DNA, 330 bp, Gossypium hirsutum
  Clone ID: LIB3196-029-P1-M1-G3
ctttgatggtgcatcaaatgcattgtggcatgggattggagcagtcttagtatcaccagaagggaaccattatccgttcactgccaggctgaatttcttctgtaccaataacatagcgaaatatgaggcctgtatcatgggactttgtgcagctattgaacgaaacatcgaaatcttaaaagtgtacggggactcagcattagtgatataccaaatcctgtgagattggcaagtgaaggattcaaaattagtcaaatacagcgatctagtggcaagactgattaaagaattcaaagaaataacttttaattactttccacgagaagaaaa

SEQ ID NO: 46681 - DNA, 358 bp, Gossypium hirsutum
  Clone ID: LIB3196-029-P1-M1-G4
atcctggacctgcctcccctccccgggtacctccgcgggagcccctgtcccctcaaggctcgaggacacccagccccctggtaccacctggtagctccccactgccaccccgactctcaagctcacctgggaagaccatgcccaccacccagagctttgcctcagaccccaagtacgccaccccccaggtgatccaggcgcctggcccgcgggccggtccctgcatcctgcccattgtccgggatggcaagaaggtcagcagcacccactattatttgctgcctgagcggccgtcctacctggagcgctaccagcgcttcctgcgtgaggcccagagccccgaggagccggcccccct

SEQ ID NO: 46682 - DNA, 123 bp, Gossypium hirsutum
  Clone ID: LIB3196-029-P1-M1-G5
attcccagctggggttccggggccgacctgtggggctcagacagcgacaccagtttgagaagccgcgcatggatgatgggctgctggaggtggtgggcgtgacgggcgtcgtgcacatgggcc

SEQ ID NO: 46683 - DNA, 364 bp, Gossypium hirsutum
  unsure (1)..(364): unsure at all n locations; Clone ID: LIB3196-029-P1-M1-G6
atgagacatgcagctgatctgtgaggcataccacctgatgaaagacgtgctgggcatggcgcaggacgagatggcccaggcctttgaggattggaataagacagagctagactcattcctgattgaaatcacagccaatatactcaagttccaagacaccgatggcaaacacctgctgncaaagatcagggacagcgcggtgcagaagggcacggngaagtggaccgacatcttcgccctggagtacggcgtacccgtcaccctcattggagaagctgtctttgctcggtgcttatcatctctgaaggatgagagaattcaagctagcanaaagctgaagggtccccagaagttccagtttgat

SEQ ID NO: 46684 - DNA, 364 bp, Gossypium hirsutum
  Clone ID: LIB3196-029-P1-M1-G7
tcgcccacgcgtccgagcttaccctgcaatgtgcgacaagctatcagatcaaagtcatattgacaacagagtagtggtggatggcaacctcattacaagcaggggacctggaactgccatggagtttgcactaggaattgtggagaagtttttcgggtgcccgaaagccttagagctagcaaaaggactgcttgttggacgccagtagatgaactagtatgagtgtttggtcctgcccatgttaccctatagcctgctatgagacgatatatgagaatataaaaggtgagtaagcattcactctgcggttttttatgtacgataagtttgttccttgttgataaataaatgagtgttggaacaa

SEQ ID NO: 46685 - DNA, 358 bp, Gossypium hirsutum
  Clone ID: LIB3196-029-P1-M1-G8
cccacgcgtccgcaggcattaacataggctaggacacaactgtgtgtccctacttcgaatgcccacactgcctgagacatgggctatttcttgatcttgtgagtcacacggcctggccacacggccgtgtgaccactacagtttgaaaacttttatatttttttgaaaaattctataagtttacgatttagtcctgacttgtttctgatgcatatttaggggcttgcgggatcgtttaagtgacaatatgtatgttttgaattggttttagtgtatttattgatatgatttgaaatgtttgaaatttatgtacgtttgatttgaaaactcctataatgctctcttaccctggtttaac

SEQ ID NO: 46686 - DNA, 362 bp, Gossypium hirsutum
  Clone ID: LIB3196-029-P1-M1-G9
tgttggtttcatttgatattcttaaaaaaaaaaaaactatttgtgcttttctgttgtttttagactgtttatgtcgtaatttgctatagtttacttcttttgctttcattagtaccctttctggtaagtttatatatgttgagcaagctttgtgtagaatataagttttatttcgaaaagaaattctctatgcaataatgtagagaggagtggttaaaaattgccatgaaattccagttacactgaacgtgaatgagggagttgggattaaaaagacgtgaaattattaaatatagggtgcaattcaagtcataaaaggttttgatttgaaggaattcaatccaattccatgttttcacttc

SEQ ID NO: 46687 - DNA, 344 bp, Gossypium hirsutum
  Clone ID: LIB3196-029-P1-M1-H1
tagacagtctagggatgatggatatgctgatgtaaatacctattcaaagagagatgttagcagttggcagttgaatcatcggaaacgcccatacttggatcttacagaagcagttccagaaatgtctaccgagtcaagtcaaagaatgccatggagtgaagtgaggagagtttccacagatagaggaagtgatgacaaaaagctgaagacgggtttcactggaatataccaatataacggtgctagagatgaaggcacatttagtgataatactgcattagatagacatggtctgggttctggctcttgtgttaaagagagatgtaacattgcttgcgaagaaa

SEQ ID NO: 46688 - DNA, 351 bp, Gossypium hirsutum
  Clone ID: LIB3196-029-P1-M1-H11
actattgggaaagaaagcacgcctgcaccacccccccaatatccggggctcgacccacgcttccggatggacatcccgaggggaggtgcggtggcattaaagaaacttttcgtgaaccttcaacaaaaatgctgacgggggcagaagcctgtatggaacaaagtgcccattgtccaaccacggcgtaggcgataggtccctcgacttcaccaagttgagtggatcacagcacgtaccctgattactatttgcgtattaaaagcactgtgcacaacactgtgctgaaagagaaagaattgcacacgttcaaaaacttgttttccaaagggcctttagttccattttaatggg

SEQ ID NO: 46689 - DNA, 313 bp, Gossypium hirsutum
  unsure (1)..(313): unsure at all n locations; Clone ID: LIB3196-029-P1-M1-H12
atgcaaagccataaggggcaggggccaccccacggcatctcctcggaagtacaggcctcaggaggaggtggaactgacggggggtggcactccccggagactgtcctcacgaggggactgggttcgctctcagctctgcagctgtctacagtggggggaaggttggggggtgtctnnnngcatnnttccctaaccaccccctgtgggtctcagggtggccgggtgcgaccttttctttctcaccaagctatcctagtgctatagcagttggtggttacctcccctttcactcaccatataggggtttgttgga

SEQ ID NO: 46690 - DNA, 363 bp, Gossypium hirsutum
  Clone ID: LIB3196-029-P1-M1-H2
ggttggagctcttttgcaaacatatcatgtgatgcatattatgagctaatatatgagttttacaccacatttagcttcaatgttagtgcattacagactattgaaacgcaaagcattatctgttttcgtctgcttggaaaggactttcaaatgtcggtatctaattttaatattgccatgggtttcgttgaccctgacaatattcaatccgactcctatcatactgctttgttagacattctgagcgactttaatgctcaagatgcctaccgtgtgttaaccaattctaatcaactgtataatccaaaaaccacaaaagacttattggtgcatgaacctaccttaagatatattcaccgattt

SEQ ID NO: 46691 - DNA, 422 bp, Gossypium hirsutum
  Clone ID: LIB3196-029-P1-M1-H3
acaacaaggtacgcaaaaacacgcggctgccgccccggaataaccgggatctgctctcccgccccagcatcagcatcactacctcatgctacccgctcccctccatctgcgtgcgggaccccgtgagcgactggtttgagagcctagcgcagtgcctgcactggaacgtccggaagaagcaagcccacttcgaggaggaggaggagggggagggctaggtcgagccctgtccaggccggaatccttccgctggcttcatttctgccctccaagctccctctggggacagaccaatctgtgtgtgtctgtgaccacctctgtctcaatggcgcggccacttccttcctgtagctgggtcagagcctgggtctgcccttttgtccagaacagcaggtttttttaacattttaagtcagactttt

SEQ ID NO: 46692 - DNA, 392 bp, Gossypium hirsutum
  Clone ID: LIB3196-029-P1-M1-H4
atcaggagggaggctggcgcaggcaggggtgaggagcacagcaggcggcgagcgggaggcactggcctccagagcccgtggccaaggcgggcctcacgggcgacgacggagccgggatcggtgcctcagcgttcgggctggagacgaggccaggtctccagtcggggtggacgtgcccaccagctgccgaaggccgggacgccaggtccggcggacttgccgagcgggacatgacatggtccggtgtgacggcgaggacagaaggggcgcgtccggccttcctgaacaccctaggctggtggggctgcggcaagaagcgggtctgtttctttacttctcccacggagtcggcacactacagctgccctctgggctcccagaacccacaacat

SEQ ID NO: 46693 - DNA, 286 bp, Gossypium hirsutum
  Clone ID: LIB3196-029-P1-M1-H5
atgcctgcatgtcttgcgggtggagaagctgaagccagtgcccgtggcaccagagaaccagggcgatttcttctcggtggactactacctagtgctgcacaatggcccataagaggtttcccatttgcacctgtggataggtgagcagtgatcccgacatgagcagggggcctgtgccgtgctggctgtgcacctcaacacgcttgtgtgagagcgcactgtgcagcaccgtgaggcgcaggccaatgagtccgacctcttcatgagctactttccacaaggcctt

SEQ ID NO: 46694 - DNA, 315 bp, Gossypium hirsutum
  Clone ID: LIB3196-029-P1-M1-H6
atcctactacggctatgatgatggctatgcagtaagaggaagaggaggaggaaggggagggctaggtgctccaccaccaccacggtggaggggggcaccacctacaaaaagtacagctgtctatttacagatgtaggcacctcttgaaaccaccaatagtctatattgttaaccaatgaacatcctgctcaacaacagataatccttattctccggatatcttcattcaatcttagagactatgtaatcatcaagacaaagccaaatacctacaacctacctagtttcaatcttcgccagaccaccaaccaacat

SEQ ID NO: 46695 - DNA, 362 bp, Gossypium hirsutum
  Clone ID: LIB3196-029-P1-M1-H7
gttttccaaaatccctagcccgatctcctgtggaggcagccatgaggaccctattttcaaccaccaaacgcctcatttcttgcactagcgccaccgccgtggccacccattcccgttccttcagcttgatacccatggtgatcgagcactcttcccgcggcgagagggcttacgacattttctctcgtctcctcaaggaaaggatcgtctgcatcaacggacccatcaacgacgacacctcccacgtcgttgtggcccagctcctcttccttgaatccgaaaacccatccaagcctatcaacatgtaccttaacttccctggcggtcaagtcactgcaagtcttgcaatttatgatacgatg

SEQ ID NO: 46696 - DNA, 379 bp, Gossypium hirsutum
  Clone ID: LIB3196-029-P1-M1-H8
attttatagcttggacctttcttcactcaagtgcactaataaattatgtatgttgcttgaacaactagcattcctttggaccattggactatgaaagtctccaacaagaacttgctttaaaagagacagtatggaaaaaagtgtcacctgagtcaaatgaggacatctctacaactgtagtatatagaatggaaagtctgggagagaaaagctaaagaaatgggttctagtttcagaatgtttcttcatttaatctttcaaacacctttagctttttttttgcaagttataaatatttatttgaggtattttttgttctcaatcttgggtgctggagccataaagcttttttttttttccttttaatctttgtataaag

SEQ ID NO: 46697 - DNA, 182 bp, Gossypium hirsutum
  Clone ID: LIB3196-029-P1-M1-H9
aaggaccaaattaaataaattgcaaaacatggattctagaagcaatttgcatgaaattgctttaaattagtatttaaaaggtcctaaagagcaacttgcccaatttttaagtttttggacaaaaatagcatgcatagaaaactttggaagtttagtaaggagaggcattttggtcatttgat

SEQ ID NO: 46698 - DNA, 214 bp, Gossypium hirsutum
  Clone ID: LIB3196-030-P1-M1-A1
aggacgcgtgggtttagacacggtctaggacatgtgcgtgttatggccgggggagggacacatgcacattgacacagtcatgtgtgacaggcgggtgaaaacccatataggttcgtattgggaactaaattgatatgagtgtaggaaacacacatggccactatatgcttacgtcatgttggtggaacgagccattaacatgaccatgccataa

SEQ ID NO: 46699 - DNA, 355 bp, Gossypium hirsutum
  Clone ID: LIB3196-030-P1-M1-A11
cccacgcgtccggaaattcgtgttatggcatcagctctgtccaaggaaatgggaatgatggaagctcagttgaatcgctggaaggagactgctcacgaagccatttccttgcatgaagaagcccaagcactaaaagctttgttaagcgataagacaaatctacaaaagcgcttggcagaagagtgtgctgagcagattgcagaaatcaaatctctcaatgatatgattgagaaattgcagaaggaaaagttggaattgcagatcttcttggacatgtatggccaagaaggctatgatgatagagatgtgatggaaataagagaatctaaaaatagagctcattcgcaagctgaaa

SEQ ID NO: 46700 - DNA, 346 bp, Gossypium hirsutum
  Clone ID: LIB3196-030-P1-M1-A12
cggaatcgagctgacttcactcggattaaatttgaattcatcggaaaatctttacaagacatttggttcttcatggtctgatgaaccagctaagggtgacccgtagtttactgtgccacaatgttattacgctaagcaaccacctactttacaccaaggttatttttcaaagttcactgtggacacattggtctatatattttacagcatgccaaaagatgaagctcaattatacgctgcaaatgaactttacaatacaggcttgttttaccacatgtagcactggtgtttattcataaagatttccaatgtggagccactagtgaagacgaacacgtacgagaga

SEQ ID NO: 46701 - DNA, 340 bp, Gossypium hirsutum
  Clone ID: LIB3196-030-P1-M1-A2
atctggaacgcacgctggctgatgctgctgctgctgctgctttgcagaggagcgcacgccctggagtgctacagctgcgtgcaaaaagcagatgacggatgctccccacacaagatgaagacggtgaagtgcgcgccggacgtggacgtctgcaccgaggcagtcggggcggtggagaccatccacggacaattctcgatgggagtgcggggttgcgggtcgggactccccggcaagaatgaccgcggcctggatcttcaccggcttctggcgttcatacagctgcagcaatgcgctcaggaccgctgcaacgccaagctcaacctcacctcgcgggcgc

SEQ ID NO: 46702 - DNA, 367 bp, Gossypium hirsutum
  Clone ID: LIB3196-030-P1-M1-A3
agactattgaacctaatggccttgttttgccttccttcaccaatgctcctcagcttctctacattgtccaaggaagaggtattcaaggtattgtgatgcctggatgtgccgaaacattccaggattcacagcaatggcagcatcaaagccgtggcaggttccaggaccagcaccagaaagtccgacggttccgccagggtgacatcattgctttgccgcagggtgtggttcactggagctacaatgatggcaatgagcgtgttgttactatcaatctacttgacactggcaacagtgctaatcagctcgacaacatccctagaagattccatcttgctggtaacccagaagaggaacagaggcaact

SEQ ID NO: 46703 - DNA, 378 bp, Gossypium hirsutum
  Clone ID: LIB3196-030-P1-M1-A4
atgccagatgtgtggaatctttagctcagcattgagagaataaaatgtcactacctctcatcttatgaacaggataatataattctttaacagctataggttatctggctgaagtagacctaattttacatgacttgtggtgtaaaatgtcttgatgataatttttaaaacttaggcaacatttccaaatatgggaggaaaggacagatgtgtttacaagggagggtttcattacaacgtatttgctttattcacctccctgttttgtgttgcatctttccttgaatatcttactggcccagagttagcctttctcaattatgtttccagactgtggccgtgattctaaaggaaaatgtgtgctctttaatgggtaga

SEQ ID NO: 46704 - DNA, 360 bp, Gossypium hirsutum
  Clone ID: LIB3196-030-P1-M1-A5
ggaggtgtggtaagaggaggtcaaagcagagaccgaaaccaaaggcaaagcagaacccagagaggggaacgggaggaggaagagtcgcaagagagcggcggaaacaatgtgctcagtggctttcgcgacaatctcctggcgcaggctttcggaattgataccaggctagcaaggaagctacaaaacgaaagagataacaggggagccattgttagaatggagcatggatttgagtggcccgaggaagggcagaggcgacaaggacgtgaagaggagggagaagaagaaagagaaccgaaatggcagaggcgacaagaaagtcaagaagagggatctgaggaagaagaaagagaagaacga

SEQ ID NO: 46705 - DNA, 353 bp, Gossypium hirsutum
  Clone ID: LIB3196-030-P1-M1-A6
attttaagtttctttaatattgttttaaagaaatagagtgaaagtcgatactttattttatctatatggtttttatgtaattttaaatcgactctcgagcaattttttttaaaattttaattagttcatttattttgcgaaagttgtagatttaattattatactctagtttaatcaattttaatctttatattttttgaatttggtcaattttaatgttaacctaaacaacatcagttaaattcaattactagtcatgtactatgcatatagttgtagatttaacccatatttaacaattggatcattttaagtccgtgtacttttttgaattttaaaattttagtcttgat

SEQ ID NO: 46706 - DNA, 372 bp, Gossypium hirsutum
  Clone ID: LIB3196-030-P1-M1-A7
atcgcggggatccctccctcccacccgttccctcccccccgcgccccgattccggccccagcgcgggggggaggtcttatgtatatggctgttatgtgattttaaatcgactctcgagcaattttttttaaaattgtaattagttcatttattttgcgaaagtggtagatttaattattatactctagtttaatcaattttaatctttatattttttgaattcggtcaattataatgtcaacctaaacaacatcagttaaattcaattactagtcatgtactatgcatataggtggagatctaacccatctttaacaattggatcattttaaatgccggtacttttttgaattttaaaaatttaggcttgat

SEQ ID NO: 46707 - DNA, 385 bp, Gossypium hirsutum
  Clone ID: LIB3196-030-P1-M1-A8
atgctcagtaagaacactcagacttacgacctttaccatcagccaaagtgtgctggtcaccaacttgaaaccagcaaccatcaaggtctatgactactacctaccagatgaacaggcaacaattcagtattctgatccctgtgaatgaggacagaagctggaaagagactcaattagtcctctatgtcattactggagggtggaacattcttctgtcgcttgaagcagaactcattcaatcaaataatttaatttctctgactagtaaatgggtaacagatgaatatgtctgaacctcagctgtaatactttctagtacctttgcaaggagatgggataggaacaagcactcaaaggaggcactgtatgggcaaggtcacaaggg

SEQ ID NO: 46708 - DNA, 364 bp, Gossypium hirsutum
  Clone ID: LIB3196-030-P1-M1-A9
gagggatagggatgcttgggattgttcacgggttccattctgtccaggtggcaagcgccaactctatggctacattgccatgaaagaagatttggatttatttaaccaacactctcaaggaaagtccaggctgaaatttgagacgaggtcatatcaagagatggttgagagtcagataaagaagataaatgatgatagtcagcagcttaacctacttaaaaagaaggttgctcaagaacagcagcactcacaagtccttgcagagtctctaggacgattgagtgagaagctgcaccagacgacggaggaatatggtatcataaggcagcaatctagattgcagcatgagcagaacaaagaagag

SEQ ID NO: 46709 - DNA, 339 bp, Gossypium hirsutum
  Clone ID: LIB3196-030-P1-M1-B1
atcagggctggggctaccatgttctctcgcgcgggcgtagctgggctgtcggcctggaccttgcagcctcaatggattcaagttcgaaatatggcaactttgaaagatattaccaggagactaaagtccatcaaaaacatccagaaaattaccaagtctatgaaaatggtagcagcagcaaaatatgcccgagctgagagagagctgaaaccagctcgaatatatggattgggatctttggctttgtatgaaaaagctgatatcaaggttcctgaagacaagaagaaacacctccttattggtgtgtcctcagatcgaggactgtgtggtgctattcat

SEQ ID NO: 46710 - DNA, 308 bp, Gossypium hirsutum
  Clone ID: LIB3196-030-P1-M1-B10
acgctggagcgcctgcaggcaccgccccgatttccccgatgcgacgcacaccttcgctgctctggggctggagggaatcaactggcagacggccttcaaccgacaagcgcatcacacacacaaggtctatagccgggagctcatcttgcggagaggccaaaactttcacgtcttaatgctcatgaacaaaggccttggctctaacgaacgactgctgttcattggctgcacaagaccttacctcttcgtggcagtcatgacgaaagctgcggttacactatccaactgcaataccggcggctgaagtg

SEQ ID NO: 46711 - DNA, 368 bp, Gossypium hirsutum
  Clone ID: LIB3196-030-P1-M1-B11
atgctgtccccgctgttccgcctgaggcgagtgacgctggccgccaacgaggtatacgtcctgggtccctcgccctcagtctcgtctccggcgcggctgctcgccccgttttccctctgagctgacctgctccgagccgtgggccgcccatggcgggggccgctccgaccacggccttcgggcaggcggtgatcggccctccgggctcagggaagaccacgtactgtctgggcatgagtgagttcctgcgcgcgctgggccggcgcgtggccgtggtgaacctggacccggccaacgaggggctgccgtacgagtgtgccgtggacgtaggcgaactggtggggctgggcgacgtgatggacgcgctg

SEQ ID NO: 46712 - DNA, 354 bp, Gossypium hirsutum
  Clone ID: LIB3196-030-P1-M1-B12
cccacgcgtccgatcatttccaaccccatccaagcctgaacccagattcaatttcaaattaaaagccatcaaaattttacctaccggcgaattccatcgattctcagtatccttaagctccggttgaaatcagggtcaacggtttcaatttcctctcaacaaaaacacagcagttgatgccttttctcatatagatggtttatacaaccttaataaataggttttctatggcgttctccctagctacatttctagaaggtgtcaatctccaagataagttttttgtttgttaatgtttctataaatttagtgcagcttgtctttattgtttttattggtgaggcctacggttac

SEQ ID NO: 46713 - DNA, 252 bp, Gossypium hirsutum
  Clone ID: LIB3196-030-P1-M1-B2
caattccaggagtgtcaggaacattgccaccagcaagaacaaaggccggaaaagaagcaacaatgtgtgagggaatgcagggaaaagtaccaggagaatccatggaggggagagagagaagaagaagcagatgaggaggaaactgaagaaggagagcaagaacaaagccataaccctttgcacttgcatcgcagatcattccaatctctattcagggaagaacatggcaatttcaaggtcctgcaaaggttt

SEQ ID NO: 46714 - DNA, 380 bp, Gossypium hirsutum
  Clone ID: LIB3196-030-P1-M1-B4
attggacagcatcattgctgaggtcaaggcccaatacgaggagattgctcagaggagccgggctgaggccgagtcctggtaccagagcaagtacgaggagctgcaggtcacagcgggcagacatggggatgacctgcgcaacaccaagcaggagattgctgagatcaaccgcatgatccagaggctgagatccgagatcgaccacgtcaagaagcagtgtgccaacctgcaggctgccattgctgatgctgagcagcgtggggagatggcactcaaggatgccaagaacaagctggaagggctggaggatgccctgcagaaggccaagcaggacctggcccgactgctgaaagagtaccaggagctgatgaatgtcaagc

SEQ ID NO: 46715 - DNA, 434 bp, Gossypium hirsutum
  Clone ID: LIB3196-030-P1-M1-B5
cgacactatataacaagttggaacaaaaaagcacgctggtaccgggccgcaatatccgggatctgaatgaagggctcctgcagcattgggggcggtatcaggggcggatcaacccatatatccttcgaataggccggagggtactgccgcgcccccagcacactacagcggaacgcctgtctgcattctccttccgcttctgctaacaaggagactaccggctggggggcggatattgatgaagcttgaatagcacaagaaggtccagtagtgggtaatgtgaaggaaataatggtgactatgatgatgattatcatcatgatattcttgtttcgatgtctaggttcaagtcaatgattgaaccaaaaatgacggagtgatcacctactaaaaaaatatcctgtgatggcttgttgatcagaaaggctgaaatt

SEQ ID NO: 46716 - DNA, 357 bp, Gossypium hirsutum
  Clone ID: LIB3196-030-P1-M1-B6
tcgctgagaaattctttgtgttccatggcgacaactattgcattctccctctcaaccccgatccgagcctgaaccggttcacttcaaagacccgatccaagtcgcagaaaacctgtttcttcctcctcctggggggctcccctcttcgggttgtcctccaaccccgattacctcaacgatggccatatcggcgtcacatcggagagaaatcccgaagtatccgaatcggactcagatccgggtcgatccagatccaaatccacgctcaggtgcttcaccgaggagaaagcgaagcaacttcgcaggaagacaatggagaacgcgtcgtttcacgatatgatgtaccactcggcgatc

SEQ ID NO: 46717 - DNA, 365 bp, Gossypium hirsutum
  Clone ID: LIB3196-030-P1-M1-B7
cggacgcgtgggcggcagaagaagcgaggatgatcctcaacagaggtacgaggactgccggaagcgatgccaattggagacacgtggacaaacggagcaagacaagtgtgaagacaggtgtgaaacgcagttgaaggaggagcagcagcgtgacggagaagatcctcagaggagataccaggattgccgacaacactgccaacaggaagaaagaaggctgcgttcacattgcgaacaaagctgcagggaacaatacgagaaacagcagcagcagcagcctgacaagcaattcaaggagtgtcaacagcgttgccaatggcaagagcaaaggcccgaacggaagcaacaatgtgtgaaggaatgca

SEQ ID NO: 46718 - DNA, 120 bp, Gossypium hirsutum
  Clone ID: LIB3196-030-P1-M1-B8
cttaggggtggctcctgctctaaccctcttcttcttcaacactctaacagtagaaaaacccaagccctaaaacctgacattcacaggtcaaaaaaaaaaagacaagagaaaaaacagaag

SEQ ID NO: 46719 - DNA, 361 bp, Gossypium hirsutum
  Clone ID: LIB3196-030-P1-M1-B9
gtggtgcatgacaggcctcatgctgctgacaagatcaggcctaatcccaatgcatctgcaaacaataacagcggagcacctgctaacaaggcacaggttgtaggttggccacctatcagatcatttaggaagaactcattgtcctcggctttgaagaacactgatgaagtcgatggaaaggcaaggcctggtgctttgtttgtgaaggttagcatggatggtgctccgtatttgaggaaagtagacttgaaaaactacactaaatatcaagagctgtcttctgcacttgagaagatgttcagctgttttaccataagtcagtatggatctcatggaacctcgggcaaggagctgttgagcg

SEQ ID NO: 46720 - DNA, 367 bp, Gossypium hirsutum
  Clone ID: LIB3196-030-P1-M1-C1
cccacgcgtccgctttgtttctttgatttgtttctaaggatttaatctctaaaccttcttcccatttcttcattacattgttcaagaacaaacaaaaaaaaaaagaagcaaaaaaacatggccaaagttctgttgttcattgctctatgtgtgcttccagctttggttagtgctacacgcattctgaataaccaattggtggttgaaggctatgtgtactgtgatacttgccgtgctggttttgaaacccctaagactagaaagctagctgatgccatggttaagctggtatgctccgacaggaagaccggcggagttgttttcgagaaggaaggatataccgacaaaaccggaaaataccagattc

SEQ ID NO: 46721 - DNA, 355 bp, Gossypium hirsutum
  Clone ID: LIB3196-030-P1-M1-C10
ggctcaagcaactttcacagccgaagatcaaaagattgagtcttttaggttactaagtggccacaaaatccctgcaattgggttaggcacttggagatccggttcacaagccgataactccgtcaagaccgccattgttgagggtggttatagacatatagatacagcttgggaatacggtgttcaagaaagtgttggccatggagtcaaagcagcaatacatgcaggagtagaaagaagggatattttcattacatccaagctatggtgcaccgagttgagtccagaacgtgttcgacctgctttattgaacaccctcgaagaactccaacttgaataccttgatctttacctg

SEQ ID NO: 46722 - DNA, 324 bp, Gossypium hirsutum
  unsure (1)..(324): unsure at all n locations; Clone ID: LIB3196-030-P1-M1-C11
atggcggcggcagggctgagccagcgacgccctccattcactctccgcgcccgctctccggctgtccgcccgttccgctgcccgccccgccaccatgacggaacaggccatctccttcgccaaggactttttggccggaggcatcgccgccgccatctccaagacggccgtggctccgatcgagcgggtcaagctactgctgcaggtccagcacgccagcaagcagatcgccgccgacaagcagtacaagggcatcgtggactgcatcgtccgtatccccaaggagcanggcgtgctgtcgttctggagaggcaacctggccaa

SEQ ID NO: 46723 - DNA, 354 bp, Gossypium hirsutum
  Clone ID: LIB3196-030-P1-M1-C12
cccacgcgtgcggcgataccgccatacgagaggagggtctcaagataatggcctcgaggaaactttctgctccatgaggatcaaggagaaccttgctgaccctgaacgtgccgacattttcaacccacaagccggtcgtatttccaccctcaacaggtttaacctccccatcctccaacgacttgagctcagcgccgagaggggtgtcctctacaacagagctggtttgattccacaatggaacgtcaacgctcacaaaatactctacatgttaagaggctgtgccagagtccaagtggtgaaccacaacggcgacgcagtgttcgacgataacgtggagcaaggtcagctcct

SEQ ID NO: 46724 - DNA, 380 bp, Gossypium hirsutum
  Clone ID: LIB3196-030-P1-M1-C2
atgggaagattccagggtcccaacagcttcagagttgcaaagcctgtagaggtgacgtgtgtttttcccctggctgctttggaaattatggaaaaaaatcaaataccaaggaagaaaaatctataatgaaattagatgtggatttctttttatgtattcagcttggggcttataatacttccagtacccaaagctctgcctgcttaggactctgcccagccaggaaggaaacctacaggaggaagaatggctgcagggtggctgacaacctggtcacagaactccgtgaccttccaggaagtggcagtggacttttcccaggaggagtgggcattgctggaccctgctcaaaaaaatctatacaaagatgtgatgctgga

SEQ ID NO: 46725 - DNA, 371 bp, Gossypium hirsutum
  Clone ID: LIB3196-030-P1-M1-C3
cccacgcgtccgattaaataactttttaaataaaaaagataaaaataaaattttaaaactaaaatattattagatttcttcttctctcactttgaacaaatagggtattaaaaagaaaagggaaatcgagggattatctattccctcttcgtttcctcctatgtaaaaatataatatccaaataagagtaatgtaaagctcaaatgctacaaaagggatgaattgatgattaaaaactttgtaataaagattgacaaataaaaattaatttaaaaattttaaagtgattcgactctaattgcctatatgtattaccttaactgtttacaattaaagatttttcaaatttactaatttgaaaaattttaaat

SEQ ID NO: 46726 - DNA, 357 bp, Gossypium hirsutum
  Clone ID: LIB3196-030-P1-M1-C4
cccacgcgtccgctaaatcttcgctaattgtttatgcccattctgctctcccataaaaaccgttagagatattcctagggtttgcatttgcggtttggggtatagggttttagacaacgccaaatcttggatttgaggaatggcgactgcgacgggacaggtgaacgcgaagagaaagccggtgttcgtgaaagtggaggatttgaagcccggtactagtgggcacactttgatcgtcaaagtggtggagatgaccccagtcaagacttccgccaggcccaacaggtcccgtgctctcctttctcgacctgtccctccggtccggatcgctgagtgcgtcgttggggacgagactgg

SEQ ID NO: 46727 - DNA, 373 bp, Gossypium hirsutum
  unsure (1)..(373): unsure at all n locations; Clone ID: LIB3196-030-P1-M1-C5
atcggtatgaaggggacccagctcagttccggggcctctaagtctcctccagcagcagagcctggggggccgcaggagcaggctgggagggaagaagccttcaacatggactctgcctactcagaacaagctgcggtgctcctgcagaagagcaggccatcccagggaggcacctctgcctggggcaagtgttccctgccgaagtttaccatccccaaaggcagacttggcgtgacgaggataggagacttgtccctgcaggatatgaggaaggtaccttctctggccctcatagagctgaccgcgctctgtgacgtacttggcttggacctgaagaggagcaaggcggngaagtggaaagcggcagaaactc

SEQ ID NO: 46728 - DNA, 359 bp, Gossypium hirsutum
  Clone ID: LIB3196-030-P1-M1-C6
gttccgtggtaaaatgagcaccaaggaagtggatgagcagatgttgaatgtccagaacaagaactcctcatactttgttgagtggatcccgaacaatgtgaaatcgaccgtttgtgacatcccacccactgggctgaagatggcatcaacatttattggcaattcaacatccatacaggagatgttcaggcgtgtgagtgagcagttcacagctatgtttaggaggaaggccttcttgcattggtacacaggggaaggcatggatgagatggagttcactgaagctgagagcaacatgaatgatctggtctccgagtatcagcagtaccaagatgcaacagctgatgatgaagagtacg

SEQ ID NO: 46729 - DNA, 293 bp, Gossypium hirsutum
  Clone ID: LIB3196-030-P1-M1-C7
acactatagaacaagtgggaacgaaaaagcacgctggtgcccggccgcaatttccgggatcagcacatccaccaccatcaggagccacagcagctgccgcaggggcttcagtgccggctcagacaggctacctggggtcagacgctctggcttaagcagcgcatccgggtcccggtccaggggcatgggctgcctgggtcgcgcatgtggaagagctggctgtggcaaccctaacctgtatgggctgtagggctccaagaggatctccatcggagggggctaactcgtccata

SEQ ID NO: 46730 - DNA, 358 bp, Gossypium hirsutum
  Clone ID: LIB3196-030-P1-M1-C8
cggaattgatctgactacactcggattaaatttgaattcatcggaaaatctttacaagacatttggttctccatggtctgatgaaccagctaagggtgacccggagttcactgtgccacaatgttattacgctaagcaaccacctcctttacaccaaggttatttttcaaagttcactgtggacacattggtctatatattttacagcatgccaaaagatgaagctcaattatacgctggaaatgaactttacaatagaggctggttttaccacaaggagcactggggttggatcataagggttcccaatgtggagccactagtgaagacgaacacgtacgagagaggttcttatcac

SEQ ID NO: 46731 - DNA, 352 bp, Gossypium hirsutum
  Clone ID: LIB3196-030-P1-M1-C9
ggtttgggctctgggatctcccttttcatagccaccaatatctgtgaaaacataatctggaaagcctttagccctacaacaatcaacagcggtcgtggggctgaattcgaaggtgctgtcattgccatgttccatcttttaataaccaggacggacaaagttcgagcacttcgtgaagctttctaccgacagaatcttccaaacgttacaaatttactcgctacggttttgatcttccttattgttatctacttccaaggtttccgagttgttttgcctgtaagatcgaagaatgctcgagggcagcaagggtcggatcccattaagctattctacacctgcaacatgccca

SEQ ID NO: 46732 - DNA, 385 bp, Gossypium hirsutum
  Clone ID: LIB3196-030-P1-M1-D1
atgttaagtggaaaaatacacagtttggtaaaatagattccacatttatttgtgggttttttcccctcctttctttccacagcacttttgatatcaagcaagtggcttcctttttgagatattaaaaaaaaaaaaggaagaaaagtaaatgaagcccaactacctaaccctttcttatttgtatttgttttagtattgtgaagttgtgttaaatagtactagctagaaataccaatttctggttatcatttctcttccctgtggcacttgacattttaattgtcttaaactttttgaagtacatcttctggccccttgagtactgccagaggcaaaagatgtttgtttcttactcattccacttttgtctcctgggatcccttct

SEQ ID NO: 46733 - DNA, 371 bp, Gossypium hirsutum
  Clone ID: LIB3196-030-P1-M1-D10
atgcgaggccgggtctcacaccttccagaggatgtacggctgcgacctggggcccgacgggcgcctcctccgcgggtatagccagtacgcctacgacggcagggattacatcgccctgaacggggacctgcgttcctggacggcagcggacatggcggctcagaacacccagcggaagtgggaggcggcgggtgtggcggagcggttcagaacctacgtggagggccgatgtgtggagtggctccgcagatacctggagaacgggaaggagacgctgcagcgcgcggacccccccaagacacatgtgacccatcaccccgtctctgaccatgaggccaccctgagatgctgggccctgggcttctaccctg

SEQ ID NO: 46734 - DNA, 346 bp, Gossypium hirsutum
  Clone ID: LIB3196-030-P1-M1-D11
cttaaagctcttcgagtcaagagcaatcacccattacattgctcatgaatacagcgacaaagggacccaactcttaatccctggctctaacaaggatatggctgtcttagaattatggaaggaagtggaagcccaccagttcgattctccatcttcaaaaatagcctgggaggcgttttacaagccatttttcggcatggttaccgactccgcggctgtggaggaaaatgaaggtaagcttgccaaagttcttgacgtgtacgaggctcgattgacacagtcaaaatacttggcaagtgactgcttcaccttggccgacctgcatcacattcccaacattcaatgc

SEQ ID NO: 46735 - DNA, 369 bp, Gossypium hirsutum
  Clone ID: LIB3196-030-P1-M1-D12
atgcacggcattatttttagtagttctgtttttctccaattctttgtctcattccctcctcccttcttttctccttgtcactcacagtagaaggaattcagactctgaggatgaggactcaggttctgccagaagcgccaccgtttttagtagagcacaaaaagcagagcgtaggctagatggcagctgccaaagaccttcactcttgctggaattagctaccaaacgggctgtaaaatcaccggactcccatgcagccaggagaagcagtagtgcttcggatgagcccaggtgcccctgtctgcatgagcctgcctgctgggggtctggcctcagacatccctctgcccgcttctgctgctccattaa

SEQ ID NO: 46736 - DNA, 370 bp, Gossypium hirsutum
  Clone ID: LIB3196-030-P1-M1-D2
tcggttgtttcttgtgctgatatccttgttctgtctgctagagaaggcatcgtttcgttgggaggcccttacattcctctcaaaactggaagaagagacggtagaaggagcagagcagatgttgtggaggagtatcttccggaccacaatgagaccatctctggcgttctcgacaggtttgccgccatgggtattgacacccctggagtcgttgccctcctaggagctcacagtgtcggcagaactcactgtgtgaagctggtgcatcggttgtacccagaggttgaccctgccctcagccccgaccatgttccacacatgctccataaatgccctgatcaaatcccagaccccaaggccgtccagtatg

SEQ ID NO: 46737 - DNA, 385 bp, Gossypium hirsutum
  Clone ID: LIB3196-030-P1-M1-D3
atgatttccctctgtgggtaagtccacattcttgagtctgatgacctccacggccagcgaggcagcgtcctatgagttcaccactctgacgtgtattcctggggtcattgaatacaaaggcgccaacatccagctcctggaccttcctggaatcattgaaggcgcagcccaaggaaaaggccgtggccggcaggtgatcgctgtggcacgcacagctgatgtcgtcatcatgatgctggatgccaccaagggagaggtgcagaggtctctgctggagaaggagctggagtctgtgggcatccgcctcaacaagcacaagcctaacatctacttcaagcccaagaaaggcggtggcatctcctttaactcaacagtcacgctgacc

SEQ ID NO: 46738 - DNA, 373 bp, Gossypium hirsutum
  Clone ID: LIB3196-030-P1-M1-D4
attgatgatggcacaggccagaaacagatctggagaattgaaggctccagcaaagtacccgtggaccctgccacatatggacagttctatggaggagacagctacatcattctgtacaactaccgccatggaggccgccaggggcagataatctacaactggcagggtgcccagtctacccaggatgaggtcgctgcatctgccatcctgactgctcagctggatgaggagctgggaggtacccctgttcagagccgtgtggtccaaggcaaggagcccgcacacctcatgagcctgtttggtgggaagcccatgatcatctacaagggcggcacctcccgcgagggcgggcagacagcccctgccagcaccc

SEQ ID NO: 46739 - DNA, 355 bp, Gossypium hirsutum
  Clone ID: LIB3196-030-P1-M1-D5
cggacgcgtgggtatttccaatgctagctgcactaccaactgtcttgctccccttgctaaggttattcatgacaaattcggcatcattgagggacttatgacaacggttcattctattacggctacacaaaaaactgtggatggtccatcaatgaaggactggagaggaggaagagctgcttcgttcaacatcattcctagcagtactggagctgctaaggctgttggaaaagtgcttcctgccttgaatggaaaattaactggaatggctttccgtgttcccaccgttgatgtttcagtggttgacctcacagtaagactagagaaagcagcctcttatgatgaaatcaaagct

SEQ ID NO: 46740 - DNA, 358 bp, Gossypium hirsutum
  Clone ID: LIB3196-030-P1-M1-D6
cccacgcgtccgcaagtgtacaggtcaaatattaatatagttaaatttacaacgaaacactttggaagtattttcaaagatcgtacccaagggattgctaagttggtgaaaactattattaaattaattatctaaaaaattactagtctaatcaagttacaaattagtagtgcaaactctaaattaagatgaaaaaaaactaattaaactaaaactaaacctaagttaaactatcgaaacttcctattcctaatttcaacgatgtgagctacttagcctggaattgattgaattgttaattatcaactaagcaaataattacacttaattgagttatttaccatctttaactaagaac

SEQ ID NO: 46741 - DNA, 376 bp, Gossypium hirsutum
  Clone ID: LIB3196-030-P1-M1-D7
atgcctgtctttgacttccctcccgaattctacgagcatgccaaggctctgtgggaggacgaaggagtacgtgcctgctatgaacgctccaacgagtaccagctgattgactgtgcccagtacttcctggacaagatcgatgtgatcaagcaggctgactatgtgccgagcgaccaggacctgcttcgctgccgcgtcctgacttctggaatcttcgagaccaagttccaggtggacaaagtcaacttccacatgtttgacgtgggtggccagcgcgatgaacgccgcaagtggatccagtgcttcaatgatgtgactgccatcatcttcgtggtggccagcagcagctacaacatggtcattcgggaggacaacc

SEQ ID NO: 46742 - DNA, 359 bp, Gossypium hirsutum
  Clone ID: LIB3196-030-P1-M1-D8
gggtttcctcaagttcccatctttctttggctttcgcatcagctccatggatcgggcgcagctcctcctcgtaggattacctctcttcctcttcgccactgatctcctcagcctcttcactcctccgcccccaaagccgccgtcccatcaccatcaccatcaccaccatcatccccacctacccaaacctccactcaatcctgaaaccctagatatttctttacagaaacccagcgctagtggaggaatcggctatggcagcacggtgaatatcaatttctgcgcttcatgctcttacaggggaaatgctgtgacaatgaagaagatgttagaagcccagtttcctggaattgatgtaa

SEQ ID NO: 46743 - DNA, 315 bp, Gossypium hirsutum
  Clone ID: LIB3196-030-P1-M1-D9
taaacacgtgagttggacacactgagaacttgggccaccaaatcaacatgttaaagctaaccataccaattgctaaacctgacctgataataacccgaaacaattactaaacttcttgcctgctggacaggaaaaaactaaagcatacttaactaatgttcatgattgatattcttgatgctgtcttcaatacacaacatgagcaactagattatcctgtttgcgtgaggcataagacatataaggcagtatggacagagaaagccccgtataatctgcctagaacaaataaaaccatctagccaaggatctact

SEQ ID NO: 46744 - DNA, 383 bp, Gossypium hirsutum
  Clone ID: LIB3196-030-P1-M1-E1
atcaaaaacacagtaacagcagcagcggcagcctgactaacaccccagaacggggcagtgatgaggacattgaaccactgctgcaagatagcagcatttgggagctctcttcatttgaggagcctgggaatcagtgcactgagttgtaaactcggcagaaggtgggattctgcatacgccatctctgagagccatggagggagccacacccctggtgacttcatggtgctggatgggagatgctagcggcatccttcagggccaagtttgataaataccaccaccatcgttctgctcttcctcctcctgtttttttttttttttttttctcttacattttttttcctgtttatacattagaataagataagatttgaaatact

SEQ ID NO: 46745 - DNA, 370 bp, Gossypium hirsutum
  unsure (1)..(370): unsure at all n locations; Clone ID: LIB3196-030-P1-M1-E10
atccaaggtggacagtcttaatgatgagatcaacttcctgaaggagctgtcccagatgcagacccacgtcagcgacatgtccgtggtcctctccatggacaacaaccgcaacctggacctggacagcattattgctgaggtccgtgcccagtacgaggagattgcccagaggagcaaggctgaggccgaggccctgtaccagaccaaggtccagcagctccagatctcagttgaccaacatggtgacaacctgaagaacaccaagagtgaaatcgcagagctcaacaggatgatccagaggctgcgggcagagatcgagaacatcaagaagcagtgccagactcttcangcatccgtggctgatgcagag

SEQ ID NO: 46746 - DNA, 349 bp, Gossypium hirsutum
  Clone ID: LIB3196-030-P1-M1-E11
atacttaaaatgatgtatagatcaaccaagctctctcttccaagactttctctgcttctctctccctcaacactcaatattctcaactcaactatcttttccttcttctacactaactacaggggcaaaaccctaaatttttgaaaattttcattctacattttaaattttttttaaaatttttaactaaactcttccaagttttttaaaaattctcattatgctcctaaaattttaaaaaaaaaaagtttagttaggcccccaacacttaccccccagatcccacactgtctaactacatcctactacactccacctatagatgaaccgaccaccataatctcaacct

SEQ ID NO: 46747 - DNA, 352 bp, Gossypium hirsutum
  Clone ID: LIB3196-030-P1-M1-E12
cacaaacagctcagaaggatgtggaagttgttcatgtgtcatctccagaactgacaacatcagcccctgcactagcacctgggcctgcaaaagcatcacaacctgtgttagcacaagcaccgcaatcattgtcggcgcaagcagcgccaccattattagcacaagcaccaccacaaccatcaaaaacagaaggacaggaacctatattgccttcgccttcaccctctgatcataagctacatggagctccaatgcatgctcatcagtatcataattatagaggaggccgtgaaagaggacgaggaagaggaagaggaagaggaaatgagatttcacgttcggcaaccaaatt

SEQ ID NO: 46748 - DNA, 380 bp, Gossypium hirsutum
  Clone ID: LIB3196-030-P1-M1-E2
atgagaacttcaaattaaagattaaaaactgaacatttgtgattatcccttctgccctcctaagaacccactaaaactatagtaaagaagtaaaagagagaagagaatgaaaataaatagagaaagattatcagtgaatgaatgatttctacagttttctgggggacagaaagcagatagaggaatggtcattgaaacacagcagagcaagtcagtttcatctgttacttatttatacctcaaattgtactcacaccacaacagtggcttataaaatcacttatcattacaaattgcaatagaaagtgtcaagagtatgtctcataggataagtattattatgtgaaacatttattttgaggaggatgcagataaagaaa

SEQ ID NO: 46749 - DNA, 362 bp, Gossypium hirsutum
  Clone ID: LIB3196-030-P1-M1-E3
agacacaccacccttcttctttttcttctctttcttccatgtccttgtcttctgaatcccaacagcagcaccaacttcgctaccatggttatcattcccaggcgaatcacccctttatgtatccccatgcatcgagacctccaggggttggactgtcacctcaagaaaacaccacacattctctcctcggctctggctcttactcccagactaacatggattacaggagaaacagttatgtttatgggttgaaagaagaagtagatgaacatgcttttttctctgaaccttccggtacaatgaggagtttctcaggttcatctgtggatgattcatggcaacttgcaccactaacaatgagc

SEQ ID NO: 46750 - DNA, 357 bp, Gossypium hirsutum
  Clone ID: LIB3196-030-P1-M1-E5
tatgcagtagtgaagaggagaggaagaaattgctccaatgttcctgttgtgggaaacttgtgcatcctgcttgtttagttccacctattacagatttagtccctgagaagtggtcatgttattcctgcaaggagaaaacagatgaatacatgcaagcaaggcgtgcatatatagaggaacttttaaagaggtatgaacaagctttgcagcgcaaatcaaaaattttggatataattcgctctttggatcttccaaacaatcccttggatgacattattgatcagcttggaagtcctgataaggttgcggaaatgacagggaggcgcggcatgcttgtaagggcttcaagtgggaaag

SEQ ID NO: 46751 - DNA, 356 bp, Gossypium hirsutum
  Clone ID: LIB3196-030-P1-M1-E6
gggaagcctatcacactggaggaagcagagccaataattagccgcctatcgtctctaatatacaaggcagaagatgctcattatgacattgcaactacgatagtgacgatgaaatctcatattcaagctcttgaagagcgagccaatgctgcaactgttcagagtacagtgtttggacaattggtagctgaggcatttcctaagagtcttcactgcctccttctcaagctttcggctgattggcttaaaaggccgccccttcaagaccttgcaaacgagcggagaaactctcctcgactcgtggacaacaatctctatcatttttgcatattttcagacaatgttctggctacctc

SEQ ID NO: 46752 - DNA, 344 bp, Gossypium hirsutum
  Clone ID: LIB3196-030-P1-M1-E7
caaattgaaaacttcagtttgagatttggcaaatcaagcgaaaatgctaacagcggatatacctcccaatcaaactatttacatcaagaacctcaacgagaagatcaaaaaagaagaattaaagagatccctttatgctttattttctcaatatggaaggattttggatgtcgttgccttgaagacgcctaagcttcgtggacaagcatgggttgtgtttgatgaattgacttccgctagtaacgccttccgtcagatgcaaaatttcccgttttatgataaacctatgcggatacaatatgcaaagacaaagtcagattgtatcgccaaaaatgatggaagct

SEQ ID NO: 46753 - DNA, 356 bp, Gossypium hirsutum
  Clone ID: LIB3196-030-P1-M1-E8
atgatatttttatttattcatgagatgagtctgagcatgccgagcatttgagaattgtattgaaaactctgtgtgaaaagcaattatttgctaagtttagcaaatgtgaattttggcttcgggaagttggatttttgggacttgttgtattagtcgagggtatcagagttgatcctagcaaaatttcaactgctgttgaatggaaacctctgagaaatgtatttgaagttagaagatttctaggactagctggatattacagaagattcgctaaaggattctcgatgattgctacacctatggcaagattattgcaaaaagatgtgaaatttgagtggtctgagaaatgctagcaa

SEQ ID NO: 46754 - DNA, 370 bp, Gossypium hirsutum
  Clone ID: LIB3196-030-P1-M1-E9
atgccaaagccgttctctcagttctggcagcccctgctcaggggcctgcactcccagaacttcacgcaggccctattggagaggatgctctctgaactgccagccttggggatcagcgggatccggcctacctacatcctcagatggaccgttgaactgatcgtggccaacaccaagactggacggaatgctcgccgattttctgcaggccagtgggaagcaagaaggggctggaggctgttcaactgctccgcctcccttgactggccccggatggttgagtcctgcttgggctcaccttgctgggccagcccccaactccttcggatcatcttcaaagccatggggcagggcctgccagacgaggagc

SEQ ID NO: 46755 - DNA, 296 bp, Gossypium hirsutum
  unsure (1)..(296): unsure at all n locations; Clone ID: LIB3196-030-P1-M1-F1
ctcgaactggtctttcctcgaaataagctcgaccaaggactcttccacgatcatggcttctgagattattggacccctcaacatttcaattcatgtttgacccatggcttcaacccatccatgaaatagaagaatgtctcattctcactaaaatccataatttggagtactaaactccttcacctacactcgaattgtgccttattgcgagaatcgatgtaacttacattaagcctnctccttggcatattgagggtaaaaattgctcattgaactctttatagaaatactcaaaa

SEQ ID NO: 46756 - DNA, 353 bp, Gossypium hirsutum
  Clone ID: LIB3196-030-P1-M1-F11
cccctttcaaagaaacctaggtgcttaccccaggtactgcgccgctcttgcgtctacgacctccacccaggctccgattgcaacggagagggtcagagatccgacggcttcctacgacaaggtacgactccttccttttcttcccttttttgttgtttcgcttatagatataaaacagaaatgaaaagaaacggccaaaagacaaagaaaaaccaaggaaaaaaaactaccatcacctttcgaatttttgatttttttatttctctctgaatctttttttgtacacaatatgcctgtgtgtctgtgtgttgatatcgtaaaaaaggaaactttttacagattttgttggctct

SEQ ID NO: 46757 - DNA, 372 bp, Gossypium hirsutum
  Clone ID: LIB3196-030-P1-M1-F12
atgtttctttaacgatatgaataagtatataaactattgcaaccttaaacgagtcatacacgcatgtcgagaaccacagagtgttaataatggtcacctttcccaacttatccagtgctcactaggaatggcagctctgttttgatcggttaaaaacatgtcaccttacagtaacgactttccacaagcccaaatcatatggctgagctggcttctcaattcctaccctaattactcctcatgcttcttagagcttctacatttttgggagcatcatttcattgatcgctgactttgactgtatagctcttggcaattatactgtatactctgccaagagtggaatgtctgacgtcagtgcctacggattcc

SEQ ID NO: 46758 - DNA, 347 bp, Gossypium hirsutum
  Clone ID: LIB3196-030-P1-M1-F2
cttactgaggcactttgtggcttccagtttatactgacccacctagatggcaggcaacttctcattaagacccatcctggtgaagtggttaagcctgatcaattcaaggccataaatgatgaagggatgcctatgtatcaaaggccattcatgaggggtaaactatacattcactttactgtcgattttcccgactccttggcccccgagcagtgcaaggcactcgaggctgtgctacctccgaggacctcagtccagctgacagacatggagctggatgagtgtgaagaaacaactctatatgatgtcaacatcgaggaagagatgcgtaggaagcaagcgcaagc

SEQ ID NO: 46759 - DNA, 359 bp, Gossypium hirsutum
  Clone ID: LIB3196-030-P1-M1-F3
cttcctgtaggttatgacctggtatggaggaattgtctagatgactacaccacaccggtctctatttggtatccgcgagcacctgatggattcttctccctgggatgtgtagctgttgcgggttttgaagagccagaagctgatttggtacgttgtgtggcagaaacagttgcagaggagacaacatttgaggagcagaaggtatggtgtgctccagaatcatatccgtggggttgtcatgtataccaagttcaaagtgacgcacttcattttgttgctctaagagaaactaaggaagaatccaactggaaaccctcaagggttcgtgatgatttccagtctccacgatcatcagaatc

SEQ ID NO: 46760 - DNA, 356 bp, Gossypium hirsutum
  Clone ID: LIB3196-030-P1-M1-F6
aaactcctccatacatagatttttcagaacagcctttgcaagtagccagcagctttttcctccagtacttggtccccttttccagggaatacggtcgttctttctttctttcttttttgcaggtttccatcatccgggatgatctgctactactttgtgagcctgacaatgggcgtcggtttcttcatggctgaatttccctgagatgggttctggatttttgcttagcctttgtgcatatttgctttaggcgaaagcttttgcttaatattgtccttatttaaagtaggttttccaatattgggttgtagtttgaggttgctttttgcagtttcaaagcgtggtgttgcaagctt

SEQ ID NO: 46761 - DNA, 356 bp, Gossypium hirsutum
  Clone ID: LIB3196-030-P1-M1-F7
aatcaatccagttatatatatcaaaaaacgtaccatggcaaagttcgctctcctcgtagccactttcgctctcgctttcttcctcgtcaacgcctccatctaccggaccacggacggcgacgaagaaaactggtaccgacacgatcggcgatcgtgtcaagaccagatatggcagcaaggctacctcccaaactgtcagtggtacatgaacgaacaggccggccacagccacagcggatatggcacccactacctcaactcgtgctgctacgagctccagaacctaaggcattgccggtgccaaggcttgaaacaagcgttaggacaacagctgaagctgcaaggagtacggtggg

SEQ ID NO: 46762 - DNA, 332 bp, Gossypium hirsutum
  Clone ID: LIB3196-030-P1-M1-F8
atgggcttcctggtcttcatcggacagtgaaatttgtttgggtgtccaaacaaaatatgaaagagctgtaatacttcctgtagtgtatttcaaaggattgtgtcctcctcttccttccctgtggtcaatctccacctgtctacccttccgtgacaatggttcaatggaagagactctgccggcagcattacttgtgggccctgggctgctatatgctgctggccattgtggctctgaaactttctttaaggttgaagtgtgactctgaccacttgggtctggagtccagggaatttcaaagccagtactgtaggaatatcttgtttaattcc

SEQ ID NO: 46763 - DNA, 352 bp, Gossypium hirsutum
  Clone ID: LIB3196-030-P1-M1-F9
cggacgcgtgggctcttttcctccaggaaacccaaaggctgcctcgatccggaaaatttcagagagtttaagcttgtcaagcgccagcagctgagtcataatgtggcgaagttcacatttgaacttcctactcctacttcagttttgggtcttcccatcggacagcatataagttgcaggggcaaggatagccaaggtgaggaggttattaaaccatatacacctactacattggattctgatgttggtcattttgaattagttattaagatgtatcctcaaggaaggatgtcacaccatttcagagagttgcgtgttggtgattatcttgctgtgaagggtcccaaggggc

SEQ ID NO: 46764 - DNA, 370 bp, Gossypium hirsutum
  Clone ID: LIB3196-030-P1-M1-G1
atgagaaatactcttaaggtaggatcaagccacatagaaaacatttaataaaaagtaacaaattttgccacataaatgctgctagtcaagaagatgtatgcaaagtaagttgcatatatttttaaaaatcagaattgtcaaatctccagacatagatagagctagaaaggtcaacagcaggtggaacaggtgactgtccagaaggcagcaactgtttggcatcactgtgctgttatgtgggacctgtgtcgggttgggtaacagatcatgctcactgactgtggtggccaggagcttcagaggggcctgtgaatcacggatgggggatgagggtagagacgagacttttcagtttaaagagtgttcccct

SEQ ID NO: 46765 - DNA, 352 bp, Gossypium hirsutum
  Clone ID: LIB3196-030-P1-M1-G10
tttcactgatctaaacatcctcctcaacctagtttccatcggcactctctttgtgttctacatggtatccaatgctgtcatctacaggcgatatgttatggttgggacaacaaagccatggcctaccttatccttcctatgcttattctccctcacatccaccattttcaccctcgtgtggcattttacgccaccaggcaagcctaagcccttcttgcttggtgcttgtgttgtgattgccatttccatattacaagttttccattgtatggtaccacaagcaaggaagcctgcattttggggtgtccctttcatgccttggttaccgtccatatccatcttcttgaatgtt

SEQ ID NO: 46766 - DNA, 368 bp, Gossypium hirsutum
  Clone ID: LIB3196-030-P1-M1-G11
atcctttttaaaaaatagatttggtactgtgagatattgctaatatgtccttatggggatgggtgccacaaatagaaaatatgaccagatcagggatttgaatgcacttttgctcatggtgaatatagatgaacagagaggaaaatgtatttaaaagaaatacaagaaaagaaaatgtgaaagttttacaagtagagggatggaatgtaatgtttaatgttgatgtcatggagtgacaaaatggctttgctggcactcaaagctcctcacttagctatgttctgagacttttaagagttataaggtataactataaaactaattttttttacacactaaatgggtatttgttcagaatagtgaagtta

SEQ ID NO: 46767 - DNA, 321 bp, Gossypium hirsutum
  unsure (1)..(321): unsure at all n locations; Clone ID: LIB3196-030-P1-M1-G12
atgaaccattgaaaaatttgagaaggaggctgctgagatgggaaagggctccttcaagtatgcctgggtcttggataaactgaaagctgagcgggaacgtggtatcaccattgatatctccttgtggaaatttgagaccagcaagtattatgtgactatcattgatgccccaggacacagagacttcatcaaaaacatgattacagggacatctcangctgactgtgctgtcctgattgttgctgctggtgttggtgaatttgaagctggtatctncaagaatgggcagacccgagagcatgctcttctggcttacacact

SEQ ID NO: 46768 - DNA, 363 bp, Gossypium hirsutum
  Clone ID: LIB3196-030-P1-M1-G2
caaaatactctacatgttaagaggctgtgccagagttcaagtggtgaaccacaacggcgacgcagtgttcgacgataacgtggagcaaggtcagctactgacggtgccacagaactttgcgttcatgaaacaagcaggaaacgaaggaaccgaatggattttcttcttcaccaatagcgaagccaccaacaccccaatggctggaagtgtctacttcatgcgagcactgccggatgaagtggtggcagcgtcctatcaggtgtcaagagaagatgcatggcggattaagttcaacaacaaaaacacctttttcttcactgcttcacagtccgagaagagggccgatgcttaaacttcatccga

SEQ ID NO: 46769 - DNA, 189 bp, Gossypium hirsutum
  Clone ID: LIB3196-030-P1-M1-G3
ataagctctaggatcttcatccaaactttgtaatagtttataggcactacgaactgtatactcacccgaaggctcaccgctccatgccagaagatcatcgtgaggctcaactgccagtggaatgcgaagaatcctatcagctacttcttctggaaaggtagactcaatcaactcttttttccacagtcg

SEQ ID NO: 46770 - DNA, 377 bp, Gossypium hirsutum
  Clone ID: LIB3196-030-P1-M1-G4
atgttcatactctgtcctgactcctttgtaacctgggaggcagtctgcttgggcccacgtctctgaagctgctcagtaaatcagctcaacggaatccagggagctctgttcggttcctgagttatgtgcccagtcacagtgctgcggctttaggaggagctcctaagaggaccgtctgcggctcagttacaccctcctgacgtgagccccctccctggctgggggctcactccctccgctaaagcccttgttcgtcctctgccagggcccaagaggtgcagcttcacggaggccaggggcgagaggaggcccagctctccccggctgcccatgtctgacgcactgcctcggaagcacctgtggccactgggcggctt

SEQ ID NO: 46771 - DNA, 377 bp, Gossypium hirsutum
  Clone ID: LIB3196-030-P1-M1-G5
atcgctcccccctccccccgagcgccgctccggctgcaccgcgctcgctccgagtttcgggctcctgctaagctagcgccgccgtcgtctcccttcagtcgccgtcatgattatctaccgggacctcatcagccacgatgagatgttctccgacatctacaagatccgggagatcgcggacgggctgtgcctggaggtggaggggaagatggtcagtaggacagaaggtaacattgatgactcgctcattggtggaaatgcctccgctgaaggcccagagggcgaaggtaccgaaagcacagtaatcactggtgtcgatattgtcatgaaccatcacctgcaggaaacaagtttcacgaaagaagcctacaagaagt

SEQ ID NO: 46772 - DNA, 378 bp, Gossypium hirsutum
  Clone ID: LIB3196-030-P1-M1-G6
atcgtgaagcgttccatatttttgatgttagaattgatcatccttcagcctgtgagtgggaactgtgttctttcctctgaggggttgttcatgaggacctccgcctgctcttggagacccacctgccatccaaaaagaagaaagtactcttgggagttggggatcccaagattggtgctgcaatacaggaggaattagggtacaactgccagactggaggcgtcatagctgagatcctgcgaggagttcgtctgcacttccacaatctggtgaagggtctgactgatctgtcagcttgtaaagcacagctggggctgggacacagctattcccgtgccaaagttaagtttaatgtgaaccgagtggacaatatgatca

SEQ ID NO: 46773 - DNA, 356 bp, Gossypium hirsutum
  Clone ID: LIB3196-030-P1-M1-G7
gagaaatcagcttgaaaataaaaagtgttgtttagatcaaaagaagagattttaaacaatggcgtctaatgttaagccagtgttgggttacgccatattttacgttaaggacgtagcgaaatccgttgacttctatgcaaaagcctttggttataatgttcgtcgcttggacgagtctcacagatggggagagctggagagtgggcagaccaccattgcctttaccccaaagcaccaacacgagaccgatgaactaaccggtgaagtccaggttccaaaatctgatgtccaccgacccccactggaactctgctttatttactacgacgttgacgctgcattcacgcgggcagtgg

SEQ ID NO: 46774 - DNA, 355 bp, Gossypium hirsutum
  Clone ID: LIB3196-030-P1-M1-G8
aagaacaacaaagaatagcattaaaaaacttaaaaacgaatctgaatctcatttttttttcagatttcagatacttgataggcttgtctacatcagggtctaacgaatccatatctataggtctaaaaatctgcaactgaaagataaccaggatgcccaaagtcaaggatattattagattgagtagaggttatttttagaattgggaatgtatacatattttcgagctttttaaagcttcatttatattttcgatgattcatttatactccaatttctaatactctgtgagctcctttttgtttatttttccgaaataatttatgggtttgcttacgtaagctctctgcaagta

SEQ ID NO: 46775 - DNA, 373 bp, Gossypium hirsutum
  Clone ID: LIB3196-030-P1-M1-G9
atcgccgccgccccctcggcccgccatgctgctatccgtgccgctgctgctcggcctcctcggcttggccgccgccgagcccgccgtctacttcaaggagcagtttctggacggagacgggtggacttcccgctggatcgaatccaaacacaagtcagattttggcaaattcgtcctcagttccggcaagttctacggtgacgaggagaaagataaaggtttgcagacaagccaggatgcacgcttttatgctctgtcggccagtttcgagcctttcagcaacaaaggccagacgctggtggtgcagttcacggtgaaacatgagcagaacatcgactgtgggggcggttatgtgaagctgtttcctaatagt

SEQ ID NO: 46776 - DNA, 326 bp, Gossypium hirsutum
  Clone ID: LIB3196-030-P1-M1-H1
cccacgcgtccgcccacgcgtccggggtcctatggagatggcggtgggcggacaattggtgcttaattccttccttacaatccatctttgaaccatgttgctgcttaaaaggatgtttggagctggagagtggattgtggtgcttttttattttattttattttattttattatttaatattcaagggttttgacaacattaatgttaatagctattattgtacgagatttttttttgaaaaattagtgtcagtttgcggtcaaacttctatggaacttatatttaatacctggttttggaatattgtgtatccttttatgctttg

SEQ ID NO: 46777 - DNA, 352 bp, Gossypium hirsutum
  Clone ID: LIB3196-030-P1-M1-H11
atttgaagctgcatttagttccacaaagaaacaacatatagattataagcacctccccataagcaaaccacaaaggaaagcttggagagagacccaaaaacaatgtctaaggaagtgagtgaagaaagacagggtcgtaaggactatgtggaccctccaccggcacctctgattgatatggctgaactcaagtcatggtctttttacagagccctcatagctgagttcatagccactctcctcttcctctatgtcactgttgctaccgtaattggtcacaagaaacaacaagatgcatgtgatggtgttggtctcttgggtattgcatgggctttcggtggcatgatcttta

SEQ ID NO: 46778 - DNA, 173 bp, Gossypium hirsutum
  Clone ID: LIB3196-030-P1-M1-H2
cttgacacggagctgaggcggctctttcgcgagcgctatctgctggaccccaagggtgtggtgggggtgcgctacgaggcgggcaccatccagatttggctgggggggaacacgttacaaaaaggcgcatgtgacccggccatctgtgatacacactactacttctagagggg

SEQ ID NO: 46779 - DNA, 382 bp, Gossypium hirsutum
  Clone ID: LIB3196-030-P1-M1-H3
atgccataatagtagagttagaactgaagaaaaaagttacacaggaggtgacaaaaaaggttgaaagagaggttatcacctgaggccttcttaaagggagagaggaagagcagatctcaggaggaaatgtggcagaaatagaaactctggacagtgtaaagcatggctgttaatgaaaacagatttcagatttaaaaatcaaaaccttttctaattttctaagagtaaatgaatatttcaagaaagccttgctgcttttacacaggggaccaaatttttagttttgcgttagtgtatctttaatatcaaagcttaatctttagaaagacacaaatctcttttatagccaatttgatcacatgcagaattttctttcataaag

SEQ ID NO: 46780 - DNA, 362 bp, Gossypium hirsutum
  Clone ID: LIB3196-030-P1-M1-H4
cccacgcgtccgataggccattaatgttggctaatattgattattattaaatgaatttgatgcaaatttctcatggatgtggttgttttagttatatgtgttatgcttggattggttttggttgatgttgtgtaggttggtgcaagtgagggtggtaaaaaggcttggtaaaaagccttgtttttgtccacatgggcagacacacgggcatgtgtctagaccaagtgtgacacatgacttgccctatgggcgtgtggtaaggtcgtgtgtcccctatacttaaagttggcaaatcagaatgcccagtagtaaccacacgggcagagacactgccgtgtgtcccaaccatgtagaggacacga

SEQ ID NO: 46781 - DNA, 355 bp, Gossypium hirsutum
  Clone ID: LIB3196-030-P1-M1-H5
ctggtaatttccaagatagatctttattctggatatcatcagcttaaggttaaggaagttgatgttcataagacggcctttaggactcgttatgggcattacgagtttctagtcatgccctttggtttgacaaatgctctggctacattcatagatctgatgaaccagtttttctagccgtatttggattacttcatcttagtcttcattaacgacatcctggtatactctaagaccgaagatgatcacgatgagcattttaaagtagttcttcaaatgcttcgagagaaaaagctctatgctaagttgagaaagtgtgaattttggttaagagaagtaacatttctggggcatg

SEQ ID NO: 46782 - DNA, 383 bp, Gossypium hirsutum
  Clone ID: LIB3196-030-P1-M1-H6
atccaccatccagcgagtgcgggccgaggagcgtgaacagatcaagaccctcaacaacaagttcgcctccttcatcgacaaggtgcggttcctggagcagcagaacaaggttctggaaaccaagtggaccctgctgcaggagcagggcaccaagaccgtgaggcagaacctggagccgttgttcgagcagtacatcaacaacctcaggaggcagctggacagcatcgttggggaacggggccgcctggactcggagctcagaggcatgcaggacctggtggaggacttcaagaacaagtatgaggatgaaatcaacaagcgcacagcagcagagaatgaatttgtgactctgaagaaggacgtggatgctgcctacatgaaca

SEQ ID NO: 46783 - DNA, 318 bp, Gossypium hirsutum
  Clone ID: LIB3196-030-P1-M1-H7
acaaaaaagcacgctggtacccctccccaatttccgggatccaccatacaccgagtgcgcaccggggagcgggaacagatgatgactctaaacaacatgtacggctgcttaatacgacatggggcggttactgcagcagaacatcaagggtttggaaaccaatgggacccttttgcacgagcatcgtaccaagaacctgacacataacctgaatgcttggcacttactcttcatctgcaacccaaactggaatatgctctggcatacagaggaacggttgctatttttatacaaacgcatatgcttgcaggacctaat

SEQ ID NO: 46784 - DNA, 373 bp, Gossypium hirsutum
  Clone ID: LIB3196-030-P1-M1-H8
atcaaatgtagtttggttcgcacgtgtgcgccttccctcctccccgcccgcagggtccacggccaccatggcgtattaggggcagcagtgcctgcggcagcattggcctttgcagcggcggcagcagcaccaggctctgcagcggcaccccccccagcggcttaagccatggcgcttctcacggcattcagcagcagcgttgctgtaaccgacaaagacatcttcgaattaagcacattcctcgattccagcaaagcaccgcaacatgaccgaaatgagcttcctgagcagcgaggtgttggtgggggacttgatgtcccccttcgaccagtcgggtttgggggctgaagaaagcctaagtcttttagatgac

SEQ ID NO: 46785 - DNA, 354 bp, Gossypium hirsutum
  Clone ID: LIB3196-030-P1-M1-H9
cgaacatgtggtcaaggcatacgttcttatggtagagacacacgtccatatgtgcaacccgctgtcaattttcctatcaggagtcacacaacagtgtgaccagcccgttgaccaattttacccaatttctaaatggcacacgaccatgtgaaccgcctatttgccagcccgtgtggtccaaaaatctccccgaaactgctgcaaatcatgaaaattcaacacaaaattacccctaattacaaatgtacaagaacacacttgagagatgacaccatgcactaacaatcgattgatttccttatactctaccgtcctataacccaattgcacaatcgtactaaatccttaagaatt

SEQ ID NO: 46786 - DNA, 210 bp, Gossypium hirsutum
  Clone ID: LIB3196-031-P1-M1-A1
atttaaaaaaaaaaaaaaaaaaaggaattttttaaaccaatttgaaaagaaagtcgttagataaatctgtacttcgccttcaaaaactgaagactttttttgttcaatatgtattattcaaaatatacatcaatttttttcttttttttttatacacatttgtagttattagagggggggggggtctgttaacatttaaccttttttttt

SEQ ID NO: 46787 - DNA, 301 bp, Gossypium hirsutum
  Clone ID: LIB3196-031-P1-M1-A10
gaattatcctattactctgcttctgtttttcgccacacgattttctctttttcattttgtggccaacacgatatcattgtcttcacttttctctttaatcccctatcttgtttcagcccaaggatcggagccatgctccttcatttctctcctgcttcttctacttctccaccttccccttcttctttcacctccaattatttcctccacagattatcaatttccagaccaccgtacttggagttcccattaaaacccagaacccatctctttaaacctacctctcctcccgtttcttact

SEQ ID NO: 46788 - DNA, 353 bp, Gossypium hirsutum
  Clone ID: LIB3196-031-P1-M1-A11
aaaaaaaataaatggagggactaaaagaatttttcaaaaagtcagaagactaaataagttgaaatcgtgttattttatattgataacaatactcatactaataaaattaaaattaatccacaagctaatattataaatgttaaagaaaaggaaaaataaatcattgcaattcttgttaaaaagaaaagaagatcgtgtggtgaagaaggtggcacgtggtctaggagataggtaaggatgtgacttatgagggggaccgccgattttagaaacgcaggcgcggtggcgggttttttattaaaataatacaaaaaaattaaaaaatatcaaaataagattttttttatttattt

SEQ ID NO: 46789 - DNA, 370 bp, Gossypium hirsutum
  Clone ID: LIB3196-031-P1-M1-A12
gaattatcctattactctgcttctgtttttcgccacacgattttctctttttcattttgtggccaacacgatatcattgtcttcacttttctctttaatcccctatcttgtttcagcccaaggatcggagccatgctccttcatttctctcctgcttcttctacttctccaccttccccttcttctttcacctccaattatttcctccacagattatcaatttccagaccaccgtacttggagttcccattaaaacccagaacccatctctttaaacctacctctcctcccgtttcttactcgaccaagaccaagttgttgtatccttctgccaacagggctgaattcaggtcatacgctcttcctggat

SEQ ID NO: 46790 - DNA, 395 bp, Gossypium hirsutum
  Clone ID: LIB3196-031-P1-M1-A2
atttctatggagacgaaaatcctagatgacaagaaaccggaggaagaggaggtgaaagagagactgaaacttctcattgaataagaaatcaatagaaggaaaaagaaatcagatctttctgaataagaagaagaaaaatcagtactttctttccattgaagaacaagaagtgaaagaggatatcaagggaaaatgtcaagagaaaaactaagaagagccgcacttcctcctgttcaagagaatattgataaattagaaaaagctataaatgagggtaatttctatggagctcagcagatgtacaaatcaataagtgcacgagaaaccgaaggaaacctgaagaacttaatgcgggaaaaaaggtgaacagtaggaaagtgaggaaagaaaaatta

SEQ ID NO: 46791 - DNA, 376 bp, Gossypium hirsutum
  Clone ID: LIB3196-031-P1-M1-A3
aaaaaggccaaaaccccaccactctccccgcctctctctctcccccctcccttgaacagaggctaaactcttgggggggataaagagataagagagaatccaagcaacacacatacacaaaacccttagctgccaccaaagcctcttttgaagatatagtttttaagggagcattcattctgaggggaatgttgtctggaccggggacacttgtgtttctaatccattttccctgcaatattgttctggccatggggatctttatattgcttatttttgtaatggattaaggttgtactagtgtcgtcggaccaggcttcattccccccaatcattgctcccatatgcaactcccatggactgcagcatgtaaaaa

SEQ ID NO: 46792 - DNA, 377 bp, Gossypium hirsutum
  Clone ID: LIB3196-031-P1-M1-A4
atgaaagaggcacgttcctggtgcacaggtggctctgcagcataatttaggccttggaggagctgtggttgtcacactctacaagatgggttttccggaagccgccagttcatttagaactcatcaaattgaagcgggtccaaccaactctgcaagtgatggatttaaggcaaatcttgtctttaaggagattgagaagaaacttgatgaggaaggggaacagtttgtgaagaaaattgtgggtatttgtgccttcaaggtgaaagatggccctgggggtaaagaggccacctgggtggtggatgtgaagaatggcaaatgatcagttcttcctaactcagataagaaagctgactgcacaatcacaatggctgact

SEQ ID NO: 46793 - DNA, 374 bp, Gossypium hirsutum
  Clone ID: LIB3196-031-P1-M1-A5
gctcttgacaagatgtacaaggatacgagtgcgacgcctgcaagactggtgatgatagcacttgcgcatgggttgtctctgtttgcagctgtggcatctagtgtaaacgtatctggtggccatgtgaatccagcagtcactttcggtgccttgctcggtggaagaatctctctcgttcgggcgctgtactactggattgcccagctcttaggttccattgtggcttgtctcttgctccgcctcaccgctggaatgcgaccgggggggttcgccctggcgtcaggagtaggggagttgcgtggtctgatattggagatagtgctgacatacggattggtgtacacagtttatgcaacagggatcgatcccaaaag

SEQ ID NO: 46794 - DNA, 138 bp, Gossypium hirsutum
  Clone ID: LIB3196-031-P1-M1-A7
ccctccagggagagattcaagctcgcctagacatttcaacaaatacctagtgatcttcctactagagaaaccaaaaataaaataatgaagagggctgttatctcagtttttgtgatgctagccatgtttcaattcgtg

SEQ ID NO: 46795 - DNA, 382 bp, Gossypium hirsutum
  Clone ID: LIB3196-031-P1-M1-A9
gaattatcctattactctgcttctgtttttcgccacacgattttctctttttcattttgtggccaacacgatatcattgtcttcacttttctctttaatcccctatcttgtttcagcccaaggatcggagccatgctccttcatttctctcctgcttcttctacttctccaccttccccttcttctttcacctccaattatttcctccacagattatcaatttccagaccaccgtacttggagttcccattaaaacccagaacccatctctttaaacctacctctcctcccgtttcttactcgaccaagaccaagttgttgtatccttctgccaacagggctgaattcaggtcatacgctcttcctggatttgatttcggga

SEQ ID NO: 46796 - DNA, 212 bp, Gossypium hirsutum
  Clone ID: LIB3196-031-P1-M1-B1
taaataaatgaattgaggtagtgttcacaagtatacatgttgagttgtaatacagttacaacaaagtaggatcgtactcacaagaggcgagtactaaattaatgttaactaaatgcaaatagaattaattagtaatctaaataaagtatattacgattgaacataaaaaagagatttttaggttttttatatttaaaaaacaaatatatact

SEQ ID NO: 46797 - DNA, 322 bp, Gossypium hirsutum
  Clone ID: LIB3196-031-P1-M1-B10
gagagaactgatgagtggtgcccggcctaatgctatacaccaaattttcataactacgaagcttgttgtcgggatgatgatgatgatgacgttgaacaaatgatatggcatatggggcgggtggtgattctactgcgaaatgggtgaaaactatgcactgagtttctccgtgcagaatcgtctctttgattcctgaaaacttttctttctcaaggaaaaagcatacattaaatggagcctgaatattcaaaatacatatacttgcgaattttgaattgatttaaatatatataattaaaattgggacctttgcttcaatgtg

SEQ ID NO: 46798 - DNA, 376 bp, Gossypium hirsutum
  Clone ID: LIB3196-031-P1-M1-B11
caaatggctcgtactaagcaaactgcgaggaaatcaaccggcggcaaggccccacgcaagcaactagccacgaaggctgctcggaagtcagctccggcgacaggaggagtgaagaagcctcaccgtttcaggccaggaactgtggctctcagggaaatcaggaagtaccagaagagcaccgagctcttgatcagaaagcttccattccagaggcttgtgagagaaatcgctcaagatttcaagaccgatttaaggttccaaagcagcgctgtcgccgctcttcaagaagctgccgaggcttatctcgtcggactgtttgaagatactaatctatgtgctattcatgctaagatggttaccatcatgcctaaagata

SEQ ID NO: 46799 - DNA, 372 bp, Gossypium hirsutum
  Clone ID: LIB3196-031-P1-M1-B12
gcaatcttaccattgaagttaccaaaattatcaatacaaacaatcacacgagcattcgcacgctcgcaagttctcgagatgctggcttttcagcatttcgacttttcagcttttaccgatctagtctactagtgggtgtcgtttacacacctgatttgcgacaactgctaccgaaatctccacgatatcctacaatcggttgctagacatatcagattcaaagtataatggcaaacatcataaacttacttaccataatcggccatcaatacatatggcccttgagatcctacctttgccaaaactagtgactagatctcaatctagtcgttccacttgtccaagccttcgatcagcagcctctagatacac

SEQ ID NO: 46800 - DNA, 298 bp, Gossypium hirsutum
  Clone ID: LIB3196-031-P1-M1-B2
aaatgatttcctattgtaaaatattttacaaaacacgggaaaaggagttcttgtttgaggaaaatgtcttaccgttttgaattcggtaagacattttccggaaaatgacccattgttgttcgctttccccttcttcttgagttttccattctccttacttttaccgtttcgaaccctacattacactccaagccatggcggcgtccttcccagagaaatctctgtttctacctttgattttccctacggacccaatctgttagaacaagctgtcctcaaagctacgccaggatttcat

SEQ ID NO: 46801 - DNA, 379 bp, Gossypium hirsutum
  Clone ID: LIB3196-031-P1-M1-B3
cccacgcgtccggtggaatggtgaggtttgaggtgattgagaagattggtcctgatgttaagtgtaggtgcactgatccgggattgttgcttcctcgagccaatttgactttttggagggatgggagtcttgttcgtgagcgtaatgcaatgcttcctaccatttcttccaaggattggttagacatcgactttggggttgcagaaggtgttgattttattgcaatatcctttgtcaaatcagctgaagtgattaaccatctcaaaagctatattgctgctaggtcacgtggtagtgacatagctgtgattgcaaagattgagagtattgactcattaaagaacttggaagaaattattcaagcatcagatggagctat

SEQ ID NO: 46802 - DNA, 370 bp, Gossypium hirsutum
  Clone ID: LIB3196-031-P1-M1-B4
atctcaatcctgctctcaccatgagcctccgcctgcagagctcctccgccagctatggaggtggttttgggggtggctcttgccagctgggaggaggccgcggtgtctctagctgttcaactcggtttgtctctgggggatcagctggaggctacggaggcggcgtgacctgtggctttggtggaggggctggtagtggctttggaggtggctacggaggtggccttggaggtggctttggtgggggttatgctggtggctttgttgattttggtgcttgtgatggtggcctcctcactggcaatgagaagatcaccatgcagaacctcaacgaccgcctggcttcctacctggagaaggtgcgcgccct

SEQ ID NO: 46803 - DNA, 374 bp, Gossypium hirsutum
  Clone ID: LIB3196-031-P1-M1-B5
tcgattccaagcactattttagccatagttttaaccacgaaatgaaaagtacaaaagcaataaaaagaacattgagattgtttacgtagttcaatctcagcctacatctggctttgctcaaagtaacaatttactatctttctcacaatacaaccaatgatttaagtcctaacactggtctaacactcaccaattcaacaacctcaccattgtacaaagactagatcactctccctctaagcttccccctcgaaagtttaactttgtaactcaagagactctcttagttgcttacagaaataatgcacacatttacactcctaacttaaataaattcatactctatcaaactcacaaaacattctcttaccctt

SEQ ID NO: 46804 - DNA, 381 bp, Gossypium hirsutum
  Clone ID: LIB3196-031-P1-M1-B6
cccacgcgtccgatctgattattttctccataccagcataaatcaacaatggcaaagctcgcagtttacttagccaccctggctctcattttgttccttgccaatgcttcaatcacatctgtgacggtcgaaagcgaggaaaaccgggatagctgtgaacagcagataaggaagcaagcccacctgaagcactgccagaagtacatggaggaagagtggggtggcgaaggcagcgacaatatagccggcgggtacattgactcatgttgccagcagctagagaagatggatacgcaatgcagatgtcaaggtctaagacatgcaacgatgcaacagatgcaacagatgcaagaacaaatggggagcaaacagatgcgagag

SEQ ID NO: 46805 - DNA, 385 bp, Gossypium hirsutum
  Clone ID: LIB3196-031-P1-M1-B7
ggtgcatatcagaaaccttagtttttgcaagttttgtcgttgaaaatggtggctgtcaacgccacacggtaggcacacgggcgtgtaactaggccttgtgtgccatacgaacatgtggtaggccgtgtgaacggttgtgtaacttactgtttattgaattaagaccacacggatgtgtgtttaggctgtgtgtgaccattttagtgcatggtctacatggccagggacatgggcgtgtgcccagaccgtgtaactcactgtttcaggtgtgaaaaccaggcccaggccgtgtggcaggatgttggatccgaaaaaatttttttgaggctgagaagggtgctaaactctgatattggtttcctttatttaggaatgactgaatttg

SEQ ID NO: 46806 - DNA, 346 bp, Gossypium hirsutum
  Clone ID: LIB3196-031-P1-M1-B8
atggagtgccctcgacaggcagggagggctaagctgtgcatccctccgctcgcgttgcagggagatggctcagcgacttctcctaaggaggttcctggcctccgtcatctccaggaatccttctcagggtcggtggccacccctcacttccagagccctgcagaccccacaatgcagtcctggtggcctgactgtaacactcaacccagcccggacaatatacaccaccaggatctccttgacgacctttaatatccaggacggacctgactttcaagaccgagtggtcaacagtgagacgccagtggttgtggatttccacgcacagtggtgtgggccctgcaag

SEQ ID NO: 46807 - DNA, 380 bp, Gossypium hirsutum
  Clone ID: LIB3196-031-P1-M1-B9
gaattatcctattactctgcttctgtttttcgccacacgattttctctttttcattttgtggccaacacgatatcattgtcttcacttttctctttaatcccctatcttgtttcagcccaaggatcggagccatgctccttcatttctctcctgcttcttctacttctccaccttccccttcttctttcacctccaattatttcctccacagattatcaatttccagaccaccgtacttggagttcccattaaaacccagaacccatctctttaaacctacctctcctcccgtttcttactcgaccaagaccaagttgttgtatccttctgccaacagggctgaattcaggtcatacgctcttcctggatttgatttcgg

SEQ ID NO: 46808 - DNA, 387 bp, Gossypium hirsutum
  Clone ID: LIB3196-031-P1-M1-C1
cccacgcgtccgcaagaattggaagagttgcaggcaacaaagatctctatcttggcacatttagcacccaagaagaagcagctgaagcctatgatattgcagcaatcaagtttagaggcttaaacgcggttacaaattttgatatgagccgctacgatgtaaacagcattgcaaacagcaatcttcccattggaggactgaacaacaaatccaaaaactgcaatgattcaacttctgataggagcaccgatgaggagcgagatcactctggatcatcgggcatgacctttacatctcagcccgctgcaagctccacagtaggctttgcaattaacatcaagcaagacccatccgattattggtcaaacgttctcggatacaatgata

SEQ ID NO: 46809 - DNA, 358 bp, Gossypium hirsutum
  Clone ID: LIB3196-031-P1-M1-C10
atgcggagagcggaccccagagagccctgagcagccccaccgccgccgccggcctagttaccatcacaccccgggaggagccgcagctgccgcagccggccccagtcaccatcaccgcaaccatgagcagcgaggccgagacccagcagccgcccgccgccccccccgccgcccccgccctcagcgccgccgacaccaagcccggcactacgggcagcggcgcagggagcggtggcccgggcggcctcacatcggcggcgcctgccggcggggacaagaaggtcatcgcaacgaaggttttgggaacagtaaaatggttcaatgtaaggaacggatatggtttcatcaacaggaatga

SEQ ID NO: 46810 - DNA, 378 bp, Gossypium hirsutum
  Clone ID: LIB3196-031-P1-M1-C11
ggagaagggaaaaggagtaatgggtgccggccgaagatgggccgtcgatttctctgataattccaccgctccttcatcgcgtgacatccccgatccccccggcttcactcgtgcttccgtcgatcaggacgattcggctgtgagtcgccaaaagaaggatgctgaagccaattggaaagctcagaaagcatgggaagttgcacaagcacctttcaagaatttgctaatgatgggcttcatgatgtggatggctggcagtacagtgcatctcttcagcattggtatcactttttcagcactttggcaacctattagtgctcttcaaggggttgggaaggtttttgaaccgtataaagacaataaagtagatcttctttg

SEQ ID NO: 46811 - DNA, 362 bp, Gossypium hirsutum
  Clone ID: LIB3196-031-P1-M1-C12
atgcggctatggcggtggcttcagcagcagcagcagctttggtagtggcttcgggggaggatatggtgctggcttcggtggtggcttgggtgctggcttgggtggtggcttgggtggtggctttgctggtggtgatgggcttctggtgggcagtgagaaggtgaccatgcagaacctcaacgaccgcctggcctcctacctggacaaggtgcgtgctctggaggaggccaacgctgacctggaggtgaagatccgcgactggtaccagaggcagcggcccgctgagatcaaagactacagtccctacttcaagaccattgaggacctgaggaacaagattctcacggccacagtggacaatg

SEQ ID NO: 46812 - DNA, 177 bp, Gossypium hirsutum
  Clone ID: LIB3196-031-P1-M1-C2
cccacgcgtccgaaagcgtattcaagagtcgccaagtctctactttcttaaagaggctaatgagcataatggggatgagtgagcaatgggtcgcaacttggattaaacaaaagggagatagtaaatgtatcccttgaaaaattttgaggggtttgatcttggcacattcggatacaa

SEQ ID NO: 46813 - DNA, 373 bp, Gossypium hirsutum
  Clone ID: LIB3196-031-P1-M1-C3
cggacgcgtgggcttgcacacccatgcaagctaaattagctcaattgcatctcactgagctttgtttagctcgtttccagctcaatgggatcgttttgctcaatttgagtttattttaattcttttgatttcattttctgaaataaattgaataagttaatttatttatttatttaattcagctcaaataagtgttagtaaattaatatgtttaaatctgaacatctttaataatttttttaatttaattgattgtgttttatttattacatctatttaatatgctgaatttattaatgttttttattagtttcagccgaattaaagagtagtattaaatgtgtcttaagttctttaaaagtgacgaatttat

SEQ ID NO: 46814 - DNA, 390 bp, Gossypium hirsutum
  Clone ID: LIB3196-031-P1-M1-C4
atagaaaatgaacttattagcatatcactcaagtataactattaacgtgtttctttctaatcattttagactctatgcttcggtttggggttttcttttaaaagattatgatcaagctgtatgtagtgtgtgttctcttttccacttaaactttataatacgctttgagtaactgcatgtttctttgtaaacatttttgttggcagcaaaatattccattaagtgaatatctcataatttacttaactgtgatgccatttagagcaaaggaattttgaatggccagatgtgatttttgtctctttgttccctaattagatacgggcagctgtatgttctcttcttgaggcatcattctcggacctccaacagcacaggagcggaggtggt

SEQ ID NO: 46815 - DNA, 401 bp, Gossypium hirsutum
  Clone ID: LIB3196-031-P1-M1-C5
atgccgacctggaggtgaagatccgcgactggtaccagaggcagcggcccagtgagatcaaagactacagtccctacttcaagaccatcgaggacctgaggaacaagatcattgcagccaccattgagaatgcgcagcccattttgcagattgacaatgccaggctggcagccgatgacttcaggacaaagtacgagcatgaactggccctgcggcagaccgtggaggccgatgtcaatggcctgcgccgggtgttggatgagctgaccctggccaggaccgacctggagatgcagatcgaaggcctgaaggaggagctggcctacctgaggaagaaccatgaggaggagatgcttgctcttcgaggtcagagcggtggagatgtgaacgtggagatggat

SEQ ID NO: 46816 - DNA, 375 bp, Gossypium hirsutum
  Clone ID: LIB3196-031-P1-M1-C6
ggaaatatgaaaaaaaaagcctccatatttccctatgcttccaacgtgcaggagaaggatgaaaagagaaactttcatctttttacaattttgtccttttccataacattttaccttttcaacccaaaaccttaagaatttccatagcaattaaagagagaaagtgatgctgagaccttaaagagcttatgtatcatcttagaatcaagatatttgaagttggaagtgagagaaagttaagagaagtgtgagaaaccaaagttacaaggtaagaccttaagtgttctctcctggattttatgcttaatagaagtagaaacatgaaaaagcaatttttagtgtagattttaattaagttcatcttttttttatgta

SEQ ID NO: 46817 - DNA, 274 bp, Gossypium hirsutum
  Clone ID: LIB3196-031-P1-M1-C7
gcatcatgatacaaatgtatcggtgcaccatacacggagctgttggtggcttagagatggttcagacggtgcacagcctcaaacaagctttcttgagcctcctgatttcaaccgtcattcttcaaaccacccatacgataacttctctgagaggaatgtggaagatgaagaccaatttcttgattggagggattcttggaggttatcccgaacgacttacttggatgatcttgaagccggagaggatgtaaatcttcattttgatgatatttac

SEQ ID NO: 46818 - DNA, 344 bp, Gossypium hirsutum
  Clone ID: LIB3196-031-P1-M1-C8
cggacgcgtggggctgcaaatggggattctaatttcagttgatttggtgcttcatagacctgtccatgggccgggccgggccagaattttcagcccgtttactaggcccgggcccggcccgaaatatgggcctgagattttgcccaggcccggcccgaagaaaaaatatggggcccgagcccggcccggcccgtttttaattaaaattaaaattaaaattatttttttaataaaattaaaactaattgttattaaaattaattggtaagtaaattatcaaattattaattgttaattggattaattggtggaataaaatctaacatttgattaggtaatttatc

SEQ ID NO: 46819 - DNA, 356 bp, Gossypium hirsutum
  Clone ID: LIB3196-031-P1-M1-D1
tgtatatttatttatgtacaacttactaagctttaagcttactccctctccttttctgttttcttatagtgctgcctatctagctcaaagaccaacggaagttagagatatcgattacactatcaatcaaagtattcggtatagtttgatttatatttttaaatatggcatgtatagggaactagacttgcgttttgtgtattattaatttggccaaatgtgttggattgagataaatactcattttttatgaagccttgaatgatggcaaatattgattttgatttatatgcaaatgaagttactctcatgaatgagtaattgcttaatcgatatatagactattggggctgatt

SEQ ID NO: 46820 - DNA, 330 bp, Gossypium hirsutum
  Clone ID: LIB3196-031-P1-M1-D10
atggcggccgcggcggcggcagcaacaacgggggctgcgggccgtcggggctccgggccggggcggcggcgccatcttgtgcccggggccggtggggaggccggggagggggccccggggggcgcaggggactacgggaacggcctggagtctgaggaactggagcctgaggagctgctgctggagcccgagccggagcccgagcccgaagaggagccgccccggccccgcgcccccccgggagctccgggccctgggcctggttcgggagcccccggcagccaagaggaggaggaggagccgggactggtcgagggtgacccgggggac

SEQ ID NO: 46821 - DNA, 354 bp, Gossypium hirsutum
  Clone ID: LIB3196-031-P1-M1-D11
gcatcccaaaaccagaacctgcggatgactgggttcggtctttacaaccagaacattaacccagaccataaccagaggatcttcgtggctggaaaaatcaaccatgtgagacaatgggatagccaagccaaggagttggcctttggggtgtcatcgaggttggtggatgagatattcaacaacaacccacaagagtcttacttcgtgtctcgacagaggcagcgtgcatctgaataaagagttagaggcaataataaccacatagtctcgagtttacggactaatgtgaaattttctagttttaagcaggcatgtaatgaaataaaaatggtgacctatgtaaaggaggagacc

SEQ ID NO: 46822 - DNA, 387 bp, Gossypium hirsutum
  unsure (1)..(387): unsure at all n locations; Clone ID: LIB3196-031-P1-M1-D12
ataattcctccatgcccaggaggaggtgaagcgaatccaaagcatcccgctggtcatcggacaatttctggaggctgtggatcagaatacagctattgttggctctaccacaggctccaactattatgtgcgcatcctgagcaccatcgatcgggagctgctcaagcccaaccctcagtggccctccacaaacacagcaatgcactggtggacgtactgccccccgaagccgacagcagcatcatgatgctcacctcagaccagaagccagatgtgatgtacgcggacattggaggtatggacattcagaanccagaggtgcgggaggctgtggagctcccactcacgcatttcgagctctacaagcagatcggcatcgatcccccc

SEQ ID NO: 46823 - DNA, 401 bp, Gossypium hirsutum
  Clone ID: LIB3196-031-P1-M1-D2
atttctgcgtcctgctgagctctgttctctccagcacctgccaacccactagtgcccggttcttttgctccaccaggaacaagccatcatgtctcgccagtcaagtgtgtccttccggagtgggggcagtcgtagcttcagcaccgcctctgccatcaccccgtctgtctcccgcaccagcttcacctctgtgtcccggtccgggggtggcggtggtggctttggcagggtcagccttgggggtgcttgtggagtgggtggctatggcagccggagcctctacaatctggggggctccaaaaggatatccatcagcactagtggtggcagcttcaggaaccgatttggtgctggtgctggaggcggctatggctttggaggtggtgccggtagtggatttg

SEQ ID NO: 46824 - DNA, 399 bp, Gossypium hirsutum
  Clone ID: LIB3196-031-P1-M1-D3
atcccaggccaagcaagcttctgtctgcacctgctctcaatcctgctctcaccatgagcctccgcctgcagagctcctccgccagctatggaggtggttttgggggtggctcttgccagctgggaggaggccgcggtgtctctagctgttcaactcggtttgtctctgggggatcagctggaggctacggaggcggcgtgacctgtggctttggtggaggggctggtagtggctttggaggtggctacggaggtggccttggaggtggctttggtgggggttatgctggtggctttgttgattttggtgcttgtgatggtggcctcctcactggcaatgagaagatcaccatgcagaacctcaacgaccgcctggcttcctacctggagaaggtgcgcg

SEQ ID NO: 46825 - DNA, 377 bp, Gossypium hirsutum
  Clone ID: LIB3196-031-P1-M1-D4
cttctatgggcgtgtggatcatctggtgaatgcagcgagtttgggacataccttctacttcgatgaagttacagactcctcagtgtttcctattttgttggacataaacttttggggaaatgtttatcctacatttgtcgctcttccatacctacatcagagtaatggccgagtcattgtgaatgcatcggtggagaactggttaccgttaccaagaatgagtttgtatgctgctgcaaaagctgctcttgtgaatttctatgagaccctcagacttgaagtaaataatgatgttgggataacgattgctacacatggatggataggaggcgaaatgacaagaggaaagtttatgcttgaagagggagccgagatgc

SEQ ID NO: 46826 - DNA, 363 bp, Gossypium hirsutum
  Clone ID: LIB3196-031-P1-M1-D6
cccacgcgtccggtagggtggaatgcacccggtggtccgtatgtatggggatactgctttactaagcaaataaaccctccttcagattatttggacaagacatgcaaagagtacccatgtgttcctggtcagaaatattatggtcgaggccccatacaacttacttgtaaggaactacaactatggtcaatttggagcaaccattgggatggaaaaggagttgttagaaaacccagacctgatagtaagcgatgccacattgtgtttccaatctgcattatggttctggatgactccgcaagggttaaagccttcttgccacgatgtgatcactggagcgtggacgccttcagctagggacgt

SEQ ID NO: 46827 - DNA, 364 bp, Gossypium hirsutum
  Clone ID: LIB3196-031-P1-M1-D7
gcgcccacacgtgcgggcaggttttcaagctttaacgatcaaccccaaggaatgatttctgtcagatagctgcaaaaaatgggatattactgaggcttattaatactctgtatagtttaaatgaggcaactcgacttgctgctaaatctgttgggggtcgattctcatcagatggttcagctcgacagcaacgttctggtcctttagattccagtcatcgtctgttttctcagaacgaaattccactctcttcaactgatcatttgttagagagacatggaatgactgagcattcgttttcaactgttactcaagaatcttcacgggcttcaacttcacattctcagaggtcagatatcaatct

SEQ ID NO: 46828 - DNA, 398 bp, Gossypium hirsutum
  Clone ID: LIB3196-031-P1-M1-D8
atattttaaattatattcgtaccaggagttcacgtgaaagcgtcagccccgcttggcgtttttgtgcaaagttttctcttctttcctgaggagagagaaaaggtcctgacggcggtgccatgactcacatctctccgtggcccttgcctggaggttccagggcaggtgggctgtgagtggctttgattctggagagcccctgactcaccattacgatacagagagatgaccgcacggtcagagcccagacctggaagcagaggggaaactgaggccagtctgggtctcacatagggagcgagagcagggcctgtgagccagccttggctggcgtcatgggagtgaccaggctgggtcgcctctctcggcagggggggttccgggcctccgttggcttt

SEQ ID NO: 46829 - DNA, 370 bp, Gossypium hirsutum
  Clone ID: LIB3196-031-P1-M1-D9
ttttagctgaacccattacagggttctttctaagctctgggacttcaggcgggcagccaaagctgatgcctgtcactgctgaagttggtaataagtgggatttatttcgtcgcttgtacgagtctcctgtgataaagcactttgatgacatcaaccaagccggtaaaagattggagcttatgtttgccagaccagagattgaaactcctagtggcctcaaggcagcatctgtttcaacgagcatatacagcgggagtaattttagaaccaggttgcctaagctttacacaagtcccgttgggaccatcttttgcccaaaccccaaccagggcttatactgtcaattactttttggtttaatccaacgaga

SEQ ID NO: 46830 - DNA, 384 bp, Gossypium hirsutum
  Clone ID: LIB3196-031-P1-M1-E10
atcctttgcccattcgtctgccctcacccttaaaaccaaaactcggtcctgctgctcaccgacctagcattactctcgccatggctctcagcgatgctgacgtgcagaagcagataaagcatatgatggctttcatcgaacaagaagccaatgagaaggcagaagaaatagatgcaaaggcagaagaagagttcaacatagagaaaggtcggcttgtgcaaacccaaagactaaagatcatggaatattatgagaagaaagagaaacagattgagcagcagaagaaaattcagatgtccaatttgatgaatcaagcgagactcaaagtcctcagagcgagagatgaccttatcacagacctactaaatgaagcaaacagagact

SEQ ID NO: 46831 - DNA, 218 bp, Gossypium hirsutum
  Clone ID: LIB3196-031-P1-M1-E11
tcgaccaaggattaggtcctataccgtaggctaaggcaagcacccattctaaataagaaccaaatcgcgattctacagatttccaaccatattgtcacagcaatactaattcttttacgcctcacactttgtgcaattaaaggcagacgagccattactgcaacattttgaaattagaacacactatcaaagaattgaagttgcaattacacattatc

SEQ ID NO: 46832 - DNA, 380 bp, Gossypium hirsutum
  Clone ID: LIB3196-031-P1-M1-E12
aattttccgaattgctgaccaagatcgacaggcgatctggaaaggagcttgagaaggagcccaagttcttgaagaatggtgatgcagggatgataaagatggttcccaccaagcctatggttgtggagactttctctgagtacccaccacttggacggtttgctgtcagggacatgcgtcagactgtggctgttggtgtcatcaagagcgttgagaagaaggacccaacgggtgctaaggtcaccaaatctgctgccaagaagaaatgagattgcatttgatagtatcagagccttttgattttggttatctttgtagtttggtacttgcagttttttagaccaattttgatgtgtgttcatttggttgagactgtcatc

SEQ ID NO: 46833 - DNA, 383 bp, Gossypium hirsutum
  Clone ID: LIB3196-031-P1-M1-E2
gaaagtattgtattgagtatcatatcaatgctttcaagccctaatgatgaatctcctgcgaatgttgaagctgctaaggagtggagagagaggaaagatgaatttaagagaaaggttggccgctgtgtccgacggtcgcaagaaatgttgtgatcaatgatggctgttgctgctgttccttttctagaatatatgaactcgtggaatgccttaatttttatcatgtacggagatgagttgcggctgattacaccgcagaatccttgtgaacctagggagtgccttaaaacttaaagcccccctccccttccccttccctttccccatctctttctatttttatttattgtgcttttaagtggtagtgttcttttgtattcgaa

SEQ ID NO: 46834 - DNA, 404 bp, Gossypium hirsutum
  Clone ID: LIB3196-031-P1-M1-E3
atcgccagcccgccgccctctgccgccgcaccctgcacacccgcccctcttctgtgccaggaacttgctaccaccagcaccatgccctaccaatatccagcgctgaccccggagcagaagaaggagctgtctgacatcgctcaccgcatcgtggcacccggcaagggcatcctggctgcagatgagtccactgggagcattgccaagaggctgcagtccattggcaccgagaacaccgaggagaaccggcgcttctaccgccagctgctgctgacagctgacgaccgcgtgaacccctgcattgggggtgtcatcctcttccacgagacactctaccagaaggcggatgatggtcgtcccttcccccaagttataaaatccaagggcggtgttgtgggcatcaa

SEQ ID NO: 46835 - DNA, 372 bp, Gossypium hirsutum
  Clone ID: LIB3196-031-P1-M1-E4
acgactagctgctgacgttgaagatgttaagtgtcgaattcacgaatatgaaaagggaaaaactgagttctctcctgaggaggatccacatgtcattgctgattgtatcaagtatgtcattcgagagttgccatcatgtcctgtccctgcttcatgctgcaatgcactactagaagcatatcgaactctgggtggtgatagagtcaacactatgcgtgaagcagtatcggacgcgtttcctgagccaaaccgtcgcctactacagagaattctaatgatgatgcgagctgtggcttctaataaaactttaaatcggatgagctcttcagctgtggcagcatgcatggcacccttgattcttcgaccccttgt

SEQ ID NO: 46836 - DNA, 224 bp, Gossypium hirsutum
  Clone ID: LIB3196-031-P1-M1-E5
gggtggggtttaaagggtttttcagagttttcaagaagtcccaaccttttcaacttcatcccaacccaacccaacccaaccttattttcaaatctttattattggtgaaaaaaaaatggtggagattgggttaatgatcacttgccttttctttctccggtttctgggtcttaccggcgccaggcaaaaatctattgaataccctaagccttattacacaactt

SEQ ID NO: 46837 - DNA, 374 bp, Gossypium hirsutum
  Clone ID: LIB3196-031-P1-M1-E6
gcattaccagatggcggtgtattgctgcttgagaatgtgaggttctacaaggaggaagagaagaatgatcctgaattcgcaaagaagctagcttctctcgctgatctctatgttaatgatgcatttggcactgcgcacagagcccatgcttccacagagggagtggctaagtacttaaagccttctgttgctggttttcttatgcagaaggaactcgattatcttgttggagctgtggcaaatcccaagaagccatttgctgcaattgtcggtggttctaaggtatcaaccaagattggagtgattgaatcactcttggccaaggttgatattctcatactgggtggaggaatgatgtttaccttctacaaggc

SEQ ID NO: 46838 - DNA, 353 bp, Gossypium hirsutum
  Clone ID: LIB3196-031-P1-M1-E7
atttactagcaatttcttcaagttcttttctttgtttttttaatcaatggctgaccactacctccaaaacactcaaccaatgactcaccaaatggtgaaagccgctactgccgcaacagccggtggttccctcctcattctctccggtttaatcctagctggcaccgttattgcgctcaccatagccactccactcttcgttattttcagtccagttcttgtccctgctctcattgcaacagctctcctagcaacgggtttcgttgcctccggcggtttcggtgttgcagctgtcacggtcctgtcctggatttacaggtatgtgacggggaagcacccaccggctgcggatc

SEQ ID NO: 46839 - DNA, 384 bp, Gossypium hirsutum
  Clone ID: LIB3196-031-P1-M1-E8
atcttttctgattctggtggatcctccctggcgtaattaaaggctctttgcgcctccccatactatgaaatattatctaggagttgaccctgaatgatccacgggcaaaccagaggttaggggttaaattgaaccgtagcctgccaacatgtttaatcattctgtctctaaaatatttaattatagtgtcagatggtaaataatatatcctcaccgccacaatgttaccccactcagcctataaccactactgctgccgccatcggcaccgcggccacatttactccgactaataacattccgctcttggatacttcagctgcatttttgttttaccaaagagtaacgtctgcggacttctttcagtttcaggttcactctata

SEQ ID NO: 46840 - DNA, 374 bp, Gossypium hirsutum
  Clone ID: LIB3196-031-P1-M1-E9
cccacgcgtccggtttctatcaatgaagattgctactttgaatcctatgttttattatctaggagttgaccctgaatcatttatggtcaaaccagaggtaaggtattaaattgaaaaatagtttgataatatgtttaattatttgtctctaaaatatttaattatgtttcagatggtaaataatatatcctcaccgccacaatgttaccccactcagcctataaccactactgctgccgccatcggcaccgcggccacatttactccgactaataacattccgctcttggatacttcagctgcatttttgtttcaccaaggagtaacgtctgcggtcttctctcagtttcaggtacactctatattagggtttt

SEQ ID NO: 46841 - DNA, 363 bp, Gossypium hirsutum
  Clone ID: LIB3196-031-P1-M1-F1
cccacgcgtccggttaacccgttatgtgttgttgttgatgatagcattttcttaacacttctcgctgcaaatctttcaaaaacatctcatgtactatcattgtttccggggttgagagaaaaaggagcccaatatttggaaactgttgttaaggcaaactgtttctctatggaccgtgtagaagtacctgaaaaaaggaaaccttgtttgaccttgcaagatactcgtgggaaaaaggttgatatgttgattggagaaccgtattattatgcaaatgaagggatgcttccatggcagaacctgcggttttggaaggaccgtaccttgctcgaccctgtcctttcagaagatgcgttgataatg

SEQ ID NO: 46842 - DNA, 398 bp, Gossypium hirsutum
  Clone ID: LIB3196-031-P1-M1-F10
atcctctacattgctgatcggaaggctcgtgaagctgtggaaatgcgtgcccaagtagagagaaaaatggctcagaaagaaaaggaaaaacacgaagagaaacttagagaaatggctcagaaagccagggagagaagagctgggatcaaaactcacgtggaaaaagaggatggggaggcacgtgagagggatgaaatccggcatgacaggcgaaaagagagacagcatgaccggaatctttccagggcagctcctgataagaggtcgaaacttcagagaaatgaaaatcgggatatcagtgaagtcattgctctcggtgttcctaatcctcggacttccaatgaagttcagtatgaccaaaggctcttcaaccaatccaagggtatggacagtggatt

SEQ ID NO: 46843 - DNA, 357 bp, Gossypium hirsutum
  Clone ID: LIB3196-031-P1-M1-F11
atgttttggaggctttggggtagtttattatttaacacattttgttttattggccaccctcaatgatccaattcccaataggaaaagaatactagaatgggaattctgttttaggttaaagatgtggtaaaaaaaccatctgcaaaaggaattaaaagttccctttaaaactttttaacactgggagacaccaaattttatttgggggcttaataaaggcctttaatgggttctggttaaaaattttgggatggattccttaatggaccttgaacgttgtgtgtgagtgtgaatacacctgcatgtgtgcttgtgcctgtgtagttgcagtcttagacaggtagctactattttttg

SEQ ID NO: 46844 - DNA, 306 bp, Gossypium hirsutum
  Clone ID: LIB3196-031-P1-M1-F12
gctggggttcgtgtgatcgactatgttgtcgacagggtgtcccccaccgcttccatgatcgactactttaaccccaagcacgtagatatcggatgggtcattaagccttttatggctatgaaccgtcccaacgttaccataactggccgtgctgaccagatctacactcgggagatgactgaccctgatgcgccaagatcacatcatgccaaccatacttaaatgggttgactggaccgtgtatgacattcctgtgcgaaccaaccccactcaatggataggaaatgctggcatacactattccac

SEQ ID NO: 46845 - DNA, 376 bp, Gossypium hirsutum
  Clone ID: LIB3196-031-P1-M1-F2
gattcctgctcctcagatcgttaagaaatctgaagacccatatgctataacagacaatgattggagttgggaagataaagcaatactcaaacatccttgagaagccccttagcaagggcaaacaagaggttagcttgagtgcctttacatttttgttctctgagcttgttcagtacaatcaaactcgggttgacaacattgctgaattagaaagaaggctggaggatgcaaggtatgctgttggggctcgagttcttgaacttttatgccatagggataaggggaatagaagggagacacgattgctgggtattttatcctttgtgcacagcactgtctggaaggcgttatttggaaaggtggctgactctcttga

SEQ ID NO: 46846 - DNA, 383 bp, Gossypium hirsutum
  Clone ID: LIB3196-031-P1-M1-F3
gccaatccgaggattttgaagagattttcttgtccaaagatgtttttggaaatagttcagcttttccctcttgtgagagccctttccattttgtgcttcaaagaagcccttctttcggtcaccggacacccatcttttcttcgccggcgacatccccaggtcgccaccaaaaacaggacaaggaaagttataatgaagtagagagcttaaagaaagcgcaagtagtagaagaagaagaacagttcagccctgtatctgttctggaccctccattcgaggacgatgacgatagacatgtgaatgttgatgataatgatgggaacgacagttttgatcttgaatgcagctatgcagttgtacaaagaacaaagcaacagctactg

SEQ ID NO: 46847 - DNA, 384 bp, Gossypium hirsutum
  Clone ID: LIB3196-031-P1-M1-F4
gtgaccttgggttgagtgtagagatgaggaaaatcatgggtgccaaagttctcttcttctttgctttgctttccttttcagctgtgtcggcatttgcaggatgaggaagaccaaggtcttgttatgaacttctacaaggattcttgtcctcaggctgaagacattatcaaggagcaagttaagctactgtacaagcgacacaaaaacactgctttttcttggctgagaaacattttccatgactgtgctgtccagtcatgtgatgcttcactgctgctggactccacaagaaggagcttgtctgagaaggagacagacaggagctttggcctaaggaatttcaggtacattgagaccatcaaagaagctgtagaaagggaatgg

SEQ ID NO: 46848 - DNA, 310 bp, Gossypium hirsutum
  Clone ID: LIB3196-031-P1-M1-F5
cttacttcgtgtctcgacagaggcagcgtgcatctgaataaagagttaaaggcaatattaatcacatagtctcgtgtttatggactaatgtgaaattttctagttttaagcaggcatgtaatgaaataaaaatggtgacctatgtaaaggaggagacccttgttttgtagggcactaacttgtatgaccttttgagggcgtttttttgccttcctatgttaaggaataaaatgttaagtccttaggcctaaaaaaaaatgtgacccttcattggggggagctttacaaaaaaaaattcttgggggggcgc

SEQ ID NO: 46849 - DNA, 389 bp, Gossypium hirsutum
  Clone ID: LIB3196-031-P1-M1-F6
gagaaaacaagtggagagaagaagaagaagaggaaagtgacgaaggagagcaacaacaaaggaacaacccttactacttccatcgcagatcgttccaagaacgattcagggaagaacatggcaatttcagagtcctccagaggtttgctgacaaacatcatttacttaggggcatcaacgagttccgcattgccattttagaagcaaaccccaacactttcgttctcccacaccattgtgacgcggagaaaatttacgttgtcactaacggaagaggaacagttacgttcgtgacacatgaaaacaaagagtcatacaatgtagttcctggagttgtagtaagaattccagcaggaagcactgtgtacttggccaaccaagacaacagg

SEQ ID NO: 46850 - DNA, 382 bp, Gossypium hirsutum
  Clone ID: LIB3196-031-P1-M1-F7
gaatgctatcaacggacgtgctcacaaggaacgagctcaaccgtcatcgaggaaaaaatttgggcttcttgagaaacacaaggattatgtcgtccgtgcgaaagcattccacaagaaggaagaaacgttacggaaactcaaggagaaagctgcattcagaaacccagatgaattttactttcagatgataaaaacgagaactgtggatggagttcataaacctgagagtcaggctaacaaatacactcaagaagaactcatgctaatgaaaactcaagacataggatatatactacagaaattgcaaagtgaaaggaagaaaattgagaagctaactgcagtgttgcattctgttgataatcatccatctaacagacacatt

SEQ ID NO: 46851 - DNA, 305 bp, Gossypium hirsutum
  Clone ID: LIB3196-031-P1-M1-F8
gacaaatggtgggaaacccactggatttttctcttgactacattgatcaagctcctcggaaatcccgattctttgggtggctgcttttcatgtcaaggttccacgcccgaccacttagattatatgaaaagatgctgacatagaccgtcgaatgaaatccttttgatccacaagtccagccaaaaggagaacagattgtagctgatgaccagtcgagagtgaaggatgaaatctctattcttcgccgctcataggccaatagatagggtgctaaaccaatgctacttgactacagtcctgctatt

SEQ ID NO: 46852 - DNA, 376 bp, Gossypium hirsutum
  Clone ID: LIB3196-031-P1-M1-G1
cccacgcgtccgcccacgcgtccgcccacgcgtccgcccacgcgtccggagaaggaagggaaaaaaggaaaagcagtgcttggaatattttggcatcgggacagactacacagtactttcggaggggctgtttaagagtttcttactgattgttagtttgattgaagttatatagacaatgtttaggactgcatgtttgactcgcaattagagttggttttggtgtacgaaacgaagaagaagaaacgagttgtgaaaagtcttcgtttgaatgtaccaggctgtttctacctgcaattcaattagaataattttatgattatagtgtcataaacaattaactatcatgaatcgcattttccactaattaaaattt

SEQ ID NO: 46853 - DNA, 184 bp, Gossypium hirsutum
  Clone ID: LIB3196-031-P1-M1-G12
gaaaaaaaaaaaaaaaacatgtggtaataaaatcatttgacaatggatcagtctgggtattccgttccctttttggtttatgttgggccatattgagccttttcttttttaaagctttctaatgcttttgttagagacgaaacttgttccttttataatagaaaatgttctgtttatttcagct

SEQ ID NO: 46854 - DNA, 378 bp, Gossypium hirsutum
  Clone ID: LIB3196-031-P1-M1-G2
tccacgcgtccgtccacgcgtgcgtgcactcgttcgtccactcgttcggagaaggaaggttaaaaaggaaatgcactgcttggaatattttggcatcgggacagactacacagtactttcggaggggctgtttaagagtttcttactgattgttagtttgattgaagctatatagacaatgtttaggactgcatgtttgactcgcaattagagttggttttggtgtacgaaacgaagaagaagaaacgagttgtgaaaagtcttcgtttgaatgtaccaagctgtttctacctgcaattcaattagaataattttatgattatagggtcataaacaattaactatcatgaatcgcattttccactaattaaaatttag

SEQ ID NO: 46855 - DNA, 356 bp, Gossypium hirsutum
  Clone ID: LIB3196-031-P1-M1-G3
atggagaattcaaccactctctcttccttccccttatggcccaggttatccacagccaccttcccaaccaagaccctatccacctggacctccattttcccctgtaatttctccacctgatcctgacctccctaatcctgcaccctaaatacagacaactgcaacaggtgccaccaccactgcaaaagacaacactaccctcataaccactgcttctactctccaaaaataagaatttcaacactacttccaagagacttttagataaaatggctttcatttttgaatgagaataaacatttccaaagcattgcattttgggagaaatatcttagaaattgtgaaacaatccccat

SEQ ID NO: 46856 - DNA, 384 bp, Gossypium hirsutum
  Clone ID: LIB3196-031-P1-M1-G4
gctccaacctctggtctggcgagctatcaaaacttgctgccaatgccttcttggcgcagagaatctcttcggttaatgctatgtccgcattgtgtgaggccaccggtgctgatgtgagccaagtggctcatgctgttgggaaagacacaagaattggacccaagttcttgaatgcgagtgtgggtttcggtggatcgtgtttccaaaaggatattttgaacctggtctacatctgtgagtgcaatggcctcccagaggttgcaaactactggaaacaagtcattaagattaatgactaccagaaaactcggtttgtgaaccggattgtttcctcaatgtttaacacagtttcagggaagaagattgccattctcgggtttgctt

SEQ ID NO: 46857 - DNA, 384 bp, Gossypium hirsutum
  unsure (1)..(384): unsure at all n locations; Clone ID: LIB3196-031-P1-M1-G5
gaaatcattcatatatttcccaattttcctccacctcctctccattcctcatccttaatgtgtataacacattnaaacaacattattcgcactttcactattttcttgtatgtaaaattcgagctgtccgtctgagttagagtcactaaattatttttccccagagctaaagaacttnnnaataagatccgtaaatttttcctgaaactagattcataaatattcttaccataaaaattttagaatttttggtttagtcaaatagtacaggttattctttaaagttttccttgtttcgctatctgacagttctgacctctcttcactaaaaattaattatctcattgtacagaattcagttgatgtttctgtttaattattttg

SEQ ID NO: 46858 - DNA, 390 bp, Gossypium hirsutum
  Clone ID: LIB3196-031-P1-M1-G6
ctttcaaggctaagccaccaccaccactaccacgatggccttgaccaccatgctccgccgccgactcttctcccgggctttctcctcccacgacggtccaagccggtggacgacgcccggtcaccaggaacgacccaatggttacctcttcaacaggaccccaccacctccaggccaatcccgtaaatgggaagattgggagttgccttgctacgtcacgagcttcctcaccatcgtcatcctcggtgttggtctcaacgccaagcccgatctcactatcgagacttgggcacatcaaaaagcccttgaaaaactcgccgccgagtcgtcgtcatcttcttctgactgagatgttttgaagcaaatttcgaccgggatctggggtacggg

SEQ ID NO: 46859 - DNA, 306 bp, Gossypium hirsutum
  Clone ID: LIB3196-031-P1-M1-G7
cccacgcgtacgcccatggctgcctccgttgatcctctcgttgttggtcgcgtcattggcgatgttgtcgacatgttcgttcccaccgtcaccatgtccgtctactatggttccaagcacgtctctaacggatgtgacattaagccttctatggctatcaaccctcccaaagttgccatcgatggccttcctgaccagttttatactttggtgatgactgaccctgatgcgccaaatcccagcgagccaaccatgcgtgaatgggttcactggatcgtgtctgacattcctggagggaccaacccc

SEQ ID NO: 46860 - DNA, 374 bp, Gossypium hirsutum
  Clone ID: LIB3196-031-P1-M1-G8
gcaaaccccaacactttcgttctcccacaccattgtgacgcggagaaaatttacgttgtcactaacggaagaggaacagttacgttcgtgacacatgaaaacaaagagtcatacaatgtagttcctggagttgtagtaagaattccagcaggaagcactgtgtacttggccaaccaagacaacagggaaaagctaaccatagcagtgctccaccgacctgtcaataaccctggacaattccagaaattcttccctgctggacaggaaaatcctcagtcatacttacgaatcttcagccgtgaaattcttgaggctgtcttcaatacacgaagtgagcagctagacgagctgtttggtgggaggcaaagccatcg

SEQ ID NO: 46861 - DNA, 344 bp, Gossypium hirsutum
  Clone ID: LIB3196-031-P1-M1-G9
ataagtctagttataatatcttaatggtaagaataacatgagtaagttctatatatgaaaatgattttgaaatctttggcttatatttgtgatgtataagtatgtggtgatatctacctttgtgcactcaagaatgttttgttgatttattatatgctatgtgttttaattatgcatggttgacattgttatttatttacatgcaacttactaagctttatgattactccctctcctttccattttcttatagtgccgccaagattgtatcggggatcaagggatgccggaggcatcgatcacactatcacctaaagctttggtatagctaggttaatatttta

SEQ ID NO: 46862 - DNA, 377 bp, Gossypium hirsutum
  Clone ID: LIB3196-031-P1-M1-H1
gttcggtccaaaacaaaggtgtacgacatttacgatcgtacaaagcctcgtaaggcgccatattgatgctcgattgaaaactattattatatgcgaattcaaccaaaggtaagtatcgttcccacaaggcactaaactcaaggatgcaacatctcaacatatcctcgagtatctgaataattcgctcggattgaccatcggtctggggatgaaaagcggtgctaaaatgcaacttagtacccaattcttctttccatttcttccaaaatcgcgatgtgaatctcggtaccccgtgtaaccttacaatctgagaaacatacaattcaactaacttatcaagtgaataatctgtacgtatgggaataaaatgagccgac

SEQ ID NO: 46863 - DNA, 376 bp, Gossypium hirsutum
  unsure (1)..(376): unsure at all n locations; Clone ID: LIB3196-031-P1-M1-H10
cggacgcgtgggttcttttataatatgctttctgctaatagaacatagttctgtagttttatgccattaaggtctgaattttatgccatttatagatcatgaaaactgagaactaatgaagtttatgcttttgttatatagcacataatgcccctttttttctaaggttaaagtggtaaaaatcatttggtgcatagtgtgtgttattttattgttatcattaaagaattctattgtaagttggatcagtatgtgctgttgagacatacatgaaatacctgtcatggtcgtatatgttgacaaaaaataccggtataatttttactctgattagctgtaantatttttgtgttatatgtccagtttttagatctgc

SEQ ID NO: 46864 - DNA, 389 bp, Gossypium hirsutum
  Clone ID: LIB3196-031-P1-M1-H11
ctacattcgtggtcctcgtcaccgaaggaaacggccacgtcgaaatggtctgccctcacctttctaggcagagctcacactggtcctcccgagaggaagaagaacaagaagaacaagaagttgaaaggagaagtggacaatacaagagagtgagagcccagttatcaaccggtgacctatttgtagtcccagcaggccatccagtcacattcgttgcctcccaaaacgaggacctaagattgctcgggttcggactctacaacggccaagacaacaagaggatcttcgtggctgggaaaaccaacaatgtgagacaatgggatcgccaagccaaggagctggcgtttggggtggagtcaaagttggtggatgaggtattcaacaacaac

SEQ ID NO: 46865 - DNA, 241 bp, Gossypium hirsutum
  Clone ID: LIB3196-031-P1-M1-H12
ggcatcatcagaaacgccattgattttaaatgtatcgcaaaattccaaaaggttcgctaaatgagcgttgggatcttcatcctgcaaaccatcaaattgaacgaattgttgtatcatctgaatagtgttaggttttagttcaaaagtatttgttgctatagcaagtctagctatgctagattcatttcttgttaaataaggtttagcataatcatacatagtacgtggagcaagattttga

SEQ ID NO: 46866 - DNA, 374 bp, Gossypium hirsutum
  Clone ID: LIB3196-031-P1-M1-H2
atatctacataaagtatatacacctcaacaattattccttttattttttaaaattgttaaaaatattatttagaaaacgtatttagattaaaagcctttaaaattagtttttgcattcaatacttcaattattgtcaaattattaattattaattattaaaattcacatgatatttttccagataatatatatatatttttcaaacacaaaagtacatggatgagaatgaaatatgaaaaaaaaggttaaaagatgataaatgtggtgaaagtatttaccagtggagtgtaatcaagttgggctgaactcgaatagtgccaacttgaattggactccgagttcaaggttcaatattcggtttaagttcaactcg

SEQ ID NO: 46867 - DNA, 234 bp, Gossypium hirsutum
  Clone ID: LIB3196-031-P1-M1-H3
gcaaaatgtgggctaatatatgcatgaaaaatattcgcctaggcttgggtaacctagacatttcgtgcatttaattatacgagccttaggactaaattgtaaaaagtgtgaaaggttaggggcaaattggtcattttgaccgggggtgagtttatgccgaagatgaacaatgtgaggtattaatgatctatttttactaatatagaccccgaggaaccaattgcggaggttcat

SEQ ID NO: 46868 - DNA, 406 bp, Gossypium hirsutum
  Clone ID: LIB3196-031-P1-M1-H4
attgtatatgcttttgcaagtttgaaaaattcaaattaaccccttttgactaggtaggtctttctaaaaaccatttaaagctaactgggtcttagcatcctcctgtgtatggaagggacaggtggccactccaggttgggtgctcacagaacccttttcctgactgtcatggaagatggtagaaggaaaatggactgtctcatcaatactgctgtgtcctctgaagcaatctcagtttttattaaccacctcttctgtgtttctggtagctatttaatctgtatttaatctgtacttcttatgccagcctcgattttatttgatttttaaaattagtctcttctaaccaatgaagtgtttgtcagtatgccccaaagcttgctcttttgtgcccccttttgaataa

SEQ ID NO: 46869 - DNA, 375 bp, Gossypium hirsutum
  Clone ID: LIB3196-031-P1-M1-H5
gggttacccttccagtaggcataaggttccctctttccccactttatcctctccctccctttctttattgctctcaacgtctcctcccatggctttatattcacctccgccctgccaggacaaagcaaagtaaatatgattaactagctaattgcagtaaaaagttataaacactaggcatttttttctccattaacgtcgtgtgaatttaggcaatatgtagcagaatttaccatccccagaaggtccaatcagggaacacaatgtccagtgctgctttctctccacagtaatgaaaagccggcggtggtgatgtagcattgagtcctttgtagtctcttttcatgatcatagtcttgtctccactatagaaca

SEQ ID NO: 46870 - DNA, 57 bp, Gossypium hirsutum
  Clone ID: LIB3196-031-P1-M1-H6
tgtccctggccgtcatcgtcaccacctcgctataaactgatagaggcacataatcgg

SEQ ID NO: 46871 - DNA, 265 bp, Gossypium hirsutum
  Clone ID: LIB3196-031-P1-M1-H7
tttcgtctaggcggtggaggatgttcttctaatggctttggaaggccttggattaactgtgtgcccccctggagacattcaaaaggccaccgttaaccagattctactgactaccctcaacctgcaaatcgacccgaccatccaaagagtgccgaccgaggaacgtgaacagatcaagaccctaaacaacaatttcaactgcttcatctacaatgtgcggctcatgtagcaccagaacacggttcttgaaaccaagtgtaccctg

SEQ ID NO: 46872 - DNA, 284 bp, Gossypium hirsutum
  Clone ID: LIB3196-032-P1-M1-A1
gcggccacgcgttcgcggacgcgtgggcttccatctactagcaattgcttcaagggcttttatttgttttttatgatcaatgggtgaccactaccttcaaaacactgaaccaatgactcaccaaatggtgaaaggcgatactggcgcaacaggcggtgggtccctgctcattctctgcggattaatactagctggcaccagtattgggcttaccatagtcactgcactcttggttattttaagaccagctcttgctcctgctctcattgcagcaggtttcctag

SEQ ID NO: 46873 - DNA, 371 bp, Gossypium hirsutum
  Clone ID: LIB3196-032-P1-M1-A10
atcaagacccatcagtctgctgtattcaggagacccatctcacacgcagagacatacataggctcaaaataaagggatggaggaagatttaccaagcaaatggagaacaaaaaaaagcgggggttgcaatactagtctctgataaaacagactttaaaccatcaaagatcaaaagagacaaagaaggccattacataatggtaaacggatcaattcaacaggaagagctaactatcctaaatatatatgcacccaatacaggagcacccagattcataaagcaagtccttaaaaaacttacaaagagacttagactcccatacaataataatgggagacttcaacactccactgtcaacattagacagatc

SEQ ID NO: 46874 - DNA, 328 bp, Gossypium hirsutum
  Clone ID: LIB3196-032-P1-M1-A11
atcggatgacaacttctccaccatagtggctgccgttgaggaggggcgggcaatctacaacaacatgaaacagttcatccgctacctcatctcgtccaacgttggggaagttgtctgtattttcctgacagcagcccttggatttcccgaggctttgattcctgttcagctgctctgggtcaatctggtgacagatggcctgcctgccactgcactggggttcaaccctcctgatctggacatcatgaataaacctccccggaacccaaaggaaccattgatcagcgggtggctctttttccgttacttggctattggctgttacgtc

SEQ ID NO: 46875 - DNA, 368 bp, Gossypium hirsutum
  Clone ID: LIB3196-032-P1-M1-A2
aacgaggaagaggaaggagaaggtcaggaaacggcttagaagaaacattctgctcaatgagactggaaacacaggacccctgcttcctctgctgatgttttcaacccacgaggtggtcgcatcaccacagttaacagtttcaatcttcccattctccaatacctccaactcagcgccgagaggggagtcctttacaataatgctatctacgctcctcactggaacatgaatgcccacagcattgtttacatcacaaggggaaatggaaggattcaaattgtgtcggaaaatggagaggcgatattcgatgagcaagttgagaggggtcaagtcataaccgtaccccagaatcatgcagtggtgaaaaa

SEQ ID NO: 46876 - DNA, 371 bp, Gossypium hirsutum
  Clone ID: LIB3196-032-P1-M1-A3
atcggggatggcggttgtggcggcggctgcaggctggctgctcaggcttagggcggcaggggctgaggggcactggcgtcggttccgtggcgtggggctggcgcggggatttctgcacccctccgcgactgtcgaggatgcggcccagaggcggcaggtggctcattttactttccagccagatccggagccccgagagtacgggcaaactcagaaaatgaatcttttccagtcagtaacaagtgccttggataactcattggccaaagatcctactgcagtaatatttggtgaagatgttgcctttggtggagtctttagatgcactgttggcttgcgagacaaatatggaaaagatagagtttttaata

SEQ ID NO: 46877 - DNA, 303 bp, Gossypium hirsutum
  Clone ID: LIB3196-032-P1-M1-A4
taaataaataaatctcaaatgcacgattttaaaatacgattttaatcaagatgacataattgtgttagattaattacatttcttaacttagaattattaaactcatgtttatattgttacgaataagttcacaacaactcgataatttgctaacttatgaacttactcacctaccaaaattcatttatcacttgactatatccctatgtcaatccaaccgattaaacaaatcttaataggcaaatatgttattgcacatacatacttattaaatataaataatctcttgtacatatccctatg

SEQ ID NO: 46878 - DNA, 271 bp, Gossypium hirsutum
  Clone ID: LIB3196-032-P1-M1-A5
attgcggatgagcccgtggagaagacgccccagactcagcaggatgagctctacatccactcggagcctctgggcgtggtccttgtcatcggcacctggaactaccccttcaacctcaccatccagcccatggtgggcgccatcgctgcagggaacgcggtggtcctcaagccctcggagctgagtgagaacatggcgagcctgctggctaccatcatcccccagtacctggacaaggatctgtacccagtcattaatgggggtgtccctg

SEQ ID NO: 46879 - DNA, 99 bp, Gossypium hirsutum
  Clone ID: LIB3196-032-P1-M1-A6
atcttccctctcacctccagcctctcacgctctcctcagctctctcatctcctggaaccatggccagcacattcaccaccataggagccacacacgccg

SEQ ID NO: 46880 - DNA, 368 bp, Gossypium hirsutum
  Clone ID: LIB3196-032-P1-M1-A7
attccctgtcttctcctttaatccctaaattttcatccccaagctcccaacccatttgccaccgaagatgccgaccggaccacctggtgcatcgccctcgactaacccctctgctgcgtctccgtcgccgtcgctctctactaccacagctaatcgataaagggctcagatagtttggtttctattgttgcttctaggtctggaaaagggctcccaattctttcatactatctaacgttaacaacctaaaaggctattgcagcaatgatgcgtgctcaggaagccgatcctatcaatctggaaatacttcttgctcttggtgtgagtcatacaaatggctagtgaatgcttatccctttaatcaagat

SEQ ID NO: 46881 - DNA, 404 bp, Gossypium hirsutum
  Clone ID: LIB3196-032-P1-M1-A8
atgctgggttggggtccaaagtgtaaggaccccctgcccttagtggagagctggagcttggagacattaccccttcatcagaaggaattttcggatgttttcttgggaagctgctttggtccttggaagtagagctgggaagcttcctttgcctctaggtgagttgtcatgagggtaagttgaggttatcttgggataaagggccttctagggcacaaaactcactctaggtttatattatacgtagcttatattttttactaaggtgtcaccttataaacatctataaatcgacttctttttcttagttgcatggccaagcagtcccctttttaggagttggcttctgcaaactcaatccattgaactaactgttggggagcaatttggtagttgtagacatt

SEQ ID NO: 46882 - DNA, 371 bp, Gossypium hirsutum
  Clone ID: LIB3196-032-P1-M1-A9
cccacgcgtgcgcggacgcgtgggtttccatttactagcaatttcttcaagttcttttctttgttttttttaatcaatggctgaccactaccttcaaaacactcaaccaatgactcaccaaatggtgaaagccgctactgccgcaacagccggtggttccctcctcattctctccggtttaatcctagctggcaccgttattgcgctcaccatagccactccactcttcgttattttcagtccagttcttgtccctgctctcattgcaacagctctcctagcaacgggtttcgttgcctccggcggtttcggtgttgcagctgtcacggtcctgtcctggatttacaggtatgtgacggggaggcacccac

SEQ ID NO: 46883 - DNA, 372 bp, Gossypium hirsutum
  Clone ID: LIB3196-032-P1-M1-B1
attggtgtgttaaaagtagggtttctttgcctctctacagtacactaatctgcctaaaggtggttgtttcatatttataatgctaattgtcatacctacctactttaaattttaggtagaaaattatctgatttaaatacagacacatatttttctcacattgagtcatatgcataatgtagttccaaatgtatttcattactatagtcacaatatccaactaaaaattacgctatctagaattgtaccgaccaaaatctagtattggcagatcttgacaggctggacctgcaagatatggcttgaattttaaccatttattacataatctctagtgatcatgcatctagttatcataagaaataatttaaa

SEQ ID NO: 46884 - DNA, 187 bp, Gossypium hirsutum
  Clone ID: LIB3196-032-P1-M1-B10
gagggtggtaggacatgaatgtgaaccatggaaggttactttgcttgcttgtaaaatgtacttttaagtgtttttcattttcgagaagtcttttgcctttgcgattttcgtgcgtgttcattttatcttcttctttttctctagttgtgaaataatgggtaatatagtaatatattagatttgtggt

SEQ ID NO: 46885 - DNA, 352 bp, Gossypium hirsutum
  unsure (1)..(352): unsure at all n locations; Clone ID: LIB3196-032-P1-M1-B11
atcaatgacctgcggcactttgaccctgagtttactgaagagcctgtccccaattccatcggcaagtcccccgacagcatcctcgtcacagccagcgtcaaggaagctgctgaggctttcctaggcttttcctacgcgcctcccacggactctttcctctgaacgctgatagggcttggttttaaagggttttatgtgtgtttctgaatgttttagttagccttttggtggagccgtcagctgacaggacatgttacaagagaatttgcacatctctggaagcttagcaatcttattgcacactgttcgctggaagctttttgaagagcacatactnctcagtgagctcatg

SEQ ID NO: 46886 - DNA, 134 bp, Gossypium hirsutum
  Clone ID: LIB3196-032-P1-M1-B12
gctgaagataactaaaaggggacaatttaacccataagtagggagaaaacatatgttctttctaggactatcacaccccctaacttgagttgggtcttggcctcaagtaaaacaaaaactggcaacgctataca

SEQ ID NO: 46887 - DNA, 294 bp, Gossypium hirsutum
  Clone ID: LIB3196-032-P1-M1-B2
aattctcaaaacaatctaactctaacttctgctgcgatctcaacgccggcgaacataaatacggcgctggtcggtacttcggttatcagtccttctagcttcgttcaatcgcagccgcagagtttgactctggactttacaaaacctaatttgtttggctccaacggtaaaagtaccgagttggagttcacaaaagaaagccttagcgtttcctctaactcttcgtttatgtcttctgccatcaccagagatggcagcgtctcgaacgggaagcagggatcatctctattcttg

SEQ ID NO: 46888 - DNA, 373 bp, Gossypium hirsutum
  Clone ID: LIB3196-032-P1-M1-B3
ccagaacattaaaaaggaaaaaaaaaatcattggtctttctcgattgttgggtctttgagatatgtcgtcggagatcgaggtggtggaggaggctgtacctttgaagcaattgagtggcgttgtagcgaatggaaatgaatatgggggagggcatcatggggttgtcggtgatgttgccgatgatgagagcttgaagaacgatgtctataccgctgctgcttatggggatttggagaaacttcagaggttggttgagtccgaaggttgctctctttccgagcctgatggccttggttactatgcccttcagtgggctgctttgaataatagaaccgcagctgctcaatacatcatcgagcatggtggagatgt

SEQ ID NO: 46889 - DNA, 263 bp, Gossypium hirsutum
  Clone ID: LIB3196-032-P1-M1-B4
atttttcactttccgcacacttagcttaactaagcaagctcgtaagctgttttcatcaatggccgaccgtgaccgctcttaccggacgtttgaccaggttgttcgtggtgatagaacgaactatcaaagcggaccatcaacaacccaagttctaactgtcctcaccctccttcccataggcggcactctccttgcattagccgggctaaccctcaccggcaccgtcatcggcctatgcatggcaacgccactcttcgtcatct

SEQ ID NO: 46890 - DNA, 310 bp, Gossypium hirsutum
  Clone ID: LIB3196-032-P1-M1-B6
cccacgcgtccgaaataaactaagatccattgagtcataaaatgtaaattactggattgaaaatacaaaaatatgtgctgaagataactaaaagggaacaatttaaccaataagtagggagaaaacatatgttctttctagtactatcacacccccaaacttgagtttgtacttgtcctcaagtaaaacaaaaactggcaacgctatacaagaattcactaaggtaaatgatcattctagcaactttaatcacctaaaattccaatgaattattcacattcagatgacagaatattgcatcgacaatgca

SEQ ID NO: 46891 - DNA, 319 bp, Gossypium hirsutum
  Clone ID: LIB3196-032-P1-M1-B7
cgatttgaaggtcgttgaacccctgggggttcagccaatggccgtggaagggaacaacgaaccaaaaagggggttttcccttttctcttccgtcgcgatgggctatgaaggctccgccttcgaaccagttcggaagaggaccaaaagggcccgtttcactcaacaccgactgccgttcgaggcatgggcgaagagacgcccccgatgagcccatggtcggccatgggggaggctaagaggaaaatgggagggagagaaaagcagaagctctcttttttttttaaatgaagtcttgaaaatggaaaaaaaaaagggtttt

SEQ ID NO: 46892 - DNA, 302 bp, Gossypium hirsutum
  Clone ID: LIB3196-032-P1-M1-B9
ctctgtctaactagatggaacgctgaagcacgctggtgccccgccgcaatattcggggttggaaccgcgcgtgcgagccaccacacccagctatgacagggacttgtgtatcaccgcagctggtctcaaacccctgggctgacgatattctgctgcccgagccttctaaagtgttgggaatacaagcatgagccactgtgcctggccacattgaatctatttataagagtaagtgaccaagctatatgcaccacataaacagggaccatatctgctttttttacgagcgattcaaggactat

SEQ ID NO: 46893 - DNA, 393 bp, Gossypium hirsutum
  Clone ID: LIB3196-032-P1-M1-C1
atctctaaactttcacaggttcctggtatcatggaaaagccaattctaccacattttcttttgtacttttatatatatttatacttacaattttaaaaaattatatattttatagggaaattagtatgttctttgtcagagtggtgtcaggcatactcatgttctaaaaagtctaacagtgatcaacactgccttgattttacccgccctgcctcccccctcctgttttttttttttgctgtaatagaagacctttctaaaccttgccatcatataaatatgatctgatagcataaacccacaattaagagttttcaaaattttaaactgatcattaggcagttttaaagacacacatacagataaagcttgtttggtttggtttttcttttc

SEQ ID NO: 46894 - DNA, 276 bp, Gossypium hirsutum
  Clone ID: LIB3196-032-P1-M1-C10
atctccctctccaccactctcattttggctgccacgcccctcccctgcagggccggctgtactctgatcactatggcatgtaccacacaagcccctcgctgggcggcctgacccggcccgtggtcctgtggagtcagcaggatgtctgcaagtggctcaagaagcactgtccccacaactacctcgtctacgtggaggccttctcccagcatgccatcaccggccgggcactgctgcggctgaatgcggagaagctgcagcggatggggctggccc

SEQ ID NO: 46895 - DNA, 302 bp, Gossypium hirsutum
  Clone ID: LIB3196-032-P1-M1-C11
atctgagaccacgtgggcaattatctgggatgtgctggtgtcccttattatgtgctaaggcctgagaaccccacggcgtccatgtgaagaggtttttgcatatctttgtaaatttctgacacactctttttatatccagcgattctaacactgaggaattttttatagggacaacacctcccatgttaacgaaaggggttgatataatacttcgtgaaaaaaacaacttgtgataaccaaaatgtgcatcaataggagactggttgaaaagccataatgtgtctacgtgccatgcaagtgcg

SEQ ID NO: 46896 - DNA, 324 bp, Gossypium hirsutum
  Clone ID: LIB3196-032-P1-M1-C12
gcataccatattgatttggtagaaatgtggggtaattatgatgtttttcttggtataatatcaacaactagtgatgaatcttcacaaattagtagcaatgttaatgttcattcatggagattcagggtaaatgttgttccaagttggatgcattcattgcctgctgatccaagaagttacatggataacaaggatagtgaggaaactagggaagaaaaggggaagttttgtgctttgccaattcttgctaggttgattttcgctactggatgtggtgcctttgttgcgttcatgatgcttgttaatgcggtgattttcgttagt

SEQ ID NO: 46897 - DNA, 350 bp, Gossypium hirsutum
  Clone ID: LIB3196-032-P1-M1-C2
gggtagatcttctttcaaccgcgcctaataaccgctcggatttttctcagacgtgaaaaaaatggggctgtctttcaccaagctattcagccggctatttgccaaaaaggagatgcgtatactgatggttgggcttgatgctgctggtaaaaccaccattctttacaagctgaagttgggagagattgtcactaccattcccaccatcggtttcaatgttgagaccgttgaatacaagaacatcagcttcactgtttgggatgttggtggccaggacaagatccgaccattgtggagacactatttccaaaacatgcaaggacttattttcgtggttgatagcaatgatc

SEQ ID NO: 46898 - DNA, 345 bp, Gossypium hirsutum
  Clone ID: LIB3196-032-P1-M1-C3
gcaaaatagaccacccctcccttttatcccttttgtttgggttttgacctcaaccttggagcgccaccgcaccaccatcggacttggtgccgaccacgcgcagaaaggacacgacgagaggccggaggtaagtattattctttctttttattctcttttgaaactggttttctttttttattttccgtttggtacatattttttcctttcccccttctccctttggagttcgaaatcgatgaaggagggaggagttccagcgacgtgattcggtaagtccctttcccctccctttttatttttcatatttatgtgaaaaaacaaaaattaaaaaattaacttaag

SEQ ID NO: 46899 - DNA, 278 bp, Gossypium hirsutum
  Clone ID: LIB3196-032-P1-M1-C4
atggctgaacaactcaaccttctctgcacagtgggtccagcatcctttgaagcatgagttcttaccaggagaagcagacctttaccccaccacctcagctttaacagcagcaggtgaaacaacccagccagcctccacctcaggaaccatttgttcccataaccaaggagccatgccacccaaaggttccacatcctgtaaacacaaagattccagagccagattgcaccaaggtccctaagccaggctacaccaaggaccctgagccaggcagcacc

SEQ ID NO: 46900 - DNA, 252 bp, Gossypium hirsutum
  Clone ID: LIB3196-032-P1-M1-C5
atctgattctacaccactaatatgttgggatgcgggcgcgtccatgtgaaggtgcgttgacagctgatcactatggcatgcaccacacaatgcgcttgcacgtcggtcagaacccgcccttgagtctgtgtattcagaacgacgtgtgcaacgtggttaaagaagcactggtctcacaactaccttgtttacgatagagtcctttcttccaacatgcctttatcgaccggccactgttgctaaataaatgcg

SEQ ID NO: 46901 - DNA, 325 bp, Gossypium hirsutum
  Clone ID: LIB3196-032-P1-M1-C6
cggacgcgtgggttgcttttaccgcattcaaaacaaaatatgtatattgtgaagaagactatttgtctttacctcttttttttttcttttttcaatctaaattggactaaattggggggggggggggtaattatattcctattgtcagtgtcagagttaaatgttacacaataggtcttgttttctaaattcaattcgagtagatactaaacataagataagtccgtggagaatataaaggaaggatgaattaaatgagtggaacaaacagggagtattcttcgtctttctagccttcgacacaagaaaaggaattttacacacc

SEQ ID NO: 46902 - DNA, 349 bp, Gossypium hirsutum
  Clone ID: LIB3196-032-P1-M1-C7
atgaaaaaaaaaaaaaaaaaagagcaaagttataggaaaacatgatttctcatattttgttttaggactgcagaacctcacgacttcaatgaagagagatttggcaatatctttcaaaattacagacacacttgtatttgacccagcaatcctacttctgagtatttttctataggtacaactccacacatgtaaacgaatggcattgatatagtacttgtaaaaaaaaacaattggaaataaccaaattgtccatcaataggagactggttaaaaagccatagtcatctacgtgccatgcagctgcaagaaaaaaagaaaggacacaagaaagaaaagatgaggatca

SEQ ID NO: 46903 - DNA, 364 bp, Gossypium hirsutum
  Clone ID: LIB3196-032-P1-M1-C9
atccttgaagttgctgtcccttaactggcacctcctctctactttcatggacttgtttctttgtaatagtgcaatttggttttgttttatttggggttcattgtatgtttgggaatcaccaaaggcttttagagttctttggcaaaataaaaatatttgactaatcaatttttattatcggaatagttttaacctttcaaatacatgttctgtcctggagcaggattgtagaaactaacagcgtctattttcatgtctgatatgttcttcgtttagtcatcatgttaaatctgtgtaccctaaatcagcatattactcataaatcattaattcatgtaagtataggaaatggtcttaaaagata

SEQ ID NO: 46904 - DNA, 340 bp, Gossypium hirsutum
  Clone ID: LIB3196-032-P1-M1-D10
atgtggtggggtagccctgaattcttttgacgacctaagtcccgactgcttgggccatgcaggacttgtgtatgagtatacattgggagaagagaagttcacctttattgagaaatgtaacaaccctcgttctgtcacattattgatcaaaggaccaaacaagcacacactcactcagatcaaagatgcagtgagggatggcttgagggctgtcaaaaatgctattgatgatggctgtgtggttccaggtgctggtgcttgggaagtggcaatggcagaagccctgattaaatataagcccagtgtaaagggcaaggcacagcttggagtccaagcattt

SEQ ID NO: 46905 - DNA, 281 bp, Gossypium hirsutum
  Clone ID: LIB3196-032-P1-M1-D11
gcttgctgatccacttcaccgctactactatacaggcattcacactacccttatcgggcttgcaattccaccgcgcctgacaaaccctcctcccattcctgacgcctgtaaaggtaactgctacttcagttttggcttcatagataaagaatggcaagcgcgtgcttttcgacatcgccctcgtctcttcgattcagatctctgctcttctcttcaaactcaagcaccaatgtcgattctaataagttggctctttcttttcatacccttcgtcccaggaa

SEQ ID NO: 46906 - DNA, 399 bp, Gossypium hirsutum
  Clone ID: LIB3196-032-P1-M1-D12
atgtggtggggtcgccctgaatgctgtggacgacctaagtgccgactgcttgggccatgcaggacttgtgtatgagtatacattgggagaagagaagttcacctttattgagaaatgtaacaacctctggttctgtcacattattgatcaaaggaccaaacaggcacacactcactcagatcaaagatacagtgagggatggcttgagggctggcaaaaatgctattgatgatggatgtgtggttacaggtgctggtgctgtgagaggcgcaatggcagaagccctgattaaatataagcccagtgtaaagggcaggggacagctaggagtccaagcatttgctgatgcgttgctcattattgccaaagatcttgctcagaactctggttttgaccttc

SEQ ID NO: 46907 - DNA, 270 bp, Gossypium hirsutum
  Clone ID: LIB3196-032-P1-M1-D2
ccataggaattgctgggaatactatttcgagaacctttttgcttcaagaggaggacggaatcatgacttattttcaaggtcacagggacttaatttcattaatttattccaaatattgacgagattacatcaataatgggttaatttcaccaacccaaaagaagcactaattctatttataacaaagtgacaatatatcaccacacgttggttattaaattaacctaacccgatagtattaatgtgggaatgagttacgcccaagtcacc

SEQ ID NO: 46908 - DNA, 309 bp, Gossypium hirsutum
  Clone ID: LIB3196-032-P1-M1-D3
attttctttttcttttttggttttcggtgctcaaaaagaaagtcggtcttttttttttttgtttgtttgtttgtttgtcactgttgatttcttgttttgcaagttgatttttattatttctgctaatttttaactttctttttgttcccttgggagattctggttgtgattatgaataataactggagaagaccaaaaggtgaaattcatcatcatcatcaaggaatgcaggggacaagatcatattcccgaaagccatctcttgctacgtggcagccgactgttccttcatgggagaagaagttttgc

SEQ ID NO: 46909 - DNA, 307 bp, Gossypium hirsutum
  Clone ID: LIB3196-032-P1-M1-D4
cagctgtgatgttgcatccttcatttgtgactgtggacgatatcaagagtgtgaaggtgcccatcgcgatattgggagctgagattgacaatttgtctcccccagaacttgtaaaacagtttgatgagatattaaaagtgagtgaggttgatagctttgtgaagatatttcctaaatgtgcccatggatggacggtcagatacgatgtcaatgatacaacagctgtgtcatgcgctaatgaagctcatcaagatatgttggagtggtttgcaaagtacgttaagtgagaaacttatccgatgatgat

SEQ ID NO: 46910 - DNA, 348 bp, Gossypium hirsutum
  Clone ID: LIB3196-032-P1-M1-D6
ctcgaaaaaaaaaatgtcttcaggttgcaattgcggatctaactgcagctgcggtgacaactgctcatgcagcaggaaccttaaccttggatattcggagaagacaaccagcactcagaccatcatctccggagttgcgccagtgaaaatgacctttgagggaccagagatgagcactactgaatcaggacatggatgcaagtgtggatcaaactgctcttgtgatccatgcaactgttgaaaagcttgatgaaagccatagattatgaaaaaaagaaagcagcaaaaataacaggcctctgtaatgatatattgtcaaggatggatgcctgcaaggtctataattat

SEQ ID NO: 46911 - DNA, 318 bp, Gossypium hirsutum
  Clone ID: LIB3196-032-P1-M1-D7
cccacgcgtccgtggaaagcaagaacctagaaatcaagaaaataaatgatgagaagaaggcatccatggctgctcagtttgcagctgaggccactctgcggagggttcatgctgctcaaaaggacgatgatatgcctccaattgaagcaattcttgcacccttggaggctgagctgaagcttgctcggcaagagattgcaaagcttcaagatgataacaaagctctcgatcgtctaactaaatcaaaagaagcagctttaattgatgctgaaagaactgtagagtttgcattggcgaaagcttccatggtagatgatc

SEQ ID NO: 46912 - DNA, 345 bp, Gossypium hirsutum
  Clone ID: LIB3196-032-P1-M1-D8
cggacgcgtgggctcctctttctcccatggctgcctccgttgatcctctcgttgttggtcgtgttattggcgatgttgtcgacatgttcgttcccaccgtcaccatgtccgtctactatggttccaagcacgtctctaacggatgtgacattaagccttctatggctatcaaccctcccaaagttgccatcgatggccttcctgaccagttttatactttggtgatgactgaccctgatgcgccaagtcccagcgagccaaccatgcgtgaatgggttcactggatcgtgtctgacattcctggaggaaccaaccccactcgagggaaggaaatcctggcataca

SEQ ID NO: 46913 - DNA, 374 bp, Gossypium hirsutum
  Clone ID: LIB3196-032-P1-M1-D9
atcggctgtgttgctcgtttctctgagccatccagtgccatcctcgtcgctgcagcgacacacgcgctcgccgccgccatgactgagcagatgacccttcgtggcaccctcaagggccacaacggctgggtaacccagatcgctactacccccgcagttcccggacatgatcctgtccgcctctcgagataagaccatcatcatgtggaaactgaccagggatgagaccaactatggaattccacagcgtgctctgcggggtcactcccactttgttagtgatgtggttatctcctcagatggccaggtttgccctctcaggctcctgggatggaaccctgcgcctctgggatctcacaacgggcaccaccacg

SEQ ID NO: 46914 - DNA, 289 bp, Gossypium hirsutum
  unsure (1)..(289): unsure at all n locations; Clone ID: LIB3196-032-P1-M1-E1
gccgacgccgctgattccaactcaacccattggtccccagcgcactcctccgctctctaccgcatcgacggatggggagccccctacttttccgtcaataacgccggcaatatcaccgttcgtccgtacggaacggacactctggcccaccaagaaatcgatttgctgaaaatcgttaagaaagtctcggatccgaaatctgtgggcgggctgggtttacagcttnccctcattgttcgggtgcccgatgtgctgaaaaaccggctcgagtctcttcaatcggcttttg

SEQ ID NO: 46915 - DNA, 345 bp, Gossypium hirsutum
  Clone ID: LIB3196-032-P1-M1-E10
atgggtgagataagcagagtatacttgaaccactcccagcattcctgcatgccctctttttcttcaggtccagctgtagttcctccggacgttctcgaagatgctcttcctcttcatcatcatcttcctcttcgtcttcctcatcctcatcatccagttcccgaagccgctcacgctccccatccccccgccggagaagtgacaggaggcggcggtgagcacgtgtttagggagcaccatgcacctggcatgcaagtgtctaagagttctgagtcttgaattggcttatgtttggggggctgacgacaccttctcttgtcaagtacagctcttatcgttcacatg

SEQ ID NO: 46916 - DNA, 394 bp, Gossypium hirsutum
  Clone ID: LIB3196-032-P1-M1-E11
attgtggatgaaatgtctttcctccaggacccaagtttcttcaccatggggatgtggtccattggtgcaggagccctgggggctgctgccttggcattgctgcttgccaacacagacgtgtttctgtccaagccccagaaagcagccctggagtacctggaggatatagacctgaaaacactggagaaggaaccaaggactttgaaagcaaaggagctatgggaaaaaaatggagctgtgattatggccgtgcggaggccaggctttcctctgtcgagaggaagctgcggatctgtcttccctgaaaagcatgttggaccagctgggcgtccccctctatgcagtggtaaaggagcacatcaggaccgaagtggaggatttccagccttatttc

SEQ ID NO: 46917 - DNA, 335 bp, Gossypium hirsutum
  Clone ID: LIB3196-032-P1-M1-E2
aagagaaatacacaagaaaaaaaaaaaaaaaacaagtgagcagataaattgaagacttttatttctgttaacatccattatgagtactgctggtcaagtcatccgttgcaaagctgcggtagcatgggagtcggggaagccactgtcaatagaggaagtggaagtggcaccaccgcagaaggatgaagtccgtattaagatactcttcacttctttatgtcacaccgatgtctacttctgggatgctaaaggacaaaaccctctgtttcctcgcatactaagtcatgaagcttgagggattgtggaaagtgtatgttaaggggtgactgatctaa

SEQ ID NO: 46918 - DNA, 353 bp, Gossypium hirsutum
  Clone ID: LIB3196-032-P1-M1-E3
ggccaactgcacatcaaagcatgggatcaaatcctgctgtaggaggatcaacccaggcaatgaacatgatgagtgggcctaagcttgagaggcaaaactctagtaatgacccaaatagattgcagggcacatcactttctcacttttctagtggttcagttccttggcaagcctctccgagtaaggagctgaatcctggccctttttcatcagcgacatatgtgaaacaggaatctgctgatcaaggtgctgaccagcacagatctcatttgcctgcaacccaaggagtctcgactacactagctgaacaagggaaagcagttacaactactgcaaaggatgagcctggagag

SEQ ID NO: 46919 - DNA, 417 bp, Gossypium hirsutum
  Clone ID: LIB3196-032-P1-M1-E4
ataattaatttccgaaatctttgtaacagttcacacccactccgagttacgatggcagacaaacagaaagcattaatacaagcccctcctaacacccttaatttgaatctgaacatgttaaaattggagaataaagagacatttttcatctctttgtctggtttgtcccttgtgcttatgggactcctaatggcatttcagtctgttgctgaagccattatattttaatataaatgtagaaaaaagagataaatcttagtaacgtgtattttttagtattagcttgattattgactcttctatttaaatctgcttctgtaaattatgctgaaagtttgccttgagaactctatttttttattagagttatattgaaacttttcatgggaaaagttaatgtgaatactgaggaatttt

SEQ ID NO: 46920 - DNA, 363 bp, Gossypium hirsutum
  Clone ID: LIB3196-032-P1-M1-E5
cggacgcgtggggaagcagccagccagccctcgtttccctcattttcctcttcattttctcgggaaaaaagaagcatgggaaaaggtcctggtctctactccgatatcggcaaaaaggctagagatcttctttacaaggattaccaggttgaccacaagttcactgtcactacttacacttccaatggagtcgcaatcacatcaaccgggactaagaaaggtgatttgcttttggctgatgtaaatactcagctcaagaacaagaacatcacaactgatgtgaaagtcgactccagatcgaatcttttcaccactgtcactattgatgaacctgcaccaggattgaagaccatctttagtttc

SEQ ID NO: 46921 - DNA, 274 bp, Gossypium hirsutum
  Clone ID: LIB3196-032-P1-M1-E6
taattgtttataccgtttcatgaatccaaactttttttttttgaaggtattaggtaggaaggtaacttttttgtttcatgaaaagttcaaaaataaaaacaaaattaatatattgttttaattttttttgacaaatggatgttcatatatttttgtaaattatggtgattgaaactttataaatagatatataaactttttggtatccaagtgaaagttgaattatcttttcatttttctacacttttctcttggcctttttataattctctta

SEQ ID NO: 46922 - DNA, 281 bp, Gossypium hirsutum
  Clone ID: LIB3196-032-P1-M1-E7
ctggatttgagggtgataacatgattgagaggtctaccaaccttgactggtacaagggtcccactctccttgaggctcttgaccagatcaatgagcccaagaggccttcagacaagccgctccggctcccacttcaggatgtctacaagattggcggcattggaactgtgcctgttggtcgtgttgagactggtgttcttaaacctggtatggtagtgacctttggcccctctggcctgaccactgaagttaagtctgttgagatgcaccatgaagccctc

SEQ ID NO: 46923 - DNA, 384 bp, Gossypium hirsutum
  Clone ID: LIB3196-032-P1-M1-E8
cggcgaaaggcgcatctcttccgaagctattgctttttaagctgaactctgctatcagactttgatattcgtagatctaagatttccggggtaaggactgacttaggcttagtgaatatctttgcttttcaatagtacgatcttcggcatatgaagagatatttttttttaagtttcttttcttaatcatctgggaatgaagaggatgataagttgacttctttcttcccttccatttcatccttttcacttagaagcgatccactttatatataaataacacctgtgctaatgatttctttcatgcagtaaacatggtcaagtgagtgaacaagacatttatttttcaagccaacagggaagactaactgaaaggagtaatat

SEQ ID NO: 46924 - DNA, 340 bp, Gossypium hirsutum
  Clone ID: LIB3196-032-P1-M1-E9
atgaaaagatggcggctgccgcacaatcccgggttgtccgggtcctgccaatgtcacgttctgccattactgcaatagccacatcagtgtgtcatggcccgccctgtcgccagcttcatcatgccgtcatacctcatgggaaaggtggacgttcctcagtcagtgggatcgtggccactgtgtttggagcaacaggattcctggggcgatacgttgtcaaccaccttggacgcatagggtcacaggtaatcataccccatcggtgtgatatatatgacaccatgcaccttcgtcccatgggtgacctgggccagcttctgtttctggaatgggacgcgag

SEQ ID NO: 46925 - DNA, 258 bp, Gossypium hirsutum
  Clone ID: LIB3196-032-P1-M1-F1
ccacatttcacttccacctgcttgcttacctatttgttgcgataatctcgaagcttccttttccgttttagatctcaaaattcaaaaggctctctttttcatctcatggctgctactattgtctccgtcaaagctaggcagatcttcgacagccgtggaaatcctacggttgaggttgatgtggaaatatcgaacggtataaaggctagggccgcagttcctagcggtgcatccactggaatttacgaggctcttgag

SEQ ID NO: 46926 - DNA, 391 bp, Gossypium hirsutum
  Clone ID: LIB3196-032-P1-M1-F10
gattggctctcgttatgaagagtgggaaatacactttgggttacaaaactgttctcaagtctcttagaagctccaaaggtaagttgattatcattgccaacaactgccctcctcttaggaagtcggagattgagtattatgccatgttgtgcaaggttggagttcaccactacaatggaaacaacgtagacttgggcactgcttgcggcaaatactttagagtgtgctgcctcagcattattgaccctggtgactctgatattataaagagcatgcccggtgatcactaagctatggggggataacttcctaggtgctgatttagtttcaatttttgggtgtctaaaaacatttgtgatgttaaagacaaacttattctgaaattcagaac

SEQ ID NO: 46927 - DNA, 320 bp, Gossypium hirsutum
  Clone ID: LIB3196-032-P1-M1-F11
tcgctcgagttgccattatcagagacagagagaaggatcgtactgacccggattatgacaggaattatcaaaggttcgtcagaagcattccatgtaaccagagtgtgggtgtggctccttacaatatgcagaagatgcaactttcattcatgcagtatgattctgctttttctcagctgggtcagattgcaaatacacaagctcccctagggtatggtgttacttcgaggccagctgtgagtccattatgagagctgggattgaatacaacttctatggatggtgcttatatgcagggggcaagagctaatatgatgtat

SEQ ID NO: 46928 - DNA, 410 bp, Gossypium hirsutum
  Clone ID: LIB3196-032-P1-M1-F12
atgcagaagccatagttcataatggtagggatacagggtccttcgtaacattatcagtgtggcctatgttggaaagtctggtgacctctgattttgtcttgcttctgggtctttgactttggcactctttgccatattagagttcctgggcctagggctgagcaggattcataggtgcagctgcttttgctggaggtagactgcatccaagaaaggaagtgtgctgggtgggttctgggagtagagattctgactggggtcaccgctgggctggccaccggtcttccttctgacccagggttaaactgtggcttgggactgactcaggtcctctcttggggtcggtctgcacataaaaagactcctattcttggcagttctgaagcaacaccaccacaatgcttaaagtg

SEQ ID NO: 46929 - DNA, 386 bp, Gossypium hirsutum
  Clone ID: LIB3196-032-P1-M1-F2
atggcaacggcaccggctccgcggcgcgcaggctaggctgcagactctcggcggcagcgttcggtggatctaggatctggcttccaacatgtggtggctctgggcctccctctgctgcctgctggcgttgggcgatgcccggagcaggccctctttccatcccctgtcggatgagctggtcaactatgtcaacaaacagaacaccacgtggcaggccgggcacaacttctacaacgtggacgtgagctacttgaagaggctgtgtggtaccttcctgggtgggcccaagccggccccagagagttatgtttaccgaggacctgaagctgcctgaaaagctcgatgcacgggaacaatggccacagtgtcccaccatcaaagagatc

SEQ ID NO: 46930 - DNA, 239 bp, Gossypium hirsutum
  Clone ID: LIB3196-032-P1-M1-F3
aatttgaatactgaactatttggaactgtttgaattgtgttaaaaaatcgattatttttatttttttaatatttttattttatgatttttttaataatttatttgattaaatgagataaactagtcggacaatcaaattgaaaattgatgatctgtttaatttgaccaaaacttcactgatttatttgactgttatggtttactttcattcccactcgtgtagtgaataaaaatgtgat

SEQ ID NO: 46931 - DNA, 400 bp, Gossypium hirsutum
  Clone ID: LIB3196-032-P1-M1-F4
tacaaaccatcaacttgtgtattgcatggatatatatatatgtatattatatttttactactccttcaaagatatgttaatcataaattcttggtggaatttttttttatcggtagcatatcaaattatttaatatatatatacatttaacagtaagaataaatgtatctatactataagatactatatttaaagggtttgacgtcactcattaatcgaattccaactcaagtgaacaattacctaaaactcatctttttataaagtaagaaacattgctatgaaaaagtttggtaaaagtaccacaaaactcctatcctatatcttgaattgcattttagccgctctactgaagaaatggacaaattagcccttatacattagataagtgagccaaatg

SEQ ID NO: 46932 - DNA, 224 bp, Gossypium hirsutum
  Clone ID: LIB3196-032-P1-M1-F5
ccctaaaacaactcacaatagggaaagctgggacgcccgctggcactcggtccgagaaatcccaggacgatttacgcgtccgcacaagtagccactgggagagacagagagaaggatcgtcctgaccccgattatgacaggaattatcaaaggcacgtcagaagcaatccatgtaaccagagtggtggagaggctcctcacaatatgcaaaagaggcaacatcc

SEQ ID NO: 46933 - DNA, 391 bp, Gossypium hirsutum
  Clone ID: LIB3196-032-P1-M1-F6
atgaaatatgggactatgtgaaaaaacaaaatctacgtttggctggtgtacctgaaggtgatgcatagaaaggaaccaagctgcaaaacactcttcaggatattttccatgagaacttccccaacctaacaaggcaggccaacattcaaattcaggaaagacagacaacaccacaaagatatactttgagaaaagcaaccccaagacacataattgtcagattcaccaaggttgaaatgaaggaaaaaatgctaagggcagccagagagaaaggccaggatacccacaaagggaagcccatcagactaacagcagatccttccgcagaaactctacaaagccagaagagagtgggagccaatattcaacattcttaaaagaaaagaatttc

SEQ ID NO: 46934 - DNA, 345 bp, Gossypium hirsutum
  Clone ID: LIB3196-032-P1-M1-F7
atattttgaactgctgggatcccatgttgaaactgaaactcatgagttttcattttctcttcccctgcttcctatagctgactataaagaaagcttcaacactatcagtaacatcgaggagattgcatataacgccatttccttcacatgggacatcaacgatgaagcaaaggtgggtggtgaggtctgggcgccttatgtccagccatttgagaatgggaggagtttaatgatttgacaactgatttttttttttcccacagttttatgtgttttcattctcaggtgttatgaaactatcctctcccctttctattctcccctcctccaaaacagatcattttt

SEQ ID NO: 46935 - DNA, 364 bp, Gossypium hirsutum
  Clone ID: LIB3196-032-P1-M1-F8
gtagatatggcgattaacccttctttgctctttctttcccttctttttctcttcaatggctgcctagctcgccagaccttttcgtcacagcagtcccaaaatgagtgtcaaatcaataggctccgcgcctctgcaccccagacccgaattcgctccgaagccggcaccaccgagtggtggaaccccaactgtcaacagctcaggtgtgctggtgtatctgtaatgaggcagactattgaacctaatggccttggttttgccttccttcaccaatgctcctcagcttctctacattgtccaaggaagaggtattcaaggtattgtgatgcctggatgtgccgaaacattccaggattcacagcaa

SEQ ID NO: 46936 - DNA, 370 bp, Gossypium hirsutum
  Clone ID: LIB3196-032-P1-M1-F9
attccacagttcctggtgtttttcctttttttggtataagtagctctcagacttttacccacatgagtttccattaaaattgtacaagctttgacttgaaatcagctgatgaatcgaaggagttggtgtgtgatcagctggtgccattgggaaaactgatgataagcagtggagcaggtaagaacgcattgttcctgagccattggaggaactagcagcaatgacctctgaggagccctgggaacaccctggagctcctgagcaacatgttgcttatgatcagtgacctggatatcatgactgtgtgagcaataacccccaacacctcagtagcaaaaacagagaacagtggcagcacatcgtgggctga

SEQ ID NO: 46937 - DNA, 63 bp, Gossypium hirsutum
  Clone ID: LIB3196-032-P1-M1-G1
atcttcctgaaggtcctctatgatgcggagctgtcccagatgcagacccacgtcagcgacatg

SEQ ID NO: 46938 - DNA, 389 bp, Gossypium hirsutum
  Clone ID: LIB3196-032-P1-M1-G10
gcggtgttttggtttcattgttggcgcttccttcactctccctctcaaacgatcgcctcttattttataatatgaaaatatatccttttgtttttctcttttgaattgagagagtcatcttctttcttcccgctctctacagatctttgggaaatatttatattttccgttcattactcgtcgaaacaactagttactgagtttttttatttgctacgatggcggcttctttacaaatttccggcgtaaaaaccgccccgtctcattcatttccaaagcagacttctttccactgtcgttcggcattttcgagccagcttcatttcgggtcattccggtctacggattcttgtaggaggctaaggcattgttgtaaaagtagagtgttt

SEQ ID NO: 46939 - DNA, 333 bp, Gossypium hirsutum
  Clone ID: LIB3196-032-P1-M1-G11
cacgaagtgagcagctagacgagctgtttggtgggaggcaaagccatcgaaggcagcagggacagggaatgttccgtaaagccagccaagaacaaataagggcattgagccaagaagctacttcaccaaggggaaaaggtagcgagggatacgccttcaacttattgagccaaacccctcgctactccaaccaaaacggccgcttctatgaggcttgccctcgtaatttccagcagcaactccaagaagtggattcctccgttgttgccttcgaaataaacaaaagatcgatcttcgtaccgcactacaattcaaaggctacattcgtggtcc

SEQ ID NO: 46940 - DNA, 372 bp, Gossypium hirsutum
  Clone ID: LIB3196-032-P1-M1-G12
aatggggattggagaggaaaggggaaactgaaggcggaagctgttttacaggcggctacgttggcggccagcggtcagccgttcgaggttgtttattacccaagagcgacaacaccggagttttgcgttaaggcgtcgtcggtgaaggcggcaatgagggttccttggtgttgtgggatgaggtttaagatggctttcgagacagaagattcttcaaggattagttggttcatggggactgtgtcttctgttcaagttgtcgatcccattcggtggcctaattccccatggcgacttcttcaggtaacatgggatgaaccggatttgcttcaaaacgttaaaacgtggtaatccttgatggttgaattggta

SEQ ID NO: 46941 - DNA, 199 bp, Gossypium hirsutum
  Clone ID: LIB3196-032-P1-M1-G2
gattgtatgaatgaaaaacacccttggcagttaattaggcctcttcaaaccagtgtcgagattttgaaggtcgtatgctccccctttgagtttgaaattggatgccgcgacattgattgctatatgctcttattttgagtcgaagttggatgtgttggaaaaaatccatttcgaaaatggttttcttgcacagtgaaaa

SEQ ID NO: 46942 - DNA, 133 bp, Gossypium hirsutum
  Clone ID: LIB3196-032-P1-M1-G3
ggaagatgttcgcccaatattttgggctaaccgtccaaagagttacttatctaggactattggttgggatcagtacccacaggggcgatggggtgattctcgaaatccatcgtatggtgcactattccgctat

SEQ ID NO: 46943 - DNA, 257 bp, Gossypium hirsutum
  Clone ID: LIB3196-032-P1-M1-G4
gcgaggacgcataggatcgtctgtcaggaattaaagaaacaccgctggctgatttaatgccattgtttgacaatgttctgctgcaagaaggttatgcagggatgaacattccatcaaaagtgaccctggcatgtcgaatggaacctcttattattagtgcttacccgaaatatttcgccaccctagacattgctccttttgcctttttcttagagcggaaaacaaggactaagctcaccatgccaatacttttacag

SEQ ID NO: 46944 - DNA, 349 bp, Gossypium hirsutum
  Clone ID: LIB3196-032-P1-M1-G6
agacgaagtgagcagctgaaaccgcttttggctacagcaacagggtggtggacctcatggcccacatggcctgcaaggagtaagacccccagaccaccagccccagcgagagcacaagatgcttgagagagggcgtaactgctggagggatactgccataatctattgagaccaaactgtatcttctctaacaaaaccgaggtttactttagataggcgaggggacttacagagcccatcttgaaagtggcattcatcaaagtccctgtgctcagcccacaaaggatcgatcttcgtaccggactacaattcaaaggctacatttgtggtcctcgtcaccgacggaaac

SEQ ID NO: 46945 - DNA, 279 bp, Gossypium hirsutum
  Clone ID: LIB3196-032-P1-M1-G7
gtgtgttttgcttttcatactcatttagcccctttcattagcatcaaaatcactccagttttctttatcactgaaaaatgtcttgctgtggtggaaactgtggctgcggtactggctgcaagtgtggcagtggctgtggaggatgcaagatgtatccagacctgaacgctgccgagatgaccacaactgagactctggttcttggtgtagcaccccagaaagcacactttgagggagctgagatggaattcggggcttgaaacggctgcaagtgtggag

SEQ ID NO: 46946 - DNA, 269 bp, Gossypium hirsutum
  Clone ID: LIB3196-032-P1-M1-G8
ggaggggcttatcctatatcgatcaaccatatccctctatatagatcgtggtatatccaacatcagcatttatagaacaaccggttacaatgtatgtttgactgtatcaaaatatacaatcacgatgttgggataatgatgatctcaagtctgaggatcatatacatattaatcattatgagtaatgttgtgacaattacataataatccaagaaacatactcataacgggttagtccaatatgttgttctctaacatacatattcatg

SEQ ID NO: 46947 - DNA, 261 bp, Gossypium hirsutum
  Clone ID: LIB3196-032-P1-M1-G9
gcgatggcttcttctttccttcttttccttctcattttcctttccgtttcttctttcatccttttatctgaatctcaaaagacttcgaaaccgaacaggttcgttttgcagctgcaaaaagatccgaaaactaaactttatgtgactaacatatacaagagaactccttcacagaaagtcccatttgttgtggacttgaatggaaagttactatgggttacttgggagaaaaagtaccggtcgtccacctaccattcccct

SEQ ID NO: 46948 - DNA, 398 bp, Gossypium hirsutum
  Clone ID: LIB3196-032-P1-M1-H1
ggatttgtgagactgatcttggtattgtttcccagtgctgcttgactaaacatgtatttagaatgagcaaacaatatttggccaatgtggcattgaaaattaatgtaaaggttgggggaagaaatactgttcttgttgatgcaatatcacgaaggatacctcttgtcagtgaccgtccaactataatttttggcgctgatgttacccatcctcaccctggggaggattcaagcccttctattgcagctgttgttgcctctcaagattggccagaggttacaaagtatgctggcctggtttgtgctcaagctcatcgtcaggagctcatccaagatttattcaagacatggcaggatcccgtaagggggactgtttctggtggcatgattaaagagctt

SEQ ID NO: 46949 - DNA, 350 bp, Gossypium hirsutum
  Clone ID: LIB3196-032-P1-M1-H10
cccacgcgtccgatttctacttcccaaagctatcgtataaaaatgggccacttttagatttcacttttaaaagaaccccctttctttcacttgttttgcatttaagtaatgggaaaagctacaaggtggctaaagagcttatttgggataaagaacaccaaagaatgcccaagttccggtgaccggaaagataagaaacggtgtagcattgggcattcagggcgggaatcaagcggcggattatgtcacaaccctacaacgataccaccaaatatatcaccggcagaggtggtttggctgagatcattctacaatgaaacggagaaagagcagaataagcacgcaattgc

SEQ ID NO: 46950 - DNA, 271 bp, Gossypium hirsutum
  Clone ID: LIB3196-032-P1-M1-H11
atccagcctggacagcagagtaagactctgttttaaaataaaataagtaaaataaaatatttattgtgggcataaatggcagagttatttttcacatgattgtacaaatgccctcccgttttttaaatagggatggaattaaaaaaagtttagagaatgtctcacctggtgaaaaacaagctattcacaagacttgcgataaaggggtttgccttttttttttttcttttcagtataaaggcatatttttatgaatggtgctacgtaacta

SEQ ID NO: 46951 - DNA, 315 bp, Gossypium hirsutum
  Clone ID: LIB3196-032-P1-M1-H12
attttgattttgaatgagaataacaaggaaggtttgtttttataagatttctggattttggtgaaatagggctagagcttattctaggatcccctgtttcaactttagaaattcaccatacattttgaaaaaataattatgtggggtactttatatggctagaatccttatttaatctaggcgtaataaaaataaactgaatagttatatgattcttggacagaaagaaaagtggtttgatgtaagtagagggctaggcagccaattctgaaacaagggcaatttgactaataaaaagtactaactctgttaagt

SEQ ID NO: 46952 - DNA, 363 bp, Gossypium hirsutum
  Clone ID: LIB3196-032-P1-M1-H2
aagaaagagagcaatggaaagaatacggcataagatggtgaatgtcaatggtatatcgatgcatgtagctgaaaaaggagaagggccggttatcctcttccttcatggcttcccggaactatggtacacttggaggcatcaaattattgcactaagctcactcggctaccacgctgttgccccagatcttcgtggctatggtgataccgaagctcccactgctatcagtagctactcttgcatgcagatcgttggtgacctcgttgcactcattgactctcttggtgtaaagcaagtctttctggttgctcatgattggggtgccattattggatggtacctttgctttgttcgtcccgatag

SEQ ID NO: 46953 - DNA, 414 bp, Gossypium hirsutum
  Clone ID: LIB3196-032-P1-M1-H4
attgcatttttaaccaacagaacccacagtagaggggtctcatgtctccccagttccacagcagtgtcacagacgtgaaagccagaacctcagaggccacttgcttgctgacttagccaccccccaaagtcccctcctcagccagcctccttgtgagagtgggtttctcctgcacgaagcctgtccctgggggagtaattctgtcattcctaaaacaccttcagcaatgataatgagcagatgagagtttctggattaccttttcctattttcgatgaagttctgagatactgaaataagaaaagagcagtcagaattgtgctttttctccctcctctattcctttaggaaatcatattcaatacacagtacttcctcccagcattgctactgttcagctgcttctttcattct

SEQ ID NO: 46954 - DNA, 344 bp, Gossypium hirsutum
  Clone ID: LIB3196-032-P1-M1-H6
accttccgctgaaaatattacaaatccttatatccttcctagacatcttaacctgatcaaaaatggctgggtttgaaggattgattttacctggcaccatgcgtgcccacaccgacatggtgacagccattgctactcccatcgataacctcgacatgatcgggactacctcccgggacaaatgcatcatcctttgggacttaaccaaggacgaaaagacctacggtgtccctcgtcgtcgtctcaccggtcactctcacttcgtgcaagacgttgtcctctctttcgattctcaaatcgctctctctggttcctgggatggggagcttcgtctctgggactta

SEQ ID NO: 46955 - DNA, 125 bp, Gossypium hirsutum
  Clone ID: LIB3196-032-P1-M1-H8
cccacgcgttcggaaaaaaatggaaaatgtaggctaccataagaaggaaaagtgttcggctaggcttgggtaagataaaaattgcatgtgtttcattatacgagcctaaaggctaaattgtaaaa

SEQ ID NO: 46956 - DNA, 306 bp, Gossypium hirsutum
  Clone ID: LIB3196-032-P1-M1-H9
aaacaatggaaaacaacttgaatttttcgttcaaggtgtttctaatgtgctaaattcatgaaatttaatatttttcgtcaccaaatttcacccatagaaatttttttcgactttttcacttttttgaattttttttagaggttgtttaagtaaaattggtgaagcacaaggaaacaacttaaaacgcccaaatctgataccatatgataaggggtagtagaagaaaatcatgttcaagttgtttaactcgagaaagaaagatttggatctgacctgcaaagaagaaacccaacagatttacggctg

SEQ ID NO: 46957 - DNA, 384 bp, Gossypium hirsutum
  Clone ID: LIB3196-033-P1-M1-A1
atcgggtgggcggcatgtctgtggccggtggggagattcgtggagacacggcgggagaggacactgctgctcccggccggttcagcttcagcccggagcccacgcttgaggacattcgccgcctccatgccgagtttgctgcagaacgagactgggaacagttccatcagcctcggaacctcctcctggccttggtcggggaagtgggggagctcgcagaactctttcagtggaaaaccgatggggaacctggcccccaaggctggtcccccagggaacggttagcccttcaagaggagcttagtgacgtcctcatctacctggtggcattagcagcccgctgccgtgtggatctgccgctagcagtgctctccaaaatggaca

SEQ ID NO: 46958 - DNA, 320 bp, Gossypium hirsutum
  Clone ID: LIB3196-033-P1-M1-A10
ctcttggggtccttcattatgcattggagctgccctaagactgggcattaaagacttcaatctgagatactatggacctatgccctcatttcaattctagcaacgcaatattttctctacagctctttctgagggttactatctctgcgaggtgtcttgctactttttatgtctctacttgggtttaaacttgcttgcattttttttatcatattatggaataccattggaatcctggttgtcattgactgcggctttatatgctttgtctggactgagtatgatttcctagcatgcttaatccttctctaacataagta

SEQ ID NO: 46959 - DNA, 351 bp, Gossypium hirsutum
  Clone ID: LIB3196-033-P1-M1-A11
cggacgcgtgggttcaaagcctctcgtctcctctccataaatctctcactcaacgcagagcgaataggcggagacttccaagaatctatcgcatcagctaatcacgctctaaagaatggatcaggttcaacacccatctatcatgcagaaggtagcaggccagctccttcgttctagccattctcaagattttcaaggttataatgggtctttcaggagtcctgctctatgccaaaggcgtgctgcatatggcaattactccaatgctgcactgcagcatcctgtccgggcttgtggagacctgtctatggttccatcaacagcttctgctatttgcgttcaggctcctgc

SEQ ID NO: 46960 - DNA, 280 bp, Gossypium hirsutum
  Clone ID: LIB3196-033-P1-M1-A12
accaattatcagcaagaaaatgctgagcagattatgatcaatcaagctcgtaaggctgaagatttagctgctgcaatggcagcaagcaaggggatcccagtacaggccgatactgatgggaactcacaagcagggtttgtagctggtacccaaggtcaatatgcaccgacagttgctggaggacagccacgaccaacaggcatggcaccacaaccggtaccacttgctggtgggctggacatgcatggctatgctcttgatgatgaggaaatgatgaggc

SEQ ID NO: 46961 - DNA, 311 bp, Gossypium hirsutum
  Clone ID: LIB3196-033-P1-M1-A2
ctcttggtctccttgattaggcattggagctgccctaggattgggcattagggacttcaatttttgatactatggacctctgccctaatttcaattttagcaacgcaatatttctctaacaagtcttttggcaggtacactatctcgtggaagcggctgctgccctttataggggaactgggggagctagcataacgctttcagtggaaaacagaaggggaacctggcccacaatgctggtcccccagggaacggttagaccttcaagaggagctcagagacgtcctcatctacctggtggcattagcagc

SEQ ID NO: 46962 - DNA, 343 bp, Gossypium hirsutum
  Clone ID: LIB3196-033-P1-M1-A3
cggaaaatggagaggcgatattcgatgagcaggttgagaggggtcaggtcataaccgtaccccagaatcatgcagtggtgaaaaaagcaggaaggcgagggtttgaatggatagcattcaagacaaatgccaatgctaagattagtcagattgctggacgtgtctccattatgcgaggattgccggtggacgtgctggccaactcctttggtatatcccgggaggaggccatgaggttgaagcataacagacaggaggtgtcggtttttagcccaaggcaaggctcgcaacagtagatcaaacaacttatctaggtgtacgtacgtacgtaattgcatcaaca

SEQ ID NO: 46963 - DNA, 337 bp, Gossypium hirsutum
  Clone ID: LIB3196-033-P1-M1-A4
cggaaaatggagaggcgatattcgatgagcaggttgagaggggtcaggtcataaccgtaccccagaatcatgcagtggtgaaaaaagcaggaaggcgagggtttgaatggatagcattcaagacaaatgccaatgctaagattagtcagattgctggacgtgtctccattatgcgaggattgccggtggacgtgctggccaactcctttggtatatcccgggaggaggccatgaggttgaagcataacagacaggaggtgtcggtttttagcccaaggcaaggctcgcaacagtagatcaaacaactaatctatgtgtacgtacgtacgtaattgca

SEQ ID NO: 46964 - DNA, 316 bp, Gossypium hirsutum
  Clone ID: LIB3196-033-P1-M1-A5
atggcaagctctagaatgagagaaaataattgcaaatcatagatcttataaggaccccaaatccagaatatatgaggaacttctataactcaacaacaagaaaaccaaataactcaatttttaaaaatgggcaaaggacttgcacagacatttctccaaagaaggcatacaaatggtcaataagaacataaaaatatgctcaacattgctaattattagggaaatataaatcaaaatcacaatgagttatcatctcacgcccatcatgctggccactatcagaagaacaaaaaaaaataagtattggggagaatgc

SEQ ID NO: 46965 - DNA, 350 bp, Gossypium hirsutum
  Clone ID: LIB3196-033-P1-M1-A6
aaagatttgatcaaaagtgactagaaaagaggcggtcgagaaggaatgagtggaaactatgttgattgagtgcaatttctaaattaggaaagattagacagaatcctaccaatctaaatcaatgtttccaacagtgaaaggctgcccctgtcggcgggttgcttaggtccatgtagtccaaatctccgcttaggaaagaagtccaagttgactttttgcgaaagggaaaatggctttctgttagagagtgatcgagagaaattttcagttgggagccagtcttttgcagctaggagacattgttgttatgttttccagttatgagccattgttgtgtggtccctttcgag

SEQ ID NO: 46966 - DNA, 356 bp, Gossypium hirsutum
  Clone ID: LIB3196-033-P1-M1-A7
ctggaaaagccaccatcaatgttgaaaatgttgatgaattcaagtggcttaattcatcctattgccctgtcctccggcagcttgagactgcagcgatgaaggagtactacttcaaggcagatcagccaaccaattctggatcttcgaacttgaagtatcgaaacccaaagtatctctcaatgcttaatcacttgcggttctatctgccacaggtctacccaaagttagataagatcctctttcttgatgatgacattgttgtccagaaagacttgactggattatggtctgtagagctccatggaaaagtgaatggtgcagtagaaacttgcggtgaaagctttcatcgttttgac

SEQ ID NO: 46967 - DNA, 349 bp, Gossypium hirsutum
  Clone ID: LIB3196-033-P1-M1-A8
ctcttcgtctccttcattaggcattggagctgccctaggattgggcattagtgacttcaatttttgatactatggacctctgccctcatttcaattctagcaacgcaatatttcctctacagctctttttgtgggttactatctctgtgaggtgtcttgctactttttatgtctttacttgggtttaagttttcttgcattttttttatcatattatggaataccattggattcttggtagtcattgactgtggctttatatgcttttttgtaactaagtttcattttcctagcaatgcttaatcctccaactaatataagttaaactgtggcttaccaagggtttttg

SEQ ID NO: 46968 - DNA, 277 bp, Gossypium hirsutum
  Clone ID: LIB3196-033-P1-M1-A9
ctgggggagtccttaattaggcattgaaaggggcctaggaatagccattcccgactatcatgcttgatgctataaagcctgtgggctcattttaaatttagcaacactctatacaactctacagcgcttaaatgagggcaaactatttggagcgaggtgcattgttacaggatatgcctttaattggctttacaacttctttggtatatttccatcatgttgacccaatgccgttgcattactgacaggaagtgactgtttttttctaaggcaaggc

SEQ ID NO: 46969 - DNA, 352 bp, Gossypium hirsutum
  Clone ID: LIB3196-033-P1-M1-B1
tcgggagcactactcgccctcatcttttgatttttctctatgtcatttatttcaggacaatctcgaatgaagtggtctagcgacccacacttgaaatacctgtctcatttactcagcattcgcccaagtgacgtcttccacattgcgaactctctggcctatttgtccgagcactaccaacacttgcaactgaagtagtttgggcttcagatgccatgttctgatgattcttattccttcgcgaaaatcccactgaagtgttccatcgggcattaattcttttagacctcttggtggaggactaatgcgtctttcccatctaggttctctttaaatctcgcgacttgatggc

SEQ ID NO: 46970 - DNA, 353 bp, Gossypium hirsutum
  Clone ID: LIB3196-033-P1-M1-B10
cccacgcgtccgaccggagcctctcctgctcgctgcgtcttcgtctgcaagatctcaattctcaaattgtagcgcccttttatatcaagcaatggctctggtcttgcatgctggaaaaacaaacaaaaatgcctttaaggcactcattgctgcagaatatagtggtgtgcaggtcaaaatggttgagaattttgagatgggtgtgtcaaataagactcctgagttcatcaagatgaaccctttggggaaggttcctgtgttggaaacacctgagggtcctgtatttgagagcaatgccattgctcattatgttgctcgctcaaaggttaacaaccctatatgtggttctacat

SEQ ID NO: 46971 - DNA, 212 bp, Gossypium hirsutum
  Clone ID: LIB3196-033-P1-M1-B11
attcgttcacgcgggcgtgtaaaaacacactagtatgcaccgctggcactgattacacacttactattaaggactgtgtaccatggccgaacacctgaggactgacgagggcatatagattcttccctgagggcctacaaacgggcaccgatatataactcatgataaaactatgtgaacaaattatttcattactagctcctacttcattt

SEQ ID NO: 46972 - DNA, 379 bp, Gossypium hirsutum
  Clone ID: LIB3196-033-P1-M1-B2
atgctgaaaaccgcagtgccttcagctaccattgcaagaccccagattgcaagggatggtgcttctttgaggatgatgtcaacgagttcacctgccctgtgtgtttccacgtcaactgcctgctctgcaaggccatccacgagcagatgaactgcaaggagtatcaggaggacctggccctgcgggctcagaatgatgtggctgcccggcagacgacagagatgctgaaggtgatgctgctgcagggcgaggccatgcgctgcccccagtgccagatcgtggtacagaagaaggacggctgcgactggatccgctgcaccgtctgccacactgagatctgctgggtcaccaagggtccacgctggggccccgggggccc

SEQ ID NO: 46973 - DNA, 364 bp, Gossypium hirsutum
  Clone ID: LIB3196-033-P1-M1-B3
ctctcttcgtgctcccgccgtatttcacttcccctctcttctctcttcttttccttccttccttccttctgtcaacaccactttctaatggcttcccttgctggttcatccatctctatgcaacctcgccagaccctggctacaagcagggtttctgggttgaaattggtttcatttgtgaaccggggaagaagcagcctctcctttaggctgcgtccggatcgcttgcggatttcatgtgctgccaaaccagagacagtggataaggtatgtgaaatagtaaggaaacaactagccctaccaagtgacaaagcagtcacaggtgaatcaaaatttgctgaacttggagccgattctcttgata

SEQ ID NO: 46974 - DNA, 302 bp, Gossypium hirsutum
  Clone ID: LIB3196-033-P1-M1-B4
ataatcggccaaggtaatgataagattggaggaggatactctggtggtggtagaggttgggttccacaaccacaacgtccagcgaagaggttatcgtggtggttaggctggacatggcagtcgtggagaaccttttccagtggagtttcgagttattaggtgatgatgagctttggagaaacgcaatgccttggtagagggaggggcttcggacgtcgatagtgatgctatggtcggcacacgagcgtggtaaggaaggcgtgggcaagagttgaggcggctagggttagggattttgggga

SEQ ID NO: 46975 - DNA, 361 bp, Gossypium hirsutum
  Clone ID: LIB3196-033-P1-M1-B6
ctcccacaccattgtgacgctgagaaaatttaccttgtcaccaacggaagaggaacgcttacgttcttgacacatgaaaacaaagagtcttacaatgtagtaccgggagttgtagtcagagtcccagcaggaagcactgtgtacttggctaaccaagacaacaaggaaaagctaatcatagcagtgcttcaccgccctgttaataaccctggacaattcgaggaattcttcccagctggaagccaacgccctcagtcatatctccgagcctttagtcgtgaaattcttgagcctgccttcaatacacgaagtgagcagctagacgagctgtttggtgggaggcaaagccaccgaaggcagc

SEQ ID NO: 46976 - DNA, 280 bp, Gossypium hirsutum
  Clone ID: LIB3196-033-P1-M1-B7
ctttttaaaatgtctgccaaatcaaagctttctacacttattttaaccctgtctcttgtgtttctctatgccggctgcttagcctttgctaagcaagaccctgagctaaaacaatgcacccaccaatgcagagtccagcaacaatacgatgaaaaacaaaaggaagagtgtgtgaggacatgtgaagagtaccaccgtgagaaaaaggatagagagtcccttaaagaagttgggcaagaccctgatgtcgaatttcaccctggcgacggattgagtgagt

SEQ ID NO: 46977 - DNA, 358 bp, Gossypium hirsutum
  Clone ID: LIB3196-033-P1-M1-B8
agcttatttcggagaatcatcttggggtgaggaatgctgcccaaaggaagcttttggatgagctcggtattcctcctgaagatgttcctgttgatcagttcgtcccactgagccgcatgctgtacaaggcaccttctgacggcatgtggggcgagcatgaacttgattacctcctattcattgtccgagatgttaacgttcatccaaaccctgatgaggtagcagaggctaaatacgtgaaccgtgaccaactgaaggagttactgcgtaaagctgatgctggtgaagatggtttgaaactgtcaccatggttcagactcgtcgtggataatttcttgttcaagtggtgggatcatgt

SEQ ID NO: 46978 - DNA, 355 bp, Gossypium hirsutum
  Clone ID: LIB3196-033-P1-M1-B9
gcgtaccatgcttgaaattgtcaaccagcttgatggctttgatgctcgtggaaacatcaaagtcctgatggcaacaaacaggccggacacgctagatcctgcattattacgtcctggacgattagatcgtaaggttgagtttggtctccctgatttggagagtcgaacacagatatttaaaattcatacaagaacgatgaactgtgaacgtgatattagatttgaacttttagcccgactttgcccaaattctaccggggccgacataagaagtgtgtgcacagaggctggaatgtatgctattcgggctcgaagaaaaacagtgacagagaaagatttcctagatgcggtgaac

SEQ ID NO: 46979 - DNA, 360 bp, Gossypium hirsutum
  Clone ID: LIB3196-033-P1-M1-C1
cccacgcgtccgtattttctctccataagaagtctttttctcttcattctcccaatatcttcatttgaagcagctatgtcttttagaggaggaaatgcatcatcgggcatgggagtggctgaacacagcaaaagcacgtacctggaactgcagagaaagaaggtgttccgatatgttatcttcaagattgatgagaagaaaaaggaggtcatagttgaaaagactggaggtccgacagagagctatgatgatttcgcagcctcattgccggagagtgactgccgctatgcagtttatgacttcgattttgtgacttccgagaattgtcagaagagcaagatcttttttattgcgtggtct

SEQ ID NO: 46980 - DNA, 353 bp, Gossypium hirsutum
  Clone ID: LIB3196-033-P1-M1-C10
cggacgcgtgggcgacagcttgaggggtggaatcaattttatggctgccaataatgactgtagcatgagagaatatgatacggagagatttcagcttctaaaccatctccgtttcccttggccagtaaatcatacatcagtcagccctgaccgaaggcttattactgttgttggagatagcttggatgggttgcttgtggatttgcaaaacggaaagactgtagccacggtggtaggtcatctagattactcctttgcatctgcatggcacccagatgggcgcatatttgccactggaaatcaggataagacttgccgtgtgtgggacgttcgaaacctctcaaggccagttg

SEQ ID NO: 46981 - DNA, 321 bp, Gossypium hirsutum
  Clone ID: LIB3196-033-P1-M1-C11
gtctgtctctcttgcagtcgcctttatcagaagcaaaaacactaagctttagcttctacatcggagaaaatggtgaagggacgccaaggagagcgagtcaggctctatgtaagaggaaccatcttgggttacaagagatcaaagtcgaaccagtacccaaacacttcgttgatccagattgagggagttaacaccaaggaggaagtagcttggtatgctggcaagcgtatggcttatatctacaaggccaaagtgaagaagaatggctcacactatcgctgcatttggggaaaagttactagacctcatggtaacagtggg

SEQ ID NO: 46982 - DNA, 238 bp, Gossypium hirsutum
  Clone ID: LIB3196-033-P1-M1-C12
gaagaggggggcaattcacgaaaaccaggctgcaatcacttacctaagacatcatgcgaggaccggcaatactaaaagtgacactctccttattctatataaggtaccggcgagtgaactgaaatcagagtttacacacctgaacatttaaccaaaccatatacagtagcacttattagatggtaccatcatgccttagagactatcagacagcccaagcaatgaatccatgcatatt

SEQ ID NO: 46983 - DNA, 349 bp, Gossypium hirsutum
  Clone ID: LIB3196-033-P1-M1-C2
accacactttcgttttcatctctccatatcggttgtgttccttggcgatcaacaacacaggagccgtgagctgtggaagaacaacaacacaaagtggtgacttcagtcggagccgataacgtttcctacaacaactacactaattgcccacatactttcaatacccaacaaactctttatttcatccctcacaatagcaagaggtatatgcatcgctacattgatgtggtacaagtcattgttggagtggctaccgctagagccgaaaccaatgctgagatattggatcacaacatgcgggatgtggtgcaaacagacagggatgataccatcgacatgtaagatgaat

SEQ ID NO: 46984 - DNA, 364 bp, Gossypium hirsutum
  Clone ID: LIB3196-033-P1-M1-C3
tagatcttccttatcatactgaacctccatggcctccaagtttgagagaatttctttaaacactgttaagtgttcgtgcacagatgcaccttcctccaaacgatgagcacaaagatgttgcttcatatgcagcttgctagttagagttttcgacatacatatttgttccaaccacttccataatccagcgacgatcttctccttcatcacatcctgcaaaatttcgttcgacaaatgcagatgtaactgtgttaatgcctttcgatccttgcgcttcttctattcttccgtcaatgttgaaggcatcttatctacccctagcagggcttcttctaagtccatctatgcaagaactgcctgcatc

SEQ ID NO: 46985 - DNA, 332 bp, Gossypium hirsutum
  Clone ID: LIB3196-033-P1-M1-C4
tcttgtttcaggggaaaaaaactgaaaggaacaaacttgtttcggcgaaaaggaaaacgaagaggctttgtatttatttctttattgttagttaggccccccgatggagaccggaccaaccggcggtggcctatgtggtgacgatctatcccaatcgtatcctgcgaccgctatatcgcggtggagcttcaaggtgtcgcggcggtaccaacacgttctggacaagactgtcccgcacattctgtaccgttggatagcatgtctggtgctggggctgatctacgccggacgcctgtactttgtgcaaggattttacattatcacctactggc

SEQ ID NO: 46986 - DNA, 356 bp, Gossypium hirsutum
  Clone ID: LIB3196-033-P1-M1-C5
cggacgcgtgggaaaaaaatggggcttgaagaaaatctcaaatcaatgaacatcaacgaagaagagaacaagaaccctaaccctaacactaaagatgaagaagatggtgaacttgaagaaggggagatcgcaggtgaagaagatgatacgacgtcgtcttcgttaaagaaaggtgtcgtcgaacagcctcaccagttggagcattcatggaccttttggtttgataacgcttctgctaaatcaaaacaagctccttggggtagttctatgcgcgctatttacactttctccaccatcgaacaattctggagtctatacaataacatacatcatccaagcaaattggctgtgggagc

SEQ ID NO: 46987 - DNA, 359 bp, Gossypium hirsutum
  Clone ID: LIB3196-033-P1-M1-C6
ggagaagtgggcaatacaggaaaataaggtcccagttgtcgcgtggagacatatttgtagtcccagcaaacttcccagttacattcgttgcatcccaaaaccagaacctgcggatgactgggttcggtctttacaaccagaacattaacccagaccataaccagaggatcttcgtggctggaaaaatcaaccatgtgagacaatgggatagccaagccaaggagttggcctttggggtgtcatcgaggttggtggatgagatattcaacaacaacccacaagagtcttacttcgtgtctcgacagaggcagcgtgcatctgaataaagagttagaggcaataataaccacatagtctcg

SEQ ID NO: 46988 - DNA, 354 bp, Gossypium hirsutum
  Clone ID: LIB3196-033-P1-M1-C7
cccacgcgtccgtggacgcgtgggcatatatgttcatctccatatgtgaatcaatactccaaatcatcacaagttaccaaactcatcaagatgtcttatacatcaaggatagtgtaagcttcaagaaaattcggtttgacgtgattcgcaaggtgacgatctataaggaaaagagaaaacaaactaggtaagctaattagtttatcattaacaaccaaaaatcaattactatcgagttaaatttacagtttattcataaaatcctatttacatgctcctaatcaatcacttgtatttctacaagctcaagcacacataagcacacaaaattaaaattaattattaagaaaataa

SEQ ID NO: 46989 - DNA, 259 bp, Gossypium hirsutum
  Clone ID: LIB3196-033-P1-M1-C8
tcgcataaagatccgaaaactaaactttatgtgactaacatatacaatgagaacatcccttacagaaagtcccatctgatgtggacttgaatggaagggtactatgggttacttgtgagaaatgttaccgttggtacaatgggtagggtacataaatatttgttcactcgtgcaccttacttcatactgcatagagggctaccaagcactgtgcaaggtgtggctcgacagatgcatatgtctcatgtgctatacgcaa

SEQ ID NO: 46990 - DNA, 365 bp, Gossypium hirsutum
  Clone ID: LIB3196-033-P1-M1-C9
attcttgcttctctgatagctcccagcttactctctgcagccatgattgccagacagcagtgtgtccgaggcgggtctcggggcttcagctgtggctcagccatcgtaggcagtggcaagagaggtgccttcagctcagtctccgtgtctggaggtgctggccgatgctcttctgggggctttggcagcaggagcctctacaacctcggggggaacaagagcatctccatgagcgtggctgggtcacgacaaggcgcctgctttggaggtgctggaggcttcggcactggtggctttggcggtggatttgggggctccttcagcggtaagggtggccctggcttccctgtctgccctgctggggg

SEQ ID NO: 46991 - DNA, 362 bp, Gossypium hirsutum
  Clone ID: LIB3196-033-P1-M1-D1
ataggcgtccaccatttccactcagcagtgctatatcctctgtagaggtagctgatgatgcgtctactagaattaaccagtcgtcccctcgtgcagctgtggaggcttcagagccatatggtaagaaagggagtgatgaagtgaacagaaaacttagcatgacagcatcaggcactcatgatgattctagcgatgatgacagtgaggaagagcgaccaatacagccttttagtagcactcgagaccaatacaacaaaagatcaagcttaagagtctctctcccatattttggttcaagaaatagtgattctgatgaagaccttcctaaaacaagtttaaaggctcattcaaacacgggtttt

SEQ ID NO: 46992 - DNA, 347 bp, Gossypium hirsutum
  Clone ID: LIB3196-033-P1-M1-D10
ctttattattcttcgtcttctgaaaaattttctttgaaattccagcttttgactacaatgtcaggaaggggaaagggaggtaaggggctcggaaagggaggagccaagaggcataggaaggtcttaagggacaacattcagggcattaccaagcctgcgattcgccgtctggctcgtaggggaggtgtgaaaagaatcagcggtttgatctacgaagaaacccgaggcgtattgaagatcttcttggagaacgtgattcgtgatgccgtgacatacactgaacacgccagaaggaagaccgttaccgccatggatgttgtttatgccttgaaaaggcaaggcaggac

SEQ ID NO: 46993 - DNA, 340 bp, Gossypium hirsutum
  Clone ID: LIB3196-033-P1-M1-D11
tttcctcatcaccatcgtctgctattcttcacaaaaaagaaaagaaaaattacagtgaaaatggcaacccttaaagttccagctcatgtacctgccccttctgaggatgctgagcaacttcgtaaagcttttgaaggatggggtacaaatgagcaattgattatcgacattttggctcacaggaatgcagctcagcgcaatttgattcgtaaaacttatcgtgaagcttatggggaagatctccttaagtctttggatgaggaactttcaagtgactttgagcgagctgtggtgcttgttactttggaccctgcaaagcgtgatgcatttcttgctcatg

SEQ ID NO: 46994 - DNA, 350 bp, Gossypium hirsutum
  Clone ID: LIB3196-033-P1-M1-D12
ttaaaaagatcgtagtttaaaatcttttcaaattctcgacactaagacattaaacaatcaatttggtaccaattttgggcgttacgagggtgctaacccttcctcgtgcgtgaccgactcccgaacctattttctcaaaatttgtagacttaaaatcgttttcaaggtgatccgatcacaccccaataaaagatcagttgcgactccaatttttgttttaaaaaatggtttcgattggtatgaaggaccctttcgagttgtgaagagagtaggaagggtggcctacaaacttgagttattagcaaagctcaaagtccacccagtgtttcacgtgagcatgcttaagtcat

SEQ ID NO: 46995 - DNA, 364 bp, Gossypium hirsutum
  Clone ID: LIB3196-033-P1-M1-D2
atgctgcgcggaggcacacaggccgggagaccgttctgggtccgagggtccgggcaggggttgagacaccatctgacctcaagcttcgtcgtgtcgccggttctgcaggcaccatgagccaggacaccgaggtggatatgaaggaggtggagctgaatgagttagaacccgagaagcagccgatgaacgcggcgtctggggctgccatggccgtggtgggagcagagaagaatggtctggtgaagatcaaggtggcggaagacgaggcggaggcagtagccgccgctaagttcacgggcctgtccaaggaggagctgctgaaggtggcgggcagtcccggctgggtacgtacccgctgggtgct

SEQ ID NO: 46996 - DNA, 354 bp, Gossypium hirsutum
  Clone ID: LIB3196-033-P1-M1-D3
ctccttgctcatccaattgcttctttagcgtttacaagtctggtcattgcagctgttggataattggatgggcaaagtacataacgcttggttatcaactgaggctaaaaacacctgatctcgttgcatcatgaatttttttctccagttcctttctgccattgtaacaatttcgttatttgaaaagggaagaagaagggaaagtgaaatgattagcaatgaggatagagataagtgttagtcatttgcgggaatagccatatttgtatgattcctttagtaggtattgcttgatccttaaatctttgttctgaaaggagcggctcatgtactaaacttttcactttttggcat

SEQ ID NO: 46997 - DNA, 401 bp, Gossypium hirsutum
  Clone ID: LIB3196-033-P1-M1-D4
tgccccgccggaatttccggggtgctcctcaacagcacgtttgcctccttcatcgacaaggtgcggttcttagagcaacagaataaggtcctggagaccaaatggaagctgctccagcagcagacgaccagcacctccagcaaaaaccttgagcccctctttgagacctacctcagtgtcctgaggaagcaactagataccttggtcaatgacaaagggcgcctgcagtctgagctgaagaccatgcaggacagcgtggaggacttcaagaccaaatatgaagaggagatcaacaaacgcacagcagctgagaatgactttgtggtcctcaagaaggacgtggatgctgcctatatgaacaaggtggagctggaggccaaggtggacagtcttaatgatga

SEQ ID NO: 46998 - DNA, 356 bp, Gossypium hirsutum
  Clone ID: LIB3196-033-P1-M1-D5
caaatagtgcactttggctcctcagattcccagctgctggagaaacgagactgcgagcatatgctgctgcacaaggggtacagccagagcaaataattttcacagatgttgcaatgaaacatgaacatatcaggcgcagtgctttagctgatctctgtctcgacacccctttatgcaatgcacatactactggcacggatgtgttatgggctggtttacctatggtgactctaccccttgagaaaatggctacaagggttgctggttcactttgtctcgctactggtttgggggaggagatgattgtgaacagtatgaaggaatatgaagaaagggctgtctcgttggcattaaat

SEQ ID NO: 46999 - DNA, 360 bp, Gossypium hirsutum
  Clone ID: LIB3196-033-P1-M1-D6
ctttgttctaatgcttggcacccgcagactcccatttcctgcatttgcatttgacttaattcactgctctcgttgccttatcccttttacagcttataatgcaacatatttcgttgaagtggatcggttgcttcgtccgggtggatatttggtcatctccggaccccctgtgcagtggcctaagcaagacaaggagtggacagacctccaggctgttgcaagagcattgtgttatgagcttattgctgtggatggaaacacagccatttggaagaagcctgatggagattcatgtctaccaaaccaaaatgaatttgggcttgaattatgtgatggatctaatgacccaagtaatgcatg

SEQ ID NO: 47000 - DNA, 354 bp, Gossypium hirsutum
  Clone ID: LIB3196-033-P1-M1-D8
cggacgcgtgggaaaatatgaaaaaatctatgtacgtaaaaatatatgtaagtatgtaagtatttatatatgtgtataaagttatgaaataaaaaatatataaaggtaggtatatatgtaaaaattaaaaaaacgtatgtagatacatatatatatattatgtgcatgtatgtattggaaaatatataaaaatatatgtacacatgaattataaactatagaaaatatataagaaaaatatagattttaaatataaagaatatgtacaagtatgtgtatatatatttatgaaaataaaaaaaaaaggatacatgtaagtatgtctatatatatataaaattaaaaatgcgcata

SEQ ID NO: 47001 - DNA, 356 bp, Gossypium hirsutum
  Clone ID: LIB3196-033-P1-M1-E1
cccacgcgtccggtttttaatgacgtcatacaaatatatatatatataaagaaaacgttgcatatagaaaaaaaaggtcataatttaattattttcttagtctcaaactcaatgtaaaatgtttaactttgtggctttcctagtcatactgtatacataattataaagacagcatatatgctaatggagatgtaaaagcattaaagttgacaccattccctggcctctcatactctccttccacacaaatgtagggtagggaatcttaaacagaacaaatcatcactttgttagttaattaatatatgtctcaaaattttgcacaaccaaaaaagaagctctttctattagaaaac

SEQ ID NO: 47002 - DNA, 353 bp, Gossypium hirsutum
  Clone ID: LIB3196-033-P1-M1-E10
attaatggcaacttgggaccatttattaataatgtacggagtcgtcctcactgatatatagaaggattcacttacagtaatagtctagaattgatcttacacgagcaatgaaaatttaaggatactatttcatgttttatttgtgtcaaattttaagtaaattaaaagtaatggattatttttatgataaataaagttaatgagaggatgctcaatttgtaagtgatttatagctagtgaggagggaggatgctaatgatctgacctagagctggcaaaatgatgaagcttggaggtgctggagaagataatcaacccaacttcagcatcgctgaggatggctaactctttag

SEQ ID NO: 47003 - DNA, 353 bp, Gossypium hirsutum
  Clone ID: LIB3196-033-P1-M1-E11
cccacgcgtccgcccacgcgtccggaaactagcaatggagtcactttctgatattcattgtgacataaaaaacctgataactgaacttgacctccctgtgactgagtgggatgaaaaatggatggatgtgtacctggatatcagtgtgaagttgcttgatattagtattgcttttacctctgagcttacacggcttaaccaaggccatctcttacttcaatatggtctgcacaagttggagtcggattccccagaactgttcagtcgggcctcttcctcacttaatagctggaaacagcacattggctccaaaaatcccagagttgaaacttgtcgacctatctttgacaacc

SEQ ID NO: 47004 - DNA, 352 bp, Gossypium hirsutum
  Clone ID: LIB3196-033-P1-M1-E12
gttcaatgtttgttaagttattgtgttgttgattgttatgaattctttagcttgttttttttagaaatgttctctcaattattacgaataattgtttaattaattaagaagaatatatagaaggataggtagaaatagaagaccttgtacaatggccaccatcaccatccttcctctgtgttgtattgtttgtaagtttccatcaactttcaattttaaaatcctaaatttctttttattatgagtttaatttttttatcaagaataattactagtacttattctattaatttaaggttcctgatatagattgaagtttgaagcttatctgctttgttgtttgtgatttaaa

SEQ ID NO: 47005 - DNA, 363 bp, Gossypium hirsutum
  Clone ID: LIB3196-033-P1-M1-E2
tttcaaatgaggggacaattttgtaaaatggttgaaagtataaggttttgccatgagagaaaataggttgttttctaaaattttatggaagaatataaatcttaaataaacaacttttgtgaagagatttctcatgaaaaccctaataggaccattttgtaaagtttgttaaatagatagtaatattgtgaaatattggaaatttggggttgtcataagagagataattggtaggttaggcttggatgataaggaaattcgataaaaatccattttcagatctaggggtaaaatggtcattttgccaaattatagatttattgaatgcctagatcaataaaatgattaaatgtgtgaattttt

SEQ ID NO: 47006 - DNA, 375 bp, Gossypium hirsutum
  Clone ID: LIB3196-033-P1-M1-E3
atgtgttcaccatcatgagctgaccaacaatttctaaattcctgctcagaaacacagcaaggggaatgcagtcaagcacaaagggcttaaatgaccaggtaaggctgggctggatgaataaagaggaatgtcctatgagtgtgactgtatagttttacagtatcctgtttcaatggttaacatttgacttgtggccttgtagacagtgtattaatatcagatcttctttttcagaactgttttaatcatggacaaacaaaacacacagatgaatgcttctcaccctgaaacaaacttgccagttgggtatcctcctcagtatccaccgacagcgttccaagatagatcagatactgattcatcagcagattgaac

SEQ ID NO: 47007 - DNA, 357 bp, Gossypium hirsutum
  Clone ID: LIB3196-033-P1-M1-E4
gcaaggtcagctcctgacggtgccacagaactttgcgttcatgaaacaagcaggaaacgaaggagccgaatggatttccttcttcaccaatagcgaagccaccaacaccccaatggctggaagtgtctccttcatgcgagcactgccggaggaagtggtggcagcgtcgtatcaggtgtcaagagaagatgcaaggcggattaagttcaacaacaaaaacacctttttcttcactgcttcacagtccgagaggagggccgatgcttaaactccagccgatgccaatgcaatcaaaatcagggggatctttgtagggtaacgtaagtaggaagtaataaaaagagttgcagagctatg

SEQ ID NO: 47008 - DNA, 358 bp, Gossypium hirsutum
  Clone ID: LIB3196-033-P1-M1-E5
cccacgcgtccggttaacttacaagctcatttagcttaagataacatttccttagagcattaaaaaagagtttagaaaaggggtgtcaatgttaaaattgtgtttcctttcggtcatcagatttggagcgaggaacccatgggtggcacagtttgtcaaacaaaaaatatgttgatatcagatattataactataaatagctcttcagttacattgacttgattagaaggcagggcaaaatcaggggctagcgctttgaaatttttaaaattttaaatttgtaaaagtaaaattgtactctactccccttaaaatgataaaaaaattgatttaatcctttaaaaagtataaatattga

SEQ ID NO: 47009 - DNA, 373 bp, Gossypium hirsutum
  Clone ID: LIB3196-033-P1-M1-E6
attgctgttttagaaaacaaaaataaatttaaaatgcgtttttgagttaatcctagatatcacaccagagtactgtgatttttcagttacaatccatttgatatattctgtagtaaaattatatttcatgtacagttttcattttgtattgttccttatatcacaatttgcaagtattttggttgttcttgttgatatgtaaagaactaattaactattccttatttgttcatggtgcagacatactgaaagacttcaatatagttgaaacaatctttcccacatgtgcctgcttttatgaaaatattcattcagagtacttgacatttgaatatgtgctatgaaacttcttctttgatactttctaattctc

SEQ ID NO: 47010 - DNA, 337 bp, Gossypium hirsutum
  Clone ID: LIB3196-033-P1-M1-E7
atgccttcctgagcaccttcctttctttcagccaactgctcgctcgctcacctccctcctcggcaccatgaccacctgcagtcgccagttcacctcctccagctccatgaagggctcctgcggcatcgggggcggcatcgggggcggctccagccgcatctcctccgtcctggccggagggtcctgccgcgcccccagcacctacggtgggggcctgtctgtctcctcctcccgcttctcctctgggggagcctgcgggctggggggcggctatggcggtggcttcagcagcagcagcagctttggtagtggcttcgggggaggatatggtgctggc

SEQ ID NO: 47011 - DNA, 196 bp, Gossypium hirsutum
  Clone ID: LIB3196-033-P1-M1-E8
tttttttgcctgtaaaactcaaaactatgaaaagcataaataaagtgcaaaagagtgaggaaaagtggataaactttatgtagcatttttagaacacatataattaaatggtcaaatatcttaaagaacattcaacttaaaatgctaaaaagggaaaaccaaaaaagaaaaaaagagcacacttaattgaacattc

SEQ ID NO: 47012 - DNA, 341 bp, Gossypium hirsutum
  Clone ID: LIB3196-033-P1-M1-E9
gttcaagacttgcagggactgtggggcgacaatttcatcatgtccgatgtgccggcagccaataacgacacgcctgagactgtatacctaattgggagctgatttctggttctgttgagtgctgtgaagcctattcaggacaggaccctttacaaaatctcagtcattatacaatatgcataaagtccagttttatttctattagagattctcaaatccaaaggtggccatgttactgaactggtcaactttttttttttacaaagggtttgcattggactattttgctcccccaaagttctttgcgttgtttgaataaagtatttgtatttggaatgtgc

SEQ ID NO: 47013 - DNA, 333 bp, Gossypium hirsutum
  Clone ID: LIB3196-033-P1-M1-F1
atcaaaggtacagggtgagcttgatgaaatcgtcggaaaatcagggccgctgacggaaccaggcgttcaatcaatggtttacctacaggctgtgctgaaggaagttctgaggttgcacccacctggtccacttctatcatgggcccgtttgtcaatcatggacacaaccgttgatggacatcacgtgccatctgggaccacagccatggttaacatgtgggccataacaagggacccagatgtttgggtggacccactcaagttcatgcctgagagattcgtgtccaaggacagtggtgacgtggaagtagtgtcagtgttggggtctgacct

SEQ ID NO: 47014 - DNA, 333 bp, Gossypium hirsutum
  Clone ID: LIB3196-033-P1-M1-F10
ataatattaaaggaaaataaaataaaaagtacttaaataagataaataaagataaaagtggaaataaaaataaaaataaaaagtctttaaacattgtcatcgtcggatggttcgcgaggtggtggtggcgatgagatgtgaaggtgctgacaaatctaatgaagagtagcatcaatgtgatcaaagcgctgaaaacactactactcaaatcgagtaaggcattcagagatgttagagtatgaagccaccgtatgaactggacgatggatgggtggtggttgagacggtgggtcctcatgacgtagagggacatcattagtaatgtcctctggg

SEQ ID NO: 47015 - DNA, 373 bp, Gossypium hirsutum
  Clone ID: LIB3196-033-P1-M1-F11
atcacaaatgtgtcgaaggtttagcaatataatagcaaagtcctactccagtaaataaaagttgatatgtttgtactaactttcaaagacattatgcgtttttatcattacaaggcatctaattgttcccttcatgtgataaaggtggtggaggtggatacagcagtcggagaacatctggcagagacaaatacggaccacctgttcgtacagaatacaggcttattgtagaaaatctttctagtcggtgcagttggcaagatttaaaggattttatgcgacaagcaggtgaagtaacctatgcggatgcccacaaggaacgaacaaatgagggtgtaattgagtttcgctcctactctgacatgaagcgtgc

SEQ ID NO: 47016 - DNA, 351 bp, Gossypium hirsutum
  Clone ID: LIB3196-033-P1-M1-F12
atcagggatccctagccctgtacaatgtaatttaaacttacagcatttttactgtgtataatatggtgtcctctgtgccagttttgtaccttatagaggcagattgcctccgatcgctgtggttcttattatcaaaattaagtttacttgtatacggaacaaccacaagaaatttgattctgtaaagaatcctctttagctgtggcctggcagtatataaatggtgctttatttaacagaatacctgtggaggaaataaagcacacttgatgtaaaaataattgttttatttttattgacatgactgattgctattctgtgcacttaattaaactgattgtgatgactttt

SEQ ID NO: 47017 - DNA, 344 bp, Gossypium hirsutum
  Clone ID: LIB3196-033-P1-M1-F2
cccacgcgtccgaaaacacaccaagcgtaaaaactatttgcgccccaaaatcctgaaaaccctcactaaacctttcccttcttccactcctatcaatcccataacccccatagaatcccaacctgaaactaaacctctcgacgtcgtcgttttcgagccgccttctgatgaaaccgataaagttgaagaatttcgggtttcagagacaccgggtgttcttaatggagaaaacagtggcggttttggtaaattttctccttattcagtaatgaaatttggattttattttgttgggatttttttgtttcagactttaattgctgtttgggtgatgggaaattggg

SEQ ID NO: 47018 - DNA, 323 bp, Gossypium hirsutum
  Clone ID: LIB3196-033-P1-M1-F3
ctttgcacgcttgttctaagtagtagttttgttagtaaggcatgtaatggtggaataaaataagggtggcctatgtaaagaggaagagccttttttgttgtgtgttttggagtccttttgttttaaggaataaaataagagggaaatctttacttttccttttaaaaaaaaaaaaaaaaaaaaaaaaaaaataaaaaaaaaaaaaaaaaaaaatgttattaataaaaaaaaaaaaaaaaaaaattaaaaaaaattaaatacttattcgggggggccaatttaaatgttaaatatgttacgaacgcggggggggccggctttaa

SEQ ID NO: 47019 - DNA, 357 bp, Gossypium hirsutum
  Clone ID: LIB3196-033-P1-M1-F4
ccgaaactcagtttggaaaaactcccaagttacttgctcccggggcacaacagaagtcagagtactccaccaatagtaggcagaatcacgtagcaaggagatagcacactttaggcattcatcgggtgtacaagatagctcatcgagtacccggatagtgttgtccaaccaaaattcagcttgctcggcatcgtcgctatccgtagctttaaattcagtagccccaggttttcagattctgtcaactgggggcttatttgaccttatttggtcagttaccggaggtattgtaggtgcgggggttgtgtttgtcgggaatggaggttgtggaacagccgtattagttcgaatgtattg

SEQ ID NO: 47020 - DNA, 79 bp, Gossypium hirsutum
  Clone ID: LIB3196-033-P1-M1-F5
aaaaaaaaaaaaaaaaaaaaaaaaaaaaaaaaaaaaaaaaaaaaaaaaaaaaaaaaaaaaaaaaaaaaaaaaaaaaaaa

SEQ ID NO: 47021 - DNA, 356 bp, Gossypium hirsutum
  Clone ID: LIB3196-033-P1-M1-F6
gttcgtagtggcagagaaactctttcttggagttttccttcattgcttggtcttggacggcaaattcatcagagtagctctctaatagaggaacaacttgacccattttcacttgtttctgatgaactgtcacttgtcgctaacaggttgcgggctatggttattgctgaggttcctaagcttgcttcagctgctgagtacttcttcagattgggggtggaaggaaagagatttcgtcccacggttttgcttttgatggctacagctttgaatgttcatatacctgaaccagttggtggtggtgtaggagatactgtggcaactgaattacgtacaagacagcagtctatagctga

SEQ ID NO: 47022 - DNA, 365 bp, Gossypium hirsutum
  Clone ID: LIB3196-033-P1-M1-F7
atcttccctctcacctccagcctctcacgctctgcacagccctctcatctcctggaaccatggccagcacatccaccaccatcaggagccacagcagcagccgcaggggcttcagtgccggctcagccaggctccctggggtcagccgctctggcttcagcagcgtctccgtgtcccgctccaggggcagtggtggcctgggtggcgcatgtggaggagctggctttggcagccgcagcctgtatggcctggggggctccaagaggatctccattggagggggcagctgtgccatcggtggcggctatggcagcagagccggaggcagctatggctttggtggcgccgggagtggatttggtttc

SEQ ID NO: 47023 - DNA, 348 bp, Gossypium hirsutum
  Clone ID: LIB3196-033-P1-M1-F8
acggatttggaagaatcggacgtttggttgccagagttgctcttcagaggaacgatgttgaactcgtcgccgttaacgatcccttcatttccaccgattatatgacatacatgttcaaatacgacagcgttcacggtcaatggaagcaccatgatcttaaggtcaaagactctaaaaccctcctcttcggcgaaaaacccgtcactgttttcggaatcaaggaccctggaggagattccatgggctgaagccggggctgagttcgttgttgagtcaactggagtgttcactgacaaagacaaggctgctgctcacttgaagggtggtgctaagaaagttgtgatatct

SEQ ID NO: 47024 - DNA, 292 bp, Gossypium hirsutum
  Clone ID: LIB3196-033-P1-M1-F9
cggacgcgtggggcgaaaaagtgaataaaataaaatatattattttattaaagtttttgtttgggggaaattgagagaaaattttgaaaaaaaaaaatccaagatgaagatcacatcgttagtagtgctgaagtgcaacccggaaggatccgatccgataatactagcgaacgctaccgatttgagccattttggttacttccaaaggtcaagcgtcaaggagttcatcgttttcgtttctcgaactgttgctaaacgtactccttctggtcagcgccaatccgttcagcac

SEQ ID NO: 47025 - DNA, 351 bp, Gossypium hirsutum
  Clone ID: LIB3196-033-P1-M1-G1
aaccaaggccttggatcaaaagactccattcgaagcctggtttggattcaagccatcattggctcatttgaaggtctttggatgcatctgttatgctcatgtacctgctgtcaaaagggacaaattgtctgaaagggctcgacctggtattttggtgggctacagcactgttaagaagggctataggatcttggatccttcaacaaagaaagtgtcagtcagtaaggatgtggtatttgatgaaaagtcatgttggaactgggaaaaacatgaacctgagaaagtttcagaaggacttgcagcagatcaagctaagccagatcaaaatgttcctgaaatggacattgatga

SEQ ID NO: 47026 - DNA, 354 bp, Gossypium hirsutum
  Clone ID: LIB3196-033-P1-M1-G10
cccacgcgtccggccttaaccaattcttaacctttttccgatcagtttcctactttcattcttcttcttcttcttcttcttcttcttcttcatattcttcatctttatcagaaaaatggagctttgcatggaagccaaagcgttgaaatcaagtgtaagaggagaattcacgaagaacagccataaccagaaccagcatgttgcttttgatgatttttttagctcaaacggtggcgtttccagtgaagaattttcagttgattgtttttttgattttactaatggagaatttgaagaagaaaatgaagagaaaaattctgcgcttattttctcgcaagaagaaagagtaacaga

SEQ ID NO: 47027 - DNA, 351 bp, Gossypium hirsutum
  Clone ID: LIB3196-033-P1-M1-G11
tgcttctgttggaaagactacgtatgttcactgcaaggcaggtcgaggacgcagcacaaccattgttctctgctacttggtagaacataggcatatgactcctgatgcagcttatgagtatgtgagatctatcagacctagggtccttctggcacctgcacagcagcaggctgttcaagattactatcttcacaaggtcaataataatggaatctgtggagactcttgctcaatgataataaagaaaactctagttgtacctgaaaaacaggatatagcggtcttcgatgatggctctgtagttgttgtaacagagtcggaccttgacgggtatgacgctagctttgacac

SEQ ID NO: 47028 - DNA, 361 bp, Gossypium hirsutum
  Clone ID: LIB3196-033-P1-M1-G12
cacgcgtcccgcctggtgggggaaagaatacgtatgttcactgcaaggcaattcgaggacacagcacaaccattgtaacgggcttcttggtataacataggaatatgaaccctggtgcactttattagtatgcgagatctatcaaacctaagggaggtttgggacctgcgcagaatcttggtgttcaagattactatctttacaagggcaataataatggaatctgtggagactctcgctgaatgataataaagaaaactctagttgtacctgaaaaacaggatatatcggccttagatgatggctctgtagatgttgtaacaaagtcggaccttgacgggtatgacgctagctttgacac

SEQ ID NO: 47029 - DNA, 294 bp, Gossypium hirsutum
  Clone ID: LIB3196-033-P1-M1-G2
atggcggagcggagccggacaagttggctgcccgtgttgggagcactagaggccgttgctgtgccgcccctgctctttaaactcggattcccaatggaagcagccgcccctgacctttacactgaaccattttgtaagagaacccagccgacccggctgttgtggggcttttctttgtagaatgccagggcacaaatgaataatttcagaatgtgaaaacttgacagactctaataaatgattcatacactacttctccatgaatatgaaaaccattaataggatgatgagaaa

SEQ ID NO: 47030 - DNA, 345 bp, Gossypium hirsutum
  Clone ID: LIB3196-033-P1-M1-G3
cgctagggtttcaagggatttcttccagtgcgaagagcagcagccatggttctcaagacggagctttgccgatttagtggtgccaagatataccctgggaaaggcatcagatttgttcgtggtgattcccaggtcttcctcttttccaattcaaaatgcaagaggtacttccacaaccgcctgaagccatcaaaacttacatggacggccatgtacaggaagcaacacaagaaggacattgcccaagaagctgtgaagaagaggagacgtactgcaaagaagccatactccagatccattgtgggtgccaccttagaggttatccagaagaagaggagtgagaaa

SEQ ID NO: 47031 - DNA, 303 bp, Gossypium hirsutum
  Clone ID: LIB3196-033-P1-M1-G4
aactagggaaaaaagggataaagggcaaagcgaagagcagcaaccataggaactaaagacagaagcaaagccaatttagaaggggcccagatatacccgtggaaaaggcatcaaaagggggcggccgccattaggggcccatgcttctttccccgtgcatgcagcaagatggccttttttcagggcgccccaaaacataattaccggcccgggctgtcccgcacaggaggcgggaaaaccccggcgttgccccaactgatgcgcttgggaggaaacccccttttgagcagccgtgctataaat

SEQ ID NO: 47032 - DNA, 327 bp, Gossypium hirsutum
  Clone ID: LIB3196-033-P1-M1-G7
cccacgcgtccggtttccacttcctccatagccattttctactgaccagtccaaaaagtcttaacccttcttcattggcttcccgagccataagctgctatcaatggctcaacgacgcccattgccacccttgatcatggacctgaccatcgcagttcgtccaccaggtcatcaacatcctagctcaagaaaagtagatttcatgttttgaagtagatggcaatatctctcctgagctctttcttcttatatcttttcttctattctcgaaattctttgatgattattcgagttttcttgaccttgcaagtccgtaagcaaggtaaa

SEQ ID NO: 47033 - DNA, 256 bp, Gossypium hirsutum
  Clone ID: LIB3196-033-P1-M1-G8
cacgtttcaactcgagtaatgggaacatatggatatgctgcacctgaatatgttatgactggtcatctgactgcgaggagtgatgtatacagcttcggagttgttcttttggagcttttgacgggaagaaaatctgttgataagacaagaccaagcaaggagcagaatttggtggattgggctcgcccaaaactgaatgataagagaaaattacttcaaataattgacccaagattggagaaccagtattcagcaa

SEQ ID NO: 47034 - DNA, 217 bp, Gossypium hirsutum
  unsure (1)..(217): unsure at all n locations; Clone ID: LIB3196-033-P1-M1-G9
gcgcccacgcgtncgcgtgttccaaaaggccttcatttccaaaaaagccattgttggccgggaacccaaaccgtttttgtttgtttccgatccaataccaaaaagtttgggaatggtccaaaaaagccgaaccgtctttttgaaccgaaaaggaagccatcttgctttccaaccttggtaactgggaaactttaacggcggtgagcattaatttatt

SEQ ID NO: 47035 - DNA, 318 bp, Gossypium hirsutum
  Clone ID: LIB3196-033-P1-M1-H1
gtttcagacaagatcatcacagtttcaagtgcctccactggtttactggaaaggatactattcttacatgcatcaattatgtccgcttatgtatcatataagcaaaacgcatcactttggcatttgcacaccatagtgactctgagaaaatttaccttgtggccgaacctatgatgaacgctcacgttcttgcacattagaacaaatattatgtcacattatgacctgtagtttgatccactgacccatcaagtagcaccgtgtacttgtctcactcaacgacacgaggaaaagattatcatagcattgctttaccga

SEQ ID NO: 47036 - DNA, 375 bp, Gossypium hirsutum
  Clone ID: LIB3196-033-P1-M1-H10
atgcccgaacgtcatttcttattttagttgggctgggtcccccagactcccaccacctcaccaggacttttggacagcccaattatactcccagagtaccccaccccaaccccctatgaattcccagtattttcccacgtctcacccccccagcagaacactggtctcacctgtgggtatgcagagctgggcacagggaagacggcaggccggggcatgtgaggcatggggtgggcagggtgagctgggtgagtgaggtactgagggctacagggcaagtggggctgtagagcagtgtaggggtgcaggccaagggagtggccatgccccagtcctggacccgggtacaaactagaccccaccgagatgacgggc

SEQ ID NO: 47037 - DNA, 353 bp, Gossypium hirsutum
  Clone ID: LIB3196-033-P1-M1-H11
taaagccagccaggaacaaataagggcattgagccaagaagctacttcaccaagggagaaaagtggcgagagattcgccttcaacttattgagccaaacccctcgctactccaaccaaaacggccgcttcttcgaggcttgcccacgtgaattccggcaactcagggacatcaatgtcaccgtttcagccttgcaattaaaccaaggatcaatctttgtgccgcactacaattcaaaggctacattcgtgatccttgttaccgaaggaaatggatacgctgaaatggtttctcctcatcttcctaggcaaagctcatatgaagaagaagaagaagaagacgaagaagaagaac

SEQ ID NO: 47038 - DNA, 377 bp, Gossypium hirsutum
  Clone ID: LIB3196-033-P1-M1-H12
atgcaagtttgctgagctgaaggaaaagattgatcgccgttctggtaaaaaactggaagatggccctaaattcttgaagtctggtgatgctgccattgttgatatggttcctggcaagcctatgtgtgttgagagcttctcagactatccacctttgggtcgctttgctgttcgtgatatgaggcagacagttgcggtgggtgtcatcaaagcagtggacaagaaggctgctggagctggcaaggtcaccaagtctgcccagaaagctcagaaggctaaatgaatattatccctaatacctgccaccccactcttaatcagtggtggaagaacggtctcagaactgtttgtttcaattggccatttaagtttagtag

SEQ ID NO: 47039 - DNA, 355 bp, Gossypium hirsutum
  Clone ID: LIB3196-033-P1-M1-H2
ataaacatgaataagtttcatataatctcttaacacattaacttcttccatcaacaaccttttgtttctttatccatcaaaacttaaaggaaataatcaaattccttctttaatagccatagccgaatggtccatccatccatcaaagtttttttaaaaagaattagcatggtctaagtaagaaccatgataattaacctaaaacaagctaaaatttcacaactttaacacaatatactaaccttattaaacattcaaatggccgaaagttctttgcccctattccttccttcaattcggccaagaagacaagaatgaagccccttttttttttcatcacattttcattcttttc

SEQ ID NO: 47040 - DNA, 351 bp, Gossypium hirsutum
  Clone ID: LIB3196-033-P1-M1-H3
gggaaaactgcgaatcttagtgctaatttagccgggagagtggaagggaatgtgtttgacattattcatgggttagaagatttaggatcaaatttaggattctccggcgcgtccgatgttgaccgctgtgttgttagttcaggggtagttaaggatattactcactttgtcggtgtttcggattttatcccatttgcttatgatgttcccggattcccggttgttaaagagtcgacaaaaactgggagtttttgggaaaaagaagaagttcctcctggggagcatataccgagttggttgcctgcttttcctgaccctgagacttatgagaactcgttgagtgtagagaat

SEQ ID NO: 47041 - DNA, 145 bp, Gossypium hirsutum
  Clone ID: LIB3196-033-P1-M1-H4
aagtttttgaaaaacgcaatatattaaaaaaaggataactaaaaacacctttttgaggttttgcgatggcatcgaagcggatcttgaaggaattgaaggatttgcagaaggaccctcctacatcatgcagtgctggtcctgttgc

SEQ ID NO: 47042 - DNA, 390 bp, Gossypium hirsutum
  Clone ID: LIB3196-033-P1-M1-H6
tttaggcgacactatagaacaagtttgtacaaaaaagcacgctgctgcctttccgggatgccagaataccacaaattcctcatcggcaaggggggcggcaaaattcgcaaggtgcgtgacagcacgggagcacgcgtcatcttccccgcggctgaggacaaggaccaggacctaatcaccatcattggaaaggaggacgccgttcgagaggcacagaaggagctggaggccttgatccaaaacctggataatgtggtggaagactccatgctggtggaccccaagcaccaccgccactttgtcatccggagaggccaggttttgcgggagattgctgaagagtatggcggggtgatggtcagcttcccacgctctggcacacagagcgac

SEQ ID NO: 47043 - DNA, 87 bp, Gossypium hirsutum
  Clone ID: LIB3196-033-P1-M1-H7
gtgaatctcggatctcagtctgacactatagacaatggcacaccatgtaatcttactatatcagaaatgtatcattcagcttatcta

SEQ ID NO: 47044 - DNA, 322 bp, Gossypium hirsutum
  Clone ID: LIB3196-033-P1-M1-H8
gagagccttcctgctctctctctccctcctccttcttctcatttgggtagggtaatatacccatcatcgccggaccaccgctcctccaccgtagacggtggtcggggagacgcaaattggtccccttagcctcgtttgaaacgcctttgaaggctaggctaccaaaactcaaagaatcgaaggagaacctcaacccccccttttgggtccgatgtcggcgatggaaaagtgttctccgacacgcgaccaagagatccaagtgagcccctcccctttcctttttaatccttaattttttatgcctaaaatagatatcttaaaa

SEQ ID NO: 47045 - DNA, 354 bp, Gossypium hirsutum
  Clone ID: LIB3196-033-P1-M1-H9
gtcctgagtgctagacaaaatgctcctcatgaaacttatgtttatttcatggatctcttggcaaaaacagtgagagatgaaatagctggatgcagtgagaaggcatatgattatctttcaattaacgatgcccgacagatgttacttttctcatctgatcaagaacttttggaatacatcaaagaggagcatcctgactgggaggtgaagaatggatccgtgtatttccagaaggctaaagattctgcaccatgtaaggagatcccatccctacaactgattaaccaaactcttagctatgctagggagttggagcggattgtgtaggcaagctgctatccagtggttgctttt

SEQ ID NO: 47046 - DNA, 366 bp, Gossypium hirsutum
  Clone ID: LIB3196-034-P1-M1-A1
tacttatggtaatcatggtgaggaacaagtcagttttcgtagttttgctcttttctcttttcctttcctttggcttgctttgctctgccaaagacttccccggccgaagaagcgaggatgatcctcgacagaggtacgaggactgccagaggcgatgccagtcggagacacgtggacaaacggagcaagacaagtgtgaagacaggtgtgaaaggcagtttaaggaggagcagcagcgtgacggagacgatcctcagaggagataccaggattgccgacaacactgccaacaggaagaaagaaggctgcgtccacagtgctaacaaagctgccaggaacaatacgagagacaacagcagcagcagc

SEQ ID NO: 47047 - DNA, 369 bp, Gossypium hirsutum
  Clone ID: LIB3196-034-P1-M1-A11
attactgctcaaaaacctgagcagcgatacgaagacagtgacagtgaacatgacagcctggaccatcgtctacaatggcacacttgtacatgaagtgtggaaggactctgccaccatgtccctggaccctgaggaagaggcagagcatcctgtaaagatctcgtacgctcagtatgaaaagtacctgaagtccgacaacatgatccggatcacagccgtgtgcaaggtcccagatgaacctggggtggtggtggagcgggacatcatcctggacaaccccaccttgactctggaggtgctggatgaggctcgtgtgcggaagcctgtgaacgtgcagatgctcttctccaatccactggatgagccagt

SEQ ID NO: 47048 - DNA, 368 bp, Gossypium hirsutum
  Clone ID: LIB3196-034-P1-M1-A12
atgtcgcgacgagggcgctggtcgagaggcatttggcttgtagcaggtcccgcactccaacctttcgcggccagggtttgctctctgcttgtcctggactgaggtgcccatgacggagttatccaaggaggaagaaatctgttccgggtgagcccaggccgccccggatatgcgatggctgaagagcggacaccagggaccacactgaggttgggtttgagaccaagatactggattcttctagttaagataaagagctttgggtgcctgacagtgaaaatggtgtaatctgcgtaacagttcacagtttgaaggcatgacagttaaagaacacacatggacttgtggcacatggaaatgtgcacaca

SEQ ID NO: 47049 - DNA, 362 bp, Gossypium hirsutum
  Clone ID: LIB3196-034-P1-M1-A2
gcgggatgttcgttccgatgctcaaactcataataggctgtgaccccaagtattccacaggcatttacaagcgtatgatcatgggtgcagctggatcaactgtatactataacctgagacttaggcacccaacactggaaatgcctctcatagattatgacttggcattgctatttcagcccatgcttatgcttggaatcagcattggagttgcccttaatgtcatgtttgctgattggatggtcacggttctgcttatcattctcttcattggtacatcaacgaaagccttattcaaaggtatagacacatggaagaaagagacaatattgaaaaaggaagctgccaaggtggaatcagaa

SEQ ID NO: 47050 - DNA, 360 bp, Gossypium hirsutum
  Clone ID: LIB3196-034-P1-M1-A3
cgttttcctgcctcgtcacctgacaacgcgctgacgtggacgcgttttcggggtaatagggtcatttcggtaattaattttttaatgggcccattttagtaatttaaaaaaaaatagggcttttattggtattttgccctttttaaaaactataattcttttgcatttctatttttttttacaaaaaagaatttttattaacatttttgaaatacttttccatttttttaatctatacagtttaaaagtttgaagagatttcataatttttggaattatactcttatttatgttttttattcattttataaaatttaaattattttctaaatggtgtataagacaaatattatcatgtta

SEQ ID NO: 47051 - DNA, 366 bp, Gossypium hirsutum
  unsure (1)..(366): unsure at all n locations; Clone ID: LIB3196-034-P1-M1-A4
atcgggtgcattgaacctttagaaaaggttagaaggcaaatttagtaacaaatctttgttagtaattttttaatttgagcaccatcattttaaaaagaggtagttctgggtaactttttgcccttgttttccaagagggtgtaaaccagtgtgtataaaaagaggtgtgaggggtgatttagagcacataatattgaagataccgtgtagctgtgatgtgctttttgttcattacttaaatactcatttatgggcggttgtcttattcttatataatcacatgtattttcctcattatttttctttctcgncagagcccacttttgccctcacacttctaaatagaagcatatacgagtttttttt

SEQ ID NO: 47052 - DNA, 368 bp, Gossypium hirsutum
  Clone ID: LIB3196-034-P1-M1-A5
atcgggtgcatcggacctttagaaaaagctaggaggcaaagtcagtgacagatctcttgtcggacttgcttcatctgagcaccatcatcttcaagagaaggtagtatctgtgtagacattatctggaccttggttttcccaagcaaggtgtaaaaccagtgtgtgtagaaagaggggtgaggggtgattcgagagcagataatcttgaagatcccgtgtagctgtaatgttctttttgttcattacttaaatacttatttatgggctgttctcttattcttatataatcacatgtattttcctcattatttttctttctcgtcagagcccacttttgccctcacacttgtaaatagaagcatatacga

SEQ ID NO: 47053 - DNA, 273 bp, Gossypium hirsutum
  Clone ID: LIB3196-034-P1-M1-A6
atgctgggaggaggccgcggtgtctctagctgttcaactcggtttgtctctgggggatcagctggaggctacggaggcggcgtgacctgtggctttggtggaggggctggtagtggctttggaggtggctacggaggtggccttggaggtggctttggtgggggttatgctggtggctttgttgattttggtgcttgtgatggtggcctcctcactggcaatgagaagatcaccatgcagaacctcaacgaccgcctggcttcctacctggag

SEQ ID NO: 47054 - DNA, 359 bp, Gossypium hirsutum
  Clone ID: LIB3196-034-P1-M1-A7
atgaggcctacaagaagggcctaattgattatgaaaccttcaaagaactgtgtgagcaggaatgtgaatgggaagaaataaccatcacgggatcagatggctccaccagggtggtcctggtagacagaaagacaggcagtcagtatgatattcaagatgctattgacaagggccttgttgacaggaagttctttgatcagtaccgatccggcagcctcagcctcactcaatttgctgacatgatctccttgaaaaatggtgttggcaccagcagcagcatgggcagtggtgtcagcgatgatgtttttagcagcacccgccatgattcagtaagtaagatttccaccatatccagcgtc

SEQ ID NO: 47055 - DNA, 330 bp, Gossypium hirsutum
  Clone ID: LIB3196-034-P1-M1-A8
cggacgcgtgggcaaaaccctaacggctacagctctagaattcaagcctttcgaccatggcggatgttgagacggaggtagcggcggctggagtgcccaagaagagaacattcaagaagtttagcttcagaggtgttgatttggatgctctccttgatatgtccactgatgagcttgtcaagctctttcctgcccgtgctcgcagaaggttccagaggggtctcaagagaaagcccatggctttaatcaagaaacttcgcaaggcgaaaagggaggctccaccaggtgagaagccagaaccagtcagaacccaactccgaaatatgatca

SEQ ID NO: 47056 - DNA, 350 bp, Gossypium hirsutum
  Clone ID: LIB3196-034-P1-M1-A9
atttacagcttctcttattcatatcaatgttgaatatggagatgggcagcttgaattaaatatggaacggttgagaatggctgttgacgagctccttatgaagcttgcaaaaatgttttcaaaaccaaaattacaaatcgtgttcctaataaacaactgtgacatgacaattgcagttctgaaggaagctggtcctgaaggtgggaaaatccaacagcactttgaggagatgctaaagagtaacacaggattatttgtagaggaacttctgatggagcattttagcgatttgataaagtttgtgaaaactcgagcctcggaggatcctaatggtagcaacgaaaggccta

SEQ ID NO: 47057 - DNA, 334 bp, Gossypium hirsutum
  Clone ID: LIB3196-034-P1-M1-B1
atgccggagggtcctgccgcgcccccagcacctacggcgggggcctgtctgtctcctcctcccgcttctcctctgggggagcctacgggctggggggcggctatggcggtggcttcagcagcagcagcagctttggtagtggcttcgggggaagatatggtgctggcttcggtggtggcttgggtgctggcttgggtggtggcttgggtggtggctttgctggtggtgatgggcttctggtgggcagtgagaaagtgaccatgcagaacctcaacgaccgcctggcctcctacctggacaaggtgcgtgctctggaggaggccaacgctgacct

SEQ ID NO: 47058 - DNA, 352 bp, Gossypium hirsutum
  Clone ID: LIB3196-034-P1-M1-B11
gtaaaaaatgagtaggaaggaaatggcgtggtggttgaggttggcagtgttgatgatggttggaagccattgggcatgggggcagtgcgagacgagtatccccaagctcatatcccaatgcgggcaatacgtagaaggatcagggccggaaacgactccatccaaggcttgctgtgatgtgataacaagtctggatattccatgcatgtgcaagtacgtgacaccagatgttgagaagcttgtgaacatggaaaaagttgtgtttgttgctaaatcctgtggattgacacttcaacccggaatgaaatgcggaagtacctactttacatacctttaacatccttccattttt

SEQ ID NO: 47059 - DNA, 363 bp, Gossypium hirsutum
  Clone ID: LIB3196-034-P1-M1-B2
ctaaaaagaaatcgataaaaatggggatggcgagtgttcgatctggtctcctacgagcaggccttcgcggcggctctcgtcctactgctcctcccacgcgtggcttcgcttcctcttctcatcacgatgatgcttatgaaaccgcaaaatgggaaaagataacatatttaggtgttgctacctgcactgttttagcgatttataacctatcaaaaggtcatccccaccatgaagagcctcctgcatacccatatttgcacattcgcaacaaggagttcccatggggtccggatggtctgtttgagagaaaggagcatcactagggatggccggatggatgcatatcttttcgagttcggcgca

SEQ ID NO: 47060 - DNA, 358 bp, Gossypium hirsutum
  Clone ID: LIB3196-034-P1-M1-B3
tccgatttagtcccgacttgtttctaatgtctttgtagggcctcgagggctcatataaggaagaatatgtattttattgatttgttttgctgttattaatggtaggaattaaatgttttaaaattgttgatagtgctccgtaaccttattctagtgacagatacgggttaggggtgttacagtaattttgtctggtaagttcgtatgaactgtaatcgctataattttattgaaattaaataattactatgttgtttttaatgtaaatgaatcaatatatatatgaatgtgtctatattatgatgaattgatagatatcaagtcccggttgaaccttaagaattcataggatgcaaat

SEQ ID NO: 47061 - DNA, 377 bp, Gossypium hirsutum
  Clone ID: LIB3196-034-P1-M1-B4
atgtcatttcattggcgtttgagtcagcaaagaagtcaagatggccaaagttccggacatgtttgaagacctgaagaactgttacagtgaaaatgaagaagacagttcctccattgaccatctgtctctgaatcagaaatccttctatgatgtaagctatggcccactccatgaaggctgcatggatcagtctgtgtccctgagtatctctgaaatctctaaaacatccaagctgaccttcaagcagagcatggtggtagtatcaaccaatgggaaggttctgaagaagagacggttgagtttaagccagtccatcactgataataacctggaggccatcgccaacgactcagaggaagaaatcatcaagcccaggt

SEQ ID NO: 47062 - DNA, 378 bp, Gossypium hirsutum
  Clone ID: LIB3196-034-P1-M1-B5
atgtcatttcattggcgtttgagtcagcaaagaagtcaagatggccaaagttccggacatgtttgaagacctgaagaactgttacagtgaaaatgaagaagacagttcctccattgaccatctgtctctgaatcagaaatccttctatgatgtaagctatggcccactccatgaaggctgcatggatcagtctgtgtccctgagtatctctgaaatctctaaaacatccaagctgaccttcaagcagagcatggtggtagtatcaaccaatgggaaggttctgaagaagagacggttgagtttaagccagtccatcactgataataacctggaggccatcgccaacgactcagaggaagaaatcatcaagcccaggtc

SEQ ID NO: 47063 - DNA, 372 bp, Gossypium hirsutum
  Clone ID: LIB3196-034-P1-M1-B6
atgcagcgtcatcctcaccggggagtacatcagcaaggatggtgttccatactgcgagtctgactaccacgcccagtttggcattaaatgtgagacttgtgaccgatacatcagtggcagagtcttggaggcaggaggggaagcactaccacccaacctgtgccaggtgtgtacgctgccaccagatgttcaccgaaggagaggagatgtacctcacaggttctgaggtttggcaccccatctgcaaacaggcagcccgggcagagaagaagttaaagcatagacggacatctgaaacctccatctctccccctggatccagcattgggtcacccaaccgagtcatctgcgacatctacgagaacctggacc

SEQ ID NO: 47064 - DNA, 374 bp, Gossypium hirsutum
  Clone ID: LIB3196-034-P1-M1-B7
atgcgcgccctaaggagtggcactttttaaaagtgcagccggagaccagcccacagccgcctgtatctgtgtccagcccgggtaccgcctgtcccagctgcgctcgcccctcagtcccgcacccgttcgacccaggctaggttagccctcaccatgccggtcaaaggaggcaccaagtgcatcaaatacctgctgttcggatttaacttcatcttctggcttgccgggattgctgtccttgccattggactatggctgcgattcgactctcagaccaagagcatcttcgagcaagaaactaataataataattccagcttctacacaggagtctatattctgatcggagccggcgccctcatgatgctggtggg

SEQ ID NO: 47065 - DNA, 355 bp, Gossypium hirsutum
  Clone ID: LIB3196-034-P1-M1-B8
cccacgcgtccgatcgatcttcgtaccgcactacaattcaaaggctacattcgtggtcctcgtcaccgaaggaaacggccacgtcgaaatggtctgccctcacctttctaggcagagctcacactggtcctcccgagaggaagaagaacaagaagaacaagaagttgaaaggagaagtggacaatacaagagagtgagagcccagttatcaaccggtgacctatttgtagtcccagcaggccatccagtcacattcgttgcctcccaaaacgaggacctaggattgctcgggttcggactctacaacggccaagacaacaagaggatcttcgtggctgggaaaaccaacaatgtg

SEQ ID NO: 47066 - DNA, 317 bp, Gossypium hirsutum
  Clone ID: LIB3196-034-P1-M1-B9
gagatgcggaaaatcatgggtgccaaaggtctcttcttctgtgctttgctttccttttcagctgggccggcattcgcacaggatgaggaagaccaaggtcttgttatgatttctacaaggattcttgtcctcaggctgaagacattatcaaggagcacgttaagctactgtacaagcgacacaaaaacactgctttttcttggctgggaaacagtttccatgactgtgctgtccagtcatgtgatgcttcactgctgctggactccacaagaaggagcttgtctgagaaggagacagtcaggagctttggcctaaag

SEQ ID NO: 47067 - DNA, 363 bp, Gossypium hirsutum
  Clone ID: LIB3196-034-P1-M1-C1
ctggacaattcgaggaattcttcccagctggaagccaacgccctcagtcatatctccgagcctttagtcgtgaaattcttgagcctgccttcaatacacgaagtgagcagctagacgagctgtttggtgggaggcaaagccaccgaaggcagcagggacagggaatgttccgtaaagccagccaagaacaaataagggcattgagccaagaagccacttctccaagggagaaaagtggcgagagattcgccttcaacttattgtaccaaacccctcgctactccaaccaaaacggccgcttctatgaggcttgcccacgtgaattccggcaactcagggacatcaatgtcaccgtttcagcct

SEQ ID NO: 47068 - DNA, 298 bp, Gossypium hirsutum
  Clone ID: LIB3196-034-P1-M1-C10
tctcgacagaggcagcgtgcatctgaataaagagttaaaggcaataataatcacatagtctcgtgtttatggactaatgtgaaattttctagttttaagcaggcatgtaatgaaataaaaatggtgacctatgtaaaggaggagacccttgttttgtagtgcaataacttgtatgaacttttgagtgcgtttttttgactttctatgttaaggaataaaatgttaagctcttaagtcaaacaaaaaaagaatctagatatgaggctcaagtgcagataacatatcttaaacgctggct

SEQ ID NO: 47069 - DNA, 365 bp, Gossypium hirsutum
  Clone ID: LIB3196-034-P1-M1-C11
atctctgtgagtatttttaaataaacttattttggacagtatgagctttgggaagggaatttatatacatgactttaaaagattttccttattattttcagatttcaatgttaagaaatagtttttttttaaagctatattttcagtgatggctttaatgtcagtgagaaaccaaaccctatatctgttctcataagcaatctaaaccatagaaattagtgagacttaaatgcatcttttaattttattcttagaaatttgattttggtcttgaagtggcaggtgcaaaatacaaaaacaaagattagaaaaaagaaattaaagaaaagaaatttaattttgggctcttggcctttctagagtct

SEQ ID NO: 47070 - DNA, 325 bp, Gossypium hirsutum
  Clone ID: LIB3196-034-P1-M1-C12
atcagctccatggtgatccgggacctgaccctgcgcagcgccgccagcttcggctccttccacctcatccgcctgctctacgacgagtacatgttctacctggtggagcaccgcgtcgcggaggccaccggagagacgccgatcgctgtgatgggagagttcaacgatctcgcctctctgtcgctgacgctgcttgacaaagacgacatgggtgatgagcagcgcggcagcgaggcgggcccggatgcccacagcctgggcgagcccctggtgaagcgggagcgcagtgatcccaaccactccctgcagggcatctagcagcccc

SEQ ID NO: 47071 - DNA, 254 bp, Gossypium hirsutum
  Clone ID: LIB3196-034-P1-M1-C2
tggagtttctgcatggattccgggttgacatcgtttttggtcccggacatccctctcgatggaaccgctgaattgccaaacttgtttgatcatgatgcgggatttgaggataacttcgacttgatattcgacgtagggccgcctaacaaagaagaggctaatcggaaatgcatgatggatgaagatgtgattggagtcggtgtttccatgaacgtggaagacgataataagaaggagagattgtcatcactgtc

SEQ ID NO: 47072 - DNA, 365 bp, Gossypium hirsutum
  Clone ID: LIB3196-034-P1-M1-C3
atgcttttttcttttaaaagctaaaaaaaaaaaaaaaaaatacttttaattcctttttgttatgttagataattgagatcacatagaaatgcatttaatctgttcacccactgtaaattttattttgaggacccagaattttcttgtctaatttatactttcacccatgttgcagttaacaccagagaaggaacgtgaatgttgagcacagccactacccttgttggcactaaatttagaaatagggtgagaaggtttaaaagcctgtaaacacccatcttgattttattttcattccttttggttctctgtgtaataatagtaggctacatagtgacattccagttccaagaaggtacatcctg

SEQ ID NO: 47073 - DNA, 358 bp, Gossypium hirsutum
  Clone ID: LIB3196-034-P1-M1-C4
ggtttttcttcttcattttctcctttcctcgatcaaaaacctcagctctcttaccgccaaaggaggatcatcttttcaggttttgcgatggcatcgaagcggatcttgaaggaattgaaggatttacagaaggatcctcctacatcttgcagcgctggtcctgttgctgaagacatgttccattggcaggcaacaatcatgggtccaccagacagtccttatgctgggggtgttttcctggtgaccatccattttcctccagattatcccttcaagcctcccaaggtggcatttagaacgaaagtattccatcctaatattaacagcaatgggagcatttgcctagacatcttaaagg

SEQ ID NO: 47074 - DNA, 357 bp, Gossypium hirsutum
  Clone ID: LIB3196-034-P1-M1-C5
ggtttttcttcttcattttctcctttcctcgatcaaaaacctcagctctcttaccgccaaaggaggatcatcttttcaggttttgcgatggcatcgaagcggatcttgaaggaattgaaggatttacagaaggatcctcctacatcttgcagcgctggtcctgttgctgaagacatgttccattggcaggcaacaatcatgggtccaccagacagtccttatgctgggggtgttttcctggtgaccatccattttcctccagattatcccttcaagcctcccaaggtggcatttagaacgaaagtattccatcctaatattaacagcaatgggagcatttgcctagacatcttaaag

SEQ ID NO: 47075 - DNA, 350 bp, Gossypium hirsutum
  Clone ID: LIB3196-034-P1-M1-C6
cggacgcgtgggctttgaagagcggctgctcagattttgcctatttctcagatttttctctcagtttgaaacgatgtctacggctggcgaagctgcttgttcttacgctgctttaattctctatgatgatggcattcccatcaccgctgagaaaattgcaacaattgttaaagctgcaaatgtctcggttgaatcttattggccaagcttgtttgcaaagcttttcgaaaagtgcaacattgaggatcttataaccaatgttggtgctggtggtgctggtgctccagttgccgcagctgcacctgttgctgcttgtggtggatgtgtgccgctgctccacctactgctga

SEQ ID NO: 47076 - DNA, 356 bp, Gossypium hirsutum
  Clone ID: LIB3196-034-P1-M1-C7
ccacaacaaggaaatggtatttaaacatcttggaggctgacaaggtccaaccaccaaagaagacggaagagggaaagctatatactcctgctgcagttgatttattcaggatactcggggagcaagtacaaattgttagggataatagcactgatgccatgctttacaggattgctttggcaataattcaggtaatgattgattttcaagcagctgaaaagcagagacttgaagaacctgcttctgatattggtctggaacctctatgtgcaatgattaacaacaatttgcgctgctatgaccttgcactggagttaagtaacagcatcatagaggctcttccacaaaactatgct

SEQ ID NO: 47077 - DNA, 227 bp, Gossypium hirsutum
  Clone ID: LIB3196-034-P1-M1-C9
gaagatgtcagttgtggatgctgctccacagaggagcagcatggtaacacaaggaatgatcaaaaaccaatgctgtagattacggattaaatacattgtgtgaaaacaaacgcgaagtgaacacgtacattgtggaagggattcaaaccaataacaaggcaactacacatacatgtgtataacacaaaaaggctattagtagtcatacatgggcgaagatcttattg

SEQ ID NO: 47078 - DNA, 363 bp, Gossypium hirsutum
  Clone ID: LIB3196-034-P1-M1-D1
ggcccacatggcccttttcggcctatcgcggcccgaagtagccatcctacagctagagtagtgagaaatacacacctgataggagactagagttaatccacactccgagcactcttagccgatgcccaacccaaacgagcacgccatacagcgaaagggatcagccaagaaaggtacctctactctcctcatgttctctctatttaaagccagcttcgcatcccctcttatgttagcttcctgatgtgggatccctccatcatcagagtttaaattcaacaccaactcttgccgccccctgttagcaaaataaatgctccttgcttgccatgggattcgaacccatgcctcccctcagatgct

SEQ ID NO: 47079 - DNA, 354 bp, Gossypium hirsutum
  Clone ID: LIB3196-034-P1-M1-D10
cccacgcgtccgacaaaatcggagaccaaaagaccaggaaaatcccagaaaaaccaccatacgaattctccatctgccgccgtcaatggttcattacccacacccatcacacagacagtaaagtaatagagaagaaaacaaaacaaaacaaaacaaaaaaagggtgcatgcatttgcaaaccattgccatatttccttgttgcatggacaagtggacgatgaaaaatcaagtttggagaccctcagctgtgcccgcgttggtttctccgtcaaatggtagtgcttggaatcccaggtgccgaggccgagacaatatctctctttggttctatctcttaattactacagagaatt

SEQ ID NO: 47080 - DNA, 304 bp, Gossypium hirsutum
  unsure (1)..(304): unsure at all n locations; Clone ID: LIB3196-034-P1-M1-D11
cccacgcgtccgggttgacctgtcagatgcagcccagaaggaacgggtgaatcagatgattgaagactgcgagccatttgagggagagcctctcttggatgccaagtgctttaagtgatagaatatgttcttaattttacttttttatatttctggtacctttttgcatgtcaggttttatttatagatcgctgttttcagtttttgattaaggtaacattacaanttaagttttaatgtcttagatgttggaatttgaaaggctttatttatgttatattaaggagatataggttctattgtt

SEQ ID NO: 47081 - DNA, 353 bp, Gossypium hirsutum
  Clone ID: LIB3196-034-P1-M1-D12
gagggattcaagtgcaattatggaggattctgttgaatgtaagaaatgcacacattgtgatgatgatgttgtgaagttggattcaagtgacattaaggaaaaattgtcttcaaataagaggaagagggattcaagtgcaattatggaggattctgttgaatgtaagaaatgcacacatagtgatgatgatgttgtgaagttggattcaagtgacattaaggaaaaattgtcttcaaataagaggaagagggattcaagtgcaattatggaggattctgttgaatgtaagaaatacacacatagtgatgatgatgttgtgaagttggattcaagtgacattaaggaaaactttt

SEQ ID NO: 47082 - DNA, 362 bp, Gossypium hirsutum
  Clone ID: LIB3196-034-P1-M1-D2
gccatcccgaccatcattcccatggcccggggcgcttcctccacttcctaccacattgccaataggactaccccctctgccaagcattccctcagtctccacaatcccaactgcaattccccctattcctttctcttctccaccattgccatctttccctaatctcccaaatcctggggtgcttcctccacttcctaccacatttccaagaggactggcccctctgccaagcattcccttagtccccacaatcccaattgcagttccctctattcctttcttttctccaccaccttctccttctactcgttgaaataccccatttttttctatctgctgcatactggatctggtttaataag

SEQ ID NO: 47083 - DNA, 359 bp, Gossypium hirsutum
  Clone ID: LIB3196-034-P1-M1-D3
catgaaacaactgcatctaactggcgttttgaggctttagctaaagagattgaatgcttccgtgaactgttatcgttggtggactgtaaaattggaaagcttacacttgctagattactgaaggcttatgatgcaatgtcatatccgttcgctaacaaactggtgcattcagaagaagttcttgagctgtatagtgatttgatgaaattggatccaacacattaccagttctacaaggatgaacatagcattgtcttgctacagaaggtgacatctagtaaagagtctttacttcaacattgctttcagtataaggactcggcttcatcagctatatgtgaccctatctgtctccggct

SEQ ID NO: 47084 - DNA, 357 bp, Gossypium hirsutum
  unsure (1)..(357): unsure at all n locations; Clone ID: LIB3196-034-P1-M1-D4
accacgcgtccgggagggcactgtcctattgccccatcaaccgataccggcatttgtgttcaagcccctgcagagaaaggattgaccagctttgccattgatttccataagtgtggagtgagcgcatctgtgccaaaaacagctgatggtcctaaagagcgtgttaagctgttgatacagaaccgagatgaaatgatcataactgggaggctatcagagccctacaagggtatacagggataggctcacgcgaccaatgaatagatgaaggagtggaccctttgtggaggcgtaacacaagataatgntatacgctatcaccccactcatactttgaacatggatttcaaggactac

SEQ ID NO: 47085 - DNA, 341 bp, Gossypium hirsutum
  Clone ID: LIB3196-034-P1-M1-D7
cccacgcgtccggccatgcgttctaaccaagccaaatcaaaagcttcctttatttgtgtttgagactccgcacatatatgaaacacccacattttcctacaaatattacattgctgtgactgtgaaacttacattaatatcagaaaaacttcctaaaacaccatgctttctttaataaacctatccacattttatttaactaacacaggatgcttactcagtcctacttggatctcaacaccagaattatgtgcattgtgcattatgaagagcctgcacagtggcttacgcagccaacctttatcttctaaaaaaccgctacatgttgactccattgacaa

SEQ ID NO: 47086 - DNA, 347 bp, Gossypium hirsutum
  Clone ID: LIB3196-034-P1-M1-D8
cggacgcgtgggttttcgtgcaaaatgtattgagtggagagaaatgggaggagataaaggaacagtgtgtgtgactggaggtactgggttcataggttcatggctcatcaagaggcttcttcaggagggttattctgtccgtaccactgtcagtgctgatccagaaaacaaaaaagaccttagtttcctcactagtctaccaggagcagccgaaatgctgaaaatcttgagtgcagatcttaatgaccccaacagtttcgatgcagccattgaaagaagcaaggcagtgctccatgttgccactcccatgagtttcgatggtaaagaatctctggaagcggtaacag

SEQ ID NO: 47087 - DNA, 356 bp, Gossypium hirsutum
  Clone ID: LIB3196-034-P1-M1-D9
ggcagaggcgacaaggacgtgaagaggagggagaagaagaaagagaaccgaaatggcagaggcgacaagaaagtcaagaagagggatctgaggaagaagaaagagaagaacgaggaagaggaaggagaaggtcaggaaacggcttagaagaaacattctgctcaatgagactgaaacacaggacccctgcttcctctgctgatgttttcaacccacgaggtggtcgcatcaccacagttaacagtttcaatcttcccattctccaatacctccaactcagcgccgagaggggagtcctttacaataatgctatctacgctcctcactggaacatgaatgcccacagcattgtttac

SEQ ID NO: 47088 - DNA, 96 bp, Gossypium hirsutum
  Clone ID: LIB3196-034-P1-M1-E1
aatggtatcaaagtcaaggttcaaaactttgggctaaatttttaatcctttcaaaatgagtttgcatgcatgcatacatgaaaagggatttttggg

SEQ ID NO: 47089 - DNA, 372 bp, Gossypium hirsutum
  Clone ID: LIB3196-034-P1-M1-E10
atgcggcggcggcggcggtggtatcggcggcggctgtgagggggttccgggaagatggtgctgatcaaggaattccgtgtggttttgccatgttctgttcaggagtatcaggttgggcagctttactctgttgcagaagctattaagaatgatactggcggtggagaaggaattgaagtcttaaagaatgaaccttatgagaaggatggagaaaagggacaatatacacacaaaatttatcacctaaagagcaaagttcctgcattcgtgaggatgattgctcccaaaggctccttggtgtttcacgagaaagcctgaaatgcgtacccctactgtagaacaattgttacgaatgaatatatgtaagatgat

SEQ ID NO: 47090 - DNA, 369 bp, Gossypium hirsutum
  Clone ID: LIB3196-034-P1-M1-E11
atctttccaacgccatggccagggcgctgcaccggcacattatgatggagcgggagcgcaagcggcaggaggaagaagaggtggataagatgatggaacagaagatgaaggaagaacaggagagaaggaagaaaaaggagatggaagagagaatgtcactagaggagaccaaggaacaaattctgaagttggaggagaagcttttggccctacaggaagagaagcatcagcttttcctgcagctcaagaaagttttacatgaggaagaaaaacggaggcgaaaggaacagagtgacctgaccaccctgacatcagctgcataccagcagagcctgactgtccacacaggaactcatctcctcagcatgc

SEQ ID NO: 47091 - DNA, 431 bp, Gossypium hirsutum
  Clone ID: LIB3196-034-P1-M1-E2
cactatctaacaagttggaacgaagaagcacgctggtgccccgccgcaatttccgggatgcggccgacgcggccgtgggatctgcggtggctgtaaaggggttacaggaagatggcgctgatcaaggaatttcgtgtggttttgccatgtgctgtacaggagtatcaggttgggcagatttactctggtgcagaagctattaagaatgaaactgggggtggagaaggaaatgaaggcttaaagaatgaaccttatgagaaggatggagaaacgggacaatatacacacaaaacctatcacctatagagcaaaggtcctgcattcgtgaggatgatagctcccgaaggctgcttggtgtttcacgagaaagcctgcaatgcgtacccctactgttgaacaattgtaacgaatgaatatatgaaagatgagtt

SEQ ID NO: 47092 - DNA, 359 bp, Gossypium hirsutum
  Clone ID: LIB3196-034-P1-M1-E3
cccacgcgtccgcaaaactgttagacagcagaataggggaaggaaaaagataccaaatttccaatttggaaacaagataatagagatctaacatttcattacatataaaccaaacatttctttcaagaacttccaaatcaataggttaaagatttgagtttgttttaagataagaaacttacacataccaaaggaaaaggggtcaactttgctctgcagaaaatacccagaacaagaactaaacaagatctttcttttcgtgagatcaatgaaacatgaagaaaggagatttgggcttggtttttgaagtcaggtaacggctggcaggctgtgcaaatgttaccatccttctatactta

SEQ ID NO: 47093 - DNA, 356 bp, Gossypium hirsutum
  Clone ID: LIB3196-034-P1-M1-E4
tctaatggcttacacttctttgctttcttttagcgtttgcttgcttgttctcttccatggctgctgtgctcagatagatctcgtcactaaccatcaccaggatccaccttgggggcagcctcagcaacctcagccacgtcaccaatcccaatgccaactccagaacttgaatgctcttcagcctaagcaccggtttaggtcagaggctggtgaaactgagttctgggaccaaaatgaggatcaattccagtgtgctggtgttgctttcctacgtcataagatccagcgcaaaggacttttattgccttcatttaccagtgctcctatgcttttctatgttgaacaaggggagggta

SEQ ID NO: 47094 - DNA, 255 bp, Gossypium hirsutum
  Clone ID: LIB3196-034-P1-M1-E5
ctatttacgtgacactatagaacaagcttgtacacaaaagcagtccggtaccggaactgaattctcgggatcattgcaacgccatgtgcatggcacttctttgctttcttttagcggttgcttagttgatctcttccatgaatgatgtgctcatatagatctcgacataaccataagcagaacccgccttgagggcgaaactgagcaacctcagccacgtgaccaatcccgatgccaactgcagaacttgaatgc

SEQ ID NO: 47095 - DNA, 373 bp, Gossypium hirsutum
  Clone ID: LIB3196-034-P1-M1-E6
atacagccctccccactaaatgaacactgttaacagctctgtttatgctcttcttggttttctttctgcctcttaagtgtatattatctgcataaggtacagaacaaaaatgccactctttggctgagtgcggtagcttatgcctataattgcagcactttgggaggtcaaggtaggaggattgcttgggcccaggagatcaaggctgcagtgagccatgatcatgccactacactccagtctgggtgacagagtaagactgtctcaaaaaaaaaaaaaaagctacttttaaaattgccagtgttaattagataatcagtacatgttcagacctttgaagtatacagaccacatgcagtttctcctggctaga

SEQ ID NO: 47096 - DNA, 352 bp, Gossypium hirsutum
  Clone ID: LIB3196-034-P1-M1-E7
ggagatttcagttggggatgctgtcccagtgtggtacaacatggtcgaacaaggtcttatcaaagaccaggtattttcattttggcttaatcgcaatgtaggagaagaaatgggtggtgaaattgtgtttggtgggattgatccaaaccactacaagggcaagcacacatacgttcctataacacaaaaaggctattggcagtttgacatgggtgatgttcttattggtgacaaaccaactggatattgtgctggtggttgtgcagcaattgcagattctggaacttccctgctggcaggtcctacgactgtgattaccatgataaaccaagcaattggagcctctggagtg

SEQ ID NO: 47097 - DNA, 373 bp, Gossypium hirsutum
  Clone ID: LIB3196-034-P1-M1-E8
atgggcaagagggcagggacggagcgcagggtggccagcgtagggtccagcacgtggggtggtaccccaggcccgggtcagacagggacaaggcaggggacacaaaacagaggggtccccagctgccacctcacccaccgcaattcatttagtagcaggcacaggggcagctctggcagggctttctcaggcctatgccggagcctcgagggctggagagcgggaagacaggcagtgctcggggagtagcagcaggacgtcaccaggagggcgaagcggccacgggaagggccccgggacattacgcagcaaggaggctgcaggggctcggcctgcgggcgccgttcccacgaggcactgcggcccagggtct

SEQ ID NO: 47098 - DNA, 352 bp, Gossypium hirsutum
  Clone ID: LIB3196-034-P1-M1-E9
cccacgcgtacggtgcctagcgctcatcaatgtgtttgacacccagtgccttataggtataactgaattataaatgtgcccagcacttatcgattcgtagtcgaagtaacttgtacatgatctatcctacggcatgccaactatatccgactctgcctaaaaagttaatagggtaaccttttattcaatcatcatattgttcaatatgcatttaaacaattcaattcatcattttatcacatagcatatcctatttcaaaccattttaaaatcaattccaatcaaattacactattttcagttatattcaatttaatcctttatcttaataatcagtcaaattcataacatt

SEQ ID NO: 47099 - DNA, 373 bp, Gossypium hirsutum
  Clone ID: LIB3196-034-P1-M1-F1
atggtttgtgctccccccactgcctatatcgacttcgcccggcagaagctagatcccaagattgctgtggctgcacagaactgctacaaagtgactaatggggcctttactggggagatcagccctggcatgatcaaagactgcggagccacgtgggtggtcctggggcactcagagagaagacatgtctttggggagtcagatgagctgattgggcagaaagtggcccatgctctggctgagggactcggagtaatcgcctgtattggggagaagctagatgaaagggaagctggcatcactgaaaaagttgtttcgagcagacaaaggtcatcgcagataatgtgaaagactggagcaaggttgtcctggc

SEQ ID NO: 47100 - DNA, 336 bp, Gossypium hirsutum
  Clone ID: LIB3196-034-P1-M1-F10
attttcacccgggcgcacagtccgctcagccagcccagtccgtccagtccttaccgcctgtcggcctgtccaccccccaccgcagtcatggacgcccttataagaagatcagatttttactttcaagggggaaagcctttttcgcgccgagcaggccgaagccgacaagaaacaagctgaggaccgctgcaagcagctggaggaggagcagcaggccctccagaagaagctgaaggggacagaggatgaggtggaaaagtattctgaatccgtgaaggaggcccaggagaaactggagcaggccgagaagaaggccactgatgctgaggcagatgt

SEQ ID NO: 47101 - DNA, 316 bp, Gossypium hirsutum
  Clone ID: LIB3196-034-P1-M1-F11
atggcgaccaatttgatccgtggagcgatgaacatgacgtcacgtttgcggtcatcgacagtggctccagcgtcgcggctggtgttggaccgtccttacgccaccgaaacggaagctcaaaaggtggaaccgaaagcctcctccggcagcggcggcaccagcatgaaaaccttccaaatctatcgatggaacccagataatcctacgaaaccccaacttcaagacttcaaaatcgacttaaaagaatgcggacccatggtgcttgatgccttgatcaagatcaagaacgagatggatccatcgctcaccttccgtc

SEQ ID NO: 47102 - DNA, 372 bp, Gossypium hirsutum
  Clone ID: LIB3196-034-P1-M1-F12
ataaggacattactaatgacattttgcaaagtaaaaacattcatttgaacatagtcccctagaaaaacaactctacaaaaattttgcagccttattcattataattttaataaaattaacacaaaatcagtcaagaagaaggaaacatgtatattagcgaagtgtttttggagactatttgaatgtgaccaaatgtggttctggttgacttcttttcactttggcttatatcagctcttgagagttaagtctgatcatgatattgcaaacaactgtaaatggtctctaggccttactttgtgattatacgttatctcctgctagaaaaagaataatgtagtaaagaactgacaaactgaaaaaaagaaacaa

SEQ ID NO: 47103 - DNA, 377 bp, Gossypium hirsutum
  Clone ID: LIB3196-034-P1-M1-F2
atgaccaaataaggtttttgatctttgcgtagtgtgtggagacaaagcatcaggacgtcattatggagcagtaacttgtgaaggctgcaaaggattttttaaaagaagcatccgaaaaaatttagtatattcatgtcgaggatcaaaggattgtattattaataagcaccaccgaaaccgctgtcaatactgcaggttacagagatgtattgcgtttggaatgaagcaagactgtatgtattagcttttaaggagaaaatactttttaaagattccagcaaactagaagagtattgaaattaacaaattaaaataggtcaaatatgtatactttttagtttacagttttccaactaaaaatataagaatacagacat

SEQ ID NO: 47104 - DNA, 377 bp, Gossypium hirsutum
  Clone ID: LIB3196-034-P1-M1-F4
attgccacccgtgcacccagtccgctcagccagcccagtccgtccagtcctcaccgcctgccggcctgcccaccccccaccgcagccatggacgccatcaagaagaagatgcagatgctgaagctggacaaggagaacgccatcgaccgcgccgagcaggccgaagccgacaagaaacaagctgaggaccgctgcaagcagctggaggaggagcagcaggccctccagaagaagctgaaggggacagaggatgaggtggaaaagtattctgaatccgtgaaggaggcccaggagaaactggagcaggccgagaagaaggccactgatgctgaggcagatgtggcctctctgaaccgccgcattcagctggttgagga

SEQ ID NO: 47105 - DNA, 357 bp, Gossypium hirsutum
  Clone ID: LIB3196-034-P1-M1-F6
cccacgcgtccgggaaaaaggaagaaaaaaaaaggctaaaaaaatgtttttgcgaatgatatcgcggccgttgttggctaaggtgaaggagacaacggggatcgtcggattagacgttgtccctaacgcaagggaagtccttatcggtctctacaacaagactctgaaggagatccaggccgtacctgaagacgagggttaccgtaaggccgttgaaagcttcacgcgccaccgtctgaaggtttgccaagaggaagaagattgggaaatgattgagaagcgccttggatgtggccaggtcgaggagctcatcgaggaagcgcgtgacgagctcactcttatcggaaaaatgatcga

SEQ ID NO: 47106 - DNA, 349 bp, Gossypium hirsutum
  Clone ID: LIB3196-034-P1-M1-F7
gattataagaggcttaggtccttggggtccagatcttgtacgaaagtatacagctgctaggtttaccaacagatattcacctgagggtgtatttacagaggaggagtctagacttctatctggtattattatgtgtaccatacctcagctgccaaagcaagtggagagctctgcttaaaatatatatttgcatttggagcatttaatcgggcacttttaaacagtgcatctgagtggaaagtgccaaccacttttatatatggggctgaagattggatgaactaccaaggagcccaagaagctcgcgagcaaatgaaggtcccatgtgaaattatcaaggttccagatc

SEQ ID NO: 47107 - DNA, 366 bp, Gossypium hirsutum
  Clone ID: LIB3196-034-P1-M1-F8
ataaaaaatgtttatttaaaacaatttttaaaattataaatgtatttttatagccatatgtagggtataaagattaatatgatgttctcaagctacttaatactttgattcgtgaaatggtaagtaaacagttttactgaaataaactctacagatagatgcaacatgaggagttattgaagcagaaaatgtgttttgctttgtacactgtgtgtgtgttagcagacagcctcaagtaggtttccataacagccactgcctttgaatctaccttctgtagcttaatatgtataggaaaatatatcctgattctgtagcaagtagattgtttgctctttgtcttttaagaaatactaagggagggct

SEQ ID NO: 47108 - DNA, 346 bp, Gossypium hirsutum
  Clone ID: LIB3196-034-P1-M1-F9
gctttcggtcctttacctttacctttacattgtgcccaactccatctctctctttaccaccccgctctgttaatatccaaaaaccaaaacaatcccaaattcaaaaaaataaaaaataaaaaatctagggttttcttctaaaaggcttctttgttttgttgatcaagatattggttgataattagcaggacatggaagataccaagtctgaggcgcatataacctctgctgcagcttttgtggaagggggaattcaagatgcttgtgatgatgcctgcagtatatgccttgaagcattctgtgaaagtgatccatccacggtgacctgctgcaagcacgagtttca

SEQ ID NO: 47109 - DNA, 353 bp, Gossypium hirsutum
  Clone ID: LIB3196-034-P1-M1-G1
gtccaaggaagaggtattcaaggtattgtgatgcctggatgtgccgaaacattccaggattcacagcaatggcagcatcaaagccgtggcaggttccaggaccagcaccagaaagtccgacggttccgccagggtgacatcattgctttgccgcagggtgtggttcactggagctacaatgatggcaatgagcgtgttgttactatcaatctacttgacactggcaacagtgctaatcagctcgacaacatccctagaagattccatcttgctggtaacccagaagaggaacagaggcaactgaggaggctagcacagcagatgcaaggaagaagtgagaggggggaggagtc

SEQ ID NO: 47110 - DNA, 372 bp, Gossypium hirsutum
  Clone ID: LIB3196-034-P1-M1-G10
atggtgcctctggtcccaggtcgggagctctgggccaggggatccaggggccttggggtggggaaggctggccaggagcagcaatgtctgtgcaggtggtggctcccggaagtgcggggctgggcccagagcgcctgagccctgaggagctggtacggcagacgcggcaagtggtccaggggctggaggcgctgcgggcagagcaccgtggcctggctgggcacctggcagaggccctggcgggacagggcccagcgactggcttggagatgctggaggaaaagcagcaggtggtgagccactcgctggaggccatcgagctggggctgggcgaggcccaagtgctgctggccttgtcggcacacgtgggtg

SEQ ID NO: 47111 - DNA, 353 bp, Gossypium hirsutum
  Clone ID: LIB3196-034-P1-M1-G11
caagctcttcttcaacagcagtctctctatcatcccggcatattagctcctcctcagatagagccaattcccagtggaaatctgcctgctggttttgatccaagcacttgccgcagtgtgtatgtgggaaatatccatacacaagtgactgaaccactacttcaagaggtttttgcaagtactggccctgttgaaggttgcaagcttgtcagaaaggaaaagtcatcgtatggattcgtccactacttcgatcgcagatcagctgctcttgctatattgtctctaaatggaaggcatttgtttggacagcctatcaaggtcaattgggcatatgctagtggtcagagagagga

SEQ ID NO: 47112 - DNA, 358 bp, Gossypium hirsutum
  Clone ID: LIB3196-034-P1-M1-G12
cggacgcgtggggaaatacacaagaaaaaaaaaaaaaaacagcgtgagcagataaattgaagacttttatttctgttaacatccattatgagtactgatggtcaagtcatccgttgcaaagctgcggttgcatgggagtcggggaagccactgtcaatagaggaagtggaagtggcaccaccgcagaaggatgaagtccgtattaagatactcttcacttgtttatgtcacaccgatgtctacttgtgggatgctaagggacaaaaccctctgtttactcgcatactaagtcatgaagctggagggattgtggagagtgtaggtgagggggtgactgatctaaagccaggtgatcatg

SEQ ID NO: 47113 - DNA, 76 bp, Gossypium hirsutum
  Clone ID: LIB3196-034-P1-M1-G2
aaacatacaataatgatggaaaccggttggacaatagataataatagagcatttgtttggggcgtttgattttttt

SEQ ID NO: 47114 - DNA, 363 bp, Gossypium hirsutum
  Clone ID: LIB3196-034-P1-M1-G3
atcagagcttgctgacccccctgcacgtggagattgaccctgagatccagaaagtccggacagaggagcgagaacagaaaaagataacacggatcgaattagtctactttgtcttcgaggagcggctcttacagtatcagagtacggttctggtgaccaaatggaagctggtccatgagcaaacaaacaggacgttctgcaaagaccttgagcgcatctttgagacctacctgagtgtcctgaggaagcaactagataccttggtcaatgacaaaaggcgcctgcagtctgagctgaagaccatgcacgacagcgtggaggacttcaagaccaaatatgaagaggagatcaacaaacgcacag

SEQ ID NO: 47115 - DNA, 362 bp, Gossypium hirsutum
  Clone ID: LIB3196-034-P1-M1-G4
atccgatttctgcccgaatagccaagaaacccaagctggaggagtaatgtttgagatccaacctggcggccacagacgtgaccttcctcctgtgctgcgtccccttcacggcgctgctgtacccgctgcctgcctgggtgctcggcgatttcatgtgcaagttcgtcaactacatccagcaggtctcggtgcaggccacgtgcgccactctgaccgccatgagcgtggaccgctggtacgtgacggtgttcccgttgcgcgccttgcaccgccgcacgccccggctggcgctggctgtcagcctcagcatctgggtaggctctgcggcggtgtctgcgccggtgctcgccctgcaccgcctg

SEQ ID NO: 47116 - DNA, 283 bp, Gossypium hirsutum
  Clone ID: LIB3196-034-P1-M1-G5
ctctaatacgacttactataaagaaagctggtacccctgccggtacccccccggtactttttgtgtgcccctcgccaacaaaaccaagcttgtggagtaatgttttagattccacctggcgggcacagacgtgacccttctcctgtgcttcgtcccctttacggcgctgctgtacccgctgcctgccttggtgctctgggactttatgtgccagttcgtcaactacattcaacaggtctcggtgcagggcacgtgcgccactctgaccgccattagcgtggac

SEQ ID NO: 47117 - DNA, 380 bp, Gossypium hirsutum
  Clone ID: LIB3196-034-P1-M1-G6
atggcgggcgcaggcccctgcggcggcggcggcgggatgtttgtgcaggaggagaagatcttcgcgggcaaggtgctgcggctgcacatctgcgcgtccgacggcgccgagtggctggaggaggccaccgaggacacctcggtggagaagctcaaggagcgctgcctcaagcactgtgctcatgggagcttagaagatcccaaaagtataacccatcataaattaatccacgctgcctcagagagggtgctgagtgatgccaggaccatcctggaagagaacatccaggaccaagacgtcctattattgataaaaaagcgtgctccatcaccacttcccaagatggctgaggtctcagcagaagaaaagaaaaaacaaga

SEQ ID NO: 47118 - DNA, 295 bp, Gossypium hirsutum
  unsure (1)..(295): unsure at all n locations; Clone ID: LIB3196-034-P1-M1-G7
ctctgctggaaccgcttggacaattgttcatctcgcgcatttctttgtcacatatcacttctttcactggaagaagggaacaccgtttgctgatgaccaaggtatctacaacggtttgacttggtgggagcaaatagacaatggcaagcaactgacacggaacangaagtttttgactgttgtacctgttgtgctgtcccttatcngctcacatacaacagattatcaaaacccaatgctcttcttcaatacgttggccgtatttgtgctggtggttgcaaagttccccaacatg

SEQ ID NO: 47119 - DNA, 365 bp, Gossypium hirsutum
  Clone ID: LIB3196-034-P1-M1-G8
atcacaccccatgtggcctcagggacttcactctaggttcatcctgtttttcgagttgcctggctgatgtgaaaaagaaaacacggtttgaatcagtagaaagtgtcttgtcagactgactcatgccatctgtggtccgttctgccttgtcctgatgagtcattgccctgtccccaaaacatctggagctttgagagggccgggtggaaaccgcagtggcagtagggggttctgccgagggtgtggtctctttgcaattttgcagagaagctgaacaccgtgaacattcaacatgggcacctgagttctccaccaggctccttctctaagggcatggttgcagctcctgctgggtgggttttgat

SEQ ID NO: 47120 - DNA, 339 bp, Gossypium hirsutum
  Clone ID: LIB3196-034-P1-M1-G9
ctcgacagaggcagcgtgcatctgaataaagagttaaaggcaataataatcacatagtctcgtgtttatggactaatgtgaaattttctagttttaagcaggcatgtaatgaaataaaaatggtgacctatgtaaagtaggtgaccgttatgctggcagactatgtgatgctggtgcttgtgatggtggcctcctcactggcaatgagaagatcaccatgcagaacctcaacgaccgcctggcttcctacctggagaaggtgcgcgccctggaggaggccaacgccgacctggaggtgaagattcgtgactggcacctgaagcagagcccatctagccc

SEQ ID NO: 47121 - DNA, 352 bp, Gossypium hirsutum
  Clone ID: LIB3196-034-P1-M1-H1
gagctaatggaaaaaagtgaaaagggtaatggtgttgctcctgctacaaggtctccaatggctttaatggggtcatctagaaatgaaaaccaagaagtgaataccagcatgagaactgccgagaccatgctgcggttggtgcctatggctttaggggttgctgcacttgttgtcatgctcaaaaactcacagtccaatgactttggctccgtttcatactcagatcttggtgctttcaggtacttggtgcatgctaatggtatttgtgcaggctattcccttctttcagctattatagcagctgtgcctagtccttctactatgcctagagcttggactttcttcctactcg

SEQ ID NO: 47122 - DNA, 365 bp, Gossypium hirsutum
  Clone ID: LIB3196-034-P1-M1-H10
ataaaacacttaaaatagttggtttaaaagaacttttatttctggaatgggatgatttggatgtgacctgataaataagagtttattattgtggtctcattaaattaatcagctttttcacattggggtaaagaaacagatgacgatactagggaatggaaacaaaattggaaacttgggttatctggggatttatattgtactctgcacagttgcccttttttttaggagtgttccctggaaaagagggatggatgaacctggaagtaagtaaaagacattctaggtgtgtagcatcaaggcagttaatatccaagcatcagctttctctttatacatctacactgcatggcctgcaccaaata

SEQ ID NO: 47123 - DNA, 352 bp, Gossypium hirsutum
  Clone ID: LIB3196-034-P1-M1-H11
ggataaccccccccccccaaaaacgattttactcgaaaattctaaagacgaggaaatgcagagggcgaatgaatcggcgtctgcgtctgcgtctgcgtctgcggataaatttgaagaagaagtagggagggtgatggagcaagccagggagttgcacgaatctggagcttcgcttttatggaagatttcaaacgaggagcagtctcttcgccaaaaagccatttctcttgaatcctctattcgccgtgtgcgttcttcgatcaactcgcttgtatctaaaaagcttttggatcctaagttcgcaagcaagctcgaagaggatttacagagagccagctccatcttaacagat

SEQ ID NO: 47124 - DNA, 356 bp, Gossypium hirsutum
  Clone ID: LIB3196-034-P1-M1-H12
ctcaagagaaaaacccagagccaaaaaaatggccaaattattgctgttcattgcactatttgtggttccatgtcttgttagtgctacacgcatggtgaagaacccgttggtggttcaaggtcaagtttactgtgaccattgccgtgctgggtttgaaacaccaaagactagaaacatggctggtgccaaggttaaggtggtatgttccaaccggaagaccggtgatgtcgtgtacgagaaggaaggacacacggattcaaccggacaatacaagatcgctgtctccgaggatcatttggatgagatctgcgacgctgttctcgttaagagctcgcagccggagtgcgctgaaatgt

SEQ ID NO: 47125 - DNA, 373 bp, Gossypium hirsutum
  Clone ID: LIB3196-034-P1-M1-H2
atcgccgagatgcggtcatggcgccccgaaccctgctcctggtgctctcaggggtcctggccctgaccaagacctgggcctgctcgcactccttgaggtatttccacacctccgtgtcccggcccggcctcggggagccccgcttcatctccgtgggctacgtggacgacacgcagttcgtgcggttcgacagcgacgccgagagtcagagaaaggagccgctggcgccgtggatggagcaggaggggccggagtattgggaagaggagacacggatcgccaagggccacgcacagactgaccgagggaacctgcagatcctgctccgctactacaaccagagcgaggccgggtctcacacccttcagtggat

SEQ ID NO: 47126 - DNA, 359 bp, Gossypium hirsutum
  Clone ID: LIB3196-034-P1-M1-H3
gctaggcaggcacttgtgcatgctagaaatgacatcaatgctgccacaaacattcttcttgaagcacagtcccactaattgaagcatagaattgctggcgaaaagtggatgccgggatgttatttcatcggtataaatgcataatcacacatatattggatggcaaccaatttgcttgcctccgggggttatgtggcattccaagatttcactatggagtagtattttcttccattttgctctcacatatttctgttagtagcagtaatcatacaccaatgcaactcaaaacttggggagttcttttttttttttgaaattgtttaccctcatgcaaatgcatgcgtcttaccaaaagg

SEQ ID NO: 47127 - DNA, 258 bp, Gossypium hirsutum
  Clone ID: LIB3196-034-P1-M1-H7
atcgtgaatgtataaaaccctagtttggctcccacggttattctcctcagataagtagtcccccagagtctcttccctcatctacccccaaatctcctcacattatgtctttggtggccaacgaagattttcagcacattttacgtgtgctgaacaccaacgttgatgggaagcagaagattatgtttgcattgacctccatcaagggtatcggaaggcgattcgctaacatcgtttgcaagaaggctgatgtcgaca

SEQ ID NO: 47128 - DNA, 368 bp, Gossypium hirsutum
  Clone ID: LIB3196-034-P1-M1-H8
atcggccgcgcagtaggacgcagccctatccgagactcgcgccgcgccgatctgatttgtgtccactgtcaccagtactgctcacttaggactttctggatccagacccagctgcagcgcacacgggactcctgaggaagaaggagactgtgattttggattccttggtggaggaaaatcaaacactctggtcttgcccccaacgatgcaagtgtgactgctggcgtcttcatgagctccagaggtcacagcacactaccaaggactctcatggcccctcggatgatttccgagggagacttaggaggcattgctcaaatcacctcctctctattcctgggcagaggcagtgtggcctccaatcggca

SEQ ID NO: 47129 - DNA, 344 bp, Gossypium hirsutum
  Clone ID: LIB3196-034-P1-M1-H9
atgtcatccactgaacaaggtggttgggctggtggcaggagctgggctcaccgggctctaagggccagcaaccccgtcggtcctttgttcagggacataaggaccccggataatgggataccgttactagctgggacaagcttaatgcatgacagtagctgccacaggaaagacgccttctaagaagctatgttccaactggcaactcttgccttggctggcgtgacctgtaacgtgttgcagggctgtaaaccaagtgtcgcatctgcgctctgacaaacacaccatgccagatgactaagaggctccgtttcgaaaggtccgacactttgcattatatgcct

SEQ ID NO: 47130 - DNA, 338 bp, Gossypium hirsutum
  unsure (1)..(338): unsure at all n locations; Clone ID: LIB3196-035-P1-M1-A1
atcccagatgtggacgcgaacctcggggnggggtgggtagttggtgttggacccaaggtggacactgatgtcccagaagtgaatatcgaaggtccagatgcaaaactgaagggccccacgttcaagatgcctgatagtaatatcaaagctcccaagatctccatacctggtgtcgacctagatttgaaaggacccaaagggaatggagagtatgatgtgtccatccctaatgaagaagggactttgaaaggcccacaactagaccttaaaggtccaaacctggatttccaaagccccaatgcaaaactcagtggcccatctttgaagatgccatcacc

SEQ ID NO: 47131 - DNA, 399 bp, Gossypium hirsutum
  unsure (1)..(399): unsure at all n locations; Clone ID: LIB3196-035-P1-M1-A10
agnnnnatcctggggtgaataataatcaagtcattcatcacaaagacaaatgacccgtgaccacgtttacaagtaagtaaatccataaacagatttaagatctaggtatgccacattatgaacgtcacaagtgaataaatacataaatagatttaggatctattcttcttgggtcctgtccgatgtactgtcagtttagtcagttacatctatgtctttattttctgggagtcattcattccgatgcccaaaacaaagcatcttcctaattggacttgataaatgacatattagtcattcaatcgattcgttcattttcnattagactgaagacatgtttaannntgtctacaagctgccttttcgtattacaattctatcacgtaatattgcttagta

SEQ ID NO: 47132 - DNA, 137 bp, Gossypium hirsutum
  unsure (1)..(137): unsure at all n locations; Clone ID: LIB3196-035-P1-M1-A11
atgcaagcttctgtgggggnnnatgggaagcctgctctcaccatgagcctccgcctgcagagctcctccgccagctatggacgtggatttgggggtggctcttgccagctgggaagatgccgaggcgtctctagctg

SEQ ID NO: 47133 - DNA, 323 bp, Gossypium hirsutum
  unsure (1)..(323): unsure at all n locations; Clone ID: LIB3196-035-P1-M1-A2
atagttgatgtcccgctgcggagaggggnncgcgagttcgccacnagctgctccgccaggcgctggccgaatgcctggggaccctcatcctcgtgatgtttggctgtggctccgtggcccaagttgtgctcagccggggcacccatggtggtttcctcaccatcaacctggcctttggctttgctgtcactctgggcatcctcattgctggccaggtctctggggcccacctgaaccctgccgtgacctttgccatgtgctttctggctcgtgagccctggatcaagctagccgtctataccctggcacagacgctgggagcc

SEQ ID NO: 47134 - DNA, 403 bp, Gossypium hirsutum
  unsure (1)..(403): unsure at all n locations; Clone ID: LIB3196-035-P1-M1-A3
cggacgccccncctgtctcgtggggtgtacttctaagtctcttgattttatcgattttagttttcattcagctgaaaagaaaatttgaaaaaaaaagattattattattttttattttttgcatctggattcttcaaaatcgaataacgagatactcagcacaatggctaaaagtagcttcaagatcgagcatgactttgagaaaaggcgcgctgaggctgcaagaattagggtaaaatacccagatagaattccagtgattgtggagaagacgaaaggaaacgacatccctaacattgacaagaagaaatacttagtaccagctgacttgacagtgggtcaatttgaaaaaaaaaaacgcaaaagaatcaaattgagtgctggaaaggctatcttcttattt

SEQ ID NO: 47135 - DNA, 423 bp, Gossypium hirsutum
  unsure (1)..(423): unsure at all n locations; Clone ID: LIB3196-035-P1-M1-A4
atccgccccgcgcctcgtcggccggnnnnaggcactcagcgtgcggccgagcagctgtgtatgctgagccgctgccgcagccgactgctccacgtcctgggccttagcttcctgctgcagacccgccggccgattctcttctgccctccccgtctcatgaagccgctggtagtgttcgtcctcggcggccccggcgccggcaaggggacccagtgcgcccgcatcgtcgagaaatatggctacacacacctttctgcaagagagctgcttcgtgatgaaaggaagaacccagattcacagtatggtgaacttattgaaaagtacattaaagaaggaaagatngtaccagttgagataaccatcagnnnattaaagagggaaatggatcagacaatggctgccaatgctcaagagaataaattc

SEQ ID NO: 47136 - DNA, 318 bp, Gossypium hirsutum
  unsure (1)..(318): unsure at all n locations; Clone ID: LIB3196-035-P1-M1-A5
acacccaagaacaagagggaacgcaaaagcacgctggtgccccgccccagtttcccggattcgacccacgcttccgccttcttnnnnaaagcgcaagaggttagtcccgtggatagaagcccccgtcaagactgctagcctttcccgttcactaagcagaggctacctccaatacacatccagacatgatctccttcaaccgaagctaagaaatctggacacttaaatctaccttgcaaataagaatactcccactcgacgagatcgtaccacggccacacatttaagccggggctcattatttctatccggtcctaa

SEQ ID NO: 47137 - DNA, 326 bp, Gossypium hirsutum
  unsure (1)..(326): unsure at all n locations; Clone ID: LIB3196-035-P1-M1-A6
atcccaaacagagtggaagatatggnnnnattttgagtgcactggtgcctttgggcgtgacttaaaaaaaaaaaattaaatactctctgggtgcggtgactcacacctagtttcccagcacttcaggaggctgaggtgggtggatcacgtagtcaagagatcagagaccatcctggcctacacgctgaaactatgcctctactaaaaatacataaattagctgggcatggtggtgtgtgcctgttattccaaatactctggaggctaaggcatgagaatcacttaaactctagcagtggaagttgctgtggacctgaattaaacca

SEQ ID NO: 47138 - DNA, 316 bp, Gossypium hirsutum
  unsure (1)..(316): unsure at all n locations; Clone ID: LIB3196-035-P1-M1-A7
tctgnnnnagcntgcgaggaaantcctcagtcatatttacgaatcttcagccgagaaattcttgaagctgtcttcaatacacgaagtgagcagctagacgagctgtttggtgggaggcaaagccatcgaaggcggtcaggacagggaatgttccgtaaagccagccaataacaaattaaggcattgagccaaaaagctacttcaccaaagggaaaaagtagcgagggattcgccttctacttattgagccaaacccctcgcttcttcaaccaaaacaggcgcttctattaagcttgcccttataattttcaacagc

SEQ ID NO: 47139 - DNA, 394 bp, Gossypium hirsutum
  unsure (1)..(394): unsure at all n locations; Clone ID: LIB3196-035-P1-M1-B11
nnnaatgtttacctcggancaagtctttattatattattagggacttaagaaaaagaatgaagtaatttcattagggtcttactttttaaagaagttaaactctcttttaatcaggtataatgataaacttcattgtttacctcttttgttacattgactctaattattactttttgatcattttaacttttaaccttaaatttttagttaatttacttttgttccggcaaaaaattaagtagtttggtaaaattttaatggtcatgacatgatcgcctattgaccattcgcgtgtacataaaaaatccaaacttaaaaaaaaattccatttgttttgnnaagattattcacttcaatagtaaaaatatatgtatattgttacgtgagctgtca

SEQ ID NO: 47140 - DNA, 362 bp, Gossypium hirsutum
  unsure (1)..(362): unsure at all n locations; Clone ID: LIB3196-035-P1-M1-B2
atgagagatagcaccggcctgaggtnnnnnaggagctgaactatactctcctttgaagactgccggacgacccccgcgggagccggggcccagaaacccgcccgggcagcagtaactggaacggagcccgcaggcctgggccggctgggctgcgcgagctggaagcggggtccccgggcccctttgtgtgaagggcgggggagggttgcgggcagccccgggctgcgggctactctgacgtccgcctcgccgcggggtcctctcgtcgcggacccccccttttgcttcccgggggcacgcgcgccaccctagccgggcttcctccagactttgactcctgcccacgcccgctgattgttttt

SEQ ID NO: 47141 - DNA, 349 bp, Gossypium hirsutum
  unsure (1)..(349): unsure at all n locations; Clone ID: LIB3196-035-P1-M1-B3
atgagatttgcctgatcctcttcaannnnntcgtgctgtgccggctccagccctgtaccgacatcccacttcccgctgttcccatctgtgttctgggtgggatcggtctggaagcggtcgacgacttcccaggcaggagctcggggcacatgccgagtccgcgggagaccacggcagccaggcgctggctggcaggggacaccgcggtgccagcctgaggctgggctgctccgcgaggatgcagcggcccctgccctgctctgccctgtcctgttctgccctgtgtcctgagagaacatgttaaccgtgcactttgacaagccgggaggaccggaaaacccctacgtga

SEQ ID NO: 47142 - DNA, 145 bp, Gossypium hirsutum
  unsure (1)..(145): unsure at all n locations; Clone ID: LIB3196-035-P1-M1-B4
aagagaccccnnattnttagatggatnccataatgatgacgctgtcgatagtgtctggagcattggtctgaggaaaaaaggcaaaccaaagaaatgggggaaaatgtcaatgaatgggaaaatcatgaatattttctgcatggag

SEQ ID NO: 47143 - DNA, 293 bp, Gossypium hirsutum
  unsure (1)..(293): unsure at all n locations; Clone ID: LIB3196-035-P1-M1-B5
attttatgnnnnatgaatgagattttttgntcaagcaaacaaaagagatcaaactttgtaaaacaacgatcatcccctcatttccttccccaatcatcttcaagtttttcattattcttatactctcacccaaacctcacaatctcaaataccatatcaaatcgatacccaactttactagacacaaactacatcaccacttcatcattgagcgctcaccgctaaacccacatcgaaagtttttttttttttacaaacatacccaaactttgttttgcatatttcttttcatg

SEQ ID NO: 47144 - DNA, 410 bp, Gossypium hirsutum
  unsure (1)..(410): unsure at all n locations; Clone ID: LIB3196-035-P1-M1-B6
attccggagctgcgggctcactggtnnnttgggcgtgggacggcgcggcgcggctcggtgcatttccaggggccgcgctccagtgcgccgtagagaaccctgaactcggagcgctgaaagtcccagcagggcaagggggcgcggcgtcctggtcctcgcgcttgggagacagatgcgcctgggcgtcggggcatgcggacctaagctcgggtgaagctctcgggaagggcatgacggctgcgacaagatgcgagcagaagagcccagcgtcccgggagcccagcgcgcgccgggccccgagctgcgcctgtccagccagctgctgcccgagctctgtaccttcgtggtgcgcgtacttttctacgnnaggcctgtctacctagctggctacctgggggttaacataacct

SEQ ID NO: 47145 - DNA, 300 bp, Gossypium hirsutum
  unsure (1)..(300): unsure at all n locations; Clone ID: LIB3196-035-P1-M1-B7
nnnncgttcgagtttggcgttattacagtgagctgtagcttacatagtctatagtgtgtagggatggttctgatgatctgaaactcttgcaccctattactgtaaggttgcatctagctgctgttgatcagttgatgtttctacaaaataatctgaggggctgcattgaagtgaaagctgcttatctttaccagtaacggacaaagtctaaactctcagaacctctttgtttctctaaagtagatcatttctgcttttagtccatattggagacgatggaggacatctttattgacaccc

SEQ ID NO: 47146 - DNA, 383 bp, Gossypium hirsutum
  unsure (1)..(383): unsure at all n locations; Clone ID: LIB3196-035-P1-M1-B9
attgcacgggagcttgcgnnnttgttttatcccagggtgtcctctgtcccttacccaaccccaactcctcttcctctgccaaaagctattcgaattcaaagactttaacctgggctggatctggtttggagacataaaggggacagctctgggtcaacatgaccttctttagagccaccaaagctaaaaataccttttgggaccaggctggcctagacccaaggatgagaatgcaccctaaaataaatatacgggaagcagcagagggcttccctgtctagtgtgtgatcctaactaaaggcagctctcttgaacagccttcccctggattaggtcacatacacccggtgggccaaaaaaaaactgggttccaaatacacacc

SEQ ID NO: 47147 - DNA, 405 bp, Gossypium hirsutum
  unsure (1)..(405): unsure at all n locations; Clone ID: LIB3196-035-P1-M1-C10
atggagcttatcacagattttnaaggagaggatactttntctcatcagcgtccctgtttattaaaaagtttgaagagagaaggtgctaacaaactcagatatcctcccaacagccagtcaaaggtggattggggaaaattttttctcttgagacggttcaacaaagaaaaactcggtctcctggtgctcactttcctgggcattgtagccgctgtgctggtcaaagctggatattactgaaaaatgatcccgttcaacctcctagtgcctctactgaattattcctcttttaaatggttaatgaaccaatactttttaaatcctaccaaaaatagttagaaaatatgcaaacacactgtnntcaaactcaaaagtcattgccattcatcattaataaaacttgcc

SEQ ID NO: 47148 - DNA, 382 bp, Gossypium hirsutum
  unsure (1)..(382): unsure at all n locations; Clone ID: LIB3196-035-P1-M1-C11
gcggggnaagtcattatggtttnccttcaaaacaccatcaaagtaaggattaacgccagaaagatttcaaaaaggttgagaaaacaaggggaagaaaggaagaggaggtgaccagagaatacaccatcaaccttcacaagagactccatggctgcacattcaagaagaaggctcccaaagctataaaggagatcaagaaatttgccgaaaaagccatggggacaaaggatgtacgagtcgacgtgaagctgaacaagcacatatggagccgagggatccgaagtgtcccaagaaggattaaggttcgtattgctcggaggagaaacgatgacgaaaatgcaaaggnnaaactctactctttggtaaccagtgctgaaatccc

SEQ ID NO: 47149 - DNA, 396 bp, Gossypium hirsutum
  unsure (1)..(396): unsure at all n locations; Clone ID: LIB3196-035-P1-M1-C12
gcgnnnnttgttgtcgagaattacccggattttatctcgtcggttcgggagttcgcggatgcggacccggcccatcggaagatcttcgtacacgggttgagttgggataccactgccgaaacccttaccgccgagttttcaaagtacggcgagatcgaagaatgcaaagcggttactgattgggtttccgggaaatcgaaagggtacgcttttattctatttaaacataggagtggggcgcggcgggctttgaaacagccacagaagaagatcggtattcgaaccacttcttgtcagctggcagcgcaaggaccggtttctgctccgcctcccaatggtacgnnagtttccgagtatacccagaggaagatttttgttagtaacgtatcgcctgaa

SEQ ID NO: 47150 - DNA, 401 bp, Gossypium hirsutum
  unsure (1)..(401): unsure at all n locations; Clone ID: LIB3196-035-P1-M1-C2
cattttnnnnnaaagagtttgggagtcctcgattatcgttactgagaggagatccaacgagagttctaactttatagcctgtaatcctgcataagcttttgctgcaaacggagatggaacgcttgagttcaaaacaatcttcgttgctaggagtgcccccatctggccccaaacaaccaagcccgatgccgatttgaaatttcttttgtcaaaagctgcgtcaatctgaatcatcgccctggtatttgcaccttgttggctgtggcttctgttcgtgtttaagatgaaccacaatctgcggcagaacattcggcactgtttaaaagtactcctcttaaaaatccaagnnattgtcgaaaaacatgagtgctatcttctttcccatttctgcagcgaggaca

SEQ ID NO: 47151 - DNA, 394 bp, Gossypium hirsutum
  unsure (1)..(394): unsure at all n locations; Clone ID: LIB3196-035-P1-M1-C3
ctttgtnnnnaagtaccgcgtcttcnaagttccctggttaagaaagcccggcgagatttgaagccgatgcccatctctctacagcctcttcctcaaattcacaaccagacaatttctccgccaaccaaagcaactcagccgccagcttctgcatcgaattccccgaacggctgacacccactctcccactccctaccccaaccgctcgttaaagccggttcaactgattacataccggtccaaacccagcaccattatgaccaacccttccttgccccaattcaagcattgcagcttcaaccaggccaagtgtcctcgataaagcccccgattaaatccgtccattcatnnnacgcaaagcttcaatatcttccttattggtctcttctataag

SEQ ID NO: 47152 - DNA, 400 bp, Gossypium hirsutum
  unsure (1)..(400): unsure at all n locations; Clone ID: LIB3196-035-P1-M1-C4
tctctgatnnnnntagatgtaatatttcttacccgagactgttgccagaatcgagcacgaggcattactaaacttaatctatcacttaaatagttttaaattgtttatttaagcttttcggaatgtgctgccactctgcgtcgtagtcgcctaaaaattcatatcttgagttccaaaactcaaaattaagatccgtaaatttttactgaaactagactcatatatctatctactaatttttttcatagattttttgacttggccaattagtacagtttattagttaaagtttcccttgtttcaaaactcgactgcactaacctcttcttgctacgaaccatgtttnnntctgtacaaaattcatatcactaagcccgttgtttctattaaaactagactc

SEQ ID NO: 47153 - DNA, 403 bp, Gossypium hirsutum
  unsure (1)..(403): unsure at all n locations; Clone ID: LIB3196-035-P1-M1-C5
ntgggaatnnnnatggtgtgacaaatggaactgataaagcagcacttgtagaagtgcaagtaattgaacctcctgaaagtgataaaagtaaaaaggaaacatatgtattcacatctaaagtcattcaagtagaagcagatatagtagtagagacatttcccttgcggcctgttgctaagccaactgatagcgtcaatggaatgtctagcgaagttgggaaattagatgaaaatttgtataaaacggaaaatgggaagctgaatgtgagtcaagaaaatggtagttttaagttggatggtatgaattcctctgaggtttctgtgttgacagatgatggtaaagaagtannnaacaatgtgggtttgttgttggaaaagaattccaatttaacagattagaaaat

SEQ ID NO: 47154 - DNA, 218 bp, Gossypium hirsutum
  unsure (1)..(218): unsure at all n locations; Clone ID: LIB3196-035-P1-M1-C6
ggttannattttatggacccgacactacaagggatgagcttcctaatatctgatgccatggctgaatcaagacataccaaagactggctgcacataacacaaatctgagagttgtagacctccaagagccgagtgactcaagaaactgctgaaaaaaactgaactgagagggagtgaaatgacaaagagagagagaagggggaggctaactgacattt

SEQ ID NO: 47155 - DNA, 267 bp, Gossypium hirsutum
  unsure (1)..(267): unsure at all n locations; Clone ID: LIB3196-035-P1-M1-C7
atctctcgggtcctagggggnccgttctcgtctaaacacgcttatcgcgcgtccgggccttccacctcgcggaaggggctccccaccacttggatttctgttgcaggttgagaacaaaaagatgcacctggactttccccggagccctctgcgtggttgagcttcgggggaatttcggggctcttggctgccagccgcgcttgcctggtagcaacaaaaaccaatcccgctcgcctccgtgccacaaaaaaaccacacccaagatca

SEQ ID NO: 47156 - DNA, 269 bp, Gossypium hirsutum
  unsure (1)..(269): unsure at all n locations; Clone ID: LIB3196-035-P1-M1-C8
atacaagctccagcagannnncctttgcacggcgacntgcctgagaggacccaccccccggtgtccggtggtcagtcgccccacgatggggactacagtcagagcagccttggtcttggcctatttggccattgcttctgctgcctctgaaggaggccttaaagctacagggcagaggcagctgaggccagagcactttcaagaaattggctacgcaactccccccttcccacccctattccgaagcctcctcatggatcaccctgaca

SEQ ID NO: 47157 - DNA, 296 bp, Gossypium hirsutum
  unsure (1)..(296): unsure at all n locations; Clone ID: LIB3196-035-P1-M1-C9
aaaanaagaaaactataattncgaacacgatggaatcctgtctgctatctcttattgcacctcggctttcactttcaccgaccctcaagaatcgccttcgcaacaagatctcaagcgccttaagcttatggatgttgtctctctgctcaaatcaccaaagaagccattgcacgaacagcttttttcacctctaatagtccatagagtctgtcaatctcttcaagccacttcctccaccttccaaaacttacatcgtctctgccttgcctgatgatgaagaactcttcactttcaca

SEQ ID NO: 47158 - DNA, 267 bp, Gossypium hirsutum
  unsure (1)..(267): unsure at all n locations; Clone ID: LIB3196-035-P1-M1-D1
cccacgnnnaatggactcaagggcnaataaaatagccattgttgtgaaaggtgaaggatactttgaaatggtatcacctcctgtttcccccaagtccaatcaggaggattcagcaggaaaaaagagtgggtctcgttatcaaaagataagctcacgtttgagatccgacacggtgttcgttgttccagcaaggcatcctttcgttacagttgcttcaagaaacaataatctaaagattctatgctttgaggtcaacataaaaaacaa

SEQ ID NO: 47159 - DNA, 397 bp, Gossypium hirsutum
  Clone ID: LIB3196-035-P1-M1-D10
tcggggaattttaaagtagtgagaagaatgcattcataagagtcgaacatgataaattcttcattattttatataatatatattatatctgagacattcaacatcaaatcaaatcaacacaagagtttatgttttatatatatttgaagcactttgggtgattagtaaaacccgagtggattgagttggaaacataagtaaaaagttaatgaagacatcaatcaaatcatggcattgctggtgttttttggtacacagattctgaggacaatttgacctatcaaatcatatctagaaaacctatattactttttttttcctaataatattaatgatttaagggtgttcttaaaaatataataagaatttttaaatctcattgtgaataaaaatgatc

SEQ ID NO: 47160 - DNA, 260 bp, Gossypium hirsutum
  unsure (1)..(260): unsure at all n locations; Clone ID: LIB3196-035-P1-M1-D12
tgnnnncatttgggagggcgganatgccaatggcgtctatcagagagaggtttcctgtattggttggttttataatcaccgccatcactatcattcaaagtttattcgctctaaggttctgaaatgagttttgaaaaattataggtgaatgtatagtagaggttcctatattaatagtttgattgcattttaccccatctatttaataaacgagtcatttaatcattgtatgtttgatcaaaattaaacaaacttttaaa

SEQ ID NO: 47161 - DNA, 339 bp, Gossypium hirsutum
  unsure (1)..(339): unsure at all n locations; Clone ID: LIB3196-035-P1-M1-D2
cccacgnnnaatggaccctcttttnatcaaagcaaaaacaaccagaattcaatggggaagaaagctgtgttgattggaatcaactatccacgcacaaaggctgaactgaaaagctgcataaacgatgtgaagagaatgtacaaatgccttatagaacgctatggattctctgaagaagacatcacggtattgatagacaccgattattcttatgatcagcccacagggaagaacatcagaaaggctttgaatgatcttgggagatcggctgagcctggggattttctgtttgggcacttcagtggccatgggactaggctttctgctggagactggggg

SEQ ID NO: 47162 - DNA, 404 bp, Gossypium hirsutum
  unsure (1)..(404): unsure at all n locations; Clone ID: LIB3196-035-P1-M1-D3
cccacgnnnttgggcgcaaattcgtgttcacagttgagttcgcagcgatgtcgaacgagttcgccgataagggggacaagattatctatgaaaccgaagccaaagggttcaacccgggattgattgtattgctggttattggtggactactgataacattccttgtggggaactacatactttactcgtacgcgcagaagactcttcctcctaggaaaaagaagcccgtatccaagaagaagatgaaacgagagaggctgaagcaaggagtctcaacaccaggggaataggaattcaaagtccgacttttctcttttttcgacattgttaaaaactggtttgttcannntttctgtccagtttcgagagtttaaaacttcaacatctgaattataagtgtaccc

SEQ ID NO: 47163 - DNA, 401 bp, Gossypium hirsutum
  unsure (1)..(401): unsure at all n locations; Clone ID: LIB3196-035-P1-M1-D4
cgcaactnnnnngtgtgcatctggagaaaagccggttcgcgagcttgttaaggatgatgcatggttgaatggagaattcataaccactgtccaacaacgtggtgctgcaatcatcaaagctaggaaactctcaagtgcactatctgctgctagtgctgcttgtgatcacattcgtgattgggtccttggaactcccgagggcacatgggtttccatgggggtttactctgatggttcatacaatgcaccagctggggtcatctattccttccctgtaacttgtaagaatggagaatggacaattgtccaagggctggcaattgatgaattctcgaggaagaagttnnacttgaccggagtggagctgaccgaagagaaagaattggcatactcgtgcctct

SEQ ID NO: 47164 - DNA, 402 bp, Gossypium hirsutum
  unsure (1)..(402): unsure at all n locations; Clone ID: LIB3196-035-P1-M1-D6
tacaaaannnnntgtntgaaggactcnaaggtgaaataaatgaaatgtatcgacttatatgggtactaggaagattcggcccttaaagagtgtgaccaaactttgtgtattttgtgttttgtggaataaagactaaattgtgaaagtgcgaaatattaggggtaaaaatgtaatttaccgatttatgcgttattagactaaattgaatgaaaatatgttaaaatgagatttatttgaatatgttaagatcaagaaaccaaggaattggatttagatcggggaaaatcgaaagtagttgagtagtcgatcatttagtcgacgacatccgaagaaagtttataagcannnagatattaaaatttcggaataaatgtttgttatatatgctgaaatggaaatatg

SEQ ID NO: 47165 - DNA, 186 bp, Gossypium hirsutum
  unsure (1)..(186): unsure at all n locations; Clone ID: LIB3196-035-P1-M1-D7
atggcaaagatctgtggnnnaaggagttttctgttttggagcgagaggactcctgcgcctccatgtacagccgctccatccagggtcaccacgtctgcctcctggtgaaaaagggggagaactctgtctcggtcgatgggaagtgcagtgactccacgctgctgagcaacttgttagaagagatga

SEQ ID NO: 47166 - DNA, 331 bp, Gossypium hirsutum
  unsure (1)..(331): unsure at all n locations; Clone ID: LIB3196-035-P1-M1-D8
ggnnnnacgnatgggatgacttaaggaacaaagtgaagttggaaggagagcagcgggatgatctcgtctctacttccagtcagaattctcatttggtttcgaaggctactcgcttatgggagtctatattatctcgtaaaagtcagcatgaagttcttgcttcaggacctatcgaagatttgatagctcatcgggagcataagtatcgcatatctgggtctgctttgctttcagctatggatcaaaggtcacaagttcctcctacagatgtcttatccgttcagtcgggtgatttaaatggccaagaacaaaatgaaggatttcacacaca

SEQ ID NO: 47167 - DNA, 346 bp, Gossypium hirsutum
  unsure (1)..(346): unsure at all n locations; Clone ID: LIB3196-035-P1-M1-E1
atcataactcttgttcatcttcatgnnnnatganagaaaagagtaggttataaataaaattttacggggacaaggccaggactggaattgcacagaggcaatgagaatgaatgattggaaccgaaatactcttaagatcctgatcactgagatagctcttcataccagtatggtcgataagaccattagtttattatattttctagtactaagtggccttcactgcctacttgtccagtctcttatgattcttcctcatatccaaatagatgacctttctgaacatcatcctgctccttgataactctagcactcattgattgctttcacccttaacccttttcct

SEQ ID NO: 47168 - DNA, 395 bp, Gossypium hirsutum
  unsure (1)..(395): unsure at all n locations; Clone ID: LIB3196-035-P1-M1-E10
gnnnntttntgtagcttgggtttacagtccgatcggcgaaaaccttaatcgtcttcaagtaccgttagattaaccagcaacgaaaagaaaatcaatggctgcgatcttcgctcgcaactctctcaccgctctcagagctcgacatctcgctttgtcagggcaagcgttgcagggttcatcacaacactatgggctgcgactcggtgcacactcctatggcaccatggaagatgatgaagaaagagagcagcttgcaaaggagatttcgaaagactggagttctgttttcgagcgtagcataaacacattgtttctaactgaaatggttagggggctcatggnnacactcaagtacttctttgaaagaaaagttactattaactatccttttgaga

SEQ ID NO: 47169 - DNA, 333 bp, Gossypium hirsutum
  unsure (1)..(333): unsure at all n locations; Clone ID: LIB3196-035-P1-M1-E11
gnnnnaatgagatgtttgattctatcagaacagcaactgaaatatgctcaagaaaaagtgaaggaagctggactccaggataacatcaaaatacttctctgtgactatcgccagttacctaaggaacaccaatttgacagaatcatatctgtagagatggtagaacatgttggtgaagaatatattgaggagttttacagatgctgtgaccaattactgaaagaagatgggctttttgttcttcagttcatatctatcccagaagagctttccaaaaaaatccagcaaacagcaggttttctaaaggaatatatattccctggaggaaccctg

SEQ ID NO: 47170 - DNA, 414 bp, Gossypium hirsutum
  unsure (1)..(414): unsure at all n locations; Clone ID: LIB3196-035-P1-M1-E12
atgccaaggtggacagtgtnnnnaatgagatcaacttcctgaaagtcctctatgatgcggagctgtcccagatgcagacccacgtcagcgacatgtccgtggtcctctccatggacaacaaccgcaacctggacctggagagcattattgctgaggtccgtgcccagtacgaggagattgcccagaggagcaaggctgaggccgaggccctgtaccagaccaaggtccagcagctccagatctcagttgaccaacatggtgacaacctgaagaacaccaagagtgaaatcgcagagctcaacaggatgatccagaggctgcgggcagagatcgagaacatcaagaagcagtgcctgactnnncaagcatccgtggctgatgcagagcagcgtggtgagaatgcccttaaagatg

SEQ ID NO: 47171 - DNA, 330 bp, Gossypium hirsutum
  unsure (1)..(330): unsure at all n locations; Clone ID: LIB3196-035-P1-M1-E2
cgacggnnnnttggagaccgccaanactattgcttcacctggtcgtggaatactggcaattgatgaatcgaatgcaacatgtgggaagagattatcttctattggcttagacaatactgaacccaaccgccaggcttacagacagcttctgctcacaactcctggcctcggagaatatatttccggtgccattcttttcgaggaaacactttaccagtcaactacagatgggaagaagtttgttgatgtcttgcacgaccagaaaatcgtacctggcatcaaagtagataaaggtttggttcctctacctggatcaaacaatgaatcttg

SEQ ID NO: 47172 - DNA, 404 bp, Gossypium hirsutum
  unsure (1)..(404): unsure at all n locations; Clone ID: LIB3196-035-P1-M1-E4
atttccggnnnccgctagatcctcttcatctgccgcatctcagtacctccgcagttcactgagaaatggatgaggaagttaaggctgtggttcctgagtcactcttgaagaaacagaagagggctgaagaatgggagcttgccaaaaagcaggagcttgaagttgcaaagaagaagaaagtcgagaaccgcaagctgatttacactagggctaagcagtatgcaaaggagtacgaggctcaagaaaaagagctgattcaattgaagcgggaggcaaagttgaaaggaggattctatgtagatccagaagctaaactcttgttcatcatccgaatccgtggtttcaatgcnnagcacccgagaacaagaaagatcttgcagctattgcgtttgagacagattttc

SEQ ID NO: 47173 - DNA, 321 bp, Gossypium hirsutum
  unsure (1)..(321): unsure at all n locations; Clone ID: LIB3196-035-P1-M1-E5
tttttaggnnnttggcggggggtttgtgtgtcggatctgagggccggcgccgttgactgtgaaatggatgaggaagtttacgctggggctcctggatctctttcggtggaacaggcgagggctgacgaatgggcgctcggccagaagcaggaccttgttgttggggagaagatgcatgtggtcgatccgcaagctgatttactgtacggcttggccgcttgcataggaccacgggggatcggagaaagagctgagtcctttgtttcgggaggccgaggggacaggaggcttctgttttgatccagaatctaaactcttgtt

SEQ ID NO: 47174 - DNA, 406 bp, Gossypium hirsutum
  unsure (1)..(406): unsure at all n locations; Clone ID: LIB3196-035-P1-M1-E6
tggacgcgnnnnattttggccagtctggtttctttttcaatttaaataagaaaagttcgaggacttttattgttcactggctgtagcctgtagcagacatacctctcgaggcatgagcgtcttgggaaaactctgcggtgaaagagagacagtaacatgacaaaaaagtcagttgtaatggaacccaaaactaagaacagttatgcaataaggaagacaaattatctgcaagaaaacaaagctacttcaatgaattttcttcttaaagcatgttggaatattgtcttagaaaatgggaaaaattggacattacccaatgacatggcgaccaccatcattatcagccttttttttttaacccatcaaaccaatgctacctcctccatagaccaaatcaatgttcctt

SEQ ID NO: 47175 - DNA, 333 bp, Gossypium hirsutum
  unsure (1)..(333): unsure at all n locations; Clone ID: LIB3196-035-P1-M1-E7
aggggaaggggttcaggcagancttcgtcaaaaccctaacggggaaaaccataacccttgaggtcgagtcttctgacaccatcgacaatgtcaaagccaagatccaagacaaggaaggcatccctcccgatcaacaacgccttatcttcgccgggaagcagcttgaagacggccgcaccttatccgactacaatatccagaaggaatccactcttcacctcgtcctccgcctccgaagtggtgcccagaagaggaagaagaagacctacaccaagcccaagaagatcaagcgcaagaagaagaaggtcaagctcgccgcggtccagttttaca

SEQ ID NO: 47176 - DNA, 309 bp, Gossypium hirsutum
  unsure (1)..(309): unsure at all n locations; Clone ID: LIB3196-035-P1-M1-E9
ataggcggcgcgcccgggnnnnaagagagagtagctcctactcgggccgccgcggccccgggcgtcgccatgaccagcgagctggacatcttcgtggggaacactacccttatcgacgaggacgtgtatcgcctctggctcgatggttactcggtgaccgacgcggtggccctgcgggtgcgctcgggaatcctggagcagacgggcgccacagcagcggtgctgcagagcgacaccatggaccattaccgcaccttccacatgctcgagcggctggtgcacgcaccacccaagcttctgcaccagctc

SEQ ID NO: 47177 - DNA, 395 bp, Gossypium hirsutum
  unsure (1)..(395): unsure at all n locations; Clone ID: LIB3196-035-P1-M1-F1
gtgcannnnnatgnttcaacagttcgggcaaaccatcatcgatctacttttagctgagacacaaccacagaaaatctgctcccaaattggattgtgcacttttgatggagctcatggcgttagcacgggcattgagagtgtggtggaagagggcaacggcaaatcatccggagttcaaggcaatgctatgtgccctgcttgtgagatggctgttgtttggatgcagaaccaattaaagcagaatcagactcaagacatcatattgaactacgtcaatcagctatgtgaccgtatgccgagtccgatgggagaatctgctgttgaatgtggaagtctatcgtccannncaactgtttccttcactattggtgacgaagttttcgacctttcccctg

SEQ ID NO: 47178 - DNA, 260 bp, Gossypium hirsutum
  unsure (1)..(260): unsure at all n locations; Clone ID: LIB3196-035-P1-M1-F10
atgctagccacgcctccgggggnaaggagttgtttggatgatccttacctattggcaaacggggcgcaaattatctggtaacttgataacgttccgttgccacatatttttttattaagaacacctctctaaatttgagtctactttaaaaacaaatactgcgacctcaattctagctgtggagctgctgcctaatcttgtaaagaagtcaccctccactaaaacgaagcctaatcgtgaaaatgcattatgtcttttaa

SEQ ID NO: 47179 - DNA, 334 bp, Gossypium hirsutum
  unsure (1)..(334): unsure at all n locations; Clone ID: LIB3196-035-P1-M1-F11
tttgnnnnatttattggggcggggataataatcagaaccatcaaactggtttctgtcttatgtccatgttggagttacaaaaacccattatcgatactccttgtcagcccgtcaagaaagcggcggcttccacaatcatcgctgtctttctcattaccgttctgatggtttccgttggttggcttgatatttgcttcttttcaggtgtttcttcatatcaaaacatagtcgtgggttccaaatcaacaacggcaagacacaagcccgagttcccactcgaatgttccactgaaaaccatacacaaacatgtcggaaggactatcctaccaccac

SEQ ID NO: 47180 - DNA, 198 bp, Gossypium hirsutum
  unsure (1)..(198): unsure at all n locations; Clone ID: LIB3196-035-P1-M1-F12
tcggnnnnnaatttctgaagcccggctaatcctccacaagtccctactatgtcacaagttaatccgaatcagttgaataagcctccagttgataaaattagaaaatatggggccaaagagttctgtgctaaaattggaacaatgggtacttatataccacttttagctaagaacacgcctatatactgttgataatgc

SEQ ID NO: 47181 - DNA, 396 bp, Gossypium hirsutum
  unsure (1)..(396): unsure at all n locations; Clone ID: LIB3196-035-P1-M1-F2
cttcannnnttggattttgcttttntaatcaatggctgaccactacctccaaaacactcaaccaatgactcaccaaatggtgaaagccgctactgccgcaacagccggtggttccctcctcattctctccggtttaatcctagctggcaccgttattgcgctcaccatagccactccactcttcgctattttcagtccagttcttatccctgctctcattgcaacaactctcctaacaacgggtttcgctgcctacagcggtttcagcgttgcagctgtcacggtcctgtcctggatttacaggtatgtgacggggaggcacccaccggctgcggatcagttgnnnagtgcagggacgaaattggctagcaaggcacgggagatgaaagatagggc

SEQ ID NO: 47182 - DNA, 402 bp, Gossypium hirsutum
  unsure (1)..(402): unsure at all n locations; Clone ID: LIB3196-035-P1-M1-F3
aaaaagnnnttggctggtgcccggaaatgtcggacgaggaacaccattttgaatccaaggccgacgccggtgccttcaaaacctacccactacaggccggaaccattcgtaagaatggttacatcgtcataaaaaaccgtccctgcaaggttgttgaagtttcgacctccaagactgggaagcatggtcatgctaagcgtcactttgttggaattgacatcttcaccgccaagaagctggaagatattgttccctcttcccacaactgtgatgttccacatgttaatcgtactgactaccacttgatcgacatttctgaggatggatttgagagttagctgaccggnnatggagacactaaagatgatctgaggctcccaactgatgagaacctgttgaaac

SEQ ID NO: 47183 - DNA, 274 bp, Gossypium hirsutum
  unsure (1)..(274): unsure at all n locations; Clone ID: LIB3196-035-P1-M1-F4
gagcgaggggnncggtgagcggggggatgaaggacgaggaacaccccttggaatccaaggccgacgccggagcctccgagacctacccgcatcgggccgtacccatgcgcgagaatgggtacgctcggccaaagaaccggccgtggaagggggctgcagcctcgacctccacgaccgaggcgctgggtcatgccatgcgtgtcttaggccggatggacatgctcaccgccaagtagctggaagatatagtgccctcttcccacatcagtgatgt

SEQ ID NO: 47184 - DNA, 407 bp, Gossypium hirsutum
  unsure (1)..(407): unsure at all n locations; Clone ID: LIB3196-035-P1-M1-F5
tccacttcgnnnnntggtcgcgtagaggtcagatctgtcgagctgtgaaacaggggatactttaatgaataaactgtactaatgtgctaagtcaaaaattctaaaaattttatggtaagtaggaatatgagtccagtttcacggaaaatttacggatttaaattttgagtttcgtaactcaagttataattaaattagtgacagttgcgcaagtggacagtgttgttatgaacagtgaatttaattttaaaagcaaatttttatgctccgaatcggtaagttaaattggatgacatctcgtactcgattccggagacagtctcgggtaaagggtgttactagaatcttctnnnagattgagccctaacgtattgggtttcaactctttcgttgaatctgaataatca

SEQ ID NO: 47185 - DNA, 353 bp, Gossypium hirsutum
  unsure (1)..(353): unsure at all n locations; Clone ID: LIB3196-035-P1-M1-F6
atcactcagccaactgctcgctcgctgnnnnatgcnccttggcaccntgaccacctgcagccgccagttcacctcctccagctccatgaagggctcctgcggcatcgggggcggcatcgggggcggctccagccgcatctcctccgtcttggccggagggtcctgccgcgcccccagcacctacggcgggggcctgtctgtctcctcctcccgcttctcctctgggggagcctatgggctggggggcggctatggcggtggcttcagcagcagcagcagctctggtagtggcttcgggggaggatatggcggtggcttgggtagtggcttgacaggcggcttttgtgggggct

SEQ ID NO: 47186 - DNA, 336 bp, Gossypium hirsutum
  unsure (1)..(336): unsure at all n locations; Clone ID: LIB3196-035-P1-M1-F7
ggnnnncatntcgagaggttcngggatttaagaaaaatggggatttgatgttgagaacttatgacaatctaagattggtttcccgtgatccagagagccatgaaatcgattattttggaattcaaggaagacgtacttatgtttgtaattatacagagagcctaatgttacttgatcgagtaattgatggtgctatgactgagaattgtgcaaactatgcggataaagcttatcgttgaatgagcggctttatggatttactgaacttgctgccaataatgaagcaatcgatgattctagttatgtaagaagaatggtctaaccatgaactctttt

SEQ ID NO: 47187 - DNA, 258 bp, Gossypium hirsutum
  unsure (1)..(258): unsure at all n locations; Clone ID: LIB3196-035-P1-M1-F8
atgccgaccccagagtgnnnntgtatggctggttgtgggagcggagcgggtcgggcggggccgggcggggcccaaccccgccgcgggccctgttggggccgcgcggcggcccggccggcggacagcgggatgggctgcacaatgagcgcccaggacaaagcggcggccgagcgctcttatatgatcgacaagaaacctcgggaggacggaaaaaaaacagcgccggaggtgaaattgctgctgttgggtgctggggag

SEQ ID NO: 47188 - DNA, 325 bp, Gossypium hirsutum
  unsure (1)..(325): unsure at all n locations; Clone ID: LIB3196-035-P1-M1-F9
annnnggtnctgcttgctgagnttattcatgaccgatgaggaatcgctgagggtgtcataactaccggtcatgccattactgcgacacataagaccgaatgtggaccataaatgcatgactggagaggaggatgagccccttacttcaacatcattgctagcagcaccggtcgctgccaaagctgctggaaaggttcttcactgccctcaatggcaaactgacatggaaagggaggcgagtatataccgtcaatgtatcacccgtgagatgcaccgccaagcttgagaaaggtgcgtaccatgatgagaacaaaaccgctctcaa

SEQ ID NO: 47189 - DNA, 265 bp, Gossypium hirsutum
  unsure (1)..(265): unsure at all n locations; Clone ID: LIB3196-035-P1-M1-G1
gacccacgcgtcccaagattctcttttcatatatctattccaatacgttaactannnnatattacttggaggggaaaacatatctctctttttcaccctttctaaacactctatcctctggatcttcaacacgtttatcaataaatatcaatcacttcttcccttattctttctaatacccttttccttaattttatttattcctatacatacaataaaattcttcataacataaccccaatttcccctttctcaattctttttt

SEQ ID NO: 47190 - DNA, 283 bp, Gossypium hirsutum
  unsure (1)..(283): unsure at all n locations; Clone ID: LIB3196-035-P1-M1-G10
gtctcnnnnttgtcattgatgctgtgctacggtttcttctcatgagttgaacagatggagatgatattatagagtacatagatcacaaatcacttgcgccttaagaatatcggttcaagttttcgagcccagtgactgatataataaaaagggccatgcgctctttaggattcaggctctcatacgcccacctgcctcacggtttgtcatctttatttattcgctgattattgtttactcgtcgtgggtgctcaacgattttgccatagaaaaccctggcgtt

SEQ ID NO: 47191 - DNA, 309 bp, Gossypium hirsutum
  unsure (1)..(309): unsure at all n locations; Clone ID: LIB3196-035-P1-M1-G11
atctccagcctctcacgctgnnnnnaagaagtctcatcttctggaaccatggccagcacatccaccaccatcaggagccacagcagcagccgcaggggcttcagtgccggctcagcccggctccctggggtcagccgctctggcttcagcagcgtctccgggtaccgctccataggcagtggtggcctgggtggcgcaagtggaggagctggctttggcagccgcagcctgtatggcctggggggctccaagaggatctccattggagggggcagctgcgccatccgcggcggatatggcagcagagcc

SEQ ID NO: 47192 - DNA, 418 bp, Gossypium hirsutum
  unsure (1)..(418): unsure at all n locations; Clone ID: LIB3196-035-P1-M1-G12
atgctggcgtaactggaattgnnnaagattcttttttcaacggtggtataggcagcagtggcctggttggcaccagcatgggtgctgggggtggggccctgagtggagctggcataagtggtggtggcattggcctgagcagcttgggagggacagccaccattggccacatgaggagttcctctgaccatcactttaaccaaaccattgggtccgcctcccctagcacagctcgaagtcgaatcacaaagtacagtaccgtgcaatatagcaagtagtcaggaccccagctcactttttcatagtcactgaggtttagatccaattcccaccactaaaaaactaacaatgtgaattataaannacaacttcatgctcaagtcatctaggagcaaagtgagaaaacacaatgagaaaa

SEQ ID NO: 47193 - DNA, 345 bp, Gossypium hirsutum
  unsure (1)..(345): unsure at all n locations; Clone ID: LIB3196-035-P1-M1-G2
caccgnnnnntgggtgaccctgganaattccagaaattcttccctgctggacaggaaaatcctcagtcatacttacgaatcttcagccgtgaaattcttgaagctgtcttcaatacacgaagtgagcagctagacgagctgtttggtgggaggcaaagccatcgaaggcagcagggacagggaatgttccgtaaagccagccaagaacaaataagggcattgagccaaggagctacttcaccaagggggaaaggtagcgagggatacgccttcaacttattgagccaaacccctcgctactccaaccaaaacggccgctttttcgaagcttgccctcgttatttc

SEQ ID NO: 47194 - DNA, 399 bp, Gossypium hirsutum
  unsure (1)..(399): unsure at all n locations; Clone ID: LIB3196-035-P1-M1-G3
tcgcggacgnnnntggcgaagccatttcttccctaccccgattccctttatttttctgcccaatttccccaaatcggcagccctctacatctcctcaaagggtacagattcttcttctcttatagttaaaaagctgtcattcttcaaccaaatccaaaccctaaattgcgtctctcccaatttcttcttcactttgaggttttcttgcaatagtttatagagaggtgagaccaagttattttgggttacaacagaggaaccaaagtaacgaaaaaggtggatatatatgggatattgggtaaccgagattcgaagctaggcaaatcaagcatacccaggaaacgaccnnaggttaaaagaagaaaaacatggttggctatacttggtgtcatcctcaat

SEQ ID NO: 47195 - DNA, 401 bp, Gossypium hirsutum
  unsure (1)..(401): unsure at all n locations; Clone ID: LIB3196-035-P1-M1-G4
cttcttcatnnnnactntgcgtctccactnaactcttgctaaacggtatcgttttagtcagtctttcatcaatggcgaaagaaccggttcgcgtcctcgttactggagctgcaggacaaatcgggtatgctcttgtacccatgattgctaggggagtcatgttgggtgctgaccagcccgtgatccttcacatgcttgatatcccacctgctgcggaggctttgaatggtgtcaaaatggagttggtggatgctgcttttcctcttctaaagggtgttgttgctacaactgatgttgttgaggcatgcactggagtcaatgttgctgtcatggttggtggtttcccaagnnnagaaggaatggagaggaaagatgttatgtcaaagaatgtgtctatttac

SEQ ID NO: 47196 - DNA, 365 bp, Gossypium hirsutum
  unsure (1)..(365): unsure at all n locations; Clone ID: LIB3196-035-P1-M1-G5
atgtcctgcgcggctgctctctggaggnnnnctggtgggtctccgnccgccttctctcccacataagtgcgtgccgccacctgatggaagattcgatggacatggacatgagccccctgaggccccagaactatcttttcggttgcgaactaaaggccgacaaagattatcactttaaggtggataatgatgaaaatgagcaccagttatctttaagaacggtcagtttaagggctggtgcaaaggatgaattgcacattgttgaagcagaggcaatgaattacgaaggcagtccaattaaaagaacactggcaactttgaaaatgtctgtacagccaacggtttcccttgggggctttgaaata

SEQ ID NO: 47197 - DNA, 411 bp, Gossypium hirsutum
  unsure (1)..(411): unsure at all n locations; Clone ID: LIB3196-035-P1-M1-G6
ctctattattttnnagggagtatatcgctttgatttcgcatccttgctgtgcactcgatggcaaatcgatggttgagagcctgaggtgtatccgctgtttgcggccgtaagtgttgctgtcggaatctgcgggtttcagttggtgcgcaatatctgcatcaaccctgaagtcagggtaaccaatgagaacagggctgctggggttttggacaactttgctgagggagaaaaatattctgagcatttcttgagaaaatatgtccgcaacaagacgccagaaatcatgcccagtatcaacagcttcttcactgacccaaagtgaggcttcactcttgctttatgcttattcttttaaataaaaaaaatagaagaacttagtcttattcaatcaataccaaattatgccctttc

SEQ ID NO: 47198 - DNA, 401 bp, Gossypium hirsutum
  unsure (1)..(401): unsure at all n locations; Clone ID: LIB3196-035-P1-M1-G7
atgtttgtctgcagtctnnnaagagnagcaaagctgtngatcactgttttttgaaattaagtgccaatcccatgccatgcagtattatgcccctcttctatctctgtattacacactcccctctcccctgtatcaaaaccatccacctgtgggttcttcttgacagttctagaacagccttgcaaattaatacaagccccaagcccaatgcctaatagaccagacatgggcaaagacaagtttggatggaaaggtgttatcattgaaccctggttcagctcctaaaattcttcaagccaatgacacttttttgctgctgatgacccatgcctcttatgaaaacacttgcttattttggnnacaaaaaaagagtaagctggatgttttcacaagctcacaaa

SEQ ID NO: 47199 - DNA, 354 bp, Gossypium hirsutum
  unsure (1)..(354): unsure at all n locations; Clone ID: LIB3196-035-P1-M1-G8
atccggatcgccttcggnnnnaaggagcgactcgcgttagctcccggcccgtcctcgcccccgccttcgccaccgcctcggcccgcagagctcgccctctccccacctgcagatatgtccgagtccaagagcggccctgagtatgcttcgtttttcgccgtcatgggcgcctcggccgccatggtcttcagcgccctgggcgctgcctatggcacagccaaaagcggcaccggcattgcggccatgtctgtcatgcggccagagctgatcatgaagtccatcatcccagtggtcatggctggcatcatcgccatctacagactggtggtggcagtcctcatcgccaacttcctg

SEQ ID NO: 47200 - DNA, 128 bp, Gossypium hirsutum
  unsure (1)..(128): unsure at all n locations; Clone ID: LIB3196-035-P1-M1-G9
gtnnnnaagagcgaatcaatttaagcatcaaaatattccaggagtgaacagcattagatgatttgagtgaaaaaagatcatggggaaatgtgtataaagactatggtatcaattattgtagcttagag

SEQ ID NO: 47201 - DNA, 424 bp, Gossypium hirsutum
  unsure (1)..(424): unsure at all n locations; Clone ID: LIB3196-035-P1-M1-H1
atgcaagaagagtgaatctccatcgnnnnataaatattaaaaagaaaaaaaaagtgaggcctggactaaggggaggtggagggcacaagaagggtggagaaaggaggaagcccaaagaccctcaagagaaagagccttcaggatgcccagctggggagaaaggggtctcaggtaagatctaggtatccggccctggtggtgggtgaatgatacgctggtgatacagcaagaggaaagaagggcagagggagggacactaagcctgctggagaccagagaacttccagatggaagggaccagaaggctggagcgggagagggtctcaaaatgcaccaacagaaacagcattttgcaaagagctgccttnnttttttgaacaaaaatagtgttgggggattaaataactaagctttaaaacaaatt

SEQ ID NO: 47202 - DNA, 405 bp, Gossypium hirsutum
  unsure (1)..(405): unsure at all n locations; Clone ID: LIB3196-035-P1-M1-H10
ccgnnnnttggataacattctgaggcatcaactaatagtacaccaggatggcagataggtgtaagaccatggatgaaagacttcatggcatccgcaaggtaagttcatcagggtagtatacatagaacagagatagtctgtcaagacagtaaacatggaatagagatagtccaccgaaacaataaacacgaaatagagatagtctactgggacaataaacatggaataaagatagcccatcgagatagtaaatacaatacaagtccaccgtttaagaattttaataaagcaaactacttttaaaacaagttagaattgctccaagccaaaaagtatcgataccttttnnnaaaaatatcgatatttttaaaatattgatacccttcaaataaacgataccaactt

SEQ ID NO: 47203 - DNA, 328 bp, Gossypium hirsutum
  unsure (1)..(328): unsure at all n locations; Clone ID: LIB3196-035-P1-M1-H11
atcggcgggcggcggccgatannnnnaggcggtggttgtgtgggcggaggccggcggcgacgacgcccgctgcgtgcggctgagcgccgagcgggcacaggcgctgctggccgacgtggacacgttgctgtttgactgcgacggcgtactgtggcgcggggagacggccgtgcctggcgctcccgaggccctgcgggcgctgcgggcccgcggcaagcgcctgggcttcatcaccaacaacagcagcaagacccgcgctggctacgccgagaagctgcggcgcctgggctttggcgggcccgcggggcccggcgccggcctggaggtc

SEQ ID NO: 47204 - DNA, 344 bp, Gossypium hirsutum
  unsure (1)..(344): unsure at all n locations; Clone ID: LIB3196-035-P1-M1-H12
atacttttcatagctgcctctttttccttgacaagaagatnttatttttgcttcattcatattattatgtaatgaactgaattaaggaaaatataagctggtttgtaaatgttaagagataattcattgaaaataccatttaaaaagtatttctgttgacctgaatatagtgctggaacacaaagagaaaataaagtaattatgggatcaggctgggaataagcctgaaaattctcttcacaagactgaaaaatcacttaaaaacttcaaatcaatttaagcatttaattttagaagtttttcacatcatcttatacttaaacatctatgcattgtattttctt

SEQ ID NO: 47205 - DNA, 323 bp, Gossypium hirsutum
  unsure (1)..(323): unsure at all n locations; Clone ID: LIB3196-035-P1-M1-H2
atagccttttnccttntcctcctaaggagaaaagaggcgagagattccccttcaacttattgagccacacccctcgctactccaaccaaaacggccgcttcttcgaggcttgcccacctgaattcccgcaactcagggacatcaatgtcaccgtttcagccttgcaattaaaccaaggatcaatctttgtgccgcactacaattcaaaggctacattcgtgatccttgttaccgacagtaatggatacgctgaaatggtttctcctcatcttcctaggccaagctcatatgaagaagaagaagatgaaaacgcacaacaagaa

SEQ ID NO: 47206 - DNA, 422 bp, Gossypium hirsutum
  unsure (1)..(422): unsure at all n locations; Clone ID: LIB3196-035-P1-M1-H3
atgtctctctgaagaggctatcatagnnnnntgncctgccgactggtattcccattgtctatgaattggacaagaacttgaagcctatcaagcccatgcagttcctgggggatgaagagacggtgcgcaaagccatggaagctgtggccgcccagggcaaggccaagaagtgaaggccagcggggaggatactgtccccaggagcaccctccctgcctgtcttgtccctctgcccctcccacctgcacatgtcacactgaccacatctgtagacatcttgagttgtatctgcagatggggactggtggctcccattttcattttagccattttgtcttctgcacccactcccttcgtacaatctagtnnnaatagcacttctagagcacaggttctcaatccaagctgtggaaaagctcccc

SEQ ID NO: 47207 - DNA, 332 bp, Gossypium hirsutum
  unsure (1)..(332): unsure at all n locations; Clone ID: LIB3196-035-P1-M1-H4
ctccacttgttttnattttgtgtattccntgaaaagctctttgagatcgatcctgatgggtcagtctttgcatctgctgacatgattaggaagtaaatctacatgccaccccactcttattttttatggcaccccttaaaacaagtcttacctctactccattgtgagagttactattcccattatcaccctccctgcctgttttgttcctgttccacttccacctgcacatattatatttgccacatctgttgacatttttatttttatttttcaatggatactgattgttcccatttttattttaaccattatttcttctgcaccctctt

SEQ ID NO: 47208 - DNA, 387 bp, Gossypium hirsutum
  unsure (1)..(387): unsure at all n locations; Clone ID: LIB3196-035-P1-M1-H5
tataaatatannnnttatttaaaggagagagggagaggcttctccggcctaagcgattttcggccatcagatcacggcccattcgtcaccggcgaccactgtgcgcggcggtcggatgtgcaaaacgaagccctttttgcccctttcgctctcctcactccagatctaagccccaagcacataaaaaaccccgagcaagtcgaagaaagccaaaggagccctccgattccgacttccccgactcgacgaaggtaagaccgatcatattcttcccctctttttatcctttggtttttaaaaatcgattcgagagcaaaaataaaataaagaaaaaaaaaaggaacagagagtgannntccacctttttgttttttttgattgcttaat

SEQ ID NO: 47209 - DNA, 335 bp, Gossypium hirsutum
  unsure (1)..(335): unsure at all n locations; Clone ID: LIB3196-035-P1-M1-H6
atgcaagcttctgtctgcacctgctctggggnntggcggtccatgaacctccgcctgcagagctcctccgccagctatggaggtggttttgggggtggctcttgccagctgggaggaggccgcggtgtctctagctgttcaactcggcttgtctctgggggatcagctgcaggctccagtggcggcgccacccgcctctttgaccgaggggcctgctgtgagctcctaggtggcctcacgagtgcccttgcacgacccttccgtggggagaccgctcatatttttcccctctttttatcctttggcttgtaaaaatctcttcggcagcgagaatt

SEQ ID NO: 47210 - DNA, 415 bp, Gossypium hirsutum
  unsure (1)..(415): unsure at all n locations; Clone ID: LIB3196-035-P1-M1-H7
atctgggtataaagataaggggncttntgttttaaagggcttaatttgccaaaaagaaaagtaaaaagctagagaccctttttgcagaacatttggtgcccacacatttgagggaagatgtggctttagatgaagcagaagcaaaccctgctcttagggtctcgtctagatgagtgcacagcctatgacactacagggagaggtcaggaaactgagatccagccttctgggtgacacgggcattgtttatcacaaaggttctgaagtttaagtagcaagtacataatgaaaagggctttaaaaattgctgagaaagcgagtcaccaaggctggcaagagtgtaacggggctgtcctgaggnnttaggagagtagatgctgggagggctggtgacctccatgggtttatctgttgg

SEQ ID NO: 47211 - DNA, 341 bp, Gossypium hirsutum
  unsure (1)..(341): unsure at all n locations; Clone ID: LIB3196-035-P1-M1-H8
acagnnnnnagnagagcttttatgacgataagtatcctccctctccttcatttttgctttttactcatataataacgaaaatcaaagaaataaaagcaaaatgaaaggaaaaatgatatgaaattaccacttaaaaactgctctttattcacactctttagaactgatttatatgcgaaaatatacacgtatcttttttctttttcagattacactcggcctttttatagccaaaataaataaaaatacaatggccttagattttctgctatatatttgctgtcaattgcgggatatctgctatgtgctctttctgttgcaaacgtgtatgagcacggtac

SEQ ID NO: 47212 - DNA, 394 bp, Gossypium hirsutum
  unsure (1)..(394): unsure at all n locations; Clone ID: LIB3196-035-P1-M1-H9
nnnccgtcggtaaaagagatccttgtggtctggaacaaagggataccgccaaaggtgagtgatctcaattcagcagtgcctgttcggatcagggttgaggatctgaactccctcaataatagattcaaggtcgatccattgattaagactcgtgctgttcttgagcttgatgatgatataatgatgccttgtgatgatgttgagcggggatttatgttgtggcgtcaacatcccgataggattgtgggattctaccctcggtatgttgacaggagccgattggagtataatggtgagaagtatgccagaaaaaataaagggtataatatgattcttacnnaggctgctttcatggatagtcaagtagcctttgaacggtattggagtgagcaag

SEQ ID NO: 47213 - DNA, 365 bp, Gossypium hirsutum
  Clone ID: LIB3196-036-P1-M1-A10
atggcgactgaatgcactaacagcagcaggctccgacctgcttccctggacatttcccggaccgtgagcgagggaaccacgttgccctggattcttgccaactgtacaaagttgaccaggaaaatggctcagcagacaagcccggacaccttaacagtacctgaagtggataatccgcattgtccaaacccgtggctgaacgaggaccttgtgaaatccttgcgagaaaacctgttgcagcatgagaagtccaagacagcgaggaaatcggtttctcccaagctctctccagtgatctctccgagaaattcccccaggctcctgcgcagaatgcttctcagcagcaacattcccaaacagcggcg

SEQ ID NO: 47214 - DNA, 179 bp, Gossypium hirsutum
  Clone ID: LIB3196-036-P1-M1-A12
ggaacatcgtgtatcagtttaggaaggcccagaatgaaatcgaccagtatttgaagattgttcctcttatcacgctggtggataattctcgagtcagggagagactagaagttatagagaaagatcaacatgaatacacattggatgaagaggaccgaagggtgcaagatgttatactg

SEQ ID NO: 47215 - DNA, 130 bp, Gossypium hirsutum
  Clone ID: LIB3196-036-P1-M1-A2
gtgacatttataatttaatttttaaattcttaataaatatattatatatatgtaaatatatctcaattgcatactataaatatattcatatgcaaaaatacatttgtaaagttactaattagacgtaaaa

SEQ ID NO: 47216 - DNA, 378 bp, Gossypium hirsutum
  Clone ID: LIB3196-036-P1-M1-A3
gcctttgctgcgccagaaaagggggctgaacttgtgcagaaggtgaattcagctattcagcaagaacttccactggtgatagcaaagatgaagctttatttacagaacccatcgacaagaacaattctttttaaaccaattaagacgaatattgtggaagcccatattcaaggtcaatcccttttaaaaaccgagtattcttcagatgaaaaaagcaccatcaacatggtgaacatacaaaaactgggagcacaactcgacaatcttctctagggggctagggaagcttattcaagtatttttcctcaaccccaacacctttcaggaaattttggcgaaaacgggggtcaaactggtcataaagggatattggtaggt

SEQ ID NO: 47217 - DNA, 390 bp, Gossypium hirsutum
  Clone ID: LIB3196-036-P1-M1-A5
gcccttacaatgttatcaagaactggaattacactgcctttgttgatgccatccacaatggtgaaggcagatgctggacagccaaggtgaggaccgaggatgaactgatagatgcaattgcggcagcaacaggagaaaagaaagattcactgtgtttcattgaagtttttgcacacaaagatgacaccagcaaagagttgctggaatggggatccagagtttcctctgctaacagccggcctccaaatcctcagtagagctgttgattctgaaatgtttagggaaagacagactggaagcaccataagctggaaataagatagatggggcagatttgcttggcttggatgagatttctgttaatctttttactgcattaaactttgtaaa

SEQ ID NO: 47218 - DNA, 362 bp, Gossypium hirsutum
  unsure (1)..(362): unsure at all n locations; Clone ID: LIB3196-036-P1-M1-A6
atgcgcgccccggccagtgaagggctcggggatggactgcggctcggtcggcggccagaggacccagcgcctgcccggccatcggcggcttctgttcttgcccgcgggcctcagcggaagaccgggaggcagcgaaacctcagcacgccgctgcctctctgcgctctgcgacggtctgggggcgctgcgccctcgcgccccggcgacccgcggctgcgtgtcacgtgcctcgccgctactcctcctcctgctagtgccctccccgcgcttgggcgncgcaagcccgcgccgggagctcgggggactgggagcgcttcgcgcctcgggattgccggaccccccggcgggcgcagcggcgcatg

SEQ ID NO: 47219 - DNA, 338 bp, Gossypium hirsutum
  Clone ID: LIB3196-036-P1-M1-A7
cggacgcgtgggcttgtatctttctacattacaataatagatatagatagtatggtagaaagattcatattttttttctaccatactatcgagttttataggatggtagaaagattcatattttttttctaccatactatcgagttttataggatactgctgattctagtccattcattttatttaagacgtgagatttgaatcctttttttcttaactccttgataaaaagtcaagtttcattcaaattaatcactttgactgacagtttttacgtatattataagtaaaaaagcggtaggaactagaatgaacagcgctgtagcaataaatgcgag

SEQ ID NO: 47220 - DNA, 400 bp, Gossypium hirsutum
  Clone ID: LIB3196-036-P1-M1-A8
tgcctttgctgtgaacgggggtgctatctcggagtgaatgaccgcctttaatgctagaatctccccttcctcgtttcgtacaagtaggcccgtagccgatctagaagattgactgtcaaaggctgtatcaaaatgaactgcgacttttgatcttcgacaaatctggcgaatggttctatcaacctgaaagattgaccagagaccacaacagaaatgtcggatctgttcgttagtaactagacggaagacctaggacattattgaaagacatggctactatccttttcatgttgaagacagtggggcactgatcattcaacacaactctcttgtgtctgagattaacaaaggacggaataaagttccaagagattctccatactattattttaatttttga

SEQ ID NO: 47221 - DNA, 261 bp, Gossypium hirsutum
  Clone ID: LIB3196-036-P1-M1-A9
tggatgtgggaacccccaactttttagctgatcagtcggaagaaccggtgacctggacttctgattctcacctctagtagaggcatgagacataccccttaaagagcaggggctgtgtcacctctgtgtaatagtgtctgaattgaattgatgaacatccaattattgtttggaaaatgattattgtcctagcaaaaacccacccctttcgttttagaagtgtttagagtagaaaccaaacctaagaatatgtgtaattta

SEQ ID NO: 47222 - DNA, 357 bp, Gossypium hirsutum
  Clone ID: LIB3196-036-P1-M1-B1
gcgcatcagatccactctccctctctttcacaggcttttgagatccgattccctgccttctcacactcccagagctgctcttcaccgaactctactttgtcccgaactgtcgaggaaatattccacttctccgaagaaggacgagaatgttaaggtgcctttggctttgtttggtggatctggaaactatgcatctgcactgtaccttgcagccgtaaaaggaaatgctctggacaaggttgagtctgaacttcttgaccttgttcaggcatcaaaaaacagtcaattcttttctcaattcactaaggacttgtcagtacctgcagagacacgggtcaaagccattaatgagatatg

SEQ ID NO: 47223 - DNA, 384 bp, Gossypium hirsutum
  Clone ID: LIB3196-036-P1-M1-B10
acaattccctgaaaaaatttgttggagtcttattgctcagcaggatgagactttcatctggcagaaaactgttgatgctcagtgctattcttctcgcaagcagaatgatgtacccctttgcaaaggacatgatgcttcctattatcaggccttgagcccatgcattattggaccttccagcaaacccctggattcctattcagaacaggtcctctagctcagaattgagctctgcggagcttgcacttcatggagtcagtctagaagatttctttgaagacttgcaaggtgcttgagaaccattggcttcctttaatattggaccccaatgggatggaaatgaatgctcataatgggggttaaaatgctgcattcctggaggaa

SEQ ID NO: 47224 - DNA, 378 bp, Gossypium hirsutum
  Clone ID: LIB3196-036-P1-M1-B11
caaaatacagagcttatcgtaatcatggtgaggaataagtcagcttgcgtagttttgctcttttctcttttcctttcctttggcttgctttgttctgccaaagactttcccggaagaagaggcgacgatgatcctccgaagaggtacgaggactgccggaggcgatgcgaatgggatacacgtggacaaaaggagcaacagcagtgtgaagaaagttgtaaaagtcagtatggggagaaagatcaacagcagcgccaccgccctgaagatccccagaggagatacgaggagtgtcagcaagaatgccgacaacaagaagaaaggcaacgaccacaatgccaacaaaagtgcttgaaacgattcgagcaagaacaacaa

SEQ ID NO: 47225 - DNA, 376 bp, Gossypium hirsutum
  Clone ID: LIB3196-036-P1-M1-B12
tttgaagtgcagaatcaagggattgtgggtggagaagaagcggtgacggatctaacttggaactccgttttctcttcttaccgctattcccgacctatctctaaccccctcaatttctctcaggtagatattccttgtgttcaagcgtcttcatggcttcaaagcggattttgaaagaacttaaggatttgcagaaggatccaccaacttcctgtagtgcaggtcctgtagcggaagacatgtttcattggcaagcaacaattatgggcccctccgatagcccttttgcaggaggtgtgtttttggttaatattcattttcctccggattatccattcaagcctcctaaggttgcatttaggaccaaggtcttcca

SEQ ID NO: 47226 - DNA, 207 bp, Gossypium hirsutum
  Clone ID: LIB3196-036-P1-M1-B2
aaaagatatccttccttccttcctttatttattcttcttcttcttcttcccaatggcttctgcttgtgttaacaacctcaccgtcgtctcaacggagaccaatttgcattccacgccaccttactctccctacgtttcgtcgccggagattcaagacacggctgcaggtggtgattttgagttcagactcgaagaagatcccgtcac

SEQ ID NO: 47227 - DNA, 275 bp, Gossypium hirsutum
  Clone ID: LIB3196-036-P1-M1-B3
gcgtgattacttactccctaccagcgtgaatcaaccatggcaaagctcgggggttactcagcccccctggctctcattttgttccttgccaaggcttcaatcacatgcgcagacgtcgaaagcgaggtaaacctggatagctgtgaaccgcagataagggagcacgcccacctgaagcactgtcagaagtacatggaggaagagtggggttgccaatgcagcgacaatatattcggcgggtacattgactcatgttgccagcagcttgagaagat

SEQ ID NO: 47228 - DNA, 390 bp, Gossypium hirsutum
  Clone ID: LIB3196-036-P1-M1-B4
atcaaaataaagcacaaagtgcatagagaaaagaaatagggactgaagataaaaacagagcttcagtaagcagctgtggaacaatatataaagttgcttatcatacatacaattggacttttcagaagagggagatgagaaaaaatatttgaagaagaaaagctggacgttgttcagataggatagaaactataaactcacaaatcccaggaagtttaatgagccccaagcagaatgaatgtcactaaaacacataataatcaaattgccagaaacaagtaatgaaggacatagtcttaaaagcagccagggggcgaaaaatacaccttacatattgaaggaagataaatcaagtcttcttatctgaaatcagtcaggaaagaagaaaag

SEQ ID NO: 47229 - DNA, 382 bp, Gossypium hirsutum
  Clone ID: LIB3196-036-P1-M1-B5
tgattttcgagttgtgaaactcaagatatgatttttaaagcgactagtacgcagattggcagtgtctgagaaatatttttataaagggtttaaagtctgttaacacctcgtgttcgactccggtgtcggtctcgggttcggggtgttacaagtttcccatgatttgacaactcgatcttggtccacgtgcaaccctctatcttgtcgaatcagattttgggcgatttgggtgttcttagttgatttctaaactgatctctattttttaaactacaaacagcagttttacctagaaaagttttttgaaaaaaattcatttgattggataaacattgtccgattgatctgaaattttacatacatatttttggcactgtgattg

SEQ ID NO: 47230 - DNA, 386 bp, Gossypium hirsutum
  Clone ID: LIB3196-036-P1-M1-B6
ggcttacacttctttgctttcttttagcgtttgcttgcttgttctcttccatggctgctgtgctcagatagatctcgtcactaaccatcaccaggatccaccttgggggcagcctcagcaacctcagccacgtcaccaatcccaatgccaactccagaacttgaatgctcttcagcctaagccaccggtttaggtcagaggctggtgaaactgagttctgggaccaaaatgaggatcaattccagtgtgctggtgttgctttcctacgtcataagatccagcgcaaaggacttttattgccttcatttaccagtgctcctatgcttttctatgttgaacaaggggagggtattcatggggcggtcttcccaggttgtcccgagaca

SEQ ID NO: 47231 - DNA, 270 bp, Gossypium hirsutum
  Clone ID: LIB3196-036-P1-M1-B7
cgcaaaaagaaaggcttgaaaaaagccctttttactttgttatatagattatgttatatagattattatttatctatatagagtattattaatccatagatatatagattctaaatttgattattattagatagattgattatatagctatatccaacttttctatagagatatagaacttttatcagtaattccatttcatttatattatattctatatcatttatatttttaaataaaacaatggctctaaagaaatatctcaaataa

SEQ ID NO: 47232 - DNA, 324 bp, Gossypium hirsutum
  Clone ID: LIB3196-036-P1-M1-B8
gaaatgtggagagggcattgtggctgatgaagatatcaagcatggagagtttgtaatagaatatgtcggggaagttattgatgacaaaacatgtgaggagaggctttggaacatgaagcatcgtggagaaaccaatttctacttatgtgaaatcaatcgtgatatggtaattgatgccacatacaaggggaacaaatccagatatataaaccatagttgctgtcccaatactgagatgcagaaatggataattgatggtgaaacaaggattggcatattttcaatgcgagatataaaaaagggggagcatctgaactatgatta

SEQ ID NO: 47233 - DNA, 70 bp, Gossypium hirsutum
  Clone ID: LIB3196-036-P1-M1-C1
gtcgtttgcgaatttcagactgttttccctcgatttcatttaccgggccagaaaacaaaccgcaaaccct

SEQ ID NO: 47234 - DNA, 371 bp, Gossypium hirsutum
  Clone ID: LIB3196-036-P1-M1-C10
gggctgttatctcagtttttgtgatgctagccatgtttcaattcgtggtgaagcaagggcaggccgccgtaacttgcaaacaagttgatgatgcattggcagcctgcgttccttaccttaccaacggtggggttccttcgactccgtgttgtaatggtgtaggggaactccggaatagtgccgaaaccacggcagacaggcaagcagcttgcaactgtgttaaacaagccgccgctcgtatccccactatcaaagaagatgacgccgcaactctccctgcaaagtgccatgtccaagttgatttcccaatctccaagaacaccaactgcgaggacattcactaagatggaagccatcaagacgcaaatata

SEQ ID NO: 47235 - DNA, 375 bp, Gossypium hirsutum
  Clone ID: LIB3196-036-P1-M1-C11
cccacgcgttcggcttacacttctttgctttcttttagcgtttgcttgcttgttctcttccatggctgctgtgctcagatagatctcgtcactaaccatcaccaggatccaccttgggggcagcttcagcaacctcagccacgtcaccaatcccaatgccaactccagaacttgaatgctcttcagcctaagcaccggtttaggtcagaggctggtgaaactgagttctgggaccaaaatgaggatcaattccagtgtgctggtgttgctttcctacgtcataagatccagcgcaaaggacttttattgccttcatttaccagtgctcctatgcttttctatgttgaacaaggggagggtattcatggggcggtc

SEQ ID NO: 47236 - DNA, 312 bp, Gossypium hirsutum
  Clone ID: LIB3196-036-P1-M1-C12
ggagaaaaggtgttgccatagactttgtgactctagatgatgaaagaatgctgtttgatatccagaagttctacaatgttgtcatcgaggagctgccatcgaatgtcgcggatctcctttgatgagagattacgttttcaaaaaggtggcgaggcgagcgctttcattggtttgaagtccaattaaaggggctctttttttcttttttgggtttccctttttagcaatttaaggtgaatggtctttaaaatatttgaccatttaaatatgtggtctaaaaatgctacataaaggttattcactttttctccc

SEQ ID NO: 47237 - DNA, 213 bp, Gossypium hirsutum
  Clone ID: LIB3196-036-P1-M1-C2
cgacgcgtgggcttttttacgtgttgaaatgaaatgtgaactccaatcatctttttggactattatttaaccattaattaagccatggccttgttccccacacaaaaatcattattaatttggaaacaacatatggtgaagaaaactagaaacggtcgatagtattttggtcttcaagatacgtcactcaagccacaaacttttgaagtatgg

SEQ ID NO: 47238 - DNA, 249 bp, Gossypium hirsutum
  unsure (1)..(249): unsure at all n locations; Clone ID: LIB3196-036-P1-M1-C3
acgcccacgcgtncggggattcatatgggacggcgaaccggtggttcaaaaatcgagccgagcaagaagcgaaaacaaaagagatttgtgccaaacaagcggttcaaacgaaagaaatgttgtcgaaacaagctgttaagatcgctaaacaagctgaagaacacgagcgctttatcaataaggtgactcatcttttgggggttcttggatttggagggttttgctttctattgggagcaagaccacaag

SEQ ID NO: 47239 - DNA, 386 bp, Gossypium hirsutum
  Clone ID: LIB3196-036-P1-M1-C4
ctcttatcctattctttcttgttttcagtttcttcactcactggcccaagtctctcaggtgaacggagatggcaggaaaaggtggaaaggggcttttggcggcgaaaacaaccgcagctaacaaggacaaggacaaggataaggacaagaagcgtccggtttctcgttcatctcgtgccggaattcagttcccagtgggtcgtatccaccgtcatctcaagtctagggcatctgcaaatgggagagttggggccacagccgccgtttacttggcctctattcttgaatacctgacagctgaggttcttgagttggctggaaacgcaagcaaggatctgaaagtgaaaagaatcaccccaaggcatctgcagctggctattaggggg

SEQ ID NO: 47240 - DNA, 192 bp, Gossypium hirsutum
  Clone ID: LIB3196-036-P1-M1-C5
acaccatagaacaagtttgtacaaaaaagggggctggtgctccgcgcccggttttccgggtgcgcggcacgagaccctccccgcctctattgaacacgggggggatatcttggagatagacattcccactctctctgggtgtctttacgctctcatatttgaaaaagcgttgccctttctccaacggggggg

SEQ ID NO: 47241 - DNA, 82 bp, Gossypium hirsutum
  Clone ID: LIB3196-036-P1-M1-C7
cccacgcgtgcgcccacgcgggcgatagattatcacatatcaaggcatcactcataagcttagtgtacatacctataccaac

SEQ ID NO: 47242 - DNA, 277 bp, Gossypium hirsutum
  Clone ID: LIB3196-036-P1-M1-C8
cagccagcagtattgcagcgtctgtgggataatcaagtctggcttttcaccaaagatggacggaatctccacgctatcaacgagctggagagcacacatggcggtccctgaggatgtagaggaagagttcaagttcatgaacgtgaaacgggccatgcttgtctgccgggtggtagcgggtagggtggggtcagaaggggatgaaacaaacaaggaggatggcggatttgattcggtgatagggaggggaggggggaatatggcacatcataccaag

SEQ ID NO: 47243 - DNA, 380 bp, Gossypium hirsutum
  Clone ID: LIB3196-036-P1-M1-D1
aatgccattagttatatatttcttatgtatatattcttaaatactattatatacatatatatattttaaataccatattgtgtatatattattattacaaattattactattgctagtattattataactattattatattagtgtatattttatgtacatatgtatatatatttttgcacatatcattattttatattattggtgtaaattttttatgtatatattttttatgtacgtttcctaatattttcttttaattgggaaattattattattattacatacttttattatacgcatatatataaagatttttatggacatattattattttatattattattacccaaaatatcatttttcctaatttattatt

SEQ ID NO: 47244 - DNA, 210 bp, Gossypium hirsutum
  Clone ID: LIB3196-036-P1-M1-D11
ctgcaatgtggctaggttaacatgcatttgcatatgtcaaagagtgacatacttcaagttccattgtgggggaatttttatgggtcatctgttatctgtaaagggatgggtttcttgggtcccaaaccacctttctttgcttatgtttattgttttgcttgtatggttattaggagaggcagtatcaagtatgcatgttgtcttggttat

SEQ ID NO: 47245 - DNA, 371 bp, Gossypium hirsutum
  Clone ID: LIB3196-036-P1-M1-D12
gacagagttctttgggttaccttttcgggagcggagaagctccacctccaaaaccaaccaacgtcacgagtactggcaccaccagtaatgaagttcctcagaagcagattgaggttgtgaaggaaactgtgcaaaaaccgaccactgcttcaccatcatcgggtgatgccaaggagatccctgcaggtgttccagggagcaaaacgaacaactatttccgagctgatggccagaattgtggcaactttcttacggagcgcaggacaactaaggttcacgcagcgcctggcggtgggtcttccttggattacctgtttggtggcagcgagaagtgatatgtgagatattaaatgttggaaccactgcttatg

SEQ ID NO: 47246 - DNA, 388 bp, Gossypium hirsutum
  Clone ID: LIB3196-036-P1-M1-D2
cccacgcgtgcgctttttcacactaacaagtcttagcctaacatcctctttctttgaagatctctggtggacttgtcgatcaaatcatttagcttaaaatctatttcattgactcacccattgtacccattgttagattattcgccaatcgttggtgaactaataatgaaggatatcccataccttaaatagggtaccccttctattacccttgccttgataataccacacatataccaaattcctttttccatcacaatgtggcgaattcccctattaacaggcttacccgcattcttgggcacatctactagctattctcctcttcatagttaggcagattctcttactatcccatttacccgcattcttagacacgtcgcattca

SEQ ID NO: 47247 - DNA, 349 bp, Gossypium hirsutum
  Clone ID: LIB3196-036-P1-M1-D3
cggacgcgtgggccgacaccatcgacaatgtcaaagccaagatccaagacaaggaaggcatcccacccgaccaacagcgcctcatctttgccggaaagcagctcgaggacggccgcaccttagccgactacaacatccagaaggaatccaccctccatctcgtgctccgtcttaggggaggtgctaagaagagaaagaagaagacctacaccaagcccaagaagatcaagcacaagaagaagaaggtcaagctcgctgtgctacagttctacaaggtggatgaatcgggtaaggttcaaaggctgaggaaagagtgtcctaatgctgagtgtggtgctggaactttcat

SEQ ID NO: 47248 - DNA, 377 bp, Gossypium hirsutum
  Clone ID: LIB3196-036-P1-M1-D5
aacaatttcaaaatattaaatattctttctctttgatcgatacttgaataatatgtcaggaagaggaaagggaggcaaggggttgggcaagggcggagcaaagcgccaccgcaaggtcctccgtgataacatccagggaatcacgaaaccggcgatccggcgtctagctcgtaggggaggtgttaagcgtatcagtggcttgatctacgaggaaacccgtggagtgttgaagatcttcttggagaacgtgatccgcgacgccgtgacctacactgagcacgccaggagaaagacggtgaccgccatggatgtcgtttatgccctcaagaggcagggtaggactttgtacggtttcggtggttagattggtgtttact

SEQ ID NO: 47249 - DNA, 401 bp, Gossypium hirsutum
  Clone ID: LIB3196-036-P1-M1-D6
atgccttcctgtcactgccccaccctgccccactgctgtctcagtaccaagaaaaagcccagcagcatctgggacttggagctgcacatgtctggtgaggaccttgccctcacccacagatgccatggggcagagatgctctttccacggcctcagagccactcccagccacagtctccagcatctctgtggacagggatcacagctcccagcttcttccagttcctgcagcaccagaccagcctctgcagctgcacttcagctccgcagacctgcactgtcccagcagacctcacttgccccatggccttcatggcgccttccaggcctcaaacccttctctgcgttccatcctggccacaggcttgttgcagtcagcaggtgtgggcttaggcgggtac

SEQ ID NO: 47250 - DNA, 350 bp, Gossypium hirsutum
  Clone ID: LIB3196-036-P1-M1-D7
atcgtgtgcggaagcctgtgaacgtgcagatgctcttctccaatccactggatgagccagtgagggactgtgtgctgatggtggagggaagcggcctgctgttgggtaacctgaagatcgagtgagtcctgggcctgagtggccggtgcgggagggtgggagggggcgggggggggccctacagatcctctgggtgggacagacagagctccctctgaccttaagttctttactcttttgggggccttggaactctagaatctgcatttgcatttggtttgggggttcaccaaacttgaactcttgagaagtccaggtcatcagagctaagagctggtcttcagggctta

SEQ ID NO: 47251 - DNA, 297 bp, Gossypium hirsutum
  Clone ID: LIB3196-036-P1-M1-D8
cttaaatctaggcggcatttaaatgtccgaggaaaaagtgctacgctgccttctattacagaaaaggactgggatgacataaaatttggagtagacaataaagtcgacttttatgctgtttcttttgttaaagatgcagaagtggttcatgagttgaagaattatctgcagagttgcgatgcagatattcatgttattgttaaaattgaaagtgcagattctattccaaatttgcattcaattataacagcatctgatgcggcaatggttgcaagaggagatcttggtgcagagctg

SEQ ID NO: 47252 - DNA, 411 bp, Gossypium hirsutum
  Clone ID: LIB3196-036-P1-M1-D9
atcgggacagttcaggaggaaaggaagagaagaaacatcataagtcctcggacaagcacagataataaagactttccatcaaggctatggacagaccccctaagctgaaagtctcccagaggaggatgccaaagctccgtgcgtcactctcagaacgatatctcccataattaagagcttctggtgctgtccatttaatgggaatctgctttaagtcagaagatgaatacacaccaccatcctcttgacgagacattccaaagtcactgattttcagaacattattttcacctccaggcagtttcttgcagcaaggtccctgtgtatacattttttactcgagatacgccatccagaatcagcatctaatgaaaatttcactaactgagttttagttcattcttctttctc

SEQ ID NO: 47253 - DNA, 397 bp, Gossypium hirsutum
  Clone ID: LIB3196-036-P1-M1-E1
ggacaatagtctgtgtaaggaaaaggttctacagattgagcttgaagcgccaatgccatccttaggggctccagagctactattgcaccgaattgttaggtacttggcagttgcatcttcaatgaaaaataaagatgggaagccaggttactcgtatgttcaaccaattatcttgaaactgctcatcacttggctagcagattgcccaaatgcagtgcaatgcttcttagattcacggccccacttaacgtatctgctggagttggtgtcaagtacatcatcaactgtgtgcgttagggggttggctgcagttctcttgggagaatgtgtgatttacaataaatctagtgaaaatggaaaggatggttttaccatagctgatgccataagccagaat

SEQ ID NO: 47254 - DNA, 392 bp, Gossypium hirsutum
  Clone ID: LIB3196-036-P1-M1-E10
caattttggctccaaggaagattttgacagtctcttgcaatcggctaaaaaaaagagcatccgtgtcattctggacctcactcccaactaccggggtgagaacttgtggttctccacccaggttgacagtgtggccaccaaggtgaaggatgctctggagttttggctgcaagctggcgtggatgggttccaggttcgggacatagagaatctgaaggatgcatcctcattcttggctgagtgggaaaacatcaccaagggcttcagtgaagataggctcttgattgcagggactaactcctccgaccttcagcagatcgtgagcctactcgaatccaacaaagacttgctgttgaccagctcatacctgtctgattccagctttactgggg

SEQ ID NO: 47255 - DNA, 379 bp, Gossypium hirsutum
  Clone ID: LIB3196-036-P1-M1-E11
ttatttttcactttccgcacacttagcttaactaagcaagctcgtaagctgttttcatcaatggccgaccgtgaccgctcttaccggacgtttgaccaggttgttcgtggtgatagaacgaactatcaaagcggaccatcaacaacccaagttctaactgtcctcaccctccttcccataggcggcactctccttgcattagccgggctaaccctcaccggcaccgtcatcggcctatgcatggcaacgccactcttcgtcatcttcagcccggttctggtcccagctgccatcgcggtcttcatggctgtggccggtttcttgtcgtccggggcattcgggttgacggggctgtcctcgctctcctacgtatttaacc

SEQ ID NO: 47256 - DNA, 397 bp, Gossypium hirsutum
  Clone ID: LIB3196-036-P1-M1-E12
atctcttcttctcagcactatgccttccttctttgggatagagaatgttccagacattctcgcttccctgaaagactgaggaaagtgtggggtatgggaaccacgaaactgccctggctccagtgaaacgtgggcacatgctcaggctactataggtccagcagcccttatgttaaaccctggcaggcaggtgtttattcaaattctgaattttggggattttcaaaagataatattttacatacactgtatgttatagaacttcatggctcagatctggggcagtaccgtataaatcaacaccttaatatgctgcaacaaaatgtagactattcagacaaaatgcatacctaaagactagctcataaggggtcaaatgttgctggcaaatgcgtat

SEQ ID NO: 47257 - DNA, 391 bp, Gossypium hirsutum
  Clone ID: LIB3196-036-P1-M1-E3
tattaacaacgtgaaaacatgatgatagtattataatagctgatatcatttacatatattataaattataacacccttaaatgtctcacttaacaagaagaagtatttcaacattaattttattataaaattttattatatttgttctttattttgatatttcagcgtattcaaattcacgtttccttatgctgataacaatgtcaatactaatcaaactaatacctaatcagcataatgaagaagttattaattttatacaatattttttaattaataactttttggtatttgtacctttaattaaaatcaggactataatttaatatcatgatagtcttataataatagtagctaatctcttgcaggttcaggtaattgattagataat

SEQ ID NO: 47258 - DNA, 255 bp, Gossypium hirsutum
  Clone ID: LIB3196-036-P1-M1-E5
atgaaaaccaaacaccgcatgttctcactcataggtgggaactgaacaatgagatcacttggactcaggaaggggaacatcacacaccggggcctatcatggggaggagggaggggggagggactgcattgggagttataccggatgtaaatgacgagttgatgggtgcagcacaccaacatggcacaagtatacatatgtaacaaacctgcacgttatgcacatgtaccctacaacttaaagtataataataat

SEQ ID NO: 47259 - DNA, 383 bp, Gossypium hirsutum
  Clone ID: LIB3196-036-P1-M1-E6
cccacgcgtccgacgatttgtattttgaaaggggggattttggaaataaaaaaaccattgtataaaacacaaaagagcaatcgaaaagggagaaatcaaggtgttccttcattctgtttttttgttatttcctttgtaagttcatttctgaatatagtgcatacatatagatattaaaagaaaacacacacaaaaaaagagaaagcttacctttttgaggtcggggaagggaacctacccgcggtttcagccatcggagaccctttcaacggcatggatttggaccaatggacgcctcccgtctcctttgttcccgagccatgagccacgataggtggaggcgcatgggacgccgatgaaacccatgatcggccaagcagaga

SEQ ID NO: 47260 - DNA, 396 bp, Gossypium hirsutum
  Clone ID: LIB3196-036-P1-M1-E7
atcccggccagacggcgggcaagacagctgggtgtgcagcgtcctcgaaaccacgagcaagcgagcagatcctccgaggcaccacggactccagcccatgccatggcggattctgagcgcctctctgcccctggctgctgggccgcctgcaccaacttctcgcgcacccgaaagggaatcctcctgtttgctgagattatattatgtctggtgatcctgatctgcttcagtgcctccacaccaggctactcctccttgtcggtggttgagatgatccttgctgctattttctttgttgtctacatgtgtgacctgcacaccaagataccattcatcaactggccttggagtgatttcttccgaaccctcatagcggcaatcctctacctgatcacc

SEQ ID NO: 47261 - DNA, 410 bp, Gossypium hirsutum
  Clone ID: LIB3196-036-P1-M1-E8
atcgaggctgcagccagcactgccaccggaggcacagtcggtgcccgagctggaggaggtggcacgggtgctggcggaaattccccggcccctcaaacgcaggggctccatggagcaggcccctgccgtggccctgccccctacccacaagaaacagtaccagcagatcatcagccgcctcttccatcgccatggggggccagggcccggggggccggagccagagctgtccaccatcactgagggatctgaggccagggcagggcctcctgctcctgccccaccagctcccattccacccccggccccgtcccagagcagcccaccagagcagctacagagcatggagatgcgctctgtgctgcggaaggctggctccccgcgcaaggcccgccgcgcgcgccttaacc

SEQ ID NO: 47262 - DNA, 389 bp, Gossypium hirsutum
  Clone ID: LIB3196-036-P1-M1-E9
gttatctctgaaggtgtcttaataaacgccttcgatttaccttcgatttccatttacttctctattgctacgtttttgaatttttagtgagcgaaaatgagagagtgcatttcagtccacatcggtcaggctggtattcaagtcggaaatgcctgctgggaactttactgccttgaacatggaatccagcctgatggccagatgccaagtgacaagactgtcggaggaggtgatgatgcttttaacacctttttcagtgaaactggtgctggaaagcacgtccctcgtgctgtctttgtggatcttgagcctactgttattgatgaagtgaggactggtacttaccgtcagcttttccaccctgagcaactcatcagcggcaaggaaga

SEQ ID NO: 47263 - DNA, 397 bp, Gossypium hirsutum
  Clone ID: LIB3196-036-P1-M1-F10
atgacagctgctgctcctgcttctcctgaacagatcattgttcatgctttatccccagaacatttgttgaacacaagtgataatgttacagtacagtgtcacacaccaagagtcatcattcagactgttgccacagaggacatcacttcttccatatcccaagcagaactgacagtagatagtgatattcagtcatctgattttcctgagcctccagatgccctagaagcagacactttcccagatgaaattcatcaccctaagatgactgtggagccatcatttaatgatgctcatgtatccaaattcagtgaccaaaatagcacagaactgatgaatagtgttatggtcagaacagaagaagaaatttctgacaccgaccttaaacaagaggaat

SEQ ID NO: 47264 - DNA, 397 bp, Gossypium hirsutum
  Clone ID: LIB3196-036-P1-M1-F11
atggaggctttgctgtgagggatatgccatatgcatatttgggggaagagcattcttggcattgataacagcaggtgccaaggccctgaggtgggattgtgtttagagcattcaagcaagaaggccagggaggctggattaaataatctccaaatgcctcttaaaggaggtggtggtaactctaatttaaatgtcagataaatggttgaaagaaagttttcactctggctaggtgggaatcctaaatcatctctttacaatcaatactttctgattaatgtatctaattaaatatatcaaagagagttgtctggcatttattacttcgaggtctgtaattcaatgccaatttgaatttcttccaatgtttctatagccaaaatgatttttcagcttt

SEQ ID NO: 47265 - DNA, 377 bp, Gossypium hirsutum
  Clone ID: LIB3196-036-P1-M1-F12
gccattttctgctctttcaattttaagaccaaatcacgagcgactctcagactcagctgagttaagatcgctaaagcgatatggctttgcagctatgggaaacgttgaaggaggcgataacggcgtatacgggtctatctccggccacttttttcacggttctagctctgttatgggctgtttactatgtagcaacgggtctattcgggtcatccgatgaccatatccatcaacggtctacggctttcgaggagcagatggagccgctaccgccaccggttcagctcggcgagattaccgaggaggaacttaagcagtatgatgggtcggattcaaagaaaccactccttatggccatcaagggccagatctatgat

SEQ ID NO: 47266 - DNA, 343 bp, Gossypium hirsutum
  Clone ID: LIB3196-036-P1-M1-F2
cccacgcgtccggccttcagctgggcagaaaattgatattcccaacgtccccaggaaccaaagtggaattgttactatgtaacctgtccaataatgaggccttaatctccagtcagatgaagttcctatcgaggaagcagttatatagtatctcctcacaagaagtgcaacagccatcaacatgaatatgactagaatgctcacagatggctagcttgttaagacatccaagcttgaaaagaaagcaatcagaccacttgagacggcagtttttggtgttccagtctggatggacaaaagaccatggtctgatcacttgtgctcatgcaatatgattcgtgta

SEQ ID NO: 47267 - DNA, 386 bp, Gossypium hirsutum
  Clone ID: LIB3196-036-P1-M1-F3
cccacgcgtccgtccagtacttgattggatcgggaatggatcctcatacagagaatagtccttatcgaggatttatatacacttcgttccaagaaagggcgacttttatctcccatgggaatacaggcaggctcgccaaggagtatggggatattaacttggctcaaatttgcggtagcattgcctcagatgagaagcgccacgagacagcctataccaaaatcgttgaaaagctgtttgagattgatcccgatgaaacagttcgggcatttgctgacatgatgaggaagaaaatcaccatgccagctgagttcatctatgatggccgaaattacaacctatttgaccactactcggctgtcgcccaaagaatcggggtttacact

SEQ ID NO: 47268 - DNA, 401 bp, Gossypium hirsutum
  Clone ID: LIB3196-036-P1-M1-F4
atggagaaaggtgaggagctctcctgcgaagagcgaaacctgctctcagtagcctacaagaatgtggtgggcggccagagggctgcctggagggtcctgtccagtattgagcagaaaagcaatgaggaggcctcggaggagaagggccccgaggtgcgtgagtaccgggagaaggtggagactgagctccggggcgtgtgcgacaccgtgctgggcctgctggacagccatctcatcaaggaggctggggacgcggagagcagggtcttctacctgaagatgaagggcgactactaccgctacttggccgaggtggccactggtgacgacaagaagcgcatcatcgactcagcccggtcagcctaccaggaggccatggacatcagcaagaaggagatgcc

SEQ ID NO: 47269 - DNA, 383 bp, Gossypium hirsutum
  Clone ID: LIB3196-036-P1-M1-F5
taacccttctttgctctttctttgccttctttttctcttcaatggctgcctagctcgccagaccttttcgtcacagcagtcccaaaatgagtgtcaaatcaataggctccgcgcctctgcaccccagacccgaattcgctccgaagccggcaccaccgagtggtggaaccccaactgtcaacagctcaggtgtgctggtgtatctgtaatgaggcagactattgaacctaatggccttgttttgccttccttcaccaatgctcctgagcttctctacattgtccaaggaagaggtattcaaggtattgtgatgcctggatgtgccgaaacattccaggattcacagcaatggcagcatcaaagccgtggcaggttccaggacc

SEQ ID NO: 47270 - DNA, 382 bp, Gossypium hirsutum
  Clone ID: LIB3196-036-P1-M1-F6
ggtaaatggattcaaaccgaagaatggtatgttcgagaaggaaagtgctattaggagagagactgagggtgagtttagactgttgggtgggagagaagggagcaggttcgccaatggtagacttttcggttttgatgatgacgaccaagtggcaagcttgggtcgcaaggtatcttttagcatggaagacagcaggattgaaattccgagccggttggagcctggtgaagtttcgttgactaccttgcctgatgatgaatccggtaccgatgaagactacgattacgatgaccaagagtgcagtagaaaggaacctgagatcatttgccggcacctcgaccacgtcaacatgttgggtctaaacaaaacgactcttagacta

SEQ ID NO: 47271 - DNA, 404 bp, Gossypium hirsutum
  Clone ID: LIB3196-036-P1-M1-F7
atggcgtctccggggacgggcagagcctcgagggcgcctgcggggacgggcagagcctcgagggcgtctccggggacgggcagagcctcgagggcgtctccggcgacgggcagagcctcgagggtgtctccggtgatgggcagagcctcgagggtgtctctggcgccggccacagcgcagggctcgcggccgggcagggccccggggctgacgagctgggcttgtcccgcgggaagccctacgcctgcggcgagtgcggggaggccttcgcgtggctttcgcacctcatggagcaccacagcagccatggcggccggaagcgctacgcctgtcaaggctgctggaagaccttccacttcagcctggccctagccgagcaccagaagacccacgagaaggagaaa

SEQ ID NO: 47272 - DNA, 292 bp, Gossypium hirsutum
  Clone ID: LIB3196-036-P1-M1-F8
atcgctcacctccctcctcggcaccatgaccacctgcagtcgccagttcacctcctccagctccatgaagggctcctgcggcatcgggggcggcatcgggggcggctccagccgcatctcctccgtcctggccggagggtcctgccgcgcccccagcacctacggcgggggcctgtctgtctcctcctcccgcttctcctctgggggagcctgcggcctggggggcggctatggcggtggcttaagcagcagcagcagttttggtgggggcttcgggggaggatatggggct

SEQ ID NO: 47273 - DNA, 374 bp, Gossypium hirsutum
  Clone ID: LIB3196-036-P1-M1-F9
cccacgcgtacggtctcacactcgaagaatttctctcctgcgccggagttatggcaccagagttccctgacccgaaccgtttcatgttcgcgctccatttctgcagggtcgatcgacgattcgagttggaggatgatgaggacggtgtcggatacggatttgagggatctggtcgtcccccagatgaaaaccgctaagaataataacgtgctcttgaatgggatctgtgtcgaggaggaagaggtggaagagtgtgggataggcggtggtgggggaaaaaactttggcggacgaagaggaagtggtggttcggactgtgaggataacgaatggggcttttgggattcgaaaaacggaaatgatagtactgattt

SEQ ID NO: 47274 - DNA, 363 bp, Gossypium hirsutum
  Clone ID: LIB3196-036-P1-M1-G10
cccacgcgtccggctgtccagtcatgtgatgcttcactgctgctggactccacaagaaggagcttgtctgagaaggagacagacaggagctttggcctaaggaatttcaggtacattgagaccatcaaagaagctgtagaaagggaatgtcctggagttgtttcttgtgctgatatccttgttctgtctgctagggaaggcatcgtttcgttgggaggcccttatattcctctcaaaactggaagaagagacggtagaaggagcagagcagatgttgtggaggagtatcttccggaccacaatgagaccatctctggcgttcttgacaggtttgccgccatgggtattgacacccctggagtc

SEQ ID NO: 47275 - DNA, 352 bp, Gossypium hirsutum
  Clone ID: LIB3196-036-P1-M1-G11
cacccttccaaaggggaataaaaactcctgcttctgatcaaatggtttttaattaattgagagaggggaaattcgataaagaaaaatggttctctgataaaaatttacgcctgtttcttcagcaaatatcgggaaggaataccccctttttttcccccctggtaactaattgttattgtgaagctttcttttagagaatactagttaactcgacccgcctaccccccaagaggagaagatgacaactcctcccctgaaaagaaagatttggtagtttttttagaagcttcccgatgctccttcccgaaatagaggtgcgacctcagataacaacattatgctttgggatgct

SEQ ID NO: 47276 - DNA, 393 bp, Gossypium hirsutum
  Clone ID: LIB3196-036-P1-M1-G12
atccggactacggggcgccgctgagccaagtgggcgacccgggcaaggacgggctcccgggtcacgtgacacggagctggccgaattctgcaggaggcaacgccatagcctagaggtgccacctcatggagacccccgaggccgccgcccctgccgggagcttatttccctccttcctgctcctggcctgcgggacgctggtggccgccttgctaggcgccgcgcaccgcctggggctcttctatcagctgctgcacaaggtggacaaggcaagcgtccggcatggtggagagaacgtggccgctgtgctgagggcccatggcgtgcggttcatcttcacgctggtcggtgggcacatttccccactgctggtggcctgtgagaaactgggca

SEQ ID NO: 47277 - DNA, 412 bp, Gossypium hirsutum
  Clone ID: LIB3196-036-P1-M1-G2
atgtccttctcacttcagagagacactcactcgtgttcttttcaaatattttgaggttccatctgtcttgcttgctccaagtcatctgatggctcttctgacgcttggaattaattctgccatggtcctagattgtggatatagggaaagcctggtgttacccatatatgaaggaatcccagttctaaattgttggggagcactacccctaggaggaaaagctcttcacaaagagttggaaactcaactattggaacaatgtactgttgacacaagtgctgctaaagaacagagccttccctcagtgatgggttcagttccagaaggtgtcttagaggacatttaaagtgcgtacttgctttgtaagtgatctgaagcgaggactaaaaatccaagcagcaaaatttaatat

SEQ ID NO: 47278 - DNA, 228 bp, Gossypium hirsutum
  Clone ID: LIB3196-036-P1-M1-G4
atccgcaggtgacgtggacatcggtgatgcagcctactactgcgagagggacgtcaagggcgagtctctattccagggccgcggcggcctggacttgcgcgtgcgcggagaagcccctgcaggtggagcgcacgctcatctattacctggacgagattcccccgaagttcttcatgaagcgccttaccggcgggcttatcggcgtcatcgtggtggtggtggtggccc

SEQ ID NO: 47279 - DNA, 397 bp, Gossypium hirsutum
  Clone ID: LIB3196-036-P1-M1-G5
atgagttttccctttttccactctgagtttcttttgtatggcctttacagtcatttgaaggtcatacctttaggcttggtgacttttgagtaattaaccctagatagcttcatgaatggtttatttggtggctcttagaacctatagtcatatctaaagagaattaaaaaccttaataaagtggtagtaccagcctgtagtacacagaaggctctgttctggcctttagcctcctaaaaagtcatagccaaacatttgctaatacttaatcctctgttatagcacacattcctgatcctagtttatgaggttttcagggtaaaaaaaaaaaaaaaatttaattctatcatgttttgctctgtcagtagaaataaaaccagataatcaaataatttgt

SEQ ID NO: 47280 - DNA, 318 bp, Gossypium hirsutum
  Clone ID: LIB3196-036-P1-M1-G6
atcgcccgcctgtgtgtccccagagccatggagagagccagtctgatccagaaggccaagctggcagagcaggccgaacgttatgaggacatggcagccttcatgaagggcgccgtggagaaaggtgaggagctcttcttcgaagagagaaacctggtctctaaagcctacaagaatgtggtgggcggccagagggctgcctggagggtcctgtccagtattgagccgaaaagccaccaggagggctctcgggagaaaggcccccaggtgcgtgagtacccggagaaagtggagactgagctcctgggcgtgtgcgac

SEQ ID NO: 47281 - DNA, 391 bp, Gossypium hirsutum
  Clone ID: LIB3196-036-P1-M1-G7
aaatttcttcacgaaattttcacacaatcatgcaatcatatcatagacctcaaaataatcataaaataattatttctatctcggattttgtggtaacgaaaccgctattccaactaggcccaaaatcaggatattacagtatgagaaagattacactcaaaatttagagtaggggtttaggctactactaaattcccaattaacacattgaatcgtgtccacaagcaactattctaaacactctccgatacactttcgtcaaaatgtcgaaagctcaaactagcctttctttagcttgtagaaggtcctaataaattcgaagcttcaacataataattcacacaataacacaatcaacaattagctaatgattcatcttaaacaataaaaa

SEQ ID NO: 47282 - DNA, 409 bp, Gossypium hirsutum
  Clone ID: LIB3196-036-P1-M1-G8
atctggccggcgcggcgctcccctgctctctggctccgggctgcggcgccgcggctggagcgagcccctgtcccggcgcggggcggcggcgggcggccggcaggcactgccttgcgtgtgagtgcacctcactcacatgtgctggagaatctggtaaaagcaccattgtgaagcagatgaggatcctgcatgttaatgggtttaatggagacagtgagaaggcaaccaaagtgcaggacatcaaaaacaacctgaaagaggcaatcgaaaccattgtggccgccatgagcaacctggtgccccccgtggagctggccaaccctgagaaccagttcagagtggactacattctgagtgtgatgaacgtgcctgactttgacttccctcccgaattctacgagcatgccaa

SEQ ID NO: 47283 - DNA, 403 bp, Gossypium hirsutum
  Clone ID: LIB3196-036-P1-M1-G9
atccagcctgcaggccgccattgctgatgctgagcagcgtggggaaatggcactcaaggatgccaagaacaagctggaagggctggaggatgccctgcagaaggccaagcaggacctggcccggctgctgaaggagtaccaggagttgatgaacgtgaagctggccctggacgtggagattgccacctaccgcaagctgctggagggcgaggagtgcaggctgaatggcgaaggcgttggacaagtcaacatctctgtggtacaatccaccgtctccagtggctatggcggtgccagtggtgtcggcagtggcttaggcctgggtggaggaagcagctactcctatggcagtggtcttggcgttggaggtggcttcagttccagcagcggcagagccattgga

SEQ ID NO: 47284 - DNA, 393 bp, Gossypium hirsutum
  Clone ID: LIB3196-036-P1-M1-H1
cttcgttgctctttctttcccttctttttctcttcaatggctgcctagctcgccagaccttttcggcacagacgtcccaaaatgagtgtcaaatcaataggctccgcgcctctgcaccccagacccgaattcgctccgaagccggcaccaccgagtggcggaaccccaactgtcaacagctcaggtgtgctggtgtatctgtaatgaggcacactattgaacctaacggccttgatttgccttgcttcaccaatgctcctcagcttctctacattgtccaaggaagaggtattcaagggtattgtgatgcctggatgtgccgaaacattacaggattcacagcaatggcagcatcaaagccagggcaaggtccaggaccagcaccagaaagtc

SEQ ID NO: 47285 - DNA, 346 bp, Gossypium hirsutum
  Clone ID: LIB3196-036-P1-M1-H10
ctaatttcaaaaatcttcaatgtttttcccttcttctatttcaaatctaaattttcgattcttcttgattcatcttttgttttaatttttcttctttaaatacttttctaagcagtttaacagtatagcacgactgttaattgtttaatctcttgctattttgagaattttattgtgaattttttcctttggattgctcttgaagttttctgttttttccgagatttttcgtttaaactggggaagttgcaggagtatttctaggttctgcaagatttgaagcaaaattcgtttctaacgatggctacggaggaccaaattgaaagtacagcatcacctactgctc

SEQ ID NO: 47286 - DNA, 374 bp, Gossypium hirsutum
  Clone ID: LIB3196-036-P1-M1-H11
acgagttcgcatttggaagcaatgcaacaggactcgtgaaaccgtgggaaggagagaggattcatgaagattgcggatcggatgacctagaactcacccttggcagttccaggactaggtgagttttttaagcttattgagtagatagatggccaaaattgactccttttgttttcccttcctgtttttactttgtgttacaataccttgcatataaagcaatctgtatgaactttgattccatattttgctctctgaaaaaagggaacaaaagggatcagggtgagcatgaatcttattattagccttcatttaattttataattttttttctctaaatatatagtcagtttttcaatggtgatttcttagca

SEQ ID NO: 47287 - DNA, 369 bp, Gossypium hirsutum
  Clone ID: LIB3196-036-P1-M1-H12
ctttttataagaactcttccaaggattatttcgttattattatttctacaatctaaagagacagagcaatgggaaaaacagagcaaaattcagttcttttagtcccaattttcttctttttattgacaatatcattgcctgtctctgtttatgccaagaaaccagtggcgattcctcgaaaagaagacattccttatattaaatgtcaagtttgtgagaagatagcatcacagttggttcaacaagttcaatcgaaacaaacccagatctctcccaagaagatctcagaatatcaaatcattgagattgcggagaatgtttgcaatttgaagaaagaagaagctgattggattttgaagattgatatag

SEQ ID NO: 47288 - DNA, 391 bp, Gossypium hirsutum
  Clone ID: LIB3196-036-P1-M1-H2
attttcacacaggcatgcatatatatcaaggatgatcgcgaggtttcgtgataggttttaaatatttataattacttgttcttgaactaactattatcgcgatgtaggcaagtgtacctatcgaacattagtatagtttttgcaaaaccggattatcgaacccaaaggaactaaaagtactagtaatgactgtctttttattatctagcctaagaataaagaatttttgttttaattaactaattatctaaactaagaaatcaaagagaaaagaattggggaattgctttttgggaaaaatcgattgacttaagacaatacctaaggacaaatccacctagactttacttgttattgtggctccgaatcggacgatgtattcattcaactt

SEQ ID NO: 47289 - DNA, 386 bp, Gossypium hirsutum
  Clone ID: LIB3196-036-P1-M1-H3
cgtgaactcaatgtcgaaacgctacgtgcctccgctacctcctccctcgcaacaatcaagccctttgttcaagcagcggtcatggtctcctgacgctgagcgagacgaggcgtggctcaggcggaaggaagtttacggctcggggatccgccgtagtcagagcttcacggaagatgatttggatgagctcaaaggttgtttagatttaggtttcggcttcgaaccagattcgcctgagttagatccgaaactatcccatgctttacccgctttgccgttttactgtgccgttaatcgtcagtacaatggcaggatatcgaggtcttcgtccgcgtcatcgatggactcttttagtgacgccggtagcgctaactcgataattgatc

SEQ ID NO: 47290 - DNA, 398 bp, Gossypium hirsutum
  Clone ID: LIB3196-036-P1-M1-H4
atgctattcttcctgactctctccctcctcccaccaaccactcttcaacaggacccagtgtgtgttgttccccgccatgtgtccatgtattctcattattcagctttcacttataagtgagaacatgcagtatttggttttctggtcctgtgctagtttgcaaagaataatagcctccagctccatccacgtccctgcaaatgacaagatcccattcctttttatggttatatagtattccatgataaatacacaccacattttctttatccagtctatcattgatgagcatttaggttgattctatgtctttgctactgtgaataatgctgcagtgaacatacatgtgcatgtgtctttataatagaatgatttacattcctttgggtatatacaca

SEQ ID NO: 47291 - DNA, 398 bp, Gossypium hirsutum
  Clone ID: LIB3196-036-P1-M1-H5
atcacgacaaaagaagcgcagaagttttctttatttacttgaacagccattatatcagcacattatgtatagctcctgtcaagaagtctgattgtgtctggaattgatgggttcttggtcttgctgacttcaagaatgaagccacggatactcgcgtcctgataacaacagcgtgacagcacatatacgactggtattcaagggtcccagatcaatggaagaaaacacaggaaaaggaattgaaagtatcttccattagatgctgaagaaccattcaggatccttgactacagatctgaattctctgaggcttatggaaatcagtaaggtcaatgctgcagaaattatcaacaaccgacaaaaaacccaaaaaactatactgtcagctttggcatgaa

SEQ ID NO: 47292 - DNA, 406 bp, Gossypium hirsutum
  Clone ID: LIB3196-036-P1-M1-H7
atcggtatctgaccaaccaaaaaaactccaatagcaaaaatgatcgaaggaaccggaagtttaaggaagctgagcggctcttcagtaaatcctcagttacctcagcagctgcagtaagtgcattggcaggagttcaagaccagctcattgaaaagagggagccaggaagtgggacggaaagtgacacttctccagacttccacaatcaggaaaacgagcccagccaggaggaccctgaggatctggatggatctgtgcagggagtgaaacctcagaaggctgcttcctctacttcctcagggagtcaccacagcagccataaaaagcgaaagaataaaaaccggcacaggattgatctgaagttaaacaaaaaaccacgagctgactattagaagacacgttagtg

SEQ ID NO: 47293 - DNA, 405 bp, Gossypium hirsutum
  Clone ID: LIB3196-036-P1-M1-H9
atcgtggaaggactcatgaccacagtccacgccatcactgccacccagaagactgtggatggcccctccgggaaactgtggcgtgatggccgcggagctctccagaacatcatccctgcctctactggcgctgccaaggctgtgggcaaggtcatccctgagctgaacgggaagctcactggcatggccttccgtgtccccactgccaacgtgtcagtggtggacctgacctgccgtctggaaaaacctgccaagtacgatgacatcaagaaggtggtgaagcaggcgtcggagggccccctcaagggcatcctgggctacactgagcaccaggtggtctcctccgacttcaacagcgacacccactcttccaccttcgacgctggggctggcattgccctcaac

SEQ ID NO: 47294 - DNA, 343 bp, Gossypium hirsutum
  Clone ID: LIB3196-037-P1-M1-A1
tcgcttatatttgggggaattggaaattcatacccatctttcaaatatataattacaacgaatatgaactaattgatgcattttgattctcaaagttaatataacaaatgacatttaagttcaaattgtcaagctcatgttttccaaacatacaataaattttaacattattgatttgaaaaaaaataggtgaggactaaaaaaatgcaggagaaaaaacaattttgtgatattccttattgcacgttaagcttttagactctttggttctttttacggagttaattatatgcgcaatatgattcacatcaggttggataagcggattgctatgtgggagaag

SEQ ID NO: 47295 - DNA, 358 bp, Gossypium hirsutum
  Clone ID: LIB3196-037-P1-M1-A11
caaaaaagaaaatgtcaagtgctttagagatgtcgctcgacgatctcatcaagcgtaaccgtaagccgagatccggcaaatctcgcggccggggacgtggatccggacctggaccggcccgccgttttcctaatcgtggagcaaaccgctcggcaccgtatgctcctgctaaggtgctggagacgacgcggcagcaggatatgttttccgataagggagcggcgttgcaaggactagcgggtcggaattctggaatagaaaccggaacgaagctctatatctctaatttagattacggtgtttcaaacgacgacatcaaggaattggtttctgaggtcggtgacctgaaacgattttc

SEQ ID NO: 47296 - DNA, 197 bp, Gossypium hirsutum
  Clone ID: LIB3196-037-P1-M1-A12
attttaaaaataaattgtttaagctgtttaagtaatgaattaagtctgttaacacctcgttttcgactccggcgatggtctcgggtacggggagttacagtaattctttcccatttccattccaaaatcgtaactggctgtaataatcccaaggcacctaatgctcagcttttacttgcagacatatcaaacattta

SEQ ID NO: 47297 - DNA, 240 bp, Gossypium hirsutum
  Clone ID: LIB3196-037-P1-M1-A2
cccacgcgtccggtatgttttgggcctggtaggctcgtattagggactttatgattgaatgcaaaaaattttaatttggacgcaaattgatgactcagaattttatgaaagtttgtgtgataagtccggtaatgcttcgtaccatgttttggaagtgatttgggactaaaccacctttctttgcttgtaaaacaaaaaaaaggaagtgaaaaaaataaagatgcaatacaaaataaatgg

SEQ ID NO: 47298 - DNA, 390 bp, Gossypium hirsutum
  Clone ID: LIB3196-037-P1-M1-A3
atgggcagtggtggcctgggtggcgcatgtggaggagctggctggggcagccgcagcctgtatggcctggggggctccaagaggatctccattggagggggcagctgtgccatcggtggcggctatggcagcagagccggaggcagctatggctttggtggcgccgggagtggatttggtttcggtggtggagccggcattggctttggtctgggtggtggagccggccttgctggtggctttgggggccctggcttccctgtgtgcccccctggaggcatccaagaggtcaccgtcaaccagagtctcctgactcccctcaacctgcaaatcgaccccgccatccagcgggtgcgggccgaggagcgcgagcagatcaagaccctcaac

SEQ ID NO: 47299 - DNA, 377 bp, Gossypium hirsutum
  Clone ID: LIB3196-037-P1-M1-A4
atgcggcgcacaagtcaggtttggcacatgtttccgaggagaggacccctcattgacggatgatatcacctcttcttctctggtgagagtctgaggatagagacctttttctcaccatgaatgtcaccccagaggtcaagagtcgtgggatgaagtttgctgaggagcagttgttaaagcatggatggactcaaggcaaaggcctcggccggaaggagaatggtatcacccaagctctcagggtgacactgaagcaagacactcatggggtgggacacgaccctgccaaggagttcacaaaccactggtggaatgagctcttcaacaagactgcggccaacttggtagtggaaactgggcaagatggagtacagata

SEQ ID NO: 47300 - DNA, 360 bp, Gossypium hirsutum
  Clone ID: LIB3196-037-P1-M1-A5
atggcgtggtgtatgtggaggtgcggaacaatccgcacgtgtttgccaattactaagtggtgccaatccctttgaaccagcctgaagaggactttattccagacgtggttgtgtccctagaggcccaactcctgctagagagggagcgagacttcatagtgaaggcccaacccatactgcactgcatgcgccaccagcctaactcatccctcgatgcagatgaattttgtcacaagtaccaccagaagactgtggcaagcacttaccttgctggacatgaaaccataccaggatgcaatctcttttctggacatgtgcacgtctaccatgatgctgcgaacagcgggatttaccatactg

SEQ ID NO: 47301 - DNA, 367 bp, Gossypium hirsutum
  Clone ID: LIB3196-037-P1-M1-A6
gttccaacgtcactaaagctgactgcttgctctctagtctctaccatgaagccaccaccaccatccctcaactcactaccactcttcctcttcctcctcctctccgccgtcatctccgccgctaccaccaccacaaatgccacctctaaacttccccctgctccttcccccaccactgaaactccctcttcttcttcctcctcctcttctactctagaccctaaacaaattgaagcacttgaatccctcaacattcccaccgcaagagacccttgcatccaaccttcccctcacaacgccaccgtttgtgacagctctaagccctttcgccacctcgtttccctccacctttccaactgctcctctg

SEQ ID NO: 47302 - DNA, 240 bp, Gossypium hirsutum
  Clone ID: LIB3196-037-P1-M1-A7
ccctatattttggggaaatttgggggcatacccacctttcttatgtacaattacaacgaatatgaaataatttacatatgccgctaaccaacgtcattacaatctgacgacagctcgctttaaaacccccgatcctgctattgcaacttctcggaaagatttacaggaattaccaccagtgcttttttcttatgttctccaatacatgaaaaaacaacaatattcagacttatcttataa

SEQ ID NO: 47303 - DNA, 367 bp, Gossypium hirsutum
  Clone ID: LIB3196-037-P1-M1-A8
cccacgcgtccggagtggtgcaagaagctcgcttttctgatggttgcaatggctctgcttcttcaggccatggtgcccccgacagcattagctgctcgtaacaatgtcatggaatacaatccattggcaagcgtattctcgagggaaggccctggctgcatcgcaaaaggcgggttttgcttgtttgacctaaccagttgctgtaggccttgcggatgccttgcagggtggtgctataacattgatcatgattgcaatgagtacacataatggtcgctactaagttaaaaaaaaaaaaaacagctctgagtcaaaaaatgacacgggattcgattataaatgttctatatataacatatgtatttga

SEQ ID NO: 47304 - DNA, 314 bp, Gossypium hirsutum
  Clone ID: LIB3196-037-P1-M1-A9
gtctagaaaacttgcttggttgatgagttaagaagcctagtttttaaagtaaatatgtcatattttgggagtatttattgagatatttggcacttggactctgctattgtgaaagggatgatttaatttaataagttggatctgatgatttagtggctttaaagcttttattctgttcagagctctttcttactgtcgcttacttgaattttatatttttaataattactaaactggtataaatggactgggagttaaaactttttacaatcaaataaattatcatttttttaatattgcaacggaaaataaat

SEQ ID NO: 47305 - DNA, 357 bp, Gossypium hirsutum
  Clone ID: LIB3196-037-P1-M1-B11
ccagagtctcttccctcatctacccccaaatctcctcacattatgtctttggtggccaacgaagattttcagcacattttacgtgtgctgaacaccaacgttgatgggaagcagaagattatgtttgcattgacctccatcaagggtatcggaaggcgattcgctaacatcgtttgcaagaaggctgatgtcgacatgaacaagagggctggtgaattgactgcacaggagttggacaatctcatgaccattgttgcaaaccccaggcagtttaaaatccctgactggtttttaaataggcagaaggattacaaggacgggaagtattcccaagtcgtgtctaatgctcttgacatg

SEQ ID NO: 47306 - DNA, 382 bp, Gossypium hirsutum
  Clone ID: LIB3196-037-P1-M1-B12
atgacgagagtgagacagcagtgaagccgctggcatctgcgctgctgcagatgatggaagggaacgggaacggccacgagcactgcagcgattgcgagaatgaggaggacaacagctacaaccggggtggtttgagtccagccaatgacactggagccaaaaagaagaaaaagaaacaaaaaaagaagaaagaaaaaggcagtgagacagattcaacccaggatcagcctgtaaagatgaactctttgccagcagagaggatccaggaaatacagaaggccattgagctgttctcagtgggtcaaggacctgccaaaaccatggaagaggctagcaagcgaagctaccagttctgggatacgcaagcccgtccccaagctgg

SEQ ID NO: 47307 - DNA, 373 bp, Gossypium hirsutum
  Clone ID: LIB3196-037-P1-M1-B2
ccctatatataggaaatctttagttgggtttgtggtctggatttaaaggaatccatgtatcatgttggatatatgagtagtaaaactctaatctaaccactaagtattattatgaacttcaattaagtttaattcgaaacatacaaaaacataaaatttacctttctttttgaaccaagctttgtatttttggaaatctttttgatagtgtcctttcttacaaaagtgacacttatctgccatttgttcctttttatcgccattagaaacattgacaggcaagttttttcttcttcttaaacttgttggttgttgctttaagtcctttgccagctccttgatccacaaggttgatggaattacttctttgact

SEQ ID NO: 47308 - DNA, 375 bp, Gossypium hirsutum
  Clone ID: LIB3196-037-P1-M1-B3
ggacacatagaaatcggttaatctatgaaagaaaatgtatgatgggtatggatatttcgaaacaaatctatagctatatttctgagttgaatggcttagaggagaaaaaactcaccttaaaaatagacagaggccacaaactgaaaggagaacgagggtgacaatttattttgatgcagcctttgacaagcgatcttccaaatctattttgggactggtaatacgagatgtggggggcgagatcttggcatcaaagacggttattcacaccgaagtaccatatctgtttgcggtgaaggcacatgcaggattataagccattcggttaggaatttcaatgggttttagcattctggaaatagtgcgggattcaag

SEQ ID NO: 47309 - DNA, 365 bp, Gossypium hirsutum
  Clone ID: LIB3196-037-P1-M1-B4
cagaggcagaaaagcaaacctgcttcaaagtgtttagctaagtctgcatcttttccttctgctgtgtctacccccgatgatgatgatgatgatgaaattgtaactgcaatgcagcgaatgttctctgaggattctgtgcagtcgctgtcgacctactcccgctcgatttctttgcctactcccttgaagctggtatcagcccttaaaggtagccgtgagaaacagggattgccgacaaagaagcttaccgtgaaatgggcaccagatgtgtatgatcctccgccgacatcagtattgcacacagttagaagcaaaaagcagcagaaatcaaaaaagaaaaatgacaagaataaaaatgggaagaa

SEQ ID NO: 47310 - DNA, 362 bp, Gossypium hirsutum
  Clone ID: LIB3196-037-P1-M1-B5
agcgaagaaaactctcgtatgcaatcctgcaatggacactgacacaactcaattgaagctcgcccttttagccgtatctttgcttttcttgccttttcttcaagccactgatttcaaatattgcgataatggaggtaattatgttgtgaaagtcaatggaatcgatatatcacctaatccagtggttagtggcaagccagccaccttttccatctcagcttctactggtcaagcaatctctggaggcaaagcagtgattgatgtttcctactttgggtttcatatccatcaagaaacgcatccactttgtgaggaaacatcctgtcctattgcagttggcaactttgtactctctcacaatc

SEQ ID NO: 47311 - DNA, 368 bp, Gossypium hirsutum
  Clone ID: LIB3196-037-P1-M1-B6
ggggagccgttggttccaacaacagttatttagggaggaagctattggagaaaatagtcgttgagggaaaacgcttctagctgcgggaagcgttttcattatttcaacccaatctcgtcatttttcaaaaaaaatggcctaatttagtaaatatcttaaaaaactgacatttttttgtaattcagtctaagttaaaattattttttgtttaccttactttcaaaagttacataatagtcaacaacactattagagttgtgagttttaaaaataaattatgatttttcaaaaaaaagaattttttgatatttttagaaattttgtttcgaatcatcattaaagaaattgtaaaagcaccaagctaaaaa

SEQ ID NO: 47312 - DNA, 374 bp, Gossypium hirsutum
  Clone ID: LIB3196-037-P1-M1-B8
atggccctgcggcagaccgtggaggccgatgtcaatggcctgcgccgggtgttggatgagctgaccctggccaggactgacctggagatgcagatcgaaggcctgaaggaggagctggcctacctgaggaagaaccatgaggaggagatgcttgctcttcgaggtcagagcggtggagatgtgaacgtggagatggatgctgcacctggcgtggacctgagccgcatcctgaatgagatgcgtgaccagtatgagcagatggcagagaaaaaccgcagagatgctgaggcctggttcctgagcaagaccgaggagctaaacaaagaagtggcctccaacagcgaactggtacagagcagccgcactgaggtgac

SEQ ID NO: 47313 - DNA, 373 bp, Gossypium hirsutum
  unsure (1)..(373): unsure at all n locations; Clone ID: LIB3196-037-P1-M1-B9
acgattaaatttaatctcaataaaaaggtaaattaagtaagaggatttcaacaataatgggttaatgggttaatgataagggttaataaataaaaaaaggttggtaggctcaaaggggtttcgctaagggtttaattatgtcggaaggctttttatggagtaaatgggttaaatcctaagtgcctttatcatcttagtatatcaaatcttacgtgtgatctcgacatgtataatcgaagcaagttctagaataacaattcaatgttgacacactcaaaccataaaagaagtgagcaagaaagaaagctatatgctcaaaaggctcaaaaatctcaccaaaaatttgggttnttgatgtcatttctgtatactt

SEQ ID NO: 47314 - DNA, 373 bp, Gossypium hirsutum
  Clone ID: LIB3196-037-P1-M1-C1
agctttagtagtttacatttgctgattctcagaagttgtgttttttttttggggggtatagagaaatagatcatggcaaaagtagatgaaccacagccacatccaccaaaggagcagctgcccaacatttcttactgcattacaagtccacctccatggcccgaggccatccttcttggtttccaacattatcttgtgatgcttggaacgacagtgatcattccaacttcacttgttccccagatgggaggtggaaatgaggagaaagcaaaggttatccagactctactctttgttgctggtttgaacacattattgcagtcactgtttgggtctagattgcctgctgtgatcggagggtcttatacctttg

SEQ ID NO: 47315 - DNA, 359 bp, Gossypium hirsutum
  Clone ID: LIB3196-037-P1-M1-C10
tctaagcctactcaaaatattgatttgtatttgttttttgaaagcatattagaggatttagcatgtgaaaaaattatttgacttgataatcacaatagagcatacactgaattacctattgctcaatcatatcgcaatttaaataagaatcactcttgaagctaaggtttttaatttagaagatggatggagcaaacaactacctcattagctactcaacgtgttactacagtggagtgcccctaattttcttctctttattacacactcttacttggactcacctttctagtcaacaacacgatggagcaaacaaagtggtgctgacttacttggcaattctaagcattggagtttct

SEQ ID NO: 47316 - DNA, 321 bp, Gossypium hirsutum
  Clone ID: LIB3196-037-P1-M1-C11
cccacgcgtccgctatcttagaagcaaaccccaacactttcgttctcccacaccattgtgacgctgagaaaatttaccttgtcaccaacggaagaggaacgcttacgttcttgacacatgaaaacaaagagtcttacaatgtagtaccgggagttgtagtcagagtcccagcaggaagcactgtgtacttggctaaccaagacaacaaggaaaagctaatcatagcagtgcttcaccgccctgttaataaccctggacaattcgaggaattcttcccagctggaagccaacgccctcagtcatatctccgagcctttagtc

SEQ ID NO: 47317 - DNA, 383 bp, Gossypium hirsutum
  Clone ID: LIB3196-037-P1-M1-C12
atgccatcctgacccccaatgacggccgctgtcacctggaggacaacatgtacaagaggagcaacgagttcgactacccatcggtgggccagctggcgcacaagctggccgaaaacaacatccagcccatcttcgcggtgaccaggaagatggtgaagacgtatgagaaactcactgagatcatcccgaagtcagcagtgggggagctgtctgacgactccagcaatgtggtccagctcattaagaacgcttacaataaactctcctccagggtcttactggatcacaacgccctccccgacaccctgaaagtcacctatgactccttctgcagcaatggagtgaccctcaaggaccagtccagaggtgactgtgacggcgtg

SEQ ID NO: 47318 - DNA, 374 bp, Gossypium hirsutum
  Clone ID: LIB3196-037-P1-M1-C2
aagaattttctttttctttttgtttgagaaaaatcttggaagagaaacgaacaatcatggaggaggctgtcaaagaacaacaatctgctgctcaaatttctgggagtgcagggaagtcgaagctacgttatccacttcgatcctcaatgaaaccaaaggagcagaagcctcccgcgcctgatttatccaattcttcttcatccagaagggggagggcaacacccagtgtaagcaagagtgtgggtgttctagatctttcaaaggagaaatctgggtcaggaaagccgcccaggaggctttccatcccaaccaaatcaacagtgactgcatccccaaaatttgttgggacaaccactcctatattcgagggtaga

SEQ ID NO: 47319 - DNA, 364 bp, Gossypium hirsutum
  Clone ID: LIB3196-037-P1-M1-C4
gtgaaaatggcaacccttaaggttccagctcatgtacctgccccttctgaggatgctgagcaacttcgtaaagcttttgaaggatggggtacaaatgagcaattgattatcgacatattggctcacaggaatgcagctcagcgcaatttgattcgtaaaacttatcgtgaagcttatggggaagatctccttaagtctttggatgaggaactttcaagtgactttgagcgagctgtggtgctgtttactttggaccctgcagagcgtgatgcatttctggctcatgaagctacaaagaggttcacatcaagccattgggttctcatggaaattgcttgcactaggtcttcacatgaactgttca

SEQ ID NO: 47320 - DNA, 366 bp, Gossypium hirsutum
  Clone ID: LIB3196-037-P1-M1-C5
cccacgcgtccgcccacgcgtgcgcgcacgcgtccggtcaaagcgtcagattcagagttatccacattgtggcttagccactagttcagagcagagtgcttcattcttcacaatatgccaaccgatacatatgcgatatacaaatattcatatttacagagtgcagttcattatcaaaaatagctatcacagtacatatacgggtatgctatacatatgtcaatcatagagcatcagagagccatcatacaatcgaattcagatcattcatactttgagcaagacagaatcaatgttggccacacatggcctcagagaaaagagattcaaacccgatttatttgccacacggcctggacacatgcc

SEQ ID NO: 47321 - DNA, 373 bp, Gossypium hirsutum
  unsure (1)..(373): unsure at all n locations; Clone ID: LIB3196-037-P1-M1-C6
attgccgcccagttactacagctgacgaatctagaacatgatgtctatgaaagacttaccaacctgcaggaagggattatcccaaagaaaaaagcagcaaccgatgatgatctccaccgaataaatgaactgatacagggaaatatgcagaggtgtaaactcgtgatggatcaaatcagtgaagccagagactccatgcttaaggttttagatcataaagaccgcgtcctgaagcttctgaacaagaacgggactgtcaaaaaagtgtccaaattgaagcgaaaggaaaaagtctagacccagaagaatcaggagtttggaagcaaattgatgaagaatgatggtgggggtgggggggagggtttggnttttc

SEQ ID NO: 47322 - DNA, 371 bp, Gossypium hirsutum
  Clone ID: LIB3196-037-P1-M1-C7
cccacgcgtccgccttaccttatctagggttagggttttgctccttctgagtttctctctcaataccaaaaatatctccaaattgaagatgatgcaacaaccagcacaagctatggtaccaccaccaatggctctaccaccttctatggcgggtgctccacagacccaacaacagtaccaatatcagcaaccacctccggctccggttcctcagacacaaccaccttacatgatgatgaacatgatgcagccgcctcagagtcatcctccacctatgtggcccccacaacaaggttcggctggggtaccagctcaacaacagccagcgggtcaaccggctaacgcagatgaggttcggactttgtggatcg

SEQ ID NO: 47323 - DNA, 388 bp, Gossypium hirsutum
  Clone ID: LIB3196-037-P1-M1-C8
atatcgaaagcgccgctgacaccacagctccgacctccctcagcgtggccgggaccctgagcagctgcgcagagccatgcgccccgatgtacttaggtggcacagccctgagacctctggccagcgccaggcgggcgtcggggccggcagaggcctggatctgagtctttgggctctgcctctccctggggacaggagggagcctgggggtgtgggtggggagccggccgaccctgacccagcgcctggctctgcccccaggagtggacagtgcgatgaaggaggaagtgcagaggctgcagtccagggtggacctgctggaggagaagctgcaactggtgctggccccgctgcacaagctggcctcgcaggcactggagcacgggct

SEQ ID NO: 47324 - DNA, 367 bp, Gossypium hirsutum
  Clone ID: LIB3196-037-P1-M1-C9
gttctgttttggccctaaatcgggttgttacaagggtttatgtttaaaaatttacccatgagtgacatgctggtattttgaggtttattggtagattatgcatgtttatgattagaggaacaacttttactgagtcgatgaaacgtccaaaaggaccgtttttgcaaaagttattaaattggtcataaaatggtgatttagtggaaattgggggctgctatagttatgaaaatgattcggctaggcttaaaatgcaaggaaattgaataaaaatcatttgacgagcctagaggccaaagtgtaaataagtgaaagtttaagggtcaaaatgcaaatttgtaaaagtatgatttatggacccacttga

SEQ ID NO: 47325 - DNA, 390 bp, Gossypium hirsutum
  Clone ID: LIB3196-037-P1-M1-D1
atggcttgggtggtggcttgggtggtggctttggtggtggctttgctggtggtgatgggcttctggtgggcagtgagaaggtgaccatgcagaacctcaacgaccgcctggcctcctacctggacaaggtgcgtgctctggaggaggccaacgctgacctggaggtgaagatccgcgactggtaccagaggcagcggcccgctgagatcaaagactacagtccctacttcaagaccattgaggacctgaggaacaagattctcacggccacagtggacaatgccaacgtccttctgcagattgacaatgcccgtctggccgcggatgacttccgcaccaagtatgagacagagctgaacctgcgcatgagtgtggaggccgacatcaatg

SEQ ID NO: 47326 - DNA, 382 bp, Gossypium hirsutum
  Clone ID: LIB3196-037-P1-M1-D10
atgtccgtctgcagctgcgtgactgtctgtctctgacatgtctctctccccatgccgggcccagaggggcttcagctctcgctcagcctgttctgctcgctcaaggggctgcagcaggggaggcttcagcagcaggagccttaattcctttggggggtgcctgggaggctctcgtgggagtacctgggggtcagggggaaggctgggggtgcagtttggggagtggagtgctgggcctgggctctccctgtgccctccggggggcatccaagaagtgaccattaaccagaatctgctgaccccactgaagattgagatcgacccccagttccaggtggtgcggacgcaagagacccaggagatcaggaccctcaacaaccag

SEQ ID NO: 47327 - DNA, 385 bp, Gossypium hirsutum
  Clone ID: LIB3196-037-P1-M1-D11
atctccgctcccgtgagtaacttggctccgggggctccggtcgcctgcccgtacgccgccagccacccaggaccgcgccgccggcctccgccgcgagcaaacccttccgacggccttcgctgcgcaggccgggacgcctctcccccctccgcccccgccgcggaaagttaagtttgaagaggggggaagaggggaacatggacatgaagaggagaatccacctggaactgaggaaccggaccccggcagctgttcgagaacttgtcttggacaattgcaaatcaaatgatggaaaaattgagggcttaacagctgaatttgtgaacttagagttcctcagtttaataaatgtaggcttgatctcagtttcaaatctccccaagct

SEQ ID NO: 47328 - DNA, 355 bp, Gossypium hirsutum
  Clone ID: LIB3196-037-P1-M1-D12
agaaaattgaacccatcttataaacaaaattctgatcatcaaaggattttattgtattgcatccgttacctaatataagaagagcttagcagtttggtactttggtctacgcgaaatattttcaaatctccatttaaagttgcacatactatgtagaaatacaatagaaagtggttaatctaaaaatcatcttctccaatctatacttctacacggctacagccgtttcctctgaagttgaaactaaactaacagcctctaaaatttgataaaagctgaattgaaagaacaaaataatcgataaagtgacataaatttcgcaccataaaaaacgaaattgagattcctagaatct

SEQ ID NO: 47329 - DNA, 371 bp, Gossypium hirsutum
  Clone ID: LIB3196-037-P1-M1-D2
attattttctccataccagcataaatcaacaatggcaaagctcgcagtttacttagccaccctggctctcattttgttccttgccaatgcttcaatcacatctgtgacggtcgaaagcgaggaaaaccgggatagctgtgaacagcagataaggaagcaagcccacctgaagcactgccagaagtacatggaggaagagtggggtggcgaaggcagcgacaatatagccggcgggtacattgactcatgttgccagcagctagagaagatggatacgcaatgcagatgtcaaggtctaagacatgcaacgatgcaacagatgcaacagatgcaagaacaaatggggagcaaacagatgcgagagatcatgc

SEQ ID NO: 47330 - DNA, 389 bp, Gossypium hirsutum
  Clone ID: LIB3196-037-P1-M1-D3
atccggagcgcatagacctcgcagacctcgccggcttcacactcacctcggtgtctgctgcacccgccgcttcttctcctaggccacgagacccagcggctagaaattcaccatgtctattctcaaggtccatgccagggaaatctttgactctcgtgggaatcccactgttgaggttgatctcttcacctcaaaaggtctcttcagagctgctgtgcccagtggtgcttcaactggtatctatgaggccctagaactccgggacaatgataagactcgctatatggggaagggtgtctcaaaggctgttgagcacatcaataaaactattgcgcctgccctggttagcaagaaactgaacgtcacagaacaagagaagattgacaaac

SEQ ID NO: 47331 - DNA, 363 bp, Gossypium hirsutum
  Clone ID: LIB3196-037-P1-M1-D4
aaaatatagagatatcatcatggttgttaaccaaacacgccatgggaggtctgaaagctgctggtttttaatactttgatatatgtgagttcaattcttgccctttactttgagatttttatgtttttgtgacttttacaattagttccaagtgtttaattcattagtttttattttatggacaaaattaaaagctatcattgataagtgttggcagtttatgatgaaataaaatgaattttaagctttgattttgttgtttgatgattttatcaagtaaattcaatagaaattgattttaggacctaattgtgaaaaagttgtgaattaaggttcagtgttaaaattataattctcaaaggt

SEQ ID NO: 47332 - DNA, 383 bp, Gossypium hirsutum
  Clone ID: LIB3196-037-P1-M1-D5
atctctcctgttacagaagttctgatttttcctagagacctggaggaaagtgatttgccttgaaggaaactggggagtcagaaaattgggaactcatatcagcatggcaagcctactgaaaacactggtgactggctgctcgtgtcctttacttagcaatttggggtcctgtaagggtctacatgtgaagaaggattttttacgaacatttcatactcaccaagaactgtggtgtaaagcgcctgtaaaaccaggaattccatataagcaactgactgttggagtccccaaagagatattccaaaatgaaaagcgagtggcattgtctcctgctggcgttcagaccttggtcaagcagggttttaatgttgtcgtggaatctg

SEQ ID NO: 47333 - DNA, 370 bp, Gossypium hirsutum
  Clone ID: LIB3196-037-P1-M1-D6
cggacgcgtgggcggacgcgtgggagatgtttgagatgctgtgaaagacacctatttagatttagaaaacgctttacagatctttgagttaaaaataaaactctagaaggctaggtaaggggaaaaagaaattacttttattataattagatgatgtctctttggcaagaactagatcaatgctataatgatgaatgagagtgtaccgaagatagtgtaaaagctatgaaaaaagaggagaatgagcgaacttatttatttctcgctggtttaaataaagaatttgatgaagtgagatctcggatcctaggaaaaaatcgctttcaacactccgtgagatttttttttgaggttagaagagaggagacaa

SEQ ID NO: 47334 - DNA, 374 bp, Gossypium hirsutum
  Clone ID: LIB3196-037-P1-M1-D7
aagcgcgctgcagcctcaggtaccgaatcccaattcccacctacacctacgcttactttctccctaccaccgtgtcttgacaaatgtttaacttgctcttaactaaacctacctagatctaattaacgctcttcacaactcttaaatcacatttataacctacaaaatcgatgaaaacaaaaataactttcttcatattattattgaatcatgcctatctgaaacactctcaatcatatcattataataagagaatgatagcgaacccaacatcaatataaccctctgatacattaactcattttgccaacttctttataagatggttactcaaatcaaatatcaaggtctaagacatgcaacgattctacaaa

SEQ ID NO: 47335 - DNA, 369 bp, Gossypium hirsutum
  Clone ID: LIB3196-037-P1-M1-D8
gtggcgccgggagtttcatgtacgagaacgtcgaccgtgtcccgccgtccgttgattggcgacagaaaggtgccgtcactgctgttaaggatcaaggccagtgtggtagttgctgggcattttcaacagttgtagcggttgagggaatcaatcaaattaaaaccaataaattagtatcattatcggagcaagaattgatagattgcgacactgaagaaaaccaaggttgcaatggtggtttaatggacattgcattcaatttcattaaaaagaaaggtgggatcactactgagtccaattacccttaccaagctaatgatggaagttgcgattctgccaaggtgaattctccggcagtggctatcgatg

SEQ ID NO: 47336 - DNA, 383 bp, Gossypium hirsutum
  Clone ID: LIB3196-037-P1-M1-E1
atgcagaaaccactccccacttggccactactcagcagcgctgactcattaaggaaacacaaaaaccgagagcaaccagacacaacagaaaaggggaaccctgacctgaggaggctcaaacggaggggaatagggcagatctcactgacgtagcaattaaatggaagagactttatcagaaatagtagggaaagcccgggcactgacccagacgaaaaagcatgcttctccatggtgaccaaattagtaatgtggaacatcaagcagaagatagattgcagaacaaagaggtaaaaaagccaagaaatagaaataagggtgggaaagagatttgaaaacacattaaggagagccttaatggatgaatgatttccatgaataat

SEQ ID NO: 47337 - DNA, 365 bp, Gossypium hirsutum
  Clone ID: LIB3196-037-P1-M1-E10
cggacgcgtgggcatggagtggtgcaagaagttcgcttttcagatggttgcaatggctctgcttcttcaagccatggtgcctccgacagcattagctgctcgtaacaatgttatggaatacaatccattggcaagcatagtctcgagggaaggccctggctgcatcgcaaaaggcgggttttgcttgtttgacctaaccagttgctgtaggccttgcggatgccttgcagggtggtgctacaacattgatcatgattgcaatgagtacgcataatggtcgctactgagttaaaaaaaaaaaacagctccgagtcaaaaaatgacatgggattcgcattcgattataaatgttctatatataacat

SEQ ID NO: 47338 - DNA, 370 bp, Gossypium hirsutum
  Clone ID: LIB3196-037-P1-M1-E11
atggacaatgctgagataagagtccacacagttgaggattatcaggcaattgttgatgctgagtggaacattctctatgacaagttagagaagatccatcattctggagccaaagttgtcttgtccaaactccccattggggatgtggccacccagtactttgctgacagggacatgttctgtgctggccgagtacctgaggaggatctgaagaggacaatgatggcgtgtggaggcttaaatcagaccagtgtgaatgctctgtcagcagatgtgctgggtcgatgtcaggtgtttgaagagacccagattggaagcgagaggtacaatttttttactggcttgcccaaagccaagacatgtaccttca

SEQ ID NO: 47339 - DNA, 366 bp, Gossypium hirsutum
  Clone ID: LIB3196-037-P1-M1-E12
attggcctaatcgaagtaaagtggtacccagtacctcatcgaatctatccgaagtacaatagtgacacccagtgtctcattgactcgagatcgaagaatccctgaactcttccaatcctatggcatgccaactatatctgactcagcccgactagttaatagggtattcgatccactttctcaattcaatatcactttcaattcatttacgaaacaattcaattatcttccacctttcaaccaacattcaattcacaattcaattcaaattcactttttcactttctaatcaatatacaattcaataccaatacatatttcagataagcacatataatcatactttgattcaattcaatccacttt

SEQ ID NO: 47340 - DNA, 391 bp, Gossypium hirsutum
  Clone ID: LIB3196-037-P1-M1-E2
atcattaatccagccatgatggctgctgcccaggcagcactacagagcagttggggtatgatgggcatgttagccagccagcagaaccagtcaggcccatcgggtaataaccaaagccaaggcaacatgcagagggagccaaaccaggccttcggttctggaaataactcttatagtggttctaattctggtgcagcaattggttggggatcagcatcaaatgcagggtcgggcagtggttttaatggaggctttggctcaagcatggattctaagtcttctggctggggaatgtaggcagtggggttgtggttggtggtatagaatggtgggaattcaaatttttctaaactcatggtaagtatattgtaaaatacgtatgtactaagaa

SEQ ID NO: 47341 - DNA, 389 bp, Gossypium hirsutum
  Clone ID: LIB3196-037-P1-M1-E3
atgccctcttgcttctctgatagctcccagcttactctctgcagccatgattgccagacagcagtgtgtccgaggcgggtctcggggcttcagctgtggctcagccatcgtaggcagtggcaagagaggtgccttcagctcaatctccgtgtctggaggtgctggccgatgctcttctgggggctttggcagcaggagcctctacaacctcggggggaacaagagcatctccatgagcgtggctgggtcacgacaaggcgcctgctttggaggtgctggaggcttcggcactggtggctttggcggtggatttgggggctccttcagcggtaagggtggccctggcttccctgtctgccctgctgggggaattcaggaggtcactatca

SEQ ID NO: 47342 - DNA, 382 bp, Gossypium hirsutum
  Clone ID: LIB3196-037-P1-M1-E5
atagaagcccgtggcctggagtcgaaggcccatttggggtttgctctgctgttgccaggtgccagtctgttttcagtgaggctttggacagcagtagggcagaaggcacctgccctttaactgtcagtgaccatgctagacactgttgataccgcctccccctacttccgtctccatcctcttgacgtcgacaccaaaccatttctcctctgtggtgctttaaaaactgtagcaaattttttgtatggtgcaagaatgcatggcctgggtctattggcaaccacagcagtttaaaactcactcagttgacaagcttctttctatcaaaatatctctctaaggcagacattgggactcattccttgaatgcagccctgccttc

SEQ ID NO: 47343 - DNA, 383 bp, Gossypium hirsutum
  Clone ID: LIB3196-037-P1-M1-E6
atcccggctgtcctacagtcctcaaggctctactccctgagcgggatggtgaccgtgccctccagcatcttgggcacccagacctacgtctgcaacgtaaaccacaagcccagcaacaccaaggtggacaagagagttgagataaaaacatgtggtggtggcagcaaacctcccacgtgcccaccgtgcccagcacctgaacttctggggggaccgtcagtcttcctcttccccccaaaacccaaagacaccctcatgatctcccggacccctgaggtcacatgcgtggtggtagacgtgagccaggaagaccccgatgtcaagttcaactggtacgtaaacggcgcggaggtgcatcatgcccagacgaagccacgggagac

SEQ ID NO: 47344 - DNA, 370 bp, Gossypium hirsutum
  Clone ID: LIB3196-037-P1-M1-E7
caattgtggtccaaatgtatatttgaaactttaattttgatttaatcatacacatttaaagaaataaatacatcaatttatttttatattggataaatataattattcatgtatgcaatatatagacataaaatgatgttatatcaataattgcattaataatttacaagaattagatcaaatcaaaatttcatgtataaaattgcacaaaatcaaaattcatgtatacaattgcacattaaaccatagttaatgtataattttggtatgtatccctaattaattaatttaaaattaaaaaaatctaattttacttaaaagtcatgagataaatgattagattatatatgaattttattttggtacaatt

SEQ ID NO: 47345 - DNA, 354 bp, Gossypium hirsutum
  Clone ID: LIB3196-037-P1-M1-E8
atcaggaagttataacatttagataaatgagtagaagtggacttccttcaacatattgttaccttgtctatccttaggaagaaaacaagagccacctgaaaatataggctcttttcgagaatctgctgaaatactattacagcaatttgaagttaatatggtaggaaaggaaggtggcttttcttgcaaaagtctttctaaacattcacactgtcctaagagatgagcttgcttgttttattccagtatattccacaaggtggcacttttagagaaaaacaaatccgatgaagactaaagaggtacttctaaaagagatttcattctaactctatttttctgtgcatatttaac

SEQ ID NO: 47346 - DNA, 361 bp, Gossypium hirsutum
  Clone ID: LIB3196-037-P1-M1-E9
caatctcatctctctcctttggtttcccttttgtctctctctctctttttccaaccctaaccctacctcaccaaccaggattcaacatgaagggaggaaaatccaagtcagatactaagagtgccaagctatccgtgaaatccaaagctggaaagaaatcggggaaggctgccaaggatccaaacaagccaaagaggcctgctagtgccttctttgttttcatggaggagttccgtgagcaatacaagaaggatcaccctaaaaacaaatccgttgcggctgtcggcaaagctggtggagataaatggaagagcttgtctgaagctgaaaaggcaccttatgtagctaaggcagaaaagcg

SEQ ID NO: 47347 - DNA, 372 bp, Gossypium hirsutum
  Clone ID: LIB3196-037-P1-M1-F1
tgagccttggaatccgcatggggagaatcatggtattcaaaagaactacaatttggatccctccctatgtgcatgggactcaagtgaccttgaatgaggaaaacctttcctacatgtttgatgaaacaacccctgttaaagattttgaaaaactgccttattatgttacacataacgataatataaccaaggaactggaacagaaaagggagacttcttcacacgttaaaaggcgaagaatgcttcagtttgacactcatgtatgtagattcttccctcatctgcaatgagatgccatctgcactcctaaaaccaagggttcttgctctcttttttttcttctttccatgcttaggagagggatgattcgat

SEQ ID NO: 47348 - DNA, 140 bp, Gossypium hirsutum
  Clone ID: LIB3196-037-P1-M1-F10
gccacggacggcgggcgctgatctgttcataaccaaccccacaaccaaattaccttcccctctccctttaatctcccatttaagtttctatctccacttccaaatgaatttttttaaaaaatttttaacttttatagggg

SEQ ID NO: 47349 - DNA, 382 bp, Gossypium hirsutum
  Clone ID: LIB3196-037-P1-M1-F11
aaaaagaaaacaaaaacacaaactcacacccagacccaatcccaattatccggattcctattttacactcttactcccacgatacgcgcgggtttctacagtttcaaacccacccccacaacatcacctgctttatacacccatcaactcattctacataaatcacccccacaattccattaactatttaattctatcaatccataactacatcaaacatatttccaaattcacttattgcatttcaaacaccacatctacatttctgaaaactataaaaccctaataataaacatccctaattacatatcccactacaagcattacatagactactacaaatactaatagtccaacacctcatccaacaattgtatgctaa

SEQ ID NO: 47350 - DNA, 366 bp, Gossypium hirsutum
  Clone ID: LIB3196-037-P1-M1-F12
ctgtaatataaactcataaagtattatcgggattaccagtccaggctgaatcccctgcaacgacaattactctaatgagcttggatctaaattatcagtctaggctaaattcagaccctaattcggattacccgtctgggataaatccattttacacgtattcttcgggagggctatatcaggataggatcactcgttcgagctagattctttttaccgtcaattccttttcattcaaccgggatttcttcccttttttatcaaatatatcaatgtttcatcaattttcatacaatgaatatttaaatcatattcacatcaataacatacatttcaagtatttaaaaatataatttaagttatacg

SEQ ID NO: 47351 - DNA, 354 bp, Gossypium hirsutum
  Clone ID: LIB3196-037-P1-M1-F2
atcggtcctacgcccgatcgcgcgctcgccccgccgctcgtggcggagtcccagggcccctcgcagccgccaccatggacgccatcaagaagaagatgcagatgctgaagctcgacaaggagaacgccttggatcgagctgagcaagcggaggccgacaagaaggcggcggaagacaggagcaagcagctggaagatgagctggtgtcactgcaaaagaaactcaagggcaccgaagatgaactggacaaatactctgaggctctcaaagatgcccaggagaagctggagctggcagagaaaaaggccaccgacgctgaagccgatgtagcttctctgaacagacgcatccagc

SEQ ID NO: 47352 - DNA, 368 bp, Gossypium hirsutum
  Clone ID: LIB3196-037-P1-M1-F3
aatcaatccagttatatatatgaaaaaacgtaccatggcaaagttcgctctcctcgtagccactttcgctctcgctttcttcctcgtcaacgcctccatctaccggaccacggacggcgacgaagaaaactggtaccgacacgatcggcgatcgtgtcaagaccagatatggcagcaaggctacctcccaaactgtcagtggtacatgaacgaacaggccggccgcagccacagcggatatgggaccccactacctcaactcgtgctgctacgagctccagaacctaaggcaggattgccggtgccaaggcttgaaacaggcgttaggacaacagctgaagctgcaaggagtactgtgggagagtcga

SEQ ID NO: 47353 - DNA, 368 bp, Gossypium hirsutum
  Clone ID: LIB3196-037-P1-M1-F4
cggacgcgtgggttcgatagaagcttgccaacccgtgaaaactcctcacttggctgatgttcgttggacacggccattcgttgatcgccttgaccttttcttggtcaacttctaatccacgagcacttaccacaaagcctagaaaaacaacttcattagtgcaaaaagaacatttctttaaattggcataaagtacctcttttcgcaagacttcaagcacggcacgtagatgttgaatatgatcttccaagctcttgctatagactaaaattccctatgaacgaacgtaaaacataattcatgagacgcatgaaagtactaggagcgttggtaagtccgaatggctttaccaaccattcatacaaacc

SEQ ID NO: 47354 - DNA, 388 bp, Gossypium hirsutum
  Clone ID: LIB3196-037-P1-M1-F6
atctggagtgctgctggaaacgcgttctgccaggctgcgcagctgcacctgcagctccagagcaagcacgacgcagccacctgctttgtggacgccggcaacgcattcaagaaagctgacccccaagaggccattaactgtttgatgcgagcaatcgagatctacacagacatgggccgattcacgattgcggccaagcaccacatctgcattgctgagatctatgagacggagttggtagacatcgagaaggccatcgcccactacgagcagtccgcagactactacaaaggcgaagagtccaacagctcagccaacaagtgtctgctgaaggtggctggctacgccgcactgttggagcagtatcagaaagccattgacatctacg

SEQ ID NO: 47355 - DNA, 283 bp, Gossypium hirsutum
  Clone ID: LIB3196-037-P1-M1-F7
gtggaattgtaggggaatgcgatggtatgtacacatgtggtaaaaaagactttaatctctctgtttcctgaggaaacttctgtgatgacagtgaaaatttctccatcttgacaactcttaaaatagtatgttaaaagattggaatatatgggtaaaaaaaagttaaatctaaaaaaaaaaaaaaaaaaaaaaaaaaaaaaaaaaaaaacgacgaaaaaaaaaaaaaaaaaaaaaggggcctcacaaaaaacgcccagcgaagcagacggctacaaaggaaaaa

SEQ ID NO: 47356 - DNA, 314 bp, Gossypium hirsutum
  Clone ID: LIB3196-037-P1-M1-F8
attgacaatgcccgtctggccgcggatgacttccgcacgaagtatgagacagagctgaacctgcgcatgagtgtggaggccgacatcaatggcctgcgcagggtgctggatgaactgaccctggccagagctgacctggagatgcagattgagagcctgaaggaggagctggcctacctgaaaaagaaccacgaggaggagatgaatgccctgagaggccaggtgggtggagatgtcaacgtggagatggacgctgcacctggcgtggacctgagccgcatcctgaacgagatgcgtgaccagtatgagaagat

SEQ ID NO: 47357 - DNA, 325 bp, Gossypium hirsutum
  Clone ID: LIB3196-037-P1-M1-F9
gcgacggacggcggccgatgatcggtcggtgaccgaccccctggccgaattcccttcccctctcccttttctctcccatttttttttctttctccccttccaaatgaatttttttaaaaaatttttaactttttataggggaccaaaacgcaccgttttggtcccccctacatttaacctgaaactgcactgttttggcctcgggttgagtcgacaccgacccactccagttagatccgcgtgtttttaaaaacagaacggctatctgcgcatttagcccttccggtttttcatgcatttacaatcagatattatttgttttcaa

SEQ ID NO: 47358 - DNA, 368 bp, Gossypium hirsutum
  Clone ID: LIB3196-037-P1-M1-G1
gggacgcgtgggatttttagagtttaccgaatcagtttagctatcctttttttgacacagaaccgcaatttaaaacagtatatcgacggggaagggctagataatttttttcttttcttgcttggcgatgtataaccaggtatcatgcaatagaaaaattccttaaaattcctggaagtattggcttgggcctagaaacggaagatcaggtaacccgtgaatccaacgagttggtttataataattcatgaaggaaattatcatatttccgcaagtcaattagatgcgaaatataaaaattgactttttttcgtagttgcacaagaggttttgttttttgttggaaagcctcttttttttttatctat

SEQ ID NO: 47359 - DNA, 362 bp, Gossypium hirsutum
  Clone ID: LIB3196-037-P1-M1-G10
cttctttagatcaaacagcaataaccttcaatgcacgtggggatgtaatttatgctatcctgaggagaaatcttgaagatgtgatgtcagcagttaatacccgtcgcgtgaaacatcctttatttgctgctttccgcacattagatgccattaactactctgatattgcaactattccagtggatcgatgtgttcttgactttgcaactgaaccaactgattcctttgttgggttgattacaatggatgaccaagaagagatgttttcatcagccagggtttatgaaattggtcgccgaaggccgactgatgatgattctgatcctgatgatgcagaaagtgatgaggacgaggatgacgac

SEQ ID NO: 47360 - DNA, 367 bp, Gossypium hirsutum
  Clone ID: LIB3196-037-P1-M1-G11
aactttcccatgtgggctacgacctgggtggcgggcgcatctacaagcccctgcggacccgggatgagctggaccagttcctggacaagatggacgaccctgattactggcgcactgtgcaggacccgatgacagggcaggacctgaggctgacagatgagcaggtggccctggtgcggcggctgcagagtggccagtttggggacatgggcttcaacccctatgagccggctgtcgacttcttcagcggggacgtcatgatccacccggtgaccaaccgcccggccgacaagcgcagcttcatcccctccctggtggagaaggagaaggtctctcgcatggtgcacgccatcaagatgggctggat

SEQ ID NO: 47361 - DNA, 368 bp, Gossypium hirsutum
  Clone ID: LIB3196-037-P1-M1-G12
cccacgcgtccggaaatgtgaaatgaaagttgtaatgaatgtgaaatgaaattaacattgaaatgaatatgaaataaaattaaaatataaattgaaatgaaaaaaatggaaacagaaaaaaatgaatatgaaaaaaaataaatttaaataaatttaaatgaaaaaaataaatttaaatgaaatgtaatgaaatgaaatatgaaatgaatataaaataaaatgaaattaaaatataaattgaaatgaaaaaaaacggaaaaaggtgacaatacattgcatgataggcttgtgttaggccattcaaaacgggcaatcaattggtcggcaccagcaggcagactttgaatggctagcactagtaggttatg

SEQ ID NO: 47362 - DNA, 399 bp, Gossypium hirsutum
  Clone ID: LIB3196-037-P1-M1-G2
gccccataatccccgatgcgacccacgcgtacacgtacgcatgatatttttagaggatgccgaatcaatatacttatccttcttccaacactggaacgcaattttaaacagtatatcgtcgtgaaatgctacataatttctatcttcttattgcttgttgatgtataaccagatatcatgcattaaaaaattactcaaattcatgaaagtattgacttgggcctaaaaacggaaaatcaactaacccctgaatgcaacaagttcatttataataattcataaacgaaattatcatatatacgcaagtcaattagatgctatatattaaaattgactatttttcctagttgcacaacaggttttgttacttgctggaaaccctgattattttttatctat

SEQ ID NO: 47363 - DNA, 384 bp, Gossypium hirsutum
  Clone ID: LIB3196-037-P1-M1-G3
atgcaagaattccctggattgtgaaatagtcagtgccaaatcttccgagatgaatgtcctcattcctacagaaggcggtgactttaatgaattcccagttcctgagcagttcaagaccctctggaatgggcagaagttggtcaccacagtgacagaaattgctggataagcgaagtgccactgggttctttgccctcccttcacaccatgggataaatctgtatcaagacggttcttttctagatttcctctacctttctgctcttaaaactgcttctctgctctgagaagcacagctacctgccttcactgaaatatacctcaggctgaaatttggggtgggatagcaggtcagttgatcttctgcaggaaggtgcagctttt

SEQ ID NO: 47364 - DNA, 369 bp, Gossypium hirsutum
  Clone ID: LIB3196-037-P1-M1-G4
caggaggaagcgaaaactggtcggcgtggaatgtggcagtatggagatgtggagtcggatgatgaggatttacttccgccagttgcggctaagaaaaccggaggtcggcgttaggtattgtaatttttttatcaatcactttttggggttaaacatctaaagagttctaagttataggtgtggatcattctcgtttgaagagttacaagagctccccgaaagaaaaatctcaaccataacatgcttaaattttgactctttttttaaaatctttttttttttttacattacgagagacaatttttttaatacatgtttaaataaggtgaacagtagcatttctgttatgtttccatgtgggagaccgat

SEQ ID NO: 47365 - DNA, 303 bp, Gossypium hirsutum
  Clone ID: LIB3196-037-P1-M1-G5
ttgaaatagattttttttaaatgggggcattttagtcatttagtaataaaaagaattaaaaagggggaaatcaagtcaaaattggtgtccatcttattcaccttggccaaatttctcaaggagaccatagctagggtttcttcaactttcaaggttgatcgtaagtacatcgtagccccttttttttgctttttacatttttgaagaacgactaacccgatttacctatttataccattattgcgaattaagggacatgtttaaaaaaatacccatgtgtgacaaccttgcatgagacatgct

SEQ ID NO: 47366 - DNA, 327 bp, Gossypium hirsutum
  Clone ID: LIB3196-037-P1-M1-G6
acgctaaagcaccttcgtgccccgccccaatatccccgatccgatccacgcttccgatgcaatgtaacctgaatctataggtggatgaactgataagggatttaacaataatgtactgatgtggtcatgataagggcttataaataaaaaaaggttggtacgctcaaaagggtttcgcttagggtttaattatttctgaatgcttattataagatcaatatgctaaatcctaacgacctttttgatttttatatatcaaatgttacctgtgttctcgacatgtataatcgaatcaaggtgtagaatcacaattgaatgctgacacac

SEQ ID NO: 47367 - DNA, 385 bp, Gossypium hirsutum
  Clone ID: LIB3196-037-P1-M1-G7
atctcccacccccccaagtaggtggggctagaagcgtgcaccatcacacctggctatttctgtatgttttgtatagacagggtcactatgttacctgagctggtctcagactcctgggctcaagcaatccttccactttggcctgtatgcctacactcaagtgtaaagacatataaaccatgtctatactaaccagccaaatacctgaacactaaaaagaataattttcttgatgtggtaatggtatcatggttgtatagaatgttcctcttcttgggagatacgtgctgaaaatctggtttgacatctaaacctatttttgttttggcaaagaggacatgtgtctgtacaaaagaaatggagccagcgtggcaaaatgtttaca

SEQ ID NO: 47368 - DNA, 384 bp, Gossypium hirsutum
  Clone ID: LIB3196-037-P1-M1-G8
atgtttctccaggctggaccagtagtcaacacccacatgccaaaggatagagtcactggccagcaccaaggctatggctttgtggaattcttgagtgaggaagatgctgactatgccattaagatcatgaacatgatcaaactctatgggaagccaatacgggtgaacaaagcatcagcccacaacaaaaacctggatgtaggggccaacattttcattgggaacctggaccctgagattgatgagaagttgctttatgatactttcagcgcttttggggtcatcttacaaacccccaagattatgcgggaccctgacacaggcaactccaaaggttatgcctttattaatttgcttcatttgatgcttcggatgcagcaattg

SEQ ID NO: 47369 - DNA, 376 bp, Gossypium hirsutum
  Clone ID: LIB3196-037-P1-M1-G9
atgtttctccaggctggaccagtagtcaacacccgggtggcaaaggatagagtcactggccagcaccaaggctatggctttgtggaattcttgagtgaggaagatgctgactatgccattaagatcatgaacatgatcaaactctatgggaagccaatacgggtgaacaaagcatcagcccacaacaaaaacctggatgtaggggccaacattttcattgggaacctggaccctgagattgatgagaagttgctttatgatactttcagcgcttttggggtcatcttacaaacccccaagattatgcgggaccctgacacaggcaacttcaaaggttatgcctttattaatttgcttcatttgatgcttcggatgc

SEQ ID NO: 47370 - DNA, 383 bp, Gossypium hirsutum
  Clone ID: LIB3196-037-P1-M1-H10
gaacgctggtgcgccttcaggccccgccccaaaattcccggtgcaacccacgcactagctaaaaagctattaggcgtacagagggttacaaaatgattacgtgaatgacacaaactaaacatttcaaacataagtgactaaaatccacctataaggagcactggtgaccatcagtgctgcttacccttacaataaggatatttgataggaccaaatatacaaaattcacacatcaattaaacgcacagagtggaatatatgaccaagatatttaaaaagtgtatgcattaagggtgcaaatttaaaataccaggaatacagtatttaatatacaagagaaaatgtataacctgaacatacagaatgatgtctgatttattaga

SEQ ID NO: 47371 - DNA, 362 bp, Gossypium hirsutum
  Clone ID: LIB3196-037-P1-M1-H11
tacctagtggccctggcaaccagacagaagatgaagttcccctcctacaaaacatatattggaaagagttatcgtcgctcgtgtatgtatggattggttttcttattgtgcagatcattaaggaatatcttccaacttgctcagtcatgtactggattgtgacctccttgcagatacccattgctgcctctgtgacaatctttgaagccatatgcttatgcaaagggaccagagtgattgcatccaaaggaaaggaaatcacaaactggaagatgcatcggattcttctttattgttcctgtggcataatagctggtatggtaggagggctgctaggactaggaggtggcttcatcttgggt

SEQ ID NO: 47372 - DNA, 285 bp, Gossypium hirsutum
  Clone ID: LIB3196-037-P1-M1-H12
gcgcgcacgcgttcggatacttttctgcattcgctaagcatcactggccttgtgttcaagcctgatgcacacgttacaagtcggtggaagatgtgaagcctctgtctcactgaggattttaaaggtcaattatacttttgttgttcattagcatctttgtaaactataagacatagttttaattaataaatattgcccccagattgtatttattttgaaaaaacaaaaggaaagcggccaagaaagaaaaaaaaaaaaaaaaaacgggggcggcccccctggaag

SEQ ID NO: 47373 - DNA, 357 bp, Gossypium hirsutum
  Clone ID: LIB3196-037-P1-M1-H2
cggacgcatgggattaaattgaaagggagatttcaactttaacaataattttaaaaaattaaattatttataatgtcgaaacctttttttgcttttttttttaaatcaacttatattttgaaaataaagatggaatcttcaccaattttttttatgaggtctgaccgaatcacctcataatttgattgttttactaaaaagcttgatttgctaaaacaatgatttttgttctacaaaaattcaaaaaatgggggcgggagtcgatttcacacgaggaagaattagcaccctcgttacgcccaaaattggtacctaattgattactcgacgtcttagtaccgaaaattaaaattttga

SEQ ID NO: 47374 - DNA, 362 bp, Gossypium hirsutum
  unsure (1)..(362): unsure at all n locations; Clone ID: LIB3196-037-P1-M1-H3
cagaaggtgaatagcatcattagagatgccattgattttaaatgtgtcgcagaattccaaaaaattcgccaagtgggtgtttgggtcctcatcctgcaaaccatcaaactgaacaaattgctgtatcatttgaatcatgttaggtttcagtttaaaattatttgtagcaatagcaggcctaactatacttgactcagttcctgttaaattcggtttagcataatcatacatagtgcgtggagcatgattctgatttactggatcagcggcaatcgcaggaggtagtgaattttcatgattttcagccatctcctcggttgtggtttgaatatcngcctcttgctcttcctctgtgtatttta

SEQ ID NO: 47375 - DNA, 386 bp, Gossypium hirsutum
  Clone ID: LIB3196-037-P1-M1-H4
atctcggcgcgactcgcttcattcggttctacctgggagaatccaccgccatccgccaccatggtgaacttcacggtagaccagatccgcgccatcatggacaagaaggccaacatccgaaacatgtctgtcatcgcccacgtggaccacggcaagtccacgctgacagactccctggtgtgcaaggcgggcatcatcgcctcggcccgggccggggagacacgcttcactgacacccggaaggatgagcaggagcgttgcatcaccatcaagtcaactgccatctccctcttctacgagctctcggagaatgacttgaacttcatcaagcagagcaagggacggcgccggcttcctcattaacctcatcgactcccccgggcacg

SEQ ID NO: 47376 - DNA, 368 bp, Gossypium hirsutum
  Clone ID: LIB3196-037-P1-M1-H5
tacctaatggacatggcgggcgggcagaacatgaagttccgctactacaaaacatatataggatcgcgtgctttgctgcacagtacgttctgataactctctttctttctaaattgcctacagactccaagaatgaaaaggctctgggccgcataataaactcctgggaattatcaaggtgtgggcattcattcctgagcaacttgcacttgacgaatggcgaactggtcatgcaagaaatggggatttactacatggtattccaaacatactatgaatttcaggaggatgtctaggactacacaaagaacggcaagcacatggcccaatatatttacaaatacacaagttatcctgaccatatactg

SEQ ID NO: 47377 - DNA, 372 bp, Gossypium hirsutum
  unsure (1)..(372): unsure at all n locations; Clone ID: LIB3196-037-P1-M1-H6
gcgcgccacgcgttcggaacttttctgcattcgttatgcatcactggaaaattgcaaaacctttatgcaaatgttccaagaagttgctgaatcacaaaaaccaaaagaggaaaacaaggatgcatctgatgctgctggacaacttgagaagttgagctttcaagagaaagctggagagaaggctgttgctaagaaggaagagaaggaaacaaaagtggatacagaaaaagcagatacagagaacaaagatggggagccagcttcctcaacttgaaaagagtttggctctgttcttcatgccattggcttttggcgaatatggtgagattagtcagctgatcaacctnctcacccatgtctaggatattccta

SEQ ID NO: 47378 - DNA, 367 bp, Gossypium hirsutum
  Clone ID: LIB3196-037-P1-M1-H7
gtgctcaaaagattatttatcaagtgggccaaaagcgaggtaggttgaccattgatgaagaggatgatcaacccaagaagaaggttcgtcttggtgttcctgctacacagtggatttcaatctacaatgcaagacttccaatgaagcagaggtatcattacaatgtggcagatgcaaggttggcccaacacgtggagaaaggaatggcagatggtctgctaataagctgtgtggcatcttataccaatctttgggcattaattatggatgctggaactggtttcacaagccaagtttatgagctttcaccttccttcttacacaaggagtggatcatggatcagtgggagaagaactattacattag

SEQ ID NO: 47379 - DNA, 322 bp, Gossypium hirsutum
  Clone ID: LIB3196-037-P1-M1-H8
gaaaagttcttctttcttcagcattttctgagttcttttcggataatgggccagttgatatgatggatgaagatgccatatcgaacctttctgtacgagtcaaattaagtttgacagtttgggactttattattccaacaactccctcactacctgctgtctttggtatatctgatactgtaattgaggatcgctttggtgtcggacatgggagcagtgagtggtatgatgcactggagcaccatttcaagtggctttttcagtacagaatcagcccatacttttgtagatggggtgatagcatgcgtgttttaacttacac

SEQ ID NO: 47380 - DNA, 381 bp, Gossypium hirsutum
  Clone ID: LIB3196-037-P1-M1-H9
atgcaatgtaagtactatctaaatagctattatactacatcgggttttttatttttttcttgttttgcactttctagtattttcaatccgaggttggttgactccgcagataaagtggactggaaaagtacagtcatccctaggtgtacgagagggattggttctaggacccctaccaaaatccacacatattctagtcccccagtctgccctgtggaacctgtgtatatgaagagttggagctctgtgtgtgcagattccacatcccaagaatactgtattttctctccgagtttggttgctgaacctgcacatacagagggtggactgtatgtattggaaaaaaaaatagcatataagttcaaacctgtggtgttcaag

SEQ ID NO: 47381 - DNA, 307 bp, Gossypium hirsutum
  Clone ID: LIB3196-038-P1-M1-A1
atgtgagccaagccatttacctgctgaccagccgggacgagagttaccagttcaagacgggtgctgaggtcctcaaggtgagctccccccaggcctgactctcgggcctatagagtcccacgtcctggatccagaatcacacctgggttccaatcccagggcctccacttggagctgtgcaacctctaagcacttacctgcctactctgtgtctccattttctacctgtggggtcaggggcaagctgcagtaaccgttcgccatgataattcaggtcatggagcccccagtaagcactcggcacata

SEQ ID NO: 47382 - DNA, 111 bp, Gossypium hirsutum
  unsure (1)..(111): unsure at all n locations; Clone ID: LIB3196-038-P1-M1-A10
aacaggaacccctccgcttccagtcccctatccccaattccacccacgtttcactcaccactntcaaattttcttatgtctctaaccctattataccatataatctaacca

SEQ ID NO: 47383 - DNA, 346 bp, Gossypium hirsutum
  Clone ID: LIB3196-038-P1-M1-A11
atcccagcccatccctgtgtcagccctgagtgctggacgctgtgttccacaaatgaggaagaggagagagagaagagatggacagacctcagatccattaaagcgttctcacttccctgagacttggttctgggtccttaaaaccaggtttcctcggctggggccctgtacacagttggtgtttaatgagtgtgtatggagaggagagttctaaggtcacctctggctgcaggcatccaggggttattccagcaatatgcaggtagggcgtgcatcccagcctgggagcctgctgtcaggagcaggcagacctagactccagcctggctgtgatacgtgctcgctc

SEQ ID NO: 47384 - DNA, 329 bp, Gossypium hirsutum
  Clone ID: LIB3196-038-P1-M1-A2
attgccgccgtcccgcccgccagcgccctagcgaggaagcagcgcgcagcccgcggcccagcgcacccgcagcagcgcccgcagctcgcccgcgccatgttccaggcggccgagcgcccccaggagtgggccatggagggtccccgcgacgggctgaagaaggaacgactgctggacgaccgccacgacagcggcctggactccatgaaggatgaggagtacgagcagatggtcaaggagctgcaggagatccgcctcgagccgcatgaggtgccgcgcggcgcggagccctggaagcagcagctcaccgaggacgggggactcggttc

SEQ ID NO: 47385 - DNA, 316 bp, Gossypium hirsutum
  Clone ID: LIB3196-038-P1-M1-A4
gatcattcgctgctctcttcgatctcaaggactgccggtggcagcaatagagccagttcccgagagttgcgtgtcctctgtagaggagagaacgatggaggaaagggaaaggtggtggaagatgggattgaaggctatatcggaaggcaaattggctgttttgcttctatccggtggccaggggactcggcttggaagttcagatcccaagggatgtttcaacattggacttccttctgggaagtcactttttcaactgcaagctgagcggattttgtgtgttcaaagattagccgcacaagctaaaaatgagggc

SEQ ID NO: 47386 - DNA, 316 bp, Gossypium hirsutum
  Clone ID: LIB3196-038-P1-M1-A5
gacgcggagaaaatttacgttgtcactaacggaagaggaacagttacgttcgtgacacatgaaaacaaagagtcatacaatgtagttcctggagttgtagtaagaattccagcaggaagcactgtgtacttggccaaccaagacaacagggaaaagctaaccatagcagtgctccaccgacctgtcaataaccctggacaattccagaaattcttccctgctggacaggaaaatcctcagtcatacttacgaatcttcagccgtgaaattcttgaggctgtcttcaatacacgaagtgagcagctagacgagctgt

SEQ ID NO: 47387 - DNA, 383 bp, Gossypium hirsutum
  Clone ID: LIB3196-038-P1-M1-A6
atggagtttgagactagcctgagcaacaaagtaagactcctcatgtcaacagaaaatgtaataaaataaataaaaagaatagtcccagtatcaaatgttcagactcatctcactttcttaggatcttaagattgaaagtgatgttcaagaaccaactgaaccagaggatgaccttgacattatgcttggcaataaaaagaagaaaaagaagaatgttaagttcccagatgaggatgaaatactagagaaagatgaagctctagaagatgaagacagcaaaaaagatgatggtatctcattcagtaatcagacaggccctgcttgggcaggctcagaaagagactacacatacgaagagctgctgaatcgagtattcaacatca

SEQ ID NO: 47388 - DNA, 227 bp, Gossypium hirsutum
  Clone ID: LIB3196-038-P1-M1-A9
ctcccattttcttatatctcgaaaccccataaaccaaaggatcgaacccatttcagattgtattcaatggcatcatcggacttgaaagaatcagctgccaataaccctgggcttcatactacccctgatgaagctaccaaagactacatcatgcagcaaactatgtttcgaattaaagatccaaaagccagtcttgatttttactctcgtgtgttgggcatgtcgct

SEQ ID NO: 47389 - DNA, 281 bp, Gossypium hirsutum
  Clone ID: LIB3196-038-P1-M1-B1
cggacgcgtgggggaactttgtgtcttcctattgagaatggcctcacccagaatctgtgaaattgcatccatccaaatataaaattttcattctgcaaatacttaaatttgaactctttttttttaaccttttaattctgttcccattaaattattaaaatgaatattatcttaaaaagcatcttaattttaataattttagaatgttaaaaaatatcaaatgaacaattgttttttatttaaaaaggaattttatatacaatatgcaattttatgggttt

SEQ ID NO: 47390 - DNA, 284 bp, Gossypium hirsutum
  Clone ID: LIB3196-038-P1-M1-B10
catcatccttggcatggatgtgtctcatggctctcctgggcagtctgatattccatcaattgctgcggtggtcagctcccggcagtggcctttgatttcccgctatagagcatctgtgcgtacacaatctcctaagcttgaaatgatagattctctattcaaaaaagtctctgacaaggaggatgaaggtatcatgagggaggttctcttggacttttatacaagttcaggaaagaggaagcctgatcaaattatcatattcagggatggagttagcgagtcgc

SEQ ID NO: 47391 - DNA, 376 bp, Gossypium hirsutum
  Clone ID: LIB3196-038-P1-M1-B11
atggggagttttgtgcggtgggtgagccaagaaaatactaattaataatagtaagtgttggttaagttgttgcttggaagtgaaaagttgcttagaaaggttagaactttaagtgcaaagaaaagaaaaaaacccaaaacaattgttttcctttgctgcaaggtggggaagactgaaaaagtgtaaccgaaaacagatgacacagagtcacccgttttcctagaacccacagggaggggtgtatgatgccatctcacaagcagggcaagtgtctttaccagcttcctcccggtgaccaaggcagcctgttttagagggttgttttgtttggggtgtgggtgttatcaagtgaattaatcactagaaagatgagtgt

SEQ ID NO: 47392 - DNA, 264 bp, Gossypium hirsutum
  Clone ID: LIB3196-038-P1-M1-B12
ggcttgcaggctttcagaggaaggtttttgatgtcttatacaaggttgctgacattcctttcttaagcaaatacaagcatcaaattctcgatcttattgagcatgctgagacacagccgaacctcaccattggtgtcttggtctctattgtggtgattattctcacgattttcttcaagctcatttttggtgggaagaaacagccaagagtagagaagaaaccagaggttgctaaaacatcaaatggtgaaggaaagcagggag

SEQ ID NO: 47393 - DNA, 334 bp, Gossypium hirsutum
  Clone ID: LIB3196-038-P1-M1-B2
attaatttgaaacaaaatagaaaaatatggaaaattttgaaaaattttggaaacagaggtcacattgctatgtggccaagccgtgtgatagagcctagtccatgtggctcagaaacatggccatatggccaaaccgcgtacaattagaaataagggtcacatggtcgtgtcaaatctcgtgtgcccacctgtgtacaattcgaaataaggtacgtggtcatgtcccagaccgtataacaacctatgatcgtgtgtgataaacctgcagcaaaattaaatagtccacttggccttgtagtgtgaccatgtgtggcacatagccatgtgacagatc

SEQ ID NO: 47394 - DNA, 279 bp, Gossypium hirsutum
  Clone ID: LIB3196-038-P1-M1-B3
atgcctaccgcgcgaggacgtgatccgcctctgctccggcttggattgcagccttgacgaggtctgagcgaccatggacgggccggggttcatggcgtcgctggtggctggtggggtagcaggtgtttctgttgacttgatattatttcctctggataccattaaaaccaggctgcagagtccccaaggatttaataaggctggtggttttcgtggaatatatgctggtgttccttctgctgctgttggatcccttcctaatgctgctgcatttttatc

SEQ ID NO: 47395 - DNA, 382 bp, Gossypium hirsutum
  Clone ID: LIB3196-038-P1-M1-B4
cccacgcgtccggcgaaggttggaggtaattggagcattatcacactatccattagctcattttgggtatatatagtaaaatcattttggtataatggcatgtataggctagcatgaccatagatggcttaaatatgtggtttgtaatctagctattggaatggctagtaatggatgtttttgatatacttgtaatgtcatactatggtagctatatacaagttaaaagatgtgccaaattatgcctatcatatggaatataccaaggtcagattctaaacatgtatgcatgtaatgatatgccatgttgaatgatagagcttgcttaatttgaatgcttgaaatgggtggtatgtagattgaggttaagtgcagatcattg

SEQ ID NO: 47396 - DNA, 347 bp, Gossypium hirsutum
  Clone ID: LIB3196-038-P1-M1-B5
caaaattagattaattaactggagaaaggcgttaatgaatttgcacaggtttaactcacccatcagagtcagttacaactacatggatatttctatgatgatattgtcaaattataacttgaaacacggatcatatcttacccaatcttgaaggcatacataatcctcttcaggtcggtattttgtattgttcttcccagtaacgatctctaatgcaacaatcccaaaactataaacgtttgccttgaaggtgagatagccccataatgcatattcaggggccatgtatcctctgcaaaaaatggagctttaagcgcaacattctcatgcatatcaacttcgttcac

SEQ ID NO: 47397 - DNA, 351 bp, Gossypium hirsutum
  Clone ID: LIB3196-038-P1-M1-B6
ctcaattctcaaaaccctaatttctctgctttcccttttgcttaatcaatcgatccttgtcaatggccaacagtaatctccctcgaagaatcatcaaggaaactcagcgtctcctcagtgaacctgcacctggaattagtgcttcaccatcagaggataacatgcgatatttcaatgtgatgatccttggtccaacacagtcaccatatgaaggtggggttttcaagttggaactatttttgcctgaagaatatcccatggctgctcccaaggttcgatttcttacaaagatatatcatcctaacattgacaagcttggaagaatatgccttgatattctcaaagacaaat

SEQ ID NO: 47398 - DNA, 266 bp, Gossypium hirsutum
  Clone ID: LIB3196-038-P1-M1-B7
ttgaaagtaagatcagaatctaaattctgaaaatgccaaaatacatgttacggaggaagtacagactactaaactattcaagagaaagttcaaacagactgatagagaacctaagttcaaaaagaacaaaagggctcatgctataattatggtaagccaagatattttaaaaatgaatgtcgatttttaaagaagaaatcatcttctaaggctaataataatgaaaaagtttgtacaatgatatctgaaattaatatgcacaagat

SEQ ID NO: 47399 - DNA, 255 bp, Gossypium hirsutum
  Clone ID: LIB3196-038-P1-M1-B8
atcacaaatgtagtaagtgcagcaattcatatggtacagaatgggacctgaaaagacacacagaggactgtggcaagacctttcggtgcacatgcggctgtccctacgccagtagaacagcattgcagtcccacatctaccgaacgggccacgagatccctgcagaacacagggacccacctagtaagaaaaggaaaatggaaaactgtatgcaaaaccagaagttatccaacaagaccattgaatcattgaaca

SEQ ID NO: 47400 - DNA, 362 bp, Gossypium hirsutum
  unsure (1)..(362): unsure at all n locations; Clone ID: LIB3196-038-P1-M1-B9
atgtttcgacagcactaatttaatgctgatatactctagatgaagttttacattgttgagctatcgctgttctcttgggaactgaactcactttcctcttgaggctttggatttgacattgcatttgactttttacatagtaattgacatgtgccagggcaatgatgaatgagaatctacccccaggtccaagcattctgagcaactcttgattatccataaagagtcaaatggtaggcattttctatcacctattntcattcaacaagagcactacattcatttagctaaacagattccaaagagtagaattccagtgaccgtaattaatttcaaaaaacttttaataataataataattt

SEQ ID NO: 47401 - DNA, 377 bp, Gossypium hirsutum
  Clone ID: LIB3196-038-P1-M1-C12
ctttagaattgcaacgaaaactcagttttatcaaatacaacatttttcttaaatgcaaacgattttctttaaatatcacaattttaaaagcttctgctacagaatatgtttctaaacgaatcaaattaatgagaaaatagttttgaaattgatgaaaaataaataaaagctaataaatggaaacgattttaaattgataaattcgatttcaaattctattccatatgacatcgccagatttggccataatgtctaggccaggtttggggtgttacatgaaccatgtaggaattaactgagtcgaatatgtgcttagaaactagaacacttctagccttcgacttgtacactaccaaatcaaaactaacccgggtttg

SEQ ID NO: 47402 - DNA, 126 bp, Gossypium hirsutum
  unsure (1)..(126): unsure at all n locations; Clone ID: LIB3196-038-P1-M1-C2
ggaaggactctttatggtttcggtggttgattttgggttttagggtcttttttgttgtaaatctttcgttgcaactgcttgttgtaggtttttctttgtttggattaatgtattttcgtttcgntg

SEQ ID NO: 47403 - DNA, 307 bp, Gossypium hirsutum
  unsure (1)..(307): unsure at all n locations; Clone ID: LIB3196-038-P1-M1-C3
gtggatttgcacaatgtaggaacatttaatgttgataccgggttcaaagccggttatttgaacgagctagagaaaatgctagaaaaggctttaccaagagcaatgttgaaggcgaaaccaaatattgaatctcggattagttgcctaaaaagggaatggtcagtcgtctatgacatgcttaatggccaaaacaatagcggttntggttgggacgagcataggcagctcgttgttgctgaaaatacagtttgggaatcctatgtaaagagtcacaaagaagcctctcagttcagacatcgttcttttc

SEQ ID NO: 47404 - DNA, 341 bp, Gossypium hirsutum
  Clone ID: LIB3196-038-P1-M1-C4
atgtgctccttgcttcctccgctttcttccgagtggtcgcgtgaacggcttcctgcagcctggccatggcgcttcacgttcccaaggctccgggctttgcccagatgctcaaggagggagcgaaacacttttcaggattagaagaggctgtgtatagaaatatacaagcttgcaaggagcttgcccaaaccactcgtacagcatatggaccaaatggaatgaacaaaatggttatcaaccacttggagaagttgtttgtgacaaatgatgcagcgactattttaagagaactagaagtacagcatcctgctgcaaaaatgattggaatggcttctcatatg

SEQ ID NO: 47405 - DNA, 349 bp, Gossypium hirsutum
  Clone ID: LIB3196-038-P1-M1-C5
cccacgcgtccgtttttgatgaaactgttattctacctaacttatctcttaaaggctcttccaataaagaaaatcaaaagtagatggaacatcagattaatccagaatctacaacagagtcgacttctcaagccagtacaaaaattcagaaaagagttatttcttcaccacaatactctatcgccaaaaacagaactagaagagaaattaaacctccaaagaagtataccgaggctgatctagttgcttatgctttaaatttggctgaagatatatgtaacaccccaaacctggtctaaacgttatgaccgaatctggcgatgtcacatttgaacacccctaacccgta

SEQ ID NO: 47406 - DNA, 391 bp, Gossypium hirsutum
  Clone ID: LIB3196-038-P1-M1-C6
atgaaatgtggggccaaacctgcggggtccggcctggtctcctgccttctgggcccagccctggggcctgtgcccccagaggcctacaggggcaccatgctgcactgcccgctgaacttcactggcaccccaggccccttgaagggccaggctgcactccccttcagccccctggtcatcccagccttcccagcccacttcctggccactgcgggcccctcacccatggctgctggcttgatgcacttcccgcccacgtccttcgacagtgctctccgccacagactttgcccggcctcatctgcctggcatgcaccaccagtcacaacctatgcagcgccccacttcttccacctcaacaccaagctgtaggccagcacatgtggagtcg

SEQ ID NO: 47407 - DNA, 312 bp, Gossypium hirsutum
  Clone ID: LIB3196-038-P1-M1-C7
gattaattgaaatggctttgtaataatactcctattatctcattaattcatgctatggattcccctattagatttgactctaatccagtagatttatgtagtcttatttgtaggattgcatgcaattccattcaattacactaaatctaatatgaaacagggtctactcaaccattgatttaagcatatcgaacatggattaataatctagaaatatcaaaccaagaattaagcacacataattgagaacaagaaactaagaatttattgcgtaaaataaaaatcaaatgacagaatccatgtatttagaaa

SEQ ID NO: 47408 - DNA, 298 bp, Gossypium hirsutum
  Clone ID: LIB3196-038-P1-M1-C8
ggtaaaaatacaaggattgttaaccaaggaaaataattcgtggtaaagacaagatacacttggaccagaaaaacccgtgctcaaaaaaaacctttttgagcacgggttttttcagtaaaaaaaatcaaatggattcaaaatgtattcaactagggttttctggaccgtatcaataagctagacccatacttcgagttgtttcatgccataaataaactcgaacgctcaagatatccgttggaaaagcggattcacatctcttacaaccaacacaatcttctgtttttggaggggaagc

SEQ ID NO: 47409 - DNA, 319 bp, Gossypium hirsutum
  Clone ID: LIB3196-038-P1-M1-C9
gatgctatggatagagatgacaaccaagcaagcaaaaagctccgtctaaggtctacatctcggtcaaggtcactatcacgacctcctggtgaagttataccgggagagggcttgaaggattctgctcagaagataaaggctattaaattggccaagaaatctgtgttaaagaggaacaaaaatgctcgccgtggggaggctgatagagttattcccacattgaaaccaaagcatctgttctctgggaaacgttccattggaaaaactcaaaggcgataagaattggtgttggggagagaagattttgtttgggtttttg

SEQ ID NO: 47410 - DNA, 356 bp, Gossypium hirsutum
  Clone ID: LIB3196-038-P1-M1-D10
gcgtgggctcatatgcaatttaatcagactgtcgaaacagcgtgttgatattgagaagcctaggcaccggacagttatcacctcggatgttcggcagcaaattatgatgatgaaccagaatgctaggggagaatgggagaaaaagcaggctgaggcagagaagctccagaaacttaatgaacctgaggctgagactgcctttgatggtgacaaggagaaagatgacagtcgagtaaaagcagtaaaggtaaataaggaggaggatgacaagatgaggaccactgctgcaaatgttgctgctcgtgctgctgttggaggggatgacatgctgtcaaaatggcagcttatggctgagc

SEQ ID NO: 47411 - DNA, 365 bp, Gossypium hirsutum
  unsure (1)..(365): unsure at all n locations; Clone ID: LIB3196-038-P1-M1-D11
atgcagcaaatactgtaaacgtgcagttttttttttggggggttatgtatacaaaagtttaactactttttggtgttcatgaaaaccatttagttgaccaggtgcctatgccattgttcagttttctttaacaacagatttgcaaattaaaaaaaaaaaagaaaaaaaaatcttaccagcagtttgtaaaggtctggaatcacagttggcatcctttattcaggtctcttctctccagtgtgcacttaaaagtggtgccgagcagggataaaacctgcagttaagggaaaagaaaatccagcctccctctccaaaaaaaaaaatacatttaattnttaaaaattagtggtatggcaataagacac

SEQ ID NO: 47412 - DNA, 329 bp, Gossypium hirsutum
  Clone ID: LIB3196-038-P1-M1-D12
atgccggcagagacccaccgagcgtcggcggagggagcggcgccggggcgcacgcggccaccatgacccagacgcccgccttcgacaagcccaaagtggaactgcacgtccacctagacggagccatcaagcctgaaaccatcttatactatggcaggaggagagggatcgccctcccagctaacacagcagaggggctgctgaacgtcattggcatggacaagccgctcaccctgccggaattcctggccaagtttgactactacatgcctgctattgcgggctgccgggaggctatcaaaaggatcgcctacgagtttatagagatg

SEQ ID NO: 47413 - DNA, 315 bp, Gossypium hirsutum
  Clone ID: LIB3196-038-P1-M1-D2
atgcgagaggagtggggggagcgcggggcaggaggagtacctcggccaagaaaattatgcatgcgttagggaagctctgagagaatggctgtggaagctcttcactgtggtttgaatccacggggcattgatcaccctgcccatgctgaaggtattaaactgcaaattgaaggtgaaggtgtggaatctcaatccattaaaaacaaaaatttccagaaggtgcctgaccagaaaggaacccccaggcgactgcaggcagaatctgagacggctaaggtgcgtaatattccagttaattacggagatttgaaagct

SEQ ID NO: 47414 - DNA, 211 bp, Gossypium hirsutum
  Clone ID: LIB3196-038-P1-M1-D3
atgaaaaaagttgagaagtctgtcaatgaagtgatggaatggatgaataatgtcatgaatgctcaggctaaaaagagtcttgatcaggatccagttgtacgtgctcaggagattaaaataaaaatcaaggaattgaacaacacatgtgaacctgttgtatcacatccgagaccaaaaattgaatcacccaagctggaaagaactccaaatg

SEQ ID NO: 47415 - DNA, 273 bp, Gossypium hirsutum
  Clone ID: LIB3196-038-P1-M1-D5
acgtgcaccatcatatctcatttaattcggctctcttgttcacatagtgaacacttagtaccactcatgcgacctaaccaatttgtctggtacctctattgactacatggtgtgcttcactcggaatcacgcatgcgagctaactacattgatctttcacgtagctctcttgtgtacatgggatacatgcagtctcacacatgtgacctagctactacatagtatctggtaactttcttgtacacatgatgtgcactcaggaccatacatgtg

SEQ ID NO: 47416 - DNA, 359 bp, Gossypium hirsutum
  Clone ID: LIB3196-038-P1-M1-D7
cccaccatcatatggcatttaattcggctctcttgtacacatagtgaacacttagtaccactcatgcgacctagccgatttgtctcgtagctctcttgactacatggtgtccttcacttggaatcacgcatgcgacctaactacatttatctctcacgtagctctcttgtctacatgggatacatccagtatcacacatgtgacctagctactacatagtatctcgtagctttcttgtacacatgatgtgcactcagcaccatacatgtgacctagctatgctccctctattttattcgatctttccgaatgttcaaccaggatctctctctctattacttacttcgattcttccgata

SEQ ID NO: 47417 - DNA, 324 bp, Gossypium hirsutum
  Clone ID: LIB3196-038-P1-M1-D8
atccgcgcgaggtgaccggagtcacagttcccgcgggcggcgacagcagagcgcccactgcctccagcagattaatattaagattggaagtttgtatcttttgctggatattggaaattgaagtaatggcaacagaatttataaagagttgctgtggaggatgtttctatggtgaaacagaaaaacacaacttttctgtggaaagagattttaaagcaacagtcccacatagtcaaaatgctactatctctgtaccttccactgacttctgtttctgtaaagcctcaggttggctgtactgaggattatttgctttccaaatta

SEQ ID NO: 47418 - DNA, 364 bp, Gossypium hirsutum
  Clone ID: LIB3196-038-P1-M1-D9
gtcagtttcgagcacgggctagacgcactggcatgtgactggccatgtaacccaagtcagtagcctccctaattttcacacagcctggcacacgggcgtgtcatgtggccgtgtggacaagttagtatgtatgccctgttttgccacggcctagacacatgggtgtgtttaaatccgtgtgaggcacacggcctattcacacaagcgtgtgacctctgtaatttagaaaaaattgtttagttttgaaaaattttgtaagtgttcggtttagtcccgacctcttcctaatgcatgtttaaggtctcattgacctaagaaagggacttattgttgatattttaatatgatatgatgatatataact

SEQ ID NO: 47419 - DNA, 407 bp, Gossypium hirsutum
  Clone ID: LIB3196-038-P1-M1-E1
attgtattcaaagatgatttcatagtgccaagcaacatggtgatccagtggttatgtaaaaataataaaacatgaggtgtcctgaaagttttggggcagtttttagctttaatatagtgtgcctgggccctccagaggactgcagcatataggtacatgctgtaaatctttacaaaatatcatttggaagtgtaattgtatttcttctttttatttttaatagatggtgcctcactatattgcccaagctacagtgcaatcagagacacaatcatagcgcaccacagcctgaaaaccctggcctcaagcaatcttcccatgtcagtctaccaagcagctgggaccataggtgtgtaccaccgcctctaggtttattttggagaatttgaatgttaacttttaacttt

SEQ ID NO: 47420 - DNA, 360 bp, Gossypium hirsutum
  Clone ID: LIB3196-038-P1-M1-E10
aaatctccctaatgaaaggcaagaggaagctaaaagactcctcactcgttgccttgatattggaatctctgctcttcgttctaacctctccgccattgacgtcgttgaacttgtcgtgagggaattggaaacggatcctttgtttaattccgggcgtggatcagcacttacggagaaagggacggtggaaatggaagctagtattatggatggaccgaagagacgatgcggtgctgtttcgggtttaacgacggtgaagaatccgatatctcttgctcgacttgttatggataaaacaccacattcgtatttgggttttgcccgcgccgaaaaagttgcgaggaaacaaggtgtggaagt

SEQ ID NO: 47421 - DNA, 332 bp, Gossypium hirsutum
  Clone ID: LIB3196-038-P1-M1-E11
cccacgcgtccgaaattttcgtacttcattgaagttacagtatagctagatacggtattcggtcaattttatgcataaatttaccaaaattcgggttatatatatttccatcatacataaatgtattgttttaaggttttgctagggcgtttatatatgatgtaatgatttttgttgattttcttgttgctgaagtttataggcttagttgttgcttcagtctgaagttaatctctcatttggttttacagtggatttcaaagcaagtttgcttatgttttgaatttggattaggtcttttccattttgcatttgcagtttaattttggaat

SEQ ID NO: 47422 - DNA, 297 bp, Gossypium hirsutum
  Clone ID: LIB3196-038-P1-M1-E12
ggcgattaacccttgtttgctctttctttcccttctttttctcttcaatggctgcctagctcgccagaccttttcgtcacagcagtcccaaaatgagtgtcaaatcaataggctccgcgcctctgcaccccagacccgaattcgctccgaagccggcaccaccgagtggtggaaccccaactgtcaacagctcaggtgtgctggtgtatctgtaatgaggcagactattgaacctaatggccttgttttgccttccttcaccaatgctcctcagcttttctacattgtccaaggaag

SEQ ID NO: 47423 - DNA, 361 bp, Gossypium hirsutum
  Clone ID: LIB3196-038-P1-M1-E2
atgcctgcgacaggctccccacaaccatcccatgctgtgaaggacggaaacaggagaggaagggactggagatccctggcgggaggtggctgaggcagggatggaccctgctcaggttttctgagccctggattgtggtttgtccttcagttttctggtaaaagatgtagatgaaattgagccagcagagagatctcataaaaggaagcaggtttcaggatcacccagaccttggttcggatcctaaccccgggaactttccagctctgtggcctagacagacctccccctctttgaagctcagtgttgatagtgctcattttcaaagataatagttccagcactttgagaggctgaggca

SEQ ID NO: 47424 - DNA, 325 bp, Gossypium hirsutum
  Clone ID: LIB3196-038-P1-M1-E3
aagctttcaacgttgaccacgacatcattaggaaaatccaacgtgtacgaggaaatagaggcaccatcatcagagtcagggacagactccaagtcgtaacaccacccagaatggaggaagaagaacgtgaggagcgccagcaggagcagcgataccgccatacgagaggagggtctcaagataatggcctcgaggaaactttctgctccatgaggatcaaggagaaccttgctgaccctgaacgtgccgacattttcaacccacaagccggtcgtatttccaccctcaacaggtttaacctccccatcctccaacgacttgagct

SEQ ID NO: 47425 - DNA, 335 bp, Gossypium hirsutum
  Clone ID: LIB3196-038-P1-M1-E4
atgaaatgtggggccaaacctgcggggtccggcctggtgtcctgccttctgggcccagccctggggcctgtgcccccagaggcctacaggggcaccatgctgcactgcccgctgaacttcactggcaccccaggccccttgaagggccaggctgcactccccttcagccccctggtcatcccagccttcccagcccacttcctggccactgcgggcccctcacccatggctgctggcttgatgcacttcccgcccacgtccttcgacagtgctctccgccacagactttgcccggcctcatctgcctggcatgcaccaccagtcacaacctatgc

SEQ ID NO: 47426 - DNA, 348 bp, Gossypium hirsutum
  Clone ID: LIB3196-038-P1-M1-E5
atcgaggagaccaggctgctctaacttctgaagagtgggctccggctcaagactccaatcggccagaagcccacagagatcaaagcactagcaagttcagctgtcctggccctcaggcagaacccactggagtgcctgggtgtggctccacccacatgccccactgtcagcccaggcaggagccttcctggccaggctcaagatctgcctgcagcccagccaggccatcacccagccccgatgcatcctggcactgcacgcttactcttcacaagcacttatatgcggatggcctccgagaccctgcctccctggtctgctgaggccaggccaggtctcccacggggc

SEQ ID NO: 47427 - DNA, 305 bp, Gossypium hirsutum
  Clone ID: LIB3196-038-P1-M1-E6
cccacgcgtccggtgatggaaggtatttcagcgaccatgtacaagaacttgaaagggtactggcaaaggagaggctacatcaagctaaatggtacgaaaggaggaggacggcggagcaaggtggagcttgggtcgtcgcgacggaggcgattctggaagataagggtgaaagcgaagctgagattaccttcgcccaagaagttctttgtttggctacgtgatgcgtacgtgaaaatgatgctggagttggctaactacgcgatggttagtaccggctacggtggagctatgggggaccatcatgg

SEQ ID NO: 47428 - DNA, 300 bp, Gossypium hirsutum
  Clone ID: LIB3196-038-P1-M1-E7
gtaatcatggtgaggaacaagtcagttttcgtaggtttgctcttttctcttttcctttcctttggcttgctttgctctgccaaagacttccccggcagaagaagcgaggatgatcctcaacagaggtacgaggactgccggaagcgatgccaattggagacacgtggacaaacggagcaagacatgtgtgaagacaggtgtgaaacgcagttgaaggaggagcagcagcgtgacggagaagatcctcagaggagataccaggattgccgacaacactcccaacaggaagaaagaaggctg

SEQ ID NO: 47429 - DNA, 383 bp, Gossypium hirsutum
  Clone ID: LIB3196-038-P1-M1-E8
cggacgcgtggggcagacacacactctcattctctctctgtatttcctttgtctctttaatggctactttcttcttcttcctcctctccttccttatctgctttcacttctcaagtgctgagccgtttattggagtgaactacggccaagtggcggacaacttaccgccgccatcagccaccgcgaagcttctaaaatcgacgtcgattgagaaagttagattgtacggagcggatccggcgattatcaaagctttggctaataccgaaattgggatcgtaatcggagcagctaatggagatattccttctttggcttccgatccaaactcagcagctcagtggattaactccaacgtgttgcctttttaccctgttagcaaa

SEQ ID NO: 47430 - DNA, 365 bp, Gossypium hirsutum
  Clone ID: LIB3196-038-P1-M1-E9
gatctcaccattactcagatccaaatcctcttttgcaaggggaaggatgttgatagtggatagtgcttgaagcgatgagtcggccccaagacccttaattcaagatgcagttcagtattccggtgtcttggatcggactggatttgttgacaaatgcatttttgaagcagataacaaatctaaaaatgcttttccagtcaacaaataccagtttgagctgagattgggctgagatttacaaacctcttcctcactcaattcaacagtctgattccgggaaagttcctttcttttgaatttacttttaaattttactaggtaatgtttagtttgcagtcgtttcttccctctcttcgacatatttt

SEQ ID NO: 47431 - DNA, 362 bp, Gossypium hirsutum
  Clone ID: LIB3196-038-P1-M1-F1
ccaaaccaagaaacaaaactattaaaaggatgaaatttaatccaataatcattgggaaaacatatttttaaataaaaaataaggttgtatcttccttaccggttccaatggacagaacatagtttcaccgatagagaggaacagaaaacgtgagaaggaggctgctttctgattggtgttcaaagtccagttgtaacgccaaagagaggtaaaacagaaaggtaaaagcgtgaatcggtggagatagaaaggtaagacagaaaggtgaggagagtggaaaagaaaggtggaaggaagaaccagattacggtggattttgggtaagacagaagcgtgaatcaggagggtaaaacagggaccaa

SEQ ID NO: 47432 - DNA, 335 bp, Gossypium hirsutum
  Clone ID: LIB3196-038-P1-M1-F10
cttcgaagacctatcatctctgttattctattaccgattggatccaaacaaaggatttaatggatcattggtattttctaggattcttgcttcttattttgcttcaactctgtttggtttcagctgagatcaatggatcggtgcttgaaatgaagagaggaacttcttcggttccatttgatcccactcgtgttactcaactctcatggcaccctagggctttcctttacaaaggatttttatcaagtgaggaatgcgatcaccttattactctggctaaggataaattagagaagtcaatggtggcgggatatgaatcaggtgatagcattgag

SEQ ID NO: 47433 - DNA, 283 bp, Gossypium hirsutum
  Clone ID: LIB3196-038-P1-M1-F12
attgaggagattgctcagaggagccgggctgaggccgagtcctggtaccagaccaagtacgaggagctgcagatcacagcgggcagacatggggatgacctgcgcaacaccaagcaggagattgctgagatcaaccgcatgatccagaggctgagatctgagatcgaccacgtcaagaagcagtgtgccagcctgcaggccgccattgctgatgctgagcagcgtggggaaatggcactcaaggatgccaagaacaagctggaagggctggaggatgccctgc

SEQ ID NO: 47434 - DNA, 294 bp, Gossypium hirsutum
  Clone ID: LIB3196-038-P1-M1-F3
agctcgcagtttacttagccaccctggctctcattttgttccttgccaatgcttcaatcacatctgtgacggtcgaaagcgaggaaaaccgggatagctgtgaacagcagataaggaagcaagcccacctgaagcactgccagaagtacatggaggaagagtggggtggcgaaggcagcgacaatatagccggcgggtacattgactcatgttgccagcagctagagaagatggatacgcaatgcagatgtcaaggtctaagacatgcaacgatgcaacagatgcaacagatgc

SEQ ID NO: 47435 - DNA, 371 bp, Gossypium hirsutum
  Clone ID: LIB3196-038-P1-M1-F4
atgattttggcatcaagaactaacaaagaaatcagagacattaacagggtctacagagaggaactgaagagagatctggccaaagacataacttcagacacatctggagattttcggaacgctttgcttcctcttgctaagggtgaccgatctgaggactttggtgtgaatgaagacttggctgattcagatgccagggccttgtatgaagcgggagaaaggagaaaggggacagatgtaaacgtgttcaataccatccttaccacccgaagctatccacatcttcgcagagtgtttcagaaatacaccaagtacagtaagcatgacatgaacaaagttctgggacctgggagtgaaagtgacatttgaga

SEQ ID NO: 47436 - DNA, 316 bp, Gossypium hirsutum
  unsure (1)..(316): unsure at all n locations; Clone ID: LIB3196-038-P1-M1-F5
attgcttctgcctttgctttgtgcttcttactctcaaccaaaaatgactgctcaggccgacaaagagatcgaagagattctggcagcccatctcgaccaacaaaaaatcgattccgagaaaccagagcaacctgttgttgaagatgacgacgaggaagatgacgatgacgatgatgatgaagatgatgccgaaggtcatcatgagggagaaggagatggaactgttaggtcaaagcaaagccgaagtgaaaagaagagtcgcanagctatgttgaagcttgggatgaaaccgatctctggtgtcagccgggtcact

SEQ ID NO: 47437 - DNA, 406 bp, Gossypium hirsutum
  unsure (1)..(406): unsure at all n locations; Clone ID: LIB3196-038-P1-M1-F6
atgggaagttgttggaaatactactggagatgtaaccagtagttggaccatgtaagactataaatatacagaaaaagatgaaaatgttttgacaagagaatggcttaatccaatatacattttgacagaattgctctgtcagaatttactgtgtcagccacagacgtcagggggcaaaggtagaggcaagaaaccagacaggaggctcccgtagtagtccaggcaagagatgataatagttatgctctttaatcatactcaacaaagttgttgagtattggaatacatttttaagttgccaccagcagaanttgcttatgaattaattatgggctatgagaaaaagataaatcaagatgttctatcatgtgttttctgaacaacatgggtaatggcaatgttattt

SEQ ID NO: 47438 - DNA, 334 bp, Gossypium hirsutum
  Clone ID: LIB3196-038-P1-M1-F7
cccacgcgtccgggggttctcaaaatccttgaccctagactgtcttcggttcccctccacgaggtaatgcatgtattctacgttgcgatgctctgcgttgaagaacaagctgtagagagaccaacaatgagagaagtggttcaaattctaacagaggttcctaaaccacccagctcaaagcagcagcagggagactccgcaatcactgagtcctcaccaatatcacaacccacaactctagagtctcctagagatgcaacaacaaaggaaccaaaagaccaacacactccaccacctgatcttcttagcatttaaagtggggtttttttttttt

SEQ ID NO: 47439 - DNA, 354 bp, Gossypium hirsutum
  Clone ID: LIB3196-038-P1-M1-F8
atccggtccaggctttacagaagggaagaactggtaacttgacagcaggctctctggagtccacggaacccatatacgtctacaaagcacaaggtgcaggagtcacgccgcctccaacgccctcgggcagccgcaccaagcagaggcttccaggccagaagccttttaagaggtccctgcgaggttcagatgctttgagtgagaccagctcagccagccacattgaagacttagaaaaggtggagcgcctgtccggtgggccggagcagatcaccctcgaggccagcagcactgagggacacccaggggctcccagccctcagcacgccagccggagcgaggccttccagaaag

SEQ ID NO: 47440 - DNA, 316 bp, Gossypium hirsutum
  Clone ID: LIB3196-038-P1-M1-F9
attctgcctctcaatcttggataggagtctgaatttccgccgtgaccctgctactgatgtggcccgcagaaatgaccccaaatatgttggccgggtgctgagtgccatgatcaatagcaatgatgacaacggtgtgcttgctgggaattggagcggcacttacacgggtggtcgtgacccaaggaactggaacggcagcgtggagatcctcaaggactggaaaaaatctggctttagcccagtccgatatggccagtgctgggtctttgctgggaccctcaacacagcgctgcggtcttgggggaattcttccggg

SEQ ID NO: 47441 - DNA, 283 bp, Gossypium hirsutum
  Clone ID: LIB3196-038-P1-M1-G1
aaaactgcaaagatgtcatcatcaacagcggccaatcaagtgagggcatctcacatactcatcaagcaccaaggctctcgtcgtaaggcttcttggaaggatccagaaggtcgcgtcatctccaccaccacccgagacgccgctgtctcacagcttaaacttctccgcgacgacatcgtttccaacaaggctaagttcgacgaggttgcctctcgctactccgattgcagctccgctaaacgtggcggtgatctcggtccttttggtcgaggccagatgcaaa

SEQ ID NO: 47442 - DNA, 347 bp, Gossypium hirsutum
  Clone ID: LIB3196-038-P1-M1-G11
atcggtcccggagccagtggccgcacccgtgcgggtagcgcctctgccaccgctcaccatgggcccgggtcctcggctgctgctacctctcttgctttgcgtggggctcggcgcgcttgtgtcttcttcgggggccgggggcttccgcatgcgaggcccctctgtgacagccaaggttttctctgatgtgaggattggagacagagatgatggcagaattgtgatttggcctctttggaaaagttgtgcccaagacggtagaaaattttggtgctctagcaacaggagagaaaggatatggatttaaagggagcctgcgtcattgtgtcaccaaaggatttcatgat

SEQ ID NO: 47443 - DNA, 372 bp, Gossypium hirsutum
  Clone ID: LIB3196-038-P1-M1-G12
atcaattctggcgtgtaaccttttggccgttaattcccgagataagcactccagaactccatacatttagcagtatgggccagacaagcgcaggtagtgagttatctttgcaagcaaaaggctgatgttggtgctgctgccatggatggcatgggtgcgattcattttgtagcgcagaaaggacatctagaggttgtctgaactctgctttcatcaggagtttcagtgagagccactaatcgtaagggattcactccacttcactatgctgttcaagggtcccatctagaaggaattaaagtcttattaaagaaaggtgcaagtggctagcaatttgatgggagagggtgatcagttaatgcaacgcttaca

SEQ ID NO: 47444 - DNA, 292 bp, Gossypium hirsutum
  Clone ID: LIB3196-038-P1-M1-G2
atgcctgaggagccattttgagcaatggggaacgctcacggactgggtggtaatgagagatccaaacaccaagcgttccaggggctttgggtttgtcacatatgccactgtggaggaggtggatgcagctatgaatgcaaggccacacaaggtggacggaagagttgtggaaccaaagagagctgtctcaagagaagattctcaaagaccaggtgcccacttaactgtgaaaaagatatttgttggtggcgttttagaagacaccgcagaacatcacctaagagattatttt

SEQ ID NO: 47445 - DNA, 301 bp, Gossypium hirsutum
  Clone ID: LIB3196-038-P1-M1-G3
gagaggttaagactgacctaagtctctactaatataaggtagccacaaaatatgtggatagaatcctccaaagaattgtagtatcatgggcacaaagtattcattgcaatccttctgtaatttagattgactaaagtagggatagaattccatgaaaatctccaaaccatagttttaatcatagttttaattttcggaggaatttgtaaattccatagctttttgtagaaatatctagaattagtatgtgatgtataatcagtaggaacaagggaaccattttgtaatagtatttgcgata

SEQ ID NO: 47446 - DNA, 324 bp, Gossypium hirsutum
  Clone ID: LIB3196-038-P1-M1-G4
atggagtggcttgctaaagctttgtttcttccctttctgctgcaactgttggttttactgccaattgcgatagcagaagctaatgtaaaactgaaatgggtgctacagaatgagactactgatagagcgtcgccgtggctcaagaatgcagcgaatccgaggccaagacctggtggatgcatgttcaggccgtggatatgtgaacggggagaacatccgccgacagctcggatgcgttgttgtaggaaccgttgtgttgaccttaactctgatgatgctcactgtggcttatgtgcgcttagatgttcatttacttggcaatgc

SEQ ID NO: 47447 - DNA, 309 bp, Gossypium hirsutum
  Clone ID: LIB3196-038-P1-M1-G5
ttctgtccaaagacatttcctgccgcactgtctaggcttgtgttttctatgatctcattgacaacaagagaatctggtttgatatttggcgacaatcctgtctataccaatagagttgttcagtgggcagagtgggaaattgaattttttgtacgtttggtgaaggaaaatgcaccaccttcagagacaatttctgcactacgtgcagctagcatttgtgttcaggacagccttaactactgcttattgctggaatcacaagggttgaaactctcgaagttgcttctggtgctcttgcgtacgtatctt

SEQ ID NO: 47448 - DNA, 406 bp, Gossypium hirsutum
  Clone ID: LIB3196-038-P1-M1-G6
atccaccatggaggcccagaccacactgaccacaaatgacattgtcattagcaagcttacccagatcctttcatacctgaggcagggaacccgtaacaagaagcttaagaagaaggataaagggaagctagaagagaagaaacctcctgaggctgacatgaatatttttgaagacattggggattacgtaccctccacaaccaagacacctcgggacaaggagcgggagagatatcgggaacgggagcgtgatcgggagagagacagagaccgtgaccgagagcgagagagagaacgagatcgagaacgagagcgagagcgggacccggagagagaagaggaaaagaagagacacagctactttgagaagccaaagtagatgatgagcccatggatgttgacaaag

SEQ ID NO: 47449 - DNA, 286 bp, Gossypium hirsutum
  Clone ID: LIB3196-038-P1-M1-G7
atccagaggcagcggcccgctgagatcaaagactacagtccctacttcaagaccattgaggacctgaggaacaagattctcacggccacagtggacaatgccaacgtccttctgcagattgacaatgcccgtctggccgcggatgacttccgcaccaagtatgagacagagctgaacctgcgcatgagtgtggaggccgacatcaatggcctgcgcagggtgctggatgaactgaccctggccagagctgacctggagatgcagattgagagcctgaaggaggagc

SEQ ID NO: 47450 - DNA, 284 bp, Gossypium hirsutum
  Clone ID: LIB3196-038-P1-M1-G8
agaggttgaaaagcattgggatgattgatagtgtgccagggatgaaggcactggatatgaatacagctgaggatgctatagtgaggctgactagggaaattgtgcctgggatgattgtcaccgggatggaagttgctgagattgatggatccccaagaatggggccaacatttggagcaatgatgatatcagggcaaaaggcagcccatcttgccctgaaatcattaggattgcctaatgcaattgatggaacacatgtgggaaccattcacccggagcttatc

SEQ ID NO: 47451 - DNA, 245 bp, Gossypium hirsutum
  Clone ID: LIB3196-038-P1-M1-G9
aaaacaacaaaaatggaaccaggagggcaaagcttagctctaaccaccaccaccatagccattcaaatcttaaccttcagcctaatcttttcgttcagcttcgctctcctcgaaaccccacaagaaccaaccatacaccaagtcactgaaaattcagatatcccaactatgaagaccaaattcacgagaaaccacgtccacaaacagttccgagttttcatggtaacgtacggaaaaaactactc

SEQ ID NO: 47452 - DNA, 320 bp, Gossypium hirsutum
  unsure (1)..(320): unsure at all n locations; Clone ID: LIB3196-038-P1-M1-H10
tgacaaaatactaattttttgctctctttatccctccctttctttgcatgtccccagcgtttcaagtaggtgaaagtagagtactaaacaaatttctttttaaaaaatagtgggaaggattaaactgtaatttccggatgttctggcgggaatcccatcggccctcgaatctctccgttctctgtagcattcaaccttcaaaaagactaaaaaacagaggctatctcggtgccatgattgtttgtttgttaattgaataagcaaagcatgccaattgctgtctntcctaagnctttctacttcaaagcatggcaacacga

SEQ ID NO: 47453 - DNA, 309 bp, Gossypium hirsutum
  Clone ID: LIB3196-038-P1-M1-H11
gggatttgaaggtcccaaatagatgtatagagtttttttcattatcgtttttactcaaattactgtctgtatgctgggtcacttttgtaagtaacgctcgatacccactcttcaccgaatactctcttgaagtatcatggcaccaagcaagcaaatcaggaatactacacccaacaagaggaatgttgaaaatttttcgagtatgaacttcatcgcatatcttaaaaatcacctcatttttccaggaccaggaagctagggatcattccagatatttacctttacaccattgccaattcttcacaagag

SEQ ID NO: 47454 - DNA, 141 bp, Gossypium hirsutum
  Clone ID: LIB3196-038-P1-M1-H12
atctcctcactcacccttcctggtgctttgggctccccttcctccttagataagatgtcttatcagaaaaagcagcccaccccccagcccccagtgggctgcgtgaagacctctggcggcggtagcggaagcggaggctgc

SEQ ID NO: 47455 - DNA, 317 bp, Gossypium hirsutum
  Clone ID: LIB3196-038-P1-M1-H2
atgagatttacgaatgaaagccgaagattatgaagtagtgaaggtgattggtagaggtgcatttggagaagttcaattggtaaggcataaatccaccaggaaggtatatgctatgaagcttctcagcaaatttgaaatgattaagagatctgattctgcttttttctgggaagaaagggacatcatggcttttgctaatagtccgtgggttgttcagcttttttatgcattccaagatgatcgttatctctacatggtgatggaatacatgcctggtggagatcttgtaaacttaatgagcaactatgatgtgcctg

SEQ ID NO: 47456 - DNA, 285 bp, Gossypium hirsutum
  Clone ID: LIB3196-038-P1-M1-H3
cccacgcgtccgacttaatttccatttactagcaatttcttcaagttcttttctttgtttttttaatcaatggctgaccactacctccaaaacactcaaccaatgactcaccaaatggtgaaagccgctactgccgcaacagccggtggttccctcctcattctctccggtttaatcctagctggcaccgttattgcgctcaccatagccactccactcttcgttattttcagtccagttcttgtccctgctctcattgcaacagctctcctagcaacgggtttc

SEQ ID NO: 47457 - DNA, 379 bp, Gossypium hirsutum
  Clone ID: LIB3196-038-P1-M1-H4
ttccacgcgtccgctttcttcttccccagttcccagtcgaaggactaaaacccaactctcattcgccgcctcatgcgcggccgtaaacagccatcgaaaggccgaagttcacccccttttgccagcgaatcgaaaggtatggtgaatgtggcttggacgtggtacatgggtgcatggtgaacgatgatggagaacgtgggtagtgcgtggaggtggtggcggcgccagccaaagggagagcctcaaagctagggtttgttatttctttaaaagaaaattagggccattgggcttgtgtaaacgggctaaaattatgttttgagccagcatttaagcttgggctttaaatttggaatggacctatttgtttttgtttagt

SEQ ID NO: 47458 - DNA, 383 bp, Gossypium hirsutum
  unsure (1)..(383): unsure at all n locations; Clone ID: LIB3196-038-P1-M1-H5
ttaatattttatttatcaaataatctaaaagattttgaattcttatgctttaggtagataagagttgttttttaattgttttcttaaattatttatgattatattagttgcaataatgaaaaaaataatttcatttatgtactagtaggttaaatggtaaattcttttatatagttgctttggctcgtaagcttacctggttatgtggtaacttgcacagattctagtttttctttttctgggaataggtagatcgttttacattagttaattatgtatgtccctgggtagttttaccttaatgatnttgtttattggtattccattacttgaaatcagtttttgagctggtttcttattttcagtcagcaacacggatcttg

SEQ ID NO: 47459 - DNA, 388 bp, Gossypium hirsutum
  Clone ID: LIB3196-038-P1-M1-H6
cgtggaccctgttcctacgtctatagatgctggatttaatcaatcagataatgcccccttgtacttcaattcagaccagggaagtaactcgatcaattgttccgactatggctggggagaacagggtgccaaaactcctgaaatatcatccattcttgaagcttctgtagagggtgatgagtttcttgaggatgctaaccctagcaagaagctgaaaccaagttccgacaatgttatgcctgccgaagacaactccgcgaagaccttgtcggacgagctgttggctttggacaaccagatgaaatacttccaaatgccgccatttattgaaggaaactgggacgccactattgatgctttcctcaatggagatgcaacacaggatggg

SEQ ID NO: 47460 - DNA, 327 bp, Gossypium hirsutum
  Clone ID: LIB3196-038-P1-M1-H7
attgcgcctctgtttctctatctagaaaagtgagatcctagttgtgcctggttcccggcatcgttatagcagccgtctccagcctttatgacaccagggactggttttgtggaagataatttttccacacaccagggttggtgggggatggtttcagaatgattcaagcgtattacatttgttgtgcagtttacttctattatcattacattttaatatataatgaaataattatacaactcaccataaggtagaatcagagccctgagcttgttttcctgcaagtagacagtcccacctgagggtgatgggagccagtgacagatc

SEQ ID NO: 47461 - DNA, 324 bp, Gossypium hirsutum
  Clone ID: LIB3196-038-P1-M1-H8
ctagctccgaatccgattgctccaacaacccacgccttcaatccaacacttaagaagacactaatcattgacagaaaacgtcagttaaaaacccttagagccacatgcccaaatcgacagcctccctagattttagggacttcggcttttcctaactttgtaaaataggaccagatctgagatgatgaacacttaccccttactccttttcgacctccatgcaatctggtgccgatttatctttcaaatgacggtagaactcaacttccaaagttttgaaagttccgctattaaccccttaatctatgggtttttggcttttgg

SEQ ID NO: 47462 - DNA, 295 bp, Gossypium hirsutum
  Clone ID: LIB3196-039-P1-M1-A1
aaataatttgtaatctacagtgatgctttattgaccagtttgggatgtgttgtgatgcaacaacattggcctttcccggatgataatcgataacaagctcgtaatcttttagcaattctagccatcttctctgtcgcaggttcaaatctttccgagttatcaagtatttcaaacttttatgattagaataaacgtgacatttctcaccaaatagatagtggcgccaaatcttcaaagcaaatacaatatccgccaattctagatcgtgtgtcaaatagttctttttatgctactt

SEQ ID NO: 47463 - DNA, 352 bp, Gossypium hirsutum
  Clone ID: LIB3196-039-P1-M1-A10
cggacgcgtgggggctgaagctcagtcaaagtgctgtcttaaaaccctagttttcgagctctctttcagttttccggaatccatgtgaaggagaaaggttagggagcccaaggaggagaatactaaccttggacctgctgttcgagagggtgagcatgtttttggggtggctcacatttttgcttcattcaatgacacatttattcacgtgactgatttgtctggaagggaaacaatggttcgaatcactggtggtatgaaggtgaaagctgatagggatgagtcttccccttatgcggccatgcttgcggcacaagatgtttctcaacgctgcaaggagttgggtattact

SEQ ID NO: 47464 - DNA, 314 bp, Gossypium hirsutum
  Clone ID: LIB3196-039-P1-M1-A11
cgccgttctaaatcacagaaagctttgaagaagaagcttttggaggtgcaaaacatggggccgaagaaaggtggaaaggtggctgtgcccgccaagaagaaacaagagaaggttgtcaatccgttatttgagaagcgtccaaagcagttcggcattggaggggctttacctcctaagaaggatttgcatcgattcgtgaagtggcctaaggttgttcgtattcaaaggaagaagaggatcctcaagcagaggttgaaggttccaccagcattgaaccagttcaccaagactcttgacaagaacctcgcaacaag

SEQ ID NO: 47465 - DNA, 319 bp, Gossypium hirsutum
  Clone ID: LIB3196-039-P1-M1-A2
aaagctcatacattggacagacatggtttagatactaaatagatatggattaatgaactaataatgttatacgataatctttgctgcgtatgttcgatgaggaccaacgtttggatattactggattcggatgtaccaaaaagtttcgcctgactatacttaaatcacttactaatccaatctccgatcacgggtcaacttgtgatctctcctttcccattccacttttaatttggctattaccaatgctgagtctgcatacactcgtagtatcttaatcttccgttctatggttgctcgaatccccatgatgcaagct

SEQ ID NO: 47466 - DNA, 376 bp, Gossypium hirsutum
  unsure (1)..(376): unsure at all n locations; Clone ID: LIB3196-039-P1-M1-A3
atggagctgcaggtcacagcgggcagacatggggatgacctgcgcaacaccaagcaggagattgctgagatcaaccgcatgatccagaggctgagatccgagatcgaccacgtcaagaagcagtgtgccaacctgcaggctgccattgctgatgctgagcagcgtggggagatggcactcaaggatgccaagaacaagctggaagggctggaggatgccctgcagaaggccaagcaggacctggcccgactgctgaaagagtaccaggagctgatgaatgtcaagctggccttggacgtggagatcgccacctatcgcaagctgctggagggcgaggagtgcangctgaatggcgaaggcgttggacaagtcaaca

SEQ ID NO: 47467 - DNA, 364 bp, Gossypium hirsutum
  Clone ID: LIB3196-039-P1-M1-A4
atcccagacgaaggctgagagtagacagcagaaccagcggcggtagctaagctgagacagtagtagcggcgacaacgacggcggcagcgatggctggggcggggccagccccgggactcccgggtgcaggaggacccgtggtcccgggtcctggcgctggcatcccgggcaagagcggcgaggaacgcttgaaggaaatggaggcggagatggccctgtttgagcaggaagttctgggggctccagtacccggaatcccaactgctgtgcctgcggtgcccacggtccccacggtccccacggtagaagcgatgcatgtcccagcggctcctgtgatccgtccaattatcgcgaccaacacata

SEQ ID NO: 47468 - DNA, 384 bp, Gossypium hirsutum
  Clone ID: LIB3196-039-P1-M1-A5
atcggcgagggcgagagcggccccatgggcaacatcatgatcgatcctgtcctcggtaccgtgggcttcgggtctggtctccatgggtgggccttcaccctgaagcagtttgcggagatgtacgtggccaagtttgctgccaaaggggagggccagttggggcctgccgagcgggccaaaaaagtggaggacatgatgaagaagctgtggggtgacaggtactttgacccagccaacggcaagttcagcaagtcagccaccagccccgatgggaagaagctgccacgcaccttctgccagttgatcctggaccccatcttcaaggtgtttgatgccatcatgaatttcaagaaagaggagacagcaaaactgatagagaaactg

SEQ ID NO: 47469 - DNA, 372 bp, Gossypium hirsutum
  Clone ID: LIB3196-039-P1-M1-A6
atctcagctgtaggtctgttggagattgcttgaggtccactctagaccctgtttgcctgggtatcagcagcggaggttgcagaagataaaatattgctgaacagcgagtgttcctgtctgattcttgttctggaagcttcatcaggggtgtaccccaccgtgtgaggtgtgggatgttggtctgcacctagtgtgggctgtctcccagttagtctactcaggggtcagggacccacttgagcaggcagtctgtccgttctcagatctcaacctctgtgttgggagatccaccgctctcttcaaagctgtcagacagggtcatttgcatctgaagaggtttcagctgcttttttgttagctatgccctgtccc

SEQ ID NO: 47470 - DNA, 271 bp, Gossypium hirsutum
  unsure (1)..(271): unsure at all n locations; Clone ID: LIB3196-039-P1-M1-A7
agttatgccataaatgccaaatggaggaagataaaacttatgtgcctcatccatttcttcacagattttctatatgtggagcatggatattatagggctgatcttgtcaaaagcttctaaccgatactgattcatctttcgggtcgttgattacttcgtgaaaagggtgcaagtcagttcatatggccaatattactaagtccacggtcaccaaaatcaaanntaaaaataataaaaaaaaaaaaatataatttaaaatattttaatatat

SEQ ID NO: 47471 - DNA, 380 bp, Gossypium hirsutum
  Clone ID: LIB3196-039-P1-M1-A8
atcaaaaatgccagatgaatggaagagggaacacactgagatgacttagactctggtccaccaaccagacccttggaatggaatattaaaatcattacaaggcatgaattttaaatggatgaaatttcaaattatcttatttggatagaagtctatattctagcctcatttgcctgaagtcagatagccagaagaaatttcattgctcgttttcacgaaattcacttgtcttttgttaattaacacagggcctttcccaaattattctctagccaagccccgccttcattactgttgaaatccctcatttatttccttctcaaagtgcccgttatccaaacgcagaacctttgcatctccaagccagttatgctgaattt

SEQ ID NO: 47472 - DNA, 281 bp, Gossypium hirsutum
  Clone ID: LIB3196-039-P1-M1-A9
atgcttcggcactggtggctttggcggtggatttgggggctccttcagcggtaagggtggccctggcttccctgtctgccctgctgggggaattcaggaggtaactatcaaccagagcttgctgacccccctccacgtggagattgaccctgagatccaaaaagtccggacagaggagcgagaacagatcaagctcctcaacaacaagtttgcctgcttcatcgacaaggtgcggttcttagagcaacagaataaggtcctggagaccaaatggaaagctg

SEQ ID NO: 47473 - DNA, 356 bp, Gossypium hirsutum
  Clone ID: LIB3196-039-P1-M1-B10
cggacgcgtgggcatctcccatctttccttctatttttgatttagtttctcctcagctcttcaacaccttcaagcattcatggattccatccatcacctatctgcatccacctctttcacaatgaaagaaggaacttcattcatcagataagttgtttctctcctttttagttcctttgtagctagaatgtgaacagccttgtctgattctctataggtaaatcgaaaaacataagacctaaaacttgaacataattgttttgaatcattgataaaaacttcaatctcagatctgtctgctacctcagcttacagtttacgaatcactgtatgggcatctccttctatttcaagcg

SEQ ID NO: 47474 - DNA, 365 bp, Gossypium hirsutum
  Clone ID: LIB3196-039-P1-M1-B11
ctcgattttcacaccaacaaaaagattatcgaagaagtagctataatcccatccaagaggctccgtaacaagattgccggtttctcgacccatcttatgaaacgtatccagaaaggaccagttcgcgggatttctcttaagcttcaagaagaagagcgcgagcgtcgcatggattttgtccccgatgaatcggccatcaaggtcgaccaaatcgaagttgataaggaaacacttgatatgctttcggttattggaatgggtgatattcccggccttgttaaggttgacccggttgctgtttcggttcctcaagttgggttcggtcgcggtggtggacccgggaggaggttttgagtggtgggtct

SEQ ID NO: 47475 - DNA, 334 bp, Gossypium hirsutum
  Clone ID: LIB3196-039-P1-M1-B12
atgtgaatcgtaagagaacctcagcattgtgcacgataagagaatgtgtcagtatttcagggttctacattttatctgtaaaatgtgacttttttttttttatcacaacagaagtaaaatgttgctttgtacctggtgtcttttattaagaatttactccccccatttctcacagagaataacagtcgggagtcattgtcacaatataatagaaatgttagcaaccagattcatgtaaggactaagtggtcctcatgaattgcattaagactctgtactgctcatattacactccatcctctctgtagtttgctgggtagtggagggggtaagc

SEQ ID NO: 47476 - DNA, 366 bp, Gossypium hirsutum
  Clone ID: LIB3196-039-P1-M1-B2
atttctaacttttatcatcactattaccagcatcatcactgttatcgttatcttcatcatcatcattaccaccattatacctgatactgccacaacatcagaacattatgtacaggcacagcatatcttcccaaagatcttggccactgtggactacgatctttacgtttcttggagtggcagcaatcttgggagtaactattggtcttcttgttcattttctggcagttgagaagacttactattatcaaggtgattttcatatttctggagtcacgtacaatgacaattgtgaaaatgtagcttcacaagccagcacaaatctaagcaaagatattgagactaagatgttaaatgcatttcaaa

SEQ ID NO: 47477 - DNA, 377 bp, Gossypium hirsutum
  Clone ID: LIB3196-039-P1-M1-B3
tgttgatgctgatcaagttgtgagggcagatatgggagaactctatgacatggatataaagggaagacctcttgcatatactcctttttgcgataacaataaggacatggatggctatcggttttggagacaagggttctggcgagagcatttgcggggcagaccataccatataagtgcattgtacgtggttgacttggtgaagtttcgtgagacagcagcaggggataatctaagagtcttttatgaaagtcttagcaaagatccaaacagtctagccaatctggatcaggatcttccgaactacgcacaacacacagtaccaatcttttcattaccccaaagatggctatggtgtgaatcatggtgggggaatg

SEQ ID NO: 47478 - DNA, 387 bp, Gossypium hirsutum
  Clone ID: LIB3196-039-P1-M1-B4
atccctggtagagttccggaacctggagaacttcaaacaaggtcgctggagcaattcctacaagctcccgtacagctggatcggcacaggccacgtggtatacaatggcgccttctactacaatcgcgccttcacccgcaacatcatcaagtatgacctgaagcagcgctacgtggctgcctgggccatgctgcatgatgtggcctacgaggaggccaccccctggcgatggcagggacactcagacgtggactttgctgtggacgagaatggcctatggctcatctacccagccctggacgacgagggcttcagccaggaggtcattgtcctgagtaagctcaatgccgcggacctgagcacacaaaaagagaccacatggcgcac

SEQ ID NO: 47479 - DNA, 370 bp, Gossypium hirsutum
  Clone ID: LIB3196-039-P1-M1-B5
cggacgcgtgggtgcagttgcagtcgacttcaaacttcaaactccaaactccaaactcccacataacaaaatcgtaaaagatcgatctatctaaatttttgctaaaaaagtaagatccttcaaaaatggctacccttccacaaatcgcggttctggaggctggaatatttgtaaaaactcaatacatcccgagactcgccgagatctcacatctcttctgcctcaaatatatctggagctgttcagaggaatcttcgagaggagctgttgagatagccaaacagcattttcctggagtggaatgtaaatggggagaccaaggtctaaacgacatcgtgcaggattcttctcttattggtactgctgtcgt

SEQ ID NO: 47480 - DNA, 361 bp, Gossypium hirsutum
  Clone ID: LIB3196-039-P1-M1-B6
gtgaaattggcattgcaggggataaataagatattggagaccaaggtagcaaagctgaatcttgattattcggaatggaggcaggagttaaacgagcagaagctgaaattccctttgagttacaagacctttggtgaagctattccacctcaatatgcaattcaggttcttgatgaattaactggcgggaatgcaattataagtactggtgttggtcagcatcaaatgtgggctgctcaattttacaagtataagaagcctcgtcaatggttaacatctgggggattgggtgctatgggatttggattgcctgctgctattggagctgccgttgcaaacccagaggcagtcgttgtagaca

SEQ ID NO: 47481 - DNA, 357 bp, Gossypium hirsutum
  Clone ID: LIB3196-039-P1-M1-B7
atctggattcgactgctcagttcacctgccacgttctctccaaggagtgggttctacgtgaccttcagtcctctacctcagagccccgagtcatttctgacaaccccgttctgtgtcctcactcttgtccctgaacgggtccctgtgtggatctgtgtgtgtgtgtgggttctccgctcccccccctcgtgtaccacacctgccataatgaaccgtttctgcactgatcttgtccatgggtatggagtggagggaaggtcttgtgaaaggggagagccttgacttccatctaggtttcttttatctggagaaaaagaacatttttaaactatgaatgcttagccctgaaaggcaagc

SEQ ID NO: 47482 - DNA, 366 bp, Gossypium hirsutum
  Clone ID: LIB3196-039-P1-M1-B8
ataaggcccttctctacaccgccgtcaacagatggttcggccgactcaaattcctgcaccaaatccggcccggattcaggcgagggaatcatagatcaccaccgcggcgtatccttgaaggtatttgtggcgagaaacgtgtgcgtggaggggagatcggccccgagacgtgcgccgattggagtcttactggcggcgctggaggtagtggctggtggggcgtttgaagagcggctagggttttgttctttttgttttttgctttgctgtattggctattgggtttgggccaattgactgggcctgaactgttttctttatgtgtttggacccaagccgattgggccttattacaatgtgaatgag

SEQ ID NO: 47483 - DNA, 366 bp, Gossypium hirsutum
  Clone ID: LIB3196-039-P1-M1-B9
cttcgctccaattttcccatctctttcgcaagagaaccaaaagagaagaaaaaataactactaaaaaatgcttgagcttaggctagttcagggttcgcttctaaagaaagtcttggaagcgattaaggacttggtcaacgatgccaacttcgactgttcggcgacggggttttctctgcaggccatggattcgagtcatgttgcgctggtggccctgttgctgagatcggaagggttcgagcactatcgctgcgacaggaacatttccatggggatgaatctcggtaacatgtccaagatgctgaaatgtgccggaaatgatgacatcatcacaatcaaggctgatgatggcagcgacactgttac

SEQ ID NO: 47484 - DNA, 293 bp, Gossypium hirsutum
  Clone ID: LIB3196-039-P1-M1-C1
atcacgggtgatctggactggagcagcagcagcgtgagcgactctgacgagcggggcagcatgcagagcctcggcagtgacgagggctattccagcgccagcatcaagagaataaagctgcaggacagtcacaaggcatgtcttggtctctaagagaatgggcactgcggctgcctccttgaaggttctccctgttggttctgattaggtaacgtattggacctgcccacaactcccttgcacgtaaacttcagtgtcccaccttgaccaaaatcagctttgtaactgttttc

SEQ ID NO: 47485 - DNA, 366 bp, Gossypium hirsutum
  Clone ID: LIB3196-039-P1-M1-C10
ctcaacatataattaagaaattcaatttatgatgatgctaggaggaggtaaagaagacttgaattcgccggagattggacttcgcggcagcgtcgcggggaagttgaacgtcttgttgacggactccgacgacggaagcgagttctcctatgagggttctgtcgaagaagagaaactggaggagataatgcaagagctttacaaagagataacatcaacatcaccgccaccttctgtaacttttccgtcgctgtcatcgtcttcttcttcactggcgttctctcccgtcagcgacgttaagatcagtgagagctgtggggcatcaatgtctgactcatcgttcacggtgatgggccgcattgcatt

SEQ ID NO: 47486 - DNA, 345 bp, Gossypium hirsutum
  Clone ID: LIB3196-039-P1-M1-C11
cccacgcgtccgatccgcaacaacaccttatctggcaatgtaccaccagttttgaagaggctgcatgctgggttccaatatgaaaacaatattggcttgtgtggtgttgggtttcctaacttgaaagattgtgcggattcgagtaagattatagaagcagacctgaaccattcaaacccaatggccttaaccaaaagaatatccgggagtcggctgatttaccaactgaatgcagcaaagctaactgctcgagtccatccggtagtgcaaaaatcggtgtggtctccggcattgttggtgttgctcttgtgttgacagttgcagcactttttacttttgcatggt

SEQ ID NO: 47487 - DNA, 336 bp, Gossypium hirsutum
  Clone ID: LIB3196-039-P1-M1-C12
cggacgcgtggggcttatggaattgaagagacattaagtataccccccattggttgcttactgaaagggatgccgcatgtcataacagagagttctcagtatagttgctcaaatgagaatggtagattttagtgttttatatatattaatattaatgattgcatagtacaatttatatagatagaggccgagggggagagatgacatagcacaatcatctgaatatgtattatataattggtttgttttgtggtgttggtttaggcttctttcatccctttaaaggggttatttatcccttagcgtgtgatgagatgagatgtgctggtttgtata

SEQ ID NO: 47488 - DNA, 261 bp, Gossypium hirsutum
  Clone ID: LIB3196-039-P1-M1-C2
acactatctaacaagttggtacgcagaagcacgctggtgccccgccgcaatttccgggatgggaaccgcgcgctcgttgaccatgatggttaaaagggcctggccaaggtgcatattgaggaagctggctggagctatgttgggggctggactggccaacgtggctctaaacttgagactaaacggactctacccaagaagagctttgctcagatcactgccaatgtaactaagcctaacattcatggcctggtcatgatt

SEQ ID NO: 47489 - DNA, 311 bp, Gossypium hirsutum
  Clone ID: LIB3196-039-P1-M1-C3
gaggaaatccacaagagctgaaatggaacgccagaagctggaggagatggccaagaaagggtaaggacaggtagattgataaaggaaggcttattggactgggagaaagaaatgtagtatagctcgtgtttgggttgaacctggtgatgggaagttcattatcaatgacaaagaatttgatgtctatttcccaatgcttgatcaccgtgctgctcttcttcggccattctcagagaccaagaccttgggcctttgggacatcaaatgcacagttaaaggaggtggtctttcttgtcaagtaggagcaattc

SEQ ID NO: 47490 - DNA, 321 bp, Gossypium hirsutum
  Clone ID: LIB3196-039-P1-M1-C4
cccacgcgtccgaagattacaagaatctattggacgcggttgcgaaaattgtacaggcggaaggaccgggaggactatacaaaggcctcactccaagtgtgatgggagttgttccttatgctgcctctaattattttgcttatgatacactaagaaatgcttataaaaaagcttttaagaaagaggaaattgggaatgttatgactcttctaataggatcagcggccggtgcgatctcgagcacggcaacttaccctctcgaggtggctcggaagcagatgcaggctggtgctattaatggaagacaatgccacagcatga

SEQ ID NO: 47491 - DNA, 255 bp, Gossypium hirsutum
  Clone ID: LIB3196-039-P1-M1-C5
cccacgcgtgcggttcacaggtacttgattacattgaagatagtgggcttgaggtgcttgcatctagttgcaaggacttgcaagaattacgcgtgtttccatctgatccatttggtgcagagccaaatgtgtccttgacagaacagggccttgttgccgtatctttgggttgtcccaagctacaatcagtattgtacttctgccgccgaatgtctaatgaggcattagttaccattgctcgtagccgtccaaact

SEQ ID NO: 47492 - DNA, 383 bp, Gossypium hirsutum
  Clone ID: LIB3196-039-P1-M1-C6
atccgccgccagctcgcgcatcttgttcttctgccgctcaactgtcctagtcctccgccggtcgcaatggaagaagagatcgccgccctcgtcattgacaatggctccggcatgtgcaaagctggctttgctggggacgatgcaccccgagccgtgtttccctccatcgtcgggcgcccccgacaccagggcgtgatggtgggcatgggccagaaggactcctacgtgggtgacgaggcccagagcaagcgcggcatcttgaccctgaagtaccctattgagcatggcattgtcaccaactgggacgacatggagaaaatctggcaccatactttctacaatgagctgcgcgtggccccagaggagcacccggtgctgctgac

SEQ ID NO: 47493 - DNA, 349 bp, Gossypium hirsutum
  Clone ID: LIB3196-039-P1-M1-C7
cggacgcgtggggttctagatcgcgagcggcgccatggctcaggaatgcagcaaatccgaggccaagacctggtgggtgcatgttcaggccgtggatatgtgaacagggagaacatccgacaacagctcggatgcgttgttgtaggaaccgatgtgttgaccttaactctgatgatgctcactgtggcttatgtgcgcttagatgtccatttacttggcaatgctgcaggggggtttgtattaatacgaatattagtcctctgaattgtggtcgctgtggaaaccgatgcccatttagggttccatgctcgtttgggatgtgtggatatgcacagccttgtccattccc

SEQ ID NO: 47494 - DNA, 217 bp, Gossypium hirsutum
  Clone ID: LIB3196-039-P1-M1-C8
aaccggtcggttttatttaacctaaggagggggaggtttaaacttaaactttttgttgagatagaactcctaaataacttacaatacttaataattataaaaaatttgggataaaaaataaaaaatatttaaagtttataaatacaatattgagcttatctattataaaaattaaacctccaacctccctctaatataatttaaacactcattaaaa

SEQ ID NO: 47495 - DNA, 374 bp, Gossypium hirsutum
  Clone ID: LIB3196-039-P1-M1-D1
atctctattacaccccacattctcttttctttaattcttgtctgttctgcctcactcctgagctctactgactcccaacagagcacccaagaggaaaatggccataagtggagtccccgtgctaggatttttcatcatagctgtgctgatgagcgctcaggaatcatgggctatcaaagaagaacacgtgatcatccaggctgagttctatctgaaccctgaccaatcaggagagtttatgtttgactttgatggtgatgagattttccacgtggatatggcaaagaaggagacggtctggcggcttgaagaatttggacgatttgccagctttgaggctcaaggtgcactggccaacatagctgtggacaaag

SEQ ID NO: 47496 - DNA, 364 bp, Gossypium hirsutum
  Clone ID: LIB3196-039-P1-M1-D10
cttgtttgtccgagttggctgacttgagcaacactttcaagcaagcccagaatgcttgtatggagcaactagcagcaactgtgacacctcaaatccgtccagtactagacagtgtagcaaccatcagctatgaactatcagagtctgaatatgccgagaacgaggtgaatgatccttgggtacagagacttcttcatgctgttgaaatcaatgtggcttggctccaacccctgatgactactaacaactacgattcatttgtacatttggtaatcgacttcattgtgaagaggttggaagtgattatgatgcagaaacggtttagtcaactcggtggccttcagcttgacagagatacccgagc

SEQ ID NO: 47497 - DNA, 366 bp, Gossypium hirsutum
  Clone ID: LIB3196-039-P1-M1-D11
gtaaatcttatcaatctgcatcgaaggaattccaagactcgttcaatcgttctaatgcatcgatgagatattcaagtagagatcatgaaaaacaacctgtgagttctacagctcaagctacgcctattgctagtgttggcagtgtgacagcccaaaattgaccctagtcagaaagtggtttcgggaccgctaaaccgagtcaccgaagtatttgagtataatatttattgtctaaaatatgtgaatatgagtgtgtgaaagttttaagcttcgatttagttaattgcatgtgaatttagttaataagacttatgtgtgacacttttgaaatgtgataggttaatctataaggatctattagtgcat

SEQ ID NO: 47498 - DNA, 104 bp, Gossypium hirsutum
  Clone ID: LIB3196-039-P1-M1-D12
caaaatactaagatcattaatacccaaaatgaaagtttgatagtgtgatttgaatctctgacgatctctgtttccgagctagcttggcgacactataaaacatg

SEQ ID NO: 47499 - DNA, 275 bp, Gossypium hirsutum
  Clone ID: LIB3196-039-P1-M1-D2
atcttaatgactgttttggaaaagttgaattctagatttatatatatatgtgtgtgtatttttttttcaaacatcatttacatagtcatgtagtggaaaagggatacctaacatagttttattgaaaaccaaatttcatgtataaataataaaaaatccatatttcaacatcctaaaatcaaaataaatgccatgcatgctatataaattcaaaacctaagtcccatgccacagtttaattataaatcaatacagtctcttaataatagaaattg

SEQ ID NO: 47500 - DNA, 341 bp, Gossypium hirsutum
  Clone ID: LIB3196-039-P1-M1-D3
cggacgcgtgggcggacgcgtgggttcccttctttctttcttcctttttcttttatttgtttcttgatcactatgtatgtgatacagtatttttattttcttaataatcattcattcctttgattagtctaaggtgttattggaagctgtattcttcattttattgcttgtaaaagctattagcttttctcctttagctttaataacttgtatctcgatgagaacaagtcattgatcttaaagattgttgagagccagaattctgggaaattgagtgaatgtgctgagaaccaagcaaggctgcagcgaaacctcatgtacctggctgccattgcggattc

SEQ ID NO: 47501 - DNA, 387 bp, Gossypium hirsutum
  unsure (1)..(387): unsure at all n locations; Clone ID: LIB3196-039-P1-M1-D4
ataatgattgcagttgtattttcagaggattcaaatatcatatgtgccatggatattgatattacaactttcaaaaatgattaacaattctcagtaaggtgcaaatgaaacaaagtatagtcttcagttagtttacattggatttgcatttatgggaaattgtgtattaaaaccatgaaaagaagtatttaattttttaatgtaagattgaatttggtcctaggcttaaatcattacatacagattttttttaatctacatgattaaaaaaatctacaggaaacacaatgtctcatatccatggctccattggtgcatggtactatataactngtagggtatgttaattccctgatatttattcatttattcattcaacacataaaa

SEQ ID NO: 47502 - DNA, 387 bp, Gossypium hirsutum
  Clone ID: LIB3196-039-P1-M1-D5
atcgcgccgctgcggtgctcaggaacagcccatggaagaatcatatgaagaggtggtgactgaggtcgtaagcaggagtggacatgtttggatttccaacagctaccctgctggactgtcatggaagatatgcccagaatgtagcgttcttcagtgagtgagtcagttgatgtctggatgtgctcagctcacagatattcagtgttcctgtcctcagcactggtcagcagtctgaggaagcagaggagaccttgctttggtagagctcgctgttcctagggttacaagaaaagcctgtgagctggagttagaagtaatagtagaaacagagcaagagaaccatcgtgatatagaggtagcgttgaagtaatctctgagaatcaatga

SEQ ID NO: 47503 - DNA, 275 bp, Gossypium hirsutum
  Clone ID: LIB3196-039-P1-M1-D6
ataaaatttggattgtagtctgagttttttttccccgtacaattccccattcccccctgcaagcctgtaccaggagaggtatcagctgccttggaggcggtgagacatgtgggtgttcactgtggccctcaggggtgaggctggcactggggcatctggggccagaagtcctcctttagtcccaagtcttttgccactgaagggcataaggaaaaggtcctaatagaaaatttactgggggcccaaagctgccaggctgttgggggtgggaagca

SEQ ID NO: 47504 - DNA, 314 bp, Gossypium hirsutum
  Clone ID: LIB3196-039-P1-M1-D7
gccttcatcaaaaccatcagaagggaagcgattcattctctcatctctcactttcatcttcttcctctgtgcattagcttccatcaatgaaatcagattcgagagcttgtttaagcttggaagatgtgctctttccaacgcccctctggctctcaactcatcttcagaaatgtccacacttgcacccaattcctcattccgatgacattcggattctgatcggaatcctcacacttcccgatcagtaccatcgccgccatttccttcgtctcatatatggtacgcagactccggtgggggcacaagtggacgtg

SEQ ID NO: 47505 - DNA, 381 bp, Gossypium hirsutum
  Clone ID: LIB3196-039-P1-M1-D8
atctggactcagagctcaaatctgaactctacctccagacagaatgaagttcatctcggcatctctgcttctcatgctgctggtcagcagcctctctccagtccaaggtgttctagaggtctattacacacacttgaggtgtagatgtgtccaagagagctcagtctttatccccagacgcttcattgatcgaattcaaatctcacctcgtgggaatggttgtccaaggaaagaaatcatagtctggaagaagaacaagtcagttgtgtgtgtggaccctcaagctgaatggatacagagaataatggaaatgttgagaaagaaaagttcttcaactccaccagttccagtgtttaagagaaagattccctgatgctgata

SEQ ID NO: 47506 - DNA, 360 bp, Gossypium hirsutum
  unsure (1)..(360): unsure at all n locations; Clone ID: LIB3196-039-P1-M1-D9
tggcctcactcgccaacacaaccgcaggtgccgttgccggcgcccggaaaatttccaacggaaaacgtattcccatcatttcttccaaatccctctcctttccctctttcaggccttccatttcctcactgaaacccttaatccccaccaaattctcctctctttcccctctccaatgctcccctaatccctccccttctacctccccgccttccctcaaatctcgcctccgcaacggcgaaaccctctacggcatcttcctcctctcattctcccccactttggctgagatcgtcgccttctctggctacgactntgtagtcatcgacatggaacacggccccgggggaatccatgagt

SEQ ID NO: 47507 - DNA, 361 bp, Gossypium hirsutum
  Clone ID: LIB3196-039-P1-M1-E10
atcgcgagcggcgccctgttttttttttttttttatttttattttgaagcttgaccagcaattattccttcaccactcactctctttctctaactttgcccaattattaaatgaaaaagttgaaagcatatatgctcgtttatttgatgtgcatataggtgtttaattattatttttaacatatttaatgcattaattttattgaatttaaaaagaaaaatcactatttttttcaaaaagaaaaaaaggaaaaatattattattaaataccatattattattagactttgggtcttcttaattgattagcattttccaattccaaataagattattttgttttcatttgactctaaactta

SEQ ID NO: 47508 - DNA, 365 bp, Gossypium hirsutum
  Clone ID: LIB3196-039-P1-M1-E11
atacctggacaaggtgcgtgctctggaggaggccaacgccgacctggaggtgaagatccgtgactggtaccagaggcagcggcccagtgagatcaaagactacagtccctacttcaagaccatcgaggacctgaggaacaagatcattgcagccaccattgagaatgcgcagcccattttgcagattgacaatgccaggctggcagccgatgacttcaggacaaagtacgagcatgaactggccctgcggcagaccgtggaggccgatgtcaatggcctgcgccgggtgttggatgagctgaccctggccaggaccgacctggagatgcagatcgaaggcctgaaagaggagctggcctacctga

SEQ ID NO: 47509 - DNA, 365 bp, Gossypium hirsutum
  Clone ID: LIB3196-039-P1-M1-E12
cacgaactgctgttgctcctttggaacgtttaaaaatcttacttcaggttcaaaatccacatagtattaaatacaatggaacaattcaaggcttgaagtacatttggagaacagaaggttttcgcggattattcaaaggcaatggtactaattgtgcacgcattgttccaaactcggcggtcaagttcttcagctacgagcaagcttcaaagggaatcctatatctgcatcaacggcaaactggcaatggtatgatcaatattgccatcgtctttttgctgagcaaccatctcatgtttgctttacactgataacatatggaattcagttatcttttaggttcatcgattgatgcctgcatacat

SEQ ID NO: 47510 - DNA, 353 bp, Gossypium hirsutum
  unsure (1)..(353): unsure at all n locations; Clone ID: LIB3196-039-P1-M1-E2
cagagatatcaattcttcgattntacctgcgattcttcaatnggtttttttttacctaccaaggaaagcttcagtggttcagtttcctgcaaacttacataacccacacagagaagacgatgaaggtggccaaacattcggattctgttttttggtgaatcagtatttaagggttttcgatcctttcatttgtcttcatcgtcgtcaaggttcggcccatgtctttagatgcaacaaaaagattgaaatagttctgttctgttgtggagttactgagntttgtgttcgtttggagaaatcaaattgtgaggaaaaagaaagaaaagaggttttgggagattggtagaatgggg

SEQ ID NO: 47511 - DNA, 369 bp, Gossypium hirsutum
  Clone ID: LIB3196-039-P1-M1-E4
cgcacttgtaacaggagcggtcatggaatctacaactccccgaatgccatctaccgcaatgtcgacattccgttctgtctcgacgttcattcccaacactggcgaccgaagtgcctcgtgtacacacagggggtcgatcacgatctcgtctaaaaaggcccgaagtgcctctagaccgacccacatcatctcgaaatttcttcgatgcctgttgaagagactttcccgaggatcttttacgaaactctccagttcccacatcaactttttgtttttcttttctaagctcttcggctttacaagctcgctcgacaagtactacgaactctcgtatttcaagaatgccaacgaacatttttatatcttcat

SEQ ID NO: 47512 - DNA, 368 bp, Gossypium hirsutum
  Clone ID: LIB3196-039-P1-M1-E5
gaaaggaccagttcgcgggatttctcttaagcttcaagaagaagagcgcgagcgtcgcatggattttgtccccgatgaatcggccatcaaggtcgaccaaatcgaagttgataaggaaacacttgatatgctttcggttcttggaatgggtgatattcccggccttgttaaggttgatccggttgctgtttcggttcctcaagttgggttcggtcgcggtggtggacccgggaggaggttttgagtggtgggtcttcatggatttcatgggttttttttaagcttctatgtttttttctctgttttggggtagtttctaattttgtgttttttatggaacagtactagttaagtggaactgaaatttt

SEQ ID NO: 47513 - DNA, 384 bp, Gossypium hirsutum
  Clone ID: LIB3196-039-P1-M1-E6
atggaatggccaggacaagtggagctagccattttcattacatggccatcccaatggacactggatccctggtccaactgtctaaaaggccagttgtgcctgtctgtggatgtggatgtctggccttcacctgaggtagagcggggactataaacacacatcaactttctttctatttgctttcttttccttcttttcaaactcttaaacttaggcctttatgctgtgagtgactagtccaagaagcacacatttagtagtagtcctgcaccagccctgctcttgaataaaaaggaatattactggctgcacccaaatcttctagtacttaagtcgagtaataagcatcaggcattggaagaggttttaaatttgcttttttga

SEQ ID NO: 47514 - DNA, 362 bp, Gossypium hirsutum
  Clone ID: LIB3196-039-P1-M1-E9
gagccgcccaaagaatcaaatctctgctactgcatagtaaaagagagaaagagcgacaatggaggcagcaagaacagttaaggacgtttcccctcacgatttcgtcaaggcttacgccgcccatctcaagcgctccggcaagattgagcttccttcatggactgatattgtcaagaccggcaaactcaaggaacttcctccatatgatcctgattggtactatatcagagccgcttccatggcgaggaaaatatacctgaggggaggtcttggtgttggtgcctttagaaggatttacggtggggctaagagaaatggaagccgtcctcgccatttcttgtagagcagtggatctgttgctc

SEQ ID NO: 47515 - DNA, 364 bp, Gossypium hirsutum
  Clone ID: LIB3196-039-P1-M1-F1
atcgagaagacaggtgaacatttccgcctggtctatgacaccaagggccgttttgctgttcaccgcatcacagtggaagaggcaaagtacaagttgtgcaaagtgaggaagatcactatgggaatgaagggaatccctcacctggtgactcatgatgctcgtaccatccgctacccagatcctctcattaaggtgaatgatactgtgcaaattgatttagggactggcaagataatcaactttatcaaatttgagacgggcaatgtgtgtatggtgattggtggagccaacctcggtcgtgttggtgtgatcacaaacagggaaagacatcctggttcttttgatgtggtgcatgtgaaggatg

SEQ ID NO: 47516 - DNA, 329 bp, Gossypium hirsutum
  Clone ID: LIB3196-039-P1-M1-F10
gtaacaatagatggagtttgtctactattttgtgcaaccgattctaactctaaaatgtatctgttaacaaatcttcctatgtcttttccagatttacaccctttattatgcagtctgttattcttatcaccccagatggcccatacagcaacacagaagggcattaacgaaaaaggtgatccatagattcaggtccagatccacaccgaggacacactgaaaagattgttagtcttctaagaagcatattaacccaagttgctagaaaattccaagagatcttccaaactgtaatttttatttttgaaggaagatcaagaagccatagc

SEQ ID NO: 47517 - DNA, 367 bp, Gossypium hirsutum
  Clone ID: LIB3196-039-P1-M1-F11
tcaaaactcacaagagaagcagccgctcctccttccatctcctaaacaagaatggattcgcaaattaagtttgctgtggtggtgaaaataatgggaaggaccggttcaagaggtcaagtgacgcaggtgagagtgaagttcttggacgatcagaaccggttcattatgaggaacgtgaagggaccggttcgtgagggagatatcctcacattgctggagtctgagagagaagctaggaggcttcgttgaagggttatttttatactttttggggtttatgcttgttttgaattgtctaccgtattgcttttgaattacgtttagtaggtattcgtatatcgagacttgcgatttgggagaatggttg

SEQ ID NO: 47518 - DNA, 231 bp, Gossypium hirsutum
  Clone ID: LIB3196-039-P1-M1-F12
atggccaagcaagcttctgtctgcacctgctctcaatcctgctctcactatgagcctccgcctgcagagctcctccgccagctatggaggtggttttgggggtggctcttgccagctgggaggaggccgcggtgtctctagctggtcaactcggtttgtctctgggggatcagctggaggctaccgaggccgcgtgacctgtggctttggtggaggggctggtaatggctt

SEQ ID NO: 47519 - DNA, 391 bp, Gossypium hirsutum
  Clone ID: LIB3196-039-P1-M1-F2
atgtttgccggccggcccggcaaggaggcgggacacgtcggcgctaccaccgccgcccctcctcctgtttcagctgccgctgctgccgccgcttcctgggctaagccagcccgcggtcccggcggcgccaggtgcgttcactctccccggctccagccagcgtccgccgccgccgtagctgccctgggctccgcgccccactgccgagatggcgacgcgctcctgccgggaaaaggctcagaagctgaacgagcagcaccagctcatcctatccaagcttctgagggaggaggacaacaagtactgcgccgactgcgaggccaaagtgcatgcaagatatgggaaatactaaagcaagactactctatgaagccaatcttccagagaactt

SEQ ID NO: 47520 - DNA, 305 bp, Gossypium hirsutum
  Clone ID: LIB3196-039-P1-M1-F3
cggacgcgtgggctttcactgtacagccgatcccacacgcccttctctctctctctctctctctttgtttcttcgtcttttcatgctctcctttctcttctttttcttctttttttttaattttccccttttactttccgtttctctctctttcactgatacaaagtaagattttcctcagcgtctggcatgagctcaacaccgtatttctctccccaattcccctctctcgatgttttcgaaagaaaggaaagtgaagtattaccggtagaggggagtcaccggagctgggagactagaatcga

SEQ ID NO: 47521 - DNA, 363 bp, Gossypium hirsutum
  Clone ID: LIB3196-039-P1-M1-F4
atcatgtgtaaaagcttcgaagacggtttgaatgaagacattaaattactaataggcatacttgagataaaagagtttgtggtacttgttgagcgaatttgcaaagccgaagaacttggaaaagagaaaacaaaagctgattttaaagccagagattctcgtaaaagatcatcgggtaagacttttcactcaacatcgaagaagttcagagatgattctactcgatctaaggatactacaggcttttctagacgagatcgagaccgacccctatgagttcacgagctacttcgatagctagtgttggcaacgttcgacagaacagagtcaagtgcaagcattatggtaaatggcattcttgag

SEQ ID NO: 47522 - DNA, 385 bp, Gossypium hirsutum
  Clone ID: LIB3196-039-P1-M1-F5
atcttcctgtatcttatcactggcaatttagaaaaacttcgcaagatgatgaagattgctgagatcagaaaggacatgagtggccactatcagaatgccctatacctgggtgatgtgtcagagcgtgtgcggatcctaaagaactgtgggcagaagtccctggcctatctcacagctgctacccatggcttagatgaagaagctgagagcctaaaggaaacatttgacccagagaaggagacaatcccagacattgaccctaatgccaagttgctccagccacctgcacctatcatgccattggataccaattggcctttattgaccgtatccaaaggattttttgaaggcaccattggcagcaaagggaagggaggagcactgg

SEQ ID NO: 47523 - DNA, 206 bp, Gossypium hirsutum
  Clone ID: LIB3196-039-P1-M1-F6
gaagaggtgccagggcaaggttccagaagagttaccgttgaagaactgtcatggttcgttttgatgttgttcttagtgaaatgatatggttatgcttgttttgaattaaggttttattatatggatttaaattagctgtgactgagtttctgaatttttggatgtttgttttggttgcttaaatttatagataaatgcttaagact

SEQ ID NO: 47524 - DNA, 332 bp, Gossypium hirsutum
  Clone ID: LIB3196-039-P1-M1-F7
aatacacgaagtgagcagctagacgagctgtttggtgggaggcaaagccatcgaaggcagcagggacagggaatgttccgtaaagccagccaagaacaaataagggcattgagccaaggagctacttcaccaagggggaaaggtagcgagggatacgccttcaacttattgagccaaacccctcgctactccaaccaaaacggccgcttttacgaggcttgccctcgtaatttccagcagcaactccgagaagtggattcctccgttgttgccttcgaaataaacaaaggatcgatcttcgtaccgcactacaattcaaaggctacattcgt

SEQ ID NO: 47525 - DNA, 309 bp, Gossypium hirsutum
  Clone ID: LIB3196-039-P1-M1-F8
aaacattaccaaaatatggggtttgctgttgtagtactagtagttaaagctgttttgcttgtgcagctttcactgttgttactgagcaccttcactgtctctgctcccatttggcctcaggcttctcctcctcattaccatgctgtttcacctgtagtcccgcctagtcacccaccaacccaccaccatcaccaccaccctcaccctcaccctcaccctcatccacccactaagcccccaacccccactccttctccagttcatccaccacccaaagcgccagtgcaaccaccaaccaagcccccaact

SEQ ID NO: 47526 - DNA, 357 bp, Gossypium hirsutum
  Clone ID: LIB3196-039-P1-M1-F9
atcagcagccctgagccacaggaaggtacagacacaactgaggccccctttcaaggggatcagaggtccctggagtttctgcttcctccagagccagactactcactgctgctcaccttcatctacaacgggcgtgtggtgggcgaggcccaggtgcaaagcctggattgccgccttgtggctgagccctcaggctctgagagcagcatggagcaggtgctgttccccaagcctggcccactggagcccacgcagcgcctgctgagccagcttgagaggggcatcctggtggccagcaacccccgaggcctcttcgtgcagcgcctttgccccattcccatcttctgggatgcaccc

SEQ ID NO: 47527 - DNA, 342 bp, Gossypium hirsutum
  Clone ID: LIB3196-039-P1-M1-G1
catgaacacaatcctccacccctaaattagattcggcaatcacttaacccctttaacctcaactttcaagttaaaagcaattaaccactcaccatatcctacattactatccattttaatgacattaacacatctactaagagtttcaagcttcttggccgaatttcaacctcaaaatcctaagtctaatctatcggatgagtagaatttgaactaaccatctcaaacatgcatagattttcaagaatcattcaatacatacctcattctagccatcttccaagccaaaatccaataaccaaatctcccttccttctcctcactcacggcaatagccaaaaa

SEQ ID NO: 47528 - DNA, 62 bp, Gossypium hirsutum
  Clone ID: LIB3196-039-P1-M1-G10
cccacgcgtccgctttaagaatcacacatcgagatgtatttgatgcatacgcatctgagacc

SEQ ID NO: 47529 - DNA, 375 bp, Gossypium hirsutum
  Clone ID: LIB3196-039-P1-M1-G12
atgttctctgcagtgctttctaacagcttctgggtgcagattttcttcggcatccttttgcactcagcttattacaggtaggtagtgcttaagaaaagtcatggaggactaaagcctaagtccttttcacttttcctccatctgaaggtaggtgagttcatcctcttcatagtaatgctgttttaccaagactttttatatagcagatgaacccagaaagaattttctgctattgtgttcactacaacagggtagagacatcagaacagccccagaacccctttcaaatctgatatgggactattaaattttatgctggtaatttggattcattcacaatgcagtttaaggcggaaggctccactgcattctttg

SEQ ID NO: 47530 - DNA, 358 bp, Gossypium hirsutum
  Clone ID: LIB3196-039-P1-M1-G2
atggtgatatcaccctcaagtgtcctgtgatgctggtggtaggagaccaagcacctcatgaagatgcagtggtggaatgtaactcaaaactggaccccacccagacctcgttcctcaagatggctgactctggaggtcagccccagctgactcagccaggcaagctgactgaggccttcaagtacttcctgcaaggcatgggctacatggcctcatcctgcatgactcgcctgtcccggtctcgtacggcctctctaaccagtgcagcatccattgatggcaaccggtcccgctctcgcaccctgtctcagagcagcgagtctggaactctttcttcggggcccccggggcacaccat

SEQ ID NO: 47531 - DNA, 356 bp, Gossypium hirsutum
  Clone ID: LIB3196-039-P1-M1-G3
atgtttgatgcatgcaaaaaattggcagattgtttagtttttaaatgttaagcccaatatataaagaagcgattgctaggtgtgtgttgctgttgcagaacccattcattaatcaatgtgttgaagcgttcattttaaggtgttgcaggcttaagtgtgtacttctttggattttaggcttccgttttctaaacgagaggtgccggtggctagtgggtctgggtttattgtgtcggaagatggactgatcgtgacaaatgcccacgtggtgaccaacaagcaccgggtcaaagttgagctgaagaatggtgccacctatgaagccaaaatcaaagatgtgggtgagaaaacagaca

SEQ ID NO: 47532 - DNA, 61 bp, Gossypium hirsutum
  Clone ID: LIB3196-039-P1-M1-G4
agcgtttgtctcagatctcagaagatggcccgtaccaagcaaaccgcccgtaagtctactg

SEQ ID NO: 47533 - DNA, 358 bp, Gossypium hirsutum
  Clone ID: LIB3196-039-P1-M1-G5
gcagcagggacagggaatgttccgtaaagccagccaagaacaaataagggcattgagccaagaagccacttctccaagggagaaaagtggcgagagattcgccttcaacttattgtaccaaacccctcgctactccaaccaaaacggccgcttctatgaggcttgcccacgtgaattccggcaactcagggacatcaatgtcaccgtttcagccttgcaattaaaccaaggatcaatctttgtgccgcactacaattcaaaggctacattcgtggtccttgttaacgaaggaaatggatacgttgaaatggtttctcctcatcttcctaggcaaagctcatttgaagaagaagaagaa

SEQ ID NO: 47534 - DNA, 390 bp, Gossypium hirsutum
  Clone ID: LIB3196-039-P1-M1-G6
atcgccttccccgccgccaggatgcccaagaggaaggtcagctccgccgaaggggccgccaaggaagagcccaagaggagatcggcgcggttgtcagctaaacctcctgccaaagtggaagcgaagccgaaaaaggcagcagcgaaggataaatcttcagacaaaaaagtgcaaacaaaagggaaaaggggagcaaagggaatacaggccgaagtggctaaccaagaaactaaagaagatttacctgcagaaaacggtgaaacgaaaactgaggagagtccagcctctgatgaagcatgagagaaagaagccaagtctgattaataccatataccatgtcttcccagtggtccctgtctcccttcttgtacaatccagaggaatattttt

SEQ ID NO: 47535 - DNA, 367 bp, Gossypium hirsutum
  Clone ID: LIB3196-039-P1-M1-G7
gctggctgtacctgcaaacacgacaaactcacgagagcaaaagaaaaggacagaaggacaaggacgaatttttttttccttttatttattttctttttcctctgtaaaaatgaggctataagaaagccaagattagactgtaaacgggagaacccatgcagatattgtatcaaatacataaaaaagacatattgaaatgaaaaaaaaacagagattaaagatcgattgatccttttttctcaaaaggtggttcctttttttcgttttctctctcggtatttgctttttagcaagtgatactgtcgtttttttttgttgcatgcatatagatataacgaaaggggggtctttttgtcattactagcgt

SEQ ID NO: 47536 - DNA, 366 bp, Gossypium hirsutum
  Clone ID: LIB3196-039-P1-M1-G9
gtgaaagcaaaattttcggagtggatttgattaaaaattctgaacagaaagtaaaaataattagtgaaagtctgaaggcagcatcagatcgtcagaagtcgtacgcggatttaaaatgaagagatattgagtatcaggtgggagacaaagtgtttcttaaggtatcgccttggaagaagatactcagatttggccgtaagggcaaattgagtccgagattcattgggctgtatgagatctccgaacgagttggcccagttgcatataggttgcttttaccccctgaactcgaaaggatccacaacgtttttcatgtttcgatgcttcgacgttacagatccgatccttcgcacgtaataaacccct

SEQ ID NO: 47537 - DNA, 365 bp, Gossypium hirsutum
  Clone ID: LIB3196-039-P1-M1-H1
atcaccaactcacttctctcggcttccttgtctgtaaattggatgagaacagctctaatgcctttcaggctctaagaagccatagatttggacaagcccagcaagatgggtgtccttccaggcctcttcccctttcctccatctctggcaacagttcttagggtttggcaattgtttggattttttttctttctgcagttgtgtgtatgtgtttgtgtgaagaaaaacagactctgtccaggtagaaatggtgacgagggggaagataattacatttccagggtcaggaacttggcaacagttttcctaaagtgactcagacacaccacagtaacaactcttgctgcaattttattttcatttga

SEQ ID NO: 47538 - DNA, 387 bp, Gossypium hirsutum
  Clone ID: LIB3196-039-P1-M1-H10
atgcaatgagaagatcaccatgcagaacctcaacgaccgcctggcttcctacctggagaaggtgcgcgccctggaggaggccaacgccgacctggaggtgaagatccgtgactggcacctgaagcagagcccagctagccctgagcgggactacagcccctaccacaagaccattgaagagctgcgggacaagatcctgaccgccactattgaaaacaaccgggtcatcctggagattgacaatgccaggctggctgcggatgacttcaggctcaagtatgagaacgagctggccctgcgccagagcgtggaggctgacatcaacggcctgcgccgggtgctggatgagctcaccctgtctaagactgacctggagatgcagatcga

SEQ ID NO: 47539 - DNA, 366 bp, Gossypium hirsutum
  Clone ID: LIB3196-039-P1-M1-H11
caaaaacacctattctcttgagtaactgtaacaaaattcagcaaatatggaagccaacaggggccagaacggtattcaacagctgctagctgcggaacaagatgctcagcatattgtcaatgctgcaagaaatgcaaaaatggctagactgaaacaggccaaggaagaggcagagaaagagattgctgaatatcgtgctcaagtagagtatgagttcaagaagaaagtggcggaggcgatagacttgcttcgagacccagttatccttgattacaatatgagctaaaccattaaccatgtttgtggattatcagagtagcggatactcgggggctaatgtgaagcggctcgagacggaaacagatg

SEQ ID NO: 47540 - DNA, 318 bp, Gossypium hirsutum
  Clone ID: LIB3196-039-P1-M1-H12
atgcttcatgcacattaacttttagctcatttcatggagatgggacactcctggctgcttgtctagcaacctggctgcctgtctagcatgtctggctttggaacaaggattcccatttcagaatgatgagagtaaaagcccttttactgtgtatagcacattataaattattttcacatctgtgaacttatgttagcttcacaacaactttgttggttttatgattcccattttataaatgaggaatgtgggctggagaacatgaagtgcccaaatgaggaacgtgcaagtgttagatcaaggaaaatagactgcacc

SEQ ID NO: 47541 - DNA, 361 bp, Gossypium hirsutum
  Clone ID: LIB3196-039-P1-M1-H2
tcaaaaagttgggtggtggattattttaataaatgtgaacattaaatgagttaaattttccattatagatcaagatagacgagaagactacctcaaacggggaaaagagaagatagtggagtaaattgcaaaattgcaatattttgcatcgaggtaagtaaacatgtgaaataatgcattattttgatattatttgatatgtgttgagatttatttgaacatagaataaatatgtggcaaagattcaaaaaaaatgtggctaagtggggaaaggtggtaaagtgttgaaaaacacggtttctggttgaacactcggaataggccggattacattgaatagaaagggggttgctaagtgctg

SEQ ID NO: 47542 - DNA, 363 bp, Gossypium hirsutum
  unsure (1)..(363): unsure at all n locations; Clone ID: LIB3196-039-P1-M1-H3
ctttctttggctttcgcatcagctccatggatcgggcgcagctcctcctcgtaggattacctctcttcctcttcgccactgatctcctcagcctcttcactcctccgcccccaaanccnccgtcccatcaccatcaccatcaccaccatcatccccacctacccaaacctccactcaatcctgaaaccctagatatttctttacagaaacccagcgctagtggaggaatcggctatggcagcacggtgaatatcaatttctgcgcttcatgctcttacaggggaaatgctgtgacaatgaagaagatgttagaagcccagtttcctgggaattgatgtaaatcctgataactatccaccatca

SEQ ID NO: 47543 - DNA, 383 bp, Gossypium hirsutum
  Clone ID: LIB3196-039-P1-M1-H4
atcgccttcttcctgccggagctgatatttgggttcctggtctggaccctggtagccgccacccacgtagtattcccattgctgcaaggatgggtgatgtatgtctcaatcacctcgtttctcatctccttgatgttcctgttgtcttacttgtttggattttacaaaatatttgaatcctggagagttctggacagcctgtaccacgggaccactggcatcctgtacatgagtgctgccgtcctacaagcacatgccacgattgtttctgagatcatggacccgagaatttactacattaacacggcagcctcgttcttcgccttcatcaccacgctgctctacatcctccatgccttcagcatctattaccattgatgcac

SEQ ID NO: 47544 - DNA, 372 bp, Gossypium hirsutum
  Clone ID: LIB3196-039-P1-M1-H5
gactacttgaagcttgctgtcggcacaccggaattttccagatgaataggcgtgtaagatggaatgaggaaaatctgggggaaattgaagcaaataaacccgtaaggcagaaaataactgaacccaagacgccgtaccaccccatgattgatgatgatgggtctttgtctcccagaggacgtagtttcaacgattgtgtcattgatgtggatgctgaggaattatgctctgctttgaaagatgtggcttcctcaagtagaaaaacaactgggcagtctggtggttggacttcttctgatgatgaggctgatcctatggatcatgatgaagaagatcagaatggtaagagttttaaggagcaaaggaaagcac

SEQ ID NO: 47545 - DNA, 370 bp, Gossypium hirsutum
  Clone ID: LIB3196-039-P1-M1-H6
taataagaagacacggatcaaaacgatgtaatgaaacatgttgggtgaatggaagaataaaataagaagcatgggcaataaactaataagaaattgaaggaagaaaacaaagagaaaaaatgtaacaccccgaacccgagaccgacaccggagccggacacgagatgttaacaaactttgaaaaatttttccagacactgcccagtctgagtactagtcgcttcaaaaatcatatcttgagtttcacaactcgaaaatcagttttgtgatttttccctgaaactagactcatgtccccacctatgtatttttttctagaatttttggtcgggccaattagtacagtttattagtcaaagtctcccatgtt

SEQ ID NO: 47546 - DNA, 380 bp, Gossypium hirsutum
  unsure (1)..(380): unsure at all n locations; Clone ID: LIB3196-039-P1-M1-H7
atccagaatacacaggttccaatacatatgaagaggcagctgcctatattcaatgccagtttgaagatctgaacagaagaaaagataccaaggagatctacactcacttcacctgtgccacagacacgaanaatgtgcagtttgtttttgatgctgttacagatgtcatcattaaaaacaacttaaaggaatgtggactttattgaaaagcatggatgttagtgaaagttactacagtgtggagtgttgagaccagacaccttttgctgtcttacggggcagctacaaacatgaacgggaccagggaatggcagcagcatgcagaatcttagcactctttagcacaatcttctatattagggaacttttaattgacatga

SEQ ID NO: 47547 - DNA, 313 bp, Gossypium hirsutum
  unsure (1)..(313): unsure at all n locations; Clone ID: LIB3196-039-P1-M1-H8
gcgaggtcacgtggaatcgatctgnttaagatcgatatgggacgtcctttggctgatcaaggaccgtttgattgcgtgcttcacaagttgtacggtgaggattggaggagtcaacttgaggatttccgttctcaaaaccctaatgctgtaatcattgattctcctgctgcaatcgaacggctccacaataggatttcgatgctccacgtggtgtccgaactcaagatcgaaaatcaaagcgaaacctttgagatccctaaacagatcgtgatttacgatcgggaaaccttgcttgataaccaatcttgggaat

SEQ ID NO: 47548 - DNA, 342 bp, Gossypium hirsutum
  Clone ID: LIB3196-039-P1-M1-H9
tgagatataaaaaaaatagaaaaaaaaattaatgagatataaaattggaggggtgcaacacgaggacttcccaggaggtcacccatcctagtactactatcgcccaagcacgcttaactgcggagttctgatgggatccggtgcattagtgctggtatgatcgcacctgtaaattcttgcgcattctatttatataaaggctacccctgatcgcgcttgagcctcgaatttgaatttaaatacgtccaaataacgtttcgagtgatttattccataaataactaattagttatacgatgagatataaaaaaaatagaaaaaaaaattaatgagatataaaat

SEQ ID NO: 47549 - DNA, 121 bp, Gossypium hirsutum
  Clone ID: LIB3196-040-P1-M1-A1
tgaagacttatcatttcaatcactgtgctatgcacacacacacacatactttgaagaaaaaaaaaacctttaaagctctctttgaaactcaagcattactgtataatctgatcatctcttc

SEQ ID NO: 47550 - DNA, 407 bp, Gossypium hirsutum
  Clone ID: LIB3196-040-P1-M1-A10
atgtcgggggcctgggctggtgcttcatggtcttcgtggacatgtgagggccgtgggcgtgagcttgatgtatcgtcccagcctgtggctgtgttctttacatcggtgggactgcccatgccgcaggcagtcgctgctgcctggcgcccacggagagaaaagaaagggctgagacttccgtgatgggggtgcggatgccgcccctaggctggcttcctgcgtccaccctccccatgtgcactctcaggggcggcgcccacctgcgggtggctcctgttcacacgacttcaggtcatactgcggagtgggccgtctgttctgcctctctgtgggcttctctccaggaccccagctgccaaggactttagacgtcacccttggaggcctctggacacagagggctgtgt

SEQ ID NO: 47551 - DNA, 162 bp, Gossypium hirsutum
  Clone ID: LIB3196-040-P1-M1-A11
cgtaagactttcaaacactgctgatccatagagaacctcatgtgccaagtcctaggctcaatagaaaggagtgaacccatgatcatcatcacgtctcttgctaaagggaaacccgcatatcagtctggtgcagccgcatgttctacggactgtacggagggt

SEQ ID NO: 47552 - DNA, 320 bp, Gossypium hirsutum
  Clone ID: LIB3196-040-P1-M1-A3
tacaactcatagtaacgtgcaaaaacgcagagctggtgccggtcccgaatccccgttatcgctgttgtgacagccagtccgggcactgacctcatctggaagaaccagagctgatcttgcactgtcgatgagcccaggcaatactgactaaaactcagctagaggagggggcacgcagaacccttggtgggaagaagcttattctcacatagtgtctagttgtgggaccaacaaaggcagcagctggttcttggggcatcttcattcttttggggcctcagttttatttatcaaaatactggacattatactggtcacat

SEQ ID NO: 47553 - DNA, 298 bp, Gossypium hirsutum
  Clone ID: LIB3196-040-P1-M1-A5
gaaaaagataacattttctctttattttatttattagtcaaatacaccacctaatggcaacaacctttgattttttttttgactttctttgtctcaatggccgactatgcctaaaaaaattggcctatttgcacattaaatacccctaatttataatccatggccatttaacactattttctagcaaatcataactttttcccctatgatatttagtcctttttcgaaattaagctctcaaacgttaaaattacttcaccaaatttttcatgcactattataattaggctataacacc

SEQ ID NO: 47554 - DNA, 409 bp, Gossypium hirsutum
  Clone ID: LIB3196-040-P1-M1-A6
atccgccatctgctctgcagtcaagaagcagcaaccatgcgtgagtgcatctccatccatgttggccaggctggtgtccagattggcaatgcctgctgggagctctactgcctggaacacggcatccagcccgatggtcagatgccaagtgacaagaccattgggggaggagatgattccttcaacaccttcttcagtgagacgggcgctggcaagcatgtgccccgggccgtgtttgtagacttggaacccacggtcattgatgaagttcgcactggcacctaccgccagctcttccaccctgagcagctcatcacaagcaaggaagatgctgccaataactatgcccgagggcactacaccattggcaaggagatcattgaccttgtgttggaccgaattcgtaagc

SEQ ID NO: 47555 - DNA, 365 bp, Gossypium hirsutum
  Clone ID: LIB3196-040-P1-M1-A7
ttcttcttcggtttatctctgaagtcttatcatttcaatcactgtgctatacacacacacacacatactttgaagaaaaaaaaaacctttaaagctctctttgaaactcaagcatcactgtataatctgatcatctcttcaaatatgccacgcccttttttccataagcttattctctcctctactctccaagataagaaactgaggatccctgataactttgttaagaaattcaaggatgaactttctgttgcagctgctctcactgtccctgatggtcatgtttggcgtgtagggattaggaaagtcaatacaatcatgggaaatcgtatccgttcgatgaactcgaagaccaagaatgcatg

SEQ ID NO: 47556 - DNA, 355 bp, Gossypium hirsutum
  Clone ID: LIB3196-040-P1-M1-A8
atggggagggccagttggggcctgccgagcgggccaaaaaagtggaggacatgatgaagaagctgtggggtgacaggtactttgacccagccaacggcaagttcagcaagtcagccaccagccccgatgggaagaagctgccacgcaccttctgccagttgatcctggaccccatcttcaaggtgtttgatgccatcatgaatttcaagaaagaggagacagcaaaactgatagagaaactggacatcaaactggacagtgaagacaaggacaaggaaggcaaacccctgctaaaggctgtgatgcgccgctggctgcccgccggagacgccttgttgcagatgatcaccatcca

SEQ ID NO: 47557 - DNA, 402 bp, Gossypium hirsutum
  Clone ID: LIB3196-040-P1-M1-A9
atgaatcattcacctgtgacctctgtgggcctgcggggggacagcaggggcacatgacatctgcctgggccctgaccaataaatcctcagaccctgctgtggatggggagcaggggtacctttgggaggtgaggactttatttaaacagcggttctagtgtgggaccaagagaggcagcagctgggtcttggggcagcttcattcctgttgggcctcagtttctcttccccacattgagggacttgtgccgggtgacatgcagggtctccctctgccctaacaggatatgcatgatgacaggcagtgtgatgtgttctgaaagggtccagggcaaagcacagggagagggtggatttgtgtagggtgcagctctggagaagctggatcattcccggtcccac

SEQ ID NO: 47558 - DNA, 409 bp, Gossypium hirsutum
  Clone ID: LIB3196-040-P1-M1-B1
atgtggccacgagcgagggcaggcccctggggacacatctgcccacagctgcacaggccagggtgcaggcccatctgttggttctcaggcctcagatgaaaccatctccgcatcatatggccagtgaccactttctcccttcaggaaaattctgtggctgtgcagcattttgaagttttaattattaacctgctttcattaaagcagtttcctttcttgctaaatggaattaccaaatctgatcacacatagcaaggtcctgtagttacccatcctgctgccataatgggggagattgtaaggaagcagtgacaggtggtgaagcaagtgtcaaatttcagagctcttggccgacggatacaaagataaagaaaacattgcctttttctacaactgtcagaaatagtca

SEQ ID NO: 47559 - DNA, 386 bp, Gossypium hirsutum
  unsure (1)..(386): unsure at all n locations; Clone ID: LIB3196-040-P1-M1-B10
ggagaaggtcaggaaactgcttagaagaaacattctgctcaatgagactgaaacacaggacccctgcttcctctgctgatgttttcaacccacgaggtggtcgcatcaccacagttaacagtttcaatcttcccattctccaatacctccaactcagcgccgagaggggagtcctttacaataatgctatctacgctcctcactggaacatgaatgcccacagcattgtttacatcacaaggggaaatggaaggattcaaattgtgtcggaaaatggagaggcgatattcgatgagcaggttgagaggggtcaggtcataaccgtaccccagaatcatgcagtggtgaaaaaagcangaaggcgagggtttgaatggatagcattc

SEQ ID NO: 47560 - DNA, 342 bp, Gossypium hirsutum
  Clone ID: LIB3196-040-P1-M1-B11
taacacgtttgtgcacaaaagcacgctggttcccggccggaatttccgggatcccaccacctcttttcttaagctttggggtgccttcttcttctcctggtattcactaacaacatttcatgcccccaccttctcgattaccttctcattttgctgtaccttcccctgggggcattccaacttgcctttaacttaattcaaccttttttcccccaccaaacgcttcaatggggccttcaccagatacttacattaaagcctctgtcccctattaccaccattggagccgagaatttggcccttcaccctctacagttagtgaagcccaatttgaagatatta

SEQ ID NO: 47561 - DNA, 376 bp, Gossypium hirsutum
  Clone ID: LIB3196-040-P1-M1-B2
tccacgcgtccgaacgatgtgagtaagtgtttgactgaatacttatagcaacctctaaacataaagcaatgttcatacgaaaagaaaaaaagcagtgtaaggtaccgtgctataagcctgtaaacatatatcgcttaaggcaaggtaacttgagatcttgttcttgaaggaagcaaaccattttagaactcttctgagcaacagattgagtatggttttgccgaggcattactgtcagtaagggtggattctttgtaatcccgaccttctaaatcaacatcgtagaccctatatcctttgtcgtaggtttttcgacataacatatttagttgtttacttgtttgttacatattattcacgtattattctcaaattt

SEQ ID NO: 47562 - DNA, 374 bp, Gossypium hirsutum
  unsure (1)..(374): unsure at all n locations; Clone ID: LIB3196-040-P1-M1-B3
cccacgcgtccgcaaatctctgatcttctaagcatcacatcccataaaatattagggatgataacagttgtttgcaaaataaaaaaaaaaaattttattattatataaattaaataaataaataataaataaaaaataataaaaaaatntattaattatataataaaaaaaaaaaaaaaaaggggggggcctttgggaaaaaaaaccattggccaacctaagggggaattttttttgttcaaaaaaactttttgaaaactaaatggcttgaggaaaaaaaattaaagaaaggttttgggaatttaaaaagggttttgggaccccaaatttttttgtttttattcaaatttttaaactttttttccacaagcttt

SEQ ID NO: 47563 - DNA, 392 bp, Gossypium hirsutum
  Clone ID: LIB3196-040-P1-M1-B5
ctaaactgaatgaccgtttcccgtttatctattgcgttgagaatttggaattggagcgcatgccccttgaatgggaatcgtgctttaagaaattgggattggaatcaaagcccgttaatgattgttataagagtggactggggcaaaagcttgatctacaatatgcagctgaaacaagtgcccttgaaccacctcatacatatgtaccttgggttgttgtggatgggcaaccactttacgaggactatgaaaactatataagctatgtgtgcaaggcttataaaggtgctaatatgcccaaggcttgtagtggactgaccttcaatcaaatctacaataggaaaactatccatccagtttgctattaggagataccaccattaacattgtca

SEQ ID NO: 47564 - DNA, 389 bp, Gossypium hirsutum
  unsure (1)..(389): unsure at all n locations; Clone ID: LIB3196-040-P1-M1-B7
cggacgcgtgggcggacgcgtgggttctaaacccaaatcagacaccgcaggagttcaatctgccatgggggcttacaagtacgtgtcagagctatggaggaagaagcaatccgatgtgatgaggttcttgcagagggtgaggtgctgggagtaccgtcagcacccttccatcgtgcgagttaaccacccaactcgccccgacaaggctcgtcgattggggtacaaagccaagcagggttatgtcgtctatcgtgtccgtgtaaggcgtggtgggaggaagagaccagttcctaagggtattgtatatggaaagcccacaaaccagggtgttacccagctgaaattccaacgtancaaacgatcagttgcagaggaacgagctggccgga

SEQ ID NO: 47565 - DNA, 397 bp, Gossypium hirsutum
  Clone ID: LIB3196-040-P1-M1-B8
atccacacctctgtctccatcactgcctcacggtcctgcagggccagcaagatgcagtttgagatgcacgacaacgtgaaaggcaaagctatgtcctaccccgtgaccagtcagccccagtgcgccaccaccagctgctaccagacccagctcagtgactggcacacaggtctcacggactgctgcaacgacatgcctgtctgtctgtgcggcacttttgctcctctgtgcctcgcctgccgcatctccgacgacttcggcgagtgctgctgcgcgccctacctgcccggaggcctgcactccatccgcaccggcatgcgggagcgctaccacattcagggctccgtcgggcacgactgggcggccctcaccttttgtctgccctgcgcgctctgtc

SEQ ID NO: 47566 - DNA, 382 bp, Gossypium hirsutum
  Clone ID: LIB3196-040-P1-M1-B9
aagggctcaactgaatacgttcctgatccaatcgagctaatagttggtccatttactagctctagccaagcagttcaaagaggcaattttggtcttagttgaacgagtttgggaggaagcttcaactggacttgtcaatcatgtttgggatggctcatcaagtgctccttgtaatttacttcaagccgaattcaacttaactagctaactcagctgttgaataagacttagacatttttagttatttcaattatattatttatgttttgatttcatacaacattattacatgtttgattattttagttaagactactaaatgtgtcctagtttgtacaactttattacatatctgattgtttagttgttctatgtttattac

SEQ ID NO: 47567 - DNA, 386 bp, Gossypium hirsutum
  Clone ID: LIB3196-040-P1-M1-C10
tttccttttcctgtaaaaatggagggttcctcgtctgacaagctgatcgttgtgacccgtgaacctgatgggatcgctattgttaccatcaatcgacccaaatctctcaactccttgacccgacccatgatggtggacttggccaaggctttcaaggctcttgcgaaggacaactcggtgcgggtcatcatcttgtctggagctggacgggctttctgttcaggcgtggatttgacggctgcacaagatgttttcaagggtgacgttaaggacccggagacggatccggttgttcagatggagcaatgccccaaacccatcatcggagctatcaacggcgttgctattactgccggcttcgagatcgccctcgcttgtgacatgct

SEQ ID NO: 47568 - DNA, 253 bp, Gossypium hirsutum
  Clone ID: LIB3196-040-P1-M1-C11
atgccgcctggactcagagctgagaaacatgcaggacctggtggaggacttcaagaacaagtatgaggatgaaatcaacaagcgcaccactgccgagaatgagtttgtgatgctgaagaaggatgtagatgctgcctacatgaacaaggtggagctagaggccagggtcgatgcactgatggatgagattaatttcatgaagatgttctttgatgcggagctgtcccagatgcagacgcacgtctctgacacc

SEQ ID NO: 47569 - DNA, 404 bp, Gossypium hirsutum
  unsure (1)..(404): unsure at all n locations; Clone ID: LIB3196-040-P1-M1-C12
atggaaatgtcaagcagattatgaattacatgaccaaatattttgtattggagaagctttgcgcaccagttaaatctcattccttcccttttttttttcaaatggcaccagctttttcagctctcttatttcttccttgagttgcatttattcctaaggtaggcagggtatttcctagtaagcatactttcttaagacagaggccacttggttcctgggagaataggcagccccacgctttgaagaccacagaccccaatatctagtcgtggatatacttaaaacactgaagagcataaccttttgggtcaaccgttggtcaaactatagggaccatcacacgggtagggattttccatccagagccaataaaagggctggtgggggccggnggtggctattgt

SEQ ID NO: 47570 - DNA, 417 bp, Gossypium hirsutum
  Clone ID: LIB3196-040-P1-M1-C2
atgcagcagcggctgatcaatgacctgactgcgcagagggggcgcctgcagactgaatctggtgaattttcacgccagctcgatgaaaaggatgctctggtgtctcagttatcaaggggcaaacaagcctttactcaacagattgaagaactaaagaggcaacttgaagaggagataaaagccaagaacgccctggcgcatgccctgcagtcttcccgccacgactgtgacctgctgcgggaacagtatgaggaggagcaggaatccaaggctgagctgcagagggcgctgtccaaggccaacaccgaagttgcccagtggaggaccaaatatgagacggacgccatccagcgcacagaggagctggaggaggcaaagaagaagctggcccagcggctccaggctgctgaggaacat

SEQ ID NO: 47571 - DNA, 318 bp, Gossypium hirsutum
  Clone ID: LIB3196-040-P1-M1-C3
gaacgctgacgcaggagcaggctgggccccggtctccatgatgcgacacacgcttatgaacaccctgactatccgacggggtgacgtgctaactgaggtttaggcattctaaccccccctcagcgaaaaggctgcgtggatgacacaatgatgactggccgaacaagactacagttgacagcccgaatttctaagggggaaagttcaacatgtgagagcatccgtgtacacccaggctcatgcgctgcagtcattccgccacgactgttacctactgttggaacagacttaggaggggcaggaattcaaggctgggct

SEQ ID NO: 47572 - DNA, 397 bp, Gossypium hirsutum
  Clone ID: LIB3196-040-P1-M1-C4
cccacgcgtccgagcgtttgtctcagatctcagaagatggcccgtaccaagcaaaccgcccgtaagtctactggtgggaaggctccaaggaagcaacttgctaccaaggctgcccgtaaatctgccccaaccaccggtggtgtgaagaagcctcatcgataccgtcctggaactgttgctcttcgtgaaattcgtaaatactagaagagtactgagcttcttatcaggaaattgcctttccagaggcttgttcgtgaaattgcccaggacttcaagactgatttgcgtttccagagccatgctgttctagctctccaggaagctgcagaggcataccttgtgggtctttttgaagacaccaacctttgcgcgatccatgccaagcgtgtcacaatta

SEQ ID NO: 47573 - DNA, 141 bp, Gossypium hirsutum
  Clone ID: LIB3196-040-P1-M1-C5
gcgtccacgcgttcgaacaaaatgtatattttatagatttatgttgggttttttacaagaatattataaaaaaataaaaatttaccaaaatattataactttttttttatttaccaaaatatataaaaaaaatctatttac

SEQ ID NO: 47574 - DNA, 393 bp, Gossypium hirsutum
  Clone ID: LIB3196-040-P1-M1-C6
atgcccagctaattttcgtagatcagtataaatggggcttctccatgttggccaggctagtcttgaactcctgacttcaggtatccgcccgcctcggcctaccaaagtggtgggattacaggagtgagccactgcacccagacggcccgtctctttttgtttactctaggctgctctcaaatacgtttcctcttctttatcttgctaacccctacaaatacctcaaaactcagccctggtgtctctgcggcatgcatgaggtgtctgacctgtctgaccttccagctgaactgttagctccttgagcagagcgcctggcacggcacagataattgtcaagaagctttgatgagcaaatgcatgccaagcaatttctagatgtcaactcactga

SEQ ID NO: 47575 - DNA, 414 bp, Gossypium hirsutum
  Clone ID: LIB3196-040-P1-M1-C7
atccagcggcgacggtagcagcagcatgggcgcgatctatgggggtatagaggggggaggcacacggtccaaagtccttttagtctcggaggatgggaagatcctggcagaagcagatggactgagcacaaaccactggctgatcgggacagacaagtgtgtggagaggatcaatgagatggtgaacagggccaaatggaaagcaggggtggatcctctggtaccgctgcgaagcttgggcctatctctgagtggtggggatcaggaggacgcggggaggatcctgatcgaggagctgagggaccgatttccctacctgagtgaaagctacttaatcaccaccgatgccgccggctccatcgccacagctacaccggatggtggagttgtgctcatagctggaacaggctccaa

SEQ ID NO: 47576 - DNA, 409 bp, Gossypium hirsutum
  Clone ID: LIB3196-040-P1-M1-C9
atcccagccctgcagaccctggaattctgtctctgctcagtgcccccttgggctccggtggctttactctcctgcatgcagcagctgcagctggcagaggctcagtggttcgtctgctgctggaagcaggtgccgaccccactgtgcagtgagtaaaggtccccatcctgagtcattttgggtatagagaggataatttggaggttaaagttggcactgactacttgacaatattctcttggtctggttgggtgatgttaggaaaggcaggaggcaagttaaacccatttttggagtttttgcgcctagggactctcgggcccagccaccttacactgttgcggctgacaaatcaacacgtaatgagttccgaaggttcatggagaagaatccagatgcctatgattac

SEQ ID NO: 47577 - DNA, 376 bp, Gossypium hirsutum
  Clone ID: LIB3196-040-P1-M1-D1
cccaacttaccagagaaatctatactaacccagttcttgagaacttcgacggtagcttccgtggttctgcccaaggtatcgaaggctccatcaggagcccacacttgatggacatcttgaacagcataactatctacaccgatgctcacagaggagagtattactggtctggacaccagatcatggcctctccagttggattcagcgggcccgagtttacctttcctctctatggaactatgggaaacgccgctccacaacaacgtatcgttgctcaactaggtcagggtgtctacagaaccttgtcttccaccttgtacagaagacccttcaatatcggtatcaacaaccagcaactttccgttcttgacggaac

SEQ ID NO: 47578 - DNA, 367 bp, Gossypium hirsutum
  Clone ID: LIB3196-040-P1-M1-D10
ggcgattaacccttctttgctctttctttcccttctttttctcttcaatggctgcctagctcgccagaccttttcgtcacagcagtcccaaaatgagtgtcaaatcaataggctccgcgcctctgcaccccagacccgaattcgctccgaagccggcaccaccgagtggtggaaccccaactgtcaacagctcatgtgtgctggtgtatctgtaatgaggcagactattgaacctaatggccttgttttgccttccttcaccaatgctcctcagcttctctacattgtccaaggaagaggtattcaaggtattgtgatgcctggatgtgccgaaacattccaggattcacagcaatggcagcatcaa

SEQ ID NO: 47579 - DNA, 389 bp, Gossypium hirsutum
  Clone ID: LIB3196-040-P1-M1-D11
gaagccccaagagaaaagaaaaaggaggtgtgtggaatcttcaaagaagaccaggaggaagaatccttcccttttttctttttttccccagaaagagcgattcctttcccttcccttctagttcctcgtttactttttcttcttctttcccttctgattataataagatttgggtttcgttatcctctgaaactctctctctggtttgaaaggagattgaaaaaatatggctgaagaacatagatgtcaagcaccacagttatgtgccaacaactgtggatttttcggaagcccgacgactcaaaatctctgctctaaatgttatcgcgatcttcaacttaaagaacaacaatcttgctctgccaaacaagcctttaatcacactttcg

SEQ ID NO: 47580 - DNA, 392 bp, Gossypium hirsutum
  Clone ID: LIB3196-040-P1-M1-D12
atgtggctttgctggtggtgatgggcttctggtgggcagtgagaaggtgaccatgcagaacctcaacgaccgcctggcctcctacctggacaaggtgcgtgctctggaggaggccaacgccgacctggaggtgaagatccgcgactggtaccagaggcagcggcccagtgagatcaaagactacagtccctacttcaagaccatcgaggacctgaggaacaagatcattgcagccaccattgagaatgcgcagcccattttgcagattgacaatgccaggctggcagccgatgacttcaggacaaagtacgagcacgaactggccctgcggcagaccgtggaggccgatgtcaatggcctgcgccgggtgttggatgagctgaccctggcca

SEQ ID NO: 47581 - DNA, 364 bp, Gossypium hirsutum
  Clone ID: LIB3196-040-P1-M1-D2
atgatgctcacactttggattggcaggaaaggggctgtggcggaaacaaaaggagatgagggcaggggcacttttaggaaggactgaggctactggcgatgtcacatgactgttgagaagaagggaatttgttagcaagtggttacatttagtaggaaaagtgttgagagcatggatttggattaaaagggggtaagcaattgaggaggaaatgaaaattgggcaaaacattccttttggaagtttggatggtaaagggaagttgttgttgaagggaataacaggatctttatgtttggcttatttactggtctatggggaggaggtgggagaggaaaaagttagatacaggacctgggcaaac

SEQ ID NO: 47582 - DNA, 367 bp, Gossypium hirsutum
  Clone ID: LIB3196-040-P1-M1-D3
actttcgctccttacaactacggctcaggctcacacacacattgactgaatgggtcgcgctatccgggctgaacgtaggggcgctggatctgacatgactgccgacacgaagggactcatgtgtcctgcgctttcatttagtctgaaaagcgttgagagcatgggttttgattaaaagggggtcagcaattgaggaggaaatgaaaattgggcaaaacattccttttggaagtttggatggtaaagggaagcttttgttgaagggaataacaagatctttatgtttggcttatttactggtctatggggatgaggtgggaaatgaaaaattttattcagttattgccctaataaccctgcccttttt

SEQ ID NO: 47583 - DNA, 306 bp, Gossypium hirsutum
  Clone ID: LIB3196-040-P1-M1-D4
atttgatcttttcccatggaagtctcaaagatctttcattggttgtttctctgagccttgctactaaaatgagcctcgtggggagcatcaaagaaagccaggtgtgtttccctagactctataactatctctctctctctctctttctctctctctctctctctctctggctctctctgactatctctgtgtctctctctatatttctctatctctctgtgtatatatgtgtccctgactctggctctctacatgctctctgcttcggtatggaactttacttagacattttgtagcctttatttt

SEQ ID NO: 47584 - DNA, 393 bp, Gossypium hirsutum
  Clone ID: LIB3196-040-P1-M1-D5
agctgctctccaagtctttcaagtcatcatggcttcagagaagaaattgtcgaacccaatgagggaaatcaaagttcaaaagctcgtcctcaatatctccgtcggcgaaagcggcgatcgtctcacacgcgccgccaaggtcttggaacaactcagtggtcaaacccctgttttctctaaggcaagatataccgtgagatctttcggaattaggcgtaatgagaaaattgcttgctacgttacggtgaggggagagaaggcaatgcaacttctcgagagtggtttgaaggttaaggaatacgagcttttaaggaggaacttcagtgataccggctgcttcggatttggtatccaagaacacatcgatcttggcatcaagtatgatccttcaac

SEQ ID NO: 47585 - DNA, 415 bp, Gossypium hirsutum
  Clone ID: LIB3196-040-P1-M1-D6
attgaaaattttaatttttgttgatttagctatcccacattataaatcatccttaaccattttatatcagttaaatacaggggtggggtgggggaggaatgactggcatgtagacatgtattgatttgggaatatctgagcatttctttcattgttggtaagatatcatgatgaaattaaaacagcagtatggagcattatatatcagtaatgtgatactttatatacttaagccagtttaaccattttgggaaatgttagcataaggaaataaaatccaaaagaaggaagataagctatatgcaatgcaaaatttgcttattgcaatatttttatatacaaataaagacactaaaaacagttttcacagtccatcattacataactaaagtaagtaaaatgatatgtatcaact

SEQ ID NO: 47586 - DNA, 389 bp, Gossypium hirsutum
  Clone ID: LIB3196-040-P1-M1-D7
cttctttcaacttccaaactccatcatcatttccgtttctctcctctcaaatcccctcgcttctcctgctcagcctctgcttcaagcacaatggctaaacaagttttggtgccgatcgcgaacgggacggagccgatggaggcggtgattacgatcgacgtgattaggagatcgggagctgacgtcacggtggcttccgtcgagaaagagcttcgcgttgacgcttgccacggtgttaaaattgttgctgatgctcttgtcgctgattgtaagaataccgttttcgatcttatcgcgcttcctggaggcatgcctggtgctagcaactttaaagattgtggagctcttgaaagtcttgtgaaaaagcaggctgcagatgggcggcttta

SEQ ID NO: 47587 - DNA, 345 bp, Gossypium hirsutum
  Clone ID: LIB3196-040-P1-M1-D8
atggaaaacagtatggcgattcctcaaggatctagaactagatgtaccatatgacccagccatcccattactgggtatatacccaaaggattataaatcatgctgctataaagacacatgcacacgtatgtttactgcggcactattcacaatagcaaagacttggaatcaacccaaatgtccatcagtgacagactggattaagaaaatgtggcacatatacaccatggaatactatgcagccatcaaaaaagatgagtttgcgtcctttgtaaggacatggatgcagctggaaaccatcattcttagcaaactatcacaagaacagaaaaccaaacacctcat

SEQ ID NO: 47588 - DNA, 378 bp, Gossypium hirsutum
  Clone ID: LIB3196-040-P1-M1-D9
aacatgtcgtgcgacgggaacgtcaccggcggcggcggcgctaacaccgtcggcgtaaccaataagcctttcttttgctaccaatgcaaccgtaccgttaacgtaacgatatcccctccctcttctgatccgacttgtcccatttgcaacgagggtttcctcgaagaatacgacaacccaaaccctaatcaaggttccggtttcctaaacccgaatccgaactcaatcccgttccatgaccctttcttgacgttatcggatccgttcgcttccctccttacgctcctttttccgtcctcttcatccacaactacctcatcctctgcttctattgaccctaataaccctagcctatctgggccgacccgctcaggtcga

SEQ ID NO: 47589 - DNA, 384 bp, Gossypium hirsutum
  Clone ID: LIB3196-040-P1-M1-E1
cagggactcagaaagcctctggcaaacctgcgcaaaacggtcgtcgcctgtcaaaaagtgaaagcattagtgcttcaagatgtgtgggcgtcattcgaaaacctcaagggatgcacggagaagtgcagaaactggtcgcttaacatgcttgggaacttgcaaacgtttgactaagaaaaatctgccgattcttggttttcttttgctatgtccatgatattcctctggaggttcttaatctgtcttaataaactaatatgtgctacctgtagttactttattgtactctggacaaggaaaaaaattgcctgacttatgatttggaaattatttaaggcaggcaatcttgcggtgacaatttgggtcaatttccaatagttcagc

SEQ ID NO: 47590 - DNA, 393 bp, Gossypium hirsutum
  Clone ID: LIB3196-040-P1-M1-E10
cccgaacatcgttaccccattaccaaaatctgaatgatttcgaatggtgcttcagcggcggtgacgaatgtaggtttgctaccgctcacaatactcctcgttttggcaatgcaggtcggtccaatgctcctacgacaccgactcagagtgtgtgcggggacggatattttaggccatattccaacttccccaactatatgaccaacacacaatcgtttaaggcgaaattacgatcttacagtgccccaaagcaaagaccagaatcaggaggtgcaaagaagaggctttcgctcaatgaaataatggctgctagaaacagcataagtggagttagaatgaacaaatcatattaccaaattcatcatcaattttgaataggaaacaaaaaaagat

SEQ ID NO: 47591 - DNA, 389 bp, Gossypium hirsutum
  Clone ID: LIB3196-040-P1-M1-E11
cggacgcgtggggtattggctatctgtgaaccccttaccccaatccgatatgcactgtgaggtcgagagataagtagttctagcagactcattagtttattggaagatctagatatcctgtttatgtaatgactagtagattgagtagaaacctagaataggaattaattataaccactaaagtgagctaatcacccattcttagatttggttgagttatatataagtttttcattttcactcttttatgcatgttttactctttccttattaaataaatatttttcactttaggccttatcatactataatttatttatgatactaattagatctatttacgtttaagttaatattagtacttgccttccttgggttcgacctttgga

SEQ ID NO: 47592 - DNA, 332 bp, Gossypium hirsutum
  Clone ID: LIB3196-040-P1-M1-E12
cccacgcgtccgaaatcacgagcgactcactctcagactcagctgagttaaaatcgctaaagcgatatggctttgcagctatgggaaacgttgaaggaggcgacaacggcgtatacgggtctatctccggccactttttttacggttctagctctgttatgggctgtttactatgtagcaaagggtctatttgggtcatccgatgatcatatccatcaacggtctacggctttcgaggagcagatggagccgctaccgccaccggttcagctcggcgagattaccgaggaggaacttaagcagtatgatgggtcggattcaaagaaatcact

SEQ ID NO: 47593 - DNA, 368 bp, Gossypium hirsutum
  Clone ID: LIB3196-040-P1-M1-E2
ctgcatttaatttcttaggtagagcttatttcggttcaaacccggttgatactaaactcggaaccgacggtccgagtttgatcgctaaatgggtattatttcaacttgctccggttctttcccttggtttacccaaatatatagaagaccttttaattcatacgtttccgttaccatcttttcttgtgaaaaaagactacaaaagattatacgattttttctacgaatcggccggttcggttcttgatgaagctgaaaaatgggcatttcacgtgaagaagcttgtcataatctttattcgctacgtgctttaataccttcggcggcatgaaaatcttcttccccaacatattgaaatggatcggtaa

SEQ ID NO: 47594 - DNA, 176 bp, Gossypium hirsutum
  Clone ID: LIB3196-040-P1-M1-E3
cagaaatagagaaattaagaggagtcattcttagtacatacagcactttttgctaaacaactaaccgacggcccctgttatagcgctagatgttttattattaaaactggctccgcctctttttattggtttacccaaatttatataagaccttttaattcatacattgttccata

SEQ ID NO: 47595 - DNA, 397 bp, Gossypium hirsutum
  Clone ID: LIB3196-040-P1-M1-E4
gtaaggggtgttgtaacaccccaaacccggcccagacattatggtcgaatctgacgtgccacattggagttgaaaatccacgttctgttttagtgttttaaaaaccatatattttgttgagttaacaaagtgtatggaagcttggcaccaggtaggtatccgagatagaggaggtgagccatgaaggctgcttaagtaccaagctctttgattggatcgaatcctagacatgcccacaaccatacccacactttgttatatcgagtttaaatttttttaagtgaatgactttgataaatcaattaatcgtggtgttgaactcttttgaaaacaagtatcgttttgaaaacacgtcctaagtctagcccatttgaataattatcaaccaggtttgaag

SEQ ID NO: 47596 - DNA, 289 bp, Gossypium hirsutum
  Clone ID: LIB3196-040-P1-M1-E5
atttttattatatatgtacatataaatatttatatagtgttatttttaattactttattttaatattattatattatatttcctttttgtatttcattattattattgctagtattattatcattatcatcattattatcatatacaaattcctattacaaatgatattttttctatgtttttaatttcaacaaataaggtaacgtaccgatttcaacactaagttgctgatttcatcgctatgttgggtggatatcattgactcatgttaaaaactagacgtccttct

SEQ ID NO: 47597 - DNA, 367 bp, Gossypium hirsutum
  Clone ID: LIB3196-040-P1-M1-E6
aacaaatgcaaatgtaaacaatgtcaaactgtgtttagctctggcttctgctcctgagatggattccaagttattttcgcagctaaaagtggttcgaaaaattggtaatcttttggagcttgtatatgcaaaggttatggaagactttcttgagccaactcttggcttgtttaaggcttttcttctccgctctagtggaaatggtttcgtttacacaaaagaacccacactgttacttgatggttcattcgagtcaagtggctcattcaagcagcagcaatgcattagagatataatggactttggcagcaatgttggagtgctattggaggtaagtgcatctcatgaaccgaacattgctgatgta

SEQ ID NO: 47598 - DNA, 377 bp, Gossypium hirsutum
  Clone ID: LIB3196-040-P1-M1-E7
cttttctcccccatttgtctctttttggctagggcttcatatccatcatggccgccgccgttaaggccaccatggacggtggttgaaggcatgtgaaaaggagggtttttcacctccgtttaaagagtttgaaaaccaagcctcctcaaaacccccctcaaaaaaatgatatatgaaagaaaggcccctttttctctcttgaaatcgacatcagcaacggagaggagaattccgatggccgaccacagggcgttcgaggaaggttctcctcttttttctttttattgatttttctatttaaaatagatttgtaatgaaaataaaaagataaaaaaatttaaattgaacataaagaaaccgaacaagtagagactaaa

SEQ ID NO: 47599 - DNA, 376 bp, Gossypium hirsutum
  Clone ID: LIB3196-040-P1-M1-E8
atggactacgtggacattgtgcaggggcggcgcattggtgtctggaatgtgccctatatttcaaacatctacttgatcaaaggcagtgccctacggggtgagctgcagtccccagatctcttccaccacagcaagctggaccctgacatggccttctgtgccaatgtccggcagcaggatgtgttcatgttcctgaccaaccggcacacccttggccacctgctctccctggacagctaccgcaccgcccacctgcacaatgacctctgggaggtgttcagtaaccccgaggactggaaggagaagtacatccaccagaactacaccaaggccctggcggtgaagctggtggagacgcccttgccggatgtctact

SEQ ID NO: 47600 - DNA, 404 bp, Gossypium hirsutum
  Clone ID: LIB3196-040-P1-M1-E9
atgctgggtgtcgtgcatccgtagtcccagcttgctgggaggctgaggcgggttgttcgcgtccaactggtcaacaaagcaagaccccgtctcaaaaaaaatacttttttaaaaaatgaggccaggcgcctcattttaattgttcggtaaaattaaaagtggtttgggcacttgaggaaggggtacagatgcgtgcgtgcctggggacgcttgcacacaacttgagaaaagcagatgcagaattgagttctcatgtcctgctctgacacagggtagcccctgatacaggtcacccatcgtccacttgatgacttggtgagtgacccatacaggtgcatctgaggctctttagatgtgagcttgtttgacatacacaagctcctgaatgaccatcacctagactg

SEQ ID NO: 47601 - DNA, 383 bp, Gossypium hirsutum
  Clone ID: LIB3196-040-P1-M1-F1
cggacgcgtgggcgaaattatttttcttttttgtcatcattgtgagtttgttgaaagcattaaaaatggatgagaacaaatttgttgttagtttgatgatcatttttctgggtttttcttatctcctcaattcttctgctgctgttcctgtaacaagatgctccatgccaaataataagaaactcctcccttcttctccttctgctcaagatgttgttgttcaggtattttgaatgccctaattgatattcttacagggtttttatccttttgcattcttttacatccttcacatgaactcacaagtaatggttaggattttggttaatttgttgtgttttttgggggcaggatgtaatgaaattgagtggaagtgaggaagt

SEQ ID NO: 47602 - DNA, 390 bp, Gossypium hirsutum
  Clone ID: LIB3196-040-P1-M1-F10
gagatattgtttactcctgaactatcttcatataatctcagaaagcacgagctgtgtaaaatccgtcggctctacaaaagagtttaagatctaacattccgcctcttaaattctatcagatctgcgtcttgctgattccatcttacattttcattgatagactttttctttggttagatccgtgatggatttcatgaaggtctttgatcagacggttcgcgaaataaagagggaggttaatctaaaggtattgaaggttccggagatcgagcagaaggtactggatgctacagataatgaaccatggggtcctcatgggactgcattggcagaaatagcacaggccacaaagaaattctctgaattccagatggttatgaatgtgctctg

SEQ ID NO: 47603 - DNA, 392 bp, Gossypium hirsutum
  Clone ID: LIB3196-040-P1-M1-F12
gaaaaccctttgggcaattgggaaattagggtagagcaaaaatggcgagaacatcatccagcaaagaaaatgctcaagctttattccattctcttcgctctgcttatgctgccactccagtcaatctcaagatcattgatctgtatgtgggtttcgcagtcttcactgctctgatccaggtggtttacatggctagtgtgggatcatttcctttcaactcttttctttctggagtgctttcttgtgttgggactgctgtccttgctgtttgtcttcgcattcaggtgaacaaggaaaacaaggaattcaaggatctaccacctgagagagcttttgcagattttgttctttgcaacttggtgctccatttggtgatcatgaatttccttgga

SEQ ID NO: 47604 - DNA, 409 bp, Gossypium hirsutum
  Clone ID: LIB3196-040-P1-M1-F2
atcactgagccacctcctcctgttcgccaggagccatctcccaagcccaacaacaagacccctgcaattctgcatacctacagaggcctgcgtaatagacgagctgccgtctatgtgggcagcttctcctgggttggattgatctctgaaagagaactatcctgaggacgtactggtgccgaagaaagcaatgattaatggaccacagaccagcagctgatccaggttattcgctctataggagtctatgatgtggtggagttgaaatttgcagagaatcgagcaaatggccagtccaaagggtatgctgaggtggtggtagcctctgaaaactctgtccacaaattgttggaactcctaccaggaaaagttcttaatggagaaaaagtggacgtgaagccggccaccc

SEQ ID NO: 47605 - DNA, 381 bp, Gossypium hirsutum
  Clone ID: LIB3196-040-P1-M1-F3
ggttcatctatctcatacactatatcattaaccacaattattcaatacataccttcactgtctcgtatttaactattacattaccacatccatgctcgatgcactaattcgttagatcgtttttcacgtgcaagaacatcgcacacttagtgccaacaatctagtcgaagctataagatatcgcacacttagtgctatcacattatacctaaccatctcaatattgcacacttagtgtcgcatatagctgaagctattccaattcgcacacttagtgctatttctagttgaagctgttgaaatcgcacacttagtgctgaacagaatcgatttatcatcgcgttcaaaccaagcttgaatatacaatttatataattcatc

SEQ ID NO: 47606 - DNA, 414 bp, Gossypium hirsutum
  Clone ID: LIB3196-040-P1-M1-F4
atggcttctggtgggcagtgagaaggtgaccatgcagaacctcaacgaccgcctggcctcctacctggacaaggtgcgtgctctggaggaggccaacgccgacctggaggtgaagatccgcgactggtaccagaggcagcggcccagtgagatcaaagactacagtccctacttcaagaccatcgaggacctgaggaacaagatcattgcagccaccattgagaatgcgcagcccattttgcagattgacaatgccaggctggcagccgatgacttcaggacaaagtacgagcacgaactggccctgcggcagaccgtggaggccgatgtcaatggcctgcgccgggtgttggatgagctgaccctggccaggactgacctggagatgcagatcgaaggcctgaaggaggagct

SEQ ID NO: 47607 - DNA, 417 bp, Gossypium hirsutum
  Clone ID: LIB3196-040-P1-M1-F5
ataaaatgtataggccagcacgtgtaccatcgacttcaagatttctgaatccatatgtcgtatgtttcattgtcgtcgcaggggtagtgatcctggcagtgaccatagctctacttgtttactttttagcttttgatcaaaaatcttacttttacaggagcagttttcaactcctaaatgttgaatataatagtcagttaaattcaccagctacacaggaatacaggactttgagtggaagaattgaatctctgattactagaacattcaaagaatcaaatttaagaaaccagttcatgagagctcatgttgtcaaactgagtcaagatggtagtggtgtgagagcggatgttgtcatgaaatttcgattcactagaaataacaatggagcatcaatgaaaagcagaattgagtctg

SEQ ID NO: 47608 - DNA, 397 bp, Gossypium hirsutum
  Clone ID: LIB3196-040-P1-M1-F6
gctatatttgttgtatacagatttcttgtgtatcaagcaaccctttttttgcttttatcaaacaaaatatttttgcatgaaatcttcctataatggcttaaatttccttaacatattatttaaaatattcaatattaatattttaataataaatatttattacaattataaatatattaataaaaaatgttttgtagtataaaggctaaagtatgtcataagtctatgtacacttcacaaatttacaatttactctttgtacttttatttttaagaatttagtccctttacttttcaaatttaaaaatcaagatcaattgttgacatcgttaaatttttttgtcaaatttgttgatgtcacattttaaaataaaaaatactcactttgtagtcatgt

SEQ ID NO: 47609 - DNA, 389 bp, Gossypium hirsutum
  Clone ID: LIB3196-040-P1-M1-F7
atgcccagaagcccaggaagccggtcagtgcccgccccagtttgaggcctggctatccccgtgggaacatcaccatgtcagagacaccccgggctgagacctttgtcttcctggacctggaagctactgggctccccagcatggatcctgagattgctgaactgtccctctttgctgtccaccgctcctccctggagaacctggagcgcgacgaatctggtgccccagtactgccccgggtcctggacaagctcacgctgtgcatgtgcccagagcgccccttcaccgccaaggccagcgagatcactggcctgagcagcgagggcctggcgcggtgccggaaggctggctttgatggtgccgtggtgcggatgctacaggcgttcctg

SEQ ID NO: 47610 - DNA, 379 bp, Gossypium hirsutum
  Clone ID: LIB3196-040-P1-M1-F8
gaagcctctctgcaagttttgcggggctttgatacagatatttctgttgaagttaatgaaatcaagagagctgtagcatcatcaagcaggagaacaacaattcgatttgcagatctcaagcgaaaaagatattggtatcccttgacgatagggattgggttactggtgcttcagcaactaagtggcatcaacggtgttttattctattccagcaatatcttcgcaagtgctggggttgcgtctagtgatgttgcgacatttggggttggggccattcaggtcattgcaactggggtgactacatggttggtggacaaaactggccgcagacttcttcttatggtatcctcggcttaaatgacactgagtctgctaattg

SEQ ID NO: 47611 - DNA, 360 bp, Gossypium hirsutum
  Clone ID: LIB3196-040-P1-M1-F9
aagaacgtgaggagcgccagcaggagcagcgataccgccatacgagaggagggtctcaagataatggcctcgaggaaactttctgctccatgaggatcaaggagaaccttgctgaccctgaacgtgccgacattttcaacccacaagccggtcgtatttccaccctcaacaggtttaacctccccatcctccaacgacttgagctcagcgccgagaggggtgtcctctacaacagagctggtttgattccacaatggaacgtcaacgctcacaaaatactctacatgttaagaggctgtgccagagtccaagtggtgaaccacaacggcgacgcagtgttcgacgataacgtggagcaag

SEQ ID NO: 47612 - DNA, 415 bp, Gossypium hirsutum
  Clone ID: LIB3196-040-P1-M1-G10
atgccacttgtttcatcccacctgggcattaggttgacttcaaagatgcctcagttactgagaaacattaatgggatcatcgaggccttcaggcgctacgcaaggacggagggcagctgcacagcgctcacccgaggggagctgaaaagactcttggagcaagagtttgccgatgtgattgtgaaaccccacgatccagccactgtggacgaggtcctgcgtctgctggatgaagaccacacagggactgtggaattcaaggaattcctggtcttggtgtttaaagtcgcccaggcctgtttcaagacactgagcgagagtcctgagggagcctgcagctctcaagagtctggaagcctccattctggggcctggcaggagctgagtgaaggacagagaagtggcactgaagtgg

SEQ ID NO: 47613 - DNA, 367 bp, Gossypium hirsutum
  Clone ID: LIB3196-040-P1-M1-G11
atcggcaggaagtgccggaggcgtggtggaggctgccatctcatacaccggcgacgtgtccgaccccagccgcaccaagtactcactgcagtactacatgggcttggccgaagagctggtgcgagctggcacccacatcctgtgcatcaaggatatggctgggctgctgaagcccacggcctgcaccatgctggtcagctccctccgggaccgcttccccgacctcccactgcacatccacacccacgacacgtcaggggcaggcgtggcagccatgctggcttgtgcccaggctggagctgatgtggtagatgtggcagccgattccatgtctgggatgacgtcacagcccagcatgggggccctg

SEQ ID NO: 47614 - DNA, 115 bp, Gossypium hirsutum
  Clone ID: LIB3196-040-P1-M1-G12
caggtccagaaagcagaggaagaaaaaaggggaagaaattaaagtagtcttcccaatagaaatagaagccctcggcaggaaattctcctagggctgtagaaaatattttacaagt

SEQ ID NO: 47615 - DNA, 384 bp, Gossypium hirsutum
  Clone ID: LIB3196-040-P1-M1-G2
aagcaattttgagactcttccatttagcaatggcttcttctctagctcttaagaggctcgtctcatccaacatcctccctaactccttacgcgtcgccatcgctccatccacctccagactctttaataccaacgccgccacgcctgatgaccacgatgatcgccgtcgtgctgacggtttcttctcagatctgcaggggcggcgccagggggccaaaaaagatgtgtttgatcctttgtctccaacaaggagcctgaacatgatggatcaagtcaaggggaatcgatttctctccacatcccgtgacattccagggcttgggagcgaggccaaagaatcaaaccttcgccccgtatctcctcatcttcctatttataagccac

SEQ ID NO: 47616 - DNA, 242 bp, Gossypium hirsutum
  Clone ID: LIB3196-040-P1-M1-G3
atagaaatttaggtatttacctaaggccattaaggcgtggaataacccgtccccacgtgtagaatgtgtcctggcagagctcaagggcgttacatgcgagaacagggaggctgtgctggatgcttttctggatgatggcttccttgtccccacatttgaacagttggcagctttgcagatagagtatgaaggtgtcccttacaaaccagaaaacgtggacttgaatgacgtcctggtgccaa

SEQ ID NO: 47617 - DNA, 403 bp, Gossypium hirsutum
  Clone ID: LIB3196-040-P1-M1-G4
atcatggagcggtgcaagaagttcgcttttctgatggttgcaatggctctgcttcttcaatccatggtgcctccgacagcattagctgctcgtaacaatgttatggaatacaatccattggcaagcgtattctcgagggaaggccctggctgcatcgcaaaaggcgggttttgcttgtttgacctaaccagttgctgtaggccatgcggatgccttgcagggtggtgctataacattgatcataattgcaatgagtacacataatggtcgctactgagttaaaaaaaacagttctgagtcaaaaaatgacatgggattcgattataaatgttctatatataacatatgtttttgaataaagaatctcgtgttatgtccctgtttaattgagctgtgccattgg

SEQ ID NO: 47618 - DNA, 401 bp, Gossypium hirsutum
  Clone ID: LIB3196-040-P1-M1-G5
gttggtatgattggcctgaacctttgaaaaatcgccatcttgcggccttagaaaaaatatacgaggaaaagaaggatttcatagacttgttcattgctaaacaattcctgttccaaaggcagtggaagaaaattcgcaactatgcacagacaaagggagtcagcataatgggagacatgcctatttatgttggttatcacagtgctgatgtttgggcaaataagaaacattttttgctgaataggcatggttatcctatgctagtcagtggtgttcctcctgatgccttcagtgatactggtcagctctgggggagtcctctatatgattggaaagccatggagaaagatggatttttatggtggataagtcgcattagacgtgcacagaatctatatgat

SEQ ID NO: 47619 - DNA, 389 bp, Gossypium hirsutum
  unsure (1)..(389): unsure at all n locations; Clone ID: LIB3196-040-P1-M1-G6
gtatgttccgcttctgaactactttctggctttctgtatctaattcagtacttagatggtttgctctcacactgagctcgattagctccccctcatctgtttcctctttcaggtatagttctggattctattgatggacttggtacacggaggtcttagacagtctcagtggaaatggattatcagtttgtgatttccaattcttatatttggtttttgtactgtaagactttataaaactatggtacaaattctgatttaagttttactcattctaattntgaatttatatactaaacttaactaaaattgtactgttcaagttttatgtgattaaacgttttgatacgaagtaataatttatttgtggaaaaatttacctactatca

SEQ ID NO: 47620 - DNA, 375 bp, Gossypium hirsutum
  Clone ID: LIB3196-040-P1-M1-G7
atctctggaaaagctcttcttgcaaaaaataaatgaactacccacagaagaaaccgagatcatgatagtccaggcaaaaggaagaggacgtgggaggaaagaagcagggacagcaaaacctggcgtttccacggtaccaaacacaactcaagcatcaactcctccgcagacccagacccctcagccgaatcctcctcctgtgcaggccacgcctcaccccttccctgccgtcaccccagacctcatcgtccagacccctgtcatgacagtggtgcctccccagccactgcagacacccccgccggtgcccccccagccacaacccccacccgcttcagcttcccaggctgtacagagccacccacctatcatcgc

SEQ ID NO: 47621 - DNA, 363 bp, Gossypium hirsutum
  Clone ID: LIB3196-040-P1-M1-G8
caaaaaacataatcatggagcgtagcaagaagtacgcttttctgatggttgcaatggctctgcttcttcaatccatggtgcctccgacaggattagctgctcctaacaatgttatggaatacaatccattggcaagcgtattctccagggaaggccctgcctgcatcgcaaaaggcggacatagcttgtttgacctaaccagttgctgcaagccatgccgatgccttgcacggtggcgctatcacattgatcataattgcgatgagtacacataatggacgctactgagctaaaaaacagttctgagtcaaaagatgacatgcgattcgatcataaatgtgctatatataacatatgtatttg

SEQ ID NO: 47622 - DNA, 379 bp, Gossypium hirsutum
  Clone ID: LIB3196-040-P1-M1-G9
attcgaggtggagcccagtgacactattgaaaatgtcaaggcaaagatccaggacaaggagggcatccctcctgaccagcagaggttgatctttgctggaaagcagctggaagatgggcgcaccctgtctgactacaacatccagaaagagtccaccctgcacctcgtgctccgcctcagaggtgggatgcagatcttcgtgaagaccctcactggcaagaccatcaccctcgaggtggagcccagcgacaccattgagaatgtcaaggcaaagatccaggataaggaaggcatcccgcctgaccagcagaggttgatctttgctgggaaacagctggaagatgggcgcaccctgtctgactacaacatccagaaagag

SEQ ID NO: 47623 - DNA, 389 bp, Gossypium hirsutum
  Clone ID: LIB3196-040-P1-M1-H1
gcggcaactacttccatggttacttcattaaccttcacaattccttcgctagggcttcgcctacccactcgtagctacccatgtctaaaaccccagagacgttttgtgaggaaggctgcttcaaatgttataacggcaacatatgagttgaaggcacctccatatcccttgaatgcattggaaccccatatgagccgagaaaccctggagtatcattggggaaaacatcacagaacctatgtggagaacctaaacaagcaagttgtaggaacagatctagaagggttgtctttggaagacattatcattgttacatacaacaggggtgatatactccctgcattcaacaatgctgcacaagcctggaaccatgattttttctgggaatc

SEQ ID NO: 47624 - DNA, 363 bp, Gossypium hirsutum
  Clone ID: LIB3196-040-P1-M1-H10
aatggcttacacttctttgctttcttttagcgtttgcttgcttgttctcttccatggctgctgtgctcagatagatctcgtcactaaccatcaccaggatccaccttgggggcagcctcagcaacctcagccacgtcaccaatcccaatgccaactccagaacttgaatgctcttcagcctaagcaccggtttaggtcagaggctggtgaaactgagttctgggaccaaaatgaggatcaattccagtgtgctggtgttgctttcctacgtcataagatccagcgcaaaggacttttattgccttcatttaccagtgctcctatgcttttctatgttgaacaaggggagggtattcatggggc

SEQ ID NO: 47625 - DNA, 349 bp, Gossypium hirsutum
  Clone ID: LIB3196-040-P1-M1-H11
cggacgcgtgggttttgatgttaaggatcctaactttgaagatcctgatgaaatcgtgaatgataattaattgtgttgtctatgatggtagtgtgagatcgttattattatcatcatcgatcgttgcctttggtttttttttctaatctagtttttatgatgagaccatgaaaagtgtttatgaataaattttgtagaaattgcggctttaattgttgatgtttgcttcttcttctttttttaatgatattatcttagctaaatcgcgaaagaaaatttttgtaagatgtttaaaattgatgtggttttgatttggatggtttctggaaatagtgtactgtctaaattt

SEQ ID NO: 47626 - DNA, 405 bp, Gossypium hirsutum
  Clone ID: LIB3196-040-P1-M1-H2
atcggcgagtcacgatgatggcggccaccatcctgtggtgagctagcggattccctgcttgtctcgccgagccccttgcgcctcctgcagactcagtggctggcgctcggcgcgtgaggaagcacggcggcccgagctcgcggggaaggccgcagtcgcggaggcagcggcgcggtccggggcacgggctgggggagaggccgctccgctgggcgaatgtgacaagcccccacccccaccgcctttctccccagagcgcgaggagcgcgggcgaccccggggccccgccaggccacagaccccgcccagcggccagcacccggcgcatgcccggcagcagagctgcgcggcggcaccatgcaggtcaccctgaagacccttcagcagcagaccttcaaatagaca

SEQ ID NO: 47627 - DNA, 400 bp, Gossypium hirsutum
  Clone ID: LIB3196-040-P1-M1-H5
ctctgtcgccgctacccatcacttctaaaacccttaagctatttcccgcctcaccggccaccgctgccgttgctcctcacctgcgccttcataagtcaacgtcttttattgggaagatgatggcggaagaggaaggacagtcattgccgtacgtatcagagatagtattgaagaaaaggaataagagatgagttagcgattacgaggaggacccagttggagttgggtaaatacggagccaagaagagcaagaagcaatccgatgtttctgacatcaaaagacctgaacaattaattaaagagttcagagacaaggaattggacctgatcagaacgaaacaaagggcaaagaggccaaaattaatgataccaacgataaaatcaaaagtgcttttcatta

SEQ ID NO: 47628 - DNA, 357 bp, Gossypium hirsutum
  Clone ID: LIB3196-040-P1-M1-H6
ggtcttctctgcttttggtcctgttcaaaagattgccatgtttgataagaatggtggactacaggcactaattcagtacccagatgttcagacagctgttttggctaagggcaccttggaagggcactgcatatatgatggaggattttgcaagctccatctctcatattcacgccacactgatcttagtataaaggtcaacaatgatcggagcagagattacacaatccctaacccggccatggttaaccctcagccttcaacattgaggcaacagccagttcaagcaatgggtggtccagctgctcatcaatacaatggggctgcatatgctttaggttacaacaacctaccatg

SEQ ID NO: 47629 - DNA, 393 bp, Gossypium hirsutum
  Clone ID: LIB3196-040-P1-M1-H7
caacgctctccttctgtttctggtcaagccaatctcaaaagactccccttttagctcacagctcctctcttgagtactataatgggtaaggagaaggttcacatcaacattgtggtcattggccatgtcgactctgggaagtctacaaccactggtcatttgatctacaagcttggtggtattgacaagcgtgtgattgagaggtttgagaaggaggctgctgagatgaacaaaaggtcatttaagtatgcatgggtgcttgacaagcttaaggccgagcgtgaacgtggtattaccatcgatattgccctctggaagttgagactaccaaatactactgtactgtcattgattcccctggacatcgtgacttcatcaagaacatgattactg

SEQ ID NO: 47630 - DNA, 393 bp, Gossypium hirsutum
  unsure (1)..(393): unsure at all n locations; Clone ID: LIB3196-040-P1-M1-H8
atagggagttgggtgaggacgttacagatatccataggaggtcattttcaggggtaattcaaaagcattctgcaataaagacttcatcttcatcatcaacatcttcatctggttcttcttcttcttcaacatctttttctttaagttcaagtggattctgcgatttacagttgctgaaaaggagcaacagtgccaattcagagattgagaattcaattgaaggggcaattgctcattgtaagcagtctcagaaacttggggtctgttcactttctgcttcaaagatttctgtttgtggggaccaagaaagaccagaactttgcagcatttgaatgtcaaaaaatactttacaaagactggaaatccaccataacangaagaaaaaaataaacc

SEQ ID NO: 47631 - DNA, 378 bp, Gossypium hirsutum
  unsure (1)..(378): unsure at all n locations; Clone ID: LIB3196-040-P1-M1-H9
atgcgtctcttgggtttgctgagaactcacgggctccagctacctgacgatgaccaccacatttctgcaaacttcttcctccacttttgggggtggctctacccgagggggttcccttctggctgggggaggtggctttggtgggggtagtctctatgggggaggtggaagccgaaatatctcagcttcttctgctaggtttgtgtcttcagggtcaggagggggctacgggggtggcatgagggtctgtggctttggtggaggggctggcagtgcttttggtggaggctttggagggggcattggtgggggttttggtggtggctttggtggtggcgatggtggtctnctctctggcaatgngaaaattaccatgca

SEQ ID NO: 47632 - DNA, 391 bp, Gossypium hirsutum
  Clone ID: LIB3196-041-P1-M1-A10
atcttacctctaacctactgctcattggcatggaaggaaatgtgacacctgctcattatgatgagcagcagaacttttttgctcaaataaaaggttacaaacgatgcatcttatttcctccggatcagtttgagtgcctctacccataccctgttcatcacccatgtgacagacagagccaggtggactttgacaatcccgactacgagaggttccctaatttccaaaatgtggttggttacgaaacagtggttggccctggtgatgttctttacatcccaatgtactggtggcatcacatagagtcattactaaatggggggattaccatcactgtgaacttctggtataagggggctcccacccctaagagaattgaatatcctctcaa

SEQ ID NO: 47633 - DNA, 377 bp, Gossypium hirsutum
  Clone ID: LIB3196-041-P1-M1-A11
cggacgcgtgggcttttatctcttgtttcgtggccattgtttctttctctctttggttcaccattttcatttgttctcgcagagctcactcagcggcacacatgacttttaccagaatttcccttttctctctctttttctcctctttctttttcctatcatcaaccctttcttctcatctttatcctgcttctgcaactacttctgaaaaagatggcaaaacgagatctttgtattcagaaattttaagggacgaggcagttgcaaggcttaataatcttggaaaggtgagtgatgctgatggctaccttgagagaacatttatgagcccagcttctgtgagggcaggctttcttattcgtgagtggatggaggat

SEQ ID NO: 47634 - DNA, 377 bp, Gossypium hirsutum
  Clone ID: LIB3196-041-P1-M1-A12
agccattggaatggttaatcatgatcattttggtgctatgtatgacaacctctagttgattcatggaaaaccatgaaataggtaaagtttaccttaaaaatagatgctgacagcagcagtggtgtggatttgaaaaatcactaaaaatagtaggaatggaattaaatagtgaataaattatgtaatcgaaccttgatgaatctattttcatatggaagaaacaaaacgatcatatgagtcgtatgttaagagatatttaagtttttgtgaaacagggccagaacagtttctggattccctgttccgacttcggaaattcattatagattaaccagagataattagaagtcattccatatatttatagatttattttc

SEQ ID NO: 47635 - DNA, 341 bp, Gossypium hirsutum
  Clone ID: LIB3196-041-P1-M1-A2
atgcgcaggctcgaagctgcgcaggcgcagggcccgcccctgggaccctcggggccaggcggtttggcccctcatcgcccgggcgtcggggcgggagaagaccagaagaagggaggcacttgaggacccaagtttcttcaccatggggatgtggtccattggtgcaggagccctgggggctgctgccttggcattggtgcttgccaacacagacgtgtttctgtccaagccccaaaaagcaaccctgggagacctggaggatatagacctgaaaacactggagaaggaaccaaggactttgaaagcaaaggagctatgggaaaaaaatggagctgagatta

SEQ ID NO: 47636 - DNA, 397 bp, Gossypium hirsutum
  Clone ID: LIB3196-041-P1-M1-A3
cggacgcgtgggttggaaataatttggaggcacaggaaactttgtcatccaaaaatgttatggatgcccgtgatacaagatgcaatgcggagattggtagtcaagttatttgtaggccggatttagataaaagtagtggtgagtccattgataaaaattcttgtttagattttagcttcaactctgaaggtctgcgtcaagttcctcttgacttgggttctgctggaaagccttctatcttattatttccaaatgaaaacttttctgctaaaaattctgcatcacattctgatgcctctcaatgtgataaaatttgcaaccaagataggttgtcagcgacacttgcttatcatgggaatgaagacaaacaggctaacaatgcttgtagtggacatga

SEQ ID NO: 47637 - DNA, 389 bp, Gossypium hirsutum
  Clone ID: LIB3196-041-P1-M1-A4
atcagctctggccacggcgcttgacgtgggcttgtccaactggagcttcctctatgtcaccgtctctctgtacacaatgaccaaatcctcagctgtcctcttcatcttgatcttctctctgatcttcaagctggaggagctgcgcgcggcactggtcctggtggtcctcctcatcgccgggggtctcttcatgttcacctacaagtccacacagttcaacgtggagggctttgccttggtgctgggggcctcattcatcggtggcattcgctggaccctcacccagatgctcctgcagaaggctgaacttggcctccagaatcccattgaacaccatgtttcacctgcagccactcatgttcctggggctcttccctctctttgctgta

SEQ ID NO: 47638 - DNA, 382 bp, Gossypium hirsutum
  Clone ID: LIB3196-041-P1-M1-A5
taacctttttgacactcttctaacttgaaactactcccaaaaattcctctaacaaaaccagttcgtgtgtgagacaatgaagggtaaggcaaccaagaacccaatcttcgccttcaccacatggatccgacgacaaccaccgaagatgaaagcgtttttagtgaccatctcagggatggcagctcttttgttcttgagaatggtggtggaagatcacaacaatctttttgttgctgctgagactgttcatgctttgggtacttttgtccttatttacaagcttaccaaagagaaagcttgtgctggactttcccttaaatcacaggaactaacagctatatttttagccgttcgattatactgcagttttgtaatggaatac

SEQ ID NO: 47639 - DNA, 377 bp, Gossypium hirsutum
  Clone ID: LIB3196-041-P1-M1-A6
cggacgcgtgggcttgaagcgaaatgagttcctggaactcaaacaagggaacaagactgtagcagaatacgaacgagagttcgtgaggctaaatcagtacacaactgaatgggtccataccgagccagaaatgtgtaaacattttgaggaaggtctaaatgaggaaattaagttgttgattgggatcctcgaaatacaggaatttgtcgcattggctgatcgggccaagaaggccgaggagcttaacaatgaaagaaagaaagcaagagagaggcccgagtcttgagcaagaggtctagttgtaaaacactctcgtttcccacaaaaaatcaaggagccagcatgaacgctccatttcatcagtaggatatttgggt

SEQ ID NO: 47640 - DNA, 380 bp, Gossypium hirsutum
  Clone ID: LIB3196-041-P1-M1-A7
gggatctagagcaaggttagtgaccttgggttgagtgtagagatgaggaaaatcatgggtgccaaagttcttttattatttgctttgctttccttttcagctgtctcggcatttgcacaggatgaggaagaccaaggtcttgttatgaacttctacaaggattcttgtcctcaggctgaagacattatcaaggagcaaggtaagctactgtacaagcgacacaaaaacactgctttttcttggctgagaaacattttccatgactgcgctgtccagtcatgtgatgcttcactggtgctggactccacaagaaggagcttgtctgagaaggagacagacaggagcttttgcctaaggaatttcaggtacattgagaccat

SEQ ID NO: 47641 - DNA, 344 bp, Gossypium hirsutum
  Clone ID: LIB3196-041-P1-M1-A8
atagctccggcaccaacagcagcgccgctgacaccttccaccttctggcgacaccaccacagccaccttcttctccttcgctgtgctctcccgtactcgcctctgtcgactatcatgcgagccttgaaccacgatggctgagccccgccaggagttcgacgtgatggaagatcacgctgtgacgtacaggttgggggacaggaaacatcaagagggctacaccatgctccaagaccaagagggggacacggacgctggcctgaaagaatatcccctgcagacccacgctgaggattgatctgaggaaccgggctctaaaacacttgatgctaagagcactccaa

SEQ ID NO: 47642 - DNA, 266 bp, Gossypium hirsutum
  Clone ID: LIB3196-041-P1-M1-A9
ttctagatcgcgagcagagcccctttgttttttttattttttttttcttttattttatttttttttttttttctttatttttttttttttttttttttttttttttttttagccggatttagagaaactaaaagtaaagccatttataataagcaagcttaaaatttaactttaactgtttaaggcagaaaaaaatccttttgactcggattacccttgaaaggcttctatttttttatttacaaatgaaaacttttctttttaaa

SEQ ID NO: 47643 - DNA, 227 bp, Gossypium hirsutum
  Clone ID: LIB3196-041-P1-M1-B1
cttcgtaccacattgatgatgggcctaatgacctcggttctgaacctaatggggccccctgccaccatgatgatgctggccctttcatgggccgccctgggccttatcaatgcatgggaatggggttaccacaccctatattccattgagggtatggatgggcaaagtggcattattaccggggcctcttctgggattggagagcgaattggatattaatattccaa

SEQ ID NO: 47644 - DNA, 373 bp, Gossypium hirsutum
  Clone ID: LIB3196-041-P1-M1-B10
cggacgcgtgggttggaaatttttcttcttctatcattcttttacatttcatttgcattcagatccgattcttaaacgcattcccatttaaacccctctttgatttcatcctcattccgatacaaaaacccaagggcttgctctggtttttagcctctcaattcttcgtatagtcgatctaagtcatagagggagcttaagtgggatttgatgtgccaggcaaggtggaagcaagttcattggaggtttcaagggaacataacacttggagcgtttgtgatagatttggctacattgcaggatgcatagagtggagtagaagttagtccttttttattcaattgatccaatatttgcttcagaagataggata

SEQ ID NO: 47645 - DNA, 367 bp, Gossypium hirsutum
  Clone ID: LIB3196-041-P1-M1-B11
gtaagttggaagagggtcatgcttcggtggtaggtacaccagagccttcactttggtctcattgcatagagttatgaactgtgcctacacctaacattttccccatctctatcttttcttctctccctctaaaccaaacccaaccaaagcccctctctgcaagcaaaacttaaactaggaattaagcccattctttataaattgctgcaaagggttgggttttgttcttaagatcatggatttggagttcctgcaatccatggatgttcagattcttgtgggtgtaggagtagctgttttagccattcttgttgctgctgcttatctcttttcctccaggaaacccaaaggctgcctcgatccggaa

SEQ ID NO: 47646 - DNA, 396 bp, Gossypium hirsutum
  Clone ID: LIB3196-041-P1-M1-B12
atggggccaggacccctgccagagtgactcaggaggccccctggtctgtgatgagaccctccaaggcatcctgtcatggggtgtttacccctgcggctctgcccagcatccagctgtctacacccagatctgcaaatatatgtcctggatcaataaagtcatacgctccaactgatccagatgcccagaggctccgtcgtccatcctcttcctccccagtcggctgaactctccccttgtctgcactgctcaaacctctgccaccctccacgcctctaaacatctctcctctcgcctcattcccccacccatccccattctctgactgcactgaagcctgaatgcagagaaacattattccagaaaagcaaggaagccggtcatcgcccattctct

SEQ ID NO: 47647 - DNA, 370 bp, Gossypium hirsutum
  Clone ID: LIB3196-041-P1-M1-B2
agtgaggaaactgaggaaaaaagaacaaactagttaagagcaatggaagatgatgcaatggcaaccgaggctcctttagcaccagtcacttgtggaaggagagtccgaaatgacttggaagataaacttcctaaaccttatatggcgagagctttggtggctccggatgtcgatcacccgaacggaacgccgggccattaccataacggaatgagtgttcttcaacaacatgcggcatatttcgaccaggacgacaatggaatcatttatccttgggagacttacgccggttgtcgagccatgggatttaatccgattggctctctttttttcaccattcttattaatggatctatgagctatcctacac

SEQ ID NO: 47648 - DNA, 307 bp, Gossypium hirsutum
  Clone ID: LIB3196-041-P1-M1-B3
gcgtaaagccacccaaaagcaccaaaaacacaaacagagaagagatataattgaaagaaaagaaaaatggttctgctagagaaactttgggatgatgtagtggccggtcctcaaccggaacgtggccttggccggctgaggaagatcaccaccaccccacccttgtccaccaaagatgaggcttcatcaatggcgatgccgacgagtccgacgacacctgggacaccatcgacgccggtgtcggctcgtagggacaacgtgtggaggagcgtgttcaatccaggtagcaaccttgcaaccaaaggta

SEQ ID NO: 47649 - DNA, 338 bp, Gossypium hirsutum
  Clone ID: LIB3196-041-P1-M1-B4
atctgttgcaagccgccacgccgctctaaatcttggatgcgatctgtatgccctggatcggatttggaaagacatgcgaacatacctgaatgttgatgatgtgagacccaaacaaagctaatgcactcacaagtgtgacacagctcttgtgttcgcaagtatacaatattgccggggaattaatatgaggcattcgatctttcgccttatattctaagggcccccatcgcgatgcaggcagaagcatattgttactacacacacgcttgtggagttctaattgagacccaaaaactggatgaacaaacaagtggatgccacaattagatagaatgatt

SEQ ID NO: 47650 - DNA, 235 bp, Gossypium hirsutum
  Clone ID: LIB3196-041-P1-M1-B5
ctcgacagaggcagcgtgcatctgaataaagagttagaggcaataataaccacatagtctcgtgtttacggactaatgtgaaattttctagttttaagcaggcatgtaatgaaataaaaatggtgacctatgtaaaggaggagacccttgttttgtagtgcaataacttgtatgaactttttgagtgccttttttgtctttctatgttaaggaataaaacgttaagtacttaagt

SEQ ID NO: 47651 - DNA, 381 bp, Gossypium hirsutum
  Clone ID: LIB3196-041-P1-M1-B6
aattgaaactccatttctctgccacaaaaagctcccccgccccaactcccctgggatcaacagcacaattctaaacccaaaaacataaaaaaatggcagcaagtgtagcaacaatggcgatgctcaatgcaaaatgcctaagcatcagctcaactaagatgagcagcccaacaaagccaaccccaaagcccttctcccttctctccatgcagaacctccccaaaggcctcaccatctcaaaaccggccaacaactcaaacctaccgtcttcactcgctggcagcgccattgctggagctatcttctcaaccttgagctcatgtgaccccgccttagctgcacaacagattgctgaaatagctgaaggagacaaccgtgggc

SEQ ID NO: 47652 - DNA, 405 bp, Gossypium hirsutum
  Clone ID: LIB3196-041-P1-M1-B7
ataagcattagaatctggttgttcttatgtaaatactgatatgttaaagttgcccaaaattaattctagcttaaaactttcctttacattgggattctaggtgctgtccaaccctgagtttctggcatagggaacggccatcaatgacctaaagtacccagacagggtactgattggaggggatgaaactccagagggccagacagctgtgcaggccctgtgtgctgtatatgatcactagcttcccagagtaaagatcctcaccactaatacttggtctttagagctttacaaactggcagcaaatgcttctcttgcccagagaataagcagcattaattccataagcgctctgtgtgaagcaacaggagctgatgtataagaggtagcaacagcaattggaat

SEQ ID NO: 47653 - DNA, 316 bp, Gossypium hirsutum
  Clone ID: LIB3196-041-P1-M1-B8
cggacgcgtgggctggctctctcactctatccctttcctcttgttcttatgcataggcagggacgcctccaaccagctatactactaagtcattactcatcgttactgttgctaaagtatgcgcaagactgggtcctgctattgggatatattcaaatctgcactccttatactttaatagtcgctcatgaatatcatgaatgtaggcacataccttcgatttatctgggatacttttattacaccatcttatgattgatcaagagtctacttcaataacgacttttttgcaacgcatgtctatgccgatttgggg

SEQ ID NO: 47654 - DNA, 303 bp, Gossypium hirsutum
  Clone ID: LIB3196-041-P1-M1-B9
cccacgcgtccgcccacgcgtccgtccattacagccttatgcagagaatagagagcatttctattccctctcctccccaccgaatggtcattcgttgtttggaaaatcattcatctccccaattttaccctccccaagttctcaccttccttctttcctttcttccttaaactccaaccagtaaaactcctctcacttatctccttctgattttgcttccttcaccctcatcggagtcttcttcaggtactgtagtagcacggacgaataaagttgcagcagctttggcttaaaatagctatg

SEQ ID NO: 47655 - DNA, 368 bp, Gossypium hirsutum
  Clone ID: LIB3196-041-P1-M1-C10
cttcctttgaggatgacactagcattccatgtggagttgccttgaagaggatggctggcctactggacaagtcggaaaggagcatacagaggcttatcaaactgaggaattcagtaatccgttcttatcaggagtgtaagattccagttgattggatgcttgataccggaatggtgtataaaataaagcaggcttctatgaagctggtcacaatgtacataaagagagtgggaaccggaccttcaattggtacgcaagtttagacaaggaatctgcacaagaggcactgcttcttcaaggcatgcattttgcaaatagggctcaccagtttgctggagatcttgattcagaaacactgggtgcttttg

SEQ ID NO: 47656 - DNA, 376 bp, Gossypium hirsutum
  unsure (1)..(376): unsure at all n locations; Clone ID: LIB3196-041-P1-M1-C11
catttttatcacataaaaatctgcagggaagataaggctattgactttgactaatacatcctcgaggactccttcggggtgcacaacagacctgtctgccaactgaatgatgacacctgtctttttcaaaaaaccggtgttaagtgactcataaatagaataaggcataatatttatggatgcccctaaatcacacatggcctttttaatccccaaatggcctattttgcatggtatagcgaacatacccctatctttacattttgccggcattttccgctgtagcactgcgaatacattctcaccaacacttatcttttcactgcctgtaagttttggtttgttggtgcaaagttctttgaggaactntgcatac

SEQ ID NO: 47657 - DNA, 393 bp, Gossypium hirsutum
  Clone ID: LIB3196-041-P1-M1-C12
atgactacctcctcaagcaggtccctgacccccgagattcctgactgggagacacctcccagcaagggtcgatggacacttcatacaggagagctccggctggcatctggtgggtgcccctctgggacagaacttccagaggaaggaacaggcagcagtatttgctgttctgcagcctcttctggtgatacccaggcaaacagggtctggagtggacctccagcaaattccagcagactagcagcagaggggcctgttagaaggaaaactaacaaacaggaatagcatcaacatcaacaaaaagatgtccacacaaaaaccccatacaaaggtcaccaacatcaaagatcaaaagtagataaatccacaagggatgaggaaaatccagcacaa

SEQ ID NO: 47658 - DNA, 383 bp, Gossypium hirsutum
  Clone ID: LIB3196-041-P1-M1-C2
aaagaaaagaaaagggttttcctccattttctatttatctttttcatttcgaatttagggaaaaaatggccactttcatcgaatttccaatctaatttcccattaatattttttattttaaattctcgtttctaattttttttttcagtcatttcaaccatggcttccaattcgaagaagcccgctactgctgatgagaaatcggctttgaaaacggagagcaaaagttcaaagcctgaaacatccaccactgagaagaaaacttcaacacctgagccttcaactgggggttcacagccagcacaagcaggggccttccctcccaacgctatgcctggtcctgggtttgccccacccaatccatttgatttctcagccatgag

SEQ ID NO: 47659 - DNA, 326 bp, Gossypium hirsutum
  Clone ID: LIB3196-041-P1-M1-C3
atgcctgggccctacttagctggggtggcagagggcgagaggctctgtgctgcgtcccttctgagggtccctttgcagccccagtatactgtgtgtgcaccagccccagctggagccgccagaaatgctgccggtttaggcatatgtcctgggtgcaggaggcctggggcgccttcgggccgctcccctgagattctggggcagtcagacgatgtgggccctgggcgggagcagcccacctcagcagcactgccactgcctttggccacctgaggtgacccccaggccctcccgccctgtgcagtgtacctctgtgtatttgtaca

SEQ ID NO: 47660 - DNA, 394 bp, Gossypium hirsutum
  Clone ID: LIB3196-041-P1-M1-C4
atgacaggtttaagattgaaggacaggatgtatgatataggagacatgaaatagagtgaagagtcaaagataattttaatagttctatcttaaaagttgacattattgcataattattaattcaattaggggctggtttggagaaagtgatgatgactttgacattggatatgtggagttttgtagcgctatagagcacctagtcagatacatcaagaaggctgttgaatatgaggttgtagctgagaaagaagtagggtctataaatgcactgtcatgtatagtaaccactagtcacatgtggatttaaatgaaaaataattagattaaataagagtcaaagttcaatttctcagtagcattagccataattcacatgcttagtgatcatgta

SEQ ID NO: 47661 - DNA, 400 bp, Gossypium hirsutum
  Clone ID: LIB3196-041-P1-M1-C5
atgcgactgcgtgagcctgcactgcggcctcaacgagcacatccaccaccttatcaacgacttcaccgtcaagcagatgagacaaggggccttcctggtgaacacagcccggggcggcctggtggacgagaaggcgctggcccaggccctgaaggagggccggatccgcggcgcggccctggacgtgcacgagtcggaacccttcagctttagccagggccccctgaatgatgcacccaatcttatctgcaccccccacgctgcgtggtacagcgagcatgcttccatcgagatgcgagaggaggcggcacgggagatccgcatagccatcacatgccggatcccagacagtctgaagaactgtgtcatcaaggaccatctgacggcagccacccactgg

SEQ ID NO: 47662 - DNA, 243 bp, Gossypium hirsutum
  Clone ID: LIB3196-041-P1-M1-C6
ataagctgcggaagcccagacaccaggaaggtgagatcttcgacacagaaaaagagaaatacgagattacagagcagcgcaagattgatcagaaagctgtggactcacaaattctaccaaaaatcaaagctgttcctcagctccagggctacctgcgatctgtgtttgccctgacgaatggaatttatcctcacaaattggtgttctaaatgtcttaagaacctcattaaatagctaagtcca

SEQ ID NO: 47663 - DNA, 378 bp, Gossypium hirsutum
  Clone ID: LIB3196-041-P1-M1-C7
cccacgcgtccgattttgcagatcggttctctaatccttttttcgggtgtagcgttgtttatacgtttggttgttgttgaagaagtgctactaccatggctacaaagaagagcgttggggacttgaaggaagctgatttgaagggaaagaaagtgtttgttagagtcgatctgaacgttccattggatgataacttcaacataactgatgacacaaggatccgtgccgctgttcccaccatcaagtatttgatgggtcatggctctaaagtcatcctctctagtcatttgggacgcccaaagggtgtcactcccaagtacagtttgaagcctcttgtgccaaggttatctgaactccttggagtcgaggttaaaatgg

SEQ ID NO: 47664 - DNA, 234 bp, Gossypium hirsutum
  Clone ID: LIB3196-041-P1-M1-C8
gactcacatggtcaagagacacacccgtgtctcaggctgtgtagatattcgaattagggacacacggccgtgtctcagcccatgtttgtacctgtgtaactttctgacttggtcacatgaacaagtcacacgcccgtgtgctgggccgagtactcttcgaagtaacatcacacacccgtgtgccaagccgtgtgctaagccgtgttacaactcgacttttaaccctttaaaaac

SEQ ID NO: 47665 - DNA, 393 bp, Gossypium hirsutum
  Clone ID: LIB3196-041-P1-M1-C9
atggccttcacaaacatccctggaattactctgcttaatgtaagcaaactgaacattttgaagcttgctcctggtgggcatgtgggacgtttctgcatttggactgagagtgctttccggaagttagatgaattgtatggcacttggcgtaaagccgcttctctcaagagtaactacaatcttcccatgcacaagatgattaatacagatcttagcagaatcttgaaaagcccagagatccaaagagcccttcgagcaccacgcaagaagattcatcgcagagtcctaaagtagaacccactgaaatacctgagaatcatgttgaagctaaacccatatgcaaagaccatgcgccggaataccattcttcgccaggccaggaatcacaagctc

SEQ ID NO: 47666 - DNA, 350 bp, Gossypium hirsutum
  Clone ID: LIB3196-041-P1-M1-D1
cccacgcgtccggcggcataagagttttaaggaaaatgcagatcttcgtgaaaaccctaactgggaagaccataaccctagaggttgaatccagcgacactatcgacaatgttaaggctaagatccaggacaaggaaggtatcccgccggaccagcagaggttgatcttcgccggaaagcagcttgaggatggtcgtacacttgccgactacaatatccagaaagaatcaacattgcatctggttctgaggcttcgtggtggcattatcgagccatctttgatggcattggctaggaaatacaaccaggacaagatgatctgccgcaagtgctatgctcgtctacaccca

SEQ ID NO: 47667 - DNA, 373 bp, Gossypium hirsutum
  Clone ID: LIB3196-041-P1-M1-D10
ggaccgatgaaagcaataattttctcacaatggactggtatgttgaacttggttgagcactcgctacgccatcatggtataagctataggagacttgatggaacaatgactttaactgcacgagaccggaatgtcaaagatttcaatactgacccagaggtaactgtgatgctgatgtcattaaaagcgggaaaccttggtttgaatatggttgctgcttgccatgttatccttctggacctctggtggaatccaaccactgaagaccaggctattgatcgagcacatagaatcggacagactcctcctgttactgtaactcggatcaccattaaagacacagtggaagatcgaatattatctcttcaggatg

SEQ ID NO: 47668 - DNA, 375 bp, Gossypium hirsutum
  Clone ID: LIB3196-041-P1-M1-D11
cccacgcgtccgttctttggaaattaaaagcagtagctcttaattaattattttattttttatttttacaaggctcaacggcaggagtaagcagaatcctgcaatcaaattccatccatagaatctggagtcgggactgtaaattatgagaacagttgacattcaattgtattggtgaagaccggaaggaacgtgtaattaattagagagtaaacaagacagaaatgttctcactcttttatggactttataagtacctatttagcaagacagagtttcatgtactcattcttggaatcgacaaggctgggaaaacaactttgttggagaaattgaaatccggatactcaaacttggaaggtctaccacctgatc

SEQ ID NO: 47669 - DNA, 376 bp, Gossypium hirsutum
  Clone ID: LIB3196-041-P1-M1-D12
cccacgcgtccgcaaggcttttttcgaataagccaattcatttgggatcctgcggatccactctttttcctattcaaagatcagccctttgtctctgtgttttcacaccgagaattctttgcagatgaagagatgtcaaaggggcttcttacttcccaaacagatcctcctacatctatatataaacgctggtttatcaagaatacgcaagaaaagcacttcgaattattgattcatcgccagagatggcttagaaccaatagttcattatctaatgctaatggatttttccgttctaatactccatccgagagttatcagtatttatcaaatctgttcctatctaacggaagactattggatcaaatgacaaaga

SEQ ID NO: 47670 - DNA, 375 bp, Gossypium hirsutum
  Clone ID: LIB3196-041-P1-M1-D2
caacagctgcggatccattgcttccctgtttcctgtaatcaaaaaagagagaaaatgaaggttgttgctgcagctgagactaagaaggaagagaaagttgaggagaaagaggaatccgatgatgatatgggcttcagtctcttcgactaaaagcaccgcgcaccgctttccgcgcaccgccagcaacctatgaatgaaatacggatggtttttggtttctacagaggatttcttttgaatttaaggctgccctaggtttttgaagttagttatccagtgccatttagttctttctttgtggattcatatatttgttttgctgaacccttttgttgcaatggaattttcttccgacttaattttaattatcttctc

SEQ ID NO: 47671 - DNA, 377 bp, Gossypium hirsutum
  Clone ID: LIB3196-041-P1-M1-D3
aaagagggaaaaagaaattacagttttcgtgttgggtttggcattttagagagagtcgttggctgagatccgagttttgcgagaaaattaaagggaagtactagtagttgaggcgaagctgaagctaatacaaaacagcggcaatttctgatttcagccctccgacacttcatccagattctgctcaatttctccgtttgattgaggattgggccaatcaaaacatcctataggtatctaaatcttctttatttacatttttggatctgcgccattgctattgcaatgtcccttttatccagattgcgatgtatcactgtggatgttactgggactctcatagcttataaaggggagcttggtgattactactgcat

SEQ ID NO: 47672 - DNA, 310 bp, Gossypium hirsutum
  Clone ID: LIB3196-041-P1-M1-D4
atcagccttcctgagcaccttcctttctttcagccaactgctcgctcgctcacctccctcctcggcaccatgaccacctgcagtcgccagttcacctcctccagctccatgaagggctcctgcggcatcgggggcggcatcgggggcggctccagccgcatctcctccgtcctggccggagggtcctgccgcgcccccagcacctacggcgggggcctgtctgtctcttcctcccgcttctcctctgggggagcctgcgggctggggggcggctatggcggtggcttcagcagcagcagcagctttggta

SEQ ID NO: 47673 - DNA, 377 bp, Gossypium hirsutum
  Clone ID: LIB3196-041-P1-M1-D5
cagaatttgagaacttctctaagtggctgggtgtgtctcagtaattctagtctttgatttacatattcggtgcagacaatgttttcagctttgttatggtgtcgtccttttaattatttcggtgtttttagttgcgggtggaaggaaaattactgaaatatcatgctttgatacgcttctgttttgtcctgctcccctgttttcgcattctatggctagtcgaatactttctatattctgagaacacgagattgatcagcttgccctggacatcgagatcgccacctaccgcaaactcctggagggcgaggagtgcagaatgtctggagaatgccagaatgccgtgagcatctctgtggttggaggtagcaccagca

SEQ ID NO: 47674 - DNA, 377 bp, Gossypium hirsutum
  Clone ID: LIB3196-041-P1-M1-D6
atgtttgtctgaacaaaatgctagactttctggagtgataagctggtgacaaatattctctctgcagctgtaagcaagtcacttaatctttctacctcttttttctatctgccaaattgagataatgatttaaccagttagaagaggtagtgtgaatattagtttatattactctcattctttgaacatgaactatgcctatgtaatgtttttatttgctcagttggctgtttagaagtcactgaacaaaacctacacacacaccttcatgtggttcagtaccttcctctctctatcagtctatttccattctttcagctgtgtctgacatgttgtttgtgctctgtgccactttaacaactgctcttacttttcca

SEQ ID NO: 47675 - DNA, 390 bp, Gossypium hirsutum
  Clone ID: LIB3196-041-P1-M1-D8
atgagacagccgagggcgccgtgcgggctccggacactagctgctccgcccgatccccgccaactgtgcaggctgctgacccgcagcggcagctgcagcatcgaggactcgagcgccggcggcagcaacagccgcggcgaaagcgacaccatggatctctcctttatggccgcgcaggtcaggacactaaacgagattaaataatttgcccaaggacatgccgtttgtaaggaggagaactggatttcaaatctgagtctgagtgtctgcaaagccactggggtttccaccttattgctgcagcctgagaaagatttgatctgcccatgatgggaggagctttcatggactcgcccaacgaggacttcagcaccgagtactccctgttta

SEQ ID NO: 47676 - DNA, 344 bp, Gossypium hirsutum
  Clone ID: LIB3196-041-P1-M1-D9
gatgaaagaagatcggagtatcaatccaaactggactacatttagcacaatggctaccatgtatatcaagatgggactgtctgaaaaagctgaagaatgcttgagaaatgtagagagtaggatcaccggtcgggatcgtataccatatcattaccttattacactttatggtactgttggtaataaagaggaggtgtatcggatatggaaggtttacaagtctattttccccagtgttccaaatttgggttatcatgctatgatatcatctctggttagggccagtgatattgaaggggcagaaaagatttatgaagaggggctatcagttaaaacatcttatg

SEQ ID NO: 47677 - DNA, 387 bp, Gossypium hirsutum
  Clone ID: LIB3196-041-P1-M1-E1
atcaacaccaaaacctagcttcctcccgtctcattcggccgaacgaaaaaacccttcaaccaccatttcgcctccgtaatcagcgaacgacatcacacaaaggcctaatcgaccatgttcgatcacgactccgagggttttgccactcttaatccacacaatccctatttgagcttcgatttcttcaaagcaaacaaggattcgagggcttttatcacgataagtatcctccctctccttcatttttgttttttactcatataataacgaaaatcaaagaaataaaagcaaaatgaaaggaaaaatgatatgaaattaccacttaaaaactgctctttattcacactctttagaactgatttgtatgcgaaaatatgcgtgtatctt

SEQ ID NO: 47678 - DNA, 389 bp, Gossypium hirsutum
  Clone ID: LIB3196-041-P1-M1-E10
acactatataacaagttggtacgataaagcacgctggtgcccgtccgcaatttccgggatggcatggactcctgcattgccgcggggcgcggggctacattgggcctacggcgcattttccaagccatcaggactttgttccccgcgccagcctatttgtcctgcaaggttcacgccgtgcctgtgcaagcgtacagtactggaccttacaatccctgcgcgtttcagccatcgacaaagcctgtcataatgcacaagcgcctgccttcggcacaagaacgcacattcttgagtcctgaattcattcctcgcatgggaagaacagatcctctgaaagttcaaatattaagataagatgtgttagaaacgagaaaagatctccacatgcc

SEQ ID NO: 47679 - DNA, 376 bp, Gossypium hirsutum
  Clone ID: LIB3196-041-P1-M1-E11
cccacgcgtccgcggacgcgtgggctggtatattagcaaatgcaggtactcctagtctgggaaccaccggattcgagctccccaaagactcttctcgttcattccaagctccgacgggttggtccggtcgtttttggggtcgaacggggtgtaaattcgacggatccggctccggaacttgtctcaccggcgattgcgggtcgggtcaagtagaatgcaacggactcggtgctgctccgccggtgactctagctgagttcactcttggaaccaccggtggtcaagatttttacgacgttagtctcgtcgatggttataatatgccgatgatagttgaaggccgtggtgggtcgggcctttgttcttcgacgggttg

SEQ ID NO: 47680 - DNA, 374 bp, Gossypium hirsutum
  Clone ID: LIB3196-041-P1-M1-E12
aaaatattttatttatcaaataatctaaaagattttgaattcttatgctttaggtagataagagttgttttttaattgttttcttaaattatttatgattatattagttgcaataatgaaaaaaataatttcatttatgtactagtaggttaaatggtaaattcttttatatagttgctttggctcgtaagcttacctggttatgtggtaacttgcacagattctagtttttctttttctgggaataggtagatcgttttacattagttaattatgtatgtccctgggtagttttaccttaatgatttgttttatttgtattccattacttgaaatcagcttttgagctggttttcttattttcaggtcagcaa

SEQ ID NO: 47681 - DNA, 394 bp, Gossypium hirsutum
  Clone ID: LIB3196-041-P1-M1-E2
atctcagccttcctgagcaccttcctttctttcagccaactgctcgctcgctcacctccctcctcggcaccatgaccacctgcagtcgccagttcacctcctccagctccatgaagggctcctgcggcatcgggggcggcatcgggggcggctccagccgcatctcctccgtcctggccggagggtcctgccgcgcccccagcacctacggcgggggcctgtctgtctcctcctcccgcttctcctctgggggagcctgcgggctggggggcggctatggcggtggcttcagcagcagcagcagctttggtagtggcttcgggggaggatatggtgctggcttcggtgctggcttgggtgctggcttgggtggtggctttggtggtggctttgc

SEQ ID NO: 47682 - DNA, 380 bp, Gossypium hirsutum
  Clone ID: LIB3196-041-P1-M1-E4
agaatcctgaatgagtattttttaatagaaacaaacaagaacatcatttgaatcctgtatgaagagataattaatttttagtgaagaagggtcagaactgtcagacagcagaactggggtgaatttaaagaataaactgtacttattggctaaaccaaaaattctgaaaattttatagtaagaagatatatgagtctagtttcagggaaaattaactgatcttaatttggagttccttagcttgagttataaataatttagtgactatgactcaaatagacagctttgaataaactataaataataatagttgaattatagagaatgttgcatatgaacatgaaatgtattaaattgataattaaatttatttatttaga

SEQ ID NO: 47683 - DNA, 401 bp, Gossypium hirsutum
  Clone ID: LIB3196-041-P1-M1-E5
atgagaactacagttcgtgggtactgctggagttggctcatctaggctccctcccacctccccttccctgcagaggacctgtcagaccccgctgaaagggacaattatgagctgctctgcccagacaatactcggaagccagtggacaagttcaaggagtgccacctggcgcgggtcccttctcatgccgttgtggcacgaagtgtgaacggcaaggaggacgccatctgggagcttctccgccaggcacaggagaagtttggaaaggacaagtcaccagagttccagctctttggctccccgagagggcagaaggatctgctgttcaaggactccgccatcgggttttcgagggtccccctgaggatcgattctgggctgtaccttggctctggctactt

SEQ ID NO: 47684 - DNA, 381 bp, Gossypium hirsutum
  Clone ID: LIB3196-041-P1-M1-E6
gagagctctaaaattctctcagagctccggccagtggccgtcctggctcgtctcggagcaccaccgccttcggccatacgcgcttcacgcgccaccgtctgaaccaccgtgcccggcggttagggctttaaaattttctttttctctcacgaatcaacaggtttatacacgatgattgcgacggaggtgagggcatgctgattcaggcctttgattgcggcgcaacatgaggttgatgtcggctggaagcttacggcgcgaaccctagctagggtttctcagaagctgaaactccttaagttagttgggcctgctgggctgtgtttgtttgttggatcaaaagggtattttgggctgattcgggttgtgaatttaggtatg

SEQ ID NO: 47685 - DNA, 380 bp, Gossypium hirsutum
  Clone ID: LIB3196-041-P1-M1-E7
ggggtttccatttcccagttcttctcgtccctttcttaaagtcggcatcttcctttgctttctccagttttctcctacccagcaccttcttcaagggtttgttcttatttgaatagcctttgttgtagctatttgcaaaatgctggctcctagtgttactgctcccttgcggccttcattatctaccggacatcgattagagtcacgaattgaatgcagtagccgttgtggctcagttagaattccgaatcggattaagccaagggaacttggcttgcaatcacaacctagggtaggaagaagtagaaaacaatcttcatccattgcatgcaccgcaactgctttgcagaacgcaacttgcagtgcatcaggacaaactc

SEQ ID NO: 47686 - DNA, 299 bp, Gossypium hirsutum
  Clone ID: LIB3196-041-P1-M1-E9
attccagatctcagttgaccaacatggtgacaacctgaagaacaccaagagtgaaatcgcagagctcaacaggatgatccagaggctgcgggcagagatcgagaacatcaagaagcagtgccagactcttcaggcatccgtggctgatgcagagcagcgtggtgagaatgcccttaaagatgctcacagcaagcgcatagagctggagactgccctgcagcaggccaaggaggagctggcacgaatgctgcgtgagtaccaggagctcatgagtgtgaagctggccctggacatcgaga

SEQ ID NO: 47687 - DNA, 358 bp, Gossypium hirsutum
  Clone ID: LIB3196-041-P1-M1-F1
caagaaacaaacaagtcatcacttaaacccactcaaacgcaaatggcacgtaccaagcaaaccgctagaaaatcaacgggaggcaaggcgccgaggaagcagttagccacaaaagcggcgcgaaaatcagctccggcaaccggtggagtcaagaagccgcataggttcaggccaggaactgtggcgttacgtgaaatccggaagtatcagaagagcacggaacttttgatcaggaaactcccatttcagaggttggtaagagaaatcgcccaggatttcaaaacagatctgaggttccaaagcagcgctgttgctgctctccaggaggccgccgaagcttacttggttggactttttg

SEQ ID NO: 47688 - DNA, 375 bp, Gossypium hirsutum
  unsure (1)..(375): unsure at all n locations; Clone ID: LIB3196-041-P1-M1-F10
cccacgcgtccgggaggaagcaaggcagctagtggaaatagggctgggcggggatgttattggaagcaccttggggatgattaaaagagagagaggagaaagtgtgttgaatgaaattagaggtagctcctgtttgcggctggaggactttcggccttcgcatcccaacagatcaaggattttagaaacttttctttaattagcacatagcaaagtgtagtgaatagtgattgctccctttgattttgttagaagaaaattcatggcttggcctagcctaatctagcattgggttcttgttaagttccatgcttcttggctatgtctgaactttattattattattatncgtaatgcaaatattcacttcacaac

SEQ ID NO: 47689 - DNA, 377 bp, Gossypium hirsutum
  Clone ID: LIB3196-041-P1-M1-F11
cccacgcgtccgctcacaaaattcattatatctcaaaatttacaaatccattgcttacaatatttcttctataagaaactaggctcaataagctttaattccatatttttttatcttctaattcgatttctacaatttatggtgatttttcaaagttagtctactgctgctgtccaaactgtttttgtgcaagctgtttattaccatttttcccctaagcttttaataaatgataatttcgtacctactcaattagcctctcaattgagctgatttttctcaattaacattttattctatcaccttaaactagtttaaaacctttaggaataagaatttcagcaatagactttaattctaagcattttcacaattag

SEQ ID NO: 47690 - DNA, 395 bp, Gossypium hirsutum
  unsure (1)..(395): unsure at all n locations; Clone ID: LIB3196-041-P1-M1-F12
atagcctttccatttagatatttttaaatctccccaggtgatactataataatatgcagccaagattcactaactttgcctgagggcacccacagtttctttgtagggcttgtggactcattctttctcttttctatatgcttattataccagttatatttagtcattgaataaaatctagaaaatactgattaatttttggagggtagtcataattattccacagagaaataaattttgttaacaattggctgtatatctttctgggatttgtctacatacatacacacaaataaataatcctatgcttcttctttaatcaaaaatgatatacatgctgtgtatcttttatctttgactttnttttccatgccaacaaattcaaataagcctat

SEQ ID NO: 47691 - DNA, 296 bp, Gossypium hirsutum
  Clone ID: LIB3196-041-P1-M1-F3
ggttccatgtgaacggtacttgcacatgtgtatggccatcctaatatactgaacctgaccgtacgccagcctgtacacctcgagcctgctatgggtagatcacttatatacctggaccgggacccggtggctgacgcaaacgatagggaaatcggagacctttgctgcgcctactgaagagtgatccatgctgtctaacatgctgcgctccctggataccgcttaacccaaagttgattacatctggcatcagatgaacaaaagcaacctattttccctttcaagacctacgacat

SEQ ID NO: 47692 - DNA, 381 bp, Gossypium hirsutum
  Clone ID: LIB3196-041-P1-M1-F4
agttaacaaagacctggtttctcgtatcaattacgctggagccaccgctgtgggcctttctggcatggacggccgccttttagttgcccggcccagcccaaacgctgcacagttggggtttgtgggagaagttgcgagagtggaccccacagtcctccaaacgatcgtggacaacggaagcatcccggtgattgcttcagtggcggcggatgagtatggtcagccttacaacatcaatgcagacacggtagccggtgaggtggcggcggcattgggggcagagaaactgattctgttgaccgacgtcgcagggattctgagaaaccgagaggaccctggaagcttggtgaaagagattgatataaagggagtgaagaaaat

SEQ ID NO: 47693 - DNA, 383 bp, Gossypium hirsutum
  Clone ID: LIB3196-041-P1-M1-F5
atttcttgggtagtttagatcccatgtcacctcagctgatattatggcaagtgacatcatcctctcttcagcccctagtgctattctgtgttgaacacaattgatacttcaggtgcttttgatgtgaaaatcatgaaaagaggaacagatggatgtacagcattttcattcatgccatctgttttcaaccaactatttttgaggagttatcatgggaaagatcagggcttttcccaggaatatcccaaacttcagaaacaagttattctcttcactcccaataactaatgctaagaaatgctgaaaatcaaagtaaaaaattaaagcccataaggccagaaaactgctatcttcctctaaatatgattactttaaaataaaaa

SEQ ID NO: 47694 - DNA, 398 bp, Gossypium hirsutum
  Clone ID: LIB3196-041-P1-M1-F6
ataccatccgtgtgaatctagcagatttgagtgtgaggagctaggcttggattgcggacctcaagttacaattgatgtgtccttgttttgtagtaagatgcacatcctgaaaggtttcacccagcagagaacaatttgtgggggtagtcatggggagatatccgaggccttttcttttctgtgggggtctggctaatgtctaaggttgtgagattacagctgtcattaggaagaaggatgacaatattgcttgactcagtctccaggcttaactttccctttggcataaagagtttgggggtcccaagatttctgttacagtacccaaggacttgctaatatctctggggatttcaaaacagatgggccacactttgaaacaagctaccttaccgaat

SEQ ID NO: 47695 - DNA, 329 bp, Gossypium hirsutum
  Clone ID: LIB3196-041-P1-M1-F7
ctcagatcagaactagagagtttacatcctggtaagaggttgagttgccatggcttcagcttcctccaattcactatcaatctcaccctcatccaccctcgtggatgccaaagctcctcgtcaaccaactgctgcatccccacaatgtgtcactcttcctactcttcctcccccacccgttcagtcccagagtcgtccctggaagaccactgcctactgtcgcaagattgctcgaaatgtgatggctatggccactggtgagactttggccacgcgtgaagctccaaccgaagttaccccaactgagctgacagagtttatcaacaaaa

SEQ ID NO: 47696 - DNA, 193 bp, Gossypium hirsutum
  Clone ID: LIB3196-041-P1-M1-F9
ctactctaactcactttactgtaagcaaagctggctcgcctgcacgttccggaaattaattctcgacccaaccctcgcgtccagtcttttaaaggaaggggtaaatgtggtggagaaaaattttccacacaatgaatgagaagattttcatcatctacattagcaccaaagagcatttcaacatcagtttttc

SEQ ID NO: 47697 - DNA, 59 bp, Gossypium hirsutum
  Clone ID: LIB3196-041-P1-M1-G1
tcgcacaagcgtccgaaaagaggcagaggagggcgaaaacatggctgctctaggactac

SEQ ID NO: 47698 - DNA, 397 bp, Gossypium hirsutum
  Clone ID: LIB3196-041-P1-M1-G10
atctctggaaagctccgagttcacaggtcttacccacgcacatgctcagtgcttccaatcagcgattaaggccattgcttttcatccggagcaggcagcagggattcccaggtatccaaagcaaccaaaacaggcggtgtaatttaggactgaataattcatggctcggccactttaagtgtggaagcaaaactgaccccacagatacagaaaactaacactgcttattgggagacactagtgtcaccctgtctagttctgctccccaaattaaataaaagggaaataaacagttgagcacgtcccatcagcctggagggaaacttccgcccccaactttgtaggactgacatctgaagacgtcagagactgcggtcacaaccgtcggtacctcctc

SEQ ID NO: 47699 - DNA, 397 bp, Gossypium hirsutum
  Clone ID: LIB3196-041-P1-M1-G12
atatcaactccaagtgggagaaggtgcagcagctggtgccaaaacgggaccacgccctcctggaggagcagagcaagcagcagtccaatgagcacctgcgccgccagtttgccagccaggccaacgtcgtgggcccctggatccagaccaagatggaggagatcgggcgcatctccattgagatgaacgggaccctggaggaccagctgagccacctgaagcagtatgaacgcagcatcgtggactacaagcccaacctggacctgctggagcagcagcaccagctcatccaggaggccctcatcttcgacaacaagcacaccaactacaccatggagcacattcgcgtgggctgggagcagctgctcaccaccattgcccgcaccatcaacgaggt

SEQ ID NO: 47700 - DNA, 239 bp, Gossypium hirsutum
  Clone ID: LIB3196-041-P1-M1-G2
ataagcattagaatctggttgaccctatgtaaatactgatatgctaaagtggcccaaaattaattgtagcttaaaactctcctttacattgggattctaggtgctgtccaaccctgagtttctggctaagggaacggcccttaatgacctaaagtacccacacagggtactgattggaggggatgaaacttcatagggccagagagctgtgcacgccctgtgtgctgtatatgagcact

SEQ ID NO: 47701 - DNA, 374 bp, Gossypium hirsutum
  Clone ID: LIB3196-041-P1-M1-G3
tctgattattttctccataccagcataaatcaacaatggcaaagctcgcagtttacttagccaccctggctctcattttgttccttgccaatgcttcaatcacatctgtgacggtcgaaagcgaggaaaaccgggatagctgtgaacagcagataaggaagcaagcccacctgaagcactgccagaagtacatggaggaagagtggggtggcgaaggcagcgacaatatagctggcgggtacattgactcatgttgccagcagctagagaagatggatacgcaatgcagatgtcaaggtctaagacatgcaacgatgcaacagatgcaacagatgcaagaacaaatggggagcaaacagatgcgagagatcatg

SEQ ID NO: 47702 - DNA, 392 bp, Gossypium hirsutum
  Clone ID: LIB3196-041-P1-M1-G4
atccgccatgttgggtcttgtgggtcgtgtggccactgcttcggcctccggggccttgcggggactcactccttcagcgtcgctacccccagctcagctcttactgcgggccgctccgacggcggtccatcctgtcagggactatgcggcgcaaacatctccttcgccaaaagcgggcgccgccaccgggcgcatcgtggcggtcattggcgcagtggtggacgtccagtttgatgagggactaccaccaattctaaatgccctggaagtgcaaggcagggagaccagactggttttggaggtggcccagcatttgggtgagagcacagtaaggactattgctatggatggtacggaaggcttggttagaggccagaaagtactggattctg

SEQ ID NO: 47703 - DNA, 379 bp, Gossypium hirsutum
  Clone ID: LIB3196-041-P1-M1-G5
cttgggttgagtgtagagatgaggaaaatcatgggtgccaaagttcttttcttctttgctttgctttccttttcagctgtctcggcatttgcacaggatgaggaagaccaaggtcttgttatgaacttctacaaggattcttgtcctcaggctgaagacattatcaaggagcaagttaagctactgtacaagcgacacaaaaacactgctttttcttggctgagaaacattttccatgactgtgctgtccagtcatgtgatgcttcactgctgctggactccacaagaaggagcttgtctgagaaggagacagacaggagctttggcctaaggaatttcaggtacattgagaccatcaaagaagctgtagaaagggaat

SEQ ID NO: 47704 - DNA, 384 bp, Gossypium hirsutum
  Clone ID: LIB3196-041-P1-M1-G6
actctcccttgatttcaaatgggcccttcttttttcattttcaatatcattatctccctagcattaaccttagtgaatggagatgctggtttgatccaaaaaacttgcaaaaccaccaagtactatgacctttgtgtctcctccctcaaatccgatccgactagcgccaattcggacacaaagggcttggctatgatcatggtgggagtcggaatggctaatgccacggccacatcgaccctcttatcatcccaattacttactaccaaaaatgacacaatcatgaggaaagtattgaaagaatgctctgacaagtatgctcacgctgccgatgctcttcaagattccgttcaagatttcgactcggagttatatgattatgtc

SEQ ID NO: 47705 - DNA, 298 bp, Gossypium hirsutum
  Clone ID: LIB3196-041-P1-M1-G7
cttaattaagcaagctcgtaagctgttttcatcaatggccgaccgtgaccgctcttaccgatttgaccaggttgttcgtggtgatagaacgaactatcaaagcggaccatcaacaacccaagttctaaccgtcctcaccctccttcccatcggcggcactctccttgcattagccgggctaaccctcaccggcaccgtcatcggcctatgcgtggcaacgccactcttcgtcatcttcagcccggttctgctcccagctgccatcgcggttttcatggctgtggccggtttcttgtcg

SEQ ID NO: 47706 - DNA, 371 bp, Gossypium hirsutum
  Clone ID: LIB3196-041-P1-M1-G8
aaaaggaaaaaaaaatggagctcttgtttctaactttgctgctttgctctcttcttctatgttcttcagtttttgaaccaacaatggctcagcctcgttcacctttttgtgaagggaaatgcaaagggaggtgcaataaagcggcggtttgggatcgatgcttcaaatattgcggcatatgttgcgaggagtgtaaatgtgttccttccggtacttatgggaacaaacacgagtgtccttgctacagagacaaggtgaataacaagggcaaacccaaatgcccttggaaatgaaatatattcgagctcgggatttcatcaagcttaaagatcgaggacgaagaggctatatatatatatatgcatgctgat

SEQ ID NO: 47707 - DNA, 348 bp, Gossypium hirsutum
  Clone ID: LIB3196-041-P1-M1-G9
atcgcaacctggacctggacagcatcatcgccgaggtcaaggcccagtatgaggagatcgccaaccgcagccggaccgaagctgagtcttggtaccagaccaagtatgaggagctgcagcagacagctggccggcatggcgatgacctccgcaacaccaagcatgagatctctgagatgaaccggatgatccagaggctgagagctgagattgacaatgtcaagaaacagtgtgccaacctgcagaacgccattgcggatgccgagcagcgtggggagctggcgctcaaggacgccagaaacaagctggccgagctggaggaggccctgcagaaggccaagcatgaca

SEQ ID NO: 47708 - DNA, 158 bp, Gossypium hirsutum
  Clone ID: LIB3196-041-P1-M1-H1
gaaaagcagattttgaaaataccttagcgtgtcctgaggctcaactcatctctcgcaatatgagttgatttttgaaaacatgaattaaaacagaaattggaaatacctcagcatgaccaaggctcaactcacctctcgcaatatgagttgattttttg

SEQ ID NO: 47709 - DNA, 388 bp, Gossypium hirsutum
  Clone ID: LIB3196-041-P1-M1-H10
atgggctggatatggcctactttcataggcttttcttctttcaggtttgatgtaagcatgggcttgcatcgcccaggtacatacttttacttattgtgggataacctggcactagtaggcaggtaaagtcacaaatttggtgtcttttcaccttttgactgttgacttaatagctcctctcactctggctggagatacttcctgcctcagatgaggagccagaagaaacaaagcccgacttgaatgaactcagctcaagagttctaaggaccagcattctgggggccattttctctacaagcaaatggaattgcttttccataacatccaaattgtaatgtggctgctgctgaaggaggaggcagcaacgaggtcctgcggtacccat

SEQ ID NO: 47710 - DNA, 378 bp, Gossypium hirsutum
  Clone ID: LIB3196-041-P1-M1-H11
cccacgcgtccgcccacgcgttcgcggacgcgtggggcaaaagtgtgatctgaggagggcattgagccagaggtgataaatagtgaaatagtacatgtccatggccgcgatgaatattgattgcgaagtgaaatgtaaataaggtttaattttatttgtggaccagtgaagacgaaaggttgtgcataagcaggaaactaagtttgaagagttgcaaagagtgtatacttttattctaattggaaatttatatacagatgtatttaggactagtttgtaaggaaagaccatttgtgttttgctatatattctgcaaacgatcaagtctaatgacgtggttgaaatctttctcatgaagagcctggttgtgcatctgat

SEQ ID NO: 47711 - DNA, 323 bp, Gossypium hirsutum
  Clone ID: LIB3196-041-P1-M1-H12
gggatatttttctcttctctttgaaaaatccgaaaagtaattttccaaagggaaacttttgctcgtaatattctcagatctgctctcaaatcgtcacattttgaatagccaatatgggaggcgggttcagagtacttcatttggttagaccatttctttcgtttctgcctgaagttcagagtgctgataggaaaatcccttttagagagaaggtcatctatactgtgatatccctctttattttcctggtttgcagtcagcttcccctttatggaatacattctacgacgggcgctgatccgttttattggatgcgtgttatc

SEQ ID NO: 47712 - DNA, 324 bp, Gossypium hirsutum
  Clone ID: LIB3196-041-P1-M1-H2
aacaaattgatgtgcataacaaactaacagttgaattgactcctaacaatactagcagttgttactttgtactttaacattcacccatcttcctgacgggtaaaacctgaagaagacttctaaaccgagcaaaagatgaaacagataaaggtttaataagattgtcaacaacctgatctcacgcaggtacctcacccacaactatggacctattagcaactctctcacgtacaaagaacaaatcaagctctacatgtttaaacttagaatgtaaaacagatttgcagcaactgcgactgcacttgagttgtcacactagacaat

SEQ ID NO: 47713 - DNA, 397 bp, Gossypium hirsutum
  Clone ID: LIB3196-041-P1-M1-H3
atcggctgatcaatgacctgactgcgcagagggggcgcctgcagactgaatctggtgaattttcacgccagctcgatgaaaaggatgctctggtgtctcagttatcaaggggcaaacaagcctttactcaacagattgaagaactaaagaggcaacttgaagaggagataaaagccaagaacgccctggcgcatgccctgcagtcttcccgccacgactgtgacctgctgcgggaacagtatgaggaggagcaggaatccaaggctgagctgcagagggcgctgtccaaggccaacaccgaagttgcccagtggaggaccaaatatgagacggacgccatccagcgcacagaggagctggaggaggcaaagaagaagctggcccagcggctccaggc

SEQ ID NO: 47714 - DNA, 373 bp, Gossypium hirsutum
  Clone ID: LIB3196-041-P1-M1-H4
attactgaaatgttttcttctccgaagaaagaagatgatgattcaggccaaggctttcgttttgacaagtctctccaggaactgagagatttgcggtctcagcttcattacgctgcggattactgtgaaacaacatttttaaagtctgaagagaagaaaactgtggtggaaaacacaaaagaatacctatgcaaggcacttgtcactttcgttgatcatctgggaaacgtctctgctaatctaaatcactccatttcccagactaattcattttccgaggctgagctccgcatcaattgcctccatcaaagacttctctcatgccaacaatttgctcacaagcttgctctaaccagagtcaaatggaacccca

SEQ ID NO: 47715 - DNA, 401 bp, Gossypium hirsutum
  Clone ID: LIB3196-041-P1-M1-H5
atgccagatttaagagtttaggaataagagcaggagaaattaagcggttcttgcaaaacagaagcgagggtgctacgtttcatttgcgttctgccttccatgcggacgtagttacagaaatgacatcggggtgcctgtgtgtatcctcatttcagagattccagtgtaaagggtatgttatacacatactggaatgtgcttttcagaccaagtaatccactttttcacttgtaattactgtgagtgactttggggcaacacatttcttcctgggttttgcctaccttgaactcctcttttggtatttcttggagacattaaagtagttcaagtagaaagttgtcactgtttccagggcaattgataggtaaaattccttgtgttagtaaaaacactaaaaa

SEQ ID NO: 47716 - DNA, 382 bp, Gossypium hirsutum
  Clone ID: LIB3196-041-P1-M1-H6
cccacgcgtccgaagcaaccacaaagcgatgtcgaatcatgcgcaagttccaggcgagcccactgaaaccaccacttccctcgtcgagaccgccaccggtgccatccaaggcttccgccccatcaaacaaatccatgaacatctctgcgcatttcatttctatggctacgacatgacccgtcaagtcgaagcgcaccatttctgcgcacatcaaaacgaagaaatgcgacaatgtctcatatatgacacccccgaagccgatgcaaagctcatcggattggagtatatgatatcggagaatttgtttttgacgttgccggacgaagagaagccgctttggcattcgcatttgtacgaagtgaagagtggggtgttgtttatg

SEQ ID NO: 47717 - DNA, 288 bp, Gossypium hirsutum
  Clone ID: LIB3196-041-P1-M1-H7
tcctgatgcacgaagtatagctgttgtaaaacttttatgcgatctgagtgccatggatcggatctctgatgacataggtgcataccgatatgttaagcttgttgcaaaaaactaacgttttgcggtcaaaaggactacacagaacttgaatgcccaagttctaaatattgcctgtataagcattgacgacttggatctttcatcttatattataagggcccacttcaggatggactcagaagcttatactgctgacacacagcttgctgggacctaattgatacccgt

SEQ ID NO: 47718 - DNA, 210 bp, Gossypium hirsutum
  Clone ID: LIB3196-041-P1-M1-H8
aagaaggggaagggagctgcttaaaaaattattgcatagttttcagcattcatatcagaatgccgcccttagggtttgcctttcacatttccagaacatttaaagttgtgttagcattgaacttttaatctggatccctgagagttattatttttgtattggaatttagattatctttgaactttataaatgcagcttattttggttggt

SEQ ID NO: 47719 - DNA, 377 bp, Gossypium hirsutum
  Clone ID: LIB3196-041-P1-M1-H9
catctctctcctttgttttcccttttgtctctctctctctttttccaaccctaaccctacctcaccaaccaggattcaacatgaagggaggaaaatccaagtcagatactaagagtgccaagctatccgtgaaatccaaagctggaaagaaatcggggaaggctgccaaggatccaaacaagccaaagaggcctgctagtgccttctttgttttcatggaggagttccgtgagcaatacaagaaggatcaccctaaaaacaaatccgttgcggctgtcggcaaagctggtggagaaaaatggaagagcttgtctgaagctgaaaaggcaccttatgtagctaaggcagaaaagcggaaggttgagtatgaaaagaac

SEQ ID NO: 47720 - DNA, 148 bp, Gossypium hirsutum
  Clone ID: LIB3196-042-P1-M1-A1
gtgatcggctcaccttggaaattattttggtctacgaattttgagaaaacgagttcgggagtcagttacgcacgaggaagggttagcaccctcgtaacgcccaaaatcggtaccaaattgattatttgatgtcttagtgtcgaaggtt

SEQ ID NO: 47721 - DNA, 359 bp, Gossypium hirsutum
  Clone ID: LIB3196-042-P1-M1-A10
ctctctctcctatactaacttcttccacttaaaagcaagttagctagctagggttttttgagccagagagatgggttcgaaaagaacagcatcactagccctcctctttgcactcaacatcctcttcttttccctggtgagtgcttgtggttcctgcccttcccccaaccccaaacctaaacctaaacctaaaccaaagccaaaccctactccctccccatcttcttctggcaagtgccctagagatgctcttaaactcggtgtatgtgctgatttgctccgtggcttgctcaacgtcaccattggtacccctcctgttcaaccctgctgctctctcatccaaggtcttgctgatcttg

SEQ ID NO: 47722 - DNA, 386 bp, Gossypium hirsutum
  Clone ID: LIB3196-042-P1-M1-A3
cgatgccagacttcagggacatttccaaatggaacaaccgcgtggtgagcaacctgctctattaccagaccaactacctggtggtggctgccatgatgatttccgttgtagggtttctgagtcccttcaacatgatcctgggaggaatcgtggtggtgctggtgttcacagggtttgtgtgggcagcccacaataaggacgcccttcgccggctgaagaagcgctaccccacgacgttcgttatggtggtcatgttggcgagttatttccttatatccatgtttggaggcgtcatggtctttgtgtttggcattacttatgctttgctgttgatgtttatccatgcatcgttgagactccggaacctcaagaacaaactggagaat

SEQ ID NO: 47723 - DNA, 311 bp, Gossypium hirsutum
  Clone ID: LIB3196-042-P1-M1-A7
tccacgcgtgcgtaagaagatacgaaataagagaaggagagatgggcgctcaaaaggacccagaagaagaactgaaagaaatagcagcttggctaaccacaagaaactagaaacgatagcaagcaagctaataaaattaataagctttgtagatggccgccgcctcatcgtccacacctttttttggaaccagggaagaaaatcaaaaaccagatgatgcaagtacaatcattcaccgctacacccacttcgtcaactgctccaaccactgcacctcagaagagaaagagaaatcaccctggaacatcata

SEQ ID NO: 47724 - DNA, 78 bp, Gossypium hirsutum
  Clone ID: LIB3196-042-P1-M1-A8
cccacgcgtccgcggacgcgtgggctttttcattatttattacggatatgatatttttggtgctttcaatgaccgctt

SEQ ID NO: 47725 - DNA, 358 bp, Gossypium hirsutum
  Clone ID: LIB3196-042-P1-M1-A9
aaaatggtctgctccactgattgataaccccaattacaagggtatttggaagcctcaagagattccaaaccccgactacgttgagcttgataagcctgactttgagcctattgctgctgttggtattgagatttggacaatgcaagatggcatattgtttgacaatattttgattgccaaaaatgacaaggttgctgagtcatatagggagaccacatggaagcctaagtttgaggttgagaaagaaaaacagaaggctgaggatgagtccactgattcagatggactttcaggcgtccagaagaaggtctttgatgtcctttacaaggttgctgatattcctttcttaagtgaatac

SEQ ID NO: 47726 - DNA, 380 bp, Gossypium hirsutum
  Clone ID: LIB3196-042-P1-M1-B1
atcactgggatacacgtaggattttattttgtaagtgtcactgtgaaaacagacaagtaagtattaaaaacagtttatctgtaccagcttctactctgaatgaggaaatagccccagaaaggtgaagtgacttatgctgagtcccacaggtaggtcctagcaaagtggggactaagtcaggacccctgcatgcctgtgccccccactcccatgtcattttaacaaaggatgttggagcaaacagacatctccattttgaggaaataatattcctccataatgaggaaacaggtaaaatggctccaggagtgccaagatggagccaggctggaaatctctgaaagccagtcctgtggacctgcctcatcccagccccaccc

SEQ ID NO: 47727 - DNA, 373 bp, Gossypium hirsutum
  Clone ID: LIB3196-042-P1-M1-B10
atctctttcctccttgtcttacaccatcattaagacctgggctagatcacctacaacatctcacttagggaaggcaatgtgttgccataaaaagaccacaagcttttgagtgaggcccgaatttgaatttcagcttaatcctgtgggatttatggtgggggccctttcagtctcaacttccacattagtgagccggggaaatgatacatacttctaagggtttttagggggattaaatgaagtatacagttcttagcctcaggcctaggattaagtaagtactcaagaaacgtgcaggttttctacttccatgtttcttttctaatcttcaaatggaattatagaaaccgtgggtcagaacacattgctttac

SEQ ID NO: 47728 - DNA, 339 bp, Gossypium hirsutum
  Clone ID: LIB3196-042-P1-M1-B11
cccacgcgtccgaaaggctacattcgtggtcctcgtcaccgaaggaaacggccacgtcgaaatggtctgccctcacctttctaggcagagctcacactggtcctcccgagaggaagaagaacaagaagaacaagaagttgaaaggagaagtggacaatacaagagagtgagagcccagttatcaaccggtgacctatttgtagtcccagcaggccatccagtcacattcgttgcctcccaaaacgaggacctaggattgctcgggttcggactctacaacggccaagacaagaggatcttcgtggctgggaaaaccaacaatgtgagacaatgggatcg

SEQ ID NO: 47729 - DNA, 377 bp, Gossypium hirsutum
  Clone ID: LIB3196-042-P1-M1-B12
atgagttaatgcaaatgaagagattccgtgggttgcgctgggataagtgaggttagtgtcttagaccacactattgtttgaaggtttatctcttctagtcatgctcttccacattgtagacagcctaaagagagttgtttttgagctgatctcacggaagtacaaataacttgggagatgagggacaaaagatgattctgtgctgtcaaggcagtaagtctgaagaaaggaccatgcttcttatattatcttccaccttgcttaaaacagcccatagctttgagttgacatttttattcttggcaggtagcctactttatggaggtaaggaatgaagacttacccttgggtcattctctgtactgatgcattggtct

SEQ ID NO: 47730 - DNA, 371 bp, Gossypium hirsutum
  Clone ID: LIB3196-042-P1-M1-B2
cccacgcgtccgatttctctaacaaatccctattcaatacttgttatatcaaatagttcatgatccaatctaaattttatagttggaatactatttccaataaaattggtaaaaacataagattgaagaaaatattcagaaaaagtttttctaaattgattctgctgattgcagatcatatcatttattttgttgaatatttccaatggacaaatctgtctagatttgttatgtaaacagattctaaataccttattcataaaagggctgctttttcctttatgaataaaatattgaatagtatcaagaagattatttatctccttaatatccattataaagagttggaattcatcccaatctcgatataa

SEQ ID NO: 47731 - DNA, 378 bp, Gossypium hirsutum
  Clone ID: LIB3196-042-P1-M1-B3
atgacggaacccaggggtcgtaatatatgtgaactggcgtccgtgctgcgtgcccagagtagtggccgaataccttaacgggtctgtgcgcgaggagagcatccactgcaagtcggtcgaggagatctcgacgctggtgcagaagctggccaaccagtcgggtttggacgtgatccgcatccgcaagcccttccacaccgacaaccctagcatccagggccaatggcaccccttcaccaacaagccgaccactttccgcgagctatgcccccgagaggttcaggatcctgccccagcccaggtgcaagcacagtgaagagttgctccaccccaggctttggactgtttctccagtaaaggtggttcttcccctttggg

SEQ ID NO: 47732 - DNA, 115 bp, Gossypium hirsutum
  Clone ID: LIB3196-042-P1-M1-B5
tttcgttgggataaatagcccccaaaaaaaacatgtggctaatcttgtacaataggagcggtttgattttttttccaattaaccttttagtcatattccaaaaataaccctaaaa

SEQ ID NO: 47733 - DNA, 63 bp, Gossypium hirsutum
  Clone ID: LIB3196-042-P1-M1-B6
aaattatttgaagggtagctctctgttctactaaatcgtccattttaggggaaggggggggtt

SEQ ID NO: 47734 - DNA, 375 bp, Gossypium hirsutum
  unsure (1)..(375): unsure at all n locations; Clone ID: LIB3196-042-P1-M1-B7
attgctaactttctgacacagtgctctagaaccctggctgtggtcctgagcactgatcagcttagctagaccatggttgactcttcttggagattttcacttggtcctagaatgtggcaacgtagttgtgctcgctagaatgtgggaccaaattggcctcatgtgtttagtccagacttctgcttttgagagagggctgcactttttaatggtatttctaggggaggtggtaggctgcatgtgccacttggtcttgtgagtatgctgacaccagaaactcanagccagcttgtggcaagcagttggggtggggggtctctgacttgctcangacaaactaggccagtgggtttcaaactgcttggcagagccctg

SEQ ID NO: 47735 - DNA, 381 bp, Gossypium hirsutum
  Clone ID: LIB3196-042-P1-M1-B8
atccacgcctcgcagccatccatgactgtggacggcgttaccgacccctacaattcggagcgcttctgcctcgggctgctctccaatgtcaacaggaatgcagcagtggagctgacgcggagacacattggaagaggcgtgcggctctactacatcggaggggaggtcttcgcagagtgcctcagtgacagcgctatttttgtccagtctgccaactgtaaccagcgctatggctggcacccggtcaccgtctgctagattccaccaggatgcaagctgaagatcttcaacaaccaggagtttagtgaccttctggcccaagccgtctaccagggctttgtggcgggctaccagttgacccgaatgtgtaccatccgcatg

SEQ ID NO: 47736 - DNA, 274 bp, Gossypium hirsutum
  Clone ID: LIB3196-042-P1-M1-B9
cagctaccagggtttcccaaactaacttttaaagcaaacaaattttacctttactaaatggcccccaaagctgagaaaaagccagccgaaaagaaaccggcggaggagaaaaagaccaccgttgccgagaaatccccggcggagaagaaaccgaatgccggcaagaagcttccaaaagaaggcggtgccgccgctgacaagaagaagaagaaggccaagaagagtgcggtgacttacaagatctacatcttgaaggttcttaaacaagttcacc

SEQ ID NO: 47737 - DNA, 384 bp, Gossypium hirsutum
  unsure (1)..(384): unsure at all n locations; Clone ID: LIB3196-042-P1-M1-C1
atcaagattccattaacctcttcctgggagtttttcatcccactgaagggaaacctcatctctgggaactcccaacagatttttatttgcatcacaaaaataccatgagacttttgccaacaagaagaagttatacttactggtggacaccagaggtaataaagcattttaccattaccctatgatgaagttatctgtgctgtgaacttaaagaagttgatagtgaagaaattccacacatatgaagaagagattgatatccacaatgagttctttcggccatatgagttgagcagctttgatgataccttttgcttggctatgacaagctcagcacgtgactntatgcctaagactgttggaattgatccaagtccatttact

SEQ ID NO: 47738 - DNA, 372 bp, Gossypium hirsutum
  unsure (1)..(372): unsure at all n locations; Clone ID: LIB3196-042-P1-M1-C11
atttctccaactgttatcctaatctagcaaatgaggactgatccctaggcagaagtggtgtgaggaattaactctggaagaggaaaatctggctggctttccaatgctaagataggtttgtatttcaccccgtggccaagctacagaaattctgagattgtggcagaatttatgcaaccagcaggggaagaggcctcttattgcctaaacacaaagttacactgagttttctaccgtcctttgcctgttgctccctctatcgtgtaaagatctgggaaggatgaaaggcagagactgcttgtcatgagctgcactcttctctttttaactagtcattgacaattggaagaaaattgactntaaagaagtttc

SEQ ID NO: 47739 - DNA, 284 bp, Gossypium hirsutum
  Clone ID: LIB3196-042-P1-M1-C12
agagtattcaccaaccttcgaccctttaagaggtttctaggcaccaactgaaaaaaggtaagcacttaagttaaccaataaaggaaaacaccactctaactcttttcttgaaagttgctttggaaagaaaagagtttgagggtgttttccttgtaaatttgctaagtaatgattttaggctttgcttaaaattcactatttataatactctctttccctaattgaaataggttttaacaattcatgtagaattgatacttctttaaaataaggactaaattgaa

SEQ ID NO: 47740 - DNA, 354 bp, Gossypium hirsutum
  Clone ID: LIB3196-042-P1-M1-C2
ctttcttttcgatcgaagagaaaaaaacacccagagtctcagatcaccctgttctttaaatcaagatgcagtcaaccaacggttctgatctgagctcaaagcaccaaaaacagcagcccccaccgccgccgcagccacagcagcctcaatggatgccgaaccaatggatgggagctatgcaatacccggcggctgctatggcaatgatgcaacaacaacagatgatgatgatgtatcctcctcatcattacatggcttataataaccctcattttcattatcaacaacagtatcaacaacaacagttgcataaacaacaacaaggatctaattcagatgaggttaaaacgatct

SEQ ID NO: 47741 - DNA, 238 bp, Gossypium hirsutum
  Clone ID: LIB3196-042-P1-M1-C3
gatcttaatttggctttaggttagcaaaagatctattgtaagctcatattagaccccaaaaatgattatataacacaatacaaatatgaattatacttaattgtatgtgtaaatgattgtatgatgtataattgattggagttgctccaacaacgaatgtaacatcctgtggctccgacccgatgattgggtcaagtaaggggtgttacataatccatatgtgatctcaagtgaaaaa

SEQ ID NO: 47742 - DNA, 371 bp, Gossypium hirsutum
  unsure (1)..(371): unsure at all n locations; Clone ID: LIB3196-042-P1-M1-C4
gcgcccacgcgtccgcggacgcgtgggcaggtgcaagcatttcaggtggactgaaggcaaactacagcattactgctgcaaagggtatgtattattcggcccgaggaccagatccagaagacagttctctagatgatgcagacataatgaaaccgaacttgattgcccctggaaataagatatgggctgcctggagttccctcgggacagattcagttgaattccaaggtgaaagctttgcaatgatgtctggaacaagcatggcagctcctcatattgctgggcttgctgcattgataaagcaaaagatttctcattttagtcctgcagccatcgcctctgcactttngacaacagattatctttatgac

SEQ ID NO: 47743 - DNA, 248 bp, Gossypium hirsutum
  Clone ID: LIB3196-042-P1-M1-C5
tcccggaattccccgggatcctgtgtccacttcgtggtggcaaatcacacttggagaactcggtcccaagagcctactgatagctgcagcccagaatgcaagacttgggtcacaggctccctggctttacccaagatctgtctctgcccccataccttgttggcctggggcacccccataacccatgtccccaggccctggctggaacgtgccatgcagggaagacaggccccaccttgcagcctcct

SEQ ID NO: 47744 - DNA, 367 bp, Gossypium hirsutum
  unsure (1)..(367): unsure at all n locations; Clone ID: LIB3196-042-P1-M1-C6
tcgcccacgcgttcggccaaagctatcgcaaacgaatgtcaggcaaacttcattagcgtcaagggtccggaattgctcacaatgtggttcggagaaagtgaggccaatgttcgtgaaattttcgataaggctcgccagtctgctccttgtgtccttttctttgatgaacttgactcaattgctactcanagaggaagcagtgtcggagatgcacgtggtgccgccgatagggttctgaaccaacttcttaccgagatggatggcatgtctgccaagaaaactgttttcatcatcggagccaccaaccgaccagacattatagatcccgcacttttgcggccaggtcgtctcgatcagttaatctata

SEQ ID NO: 47745 - DNA, 352 bp, Gossypium hirsutum
  Clone ID: LIB3196-042-P1-M1-C7
cggactcgtggggacaaaggtgtagaacttgataacatcattcgtaaaactggcatcaccggcattgtgaatggcatggatgttcaagaatggaatcctgcctctgacaaatacatcagtgtcaaatatgatgcaacaactgtgatgaaggcacagccattgttaaaggaagctcttcaagctgaggtgggattgccttgcgacggagatgttcctttgatcggattcattggtaggctagaagagcagaagggttcagatattttggcagaagctattccgaaattagttgctgaaaattgccagattgtagtccttggcacacgcaaaaaggccatggagaagcacattg

SEQ ID NO: 47746 - DNA, 346 bp, Gossypium hirsutum
  Clone ID: LIB3196-042-P1-M1-C8
cccacgcgtgcgcttgcagttcggacattattcagccgtgctaggacatgttcaccatgcatacttttttttgatgaggtttgtggctctcttttttatttctaagtgaaaggaaaaatttctggaaaaaaattgctactgttgaatttgataattttgaggattttctgtaaaatgtaggtggatgctttgaccacaaagcggggaaaagaggggggatgggtcgttgagcgacttctgaaccagttactcatagagttagatggtgcagaccagcggtgtggtgtttttgttattggtgccactaataggcctgaggtgatggatcgtgctgatttacgccctg

SEQ ID NO: 47747 - DNA, 326 bp, Gossypium hirsutum
  Clone ID: LIB3196-042-P1-M1-C9
acggtacactgtgtgcattagccggtttaacactggcctgcaccatcattgggctgatgctagccacaccgatgttcatgatcttcagcccagttcttgtaccagctgccattgccattgccatggcagagacggggttcttgtggtcacgcgcgtttgggttaacaggggtggagaaggctagttacacgcttaacaggctgtggtacacaacagggacggagcatctagatctagaccattcagagagacggggacaggacatctgagactatgtggtgcaaaagacaaatgaagatgggcagaacactgagaacaaggcacat

SEQ ID NO: 47748 - DNA, 382 bp, Gossypium hirsutum
  Clone ID: LIB3196-042-P1-M1-D1
ataacggctcgggtctccgccatggcttctctactggccaaggacgcctacctgcagagcctggccaagaagatctgctcccattcgggcccggagcagcaggcgcgcacgcgggctggcaaaactcgaggctcagtagctgcagggcccccaaaaaagaaaaggaagaaaacacaaaagaaattccggcagcggaagagaaggctgctgagcacaaggccaagtccttgggagagaagtctccagcagcctctggggccaggaggcctgaggcagccaaagaggaagcagctggggcttccagttcagcagggaaccctgcagatggcctggccactgagcctgagtctgtctttgcactggatgttctgcgacagcgact

SEQ ID NO: 47749 - DNA, 356 bp, Gossypium hirsutum
  Clone ID: LIB3196-042-P1-M1-D10
gagagtgttaagcatgataagtcattttttagaaattattattttaggttgcctcattgaactaaaggattatcttgaaattttaaatctgcaagtctgacatcaaaaccataattttttgtgagcttttgagcctatagagcatatatgttatttcatgctcattttatttttagttgtgagtatgtcaacttgatttgttattatagaacttgcttcgattatgcatgtcaagaccacattattgatttgatatactaagatgatagagacacttaggatttaacccacctaacctttaatcatcttacttgttgtattaatccctaataaaccccgctgatcctaacacattt

SEQ ID NO: 47750 - DNA, 343 bp, Gossypium hirsutum
  Clone ID: LIB3196-042-P1-M1-D11
aactctactacgtctaactatagggaacgctggtgcgccttcatgcacctccccaatattcccgattggacccacgaccgccccaactcggggctatgggaacccatcgtctgcccatacttacgataggacgaggactaggacatagggagtgtcctagcggtgtaacactcacagtcggccgtggaagatcacattctggtgcgcgtgcccgagccaataaatgaggtcctgcatgaggcgctcattgaatctacagacctgatgaccacactttacaatatgcttacagaactttgttcacttcaacgatggtagactacactcttggggtggaaagctc

SEQ ID NO: 47751 - DNA, 317 bp, Gossypium hirsutum
  Clone ID: LIB3196-042-P1-M1-D2
taaaaattagaaatatgggaattcatgtctgggagtactcattagagcatttaaacagaaagctttctctcaagcactataacgggaaactcattaagccatgtaacgagaagcttatccaggcttaataacgggaagctcacaaagagcctatatcgggtagcttcaaagagcacttaacgggaagctccgaggagcctttaacgggaagctcacaaagagcctataagcagaacgcttataagagcgtgggggtggctacaacatatgcatatgacaactagtcgggatgctcagcatagcattttacgggaagc

SEQ ID NO: 47752 - DNA, 357 bp, Gossypium hirsutum
  unsure (1)..(357): unsure at all n locations; Clone ID: LIB3196-042-P1-M1-D3
taaaaacagagagaaatggctctacacgagccaaattcggcgagaaagaaagccactgttatagccatggatgaaatcccctgcccgaaccttcacatttctccggcattcgggttctaaatcactaagacccaggtacgtgcgtgagtgcatcactgatgtggcatggtggagcagcgcatgacgcggaggaagcgcgagacgtgcggtgcctggagactgccctgggttgtgacggctgatggngtttttgtttttgtttttattatttttttgggctgttggggtttatgtaattgggcttggtttgtaattttgttttaggtgtttgatttggggtgtgatttggacttaaat

SEQ ID NO: 47753 - DNA, 392 bp, Gossypium hirsutum
  Clone ID: LIB3196-042-P1-M1-D4
gccggacttcccgggatcatttgtacagtggtctccttaagagggtctggtgcaaagatgtcaccagtatttgtgttatcaaccagacaaactgagtgaaacacatgctttacacaacaaaaaaatccatgcccacattcatggcttacagtgcagctctggctgagtgattcaggttcctgagatcccatcttacaatgcagcttgacttaccaaaagtatccaatggcccaatgccttcaaaccaagttttttcaattactatatttaaagttatacattcaagttaaaatatacctaggacattctgattatagctgaggctttagttctatccagagaacaagaaaaactttttgaaaaaggggaggaatcaatttcatacctgatca

SEQ ID NO: 47754 - DNA, 373 bp, Gossypium hirsutum
  Clone ID: LIB3196-042-P1-M1-D5
atccgggcccaggggctccgcacagcaggttctccccatgacaccacctgaacgtctcttactcttaagggtgcgtggcacccccctacacctcctccttctggggctgctgctggtcctgctgcctggggcccacgggctccctggtgttggcctcacaccttcagctgcccagactgcccgtcagcaccccaagatgcatcttgcccacagcaccctcaaacctgctgctcacctcattggagaccccagcaagcagaaactcactgctctggagagcgaacacggaccgtgccttcctccaggatggtttctccttgagcaacaattctctcctggtccccaccagtggcatctactttgtctactccca

SEQ ID NO: 47755 - DNA, 280 bp, Gossypium hirsutum
  Clone ID: LIB3196-042-P1-M1-D6
cgggacgcgtgggttttagcccaaggcaaggctcgcaacagtagatcaaacaactaatctaggtgtacgtacgtacgtaattgcatcaacaataaaacccagatcccaatatctggattcggaataaatatatatataaataaaataaaacatggccttaacaggcatgcaactctagtttctactctacaacttgcatgtatttatatatgtgcgggagcaatgttttgtaatccagctaaattaaataaaagtaatagtaaacaaggtttttcttctt

SEQ ID NO: 47756 - DNA, 267 bp, Gossypium hirsutum
  Clone ID: LIB3196-042-P1-M1-D7
atgggttctctacttggcaaaaactatcttcctgctgactccttccttgaagatcttttttttaaatttctcgaaaccccttgtttgcccactatgtgtcaatacatcaaggtatttcgccacgctaccgcccaggatgtattgctggattcaccaaattgattcctgtcccacttgaaatagctggtgatctcttacatgtcactatgcactgatgatactttgcgatcaatattgcaaatgcgctggctaggcctcttatataca

SEQ ID NO: 47757 - DNA, 353 bp, Gossypium hirsutum
  Clone ID: LIB3196-042-P1-M1-D8
ctgaaaaatgtcttgctgtggtggaaactgtggctgcggtactggctgcaagtgtggcagtggctgtggaggatgcaagatgtatccagacctgaacgctgccgagatgaccacaactgagactctggttcttggtgtagcaccccagaaagcacactttgagggagctgagatggaattcggggctgagaacggctgcaagtgtggagacaactgcacctgcaacccttgcaattgtaaatgattagagaccaaagccaaagctccctggaagcagaggcgcctttgtctttaagaaataatatgttttgttgtttatgtgtttttagaataaagtagccatggcttgtcgt

SEQ ID NO: 47758 - DNA, 273 bp, Gossypium hirsutum
  unsure (1)..(273): unsure at all n locations; Clone ID: LIB3196-042-P1-M1-D9
atcgcccccnngaaaccagataaaaatgggtctctgcgtcgaaaaatggggataaaaaacttctttttttttttccatggggagaaaagaaagccggaccttttcatatcttaacgagccgggtgttattatcacttacaaccacgtgcattcgtgagagcagcacatgaaatggccttctcagagaattcatgacccccaacaaacccgagaggggccgtgcctggagacaaacctgggtccagacctctgatcccgaaaatgtttgcgtgc

SEQ ID NO: 47759 - DNA, 349 bp, Gossypium hirsutum
  Clone ID: LIB3196-042-P1-M1-E1
cccacgcgtgcgggggcagggtggagtaggaatgcatgcactcaacatccatggaagcggtagtgtttttcaaaattattcattcatagtggagtagaatatatgatggagcaaactatggcaactatgaagcaatgatggatttaataatattcgcttctgtcccgctcgactactattcctagagatattagtcatcaatatataaggttggagaaggatgtatgattgaaagctttatcaagaaagaaatttaccttttggatgtcaactagatgaagaaacacttgttactaaccgttcctttttttttttttggtaagtagtaacaatttgatacataaatttt

SEQ ID NO: 47760 - DNA, 334 bp, Gossypium hirsutum
  Clone ID: LIB3196-042-P1-M1-E10
taaagttttgatttcaatcgacaagtaagatttaattcttttccgctatgacatttcctttgaaacttgaaattttctaaagataatcgatttttgcaattttttttgaaaagaaaatttatagacactatttggattttcttaagcaaatcaaaatgacgattttaaataatgacgtttgtcaagagaaaatagtaaataatttatgtgccatcatcctggccaatgtgatcttcgagatccgatcataatgtttaaatcgagtttagggggttacaagtttattgccgaattatttaaagtttagttttataaattaaaaatctcctccaaa

SEQ ID NO: 47761 - DNA, 288 bp, Gossypium hirsutum
  Clone ID: LIB3196-042-P1-M1-E11
gccacgcgtgcggcgctgtactactggattgcccagctcttaagttccattgtggactagtatattgctccgcctcaccgctggaatgcgaccggtggggttcgccctggcgtcaagagtatgggagtagcgtgggctgatattggggatagtgctgacatacggattggtgttcacagtttatgcaacagggatcgatcccaaaagaggaagcgtggggacaatagcaccggttgctataggcttgatagcgagcgccaacaatttagtatggggaccatatgatgg

SEQ ID NO: 47762 - DNA, 365 bp, Gossypium hirsutum
  Clone ID: LIB3196-042-P1-M1-E2
cggacgcgtgggtgggagattcatacaccgactctgaattctgaaaccatcctctttctttatatagatatatagtatggctctcttgtagttatcttcatcaccccacctccggcccctttctcgcgctcttttcttttttctttctttttcaagccatcttcttctacctcttcttattctcttggttttcagcatatataattcaactcctccttcagtaatggtggatcttcaaactgtctgctgcatgtgcggcgacgttggttttcctgacaaactcttccgctgtaacaagtgccaccaccgctttcaacactcgtattgcagcaactattacagcgagttggcagagccaattggac

SEQ ID NO: 47763 - DNA, 350 bp, Gossypium hirsutum
  Clone ID: LIB3196-042-P1-M1-E3
tcgcccacgcgtccgtgacattccgaaaggtggtcccggttaattcaggcaacaccaaggtaatcttctcagtggttttggaaggaacttctttgtgttatgtaccaaaggtcaacaacagagaactgctttgttttatggaggttgtttgatggtatatcacagattatgcatttaatttgtagttgctgtattcaatctccatcactttctgcatttagtttgtagttactgttttgtggaggctatatgtttttactagcgcttgccatcatggtcagtacgaatggtaccgtttggttcgattttgaaaactaagtttgtggctaacgtgctttttagttatttag

SEQ ID NO: 47764 - DNA, 238 bp, Gossypium hirsutum
  Clone ID: LIB3196-042-P1-M1-E5
tagaattggtacttttggtacccaaataactccaaaccattacatccgttaaaacaattccaaccaattaaaagctattatgtgcatttatttaagtttattatttccaaatatataggaaaattttataaaatttaaaaaatatatatacttatggagatttatttttatgatatattaattatttaaaattaaaaagctttatataaaaagttaaaagatatataaattttaaaaa

SEQ ID NO: 47765 - DNA, 360 bp, Gossypium hirsutum
  Clone ID: LIB3196-042-P1-M1-E6
cggacgcgtgggctcaatttgtgaatggattatttgactcgagaaatgatttgtccacttttaaaaatcacatacgggacttccttgtgcaatcaaaagaattttcagctcaggacaataaagatctctatgcagaagaggctgccctacaaagggaaagagagcgacaacggatgctttctatcccagggctcattgccccaaatgagatacaagatgagatgttagactcgtagatgtggctaattttggcatggaggctaatttgtttaattttgacttgggagttaaggttgcgccttgattttatgacctgtatccctgaatgtaatcagatatgatacagcattttcacccatt

SEQ ID NO: 47766 - DNA, 368 bp, Gossypium hirsutum
  Clone ID: LIB3196-042-P1-M1-E7
atatgccagcaagctcagcatcgacgaggaggtggagctttgagaatctcatgcagctggtggagcactacacctcagacgcagatggactctgtacgcgcctcattaaaccaaaggtcatggagggcacggtggcggcccaggatgagttctaccgcagtggctgggccctgaacatgaaggagctgaagctactgcagaccattgggaagggggagttcggagacgtgatgctgggcgattaccgagggaacaaagtcgctgtcaagtgcattaagaacgactccaccgcccaggccttcctggctgaagcttcagtcatgacgcaactgcggcatatcaacctggtgcagctcctgggcgtgatc

SEQ ID NO: 47767 - DNA, 370 bp, Gossypium hirsutum
  unsure (1)..(370): unsure at all n locations; Clone ID: LIB3196-042-P1-M1-E8
atccagcgtgtgggcccctcccgaccccacgggggctgcacaggctcccacctgcctctgggcgtgacccangcacaggaagctgtccagggaaaggaatgcccatggcagtcacagcacagtatcatccttggagcctccatcctgcccatctagaacagactagaacattccctggaggaatccccagcctagctgggaagggcgggagctcgggttccagacgtacttcaccttcccaccccgatggcgggagaagccagggcaaggcggcaatcgagagacataccaggccttgcgtgggatctcactttaatggagaggacgtgctggcctctggggcacggctctcagccttgggcaagcccct

SEQ ID NO: 47768 - DNA, 306 bp, Gossypium hirsutum
  unsure (1)..(306): unsure at all n locations; Clone ID: LIB3196-042-P1-M1-E9
atggagagctggagcaaggactcangcggaggcagaggtcagaacccaagccctgtccccgaaggaagtgtgtcccatcctaactactccgtagctgaggcctggagggaagtcagggaccctgggactggctctcctggccttgactcatgactgttccggagacccaaatgcaccctgagccaccagacgcaccctgagccaccagacatgggtgttaacacctgaggtcaaacccctgatgcttccgggtgctctggaggaagctgatcctccctcccatctcctgttttttgtgccagcctg

SEQ ID NO: 47769 - DNA, 360 bp, Gossypium hirsutum
  unsure (1)..(360): unsure at all n locations; Clone ID: LIB3196-042-P1-M1-F1
attgcctcgcttcctccgccactaaaccagcgggggactgacagcccgaggctggtgcagaagcgggtgcataagccggagagggaacgcgcgtggcgccccagccgccacctcaacccagccacttccgcagctgcccgggcgccgctgcatccggactactctgcggtccacccgctgcggccaaaagaagagagactccggggagtgcggccctgcagcaccctggccttcacagagcagggggcggaggagcccangtgccctcggtgcctgcgcaacctgagccccggccgcttcgcgccttatccttggggctccccctggcggttattccggtccctgcaaggaaatgtgccc

SEQ ID NO: 47770 - DNA, 354 bp, Gossypium hirsutum
  Clone ID: LIB3196-042-P1-M1-F10
gtactattgtgggtggaaaaatggtgaagatagatgaccctcttgattatattttaatattcaattcgctaatgtcatcaattaccaaccctagtcatattttgactttttgactcctcatgtctctatggtcggctagctcgtcttttaagggtttaatttccctttaaaaacccttaatttaggtgctctaagtattcgacaccctcagctatcaaaataagacttttgcactttatgcgatttaggcttttttcacaattcagcataaaatcactaaaaatcattcaccaaaattgtcatactttcatataatcatgccgccacacataaaataatcttaaaaataatttc

SEQ ID NO: 47771 - DNA, 265 bp, Gossypium hirsutum
  Clone ID: LIB3196-042-P1-M1-F11
tcaaaaccctagcctgtgttgattttccctcaaccgatcctaacatccctctcttaagcaccgatttgcctctatcaatgttgacgaacagattcgggcttcgagagacgataatcttagccgtgaaattccttctcaactctaatttcaaccaaacagatgggatccccagtatttccgtaagtttgttaatcggttgcaggaggagccagctggaggtggtggcgcacatggggcgtacagaggggacgaagaaaccgtgcgt

SEQ ID NO: 47772 - DNA, 288 bp, Gossypium hirsutum
  Clone ID: LIB3196-042-P1-M1-F12
gtcacctaacaccttcggtttattcatctaagcctctaagctatcttggtcttctcaaattttgcgcccaaaacaagttttttttttctttccaatatttgaatcaactcccttttcactaaccctaatcattcgtatcattttcgcaggcaaaacggtgttgaagcagagagaagaagcgggattttccccctcaattgtgcccaaaataatttaaaatggctggaagaaaccgcattcctcgcgaagccttcaatgaccggcatggatttcctcctgaaagatctt

SEQ ID NO: 47773 - DNA, 374 bp, Gossypium hirsutum
  unsure (1)..(374): unsure at all n locations; Clone ID: LIB3196-042-P1-M1-F2
atgcggcggcggcgcggagaggcgcancgganggtggcctggtttcggaccccagcggccggatggtgaaatcctccctgcagcggatcctcaatagccactgcttcgccagagagaaggaaagggataaacccagcgccaccatccacgccagccgcaccatgccgcttctaagcctgcacagccgcggaggcagcagcagtgagagttccagggtctccctccgctgctgtagtaacccgggtccggggcctcggtggtgctcctgatgcccctcacccacccctgaagatcccaggtgggcgagggaatagtcagagggatcacaatctttcagctaacttattctactccgatgatcggctgaatgtaac

SEQ ID NO: 47774 - DNA, 332 bp, Gossypium hirsutum
  unsure (1)..(332): unsure at all n locations; Clone ID: LIB3196-042-P1-M1-F3
attggacaactcaactcctgacaagatgtcctgccggcagaaccagcagcagtgccaacctccacccaagtgcccctcacccaagtgccccccaaagagcccagcacagtgtctgcctccagcttcctctggctgtgccccaagctcccggggctgcggttccagctctgaaggcggctgctgcctgagccaccacaggcgccaccaccgatgccggcgccagaggtccaactcctgtgataagggcagtggtcagcaaggcgggggctccagctgcagccacggttctngaggctgctgctgacctggatcctgatgctgagacaagcaat

SEQ ID NO: 47775 - DNA, 368 bp, Gossypium hirsutum
  Clone ID: LIB3196-042-P1-M1-F4
ctttgtgactcacccagagcctcgccttcttctcttcgctcttgcgctgcttcgcgccgtctcattagtgcctccggccaccgtctgaagctgccgtcgtgggatatctgaggtaaatttgtgaacaaagataagcttgcggtaatatttgctgcaagttgttgaaagtttactgtcagccactcaacagatggagcaggattgcacccattggacttgcaacttgtgtgggaatgtgggaatggctgatggatcagatggctacttctactgcttgagatgtgggtctcaggctgatgacatcattgatacgggtgttgctgatgaggattttattgaaaagggtactcagggtggtggtgcccttt

SEQ ID NO: 47776 - DNA, 380 bp, Gossypium hirsutum
  Clone ID: LIB3196-042-P1-M1-F5
atggccgcagccagcaccgggcggagagggccacggggggaaaatcgcgctgcaactcaaagccacgctggagaacatcaccaacctccggcccgtgggcgaggacttccggtggtacctgaagatgaaatgtggcaactgtggtgagatttcggacaagtggcagtacatccggctgatggacagtgtggcactgaaggggggccgtggcagtgcttccatggtccagaagtgcaagctgtgtgcaagagaaaattccatcgagatattaagcagcaccatcaagccttacaatgctgaagacaatgagaacttcaagacaatagtggagtttgagtgcaggggccttgaaccagttgatttccagccccaggctgggt

SEQ ID NO: 47777 - DNA, 370 bp, Gossypium hirsutum
  Clone ID: LIB3196-042-P1-M1-F6
cccacgcgtccgaaagcgtggctccgaaacaatctccacttgcgaaagtctcactttggaataggatctttcgattataagaacataaaataccctaagtgaaaactaagaatgaaataaaaaacctaagaataatttttgtctccttaaaattgtgtgtttaaactgattacaatggcctttatataggctaaacttgaaatgttaaactgcctaaattgtccttgaattccttgagttcgactaggaacatacacctaatttccttccaaaacatcattatcaattgcaagacttttttgggctgcgtaggtgctttgttgcaacacatggggtatgtcacgagactgtaaggagcgtatcacgacat

SEQ ID NO: 47778 - DNA, 360 bp, Gossypium hirsutum
  unsure (1)..(360): unsure at all n locations; Clone ID: LIB3196-042-P1-M1-F7
tcggccactcgtggggccacgcgtncgggattcatcatcacatttgacaaagagcaaaggccacaagggaacacagagggtgaaagagagagagcaatggaaggaatacggcataagatggtgaatgtcaatggtatatcgatgcatgtagctgaaaaaggagaaggaccggttatcctcttccttcacggcttcccggaactatggtacacttggaggcatcaaattcttgcactaagctctctcgggtaccacgctgttgccccggatctccgtggctatggtgataccgaagctcccactgctatcactagctactcttgcatgcacatcgttggtgacctcgttgcactcattgac

SEQ ID NO: 47779 - DNA, 374 bp, Gossypium hirsutum
  Clone ID: LIB3196-042-P1-M1-F8
atggaaatctagaagtagtcctgaaggacagaaactaaactcttaccatatgtttggtaaggctccagactccagataacagtccctatggaaagatggcatcaaaacagatagatctatatatatatataaatatatattctattacattttcagtgagtaattttggattttgcaaggtgcatttttactattgttacattatgtggaaaacttatgctgatttatttaagggggaaaaagtgtcaactctttgttatttgaaaacatgtttatttttcttgtctttattttaacctttgatagaaccattgcaatatgggggccttttgggaacagactggtatgtaaaagaaaatccattatcgagcagc

SEQ ID NO: 47780 - DNA, 380 bp, Gossypium hirsutum
  unsure (1)..(380): unsure at all n locations; Clone ID: LIB3196-042-P1-M1-G1
atcatggtcataggaaactaccggacgcagctgtatgacaagcagcgggaggagtaccagccggccaccccggggcttggcatgtttgtggaggtgaaggacccanaggacaaggtcatcctggcccggcagtatggctccgagggcaggttcactttcacctcccatacccctggcgagcaccagatctgtcttcactccaattccaccaagttctccctgtttgctggaggcatgctgagagttcacctggacatccaggtaggtgaacatgccaacgactatgcagaaattgccgctaaagacaagttgagtgagttgcagctacgagtgcgacagctggtggaacaagtagagcagatccagaaagagcagaacta

SEQ ID NO: 47781 - DNA, 328 bp, Gossypium hirsutum
  Clone ID: LIB3196-042-P1-M1-G11
gagattcttgggtgctatttgagttctccttatgtatgtatgtgcatgagtattcggtcatgttatagatccatgttgaaaaatgtgaatgctatatgtgtcatataaatgtacttgtgaatgaacttgagaatatctaaattataggttggaggtgccgaatgtagtgttggatgagttttaaagaataaaaatttatgtgactaaaggttaatgacattcggccaaaggcttgtgtgctaacgaaatcggcataaatgctgttcgatgtgttgaattgagtaagctagatgttggaacacttaacgattaggcatctctatgacat

SEQ ID NO: 47782 - DNA, 105 bp, Gossypium hirsutum
  Clone ID: LIB3196-042-P1-M1-G12
atgcggtggcttcagcagcagcagcagctttggtagtggcttcgggggaggatatggtggtggcttgggtagtggcttgggtgggggctttggtggggggctttg

SEQ ID NO: 47783 - DNA, 301 bp, Gossypium hirsutum
  Clone ID: LIB3196-042-P1-M1-G2
cgggatgcggccgccctgttttttttttttttagacatggggtcttggtgggcatgggggctcgcctataattccagcgacttgggaggccaaggcaggaggatcacttgagcccagcactttgagactagcctgggcaatataaggagatgttgtctctacaagaaatttaaaacatgatctgggtgtggtggcatgtgcctgaggccccagctactcaagaggctgaggtgggaggatcgctttaaccagggatgtcaacgctgcaatgagttctgattggaccactgtactccagcct

SEQ ID NO: 47784 - DNA, 358 bp, Gossypium hirsutum
  Clone ID: LIB3196-042-P1-M1-G3
cggacgcgtgggtggctgcctccgttgatcctctcgttgttggtcgtgtcattggcgatgttgtcgacatgttcgttcccaccgtcaccatgtccgtctactatggttccaagcacgtctctaacggatgtgatattaagccttctatggctatcaaccctcccaaagttgccatcgatggccttcctgaccagttttatactttggtgatgactgaccctgatgcgccaagtcccagcgagccaaccatgcgtgaatgggttcactggatcgtgtctgacattcctggaggaaccaaccccactcgagggaaggaaatcctggcatacatgggtccacggcctccagtaagcataca

SEQ ID NO: 47785 - DNA, 374 bp, Gossypium hirsutum
  Clone ID: LIB3196-042-P1-M1-G4
atgcataagccactgcgcctggcctaaaattaaatggttacaggcacataagtaacacttcctggatccaaaaatgtgcattctgcatttcgtattaaaatgaaaaagcaagtgcttgggatacaaatatctgcatgaaaatttaaagactttattcctgactggtatcatttttagtaagcagttgaacataacttgtagtgtgaatatggttaaaacaaaggacacctgatgtctgtgaaatcttgtagtgtgaatatggttaaaacaaaggacacctgatgtctgtgaaatcttgtagtgtgaatatggttaaaacgaaggacacctgatgtctgtgaaatctgctaaggacaggtacaaaatttatgaat

SEQ ID NO: 47786 - DNA, 233 bp, Gossypium hirsutum
  Clone ID: LIB3196-042-P1-M1-G6
gtttgtacaaaaaagcacgctggtgcccctcccgaattcccccggtctggccctctcgggcgtatacgcctgctattcgagtgagcggggtcttgagagcttctcattgataacgatagtaccgtttgctgtgcgagaaaccacgttcacccctttcttcttcctgtgggggctaagcttgaaactttagctcccttttttttcacaaacaggctcaatgcaaagaattggat

SEQ ID NO: 47787 - DNA, 291 bp, Gossypium hirsutum
  Clone ID: LIB3196-042-P1-M1-G7
atgggcagcgtctcctggcctatgtggatccccttgcagaagaaggctggaaacagaaacccaacctcaatgccatccgctctctggaggctgtgatccgggtgcacagtaaatactggggctgcatgcagcgcctggcctcctgtccagactcctgggtgcctagagtgccaggggctgacaaagaagaagtggaggcagtgaccgcactggcatccctctctgtgggcatcctggctgaagacaggccctcggagcagctggtggaggaggaagaacctatgaatctct

SEQ ID NO: 47788 - DNA, 97 bp, Gossypium hirsutum
  Clone ID: LIB3196-042-P1-M1-G8
ttttccaaaaaaccatcctgttcccgttcccaatttcccttatattgccttacaactttaaacccttgggtaaaaccttaaaaatttcccgcaatcc

SEQ ID NO: 47789 - DNA, 326 bp, Gossypium hirsutum
  Clone ID: LIB3196-042-P1-M1-H1
cgtatttaaccgcttcagacaggcgactggcaccgagcagctcgacgcggaccgggccaagaggggcatgcaagatatggtggggtatgtgggacaaaagactaaggaaactgggcagactatcgaaaacaaggctcatgagggtggtaggacatgaatgtgaaccatggaaggttactttgcttgcttgtaaaatgtacttttaagtgtttttcattttcgagaagtcttttgcctttgcgattttcgtgcgtgttcattttatcttcttctttttctctagttgtgaaataatgggtaatatagtaatatattagatttgtggt

SEQ ID NO: 47790 - DNA, 290 bp, Gossypium hirsutum
  Clone ID: LIB3196-042-P1-M1-H10
cgcggtgggtttaaacttagacccaacaggggctactccatgcgtatcccttccctgtggtgcgggcgtttctggggtcgtcacggctgctacttcgacgcatacggactaagaccgtgcgcttctggtgactgcggcgggtccctcttttgtaacggcctcggcggtgccccccctgcctcgctaggcgaaattaccctttgccaggaccaggatttctacgatgtgagcttggtggatggcttccacataacaatgtcaataaccccattcaaagggtcaagcaaatg

SEQ ID NO: 47791 - DNA, 187 bp, Gossypium hirsutum
  Clone ID: LIB3196-042-P1-M1-H11
acgcccactcgtccggttttggtgacaaatacatcatgtgatgcacattctatcattccccaagtatagaaatttcacttttgtgcataatgaatatcacaatcacgtgcacaatctcttactgagaacttgagctgtaaacactcaacaatgtttacaataatttgcattctatcacaaaaacaac

SEQ ID NO: 47792 - DNA, 319 bp, Gossypium hirsutum
  Clone ID: LIB3196-042-P1-M1-H12
atccaaaaacaagatgaccaaatttgatctcagcctgatgacgctacaagttgtgctgtgatacagagtccttatgggtaaagcagaaagagagtgggaaagagaaccaccccactctgtcttcatatttgcatttcatgtttaacctccggctggaaatagaaagcattcccttagcgatgaggataaaagaaagtttgtaattcaacagggggaagaaaatggagatttaatcctaaaactatgacttggggaggtcagtcatttacagttagacttgtgtctttcgacttttgggatagttaaccccactcactac

SEQ ID NO: 47793 - DNA, 274 bp, Gossypium hirsutum
  Clone ID: LIB3196-042-P1-M1-H2
agccttccggaaatgataaatgttaagtggagcttgagaaatgctttgggattatatattaaagggcctaaattaagtgttattagggagtgaggtaaatttaaaggggttcttaagggacctatcgcggattatggaatatatatatggaataattatgaagtttcatattccctgtgacaacccgctttcagtggaatcagaatagtgatttttggactacacatccgcgttatatagaaaatttattttaatattattgcgtgggctatat

SEQ ID NO: 47794 - DNA, 322 bp, Gossypium hirsutum
  Clone ID: LIB3196-042-P1-M1-H3
atgtggtgggagaggcctgcgtctgtacaccccactggggtccccgctgtgtgtgcccctcatgcggtcaccagccctaccaggtcctcctctcccggcaggtcttcgccttgatcgtgttctcctgcatctatggcgagggctacagcaacacccacaagtctaagcagatgtactgcgtattcaaccacaatgagggatgcctgccgctatggcagtggcatcggggtgctggccttcctggcctcgggcttcttcttggtgatcgacgcatattttccccagatcagcaacgccactggaccgaagtacctgggcattg

SEQ ID NO: 47795 - DNA, 182 bp, Gossypium hirsutum
  Clone ID: LIB3196-042-P1-M1-H4
tatgccgtggcttcaccagcagcatcagctttggtagtggcttcaggggaggatatggtcgcaactctgttccctgcctcccttactgctcagctggtagctatcctggcggtgatgggcttcctgtggacacccacacaggtgccccgcaaaaccttaacgaccagctagactcctaccta

SEQ ID NO: 47796 - DNA, 176 bp, Gossypium hirsutum
  Clone ID: LIB3196-042-P1-M1-H5
gcgacgtgggcggttcgctgcccgcgacgtcgcgagaagtccactgaaccttatcatttaagggaaaagaaagtcaatattttttactaaatccctgtaaattcgccaaaaagacttaaaaatccataattcgttgtcttcccgtaatggattttagtcagcctcctgttgaaaat

SEQ ID NO: 47797 - DNA, 273 bp, Gossypium hirsutum
  Clone ID: LIB3196-042-P1-M1-H6
tcgcccacgcgttcgtttttaattacaaatacaacaagggatttacattctatcattccccaagtgtagaaatttcacttttgtgcataaagactataacactcacgttcaaaatctcttactgagaacttgagctattaacactcaacaatatttacaataggttgcattctatcacaaaaacaccaaatgaaagtggtatcctccataatagaaaaacttcctccatcttgggaagactttaaaagaggtgtaaaacatataaaagagaaa

SEQ ID NO: 47798 - DNA, 403 bp, Gossypium hirsutum
  Clone ID: LIB3196-042-P1-M1-H7
acactatataacaagatggaacgcagaagcacgctggtgccccgccgcgatttccggggtgtgcccgagccagagactgaaacgcgctctcaccacacagactcaccgagcactcgttcggctatggtataggagccggttcgagccgcccacgaaaaccaggcgatctgcaccctgcgcagccatgaccaccaagggcgagtcctcgggctcctaccgtatgaggttctgtgggccgggcaccgctagccgatcgagctccaaccggagctacacggctacgtgcacacgcacctacagactgggcagggcgctgcgccccataaccaagcgcaggctatacgcctcgtgctcgggcggtgtgtatgccacgcgctcactctgctgtgcgcctgacagagca

SEQ ID NO: 47799 - DNA, 387 bp, Gossypium hirsutum
  Clone ID: LIB3196-043-P1-M1-A1
tccctttctgtgtcggtcagagaaactccgaggtgttgggtctcaacgagcactccatgcaggcgctgtcctggcgcaagctctatttgagccgcgccaagctcaaagcctccagccggacctcggctctgctctccggcttcgccatggtggcaatggtggaggtgcagctggacgccgaccacgactacccgccagggctgctcatcgccttcagtgcctgcaccacggtgctggtggctgtgcacctgtttgcactcatgatcagcacctgcatcctgcccaacatcgaggcggtgagcaacgtgcacaacctcaactcggtcaaggagtccccccacgagcgcatgcaccgacacatcgagctggcctgggccttctccaccg

SEQ ID NO: 47800 - DNA, 395 bp, Gossypium hirsutum
  Clone ID: LIB3196-043-P1-M1-A10
gcttgtgaacgtgctaagcgtacgctctcttccagcacccaggccagtattgagatcgattctctctatgaaggaatcgacttctatacctccattacccgtgcccgatttgaagaattgaatgctgacctgttccgtggcaccctggacccagtagagaaagcccttcgagatgccaaactagacaagtcacagattcatgatattgtcctggttggtggttctactcgtatccccaagattcagaagcttctccaagatttcttcaacggaaaagaactgaataagagcatcaaccctgatgaagctgttgcttatggtgcagctgtccaggcagccatcctgtctggagacaagtctgaaaatgttcaagatttgttgctcttggatgtcac

SEQ ID NO: 47801 - DNA, 383 bp, Gossypium hirsutum
  Clone ID: LIB3196-043-P1-M1-A11
cccacgcgtccgcggacgcgtgggcttgcgagagagagaaaaaatggatccacagctaactgaagtgtcgcagatgttcgagcgattcaaagctgcattcattagaaaagatttcgattcatgcgccaatctcctttctcaactcaaggttttgctgacaaagtttaggagccttcctccgctatttgaaaacacccctaattcggttaacgaagtgctcttagcaagggaaatttacgaacatgctgttgtcctcagtgttaagattgaggatcaagatgcctttgagagggactttttccagttgaagccctattatacggatgctggtagccgtcttccaccatcccagcaagagtacctgattctaggtcttaatctct

SEQ ID NO: 47802 - DNA, 382 bp, Gossypium hirsutum
  Clone ID: LIB3196-043-P1-M1-A12
cccacgcgtccgaccgactcgaaaacgaaataggcccaaagcaaaacaaaagcttggaaaaacaggcctaaatttatctgggtctaattactatttaagaaaagattgtatcttcaatccataaagattgaatataacttttccaaagtacgatatttttaaaaaaaatgaaataaaattcaaaccatttttaaaataaataataaaaactctttcttccttcatctctctcattctccctttcttctctcccccttttcccctttcttctactacttttctttttctctcttcctcctttattgtcctttctaacaaaccgctgccgctgcttccacacactttccagcgtcttacctccgatcaggccaactttctttcc

SEQ ID NO: 47803 - DNA, 387 bp, Gossypium hirsutum
  Clone ID: LIB3196-043-P1-M1-A2
attgattttgcagatcggttctctaatccttttttcgggtgtagcgttgtttatacgtttggttgttgttgaagaagtgctactaccatggctacaaagaagagcgttggggacttgaaggaagctgatttgaagggaaagaaagtgtttgttagagtcgatctgaacgttccattggatgataacttcaacataactgatgacacaaggatccgtgccgctgttcccaccatcaagtatttgatgggtcatggctctaaagtcatcctctctagtcatttgggacgcccaaagggtgtcactcccaagtacagtttgaagcctcttgtgccaaggttatctgaactccttggagtcgaggttaaaatggcaaatgactgtattggt

SEQ ID NO: 47804 - DNA, 118 bp, Gossypium hirsutum
  Clone ID: LIB3196-043-P1-M1-A3
aggcgacactgtataactagtttgtacgaaaaagcaggctggtacccggccgcaatttccgggttacaatttaccaaaccgtttactttacaaatggcttggcattagaaattttaac

SEQ ID NO: 47805 - DNA, 406 bp, Gossypium hirsutum
  Clone ID: LIB3196-043-P1-M1-A4
ataaatctgctaaatttctaaatattacataactgaggaaatcccagacctacaacgttggaacagtgaaatattagtccaaggatccagtgagagacacagaagtgctagaagccactcctggggacctagggggaaaaggaccggccaggggacaaccttgacacatggttagagatatcacataacacaggccaatgtgcctcattgagaacactaatgggcgactgatggcgaatccagaagctctgaagatcctgtctgccattacacagcctgtggttgtggtggcgattgtgggcctctatcgcacagggaaatcctacctgatgaacaagctggctggaaagaaaaagggcttctctctgggctccacagtgcagtctcacactaaaggaatctggat

SEQ ID NO: 47806 - DNA, 379 bp, Gossypium hirsutum
  Clone ID: LIB3196-043-P1-M1-A5
ggaaatggatacgttgaaatggtttctcctcatcttcctaggcaaagctcatttgaagaagaagaagaacaacaacaagaacaagaacaagaagaggaaaggagaagtgggcaatacaggaaaataaggtcccagttgtcgcgtggagacatatttgtagtcccagcaaacttcccagttacattcgttgcatcccaaaaccagaacctgcggatgactgggttcggtctttacaaccagaacattaacccagaccataaccagaggatcttcgtggctggaaaaatcaaccatgtgagacaatgggatagccaagccaaggagttggcctttggggtgtcatcgaggttggtggatgagatattcaacaacaacccac

SEQ ID NO: 47807 - DNA, 359 bp, Gossypium hirsutum
  Clone ID: LIB3196-043-P1-M1-A7
attgtgagactatgaaacaaaatgattatcttttagattcttattgcagatgagaagatgaagtgttttataaaataatgtattaaatgtacctattccttggcatatatgtttagatttttaattataatttttatgatgtgttggagccagcattttcctatagaaatataactcaagatttaatattgggcaacagtgggaaaatgggatttagtatgaaaatatttgctttatgtaaacctttttatgaatgtacctaatgtataaagtgaagtcaagctgtaaaaacaattagctgggaaaatgccacgttaattttctatgttccagcgagtatctattaactacacattact

SEQ ID NO: 47808 - DNA, 357 bp, Gossypium hirsutum
  Clone ID: LIB3196-043-P1-M1-A8
ggagagagtcgtccctttgctttgagttggaacaaatccatggctccatctctcacctccaattcctttctcttaaccaccacgccccgctcaagggtaaacctcaagtaccaaaggctcgcagtgtttgccaaagggtccggtcccttctctccatttcagttcgggaaagctaaagacaaccctgaagatggtcaagctgaagatacaggcaattctagtcctttccgcttcgattttggtaaattacctgatgttaagactttggtccccctcgtcagtaacccttcctcgggtttatcgtttgggaacgttagaagaaaagacccaagcactgtatttgtggctggcgcaacc

SEQ ID NO: 47809 - DNA, 197 bp, Gossypium hirsutum
  Clone ID: LIB3196-043-P1-M1-A9
gctttgctgctccacaagggcatcctggctgtcagcctgtccctgcggctgctgcagagccaccttaaggcacaagtggtggctggctgtgggatcctttttttatgcattacaccctttaggattgggcctggtgccacttttggttagtccgggggacccttgtaccaaatgggccaatctgtgctttaaggcat

SEQ ID NO: 47810 - DNA, 321 bp, Gossypium hirsutum
  Clone ID: LIB3196-043-P1-M1-B1
gctctaatagctcttttggggtgcgatcgaaggacaaaaaggtgttctagttggatgggtgggtttcaatacttgactacattcctgtgcatctatttgggtgtaagactatatttctgtactctttatgtctatgcaacacctctgttaactatcatgtgtgtatttggtgtgctttgattgtttcgtgtgttaaggtattggttttgtgttgtgtttttttctgcatatatctgcaaataaattctgctactgatttgccatctagagctcccttctgtaaatatatagttactcgtttgaactcacactaagctcgag

SEQ ID NO: 47811 - DNA, 384 bp, Gossypium hirsutum
  Clone ID: LIB3196-043-P1-M1-B10
caaacgcctcactctccacaaatcaaatatggcaagcaaagagcccgatcacgagcacagagaagacgatgacgcccccgccgccgatgatgaagacaccggtgctcaagttgcccctatcgtcaggcttgaggaagtcgccgttaccaccggcgaggaagaagaagatgccatactcgatctgaagtcgaaactgtaccgatttgataaagacgggaatcaatggaaagagagaggcgctggtactgtgaagatgttgaagcacaaaaagaccggaaaagttcgccttgttatgaggcaatctaagactctcaagatctgcgccaatcattatgtgttggcaacgatgacggtgcaagagcacgcaaggaacgacaaatcgtg

SEQ ID NO: 47812 - DNA, 240 bp, Gossypium hirsutum
  Clone ID: LIB3196-043-P1-M1-B11
atcaagcttctgtctgcacctgctctcaatcctgctctcaccatgagcctccgcctgcagagctcctccgccagctatggaggtggttttgggggtggctcttgccagctgggaggaggccgcgatgtctctagctgtacaactcggattgactctgggggatcagctggaggctacggaggcggtgtgacctgtggctttggtggaagggctgaatgtggcttaggaagaggctacgga

SEQ ID NO: 47813 - DNA, 400 bp, Gossypium hirsutum
  Clone ID: LIB3196-043-P1-M1-B12
atgcggcgatggcggcggggatggtggcttctcggagactccgcgacctactgagccggcgattgacagcctccaactactcgggcctcagtattagccttcgcctcactggctcctctgcacaagaggaagccccagaccacagctatgagtcccttcgtgtgacatctgcgcagaaacacgttctgcatgtccagctcaaccggcccaacaagaggaatgccatgaacaaggccttctggagagagatggtagagtgcttcaacaagatttcgagagacgctgactgtcgagcggtggtgatctctggtgcaggaaaaatgttcactgcaggtattgacctgatggacctggcttcggacatcctgcagcccaaaggagatgatgtggcccggatcaa

SEQ ID NO: 47814 - DNA, 394 bp, Gossypium hirsutum
  Clone ID: LIB3196-043-P1-M1-B2
cccacgcgtccgggacatataatgctttcggattttgacctctctcttagatgtgctgtctctcctactctggtcaaatcctcgaactcgaccctggaatcaaaacattccttgtactgtgctcaacctgcatgcattgagccaacttgtgtggtgcagccggattgtatccaacctgcatgttttggaccacgttttttttcaagcaagccgaagaaagaaaagaagaacaaagtaaagatcgaaacgggccatcaagtgagtccgcttcctgagctcatagcagaacctaccaatgctcgatcgatgtccttcgtgggcactcatgaatacttggcaccggagatcattaaaggtgaagggcacggaagtgctgtagactggtggacatttg

SEQ ID NO: 47815 - DNA, 437 bp, Gossypium hirsutum
  Clone ID: LIB3196-043-P1-M1-B3
ggcttttacccgtccggaatatccgggatgttttgctgttttgtggatggcaaggccagctttgtgtgttgttctgagatgatccaaaccgtaaaaaagctttcgcagcaaggctgctgtggccagactgtctctctagattcctcctctctaggcagggcgtctctgaaaaaaaggcagcagccccagtcatgggcttatagacaaaatccccatcaccctgggacagaacacctgggggaaggggcagtttcagcagacttaaacgtccctgcctatccgctcttaagagagcagtggatctcccagcgcagtgtttgagctctgctaagggtcagactccctcctaaagtggtttcctgacccctgtgtatcctgactaggagacatctcccagtagggacacctactgacaggagagacacctcatacaggac

SEQ ID NO: 47816 - DNA, 372 bp, Gossypium hirsutum
  Clone ID: LIB3196-043-P1-M1-B6
atggtagccagaacagtcaagagaagaatgaggattgaggtactgtagtcccccacttatccttgtttttgctctctgtgatttcacttaccctcagtcaaccaacatgtgaaaatattaaatggaaaattccagagataaataaatcacttaagttttaaacactattcaccccatttcatctcatcatgtaggcattttatcatctcacatcatcacaaagagggtgagtacagaacagtgttttgatagagagaaagaaaaagacaccatattgacataactttcattacaacacattgttataatttgttttttagttttagttttgtttgtttgtttggttggttgtttgtttggtttttaacagac

SEQ ID NO: 47817 - DNA, 381 bp, Gossypium hirsutum
  Clone ID: LIB3196-043-P1-M1-B8
cggacgcgtgggcacaaattcacaatgttccatagcaaagtaaatgtgatatatttattcatcactcgaagcaaagcaaaaggaaaagtcggagggttttgaggagagtgaaaaatggttggtcctacttcatcggagagtgaagtcattctggaaataccattcgggtcaggaggttgccctagttcccaccattttatcggtggaaatcatgaagcttccaattatttatgtgaattgtaagtcaccccttttttttcatatgttttagcttggggattttaattcttttatgaaaaggcgttgaattttaccttctgcaattgaaatgtgtgaactttaggtattatgggggatgggcattacctaatatatactttt

SEQ ID NO: 47818 - DNA, 387 bp, Gossypium hirsutum
  unsure (1)..(387): unsure at all n locations; Clone ID: LIB3196-043-P1-M1-B9
tttccatttactagcaatttcttcaagttcttttctttgtttttttagtcaatggctgaccaccacctccaaaacactcaaccaatgactcaccaaatggtgaaagccgctactgccgcaacagccggtggttccctcctcattctctccggtttaatcctagctggcaccgttattgcactcactatagccactccactcttcgttattttcagtccagttcttgtccctgctctcattgcaacagctctcctagcaacgggtttcgtcgcctccggcggtttcggtgttgcagccgccacggttctgtcctggatttacaggtatgtgacggggaggcacccaccggcggcggatcagttggatagtgcggngatgaaattggct

SEQ ID NO: 47819 - DNA, 309 bp, Gossypium hirsutum
  Clone ID: LIB3196-043-P1-M1-C1
atgacaagatctcggctcccttgctcatgccccagagactcccttctcccttgccagctcatccgtccgtcgactcttctgtcttgctccaagccctgaagccgatcccccctttaaacttagaaaccaaagactaaactctaggggatcctgctgctttgctttccttcctcgctacttcctaaaaaacaacaaaaaagtttttgtgaatgctgcaagattgttgcattgtgtatactgagataatctgaggcatggagagaagattcaaggtgtgtgtgtgtgtgtgtgtgtgtgtgtgtgtatgta

SEQ ID NO: 47820 - DNA, 380 bp, Gossypium hirsutum
  Clone ID: LIB3196-043-P1-M1-C10
cttattttctttgaactgatctaggaatcaattgatcaagtcaattcaaaataagttcaactacaggttcaaacaattttgtagctcgattcacctagtccgtacctgttcgcgggtcaacagtttttttcctcactaaatcattacaataccctaaccgattcctgatccaatcagtctaactggtcgatttagtgtagtctagtttggatatcattgaatctttgaaaattttttatatttttttaatttttttaattttttaattttaaagagtttttattttttttaaatataatcttgtttaaaattattttttaaaaattataaattataaatttgttaggttttttatttaaaatatgaaaagatagtttgta

SEQ ID NO: 47821 - DNA, 339 bp, Gossypium hirsutum
  Clone ID: LIB3196-043-P1-M1-C11
tcgaaaccccttgctactgcaaccaaaacgggctcttttacgatgcttgccctattaatttccaggaggacttctatgagggggtatcaacgttgttaacttcataaaaacacataagtgttcattcgtcccaggctgcaattaaacgcatgaatgcgttgctcttgtgactgagtgaagacaacacgtacataatggcttgacgtgaccttgtgtaatcttagctcacactgttcctcacagtaggaagaagaactagacgaacatgaagatgaaaggagcagtcgacaattcacgatagtgagagcccagctatcaacaggtgacctatttgtagtc

SEQ ID NO: 47822 - DNA, 363 bp, Gossypium hirsutum
  Clone ID: LIB3196-043-P1-M1-C12
tcgtccacgcgtacgattctttgctgttgaagtagtaatatctatagaagacggagatggagaggcaaagaagcaagcaggttcgtttgttgatgtgggttttggttgctgccttgttctcccacaacatggtcattgcagtgacctccactggccttggagagcagaaaaattactatccagttcctgaccctcatgctggaactcccccttcaggttcacatggcacaccaccatcttcaggaggtggaacacctccctctcatggaaacccatcacatggtgggtggtaccaccctttaacaacaccaataaagccttcgggtggaaattgtggaacttcaccacattacccttaaactt

SEQ ID NO: 47823 - DNA, 401 bp, Gossypium hirsutum
  Clone ID: LIB3196-043-P1-M1-C2
ccacgcgtccgaagggtatttaataatttggtaaactaaagtattctaaacagggataacaatacgaatgggcctaaagcccttctcggcccaaatgggcccacacgctcgtgtgacccttttagcccaaatctagccacagatatgagattcacctagcctagtccaatatttactacacaatcaaacaacttatccaattgggcccctaggcccattgggcccacatggcccctttcggcccatcgcggcccgaagttgccatcctacagttagagtagtgagaaataacacctgataggagactagagttaatctgcgctccgagcactcttagccgacgcccaacccaaacgagcacgccataaagcgaaagggatcagccaagaaatataccttta

SEQ ID NO: 47824 - DNA, 410 bp, Gossypium hirsutum
  Clone ID: LIB3196-043-P1-M1-C3
gggatgggggccatctcacccacggctacatgtctgacgtcaagcggatatcagccacgtccatcttcttcgagtctatgccctataagctcaatcccaaaactggcctcattgactatgaccagctggcactgactgctcgacttttccgaccgcggctcatcatagctggcaccagtgcctatgctcgcctcattgactatgcccgcatgagagaggtgtgtgatgaagtcaaagcacacctgctggcagacatggctcacatcagtggcctggtggctgccaaggtgattccctcgcctttcaagcacgcggacatcgtcaccaccactactcacaagactcttcgaggggccaggtcagggctcatcttttaccggaaaggggtgaaggctgtggaccccaagact

SEQ ID NO: 47825 - DNA, 391 bp, Gossypium hirsutum
  Clone ID: LIB3196-043-P1-M1-C4
tcggccacgcgttcgtattcttttagtaccgatttagaagtttccattcccgattaaagccatcatcggccctaagagctttacagcccaaaatcttgttttccgggaaactccaccgataatcgacgaactctctctcgatctcacctaagattcgccgataatcgaaaatttaaaaataacccgacaacaacaaagatgaagaaagaagacacagtgaaactcattagcgctgaaggaatggaattcgttatcgacaaagaagctgctatggtttctcaaacaatccgtaacatgcttacttctccaggtggtttcgctgaggcggagcatggggaagtgactttcccggagataagtgctgtgattcttgagaagatttgtcagtatt

SEQ ID NO: 47826 - DNA, 401 bp, Gossypium hirsutum
  Clone ID: LIB3196-043-P1-M1-C5
atgtattattggagtggtttatcatttctgaaactaatcatgtcagaattgactttgaaagcattgctttttacagaaatatattaactttaggagtaatttctagttggattgtaatacgaaataatttaaaagagcttcgctcatatataggaaaattgcaaatggtcctactattaaattcttactgcttactgatttttttgaattaagagttgttatatgctagaatatgaggatgtgaatataaataagagaagaaaaaagaataaagtagattgagtctccaattttatgtaagcttcagaagaactggtttgtttacatacaagcttatagttgaaatatttttcaggaattacatgaatgacagtctttgaaccaatgtttttgttcgattt

SEQ ID NO: 47827 - DNA, 359 bp, Gossypium hirsutum
  Clone ID: LIB3196-043-P1-M1-C6
gtttgctattaccaatggcctcttcccggcattgatcagtttggagtgtttggtatctgtgatgggcatggtggtgttgaggctgccaaatctgcgagcaagattctgccagagatgcttgctaccattttatcggatcctgttataagagagagggttttgtcacagcatgatgcctcagatgttcttaaagatgcattccttcgagcagaagcgaacatgaataactattatgagggctgtactgcaacagttcttcttgtttgggctgatgctgacgaaaatttctatgcacaatgtgcaaatgttggggattcagcatgtcttatgaatgtcggagtagcagataagatgacaga

SEQ ID NO: 47828 - DNA, 401 bp, Gossypium hirsutum
  Clone ID: LIB3196-043-P1-M1-C7
atggctgaaatacagattgtgaagttatcactctatttcttcattctccatttagcaaggtcatggaagatttggaggaaacattatttgaagaatttgaaaactattcctatgccctagactattactctctggagtctgatttggaggaaaaagtccagctgggagttgttcactgggtctccctggtgttatattgtttatcttttgtcctgggaattccaggaaatgccattgttatttggttcacggggttcaagtggaagaagacagtcagcactctgtggttcctcaatctagccattgcggatttcatctttcttctcttcctgcccctgtacatctcctatgtggtcatgaatttccactggccctttggcatctggctgtgcaaagccaat

SEQ ID NO: 47829 - DNA, 385 bp, Gossypium hirsutum
  Clone ID: LIB3196-043-P1-M1-C9
cccacgcgtccgaggaggaactgattaaggatgacacaatttccttccattaataaccaagttaagactgatactagcaaaaacgaggaagaggtggaggatccagaagaaggtgatgaggagttggaaccgaattctgactaaatcagaacaattattgtttttatttttgaacttttcattatttttaaagacttggatatttttaatttttaagcttagatacttttaattttttaggtatattttagtttgtactttttatgtaggaaccctgcaatttttgaaggcacttcaaatttcaagctaaatcagcaaggaggagatcgcccaacaaattccaagaaactttcaagcttatcgagtaatctatttcctttatttt

SEQ ID NO: 47830 - DNA, 389 bp, Gossypium hirsutum
  Clone ID: LIB3196-043-P1-M1-D1
aaatgctgttgcaaaggcacaaggagcattaaccagagatgggtttatggggggtatgaagcctacacatgtatggagacgggtttacatggtaaatttcatccctgaacttgatagagaaaaatacccctttgctgcattaaaattagatgatggtgttaaacctccaccttgtttattgtctgggtacatgcaggcaatccctgttgcctggacggctaaacatcacttaaaagaaaacacagatatcattctacgcattaacaagcgtacatggaggaccagatataattatcacaaaaatcgtgattgtggagggctttctggtggttggaagtgttttgtgaatgacaataatttaatagaacatgatgtgtgtgtatttgagc

SEQ ID NO: 47831 - DNA, 359 bp, Gossypium hirsutum
  Clone ID: LIB3196-043-P1-M1-D10
tgatattgtaggttatgagttttcgattttgaaatgatagtaaggcctattggccgttgtgatgaatgtgaaagtgtttttttgtgatagggcctattagccgacgtgatgaatgtgaaagtgtttatgggggttaaggcctattggccgttgggttgattgggaaagggttatgtgtgataaggccaaatggtcgatgtgatgaatgtgaaagtgtatatgtgtgataaggccaaatggccgatgtgatgaatgtgaaagtgtatatgtgtgataaggcctaatagccgatgtgatgaatgtgaaagtgtatatatgtgataaggcctaatagccgatgtgatgaatgtgaaagtgta

SEQ ID NO: 47832 - DNA, 394 bp, Gossypium hirsutum
  Clone ID: LIB3196-043-P1-M1-D12
atcaagggcggtagaagaaagtctccatgctgaacagattacattatggagcccaggagcctgggaaagatgggccaggagagtgaagggggctttgaggagaggtcctgccagaaatatttgtccctgtccggggtgaagagtaagagggtaagggggccagggcctcagaagcggccatgccggtgatcaggggaacgccgacggttcccctctcggggacagtggctagtatggaacctcgggggtgacccgggaataggagtgttgagaagttaggttagaatgctgaggagtggtgcagagatcctgcaggcctgcctctctgctctgggatgaggcaagagggtgctgaaataactagagttctaagacatggcctcagtggccagca

SEQ ID NO: 47833 - DNA, 386 bp, Gossypium hirsutum
  Clone ID: LIB3196-043-P1-M1-D3
atatttttggtactatatttaatttgaatcgttcaagcctacactcaaaatagttcgtggtataagaatagcggagaaggtcattcgattgaaagtcaggaaagacaaggatctatctagtaaaaaacacatgtgcaatttcgataaagggtctattgctataaatatcacaaattaactgagtttttaaaatttttatttttcgctatataagaaaccgttttcgaactatattttttctaacattaactgcctttagtttagttgttgcatgaattgtttgaacatcactagggacaaatttggacagttgaaatgcagtgtgttttgttcgcatttgtgacttggttaatttttggtggtttcctatggacaaataatttttt

SEQ ID NO: 47834 - DNA, 362 bp, Gossypium hirsutum
  Clone ID: LIB3196-043-P1-M1-D4
cccacgcgtccgtttttatgttcatttatgtatttatttatatgcccatttttatgctttagtttatttatttatttatttgctatggtatatgcatgattgatttattttattattcgtttttgctcatttttttattcgcattatcatgtctattatcccattatgcatataaatatcatattttaaaaaaaaagaaaatatttctaattgagacaatatttagcgtttggaaattcgagaaaacatgccctaaggtgttgggtgtcgatttttctcgttcaaccaaatagcttaatatccttttcaaaaatttcaaaataaggcaatattttgcgtttggaaattcgaggaacgggccc

SEQ ID NO: 47835 - DNA, 377 bp, Gossypium hirsutum
  Clone ID: LIB3196-043-P1-M1-D5
gagattttggtattagattttgctgaggcacttcctctgggtctaggagttttggctattggatttgaaggaattttaaatgacagaatgaaaggtttctatagaagtacatacgagcacaatggtgagaagaagaatatggcagttacacagtttgagccagctgatgctaggcgatcctttccatgttgggatgaaccttctttcaaggctacgtttaagatcaccttagatgtgccatctgagctaatggccctctcaaacatgccagtcatcgaagagaaagttaatgggcctctggaaactgtttcttatcaagaatcaccaatcatgtccacttatttagtggcttacgttgttggtttgtttgattatgt

SEQ ID NO: 47836 - DNA, 404 bp, Gossypium hirsutum
  Clone ID: LIB3196-043-P1-M1-D6
atatcacctccagcgccaaagtggacatgacgttcgaggaggaggcacagctcctgcagttgaaggtgaagtgtctgaacaacctggcggcctcgcagctgaagctcgaccactaccgcgcggccctgcgctcctgcagccttgtgctggagcaccagccagataacatcaaggctctcttccgcaagggcaaggtgctggcccagcagggggagtacagtgaggccatccccatcctgagggcggccctgaagctggaacctttcaacaagacgatccacgcagaactctcgaagctggtgaagaagcatgcagcacagcggagcacagagactggcttgtaccggaaaatgctgggcaaccccagccggctgtctgccaagtgccctggcaagggtgcctgg

SEQ ID NO: 47837 - DNA, 385 bp, Gossypium hirsutum
  Clone ID: LIB3196-043-P1-M1-D8
aacacgtagatatggcgattaacccttctttgctctttctttcccttctttttctcttcaatggctgcctagctcgccagaccttttcgtcacagcagtcccaaaatgagtgtcaaatcaataggctccgcgcctctgcaccccagacccgaattcgctccgaagccggcaccaccgagtggtggaaccccaactgtcaacagctcaggtgtgctggtgtatctgtaatgaggcagactattgaacctaatggccttgttttgccttccttcaccaatgctcctcagcttctctacattgtccaaggaagaggtattcaaggtattgtgatgcctggatgtgccgaaacattccaggattcacagcaatggcagcatcaaagccg

SEQ ID NO: 47838 - DNA, 400 bp, Gossypium hirsutum
  Clone ID: LIB3196-043-P1-M1-D9
atctggcatcgaaaagttaaaaatatatcaaatgaacaacctaacattacacctagaggacctagagaaacaagagaaaacgtatcccagagctagcagagcagaagacaagaaaaaaaaaaaaatcagagtggaactcaaggaaattgagttgtgaaaaaccatacaaaggtcaaagaatgctggagtaggttctctgaaagaataagttagacaaactgctagctagattaataaagggaaaaagaggaagatccaaataaacacaatcagaaatgacaaaggggatattaccactgaacccacaaaaatacaaaaattatcagagactactataaacaccctatgcacaccaactagaaaacctggaagaaatagataaatttctggaaacataaaa

SEQ ID NO: 47839 - DNA, 386 bp, Gossypium hirsutum
  Clone ID: LIB3196-043-P1-M1-E1
ccaaaaccgagcctagaccggggcaaggccaagcaatccgattaagcctactagtaaatactttttgtaaaccgaggtaagttatatgtaaataatacaactatattattaatgcatgtattcgattgttattgatttgatatagcatatatttctagaattggaactaagtatatgtatttatgattgagaaagtcgaaagatccagtaagaacccaaggaaacaaaccgcatattcatgccatgacatagggttatgtgagagccagtataataccatgtttgggacatggcatcggcattgagacgaaggctagtgtaagacgtgtctgggacatgcatcagttgcatcatgatagcctgggtaagacgtcgtctgggacatg

SEQ ID NO: 47840 - DNA, 358 bp, Gossypium hirsutum
  Clone ID: LIB3196-043-P1-M1-E10
gaaacctttaggcggcgactactactcgagcttcataacacacgaagcttttaactatggcgggtgtagagacggaggttgcggcggccggtgtgcccaagaagagaacattcaagaagtttagcttccgaggtgtcgatttggatgctctccttgatatgtccactgatgagattgtcaagctcttccctgctcgagctcgcagaaggttccagaggggtttgaagagaaagcccatggctctaattaagaagcttcgcaaggcgaaaagggaggctccacctggtgagaagccggaaccagttagaacccacctgcgtaacatgatcattgtaccccgaatgattggaagcattat

SEQ ID NO: 47841 - DNA, 242 bp, Gossypium hirsutum
  Clone ID: LIB3196-043-P1-M1-E11
ctgcaagctggagacctaaagaaaggaaagagaaaagttgagggagaaaggaaggaatcccggtggatgaaatggaaatacgggtgggttttggtttctacagaggatttcttttgaatttaaggctggcctaaggttttggagttagttatccagtgccatttagttctttctttgtggattcatatatttggtttgctgaacccttttggtgcaatggaattttcttccgacttaatttt

SEQ ID NO: 47842 - DNA, 140 bp, Gossypium hirsutum
  Clone ID: LIB3196-043-P1-M1-E12
gaggtccgggaaagtttctttggaggtccggcccggagcagccatgtcccactgccccaagcagcccggcacggtcgccgcgccgtcgggcgtcaaggctccgtgccagcatgggggcttctttgtggctgtcaaacaag

SEQ ID NO: 47843 - DNA, 384 bp, Gossypium hirsutum
  Clone ID: LIB3196-043-P1-M1-E2
caggactgcaggcttttcagcagttcactggcatcaatacagttatgtactatagcccaacaatcgtccagatggctggcttcaattccaatcagctagcacttctgctgtctctcattgtcgctgccatgaatgcaggaggaactgttgtcggcatttaccttatcgatcattttggaaggaaaaagctggctctttcaagcttatccggtgtcatcgtgtcccttgtcatccttgctggggctttctttgctgaaacacctggttcttctaatggaatttatggatggctggcagtcattggattagccctctacattgcattcttcgcacctgggatggggcctgttccatggactgtgaactcagagatataccctgagc

SEQ ID NO: 47844 - DNA, 358 bp, Gossypium hirsutum
  Clone ID: LIB3196-043-P1-M1-E4
atctcacctccagcctctcacgctctcctcagctctctcatctcctggaaccatggccagcacatccaccaccatcaggagccacagcagcagccgcaggggcttcagtgccggctcagccaggctccctggggtcagccgctctggcttcagcagcgtctccgtgtcccgctccaggggcagtggtggcctgggtggcgcatgtggaggagctggctttggcagccgcagcctgtatggcctggggggctccaagaggatctccattggagggggcagctgtgccatcggtggcggctatggcagcagagccggaggcagctatggctttggtggcgccgggagtggatttgggttc

SEQ ID NO: 47845 - DNA, 109 bp, Gossypium hirsutum
  Clone ID: LIB3196-043-P1-M1-E5
cgggatgaaccggaagccgggttacggtgcccaactgcgcgctaacctagaacccacaaagggtgttggtcgattaaaacagcaggacggtggtcatggaagtcgaaat

SEQ ID NO: 47846 - DNA, 156 bp, Gossypium hirsutum
  Clone ID: LIB3196-043-P1-M1-E6
atccccgccctcctcagcaccgacctggcccacttctcggaaaacccaatactctacctgctcctgcctcttatctttgtcaacaagtgttcgtttgggtgcaaagtggaactcgaggttctgaaggggctcatgcaagagcccccagcccatgct

SEQ ID NO: 47847 - DNA, 404 bp, Gossypium hirsutum
  Clone ID: LIB3196-043-P1-M1-E7
atgccgaggatggcggtcatggcgccccgaaccctcctcctggtgctctcaggggtcctggccctgaccgagacctgggcgggctcccactccatgaggtatttctacacctccatgtcccggcccggccgcgggcagccccgcttcatctccgtgggctacgtggacgacacgcagttcgtgcggttcgacagcgacgccgagagtccgagagaggagccgcgggcgccgtgggtggagcaggaggggccggagtattgggaccggaacacacggatcgccaaggccgacacacagacctaccgagagaacctgaggaccctgctccgctactacaaccagagcgaggcggggtctcacaccatccagaggatgtacggctgcgacctggggcccgacgggcg

SEQ ID NO: 47848 - DNA, 397 bp, Gossypium hirsutum
  Clone ID: LIB3196-043-P1-M1-E8
atcatccatctgcacagcaacgacatcttccaggtgggggagtgccggcgcgtgcagcagctggccttgagccccagcgcaggcctgctggttgtgctgtgtggccgcggccccagtgtgcgtctctttgccctggcggagctggagaacatagaggtagcaggtgccaagatccctgagtctcgaggctgccaggcactggcagctgggagcatcctgcaggcccgcaccccagtgctctgtgtagccgtcaagcgccaggtgctctgctaccagctgggcccgggccctgggccctggcagcgccgtatccgtgagctgcaggcacccgccactgtgcagagcctggagctgctgggcgaccggctatgtgtgggcgctgccggtggctttgcgc

SEQ ID NO: 47849 - DNA, 355 bp, Gossypium hirsutum
  Clone ID: LIB3196-043-P1-M1-E9
gataaataagcgtttgtctcagatttttgaagatggcccgtaccaagcagacagcccgtaagtcgactggtgggaaggctccaaggaagcaacttgctaccaaggctgcccgtaaatctgccccaaccaccggtggtgtgaagaagcctcatcgctaccgtcctggaactgttgctcttcgtgaaattcgaaagtaccaaaagagtactgagcttcttatcaggaaattgcctttccagaggcttgttcgtgaaattgcccaggacttcaagactgatttgcgtttccagagccatgctgttctagctctccaggaagctgcagaagcataccttgtgggtctttttgaagacac

SEQ ID NO: 47850 - DNA, 184 bp, Gossypium hirsutum
  Clone ID: LIB3196-043-P1-M1-F10
gcagttggagaggccaatcttccgacagggggcaatcttccactccagggtcaagaactgggcgaaacgattacagaaatagcagtagtcgagatgggcatccaagtggtgtaccacggccctatggtggacggggacgtggtaagggttcattataatagcagcaggggacataatgaggggc

SEQ ID NO: 47851 - DNA, 53 bp, Gossypium hirsutum
  Clone ID: LIB3196-043-P1-M1-F11
gttcttttatattttacataatgcttttataaataatatagactaaaatattg

SEQ ID NO: 47852 - DNA, 81 bp, Gossypium hirsutum
  Clone ID: LIB3196-043-P1-M1-F12
atcctgtgccctgtggccatggagctggacttgcttcccctctgcaaaacgctggagctggcggcaggcccagccgtccca

SEQ ID NO: 47853 - DNA, 389 bp, Gossypium hirsutum
  Clone ID: LIB3196-043-P1-M1-F2
cccacgcgtccgttcccatttcacaatattaattactagacggtagaccagccctgcttgactcctgctaatcaaagccaaaacccttgacctgttgtttccagctcacattccggcgatggatctccgtgaatcgatcactagccaaaccgacgtcgctttgaccctgaccaaaaacgttctccaaactgaagccaaggactcgaacctactgttctcgcccctgtcgatccatgttgtgctcagcttgatcgccgctggtgctaagggtccaaccctcgaccagctcctctctttcctcaagttcaaatccaacgaccagctcagctccttctcctccgagcttgtttccgttgtcttcgcggatggaagtccagccggtggtcccc

SEQ ID NO: 47854 - DNA, 348 bp, Gossypium hirsutum
  Clone ID: LIB3196-043-P1-M1-F3
gaggaaccatggcatggttcggtatggatggagtaactagcctcgttccattttatttcctattgtgataatgttattaatggatggtagtgcattgcttatgacttactgagttataaactcactcggtgtttccttgtcacctattctaggtttcttggactcgtctctttttgcgtggtcgggccgtcatcgaagtcattacaccggatagcaagttttggtactttcttcttagttggcttaggagaacatttcggcatgtataggctattatgttgggttggaactttggtatgtaatcttttagccatgcgaaaatggcataaatgttcggttgggtttgga

SEQ ID NO: 47855 - DNA, 375 bp, Gossypium hirsutum
  Clone ID: LIB3196-043-P1-M1-F4
ggaagggtcgcgaaaaggcaagtagccggacccgtatgtcttggttcgggtcaggattctggttgcatcggggataaaaattggggttttgttgaggagagcaacagtgaggcgagaacgggaaggaaaggaagaagaagaagaagaagtgagggcgcggcttataagagttgatagagatcgtcgggcattgaggcaagccatgttccggcaacgctggttctctctgataataagctttggttcttctacactactagatagttcaccgatttattatttagaaatatcaaatcatatcaaatcatatcttttctttttaaaaatttgtattaatgtttatatcaagatttaaattcctgaaatttaaatctt

SEQ ID NO: 47856 - DNA, 108 bp, Gossypium hirsutum
  Clone ID: LIB3196-043-P1-M1-F5
ggctgctaaattcaatggcgaaaccgatcccatctccgagtactatgttgctgttgtttgcgataaagaagttgttttactcgttggggatctaaagaaagaagctta

SEQ ID NO: 47857 - DNA, 388 bp, Gossypium hirsutum
  Clone ID: LIB3196-043-P1-M1-F7
taaggaggaaggttcttctcggagaagtgaaaccagaaaggcttattacaatgaccccagaggaaatggcaagtgaacaaaggcaacgtgaaattaatgaaattaaagaaaaagctttatttgattgcgagcgaggtgttgcaccaaaggcaacgacagatcaatttaagtgcggtcgttgtggtcaacgcaagaccacttactatcaaatgcagacaaggagtgcagatgaacctatgacaacctatgttacgtgtgtcaactgcaacaaccattggaaattctgttagtgaaatccagagatgtcgtgttgaccatcttggttgcttcactctgtttatgaggagtttgtggtcattaactttagaattcatctttcattcatatt

SEQ ID NO: 47858 - DNA, 403 bp, Gossypium hirsutum
  Clone ID: LIB3196-043-P1-M1-F8
attgaatacagagttcctgaactgaatgttcaaaatggagtgttaaagtcactttccttcttgtttgaatatattggtgaaatgggaaaagactacatttatgctgtaacaccggtacttgaagatgctttaatggatagagaccttgtacacagacagacggctagtgcagtggtgcagcacatgtcacttggggtttatggatttggttgtgaagattcgctgaatcacttgctgaactatgtatggcccaatgtgtttgagacatctcctcatgtaattcaggcagatatgggagccctagagggtctgagagttgctattggaccatgtagaatgttgcagcattgtttacagggtctgtttcacccagcccggaaagtcagagatgtatattggaaaa

SEQ ID NO: 47859 - DNA, 386 bp, Gossypium hirsutum
  Clone ID: LIB3196-043-P1-M1-F9
ttttccattctttgaggctaaagcaaccatgtcggcaactccaacccagaaatcctccaacgtcaaccaggaggaactccaaaaagtcttcaaccagttcgacgccaacagggatggcaagatctcggtgacggagctccgcgatgtgttgaaatcaatgggctccagcatcactgaggaagaactcaaacgtgtcttggaagacatcgacaccgacaaagacggcttcatcaacctctccgagttctcctctctcttccggtcttcatccgatgaagtcaccgccgccttggagctgcgcgacgccttcgatttgtacgaccaggacaagaacggcctgatttcgacgagcgagttgcacctggttctgaatcagctagggatga

SEQ ID NO: 47860 - DNA, 386 bp, Gossypium hirsutum
  Clone ID: LIB3196-043-P1-M1-G1
cttgttcctctcttaattgcgttctatattgaggatgggttgtactaagaaaactctggctttccttttgatgctggcttttgtgggagtctctcttggtgcggttcacaaagtgggcgattccaccggctggactagtcttgggaatattgactacctcaagtgggcttccaccaagaatttccatgttggcgactctcttctttttcagtacaaccctcaattccacaacgcgatgcaagtgacccacgacgatttccagtcatgcaacggaacatctgccatcgcctcctacacctctggatccgactccgtaaccctcaaaaggcctggccacttttatttcctttgcggtgttccaggccactgccaagccggtcagaaag

SEQ ID NO: 47861 - DNA, 370 bp, Gossypium hirsutum
  Clone ID: LIB3196-043-P1-M1-G10
atctttttttctgaataaaggtcttatcactgtcacttggaaagagagttgctaaatgttgaattttaaattttcaagatggcaagctctattccatgtaagttgtttaatgatttaatagttcaaatcatattgtcagattgcaagtagtattaaagttatgacactttgtcagaaatattgtaatgcactatggtgactgagaaatggcagtgtacaaagaataccacttaattatttaagttctagaatttaaaaacaagggctagctttcattttagggtttgatctttccagagatcagggtaatatgggatatttcatttttaatggtaacacaacaatgaaaggtaaataccttggggaaatt

SEQ ID NO: 47862 - DNA, 380 bp, Gossypium hirsutum
  Clone ID: LIB3196-043-P1-M1-G11
gttcttgtcatgtcggcctacaggattggcaaagaattgtaggatgatcttgattgctttatatcctgttgtgaaagagagttttcaattatatgcagatatttgcgaggttttggctgtgctgcttgataagtttttcgatatggagtacccagattgtgtcaaggcatttgatgcatatgcaagtgcagcgaagcagatagatgagttgattgcattttataattggtgtaaggatacgggtgtggctagatcgtcggagtatcccgaggtgcaaaggatcactagtaagttgttggagacattggaggagtttgtgagggatagagctaagaggccaaagagtccagaaaggaaagagctcccttcttcacctaaag

SEQ ID NO: 47863 - DNA, 331 bp, Gossypium hirsutum
  Clone ID: LIB3196-043-P1-M1-G12
tggtgatagcaaggctgaggccgtggccctgtaccagaccaaggtccagcagctccagatctcaattgaccaacatggggacaacctgaaaaacaccaaaaagtaaattcgaaagctcaacaagatgatccaaaagctgcgggcatagatcgagaacattaaaaaacaatggccaaatctttaagcattcgtggctgatgcaaaacaacgtggtgaaaatgcccttaaaaattcccacaacaaaggcattgagctggagactgccctgcaacaagccaaggaggaacttgcaccaatgcttcgtgagtaccaaaaacttataagtgtgaaa

SEQ ID NO: 47864 - DNA, 399 bp, Gossypium hirsutum
  Clone ID: LIB3196-043-P1-M1-G2
cccaatacgaggagattgctcagaggagccgggctgaggccgagtcctggtaccagaccaagtacgaggagctgcaggtcacagcgggcagacatggggacgacctgcgcaacaccaagcaggagattgctgagatcaaccgcatgatccagaggctgagatctgagatcgaccacgtcaagaagcagtgtgccagcctgcaggccgccattgctgatgctgagcagcgtggggaaatggcactcaaggatgccaagaacaagctggaagggctggaggatgccctgcagaaggccaagcaggacctggcccggctgctgaaggagtaccaagagttgatgaacgtgaagctggccctggacgtggagattgccaactaccgcaagctgctggagggcg

SEQ ID NO: 47865 - DNA, 201 bp, Gossypium hirsutum
  Clone ID: LIB3196-043-P1-M1-G5
cggacgcgtgggtagccttcttctttttcctccgcggctacatttccactctcgttcccgagatatcaaagtaaaatgaaggtggtcgccgcctacttgcttgccgtgctcggaggaaacgcttctccttccgccgatgacttgaaggttattctcggatcaattggagctgaggctgatgatgataggatagagttgcta

SEQ ID NO: 47866 - DNA, 322 bp, Gossypium hirsutum
  Clone ID: LIB3196-043-P1-M1-G6
cagtcataaaacacttgccatgcagctatagcatctcaagctgcttcgcttcgttgatgtcttcaatccaaggtagtgcgtgccatgattttgaatgagctttacctttccgatgaggtctgttctgatgagttcaaagcttcataagcctgtgccgtgtagctctagttttgcatgctctcatcatttagctaccacagatctaattctaagcaacaatgaatctggagatgtgcctttcttgcgcctttctggtgcatcaactccattgttgagaggggatctaagtggtctatcacaagctttaccgccattacctaag

SEQ ID NO: 47867 - DNA, 389 bp, Gossypium hirsutum
  Clone ID: LIB3196-043-P1-M1-G7
ataaaacttgggaaccaaaatggtggtttatccttgtatctctgcagtgtggattgaacagaaaattggaaatcatagtcaaagggcttctcttggttcgccactcacttatttgtaacttgacttctttttttctgcttaaaagtttcaattctcgtggtaataccagagtagaaggagagggtgactttacagaactgacagccattggggaggcagatgccggtgtggaagtgtgggcctgaaggtagggcctgtttgattttaaaaagtgtgcctgtcaagtgtatatgttgcttttctcaaacaatgattcagggatacaagtgggctcctctcgttcattaaaagaaaacgtgacatcttctaagaatctctgtgggaaaaag

SEQ ID NO: 47868 - DNA, 384 bp, Gossypium hirsutum
  Clone ID: LIB3196-043-P1-M1-G8
tttagggaatgctggaaaaaccttaaaggaagaaattcataagaaaattgaaaaatggcaagaaccacctcctgcaaagcagcctaaaccacttcctgttcctgattctgaacctaagaaaaagaggggtggtcgtcgcttaaggaagatgaaagaaaggtatgctataacagatatgaggaagctagcgaacaggatgcaatttggagtacctgaggaaagctctttaggtgatggactaggtgaaggttatggaatgcttggtcaggctgggagtggcaaactgcgtgtttcaattggtcagagcaaacttgcagccaaagttgctaagaagttcaaggaaaagaattacggaagcagtggtgccacctctgggctgacttc

SEQ ID NO: 47869 - DNA, 384 bp, Gossypium hirsutum
  Clone ID: LIB3196-043-P1-M1-G9
atcagttatgccagcacagccaccagctctgactccagcacaccctccagtggggccagcacagccaccagctctgactccagcacaacctccagtggggccagcacagccaccagctctgactccagcacaacctccagtggggccagcacagccaccagctctgactccagcacaacctccggtgggaccagcacagccaccagctctgactccagcacaacctccggtgggaccagcacagccaccagctctgagtccagcacaacctccggtgggaccagcacagccaccagctctgagtccagcacaaccttcggtgggaccagcacagccaccagctctgagtccagcacaaactccagtggggccagcacagccacc

SEQ ID NO: 47870 - DNA, 328 bp, Gossypium hirsutum
  Clone ID: LIB3196-043-P1-M1-H10
tgaagttgaagtgaaatcagaagctgcaaaaaggttgaaaattgggatttattttgcaacttggtgggctttgaatgtggttttcaatatatataacaagaaggttttgaatgcttacccttacccatggttgacttcaactttgtcccttgcttgtggttctttgatgatgttaatttcatgggctacaaggattgctgagaccccaaaaacagattttgagttttggaagactttgtttccggttgctgtagcacataccattggacatgtagcagcaacagtgagtatgtcgaaagttgcagtttcggtcacccacatcatcaaa

SEQ ID NO: 47871 - DNA, 370 bp, Gossypium hirsutum
  Clone ID: LIB3196-043-P1-M1-H2
cccacgcgtccgatggatttaatacaaagcttagcagtgctggacttgtttataagcattttggcaaggagataatagctaaagagcttcagcttggagaagaccacccggatgtgcatagattatttctggccttttacaaaagcttaatggaggcaatggatgcgatggacattggattcaaccagttggatactgccaggccaccaaatttggtgaccattccaaacttttctctaaaagtgggaggataaatttaggcctgacaaattccggtccattaacttgaaaaggaaatggaggttttcaaccaggcatgggtttaactggtagtgaggtcttagaaagggtcccatttcatgcaagatca

SEQ ID NO: 47872 - DNA, 385 bp, Gossypium hirsutum
  Clone ID: LIB3196-043-P1-M1-H3
tactgaaaatgactttagtaagaatgtatgtttgacttaccattacctgatacagtttacttgcatgtttagaagagatgaaaatattttaccaaaaatcatgaattgaaaaataaattccgaaacattgcaaaattctacaaaaaagggcctgaagaaacaaaaccctttcatcctctacctaatttctttatttaaccttctggaaaaataacacctctgggtaccgaactcagttttagaggttgttagaagtggcagttaagatgagaaatagattacttcccaccttagatttacaccattaaagatgcttttaagaatctggttcaaccacctgaacattcttttcttgacatttacttattgtttacttctttacttt

SEQ ID NO: 47873 - DNA, 379 bp, Gossypium hirsutum
  Clone ID: LIB3196-043-P1-M1-H4
ctttgaggaaaccaaggagctcaaagatgcactggagaaggaaattttaaaggctaaggagcaatcttgtgtgagaaagagatcaatatctgctatgacaccgcttgtcaaagaagaggccgcttctttacccaattgtgttgaaatccccaccgatggaactgatgcgtgggaaattgattccaggcagctcaaaattgaacacaagattgcatctgggtcctattgcgatctatacagaggcacatattatagtcaagaagtggctattaaagtcctcaagcctgagcgggttacaagggaattgctgagagagttttctcaagaaggttttattattaagaaaattccgcctaagaaagatggtcaattcataggt

SEQ ID NO: 47874 - DNA, 294 bp, Gossypium hirsutum
  Clone ID: LIB3196-043-P1-M1-H8
gaagactctgagactcaaacaatgggaaagggttgggcagtgaaggtgatgatgatgagtttggtggtggtggttggtgcgggtgatgagagtgggttagccaaagagtgcagcatagatttacagagcgtgatgacttgtttgagctttgcgcaagggaagatggagaaaccttcaaaggagtgttgcagtttggtttcgagtattaaagaagaagaaccaaagtgcttgtgttatattcttcaacagacccaagctattcggagctcataatcttaagagcttaggcgttca

SEQ ID NO: 47875 - DNA, 255 bp, Gossypium hirsutum
  Clone ID: LIB3196-043-P1-M1-H9
atttttcactttccgcacacttagcttaactaagcaagctcgtaagctgttttcatcaatggccgaccgtgaccgctcttaccggacgtttgaccaggttgttcgtggtgatagaacgaactatcaaagcggaccatcaacaacccaagttctaactgtcctcaccctccttcccataggcgggactctccttgcattagccgggctaaccctcaccgggaccgtgatagggctatgcatgggaacgccactctt

SEQ ID NO: 47876 - DNA, 336 bp, Gossypium hirsutum
  Clone ID: LIB3196-044-P1-M1-A1
atcccccctcatcttcatactcacccccccattcctcctctcaccttcagacccaccccaccctttattcccccctcacctacacccaacaccccccactctcggtctcacctccacacccaccccgcactcccccctcacttccacacccactcctccccttctcacctccacacccaccccccactttccccttacctgcacgcccaccccttacttcccccaacttacgtttcacctgcacaccccttaccccacttgttttgtgcacgtggctgtggagggactggctggctgttccaaaagcaaaccctcgtggttgtaactggcattgtc

SEQ ID NO: 47877 - DNA, 212 bp, Gossypium hirsutum
  unsure (1)..(212): unsure at all n locations; Clone ID: LIB3196-044-P1-M1-A10
naaccaggggagaatggacactttaacatgtaatagaaaaaacatcaaaaaaaagaaccaaaatagccctgccgatccaaaccctcaaggcttacctactctggcattccaagttatagttctcttatatcggaccctataattaatcaattgtccgccaaatacaacttcctgaccgtaattttacttactaacccaattaaaactcctct

SEQ ID NO: 47878 - DNA, 374 bp, Gossypium hirsutum
  Clone ID: LIB3196-044-P1-M1-A11
ctttcattctttgctgttgaagtagtaatatctatagaagacggagatggagaggcaaagaagcaagcaggttcgtttgttgatgtgggttttggttgctgccttgttctcccacaacatggtcattgcagtgacctccactggccttggagagcagaaaaattactatccagttcctgaccctcatgctggaactcccccttcaggttcacatggcacaccaccatcttcaggaggtggaacacctccctctcatggaaccccatcacatggaggtggttaccacccttcaccaacaccatcaacgccttcgggtggaaattgtggaactccaccacatgaccctttaacttcatcaacaccatcacacactc

SEQ ID NO: 47879 - DNA, 366 bp, Gossypium hirsutum
  Clone ID: LIB3196-044-P1-M1-A12
cccacgcgtccgcggacgcgtgggatgagtttgagtggtcaaagcaggcaatacatgtgagtgttcggaggcagactaaatggtggtatgccaagaggtttttgcaccctgacatcgtggctccatatgactacatattcatctgggatgaggacttgggggttgagcatttcaatgcggaagaatacattaaactggtgaggaagcacggactagagattttacagcctggtttggaaccgaataaagggttaacctggcaaatgacaaagaggagaggagatcgtgaaagtcacaagggaacagaggagaaaccgggttggtgcaatcattcacatgtttctccttgtgcagcgtttgtggaga

SEQ ID NO: 47880 - DNA, 324 bp, Gossypium hirsutum
  Clone ID: LIB3196-044-P1-M1-A2
ttggtcaccaaattcattatacatcatttcccgtgaaaaccaaactgaatatctggatgggtatcgttggtgaagaaccggttctgtctagactagatcgagtagacaacatggtaaggcagttggaggaaatgagagggagccatggtaatggtaattataacaggtctccaagcccaaggagctctagcgcatccaccccatcaagtgggacgttgggcagcacatgtacggagggtcatccttcatctatcgatttctccccaaccgccaagtccctggagaagtactgtcgtcccattgatcatgtcatggtggagactc

SEQ ID NO: 47881 - DNA, 345 bp, Gossypium hirsutum
  Clone ID: LIB3196-044-P1-M1-A3
ccatggaggctgcgtctggctcccgctctcacagggattgcagaacattgagctccataaagacaggaactgagcaagtgtgagcccaacgggcactgcgcgactatgtgcctggctgagggaaaataactaaacatgggcacaggagatcctaagaagccgcttggtaaactgtattgataaggagtggttgggcaaacttgactgatggagcacaagaagaagtacccagttgctttagtcaacttttcagagctttctaagaagtgctcacagaggcggtaggtaagagggcttataacatgctaacaaggtaattagacaattttcaattgaggatgctta

SEQ ID NO: 47882 - DNA, 366 bp, Gossypium hirsutum
  Clone ID: LIB3196-044-P1-M1-A6
gcgggcgccgccctcaagctctatctgactcaaaactctaaaaccatggcaatcgacataaacgaacccagcaagctccgttggtgagagcttgaggaagaccacgacctggactttttgttacccccaaaagaagtgatcgggccagacgaaaacgggataaaaaaggtgattgaatacaggtttaacgatgaaggtaacatggtgaatataacaacgacgacccgcgtccgaaagctggcgaaagcccggttgagtaaacgggctttggaaagaaggaattgggacaagttcggggacgccgtgcgtgaagatgttgggagtcggcttaccatggtgtctactgaagaagatcttattgaacga

SEQ ID NO: 47883 - DNA, 346 bp, Gossypium hirsutum
  unsure (1)..(346): unsure at all n locations; Clone ID: LIB3196-044-P1-M1-A9
ggcacgcgggggcaaanccggaggaggcgcaagcacaaagacaacccggacaggggaagggacaaaacgaggccgcgggcgaaaagcacgagaggaccagcaaagcaaccggcagcgagagcacgaggcagagccaccgagaagaaaaagacaccaaacacgcggcgacggccaggacccggagaaccngagagaaaaggacacgaagaaccgagggagcccgagaaggggagccaggaacaacagccacaggcaccgagacaaccacagaagggacacaagaacacacgagaacgggggccaacgaagcccgaaagggaaaaacccaagggcagagggcggaggc

SEQ ID NO: 47884 - DNA, 325 bp, Gossypium hirsutum
  Clone ID: LIB3196-044-P1-M1-B11
tcgcggacgcgtgggggggactcctaaggagacagtggcagaaccagtttccgtggggatcaagggaaccactgtacaaaccgttggaaccaaagaaacttcagagtcttttgaggcagcagtagaagcacccaaagaagaagttgtgaaggagagaagaagcaaaacccgctgtagtggagaaagttgtaacagaaactgatccagcagagaagactgggtgaataataaagcttttgtgatgaaaatgagggtgtcaatggggagattgttttaagaggctacagattgataagattgcatgttaagtcaactagtttttttt

SEQ ID NO: 47885 - DNA, 372 bp, Gossypium hirsutum
  Clone ID: LIB3196-044-P1-M1-B2
cccacgcgtccgcttgccctaggcaggccaagcggaaacccatgcccggaagtcgttgctcaaagacgatctggtgacgacggtataccggtgatattttctagttcggactccgacgatggagttgttcgcctatcctctgacataaacatagagtttgttccgctcagacccagactttgccgaacaacaacggtgtggaaggtcgatgattacgaccattcagccggaaaatggtgggtgataaccgatggggttaaagggaacccgggtgccgacactttgaccagttggtttagaatagagaaggggggtgttcttggttacaaatttaagtactgccccgcagtatgtggaacatgcccagcttta

SEQ ID NO: 47886 - DNA, 344 bp, Gossypium hirsutum
  Clone ID: LIB3196-044-P1-M1-B3
ccgaggagaagatacgggtagcttacgacaagaaatcccgtaggttgaaacgacttgatgaacggggtgctgaagctactaaagttgattcaacccggaatataatcaggagcctatctacaaagttacgaattgcaattcaagttgttgataagatatctgtaacaatcaataagatcagggacgatgaactatggccgctgctcaatgaactgattgatgggttaagcagaatgtggaaatgtatgctcaaatgccatcgaaatcagtatgaggtgatcagagaagccaaagctttaagttctattggatcaggcaaaatgctcagcgatgaccaccttaca

SEQ ID NO: 47887 - DNA, 387 bp, Gossypium hirsutum
  Clone ID: LIB3196-044-P1-M1-B4
atgtgaaatgttatctaccaaggaagctcattggagactcagtacccaaagtttttattgagggatggcacgtaggcatctgcctagaatgtatcaaaattccagactcccagaaagaaaataggtatacaacataaaccatattgtttgtataaacagtgtaggcagagtaagctacccttatcatttgaggaaagtttcttatcaatatagggaactgtttaccagctaaattcccaaatgccagccaaggaccacccttgtaaggaggtctttctaccctctggtaactctgctctgcacagatgatttttgcaggattaaattgaactatatgaatgccatttttataggtcagagttgatctgatatcagtaattctgtatt

SEQ ID NO: 47888 - DNA, 355 bp, Gossypium hirsutum
  Clone ID: LIB3196-044-P1-M1-B6
ctctcttcgatcaaagtttcataatccgaaggcgaagaggcaaaagattaatggctcctcccgcaaagccaataacgagtccagtctcagatgcatggtacccaaccctagccctcttaatgctctccattggtcttgtcgtcaccgcttccttcttcatctatgaagcaacttcttcgaagagaaatcgaagtcttgccaaggagctcatcactggcggagtggcatcggtctttctgggctttggttcactgtttttgctactttcaaacggtgtttatgtctgattattgatataggtaaaacggcttacagaagtttgcaaaaaaaaagaatggtgtctgcttttcttgca

SEQ ID NO: 47889 - DNA, 369 bp, Gossypium hirsutum
  Clone ID: LIB3196-044-P1-M1-B7
cttctacattatgcaagaagctcctaaggtccgagagagatggcttcaaaatgatcggcatcggttgccctcttttttgcactcaacattctcttcttttcacttgtcagtgctaattgttcttgcccttcccccaagccaaaaccaaaccccactccctccccaactcctgctgcggaaggaaagtgccccataaatacccttaaactaggtgtatgtgctgaggtgcttggtttagtcaatgtaactgttgggtcacccccagttcaaccttgctgcacccttatcaaaggccttgctgatcttgaagctgctgtttgcctttgcacagcgatcaaaggcaacattttgggtatcaatcttaatatc

SEQ ID NO: 47890 - DNA, 362 bp, Gossypium hirsutum
  Clone ID: LIB3196-044-P1-M1-B9
gtttgtcttatgtatagtgagttacctgaaagactacacaatagttcaagtttcaatgaggaggtggactctcgagctagtctaatgctccattctagggaagtctagtaacctcctatcttttgttttaaacacattggggataatgtgtagtctgagtgtggcggtgcacataagttatatatgtgttatttatcttacttttatgtttggttgagcatttattttaagttttatgccttttggaaaaaattttaaaatttcaaaagtattattcattttttgttcttattttttcaagaatctgatgttccttaggagcacatttctgtgacagcatagtgcttgaacatgaagttatt

SEQ ID NO: 47891 - DNA, 354 bp, Gossypium hirsutum
  Clone ID: LIB3196-044-P1-M1-C1
aaacccaacctggggaagtcgttaagcctgatcaattcaaagcaataaacgatgaaggaatgccgatttatcagaggccatttatgagaggtaaacttttcattcacttcactgttgacttccctgactcgttgaccccagaccaatgcaaggcactggaggctgtgcttcctcccaaggcatcggttcagctgactgacatggagctggatgagtgcgaggaaacaaccatgcatgatgttaacattgaggaagagatgcgtaggaaacaggctcaagctcaacaagaagcttatgaggaaaatgaggacatgcatggtggggcgcagagagtccattgcgctcaacattgtt

SEQ ID NO: 47892 - DNA, 298 bp, Gossypium hirsutum
  unsure (1)..(298): unsure at all n locations; Clone ID: LIB3196-044-P1-M1-C11
ctctttgtgtttttgtcctctcccgttgtcatggatccttttggtctcttctgtactggggctcttcttgcctgcgggctttactggttcgtctgccttttagggccggccgagcaaaagggcaagcgagccgtcgatctcttcggcgggtccatctctgtcgggaaaggttaggacaaccaccaacaggattgggctttttttcgcccacccaaagaggtcgaaaccccccnaaaagaaccagattatgtcgatacttttttcaacacaatcaccgatatttaccaatgggggtggg

SEQ ID NO: 47893 - DNA, 356 bp, Gossypium hirsutum
  Clone ID: LIB3196-044-P1-M1-C12
ctactattacactggcggaaaaaaatcatggccaccgtcacgacgcaagcctctgccgctgttttccggccatgtgcatcgaaaacacggttccttactggttcttccggtaagttaaaccgagacgtttcatttaaaccagtggctgctacatcgactagctcattcaaagttgaagcaaagaaaggggagtggttacctggtcttccttcaccagcttacctgaatggcagtcttccaggtgataatggctttgatcctcttggattggctgaggaccctgagaacttaagatggtatgtacaagctgagcttgtgaattgtactttggctatgttgggtgttgcaaggatgct

SEQ ID NO: 47894 - DNA, 357 bp, Gossypium hirsutum
  Clone ID: LIB3196-044-P1-M1-C2
atggctcccccgtccgcttcaccacaactcccccgggagcctgctctccagcaggccctgagtaagataaatgaggtaccccggagaggctcccttcttcagggagatcagatggcatcagcagccatcatagaagcccaaatcttaggaagggaaggacctgggggtggcaggtgccaaagtgtgaacacggctttgagagactgataggttttccgcagatagttctgggatgggggagggctgggtgggaggcccctgtgctctagggtgggttctataggtttcctagaccctgctaactttcaagcggcatggattcgaggccatctctctgcgaaaggcaagatggctccc

SEQ ID NO: 47895 - DNA, 268 bp, Gossypium hirsutum
  Clone ID: LIB3196-044-P1-M1-C3
atcgctgccatgcgtagttttgcacatctccaactgaaaagagtgtctaagggagcgcagggtgacaccaataaagtgcccctgagaggcccccctgttcacatacatgacccagtttagctagccctcatatacaccctgatcacacgctgggaacgaccttcttgccggctcaggcaaagactgaacacatggttaccgagactcataactgtctcgccaatagttatttgatggccaccggctagatagggtactctttggcctt

SEQ ID NO: 47896 - DNA, 209 bp, Gossypium hirsutum
  Clone ID: LIB3196-044-P1-M1-C4
cgaacttgaaaaatactggcactggtatgggggtatagttgtgactgaacctggtttttcactcttcatttttatcttttttggatggggaattaatattgtgtgcccttctgggtggaggaaaaaaaaaaaaaaaaaaaaaaaaaaaaaaaaaattaataaaaaaaaaaaaaaaaaataaattaataaaaaaaaaaaacaatatataa

SEQ ID NO: 47897 - DNA, 394 bp, Gossypium hirsutum
  Clone ID: LIB3196-044-P1-M1-C6
atcagaagccatagttcataatggtagggatacagggtccttcgtaacattatcagtgtggcctatgttggaaagtctggtgacctctgattttgtcttgcttctgggtctttgactttggcactctttgccatattagagttcctgggcctagggctgagcaggattcataggtgcagctgcttttgctggaggtagactgcatccaagaaaggaagtgtgctgggtgagttctgggagtagagattctgactggggtcaccgctgggctggccaccggtcttccttctgacccagggttaaactgtggcttgggactgactcaggtcctctcttggggtcggtctgcacataaaaggactcctatccttggcagttctgaagcaacaccacc

SEQ ID NO: 47898 - DNA, 347 bp, Gossypium hirsutum
  Clone ID: LIB3196-044-P1-M1-C7
cacggctgttcctgatgccaccaaatgggaaatcgcagtgatggaacaataagaaatccaagatctgggctagtttgacgggtagtagagatagctcaggtatgattaatttggttgtggatcataagtttgacgcttctaggcaaactttctatgccagcaacaatacaaagccagcagtgaccaccattgtcggttacaaaggcatgtgcttgctagcaagtggaagtcggttgtggctggaagactgcgtgagcaacgatgctaaacaacaatgggcgatatatccagatgggaccatcaggccccaaaagaatagaaacggttgcctcaagtatgcaaacgat

SEQ ID NO: 47899 - DNA, 150 bp, Gossypium hirsutum
  Clone ID: LIB3196-044-P1-M1-C8
atccaaactcttgatagtggtcacctgtgaagagtggcgaagggaaagtaatgagtgtgggaggtggggtggctattgggttaaggggacttcagctttttatttaaacaatcacttttctttcaaaagactttaattaaaaataaaaag

SEQ ID NO: 47900 - DNA, 333 bp, Gossypium hirsutum
  Clone ID: LIB3196-044-P1-M1-C9
cccacgggtccgaaaaaagggaggtgggtacttgaacatatgtagtagtgtatcatgcataagattggttttgacttggttttaatgtcttggattggttggtgcatgtgtgttggaacatttatgtaggtggaaaacaagttttggtgagaaataaggcttagaaatagctttattttgtgcacacaggtagagacacgggtgtgtgtcttagccgtgtgtgacacacggccatgcgctcgggcgtgtggtttagtaatgtgttcactgcatcttaaaaattaagaattagagtggtcaaaattaatcacacgggcatgttggtagctttgt

SEQ ID NO: 47901 - DNA, 372 bp, Gossypium hirsutum
  Clone ID: LIB3196-044-P1-M1-D1
atgccctctcctctggggcctcggcttcccggaggtccccttctccagtgcttccctggagaggccagctgtgtcgagtcctctgtgcctgccctggcgttctcacagcctcccccttcccttcagcaggcagctctgtttgccttacccgtccggaaggcttgccctcggcgctctgcctgcccctgctgctggctcatcacaatctgcagggcattgaccctttgctttccctttctgctccctctctttccatctgtttggctttttccctcagggaactgggtctggaaggcactgggaagctcatcagagaaaatgggtgttgggcctgcgtactccggtcggaggggacggacaggcacccctccc

SEQ ID NO: 47902 - DNA, 364 bp, Gossypium hirsutum
  Clone ID: LIB3196-044-P1-M1-D10
cccaagggtccatgctatcagaggtggccctctggctgctacaatacttcacgagatgagggaccaatttatggaacgagagcaggaacaagcttcagacaggctcccttgaaacatagccctgtgatatgtcattcacagggctgatcaggacacgttcgagagaaagcgaatgcgttggcagctctgtgcggggccgagacatgacttgctactcatagtctatcgactccagactttgagtgggcacttcgtcttgcatcttatgtttcatagcttgaggccttggctgcgccctgcttacttagcgcggcgtcttgccctcgtatttaagaccaaccggttttagccggatgctggcaat

SEQ ID NO: 47903 - DNA, 374 bp, Gossypium hirsutum
  Clone ID: LIB3196-044-P1-M1-D11
acaagatggatgccactacccctaaatactcgaaggctaggtatgatgaaattgtgaaggaagtctcttcctacttgaagaaggtgggatacaaccctgacaagattccatttgttcccatttctggttttgagggtgacaacatgattgagaggtctaccaacttggactggtacaagggccctactcttcttgaggctcttgaccagatcaatgagcccaagaggccttcagacaagcctctccgtctcccacttcaggatgtgtacaagattggtggtattggaactgttccagttggtcgtgttgaaaccggtgtcttgaagcctggtatggttgtgacatttggcccttctggtctgacaaccgaagtt

SEQ ID NO: 47904 - DNA, 369 bp, Gossypium hirsutum
  Clone ID: LIB3196-044-P1-M1-D2
ggaaaatcaataagtaaacagtctcaaatatgagaatgggtgattagcttgcttcagtaatcataaccaactattgctttagggcttcttgttcaatcaactagttgttaccctagcaggatcttctgatcttccactagaatactagtcatcaagaactacttatctatcgacctcacaatttagaccagtttggggctaaggtgatcatggataggccataccaattttgggttaattcccacattaatgacttcctagggtcatcaagcctaaggtttgtgttcttcctctcccaaacaactgatccattaatagaaccttacaaaatagttaatttatcatacctcgactcactaatcacccacc

SEQ ID NO: 47905 - DNA, 369 bp, Gossypium hirsutum
  Clone ID: LIB3196-044-P1-M1-D3
ataccagacaagctccagcagctggcccttcacatccagacttgcctgagaggacccacccctgggtgtccggtggtcagtcgccccaggatggggactacagtcagagcagcgttggtcttggcctatttggccattgcttctgctgcctctgagggaggcttcaaggctacagggcagaggcagctgaggccagagcactttcaagaagttggctacgcagctcccccctccccacccctatcccgaagcctcctcatggatcaccctgacagctctcagcatggccctccctttgagggacagagtcaagtgcagcctcctccctctcaggaggccacccctatccaacaggaagagctgatgcct

SEQ ID NO: 47906 - DNA, 334 bp, Gossypium hirsutum
  Clone ID: LIB3196-044-P1-M1-D4
atcgccctgtcagccgccacggccgccgccgtcgtcagagtcgccatgcagatcccgcgcgccgcgctgctcccactgctgctactgctgctgctggcggcgcccgcctcggcgcagctgtcccgggccggccgctcggcgcctttggccaccgggtgccccgagcgctgcgagccggcgcgctgcccgccgcagccggagcactgcgagggcggccgggcccgggacgcgtgcggctgctgcgaagtgtgcggcgcgccggagggcgccgcgtgcggcctgcatgagggcccgtgcggcgaggggctgcagtgcgtggtgcccttcggggtgc

SEQ ID NO: 47907 - DNA, 389 bp, Gossypium hirsutum
  Clone ID: LIB3196-044-P1-M1-D6
atgcacgctccagggcctggagattgagttgcagtcccagctgagcatgaaagccgggctggagaacaccgtggcggagacggagtgccgctacgccctgcagctgtagcagatccaggggctcatcagcagcatcgaggcccagctgagcgagctccgcagcgagatggagtgccagaaccaggagtacaagatgctgctggacatcaagacgcggctggagcaggagatcgccacctaccgcagcctgctcgagggccaggacgccaagatgactggtgtcccttcctcagcaggaagcgtcagcccccgaagcacctctgttaccacaacttccagtgtctctgctaccaccacctctaatgcctctggccggcgcacttctgatg

SEQ ID NO: 47908 - DNA, 316 bp, Gossypium hirsutum
  Clone ID: LIB3196-044-P1-M1-D7
atgtcaaagctcatcccagatgtcctaatgtttctagtaaatgtttctgcacaattctaaaagataaggatgtttttaaacccagccccgacactatcatacctcacaagattcatgctaattcctcagtttcttctagtcccaagtccatgctcaagtgtcccccgctgtccaggcaccctattcaggggtcctccatgtttcacagtgagaagggaccctcagagttgggcaccccaggcaggctgattggagggggatttggaaagaaaggctttgccagggtgtgagggtacaggtctcaccacactctgtt

SEQ ID NO: 47909 - DNA, 263 bp, Gossypium hirsutum
  Clone ID: LIB3196-044-P1-M1-D9
atctgacagtgaagtgacagggccctcacttagggacttttagtctgtcggaggagttagaatacacctgagggtccaaagagagacacagggagagaagagcagatgacataggtggaagaagtcttcagaccaaggaaatggaggaagcagagctggaaaagcttcctggaagagaatcaatagagaactacacccacagcaggtgtttatagagcgtctacttccagcatgacttggatacaggcacaggccttaggaaa

SEQ ID NO: 47910 - DNA, 352 bp, Gossypium hirsutum
  Clone ID: LIB3196-044-P1-M1-E1
cttttctcttaccatcatcataatcatgccgatcaacgatcaaaacagacccatggctcaaaagctctacgactcagctccgtcgtctcgccaggtggctaagttcttgaccgcctcgacgttgggcgcaacgctgcttttcttgtctgggttaaccttgaccgggacggtcattgccttgataatagctacgccgttgatggttatcttcagtccggttctagtcccggccgggataaccatattcttggtgacgacggggttcttgttttcgggcgggtgtggggtggcggcattaacggcgttgtcgtggatatacaattacgtgcaagggaaacacccaccaggagct

SEQ ID NO: 47911 - DNA, 345 bp, Gossypium hirsutum
  Clone ID: LIB3196-044-P1-M1-E11
cttaaattttcacacaaataagttactttggctggacgcttatatatcttatttagcataacttcattcatctttcgaatccaaatgacattataacaagtatgtttacattcatatacacaaactcataaatcaaaactcaacatcacattcatatgcacatatatattgccgaacatacttttcatatttactcacattcttcatttacatcttacatgacttgtaataaatattaggaaacttacttaacatatctgaattaagtcataagctaaattcatacctggtcgatttaagatattttacacatcttgcacacgtttcaccttcccctggttgaac

SEQ ID NO: 47912 - DNA, 265 bp, Gossypium hirsutum
  Clone ID: LIB3196-044-P1-M1-E12
cccacgcgtcctagaaagatctacagcagcgccaccgccctgtagatccccagaggagatacgaggagtgttagcaagaatgccgacaacaagaagaaaggcaacgaccacaatgccaacaaaggtgcttgaaacgattcgtgcaagaacaacatcaattccagaggcaattccaggagtgtcagcaacattgtcaccagcatgaacaaaggccggaaaggaagcaacaatgtgtgagggaatgcatggaaagcgtccatgagaa

SEQ ID NO: 47913 - DNA, 315 bp, Gossypium hirsutum
  Clone ID: LIB3196-044-P1-M1-E2
cacttttggtcggttggggggctaaaccagggttatggggcctccacaaccgggggttaaaccaacccacagggttttgaaacttgacgggggggccaccttgcccaattggccccaaacagaatggaactttccttttttaaaatggccgggattccaaaccggttaaaaaggattggccggggaaaaaggcgattaccttggaaacaattttttaagagttttttttttttaaatcccccaattttaccaaaaaaaagggatccttattttccgacaatttacccaacaaaaaaaattccaggcccctctttt

SEQ ID NO: 47914 - DNA, 178 bp, Gossypium hirsutum
  Clone ID: LIB3196-044-P1-M1-E3
agccttccgatgtttggtgggggtggcaatggaaaggaatataaacccggcctttacatttgtttcgaaggttggttgaccaacaacctgtttggccccttgggctaggggggccaccgttaatttgggcttggtgaaggtcctatgaacaccggccctttttttaattgttcacaaa

SEQ ID NO: 47915 - DNA, 360 bp, Gossypium hirsutum
  Clone ID: LIB3196-044-P1-M1-E6
attaagagttgtaccacttttcgagaagcttgcggatttagaggctgcacctgctgcattggctcgacttttctctatagattggtatagaaaccggatcaacggcaaacaagaagttatgattgggtactcagattcgggcaaagatgctgggcgtttctctgctgcgtggcagttgtacaaagctcaagaggagcttataaaggtagctaagcaggtcggtgtgaagctaacgatgttccatggtcgcggtggaactgttggaagaggaggtggtcccacccaatcttgctatatttactcaaccaccggcaacctatttacgggtcacttcttgttacagggtaaggtgaaggtatt

SEQ ID NO: 47916 - DNA, 233 bp, Gossypium hirsutum
  Clone ID: LIB3196-044-P1-M1-E7
cgaaaaggaaaaaagcccccagagtctaagatcaccctgttctttaaatcaagatgcagtcaaccaacggttctgatctgagctcaaagcaccaaaaacagcagcccccaccgccgccgcagccacagcagcctcaatggatgccgaaccagtggatgggagctatgcaatacccggctgctgctatggcaatgatgcaacaacaacagatgatgatgatgtatcctcctcat

SEQ ID NO: 47917 - DNA, 298 bp, Gossypium hirsutum
  Clone ID: LIB3196-044-P1-M1-E9
aaatactgtagtttaactttaattaagaaagagttttttttttttcttttgaaagtttgttccttgtaattctctataaattcttggcaggccaatgatttagccctcatttctttcttccaagtacttgaagttgagaagtgaggatcattaaaagaaagaaacatccctgtctctctcttttgtacaaacatattgttgtcagctttcagtggctcaatattttatattggttgggaaatacggcctttccccatttagagacccaaaacagctaaccctgttggaacttgggccc

SEQ ID NO: 47918 - DNA, 381 bp, Gossypium hirsutum
  Clone ID: LIB3196-044-P1-M1-F10
cccgatatccgggatgcatcagaagctttggtagaggcttaaggggaggatatggtgctggcttcggtgctggcttgggtgctggcttgggtggtggctttggtggtggctttgctggtggtgatgggcttctggtgggcagtgagaaggtgaccatgcaaaacctcaacgaccgcctggccttctacctggacaaggtgcgtgctctggaggaggccaacgccgacctggaggtgaagatccgcgactggtaccataggcagcggcccagtgagatcaaagactacagtccctacttcaagaccatcgaggacctgaggaacaagatcattgcagccaccattgagaatgcgcaatccattttgcagattgacaatgcca

SEQ ID NO: 47919 - DNA, 392 bp, Gossypium hirsutum
  Clone ID: LIB3196-044-P1-M1-F12
atggctgtgtctgcagcgctcttgtctactgggggtctcggtgcccgctccttttcgtttccggaaacatggcctccggtgtggctgtctctgatggtgtcatcaaggtgttcaacgacatgaaggtgcgtaagtcttcaacgccagaggaggtgaagaagcgcaagaaggcggtgctcttctgcctgagtgaggacaagaagaacatcatcctggaggagggcaaggagatcttggtgggcgatgtgggccagactgtcgacgacccctatgccacctttgtcaagatgctgccagacaaggactgccgctacgccctctatgatgcaacctatgagaccaatgagagcatgaaggaggacctggtgtttatcttctgggcccctgagtgt

SEQ ID NO: 47920 - DNA, 387 bp, Gossypium hirsutum
  Clone ID: LIB3196-044-P1-M1-F3
gggccgaaatacccgggatgaggcgatggcggcggcggctgcggaagccgggggcgacgacgcccgctgggtgcgggtgaacgcctagcgggcacaggcgctgctggccgaagtggacacattgctgtttgactgcgacagcgtactgtggcgcggagagacggccgtgcctggtgctcccgaggccctgcgggcgctgcgggcccgcggcaagcgcatgggcttcatcaccaacaacagcagcaagacccgcgctgcctacgccgagaagctgcggagactgggcttcggcgggcccgcggggcccggcgccggcctggaggaattaggaacggctactggaccggtctctacctgcgccagcgcctaggcggagcgaccgcgccc

SEQ ID NO: 47921 - DNA, 273 bp, Gossypium hirsutum
  Clone ID: LIB3196-044-P1-M1-F4
cttaatttccatttactagcaagtacttcaaggggtgtgcgttgtttttttaatcaatggctgaccactacctccaaaacactcaaccaatgactcaccaaatggtgaaagccgctactgccgcaacagccggtggttccctcctcattctctccggtttaatactagctggcaccgttatttgcgctcaccatagccactccactcttcgttattttcagtccagatctttgccctgctctcattgcaacagctctcctagcaacgggtttc

SEQ ID NO: 47922 - DNA, 221 bp, Gossypium hirsutum
  Clone ID: LIB3196-044-P1-M1-F7
cgttgaatatgtgggctttcttcttgttcagagaaggaaggaaaagggaccatagcgtcggcgtttttggatcttcttcttcttcttcttcttccctctctctctctctcttactctgaagctcctctttggtctttcatttactcagtattggaaaaaatggcccgccgtgaggaaattcaacccctcgtctggggtaatgggaactggaatgggggaag

SEQ ID NO: 47923 - DNA, 278 bp, Gossypium hirsutum
  unsure (1)..(278): unsure at all n locations; Clone ID: LIB3196-044-P1-M1-F8
taaaaaaaggccaagcaggnacgccagcaaacacacgaccaaaacccccggaacgacccacgcacccaggcagaccaaaaaagaggaaaagggaggccgaaaaagggcaagcganccaaagaagaaggncaaaagccaaaggagcaaaggccgaaagagcgcgaccagaaacccgacgcaccaagcaaaaggcaacccacagaaccgaggcaacaaaacaaccggaagagggcacggggcaaagaaccaaaacaggggaccaacaacaagccaagaac

SEQ ID NO: 47924 - DNA, 364 bp, Gossypium hirsutum
  Clone ID: LIB3196-044-P1-M1-F9
ctaattgttggaagaagaagcagaagagaagaaatggagatgcctactgttgatttgagttttctctttcattttctctattgattttctcgacatccaaacaatggagagattatacctctgcgctgccgcttccttcagcttcaacccccttcttttttcctgatctcttctctcatccccttctcatttttggtagctagctttttctggtccctacgatccattccagccctaaaccttcaaccaaacaaaaattgtgcctcgtgagggttttggtacaaagaattcatgtctctggaagtatctttggtgctctcccaatcgaaagaaaacctaaatttctcgctaggtttaataaccc

SEQ ID NO: 47925 - DNA, 364 bp, Gossypium hirsutum
  Clone ID: LIB3196-044-P1-M1-G1
gtagaaattagggcgcaactggccgaactagaggcttcaaaaatgcaaaccacagaagcgcgattggtatgtaatgctgttgatgaacgtaccaatatataggcttctgaagtcatcgtcttggaggagaaggcactcatattaatggtcgaatgagctaaaacttggagaggcatactggagaacacagaggctgaaatattttatttcaagtattcctaagaaaattgctaacctagagaaagagcgttaggatattctatcaacccctgtagcacttcaagaagagaagaaggtgctttagtctcagccaccaaaagcttttcgctggagacagcctattgatgctattaataatcctgct

SEQ ID NO: 47926 - DNA, 371 bp, Gossypium hirsutum
  Clone ID: LIB3196-044-P1-M1-G10
tttcctttttcctaagggccagttcagtgtcaataggggtaaggcctgagagaaaagaaaactattctgatgaagggtctctctacaccctccgtctctgctatctgactcttcatttcagtcgggctctcttggtctttccagttccgactggtgtgtggcatacccaggcaccgcatcaaacagaagcccatctccttccccatgagaaccgcttcataacatgctatcgcttctgcttcaaaagtcgtagtcaccatggaatggaggggccttccatttatcagttttctgggcgtcactaatttgtctctcatttatgccatcaagttcacccagagtacccagataccacaaatcagtgatcgacg

SEQ ID NO: 47927 - DNA, 380 bp, Gossypium hirsutum
  Clone ID: LIB3196-044-P1-M1-G2
cttttctctctgcccttcgcgtgaccatgggaaacaggtcatcgtaaattggcttacaaagagctcacccagataagagccaagtggaagaagaagcgtatgaggaggctgtaaaggaagcgcctaaagatgagacagagatccaagtagatgcgccttggactgaattagttttgccctgacaatcccttgtcttcataattatcctgcatatgttgcatgaagttgtgaagattgaagggtattttcaggcaaccctatctgttttgacctctatatctcggttaaagatttaagactgtttgagatgtttgtctagtactatttagatattatgtaggggatttgtggtttgatctgtgtaagccgttattttaaca

SEQ ID NO: 47928 - DNA, 389 bp, Gossypium hirsutum
  Clone ID: LIB3196-044-P1-M1-G3
atgaaatgtttcatcgcgggagcggacaatgtgggctccaagcagatgcagcagatccgcatgtcccttcgagggaaggccgtggtgctgatgggcaagaacaccatgatgcgcaaggccatccgagggcacctggaaaacaacccagctctggagaaactgctgcctcatatccgggggaatgtgggctctgtgttcaccaaggaggatctcactgagatcagggacatgttgctggccaataaagtgccagctgctgaccgtgctggtgccattgctccatgtgaagtcactgtgccaggccagaacactggactcgggcccgagaagacctcctttctccaggctttaggtatcaccactaaaatctgcaggggcaccattgaaat

SEQ ID NO: 47929 - DNA, 382 bp, Gossypium hirsutum
  Clone ID: LIB3196-044-P1-M1-G4
cttttccttatcattttcctttccgtttcttctttcatccttttatctgaatctcaaaagacttcgaagccgaacaggttcattttgcagctgcaaaaagatccgaaaactaaactttatgtgactaacatatacaagagaactccttcacagaaagtcccatttgttgtggacttgaatggaaggttactatgggttacttgtgagaaaagttaccgttcgtccacctaccatgcccctcggtgccactcgactcaatgctctagagctggcagtcattattgccacatatgctccaccagggatggaccagggtgccataacaacacatgtggggtcatgtcaatgaatcctgtgacaggcctaaccgccatgagtgagc

SEQ ID NO: 47930 - DNA, 378 bp, Gossypium hirsutum
  Clone ID: LIB3196-044-P1-M1-G5
atgccgatcccgccggaagcgccaggacaatggggacccgggacgacgagtacgactacctattcaaagtggtgctcatcggggactcgggcgtgggcaagagcaacctgctgtcgcgcttcacccgcaacgagttcaacctggagagcaagagcaccatcggcgtggagttcgccacccgcagcatccaggtggacggcaagaccatcaaggcgcagatctgggacaccgtcggccaggagcgctaccgcgccatcaccttcgcgtactaccgaggcgcattgggcgccctgctggtgtatgacatcgccaagcacctgacctatgagaacgtggagcgctggctgaaagagcttctggaccacgcagacagcaaca

SEQ ID NO: 47931 - DNA, 287 bp, Gossypium hirsutum
  Clone ID: LIB3196-044-P1-M1-G6
atgccttttctgtgtttggccaggtagagagggctgtagtcattgtggatgatcgaggaaggccctcaagaaaaggcattgttgagttctcagggaagccagctgctcggaaagctctggacagatgcagtgaaggctccttcctgctaaccacatttactcgtcctgtgactgtggagcccatggaccagatagatgatgaaaagggacttccaaagaagctgtttataaaaaaccagcagattcacaaggaacgagagcagccacccagatttgtacaacctggc

SEQ ID NO: 47932 - DNA, 363 bp, Gossypium hirsutum
  Clone ID: LIB3196-044-P1-M1-G7
atacggaaatatctgcgcagtgtaggagatggagaaactgtagagtttgatgtggttgaaggagagaagggtgcagaagctgccaatgtgactggcccggatggagttcctgtggaagggagtcgttacgctgctgatcggcgccgttacagacgtggctactatggaaggcgccgtggccctccccggaatgctggtgagattggagagatgaaggatggagtcccagagggagcacagcttcaaggaccggttcatcgaaatccaacttaccgcccaaggtaccgtagcagaggaccttctcgcccacgacctgccccagcagttggagaggctgaagataaagaaaatcagcaagccttc

SEQ ID NO: 47933 - DNA, 359 bp, Gossypium hirsutum
  Clone ID: LIB3196-044-P1-M1-G8
atcgagatgcaggtcatggcgccccgaaccctgctcctgctgctcttgggggccctggccctgaccgagacctgggccgtctcccactccatgaggtatttcagcactgcagtgtcccggcccggccgccgggaaccctggtatctcgaagtcggctacgtggacgacacgcagttcgtgtggttcgacagcgacaccgagagtccgaggatggagccgcgggcgccctgggtggagcaagaggggccggagtatttggacccggacacacagagagccaaggggcaacgccaaactgagcgagggagcctgagggccctgctccgctactacaaccagagcgagggggggtctcacac

SEQ ID NO: 47934 - DNA, 368 bp, Gossypium hirsutum
  Clone ID: LIB3196-044-P1-M1-G9
cccacgcgtccgaacagggaaaagctaaccatagcagtgctccaccgacctgtcaataaccctggacaattccagaaattcttccctgctggacaggaaaatcctcagtcatacttacgaatcttcagccgtgaaattcttgaggctgtcttcaatacacgaagtgagcagctagacgagctgtttggtgggaggcaaagccatcgaaggcagcagggacagggaatgttccgtaaagccagccaagaacaaataagggcattgagccaaggagctacttcaccaagggggaaaggtagcgagggatacgccttcaacttattgagccaaacccctcgctacttcaaccaaaacggtcgcttttacga

SEQ ID NO: 47935 - DNA, 366 bp, Gossypium hirsutum
  Clone ID: LIB3196-044-P1-M1-H10
ttggaagagaccttgacaacatcaaatggttgttcatcttctatgaatttgagctctaggaacttagtttatcatgatgaagttgattttgatagtcatagagcaactgcagatgctagaaacgataattcacctaaattttcacaaccagagcttaggaaactagatattcctgatgcatcaactcttgggaatgattatatctgctgtgcatctatacctggttcaagttttaagaacatccaacaatcttcctctatgtcttttgtgattgatccaaatgctaggaaccttcctattttgccaaataaagtggaatcatactccaacactttgcctagcgatttattggcagcggctattcaa

SEQ ID NO: 47936 - DNA, 57 bp, Gossypium hirsutum
  Clone ID: LIB3196-044-P1-M1-H11
caaaaaaaaaaaaaaaaaaaaaaaaaaaaaaaaaaaaaaaaaaaaaaaaaatctact

SEQ ID NO: 47937 - DNA, 223 bp, Gossypium hirsutum
  Clone ID: LIB3196-044-P1-M1-H12
aaagagtcacagctggggcgcggaagaagatgccgttgcctaaacctttcaaccaacgtcaatctcgacggcgtcgtcacctgcgccatcctttccgaagccacctttttcgtcgcttaactcattggcataacctgaggcctaggtgttgattgtgttgtagggctcagtatccatgttatttgttgggaccgagcatgccgcttgctattgagaactggta

SEQ ID NO: 47938 - DNA, 374 bp, Gossypium hirsutum
  Clone ID: LIB3196-044-P1-M1-H3
cccacgcgtccggttcaagggatgtactttgatgcccaatattggctatggttcagacaagaagacccgacactatcttccaaatggctttaagaagtttgtcgtgcacaatgttggagagcttgaactgttaatgatgcacaacaggacatattgtgccgagattgcccatgatgtttcaacaaagaagagaaaggagattgtggaacgggcagcccagcttgatgttgttgttacgaacaagcttgctaggctgcgcagccaagaagatgaatgagattaagcttgtcttttatgtttatctttgagctttgtttgcgtttcttataaatttttggtaattttgttgctttagatgtggcaataactttctc

SEQ ID NO: 47939 - DNA, 352 bp, Gossypium hirsutum
  Clone ID: LIB3196-044-P1-M1-H4
atgttaatcagaaggttagacacagttgaggagaaattaatgaactagaatagaagatagatgtgaaggaaacattcagaatccaacatagccagacatgtaaacgtaaatgccaaatgtgtcagaagaaaggtgggaatctggagggtaaagtgatttcttacatacctaaccagaactcttgaaggaatgggaaaaagtagggcagagacagactcttttttctgtgtttaaaaaaaaaaaattcaggtggataaaagacctaaggagaaaggcacactacaataaggttttagaaaaagtaaaggagaattgtctttatgatcttggttaagggaaggagttttgaaga

SEQ ID NO: 47940 - DNA, 327 bp, Gossypium hirsutum
  Clone ID: LIB3196-044-P1-M1-H5
gcaagcttctgtctgcacctgctctcaatcctgctctcaccatgagcctccgcctgcagagctcctccgccagctatggaggtggttttgggggtggctcttgccagctgggaggaggccgcggtgtctctagctgttcaactcggtttgtctctgggggatcagctggaggctacggaggcggcatgacctgtggctttggtggaggggctggtagtggctttggaggtggctacggaggtggccttggaggtggcttttggtggggggttattgctgggtgggctttggttggatttttgggtgctctgtgaatggtgggccctt

SEQ ID NO: 47941 - DNA, 229 bp, Gossypium hirsutum
  Clone ID: LIB3196-044-P1-M1-H7
aatcccaaatttgtagtttgcgttaagccaacggaatgggaaagggcatagaggtttgtatgagacaatttatggaccaggtctggaagtagagatagcacttttgctcacattctgttggctagaacaatcacaagtccttgcctaactgctgggaaatagtttagctgtgagaccaggaacaagaggaaaagatttggtgatcagctagctgtctgttccatggcca

SEQ ID NO: 47942 - DNA, 363 bp, Gossypium hirsutum
  Clone ID: LIB3196-044-P1-M1-H8
cggacgcgtgggcactagctcatcttcgtataatcaatttttagttttatctctcagcaactttcaaataatggcttcttttgatgttgcttcttggtttatcgttttgattgtagcattttgttagtatatacaataattctctactttgatattcaatcattacatcatatgtaacaccccaaacctagcctagacgctacggtcagatttggagaagctaccataatacactttgaaaactcaaaaatcatttgggcttgtaaaaataacgcaagcttttgatgaaaaaaatttcaatttatttttagtgaaaatatctttcttatttaatttggtaattttggtgactgaatttatatt

SEQ ID NO: 47943 - DNA, 341 bp, Gossypium hirsutum
  Clone ID: LIB3196-044-P1-M1-H9
cccacgcgtccgcaacgatatttctgcaggtgactcccaacaatgttgatattgccaaagtagcaccaacataccatctatacaccccttcagaggtggaagctgtcattactcgcctatgagaatgcgctgccatcatacgatcttaccatgcaacaacctgctttactgtcataatgatgcatgacttgagggggagaagcttgtatttgtttcttgggattcaagctgtgaaacgttatttttggtgtggcactaaactcatctactctttcagttggataatttaattacaccagatcagaaaaaagaaccttttttaattggatattatgttctcg

SEQ ID NO: 47944 - DNA, 358 bp, Gossypium hirsutum
  Clone ID: LIB3196-045-P1-M1-A1
atctctatctccgggcaggctcacccgagatcccccccacaccgaactccctctgcacgctcggcccagcggtgttgccccgggagcggacgtttctgtagctatttgagcacaccttgacgtcggcggagggagctggacagggccagcggcgaaggaggcaggccccgcgcggggaatctcggaagccctgcggtgcatcatgaagttccagtacaaggaggaccatccctttgagtatcggaaaaaggaaggagaaaagatccggaagaaatatccggacagggtccccgtgattgtagagaaggctccaaaagccagggtgcctgatctggacaagaggaaagtcctagtgccc

SEQ ID NO: 47945 - DNA, 274 bp, Gossypium hirsutum
  Clone ID: LIB3196-045-P1-M1-A11
tcggaccattggaatcatgcttgacaccaaaggtcctgagggtaggagtggcgacttgcgcttaaccaattacattaacaaccgggcaggaattcacttttacaattcggagaggggttgggacacctgattgtgtgagagtgaactatgaggagattgtgaatgaggtagaaaagggtgacacgctttttgttgatggggggatgatgtcattagaggggaagtctaatacagaggattcagagaagtgtgaagtagttgatggtggtgagct

SEQ ID NO: 47946 - DNA, 296 bp, Gossypium hirsutum
  Clone ID: LIB3196-045-P1-M1-A12
atgttctgccaggtatatactgctctttctctctgggttttttccccttttcttggttgattgctataaaattaacacagcttctgttatcagaaatggccccttttatccttgcataaagatataaaaaatgttaaaaattatccctcagggataagaaaactgccttggaaattcacacacagtgagatcccacactcacatttatgatcaagggaaatttcacccttaaaacctgaagggatctcatatttttagggggtcattgagcccatggataaattaacccattcccc

SEQ ID NO: 47947 - DNA, 362 bp, Gossypium hirsutum
  Clone ID: LIB3196-045-P1-M1-A2
cagcttttctcatctgtcacaatcgctccaccttgagagtccttttgcatccaactcgattaccggttttggataagagagaggttgacaatactgtctttgatggagatggagaaaaagaataagttaatcatactgaaaagccccttagttttccctatgattatgatcttaaacttatgtgccaggattataaagcagccttttcaagtatcacgaaactcaaaccgtgaccgtatagccacccttaattggatcctgagttatacttcaacccgtgaccgcatgaccactatcaactaggagccttaattatacttcaactcgtgaccgtataaccaccatgaatttggagcctgagt

SEQ ID NO: 47948 - DNA, 366 bp, Gossypium hirsutum
  Clone ID: LIB3196-045-P1-M1-A6
ccgcagcaaaaataacgaatttgttcagtcgttcctttgctaaagacctaggacactgctgaaaatatgataactatcttcctcgttttgtcgacatcgagggcaaagggcattagctactgctttcttctgcttgaggttgactaatgaaggaatgaaattccaagatattctccatattgttaatgtaacctttgaagggatgtgtagcttccacaattttctgtaaaagttattagtttcggtctgtaaattaatattgctaggatcttcgctagtctcttgtaatagtttataggcactccttaccgagaattcccctgacatctccctcctccaaacttggaagtcctcgtgtgctagctc

SEQ ID NO: 47949 - DNA, 362 bp, Gossypium hirsutum
  Clone ID: LIB3196-045-P1-M1-A7
aaaaataataaataagtaaataaaaatgaagtagaagaacccagattccaaatgaacaaattcaaacttgaaaaggatctttctgattctcgaagaatgaggggcaaagggattgatcgagaaagatctcttgttcttattataagatcgtgtgattggatccgcagatgtttggtaaaaaaaatcttctcttttgagaataatcaaaaatggaaagtgttcaattggaacatgaaaacgtgactgaatttgtcctagttactcttcgggacagagtggaagaagggaggagattctcgaacgaggaaaaggacccaatgacttcgaaagaattgaacgaggagccgtatgaggtgaaaatc

SEQ ID NO: 47950 - DNA, 433 bp, Gossypium hirsutum
  Clone ID: LIB3196-045-P1-M1-A8
cacaatataaggaaagctgatgcgcctgcaggctcttgcccggacgtactggccggaatcactcgtggagaaggaccacgtgaccaagcctactgccatggcccagggccgagtggctcacctcattgagtggaagggctggagcaagccgagtgactcgcctgctgccctggaatcagccttttcctcctattcggacctcagcgagggcgaacaagaggctcgctttgcagcaggagtggctgagcagtttgccatcgcggaagccaaactccgagcgtggtcttctgtggatggcgaggactccactgatgactcctatgatgaggactttgctgggggaatggacacagacatggctgtgcagctgcccctggggccccaccttcaggacctgttcaacggccatcggttctcccgggctgtgcgccag

SEQ ID NO: 47951 - DNA, 376 bp, Gossypium hirsutum
  Clone ID: LIB3196-045-P1-M1-A9
atggactttgacgctaggcaaatttgtgaaggagcaaaagttcgtttgggggttgtttcatttaccccttactctttgccctccctagtcatgtttgtcttcttttctttgtttataagaaatggactgatactcatagtcaggaataaataaatagttatggattaaaataatattcttgagagtattttcatctttgtcagggaacaaacatggttatttgtacttgagttcttgtcctaccatcatcactggaaaaacatctctgggtagtcactgtctccccaaactggactcaggatggaacttttgaagcagtgttacctaccccaaacaacttaaaccccgaagtgtatgaatatttgattattacttt

SEQ ID NO: 47952 - DNA, 357 bp, Gossypium hirsutum
  Clone ID: LIB3196-045-P1-M1-B1
ggaattttctccgtcctaaattcgttttggtcgggagctctacctttgagttcgcagccatggcagaagagtccgacttcgccgataaggttcctccctccttttatgaaatgggaaacaagatcatttatgaaactgaagccaaagggttgaacccgggattgatagtgctactagttgttctggggctgctgctgatattccttgtagggaactatgtactttactcgtatgcgcaaaagactcttccacctaggaaaaagaagccagtatccaagaagaagatgaagagagagaggctgaaggaaggagcatgagccccagtagagtaccactctgaggtctgatctcttcagc
